United States Patent Application Publication US 2019/0048337 A1 - sequence listing, part 9

SEQ ID NO: 274448 - RNA, 22 nt, Artificial Sequence
  Synthetic
uaucuucccacaaaguuaaagc

SEQ ID NO: 274449 - RNA, 23 nt, Artificial Sequence
  Synthetic
uuaucuucccacaaaguuaaagc

SEQ ID NO: 274450 - RNA, 24 nt, Artificial Sequence
  Synthetic
guuaucuucccacaaaguuaaagc

SEQ ID NO: 274451 - RNA, 18 nt, Artificial Sequence
  Synthetic
uaucuaggcaguuaaagc

SEQ ID NO: 274452 - RNA, 19 nt, Artificial Sequence
  Synthetic
auaucuaggcaguuaaagc

SEQ ID NO: 274453 - RNA, 20 nt, Artificial Sequence
  Synthetic
aauaucuaggcaguuaaagc

SEQ ID NO: 274454 - RNA, 21 nt, Artificial Sequence
  Synthetic
aaauaucuaggcaguuaaagc

SEQ ID NO: 274455 - RNA, 22 nt, Artificial Sequence
  Synthetic
uaaauaucuaggcaguuaaagc

SEQ ID NO: 274456 - RNA, 23 nt, Artificial Sequence
  Synthetic
uuaaauaucuaggcaguuaaagc

SEQ ID NO: 274457 - RNA, 24 nt, Artificial Sequence
  Synthetic
uuuaaauaucuaggcaguuaaagc

SEQ ID NO: 274458 - RNA, 18 nt, Artificial Sequence
  Synthetic
uauuucggaauuuaaagc

SEQ ID NO: 274459 - RNA, 19 nt, Artificial Sequence
  Synthetic
auauuucggaauuuaaagc

SEQ ID NO: 274460 - RNA, 20 nt, Artificial Sequence
  Synthetic
aauauuucggaauuuaaagc

SEQ ID NO: 274461 - RNA, 21 nt, Artificial Sequence
  Synthetic
aaauauuucggaauuuaaagc

SEQ ID NO: 274462 - RNA, 22 nt, Artificial Sequence
  Synthetic
uaaauauuucggaauuuaaagc

SEQ ID NO: 274463 - RNA, 23 nt, Artificial Sequence
  Synthetic
cuaaauauuucggaauuuaaagc

SEQ ID NO: 274464 - RNA, 24 nt, Artificial Sequence
  Synthetic
ucuaaauauuucggaauuuaaagc

SEQ ID NO: 274465 - RNA, 18 nt, Artificial Sequence
  Synthetic
ucuguuugacuuuaaagc

SEQ ID NO: 274466 - RNA, 19 nt, Artificial Sequence
  Synthetic
gucuguuugacuuuaaagc

SEQ ID NO: 274467 - RNA, 20 nt, Artificial Sequence
  Synthetic
ugucuguuugacuuuaaagc

SEQ ID NO: 274468 - RNA, 21 nt, Artificial Sequence
  Synthetic
augucuguuugacuuuaaagc

SEQ ID NO: 274469 - RNA, 22 nt, Artificial Sequence
  Synthetic
caugucuguuugacuuuaaagc

SEQ ID NO: 274470 - RNA, 23 nt, Artificial Sequence
  Synthetic
ccaugucuguuugacuuuaaagc

SEQ ID NO: 274471 - RNA, 24 nt, Artificial Sequence
  Synthetic
cccaugucuguuugacuuuaaagc

SEQ ID NO: 274472 - RNA, 18 nt, Artificial Sequence
  Synthetic
ucuauaugauuuuaaagc

SEQ ID NO: 274473 - RNA, 19 nt, Artificial Sequence
  Synthetic
gucuauaugauuuuaaagc

SEQ ID NO: 274474 - RNA, 20 nt, Artificial Sequence
  Synthetic
cgucuauaugauuuuaaagc

SEQ ID NO: 274475 - RNA, 21 nt, Artificial Sequence
  Synthetic
acgucuauaugauuuuaaagc

SEQ ID NO: 274476 - RNA, 22 nt, Artificial Sequence
  Synthetic
cacgucuauaugauuuuaaagc

SEQ ID NO: 274477 - RNA, 23 nt, Artificial Sequence
  Synthetic
ccacgucuauaugauuuuaaagc

SEQ ID NO: 274478 - RNA, 24 nt, Artificial Sequence
  Synthetic
cccacgucuauaugauuuuaaagc

SEQ ID NO: 274479 - RNA, 18 nt, Artificial Sequence
  Synthetic
cuaauaauuaaaacaagc

SEQ ID NO: 274480 - RNA, 19 nt, Artificial Sequence
  Synthetic
ccuaauaauuaaaacaagc

SEQ ID NO: 274481 - RNA, 20 nt, Artificial Sequence
  Synthetic
cccuaauaauuaaaacaagc

SEQ ID NO: 274482 - RNA, 21 nt, Artificial Sequence
  Synthetic
acccuaauaauuaaaacaagc

SEQ ID NO: 274483 - RNA, 22 nt, Artificial Sequence
  Synthetic
aacccuaauaauuaaaacaagc

SEQ ID NO: 274484 - RNA, 23 nt, Artificial Sequence
  Synthetic
caacccuaauaauuaaaacaagc

SEQ ID NO: 274485 - RNA, 24 nt, Artificial Sequence
  Synthetic
acaacccuaauaauuaaaacaagc

SEQ ID NO: 274486 - RNA, 18 nt, Artificial Sequence
  Synthetic
guaaguuuuuuaacaagc

SEQ ID NO: 274487 - RNA, 19 nt, Artificial Sequence
  Synthetic
aguaaguuuuuuaacaagc

SEQ ID NO: 274488 - RNA, 20 nt, Artificial Sequence
  Synthetic
aaguaaguuuuuuaacaagc

SEQ ID NO: 274489 - RNA, 21 nt, Artificial Sequence
  Synthetic
gaaguaaguuuuuuaacaagc

SEQ ID NO: 274490 - RNA, 22 nt, Artificial Sequence
  Synthetic
cgaaguaaguuuuuuaacaagc

SEQ ID NO: 274491 - RNA, 23 nt, Artificial Sequence
  Synthetic
ucgaaguaaguuuuuuaacaagc

SEQ ID NO: 274492 - RNA, 24 nt, Artificial Sequence
  Synthetic
aucgaaguaaguuuuuuaacaagc

SEQ ID NO: 274493 - RNA, 18 nt, Artificial Sequence
  Synthetic
uaaaacccccacacaagc

SEQ ID NO: 274494 - RNA, 19 nt, Artificial Sequence
  Synthetic
guaaaacccccacacaagc

SEQ ID NO: 274495 - RNA, 20 nt, Artificial Sequence
  Synthetic
cguaaaacccccacacaagc

SEQ ID NO: 274496 - RNA, 21 nt, Artificial Sequence
  Synthetic
ccguaaaacccccacacaagc

SEQ ID NO: 274497 - RNA, 22 nt, Artificial Sequence
  Synthetic
gccguaaaacccccacacaagc

SEQ ID NO: 274498 - RNA, 23 nt, Artificial Sequence
  Synthetic
agccguaaaacccccacacaagc

SEQ ID NO: 274499 - RNA, 24 nt, Artificial Sequence
  Synthetic
aagccguaaaacccccacacaagc

SEQ ID NO: 274500 - RNA, 18 nt, Artificial Sequence
  Synthetic
uucugucaagagacaagc

SEQ ID NO: 274501 - RNA, 19 nt, Artificial Sequence
  Synthetic
guucugucaagagacaagc

SEQ ID NO: 274502 - RNA, 20 nt, Artificial Sequence
  Synthetic
uguucugucaagagacaagc

SEQ ID NO: 274503 - RNA, 21 nt, Artificial Sequence
  Synthetic
cuguucugucaagagacaagc

SEQ ID NO: 274504 - RNA, 22 nt, Artificial Sequence
  Synthetic
acuguucugucaagagacaagc

SEQ ID NO: 274505 - RNA, 23 nt, Artificial Sequence
  Synthetic
aacuguucugucaagagacaagc

SEQ ID NO: 274506 - RNA, 24 nt, Artificial Sequence
  Synthetic
aaacuguucugucaagagacaagc

SEQ ID NO: 274507 - RNA, 18 nt, Artificial Sequence
  Synthetic
ugacacuucaggacaagc

SEQ ID NO: 274508 - RNA, 19 nt, Artificial Sequence
  Synthetic
uugacacuucaggacaagc

SEQ ID NO: 274509 - RNA, 20 nt, Artificial Sequence
  Synthetic
uuugacacuucaggacaagc

SEQ ID NO: 274510 - RNA, 21 nt, Artificial Sequence
  Synthetic
uuuugacacuucaggacaagc

SEQ ID NO: 274511 - RNA, 22 nt, Artificial Sequence
  Synthetic
auuuugacacuucaggacaagc

SEQ ID NO: 274512 - RNA, 23 nt, Artificial Sequence
  Synthetic
gauuuugacacuucaggacaagc

SEQ ID NO: 274513 - RNA, 24 nt, Artificial Sequence
  Synthetic
ugauuuugacacuucaggacaagc

SEQ ID NO: 274514 - RNA, 18 nt, Artificial Sequence
  Synthetic
aaaaaaaaaaugacaagc

SEQ ID NO: 274515 - RNA, 19 nt, Artificial Sequence
  Synthetic
aaaaaaaaaaaugacaagc

SEQ ID NO: 274516 - RNA, 20 nt, Artificial Sequence
  Synthetic
aaaaaaaaaaaaugacaagc

SEQ ID NO: 274517 - RNA, 21 nt, Artificial Sequence
  Synthetic
aaaaaaaaaaaaaugacaagc

SEQ ID NO: 274518 - RNA, 22 nt, Artificial Sequence
  Synthetic
aaaaaaaaaaaaaaugacaagc

SEQ ID NO: 274519 - RNA, 23 nt, Artificial Sequence
  Synthetic
aaaaaaaaaaaaaaaugacaagc

SEQ ID NO: 274520 - RNA, 24 nt, Artificial Sequence
  Synthetic
aaaaaaaaaaaaaaaaugacaagc

SEQ ID NO: 274521 - RNA, 18 nt, Artificial Sequence
  Synthetic
uacuuguaacugacaagc

SEQ ID NO: 274522 - RNA, 19 nt, Artificial Sequence
  Synthetic
guacuuguaacugacaagc

SEQ ID NO: 274523 - RNA, 20 nt, Artificial Sequence
  Synthetic
uguacuuguaacugacaagc

SEQ ID NO: 274524 - RNA, 21 nt, Artificial Sequence
  Synthetic
uuguacuuguaacugacaagc

SEQ ID NO: 274525 - RNA, 22 nt, Artificial Sequence
  Synthetic
uuuguacuuguaacugacaagc

SEQ ID NO: 274526 - RNA, 23 nt, Artificial Sequence
  Synthetic
auuuguacuuguaacugacaagc

SEQ ID NO: 274527 - RNA, 24 nt, Artificial Sequence
  Synthetic
cauuuguacuuguaacugacaagc

SEQ ID NO: 274528 - RNA, 18 nt, Artificial Sequence
  Synthetic
ugucgcagacauacaagc

SEQ ID NO: 274529 - RNA, 19 nt, Artificial Sequence
  Synthetic
uugucgcagacauacaagc

SEQ ID NO: 274530 - RNA, 20 nt, Artificial Sequence
  Synthetic
guugucgcagacauacaagc

SEQ ID NO: 274531 - RNA, 21 nt, Artificial Sequence
  Synthetic
cguugucgcagacauacaagc

SEQ ID NO: 274532 - RNA, 22 nt, Artificial Sequence
  Synthetic
acguugucgcagacauacaagc

SEQ ID NO: 274533 - RNA, 23 nt, Artificial Sequence
  Synthetic
aacguugucgcagacauacaagc

SEQ ID NO: 274534 - RNA, 24 nt, Artificial Sequence
  Synthetic
gaacguugucgcagacauacaagc

SEQ ID NO: 274535 - RNA, 18 nt, Artificial Sequence
  Synthetic
ggcagaaacccuacaagc

SEQ ID NO: 274536 - RNA, 19 nt, Artificial Sequence
  Synthetic
uggcagaaacccuacaagc

SEQ ID NO: 274537 - RNA, 20 nt, Artificial Sequence
  Synthetic
uuggcagaaacccuacaagc

SEQ ID NO: 274538 - RNA, 21 nt, Artificial Sequence
  Synthetic
uuuggcagaaacccuacaagc

SEQ ID NO: 274539 - RNA, 22 nt, Artificial Sequence
  Synthetic
auuuggcagaaacccuacaagc

SEQ ID NO: 274540 - RNA, 23 nt, Artificial Sequence
  Synthetic
cauuuggcagaaacccuacaagc

SEQ ID NO: 274541 - RNA, 24 nt, Artificial Sequence
  Synthetic
ucauuuggcagaaacccuacaagc

SEQ ID NO: 274542 - RNA, 18 nt, Artificial Sequence
  Synthetic
ugcagaaacccuacaagc

SEQ ID NO: 274543 - RNA, 19 nt, Artificial Sequence
  Synthetic
cugcagaaacccuacaagc

SEQ ID NO: 274544 - RNA, 20 nt, Artificial Sequence
  Synthetic
ucugcagaaacccuacaagc

SEQ ID NO: 274545 - RNA, 21 nt, Artificial Sequence
  Synthetic
cucugcagaaacccuacaagc

SEQ ID NO: 274546 - RNA, 22 nt, Artificial Sequence
  Synthetic
acucugcagaaacccuacaagc

SEQ ID NO: 274547 - RNA, 23 nt, Artificial Sequence
  Synthetic
cacucugcagaaacccuacaagc

SEQ ID NO: 274548 - RNA, 24 nt, Artificial Sequence
  Synthetic
ucacucugcagaaacccuacaagc

SEQ ID NO: 274549 - RNA, 18 nt, Artificial Sequence
  Synthetic
uaccagcaaguuacaagc

SEQ ID NO: 274550 - RNA, 19 nt, Artificial Sequence
  Synthetic
auaccagcaaguuacaagc

SEQ ID NO: 274551 - RNA, 20 nt, Artificial Sequence
  Synthetic
uauaccagcaaguuacaagc

SEQ ID NO: 274552 - RNA, 21 nt, Artificial Sequence
  Synthetic
uuauaccagcaaguuacaagc

SEQ ID NO: 274553 - RNA, 22 nt, Artificial Sequence
  Synthetic
cuuauaccagcaaguuacaagc

SEQ ID NO: 274554 - RNA, 23 nt, Artificial Sequence
  Synthetic
ucuuauaccagcaaguuacaagc

SEQ ID NO: 274555 - RNA, 24 nt, Artificial Sequence
  Synthetic
uucuuauaccagcaaguuacaagc

SEQ ID NO: 274556 - RNA, 18 nt, Artificial Sequence
  Synthetic
auuuuggguuuuacaagc

SEQ ID NO: 274557 - RNA, 19 nt, Artificial Sequence
  Synthetic
uauuuuggguuuuacaagc

SEQ ID NO: 274558 - RNA, 20 nt, Artificial Sequence
  Synthetic
auauuuuggguuuuacaagc

SEQ ID NO: 274559 - RNA, 21 nt, Artificial Sequence
  Synthetic
aauauuuuggguuuuacaagc

SEQ ID NO: 274560 - RNA, 22 nt, Artificial Sequence
  Synthetic
aaauauuuuggguuuuacaagc

SEQ ID NO: 274561 - RNA, 23 nt, Artificial Sequence
  Synthetic
uaaauauuuuggguuuuacaagc

SEQ ID NO: 274562 - RNA, 24 nt, Artificial Sequence
  Synthetic
guaaauauuuuggguuuuacaagc

SEQ ID NO: 274563 - RNA, 18 nt, Artificial Sequence
  Synthetic
aacauaaugaaaccaagc

SEQ ID NO: 274564 - RNA, 19 nt, Artificial Sequence
  Synthetic
gaacauaaugaaaccaagc

SEQ ID NO: 274565 - RNA, 20 nt, Artificial Sequence
  Synthetic
agaacauaaugaaaccaagc

SEQ ID NO: 274566 - RNA, 21 nt, Artificial Sequence
  Synthetic
cagaacauaaugaaaccaagc

SEQ ID NO: 274567 - RNA, 22 nt, Artificial Sequence
  Synthetic
ccagaacauaaugaaaccaagc

SEQ ID NO: 274568 - RNA, 23 nt, Artificial Sequence
  Synthetic
cccagaacauaaugaaaccaagc

SEQ ID NO: 274569 - RNA, 24 nt, Artificial Sequence
  Synthetic
ucccagaacauaaugaaaccaagc

SEQ ID NO: 274570 - RNA, 18 nt, Artificial Sequence
  Synthetic
ccucaguuaagaccaagc

SEQ ID NO: 274571 - RNA, 19 nt, Artificial Sequence
  Synthetic
uccucaguuaagaccaagc

SEQ ID NO: 274572 - RNA, 20 nt, Artificial Sequence
  Synthetic
uuccucaguuaagaccaagc

SEQ ID NO: 274573 - RNA, 21 nt, Artificial Sequence
  Synthetic
guuccucaguuaagaccaagc

SEQ ID NO: 274574 - RNA, 22 nt, Artificial Sequence
  Synthetic
gguuccucaguuaagaccaagc

SEQ ID NO: 274575 - RNA, 23 nt, Artificial Sequence
  Synthetic
agguuccucaguuaagaccaagc

SEQ ID NO: 274576 - RNA, 24 nt, Artificial Sequence
  Synthetic
uagguuccucaguuaagaccaagc

SEQ ID NO: 274577 - RNA, 18 nt, Artificial Sequence
  Synthetic
uucccugagcccccaagc

SEQ ID NO: 274578 - RNA, 19 nt, Artificial Sequence
  Synthetic
uuucccugagcccccaagc

SEQ ID NO: 274579 - RNA, 20 nt, Artificial Sequence
  Synthetic
uuuucccugagcccccaagc

SEQ ID NO: 274580 - RNA, 21 nt, Artificial Sequence
  Synthetic
uuuuucccugagcccccaagc

SEQ ID NO: 274581 - RNA, 22 nt, Artificial Sequence
  Synthetic
cuuuuucccugagcccccaagc

SEQ ID NO: 274582 - RNA, 23 nt, Artificial Sequence
  Synthetic
ccuuuuucccugagcccccaagc

SEQ ID NO: 274583 - RNA, 24 nt, Artificial Sequence
  Synthetic
cccuuuuucccugagcccccaagc

SEQ ID NO: 274584 - RNA, 18 nt, Artificial Sequence
  Synthetic
aggcaagagagcccaagc

SEQ ID NO: 274585 - RNA, 19 nt, Artificial Sequence
  Synthetic
aaggcaagagagcccaagc

SEQ ID NO: 274586 - RNA, 20 nt, Artificial Sequence
  Synthetic
gaaggcaagagagcccaagc

SEQ ID NO: 274587 - RNA, 21 nt, Artificial Sequence
  Synthetic
agaaggcaagagagcccaagc

SEQ ID NO: 274588 - RNA, 22 nt, Artificial Sequence
  Synthetic
uagaaggcaagagagcccaagc

SEQ ID NO: 274589 - RNA, 23 nt, Artificial Sequence
  Synthetic
uuagaaggcaagagagcccaagc

SEQ ID NO: 274590 - RNA, 24 nt, Artificial Sequence
  Synthetic
guuagaaggcaagagagcccaagc

SEQ ID NO: 274591 - RNA, 18 nt, Artificial Sequence
  Synthetic
gacccaccaggcccaagc

SEQ ID NO: 274592 - RNA, 19 nt, Artificial Sequence
  Synthetic
ugacccaccaggcccaagc

SEQ ID NO: 274593 - RNA, 20 nt, Artificial Sequence
  Synthetic
gugacccaccaggcccaagc

SEQ ID NO: 274594 - RNA, 21 nt, Artificial Sequence
  Synthetic
cgugacccaccaggcccaagc

SEQ ID NO: 274595 - RNA, 22 nt, Artificial Sequence
  Synthetic
gcgugacccaccaggcccaagc

SEQ ID NO: 274596 - RNA, 23 nt, Artificial Sequence
  Synthetic
ggcgugacccaccaggcccaagc

SEQ ID NO: 274597 - RNA, 24 nt, Artificial Sequence
  Synthetic
aggcgugacccaccaggcccaagc

SEQ ID NO: 274598 - RNA, 18 nt, Artificial Sequence
  Synthetic
uuuuuauaccuagcaagc

SEQ ID NO: 274599 - RNA, 19 nt, Artificial Sequence
  Synthetic
auuuuuauaccuagcaagc

SEQ ID NO: 274600 - RNA, 20 nt, Artificial Sequence
  Synthetic
uauuuuuauaccuagcaagc

SEQ ID NO: 274601 - RNA, 21 nt, Artificial Sequence
  Synthetic
auauuuuuauaccuagcaagc

SEQ ID NO: 274602 - RNA, 22 nt, Artificial Sequence
  Synthetic
uauauuuuuauaccuagcaagc

SEQ ID NO: 274603 - RNA, 23 nt, Artificial Sequence
  Synthetic
cuauauuuuuauaccuagcaagc

SEQ ID NO: 274604 - RNA, 24 nt, Artificial Sequence
  Synthetic
acuauauuuuuauaccuagcaagc

SEQ ID NO: 274605 - RNA, 18 nt, Artificial Sequence
  Synthetic
ugcaaauauucugcaagc

SEQ ID NO: 274606 - RNA, 19 nt, Artificial Sequence
  Synthetic
uugcaaauauucugcaagc

SEQ ID NO: 274607 - RNA, 20 nt, Artificial Sequence
  Synthetic
cuugcaaauauucugcaagc

SEQ ID NO: 274608 - RNA, 21 nt, Artificial Sequence
  Synthetic
ucuugcaaauauucugcaagc

SEQ ID NO: 274609 - RNA, 22 nt, Artificial Sequence
  Synthetic
aucuugcaaauauucugcaagc

SEQ ID NO: 274610 - RNA, 23 nt, Artificial Sequence
  Synthetic
uaucuugcaaauauucugcaagc

SEQ ID NO: 274611 - RNA, 24 nt, Artificial Sequence
  Synthetic
uuaucuugcaaauauucugcaagc

SEQ ID NO: 274612 - RNA, 18 nt, Artificial Sequence
  Synthetic
gcauaccagcuaucaagc

SEQ ID NO: 274613 - RNA, 19 nt, Artificial Sequence
  Synthetic
ugcauaccagcuaucaagc

SEQ ID NO: 274614 - RNA, 20 nt, Artificial Sequence
  Synthetic
uugcauaccagcuaucaagc

SEQ ID NO: 274615 - RNA, 21 nt, Artificial Sequence
  Synthetic
guugcauaccagcuaucaagc

SEQ ID NO: 274616 - RNA, 22 nt, Artificial Sequence
  Synthetic
aguugcauaccagcuaucaagc

SEQ ID NO: 274617 - RNA, 23 nt, Artificial Sequence
  Synthetic
caguugcauaccagcuaucaagc

SEQ ID NO: 274618 - RNA, 24 nt, Artificial Sequence
  Synthetic
gcaguugcauaccagcuaucaagc

SEQ ID NO: 274619 - RNA, 18 nt, Artificial Sequence
  Synthetic
aauaacucaaagucaagc

SEQ ID NO: 274620 - RNA, 19 nt, Artificial Sequence
  Synthetic
aaauaacucaaagucaagc

SEQ ID NO: 274621 - RNA, 20 nt, Artificial Sequence
  Synthetic
caaauaacucaaagucaagc

SEQ ID NO: 274622 - RNA, 21 nt, Artificial Sequence
  Synthetic
ucaaauaacucaaagucaagc

SEQ ID NO: 274623 - RNA, 22 nt, Artificial Sequence
  Synthetic
cucaaauaacucaaagucaagc

SEQ ID NO: 274624 - RNA, 23 nt, Artificial Sequence
  Synthetic
ucucaaauaacucaaagucaagc

SEQ ID NO: 274625 - RNA, 24 nt, Artificial Sequence
  Synthetic
aucucaaauaacucaaagucaagc

SEQ ID NO: 274626 - RNA, 18 nt, Artificial Sequence
  Synthetic
uuuguggaacagucaagc

SEQ ID NO: 274627 - RNA, 19 nt, Artificial Sequence
  Synthetic
guuuguggaacagucaagc

SEQ ID NO: 274628 - RNA, 20 nt, Artificial Sequence
  Synthetic
uguuuguggaacagucaagc

SEQ ID NO: 274629 - RNA, 21 nt, Artificial Sequence
  Synthetic
auguuuguggaacagucaagc

SEQ ID NO: 274630 - RNA, 22 nt, Artificial Sequence
  Synthetic
aauguuuguggaacagucaagc

SEQ ID NO: 274631 - RNA, 23 nt, Artificial Sequence
  Synthetic
aaauguuuguggaacagucaagc

SEQ ID NO: 274632 - RNA, 24 nt, Artificial Sequence
  Synthetic
aaaauguuuguggaacagucaagc

SEQ ID NO: 274633 - RNA, 18 nt, Artificial Sequence
  Synthetic
acuaaaguuuagucaagc

SEQ ID NO: 274634 - RNA, 19 nt, Artificial Sequence
  Synthetic
gacuaaaguuuagucaagc

SEQ ID NO: 274635 - RNA, 20 nt, Artificial Sequence
  Synthetic
ugacuaaaguuuagucaagc

SEQ ID NO: 274636 - RNA, 21 nt, Artificial Sequence
  Synthetic
cugacuaaaguuuagucaagc

SEQ ID NO: 274637 - RNA, 22 nt, Artificial Sequence
  Synthetic
ccugacuaaaguuuagucaagc

SEQ ID NO: 274638 - RNA, 23 nt, Artificial Sequence
  Synthetic
gccugacuaaaguuuagucaagc

SEQ ID NO: 274639 - RNA, 24 nt, Artificial Sequence
  Synthetic
agccugacuaaaguuuagucaagc

SEQ ID NO: 274640 - RNA, 18 nt, Artificial Sequence
  Synthetic
ccucacacacugucaagc

SEQ ID NO: 274641 - RNA, 19 nt, Artificial Sequence
  Synthetic
uccucacacacugucaagc

SEQ ID NO: 274642 - RNA, 20 nt, Artificial Sequence
  Synthetic
uuccucacacacugucaagc

SEQ ID NO: 274643 - RNA, 21 nt, Artificial Sequence
  Synthetic
cuuccucacacacugucaagc

SEQ ID NO: 274644 - RNA, 22 nt, Artificial Sequence
  Synthetic
ucuuccucacacacugucaagc

SEQ ID NO: 274645 - RNA, 23 nt, Artificial Sequence
  Synthetic
uucuuccucacacacugucaagc

SEQ ID NO: 274646 - RNA, 24 nt, Artificial Sequence
  Synthetic
cuucuuccucacacacugucaagc

SEQ ID NO: 274647 - RNA, 18 nt, Artificial Sequence
  Synthetic
uacaaaacccuuucaagc

SEQ ID NO: 274648 - RNA, 19 nt, Artificial Sequence
  Synthetic
guacaaaacccuuucaagc

SEQ ID NO: 274649 - RNA, 20 nt, Artificial Sequence
  Synthetic
aguacaaaacccuuucaagc

SEQ ID NO: 274650 - RNA, 21 nt, Artificial Sequence
  Synthetic
aaguacaaaacccuuucaagc

SEQ ID NO: 274651 - RNA, 22 nt, Artificial Sequence
  Synthetic
aaaguacaaaacccuuucaagc

SEQ ID NO: 274652 - RNA, 23 nt, Artificial Sequence
  Synthetic
caaaguacaaaacccuuucaagc

SEQ ID NO: 274653 - RNA, 24 nt, Artificial Sequence
  Synthetic
acaaaguacaaaacccuuucaagc

SEQ ID NO: 274654 - RNA, 18 nt, Artificial Sequence
  Synthetic
caugcucauguuucaagc

SEQ ID NO: 274655 - RNA, 19 nt, Artificial Sequence
  Synthetic
ucaugcucauguuucaagc

SEQ ID NO: 274656 - RNA, 20 nt, Artificial Sequence
  Synthetic
aucaugcucauguuucaagc

SEQ ID NO: 274657 - RNA, 21 nt, Artificial Sequence
  Synthetic
caucaugcucauguuucaagc

SEQ ID NO: 274658 - RNA, 22 nt, Artificial Sequence
  Synthetic
ccaucaugcucauguuucaagc

SEQ ID NO: 274659 - RNA, 23 nt, Artificial Sequence
  Synthetic
uccaucaugcucauguuucaagc

SEQ ID NO: 274660 - RNA, 24 nt, Artificial Sequence
  Synthetic
uuccaucaugcucauguuucaagc

SEQ ID NO: 274661 - RNA, 18 nt, Artificial Sequence
  Synthetic
ccuaaagauguuucaagc

SEQ ID NO: 274662 - RNA, 19 nt, Artificial Sequence
  Synthetic
accuaaagauguuucaagc

SEQ ID NO: 274663 - RNA, 20 nt, Artificial Sequence
  Synthetic
uaccuaaagauguuucaagc

SEQ ID NO: 274664 - RNA, 21 nt, Artificial Sequence
  Synthetic
uuaccuaaagauguuucaagc

SEQ ID NO: 274665 - RNA, 22 nt, Artificial Sequence
  Synthetic
cuuaccuaaagauguuucaagc

SEQ ID NO: 274666 - RNA, 23 nt, Artificial Sequence
  Synthetic
acuuaccuaaagauguuucaagc

SEQ ID NO: 274667 - RNA, 24 nt, Artificial Sequence
  Synthetic
uacuuaccuaaagauguuucaagc

SEQ ID NO: 274668 - RNA, 18 nt, Artificial Sequence
  Synthetic
cuuuucaaacaaagaagc

SEQ ID NO: 274669 - RNA, 19 nt, Artificial Sequence
  Synthetic
gcuuuucaaacaaagaagc

SEQ ID NO: 274670 - RNA, 20 nt, Artificial Sequence
  Synthetic
ugcuuuucaaacaaagaagc

SEQ ID NO: 274671 - RNA, 21 nt, Artificial Sequence
  Synthetic
augcuuuucaaacaaagaagc

SEQ ID NO: 274672 - RNA, 22 nt, Artificial Sequence
  Synthetic
gaugcuuuucaaacaaagaagc

SEQ ID NO: 274673 - RNA, 23 nt, Artificial Sequence
  Synthetic
ugaugcuuuucaaacaaagaagc

SEQ ID NO: 274674 - RNA, 24 nt, Artificial Sequence
  Synthetic
augaugcuuuucaaacaaagaagc

SEQ ID NO: 274675 - RNA, 18 nt, Artificial Sequence
  Synthetic
uuuuccaggcaaagaagc

SEQ ID NO: 274676 - RNA, 19 nt, Artificial Sequence
  Synthetic
auuuuccaggcaaagaagc

SEQ ID NO: 274677 - RNA, 20 nt, Artificial Sequence
  Synthetic
cauuuuccaggcaaagaagc

SEQ ID NO: 274678 - RNA, 21 nt, Artificial Sequence
  Synthetic
ccauuuuccaggcaaagaagc

SEQ ID NO: 274679 - RNA, 22 nt, Artificial Sequence
  Synthetic
cccauuuuccaggcaaagaagc

SEQ ID NO: 274680 - RNA, 23 nt, Artificial Sequence
  Synthetic
ucccauuuuccaggcaaagaagc

SEQ ID NO: 274681 - RNA, 24 nt, Artificial Sequence
  Synthetic
uucccauuuuccaggcaaagaagc

SEQ ID NO: 274682 - RNA, 18 nt, Artificial Sequence
  Synthetic
acauuauuggaaagaagc

SEQ ID NO: 274683 - RNA, 19 nt, Artificial Sequence
  Synthetic
uacauuauuggaaagaagc

SEQ ID NO: 274684 - RNA, 20 nt, Artificial Sequence
  Synthetic
auacauuauuggaaagaagc

SEQ ID NO: 274685 - RNA, 21 nt, Artificial Sequence
  Synthetic
cauacauuauuggaaagaagc

SEQ ID NO: 274686 - RNA, 22 nt, Artificial Sequence
  Synthetic
ucauacauuauuggaaagaagc

SEQ ID NO: 274687 - RNA, 23 nt, Artificial Sequence
  Synthetic
uucauacauuauuggaaagaagc

SEQ ID NO: 274688 - RNA, 24 nt, Artificial Sequence
  Synthetic
uuucauacauuauuggaaagaagc

SEQ ID NO: 274689 - RNA, 18 nt, Artificial Sequence
  Synthetic
acacuuaauuacagaagc

SEQ ID NO: 274690 - RNA, 19 nt, Artificial Sequence
  Synthetic
gacacuuaauuacagaagc

SEQ ID NO: 274691 - RNA, 20 nt, Artificial Sequence
  Synthetic
ugacacuuaauuacagaagc

SEQ ID NO: 274692 - RNA, 21 nt, Artificial Sequence
  Synthetic
gugacacuuaauuacagaagc

SEQ ID NO: 274693 - RNA, 22 nt, Artificial Sequence
  Synthetic
ugugacacuuaauuacagaagc

SEQ ID NO: 274694 - RNA, 23 nt, Artificial Sequence
  Synthetic
uugugacacuuaauuacagaagc

SEQ ID NO: 274695 - RNA, 24 nt, Artificial Sequence
  Synthetic
auugugacacuuaauuacagaagc

SEQ ID NO: 274696 - RNA, 18 nt, Artificial Sequence
  Synthetic
guugaauaaagcagaagc

SEQ ID NO: 274697 - RNA, 19 nt, Artificial Sequence
  Synthetic
aguugaauaaagcagaagc

SEQ ID NO: 274698 - RNA, 20 nt, Artificial Sequence
  Synthetic
uaguugaauaaagcagaagc

SEQ ID NO: 274699 - RNA, 21 nt, Artificial Sequence
  Synthetic
uuaguugaauaaagcagaagc

SEQ ID NO: 274700 - RNA, 22 nt, Artificial Sequence
  Synthetic
cuuaguugaauaaagcagaagc

SEQ ID NO: 274701 - RNA, 23 nt, Artificial Sequence
  Synthetic
acuuaguugaauaaagcagaagc

SEQ ID NO: 274702 - RNA, 24 nt, Artificial Sequence
  Synthetic
cacuuaguugaauaaagcagaagc

SEQ ID NO: 274703 - RNA, 18 nt, Artificial Sequence
  Synthetic
cauggccagagcagaagc

SEQ ID NO: 274704 - RNA, 19 nt, Artificial Sequence
  Synthetic
acauggccagagcagaagc

SEQ ID NO: 274705 - RNA, 20 nt, Artificial Sequence
  Synthetic
cacauggccagagcagaagc

SEQ ID NO: 274706 - RNA, 21 nt, Artificial Sequence
  Synthetic
ucacauggccagagcagaagc

SEQ ID NO: 274707 - RNA, 22 nt, Artificial Sequence
  Synthetic
gucacauggccagagcagaagc

SEQ ID NO: 274708 - RNA, 23 nt, Artificial Sequence
  Synthetic
ugucacauggccagagcagaagc

SEQ ID NO: 274709 - RNA, 24 nt, Artificial Sequence
  Synthetic
augucacauggccagagcagaagc

SEQ ID NO: 274710 - RNA, 18 nt, Artificial Sequence
  Synthetic
gguggagacaucagaagc

SEQ ID NO: 274711 - RNA, 19 nt, Artificial Sequence
  Synthetic
agguggagacaucagaagc

SEQ ID NO: 274712 - RNA, 20 nt, Artificial Sequence
  Synthetic
cagguggagacaucagaagc

SEQ ID NO: 274713 - RNA, 21 nt, Artificial Sequence
  Synthetic
gcagguggagacaucagaagc

SEQ ID NO: 274714 - RNA, 22 nt, Artificial Sequence
  Synthetic
ugcagguggagacaucagaagc

SEQ ID NO: 274715 - RNA, 23 nt, Artificial Sequence
  Synthetic
cugcagguggagacaucagaagc

SEQ ID NO: 274716 - RNA, 24 nt, Artificial Sequence
  Synthetic
ccugcagguggagacaucagaagc

SEQ ID NO: 274717 - RNA, 18 nt, Artificial Sequence
  Synthetic
aacaccagacagagaagc

SEQ ID NO: 274718 - RNA, 19 nt, Artificial Sequence
  Synthetic
uaacaccagacagagaagc

SEQ ID NO: 274719 - RNA, 20 nt, Artificial Sequence
  Synthetic
auaacaccagacagagaagc

SEQ ID NO: 274720 - RNA, 21 nt, Artificial Sequence
  Synthetic
cauaacaccagacagagaagc

SEQ ID NO: 274721 - RNA, 22 nt, Artificial Sequence
  Synthetic
acauaacaccagacagagaagc

SEQ ID NO: 274722 - RNA, 23 nt, Artificial Sequence
  Synthetic
gacauaacaccagacagagaagc

SEQ ID NO: 274723 - RNA, 24 nt, Artificial Sequence
  Synthetic
agacauaacaccagacagagaagc

SEQ ID NO: 274724 - RNA, 18 nt, Artificial Sequence
  Synthetic
uaaaagaaguagagaagc

SEQ ID NO: 274725 - RNA, 19 nt, Artificial Sequence
  Synthetic
uuaaaagaaguagagaagc

SEQ ID NO: 274726 - RNA, 20 nt, Artificial Sequence
  Synthetic
auuaaaagaaguagagaagc

SEQ ID NO: 274727 - RNA, 21 nt, Artificial Sequence
  Synthetic
aauuaaaagaaguagagaagc

SEQ ID NO: 274728 - RNA, 22 nt, Artificial Sequence
  Synthetic
caauuaaaagaaguagagaagc

SEQ ID NO: 274729 - RNA, 23 nt, Artificial Sequence
  Synthetic
acaauuaaaagaaguagagaagc

SEQ ID NO: 274730 - RNA, 24 nt, Artificial Sequence
  Synthetic
cacaauuaaaagaaguagagaagc

SEQ ID NO: 274731 - RNA, 18 nt, Artificial Sequence
  Synthetic
uuggugucccugagaagc

SEQ ID NO: 274732 - RNA, 19 nt, Artificial Sequence
  Synthetic
cuuggugucccugagaagc

SEQ ID NO: 274733 - RNA, 20 nt, Artificial Sequence
  Synthetic
ucuuggugucccugagaagc

SEQ ID NO: 274734 - RNA, 21 nt, Artificial Sequence
  Synthetic
cucuuggugucccugagaagc

SEQ ID NO: 274735 - RNA, 22 nt, Artificial Sequence
  Synthetic
acucuuggugucccugagaagc

SEQ ID NO: 274736 - RNA, 23 nt, Artificial Sequence
  Synthetic
aacucuuggugucccugagaagc

SEQ ID NO: 274737 - RNA, 24 nt, Artificial Sequence
  Synthetic
aaacucuuggugucccugagaagc

SEQ ID NO: 274738 - RNA, 18 nt, Artificial Sequence
  Synthetic
ccauggcucuugagaagc

SEQ ID NO: 274739 - RNA, 19 nt, Artificial Sequence
  Synthetic
accauggcucuugagaagc

SEQ ID NO: 274740 - RNA, 20 nt, Artificial Sequence
  Synthetic
uaccauggcucuugagaagc

SEQ ID NO: 274741 - RNA, 21 nt, Artificial Sequence
  Synthetic
auaccauggcucuugagaagc

SEQ ID NO: 274742 - RNA, 22 nt, Artificial Sequence
  Synthetic
cauaccauggcucuugagaagc

SEQ ID NO: 274743 - RNA, 23 nt, Artificial Sequence
  Synthetic
ccauaccauggcucuugagaagc

SEQ ID NO: 274744 - RNA, 24 nt, Artificial Sequence
  Synthetic
cccauaccauggcucuugagaagc

SEQ ID NO: 274745 - RNA, 18 nt, Artificial Sequence
  Synthetic
gaaugcaagaauagaagc

SEQ ID NO: 274746 - RNA, 19 nt, Artificial Sequence
  Synthetic
cgaaugcaagaauagaagc

SEQ ID NO: 274747 - RNA, 20 nt, Artificial Sequence
  Synthetic
ccgaaugcaagaauagaagc

SEQ ID NO: 274748 - RNA, 21 nt, Artificial Sequence
  Synthetic
gccgaaugcaagaauagaagc

SEQ ID NO: 274749 - RNA, 22 nt, Artificial Sequence
  Synthetic
agccgaaugcaagaauagaagc

SEQ ID NO: 274750 - RNA, 23 nt, Artificial Sequence
  Synthetic
cagccgaaugcaagaauagaagc

SEQ ID NO: 274751 - RNA, 24 nt, Artificial Sequence
  Synthetic
gcagccgaaugcaagaauagaagc

SEQ ID NO: 274752 - RNA, 18 nt, Artificial Sequence
  Synthetic
uagagcaaugauagaagc

SEQ ID NO: 274753 - RNA, 19 nt, Artificial Sequence
  Synthetic
uuagagcaaugauagaagc

SEQ ID NO: 274754 - RNA, 20 nt, Artificial Sequence
  Synthetic
uuuagagcaaugauagaagc

SEQ ID NO: 274755 - RNA, 21 nt, Artificial Sequence
  Synthetic
uuuuagagcaaugauagaagc

SEQ ID NO: 274756 - RNA, 22 nt, Artificial Sequence
  Synthetic
guuuuagagcaaugauagaagc

SEQ ID NO: 274757 - RNA, 23 nt, Artificial Sequence
  Synthetic
gguuuuagagcaaugauagaagc

SEQ ID NO: 274758 - RNA, 24 nt, Artificial Sequence
  Synthetic
ugguuuuagagcaaugauagaagc

SEQ ID NO: 274759 - RNA, 18 nt, Artificial Sequence
  Synthetic
acggccaucauuagaagc

SEQ ID NO: 274760 - RNA, 19 nt, Artificial Sequence
  Synthetic
aacggccaucauuagaagc

SEQ ID NO: 274761 - RNA, 20 nt, Artificial Sequence
  Synthetic
uaacggccaucauuagaagc

SEQ ID NO: 274762 - RNA, 21 nt, Artificial Sequence
  Synthetic
uuaacggccaucauuagaagc

SEQ ID NO: 274763 - RNA, 22 nt, Artificial Sequence
  Synthetic
auuaacggccaucauuagaagc

SEQ ID NO: 274764 - RNA, 23 nt, Artificial Sequence
  Synthetic
gauuaacggccaucauuagaagc

SEQ ID NO: 274765 - RNA, 24 nt, Artificial Sequence
  Synthetic
ugauuaacggccaucauuagaagc

SEQ ID NO: 274766 - RNA, 18 nt, Artificial Sequence
  Synthetic
cuauaaugauugcgaagc

SEQ ID NO: 274767 - RNA, 19 nt, Artificial Sequence
  Synthetic
ucuauaaugauugcgaagc

SEQ ID NO: 274768 - RNA, 20 nt, Artificial Sequence
  Synthetic
aucuauaaugauugcgaagc

SEQ ID NO: 274769 - RNA, 21 nt, Artificial Sequence
  Synthetic
aaucuauaaugauugcgaagc

SEQ ID NO: 274770 - RNA, 22 nt, Artificial Sequence
  Synthetic
gaaucuauaaugauugcgaagc

SEQ ID NO: 274771 - RNA, 23 nt, Artificial Sequence
  Synthetic
ggaaucuauaaugauugcgaagc

SEQ ID NO: 274772 - RNA, 24 nt, Artificial Sequence
  Synthetic
uggaaucuauaaugauugcgaagc

SEQ ID NO: 274773 - RNA, 18 nt, Artificial Sequence
  Synthetic
aaaaggcaaaaaggaagc

SEQ ID NO: 274774 - RNA, 19 nt, Artificial Sequence
  Synthetic
uaaaaggcaaaaaggaagc

SEQ ID NO: 274775 - RNA, 20 nt, Artificial Sequence
  Synthetic
cuaaaaggcaaaaaggaagc

SEQ ID NO: 274776 - RNA, 21 nt, Artificial Sequence
  Synthetic
acuaaaaggcaaaaaggaagc

SEQ ID NO: 274777 - RNA, 22 nt, Artificial Sequence
  Synthetic
uacuaaaaggcaaaaaggaagc

SEQ ID NO: 274778 - RNA, 23 nt, Artificial Sequence
  Synthetic
cuacuaaaaggcaaaaaggaagc

SEQ ID NO: 274779 - RNA, 24 nt, Artificial Sequence
  Synthetic
acuacuaaaaggcaaaaaggaagc

SEQ ID NO: 274780 - RNA, 18 nt, Artificial Sequence
  Synthetic
ugaaaagcagaaggaagc

SEQ ID NO: 274781 - RNA, 19 nt, Artificial Sequence
  Synthetic
uugaaaagcagaaggaagc

SEQ ID NO: 274782 - RNA, 20 nt, Artificial Sequence
  Synthetic
uuugaaaagcagaaggaagc

SEQ ID NO: 274783 - RNA, 21 nt, Artificial Sequence
  Synthetic
cuuugaaaagcagaaggaagc

SEQ ID NO: 274784 - RNA, 22 nt, Artificial Sequence
  Synthetic
acuuugaaaagcagaaggaagc

SEQ ID NO: 274785 - RNA, 23 nt, Artificial Sequence
  Synthetic
gacuuugaaaagcagaaggaagc

SEQ ID NO: 274786 - RNA, 24 nt, Artificial Sequence
  Synthetic
agacuuugaaaagcagaaggaagc

SEQ ID NO: 274787 - RNA, 18 nt, Artificial Sequence
  Synthetic
cuucuccagccaggaagc

SEQ ID NO: 274788 - RNA, 19 nt, Artificial Sequence
  Synthetic
ccuucuccagccaggaagc

SEQ ID NO: 274789 - RNA, 20 nt, Artificial Sequence
  Synthetic
cccuucuccagccaggaagc

SEQ ID NO: 274790 - RNA, 21 nt, Artificial Sequence
  Synthetic
gcccuucuccagccaggaagc

SEQ ID NO: 274791 - RNA, 22 nt, Artificial Sequence
  Synthetic
ugcccuucuccagccaggaagc

SEQ ID NO: 274792 - RNA, 23 nt, Artificial Sequence
  Synthetic
cugcccuucuccagccaggaagc

SEQ ID NO: 274793 - RNA, 24 nt, Artificial Sequence
  Synthetic
acugcccuucuccagccaggaagc

SEQ ID NO: 274794 - RNA, 18 nt, Artificial Sequence
  Synthetic
auaauauaagcaggaagc

SEQ ID NO: 274795 - RNA, 19 nt, Artificial Sequence
  Synthetic
uauaauauaagcaggaagc

SEQ ID NO: 274796 - RNA, 20 nt, Artificial Sequence
  Synthetic
uuauaauauaagcaggaagc

SEQ ID NO: 274797 - RNA, 21 nt, Artificial Sequence
  Synthetic
uuuauaauauaagcaggaagc

SEQ ID NO: 274798 - RNA, 22 nt, Artificial Sequence
  Synthetic
uuuuauaauauaagcaggaagc

SEQ ID NO: 274799 - RNA, 23 nt, Artificial Sequence
  Synthetic
uuuuuauaauauaagcaggaagc

SEQ ID NO: 274800 - RNA, 24 nt, Artificial Sequence
  Synthetic
auuuuuauaauauaagcaggaagc

SEQ ID NO: 274801 - RNA, 18 nt, Artificial Sequence
  Synthetic
uuugguaagucaggaagc

SEQ ID NO: 274802 - RNA, 19 nt, Artificial Sequence
  Synthetic
uuuugguaagucaggaagc

SEQ ID NO: 274803 - RNA, 20 nt, Artificial Sequence
  Synthetic
uuuuugguaagucaggaagc

SEQ ID NO: 274804 - RNA, 21 nt, Artificial Sequence
  Synthetic
auuuuugguaagucaggaagc

SEQ ID NO: 274805 - RNA, 22 nt, Artificial Sequence
  Synthetic
gauuuuugguaagucaggaagc

SEQ ID NO: 274806 - RNA, 23 nt, Artificial Sequence
  Synthetic
agauuuuugguaagucaggaagc

SEQ ID NO: 274807 - RNA, 24 nt, Artificial Sequence
  Synthetic
cagauuuuugguaagucaggaagc

SEQ ID NO: 274808 - RNA, 18 nt, Artificial Sequence
  Synthetic
uuuuaauauucaggaagc

SEQ ID NO: 274809 - RNA, 19 nt, Artificial Sequence
  Synthetic
auuuuaauauucaggaagc

SEQ ID NO: 274810 - RNA, 20 nt, Artificial Sequence
  Synthetic
gauuuuaauauucaggaagc

SEQ ID NO: 274811 - RNA, 21 nt, Artificial Sequence
  Synthetic
ggauuuuaauauucaggaagc

SEQ ID NO: 274812 - RNA, 22 nt, Artificial Sequence
  Synthetic
uggauuuuaauauucaggaagc

SEQ ID NO: 274813 - RNA, 23 nt, Artificial Sequence
  Synthetic
guggauuuuaauauucaggaagc

SEQ ID NO: 274814 - RNA, 24 nt, Artificial Sequence
  Synthetic
gguggauuuuaauauucaggaagc

SEQ ID NO: 274815 - RNA, 18 nt, Artificial Sequence
  Synthetic
uaagggugacccggaagc

SEQ ID NO: 274816 - RNA, 19 nt, Artificial Sequence
  Synthetic
guaagggugacccggaagc

SEQ ID NO: 274817 - RNA, 20 nt, Artificial Sequence
  Synthetic
aguaagggugacccggaagc

SEQ ID NO: 274818 - RNA, 21 nt, Artificial Sequence
  Synthetic
gaguaagggugacccggaagc

SEQ ID NO: 274819 - RNA, 22 nt, Artificial Sequence
  Synthetic
ugaguaagggugacccggaagc

SEQ ID NO: 274820 - RNA, 23 nt, Artificial Sequence
  Synthetic
augaguaagggugacccggaagc

SEQ ID NO: 274821 - RNA, 24 nt, Artificial Sequence
  Synthetic
gaugaguaagggugacccggaagc

SEQ ID NO: 274822 - RNA, 18 nt, Artificial Sequence
  Synthetic
gggggaaagagcggaagc

SEQ ID NO: 274823 - RNA, 19 nt, Artificial Sequence
  Synthetic
ggggggaaagagcggaagc

SEQ ID NO: 274824 - RNA, 20 nt, Artificial Sequence
  Synthetic
aggggggaaagagcggaagc

SEQ ID NO: 274825 - RNA, 21 nt, Artificial Sequence
  Synthetic
uaggggggaaagagcggaagc

SEQ ID NO: 274826 - RNA, 22 nt, Artificial Sequence
  Synthetic
guaggggggaaagagcggaagc

SEQ ID NO: 274827 - RNA, 23 nt, Artificial Sequence
  Synthetic
aguaggggggaaagagcggaagc

SEQ ID NO: 274828 - RNA, 24 nt, Artificial Sequence
  Synthetic
caguaggggggaaagagcggaagc

SEQ ID NO: 274829 - RNA, 18 nt, Artificial Sequence
  Synthetic
ggagagagggagggaagc

SEQ ID NO: 274830 - RNA, 19 nt, Artificial Sequence
  Synthetic
gggagagagggagggaagc

SEQ ID NO: 274831 - RNA, 20 nt, Artificial Sequence
  Synthetic
agggagagagggagggaagc

SEQ ID NO: 274832 - RNA, 21 nt, Artificial Sequence
  Synthetic
aagggagagagggagggaagc

SEQ ID NO: 274833 - RNA, 22 nt, Artificial Sequence
  Synthetic
gaagggagagagggagggaagc

SEQ ID NO: 274834 - RNA, 23 nt, Artificial Sequence
  Synthetic
ggaagggagagagggagggaagc

SEQ ID NO: 274835 - RNA, 24 nt, Artificial Sequence
  Synthetic
aggaagggagagagggagggaagc

SEQ ID NO: 274836 - RNA, 18 nt, Artificial Sequence
  Synthetic
cccagcacuuugggaagc

SEQ ID NO: 274837 - RNA, 19 nt, Artificial Sequence
  Synthetic
ucccagcacuuugggaagc

SEQ ID NO: 274838 - RNA, 20 nt, Artificial Sequence
  Synthetic
aucccagcacuuugggaagc

SEQ ID NO: 274839 - RNA, 21 nt, Artificial Sequence
  Synthetic
aaucccagcacuuugggaagc

SEQ ID NO: 274840 - RNA, 22 nt, Artificial Sequence
  Synthetic
uaaucccagcacuuugggaagc

SEQ ID NO: 274841 - RNA, 23 nt, Artificial Sequence
  Synthetic
guaaucccagcacuuugggaagc

SEQ ID NO: 274842 - RNA, 24 nt, Artificial Sequence
  Synthetic
uguaaucccagcacuuugggaagc

SEQ ID NO: 274843 - RNA, 18 nt, Artificial Sequence
  Synthetic
auaagugaaaauggaagc

SEQ ID NO: 274844 - RNA, 19 nt, Artificial Sequence
  Synthetic
uauaagugaaaauggaagc

SEQ ID NO: 274845 - RNA, 20 nt, Artificial Sequence
  Synthetic
auauaagugaaaauggaagc

SEQ ID NO: 274846 - RNA, 21 nt, Artificial Sequence
  Synthetic
cauauaagugaaaauggaagc

SEQ ID NO: 274847 - RNA, 22 nt, Artificial Sequence
  Synthetic
ucauauaagugaaaauggaagc

SEQ ID NO: 274848 - RNA, 23 nt, Artificial Sequence
  Synthetic
uucauauaagugaaaauggaagc

SEQ ID NO: 274849 - RNA, 24 nt, Artificial Sequence
  Synthetic
guucauauaagugaaaauggaagc

SEQ ID NO: 274850 - RNA, 18 nt, Artificial Sequence
  Synthetic
uauauuuacuauggaagc

SEQ ID NO: 274851 - RNA, 19 nt, Artificial Sequence
  Synthetic
cuauauuuacuauggaagc

SEQ ID NO: 274852 - RNA, 20 nt, Artificial Sequence
  Synthetic
acuauauuuacuauggaagc

SEQ ID NO: 274853 - RNA, 21 nt, Artificial Sequence
  Synthetic
aacuauauuuacuauggaagc

SEQ ID NO: 274854 - RNA, 22 nt, Artificial Sequence
  Synthetic
uaacuauauuuacuauggaagc

SEQ ID NO: 274855 - RNA, 23 nt, Artificial Sequence
  Synthetic
cuaacuauauuuacuauggaagc

SEQ ID NO: 274856 - RNA, 24 nt, Artificial Sequence
  Synthetic
ccuaacuauauuuacuauggaagc

SEQ ID NO: 274857 - RNA, 18 nt, Artificial Sequence
  Synthetic
gcagagcaggcuggaagc

SEQ ID NO: 274858 - RNA, 19 nt, Artificial Sequence
  Synthetic
ugcagagcaggcuggaagc

SEQ ID NO: 274859 - RNA, 20 nt, Artificial Sequence
  Synthetic
uugcagagcaggcuggaagc

SEQ ID NO: 274860 - RNA, 21 nt, Artificial Sequence
  Synthetic
cuugcagagcaggcuggaagc

SEQ ID NO: 274861 - RNA, 22 nt, Artificial Sequence
  Synthetic
acuugcagagcaggcuggaagc

SEQ ID NO: 274862 - RNA, 23 nt, Artificial Sequence
  Synthetic
cacuugcagagcaggcuggaagc

SEQ ID NO: 274863 - RNA, 24 nt, Artificial Sequence
  Synthetic
ccacuugcagagcaggcuggaagc

SEQ ID NO: 274864 - RNA, 18 nt, Artificial Sequence
  Synthetic
aucuuuuaaaguggaagc

SEQ ID NO: 274865 - RNA, 19 nt, Artificial Sequence
  Synthetic
uaucuuuuaaaguggaagc

SEQ ID NO: 274866 - RNA, 20 nt, Artificial Sequence
  Synthetic
uuaucuuuuaaaguggaagc

SEQ ID NO: 274867 - RNA, 21 nt, Artificial Sequence
  Synthetic
uuuaucuuuuaaaguggaagc

SEQ ID NO: 274868 - RNA, 22 nt, Artificial Sequence
  Synthetic
uuuuaucuuuuaaaguggaagc

SEQ ID NO: 274869 - RNA, 23 nt, Artificial Sequence
  Synthetic
auuuuaucuuuuaaaguggaagc

SEQ ID NO: 274870 - RNA, 24 nt, Artificial Sequence
  Synthetic
aauuuuaucuuuuaaaguggaagc

SEQ ID NO: 274871 - RNA, 18 nt, Artificial Sequence
  Synthetic
caaaacaacaguggaagc

SEQ ID NO: 274872 - RNA, 19 nt, Artificial Sequence
  Synthetic
acaaaacaacaguggaagc

SEQ ID NO: 274873 - RNA, 20 nt, Artificial Sequence
  Synthetic
cacaaaacaacaguggaagc

SEQ ID NO: 274874 - RNA, 21 nt, Artificial Sequence
  Synthetic
ccacaaaacaacaguggaagc

SEQ ID NO: 274875 - RNA, 22 nt, Artificial Sequence
  Synthetic
accacaaaacaacaguggaagc

SEQ ID NO: 274876 - RNA, 23 nt, Artificial Sequence
  Synthetic
aaccacaaaacaacaguggaagc

SEQ ID NO: 274877 - RNA, 24 nt, Artificial Sequence
  Synthetic
gaaccacaaaacaacaguggaagc

SEQ ID NO: 274878 - RNA, 18 nt, Artificial Sequence
  Synthetic
ucaaaaaaucaaugaagc

SEQ ID NO: 274879 - RNA, 19 nt, Artificial Sequence
  Synthetic
uucaaaaaaucaaugaagc

SEQ ID NO: 274880 - RNA, 20 nt, Artificial Sequence
  Synthetic
cuucaaaaaaucaaugaagc

SEQ ID NO: 274881 - RNA, 21 nt, Artificial Sequence
  Synthetic
ccuucaaaaaaucaaugaagc

SEQ ID NO: 274882 - RNA, 22 nt, Artificial Sequence
  Synthetic
uccuucaaaaaaucaaugaagc

SEQ ID NO: 274883 - RNA, 23 nt, Artificial Sequence
  Synthetic
auccuucaaaaaaucaaugaagc

SEQ ID NO: 274884 - RNA, 24 nt, Artificial Sequence
  Synthetic
aauccuucaaaaaaucaaugaagc

SEQ ID NO: 274885 - RNA, 18 nt, Artificial Sequence
  Synthetic
aauugggagagaugaagc

SEQ ID NO: 274886 - RNA, 19 nt, Artificial Sequence
  Synthetic
gaauugggagagaugaagc

SEQ ID NO: 274887 - RNA, 20 nt, Artificial Sequence
  Synthetic
ugaauugggagagaugaagc

SEQ ID NO: 274888 - RNA, 21 nt, Artificial Sequence
  Synthetic
uugaauugggagagaugaagc

SEQ ID NO: 274889 - RNA, 22 nt, Artificial Sequence
  Synthetic
uuugaauugggagagaugaagc

SEQ ID NO: 274890 - RNA, 23 nt, Artificial Sequence
  Synthetic
guuugaauugggagagaugaagc

SEQ ID NO: 274891 - RNA, 24 nt, Artificial Sequence
  Synthetic
aguuugaauugggagagaugaagc

SEQ ID NO: 274892 - RNA, 18 nt, Artificial Sequence
  Synthetic
uaaggacauggaugaagc

SEQ ID NO: 274893 - RNA, 19 nt, Artificial Sequence
  Synthetic
guaaggacauggaugaagc

SEQ ID NO: 274894 - RNA, 20 nt, Artificial Sequence
  Synthetic
uguaaggacauggaugaagc

SEQ ID NO: 274895 - RNA, 21 nt, Artificial Sequence
  Synthetic
uuguaaggacauggaugaagc

SEQ ID NO: 274896 - RNA, 22 nt, Artificial Sequence
  Synthetic
uuuguaaggacauggaugaagc

SEQ ID NO: 274897 - RNA, 23 nt, Artificial Sequence
  Synthetic
cuuuguaaggacauggaugaagc

SEQ ID NO: 274898 - RNA, 24 nt, Artificial Sequence
  Synthetic
ccuuuguaaggacauggaugaagc

SEQ ID NO: 274899 - RNA, 20 nt, Artificial Sequence
  Synthetic
ggcagggacauggaugaagc

SEQ ID NO: 274900 - RNA, 21 nt, Artificial Sequence
  Synthetic
uggcagggacauggaugaagc

SEQ ID NO: 274901 - RNA, 22 nt, Artificial Sequence
  Synthetic
uuggcagggacauggaugaagc

SEQ ID NO: 274902 - RNA, 23 nt, Artificial Sequence
  Synthetic
cuuggcagggacauggaugaagc

SEQ ID NO: 274903 - RNA, 24 nt, Artificial Sequence
  Synthetic
ccuuggcagggacauggaugaagc

SEQ ID NO: 274904 - RNA, 18 nt, Artificial Sequence
  Synthetic
uagggacauggaugaagc

SEQ ID NO: 274905 - RNA, 19 nt, Artificial Sequence
  Synthetic
guagggacauggaugaagc

SEQ ID NO: 274906 - RNA, 20 nt, Artificial Sequence
  Synthetic
uguagggacauggaugaagc

SEQ ID NO: 274907 - RNA, 21 nt, Artificial Sequence
  Synthetic
uuguagggacauggaugaagc

SEQ ID NO: 274908 - RNA, 22 nt, Artificial Sequence
  Synthetic
uuuguagggacauggaugaagc

SEQ ID NO: 274909 - RNA, 23 nt, Artificial Sequence
  Synthetic
cuuuguagggacauggaugaagc

SEQ ID NO: 274910 - RNA, 24 nt, Artificial Sequence
  Synthetic
ccuuuguagggacauggaugaagc

SEQ ID NO: 274911 - RNA, 18 nt, Artificial Sequence
  Synthetic
uagggacguggaugaagc

SEQ ID NO: 274912 - RNA, 19 nt, Artificial Sequence
  Synthetic
guagggacguggaugaagc

SEQ ID NO: 274913 - RNA, 20 nt, Artificial Sequence
  Synthetic
uguagggacguggaugaagc

SEQ ID NO: 274914 - RNA, 21 nt, Artificial Sequence
  Synthetic
uuguagggacguggaugaagc

SEQ ID NO: 274915 - RNA, 22 nt, Artificial Sequence
  Synthetic
uuuguagggacguggaugaagc

SEQ ID NO: 274916 - RNA, 23 nt, Artificial Sequence
  Synthetic
cuuuguagggacguggaugaagc

SEQ ID NO: 274917 - RNA, 24 nt, Artificial Sequence
  Synthetic
ccuuuguagggacguggaugaagc

SEQ ID NO: 274918 - RNA, 18 nt, Artificial Sequence
  Synthetic
aguauuaccguaugaagc

SEQ ID NO: 274919 - RNA, 19 nt, Artificial Sequence
  Synthetic
gaguauuaccguaugaagc

SEQ ID NO: 274920 - RNA, 20 nt, Artificial Sequence
  Synthetic
agaguauuaccguaugaagc

SEQ ID NO: 274921 - RNA, 21 nt, Artificial Sequence
  Synthetic
uagaguauuaccguaugaagc

SEQ ID NO: 274922 - RNA, 22 nt, Artificial Sequence
  Synthetic
uuagaguauuaccguaugaagc

SEQ ID NO: 274923 - RNA, 23 nt, Artificial Sequence
  Synthetic
uuuagaguauuaccguaugaagc

SEQ ID NO: 274924 - RNA, 24 nt, Artificial Sequence
  Synthetic
auuuagaguauuaccguaugaagc

SEQ ID NO: 274925 - RNA, 18 nt, Artificial Sequence
  Synthetic
gagcaaaaucacugaagc

SEQ ID NO: 274926 - RNA, 19 nt, Artificial Sequence
  Synthetic
ggagcaaaaucacugaagc

SEQ ID NO: 274927 - RNA, 20 nt, Artificial Sequence
  Synthetic
aggagcaaaaucacugaagc

SEQ ID NO: 274928 - RNA, 21 nt, Artificial Sequence
  Synthetic
caggagcaaaaucacugaagc

SEQ ID NO: 274929 - RNA, 22 nt, Artificial Sequence
  Synthetic
acaggagcaaaaucacugaagc

SEQ ID NO: 274930 - RNA, 23 nt, Artificial Sequence
  Synthetic
gacaggagcaaaaucacugaagc

SEQ ID NO: 274931 - RNA, 24 nt, Artificial Sequence
  Synthetic
ugacaggagcaaaaucacugaagc

SEQ ID NO: 274932 - RNA, 18 nt, Artificial Sequence
  Synthetic
aacuugggaggcugaagc

SEQ ID NO: 274933 - RNA, 19 nt, Artificial Sequence
  Synthetic
uaacuugggaggcugaagc

SEQ ID NO: 274934 - RNA, 20 nt, Artificial Sequence
  Synthetic
cuaacuugggaggcugaagc

SEQ ID NO: 274935 - RNA, 21 nt, Artificial Sequence
  Synthetic
gcuaacuugggaggcugaagc

SEQ ID NO: 274936 - RNA, 22 nt, Artificial Sequence
  Synthetic
ggcuaacuugggaggcugaagc

SEQ ID NO: 274937 - RNA, 23 nt, Artificial Sequence
  Synthetic
uggcuaacuugggaggcugaagc

SEQ ID NO: 274938 - RNA, 24 nt, Artificial Sequence
  Synthetic
cuggcuaacuugggaggcugaagc

SEQ ID NO: 274939 - RNA, 18 nt, Artificial Sequence
  Synthetic
uacuugggaggcugaagc

SEQ ID NO: 274940 - RNA, 19 nt, Artificial Sequence
  Synthetic
cuacuugggaggcugaagc

SEQ ID NO: 274941 - RNA, 20 nt, Artificial Sequence
  Synthetic
gcuacuugggaggcugaagc

SEQ ID NO: 274942 - RNA, 21 nt, Artificial Sequence
  Synthetic
agcuacuugggaggcugaagc

SEQ ID NO: 274943 - RNA, 22 nt, Artificial Sequence
  Synthetic
cagcuacuugggaggcugaagc

SEQ ID NO: 274944 - RNA, 23 nt, Artificial Sequence
  Synthetic
ccagcuacuugggaggcugaagc

SEQ ID NO: 274945 - RNA, 24 nt, Artificial Sequence
  Synthetic
cccagcuacuugggaggcugaagc

SEQ ID NO: 274946 - RNA, 18 nt, Artificial Sequence
  Synthetic
uugaaaacuaucugaagc

SEQ ID NO: 274947 - RNA, 19 nt, Artificial Sequence
  Synthetic
auugaaaacuaucugaagc

SEQ ID NO: 274948 - RNA, 20 nt, Artificial Sequence
  Synthetic
uauugaaaacuaucugaagc

SEQ ID NO: 274949 - RNA, 21 nt, Artificial Sequence
  Synthetic
auauugaaaacuaucugaagc

SEQ ID NO: 274950 - RNA, 22 nt, Artificial Sequence
  Synthetic
aauauugaaaacuaucugaagc

SEQ ID NO: 274951 - RNA, 23 nt, Artificial Sequence
  Synthetic
uaauauugaaaacuaucugaagc

SEQ ID NO: 274952 - RNA, 24 nt, Artificial Sequence
  Synthetic
auaauauugaaaacuaucugaagc

SEQ ID NO: 274953 - RNA, 18 nt, Artificial Sequence
  Synthetic
aucuucuaaaauugaagc

SEQ ID NO: 274954 - RNA, 19 nt, Artificial Sequence
  Synthetic
uaucuucuaaaauugaagc

SEQ ID NO: 274955 - RNA, 20 nt, Artificial Sequence
  Synthetic
auaucuucuaaaauugaagc

SEQ ID NO: 274956 - RNA, 21 nt, Artificial Sequence
  Synthetic
uauaucuucuaaaauugaagc

SEQ ID NO: 274957 - RNA, 22 nt, Artificial Sequence
  Synthetic
uuauaucuucuaaaauugaagc

SEQ ID NO: 274958 - RNA, 23 nt, Artificial Sequence
  Synthetic
uuuauaucuucuaaaauugaagc

SEQ ID NO: 274959 - RNA, 24 nt, Artificial Sequence
  Synthetic
uuuuauaucuucuaaaauugaagc

SEQ ID NO: 274960 - RNA, 18 nt, Artificial Sequence
  Synthetic
gacacgcugaauugaagc

SEQ ID NO: 274961 - RNA, 19 nt, Artificial Sequence
  Synthetic
agacacgcugaauugaagc

SEQ ID NO: 274962 - RNA, 20 nt, Artificial Sequence
  Synthetic
gagacacgcugaauugaagc

SEQ ID NO: 274963 - RNA, 21 nt, Artificial Sequence
  Synthetic
agagacacgcugaauugaagc

SEQ ID NO: 274964 - RNA, 22 nt, Artificial Sequence
  Synthetic
uagagacacgcugaauugaagc

SEQ ID NO: 274965 - RNA, 23 nt, Artificial Sequence
  Synthetic
uuagagacacgcugaauugaagc

SEQ ID NO: 274966 - RNA, 24 nt, Artificial Sequence
  Synthetic
uuuagagacacgcugaauugaagc

SEQ ID NO: 274967 - RNA, 18 nt, Artificial Sequence
  Synthetic
ggauuuugaacuugaagc

SEQ ID NO: 274968 - RNA, 19 nt, Artificial Sequence
  Synthetic
aggauuuugaacuugaagc

SEQ ID NO: 274969 - RNA, 20 nt, Artificial Sequence
  Synthetic
aaggauuuugaacuugaagc

SEQ ID NO: 274970 - RNA, 21 nt, Artificial Sequence
  Synthetic
aaaggauuuugaacuugaagc

SEQ ID NO: 274971 - RNA, 22 nt, Artificial Sequence
  Synthetic
gaaaggauuuugaacuugaagc

SEQ ID NO: 274972 - RNA, 23 nt, Artificial Sequence
  Synthetic
ggaaaggauuuugaacuugaagc

SEQ ID NO: 274973 - RNA, 24 nt, Artificial Sequence
  Synthetic
uggaaaggauuuugaacuugaagc

SEQ ID NO: 274974 - RNA, 18 nt, Artificial Sequence
  Synthetic
aggagaaucacuugaagc

SEQ ID NO: 274975 - RNA, 19 nt, Artificial Sequence
  Synthetic
caggagaaucacuugaagc

SEQ ID NO: 274976 - RNA, 20 nt, Artificial Sequence
  Synthetic
gcaggagaaucacuugaagc

SEQ ID NO: 274977 - RNA, 21 nt, Artificial Sequence
  Synthetic
agcaggagaaucacuugaagc

SEQ ID NO: 274978 - RNA, 22 nt, Artificial Sequence
  Synthetic
aagcaggagaaucacuugaagc

SEQ ID NO: 274979 - RNA, 23 nt, Artificial Sequence
  Synthetic
gaagcaggagaaucacuugaagc

SEQ ID NO: 274980 - RNA, 24 nt, Artificial Sequence
  Synthetic
ugaagcaggagaaucacuugaagc

SEQ ID NO: 274981 - RNA, 18 nt, Artificial Sequence
  Synthetic
ggauguggaaguugaagc

SEQ ID NO: 274982 - RNA, 19 nt, Artificial Sequence
  Synthetic
uggauguggaaguugaagc

SEQ ID NO: 274983 - RNA, 20 nt, Artificial Sequence
  Synthetic
auggauguggaaguugaagc

SEQ ID NO: 274984 - RNA, 21 nt, Artificial Sequence
  Synthetic
uauggauguggaaguugaagc

SEQ ID NO: 274985 - RNA, 22 nt, Artificial Sequence
  Synthetic
uuauggauguggaaguugaagc

SEQ ID NO: 274986 - RNA, 23 nt, Artificial Sequence
  Synthetic
cuuauggauguggaaguugaagc

SEQ ID NO: 274987 - RNA, 24 nt, Artificial Sequence
  Synthetic
acuuauggauguggaaguugaagc

SEQ ID NO: 274988 - RNA, 18 nt, Artificial Sequence
  Synthetic
uacuugggagguugaagc

SEQ ID NO: 274989 - RNA, 19 nt, Artificial Sequence
  Synthetic
cuacuugggagguugaagc

SEQ ID NO: 274990 - RNA, 20 nt, Artificial Sequence
  Synthetic
gcuacuugggagguugaagc

SEQ ID NO: 274991 - RNA, 21 nt, Artificial Sequence
  Synthetic
agcuacuugggagguugaagc

SEQ ID NO: 274992 - RNA, 22 nt, Artificial Sequence
  Synthetic
cagcuacuugggagguugaagc

SEQ ID NO: 274993 - RNA, 23 nt, Artificial Sequence
  Synthetic
ccagcuacuugggagguugaagc

SEQ ID NO: 274994 - RNA, 24 nt, Artificial Sequence
  Synthetic
cccagcuacuugggagguugaagc

SEQ ID NO: 274995 - RNA, 18 nt, Artificial Sequence
  Synthetic
uccaaacguauuugaagc

SEQ ID NO: 274996 - RNA, 19 nt, Artificial Sequence
  Synthetic
cuccaaacguauuugaagc

SEQ ID NO: 274997 - RNA, 20 nt, Artificial Sequence
  Synthetic
acuccaaacguauuugaagc

SEQ ID NO: 274998 - RNA, 21 nt, Artificial Sequence
  Synthetic
gacuccaaacguauuugaagc

SEQ ID NO: 274999 - RNA, 22 nt, Artificial Sequence
  Synthetic
ugacuccaaacguauuugaagc

SEQ ID NO: 275000 - RNA, 23 nt, Artificial Sequence
  Synthetic
augacuccaaacguauuugaagc

SEQ ID NO: 275001 - RNA, 24 nt, Artificial Sequence
  Synthetic
uaugacuccaaacguauuugaagc

SEQ ID NO: 275002 - RNA, 18 nt, Artificial Sequence
  Synthetic
uuguuaagacaaauaagc

SEQ ID NO: 275003 - RNA, 19 nt, Artificial Sequence
  Synthetic
cuuguuaagacaaauaagc

SEQ ID NO: 275004 - RNA, 20 nt, Artificial Sequence
  Synthetic
ucuuguuaagacaaauaagc

SEQ ID NO: 275005 - RNA, 21 nt, Artificial Sequence
  Synthetic
aucuuguuaagacaaauaagc

SEQ ID NO: 275006 - RNA, 22 nt, Artificial Sequence
  Synthetic
gaucuuguuaagacaaauaagc

SEQ ID NO: 275007 - RNA, 23 nt, Artificial Sequence
  Synthetic
cgaucuuguuaagacaaauaagc

SEQ ID NO: 275008 - RNA, 24 nt, Artificial Sequence
  Synthetic
ucgaucuuguuaagacaaauaagc

SEQ ID NO: 275009 - RNA, 18 nt, Artificial Sequence
  Synthetic
uaauuucaugcaauaagc

SEQ ID NO: 275010 - RNA, 19 nt, Artificial Sequence
  Synthetic
uuaauuucaugcaauaagc

SEQ ID NO: 275011 - RNA, 20 nt, Artificial Sequence
  Synthetic
uuuaauuucaugcaauaagc

SEQ ID NO: 275012 - RNA, 21 nt, Artificial Sequence
  Synthetic
guuuaauuucaugcaauaagc

SEQ ID NO: 275013 - RNA, 22 nt, Artificial Sequence
  Synthetic
gguuuaauuucaugcaauaagc

SEQ ID NO: 275014 - RNA, 23 nt, Artificial Sequence
  Synthetic
ugguuuaauuucaugcaauaagc

SEQ ID NO: 275015 - RNA, 24 nt, Artificial Sequence
  Synthetic
gugguuuaauuucaugcaauaagc

SEQ ID NO: 275016 - RNA, 18 nt, Artificial Sequence
  Synthetic
auggaguggguaauaagc

SEQ ID NO: 275017 - RNA, 19 nt, Artificial Sequence
  Synthetic
aauggaguggguaauaagc

SEQ ID NO: 275018 - RNA, 20 nt, Artificial Sequence
  Synthetic
gaauggaguggguaauaagc

SEQ ID NO: 275019 - RNA, 21 nt, Artificial Sequence
  Synthetic
ggaauggaguggguaauaagc

SEQ ID NO: 275020 - RNA, 22 nt, Artificial Sequence
  Synthetic
aggaauggaguggguaauaagc

SEQ ID NO: 275021 - RNA, 23 nt, Artificial Sequence
  Synthetic
gaggaauggaguggguaauaagc

SEQ ID NO: 275022 - RNA, 24 nt, Artificial Sequence
  Synthetic
agaggaauggaguggguaauaagc

SEQ ID NO: 275023 - RNA, 18 nt, Artificial Sequence
  Synthetic
cugacacuucccauaagc

SEQ ID NO: 275024 - RNA, 19 nt, Artificial Sequence
  Synthetic
ucugacacuucccauaagc

SEQ ID NO: 275025 - RNA, 20 nt, Artificial Sequence
  Synthetic
uucugacacuucccauaagc

SEQ ID NO: 275026 - RNA, 21 nt, Artificial Sequence
  Synthetic
uuucugacacuucccauaagc

SEQ ID NO: 275027 - RNA, 22 nt, Artificial Sequence
  Synthetic
uuuucugacacuucccauaagc

SEQ ID NO: 275028 - RNA, 23 nt, Artificial Sequence
  Synthetic
auuuucugacacuucccauaagc

SEQ ID NO: 275029 - RNA, 24 nt, Artificial Sequence
  Synthetic
cauuuucugacacuucccauaagc

SEQ ID NO: 275030 - RNA, 18 nt, Artificial Sequence
  Synthetic
uucuuccuuuccauaagc

SEQ ID NO: 275031 - RNA, 19 nt, Artificial Sequence
  Synthetic
auucuuccuuuccauaagc

SEQ ID NO: 275032 - RNA, 20 nt, Artificial Sequence
  Synthetic
gauucuuccuuuccauaagc

SEQ ID NO: 275033 - RNA, 21 nt, Artificial Sequence
  Synthetic
ugauucuuccuuuccauaagc

SEQ ID NO: 275034 - RNA, 22 nt, Artificial Sequence
  Synthetic
uugauucuuccuuuccauaagc

SEQ ID NO: 275035 - RNA, 23 nt, Artificial Sequence
  Synthetic
auugauucuuccuuuccauaagc

SEQ ID NO: 275036 - RNA, 24 nt, Artificial Sequence
  Synthetic
uauugauucuuccuuuccauaagc

SEQ ID NO: 275037 - RNA, 18 nt, Artificial Sequence
  Synthetic
ccugaaaacuagauaagc

SEQ ID NO: 275038 - RNA, 19 nt, Artificial Sequence
  Synthetic
gccugaaaacuagauaagc

SEQ ID NO: 275039 - RNA, 20 nt, Artificial Sequence
  Synthetic
ugccugaaaacuagauaagc

SEQ ID NO: 275040 - RNA, 21 nt, Artificial Sequence
  Synthetic
uugccugaaaacuagauaagc

SEQ ID NO: 275041 - RNA, 22 nt, Artificial Sequence
  Synthetic
uuugccugaaaacuagauaagc

SEQ ID NO: 275042 - RNA, 23 nt, Artificial Sequence
  Synthetic
guuugccugaaaacuagauaagc

SEQ ID NO: 275043 - RNA, 24 nt, Artificial Sequence
  Synthetic
aguuugccugaaaacuagauaagc

SEQ ID NO: 275044 - RNA, 18 nt, Artificial Sequence
  Synthetic
gauaggaauacgauaagc

SEQ ID NO: 275045 - RNA, 19 nt, Artificial Sequence
  Synthetic
ggauaggaauacgauaagc

SEQ ID NO: 275046 - RNA, 20 nt, Artificial Sequence
  Synthetic
uggauaggaauacgauaagc

SEQ ID NO: 275047 - RNA, 21 nt, Artificial Sequence
  Synthetic
auggauaggaauacgauaagc

SEQ ID NO: 275048 - RNA, 22 nt, Artificial Sequence
  Synthetic
cauggauaggaauacgauaagc

SEQ ID NO: 275049 - RNA, 23 nt, Artificial Sequence
  Synthetic
gcauggauaggaauacgauaagc

SEQ ID NO: 275050 - RNA, 24 nt, Artificial Sequence
  Synthetic
cgcauggauaggaauacgauaagc

SEQ ID NO: 275051 - RNA, 18 nt, Artificial Sequence
  Synthetic
uauuuuuauaauauaagc

SEQ ID NO: 275052 - RNA, 19 nt, Artificial Sequence
  Synthetic
auauuuuuauaauauaagc

SEQ ID NO: 275053 - RNA, 20 nt, Artificial Sequence
  Synthetic
gauauuuuuauaauauaagc

SEQ ID NO: 275054 - RNA, 21 nt, Artificial Sequence
  Synthetic
agauauuuuuauaauauaagc

SEQ ID NO: 275055 - RNA, 22 nt, Artificial Sequence
  Synthetic
uagauauuuuuauaauauaagc

SEQ ID NO: 275056 - RNA, 23 nt, Artificial Sequence
  Synthetic
uuagauauuuuuauaauauaagc

SEQ ID NO: 275057 - RNA, 24 nt, Artificial Sequence
  Synthetic
uuuagauauuuuuauaauauaagc

SEQ ID NO: 275058 - RNA, 18 nt, Artificial Sequence
  Synthetic
aucuauaugcauauaagc

SEQ ID NO: 275059 - RNA, 19 nt, Artificial Sequence
  Synthetic
aaucuauaugcauauaagc

SEQ ID NO: 275060 - RNA, 20 nt, Artificial Sequence
  Synthetic
aaaucuauaugcauauaagc

SEQ ID NO: 275061 - RNA, 21 nt, Artificial Sequence
  Synthetic
caaaucuauaugcauauaagc

SEQ ID NO: 275062 - RNA, 22 nt, Artificial Sequence
  Synthetic
acaaaucuauaugcauauaagc

SEQ ID NO: 275063 - RNA, 23 nt, Artificial Sequence
  Synthetic
uacaaaucuauaugcauauaagc

SEQ ID NO: 275064 - RNA, 24 nt, Artificial Sequence
  Synthetic
cuacaaaucuauaugcauauaagc

SEQ ID NO: 275065 - RNA, 18 nt, Artificial Sequence
  Synthetic
guuauuguguuuauaagc

SEQ ID NO: 275066 - RNA, 19 nt, Artificial Sequence
  Synthetic
uguuauuguguuuauaagc

SEQ ID NO: 275067 - RNA, 20 nt, Artificial Sequence
  Synthetic
guguuauuguguuuauaagc

SEQ ID NO: 275068 - RNA, 21 nt, Artificial Sequence
  Synthetic
uguguuauuguguuuauaagc

SEQ ID NO: 275069 - RNA, 22 nt, Artificial Sequence
  Synthetic
uuguguuauuguguuuauaagc

SEQ ID NO: 275070 - RNA, 23 nt, Artificial Sequence
  Synthetic
auuguguuauuguguuuauaagc

SEQ ID NO: 275071 - RNA, 24 nt, Artificial Sequence
  Synthetic
cauuguguuauuguguuuauaagc

SEQ ID NO: 275072 - RNA, 18 nt, Artificial Sequence
  Synthetic
cuucagggaaaacuaagc

SEQ ID NO: 275073 - RNA, 19 nt, Artificial Sequence
  Synthetic
ucuucagggaaaacuaagc

SEQ ID NO: 275074 - RNA, 20 nt, Artificial Sequence
  Synthetic
uucuucagggaaaacuaagc

SEQ ID NO: 275075 - RNA, 21 nt, Artificial Sequence
  Synthetic
uuucuucagggaaaacuaagc

SEQ ID NO: 275076 - RNA, 22 nt, Artificial Sequence
  Synthetic
cuuucuucagggaaaacuaagc

SEQ ID NO: 275077 - RNA, 23 nt, Artificial Sequence
  Synthetic
gcuuucuucagggaaaacuaagc

SEQ ID NO: 275078 - RNA, 24 nt, Artificial Sequence
  Synthetic
ggcuuucuucagggaaaacuaagc

SEQ ID NO: 275079 - RNA, 18 nt, Artificial Sequence
  Synthetic
uacagagaacaacuaagc

SEQ ID NO: 275080 - RNA, 19 nt, Artificial Sequence
  Synthetic
uuacagagaacaacuaagc

SEQ ID NO: 275081 - RNA, 20 nt, Artificial Sequence
  Synthetic
auuacagagaacaacuaagc

SEQ ID NO: 275082 - RNA, 21 nt, Artificial Sequence
  Synthetic
cauuacagagaacaacuaagc

SEQ ID NO: 275083 - RNA, 22 nt, Artificial Sequence
  Synthetic
ccauuacagagaacaacuaagc

SEQ ID NO: 275084 - RNA, 23 nt, Artificial Sequence
  Synthetic
accauuacagagaacaacuaagc

SEQ ID NO: 275085 - RNA, 24 nt, Artificial Sequence
  Synthetic
caccauuacagagaacaacuaagc

SEQ ID NO: 275086 - RNA, 18 nt, Artificial Sequence
  Synthetic
cugcaagcuccccuaagc

SEQ ID NO: 275087 - RNA, 19 nt, Artificial Sequence
  Synthetic
ccugcaagcuccccuaagc

SEQ ID NO: 275088 - RNA, 20 nt, Artificial Sequence
  Synthetic
uccugcaagcuccccuaagc

SEQ ID NO: 275089 - RNA, 21 nt, Artificial Sequence
  Synthetic
uuccugcaagcuccccuaagc

SEQ ID NO: 275090 - RNA, 22 nt, Artificial Sequence
  Synthetic
uuuccugcaagcuccccuaagc

SEQ ID NO: 275091 - RNA, 23 nt, Artificial Sequence
  Synthetic
auuuccugcaagcuccccuaagc

SEQ ID NO: 275092 - RNA, 24 nt, Artificial Sequence
  Synthetic
aauuuccugcaagcuccccuaagc

SEQ ID NO: 275093 - RNA, 18 nt, Artificial Sequence
  Synthetic
acauuuaaagagcuaagc

SEQ ID NO: 275094 - RNA, 19 nt, Artificial Sequence
  Synthetic
cacauuuaaagagcuaagc

SEQ ID NO: 275095 - RNA, 20 nt, Artificial Sequence
  Synthetic
ccacauuuaaagagcuaagc

SEQ ID NO: 275096 - RNA, 21 nt, Artificial Sequence
  Synthetic
accacauuuaaagagcuaagc

SEQ ID NO: 275097 - RNA, 22 nt, Artificial Sequence
  Synthetic
uaccacauuuaaagagcuaagc

SEQ ID NO: 275098 - RNA, 23 nt, Artificial Sequence
  Synthetic
guaccacauuuaaagagcuaagc

SEQ ID NO: 275099 - RNA, 24 nt, Artificial Sequence
  Synthetic
aguaccacauuuaaagagcuaagc

SEQ ID NO: 275100 - RNA, 18 nt, Artificial Sequence
  Synthetic
ugggcauuggagcuaagc

SEQ ID NO: 275101 - RNA, 19 nt, Artificial Sequence
  Synthetic
cugggcauuggagcuaagc

SEQ ID NO: 275102 - RNA, 20 nt, Artificial Sequence
  Synthetic
acugggcauuggagcuaagc

SEQ ID NO: 275103 - RNA, 21 nt, Artificial Sequence
  Synthetic
uacugggcauuggagcuaagc

SEQ ID NO: 275104 - RNA, 22 nt, Artificial Sequence
  Synthetic
uuacugggcauuggagcuaagc

SEQ ID NO: 275105 - RNA, 23 nt, Artificial Sequence
  Synthetic
uuuacugggcauuggagcuaagc

SEQ ID NO: 275106 - RNA, 24 nt, Artificial Sequence
  Synthetic
uuuuacugggcauuggagcuaagc

SEQ ID NO: 275107 - RNA, 18 nt, Artificial Sequence
  Synthetic
ccaucuucuucucuaagc

SEQ ID NO: 275108 - RNA, 19 nt, Artificial Sequence
  Synthetic
cccaucuucuucucuaagc

SEQ ID NO: 275109 - RNA, 20 nt, Artificial Sequence
  Synthetic
ccccaucuucuucucuaagc

SEQ ID NO: 275110 - RNA, 21 nt, Artificial Sequence
  Synthetic
cccccaucuucuucucuaagc

SEQ ID NO: 275111 - RNA, 22 nt, Artificial Sequence
  Synthetic
acccccaucuucuucucuaagc

SEQ ID NO: 275112 - RNA, 23 nt, Artificial Sequence
  Synthetic
cacccccaucuucuucucuaagc

SEQ ID NO: 275113 - RNA, 24 nt, Artificial Sequence
  Synthetic
ucacccccaucuucuucucuaagc

SEQ ID NO: 275114 - RNA, 18 nt, Artificial Sequence
  Synthetic
cauagccuaguucuaagc

SEQ ID NO: 275115 - RNA, 19 nt, Artificial Sequence
  Synthetic
ucauagccuaguucuaagc

SEQ ID NO: 275116 - RNA, 20 nt, Artificial Sequence
  Synthetic
gucauagccuaguucuaagc

SEQ ID NO: 275117 - RNA, 21 nt, Artificial Sequence
  Synthetic
agucauagccuaguucuaagc

SEQ ID NO: 275118 - RNA, 22 nt, Artificial Sequence
  Synthetic
aagucauagccuaguucuaagc

SEQ ID NO: 275119 - RNA, 23 nt, Artificial Sequence
  Synthetic
uaagucauagccuaguucuaagc

SEQ ID NO: 275120 - RNA, 24 nt, Artificial Sequence
  Synthetic
uuaagucauagccuaguucuaagc

SEQ ID NO: 275121 - RNA, 18 nt, Artificial Sequence
  Synthetic
uuacuuuuauuucuaagc

SEQ ID NO: 275122 - RNA, 19 nt, Artificial Sequence
  Synthetic
uuuacuuuuauuucuaagc

SEQ ID NO: 275123 - RNA, 20 nt, Artificial Sequence
  Synthetic
uuuuacuuuuauuucuaagc

SEQ ID NO: 275124 - RNA, 21 nt, Artificial Sequence
  Synthetic
uuuuuacuuuuauuucuaagc

SEQ ID NO: 275125 - RNA, 22 nt, Artificial Sequence
  Synthetic
guuuuuacuuuuauuucuaagc

SEQ ID NO: 275126 - RNA, 23 nt, Artificial Sequence
  Synthetic
aguuuuuacuuuuauuucuaagc

SEQ ID NO: 275127 - RNA, 24 nt, Artificial Sequence
  Synthetic
uaguuuuuacuuuuauuucuaagc

SEQ ID NO: 275128 - RNA, 18 nt, Artificial Sequence
  Synthetic
aagaagaacacaguaagc

SEQ ID NO: 275129 - RNA, 19 nt, Artificial Sequence
  Synthetic
aaagaagaacacaguaagc

SEQ ID NO: 275130 - RNA, 20 nt, Artificial Sequence
  Synthetic
aaaagaagaacacaguaagc

SEQ ID NO: 275131 - RNA, 21 nt, Artificial Sequence
  Synthetic
aaaaagaagaacacaguaagc

SEQ ID NO: 275132 - RNA, 22 nt, Artificial Sequence
  Synthetic
gaaaaagaagaacacaguaagc

SEQ ID NO: 275133 - RNA, 23 nt, Artificial Sequence
  Synthetic
agaaaaagaagaacacaguaagc

SEQ ID NO: 275134 - RNA, 24 nt, Artificial Sequence
  Synthetic
uagaaaaagaagaacacaguaagc

SEQ ID NO: 275135 - RNA, 18 nt, Artificial Sequence
  Synthetic
uaaucauuuucaguaagc

SEQ ID NO: 275136 - RNA, 19 nt, Artificial Sequence
  Synthetic
uuaaucauuuucaguaagc

SEQ ID NO: 275137 - RNA, 20 nt, Artificial Sequence
  Synthetic
auuaaucauuuucaguaagc

SEQ ID NO: 275138 - RNA, 21 nt, Artificial Sequence
  Synthetic
gauuaaucauuuucaguaagc

SEQ ID NO: 275139 - RNA, 22 nt, Artificial Sequence
  Synthetic
agauuaaucauuuucaguaagc

SEQ ID NO: 275140 - RNA, 23 nt, Artificial Sequence
  Synthetic
aagauuaaucauuuucaguaagc

SEQ ID NO: 275141 - RNA, 24 nt, Artificial Sequence
  Synthetic
aaagauuaaucauuuucaguaagc

SEQ ID NO: 275142 - RNA, 18 nt, Artificial Sequence
  Synthetic
ucuaagucaagaguaagc

SEQ ID NO: 275143 - RNA, 19 nt, Artificial Sequence
  Synthetic
uucuaagucaagaguaagc

SEQ ID NO: 275144 - RNA, 20 nt, Artificial Sequence
  Synthetic
guucuaagucaagaguaagc

SEQ ID NO: 275145 - RNA, 21 nt, Artificial Sequence
  Synthetic
gguucuaagucaagaguaagc

SEQ ID NO: 275146 - RNA, 22 nt, Artificial Sequence
  Synthetic
agguucuaagucaagaguaagc

SEQ ID NO: 275147 - RNA, 23 nt, Artificial Sequence
  Synthetic
aagguucuaagucaagaguaagc

SEQ ID NO: 275148 - RNA, 24 nt, Artificial Sequence
  Synthetic
gaagguucuaagucaagaguaagc

SEQ ID NO: 275149 - RNA, 18 nt, Artificial Sequence
  Synthetic
cuuuauuuacauguaagc

SEQ ID NO: 275150 - RNA, 19 nt, Artificial Sequence
  Synthetic
ucuuuauuuacauguaagc

SEQ ID NO: 275151 - RNA, 20 nt, Artificial Sequence
  Synthetic
cucuuuauuuacauguaagc

SEQ ID NO: 275152 - RNA, 21 nt, Artificial Sequence
  Synthetic
gcucuuuauuuacauguaagc

SEQ ID NO: 275153 - RNA, 22 nt, Artificial Sequence
  Synthetic
ggcucuuuauuuacauguaagc

SEQ ID NO: 275154 - RNA, 23 nt, Artificial Sequence
  Synthetic
uggcucuuuauuuacauguaagc

SEQ ID NO: 275155 - RNA, 24 nt, Artificial Sequence
  Synthetic
cuggcucuuuauuuacauguaagc

SEQ ID NO: 275156 - RNA, 18 nt, Artificial Sequence
  Synthetic
aguauggaccuuguaagc

SEQ ID NO: 275157 - RNA, 19 nt, Artificial Sequence
  Synthetic
gaguauggaccuuguaagc

SEQ ID NO: 275158 - RNA, 20 nt, Artificial Sequence
  Synthetic
agaguauggaccuuguaagc

SEQ ID NO: 275159 - RNA, 21 nt, Artificial Sequence
  Synthetic
uagaguauggaccuuguaagc

SEQ ID NO: 275160 - RNA, 22 nt, Artificial Sequence
  Synthetic
cuagaguauggaccuuguaagc

SEQ ID NO: 275161 - RNA, 23 nt, Artificial Sequence
  Synthetic
gcuagaguauggaccuuguaagc

SEQ ID NO: 275162 - RNA, 24 nt, Artificial Sequence
  Synthetic
agcuagaguauggaccuuguaagc

SEQ ID NO: 275163 - RNA, 18 nt, Artificial Sequence
  Synthetic
cauucucaggaauuaagc

SEQ ID NO: 275164 - RNA, 19 nt, Artificial Sequence
  Synthetic
gcauucucaggaauuaagc

SEQ ID NO: 275165 - RNA, 20 nt, Artificial Sequence
  Synthetic
cgcauucucaggaauuaagc

SEQ ID NO: 275166 - RNA, 21 nt, Artificial Sequence
  Synthetic
acgcauucucaggaauuaagc

SEQ ID NO: 275167 - RNA, 22 nt, Artificial Sequence
  Synthetic
aacgcauucucaggaauuaagc

SEQ ID NO: 275168 - RNA, 23 nt, Artificial Sequence
  Synthetic
aaacgcauucucaggaauuaagc

SEQ ID NO: 275169 - RNA, 24 nt, Artificial Sequence
  Synthetic
gaaacgcauucucaggaauuaagc

SEQ ID NO: 275170 - RNA, 18 nt, Artificial Sequence
  Synthetic
acuucuugaagcuuaagc

SEQ ID NO: 275171 - RNA, 19 nt, Artificial Sequence
  Synthetic
gacuucuugaagcuuaagc

SEQ ID NO: 275172 - RNA, 20 nt, Artificial Sequence
  Synthetic
agacuucuugaagcuuaagc

SEQ ID NO: 275173 - RNA, 21 nt, Artificial Sequence
  Synthetic
aagacuucuugaagcuuaagc

SEQ ID NO: 275174 - RNA, 22 nt, Artificial Sequence
  Synthetic
caagacuucuugaagcuuaagc

SEQ ID NO: 275175 - RNA, 23 nt, Artificial Sequence
  Synthetic
acaagacuucuugaagcuuaagc

SEQ ID NO: 275176 - RNA, 24 nt, Artificial Sequence
  Synthetic
aacaagacuucuugaagcuuaagc

SEQ ID NO: 275177 - RNA, 18 nt, Artificial Sequence
  Synthetic
aaagugcuacauuuaagc

SEQ ID NO: 275178 - RNA, 19 nt, Artificial Sequence
  Synthetic
aaaagugcuacauuuaagc

SEQ ID NO: 275179 - RNA, 20 nt, Artificial Sequence
  Synthetic
uaaaagugcuacauuuaagc

SEQ ID NO: 275180 - RNA, 21 nt, Artificial Sequence
  Synthetic
uuaaaagugcuacauuuaagc

SEQ ID NO: 275181 - RNA, 22 nt, Artificial Sequence
  Synthetic
guuaaaagugcuacauuuaagc

SEQ ID NO: 275182 - RNA, 23 nt, Artificial Sequence
  Synthetic
aguuaaaagugcuacauuuaagc

SEQ ID NO: 275183 - RNA, 24 nt, Artificial Sequence
  Synthetic
gaguuaaaagugcuacauuuaagc

SEQ ID NO: 275184 - RNA, 18 nt, Artificial Sequence
  Synthetic
cuacccaauuauuuaagc

SEQ ID NO: 275185 - RNA, 19 nt, Artificial Sequence
  Synthetic
ucuacccaauuauuuaagc

SEQ ID NO: 275186 - RNA, 20 nt, Artificial Sequence
  Synthetic
aucuacccaauuauuuaagc

SEQ ID NO: 275187 - RNA, 21 nt, Artificial Sequence
  Synthetic
caucuacccaauuauuuaagc

SEQ ID NO: 275188 - RNA, 22 nt, Artificial Sequence
  Synthetic
ccaucuacccaauuauuuaagc

SEQ ID NO: 275189 - RNA, 23 nt, Artificial Sequence
  Synthetic
accaucuacccaauuauuuaagc

SEQ ID NO: 275190 - RNA, 24 nt, Artificial Sequence
  Synthetic
caccaucuacccaauuauuuaagc

SEQ ID NO: 275191 - RNA, 18 nt, Artificial Sequence
  Synthetic
uugaagaucucuuuaagc

SEQ ID NO: 275192 - RNA, 19 nt, Artificial Sequence
  Synthetic
uuugaagaucucuuuaagc

SEQ ID NO: 275193 - RNA, 20 nt, Artificial Sequence
  Synthetic
cuuugaagaucucuuuaagc

SEQ ID NO: 275194 - RNA, 21 nt, Artificial Sequence
  Synthetic
acuuugaagaucucuuuaagc

SEQ ID NO: 275195 - RNA, 22 nt, Artificial Sequence
  Synthetic
gacuuugaagaucucuuuaagc

SEQ ID NO: 275196 - RNA, 23 nt, Artificial Sequence
  Synthetic
ggacuuugaagaucucuuuaagc

SEQ ID NO: 275197 - RNA, 24 nt, Artificial Sequence
  Synthetic
aggacuuugaagaucucuuuaagc

SEQ ID NO: 275198 - RNA, 18 nt, Artificial Sequence
  Synthetic
caagauuggucuuuaagc

SEQ ID NO: 275199 - RNA, 19 nt, Artificial Sequence
  Synthetic
ucaagauuggucuuuaagc

SEQ ID NO: 275200 - RNA, 20 nt, Artificial Sequence
  Synthetic
gucaagauuggucuuuaagc

SEQ ID NO: 275201 - RNA, 21 nt, Artificial Sequence
  Synthetic
cgucaagauuggucuuuaagc

SEQ ID NO: 275202 - RNA, 22 nt, Artificial Sequence
  Synthetic
acgucaagauuggucuuuaagc

SEQ ID NO: 275203 - RNA, 23 nt, Artificial Sequence
  Synthetic
gacgucaagauuggucuuuaagc

SEQ ID NO: 275204 - RNA, 24 nt, Artificial Sequence
  Synthetic
ggacgucaagauuggucuuuaagc

SEQ ID NO: 275205 - RNA, 18 nt, Artificial Sequence
  Synthetic
aaaugucgauguuuaagc

SEQ ID NO: 275206 - RNA, 19 nt, Artificial Sequence
  Synthetic
uaaaugucgauguuuaagc

SEQ ID NO: 275207 - RNA, 20 nt, Artificial Sequence
  Synthetic
uuaaaugucgauguuuaagc

SEQ ID NO: 275208 - RNA, 21 nt, Artificial Sequence
  Synthetic
uuuaaaugucgauguuuaagc

SEQ ID NO: 275209 - RNA, 22 nt, Artificial Sequence
  Synthetic
auuuaaaugucgauguuuaagc

SEQ ID NO: 275210 - RNA, 23 nt, Artificial Sequence
  Synthetic
aauuuaaaugucgauguuuaagc

SEQ ID NO: 275211 - RNA, 24 nt, Artificial Sequence
  Synthetic
aaauuuaaaugucgauguuuaagc

SEQ ID NO: 275212 - RNA, 18 nt, Artificial Sequence
  Synthetic
agucacacaauuuuaagc

SEQ ID NO: 275213 - RNA, 19 nt, Artificial Sequence
  Synthetic
cagucacacaauuuuaagc

SEQ ID NO: 275214 - RNA, 20 nt, Artificial Sequence
  Synthetic
ucagucacacaauuuuaagc

SEQ ID NO: 275215 - RNA, 21 nt, Artificial Sequence
  Synthetic
aucagucacacaauuuuaagc

SEQ ID NO: 275216 - RNA, 22 nt, Artificial Sequence
  Synthetic
aaucagucacacaauuuuaagc

SEQ ID NO: 275217 - RNA, 23 nt, Artificial Sequence
  Synthetic
aaaucagucacacaauuuuaagc

SEQ ID NO: 275218 - RNA, 24 nt, Artificial Sequence
  Synthetic
gaaaucagucacacaauuuuaagc

SEQ ID NO: 275219 - RNA, 18 nt, Artificial Sequence
  Synthetic
uagcucccacuuuuaagc

SEQ ID NO: 275220 - RNA, 19 nt, Artificial Sequence
  Synthetic
uuagcucccacuuuuaagc

SEQ ID NO: 275221 - RNA, 20 nt, Artificial Sequence
  Synthetic
uuuagcucccacuuuuaagc

SEQ ID NO: 275222 - RNA, 21 nt, Artificial Sequence
  Synthetic
guuuagcucccacuuuuaagc

SEQ ID NO: 275223 - RNA, 22 nt, Artificial Sequence
  Synthetic
uguuuagcucccacuuuuaagc

SEQ ID NO: 275224 - RNA, 23 nt, Artificial Sequence
  Synthetic
auguuuagcucccacuuuuaagc

SEQ ID NO: 275225 - RNA, 24 nt, Artificial Sequence
  Synthetic
aauguuuagcucccacuuuuaagc

SEQ ID NO: 275226 - RNA, 18 nt, Artificial Sequence
  Synthetic
aucacaugggaaaacagc

SEQ ID NO: 275227 - RNA, 19 nt, Artificial Sequence
  Synthetic
uaucacaugggaaaacagc

SEQ ID NO: 275228 - RNA, 20 nt, Artificial Sequence
  Synthetic
cuaucacaugggaaaacagc

SEQ ID NO: 275229 - RNA, 21 nt, Artificial Sequence
  Synthetic
acuaucacaugggaaaacagc

SEQ ID NO: 275230 - RNA, 22 nt, Artificial Sequence
  Synthetic
cacuaucacaugggaaaacagc

SEQ ID NO: 275231 - RNA, 23 nt, Artificial Sequence
  Synthetic
ucacuaucacaugggaaaacagc

SEQ ID NO: 275232 - RNA, 24 nt, Artificial Sequence
  Synthetic
cucacuaucacaugggaaaacagc

SEQ ID NO: 275233 - RNA, 18 nt, Artificial Sequence
  Synthetic
guuagcuuauuaaacagc

SEQ ID NO: 275234 - RNA, 19 nt, Artificial Sequence
  Synthetic
gguuagcuuauuaaacagc

SEQ ID NO: 275235 - RNA, 20 nt, Artificial Sequence
  Synthetic
cgguuagcuuauuaaacagc

SEQ ID NO: 275236 - RNA, 21 nt, Artificial Sequence
  Synthetic
acgguuagcuuauuaaacagc

SEQ ID NO: 275237 - RNA, 22 nt, Artificial Sequence
  Synthetic
aacgguuagcuuauuaaacagc

SEQ ID NO: 275238 - RNA, 23 nt, Artificial Sequence
  Synthetic
uaacgguuagcuuauuaaacagc

SEQ ID NO: 275239 - RNA, 24 nt, Artificial Sequence
  Synthetic
auaacgguuagcuuauuaaacagc

SEQ ID NO: 275240 - RNA, 18 nt, Artificial Sequence
  Synthetic
cacugucacaagaacagc

SEQ ID NO: 275241 - RNA, 19 nt, Artificial Sequence
  Synthetic
ucacugucacaagaacagc

SEQ ID NO: 275242 - RNA, 20 nt, Artificial Sequence
  Synthetic
cucacugucacaagaacagc

SEQ ID NO: 275243 - RNA, 21 nt, Artificial Sequence
  Synthetic
acucacugucacaagaacagc

SEQ ID NO: 275244 - RNA, 22 nt, Artificial Sequence
  Synthetic
aacucacugucacaagaacagc

SEQ ID NO: 275245 - RNA, 23 nt, Artificial Sequence
  Synthetic
gaacucacugucacaagaacagc

SEQ ID NO: 275246 - RNA, 24 nt, Artificial Sequence
  Synthetic
agaacucacugucacaagaacagc

SEQ ID NO: 275247 - RNA, 18 nt, Artificial Sequence
  Synthetic
uacuaucacgagaacagc

SEQ ID NO: 275248 - RNA, 19 nt, Artificial Sequence
  Synthetic
uuacuaucacgagaacagc

SEQ ID NO: 275249 - RNA, 20 nt, Artificial Sequence
  Synthetic
uuuacuaucacgagaacagc

SEQ ID NO: 275250 - RNA, 21 nt, Artificial Sequence
  Synthetic
auuuacuaucacgagaacagc

SEQ ID NO: 275251 - RNA, 22 nt, Artificial Sequence
  Synthetic
aauuuacuaucacgagaacagc

SEQ ID NO: 275252 - RNA, 23 nt, Artificial Sequence
  Synthetic
uaauuuacuaucacgagaacagc

SEQ ID NO: 275253 - RNA, 24 nt, Artificial Sequence
  Synthetic
cuaauuuacuaucacgagaacagc

SEQ ID NO: 275254 - RNA, 18 nt, Artificial Sequence
  Synthetic
cacuaucaugagaacagc

SEQ ID NO: 275255 - RNA, 19 nt, Artificial Sequence
  Synthetic
ucacuaucaugagaacagc

SEQ ID NO: 275256 - RNA, 20 nt, Artificial Sequence
  Synthetic
cucacuaucaugagaacagc

SEQ ID NO: 275257 - RNA, 21 nt, Artificial Sequence
  Synthetic
acucacuaucaugagaacagc

SEQ ID NO: 275258 - RNA, 22 nt, Artificial Sequence
  Synthetic
cacucacuaucaugagaacagc

SEQ ID NO: 275259 - RNA, 23 nt, Artificial Sequence
  Synthetic
ucacucacuaucaugagaacagc

SEQ ID NO: 275260 - RNA, 24 nt, Artificial Sequence
  Synthetic
uucacucacuaucaugagaacagc

SEQ ID NO: 275261 - RNA, 18 nt, Artificial Sequence
  Synthetic
cgcuaucaugagaacagc

SEQ ID NO: 275262 - RNA, 19 nt, Artificial Sequence
  Synthetic
ccgcuaucaugagaacagc

SEQ ID NO: 275263 - RNA, 20 nt, Artificial Sequence
  Synthetic
cccgcuaucaugagaacagc

SEQ ID NO: 275264 - RNA, 21 nt, Artificial Sequence
  Synthetic
ucccgcuaucaugagaacagc

SEQ ID NO: 275265 - RNA, 22 nt, Artificial Sequence
  Synthetic
aucccgcuaucaugagaacagc

SEQ ID NO: 275266 - RNA, 23 nt, Artificial Sequence
  Synthetic
gaucccgcuaucaugagaacagc

SEQ ID NO: 275267 - RNA, 24 nt, Artificial Sequence
  Synthetic
agaucccgcuaucaugagaacagc

SEQ ID NO: 275268 - RNA, 18 nt, Artificial Sequence
  Synthetic
uuuggcagguagaacagc

SEQ ID NO: 275269 - RNA, 19 nt, Artificial Sequence
  Synthetic
uuuuggcagguagaacagc

SEQ ID NO: 275270 - RNA, 20 nt, Artificial Sequence
  Synthetic
uuuuuggcagguagaacagc

SEQ ID NO: 275271 - RNA, 21 nt, Artificial Sequence
  Synthetic
auuuuuggcagguagaacagc

SEQ ID NO: 275272 - RNA, 22 nt, Artificial Sequence
  Synthetic
uauuuuuggcagguagaacagc

SEQ ID NO: 275273 - RNA, 23 nt, Artificial Sequence
  Synthetic
cuauuuuuggcagguagaacagc

SEQ ID NO: 275274 - RNA, 24 nt, Artificial Sequence
  Synthetic
acuauuuuuggcagguagaacagc

SEQ ID NO: 275275 - RNA, 18 nt, Artificial Sequence
  Synthetic
uacaucucaucuaacagc

SEQ ID NO: 275276 - RNA, 19 nt, Artificial Sequence
  Synthetic
guacaucucaucuaacagc

SEQ ID NO: 275277 - RNA, 20 nt, Artificial Sequence
  Synthetic
aguacaucucaucuaacagc

SEQ ID NO: 275278 - RNA, 21 nt, Artificial Sequence
  Synthetic
caguacaucucaucuaacagc

SEQ ID NO: 275279 - RNA, 22 nt, Artificial Sequence
  Synthetic
acaguacaucucaucuaacagc

SEQ ID NO: 275280 - RNA, 23 nt, Artificial Sequence
  Synthetic
uacaguacaucucaucuaacagc

SEQ ID NO: 275281 - RNA, 24 nt, Artificial Sequence
  Synthetic
auacaguacaucucaucuaacagc

SEQ ID NO: 275282 - RNA, 18 nt, Artificial Sequence
  Synthetic
aaaaaaaaaaaacacagc

SEQ ID NO: 275283 - RNA, 19 nt, Artificial Sequence
  Synthetic
aaaaaaaaaaaaacacagc

SEQ ID NO: 275284 - RNA, 20 nt, Artificial Sequence
  Synthetic
aaaaaaaaaaaaaacacagc

SEQ ID NO: 275285 - RNA, 21 nt, Artificial Sequence
  Synthetic
aaaaaaaaaaaaaaacacagc

SEQ ID NO: 275286 - RNA, 22 nt, Artificial Sequence
  Synthetic
aaaaaaaaaaaaaaaacacagc

SEQ ID NO: 275287 - RNA, 23 nt, Artificial Sequence
  Synthetic
uaaaaaaaaaaaaaaaacacagc

SEQ ID NO: 275288 - RNA, 24 nt, Artificial Sequence
  Synthetic
uuaaaaaaaaaaaaaaaacacagc

SEQ ID NO: 275289 - RNA, 18 nt, Artificial Sequence
  Synthetic
ggagcugagaaacacagc

SEQ ID NO: 275290 - RNA, 19 nt, Artificial Sequence
  Synthetic
aggagcugagaaacacagc

SEQ ID NO: 275291 - RNA, 20 nt, Artificial Sequence
  Synthetic
aaggagcugagaaacacagc

SEQ ID NO: 275292 - RNA, 21 nt, Artificial Sequence
  Synthetic
gaaggagcugagaaacacagc

SEQ ID NO: 275293 - RNA, 22 nt, Artificial Sequence
  Synthetic
ugaaggagcugagaaacacagc

SEQ ID NO: 275294 - RNA, 23 nt, Artificial Sequence
  Synthetic
cugaaggagcugagaaacacagc

SEQ ID NO: 275295 - RNA, 24 nt, Artificial Sequence
  Synthetic
ccugaaggagcugagaaacacagc

SEQ ID NO: 275296 - RNA, 18 nt, Artificial Sequence
  Synthetic
acuuguuagaaacacagc

SEQ ID NO: 275297 - RNA, 19 nt, Artificial Sequence
  Synthetic
uacuuguuagaaacacagc

SEQ ID NO: 275298 - RNA, 20 nt, Artificial Sequence
  Synthetic
auacuuguuagaaacacagc

SEQ ID NO: 275299 - RNA, 21 nt, Artificial Sequence
  Synthetic
uauacuuguuagaaacacagc

SEQ ID NO: 275300 - RNA, 22 nt, Artificial Sequence
  Synthetic
uuauacuuguuagaaacacagc

SEQ ID NO: 275301 - RNA, 23 nt, Artificial Sequence
  Synthetic
auuauacuuguuagaaacacagc

SEQ ID NO: 275302 - RNA, 24 nt, Artificial Sequence
  Synthetic
aauuauacuuguuagaaacacagc

SEQ ID NO: 275303 - RNA, 18 nt, Artificial Sequence
  Synthetic
agauuaaggccacacagc

SEQ ID NO: 275304 - RNA, 19 nt, Artificial Sequence
  Synthetic
uagauuaaggccacacagc

SEQ ID NO: 275305 - RNA, 20 nt, Artificial Sequence
  Synthetic
cuagauuaaggccacacagc

SEQ ID NO: 275306 - RNA, 21 nt, Artificial Sequence
  Synthetic
gcuagauuaaggccacacagc

SEQ ID NO: 275307 - RNA, 22 nt, Artificial Sequence
  Synthetic
agcuagauuaaggccacacagc

SEQ ID NO: 275308 - RNA, 23 nt, Artificial Sequence
  Synthetic
uagcuagauuaaggccacacagc

SEQ ID NO: 275309 - RNA, 24 nt, Artificial Sequence
  Synthetic
auagcuagauuaaggccacacagc

SEQ ID NO: 275310 - RNA, 18 nt, Artificial Sequence
  Synthetic
cuuacaguuccacacagc

SEQ ID NO: 275311 - RNA, 19 nt, Artificial Sequence
  Synthetic
acuuacaguuccacacagc

SEQ ID NO: 275312 - RNA, 20 nt, Artificial Sequence
  Synthetic
gacuuacaguuccacacagc

SEQ ID NO: 275313 - RNA, 21 nt, Artificial Sequence
  Synthetic
ggacuuacaguuccacacagc

SEQ ID NO: 275314 - RNA, 22 nt, Artificial Sequence
  Synthetic
uggacuuacaguuccacacagc

SEQ ID NO: 275315 - RNA, 23 nt, Artificial Sequence
  Synthetic
auggacuuacaguuccacacagc

SEQ ID NO: 275316 - RNA, 24 nt, Artificial Sequence
  Synthetic
aauggacuuacaguuccacacagc

SEQ ID NO: 275317 - RNA, 18 nt, Artificial Sequence
  Synthetic
caccauaaccaccacagc

SEQ ID NO: 275318 - RNA, 19 nt, Artificial Sequence
  Synthetic
ucaccauaaccaccacagc

SEQ ID NO: 275319 - RNA, 20 nt, Artificial Sequence
  Synthetic
uucaccauaaccaccacagc

SEQ ID NO: 275320 - RNA, 21 nt, Artificial Sequence
  Synthetic
uuucaccauaaccaccacagc

SEQ ID NO: 275321 - RNA, 22 nt, Artificial Sequence
  Synthetic
cuuucaccauaaccaccacagc

SEQ ID NO: 275322 - RNA, 23 nt, Artificial Sequence
  Synthetic
ucuuucaccauaaccaccacagc

SEQ ID NO: 275323 - RNA, 24 nt, Artificial Sequence
  Synthetic
gucuuucaccauaaccaccacagc

SEQ ID NO: 275324 - RNA, 18 nt, Artificial Sequence
  Synthetic
gguaagaaagaccacagc

SEQ ID NO: 275325 - RNA, 19 nt, Artificial Sequence
  Synthetic
ugguaagaaagaccacagc

SEQ ID NO: 275326 - RNA, 20 nt, Artificial Sequence
  Synthetic
augguaagaaagaccacagc

SEQ ID NO: 275327 - RNA, 21 nt, Artificial Sequence
  Synthetic
uaugguaagaaagaccacagc

SEQ ID NO: 275328 - RNA, 22 nt, Artificial Sequence
  Synthetic
cuaugguaagaaagaccacagc

SEQ ID NO: 275329 - RNA, 23 nt, Artificial Sequence
  Synthetic
acuaugguaagaaagaccacagc

SEQ ID NO: 275330 - RNA, 24 nt, Artificial Sequence
  Synthetic
uacuaugguaagaaagaccacagc

SEQ ID NO: 275331 - RNA, 18 nt, Artificial Sequence
  Synthetic
guaugucuuuaucacagc

SEQ ID NO: 275332 - RNA, 19 nt, Artificial Sequence
  Synthetic
aguaugucuuuaucacagc

SEQ ID NO: 275333 - RNA, 20 nt, Artificial Sequence
  Synthetic
aaguaugucuuuaucacagc

SEQ ID NO: 275334 - RNA, 21 nt, Artificial Sequence
  Synthetic
caaguaugucuuuaucacagc

SEQ ID NO: 275335 - RNA, 22 nt, Artificial Sequence
  Synthetic
ucaaguaugucuuuaucacagc

SEQ ID NO: 275336 - RNA, 23 nt, Artificial Sequence
  Synthetic
cucaaguaugucuuuaucacagc

SEQ ID NO: 275337 - RNA, 24 nt, Artificial Sequence
  Synthetic
ucucaaguaugucuuuaucacagc

SEQ ID NO: 275338 - RNA, 18 nt, Artificial Sequence
  Synthetic
gacuaauccucucacagc

SEQ ID NO: 275339 - RNA, 19 nt, Artificial Sequence
  Synthetic
ugacuaauccucucacagc

SEQ ID NO: 275340 - RNA, 20 nt, Artificial Sequence
  Synthetic
gugacuaauccucucacagc

SEQ ID NO: 275341 - RNA, 21 nt, Artificial Sequence
  Synthetic
ugugacuaauccucucacagc

SEQ ID NO: 275342 - RNA, 22 nt, Artificial Sequence
  Synthetic
augugacuaauccucucacagc

SEQ ID NO: 275343 - RNA, 23 nt, Artificial Sequence
  Synthetic
gaugugacuaauccucucacagc

SEQ ID NO: 275344 - RNA, 24 nt, Artificial Sequence
  Synthetic
agaugugacuaauccucucacagc

SEQ ID NO: 275345 - RNA, 18 nt, Artificial Sequence
  Synthetic
ugacugguaugucacagc

SEQ ID NO: 275346 - RNA, 19 nt, Artificial Sequence
  Synthetic
uugacugguaugucacagc

SEQ ID NO: 275347 - RNA, 20 nt, Artificial Sequence
  Synthetic
guugacugguaugucacagc

SEQ ID NO: 275348 - RNA, 21 nt, Artificial Sequence
  Synthetic
aguugacugguaugucacagc

SEQ ID NO: 275349 - RNA, 22 nt, Artificial Sequence
  Synthetic
uaguugacugguaugucacagc

SEQ ID NO: 275350 - RNA, 23 nt, Artificial Sequence
  Synthetic
auaguugacugguaugucacagc

SEQ ID NO: 275351 - RNA, 24 nt, Artificial Sequence
  Synthetic
uauaguugacugguaugucacagc

SEQ ID NO: 275352 - RNA, 18 nt, Artificial Sequence
  Synthetic
aagagagaggaagacagc

SEQ ID NO: 275353 - RNA, 19 nt, Artificial Sequence
  Synthetic
aaagagagaggaagacagc

SEQ ID NO: 275354 - RNA, 20 nt, Artificial Sequence
  Synthetic
aaaagagagaggaagacagc

SEQ ID NO: 275355 - RNA, 21 nt, Artificial Sequence
  Synthetic
aaaaagagagaggaagacagc

SEQ ID NO: 275356 - RNA, 22 nt, Artificial Sequence
  Synthetic
gaaaaagagagaggaagacagc

SEQ ID NO: 275357 - RNA, 23 nt, Artificial Sequence
  Synthetic
ugaaaaagagagaggaagacagc

SEQ ID NO: 275358 - RNA, 24 nt, Artificial Sequence
  Synthetic
augaaaaagagagaggaagacagc

SEQ ID NO: 275359 - RNA, 18 nt, Artificial Sequence
  Synthetic
acucuaguuugggacagc

SEQ ID NO: 275360 - RNA, 19 nt, Artificial Sequence
  Synthetic
cacucuaguuugggacagc

SEQ ID NO: 275361 - RNA, 20 nt, Artificial Sequence
  Synthetic
acacucuaguuugggacagc

SEQ ID NO: 275362 - RNA, 21 nt, Artificial Sequence
  Synthetic
cacacucuaguuugggacagc

SEQ ID NO: 275363 - RNA, 22 nt, Artificial Sequence
  Synthetic
acacacucuaguuugggacagc

SEQ ID NO: 275364 - RNA, 23 nt, Artificial Sequence
  Synthetic
cacacacucuaguuugggacagc

SEQ ID NO: 275365 - RNA, 24 nt, Artificial Sequence
  Synthetic
gcacacacucuaguuugggacagc

SEQ ID NO: 275366 - RNA, 18 nt, Artificial Sequence
  Synthetic
uucuacuuuuuggacagc

SEQ ID NO: 275367 - RNA, 19 nt, Artificial Sequence
  Synthetic
uuucuacuuuuuggacagc

SEQ ID NO: 275368 - RNA, 20 nt, Artificial Sequence
  Synthetic
guuucuacuuuuuggacagc

SEQ ID NO: 275369 - RNA, 21 nt, Artificial Sequence
  Synthetic
aguuucuacuuuuuggacagc

SEQ ID NO: 275370 - RNA, 22 nt, Artificial Sequence
  Synthetic
aaguuucuacuuuuuggacagc

SEQ ID NO: 275371 - RNA, 23 nt, Artificial Sequence
  Synthetic
aaaguuucuacuuuuuggacagc

SEQ ID NO: 275372 - RNA, 24 nt, Artificial Sequence
  Synthetic
uaaaguuucuacuuuuuggacagc

SEQ ID NO: 275373 - RNA, 18 nt, Artificial Sequence
  Synthetic
augaaaaucuuugacagc

SEQ ID NO: 275374 - RNA, 19 nt, Artificial Sequence
  Synthetic
aaugaaaaucuuugacagc

SEQ ID NO: 275375 - RNA, 20 nt, Artificial Sequence
  Synthetic
caaugaaaaucuuugacagc

SEQ ID NO: 275376 - RNA, 21 nt, Artificial Sequence
  Synthetic
gcaaugaaaaucuuugacagc

SEQ ID NO: 275377 - RNA, 22 nt, Artificial Sequence
  Synthetic
ugcaaugaaaaucuuugacagc

SEQ ID NO: 275378 - RNA, 23 nt, Artificial Sequence
  Synthetic
cugcaaugaaaaucuuugacagc

SEQ ID NO: 275379 - RNA, 24 nt, Artificial Sequence
  Synthetic
ucugcaaugaaaaucuuugacagc

SEQ ID NO: 275380 - RNA, 18 nt, Artificial Sequence
  Synthetic
uugcugccugcauacagc

SEQ ID NO: 275381 - RNA, 19 nt, Artificial Sequence
  Synthetic
uuugcugccugcauacagc

SEQ ID NO: 275382 - RNA, 20 nt, Artificial Sequence
  Synthetic
auuugcugccugcauacagc

SEQ ID NO: 275383 - RNA, 21 nt, Artificial Sequence
  Synthetic
aauuugcugccugcauacagc

SEQ ID NO: 275384 - RNA, 22 nt, Artificial Sequence
  Synthetic
caauuugcugccugcauacagc

SEQ ID NO: 275385 - RNA, 23 nt, Artificial Sequence
  Synthetic
ucaauuugcugccugcauacagc

SEQ ID NO: 275386 - RNA, 24 nt, Artificial Sequence
  Synthetic
uucaauuugcugccugcauacagc

SEQ ID NO: 275387 - RNA, 18 nt, Artificial Sequence
  Synthetic
gccuugugaagauacagc

SEQ ID NO: 275388 - RNA, 19 nt, Artificial Sequence
  Synthetic
ugccuugugaagauacagc

SEQ ID NO: 275389 - RNA, 20 nt, Artificial Sequence
  Synthetic
cugccuugugaagauacagc

SEQ ID NO: 275390 - RNA, 21 nt, Artificial Sequence
  Synthetic
ucugccuugugaagauacagc

SEQ ID NO: 275391 - RNA, 22 nt, Artificial Sequence
  Synthetic
uucugccuugugaagauacagc

SEQ ID NO: 275392 - RNA, 23 nt, Artificial Sequence
  Synthetic
cuucugccuugugaagauacagc

SEQ ID NO: 275393 - RNA, 24 nt, Artificial Sequence
  Synthetic
ccuucugccuugugaagauacagc

SEQ ID NO: 275394 - RNA, 18 nt, Artificial Sequence
  Synthetic
gagagucuuugauacagc

SEQ ID NO: 275395 - RNA, 19 nt, Artificial Sequence
  Synthetic
ugagagucuuugauacagc

SEQ ID NO: 275396 - RNA, 20 nt, Artificial Sequence
  Synthetic
cugagagucuuugauacagc

SEQ ID NO: 275397 - RNA, 21 nt, Artificial Sequence
  Synthetic
ucugagagucuuugauacagc

SEQ ID NO: 275398 - RNA, 22 nt, Artificial Sequence
  Synthetic
cucugagagucuuugauacagc

SEQ ID NO: 275399 - RNA, 23 nt, Artificial Sequence
  Synthetic
ucucugagagucuuugauacagc

SEQ ID NO: 275400 - RNA, 24 nt, Artificial Sequence
  Synthetic
aucucugagagucuuugauacagc

SEQ ID NO: 275401 - RNA, 18 nt, Artificial Sequence
  Synthetic
uuuacuuuuaacuacagc

SEQ ID NO: 275402 - RNA, 19 nt, Artificial Sequence
  Synthetic
uuuuacuuuuaacuacagc

SEQ ID NO: 275403 - RNA, 20 nt, Artificial Sequence
  Synthetic
uuuuuacuuuuaacuacagc

SEQ ID NO: 275404 - RNA, 21 nt, Artificial Sequence
  Synthetic
auuuuuacuuuuaacuacagc

SEQ ID NO: 275405 - RNA, 22 nt, Artificial Sequence
  Synthetic
uauuuuuacuuuuaacuacagc

SEQ ID NO: 275406 - RNA, 23 nt, Artificial Sequence
  Synthetic
guauuuuuacuuuuaacuacagc

SEQ ID NO: 275407 - RNA, 24 nt, Artificial Sequence
  Synthetic
uguauuuuuacuuuuaacuacagc

SEQ ID NO: 275408 - RNA, 18 nt, Artificial Sequence
  Synthetic
acaccacugcacuacagc

SEQ ID NO: 275409 - RNA, 19 nt, Artificial Sequence
  Synthetic
cacaccacugcacuacagc

SEQ ID NO: 275410 - RNA, 20 nt, Artificial Sequence
  Synthetic
ucacaccacugcacuacagc

SEQ ID NO: 275411 - RNA, 21 nt, Artificial Sequence
  Synthetic
aucacaccacugcacuacagc

SEQ ID NO: 275412 - RNA, 22 nt, Artificial Sequence
  Synthetic
gaucacaccacugcacuacagc

SEQ ID NO: 275413 - RNA, 23 nt, Artificial Sequence
  Synthetic
ggaucacaccacugcacuacagc

SEQ ID NO: 275414 - RNA, 24 nt, Artificial Sequence
  Synthetic
gggaucacaccacugcacuacagc

SEQ ID NO: 275415 - RNA, 18 nt, Artificial Sequence
  Synthetic
gugccacugcacuacagc

SEQ ID NO: 275416 - RNA, 19 nt, Artificial Sequence
  Synthetic
ugugccacugcacuacagc

SEQ ID NO: 275417 - RNA, 20 nt, Artificial Sequence
  Synthetic
uugugccacugcacuacagc

SEQ ID NO: 275418 - RNA, 21 nt, Artificial Sequence
  Synthetic
auugugccacugcacuacagc

SEQ ID NO: 275419 - RNA, 22 nt, Artificial Sequence
  Synthetic
gauugugccacugcacuacagc

SEQ ID NO: 275420 - RNA, 23 nt, Artificial Sequence
  Synthetic
agauugugccacugcacuacagc

SEQ ID NO: 275421 - RNA, 24 nt, Artificial Sequence
  Synthetic
gagauugugccacugcacuacagc

SEQ ID NO: 275422 - RNA, 18 nt, Artificial Sequence
  Synthetic
gacccaauugccuacagc

SEQ ID NO: 275423 - RNA, 19 nt, Artificial Sequence
  Synthetic
ggacccaauugccuacagc

SEQ ID NO: 275424 - RNA, 20 nt, Artificial Sequence
  Synthetic
uggacccaauugccuacagc

SEQ ID NO: 275425 - RNA, 21 nt, Artificial Sequence
  Synthetic
guggacccaauugccuacagc

SEQ ID NO: 275426 - RNA, 22 nt, Artificial Sequence
  Synthetic
aguggacccaauugccuacagc

SEQ ID NO: 275427 - RNA, 23 nt, Artificial Sequence
  Synthetic
aaguggacccaauugccuacagc

SEQ ID NO: 275428 - RNA, 24 nt, Artificial Sequence
  Synthetic
uaaguggacccaauugccuacagc

SEQ ID NO: 275429 - RNA, 18 nt, Artificial Sequence
  Synthetic
uggaacauugaguacagc

SEQ ID NO: 275430 - RNA, 19 nt, Artificial Sequence
  Synthetic
cuggaacauugaguacagc

SEQ ID NO: 275431 - RNA, 20 nt, Artificial Sequence
  Synthetic
acuggaacauugaguacagc

SEQ ID NO: 275432 - RNA, 21 nt, Artificial Sequence
  Synthetic
gacuggaacauugaguacagc

SEQ ID NO: 275433 - RNA, 22 nt, Artificial Sequence
  Synthetic
agacuggaacauugaguacagc

SEQ ID NO: 275434 - RNA, 23 nt, Artificial Sequence
  Synthetic
gagacuggaacauugaguacagc

SEQ ID NO: 275435 - RNA, 24 nt, Artificial Sequence
  Synthetic
agagacuggaacauugaguacagc

SEQ ID NO: 275436 - RNA, 18 nt, Artificial Sequence
  Synthetic
uuuuaaguuaauuacagc

SEQ ID NO: 275437 - RNA, 19 nt, Artificial Sequence
  Synthetic
auuuuaaguuaauuacagc

SEQ ID NO: 275438 - RNA, 20 nt, Artificial Sequence
  Synthetic
aauuuuaaguuaauuacagc

SEQ ID NO: 275439 - RNA, 21 nt, Artificial Sequence
  Synthetic
aaauuuuaaguuaauuacagc

SEQ ID NO: 275440 - RNA, 22 nt, Artificial Sequence
  Synthetic
caaauuuuaaguuaauuacagc

SEQ ID NO: 275441 - RNA, 23 nt, Artificial Sequence
  Synthetic
acaaauuuuaaguuaauuacagc

SEQ ID NO: 275442 - RNA, 24 nt, Artificial Sequence
  Synthetic
uacaaauuuuaaguuaauuacagc

SEQ ID NO: 275443 - RNA, 18 nt, Artificial Sequence
  Synthetic
guuuccugucauuacagc

SEQ ID NO: 275444 - RNA, 19 nt, Artificial Sequence
  Synthetic
cguuuccugucauuacagc

SEQ ID NO: 275445 - RNA, 20 nt, Artificial Sequence
  Synthetic
acguuuccugucauuacagc

SEQ ID NO: 275446 - RNA, 21 nt, Artificial Sequence
  Synthetic
cacguuuccugucauuacagc

SEQ ID NO: 275447 - RNA, 22 nt, Artificial Sequence
  Synthetic
ccacguuuccugucauuacagc

SEQ ID NO: 275448 - RNA, 23 nt, Artificial Sequence
  Synthetic
accacguuuccugucauuacagc

SEQ ID NO: 275449 - RNA, 24 nt, Artificial Sequence
  Synthetic
gaccacguuuccugucauuacagc

SEQ ID NO: 275450 - RNA, 18 nt, Artificial Sequence
  Synthetic
aaguccugggauuacagc

SEQ ID NO: 275451 - RNA, 19 nt, Artificial Sequence
  Synthetic
aaaguccugggauuacagc

SEQ ID NO: 275452 - RNA, 20 nt, Artificial Sequence
  Synthetic
caaaguccugggauuacagc

SEQ ID NO: 275453 - RNA, 21 nt, Artificial Sequence
  Synthetic
ccaaaguccugggauuacagc

SEQ ID NO: 275454 - RNA, 22 nt, Artificial Sequence
  Synthetic
cccaaaguccugggauuacagc

SEQ ID NO: 275455 - RNA, 23 nt, Artificial Sequence
  Synthetic
ucccaaaguccugggauuacagc

SEQ ID NO: 275456 - RNA, 24 nt, Artificial Sequence
  Synthetic
cucccaaaguccugggauuacagc

SEQ ID NO: 275457 - RNA, 18 nt, Artificial Sequence
  Synthetic
acaggauuguuuuacagc

SEQ ID NO: 275458 - RNA, 19 nt, Artificial Sequence
  Synthetic
aacaggauuguuuuacagc

SEQ ID NO: 275459 - RNA, 20 nt, Artificial Sequence
  Synthetic
uaacaggauuguuuuacagc

SEQ ID NO: 275460 - RNA, 21 nt, Artificial Sequence
  Synthetic
auaacaggauuguuuuacagc

SEQ ID NO: 275461 - RNA, 22 nt, Artificial Sequence
  Synthetic
uauaacaggauuguuuuacagc

SEQ ID NO: 275462 - RNA, 23 nt, Artificial Sequence
  Synthetic
uuauaacaggauuguuuuacagc

SEQ ID NO: 275463 - RNA, 24 nt, Artificial Sequence
  Synthetic
uuuauaacaggauuguuuuacagc

SEQ ID NO: 275464 - RNA, 18 nt, Artificial Sequence
  Synthetic
caggaguucaaaaccagc

SEQ ID NO: 275465 - RNA, 19 nt, Artificial Sequence
  Synthetic
ccaggaguucaaaaccagc

SEQ ID NO: 275466 - RNA, 20 nt, Artificial Sequence
  Synthetic
cccaggaguucaaaaccagc

SEQ ID NO: 275467 - RNA, 21 nt, Artificial Sequence
  Synthetic
gcccaggaguucaaaaccagc

SEQ ID NO: 275468 - RNA, 22 nt, Artificial Sequence
  Synthetic
agcccaggaguucaaaaccagc

SEQ ID NO: 275469 - RNA, 23 nt, Artificial Sequence
  Synthetic
gagcccaggaguucaaaaccagc

SEQ ID NO: 275470 - RNA, 24 nt, Artificial Sequence
  Synthetic
ugagcccaggaguucaaaaccagc

SEQ ID NO: 275471 - RNA, 18 nt, Artificial Sequence
  Synthetic
gucaauauuccaaccagc

SEQ ID NO: 275472 - RNA, 19 nt, Artificial Sequence
  Synthetic
agucaauauuccaaccagc

SEQ ID NO: 275473 - RNA, 20 nt, Artificial Sequence
  Synthetic
uagucaauauuccaaccagc

SEQ ID NO: 275474 - RNA, 21 nt, Artificial Sequence
  Synthetic
guagucaauauuccaaccagc

SEQ ID NO: 275475 - RNA, 22 nt, Artificial Sequence
  Synthetic
aguagucaauauuccaaccagc

SEQ ID NO: 275476 - RNA, 23 nt, Artificial Sequence
  Synthetic
uaguagucaauauuccaaccagc

SEQ ID NO: 275477 - RNA, 24 nt, Artificial Sequence
  Synthetic
uuaguagucaauauuccaaccagc

SEQ ID NO: 275478 - RNA, 18 nt, Artificial Sequence
  Synthetic
uccagcaggcuaaccagc

SEQ ID NO: 275479 - RNA, 19 nt, Artificial Sequence
  Synthetic
cuccagcaggcuaaccagc

SEQ ID NO: 275480 - RNA, 20 nt, Artificial Sequence
  Synthetic
ccuccagcaggcuaaccagc

SEQ ID NO: 275481 - RNA, 21 nt, Artificial Sequence
  Synthetic
cccuccagcaggcuaaccagc

SEQ ID NO: 275482 - RNA, 22 nt, Artificial Sequence
  Synthetic
ucccuccagcaggcuaaccagc

SEQ ID NO: 275483 - RNA, 23 nt, Artificial Sequence
  Synthetic
aucccuccagcaggcuaaccagc

SEQ ID NO: 275484 - RNA, 24 nt, Artificial Sequence
  Synthetic
caucccuccagcaggcuaaccagc

SEQ ID NO: 275485 - RNA, 18 nt, Artificial Sequence
  Synthetic
aaaauauggaacaccagc

SEQ ID NO: 275486 - RNA, 19 nt, Artificial Sequence
  Synthetic
gaaaauauggaacaccagc

SEQ ID NO: 275487 - RNA, 20 nt, Artificial Sequence
  Synthetic
ugaaaauauggaacaccagc

SEQ ID NO: 275488 - RNA, 21 nt, Artificial Sequence
  Synthetic
uugaaaauauggaacaccagc

SEQ ID NO: 275489 - RNA, 22 nt, Artificial Sequence
  Synthetic
uuugaaaauauggaacaccagc

SEQ ID NO: 275490 - RNA, 23 nt, Artificial Sequence
  Synthetic
cuuugaaaauauggaacaccagc

SEQ ID NO: 275491 - RNA, 24 nt, Artificial Sequence
  Synthetic
gcuuugaaaauauggaacaccagc

SEQ ID NO: 275492 - RNA, 18 nt, Artificial Sequence
  Synthetic
ugucuuaaagacaccagc

SEQ ID NO: 275493 - RNA, 19 nt, Artificial Sequence
  Synthetic
gugucuuaaagacaccagc

SEQ ID NO: 275494 - RNA, 20 nt, Artificial Sequence
  Synthetic
ugugucuuaaagacaccagc

SEQ ID NO: 275495 - RNA, 21 nt, Artificial Sequence
  Synthetic
uugugucuuaaagacaccagc

SEQ ID NO: 275496 - RNA, 22 nt, Artificial Sequence
  Synthetic
uuugugucuuaaagacaccagc

SEQ ID NO: 275497 - RNA, 23 nt, Artificial Sequence
  Synthetic
auuugugucuuaaagacaccagc

SEQ ID NO: 275498 - RNA, 24 nt, Artificial Sequence
  Synthetic
aauuugugucuuaaagacaccagc

SEQ ID NO: 275499 - RNA, 18 nt, Artificial Sequence
  Synthetic
caggaguucaagaccagc

SEQ ID NO: 275500 - RNA, 20 nt, Artificial Sequence
  Synthetic
gccaggaguucaagaccagc

SEQ ID NO: 275501 - RNA, 21 nt, Artificial Sequence
  Synthetic
ggccaggaguucaagaccagc

SEQ ID NO: 275502 - RNA, 22 nt, Artificial Sequence
  Synthetic
aggccaggaguucaagaccagc

SEQ ID NO: 275503 - RNA, 23 nt, Artificial Sequence
  Synthetic
gaggccaggaguucaagaccagc

SEQ ID NO: 275504 - RNA, 24 nt, Artificial Sequence
  Synthetic
ugaggccaggaguucaagaccagc

SEQ ID NO: 275505 - RNA, 19 nt, Artificial Sequence
  Synthetic
ucaggaguucaagaccagc

SEQ ID NO: 275506 - RNA, 20 nt, Artificial Sequence
  Synthetic
cucaggaguucaagaccagc

SEQ ID NO: 275507 - RNA, 21 nt, Artificial Sequence
  Synthetic
gcucaggaguucaagaccagc

SEQ ID NO: 275508 - RNA, 22 nt, Artificial Sequence
  Synthetic
agcucaggaguucaagaccagc

SEQ ID NO: 275509 - RNA, 23 nt, Artificial Sequence
  Synthetic
gagcucaggaguucaagaccagc

SEQ ID NO: 275510 - RNA, 24 nt, Artificial Sequence
  Synthetic
ugagcucaggaguucaagaccagc

SEQ ID NO: 275511 - RNA, 18 nt, Artificial Sequence
  Synthetic
caggaguuuaagaccagc

SEQ ID NO: 275512 - RNA, 19 nt, Artificial Sequence
  Synthetic
ucaggaguuuaagaccagc

SEQ ID NO: 275513 - RNA, 20 nt, Artificial Sequence
  Synthetic
cucaggaguuuaagaccagc

SEQ ID NO: 275514 - RNA, 21 nt, Artificial Sequence
  Synthetic
gcucaggaguuuaagaccagc

SEQ ID NO: 275515 - RNA, 22 nt, Artificial Sequence
  Synthetic
agcucaggaguuuaagaccagc

SEQ ID NO: 275516 - RNA, 23 nt, Artificial Sequence
  Synthetic
gagcucaggaguuuaagaccagc

SEQ ID NO: 275517 - RNA, 24 nt, Artificial Sequence
  Synthetic
ugagcucaggaguuuaagaccagc

SEQ ID NO: 275518 - RNA, 18 nt, Artificial Sequence
  Synthetic
caagaguuugagaccagc

SEQ ID NO: 275519 - RNA, 19 nt, Artificial Sequence
  Synthetic
ccaagaguuugagaccagc

SEQ ID NO: 275520 - RNA, 20 nt, Artificial Sequence
  Synthetic
gccaagaguuugagaccagc

SEQ ID NO: 275521 - RNA, 21 nt, Artificial Sequence
  Synthetic
ggccaagaguuugagaccagc

SEQ ID NO: 275522 - RNA, 22 nt, Artificial Sequence
  Synthetic
aggccaagaguuugagaccagc

SEQ ID NO: 275523 - RNA, 23 nt, Artificial Sequence
  Synthetic
gaggccaagaguuugagaccagc

SEQ ID NO: 275524 - RNA, 24 nt, Artificial Sequence
  Synthetic
agaggccaagaguuugagaccagc

SEQ ID NO: 275525 - RNA, 18 nt, Artificial Sequence
  Synthetic
caggaguuugagaccagc

SEQ ID NO: 275526 - RNA, 19 nt, Artificial Sequence
  Synthetic
ccaggaguuugagaccagc

SEQ ID NO: 275527 - RNA, 20 nt, Artificial Sequence
  Synthetic
cccaggaguuugagaccagc

SEQ ID NO: 275528 - RNA, 21 nt, Artificial Sequence
  Synthetic
gcccaggaguuugagaccagc

SEQ ID NO: 275529 - RNA, 22 nt, Artificial Sequence
  Synthetic
agcccaggaguuugagaccagc

SEQ ID NO: 275530 - RNA, 23 nt, Artificial Sequence
  Synthetic
gagcccaggaguuugagaccagc

SEQ ID NO: 275531 - RNA, 24 nt, Artificial Sequence
  Synthetic
ugagcccaggaguuugagaccagc

SEQ ID NO: 275532 - RNA, 20 nt, Artificial Sequence
  Synthetic
uccaggaguuugagaccagc

SEQ ID NO: 275533 - RNA, 21 nt, Artificial Sequence
  Synthetic
guccaggaguuugagaccagc

SEQ ID NO: 275534 - RNA, 22 nt, Artificial Sequence
  Synthetic
aguccaggaguuugagaccagc

SEQ ID NO: 275535 - RNA, 23 nt, Artificial Sequence
  Synthetic
gaguccaggaguuugagaccagc

SEQ ID NO: 275536 - RNA, 24 nt, Artificial Sequence
  Synthetic
ggaguccaggaguuugagaccagc

SEQ ID NO: 275537 - RNA, 18 nt, Artificial Sequence
  Synthetic
cagauccagcaacccagc

SEQ ID NO: 275538 - RNA, 19 nt, Artificial Sequence
  Synthetic
acagauccagcaacccagc

SEQ ID NO: 275539 - RNA, 20 nt, Artificial Sequence
  Synthetic
cacagauccagcaacccagc

SEQ ID NO: 275540 - RNA, 21 nt, Artificial Sequence
  Synthetic
acacagauccagcaacccagc

SEQ ID NO: 275541 - RNA, 22 nt, Artificial Sequence
  Synthetic
uacacagauccagcaacccagc

SEQ ID NO: 275542 - RNA, 23 nt, Artificial Sequence
  Synthetic
auacacagauccagcaacccagc

SEQ ID NO: 275543 - RNA, 24 nt, Artificial Sequence
  Synthetic
aauacacagauccagcaacccagc

SEQ ID NO: 275544 - RNA, 18 nt, Artificial Sequence
  Synthetic
cagucuggaaaagccagc

SEQ ID NO: 275545 - RNA, 19 nt, Artificial Sequence
  Synthetic
ucagucuggaaaagccagc

SEQ ID NO: 275546 - RNA, 20 nt, Artificial Sequence
  Synthetic
cucagucuggaaaagccagc

SEQ ID NO: 275547 - RNA, 21 nt, Artificial Sequence
  Synthetic
ccucagucuggaaaagccagc

SEQ ID NO: 275548 - RNA, 22 nt, Artificial Sequence
  Synthetic
accucagucuggaaaagccagc

SEQ ID NO: 275549 - RNA, 23 nt, Artificial Sequence
  Synthetic
gaccucagucuggaaaagccagc

SEQ ID NO: 275550 - RNA, 24 nt, Artificial Sequence
  Synthetic
ugaccucagucuggaaaagccagc

SEQ ID NO: 275551 - RNA, 18 nt, Artificial Sequence
  Synthetic
gaaaggauuuccgccagc

SEQ ID NO: 275552 - RNA, 19 nt, Artificial Sequence
  Synthetic
ggaaaggauuuccgccagc

SEQ ID NO: 275553 - RNA, 20 nt, Artificial Sequence
  Synthetic
gggaaaggauuuccgccagc

SEQ ID NO: 275554 - RNA, 21 nt, Artificial Sequence
  Synthetic
cgggaaaggauuuccgccagc

SEQ ID NO: 275555 - RNA, 22 nt, Artificial Sequence
  Synthetic
acgggaaaggauuuccgccagc

SEQ ID NO: 275556 - RNA, 23 nt, Artificial Sequence
  Synthetic
cacgggaaaggauuuccgccagc

SEQ ID NO: 275557 - RNA, 24 nt, Artificial Sequence
  Synthetic
acacgggaaaggauuuccgccagc

SEQ ID NO: 275558 - RNA, 18 nt, Artificial Sequence
  Synthetic
aagucaccuaaggccagc

SEQ ID NO: 275559 - RNA, 19 nt, Artificial Sequence
  Synthetic
gaagucaccuaaggccagc

SEQ ID NO: 275560 - RNA, 20 nt, Artificial Sequence
  Synthetic
agaagucaccuaaggccagc

SEQ ID NO: 275561 - RNA, 21 nt, Artificial Sequence
  Synthetic
gagaagucaccuaaggccagc

SEQ ID NO: 275562 - RNA, 22 nt, Artificial Sequence
  Synthetic
ggagaagucaccuaaggccagc

SEQ ID NO: 275563 - RNA, 23 nt, Artificial Sequence
  Synthetic
aggagaagucaccuaaggccagc

SEQ ID NO: 275564 - RNA, 24 nt, Artificial Sequence
  Synthetic
gaggagaagucaccuaaggccagc

SEQ ID NO: 275565 - RNA, 18 nt, Artificial Sequence
  Synthetic
ccugcugcucaggccagc

SEQ ID NO: 275566 - RNA, 19 nt, Artificial Sequence
  Synthetic
accugcugcucaggccagc

SEQ ID NO: 275567 - RNA, 20 nt, Artificial Sequence
  Synthetic
caccugcugcucaggccagc

SEQ ID NO: 275568 - RNA, 21 nt, Artificial Sequence
  Synthetic
gcaccugcugcucaggccagc

SEQ ID NO: 275569 - RNA, 22 nt, Artificial Sequence
  Synthetic
agcaccugcugcucaggccagc

SEQ ID NO: 275570 - RNA, 23 nt, Artificial Sequence
  Synthetic
cagcaccugcugcucaggccagc

SEQ ID NO: 275571 - RNA, 24 nt, Artificial Sequence
  Synthetic
ccagcaccugcugcucaggccagc

SEQ ID NO: 275572 - RNA, 18 nt, Artificial Sequence
  Synthetic
guagugggucaggccagc

SEQ ID NO: 275573 - RNA, 19 nt, Artificial Sequence
  Synthetic
gguagugggucaggccagc

SEQ ID NO: 275574 - RNA, 20 nt, Artificial Sequence
  Synthetic
cgguagugggucaggccagc

SEQ ID NO: 275575 - RNA, 21 nt, Artificial Sequence
  Synthetic
gcgguagugggucaggccagc

SEQ ID NO: 275576 - RNA, 22 nt, Artificial Sequence
  Synthetic
agcgguagugggucaggccagc

SEQ ID NO: 275577 - RNA, 23 nt, Artificial Sequence
  Synthetic
aagcgguagugggucaggccagc

SEQ ID NO: 275578 - RNA, 24 nt, Artificial Sequence
  Synthetic
aaagcgguagugggucaggccagc

SEQ ID NO: 275579 - RNA, 18 nt, Artificial Sequence
  Synthetic
ucuucucuucuggccagc

SEQ ID NO: 275580 - RNA, 19 nt, Artificial Sequence
  Synthetic
cucuucucuucuggccagc

SEQ ID NO: 275581 - RNA, 20 nt, Artificial Sequence
  Synthetic
ucucuucucuucuggccagc

SEQ ID NO: 275582 - RNA, 21 nt, Artificial Sequence
  Synthetic
cucucuucucuucuggccagc

SEQ ID NO: 275583 - RNA, 22 nt, Artificial Sequence
  Synthetic
gcucucuucucuucuggccagc

SEQ ID NO: 275584 - RNA, 23 nt, Artificial Sequence
  Synthetic
ugcucucuucucuucuggccagc

SEQ ID NO: 275585 - RNA, 24 nt, Artificial Sequence
  Synthetic
uugcucucuucucuucuggccagc

SEQ ID NO: 275586 - RNA, 18 nt, Artificial Sequence
  Synthetic
uguuuuuuaacauccagc

SEQ ID NO: 275587 - RNA, 19 nt, Artificial Sequence
  Synthetic
guguuuuuuaacauccagc

SEQ ID NO: 275588 - RNA, 20 nt, Artificial Sequence
  Synthetic
aguguuuuuuaacauccagc

SEQ ID NO: 275589 - RNA, 21 nt, Artificial Sequence
  Synthetic
gaguguuuuuuaacauccagc

SEQ ID NO: 275590 - RNA, 22 nt, Artificial Sequence
  Synthetic
ugaguguuuuuuaacauccagc

SEQ ID NO: 275591 - RNA, 23 nt, Artificial Sequence
  Synthetic
augaguguuuuuuaacauccagc

SEQ ID NO: 275592 - RNA, 24 nt, Artificial Sequence
  Synthetic
uaugaguguuuuuuaacauccagc

SEQ ID NO: 275593 - RNA, 18 nt, Artificial Sequence
  Synthetic
cugccacuccacuccagc

SEQ ID NO: 275594 - RNA, 19 nt, Artificial Sequence
  Synthetic
ccugccacuccacuccagc

SEQ ID NO: 275595 - RNA, 20 nt, Artificial Sequence
  Synthetic
uccugccacuccacuccagc

SEQ ID NO: 275596 - RNA, 21 nt, Artificial Sequence
  Synthetic
auccugccacuccacuccagc

SEQ ID NO: 275597 - RNA, 22 nt, Artificial Sequence
  Synthetic
gauccugccacuccacuccagc

SEQ ID NO: 275598 - RNA, 23 nt, Artificial Sequence
  Synthetic
agauccugccacuccacuccagc

SEQ ID NO: 275599 - RNA, 24 nt, Artificial Sequence
  Synthetic
gagauccugccacuccacuccagc

SEQ ID NO: 275600 - RNA, 18 nt, Artificial Sequence
  Synthetic
acaccacugcacuccagc

SEQ ID NO: 275601 - RNA, 19 nt, Artificial Sequence
  Synthetic
cacaccacugcacuccagc

SEQ ID NO: 275602 - RNA, 20 nt, Artificial Sequence
  Synthetic
ucacaccacugcacuccagc

SEQ ID NO: 275603 - RNA, 21 nt, Artificial Sequence
  Synthetic
aucacaccacugcacuccagc

SEQ ID NO: 275604 - RNA, 22 nt, Artificial Sequence
  Synthetic
gaucacaccacugcacuccagc

SEQ ID NO: 275605 - RNA, 23 nt, Artificial Sequence
  Synthetic
agaucacaccacugcacuccagc

SEQ ID NO: 275606 - RNA, 24 nt, Artificial Sequence
  Synthetic
gagaucacaccacugcacuccagc

SEQ ID NO: 275607 - RNA, 18 nt, Artificial Sequence
  Synthetic
ucaccacugcacuccagc

SEQ ID NO: 275608 - RNA, 19 nt, Artificial Sequence
  Synthetic
cucaccacugcacuccagc

SEQ ID NO: 275609 - RNA, 20 nt, Artificial Sequence
  Synthetic
ucucaccacugcacuccagc

SEQ ID NO: 275610 - RNA, 21 nt, Artificial Sequence
  Synthetic
gucucaccacugcacuccagc

SEQ ID NO: 275611 - RNA, 22 nt, Artificial Sequence
  Synthetic
ggucucaccacugcacuccagc

SEQ ID NO: 275612 - RNA, 23 nt, Artificial Sequence
  Synthetic
uggucucaccacugcacuccagc

SEQ ID NO: 275613 - RNA, 24 nt, Artificial Sequence
  Synthetic
guggucucaccacugcacuccagc

SEQ ID NO: 275614 - RNA, 18 nt, Artificial Sequence
  Synthetic
aagccacugcacuccagc

SEQ ID NO: 275615 - RNA, 19 nt, Artificial Sequence
  Synthetic
caagccacugcacuccagc

SEQ ID NO: 275616 - RNA, 20 nt, Artificial Sequence
  Synthetic
ucaagccacugcacuccagc

SEQ ID NO: 275617 - RNA, 21 nt, Artificial Sequence
  Synthetic
aucaagccacugcacuccagc

SEQ ID NO: 275618 - RNA, 22 nt, Artificial Sequence
  Synthetic
gaucaagccacugcacuccagc

SEQ ID NO: 275619 - RNA, 23 nt, Artificial Sequence
  Synthetic
agaucaagccacugcacuccagc

SEQ ID NO: 275620 - RNA, 24 nt, Artificial Sequence
  Synthetic
gagaucaagccacugcacuccagc

SEQ ID NO: 275621 - RNA, 18 nt, Artificial Sequence
  Synthetic
gcgccacugcacuccagc

SEQ ID NO: 275622 - RNA, 19 nt, Artificial Sequence
  Synthetic
cgcgccacugcacuccagc

SEQ ID NO: 275623 - RNA, 20 nt, Artificial Sequence
  Synthetic
ucgcgccacugcacuccagc

SEQ ID NO: 275624 - RNA, 19 nt, Artificial Sequence
  Synthetic
ugcgccacugcacuccagc

SEQ ID NO: 275625 - RNA, 20 nt, Artificial Sequence
  Synthetic
uugcgccacugcacuccagc

SEQ ID NO: 275626 - RNA, 21 nt, Artificial Sequence
  Synthetic
auugcgccacugcacuccagc

SEQ ID NO: 275627 - RNA, 22 nt, Artificial Sequence
  Synthetic
gauugcgccacugcacuccagc

SEQ ID NO: 275628 - RNA, 23 nt, Artificial Sequence
  Synthetic
agauugcgccacugcacuccagc

SEQ ID NO: 275629 - RNA, 24 nt, Artificial Sequence
  Synthetic
gagauugcgccacugcacuccagc

SEQ ID NO: 275630 - RNA, 18 nt, Artificial Sequence
  Synthetic
aggccacugcacuccagc

SEQ ID NO: 275631 - RNA, 19 nt, Artificial Sequence
  Synthetic
caggccacugcacuccagc

SEQ ID NO: 275632 - RNA, 20 nt, Artificial Sequence
  Synthetic
ucaggccacugcacuccagc

SEQ ID NO: 275633 - RNA, 21 nt, Artificial Sequence
  Synthetic
gucaggccacugcacuccagc

SEQ ID NO: 275634 - RNA, 22 nt, Artificial Sequence
  Synthetic
ggucaggccacugcacuccagc

SEQ ID NO: 275635 - RNA, 23 nt, Artificial Sequence
  Synthetic
aggucaggccacugcacuccagc

SEQ ID NO: 275636 - RNA, 24 nt, Artificial Sequence
  Synthetic
gaggucaggccacugcacuccagc

SEQ ID NO: 275637 - RNA, 18 nt, Artificial Sequence
  Synthetic
augccacugcacuccagc

SEQ ID NO: 275638 - RNA, 19 nt, Artificial Sequence
  Synthetic
caugccacugcacuccagc

SEQ ID NO: 275639 - RNA, 20 nt, Artificial Sequence
  Synthetic
ucaugccacugcacuccagc

SEQ ID NO: 275640 - RNA, 21 nt, Artificial Sequence
  Synthetic
aucaugccacugcacuccagc

SEQ ID NO: 275641 - RNA, 22 nt, Artificial Sequence
  Synthetic
gaucaugccacugcacuccagc

SEQ ID NO: 275642 - RNA, 23 nt, Artificial Sequence
  Synthetic
agaucaugccacugcacuccagc

SEQ ID NO: 275643 - RNA, 24 nt, Artificial Sequence
  Synthetic
gagaucaugccacugcacuccagc

SEQ ID NO: 275644 - RNA, 18 nt, Artificial Sequence
  Synthetic
gagucacugcacuccagc

SEQ ID NO: 275645 - RNA, 19 nt, Artificial Sequence
  Synthetic
cgagucacugcacuccagc

SEQ ID NO: 275646 - RNA, 20 nt, Artificial Sequence
  Synthetic
ucgagucacugcacuccagc

SEQ ID NO: 275647 - RNA, 21 nt, Artificial Sequence
  Synthetic
aucgagucacugcacuccagc

SEQ ID NO: 275648 - RNA, 22 nt, Artificial Sequence
  Synthetic
gaucgagucacugcacuccagc

SEQ ID NO: 275649 - RNA, 23 nt, Artificial Sequence
  Synthetic
agaucgagucacugcacuccagc

SEQ ID NO: 275650 - RNA, 24 nt, Artificial Sequence
  Synthetic
gagaucgagucacugcacuccagc

SEQ ID NO: 275651 - RNA, 18 nt, Artificial Sequence
  Synthetic
aggcuacugcacuccagc

SEQ ID NO: 275652 - RNA, 19 nt, Artificial Sequence
  Synthetic
gaggcuacugcacuccagc

SEQ ID NO: 275653 - RNA, 20 nt, Artificial Sequence
  Synthetic
ggaggcuacugcacuccagc

SEQ ID NO: 275654 - RNA, 21 nt, Artificial Sequence
  Synthetic
gggaggcuacugcacuccagc

SEQ ID NO: 275655 - RNA, 22 nt, Artificial Sequence
  Synthetic
cgggaggcuacugcacuccagc

SEQ ID NO: 275656 - RNA, 23 nt, Artificial Sequence
  Synthetic
ucgggaggcuacugcacuccagc

SEQ ID NO: 275657 - RNA, 24 nt, Artificial Sequence
  Synthetic
cucgggaggcuacugcacuccagc

SEQ ID NO: 275658 - RNA, 18 nt, Artificial Sequence
  Synthetic
acaccgcugcacuccagc

SEQ ID NO: 275659 - RNA, 19 nt, Artificial Sequence
  Synthetic
cacaccgcugcacuccagc

SEQ ID NO: 275660 - RNA, 20 nt, Artificial Sequence
  Synthetic
ucacaccgcugcacuccagc

SEQ ID NO: 275661 - RNA, 21 nt, Artificial Sequence
  Synthetic
aucacaccgcugcacuccagc

SEQ ID NO: 275662 - RNA, 22 nt, Artificial Sequence
  Synthetic
gaucacaccgcugcacuccagc

SEQ ID NO: 275663 - RNA, 23 nt, Artificial Sequence
  Synthetic
ugaucacaccgcugcacuccagc

SEQ ID NO: 275664 - RNA, 24 nt, Artificial Sequence
  Synthetic
gugaucacaccgcugcacuccagc

SEQ ID NO: 275665 - RNA, 18 nt, Artificial Sequence
  Synthetic
gcacugcugcacuccagc

SEQ ID NO: 275666 - RNA, 19 nt, Artificial Sequence
  Synthetic
cgcacugcugcacuccagc

SEQ ID NO: 275667 - RNA, 20 nt, Artificial Sequence
  Synthetic
ucgcacugcugcacuccagc

SEQ ID NO: 275668 - RNA, 21 nt, Artificial Sequence
  Synthetic
aucgcacugcugcacuccagc

SEQ ID NO: 275669 - RNA, 22 nt, Artificial Sequence
  Synthetic
gaucgcacugcugcacuccagc

SEQ ID NO: 275670 - RNA, 23 nt, Artificial Sequence
  Synthetic
ugaucgcacugcugcacuccagc

SEQ ID NO: 275671 - RNA, 24 nt, Artificial Sequence
  Synthetic
augaucgcacugcugcacuccagc

SEQ ID NO: 275672 - RNA, 21 nt, Artificial Sequence
  Synthetic
aucacaccauugcacuccagc

SEQ ID NO: 275673 - RNA, 22 nt, Artificial Sequence
  Synthetic
gaucacaccauugcacuccagc

SEQ ID NO: 275674 - RNA, 23 nt, Artificial Sequence
  Synthetic
agaucacaccauugcacuccagc

SEQ ID NO: 275675 - RNA, 24 nt, Artificial Sequence
  Synthetic
aagaucacaccauugcacuccagc

SEQ ID NO: 275676 - RNA, 24 nt, Artificial Sequence
  Synthetic
gagaucacaccauugcacuccagc

SEQ ID NO: 275677 - RNA, 18 nt, Artificial Sequence
  Synthetic
gcaccauugcacuccagc

SEQ ID NO: 275678 - RNA, 19 nt, Artificial Sequence
  Synthetic
cgcaccauugcacuccagc

SEQ ID NO: 275679 - RNA, 20 nt, Artificial Sequence
  Synthetic
ucgcaccauugcacuccagc

SEQ ID NO: 275680 - RNA, 24 nt, Artificial Sequence
  Synthetic
cagaucgcaccauugcacuccagc

SEQ ID NO: 275681 - RNA, 18 nt, Artificial Sequence
  Synthetic
uggccauugcacuccagc

SEQ ID NO: 275682 - RNA, 19 nt, Artificial Sequence
  Synthetic
cuggccauugcacuccagc

SEQ ID NO: 275683 - RNA, 20 nt, Artificial Sequence
  Synthetic
ucuggccauugcacuccagc

SEQ ID NO: 275684 - RNA, 21 nt, Artificial Sequence
  Synthetic
aucuggccauugcacuccagc

SEQ ID NO: 275685 - RNA, 22 nt, Artificial Sequence
  Synthetic
gaucuggccauugcacuccagc

SEQ ID NO: 275686 - RNA, 23 nt, Artificial Sequence
  Synthetic
agaucuggccauugcacuccagc

SEQ ID NO: 275687 - RNA, 24 nt, Artificial Sequence
  Synthetic
aagaucuggccauugcacuccagc

SEQ ID NO: 275688 - RNA, 18 nt, Artificial Sequence
  Synthetic
gugccauugcacuccagc

SEQ ID NO: 275689 - RNA, 19 nt, Artificial Sequence
  Synthetic
cgugccauugcacuccagc

SEQ ID NO: 275690 - RNA, 20 nt, Artificial Sequence
  Synthetic
ucgugccauugcacuccagc

SEQ ID NO: 275691 - RNA, 18 nt, Artificial Sequence
  Synthetic
gcgcuguugcacuccagc

SEQ ID NO: 275692 - RNA, 19 nt, Artificial Sequence
  Synthetic
cgcgcuguugcacuccagc

SEQ ID NO: 275693 - RNA, 20 nt, Artificial Sequence
  Synthetic
ucgcgcuguugcacuccagc

SEQ ID NO: 275694 - RNA, 21 nt, Artificial Sequence
  Synthetic
aucgcgcuguugcacuccagc

SEQ ID NO: 275695 - RNA, 22 nt, Artificial Sequence
  Synthetic
gaucgcgcuguugcacuccagc

SEQ ID NO: 275696 - RNA, 23 nt, Artificial Sequence
  Synthetic
agaucgcgcuguugcacuccagc

SEQ ID NO: 275697 - RNA, 24 nt, Artificial Sequence
  Synthetic
gagaucgcgcuguugcacuccagc

SEQ ID NO: 275698 - RNA, 18 nt, Artificial Sequence
  Synthetic
gcaccauuguacuccagc

SEQ ID NO: 275699 - RNA, 19 nt, Artificial Sequence
  Synthetic
cgcaccauuguacuccagc

SEQ ID NO: 275700 - RNA, 20 nt, Artificial Sequence
  Synthetic
ucgcaccauuguacuccagc

SEQ ID NO: 275701 - RNA, 21 nt, Artificial Sequence
  Synthetic
aucgcaccauuguacuccagc

SEQ ID NO: 275702 - RNA, 22 nt, Artificial Sequence
  Synthetic
gaucgcaccauuguacuccagc

SEQ ID NO: 275703 - RNA, 23 nt, Artificial Sequence
  Synthetic
agaucgcaccauuguacuccagc

SEQ ID NO: 275704 - RNA, 24 nt, Artificial Sequence
  Synthetic
aagaucgcaccauuguacuccagc

SEQ ID NO: 275705 - RNA, 18 nt, Artificial Sequence
  Synthetic
gugccauuguacuccagc

SEQ ID NO: 275706 - RNA, 19 nt, Artificial Sequence
  Synthetic
cgugccauuguacuccagc

SEQ ID NO: 275707 - RNA, 20 nt, Artificial Sequence
  Synthetic
ucgugccauuguacuccagc

SEQ ID NO: 275708 - RNA, 21 nt, Artificial Sequence
  Synthetic
aucgugccauuguacuccagc

SEQ ID NO: 275709 - RNA, 22 nt, Artificial Sequence
  Synthetic
gaucgugccauuguacuccagc

SEQ ID NO: 275710 - RNA, 23 nt, Artificial Sequence
  Synthetic
agaucgugccauuguacuccagc

SEQ ID NO: 275711 - RNA, 24 nt, Artificial Sequence
  Synthetic
gagaucgugccauuguacuccagc

SEQ ID NO: 275712 - RNA, 18 nt, Artificial Sequence
  Synthetic
augccacugcccuccagc

SEQ ID NO: 275713 - RNA, 19 nt, Artificial Sequence
  Synthetic
caugccacugcccuccagc

SEQ ID NO: 275714 - RNA, 20 nt, Artificial Sequence
  Synthetic
ucaugccacugcccuccagc

SEQ ID NO: 275715 - RNA, 21 nt, Artificial Sequence
  Synthetic
aucaugccacugcccuccagc

SEQ ID NO: 275716 - RNA, 22 nt, Artificial Sequence
  Synthetic
gaucaugccacugcccuccagc

SEQ ID NO: 275717 - RNA, 23 nt, Artificial Sequence
  Synthetic
agaucaugccacugcccuccagc

SEQ ID NO: 275718 - RNA, 24 nt, Artificial Sequence
  Synthetic
aagaucaugccacugcccuccagc

SEQ ID NO: 275719 - RNA, 18 nt, Artificial Sequence
  Synthetic
gugccauugcgcuccagc

SEQ ID NO: 275720 - RNA, 19 nt, Artificial Sequence
  Synthetic
ugugccauugcgcuccagc

SEQ ID NO: 275721 - RNA, 20 nt, Artificial Sequence
  Synthetic
uugugccauugcgcuccagc

SEQ ID NO: 275722 - RNA, 21 nt, Artificial Sequence
  Synthetic
auugugccauugcgcuccagc

SEQ ID NO: 275723 - RNA, 22 nt, Artificial Sequence
  Synthetic
gauugugccauugcgcuccagc

SEQ ID NO: 275724 - RNA, 23 nt, Artificial Sequence
  Synthetic
agauugugccauugcgcuccagc

SEQ ID NO: 275725 - RNA, 24 nt, Artificial Sequence
  Synthetic
aagauugugccauugcgcuccagc

SEQ ID NO: 275726 - RNA, 18 nt, Artificial Sequence
  Synthetic
ucacaacuccucuccagc

SEQ ID NO: 275727 - RNA, 19 nt, Artificial Sequence
  Synthetic
aucacaacuccucuccagc

SEQ ID NO: 275728 - RNA, 20 nt, Artificial Sequence
  Synthetic
gaucacaacuccucuccagc

SEQ ID NO: 275729 - RNA, 21 nt, Artificial Sequence
  Synthetic
ugaucacaacuccucuccagc

SEQ ID NO: 275730 - RNA, 22 nt, Artificial Sequence
  Synthetic
augaucacaacuccucuccagc

SEQ ID NO: 275731 - RNA, 23 nt, Artificial Sequence
  Synthetic
aaugaucacaacuccucuccagc

SEQ ID NO: 275732 - RNA, 24 nt, Artificial Sequence
  Synthetic
aaaugaucacaacuccucuccagc

SEQ ID NO: 275733 - RNA, 18 nt, Artificial Sequence
  Synthetic
caacugcccuucuccagc

SEQ ID NO: 275734 - RNA, 19 nt, Artificial Sequence
  Synthetic
gcaacugcccuucuccagc

SEQ ID NO: 275735 - RNA, 20 nt, Artificial Sequence
  Synthetic
agcaacugcccuucuccagc

SEQ ID NO: 275736 - RNA, 21 nt, Artificial Sequence
  Synthetic
uagcaacugcccuucuccagc

SEQ ID NO: 275737 - RNA, 22 nt, Artificial Sequence
  Synthetic
uuagcaacugcccuucuccagc

SEQ ID NO: 275738 - RNA, 23 nt, Artificial Sequence
  Synthetic
guuagcaacugcccuucuccagc

SEQ ID NO: 275739 - RNA, 24 nt, Artificial Sequence
  Synthetic
uguuagcaacugcccuucuccagc

SEQ ID NO: 275740 - RNA, 18 nt, Artificial Sequence
  Synthetic
uacccuacaauguccagc

SEQ ID NO: 275741 - RNA, 19 nt, Artificial Sequence
  Synthetic
guacccuacaauguccagc

SEQ ID NO: 275742 - RNA, 20 nt, Artificial Sequence
  Synthetic
gguacccuacaauguccagc

SEQ ID NO: 275743 - RNA, 21 nt, Artificial Sequence
  Synthetic
agguacccuacaauguccagc

SEQ ID NO: 275744 - RNA, 22 nt, Artificial Sequence
  Synthetic
cagguacccuacaauguccagc

SEQ ID NO: 275745 - RNA, 23 nt, Artificial Sequence
  Synthetic
gcagguacccuacaauguccagc

SEQ ID NO: 275746 - RNA, 24 nt, Artificial Sequence
  Synthetic
ggcagguacccuacaauguccagc

SEQ ID NO: 275747 - RNA, 18 nt, Artificial Sequence
  Synthetic
aagggaaaaguguccagc

SEQ ID NO: 275748 - RNA, 19 nt, Artificial Sequence
  Synthetic
aaagggaaaaguguccagc

SEQ ID NO: 275749 - RNA, 20 nt, Artificial Sequence
  Synthetic
aaaagggaaaaguguccagc

SEQ ID NO: 275750 - RNA, 21 nt, Artificial Sequence
  Synthetic
aaaaagggaaaaguguccagc

SEQ ID NO: 275751 - RNA, 22 nt, Artificial Sequence
  Synthetic
caaaaagggaaaaguguccagc

SEQ ID NO: 275752 - RNA, 23 nt, Artificial Sequence
  Synthetic
acaaaaagggaaaaguguccagc

SEQ ID NO: 275753 - RNA, 24 nt, Artificial Sequence
  Synthetic
aacaaaaagggaaaaguguccagc

SEQ ID NO: 275754 - RNA, 18 nt, Artificial Sequence
  Synthetic
ucaccacugcauuccagc

SEQ ID NO: 275755 - RNA, 19 nt, Artificial Sequence
  Synthetic
cucaccacugcauuccagc

SEQ ID NO: 275756 - RNA, 20 nt, Artificial Sequence
  Synthetic
ucucaccacugcauuccagc

SEQ ID NO: 275757 - RNA, 21 nt, Artificial Sequence
  Synthetic
aucucaccacugcauuccagc

SEQ ID NO: 275758 - RNA, 22 nt, Artificial Sequence
  Synthetic
gaucucaccacugcauuccagc

SEQ ID NO: 275759 - RNA, 23 nt, Artificial Sequence
  Synthetic
agaucucaccacugcauuccagc

SEQ ID NO: 275760 - RNA, 24 nt, Artificial Sequence
  Synthetic
aagaucucaccacugcauuccagc

SEQ ID NO: 275761 - RNA, 18 nt, Artificial Sequence
  Synthetic
acgccacugcauuccagc

SEQ ID NO: 275762 - RNA, 19 nt, Artificial Sequence
  Synthetic
cacgccacugcauuccagc

SEQ ID NO: 275763 - RNA, 20 nt, Artificial Sequence
  Synthetic
ucacgccacugcauuccagc

SEQ ID NO: 275764 - RNA, 21 nt, Artificial Sequence
  Synthetic
aucacgccacugcauuccagc

SEQ ID NO: 275765 - RNA, 22 nt, Artificial Sequence
  Synthetic
gaucacgccacugcauuccagc

SEQ ID NO: 275766 - RNA, 23 nt, Artificial Sequence
  Synthetic
agaucacgccacugcauuccagc

SEQ ID NO: 275767 - RNA, 24 nt, Artificial Sequence
  Synthetic
gagaucacgccacugcauuccagc

SEQ ID NO: 275768 - RNA, 18 nt, Artificial Sequence
  Synthetic
gugccauugcauuccagc

SEQ ID NO: 275769 - RNA, 19 nt, Artificial Sequence
  Synthetic
ugugccauugcauuccagc

SEQ ID NO: 275770 - RNA, 20 nt, Artificial Sequence
  Synthetic
uugugccauugcauuccagc

SEQ ID NO: 275771 - RNA, 21 nt, Artificial Sequence
  Synthetic
auugugccauugcauuccagc

SEQ ID NO: 275772 - RNA, 22 nt, Artificial Sequence
  Synthetic
gauugugccauugcauuccagc

SEQ ID NO: 275773 - RNA, 23 nt, Artificial Sequence
  Synthetic
agauugugccauugcauuccagc

SEQ ID NO: 275774 - RNA, 24 nt, Artificial Sequence
  Synthetic
aagauugugccauugcauuccagc

SEQ ID NO: 275775 - RNA, 18 nt, Artificial Sequence
  Synthetic
aagaauccuaaaagcagc

SEQ ID NO: 275776 - RNA, 19 nt, Artificial Sequence
  Synthetic
aaagaauccuaaaagcagc

SEQ ID NO: 275777 - RNA, 20 nt, Artificial Sequence
  Synthetic
gaaagaauccuaaaagcagc

SEQ ID NO: 275778 - RNA, 21 nt, Artificial Sequence
  Synthetic
agaaagaauccuaaaagcagc

SEQ ID NO: 275779 - RNA, 22 nt, Artificial Sequence
  Synthetic
aagaaagaauccuaaaagcagc

SEQ ID NO: 275780 - RNA, 23 nt, Artificial Sequence
  Synthetic
aaagaaagaauccuaaaagcagc

SEQ ID NO: 275781 - RNA, 24 nt, Artificial Sequence
  Synthetic
uaaagaaagaauccuaaaagcagc

SEQ ID NO: 275782 - RNA, 18 nt, Artificial Sequence
  Synthetic
aacuuauuccaaagcagc

SEQ ID NO: 275783 - RNA, 19 nt, Artificial Sequence
  Synthetic
aaacuuauuccaaagcagc

SEQ ID NO: 275784 - RNA, 20 nt, Artificial Sequence
  Synthetic
gaaacuuauuccaaagcagc

SEQ ID NO: 275785 - RNA, 21 nt, Artificial Sequence
  Synthetic
ugaaacuuauuccaaagcagc

SEQ ID NO: 275786 - RNA, 22 nt, Artificial Sequence
  Synthetic
augaaacuuauuccaaagcagc

SEQ ID NO: 275787 - RNA, 23 nt, Artificial Sequence
  Synthetic
uaugaaacuuauuccaaagcagc

SEQ ID NO: 275788 - RNA, 24 nt, Artificial Sequence
  Synthetic
guaugaaacuuauuccaaagcagc

SEQ ID NO: 275789 - RNA, 18 nt, Artificial Sequence
  Synthetic
cuaccuuugcaaagcagc

SEQ ID NO: 275790 - RNA, 19 nt, Artificial Sequence
  Synthetic
ccuaccuuugcaaagcagc

SEQ ID NO: 275791 - RNA, 20 nt, Artificial Sequence
  Synthetic
accuaccuuugcaaagcagc

SEQ ID NO: 275792 - RNA, 21 nt, Artificial Sequence
  Synthetic
uaccuaccuuugcaaagcagc

SEQ ID NO: 275793 - RNA, 22 nt, Artificial Sequence
  Synthetic
cuaccuaccuuugcaaagcagc

SEQ ID NO: 275794 - RNA, 23 nt, Artificial Sequence
  Synthetic
ccuaccuaccuuugcaaagcagc

SEQ ID NO: 275795 - RNA, 24 nt, Artificial Sequence
  Synthetic
accuaccuaccuuugcaaagcagc

SEQ ID NO: 275796 - RNA, 18 nt, Artificial Sequence
  Synthetic
uuguaucacagaagcagc

SEQ ID NO: 275797 - RNA, 19 nt, Artificial Sequence
  Synthetic
uuuguaucacagaagcagc

SEQ ID NO: 275798 - RNA, 20 nt, Artificial Sequence
  Synthetic
cuuuguaucacagaagcagc

SEQ ID NO: 275799 - RNA, 21 nt, Artificial Sequence
  Synthetic
ucuuuguaucacagaagcagc

SEQ ID NO: 275800 - RNA, 22 nt, Artificial Sequence
  Synthetic
uucuuuguaucacagaagcagc

SEQ ID NO: 275801 - RNA, 23 nt, Artificial Sequence
  Synthetic
uuucuuuguaucacagaagcagc

SEQ ID NO: 275802 - RNA, 24 nt, Artificial Sequence
  Synthetic
uuuucuuuguaucacagaagcagc

SEQ ID NO: 275803 - RNA, 18 nt, Artificial Sequence
  Synthetic
aauuguauuauaagcagc

SEQ ID NO: 275804 - RNA, 19 nt, Artificial Sequence
  Synthetic
caauuguauuauaagcagc

SEQ ID NO: 275805 - RNA, 20 nt, Artificial Sequence
  Synthetic
acaauuguauuauaagcagc

SEQ ID NO: 275806 - RNA, 21 nt, Artificial Sequence
  Synthetic
gacaauuguauuauaagcagc

SEQ ID NO: 275807 - RNA, 22 nt, Artificial Sequence
  Synthetic
ggacaauuguauuauaagcagc

SEQ ID NO: 275808 - RNA, 23 nt, Artificial Sequence
  Synthetic
gggacaauuguauuauaagcagc

SEQ ID NO: 275809 - RNA, 24 nt, Artificial Sequence
  Synthetic
agggacaauuguauuauaagcagc

SEQ ID NO: 275810 - RNA, 18 nt, Artificial Sequence
  Synthetic
aaaucuacaguaagcagc

SEQ ID NO: 275811 - RNA, 19 nt, Artificial Sequence
  Synthetic
uaaaucuacaguaagcagc

SEQ ID NO: 275812 - RNA, 20 nt, Artificial Sequence
  Synthetic
guaaaucuacaguaagcagc

SEQ ID NO: 275813 - RNA, 21 nt, Artificial Sequence
  Synthetic
aguaaaucuacaguaagcagc

SEQ ID NO: 275814 - RNA, 22 nt, Artificial Sequence
  Synthetic
aaguaaaucuacaguaagcagc

SEQ ID NO: 275815 - RNA, 23 nt, Artificial Sequence
  Synthetic
aaaguaaaucuacaguaagcagc

SEQ ID NO: 275816 - RNA, 24 nt, Artificial Sequence
  Synthetic
aaaaguaaaucuacaguaagcagc

SEQ ID NO: 275817 - RNA, 18 nt, Artificial Sequence
  Synthetic
uaucauaagaacagcagc

SEQ ID NO: 275818 - RNA, 19 nt, Artificial Sequence
  Synthetic
cuaucauaagaacagcagc

SEQ ID NO: 275819 - RNA, 20 nt, Artificial Sequence
  Synthetic
acuaucauaagaacagcagc

SEQ ID NO: 275820 - RNA, 21 nt, Artificial Sequence
  Synthetic
cacuaucauaagaacagcagc

SEQ ID NO: 275821 - RNA, 22 nt, Artificial Sequence
  Synthetic
ucacuaucauaagaacagcagc

SEQ ID NO: 275822 - RNA, 23 nt, Artificial Sequence
  Synthetic
cucacuaucauaagaacagcagc

SEQ ID NO: 275823 - RNA, 24 nt, Artificial Sequence
  Synthetic
gcucacuaucauaagaacagcagc

SEQ ID NO: 275824 - RNA, 18 nt, Artificial Sequence
  Synthetic
ugcuuuuccaccagcagc

SEQ ID NO: 275825 - RNA, 19 nt, Artificial Sequence
  Synthetic
uugcuuuuccaccagcagc

SEQ ID NO: 275826 - RNA, 20 nt, Artificial Sequence
  Synthetic
auugcuuuuccaccagcagc

SEQ ID NO: 275827 - RNA, 21 nt, Artificial Sequence
  Synthetic
aauugcuuuuccaccagcagc

SEQ ID NO: 275828 - RNA, 22 nt, Artificial Sequence
  Synthetic
aaauugcuuuuccaccagcagc

SEQ ID NO: 275829 - RNA, 23 nt, Artificial Sequence
  Synthetic
caaauugcuuuuccaccagcagc

SEQ ID NO: 275830 - RNA, 24 nt, Artificial Sequence
  Synthetic
gcaaauugcuuuuccaccagcagc

SEQ ID NO: 275831 - RNA, 18 nt, Artificial Sequence
  Synthetic
uaaauuuguuucagcagc

SEQ ID NO: 275832 - RNA, 19 nt, Artificial Sequence
  Synthetic
uuaaauuuguuucagcagc

SEQ ID NO: 275833 - RNA, 20 nt, Artificial Sequence
  Synthetic
auuaaauuuguuucagcagc

SEQ ID NO: 275834 - RNA, 21 nt, Artificial Sequence
  Synthetic
cauuaaauuuguuucagcagc

SEQ ID NO: 275835 - RNA, 22 nt, Artificial Sequence
  Synthetic
ccauuaaauuuguuucagcagc

SEQ ID NO: 275836 - RNA, 23 nt, Artificial Sequence
  Synthetic
uccauuaaauuuguuucagcagc

SEQ ID NO: 275837 - RNA, 24 nt, Artificial Sequence
  Synthetic
cuccauuaaauuuguuucagcagc

SEQ ID NO: 275838 - RNA, 18 nt, Artificial Sequence
  Synthetic
gucauccucccgagcagc

SEQ ID NO: 275839 - RNA, 19 nt, Artificial Sequence
  Synthetic
cgucauccucccgagcagc

SEQ ID NO: 275840 - RNA, 20 nt, Artificial Sequence
  Synthetic
gcgucauccucccgagcagc

SEQ ID NO: 275841 - RNA, 21 nt, Artificial Sequence
  Synthetic
ugcgucauccucccgagcagc

SEQ ID NO: 275842 - RNA, 22 nt, Artificial Sequence
  Synthetic
cugcgucauccucccgagcagc

SEQ ID NO: 275843 - RNA, 23 nt, Artificial Sequence
  Synthetic
ccugcgucauccucccgagcagc

SEQ ID NO: 275844 - RNA, 24 nt, Artificial Sequence
  Synthetic
uccugcgucauccucccgagcagc

SEQ ID NO: 275845 - RNA, 18 nt, Artificial Sequence
  Synthetic
gcaaggccuuggagcagc

SEQ ID NO: 275846 - RNA, 19 nt, Artificial Sequence
  Synthetic
ugcaaggccuuggagcagc

SEQ ID NO: 275847 - RNA, 20 nt, Artificial Sequence
  Synthetic
cugcaaggccuuggagcagc

SEQ ID NO: 275848 - RNA, 21 nt, Artificial Sequence
  Synthetic
acugcaaggccuuggagcagc

SEQ ID NO: 275849 - RNA, 22 nt, Artificial Sequence
  Synthetic
uacugcaaggccuuggagcagc

SEQ ID NO: 275850 - RNA, 23 nt, Artificial Sequence
  Synthetic
auacugcaaggccuuggagcagc

SEQ ID NO: 275851 - RNA, 24 nt, Artificial Sequence
  Synthetic
gauacugcaaggccuuggagcagc

SEQ ID NO: 275852 - RNA, 18 nt, Artificial Sequence
  Synthetic
gaguuaauucugagcagc

SEQ ID NO: 275853 - RNA, 19 nt, Artificial Sequence
  Synthetic
agaguuaauucugagcagc

SEQ ID NO: 275854 - RNA, 20 nt, Artificial Sequence
  Synthetic
gagaguuaauucugagcagc

SEQ ID NO: 275855 - RNA, 21 nt, Artificial Sequence
  Synthetic
agagaguuaauucugagcagc

SEQ ID NO: 275856 - RNA, 22 nt, Artificial Sequence
  Synthetic
aagagaguuaauucugagcagc

SEQ ID NO: 275857 - RNA, 23 nt, Artificial Sequence
  Synthetic
caagagaguuaauucugagcagc

SEQ ID NO: 275858 - RNA, 24 nt, Artificial Sequence
  Synthetic
ucaagagaguuaauucugagcagc

SEQ ID NO: 275859 - RNA, 18 nt, Artificial Sequence
  Synthetic
guauuucuucauagcagc

SEQ ID NO: 275860 - RNA, 19 nt, Artificial Sequence
  Synthetic
gguauuucuucauagcagc

SEQ ID NO: 275861 - RNA, 20 nt, Artificial Sequence
  Synthetic
ggguauuucuucauagcagc

SEQ ID NO: 275862 - RNA, 21 nt, Artificial Sequence
  Synthetic
cggguauuucuucauagcagc

SEQ ID NO: 275863 - RNA, 22 nt, Artificial Sequence
  Synthetic
ucggguauuucuucauagcagc

SEQ ID NO: 275864 - RNA, 23 nt, Artificial Sequence
  Synthetic
cucggguauuucuucauagcagc

SEQ ID NO: 275865 - RNA, 24 nt, Artificial Sequence
  Synthetic
ucucggguauuucuucauagcagc

SEQ ID NO: 275866 - RNA, 21 nt, Artificial Sequence
  Synthetic
uggguauuucuucauagcagc

SEQ ID NO: 275867 - RNA, 22 nt, Artificial Sequence
  Synthetic
uuggguauuucuucauagcagc

SEQ ID NO: 275868 - RNA, 23 nt, Artificial Sequence
  Synthetic
cuuggguauuucuucauagcagc

SEQ ID NO: 275869 - RNA, 24 nt, Artificial Sequence
  Synthetic
ucuuggguauuucuucauagcagc

SEQ ID NO: 275870 - RNA, 18 nt, Artificial Sequence
  Synthetic
gcuagccaugauagcagc

SEQ ID NO: 275871 - RNA, 19 nt, Artificial Sequence
  Synthetic
ugcuagccaugauagcagc

SEQ ID NO: 275872 - RNA, 20 nt, Artificial Sequence
  Synthetic
gugcuagccaugauagcagc

SEQ ID NO: 275873 - RNA, 21 nt, Artificial Sequence
  Synthetic
agugcuagccaugauagcagc

SEQ ID NO: 275874 - RNA, 22 nt, Artificial Sequence
  Synthetic
cagugcuagccaugauagcagc

SEQ ID NO: 275875 - RNA, 23 nt, Artificial Sequence
  Synthetic
ucagugcuagccaugauagcagc

SEQ ID NO: 275876 - RNA, 24 nt, Artificial Sequence
  Synthetic
cucagugcuagccaugauagcagc

SEQ ID NO: 275877 - RNA, 18 nt, Artificial Sequence
  Synthetic
agcagcacuccuagcagc

SEQ ID NO: 275878 - RNA, 19 nt, Artificial Sequence
  Synthetic
cagcagcacuccuagcagc

SEQ ID NO: 275879 - RNA, 20 nt, Artificial Sequence
  Synthetic
ccagcagcacuccuagcagc

SEQ ID NO: 275880 - RNA, 21 nt, Artificial Sequence
  Synthetic
accagcagcacuccuagcagc

SEQ ID NO: 275881 - RNA, 22 nt, Artificial Sequence
  Synthetic
uaccagcagcacuccuagcagc

SEQ ID NO: 275882 - RNA, 23 nt, Artificial Sequence
  Synthetic
cuaccagcagcacuccuagcagc

SEQ ID NO: 275883 - RNA, 24 nt, Artificial Sequence
  Synthetic
ucuaccagcagcacuccuagcagc

SEQ ID NO: 275884 - RNA, 18 nt, Artificial Sequence
  Synthetic
cauaaacaaagccgcagc

SEQ ID NO: 275885 - RNA, 19 nt, Artificial Sequence
  Synthetic
acauaaacaaagccgcagc

SEQ ID NO: 275886 - RNA, 20 nt, Artificial Sequence
  Synthetic
uacauaaacaaagccgcagc

SEQ ID NO: 275887 - RNA, 21 nt, Artificial Sequence
  Synthetic
uuacauaaacaaagccgcagc

SEQ ID NO: 275888 - RNA, 22 nt, Artificial Sequence
  Synthetic
cuuacauaaacaaagccgcagc

SEQ ID NO: 275889 - RNA, 23 nt, Artificial Sequence
  Synthetic
ccuuacauaaacaaagccgcagc

SEQ ID NO: 275890 - RNA, 24 nt, Artificial Sequence
  Synthetic
uccuuacauaaacaaagccgcagc

SEQ ID NO: 275891 - RNA, 18 nt, Artificial Sequence
  Synthetic
gcaccuucacaaggcagc

SEQ ID NO: 275892 - RNA, 19 nt, Artificial Sequence
  Synthetic
agcaccuucacaaggcagc

SEQ ID NO: 275893 - RNA, 20 nt, Artificial Sequence
  Synthetic
aagcaccuucacaaggcagc

SEQ ID NO: 275894 - RNA, 21 nt, Artificial Sequence
  Synthetic
gaagcaccuucacaaggcagc

SEQ ID NO: 275895 - RNA, 22 nt, Artificial Sequence
  Synthetic
ggaagcaccuucacaaggcagc

SEQ ID NO: 275896 - RNA, 23 nt, Artificial Sequence
  Synthetic
aggaagcaccuucacaaggcagc

SEQ ID NO: 275897 - RNA, 24 nt, Artificial Sequence
  Synthetic
aaggaagcaccuucacaaggcagc

SEQ ID NO: 275898 - RNA, 18 nt, Artificial Sequence
  Synthetic
uauauaguuacaggcagc

SEQ ID NO: 275899 - RNA, 19 nt, Artificial Sequence
  Synthetic
uuauauaguuacaggcagc

SEQ ID NO: 275900 - RNA, 20 nt, Artificial Sequence
  Synthetic
auuauauaguuacaggcagc

SEQ ID NO: 275901 - RNA, 21 nt, Artificial Sequence
  Synthetic
aauuauauaguuacaggcagc

SEQ ID NO: 275902 - RNA, 22 nt, Artificial Sequence
  Synthetic
aaauuauauaguuacaggcagc

SEQ ID NO: 275903 - RNA, 23 nt, Artificial Sequence
  Synthetic
uaaauuauauaguuacaggcagc

SEQ ID NO: 275904 - RNA, 24 nt, Artificial Sequence
  Synthetic
uuaaauuauauaguuacaggcagc

SEQ ID NO: 275905 - RNA, 18 nt, Artificial Sequence
  Synthetic
uucugccauggaggcagc

SEQ ID NO: 275906 - RNA, 19 nt, Artificial Sequence
  Synthetic
uuucugccauggaggcagc

SEQ ID NO: 275907 - RNA, 20 nt, Artificial Sequence
  Synthetic
guuucugccauggaggcagc

SEQ ID NO: 275908 - RNA, 21 nt, Artificial Sequence
  Synthetic
aguuucugccauggaggcagc

SEQ ID NO: 275909 - RNA, 22 nt, Artificial Sequence
  Synthetic
uaguuucugccauggaggcagc

SEQ ID NO: 275910 - RNA, 23 nt, Artificial Sequence
  Synthetic
auaguuucugccauggaggcagc

SEQ ID NO: 275911 - RNA, 24 nt, Artificial Sequence
  Synthetic
uauaguuucugccauggaggcagc

SEQ ID NO: 275912 - RNA, 18 nt, Artificial Sequence
  Synthetic
aaaaauguuaagggcagc

SEQ ID NO: 275913 - RNA, 19 nt, Artificial Sequence
  Synthetic
aaaaaauguuaagggcagc

SEQ ID NO: 275914 - RNA, 20 nt, Artificial Sequence
  Synthetic
gaaaaaauguuaagggcagc

SEQ ID NO: 275915 - RNA, 21 nt, Artificial Sequence
  Synthetic
ggaaaaaauguuaagggcagc

SEQ ID NO: 275916 - RNA, 22 nt, Artificial Sequence
  Synthetic
aggaaaaaauguuaagggcagc

SEQ ID NO: 275917 - RNA, 23 nt, Artificial Sequence
  Synthetic
aaggaaaaaauguuaagggcagc

SEQ ID NO: 275918 - RNA, 24 nt, Artificial Sequence
  Synthetic
gaaggaaaaaauguuaagggcagc

SEQ ID NO: 275919 - RNA, 18 nt, Artificial Sequence
  Synthetic
ugugaucaagagggcagc

SEQ ID NO: 275920 - RNA, 19 nt, Artificial Sequence
  Synthetic
gugugaucaagagggcagc

SEQ ID NO: 275921 - RNA, 20 nt, Artificial Sequence
  Synthetic
ggugugaucaagagggcagc

SEQ ID NO: 275922 - RNA, 21 nt, Artificial Sequence
  Synthetic
gggugugaucaagagggcagc

SEQ ID NO: 275923 - RNA, 22 nt, Artificial Sequence
  Synthetic
ugggugugaucaagagggcagc

SEQ ID NO: 275924 - RNA, 23 nt, Artificial Sequence
  Synthetic
gugggugugaucaagagggcagc

SEQ ID NO: 275925 - RNA, 24 nt, Artificial Sequence
  Synthetic
ugugggugugaucaagagggcagc

SEQ ID NO: 275926 - RNA, 18 nt, Artificial Sequence
  Synthetic
cguaauguuaggggcagc

SEQ ID NO: 275927 - RNA, 19 nt, Artificial Sequence
  Synthetic
ucguaauguuaggggcagc

SEQ ID NO: 275928 - RNA, 20 nt, Artificial Sequence
  Synthetic
cucguaauguuaggggcagc

SEQ ID NO: 275929 - RNA, 21 nt, Artificial Sequence
  Synthetic
gcucguaauguuaggggcagc

SEQ ID NO: 275930 - RNA, 22 nt, Artificial Sequence
  Synthetic
ugcucguaauguuaggggcagc

SEQ ID NO: 275931 - RNA, 23 nt, Artificial Sequence
  Synthetic
uugcucguaauguuaggggcagc

SEQ ID NO: 275932 - RNA, 24 nt, Artificial Sequence
  Synthetic
guugcucguaauguuaggggcagc

SEQ ID NO: 275933 - RNA, 18 nt, Artificial Sequence
  Synthetic
ucuucuucacauggcagc

SEQ ID NO: 275934 - RNA, 19 nt, Artificial Sequence
  Synthetic
uucuucuucacauggcagc

SEQ ID NO: 275935 - RNA, 20 nt, Artificial Sequence
  Synthetic
cuucuucuucacauggcagc

SEQ ID NO: 275936 - RNA, 21 nt, Artificial Sequence
  Synthetic
ccuucuucuucacauggcagc

SEQ ID NO: 275937 - RNA, 22 nt, Artificial Sequence
  Synthetic
accuucuucuucacauggcagc

SEQ ID NO: 275938 - RNA, 23 nt, Artificial Sequence
  Synthetic
caccuucuucuucacauggcagc

SEQ ID NO: 275939 - RNA, 24 nt, Artificial Sequence
  Synthetic
acaccuucuucuucacauggcagc

SEQ ID NO: 275940 - RNA, 18 nt, Artificial Sequence
  Synthetic
cagcaacauagaugcagc

SEQ ID NO: 275941 - RNA, 19 nt, Artificial Sequence
  Synthetic
gcagcaacauagaugcagc

SEQ ID NO: 275942 - RNA, 20 nt, Artificial Sequence
  Synthetic
ugcagcaacauagaugcagc

SEQ ID NO: 275943 - RNA, 21 nt, Artificial Sequence
  Synthetic
uugcagcaacauagaugcagc

SEQ ID NO: 275944 - RNA, 22 nt, Artificial Sequence
  Synthetic
uuugcagcaacauagaugcagc

SEQ ID NO: 275945 - RNA, 23 nt, Artificial Sequence
  Synthetic
cuuugcagcaacauagaugcagc

SEQ ID NO: 275946 - RNA, 24 nt, Artificial Sequence
  Synthetic
ccuuugcagcaacauagaugcagc

SEQ ID NO: 275947 - RNA, 18 nt, Artificial Sequence
  Synthetic
uaggaacauggaugcagc

SEQ ID NO: 275948 - RNA, 19 nt, Artificial Sequence
  Synthetic
guaggaacauggaugcagc

SEQ ID NO: 275949 - RNA, 20 nt, Artificial Sequence
  Synthetic
uguaggaacauggaugcagc

SEQ ID NO: 275950 - RNA, 21 nt, Artificial Sequence
  Synthetic
uuguaggaacauggaugcagc

SEQ ID NO: 275951 - RNA, 22 nt, Artificial Sequence
  Synthetic
uuuguaggaacauggaugcagc

SEQ ID NO: 275952 - RNA, 23 nt, Artificial Sequence
  Synthetic
uuuuguaggaacauggaugcagc

SEQ ID NO: 275953 - RNA, 24 nt, Artificial Sequence
  Synthetic
cuuuuguaggaacauggaugcagc

SEQ ID NO: 275954 - RNA, 18 nt, Artificial Sequence
  Synthetic
gguugcgugauaugcagc

SEQ ID NO: 275955 - RNA, 19 nt, Artificial Sequence
  Synthetic
ggguugcgugauaugcagc

SEQ ID NO: 275956 - RNA, 20 nt, Artificial Sequence
  Synthetic
aggguugcgugauaugcagc

SEQ ID NO: 275957 - RNA, 21 nt, Artificial Sequence
  Synthetic
uaggguugcgugauaugcagc

SEQ ID NO: 275958 - RNA, 22 nt, Artificial Sequence
  Synthetic
auaggguugcgugauaugcagc

SEQ ID NO: 275959 - RNA, 23 nt, Artificial Sequence
  Synthetic
aauaggguugcgugauaugcagc

SEQ ID NO: 275960 - RNA, 24 nt, Artificial Sequence
  Synthetic
aaauaggguugcgugauaugcagc

SEQ ID NO: 275961 - RNA, 18 nt, Artificial Sequence
  Synthetic
cauggaauacuaugcagc

SEQ ID NO: 275962 - RNA, 19 nt, Artificial Sequence
  Synthetic
ccauggaauacuaugcagc

SEQ ID NO: 275963 - RNA, 20 nt, Artificial Sequence
  Synthetic
accauggaauacuaugcagc

SEQ ID NO: 275964 - RNA, 18 nt, Artificial Sequence
  Synthetic
ccuucugcugugugcagc

SEQ ID NO: 275965 - RNA, 19 nt, Artificial Sequence
  Synthetic
cccuucugcugugugcagc

SEQ ID NO: 275966 - RNA, 20 nt, Artificial Sequence
  Synthetic
ucccuucugcugugugcagc

SEQ ID NO: 275967 - RNA, 21 nt, Artificial Sequence
  Synthetic
aucccuucugcugugugcagc

SEQ ID NO: 275968 - RNA, 22 nt, Artificial Sequence
  Synthetic
caucccuucugcugugugcagc

SEQ ID NO: 275969 - RNA, 23 nt, Artificial Sequence
  Synthetic
ucaucccuucugcugugugcagc

SEQ ID NO: 275970 - RNA, 24 nt, Artificial Sequence
  Synthetic
uucaucccuucugcugugugcagc

SEQ ID NO: 275971 - RNA, 18 nt, Artificial Sequence
  Synthetic
uauuuaccuuauugcagc

SEQ ID NO: 275972 - RNA, 19 nt, Artificial Sequence
  Synthetic
auauuuaccuuauugcagc

SEQ ID NO: 275973 - RNA, 20 nt, Artificial Sequence
  Synthetic
aauauuuaccuuauugcagc

SEQ ID NO: 275974 - RNA, 21 nt, Artificial Sequence
  Synthetic
gaauauuuaccuuauugcagc

SEQ ID NO: 275975 - RNA, 22 nt, Artificial Sequence
  Synthetic
agaauauuuaccuuauugcagc

SEQ ID NO: 275976 - RNA, 23 nt, Artificial Sequence
  Synthetic
aagaauauuuaccuuauugcagc

SEQ ID NO: 275977 - RNA, 24 nt, Artificial Sequence
  Synthetic
uaagaauauuuaccuuauugcagc

SEQ ID NO: 275978 - RNA, 18 nt, Artificial Sequence
  Synthetic
auuguccugaguugcagc

SEQ ID NO: 275979 - RNA, 19 nt, Artificial Sequence
  Synthetic
aauuguccugaguugcagc

SEQ ID NO: 275980 - RNA, 20 nt, Artificial Sequence
  Synthetic
gaauuguccugaguugcagc

SEQ ID NO: 275981 - RNA, 21 nt, Artificial Sequence
  Synthetic
agaauuguccugaguugcagc

SEQ ID NO: 275982 - RNA, 22 nt, Artificial Sequence
  Synthetic
cagaauuguccugaguugcagc

SEQ ID NO: 275983 - RNA, 23 nt, Artificial Sequence
  Synthetic
ucagaauuguccugaguugcagc

SEQ ID NO: 275984 - RNA, 24 nt, Artificial Sequence
  Synthetic
uucagaauuguccugaguugcagc

SEQ ID NO: 275985 - RNA, 18 nt, Artificial Sequence
  Synthetic
cugcacgcacguugcagc

SEQ ID NO: 275986 - RNA, 19 nt, Artificial Sequence
  Synthetic
ucugcacgcacguugcagc

SEQ ID NO: 275987 - RNA, 20 nt, Artificial Sequence
  Synthetic
aucugcacgcacguugcagc

SEQ ID NO: 275988 - RNA, 21 nt, Artificial Sequence
  Synthetic
gaucugcacgcacguugcagc

SEQ ID NO: 275989 - RNA, 22 nt, Artificial Sequence
  Synthetic
ggaucugcacgcacguugcagc

SEQ ID NO: 275990 - RNA, 23 nt, Artificial Sequence
  Synthetic
gggaucugcacgcacguugcagc

SEQ ID NO: 275991 - RNA, 24 nt, Artificial Sequence
  Synthetic
agggaucugcacgcacguugcagc

SEQ ID NO: 275992 - RNA, 18 nt, Artificial Sequence
  Synthetic
agaccuggagaaaucagc

SEQ ID NO: 275993 - RNA, 19 nt, Artificial Sequence
  Synthetic
aagaccuggagaaaucagc

SEQ ID NO: 275994 - RNA, 20 nt, Artificial Sequence
  Synthetic
uaagaccuggagaaaucagc

SEQ ID NO: 275995 - RNA, 21 nt, Artificial Sequence
  Synthetic
cuaagaccuggagaaaucagc

SEQ ID NO: 275996 - RNA, 22 nt, Artificial Sequence
  Synthetic
ucuaagaccuggagaaaucagc

SEQ ID NO: 275997 - RNA, 23 nt, Artificial Sequence
  Synthetic
uucuaagaccuggagaaaucagc

SEQ ID NO: 275998 - RNA, 24 nt, Artificial Sequence
  Synthetic
uuucuaagaccuggagaaaucagc

SEQ ID NO: 275999 - RNA, 18 nt, Artificial Sequence
  Synthetic
acucacaucagaaucagc

SEQ ID NO: 276000 - RNA, 19 nt, Artificial Sequence
  Synthetic
uacucacaucagaaucagc

SEQ ID NO: 276001 - RNA, 20 nt, Artificial Sequence
  Synthetic
auacucacaucagaaucagc

SEQ ID NO: 276002 - RNA, 21 nt, Artificial Sequence
  Synthetic
aauacucacaucagaaucagc

SEQ ID NO: 276003 - RNA, 22 nt, Artificial Sequence
  Synthetic
uaauacucacaucagaaucagc

SEQ ID NO: 276004 - RNA, 23 nt, Artificial Sequence
  Synthetic
guaauacucacaucagaaucagc

SEQ ID NO: 276005 - RNA, 24 nt, Artificial Sequence
  Synthetic
aguaauacucacaucagaaucagc

SEQ ID NO: 276006 - RNA, 18 nt, Artificial Sequence
  Synthetic
acucacgucagaaucagc

SEQ ID NO: 276007 - RNA, 19 nt, Artificial Sequence
  Synthetic
uacucacgucagaaucagc

SEQ ID NO: 276008 - RNA, 20 nt, Artificial Sequence
  Synthetic
guacucacgucagaaucagc

SEQ ID NO: 276009 - RNA, 21 nt, Artificial Sequence
  Synthetic
aguacucacgucagaaucagc

SEQ ID NO: 276010 - RNA, 22 nt, Artificial Sequence
  Synthetic
uaguacucacgucagaaucagc

SEQ ID NO: 276011 - RNA, 23 nt, Artificial Sequence
  Synthetic
guaguacucacgucagaaucagc

SEQ ID NO: 276012 - RNA, 24 nt, Artificial Sequence
  Synthetic
aguaguacucacgucagaaucagc

SEQ ID NO: 276013 - RNA, 18 nt, Artificial Sequence
  Synthetic
uagcauaagggaaucagc

SEQ ID NO: 276014 - RNA, 19 nt, Artificial Sequence
  Synthetic
cuagcauaagggaaucagc

SEQ ID NO: 276015 - RNA, 20 nt, Artificial Sequence
  Synthetic
acuagcauaagggaaucagc

SEQ ID NO: 276016 - RNA, 21 nt, Artificial Sequence
  Synthetic
cacuagcauaagggaaucagc

SEQ ID NO: 276017 - RNA, 22 nt, Artificial Sequence
  Synthetic
acacuagcauaagggaaucagc

SEQ ID NO: 276018 - RNA, 23 nt, Artificial Sequence
  Synthetic
uacacuagcauaagggaaucagc

SEQ ID NO: 276019 - RNA, 24 nt, Artificial Sequence
  Synthetic
auacacuagcauaagggaaucagc

SEQ ID NO: 276020 - RNA, 18 nt, Artificial Sequence
  Synthetic
agcaagaaaauaaucagc

SEQ ID NO: 276021 - RNA, 19 nt, Artificial Sequence
  Synthetic
aagcaagaaaauaaucagc

SEQ ID NO: 276022 - RNA, 20 nt, Artificial Sequence
  Synthetic
aaagcaagaaaauaaucagc

SEQ ID NO: 276023 - RNA, 21 nt, Artificial Sequence
  Synthetic
aaaagcaagaaaauaaucagc

SEQ ID NO: 276024 - RNA, 22 nt, Artificial Sequence
  Synthetic
caaaagcaagaaaauaaucagc

SEQ ID NO: 276025 - RNA, 23 nt, Artificial Sequence
  Synthetic
ucaaaagcaagaaaauaaucagc

SEQ ID NO: 276026 - RNA, 24 nt, Artificial Sequence
  Synthetic
gucaaaagcaagaaaauaaucagc

SEQ ID NO: 276027 - RNA, 18 nt, Artificial Sequence
  Synthetic
uaagauuaugucaucagc

SEQ ID NO: 276028 - RNA, 19 nt, Artificial Sequence
  Synthetic
auaagauuaugucaucagc

SEQ ID NO: 276029 - RNA, 20 nt, Artificial Sequence
  Synthetic
uauaagauuaugucaucagc

SEQ ID NO: 276030 - RNA, 21 nt, Artificial Sequence
  Synthetic
guauaagauuaugucaucagc

SEQ ID NO: 276031 - RNA, 22 nt, Artificial Sequence
  Synthetic
uguauaagauuaugucaucagc

SEQ ID NO: 276032 - RNA, 23 nt, Artificial Sequence
  Synthetic
cuguauaagauuaugucaucagc

SEQ ID NO: 276033 - RNA, 24 nt, Artificial Sequence
  Synthetic
gcuguauaagauuaugucaucagc

SEQ ID NO: 276034 - RNA, 18 nt, Artificial Sequence
  Synthetic
uuuuuacuguucaucagc

SEQ ID NO: 276035 - RNA, 19 nt, Artificial Sequence
  Synthetic
uuuuuuacuguucaucagc

SEQ ID NO: 276036 - RNA, 20 nt, Artificial Sequence
  Synthetic
uuuuuuuacuguucaucagc

SEQ ID NO: 276037 - RNA, 21 nt, Artificial Sequence
  Synthetic
uuuuuuuuacuguucaucagc

SEQ ID NO: 276038 - RNA, 22 nt, Artificial Sequence
  Synthetic
auuuuuuuuacuguucaucagc

SEQ ID NO: 276039 - RNA, 23 nt, Artificial Sequence
  Synthetic
uauuuuuuuuacuguucaucagc

SEQ ID NO: 276040 - RNA, 24 nt, Artificial Sequence
  Synthetic
auauuuuuuuuacuguucaucagc

SEQ ID NO: 276041 - RNA, 18 nt, Artificial Sequence
  Synthetic
caggaguuugagaucagc

SEQ ID NO: 276042 - RNA, 19 nt, Artificial Sequence
  Synthetic
ccaggaguuugagaucagc

SEQ ID NO: 276043 - RNA, 20 nt, Artificial Sequence
  Synthetic
uccaggaguuugagaucagc

SEQ ID NO: 276044 - RNA, 21 nt, Artificial Sequence
  Synthetic
guccaggaguuugagaucagc

SEQ ID NO: 276045 - RNA, 22 nt, Artificial Sequence
  Synthetic
aguccaggaguuugagaucagc

SEQ ID NO: 276046 - RNA, 23 nt, Artificial Sequence
  Synthetic
gaguccaggaguuugagaucagc

SEQ ID NO: 276047 - RNA, 24 nt, Artificial Sequence
  Synthetic
ugaguccaggaguuugagaucagc

SEQ ID NO: 276048 - RNA, 18 nt, Artificial Sequence
  Synthetic
ugggaguuugagaucagc

SEQ ID NO: 276049 - RNA, 19 nt, Artificial Sequence
  Synthetic
uugggaguuugagaucagc

SEQ ID NO: 276050 - RNA, 20 nt, Artificial Sequence
  Synthetic
cuugggaguuugagaucagc

SEQ ID NO: 276051 - RNA, 21 nt, Artificial Sequence
  Synthetic
gcuugggaguuugagaucagc

SEQ ID NO: 276052 - RNA, 22 nt, Artificial Sequence
  Synthetic
agcuugggaguuugagaucagc

SEQ ID NO: 276053 - RNA, 23 nt, Artificial Sequence
  Synthetic
gagcuugggaguuugagaucagc

SEQ ID NO: 276054 - RNA, 24 nt, Artificial Sequence
  Synthetic
ugagcuugggaguuugagaucagc

SEQ ID NO: 276055 - RNA, 18 nt, Artificial Sequence
  Synthetic
uggaagacgaauaucagc

SEQ ID NO: 276056 - RNA, 19 nt, Artificial Sequence
  Synthetic
guggaagacgaauaucagc

SEQ ID NO: 276057 - RNA, 20 nt, Artificial Sequence
  Synthetic
gguggaagacgaauaucagc

SEQ ID NO: 276058 - RNA, 21 nt, Artificial Sequence
  Synthetic
ggguggaagacgaauaucagc

SEQ ID NO: 276059 - RNA, 22 nt, Artificial Sequence
  Synthetic
gggguggaagacgaauaucagc

SEQ ID NO: 276060 - RNA, 23 nt, Artificial Sequence
  Synthetic
ugggguggaagacgaauaucagc

SEQ ID NO: 276061 - RNA, 24 nt, Artificial Sequence
  Synthetic
gugggguggaagacgaauaucagc

SEQ ID NO: 276062 - RNA, 18 nt, Artificial Sequence
  Synthetic
gguccucugauuaucagc

SEQ ID NO: 276063 - RNA, 19 nt, Artificial Sequence
  Synthetic
agguccucugauuaucagc

SEQ ID NO: 276064 - RNA, 20 nt, Artificial Sequence
  Synthetic
aagguccucugauuaucagc

SEQ ID NO: 276065 - RNA, 21 nt, Artificial Sequence
  Synthetic
gaagguccucugauuaucagc

SEQ ID NO: 276066 - RNA, 22 nt, Artificial Sequence
  Synthetic
ugaagguccucugauuaucagc

SEQ ID NO: 276067 - RNA, 23 nt, Artificial Sequence
  Synthetic
uugaagguccucugauuaucagc

SEQ ID NO: 276068 - RNA, 24 nt, Artificial Sequence
  Synthetic
auugaagguccucugauuaucagc

SEQ ID NO: 276069 - RNA, 18 nt, Artificial Sequence
  Synthetic
accauaaggaaacucagc

SEQ ID NO: 276070 - RNA, 19 nt, Artificial Sequence
  Synthetic
aaccauaaggaaacucagc

SEQ ID NO: 276071 - RNA, 20 nt, Artificial Sequence
  Synthetic
aaaccauaaggaaacucagc

SEQ ID NO: 276072 - RNA, 21 nt, Artificial Sequence
  Synthetic
gaaaccauaaggaaacucagc

SEQ ID NO: 276073 - RNA, 22 nt, Artificial Sequence
  Synthetic
ggaaaccauaaggaaacucagc

SEQ ID NO: 276074 - RNA, 23 nt, Artificial Sequence
  Synthetic
aggaaaccauaaggaaacucagc

SEQ ID NO: 276075 - RNA, 24 nt, Artificial Sequence
  Synthetic
gaggaaaccauaaggaaacucagc

SEQ ID NO: 276076 - RNA, 18 nt, Artificial Sequence
  Synthetic
uccuucuccugccucagc

SEQ ID NO: 276077 - RNA, 19 nt, Artificial Sequence
  Synthetic
cuccuucuccugccucagc

SEQ ID NO: 276078 - RNA, 20 nt, Artificial Sequence
  Synthetic
ucuccuucuccugccucagc

SEQ ID NO: 276079 - RNA, 21 nt, Artificial Sequence
  Synthetic
uucuccuucuccugccucagc

SEQ ID NO: 276080 - RNA, 22 nt, Artificial Sequence
  Synthetic
auucuccuucuccugccucagc

SEQ ID NO: 276081 - RNA, 23 nt, Artificial Sequence
  Synthetic
cauucuccuucuccugccucagc

SEQ ID NO: 276082 - RNA, 24 nt, Artificial Sequence
  Synthetic
ccauucuccuucuccugccucagc

SEQ ID NO: 276083 - RNA, 18 nt, Artificial Sequence
  Synthetic
ucucaugacuagcucagc

SEQ ID NO: 276084 - RNA, 19 nt, Artificial Sequence
  Synthetic
uucucaugacuagcucagc

SEQ ID NO: 276085 - RNA, 20 nt, Artificial Sequence
  Synthetic
cuucucaugacuagcucagc

SEQ ID NO: 276086 - RNA, 21 nt, Artificial Sequence
  Synthetic
ccuucucaugacuagcucagc

SEQ ID NO: 276087 - RNA, 22 nt, Artificial Sequence
  Synthetic
gccuucucaugacuagcucagc

SEQ ID NO: 276088 - RNA, 23 nt, Artificial Sequence
  Synthetic
ugccuucucaugacuagcucagc

SEQ ID NO: 276089 - RNA, 24 nt, Artificial Sequence
  Synthetic
uugccuucucaugacuagcucagc

SEQ ID NO: 276090 - RNA, 18 nt, Artificial Sequence
  Synthetic
aaaaaacuguaucucagc

SEQ ID NO: 276091 - RNA, 19 nt, Artificial Sequence
  Synthetic
gaaaaaacuguaucucagc

SEQ ID NO: 276092 - RNA, 20 nt, Artificial Sequence
  Synthetic
ggaaaaaacuguaucucagc

SEQ ID NO: 276093 - RNA, 21 nt, Artificial Sequence
  Synthetic
gggaaaaaacuguaucucagc

SEQ ID NO: 276094 - RNA, 22 nt, Artificial Sequence
  Synthetic
agggaaaaaacuguaucucagc

SEQ ID NO: 276095 - RNA, 23 nt, Artificial Sequence
  Synthetic
aagggaaaaaacuguaucucagc

SEQ ID NO: 276096 - RNA, 24 nt, Artificial Sequence
  Synthetic
caagggaaaaaacuguaucucagc

SEQ ID NO: 276097 - RNA, 18 nt, Artificial Sequence
  Synthetic
aauacagugguucucagc

SEQ ID NO: 276098 - RNA, 19 nt, Artificial Sequence
  Synthetic
uaauacagugguucucagc

SEQ ID NO: 276099 - RNA, 20 nt, Artificial Sequence
  Synthetic
cuaauacagugguucucagc

SEQ ID NO: 276100 - RNA, 21 nt, Artificial Sequence
  Synthetic
ucuaauacagugguucucagc

SEQ ID NO: 276101 - RNA, 22 nt, Artificial Sequence
  Synthetic
gucuaauacagugguucucagc

SEQ ID NO: 276102 - RNA, 23 nt, Artificial Sequence
  Synthetic
agucuaauacagugguucucagc

SEQ ID NO: 276103 - RNA, 24 nt, Artificial Sequence
  Synthetic
uagucuaauacagugguucucagc

SEQ ID NO: 276104 - RNA, 18 nt, Artificial Sequence
  Synthetic
aagcuacuuaaugucagc

SEQ ID NO: 276105 - RNA, 19 nt, Artificial Sequence
  Synthetic
gaagcuacuuaaugucagc

SEQ ID NO: 276106 - RNA, 20 nt, Artificial Sequence
  Synthetic
agaagcuacuuaaugucagc

SEQ ID NO: 276107 - RNA, 21 nt, Artificial Sequence
  Synthetic
aagaagcuacuuaaugucagc

SEQ ID NO: 276108 - RNA, 22 nt, Artificial Sequence
  Synthetic
aaagaagcuacuuaaugucagc

SEQ ID NO: 276109 - RNA, 23 nt, Artificial Sequence
  Synthetic
aaaagaagcuacuuaaugucagc

SEQ ID NO: 276110 - RNA, 24 nt, Artificial Sequence
  Synthetic
uaaaagaagcuacuuaaugucagc

SEQ ID NO: 276111 - RNA, 18 nt, Artificial Sequence
  Synthetic
aauagaacauaugucagc

SEQ ID NO: 276112 - RNA, 19 nt, Artificial Sequence
  Synthetic
caauagaacauaugucagc

SEQ ID NO: 276113 - RNA, 20 nt, Artificial Sequence
  Synthetic
ucaauagaacauaugucagc

SEQ ID NO: 276114 - RNA, 21 nt, Artificial Sequence
  Synthetic
uucaauagaacauaugucagc

SEQ ID NO: 276115 - RNA, 22 nt, Artificial Sequence
  Synthetic
guucaauagaacauaugucagc

SEQ ID NO: 276116 - RNA, 23 nt, Artificial Sequence
  Synthetic
uguucaauagaacauaugucagc

SEQ ID NO: 276117 - RNA, 24 nt, Artificial Sequence
  Synthetic
auguucaauagaacauaugucagc

SEQ ID NO: 276118 - RNA, 18 nt, Artificial Sequence
  Synthetic
uauuaggacccauucagc

SEQ ID NO: 276119 - RNA, 19 nt, Artificial Sequence
  Synthetic
auauuaggacccauucagc

SEQ ID NO: 276120 - RNA, 20 nt, Artificial Sequence
  Synthetic
gauauuaggacccauucagc

SEQ ID NO: 276121 - RNA, 21 nt, Artificial Sequence
  Synthetic
agauauuaggacccauucagc

SEQ ID NO: 276122 - RNA, 22 nt, Artificial Sequence
  Synthetic
gagauauuaggacccauucagc

SEQ ID NO: 276123 - RNA, 23 nt, Artificial Sequence
  Synthetic
agagauauuaggacccauucagc

SEQ ID NO: 276124 - RNA, 24 nt, Artificial Sequence
  Synthetic
cagagauauuaggacccauucagc

SEQ ID NO: 276125 - RNA, 18 nt, Artificial Sequence
  Synthetic
uucucucauagauucagc

SEQ ID NO: 276126 - RNA, 19 nt, Artificial Sequence
  Synthetic
auucucucauagauucagc

SEQ ID NO: 276127 - RNA, 20 nt, Artificial Sequence
  Synthetic
aauucucucauagauucagc

SEQ ID NO: 276128 - RNA, 21 nt, Artificial Sequence
  Synthetic
gaauucucucauagauucagc

SEQ ID NO: 276129 - RNA, 22 nt, Artificial Sequence
  Synthetic
agaauucucucauagauucagc

SEQ ID NO: 276130 - RNA, 23 nt, Artificial Sequence
  Synthetic
cagaauucucucauagauucagc

SEQ ID NO: 276131 - RNA, 24 nt, Artificial Sequence
  Synthetic
acagaauucucucauagauucagc

SEQ ID NO: 276132 - RNA, 18 nt, Artificial Sequence
  Synthetic
gagaacuggugguucagc

SEQ ID NO: 276133 - RNA, 19 nt, Artificial Sequence
  Synthetic
ggagaacuggugguucagc

SEQ ID NO: 276134 - RNA, 20 nt, Artificial Sequence
  Synthetic
gggagaacuggugguucagc

SEQ ID NO: 276135 - RNA, 21 nt, Artificial Sequence
  Synthetic
ugggagaacuggugguucagc

SEQ ID NO: 276136 - RNA, 22 nt, Artificial Sequence
  Synthetic
gugggagaacuggugguucagc

SEQ ID NO: 276137 - RNA, 23 nt, Artificial Sequence
  Synthetic
agugggagaacuggugguucagc

SEQ ID NO: 276138 - RNA, 24 nt, Artificial Sequence
  Synthetic
aagugggagaacuggugguucagc

SEQ ID NO: 276139 - RNA, 18 nt, Artificial Sequence
  Synthetic
augagagaauauuucagc

SEQ ID NO: 276140 - RNA, 19 nt, Artificial Sequence
  Synthetic
caugagagaauauuucagc

SEQ ID NO: 276141 - RNA, 20 nt, Artificial Sequence
  Synthetic
ucaugagagaauauuucagc

SEQ ID NO: 276142 - RNA, 21 nt, Artificial Sequence
  Synthetic
cucaugagagaauauuucagc

SEQ ID NO: 276143 - RNA, 22 nt, Artificial Sequence
  Synthetic
ucucaugagagaauauuucagc

SEQ ID NO: 276144 - RNA, 23 nt, Artificial Sequence
  Synthetic
uucucaugagagaauauuucagc

SEQ ID NO: 276145 - RNA, 24 nt, Artificial Sequence
  Synthetic
guucucaugagagaauauuucagc

SEQ ID NO: 276146 - RNA, 18 nt, Artificial Sequence
  Synthetic
auaauuuacuguuucagc

SEQ ID NO: 276147 - RNA, 19 nt, Artificial Sequence
  Synthetic
uauaauuuacuguuucagc

SEQ ID NO: 276148 - RNA, 20 nt, Artificial Sequence
  Synthetic
auauaauuuacuguuucagc

SEQ ID NO: 276149 - RNA, 21 nt, Artificial Sequence
  Synthetic
uauauaauuuacuguuucagc

SEQ ID NO: 276150 - RNA, 22 nt, Artificial Sequence
  Synthetic
uuauauaauuuacuguuucagc

SEQ ID NO: 276151 - RNA, 23 nt, Artificial Sequence
  Synthetic
uuuauauaauuuacuguuucagc

SEQ ID NO: 276152 - RNA, 24 nt, Artificial Sequence
  Synthetic
guuuauauaauuuacuguuucagc

SEQ ID NO: 276153 - RNA, 18 nt, Artificial Sequence
  Synthetic
agaguuugggaaaagagc

SEQ ID NO: 276154 - RNA, 19 nt, Artificial Sequence
  Synthetic
gagaguuugggaaaagagc

SEQ ID NO: 276155 - RNA, 20 nt, Artificial Sequence
  Synthetic
ggagaguuugggaaaagagc

SEQ ID NO: 276156 - RNA, 21 nt, Artificial Sequence
  Synthetic
aggagaguuugggaaaagagc

SEQ ID NO: 276157 - RNA, 22 nt, Artificial Sequence
  Synthetic
gaggagaguuugggaaaagagc

SEQ ID NO: 276158 - RNA, 23 nt, Artificial Sequence
  Synthetic
ggaggagaguuugggaaaagagc

SEQ ID NO: 276159 - RNA, 24 nt, Artificial Sequence
  Synthetic
aggaggagaguuugggaaaagagc

SEQ ID NO: 276160 - RNA, 18 nt, Artificial Sequence
  Synthetic
auucauuucuuaaagagc

SEQ ID NO: 276161 - RNA, 19 nt, Artificial Sequence
  Synthetic
aauucauuucuuaaagagc

SEQ ID NO: 276162 - RNA, 20 nt, Artificial Sequence
  Synthetic
aaauucauuucuuaaagagc

SEQ ID NO: 276163 - RNA, 21 nt, Artificial Sequence
  Synthetic
gaaauucauuucuuaaagagc

SEQ ID NO: 276164 - RNA, 22 nt, Artificial Sequence
  Synthetic
agaaauucauuucuuaaagagc

SEQ ID NO: 276165 - RNA, 23 nt, Artificial Sequence
  Synthetic
uagaaauucauuucuuaaagagc

SEQ ID NO: 276166 - RNA, 24 nt, Artificial Sequence
  Synthetic
auagaaauucauuucuuaaagagc

SEQ ID NO: 276167 - RNA, 18 nt, Artificial Sequence
  Synthetic
gcuauugagaccaagagc

SEQ ID NO: 276168 - RNA, 19 nt, Artificial Sequence
  Synthetic
ggcuauugagaccaagagc

SEQ ID NO: 276169 - RNA, 20 nt, Artificial Sequence
  Synthetic
aggcuauugagaccaagagc

SEQ ID NO: 276170 - RNA, 21 nt, Artificial Sequence
  Synthetic
aaggcuauugagaccaagagc

SEQ ID NO: 276171 - RNA, 22 nt, Artificial Sequence
  Synthetic
gaaggcuauugagaccaagagc

SEQ ID NO: 276172 - RNA, 23 nt, Artificial Sequence
  Synthetic
ggaaggcuauugagaccaagagc

SEQ ID NO: 276173 - RNA, 24 nt, Artificial Sequence
  Synthetic
aggaaggcuauugagaccaagagc

SEQ ID NO: 276174 - RNA, 18 nt, Artificial Sequence
  Synthetic
aagaaagagagcaagagc

SEQ ID NO: 276175 - RNA, 19 nt, Artificial Sequence
  Synthetic
aaagaaagagagcaagagc

SEQ ID NO: 276176 - RNA, 20 nt, Artificial Sequence
  Synthetic
aaaagaaagagagcaagagc

SEQ ID NO: 276177 - RNA, 21 nt, Artificial Sequence
  Synthetic
caaaagaaagagagcaagagc

SEQ ID NO: 276178 - RNA, 22 nt, Artificial Sequence
  Synthetic
ucaaaagaaagagagcaagagc

SEQ ID NO: 276179 - RNA, 23 nt, Artificial Sequence
  Synthetic
cucaaaagaaagagagcaagagc

SEQ ID NO: 276180 - RNA, 24 nt, Artificial Sequence
  Synthetic
ucucaaaagaaagagagcaagagc

SEQ ID NO: 276181 - RNA, 18 nt, Artificial Sequence
  Synthetic
cuucccauucucaagagc

SEQ ID NO: 276182 - RNA, 19 nt, Artificial Sequence
  Synthetic
ccuucccauucucaagagc

SEQ ID NO: 276183 - RNA, 20 nt, Artificial Sequence
  Synthetic
gccuucccauucucaagagc

SEQ ID NO: 276184 - RNA, 21 nt, Artificial Sequence
  Synthetic
ggccuucccauucucaagagc

SEQ ID NO: 276185 - RNA, 22 nt, Artificial Sequence
  Synthetic
aggccuucccauucucaagagc

SEQ ID NO: 276186 - RNA, 23 nt, Artificial Sequence
  Synthetic
uaggccuucccauucucaagagc

SEQ ID NO: 276187 - RNA, 24 nt, Artificial Sequence
  Synthetic
cuaggccuucccauucucaagagc

SEQ ID NO: 276188 - RNA, 18 nt, Artificial Sequence
  Synthetic
guauauucacauaagagc

SEQ ID NO: 276189 - RNA, 19 nt, Artificial Sequence
  Synthetic
uguauauucacauaagagc

SEQ ID NO: 276190 - RNA, 20 nt, Artificial Sequence
  Synthetic
cuguauauucacauaagagc

SEQ ID NO: 276191 - RNA, 21 nt, Artificial Sequence
  Synthetic
ucuguauauucacauaagagc

SEQ ID NO: 276192 - RNA, 22 nt, Artificial Sequence
  Synthetic
gucuguauauucacauaagagc

SEQ ID NO: 276193 - RNA, 23 nt, Artificial Sequence
  Synthetic
ugucuguauauucacauaagagc

SEQ ID NO: 276194 - RNA, 24 nt, Artificial Sequence
  Synthetic
uugucuguauauucacauaagagc

SEQ ID NO: 276195 - RNA, 18 nt, Artificial Sequence
  Synthetic
cucacagugcaacagagc

SEQ ID NO: 276196 - RNA, 19 nt, Artificial Sequence
  Synthetic
ucucacagugcaacagagc

SEQ ID NO: 276197 - RNA, 20 nt, Artificial Sequence
  Synthetic
cucucacagugcaacagagc

SEQ ID NO: 276198 - RNA, 21 nt, Artificial Sequence
  Synthetic
ucucucacagugcaacagagc

SEQ ID NO: 276199 - RNA, 22 nt, Artificial Sequence
  Synthetic
uucucucacagugcaacagagc

SEQ ID NO: 276200 - RNA, 23 nt, Artificial Sequence
  Synthetic
guucucucacagugcaacagagc

SEQ ID NO: 276201 - RNA, 24 nt, Artificial Sequence
  Synthetic
aguucucucacagugcaacagagc

SEQ ID NO: 276202 - RNA, 18 nt, Artificial Sequence
  Synthetic
acaagcaaagaacagagc

SEQ ID NO: 276203 - RNA, 19 nt, Artificial Sequence
  Synthetic
aacaagcaaagaacagagc

SEQ ID NO: 276204 - RNA, 20 nt, Artificial Sequence
  Synthetic
aaacaagcaaagaacagagc

SEQ ID NO: 276205 - RNA, 21 nt, Artificial Sequence
  Synthetic
caaacaagcaaagaacagagc

SEQ ID NO: 276206 - RNA, 22 nt, Artificial Sequence
  Synthetic
acaaacaagcaaagaacagagc

SEQ ID NO: 276207 - RNA, 23 nt, Artificial Sequence
  Synthetic
uacaaacaagcaaagaacagagc

SEQ ID NO: 276208 - RNA, 24 nt, Artificial Sequence
  Synthetic
uuacaaacaagcaaagaacagagc

SEQ ID NO: 276209 - RNA, 18 nt, Artificial Sequence
  Synthetic
auuuuagagccacagagc

SEQ ID NO: 276210 - RNA, 19 nt, Artificial Sequence
  Synthetic
gauuuuagagccacagagc

SEQ ID NO: 276211 - RNA, 20 nt, Artificial Sequence
  Synthetic
ggauuuuagagccacagagc

SEQ ID NO: 276212 - RNA, 21 nt, Artificial Sequence
  Synthetic
aggauuuuagagccacagagc

SEQ ID NO: 276213 - RNA, 22 nt, Artificial Sequence
  Synthetic
aaggauuuuagagccacagagc

SEQ ID NO: 276214 - RNA, 23 nt, Artificial Sequence
  Synthetic
gaaggauuuuagagccacagagc

SEQ ID NO: 276215 - RNA, 24 nt, Artificial Sequence
  Synthetic
ugaaggauuuuagagccacagagc

SEQ ID NO: 276216 - RNA, 18 nt, Artificial Sequence
  Synthetic
ugauguacuucacagagc

SEQ ID NO: 276217 - RNA, 19 nt, Artificial Sequence
  Synthetic
gugauguacuucacagagc

SEQ ID NO: 276218 - RNA, 20 nt, Artificial Sequence
  Synthetic
ugugauguacuucacagagc

SEQ ID NO: 276219 - RNA, 21 nt, Artificial Sequence
  Synthetic
augugauguacuucacagagc

SEQ ID NO: 276220 - RNA, 22 nt, Artificial Sequence
  Synthetic
aaugugauguacuucacagagc

SEQ ID NO: 276221 - RNA, 23 nt, Artificial Sequence
  Synthetic
aaaugugauguacuucacagagc

SEQ ID NO: 276222 - RNA, 24 nt, Artificial Sequence
  Synthetic
aaaaugugauguacuucacagagc

SEQ ID NO: 276223 - RNA, 18 nt, Artificial Sequence
  Synthetic
cacuagcuaaggcagagc

SEQ ID NO: 276224 - RNA, 19 nt, Artificial Sequence
  Synthetic
acacuagcuaaggcagagc

SEQ ID NO: 276225 - RNA, 20 nt, Artificial Sequence
  Synthetic
aacacuagcuaaggcagagc

SEQ ID NO: 276226 - RNA, 21 nt, Artificial Sequence
  Synthetic
aaacacuagcuaaggcagagc

SEQ ID NO: 276227 - RNA, 22 nt, Artificial Sequence
  Synthetic
aaaacacuagcuaaggcagagc

SEQ ID NO: 276228 - RNA, 23 nt, Artificial Sequence
  Synthetic
aaaaacacuagcuaaggcagagc

SEQ ID NO: 276229 - RNA, 24 nt, Artificial Sequence
  Synthetic
caaaaacacuagcuaaggcagagc

SEQ ID NO: 276230 - RNA, 18 nt, Artificial Sequence
  Synthetic
caaggaucauugcagagc

SEQ ID NO: 276231 - RNA, 19 nt, Artificial Sequence
  Synthetic
ucaaggaucauugcagagc

SEQ ID NO: 276232 - RNA, 20 nt, Artificial Sequence
  Synthetic
cucaaggaucauugcagagc

SEQ ID NO: 276233 - RNA, 21 nt, Artificial Sequence
  Synthetic
ucucaaggaucauugcagagc

SEQ ID NO: 276234 - RNA, 22 nt, Artificial Sequence
  Synthetic
uucucaaggaucauugcagagc

SEQ ID NO: 276235 - RNA, 23 nt, Artificial Sequence
  Synthetic
uuucucaaggaucauugcagagc

SEQ ID NO: 276236 - RNA, 24 nt, Artificial Sequence
  Synthetic
cuuucucaaggaucauugcagagc

SEQ ID NO: 276237 - RNA, 18 nt, Artificial Sequence
  Synthetic
ucucaaaagaaagagagc

SEQ ID NO: 276238 - RNA, 19 nt, Artificial Sequence
  Synthetic
uucucaaaagaaagagagc

SEQ ID NO: 276239 - RNA, 20 nt, Artificial Sequence
  Synthetic
cuucucaaaagaaagagagc

SEQ ID NO: 276240 - RNA, 21 nt, Artificial Sequence
  Synthetic
ucuucucaaaagaaagagagc

SEQ ID NO: 276241 - RNA, 22 nt, Artificial Sequence
  Synthetic
gucuucucaaaagaaagagagc

SEQ ID NO: 276242 - RNA, 23 nt, Artificial Sequence
  Synthetic
agucuucucaaaagaaagagagc

SEQ ID NO: 276243 - RNA, 24 nt, Artificial Sequence
  Synthetic
aagucuucucaaaagaaagagagc

SEQ ID NO: 276244 - RNA, 18 nt, Artificial Sequence
  Synthetic
gguagaaaaagagagagc

SEQ ID NO: 276245 - RNA, 19 nt, Artificial Sequence
  Synthetic
agguagaaaaagagagagc

SEQ ID NO: 276246 - RNA, 20 nt, Artificial Sequence
  Synthetic
gagguagaaaaagagagagc

SEQ ID NO: 276247 - RNA, 21 nt, Artificial Sequence
  Synthetic
cgagguagaaaaagagagagc

SEQ ID NO: 276248 - RNA, 22 nt, Artificial Sequence
  Synthetic
ccgagguagaaaaagagagagc

SEQ ID NO: 276249 - RNA, 23 nt, Artificial Sequence
  Synthetic
cccgagguagaaaaagagagagc

SEQ ID NO: 276250 - RNA, 24 nt, Artificial Sequence
  Synthetic
acccgagguagaaaaagagagagc

SEQ ID NO: 276251 - RNA, 18 nt, Artificial Sequence
  Synthetic
acagacgccugagagagc

SEQ ID NO: 276252 - RNA, 19 nt, Artificial Sequence
  Synthetic
cacagacgccugagagagc

SEQ ID NO: 276253 - RNA, 20 nt, Artificial Sequence
  Synthetic
acacagacgccugagagagc

SEQ ID NO: 276254 - RNA, 21 nt, Artificial Sequence
  Synthetic
aacacagacgccugagagagc

SEQ ID NO: 276255 - RNA, 22 nt, Artificial Sequence
  Synthetic
gaacacagacgccugagagagc

SEQ ID NO: 276256 - RNA, 23 nt, Artificial Sequence
  Synthetic
agaacacagacgccugagagagc

SEQ ID NO: 276257 - RNA, 24 nt, Artificial Sequence
  Synthetic
aagaacacagacgccugagagagc

SEQ ID NO: 276258 - RNA, 18 nt, Artificial Sequence
  Synthetic
uuaaagugaaaggagagc

SEQ ID NO: 276259 - RNA, 19 nt, Artificial Sequence
  Synthetic
auuaaagugaaaggagagc

SEQ ID NO: 276260 - RNA, 20 nt, Artificial Sequence
  Synthetic
cauuaaagugaaaggagagc

SEQ ID NO: 276261 - RNA, 21 nt, Artificial Sequence
  Synthetic
acauuaaagugaaaggagagc

SEQ ID NO: 276262 - RNA, 22 nt, Artificial Sequence
  Synthetic
aacauuaaagugaaaggagagc

SEQ ID NO: 276263 - RNA, 23 nt, Artificial Sequence
  Synthetic
gaacauuaaagugaaaggagagc

SEQ ID NO: 276264 - RNA, 24 nt, Artificial Sequence
  Synthetic
ggaacauuaaagugaaaggagagc

SEQ ID NO: 276265 - RNA, 18 nt, Artificial Sequence
  Synthetic
cugugacuucaggagagc

SEQ ID NO: 276266 - RNA, 19 nt, Artificial Sequence
  Synthetic
ucugugacuucaggagagc

SEQ ID NO: 276267 - RNA, 20 nt, Artificial Sequence
  Synthetic
uucugugacuucaggagagc

SEQ ID NO: 276268 - RNA, 21 nt, Artificial Sequence
  Synthetic
uuucugugacuucaggagagc

SEQ ID NO: 276269 - RNA, 22 nt, Artificial Sequence
  Synthetic
cuuucugugacuucaggagagc

SEQ ID NO: 276270 - RNA, 23 nt, Artificial Sequence
  Synthetic
ucuuucugugacuucaggagagc

SEQ ID NO: 276271 - RNA, 24 nt, Artificial Sequence
  Synthetic
cucuuucugugacuucaggagagc

SEQ ID NO: 276272 - RNA, 18 nt, Artificial Sequence
  Synthetic
ggcaggagauuggagagc

SEQ ID NO: 276273 - RNA, 19 nt, Artificial Sequence
  Synthetic
uggcaggagauuggagagc

SEQ ID NO: 276274 - RNA, 20 nt, Artificial Sequence
  Synthetic
uuggcaggagauuggagagc

SEQ ID NO: 276275 - RNA, 21 nt, Artificial Sequence
  Synthetic
guuggcaggagauuggagagc

SEQ ID NO: 276276 - RNA, 22 nt, Artificial Sequence
  Synthetic
cguuggcaggagauuggagagc

SEQ ID NO: 276277 - RNA, 23 nt, Artificial Sequence
  Synthetic
gcguuggcaggagauuggagagc

SEQ ID NO: 276278 - RNA, 24 nt, Artificial Sequence
  Synthetic
ggcguuggcaggagauuggagagc

SEQ ID NO: 276279 - RNA, 18 nt, Artificial Sequence
  Synthetic
auuuggcugcaugagagc

SEQ ID NO: 276280 - RNA, 19 nt, Artificial Sequence
  Synthetic
uauuuggcugcaugagagc

SEQ ID NO: 276281 - RNA, 20 nt, Artificial Sequence
  Synthetic
auauuuggcugcaugagagc

SEQ ID NO: 276282 - RNA, 21 nt, Artificial Sequence
  Synthetic
aauauuuggcugcaugagagc

SEQ ID NO: 276283 - RNA, 22 nt, Artificial Sequence
  Synthetic
aaauauuuggcugcaugagagc

SEQ ID NO: 276284 - RNA, 23 nt, Artificial Sequence
  Synthetic
aaaauauuuggcugcaugagagc

SEQ ID NO: 276285 - RNA, 24 nt, Artificial Sequence
  Synthetic
aaaaauauuuggcugcaugagagc

SEQ ID NO: 276286 - RNA, 18 nt, Artificial Sequence
  Synthetic
gacugcacauaugagagc

SEQ ID NO: 276287 - RNA, 19 nt, Artificial Sequence
  Synthetic
ugacugcacauaugagagc

SEQ ID NO: 276288 - RNA, 20 nt, Artificial Sequence
  Synthetic
augacugcacauaugagagc

SEQ ID NO: 276289 - RNA, 21 nt, Artificial Sequence
  Synthetic
aaugacugcacauaugagagc

SEQ ID NO: 276290 - RNA, 22 nt, Artificial Sequence
  Synthetic
aaaugacugcacauaugagagc

SEQ ID NO: 276291 - RNA, 23 nt, Artificial Sequence
  Synthetic
aaaaugacugcacauaugagagc

SEQ ID NO: 276292 - RNA, 24 nt, Artificial Sequence
  Synthetic
gaaaaugacugcacauaugagagc

SEQ ID NO: 276293 - RNA, 18 nt, Artificial Sequence
  Synthetic
uacucuuaguuugagagc

SEQ ID NO: 276294 - RNA, 19 nt, Artificial Sequence
  Synthetic
auacucuuaguuugagagc

SEQ ID NO: 276295 - RNA, 20 nt, Artificial Sequence
  Synthetic
uauacucuuaguuugagagc

SEQ ID NO: 276296 - RNA, 21 nt, Artificial Sequence
  Synthetic
guauacucuuaguuugagagc

SEQ ID NO: 276297 - RNA, 22 nt, Artificial Sequence
  Synthetic
uguauacucuuaguuugagagc

SEQ ID NO: 276298 - RNA, 23 nt, Artificial Sequence
  Synthetic
auguauacucuuaguuugagagc

SEQ ID NO: 276299 - RNA, 24 nt, Artificial Sequence
  Synthetic
uauguauacucuuaguuugagagc

SEQ ID NO: 276300 - RNA, 18 nt, Artificial Sequence
  Synthetic
gauuacacaaaauagagc

SEQ ID NO: 276301 - RNA, 19 nt, Artificial Sequence
  Synthetic
ggauuacacaaaauagagc

SEQ ID NO: 276302 - RNA, 20 nt, Artificial Sequence
  Synthetic
gggauuacacaaaauagagc

SEQ ID NO: 276303 - RNA, 21 nt, Artificial Sequence
  Synthetic
ggggauuacacaaaauagagc

SEQ ID NO: 276304 - RNA, 22 nt, Artificial Sequence
  Synthetic
aggggauuacacaaaauagagc

SEQ ID NO: 276305 - RNA, 23 nt, Artificial Sequence
  Synthetic
aaggggauuacacaaaauagagc

SEQ ID NO: 276306 - RNA, 24 nt, Artificial Sequence
  Synthetic
gaaggggauuacacaaaauagagc

SEQ ID NO: 276307 - RNA, 18 nt, Artificial Sequence
  Synthetic
uuaccaaggucauagagc

SEQ ID NO: 276308 - RNA, 19 nt, Artificial Sequence
  Synthetic
uuuaccaaggucauagagc

SEQ ID NO: 276309 - RNA, 20 nt, Artificial Sequence
  Synthetic
cuuuaccaaggucauagagc

SEQ ID NO: 276310 - RNA, 21 nt, Artificial Sequence
  Synthetic
acuuuaccaaggucauagagc

SEQ ID NO: 276311 - RNA, 22 nt, Artificial Sequence
  Synthetic
gacuuuaccaaggucauagagc

SEQ ID NO: 276312 - RNA, 23 nt, Artificial Sequence
  Synthetic
ugacuuuaccaaggucauagagc

SEQ ID NO: 276313 - RNA, 24 nt, Artificial Sequence
  Synthetic
gugacuuuaccaaggucauagagc

SEQ ID NO: 276314 - RNA, 18 nt, Artificial Sequence
  Synthetic
uuacugggcagauagagc

SEQ ID NO: 276315 - RNA, 19 nt, Artificial Sequence
  Synthetic
uuuacugggcagauagagc

SEQ ID NO: 276316 - RNA, 20 nt, Artificial Sequence
  Synthetic
uuuuacugggcagauagagc

SEQ ID NO: 276317 - RNA, 21 nt, Artificial Sequence
  Synthetic
cuuuuacugggcagauagagc

SEQ ID NO: 276318 - RNA, 22 nt, Artificial Sequence
  Synthetic
ccuuuuacugggcagauagagc

SEQ ID NO: 276319 - RNA, 23 nt, Artificial Sequence
  Synthetic
uccuuuuacugggcagauagagc

SEQ ID NO: 276320 - RNA, 24 nt, Artificial Sequence
  Synthetic
guccuuuuacugggcagauagagc

SEQ ID NO: 276321 - RNA, 18 nt, Artificial Sequence
  Synthetic
augguaugaaacuagagc

SEQ ID NO: 276322 - RNA, 19 nt, Artificial Sequence
  Synthetic
caugguaugaaacuagagc

SEQ ID NO: 276323 - RNA, 20 nt, Artificial Sequence
  Synthetic
ucaugguaugaaacuagagc

SEQ ID NO: 276324 - RNA, 21 nt, Artificial Sequence
  Synthetic
cucaugguaugaaacuagagc

SEQ ID NO: 276325 - RNA, 22 nt, Artificial Sequence
  Synthetic
gcucaugguaugaaacuagagc

SEQ ID NO: 276326 - RNA, 23 nt, Artificial Sequence
  Synthetic
ugcucaugguaugaaacuagagc

SEQ ID NO: 276327 - RNA, 24 nt, Artificial Sequence
  Synthetic
uugcucaugguaugaaacuagagc

SEQ ID NO: 276328 - RNA, 18 nt, Artificial Sequence
  Synthetic
acuucaccuggcuagagc

SEQ ID NO: 276329 - RNA, 19 nt, Artificial Sequence
  Synthetic
cacuucaccuggcuagagc

SEQ ID NO: 276330 - RNA, 20 nt, Artificial Sequence
  Synthetic
gcacuucaccuggcuagagc

SEQ ID NO: 276331 - RNA, 21 nt, Artificial Sequence
  Synthetic
ggcacuucaccuggcuagagc

SEQ ID NO: 276332 - RNA, 22 nt, Artificial Sequence
  Synthetic
aggcacuucaccuggcuagagc

SEQ ID NO: 276333 - RNA, 23 nt, Artificial Sequence
  Synthetic
caggcacuucaccuggcuagagc

SEQ ID NO: 276334 - RNA, 24 nt, Artificial Sequence
  Synthetic
gcaggcacuucaccuggcuagagc

SEQ ID NO: 276335 - RNA, 18 nt, Artificial Sequence
  Synthetic
agauggcaacaguagagc

SEQ ID NO: 276336 - RNA, 19 nt, Artificial Sequence
  Synthetic
aagauggcaacaguagagc

SEQ ID NO: 276337 - RNA, 20 nt, Artificial Sequence
  Synthetic
caagauggcaacaguagagc

SEQ ID NO: 276338 - RNA, 21 nt, Artificial Sequence
  Synthetic
ucaagauggcaacaguagagc

SEQ ID NO: 276339 - RNA, 22 nt, Artificial Sequence
  Synthetic
uucaagauggcaacaguagagc

SEQ ID NO: 276340 - RNA, 23 nt, Artificial Sequence
  Synthetic
uuucaagauggcaacaguagagc

SEQ ID NO: 276341 - RNA, 24 nt, Artificial Sequence
  Synthetic
auuucaagauggcaacaguagagc

SEQ ID NO: 276342 - RNA, 18 nt, Artificial Sequence
  Synthetic
uaauucuuaugguagagc

SEQ ID NO: 276343 - RNA, 19 nt, Artificial Sequence
  Synthetic
guaauucuuaugguagagc

SEQ ID NO: 276344 - RNA, 20 nt, Artificial Sequence
  Synthetic
uguaauucuuaugguagagc

SEQ ID NO: 276345 - RNA, 21 nt, Artificial Sequence
  Synthetic
uuguaauucuuaugguagagc

SEQ ID NO: 276346 - RNA, 22 nt, Artificial Sequence
  Synthetic
uuuguaauucuuaugguagagc

SEQ ID NO: 276347 - RNA, 23 nt, Artificial Sequence
  Synthetic
auuuguaauucuuaugguagagc

SEQ ID NO: 276348 - RNA, 24 nt, Artificial Sequence
  Synthetic
uauuuguaauucuuaugguagagc

SEQ ID NO: 276349 - RNA, 18 nt, Artificial Sequence
  Synthetic
ugccaacaaacuuagagc

SEQ ID NO: 276350 - RNA, 19 nt, Artificial Sequence
  Synthetic
augccaacaaacuuagagc

SEQ ID NO: 276351 - RNA, 20 nt, Artificial Sequence
  Synthetic
aaugccaacaaacuuagagc

SEQ ID NO: 276352 - RNA, 21 nt, Artificial Sequence
  Synthetic
aaaugccaacaaacuuagagc

SEQ ID NO: 276353 - RNA, 22 nt, Artificial Sequence
  Synthetic
gaaaugccaacaaacuuagagc

SEQ ID NO: 276354 - RNA, 23 nt, Artificial Sequence
  Synthetic
ugaaaugccaacaaacuuagagc

SEQ ID NO: 276355 - RNA, 24 nt, Artificial Sequence
  Synthetic
gugaaaugccaacaaacuuagagc

SEQ ID NO: 276356 - RNA, 18 nt, Artificial Sequence
  Synthetic
gauucccauucuuagagc

SEQ ID NO: 276357 - RNA, 19 nt, Artificial Sequence
  Synthetic
ggauucccauucuuagagc

SEQ ID NO: 276358 - RNA, 20 nt, Artificial Sequence
  Synthetic
gggauucccauucuuagagc

SEQ ID NO: 276359 - RNA, 21 nt, Artificial Sequence
  Synthetic
agggauucccauucuuagagc

SEQ ID NO: 276360 - RNA, 22 nt, Artificial Sequence
  Synthetic
aagggauucccauucuuagagc

SEQ ID NO: 276361 - RNA, 23 nt, Artificial Sequence
  Synthetic
uaagggauucccauucuuagagc

SEQ ID NO: 276362 - RNA, 24 nt, Artificial Sequence
  Synthetic
cuaagggauucccauucuuagagc

SEQ ID NO: 276363 - RNA, 18 nt, Artificial Sequence
  Synthetic
aauugauucauuuagagc

SEQ ID NO: 276364 - RNA, 19 nt, Artificial Sequence
  Synthetic
aaauugauucauuuagagc

SEQ ID NO: 276365 - RNA, 20 nt, Artificial Sequence
  Synthetic
aaaauugauucauuuagagc

SEQ ID NO: 276366 - RNA, 21 nt, Artificial Sequence
  Synthetic
uaaaauugauucauuuagagc

SEQ ID NO: 276367 - RNA, 22 nt, Artificial Sequence
  Synthetic
uuaaaauugauucauuuagagc

SEQ ID NO: 276368 - RNA, 23 nt, Artificial Sequence
  Synthetic
uuuaaaauugauucauuuagagc

SEQ ID NO: 276369 - RNA, 24 nt, Artificial Sequence
  Synthetic
auuuaaaauugauucauuuagagc

SEQ ID NO: 276370 - RNA, 18 nt, Artificial Sequence
  Synthetic
uucuuccuaaccacgagc

SEQ ID NO: 276371 - RNA, 19 nt, Artificial Sequence
  Synthetic
auucuuccuaaccacgagc

SEQ ID NO: 276372 - RNA, 20 nt, Artificial Sequence
  Synthetic
gauucuuccuaaccacgagc

SEQ ID NO: 276373 - RNA, 21 nt, Artificial Sequence
  Synthetic
ugauucuuccuaaccacgagc

SEQ ID NO: 276374 - RNA, 22 nt, Artificial Sequence
  Synthetic
cugauucuuccuaaccacgagc

SEQ ID NO: 276375 - RNA, 23 nt, Artificial Sequence
  Synthetic
acugauucuuccuaaccacgagc

SEQ ID NO: 276376 - RNA, 24 nt, Artificial Sequence
  Synthetic
cacugauucuuccuaaccacgagc

SEQ ID NO: 276377 - RNA, 18 nt, Artificial Sequence
  Synthetic
caaauggaaaugccgagc

SEQ ID NO: 276378 - RNA, 19 nt, Artificial Sequence
  Synthetic
acaaauggaaaugccgagc

SEQ ID NO: 276379 - RNA, 20 nt, Artificial Sequence
  Synthetic
aacaaauggaaaugccgagc

SEQ ID NO: 276380 - RNA, 21 nt, Artificial Sequence
  Synthetic
caacaaauggaaaugccgagc

SEQ ID NO: 276381 - RNA, 22 nt, Artificial Sequence
  Synthetic
gcaacaaauggaaaugccgagc

SEQ ID NO: 276382 - RNA, 23 nt, Artificial Sequence
  Synthetic
agcaacaaauggaaaugccgagc

SEQ ID NO: 276383 - RNA, 24 nt, Artificial Sequence
  Synthetic
gagcaacaaauggaaaugccgagc

SEQ ID NO: 276384 - RNA, 18 nt, Artificial Sequence
  Synthetic
gaaaaggaucaagcgagc

SEQ ID NO: 276385 - RNA, 19 nt, Artificial Sequence
  Synthetic
agaaaaggaucaagcgagc

SEQ ID NO: 276386 - RNA, 20 nt, Artificial Sequence
  Synthetic
cagaaaaggaucaagcgagc

SEQ ID NO: 276387 - RNA, 21 nt, Artificial Sequence
  Synthetic
gcagaaaaggaucaagcgagc

SEQ ID NO: 276388 - RNA, 22 nt, Artificial Sequence
  Synthetic
ggcagaaaaggaucaagcgagc

SEQ ID NO: 276389 - RNA, 23 nt, Artificial Sequence
  Synthetic
aggcagaaaaggaucaagcgagc

SEQ ID NO: 276390 - RNA, 24 nt, Artificial Sequence
  Synthetic
uaggcagaaaaggaucaagcgagc

SEQ ID NO: 276391 - RNA, 18 nt, Artificial Sequence
  Synthetic
ggauccugucaaaggagc

SEQ ID NO: 276392 - RNA, 19 nt, Artificial Sequence
  Synthetic
uggauccugucaaaggagc

SEQ ID NO: 276393 - RNA, 20 nt, Artificial Sequence
  Synthetic
guggauccugucaaaggagc

SEQ ID NO: 276394 - RNA, 21 nt, Artificial Sequence
  Synthetic
uguggauccugucaaaggagc

SEQ ID NO: 276395 - RNA, 22 nt, Artificial Sequence
  Synthetic
cuguggauccugucaaaggagc

SEQ ID NO: 276396 - RNA, 23 nt, Artificial Sequence
  Synthetic
ucuguggauccugucaaaggagc

SEQ ID NO: 276397 - RNA, 24 nt, Artificial Sequence
  Synthetic
aucuguggauccugucaaaggagc

SEQ ID NO: 276398 - RNA, 18 nt, Artificial Sequence
  Synthetic
uuuuaaagauuaaggagc

SEQ ID NO: 276399 - RNA, 19 nt, Artificial Sequence
  Synthetic
uuuuuaaagauuaaggagc

SEQ ID NO: 276400 - RNA, 20 nt, Artificial Sequence
  Synthetic
auuuuuaaagauuaaggagc

SEQ ID NO: 276401 - RNA, 21 nt, Artificial Sequence
  Synthetic
aauuuuuaaagauuaaggagc

SEQ ID NO: 276402 - RNA, 22 nt, Artificial Sequence
  Synthetic
uaauuuuuaaagauuaaggagc

SEQ ID NO: 276403 - RNA, 23 nt, Artificial Sequence
  Synthetic
auaauuuuuaaagauuaaggagc

SEQ ID NO: 276404 - RNA, 24 nt, Artificial Sequence
  Synthetic
gauaauuuuuaaagauuaaggagc

SEQ ID NO: 276405 - RNA, 18 nt, Artificial Sequence
  Synthetic
aaggauguuaccaggagc

SEQ ID NO: 276406 - RNA, 19 nt, Artificial Sequence
  Synthetic
gaaggauguuaccaggagc

SEQ ID NO: 276407 - RNA, 20 nt, Artificial Sequence
  Synthetic
ugaaggauguuaccaggagc

SEQ ID NO: 276408 - RNA, 21 nt, Artificial Sequence
  Synthetic
uugaaggauguuaccaggagc

SEQ ID NO: 276409 - RNA, 22 nt, Artificial Sequence
  Synthetic
guugaaggauguuaccaggagc

SEQ ID NO: 276410 - RNA, 23 nt, Artificial Sequence
  Synthetic
aguugaaggauguuaccaggagc

SEQ ID NO: 276411 - RNA, 24 nt, Artificial Sequence
  Synthetic
aaguugaaggauguuaccaggagc

SEQ ID NO: 276412 - RNA, 18 nt, Artificial Sequence
  Synthetic
ccuggcuagagcaggagc

SEQ ID NO: 276413 - RNA, 19 nt, Artificial Sequence
  Synthetic
accuggcuagagcaggagc

SEQ ID NO: 276414 - RNA, 20 nt, Artificial Sequence
  Synthetic
caccuggcuagagcaggagc

SEQ ID NO: 276415 - RNA, 21 nt, Artificial Sequence
  Synthetic
ucaccuggcuagagcaggagc

SEQ ID NO: 276416 - RNA, 22 nt, Artificial Sequence
  Synthetic
uucaccuggcuagagcaggagc

SEQ ID NO: 276417 - RNA, 23 nt, Artificial Sequence
  Synthetic
cuucaccuggcuagagcaggagc

SEQ ID NO: 276418 - RNA, 24 nt, Artificial Sequence
  Synthetic
acuucaccuggcuagagcaggagc

SEQ ID NO: 276419 - RNA, 18 nt, Artificial Sequence
  Synthetic
ucccagcuacucaggagc

SEQ ID NO: 276420 - RNA, 19 nt, Artificial Sequence
  Synthetic
aucccagcuacucaggagc

SEQ ID NO: 276421 - RNA, 20 nt, Artificial Sequence
  Synthetic
aaucccagcuacucaggagc

SEQ ID NO: 276422 - RNA, 21 nt, Artificial Sequence
  Synthetic
uaaucccagcuacucaggagc

SEQ ID NO: 276423 - RNA, 22 nt, Artificial Sequence
  Synthetic
guaaucccagcuacucaggagc

SEQ ID NO: 276424 - RNA, 23 nt, Artificial Sequence
  Synthetic
uguaaucccagcuacucaggagc

SEQ ID NO: 276425 - RNA, 24 nt, Artificial Sequence
  Synthetic
uuguaaucccagcuacucaggagc

SEQ ID NO: 276426 - RNA, 18 nt, Artificial Sequence
  Synthetic
ucaccugaggucaggagc

SEQ ID NO: 276427 - RNA, 19 nt, Artificial Sequence
  Synthetic
aucaccugaggucaggagc

SEQ ID NO: 276428 - RNA, 20 nt, Artificial Sequence
  Synthetic
gaucaccugaggucaggagc

SEQ ID NO: 276429 - RNA, 21 nt, Artificial Sequence
  Synthetic
ggaucaccugaggucaggagc

SEQ ID NO: 276430 - RNA, 22 nt, Artificial Sequence
  Synthetic
cggaucaccugaggucaggagc

SEQ ID NO: 276431 - RNA, 23 nt, Artificial Sequence
  Synthetic
gcggaucaccugaggucaggagc

SEQ ID NO: 276432 - RNA, 24 nt, Artificial Sequence
  Synthetic
ggcggaucaccugaggucaggagc

SEQ ID NO: 276433 - RNA, 18 nt, Artificial Sequence
  Synthetic
augaggacacagaggagc

SEQ ID NO: 276434 - RNA, 19 nt, Artificial Sequence
  Synthetic
aaugaggacacagaggagc

SEQ ID NO: 276435 - RNA, 20 nt, Artificial Sequence
  Synthetic
aaaugaggacacagaggagc

SEQ ID NO: 276436 - RNA, 21 nt, Artificial Sequence
  Synthetic
caaaugaggacacagaggagc

SEQ ID NO: 276437 - RNA, 22 nt, Artificial Sequence
  Synthetic
acaaaugaggacacagaggagc

SEQ ID NO: 276438 - RNA, 23 nt, Artificial Sequence
  Synthetic
uacaaaugaggacacagaggagc

SEQ ID NO: 276439 - RNA, 24 nt, Artificial Sequence
  Synthetic
uuacaaaugaggacacagaggagc

SEQ ID NO: 276440 - RNA, 18 nt, Artificial Sequence
  Synthetic
ggcaggaggaggaggagc

SEQ ID NO: 276441 - RNA, 19 nt, Artificial Sequence
  Synthetic
aggcaggaggaggaggagc

SEQ ID NO: 276442 - RNA, 20 nt, Artificial Sequence
  Synthetic
uaggcaggaggaggaggagc

SEQ ID NO: 276443 - RNA, 21 nt, Artificial Sequence
  Synthetic
guaggcaggaggaggaggagc

SEQ ID NO: 276444 - RNA, 22 nt, Artificial Sequence
  Synthetic
uguaggcaggaggaggaggagc

SEQ ID NO: 276445 - RNA, 23 nt, Artificial Sequence
  Synthetic
auguaggcaggaggaggaggagc

SEQ ID NO: 276446 - RNA, 24 nt, Artificial Sequence
  Synthetic
gauguaggcaggaggaggaggagc

SEQ ID NO: 276447 - RNA, 18 nt, Artificial Sequence
  Synthetic
acauggguguggaggagc

SEQ ID NO: 276448 - RNA, 19 nt, Artificial Sequence
  Synthetic
gacauggguguggaggagc

SEQ ID NO: 276449 - RNA, 20 nt, Artificial Sequence
  Synthetic
agacauggguguggaggagc

SEQ ID NO: 276450 - RNA, 21 nt, Artificial Sequence
  Synthetic
uagacauggguguggaggagc

SEQ ID NO: 276451 - RNA, 22 nt, Artificial Sequence
  Synthetic
auagacauggguguggaggagc

SEQ ID NO: 276452 - RNA, 23 nt, Artificial Sequence
  Synthetic
aauagacauggguguggaggagc

SEQ ID NO: 276453 - RNA, 24 nt, Artificial Sequence
  Synthetic
caauagacauggguguggaggagc

SEQ ID NO: 276454 - RNA, 18 nt, Artificial Sequence
  Synthetic
ucuagaucuuugaggagc

SEQ ID NO: 276455 - RNA, 19 nt, Artificial Sequence
  Synthetic
uucuagaucuuugaggagc

SEQ ID NO: 276456 - RNA, 20 nt, Artificial Sequence
  Synthetic
guucuagaucuuugaggagc

SEQ ID NO: 276457 - RNA, 21 nt, Artificial Sequence
  Synthetic
gguucuagaucuuugaggagc

SEQ ID NO: 276458 - RNA, 22 nt, Artificial Sequence
  Synthetic
ugguucuagaucuuugaggagc

SEQ ID NO: 276459 - RNA, 23 nt, Artificial Sequence
  Synthetic
cugguucuagaucuuugaggagc

SEQ ID NO: 276460 - RNA, 24 nt, Artificial Sequence
  Synthetic
ucugguucuagaucuuugaggagc

SEQ ID NO: 276461 - RNA, 18 nt, Artificial Sequence
  Synthetic
uucuagggagaagggagc

SEQ ID NO: 276462 - RNA, 19 nt, Artificial Sequence
  Synthetic
uuucuagggagaagggagc

SEQ ID NO: 276463 - RNA, 20 nt, Artificial Sequence
  Synthetic
uuuucuagggagaagggagc

SEQ ID NO: 276464 - RNA, 21 nt, Artificial Sequence
  Synthetic
guuuucuagggagaagggagc

SEQ ID NO: 276465 - RNA, 22 nt, Artificial Sequence
  Synthetic
aguuuucuagggagaagggagc

SEQ ID NO: 276466 - RNA, 23 nt, Artificial Sequence
  Synthetic
caguuuucuagggagaagggagc

SEQ ID NO: 276467 - RNA, 24 nt, Artificial Sequence
  Synthetic
ucaguuuucuagggagaagggagc

SEQ ID NO: 276468 - RNA, 18 nt, Artificial Sequence
  Synthetic
ucccagcuacucgggagc

SEQ ID NO: 276469 - RNA, 19 nt, Artificial Sequence
  Synthetic
gucccagcuacucgggagc

SEQ ID NO: 276470 - RNA, 20 nt, Artificial Sequence
  Synthetic
agucccagcuacucgggagc

SEQ ID NO: 276471 - RNA, 21 nt, Artificial Sequence
  Synthetic
uagucccagcuacucgggagc

SEQ ID NO: 276472 - RNA, 22 nt, Artificial Sequence
  Synthetic
guagucccagcuacucgggagc

SEQ ID NO: 276473 - RNA, 23 nt, Artificial Sequence
  Synthetic
uguagucccagcuacucgggagc

SEQ ID NO: 276474 - RNA, 24 nt, Artificial Sequence
  Synthetic
cuguagucccagcuacucgggagc

SEQ ID NO: 276475 - RNA, 18 nt, Artificial Sequence
  Synthetic
caggcugccucugggagc

SEQ ID NO: 276476 - RNA, 19 nt, Artificial Sequence
  Synthetic
acaggcugccucugggagc

SEQ ID NO: 276477 - RNA, 20 nt, Artificial Sequence
  Synthetic
uacaggcugccucugggagc

SEQ ID NO: 276478 - RNA, 21 nt, Artificial Sequence
  Synthetic
auacaggcugccucugggagc

SEQ ID NO: 276479 - RNA, 22 nt, Artificial Sequence
  Synthetic
uauacaggcugccucugggagc

SEQ ID NO: 276480 - RNA, 23 nt, Artificial Sequence
  Synthetic
auauacaggcugccucugggagc

SEQ ID NO: 276481 - RNA, 24 nt, Artificial Sequence
  Synthetic
uauauacaggcugccucugggagc

SEQ ID NO: 276482 - RNA, 18 nt, Artificial Sequence
  Synthetic
ucccagcacuuugggagc

SEQ ID NO: 276483 - RNA, 19 nt, Artificial Sequence
  Synthetic
aucccagcacuuugggagc

SEQ ID NO: 276484 - RNA, 20 nt, Artificial Sequence
  Synthetic
aaucccagcacuuugggagc

SEQ ID NO: 276485 - RNA, 21 nt, Artificial Sequence
  Synthetic
uaaucccagcacuuugggagc

SEQ ID NO: 276486 - RNA, 22 nt, Artificial Sequence
  Synthetic
guaaucccagcacuuugggagc

SEQ ID NO: 276487 - RNA, 23 nt, Artificial Sequence
  Synthetic
uguaaucccagcacuuugggagc

SEQ ID NO: 276488 - RNA, 24 nt, Artificial Sequence
  Synthetic
cuguaaucccagcacuuugggagc

SEQ ID NO: 276489 - RNA, 18 nt, Artificial Sequence
  Synthetic
gaucagaagcaauggagc

SEQ ID NO: 276490 - RNA, 19 nt, Artificial Sequence
  Synthetic
ugaucagaagcaauggagc

SEQ ID NO: 276491 - RNA, 20 nt, Artificial Sequence
  Synthetic
augaucagaagcaauggagc

SEQ ID NO: 276492 - RNA, 21 nt, Artificial Sequence
  Synthetic
caugaucagaagcaauggagc

SEQ ID NO: 276493 - RNA, 22 nt, Artificial Sequence
  Synthetic
ucaugaucagaagcaauggagc

SEQ ID NO: 276494 - RNA, 23 nt, Artificial Sequence
  Synthetic
uucaugaucagaagcaauggagc

SEQ ID NO: 276495 - RNA, 24 nt, Artificial Sequence
  Synthetic
cuucaugaucagaagcaauggagc

SEQ ID NO: 276496 - RNA, 18 nt, Artificial Sequence
  Synthetic
auccagcuaaacuggagc

SEQ ID NO: 276497 - RNA, 19 nt, Artificial Sequence
  Synthetic
aauccagcuaaacuggagc

SEQ ID NO: 276498 - RNA, 20 nt, Artificial Sequence
  Synthetic
caauccagcuaaacuggagc

SEQ ID NO: 276499 - RNA, 21 nt, Artificial Sequence
  Synthetic
ccaauccagcuaaacuggagc

SEQ ID NO: 276500 - RNA, 22 nt, Artificial Sequence
  Synthetic
uccaauccagcuaaacuggagc

SEQ ID NO: 276501 - RNA, 23 nt, Artificial Sequence
  Synthetic
uuccaauccagcuaaacuggagc

SEQ ID NO: 276502 - RNA, 24 nt, Artificial Sequence
  Synthetic
uuuccaauccagcuaaacuggagc

SEQ ID NO: 276503 - RNA, 18 nt, Artificial Sequence
  Synthetic
uggggaagacacuggagc

SEQ ID NO: 276504 - RNA, 19 nt, Artificial Sequence
  Synthetic
auggggaagacacuggagc

SEQ ID NO: 276505 - RNA, 20 nt, Artificial Sequence
  Synthetic
gauggggaagacacuggagc

SEQ ID NO: 276506 - RNA, 21 nt, Artificial Sequence
  Synthetic
ggauggggaagacacuggagc

SEQ ID NO: 276507 - RNA, 22 nt, Artificial Sequence
  Synthetic
uggauggggaagacacuggagc

SEQ ID NO: 276508 - RNA, 23 nt, Artificial Sequence
  Synthetic
auggauggggaagacacuggagc

SEQ ID NO: 276509 - RNA, 24 nt, Artificial Sequence
  Synthetic
aauggauggggaagacacuggagc

SEQ ID NO: 276510 - RNA, 18 nt, Artificial Sequence
  Synthetic
gauguuuuuuacuggagc

SEQ ID NO: 276511 - RNA, 19 nt, Artificial Sequence
  Synthetic
ggauguuuuuuacuggagc

SEQ ID NO: 276512 - RNA, 20 nt, Artificial Sequence
  Synthetic
uggauguuuuuuacuggagc

SEQ ID NO: 276513 - RNA, 21 nt, Artificial Sequence
  Synthetic
guggauguuuuuuacuggagc

SEQ ID NO: 276514 - RNA, 22 nt, Artificial Sequence
  Synthetic
uguggauguuuuuuacuggagc

SEQ ID NO: 276515 - RNA, 23 nt, Artificial Sequence
  Synthetic
guguggauguuuuuuacuggagc

SEQ ID NO: 276516 - RNA, 24 nt, Artificial Sequence
  Synthetic
uguguggauguuuuuuacuggagc

SEQ ID NO: 276517 - RNA, 18 nt, Artificial Sequence
  Synthetic
ggaaaagugagcuggagc

SEQ ID NO: 276518 - RNA, 19 nt, Artificial Sequence
  Synthetic
uggaaaagugagcuggagc

SEQ ID NO: 276519 - RNA, 20 nt, Artificial Sequence
  Synthetic
uuggaaaagugagcuggagc

SEQ ID NO: 276520 - RNA, 21 nt, Artificial Sequence
  Synthetic
auuggaaaagugagcuggagc

SEQ ID NO: 276521 - RNA, 22 nt, Artificial Sequence
  Synthetic
gauuggaaaagugagcuggagc

SEQ ID NO: 276522 - RNA, 23 nt, Artificial Sequence
  Synthetic
ugauuggaaaagugagcuggagc

SEQ ID NO: 276523 - RNA, 24 nt, Artificial Sequence
  Synthetic
cugauuggaaaagugagcuggagc

SEQ ID NO: 276524 - RNA, 18 nt, Artificial Sequence
  Synthetic
ccaaaaggacucuggagc

SEQ ID NO: 276525 - RNA, 19 nt, Artificial Sequence
  Synthetic
uccaaaaggacucuggagc

SEQ ID NO: 276526 - RNA, 20 nt, Artificial Sequence
  Synthetic
cuccaaaaggacucuggagc

SEQ ID NO: 276527 - RNA, 21 nt, Artificial Sequence
  Synthetic
acuccaaaaggacucuggagc

SEQ ID NO: 276528 - RNA, 22 nt, Artificial Sequence
  Synthetic
aacuccaaaaggacucuggagc

SEQ ID NO: 276529 - RNA, 23 nt, Artificial Sequence
  Synthetic
aaacuccaaaaggacucuggagc

SEQ ID NO: 276530 - RNA, 24 nt, Artificial Sequence
  Synthetic
gaaacuccaaaaggacucuggagc

SEQ ID NO: 276531 - RNA, 18 nt, Artificial Sequence
  Synthetic
uuagcucuagaguggagc

SEQ ID NO: 276532 - RNA, 19 nt, Artificial Sequence
  Synthetic
auuagcucuagaguggagc

SEQ ID NO: 276533 - RNA, 20 nt, Artificial Sequence
  Synthetic
cauuagcucuagaguggagc

SEQ ID NO: 276534 - RNA, 21 nt, Artificial Sequence
  Synthetic
ucauuagcucuagaguggagc

SEQ ID NO: 276535 - RNA, 22 nt, Artificial Sequence
  Synthetic
uucauuagcucuagaguggagc

SEQ ID NO: 276536 - RNA, 23 nt, Artificial Sequence
  Synthetic
auucauuagcucuagaguggagc

SEQ ID NO: 276537 - RNA, 24 nt, Artificial Sequence
  Synthetic
gauucauuagcucuagaguggagc

SEQ ID NO: 276538 - RNA, 18 nt, Artificial Sequence
  Synthetic
gccaguaauuauuggagc

SEQ ID NO: 276539 - RNA, 19 nt, Artificial Sequence
  Synthetic
agccaguaauuauuggagc

SEQ ID NO: 276540 - RNA, 20 nt, Artificial Sequence
  Synthetic
uagccaguaauuauuggagc

SEQ ID NO: 276541 - RNA, 21 nt, Artificial Sequence
  Synthetic
guagccaguaauuauuggagc

SEQ ID NO: 276542 - RNA, 22 nt, Artificial Sequence
  Synthetic
uguagccaguaauuauuggagc

SEQ ID NO: 276543 - RNA, 23 nt, Artificial Sequence
  Synthetic
auguagccaguaauuauuggagc

SEQ ID NO: 276544 - RNA, 24 nt, Artificial Sequence
  Synthetic
gauguagccaguaauuauuggagc

SEQ ID NO: 276545 - RNA, 18 nt, Artificial Sequence
  Synthetic
gauauuauggaaaugagc

SEQ ID NO: 276546 - RNA, 19 nt, Artificial Sequence
  Synthetic
ggauauuauggaaaugagc

SEQ ID NO: 276547 - RNA, 20 nt, Artificial Sequence
  Synthetic
aggauauuauggaaaugagc

SEQ ID NO: 276548 - RNA, 21 nt, Artificial Sequence
  Synthetic
gaggauauuauggaaaugagc

SEQ ID NO: 276549 - RNA, 22 nt, Artificial Sequence
  Synthetic
agaggauauuauggaaaugagc

SEQ ID NO: 276550 - RNA, 23 nt, Artificial Sequence
  Synthetic
uagaggauauuauggaaaugagc

SEQ ID NO: 276551 - RNA, 24 nt, Artificial Sequence
  Synthetic
uuagaggauauuauggaaaugagc

SEQ ID NO: 276552 - RNA, 18 nt, Artificial Sequence
  Synthetic
uuaggacuggaaaugagc

SEQ ID NO: 276553 - RNA, 19 nt, Artificial Sequence
  Synthetic
uuuaggacuggaaaugagc

SEQ ID NO: 276554 - RNA, 20 nt, Artificial Sequence
  Synthetic
guuuaggacuggaaaugagc

SEQ ID NO: 276555 - RNA, 21 nt, Artificial Sequence
  Synthetic
uguuuaggacuggaaaugagc

SEQ ID NO: 276556 - RNA, 22 nt, Artificial Sequence
  Synthetic
uuguuuaggacuggaaaugagc

SEQ ID NO: 276557 - RNA, 23 nt, Artificial Sequence
  Synthetic
auuguuuaggacuggaaaugagc

SEQ ID NO: 276558 - RNA, 24 nt, Artificial Sequence
  Synthetic
uauuguuuaggacuggaaaugagc

SEQ ID NO: 276559 - RNA, 18 nt, Artificial Sequence
  Synthetic
uacuuggagagaaugagc

SEQ ID NO: 276560 - RNA, 19 nt, Artificial Sequence
  Synthetic
uuacuuggagagaaugagc

SEQ ID NO: 276561 - RNA, 20 nt, Artificial Sequence
  Synthetic
guuacuuggagagaaugagc

SEQ ID NO: 276562 - RNA, 21 nt, Artificial Sequence
  Synthetic
uguuacuuggagagaaugagc

SEQ ID NO: 276563 - RNA, 22 nt, Artificial Sequence
  Synthetic
uuguuacuuggagagaaugagc

SEQ ID NO: 276564 - RNA, 23 nt, Artificial Sequence
  Synthetic
uuuguuacuuggagagaaugagc

SEQ ID NO: 276565 - RNA, 24 nt, Artificial Sequence
  Synthetic
uuuuguuacuuggagagaaugagc

SEQ ID NO: 276566 - RNA, 18 nt, Artificial Sequence
  Synthetic
gccccuuguagaaugagc

SEQ ID NO: 276567 - RNA, 19 nt, Artificial Sequence
  Synthetic
ugccccuuguagaaugagc

SEQ ID NO: 276568 - RNA, 20 nt, Artificial Sequence
  Synthetic
augccccuuguagaaugagc

SEQ ID NO: 276569 - RNA, 21 nt, Artificial Sequence
  Synthetic
gaugccccuuguagaaugagc

SEQ ID NO: 276570 - RNA, 22 nt, Artificial Sequence
  Synthetic
ugaugccccuuguagaaugagc

SEQ ID NO: 276571 - RNA, 23 nt, Artificial Sequence
  Synthetic
cugaugccccuuguagaaugagc

SEQ ID NO: 276572 - RNA, 24 nt, Artificial Sequence
  Synthetic
acugaugccccuuguagaaugagc

SEQ ID NO: 276573 - RNA, 18 nt, Artificial Sequence
  Synthetic
gcccaaaggggaaugagc

SEQ ID NO: 276574 - RNA, 19 nt, Artificial Sequence
  Synthetic
agcccaaaggggaaugagc

SEQ ID NO: 276575 - RNA, 20 nt, Artificial Sequence
  Synthetic
cagcccaaaggggaaugagc

SEQ ID NO: 276576 - RNA, 21 nt, Artificial Sequence
  Synthetic
ccagcccaaaggggaaugagc

SEQ ID NO: 276577 - RNA, 22 nt, Artificial Sequence
  Synthetic
gccagcccaaaggggaaugagc

SEQ ID NO: 276578 - RNA, 23 nt, Artificial Sequence
  Synthetic
agccagcccaaaggggaaugagc

SEQ ID NO: 276579 - RNA, 24 nt, Artificial Sequence
  Synthetic
cagccagcccaaaggggaaugagc

SEQ ID NO: 276580 - RNA, 18 nt, Artificial Sequence
  Synthetic
auuuuauccugaaugagc

SEQ ID NO: 276581 - RNA, 19 nt, Artificial Sequence
  Synthetic
aauuuuauccugaaugagc

SEQ ID NO: 276582 - RNA, 20 nt, Artificial Sequence
  Synthetic
uaauuuuauccugaaugagc

SEQ ID NO: 276583 - RNA, 21 nt, Artificial Sequence
  Synthetic
auaauuuuauccugaaugagc

SEQ ID NO: 276584 - RNA, 22 nt, Artificial Sequence
  Synthetic
aauaauuuuauccugaaugagc

SEQ ID NO: 276585 - RNA, 23 nt, Artificial Sequence
  Synthetic
caauaauuuuauccugaaugagc

SEQ ID NO: 276586 - RNA, 24 nt, Artificial Sequence
  Synthetic
ucaauaauuuuauccugaaugagc

SEQ ID NO: 276587 - RNA, 18 nt, Artificial Sequence
  Synthetic
augcuuucaauaaugagc

SEQ ID NO: 276588 - RNA, 19 nt, Artificial Sequence
  Synthetic
aaugcuuucaauaaugagc

SEQ ID NO: 276589 - RNA, 20 nt, Artificial Sequence
  Synthetic
gaaugcuuucaauaaugagc

SEQ ID NO: 276590 - RNA, 21 nt, Artificial Sequence
  Synthetic
ugaaugcuuucaauaaugagc

SEQ ID NO: 276591 - RNA, 22 nt, Artificial Sequence
  Synthetic
augaaugcuuucaauaaugagc

SEQ ID NO: 276592 - RNA, 23 nt, Artificial Sequence
  Synthetic
aaugaaugcuuucaauaaugagc

SEQ ID NO: 276593 - RNA, 24 nt, Artificial Sequence
  Synthetic
uaaugaaugcuuucaauaaugagc

SEQ ID NO: 276594 - RNA, 18 nt, Artificial Sequence
  Synthetic
ggggcgucuguaaugagc

SEQ ID NO: 276595 - RNA, 19 nt, Artificial Sequence
  Synthetic
aggggcgucuguaaugagc

SEQ ID NO: 276596 - RNA, 20 nt, Artificial Sequence
  Synthetic
aaggggcgucuguaaugagc

SEQ ID NO: 276597 - RNA, 21 nt, Artificial Sequence
  Synthetic
gaaggggcgucuguaaugagc

SEQ ID NO: 276598 - RNA, 22 nt, Artificial Sequence
  Synthetic
ggaaggggcgucuguaaugagc

SEQ ID NO: 276599 - RNA, 23 nt, Artificial Sequence
  Synthetic
gggaaggggcgucuguaaugagc

SEQ ID NO: 276600 - RNA, 24 nt, Artificial Sequence
  Synthetic
ggggaaggggcgucuguaaugagc

SEQ ID NO: 276601 - RNA, 18 nt, Artificial Sequence
  Synthetic
acauguuaauacaugagc

SEQ ID NO: 276602 - RNA, 19 nt, Artificial Sequence
  Synthetic
cacauguuaauacaugagc

SEQ ID NO: 276603 - RNA, 20 nt, Artificial Sequence
  Synthetic
ucacauguuaauacaugagc

SEQ ID NO: 276604 - RNA, 21 nt, Artificial Sequence
  Synthetic
gucacauguuaauacaugagc

SEQ ID NO: 276605 - RNA, 22 nt, Artificial Sequence
  Synthetic
ggucacauguuaauacaugagc

SEQ ID NO: 276606 - RNA, 23 nt, Artificial Sequence
  Synthetic
gggucacauguuaauacaugagc

SEQ ID NO: 276607 - RNA, 24 nt, Artificial Sequence
  Synthetic
ugggucacauguuaauacaugagc

SEQ ID NO: 276608 - RNA, 18 nt, Artificial Sequence
  Synthetic
uucuuccuauccaugagc

SEQ ID NO: 276609 - RNA, 19 nt, Artificial Sequence
  Synthetic
auucuuccuauccaugagc

SEQ ID NO: 276610 - RNA, 20 nt, Artificial Sequence
  Synthetic
gauucuuccuauccaugagc

SEQ ID NO: 276611 - RNA, 21 nt, Artificial Sequence
  Synthetic
ugauucuuccuauccaugagc

SEQ ID NO: 276612 - RNA, 22 nt, Artificial Sequence
  Synthetic
uugauucuuccuauccaugagc

SEQ ID NO: 276613 - RNA, 23 nt, Artificial Sequence
  Synthetic
auugauucuuccuauccaugagc

SEQ ID NO: 276614 - RNA, 24 nt, Artificial Sequence
  Synthetic
uauugauucuuccuauccaugagc

SEQ ID NO: 276615 - RNA, 18 nt, Artificial Sequence
  Synthetic
ucuccuuuuuccaugagc

SEQ ID NO: 276616 - RNA, 19 nt, Artificial Sequence
  Synthetic
aucuccuuuuuccaugagc

SEQ ID NO: 276617 - RNA, 20 nt, Artificial Sequence
  Synthetic
uaucuccuuuuuccaugagc

SEQ ID NO: 276618 - RNA, 21 nt, Artificial Sequence
  Synthetic
cuaucuccuuuuuccaugagc

SEQ ID NO: 276619 - RNA, 22 nt, Artificial Sequence
  Synthetic
ccuaucuccuuuuuccaugagc

SEQ ID NO: 276620 - RNA, 23 nt, Artificial Sequence
  Synthetic
accuaucuccuuuuuccaugagc

SEQ ID NO: 276621 - RNA, 24 nt, Artificial Sequence
  Synthetic
uaccuaucuccuuuuuccaugagc

SEQ ID NO: 276622 - RNA, 18 nt, Artificial Sequence
  Synthetic
aaauaguucugcaugagc

SEQ ID NO: 276623 - RNA, 19 nt, Artificial Sequence
  Synthetic
aaaauaguucugcaugagc

SEQ ID NO: 276624 - RNA, 20 nt, Artificial Sequence
  Synthetic
uaaaauaguucugcaugagc

SEQ ID NO: 276625 - RNA, 21 nt, Artificial Sequence
  Synthetic
auaaaauaguucugcaugagc

SEQ ID NO: 276626 - RNA, 22 nt, Artificial Sequence
  Synthetic
aauaaaauaguucugcaugagc

SEQ ID NO: 276627 - RNA, 23 nt, Artificial Sequence
  Synthetic
uaauaaaauaguucugcaugagc

SEQ ID NO: 276628 - RNA, 24 nt, Artificial Sequence
  Synthetic
auaauaaaauaguucugcaugagc

SEQ ID NO: 276629 - RNA, 18 nt, Artificial Sequence
  Synthetic
gacugggaagagaugagc

SEQ ID NO: 276630 - RNA, 19 nt, Artificial Sequence
  Synthetic
agacugggaagagaugagc

SEQ ID NO: 276631 - RNA, 20 nt, Artificial Sequence
  Synthetic
gagacugggaagagaugagc

SEQ ID NO: 276632 - RNA, 21 nt, Artificial Sequence
  Synthetic
agagacugggaagagaugagc

SEQ ID NO: 276633 - RNA, 22 nt, Artificial Sequence
  Synthetic
aagagacugggaagagaugagc

SEQ ID NO: 276634 - RNA, 23 nt, Artificial Sequence
  Synthetic
gaagagacugggaagagaugagc

SEQ ID NO: 276635 - RNA, 24 nt, Artificial Sequence
  Synthetic
ugaagagacugggaagagaugagc

SEQ ID NO: 276636 - RNA, 18 nt, Artificial Sequence
  Synthetic
uugaccaucaugaugagc

SEQ ID NO: 276637 - RNA, 19 nt, Artificial Sequence
  Synthetic
uuugaccaucaugaugagc

SEQ ID NO: 276638 - RNA, 20 nt, Artificial Sequence
  Synthetic
cuuugaccaucaugaugagc

SEQ ID NO: 276639 - RNA, 21 nt, Artificial Sequence
  Synthetic
gcuuugaccaucaugaugagc

SEQ ID NO: 276640 - RNA, 22 nt, Artificial Sequence
  Synthetic
ggcuuugaccaucaugaugagc

SEQ ID NO: 276641 - RNA, 23 nt, Artificial Sequence
  Synthetic
aggcuuugaccaucaugaugagc

SEQ ID NO: 276642 - RNA, 24 nt, Artificial Sequence
  Synthetic
caggcuuugaccaucaugaugagc

SEQ ID NO: 276643 - RNA, 18 nt, Artificial Sequence
  Synthetic
uccauggugaugaugagc

SEQ ID NO: 276644 - RNA, 19 nt, Artificial Sequence
  Synthetic
cuccauggugaugaugagc

SEQ ID NO: 276645 - RNA, 20 nt, Artificial Sequence
  Synthetic
acuccauggugaugaugagc

SEQ ID NO: 276646 - RNA, 21 nt, Artificial Sequence
  Synthetic
gacuccauggugaugaugagc

SEQ ID NO: 276647 - RNA, 22 nt, Artificial Sequence
  Synthetic
ugacuccauggugaugaugagc

SEQ ID NO: 276648 - RNA, 23 nt, Artificial Sequence
  Synthetic
augacuccauggugaugaugagc

SEQ ID NO: 276649 - RNA, 24 nt, Artificial Sequence
  Synthetic
aaugacuccauggugaugaugagc

SEQ ID NO: 276650 - RNA, 18 nt, Artificial Sequence
  Synthetic
caauucccaccuaugagc

SEQ ID NO: 276651 - RNA, 19 nt, Artificial Sequence
  Synthetic
ucaauucccaccuaugagc

SEQ ID NO: 276652 - RNA, 20 nt, Artificial Sequence
  Synthetic
uucaauucccaccuaugagc

SEQ ID NO: 276653 - RNA, 21 nt, Artificial Sequence
  Synthetic
guucaauucccaccuaugagc

SEQ ID NO: 276654 - RNA, 22 nt, Artificial Sequence
  Synthetic
uguucaauucccaccuaugagc

SEQ ID NO: 276655 - RNA, 23 nt, Artificial Sequence
  Synthetic
uuguucaauucccaccuaugagc

SEQ ID NO: 276656 - RNA, 24 nt, Artificial Sequence
  Synthetic
auuguucaauucccaccuaugagc

SEQ ID NO: 276657 - RNA, 18 nt, Artificial Sequence
  Synthetic
gcuauggguguuaugagc

SEQ ID NO: 276658 - RNA, 19 nt, Artificial Sequence
  Synthetic
ggcuauggguguuaugagc

SEQ ID NO: 276659 - RNA, 20 nt, Artificial Sequence
  Synthetic
gggcuauggguguuaugagc

SEQ ID NO: 276660 - RNA, 21 nt, Artificial Sequence
  Synthetic
agggcuauggguguuaugagc

SEQ ID NO: 276661 - RNA, 22 nt, Artificial Sequence
  Synthetic
aagggcuauggguguuaugagc

SEQ ID NO: 276662 - RNA, 23 nt, Artificial Sequence
  Synthetic
caagggcuauggguguuaugagc

SEQ ID NO: 276663 - RNA, 24 nt, Artificial Sequence
  Synthetic
acaagggcuauggguguuaugagc

SEQ ID NO: 276664 - RNA, 18 nt, Artificial Sequence
  Synthetic
augacuaggaaccugagc

SEQ ID NO: 276665 - RNA, 19 nt, Artificial Sequence
  Synthetic
aaugacuaggaaccugagc

SEQ ID NO: 276666 - RNA, 20 nt, Artificial Sequence
  Synthetic
gaaugacuaggaaccugagc

SEQ ID NO: 276667 - RNA, 21 nt, Artificial Sequence
  Synthetic
agaaugacuaggaaccugagc

SEQ ID NO: 276668 - RNA, 22 nt, Artificial Sequence
  Synthetic
aagaaugacuaggaaccugagc

SEQ ID NO: 276669 - RNA, 23 nt, Artificial Sequence
  Synthetic
gaagaaugacuaggaaccugagc

SEQ ID NO: 276670 - RNA, 24 nt, Artificial Sequence
  Synthetic
agaagaaugacuaggaaccugagc

SEQ ID NO: 276671 - RNA, 18 nt, Artificial Sequence
  Synthetic
uuauuuuaguaccugagc

SEQ ID NO: 276672 - RNA, 19 nt, Artificial Sequence
  Synthetic
auuauuuuaguaccugagc

SEQ ID NO: 276673 - RNA, 20 nt, Artificial Sequence
  Synthetic
gauuauuuuaguaccugagc

SEQ ID NO: 276674 - RNA, 21 nt, Artificial Sequence
  Synthetic
agauuauuuuaguaccugagc

SEQ ID NO: 276675 - RNA, 22 nt, Artificial Sequence
  Synthetic
aagauuauuuuaguaccugagc

SEQ ID NO: 276676 - RNA, 23 nt, Artificial Sequence
  Synthetic
aaagauuauuuuaguaccugagc

SEQ ID NO: 276677 - RNA, 24 nt, Artificial Sequence
  Synthetic
aaaagauuauuuuaguaccugagc

SEQ ID NO: 276678 - RNA, 18 nt, Artificial Sequence
  Synthetic
cagguggauugccugagc

SEQ ID NO: 276679 - RNA, 19 nt, Artificial Sequence
  Synthetic
gcagguggauugccugagc

SEQ ID NO: 276680 - RNA, 20 nt, Artificial Sequence
  Synthetic
agcagguggauugccugagc

SEQ ID NO: 276681 - RNA, 21 nt, Artificial Sequence
  Synthetic
aagcagguggauugccugagc

SEQ ID NO: 276682 - RNA, 22 nt, Artificial Sequence
  Synthetic
aaagcagguggauugccugagc

SEQ ID NO: 276683 - RNA, 23 nt, Artificial Sequence
  Synthetic
caaagcagguggauugccugagc

SEQ ID NO: 276684 - RNA, 24 nt, Artificial Sequence
  Synthetic
ccaaagcagguggauugccugagc

SEQ ID NO: 276685 - RNA, 18 nt, Artificial Sequence
  Synthetic
uaucuuagcaagcugagc

SEQ ID NO: 276686 - RNA, 19 nt, Artificial Sequence
  Synthetic
uuaucuuagcaagcugagc

SEQ ID NO: 276687 - RNA, 20 nt, Artificial Sequence
  Synthetic
guuaucuuagcaagcugagc

SEQ ID NO: 276688 - RNA, 21 nt, Artificial Sequence
  Synthetic
aguuaucuuagcaagcugagc

SEQ ID NO: 276689 - RNA, 22 nt, Artificial Sequence
  Synthetic
aaguuaucuuagcaagcugagc

SEQ ID NO: 276690 - RNA, 23 nt, Artificial Sequence
  Synthetic
caaguuaucuuagcaagcugagc

SEQ ID NO: 276691 - RNA, 24 nt, Artificial Sequence
  Synthetic
ucaaguuaucuuagcaagcugagc

SEQ ID NO: 276692 - RNA, 18 nt, Artificial Sequence
  Synthetic
augauagaauagcugagc

SEQ ID NO: 276693 - RNA, 19 nt, Artificial Sequence
  Synthetic
aaugauagaauagcugagc

SEQ ID NO: 276694 - RNA, 20 nt, Artificial Sequence
  Synthetic
gaaugauagaauagcugagc

SEQ ID NO: 276695 - RNA, 21 nt, Artificial Sequence
  Synthetic
ggaaugauagaauagcugagc

SEQ ID NO: 276696 - RNA, 22 nt, Artificial Sequence
  Synthetic
cggaaugauagaauagcugagc

SEQ ID NO: 276697 - RNA, 23 nt, Artificial Sequence
  Synthetic
ccggaaugauagaauagcugagc

SEQ ID NO: 276698 - RNA, 24 nt, Artificial Sequence
  Synthetic
cccggaaugauagaauagcugagc

SEQ ID NO: 276699 - RNA, 18 nt, Artificial Sequence
  Synthetic
cuuaaauccuuucugagc

SEQ ID NO: 276700 - RNA, 19 nt, Artificial Sequence
  Synthetic
acuuaaauccuuucugagc

SEQ ID NO: 276701 - RNA, 20 nt, Artificial Sequence
  Synthetic
gacuuaaauccuuucugagc

SEQ ID NO: 276702 - RNA, 21 nt, Artificial Sequence
  Synthetic
ggacuuaaauccuuucugagc

SEQ ID NO: 276703 - RNA, 22 nt, Artificial Sequence
  Synthetic
aggacuuaaauccuuucugagc

SEQ ID NO: 276704 - RNA, 23 nt, Artificial Sequence
  Synthetic
aaggacuuaaauccuuucugagc

SEQ ID NO: 276705 - RNA, 24 nt, Artificial Sequence
  Synthetic
aaaggacuuaaauccuuucugagc

SEQ ID NO: 276706 - RNA, 18 nt, Artificial Sequence
  Synthetic
cugauuggaaaagugagc

SEQ ID NO: 276707 - RNA, 19 nt, Artificial Sequence
  Synthetic
acugauuggaaaagugagc

SEQ ID NO: 276708 - RNA, 20 nt, Artificial Sequence
  Synthetic
aacugauuggaaaagugagc

SEQ ID NO: 276709 - RNA, 21 nt, Artificial Sequence
  Synthetic
aaacugauuggaaaagugagc

SEQ ID NO: 276710 - RNA, 22 nt, Artificial Sequence
  Synthetic
aaaacugauuggaaaagugagc

SEQ ID NO: 276711 - RNA, 23 nt, Artificial Sequence
  Synthetic
aaaaacugauuggaaaagugagc

SEQ ID NO: 276712 - RNA, 24 nt, Artificial Sequence
  Synthetic
uaaaaacugauuggaaaagugagc

SEQ ID NO: 276713 - RNA, 18 nt, Artificial Sequence
  Synthetic
uuugcagggugagugagc

SEQ ID NO: 276714 - RNA, 19 nt, Artificial Sequence
  Synthetic
cuuugcagggugagugagc

SEQ ID NO: 276715 - RNA, 20 nt, Artificial Sequence
  Synthetic
ccuuugcagggugagugagc

SEQ ID NO: 276716 - RNA, 21 nt, Artificial Sequence
  Synthetic
uccuuugcagggugagugagc

SEQ ID NO: 276717 - RNA, 22 nt, Artificial Sequence
  Synthetic
guccuuugcagggugagugagc

SEQ ID NO: 276718 - RNA, 23 nt, Artificial Sequence
  Synthetic
gguccuuugcagggugagugagc

SEQ ID NO: 276719 - RNA, 24 nt, Artificial Sequence
  Synthetic
ugguccuuugcagggugagugagc

SEQ ID NO: 276720 - RNA, 18 nt, Artificial Sequence
  Synthetic
uacacucuaguagugagc

SEQ ID NO: 276721 - RNA, 19 nt, Artificial Sequence
  Synthetic
uuacacucuaguagugagc

SEQ ID NO: 276722 - RNA, 20 nt, Artificial Sequence
  Synthetic
cuuacacucuaguagugagc

SEQ ID NO: 276723 - RNA, 21 nt, Artificial Sequence
  Synthetic
acuuacacucuaguagugagc

SEQ ID NO: 276724 - RNA, 22 nt, Artificial Sequence
  Synthetic
aacuuacacucuaguagugagc

SEQ ID NO: 276725 - RNA, 23 nt, Artificial Sequence
  Synthetic
gaacuuacacucuaguagugagc

SEQ ID NO: 276726 - RNA, 24 nt, Artificial Sequence
  Synthetic
agaacuuacacucuaguagugagc

SEQ ID NO: 276727 - RNA, 18 nt, Artificial Sequence
  Synthetic
aguaauccuaaauugagc

SEQ ID NO: 276728 - RNA, 19 nt, Artificial Sequence
  Synthetic
uaguaauccuaaauugagc

SEQ ID NO: 276729 - RNA, 20 nt, Artificial Sequence
  Synthetic
guaguaauccuaaauugagc

SEQ ID NO: 276730 - RNA, 21 nt, Artificial Sequence
  Synthetic
cguaguaauccuaaauugagc

SEQ ID NO: 276731 - RNA, 22 nt, Artificial Sequence
  Synthetic
ucguaguaauccuaaauugagc

SEQ ID NO: 276732 - RNA, 23 nt, Artificial Sequence
  Synthetic
uucguaguaauccuaaauugagc

SEQ ID NO: 276733 - RNA, 24 nt, Artificial Sequence
  Synthetic
cuucguaguaauccuaaauugagc

SEQ ID NO: 276734 - RNA, 18 nt, Artificial Sequence
  Synthetic
uauuagauaauauugagc

SEQ ID NO: 276735 - RNA, 19 nt, Artificial Sequence
  Synthetic
auauuagauaauauugagc

SEQ ID NO: 276736 - RNA, 20 nt, Artificial Sequence
  Synthetic
cauauuagauaauauugagc

SEQ ID NO: 276737 - RNA, 21 nt, Artificial Sequence
  Synthetic
gcauauuagauaauauugagc

SEQ ID NO: 276738 - RNA, 22 nt, Artificial Sequence
  Synthetic
agcauauuagauaauauugagc

SEQ ID NO: 276739 - RNA, 23 nt, Artificial Sequence
  Synthetic
gagcauauuagauaauauugagc

SEQ ID NO: 276740 - RNA, 24 nt, Artificial Sequence
  Synthetic
ugagcauauuagauaauauugagc

SEQ ID NO: 276741 - RNA, 18 nt, Artificial Sequence
  Synthetic
cugaaggaucacuugagc

SEQ ID NO: 276742 - RNA, 19 nt, Artificial Sequence
  Synthetic
gcugaaggaucacuugagc

SEQ ID NO: 276743 - RNA, 20 nt, Artificial Sequence
  Synthetic
ggcugaaggaucacuugagc

SEQ ID NO: 276744 - RNA, 21 nt, Artificial Sequence
  Synthetic
aggcugaaggaucacuugagc

SEQ ID NO: 276745 - RNA, 22 nt, Artificial Sequence
  Synthetic
gaggcugaaggaucacuugagc

SEQ ID NO: 276746 - RNA, 23 nt, Artificial Sequence
  Synthetic
cgaggcugaaggaucacuugagc

SEQ ID NO: 276747 - RNA, 24 nt, Artificial Sequence
  Synthetic
ccgaggcugaaggaucacuugagc

SEQ ID NO: 276748 - RNA, 18 nt, Artificial Sequence
  Synthetic
gagaaggaacccuugagc

SEQ ID NO: 276749 - RNA, 19 nt, Artificial Sequence
  Synthetic
agagaaggaacccuugagc

SEQ ID NO: 276750 - RNA, 20 nt, Artificial Sequence
  Synthetic
cagagaaggaacccuugagc

SEQ ID NO: 276751 - RNA, 21 nt, Artificial Sequence
  Synthetic
acagagaaggaacccuugagc

SEQ ID NO: 276752 - RNA, 22 nt, Artificial Sequence
  Synthetic
uacagagaaggaacccuugagc

SEQ ID NO: 276753 - RNA, 23 nt, Artificial Sequence
  Synthetic
guacagagaaggaacccuugagc

SEQ ID NO: 276754 - RNA, 24 nt, Artificial Sequence
  Synthetic
aguacagagaaggaacccuugagc

SEQ ID NO: 276755 - RNA, 18 nt, Artificial Sequence
  Synthetic
cacaagaaccgcuugagc

SEQ ID NO: 276756 - RNA, 19 nt, Artificial Sequence
  Synthetic
gcacaagaaccgcuugagc

SEQ ID NO: 276757 - RNA, 20 nt, Artificial Sequence
  Synthetic
ggcacaagaaccgcuugagc

SEQ ID NO: 276758 - RNA, 21 nt, Artificial Sequence
  Synthetic
aggcacaagaaccgcuugagc

SEQ ID NO: 276759 - RNA, 22 nt, Artificial Sequence
  Synthetic
gaggcacaagaaccgcuugagc

SEQ ID NO: 276760 - RNA, 23 nt, Artificial Sequence
  Synthetic
ugaggcacaagaaccgcuugagc

SEQ ID NO: 276761 - RNA, 24 nt, Artificial Sequence
  Synthetic
cugaggcacaagaaccgcuugagc

SEQ ID NO: 276762 - RNA, 18 nt, Artificial Sequence
  Synthetic
caggagaaccgcuugagc

SEQ ID NO: 276763 - RNA, 19 nt, Artificial Sequence
  Synthetic
gcaggagaaccgcuugagc

SEQ ID NO: 276764 - RNA, 20 nt, Artificial Sequence
  Synthetic
ggcaggagaaccgcuugagc

SEQ ID NO: 276765 - RNA, 21 nt, Artificial Sequence
  Synthetic
aggcaggagaaccgcuugagc

SEQ ID NO: 276766 - RNA, 22 nt, Artificial Sequence
  Synthetic
gaggcaggagaaccgcuugagc

SEQ ID NO: 276767 - RNA, 23 nt, Artificial Sequence
  Synthetic
ugaggcaggagaaccgcuugagc

SEQ ID NO: 276768 - RNA, 24 nt, Artificial Sequence
  Synthetic
cugaggcaggagaaccgcuugagc

SEQ ID NO: 276769 - RNA, 18 nt, Artificial Sequence
  Synthetic
caggaggauugcuugagc

SEQ ID NO: 276770 - RNA, 19 nt, Artificial Sequence
  Synthetic
gcaggaggauugcuugagc

SEQ ID NO: 276771 - RNA, 20 nt, Artificial Sequence
  Synthetic
ggcaggaggauugcuugagc

SEQ ID NO: 276772 - RNA, 21 nt, Artificial Sequence
  Synthetic
aggcaggaggauugcuugagc

SEQ ID NO: 276773 - RNA, 22 nt, Artificial Sequence
  Synthetic
gaggcaggaggauugcuugagc

SEQ ID NO: 276774 - RNA, 23 nt, Artificial Sequence
  Synthetic
ugaggcaggaggauugcuugagc

SEQ ID NO: 276775 - RNA, 24 nt, Artificial Sequence
  Synthetic
cugaggcaggaggauugcuugagc

SEQ ID NO: 276776 - RNA, 18 nt, Artificial Sequence
  Synthetic
ugggaggauugcuugagc

SEQ ID NO: 276777 - RNA, 19 nt, Artificial Sequence
  Synthetic
gugggaggauugcuugagc

SEQ ID NO: 276778 - RNA, 20 nt, Artificial Sequence
  Synthetic
ggugggaggauugcuugagc

SEQ ID NO: 276779 - RNA, 21 nt, Artificial Sequence
  Synthetic
aggugggaggauugcuugagc

SEQ ID NO: 276780 - RNA, 22 nt, Artificial Sequence
  Synthetic
gaggugggaggauugcuugagc

SEQ ID NO: 276781 - RNA, 23 nt, Artificial Sequence
  Synthetic
ugaggugggaggauugcuugagc

SEQ ID NO: 276782 - RNA, 24 nt, Artificial Sequence
  Synthetic
cugaggugggaggauugcuugagc

SEQ ID NO: 276783 - RNA, 18 nt, Artificial Sequence
  Synthetic
gguauguccuucuugagc

SEQ ID NO: 276784 - RNA, 19 nt, Artificial Sequence
  Synthetic
ugguauguccuucuugagc

SEQ ID NO: 276785 - RNA, 20 nt, Artificial Sequence
  Synthetic
gugguauguccuucuugagc

SEQ ID NO: 276786 - RNA, 21 nt, Artificial Sequence
  Synthetic
agugguauguccuucuugagc

SEQ ID NO: 276787 - RNA, 22 nt, Artificial Sequence
  Synthetic
aagugguauguccuucuugagc

SEQ ID NO: 276788 - RNA, 23 nt, Artificial Sequence
  Synthetic
aaagugguauguccuucuugagc

SEQ ID NO: 276789 - RNA, 24 nt, Artificial Sequence
  Synthetic
aaaagugguauguccuucuugagc

SEQ ID NO: 276790 - RNA, 18 nt, Artificial Sequence
  Synthetic
cuuacucaugcuuugagc

SEQ ID NO: 276791 - RNA, 19 nt, Artificial Sequence
  Synthetic
acuuacucaugcuuugagc

SEQ ID NO: 276792 - RNA, 20 nt, Artificial Sequence
  Synthetic
cacuuacucaugcuuugagc

SEQ ID NO: 276793 - RNA, 21 nt, Artificial Sequence
  Synthetic
ucacuuacucaugcuuugagc

SEQ ID NO: 276794 - RNA, 22 nt, Artificial Sequence
  Synthetic
aucacuuacucaugcuuugagc

SEQ ID NO: 276795 - RNA, 23 nt, Artificial Sequence
  Synthetic
uaucacuuacucaugcuuugagc

SEQ ID NO: 276796 - RNA, 24 nt, Artificial Sequence
  Synthetic
uuaucacuuacucaugcuuugagc

SEQ ID NO: 276797 - RNA, 18 nt, Artificial Sequence
  Synthetic
cuuuaggguauuuugagc

SEQ ID NO: 276798 - RNA, 19 nt, Artificial Sequence
  Synthetic
gcuuuaggguauuuugagc

SEQ ID NO: 276799 - RNA, 20 nt, Artificial Sequence
  Synthetic
agcuuuaggguauuuugagc

SEQ ID NO: 276800 - RNA, 21 nt, Artificial Sequence
  Synthetic
aagcuuuaggguauuuugagc

SEQ ID NO: 276801 - RNA, 22 nt, Artificial Sequence
  Synthetic
uaagcuuuaggguauuuugagc

SEQ ID NO: 276802 - RNA, 23 nt, Artificial Sequence
  Synthetic
uuaagcuuuaggguauuuugagc

SEQ ID NO: 276803 - RNA, 24 nt, Artificial Sequence
  Synthetic
guuaagcuuuaggguauuuugagc

SEQ ID NO: 276804 - RNA, 18 nt, Artificial Sequence
  Synthetic
uuuucacuacuuuugagc

SEQ ID NO: 276805 - RNA, 19 nt, Artificial Sequence
  Synthetic
auuuucacuacuuuugagc

SEQ ID NO: 276806 - RNA, 20 nt, Artificial Sequence
  Synthetic
cauuuucacuacuuuugagc

SEQ ID NO: 276807 - RNA, 21 nt, Artificial Sequence
  Synthetic
acauuuucacuacuuuugagc

SEQ ID NO: 276808 - RNA, 22 nt, Artificial Sequence
  Synthetic
aacauuuucacuacuuuugagc

SEQ ID NO: 276809 - RNA, 23 nt, Artificial Sequence
  Synthetic
caacauuuucacuacuuuugagc

SEQ ID NO: 276810 - RNA, 24 nt, Artificial Sequence
  Synthetic
acaacauuuucacuacuuuugagc

SEQ ID NO: 276811 - RNA, 18 nt, Artificial Sequence
  Synthetic
caguauaaauuuuugagc

SEQ ID NO: 276812 - RNA, 19 nt, Artificial Sequence
  Synthetic
ucaguauaaauuuuugagc

SEQ ID NO: 276813 - RNA, 20 nt, Artificial Sequence
  Synthetic
uucaguauaaauuuuugagc

SEQ ID NO: 276814 - RNA, 21 nt, Artificial Sequence
  Synthetic
auucaguauaaauuuuugagc

SEQ ID NO: 276815 - RNA, 22 nt, Artificial Sequence
  Synthetic
uauucaguauaaauuuuugagc

SEQ ID NO: 276816 - RNA, 23 nt, Artificial Sequence
  Synthetic
guauucaguauaaauuuuugagc

SEQ ID NO: 276817 - RNA, 24 nt, Artificial Sequence
  Synthetic
aguauucaguauaaauuuuugagc

SEQ ID NO: 276818 - RNA, 18 nt, Artificial Sequence
  Synthetic
aaaaauacaaaaaauagc

SEQ ID NO: 276819 - RNA, 19 nt, Artificial Sequence
  Synthetic
uaaaaauacaaaaaauagc

SEQ ID NO: 276820 - RNA, 20 nt, Artificial Sequence
  Synthetic
cuaaaaauacaaaaaauagc

SEQ ID NO: 276821 - RNA, 21 nt, Artificial Sequence
  Synthetic
acuaaaaauacaaaaaauagc

SEQ ID NO: 276822 - RNA, 22 nt, Artificial Sequence
  Synthetic
uacuaaaaauacaaaaaauagc

SEQ ID NO: 276823 - RNA, 23 nt, Artificial Sequence
  Synthetic
cuacuaaaaauacaaaaaauagc

SEQ ID NO: 276824 - RNA, 24 nt, Artificial Sequence
  Synthetic
ucuacuaaaaauacaaaaaauagc

SEQ ID NO: 276825 - RNA, 18 nt, Artificial Sequence
  Synthetic
gaguuuagaaaaaauagc

SEQ ID NO: 276826 - RNA, 19 nt, Artificial Sequence
  Synthetic
agaguuuagaaaaaauagc

SEQ ID NO: 276827 - RNA, 20 nt, Artificial Sequence
  Synthetic
aagaguuuagaaaaaauagc

SEQ ID NO: 276828 - RNA, 21 nt, Artificial Sequence
  Synthetic
uaagaguuuagaaaaaauagc

SEQ ID NO: 276829 - RNA, 22 nt, Artificial Sequence
  Synthetic
guaagaguuuagaaaaaauagc

SEQ ID NO: 276830 - RNA, 23 nt, Artificial Sequence
  Synthetic
aguaagaguuuagaaaaaauagc

SEQ ID NO: 276831 - RNA, 24 nt, Artificial Sequence
  Synthetic
caguaagaguuuagaaaaaauagc

SEQ ID NO: 276832 - RNA, 18 nt, Artificial Sequence
  Synthetic
cucagccucccaaauagc

SEQ ID NO: 276833 - RNA, 19 nt, Artificial Sequence
  Synthetic
ccucagccucccaaauagc

SEQ ID NO: 276834 - RNA, 20 nt, Artificial Sequence
  Synthetic
gccucagccucccaaauagc

SEQ ID NO: 276835 - RNA, 21 nt, Artificial Sequence
  Synthetic
cgccucagccucccaaauagc

SEQ ID NO: 276836 - RNA, 22 nt, Artificial Sequence
  Synthetic
ccgccucagccucccaaauagc

SEQ ID NO: 276837 - RNA, 23 nt, Artificial Sequence
  Synthetic
uccgccucagccucccaaauagc

SEQ ID NO: 276838 - RNA, 24 nt, Artificial Sequence
  Synthetic
cuccgccucagccucccaaauagc

SEQ ID NO: 276839 - RNA, 18 nt, Artificial Sequence
  Synthetic
agaugugguagaaauagc

SEQ ID NO: 276840 - RNA, 19 nt, Artificial Sequence
  Synthetic
cagaugugguagaaauagc

SEQ ID NO: 276841 - RNA, 20 nt, Artificial Sequence
  Synthetic
gcagaugugguagaaauagc

SEQ ID NO: 276842 - RNA, 21 nt, Artificial Sequence
  Synthetic
ugcagaugugguagaaauagc

SEQ ID NO: 276843 - RNA, 22 nt, Artificial Sequence
  Synthetic
cugcagaugugguagaaauagc

SEQ ID NO: 276844 - RNA, 23 nt, Artificial Sequence
  Synthetic
acugcagaugugguagaaauagc

SEQ ID NO: 276845 - RNA, 24 nt, Artificial Sequence
  Synthetic
cacugcagaugugguagaaauagc

SEQ ID NO: 276846 - RNA, 18 nt, Artificial Sequence
  Synthetic
uguauuuguagaaauagc

SEQ ID NO: 276847 - RNA, 19 nt, Artificial Sequence
  Synthetic
uuguauuuguagaaauagc

SEQ ID NO: 276848 - RNA, 20 nt, Artificial Sequence
  Synthetic
cuuguauuuguagaaauagc

SEQ ID NO: 276849 - RNA, 21 nt, Artificial Sequence
  Synthetic
ucuuguauuuguagaaauagc

SEQ ID NO: 276850 - RNA, 22 nt, Artificial Sequence
  Synthetic
uucuuguauuuguagaaauagc

SEQ ID NO: 276851 - RNA, 23 nt, Artificial Sequence
  Synthetic
uuucuuguauuuguagaaauagc

SEQ ID NO: 276852 - RNA, 24 nt, Artificial Sequence
  Synthetic
uuuucuuguauuuguagaaauagc

SEQ ID NO: 276853 - RNA, 18 nt, Artificial Sequence
  Synthetic
aauagaaaguuaaauagc

SEQ ID NO: 276854 - RNA, 19 nt, Artificial Sequence
  Synthetic
aaauagaaaguuaaauagc

SEQ ID NO: 276855 - RNA, 20 nt, Artificial Sequence
  Synthetic
uaaauagaaaguuaaauagc

SEQ ID NO: 276856 - RNA, 21 nt, Artificial Sequence
  Synthetic
guaaauagaaaguuaaauagc

SEQ ID NO: 276857 - RNA, 22 nt, Artificial Sequence
  Synthetic
uguaaauagaaaguuaaauagc

SEQ ID NO: 276858 - RNA, 23 nt, Artificial Sequence
  Synthetic
auguaaauagaaaguuaaauagc

SEQ ID NO: 276859 - RNA, 24 nt, Artificial Sequence
  Synthetic
aauguaaauagaaaguuaaauagc

SEQ ID NO: 276860 - RNA, 18 nt, Artificial Sequence
  Synthetic
gagaaaugaggcaauagc

SEQ ID NO: 276861 - RNA, 19 nt, Artificial Sequence
  Synthetic
ugagaaaugaggcaauagc

SEQ ID NO: 276862 - RNA, 20 nt, Artificial Sequence
  Synthetic
uugagaaaugaggcaauagc

SEQ ID NO: 276863 - RNA, 21 nt, Artificial Sequence
  Synthetic
uuugagaaaugaggcaauagc

SEQ ID NO: 276864 - RNA, 22 nt, Artificial Sequence
  Synthetic
auuugagaaaugaggcaauagc

SEQ ID NO: 276865 - RNA, 23 nt, Artificial Sequence
  Synthetic
aauuugagaaaugaggcaauagc

SEQ ID NO: 276866 - RNA, 24 nt, Artificial Sequence
  Synthetic
gaauuugagaaaugaggcaauagc

SEQ ID NO: 276867 - RNA, 18 nt, Artificial Sequence
  Synthetic
cugaggcaggagaauagc

SEQ ID NO: 276868 - RNA, 19 nt, Artificial Sequence
  Synthetic
gcugaggcaggagaauagc

SEQ ID NO: 276869 - RNA, 20 nt, Artificial Sequence
  Synthetic
ggcugaggcaggagaauagc

SEQ ID NO: 276870 - RNA, 21 nt, Artificial Sequence
  Synthetic
aggcugaggcaggagaauagc

SEQ ID NO: 276871 - RNA, 22 nt, Artificial Sequence
  Synthetic
gaggcugaggcaggagaauagc

SEQ ID NO: 276872 - RNA, 23 nt, Artificial Sequence
  Synthetic
ggaggcugaggcaggagaauagc

SEQ ID NO: 276873 - RNA, 24 nt, Artificial Sequence
  Synthetic
aggaggcugaggcaggagaauagc

SEQ ID NO: 276874 - RNA, 18 nt, Artificial Sequence
  Synthetic
caagcguccaugaauagc

SEQ ID NO: 276875 - RNA, 19 nt, Artificial Sequence
  Synthetic
gcaagcguccaugaauagc

SEQ ID NO: 276876 - RNA, 20 nt, Artificial Sequence
  Synthetic
agcaagcguccaugaauagc

SEQ ID NO: 276877 - RNA, 21 nt, Artificial Sequence
  Synthetic
aagcaagcguccaugaauagc

SEQ ID NO: 276878 - RNA, 22 nt, Artificial Sequence
  Synthetic
uaagcaagcguccaugaauagc

SEQ ID NO: 276879 - RNA, 23 nt, Artificial Sequence
  Synthetic
uuaagcaagcguccaugaauagc

SEQ ID NO: 276880 - RNA, 24 nt, Artificial Sequence
  Synthetic
uuuaagcaagcguccaugaauagc

SEQ ID NO: 276881 - RNA, 18 nt, Artificial Sequence
  Synthetic
cuaauucacaauaauagc

SEQ ID NO: 276882 - RNA, 19 nt, Artificial Sequence
  Synthetic
ucuaauucacaauaauagc

SEQ ID NO: 276883 - RNA, 20 nt, Artificial Sequence
  Synthetic
uucuaauucacaauaauagc

SEQ ID NO: 276884 - RNA, 21 nt, Artificial Sequence
  Synthetic
uuucuaauucacaauaauagc

SEQ ID NO: 276885 - RNA, 22 nt, Artificial Sequence
  Synthetic
uuuucuaauucacaauaauagc

SEQ ID NO: 276886 - RNA, 23 nt, Artificial Sequence
  Synthetic
auuuucuaauucacaauaauagc

SEQ ID NO: 276887 - RNA, 24 nt, Artificial Sequence
  Synthetic
uauuuucuaauucacaauaauagc

SEQ ID NO: 276888 - RNA, 18 nt, Artificial Sequence
  Synthetic
ggagaauuagauaauagc

SEQ ID NO: 276889 - RNA, 19 nt, Artificial Sequence
  Synthetic
aggagaauuagauaauagc

SEQ ID NO: 276890 - RNA, 20 nt, Artificial Sequence
  Synthetic
uaggagaauuagauaauagc

SEQ ID NO: 276891 - RNA, 21 nt, Artificial Sequence
  Synthetic
uuaggagaauuagauaauagc

SEQ ID NO: 276892 - RNA, 22 nt, Artificial Sequence
  Synthetic
auuaggagaauuagauaauagc

SEQ ID NO: 276893 - RNA, 23 nt, Artificial Sequence
  Synthetic
uauuaggagaauuagauaauagc

SEQ ID NO: 276894 - RNA, 24 nt, Artificial Sequence
  Synthetic
guauuaggagaauuagauaauagc

SEQ ID NO: 276895 - RNA, 18 nt, Artificial Sequence
  Synthetic
uucuccugcuauaauagc

SEQ ID NO: 276896 - RNA, 19 nt, Artificial Sequence
  Synthetic
uuucuccugcuauaauagc

SEQ ID NO: 276897 - RNA, 20 nt, Artificial Sequence
  Synthetic
guuucuccugcuauaauagc

SEQ ID NO: 276898 - RNA, 21 nt, Artificial Sequence
  Synthetic
aguuucuccugcuauaauagc

SEQ ID NO: 276899 - RNA, 22 nt, Artificial Sequence
  Synthetic
gaguuucuccugcuauaauagc

SEQ ID NO: 276900 - RNA, 23 nt, Artificial Sequence
  Synthetic
ugaguuucuccugcuauaauagc

SEQ ID NO: 276901 - RNA, 24 nt, Artificial Sequence
  Synthetic
augaguuucuccugcuauaauagc

SEQ ID NO: 276902 - RNA, 18 nt, Artificial Sequence
  Synthetic
uccgugugguauaauagc

SEQ ID NO: 276903 - RNA, 19 nt, Artificial Sequence
  Synthetic
uuccgugugguauaauagc

SEQ ID NO: 276904 - RNA, 20 nt, Artificial Sequence
  Synthetic
guuccgugugguauaauagc

SEQ ID NO: 276905 - RNA, 21 nt, Artificial Sequence
  Synthetic
aguuccgugugguauaauagc

SEQ ID NO: 276906 - RNA, 22 nt, Artificial Sequence
  Synthetic
aaguuccgugugguauaauagc

SEQ ID NO: 276907 - RNA, 23 nt, Artificial Sequence
  Synthetic
uaaguuccgugugguauaauagc

SEQ ID NO: 276908 - RNA, 24 nt, Artificial Sequence
  Synthetic
uuaaguuccgugugguauaauagc

SEQ ID NO: 276909 - RNA, 18 nt, Artificial Sequence
  Synthetic
ggaccuugguuuaauagc

SEQ ID NO: 276910 - RNA, 19 nt, Artificial Sequence
  Synthetic
uggaccuugguuuaauagc

SEQ ID NO: 276911 - RNA, 20 nt, Artificial Sequence
  Synthetic
auggaccuugguuuaauagc

SEQ ID NO: 276912 - RNA, 21 nt, Artificial Sequence
  Synthetic
uauggaccuugguuuaauagc

SEQ ID NO: 276913 - RNA, 22 nt, Artificial Sequence
  Synthetic
uuauggaccuugguuuaauagc

SEQ ID NO: 276914 - RNA, 23 nt, Artificial Sequence
  Synthetic
auuauggaccuugguuuaauagc

SEQ ID NO: 276915 - RNA, 24 nt, Artificial Sequence
  Synthetic
aauuauggaccuugguuuaauagc

SEQ ID NO: 276916 - RNA, 18 nt, Artificial Sequence
  Synthetic
gauuauauuuuuaauagc

SEQ ID NO: 276917 - RNA, 19 nt, Artificial Sequence
  Synthetic
ggauuauauuuuuaauagc

SEQ ID NO: 276918 - RNA, 20 nt, Artificial Sequence
  Synthetic
uggauuauauuuuuaauagc

SEQ ID NO: 276919 - RNA, 21 nt, Artificial Sequence
  Synthetic
uuggauuauauuuuuaauagc

SEQ ID NO: 276920 - RNA, 22 nt, Artificial Sequence
  Synthetic
uuuggauuauauuuuuaauagc

SEQ ID NO: 276921 - RNA, 23 nt, Artificial Sequence
  Synthetic
auuuggauuauauuuuuaauagc

SEQ ID NO: 276922 - RNA, 24 nt, Artificial Sequence
  Synthetic
uauuuggauuauauuuuuaauagc

SEQ ID NO: 276923 - RNA, 18 nt, Artificial Sequence
  Synthetic
cccuaggcugcacauagc

SEQ ID NO: 276924 - RNA, 19 nt, Artificial Sequence
  Synthetic
ucccuaggcugcacauagc

SEQ ID NO: 276925 - RNA, 20 nt, Artificial Sequence
  Synthetic
gucccuaggcugcacauagc

SEQ ID NO: 276926 - RNA, 21 nt, Artificial Sequence
  Synthetic
agucccuaggcugcacauagc

SEQ ID NO: 276927 - RNA, 22 nt, Artificial Sequence
  Synthetic
uagucccuaggcugcacauagc

SEQ ID NO: 276928 - RNA, 23 nt, Artificial Sequence
  Synthetic
cuagucccuaggcugcacauagc

SEQ ID NO: 276929 - RNA, 24 nt, Artificial Sequence
  Synthetic
ccuagucccuaggcugcacauagc

SEQ ID NO: 276930 - RNA, 18 nt, Artificial Sequence
  Synthetic
uuuagcauaugccauagc

SEQ ID NO: 276931 - RNA, 19 nt, Artificial Sequence
  Synthetic
uuuuagcauaugccauagc

SEQ ID NO: 276932 - RNA, 20 nt, Artificial Sequence
  Synthetic
cuuuuagcauaugccauagc

SEQ ID NO: 276933 - RNA, 21 nt, Artificial Sequence
  Synthetic
acuuuuagcauaugccauagc

SEQ ID NO: 276934 - RNA, 22 nt, Artificial Sequence
  Synthetic
uacuuuuagcauaugccauagc

SEQ ID NO: 276935 - RNA, 23 nt, Artificial Sequence
  Synthetic
guacuuuuagcauaugccauagc

SEQ ID NO: 276936 - RNA, 24 nt, Artificial Sequence
  Synthetic
uguacuuuuagcauaugccauagc

SEQ ID NO: 276937 - RNA, 18 nt, Artificial Sequence
  Synthetic
acaagguuaaaucauagc

SEQ ID NO: 276938 - RNA, 19 nt, Artificial Sequence
  Synthetic
gacaagguuaaaucauagc

SEQ ID NO: 276939 - RNA, 20 nt, Artificial Sequence
  Synthetic
cgacaagguuaaaucauagc

SEQ ID NO: 276940 - RNA, 21 nt, Artificial Sequence
  Synthetic
gcgacaagguuaaaucauagc

SEQ ID NO: 276941 - RNA, 22 nt, Artificial Sequence
  Synthetic
ugcgacaagguuaaaucauagc

SEQ ID NO: 276942 - RNA, 23 nt, Artificial Sequence
  Synthetic
uugcgacaagguuaaaucauagc

SEQ ID NO: 276943 - RNA, 24 nt, Artificial Sequence
  Synthetic
auugcgacaagguuaaaucauagc

SEQ ID NO: 276944 - RNA, 18 nt, Artificial Sequence
  Synthetic
cugacaccgaaucauagc

SEQ ID NO: 276945 - RNA, 19 nt, Artificial Sequence
  Synthetic
ccugacaccgaaucauagc

SEQ ID NO: 276946 - RNA, 20 nt, Artificial Sequence
  Synthetic
uccugacaccgaaucauagc

SEQ ID NO: 276947 - RNA, 21 nt, Artificial Sequence
  Synthetic
auccugacaccgaaucauagc

SEQ ID NO: 276948 - RNA, 22 nt, Artificial Sequence
  Synthetic
cauccugacaccgaaucauagc

SEQ ID NO: 276949 - RNA, 23 nt, Artificial Sequence
  Synthetic
ucauccugacaccgaaucauagc

SEQ ID NO: 276950 - RNA, 24 nt, Artificial Sequence
  Synthetic
uucauccugacaccgaaucauagc

SEQ ID NO: 276951 - RNA, 18 nt, Artificial Sequence
  Synthetic
aucuaggacuuucauagc

SEQ ID NO: 276952 - RNA, 19 nt, Artificial Sequence
  Synthetic
caucuaggacuuucauagc

SEQ ID NO: 276953 - RNA, 20 nt, Artificial Sequence
  Synthetic
ccaucuaggacuuucauagc

SEQ ID NO: 276954 - RNA, 18 nt, Artificial Sequence
  Synthetic
ggcaaauugacagauagc

SEQ ID NO: 276955 - RNA, 19 nt, Artificial Sequence
  Synthetic
aggcaaauugacagauagc

SEQ ID NO: 276956 - RNA, 20 nt, Artificial Sequence
  Synthetic
uaggcaaauugacagauagc

SEQ ID NO: 276957 - RNA, 21 nt, Artificial Sequence
  Synthetic
auaggcaaauugacagauagc

SEQ ID NO: 276958 - RNA, 22 nt, Artificial Sequence
  Synthetic
aauaggcaaauugacagauagc

SEQ ID NO: 276959 - RNA, 23 nt, Artificial Sequence
  Synthetic
uaauaggcaaauugacagauagc

SEQ ID NO: 276960 - RNA, 24 nt, Artificial Sequence
  Synthetic
uuaauaggcaaauugacagauagc

SEQ ID NO: 276961 - RNA, 18 nt, Artificial Sequence
  Synthetic
agaggauauccagauagc

SEQ ID NO: 276962 - RNA, 19 nt, Artificial Sequence
  Synthetic
aagaggauauccagauagc

SEQ ID NO: 276963 - RNA, 20 nt, Artificial Sequence
  Synthetic
gaagaggauauccagauagc

SEQ ID NO: 276964 - RNA, 21 nt, Artificial Sequence
  Synthetic
agaagaggauauccagauagc

SEQ ID NO: 276965 - RNA, 22 nt, Artificial Sequence
  Synthetic
cagaagaggauauccagauagc

SEQ ID NO: 276966 - RNA, 23 nt, Artificial Sequence
  Synthetic
ccagaagaggauauccagauagc

SEQ ID NO: 276967 - RNA, 24 nt, Artificial Sequence
  Synthetic
cccagaagaggauauccagauagc

SEQ ID NO: 276968 - RNA, 18 nt, Artificial Sequence
  Synthetic
auaagucagggagauagc

SEQ ID NO: 276969 - RNA, 19 nt, Artificial Sequence
  Synthetic
aauaagucagggagauagc

SEQ ID NO: 276970 - RNA, 20 nt, Artificial Sequence
  Synthetic
caauaagucagggagauagc

SEQ ID NO: 276971 - RNA, 21 nt, Artificial Sequence
  Synthetic
ccaauaagucagggagauagc

SEQ ID NO: 276972 - RNA, 22 nt, Artificial Sequence
  Synthetic
cccaauaagucagggagauagc

SEQ ID NO: 276973 - RNA, 23 nt, Artificial Sequence
  Synthetic
ccccaauaagucagggagauagc

SEQ ID NO: 276974 - RNA, 24 nt, Artificial Sequence
  Synthetic
cccccaauaagucagggagauagc

SEQ ID NO: 276975 - RNA, 18 nt, Artificial Sequence
  Synthetic
cacuguagucuagauagc

SEQ ID NO: 276976 - RNA, 19 nt, Artificial Sequence
  Synthetic
acacuguagucuagauagc

SEQ ID NO: 276977 - RNA, 20 nt, Artificial Sequence
  Synthetic
aacacuguagucuagauagc

SEQ ID NO: 276978 - RNA, 21 nt, Artificial Sequence
  Synthetic
aaacacuguagucuagauagc

SEQ ID NO: 276979 - RNA, 22 nt, Artificial Sequence
  Synthetic
uaaacacuguagucuagauagc

SEQ ID NO: 276980 - RNA, 23 nt, Artificial Sequence
  Synthetic
guaaacacuguagucuagauagc

SEQ ID NO: 276981 - RNA, 24 nt, Artificial Sequence
  Synthetic
uguaaacacuguagucuagauagc

SEQ ID NO: 276982 - RNA, 18 nt, Artificial Sequence
  Synthetic
cugagacaggaggauagc

SEQ ID NO: 276983 - RNA, 19 nt, Artificial Sequence
  Synthetic
gcugagacaggaggauagc

SEQ ID NO: 276984 - RNA, 20 nt, Artificial Sequence
  Synthetic
ggcugagacaggaggauagc

SEQ ID NO: 276985 - RNA, 21 nt, Artificial Sequence
  Synthetic
aggcugagacaggaggauagc

SEQ ID NO: 276986 - RNA, 22 nt, Artificial Sequence
  Synthetic
gaggcugagacaggaggauagc

SEQ ID NO: 276987 - RNA, 23 nt, Artificial Sequence
  Synthetic
ggaggcugagacaggaggauagc

SEQ ID NO: 276988 - RNA, 24 nt, Artificial Sequence
  Synthetic
gggaggcugagacaggaggauagc

SEQ ID NO: 276989 - RNA, 18 nt, Artificial Sequence
  Synthetic
uuagaaggagaugauagc

SEQ ID NO: 276990 - RNA, 19 nt, Artificial Sequence
  Synthetic
cuuagaaggagaugauagc

SEQ ID NO: 276991 - RNA, 20 nt, Artificial Sequence
  Synthetic
gcuuagaaggagaugauagc

SEQ ID NO: 276992 - RNA, 21 nt, Artificial Sequence
  Synthetic
ugcuuagaaggagaugauagc

SEQ ID NO: 276993 - RNA, 22 nt, Artificial Sequence
  Synthetic
augcuuagaaggagaugauagc

SEQ ID NO: 276994 - RNA, 23 nt, Artificial Sequence
  Synthetic
aaugcuuagaaggagaugauagc

SEQ ID NO: 276995 - RNA, 24 nt, Artificial Sequence
  Synthetic
gaaugcuuagaaggagaugauagc

SEQ ID NO: 276996 - RNA, 18 nt, Artificial Sequence
  Synthetic
cagauggagggugauagc

SEQ ID NO: 276997 - RNA, 19 nt, Artificial Sequence
  Synthetic
ccagauggagggugauagc

SEQ ID NO: 276998 - RNA, 20 nt, Artificial Sequence
  Synthetic
uccagauggagggugauagc

SEQ ID NO: 276999 - RNA, 21 nt, Artificial Sequence
  Synthetic
cuccagauggagggugauagc

SEQ ID NO: 277000 - RNA, 22 nt, Artificial Sequence
  Synthetic
ccuccagauggagggugauagc

SEQ ID NO: 277001 - RNA, 23 nt, Artificial Sequence
  Synthetic
gccuccagauggagggugauagc

SEQ ID NO: 277002 - RNA, 24 nt, Artificial Sequence
  Synthetic
ggccuccagauggagggugauagc

SEQ ID NO: 277003 - RNA, 18 nt, Artificial Sequence
  Synthetic
aacauaauauaauauagc

SEQ ID NO: 277004 - RNA, 19 nt, Artificial Sequence
  Synthetic
aaacauaauauaauauagc

SEQ ID NO: 277005 - RNA, 20 nt, Artificial Sequence
  Synthetic
gaaacauaauauaauauagc

SEQ ID NO: 277006 - RNA, 21 nt, Artificial Sequence
  Synthetic
agaaacauaauauaauauagc

SEQ ID NO: 277007 - RNA, 22 nt, Artificial Sequence
  Synthetic
aagaaacauaauauaauauagc

SEQ ID NO: 277008 - RNA, 23 nt, Artificial Sequence
  Synthetic
caagaaacauaauauaauauagc

SEQ ID NO: 277009 - RNA, 24 nt, Artificial Sequence
  Synthetic
ucaagaaacauaauauaauauagc

SEQ ID NO: 277010 - RNA, 18 nt, Artificial Sequence
  Synthetic
cuagaggggauauauagc

SEQ ID NO: 277011 - RNA, 19 nt, Artificial Sequence
  Synthetic
gcuagaggggauauauagc

SEQ ID NO: 277012 - RNA, 20 nt, Artificial Sequence
  Synthetic
agcuagaggggauauauagc

SEQ ID NO: 277013 - RNA, 21 nt, Artificial Sequence
  Synthetic
cagcuagaggggauauauagc

SEQ ID NO: 277014 - RNA, 22 nt, Artificial Sequence
  Synthetic
ccagcuagaggggauauauagc

SEQ ID NO: 277015 - RNA, 23 nt, Artificial Sequence
  Synthetic
gccagcuagaggggauauauagc

SEQ ID NO: 277016 - RNA, 24 nt, Artificial Sequence
  Synthetic
ggccagcuagaggggauauauagc

SEQ ID NO: 277017 - RNA, 18 nt, Artificial Sequence
  Synthetic
uuugccucguaguauagc

SEQ ID NO: 277018 - RNA, 19 nt, Artificial Sequence
  Synthetic
cuuugccucguaguauagc

SEQ ID NO: 277019 - RNA, 20 nt, Artificial Sequence
  Synthetic
ccuuugccucguaguauagc

SEQ ID NO: 277020 - RNA, 21 nt, Artificial Sequence
  Synthetic
cccuuugccucguaguauagc

SEQ ID NO: 277021 - RNA, 22 nt, Artificial Sequence
  Synthetic
ucccuuugccucguaguauagc

SEQ ID NO: 277022 - RNA, 23 nt, Artificial Sequence
  Synthetic
cucccuuugccucguaguauagc

SEQ ID NO: 277023 - RNA, 24 nt, Artificial Sequence
  Synthetic
ccucccuuugccucguaguauagc

SEQ ID NO: 277024 - RNA, 18 nt, Artificial Sequence
  Synthetic
guauuguuuucuuauagc

SEQ ID NO: 277025 - RNA, 19 nt, Artificial Sequence
  Synthetic
gguauuguuuucuuauagc

SEQ ID NO: 277026 - RNA, 20 nt, Artificial Sequence
  Synthetic
ggguauuguuuucuuauagc

SEQ ID NO: 277027 - RNA, 21 nt, Artificial Sequence
  Synthetic
uggguauuguuuucuuauagc

SEQ ID NO: 277028 - RNA, 22 nt, Artificial Sequence
  Synthetic
uuggguauuguuuucuuauagc

SEQ ID NO: 277029 - RNA, 23 nt, Artificial Sequence
  Synthetic
auuggguauuguuuucuuauagc

SEQ ID NO: 277030 - RNA, 24 nt, Artificial Sequence
  Synthetic
aauuggguauuguuuucuuauagc

SEQ ID NO: 277031 - RNA, 18 nt, Artificial Sequence
  Synthetic
aaaauacugauuuauagc

SEQ ID NO: 277032 - RNA, 19 nt, Artificial Sequence
  Synthetic
caaaauacugauuuauagc

SEQ ID NO: 277033 - RNA, 20 nt, Artificial Sequence
  Synthetic
gcaaaauacugauuuauagc

SEQ ID NO: 277034 - RNA, 21 nt, Artificial Sequence
  Synthetic
agcaaaauacugauuuauagc

SEQ ID NO: 277035 - RNA, 22 nt, Artificial Sequence
  Synthetic
aagcaaaauacugauuuauagc

SEQ ID NO: 277036 - RNA, 23 nt, Artificial Sequence
  Synthetic
aaagcaaaauacugauuuauagc

SEQ ID NO: 277037 - RNA, 24 nt, Artificial Sequence
  Synthetic
aaaagcaaaauacugauuuauagc

SEQ ID NO: 277038 - RNA, 18 nt, Artificial Sequence
  Synthetic
acccaaagaguaacuagc

SEQ ID NO: 277039 - RNA, 19 nt, Artificial Sequence
  Synthetic
aacccaaagaguaacuagc

SEQ ID NO: 277040 - RNA, 20 nt, Artificial Sequence
  Synthetic
caacccaaagaguaacuagc

SEQ ID NO: 277041 - RNA, 21 nt, Artificial Sequence
  Synthetic
gcaacccaaagaguaacuagc

SEQ ID NO: 277042 - RNA, 22 nt, Artificial Sequence
  Synthetic
ggcaacccaaagaguaacuagc

SEQ ID NO: 277043 - RNA, 23 nt, Artificial Sequence
  Synthetic
aggcaacccaaagaguaacuagc

SEQ ID NO: 277044 - RNA, 24 nt, Artificial Sequence
  Synthetic
gaggcaacccaaagaguaacuagc

SEQ ID NO: 277045 - RNA, 18 nt, Artificial Sequence
  Synthetic
uuucaaauagggacuagc

SEQ ID NO: 277046 - RNA, 19 nt, Artificial Sequence
  Synthetic
auuucaaauagggacuagc

SEQ ID NO: 277047 - RNA, 20 nt, Artificial Sequence
  Synthetic
uauuucaaauagggacuagc

SEQ ID NO: 277048 - RNA, 21 nt, Artificial Sequence
  Synthetic
uuauuucaaauagggacuagc

SEQ ID NO: 277049 - RNA, 22 nt, Artificial Sequence
  Synthetic
auuauuucaaauagggacuagc

SEQ ID NO: 277050 - RNA, 23 nt, Artificial Sequence
  Synthetic
cauuauuucaaauagggacuagc

SEQ ID NO: 277051 - RNA, 24 nt, Artificial Sequence
  Synthetic
ucauuauuucaaauagggacuagc

SEQ ID NO: 277052 - RNA, 18 nt, Artificial Sequence
  Synthetic
uacugucaauauacuagc

SEQ ID NO: 277053 - RNA, 19 nt, Artificial Sequence
  Synthetic
cuacugucaauauacuagc

SEQ ID NO: 277054 - RNA, 20 nt, Artificial Sequence
  Synthetic
ucuacugucaauauacuagc

SEQ ID NO: 277055 - RNA, 21 nt, Artificial Sequence
  Synthetic
cucuacugucaauauacuagc

SEQ ID NO: 277056 - RNA, 22 nt, Artificial Sequence
  Synthetic
acucuacugucaauauacuagc

SEQ ID NO: 277057 - RNA, 23 nt, Artificial Sequence
  Synthetic
gacucuacugucaauauacuagc

SEQ ID NO: 277058 - RNA, 24 nt, Artificial Sequence
  Synthetic
agacucuacugucaauauacuagc

SEQ ID NO: 277059 - RNA, 18 nt, Artificial Sequence
  Synthetic
gggcauuauuacccuagc

SEQ ID NO: 277060 - RNA, 19 nt, Artificial Sequence
  Synthetic
ggggcauuauuacccuagc

SEQ ID NO: 277061 - RNA, 20 nt, Artificial Sequence
  Synthetic
aggggcauuauuacccuagc

SEQ ID NO: 277062 - RNA, 21 nt, Artificial Sequence
  Synthetic
gaggggcauuauuacccuagc

SEQ ID NO: 277063 - RNA, 22 nt, Artificial Sequence
  Synthetic
ggaggggcauuauuacccuagc

SEQ ID NO: 277064 - RNA, 23 nt, Artificial Sequence
  Synthetic
gggaggggcauuauuacccuagc

SEQ ID NO: 277065 - RNA, 24 nt, Artificial Sequence
  Synthetic
agggaggggcauuauuacccuagc

SEQ ID NO: 277066 - RNA, 18 nt, Artificial Sequence
  Synthetic
uccagagacaaagcuagc

SEQ ID NO: 277067 - RNA, 19 nt, Artificial Sequence
  Synthetic
uuccagagacaaagcuagc

SEQ ID NO: 277068 - RNA, 20 nt, Artificial Sequence
  Synthetic
guuccagagacaaagcuagc

SEQ ID NO: 277069 - RNA, 21 nt, Artificial Sequence
  Synthetic
uguuccagagacaaagcuagc

SEQ ID NO: 277070 - RNA, 22 nt, Artificial Sequence
  Synthetic
uuguuccagagacaaagcuagc

SEQ ID NO: 277071 - RNA, 23 nt, Artificial Sequence
  Synthetic
cuuguuccagagacaaagcuagc

SEQ ID NO: 277072 - RNA, 24 nt, Artificial Sequence
  Synthetic
ucuuguuccagagacaaagcuagc

SEQ ID NO: 277073 - RNA, 18 nt, Artificial Sequence
  Synthetic
ggucaaagagaagcuagc

SEQ ID NO: 277074 - RNA, 19 nt, Artificial Sequence
  Synthetic
aggucaaagagaagcuagc

SEQ ID NO: 277075 - RNA, 20 nt, Artificial Sequence
  Synthetic
gaggucaaagagaagcuagc

SEQ ID NO: 277076 - RNA, 21 nt, Artificial Sequence
  Synthetic
ugaggucaaagagaagcuagc

SEQ ID NO: 277077 - RNA, 22 nt, Artificial Sequence
  Synthetic
augaggucaaagagaagcuagc

SEQ ID NO: 277078 - RNA, 23 nt, Artificial Sequence
  Synthetic
aaugaggucaaagagaagcuagc

SEQ ID NO: 277079 - RNA, 24 nt, Artificial Sequence
  Synthetic
caaugaggucaaagagaagcuagc

SEQ ID NO: 277080 - RNA, 18 nt, Artificial Sequence
  Synthetic
aguuagaagccagcuagc

SEQ ID NO: 277081 - RNA, 19 nt, Artificial Sequence
  Synthetic
uaguuagaagccagcuagc

SEQ ID NO: 277082 - RNA, 20 nt, Artificial Sequence
  Synthetic
cuaguuagaagccagcuagc

SEQ ID NO: 277083 - RNA, 21 nt, Artificial Sequence
  Synthetic
ccuaguuagaagccagcuagc

SEQ ID NO: 277084 - RNA, 22 nt, Artificial Sequence
  Synthetic
accuaguuagaagccagcuagc

SEQ ID NO: 277085 - RNA, 23 nt, Artificial Sequence
  Synthetic
aaccuaguuagaagccagcuagc

SEQ ID NO: 277086 - RNA, 24 nt, Artificial Sequence
  Synthetic
uaaccuaguuagaagccagcuagc

SEQ ID NO: 277087 - RNA, 18 nt, Artificial Sequence
  Synthetic
gauaacuaggcagcuagc

SEQ ID NO: 277088 - RNA, 19 nt, Artificial Sequence
  Synthetic
ugauaacuaggcagcuagc

SEQ ID NO: 277089 - RNA, 20 nt, Artificial Sequence
  Synthetic
cugauaacuaggcagcuagc

SEQ ID NO: 277090 - RNA, 21 nt, Artificial Sequence
  Synthetic
acugauaacuaggcagcuagc

SEQ ID NO: 277091 - RNA, 22 nt, Artificial Sequence
  Synthetic
cacugauaacuaggcagcuagc

SEQ ID NO: 277092 - RNA, 23 nt, Artificial Sequence
  Synthetic
gcacugauaacuaggcagcuagc

SEQ ID NO: 277093 - RNA, 24 nt, Artificial Sequence
  Synthetic
agcacugauaacuaggcagcuagc

SEQ ID NO: 277094 - RNA, 18 nt, Artificial Sequence
  Synthetic
auuaauuagcuagcuagc

SEQ ID NO: 277095 - RNA, 19 nt, Artificial Sequence
  Synthetic
gauuaauuagcuagcuagc

SEQ ID NO: 277096 - RNA, 20 nt, Artificial Sequence
  Synthetic
ugauuaauuagcuagcuagc

SEQ ID NO: 277097 - RNA, 21 nt, Artificial Sequence
  Synthetic
uugauuaauuagcuagcuagc

SEQ ID NO: 277098 - RNA, 22 nt, Artificial Sequence
  Synthetic
auugauuaauuagcuagcuagc

SEQ ID NO: 277099 - RNA, 23 nt, Artificial Sequence
  Synthetic
uauugauuaauuagcuagcuagc

SEQ ID NO: 277100 - RNA, 24 nt, Artificial Sequence
  Synthetic
auauugauuaauuagcuagcuagc

SEQ ID NO: 277101 - RNA, 18 nt, Artificial Sequence
  Synthetic
ucugggcauguggcuagc

SEQ ID NO: 277102 - RNA, 19 nt, Artificial Sequence
  Synthetic
uucugggcauguggcuagc

SEQ ID NO: 277103 - RNA, 20 nt, Artificial Sequence
  Synthetic
uuucugggcauguggcuagc

SEQ ID NO: 277104 - RNA, 21 nt, Artificial Sequence
  Synthetic
cuuucugggcauguggcuagc

SEQ ID NO: 277105 - RNA, 22 nt, Artificial Sequence
  Synthetic
ccuuucugggcauguggcuagc

SEQ ID NO: 277106 - RNA, 23 nt, Artificial Sequence
  Synthetic
gccuuucugggcauguggcuagc

SEQ ID NO: 277107 - RNA, 24 nt, Artificial Sequence
  Synthetic
ugccuuucugggcauguggcuagc

SEQ ID NO: 277108 - RNA, 18 nt, Artificial Sequence
  Synthetic
uaacuuaaaugaucuagc

SEQ ID NO: 277109 - RNA, 19 nt, Artificial Sequence
  Synthetic
guaacuuaaaugaucuagc

SEQ ID NO: 277110 - RNA, 20 nt, Artificial Sequence
  Synthetic
uguaacuuaaaugaucuagc

SEQ ID NO: 277111 - RNA, 21 nt, Artificial Sequence
  Synthetic
uuguaacuuaaaugaucuagc

SEQ ID NO: 277112 - RNA, 22 nt, Artificial Sequence
  Synthetic
auuguaacuuaaaugaucuagc

SEQ ID NO: 277113 - RNA, 23 nt, Artificial Sequence
  Synthetic
cauuguaacuuaaaugaucuagc

SEQ ID NO: 277114 - RNA, 24 nt, Artificial Sequence
  Synthetic
ccauuguaacuuaaaugaucuagc

SEQ ID NO: 277115 - RNA, 18 nt, Artificial Sequence
  Synthetic
ggaaaucauuucucuagc

SEQ ID NO: 277116 - RNA, 19 nt, Artificial Sequence
  Synthetic
aggaaaucauuucucuagc

SEQ ID NO: 277117 - RNA, 20 nt, Artificial Sequence
  Synthetic
uaggaaaucauuucucuagc

SEQ ID NO: 277118 - RNA, 21 nt, Artificial Sequence
  Synthetic
auaggaaaucauuucucuagc

SEQ ID NO: 277119 - RNA, 22 nt, Artificial Sequence
  Synthetic
uauaggaaaucauuucucuagc

SEQ ID NO: 277120 - RNA, 23 nt, Artificial Sequence
  Synthetic
uuauaggaaaucauuucucuagc

SEQ ID NO: 277121 - RNA, 24 nt, Artificial Sequence
  Synthetic
auuauaggaaaucauuucucuagc

SEQ ID NO: 277122 - RNA, 18 nt, Artificial Sequence
  Synthetic
uaguaucuucauucuagc

SEQ ID NO: 277123 - RNA, 19 nt, Artificial Sequence
  Synthetic
cuaguaucuucauucuagc

SEQ ID NO: 277124 - RNA, 20 nt, Artificial Sequence
  Synthetic
gcuaguaucuucauucuagc

SEQ ID NO: 277125 - RNA, 21 nt, Artificial Sequence
  Synthetic
agcuaguaucuucauucuagc

SEQ ID NO: 277126 - RNA, 22 nt, Artificial Sequence
  Synthetic
uagcuaguaucuucauucuagc

SEQ ID NO: 277127 - RNA, 23 nt, Artificial Sequence
  Synthetic
guagcuaguaucuucauucuagc

SEQ ID NO: 277128 - RNA, 24 nt, Artificial Sequence
  Synthetic
uguagcuaguaucuucauucuagc

SEQ ID NO: 277129 - RNA, 18 nt, Artificial Sequence
  Synthetic
ggucucaagauuucuagc

SEQ ID NO: 277130 - RNA, 19 nt, Artificial Sequence
  Synthetic
uggucucaagauuucuagc

SEQ ID NO: 277131 - RNA, 20 nt, Artificial Sequence
  Synthetic
auggucucaagauuucuagc

SEQ ID NO: 277132 - RNA, 21 nt, Artificial Sequence
  Synthetic
gauggucucaagauuucuagc

SEQ ID NO: 277133 - RNA, 22 nt, Artificial Sequence
  Synthetic
cgauggucucaagauuucuagc

SEQ ID NO: 277134 - RNA, 23 nt, Artificial Sequence
  Synthetic
acgauggucucaagauuucuagc

SEQ ID NO: 277135 - RNA, 24 nt, Artificial Sequence
  Synthetic
aacgauggucucaagauuucuagc

SEQ ID NO: 277136 - RNA, 18 nt, Artificial Sequence
  Synthetic
cucagccucccaaguagc

SEQ ID NO: 277137 - RNA, 19 nt, Artificial Sequence
  Synthetic
ccucagccucccaaguagc

SEQ ID NO: 277138 - RNA, 20 nt, Artificial Sequence
  Synthetic
gccucagccucccaaguagc

SEQ ID NO: 277139 - RNA, 18 nt, Artificial Sequence
  Synthetic
agaggaaauggaaguagc

SEQ ID NO: 277140 - RNA, 19 nt, Artificial Sequence
  Synthetic
uagaggaaauggaaguagc

SEQ ID NO: 277141 - RNA, 20 nt, Artificial Sequence
  Synthetic
auagaggaaauggaaguagc

SEQ ID NO: 277142 - RNA, 21 nt, Artificial Sequence
  Synthetic
aauagaggaaauggaaguagc

SEQ ID NO: 277143 - RNA, 22 nt, Artificial Sequence
  Synthetic
gaauagaggaaauggaaguagc

SEQ ID NO: 277144 - RNA, 23 nt, Artificial Sequence
  Synthetic
agaauagaggaaauggaaguagc

SEQ ID NO: 277145 - RNA, 24 nt, Artificial Sequence
  Synthetic
aagaauagaggaaauggaaguagc

SEQ ID NO: 277146 - RNA, 18 nt, Artificial Sequence
  Synthetic
aggagcucccagaguagc

SEQ ID NO: 277147 - RNA, 19 nt, Artificial Sequence
  Synthetic
uaggagcucccagaguagc

SEQ ID NO: 277148 - RNA, 20 nt, Artificial Sequence
  Synthetic
uuaggagcucccagaguagc

SEQ ID NO: 277149 - RNA, 21 nt, Artificial Sequence
  Synthetic
cuuaggagcucccagaguagc

SEQ ID NO: 277150 - RNA, 22 nt, Artificial Sequence
  Synthetic
ccuuaggagcucccagaguagc

SEQ ID NO: 277151 - RNA, 23 nt, Artificial Sequence
  Synthetic
cccuuaggagcucccagaguagc

SEQ ID NO: 277152 - RNA, 24 nt, Artificial Sequence
  Synthetic
gcccuuaggagcucccagaguagc

SEQ ID NO: 277153 - RNA, 18 nt, Artificial Sequence
  Synthetic
cucagccuccagaguagc

SEQ ID NO: 277154 - RNA, 19 nt, Artificial Sequence
  Synthetic
ccucagccuccagaguagc

SEQ ID NO: 277155 - RNA, 20 nt, Artificial Sequence
  Synthetic
gccucagccuccagaguagc

SEQ ID NO: 277156 - RNA, 21 nt, Artificial Sequence
  Synthetic
ugccucagccuccagaguagc

SEQ ID NO: 277157 - RNA, 22 nt, Artificial Sequence
  Synthetic
cugccucagccuccagaguagc

SEQ ID NO: 277158 - RNA, 23 nt, Artificial Sequence
  Synthetic
ccugccucagccuccagaguagc

SEQ ID NO: 277159 - RNA, 24 nt, Artificial Sequence
  Synthetic
uccugccucagccuccagaguagc

SEQ ID NO: 277160 - RNA, 19 nt, Artificial Sequence
  Synthetic
ccucagccucccgaguagc

SEQ ID NO: 277161 - RNA, 20 nt, Artificial Sequence
  Synthetic
gccucagccucccgaguagc

SEQ ID NO: 277162 - RNA, 21 nt, Artificial Sequence
  Synthetic
cgccucagccucccgaguagc

SEQ ID NO: 277163 - RNA, 22 nt, Artificial Sequence
  Synthetic
ccgccucagccucccgaguagc

SEQ ID NO: 277164 - RNA, 23 nt, Artificial Sequence
  Synthetic
cccgccucagccucccgaguagc

SEQ ID NO: 277165 - RNA, 24 nt, Artificial Sequence
  Synthetic
ucccgccucagccucccgaguagc

SEQ ID NO: 277166 - RNA, 18 nt, Artificial Sequence
  Synthetic
cucagccucucgaguagc

SEQ ID NO: 277167 - RNA, 19 nt, Artificial Sequence
  Synthetic
ccucagccucucgaguagc

SEQ ID NO: 277168 - RNA, 20 nt, Artificial Sequence
  Synthetic
gccucagccucucgaguagc

SEQ ID NO: 277169 - RNA, 21 nt, Artificial Sequence
  Synthetic
ugccucagccucucgaguagc

SEQ ID NO: 277170 - RNA, 22 nt, Artificial Sequence
  Synthetic
cugccucagccucucgaguagc

SEQ ID NO: 277171 - RNA, 23 nt, Artificial Sequence
  Synthetic
ucugccucagccucucgaguagc

SEQ ID NO: 277172 - RNA, 24 nt, Artificial Sequence
  Synthetic
uucugccucagccucucgaguagc

SEQ ID NO: 277173 - RNA, 18 nt, Artificial Sequence
  Synthetic
cucagccuccugaguagc

SEQ ID NO: 277174 - RNA, 19 nt, Artificial Sequence
  Synthetic
ccucagccuccugaguagc

SEQ ID NO: 277175 - RNA, 20 nt, Artificial Sequence
  Synthetic
accucagccuccugaguagc

SEQ ID NO: 277176 - RNA, 21 nt, Artificial Sequence
  Synthetic
aaccucagccuccugaguagc

SEQ ID NO: 277177 - RNA, 22 nt, Artificial Sequence
  Synthetic
caaccucagccuccugaguagc

SEQ ID NO: 277178 - RNA, 23 nt, Artificial Sequence
  Synthetic
ccaaccucagccuccugaguagc

SEQ ID NO: 277179 - RNA, 24 nt, Artificial Sequence
  Synthetic
uccaaccucagccuccugaguagc

SEQ ID NO: 277180 - RNA, 18 nt, Artificial Sequence
  Synthetic
cucagccucuugaguagc

SEQ ID NO: 277181 - RNA, 19 nt, Artificial Sequence
  Synthetic
ccucagccucuugaguagc

SEQ ID NO: 277182 - RNA, 20 nt, Artificial Sequence
  Synthetic
gccucagccucuugaguagc

SEQ ID NO: 277183 - RNA, 21 nt, Artificial Sequence
  Synthetic
ugccucagccucuugaguagc

SEQ ID NO: 277184 - RNA, 22 nt, Artificial Sequence
  Synthetic
cugccucagccucuugaguagc

SEQ ID NO: 277185 - RNA, 23 nt, Artificial Sequence
  Synthetic
ccugccucagccucuugaguagc

SEQ ID NO: 277186 - RNA, 24 nt, Artificial Sequence
  Synthetic
uccugccucagccucuugaguagc

SEQ ID NO: 277187 - RNA, 18 nt, Artificial Sequence
  Synthetic
cucagccucccuaguagc

SEQ ID NO: 277188 - RNA, 19 nt, Artificial Sequence
  Synthetic
ccucagccucccuaguagc

SEQ ID NO: 277189 - RNA, 20 nt, Artificial Sequence
  Synthetic
gccucagccucccuaguagc

SEQ ID NO: 277190 - RNA, 21 nt, Artificial Sequence
  Synthetic
ugccucagccucccuaguagc

SEQ ID NO: 277191 - RNA, 22 nt, Artificial Sequence
  Synthetic
cugccucagccucccuaguagc

SEQ ID NO: 277192 - RNA, 23 nt, Artificial Sequence
  Synthetic
ccugccucagccucccuaguagc

SEQ ID NO: 277193 - RNA, 24 nt, Artificial Sequence
  Synthetic
uccugccucagccucccuaguagc

SEQ ID NO: 277194 - RNA, 18 nt, Artificial Sequence
  Synthetic
cucagccucccccguagc

SEQ ID NO: 277195 - RNA, 19 nt, Artificial Sequence
  Synthetic
ccucagccucccccguagc

SEQ ID NO: 277196 - RNA, 20 nt, Artificial Sequence
  Synthetic
gccucagccucccccguagc

SEQ ID NO: 277197 - RNA, 21 nt, Artificial Sequence
  Synthetic
ugccucagccucccccguagc

SEQ ID NO: 277198 - RNA, 22 nt, Artificial Sequence
  Synthetic
cugccucagccucccccguagc

SEQ ID NO: 277199 - RNA, 23 nt, Artificial Sequence
  Synthetic
ccugccucagccucccccguagc

SEQ ID NO: 277200 - RNA, 24 nt, Artificial Sequence
  Synthetic
uccugccucagccucccccguagc

SEQ ID NO: 277201 - RNA, 18 nt, Artificial Sequence
  Synthetic
gcuuugcaaggucguagc

SEQ ID NO: 277202 - RNA, 19 nt, Artificial Sequence
  Synthetic
agcuuugcaaggucguagc

SEQ ID NO: 277203 - RNA, 20 nt, Artificial Sequence
  Synthetic
aagcuuugcaaggucguagc

SEQ ID NO: 277204 - RNA, 21 nt, Artificial Sequence
  Synthetic
uaagcuuugcaaggucguagc

SEQ ID NO: 277205 - RNA, 22 nt, Artificial Sequence
  Synthetic
guaagcuuugcaaggucguagc

SEQ ID NO: 277206 - RNA, 23 nt, Artificial Sequence
  Synthetic
gguaagcuuugcaaggucguagc

SEQ ID NO: 277207 - RNA, 24 nt, Artificial Sequence
  Synthetic
agguaagcuuugcaaggucguagc

SEQ ID NO: 277208 - RNA, 18 nt, Artificial Sequence
  Synthetic
agacaaaagaaagguagc

SEQ ID NO: 277209 - RNA, 19 nt, Artificial Sequence
  Synthetic
aagacaaaagaaagguagc

SEQ ID NO: 277210 - RNA, 20 nt, Artificial Sequence
  Synthetic
aaagacaaaagaaagguagc

SEQ ID NO: 277211 - RNA, 21 nt, Artificial Sequence
  Synthetic
aaaagacaaaagaaagguagc

SEQ ID NO: 277212 - RNA, 22 nt, Artificial Sequence
  Synthetic
gaaaagacaaaagaaagguagc

SEQ ID NO: 277213 - RNA, 23 nt, Artificial Sequence
  Synthetic
agaaaagacaaaagaaagguagc

SEQ ID NO: 277214 - RNA, 24 nt, Artificial Sequence
  Synthetic
gagaaaagacaaaagaaagguagc

SEQ ID NO: 277215 - RNA, 18 nt, Artificial Sequence
  Synthetic
agaaacucacaagguagc

SEQ ID NO: 277216 - RNA, 19 nt, Artificial Sequence
  Synthetic
gagaaacucacaagguagc

SEQ ID NO: 277217 - RNA, 20 nt, Artificial Sequence
  Synthetic
ugagaaacucacaagguagc

SEQ ID NO: 277218 - RNA, 21 nt, Artificial Sequence
  Synthetic
uugagaaacucacaagguagc

SEQ ID NO: 277219 - RNA, 22 nt, Artificial Sequence
  Synthetic
cuugagaaacucacaagguagc

SEQ ID NO: 277220 - RNA, 23 nt, Artificial Sequence
  Synthetic
acuugagaaacucacaagguagc

SEQ ID NO: 277221 - RNA, 24 nt, Artificial Sequence
  Synthetic
gacuugagaaacucacaagguagc

SEQ ID NO: 277222 - RNA, 18 nt, Artificial Sequence
  Synthetic
gcugggguuugcgguagc

SEQ ID NO: 277223 - RNA, 19 nt, Artificial Sequence
  Synthetic
agcugggguuugcgguagc

SEQ ID NO: 277224 - RNA, 20 nt, Artificial Sequence
  Synthetic
uagcugggguuugcgguagc

SEQ ID NO: 277225 - RNA, 21 nt, Artificial Sequence
  Synthetic
uuagcugggguuugcgguagc

SEQ ID NO: 277226 - RNA, 22 nt, Artificial Sequence
  Synthetic
auuagcugggguuugcgguagc

SEQ ID NO: 277227 - RNA, 23 nt, Artificial Sequence
  Synthetic
gauuagcugggguuugcgguagc

SEQ ID NO: 277228 - RNA, 24 nt, Artificial Sequence
  Synthetic
agauuagcugggguuugcgguagc

SEQ ID NO: 277229 - RNA, 18 nt, Artificial Sequence
  Synthetic
cucagcuuccuggguagc

SEQ ID NO: 277230 - RNA, 19 nt, Artificial Sequence
  Synthetic
ccucagcuuccuggguagc

SEQ ID NO: 277231 - RNA, 20 nt, Artificial Sequence
  Synthetic
accucagcuuccuggguagc

SEQ ID NO: 277232 - RNA, 21 nt, Artificial Sequence
  Synthetic
uaccucagcuuccuggguagc

SEQ ID NO: 277233 - RNA, 22 nt, Artificial Sequence
  Synthetic
cuaccucagcuuccuggguagc

SEQ ID NO: 277234 - RNA, 23 nt, Artificial Sequence
  Synthetic
ccuaccucagcuuccuggguagc

SEQ ID NO: 277235 - RNA, 24 nt, Artificial Sequence
  Synthetic
uccuaccucagcuuccuggguagc

SEQ ID NO: 277236 - RNA, 18 nt, Artificial Sequence
  Synthetic
uucucagacugugguagc

SEQ ID NO: 277237 - RNA, 19 nt, Artificial Sequence
  Synthetic
uuucucagacugugguagc

SEQ ID NO: 277238 - RNA, 20 nt, Artificial Sequence
  Synthetic
guuucucagacugugguagc

SEQ ID NO: 277239 - RNA, 21 nt, Artificial Sequence
  Synthetic
uguuucucagacugugguagc

SEQ ID NO: 277240 - RNA, 22 nt, Artificial Sequence
  Synthetic
cuguuucucagacugugguagc

SEQ ID NO: 277241 - RNA, 23 nt, Artificial Sequence
  Synthetic
acuguuucucagacugugguagc

SEQ ID NO: 277242 - RNA, 24 nt, Artificial Sequence
  Synthetic
gacuguuucucagacugugguagc

SEQ ID NO: 277243 - RNA, 18 nt, Artificial Sequence
  Synthetic
caggauuuuguauguagc

SEQ ID NO: 277244 - RNA, 19 nt, Artificial Sequence
  Synthetic
ucaggauuuuguauguagc

SEQ ID NO: 277245 - RNA, 20 nt, Artificial Sequence
  Synthetic
uucaggauuuuguauguagc

SEQ ID NO: 277246 - RNA, 21 nt, Artificial Sequence
  Synthetic
uuucaggauuuuguauguagc

SEQ ID NO: 277247 - RNA, 22 nt, Artificial Sequence
  Synthetic
uuuucaggauuuuguauguagc

SEQ ID NO: 277248 - RNA, 23 nt, Artificial Sequence
  Synthetic
uuuuucaggauuuuguauguagc

SEQ ID NO: 277249 - RNA, 24 nt, Artificial Sequence
  Synthetic
uuuuuucaggauuuuguauguagc

SEQ ID NO: 277250 - RNA, 18 nt, Artificial Sequence
  Synthetic
cuaucugaguccuguagc

SEQ ID NO: 277251 - RNA, 19 nt, Artificial Sequence
  Synthetic
ccuaucugaguccuguagc

SEQ ID NO: 277252 - RNA, 20 nt, Artificial Sequence
  Synthetic
accuaucugaguccuguagc

SEQ ID NO: 277253 - RNA, 21 nt, Artificial Sequence
  Synthetic
aaccuaucugaguccuguagc

SEQ ID NO: 277254 - RNA, 22 nt, Artificial Sequence
  Synthetic
caaccuaucugaguccuguagc

SEQ ID NO: 277255 - RNA, 23 nt, Artificial Sequence
  Synthetic
gcaaccuaucugaguccuguagc

SEQ ID NO: 277256 - RNA, 24 nt, Artificial Sequence
  Synthetic
ggcaaccuaucugaguccuguagc

SEQ ID NO: 277257 - RNA, 18 nt, Artificial Sequence
  Synthetic
caugacaggagcuguagc

SEQ ID NO: 277258 - RNA, 19 nt, Artificial Sequence
  Synthetic
gcaugacaggagcuguagc

SEQ ID NO: 277259 - RNA, 20 nt, Artificial Sequence
  Synthetic
ggcaugacaggagcuguagc

SEQ ID NO: 277260 - RNA, 21 nt, Artificial Sequence
  Synthetic
uggcaugacaggagcuguagc

SEQ ID NO: 277261 - RNA, 22 nt, Artificial Sequence
  Synthetic
auggcaugacaggagcuguagc

SEQ ID NO: 277262 - RNA, 23 nt, Artificial Sequence
  Synthetic
uauggcaugacaggagcuguagc

SEQ ID NO: 277263 - RNA, 24 nt, Artificial Sequence
  Synthetic
guauggcaugacaggagcuguagc

SEQ ID NO: 277264 - RNA, 18 nt, Artificial Sequence
  Synthetic
uucuaucagaucuguagc

SEQ ID NO: 277265 - RNA, 19 nt, Artificial Sequence
  Synthetic
cuucuaucagaucuguagc

SEQ ID NO: 277266 - RNA, 20 nt, Artificial Sequence
  Synthetic
gcuucuaucagaucuguagc

SEQ ID NO: 277267 - RNA, 21 nt, Artificial Sequence
  Synthetic
agcuucuaucagaucuguagc

SEQ ID NO: 277268 - RNA, 22 nt, Artificial Sequence
  Synthetic
uagcuucuaucagaucuguagc

SEQ ID NO: 277269 - RNA, 23 nt, Artificial Sequence
  Synthetic
auagcuucuaucagaucuguagc

SEQ ID NO: 277270 - RNA, 24 nt, Artificial Sequence
  Synthetic
aauagcuucuaucagaucuguagc

SEQ ID NO: 277271 - RNA, 18 nt, Artificial Sequence
  Synthetic
aagagaaaucucuguagc

SEQ ID NO: 277272 - RNA, 19 nt, Artificial Sequence
  Synthetic
uaagagaaaucucuguagc

SEQ ID NO: 277273 - RNA, 20 nt, Artificial Sequence
  Synthetic
guaagagaaaucucuguagc

SEQ ID NO: 277274 - RNA, 21 nt, Artificial Sequence
  Synthetic
uguaagagaaaucucuguagc

SEQ ID NO: 277275 - RNA, 22 nt, Artificial Sequence
  Synthetic
uuguaagagaaaucucuguagc

SEQ ID NO: 277276 - RNA, 23 nt, Artificial Sequence
  Synthetic
uuuguaagagaaaucucuguagc

SEQ ID NO: 277277 - RNA, 24 nt, Artificial Sequence
  Synthetic
cuuuguaagagaaaucucuguagc

SEQ ID NO: 277278 - RNA, 18 nt, Artificial Sequence
  Synthetic
cucagccucccguguagc

SEQ ID NO: 277279 - RNA, 19 nt, Artificial Sequence
  Synthetic
ccucagccucccguguagc

SEQ ID NO: 277280 - RNA, 20 nt, Artificial Sequence
  Synthetic
gccucagccucccguguagc

SEQ ID NO: 277281 - RNA, 21 nt, Artificial Sequence
  Synthetic
ugccucagccucccguguagc

SEQ ID NO: 277282 - RNA, 22 nt, Artificial Sequence
  Synthetic
cugccucagccucccguguagc

SEQ ID NO: 277283 - RNA, 23 nt, Artificial Sequence
  Synthetic
ccugccucagccucccguguagc

SEQ ID NO: 277284 - RNA, 24 nt, Artificial Sequence
  Synthetic
uccugccucagccucccguguagc

SEQ ID NO: 277285 - RNA, 18 nt, Artificial Sequence
  Synthetic
cccuauuuuguguguagc

SEQ ID NO: 277286 - RNA, 19 nt, Artificial Sequence
  Synthetic
gcccuauuuuguguguagc

SEQ ID NO: 277287 - RNA, 20 nt, Artificial Sequence
  Synthetic
agcccuauuuuguguguagc

SEQ ID NO: 277288 - RNA, 21 nt, Artificial Sequence
  Synthetic
gagcccuauuuuguguguagc

SEQ ID NO: 277289 - RNA, 22 nt, Artificial Sequence
  Synthetic
ugagcccuauuuuguguguagc

SEQ ID NO: 277290 - RNA, 23 nt, Artificial Sequence
  Synthetic
uugagcccuauuuuguguguagc

SEQ ID NO: 277291 - RNA, 24 nt, Artificial Sequence
  Synthetic
auugagcccuauuuuguguguagc

SEQ ID NO: 277292 - RNA, 18 nt, Artificial Sequence
  Synthetic
caacucugcuauuguagc

SEQ ID NO: 277293 - RNA, 19 nt, Artificial Sequence
  Synthetic
ucaacucugcuauuguagc

SEQ ID NO: 277294 - RNA, 20 nt, Artificial Sequence
  Synthetic
cucaacucugcuauuguagc

SEQ ID NO: 277295 - RNA, 21 nt, Artificial Sequence
  Synthetic
acucaacucugcuauuguagc

SEQ ID NO: 277296 - RNA, 22 nt, Artificial Sequence
  Synthetic
uacucaacucugcuauuguagc

SEQ ID NO: 277297 - RNA, 23 nt, Artificial Sequence
  Synthetic
cuacucaacucugcuauuguagc

SEQ ID NO: 277298 - RNA, 24 nt, Artificial Sequence
  Synthetic
acuacucaacucugcuauuguagc

SEQ ID NO: 277299 - RNA, 18 nt, Artificial Sequence
  Synthetic
ccacauuaaaguuguagc

SEQ ID NO: 277300 - RNA, 19 nt, Artificial Sequence
  Synthetic
gccacauuaaaguuguagc

SEQ ID NO: 277301 - RNA, 20 nt, Artificial Sequence
  Synthetic
ugccacauuaaaguuguagc

SEQ ID NO: 277302 - RNA, 21 nt, Artificial Sequence
  Synthetic
uugccacauuaaaguuguagc

SEQ ID NO: 277303 - RNA, 22 nt, Artificial Sequence
  Synthetic
uuugccacauuaaaguuguagc

SEQ ID NO: 277304 - RNA, 23 nt, Artificial Sequence
  Synthetic
guuugccacauuaaaguuguagc

SEQ ID NO: 277305 - RNA, 24 nt, Artificial Sequence
  Synthetic
uguuugccacauuaaaguuguagc

SEQ ID NO: 277306 - RNA, 18 nt, Artificial Sequence
  Synthetic
gugagaaaauguuguagc

SEQ ID NO: 277307 - RNA, 19 nt, Artificial Sequence
  Synthetic
ugugagaaaauguuguagc

SEQ ID NO: 277308 - RNA, 20 nt, Artificial Sequence
  Synthetic
cugugagaaaauguuguagc

SEQ ID NO: 277309 - RNA, 21 nt, Artificial Sequence
  Synthetic
ucugugagaaaauguuguagc

SEQ ID NO: 277310 - RNA, 22 nt, Artificial Sequence
  Synthetic
uucugugagaaaauguuguagc

SEQ ID NO: 277311 - RNA, 23 nt, Artificial Sequence
  Synthetic
auucugugagaaaauguuguagc

SEQ ID NO: 277312 - RNA, 24 nt, Artificial Sequence
  Synthetic
uauucugugagaaaauguuguagc

SEQ ID NO: 277313 - RNA, 18 nt, Artificial Sequence
  Synthetic
uggagauaauaaauuagc

SEQ ID NO: 277314 - RNA, 19 nt, Artificial Sequence
  Synthetic
auggagauaauaaauuagc

SEQ ID NO: 277315 - RNA, 20 nt, Artificial Sequence
  Synthetic
cauggagauaauaaauuagc

SEQ ID NO: 277316 - RNA, 21 nt, Artificial Sequence
  Synthetic
acauggagauaauaaauuagc

SEQ ID NO: 277317 - RNA, 22 nt, Artificial Sequence
  Synthetic
cacauggagauaauaaauuagc

SEQ ID NO: 277318 - RNA, 23 nt, Artificial Sequence
  Synthetic
ucacauggagauaauaaauuagc

SEQ ID NO: 277319 - RNA, 24 nt, Artificial Sequence
  Synthetic
uucacauggagauaauaaauuagc

SEQ ID NO: 277320 - RNA, 18 nt, Artificial Sequence
  Synthetic
aauuuaacuuucauuagc

SEQ ID NO: 277321 - RNA, 19 nt, Artificial Sequence
  Synthetic
aaauuuaacuuucauuagc

SEQ ID NO: 277322 - RNA, 20 nt, Artificial Sequence
  Synthetic
aaaauuuaacuuucauuagc

SEQ ID NO: 277323 - RNA, 21 nt, Artificial Sequence
  Synthetic
gaaaauuuaacuuucauuagc

SEQ ID NO: 277324 - RNA, 22 nt, Artificial Sequence
  Synthetic
agaaaauuuaacuuucauuagc

SEQ ID NO: 277325 - RNA, 23 nt, Artificial Sequence
  Synthetic
aagaaaauuuaacuuucauuagc

SEQ ID NO: 277326 - RNA, 24 nt, Artificial Sequence
  Synthetic
uaagaaaauuuaacuuucauuagc

SEQ ID NO: 277327 - RNA, 18 nt, Artificial Sequence
  Synthetic
ucugagaaagugauuagc

SEQ ID NO: 277328 - RNA, 19 nt, Artificial Sequence
  Synthetic
uucugagaaagugauuagc

SEQ ID NO: 277329 - RNA, 20 nt, Artificial Sequence
  Synthetic
auucugagaaagugauuagc

SEQ ID NO: 277330 - RNA, 21 nt, Artificial Sequence
  Synthetic
gauucugagaaagugauuagc

SEQ ID NO: 277331 - RNA, 22 nt, Artificial Sequence
  Synthetic
agauucugagaaagugauuagc

SEQ ID NO: 277332 - RNA, 23 nt, Artificial Sequence
  Synthetic
cagauucugagaaagugauuagc

SEQ ID NO: 277333 - RNA, 24 nt, Artificial Sequence
  Synthetic
gcagauucugagaaagugauuagc

SEQ ID NO: 277334 - RNA, 18 nt, Artificial Sequence
  Synthetic
auuuuaagugugauuagc

SEQ ID NO: 277335 - RNA, 19 nt, Artificial Sequence
  Synthetic
uauuuuaagugugauuagc

SEQ ID NO: 277336 - RNA, 20 nt, Artificial Sequence
  Synthetic
cuauuuuaagugugauuagc

SEQ ID NO: 277337 - RNA, 21 nt, Artificial Sequence
  Synthetic
gcuauuuuaagugugauuagc

SEQ ID NO: 277338 - RNA, 22 nt, Artificial Sequence
  Synthetic
ggcuauuuuaagugugauuagc

SEQ ID NO: 277339 - RNA, 23 nt, Artificial Sequence
  Synthetic
aggcuauuuuaagugugauuagc

SEQ ID NO: 277340 - RNA, 24 nt, Artificial Sequence
  Synthetic
uaggcuauuuuaagugugauuagc

SEQ ID NO: 277341 - RNA, 18 nt, Artificial Sequence
  Synthetic
agugaugauuugauuagc

SEQ ID NO: 277342 - RNA, 19 nt, Artificial Sequence
  Synthetic
cagugaugauuugauuagc

SEQ ID NO: 277343 - RNA, 20 nt, Artificial Sequence
  Synthetic
ucagugaugauuugauuagc

SEQ ID NO: 277344 - RNA, 21 nt, Artificial Sequence
  Synthetic
cucagugaugauuugauuagc

SEQ ID NO: 277345 - RNA, 22 nt, Artificial Sequence
  Synthetic
ccucagugaugauuugauuagc

SEQ ID NO: 277346 - RNA, 23 nt, Artificial Sequence
  Synthetic
accucagugaugauuugauuagc

SEQ ID NO: 277347 - RNA, 24 nt, Artificial Sequence
  Synthetic
caccucagugaugauuugauuagc

SEQ ID NO: 277348 - RNA, 18 nt, Artificial Sequence
  Synthetic
gcuuguguucuuauuagc

SEQ ID NO: 277349 - RNA, 19 nt, Artificial Sequence
  Synthetic
ugcuuguguucuuauuagc

SEQ ID NO: 277350 - RNA, 20 nt, Artificial Sequence
  Synthetic
augcuuguguucuuauuagc

SEQ ID NO: 277351 - RNA, 21 nt, Artificial Sequence
  Synthetic
uaugcuuguguucuuauuagc

SEQ ID NO: 277352 - RNA, 22 nt, Artificial Sequence
  Synthetic
auaugcuuguguucuuauuagc

SEQ ID NO: 277353 - RNA, 23 nt, Artificial Sequence
  Synthetic
cauaugcuuguguucuuauuagc

SEQ ID NO: 277354 - RNA, 24 nt, Artificial Sequence
  Synthetic
ccauaugcuuguguucuuauuagc

SEQ ID NO: 277355 - RNA, 18 nt, Artificial Sequence
  Synthetic
uuagcagcuuaacuuagc

SEQ ID NO: 277356 - RNA, 19 nt, Artificial Sequence
  Synthetic
auuagcagcuuaacuuagc

SEQ ID NO: 277357 - RNA, 20 nt, Artificial Sequence
  Synthetic
cauuagcagcuuaacuuagc

SEQ ID NO: 277358 - RNA, 21 nt, Artificial Sequence
  Synthetic
ucauuagcagcuuaacuuagc

SEQ ID NO: 277359 - RNA, 22 nt, Artificial Sequence
  Synthetic
uucauuagcagcuuaacuuagc

SEQ ID NO: 277360 - RNA, 23 nt, Artificial Sequence
  Synthetic
cuucauuagcagcuuaacuuagc

SEQ ID NO: 277361 - RNA, 24 nt, Artificial Sequence
  Synthetic
gcuucauuagcagcuuaacuuagc

SEQ ID NO: 277362 - RNA, 18 nt, Artificial Sequence
  Synthetic
uguagcugcauacuuagc

SEQ ID NO: 277363 - RNA, 19 nt, Artificial Sequence
  Synthetic
auguagcugcauacuuagc

SEQ ID NO: 277364 - RNA, 20 nt, Artificial Sequence
  Synthetic
aauguagcugcauacuuagc

SEQ ID NO: 277365 - RNA, 21 nt, Artificial Sequence
  Synthetic
gaauguagcugcauacuuagc

SEQ ID NO: 277366 - RNA, 22 nt, Artificial Sequence
  Synthetic
ggaauguagcugcauacuuagc

SEQ ID NO: 277367 - RNA, 23 nt, Artificial Sequence
  Synthetic
gggaauguagcugcauacuuagc

SEQ ID NO: 277368 - RNA, 24 nt, Artificial Sequence
  Synthetic
cgggaauguagcugcauacuuagc

SEQ ID NO: 277369 - RNA, 18 nt, Artificial Sequence
  Synthetic
agaggaggaauccuuagc

SEQ ID NO: 277370 - RNA, 19 nt, Artificial Sequence
  Synthetic
uagaggaggaauccuuagc

SEQ ID NO: 277371 - RNA, 20 nt, Artificial Sequence
  Synthetic
auagaggaggaauccuuagc

SEQ ID NO: 277372 - RNA, 21 nt, Artificial Sequence
  Synthetic
uauagaggaggaauccuuagc

SEQ ID NO: 277373 - RNA, 22 nt, Artificial Sequence
  Synthetic
uuauagaggaggaauccuuagc

SEQ ID NO: 277374 - RNA, 23 nt, Artificial Sequence
  Synthetic
uuuauagaggaggaauccuuagc

SEQ ID NO: 277375 - RNA, 24 nt, Artificial Sequence
  Synthetic
uuuuauagaggaggaauccuuagc

SEQ ID NO: 277376 - RNA, 18 nt, Artificial Sequence
  Synthetic
auaggaauauagcuuagc

SEQ ID NO: 277377 - RNA, 19 nt, Artificial Sequence
  Synthetic
uauaggaauauagcuuagc

SEQ ID NO: 277378 - RNA, 20 nt, Artificial Sequence
  Synthetic
auauaggaauauagcuuagc

SEQ ID NO: 277379 - RNA, 21 nt, Artificial Sequence
  Synthetic
gauauaggaauauagcuuagc

SEQ ID NO: 277380 - RNA, 22 nt, Artificial Sequence
  Synthetic
ggauauaggaauauagcuuagc

SEQ ID NO: 277381 - RNA, 23 nt, Artificial Sequence
  Synthetic
aggauauaggaauauagcuuagc

SEQ ID NO: 277382 - RNA, 24 nt, Artificial Sequence
  Synthetic
aaggauauaggaauauagcuuagc

SEQ ID NO: 277383 - RNA, 18 nt, Artificial Sequence
  Synthetic
cuagcuggaagucuuagc

SEQ ID NO: 277384 - RNA, 19 nt, Artificial Sequence
  Synthetic
ucuagcuggaagucuuagc

SEQ ID NO: 277385 - RNA, 20 nt, Artificial Sequence
  Synthetic
cucuagcuggaagucuuagc

SEQ ID NO: 277386 - RNA, 21 nt, Artificial Sequence
  Synthetic
ucucuagcuggaagucuuagc

SEQ ID NO: 277387 - RNA, 22 nt, Artificial Sequence
  Synthetic
uucucuagcuggaagucuuagc

SEQ ID NO: 277388 - RNA, 23 nt, Artificial Sequence
  Synthetic
uuucucuagcuggaagucuuagc

SEQ ID NO: 277389 - RNA, 24 nt, Artificial Sequence
  Synthetic
auuucucuagcuggaagucuuagc

SEQ ID NO: 277390 - RNA, 18 nt, Artificial Sequence
  Synthetic
aaaaaagaggaaguuagc

SEQ ID NO: 277391 - RNA, 19 nt, Artificial Sequence
  Synthetic
aaaaaaagaggaaguuagc

SEQ ID NO: 277392 - RNA, 20 nt, Artificial Sequence
  Synthetic
aaaaaaaagaggaaguuagc

SEQ ID NO: 277393 - RNA, 21 nt, Artificial Sequence
  Synthetic
aaaaaaaaagaggaaguuagc

SEQ ID NO: 277394 - RNA, 22 nt, Artificial Sequence
  Synthetic
aaaaaaaaaagaggaaguuagc

SEQ ID NO: 277395 - RNA, 23 nt, Artificial Sequence
  Synthetic
aaaaaaaaaaagaggaaguuagc

SEQ ID NO: 277396 - RNA, 24 nt, Artificial Sequence
  Synthetic
aaaaaaaaaaaagaggaaguuagc

SEQ ID NO: 277397 - RNA, 18 nt, Artificial Sequence
  Synthetic
ugggauuuaaguguuagc

SEQ ID NO: 277398 - RNA, 19 nt, Artificial Sequence
  Synthetic
augggauuuaaguguuagc

SEQ ID NO: 277399 - RNA, 20 nt, Artificial Sequence
  Synthetic
gaugggauuuaaguguuagc

SEQ ID NO: 277400 - RNA, 21 nt, Artificial Sequence
  Synthetic
ugaugggauuuaaguguuagc

SEQ ID NO: 277401 - RNA, 22 nt, Artificial Sequence
  Synthetic
cugaugggauuuaaguguuagc

SEQ ID NO: 277402 - RNA, 23 nt, Artificial Sequence
  Synthetic
ucugaugggauuuaaguguuagc

SEQ ID NO: 277403 - RNA, 24 nt, Artificial Sequence
  Synthetic
aucugaugggauuuaaguguuagc

SEQ ID NO: 277404 - RNA, 18 nt, Artificial Sequence
  Synthetic
uucauccaggguguuagc

SEQ ID NO: 277405 - RNA, 19 nt, Artificial Sequence
  Synthetic
uuucauccaggguguuagc

SEQ ID NO: 277406 - RNA, 20 nt, Artificial Sequence
  Synthetic
auuucauccaggguguuagc

SEQ ID NO: 277407 - RNA, 21 nt, Artificial Sequence
  Synthetic
cauuucauccaggguguuagc

SEQ ID NO: 277408 - RNA, 22 nt, Artificial Sequence
  Synthetic
ccauuucauccaggguguuagc

SEQ ID NO: 277409 - RNA, 23 nt, Artificial Sequence
  Synthetic
accauuucauccaggguguuagc

SEQ ID NO: 277410 - RNA, 24 nt, Artificial Sequence
  Synthetic
gaccauuucauccaggguguuagc

SEQ ID NO: 277411 - RNA, 18 nt, Artificial Sequence
  Synthetic
uaggccagcuguguuagc

SEQ ID NO: 277412 - RNA, 19 nt, Artificial Sequence
  Synthetic
uuaggccagcuguguuagc

SEQ ID NO: 277413 - RNA, 20 nt, Artificial Sequence
  Synthetic
auuaggccagcuguguuagc

SEQ ID NO: 277414 - RNA, 21 nt, Artificial Sequence
  Synthetic
gauuaggccagcuguguuagc

SEQ ID NO: 277415 - RNA, 22 nt, Artificial Sequence
  Synthetic
ugauuaggccagcuguguuagc

SEQ ID NO: 277416 - RNA, 23 nt, Artificial Sequence
  Synthetic
gugauuaggccagcuguguuagc

SEQ ID NO: 277417 - RNA, 24 nt, Artificial Sequence
  Synthetic
ugugauuaggccagcuguguuagc

SEQ ID NO: 277418 - RNA, 18 nt, Artificial Sequence
  Synthetic
gugggaugaguuguuagc

SEQ ID NO: 277419 - RNA, 19 nt, Artificial Sequence
  Synthetic
agugggaugaguuguuagc

SEQ ID NO: 277420 - RNA, 20 nt, Artificial Sequence
  Synthetic
cagugggaugaguuguuagc

SEQ ID NO: 277421 - RNA, 21 nt, Artificial Sequence
  Synthetic
acagugggaugaguuguuagc

SEQ ID NO: 277422 - RNA, 22 nt, Artificial Sequence
  Synthetic
uacagugggaugaguuguuagc

SEQ ID NO: 277423 - RNA, 23 nt, Artificial Sequence
  Synthetic
uuacagugggaugaguuguuagc

SEQ ID NO: 277424 - RNA, 24 nt, Artificial Sequence
  Synthetic
uuuacagugggaugaguuguuagc

SEQ ID NO: 277425 - RNA, 18 nt, Artificial Sequence
  Synthetic
ggaaguaaaauauuuagc

SEQ ID NO: 277426 - RNA, 19 nt, Artificial Sequence
  Synthetic
cggaaguaaaauauuuagc

SEQ ID NO: 277427 - RNA, 20 nt, Artificial Sequence
  Synthetic
gcggaaguaaaauauuuagc

SEQ ID NO: 277428 - RNA, 21 nt, Artificial Sequence
  Synthetic
ggcggaaguaaaauauuuagc

SEQ ID NO: 277429 - RNA, 22 nt, Artificial Sequence
  Synthetic
uggcggaaguaaaauauuuagc

SEQ ID NO: 277430 - RNA, 23 nt, Artificial Sequence
  Synthetic
guggcggaaguaaaauauuuagc

SEQ ID NO: 277431 - RNA, 24 nt, Artificial Sequence
  Synthetic
aguggcggaaguaaaauauuuagc

SEQ ID NO: 277432 - RNA, 18 nt, Artificial Sequence
  Synthetic
gaucuagggaaguuuagc

SEQ ID NO: 277433 - RNA, 19 nt, Artificial Sequence
  Synthetic
agaucuagggaaguuuagc

SEQ ID NO: 277434 - RNA, 20 nt, Artificial Sequence
  Synthetic
aagaucuagggaaguuuagc

SEQ ID NO: 277435 - RNA, 21 nt, Artificial Sequence
  Synthetic
aaagaucuagggaaguuuagc

SEQ ID NO: 277436 - RNA, 22 nt, Artificial Sequence
  Synthetic
gaaagaucuagggaaguuuagc

SEQ ID NO: 277437 - RNA, 23 nt, Artificial Sequence
  Synthetic
ugaaagaucuagggaaguuuagc

SEQ ID NO: 277438 - RNA, 24 nt, Artificial Sequence
  Synthetic
augaaagaucuagggaaguuuagc

SEQ ID NO: 277439 - RNA, 18 nt, Artificial Sequence
  Synthetic
uggaauuuacauuuuagc

SEQ ID NO: 277440 - RNA, 19 nt, Artificial Sequence
  Synthetic
guggaauuuacauuuuagc

SEQ ID NO: 277441 - RNA, 20 nt, Artificial Sequence
  Synthetic
uguggaauuuacauuuuagc

SEQ ID NO: 277442 - RNA, 21 nt, Artificial Sequence
  Synthetic
uuguggaauuuacauuuuagc

SEQ ID NO: 277443 - RNA, 22 nt, Artificial Sequence
  Synthetic
guuguggaauuuacauuuuagc

SEQ ID NO: 277444 - RNA, 23 nt, Artificial Sequence
  Synthetic
uguuguggaauuuacauuuuagc

SEQ ID NO: 277445 - RNA, 24 nt, Artificial Sequence
  Synthetic
uuguuguggaauuuacauuuuagc

SEQ ID NO: 277446 - RNA, 18 nt, Artificial Sequence
  Synthetic
gacucaagaauuuuuagc

SEQ ID NO: 277447 - RNA, 19 nt, Artificial Sequence
  Synthetic
agacucaagaauuuuuagc

SEQ ID NO: 277448 - RNA, 20 nt, Artificial Sequence
  Synthetic
aagacucaagaauuuuuagc

SEQ ID NO: 277449 - RNA, 21 nt, Artificial Sequence
  Synthetic
gaagacucaagaauuuuuagc

SEQ ID NO: 277450 - RNA, 22 nt, Artificial Sequence
  Synthetic
agaagacucaagaauuuuuagc

SEQ ID NO: 277451 - RNA, 23 nt, Artificial Sequence
  Synthetic
aagaagacucaagaauuuuuagc

SEQ ID NO: 277452 - RNA, 24 nt, Artificial Sequence
  Synthetic
caagaagacucaagaauuuuuagc

SEQ ID NO: 277453 - RNA, 18 nt, Artificial Sequence
  Synthetic
uuaucgagaguuuuuagc

SEQ ID NO: 277454 - RNA, 19 nt, Artificial Sequence
  Synthetic
uuuaucgagaguuuuuagc

SEQ ID NO: 277455 - RNA, 20 nt, Artificial Sequence
  Synthetic
auuuaucgagaguuuuuagc

SEQ ID NO: 277456 - RNA, 21 nt, Artificial Sequence
  Synthetic
aauuuaucgagaguuuuuagc

SEQ ID NO: 277457 - RNA, 22 nt, Artificial Sequence
  Synthetic
uaauuuaucgagaguuuuuagc

SEQ ID NO: 277458 - RNA, 23 nt, Artificial Sequence
  Synthetic
cuaauuuaucgagaguuuuuagc

SEQ ID NO: 277459 - RNA, 24 nt, Artificial Sequence
  Synthetic
ccuaauuuaucgagaguuuuuagc

SEQ ID NO: 277460 - RNA, 18 nt, Artificial Sequence
  Synthetic
uuauugagaguuuuuagc

SEQ ID NO: 277461 - RNA, 19 nt, Artificial Sequence
  Synthetic
uuuauugagaguuuuuagc

SEQ ID NO: 277462 - RNA, 20 nt, Artificial Sequence
  Synthetic
auuuauugagaguuuuuagc

SEQ ID NO: 277463 - RNA, 21 nt, Artificial Sequence
  Synthetic
aauuuauugagaguuuuuagc

SEQ ID NO: 277464 - RNA, 22 nt, Artificial Sequence
  Synthetic
uaauuuauugagaguuuuuagc

SEQ ID NO: 277465 - RNA, 23 nt, Artificial Sequence
  Synthetic
cuaauuuauugagaguuuuuagc

SEQ ID NO: 277466 - RNA, 24 nt, Artificial Sequence
  Synthetic
ccuaauuuauugagaguuuuuagc

SEQ ID NO: 277467 - RNA, 18 nt, Artificial Sequence
  Synthetic
auuugucaugagccacgc

SEQ ID NO: 277468 - RNA, 19 nt, Artificial Sequence
  Synthetic
aauuugucaugagccacgc

SEQ ID NO: 277469 - RNA, 20 nt, Artificial Sequence
  Synthetic
aaauuugucaugagccacgc

SEQ ID NO: 277470 - RNA, 21 nt, Artificial Sequence
  Synthetic
aaaauuugucaugagccacgc

SEQ ID NO: 277471 - RNA, 22 nt, Artificial Sequence
  Synthetic
gaaaauuugucaugagccacgc

SEQ ID NO: 277472 - RNA, 23 nt, Artificial Sequence
  Synthetic
ugaaaauuugucaugagccacgc

SEQ ID NO: 277473 - RNA, 24 nt, Artificial Sequence
  Synthetic
augaaaauuugucaugagccacgc

SEQ ID NO: 277474 - RNA, 18 nt, Artificial Sequence
  Synthetic
gccucuuagugcgcacgc

SEQ ID NO: 277475 - RNA, 19 nt, Artificial Sequence
  Synthetic
ugccucuuagugcgcacgc

SEQ ID NO: 277476 - RNA, 20 nt, Artificial Sequence
  Synthetic
uugccucuuagugcgcacgc

SEQ ID NO: 277477 - RNA, 21 nt, Artificial Sequence
  Synthetic
uuugccucuuagugcgcacgc

SEQ ID NO: 277478 - RNA, 22 nt, Artificial Sequence
  Synthetic
uuuugccucuuagugcgcacgc

SEQ ID NO: 277479 - RNA, 23 nt, Artificial Sequence
  Synthetic
auuuugccucuuagugcgcacgc

SEQ ID NO: 277480 - RNA, 24 nt, Artificial Sequence
  Synthetic
cauuuugccucuuagugcgcacgc

SEQ ID NO: 277481 - RNA, 18 nt, Artificial Sequence
  Synthetic
aauaaaaugauugcacgc

SEQ ID NO: 277482 - RNA, 19 nt, Artificial Sequence
  Synthetic
uaauaaaaugauugcacgc

SEQ ID NO: 277483 - RNA, 20 nt, Artificial Sequence
  Synthetic
cuaauaaaaugauugcacgc

SEQ ID NO: 277484 - RNA, 21 nt, Artificial Sequence
  Synthetic
ccuaauaaaaugauugcacgc

SEQ ID NO: 277485 - RNA, 22 nt, Artificial Sequence
  Synthetic
gccuaauaaaaugauugcacgc

SEQ ID NO: 277486 - RNA, 23 nt, Artificial Sequence
  Synthetic
agccuaauaaaaugauugcacgc

SEQ ID NO: 277487 - RNA, 24 nt, Artificial Sequence
  Synthetic
aagccuaauaaaaugauugcacgc

SEQ ID NO: 277488 - RNA, 18 nt, Artificial Sequence
  Synthetic
cacaaagaacacagacgc

SEQ ID NO: 277489 - RNA, 19 nt, Artificial Sequence
  Synthetic
acacaaagaacacagacgc

SEQ ID NO: 277490 - RNA, 20 nt, Artificial Sequence
  Synthetic
gacacaaagaacacagacgc

SEQ ID NO: 277491 - RNA, 21 nt, Artificial Sequence
  Synthetic
ugacacaaagaacacagacgc

SEQ ID NO: 277492 - RNA, 22 nt, Artificial Sequence
  Synthetic
augacacaaagaacacagacgc

SEQ ID NO: 277493 - RNA, 23 nt, Artificial Sequence
  Synthetic
aaugacacaaagaacacagacgc

SEQ ID NO: 277494 - RNA, 24 nt, Artificial Sequence
  Synthetic
gaaugacacaaagaacacagacgc

SEQ ID NO: 277495 - RNA, 18 nt, Artificial Sequence
  Synthetic
gauucaaugaaaugacgc

SEQ ID NO: 277496 - RNA, 19 nt, Artificial Sequence
  Synthetic
ggauucaaugaaaugacgc

SEQ ID NO: 277497 - RNA, 20 nt, Artificial Sequence
  Synthetic
aggauucaaugaaaugacgc

SEQ ID NO: 277498 - RNA, 21 nt, Artificial Sequence
  Synthetic
uaggauucaaugaaaugacgc

SEQ ID NO: 277499 - RNA, 22 nt, Artificial Sequence
  Synthetic
uuaggauucaaugaaaugacgc

SEQ ID NO: 277500 - RNA, 23 nt, Artificial Sequence
  Synthetic
guuaggauucaaugaaaugacgc

SEQ ID NO: 277501 - RNA, 24 nt, Artificial Sequence
  Synthetic
uguuaggauucaaugaaaugacgc

SEQ ID NO: 277502 - RNA, 18 nt, Artificial Sequence
  Synthetic
ucuugugaagagugacgc

SEQ ID NO: 277503 - RNA, 19 nt, Artificial Sequence
  Synthetic
cucuugugaagagugacgc

SEQ ID NO: 277504 - RNA, 20 nt, Artificial Sequence
  Synthetic
ccucuugugaagagugacgc

SEQ ID NO: 277505 - RNA, 21 nt, Artificial Sequence
  Synthetic
gccucuugugaagagugacgc

SEQ ID NO: 277506 - RNA, 22 nt, Artificial Sequence
  Synthetic
ggccucuugugaagagugacgc

SEQ ID NO: 277507 - RNA, 23 nt, Artificial Sequence
  Synthetic
uggccucuugugaagagugacgc

SEQ ID NO: 277508 - RNA, 24 nt, Artificial Sequence
  Synthetic
cuggccucuugugaagagugacgc

SEQ ID NO: 277509 - RNA, 18 nt, Artificial Sequence
  Synthetic
aaacuacuuagcuuacgc

SEQ ID NO: 277510 - RNA, 19 nt, Artificial Sequence
  Synthetic
aaaacuacuuagcuuacgc

SEQ ID NO: 277511 - RNA, 20 nt, Artificial Sequence
  Synthetic
aaaaacuacuuagcuuacgc

SEQ ID NO: 277512 - RNA, 21 nt, Artificial Sequence
  Synthetic
uaaaaacuacuuagcuuacgc

SEQ ID NO: 277513 - RNA, 22 nt, Artificial Sequence
  Synthetic
cuaaaaacuacuuagcuuacgc

SEQ ID NO: 277514 - RNA, 23 nt, Artificial Sequence
  Synthetic
ucuaaaaacuacuuagcuuacgc

SEQ ID NO: 277515 - RNA, 24 nt, Artificial Sequence
  Synthetic
cucuaaaaacuacuuagcuuacgc

SEQ ID NO: 277516 - RNA, 18 nt, Artificial Sequence
  Synthetic
aaugcaaaucaaaaccgc

SEQ ID NO: 277517 - RNA, 19 nt, Artificial Sequence
  Synthetic
aaaugcaaaucaaaaccgc

SEQ ID NO: 277518 - RNA, 20 nt, Artificial Sequence
  Synthetic
gaaaugcaaaucaaaaccgc

SEQ ID NO: 277519 - RNA, 21 nt, Artificial Sequence
  Synthetic
agaaaugcaaaucaaaaccgc

SEQ ID NO: 277520 - RNA, 22 nt, Artificial Sequence
  Synthetic
gagaaaugcaaaucaaaaccgc

SEQ ID NO: 277521 - RNA, 23 nt, Artificial Sequence
  Synthetic
agagaaaugcaaaucaaaaccgc

SEQ ID NO: 277522 - RNA, 24 nt, Artificial Sequence
  Synthetic
cagagaaaugcaaaucaaaaccgc

SEQ ID NO: 277523 - RNA, 18 nt, Artificial Sequence
  Synthetic
cugaggcacaagaaccgc

SEQ ID NO: 277524 - RNA, 19 nt, Artificial Sequence
  Synthetic
gcugaggcacaagaaccgc

SEQ ID NO: 277525 - RNA, 20 nt, Artificial Sequence
  Synthetic
ggcugaggcacaagaaccgc

SEQ ID NO: 277526 - RNA, 21 nt, Artificial Sequence
  Synthetic
aggcugaggcacaagaaccgc

SEQ ID NO: 277527 - RNA, 22 nt, Artificial Sequence
  Synthetic
gaggcugaggcacaagaaccgc

SEQ ID NO: 277528 - RNA, 23 nt, Artificial Sequence
  Synthetic
ggaggcugaggcacaagaaccgc

SEQ ID NO: 277529 - RNA, 24 nt, Artificial Sequence
  Synthetic
uggaggcugaggcacaagaaccgc

SEQ ID NO: 277530 - RNA, 18 nt, Artificial Sequence
  Synthetic
cugaggcaggagaaccgc

SEQ ID NO: 277531 - RNA, 19 nt, Artificial Sequence
  Synthetic
gcugaggcaggagaaccgc

SEQ ID NO: 277532 - RNA, 20 nt, Artificial Sequence
  Synthetic
ggcugaggcaggagaaccgc

SEQ ID NO: 277533 - RNA, 21 nt, Artificial Sequence
  Synthetic
aggcugaggcaggagaaccgc

SEQ ID NO: 277534 - RNA, 22 nt, Artificial Sequence
  Synthetic
gaggcugaggcaggagaaccgc

SEQ ID NO: 277535 - RNA, 23 nt, Artificial Sequence
  Synthetic
ggaggcugaggcaggagaaccgc

SEQ ID NO: 277536 - RNA, 24 nt, Artificial Sequence
  Synthetic
gggaggcugaggcaggagaaccgc

SEQ ID NO: 277537 - RNA, 18 nt, Artificial Sequence
  Synthetic
agcccguuuucauaccgc

SEQ ID NO: 277538 - RNA, 19 nt, Artificial Sequence
  Synthetic
uagcccguuuucauaccgc

SEQ ID NO: 277539 - RNA, 20 nt, Artificial Sequence
  Synthetic
uuagcccguuuucauaccgc

SEQ ID NO: 277540 - RNA, 21 nt, Artificial Sequence
  Synthetic
auuagcccguuuucauaccgc

SEQ ID NO: 277541 - RNA, 22 nt, Artificial Sequence
  Synthetic
uauuagcccguuuucauaccgc

SEQ ID NO: 277542 - RNA, 23 nt, Artificial Sequence
  Synthetic
guauuagcccguuuucauaccgc

SEQ ID NO: 277543 - RNA, 24 nt, Artificial Sequence
  Synthetic
uguauuagcccguuuucauaccgc

SEQ ID NO: 277544 - RNA, 18 nt, Artificial Sequence
  Synthetic
auguuaaaacuguaccgc

SEQ ID NO: 277545 - RNA, 19 nt, Artificial Sequence
  Synthetic
aauguuaaaacuguaccgc

SEQ ID NO: 277546 - RNA, 20 nt, Artificial Sequence
  Synthetic
caauguuaaaacuguaccgc

SEQ ID NO: 277547 - RNA, 21 nt, Artificial Sequence
  Synthetic
gcaauguuaaaacuguaccgc

SEQ ID NO: 277548 - RNA, 22 nt, Artificial Sequence
  Synthetic
agcaauguuaaaacuguaccgc

SEQ ID NO: 277549 - RNA, 23 nt, Artificial Sequence
  Synthetic
uagcaauguuaaaacuguaccgc

SEQ ID NO: 277550 - RNA, 24 nt, Artificial Sequence
  Synthetic
cuagcaauguuaaaacuguaccgc

SEQ ID NO: 277551 - RNA, 18 nt, Artificial Sequence
  Synthetic
ucuucuucacaaggccgc

SEQ ID NO: 277552 - RNA, 19 nt, Artificial Sequence
  Synthetic
aucuucuucacaaggccgc

SEQ ID NO: 277553 - RNA, 20 nt, Artificial Sequence
  Synthetic
caucuucuucacaaggccgc

SEQ ID NO: 277554 - RNA, 21 nt, Artificial Sequence
  Synthetic
gcaucuucuucacaaggccgc

SEQ ID NO: 277555 - RNA, 22 nt, Artificial Sequence
  Synthetic
agcaucuucuucacaaggccgc

SEQ ID NO: 277556 - RNA, 23 nt, Artificial Sequence
  Synthetic
aagcaucuucuucacaaggccgc

SEQ ID NO: 277557 - RNA, 24 nt, Artificial Sequence
  Synthetic
caagcaucuucuucacaaggccgc

SEQ ID NO: 277558 - RNA, 18 nt, Artificial Sequence
  Synthetic
cccuuccugcuauuccgc

SEQ ID NO: 277559 - RNA, 19 nt, Artificial Sequence
  Synthetic
acccuuccugcuauuccgc

SEQ ID NO: 277560 - RNA, 20 nt, Artificial Sequence
  Synthetic
uacccuuccugcuauuccgc

SEQ ID NO: 277561 - RNA, 21 nt, Artificial Sequence
  Synthetic
uuacccuuccugcuauuccgc

SEQ ID NO: 277562 - RNA, 22 nt, Artificial Sequence
  Synthetic
uuuacccuuccugcuauuccgc

SEQ ID NO: 277563 - RNA, 23 nt, Artificial Sequence
  Synthetic
auuuacccuuccugcuauuccgc

SEQ ID NO: 277564 - RNA, 24 nt, Artificial Sequence
  Synthetic
cauuuacccuuccugcuauuccgc

SEQ ID NO: 277565 - RNA, 18 nt, Artificial Sequence
  Synthetic
ccccguguguagcagcgc

SEQ ID NO: 277566 - RNA, 19 nt, Artificial Sequence
  Synthetic
cccccguguguagcagcgc

SEQ ID NO: 277567 - RNA, 20 nt, Artificial Sequence
  Synthetic
ucccccguguguagcagcgc

SEQ ID NO: 277568 - RNA, 21 nt, Artificial Sequence
  Synthetic
aucccccguguguagcagcgc

SEQ ID NO: 277569 - RNA, 22 nt, Artificial Sequence
  Synthetic
uaucccccguguguagcagcgc

SEQ ID NO: 277570 - RNA, 23 nt, Artificial Sequence
  Synthetic
auaucccccguguguagcagcgc

SEQ ID NO: 277571 - RNA, 24 nt, Artificial Sequence
  Synthetic
cauaucccccguguguagcagcgc

SEQ ID NO: 277572 - RNA, 18 nt, Artificial Sequence
  Synthetic
uuugaaauaauauagcgc

SEQ ID NO: 277573 - RNA, 19 nt, Artificial Sequence
  Synthetic
cuuugaaauaauauagcgc

SEQ ID NO: 277574 - RNA, 20 nt, Artificial Sequence
  Synthetic
ccuuugaaauaauauagcgc

SEQ ID NO: 277575 - RNA, 21 nt, Artificial Sequence
  Synthetic
cccuuugaaauaauauagcgc

SEQ ID NO: 277576 - RNA, 22 nt, Artificial Sequence
  Synthetic
acccuuugaaauaauauagcgc

SEQ ID NO: 277577 - RNA, 23 nt, Artificial Sequence
  Synthetic
gacccuuugaaauaauauagcgc

SEQ ID NO: 277578 - RNA, 24 nt, Artificial Sequence
  Synthetic
ugacccuuugaaauaauauagcgc

SEQ ID NO: 277579 - RNA, 18 nt, Artificial Sequence
  Synthetic
ugucuagagccauggcgc

SEQ ID NO: 277580 - RNA, 19 nt, Artificial Sequence
  Synthetic
cugucuagagccauggcgc

SEQ ID NO: 277581 - RNA, 20 nt, Artificial Sequence
  Synthetic
ucugucuagagccauggcgc

SEQ ID NO: 277582 - RNA, 21 nt, Artificial Sequence
  Synthetic
aucugucuagagccauggcgc

SEQ ID NO: 277583 - RNA, 22 nt, Artificial Sequence
  Synthetic
gaucugucuagagccauggcgc

SEQ ID NO: 277584 - RNA, 23 nt, Artificial Sequence
  Synthetic
ggaucugucuagagccauggcgc

SEQ ID NO: 277585 - RNA, 24 nt, Artificial Sequence
  Synthetic
aggaucugucuagagccauggcgc

SEQ ID NO: 277586 - RNA, 18 nt, Artificial Sequence
  Synthetic
uucagaaaacacaugcgc

SEQ ID NO: 277587 - RNA, 19 nt, Artificial Sequence
  Synthetic
uuucagaaaacacaugcgc

SEQ ID NO: 277588 - RNA, 20 nt, Artificial Sequence
  Synthetic
auuucagaaaacacaugcgc

SEQ ID NO: 277589 - RNA, 21 nt, Artificial Sequence
  Synthetic
aauuucagaaaacacaugcgc

SEQ ID NO: 277590 - RNA, 22 nt, Artificial Sequence
  Synthetic
aaauuucagaaaacacaugcgc

SEQ ID NO: 277591 - RNA, 23 nt, Artificial Sequence
  Synthetic
gaaauuucagaaaacacaugcgc

SEQ ID NO: 277592 - RNA, 24 nt, Artificial Sequence
  Synthetic
ugaaauuucagaaaacacaugcgc

SEQ ID NO: 277593 - RNA, 18 nt, Artificial Sequence
  Synthetic
acagguauaaauaugcgc

SEQ ID NO: 277594 - RNA, 19 nt, Artificial Sequence
  Synthetic
aacagguauaaauaugcgc

SEQ ID NO: 277595 - RNA, 20 nt, Artificial Sequence
  Synthetic
uaacagguauaaauaugcgc

SEQ ID NO: 277596 - RNA, 21 nt, Artificial Sequence
  Synthetic
auaacagguauaaauaugcgc

SEQ ID NO: 277597 - RNA, 22 nt, Artificial Sequence
  Synthetic
uauaacagguauaaauaugcgc

SEQ ID NO: 277598 - RNA, 23 nt, Artificial Sequence
  Synthetic
auauaacagguauaaauaugcgc

SEQ ID NO: 277599 - RNA, 24 nt, Artificial Sequence
  Synthetic
cauauaacagguauaaauaugcgc

SEQ ID NO: 277600 - RNA, 18 nt, Artificial Sequence
  Synthetic
gaagaguugccccugcgc

SEQ ID NO: 277601 - RNA, 19 nt, Artificial Sequence
  Synthetic
ggaagaguugccccugcgc

SEQ ID NO: 277602 - RNA, 20 nt, Artificial Sequence
  Synthetic
uggaagaguugccccugcgc

SEQ ID NO: 277603 - RNA, 21 nt, Artificial Sequence
  Synthetic
guggaagaguugccccugcgc

SEQ ID NO: 277604 - RNA, 22 nt, Artificial Sequence
  Synthetic
gguggaagaguugccccugcgc

SEQ ID NO: 277605 - RNA, 23 nt, Artificial Sequence
  Synthetic
ugguggaagaguugccccugcgc

SEQ ID NO: 277606 - RNA, 24 nt, Artificial Sequence
  Synthetic
cugguggaagaguugccccugcgc

SEQ ID NO: 277607 - RNA, 18 nt, Artificial Sequence
  Synthetic
cugagguaccagaaucgc

SEQ ID NO: 277608 - RNA, 19 nt, Artificial Sequence
  Synthetic
gcugagguaccagaaucgc

SEQ ID NO: 277609 - RNA, 20 nt, Artificial Sequence
  Synthetic
ggcugagguaccagaaucgc

SEQ ID NO: 277610 - RNA, 21 nt, Artificial Sequence
  Synthetic
aggcugagguaccagaaucgc

SEQ ID NO: 277611 - RNA, 22 nt, Artificial Sequence
  Synthetic
gaggcugagguaccagaaucgc

SEQ ID NO: 277612 - RNA, 23 nt, Artificial Sequence
  Synthetic
ggaggcugagguaccagaaucgc

SEQ ID NO: 277613 - RNA, 24 nt, Artificial Sequence
  Synthetic
aggaggcugagguaccagaaucgc

SEQ ID NO: 277614 - RNA, 18 nt, Artificial Sequence
  Synthetic
uugaagcaggagaaucgc

SEQ ID NO: 277615 - RNA, 19 nt, Artificial Sequence
  Synthetic
guugaagcaggagaaucgc

SEQ ID NO: 277616 - RNA, 20 nt, Artificial Sequence
  Synthetic
gguugaagcaggagaaucgc

SEQ ID NO: 277617 - RNA, 21 nt, Artificial Sequence
  Synthetic
agguugaagcaggagaaucgc

SEQ ID NO: 277618 - RNA, 22 nt, Artificial Sequence
  Synthetic
gagguugaagcaggagaaucgc

SEQ ID NO: 277619 - RNA, 23 nt, Artificial Sequence
  Synthetic
ggagguugaagcaggagaaucgc

SEQ ID NO: 277620 - RNA, 24 nt, Artificial Sequence
  Synthetic
gggagguugaagcaggagaaucgc

SEQ ID NO: 277621 - RNA, 18 nt, Artificial Sequence
  Synthetic
cuaaggcaggagaaucgc

SEQ ID NO: 277622 - RNA, 19 nt, Artificial Sequence
  Synthetic
gcuaaggcaggagaaucgc

SEQ ID NO: 277623 - RNA, 20 nt, Artificial Sequence
  Synthetic
ggcuaaggcaggagaaucgc

SEQ ID NO: 277624 - RNA, 21 nt, Artificial Sequence
  Synthetic
aggcuaaggcaggagaaucgc

SEQ ID NO: 277625 - RNA, 22 nt, Artificial Sequence
  Synthetic
gaggcuaaggcaggagaaucgc

SEQ ID NO: 277626 - RNA, 23 nt, Artificial Sequence
  Synthetic
ggaggcuaaggcaggagaaucgc

SEQ ID NO: 277627 - RNA, 24 nt, Artificial Sequence
  Synthetic
gggaggcuaaggcaggagaaucgc

SEQ ID NO: 277628 - RNA, 18 nt, Artificial Sequence
  Synthetic
cagaggcaggagaaucgc

SEQ ID NO: 277629 - RNA, 19 nt, Artificial Sequence
  Synthetic
gcagaggcaggagaaucgc

SEQ ID NO: 277630 - RNA, 20 nt, Artificial Sequence
  Synthetic
ggcagaggcaggagaaucgc

SEQ ID NO: 277631 - RNA, 21 nt, Artificial Sequence
  Synthetic
aggcagaggcaggagaaucgc

SEQ ID NO: 277632 - RNA, 22 nt, Artificial Sequence
  Synthetic
gaggcagaggcaggagaaucgc

SEQ ID NO: 277633 - RNA, 23 nt, Artificial Sequence
  Synthetic
ggaggcagaggcaggagaaucgc

SEQ ID NO: 277634 - RNA, 24 nt, Artificial Sequence
  Synthetic
gggaggcagaggcaggagaaucgc

SEQ ID NO: 277635 - RNA, 20 nt, Artificial Sequence
  Synthetic
ggcugaggcaggagaaucgc

SEQ ID NO: 277636 - RNA, 23 nt, Artificial Sequence
  Synthetic
ugaggcugaggcaggagaaucgc

SEQ ID NO: 277637 - RNA, 24 nt, Artificial Sequence
  Synthetic
cugaggcugaggcaggagaaucgc

SEQ ID NO: 277638 - RNA, 18 nt, Artificial Sequence
  Synthetic
cugaggugggagaaucgc

SEQ ID NO: 277639 - RNA, 19 nt, Artificial Sequence
  Synthetic
gcugaggugggagaaucgc

SEQ ID NO: 277640 - RNA, 20 nt, Artificial Sequence
  Synthetic
ggcugaggugggagaaucgc

SEQ ID NO: 277641 - RNA, 21 nt, Artificial Sequence
  Synthetic
aggcugaggugggagaaucgc

SEQ ID NO: 277642 - RNA, 22 nt, Artificial Sequence
  Synthetic
gaggcugaggugggagaaucgc

SEQ ID NO: 277643 - RNA, 23 nt, Artificial Sequence
  Synthetic
ggaggcugaggugggagaaucgc

SEQ ID NO: 277644 - RNA, 24 nt, Artificial Sequence
  Synthetic
gggaggcugaggugggagaaucgc

SEQ ID NO: 277645 - RNA, 18 nt, Artificial Sequence
  Synthetic
cugaggcaggggaaucgc

SEQ ID NO: 277646 - RNA, 19 nt, Artificial Sequence
  Synthetic
gcugaggcaggggaaucgc

SEQ ID NO: 277647 - RNA, 20 nt, Artificial Sequence
  Synthetic
ggcugaggcaggggaaucgc

SEQ ID NO: 277648 - RNA, 21 nt, Artificial Sequence
  Synthetic
aggcugaggcaggggaaucgc

SEQ ID NO: 277649 - RNA, 22 nt, Artificial Sequence
  Synthetic
gaggcugaggcaggggaaucgc

SEQ ID NO: 277650 - RNA, 23 nt, Artificial Sequence
  Synthetic
ggaggcugaggcaggggaaucgc

SEQ ID NO: 277651 - RNA, 24 nt, Artificial Sequence
  Synthetic
aggaggcugaggcaggggaaucgc

SEQ ID NO: 277652 - RNA, 24 nt, Artificial Sequence
  Synthetic
gggaggcugaggcaggggaaucgc

SEQ ID NO: 277653 - RNA, 18 nt, Artificial Sequence
  Synthetic
auaauuacugauaaucgc

SEQ ID NO: 277654 - RNA, 19 nt, Artificial Sequence
  Synthetic
uauaauuacugauaaucgc

SEQ ID NO: 277655 - RNA, 20 nt, Artificial Sequence
  Synthetic
auauaauuacugauaaucgc

SEQ ID NO: 277656 - RNA, 21 nt, Artificial Sequence
  Synthetic
aauauaauuacugauaaucgc

SEQ ID NO: 277657 - RNA, 22 nt, Artificial Sequence
  Synthetic
aaauauaauuacugauaaucgc

SEQ ID NO: 277658 - RNA, 23 nt, Artificial Sequence
  Synthetic
aaaauauaauuacugauaaucgc

SEQ ID NO: 277659 - RNA, 24 nt, Artificial Sequence
  Synthetic
uaaaauauaauuacugauaaucgc

SEQ ID NO: 277660 - RNA, 18 nt, Artificial Sequence
  Synthetic
ugcuuuauucaucaucgc

SEQ ID NO: 277661 - RNA, 19 nt, Artificial Sequence
  Synthetic
augcuuuauucaucaucgc

SEQ ID NO: 277662 - RNA, 20 nt, Artificial Sequence
  Synthetic
uaugcuuuauucaucaucgc

SEQ ID NO: 277663 - RNA, 21 nt, Artificial Sequence
  Synthetic
uuaugcuuuauucaucaucgc

SEQ ID NO: 277664 - RNA, 22 nt, Artificial Sequence
  Synthetic
cuuaugcuuuauucaucaucgc

SEQ ID NO: 277665 - RNA, 23 nt, Artificial Sequence
  Synthetic
ccuuaugcuuuauucaucaucgc

SEQ ID NO: 277666 - RNA, 24 nt, Artificial Sequence
  Synthetic
uccuuaugcuuuauucaucaucgc

SEQ ID NO: 277667 - RNA, 18 nt, Artificial Sequence
  Synthetic
cugugguguaaggaucgc

SEQ ID NO: 277668 - RNA, 19 nt, Artificial Sequence
  Synthetic
gcugugguguaaggaucgc

SEQ ID NO: 277669 - RNA, 20 nt, Artificial Sequence
  Synthetic
ggcugugguguaaggaucgc

SEQ ID NO: 277670 - RNA, 21 nt, Artificial Sequence
  Synthetic
gggcugugguguaaggaucgc

SEQ ID NO: 277671 - RNA, 22 nt, Artificial Sequence
  Synthetic
ggggcugugguguaaggaucgc

SEQ ID NO: 277672 - RNA, 23 nt, Artificial Sequence
  Synthetic
gggggcugugguguaaggaucgc

SEQ ID NO: 277673 - RNA, 24 nt, Artificial Sequence
  Synthetic
ggggggcugugguguaaggaucgc

SEQ ID NO: 277674 - RNA, 18 nt, Artificial Sequence
  Synthetic
cugaagcaggaggaucgc

SEQ ID NO: 277675 - RNA, 19 nt, Artificial Sequence
  Synthetic
gcugaagcaggaggaucgc

SEQ ID NO: 277676 - RNA, 20 nt, Artificial Sequence
  Synthetic
ggcugaagcaggaggaucgc

SEQ ID NO: 277677 - RNA, 21 nt, Artificial Sequence
  Synthetic
aggcugaagcaggaggaucgc

SEQ ID NO: 277678 - RNA, 22 nt, Artificial Sequence
  Synthetic
gaggcugaagcaggaggaucgc

SEQ ID NO: 277679 - RNA, 23 nt, Artificial Sequence
  Synthetic
ggaggcugaagcaggaggaucgc

SEQ ID NO: 277680 - RNA, 24 nt, Artificial Sequence
  Synthetic
gggaggcugaagcaggaggaucgc

SEQ ID NO: 277681 - RNA, 18 nt, Artificial Sequence
  Synthetic
uucucaguaaacuaucgc

SEQ ID NO: 277682 - RNA, 19 nt, Artificial Sequence
  Synthetic
auucucaguaaacuaucgc

SEQ ID NO: 277683 - RNA, 20 nt, Artificial Sequence
  Synthetic
cauucucaguaaacuaucgc

SEQ ID NO: 277684 - RNA, 21 nt, Artificial Sequence
  Synthetic
ucauucucaguaaacuaucgc

SEQ ID NO: 277685 - RNA, 22 nt, Artificial Sequence
  Synthetic
aucauucucaguaaacuaucgc

SEQ ID NO: 277686 - RNA, 23 nt, Artificial Sequence
  Synthetic
caucauucucaguaaacuaucgc

SEQ ID NO: 277687 - RNA, 24 nt, Artificial Sequence
  Synthetic
ccaucauucucaguaaacuaucgc

SEQ ID NO: 277688 - RNA, 22 nt, Artificial Sequence
  Synthetic
gucauucucaguaaacuaucgc

SEQ ID NO: 277689 - RNA, 23 nt, Artificial Sequence
  Synthetic
cgucauucucaguaaacuaucgc

SEQ ID NO: 277690 - RNA, 24 nt, Artificial Sequence
  Synthetic
ccgucauucucaguaaacuaucgc

SEQ ID NO: 277691 - RNA, 18 nt, Artificial Sequence
  Synthetic
cugaggcaggaguaucgc

SEQ ID NO: 277692 - RNA, 19 nt, Artificial Sequence
  Synthetic
gcugaggcaggaguaucgc

SEQ ID NO: 277693 - RNA, 20 nt, Artificial Sequence
  Synthetic
ggcugaggcaggaguaucgc

SEQ ID NO: 277694 - RNA, 21 nt, Artificial Sequence
  Synthetic
aggcugaggcaggaguaucgc

SEQ ID NO: 277695 - RNA, 22 nt, Artificial Sequence
  Synthetic
gaggcugaggcaggaguaucgc

SEQ ID NO: 277696 - RNA, 23 nt, Artificial Sequence
  Synthetic
ggaggcugaggcaggaguaucgc

SEQ ID NO: 277697 - RNA, 24 nt, Artificial Sequence
  Synthetic
gggaggcugaggcaggaguaucgc

SEQ ID NO: 277698 - RNA, 18 nt, Artificial Sequence
  Synthetic
ggccuaagccagucucgc

SEQ ID NO: 277699 - RNA, 19 nt, Artificial Sequence
  Synthetic
aggccuaagccagucucgc

SEQ ID NO: 277700 - RNA, 20 nt, Artificial Sequence
  Synthetic
gaggccuaagccagucucgc

SEQ ID NO: 277701 - RNA, 21 nt, Artificial Sequence
  Synthetic
agaggccuaagccagucucgc

SEQ ID NO: 277702 - RNA, 22 nt, Artificial Sequence
  Synthetic
cagaggccuaagccagucucgc

SEQ ID NO: 277703 - RNA, 23 nt, Artificial Sequence
  Synthetic
gcagaggccuaagccagucucgc

SEQ ID NO: 277704 - RNA, 24 nt, Artificial Sequence
  Synthetic
agcagaggccuaagccagucucgc

SEQ ID NO: 277705 - RNA, 18 nt, Artificial Sequence
  Synthetic
uugauuggacugucucgc

SEQ ID NO: 277706 - RNA, 19 nt, Artificial Sequence
  Synthetic
auugauuggacugucucgc

SEQ ID NO: 277707 - RNA, 20 nt, Artificial Sequence
  Synthetic
gauugauuggacugucucgc

SEQ ID NO: 277708 - RNA, 21 nt, Artificial Sequence
  Synthetic
ugauugauuggacugucucgc

SEQ ID NO: 277709 - RNA, 22 nt, Artificial Sequence
  Synthetic
cugauugauuggacugucucgc

SEQ ID NO: 277710 - RNA, 23 nt, Artificial Sequence
  Synthetic
acugauugauuggacugucucgc

SEQ ID NO: 277711 - RNA, 24 nt, Artificial Sequence
  Synthetic
uacugauugauuggacugucucgc

SEQ ID NO: 277712 - RNA, 18 nt, Artificial Sequence
  Synthetic
agcaccaccuacagucgc

SEQ ID NO: 277713 - RNA, 19 nt, Artificial Sequence
  Synthetic
aagcaccaccuacagucgc

SEQ ID NO: 277714 - RNA, 20 nt, Artificial Sequence
  Synthetic
uaagcaccaccuacagucgc

SEQ ID NO: 277715 - RNA, 21 nt, Artificial Sequence
  Synthetic
auaagcaccaccuacagucgc

SEQ ID NO: 277716 - RNA, 22 nt, Artificial Sequence
  Synthetic
uauaagcaccaccuacagucgc

SEQ ID NO: 277717 - RNA, 23 nt, Artificial Sequence
  Synthetic
cuauaagcaccaccuacagucgc

SEQ ID NO: 277718 - RNA, 24 nt, Artificial Sequence
  Synthetic
ccuauaagcaccaccuacagucgc

SEQ ID NO: 277719 - RNA, 18 nt, Artificial Sequence
  Synthetic
ccagggauuggcagucgc

SEQ ID NO: 277720 - RNA, 19 nt, Artificial Sequence
  Synthetic
cccagggauuggcagucgc

SEQ ID NO: 277721 - RNA, 20 nt, Artificial Sequence
  Synthetic
acccagggauuggcagucgc

SEQ ID NO: 277722 - RNA, 21 nt, Artificial Sequence
  Synthetic
aacccagggauuggcagucgc

SEQ ID NO: 277723 - RNA, 22 nt, Artificial Sequence
  Synthetic
caacccagggauuggcagucgc

SEQ ID NO: 277724 - RNA, 23 nt, Artificial Sequence
  Synthetic
acaacccagggauuggcagucgc

SEQ ID NO: 277725 - RNA, 24 nt, Artificial Sequence
  Synthetic
aacaacccagggauuggcagucgc

SEQ ID NO: 277726 - RNA, 18 nt, Artificial Sequence
  Synthetic
uucucaguaaacugucgc

SEQ ID NO: 277727 - RNA, 19 nt, Artificial Sequence
  Synthetic
guucucaguaaacugucgc

SEQ ID NO: 277728 - RNA, 20 nt, Artificial Sequence
  Synthetic
cguucucaguaaacugucgc

SEQ ID NO: 277729 - RNA, 21 nt, Artificial Sequence
  Synthetic
ucguucucaguaaacugucgc

SEQ ID NO: 277730 - RNA, 22 nt, Artificial Sequence
  Synthetic
aucguucucaguaaacugucgc

SEQ ID NO: 277731 - RNA, 23 nt, Artificial Sequence
  Synthetic
caucguucucaguaaacugucgc

SEQ ID NO: 277732 - RNA, 24 nt, Artificial Sequence
  Synthetic
ucaucguucucaguaaacugucgc

SEQ ID NO: 277733 - RNA, 18 nt, Artificial Sequence
  Synthetic
cagaggacauuuguucgc

SEQ ID NO: 277734 - RNA, 19 nt, Artificial Sequence
  Synthetic
ucagaggacauuuguucgc

SEQ ID NO: 277735 - RNA, 20 nt, Artificial Sequence
  Synthetic
uucagaggacauuuguucgc

SEQ ID NO: 277736 - RNA, 21 nt, Artificial Sequence
  Synthetic
auucagaggacauuuguucgc

SEQ ID NO: 277737 - RNA, 22 nt, Artificial Sequence
  Synthetic
aauucagaggacauuuguucgc

SEQ ID NO: 277738 - RNA, 23 nt, Artificial Sequence
  Synthetic
aaauucagaggacauuuguucgc

SEQ ID NO: 277739 - RNA, 24 nt, Artificial Sequence
  Synthetic
gaaauucagaggacauuuguucgc

SEQ ID NO: 277740 - RNA, 18 nt, Artificial Sequence
  Synthetic
ucucugcucggguuucgc

SEQ ID NO: 277741 - RNA, 19 nt, Artificial Sequence
  Synthetic
uucucugcucggguuucgc

SEQ ID NO: 277742 - RNA, 20 nt, Artificial Sequence
  Synthetic
uuucucugcucggguuucgc

SEQ ID NO: 277743 - RNA, 21 nt, Artificial Sequence
  Synthetic
uuuucucugcucggguuucgc

SEQ ID NO: 277744 - RNA, 22 nt, Artificial Sequence
  Synthetic
cuuuucucugcucggguuucgc

SEQ ID NO: 277745 - RNA, 23 nt, Artificial Sequence
  Synthetic
gcuuuucucugcucggguuucgc

SEQ ID NO: 277746 - RNA, 24 nt, Artificial Sequence
  Synthetic
agcuuuucucugcucggguuucgc

SEQ ID NO: 277747 - RNA, 18 nt, Artificial Sequence
  Synthetic
uacuuacagggaaaaggc

SEQ ID NO: 277748 - RNA, 19 nt, Artificial Sequence
  Synthetic
auacuuacagggaaaaggc

SEQ ID NO: 277749 - RNA, 20 nt, Artificial Sequence
  Synthetic
uauacuuacagggaaaaggc

SEQ ID NO: 277750 - RNA, 21 nt, Artificial Sequence
  Synthetic
auauacuuacagggaaaaggc

SEQ ID NO: 277751 - RNA, 22 nt, Artificial Sequence
  Synthetic
cauauacuuacagggaaaaggc

SEQ ID NO: 277752 - RNA, 23 nt, Artificial Sequence
  Synthetic
acauauacuuacagggaaaaggc

SEQ ID NO: 277753 - RNA, 24 nt, Artificial Sequence
  Synthetic
aacauauacuuacagggaaaaggc

SEQ ID NO: 277754 - RNA, 18 nt, Artificial Sequence
  Synthetic
cuaaaagcuggaaaaggc

SEQ ID NO: 277755 - RNA, 19 nt, Artificial Sequence
  Synthetic
ucuaaaagcuggaaaaggc

SEQ ID NO: 277756 - RNA, 20 nt, Artificial Sequence
  Synthetic
cucuaaaagcuggaaaaggc

SEQ ID NO: 277757 - RNA, 21 nt, Artificial Sequence
  Synthetic
gcucuaaaagcuggaaaaggc

SEQ ID NO: 277758 - RNA, 22 nt, Artificial Sequence
  Synthetic
ggcucuaaaagcuggaaaaggc

SEQ ID NO: 277759 - RNA, 23 nt, Artificial Sequence
  Synthetic
aggcucuaaaagcuggaaaaggc

SEQ ID NO: 277760 - RNA, 24 nt, Artificial Sequence
  Synthetic
caggcucuaaaagcuggaaaaggc

SEQ ID NO: 277761 - RNA, 18 nt, Artificial Sequence
  Synthetic
ucuaaugcuggaaaaggc

SEQ ID NO: 277762 - RNA, 19 nt, Artificial Sequence
  Synthetic
aucuaaugcuggaaaaggc

SEQ ID NO: 277763 - RNA, 20 nt, Artificial Sequence
  Synthetic
caucuaaugcuggaaaaggc

SEQ ID NO: 277764 - RNA, 21 nt, Artificial Sequence
  Synthetic
gcaucuaaugcuggaaaaggc

SEQ ID NO: 277765 - RNA, 22 nt, Artificial Sequence
  Synthetic
agcaucuaaugcuggaaaaggc

SEQ ID NO: 277766 - RNA, 23 nt, Artificial Sequence
  Synthetic
uagcaucuaaugcuggaaaaggc

SEQ ID NO: 277767 - RNA, 24 nt, Artificial Sequence
  Synthetic
guagcaucuaaugcuggaaaaggc

SEQ ID NO: 277768 - RNA, 18 nt, Artificial Sequence
  Synthetic
ucugcugaaauaaaaggc

SEQ ID NO: 277769 - RNA, 19 nt, Artificial Sequence
  Synthetic
uucugcugaaauaaaaggc

SEQ ID NO: 277770 - RNA, 20 nt, Artificial Sequence
  Synthetic
auucugcugaaauaaaaggc

SEQ ID NO: 277771 - RNA, 21 nt, Artificial Sequence
  Synthetic
aauucugcugaaauaaaaggc

SEQ ID NO: 277772 - RNA, 22 nt, Artificial Sequence
  Synthetic
caauucugcugaaauaaaaggc

SEQ ID NO: 277773 - RNA, 23 nt, Artificial Sequence
  Synthetic
ucaauucugcugaaauaaaaggc

SEQ ID NO: 277774 - RNA, 24 nt, Artificial Sequence
  Synthetic
cucaauucugcugaaauaaaaggc

SEQ ID NO: 277775 - RNA, 18 nt, Artificial Sequence
  Synthetic
uaaggaagauacaaaggc

SEQ ID NO: 277776 - RNA, 19 nt, Artificial Sequence
  Synthetic
uuaaggaagauacaaaggc

SEQ ID NO: 277777 - RNA, 20 nt, Artificial Sequence
  Synthetic
uuuaaggaagauacaaaggc

SEQ ID NO: 277778 - RNA, 21 nt, Artificial Sequence
  Synthetic
cuuuaaggaagauacaaaggc

SEQ ID NO: 277779 - RNA, 22 nt, Artificial Sequence
  Synthetic
ccuuuaaggaagauacaaaggc

SEQ ID NO: 277780 - RNA, 23 nt, Artificial Sequence
  Synthetic
accuuuaaggaagauacaaaggc

SEQ ID NO: 277781 - RNA, 24 nt, Artificial Sequence
  Synthetic
aaccuuuaaggaagauacaaaggc

SEQ ID NO: 277782 - RNA, 18 nt, Artificial Sequence
  Synthetic
aucucaacuaucaaaggc

SEQ ID NO: 277783 - RNA, 19 nt, Artificial Sequence
  Synthetic
aaucucaacuaucaaaggc

SEQ ID NO: 277784 - RNA, 20 nt, Artificial Sequence
  Synthetic
aaaucucaacuaucaaaggc

SEQ ID NO: 277785 - RNA, 21 nt, Artificial Sequence
  Synthetic
aaaaucucaacuaucaaaggc

SEQ ID NO: 277786 - RNA, 22 nt, Artificial Sequence
  Synthetic
caaaaucucaacuaucaaaggc

SEQ ID NO: 277787 - RNA, 23 nt, Artificial Sequence
  Synthetic
ucaaaaucucaacuaucaaaggc

SEQ ID NO: 277788 - RNA, 24 nt, Artificial Sequence
  Synthetic
cucaaaaucucaacuaucaaaggc

SEQ ID NO: 277789 - RNA, 18 nt, Artificial Sequence
  Synthetic
ccauaggaccagaaaggc

SEQ ID NO: 277790 - RNA, 19 nt, Artificial Sequence
  Synthetic
uccauaggaccagaaaggc

SEQ ID NO: 277791 - RNA, 20 nt, Artificial Sequence
  Synthetic
uuccauaggaccagaaaggc

SEQ ID NO: 277792 - RNA, 21 nt, Artificial Sequence
  Synthetic
uuuccauaggaccagaaaggc

SEQ ID NO: 277793 - RNA, 22 nt, Artificial Sequence
  Synthetic
cuuuccauaggaccagaaaggc

SEQ ID NO: 277794 - RNA, 23 nt, Artificial Sequence
  Synthetic
acuuuccauaggaccagaaaggc

SEQ ID NO: 277795 - RNA, 24 nt, Artificial Sequence
  Synthetic
cacuuuccauaggaccagaaaggc

SEQ ID NO: 277796 - RNA, 18 nt, Artificial Sequence
  Synthetic
cugaggcgggagaaaggc

SEQ ID NO: 277797 - RNA, 19 nt, Artificial Sequence
  Synthetic
gcugaggcgggagaaaggc

SEQ ID NO: 277798 - RNA, 20 nt, Artificial Sequence
  Synthetic
agcugaggcgggagaaaggc

SEQ ID NO: 277799 - RNA, 21 nt, Artificial Sequence
  Synthetic
aagcugaggcgggagaaaggc

SEQ ID NO: 277800 - RNA, 22 nt, Artificial Sequence
  Synthetic
gaagcugaggcgggagaaaggc

SEQ ID NO: 277801 - RNA, 23 nt, Artificial Sequence
  Synthetic
ggaagcugaggcgggagaaaggc

SEQ ID NO: 277802 - RNA, 24 nt, Artificial Sequence
  Synthetic
gggaagcugaggcgggagaaaggc

SEQ ID NO: 277803 - RNA, 18 nt, Artificial Sequence
  Synthetic
cccagcuacccgaaaggc

SEQ ID NO: 277804 - RNA, 19 nt, Artificial Sequence
  Synthetic
ucccagcuacccgaaaggc

SEQ ID NO: 277805 - RNA, 20 nt, Artificial Sequence
  Synthetic
gucccagcuacccgaaaggc

SEQ ID NO: 277806 - RNA, 21 nt, Artificial Sequence
  Synthetic
agucccagcuacccgaaaggc

SEQ ID NO: 277807 - RNA, 22 nt, Artificial Sequence
  Synthetic
uagucccagcuacccgaaaggc

SEQ ID NO: 277808 - RNA, 23 nt, Artificial Sequence
  Synthetic
guagucccagcuacccgaaaggc

SEQ ID NO: 277809 - RNA, 24 nt, Artificial Sequence
  Synthetic
uguagucccagcuacccgaaaggc

SEQ ID NO: 277810 - RNA, 18 nt, Artificial Sequence
  Synthetic
gucgaggaaaggaaaggc

SEQ ID NO: 277811 - RNA, 19 nt, Artificial Sequence
  Synthetic
ggucgaggaaaggaaaggc

SEQ ID NO: 277812 - RNA, 20 nt, Artificial Sequence
  Synthetic
uggucgaggaaaggaaaggc

SEQ ID NO: 277813 - RNA, 21 nt, Artificial Sequence
  Synthetic
cuggucgaggaaaggaaaggc

SEQ ID NO: 277814 - RNA, 22 nt, Artificial Sequence
  Synthetic
acuggucgaggaaaggaaaggc

SEQ ID NO: 277815 - RNA, 23 nt, Artificial Sequence
  Synthetic
aacuggucgaggaaaggaaaggc

SEQ ID NO: 277816 - RNA, 24 nt, Artificial Sequence
  Synthetic
gaacuggucgaggaaaggaaaggc

SEQ ID NO: 277817 - RNA, 18 nt, Artificial Sequence
  Synthetic
ggcugccuggggaaaggc

SEQ ID NO: 277818 - RNA, 19 nt, Artificial Sequence
  Synthetic
gggcugccuggggaaaggc

SEQ ID NO: 277819 - RNA, 20 nt, Artificial Sequence
  Synthetic
agggcugccuggggaaaggc

SEQ ID NO: 277820 - RNA, 21 nt, Artificial Sequence
  Synthetic
gagggcugccuggggaaaggc

SEQ ID NO: 277821 - RNA, 22 nt, Artificial Sequence
  Synthetic
ugagggcugccuggggaaaggc

SEQ ID NO: 277822 - RNA, 23 nt, Artificial Sequence
  Synthetic
augagggcugccuggggaaaggc

SEQ ID NO: 277823 - RNA, 24 nt, Artificial Sequence
  Synthetic
aaugagggcugccuggggaaaggc

SEQ ID NO: 277824 - RNA, 18 nt, Artificial Sequence
  Synthetic
auuuugaaauggaaaggc

SEQ ID NO: 277825 - RNA, 19 nt, Artificial Sequence
  Synthetic
uauuuugaaauggaaaggc

SEQ ID NO: 277826 - RNA, 20 nt, Artificial Sequence
  Synthetic
guauuuugaaauggaaaggc

SEQ ID NO: 277827 - RNA, 21 nt, Artificial Sequence
  Synthetic
uguauuuugaaauggaaaggc

SEQ ID NO: 277828 - RNA, 22 nt, Artificial Sequence
  Synthetic
guguauuuugaaauggaaaggc

SEQ ID NO: 277829 - RNA, 23 nt, Artificial Sequence
  Synthetic
aguguauuuugaaauggaaaggc

SEQ ID NO: 277830 - RNA, 24 nt, Artificial Sequence
  Synthetic
caguguauuuugaaauggaaaggc

SEQ ID NO: 277831 - RNA, 18 nt, Artificial Sequence
  Synthetic
accuauaaucugaaaggc

SEQ ID NO: 277832 - RNA, 19 nt, Artificial Sequence
  Synthetic
gaccuauaaucugaaaggc

SEQ ID NO: 277833 - RNA, 20 nt, Artificial Sequence
  Synthetic
agaccuauaaucugaaaggc

SEQ ID NO: 277834 - RNA, 21 nt, Artificial Sequence
  Synthetic
aagaccuauaaucugaaaggc

SEQ ID NO: 277835 - RNA, 22 nt, Artificial Sequence
  Synthetic
uaagaccuauaaucugaaaggc

SEQ ID NO: 277836 - RNA, 23 nt, Artificial Sequence
  Synthetic
uuaagaccuauaaucugaaaggc

SEQ ID NO: 277837 - RNA, 24 nt, Artificial Sequence
  Synthetic
uuuaagaccuauaaucugaaaggc

SEQ ID NO: 277838 - RNA, 18 nt, Artificial Sequence
  Synthetic
auacauugaaauaaaggc

SEQ ID NO: 277839 - RNA, 19 nt, Artificial Sequence
  Synthetic
cauacauugaaauaaaggc

SEQ ID NO: 277840 - RNA, 20 nt, Artificial Sequence
  Synthetic
acauacauugaaauaaaggc

SEQ ID NO: 277841 - RNA, 21 nt, Artificial Sequence
  Synthetic
aacauacauugaaauaaaggc

SEQ ID NO: 277842 - RNA, 22 nt, Artificial Sequence
  Synthetic
uaacauacauugaaauaaaggc

SEQ ID NO: 277843 - RNA, 23 nt, Artificial Sequence
  Synthetic
auaacauacauugaaauaaaggc

SEQ ID NO: 277844 - RNA, 24 nt, Artificial Sequence
  Synthetic
gauaacauacauugaaauaaaggc

SEQ ID NO: 277845 - RNA, 18 nt, Artificial Sequence
  Synthetic
aauacuaugcauaaaggc

SEQ ID NO: 277846 - RNA, 19 nt, Artificial Sequence
  Synthetic
gaauacuaugcauaaaggc

SEQ ID NO: 277847 - RNA, 20 nt, Artificial Sequence
  Synthetic
ggaauacuaugcauaaaggc

SEQ ID NO: 277848 - RNA, 21 nt, Artificial Sequence
  Synthetic
uggaauacuaugcauaaaggc

SEQ ID NO: 277849 - RNA, 22 nt, Artificial Sequence
  Synthetic
auggaauacuaugcauaaaggc

SEQ ID NO: 277850 - RNA, 23 nt, Artificial Sequence
  Synthetic
gauggaauacuaugcauaaaggc

SEQ ID NO: 277851 - RNA, 24 nt, Artificial Sequence
  Synthetic
agauggaauacuaugcauaaaggc

SEQ ID NO: 277852 - RNA, 18 nt, Artificial Sequence
  Synthetic
aagagaggggauaaaggc

SEQ ID NO: 277853 - RNA, 19 nt, Artificial Sequence
  Synthetic
gaagagaggggauaaaggc

SEQ ID NO: 277854 - RNA, 20 nt, Artificial Sequence
  Synthetic
cgaagagaggggauaaaggc

SEQ ID NO: 277855 - RNA, 21 nt, Artificial Sequence
  Synthetic
gcgaagagaggggauaaaggc

SEQ ID NO: 277856 - RNA, 22 nt, Artificial Sequence
  Synthetic
agcgaagagaggggauaaaggc

SEQ ID NO: 277857 - RNA, 23 nt, Artificial Sequence
  Synthetic
cagcgaagagaggggauaaaggc

SEQ ID NO: 277858 - RNA, 24 nt, Artificial Sequence
  Synthetic
acagcgaagagaggggauaaaggc

SEQ ID NO: 277859 - RNA, 18 nt, Artificial Sequence
  Synthetic
ccacaaggggguaaaggc

SEQ ID NO: 277860 - RNA, 19 nt, Artificial Sequence
  Synthetic
accacaaggggguaaaggc

SEQ ID NO: 277861 - RNA, 20 nt, Artificial Sequence
  Synthetic
aaccacaaggggguaaaggc

SEQ ID NO: 277862 - RNA, 21 nt, Artificial Sequence
  Synthetic
caaccacaaggggguaaaggc

SEQ ID NO: 277863 - RNA, 22 nt, Artificial Sequence
  Synthetic
ucaaccacaaggggguaaaggc

SEQ ID NO: 277864 - RNA, 23 nt, Artificial Sequence
  Synthetic
gucaaccacaaggggguaaaggc

SEQ ID NO: 277865 - RNA, 24 nt, Artificial Sequence
  Synthetic
ugucaaccacaaggggguaaaggc

SEQ ID NO: 277866 - RNA, 18 nt, Artificial Sequence
  Synthetic
agcggugguucccaaggc

SEQ ID NO: 277867 - RNA, 19 nt, Artificial Sequence
  Synthetic
aagcggugguucccaaggc

SEQ ID NO: 277868 - RNA, 20 nt, Artificial Sequence
  Synthetic
aaagcggugguucccaaggc

SEQ ID NO: 277869 - RNA, 21 nt, Artificial Sequence
  Synthetic
caaagcggugguucccaaggc

SEQ ID NO: 277870 - RNA, 22 nt, Artificial Sequence
  Synthetic
ucaaagcggugguucccaaggc

SEQ ID NO: 277871 - RNA, 23 nt, Artificial Sequence
  Synthetic
cucaaagcggugguucccaaggc

SEQ ID NO: 277872 - RNA, 24 nt, Artificial Sequence
  Synthetic
ucucaaagcggugguucccaaggc

SEQ ID NO: 277873 - RNA, 18 nt, Artificial Sequence
  Synthetic
acuuugggaggccaaggc

SEQ ID NO: 277874 - RNA, 19 nt, Artificial Sequence
  Synthetic
cacuuugggaggccaaggc

SEQ ID NO: 277875 - RNA, 20 nt, Artificial Sequence
  Synthetic
acacuuugggaggccaaggc

SEQ ID NO: 277876 - RNA, 21 nt, Artificial Sequence
  Synthetic
aacacuuugggaggccaaggc

SEQ ID NO: 277877 - RNA, 22 nt, Artificial Sequence
  Synthetic
uaacacuuugggaggccaaggc

SEQ ID NO: 277878 - RNA, 23 nt, Artificial Sequence
  Synthetic
cuaacacuuugggaggccaaggc

SEQ ID NO: 277879 - RNA, 24 nt, Artificial Sequence
  Synthetic
ccuaacacuuugggaggccaaggc

SEQ ID NO: 277880 - RNA, 18 nt, Artificial Sequence
  Synthetic
gcuuugggaggccaaggc

SEQ ID NO: 277881 - RNA, 19 nt, Artificial Sequence
  Synthetic
ugcuuugggaggccaaggc

SEQ ID NO: 277882 - RNA, 20 nt, Artificial Sequence
  Synthetic
gugcuuugggaggccaaggc

SEQ ID NO: 277883 - RNA, 21 nt, Artificial Sequence
  Synthetic
agugcuuugggaggccaaggc

SEQ ID NO: 277884 - RNA, 22 nt, Artificial Sequence
  Synthetic
cagugcuuugggaggccaaggc

SEQ ID NO: 277885 - RNA, 23 nt, Artificial Sequence
  Synthetic
ucagugcuuugggaggccaaggc

SEQ ID NO: 277886 - RNA, 24 nt, Artificial Sequence
  Synthetic
cucagugcuuugggaggccaaggc

SEQ ID NO: 277887 - RNA, 18 nt, Artificial Sequence
  Synthetic
uuuucucaauggcaaggc

SEQ ID NO: 277888 - RNA, 19 nt, Artificial Sequence
  Synthetic
uuuuucucaauggcaaggc

SEQ ID NO: 277889 - RNA, 20 nt, Artificial Sequence
  Synthetic
cuuuuucucaauggcaaggc

SEQ ID NO: 277890 - RNA, 21 nt, Artificial Sequence
  Synthetic
acuuuuucucaauggcaaggc

SEQ ID NO: 277891 - RNA, 22 nt, Artificial Sequence
  Synthetic
uacuuuuucucaauggcaaggc

SEQ ID NO: 277892 - RNA, 23 nt, Artificial Sequence
  Synthetic
cuacuuuuucucaauggcaaggc

SEQ ID NO: 277893 - RNA, 24 nt, Artificial Sequence
  Synthetic
acuacuuuuucucaauggcaaggc

SEQ ID NO: 277894 - RNA, 18 nt, Artificial Sequence
  Synthetic
aucuuacccucucaaggc

SEQ ID NO: 277895 - RNA, 19 nt, Artificial Sequence
  Synthetic
aaucuuacccucucaaggc

SEQ ID NO: 277896 - RNA, 20 nt, Artificial Sequence
  Synthetic
uaaucuuacccucucaaggc

SEQ ID NO: 277897 - RNA, 21 nt, Artificial Sequence
  Synthetic
uuaaucuuacccucucaaggc

SEQ ID NO: 277898 - RNA, 22 nt, Artificial Sequence
  Synthetic
uuuaaucuuacccucucaaggc

SEQ ID NO: 277899 - RNA, 23 nt, Artificial Sequence
  Synthetic
guuuaaucuuacccucucaaggc

SEQ ID NO: 277900 - RNA, 24 nt, Artificial Sequence
  Synthetic
gguuuaaucuuacccucucaaggc

SEQ ID NO: 277901 - RNA, 18 nt, Artificial Sequence
  Synthetic
agaaggauguaagaaggc

SEQ ID NO: 277902 - RNA, 19 nt, Artificial Sequence
  Synthetic
aagaaggauguaagaaggc

SEQ ID NO: 277903 - RNA, 20 nt, Artificial Sequence
  Synthetic
caagaaggauguaagaaggc

SEQ ID NO: 277904 - RNA, 21 nt, Artificial Sequence
  Synthetic
ccaagaaggauguaagaaggc

SEQ ID NO: 277905 - RNA, 22 nt, Artificial Sequence
  Synthetic
uccaagaaggauguaagaaggc

SEQ ID NO: 277906 - RNA, 23 nt, Artificial Sequence
  Synthetic
uuccaagaaggauguaagaaggc

SEQ ID NO: 277907 - RNA, 24 nt, Artificial Sequence
  Synthetic
auuccaagaaggauguaagaaggc

SEQ ID NO: 277908 - RNA, 18 nt, Artificial Sequence
  Synthetic
ucuaauuuaccagaaggc

SEQ ID NO: 277909 - RNA, 19 nt, Artificial Sequence
  Synthetic
uucuaauuuaccagaaggc

SEQ ID NO: 277910 - RNA, 20 nt, Artificial Sequence
  Synthetic
uuucuaauuuaccagaaggc

SEQ ID NO: 277911 - RNA, 21 nt, Artificial Sequence
  Synthetic
guuucuaauuuaccagaaggc

SEQ ID NO: 277912 - RNA, 22 nt, Artificial Sequence
  Synthetic
uguuucuaauuuaccagaaggc

SEQ ID NO: 277913 - RNA, 23 nt, Artificial Sequence
  Synthetic
auguuucuaauuuaccagaaggc

SEQ ID NO: 277914 - RNA, 24 nt, Artificial Sequence
  Synthetic
uauguuucuaauuuaccagaaggc

SEQ ID NO: 277915 - RNA, 18 nt, Artificial Sequence
  Synthetic
acaaucuuggcagaaggc

SEQ ID NO: 277916 - RNA, 19 nt, Artificial Sequence
  Synthetic
cacaaucuuggcagaaggc

SEQ ID NO: 277917 - RNA, 20 nt, Artificial Sequence
  Synthetic
ucacaaucuuggcagaaggc

SEQ ID NO: 277918 - RNA, 21 nt, Artificial Sequence
  Synthetic
cucacaaucuuggcagaaggc

SEQ ID NO: 277919 - RNA, 22 nt, Artificial Sequence
  Synthetic
ccucacaaucuuggcagaaggc

SEQ ID NO: 277920 - RNA, 23 nt, Artificial Sequence
  Synthetic
gccucacaaucuuggcagaaggc

SEQ ID NO: 277921 - RNA, 24 nt, Artificial Sequence
  Synthetic
ggccucacaaucuuggcagaaggc

SEQ ID NO: 277922 - RNA, 18 nt, Artificial Sequence
  Synthetic
ugaaaacauugagaaggc

SEQ ID NO: 277923 - RNA, 19 nt, Artificial Sequence
  Synthetic
augaaaacauugagaaggc

SEQ ID NO: 277924 - RNA, 20 nt, Artificial Sequence
  Synthetic
aaugaaaacauugagaaggc

SEQ ID NO: 277925 - RNA, 21 nt, Artificial Sequence
  Synthetic
caaugaaaacauugagaaggc

SEQ ID NO: 277926 - RNA, 22 nt, Artificial Sequence
  Synthetic
gcaaugaaaacauugagaaggc

SEQ ID NO: 277927 - RNA, 23 nt, Artificial Sequence
  Synthetic
ggcaaugaaaacauugagaaggc

SEQ ID NO: 277928 - RNA, 24 nt, Artificial Sequence
  Synthetic
uggcaaugaaaacauugagaaggc

SEQ ID NO: 277929 - RNA, 18 nt, Artificial Sequence
  Synthetic
uaagaccaguuagaaggc

SEQ ID NO: 277930 - RNA, 19 nt, Artificial Sequence
  Synthetic
guaagaccaguuagaaggc

SEQ ID NO: 277931 - RNA, 20 nt, Artificial Sequence
  Synthetic
aguaagaccaguuagaaggc

SEQ ID NO: 277932 - RNA, 21 nt, Artificial Sequence
  Synthetic
caguaagaccaguuagaaggc

SEQ ID NO: 277933 - RNA, 22 nt, Artificial Sequence
  Synthetic
ucaguaagaccaguuagaaggc

SEQ ID NO: 277934 - RNA, 23 nt, Artificial Sequence
  Synthetic
gucaguaagaccaguuagaaggc

SEQ ID NO: 277935 - RNA, 24 nt, Artificial Sequence
  Synthetic
agucaguaagaccaguuagaaggc

SEQ ID NO: 277936 - RNA, 18 nt, Artificial Sequence
  Synthetic
augaaugaguuagaaggc

SEQ ID NO: 277937 - RNA, 19 nt, Artificial Sequence
  Synthetic
caugaaugaguuagaaggc

SEQ ID NO: 277938 - RNA, 20 nt, Artificial Sequence
  Synthetic
ucaugaaugaguuagaaggc

SEQ ID NO: 277939 - RNA, 21 nt, Artificial Sequence
  Synthetic
cucaugaaugaguuagaaggc

SEQ ID NO: 277940 - RNA, 22 nt, Artificial Sequence
  Synthetic
ucucaugaaugaguuagaaggc

SEQ ID NO: 277941 - RNA, 23 nt, Artificial Sequence
  Synthetic
uucucaugaaugaguuagaaggc

SEQ ID NO: 277942 - RNA, 24 nt, Artificial Sequence
  Synthetic
guucucaugaaugaguuagaaggc

SEQ ID NO: 277943 - RNA, 18 nt, Artificial Sequence
  Synthetic
gagaagaaaacugaaggc

SEQ ID NO: 277944 - RNA, 19 nt, Artificial Sequence
  Synthetic
agagaagaaaacugaaggc

SEQ ID NO: 277945 - RNA, 20 nt, Artificial Sequence
  Synthetic
cagagaagaaaacugaaggc

SEQ ID NO: 277946 - RNA, 21 nt, Artificial Sequence
  Synthetic
gcagagaagaaaacugaaggc

SEQ ID NO: 277947 - RNA, 22 nt, Artificial Sequence
  Synthetic
ugcagagaagaaaacugaaggc

SEQ ID NO: 277948 - RNA, 23 nt, Artificial Sequence
  Synthetic
uugcagagaagaaaacugaaggc

SEQ ID NO: 277949 - RNA, 24 nt, Artificial Sequence
  Synthetic
uuugcagagaagaaaacugaaggc

SEQ ID NO: 277950 - RNA, 18 nt, Artificial Sequence
  Synthetic
auagcugagccugaaggc

SEQ ID NO: 277951 - RNA, 19 nt, Artificial Sequence
  Synthetic
aauagcugagccugaaggc

SEQ ID NO: 277952 - RNA, 20 nt, Artificial Sequence
  Synthetic
gaauagcugagccugaaggc

SEQ ID NO: 277953 - RNA, 21 nt, Artificial Sequence
  Synthetic
agaauagcugagccugaaggc

SEQ ID NO: 277954 - RNA, 22 nt, Artificial Sequence
  Synthetic
uagaauagcugagccugaaggc

SEQ ID NO: 277955 - RNA, 23 nt, Artificial Sequence
  Synthetic
auagaauagcugagccugaaggc

SEQ ID NO: 277956 - RNA, 24 nt, Artificial Sequence
  Synthetic
gauagaauagcugagccugaaggc

SEQ ID NO: 277957 - RNA, 18 nt, Artificial Sequence
  Synthetic
ggacauuaagaauaaggc

SEQ ID NO: 277958 - RNA, 19 nt, Artificial Sequence
  Synthetic
gggacauuaagaauaaggc

SEQ ID NO: 277959 - RNA, 20 nt, Artificial Sequence
  Synthetic
ggggacauuaagaauaaggc

SEQ ID NO: 277960 - RNA, 21 nt, Artificial Sequence
  Synthetic
aggggacauuaagaauaaggc

SEQ ID NO: 277961 - RNA, 22 nt, Artificial Sequence
  Synthetic
gaggggacauuaagaauaaggc

SEQ ID NO: 277962 - RNA, 23 nt, Artificial Sequence
  Synthetic
ggaggggacauuaagaauaaggc

SEQ ID NO: 277963 - RNA, 24 nt, Artificial Sequence
  Synthetic
uggaggggacauuaagaauaaggc

SEQ ID NO: 277964 - RNA, 18 nt, Artificial Sequence
  Synthetic
agagcuugggaauaaggc

SEQ ID NO: 277965 - RNA, 19 nt, Artificial Sequence
  Synthetic
gagagcuugggaauaaggc

SEQ ID NO: 277966 - RNA, 20 nt, Artificial Sequence
  Synthetic
agagagcuugggaauaaggc

SEQ ID NO: 277967 - RNA, 21 nt, Artificial Sequence
  Synthetic
gagagagcuugggaauaaggc

SEQ ID NO: 277968 - RNA, 22 nt, Artificial Sequence
  Synthetic
agagagagcuugggaauaaggc

SEQ ID NO: 277969 - RNA, 23 nt, Artificial Sequence
  Synthetic
aagagagagcuugggaauaaggc

SEQ ID NO: 277970 - RNA, 24 nt, Artificial Sequence
  Synthetic
aaagagagagcuugggaauaaggc

SEQ ID NO: 277971 - RNA, 18 nt, Artificial Sequence
  Synthetic
agugugcuggcauaaggc

SEQ ID NO: 277972 - RNA, 19 nt, Artificial Sequence
  Synthetic
cagugugcuggcauaaggc

SEQ ID NO: 277973 - RNA, 20 nt, Artificial Sequence
  Synthetic
acagugugcuggcauaaggc

SEQ ID NO: 277974 - RNA, 21 nt, Artificial Sequence
  Synthetic
cacagugugcuggcauaaggc

SEQ ID NO: 277975 - RNA, 22 nt, Artificial Sequence
  Synthetic
ccacagugugcuggcauaaggc

SEQ ID NO: 277976 - RNA, 23 nt, Artificial Sequence
  Synthetic
accacagugugcuggcauaaggc

SEQ ID NO: 277977 - RNA, 24 nt, Artificial Sequence
  Synthetic
aaccacagugugcuggcauaaggc

SEQ ID NO: 277978 - RNA, 18 nt, Artificial Sequence
  Synthetic
uacucaggaggcuaaggc

SEQ ID NO: 277979 - RNA, 19 nt, Artificial Sequence
  Synthetic
cuacucaggaggcuaaggc

SEQ ID NO: 277980 - RNA, 20 nt, Artificial Sequence
  Synthetic
gcuacucaggaggcuaaggc

SEQ ID NO: 277981 - RNA, 21 nt, Artificial Sequence
  Synthetic
agcuacucaggaggcuaaggc

SEQ ID NO: 277982 - RNA, 22 nt, Artificial Sequence
  Synthetic
cagcuacucaggaggcuaaggc

SEQ ID NO: 277983 - RNA, 23 nt, Artificial Sequence
  Synthetic
ccagcuacucaggaggcuaaggc

SEQ ID NO: 277984 - RNA, 24 nt, Artificial Sequence
  Synthetic
cccagcuacucaggaggcuaaggc

SEQ ID NO: 277985 - RNA, 18 nt, Artificial Sequence
  Synthetic
aauuugggaggcuaaggc

SEQ ID NO: 277986 - RNA, 19 nt, Artificial Sequence
  Synthetic
caauuugggaggcuaaggc

SEQ ID NO: 277987 - RNA, 20 nt, Artificial Sequence
  Synthetic
gcaauuugggaggcuaaggc

SEQ ID NO: 277988 - RNA, 21 nt, Artificial Sequence
  Synthetic
agcaauuugggaggcuaaggc

SEQ ID NO: 277989 - RNA, 22 nt, Artificial Sequence
  Synthetic
cagcaauuugggaggcuaaggc

SEQ ID NO: 277990 - RNA, 23 nt, Artificial Sequence
  Synthetic
ccagcaauuugggaggcuaaggc

SEQ ID NO: 277991 - RNA, 24 nt, Artificial Sequence
  Synthetic
cccagcaauuugggaggcuaaggc

SEQ ID NO: 277992 - RNA, 18 nt, Artificial Sequence
  Synthetic
aaccucagaacuuaaggc

SEQ ID NO: 277993 - RNA, 19 nt, Artificial Sequence
  Synthetic
uaaccucagaacuuaaggc

SEQ ID NO: 277994 - RNA, 20 nt, Artificial Sequence
  Synthetic
cuaaccucagaacuuaaggc

SEQ ID NO: 277995 - RNA, 21 nt, Artificial Sequence
  Synthetic
ccuaaccucagaacuuaaggc

SEQ ID NO: 277996 - RNA, 22 nt, Artificial Sequence
  Synthetic
accuaaccucagaacuuaaggc

SEQ ID NO: 277997 - RNA, 23 nt, Artificial Sequence
  Synthetic
aaccuaaccucagaacuuaaggc

SEQ ID NO: 277998 - RNA, 24 nt, Artificial Sequence
  Synthetic
aaaccuaaccucagaacuuaaggc

SEQ ID NO: 277999 - RNA, 18 nt, Artificial Sequence
  Synthetic
uacucgggagguuaaggc

SEQ ID NO: 278000 - RNA, 19 nt, Artificial Sequence
  Synthetic
cuacucgggagguuaaggc

SEQ ID NO: 278001 - RNA, 20 nt, Artificial Sequence
  Synthetic
gcuacucgggagguuaaggc

SEQ ID NO: 278002 - RNA, 21 nt, Artificial Sequence
  Synthetic
agcuacucgggagguuaaggc

SEQ ID NO: 278003 - RNA, 22 nt, Artificial Sequence
  Synthetic
cagcuacucgggagguuaaggc

SEQ ID NO: 278004 - RNA, 23 nt, Artificial Sequence
  Synthetic
ccagcuacucgggagguuaaggc

SEQ ID NO: 278005 - RNA, 24 nt, Artificial Sequence
  Synthetic
cccagcuacucgggagguuaaggc

SEQ ID NO: 278006 - RNA, 18 nt, Artificial Sequence
  Synthetic
aggagaagacuuuaaggc

SEQ ID NO: 278007 - RNA, 19 nt, Artificial Sequence
  Synthetic
gaggagaagacuuuaaggc

SEQ ID NO: 278008 - RNA, 20 nt, Artificial Sequence
  Synthetic
agaggagaagacuuuaaggc

SEQ ID NO: 278009 - RNA, 21 nt, Artificial Sequence
  Synthetic
aagaggagaagacuuuaaggc

SEQ ID NO: 278010 - RNA, 22 nt, Artificial Sequence
  Synthetic
aaagaggagaagacuuuaaggc

SEQ ID NO: 278011 - RNA, 23 nt, Artificial Sequence
  Synthetic
gaaagaggagaagacuuuaaggc

SEQ ID NO: 278012 - RNA, 24 nt, Artificial Sequence
  Synthetic
ugaaagaggagaagacuuuaaggc

SEQ ID NO: 278013 - RNA, 18 nt, Artificial Sequence
  Synthetic
acuugguuguuuuaaggc

SEQ ID NO: 278014 - RNA, 19 nt, Artificial Sequence
  Synthetic
gacuugguuguuuuaaggc

SEQ ID NO: 278015 - RNA, 20 nt, Artificial Sequence
  Synthetic
cgacuugguuguuuuaaggc

SEQ ID NO: 278016 - RNA, 21 nt, Artificial Sequence
  Synthetic
gcgacuugguuguuuuaaggc

SEQ ID NO: 278017 - RNA, 22 nt, Artificial Sequence
  Synthetic
ggcgacuugguuguuuuaaggc

SEQ ID NO: 278018 - RNA, 23 nt, Artificial Sequence
  Synthetic
aggcgacuugguuguuuuaaggc

SEQ ID NO: 278019 - RNA, 24 nt, Artificial Sequence
  Synthetic
gaggcgacuugguuguuuuaaggc

SEQ ID NO: 278020 - RNA, 18 nt, Artificial Sequence
  Synthetic
acagaacaguaaacaggc

SEQ ID NO: 278021 - RNA, 19 nt, Artificial Sequence
  Synthetic
uacagaacaguaaacaggc

SEQ ID NO: 278022 - RNA, 20 nt, Artificial Sequence
  Synthetic
cuacagaacaguaaacaggc

SEQ ID NO: 278023 - RNA, 21 nt, Artificial Sequence
  Synthetic
ucuacagaacaguaaacaggc

SEQ ID NO: 278024 - RNA, 22 nt, Artificial Sequence
  Synthetic
uucuacagaacaguaaacaggc

SEQ ID NO: 278025 - RNA, 23 nt, Artificial Sequence
  Synthetic
cuucuacagaacaguaaacaggc

SEQ ID NO: 278026 - RNA, 24 nt, Artificial Sequence
  Synthetic
ucuucuacagaacaguaaacaggc

SEQ ID NO: 278027 - RNA, 18 nt, Artificial Sequence
  Synthetic
ccaguguguucaacaggc

SEQ ID NO: 278028 - RNA, 19 nt, Artificial Sequence
  Synthetic
uccaguguguucaacaggc

SEQ ID NO: 278029 - RNA, 20 nt, Artificial Sequence
  Synthetic
auccaguguguucaacaggc

SEQ ID NO: 278030 - RNA, 21 nt, Artificial Sequence
  Synthetic
uauccaguguguucaacaggc

SEQ ID NO: 278031 - RNA, 22 nt, Artificial Sequence
  Synthetic
guauccaguguguucaacaggc

SEQ ID NO: 278032 - RNA, 23 nt, Artificial Sequence
  Synthetic
gguauccaguguguucaacaggc

SEQ ID NO: 278033 - RNA, 24 nt, Artificial Sequence
  Synthetic
ugguauccaguguguucaacaggc

SEQ ID NO: 278034 - RNA, 18 nt, Artificial Sequence
  Synthetic
uauucacuaaucacaggc

SEQ ID NO: 278035 - RNA, 19 nt, Artificial Sequence
  Synthetic
auauucacuaaucacaggc

SEQ ID NO: 278036 - RNA, 20 nt, Artificial Sequence
  Synthetic
uauauucacuaaucacaggc

SEQ ID NO: 278037 - RNA, 21 nt, Artificial Sequence
  Synthetic
cuauauucacuaaucacaggc

SEQ ID NO: 278038 - RNA, 22 nt, Artificial Sequence
  Synthetic
ucuauauucacuaaucacaggc

SEQ ID NO: 278039 - RNA, 23 nt, Artificial Sequence
  Synthetic
cucuauauucacuaaucacaggc

SEQ ID NO: 278040 - RNA, 24 nt, Artificial Sequence
  Synthetic
acucuauauucacuaaucacaggc

SEQ ID NO: 278041 - RNA, 18 nt, Artificial Sequence
  Synthetic
ccacaguuacauacaggc

SEQ ID NO: 278042 - RNA, 19 nt, Artificial Sequence
  Synthetic
cccacaguuacauacaggc

SEQ ID NO: 278043 - RNA, 20 nt, Artificial Sequence
  Synthetic
ucccacaguuacauacaggc

SEQ ID NO: 278044 - RNA, 21 nt, Artificial Sequence
  Synthetic
cucccacaguuacauacaggc

SEQ ID NO: 278045 - RNA, 22 nt, Artificial Sequence
  Synthetic
gcucccacaguuacauacaggc

SEQ ID NO: 278046 - RNA, 23 nt, Artificial Sequence
  Synthetic
ugcucccacaguuacauacaggc

SEQ ID NO: 278047 - RNA, 24 nt, Artificial Sequence
  Synthetic
cugcucccacaguuacauacaggc

SEQ ID NO: 278048 - RNA, 18 nt, Artificial Sequence
  Synthetic
aagugcugggauacaggc

SEQ ID NO: 278049 - RNA, 19 nt, Artificial Sequence
  Synthetic
aaagugcugggauacaggc

SEQ ID NO: 278050 - RNA, 20 nt, Artificial Sequence
  Synthetic
caaagugcugggauacaggc

SEQ ID NO: 278051 - RNA, 21 nt, Artificial Sequence
  Synthetic
ccaaagugcugggauacaggc

SEQ ID NO: 278052 - RNA, 22 nt, Artificial Sequence
  Synthetic
cccaaagugcugggauacaggc

SEQ ID NO: 278053 - RNA, 23 nt, Artificial Sequence
  Synthetic
ucccaaagugcugggauacaggc

SEQ ID NO: 278054 - RNA, 24 nt, Artificial Sequence
  Synthetic
cucccaaagugcugggauacaggc

SEQ ID NO: 278055 - RNA, 18 nt, Artificial Sequence
  Synthetic
ggugcuggaauuacaggc

SEQ ID NO: 278056 - RNA, 19 nt, Artificial Sequence
  Synthetic
aggugcuggaauuacaggc

SEQ ID NO: 278057 - RNA, 20 nt, Artificial Sequence
  Synthetic
aaggugcuggaauuacaggc

SEQ ID NO: 278058 - RNA, 21 nt, Artificial Sequence
  Synthetic
uaaggugcuggaauuacaggc

SEQ ID NO: 278059 - RNA, 22 nt, Artificial Sequence
  Synthetic
cuaaggugcuggaauuacaggc

SEQ ID NO: 278060 - RNA, 23 nt, Artificial Sequence
  Synthetic
ccuaaggugcuggaauuacaggc

SEQ ID NO: 278061 - RNA, 24 nt, Artificial Sequence
  Synthetic
uccuaaggugcuggaauuacaggc

SEQ ID NO: 278062 - RNA, 18 nt, Artificial Sequence
  Synthetic
agugcuaggauuacaggc

SEQ ID NO: 278063 - RNA, 19 nt, Artificial Sequence
  Synthetic
aagugcuaggauuacaggc

SEQ ID NO: 278064 - RNA, 20 nt, Artificial Sequence
  Synthetic
aaagugcuaggauuacaggc

SEQ ID NO: 278065 - RNA, 21 nt, Artificial Sequence
  Synthetic
caaagugcuaggauuacaggc

SEQ ID NO: 278066 - RNA, 22 nt, Artificial Sequence
  Synthetic
ccaaagugcuaggauuacaggc

SEQ ID NO: 278067 - RNA, 23 nt, Artificial Sequence
  Synthetic
cccaaagugcuaggauuacaggc

SEQ ID NO: 278068 - RNA, 24 nt, Artificial Sequence
  Synthetic
ucccaaagugcuaggauuacaggc

SEQ ID NO: 278069 - RNA, 18 nt, Artificial Sequence
  Synthetic
agaccugggauuacaggc

SEQ ID NO: 278070 - RNA, 19 nt, Artificial Sequence
  Synthetic
gagaccugggauuacaggc

SEQ ID NO: 278071 - RNA, 20 nt, Artificial Sequence
  Synthetic
agagaccugggauuacaggc

SEQ ID NO: 278072 - RNA, 21 nt, Artificial Sequence
  Synthetic
cagagaccugggauuacaggc

SEQ ID NO: 278073 - RNA, 22 nt, Artificial Sequence
  Synthetic
ccagagaccugggauuacaggc

SEQ ID NO: 278074 - RNA, 23 nt, Artificial Sequence
  Synthetic
cccagagaccugggauuacaggc

SEQ ID NO: 278075 - RNA, 24 nt, Artificial Sequence
  Synthetic
ucccagagaccugggauuacaggc

SEQ ID NO: 278076 - RNA, 18 nt, Artificial Sequence
  Synthetic
agugcugggauuacaggc

SEQ ID NO: 278077 - RNA, 19 nt, Artificial Sequence
  Synthetic
aagugcugggauuacaggc

SEQ ID NO: 278078 - RNA, 21 nt, Artificial Sequence
  Synthetic
caaagugcugggauuacaggc

SEQ ID NO: 278079 - RNA, 22 nt, Artificial Sequence
  Synthetic
ccaaagugcugggauuacaggc

SEQ ID NO: 278080 - RNA, 23 nt, Artificial Sequence
  Synthetic
cccaaagugcugggauuacaggc

SEQ ID NO: 278081 - RNA, 24 nt, Artificial Sequence
  Synthetic
ccccaaagugcugggauuacaggc

SEQ ID NO: 278082 - RNA, 23 nt, Artificial Sequence
  Synthetic
uccaaagugcugggauuacaggc

SEQ ID NO: 278083 - RNA, 24 nt, Artificial Sequence
  Synthetic
uuccaaagugcugggauuacaggc

SEQ ID NO: 278084 - RNA, 22 nt, Artificial Sequence
  Synthetic
ucaaagugcugggauuacaggc

SEQ ID NO: 278085 - RNA, 23 nt, Artificial Sequence
  Synthetic
cucaaagugcugggauuacaggc

SEQ ID NO: 278086 - RNA, 24 nt, Artificial Sequence
  Synthetic
ucucaaagugcugggauuacaggc

SEQ ID NO: 278087 - RNA, 21 nt, Artificial Sequence
  Synthetic
gaaagugcugggauuacaggc

SEQ ID NO: 278088 - RNA, 22 nt, Artificial Sequence
  Synthetic
cgaaagugcugggauuacaggc

SEQ ID NO: 278089 - RNA, 23 nt, Artificial Sequence
  Synthetic
ccgaaagugcugggauuacaggc

SEQ ID NO: 278090 - RNA, 24 nt, Artificial Sequence
  Synthetic
uccgaaagugcugggauuacaggc

SEQ ID NO: 278091 - RNA, 20 nt, Artificial Sequence
  Synthetic
uaagugcugggauuacaggc

SEQ ID NO: 278092 - RNA, 21 nt, Artificial Sequence
  Synthetic
cuaagugcugggauuacaggc

SEQ ID NO: 278093 - RNA, 22 nt, Artificial Sequence
  Synthetic
ccuaagugcugggauuacaggc

SEQ ID NO: 278094 - RNA, 23 nt, Artificial Sequence
  Synthetic
cccuaagugcugggauuacaggc

SEQ ID NO: 278095 - RNA, 24 nt, Artificial Sequence
  Synthetic
ucccuaagugcugggauuacaggc

SEQ ID NO: 278096 - RNA, 19 nt, Artificial Sequence
  Synthetic
gagugcugggauuacaggc

SEQ ID NO: 278097 - RNA, 20 nt, Artificial Sequence
  Synthetic
agagugcugggauuacaggc

SEQ ID NO: 278098 - RNA, 21 nt, Artificial Sequence
  Synthetic
cagagugcugggauuacaggc

SEQ ID NO: 278099 - RNA, 22 nt, Artificial Sequence
  Synthetic
ccagagugcugggauuacaggc

SEQ ID NO: 278100 - RNA, 23 nt, Artificial Sequence
  Synthetic
cccagagugcugggauuacaggc

SEQ ID NO: 278101 - RNA, 24 nt, Artificial Sequence
  Synthetic
ucccagagugcugggauuacaggc

SEQ ID NO: 278102 - RNA, 19 nt, Artificial Sequence
  Synthetic
uagugcugggauuacaggc

SEQ ID NO: 278103 - RNA, 20 nt, Artificial Sequence
  Synthetic
auagugcugggauuacaggc

SEQ ID NO: 278104 - RNA, 21 nt, Artificial Sequence
  Synthetic
cauagugcugggauuacaggc

SEQ ID NO: 278105 - RNA, 22 nt, Artificial Sequence
  Synthetic
ccauagugcugggauuacaggc

SEQ ID NO: 278106 - RNA, 23 nt, Artificial Sequence
  Synthetic
cccauagugcugggauuacaggc

SEQ ID NO: 278107 - RNA, 24 nt, Artificial Sequence
  Synthetic
ucccauagugcugggauuacaggc

SEQ ID NO: 278108 - RNA, 18 nt, Artificial Sequence
  Synthetic
aguggugggauuacaggc

SEQ ID NO: 278109 - RNA, 19 nt, Artificial Sequence
  Synthetic
aaguggugggauuacaggc

SEQ ID NO: 278110 - RNA, 20 nt, Artificial Sequence
  Synthetic
aaaguggugggauuacaggc

SEQ ID NO: 278111 - RNA, 21 nt, Artificial Sequence
  Synthetic
caaaguggugggauuacaggc

SEQ ID NO: 278112 - RNA, 22 nt, Artificial Sequence
  Synthetic
ccaaaguggugggauuacaggc

SEQ ID NO: 278113 - RNA, 23 nt, Artificial Sequence
  Synthetic
cccaaaguggugggauuacaggc

SEQ ID NO: 278114 - RNA, 24 nt, Artificial Sequence
  Synthetic
ucccaaaguggugggauuacaggc

SEQ ID NO: 278115 - RNA, 18 nt, Artificial Sequence
  Synthetic
agcaccuggauuacaggc

SEQ ID NO: 278116 - RNA, 19 nt, Artificial Sequence
  Synthetic
aagcaccuggauuacaggc

SEQ ID NO: 278117 - RNA, 20 nt, Artificial Sequence
  Synthetic
aaagcaccuggauuacaggc

SEQ ID NO: 278118 - RNA, 21 nt, Artificial Sequence
  Synthetic
caaagcaccuggauuacaggc

SEQ ID NO: 278119 - RNA, 22 nt, Artificial Sequence
  Synthetic
ccaaagcaccuggauuacaggc

SEQ ID NO: 278120 - RNA, 23 nt, Artificial Sequence
  Synthetic
cccaaagcaccuggauuacaggc

SEQ ID NO: 278121 - RNA, 24 nt, Artificial Sequence
  Synthetic
ucccaaagcaccuggauuacaggc

SEQ ID NO: 278122 - RNA, 18 nt, Artificial Sequence
  Synthetic
auugcugauauuacaggc

SEQ ID NO: 278123 - RNA, 19 nt, Artificial Sequence
  Synthetic
aauugcugauauuacaggc

SEQ ID NO: 278124 - RNA, 20 nt, Artificial Sequence
  Synthetic
aaauugcugauauuacaggc

SEQ ID NO: 278125 - RNA, 21 nt, Artificial Sequence
  Synthetic
caaauugcugauauuacaggc

SEQ ID NO: 278126 - RNA, 22 nt, Artificial Sequence
  Synthetic
ccaaauugcugauauuacaggc

SEQ ID NO: 278127 - RNA, 23 nt, Artificial Sequence
  Synthetic
cccaaauugcugauauuacaggc

SEQ ID NO: 278128 - RNA, 24 nt, Artificial Sequence
  Synthetic
ucccaaauugcugauauuacaggc

SEQ ID NO: 278129 - RNA, 18 nt, Artificial Sequence
  Synthetic
agugcugguauuacaggc

SEQ ID NO: 278130 - RNA, 19 nt, Artificial Sequence
  Synthetic
aagugcugguauuacaggc

SEQ ID NO: 278131 - RNA, 20 nt, Artificial Sequence
  Synthetic
aaagugcugguauuacaggc

SEQ ID NO: 278132 - RNA, 21 nt, Artificial Sequence
  Synthetic
caaagugcugguauuacaggc

SEQ ID NO: 278133 - RNA, 22 nt, Artificial Sequence
  Synthetic
ccaaagugcugguauuacaggc

SEQ ID NO: 278134 - RNA, 23 nt, Artificial Sequence
  Synthetic
cccaaagugcugguauuacaggc

SEQ ID NO: 278135 - RNA, 24 nt, Artificial Sequence
  Synthetic
ucccaaagugcugguauuacaggc

SEQ ID NO: 278136 - RNA, 18 nt, Artificial Sequence
  Synthetic
agcgcuaggguuacaggc

SEQ ID NO: 278137 - RNA, 19 nt, Artificial Sequence
  Synthetic
aagcgcuaggguuacaggc

SEQ ID NO: 278138 - RNA, 20 nt, Artificial Sequence
  Synthetic
uaagcgcuaggguuacaggc

SEQ ID NO: 278139 - RNA, 21 nt, Artificial Sequence
  Synthetic
cuaagcgcuaggguuacaggc

SEQ ID NO: 278140 - RNA, 22 nt, Artificial Sequence
  Synthetic
ccuaagcgcuaggguuacaggc

SEQ ID NO: 278141 - RNA, 23 nt, Artificial Sequence
  Synthetic
cccuaagcgcuaggguuacaggc

SEQ ID NO: 278142 - RNA, 24 nt, Artificial Sequence
  Synthetic
ucccuaagcgcuaggguuacaggc

SEQ ID NO: 278143 - RNA, 18 nt, Artificial Sequence
  Synthetic
agugcuggguuuacaggc

SEQ ID NO: 278144 - RNA, 19 nt, Artificial Sequence
  Synthetic
aagugcuggguuuacaggc

SEQ ID NO: 278145 - RNA, 20 nt, Artificial Sequence
  Synthetic
aaagugcuggguuuacaggc

SEQ ID NO: 278146 - RNA, 21 nt, Artificial Sequence
  Synthetic
caaagugcuggguuuacaggc

SEQ ID NO: 278147 - RNA, 22 nt, Artificial Sequence
  Synthetic
ccaaagugcuggguuuacaggc

SEQ ID NO: 278148 - RNA, 23 nt, Artificial Sequence
  Synthetic
cccaaagugcuggguuuacaggc

SEQ ID NO: 278149 - RNA, 24 nt, Artificial Sequence
  Synthetic
ucccaaagugcuggguuuacaggc

SEQ ID NO: 278150 - RNA, 18 nt, Artificial Sequence
  Synthetic
uguaaugaauaaccaggc

SEQ ID NO: 278151 - RNA, 19 nt, Artificial Sequence
  Synthetic
guguaaugaauaaccaggc

SEQ ID NO: 278152 - RNA, 20 nt, Artificial Sequence
  Synthetic
aguguaaugaauaaccaggc

SEQ ID NO: 278153 - RNA, 21 nt, Artificial Sequence
  Synthetic
aaguguaaugaauaaccaggc

SEQ ID NO: 278154 - RNA, 22 nt, Artificial Sequence
  Synthetic
gaaguguaaugaauaaccaggc

SEQ ID NO: 278155 - RNA, 23 nt, Artificial Sequence
  Synthetic
ugaaguguaaugaauaaccaggc

SEQ ID NO: 278156 - RNA, 24 nt, Artificial Sequence
  Synthetic
gugaaguguaaugaauaaccaggc

SEQ ID NO: 278157 - RNA, 18 nt, Artificial Sequence
  Synthetic
acaacuauggcaccaggc

SEQ ID NO: 278158 - RNA, 19 nt, Artificial Sequence
  Synthetic
cacaacuauggcaccaggc

SEQ ID NO: 278159 - RNA, 20 nt, Artificial Sequence
  Synthetic
ucacaacuauggcaccaggc

SEQ ID NO: 278160 - RNA, 21 nt, Artificial Sequence
  Synthetic
cucacaacuauggcaccaggc

SEQ ID NO: 278161 - RNA, 22 nt, Artificial Sequence
  Synthetic
ccucacaacuauggcaccaggc

SEQ ID NO: 278162 - RNA, 23 nt, Artificial Sequence
  Synthetic
accucacaacuauggcaccaggc

SEQ ID NO: 278163 - RNA, 24 nt, Artificial Sequence
  Synthetic
gaccucacaacuauggcaccaggc

SEQ ID NO: 278164 - RNA, 18 nt, Artificial Sequence
  Synthetic
uucuggcccagcccaggc

SEQ ID NO: 278165 - RNA, 19 nt, Artificial Sequence
  Synthetic
guucuggcccagcccaggc

SEQ ID NO: 278166 - RNA, 20 nt, Artificial Sequence
  Synthetic
gguucuggcccagcccaggc

SEQ ID NO: 278167 - RNA, 21 nt, Artificial Sequence
  Synthetic
agguucuggcccagcccaggc

SEQ ID NO: 278168 - RNA, 22 nt, Artificial Sequence
  Synthetic
cagguucuggcccagcccaggc

SEQ ID NO: 278169 - RNA, 23 nt, Artificial Sequence
  Synthetic
ccagguucuggcccagcccaggc

SEQ ID NO: 278170 - RNA, 24 nt, Artificial Sequence
  Synthetic
gccagguucuggcccagcccaggc

SEQ ID NO: 278171 - RNA, 18 nt, Artificial Sequence
  Synthetic
cggggugaaugcccaggc

SEQ ID NO: 278172 - RNA, 19 nt, Artificial Sequence
  Synthetic
acggggugaaugcccaggc

SEQ ID NO: 278173 - RNA, 20 nt, Artificial Sequence
  Synthetic
aacggggugaaugcccaggc

SEQ ID NO: 278174 - RNA, 21 nt, Artificial Sequence
  Synthetic
aaacggggugaaugcccaggc

SEQ ID NO: 278175 - RNA, 22 nt, Artificial Sequence
  Synthetic
gaaacggggugaaugcccaggc

SEQ ID NO: 278176 - RNA, 23 nt, Artificial Sequence
  Synthetic
agaaacggggugaaugcccaggc

SEQ ID NO: 278177 - RNA, 24 nt, Artificial Sequence
  Synthetic
aagaaacggggugaaugcccaggc

SEQ ID NO: 278178 - RNA, 18 nt, Artificial Sequence
  Synthetic
uugcucuguugcccaggc

SEQ ID NO: 278179 - RNA, 19 nt, Artificial Sequence
  Synthetic
cuugcucuguugcccaggc

SEQ ID NO: 278180 - RNA, 20 nt, Artificial Sequence
  Synthetic
ucuugcucuguugcccaggc

SEQ ID NO: 278181 - RNA, 24 nt, Artificial Sequence
  Synthetic
ggagucuugcucuguugcccaggc

SEQ ID NO: 278182 - RNA, 18 nt, Artificial Sequence
  Synthetic
gguguuuuauggccaggc

SEQ ID NO: 278183 - RNA, 19 nt, Artificial Sequence
  Synthetic
ugguguuuuauggccaggc

SEQ ID NO: 278184 - RNA, 20 nt, Artificial Sequence
  Synthetic
augguguuuuauggccaggc

SEQ ID NO: 278185 - RNA, 21 nt, Artificial Sequence
  Synthetic
caugguguuuuauggccaggc

SEQ ID NO: 278186 - RNA, 22 nt, Artificial Sequence
  Synthetic
ccaugguguuuuauggccaggc

SEQ ID NO: 278187 - RNA, 23 nt, Artificial Sequence
  Synthetic
uccaugguguuuuauggccaggc

SEQ ID NO: 278188 - RNA, 24 nt, Artificial Sequence
  Synthetic
auccaugguguuuuauggccaggc

SEQ ID NO: 278189 - RNA, 18 nt, Artificial Sequence
  Synthetic
ccacccaagacuccaggc

SEQ ID NO: 278190 - RNA, 19 nt, Artificial Sequence
  Synthetic
uccacccaagacuccaggc

SEQ ID NO: 278191 - RNA, 20 nt, Artificial Sequence
  Synthetic
uuccacccaagacuccaggc

SEQ ID NO: 278192 - RNA, 21 nt, Artificial Sequence
  Synthetic
auuccacccaagacuccaggc

SEQ ID NO: 278193 - RNA, 22 nt, Artificial Sequence
  Synthetic
cauuccacccaagacuccaggc

SEQ ID NO: 278194 - RNA, 23 nt, Artificial Sequence
  Synthetic
acauuccacccaagacuccaggc

SEQ ID NO: 278195 - RNA, 24 nt, Artificial Sequence
  Synthetic
aacauuccacccaagacuccaggc

SEQ ID NO: 278196 - RNA, 18 nt, Artificial Sequence
  Synthetic
aaagcagcagcuccaggc

SEQ ID NO: 278197 - RNA, 19 nt, Artificial Sequence
  Synthetic
caaagcagcagcuccaggc

SEQ ID NO: 278198 - RNA, 20 nt, Artificial Sequence
  Synthetic
acaaagcagcagcuccaggc

SEQ ID NO: 278199 - RNA, 21 nt, Artificial Sequence
  Synthetic
uacaaagcagcagcuccaggc

SEQ ID NO: 278200 - RNA, 22 nt, Artificial Sequence
  Synthetic
cuacaaagcagcagcuccaggc

SEQ ID NO: 278201 - RNA, 23 nt, Artificial Sequence
  Synthetic
ccuacaaagcagcagcuccaggc

SEQ ID NO: 278202 - RNA, 24 nt, Artificial Sequence
  Synthetic
gccuacaaagcagcagcuccaggc

SEQ ID NO: 278203 - RNA, 18 nt, Artificial Sequence
  Synthetic
auucuucuuucuccaggc

SEQ ID NO: 278204 - RNA, 19 nt, Artificial Sequence
  Synthetic
uauucuucuuucuccaggc

SEQ ID NO: 278205 - RNA, 20 nt, Artificial Sequence
  Synthetic
uuauucuucuuucuccaggc

SEQ ID NO: 278206 - RNA, 21 nt, Artificial Sequence
  Synthetic
uuuauucuucuuucuccaggc

SEQ ID NO: 278207 - RNA, 22 nt, Artificial Sequence
  Synthetic
uuuuauucuucuuucuccaggc

SEQ ID NO: 278208 - RNA, 23 nt, Artificial Sequence
  Synthetic
auuuuauucuucuuucuccaggc

SEQ ID NO: 278209 - RNA, 24 nt, Artificial Sequence
  Synthetic
aauuuuauucuucuuucuccaggc

SEQ ID NO: 278210 - RNA, 18 nt, Artificial Sequence
  Synthetic
uaaguuacuuguccaggc

SEQ ID NO: 278211 - RNA, 19 nt, Artificial Sequence
  Synthetic
uuaaguuacuuguccaggc

SEQ ID NO: 278212 - RNA, 20 nt, Artificial Sequence
  Synthetic
cuuaaguuacuuguccaggc

SEQ ID NO: 278213 - RNA, 21 nt, Artificial Sequence
  Synthetic
acuuaaguuacuuguccaggc

SEQ ID NO: 278214 - RNA, 22 nt, Artificial Sequence
  Synthetic
aacuuaaguuacuuguccaggc

SEQ ID NO: 278215 - RNA, 23 nt, Artificial Sequence
  Synthetic
uaacuuaaguuacuuguccaggc

SEQ ID NO: 278216 - RNA, 24 nt, Artificial Sequence
  Synthetic
uuaacuuaaguuacuuguccaggc

SEQ ID NO: 278217 - RNA, 18 nt, Artificial Sequence
  Synthetic
gggaaaauuauuccaggc

SEQ ID NO: 278218 - RNA, 19 nt, Artificial Sequence
  Synthetic
ugggaaaauuauuccaggc

SEQ ID NO: 278219 - RNA, 20 nt, Artificial Sequence
  Synthetic
cugggaaaauuauuccaggc

SEQ ID NO: 278220 - RNA, 21 nt, Artificial Sequence
  Synthetic
ucugggaaaauuauuccaggc

SEQ ID NO: 278221 - RNA, 22 nt, Artificial Sequence
  Synthetic
uucugggaaaauuauuccaggc

SEQ ID NO: 278222 - RNA, 23 nt, Artificial Sequence
  Synthetic
uuucugggaaaauuauuccaggc

SEQ ID NO: 278223 - RNA, 24 nt, Artificial Sequence
  Synthetic
auuucugggaaaauuauuccaggc

SEQ ID NO: 278224 - RNA, 18 nt, Artificial Sequence
  Synthetic
ggggagaguguuccaggc

SEQ ID NO: 278225 - RNA, 19 nt, Artificial Sequence
  Synthetic
aggggagaguguuccaggc

SEQ ID NO: 278226 - RNA, 20 nt, Artificial Sequence
  Synthetic
uaggggagaguguuccaggc

SEQ ID NO: 278227 - RNA, 21 nt, Artificial Sequence
  Synthetic
guaggggagaguguuccaggc

SEQ ID NO: 278228 - RNA, 22 nt, Artificial Sequence
  Synthetic
aguaggggagaguguuccaggc

SEQ ID NO: 278229 - RNA, 23 nt, Artificial Sequence
  Synthetic
aaguaggggagaguguuccaggc

SEQ ID NO: 278230 - RNA, 24 nt, Artificial Sequence
  Synthetic
caaguaggggagaguguuccaggc

SEQ ID NO: 278231 - RNA, 18 nt, Artificial Sequence
  Synthetic
ccaacaaauuuuccaggc

SEQ ID NO: 278232 - RNA, 19 nt, Artificial Sequence
  Synthetic
uccaacaaauuuuccaggc

SEQ ID NO: 278233 - RNA, 20 nt, Artificial Sequence
  Synthetic
auccaacaaauuuuccaggc

SEQ ID NO: 278234 - RNA, 21 nt, Artificial Sequence
  Synthetic
cauccaacaaauuuuccaggc

SEQ ID NO: 278235 - RNA, 22 nt, Artificial Sequence
  Synthetic
ucauccaacaaauuuuccaggc

SEQ ID NO: 278236 - RNA, 23 nt, Artificial Sequence
  Synthetic
aucauccaacaaauuuuccaggc

SEQ ID NO: 278237 - RNA, 24 nt, Artificial Sequence
  Synthetic
caucauccaacaaauuuuccaggc

SEQ ID NO: 278238 - RNA, 18 nt, Artificial Sequence
  Synthetic
gaaagaaugcaagcaggc

SEQ ID NO: 278239 - RNA, 19 nt, Artificial Sequence
  Synthetic
ggaaagaaugcaagcaggc

SEQ ID NO: 278240 - RNA, 20 nt, Artificial Sequence
  Synthetic
uggaaagaaugcaagcaggc

SEQ ID NO: 278241 - RNA, 21 nt, Artificial Sequence
  Synthetic
uuggaaagaaugcaagcaggc

SEQ ID NO: 278242 - RNA, 22 nt, Artificial Sequence
  Synthetic
guuggaaagaaugcaagcaggc

SEQ ID NO: 278243 - RNA, 23 nt, Artificial Sequence
  Synthetic
aguuggaaagaaugcaagcaggc

SEQ ID NO: 278244 - RNA, 24 nt, Artificial Sequence
  Synthetic
uaguuggaaagaaugcaagcaggc

SEQ ID NO: 278245 - RNA, 18 nt, Artificial Sequence
  Synthetic
ucuuacaugacagcaggc

SEQ ID NO: 278246 - RNA, 19 nt, Artificial Sequence
  Synthetic
uucuuacaugacagcaggc

SEQ ID NO: 278247 - RNA, 20 nt, Artificial Sequence
  Synthetic
cuucuuacaugacagcaggc

SEQ ID NO: 278248 - RNA, 21 nt, Artificial Sequence
  Synthetic
acuucuuacaugacagcaggc

SEQ ID NO: 278249 - RNA, 22 nt, Artificial Sequence
  Synthetic
cacuucuuacaugacagcaggc

SEQ ID NO: 278250 - RNA, 23 nt, Artificial Sequence
  Synthetic
gcacuucuuacaugacagcaggc

SEQ ID NO: 278251 - RNA, 24 nt, Artificial Sequence
  Synthetic
ggcacuucuuacaugacagcaggc

SEQ ID NO: 278252 - RNA, 18 nt, Artificial Sequence
  Synthetic
agccacagaagagcaggc

SEQ ID NO: 278253 - RNA, 19 nt, Artificial Sequence
  Synthetic
cagccacagaagagcaggc

SEQ ID NO: 278254 - RNA, 20 nt, Artificial Sequence
  Synthetic
acagccacagaagagcaggc

SEQ ID NO: 278255 - RNA, 21 nt, Artificial Sequence
  Synthetic
aacagccacagaagagcaggc

SEQ ID NO: 278256 - RNA, 22 nt, Artificial Sequence
  Synthetic
gaacagccacagaagagcaggc

SEQ ID NO: 278257 - RNA, 23 nt, Artificial Sequence
  Synthetic
ugaacagccacagaagagcaggc

SEQ ID NO: 278258 - RNA, 24 nt, Artificial Sequence
  Synthetic
augaacagccacagaagagcaggc

SEQ ID NO: 278259 - RNA, 18 nt, Artificial Sequence
  Synthetic
cccacuugcagagcaggc

SEQ ID NO: 278260 - RNA, 19 nt, Artificial Sequence
  Synthetic
ucccacuugcagagcaggc

SEQ ID NO: 278261 - RNA, 20 nt, Artificial Sequence
  Synthetic
cucccacuugcagagcaggc

SEQ ID NO: 278262 - RNA, 21 nt, Artificial Sequence
  Synthetic
ucucccacuugcagagcaggc

SEQ ID NO: 278263 - RNA, 22 nt, Artificial Sequence
  Synthetic
cucucccacuugcagagcaggc

SEQ ID NO: 278264 - RNA, 23 nt, Artificial Sequence
  Synthetic
gcucucccacuugcagagcaggc

SEQ ID NO: 278265 - RNA, 24 nt, Artificial Sequence
  Synthetic
agcucucccacuugcagagcaggc

SEQ ID NO: 278266 - RNA, 18 nt, Artificial Sequence
  Synthetic
gcuuacaugguggcaggc

SEQ ID NO: 278267 - RNA, 19 nt, Artificial Sequence
  Synthetic
ggcuuacaugguggcaggc

SEQ ID NO: 278268 - RNA, 20 nt, Artificial Sequence
  Synthetic
uggcuuacaugguggcaggc

SEQ ID NO: 278269 - RNA, 21 nt, Artificial Sequence
  Synthetic
auggcuuacaugguggcaggc

SEQ ID NO: 278270 - RNA, 22 nt, Artificial Sequence
  Synthetic
cauggcuuacaugguggcaggc

SEQ ID NO: 278271 - RNA, 23 nt, Artificial Sequence
  Synthetic
gcauggcuuacaugguggcaggc

SEQ ID NO: 278272 - RNA, 24 nt, Artificial Sequence
  Synthetic
ggcauggcuuacaugguggcaggc

SEQ ID NO: 278273 - RNA, 18 nt, Artificial Sequence
  Synthetic
acgagcugacuugcaggc

SEQ ID NO: 278274 - RNA, 19 nt, Artificial Sequence
  Synthetic
aacgagcugacuugcaggc

SEQ ID NO: 278275 - RNA, 20 nt, Artificial Sequence
  Synthetic
aaacgagcugacuugcaggc

SEQ ID NO: 278276 - RNA, 21 nt, Artificial Sequence
  Synthetic
aaaacgagcugacuugcaggc

SEQ ID NO: 278277 - RNA, 22 nt, Artificial Sequence
  Synthetic
aaaaacgagcugacuugcaggc

SEQ ID NO: 278278 - RNA, 23 nt, Artificial Sequence
  Synthetic
gaaaaacgagcugacuugcaggc

SEQ ID NO: 278279 - RNA, 24 nt, Artificial Sequence
  Synthetic
agaaaaacgagcugacuugcaggc

SEQ ID NO: 278280 - RNA, 18 nt, Artificial Sequence
  Synthetic
uggccaggacaaucaggc

SEQ ID NO: 278281 - RNA, 19 nt, Artificial Sequence
  Synthetic
uuggccaggacaaucaggc

SEQ ID NO: 278282 - RNA, 20 nt, Artificial Sequence
  Synthetic
uuuggccaggacaaucaggc

SEQ ID NO: 278283 - RNA, 21 nt, Artificial Sequence
  Synthetic
uuuuggccaggacaaucaggc

SEQ ID NO: 278284 - RNA, 22 nt, Artificial Sequence
  Synthetic
guuuuggccaggacaaucaggc

SEQ ID NO: 278285 - RNA, 23 nt, Artificial Sequence
  Synthetic
aguuuuggccaggacaaucaggc

SEQ ID NO: 278286 - RNA, 24 nt, Artificial Sequence
  Synthetic
aaguuuuggccaggacaaucaggc

SEQ ID NO: 278287 - RNA, 18 nt, Artificial Sequence
  Synthetic
uggccagggcaaucaggc

SEQ ID NO: 278288 - RNA, 19 nt, Artificial Sequence
  Synthetic
cuggccagggcaaucaggc

SEQ ID NO: 278289 - RNA, 20 nt, Artificial Sequence
  Synthetic
ucuggccagggcaaucaggc

SEQ ID NO: 278290 - RNA, 18 nt, Artificial Sequence
  Synthetic
cuaucaaguaccucaggc

SEQ ID NO: 278291 - RNA, 19 nt, Artificial Sequence
  Synthetic
acuaucaaguaccucaggc

SEQ ID NO: 278292 - RNA, 20 nt, Artificial Sequence
  Synthetic
aacuaucaaguaccucaggc

SEQ ID NO: 278293 - RNA, 21 nt, Artificial Sequence
  Synthetic
uaacuaucaaguaccucaggc

SEQ ID NO: 278294 - RNA, 22 nt, Artificial Sequence
  Synthetic
cuaacuaucaaguaccucaggc

SEQ ID NO: 278295 - RNA, 23 nt, Artificial Sequence
  Synthetic
acuaacuaucaaguaccucaggc

SEQ ID NO: 278296 - RNA, 24 nt, Artificial Sequence
  Synthetic
cacuaacuaucaaguaccucaggc

SEQ ID NO: 278297 - RNA, 18 nt, Artificial Sequence
  Synthetic
uguacuggaaguucaggc

SEQ ID NO: 278298 - RNA, 19 nt, Artificial Sequence
  Synthetic
uuguacuggaaguucaggc

SEQ ID NO: 278299 - RNA, 20 nt, Artificial Sequence
  Synthetic
auuguacuggaaguucaggc

SEQ ID NO: 278300 - RNA, 21 nt, Artificial Sequence
  Synthetic
uauuguacuggaaguucaggc

SEQ ID NO: 278301 - RNA, 22 nt, Artificial Sequence
  Synthetic
guauuguacuggaaguucaggc

SEQ ID NO: 278302 - RNA, 23 nt, Artificial Sequence
  Synthetic
aguauuguacuggaaguucaggc

SEQ ID NO: 278303 - RNA, 24 nt, Artificial Sequence
  Synthetic
caguauuguacuggaaguucaggc

SEQ ID NO: 278304 - RNA, 18 nt, Artificial Sequence
  Synthetic
aaaaacauaauuucaggc

SEQ ID NO: 278305 - RNA, 19 nt, Artificial Sequence
  Synthetic
aaaaaacauaauuucaggc

SEQ ID NO: 278306 - RNA, 20 nt, Artificial Sequence
  Synthetic
aaaaaaacauaauuucaggc

SEQ ID NO: 278307 - RNA, 21 nt, Artificial Sequence
  Synthetic
aaaaaaaacauaauuucaggc

SEQ ID NO: 278308 - RNA, 22 nt, Artificial Sequence
  Synthetic
aaaaaaaaacauaauuucaggc

SEQ ID NO: 278309 - RNA, 23 nt, Artificial Sequence
  Synthetic
aaaaaaaaaacauaauuucaggc

SEQ ID NO: 278310 - RNA, 24 nt, Artificial Sequence
  Synthetic
uaaaaaaaaaacauaauuucaggc

SEQ ID NO: 278311 - RNA, 18 nt, Artificial Sequence
  Synthetic
cuccuuaagcuuucaggc

SEQ ID NO: 278312 - RNA, 19 nt, Artificial Sequence
  Synthetic
ucuccuuaagcuuucaggc

SEQ ID NO: 278313 - RNA, 20 nt, Artificial Sequence
  Synthetic
aucuccuuaagcuuucaggc

SEQ ID NO: 278314 - RNA, 21 nt, Artificial Sequence
  Synthetic
caucuccuuaagcuuucaggc

SEQ ID NO: 278315 - RNA, 22 nt, Artificial Sequence
  Synthetic
ucaucuccuuaagcuuucaggc

SEQ ID NO: 278316 - RNA, 23 nt, Artificial Sequence
  Synthetic
cucaucuccuuaagcuuucaggc

SEQ ID NO: 278317 - RNA, 24 nt, Artificial Sequence
  Synthetic
acucaucuccuuaagcuuucaggc

SEQ ID NO: 278318 - RNA, 18 nt, Artificial Sequence
  Synthetic
guuucagguguuucaggc

SEQ ID NO: 278319 - RNA, 19 nt, Artificial Sequence
  Synthetic
uguuucagguguuucaggc

SEQ ID NO: 278320 - RNA, 20 nt, Artificial Sequence
  Synthetic
guguuucagguguuucaggc

SEQ ID NO: 278321 - RNA, 21 nt, Artificial Sequence
  Synthetic
aguguuucagguguuucaggc

SEQ ID NO: 278322 - RNA, 22 nt, Artificial Sequence
  Synthetic
aaguguuucagguguuucaggc

SEQ ID NO: 278323 - RNA, 23 nt, Artificial Sequence
  Synthetic
uaaguguuucagguguuucaggc

SEQ ID NO: 278324 - RNA, 24 nt, Artificial Sequence
  Synthetic
uuaaguguuucagguguuucaggc

SEQ ID NO: 278325 - RNA, 18 nt, Artificial Sequence
  Synthetic
uaaaccuuccaaagaggc

SEQ ID NO: 278326 - RNA, 19 nt, Artificial Sequence
  Synthetic
cuaaaccuuccaaagaggc

SEQ ID NO: 278327 - RNA, 20 nt, Artificial Sequence
  Synthetic
gcuaaaccuuccaaagaggc

SEQ ID NO: 278328 - RNA, 21 nt, Artificial Sequence
  Synthetic
ggcuaaaccuuccaaagaggc

SEQ ID NO: 278329 - RNA, 22 nt, Artificial Sequence
  Synthetic
aggcuaaaccuuccaaagaggc

SEQ ID NO: 278330 - RNA, 23 nt, Artificial Sequence
  Synthetic
uaggcuaaaccuuccaaagaggc

SEQ ID NO: 278331 - RNA, 24 nt, Artificial Sequence
  Synthetic
cuaggcuaaaccuuccaaagaggc

SEQ ID NO: 278332 - RNA, 18 nt, Artificial Sequence
  Synthetic
gaugauaaagaaagaggc

SEQ ID NO: 278333 - RNA, 19 nt, Artificial Sequence
  Synthetic
agaugauaaagaaagaggc

SEQ ID NO: 278334 - RNA, 20 nt, Artificial Sequence
  Synthetic
gagaugauaaagaaagaggc

SEQ ID NO: 278335 - RNA, 21 nt, Artificial Sequence
  Synthetic
ggagaugauaaagaaagaggc

SEQ ID NO: 278336 - RNA, 22 nt, Artificial Sequence
  Synthetic
uggagaugauaaagaaagaggc

SEQ ID NO: 278337 - RNA, 23 nt, Artificial Sequence
  Synthetic
cuggagaugauaaagaaagaggc

SEQ ID NO: 278338 - RNA, 24 nt, Artificial Sequence
  Synthetic
ccuggagaugauaaagaaagaggc

SEQ ID NO: 278339 - RNA, 18 nt, Artificial Sequence
  Synthetic
cucucaggggaaagaggc

SEQ ID NO: 278340 - RNA, 19 nt, Artificial Sequence
  Synthetic
acucucaggggaaagaggc

SEQ ID NO: 278341 - RNA, 20 nt, Artificial Sequence
  Synthetic
gacucucaggggaaagaggc

SEQ ID NO: 278342 - RNA, 21 nt, Artificial Sequence
  Synthetic
ugacucucaggggaaagaggc

SEQ ID NO: 278343 - RNA, 22 nt, Artificial Sequence
  Synthetic
uugacucucaggggaaagaggc

SEQ ID NO: 278344 - RNA, 23 nt, Artificial Sequence
  Synthetic
uuugacucucaggggaaagaggc

SEQ ID NO: 278345 - RNA, 24 nt, Artificial Sequence
  Synthetic
cuuugacucucaggggaaagaggc

SEQ ID NO: 278346 - RNA, 18 nt, Artificial Sequence
  Synthetic
auaaaaguggcaagaggc

SEQ ID NO: 278347 - RNA, 19 nt, Artificial Sequence
  Synthetic
uauaaaaguggcaagaggc

SEQ ID NO: 278348 - RNA, 20 nt, Artificial Sequence
  Synthetic
guauaaaaguggcaagaggc

SEQ ID NO: 278349 - RNA, 21 nt, Artificial Sequence
  Synthetic
gguauaaaaguggcaagaggc

SEQ ID NO: 278350 - RNA, 22 nt, Artificial Sequence
  Synthetic
agguauaaaaguggcaagaggc

SEQ ID NO: 278351 - RNA, 23 nt, Artificial Sequence
  Synthetic
gagguauaaaaguggcaagaggc

SEQ ID NO: 278352 - RNA, 24 nt, Artificial Sequence
  Synthetic
ugagguauaaaaguggcaagaggc

SEQ ID NO: 278353 - RNA, 18 nt, Artificial Sequence
  Synthetic
gaccagcaaucaagaggc

SEQ ID NO: 278354 - RNA, 19 nt, Artificial Sequence
  Synthetic
agaccagcaaucaagaggc

SEQ ID NO: 278355 - RNA, 20 nt, Artificial Sequence
  Synthetic
aagaccagcaaucaagaggc

SEQ ID NO: 278356 - RNA, 21 nt, Artificial Sequence
  Synthetic
caagaccagcaaucaagaggc

SEQ ID NO: 278357 - RNA, 22 nt, Artificial Sequence
  Synthetic
acaagaccagcaaucaagaggc

SEQ ID NO: 278358 - RNA, 23 nt, Artificial Sequence
  Synthetic
aacaagaccagcaaucaagaggc

SEQ ID NO: 278359 - RNA, 24 nt, Artificial Sequence
  Synthetic
aaacaagaccagcaaucaagaggc

SEQ ID NO: 278360 - RNA, 18 nt, Artificial Sequence
  Synthetic
uagaagcaaggaagaggc

SEQ ID NO: 278361 - RNA, 19 nt, Artificial Sequence
  Synthetic
uuagaagcaaggaagaggc

SEQ ID NO: 278362 - RNA, 20 nt, Artificial Sequence
  Synthetic
auuagaagcaaggaagaggc

SEQ ID NO: 278363 - RNA, 21 nt, Artificial Sequence
  Synthetic
cauuagaagcaaggaagaggc

SEQ ID NO: 278364 - RNA, 22 nt, Artificial Sequence
  Synthetic
ucauuagaagcaaggaagaggc

SEQ ID NO: 278365 - RNA, 23 nt, Artificial Sequence
  Synthetic
aucauuagaagcaaggaagaggc

SEQ ID NO: 278366 - RNA, 24 nt, Artificial Sequence
  Synthetic
caucauuagaagcaaggaagaggc

SEQ ID NO: 278367 - RNA, 18 nt, Artificial Sequence
  Synthetic
uugugaacauuaagaggc

SEQ ID NO: 278368 - RNA, 19 nt, Artificial Sequence
  Synthetic
auugugaacauuaagaggc

SEQ ID NO: 278369 - RNA, 20 nt, Artificial Sequence
  Synthetic
aauugugaacauuaagaggc

SEQ ID NO: 278370 - RNA, 21 nt, Artificial Sequence
  Synthetic
caauugugaacauuaagaggc

SEQ ID NO: 278371 - RNA, 22 nt, Artificial Sequence
  Synthetic
acaauugugaacauuaagaggc

SEQ ID NO: 278372 - RNA, 23 nt, Artificial Sequence
  Synthetic
uacaauugugaacauuaagaggc

SEQ ID NO: 278373 - RNA, 24 nt, Artificial Sequence
  Synthetic
auacaauugugaacauuaagaggc

SEQ ID NO: 278374 - RNA, 18 nt, Artificial Sequence
  Synthetic
aucaugguuaacagaggc

SEQ ID NO: 278375 - RNA, 19 nt, Artificial Sequence
  Synthetic
aaucaugguuaacagaggc

SEQ ID NO: 278376 - RNA, 20 nt, Artificial Sequence
  Synthetic
gaaucaugguuaacagaggc

SEQ ID NO: 278377 - RNA, 21 nt, Artificial Sequence
  Synthetic
agaaucaugguuaacagaggc

SEQ ID NO: 278378 - RNA, 22 nt, Artificial Sequence
  Synthetic
uagaaucaugguuaacagaggc

SEQ ID NO: 278379 - RNA, 23 nt, Artificial Sequence
  Synthetic
guagaaucaugguuaacagaggc

SEQ ID NO: 278380 - RNA, 24 nt, Artificial Sequence
  Synthetic
aguagaaucaugguuaacagaggc

SEQ ID NO: 278381 - RNA, 18 nt, Artificial Sequence
  Synthetic
aaccagagucacagaggc

SEQ ID NO: 278382 - RNA, 19 nt, Artificial Sequence
  Synthetic
gaaccagagucacagaggc

SEQ ID NO: 278383 - RNA, 20 nt, Artificial Sequence
  Synthetic
agaaccagagucacagaggc

SEQ ID NO: 278384 - RNA, 21 nt, Artificial Sequence
  Synthetic
gagaaccagagucacagaggc

SEQ ID NO: 278385 - RNA, 22 nt, Artificial Sequence
  Synthetic
ugagaaccagagucacagaggc

SEQ ID NO: 278386 - RNA, 23 nt, Artificial Sequence
  Synthetic
augagaaccagagucacagaggc

SEQ ID NO: 278387 - RNA, 24 nt, Artificial Sequence
  Synthetic
caugagaaccagagucacagaggc

SEQ ID NO: 278388 - RNA, 18 nt, Artificial Sequence
  Synthetic
uacucgggaggcagaggc

SEQ ID NO: 278389 - RNA, 19 nt, Artificial Sequence
  Synthetic
cuacucgggaggcagaggc

SEQ ID NO: 278390 - RNA, 20 nt, Artificial Sequence
  Synthetic
acuacucgggaggcagaggc

SEQ ID NO: 278391 - RNA, 21 nt, Artificial Sequence
  Synthetic
aacuacucgggaggcagaggc

SEQ ID NO: 278392 - RNA, 22 nt, Artificial Sequence
  Synthetic
caacuacucgggaggcagaggc

SEQ ID NO: 278393 - RNA, 23 nt, Artificial Sequence
  Synthetic
ccaacuacucgggaggcagaggc

SEQ ID NO: 278394 - RNA, 24 nt, Artificial Sequence
  Synthetic
cccaacuacucgggaggcagaggc

SEQ ID NO: 278395 - RNA, 18 nt, Artificial Sequence
  Synthetic
caucaagugggcagaggc

SEQ ID NO: 278396 - RNA, 19 nt, Artificial Sequence
  Synthetic
ucaucaagugggcagaggc

SEQ ID NO: 278397 - RNA, 20 nt, Artificial Sequence
  Synthetic
gucaucaagugggcagaggc

SEQ ID NO: 278398 - RNA, 21 nt, Artificial Sequence
  Synthetic
ugucaucaagugggcagaggc

SEQ ID NO: 278399 - RNA, 22 nt, Artificial Sequence
  Synthetic
cugucaucaagugggcagaggc

SEQ ID NO: 278400 - RNA, 23 nt, Artificial Sequence
  Synthetic
gcugucaucaagugggcagaggc

SEQ ID NO: 278401 - RNA, 24 nt, Artificial Sequence
  Synthetic
ugcugucaucaagugggcagaggc

SEQ ID NO: 278402 - RNA, 18 nt, Artificial Sequence
  Synthetic
cacauguacuucagaggc

SEQ ID NO: 278403 - RNA, 19 nt, Artificial Sequence
  Synthetic
ccacauguacuucagaggc

SEQ ID NO: 278404 - RNA, 20 nt, Artificial Sequence
  Synthetic
cccacauguacuucagaggc

SEQ ID NO: 278405 - RNA, 21 nt, Artificial Sequence
  Synthetic
ucccacauguacuucagaggc

SEQ ID NO: 278406 - RNA, 22 nt, Artificial Sequence
  Synthetic
uucccacauguacuucagaggc

SEQ ID NO: 278407 - RNA, 23 nt, Artificial Sequence
  Synthetic
uuucccacauguacuucagaggc

SEQ ID NO: 278408 - RNA, 24 nt, Artificial Sequence
  Synthetic
uuuucccacauguacuucagaggc

SEQ ID NO: 278409 - RNA, 18 nt, Artificial Sequence
  Synthetic
agguccccgcagagaggc

SEQ ID NO: 278410 - RNA, 19 nt, Artificial Sequence
  Synthetic
aagguccccgcagagaggc

SEQ ID NO: 278411 - RNA, 20 nt, Artificial Sequence
  Synthetic
gaagguccccgcagagaggc

SEQ ID NO: 278412 - RNA, 21 nt, Artificial Sequence
  Synthetic
agaagguccccgcagagaggc

SEQ ID NO: 278413 - RNA, 22 nt, Artificial Sequence
  Synthetic
gagaagguccccgcagagaggc

SEQ ID NO: 278414 - RNA, 23 nt, Artificial Sequence
  Synthetic
agagaagguccccgcagagaggc

SEQ ID NO: 278415 - RNA, 24 nt, Artificial Sequence
  Synthetic
uagagaagguccccgcagagaggc

SEQ ID NO: 278416 - RNA, 18 nt, Artificial Sequence
  Synthetic
uuugaauguaggagaggc

SEQ ID NO: 278417 - RNA, 19 nt, Artificial Sequence
  Synthetic
cuuugaauguaggagaggc

SEQ ID NO: 278418 - RNA, 20 nt, Artificial Sequence
  Synthetic
ccuuugaauguaggagaggc

SEQ ID NO: 278419 - RNA, 21 nt, Artificial Sequence
  Synthetic
accuuugaauguaggagaggc

SEQ ID NO: 278420 - RNA, 22 nt, Artificial Sequence
  Synthetic
aaccuuugaauguaggagaggc

SEQ ID NO: 278421 - RNA, 23 nt, Artificial Sequence
  Synthetic
aaaccuuugaauguaggagaggc

SEQ ID NO: 278422 - RNA, 24 nt, Artificial Sequence
  Synthetic
gaaaccuuugaauguaggagaggc

SEQ ID NO: 278423 - RNA, 18 nt, Artificial Sequence
  Synthetic
uguagcuuuuggagaggc

SEQ ID NO: 278424 - RNA, 19 nt, Artificial Sequence
  Synthetic
guguagcuuuuggagaggc

SEQ ID NO: 278425 - RNA, 20 nt, Artificial Sequence
  Synthetic
uguguagcuuuuggagaggc

SEQ ID NO: 278426 - RNA, 21 nt, Artificial Sequence
  Synthetic
cuguguagcuuuuggagaggc

SEQ ID NO: 278427 - RNA, 22 nt, Artificial Sequence
  Synthetic
ucuguguagcuuuuggagaggc

SEQ ID NO: 278428 - RNA, 23 nt, Artificial Sequence
  Synthetic
gucuguguagcuuuuggagaggc

SEQ ID NO: 278429 - RNA, 24 nt, Artificial Sequence
  Synthetic
ggucuguguagcuuuuggagaggc

SEQ ID NO: 278430 - RNA, 18 nt, Artificial Sequence
  Synthetic
cugccaggaaugagaggc

SEQ ID NO: 278431 - RNA, 19 nt, Artificial Sequence
  Synthetic
gcugccaggaaugagaggc

SEQ ID NO: 278432 - RNA, 20 nt, Artificial Sequence
  Synthetic
ggcugccaggaaugagaggc

SEQ ID NO: 278433 - RNA, 21 nt, Artificial Sequence
  Synthetic
aggcugccaggaaugagaggc

SEQ ID NO: 278434 - RNA, 22 nt, Artificial Sequence
  Synthetic
aaggcugccaggaaugagaggc

SEQ ID NO: 278435 - RNA, 23 nt, Artificial Sequence
  Synthetic
aaaggcugccaggaaugagaggc

SEQ ID NO: 278436 - RNA, 24 nt, Artificial Sequence
  Synthetic
gaaaggcugccaggaaugagaggc

SEQ ID NO: 278437 - RNA, 18 nt, Artificial Sequence
  Synthetic
aucauaaacaauagaggc

SEQ ID NO: 278438 - RNA, 19 nt, Artificial Sequence
  Synthetic
caucauaaacaauagaggc

SEQ ID NO: 278439 - RNA, 20 nt, Artificial Sequence
  Synthetic
ucaucauaaacaauagaggc

SEQ ID NO: 278440 - RNA, 21 nt, Artificial Sequence
  Synthetic
cucaucauaaacaauagaggc

SEQ ID NO: 278441 - RNA, 22 nt, Artificial Sequence
  Synthetic
ucucaucauaaacaauagaggc

SEQ ID NO: 278442 - RNA, 23 nt, Artificial Sequence
  Synthetic
uucucaucauaaacaauagaggc

SEQ ID NO: 278443 - RNA, 24 nt, Artificial Sequence
  Synthetic
uuucucaucauaaacaauagaggc

SEQ ID NO: 278444 - RNA, 18 nt, Artificial Sequence
  Synthetic
uuucaugaucauagaggc

SEQ ID NO: 278445 - RNA, 19 nt, Artificial Sequence
  Synthetic
cuuucaugaucauagaggc

SEQ ID NO: 278446 - RNA, 20 nt, Artificial Sequence
  Synthetic
ucuuucaugaucauagaggc

SEQ ID NO: 278447 - RNA, 21 nt, Artificial Sequence
  Synthetic
uucuuucaugaucauagaggc

SEQ ID NO: 278448 - RNA, 22 nt, Artificial Sequence
  Synthetic
auucuuucaugaucauagaggc

SEQ ID NO: 278449 - RNA, 23 nt, Artificial Sequence
  Synthetic
cauucuuucaugaucauagaggc

SEQ ID NO: 278450 - RNA, 24 nt, Artificial Sequence
  Synthetic
acauucuuucaugaucauagaggc

SEQ ID NO: 278451 - RNA, 18 nt, Artificial Sequence
  Synthetic
gaugaaugauauagaggc

SEQ ID NO: 278452 - RNA, 19 nt, Artificial Sequence
  Synthetic
agaugaaugauauagaggc

SEQ ID NO: 278453 - RNA, 20 nt, Artificial Sequence
  Synthetic
gagaugaaugauauagaggc

SEQ ID NO: 278454 - RNA, 21 nt, Artificial Sequence
  Synthetic
agagaugaaugauauagaggc

SEQ ID NO: 278455 - RNA, 22 nt, Artificial Sequence
  Synthetic
gagagaugaaugauauagaggc

SEQ ID NO: 278456 - RNA, 23 nt, Artificial Sequence
  Synthetic
agagagaugaaugauauagaggc

SEQ ID NO: 278457 - RNA, 24 nt, Artificial Sequence
  Synthetic
gagagagaugaaugauauagaggc

SEQ ID NO: 278458 - RNA, 18 nt, Artificial Sequence
  Synthetic
cuacuuuuaugacgaggc

SEQ ID NO: 278459 - RNA, 19 nt, Artificial Sequence
  Synthetic
gcuacuuuuaugacgaggc

SEQ ID NO: 278460 - RNA, 20 nt, Artificial Sequence
  Synthetic
agcuacuuuuaugacgaggc

SEQ ID NO: 278461 - RNA, 21 nt, Artificial Sequence
  Synthetic
aagcuacuuuuaugacgaggc

SEQ ID NO: 278462 - RNA, 22 nt, Artificial Sequence
  Synthetic
aaagcuacuuuuaugacgaggc

SEQ ID NO: 278463 - RNA, 23 nt, Artificial Sequence
  Synthetic
aaaagcuacuuuuaugacgaggc

SEQ ID NO: 278464 - RNA, 24 nt, Artificial Sequence
  Synthetic
aaaaagcuacuuuuaugacgaggc

SEQ ID NO: 278465 - RNA, 18 nt, Artificial Sequence
  Synthetic
cugcuggagacaggaggc

SEQ ID NO: 278466 - RNA, 19 nt, Artificial Sequence
  Synthetic
acugcuggagacaggaggc

SEQ ID NO: 278467 - RNA, 20 nt, Artificial Sequence
  Synthetic
aacugcuggagacaggaggc

SEQ ID NO: 278468 - RNA, 21 nt, Artificial Sequence
  Synthetic
uaacugcuggagacaggaggc

SEQ ID NO: 278469 - RNA, 22 nt, Artificial Sequence
  Synthetic
cuaacugcuggagacaggaggc

SEQ ID NO: 278470 - RNA, 23 nt, Artificial Sequence
  Synthetic
gcuaacugcuggagacaggaggc

SEQ ID NO: 278471 - RNA, 24 nt, Artificial Sequence
  Synthetic
agcuaacugcuggagacaggaggc

SEQ ID NO: 278472 - RNA, 18 nt, Artificial Sequence
  Synthetic
ggaaguuucucaggaggc

SEQ ID NO: 278473 - RNA, 19 nt, Artificial Sequence
  Synthetic
gggaaguuucucaggaggc

SEQ ID NO: 278474 - RNA, 20 nt, Artificial Sequence
  Synthetic
ugggaaguuucucaggaggc

SEQ ID NO: 278475 - RNA, 21 nt, Artificial Sequence
  Synthetic
gugggaaguuucucaggaggc

SEQ ID NO: 278476 - RNA, 22 nt, Artificial Sequence
  Synthetic
ugugggaaguuucucaggaggc

SEQ ID NO: 278477 - RNA, 23 nt, Artificial Sequence
  Synthetic
gugugggaaguuucucaggaggc

SEQ ID NO: 278478 - RNA, 24 nt, Artificial Sequence
  Synthetic
ggugugggaaguuucucaggaggc

SEQ ID NO: 278479 - RNA, 18 nt, Artificial Sequence
  Synthetic
uagaacagaagaggaggc

SEQ ID NO: 278480 - RNA, 19 nt, Artificial Sequence
  Synthetic
cuagaacagaagaggaggc

SEQ ID NO: 278481 - RNA, 20 nt, Artificial Sequence
  Synthetic
gcuagaacagaagaggaggc

SEQ ID NO: 278482 - RNA, 21 nt, Artificial Sequence
  Synthetic
ggcuagaacagaagaggaggc

SEQ ID NO: 278483 - RNA, 22 nt, Artificial Sequence
  Synthetic
aggcuagaacagaagaggaggc

SEQ ID NO: 278484 - RNA, 23 nt, Artificial Sequence
  Synthetic
caggcuagaacagaagaggaggc

SEQ ID NO: 278485 - RNA, 24 nt, Artificial Sequence
  Synthetic
gcaggcuagaacagaagaggaggc

SEQ ID NO: 278486 - RNA, 18 nt, Artificial Sequence
  Synthetic
ggagacaagguaggaggc

SEQ ID NO: 278487 - RNA, 19 nt, Artificial Sequence
  Synthetic
aggagacaagguaggaggc

SEQ ID NO: 278488 - RNA, 20 nt, Artificial Sequence
  Synthetic
aaggagacaagguaggaggc

SEQ ID NO: 278489 - RNA, 21 nt, Artificial Sequence
  Synthetic
gaaggagacaagguaggaggc

SEQ ID NO: 278490 - RNA, 22 nt, Artificial Sequence
  Synthetic
agaaggagacaagguaggaggc

SEQ ID NO: 278491 - RNA, 23 nt, Artificial Sequence
  Synthetic
aagaaggagacaagguaggaggc

SEQ ID NO: 278492 - RNA, 24 nt, Artificial Sequence
  Synthetic
uaagaaggagacaagguaggaggc

SEQ ID NO: 278493 - RNA, 18 nt, Artificial Sequence
  Synthetic
cccaaaaauuagggaggc

SEQ ID NO: 278494 - RNA, 19 nt, Artificial Sequence
  Synthetic
gcccaaaaauuagggaggc

SEQ ID NO: 278495 - RNA, 20 nt, Artificial Sequence
  Synthetic
agcccaaaaauuagggaggc

SEQ ID NO: 278496 - RNA, 21 nt, Artificial Sequence
  Synthetic
aagcccaaaaauuagggaggc

SEQ ID NO: 278497 - RNA, 22 nt, Artificial Sequence
  Synthetic
aaagcccaaaaauuagggaggc

SEQ ID NO: 278498 - RNA, 23 nt, Artificial Sequence
  Synthetic
aaaagcccaaaaauuagggaggc

SEQ ID NO: 278499 - RNA, 24 nt, Artificial Sequence
  Synthetic
gaaaagcccaaaaauuagggaggc

SEQ ID NO: 278500 - RNA, 18 nt, Artificial Sequence
  Synthetic
ggccagcccaugggaggc

SEQ ID NO: 278501 - RNA, 19 nt, Artificial Sequence
  Synthetic
aggccagcccaugggaggc

SEQ ID NO: 278502 - RNA, 20 nt, Artificial Sequence
  Synthetic
gaggccagcccaugggaggc

SEQ ID NO: 278503 - RNA, 21 nt, Artificial Sequence
  Synthetic
agaggccagcccaugggaggc

SEQ ID NO: 278504 - RNA, 22 nt, Artificial Sequence
  Synthetic
aagaggccagcccaugggaggc

SEQ ID NO: 278505 - RNA, 23 nt, Artificial Sequence
  Synthetic
uaagaggccagcccaugggaggc

SEQ ID NO: 278506 - RNA, 24 nt, Artificial Sequence
  Synthetic
uuaagaggccagcccaugggaggc

SEQ ID NO: 278507 - RNA, 18 nt, Artificial Sequence
  Synthetic
ucaauuaaacauggaggc

SEQ ID NO: 278508 - RNA, 19 nt, Artificial Sequence
  Synthetic
aucaauuaaacauggaggc

SEQ ID NO: 278509 - RNA, 20 nt, Artificial Sequence
  Synthetic
gaucaauuaaacauggaggc

SEQ ID NO: 278510 - RNA, 21 nt, Artificial Sequence
  Synthetic
agaucaauuaaacauggaggc

SEQ ID NO: 278511 - RNA, 22 nt, Artificial Sequence
  Synthetic
gagaucaauuaaacauggaggc

SEQ ID NO: 278512 - RNA, 23 nt, Artificial Sequence
  Synthetic
agagaucaauuaaacauggaggc

SEQ ID NO: 278513 - RNA, 24 nt, Artificial Sequence
  Synthetic
gagagaucaauuaaacauggaggc

SEQ ID NO: 278514 - RNA, 18 nt, Artificial Sequence
  Synthetic
gcuuagcaaacuggaggc

SEQ ID NO: 278515 - RNA, 19 nt, Artificial Sequence
  Synthetic
agcuuagcaaacuggaggc

SEQ ID NO: 278516 - RNA, 20 nt, Artificial Sequence
  Synthetic
aagcuuagcaaacuggaggc

SEQ ID NO: 278517 - RNA, 21 nt, Artificial Sequence
  Synthetic
gaagcuuagcaaacuggaggc

SEQ ID NO: 278518 - RNA, 22 nt, Artificial Sequence
  Synthetic
ggaagcuuagcaaacuggaggc

SEQ ID NO: 278519 - RNA, 23 nt, Artificial Sequence
  Synthetic
aggaagcuuagcaaacuggaggc

SEQ ID NO: 278520 - RNA, 24 nt, Artificial Sequence
  Synthetic
gaggaagcuuagcaaacuggaggc

SEQ ID NO: 278521 - RNA, 18 nt, Artificial Sequence
  Synthetic
ucucaccguucuggaggc

SEQ ID NO: 278522 - RNA, 19 nt, Artificial Sequence
  Synthetic
uucucaccguucuggaggc

SEQ ID NO: 278523 - RNA, 20 nt, Artificial Sequence
  Synthetic
uuucucaccguucuggaggc

SEQ ID NO: 278524 - RNA, 21 nt, Artificial Sequence
  Synthetic
auuucucaccguucuggaggc

SEQ ID NO: 278525 - RNA, 22 nt, Artificial Sequence
  Synthetic
uauuucucaccguucuggaggc

SEQ ID NO: 278526 - RNA, 23 nt, Artificial Sequence
  Synthetic
uuauuucucaccguucuggaggc

SEQ ID NO: 278527 - RNA, 24 nt, Artificial Sequence
  Synthetic
uuuauuucucaccguucuggaggc

SEQ ID NO: 278528 - RNA, 18 nt, Artificial Sequence
  Synthetic
gaucucaaagaaugaggc

SEQ ID NO: 278529 - RNA, 19 nt, Artificial Sequence
  Synthetic
agaucucaaagaaugaggc

SEQ ID NO: 278530 - RNA, 20 nt, Artificial Sequence
  Synthetic
aagaucucaaagaaugaggc

SEQ ID NO: 278531 - RNA, 21 nt, Artificial Sequence
  Synthetic
aaagaucucaaagaaugaggc

SEQ ID NO: 278532 - RNA, 22 nt, Artificial Sequence
  Synthetic
caaagaucucaaagaaugaggc

SEQ ID NO: 278533 - RNA, 23 nt, Artificial Sequence
  Synthetic
gcaaagaucucaaagaaugaggc

SEQ ID NO: 278534 - RNA, 24 nt, Artificial Sequence
  Synthetic
agcaaagaucucaaagaaugaggc

SEQ ID NO: 278535 - RNA, 18 nt, Artificial Sequence
  Synthetic
ucuuaaccagaaugaggc

SEQ ID NO: 278536 - RNA, 19 nt, Artificial Sequence
  Synthetic
cucuuaaccagaaugaggc

SEQ ID NO: 278537 - RNA, 20 nt, Artificial Sequence
  Synthetic
ucucuuaaccagaaugaggc

SEQ ID NO: 278538 - RNA, 21 nt, Artificial Sequence
  Synthetic
uucucuuaaccagaaugaggc

SEQ ID NO: 278539 - RNA, 22 nt, Artificial Sequence
  Synthetic
auucucuuaaccagaaugaggc

SEQ ID NO: 278540 - RNA, 23 nt, Artificial Sequence
  Synthetic
aauucucuuaaccagaaugaggc

SEQ ID NO: 278541 - RNA, 24 nt, Artificial Sequence
  Synthetic
aaauucucuuaaccagaaugaggc

SEQ ID NO: 278542 - RNA, 18 nt, Artificial Sequence
  Synthetic
auccaaaaaauaugaggc

SEQ ID NO: 278543 - RNA, 19 nt, Artificial Sequence
  Synthetic
uauccaaaaaauaugaggc

SEQ ID NO: 278544 - RNA, 20 nt, Artificial Sequence
  Synthetic
auauccaaaaaauaugaggc

SEQ ID NO: 278545 - RNA, 21 nt, Artificial Sequence
  Synthetic
aauauccaaaaaauaugaggc

SEQ ID NO: 278546 - RNA, 22 nt, Artificial Sequence
  Synthetic
aaauauccaaaaaauaugaggc

SEQ ID NO: 278547 - RNA, 23 nt, Artificial Sequence
  Synthetic
uaaauauccaaaaaauaugaggc

SEQ ID NO: 278548 - RNA, 24 nt, Artificial Sequence
  Synthetic
uuaaauauccaaaaaauaugaggc

SEQ ID NO: 278549 - RNA, 18 nt, Artificial Sequence
  Synthetic
agccauccucacugaggc

SEQ ID NO: 278550 - RNA, 19 nt, Artificial Sequence
  Synthetic
cagccauccucacugaggc

SEQ ID NO: 278551 - RNA, 20 nt, Artificial Sequence
  Synthetic
gcagccauccucacugaggc

SEQ ID NO: 278552 - RNA, 21 nt, Artificial Sequence
  Synthetic
agcagccauccucacugaggc

SEQ ID NO: 278553 - RNA, 22 nt, Artificial Sequence
  Synthetic
cagcagccauccucacugaggc

SEQ ID NO: 278554 - RNA, 23 nt, Artificial Sequence
  Synthetic
ucagcagccauccucacugaggc

SEQ ID NO: 278555 - RNA, 24 nt, Artificial Sequence
  Synthetic
aucagcagccauccucacugaggc

SEQ ID NO: 278556 - RNA, 18 nt, Artificial Sequence
  Synthetic
uugggaauauacugaggc

SEQ ID NO: 278557 - RNA, 19 nt, Artificial Sequence
  Synthetic
cuugggaauauacugaggc

SEQ ID NO: 278558 - RNA, 20 nt, Artificial Sequence
  Synthetic
acuugggaauauacugaggc

SEQ ID NO: 278559 - RNA, 21 nt, Artificial Sequence
  Synthetic
cacuugggaauauacugaggc

SEQ ID NO: 278560 - RNA, 22 nt, Artificial Sequence
  Synthetic
gcacuugggaauauacugaggc

SEQ ID NO: 278561 - RNA, 23 nt, Artificial Sequence
  Synthetic
ugcacuugggaauauacugaggc

SEQ ID NO: 278562 - RNA, 24 nt, Artificial Sequence
  Synthetic
uugcacuugggaauauacugaggc

SEQ ID NO: 278563 - RNA, 18 nt, Artificial Sequence
  Synthetic
aggcggaucaccugaggc

SEQ ID NO: 278564 - RNA, 19 nt, Artificial Sequence
  Synthetic
caggcggaucaccugaggc

SEQ ID NO: 278565 - RNA, 20 nt, Artificial Sequence
  Synthetic
gcaggcggaucaccugaggc

SEQ ID NO: 278566 - RNA, 21 nt, Artificial Sequence
  Synthetic
ggcaggcggaucaccugaggc

SEQ ID NO: 278567 - RNA, 22 nt, Artificial Sequence
  Synthetic
aggcaggcggaucaccugaggc

SEQ ID NO: 278568 - RNA, 23 nt, Artificial Sequence
  Synthetic
aaggcaggcggaucaccugaggc

SEQ ID NO: 278569 - RNA, 24 nt, Artificial Sequence
  Synthetic
caaggcaggcggaucaccugaggc

SEQ ID NO: 278570 - RNA, 18 nt, Artificial Sequence
  Synthetic
uacucaggagccugaggc

SEQ ID NO: 278571 - RNA, 19 nt, Artificial Sequence
  Synthetic
cuacucaggagccugaggc

SEQ ID NO: 278572 - RNA, 20 nt, Artificial Sequence
  Synthetic
gcuacucaggagccugaggc

SEQ ID NO: 278573 - RNA, 21 nt, Artificial Sequence
  Synthetic
agcuacucaggagccugaggc

SEQ ID NO: 278574 - RNA, 22 nt, Artificial Sequence
  Synthetic
cagcuacucaggagccugaggc

SEQ ID NO: 278575 - RNA, 23 nt, Artificial Sequence
  Synthetic
ccagcuacucaggagccugaggc

SEQ ID NO: 278576 - RNA, 24 nt, Artificial Sequence
  Synthetic
cccagcuacucaggagccugaggc

SEQ ID NO: 278577 - RNA, 18 nt, Artificial Sequence
  Synthetic
uacucgggaagcugaggc

SEQ ID NO: 278578 - RNA, 19 nt, Artificial Sequence
  Synthetic
cuacucgggaagcugaggc

SEQ ID NO: 278579 - RNA, 20 nt, Artificial Sequence
  Synthetic
gcuacucgggaagcugaggc

SEQ ID NO: 278580 - RNA, 24 nt, Artificial Sequence
  Synthetic
cccagcuacucgggaagcugaggc

SEQ ID NO: 278581 - RNA, 18 nt, Artificial Sequence
  Synthetic
uacuugggaagcugaggc

SEQ ID NO: 278582 - RNA, 19 nt, Artificial Sequence
  Synthetic
cuacuugggaagcugaggc

SEQ ID NO: 278583 - RNA, 20 nt, Artificial Sequence
  Synthetic
gcuacuugggaagcugaggc

SEQ ID NO: 278584 - RNA, 21 nt, Artificial Sequence
  Synthetic
agcuacuugggaagcugaggc

SEQ ID NO: 278585 - RNA, 22 nt, Artificial Sequence
  Synthetic
cagcuacuugggaagcugaggc

SEQ ID NO: 278586 - RNA, 23 nt, Artificial Sequence
  Synthetic
ccagcuacuugggaagcugaggc

SEQ ID NO: 278587 - RNA, 24 nt, Artificial Sequence
  Synthetic
cccagcuacuugggaagcugaggc

SEQ ID NO: 278588 - RNA, 18 nt, Artificial Sequence
  Synthetic
uacucaggacgcugaggc

SEQ ID NO: 278589 - RNA, 19 nt, Artificial Sequence
  Synthetic
cuacucaggacgcugaggc

SEQ ID NO: 278590 - RNA, 20 nt, Artificial Sequence
  Synthetic
gcuacucaggacgcugaggc

SEQ ID NO: 278591 - RNA, 21 nt, Artificial Sequence
  Synthetic
agcuacucaggacgcugaggc

SEQ ID NO: 278592 - RNA, 22 nt, Artificial Sequence
  Synthetic
cagcuacucaggacgcugaggc

SEQ ID NO: 278593 - RNA, 23 nt, Artificial Sequence
  Synthetic
ccagcuacucaggacgcugaggc

SEQ ID NO: 278594 - RNA, 24 nt, Artificial Sequence
  Synthetic
cccagcuacucaggacgcugaggc

SEQ ID NO: 278595 - RNA, 18 nt, Artificial Sequence
  Synthetic
uacuuagcaggcugaggc

SEQ ID NO: 278596 - RNA, 19 nt, Artificial Sequence
  Synthetic
cuacuuagcaggcugaggc

SEQ ID NO: 278597 - RNA, 20 nt, Artificial Sequence
  Synthetic
gcuacuuagcaggcugaggc

SEQ ID NO: 278598 - RNA, 21 nt, Artificial Sequence
  Synthetic
agcuacuuagcaggcugaggc

SEQ ID NO: 278599 - RNA, 22 nt, Artificial Sequence
  Synthetic
cagcuacuuagcaggcugaggc

SEQ ID NO: 278600 - RNA, 23 nt, Artificial Sequence
  Synthetic
ccagcuacuuagcaggcugaggc

SEQ ID NO: 278601 - RNA, 24 nt, Artificial Sequence
  Synthetic
cccagcuacuuagcaggcugaggc

SEQ ID NO: 278602 - RNA, 18 nt, Artificial Sequence
  Synthetic
cuucucagaggcugaggc

SEQ ID NO: 278603 - RNA, 19 nt, Artificial Sequence
  Synthetic
gcuucucagaggcugaggc

SEQ ID NO: 278604 - RNA, 20 nt, Artificial Sequence
  Synthetic
agcuucucagaggcugaggc

SEQ ID NO: 278605 - RNA, 21 nt, Artificial Sequence
  Synthetic
aagcuucucagaggcugaggc

SEQ ID NO: 278606 - RNA, 22 nt, Artificial Sequence
  Synthetic
caagcuucucagaggcugaggc

SEQ ID NO: 278607 - RNA, 23 nt, Artificial Sequence
  Synthetic
ccaagcuucucagaggcugaggc

SEQ ID NO: 278608 - RNA, 24 nt, Artificial Sequence
  Synthetic
uccaagcuucucagaggcugaggc

SEQ ID NO: 278609 - RNA, 18 nt, Artificial Sequence
  Synthetic
uacucaggaggcugaggc

SEQ ID NO: 278610 - RNA, 19 nt, Artificial Sequence
  Synthetic
auacucaggaggcugaggc

SEQ ID NO: 278611 - RNA, 20 nt, Artificial Sequence
  Synthetic
gauacucaggaggcugaggc

SEQ ID NO: 278612 - RNA, 21 nt, Artificial Sequence
  Synthetic
agauacucaggaggcugaggc

SEQ ID NO: 278613 - RNA, 22 nt, Artificial Sequence
  Synthetic
cagauacucaggaggcugaggc

SEQ ID NO: 278614 - RNA, 23 nt, Artificial Sequence
  Synthetic
ccagauacucaggaggcugaggc

SEQ ID NO: 278615 - RNA, 24 nt, Artificial Sequence
  Synthetic
cccagauacucaggaggcugaggc

SEQ ID NO: 278616 - RNA, 19 nt, Artificial Sequence
  Synthetic
cuacucaggaggcugaggc

SEQ ID NO: 278617 - RNA, 20 nt, Artificial Sequence
  Synthetic
ucuacucaggaggcugaggc

SEQ ID NO: 278618 - RNA, 21 nt, Artificial Sequence
  Synthetic
aucuacucaggaggcugaggc

SEQ ID NO: 278619 - RNA, 22 nt, Artificial Sequence
  Synthetic
caucuacucaggaggcugaggc

SEQ ID NO: 278620 - RNA, 23 nt, Artificial Sequence
  Synthetic
ccaucuacucaggaggcugaggc

SEQ ID NO: 278621 - RNA, 24 nt, Artificial Sequence
  Synthetic
cccaucuacucaggaggcugaggc

SEQ ID NO: 278622 - RNA, 18 nt, Artificial Sequence
  Synthetic
ucgggaggaggcugaggc

SEQ ID NO: 278623 - RNA, 19 nt, Artificial Sequence
  Synthetic
cucgggaggaggcugaggc

SEQ ID NO: 278624 - RNA, 20 nt, Artificial Sequence
  Synthetic
acucgggaggaggcugaggc

SEQ ID NO: 278625 - RNA, 21 nt, Artificial Sequence
  Synthetic
uacucgggaggaggcugaggc

SEQ ID NO: 278626 - RNA, 22 nt, Artificial Sequence
  Synthetic
cuacucgggaggaggcugaggc

SEQ ID NO: 278627 - RNA, 23 nt, Artificial Sequence
  Synthetic
gcuacucgggaggaggcugaggc

SEQ ID NO: 278628 - RNA, 24 nt, Artificial Sequence
  Synthetic
agcuacucgggaggaggcugaggc

SEQ ID NO: 278629 - RNA, 18 nt, Artificial Sequence
  Synthetic
cuacucggaggcugaggc

SEQ ID NO: 278630 - RNA, 19 nt, Artificial Sequence
  Synthetic
gcuacucggaggcugaggc

SEQ ID NO: 278631 - RNA, 20 nt, Artificial Sequence
  Synthetic
agcuacucggaggcugaggc

SEQ ID NO: 278632 - RNA, 21 nt, Artificial Sequence
  Synthetic
cagcuacucggaggcugaggc

SEQ ID NO: 278633 - RNA, 22 nt, Artificial Sequence
  Synthetic
ccagcuacucggaggcugaggc

SEQ ID NO: 278634 - RNA, 23 nt, Artificial Sequence
  Synthetic
cccagcuacucggaggcugaggc

SEQ ID NO: 278635 - RNA, 24 nt, Artificial Sequence
  Synthetic
ucccagcuacucggaggcugaggc

SEQ ID NO: 278636 - RNA, 18 nt, Artificial Sequence
  Synthetic
uacuagggaggcugaggc

SEQ ID NO: 278637 - RNA, 19 nt, Artificial Sequence
  Synthetic
cuacuagggaggcugaggc

SEQ ID NO: 278638 - RNA, 20 nt, Artificial Sequence
  Synthetic
gcuacuagggaggcugaggc

SEQ ID NO: 278639 - RNA, 18 nt, Artificial Sequence
  Synthetic
cuaccgggaggcugaggc

SEQ ID NO: 278640 - RNA, 19 nt, Artificial Sequence
  Synthetic
gcuaccgggaggcugaggc

SEQ ID NO: 278641 - RNA, 20 nt, Artificial Sequence
  Synthetic
agcuaccgggaggcugaggc

SEQ ID NO: 278642 - RNA, 21 nt, Artificial Sequence
  Synthetic
cagcuaccgggaggcugaggc

SEQ ID NO: 278643 - RNA, 22 nt, Artificial Sequence
  Synthetic
ccagcuaccgggaggcugaggc

SEQ ID NO: 278644 - RNA, 23 nt, Artificial Sequence
  Synthetic
cccagcuaccgggaggcugaggc

SEQ ID NO: 278645 - RNA, 24 nt, Artificial Sequence
  Synthetic
ucccagcuaccgggaggcugaggc

SEQ ID NO: 278646 - RNA, 18 nt, Artificial Sequence
  Synthetic
uaccugggaggcugaggc

SEQ ID NO: 278647 - RNA, 19 nt, Artificial Sequence
  Synthetic
cuaccugggaggcugaggc

SEQ ID NO: 278648 - RNA, 20 nt, Artificial Sequence
  Synthetic
gcuaccugggaggcugaggc

SEQ ID NO: 278649 - RNA, 21 nt, Artificial Sequence
  Synthetic
agcuaccugggaggcugaggc

SEQ ID NO: 278650 - RNA, 22 nt, Artificial Sequence
  Synthetic
cagcuaccugggaggcugaggc

SEQ ID NO: 278651 - RNA, 23 nt, Artificial Sequence
  Synthetic
ccagcuaccugggaggcugaggc

SEQ ID NO: 278652 - RNA, 24 nt, Artificial Sequence
  Synthetic
cccagcuaccugggaggcugaggc

SEQ ID NO: 278653 - RNA, 18 nt, Artificial Sequence
  Synthetic
uacuugggaggcugaggc

SEQ ID NO: 278654 - RNA, 21 nt, Artificial Sequence
  Synthetic
agcuacuugggaggcugaggc

SEQ ID NO: 278655 - RNA, 22 nt, Artificial Sequence
  Synthetic
cagcuacuugggaggcugaggc

SEQ ID NO: 278656 - RNA, 23 nt, Artificial Sequence
  Synthetic
acagcuacuugggaggcugaggc

SEQ ID NO: 278657 - RNA, 24 nt, Artificial Sequence
  Synthetic
cacagcuacuugggaggcugaggc

SEQ ID NO: 278658 - RNA, 19 nt, Artificial Sequence
  Synthetic
guacuugggaggcugaggc

SEQ ID NO: 278659 - RNA, 20 nt, Artificial Sequence
  Synthetic
gguacuugggaggcugaggc

SEQ ID NO: 278660 - RNA, 21 nt, Artificial Sequence
  Synthetic
agguacuugggaggcugaggc

SEQ ID NO: 278661 - RNA, 22 nt, Artificial Sequence
  Synthetic
cagguacuugggaggcugaggc

SEQ ID NO: 278662 - RNA, 23 nt, Artificial Sequence
  Synthetic
ccagguacuugggaggcugaggc

SEQ ID NO: 278663 - RNA, 24 nt, Artificial Sequence
  Synthetic
cccagguacuugggaggcugaggc

SEQ ID NO: 278664 - RNA, 18 nt, Artificial Sequence
  Synthetic
uauuugggaggcugaggc

SEQ ID NO: 278665 - RNA, 19 nt, Artificial Sequence
  Synthetic
cuauuugggaggcugaggc

SEQ ID NO: 278666 - RNA, 20 nt, Artificial Sequence
  Synthetic
gcuauuugggaggcugaggc

SEQ ID NO: 278667 - RNA, 21 nt, Artificial Sequence
  Synthetic
agcuauuugggaggcugaggc

SEQ ID NO: 278668 - RNA, 22 nt, Artificial Sequence
  Synthetic
cagcuauuugggaggcugaggc

SEQ ID NO: 278669 - RNA, 23 nt, Artificial Sequence
  Synthetic
ccagcuauuugggaggcugaggc

SEQ ID NO: 278670 - RNA, 24 nt, Artificial Sequence
  Synthetic
cccagcuauuugggaggcugaggc

SEQ ID NO: 278671 - RNA, 21 nt, Artificial Sequence
  Synthetic
agugcuuugggaggcugaggc

SEQ ID NO: 278672 - RNA, 22 nt, Artificial Sequence
  Synthetic
cagugcuuugggaggcugaggc

SEQ ID NO: 278673 - RNA, 23 nt, Artificial Sequence
  Synthetic
ccagugcuuugggaggcugaggc

SEQ ID NO: 278674 - RNA, 24 nt, Artificial Sequence
  Synthetic
cccagugcuuugggaggcugaggc

SEQ ID NO: 278675 - RNA, 21 nt, Artificial Sequence
  Synthetic
ugugcuuugggaggcugaggc

SEQ ID NO: 278676 - RNA, 22 nt, Artificial Sequence
  Synthetic
cugugcuuugggaggcugaggc

SEQ ID NO: 278677 - RNA, 23 nt, Artificial Sequence
  Synthetic
ccugugcuuugggaggcugaggc

SEQ ID NO: 278678 - RNA, 24 nt, Artificial Sequence
  Synthetic
cccugugcuuugggaggcugaggc

SEQ ID NO: 278679 - RNA, 18 nt, Artificial Sequence
  Synthetic
cacacuggaggcugaggc

SEQ ID NO: 278680 - RNA, 19 nt, Artificial Sequence
  Synthetic
acacacuggaggcugaggc

SEQ ID NO: 278681 - RNA, 20 nt, Artificial Sequence
  Synthetic
gacacacuggaggcugaggc

SEQ ID NO: 278682 - RNA, 21 nt, Artificial Sequence
  Synthetic
agacacacuggaggcugaggc

SEQ ID NO: 278683 - RNA, 22 nt, Artificial Sequence
  Synthetic
cagacacacuggaggcugaggc

SEQ ID NO: 278684 - RNA, 23 nt, Artificial Sequence
  Synthetic
ccagacacacuggaggcugaggc

SEQ ID NO: 278685 - RNA, 24 nt, Artificial Sequence
  Synthetic
cccagacacacuggaggcugaggc

SEQ ID NO: 278686 - RNA, 18 nt, Artificial Sequence
  Synthetic
uacuccugaggcugaggc

SEQ ID NO: 278687 - RNA, 19 nt, Artificial Sequence
  Synthetic
cuacuccugaggcugaggc

SEQ ID NO: 278688 - RNA, 20 nt, Artificial Sequence
  Synthetic
gcuacuccugaggcugaggc

SEQ ID NO: 278689 - RNA, 21 nt, Artificial Sequence
  Synthetic
agcuacuccugaggcugaggc

SEQ ID NO: 278690 - RNA, 22 nt, Artificial Sequence
  Synthetic
cagcuacuccugaggcugaggc

SEQ ID NO: 278691 - RNA, 23 nt, Artificial Sequence
  Synthetic
ccagcuacuccugaggcugaggc

SEQ ID NO: 278692 - RNA, 24 nt, Artificial Sequence
  Synthetic
cccagcuacuccugaggcugaggc

SEQ ID NO: 278693 - RNA, 18 nt, Artificial Sequence
  Synthetic
guagagcuaggcugaggc

SEQ ID NO: 278694 - RNA, 19 nt, Artificial Sequence
  Synthetic
aguagagcuaggcugaggc

SEQ ID NO: 278695 - RNA, 20 nt, Artificial Sequence
  Synthetic
caguagagcuaggcugaggc

SEQ ID NO: 278696 - RNA, 21 nt, Artificial Sequence
  Synthetic
ucaguagagcuaggcugaggc

SEQ ID NO: 278697 - RNA, 22 nt, Artificial Sequence
  Synthetic
uucaguagagcuaggcugaggc

SEQ ID NO: 278698 - RNA, 23 nt, Artificial Sequence
  Synthetic
auucaguagagcuaggcugaggc

SEQ ID NO: 278699 - RNA, 24 nt, Artificial Sequence
  Synthetic
gauucaguagagcuaggcugaggc

SEQ ID NO: 278700 - RNA, 18 nt, Artificial Sequence
  Synthetic
uaaaauuuuaugugaggc

SEQ ID NO: 278701 - RNA, 19 nt, Artificial Sequence
  Synthetic
uuaaaauuuuaugugaggc

SEQ ID NO: 278702 - RNA, 20 nt, Artificial Sequence
  Synthetic
uuuaaaauuuuaugugaggc

SEQ ID NO: 278703 - RNA, 21 nt, Artificial Sequence
  Synthetic
uuuuaaaauuuuaugugaggc

SEQ ID NO: 278704 - RNA, 22 nt, Artificial Sequence
  Synthetic
auuuuaaaauuuuaugugaggc

SEQ ID NO: 278705 - RNA, 23 nt, Artificial Sequence
  Synthetic
uauuuuaaaauuuuaugugaggc

SEQ ID NO: 278706 - RNA, 24 nt, Artificial Sequence
  Synthetic
guauuuuaaaauuuuaugugaggc

SEQ ID NO: 278707 - RNA, 18 nt, Artificial Sequence
  Synthetic
aacugaccugugugaggc

SEQ ID NO: 278708 - RNA, 19 nt, Artificial Sequence
  Synthetic
caacugaccugugugaggc

SEQ ID NO: 278709 - RNA, 20 nt, Artificial Sequence
  Synthetic
acaacugaccugugugaggc

SEQ ID NO: 278710 - RNA, 21 nt, Artificial Sequence
  Synthetic
aacaacugaccugugugaggc

SEQ ID NO: 278711 - RNA, 22 nt, Artificial Sequence
  Synthetic
caacaacugaccugugugaggc

SEQ ID NO: 278712 - RNA, 23 nt, Artificial Sequence
  Synthetic
gcaacaacugaccugugugaggc

SEQ ID NO: 278713 - RNA, 24 nt, Artificial Sequence
  Synthetic
ugcaacaacugaccugugugaggc

SEQ ID NO: 278714 - RNA, 18 nt, Artificial Sequence
  Synthetic
gggcagaucacuugaggc

SEQ ID NO: 278715 - RNA, 19 nt, Artificial Sequence
  Synthetic
ugggcagaucacuugaggc

SEQ ID NO: 278716 - RNA, 20 nt, Artificial Sequence
  Synthetic
gugggcagaucacuugaggc

SEQ ID NO: 278717 - RNA, 21 nt, Artificial Sequence
  Synthetic
ggugggcagaucacuugaggc

SEQ ID NO: 278718 - RNA, 22 nt, Artificial Sequence
  Synthetic
aggugggcagaucacuugaggc

SEQ ID NO: 278719 - RNA, 23 nt, Artificial Sequence
  Synthetic
gaggugggcagaucacuugaggc

SEQ ID NO: 278720 - RNA, 24 nt, Artificial Sequence
  Synthetic
cgaggugggcagaucacuugaggc

SEQ ID NO: 278721 - RNA, 18 nt, Artificial Sequence
  Synthetic
ggguggaucacuugaggc

SEQ ID NO: 278722 - RNA, 19 nt, Artificial Sequence
  Synthetic
uggguggaucacuugaggc

SEQ ID NO: 278723 - RNA, 20 nt, Artificial Sequence
  Synthetic
auggguggaucacuugaggc

SEQ ID NO: 278724 - RNA, 21 nt, Artificial Sequence
  Synthetic
aauggguggaucacuugaggc

SEQ ID NO: 278725 - RNA, 22 nt, Artificial Sequence
  Synthetic
aaauggguggaucacuugaggc

SEQ ID NO: 278726 - RNA, 23 nt, Artificial Sequence
  Synthetic
gaaauggguggaucacuugaggc

SEQ ID NO: 278727 - RNA, 24 nt, Artificial Sequence
  Synthetic
cgaaauggguggaucacuugaggc

SEQ ID NO: 278728 - RNA, 18 nt, Artificial Sequence
  Synthetic
uggaggaucccuugaggc

SEQ ID NO: 278729 - RNA, 19 nt, Artificial Sequence
  Synthetic
auggaggaucccuugaggc

SEQ ID NO: 278730 - RNA, 20 nt, Artificial Sequence
  Synthetic
gauggaggaucccuugaggc

SEQ ID NO: 278731 - RNA, 21 nt, Artificial Sequence
  Synthetic
ggauggaggaucccuugaggc

SEQ ID NO: 278732 - RNA, 22 nt, Artificial Sequence
  Synthetic
aggauggaggaucccuugaggc

SEQ ID NO: 278733 - RNA, 23 nt, Artificial Sequence
  Synthetic
caggauggaggaucccuugaggc

SEQ ID NO: 278734 - RNA, 24 nt, Artificial Sequence
  Synthetic
ccaggauggaggaucccuugaggc

SEQ ID NO: 278735 - RNA, 18 nt, Artificial Sequence
  Synthetic
aagaggauugcuugaggc

SEQ ID NO: 278736 - RNA, 19 nt, Artificial Sequence
  Synthetic
caagaggauugcuugaggc

SEQ ID NO: 278737 - RNA, 20 nt, Artificial Sequence
  Synthetic
gcaagaggauugcuugaggc

SEQ ID NO: 278738 - RNA, 21 nt, Artificial Sequence
  Synthetic
ggcaagaggauugcuugaggc

SEQ ID NO: 278739 - RNA, 22 nt, Artificial Sequence
  Synthetic
aggcaagaggauugcuugaggc

SEQ ID NO: 278740 - RNA, 23 nt, Artificial Sequence
  Synthetic
aaggcaagaggauugcuugaggc

SEQ ID NO: 278741 - RNA, 24 nt, Artificial Sequence
  Synthetic
caaggcaagaggauugcuugaggc

SEQ ID NO: 278742 - RNA, 18 nt, Artificial Sequence
  Synthetic
uguccuugccuuugaggc

SEQ ID NO: 278743 - RNA, 19 nt, Artificial Sequence
  Synthetic
cuguccuugccuuugaggc

SEQ ID NO: 278744 - RNA, 20 nt, Artificial Sequence
  Synthetic
ucuguccuugccuuugaggc

SEQ ID NO: 278745 - RNA, 21 nt, Artificial Sequence
  Synthetic
uucuguccuugccuuugaggc

SEQ ID NO: 278746 - RNA, 22 nt, Artificial Sequence
  Synthetic
auucuguccuugccuuugaggc

SEQ ID NO: 278747 - RNA, 23 nt, Artificial Sequence
  Synthetic
gauucuguccuugccuuugaggc

SEQ ID NO: 278748 - RNA, 24 nt, Artificial Sequence
  Synthetic
agauucuguccuugccuuugaggc

SEQ ID NO: 278749 - RNA, 18 nt, Artificial Sequence
  Synthetic
gggaggauuguuugaggc

SEQ ID NO: 278750 - RNA, 19 nt, Artificial Sequence
  Synthetic
ugggaggauuguuugaggc

SEQ ID NO: 278751 - RNA, 20 nt, Artificial Sequence
  Synthetic
gugggaggauuguuugaggc

SEQ ID NO: 278752 - RNA, 21 nt, Artificial Sequence
  Synthetic
ggugggaggauuguuugaggc

SEQ ID NO: 278753 - RNA, 22 nt, Artificial Sequence
  Synthetic
aggugggaggauuguuugaggc

SEQ ID NO: 278754 - RNA, 23 nt, Artificial Sequence
  Synthetic
aaggugggaggauuguuugaggc

SEQ ID NO: 278755 - RNA, 24 nt, Artificial Sequence
  Synthetic
uaaggugggaggauuguuugaggc

SEQ ID NO: 278756 - RNA, 18 nt, Artificial Sequence
  Synthetic
accauucaggacauaggc

SEQ ID NO: 278757 - RNA, 19 nt, Artificial Sequence
  Synthetic
uaccauucaggacauaggc

SEQ ID NO: 278758 - RNA, 20 nt, Artificial Sequence
  Synthetic
uuaccauucaggacauaggc

SEQ ID NO: 278759 - RNA, 21 nt, Artificial Sequence
  Synthetic
auuaccauucaggacauaggc

SEQ ID NO: 278760 - RNA, 22 nt, Artificial Sequence
  Synthetic
cauuaccauucaggacauaggc

SEQ ID NO: 278761 - RNA, 23 nt, Artificial Sequence
  Synthetic
gcauuaccauucaggacauaggc

SEQ ID NO: 278762 - RNA, 24 nt, Artificial Sequence
  Synthetic
ggcauuaccauucaggacauaggc

SEQ ID NO: 278763 - RNA, 18 nt, Artificial Sequence
  Synthetic
accauucaggauauaggc

SEQ ID NO: 278764 - RNA, 19 nt, Artificial Sequence
  Synthetic
uaccauucaggauauaggc

SEQ ID NO: 278765 - RNA, 20 nt, Artificial Sequence
  Synthetic
auaccauucaggauauaggc

SEQ ID NO: 278766 - RNA, 21 nt, Artificial Sequence
  Synthetic
aauaccauucaggauauaggc

SEQ ID NO: 278767 - RNA, 22 nt, Artificial Sequence
  Synthetic
caauaccauucaggauauaggc

SEQ ID NO: 278768 - RNA, 23 nt, Artificial Sequence
  Synthetic
gcaauaccauucaggauauaggc

SEQ ID NO: 278769 - RNA, 24 nt, Artificial Sequence
  Synthetic
ggcaauaccauucaggauauaggc

SEQ ID NO: 278770 - RNA, 18 nt, Artificial Sequence
  Synthetic
ggaggugcaaguauaggc

SEQ ID NO: 278771 - RNA, 19 nt, Artificial Sequence
  Synthetic
aggaggugcaaguauaggc

SEQ ID NO: 278772 - RNA, 20 nt, Artificial Sequence
  Synthetic
aaggaggugcaaguauaggc

SEQ ID NO: 278773 - RNA, 21 nt, Artificial Sequence
  Synthetic
gaaggaggugcaaguauaggc

SEQ ID NO: 278774 - RNA, 22 nt, Artificial Sequence
  Synthetic
ggaaggaggugcaaguauaggc

SEQ ID NO: 278775 - RNA, 23 nt, Artificial Sequence
  Synthetic
aggaaggaggugcaaguauaggc

SEQ ID NO: 278776 - RNA, 24 nt, Artificial Sequence
  Synthetic
aaggaaggaggugcaaguauaggc

SEQ ID NO: 278777 - RNA, 18 nt, Artificial Sequence
  Synthetic
gagaccaaucuacuaggc

SEQ ID NO: 278778 - RNA, 19 nt, Artificial Sequence
  Synthetic
ugagaccaaucuacuaggc

SEQ ID NO: 278779 - RNA, 20 nt, Artificial Sequence
  Synthetic
augagaccaaucuacuaggc

SEQ ID NO: 278780 - RNA, 21 nt, Artificial Sequence
  Synthetic
aaugagaccaaucuacuaggc

SEQ ID NO: 278781 - RNA, 22 nt, Artificial Sequence
  Synthetic
aaaugagaccaaucuacuaggc

SEQ ID NO: 278782 - RNA, 23 nt, Artificial Sequence
  Synthetic
aaaaugagaccaaucuacuaggc

SEQ ID NO: 278783 - RNA, 24 nt, Artificial Sequence
  Synthetic
uaaaaugagaccaaucuacuaggc

SEQ ID NO: 278784 - RNA, 18 nt, Artificial Sequence
  Synthetic
cuguccaagaaccuaggc

SEQ ID NO: 278785 - RNA, 19 nt, Artificial Sequence
  Synthetic
gcuguccaagaaccuaggc

SEQ ID NO: 278786 - RNA, 20 nt, Artificial Sequence
  Synthetic
ugcuguccaagaaccuaggc

SEQ ID NO: 278787 - RNA, 21 nt, Artificial Sequence
  Synthetic
augcuguccaagaaccuaggc

SEQ ID NO: 278788 - RNA, 22 nt, Artificial Sequence
  Synthetic
aaugcuguccaagaaccuaggc

SEQ ID NO: 278789 - RNA, 23 nt, Artificial Sequence
  Synthetic
aaaugcuguccaagaaccuaggc

SEQ ID NO: 278790 - RNA, 24 nt, Artificial Sequence
  Synthetic
aaaaugcuguccaagaaccuaggc

SEQ ID NO: 278791 - RNA, 18 nt, Artificial Sequence
  Synthetic
ucaguaaggacccuaggc

SEQ ID NO: 278792 - RNA, 19 nt, Artificial Sequence
  Synthetic
uucaguaaggacccuaggc

SEQ ID NO: 278793 - RNA, 20 nt, Artificial Sequence
  Synthetic
uuucaguaaggacccuaggc

SEQ ID NO: 278794 - RNA, 21 nt, Artificial Sequence
  Synthetic
uuuucaguaaggacccuaggc

SEQ ID NO: 278795 - RNA, 22 nt, Artificial Sequence
  Synthetic
auuuucaguaaggacccuaggc

SEQ ID NO: 278796 - RNA, 23 nt, Artificial Sequence
  Synthetic
uauuuucaguaaggacccuaggc

SEQ ID NO: 278797 - RNA, 24 nt, Artificial Sequence
  Synthetic
cuauuuucaguaaggacccuaggc

SEQ ID NO: 278798 - RNA, 18 nt, Artificial Sequence
  Synthetic
uuuucuaaccuccuaggc

SEQ ID NO: 278799 - RNA, 19 nt, Artificial Sequence
  Synthetic
auuuucuaaccuccuaggc

SEQ ID NO: 278800 - RNA, 20 nt, Artificial Sequence
  Synthetic
gauuuucuaaccuccuaggc

SEQ ID NO: 278801 - RNA, 21 nt, Artificial Sequence
  Synthetic
ugauuuucuaaccuccuaggc

SEQ ID NO: 278802 - RNA, 22 nt, Artificial Sequence
  Synthetic
uugauuuucuaaccuccuaggc

SEQ ID NO: 278803 - RNA, 23 nt, Artificial Sequence
  Synthetic
uuugauuuucuaaccuccuaggc

SEQ ID NO: 278804 - RNA, 24 nt, Artificial Sequence
  Synthetic
auuugauuuucuaaccuccuaggc

SEQ ID NO: 278805 - RNA, 18 nt, Artificial Sequence
  Synthetic
acuuccacaaaucuaggc

SEQ ID NO: 278806 - RNA, 19 nt, Artificial Sequence
  Synthetic
gacuuccacaaaucuaggc

SEQ ID NO: 278807 - RNA, 20 nt, Artificial Sequence
  Synthetic
ugacuuccacaaaucuaggc

SEQ ID NO: 278808 - RNA, 21 nt, Artificial Sequence
  Synthetic
cugacuuccacaaaucuaggc

SEQ ID NO: 278809 - RNA, 22 nt, Artificial Sequence
  Synthetic
ucugacuuccacaaaucuaggc

SEQ ID NO: 278810 - RNA, 23 nt, Artificial Sequence
  Synthetic
uucugacuuccacaaaucuaggc

SEQ ID NO: 278811 - RNA, 24 nt, Artificial Sequence
  Synthetic
auucugacuuccacaaaucuaggc

SEQ ID NO: 278812 - RNA, 18 nt, Artificial Sequence
  Synthetic
acaccuaaacaucuaggc

SEQ ID NO: 278813 - RNA, 19 nt, Artificial Sequence
  Synthetic
aacaccuaaacaucuaggc

SEQ ID NO: 278814 - RNA, 20 nt, Artificial Sequence
  Synthetic
gaacaccuaaacaucuaggc

SEQ ID NO: 278815 - RNA, 21 nt, Artificial Sequence
  Synthetic
agaacaccuaaacaucuaggc

SEQ ID NO: 278816 - RNA, 22 nt, Artificial Sequence
  Synthetic
aagaacaccuaaacaucuaggc

SEQ ID NO: 278817 - RNA, 23 nt, Artificial Sequence
  Synthetic
uaagaacaccuaaacaucuaggc

SEQ ID NO: 278818 - RNA, 24 nt, Artificial Sequence
  Synthetic
guaagaacaccuaaacaucuaggc

SEQ ID NO: 278819 - RNA, 18 nt, Artificial Sequence
  Synthetic
uggagaaauguucuaggc

SEQ ID NO: 278820 - RNA, 19 nt, Artificial Sequence
  Synthetic
auggagaaauguucuaggc

SEQ ID NO: 278821 - RNA, 20 nt, Artificial Sequence
  Synthetic
uauggagaaauguucuaggc

SEQ ID NO: 278822 - RNA, 21 nt, Artificial Sequence
  Synthetic
cuauggagaaauguucuaggc

SEQ ID NO: 278823 - RNA, 22 nt, Artificial Sequence
  Synthetic
ccuauggagaaauguucuaggc

SEQ ID NO: 278824 - RNA, 23 nt, Artificial Sequence
  Synthetic
accuauggagaaauguucuaggc

SEQ ID NO: 278825 - RNA, 24 nt, Artificial Sequence
  Synthetic
aaccuauggagaaauguucuaggc

SEQ ID NO: 278826 - RNA, 18 nt, Artificial Sequence
  Synthetic
augauguguguaguaggc

SEQ ID NO: 278827 - RNA, 19 nt, Artificial Sequence
  Synthetic
aaugauguguguaguaggc

SEQ ID NO: 278828 - RNA, 20 nt, Artificial Sequence
  Synthetic
uaaugauguguguaguaggc

SEQ ID NO: 278829 - RNA, 21 nt, Artificial Sequence
  Synthetic
uuaaugauguguguaguaggc

SEQ ID NO: 278830 - RNA, 22 nt, Artificial Sequence
  Synthetic
uuuaaugauguguguaguaggc

SEQ ID NO: 278831 - RNA, 23 nt, Artificial Sequence
  Synthetic
auuuaaugauguguguaguaggc

SEQ ID NO: 278832 - RNA, 24 nt, Artificial Sequence
  Synthetic
gauuuaaugauguguguaguaggc

SEQ ID NO: 278833 - RNA, 18 nt, Artificial Sequence
  Synthetic
gaaggaagggacguaggc

SEQ ID NO: 278834 - RNA, 19 nt, Artificial Sequence
  Synthetic
ugaaggaagggacguaggc

SEQ ID NO: 278835 - RNA, 20 nt, Artificial Sequence
  Synthetic
gugaaggaagggacguaggc

SEQ ID NO: 278836 - RNA, 21 nt, Artificial Sequence
  Synthetic
ugugaaggaagggacguaggc

SEQ ID NO: 278837 - RNA, 22 nt, Artificial Sequence
  Synthetic
gugugaaggaagggacguaggc

SEQ ID NO: 278838 - RNA, 23 nt, Artificial Sequence
  Synthetic
ggugugaaggaagggacguaggc

SEQ ID NO: 278839 - RNA, 24 nt, Artificial Sequence
  Synthetic
aggugugaaggaagggacguaggc

SEQ ID NO: 278840 - RNA, 18 nt, Artificial Sequence
  Synthetic
ggagagagagauguaggc

SEQ ID NO: 278841 - RNA, 19 nt, Artificial Sequence
  Synthetic
gggagagagagauguaggc

SEQ ID NO: 278842 - RNA, 20 nt, Artificial Sequence
  Synthetic
agggagagagagauguaggc

SEQ ID NO: 278843 - RNA, 21 nt, Artificial Sequence
  Synthetic
aagggagagagagauguaggc

SEQ ID NO: 278844 - RNA, 22 nt, Artificial Sequence
  Synthetic
gaagggagagagagauguaggc

SEQ ID NO: 278845 - RNA, 23 nt, Artificial Sequence
  Synthetic
ggaagggagagagagauguaggc

SEQ ID NO: 278846 - RNA, 24 nt, Artificial Sequence
  Synthetic
aggaagggagagagagauguaggc

SEQ ID NO: 278847 - RNA, 18 nt, Artificial Sequence
  Synthetic
aggccagggaaauuaggc

SEQ ID NO: 278848 - RNA, 19 nt, Artificial Sequence
  Synthetic
caggccagggaaauuaggc

SEQ ID NO: 278849 - RNA, 20 nt, Artificial Sequence
  Synthetic
ucaggccagggaaauuaggc

SEQ ID NO: 278850 - RNA, 21 nt, Artificial Sequence
  Synthetic
uucaggccagggaaauuaggc

SEQ ID NO: 278851 - RNA, 22 nt, Artificial Sequence
  Synthetic
guucaggccagggaaauuaggc

SEQ ID NO: 278852 - RNA, 23 nt, Artificial Sequence
  Synthetic
aguucaggccagggaaauuaggc

SEQ ID NO: 278853 - RNA, 24 nt, Artificial Sequence
  Synthetic
aaguucaggccagggaaauuaggc

SEQ ID NO: 278854 - RNA, 18 nt, Artificial Sequence
  Synthetic
uggauuguuggauuaggc

SEQ ID NO: 278855 - RNA, 19 nt, Artificial Sequence
  Synthetic
auggauuguuggauuaggc

SEQ ID NO: 278856 - RNA, 20 nt, Artificial Sequence
  Synthetic
aauggauuguuggauuaggc

SEQ ID NO: 278857 - RNA, 21 nt, Artificial Sequence
  Synthetic
aaauggauuguuggauuaggc

SEQ ID NO: 278858 - RNA, 22 nt, Artificial Sequence
  Synthetic
aaaauggauuguuggauuaggc

SEQ ID NO: 278859 - RNA, 23 nt, Artificial Sequence
  Synthetic
gaaaauggauuguuggauuaggc

SEQ ID NO: 278860 - RNA, 24 nt, Artificial Sequence
  Synthetic
agaaaauggauuguuggauuaggc

SEQ ID NO: 278861 - RNA, 18 nt, Artificial Sequence
  Synthetic
uuggcuaaaauguuaggc

SEQ ID NO: 278862 - RNA, 19 nt, Artificial Sequence
  Synthetic
cuuggcuaaaauguuaggc

SEQ ID NO: 278863 - RNA, 20 nt, Artificial Sequence
  Synthetic
acuuggcuaaaauguuaggc

SEQ ID NO: 278864 - RNA, 21 nt, Artificial Sequence
  Synthetic
aacuuggcuaaaauguuaggc

SEQ ID NO: 278865 - RNA, 22 nt, Artificial Sequence
  Synthetic
aaacuuggcuaaaauguuaggc

SEQ ID NO: 278866 - RNA, 23 nt, Artificial Sequence
  Synthetic
aaaacuuggcuaaaauguuaggc

SEQ ID NO: 278867 - RNA, 24 nt, Artificial Sequence
  Synthetic
gaaaacuuggcuaaaauguuaggc

SEQ ID NO: 278868 - RNA, 18 nt, Artificial Sequence
  Synthetic
agaggagcacguuuaggc

SEQ ID NO: 278869 - RNA, 19 nt, Artificial Sequence
  Synthetic
cagaggagcacguuuaggc

SEQ ID NO: 278870 - RNA, 20 nt, Artificial Sequence
  Synthetic
acagaggagcacguuuaggc

SEQ ID NO: 278871 - RNA, 21 nt, Artificial Sequence
  Synthetic
gacagaggagcacguuuaggc

SEQ ID NO: 278872 - RNA, 22 nt, Artificial Sequence
  Synthetic
ugacagaggagcacguuuaggc

SEQ ID NO: 278873 - RNA, 23 nt, Artificial Sequence
  Synthetic
uugacagaggagcacguuuaggc

SEQ ID NO: 278874 - RNA, 24 nt, Artificial Sequence
  Synthetic
cuugacagaggagcacguuuaggc

SEQ ID NO: 278875 - RNA, 18 nt, Artificial Sequence
  Synthetic
ugcguaucucaaaacggc

SEQ ID NO: 278876 - RNA, 19 nt, Artificial Sequence
  Synthetic
uugcguaucucaaaacggc

SEQ ID NO: 278877 - RNA, 20 nt, Artificial Sequence
  Synthetic
auugcguaucucaaaacggc

SEQ ID NO: 278878 - RNA, 21 nt, Artificial Sequence
  Synthetic
uauugcguaucucaaaacggc

SEQ ID NO: 278879 - RNA, 22 nt, Artificial Sequence
  Synthetic
guauugcguaucucaaaacggc

SEQ ID NO: 278880 - RNA, 23 nt, Artificial Sequence
  Synthetic
gguauugcguaucucaaaacggc

SEQ ID NO: 278881 - RNA, 24 nt, Artificial Sequence
  Synthetic
agguauugcguaucucaaaacggc

SEQ ID NO: 278882 - RNA, 18 nt, Artificial Sequence
  Synthetic
cuuuguuuagaguacggc

SEQ ID NO: 278883 - RNA, 19 nt, Artificial Sequence
  Synthetic
ccuuuguuuagaguacggc

SEQ ID NO: 278884 - RNA, 20 nt, Artificial Sequence
  Synthetic
gccuuuguuuagaguacggc

SEQ ID NO: 278885 - RNA, 21 nt, Artificial Sequence
  Synthetic
agccuuuguuuagaguacggc

SEQ ID NO: 278886 - RNA, 22 nt, Artificial Sequence
  Synthetic
gagccuuuguuuagaguacggc

SEQ ID NO: 278887 - RNA, 23 nt, Artificial Sequence
  Synthetic
agagccuuuguuuagaguacggc

SEQ ID NO: 278888 - RNA, 24 nt, Artificial Sequence
  Synthetic
uagagccuuuguuuagaguacggc

SEQ ID NO: 278889 - RNA, 18 nt, Artificial Sequence
  Synthetic
caaugggcuaguuacggc

SEQ ID NO: 278890 - RNA, 19 nt, Artificial Sequence
  Synthetic
gcaaugggcuaguuacggc

SEQ ID NO: 278891 - RNA, 20 nt, Artificial Sequence
  Synthetic
ggcaaugggcuaguuacggc

SEQ ID NO: 278892 - RNA, 21 nt, Artificial Sequence
  Synthetic
uggcaaugggcuaguuacggc

SEQ ID NO: 278893 - RNA, 22 nt, Artificial Sequence
  Synthetic
auggcaaugggcuaguuacggc

SEQ ID NO: 278894 - RNA, 23 nt, Artificial Sequence
  Synthetic
aauggcaaugggcuaguuacggc

SEQ ID NO: 278895 - RNA, 24 nt, Artificial Sequence
  Synthetic
aaauggcaaugggcuaguuacggc

SEQ ID NO: 278896 - RNA, 18 nt, Artificial Sequence
  Synthetic
auacaaauuuuagccggc

SEQ ID NO: 278897 - RNA, 19 nt, Artificial Sequence
  Synthetic
cauacaaauuuuagccggc

SEQ ID NO: 278898 - RNA, 20 nt, Artificial Sequence
  Synthetic
acauacaaauuuuagccggc

SEQ ID NO: 278899 - RNA, 21 nt, Artificial Sequence
  Synthetic
aacauacaaauuuuagccggc

SEQ ID NO: 278900 - RNA, 22 nt, Artificial Sequence
  Synthetic
caacauacaaauuuuagccggc

SEQ ID NO: 278901 - RNA, 23 nt, Artificial Sequence
  Synthetic
ucaacauacaaauuuuagccggc

SEQ ID NO: 278902 - RNA, 24 nt, Artificial Sequence
  Synthetic
uucaacauacaaauuuuagccggc

SEQ ID NO: 278903 - RNA, 18 nt, Artificial Sequence
  Synthetic
acaccacugcacuccggc

SEQ ID NO: 278904 - RNA, 19 nt, Artificial Sequence
  Synthetic
cacaccacugcacuccggc

SEQ ID NO: 278905 - RNA, 20 nt, Artificial Sequence
  Synthetic
ucacaccacugcacuccggc

SEQ ID NO: 278906 - RNA, 21 nt, Artificial Sequence
  Synthetic
aucacaccacugcacuccggc

SEQ ID NO: 278907 - RNA, 22 nt, Artificial Sequence
  Synthetic
gaucacaccacugcacuccggc

SEQ ID NO: 278908 - RNA, 23 nt, Artificial Sequence
  Synthetic
agaucacaccacugcacuccggc

SEQ ID NO: 278909 - RNA, 24 nt, Artificial Sequence
  Synthetic
aagaucacaccacugcacuccggc

SEQ ID NO: 278910 - RNA, 18 nt, Artificial Sequence
  Synthetic
gcagcacugcaguccggc

SEQ ID NO: 278911 - RNA, 19 nt, Artificial Sequence
  Synthetic
agcagcacugcaguccggc

SEQ ID NO: 278912 - RNA, 20 nt, Artificial Sequence
  Synthetic
cagcagcacugcaguccggc

SEQ ID NO: 278913 - RNA, 21 nt, Artificial Sequence
  Synthetic
acagcagcacugcaguccggc

SEQ ID NO: 278914 - RNA, 22 nt, Artificial Sequence
  Synthetic
gacagcagcacugcaguccggc

SEQ ID NO: 278915 - RNA, 23 nt, Artificial Sequence
  Synthetic
agacagcagcacugcaguccggc

SEQ ID NO: 278916 - RNA, 24 nt, Artificial Sequence
  Synthetic
gagacagcagcacugcaguccggc

SEQ ID NO: 278917 - RNA, 18 nt, Artificial Sequence
  Synthetic
gugaggaggagaagcggc

SEQ ID NO: 278918 - RNA, 19 nt, Artificial Sequence
  Synthetic
agugaggaggagaagcggc

SEQ ID NO: 278919 - RNA, 20 nt, Artificial Sequence
  Synthetic
aagugaggaggagaagcggc

SEQ ID NO: 278920 - RNA, 21 nt, Artificial Sequence
  Synthetic
aaagugaggaggagaagcggc

SEQ ID NO: 278921 - RNA, 22 nt, Artificial Sequence
  Synthetic
gaaagugaggaggagaagcggc

SEQ ID NO: 278922 - RNA, 23 nt, Artificial Sequence
  Synthetic
ugaaagugaggaggagaagcggc

SEQ ID NO: 278923 - RNA, 24 nt, Artificial Sequence
  Synthetic
uugaaagugaggaggagaagcggc

SEQ ID NO: 278924 - RNA, 18 nt, Artificial Sequence
  Synthetic
gcaauacagggcagcggc

SEQ ID NO: 278925 - RNA, 19 nt, Artificial Sequence
  Synthetic
agcaauacagggcagcggc

SEQ ID NO: 278926 - RNA, 20 nt, Artificial Sequence
  Synthetic
aagcaauacagggcagcggc

SEQ ID NO: 278927 - RNA, 21 nt, Artificial Sequence
  Synthetic
gaagcaauacagggcagcggc

SEQ ID NO: 278928 - RNA, 22 nt, Artificial Sequence
  Synthetic
agaagcaauacagggcagcggc

SEQ ID NO: 278929 - RNA, 23 nt, Artificial Sequence
  Synthetic
cagaagcaauacagggcagcggc

SEQ ID NO: 278930 - RNA, 24 nt, Artificial Sequence
  Synthetic
acagaagcaauacagggcagcggc

SEQ ID NO: 278931 - RNA, 18 nt, Artificial Sequence
  Synthetic
ucucguacugauagcggc

SEQ ID NO: 278932 - RNA, 19 nt, Artificial Sequence
  Synthetic
cucucguacugauagcggc

SEQ ID NO: 278933 - RNA, 20 nt, Artificial Sequence
  Synthetic
acucucguacugauagcggc

SEQ ID NO: 278934 - RNA, 21 nt, Artificial Sequence
  Synthetic
aacucucguacugauagcggc

SEQ ID NO: 278935 - RNA, 22 nt, Artificial Sequence
  Synthetic
caacucucguacugauagcggc

SEQ ID NO: 278936 - RNA, 23 nt, Artificial Sequence
  Synthetic
acaacucucguacugauagcggc

SEQ ID NO: 278937 - RNA, 24 nt, Artificial Sequence
  Synthetic
cacaacucucguacugauagcggc

SEQ ID NO: 278938 - RNA, 18 nt, Artificial Sequence
  Synthetic
uuaaaaugaauuagcggc

SEQ ID NO: 278939 - RNA, 19 nt, Artificial Sequence
  Synthetic
uuuaaaaugaauuagcggc

SEQ ID NO: 278940 - RNA, 20 nt, Artificial Sequence
  Synthetic
cuuuaaaaugaauuagcggc

SEQ ID NO: 278941 - RNA, 21 nt, Artificial Sequence
  Synthetic
ucuuuaaaaugaauuagcggc

SEQ ID NO: 278942 - RNA, 22 nt, Artificial Sequence
  Synthetic
aucuuuaaaaugaauuagcggc

SEQ ID NO: 278943 - RNA, 23 nt, Artificial Sequence
  Synthetic
uaucuuuaaaaugaauuagcggc

SEQ ID NO: 278944 - RNA, 24 nt, Artificial Sequence
  Synthetic
guaucuuuaaaaugaauuagcggc

SEQ ID NO: 278945 - RNA, 18 nt, Artificial Sequence
  Synthetic
aucccacauacucucggc

SEQ ID NO: 278946 - RNA, 19 nt, Artificial Sequence
  Synthetic
caucccacauacucucggc

SEQ ID NO: 278947 - RNA, 20 nt, Artificial Sequence
  Synthetic
ucaucccacauacucucggc

SEQ ID NO: 278948 - RNA, 21 nt, Artificial Sequence
  Synthetic
aucaucccacauacucucggc

SEQ ID NO: 278949 - RNA, 22 nt, Artificial Sequence
  Synthetic
aaucaucccacauacucucggc

SEQ ID NO: 278950 - RNA, 23 nt, Artificial Sequence
  Synthetic
aaaucaucccacauacucucggc

SEQ ID NO: 278951 - RNA, 24 nt, Artificial Sequence
  Synthetic
uaaaucaucccacauacucucggc

SEQ ID NO: 278952 - RNA, 18 nt, Artificial Sequence
  Synthetic
aaaauuauaaaauucggc

SEQ ID NO: 278953 - RNA, 19 nt, Artificial Sequence
  Synthetic
aaaaauuauaaaauucggc

SEQ ID NO: 278954 - RNA, 20 nt, Artificial Sequence
  Synthetic
aaaaaauuauaaaauucggc

SEQ ID NO: 278955 - RNA, 21 nt, Artificial Sequence
  Synthetic
gaaaaaauuauaaaauucggc

SEQ ID NO: 278956 - RNA, 22 nt, Artificial Sequence
  Synthetic
ugaaaaaauuauaaaauucggc

SEQ ID NO: 278957 - RNA, 23 nt, Artificial Sequence
  Synthetic
uugaaaaaauuauaaaauucggc

SEQ ID NO: 278958 - RNA, 24 nt, Artificial Sequence
  Synthetic
auugaaaaaauuauaaaauucggc

SEQ ID NO: 278959 - RNA, 18 nt, Artificial Sequence
  Synthetic
aauguaaacguaaagggc

SEQ ID NO: 278960 - RNA, 19 nt, Artificial Sequence
  Synthetic
uaauguaaacguaaagggc

SEQ ID NO: 278961 - RNA, 20 nt, Artificial Sequence
  Synthetic
guaauguaaacguaaagggc

SEQ ID NO: 278962 - RNA, 21 nt, Artificial Sequence
  Synthetic
uguaauguaaacguaaagggc

SEQ ID NO: 278963 - RNA, 22 nt, Artificial Sequence
  Synthetic
cuguaauguaaacguaaagggc

SEQ ID NO: 278964 - RNA, 23 nt, Artificial Sequence
  Synthetic
ucuguaauguaaacguaaagggc

SEQ ID NO: 278965 - RNA, 24 nt, Artificial Sequence
  Synthetic
uucuguaauguaaacguaaagggc

SEQ ID NO: 278966 - RNA, 18 nt, Artificial Sequence
  Synthetic
guuugagccuuaaagggc

SEQ ID NO: 278967 - RNA, 19 nt, Artificial Sequence
  Synthetic
uguuugagccuuaaagggc

SEQ ID NO: 278968 - RNA, 20 nt, Artificial Sequence
  Synthetic
auguuugagccuuaaagggc

SEQ ID NO: 278969 - RNA, 21 nt, Artificial Sequence
  Synthetic
aauguuugagccuuaaagggc

SEQ ID NO: 278970 - RNA, 22 nt, Artificial Sequence
  Synthetic
aaauguuugagccuuaaagggc

SEQ ID NO: 278971 - RNA, 23 nt, Artificial Sequence
  Synthetic
aaaauguuugagccuuaaagggc

SEQ ID NO: 278972 - RNA, 24 nt, Artificial Sequence
  Synthetic
uaaaauguuugagccuuaaagggc

SEQ ID NO: 278973 - RNA, 18 nt, Artificial Sequence
  Synthetic
ggcagaggaaacaagggc

SEQ ID NO: 278974 - RNA, 19 nt, Artificial Sequence
  Synthetic
aggcagaggaaacaagggc

SEQ ID NO: 278975 - RNA, 20 nt, Artificial Sequence
  Synthetic
caggcagaggaaacaagggc

SEQ ID NO: 278976 - RNA, 21 nt, Artificial Sequence
  Synthetic
ccaggcagaggaaacaagggc

SEQ ID NO: 278977 - RNA, 22 nt, Artificial Sequence
  Synthetic
uccaggcagaggaaacaagggc

SEQ ID NO: 278978 - RNA, 23 nt, Artificial Sequence
  Synthetic
uuccaggcagaggaaacaagggc

SEQ ID NO: 278979 - RNA, 24 nt, Artificial Sequence
  Synthetic
auuccaggcagaggaaacaagggc

SEQ ID NO: 278980 - RNA, 18 nt, Artificial Sequence
  Synthetic
agcauggggcccaagggc

SEQ ID NO: 278981 - RNA, 19 nt, Artificial Sequence
  Synthetic
aagcauggggcccaagggc

SEQ ID NO: 278982 - RNA, 20 nt, Artificial Sequence
  Synthetic
aaagcauggggcccaagggc

SEQ ID NO: 278983 - RNA, 21 nt, Artificial Sequence
  Synthetic
gaaagcauggggcccaagggc

SEQ ID NO: 278984 - RNA, 22 nt, Artificial Sequence
  Synthetic
ugaaagcauggggcccaagggc

SEQ ID NO: 278985 - RNA, 23 nt, Artificial Sequence
  Synthetic
uugaaagcauggggcccaagggc

SEQ ID NO: 278986 - RNA, 24 nt, Artificial Sequence
  Synthetic
uuugaaagcauggggcccaagggc

SEQ ID NO: 278987 - RNA, 18 nt, Artificial Sequence
  Synthetic
aaaugaucuagcaagggc

SEQ ID NO: 278988 - RNA, 19 nt, Artificial Sequence
  Synthetic
uaaaugaucuagcaagggc

SEQ ID NO: 278989 - RNA, 20 nt, Artificial Sequence
  Synthetic
uuaaaugaucuagcaagggc

SEQ ID NO: 278990 - RNA, 21 nt, Artificial Sequence
  Synthetic
cuuaaaugaucuagcaagggc

SEQ ID NO: 278991 - RNA, 22 nt, Artificial Sequence
  Synthetic
acuuaaaugaucuagcaagggc

SEQ ID NO: 278992 - RNA, 23 nt, Artificial Sequence
  Synthetic
aacuuaaaugaucuagcaagggc

SEQ ID NO: 278993 - RNA, 24 nt, Artificial Sequence
  Synthetic
uaacuuaaaugaucuagcaagggc

SEQ ID NO: 278994 - RNA, 18 nt, Artificial Sequence
  Synthetic
uauuaccaccucaagggc

SEQ ID NO: 278995 - RNA, 19 nt, Artificial Sequence
  Synthetic
cuauuaccaccucaagggc

SEQ ID NO: 278996 - RNA, 20 nt, Artificial Sequence
  Synthetic
acuauuaccaccucaagggc

SEQ ID NO: 278997 - RNA, 21 nt, Artificial Sequence
  Synthetic
aacuauuaccaccucaagggc

SEQ ID NO: 278998 - RNA, 22 nt, Artificial Sequence
  Synthetic
aaacuauuaccaccucaagggc

SEQ ID NO: 278999 - RNA, 23 nt, Artificial Sequence
  Synthetic
gaaacuauuaccaccucaagggc

SEQ ID NO: 279000 - RNA, 24 nt, Artificial Sequence
  Synthetic
ggaaacuauuaccaccucaagggc

SEQ ID NO: 279001 - RNA, 18 nt, Artificial Sequence
  Synthetic
ucuccuuuugucaagggc

SEQ ID NO: 279002 - RNA, 19 nt, Artificial Sequence
  Synthetic
aucuccuuuugucaagggc

SEQ ID NO: 279003 - RNA, 20 nt, Artificial Sequence
  Synthetic
uaucuccuuuugucaagggc

SEQ ID NO: 279004 - RNA, 21 nt, Artificial Sequence
  Synthetic
uuaucuccuuuugucaagggc

SEQ ID NO: 279005 - RNA, 22 nt, Artificial Sequence
  Synthetic
auuaucuccuuuugucaagggc

SEQ ID NO: 279006 - RNA, 23 nt, Artificial Sequence
  Synthetic
aauuaucuccuuuugucaagggc

SEQ ID NO: 279007 - RNA, 24 nt, Artificial Sequence
  Synthetic
caauuaucuccuuuugucaagggc

SEQ ID NO: 279008 - RNA, 18 nt, Artificial Sequence
  Synthetic
uuguguuuauauaagggc

SEQ ID NO: 279009 - RNA, 19 nt, Artificial Sequence
  Synthetic
uuuguguuuauauaagggc

SEQ ID NO: 279010 - RNA, 20 nt, Artificial Sequence
  Synthetic
cuuuguguuuauauaagggc

SEQ ID NO: 279011 - RNA, 21 nt, Artificial Sequence
  Synthetic
ccuuuguguuuauauaagggc

SEQ ID NO: 279012 - RNA, 22 nt, Artificial Sequence
  Synthetic
accuuuguguuuauauaagggc

SEQ ID NO: 279013 - RNA, 23 nt, Artificial Sequence
  Synthetic
aaccuuuguguuuauauaagggc

SEQ ID NO: 279014 - RNA, 24 nt, Artificial Sequence
  Synthetic
gaaccuuuguguuuauauaagggc

SEQ ID NO: 279015 - RNA, 18 nt, Artificial Sequence
  Synthetic
ucccuucaaguuaagggc

SEQ ID NO: 279016 - RNA, 19 nt, Artificial Sequence
  Synthetic
gucccuucaaguuaagggc

SEQ ID NO: 279017 - RNA, 20 nt, Artificial Sequence
  Synthetic
ugucccuucaaguuaagggc

SEQ ID NO: 279018 - RNA, 21 nt, Artificial Sequence
  Synthetic
gugucccuucaaguuaagggc

SEQ ID NO: 279019 - RNA, 22 nt, Artificial Sequence
  Synthetic
agugucccuucaaguuaagggc

SEQ ID NO: 279020 - RNA, 23 nt, Artificial Sequence
  Synthetic
uagugucccuucaaguuaagggc

SEQ ID NO: 279021 - RNA, 24 nt, Artificial Sequence
  Synthetic
uuagugucccuucaaguuaagggc

SEQ ID NO: 279022 - RNA, 18 nt, Artificial Sequence
  Synthetic
acuacuaccacacagggc

SEQ ID NO: 279023 - RNA, 19 nt, Artificial Sequence
  Synthetic
gacuacuaccacacagggc

SEQ ID NO: 279024 - RNA, 20 nt, Artificial Sequence
  Synthetic
ugacuacuaccacacagggc

SEQ ID NO: 279025 - RNA, 21 nt, Artificial Sequence
  Synthetic
cugacuacuaccacacagggc

SEQ ID NO: 279026 - RNA, 22 nt, Artificial Sequence
  Synthetic
acugacuacuaccacacagggc

SEQ ID NO: 279027 - RNA, 23 nt, Artificial Sequence
  Synthetic
uacugacuacuaccacacagggc

SEQ ID NO: 279028 - RNA, 24 nt, Artificial Sequence
  Synthetic
auacugacuacuaccacacagggc

SEQ ID NO: 279029 - RNA, 18 nt, Artificial Sequence
  Synthetic
uuaaaacaguuacagggc

SEQ ID NO: 279030 - RNA, 19 nt, Artificial Sequence
  Synthetic
auuaaaacaguuacagggc

SEQ ID NO: 279031 - RNA, 20 nt, Artificial Sequence
  Synthetic
uauuaaaacaguuacagggc

SEQ ID NO: 279032 - RNA, 21 nt, Artificial Sequence
  Synthetic
auauuaaaacaguuacagggc

SEQ ID NO: 279033 - RNA, 22 nt, Artificial Sequence
  Synthetic
aauauuaaaacaguuacagggc

SEQ ID NO: 279034 - RNA, 23 nt, Artificial Sequence
  Synthetic
aaauauuaaaacaguuacagggc

SEQ ID NO: 279035 - RNA, 24 nt, Artificial Sequence
  Synthetic
gaaauauuaaaacaguuacagggc

SEQ ID NO: 279036 - RNA, 18 nt, Artificial Sequence
  Synthetic
auauaauugguccagggc

SEQ ID NO: 279037 - RNA, 19 nt, Artificial Sequence
  Synthetic
aauauaauugguccagggc

SEQ ID NO: 279038 - RNA, 20 nt, Artificial Sequence
  Synthetic
gaauauaauugguccagggc

SEQ ID NO: 279039 - RNA, 21 nt, Artificial Sequence
  Synthetic
agaauauaauugguccagggc

SEQ ID NO: 279040 - RNA, 22 nt, Artificial Sequence
  Synthetic
uagaauauaauugguccagggc

SEQ ID NO: 279041 - RNA, 23 nt, Artificial Sequence
  Synthetic
cuagaauauaauugguccagggc

SEQ ID NO: 279042 - RNA, 24 nt, Artificial Sequence
  Synthetic
ccuagaauauaauugguccagggc

SEQ ID NO: 279043 - RNA, 18 nt, Artificial Sequence
  Synthetic
gaguguauuagucagggc

SEQ ID NO: 279044 - RNA, 19 nt, Artificial Sequence
  Synthetic
ugaguguauuagucagggc

SEQ ID NO: 279045 - RNA, 20 nt, Artificial Sequence
  Synthetic
gugaguguauuagucagggc

SEQ ID NO: 279046 - RNA, 21 nt, Artificial Sequence
  Synthetic
agugaguguauuagucagggc

SEQ ID NO: 279047 - RNA, 22 nt, Artificial Sequence
  Synthetic
aagugaguguauuagucagggc

SEQ ID NO: 279048 - RNA, 23 nt, Artificial Sequence
  Synthetic
aaagugaguguauuagucagggc

SEQ ID NO: 279049 - RNA, 24 nt, Artificial Sequence
  Synthetic
aaaagugaguguauuagucagggc

SEQ ID NO: 279050 - RNA, 18 nt, Artificial Sequence
  Synthetic
ggagcuguacaagagggc

SEQ ID NO: 279051 - RNA, 19 nt, Artificial Sequence
  Synthetic
uggagcuguacaagagggc

SEQ ID NO: 279052 - RNA, 20 nt, Artificial Sequence
  Synthetic
cuggagcuguacaagagggc

SEQ ID NO: 279053 - RNA, 21 nt, Artificial Sequence
  Synthetic
acuggagcuguacaagagggc

SEQ ID NO: 279054 - RNA, 22 nt, Artificial Sequence
  Synthetic
gacuggagcuguacaagagggc

SEQ ID NO: 279055 - RNA, 23 nt, Artificial Sequence
  Synthetic
agacuggagcuguacaagagggc

SEQ ID NO: 279056 - RNA, 24 nt, Artificial Sequence
  Synthetic
uagacuggagcuguacaagagggc

SEQ ID NO: 279057 - RNA, 18 nt, Artificial Sequence
  Synthetic
gauggacgauuagagggc

SEQ ID NO: 279058 - RNA, 19 nt, Artificial Sequence
  Synthetic
ugauggacgauuagagggc

SEQ ID NO: 279059 - RNA, 20 nt, Artificial Sequence
  Synthetic
augauggacgauuagagggc

SEQ ID NO: 279060 - RNA, 21 nt, Artificial Sequence
  Synthetic
caugauggacgauuagagggc

SEQ ID NO: 279061 - RNA, 22 nt, Artificial Sequence
  Synthetic
acaugauggacgauuagagggc

SEQ ID NO: 279062 - RNA, 23 nt, Artificial Sequence
  Synthetic
cacaugauggacgauuagagggc

SEQ ID NO: 279063 - RNA, 24 nt, Artificial Sequence
  Synthetic
ucacaugauggacgauuagagggc

SEQ ID NO: 279064 - RNA, 18 nt, Artificial Sequence
  Synthetic
uggaacaguuuggagggc

SEQ ID NO: 279065 - RNA, 19 nt, Artificial Sequence
  Synthetic
uuggaacaguuuggagggc

SEQ ID NO: 279066 - RNA, 20 nt, Artificial Sequence
  Synthetic
guuggaacaguuuggagggc

SEQ ID NO: 279067 - RNA, 21 nt, Artificial Sequence
  Synthetic
gguuggaacaguuuggagggc

SEQ ID NO: 279068 - RNA, 22 nt, Artificial Sequence
  Synthetic
agguuggaacaguuuggagggc

SEQ ID NO: 279069 - RNA, 23 nt, Artificial Sequence
  Synthetic
cagguuggaacaguuuggagggc

SEQ ID NO: 279070 - RNA, 24 nt, Artificial Sequence
  Synthetic
acagguuggaacaguuuggagggc

SEQ ID NO: 279071 - RNA, 18 nt, Artificial Sequence
  Synthetic
agagguaggaaugagggc

SEQ ID NO: 279072 - RNA, 19 nt, Artificial Sequence
  Synthetic
gagagguaggaaugagggc

SEQ ID NO: 279073 - RNA, 20 nt, Artificial Sequence
  Synthetic
ugagagguaggaaugagggc

SEQ ID NO: 279074 - RNA, 21 nt, Artificial Sequence
  Synthetic
cugagagguaggaaugagggc

SEQ ID NO: 279075 - RNA, 22 nt, Artificial Sequence
  Synthetic
ucugagagguaggaaugagggc

SEQ ID NO: 279076 - RNA, 23 nt, Artificial Sequence
  Synthetic
gucugagagguaggaaugagggc

SEQ ID NO: 279077 - RNA, 24 nt, Artificial Sequence
  Synthetic
ugucugagagguaggaaugagggc

SEQ ID NO: 279078 - RNA, 18 nt, Artificial Sequence
  Synthetic
uacuaugauucugagggc

SEQ ID NO: 279079 - RNA, 19 nt, Artificial Sequence
  Synthetic
cuacuaugauucugagggc

SEQ ID NO: 279080 - RNA, 20 nt, Artificial Sequence
  Synthetic
ccuacuaugauucugagggc

SEQ ID NO: 279081 - RNA, 21 nt, Artificial Sequence
  Synthetic
cccuacuaugauucugagggc

SEQ ID NO: 279082 - RNA, 22 nt, Artificial Sequence
  Synthetic
acccuacuaugauucugagggc

SEQ ID NO: 279083 - RNA, 23 nt, Artificial Sequence
  Synthetic
gacccuacuaugauucugagggc

SEQ ID NO: 279084 - RNA, 24 nt, Artificial Sequence
  Synthetic
ugacccuacuaugauucugagggc

SEQ ID NO: 279085 - RNA, 18 nt, Artificial Sequence
  Synthetic
uugguuccuucugagggc

SEQ ID NO: 279086 - RNA, 19 nt, Artificial Sequence
  Synthetic
guugguuccuucugagggc

SEQ ID NO: 279087 - RNA, 20 nt, Artificial Sequence
  Synthetic
gguugguuccuucugagggc

SEQ ID NO: 279088 - RNA, 21 nt, Artificial Sequence
  Synthetic
ggguugguuccuucugagggc

SEQ ID NO: 279089 - RNA, 22 nt, Artificial Sequence
  Synthetic
aggguugguuccuucugagggc

SEQ ID NO: 279090 - RNA, 23 nt, Artificial Sequence
  Synthetic
gaggguugguuccuucugagggc

SEQ ID NO: 279091 - RNA, 24 nt, Artificial Sequence
  Synthetic
ggaggguugguuccuucugagggc

SEQ ID NO: 279092 - RNA, 18 nt, Artificial Sequence
  Synthetic
guugccuggaaauagggc

SEQ ID NO: 279093 - RNA, 19 nt, Artificial Sequence
  Synthetic
uguugccuggaaauagggc

SEQ ID NO: 279094 - RNA, 20 nt, Artificial Sequence
  Synthetic
cuguugccuggaaauagggc

SEQ ID NO: 279095 - RNA, 21 nt, Artificial Sequence
  Synthetic
ucuguugccuggaaauagggc

SEQ ID NO: 279096 - RNA, 22 nt, Artificial Sequence
  Synthetic
cucuguugccuggaaauagggc

SEQ ID NO: 279097 - RNA, 23 nt, Artificial Sequence
  Synthetic
acucuguugccuggaaauagggc

SEQ ID NO: 279098 - RNA, 24 nt, Artificial Sequence
  Synthetic
cacucuguugccuggaaauagggc

SEQ ID NO: 279099 - RNA, 18 nt, Artificial Sequence
  Synthetic
guauggggguaauagggc

SEQ ID NO: 279100 - RNA, 19 nt, Artificial Sequence
  Synthetic
uguauggggguaauagggc

SEQ ID NO: 279101 - RNA, 20 nt, Artificial Sequence
  Synthetic
uuguauggggguaauagggc

SEQ ID NO: 279102 - RNA, 21 nt, Artificial Sequence
  Synthetic
cuuguauggggguaauagggc

SEQ ID NO: 279103 - RNA, 22 nt, Artificial Sequence
  Synthetic
gcuuguauggggguaauagggc

SEQ ID NO: 279104 - RNA, 23 nt, Artificial Sequence
  Synthetic
ggcuuguauggggguaauagggc

SEQ ID NO: 279105 - RNA, 24 nt, Artificial Sequence
  Synthetic
uggcuuguauggggguaauagggc

SEQ ID NO: 279106 - RNA, 18 nt, Artificial Sequence
  Synthetic
cuauccaggaacuagggc

SEQ ID NO: 279107 - RNA, 19 nt, Artificial Sequence
  Synthetic
gcuauccaggaacuagggc

SEQ ID NO: 279108 - RNA, 20 nt, Artificial Sequence
  Synthetic
ugcuauccaggaacuagggc

SEQ ID NO: 279109 - RNA, 21 nt, Artificial Sequence
  Synthetic
augcuauccaggaacuagggc

SEQ ID NO: 279110 - RNA, 22 nt, Artificial Sequence
  Synthetic
aaugcuauccaggaacuagggc

SEQ ID NO: 279111 - RNA, 23 nt, Artificial Sequence
  Synthetic
aaaugcuauccaggaacuagggc

SEQ ID NO: 279112 - RNA, 24 nt, Artificial Sequence
  Synthetic
gaaaugcuauccaggaacuagggc

SEQ ID NO: 279113 - RNA, 18 nt, Artificial Sequence
  Synthetic
gauagauuugacuagggc

SEQ ID NO: 279114 - RNA, 19 nt, Artificial Sequence
  Synthetic
ugauagauuugacuagggc

SEQ ID NO: 279115 - RNA, 20 nt, Artificial Sequence
  Synthetic
gugauagauuugacuagggc

SEQ ID NO: 279116 - RNA, 21 nt, Artificial Sequence
  Synthetic
agugauagauuugacuagggc

SEQ ID NO: 279117 - RNA, 22 nt, Artificial Sequence
  Synthetic
cagugauagauuugacuagggc

SEQ ID NO: 279118 - RNA, 23 nt, Artificial Sequence
  Synthetic
acagugauagauuugacuagggc

SEQ ID NO: 279119 - RNA, 24 nt, Artificial Sequence
  Synthetic
uacagugauagauuugacuagggc

SEQ ID NO: 279120 - RNA, 18 nt, Artificial Sequence
  Synthetic
auuccaaccagcuagggc

SEQ ID NO: 279121 - RNA, 19 nt, Artificial Sequence
  Synthetic
uauuccaaccagcuagggc

SEQ ID NO: 279122 - RNA, 20 nt, Artificial Sequence
  Synthetic
auauuccaaccagcuagggc

SEQ ID NO: 279123 - RNA, 21 nt, Artificial Sequence
  Synthetic
aauauuccaaccagcuagggc

SEQ ID NO: 279124 - RNA, 22 nt, Artificial Sequence
  Synthetic
caauauuccaaccagcuagggc

SEQ ID NO: 279125 - RNA, 23 nt, Artificial Sequence
  Synthetic
ucaauauuccaaccagcuagggc

SEQ ID NO: 279126 - RNA, 24 nt, Artificial Sequence
  Synthetic
gucaauauuccaaccagcuagggc

SEQ ID NO: 279127 - RNA, 18 nt, Artificial Sequence
  Synthetic
aguaguuucuuuuagggc

SEQ ID NO: 279128 - RNA, 19 nt, Artificial Sequence
  Synthetic
caguaguuucuuuuagggc

SEQ ID NO: 279129 - RNA, 20 nt, Artificial Sequence
  Synthetic
ucaguaguuucuuuuagggc

SEQ ID NO: 279130 - RNA, 21 nt, Artificial Sequence
  Synthetic
aucaguaguuucuuuuagggc

SEQ ID NO: 279131 - RNA, 22 nt, Artificial Sequence
  Synthetic
aaucaguaguuucuuuuagggc

SEQ ID NO: 279132 - RNA, 23 nt, Artificial Sequence
  Synthetic
caaucaguaguuucuuuuagggc

SEQ ID NO: 279133 - RNA, 24 nt, Artificial Sequence
  Synthetic
gcaaucaguaguuucuuuuagggc

SEQ ID NO: 279134 - RNA, 18 nt, Artificial Sequence
  Synthetic
agugcugggauuacgggc

SEQ ID NO: 279135 - RNA, 19 nt, Artificial Sequence
  Synthetic
aagugcugggauuacgggc

SEQ ID NO: 279136 - RNA, 20 nt, Artificial Sequence
  Synthetic
aaagugcugggauuacgggc

SEQ ID NO: 279137 - RNA, 21 nt, Artificial Sequence
  Synthetic
caaagugcugggauuacgggc

SEQ ID NO: 279138 - RNA, 22 nt, Artificial Sequence
  Synthetic
ccaaagugcugggauuacgggc

SEQ ID NO: 279139 - RNA, 23 nt, Artificial Sequence
  Synthetic
cccaaagugcugggauuacgggc

SEQ ID NO: 279140 - RNA, 24 nt, Artificial Sequence
  Synthetic
ucccaaagugcugggauuacgggc

SEQ ID NO: 279141 - RNA, 18 nt, Artificial Sequence
  Synthetic
cgauggaaucaaccgggc

SEQ ID NO: 279142 - RNA, 19 nt, Artificial Sequence
  Synthetic
acgauggaaucaaccgggc

SEQ ID NO: 279143 - RNA, 20 nt, Artificial Sequence
  Synthetic
aacgauggaaucaaccgggc

SEQ ID NO: 279144 - RNA, 21 nt, Artificial Sequence
  Synthetic
uaacgauggaaucaaccgggc

SEQ ID NO: 279145 - RNA, 22 nt, Artificial Sequence
  Synthetic
auaacgauggaaucaaccgggc

SEQ ID NO: 279146 - RNA, 23 nt, Artificial Sequence
  Synthetic
aauaacgauggaaucaaccgggc

SEQ ID NO: 279147 - RNA, 24 nt, Artificial Sequence
  Synthetic
caauaacgauggaaucaaccgggc

SEQ ID NO: 279148 - RNA, 18 nt, Artificial Sequence
  Synthetic
aaucuuggggcuccgggc

SEQ ID NO: 279149 - RNA, 19 nt, Artificial Sequence
  Synthetic
aaaucuuggggcuccgggc

SEQ ID NO: 279150 - RNA, 20 nt, Artificial Sequence
  Synthetic
gaaaucuuggggcuccgggc

SEQ ID NO: 279151 - RNA, 21 nt, Artificial Sequence
  Synthetic
ugaaaucuuggggcuccgggc

SEQ ID NO: 279152 - RNA, 22 nt, Artificial Sequence
  Synthetic
gugaaaucuuggggcuccgggc

SEQ ID NO: 279153 - RNA, 23 nt, Artificial Sequence
  Synthetic
ugugaaaucuuggggcuccgggc

SEQ ID NO: 279154 - RNA, 24 nt, Artificial Sequence
  Synthetic
augugaaaucuuggggcuccgggc

SEQ ID NO: 279155 - RNA, 18 nt, Artificial Sequence
  Synthetic
cggaggagauguccgggc

SEQ ID NO: 279156 - RNA, 19 nt, Artificial Sequence
  Synthetic
ucggaggagauguccgggc

SEQ ID NO: 279157 - RNA, 20 nt, Artificial Sequence
  Synthetic
uucggaggagauguccgggc

SEQ ID NO: 279158 - RNA, 21 nt, Artificial Sequence
  Synthetic
guucggaggagauguccgggc

SEQ ID NO: 279159 - RNA, 22 nt, Artificial Sequence
  Synthetic
aguucggaggagauguccgggc

SEQ ID NO: 279160 - RNA, 23 nt, Artificial Sequence
  Synthetic
gaguucggaggagauguccgggc

SEQ ID NO: 279161 - RNA, 24 nt, Artificial Sequence
  Synthetic
ggaguucggaggagauguccgggc

SEQ ID NO: 279162 - RNA, 18 nt, Artificial Sequence
  Synthetic
aggugagcagcagcgggc

SEQ ID NO: 279163 - RNA, 19 nt, Artificial Sequence
  Synthetic
uaggugagcagcagcgggc

SEQ ID NO: 279164 - RNA, 20 nt, Artificial Sequence
  Synthetic
guaggugagcagcagcgggc

SEQ ID NO: 279165 - RNA, 21 nt, Artificial Sequence
  Synthetic
aguaggugagcagcagcgggc

SEQ ID NO: 279166 - RNA, 22 nt, Artificial Sequence
  Synthetic
caguaggugagcagcagcgggc

SEQ ID NO: 279167 - RNA, 23 nt, Artificial Sequence
  Synthetic
gcaguaggugagcagcagcgggc

SEQ ID NO: 279168 - RNA, 24 nt, Artificial Sequence
  Synthetic
agcaguaggugagcagcagcgggc

SEQ ID NO: 279169 - RNA, 18 nt, Artificial Sequence
  Synthetic
acaccugaacaaaggggc

SEQ ID NO: 279170 - RNA, 19 nt, Artificial Sequence
  Synthetic
cacaccugaacaaaggggc

SEQ ID NO: 279171 - RNA, 20 nt, Artificial Sequence
  Synthetic
gcacaccugaacaaaggggc

SEQ ID NO: 279172 - RNA, 21 nt, Artificial Sequence
  Synthetic
agcacaccugaacaaaggggc

SEQ ID NO: 279173 - RNA, 22 nt, Artificial Sequence
  Synthetic
gagcacaccugaacaaaggggc

SEQ ID NO: 279174 - RNA, 23 nt, Artificial Sequence
  Synthetic
agagcacaccugaacaaaggggc

SEQ ID NO: 279175 - RNA, 24 nt, Artificial Sequence
  Synthetic
gagagcacaccugaacaaaggggc

SEQ ID NO: 279176 - RNA, 18 nt, Artificial Sequence
  Synthetic
uuauucuuucaaaggggc

SEQ ID NO: 279177 - RNA, 19 nt, Artificial Sequence
  Synthetic
guuauucuuucaaaggggc

SEQ ID NO: 279178 - RNA, 20 nt, Artificial Sequence
  Synthetic
aguuauucuuucaaaggggc

SEQ ID NO: 279179 - RNA, 21 nt, Artificial Sequence
  Synthetic
uaguuauucuuucaaaggggc

SEQ ID NO: 279180 - RNA, 22 nt, Artificial Sequence
  Synthetic
uuaguuauucuuucaaaggggc

SEQ ID NO: 279181 - RNA, 23 nt, Artificial Sequence
  Synthetic
guuaguuauucuuucaaaggggc

SEQ ID NO: 279182 - RNA, 24 nt, Artificial Sequence
  Synthetic
aguuaguuauucuuucaaaggggc

SEQ ID NO: 279183 - RNA, 18 nt, Artificial Sequence
  Synthetic
ggagggacggaaaggggc

SEQ ID NO: 279184 - RNA, 19 nt, Artificial Sequence
  Synthetic
uggagggacggaaaggggc

SEQ ID NO: 279185 - RNA, 20 nt, Artificial Sequence
  Synthetic
guggagggacggaaaggggc

SEQ ID NO: 279186 - RNA, 21 nt, Artificial Sequence
  Synthetic
gguggagggacggaaaggggc

SEQ ID NO: 279187 - RNA, 22 nt, Artificial Sequence
  Synthetic
ggguggagggacggaaaggggc

SEQ ID NO: 279188 - RNA, 23 nt, Artificial Sequence
  Synthetic
gggguggagggacggaaaggggc

SEQ ID NO: 279189 - RNA, 24 nt, Artificial Sequence
  Synthetic
ugggguggagggacggaaaggggc

SEQ ID NO: 279190 - RNA, 18 nt, Artificial Sequence
  Synthetic
augaauuggauaaggggc

SEQ ID NO: 279191 - RNA, 19 nt, Artificial Sequence
  Synthetic
gaugaauuggauaaggggc

SEQ ID NO: 279192 - RNA, 20 nt, Artificial Sequence
  Synthetic
ggaugaauuggauaaggggc

SEQ ID NO: 279193 - RNA, 21 nt, Artificial Sequence
  Synthetic
uggaugaauuggauaaggggc

SEQ ID NO: 279194 - RNA, 22 nt, Artificial Sequence
  Synthetic
cuggaugaauuggauaaggggc

SEQ ID NO: 279195 - RNA, 23 nt, Artificial Sequence
  Synthetic
ucuggaugaauuggauaaggggc

SEQ ID NO: 279196 - RNA, 24 nt, Artificial Sequence
  Synthetic
uucuggaugaauuggauaaggggc

SEQ ID NO: 279197 - RNA, 18 nt, Artificial Sequence
  Synthetic
auguaacagcagaggggc

SEQ ID NO: 279198 - RNA, 19 nt, Artificial Sequence
  Synthetic
cauguaacagcagaggggc

SEQ ID NO: 279199 - RNA, 20 nt, Artificial Sequence
  Synthetic
acauguaacagcagaggggc

SEQ ID NO: 279200 - RNA, 21 nt, Artificial Sequence
  Synthetic
cacauguaacagcagaggggc

SEQ ID NO: 279201 - RNA, 22 nt, Artificial Sequence
  Synthetic
ccacauguaacagcagaggggc

SEQ ID NO: 279202 - RNA, 23 nt, Artificial Sequence
  Synthetic
gccacauguaacagcagaggggc

SEQ ID NO: 279203 - RNA, 24 nt, Artificial Sequence
  Synthetic
ggccacauguaacagcagaggggc

SEQ ID NO: 279204 - RNA, 18 nt, Artificial Sequence
  Synthetic
uauauucccgagaggggc

SEQ ID NO: 279205 - RNA, 19 nt, Artificial Sequence
  Synthetic
auauauucccgagaggggc

SEQ ID NO: 279206 - RNA, 20 nt, Artificial Sequence
  Synthetic
cauauauucccgagaggggc

SEQ ID NO: 279207 - RNA, 21 nt, Artificial Sequence
  Synthetic
ccauauauucccgagaggggc

SEQ ID NO: 279208 - RNA, 22 nt, Artificial Sequence
  Synthetic
gccauauauucccgagaggggc

SEQ ID NO: 279209 - RNA, 23 nt, Artificial Sequence
  Synthetic
ggccauauauucccgagaggggc

SEQ ID NO: 279210 - RNA, 24 nt, Artificial Sequence
  Synthetic
aggccauauauucccgagaggggc

SEQ ID NO: 279211 - RNA, 18 nt, Artificial Sequence
  Synthetic
augagauuugggaggggc

SEQ ID NO: 279212 - RNA, 19 nt, Artificial Sequence
  Synthetic
caugagauuugggaggggc

SEQ ID NO: 279213 - RNA, 20 nt, Artificial Sequence
  Synthetic
acaugagauuugggaggggc

SEQ ID NO: 279214 - RNA, 21 nt, Artificial Sequence
  Synthetic
gacaugagauuugggaggggc

SEQ ID NO: 279215 - RNA, 22 nt, Artificial Sequence
  Synthetic
ugacaugagauuugggaggggc

SEQ ID NO: 279216 - RNA, 23 nt, Artificial Sequence
  Synthetic
augacaugagauuugggaggggc

SEQ ID NO: 279217 - RNA, 24 nt, Artificial Sequence
  Synthetic
gaugacaugagauuugggaggggc

SEQ ID NO: 279218 - RNA, 18 nt, Artificial Sequence
  Synthetic
gaagauggauguaggggc

SEQ ID NO: 279219 - RNA, 19 nt, Artificial Sequence
  Synthetic
agaagauggauguaggggc

SEQ ID NO: 279220 - RNA, 20 nt, Artificial Sequence
  Synthetic
cagaagauggauguaggggc

SEQ ID NO: 279221 - RNA, 21 nt, Artificial Sequence
  Synthetic
gcagaagauggauguaggggc

SEQ ID NO: 279222 - RNA, 22 nt, Artificial Sequence
  Synthetic
agcagaagauggauguaggggc

SEQ ID NO: 279223 - RNA, 23 nt, Artificial Sequence
  Synthetic
uagcagaagauggauguaggggc

SEQ ID NO: 279224 - RNA, 24 nt, Artificial Sequence
  Synthetic
guagcagaagauggauguaggggc

SEQ ID NO: 279225 - RNA, 18 nt, Artificial Sequence
  Synthetic
uccaucuguuggcggggc

SEQ ID NO: 279226 - RNA, 19 nt, Artificial Sequence
  Synthetic
auccaucuguuggcggggc

SEQ ID NO: 279227 - RNA, 20 nt, Artificial Sequence
  Synthetic
aauccaucuguuggcggggc

SEQ ID NO: 279228 - RNA, 21 nt, Artificial Sequence
  Synthetic
gaauccaucuguuggcggggc

SEQ ID NO: 279229 - RNA, 22 nt, Artificial Sequence
  Synthetic
ggaauccaucuguuggcggggc

SEQ ID NO: 279230 - RNA, 23 nt, Artificial Sequence
  Synthetic
aggaauccaucuguuggcggggc

SEQ ID NO: 279231 - RNA, 24 nt, Artificial Sequence
  Synthetic
caggaauccaucuguuggcggggc

SEQ ID NO: 279232 - RNA, 18 nt, Artificial Sequence
  Synthetic
uguaaugaggaagggggc

SEQ ID NO: 279233 - RNA, 19 nt, Artificial Sequence
  Synthetic
guguaaugaggaagggggc

SEQ ID NO: 279234 - RNA, 20 nt, Artificial Sequence
  Synthetic
uguguaaugaggaagggggc

SEQ ID NO: 279235 - RNA, 21 nt, Artificial Sequence
  Synthetic
guguguaaugaggaagggggc

SEQ ID NO: 279236 - RNA, 22 nt, Artificial Sequence
  Synthetic
uguguguaaugaggaagggggc

SEQ ID NO: 279237 - RNA, 23 nt, Artificial Sequence
  Synthetic
cuguguguaaugaggaagggggc

SEQ ID NO: 279238 - RNA, 24 nt, Artificial Sequence
  Synthetic
gcuguguguaaugaggaagggggc

SEQ ID NO: 279239 - RNA, 18 nt, Artificial Sequence
  Synthetic
agaaaaaaugaagggggc

SEQ ID NO: 279240 - RNA, 19 nt, Artificial Sequence
  Synthetic
aagaaaaaaugaagggggc

SEQ ID NO: 279241 - RNA, 20 nt, Artificial Sequence
  Synthetic
aaagaaaaaaugaagggggc

SEQ ID NO: 279242 - RNA, 21 nt, Artificial Sequence
  Synthetic
gaaagaaaaaaugaagggggc

SEQ ID NO: 279243 - RNA, 22 nt, Artificial Sequence
  Synthetic
agaaagaaaaaaugaagggggc

SEQ ID NO: 279244 - RNA, 23 nt, Artificial Sequence
  Synthetic
aagaaagaaaaaaugaagggggc

SEQ ID NO: 279245 - RNA, 24 nt, Artificial Sequence
  Synthetic
gaagaaagaaaaaaugaagggggc

SEQ ID NO: 279246 - RNA, 18 nt, Artificial Sequence
  Synthetic
acuauuccuuccgggggc

SEQ ID NO: 279247 - RNA, 19 nt, Artificial Sequence
  Synthetic
cacuauuccuuccgggggc

SEQ ID NO: 279248 - RNA, 20 nt, Artificial Sequence
  Synthetic
ccacuauuccuuccgggggc

SEQ ID NO: 279249 - RNA, 21 nt, Artificial Sequence
  Synthetic
accacuauuccuuccgggggc

SEQ ID NO: 279250 - RNA, 22 nt, Artificial Sequence
  Synthetic
aaccacuauuccuuccgggggc

SEQ ID NO: 279251 - RNA, 23 nt, Artificial Sequence
  Synthetic
uaaccacuauuccuuccgggggc

SEQ ID NO: 279252 - RNA, 24 nt, Artificial Sequence
  Synthetic
uuaaccacuauuccuuccgggggc

SEQ ID NO: 279253 - RNA, 18 nt, Artificial Sequence
  Synthetic
guucucaaaauggggggc

SEQ ID NO: 279254 - RNA, 19 nt, Artificial Sequence
  Synthetic
gguucucaaaauggggggc

SEQ ID NO: 279255 - RNA, 20 nt, Artificial Sequence
  Synthetic
ugguucucaaaauggggggc

SEQ ID NO: 279256 - RNA, 21 nt, Artificial Sequence
  Synthetic
augguucucaaaauggggggc

SEQ ID NO: 279257 - RNA, 22 nt, Artificial Sequence
  Synthetic
aaugguucucaaaauggggggc

SEQ ID NO: 279258 - RNA, 23 nt, Artificial Sequence
  Synthetic
caaugguucucaaaauggggggc

SEQ ID NO: 279259 - RNA, 24 nt, Artificial Sequence
  Synthetic
gcaaugguucucaaaauggggggc

SEQ ID NO: 279260 - RNA, 18 nt, Artificial Sequence
  Synthetic
ugucgcgagguggggggc

SEQ ID NO: 279261 - RNA, 19 nt, Artificial Sequence
  Synthetic
cugucgcgagguggggggc

SEQ ID NO: 279262 - RNA, 20 nt, Artificial Sequence
  Synthetic
ccugucgcgagguggggggc

SEQ ID NO: 279263 - RNA, 21 nt, Artificial Sequence
  Synthetic
gccugucgcgagguggggggc

SEQ ID NO: 279264 - RNA, 22 nt, Artificial Sequence
  Synthetic
ggccugucgcgagguggggggc

SEQ ID NO: 279265 - RNA, 23 nt, Artificial Sequence
  Synthetic
aggccugucgcgagguggggggc

SEQ ID NO: 279266 - RNA, 24 nt, Artificial Sequence
  Synthetic
gaggccugucgcgagguggggggc

SEQ ID NO: 279267 - RNA, 18 nt, Artificial Sequence
  Synthetic
cauuuauuuagugggggc

SEQ ID NO: 279268 - RNA, 19 nt, Artificial Sequence
  Synthetic
gcauuuauuuagugggggc

SEQ ID NO: 279269 - RNA, 20 nt, Artificial Sequence
  Synthetic
agcauuuauuuagugggggc

SEQ ID NO: 279270 - RNA, 21 nt, Artificial Sequence
  Synthetic
cagcauuuauuuagugggggc

SEQ ID NO: 279271 - RNA, 22 nt, Artificial Sequence
  Synthetic
ucagcauuuauuuagugggggc

SEQ ID NO: 279272 - RNA, 23 nt, Artificial Sequence
  Synthetic
uucagcauuuauuuagugggggc

SEQ ID NO: 279273 - RNA, 24 nt, Artificial Sequence
  Synthetic
guucagcauuuauuuagugggggc

SEQ ID NO: 279274 - RNA, 18 nt, Artificial Sequence
  Synthetic
cccccgaggauugggggc

SEQ ID NO: 279275 - RNA, 19 nt, Artificial Sequence
  Synthetic
ucccccgaggauugggggc

SEQ ID NO: 279276 - RNA, 20 nt, Artificial Sequence
  Synthetic
cucccccgaggauugggggc

SEQ ID NO: 279277 - RNA, 21 nt, Artificial Sequence
  Synthetic
ucucccccgaggauugggggc

SEQ ID NO: 279278 - RNA, 22 nt, Artificial Sequence
  Synthetic
aucucccccgaggauugggggc

SEQ ID NO: 279279 - RNA, 23 nt, Artificial Sequence
  Synthetic
aaucucccccgaggauugggggc

SEQ ID NO: 279280 - RNA, 24 nt, Artificial Sequence
  Synthetic
gaaucucccccgaggauugggggc

SEQ ID NO: 279281 - RNA, 18 nt, Artificial Sequence
  Synthetic
cuggaagagaaauggggc

SEQ ID NO: 279282 - RNA, 19 nt, Artificial Sequence
  Synthetic
gcuggaagagaaauggggc

SEQ ID NO: 279283 - RNA, 20 nt, Artificial Sequence
  Synthetic
agcuggaagagaaauggggc

SEQ ID NO: 279284 - RNA, 21 nt, Artificial Sequence
  Synthetic
cagcuggaagagaaauggggc

SEQ ID NO: 279285 - RNA, 22 nt, Artificial Sequence
  Synthetic
gcagcuggaagagaaauggggc

SEQ ID NO: 279286 - RNA, 23 nt, Artificial Sequence
  Synthetic
agcagcuggaagagaaauggggc

SEQ ID NO: 279287 - RNA, 24 nt, Artificial Sequence
  Synthetic
aagcagcuggaagagaaauggggc

SEQ ID NO: 279288 - RNA, 18 nt, Artificial Sequence
  Synthetic
uccaaugugaaauggggc

SEQ ID NO: 279289 - RNA, 19 nt, Artificial Sequence
  Synthetic
auccaaugugaaauggggc

SEQ ID NO: 279290 - RNA, 20 nt, Artificial Sequence
  Synthetic
uauccaaugugaaauggggc

SEQ ID NO: 279291 - RNA, 21 nt, Artificial Sequence
  Synthetic
uuauccaaugugaaauggggc

SEQ ID NO: 279292 - RNA, 22 nt, Artificial Sequence
  Synthetic
uuuauccaaugugaaauggggc

SEQ ID NO: 279293 - RNA, 23 nt, Artificial Sequence
  Synthetic
uuuuauccaaugugaaauggggc

SEQ ID NO: 279294 - RNA, 24 nt, Artificial Sequence
  Synthetic
guuuuauccaaugugaaauggggc

SEQ ID NO: 279295 - RNA, 18 nt, Artificial Sequence
  Synthetic
cuaaagaggagauggggc

SEQ ID NO: 279296 - RNA, 19 nt, Artificial Sequence
  Synthetic
gcuaaagaggagauggggc

SEQ ID NO: 279297 - RNA, 20 nt, Artificial Sequence
  Synthetic
agcuaaagaggagauggggc

SEQ ID NO: 279298 - RNA, 21 nt, Artificial Sequence
  Synthetic
aagcuaaagaggagauggggc

SEQ ID NO: 279299 - RNA, 22 nt, Artificial Sequence
  Synthetic
caagcuaaagaggagauggggc

SEQ ID NO: 279300 - RNA, 23 nt, Artificial Sequence
  Synthetic
ccaagcuaaagaggagauggggc

SEQ ID NO: 279301 - RNA, 24 nt, Artificial Sequence
  Synthetic
accaagcuaaagaggagauggggc

SEQ ID NO: 279302 - RNA, 18 nt, Artificial Sequence
  Synthetic
guuggucugggauggggc

SEQ ID NO: 279303 - RNA, 19 nt, Artificial Sequence
  Synthetic
aguuggucugggauggggc

SEQ ID NO: 279304 - RNA, 20 nt, Artificial Sequence
  Synthetic
caguuggucugggauggggc

SEQ ID NO: 279305 - RNA, 21 nt, Artificial Sequence
  Synthetic
ucaguuggucugggauggggc

SEQ ID NO: 279306 - RNA, 22 nt, Artificial Sequence
  Synthetic
gucaguuggucugggauggggc

SEQ ID NO: 279307 - RNA, 23 nt, Artificial Sequence
  Synthetic
ugucaguuggucugggauggggc

SEQ ID NO: 279308 - RNA, 24 nt, Artificial Sequence
  Synthetic
gugucaguuggucugggauggggc

SEQ ID NO: 279309 - RNA, 18 nt, Artificial Sequence
  Synthetic
uacccgaaaggcuggggc

SEQ ID NO: 279310 - RNA, 19 nt, Artificial Sequence
  Synthetic
cuacccgaaaggcuggggc

SEQ ID NO: 279311 - RNA, 20 nt, Artificial Sequence
  Synthetic
gcuacccgaaaggcuggggc

SEQ ID NO: 279312 - RNA, 21 nt, Artificial Sequence
  Synthetic
agcuacccgaaaggcuggggc

SEQ ID NO: 279313 - RNA, 22 nt, Artificial Sequence
  Synthetic
cagcuacccgaaaggcuggggc

SEQ ID NO: 279314 - RNA, 23 nt, Artificial Sequence
  Synthetic
ccagcuacccgaaaggcuggggc

SEQ ID NO: 279315 - RNA, 24 nt, Artificial Sequence
  Synthetic
cccagcuacccgaaaggcuggggc

SEQ ID NO: 279316 - RNA, 18 nt, Artificial Sequence
  Synthetic
gacauggccuucuggggc

SEQ ID NO: 279317 - RNA, 19 nt, Artificial Sequence
  Synthetic
ggacauggccuucuggggc

SEQ ID NO: 279318 - RNA, 20 nt, Artificial Sequence
  Synthetic
gggacauggccuucuggggc

SEQ ID NO: 279319 - RNA, 21 nt, Artificial Sequence
  Synthetic
agggacauggccuucuggggc

SEQ ID NO: 279320 - RNA, 22 nt, Artificial Sequence
  Synthetic
uagggacauggccuucuggggc

SEQ ID NO: 279321 - RNA, 23 nt, Artificial Sequence
  Synthetic
cuagggacauggccuucuggggc

SEQ ID NO: 279322 - RNA, 24 nt, Artificial Sequence
  Synthetic
ccuagggacauggccuucuggggc

SEQ ID NO: 279323 - RNA, 18 nt, Artificial Sequence
  Synthetic
agccuccaguucuggggc

SEQ ID NO: 279324 - RNA, 19 nt, Artificial Sequence
  Synthetic
aagccuccaguucuggggc

SEQ ID NO: 279325 - RNA, 20 nt, Artificial Sequence
  Synthetic
uaagccuccaguucuggggc

SEQ ID NO: 279326 - RNA, 21 nt, Artificial Sequence
  Synthetic
uuaagccuccaguucuggggc

SEQ ID NO: 279327 - RNA, 22 nt, Artificial Sequence
  Synthetic
cuuaagccuccaguucuggggc

SEQ ID NO: 279328 - RNA, 23 nt, Artificial Sequence
  Synthetic
ucuuaagccuccaguucuggggc

SEQ ID NO: 279329 - RNA, 24 nt, Artificial Sequence
  Synthetic
gucuuaagccuccaguucuggggc

SEQ ID NO: 279330 - RNA, 18 nt, Artificial Sequence
  Synthetic
cuaagcugcaaguggggc

SEQ ID NO: 279331 - RNA, 19 nt, Artificial Sequence
  Synthetic
ucuaagcugcaaguggggc

SEQ ID NO: 279332 - RNA, 20 nt, Artificial Sequence
  Synthetic
aucuaagcugcaaguggggc

SEQ ID NO: 279333 - RNA, 21 nt, Artificial Sequence
  Synthetic
caucuaagcugcaaguggggc

SEQ ID NO: 279334 - RNA, 22 nt, Artificial Sequence
  Synthetic
acaucuaagcugcaaguggggc

SEQ ID NO: 279335 - RNA, 23 nt, Artificial Sequence
  Synthetic
cacaucuaagcugcaaguggggc

SEQ ID NO: 279336 - RNA, 24 nt, Artificial Sequence
  Synthetic
ccacaucuaagcugcaaguggggc

SEQ ID NO: 279337 - RNA, 18 nt, Artificial Sequence
  Synthetic
aggccacgacaguggggc

SEQ ID NO: 279338 - RNA, 19 nt, Artificial Sequence
  Synthetic
aaggccacgacaguggggc

SEQ ID NO: 279339 - RNA, 20 nt, Artificial Sequence
  Synthetic
aaaggccacgacaguggggc

SEQ ID NO: 279340 - RNA, 21 nt, Artificial Sequence
  Synthetic
gaaaggccacgacaguggggc

SEQ ID NO: 279341 - RNA, 22 nt, Artificial Sequence
  Synthetic
agaaaggccacgacaguggggc

SEQ ID NO: 279342 - RNA, 23 nt, Artificial Sequence
  Synthetic
aagaaaggccacgacaguggggc

SEQ ID NO: 279343 - RNA, 24 nt, Artificial Sequence
  Synthetic
caagaaaggccacgacaguggggc

SEQ ID NO: 279344 - RNA, 18 nt, Artificial Sequence
  Synthetic
ccugucgggggguggggc

SEQ ID NO: 279345 - RNA, 19 nt, Artificial Sequence
  Synthetic
gccugucgggggguggggc

SEQ ID NO: 279346 - RNA, 20 nt, Artificial Sequence
  Synthetic
ggccugucgggggguggggc

SEQ ID NO: 279347 - RNA, 21 nt, Artificial Sequence
  Synthetic
aggccugucgggggguggggc

SEQ ID NO: 279348 - RNA, 22 nt, Artificial Sequence
  Synthetic
gaggccugucgggggguggggc

SEQ ID NO: 279349 - RNA, 23 nt, Artificial Sequence
  Synthetic
ugaggccugucgggggguggggc

SEQ ID NO: 279350 - RNA, 24 nt, Artificial Sequence
  Synthetic
cugaggccugucgggggguggggc

SEQ ID NO: 279351 - RNA, 18 nt, Artificial Sequence
  Synthetic
aauuaauagugguggggc

SEQ ID NO: 279352 - RNA, 19 nt, Artificial Sequence
  Synthetic
gaauuaauagugguggggc

SEQ ID NO: 279353 - RNA, 20 nt, Artificial Sequence
  Synthetic
ggaauuaauagugguggggc

SEQ ID NO: 279354 - RNA, 21 nt, Artificial Sequence
  Synthetic
aggaauuaauagugguggggc

SEQ ID NO: 279355 - RNA, 22 nt, Artificial Sequence
  Synthetic
gaggaauuaauagugguggggc

SEQ ID NO: 279356 - RNA, 23 nt, Artificial Sequence
  Synthetic
agaggaauuaauagugguggggc

SEQ ID NO: 279357 - RNA, 24 nt, Artificial Sequence
  Synthetic
aagaggaauuaauagugguggggc

SEQ ID NO: 279358 - RNA, 18 nt, Artificial Sequence
  Synthetic
ugugcaagguauuggggc

SEQ ID NO: 279359 - RNA, 19 nt, Artificial Sequence
  Synthetic
gugugcaagguauuggggc

SEQ ID NO: 279360 - RNA, 20 nt, Artificial Sequence
  Synthetic
agugugcaagguauuggggc

SEQ ID NO: 279361 - RNA, 21 nt, Artificial Sequence
  Synthetic
cagugugcaagguauuggggc

SEQ ID NO: 279362 - RNA, 22 nt, Artificial Sequence
  Synthetic
acagugugcaagguauuggggc

SEQ ID NO: 279363 - RNA, 23 nt, Artificial Sequence
  Synthetic
uacagugugcaagguauuggggc

SEQ ID NO: 279364 - RNA, 24 nt, Artificial Sequence
  Synthetic
uuacagugugcaagguauuggggc

SEQ ID NO: 279365 - RNA, 18 nt, Artificial Sequence
  Synthetic
agugguggggcuuggggc

SEQ ID NO: 279366 - RNA, 19 nt, Artificial Sequence
  Synthetic
uagugguggggcuuggggc

SEQ ID NO: 279367 - RNA, 20 nt, Artificial Sequence
  Synthetic
auagugguggggcuuggggc

SEQ ID NO: 279368 - RNA, 21 nt, Artificial Sequence
  Synthetic
aauagugguggggcuuggggc

SEQ ID NO: 279369 - RNA, 22 nt, Artificial Sequence
  Synthetic
uaauagugguggggcuuggggc

SEQ ID NO: 279370 - RNA, 23 nt, Artificial Sequence
  Synthetic
uuaauagugguggggcuuggggc

SEQ ID NO: 279371 - RNA, 24 nt, Artificial Sequence
  Synthetic
auuaauagugguggggcuuggggc

SEQ ID NO: 279372 - RNA, 18 nt, Artificial Sequence
  Synthetic
auggaccagcaaaugggc

SEQ ID NO: 279373 - RNA, 19 nt, Artificial Sequence
  Synthetic
gauggaccagcaaaugggc

SEQ ID NO: 279374 - RNA, 20 nt, Artificial Sequence
  Synthetic
agauggaccagcaaaugggc

SEQ ID NO: 279375 - RNA, 21 nt, Artificial Sequence
  Synthetic
gagauggaccagcaaaugggc

SEQ ID NO: 279376 - RNA, 22 nt, Artificial Sequence
  Synthetic
agagauggaccagcaaaugggc

SEQ ID NO: 279377 - RNA, 23 nt, Artificial Sequence
  Synthetic
aagagauggaccagcaaaugggc

SEQ ID NO: 279378 - RNA, 24 nt, Artificial Sequence
  Synthetic
aaagagauggaccagcaaaugggc

SEQ ID NO: 279379 - RNA, 18 nt, Artificial Sequence
  Synthetic
ugugccuuaggaaugggc

SEQ ID NO: 279380 - RNA, 19 nt, Artificial Sequence
  Synthetic
uugugccuuaggaaugggc

SEQ ID NO: 279381 - RNA, 20 nt, Artificial Sequence
  Synthetic
cuugugccuuaggaaugggc

SEQ ID NO: 279382 - RNA, 21 nt, Artificial Sequence
  Synthetic
ccuugugccuuaggaaugggc

SEQ ID NO: 279383 - RNA, 22 nt, Artificial Sequence
  Synthetic
gccuugugccuuaggaaugggc

SEQ ID NO: 279384 - RNA, 23 nt, Artificial Sequence
  Synthetic
agccuugugccuuaggaaugggc

SEQ ID NO: 279385 - RNA, 24 nt, Artificial Sequence
  Synthetic
uagccuugugccuuaggaaugggc

SEQ ID NO: 279386 - RNA, 18 nt, Artificial Sequence
  Synthetic
caggacauaggcaugggc

SEQ ID NO: 279387 - RNA, 19 nt, Artificial Sequence
  Synthetic
ucaggacauaggcaugggc

SEQ ID NO: 279388 - RNA, 20 nt, Artificial Sequence
  Synthetic
uucaggacauaggcaugggc

SEQ ID NO: 279389 - RNA, 21 nt, Artificial Sequence
  Synthetic
auucaggacauaggcaugggc

SEQ ID NO: 279390 - RNA, 22 nt, Artificial Sequence
  Synthetic
cauucaggacauaggcaugggc

SEQ ID NO: 279391 - RNA, 23 nt, Artificial Sequence
  Synthetic
ccauucaggacauaggcaugggc

SEQ ID NO: 279392 - RNA, 24 nt, Artificial Sequence
  Synthetic
accauucaggacauaggcaugggc

SEQ ID NO: 279393 - RNA, 18 nt, Artificial Sequence
  Synthetic
augggcuaaaagaugggc

SEQ ID NO: 279394 - RNA, 19 nt, Artificial Sequence
  Synthetic
gaugggcuaaaagaugggc

SEQ ID NO: 279395 - RNA, 20 nt, Artificial Sequence
  Synthetic
agaugggcuaaaagaugggc

SEQ ID NO: 279396 - RNA, 21 nt, Artificial Sequence
  Synthetic
aagaugggcuaaaagaugggc

SEQ ID NO: 279397 - RNA, 22 nt, Artificial Sequence
  Synthetic
aaagaugggcuaaaagaugggc

SEQ ID NO: 279398 - RNA, 23 nt, Artificial Sequence
  Synthetic
aaaagaugggcuaaaagaugggc

SEQ ID NO: 279399 - RNA, 24 nt, Artificial Sequence
  Synthetic
aaaaagaugggcuaaaagaugggc

SEQ ID NO: 279400 - RNA, 18 nt, Artificial Sequence
  Synthetic
guagaaaugaauaugggc

SEQ ID NO: 279401 - RNA, 19 nt, Artificial Sequence
  Synthetic
cguagaaaugaauaugggc

SEQ ID NO: 279402 - RNA, 20 nt, Artificial Sequence
  Synthetic
ucguagaaaugaauaugggc

SEQ ID NO: 279403 - RNA, 21 nt, Artificial Sequence
  Synthetic
aucguagaaaugaauaugggc

SEQ ID NO: 279404 - RNA, 22 nt, Artificial Sequence
  Synthetic
aaucguagaaaugaauaugggc

SEQ ID NO: 279405 - RNA, 23 nt, Artificial Sequence
  Synthetic
aaaucguagaaaugaauaugggc

SEQ ID NO: 279406 - RNA, 24 nt, Artificial Sequence
  Synthetic
gaaaucguagaaaugaauaugggc

SEQ ID NO: 279407 - RNA, 18 nt, Artificial Sequence
  Synthetic
auaacaugucauaugggc

SEQ ID NO: 279408 - RNA, 19 nt, Artificial Sequence
  Synthetic
uauaacaugucauaugggc

SEQ ID NO: 279409 - RNA, 20 nt, Artificial Sequence
  Synthetic
auauaacaugucauaugggc

SEQ ID NO: 279410 - RNA, 21 nt, Artificial Sequence
  Synthetic
uauauaacaugucauaugggc

SEQ ID NO: 279411 - RNA, 22 nt, Artificial Sequence
  Synthetic
uuauauaacaugucauaugggc

SEQ ID NO: 279412 - RNA, 23 nt, Artificial Sequence
  Synthetic
cuuauauaacaugucauaugggc

SEQ ID NO: 279413 - RNA, 24 nt, Artificial Sequence
  Synthetic
acuuauauaacaugucauaugggc

SEQ ID NO: 279414 - RNA, 18 nt, Artificial Sequence
  Synthetic
gcauaaaauuauaugggc

SEQ ID NO: 279415 - RNA, 19 nt, Artificial Sequence
  Synthetic
ugcauaaaauuauaugggc

SEQ ID NO: 279416 - RNA, 20 nt, Artificial Sequence
  Synthetic
cugcauaaaauuauaugggc

SEQ ID NO: 279417 - RNA, 21 nt, Artificial Sequence
  Synthetic
acugcauaaaauuauaugggc

SEQ ID NO: 279418 - RNA, 22 nt, Artificial Sequence
  Synthetic
aacugcauaaaauuauaugggc

SEQ ID NO: 279419 - RNA, 23 nt, Artificial Sequence
  Synthetic
aaacugcauaaaauuauaugggc

SEQ ID NO: 279420 - RNA, 24 nt, Artificial Sequence
  Synthetic
aaaacugcauaaaauuauaugggc

SEQ ID NO: 279421 - RNA, 18 nt, Artificial Sequence
  Synthetic
auggguuacuuccugggc

SEQ ID NO: 279422 - RNA, 19 nt, Artificial Sequence
  Synthetic
uauggguuacuuccugggc

SEQ ID NO: 279423 - RNA, 20 nt, Artificial Sequence
  Synthetic
auauggguuacuuccugggc

SEQ ID NO: 279424 - RNA, 21 nt, Artificial Sequence
  Synthetic
gauauggguuacuuccugggc

SEQ ID NO: 279425 - RNA, 22 nt, Artificial Sequence
  Synthetic
ggauauggguuacuuccugggc

SEQ ID NO: 279426 - RNA, 23 nt, Artificial Sequence
  Synthetic
gggauauggguuacuuccugggc

SEQ ID NO: 279427 - RNA, 24 nt, Artificial Sequence
  Synthetic
ugggauauggguuacuuccugggc

SEQ ID NO: 279428 - RNA, 18 nt, Artificial Sequence
  Synthetic
auccacaagcugcugggc

SEQ ID NO: 279429 - RNA, 19 nt, Artificial Sequence
  Synthetic
uauccacaagcugcugggc

SEQ ID NO: 279430 - RNA, 20 nt, Artificial Sequence
  Synthetic
uuauccacaagcugcugggc

SEQ ID NO: 279431 - RNA, 21 nt, Artificial Sequence
  Synthetic
cuuauccacaagcugcugggc

SEQ ID NO: 279432 - RNA, 22 nt, Artificial Sequence
  Synthetic
ucuuauccacaagcugcugggc

SEQ ID NO: 279433 - RNA, 23 nt, Artificial Sequence
  Synthetic
uucuuauccacaagcugcugggc

SEQ ID NO: 279434 - RNA, 24 nt, Artificial Sequence
  Synthetic
uuucuuauccacaagcugcugggc

SEQ ID NO: 279435 - RNA, 18 nt, Artificial Sequence
  Synthetic
cuaggcacucuucugggc

SEQ ID NO: 279436 - RNA, 19 nt, Artificial Sequence
  Synthetic
acuaggcacucuucugggc

SEQ ID NO: 279437 - RNA, 20 nt, Artificial Sequence
  Synthetic
uacuaggcacucuucugggc

SEQ ID NO: 279438 - RNA, 21 nt, Artificial Sequence
  Synthetic
guacuaggcacucuucugggc

SEQ ID NO: 279439 - RNA, 22 nt, Artificial Sequence
  Synthetic
uguacuaggcacucuucugggc

SEQ ID NO: 279440 - RNA, 23 nt, Artificial Sequence
  Synthetic
auguacuaggcacucuucugggc

SEQ ID NO: 279441 - RNA, 24 nt, Artificial Sequence
  Synthetic
uauguacuaggcacucuucugggc

SEQ ID NO: 279442 - RNA, 18 nt, Artificial Sequence
  Synthetic
auuaaccaaaaagugggc

SEQ ID NO: 279443 - RNA, 19 nt, Artificial Sequence
  Synthetic
cauuaaccaaaaagugggc

SEQ ID NO: 279444 - RNA, 20 nt, Artificial Sequence
  Synthetic
ucauuaaccaaaaagugggc

SEQ ID NO: 279445 - RNA, 21 nt, Artificial Sequence
  Synthetic
gucauuaaccaaaaagugggc

SEQ ID NO: 279446 - RNA, 22 nt, Artificial Sequence
  Synthetic
ugucauuaaccaaaaagugggc

SEQ ID NO: 279447 - RNA, 23 nt, Artificial Sequence
  Synthetic
cugucauuaaccaaaaagugggc

SEQ ID NO: 279448 - RNA, 24 nt, Artificial Sequence
  Synthetic
ucugucauuaaccaaaaagugggc

SEQ ID NO: 279449 - RNA, 18 nt, Artificial Sequence
  Synthetic
aagaccgguaaagugggc

SEQ ID NO: 279450 - RNA, 19 nt, Artificial Sequence
  Synthetic
gaagaccgguaaagugggc

SEQ ID NO: 279451 - RNA, 20 nt, Artificial Sequence
  Synthetic
agaagaccgguaaagugggc

SEQ ID NO: 279452 - RNA, 21 nt, Artificial Sequence
  Synthetic
gagaagaccgguaaagugggc

SEQ ID NO: 279453 - RNA, 22 nt, Artificial Sequence
  Synthetic
ugagaagaccgguaaagugggc

SEQ ID NO: 279454 - RNA, 23 nt, Artificial Sequence
  Synthetic
augagaagaccgguaaagugggc

SEQ ID NO: 279455 - RNA, 24 nt, Artificial Sequence
  Synthetic
aaugagaagaccgguaaagugggc

SEQ ID NO: 279456 - RNA, 18 nt, Artificial Sequence
  Synthetic
auuccaaaaucagugggc

SEQ ID NO: 279457 - RNA, 19 nt, Artificial Sequence
  Synthetic
uauuccaaaaucagugggc

SEQ ID NO: 279458 - RNA, 20 nt, Artificial Sequence
  Synthetic
cuauuccaaaaucagugggc

SEQ ID NO: 279459 - RNA, 21 nt, Artificial Sequence
  Synthetic
gcuauuccaaaaucagugggc

SEQ ID NO: 279460 - RNA, 22 nt, Artificial Sequence
  Synthetic
agcuauuccaaaaucagugggc

SEQ ID NO: 279461 - RNA, 23 nt, Artificial Sequence
  Synthetic
cagcuauuccaaaaucagugggc

SEQ ID NO: 279462 - RNA, 24 nt, Artificial Sequence
  Synthetic
ccagcuauuccaaaaucagugggc

SEQ ID NO: 279463 - RNA, 18 nt, Artificial Sequence
  Synthetic
uguggcuugagagugggc

SEQ ID NO: 279464 - RNA, 19 nt, Artificial Sequence
  Synthetic
guguggcuugagagugggc

SEQ ID NO: 279465 - RNA, 20 nt, Artificial Sequence
  Synthetic
uguguggcuugagagugggc

SEQ ID NO: 279466 - RNA, 21 nt, Artificial Sequence
  Synthetic
auguguggcuugagagugggc

SEQ ID NO: 279467 - RNA, 22 nt, Artificial Sequence
  Synthetic
uauguguggcuugagagugggc

SEQ ID NO: 279468 - RNA, 23 nt, Artificial Sequence
  Synthetic
guauguguggcuugagagugggc

SEQ ID NO: 279469 - RNA, 24 nt, Artificial Sequence
  Synthetic
gguauguguggcuugagagugggc

SEQ ID NO: 279470 - RNA, 18 nt, Artificial Sequence
  Synthetic
ugccguaguagggugggc

SEQ ID NO: 279471 - RNA, 19 nt, Artificial Sequence
  Synthetic
augccguaguagggugggc

SEQ ID NO: 279472 - RNA, 20 nt, Artificial Sequence
  Synthetic
uaugccguaguagggugggc

SEQ ID NO: 279473 - RNA, 21 nt, Artificial Sequence
  Synthetic
uuaugccguaguagggugggc

SEQ ID NO: 279474 - RNA, 22 nt, Artificial Sequence
  Synthetic
cuuaugccguaguagggugggc

SEQ ID NO: 279475 - RNA, 23 nt, Artificial Sequence
  Synthetic
ccuuaugccguaguagggugggc

SEQ ID NO: 279476 - RNA, 24 nt, Artificial Sequence
  Synthetic
accuuaugccguaguagggugggc

SEQ ID NO: 279477 - RNA, 18 nt, Artificial Sequence
  Synthetic
uucacagauggggugggc

SEQ ID NO: 279478 - RNA, 19 nt, Artificial Sequence
  Synthetic
uuucacagauggggugggc

SEQ ID NO: 279479 - RNA, 20 nt, Artificial Sequence
  Synthetic
auuucacagauggggugggc

SEQ ID NO: 279480 - RNA, 21 nt, Artificial Sequence
  Synthetic
aauuucacagauggggugggc

SEQ ID NO: 279481 - RNA, 22 nt, Artificial Sequence
  Synthetic
aaauuucacagauggggugggc

SEQ ID NO: 279482 - RNA, 23 nt, Artificial Sequence
  Synthetic
aaaauuucacagauggggugggc

SEQ ID NO: 279483 - RNA, 24 nt, Artificial Sequence
  Synthetic
aaaaauuucacagauggggugggc

SEQ ID NO: 279484 - RNA, 18 nt, Artificial Sequence
  Synthetic
gucagcuaaugggugggc

SEQ ID NO: 279485 - RNA, 19 nt, Artificial Sequence
  Synthetic
agucagcuaaugggugggc

SEQ ID NO: 279486 - RNA, 20 nt, Artificial Sequence
  Synthetic
cagucagcuaaugggugggc

SEQ ID NO: 279487 - RNA, 21 nt, Artificial Sequence
  Synthetic
ucagucagcuaaugggugggc

SEQ ID NO: 279488 - RNA, 22 nt, Artificial Sequence
  Synthetic
uucagucagcuaaugggugggc

SEQ ID NO: 279489 - RNA, 23 nt, Artificial Sequence
  Synthetic
uuucagucagcuaaugggugggc

SEQ ID NO: 279490 - RNA, 24 nt, Artificial Sequence
  Synthetic
uuuucagucagcuaaugggugggc

SEQ ID NO: 279491 - RNA, 18 nt, Artificial Sequence
  Synthetic
ugccucccucuugugggc

SEQ ID NO: 279492 - RNA, 19 nt, Artificial Sequence
  Synthetic
cugccucccucuugugggc

SEQ ID NO: 279493 - RNA, 20 nt, Artificial Sequence
  Synthetic
ccugccucccucuugugggc

SEQ ID NO: 279494 - RNA, 21 nt, Artificial Sequence
  Synthetic
uccugccucccucuugugggc

SEQ ID NO: 279495 - RNA, 22 nt, Artificial Sequence
  Synthetic
auccugccucccucuugugggc

SEQ ID NO: 279496 - RNA, 23 nt, Artificial Sequence
  Synthetic
cauccugccucccucuugugggc

SEQ ID NO: 279497 - RNA, 24 nt, Artificial Sequence
  Synthetic
ccauccugccucccucuugugggc

SEQ ID NO: 279498 - RNA, 18 nt, Artificial Sequence
  Synthetic
auuaaucaguccuugggc

SEQ ID NO: 279499 - RNA, 19 nt, Artificial Sequence
  Synthetic
cauuaaucaguccuugggc

SEQ ID NO: 279500 - RNA, 20 nt, Artificial Sequence
  Synthetic
gcauuaaucaguccuugggc

SEQ ID NO: 279501 - RNA, 21 nt, Artificial Sequence
  Synthetic
ugcauuaaucaguccuugggc

SEQ ID NO: 279502 - RNA, 22 nt, Artificial Sequence
  Synthetic
gugcauuaaucaguccuugggc

SEQ ID NO: 279503 - RNA, 23 nt, Artificial Sequence
  Synthetic
ugugcauuaaucaguccuugggc

SEQ ID NO: 279504 - RNA, 24 nt, Artificial Sequence
  Synthetic
uugugcauuaaucaguccuugggc

SEQ ID NO: 279505 - RNA, 18 nt, Artificial Sequence
  Synthetic
uuacaugugguguugggc

SEQ ID NO: 279506 - RNA, 19 nt, Artificial Sequence
  Synthetic
cuuacaugugguguugggc

SEQ ID NO: 279507 - RNA, 20 nt, Artificial Sequence
  Synthetic
gcuuacaugugguguugggc

SEQ ID NO: 279508 - RNA, 21 nt, Artificial Sequence
  Synthetic
ggcuuacaugugguguugggc

SEQ ID NO: 279509 - RNA, 22 nt, Artificial Sequence
  Synthetic
uggcuuacaugugguguugggc

SEQ ID NO: 279510 - RNA, 23 nt, Artificial Sequence
  Synthetic
guggcuuacaugugguguugggc

SEQ ID NO: 279511 - RNA, 24 nt, Artificial Sequence
  Synthetic
aguggcuuacaugugguguugggc

SEQ ID NO: 279512 - RNA, 18 nt, Artificial Sequence
  Synthetic
ucaagaugagauuugggc

SEQ ID NO: 279513 - RNA, 19 nt, Artificial Sequence
  Synthetic
uucaagaugagauuugggc

SEQ ID NO: 279514 - RNA, 20 nt, Artificial Sequence
  Synthetic
uuucaagaugagauuugggc

SEQ ID NO: 279515 - RNA, 21 nt, Artificial Sequence
  Synthetic
auuucaagaugagauuugggc

SEQ ID NO: 279516 - RNA, 22 nt, Artificial Sequence
  Synthetic
cauuucaagaugagauuugggc

SEQ ID NO: 279517 - RNA, 23 nt, Artificial Sequence
  Synthetic
acauuucaagaugagauuugggc

SEQ ID NO: 279518 - RNA, 24 nt, Artificial Sequence
  Synthetic
uacauuucaagaugagauuugggc

SEQ ID NO: 279519 - RNA, 18 nt, Artificial Sequence
  Synthetic
cuuggugacaaaaauggc

SEQ ID NO: 279520 - RNA, 19 nt, Artificial Sequence
  Synthetic
ucuuggugacaaaaauggc

SEQ ID NO: 279521 - RNA, 20 nt, Artificial Sequence
  Synthetic
cucuuggugacaaaaauggc

SEQ ID NO: 279522 - RNA, 21 nt, Artificial Sequence
  Synthetic
ccucuuggugacaaaaauggc

SEQ ID NO: 279523 - RNA, 22 nt, Artificial Sequence
  Synthetic
cccucuuggugacaaaaauggc

SEQ ID NO: 279524 - RNA, 23 nt, Artificial Sequence
  Synthetic
ucccucuuggugacaaaaauggc

SEQ ID NO: 279525 - RNA, 24 nt, Artificial Sequence
  Synthetic
uucccucuuggugacaaaaauggc

SEQ ID NO: 279526 - RNA, 18 nt, Artificial Sequence
  Synthetic
uuugaggaagaaaauggc

SEQ ID NO: 279527 - RNA, 19 nt, Artificial Sequence
  Synthetic
cuuugaggaagaaaauggc

SEQ ID NO: 279528 - RNA, 20 nt, Artificial Sequence
  Synthetic
ucuuugaggaagaaaauggc

SEQ ID NO: 279529 - RNA, 21 nt, Artificial Sequence
  Synthetic
gucuuugaggaagaaaauggc

SEQ ID NO: 279530 - RNA, 22 nt, Artificial Sequence
  Synthetic
agucuuugaggaagaaaauggc

SEQ ID NO: 279531 - RNA, 23 nt, Artificial Sequence
  Synthetic
aagucuuugaggaagaaaauggc

SEQ ID NO: 279532 - RNA, 24 nt, Artificial Sequence
  Synthetic
uaagucuuugaggaagaaaauggc

SEQ ID NO: 279533 - RNA, 18 nt, Artificial Sequence
  Synthetic
auccuguaaauaaauggc

SEQ ID NO: 279534 - RNA, 19 nt, Artificial Sequence
  Synthetic
aauccuguaaauaaauggc

SEQ ID NO: 279535 - RNA, 20 nt, Artificial Sequence
  Synthetic
aaauccuguaaauaaauggc

SEQ ID NO: 279536 - RNA, 21 nt, Artificial Sequence
  Synthetic
uaaauccuguaaauaaauggc

SEQ ID NO: 279537 - RNA, 22 nt, Artificial Sequence
  Synthetic
uuaaauccuguaaauaaauggc

SEQ ID NO: 279538 - RNA, 23 nt, Artificial Sequence
  Synthetic
uuuaaauccuguaaauaaauggc

SEQ ID NO: 279539 - RNA, 24 nt, Artificial Sequence
  Synthetic
guuuaaauccuguaaauaaauggc

SEQ ID NO: 279540 - RNA, 18 nt, Artificial Sequence
  Synthetic
aauucugaggucaauggc

SEQ ID NO: 279541 - RNA, 19 nt, Artificial Sequence
  Synthetic
aaauucugaggucaauggc

SEQ ID NO: 279542 - RNA, 20 nt, Artificial Sequence
  Synthetic
aaaauucugaggucaauggc

SEQ ID NO: 279543 - RNA, 21 nt, Artificial Sequence
  Synthetic
gaaaauucugaggucaauggc

SEQ ID NO: 279544 - RNA, 22 nt, Artificial Sequence
  Synthetic
ggaaaauucugaggucaauggc

SEQ ID NO: 279545 - RNA, 23 nt, Artificial Sequence
  Synthetic
aggaaaauucugaggucaauggc

SEQ ID NO: 279546 - RNA, 24 nt, Artificial Sequence
  Synthetic
aaggaaaauucugaggucaauggc

SEQ ID NO: 279547 - RNA, 18 nt, Artificial Sequence
  Synthetic
uuaaggcaggagaauggc

SEQ ID NO: 279548 - RNA, 19 nt, Artificial Sequence
  Synthetic
guuaaggcaggagaauggc

SEQ ID NO: 279549 - RNA, 20 nt, Artificial Sequence
  Synthetic
gguuaaggcaggagaauggc

SEQ ID NO: 279550 - RNA, 21 nt, Artificial Sequence
  Synthetic
agguuaaggcaggagaauggc

SEQ ID NO: 279551 - RNA, 22 nt, Artificial Sequence
  Synthetic
gagguuaaggcaggagaauggc

SEQ ID NO: 279552 - RNA, 23 nt, Artificial Sequence
  Synthetic
ggagguuaaggcaggagaauggc

SEQ ID NO: 279553 - RNA, 24 nt, Artificial Sequence
  Synthetic
gggagguuaaggcaggagaauggc

SEQ ID NO: 279554 - RNA, 24 nt, Artificial Sequence
  Synthetic
aggaggcugaggcaggagaauggc

SEQ ID NO: 279555 - RNA, 18 nt, Artificial Sequence
  Synthetic
auguuggaagggaauggc

SEQ ID NO: 279556 - RNA, 19 nt, Artificial Sequence
  Synthetic
gauguuggaagggaauggc

SEQ ID NO: 279557 - RNA, 20 nt, Artificial Sequence
  Synthetic
agauguuggaagggaauggc

SEQ ID NO: 279558 - RNA, 21 nt, Artificial Sequence
  Synthetic
gagauguuggaagggaauggc

SEQ ID NO: 279559 - RNA, 22 nt, Artificial Sequence
  Synthetic
ugagauguuggaagggaauggc

SEQ ID NO: 279560 - RNA, 23 nt, Artificial Sequence
  Synthetic
augagauguuggaagggaauggc

SEQ ID NO: 279561 - RNA, 24 nt, Artificial Sequence
  Synthetic
uaugagauguuggaagggaauggc

SEQ ID NO: 279562 - RNA, 18 nt, Artificial Sequence
  Synthetic
uuuccaacucauaauggc

SEQ ID NO: 279563 - RNA, 19 nt, Artificial Sequence
  Synthetic
cuuuccaacucauaauggc

SEQ ID NO: 279564 - RNA, 20 nt, Artificial Sequence
  Synthetic
acuuuccaacucauaauggc

SEQ ID NO: 279565 - RNA, 21 nt, Artificial Sequence
  Synthetic
uacuuuccaacucauaauggc

SEQ ID NO: 279566 - RNA, 22 nt, Artificial Sequence
  Synthetic
uuacuuuccaacucauaauggc

SEQ ID NO: 279567 - RNA, 23 nt, Artificial Sequence
  Synthetic
auuacuuuccaacucauaauggc

SEQ ID NO: 279568 - RNA, 24 nt, Artificial Sequence
  Synthetic
cauuacuuuccaacucauaauggc

SEQ ID NO: 279569 - RNA, 18 nt, Artificial Sequence
  Synthetic
uguagccaaacuaauggc

SEQ ID NO: 279570 - RNA, 19 nt, Artificial Sequence
  Synthetic
auguagccaaacuaauggc

SEQ ID NO: 279571 - RNA, 20 nt, Artificial Sequence
  Synthetic
cauguagccaaacuaauggc

SEQ ID NO: 279572 - RNA, 21 nt, Artificial Sequence
  Synthetic
ucauguagccaaacuaauggc

SEQ ID NO: 279573 - RNA, 22 nt, Artificial Sequence
  Synthetic
gucauguagccaaacuaauggc

SEQ ID NO: 279574 - RNA, 23 nt, Artificial Sequence
  Synthetic
agucauguagccaaacuaauggc

SEQ ID NO: 279575 - RNA, 24 nt, Artificial Sequence
  Synthetic
cagucauguagccaaacuaauggc

SEQ ID NO: 279576 - RNA, 18 nt, Artificial Sequence
  Synthetic
gauugagagccuaauggc

SEQ ID NO: 279577 - RNA, 19 nt, Artificial Sequence
  Synthetic
ggauugagagccuaauggc

SEQ ID NO: 279578 - RNA, 20 nt, Artificial Sequence
  Synthetic
uggauugagagccuaauggc

SEQ ID NO: 279579 - RNA, 21 nt, Artificial Sequence
  Synthetic
cuggauugagagccuaauggc

SEQ ID NO: 279580 - RNA, 22 nt, Artificial Sequence
  Synthetic
ccuggauugagagccuaauggc

SEQ ID NO: 279581 - RNA, 23 nt, Artificial Sequence
  Synthetic
accuggauugagagccuaauggc

SEQ ID NO: 279582 - RNA, 24 nt, Artificial Sequence
  Synthetic
aaccuggauugagagccuaauggc

SEQ ID NO: 279583 - RNA, 18 nt, Artificial Sequence
  Synthetic
gauaaucaacuuaauggc

SEQ ID NO: 279584 - RNA, 19 nt, Artificial Sequence
  Synthetic
ggauaaucaacuuaauggc

SEQ ID NO: 279585 - RNA, 20 nt, Artificial Sequence
  Synthetic
aggauaaucaacuuaauggc

SEQ ID NO: 279586 - RNA, 21 nt, Artificial Sequence
  Synthetic
uaggauaaucaacuuaauggc

SEQ ID NO: 279587 - RNA, 22 nt, Artificial Sequence
  Synthetic
guaggauaaucaacuuaauggc

SEQ ID NO: 279588 - RNA, 23 nt, Artificial Sequence
  Synthetic
gguaggauaaucaacuuaauggc

SEQ ID NO: 279589 - RNA, 24 nt, Artificial Sequence
  Synthetic
agguaggauaaucaacuuaauggc

SEQ ID NO: 279590 - RNA, 18 nt, Artificial Sequence
  Synthetic
uacuaccaccuuaauggc

SEQ ID NO: 279591 - RNA, 19 nt, Artificial Sequence
  Synthetic
uuacuaccaccuuaauggc

SEQ ID NO: 279592 - RNA, 20 nt, Artificial Sequence
  Synthetic
uuuacuaccaccuuaauggc

SEQ ID NO: 279593 - RNA, 21 nt, Artificial Sequence
  Synthetic
auuuacuaccaccuuaauggc

SEQ ID NO: 279594 - RNA, 22 nt, Artificial Sequence
  Synthetic
aauuuacuaccaccuuaauggc

SEQ ID NO: 279595 - RNA, 23 nt, Artificial Sequence
  Synthetic
gaauuuacuaccaccuuaauggc

SEQ ID NO: 279596 - RNA, 24 nt, Artificial Sequence
  Synthetic
ggaauuuacuaccaccuuaauggc

SEQ ID NO: 279597 - RNA, 18 nt, Artificial Sequence
  Synthetic
cauuaauagaaacauggc

SEQ ID NO: 279598 - RNA, 19 nt, Artificial Sequence
  Synthetic
ucauuaauagaaacauggc

SEQ ID NO: 279599 - RNA, 20 nt, Artificial Sequence
  Synthetic
cucauuaauagaaacauggc

SEQ ID NO: 279600 - RNA, 21 nt, Artificial Sequence
  Synthetic
ucucauuaauagaaacauggc

SEQ ID NO: 279601 - RNA, 22 nt, Artificial Sequence
  Synthetic
uucucauuaauagaaacauggc

SEQ ID NO: 279602 - RNA, 23 nt, Artificial Sequence
  Synthetic
cuucucauuaauagaaacauggc

SEQ ID NO: 279603 - RNA, 24 nt, Artificial Sequence
  Synthetic
ccuucucauuaauagaaacauggc

SEQ ID NO: 279604 - RNA, 21 nt, Artificial Sequence
  Synthetic
ggacucacaguuccacauggc

SEQ ID NO: 279605 - RNA, 22 nt, Artificial Sequence
  Synthetic
uggacucacaguuccacauggc

SEQ ID NO: 279606 - RNA, 23 nt, Artificial Sequence
  Synthetic
auggacucacaguuccacauggc

SEQ ID NO: 279607 - RNA, 24 nt, Artificial Sequence
  Synthetic
aauggacucacaguuccacauggc

SEQ ID NO: 279608 - RNA, 21 nt, Artificial Sequence
  Synthetic
ugacucacaguuccacauggc

SEQ ID NO: 279609 - RNA, 22 nt, Artificial Sequence
  Synthetic
uugacucacaguuccacauggc

SEQ ID NO: 279610 - RNA, 23 nt, Artificial Sequence
  Synthetic
auugacucacaguuccacauggc

SEQ ID NO: 279611 - RNA, 24 nt, Artificial Sequence
  Synthetic
aauugacucacaguuccacauggc

SEQ ID NO: 279612 - RNA, 18 nt, Artificial Sequence
  Synthetic
guaagcaugucacauggc

SEQ ID NO: 279613 - RNA, 19 nt, Artificial Sequence
  Synthetic
aguaagcaugucacauggc

SEQ ID NO: 279614 - RNA, 20 nt, Artificial Sequence
  Synthetic
gaguaagcaugucacauggc

SEQ ID NO: 279615 - RNA, 21 nt, Artificial Sequence
  Synthetic
ggaguaagcaugucacauggc

SEQ ID NO: 279616 - RNA, 22 nt, Artificial Sequence
  Synthetic
aggaguaagcaugucacauggc

SEQ ID NO: 279617 - RNA, 23 nt, Artificial Sequence
  Synthetic
caggaguaagcaugucacauggc

SEQ ID NO: 279618 - RNA, 24 nt, Artificial Sequence
  Synthetic
acaggaguaagcaugucacauggc

SEQ ID NO: 279619 - RNA, 18 nt, Artificial Sequence
  Synthetic
ugugaagagggacauggc

SEQ ID NO: 279620 - RNA, 19 nt, Artificial Sequence
  Synthetic
cugugaagagggacauggc

SEQ ID NO: 279621 - RNA, 20 nt, Artificial Sequence
  Synthetic
ccugugaagagggacauggc

SEQ ID NO: 279622 - RNA, 21 nt, Artificial Sequence
  Synthetic
accugugaagagggacauggc

SEQ ID NO: 279623 - RNA, 22 nt, Artificial Sequence
  Synthetic
caccugugaagagggacauggc

SEQ ID NO: 279624 - RNA, 23 nt, Artificial Sequence
  Synthetic
acaccugugaagagggacauggc

SEQ ID NO: 279625 - RNA, 24 nt, Artificial Sequence
  Synthetic
uacaccugugaagagggacauggc

SEQ ID NO: 279626 - RNA, 18 nt, Artificial Sequence
  Synthetic
ugcaggacauuacauggc

SEQ ID NO: 279627 - RNA, 19 nt, Artificial Sequence
  Synthetic
gugcaggacauuacauggc

SEQ ID NO: 279628 - RNA, 20 nt, Artificial Sequence
  Synthetic
agugcaggacauuacauggc

SEQ ID NO: 279629 - RNA, 21 nt, Artificial Sequence
  Synthetic
cagugcaggacauuacauggc

SEQ ID NO: 279630 - RNA, 22 nt, Artificial Sequence
  Synthetic
gcagugcaggacauuacauggc

SEQ ID NO: 279631 - RNA, 23 nt, Artificial Sequence
  Synthetic
ggcagugcaggacauuacauggc

SEQ ID NO: 279632 - RNA, 24 nt, Artificial Sequence
  Synthetic
aggcagugcaggacauuacauggc

SEQ ID NO: 279633 - RNA, 18 nt, Artificial Sequence
  Synthetic
ccuaugugaggccauggc

SEQ ID NO: 279634 - RNA, 19 nt, Artificial Sequence
  Synthetic
accuaugugaggccauggc

SEQ ID NO: 279635 - RNA, 20 nt, Artificial Sequence
  Synthetic
caccuaugugaggccauggc

SEQ ID NO: 279636 - RNA, 21 nt, Artificial Sequence
  Synthetic
ccaccuaugugaggccauggc

SEQ ID NO: 279637 - RNA, 22 nt, Artificial Sequence
  Synthetic
uccaccuaugugaggccauggc

SEQ ID NO: 279638 - RNA, 23 nt, Artificial Sequence
  Synthetic
uuccaccuaugugaggccauggc

SEQ ID NO: 279639 - RNA, 24 nt, Artificial Sequence
  Synthetic
uuuccaccuaugugaggccauggc

SEQ ID NO: 279640 - RNA, 18 nt, Artificial Sequence
  Synthetic
caacauaucuuccauggc

SEQ ID NO: 279641 - RNA, 19 nt, Artificial Sequence
  Synthetic
acaacauaucuuccauggc

SEQ ID NO: 279642 - RNA, 20 nt, Artificial Sequence
  Synthetic
cacaacauaucuuccauggc

SEQ ID NO: 279643 - RNA, 21 nt, Artificial Sequence
  Synthetic
ucacaacauaucuuccauggc

SEQ ID NO: 279644 - RNA, 22 nt, Artificial Sequence
  Synthetic
aucacaacauaucuuccauggc

SEQ ID NO: 279645 - RNA, 23 nt, Artificial Sequence
  Synthetic
aaucacaacauaucuuccauggc

SEQ ID NO: 279646 - RNA, 24 nt, Artificial Sequence
  Synthetic
aaaucacaacauaucuuccauggc

SEQ ID NO: 279647 - RNA, 18 nt, Artificial Sequence
  Synthetic
cucacaguucagcauggc

SEQ ID NO: 279648 - RNA, 19 nt, Artificial Sequence
  Synthetic
acucacaguucagcauggc

SEQ ID NO: 279649 - RNA, 20 nt, Artificial Sequence
  Synthetic
gacucacaguucagcauggc

SEQ ID NO: 279650 - RNA, 21 nt, Artificial Sequence
  Synthetic
ugacucacaguucagcauggc

SEQ ID NO: 279651 - RNA, 22 nt, Artificial Sequence
  Synthetic
uugacucacaguucagcauggc

SEQ ID NO: 279652 - RNA, 23 nt, Artificial Sequence
  Synthetic
auugacucacaguucagcauggc

SEQ ID NO: 279653 - RNA, 24 nt, Artificial Sequence
  Synthetic
aauugacucacaguucagcauggc

SEQ ID NO: 279654 - RNA, 18 nt, Artificial Sequence
  Synthetic
gauuucuuggagcauggc

SEQ ID NO: 279655 - RNA, 19 nt, Artificial Sequence
  Synthetic
ggauuucuuggagcauggc

SEQ ID NO: 279656 - RNA, 20 nt, Artificial Sequence
  Synthetic
uggauuucuuggagcauggc

SEQ ID NO: 279657 - RNA, 21 nt, Artificial Sequence
  Synthetic
auggauuucuuggagcauggc

SEQ ID NO: 279658 - RNA, 22 nt, Artificial Sequence
  Synthetic
gauggauuucuuggagcauggc

SEQ ID NO: 279659 - RNA, 23 nt, Artificial Sequence
  Synthetic
cgauggauuucuuggagcauggc

SEQ ID NO: 279660 - RNA, 24 nt, Artificial Sequence
  Synthetic
ccgauggauuucuuggagcauggc

SEQ ID NO: 279661 - RNA, 18 nt, Artificial Sequence
  Synthetic
cucacugguuugcauggc

SEQ ID NO: 279662 - RNA, 19 nt, Artificial Sequence
  Synthetic
acucacugguuugcauggc

SEQ ID NO: 279663 - RNA, 20 nt, Artificial Sequence
  Synthetic
gacucacugguuugcauggc

SEQ ID NO: 279664 - RNA, 21 nt, Artificial Sequence
  Synthetic
ugacucacugguuugcauggc

SEQ ID NO: 279665 - RNA, 22 nt, Artificial Sequence
  Synthetic
uugacucacugguuugcauggc

SEQ ID NO: 279666 - RNA, 23 nt, Artificial Sequence
  Synthetic
auugacucacugguuugcauggc

SEQ ID NO: 279667 - RNA, 24 nt, Artificial Sequence
  Synthetic
aauugacucacugguuugcauggc

SEQ ID NO: 279668 - RNA, 18 nt, Artificial Sequence
  Synthetic
gguuuggccaaucauggc

SEQ ID NO: 279669 - RNA, 19 nt, Artificial Sequence
  Synthetic
ggguuuggccaaucauggc

SEQ ID NO: 279670 - RNA, 20 nt, Artificial Sequence
  Synthetic
aggguuuggccaaucauggc

SEQ ID NO: 279671 - RNA, 21 nt, Artificial Sequence
  Synthetic
uaggguuuggccaaucauggc

SEQ ID NO: 279672 - RNA, 22 nt, Artificial Sequence
  Synthetic
guaggguuuggccaaucauggc

SEQ ID NO: 279673 - RNA, 23 nt, Artificial Sequence
  Synthetic
gguaggguuuggccaaucauggc

SEQ ID NO: 279674 - RNA, 24 nt, Artificial Sequence
  Synthetic
ugguaggguuuggccaaucauggc

SEQ ID NO: 279675 - RNA, 18 nt, Artificial Sequence
  Synthetic
gguuuuaaaucucauggc

SEQ ID NO: 279676 - RNA, 19 nt, Artificial Sequence
  Synthetic
ugguuuuaaaucucauggc

SEQ ID NO: 279677 - RNA, 20 nt, Artificial Sequence
  Synthetic
uugguuuuaaaucucauggc

SEQ ID NO: 279678 - RNA, 21 nt, Artificial Sequence
  Synthetic
cuugguuuuaaaucucauggc

SEQ ID NO: 279679 - RNA, 22 nt, Artificial Sequence
  Synthetic
ucuugguuuuaaaucucauggc

SEQ ID NO: 279680 - RNA, 23 nt, Artificial Sequence
  Synthetic
cucuugguuuuaaaucucauggc

SEQ ID NO: 279681 - RNA, 24 nt, Artificial Sequence
  Synthetic
acucuugguuuuaaaucucauggc

SEQ ID NO: 279682 - RNA, 18 nt, Artificial Sequence
  Synthetic
aagggggcucuucauggc

SEQ ID NO: 279683 - RNA, 19 nt, Artificial Sequence
  Synthetic
caagggggcucuucauggc

SEQ ID NO: 279684 - RNA, 20 nt, Artificial Sequence
  Synthetic
gcaagggggcucuucauggc

SEQ ID NO: 279685 - RNA, 21 nt, Artificial Sequence
  Synthetic
ugcaagggggcucuucauggc

SEQ ID NO: 279686 - RNA, 22 nt, Artificial Sequence
  Synthetic
gugcaagggggcucuucauggc

SEQ ID NO: 279687 - RNA, 23 nt, Artificial Sequence
  Synthetic
ugugcaagggggcucuucauggc

SEQ ID NO: 279688 - RNA, 24 nt, Artificial Sequence
  Synthetic
uugugcaagggggcucuucauggc

SEQ ID NO: 279689 - RNA, 18 nt, Artificial Sequence
  Synthetic
agaucaaaugaagauggc

SEQ ID NO: 279690 - RNA, 19 nt, Artificial Sequence
  Synthetic
gagaucaaaugaagauggc

SEQ ID NO: 279691 - RNA, 20 nt, Artificial Sequence
  Synthetic
ugagaucaaaugaagauggc

SEQ ID NO: 279692 - RNA, 21 nt, Artificial Sequence
  Synthetic
gugagaucaaaugaagauggc

SEQ ID NO: 279693 - RNA, 22 nt, Artificial Sequence
  Synthetic
agugagaucaaaugaagauggc

SEQ ID NO: 279694 - RNA, 23 nt, Artificial Sequence
  Synthetic
gagugagaucaaaugaagauggc

SEQ ID NO: 279695 - RNA, 24 nt, Artificial Sequence
  Synthetic
ggagugagaucaaaugaagauggc

SEQ ID NO: 279696 - RNA, 18 nt, Artificial Sequence
  Synthetic
agagaagggguagauggc

SEQ ID NO: 279697 - RNA, 19 nt, Artificial Sequence
  Synthetic
uagagaagggguagauggc

SEQ ID NO: 279698 - RNA, 20 nt, Artificial Sequence
  Synthetic
cuagagaagggguagauggc

SEQ ID NO: 279699 - RNA, 21 nt, Artificial Sequence
  Synthetic
ucuagagaagggguagauggc

SEQ ID NO: 279700 - RNA, 22 nt, Artificial Sequence
  Synthetic
cucuagagaagggguagauggc

SEQ ID NO: 279701 - RNA, 23 nt, Artificial Sequence
  Synthetic
acucuagagaagggguagauggc

SEQ ID NO: 279702 - RNA, 24 nt, Artificial Sequence
  Synthetic
aacucuagagaagggguagauggc

SEQ ID NO: 279703 - RNA, 18 nt, Artificial Sequence
  Synthetic
gaguggaggcaggauggc

SEQ ID NO: 279704 - RNA, 19 nt, Artificial Sequence
  Synthetic
ugaguggaggcaggauggc

SEQ ID NO: 279705 - RNA, 20 nt, Artificial Sequence
  Synthetic
gugaguggaggcaggauggc

SEQ ID NO: 279706 - RNA, 21 nt, Artificial Sequence
  Synthetic
agugaguggaggcaggauggc

SEQ ID NO: 279707 - RNA, 22 nt, Artificial Sequence
  Synthetic
aagugaguggaggcaggauggc

SEQ ID NO: 279708 - RNA, 23 nt, Artificial Sequence
  Synthetic
caagugaguggaggcaggauggc

SEQ ID NO: 279709 - RNA, 24 nt, Artificial Sequence
  Synthetic
acaagugaguggaggcaggauggc

SEQ ID NO: 279710 - RNA, 18 nt, Artificial Sequence
  Synthetic
ccuuugucacaugauggc

SEQ ID NO: 279711 - RNA, 19 nt, Artificial Sequence
  Synthetic
uccuuugucacaugauggc

SEQ ID NO: 279712 - RNA, 20 nt, Artificial Sequence
  Synthetic
auccuuugucacaugauggc

SEQ ID NO: 279713 - RNA, 21 nt, Artificial Sequence
  Synthetic
cauccuuugucacaugauggc

SEQ ID NO: 279714 - RNA, 22 nt, Artificial Sequence
  Synthetic
acauccuuugucacaugauggc

SEQ ID NO: 279715 - RNA, 23 nt, Artificial Sequence
  Synthetic
cacauccuuugucacaugauggc

SEQ ID NO: 279716 - RNA, 24 nt, Artificial Sequence
  Synthetic
acacauccuuugucacaugauggc

SEQ ID NO: 279717 - RNA, 18 nt, Artificial Sequence
  Synthetic
uaacaauacauugauggc

SEQ ID NO: 279718 - RNA, 19 nt, Artificial Sequence
  Synthetic
cuaacaauacauugauggc

SEQ ID NO: 279719 - RNA, 20 nt, Artificial Sequence
  Synthetic
ucuaacaauacauugauggc

SEQ ID NO: 279720 - RNA, 21 nt, Artificial Sequence
  Synthetic
aucuaacaauacauugauggc

SEQ ID NO: 279721 - RNA, 22 nt, Artificial Sequence
  Synthetic
uaucuaacaauacauugauggc

SEQ ID NO: 279722 - RNA, 23 nt, Artificial Sequence
  Synthetic
uuaucuaacaauacauugauggc

SEQ ID NO: 279723 - RNA, 24 nt, Artificial Sequence
  Synthetic
uuuaucuaacaauacauugauggc

SEQ ID NO: 279724 - RNA, 18 nt, Artificial Sequence
  Synthetic
cucacaguucaauauggc

SEQ ID NO: 279725 - RNA, 19 nt, Artificial Sequence
  Synthetic
acucacaguucaauauggc

SEQ ID NO: 279726 - RNA, 20 nt, Artificial Sequence
  Synthetic
gacucacaguucaauauggc

SEQ ID NO: 279727 - RNA, 21 nt, Artificial Sequence
  Synthetic
ugacucacaguucaauauggc

SEQ ID NO: 279728 - RNA, 22 nt, Artificial Sequence
  Synthetic
uugacucacaguucaauauggc

SEQ ID NO: 279729 - RNA, 23 nt, Artificial Sequence
  Synthetic
auugacucacaguucaauauggc

SEQ ID NO: 279730 - RNA, 24 nt, Artificial Sequence
  Synthetic
aauugacucacaguucaauauggc

SEQ ID NO: 279731 - RNA, 18 nt, Artificial Sequence
  Synthetic
gagcaaugguaauauggc

SEQ ID NO: 279732 - RNA, 19 nt, Artificial Sequence
  Synthetic
ugagcaaugguaauauggc

SEQ ID NO: 279733 - RNA, 20 nt, Artificial Sequence
  Synthetic
cugagcaaugguaauauggc

SEQ ID NO: 279734 - RNA, 21 nt, Artificial Sequence
  Synthetic
acugagcaaugguaauauggc

SEQ ID NO: 279735 - RNA, 22 nt, Artificial Sequence
  Synthetic
uacugagcaaugguaauauggc

SEQ ID NO: 279736 - RNA, 23 nt, Artificial Sequence
  Synthetic
cuacugagcaaugguaauauggc

SEQ ID NO: 279737 - RNA, 24 nt, Artificial Sequence
  Synthetic
acuacugagcaaugguaauauggc

SEQ ID NO: 279738 - RNA, 18 nt, Artificial Sequence
  Synthetic
uucucagcaaacuauggc

SEQ ID NO: 279739 - RNA, 19 nt, Artificial Sequence
  Synthetic
auucucagcaaacuauggc

SEQ ID NO: 279740 - RNA, 20 nt, Artificial Sequence
  Synthetic
cauucucagcaaacuauggc

SEQ ID NO: 279741 - RNA, 21 nt, Artificial Sequence
  Synthetic
ucauucucagcaaacuauggc

SEQ ID NO: 279742 - RNA, 22 nt, Artificial Sequence
  Synthetic
aucauucucagcaaacuauggc

SEQ ID NO: 279743 - RNA, 23 nt, Artificial Sequence
  Synthetic
caucauucucagcaaacuauggc

SEQ ID NO: 279744 - RNA, 24 nt, Artificial Sequence
  Synthetic
ccaucauucucagcaaacuauggc

SEQ ID NO: 279745 - RNA, 18 nt, Artificial Sequence
  Synthetic
cauucaagagaguauggc

SEQ ID NO: 279746 - RNA, 19 nt, Artificial Sequence
  Synthetic
gcauucaagagaguauggc

SEQ ID NO: 279747 - RNA, 20 nt, Artificial Sequence
  Synthetic
ggcauucaagagaguauggc

SEQ ID NO: 279748 - RNA, 21 nt, Artificial Sequence
  Synthetic
gggcauucaagagaguauggc

SEQ ID NO: 279749 - RNA, 22 nt, Artificial Sequence
  Synthetic
ugggcauucaagagaguauggc

SEQ ID NO: 279750 - RNA, 23 nt, Artificial Sequence
  Synthetic
augggcauucaagagaguauggc

SEQ ID NO: 279751 - RNA, 24 nt, Artificial Sequence
  Synthetic
caugggcauucaagagaguauggc

SEQ ID NO: 279752 - RNA, 18 nt, Artificial Sequence
  Synthetic
accuacggaggguauggc

SEQ ID NO: 279753 - RNA, 19 nt, Artificial Sequence
  Synthetic
gaccuacggaggguauggc

SEQ ID NO: 279754 - RNA, 20 nt, Artificial Sequence
  Synthetic
ugaccuacggaggguauggc

SEQ ID NO: 279755 - RNA, 21 nt, Artificial Sequence
  Synthetic
augaccuacggaggguauggc

SEQ ID NO: 279756 - RNA, 22 nt, Artificial Sequence
  Synthetic
aaugaccuacggaggguauggc

SEQ ID NO: 279757 - RNA, 23 nt, Artificial Sequence
  Synthetic
uaaugaccuacggaggguauggc

SEQ ID NO: 279758 - RNA, 24 nt, Artificial Sequence
  Synthetic
auaaugaccuacggaggguauggc

SEQ ID NO: 279759 - RNA, 18 nt, Artificial Sequence
  Synthetic
uuuugguuccuguauggc

SEQ ID NO: 279760 - RNA, 19 nt, Artificial Sequence
  Synthetic
guuuugguuccuguauggc

SEQ ID NO: 279761 - RNA, 20 nt, Artificial Sequence
  Synthetic
uguuuugguuccuguauggc

SEQ ID NO: 279762 - RNA, 21 nt, Artificial Sequence
  Synthetic
cuguuuugguuccuguauggc

SEQ ID NO: 279763 - RNA, 22 nt, Artificial Sequence
  Synthetic
gcuguuuugguuccuguauggc

SEQ ID NO: 279764 - RNA, 23 nt, Artificial Sequence
  Synthetic
ugcuguuuugguuccuguauggc

SEQ ID NO: 279765 - RNA, 24 nt, Artificial Sequence
  Synthetic
cugcuguuuugguuccuguauggc

SEQ ID NO: 279766 - RNA, 18 nt, Artificial Sequence
  Synthetic
cauuggauuguguauggc

SEQ ID NO: 279767 - RNA, 19 nt, Artificial Sequence
  Synthetic
gcauuggauuguguauggc

SEQ ID NO: 279768 - RNA, 20 nt, Artificial Sequence
  Synthetic
agcauuggauuguguauggc

SEQ ID NO: 279769 - RNA, 21 nt, Artificial Sequence
  Synthetic
gagcauuggauuguguauggc

SEQ ID NO: 279770 - RNA, 22 nt, Artificial Sequence
  Synthetic
ugagcauuggauuguguauggc

SEQ ID NO: 279771 - RNA, 23 nt, Artificial Sequence
  Synthetic
augagcauuggauuguguauggc

SEQ ID NO: 279772 - RNA, 24 nt, Artificial Sequence
  Synthetic
caugagcauuggauuguguauggc

SEQ ID NO: 279773 - RNA, 18 nt, Artificial Sequence
  Synthetic
gcuguucucacuuauggc

SEQ ID NO: 279774 - RNA, 19 nt, Artificial Sequence
  Synthetic
agcuguucucacuuauggc

SEQ ID NO: 279775 - RNA, 20 nt, Artificial Sequence
  Synthetic
aagcuguucucacuuauggc

SEQ ID NO: 279776 - RNA, 21 nt, Artificial Sequence
  Synthetic
gaagcuguucucacuuauggc

SEQ ID NO: 279777 - RNA, 22 nt, Artificial Sequence
  Synthetic
ggaagcuguucucacuuauggc

SEQ ID NO: 279778 - RNA, 23 nt, Artificial Sequence
  Synthetic
aggaagcuguucucacuuauggc

SEQ ID NO: 279779 - RNA, 24 nt, Artificial Sequence
  Synthetic
caggaagcuguucucacuuauggc

SEQ ID NO: 279780 - RNA, 18 nt, Artificial Sequence
  Synthetic
uuauguuuccuuuauggc

SEQ ID NO: 279781 - RNA, 19 nt, Artificial Sequence
  Synthetic
cuuauguuuccuuuauggc

SEQ ID NO: 279782 - RNA, 20 nt, Artificial Sequence
  Synthetic
ucuuauguuuccuuuauggc

SEQ ID NO: 279783 - RNA, 21 nt, Artificial Sequence
  Synthetic
gucuuauguuuccuuuauggc

SEQ ID NO: 279784 - RNA, 22 nt, Artificial Sequence
  Synthetic
agucuuauguuuccuuuauggc

SEQ ID NO: 279785 - RNA, 23 nt, Artificial Sequence
  Synthetic
aagucuuauguuuccuuuauggc

SEQ ID NO: 279786 - RNA, 24 nt, Artificial Sequence
  Synthetic
gaagucuuauguuuccuuuauggc

SEQ ID NO: 279787 - RNA, 18 nt, Artificial Sequence
  Synthetic
cagcuaagauccacuggc

SEQ ID NO: 279788 - RNA, 19 nt, Artificial Sequence
  Synthetic
ccagcuaagauccacuggc

SEQ ID NO: 279789 - RNA, 20 nt, Artificial Sequence
  Synthetic
gccagcuaagauccacuggc

SEQ ID NO: 279790 - RNA, 21 nt, Artificial Sequence
  Synthetic
agccagcuaagauccacuggc

SEQ ID NO: 279791 - RNA, 22 nt, Artificial Sequence
  Synthetic
cagccagcuaagauccacuggc

SEQ ID NO: 279792 - RNA, 23 nt, Artificial Sequence
  Synthetic
ccagccagcuaagauccacuggc

SEQ ID NO: 279793 - RNA, 24 nt, Artificial Sequence
  Synthetic
cccagccagcuaagauccacuggc

SEQ ID NO: 279794 - RNA, 18 nt, Artificial Sequence
  Synthetic
uuuuacaacaagacuggc

SEQ ID NO: 279795 - RNA, 19 nt, Artificial Sequence
  Synthetic
auuuuacaacaagacuggc

SEQ ID NO: 279796 - RNA, 20 nt, Artificial Sequence
  Synthetic
uauuuuacaacaagacuggc

SEQ ID NO: 279797 - RNA, 21 nt, Artificial Sequence
  Synthetic
uuauuuuacaacaagacuggc

SEQ ID NO: 279798 - RNA, 22 nt, Artificial Sequence
  Synthetic
auuauuuuacaacaagacuggc

SEQ ID NO: 279799 - RNA, 23 nt, Artificial Sequence
  Synthetic
uauuauuuuacaacaagacuggc

SEQ ID NO: 279800 - RNA, 24 nt, Artificial Sequence
  Synthetic
cuauuauuuuacaacaagacuggc

SEQ ID NO: 279801 - RNA, 18 nt, Artificial Sequence
  Synthetic
acugacuggcagacuggc

SEQ ID NO: 279802 - RNA, 19 nt, Artificial Sequence
  Synthetic
aacugacuggcagacuggc

SEQ ID NO: 279803 - RNA, 20 nt, Artificial Sequence
  Synthetic
uaacugacuggcagacuggc

SEQ ID NO: 279804 - RNA, 21 nt, Artificial Sequence
  Synthetic
guaacugacuggcagacuggc

SEQ ID NO: 279805 - RNA, 22 nt, Artificial Sequence
  Synthetic
aguaacugacuggcagacuggc

SEQ ID NO: 279806 - RNA, 23 nt, Artificial Sequence
  Synthetic
aaguaacugacuggcagacuggc

SEQ ID NO: 279807 - RNA, 24 nt, Artificial Sequence
  Synthetic
caaguaacugacuggcagacuggc

SEQ ID NO: 279808 - RNA, 18 nt, Artificial Sequence
  Synthetic
cuauuaaguuauacuggc

SEQ ID NO: 279809 - RNA, 19 nt, Artificial Sequence
  Synthetic
ccuauuaaguuauacuggc

SEQ ID NO: 279810 - RNA, 20 nt, Artificial Sequence
  Synthetic
uccuauuaaguuauacuggc

SEQ ID NO: 279811 - RNA, 21 nt, Artificial Sequence
  Synthetic
auccuauuaaguuauacuggc

SEQ ID NO: 279812 - RNA, 22 nt, Artificial Sequence
  Synthetic
aauccuauuaaguuauacuggc

SEQ ID NO: 279813 - RNA, 23 nt, Artificial Sequence
  Synthetic
caauccuauuaaguuauacuggc

SEQ ID NO: 279814 - RNA, 24 nt, Artificial Sequence
  Synthetic
acaauccuauuaaguuauacuggc

SEQ ID NO: 279815 - RNA, 18 nt, Artificial Sequence
  Synthetic
acucaaccuucuacuggc

SEQ ID NO: 279816 - RNA, 19 nt, Artificial Sequence
  Synthetic
gacucaaccuucuacuggc

SEQ ID NO: 279817 - RNA, 20 nt, Artificial Sequence
  Synthetic
ugacucaaccuucuacuggc

SEQ ID NO: 279818 - RNA, 21 nt, Artificial Sequence
  Synthetic
uugacucaaccuucuacuggc

SEQ ID NO: 279819 - RNA, 22 nt, Artificial Sequence
  Synthetic
uuugacucaaccuucuacuggc

SEQ ID NO: 279820 - RNA, 23 nt, Artificial Sequence
  Synthetic
cuuugacucaaccuucuacuggc

SEQ ID NO: 279821 - RNA, 24 nt, Artificial Sequence
  Synthetic
ccuuugacucaaccuucuacuggc

SEQ ID NO: 279822 - RNA, 18 nt, Artificial Sequence
  Synthetic
cuuggaagucuuacuggc

SEQ ID NO: 279823 - RNA, 19 nt, Artificial Sequence
  Synthetic
acuuggaagucuuacuggc

SEQ ID NO: 279824 - RNA, 20 nt, Artificial Sequence
  Synthetic
aacuuggaagucuuacuggc

SEQ ID NO: 279825 - RNA, 21 nt, Artificial Sequence
  Synthetic
aaacuuggaagucuuacuggc

SEQ ID NO: 279826 - RNA, 22 nt, Artificial Sequence
  Synthetic
aaaacuuggaagucuuacuggc

SEQ ID NO: 279827 - RNA, 23 nt, Artificial Sequence
  Synthetic
caaaacuuggaagucuuacuggc

SEQ ID NO: 279828 - RNA, 24 nt, Artificial Sequence
  Synthetic
gcaaaacuuggaagucuuacuggc

SEQ ID NO: 279829 - RNA, 18 nt, Artificial Sequence
  Synthetic
gcaggcacuucaccuggc

SEQ ID NO: 279830 - RNA, 19 nt, Artificial Sequence
  Synthetic
agcaggcacuucaccuggc

SEQ ID NO: 279831 - RNA, 20 nt, Artificial Sequence
  Synthetic
gagcaggcacuucaccuggc

SEQ ID NO: 279832 - RNA, 21 nt, Artificial Sequence
  Synthetic
ggagcaggcacuucaccuggc

SEQ ID NO: 279833 - RNA, 22 nt, Artificial Sequence
  Synthetic
gggagcaggcacuucaccuggc

SEQ ID NO: 279834 - RNA, 23 nt, Artificial Sequence
  Synthetic
cgggagcaggcacuucaccuggc

SEQ ID NO: 279835 - RNA, 24 nt, Artificial Sequence
  Synthetic
acgggagcaggcacuucaccuggc

SEQ ID NO: 279836 - RNA, 18 nt, Artificial Sequence
  Synthetic
cugccugaucgcccuggc

SEQ ID NO: 279837 - RNA, 19 nt, Artificial Sequence
  Synthetic
ccugccugaucgcccuggc

SEQ ID NO: 279838 - RNA, 20 nt, Artificial Sequence
  Synthetic
uccugccugaucgcccuggc

SEQ ID NO: 279839 - RNA, 21 nt, Artificial Sequence
  Synthetic
uuccugccugaucgcccuggc

SEQ ID NO: 279840 - RNA, 22 nt, Artificial Sequence
  Synthetic
uuuccugccugaucgcccuggc

SEQ ID NO: 279841 - RNA, 23 nt, Artificial Sequence
  Synthetic
uuuuccugccugaucgcccuggc

SEQ ID NO: 279842 - RNA, 24 nt, Artificial Sequence
  Synthetic
uuuuuccugccugaucgcccuggc

SEQ ID NO: 279843 - RNA, 18 nt, Artificial Sequence
  Synthetic
ucuuuacucugcccuggc

SEQ ID NO: 279844 - RNA, 19 nt, Artificial Sequence
  Synthetic
uucuuuacucugcccuggc

SEQ ID NO: 279845 - RNA, 20 nt, Artificial Sequence
  Synthetic
uuucuuuacucugcccuggc

SEQ ID NO: 279846 - RNA, 21 nt, Artificial Sequence
  Synthetic
cuuucuuuacucugcccuggc

SEQ ID NO: 279847 - RNA, 22 nt, Artificial Sequence
  Synthetic
ucuuucuuuacucugcccuggc

SEQ ID NO: 279848 - RNA, 23 nt, Artificial Sequence
  Synthetic
aucuuucuuuacucugcccuggc

SEQ ID NO: 279849 - RNA, 24 nt, Artificial Sequence
  Synthetic
uaucuuucuuuacucugcccuggc

SEQ ID NO: 279850 - RNA, 18 nt, Artificial Sequence
  Synthetic
cugccugauugcccuggc

SEQ ID NO: 279851 - RNA, 19 nt, Artificial Sequence
  Synthetic
ccugccugauugcccuggc

SEQ ID NO: 279852 - RNA, 20 nt, Artificial Sequence
  Synthetic
uccugccugauugcccuggc

SEQ ID NO: 279853 - RNA, 21 nt, Artificial Sequence
  Synthetic
cuccugccugauugcccuggc

SEQ ID NO: 279854 - RNA, 22 nt, Artificial Sequence
  Synthetic
ucuccugccugauugcccuggc

SEQ ID NO: 279855 - RNA, 23 nt, Artificial Sequence
  Synthetic
uucuccugccugauugcccuggc

SEQ ID NO: 279856 - RNA, 24 nt, Artificial Sequence
  Synthetic
cuucuccugccugauugcccuggc

SEQ ID NO: 279857 - RNA, 18 nt, Artificial Sequence
  Synthetic
uugccugauugcccuggc

SEQ ID NO: 279858 - RNA, 19 nt, Artificial Sequence
  Synthetic
cuugccugauugcccuggc

SEQ ID NO: 279859 - RNA, 20 nt, Artificial Sequence
  Synthetic
ucuugccugauugcccuggc

SEQ ID NO: 279860 - RNA, 21 nt, Artificial Sequence
  Synthetic
cucuugccugauugcccuggc

SEQ ID NO: 279861 - RNA, 22 nt, Artificial Sequence
  Synthetic
ucucuugccugauugcccuggc

SEQ ID NO: 279862 - RNA, 23 nt, Artificial Sequence
  Synthetic
uucucuugccugauugcccuggc

SEQ ID NO: 279863 - RNA, 24 nt, Artificial Sequence
  Synthetic
uuucucuugccugauugcccuggc

SEQ ID NO: 279864 - RNA, 18 nt, Artificial Sequence
  Synthetic
agcaguuuauucccuggc

SEQ ID NO: 279865 - RNA, 19 nt, Artificial Sequence
  Synthetic
aagcaguuuauucccuggc

SEQ ID NO: 279866 - RNA, 20 nt, Artificial Sequence
  Synthetic
caagcaguuuauucccuggc

SEQ ID NO: 279867 - RNA, 21 nt, Artificial Sequence
  Synthetic
gcaagcaguuuauucccuggc

SEQ ID NO: 279868 - RNA, 22 nt, Artificial Sequence
  Synthetic
ugcaagcaguuuauucccuggc

SEQ ID NO: 279869 - RNA, 23 nt, Artificial Sequence
  Synthetic
gugcaagcaguuuauucccuggc

SEQ ID NO: 279870 - RNA, 24 nt, Artificial Sequence
  Synthetic
agugcaagcaguuuauucccuggc

SEQ ID NO: 279871 - RNA, 18 nt, Artificial Sequence
  Synthetic
ugagccacugcgccuggc

SEQ ID NO: 279872 - RNA, 19 nt, Artificial Sequence
  Synthetic
augagccacugcgccuggc

SEQ ID NO: 279873 - RNA, 20 nt, Artificial Sequence
  Synthetic
caugagccacugcgccuggc

SEQ ID NO: 279874 - RNA, 21 nt, Artificial Sequence
  Synthetic
gcaugagccacugcgccuggc

SEQ ID NO: 279875 - RNA, 22 nt, Artificial Sequence
  Synthetic
ggcaugagccacugcgccuggc

SEQ ID NO: 279876 - RNA, 23 nt, Artificial Sequence
  Synthetic
aggcaugagccacugcgccuggc

SEQ ID NO: 279877 - RNA, 24 nt, Artificial Sequence
  Synthetic
caggcaugagccacugcgccuggc

SEQ ID NO: 279878 - RNA, 18 nt, Artificial Sequence
  Synthetic
auuccuugcuugccuggc

SEQ ID NO: 279879 - RNA, 19 nt, Artificial Sequence
  Synthetic
aauuccuugcuugccuggc

SEQ ID NO: 279880 - RNA, 20 nt, Artificial Sequence
  Synthetic
gaauuccuugcuugccuggc

SEQ ID NO: 279881 - RNA, 21 nt, Artificial Sequence
  Synthetic
ugaauuccuugcuugccuggc

SEQ ID NO: 279882 - RNA, 22 nt, Artificial Sequence
  Synthetic
cugaauuccuugcuugccuggc

SEQ ID NO: 279883 - RNA, 23 nt, Artificial Sequence
  Synthetic
gcugaauuccuugcuugccuggc

SEQ ID NO: 279884 - RNA, 24 nt, Artificial Sequence
  Synthetic
agcugaauuccuugcuugccuggc

SEQ ID NO: 279885 - RNA, 18 nt, Artificial Sequence
  Synthetic
ucauuaauccuuccuggc

SEQ ID NO: 279886 - RNA, 19 nt, Artificial Sequence
  Synthetic
uucauuaauccuuccuggc

SEQ ID NO: 279887 - RNA, 20 nt, Artificial Sequence
  Synthetic
guucauuaauccuuccuggc

SEQ ID NO: 279888 - RNA, 21 nt, Artificial Sequence
  Synthetic
cguucauuaauccuuccuggc

SEQ ID NO: 279889 - RNA, 22 nt, Artificial Sequence
  Synthetic
acguucauuaauccuuccuggc

SEQ ID NO: 279890 - RNA, 23 nt, Artificial Sequence
  Synthetic
cacguucauuaauccuuccuggc

SEQ ID NO: 279891 - RNA, 24 nt, Artificial Sequence
  Synthetic
gcacguucauuaauccuuccuggc

SEQ ID NO: 279892 - RNA, 18 nt, Artificial Sequence
  Synthetic
cuuuggcaaaaagcuggc

SEQ ID NO: 279893 - RNA, 19 nt, Artificial Sequence
  Synthetic
ucuuuggcaaaaagcuggc

SEQ ID NO: 279894 - RNA, 20 nt, Artificial Sequence
  Synthetic
uucuuuggcaaaaagcuggc

SEQ ID NO: 279895 - RNA, 21 nt, Artificial Sequence
  Synthetic
uuucuuuggcaaaaagcuggc

SEQ ID NO: 279896 - RNA, 22 nt, Artificial Sequence
  Synthetic
auuucuuuggcaaaaagcuggc

SEQ ID NO: 279897 - RNA, 23 nt, Artificial Sequence
  Synthetic
uauuucuuuggcaaaaagcuggc

SEQ ID NO: 279898 - RNA, 24 nt, Artificial Sequence
  Synthetic
uuauuucuuuggcaaaaagcuggc

SEQ ID NO: 279899 - RNA, 18 nt, Artificial Sequence
  Synthetic
gagcaugcaugggcuggc

SEQ ID NO: 279900 - RNA, 19 nt, Artificial Sequence
  Synthetic
cgagcaugcaugggcuggc

SEQ ID NO: 279901 - RNA, 20 nt, Artificial Sequence
  Synthetic
gcgagcaugcaugggcuggc

SEQ ID NO: 279902 - RNA, 21 nt, Artificial Sequence
  Synthetic
ugcgagcaugcaugggcuggc

SEQ ID NO: 279903 - RNA, 22 nt, Artificial Sequence
  Synthetic
gugcgagcaugcaugggcuggc

SEQ ID NO: 279904 - RNA, 23 nt, Artificial Sequence
  Synthetic
ugugcgagcaugcaugggcuggc

SEQ ID NO: 279905 - RNA, 24 nt, Artificial Sequence
  Synthetic
gugugcgagcaugcaugggcuggc

SEQ ID NO: 279906 - RNA, 18 nt, Artificial Sequence
  Synthetic
aaggugucagccucuggc

SEQ ID NO: 279907 - RNA, 19 nt, Artificial Sequence
  Synthetic
uaaggugucagccucuggc

SEQ ID NO: 279908 - RNA, 20 nt, Artificial Sequence
  Synthetic
uuaaggugucagccucuggc

SEQ ID NO: 279909 - RNA, 21 nt, Artificial Sequence
  Synthetic
auuaaggugucagccucuggc

SEQ ID NO: 279910 - RNA, 22 nt, Artificial Sequence
  Synthetic
cauuaaggugucagccucuggc

SEQ ID NO: 279911 - RNA, 23 nt, Artificial Sequence
  Synthetic
acauuaaggugucagccucuggc

SEQ ID NO: 279912 - RNA, 24 nt, Artificial Sequence
  Synthetic
aacauuaaggugucagccucuggc

SEQ ID NO: 279913 - RNA, 18 nt, Artificial Sequence
  Synthetic
cuaggagggagcucuggc

SEQ ID NO: 279914 - RNA, 19 nt, Artificial Sequence
  Synthetic
ucuaggagggagcucuggc

SEQ ID NO: 279915 - RNA, 20 nt, Artificial Sequence
  Synthetic
aucuaggagggagcucuggc

SEQ ID NO: 279916 - RNA, 21 nt, Artificial Sequence
  Synthetic
caucuaggagggagcucuggc

SEQ ID NO: 279917 - RNA, 22 nt, Artificial Sequence
  Synthetic
acaucuaggagggagcucuggc

SEQ ID NO: 279918 - RNA, 23 nt, Artificial Sequence
  Synthetic
uacaucuaggagggagcucuggc

SEQ ID NO: 279919 - RNA, 24 nt, Artificial Sequence
  Synthetic
guacaucuaggagggagcucuggc

SEQ ID NO: 279920 - RNA, 18 nt, Artificial Sequence
  Synthetic
cugccuaauugcucuggc

SEQ ID NO: 279921 - RNA, 19 nt, Artificial Sequence
  Synthetic
ccugccuaauugcucuggc

SEQ ID NO: 279922 - RNA, 20 nt, Artificial Sequence
  Synthetic
uccugccuaauugcucuggc

SEQ ID NO: 279923 - RNA, 21 nt, Artificial Sequence
  Synthetic
cuccugccuaauugcucuggc

SEQ ID NO: 279924 - RNA, 22 nt, Artificial Sequence
  Synthetic
ucuccugccuaauugcucuggc

SEQ ID NO: 279925 - RNA, 23 nt, Artificial Sequence
  Synthetic
uucuccugccuaauugcucuggc

SEQ ID NO: 279926 - RNA, 24 nt, Artificial Sequence
  Synthetic
uuucuccugccuaauugcucuggc

SEQ ID NO: 279927 - RNA, 18 nt, Artificial Sequence
  Synthetic
gggcgauucccuucuggc

SEQ ID NO: 279928 - RNA, 19 nt, Artificial Sequence
  Synthetic
ugggcgauucccuucuggc

SEQ ID NO: 279929 - RNA, 20 nt, Artificial Sequence
  Synthetic
augggcgauucccuucuggc

SEQ ID NO: 279930 - RNA, 21 nt, Artificial Sequence
  Synthetic
gaugggcgauucccuucuggc

SEQ ID NO: 279931 - RNA, 22 nt, Artificial Sequence
  Synthetic
ggaugggcgauucccuucuggc

SEQ ID NO: 279932 - RNA, 23 nt, Artificial Sequence
  Synthetic
gggaugggcgauucccuucuggc

SEQ ID NO: 279933 - RNA, 24 nt, Artificial Sequence
  Synthetic
ugggaugggcgauucccuucuggc

SEQ ID NO: 279934 - RNA, 18 nt, Artificial Sequence
  Synthetic
gauguauaaucuucuggc

SEQ ID NO: 279935 - RNA, 19 nt, Artificial Sequence
  Synthetic
cgauguauaaucuucuggc

SEQ ID NO: 279936 - RNA, 20 nt, Artificial Sequence
  Synthetic
ccgauguauaaucuucuggc

SEQ ID NO: 279937 - RNA, 21 nt, Artificial Sequence
  Synthetic
gccgauguauaaucuucuggc

SEQ ID NO: 279938 - RNA, 22 nt, Artificial Sequence
  Synthetic
ugccgauguauaaucuucuggc

SEQ ID NO: 279939 - RNA, 23 nt, Artificial Sequence
  Synthetic
augccgauguauaaucuucuggc

SEQ ID NO: 279940 - RNA, 24 nt, Artificial Sequence
  Synthetic
aaugccgauguauaaucuucuggc

SEQ ID NO: 279941 - RNA, 18 nt, Artificial Sequence
  Synthetic
aguguuggaaguucuggc

SEQ ID NO: 279942 - RNA, 19 nt, Artificial Sequence
  Synthetic
uaguguuggaaguucuggc

SEQ ID NO: 279943 - RNA, 20 nt, Artificial Sequence
  Synthetic
auaguguuggaaguucuggc

SEQ ID NO: 279944 - RNA, 18 nt, Artificial Sequence
  Synthetic
cugagguauaaaaguggc

SEQ ID NO: 279945 - RNA, 19 nt, Artificial Sequence
  Synthetic
ccugagguauaaaaguggc

SEQ ID NO: 279946 - RNA, 20 nt, Artificial Sequence
  Synthetic
uccugagguauaaaaguggc

SEQ ID NO: 279947 - RNA, 21 nt, Artificial Sequence
  Synthetic
uuccugagguauaaaaguggc

SEQ ID NO: 279948 - RNA, 22 nt, Artificial Sequence
  Synthetic
auuccugagguauaaaaguggc

SEQ ID NO: 279949 - RNA, 23 nt, Artificial Sequence
  Synthetic
uauuccugagguauaaaaguggc

SEQ ID NO: 279950 - RNA, 24 nt, Artificial Sequence
  Synthetic
uuauuccugagguauaaaaguggc

SEQ ID NO: 279951 - RNA, 18 nt, Artificial Sequence
  Synthetic
cucagccucccaaguggc

SEQ ID NO: 279952 - RNA, 19 nt, Artificial Sequence
  Synthetic
ccucagccucccaaguggc

SEQ ID NO: 279953 - RNA, 20 nt, Artificial Sequence
  Synthetic
accucagccucccaaguggc

SEQ ID NO: 279954 - RNA, 21 nt, Artificial Sequence
  Synthetic
caccucagccucccaaguggc

SEQ ID NO: 279955 - RNA, 22 nt, Artificial Sequence
  Synthetic
ccaccucagccucccaaguggc

SEQ ID NO: 279956 - RNA, 23 nt, Artificial Sequence
  Synthetic
cccaccucagccucccaaguggc

SEQ ID NO: 279957 - RNA, 24 nt, Artificial Sequence
  Synthetic
ucccaccucagccucccaaguggc

SEQ ID NO: 279958 - RNA, 18 nt, Artificial Sequence
  Synthetic
uacgaaggaaacaguggc

SEQ ID NO: 279959 - RNA, 19 nt, Artificial Sequence
  Synthetic
auacgaaggaaacaguggc

SEQ ID NO: 279960 - RNA, 20 nt, Artificial Sequence
  Synthetic
uauacgaaggaaacaguggc

SEQ ID NO: 279961 - RNA, 21 nt, Artificial Sequence
  Synthetic
guauacgaaggaaacaguggc

SEQ ID NO: 279962 - RNA, 22 nt, Artificial Sequence
  Synthetic
aguauacgaaggaaacaguggc

SEQ ID NO: 279963 - RNA, 23 nt, Artificial Sequence
  Synthetic
caguauacgaaggaaacaguggc

SEQ ID NO: 279964 - RNA, 24 nt, Artificial Sequence
  Synthetic
acaguauacgaaggaaacaguggc

SEQ ID NO: 279965 - RNA, 18 nt, Artificial Sequence
  Synthetic
ccuuggcaaaccaguggc

SEQ ID NO: 279966 - RNA, 19 nt, Artificial Sequence
  Synthetic
uccuuggcaaaccaguggc

SEQ ID NO: 279967 - RNA, 20 nt, Artificial Sequence
  Synthetic
cuccuuggcaaaccaguggc

SEQ ID NO: 279968 - RNA, 21 nt, Artificial Sequence
  Synthetic
acuccuuggcaaaccaguggc

SEQ ID NO: 279969 - RNA, 22 nt, Artificial Sequence
  Synthetic
gacuccuuggcaaaccaguggc

SEQ ID NO: 279970 - RNA, 23 nt, Artificial Sequence
  Synthetic
agacuccuuggcaaaccaguggc

SEQ ID NO: 279971 - RNA, 24 nt, Artificial Sequence
  Synthetic
cagacuccuuggcaaaccaguggc

SEQ ID NO: 279972 - RNA, 18 nt, Artificial Sequence
  Synthetic
cguaggcagugcaguggc

SEQ ID NO: 279973 - RNA, 19 nt, Artificial Sequence
  Synthetic
ccguaggcagugcaguggc

SEQ ID NO: 279974 - RNA, 20 nt, Artificial Sequence
  Synthetic
uccguaggcagugcaguggc

SEQ ID NO: 279975 - RNA, 21 nt, Artificial Sequence
  Synthetic
cuccguaggcagugcaguggc

SEQ ID NO: 279976 - RNA, 22 nt, Artificial Sequence
  Synthetic
acuccguaggcagugcaguggc

SEQ ID NO: 279977 - RNA, 23 nt, Artificial Sequence
  Synthetic
cacuccguaggcagugcaguggc

SEQ ID NO: 279978 - RNA, 24 nt, Artificial Sequence
  Synthetic
ccacuccguaggcagugcaguggc

SEQ ID NO: 279979 - RNA, 18 nt, Artificial Sequence
  Synthetic
cuguucacgaucaguggc

SEQ ID NO: 279980 - RNA, 19 nt, Artificial Sequence
  Synthetic
gcuguucacgaucaguggc

SEQ ID NO: 279981 - RNA, 20 nt, Artificial Sequence
  Synthetic
agcuguucacgaucaguggc

SEQ ID NO: 279982 - RNA, 21 nt, Artificial Sequence
  Synthetic
uagcuguucacgaucaguggc

SEQ ID NO: 279983 - RNA, 22 nt, Artificial Sequence
  Synthetic
auagcuguucacgaucaguggc

SEQ ID NO: 279984 - RNA, 23 nt, Artificial Sequence
  Synthetic
aauagcuguucacgaucaguggc

SEQ ID NO: 279985 - RNA, 24 nt, Artificial Sequence
  Synthetic
uaauagcuguucacgaucaguggc

SEQ ID NO: 279986 - RNA, 18 nt, Artificial Sequence
  Synthetic
auccauggcuggaguggc

SEQ ID NO: 279987 - RNA, 19 nt, Artificial Sequence
  Synthetic
uauccauggcuggaguggc

SEQ ID NO: 279988 - RNA, 20 nt, Artificial Sequence
  Synthetic
uuauccauggcuggaguggc

SEQ ID NO: 279989 - RNA, 21 nt, Artificial Sequence
  Synthetic
uuuauccauggcuggaguggc

SEQ ID NO: 279990 - RNA, 22 nt, Artificial Sequence
  Synthetic
uuuuauccauggcuggaguggc

SEQ ID NO: 279991 - RNA, 23 nt, Artificial Sequence
  Synthetic
cuuuuauccauggcuggaguggc

SEQ ID NO: 279992 - RNA, 24 nt, Artificial Sequence
  Synthetic
ccuuuuauccauggcuggaguggc

SEQ ID NO: 279993 - RNA, 18 nt, Artificial Sequence
  Synthetic
gugagagaugauaguggc

SEQ ID NO: 279994 - RNA, 19 nt, Artificial Sequence
  Synthetic
ugugagagaugauaguggc

SEQ ID NO: 279995 - RNA, 20 nt, Artificial Sequence
  Synthetic
gugugagagaugauaguggc

SEQ ID NO: 279996 - RNA, 21 nt, Artificial Sequence
  Synthetic
cgugugagagaugauaguggc

SEQ ID NO: 279997 - RNA, 22 nt, Artificial Sequence
  Synthetic
ccgugugagagaugauaguggc

SEQ ID NO: 279998 - RNA, 23 nt, Artificial Sequence
  Synthetic
uccgugugagagaugauaguggc

SEQ ID NO: 279999 - RNA, 24 nt, Artificial Sequence
  Synthetic
guccgugugagagaugauaguggc

SEQ ID NO: 280000 - RNA, 18 nt, Artificial Sequence
  Synthetic
acugaauuugauaguggc

SEQ ID NO: 280001 - RNA, 19 nt, Artificial Sequence
  Synthetic
aacugaauuugauaguggc

SEQ ID NO: 280002 - RNA, 20 nt, Artificial Sequence
  Synthetic
aaacugaauuugauaguggc

SEQ ID NO: 280003 - RNA, 21 nt, Artificial Sequence
  Synthetic
aaaacugaauuugauaguggc

SEQ ID NO: 280004 - RNA, 22 nt, Artificial Sequence
  Synthetic
gaaaacugaauuugauaguggc

SEQ ID NO: 280005 - RNA, 23 nt, Artificial Sequence
  Synthetic
ugaaaacugaauuugauaguggc

SEQ ID NO: 280006 - RNA, 24 nt, Artificial Sequence
  Synthetic
uugaaaacugaauuugauaguggc

SEQ ID NO: 280007 - RNA, 18 nt, Artificial Sequence
  Synthetic
gggugaauuuauaguggc

SEQ ID NO: 280008 - RNA, 19 nt, Artificial Sequence
  Synthetic
agggugaauuuauaguggc

SEQ ID NO: 280009 - RNA, 20 nt, Artificial Sequence
  Synthetic
aagggugaauuuauaguggc

SEQ ID NO: 280010 - RNA, 21 nt, Artificial Sequence
  Synthetic
caagggugaauuuauaguggc

SEQ ID NO: 280011 - RNA, 22 nt, Artificial Sequence
  Synthetic
ucaagggugaauuuauaguggc

SEQ ID NO: 280012 - RNA, 23 nt, Artificial Sequence
  Synthetic
uucaagggugaauuuauaguggc

SEQ ID NO: 280013 - RNA, 24 nt, Artificial Sequence
  Synthetic
auucaagggugaauuuauaguggc

SEQ ID NO: 280014 - RNA, 18 nt, Artificial Sequence
  Synthetic
agagcccccaguaguggc

SEQ ID NO: 280015 - RNA, 19 nt, Artificial Sequence
  Synthetic
cagagcccccaguaguggc

SEQ ID NO: 280016 - RNA, 20 nt, Artificial Sequence
  Synthetic
ccagagcccccaguaguggc

SEQ ID NO: 280017 - RNA, 21 nt, Artificial Sequence
  Synthetic
uccagagcccccaguaguggc

SEQ ID NO: 280018 - RNA, 22 nt, Artificial Sequence
  Synthetic
uuccagagcccccaguaguggc

SEQ ID NO: 280019 - RNA, 23 nt, Artificial Sequence
  Synthetic
uuuccagagcccccaguaguggc

SEQ ID NO: 280020 - RNA, 24 nt, Artificial Sequence
  Synthetic
uuuuccagagcccccaguaguggc

SEQ ID NO: 280021 - RNA, 18 nt, Artificial Sequence
  Synthetic
uuauuagcugguaguggc

SEQ ID NO: 280022 - RNA, 19 nt, Artificial Sequence
  Synthetic
guuauuagcugguaguggc

SEQ ID NO: 280023 - RNA, 20 nt, Artificial Sequence
  Synthetic
aguuauuagcugguaguggc

SEQ ID NO: 280024 - RNA, 21 nt, Artificial Sequence
  Synthetic
aaguuauuagcugguaguggc

SEQ ID NO: 280025 - RNA, 22 nt, Artificial Sequence
  Synthetic
aaaguuauuagcugguaguggc

SEQ ID NO: 280026 - RNA, 23 nt, Artificial Sequence
  Synthetic
caaaguuauuagcugguaguggc

SEQ ID NO: 280027 - RNA, 24 nt, Artificial Sequence
  Synthetic
ucaaaguuauuagcugguaguggc

SEQ ID NO: 280028 - RNA, 18 nt, Artificial Sequence
  Synthetic
uuccaaaauauuaguggc

SEQ ID NO: 280029 - RNA, 19 nt, Artificial Sequence
  Synthetic
auuccaaaauauuaguggc

SEQ ID NO: 280030 - RNA, 20 nt, Artificial Sequence
  Synthetic
aauuccaaaauauuaguggc

SEQ ID NO: 280031 - RNA, 21 nt, Artificial Sequence
  Synthetic
caauuccaaaauauuaguggc

SEQ ID NO: 280032 - RNA, 22 nt, Artificial Sequence
  Synthetic
gcaauuccaaaauauuaguggc

SEQ ID NO: 280033 - RNA, 23 nt, Artificial Sequence
  Synthetic
agcaauuccaaaauauuaguggc

SEQ ID NO: 280034 - RNA, 24 nt, Artificial Sequence
  Synthetic
aagcaauuccaaaauauuaguggc

SEQ ID NO: 280035 - RNA, 18 nt, Artificial Sequence
  Synthetic
cucagccucuuuaguggc

SEQ ID NO: 280036 - RNA, 19 nt, Artificial Sequence
  Synthetic
ccucagccucuuuaguggc

SEQ ID NO: 280037 - RNA, 20 nt, Artificial Sequence
  Synthetic
gccucagccucuuuaguggc

SEQ ID NO: 280038 - RNA, 21 nt, Artificial Sequence
  Synthetic
ugccucagccucuuuaguggc

SEQ ID NO: 280039 - RNA, 22 nt, Artificial Sequence
  Synthetic
uugccucagccucuuuaguggc

SEQ ID NO: 280040 - RNA, 23 nt, Artificial Sequence
  Synthetic
auugccucagccucuuuaguggc

SEQ ID NO: 280041 - RNA, 24 nt, Artificial Sequence
  Synthetic
uauugccucagccucuuuaguggc

SEQ ID NO: 280042 - RNA, 18 nt, Artificial Sequence
  Synthetic
ugaacuggaauacguggc

SEQ ID NO: 280043 - RNA, 19 nt, Artificial Sequence
  Synthetic
cugaacuggaauacguggc

SEQ ID NO: 280044 - RNA, 20 nt, Artificial Sequence
  Synthetic
ccugaacuggaauacguggc

SEQ ID NO: 280045 - RNA, 21 nt, Artificial Sequence
  Synthetic
cccugaacuggaauacguggc

SEQ ID NO: 280046 - RNA, 22 nt, Artificial Sequence
  Synthetic
ucccugaacuggaauacguggc

SEQ ID NO: 280047 - RNA, 23 nt, Artificial Sequence
  Synthetic
gucccugaacuggaauacguggc

SEQ ID NO: 280048 - RNA, 24 nt, Artificial Sequence
  Synthetic
agucccugaacuggaauacguggc

SEQ ID NO: 280049 - RNA, 18 nt, Artificial Sequence
  Synthetic
ggggccagguuucguggc

SEQ ID NO: 280050 - RNA, 19 nt, Artificial Sequence
  Synthetic
cggggccagguuucguggc

SEQ ID NO: 280051 - RNA, 20 nt, Artificial Sequence
  Synthetic
ccggggccagguuucguggc

SEQ ID NO: 280052 - RNA, 21 nt, Artificial Sequence
  Synthetic
cccggggccagguuucguggc

SEQ ID NO: 280053 - RNA, 22 nt, Artificial Sequence
  Synthetic
gcccggggccagguuucguggc

SEQ ID NO: 280054 - RNA, 23 nt, Artificial Sequence
  Synthetic
agcccggggccagguuucguggc

SEQ ID NO: 280055 - RNA, 24 nt, Artificial Sequence
  Synthetic
gagcccggggccagguuucguggc

SEQ ID NO: 280056 - RNA, 18 nt, Artificial Sequence
  Synthetic
acagcucuuaaagguggc

SEQ ID NO: 280057 - RNA, 19 nt, Artificial Sequence
  Synthetic
uacagcucuuaaagguggc

SEQ ID NO: 280058 - RNA, 20 nt, Artificial Sequence
  Synthetic
uuacagcucuuaaagguggc

SEQ ID NO: 280059 - RNA, 21 nt, Artificial Sequence
  Synthetic
guuacagcucuuaaagguggc

SEQ ID NO: 280060 - RNA, 22 nt, Artificial Sequence
  Synthetic
uguuacagcucuuaaagguggc

SEQ ID NO: 280061 - RNA, 23 nt, Artificial Sequence
  Synthetic
cuguuacagcucuuaaagguggc

SEQ ID NO: 280062 - RNA, 24 nt, Artificial Sequence
  Synthetic
acuguuacagcucuuaaagguggc

SEQ ID NO: 280063 - RNA, 18 nt, Artificial Sequence
  Synthetic
ccuucuucacaagguggc

SEQ ID NO: 280064 - RNA, 19 nt, Artificial Sequence
  Synthetic
accuucuucacaagguggc

SEQ ID NO: 280065 - RNA, 20 nt, Artificial Sequence
  Synthetic
caccuucuucacaagguggc

SEQ ID NO: 280066 - RNA, 21 nt, Artificial Sequence
  Synthetic
gcaccuucuucacaagguggc

SEQ ID NO: 280067 - RNA, 22 nt, Artificial Sequence
  Synthetic
ggcaccuucuucacaagguggc

SEQ ID NO: 280068 - RNA, 23 nt, Artificial Sequence
  Synthetic
aggcaccuucuucacaagguggc

SEQ ID NO: 280069 - RNA, 24 nt, Artificial Sequence
  Synthetic
gaggcaccuucuucacaagguggc

SEQ ID NO: 280070 - RNA, 18 nt, Artificial Sequence
  Synthetic
aggagcuaagcagguggc

SEQ ID NO: 280071 - RNA, 19 nt, Artificial Sequence
  Synthetic
uaggagcuaagcagguggc

SEQ ID NO: 280072 - RNA, 20 nt, Artificial Sequence
  Synthetic
guaggagcuaagcagguggc

SEQ ID NO: 280073 - RNA, 21 nt, Artificial Sequence
  Synthetic
uguaggagcuaagcagguggc

SEQ ID NO: 280074 - RNA, 22 nt, Artificial Sequence
  Synthetic
cuguaggagcuaagcagguggc

SEQ ID NO: 280075 - RNA, 23 nt, Artificial Sequence
  Synthetic
ccuguaggagcuaagcagguggc

SEQ ID NO: 280076 - RNA, 24 nt, Artificial Sequence
  Synthetic
uccuguaggagcuaagcagguggc

SEQ ID NO: 280077 - RNA, 18 nt, Artificial Sequence
  Synthetic
accuuggaggacgguggc

SEQ ID NO: 280078 - RNA, 19 nt, Artificial Sequence
  Synthetic
aaccuuggaggacgguggc

SEQ ID NO: 280079 - RNA, 20 nt, Artificial Sequence
  Synthetic
caaccuuggaggacgguggc

SEQ ID NO: 280080 - RNA, 21 nt, Artificial Sequence
  Synthetic
acaaccuuggaggacgguggc

SEQ ID NO: 280081 - RNA, 22 nt, Artificial Sequence
  Synthetic
cacaaccuuggaggacgguggc

SEQ ID NO: 280082 - RNA, 23 nt, Artificial Sequence
  Synthetic
gcacaaccuuggaggacgguggc

SEQ ID NO: 280083 - RNA, 24 nt, Artificial Sequence
  Synthetic
ugcacaaccuuggaggacgguggc

SEQ ID NO: 280084 - RNA, 18 nt, Artificial Sequence
  Synthetic
aaaccuuaaagggguggc

SEQ ID NO: 280085 - RNA, 19 nt, Artificial Sequence
  Synthetic
uaaaccuuaaagggguggc

SEQ ID NO: 280086 - RNA, 20 nt, Artificial Sequence
  Synthetic
uuaaaccuuaaagggguggc

SEQ ID NO: 280087 - RNA, 21 nt, Artificial Sequence
  Synthetic
uuuaaaccuuaaagggguggc

SEQ ID NO: 280088 - RNA, 22 nt, Artificial Sequence
  Synthetic
cuuuaaaccuuaaagggguggc

SEQ ID NO: 280089 - RNA, 23 nt, Artificial Sequence
  Synthetic
acuuuaaaccuuaaagggguggc

SEQ ID NO: 280090 - RNA, 24 nt, Artificial Sequence
  Synthetic
aacuuuaaaccuuaaagggguggc

SEQ ID NO: 280091 - RNA, 18 nt, Artificial Sequence
  Synthetic
uucucaucuguggguggc

SEQ ID NO: 280092 - RNA, 19 nt, Artificial Sequence
  Synthetic
uuucucaucuguggguggc

SEQ ID NO: 280093 - RNA, 20 nt, Artificial Sequence
  Synthetic
uuuucucaucuguggguggc

SEQ ID NO: 280094 - RNA, 21 nt, Artificial Sequence
  Synthetic
guuuucucaucuguggguggc

SEQ ID NO: 280095 - RNA, 22 nt, Artificial Sequence
  Synthetic
uguuuucucaucuguggguggc

SEQ ID NO: 280096 - RNA, 23 nt, Artificial Sequence
  Synthetic
guguuuucucaucuguggguggc

SEQ ID NO: 280097 - RNA, 24 nt, Artificial Sequence
  Synthetic
gguguuuucucaucuguggguggc

SEQ ID NO: 280098 - RNA, 18 nt, Artificial Sequence
  Synthetic
aaaagagaugcugguggc

SEQ ID NO: 280099 - RNA, 19 nt, Artificial Sequence
  Synthetic
aaaaagagaugcugguggc

SEQ ID NO: 280100 - RNA, 20 nt, Artificial Sequence
  Synthetic
gaaaaagagaugcugguggc

SEQ ID NO: 280101 - RNA, 21 nt, Artificial Sequence
  Synthetic
ugaaaaagagaugcugguggc

SEQ ID NO: 280102 - RNA, 22 nt, Artificial Sequence
  Synthetic
uugaaaaagagaugcugguggc

SEQ ID NO: 280103 - RNA, 23 nt, Artificial Sequence
  Synthetic
guugaaaaagagaugcugguggc

SEQ ID NO: 280104 - RNA, 24 nt, Artificial Sequence
  Synthetic
aguugaaaaagagaugcugguggc

SEQ ID NO: 280105 - RNA, 18 nt, Artificial Sequence
  Synthetic
aaauaagcuguugguggc

SEQ ID NO: 280106 - RNA, 19 nt, Artificial Sequence
  Synthetic
caaauaagcuguugguggc

SEQ ID NO: 280107 - RNA, 20 nt, Artificial Sequence
  Synthetic
ucaaauaagcuguugguggc

SEQ ID NO: 280108 - RNA, 21 nt, Artificial Sequence
  Synthetic
cucaaauaagcuguugguggc

SEQ ID NO: 280109 - RNA, 22 nt, Artificial Sequence
  Synthetic
ccucaaauaagcuguugguggc

SEQ ID NO: 280110 - RNA, 23 nt, Artificial Sequence
  Synthetic
uccucaaauaagcuguugguggc

SEQ ID NO: 280111 - RNA, 24 nt, Artificial Sequence
  Synthetic
cuccucaaauaagcuguugguggc

SEQ ID NO: 280112 - RNA, 18 nt, Artificial Sequence
  Synthetic
guugauggauuugguggc

SEQ ID NO: 280113 - RNA, 19 nt, Artificial Sequence
  Synthetic
uguugauggauuugguggc

SEQ ID NO: 280114 - RNA, 20 nt, Artificial Sequence
  Synthetic
guguugauggauuugguggc

SEQ ID NO: 280115 - RNA, 21 nt, Artificial Sequence
  Synthetic
aguguugauggauuugguggc

SEQ ID NO: 280116 - RNA, 22 nt, Artificial Sequence
  Synthetic
aaguguugauggauuugguggc

SEQ ID NO: 280117 - RNA, 23 nt, Artificial Sequence
  Synthetic
gaaguguugauggauuugguggc

SEQ ID NO: 280118 - RNA, 24 nt, Artificial Sequence
  Synthetic
ggaaguguugauggauuugguggc

SEQ ID NO: 280119 - RNA, 18 nt, Artificial Sequence
  Synthetic
uaccaucugcaauguggc

SEQ ID NO: 280120 - RNA, 19 nt, Artificial Sequence
  Synthetic
cuaccaucugcaauguggc

SEQ ID NO: 280121 - RNA, 20 nt, Artificial Sequence
  Synthetic
acuaccaucugcaauguggc

SEQ ID NO: 280122 - RNA, 21 nt, Artificial Sequence
  Synthetic
uacuaccaucugcaauguggc

SEQ ID NO: 280123 - RNA, 22 nt, Artificial Sequence
  Synthetic
auacuaccaucugcaauguggc

SEQ ID NO: 280124 - RNA, 23 nt, Artificial Sequence
  Synthetic
aauacuaccaucugcaauguggc

SEQ ID NO: 280125 - RNA, 24 nt, Artificial Sequence
  Synthetic
uaauacuaccaucugcaauguggc

SEQ ID NO: 280126 - RNA, 18 nt, Artificial Sequence
  Synthetic
gagauuagcaacuguggc

SEQ ID NO: 280127 - RNA, 19 nt, Artificial Sequence
  Synthetic
agagauuagcaacuguggc

SEQ ID NO: 280128 - RNA, 20 nt, Artificial Sequence
  Synthetic
cagagauuagcaacuguggc

SEQ ID NO: 280129 - RNA, 21 nt, Artificial Sequence
  Synthetic
ucagagauuagcaacuguggc

SEQ ID NO: 280130 - RNA, 22 nt, Artificial Sequence
  Synthetic
cucagagauuagcaacuguggc

SEQ ID NO: 280131 - RNA, 23 nt, Artificial Sequence
  Synthetic
gcucagagauuagcaacuguggc

SEQ ID NO: 280132 - RNA, 24 nt, Artificial Sequence
  Synthetic
ggcucagagauuagcaacuguggc

SEQ ID NO: 280133 - RNA, 18 nt, Artificial Sequence
  Synthetic
gagagugguauguguggc

SEQ ID NO: 280134 - RNA, 19 nt, Artificial Sequence
  Synthetic
ggagagugguauguguggc

SEQ ID NO: 280135 - RNA, 20 nt, Artificial Sequence
  Synthetic
uggagagugguauguguggc

SEQ ID NO: 280136 - RNA, 21 nt, Artificial Sequence
  Synthetic
cuggagagugguauguguggc

SEQ ID NO: 280137 - RNA, 22 nt, Artificial Sequence
  Synthetic
acuggagagugguauguguggc

SEQ ID NO: 280138 - RNA, 23 nt, Artificial Sequence
  Synthetic
gacuggagagugguauguguggc

SEQ ID NO: 280139 - RNA, 24 nt, Artificial Sequence
  Synthetic
ggacuggagagugguauguguggc

SEQ ID NO: 280140 - RNA, 18 nt, Artificial Sequence
  Synthetic
cucacaguucuguguggc

SEQ ID NO: 280141 - RNA, 19 nt, Artificial Sequence
  Synthetic
acucacaguucuguguggc

SEQ ID NO: 280142 - RNA, 20 nt, Artificial Sequence
  Synthetic
gacucacaguucuguguggc

SEQ ID NO: 280143 - RNA, 21 nt, Artificial Sequence
  Synthetic
ugacucacaguucuguguggc

SEQ ID NO: 280144 - RNA, 22 nt, Artificial Sequence
  Synthetic
uugacucacaguucuguguggc

SEQ ID NO: 280145 - RNA, 23 nt, Artificial Sequence
  Synthetic
guugacucacaguucuguguggc

SEQ ID NO: 280146 - RNA, 24 nt, Artificial Sequence
  Synthetic
aguugacucacaguucuguguggc

SEQ ID NO: 280147 - RNA, 18 nt, Artificial Sequence
  Synthetic
uaguauaaauauuguggc

SEQ ID NO: 280148 - RNA, 19 nt, Artificial Sequence
  Synthetic
auaguauaaauauuguggc

SEQ ID NO: 280149 - RNA, 20 nt, Artificial Sequence
  Synthetic
aauaguauaaauauuguggc

SEQ ID NO: 280150 - RNA, 21 nt, Artificial Sequence
  Synthetic
gaauaguauaaauauuguggc

SEQ ID NO: 280151 - RNA, 22 nt, Artificial Sequence
  Synthetic
ggaauaguauaaauauuguggc

SEQ ID NO: 280152 - RNA, 23 nt, Artificial Sequence
  Synthetic
aggaauaguauaaauauuguggc

SEQ ID NO: 280153 - RNA, 24 nt, Artificial Sequence
  Synthetic
uaggaauaguauaaauauuguggc

SEQ ID NO: 280154 - RNA, 18 nt, Artificial Sequence
  Synthetic
uauauguuuuguuguggc

SEQ ID NO: 280155 - RNA, 19 nt, Artificial Sequence
  Synthetic
cuauauguuuuguuguggc

SEQ ID NO: 280156 - RNA, 20 nt, Artificial Sequence
  Synthetic
gcuauauguuuuguuguggc

SEQ ID NO: 280157 - RNA, 21 nt, Artificial Sequence
  Synthetic
ggcuauauguuuuguuguggc

SEQ ID NO: 280158 - RNA, 22 nt, Artificial Sequence
  Synthetic
uggcuauauguuuuguuguggc

SEQ ID NO: 280159 - RNA, 23 nt, Artificial Sequence
  Synthetic
uuggcuauauguuuuguuguggc

SEQ ID NO: 280160 - RNA, 24 nt, Artificial Sequence
  Synthetic
uuuggcuauauguuuuguuguggc

SEQ ID NO: 280161 - RNA, 18 nt, Artificial Sequence
  Synthetic
aauauuguuaaaauuggc

SEQ ID NO: 280162 - RNA, 19 nt, Artificial Sequence
  Synthetic
uaauauuguuaaaauuggc

SEQ ID NO: 280163 - RNA, 20 nt, Artificial Sequence
  Synthetic
uuaauauuguuaaaauuggc

SEQ ID NO: 280164 - RNA, 21 nt, Artificial Sequence
  Synthetic
cuuaauauuguuaaaauuggc

SEQ ID NO: 280165 - RNA, 22 nt, Artificial Sequence
  Synthetic
ucuuaauauuguuaaaauuggc

SEQ ID NO: 280166 - RNA, 23 nt, Artificial Sequence
  Synthetic
uucuuaauauuguuaaaauuggc

SEQ ID NO: 280167 - RNA, 24 nt, Artificial Sequence
  Synthetic
uuucuuaauauuguuaaaauuggc

SEQ ID NO: 280168 - RNA, 18 nt, Artificial Sequence
  Synthetic
accauucuggacauuggc

SEQ ID NO: 280169 - RNA, 19 nt, Artificial Sequence
  Synthetic
uaccauucuggacauuggc

SEQ ID NO: 280170 - RNA, 20 nt, Artificial Sequence
  Synthetic
auaccauucuggacauuggc

SEQ ID NO: 280171 - RNA, 21 nt, Artificial Sequence
  Synthetic
aauaccauucuggacauuggc

SEQ ID NO: 280172 - RNA, 22 nt, Artificial Sequence
  Synthetic
aaauaccauucuggacauuggc

SEQ ID NO: 280173 - RNA, 23 nt, Artificial Sequence
  Synthetic
gaaauaccauucuggacauuggc

SEQ ID NO: 280174 - RNA, 24 nt, Artificial Sequence
  Synthetic
ggaaauaccauucuggacauuggc

SEQ ID NO: 280175 - RNA, 18 nt, Artificial Sequence
  Synthetic
auccagccagccauuggc

SEQ ID NO: 280176 - RNA, 19 nt, Artificial Sequence
  Synthetic
gauccagccagccauuggc

SEQ ID NO: 280177 - RNA, 20 nt, Artificial Sequence
  Synthetic
ugauccagccagccauuggc

SEQ ID NO: 280178 - RNA, 21 nt, Artificial Sequence
  Synthetic
cugauccagccagccauuggc

SEQ ID NO: 280179 - RNA, 22 nt, Artificial Sequence
  Synthetic
ccugauccagccagccauuggc

SEQ ID NO: 280180 - RNA, 23 nt, Artificial Sequence
  Synthetic
uccugauccagccagccauuggc

SEQ ID NO: 280181 - RNA, 24 nt, Artificial Sequence
  Synthetic
uuccugauccagccagccauuggc

SEQ ID NO: 280182 - RNA, 18 nt, Artificial Sequence
  Synthetic
ugcucacacuccauuggc

SEQ ID NO: 280183 - RNA, 19 nt, Artificial Sequence
  Synthetic
uugcucacacuccauuggc

SEQ ID NO: 280184 - RNA, 20 nt, Artificial Sequence
  Synthetic
uuugcucacacuccauuggc

SEQ ID NO: 280185 - RNA, 21 nt, Artificial Sequence
  Synthetic
uuuugcucacacuccauuggc

SEQ ID NO: 280186 - RNA, 22 nt, Artificial Sequence
  Synthetic
cuuuugcucacacuccauuggc

SEQ ID NO: 280187 - RNA, 23 nt, Artificial Sequence
  Synthetic
acuuuugcucacacuccauuggc

SEQ ID NO: 280188 - RNA, 24 nt, Artificial Sequence
  Synthetic
cacuuuugcucacacuccauuggc

SEQ ID NO: 280189 - RNA, 18 nt, Artificial Sequence
  Synthetic
guuuggguuuccauuggc

SEQ ID NO: 280190 - RNA, 19 nt, Artificial Sequence
  Synthetic
uguuuggguuuccauuggc

SEQ ID NO: 280191 - RNA, 20 nt, Artificial Sequence
  Synthetic
auguuuggguuuccauuggc

SEQ ID NO: 280192 - RNA, 21 nt, Artificial Sequence
  Synthetic
uauguuuggguuuccauuggc

SEQ ID NO: 280193 - RNA, 22 nt, Artificial Sequence
  Synthetic
cuauguuuggguuuccauuggc

SEQ ID NO: 280194 - RNA, 23 nt, Artificial Sequence
  Synthetic
gcuauguuuggguuuccauuggc

SEQ ID NO: 280195 - RNA, 24 nt, Artificial Sequence
  Synthetic
agcuauguuuggguuuccauuggc

SEQ ID NO: 280196 - RNA, 18 nt, Artificial Sequence
  Synthetic
cuguguuauaauauuggc

SEQ ID NO: 280197 - RNA, 19 nt, Artificial Sequence
  Synthetic
acuguguuauaauauuggc

SEQ ID NO: 280198 - RNA, 20 nt, Artificial Sequence
  Synthetic
cacuguguuauaauauuggc

SEQ ID NO: 280199 - RNA, 21 nt, Artificial Sequence
  Synthetic
ucacuguguuauaauauuggc

SEQ ID NO: 280200 - RNA, 22 nt, Artificial Sequence
  Synthetic
aucacuguguuauaauauuggc

SEQ ID NO: 280201 - RNA, 23 nt, Artificial Sequence
  Synthetic
caucacuguguuauaauauuggc

SEQ ID NO: 280202 - RNA, 24 nt, Artificial Sequence
  Synthetic
gcaucacuguguuauaauauuggc

SEQ ID NO: 280203 - RNA, 18 nt, Artificial Sequence
  Synthetic
aauaugauguguauuggc

SEQ ID NO: 280204 - RNA, 19 nt, Artificial Sequence
  Synthetic
uaauaugauguguauuggc

SEQ ID NO: 280205 - RNA, 20 nt, Artificial Sequence
  Synthetic
guaauaugauguguauuggc

SEQ ID NO: 280206 - RNA, 21 nt, Artificial Sequence
  Synthetic
aguaauaugauguguauuggc

SEQ ID NO: 280207 - RNA, 22 nt, Artificial Sequence
  Synthetic
gaguaauaugauguguauuggc

SEQ ID NO: 280208 - RNA, 23 nt, Artificial Sequence
  Synthetic
agaguaauaugauguguauuggc

SEQ ID NO: 280209 - RNA, 24 nt, Artificial Sequence
  Synthetic
cagaguaauaugauguguauuggc

SEQ ID NO: 280210 - RNA, 18 nt, Artificial Sequence
  Synthetic
augccuguauaacuuggc

SEQ ID NO: 280211 - RNA, 19 nt, Artificial Sequence
  Synthetic
aaugccuguauaacuuggc

SEQ ID NO: 280212 - RNA, 20 nt, Artificial Sequence
  Synthetic
uaaugccuguauaacuuggc

SEQ ID NO: 280213 - RNA, 21 nt, Artificial Sequence
  Synthetic
uuaaugccuguauaacuuggc

SEQ ID NO: 280214 - RNA, 22 nt, Artificial Sequence
  Synthetic
uuuaaugccuguauaacuuggc

SEQ ID NO: 280215 - RNA, 23 nt, Artificial Sequence
  Synthetic
guuuaaugccuguauaacuuggc

SEQ ID NO: 280216 - RNA, 24 nt, Artificial Sequence
  Synthetic
uguuuaaugccuguauaacuuggc

SEQ ID NO: 280217 - RNA, 18 nt, Artificial Sequence
  Synthetic
cuuacgguuccacuuggc

SEQ ID NO: 280218 - RNA, 19 nt, Artificial Sequence
  Synthetic
acuuacgguuccacuuggc

SEQ ID NO: 280219 - RNA, 20 nt, Artificial Sequence
  Synthetic
gacuuacgguuccacuuggc

SEQ ID NO: 280220 - RNA, 21 nt, Artificial Sequence
  Synthetic
ggacuuacgguuccacuuggc

SEQ ID NO: 280221 - RNA, 22 nt, Artificial Sequence
  Synthetic
uggacuuacgguuccacuuggc

SEQ ID NO: 280222 - RNA, 23 nt, Artificial Sequence
  Synthetic
auggacuuacgguuccacuuggc

SEQ ID NO: 280223 - RNA, 24 nt, Artificial Sequence
  Synthetic
aauggacuuacgguuccacuuggc

SEQ ID NO: 280224 - RNA, 18 nt, Artificial Sequence
  Synthetic
cuggcauaccaccuuggc

SEQ ID NO: 280225 - RNA, 19 nt, Artificial Sequence
  Synthetic
ucuggcauaccaccuuggc

SEQ ID NO: 280226 - RNA, 20 nt, Artificial Sequence
  Synthetic
uucuggcauaccaccuuggc

SEQ ID NO: 280227 - RNA, 21 nt, Artificial Sequence
  Synthetic
uuucuggcauaccaccuuggc

SEQ ID NO: 280228 - RNA, 22 nt, Artificial Sequence
  Synthetic
auuucuggcauaccaccuuggc

SEQ ID NO: 280229 - RNA, 23 nt, Artificial Sequence
  Synthetic
cauuucuggcauaccaccuuggc

SEQ ID NO: 280230 - RNA, 24 nt, Artificial Sequence
  Synthetic
gcauuucuggcauaccaccuuggc

SEQ ID NO: 280231 - RNA, 18 nt, Artificial Sequence
  Synthetic
ugaguucauguccuuggc

SEQ ID NO: 280232 - RNA, 19 nt, Artificial Sequence
  Synthetic
augaguucauguccuuggc

SEQ ID NO: 280233 - RNA, 20 nt, Artificial Sequence
  Synthetic
gaugaguucauguccuuggc

SEQ ID NO: 280234 - RNA, 21 nt, Artificial Sequence
  Synthetic
ggaugaguucauguccuuggc

SEQ ID NO: 280235 - RNA, 22 nt, Artificial Sequence
  Synthetic
aggaugaguucauguccuuggc

SEQ ID NO: 280236 - RNA, 23 nt, Artificial Sequence
  Synthetic
aaggaugaguucauguccuuggc

SEQ ID NO: 280237 - RNA, 24 nt, Artificial Sequence
  Synthetic
aaaggaugaguucauguccuuggc

SEQ ID NO: 280238 - RNA, 18 nt, Artificial Sequence
  Synthetic
gacucagcugggcuuggc

SEQ ID NO: 280239 - RNA, 19 nt, Artificial Sequence
  Synthetic
ugacucagcugggcuuggc

SEQ ID NO: 280240 - RNA, 20 nt, Artificial Sequence
  Synthetic
cugacucagcugggcuuggc

SEQ ID NO: 280241 - RNA, 21 nt, Artificial Sequence
  Synthetic
acugacucagcugggcuuggc

SEQ ID NO: 280242 - RNA, 22 nt, Artificial Sequence
  Synthetic
gacugacucagcugggcuuggc

SEQ ID NO: 280243 - RNA, 23 nt, Artificial Sequence
  Synthetic
ugacugacucagcugggcuuggc

SEQ ID NO: 280244 - RNA, 24 nt, Artificial Sequence
  Synthetic
uugacugacucagcugggcuuggc

SEQ ID NO: 280245 - RNA, 18 nt, Artificial Sequence
  Synthetic
ccuuuuccuuggcuuggc

SEQ ID NO: 280246 - RNA, 19 nt, Artificial Sequence
  Synthetic
cccuuuuccuuggcuuggc

SEQ ID NO: 280247 - RNA, 20 nt, Artificial Sequence
  Synthetic
gcccuuuuccuuggcuuggc

SEQ ID NO: 280248 - RNA, 21 nt, Artificial Sequence
  Synthetic
agcccuuuuccuuggcuuggc

SEQ ID NO: 280249 - RNA, 22 nt, Artificial Sequence
  Synthetic
aagcccuuuuccuuggcuuggc

SEQ ID NO: 280250 - RNA, 23 nt, Artificial Sequence
  Synthetic
gaagcccuuuuccuuggcuuggc

SEQ ID NO: 280251 - RNA, 24 nt, Artificial Sequence
  Synthetic
ugaagcccuuuuccuuggcuuggc

SEQ ID NO: 280252 - RNA, 18 nt, Artificial Sequence
  Synthetic
uauuauuguaaucuuggc

SEQ ID NO: 280253 - RNA, 19 nt, Artificial Sequence
  Synthetic
uuauuauuguaaucuuggc

SEQ ID NO: 280254 - RNA, 20 nt, Artificial Sequence
  Synthetic
guuauuauuguaaucuuggc

SEQ ID NO: 280255 - RNA, 21 nt, Artificial Sequence
  Synthetic
gguuauuauuguaaucuuggc

SEQ ID NO: 280256 - RNA, 22 nt, Artificial Sequence
  Synthetic
agguuauuauuguaaucuuggc

SEQ ID NO: 280257 - RNA, 23 nt, Artificial Sequence
  Synthetic
gagguuauuauuguaaucuuggc

SEQ ID NO: 280258 - RNA, 24 nt, Artificial Sequence
  Synthetic
agagguuauuauuguaaucuuggc

SEQ ID NO: 280259 - RNA, 18 nt, Artificial Sequence
  Synthetic
aauccuuuacaucuuggc

SEQ ID NO: 280260 - RNA, 19 nt, Artificial Sequence
  Synthetic
uaauccuuuacaucuuggc

SEQ ID NO: 280261 - RNA, 20 nt, Artificial Sequence
  Synthetic
auaauccuuuacaucuuggc

SEQ ID NO: 280262 - RNA, 21 nt, Artificial Sequence
  Synthetic
aauaauccuuuacaucuuggc

SEQ ID NO: 280263 - RNA, 22 nt, Artificial Sequence
  Synthetic
uaauaauccuuuacaucuuggc

SEQ ID NO: 280264 - RNA, 23 nt, Artificial Sequence
  Synthetic
cuaauaauccuuuacaucuuggc

SEQ ID NO: 280265 - RNA, 24 nt, Artificial Sequence
  Synthetic
ucuaauaauccuuuacaucuuggc

SEQ ID NO: 280266 - RNA, 18 nt, Artificial Sequence
  Synthetic
uaacaagaggcucuuggc

SEQ ID NO: 280267 - RNA, 19 nt, Artificial Sequence
  Synthetic
uuaacaagaggcucuuggc

SEQ ID NO: 280268 - RNA, 20 nt, Artificial Sequence
  Synthetic
uuuaacaagaggcucuuggc

SEQ ID NO: 280269 - RNA, 21 nt, Artificial Sequence
  Synthetic
guuuaacaagaggcucuuggc

SEQ ID NO: 280270 - RNA, 22 nt, Artificial Sequence
  Synthetic
uguuuaacaagaggcucuuggc

SEQ ID NO: 280271 - RNA, 23 nt, Artificial Sequence
  Synthetic
auguuuaacaagaggcucuuggc

SEQ ID NO: 280272 - RNA, 24 nt, Artificial Sequence
  Synthetic
aauguuuaacaagaggcucuuggc

SEQ ID NO: 280273 - RNA, 18 nt, Artificial Sequence
  Synthetic
acaauguguuuucuuggc

SEQ ID NO: 280274 - RNA, 19 nt, Artificial Sequence
  Synthetic
aacaauguguuuucuuggc

SEQ ID NO: 280275 - RNA, 20 nt, Artificial Sequence
  Synthetic
gaacaauguguuuucuuggc

SEQ ID NO: 280276 - RNA, 21 nt, Artificial Sequence
  Synthetic
ggaacaauguguuuucuuggc

SEQ ID NO: 280277 - RNA, 22 nt, Artificial Sequence
  Synthetic
gggaacaauguguuuucuuggc

SEQ ID NO: 280278 - RNA, 23 nt, Artificial Sequence
  Synthetic
agggaacaauguguuuucuuggc

SEQ ID NO: 280279 - RNA, 24 nt, Artificial Sequence
  Synthetic
cagggaacaauguguuuucuuggc

SEQ ID NO: 280280 - RNA, 18 nt, Artificial Sequence
  Synthetic
aacuggggacgaguuggc

SEQ ID NO: 280281 - RNA, 19 nt, Artificial Sequence
  Synthetic
caacuggggacgaguuggc

SEQ ID NO: 280282 - RNA, 20 nt, Artificial Sequence
  Synthetic
ccaacuggggacgaguuggc

SEQ ID NO: 280283 - RNA, 21 nt, Artificial Sequence
  Synthetic
uccaacuggggacgaguuggc

SEQ ID NO: 280284 - RNA, 22 nt, Artificial Sequence
  Synthetic
cuccaacuggggacgaguuggc

SEQ ID NO: 280285 - RNA, 23 nt, Artificial Sequence
  Synthetic
ucuccaacuggggacgaguuggc

SEQ ID NO: 280286 - RNA, 24 nt, Artificial Sequence
  Synthetic
gucuccaacuggggacgaguuggc

SEQ ID NO: 280287 - RNA, 18 nt, Artificial Sequence
  Synthetic
ccagugggaggcguuggc

SEQ ID NO: 280288 - RNA, 19 nt, Artificial Sequence
  Synthetic
accagugggaggcguuggc

SEQ ID NO: 280289 - RNA, 20 nt, Artificial Sequence
  Synthetic
aaccagugggaggcguuggc

SEQ ID NO: 280290 - RNA, 21 nt, Artificial Sequence
  Synthetic
uaaccagugggaggcguuggc

SEQ ID NO: 280291 - RNA, 22 nt, Artificial Sequence
  Synthetic
uuaaccagugggaggcguuggc

SEQ ID NO: 280292 - RNA, 23 nt, Artificial Sequence
  Synthetic
uuuaaccagugggaggcguuggc

SEQ ID NO: 280293 - RNA, 24 nt, Artificial Sequence
  Synthetic
auuuaaccagugggaggcguuggc

SEQ ID NO: 280294 - RNA, 18 nt, Artificial Sequence
  Synthetic
gguuuucaccauguuggc

SEQ ID NO: 280295 - RNA, 19 nt, Artificial Sequence
  Synthetic
ggguuuucaccauguuggc

SEQ ID NO: 280296 - RNA, 20 nt, Artificial Sequence
  Synthetic
cggguuuucaccauguuggc

SEQ ID NO: 280297 - RNA, 21 nt, Artificial Sequence
  Synthetic
acggguuuucaccauguuggc

SEQ ID NO: 280298 - RNA, 22 nt, Artificial Sequence
  Synthetic
gacggguuuucaccauguuggc

SEQ ID NO: 280299 - RNA, 23 nt, Artificial Sequence
  Synthetic
agacggguuuucaccauguuggc

SEQ ID NO: 280300 - RNA, 24 nt, Artificial Sequence
  Synthetic
gagacggguuuucaccauguuggc

SEQ ID NO: 280301 - RNA, 18 nt, Artificial Sequence
  Synthetic
agugaaguggauguuggc

SEQ ID NO: 280302 - RNA, 19 nt, Artificial Sequence
  Synthetic
gagugaaguggauguuggc

SEQ ID NO: 280303 - RNA, 20 nt, Artificial Sequence
  Synthetic
ggagugaaguggauguuggc

SEQ ID NO: 280304 - RNA, 21 nt, Artificial Sequence
  Synthetic
aggagugaaguggauguuggc

SEQ ID NO: 280305 - RNA, 22 nt, Artificial Sequence
  Synthetic
uaggagugaaguggauguuggc

SEQ ID NO: 280306 - RNA, 23 nt, Artificial Sequence
  Synthetic
uuaggagugaaguggauguuggc

SEQ ID NO: 280307 - RNA, 24 nt, Artificial Sequence
  Synthetic
uuuaggagugaaguggauguuggc

SEQ ID NO: 280308 - RNA, 18 nt, Artificial Sequence
  Synthetic
ugcacacuagguguuggc

SEQ ID NO: 280309 - RNA, 19 nt, Artificial Sequence
  Synthetic
cugcacacuagguguuggc

SEQ ID NO: 280310 - RNA, 20 nt, Artificial Sequence
  Synthetic
gcugcacacuagguguuggc

SEQ ID NO: 280311 - RNA, 21 nt, Artificial Sequence
  Synthetic
ggcugcacacuagguguuggc

SEQ ID NO: 280312 - RNA, 22 nt, Artificial Sequence
  Synthetic
aggcugcacacuagguguuggc

SEQ ID NO: 280313 - RNA, 23 nt, Artificial Sequence
  Synthetic
aaggcugcacacuagguguuggc

SEQ ID NO: 280314 - RNA, 24 nt, Artificial Sequence
  Synthetic
aaaggcugcacacuagguguuggc

SEQ ID NO: 280315 - RNA, 18 nt, Artificial Sequence
  Synthetic
caacagauguguguuggc

SEQ ID NO: 280316 - RNA, 19 nt, Artificial Sequence
  Synthetic
ucaacagauguguguuggc

SEQ ID NO: 280317 - RNA, 20 nt, Artificial Sequence
  Synthetic
aucaacagauguguguuggc

SEQ ID NO: 280318 - RNA, 21 nt, Artificial Sequence
  Synthetic
uaucaacagauguguguuggc

SEQ ID NO: 280319 - RNA, 22 nt, Artificial Sequence
  Synthetic
cuaucaacagauguguguuggc

SEQ ID NO: 280320 - RNA, 23 nt, Artificial Sequence
  Synthetic
ccuaucaacagauguguguuggc

SEQ ID NO: 280321 - RNA, 24 nt, Artificial Sequence
  Synthetic
uccuaucaacagauguguguuggc

SEQ ID NO: 280322 - RNA, 18 nt, Artificial Sequence
  Synthetic
acaauuaagaaauuuggc

SEQ ID NO: 280323 - RNA, 19 nt, Artificial Sequence
  Synthetic
aacaauuaagaaauuuggc

SEQ ID NO: 280324 - RNA, 20 nt, Artificial Sequence
  Synthetic
aaacaauuaagaaauuuggc

SEQ ID NO: 280325 - RNA, 21 nt, Artificial Sequence
  Synthetic
aaaacaauuaagaaauuuggc

SEQ ID NO: 280326 - RNA, 22 nt, Artificial Sequence
  Synthetic
gaaaacaauuaagaaauuuggc

SEQ ID NO: 280327 - RNA, 23 nt, Artificial Sequence
  Synthetic
ggaaaacaauuaagaaauuuggc

SEQ ID NO: 280328 - RNA, 24 nt, Artificial Sequence
  Synthetic
uggaaaacaauuaagaaauuuggc

SEQ ID NO: 280329 - RNA, 18 nt, Artificial Sequence
  Synthetic
ugcugcuguguauuuggc

SEQ ID NO: 280330 - RNA, 19 nt, Artificial Sequence
  Synthetic
gugcugcuguguauuuggc

SEQ ID NO: 280331 - RNA, 20 nt, Artificial Sequence
  Synthetic
ugugcugcuguguauuuggc

SEQ ID NO: 280332 - RNA, 21 nt, Artificial Sequence
  Synthetic
cugugcugcuguguauuuggc

SEQ ID NO: 280333 - RNA, 22 nt, Artificial Sequence
  Synthetic
ccugugcugcuguguauuuggc

SEQ ID NO: 280334 - RNA, 23 nt, Artificial Sequence
  Synthetic
accugugcugcuguguauuuggc

SEQ ID NO: 280335 - RNA, 24 nt, Artificial Sequence
  Synthetic
aaccugugcugcuguguauuuggc

SEQ ID NO: 280336 - RNA, 18 nt, Artificial Sequence
  Synthetic
agcaggcaauuguuuggc

SEQ ID NO: 280337 - RNA, 19 nt, Artificial Sequence
  Synthetic
uagcaggcaauuguuuggc

SEQ ID NO: 280338 - RNA, 20 nt, Artificial Sequence
  Synthetic
uuagcaggcaauuguuuggc

SEQ ID NO: 280339 - RNA, 21 nt, Artificial Sequence
  Synthetic
guuagcaggcaauuguuuggc

SEQ ID NO: 280340 - RNA, 22 nt, Artificial Sequence
  Synthetic
uguuagcaggcaauuguuuggc

SEQ ID NO: 280341 - RNA, 23 nt, Artificial Sequence
  Synthetic
cuguuagcaggcaauuguuuggc

SEQ ID NO: 280342 - RNA, 24 nt, Artificial Sequence
  Synthetic
gcuguuagcaggcaauuguuuggc

SEQ ID NO: 280343 - RNA, 18 nt, Artificial Sequence
  Synthetic
gccaugauauauuuuggc

SEQ ID NO: 280344 - RNA, 19 nt, Artificial Sequence
  Synthetic
agccaugauauauuuuggc

SEQ ID NO: 280345 - RNA, 20 nt, Artificial Sequence
  Synthetic
uagccaugauauauuuuggc

SEQ ID NO: 280346 - RNA, 21 nt, Artificial Sequence
  Synthetic
auagccaugauauauuuuggc

SEQ ID NO: 280347 - RNA, 22 nt, Artificial Sequence
  Synthetic
uauagccaugauauauuuuggc

SEQ ID NO: 280348 - RNA, 23 nt, Artificial Sequence
  Synthetic
uuauagccaugauauauuuuggc

SEQ ID NO: 280349 - RNA, 24 nt, Artificial Sequence
  Synthetic
uuuauagccaugauauauuuuggc

SEQ ID NO: 280350 - RNA, 18 nt, Artificial Sequence
  Synthetic
ccaauggauacuuuuggc

SEQ ID NO: 280351 - RNA, 19 nt, Artificial Sequence
  Synthetic
gccaauggauacuuuuggc

SEQ ID NO: 280352 - RNA, 20 nt, Artificial Sequence
  Synthetic
agccaauggauacuuuuggc

SEQ ID NO: 280353 - RNA, 21 nt, Artificial Sequence
  Synthetic
aagccaauggauacuuuuggc

SEQ ID NO: 280354 - RNA, 22 nt, Artificial Sequence
  Synthetic
aaagccaauggauacuuuuggc

SEQ ID NO: 280355 - RNA, 23 nt, Artificial Sequence
  Synthetic
caaagccaauggauacuuuuggc

SEQ ID NO: 280356 - RNA, 24 nt, Artificial Sequence
  Synthetic
ccaaagccaauggauacuuuuggc

SEQ ID NO: 280357 - RNA, 18 nt, Artificial Sequence
  Synthetic
aauauuggaaguuuuggc

SEQ ID NO: 280358 - RNA, 19 nt, Artificial Sequence
  Synthetic
uaauauuggaaguuuuggc

SEQ ID NO: 280359 - RNA, 20 nt, Artificial Sequence
  Synthetic
auaauauuggaaguuuuggc

SEQ ID NO: 280360 - RNA, 21 nt, Artificial Sequence
  Synthetic
cauaauauuggaaguuuuggc

SEQ ID NO: 280361 - RNA, 22 nt, Artificial Sequence
  Synthetic
acauaauauuggaaguuuuggc

SEQ ID NO: 280362 - RNA, 23 nt, Artificial Sequence
  Synthetic
aacauaauauuggaaguuuuggc

SEQ ID NO: 280363 - RNA, 24 nt, Artificial Sequence
  Synthetic
caacauaauauuggaaguuuuggc

SEQ ID NO: 280364 - RNA, 18 nt, Artificial Sequence
  Synthetic
cuuguguuuauuuuuggc

SEQ ID NO: 280365 - RNA, 19 nt, Artificial Sequence
  Synthetic
ccuuguguuuauuuuuggc

SEQ ID NO: 280366 - RNA, 20 nt, Artificial Sequence
  Synthetic
gccuuguguuuauuuuuggc

SEQ ID NO: 280367 - RNA, 21 nt, Artificial Sequence
  Synthetic
ggccuuguguuuauuuuuggc

SEQ ID NO: 280368 - RNA, 22 nt, Artificial Sequence
  Synthetic
uggccuuguguuuauuuuuggc

SEQ ID NO: 280369 - RNA, 23 nt, Artificial Sequence
  Synthetic
cuggccuuguguuuauuuuuggc

SEQ ID NO: 280370 - RNA, 24 nt, Artificial Sequence
  Synthetic
acuggccuuguguuuauuuuuggc

SEQ ID NO: 280371 - RNA, 18 nt, Artificial Sequence
  Synthetic
aacuuuuuuuuuuuuggc

SEQ ID NO: 280372 - RNA, 19 nt, Artificial Sequence
  Synthetic
aaacuuuuuuuuuuuuggc

SEQ ID NO: 280373 - RNA, 20 nt, Artificial Sequence
  Synthetic
uaaacuuuuuuuuuuuuggc

SEQ ID NO: 280374 - RNA, 21 nt, Artificial Sequence
  Synthetic
auaaacuuuuuuuuuuuuggc

SEQ ID NO: 280375 - RNA, 22 nt, Artificial Sequence
  Synthetic
aauaaacuuuuuuuuuuuuggc

SEQ ID NO: 280376 - RNA, 23 nt, Artificial Sequence
  Synthetic
aaauaaacuuuuuuuuuuuuggc

SEQ ID NO: 280377 - RNA, 24 nt, Artificial Sequence
  Synthetic
uaaauaaacuuuuuuuuuuuuggc

SEQ ID NO: 280378 - RNA, 18 nt, Artificial Sequence
  Synthetic
aaaaaaaaaaaaaaaugc

SEQ ID NO: 280379 - RNA, 19 nt, Artificial Sequence
  Synthetic
caaaaaaaaaaaaaaaugc

SEQ ID NO: 280380 - RNA, 20 nt, Artificial Sequence
  Synthetic
gcaaaaaaaaaaaaaaaugc

SEQ ID NO: 280381 - RNA, 21 nt, Artificial Sequence
  Synthetic
ugcaaaaaaaaaaaaaaaugc

SEQ ID NO: 280382 - RNA, 22 nt, Artificial Sequence
  Synthetic
uugcaaaaaaaaaaaaaaaugc

SEQ ID NO: 280383 - RNA, 23 nt, Artificial Sequence
  Synthetic
uuugcaaaaaaaaaaaaaaaugc

SEQ ID NO: 280384 - RNA, 24 nt, Artificial Sequence
  Synthetic
cuuugcaaaaaaaaaaaaaaaugc

SEQ ID NO: 280385 - RNA, 18 nt, Artificial Sequence
  Synthetic
caugucagucaaaaaugc

SEQ ID NO: 280386 - RNA, 19 nt, Artificial Sequence
  Synthetic
ccaugucagucaaaaaugc

SEQ ID NO: 280387 - RNA, 20 nt, Artificial Sequence
  Synthetic
accaugucagucaaaaaugc

SEQ ID NO: 280388 - RNA, 21 nt, Artificial Sequence
  Synthetic
caccaugucagucaaaaaugc

SEQ ID NO: 280389 - RNA, 22 nt, Artificial Sequence
  Synthetic
ucaccaugucagucaaaaaugc

SEQ ID NO: 280390 - RNA, 23 nt, Artificial Sequence
  Synthetic
uucaccaugucagucaaaaaugc

SEQ ID NO: 280391 - RNA, 24 nt, Artificial Sequence
  Synthetic
guucaccaugucagucaaaaaugc

SEQ ID NO: 280392 - RNA, 18 nt, Artificial Sequence
  Synthetic
auauuagaagaaaaaugc

SEQ ID NO: 280393 - RNA, 19 nt, Artificial Sequence
  Synthetic
aauauuagaagaaaaaugc

SEQ ID NO: 280394 - RNA, 20 nt, Artificial Sequence
  Synthetic
aaauauuagaagaaaaaugc

SEQ ID NO: 280395 - RNA, 21 nt, Artificial Sequence
  Synthetic
gaaauauuagaagaaaaaugc

SEQ ID NO: 280396 - RNA, 22 nt, Artificial Sequence
  Synthetic
ugaaauauuagaagaaaaaugc

SEQ ID NO: 280397 - RNA, 23 nt, Artificial Sequence
  Synthetic
augaaauauuagaagaaaaaugc

SEQ ID NO: 280398 - RNA, 24 nt, Artificial Sequence
  Synthetic
uaugaaauauuagaagaaaaaugc

SEQ ID NO: 280399 - RNA, 18 nt, Artificial Sequence
  Synthetic
ugcuuuuaagaaaaaugc

SEQ ID NO: 280400 - RNA, 19 nt, Artificial Sequence
  Synthetic
gugcuuuuaagaaaaaugc

SEQ ID NO: 280401 - RNA, 20 nt, Artificial Sequence
  Synthetic
agugcuuuuaagaaaaaugc

SEQ ID NO: 280402 - RNA, 21 nt, Artificial Sequence
  Synthetic
gagugcuuuuaagaaaaaugc

SEQ ID NO: 280403 - RNA, 22 nt, Artificial Sequence
  Synthetic
ugagugcuuuuaagaaaaaugc

SEQ ID NO: 280404 - RNA, 23 nt, Artificial Sequence
  Synthetic
gugagugcuuuuaagaaaaaugc

SEQ ID NO: 280405 - RNA, 24 nt, Artificial Sequence
  Synthetic
agugagugcuuuuaagaaaaaugc

SEQ ID NO: 280406 - RNA, 18 nt, Artificial Sequence
  Synthetic
uccuccgaagcaaaaugc

SEQ ID NO: 280407 - RNA, 19 nt, Artificial Sequence
  Synthetic
uuccuccgaagcaaaaugc

SEQ ID NO: 280408 - RNA, 20 nt, Artificial Sequence
  Synthetic
uuuccuccgaagcaaaaugc

SEQ ID NO: 280409 - RNA, 21 nt, Artificial Sequence
  Synthetic
auuuccuccgaagcaaaaugc

SEQ ID NO: 280410 - RNA, 22 nt, Artificial Sequence
  Synthetic
gauuuccuccgaagcaaaaugc

SEQ ID NO: 280411 - RNA, 23 nt, Artificial Sequence
  Synthetic
ugauuuccuccgaagcaaaaugc

SEQ ID NO: 280412 - RNA, 24 nt, Artificial Sequence
  Synthetic
augauuuccuccgaagcaaaaugc

SEQ ID NO: 280413 - RNA, 18 nt, Artificial Sequence
  Synthetic
accguauuucuaaaaugc

SEQ ID NO: 280414 - RNA, 19 nt, Artificial Sequence
  Synthetic
gaccguauuucuaaaaugc

SEQ ID NO: 280415 - RNA, 20 nt, Artificial Sequence
  Synthetic
ugaccguauuucuaaaaugc

SEQ ID NO: 280416 - RNA, 21 nt, Artificial Sequence
  Synthetic
uugaccguauuucuaaaaugc

SEQ ID NO: 280417 - RNA, 22 nt, Artificial Sequence
  Synthetic
uuugaccguauuucuaaaaugc

SEQ ID NO: 280418 - RNA, 23 nt, Artificial Sequence
  Synthetic
cuuugaccguauuucuaaaaugc

SEQ ID NO: 280419 - RNA, 24 nt, Artificial Sequence
  Synthetic
acuuugaccguauuucuaaaaugc

SEQ ID NO: 280420 - RNA, 18 nt, Artificial Sequence
  Synthetic
uuaccuccuuuaaaaugc

SEQ ID NO: 280421 - RNA, 19 nt, Artificial Sequence
  Synthetic
guuaccuccuuuaaaaugc

SEQ ID NO: 280422 - RNA, 20 nt, Artificial Sequence
  Synthetic
aguuaccuccuuuaaaaugc

SEQ ID NO: 280423 - RNA, 21 nt, Artificial Sequence
  Synthetic
uaguuaccuccuuuaaaaugc

SEQ ID NO: 280424 - RNA, 22 nt, Artificial Sequence
  Synthetic
uuaguuaccuccuuuaaaaugc

SEQ ID NO: 280425 - RNA, 23 nt, Artificial Sequence
  Synthetic
uuuaguuaccuccuuuaaaaugc

SEQ ID NO: 280426 - RNA, 24 nt, Artificial Sequence
  Synthetic
guuuaguuaccuccuuuaaaaugc

SEQ ID NO: 280427 - RNA, 18 nt, Artificial Sequence
  Synthetic
ucaccagacaccaaaugc

SEQ ID NO: 280428 - RNA, 19 nt, Artificial Sequence
  Synthetic
cucaccagacaccaaaugc

SEQ ID NO: 280429 - RNA, 20 nt, Artificial Sequence
  Synthetic
ccucaccagacaccaaaugc

SEQ ID NO: 280430 - RNA, 21 nt, Artificial Sequence
  Synthetic
cccucaccagacaccaaaugc

SEQ ID NO: 280431 - RNA, 22 nt, Artificial Sequence
  Synthetic
gcccucaccagacaccaaaugc

SEQ ID NO: 280432 - RNA, 23 nt, Artificial Sequence
  Synthetic
ggcccucaccagacaccaaaugc

SEQ ID NO: 280433 - RNA, 24 nt, Artificial Sequence
  Synthetic
aggcccucaccagacaccaaaugc

SEQ ID NO: 280434 - RNA, 18 nt, Artificial Sequence
  Synthetic
gaaaauaugggcaaaugc

SEQ ID NO: 280435 - RNA, 19 nt, Artificial Sequence
  Synthetic
ugaaaauaugggcaaaugc

SEQ ID NO: 280436 - RNA, 20 nt, Artificial Sequence
  Synthetic
uugaaaauaugggcaaaugc

SEQ ID NO: 280437 - RNA, 21 nt, Artificial Sequence
  Synthetic
auugaaaauaugggcaaaugc

SEQ ID NO: 280438 - RNA, 22 nt, Artificial Sequence
  Synthetic
aauugaaaauaugggcaaaugc

SEQ ID NO: 280439 - RNA, 23 nt, Artificial Sequence
  Synthetic
gaauugaaaauaugggcaaaugc

SEQ ID NO: 280440 - RNA, 24 nt, Artificial Sequence
  Synthetic
agaauugaaaauaugggcaaaugc

SEQ ID NO: 280441 - RNA, 18 nt, Artificial Sequence
  Synthetic
acuaaacucugcaaaugc

SEQ ID NO: 280442 - RNA, 19 nt, Artificial Sequence
  Synthetic
aacuaaacucugcaaaugc

SEQ ID NO: 280443 - RNA, 20 nt, Artificial Sequence
  Synthetic
aaacuaaacucugcaaaugc

SEQ ID NO: 280444 - RNA, 21 nt, Artificial Sequence
  Synthetic
gaaacuaaacucugcaaaugc

SEQ ID NO: 280445 - RNA, 22 nt, Artificial Sequence
  Synthetic
ugaaacuaaacucugcaaaugc

SEQ ID NO: 280446 - RNA, 23 nt, Artificial Sequence
  Synthetic
uugaaacuaaacucugcaaaugc

SEQ ID NO: 280447 - RNA, 24 nt, Artificial Sequence
  Synthetic
cuugaaacuaaacucugcaaaugc

SEQ ID NO: 280448 - RNA, 18 nt, Artificial Sequence
  Synthetic
cccccucacuucaaaugc

SEQ ID NO: 280449 - RNA, 19 nt, Artificial Sequence
  Synthetic
acccccucacuucaaaugc

SEQ ID NO: 280450 - RNA, 20 nt, Artificial Sequence
  Synthetic
cacccccucacuucaaaugc

SEQ ID NO: 280451 - RNA, 21 nt, Artificial Sequence
  Synthetic
ucacccccucacuucaaaugc

SEQ ID NO: 280452 - RNA, 22 nt, Artificial Sequence
  Synthetic
cucacccccucacuucaaaugc

SEQ ID NO: 280453 - RNA, 23 nt, Artificial Sequence
  Synthetic
ccucacccccucacuucaaaugc

SEQ ID NO: 280454 - RNA, 24 nt, Artificial Sequence
  Synthetic
uccucacccccucacuucaaaugc

SEQ ID NO: 280455 - RNA, 18 nt, Artificial Sequence
  Synthetic
aacacaaaggagaaaugc

SEQ ID NO: 280456 - RNA, 19 nt, Artificial Sequence
  Synthetic
uaacacaaaggagaaaugc

SEQ ID NO: 280457 - RNA, 20 nt, Artificial Sequence
  Synthetic
guaacacaaaggagaaaugc

SEQ ID NO: 280458 - RNA, 21 nt, Artificial Sequence
  Synthetic
uguaacacaaaggagaaaugc

SEQ ID NO: 280459 - RNA, 22 nt, Artificial Sequence
  Synthetic
uuguaacacaaaggagaaaugc

SEQ ID NO: 280460 - RNA, 23 nt, Artificial Sequence
  Synthetic
uuuguaacacaaaggagaaaugc

SEQ ID NO: 280461 - RNA, 24 nt, Artificial Sequence
  Synthetic
guuuguaacacaaaggagaaaugc

SEQ ID NO: 280462 - RNA, 18 nt, Artificial Sequence
  Synthetic
auaucugcugagaaaugc

SEQ ID NO: 280463 - RNA, 19 nt, Artificial Sequence
  Synthetic
uauaucugcugagaaaugc

SEQ ID NO: 280464 - RNA, 20 nt, Artificial Sequence
  Synthetic
auauaucugcugagaaaugc

SEQ ID NO: 280465 - RNA, 21 nt, Artificial Sequence
  Synthetic
gauauaucugcugagaaaugc

SEQ ID NO: 280466 - RNA, 22 nt, Artificial Sequence
  Synthetic
ugauauaucugcugagaaaugc

SEQ ID NO: 280467 - RNA, 23 nt, Artificial Sequence
  Synthetic
augauauaucugcugagaaaugc

SEQ ID NO: 280468 - RNA, 24 nt, Artificial Sequence
  Synthetic
gaugauauaucugcugagaaaugc

SEQ ID NO: 280469 - RNA, 18 nt, Artificial Sequence
  Synthetic
ccauugugugagaaaugc

SEQ ID NO: 280470 - RNA, 19 nt, Artificial Sequence
  Synthetic
accauugugugagaaaugc

SEQ ID NO: 280471 - RNA, 20 nt, Artificial Sequence
  Synthetic
aaccauugugugagaaaugc

SEQ ID NO: 280472 - RNA, 21 nt, Artificial Sequence
  Synthetic
uaaccauugugugagaaaugc

SEQ ID NO: 280473 - RNA, 22 nt, Artificial Sequence
  Synthetic
auaaccauugugugagaaaugc

SEQ ID NO: 280474 - RNA, 23 nt, Artificial Sequence
  Synthetic
aauaaccauugugugagaaaugc

SEQ ID NO: 280475 - RNA, 24 nt, Artificial Sequence
  Synthetic
caauaaccauugugugagaaaugc

SEQ ID NO: 280476 - RNA, 18 nt, Artificial Sequence
  Synthetic
auauccaaguggaaaugc

SEQ ID NO: 280477 - RNA, 19 nt, Artificial Sequence
  Synthetic
gauauccaaguggaaaugc

SEQ ID NO: 280478 - RNA, 20 nt, Artificial Sequence
  Synthetic
agauauccaaguggaaaugc

SEQ ID NO: 280479 - RNA, 21 nt, Artificial Sequence
  Synthetic
uagauauccaaguggaaaugc

SEQ ID NO: 280480 - RNA, 22 nt, Artificial Sequence
  Synthetic
uuagauauccaaguggaaaugc

SEQ ID NO: 280481 - RNA, 23 nt, Artificial Sequence
  Synthetic
auuagauauccaaguggaaaugc

SEQ ID NO: 280482 - RNA, 24 nt, Artificial Sequence
  Synthetic
cauuagauauccaaguggaaaugc

SEQ ID NO: 280483 - RNA, 18 nt, Artificial Sequence
  Synthetic
ccauuucuauugaaaugc

SEQ ID NO: 280484 - RNA, 19 nt, Artificial Sequence
  Synthetic
accauuucuauugaaaugc

SEQ ID NO: 280485 - RNA, 20 nt, Artificial Sequence
  Synthetic
uaccauuucuauugaaaugc

SEQ ID NO: 280486 - RNA, 21 nt, Artificial Sequence
  Synthetic
cuaccauuucuauugaaaugc

SEQ ID NO: 280487 - RNA, 22 nt, Artificial Sequence
  Synthetic
ccuaccauuucuauugaaaugc

SEQ ID NO: 280488 - RNA, 23 nt, Artificial Sequence
  Synthetic
uccuaccauuucuauugaaaugc

SEQ ID NO: 280489 - RNA, 24 nt, Artificial Sequence
  Synthetic
auccuaccauuucuauugaaaugc

SEQ ID NO: 280490 - RNA, 18 nt, Artificial Sequence
  Synthetic
aaugaaaugaaacaaugc

SEQ ID NO: 280491 - RNA, 19 nt, Artificial Sequence
  Synthetic
aaaugaaaugaaacaaugc

SEQ ID NO: 280492 - RNA, 20 nt, Artificial Sequence
  Synthetic
gaaaugaaaugaaacaaugc

SEQ ID NO: 280493 - RNA, 21 nt, Artificial Sequence
  Synthetic
cgaaaugaaaugaaacaaugc

SEQ ID NO: 280494 - RNA, 22 nt, Artificial Sequence
  Synthetic
ucgaaaugaaaugaaacaaugc

SEQ ID NO: 280495 - RNA, 23 nt, Artificial Sequence
  Synthetic
gucgaaaugaaaugaaacaaugc

SEQ ID NO: 280496 - RNA, 24 nt, Artificial Sequence
  Synthetic
agucgaaaugaaaugaaacaaugc

SEQ ID NO: 280497 - RNA, 18 nt, Artificial Sequence
  Synthetic
cguguucuaacccaaugc

SEQ ID NO: 280498 - RNA, 19 nt, Artificial Sequence
  Synthetic
gcguguucuaacccaaugc

SEQ ID NO: 280499 - RNA, 20 nt, Artificial Sequence
  Synthetic
agcguguucuaacccaaugc

SEQ ID NO: 280500 - RNA, 21 nt, Artificial Sequence
  Synthetic
gagcguguucuaacccaaugc

SEQ ID NO: 280501 - RNA, 22 nt, Artificial Sequence
  Synthetic
ggagcguguucuaacccaaugc

SEQ ID NO: 280502 - RNA, 23 nt, Artificial Sequence
  Synthetic
aggagcguguucuaacccaaugc

SEQ ID NO: 280503 - RNA, 24 nt, Artificial Sequence
  Synthetic
aaggagcguguucuaacccaaugc

SEQ ID NO: 280504 - RNA, 18 nt, Artificial Sequence
  Synthetic
auuucuuuauagcaaugc

SEQ ID NO: 280505 - RNA, 19 nt, Artificial Sequence
  Synthetic
uauuucuuuauagcaaugc

SEQ ID NO: 280506 - RNA, 20 nt, Artificial Sequence
  Synthetic
guauuucuuuauagcaaugc

SEQ ID NO: 280507 - RNA, 18 nt, Artificial Sequence
  Synthetic
guuaugcaggcucaaugc

SEQ ID NO: 280508 - RNA, 19 nt, Artificial Sequence
  Synthetic
cguuaugcaggcucaaugc

SEQ ID NO: 280509 - RNA, 20 nt, Artificial Sequence
  Synthetic
gcguuaugcaggcucaaugc

SEQ ID NO: 280510 - RNA, 21 nt, Artificial Sequence
  Synthetic
ugcguuaugcaggcucaaugc

SEQ ID NO: 280511 - RNA, 22 nt, Artificial Sequence
  Synthetic
cugcguuaugcaggcucaaugc

SEQ ID NO: 280512 - RNA, 23 nt, Artificial Sequence
  Synthetic
gcugcguuaugcaggcucaaugc

SEQ ID NO: 280513 - RNA, 24 nt, Artificial Sequence
  Synthetic
ugcugcguuaugcaggcucaaugc

SEQ ID NO: 280514 - RNA, 18 nt, Artificial Sequence
  Synthetic
gcucagcaugaagaaugc

SEQ ID NO: 280515 - RNA, 19 nt, Artificial Sequence
  Synthetic
agcucagcaugaagaaugc

SEQ ID NO: 280516 - RNA, 20 nt, Artificial Sequence
  Synthetic
uagcucagcaugaagaaugc

SEQ ID NO: 280517 - RNA, 21 nt, Artificial Sequence
  Synthetic
cuagcucagcaugaagaaugc

SEQ ID NO: 280518 - RNA, 22 nt, Artificial Sequence
  Synthetic
acuagcucagcaugaagaaugc

SEQ ID NO: 280519 - RNA, 23 nt, Artificial Sequence
  Synthetic
gacuagcucagcaugaagaaugc

SEQ ID NO: 280520 - RNA, 24 nt, Artificial Sequence
  Synthetic
ugacuagcucagcaugaagaaugc

SEQ ID NO: 280521 - RNA, 18 nt, Artificial Sequence
  Synthetic
ugagaagaugaagaaugc

SEQ ID NO: 280522 - RNA, 19 nt, Artificial Sequence
  Synthetic
uugagaagaugaagaaugc

SEQ ID NO: 280523 - RNA, 20 nt, Artificial Sequence
  Synthetic
guugagaagaugaagaaugc

SEQ ID NO: 280524 - RNA, 21 nt, Artificial Sequence
  Synthetic
uguugagaagaugaagaaugc

SEQ ID NO: 280525 - RNA, 22 nt, Artificial Sequence
  Synthetic
guguugagaagaugaagaaugc

SEQ ID NO: 280526 - RNA, 23 nt, Artificial Sequence
  Synthetic
aguguugagaagaugaagaaugc

SEQ ID NO: 280527 - RNA, 24 nt, Artificial Sequence
  Synthetic
aaguguugagaagaugaagaaugc

SEQ ID NO: 280528 - RNA, 18 nt, Artificial Sequence
  Synthetic
uauucuacuaucgaaugc

SEQ ID NO: 280529 - RNA, 19 nt, Artificial Sequence
  Synthetic
auauucuacuaucgaaugc

SEQ ID NO: 280530 - RNA, 20 nt, Artificial Sequence
  Synthetic
aauauucuacuaucgaaugc

SEQ ID NO: 280531 - RNA, 21 nt, Artificial Sequence
  Synthetic
aaauauucuacuaucgaaugc

SEQ ID NO: 280532 - RNA, 22 nt, Artificial Sequence
  Synthetic
aaaauauucuacuaucgaaugc

SEQ ID NO: 280533 - RNA, 23 nt, Artificial Sequence
  Synthetic
aaaaauauucuacuaucgaaugc

SEQ ID NO: 280534 - RNA, 24 nt, Artificial Sequence
  Synthetic
aaaaaauauucuacuaucgaaugc

SEQ ID NO: 280535 - RNA, 18 nt, Artificial Sequence
  Synthetic
guugcuauaaaggaaugc

SEQ ID NO: 280536 - RNA, 19 nt, Artificial Sequence
  Synthetic
uguugcuauaaaggaaugc

SEQ ID NO: 280537 - RNA, 20 nt, Artificial Sequence
  Synthetic
auguugcuauaaaggaaugc

SEQ ID NO: 280538 - RNA, 21 nt, Artificial Sequence
  Synthetic
uauguugcuauaaaggaaugc

SEQ ID NO: 280539 - RNA, 22 nt, Artificial Sequence
  Synthetic
guauguugcuauaaaggaaugc

SEQ ID NO: 280540 - RNA, 23 nt, Artificial Sequence
  Synthetic
uguauguugcuauaaaggaaugc

SEQ ID NO: 280541 - RNA, 24 nt, Artificial Sequence
  Synthetic
auguauguugcuauaaaggaaugc

SEQ ID NO: 280542 - RNA, 18 nt, Artificial Sequence
  Synthetic
caaguaucucaggaaugc

SEQ ID NO: 280543 - RNA, 19 nt, Artificial Sequence
  Synthetic
gcaaguaucucaggaaugc

SEQ ID NO: 280544 - RNA, 20 nt, Artificial Sequence
  Synthetic
cgcaaguaucucaggaaugc

SEQ ID NO: 280545 - RNA, 21 nt, Artificial Sequence
  Synthetic
ucgcaaguaucucaggaaugc

SEQ ID NO: 280546 - RNA, 22 nt, Artificial Sequence
  Synthetic
aucgcaaguaucucaggaaugc

SEQ ID NO: 280547 - RNA, 23 nt, Artificial Sequence
  Synthetic
aaucgcaaguaucucaggaaugc

SEQ ID NO: 280548 - RNA, 24 nt, Artificial Sequence
  Synthetic
uaaucgcaaguaucucaggaaugc

SEQ ID NO: 280549 - RNA, 18 nt, Artificial Sequence
  Synthetic
uaauuuucuaaugaaugc

SEQ ID NO: 280550 - RNA, 19 nt, Artificial Sequence
  Synthetic
uuaauuuucuaaugaaugc

SEQ ID NO: 280551 - RNA, 20 nt, Artificial Sequence
  Synthetic
uuuaauuuucuaaugaaugc

SEQ ID NO: 280552 - RNA, 21 nt, Artificial Sequence
  Synthetic
uuuuaauuuucuaaugaaugc

SEQ ID NO: 280553 - RNA, 22 nt, Artificial Sequence
  Synthetic
auuuuaauuuucuaaugaaugc

SEQ ID NO: 280554 - RNA, 23 nt, Artificial Sequence
  Synthetic
cauuuuaauuuucuaaugaaugc

SEQ ID NO: 280555 - RNA, 24 nt, Artificial Sequence
  Synthetic
ucauuuuaauuuucuaaugaaugc

SEQ ID NO: 280556 - RNA, 18 nt, Artificial Sequence
  Synthetic
uuauuuuaguaauaaugc

SEQ ID NO: 280557 - RNA, 19 nt, Artificial Sequence
  Synthetic
auuauuuuaguaauaaugc

SEQ ID NO: 280558 - RNA, 20 nt, Artificial Sequence
  Synthetic
aauuauuuuaguaauaaugc

SEQ ID NO: 280559 - RNA, 21 nt, Artificial Sequence
  Synthetic
uaauuauuuuaguaauaaugc

SEQ ID NO: 280560 - RNA, 22 nt, Artificial Sequence
  Synthetic
auaauuauuuuaguaauaaugc

SEQ ID NO: 280561 - RNA, 23 nt, Artificial Sequence
  Synthetic
aauaauuauuuuaguaauaaugc

SEQ ID NO: 280562 - RNA, 24 nt, Artificial Sequence
  Synthetic
aaauaauuauuuuaguaauaaugc

SEQ ID NO: 280563 - RNA, 18 nt, Artificial Sequence
  Synthetic
cuuaugagaaucuaaugc

SEQ ID NO: 280564 - RNA, 19 nt, Artificial Sequence
  Synthetic
ccuuaugagaaucuaaugc

SEQ ID NO: 280565 - RNA, 20 nt, Artificial Sequence
  Synthetic
uccuuaugagaaucuaaugc

SEQ ID NO: 280566 - RNA, 21 nt, Artificial Sequence
  Synthetic
cuccuuaugagaaucuaaugc

SEQ ID NO: 280567 - RNA, 22 nt, Artificial Sequence
  Synthetic
gcuccuuaugagaaucuaaugc

SEQ ID NO: 280568 - RNA, 23 nt, Artificial Sequence
  Synthetic
ugcuccuuaugagaaucuaaugc

SEQ ID NO: 280569 - RNA, 24 nt, Artificial Sequence
  Synthetic
gugcuccuuaugagaaucuaaugc

SEQ ID NO: 280570 - RNA, 18 nt, Artificial Sequence
  Synthetic
guugguagcaucuaaugc

SEQ ID NO: 280571 - RNA, 19 nt, Artificial Sequence
  Synthetic
uguugguagcaucuaaugc

SEQ ID NO: 280572 - RNA, 20 nt, Artificial Sequence
  Synthetic
auguugguagcaucuaaugc

SEQ ID NO: 280573 - RNA, 21 nt, Artificial Sequence
  Synthetic
aauguugguagcaucuaaugc

SEQ ID NO: 280574 - RNA, 22 nt, Artificial Sequence
  Synthetic
caauguugguagcaucuaaugc

SEQ ID NO: 280575 - RNA, 23 nt, Artificial Sequence
  Synthetic
acaauguugguagcaucuaaugc

SEQ ID NO: 280576 - RNA, 24 nt, Artificial Sequence
  Synthetic
aacaauguugguagcaucuaaugc

SEQ ID NO: 280577 - RNA, 18 nt, Artificial Sequence
  Synthetic
aaaagggaagaguaaugc

SEQ ID NO: 280578 - RNA, 19 nt, Artificial Sequence
  Synthetic
gaaaagggaagaguaaugc

SEQ ID NO: 280579 - RNA, 20 nt, Artificial Sequence
  Synthetic
agaaaagggaagaguaaugc

SEQ ID NO: 280580 - RNA, 21 nt, Artificial Sequence
  Synthetic
aagaaaagggaagaguaaugc

SEQ ID NO: 280581 - RNA, 22 nt, Artificial Sequence
  Synthetic
aaagaaaagggaagaguaaugc

SEQ ID NO: 280582 - RNA, 23 nt, Artificial Sequence
  Synthetic
uaaagaaaagggaagaguaaugc

SEQ ID NO: 280583 - RNA, 24 nt, Artificial Sequence
  Synthetic
auaaagaaaagggaagaguaaugc

SEQ ID NO: 280584 - RNA, 18 nt, Artificial Sequence
  Synthetic
uaaugcguaucguaaugc

SEQ ID NO: 280585 - RNA, 19 nt, Artificial Sequence
  Synthetic
uuaaugcguaucguaaugc

SEQ ID NO: 280586 - RNA, 20 nt, Artificial Sequence
  Synthetic
guuaaugcguaucguaaugc

SEQ ID NO: 280587 - RNA, 21 nt, Artificial Sequence
  Synthetic
uguuaaugcguaucguaaugc

SEQ ID NO: 280588 - RNA, 22 nt, Artificial Sequence
  Synthetic
auguuaaugcguaucguaaugc

SEQ ID NO: 280589 - RNA, 23 nt, Artificial Sequence
  Synthetic
aauguuaaugcguaucguaaugc

SEQ ID NO: 280590 - RNA, 24 nt, Artificial Sequence
  Synthetic
caauguuaaugcguaucguaaugc

SEQ ID NO: 280591 - RNA, 18 nt, Artificial Sequence
  Synthetic
gaacucuucuuguaaugc

SEQ ID NO: 280592 - RNA, 19 nt, Artificial Sequence
  Synthetic
ugaacucuucuuguaaugc

SEQ ID NO: 280593 - RNA, 20 nt, Artificial Sequence
  Synthetic
gugaacucuucuuguaaugc

SEQ ID NO: 280594 - RNA, 21 nt, Artificial Sequence
  Synthetic
agugaacucuucuuguaaugc

SEQ ID NO: 280595 - RNA, 22 nt, Artificial Sequence
  Synthetic
aagugaacucuucuuguaaugc

SEQ ID NO: 280596 - RNA, 23 nt, Artificial Sequence
  Synthetic
caagugaacucuucuuguaaugc

SEQ ID NO: 280597 - RNA, 24 nt, Artificial Sequence
  Synthetic
ccaagugaacucuucuuguaaugc

SEQ ID NO: 280598 - RNA, 18 nt, Artificial Sequence
  Synthetic
uccuaagugaauuaaugc

SEQ ID NO: 280599 - RNA, 19 nt, Artificial Sequence
  Synthetic
auccuaagugaauuaaugc

SEQ ID NO: 280600 - RNA, 20 nt, Artificial Sequence
  Synthetic
uauccuaagugaauuaaugc

SEQ ID NO: 280601 - RNA, 21 nt, Artificial Sequence
  Synthetic
uuauccuaagugaauuaaugc

SEQ ID NO: 280602 - RNA, 22 nt, Artificial Sequence
  Synthetic
auuauccuaagugaauuaaugc

SEQ ID NO: 280603 - RNA, 23 nt, Artificial Sequence
  Synthetic
cauuauccuaagugaauuaaugc

SEQ ID NO: 280604 - RNA, 24 nt, Artificial Sequence
  Synthetic
ucauuauccuaagugaauuaaugc

SEQ ID NO: 280605 - RNA, 18 nt, Artificial Sequence
  Synthetic
ugauuaagugauuaaugc

SEQ ID NO: 280606 - RNA, 19 nt, Artificial Sequence
  Synthetic
augauuaagugauuaaugc

SEQ ID NO: 280607 - RNA, 20 nt, Artificial Sequence
  Synthetic
gaugauuaagugauuaaugc

SEQ ID NO: 280608 - RNA, 21 nt, Artificial Sequence
  Synthetic
ugaugauuaagugauuaaugc

SEQ ID NO: 280609 - RNA, 22 nt, Artificial Sequence
  Synthetic
augaugauuaagugauuaaugc

SEQ ID NO: 280610 - RNA, 23 nt, Artificial Sequence
  Synthetic
uaugaugauuaagugauuaaugc

SEQ ID NO: 280611 - RNA, 24 nt, Artificial Sequence
  Synthetic
guaugaugauuaagugauuaaugc

SEQ ID NO: 280612 - RNA, 18 nt, Artificial Sequence
  Synthetic
guucuaacaguuuaaugc

SEQ ID NO: 280613 - RNA, 19 nt, Artificial Sequence
  Synthetic
aguucuaacaguuuaaugc

SEQ ID NO: 280614 - RNA, 20 nt, Artificial Sequence
  Synthetic
uaguucuaacaguuuaaugc

SEQ ID NO: 280615 - RNA, 21 nt, Artificial Sequence
  Synthetic
auaguucuaacaguuuaaugc

SEQ ID NO: 280616 - RNA, 22 nt, Artificial Sequence
  Synthetic
aauaguucuaacaguuuaaugc

SEQ ID NO: 280617 - RNA, 23 nt, Artificial Sequence
  Synthetic
uaauaguucuaacaguuuaaugc

SEQ ID NO: 280618 - RNA, 24 nt, Artificial Sequence
  Synthetic
uuaauaguucuaacaguuuaaugc

SEQ ID NO: 280619 - RNA, 18 nt, Artificial Sequence
  Synthetic
guagccaauuuuuaaugc

SEQ ID NO: 280620 - RNA, 19 nt, Artificial Sequence
  Synthetic
uguagccaauuuuuaaugc

SEQ ID NO: 280621 - RNA, 20 nt, Artificial Sequence
  Synthetic
uuguagccaauuuuuaaugc

SEQ ID NO: 280622 - RNA, 21 nt, Artificial Sequence
  Synthetic
auuguagccaauuuuuaaugc

SEQ ID NO: 280623 - RNA, 22 nt, Artificial Sequence
  Synthetic
aauuguagccaauuuuuaaugc

SEQ ID NO: 280624 - RNA, 23 nt, Artificial Sequence
  Synthetic
gaauuguagccaauuuuuaaugc

SEQ ID NO: 280625 - RNA, 24 nt, Artificial Sequence
  Synthetic
ugaauuguagccaauuuuuaaugc

SEQ ID NO: 280626 - RNA, 18 nt, Artificial Sequence
  Synthetic
gagggcucacucacaugc

SEQ ID NO: 280627 - RNA, 19 nt, Artificial Sequence
  Synthetic
agagggcucacucacaugc

SEQ ID NO: 280628 - RNA, 20 nt, Artificial Sequence
  Synthetic
aagagggcucacucacaugc

SEQ ID NO: 280629 - RNA, 21 nt, Artificial Sequence
  Synthetic
caagagggcucacucacaugc

SEQ ID NO: 280630 - RNA, 22 nt, Artificial Sequence
  Synthetic
ccaagagggcucacucacaugc

SEQ ID NO: 280631 - RNA, 23 nt, Artificial Sequence
  Synthetic
uccaagagggcucacucacaugc

SEQ ID NO: 280632 - RNA, 24 nt, Artificial Sequence
  Synthetic
uuccaagagggcucacucacaugc

SEQ ID NO: 280633 - RNA, 18 nt, Artificial Sequence
  Synthetic
aaggaaaugcagacaugc

SEQ ID NO: 280634 - RNA, 19 nt, Artificial Sequence
  Synthetic
aaaggaaaugcagacaugc

SEQ ID NO: 280635 - RNA, 20 nt, Artificial Sequence
  Synthetic
caaaggaaaugcagacaugc

SEQ ID NO: 280636 - RNA, 21 nt, Artificial Sequence
  Synthetic
gcaaaggaaaugcagacaugc

SEQ ID NO: 280637 - RNA, 22 nt, Artificial Sequence
  Synthetic
agcaaaggaaaugcagacaugc

SEQ ID NO: 280638 - RNA, 23 nt, Artificial Sequence
  Synthetic
cagcaaaggaaaugcagacaugc

SEQ ID NO: 280639 - RNA, 24 nt, Artificial Sequence
  Synthetic
ucagcaaaggaaaugcagacaugc

SEQ ID NO: 280640 - RNA, 18 nt, Artificial Sequence
  Synthetic
aagaguaaauggacaugc

SEQ ID NO: 280641 - RNA, 19 nt, Artificial Sequence
  Synthetic
gaagaguaaauggacaugc

SEQ ID NO: 280642 - RNA, 20 nt, Artificial Sequence
  Synthetic
ugaagaguaaauggacaugc

SEQ ID NO: 280643 - RNA, 21 nt, Artificial Sequence
  Synthetic
augaagaguaaauggacaugc

SEQ ID NO: 280644 - RNA, 22 nt, Artificial Sequence
  Synthetic
aaugaagaguaaauggacaugc

SEQ ID NO: 280645 - RNA, 23 nt, Artificial Sequence
  Synthetic
aaaugaagaguaaauggacaugc

SEQ ID NO: 280646 - RNA, 24 nt, Artificial Sequence
  Synthetic
caaaugaagaguaaauggacaugc

SEQ ID NO: 280647 - RNA, 18 nt, Artificial Sequence
  Synthetic
agugcugggauuacaugc

SEQ ID NO: 280648 - RNA, 19 nt, Artificial Sequence
  Synthetic
cagugcugggauuacaugc

SEQ ID NO: 280649 - RNA, 20 nt, Artificial Sequence
  Synthetic
acagugcugggauuacaugc

SEQ ID NO: 280650 - RNA, 21 nt, Artificial Sequence
  Synthetic
cacagugcugggauuacaugc

SEQ ID NO: 280651 - RNA, 22 nt, Artificial Sequence
  Synthetic
ccacagugcugggauuacaugc

SEQ ID NO: 280652 - RNA, 23 nt, Artificial Sequence
  Synthetic
cccacagugcugggauuacaugc

SEQ ID NO: 280653 - RNA, 24 nt, Artificial Sequence
  Synthetic
ucccacagugcugggauuacaugc

SEQ ID NO: 280654 - RNA, 18 nt, Artificial Sequence
  Synthetic
gaaaacuuacaaccaugc

SEQ ID NO: 280655 - RNA, 19 nt, Artificial Sequence
  Synthetic
ggaaaacuuacaaccaugc

SEQ ID NO: 280656 - RNA, 20 nt, Artificial Sequence
  Synthetic
gggaaaacuuacaaccaugc

SEQ ID NO: 280657 - RNA, 21 nt, Artificial Sequence
  Synthetic
agggaaaacuuacaaccaugc

SEQ ID NO: 280658 - RNA, 22 nt, Artificial Sequence
  Synthetic
cagggaaaacuuacaaccaugc

SEQ ID NO: 280659 - RNA, 23 nt, Artificial Sequence
  Synthetic
ucagggaaaacuuacaaccaugc

SEQ ID NO: 280660 - RNA, 24 nt, Artificial Sequence
  Synthetic
cucagggaaaacuuacaaccaugc

SEQ ID NO: 280661 - RNA, 18 nt, Artificial Sequence
  Synthetic
aagauaugagacccaugc

SEQ ID NO: 280662 - RNA, 19 nt, Artificial Sequence
  Synthetic
aaagauaugagacccaugc

SEQ ID NO: 280663 - RNA, 20 nt, Artificial Sequence
  Synthetic
gaaagauaugagacccaugc

SEQ ID NO: 280664 - RNA, 21 nt, Artificial Sequence
  Synthetic
ggaaagauaugagacccaugc

SEQ ID NO: 280665 - RNA, 22 nt, Artificial Sequence
  Synthetic
uggaaagauaugagacccaugc

SEQ ID NO: 280666 - RNA, 23 nt, Artificial Sequence
  Synthetic
uuggaaagauaugagacccaugc

SEQ ID NO: 280667 - RNA, 24 nt, Artificial Sequence
  Synthetic
auuggaaagauaugagacccaugc

SEQ ID NO: 280668 - RNA, 18 nt, Artificial Sequence
  Synthetic
cgccaugcaaagccaugc

SEQ ID NO: 280669 - RNA, 19 nt, Artificial Sequence
  Synthetic
acgccaugcaaagccaugc

SEQ ID NO: 280670 - RNA, 20 nt, Artificial Sequence
  Synthetic
uacgccaugcaaagccaugc

SEQ ID NO: 280671 - RNA, 21 nt, Artificial Sequence
  Synthetic
cuacgccaugcaaagccaugc

SEQ ID NO: 280672 - RNA, 22 nt, Artificial Sequence
  Synthetic
acuacgccaugcaaagccaugc

SEQ ID NO: 280673 - RNA, 23 nt, Artificial Sequence
  Synthetic
uacuacgccaugcaaagccaugc

SEQ ID NO: 280674 - RNA, 24 nt, Artificial Sequence
  Synthetic
auacuacgccaugcaaagccaugc

SEQ ID NO: 280675 - RNA, 18 nt, Artificial Sequence
  Synthetic
aacugggaucugccaugc

SEQ ID NO: 280676 - RNA, 19 nt, Artificial Sequence
  Synthetic
gaacugggaucugccaugc

SEQ ID NO: 280677 - RNA, 20 nt, Artificial Sequence
  Synthetic
agaacugggaucugccaugc

SEQ ID NO: 280678 - RNA, 21 nt, Artificial Sequence
  Synthetic
cagaacugggaucugccaugc

SEQ ID NO: 280679 - RNA, 22 nt, Artificial Sequence
  Synthetic
ucagaacugggaucugccaugc

SEQ ID NO: 280680 - RNA, 23 nt, Artificial Sequence
  Synthetic
aucagaacugggaucugccaugc

SEQ ID NO: 280681 - RNA, 24 nt, Artificial Sequence
  Synthetic
gaucagaacugggaucugccaugc

SEQ ID NO: 280682 - RNA, 18 nt, Artificial Sequence
  Synthetic
cuauggagccauccaugc

SEQ ID NO: 280683 - RNA, 19 nt, Artificial Sequence
  Synthetic
acuauggagccauccaugc

SEQ ID NO: 280684 - RNA, 20 nt, Artificial Sequence
  Synthetic
aacuauggagccauccaugc

SEQ ID NO: 280685 - RNA, 21 nt, Artificial Sequence
  Synthetic
gaacuauggagccauccaugc

SEQ ID NO: 280686 - RNA, 22 nt, Artificial Sequence
  Synthetic
ugaacuauggagccauccaugc

SEQ ID NO: 280687 - RNA, 23 nt, Artificial Sequence
  Synthetic
cugaacuauggagccauccaugc

SEQ ID NO: 280688 - RNA, 24 nt, Artificial Sequence
  Synthetic
ccugaacuauggagccauccaugc

SEQ ID NO: 280689 - RNA, 18 nt, Artificial Sequence
  Synthetic
aaaaauuuaaaagcaugc

SEQ ID NO: 280690 - RNA, 19 nt, Artificial Sequence
  Synthetic
aaaaaauuuaaaagcaugc

SEQ ID NO: 280691 - RNA, 20 nt, Artificial Sequence
  Synthetic
aaaaaaauuuaaaagcaugc

SEQ ID NO: 280692 - RNA, 21 nt, Artificial Sequence
  Synthetic
aaaaaaaauuuaaaagcaugc

SEQ ID NO: 280693 - RNA, 22 nt, Artificial Sequence
  Synthetic
aaaaaaaaauuuaaaagcaugc

SEQ ID NO: 280694 - RNA, 23 nt, Artificial Sequence
  Synthetic
aaaaaaaaaauuuaaaagcaugc

SEQ ID NO: 280695 - RNA, 24 nt, Artificial Sequence
  Synthetic
gaaaaaaaaaauuuaaaagcaugc

SEQ ID NO: 280696 - RNA, 18 nt, Artificial Sequence
  Synthetic
cuggcuuugccagcaugc

SEQ ID NO: 280697 - RNA, 19 nt, Artificial Sequence
  Synthetic
acuggcuuugccagcaugc

SEQ ID NO: 280698 - RNA, 20 nt, Artificial Sequence
  Synthetic
gacuggcuuugccagcaugc

SEQ ID NO: 280699 - RNA, 21 nt, Artificial Sequence
  Synthetic
ugacuggcuuugccagcaugc

SEQ ID NO: 280700 - RNA, 22 nt, Artificial Sequence
  Synthetic
uugacuggcuuugccagcaugc

SEQ ID NO: 280701 - RNA, 23 nt, Artificial Sequence
  Synthetic
cuugacuggcuuugccagcaugc

SEQ ID NO: 280702 - RNA, 24 nt, Artificial Sequence
  Synthetic
gcuugacuggcuuugccagcaugc

SEQ ID NO: 280703 - RNA, 18 nt, Artificial Sequence
  Synthetic
cugcgugugcgagcaugc

SEQ ID NO: 280704 - RNA, 19 nt, Artificial Sequence
  Synthetic
acugcgugugcgagcaugc

SEQ ID NO: 280705 - RNA, 20 nt, Artificial Sequence
  Synthetic
aacugcgugugcgagcaugc

SEQ ID NO: 280706 - RNA, 21 nt, Artificial Sequence
  Synthetic
uaacugcgugugcgagcaugc

SEQ ID NO: 280707 - RNA, 22 nt, Artificial Sequence
  Synthetic
guaacugcgugugcgagcaugc

SEQ ID NO: 280708 - RNA, 23 nt, Artificial Sequence
  Synthetic
gguaacugcgugugcgagcaugc

SEQ ID NO: 280709 - RNA, 24 nt, Artificial Sequence
  Synthetic
ggguaacugcgugugcgagcaugc

SEQ ID NO: 280710 - RNA, 18 nt, Artificial Sequence
  Synthetic
ucuucagguggugcaugc

SEQ ID NO: 280711 - RNA, 19 nt, Artificial Sequence
  Synthetic
uucuucagguggugcaugc

SEQ ID NO: 280712 - RNA, 20 nt, Artificial Sequence
  Synthetic
guucuucagguggugcaugc

SEQ ID NO: 280713 - RNA, 21 nt, Artificial Sequence
  Synthetic
uguucuucagguggugcaugc

SEQ ID NO: 280714 - RNA, 22 nt, Artificial Sequence
  Synthetic
auguucuucagguggugcaugc

SEQ ID NO: 280715 - RNA, 23 nt, Artificial Sequence
  Synthetic
gauguucuucagguggugcaugc

SEQ ID NO: 280716 - RNA, 24 nt, Artificial Sequence
  Synthetic
agauguucuucagguggugcaugc

SEQ ID NO: 280717 - RNA, 18 nt, Artificial Sequence
  Synthetic
ggagcucugcuugcaugc

SEQ ID NO: 280718 - RNA, 19 nt, Artificial Sequence
  Synthetic
aggagcucugcuugcaugc

SEQ ID NO: 280719 - RNA, 20 nt, Artificial Sequence
  Synthetic
caggagcucugcuugcaugc

SEQ ID NO: 280720 - RNA, 21 nt, Artificial Sequence
  Synthetic
ccaggagcucugcuugcaugc

SEQ ID NO: 280721 - RNA, 22 nt, Artificial Sequence
  Synthetic
accaggagcucugcuugcaugc

SEQ ID NO: 280722 - RNA, 23 nt, Artificial Sequence
  Synthetic
aaccaggagcucugcuugcaugc

SEQ ID NO: 280723 - RNA, 24 nt, Artificial Sequence
  Synthetic
uaaccaggagcucugcuugcaugc

SEQ ID NO: 280724 - RNA, 18 nt, Artificial Sequence
  Synthetic
uuuaacagaagaucaugc

SEQ ID NO: 280725 - RNA, 19 nt, Artificial Sequence
  Synthetic
uuuuaacagaagaucaugc

SEQ ID NO: 280726 - RNA, 20 nt, Artificial Sequence
  Synthetic
guuuuaacagaagaucaugc

SEQ ID NO: 280727 - RNA, 21 nt, Artificial Sequence
  Synthetic
uguuuuaacagaagaucaugc

SEQ ID NO: 280728 - RNA, 22 nt, Artificial Sequence
  Synthetic
uuguuuuaacagaagaucaugc

SEQ ID NO: 280729 - RNA, 23 nt, Artificial Sequence
  Synthetic
cuuguuuuaacagaagaucaugc

SEQ ID NO: 280730 - RNA, 24 nt, Artificial Sequence
  Synthetic
ccuuguuuuaacagaagaucaugc

SEQ ID NO: 280731 - RNA, 18 nt, Artificial Sequence
  Synthetic
gucugauucagaucaugc

SEQ ID NO: 280732 - RNA, 19 nt, Artificial Sequence
  Synthetic
agucugauucagaucaugc

SEQ ID NO: 280733 - RNA, 20 nt, Artificial Sequence
  Synthetic
aagucugauucagaucaugc

SEQ ID NO: 280734 - RNA, 21 nt, Artificial Sequence
  Synthetic
caagucugauucagaucaugc

SEQ ID NO: 280735 - RNA, 22 nt, Artificial Sequence
  Synthetic
gcaagucugauucagaucaugc

SEQ ID NO: 280736 - RNA, 23 nt, Artificial Sequence
  Synthetic
agcaagucugauucagaucaugc

SEQ ID NO: 280737 - RNA, 24 nt, Artificial Sequence
  Synthetic
gagcaagucugauucagaucaugc

SEQ ID NO: 280738 - RNA, 18 nt, Artificial Sequence
  Synthetic
auugugaacuacucaugc

SEQ ID NO: 280739 - RNA, 19 nt, Artificial Sequence
  Synthetic
uauugugaacuacucaugc

SEQ ID NO: 280740 - RNA, 20 nt, Artificial Sequence
  Synthetic
cuauugugaacuacucaugc

SEQ ID NO: 280741 - RNA, 21 nt, Artificial Sequence
  Synthetic
ccuauugugaacuacucaugc

SEQ ID NO: 280742 - RNA, 22 nt, Artificial Sequence
  Synthetic
cccuauugugaacuacucaugc

SEQ ID NO: 280743 - RNA, 23 nt, Artificial Sequence
  Synthetic
acccuauugugaacuacucaugc

SEQ ID NO: 280744 - RNA, 24 nt, Artificial Sequence
  Synthetic
aacccuauugugaacuacucaugc

SEQ ID NO: 280745 - RNA, 18 nt, Artificial Sequence
  Synthetic
cugaaagaugucucaugc

SEQ ID NO: 280746 - RNA, 19 nt, Artificial Sequence
  Synthetic
ucugaaagaugucucaugc

SEQ ID NO: 280747 - RNA, 20 nt, Artificial Sequence
  Synthetic
aucugaaagaugucucaugc

SEQ ID NO: 280748 - RNA, 21 nt, Artificial Sequence
  Synthetic
gaucugaaagaugucucaugc

SEQ ID NO: 280749 - RNA, 22 nt, Artificial Sequence
  Synthetic
ugaucugaaagaugucucaugc

SEQ ID NO: 280750 - RNA, 23 nt, Artificial Sequence
  Synthetic
cugaucugaaagaugucucaugc

SEQ ID NO: 280751 - RNA, 24 nt, Artificial Sequence
  Synthetic
acugaucugaaagaugucucaugc

SEQ ID NO: 280752 - RNA, 18 nt, Artificial Sequence
  Synthetic
cugggcuuauucucaugc

SEQ ID NO: 280753 - RNA, 19 nt, Artificial Sequence
  Synthetic
ccugggcuuauucucaugc

SEQ ID NO: 280754 - RNA, 20 nt, Artificial Sequence
  Synthetic
uccugggcuuauucucaugc

SEQ ID NO: 280755 - RNA, 21 nt, Artificial Sequence
  Synthetic
cuccugggcuuauucucaugc

SEQ ID NO: 280756 - RNA, 22 nt, Artificial Sequence
  Synthetic
gcuccugggcuuauucucaugc

SEQ ID NO: 280757 - RNA, 23 nt, Artificial Sequence
  Synthetic
cgcuccugggcuuauucucaugc

SEQ ID NO: 280758 - RNA, 24 nt, Artificial Sequence
  Synthetic
gcgcuccugggcuuauucucaugc

SEQ ID NO: 280759 - RNA, 18 nt, Artificial Sequence
  Synthetic
guacuggcauauucaugc

SEQ ID NO: 280760 - RNA, 19 nt, Artificial Sequence
  Synthetic
gguacuggcauauucaugc

SEQ ID NO: 280761 - RNA, 20 nt, Artificial Sequence
  Synthetic
ugguacuggcauauucaugc

SEQ ID NO: 280762 - RNA, 21 nt, Artificial Sequence
  Synthetic
gugguacuggcauauucaugc

SEQ ID NO: 280763 - RNA, 22 nt, Artificial Sequence
  Synthetic
agugguacuggcauauucaugc

SEQ ID NO: 280764 - RNA, 23 nt, Artificial Sequence
  Synthetic
aagugguacuggcauauucaugc

SEQ ID NO: 280765 - RNA, 24 nt, Artificial Sequence
  Synthetic
uaagugguacuggcauauucaugc

SEQ ID NO: 280766 - RNA, 18 nt, Artificial Sequence
  Synthetic
caaauacaguuuucaugc

SEQ ID NO: 280767 - RNA, 19 nt, Artificial Sequence
  Synthetic
ccaaauacaguuuucaugc

SEQ ID NO: 280768 - RNA, 20 nt, Artificial Sequence
  Synthetic
accaaauacaguuuucaugc

SEQ ID NO: 280769 - RNA, 21 nt, Artificial Sequence
  Synthetic
gaccaaauacaguuuucaugc

SEQ ID NO: 280770 - RNA, 22 nt, Artificial Sequence
  Synthetic
ugaccaaauacaguuuucaugc

SEQ ID NO: 280771 - RNA, 23 nt, Artificial Sequence
  Synthetic
augaccaaauacaguuuucaugc

SEQ ID NO: 280772 - RNA, 24 nt, Artificial Sequence
  Synthetic
aaugaccaaauacaguuuucaugc

SEQ ID NO: 280773 - RNA, 18 nt, Artificial Sequence
  Synthetic
augauaauuuuuucaugc

SEQ ID NO: 280774 - RNA, 19 nt, Artificial Sequence
  Synthetic
caugauaauuuuuucaugc

SEQ ID NO: 280775 - RNA, 20 nt, Artificial Sequence
  Synthetic
ucaugauaauuuuuucaugc

SEQ ID NO: 280776 - RNA, 21 nt, Artificial Sequence
  Synthetic
cucaugauaauuuuuucaugc

SEQ ID NO: 280777 - RNA, 22 nt, Artificial Sequence
  Synthetic
ccucaugauaauuuuuucaugc

SEQ ID NO: 280778 - RNA, 23 nt, Artificial Sequence
  Synthetic
cccucaugauaauuuuuucaugc

SEQ ID NO: 280779 - RNA, 24 nt, Artificial Sequence
  Synthetic
ucccucaugauaauuuuuucaugc

SEQ ID NO: 280780 - RNA, 18 nt, Artificial Sequence
  Synthetic
uucuucuuaaaaagaugc

SEQ ID NO: 280781 - RNA, 19 nt, Artificial Sequence
  Synthetic
auucuucuuaaaaagaugc

SEQ ID NO: 280782 - RNA, 20 nt, Artificial Sequence
  Synthetic
uauucuucuuaaaaagaugc

SEQ ID NO: 280783 - RNA, 21 nt, Artificial Sequence
  Synthetic
auauucuucuuaaaaagaugc

SEQ ID NO: 280784 - RNA, 22 nt, Artificial Sequence
  Synthetic
uauauucuucuuaaaaagaugc

SEQ ID NO: 280785 - RNA, 23 nt, Artificial Sequence
  Synthetic
uuauauucuucuuaaaaagaugc

SEQ ID NO: 280786 - RNA, 24 nt, Artificial Sequence
  Synthetic
auuauauucuucuuaaaaagaugc

SEQ ID NO: 280787 - RNA, 18 nt, Artificial Sequence
  Synthetic
aggacaugugcaagaugc

SEQ ID NO: 280788 - RNA, 19 nt, Artificial Sequence
  Synthetic
caggacaugugcaagaugc

SEQ ID NO: 280789 - RNA, 20 nt, Artificial Sequence
  Synthetic
ccaggacaugugcaagaugc

SEQ ID NO: 280790 - RNA, 21 nt, Artificial Sequence
  Synthetic
uccaggacaugugcaagaugc

SEQ ID NO: 280791 - RNA, 22 nt, Artificial Sequence
  Synthetic
cuccaggacaugugcaagaugc

SEQ ID NO: 280792 - RNA, 23 nt, Artificial Sequence
  Synthetic
acuccaggacaugugcaagaugc

SEQ ID NO: 280793 - RNA, 24 nt, Artificial Sequence
  Synthetic
uacuccaggacaugugcaagaugc

SEQ ID NO: 280794 - RNA, 18 nt, Artificial Sequence
  Synthetic
ucaggaaacaacagaugc

SEQ ID NO: 280795 - RNA, 19 nt, Artificial Sequence
  Synthetic
gucaggaaacaacagaugc

SEQ ID NO: 280796 - RNA, 20 nt, Artificial Sequence
  Synthetic
agucaggaaacaacagaugc

SEQ ID NO: 280797 - RNA, 18 nt, Artificial Sequence
  Synthetic
ggggcacaggacagaugc

SEQ ID NO: 280798 - RNA, 19 nt, Artificial Sequence
  Synthetic
aggggcacaggacagaugc

SEQ ID NO: 280799 - RNA, 20 nt, Artificial Sequence
  Synthetic
aaggggcacaggacagaugc

SEQ ID NO: 280800 - RNA, 21 nt, Artificial Sequence
  Synthetic
aaaggggcacaggacagaugc

SEQ ID NO: 280801 - RNA, 22 nt, Artificial Sequence
  Synthetic
gaaaggggcacaggacagaugc

SEQ ID NO: 280802 - RNA, 23 nt, Artificial Sequence
  Synthetic
agaaaggggcacaggacagaugc

SEQ ID NO: 280803 - RNA, 24 nt, Artificial Sequence
  Synthetic
cagaaaggggcacaggacagaugc

SEQ ID NO: 280804 - RNA, 18 nt, Artificial Sequence
  Synthetic
cugacuuuucucagaugc

SEQ ID NO: 280805 - RNA, 19 nt, Artificial Sequence
  Synthetic
acugacuuuucucagaugc

SEQ ID NO: 280806 - RNA, 20 nt, Artificial Sequence
  Synthetic
aacugacuuuucucagaugc

SEQ ID NO: 280807 - RNA, 21 nt, Artificial Sequence
  Synthetic
caacugacuuuucucagaugc

SEQ ID NO: 280808 - RNA, 22 nt, Artificial Sequence
  Synthetic
ucaacugacuuuucucagaugc

SEQ ID NO: 280809 - RNA, 23 nt, Artificial Sequence
  Synthetic
cucaacugacuuuucucagaugc

SEQ ID NO: 280810 - RNA, 24 nt, Artificial Sequence
  Synthetic
ucucaacugacuuuucucagaugc

SEQ ID NO: 280811 - RNA, 18 nt, Artificial Sequence
  Synthetic
aaaaaguugucgagaugc

SEQ ID NO: 280812 - RNA, 19 nt, Artificial Sequence
  Synthetic
uaaaaaguugucgagaugc

SEQ ID NO: 280813 - RNA, 20 nt, Artificial Sequence
  Synthetic
guaaaaaguugucgagaugc

SEQ ID NO: 280814 - RNA, 21 nt, Artificial Sequence
  Synthetic
uguaaaaaguugucgagaugc

SEQ ID NO: 280815 - RNA, 22 nt, Artificial Sequence
  Synthetic
cuguaaaaaguugucgagaugc

SEQ ID NO: 280816 - RNA, 23 nt, Artificial Sequence
  Synthetic
ccuguaaaaaguugucgagaugc

SEQ ID NO: 280817 - RNA, 24 nt, Artificial Sequence
  Synthetic
cccuguaaaaaguugucgagaugc

SEQ ID NO: 280818 - RNA, 18 nt, Artificial Sequence
  Synthetic
auuuuugaaaauagaugc

SEQ ID NO: 280819 - RNA, 19 nt, Artificial Sequence
  Synthetic
cauuuuugaaaauagaugc

SEQ ID NO: 280820 - RNA, 20 nt, Artificial Sequence
  Synthetic
ucauuuuugaaaauagaugc

SEQ ID NO: 280821 - RNA, 21 nt, Artificial Sequence
  Synthetic
aucauuuuugaaaauagaugc

SEQ ID NO: 280822 - RNA, 22 nt, Artificial Sequence
  Synthetic
uaucauuuuugaaaauagaugc

SEQ ID NO: 280823 - RNA, 23 nt, Artificial Sequence
  Synthetic
auaucauuuuugaaaauagaugc

SEQ ID NO: 280824 - RNA, 24 nt, Artificial Sequence
  Synthetic
aauaucauuuuugaaaauagaugc

SEQ ID NO: 280825 - RNA, 18 nt, Artificial Sequence
  Synthetic
gccuguaguccuagaugc

SEQ ID NO: 280826 - RNA, 19 nt, Artificial Sequence
  Synthetic
agccuguaguccuagaugc

SEQ ID NO: 280827 - RNA, 20 nt, Artificial Sequence
  Synthetic
aagccuguaguccuagaugc

SEQ ID NO: 280828 - RNA, 21 nt, Artificial Sequence
  Synthetic
caagccuguaguccuagaugc

SEQ ID NO: 280829 - RNA, 22 nt, Artificial Sequence
  Synthetic
gcaagccuguaguccuagaugc

SEQ ID NO: 280830 - RNA, 23 nt, Artificial Sequence
  Synthetic
ugcaagccuguaguccuagaugc

SEQ ID NO: 280831 - RNA, 24 nt, Artificial Sequence
  Synthetic
augcaagccuguaguccuagaugc

SEQ ID NO: 280832 - RNA, 18 nt, Artificial Sequence
  Synthetic
ugacuguguucuagaugc

SEQ ID NO: 280833 - RNA, 19 nt, Artificial Sequence
  Synthetic
cugacuguguucuagaugc

SEQ ID NO: 280834 - RNA, 20 nt, Artificial Sequence
  Synthetic
gcugacuguguucuagaugc

SEQ ID NO: 280835 - RNA, 21 nt, Artificial Sequence
  Synthetic
ugcugacuguguucuagaugc

SEQ ID NO: 280836 - RNA, 22 nt, Artificial Sequence
  Synthetic
gugcugacuguguucuagaugc

SEQ ID NO: 280837 - RNA, 23 nt, Artificial Sequence
  Synthetic
agugcugacuguguucuagaugc

SEQ ID NO: 280838 - RNA, 24 nt, Artificial Sequence
  Synthetic
aagugcugacuguguucuagaugc

SEQ ID NO: 280839 - RNA, 18 nt, Artificial Sequence
  Synthetic
ugacaaaaguguagaugc

SEQ ID NO: 280840 - RNA, 19 nt, Artificial Sequence
  Synthetic
uugacaaaaguguagaugc

SEQ ID NO: 280841 - RNA, 20 nt, Artificial Sequence
  Synthetic
cuugacaaaaguguagaugc

SEQ ID NO: 280842 - RNA, 21 nt, Artificial Sequence
  Synthetic
ucuugacaaaaguguagaugc

SEQ ID NO: 280843 - RNA, 22 nt, Artificial Sequence
  Synthetic
cucuugacaaaaguguagaugc

SEQ ID NO: 280844 - RNA, 23 nt, Artificial Sequence
  Synthetic
ucucuugacaaaaguguagaugc

SEQ ID NO: 280845 - RNA, 24 nt, Artificial Sequence
  Synthetic
aucucuugacaaaaguguagaugc

SEQ ID NO: 280846 - RNA, 18 nt, Artificial Sequence
  Synthetic
aggugaaacauuagaugc

SEQ ID NO: 280847 - RNA, 19 nt, Artificial Sequence
  Synthetic
aaggugaaacauuagaugc

SEQ ID NO: 280848 - RNA, 20 nt, Artificial Sequence
  Synthetic
caaggugaaacauuagaugc

SEQ ID NO: 280849 - RNA, 21 nt, Artificial Sequence
  Synthetic
ucaaggugaaacauuagaugc

SEQ ID NO: 280850 - RNA, 22 nt, Artificial Sequence
  Synthetic
uucaaggugaaacauuagaugc

SEQ ID NO: 280851 - RNA, 23 nt, Artificial Sequence
  Synthetic
uuucaaggugaaacauuagaugc

SEQ ID NO: 280852 - RNA, 24 nt, Artificial Sequence
  Synthetic
uuuucaaggugaaacauuagaugc

SEQ ID NO: 280853 - RNA, 18 nt, Artificial Sequence
  Synthetic
uucuauuuacuuagaugc

SEQ ID NO: 280854 - RNA, 19 nt, Artificial Sequence
  Synthetic
uuucuauuuacuuagaugc

SEQ ID NO: 280855 - RNA, 20 nt, Artificial Sequence
  Synthetic
auuucuauuuacuuagaugc

SEQ ID NO: 280856 - RNA, 21 nt, Artificial Sequence
  Synthetic
cauuucuauuuacuuagaugc

SEQ ID NO: 280857 - RNA, 22 nt, Artificial Sequence
  Synthetic
gcauuucuauuuacuuagaugc

SEQ ID NO: 280858 - RNA, 23 nt, Artificial Sequence
  Synthetic
agcauuucuauuuacuuagaugc

SEQ ID NO: 280859 - RNA, 24 nt, Artificial Sequence
  Synthetic
cagcauuucuauuuacuuagaugc

SEQ ID NO: 280860 - RNA, 18 nt, Artificial Sequence
  Synthetic
uauuccugggggcgaugc

SEQ ID NO: 280861 - RNA, 19 nt, Artificial Sequence
  Synthetic
auauuccugggggcgaugc

SEQ ID NO: 280862 - RNA, 20 nt, Artificial Sequence
  Synthetic
cauauuccugggggcgaugc

SEQ ID NO: 280863 - RNA, 21 nt, Artificial Sequence
  Synthetic
ccauauuccugggggcgaugc

SEQ ID NO: 280864 - RNA, 22 nt, Artificial Sequence
  Synthetic
uccauauuccugggggcgaugc

SEQ ID NO: 280865 - RNA, 23 nt, Artificial Sequence
  Synthetic
auccauauuccugggggcgaugc

SEQ ID NO: 280866 - RNA, 24 nt, Artificial Sequence
  Synthetic
aauccauauuccugggggcgaugc

SEQ ID NO: 280867 - RNA, 18 nt, Artificial Sequence
  Synthetic
gggagagguugaggaugc

SEQ ID NO: 280868 - RNA, 19 nt, Artificial Sequence
  Synthetic
agggagagguugaggaugc

SEQ ID NO: 280869 - RNA, 20 nt, Artificial Sequence
  Synthetic
gagggagagguugaggaugc

SEQ ID NO: 280870 - RNA, 21 nt, Artificial Sequence
  Synthetic
agagggagagguugaggaugc

SEQ ID NO: 280871 - RNA, 22 nt, Artificial Sequence
  Synthetic
gagagggagagguugaggaugc

SEQ ID NO: 280872 - RNA, 23 nt, Artificial Sequence
  Synthetic
agagagggagagguugaggaugc

SEQ ID NO: 280873 - RNA, 24 nt, Artificial Sequence
  Synthetic
uagagagggagagguugaggaugc

SEQ ID NO: 280874 - RNA, 18 nt, Artificial Sequence
  Synthetic
uaagccuuugacggaugc

SEQ ID NO: 280875 - RNA, 19 nt, Artificial Sequence
  Synthetic
cuaagccuuugacggaugc

SEQ ID NO: 280876 - RNA, 20 nt, Artificial Sequence
  Synthetic
gcuaagccuuugacggaugc

SEQ ID NO: 280877 - RNA, 21 nt, Artificial Sequence
  Synthetic
agcuaagccuuugacggaugc

SEQ ID NO: 280878 - RNA, 22 nt, Artificial Sequence
  Synthetic
aagcuaagccuuugacggaugc

SEQ ID NO: 280879 - RNA, 23 nt, Artificial Sequence
  Synthetic
aaagcuaagccuuugacggaugc

SEQ ID NO: 280880 - RNA, 24 nt, Artificial Sequence
  Synthetic
gaaagcuaagccuuugacggaugc

SEQ ID NO: 280881 - RNA, 18 nt, Artificial Sequence
  Synthetic
gacggaugcacgggaugc

SEQ ID NO: 280882 - RNA, 19 nt, Artificial Sequence
  Synthetic
ugacggaugcacgggaugc

SEQ ID NO: 280883 - RNA, 20 nt, Artificial Sequence
  Synthetic
uugacggaugcacgggaugc

SEQ ID NO: 280884 - RNA, 21 nt, Artificial Sequence
  Synthetic
uuugacggaugcacgggaugc

SEQ ID NO: 280885 - RNA, 22 nt, Artificial Sequence
  Synthetic
cuuugacggaugcacgggaugc

SEQ ID NO: 280886 - RNA, 23 nt, Artificial Sequence
  Synthetic
ccuuugacggaugcacgggaugc

SEQ ID NO: 280887 - RNA, 24 nt, Artificial Sequence
  Synthetic
gccuuugacggaugcacgggaugc

SEQ ID NO: 280888 - RNA, 18 nt, Artificial Sequence
  Synthetic
aaauugucaaauggaugc

SEQ ID NO: 280889 - RNA, 19 nt, Artificial Sequence
  Synthetic
uaaauugucaaauggaugc

SEQ ID NO: 280890 - RNA, 20 nt, Artificial Sequence
  Synthetic
auaaauugucaaauggaugc

SEQ ID NO: 280891 - RNA, 21 nt, Artificial Sequence
  Synthetic
gauaaauugucaaauggaugc

SEQ ID NO: 280892 - RNA, 22 nt, Artificial Sequence
  Synthetic
cgauaaauugucaaauggaugc

SEQ ID NO: 280893 - RNA, 23 nt, Artificial Sequence
  Synthetic
ucgauaaauugucaaauggaugc

SEQ ID NO: 280894 - RNA, 24 nt, Artificial Sequence
  Synthetic
cucgauaaauugucaaauggaugc

SEQ ID NO: 280895 - RNA, 18 nt, Artificial Sequence
  Synthetic
gguaagcguguuggaugc

SEQ ID NO: 280896 - RNA, 19 nt, Artificial Sequence
  Synthetic
ugguaagcguguuggaugc

SEQ ID NO: 280897 - RNA, 20 nt, Artificial Sequence
  Synthetic
uugguaagcguguuggaugc

SEQ ID NO: 280898 - RNA, 21 nt, Artificial Sequence
  Synthetic
cuugguaagcguguuggaugc

SEQ ID NO: 280899 - RNA, 22 nt, Artificial Sequence
  Synthetic
ucuugguaagcguguuggaugc

SEQ ID NO: 280900 - RNA, 23 nt, Artificial Sequence
  Synthetic
cucuugguaagcguguuggaugc

SEQ ID NO: 280901 - RNA, 24 nt, Artificial Sequence
  Synthetic
acucuugguaagcguguuggaugc

SEQ ID NO: 280902 - RNA, 18 nt, Artificial Sequence
  Synthetic
ggacauuccagaugaugc

SEQ ID NO: 280903 - RNA, 19 nt, Artificial Sequence
  Synthetic
aggacauuccagaugaugc

SEQ ID NO: 280904 - RNA, 20 nt, Artificial Sequence
  Synthetic
gaggacauuccagaugaugc

SEQ ID NO: 280905 - RNA, 21 nt, Artificial Sequence
  Synthetic
ggaggacauuccagaugaugc

SEQ ID NO: 280906 - RNA, 22 nt, Artificial Sequence
  Synthetic
gggaggacauuccagaugaugc

SEQ ID NO: 280907 - RNA, 23 nt, Artificial Sequence
  Synthetic
agggaggacauuccagaugaugc

SEQ ID NO: 280908 - RNA, 24 nt, Artificial Sequence
  Synthetic
cagggaggacauuccagaugaugc

SEQ ID NO: 280909 - RNA, 18 nt, Artificial Sequence
  Synthetic
uccagguaacacugaugc

SEQ ID NO: 280910 - RNA, 19 nt, Artificial Sequence
  Synthetic
auccagguaacacugaugc

SEQ ID NO: 280911 - RNA, 20 nt, Artificial Sequence
  Synthetic
cauccagguaacacugaugc

SEQ ID NO: 280912 - RNA, 21 nt, Artificial Sequence
  Synthetic
acauccagguaacacugaugc

SEQ ID NO: 280913 - RNA, 22 nt, Artificial Sequence
  Synthetic
cacauccagguaacacugaugc

SEQ ID NO: 280914 - RNA, 23 nt, Artificial Sequence
  Synthetic
ucacauccagguaacacugaugc

SEQ ID NO: 280915 - RNA, 24 nt, Artificial Sequence
  Synthetic
cucacauccagguaacacugaugc

SEQ ID NO: 280916 - RNA, 18 nt, Artificial Sequence
  Synthetic
uucaagggcuacugaugc

SEQ ID NO: 280917 - RNA, 19 nt, Artificial Sequence
  Synthetic
cuucaagggcuacugaugc

SEQ ID NO: 280918 - RNA, 20 nt, Artificial Sequence
  Synthetic
ccuucaagggcuacugaugc

SEQ ID NO: 280919 - RNA, 21 nt, Artificial Sequence
  Synthetic
gccuucaagggcuacugaugc

SEQ ID NO: 280920 - RNA, 22 nt, Artificial Sequence
  Synthetic
ugccuucaagggcuacugaugc

SEQ ID NO: 280921 - RNA, 23 nt, Artificial Sequence
  Synthetic
augccuucaagggcuacugaugc

SEQ ID NO: 280922 - RNA, 24 nt, Artificial Sequence
  Synthetic
gaugccuucaagggcuacugaugc

SEQ ID NO: 280923 - RNA, 18 nt, Artificial Sequence
  Synthetic
ggguagauugccugaugc

SEQ ID NO: 280924 - RNA, 19 nt, Artificial Sequence
  Synthetic
gggguagauugccugaugc

SEQ ID NO: 280925 - RNA, 20 nt, Artificial Sequence
  Synthetic
ugggguagauugccugaugc

SEQ ID NO: 280926 - RNA, 21 nt, Artificial Sequence
  Synthetic
uugggguagauugccugaugc

SEQ ID NO: 280927 - RNA, 22 nt, Artificial Sequence
  Synthetic
guugggguagauugccugaugc

SEQ ID NO: 280928 - RNA, 23 nt, Artificial Sequence
  Synthetic
aguugggguagauugccugaugc

SEQ ID NO: 280929 - RNA, 24 nt, Artificial Sequence
  Synthetic
caguugggguagauugccugaugc

SEQ ID NO: 280930 - RNA, 18 nt, Artificial Sequence
  Synthetic
cacuugggaggcugaugc

SEQ ID NO: 280931 - RNA, 19 nt, Artificial Sequence
  Synthetic
ccacuugggaggcugaugc

SEQ ID NO: 280932 - RNA, 20 nt, Artificial Sequence
  Synthetic
gccacuugggaggcugaugc

SEQ ID NO: 280933 - RNA, 21 nt, Artificial Sequence
  Synthetic
agccacuugggaggcugaugc

SEQ ID NO: 280934 - RNA, 22 nt, Artificial Sequence
  Synthetic
cagccacuugggaggcugaugc

SEQ ID NO: 280935 - RNA, 23 nt, Artificial Sequence
  Synthetic
ccagccacuugggaggcugaugc

SEQ ID NO: 280936 - RNA, 24 nt, Artificial Sequence
  Synthetic
cccagccacuugggaggcugaugc

SEQ ID NO: 280937 - RNA, 18 nt, Artificial Sequence
  Synthetic
agucuucuauucugaugc

SEQ ID NO: 280938 - RNA, 19 nt, Artificial Sequence
  Synthetic
aagucuucuauucugaugc

SEQ ID NO: 280939 - RNA, 20 nt, Artificial Sequence
  Synthetic
uaagucuucuauucugaugc

SEQ ID NO: 280940 - RNA, 21 nt, Artificial Sequence
  Synthetic
guaagucuucuauucugaugc

SEQ ID NO: 280941 - RNA, 22 nt, Artificial Sequence
  Synthetic
uguaagucuucuauucugaugc

SEQ ID NO: 280942 - RNA, 23 nt, Artificial Sequence
  Synthetic
cuguaagucuucuauucugaugc

SEQ ID NO: 280943 - RNA, 24 nt, Artificial Sequence
  Synthetic
ucuguaagucuucuauucugaugc

SEQ ID NO: 280944 - RNA, 18 nt, Artificial Sequence
  Synthetic
cagaagucacagugaugc

SEQ ID NO: 280945 - RNA, 19 nt, Artificial Sequence
  Synthetic
ucagaagucacagugaugc

SEQ ID NO: 280946 - RNA, 20 nt, Artificial Sequence
  Synthetic
cucagaagucacagugaugc

SEQ ID NO: 280947 - RNA, 21 nt, Artificial Sequence
  Synthetic
ucucagaagucacagugaugc

SEQ ID NO: 280948 - RNA, 22 nt, Artificial Sequence
  Synthetic
cucucagaagucacagugaugc

SEQ ID NO: 280949 - RNA, 23 nt, Artificial Sequence
  Synthetic
ucucucagaagucacagugaugc

SEQ ID NO: 280950 - RNA, 24 nt, Artificial Sequence
  Synthetic
gucucucagaagucacagugaugc

SEQ ID NO: 280951 - RNA, 18 nt, Artificial Sequence
  Synthetic
agaauccagguuugaugc

SEQ ID NO: 280952 - RNA, 19 nt, Artificial Sequence
  Synthetic
aagaauccagguuugaugc

SEQ ID NO: 280953 - RNA, 20 nt, Artificial Sequence
  Synthetic
aaagaauccagguuugaugc

SEQ ID NO: 280954 - RNA, 21 nt, Artificial Sequence
  Synthetic
gaaagaauccagguuugaugc

SEQ ID NO: 280955 - RNA, 22 nt, Artificial Sequence
  Synthetic
ggaaagaauccagguuugaugc

SEQ ID NO: 280956 - RNA, 23 nt, Artificial Sequence
  Synthetic
aggaaagaauccagguuugaugc

SEQ ID NO: 280957 - RNA, 24 nt, Artificial Sequence
  Synthetic
uaggaaagaauccagguuugaugc

SEQ ID NO: 280958 - RNA, 18 nt, Artificial Sequence
  Synthetic
ucuuaguuccaaauaugc

SEQ ID NO: 280959 - RNA, 19 nt, Artificial Sequence
  Synthetic
aucuuaguuccaaauaugc

SEQ ID NO: 280960 - RNA, 20 nt, Artificial Sequence
  Synthetic
aaucuuaguuccaaauaugc

SEQ ID NO: 280961 - RNA, 21 nt, Artificial Sequence
  Synthetic
gaaucuuaguuccaaauaugc

SEQ ID NO: 280962 - RNA, 22 nt, Artificial Sequence
  Synthetic
ggaaucuuaguuccaaauaugc

SEQ ID NO: 280963 - RNA, 23 nt, Artificial Sequence
  Synthetic
uggaaucuuaguuccaaauaugc

SEQ ID NO: 280964 - RNA, 24 nt, Artificial Sequence
  Synthetic
cuggaaucuuaguuccaaauaugc

SEQ ID NO: 280965 - RNA, 18 nt, Artificial Sequence
  Synthetic
uuucaaacagaaauaugc

SEQ ID NO: 280966 - RNA, 19 nt, Artificial Sequence
  Synthetic
auuucaaacagaaauaugc

SEQ ID NO: 280967 - RNA, 20 nt, Artificial Sequence
  Synthetic
aauuucaaacagaaauaugc

SEQ ID NO: 280968 - RNA, 21 nt, Artificial Sequence
  Synthetic
gaauuucaaacagaaauaugc

SEQ ID NO: 280969 - RNA, 22 nt, Artificial Sequence
  Synthetic
ugaauuucaaacagaaauaugc

SEQ ID NO: 280970 - RNA, 23 nt, Artificial Sequence
  Synthetic
cugaauuucaaacagaaauaugc

SEQ ID NO: 280971 - RNA, 24 nt, Artificial Sequence
  Synthetic
acugaauuucaaacagaaauaugc

SEQ ID NO: 280972 - RNA, 18 nt, Artificial Sequence
  Synthetic
ugcauacaauaaauaugc

SEQ ID NO: 280973 - RNA, 19 nt, Artificial Sequence
  Synthetic
augcauacaauaaauaugc

SEQ ID NO: 280974 - RNA, 20 nt, Artificial Sequence
  Synthetic
caugcauacaauaaauaugc

SEQ ID NO: 280975 - RNA, 21 nt, Artificial Sequence
  Synthetic
ucaugcauacaauaaauaugc

SEQ ID NO: 280976 - RNA, 22 nt, Artificial Sequence
  Synthetic
uucaugcauacaauaaauaugc

SEQ ID NO: 280977 - RNA, 23 nt, Artificial Sequence
  Synthetic
uuucaugcauacaauaaauaugc

SEQ ID NO: 280978 - RNA, 24 nt, Artificial Sequence
  Synthetic
uuuucaugcauacaauaaauaugc

SEQ ID NO: 280979 - RNA, 18 nt, Artificial Sequence
  Synthetic
cuauuuauuugaauaugc

SEQ ID NO: 280980 - RNA, 19 nt, Artificial Sequence
  Synthetic
gcuauuuauuugaauaugc

SEQ ID NO: 280981 - RNA, 20 nt, Artificial Sequence
  Synthetic
agcuauuuauuugaauaugc

SEQ ID NO: 280982 - RNA, 21 nt, Artificial Sequence
  Synthetic
cagcuauuuauuugaauaugc

SEQ ID NO: 280983 - RNA, 22 nt, Artificial Sequence
  Synthetic
acagcuauuuauuugaauaugc

SEQ ID NO: 280984 - RNA, 23 nt, Artificial Sequence
  Synthetic
aacagcuauuuauuugaauaugc

SEQ ID NO: 280985 - RNA, 24 nt, Artificial Sequence
  Synthetic
aaacagcuauuuauuugaauaugc

SEQ ID NO: 280986 - RNA, 18 nt, Artificial Sequence
  Synthetic
gaauuaaagauaauaugc

SEQ ID NO: 280987 - RNA, 19 nt, Artificial Sequence
  Synthetic
ugaauuaaagauaauaugc

SEQ ID NO: 280988 - RNA, 20 nt, Artificial Sequence
  Synthetic
gugaauuaaagauaauaugc

SEQ ID NO: 280989 - RNA, 21 nt, Artificial Sequence
  Synthetic
ugugaauuaaagauaauaugc

SEQ ID NO: 280990 - RNA, 22 nt, Artificial Sequence
  Synthetic
gugugaauuaaagauaauaugc

SEQ ID NO: 280991 - RNA, 23 nt, Artificial Sequence
  Synthetic
ugugugaauuaaagauaauaugc

SEQ ID NO: 280992 - RNA, 24 nt, Artificial Sequence
  Synthetic
uugugugaauuaaagauaauaugc

SEQ ID NO: 280993 - RNA, 18 nt, Artificial Sequence
  Synthetic
uguuugggggucauaugc

SEQ ID NO: 280994 - RNA, 19 nt, Artificial Sequence
  Synthetic
guguuugggggucauaugc

SEQ ID NO: 280995 - RNA, 20 nt, Artificial Sequence
  Synthetic
uguguuugggggucauaugc

SEQ ID NO: 280996 - RNA, 21 nt, Artificial Sequence
  Synthetic
uuguguuugggggucauaugc

SEQ ID NO: 280997 - RNA, 22 nt, Artificial Sequence
  Synthetic
auuguguuugggggucauaugc

SEQ ID NO: 280998 - RNA, 23 nt, Artificial Sequence
  Synthetic
gauuguguuugggggucauaugc

SEQ ID NO: 280999 - RNA, 24 nt, Artificial Sequence
  Synthetic
ugauuguguuugggggucauaugc

SEQ ID NO: 281000 - RNA, 18 nt, Artificial Sequence
  Synthetic
gaccccugagagauaugc

SEQ ID NO: 281001 - RNA, 19 nt, Artificial Sequence
  Synthetic
ugaccccugagagauaugc

SEQ ID NO: 281002 - RNA, 20 nt, Artificial Sequence
  Synthetic
uugaccccugagagauaugc

SEQ ID NO: 281003 - RNA, 21 nt, Artificial Sequence
  Synthetic
uuugaccccugagagauaugc

SEQ ID NO: 281004 - RNA, 22 nt, Artificial Sequence
  Synthetic
guuugaccccugagagauaugc

SEQ ID NO: 281005 - RNA, 23 nt, Artificial Sequence
  Synthetic
uguuugaccccugagagauaugc

SEQ ID NO: 281006 - RNA, 24 nt, Artificial Sequence
  Synthetic
guguuugaccccugagagauaugc

SEQ ID NO: 281007 - RNA, 18 nt, Artificial Sequence
  Synthetic
gucuuucugaggauaugc

SEQ ID NO: 281008 - RNA, 19 nt, Artificial Sequence
  Synthetic
ggucuuucugaggauaugc

SEQ ID NO: 281009 - RNA, 20 nt, Artificial Sequence
  Synthetic
aggucuuucugaggauaugc

SEQ ID NO: 281010 - RNA, 21 nt, Artificial Sequence
  Synthetic
uaggucuuucugaggauaugc

SEQ ID NO: 281011 - RNA, 22 nt, Artificial Sequence
  Synthetic
guaggucuuucugaggauaugc

SEQ ID NO: 281012 - RNA, 23 nt, Artificial Sequence
  Synthetic
aguaggucuuucugaggauaugc

SEQ ID NO: 281013 - RNA, 24 nt, Artificial Sequence
  Synthetic
aaguaggucuuucugaggauaugc

SEQ ID NO: 281014 - RNA, 18 nt, Artificial Sequence
  Synthetic
ccaugucugaauauaugc

SEQ ID NO: 281015 - RNA, 19 nt, Artificial Sequence
  Synthetic
gccaugucugaauauaugc

SEQ ID NO: 281016 - RNA, 20 nt, Artificial Sequence
  Synthetic
ugccaugucugaauauaugc

SEQ ID NO: 281017 - RNA, 21 nt, Artificial Sequence
  Synthetic
augccaugucugaauauaugc

SEQ ID NO: 281018 - RNA, 22 nt, Artificial Sequence
  Synthetic
uaugccaugucugaauauaugc

SEQ ID NO: 281019 - RNA, 23 nt, Artificial Sequence
  Synthetic
uuaugccaugucugaauauaugc

SEQ ID NO: 281020 - RNA, 24 nt, Artificial Sequence
  Synthetic
cuuaugccaugucugaauauaugc

SEQ ID NO: 281021 - RNA, 18 nt, Artificial Sequence
  Synthetic
cuagcaguuucuauaugc

SEQ ID NO: 281022 - RNA, 19 nt, Artificial Sequence
  Synthetic
ucuagcaguuucuauaugc

SEQ ID NO: 281023 - RNA, 20 nt, Artificial Sequence
  Synthetic
aucuagcaguuucuauaugc

SEQ ID NO: 281024 - RNA, 21 nt, Artificial Sequence
  Synthetic
gaucuagcaguuucuauaugc

SEQ ID NO: 281025 - RNA, 22 nt, Artificial Sequence
  Synthetic
ggaucuagcaguuucuauaugc

SEQ ID NO: 281026 - RNA, 23 nt, Artificial Sequence
  Synthetic
aggaucuagcaguuucuauaugc

SEQ ID NO: 281027 - RNA, 24 nt, Artificial Sequence
  Synthetic
gaggaucuagcaguuucuauaugc

SEQ ID NO: 281028 - RNA, 18 nt, Artificial Sequence
  Synthetic
gauucauccaaacuaugc

SEQ ID NO: 281029 - RNA, 19 nt, Artificial Sequence
  Synthetic
agauucauccaaacuaugc

SEQ ID NO: 281030 - RNA, 20 nt, Artificial Sequence
  Synthetic
aagauucauccaaacuaugc

SEQ ID NO: 281031 - RNA, 21 nt, Artificial Sequence
  Synthetic
gaagauucauccaaacuaugc

SEQ ID NO: 281032 - RNA, 22 nt, Artificial Sequence
  Synthetic
ggaagauucauccaaacuaugc

SEQ ID NO: 281033 - RNA, 23 nt, Artificial Sequence
  Synthetic
aggaagauucauccaaacuaugc

SEQ ID NO: 281034 - RNA, 24 nt, Artificial Sequence
  Synthetic
gaggaagauucauccaaacuaugc

SEQ ID NO: 281035 - RNA, 18 nt, Artificial Sequence
  Synthetic
gugugaaugaaacuaugc

SEQ ID NO: 281036 - RNA, 19 nt, Artificial Sequence
  Synthetic
cgugugaaugaaacuaugc

SEQ ID NO: 281037 - RNA, 20 nt, Artificial Sequence
  Synthetic
acgugugaaugaaacuaugc

SEQ ID NO: 281038 - RNA, 21 nt, Artificial Sequence
  Synthetic
gacgugugaaugaaacuaugc

SEQ ID NO: 281039 - RNA, 22 nt, Artificial Sequence
  Synthetic
agacgugugaaugaaacuaugc

SEQ ID NO: 281040 - RNA, 23 nt, Artificial Sequence
  Synthetic
uagacgugugaaugaaacuaugc

SEQ ID NO: 281041 - RNA, 24 nt, Artificial Sequence
  Synthetic
auagacgugugaaugaaacuaugc

SEQ ID NO: 281042 - RNA, 18 nt, Artificial Sequence
  Synthetic
aguaagggcuaucuaugc

SEQ ID NO: 281043 - RNA, 19 nt, Artificial Sequence
  Synthetic
uaguaagggcuaucuaugc

SEQ ID NO: 281044 - RNA, 20 nt, Artificial Sequence
  Synthetic
guaguaagggcuaucuaugc

SEQ ID NO: 281045 - RNA, 21 nt, Artificial Sequence
  Synthetic
aguaguaagggcuaucuaugc

SEQ ID NO: 281046 - RNA, 22 nt, Artificial Sequence
  Synthetic
aaguaguaagggcuaucuaugc

SEQ ID NO: 281047 - RNA, 23 nt, Artificial Sequence
  Synthetic
gaaguaguaagggcuaucuaugc

SEQ ID NO: 281048 - RNA, 24 nt, Artificial Sequence
  Synthetic
ugaaguaguaagggcuaucuaugc

SEQ ID NO: 281049 - RNA, 18 nt, Artificial Sequence
  Synthetic
uuuccuucuaaaguaugc

SEQ ID NO: 281050 - RNA, 19 nt, Artificial Sequence
  Synthetic
uuuuccuucuaaaguaugc

SEQ ID NO: 281051 - RNA, 20 nt, Artificial Sequence
  Synthetic
cuuuuccuucuaaaguaugc

SEQ ID NO: 281052 - RNA, 21 nt, Artificial Sequence
  Synthetic
acuuuuccuucuaaaguaugc

SEQ ID NO: 281053 - RNA, 22 nt, Artificial Sequence
  Synthetic
uacuuuuccuucuaaaguaugc

SEQ ID NO: 281054 - RNA, 23 nt, Artificial Sequence
  Synthetic
guacuuuuccuucuaaaguaugc

SEQ ID NO: 281055 - RNA, 24 nt, Artificial Sequence
  Synthetic
aguacuuuuccuucuaaaguaugc

SEQ ID NO: 281056 - RNA, 18 nt, Artificial Sequence
  Synthetic
acuuugaguacaguaugc

SEQ ID NO: 281057 - RNA, 19 nt, Artificial Sequence
  Synthetic
gacuuugaguacaguaugc

SEQ ID NO: 281058 - RNA, 20 nt, Artificial Sequence
  Synthetic
ggacuuugaguacaguaugc

SEQ ID NO: 281059 - RNA, 21 nt, Artificial Sequence
  Synthetic
aggacuuugaguacaguaugc

SEQ ID NO: 281060 - RNA, 22 nt, Artificial Sequence
  Synthetic
aaggacuuugaguacaguaugc

SEQ ID NO: 281061 - RNA, 23 nt, Artificial Sequence
  Synthetic
uaaggacuuugaguacaguaugc

SEQ ID NO: 281062 - RNA, 24 nt, Artificial Sequence
  Synthetic
cuaaggacuuugaguacaguaugc

SEQ ID NO: 281063 - RNA, 18 nt, Artificial Sequence
  Synthetic
uuuguuacauagguaugc

SEQ ID NO: 281064 - RNA, 19 nt, Artificial Sequence
  Synthetic
guuuguuacauagguaugc

SEQ ID NO: 281065 - RNA, 20 nt, Artificial Sequence
  Synthetic
gguuuguuacauagguaugc

SEQ ID NO: 281066 - RNA, 21 nt, Artificial Sequence
  Synthetic
agguuuguuacauagguaugc

SEQ ID NO: 281067 - RNA, 22 nt, Artificial Sequence
  Synthetic
cagguuuguuacauagguaugc

SEQ ID NO: 281068 - RNA, 23 nt, Artificial Sequence
  Synthetic
gcagguuuguuacauagguaugc

SEQ ID NO: 281069 - RNA, 24 nt, Artificial Sequence
  Synthetic
ugcagguuuguuacauagguaugc

SEQ ID NO: 281070 - RNA, 18 nt, Artificial Sequence
  Synthetic
cacauuagaaauguaugc

SEQ ID NO: 281071 - RNA, 19 nt, Artificial Sequence
  Synthetic
acacauuagaaauguaugc

SEQ ID NO: 281072 - RNA, 20 nt, Artificial Sequence
  Synthetic
cacacauuagaaauguaugc

SEQ ID NO: 281073 - RNA, 21 nt, Artificial Sequence
  Synthetic
ucacacauuagaaauguaugc

SEQ ID NO: 281074 - RNA, 22 nt, Artificial Sequence
  Synthetic
uucacacauuagaaauguaugc

SEQ ID NO: 281075 - RNA, 23 nt, Artificial Sequence
  Synthetic
auucacacauuagaaauguaugc

SEQ ID NO: 281076 - RNA, 24 nt, Artificial Sequence
  Synthetic
gauucacacauuagaaauguaugc

SEQ ID NO: 281077 - RNA, 18 nt, Artificial Sequence
  Synthetic
ucaacuuggcauguaugc

SEQ ID NO: 281078 - RNA, 19 nt, Artificial Sequence
  Synthetic
aucaacuuggcauguaugc

SEQ ID NO: 281079 - RNA, 20 nt, Artificial Sequence
  Synthetic
caucaacuuggcauguaugc

SEQ ID NO: 281080 - RNA, 21 nt, Artificial Sequence
  Synthetic
gcaucaacuuggcauguaugc

SEQ ID NO: 281081 - RNA, 22 nt, Artificial Sequence
  Synthetic
agcaucaacuuggcauguaugc

SEQ ID NO: 281082 - RNA, 23 nt, Artificial Sequence
  Synthetic
uagcaucaacuuggcauguaugc

SEQ ID NO: 281083 - RNA, 24 nt, Artificial Sequence
  Synthetic
auagcaucaacuuggcauguaugc

SEQ ID NO: 281084 - RNA, 18 nt, Artificial Sequence
  Synthetic
ggguugauuguuguaugc

SEQ ID NO: 281085 - RNA, 19 nt, Artificial Sequence
  Synthetic
gggguugauuguuguaugc

SEQ ID NO: 281086 - RNA, 20 nt, Artificial Sequence
  Synthetic
ugggguugauuguuguaugc

SEQ ID NO: 281087 - RNA, 21 nt, Artificial Sequence
  Synthetic
uugggguugauuguuguaugc

SEQ ID NO: 281088 - RNA, 22 nt, Artificial Sequence
  Synthetic
uuugggguugauuguuguaugc

SEQ ID NO: 281089 - RNA, 23 nt, Artificial Sequence
  Synthetic
guuugggguugauuguuguaugc

SEQ ID NO: 281090 - RNA, 24 nt, Artificial Sequence
  Synthetic
gguuugggguugauuguuguaugc

SEQ ID NO: 281091 - RNA, 18 nt, Artificial Sequence
  Synthetic
cuuuaaauaaaauuaugc

SEQ ID NO: 281092 - RNA, 19 nt, Artificial Sequence
  Synthetic
ccuuuaaauaaaauuaugc

SEQ ID NO: 281093 - RNA, 20 nt, Artificial Sequence
  Synthetic
uccuuuaaauaaaauuaugc

SEQ ID NO: 281094 - RNA, 21 nt, Artificial Sequence
  Synthetic
uuccuuuaaauaaaauuaugc

SEQ ID NO: 281095 - RNA, 22 nt, Artificial Sequence
  Synthetic
cuuccuuuaaauaaaauuaugc

SEQ ID NO: 281096 - RNA, 23 nt, Artificial Sequence
  Synthetic
acuuccuuuaaauaaaauuaugc

SEQ ID NO: 281097 - RNA, 24 nt, Artificial Sequence
  Synthetic
uacuuccuuuaaauaaaauuaugc

SEQ ID NO: 281098 - RNA, 18 nt, Artificial Sequence
  Synthetic
gcucugcuacucuuaugc

SEQ ID NO: 281099 - RNA, 19 nt, Artificial Sequence
  Synthetic
ugcucugcuacucuuaugc

SEQ ID NO: 281100 - RNA, 20 nt, Artificial Sequence
  Synthetic
augcucugcuacucuuaugc

SEQ ID NO: 281101 - RNA, 21 nt, Artificial Sequence
  Synthetic
aaugcucugcuacucuuaugc

SEQ ID NO: 281102 - RNA, 22 nt, Artificial Sequence
  Synthetic
aaaugcucugcuacucuuaugc

SEQ ID NO: 281103 - RNA, 23 nt, Artificial Sequence
  Synthetic
uaaaugcucugcuacucuuaugc

SEQ ID NO: 281104 - RNA, 24 nt, Artificial Sequence
  Synthetic
cuaaaugcucugcuacucuuaugc

SEQ ID NO: 281105 - RNA, 18 nt, Artificial Sequence
  Synthetic
gaucauguuuaguuaugc

SEQ ID NO: 281106 - RNA, 19 nt, Artificial Sequence
  Synthetic
agaucauguuuaguuaugc

SEQ ID NO: 281107 - RNA, 20 nt, Artificial Sequence
  Synthetic
uagaucauguuuaguuaugc

SEQ ID NO: 281108 - RNA, 21 nt, Artificial Sequence
  Synthetic
uuagaucauguuuaguuaugc

SEQ ID NO: 281109 - RNA, 22 nt, Artificial Sequence
  Synthetic
auuagaucauguuuaguuaugc

SEQ ID NO: 281110 - RNA, 23 nt, Artificial Sequence
  Synthetic
aauuagaucauguuuaguuaugc

SEQ ID NO: 281111 - RNA, 24 nt, Artificial Sequence
  Synthetic
aaauuagaucauguuuaguuaugc

SEQ ID NO: 281112 - RNA, 18 nt, Artificial Sequence
  Synthetic
gauuaagggcuguuaugc

SEQ ID NO: 281113 - RNA, 19 nt, Artificial Sequence
  Synthetic
agauuaagggcuguuaugc

SEQ ID NO: 281114 - RNA, 20 nt, Artificial Sequence
  Synthetic
aagauuaagggcuguuaugc

SEQ ID NO: 281115 - RNA, 21 nt, Artificial Sequence
  Synthetic
gaagauuaagggcuguuaugc

SEQ ID NO: 281116 - RNA, 22 nt, Artificial Sequence
  Synthetic
agaagauuaagggcuguuaugc

SEQ ID NO: 281117 - RNA, 23 nt, Artificial Sequence
  Synthetic
cagaagauuaagggcuguuaugc

SEQ ID NO: 281118 - RNA, 24 nt, Artificial Sequence
  Synthetic
ccagaagauuaagggcuguuaugc

SEQ ID NO: 281119 - RNA, 18 nt, Artificial Sequence
  Synthetic
ccuaaauguaauuuaugc

SEQ ID NO: 281120 - RNA, 19 nt, Artificial Sequence
  Synthetic
cccuaaauguaauuuaugc

SEQ ID NO: 281121 - RNA, 20 nt, Artificial Sequence
  Synthetic
ucccuaaauguaauuuaugc

SEQ ID NO: 281122 - RNA, 21 nt, Artificial Sequence
  Synthetic
cucccuaaauguaauuuaugc

SEQ ID NO: 281123 - RNA, 22 nt, Artificial Sequence
  Synthetic
acucccuaaauguaauuuaugc

SEQ ID NO: 281124 - RNA, 23 nt, Artificial Sequence
  Synthetic
uacucccuaaauguaauuuaugc

SEQ ID NO: 281125 - RNA, 24 nt, Artificial Sequence
  Synthetic
uuacucccuaaauguaauuuaugc

SEQ ID NO: 281126 - RNA, 18 nt, Artificial Sequence
  Synthetic
ucaacauccuauuuaugc

SEQ ID NO: 281127 - RNA, 19 nt, Artificial Sequence
  Synthetic
aucaacauccuauuuaugc

SEQ ID NO: 281128 - RNA, 20 nt, Artificial Sequence
  Synthetic
aaucaacauccuauuuaugc

SEQ ID NO: 281129 - RNA, 21 nt, Artificial Sequence
  Synthetic
gaaucaacauccuauuuaugc

SEQ ID NO: 281130 - RNA, 22 nt, Artificial Sequence
  Synthetic
ugaaucaacauccuauuuaugc

SEQ ID NO: 281131 - RNA, 23 nt, Artificial Sequence
  Synthetic
augaaucaacauccuauuuaugc

SEQ ID NO: 281132 - RNA, 24 nt, Artificial Sequence
  Synthetic
caugaaucaacauccuauuuaugc

SEQ ID NO: 281133 - RNA, 18 nt, Artificial Sequence
  Synthetic
uauuuuaauuauuuaugc

SEQ ID NO: 281134 - RNA, 19 nt, Artificial Sequence
  Synthetic
cuauuuuaauuauuuaugc

SEQ ID NO: 281135 - RNA, 20 nt, Artificial Sequence
  Synthetic
ucuauuuuaauuauuuaugc

SEQ ID NO: 281136 - RNA, 21 nt, Artificial Sequence
  Synthetic
uucuauuuuaauuauuuaugc

SEQ ID NO: 281137 - RNA, 22 nt, Artificial Sequence
  Synthetic
uuucuauuuuaauuauuuaugc

SEQ ID NO: 281138 - RNA, 23 nt, Artificial Sequence
  Synthetic
cuuucuauuuuaauuauuuaugc

SEQ ID NO: 281139 - RNA, 24 nt, Artificial Sequence
  Synthetic
ucuuucuauuuuaauuauuuaugc

SEQ ID NO: 281140 - RNA, 18 nt, Artificial Sequence
  Synthetic
guagaaagaauuuuaugc

SEQ ID NO: 281141 - RNA, 19 nt, Artificial Sequence
  Synthetic
uguagaaagaauuuuaugc

SEQ ID NO: 281142 - RNA, 20 nt, Artificial Sequence
  Synthetic
auguagaaagaauuuuaugc

SEQ ID NO: 281143 - RNA, 21 nt, Artificial Sequence
  Synthetic
cauguagaaagaauuuuaugc

SEQ ID NO: 281144 - RNA, 22 nt, Artificial Sequence
  Synthetic
ucauguagaaagaauuuuaugc

SEQ ID NO: 281145 - RNA, 23 nt, Artificial Sequence
  Synthetic
aucauguagaaagaauuuuaugc

SEQ ID NO: 281146 - RNA, 24 nt, Artificial Sequence
  Synthetic
aaucauguagaaagaauuuuaugc

SEQ ID NO: 281147 - RNA, 18 nt, Artificial Sequence
  Synthetic
ccucauguuuaaaacugc

SEQ ID NO: 281148 - RNA, 19 nt, Artificial Sequence
  Synthetic
uccucauguuuaaaacugc

SEQ ID NO: 281149 - RNA, 20 nt, Artificial Sequence
  Synthetic
guccucauguuuaaaacugc

SEQ ID NO: 281150 - RNA, 21 nt, Artificial Sequence
  Synthetic
cguccucauguuuaaaacugc

SEQ ID NO: 281151 - RNA, 22 nt, Artificial Sequence
  Synthetic
ucguccucauguuuaaaacugc

SEQ ID NO: 281152 - RNA, 23 nt, Artificial Sequence
  Synthetic
cucguccucauguuuaaaacugc

SEQ ID NO: 281153 - RNA, 24 nt, Artificial Sequence
  Synthetic
ccucguccucauguuuaaaacugc

SEQ ID NO: 281154 - RNA, 18 nt, Artificial Sequence
  Synthetic
agucuuaaugcaaacugc

SEQ ID NO: 281155 - RNA, 19 nt, Artificial Sequence
  Synthetic
aagucuuaaugcaaacugc

SEQ ID NO: 281156 - RNA, 20 nt, Artificial Sequence
  Synthetic
uaagucuuaaugcaaacugc

SEQ ID NO: 281157 - RNA, 21 nt, Artificial Sequence
  Synthetic
guaagucuuaaugcaaacugc

SEQ ID NO: 281158 - RNA, 22 nt, Artificial Sequence
  Synthetic
aguaagucuuaaugcaaacugc

SEQ ID NO: 281159 - RNA, 23 nt, Artificial Sequence
  Synthetic
gaguaagucuuaaugcaaacugc

SEQ ID NO: 281160 - RNA, 24 nt, Artificial Sequence
  Synthetic
ggaguaagucuuaaugcaaacugc

SEQ ID NO: 281161 - RNA, 18 nt, Artificial Sequence
  Synthetic
accgcuagaaagaacugc

SEQ ID NO: 281162 - RNA, 19 nt, Artificial Sequence
  Synthetic
uaccgcuagaaagaacugc

SEQ ID NO: 281163 - RNA, 20 nt, Artificial Sequence
  Synthetic
auaccgcuagaaagaacugc

SEQ ID NO: 281164 - RNA, 21 nt, Artificial Sequence
  Synthetic
cauaccgcuagaaagaacugc

SEQ ID NO: 281165 - RNA, 22 nt, Artificial Sequence
  Synthetic
ucauaccgcuagaaagaacugc

SEQ ID NO: 281166 - RNA, 23 nt, Artificial Sequence
  Synthetic
uucauaccgcuagaaagaacugc

SEQ ID NO: 281167 - RNA, 24 nt, Artificial Sequence
  Synthetic
uuucauaccgcuagaaagaacugc

SEQ ID NO: 281168 - RNA, 18 nt, Artificial Sequence
  Synthetic
acugcuauaaagaacugc

SEQ ID NO: 281169 - RNA, 19 nt, Artificial Sequence
  Synthetic
uacugcuauaaagaacugc

SEQ ID NO: 281170 - RNA, 20 nt, Artificial Sequence
  Synthetic
auacugcuauaaagaacugc

SEQ ID NO: 281171 - RNA, 21 nt, Artificial Sequence
  Synthetic
cauacugcuauaaagaacugc

SEQ ID NO: 281172 - RNA, 22 nt, Artificial Sequence
  Synthetic
ucauacugcuauaaagaacugc

SEQ ID NO: 281173 - RNA, 23 nt, Artificial Sequence
  Synthetic
uucauacugcuauaaagaacugc

SEQ ID NO: 281174 - RNA, 24 nt, Artificial Sequence
  Synthetic
uuucauacugcuauaaagaacugc

SEQ ID NO: 281175 - RNA, 18 nt, Artificial Sequence
  Synthetic
auggucacaccuaacugc

SEQ ID NO: 281176 - RNA, 19 nt, Artificial Sequence
  Synthetic
cauggucacaccuaacugc

SEQ ID NO: 281177 - RNA, 20 nt, Artificial Sequence
  Synthetic
acauggucacaccuaacugc

SEQ ID NO: 281178 - RNA, 21 nt, Artificial Sequence
  Synthetic
cacauggucacaccuaacugc

SEQ ID NO: 281179 - RNA, 22 nt, Artificial Sequence
  Synthetic
ucacauggucacaccuaacugc

SEQ ID NO: 281180 - RNA, 23 nt, Artificial Sequence
  Synthetic
gucacauggucacaccuaacugc

SEQ ID NO: 281181 - RNA, 24 nt, Artificial Sequence
  Synthetic
ugucacauggucacaccuaacugc

SEQ ID NO: 281182 - RNA, 18 nt, Artificial Sequence
  Synthetic
ucuguagcagcuaacugc

SEQ ID NO: 281183 - RNA, 19 nt, Artificial Sequence
  Synthetic
gucuguagcagcuaacugc

SEQ ID NO: 281184 - RNA, 20 nt, Artificial Sequence
  Synthetic
ugucuguagcagcuaacugc

SEQ ID NO: 281185 - RNA, 21 nt, Artificial Sequence
  Synthetic
augucuguagcagcuaacugc

SEQ ID NO: 281186 - RNA, 22 nt, Artificial Sequence
  Synthetic
aaugucuguagcagcuaacugc

SEQ ID NO: 281187 - RNA, 23 nt, Artificial Sequence
  Synthetic
uaaugucuguagcagcuaacugc

SEQ ID NO: 281188 - RNA, 24 nt, Artificial Sequence
  Synthetic
auaaugucuguagcagcuaacugc

SEQ ID NO: 281189 - RNA, 18 nt, Artificial Sequence
  Synthetic
agagacuuccuccacugc

SEQ ID NO: 281190 - RNA, 19 nt, Artificial Sequence
  Synthetic
gagagacuuccuccacugc

SEQ ID NO: 281191 - RNA, 20 nt, Artificial Sequence
  Synthetic
agagagacuuccuccacugc

SEQ ID NO: 281192 - RNA, 21 nt, Artificial Sequence
  Synthetic
uagagagacuuccuccacugc

SEQ ID NO: 281193 - RNA, 22 nt, Artificial Sequence
  Synthetic
uuagagagacuuccuccacugc

SEQ ID NO: 281194 - RNA, 23 nt, Artificial Sequence
  Synthetic
cuuagagagacuuccuccacugc

SEQ ID NO: 281195 - RNA, 24 nt, Artificial Sequence
  Synthetic
ucuuagagagacuuccuccacugc

SEQ ID NO: 281196 - RNA, 18 nt, Artificial Sequence
  Synthetic
cucugugccaggcacugc

SEQ ID NO: 281197 - RNA, 19 nt, Artificial Sequence
  Synthetic
ucucugugccaggcacugc

SEQ ID NO: 281198 - RNA, 20 nt, Artificial Sequence
  Synthetic
uucucugugccaggcacugc

SEQ ID NO: 281199 - RNA, 21 nt, Artificial Sequence
  Synthetic
cuucucugugccaggcacugc

SEQ ID NO: 281200 - RNA, 22 nt, Artificial Sequence
  Synthetic
ccuucucugugccaggcacugc

SEQ ID NO: 281201 - RNA, 23 nt, Artificial Sequence
  Synthetic
accuucucugugccaggcacugc

SEQ ID NO: 281202 - RNA, 24 nt, Artificial Sequence
  Synthetic
uaccuucucugugccaggcacugc

SEQ ID NO: 281203 - RNA, 18 nt, Artificial Sequence
  Synthetic
ucuaagagggggcacugc

SEQ ID NO: 281204 - RNA, 19 nt, Artificial Sequence
  Synthetic
uucuaagagggggcacugc

SEQ ID NO: 281205 - RNA, 20 nt, Artificial Sequence
  Synthetic
cuucuaagagggggcacugc

SEQ ID NO: 281206 - RNA, 21 nt, Artificial Sequence
  Synthetic
ccuucuaagagggggcacugc

SEQ ID NO: 281207 - RNA, 22 nt, Artificial Sequence
  Synthetic
uccuucuaagagggggcacugc

SEQ ID NO: 281208 - RNA, 23 nt, Artificial Sequence
  Synthetic
guccuucuaagagggggcacugc

SEQ ID NO: 281209 - RNA, 24 nt, Artificial Sequence
  Synthetic
uguccuucuaagagggggcacugc

SEQ ID NO: 281210 - RNA, 18 nt, Artificial Sequence
  Synthetic
aaccugucauggcacugc

SEQ ID NO: 281211 - RNA, 19 nt, Artificial Sequence
  Synthetic
uaaccugucauggcacugc

SEQ ID NO: 281212 - RNA, 20 nt, Artificial Sequence
  Synthetic
guaaccugucauggcacugc

SEQ ID NO: 281213 - RNA, 21 nt, Artificial Sequence
  Synthetic
uguaaccugucauggcacugc

SEQ ID NO: 281214 - RNA, 22 nt, Artificial Sequence
  Synthetic
uuguaaccugucauggcacugc

SEQ ID NO: 281215 - RNA, 23 nt, Artificial Sequence
  Synthetic
uuuguaaccugucauggcacugc

SEQ ID NO: 281216 - RNA, 24 nt, Artificial Sequence
  Synthetic
auuuguaaccugucauggcacugc

SEQ ID NO: 281217 - RNA, 18 nt, Artificial Sequence
  Synthetic
uacugugggcugcacugc

SEQ ID NO: 281218 - RNA, 19 nt, Artificial Sequence
  Synthetic
uuacugugggcugcacugc

SEQ ID NO: 281219 - RNA, 20 nt, Artificial Sequence
  Synthetic
guuacugugggcugcacugc

SEQ ID NO: 281220 - RNA, 21 nt, Artificial Sequence
  Synthetic
uguuacugugggcugcacugc

SEQ ID NO: 281221 - RNA, 22 nt, Artificial Sequence
  Synthetic
uuguuacugugggcugcacugc

SEQ ID NO: 281222 - RNA, 23 nt, Artificial Sequence
  Synthetic
uuuguuacugugggcugcacugc

SEQ ID NO: 281223 - RNA, 24 nt, Artificial Sequence
  Synthetic
uuuuguuacugugggcugcacugc

SEQ ID NO: 281224 - RNA, 18 nt, Artificial Sequence
  Synthetic
ugcugcaagcuucacugc

SEQ ID NO: 281225 - RNA, 19 nt, Artificial Sequence
  Synthetic
uugcugcaagcuucacugc

SEQ ID NO: 281226 - RNA, 20 nt, Artificial Sequence
  Synthetic
guugcugcaagcuucacugc

SEQ ID NO: 281227 - RNA, 21 nt, Artificial Sequence
  Synthetic
uguugcugcaagcuucacugc

SEQ ID NO: 281228 - RNA, 22 nt, Artificial Sequence
  Synthetic
cuguugcugcaagcuucacugc

SEQ ID NO: 281229 - RNA, 23 nt, Artificial Sequence
  Synthetic
ucuguugcugcaagcuucacugc

SEQ ID NO: 281230 - RNA, 24 nt, Artificial Sequence
  Synthetic
uucuguugcugcaagcuucacugc

SEQ ID NO: 281231 - RNA, 18 nt, Artificial Sequence
  Synthetic
gggcagguccacgacugc

SEQ ID NO: 281232 - RNA, 19 nt, Artificial Sequence
  Synthetic
ugggcagguccacgacugc

SEQ ID NO: 281233 - RNA, 20 nt, Artificial Sequence
  Synthetic
gugggcagguccacgacugc

SEQ ID NO: 281234 - RNA, 21 nt, Artificial Sequence
  Synthetic
agugggcagguccacgacugc

SEQ ID NO: 281235 - RNA, 22 nt, Artificial Sequence
  Synthetic
aagugggcagguccacgacugc

SEQ ID NO: 281236 - RNA, 23 nt, Artificial Sequence
  Synthetic
uaagugggcagguccacgacugc

SEQ ID NO: 281237 - RNA, 24 nt, Artificial Sequence
  Synthetic
guaagugggcagguccacgacugc

SEQ ID NO: 281238 - RNA, 18 nt, Artificial Sequence
  Synthetic
uuuuagaaacaggacugc

SEQ ID NO: 281239 - RNA, 19 nt, Artificial Sequence
  Synthetic
auuuuagaaacaggacugc

SEQ ID NO: 281240 - RNA, 20 nt, Artificial Sequence
  Synthetic
uauuuuagaaacaggacugc

SEQ ID NO: 281241 - RNA, 21 nt, Artificial Sequence
  Synthetic
cuauuuuagaaacaggacugc

SEQ ID NO: 281242 - RNA, 22 nt, Artificial Sequence
  Synthetic
ucuauuuuagaaacaggacugc

SEQ ID NO: 281243 - RNA, 23 nt, Artificial Sequence
  Synthetic
uucuauuuuagaaacaggacugc

SEQ ID NO: 281244 - RNA, 24 nt, Artificial Sequence
  Synthetic
auucuauuuuagaaacaggacugc

SEQ ID NO: 281245 - RNA, 18 nt, Artificial Sequence
  Synthetic
guaaggauaauaaccugc

SEQ ID NO: 281246 - RNA, 19 nt, Artificial Sequence
  Synthetic
aguaaggauaauaaccugc

SEQ ID NO: 281247 - RNA, 20 nt, Artificial Sequence
  Synthetic
caguaaggauaauaaccugc

SEQ ID NO: 281248 - RNA, 21 nt, Artificial Sequence
  Synthetic
acaguaaggauaauaaccugc

SEQ ID NO: 281249 - RNA, 22 nt, Artificial Sequence
  Synthetic
cacaguaaggauaauaaccugc

SEQ ID NO: 281250 - RNA, 23 nt, Artificial Sequence
  Synthetic
gcacaguaaggauaauaaccugc

SEQ ID NO: 281251 - RNA, 24 nt, Artificial Sequence
  Synthetic
ggcacaguaaggauaauaaccugc

SEQ ID NO: 281252 - RNA, 18 nt, Artificial Sequence
  Synthetic
acucucuuccccaccugc

SEQ ID NO: 281253 - RNA, 19 nt, Artificial Sequence
  Synthetic
uacucucuuccccaccugc

SEQ ID NO: 281254 - RNA, 20 nt, Artificial Sequence
  Synthetic
uuacucucuuccccaccugc

SEQ ID NO: 281255 - RNA, 21 nt, Artificial Sequence
  Synthetic
uuuacucucuuccccaccugc

SEQ ID NO: 281256 - RNA, 22 nt, Artificial Sequence
  Synthetic
cuuuacucucuuccccaccugc

SEQ ID NO: 281257 - RNA, 23 nt, Artificial Sequence
  Synthetic
ucuuuacucucuuccccaccugc

SEQ ID NO: 281258 - RNA, 24 nt, Artificial Sequence
  Synthetic
uucuuuacucucuuccccaccugc

SEQ ID NO: 281259 - RNA, 18 nt, Artificial Sequence
  Synthetic
accagcccuuccaccugc

SEQ ID NO: 281260 - RNA, 19 nt, Artificial Sequence
  Synthetic
caccagcccuuccaccugc

SEQ ID NO: 281261 - RNA, 20 nt, Artificial Sequence
  Synthetic
ccaccagcccuuccaccugc

SEQ ID NO: 281262 - RNA, 21 nt, Artificial Sequence
  Synthetic
gccaccagcccuuccaccugc

SEQ ID NO: 281263 - RNA, 22 nt, Artificial Sequence
  Synthetic
ugccaccagcccuuccaccugc

SEQ ID NO: 281264 - RNA, 23 nt, Artificial Sequence
  Synthetic
cugccaccagcccuuccaccugc

SEQ ID NO: 281265 - RNA, 24 nt, Artificial Sequence
  Synthetic
ucugccaccagcccuuccaccugc

SEQ ID NO: 281266 - RNA, 18 nt, Artificial Sequence
  Synthetic
augaguggauagaccugc

SEQ ID NO: 281267 - RNA, 19 nt, Artificial Sequence
  Synthetic
aaugaguggauagaccugc

SEQ ID NO: 281268 - RNA, 20 nt, Artificial Sequence
  Synthetic
gaaugaguggauagaccugc

SEQ ID NO: 281269 - RNA, 21 nt, Artificial Sequence
  Synthetic
ugaaugaguggauagaccugc

SEQ ID NO: 281270 - RNA, 22 nt, Artificial Sequence
  Synthetic
augaaugaguggauagaccugc

SEQ ID NO: 281271 - RNA, 23 nt, Artificial Sequence
  Synthetic
gaugaaugaguggauagaccugc

SEQ ID NO: 281272 - RNA, 24 nt, Artificial Sequence
  Synthetic
agaugaaugaguggauagaccugc

SEQ ID NO: 281273 - RNA, 18 nt, Artificial Sequence
  Synthetic
uugggaacuuagaccugc

SEQ ID NO: 281274 - RNA, 19 nt, Artificial Sequence
  Synthetic
cuugggaacuuagaccugc

SEQ ID NO: 281275 - RNA, 20 nt, Artificial Sequence
  Synthetic
acuugggaacuuagaccugc

SEQ ID NO: 281276 - RNA, 21 nt, Artificial Sequence
  Synthetic
cacuugggaacuuagaccugc

SEQ ID NO: 281277 - RNA, 22 nt, Artificial Sequence
  Synthetic
ucacuugggaacuuagaccugc

SEQ ID NO: 281278 - RNA, 23 nt, Artificial Sequence
  Synthetic
aucacuugggaacuuagaccugc

SEQ ID NO: 281279 - RNA, 24 nt, Artificial Sequence
  Synthetic
caucacuugggaacuuagaccugc

SEQ ID NO: 281280 - RNA, 18 nt, Artificial Sequence
  Synthetic
cugcuuuguuugaccugc

SEQ ID NO: 281281 - RNA, 19 nt, Artificial Sequence
  Synthetic
gcugcuuuguuugaccugc

SEQ ID NO: 281282 - RNA, 20 nt, Artificial Sequence
  Synthetic
ggcugcuuuguuugaccugc

SEQ ID NO: 281283 - RNA, 21 nt, Artificial Sequence
  Synthetic
uggcugcuuuguuugaccugc

SEQ ID NO: 281284 - RNA, 22 nt, Artificial Sequence
  Synthetic
uuggcugcuuuguuugaccugc

SEQ ID NO: 281285 - RNA, 23 nt, Artificial Sequence
  Synthetic
cuuggcugcuuuguuugaccugc

SEQ ID NO: 281286 - RNA, 24 nt, Artificial Sequence
  Synthetic
gcuuggcugcuuuguuugaccugc

SEQ ID NO: 281287 - RNA, 18 nt, Artificial Sequence
  Synthetic
acuauguuuaguaccugc

SEQ ID NO: 281288 - RNA, 19 nt, Artificial Sequence
  Synthetic
uacuauguuuaguaccugc

SEQ ID NO: 281289 - RNA, 20 nt, Artificial Sequence
  Synthetic
guacuauguuuaguaccugc

SEQ ID NO: 281290 - RNA, 21 nt, Artificial Sequence
  Synthetic
gguacuauguuuaguaccugc

SEQ ID NO: 281291 - RNA, 22 nt, Artificial Sequence
  Synthetic
ggguacuauguuuaguaccugc

SEQ ID NO: 281292 - RNA, 23 nt, Artificial Sequence
  Synthetic
uggguacuauguuuaguaccugc

SEQ ID NO: 281293 - RNA, 24 nt, Artificial Sequence
  Synthetic
uuggguacuauguuuaguaccugc

SEQ ID NO: 281294 - RNA, 18 nt, Artificial Sequence
  Synthetic
uauaaucccaaucccugc

SEQ ID NO: 281295 - RNA, 19 nt, Artificial Sequence
  Synthetic
cuauaaucccaaucccugc

SEQ ID NO: 281296 - RNA, 20 nt, Artificial Sequence
  Synthetic
ucuauaaucccaaucccugc

SEQ ID NO: 281297 - RNA, 21 nt, Artificial Sequence
  Synthetic
aucuauaaucccaaucccugc

SEQ ID NO: 281298 - RNA, 22 nt, Artificial Sequence
  Synthetic
caucuauaaucccaaucccugc

SEQ ID NO: 281299 - RNA, 23 nt, Artificial Sequence
  Synthetic
gcaucuauaaucccaaucccugc

SEQ ID NO: 281300 - RNA, 24 nt, Artificial Sequence
  Synthetic
agcaucuauaaucccaaucccugc

SEQ ID NO: 281301 - RNA, 18 nt, Artificial Sequence
  Synthetic
uacuccuccauucccugc

SEQ ID NO: 281302 - RNA, 19 nt, Artificial Sequence
  Synthetic
auacuccuccauucccugc

SEQ ID NO: 281303 - RNA, 20 nt, Artificial Sequence
  Synthetic
uauacuccuccauucccugc

SEQ ID NO: 281304 - RNA, 21 nt, Artificial Sequence
  Synthetic
guauacuccuccauucccugc

SEQ ID NO: 281305 - RNA, 22 nt, Artificial Sequence
  Synthetic
uguauacuccuccauucccugc

SEQ ID NO: 281306 - RNA, 23 nt, Artificial Sequence
  Synthetic
guguauacuccuccauucccugc

SEQ ID NO: 281307 - RNA, 24 nt, Artificial Sequence
  Synthetic
uguguauacuccuccauucccugc

SEQ ID NO: 281308 - RNA, 18 nt, Artificial Sequence
  Synthetic
uccuuuuagauucccugc

SEQ ID NO: 281309 - RNA, 19 nt, Artificial Sequence
  Synthetic
uuccuuuuagauucccugc

SEQ ID NO: 281310 - RNA, 20 nt, Artificial Sequence
  Synthetic
cuuccuuuuagauucccugc

SEQ ID NO: 281311 - RNA, 21 nt, Artificial Sequence
  Synthetic
gcuuccuuuuagauucccugc

SEQ ID NO: 281312 - RNA, 22 nt, Artificial Sequence
  Synthetic
ggcuuccuuuuagauucccugc

SEQ ID NO: 281313 - RNA, 23 nt, Artificial Sequence
  Synthetic
uggcuuccuuuuagauucccugc

SEQ ID NO: 281314 - RNA, 24 nt, Artificial Sequence
  Synthetic
cuggcuuccuuuuagauucccugc

SEQ ID NO: 281315 - RNA, 18 nt, Artificial Sequence
  Synthetic
uuccauuuaagagccugc

SEQ ID NO: 281316 - RNA, 19 nt, Artificial Sequence
  Synthetic
uuuccauuuaagagccugc

SEQ ID NO: 281317 - RNA, 20 nt, Artificial Sequence
  Synthetic
uuuuccauuuaagagccugc

SEQ ID NO: 281318 - RNA, 21 nt, Artificial Sequence
  Synthetic
auuuuccauuuaagagccugc

SEQ ID NO: 281319 - RNA, 22 nt, Artificial Sequence
  Synthetic
aauuuuccauuuaagagccugc

SEQ ID NO: 281320 - RNA, 23 nt, Artificial Sequence
  Synthetic
uaauuuuccauuuaagagccugc

SEQ ID NO: 281321 - RNA, 24 nt, Artificial Sequence
  Synthetic
uuaauuuuccauuuaagagccugc

SEQ ID NO: 281322 - RNA, 18 nt, Artificial Sequence
  Synthetic
cuagaaacacuggccugc

SEQ ID NO: 281323 - RNA, 19 nt, Artificial Sequence
  Synthetic
ucuagaaacacuggccugc

SEQ ID NO: 281324 - RNA, 20 nt, Artificial Sequence
  Synthetic
cucuagaaacacuggccugc

SEQ ID NO: 281325 - RNA, 21 nt, Artificial Sequence
  Synthetic
gcucuagaaacacuggccugc

SEQ ID NO: 281326 - RNA, 22 nt, Artificial Sequence
  Synthetic
ugcucuagaaacacuggccugc

SEQ ID NO: 281327 - RNA, 23 nt, Artificial Sequence
  Synthetic
augcucuagaaacacuggccugc

SEQ ID NO: 281328 - RNA, 24 nt, Artificial Sequence
  Synthetic
uaugcucuagaaacacuggccugc

SEQ ID NO: 281329 - RNA, 18 nt, Artificial Sequence
  Synthetic
cucuccaguaaugccugc

SEQ ID NO: 281330 - RNA, 19 nt, Artificial Sequence
  Synthetic
acucuccaguaaugccugc

SEQ ID NO: 281331 - RNA, 20 nt, Artificial Sequence
  Synthetic
cacucuccaguaaugccugc

SEQ ID NO: 281332 - RNA, 21 nt, Artificial Sequence
  Synthetic
ccacucuccaguaaugccugc

SEQ ID NO: 281333 - RNA, 22 nt, Artificial Sequence
  Synthetic
gccacucuccaguaaugccugc

SEQ ID NO: 281334 - RNA, 23 nt, Artificial Sequence
  Synthetic
agccacucuccaguaaugccugc

SEQ ID NO: 281335 - RNA, 24 nt, Artificial Sequence
  Synthetic
cagccacucuccaguaaugccugc

SEQ ID NO: 281336 - RNA, 18 nt, Artificial Sequence
  Synthetic
uuuacaauacuugccugc

SEQ ID NO: 281337 - RNA, 19 nt, Artificial Sequence
  Synthetic
auuuacaauacuugccugc

SEQ ID NO: 281338 - RNA, 20 nt, Artificial Sequence
  Synthetic
aauuuacaauacuugccugc

SEQ ID NO: 281339 - RNA, 21 nt, Artificial Sequence
  Synthetic
caauuuacaauacuugccugc

SEQ ID NO: 281340 - RNA, 22 nt, Artificial Sequence
  Synthetic
ucaauuuacaauacuugccugc

SEQ ID NO: 281341 - RNA, 23 nt, Artificial Sequence
  Synthetic
cucaauuuacaauacuugccugc

SEQ ID NO: 281342 - RNA, 24 nt, Artificial Sequence
  Synthetic
acucaauuuacaauacuugccugc

SEQ ID NO: 281343 - RNA, 18 nt, Artificial Sequence
  Synthetic
uuuuuaagagacuccugc

SEQ ID NO: 281344 - RNA, 19 nt, Artificial Sequence
  Synthetic
uuuuuuaagagacuccugc

SEQ ID NO: 281345 - RNA, 20 nt, Artificial Sequence
  Synthetic
guuuuuuaagagacuccugc

SEQ ID NO: 281346 - RNA, 21 nt, Artificial Sequence
  Synthetic
uguuuuuuaagagacuccugc

SEQ ID NO: 281347 - RNA, 22 nt, Artificial Sequence
  Synthetic
guguuuuuuaagagacuccugc

SEQ ID NO: 281348 - RNA, 23 nt, Artificial Sequence
  Synthetic
gguguuuuuuaagagacuccugc

SEQ ID NO: 281349 - RNA, 24 nt, Artificial Sequence
  Synthetic
agguguuuuuuaagagacuccugc

SEQ ID NO: 281350 - RNA, 18 nt, Artificial Sequence
  Synthetic
uggucuuuuaucuccugc

SEQ ID NO: 281351 - RNA, 19 nt, Artificial Sequence
  Synthetic
cuggucuuuuaucuccugc

SEQ ID NO: 281352 - RNA, 20 nt, Artificial Sequence
  Synthetic
acuggucuuuuaucuccugc

SEQ ID NO: 281353 - RNA, 21 nt, Artificial Sequence
  Synthetic
gacuggucuuuuaucuccugc

SEQ ID NO: 281354 - RNA, 22 nt, Artificial Sequence
  Synthetic
ggacuggucuuuuaucuccugc

SEQ ID NO: 281355 - RNA, 23 nt, Artificial Sequence
  Synthetic
aggacuggucuuuuaucuccugc

SEQ ID NO: 281356 - RNA, 24 nt, Artificial Sequence
  Synthetic
caggacuggucuuuuaucuccugc

SEQ ID NO: 281357 - RNA, 18 nt, Artificial Sequence
  Synthetic
uaacugaaagguuccugc

SEQ ID NO: 281358 - RNA, 19 nt, Artificial Sequence
  Synthetic
auaacugaaagguuccugc

SEQ ID NO: 281359 - RNA, 20 nt, Artificial Sequence
  Synthetic
gauaacugaaagguuccugc

SEQ ID NO: 281360 - RNA, 21 nt, Artificial Sequence
  Synthetic
ugauaacugaaagguuccugc

SEQ ID NO: 281361 - RNA, 22 nt, Artificial Sequence
  Synthetic
gugauaacugaaagguuccugc

SEQ ID NO: 281362 - RNA, 23 nt, Artificial Sequence
  Synthetic
ugugauaacugaaagguuccugc

SEQ ID NO: 281363 - RNA, 24 nt, Artificial Sequence
  Synthetic
uugugauaacugaaagguuccugc

SEQ ID NO: 281364 - RNA, 18 nt, Artificial Sequence
  Synthetic
uuuuuggcauuuuccugc

SEQ ID NO: 281365 - RNA, 19 nt, Artificial Sequence
  Synthetic
uuuuuuggcauuuuccugc

SEQ ID NO: 281366 - RNA, 20 nt, Artificial Sequence
  Synthetic
uuuuuuuggcauuuuccugc

SEQ ID NO: 281367 - RNA, 21 nt, Artificial Sequence
  Synthetic
auuuuuuuggcauuuuccugc

SEQ ID NO: 281368 - RNA, 22 nt, Artificial Sequence
  Synthetic
cauuuuuuuggcauuuuccugc

SEQ ID NO: 281369 - RNA, 23 nt, Artificial Sequence
  Synthetic
acauuuuuuuggcauuuuccugc

SEQ ID NO: 281370 - RNA, 24 nt, Artificial Sequence
  Synthetic
uacauuuuuuuggcauuuuccugc

SEQ ID NO: 281371 - RNA, 18 nt, Artificial Sequence
  Synthetic
guuucaucuuuuuccugc

SEQ ID NO: 281372 - RNA, 19 nt, Artificial Sequence
  Synthetic
aguuucaucuuuuuccugc

SEQ ID NO: 281373 - RNA, 20 nt, Artificial Sequence
  Synthetic
uaguuucaucuuuuuccugc

SEQ ID NO: 281374 - RNA, 21 nt, Artificial Sequence
  Synthetic
uuaguuucaucuuuuuccugc

SEQ ID NO: 281375 - RNA, 22 nt, Artificial Sequence
  Synthetic
auuaguuucaucuuuuuccugc

SEQ ID NO: 281376 - RNA, 23 nt, Artificial Sequence
  Synthetic
cauuaguuucaucuuuuuccugc

SEQ ID NO: 281377 - RNA, 24 nt, Artificial Sequence
  Synthetic
ccauuaguuucaucuuuuuccugc

SEQ ID NO: 281378 - RNA, 18 nt, Artificial Sequence
  Synthetic
aagcagcccaccagcugc

SEQ ID NO: 281379 - RNA, 19 nt, Artificial Sequence
  Synthetic
gaagcagcccaccagcugc

SEQ ID NO: 281380 - RNA, 20 nt, Artificial Sequence
  Synthetic
ggaagcagcccaccagcugc

SEQ ID NO: 281381 - RNA, 21 nt, Artificial Sequence
  Synthetic
aggaagcagcccaccagcugc

SEQ ID NO: 281382 - RNA, 22 nt, Artificial Sequence
  Synthetic
caggaagcagcccaccagcugc

SEQ ID NO: 281383 - RNA, 23 nt, Artificial Sequence
  Synthetic
gcaggaagcagcccaccagcugc

SEQ ID NO: 281384 - RNA, 24 nt, Artificial Sequence
  Synthetic
agcaggaagcagcccaccagcugc

SEQ ID NO: 281385 - RNA, 18 nt, Artificial Sequence
  Synthetic
aggagcccugccagcugc

SEQ ID NO: 281386 - RNA, 19 nt, Artificial Sequence
  Synthetic
aaggagcccugccagcugc

SEQ ID NO: 281387 - RNA, 20 nt, Artificial Sequence
  Synthetic
uaaggagcccugccagcugc

SEQ ID NO: 281388 - RNA, 21 nt, Artificial Sequence
  Synthetic
guaaggagcccugccagcugc

SEQ ID NO: 281389 - RNA, 22 nt, Artificial Sequence
  Synthetic
uguaaggagcccugccagcugc

SEQ ID NO: 281390 - RNA, 23 nt, Artificial Sequence
  Synthetic
cuguaaggagcccugccagcugc

SEQ ID NO: 281391 - RNA, 24 nt, Artificial Sequence
  Synthetic
gcuguaaggagcccugccagcugc

SEQ ID NO: 281392 - RNA, 18 nt, Artificial Sequence
  Synthetic
aaucagaacacuagcugc

SEQ ID NO: 281393 - RNA, 19 nt, Artificial Sequence
  Synthetic
uaaucagaacacuagcugc

SEQ ID NO: 281394 - RNA, 20 nt, Artificial Sequence
  Synthetic
auaaucagaacacuagcugc

SEQ ID NO: 281395 - RNA, 21 nt, Artificial Sequence
  Synthetic
cauaaucagaacacuagcugc

SEQ ID NO: 281396 - RNA, 22 nt, Artificial Sequence
  Synthetic
ucauaaucagaacacuagcugc

SEQ ID NO: 281397 - RNA, 23 nt, Artificial Sequence
  Synthetic
uucauaaucagaacacuagcugc

SEQ ID NO: 281398 - RNA, 24 nt, Artificial Sequence
  Synthetic
auucauaaucagaacacuagcugc

SEQ ID NO: 281399 - RNA, 18 nt, Artificial Sequence
  Synthetic
augggaccaucuagcugc

SEQ ID NO: 281400 - RNA, 19 nt, Artificial Sequence
  Synthetic
gaugggaccaucuagcugc

SEQ ID NO: 281401 - RNA, 20 nt, Artificial Sequence
  Synthetic
agaugggaccaucuagcugc

SEQ ID NO: 281402 - RNA, 21 nt, Artificial Sequence
  Synthetic
cagaugggaccaucuagcugc

SEQ ID NO: 281403 - RNA, 22 nt, Artificial Sequence
  Synthetic
ccagaugggaccaucuagcugc

SEQ ID NO: 281404 - RNA, 23 nt, Artificial Sequence
  Synthetic
cccagaugggaccaucuagcugc

SEQ ID NO: 281405 - RNA, 24 nt, Artificial Sequence
  Synthetic
ccccagaugggaccaucuagcugc

SEQ ID NO: 281406 - RNA, 18 nt, Artificial Sequence
  Synthetic
cacacagggaaaggcugc

SEQ ID NO: 281407 - RNA, 19 nt, Artificial Sequence
  Synthetic
ccacacagggaaaggcugc

SEQ ID NO: 281408 - RNA, 20 nt, Artificial Sequence
  Synthetic
cccacacagggaaaggcugc

SEQ ID NO: 281409 - RNA, 21 nt, Artificial Sequence
  Synthetic
acccacacagggaaaggcugc

SEQ ID NO: 281410 - RNA, 22 nt, Artificial Sequence
  Synthetic
cacccacacagggaaaggcugc

SEQ ID NO: 281411 - RNA, 23 nt, Artificial Sequence
  Synthetic
ucacccacacagggaaaggcugc

SEQ ID NO: 281412 - RNA, 24 nt, Artificial Sequence
  Synthetic
cucacccacacagggaaaggcugc

SEQ ID NO: 281413 - RNA, 18 nt, Artificial Sequence
  Synthetic
ucaaggcugcaaggcugc

SEQ ID NO: 281414 - RNA, 19 nt, Artificial Sequence
  Synthetic
gucaaggcugcaaggcugc

SEQ ID NO: 281415 - RNA, 20 nt, Artificial Sequence
  Synthetic
ggucaaggcugcaaggcugc

SEQ ID NO: 281416 - RNA, 21 nt, Artificial Sequence
  Synthetic
aggucaaggcugcaaggcugc

SEQ ID NO: 281417 - RNA, 22 nt, Artificial Sequence
  Synthetic
gaggucaaggcugcaaggcugc

SEQ ID NO: 281418 - RNA, 23 nt, Artificial Sequence
  Synthetic
ggaggucaaggcugcaaggcugc

SEQ ID NO: 281419 - RNA, 24 nt, Artificial Sequence
  Synthetic
gggaggucaaggcugcaaggcugc

SEQ ID NO: 281420 - RNA, 18 nt, Artificial Sequence
  Synthetic
ggguggccuugaggcugc

SEQ ID NO: 281421 - RNA, 19 nt, Artificial Sequence
  Synthetic
aggguggccuugaggcugc

SEQ ID NO: 281422 - RNA, 20 nt, Artificial Sequence
  Synthetic
gaggguggccuugaggcugc

SEQ ID NO: 281423 - RNA, 21 nt, Artificial Sequence
  Synthetic
ggaggguggccuugaggcugc

SEQ ID NO: 281424 - RNA, 22 nt, Artificial Sequence
  Synthetic
uggaggguggccuugaggcugc

SEQ ID NO: 281425 - RNA, 23 nt, Artificial Sequence
  Synthetic
uuggaggguggccuugaggcugc

SEQ ID NO: 281426 - RNA, 24 nt, Artificial Sequence
  Synthetic
guuggaggguggccuugaggcugc

SEQ ID NO: 281427 - RNA, 18 nt, Artificial Sequence
  Synthetic
uagauugacuucggcugc

SEQ ID NO: 281428 - RNA, 19 nt, Artificial Sequence
  Synthetic
guagauugacuucggcugc

SEQ ID NO: 281429 - RNA, 20 nt, Artificial Sequence
  Synthetic
uguagauugacuucggcugc

SEQ ID NO: 281430 - RNA, 21 nt, Artificial Sequence
  Synthetic
uuguagauugacuucggcugc

SEQ ID NO: 281431 - RNA, 22 nt, Artificial Sequence
  Synthetic
uuuguagauugacuucggcugc

SEQ ID NO: 281432 - RNA, 23 nt, Artificial Sequence
  Synthetic
auuuguagauugacuucggcugc

SEQ ID NO: 281433 - RNA, 24 nt, Artificial Sequence
  Synthetic
uauuuguagauugacuucggcugc

SEQ ID NO: 281434 - RNA, 18 nt, Artificial Sequence
  Synthetic
ucacugaaugagggcugc

SEQ ID NO: 281435 - RNA, 19 nt, Artificial Sequence
  Synthetic
gucacugaaugagggcugc

SEQ ID NO: 281436 - RNA, 20 nt, Artificial Sequence
  Synthetic
agucacugaaugagggcugc

SEQ ID NO: 281437 - RNA, 21 nt, Artificial Sequence
  Synthetic
cagucacugaaugagggcugc

SEQ ID NO: 281438 - RNA, 22 nt, Artificial Sequence
  Synthetic
ucagucacugaaugagggcugc

SEQ ID NO: 281439 - RNA, 23 nt, Artificial Sequence
  Synthetic
aucagucacugaaugagggcugc

SEQ ID NO: 281440 - RNA, 24 nt, Artificial Sequence
  Synthetic
caucagucacugaaugagggcugc

SEQ ID NO: 281441 - RNA, 18 nt, Artificial Sequence
  Synthetic
uaagaugcuuugggcugc

SEQ ID NO: 281442 - RNA, 19 nt, Artificial Sequence
  Synthetic
uuaagaugcuuugggcugc

SEQ ID NO: 281443 - RNA, 20 nt, Artificial Sequence
  Synthetic
guuaagaugcuuugggcugc

SEQ ID NO: 281444 - RNA, 21 nt, Artificial Sequence
  Synthetic
aguuaagaugcuuugggcugc

SEQ ID NO: 281445 - RNA, 22 nt, Artificial Sequence
  Synthetic
uaguuaagaugcuuugggcugc

SEQ ID NO: 281446 - RNA, 23 nt, Artificial Sequence
  Synthetic
auaguuaagaugcuuugggcugc

SEQ ID NO: 281447 - RNA, 24 nt, Artificial Sequence
  Synthetic
aauaguuaagaugcuuugggcugc

SEQ ID NO: 281448 - RNA, 18 nt, Artificial Sequence
  Synthetic
cuugggggaacuggcugc

SEQ ID NO: 281449 - RNA, 19 nt, Artificial Sequence
  Synthetic
gcuugggggaacuggcugc

SEQ ID NO: 281450 - RNA, 20 nt, Artificial Sequence
  Synthetic
ugcuugggggaacuggcugc

SEQ ID NO: 281451 - RNA, 21 nt, Artificial Sequence
  Synthetic
uugcuugggggaacuggcugc

SEQ ID NO: 281452 - RNA, 22 nt, Artificial Sequence
  Synthetic
uuugcuugggggaacuggcugc

SEQ ID NO: 281453 - RNA, 23 nt, Artificial Sequence
  Synthetic
uuuugcuugggggaacuggcugc

SEQ ID NO: 281454 - RNA, 24 nt, Artificial Sequence
  Synthetic
uuuuugcuugggggaacuggcugc

SEQ ID NO: 281455 - RNA, 18 nt, Artificial Sequence
  Synthetic
aguguuccauuuggcugc

SEQ ID NO: 281456 - RNA, 19 nt, Artificial Sequence
  Synthetic
gaguguuccauuuggcugc

SEQ ID NO: 281457 - RNA, 20 nt, Artificial Sequence
  Synthetic
agaguguuccauuuggcugc

SEQ ID NO: 281458 - RNA, 21 nt, Artificial Sequence
  Synthetic
uagaguguuccauuuggcugc

SEQ ID NO: 281459 - RNA, 22 nt, Artificial Sequence
  Synthetic
auagaguguuccauuuggcugc

SEQ ID NO: 281460 - RNA, 23 nt, Artificial Sequence
  Synthetic
uauagaguguuccauuuggcugc

SEQ ID NO: 281461 - RNA, 24 nt, Artificial Sequence
  Synthetic
auauagaguguuccauuuggcugc

SEQ ID NO: 281462 - RNA, 18 nt, Artificial Sequence
  Synthetic
agaaaaauauuuggcugc

SEQ ID NO: 281463 - RNA, 19 nt, Artificial Sequence
  Synthetic
gagaaaaauauuuggcugc

SEQ ID NO: 281464 - RNA, 20 nt, Artificial Sequence
  Synthetic
ggagaaaaauauuuggcugc

SEQ ID NO: 281465 - RNA, 21 nt, Artificial Sequence
  Synthetic
aggagaaaaauauuuggcugc

SEQ ID NO: 281466 - RNA, 22 nt, Artificial Sequence
  Synthetic
aaggagaaaaauauuuggcugc

SEQ ID NO: 281467 - RNA, 23 nt, Artificial Sequence
  Synthetic
aaaggagaaaaauauuuggcugc

SEQ ID NO: 281468 - RNA, 24 nt, Artificial Sequence
  Synthetic
caaaggagaaaaauauuuggcugc

SEQ ID NO: 281469 - RNA, 18 nt, Artificial Sequence
  Synthetic
ccaggggcuggcugcugc

SEQ ID NO: 281470 - RNA, 19 nt, Artificial Sequence
  Synthetic
gccaggggcuggcugcugc

SEQ ID NO: 281471 - RNA, 20 nt, Artificial Sequence
  Synthetic
ggccaggggcuggcugcugc

SEQ ID NO: 281472 - RNA, 21 nt, Artificial Sequence
  Synthetic
uggccaggggcuggcugcugc

SEQ ID NO: 281473 - RNA, 22 nt, Artificial Sequence
  Synthetic
uuggccaggggcuggcugcugc

SEQ ID NO: 281474 - RNA, 23 nt, Artificial Sequence
  Synthetic
auuggccaggggcuggcugcugc

SEQ ID NO: 281475 - RNA, 24 nt, Artificial Sequence
  Synthetic
cauuggccaggggcuggcugcugc

SEQ ID NO: 281476 - RNA, 18 nt, Artificial Sequence
  Synthetic
agacacauuugcugcugc

SEQ ID NO: 281477 - RNA, 19 nt, Artificial Sequence
  Synthetic
cagacacauuugcugcugc

SEQ ID NO: 281478 - RNA, 20 nt, Artificial Sequence
  Synthetic
ucagacacauuugcugcugc

SEQ ID NO: 281479 - RNA, 21 nt, Artificial Sequence
  Synthetic
uucagacacauuugcugcugc

SEQ ID NO: 281480 - RNA, 22 nt, Artificial Sequence
  Synthetic
uuucagacacauuugcugcugc

SEQ ID NO: 281481 - RNA, 23 nt, Artificial Sequence
  Synthetic
cuuucagacacauuugcugcugc

SEQ ID NO: 281482 - RNA, 24 nt, Artificial Sequence
  Synthetic
gcuuucagacacauuugcugcugc

SEQ ID NO: 281483 - RNA, 18 nt, Artificial Sequence
  Synthetic
uuacccuuuuauugcugc

SEQ ID NO: 281484 - RNA, 19 nt, Artificial Sequence
  Synthetic
guuacccuuuuauugcugc

SEQ ID NO: 281485 - RNA, 20 nt, Artificial Sequence
  Synthetic
uguuacccuuuuauugcugc

SEQ ID NO: 281486 - RNA, 21 nt, Artificial Sequence
  Synthetic
uuguuacccuuuuauugcugc

SEQ ID NO: 281487 - RNA, 22 nt, Artificial Sequence
  Synthetic
auuguuacccuuuuauugcugc

SEQ ID NO: 281488 - RNA, 23 nt, Artificial Sequence
  Synthetic
uauuguuacccuuuuauugcugc

SEQ ID NO: 281489 - RNA, 24 nt, Artificial Sequence
  Synthetic
auauuguuacccuuuuauugcugc

SEQ ID NO: 281490 - RNA, 18 nt, Artificial Sequence
  Synthetic
aagacauagccuugcugc

SEQ ID NO: 281491 - RNA, 19 nt, Artificial Sequence
  Synthetic
aaagacauagccuugcugc

SEQ ID NO: 281492 - RNA, 20 nt, Artificial Sequence
  Synthetic
uaaagacauagccuugcugc

SEQ ID NO: 281493 - RNA, 21 nt, Artificial Sequence
  Synthetic
auaaagacauagccuugcugc

SEQ ID NO: 281494 - RNA, 22 nt, Artificial Sequence
  Synthetic
aauaaagacauagccuugcugc

SEQ ID NO: 281495 - RNA, 23 nt, Artificial Sequence
  Synthetic
gaauaaagacauagccuugcugc

SEQ ID NO: 281496 - RNA, 24 nt, Artificial Sequence
  Synthetic
agaauaaagacauagccuugcugc

SEQ ID NO: 281497 - RNA, 18 nt, Artificial Sequence
  Synthetic
gcagauacugcuugcugc

SEQ ID NO: 281498 - RNA, 19 nt, Artificial Sequence
  Synthetic
agcagauacugcuugcugc

SEQ ID NO: 281499 - RNA, 20 nt, Artificial Sequence
  Synthetic
aagcagauacugcuugcugc

SEQ ID NO: 281500 - RNA, 21 nt, Artificial Sequence
  Synthetic
aaagcagauacugcuugcugc

SEQ ID NO: 281501 - RNA, 22 nt, Artificial Sequence
  Synthetic
caaagcagauacugcuugcugc

SEQ ID NO: 281502 - RNA, 23 nt, Artificial Sequence
  Synthetic
gcaaagcagauacugcuugcugc

SEQ ID NO: 281503 - RNA, 24 nt, Artificial Sequence
  Synthetic
ugcaaagcagauacugcuugcugc

SEQ ID NO: 281504 - RNA, 18 nt, Artificial Sequence
  Synthetic
agaaugcaguguugcugc

SEQ ID NO: 281505 - RNA, 19 nt, Artificial Sequence
  Synthetic
uagaaugcaguguugcugc

SEQ ID NO: 281506 - RNA, 20 nt, Artificial Sequence
  Synthetic
cuagaaugcaguguugcugc

SEQ ID NO: 281507 - RNA, 21 nt, Artificial Sequence
  Synthetic
acuagaaugcaguguugcugc

SEQ ID NO: 281508 - RNA, 22 nt, Artificial Sequence
  Synthetic
uacuagaaugcaguguugcugc

SEQ ID NO: 281509 - RNA, 23 nt, Artificial Sequence
  Synthetic
cuacuagaaugcaguguugcugc

SEQ ID NO: 281510 - RNA, 24 nt, Artificial Sequence
  Synthetic
ucuacuagaaugcaguguugcugc

SEQ ID NO: 281511 - RNA, 18 nt, Artificial Sequence
  Synthetic
caggcagaaguuugcugc

SEQ ID NO: 281512 - RNA, 19 nt, Artificial Sequence
  Synthetic
ccaggcagaaguuugcugc

SEQ ID NO: 281513 - RNA, 20 nt, Artificial Sequence
  Synthetic
uccaggcagaaguuugcugc

SEQ ID NO: 281514 - RNA, 21 nt, Artificial Sequence
  Synthetic
guccaggcagaaguuugcugc

SEQ ID NO: 281515 - RNA, 22 nt, Artificial Sequence
  Synthetic
uguccaggcagaaguuugcugc

SEQ ID NO: 281516 - RNA, 23 nt, Artificial Sequence
  Synthetic
guguccaggcagaaguuugcugc

SEQ ID NO: 281517 - RNA, 24 nt, Artificial Sequence
  Synthetic
gguguccaggcagaaguuugcugc

SEQ ID NO: 281518 - RNA, 18 nt, Artificial Sequence
  Synthetic
uuaauuauuaaaaucugc

SEQ ID NO: 281519 - RNA, 19 nt, Artificial Sequence
  Synthetic
auuaauuauuaaaaucugc

SEQ ID NO: 281520 - RNA, 20 nt, Artificial Sequence
  Synthetic
gauuaauuauuaaaaucugc

SEQ ID NO: 281521 - RNA, 21 nt, Artificial Sequence
  Synthetic
ugauuaauuauuaaaaucugc

SEQ ID NO: 281522 - RNA, 22 nt, Artificial Sequence
  Synthetic
uugauuaauuauuaaaaucugc

SEQ ID NO: 281523 - RNA, 23 nt, Artificial Sequence
  Synthetic
auugauuaauuauuaaaaucugc

SEQ ID NO: 281524 - RNA, 24 nt, Artificial Sequence
  Synthetic
uauugauuaauuauuaaaaucugc

SEQ ID NO: 281525 - RNA, 18 nt, Artificial Sequence
  Synthetic
ccaaggaauuaaaucugc

SEQ ID NO: 281526 - RNA, 19 nt, Artificial Sequence
  Synthetic
cccaaggaauuaaaucugc

SEQ ID NO: 281527 - RNA, 20 nt, Artificial Sequence
  Synthetic
acccaaggaauuaaaucugc

SEQ ID NO: 281528 - RNA, 21 nt, Artificial Sequence
  Synthetic
gacccaaggaauuaaaucugc

SEQ ID NO: 281529 - RNA, 22 nt, Artificial Sequence
  Synthetic
agacccaaggaauuaaaucugc

SEQ ID NO: 281530 - RNA, 23 nt, Artificial Sequence
  Synthetic
uagacccaaggaauuaaaucugc

SEQ ID NO: 281531 - RNA, 24 nt, Artificial Sequence
  Synthetic
cuagacccaaggaauuaaaucugc

SEQ ID NO: 281532 - RNA, 18 nt, Artificial Sequence
  Synthetic
aaucccucaaacaucugc

SEQ ID NO: 281533 - RNA, 19 nt, Artificial Sequence
  Synthetic
uaaucccucaaacaucugc

SEQ ID NO: 281534 - RNA, 20 nt, Artificial Sequence
  Synthetic
uuaaucccucaaacaucugc

SEQ ID NO: 281535 - RNA, 21 nt, Artificial Sequence
  Synthetic
auuaaucccucaaacaucugc

SEQ ID NO: 281536 - RNA, 22 nt, Artificial Sequence
  Synthetic
aauuaaucccucaaacaucugc

SEQ ID NO: 281537 - RNA, 23 nt, Artificial Sequence
  Synthetic
uaauuaaucccucaaacaucugc

SEQ ID NO: 281538 - RNA, 24 nt, Artificial Sequence
  Synthetic
auaauuaaucccucaaacaucugc

SEQ ID NO: 281539 - RNA, 18 nt, Artificial Sequence
  Synthetic
augcaauucugacucugc

SEQ ID NO: 281540 - RNA, 19 nt, Artificial Sequence
  Synthetic
gaugcaauucugacucugc

SEQ ID NO: 281541 - RNA, 20 nt, Artificial Sequence
  Synthetic
agaugcaauucugacucugc

SEQ ID NO: 281542 - RNA, 21 nt, Artificial Sequence
  Synthetic
aagaugcaauucugacucugc

SEQ ID NO: 281543 - RNA, 22 nt, Artificial Sequence
  Synthetic
caagaugcaauucugacucugc

SEQ ID NO: 281544 - RNA, 23 nt, Artificial Sequence
  Synthetic
ucaagaugcaauucugacucugc

SEQ ID NO: 281545 - RNA, 24 nt, Artificial Sequence
  Synthetic
aucaagaugcaauucugacucugc

SEQ ID NO: 281546 - RNA, 18 nt, Artificial Sequence
  Synthetic
aucugagaccaccucugc

SEQ ID NO: 281547 - RNA, 19 nt, Artificial Sequence
  Synthetic
caucugagaccaccucugc

SEQ ID NO: 281548 - RNA, 20 nt, Artificial Sequence
  Synthetic
ccaucugagaccaccucugc

SEQ ID NO: 281549 - RNA, 21 nt, Artificial Sequence
  Synthetic
uccaucugagaccaccucugc

SEQ ID NO: 281550 - RNA, 22 nt, Artificial Sequence
  Synthetic
cuccaucugagaccaccucugc

SEQ ID NO: 281551 - RNA, 23 nt, Artificial Sequence
  Synthetic
ucuccaucugagaccaccucugc

SEQ ID NO: 281552 - RNA, 24 nt, Artificial Sequence
  Synthetic
aucuccaucugagaccaccucugc

SEQ ID NO: 281553 - RNA, 18 nt, Artificial Sequence
  Synthetic
acuugcuuuucccucugc

SEQ ID NO: 281554 - RNA, 19 nt, Artificial Sequence
  Synthetic
aacuugcuuuucccucugc

SEQ ID NO: 281555 - RNA, 20 nt, Artificial Sequence
  Synthetic
gaacuugcuuuucccucugc

SEQ ID NO: 281556 - RNA, 21 nt, Artificial Sequence
  Synthetic
ggaacuugcuuuucccucugc

SEQ ID NO: 281557 - RNA, 22 nt, Artificial Sequence
  Synthetic
uggaacuugcuuuucccucugc

SEQ ID NO: 281558 - RNA, 23 nt, Artificial Sequence
  Synthetic
auggaacuugcuuuucccucugc

SEQ ID NO: 281559 - RNA, 24 nt, Artificial Sequence
  Synthetic
aauggaacuugcuuuucccucugc

SEQ ID NO: 281560 - RNA, 18 nt, Artificial Sequence
  Synthetic
acuguauugaaucucugc

SEQ ID NO: 281561 - RNA, 19 nt, Artificial Sequence
  Synthetic
cacuguauugaaucucugc

SEQ ID NO: 281562 - RNA, 20 nt, Artificial Sequence
  Synthetic
acacuguauugaaucucugc

SEQ ID NO: 281563 - RNA, 21 nt, Artificial Sequence
  Synthetic
aacacuguauugaaucucugc

SEQ ID NO: 281564 - RNA, 22 nt, Artificial Sequence
  Synthetic
uaacacuguauugaaucucugc

SEQ ID NO: 281565 - RNA, 23 nt, Artificial Sequence
  Synthetic
guaacacuguauugaaucucugc

SEQ ID NO: 281566 - RNA, 24 nt, Artificial Sequence
  Synthetic
gguaacacuguauugaaucucugc

SEQ ID NO: 281567 - RNA, 18 nt, Artificial Sequence
  Synthetic
cauggaaaaccucucugc

SEQ ID NO: 281568 - RNA, 19 nt, Artificial Sequence
  Synthetic
ucauggaaaaccucucugc

SEQ ID NO: 281569 - RNA, 20 nt, Artificial Sequence
  Synthetic
cucauggaaaaccucucugc

SEQ ID NO: 281570 - RNA, 21 nt, Artificial Sequence
  Synthetic
ccucauggaaaaccucucugc

SEQ ID NO: 281571 - RNA, 22 nt, Artificial Sequence
  Synthetic
cccucauggaaaaccucucugc

SEQ ID NO: 281572 - RNA, 23 nt, Artificial Sequence
  Synthetic
gcccucauggaaaaccucucugc

SEQ ID NO: 281573 - RNA, 24 nt, Artificial Sequence
  Synthetic
ggcccucauggaaaaccucucugc

SEQ ID NO: 281574 - RNA, 18 nt, Artificial Sequence
  Synthetic
aagaaaguuauucucugc

SEQ ID NO: 281575 - RNA, 19 nt, Artificial Sequence
  Synthetic
aaagaaaguuauucucugc

SEQ ID NO: 281576 - RNA, 20 nt, Artificial Sequence
  Synthetic
caaagaaaguuauucucugc

SEQ ID NO: 281577 - RNA, 21 nt, Artificial Sequence
  Synthetic
acaaagaaaguuauucucugc

SEQ ID NO: 281578 - RNA, 22 nt, Artificial Sequence
  Synthetic
uacaaagaaaguuauucucugc

SEQ ID NO: 281579 - RNA, 23 nt, Artificial Sequence
  Synthetic
uuacaaagaaaguuauucucugc

SEQ ID NO: 281580 - RNA, 24 nt, Artificial Sequence
  Synthetic
guuacaaagaaaguuauucucugc

SEQ ID NO: 281581 - RNA, 18 nt, Artificial Sequence
  Synthetic
caagcuuuuuuucucugc

SEQ ID NO: 281582 - RNA, 19 nt, Artificial Sequence
  Synthetic
ccaagcuuuuuuucucugc

SEQ ID NO: 281583 - RNA, 20 nt, Artificial Sequence
  Synthetic
accaagcuuuuuuucucugc

SEQ ID NO: 281584 - RNA, 21 nt, Artificial Sequence
  Synthetic
caccaagcuuuuuuucucugc

SEQ ID NO: 281585 - RNA, 22 nt, Artificial Sequence
  Synthetic
acaccaagcuuuuuuucucugc

SEQ ID NO: 281586 - RNA, 23 nt, Artificial Sequence
  Synthetic
uacaccaagcuuuuuuucucugc

SEQ ID NO: 281587 - RNA, 24 nt, Artificial Sequence
  Synthetic
uuacaccaagcuuuuuuucucugc

SEQ ID NO: 281588 - RNA, 18 nt, Artificial Sequence
  Synthetic
caaaccagaacagucugc

SEQ ID NO: 281589 - RNA, 19 nt, Artificial Sequence
  Synthetic
gcaaaccagaacagucugc

SEQ ID NO: 281590 - RNA, 20 nt, Artificial Sequence
  Synthetic
ugcaaaccagaacagucugc

SEQ ID NO: 281591 - RNA, 21 nt, Artificial Sequence
  Synthetic
uugcaaaccagaacagucugc

SEQ ID NO: 281592 - RNA, 22 nt, Artificial Sequence
  Synthetic
auugcaaaccagaacagucugc

SEQ ID NO: 281593 - RNA, 23 nt, Artificial Sequence
  Synthetic
uauugcaaaccagaacagucugc

SEQ ID NO: 281594 - RNA, 24 nt, Artificial Sequence
  Synthetic
auauugcaaaccagaacagucugc

SEQ ID NO: 281595 - RNA, 18 nt, Artificial Sequence
  Synthetic
aaccuuucgacugucugc

SEQ ID NO: 281596 - RNA, 19 nt, Artificial Sequence
  Synthetic
gaaccuuucgacugucugc

SEQ ID NO: 281597 - RNA, 20 nt, Artificial Sequence
  Synthetic
ugaaccuuucgacugucugc

SEQ ID NO: 281598 - RNA, 21 nt, Artificial Sequence
  Synthetic
augaaccuuucgacugucugc

SEQ ID NO: 281599 - RNA, 22 nt, Artificial Sequence
  Synthetic
caugaaccuuucgacugucugc

SEQ ID NO: 281600 - RNA, 23 nt, Artificial Sequence
  Synthetic
ccaugaaccuuucgacugucugc

SEQ ID NO: 281601 - RNA, 24 nt, Artificial Sequence
  Synthetic
gccaugaaccuuucgacugucugc

SEQ ID NO: 281602 - RNA, 18 nt, Artificial Sequence
  Synthetic
acauugucaguugucugc

SEQ ID NO: 281603 - RNA, 19 nt, Artificial Sequence
  Synthetic
uacauugucaguugucugc

SEQ ID NO: 281604 - RNA, 20 nt, Artificial Sequence
  Synthetic
uuacauugucaguugucugc

SEQ ID NO: 281605 - RNA, 21 nt, Artificial Sequence
  Synthetic
uuuacauugucaguugucugc

SEQ ID NO: 281606 - RNA, 22 nt, Artificial Sequence
  Synthetic
cuuuacauugucaguugucugc

SEQ ID NO: 281607 - RNA, 23 nt, Artificial Sequence
  Synthetic
ccuuuacauugucaguugucugc

SEQ ID NO: 281608 - RNA, 24 nt, Artificial Sequence
  Synthetic
accuuuacauugucaguugucugc

SEQ ID NO: 281609 - RNA, 18 nt, Artificial Sequence
  Synthetic
ugauauaaaccauucugc

SEQ ID NO: 281610 - RNA, 19 nt, Artificial Sequence
  Synthetic
augauauaaaccauucugc

SEQ ID NO: 281611 - RNA, 20 nt, Artificial Sequence
  Synthetic
uaugauauaaaccauucugc

SEQ ID NO: 281612 - RNA, 21 nt, Artificial Sequence
  Synthetic
uuaugauauaaaccauucugc

SEQ ID NO: 281613 - RNA, 22 nt, Artificial Sequence
  Synthetic
cuuaugauauaaaccauucugc

SEQ ID NO: 281614 - RNA, 23 nt, Artificial Sequence
  Synthetic
ucuuaugauauaaaccauucugc

SEQ ID NO: 281615 - RNA, 24 nt, Artificial Sequence
  Synthetic
cucuuaugauauaaaccauucugc

SEQ ID NO: 281616 - RNA, 18 nt, Artificial Sequence
  Synthetic
caugauucuugauucugc

SEQ ID NO: 281617 - RNA, 19 nt, Artificial Sequence
  Synthetic
ucaugauucuugauucugc

SEQ ID NO: 281618 - RNA, 20 nt, Artificial Sequence
  Synthetic
cucaugauucuugauucugc

SEQ ID NO: 281619 - RNA, 21 nt, Artificial Sequence
  Synthetic
gcucaugauucuugauucugc

SEQ ID NO: 281620 - RNA, 22 nt, Artificial Sequence
  Synthetic
agcucaugauucuugauucugc

SEQ ID NO: 281621 - RNA, 23 nt, Artificial Sequence
  Synthetic
uagcucaugauucuugauucugc

SEQ ID NO: 281622 - RNA, 24 nt, Artificial Sequence
  Synthetic
uuagcucaugauucuugauucugc

SEQ ID NO: 281623 - RNA, 18 nt, Artificial Sequence
  Synthetic
uggcuuugacuauucugc

SEQ ID NO: 281624 - RNA, 19 nt, Artificial Sequence
  Synthetic
uuggcuuugacuauucugc

SEQ ID NO: 281625 - RNA, 20 nt, Artificial Sequence
  Synthetic
cuuggcuuugacuauucugc

SEQ ID NO: 281626 - RNA, 21 nt, Artificial Sequence
  Synthetic
ccuuggcuuugacuauucugc

SEQ ID NO: 281627 - RNA, 22 nt, Artificial Sequence
  Synthetic
cccuuggcuuugacuauucugc

SEQ ID NO: 281628 - RNA, 23 nt, Artificial Sequence
  Synthetic
ucccuuggcuuugacuauucugc

SEQ ID NO: 281629 - RNA, 24 nt, Artificial Sequence
  Synthetic
uucccuuggcuuugacuauucugc

SEQ ID NO: 281630 - RNA, 18 nt, Artificial Sequence
  Synthetic
ccugcagcagacuucugc

SEQ ID NO: 281631 - RNA, 19 nt, Artificial Sequence
  Synthetic
uccugcagcagacuucugc

SEQ ID NO: 281632 - RNA, 20 nt, Artificial Sequence
  Synthetic
uuccugcagcagacuucugc

SEQ ID NO: 281633 - RNA, 21 nt, Artificial Sequence
  Synthetic
auuccugcagcagacuucugc

SEQ ID NO: 281634 - RNA, 22 nt, Artificial Sequence
  Synthetic
cauuccugcagcagacuucugc

SEQ ID NO: 281635 - RNA, 23 nt, Artificial Sequence
  Synthetic
ucauuccugcagcagacuucugc

SEQ ID NO: 281636 - RNA, 24 nt, Artificial Sequence
  Synthetic
uucauuccugcagcagacuucugc

SEQ ID NO: 281637 - RNA, 18 nt, Artificial Sequence
  Synthetic
gguucuugagccuucugc

SEQ ID NO: 281638 - RNA, 19 nt, Artificial Sequence
  Synthetic
ugguucuugagccuucugc

SEQ ID NO: 281639 - RNA, 20 nt, Artificial Sequence
  Synthetic
augguucuugagccuucugc

SEQ ID NO: 281640 - RNA, 21 nt, Artificial Sequence
  Synthetic
caugguucuugagccuucugc

SEQ ID NO: 281641 - RNA, 22 nt, Artificial Sequence
  Synthetic
acaugguucuugagccuucugc

SEQ ID NO: 281642 - RNA, 23 nt, Artificial Sequence
  Synthetic
aacaugguucuugagccuucugc

SEQ ID NO: 281643 - RNA, 24 nt, Artificial Sequence
  Synthetic
gaacaugguucuugagccuucugc

SEQ ID NO: 281644 - RNA, 18 nt, Artificial Sequence
  Synthetic
auaauaaaauaguucugc

SEQ ID NO: 281645 - RNA, 19 nt, Artificial Sequence
  Synthetic
aauaauaaaauaguucugc

SEQ ID NO: 281646 - RNA, 20 nt, Artificial Sequence
  Synthetic
aaauaauaaaauaguucugc

SEQ ID NO: 281647 - RNA, 21 nt, Artificial Sequence
  Synthetic
aaaauaauaaaauaguucugc

SEQ ID NO: 281648 - RNA, 22 nt, Artificial Sequence
  Synthetic
gaaaauaauaaaauaguucugc

SEQ ID NO: 281649 - RNA, 23 nt, Artificial Sequence
  Synthetic
agaaaauaauaaaauaguucugc

SEQ ID NO: 281650 - RNA, 24 nt, Artificial Sequence
  Synthetic
uagaaaauaauaaaauaguucugc

SEQ ID NO: 281651 - RNA, 18 nt, Artificial Sequence
  Synthetic
ucaucacuccauuucugc

SEQ ID NO: 281652 - RNA, 19 nt, Artificial Sequence
  Synthetic
cucaucacuccauuucugc

SEQ ID NO: 281653 - RNA, 20 nt, Artificial Sequence
  Synthetic
ccucaucacuccauuucugc

SEQ ID NO: 281654 - RNA, 21 nt, Artificial Sequence
  Synthetic
uccucaucacuccauuucugc

SEQ ID NO: 281655 - RNA, 22 nt, Artificial Sequence
  Synthetic
cuccucaucacuccauuucugc

SEQ ID NO: 281656 - RNA, 23 nt, Artificial Sequence
  Synthetic
gcuccucaucacuccauuucugc

SEQ ID NO: 281657 - RNA, 24 nt, Artificial Sequence
  Synthetic
ugcuccucaucacuccauuucugc

SEQ ID NO: 281658 - RNA, 18 nt, Artificial Sequence
  Synthetic
uuuuugagagauuucugc

SEQ ID NO: 281659 - RNA, 19 nt, Artificial Sequence
  Synthetic
uuuuuugagagauuucugc

SEQ ID NO: 281660 - RNA, 20 nt, Artificial Sequence
  Synthetic
guuuuuugagagauuucugc

SEQ ID NO: 281661 - RNA, 21 nt, Artificial Sequence
  Synthetic
gguuuuuugagagauuucugc

SEQ ID NO: 281662 - RNA, 22 nt, Artificial Sequence
  Synthetic
ugguuuuuugagagauuucugc

SEQ ID NO: 281663 - RNA, 23 nt, Artificial Sequence
  Synthetic
gugguuuuuugagagauuucugc

SEQ ID NO: 281664 - RNA, 24 nt, Artificial Sequence
  Synthetic
ugugguuuuuugagagauuucugc

SEQ ID NO: 281665 - RNA, 18 nt, Artificial Sequence
  Synthetic
gcauaaugggguuucugc

SEQ ID NO: 281666 - RNA, 19 nt, Artificial Sequence
  Synthetic
agcauaaugggguuucugc

SEQ ID NO: 281667 - RNA, 20 nt, Artificial Sequence
  Synthetic
uagcauaaugggguuucugc

SEQ ID NO: 281668 - RNA, 21 nt, Artificial Sequence
  Synthetic
guagcauaaugggguuucugc

SEQ ID NO: 281669 - RNA, 22 nt, Artificial Sequence
  Synthetic
uguagcauaaugggguuucugc

SEQ ID NO: 281670 - RNA, 23 nt, Artificial Sequence
  Synthetic
auguagcauaaugggguuucugc

SEQ ID NO: 281671 - RNA, 24 nt, Artificial Sequence
  Synthetic
aauguagcauaaugggguuucugc

SEQ ID NO: 281672 - RNA, 18 nt, Artificial Sequence
  Synthetic
guuguguauguuuucugc

SEQ ID NO: 281673 - RNA, 19 nt, Artificial Sequence
  Synthetic
uguuguguauguuuucugc

SEQ ID NO: 281674 - RNA, 20 nt, Artificial Sequence
  Synthetic
guguuguguauguuuucugc

SEQ ID NO: 281675 - RNA, 21 nt, Artificial Sequence
  Synthetic
gguguuguguauguuuucugc

SEQ ID NO: 281676 - RNA, 22 nt, Artificial Sequence
  Synthetic
agguguuguguauguuuucugc

SEQ ID NO: 281677 - RNA, 23 nt, Artificial Sequence
  Synthetic
aagguguuguguauguuuucugc

SEQ ID NO: 281678 - RNA, 24 nt, Artificial Sequence
  Synthetic
gaagguguuguguauguuuucugc

SEQ ID NO: 281679 - RNA, 18 nt, Artificial Sequence
  Synthetic
uuucagaacaacaagugc

SEQ ID NO: 281680 - RNA, 19 nt, Artificial Sequence
  Synthetic
cuuucagaacaacaagugc

SEQ ID NO: 281681 - RNA, 20 nt, Artificial Sequence
  Synthetic
gcuuucagaacaacaagugc

SEQ ID NO: 281682 - RNA, 21 nt, Artificial Sequence
  Synthetic
ggcuuucagaacaacaagugc

SEQ ID NO: 281683 - RNA, 22 nt, Artificial Sequence
  Synthetic
gggcuuucagaacaacaagugc

SEQ ID NO: 281684 - RNA, 23 nt, Artificial Sequence
  Synthetic
ggggcuuucagaacaacaagugc

SEQ ID NO: 281685 - RNA, 24 nt, Artificial Sequence
  Synthetic
aggggcuuucagaacaacaagugc

SEQ ID NO: 281686 - RNA, 18 nt, Artificial Sequence
  Synthetic
augacccuucagaagugc

SEQ ID NO: 281687 - RNA, 19 nt, Artificial Sequence
  Synthetic
aaugacccuucagaagugc

SEQ ID NO: 281688 - RNA, 20 nt, Artificial Sequence
  Synthetic
gaaugacccuucagaagugc

SEQ ID NO: 281689 - RNA, 21 nt, Artificial Sequence
  Synthetic
ggaaugacccuucagaagugc

SEQ ID NO: 281690 - RNA, 22 nt, Artificial Sequence
  Synthetic
uggaaugacccuucagaagugc

SEQ ID NO: 281691 - RNA, 23 nt, Artificial Sequence
  Synthetic
cuggaaugacccuucagaagugc

SEQ ID NO: 281692 - RNA, 24 nt, Artificial Sequence
  Synthetic
gcuggaaugacccuucagaagugc

SEQ ID NO: 281693 - RNA, 18 nt, Artificial Sequence
  Synthetic
uaaaugugugagaagugc

SEQ ID NO: 281694 - RNA, 19 nt, Artificial Sequence
  Synthetic
uuaaaugugugagaagugc

SEQ ID NO: 281695 - RNA, 20 nt, Artificial Sequence
  Synthetic
uuuaaaugugugagaagugc

SEQ ID NO: 281696 - RNA, 21 nt, Artificial Sequence
  Synthetic
auuuaaaugugugagaagugc

SEQ ID NO: 281697 - RNA, 22 nt, Artificial Sequence
  Synthetic
gauuuaaaugugugagaagugc

SEQ ID NO: 281698 - RNA, 23 nt, Artificial Sequence
  Synthetic
ggauuuaaaugugugagaagugc

SEQ ID NO: 281699 - RNA, 24 nt, Artificial Sequence
  Synthetic
uggauuuaaaugugugagaagugc

SEQ ID NO: 281700 - RNA, 18 nt, Artificial Sequence
  Synthetic
guuuaauauuagaagugc

SEQ ID NO: 281701 - RNA, 19 nt, Artificial Sequence
  Synthetic
aguuuaauauuagaagugc

SEQ ID NO: 281702 - RNA, 20 nt, Artificial Sequence
  Synthetic
gaguuuaauauuagaagugc

SEQ ID NO: 281703 - RNA, 21 nt, Artificial Sequence
  Synthetic
ugaguuuaauauuagaagugc

SEQ ID NO: 281704 - RNA, 22 nt, Artificial Sequence
  Synthetic
cugaguuuaauauuagaagugc

SEQ ID NO: 281705 - RNA, 23 nt, Artificial Sequence
  Synthetic
ucugaguuuaauauuagaagugc

SEQ ID NO: 281706 - RNA, 24 nt, Artificial Sequence
  Synthetic
uucugaguuuaauauuagaagugc

SEQ ID NO: 281707 - RNA, 18 nt, Artificial Sequence
  Synthetic
ggcacugcuaggaagugc

SEQ ID NO: 281708 - RNA, 19 nt, Artificial Sequence
  Synthetic
aggcacugcuaggaagugc

SEQ ID NO: 281709 - RNA, 20 nt, Artificial Sequence
  Synthetic
caggcacugcuaggaagugc

SEQ ID NO: 281710 - RNA, 21 nt, Artificial Sequence
  Synthetic
ccaggcacugcuaggaagugc

SEQ ID NO: 281711 - RNA, 22 nt, Artificial Sequence
  Synthetic
gccaggcacugcuaggaagugc

SEQ ID NO: 281712 - RNA, 23 nt, Artificial Sequence
  Synthetic
ugccaggcacugcuaggaagugc

SEQ ID NO: 281713 - RNA, 24 nt, Artificial Sequence
  Synthetic
gugccaggcacugcuaggaagugc

SEQ ID NO: 281714 - RNA, 18 nt, Artificial Sequence
  Synthetic
aaaggcaaggggaagugc

SEQ ID NO: 281715 - RNA, 19 nt, Artificial Sequence
  Synthetic
gaaaggcaaggggaagugc

SEQ ID NO: 281716 - RNA, 20 nt, Artificial Sequence
  Synthetic
ggaaaggcaaggggaagugc

SEQ ID NO: 281717 - RNA, 21 nt, Artificial Sequence
  Synthetic
uggaaaggcaaggggaagugc

SEQ ID NO: 281718 - RNA, 22 nt, Artificial Sequence
  Synthetic
auggaaaggcaaggggaagugc

SEQ ID NO: 281719 - RNA, 23 nt, Artificial Sequence
  Synthetic
aauggaaaggcaaggggaagugc

SEQ ID NO: 281720 - RNA, 24 nt, Artificial Sequence
  Synthetic
aaauggaaaggcaaggggaagugc

SEQ ID NO: 281721 - RNA, 18 nt, Artificial Sequence
  Synthetic
auuaauguacugaagugc

SEQ ID NO: 281722 - RNA, 19 nt, Artificial Sequence
  Synthetic
aauuaauguacugaagugc

SEQ ID NO: 281723 - RNA, 20 nt, Artificial Sequence
  Synthetic
gaauuaauguacugaagugc

SEQ ID NO: 281724 - RNA, 21 nt, Artificial Sequence
  Synthetic
cgaauuaauguacugaagugc

SEQ ID NO: 281725 - RNA, 22 nt, Artificial Sequence
  Synthetic
gcgaauuaauguacugaagugc

SEQ ID NO: 281726 - RNA, 23 nt, Artificial Sequence
  Synthetic
ugcgaauuaauguacugaagugc

SEQ ID NO: 281727 - RNA, 24 nt, Artificial Sequence
  Synthetic
augcgaauuaauguacugaagugc

SEQ ID NO: 281728 - RNA, 18 nt, Artificial Sequence
  Synthetic
ugauggagagguaagugc

SEQ ID NO: 281729 - RNA, 19 nt, Artificial Sequence
  Synthetic
gugauggagagguaagugc

SEQ ID NO: 281730 - RNA, 20 nt, Artificial Sequence
  Synthetic
ggugauggagagguaagugc

SEQ ID NO: 281731 - RNA, 21 nt, Artificial Sequence
  Synthetic
uggugauggagagguaagugc

SEQ ID NO: 281732 - RNA, 22 nt, Artificial Sequence
  Synthetic
uuggugauggagagguaagugc

SEQ ID NO: 281733 - RNA, 23 nt, Artificial Sequence
  Synthetic
uuuggugauggagagguaagugc

SEQ ID NO: 281734 - RNA, 24 nt, Artificial Sequence
  Synthetic
uuuuggugauggagagguaagugc

SEQ ID NO: 281735 - RNA, 18 nt, Artificial Sequence
  Synthetic
cacuguugauuuaagugc

SEQ ID NO: 281736 - RNA, 19 nt, Artificial Sequence
  Synthetic
gcacuguugauuuaagugc

SEQ ID NO: 281737 - RNA, 20 nt, Artificial Sequence
  Synthetic
agcacuguugauuuaagugc

SEQ ID NO: 281738 - RNA, 21 nt, Artificial Sequence
  Synthetic
aagcacuguugauuuaagugc

SEQ ID NO: 281739 - RNA, 22 nt, Artificial Sequence
  Synthetic
aaagcacuguugauuuaagugc

SEQ ID NO: 281740 - RNA, 23 nt, Artificial Sequence
  Synthetic
aaaagcacuguugauuuaagugc

SEQ ID NO: 281741 - RNA, 24 nt, Artificial Sequence
  Synthetic
aaaaagcacuguugauuuaagugc

SEQ ID NO: 281742 - RNA, 18 nt, Artificial Sequence
  Synthetic
uagaacauggaacagugc

SEQ ID NO: 281743 - RNA, 19 nt, Artificial Sequence
  Synthetic
uuagaacauggaacagugc

SEQ ID NO: 281744 - RNA, 20 nt, Artificial Sequence
  Synthetic
uuuagaacauggaacagugc

SEQ ID NO: 281745 - RNA, 21 nt, Artificial Sequence
  Synthetic
cuuuagaacauggaacagugc

SEQ ID NO: 281746 - RNA, 22 nt, Artificial Sequence
  Synthetic
ucuuuagaacauggaacagugc

SEQ ID NO: 281747 - RNA, 23 nt, Artificial Sequence
  Synthetic
aucuuuagaacauggaacagugc

SEQ ID NO: 281748 - RNA, 24 nt, Artificial Sequence
  Synthetic
uaucuuuagaacauggaacagugc

SEQ ID NO: 281749 - RNA, 18 nt, Artificial Sequence
  Synthetic
aucuccauuucacagugc

SEQ ID NO: 281750 - RNA, 19 nt, Artificial Sequence
  Synthetic
uaucuccauuucacagugc

SEQ ID NO: 281751 - RNA, 20 nt, Artificial Sequence
  Synthetic
guaucuccauuucacagugc

SEQ ID NO: 281752 - RNA, 21 nt, Artificial Sequence
  Synthetic
aguaucuccauuucacagugc

SEQ ID NO: 281753 - RNA, 22 nt, Artificial Sequence
  Synthetic
caguaucuccauuucacagugc

SEQ ID NO: 281754 - RNA, 23 nt, Artificial Sequence
  Synthetic
ucaguaucuccauuucacagugc

SEQ ID NO: 281755 - RNA, 24 nt, Artificial Sequence
  Synthetic
cucaguaucuccauuucacagugc

SEQ ID NO: 281756 - RNA, 18 nt, Artificial Sequence
  Synthetic
acuuaaacacagcagugc

SEQ ID NO: 281757 - RNA, 19 nt, Artificial Sequence
  Synthetic
cacuuaaacacagcagugc

SEQ ID NO: 281758 - RNA, 20 nt, Artificial Sequence
  Synthetic
acacuuaaacacagcagugc

SEQ ID NO: 281759 - RNA, 21 nt, Artificial Sequence
  Synthetic
gacacuuaaacacagcagugc

SEQ ID NO: 281760 - RNA, 22 nt, Artificial Sequence
  Synthetic
agacacuuaaacacagcagugc

SEQ ID NO: 281761 - RNA, 23 nt, Artificial Sequence
  Synthetic
gagacacuuaaacacagcagugc

SEQ ID NO: 281762 - RNA, 24 nt, Artificial Sequence
  Synthetic
ggagacacuuaaacacagcagugc

SEQ ID NO: 281763 - RNA, 18 nt, Artificial Sequence
  Synthetic
ccaguaacauugcagugc

SEQ ID NO: 281764 - RNA, 19 nt, Artificial Sequence
  Synthetic
cccaguaacauugcagugc

SEQ ID NO: 281765 - RNA, 20 nt, Artificial Sequence
  Synthetic
ccccaguaacauugcagugc

SEQ ID NO: 281766 - RNA, 21 nt, Artificial Sequence
  Synthetic
uccccaguaacauugcagugc

SEQ ID NO: 281767 - RNA, 22 nt, Artificial Sequence
  Synthetic
auccccaguaacauugcagugc

SEQ ID NO: 281768 - RNA, 23 nt, Artificial Sequence
  Synthetic
uauccccaguaacauugcagugc

SEQ ID NO: 281769 - RNA, 24 nt, Artificial Sequence
  Synthetic
uuauccccaguaacauugcagugc

SEQ ID NO: 281770 - RNA, 18 nt, Artificial Sequence
  Synthetic
uuuucuggauaucagugc

SEQ ID NO: 281771 - RNA, 19 nt, Artificial Sequence
  Synthetic
uuuuucuggauaucagugc

SEQ ID NO: 281772 - RNA, 20 nt, Artificial Sequence
  Synthetic
guuuuucuggauaucagugc

SEQ ID NO: 281773 - RNA, 21 nt, Artificial Sequence
  Synthetic
uguuuuucuggauaucagugc

SEQ ID NO: 281774 - RNA, 22 nt, Artificial Sequence
  Synthetic
cuguuuuucuggauaucagugc

SEQ ID NO: 281775 - RNA, 23 nt, Artificial Sequence
  Synthetic
acuguuuuucuggauaucagugc

SEQ ID NO: 281776 - RNA, 24 nt, Artificial Sequence
  Synthetic
aacuguuuuucuggauaucagugc

SEQ ID NO: 281777 - RNA, 18 nt, Artificial Sequence
  Synthetic
ucagugagguaagagugc

SEQ ID NO: 281778 - RNA, 19 nt, Artificial Sequence
  Synthetic
aucagugagguaagagugc

SEQ ID NO: 281779 - RNA, 20 nt, Artificial Sequence
  Synthetic
uaucagugagguaagagugc

SEQ ID NO: 281780 - RNA, 21 nt, Artificial Sequence
  Synthetic
guaucagugagguaagagugc

SEQ ID NO: 281781 - RNA, 22 nt, Artificial Sequence
  Synthetic
uguaucagugagguaagagugc

SEQ ID NO: 281782 - RNA, 23 nt, Artificial Sequence
  Synthetic
auguaucagugagguaagagugc

SEQ ID NO: 281783 - RNA, 24 nt, Artificial Sequence
  Synthetic
uauguaucagugagguaagagugc

SEQ ID NO: 281784 - RNA, 18 nt, Artificial Sequence
  Synthetic
ccuauuagucuugagugc

SEQ ID NO: 281785 - RNA, 19 nt, Artificial Sequence
  Synthetic
accuauuagucuugagugc

SEQ ID NO: 281786 - RNA, 20 nt, Artificial Sequence
  Synthetic
aaccuauuagucuugagugc

SEQ ID NO: 281787 - RNA, 21 nt, Artificial Sequence
  Synthetic
aaaccuauuagucuugagugc

SEQ ID NO: 281788 - RNA, 22 nt, Artificial Sequence
  Synthetic
aaaaccuauuagucuugagugc

SEQ ID NO: 281789 - RNA, 23 nt, Artificial Sequence
  Synthetic
aaaaaccuauuagucuugagugc

SEQ ID NO: 281790 - RNA, 24 nt, Artificial Sequence
  Synthetic
gaaaaaccuauuagucuugagugc

SEQ ID NO: 281791 - RNA, 18 nt, Artificial Sequence
  Synthetic
acugaucauucauagugc

SEQ ID NO: 281792 - RNA, 19 nt, Artificial Sequence
  Synthetic
uacugaucauucauagugc

SEQ ID NO: 281793 - RNA, 20 nt, Artificial Sequence
  Synthetic
auacugaucauucauagugc

SEQ ID NO: 281794 - RNA, 21 nt, Artificial Sequence
  Synthetic
cauacugaucauucauagugc

SEQ ID NO: 281795 - RNA, 22 nt, Artificial Sequence
  Synthetic
ucauacugaucauucauagugc

SEQ ID NO: 281796 - RNA, 23 nt, Artificial Sequence
  Synthetic
aucauacugaucauucauagugc

SEQ ID NO: 281797 - RNA, 24 nt, Artificial Sequence
  Synthetic
gaucauacugaucauucauagugc

SEQ ID NO: 281798 - RNA, 18 nt, Artificial Sequence
  Synthetic
agaaagccagucuagugc

SEQ ID NO: 281799 - RNA, 19 nt, Artificial Sequence
  Synthetic
aagaaagccagucuagugc

SEQ ID NO: 281800 - RNA, 20 nt, Artificial Sequence
  Synthetic
caagaaagccagucuagugc

SEQ ID NO: 281801 - RNA, 21 nt, Artificial Sequence
  Synthetic
ucaagaaagccagucuagugc

SEQ ID NO: 281802 - RNA, 22 nt, Artificial Sequence
  Synthetic
cucaagaaagccagucuagugc

SEQ ID NO: 281803 - RNA, 23 nt, Artificial Sequence
  Synthetic
acucaagaaagccagucuagugc

SEQ ID NO: 281804 - RNA, 24 nt, Artificial Sequence
  Synthetic
cacucaagaaagccagucuagugc

SEQ ID NO: 281805 - RNA, 18 nt, Artificial Sequence
  Synthetic
aagaauccuuuguagugc

SEQ ID NO: 281806 - RNA, 19 nt, Artificial Sequence
  Synthetic
gaagaauccuuuguagugc

SEQ ID NO: 281807 - RNA, 20 nt, Artificial Sequence
  Synthetic
cgaagaauccuuuguagugc

SEQ ID NO: 281808 - RNA, 21 nt, Artificial Sequence
  Synthetic
ccgaagaauccuuuguagugc

SEQ ID NO: 281809 - RNA, 22 nt, Artificial Sequence
  Synthetic
cccgaagaauccuuuguagugc

SEQ ID NO: 281810 - RNA, 23 nt, Artificial Sequence
  Synthetic
acccgaagaauccuuuguagugc

SEQ ID NO: 281811 - RNA, 24 nt, Artificial Sequence
  Synthetic
aacccgaagaauccuuuguagugc

SEQ ID NO: 281812 - RNA, 18 nt, Artificial Sequence
  Synthetic
auuuaacuuaucccgugc

SEQ ID NO: 281813 - RNA, 19 nt, Artificial Sequence
  Synthetic
aauuuaacuuaucccgugc

SEQ ID NO: 281814 - RNA, 20 nt, Artificial Sequence
  Synthetic
caauuuaacuuaucccgugc

SEQ ID NO: 281815 - RNA, 21 nt, Artificial Sequence
  Synthetic
acaauuuaacuuaucccgugc

SEQ ID NO: 281816 - RNA, 22 nt, Artificial Sequence
  Synthetic
cacaauuuaacuuaucccgugc

SEQ ID NO: 281817 - RNA, 23 nt, Artificial Sequence
  Synthetic
ucacaauuuaacuuaucccgugc

SEQ ID NO: 281818 - RNA, 24 nt, Artificial Sequence
  Synthetic
uucacaauuuaacuuaucccgugc

SEQ ID NO: 281819 - RNA, 18 nt, Artificial Sequence
  Synthetic
aagcuggguaaaaggugc

SEQ ID NO: 281820 - RNA, 19 nt, Artificial Sequence
  Synthetic
gaagcuggguaaaaggugc

SEQ ID NO: 281821 - RNA, 20 nt, Artificial Sequence
  Synthetic
agaagcuggguaaaaggugc

SEQ ID NO: 281822 - RNA, 21 nt, Artificial Sequence
  Synthetic
gagaagcuggguaaaaggugc

SEQ ID NO: 281823 - RNA, 22 nt, Artificial Sequence
  Synthetic
ggagaagcuggguaaaaggugc

SEQ ID NO: 281824 - RNA, 23 nt, Artificial Sequence
  Synthetic
gggagaagcuggguaaaaggugc

SEQ ID NO: 281825 - RNA, 24 nt, Artificial Sequence
  Synthetic
ugggagaagcuggguaaaaggugc

SEQ ID NO: 281826 - RNA, 18 nt, Artificial Sequence
  Synthetic
uuaucuuagacaaggugc

SEQ ID NO: 281827 - RNA, 19 nt, Artificial Sequence
  Synthetic
guuaucuuagacaaggugc

SEQ ID NO: 281828 - RNA, 20 nt, Artificial Sequence
  Synthetic
aguuaucuuagacaaggugc

SEQ ID NO: 281829 - RNA, 21 nt, Artificial Sequence
  Synthetic
gaguuaucuuagacaaggugc

SEQ ID NO: 281830 - RNA, 22 nt, Artificial Sequence
  Synthetic
agaguuaucuuagacaaggugc

SEQ ID NO: 281831 - RNA, 23 nt, Artificial Sequence
  Synthetic
cagaguuaucuuagacaaggugc

SEQ ID NO: 281832 - RNA, 24 nt, Artificial Sequence
  Synthetic
ucagaguuaucuuagacaaggugc

SEQ ID NO: 281833 - RNA, 18 nt, Artificial Sequence
  Synthetic
ggaagccaaggaaggugc

SEQ ID NO: 281834 - RNA, 19 nt, Artificial Sequence
  Synthetic
aggaagccaaggaaggugc

SEQ ID NO: 281835 - RNA, 20 nt, Artificial Sequence
  Synthetic
gaggaagccaaggaaggugc

SEQ ID NO: 281836 - RNA, 21 nt, Artificial Sequence
  Synthetic
ggaggaagccaaggaaggugc

SEQ ID NO: 281837 - RNA, 22 nt, Artificial Sequence
  Synthetic
aggaggaagccaaggaaggugc

SEQ ID NO: 281838 - RNA, 23 nt, Artificial Sequence
  Synthetic
aaggaggaagccaaggaaggugc

SEQ ID NO: 281839 - RNA, 24 nt, Artificial Sequence
  Synthetic
gaaggaggaagccaaggaaggugc

SEQ ID NO: 281840 - RNA, 18 nt, Artificial Sequence
  Synthetic
ucaggaaacaacaggugc

SEQ ID NO: 281841 - RNA, 19 nt, Artificial Sequence
  Synthetic
gucaggaaacaacaggugc

SEQ ID NO: 281842 - RNA, 20 nt, Artificial Sequence
  Synthetic
agucaggaaacaacaggugc

SEQ ID NO: 281843 - RNA, 21 nt, Artificial Sequence
  Synthetic
aagucaggaaacaacaggugc

SEQ ID NO: 281844 - RNA, 22 nt, Artificial Sequence
  Synthetic
aaagucaggaaacaacaggugc

SEQ ID NO: 281845 - RNA, 23 nt, Artificial Sequence
  Synthetic
aaaagucaggaaacaacaggugc

SEQ ID NO: 281846 - RNA, 24 nt, Artificial Sequence
  Synthetic
caaaagucaggaaacaacaggugc

SEQ ID NO: 281847 - RNA, 24 nt, Artificial Sequence
  Synthetic
uaaaagucaggaaacaacaggugc

SEQ ID NO: 281848 - RNA, 18 nt, Artificial Sequence
  Synthetic
caagguggugacaggugc

SEQ ID NO: 281849 - RNA, 19 nt, Artificial Sequence
  Synthetic
ucaagguggugacaggugc

SEQ ID NO: 281850 - RNA, 20 nt, Artificial Sequence
  Synthetic
cucaagguggugacaggugc

SEQ ID NO: 281851 - RNA, 21 nt, Artificial Sequence
  Synthetic
gcucaagguggugacaggugc

SEQ ID NO: 281852 - RNA, 22 nt, Artificial Sequence
  Synthetic
ugcucaagguggugacaggugc

SEQ ID NO: 281853 - RNA, 23 nt, Artificial Sequence
  Synthetic
uugcucaagguggugacaggugc

SEQ ID NO: 281854 - RNA, 24 nt, Artificial Sequence
  Synthetic
auugcucaagguggugacaggugc

SEQ ID NO: 281855 - RNA, 18 nt, Artificial Sequence
  Synthetic
ucaggaaacaucaggugc

SEQ ID NO: 281856 - RNA, 19 nt, Artificial Sequence
  Synthetic
gucaggaaacaucaggugc

SEQ ID NO: 281857 - RNA, 20 nt, Artificial Sequence
  Synthetic
agucaggaaacaucaggugc

SEQ ID NO: 281858 - RNA, 21 nt, Artificial Sequence
  Synthetic
aagucaggaaacaucaggugc

SEQ ID NO: 281859 - RNA, 22 nt, Artificial Sequence
  Synthetic
aaagucaggaaacaucaggugc

SEQ ID NO: 281860 - RNA, 23 nt, Artificial Sequence
  Synthetic
aaaagucaggaaacaucaggugc

SEQ ID NO: 281861 - RNA, 24 nt, Artificial Sequence
  Synthetic
aaaaagucaggaaacaucaggugc

SEQ ID NO: 281862 - RNA, 18 nt, Artificial Sequence
  Synthetic
ccccuuauaaugaggugc

SEQ ID NO: 281863 - RNA, 19 nt, Artificial Sequence
  Synthetic
uccccuuauaaugaggugc

SEQ ID NO: 281864 - RNA, 20 nt, Artificial Sequence
  Synthetic
auccccuuauaaugaggugc

SEQ ID NO: 281865 - RNA, 21 nt, Artificial Sequence
  Synthetic
cauccccuuauaaugaggugc

SEQ ID NO: 281866 - RNA, 22 nt, Artificial Sequence
  Synthetic
ccauccccuuauaaugaggugc

SEQ ID NO: 281867 - RNA, 23 nt, Artificial Sequence
  Synthetic
uccauccccuuauaaugaggugc

SEQ ID NO: 281868 - RNA, 24 nt, Artificial Sequence
  Synthetic
guccauccccuuauaaugaggugc

SEQ ID NO: 281869 - RNA, 18 nt, Artificial Sequence
  Synthetic
cagauagcaaauaggugc

SEQ ID NO: 281870 - RNA, 19 nt, Artificial Sequence
  Synthetic
acagauagcaaauaggugc

SEQ ID NO: 281871 - RNA, 20 nt, Artificial Sequence
  Synthetic
uacagauagcaaauaggugc

SEQ ID NO: 281872 - RNA, 21 nt, Artificial Sequence
  Synthetic
auacagauagcaaauaggugc

SEQ ID NO: 281873 - RNA, 22 nt, Artificial Sequence
  Synthetic
uauacagauagcaaauaggugc

SEQ ID NO: 281874 - RNA, 23 nt, Artificial Sequence
  Synthetic
auauacagauagcaaauaggugc

SEQ ID NO: 281875 - RNA, 24 nt, Artificial Sequence
  Synthetic
gauauacagauagcaaauaggugc

SEQ ID NO: 281876 - RNA, 18 nt, Artificial Sequence
  Synthetic
ucagaaaaguguaggugc

SEQ ID NO: 281877 - RNA, 19 nt, Artificial Sequence
  Synthetic
gucagaaaaguguaggugc

SEQ ID NO: 281878 - RNA, 20 nt, Artificial Sequence
  Synthetic
agucagaaaaguguaggugc

SEQ ID NO: 281879 - RNA, 21 nt, Artificial Sequence
  Synthetic
cagucagaaaaguguaggugc

SEQ ID NO: 281880 - RNA, 22 nt, Artificial Sequence
  Synthetic
ccagucagaaaaguguaggugc

SEQ ID NO: 281881 - RNA, 23 nt, Artificial Sequence
  Synthetic
cccagucagaaaaguguaggugc

SEQ ID NO: 281882 - RNA, 24 nt, Artificial Sequence
  Synthetic
ucccagucagaaaaguguaggugc

SEQ ID NO: 281883 - RNA, 18 nt, Artificial Sequence
  Synthetic
uucauuuuacaagggugc

SEQ ID NO: 281884 - RNA, 19 nt, Artificial Sequence
  Synthetic
cuucauuuuacaagggugc

SEQ ID NO: 281885 - RNA, 20 nt, Artificial Sequence
  Synthetic
ccuucauuuuacaagggugc

SEQ ID NO: 281886 - RNA, 21 nt, Artificial Sequence
  Synthetic
uccuucauuuuacaagggugc

SEQ ID NO: 281887 - RNA, 22 nt, Artificial Sequence
  Synthetic
auccuucauuuuacaagggugc

SEQ ID NO: 281888 - RNA, 23 nt, Artificial Sequence
  Synthetic
cauccuucauuuuacaagggugc

SEQ ID NO: 281889 - RNA, 24 nt, Artificial Sequence
  Synthetic
acauccuucauuuuacaagggugc

SEQ ID NO: 281890 - RNA, 18 nt, Artificial Sequence
  Synthetic
agaaaugugagagggugc

SEQ ID NO: 281891 - RNA, 19 nt, Artificial Sequence
  Synthetic
uagaaaugugagagggugc

SEQ ID NO: 281892 - RNA, 20 nt, Artificial Sequence
  Synthetic
uuagaaaugugagagggugc

SEQ ID NO: 281893 - RNA, 21 nt, Artificial Sequence
  Synthetic
guuagaaaugugagagggugc

SEQ ID NO: 281894 - RNA, 22 nt, Artificial Sequence
  Synthetic
uguuagaaaugugagagggugc

SEQ ID NO: 281895 - RNA, 23 nt, Artificial Sequence
  Synthetic
auguuagaaaugugagagggugc

SEQ ID NO: 281896 - RNA, 24 nt, Artificial Sequence
  Synthetic
aauguuagaaaugugagagggugc

SEQ ID NO: 281897 - RNA, 18 nt, Artificial Sequence
  Synthetic
cuauuuaauaaauggugc

SEQ ID NO: 281898 - RNA, 19 nt, Artificial Sequence
  Synthetic
ccuauuuaauaaauggugc

SEQ ID NO: 281899 - RNA, 20 nt, Artificial Sequence
  Synthetic
cccuauuuaauaaauggugc

SEQ ID NO: 281900 - RNA, 21 nt, Artificial Sequence
  Synthetic
ucccuauuuaauaaauggugc

SEQ ID NO: 281901 - RNA, 22 nt, Artificial Sequence
  Synthetic
uucccuauuuaauaaauggugc

SEQ ID NO: 281902 - RNA, 23 nt, Artificial Sequence
  Synthetic
auucccuauuuaauaaauggugc

SEQ ID NO: 281903 - RNA, 24 nt, Artificial Sequence
  Synthetic
aauucccuauuuaauaaauggugc

SEQ ID NO: 281904 - RNA, 18 nt, Artificial Sequence
  Synthetic
auucagaagagauggugc

SEQ ID NO: 281905 - RNA, 19 nt, Artificial Sequence
  Synthetic
aauucagaagagauggugc

SEQ ID NO: 281906 - RNA, 20 nt, Artificial Sequence
  Synthetic
caauucagaagagauggugc

SEQ ID NO: 281907 - RNA, 21 nt, Artificial Sequence
  Synthetic
ucaauucagaagagauggugc

SEQ ID NO: 281908 - RNA, 22 nt, Artificial Sequence
  Synthetic
aucaauucagaagagauggugc

SEQ ID NO: 281909 - RNA, 23 nt, Artificial Sequence
  Synthetic
aaucaauucagaagagauggugc

SEQ ID NO: 281910 - RNA, 24 nt, Artificial Sequence
  Synthetic
aaaucaauucagaagagauggugc

SEQ ID NO: 281911 - RNA, 18 nt, Artificial Sequence
  Synthetic
acucuuuaccccuggugc

SEQ ID NO: 281912 - RNA, 19 nt, Artificial Sequence
  Synthetic
cacucuuuaccccuggugc

SEQ ID NO: 281913 - RNA, 20 nt, Artificial Sequence
  Synthetic
ucacucuuuaccccuggugc

SEQ ID NO: 281914 - RNA, 21 nt, Artificial Sequence
  Synthetic
gucacucuuuaccccuggugc

SEQ ID NO: 281915 - RNA, 22 nt, Artificial Sequence
  Synthetic
agucacucuuuaccccuggugc

SEQ ID NO: 281916 - RNA, 23 nt, Artificial Sequence
  Synthetic
gagucacucuuuaccccuggugc

SEQ ID NO: 281917 - RNA, 24 nt, Artificial Sequence
  Synthetic
ggagucacucuuuaccccuggugc

SEQ ID NO: 281918 - RNA, 18 nt, Artificial Sequence
  Synthetic
aacagauuccccuggugc

SEQ ID NO: 281919 - RNA, 19 nt, Artificial Sequence
  Synthetic
uaacagauuccccuggugc

SEQ ID NO: 281920 - RNA, 20 nt, Artificial Sequence
  Synthetic
guaacagauuccccuggugc

SEQ ID NO: 281921 - RNA, 21 nt, Artificial Sequence
  Synthetic
uguaacagauuccccuggugc

SEQ ID NO: 281922 - RNA, 22 nt, Artificial Sequence
  Synthetic
uuguaacagauuccccuggugc

SEQ ID NO: 281923 - RNA, 23 nt, Artificial Sequence
  Synthetic
auuguaacagauuccccuggugc

SEQ ID NO: 281924 - RNA, 24 nt, Artificial Sequence
  Synthetic
aauuguaacagauuccccuggugc

SEQ ID NO: 281925 - RNA, 18 nt, Artificial Sequence
  Synthetic
gaagaugcaaaguggugc

SEQ ID NO: 281926 - RNA, 19 nt, Artificial Sequence
  Synthetic
ggaagaugcaaaguggugc

SEQ ID NO: 281927 - RNA, 20 nt, Artificial Sequence
  Synthetic
aggaagaugcaaaguggugc

SEQ ID NO: 281928 - RNA, 21 nt, Artificial Sequence
  Synthetic
gaggaagaugcaaaguggugc

SEQ ID NO: 281929 - RNA, 22 nt, Artificial Sequence
  Synthetic
ggaggaagaugcaaaguggugc

SEQ ID NO: 281930 - RNA, 23 nt, Artificial Sequence
  Synthetic
gggaggaagaugcaaaguggugc

SEQ ID NO: 281931 - RNA, 24 nt, Artificial Sequence
  Synthetic
ugggaggaagaugcaaaguggugc

SEQ ID NO: 281932 - RNA, 18 nt, Artificial Sequence
  Synthetic
gauguaggcauuuggugc

SEQ ID NO: 281933 - RNA, 19 nt, Artificial Sequence
  Synthetic
ugauguaggcauuuggugc

SEQ ID NO: 281934 - RNA, 20 nt, Artificial Sequence
  Synthetic
uugauguaggcauuuggugc

SEQ ID NO: 281935 - RNA, 21 nt, Artificial Sequence
  Synthetic
uuugauguaggcauuuggugc

SEQ ID NO: 281936 - RNA, 22 nt, Artificial Sequence
  Synthetic
cuuugauguaggcauuuggugc

SEQ ID NO: 281937 - RNA, 23 nt, Artificial Sequence
  Synthetic
ucuuugauguaggcauuuggugc

SEQ ID NO: 281938 - RNA, 24 nt, Artificial Sequence
  Synthetic
cucuuugauguaggcauuuggugc

SEQ ID NO: 281939 - RNA, 18 nt, Artificial Sequence
  Synthetic
auggcaacagaaaugugc

SEQ ID NO: 281940 - RNA, 19 nt, Artificial Sequence
  Synthetic
uauggcaacagaaaugugc

SEQ ID NO: 281941 - RNA, 20 nt, Artificial Sequence
  Synthetic
cuauggcaacagaaaugugc

SEQ ID NO: 281942 - RNA, 21 nt, Artificial Sequence
  Synthetic
ucuauggcaacagaaaugugc

SEQ ID NO: 281943 - RNA, 22 nt, Artificial Sequence
  Synthetic
uucuauggcaacagaaaugugc

SEQ ID NO: 281944 - RNA, 23 nt, Artificial Sequence
  Synthetic
auucuauggcaacagaaaugugc

SEQ ID NO: 281945 - RNA, 24 nt, Artificial Sequence
  Synthetic
gauucuauggcaacagaaaugugc

SEQ ID NO: 281946 - RNA, 18 nt, Artificial Sequence
  Synthetic
aggcaagagagcaugugc

SEQ ID NO: 281947 - RNA, 19 nt, Artificial Sequence
  Synthetic
caggcaagagagcaugugc

SEQ ID NO: 281948 - RNA, 20 nt, Artificial Sequence
  Synthetic
gcaggcaagagagcaugugc

SEQ ID NO: 281949 - RNA, 21 nt, Artificial Sequence
  Synthetic
agcaggcaagagagcaugugc

SEQ ID NO: 281950 - RNA, 22 nt, Artificial Sequence
  Synthetic
cagcaggcaagagagcaugugc

SEQ ID NO: 281951 - RNA, 23 nt, Artificial Sequence
  Synthetic
acagcaggcaagagagcaugugc

SEQ ID NO: 281952 - RNA, 24 nt, Artificial Sequence
  Synthetic
gacagcaggcaagagagcaugugc

SEQ ID NO: 281953 - RNA, 18 nt, Artificial Sequence
  Synthetic
auucauauaaagaugugc

SEQ ID NO: 281954 - RNA, 19 nt, Artificial Sequence
  Synthetic
uauucauauaaagaugugc

SEQ ID NO: 281955 - RNA, 20 nt, Artificial Sequence
  Synthetic
uuauucauauaaagaugugc

SEQ ID NO: 281956 - RNA, 21 nt, Artificial Sequence
  Synthetic
guuauucauauaaagaugugc

SEQ ID NO: 281957 - RNA, 22 nt, Artificial Sequence
  Synthetic
cguuauucauauaaagaugugc

SEQ ID NO: 281958 - RNA, 23 nt, Artificial Sequence
  Synthetic
acguuauucauauaaagaugugc

SEQ ID NO: 281959 - RNA, 24 nt, Artificial Sequence
  Synthetic
cacguuauucauauaaagaugugc

SEQ ID NO: 281960 - RNA, 18 nt, Artificial Sequence
  Synthetic
uaacuugagucgaugugc

SEQ ID NO: 281961 - RNA, 19 nt, Artificial Sequence
  Synthetic
uuaacuugagucgaugugc

SEQ ID NO: 281962 - RNA, 20 nt, Artificial Sequence
  Synthetic
uuuaacuugagucgaugugc

SEQ ID NO: 281963 - RNA, 21 nt, Artificial Sequence
  Synthetic
guuuaacuugagucgaugugc

SEQ ID NO: 281964 - RNA, 22 nt, Artificial Sequence
  Synthetic
uguuuaacuugagucgaugugc

SEQ ID NO: 281965 - RNA, 23 nt, Artificial Sequence
  Synthetic
auguuuaacuugagucgaugugc

SEQ ID NO: 281966 - RNA, 24 nt, Artificial Sequence
  Synthetic
aauguuuaacuugagucgaugugc

SEQ ID NO: 281967 - RNA, 18 nt, Artificial Sequence
  Synthetic
aaggauuuucugaugugc

SEQ ID NO: 281968 - RNA, 19 nt, Artificial Sequence
  Synthetic
aaaggauuuucugaugugc

SEQ ID NO: 281969 - RNA, 20 nt, Artificial Sequence
  Synthetic
uaaaggauuuucugaugugc

SEQ ID NO: 281970 - RNA, 21 nt, Artificial Sequence
  Synthetic
guaaaggauuuucugaugugc

SEQ ID NO: 281971 - RNA, 22 nt, Artificial Sequence
  Synthetic
gguaaaggauuuucugaugugc

SEQ ID NO: 281972 - RNA, 23 nt, Artificial Sequence
  Synthetic
ugguaaaggauuuucugaugugc

SEQ ID NO: 281973 - RNA, 24 nt, Artificial Sequence
  Synthetic
gugguaaaggauuuucugaugugc

SEQ ID NO: 281974 - RNA, 18 nt, Artificial Sequence
  Synthetic
gaggacacgaauaugugc

SEQ ID NO: 281975 - RNA, 19 nt, Artificial Sequence
  Synthetic
ugaggacacgaauaugugc

SEQ ID NO: 281976 - RNA, 20 nt, Artificial Sequence
  Synthetic
uugaggacacgaauaugugc

SEQ ID NO: 281977 - RNA, 21 nt, Artificial Sequence
  Synthetic
cuugaggacacgaauaugugc

SEQ ID NO: 281978 - RNA, 22 nt, Artificial Sequence
  Synthetic
ccuugaggacacgaauaugugc

SEQ ID NO: 281979 - RNA, 23 nt, Artificial Sequence
  Synthetic
gccuugaggacacgaauaugugc

SEQ ID NO: 281980 - RNA, 24 nt, Artificial Sequence
  Synthetic
ugccuugaggacacgaauaugugc

SEQ ID NO: 281981 - RNA, 18 nt, Artificial Sequence
  Synthetic
cagggaagaaguaugugc

SEQ ID NO: 281982 - RNA, 19 nt, Artificial Sequence
  Synthetic
ucagggaagaaguaugugc

SEQ ID NO: 281983 - RNA, 20 nt, Artificial Sequence
  Synthetic
uucagggaagaaguaugugc

SEQ ID NO: 281984 - RNA, 21 nt, Artificial Sequence
  Synthetic
auucagggaagaaguaugugc

SEQ ID NO: 281985 - RNA, 22 nt, Artificial Sequence
  Synthetic
gauucagggaagaaguaugugc

SEQ ID NO: 281986 - RNA, 23 nt, Artificial Sequence
  Synthetic
ggauucagggaagaaguaugugc

SEQ ID NO: 281987 - RNA, 24 nt, Artificial Sequence
  Synthetic
gggauucagggaagaaguaugugc

SEQ ID NO: 281988 - RNA, 18 nt, Artificial Sequence
  Synthetic
uccaugaacuuuaugugc

SEQ ID NO: 281989 - RNA, 19 nt, Artificial Sequence
  Synthetic
uuccaugaacuuuaugugc

SEQ ID NO: 281990 - RNA, 20 nt, Artificial Sequence
  Synthetic
cuuccaugaacuuuaugugc

SEQ ID NO: 281991 - RNA, 21 nt, Artificial Sequence
  Synthetic
ccuuccaugaacuuuaugugc

SEQ ID NO: 281992 - RNA, 22 nt, Artificial Sequence
  Synthetic
gccuuccaugaacuuuaugugc

SEQ ID NO: 281993 - RNA, 23 nt, Artificial Sequence
  Synthetic
ggccuuccaugaacuuuaugugc

SEQ ID NO: 281994 - RNA, 24 nt, Artificial Sequence
  Synthetic
uggccuuccaugaacuuuaugugc

SEQ ID NO: 281995 - RNA, 18 nt, Artificial Sequence
  Synthetic
gaagucuauuuuaugugc

SEQ ID NO: 281996 - RNA, 19 nt, Artificial Sequence
  Synthetic
ggaagucuauuuuaugugc

SEQ ID NO: 281997 - RNA, 20 nt, Artificial Sequence
  Synthetic
aggaagucuauuuuaugugc

SEQ ID NO: 281998 - RNA, 21 nt, Artificial Sequence
  Synthetic
aaggaagucuauuuuaugugc

SEQ ID NO: 281999 - RNA, 22 nt, Artificial Sequence
  Synthetic
aaaggaagucuauuuuaugugc

SEQ ID NO: 282000 - RNA, 23 nt, Artificial Sequence
  Synthetic
aaaaggaagucuauuuuaugugc

SEQ ID NO: 282001 - RNA, 24 nt, Artificial Sequence
  Synthetic
gaaaaggaagucuauuuuaugugc

SEQ ID NO: 282002 - RNA, 18 nt, Artificial Sequence
  Synthetic
caugagggugaacugugc

SEQ ID NO: 282003 - RNA, 19 nt, Artificial Sequence
  Synthetic
ucaugagggugaacugugc

SEQ ID NO: 282004 - RNA, 20 nt, Artificial Sequence
  Synthetic
uucaugagggugaacugugc

SEQ ID NO: 282005 - RNA, 21 nt, Artificial Sequence
  Synthetic
cuucaugagggugaacugugc

SEQ ID NO: 282006 - RNA, 22 nt, Artificial Sequence
  Synthetic
gcuucaugagggugaacugugc

SEQ ID NO: 282007 - RNA, 23 nt, Artificial Sequence
  Synthetic
ugcuucaugagggugaacugugc

SEQ ID NO: 282008 - RNA, 24 nt, Artificial Sequence
  Synthetic
cugcuucaugagggugaacugugc

SEQ ID NO: 282009 - RNA, 18 nt, Artificial Sequence
  Synthetic
aauacagcauagcugugc

SEQ ID NO: 282010 - RNA, 19 nt, Artificial Sequence
  Synthetic
caauacagcauagcugugc

SEQ ID NO: 282011 - RNA, 20 nt, Artificial Sequence
  Synthetic
ucaauacagcauagcugugc

SEQ ID NO: 282012 - RNA, 21 nt, Artificial Sequence
  Synthetic
aucaauacagcauagcugugc

SEQ ID NO: 282013 - RNA, 22 nt, Artificial Sequence
  Synthetic
uaucaauacagcauagcugugc

SEQ ID NO: 282014 - RNA, 23 nt, Artificial Sequence
  Synthetic
auaucaauacagcauagcugugc

SEQ ID NO: 282015 - RNA, 24 nt, Artificial Sequence
  Synthetic
gauaucaauacagcauagcugugc

SEQ ID NO: 282016 - RNA, 18 nt, Artificial Sequence
  Synthetic
aguguguucccgcugugc

SEQ ID NO: 282017 - RNA, 19 nt, Artificial Sequence
  Synthetic
aaguguguucccgcugugc

SEQ ID NO: 282018 - RNA, 20 nt, Artificial Sequence
  Synthetic
caaguguguucccgcugugc

SEQ ID NO: 282019 - RNA, 21 nt, Artificial Sequence
  Synthetic
gcaaguguguucccgcugugc

SEQ ID NO: 282020 - RNA, 22 nt, Artificial Sequence
  Synthetic
cgcaaguguguucccgcugugc

SEQ ID NO: 282021 - RNA, 23 nt, Artificial Sequence
  Synthetic
ccgcaaguguguucccgcugugc

SEQ ID NO: 282022 - RNA, 24 nt, Artificial Sequence
  Synthetic
gccgcaaguguguucccgcugugc

SEQ ID NO: 282023 - RNA, 18 nt, Artificial Sequence
  Synthetic
cccaccaucaggcugugc

SEQ ID NO: 282024 - RNA, 19 nt, Artificial Sequence
  Synthetic
acccaccaucaggcugugc

SEQ ID NO: 282025 - RNA, 20 nt, Artificial Sequence
  Synthetic
cacccaccaucaggcugugc

SEQ ID NO: 282026 - RNA, 21 nt, Artificial Sequence
  Synthetic
ccacccaccaucaggcugugc

SEQ ID NO: 282027 - RNA, 22 nt, Artificial Sequence
  Synthetic
accacccaccaucaggcugugc

SEQ ID NO: 282028 - RNA, 23 nt, Artificial Sequence
  Synthetic
uaccacccaccaucaggcugugc

SEQ ID NO: 282029 - RNA, 24 nt, Artificial Sequence
  Synthetic
cuaccacccaccaucaggcugugc

SEQ ID NO: 282030 - RNA, 18 nt, Artificial Sequence
  Synthetic
gcaggcaagagcgugugc

SEQ ID NO: 282031 - RNA, 19 nt, Artificial Sequence
  Synthetic
ggcaggcaagagcgugugc

SEQ ID NO: 282032 - RNA, 20 nt, Artificial Sequence
  Synthetic
uggcaggcaagagcgugugc

SEQ ID NO: 282033 - RNA, 21 nt, Artificial Sequence
  Synthetic
guggcaggcaagagcgugugc

SEQ ID NO: 282034 - RNA, 22 nt, Artificial Sequence
  Synthetic
gguggcaggcaagagcgugugc

SEQ ID NO: 282035 - RNA, 23 nt, Artificial Sequence
  Synthetic
ugguggcaggcaagagcgugugc

SEQ ID NO: 282036 - RNA, 24 nt, Artificial Sequence
  Synthetic
augguggcaggcaagagcgugugc

SEQ ID NO: 282037 - RNA, 18 nt, Artificial Sequence
  Synthetic
gcugguacugaggugugc

SEQ ID NO: 282038 - RNA, 19 nt, Artificial Sequence
  Synthetic
agcugguacugaggugugc

SEQ ID NO: 282039 - RNA, 20 nt, Artificial Sequence
  Synthetic
gagcugguacugaggugugc

SEQ ID NO: 282040 - RNA, 21 nt, Artificial Sequence
  Synthetic
ugagcugguacugaggugugc

SEQ ID NO: 282041 - RNA, 22 nt, Artificial Sequence
  Synthetic
gugagcugguacugaggugugc

SEQ ID NO: 282042 - RNA, 23 nt, Artificial Sequence
  Synthetic
ugugagcugguacugaggugugc

SEQ ID NO: 282043 - RNA, 24 nt, Artificial Sequence
  Synthetic
augugagcugguacugaggugugc

SEQ ID NO: 282044 - RNA, 18 nt, Artificial Sequence
  Synthetic
ugaagugugggggugugc

SEQ ID NO: 282045 - RNA, 19 nt, Artificial Sequence
  Synthetic
cugaagugugggggugugc

SEQ ID NO: 282046 - RNA, 20 nt, Artificial Sequence
  Synthetic
acugaagugugggggugugc

SEQ ID NO: 282047 - RNA, 21 nt, Artificial Sequence
  Synthetic
gacugaagugugggggugugc

SEQ ID NO: 282048 - RNA, 22 nt, Artificial Sequence
  Synthetic
agacugaagugugggggugugc

SEQ ID NO: 282049 - RNA, 23 nt, Artificial Sequence
  Synthetic
gagacugaagugugggggugugc

SEQ ID NO: 282050 - RNA, 24 nt, Artificial Sequence
  Synthetic
ggagacugaagugugggggugugc

SEQ ID NO: 282051 - RNA, 18 nt, Artificial Sequence
  Synthetic
augugccaaacauugugc

SEQ ID NO: 282052 - RNA, 19 nt, Artificial Sequence
  Synthetic
uaugugccaaacauugugc

SEQ ID NO: 282053 - RNA, 20 nt, Artificial Sequence
  Synthetic
guaugugccaaacauugugc

SEQ ID NO: 282054 - RNA, 21 nt, Artificial Sequence
  Synthetic
aguaugugccaaacauugugc

SEQ ID NO: 282055 - RNA, 22 nt, Artificial Sequence
  Synthetic
aaguaugugccaaacauugugc

SEQ ID NO: 282056 - RNA, 23 nt, Artificial Sequence
  Synthetic
caaguaugugccaaacauugugc

SEQ ID NO: 282057 - RNA, 24 nt, Artificial Sequence
  Synthetic
acaaguaugugccaaacauugugc

SEQ ID NO: 282058 - RNA, 18 nt, Artificial Sequence
  Synthetic
aggagcaagugauugugc

SEQ ID NO: 282059 - RNA, 19 nt, Artificial Sequence
  Synthetic
aaggagcaagugauugugc

SEQ ID NO: 282060 - RNA, 20 nt, Artificial Sequence
  Synthetic
aaaggagcaagugauugugc

SEQ ID NO: 282061 - RNA, 21 nt, Artificial Sequence
  Synthetic
caaaggagcaagugauugugc

SEQ ID NO: 282062 - RNA, 22 nt, Artificial Sequence
  Synthetic
ucaaaggagcaagugauugugc

SEQ ID NO: 282063 - RNA, 23 nt, Artificial Sequence
  Synthetic
uucaaaggagcaagugauugugc

SEQ ID NO: 282064 - RNA, 24 nt, Artificial Sequence
  Synthetic
guucaaaggagcaagugauugugc

SEQ ID NO: 282065 - RNA, 18 nt, Artificial Sequence
  Synthetic
uaagucaugaccuugugc

SEQ ID NO: 282066 - RNA, 19 nt, Artificial Sequence
  Synthetic
auaagucaugaccuugugc

SEQ ID NO: 282067 - RNA, 20 nt, Artificial Sequence
  Synthetic
aauaagucaugaccuugugc

SEQ ID NO: 282068 - RNA, 21 nt, Artificial Sequence
  Synthetic
aaauaagucaugaccuugugc

SEQ ID NO: 282069 - RNA, 22 nt, Artificial Sequence
  Synthetic
gaaauaagucaugaccuugugc

SEQ ID NO: 282070 - RNA, 23 nt, Artificial Sequence
  Synthetic
agaaauaagucaugaccuugugc

SEQ ID NO: 282071 - RNA, 24 nt, Artificial Sequence
  Synthetic
cagaaauaagucaugaccuugugc

SEQ ID NO: 282072 - RNA, 18 nt, Artificial Sequence
  Synthetic
ugcauauggcaguugugc

SEQ ID NO: 282073 - RNA, 19 nt, Artificial Sequence
  Synthetic
augcauauggcaguugugc

SEQ ID NO: 282074 - RNA, 20 nt, Artificial Sequence
  Synthetic
aaugcauauggcaguugugc

SEQ ID NO: 282075 - RNA, 21 nt, Artificial Sequence
  Synthetic
aaaugcauauggcaguugugc

SEQ ID NO: 282076 - RNA, 22 nt, Artificial Sequence
  Synthetic
uaaaugcauauggcaguugugc

SEQ ID NO: 282077 - RNA, 23 nt, Artificial Sequence
  Synthetic
auaaaugcauauggcaguugugc

SEQ ID NO: 282078 - RNA, 24 nt, Artificial Sequence
  Synthetic
uauaaaugcauauggcaguugugc

SEQ ID NO: 282079 - RNA, 18 nt, Artificial Sequence
  Synthetic
gcugaaccuuuguugugc

SEQ ID NO: 282080 - RNA, 19 nt, Artificial Sequence
  Synthetic
ugcugaaccuuuguugugc

SEQ ID NO: 282081 - RNA, 20 nt, Artificial Sequence
  Synthetic
uugcugaaccuuuguugugc

SEQ ID NO: 282082 - RNA, 21 nt, Artificial Sequence
  Synthetic
cuugcugaaccuuuguugugc

SEQ ID NO: 282083 - RNA, 22 nt, Artificial Sequence
  Synthetic
ucuugcugaaccuuuguugugc

SEQ ID NO: 282084 - RNA, 23 nt, Artificial Sequence
  Synthetic
uucuugcugaaccuuuguugugc

SEQ ID NO: 282085 - RNA, 24 nt, Artificial Sequence
  Synthetic
uuucuugcugaaccuuuguugugc

SEQ ID NO: 282086 - RNA, 18 nt, Artificial Sequence
  Synthetic
auguuucagaauuugugc

SEQ ID NO: 282087 - RNA, 19 nt, Artificial Sequence
  Synthetic
uauguuucagaauuugugc

SEQ ID NO: 282088 - RNA, 20 nt, Artificial Sequence
  Synthetic
cuauguuucagaauuugugc

SEQ ID NO: 282089 - RNA, 21 nt, Artificial Sequence
  Synthetic
gcuauguuucagaauuugugc

SEQ ID NO: 282090 - RNA, 22 nt, Artificial Sequence
  Synthetic
cgcuauguuucagaauuugugc

SEQ ID NO: 282091 - RNA, 23 nt, Artificial Sequence
  Synthetic
ccgcuauguuucagaauuugugc

SEQ ID NO: 282092 - RNA, 24 nt, Artificial Sequence
  Synthetic
gccgcuauguuucagaauuugugc

SEQ ID NO: 282093 - RNA, 18 nt, Artificial Sequence
  Synthetic
guuugcacccuuuugugc

SEQ ID NO: 282094 - RNA, 19 nt, Artificial Sequence
  Synthetic
uguuugcacccuuuugugc

SEQ ID NO: 282095 - RNA, 20 nt, Artificial Sequence
  Synthetic
guguuugcacccuuuugugc

SEQ ID NO: 282096 - RNA, 21 nt, Artificial Sequence
  Synthetic
cguguuugcacccuuuugugc

SEQ ID NO: 282097 - RNA, 22 nt, Artificial Sequence
  Synthetic
ucguguuugcacccuuuugugc

SEQ ID NO: 282098 - RNA, 23 nt, Artificial Sequence
  Synthetic
uucguguuugcacccuuuugugc

SEQ ID NO: 282099 - RNA, 24 nt, Artificial Sequence
  Synthetic
guucguguuugcacccuuuugugc

SEQ ID NO: 282100 - RNA, 18 nt, Artificial Sequence
  Synthetic
aauaaucgaguuuugugc

SEQ ID NO: 282101 - RNA, 19 nt, Artificial Sequence
  Synthetic
aaauaaucgaguuuugugc

SEQ ID NO: 282102 - RNA, 20 nt, Artificial Sequence
  Synthetic
aaaauaaucgaguuuugugc

SEQ ID NO: 282103 - RNA, 21 nt, Artificial Sequence
  Synthetic
aaaaauaaucgaguuuugugc

SEQ ID NO: 282104 - RNA, 22 nt, Artificial Sequence
  Synthetic
uaaaaauaaucgaguuuugugc

SEQ ID NO: 282105 - RNA, 23 nt, Artificial Sequence
  Synthetic
guaaaaauaaucgaguuuugugc

SEQ ID NO: 282106 - RNA, 24 nt, Artificial Sequence
  Synthetic
uguaaaaauaaucgaguuuugugc

SEQ ID NO: 282107 - RNA, 18 nt, Artificial Sequence
  Synthetic
caguuauuauuuuugugc

SEQ ID NO: 282108 - RNA, 19 nt, Artificial Sequence
  Synthetic
acaguuauuauuuuugugc

SEQ ID NO: 282109 - RNA, 20 nt, Artificial Sequence
  Synthetic
gacaguuauuauuuuugugc

SEQ ID NO: 282110 - RNA, 21 nt, Artificial Sequence
  Synthetic
ugacaguuauuauuuuugugc

SEQ ID NO: 282111 - RNA, 22 nt, Artificial Sequence
  Synthetic
cugacaguuauuauuuuugugc

SEQ ID NO: 282112 - RNA, 23 nt, Artificial Sequence
  Synthetic
gcugacaguuauuauuuuugugc

SEQ ID NO: 282113 - RNA, 24 nt, Artificial Sequence
  Synthetic
agcugacaguuauuauuuuugugc

SEQ ID NO: 282114 - RNA, 18 nt, Artificial Sequence
  Synthetic
ugcgaccaccaaaauugc

SEQ ID NO: 282115 - RNA, 19 nt, Artificial Sequence
  Synthetic
cugcgaccaccaaaauugc

SEQ ID NO: 282116 - RNA, 20 nt, Artificial Sequence
  Synthetic
acugcgaccaccaaaauugc

SEQ ID NO: 282117 - RNA, 21 nt, Artificial Sequence
  Synthetic
uacugcgaccaccaaaauugc

SEQ ID NO: 282118 - RNA, 22 nt, Artificial Sequence
  Synthetic
uuacugcgaccaccaaaauugc

SEQ ID NO: 282119 - RNA, 23 nt, Artificial Sequence
  Synthetic
uuuacugcgaccaccaaaauugc

SEQ ID NO: 282120 - RNA, 24 nt, Artificial Sequence
  Synthetic
guuuacugcgaccaccaaaauugc

SEQ ID NO: 282121 - RNA, 18 nt, Artificial Sequence
  Synthetic
gaagugcagugaaauugc

SEQ ID NO: 282122 - RNA, 19 nt, Artificial Sequence
  Synthetic
agaagugcagugaaauugc

SEQ ID NO: 282123 - RNA, 20 nt, Artificial Sequence
  Synthetic
gagaagugcagugaaauugc

SEQ ID NO: 282124 - RNA, 21 nt, Artificial Sequence
  Synthetic
agagaagugcagugaaauugc

SEQ ID NO: 282125 - RNA, 22 nt, Artificial Sequence
  Synthetic
aagagaagugcagugaaauugc

SEQ ID NO: 282126 - RNA, 23 nt, Artificial Sequence
  Synthetic
gaagagaagugcagugaaauugc

SEQ ID NO: 282127 - RNA, 24 nt, Artificial Sequence
  Synthetic
ggaagagaagugcagugaaauugc

SEQ ID NO: 282128 - RNA, 18 nt, Artificial Sequence
  Synthetic
aaugaccuccuaaauugc

SEQ ID NO: 282129 - RNA, 19 nt, Artificial Sequence
  Synthetic
caaugaccuccuaaauugc

SEQ ID NO: 282130 - RNA, 20 nt, Artificial Sequence
  Synthetic
ccaaugaccuccuaaauugc

SEQ ID NO: 282131 - RNA, 21 nt, Artificial Sequence
  Synthetic
accaaugaccuccuaaauugc

SEQ ID NO: 282132 - RNA, 22 nt, Artificial Sequence
  Synthetic
caccaaugaccuccuaaauugc

SEQ ID NO: 282133 - RNA, 23 nt, Artificial Sequence
  Synthetic
ucaccaaugaccuccuaaauugc

SEQ ID NO: 282134 - RNA, 24 nt, Artificial Sequence
  Synthetic
aucaccaaugaccuccuaaauugc

SEQ ID NO: 282135 - RNA, 18 nt, Artificial Sequence
  Synthetic
ugagcacccguaaauugc

SEQ ID NO: 282136 - RNA, 19 nt, Artificial Sequence
  Synthetic
cugagcacccguaaauugc

SEQ ID NO: 282137 - RNA, 20 nt, Artificial Sequence
  Synthetic
gcugagcacccguaaauugc

SEQ ID NO: 282138 - RNA, 21 nt, Artificial Sequence
  Synthetic
ugcugagcacccguaaauugc

SEQ ID NO: 282139 - RNA, 22 nt, Artificial Sequence
  Synthetic
gugcugagcacccguaaauugc

SEQ ID NO: 282140 - RNA, 23 nt, Artificial Sequence
  Synthetic
ugugcugagcacccguaaauugc

SEQ ID NO: 282141 - RNA, 24 nt, Artificial Sequence
  Synthetic
augugcugagcacccguaaauugc

SEQ ID NO: 282142 - RNA, 18 nt, Artificial Sequence
  Synthetic
gaguaucuauuaaauugc

SEQ ID NO: 282143 - RNA, 19 nt, Artificial Sequence
  Synthetic
ugaguaucuauuaaauugc

SEQ ID NO: 282144 - RNA, 20 nt, Artificial Sequence
  Synthetic
uugaguaucuauuaaauugc

SEQ ID NO: 282145 - RNA, 21 nt, Artificial Sequence
  Synthetic
auugaguaucuauuaaauugc

SEQ ID NO: 282146 - RNA, 22 nt, Artificial Sequence
  Synthetic
uauugaguaucuauuaaauugc

SEQ ID NO: 282147 - RNA, 23 nt, Artificial Sequence
  Synthetic
uuauugaguaucuauuaaauugc

SEQ ID NO: 282148 - RNA, 24 nt, Artificial Sequence
  Synthetic
uuuauugaguaucuauuaaauugc

SEQ ID NO: 282149 - RNA, 18 nt, Artificial Sequence
  Synthetic
auucugggaaccaauugc

SEQ ID NO: 282150 - RNA, 19 nt, Artificial Sequence
  Synthetic
aauucugggaaccaauugc

SEQ ID NO: 282151 - RNA, 20 nt, Artificial Sequence
  Synthetic
aaauucugggaaccaauugc

SEQ ID NO: 282152 - RNA, 21 nt, Artificial Sequence
  Synthetic
gaaauucugggaaccaauugc

SEQ ID NO: 282153 - RNA, 22 nt, Artificial Sequence
  Synthetic
ugaaauucugggaaccaauugc

SEQ ID NO: 282154 - RNA, 23 nt, Artificial Sequence
  Synthetic
gugaaauucugggaaccaauugc

SEQ ID NO: 282155 - RNA, 24 nt, Artificial Sequence
  Synthetic
ugugaaauucugggaaccaauugc

SEQ ID NO: 282156 - RNA, 18 nt, Artificial Sequence
  Synthetic
aauaugcauagcaauugc

SEQ ID NO: 282157 - RNA, 19 nt, Artificial Sequence
  Synthetic
uaauaugcauagcaauugc

SEQ ID NO: 282158 - RNA, 20 nt, Artificial Sequence
  Synthetic
uuaauaugcauagcaauugc

SEQ ID NO: 282159 - RNA, 21 nt, Artificial Sequence
  Synthetic
cuuaauaugcauagcaauugc

SEQ ID NO: 282160 - RNA, 22 nt, Artificial Sequence
  Synthetic
ucuuaauaugcauagcaauugc

SEQ ID NO: 282161 - RNA, 23 nt, Artificial Sequence
  Synthetic
cucuuaauaugcauagcaauugc

SEQ ID NO: 282162 - RNA, 24 nt, Artificial Sequence
  Synthetic
ucucuuaauaugcauagcaauugc

SEQ ID NO: 282163 - RNA, 18 nt, Artificial Sequence
  Synthetic
ggggaauuuggcaauugc

SEQ ID NO: 282164 - RNA, 19 nt, Artificial Sequence
  Synthetic
aggggaauuuggcaauugc

SEQ ID NO: 282165 - RNA, 20 nt, Artificial Sequence
  Synthetic
caggggaauuuggcaauugc

SEQ ID NO: 282166 - RNA, 21 nt, Artificial Sequence
  Synthetic
ccaggggaauuuggcaauugc

SEQ ID NO: 282167 - RNA, 22 nt, Artificial Sequence
  Synthetic
uccaggggaauuuggcaauugc

SEQ ID NO: 282168 - RNA, 23 nt, Artificial Sequence
  Synthetic
uuccaggggaauuuggcaauugc

SEQ ID NO: 282169 - RNA, 24 nt, Artificial Sequence
  Synthetic
auuccaggggaauuuggcaauugc

SEQ ID NO: 282170 - RNA, 18 nt, Artificial Sequence
  Synthetic
cugaagcagaagaauugc

SEQ ID NO: 282171 - RNA, 19 nt, Artificial Sequence
  Synthetic
gcugaagcagaagaauugc

SEQ ID NO: 282172 - RNA, 20 nt, Artificial Sequence
  Synthetic
ggcugaagcagaagaauugc

SEQ ID NO: 282173 - RNA, 21 nt, Artificial Sequence
  Synthetic
aggcugaagcagaagaauugc

SEQ ID NO: 282174 - RNA, 22 nt, Artificial Sequence
  Synthetic
gaggcugaagcagaagaauugc

SEQ ID NO: 282175 - RNA, 23 nt, Artificial Sequence
  Synthetic
ggaggcugaagcagaagaauugc

SEQ ID NO: 282176 - RNA, 24 nt, Artificial Sequence
  Synthetic
gggaggcugaagcagaagaauugc

SEQ ID NO: 282177 - RNA, 18 nt, Artificial Sequence
  Synthetic
cuuuggucacagaauugc

SEQ ID NO: 282178 - RNA, 19 nt, Artificial Sequence
  Synthetic
ucuuuggucacagaauugc

SEQ ID NO: 282179 - RNA, 20 nt, Artificial Sequence
  Synthetic
uucuuuggucacagaauugc

SEQ ID NO: 282180 - RNA, 21 nt, Artificial Sequence
  Synthetic
uuucuuuggucacagaauugc

SEQ ID NO: 282181 - RNA, 22 nt, Artificial Sequence
  Synthetic
uuuucuuuggucacagaauugc

SEQ ID NO: 282182 - RNA, 23 nt, Artificial Sequence
  Synthetic
cuuuucuuuggucacagaauugc

SEQ ID NO: 282183 - RNA, 24 nt, Artificial Sequence
  Synthetic
acuuuucuuuggucacagaauugc

SEQ ID NO: 282184 - RNA, 18 nt, Artificial Sequence
  Synthetic
cugaggcagcagaauugc

SEQ ID NO: 282185 - RNA, 19 nt, Artificial Sequence
  Synthetic
gcugaggcagcagaauugc

SEQ ID NO: 282186 - RNA, 20 nt, Artificial Sequence
  Synthetic
ggcugaggcagcagaauugc

SEQ ID NO: 282187 - RNA, 21 nt, Artificial Sequence
  Synthetic
aggcugaggcagcagaauugc

SEQ ID NO: 282188 - RNA, 22 nt, Artificial Sequence
  Synthetic
gaggcugaggcagcagaauugc

SEQ ID NO: 282189 - RNA, 23 nt, Artificial Sequence
  Synthetic
ggaggcugaggcagcagaauugc

SEQ ID NO: 282190 - RNA, 24 nt, Artificial Sequence
  Synthetic
gggaggcugaggcagcagaauugc

SEQ ID NO: 282191 - RNA, 18 nt, Artificial Sequence
  Synthetic
cugaggcaggagaauugc

SEQ ID NO: 282192 - RNA, 19 nt, Artificial Sequence
  Synthetic
gcugaggcaggagaauugc

SEQ ID NO: 282193 - RNA, 20 nt, Artificial Sequence
  Synthetic
ggcugaggcaggagaauugc

SEQ ID NO: 282194 - RNA, 21 nt, Artificial Sequence
  Synthetic
aggcugaggcaggagaauugc

SEQ ID NO: 282195 - RNA, 22 nt, Artificial Sequence
  Synthetic
gaggcugaggcaggagaauugc

SEQ ID NO: 282196 - RNA, 23 nt, Artificial Sequence
  Synthetic
ggaggcugaggcaggagaauugc

SEQ ID NO: 282197 - RNA, 24 nt, Artificial Sequence
  Synthetic
aggaggcugaggcaggagaauugc

SEQ ID NO: 282198 - RNA, 24 nt, Artificial Sequence
  Synthetic
gggaggcugaggcaggagaauugc

SEQ ID NO: 282199 - RNA, 18 nt, Artificial Sequence
  Synthetic
cugaugcaggagaauugc

SEQ ID NO: 282200 - RNA, 19 nt, Artificial Sequence
  Synthetic
gcugaugcaggagaauugc

SEQ ID NO: 282201 - RNA, 20 nt, Artificial Sequence
  Synthetic
ggcugaugcaggagaauugc

SEQ ID NO: 282202 - RNA, 21 nt, Artificial Sequence
  Synthetic
aggcugaugcaggagaauugc

SEQ ID NO: 282203 - RNA, 22 nt, Artificial Sequence
  Synthetic
gaggcugaugcaggagaauugc

SEQ ID NO: 282204 - RNA, 23 nt, Artificial Sequence
  Synthetic
ggaggcugaugcaggagaauugc

SEQ ID NO: 282205 - RNA, 24 nt, Artificial Sequence
  Synthetic
gggaggcugaugcaggagaauugc

SEQ ID NO: 282206 - RNA, 18 nt, Artificial Sequence
  Synthetic
cugaggcaugagaauugc

SEQ ID NO: 282207 - RNA, 19 nt, Artificial Sequence
  Synthetic
gcugaggcaugagaauugc

SEQ ID NO: 282208 - RNA, 20 nt, Artificial Sequence
  Synthetic
ggcugaggcaugagaauugc

SEQ ID NO: 282209 - RNA, 21 nt, Artificial Sequence
  Synthetic
aggcugaggcaugagaauugc

SEQ ID NO: 282210 - RNA, 22 nt, Artificial Sequence
  Synthetic
gaggcugaggcaugagaauugc

SEQ ID NO: 282211 - RNA, 23 nt, Artificial Sequence
  Synthetic
agaggcugaggcaugagaauugc

SEQ ID NO: 282212 - RNA, 24 nt, Artificial Sequence
  Synthetic
cagaggcugaggcaugagaauugc

SEQ ID NO: 282213 - RNA, 23 nt, Artificial Sequence
  Synthetic
ggaggcugaggcaugagaauugc

SEQ ID NO: 282214 - RNA, 24 nt, Artificial Sequence
  Synthetic
gggaggcugaggcaugagaauugc

SEQ ID NO: 282215 - RNA, 18 nt, Artificial Sequence
  Synthetic
cguuacuaauagaauugc

SEQ ID NO: 282216 - RNA, 19 nt, Artificial Sequence
  Synthetic
acguuacuaauagaauugc

SEQ ID NO: 282217 - RNA, 20 nt, Artificial Sequence
  Synthetic
cacguuacuaauagaauugc

SEQ ID NO: 282218 - RNA, 21 nt, Artificial Sequence
  Synthetic
gcacguuacuaauagaauugc

SEQ ID NO: 282219 - RNA, 22 nt, Artificial Sequence
  Synthetic
ugcacguuacuaauagaauugc

SEQ ID NO: 282220 - RNA, 23 nt, Artificial Sequence
  Synthetic
gugcacguuacuaauagaauugc

SEQ ID NO: 282221 - RNA, 24 nt, Artificial Sequence
  Synthetic
agugcacguuacuaauagaauugc

SEQ ID NO: 282222 - RNA, 18 nt, Artificial Sequence
  Synthetic
uccugaaaacugaauugc

SEQ ID NO: 282223 - RNA, 19 nt, Artificial Sequence
  Synthetic
uuccugaaaacugaauugc

SEQ ID NO: 282224 - RNA, 20 nt, Artificial Sequence
  Synthetic
cuuccugaaaacugaauugc

SEQ ID NO: 282225 - RNA, 21 nt, Artificial Sequence
  Synthetic
ucuuccugaaaacugaauugc

SEQ ID NO: 282226 - RNA, 22 nt, Artificial Sequence
  Synthetic
cucuuccugaaaacugaauugc

SEQ ID NO: 282227 - RNA, 23 nt, Artificial Sequence
  Synthetic
acucuuccugaaaacugaauugc

SEQ ID NO: 282228 - RNA, 24 nt, Artificial Sequence
  Synthetic
uacucuuccugaaaacugaauugc

SEQ ID NO: 282229 - RNA, 18 nt, Artificial Sequence
  Synthetic
aguugccuccauaauugc

SEQ ID NO: 282230 - RNA, 19 nt, Artificial Sequence
  Synthetic
uaguugccuccauaauugc

SEQ ID NO: 282231 - RNA, 20 nt, Artificial Sequence
  Synthetic
auaguugccuccauaauugc

SEQ ID NO: 282232 - RNA, 21 nt, Artificial Sequence
  Synthetic
cauaguugccuccauaauugc

SEQ ID NO: 282233 - RNA, 22 nt, Artificial Sequence
  Synthetic
ccauaguugccuccauaauugc

SEQ ID NO: 282234 - RNA, 23 nt, Artificial Sequence
  Synthetic
uccauaguugccuccauaauugc

SEQ ID NO: 282235 - RNA, 24 nt, Artificial Sequence
  Synthetic
cuccauaguugccuccauaauugc

SEQ ID NO: 282236 - RNA, 18 nt, Artificial Sequence
  Synthetic
agacuagauguuaauugc

SEQ ID NO: 282237 - RNA, 19 nt, Artificial Sequence
  Synthetic
aagacuagauguuaauugc

SEQ ID NO: 282238 - RNA, 20 nt, Artificial Sequence
  Synthetic
caagacuagauguuaauugc

SEQ ID NO: 282239 - RNA, 21 nt, Artificial Sequence
  Synthetic
ccaagacuagauguuaauugc

SEQ ID NO: 282240 - RNA, 22 nt, Artificial Sequence
  Synthetic
accaagacuagauguuaauugc

SEQ ID NO: 282241 - RNA, 23 nt, Artificial Sequence
  Synthetic
aaccaagacuagauguuaauugc

SEQ ID NO: 282242 - RNA, 24 nt, Artificial Sequence
  Synthetic
gaaccaagacuagauguuaauugc

SEQ ID NO: 282243 - RNA, 18 nt, Artificial Sequence
  Synthetic
aaguuugagaagcauugc

SEQ ID NO: 282244 - RNA, 19 nt, Artificial Sequence
  Synthetic
aaaguuugagaagcauugc

SEQ ID NO: 282245 - RNA, 20 nt, Artificial Sequence
  Synthetic
uaaaguuugagaagcauugc

SEQ ID NO: 282246 - RNA, 21 nt, Artificial Sequence
  Synthetic
uuaaaguuugagaagcauugc

SEQ ID NO: 282247 - RNA, 22 nt, Artificial Sequence
  Synthetic
auuaaaguuugagaagcauugc

SEQ ID NO: 282248 - RNA, 23 nt, Artificial Sequence
  Synthetic
cauuaaaguuugagaagcauugc

SEQ ID NO: 282249 - RNA, 24 nt, Artificial Sequence
  Synthetic
acauuaaaguuugagaagcauugc

SEQ ID NO: 282250 - RNA, 18 nt, Artificial Sequence
  Synthetic
aacuuccacuaucauugc

SEQ ID NO: 282251 - RNA, 19 nt, Artificial Sequence
  Synthetic
gaacuuccacuaucauugc

SEQ ID NO: 282252 - RNA, 20 nt, Artificial Sequence
  Synthetic
agaacuuccacuaucauugc

SEQ ID NO: 282253 - RNA, 21 nt, Artificial Sequence
  Synthetic
gagaacuuccacuaucauugc

SEQ ID NO: 282254 - RNA, 22 nt, Artificial Sequence
  Synthetic
agagaacuuccacuaucauugc

SEQ ID NO: 282255 - RNA, 23 nt, Artificial Sequence
  Synthetic
cagagaacuuccacuaucauugc

SEQ ID NO: 282256 - RNA, 24 nt, Artificial Sequence
  Synthetic
ucagagaacuuccacuaucauugc

SEQ ID NO: 282257 - RNA, 18 nt, Artificial Sequence
  Synthetic
cugaggcgggaagauugc

SEQ ID NO: 282258 - RNA, 19 nt, Artificial Sequence
  Synthetic
gcugaggcgggaagauugc

SEQ ID NO: 282259 - RNA, 20 nt, Artificial Sequence
  Synthetic
ggcugaggcgggaagauugc

SEQ ID NO: 282260 - RNA, 21 nt, Artificial Sequence
  Synthetic
aggcugaggcgggaagauugc

SEQ ID NO: 282261 - RNA, 22 nt, Artificial Sequence
  Synthetic
gaggcugaggcgggaagauugc

SEQ ID NO: 282262 - RNA, 23 nt, Artificial Sequence
  Synthetic
ggaggcugaggcgggaagauugc

SEQ ID NO: 282263 - RNA, 24 nt, Artificial Sequence
  Synthetic
aggaggcugaggcgggaagauugc

SEQ ID NO: 282264 - RNA, 18 nt, Artificial Sequence
  Synthetic
caccaaaguugagauugc

SEQ ID NO: 282265 - RNA, 19 nt, Artificial Sequence
  Synthetic
acaccaaaguugagauugc

SEQ ID NO: 282266 - RNA, 20 nt, Artificial Sequence
  Synthetic
gacaccaaaguugagauugc

SEQ ID NO: 282267 - RNA, 21 nt, Artificial Sequence
  Synthetic
agacaccaaaguugagauugc

SEQ ID NO: 282268 - RNA, 22 nt, Artificial Sequence
  Synthetic
cagacaccaaaguugagauugc

SEQ ID NO: 282269 - RNA, 23 nt, Artificial Sequence
  Synthetic
ucagacaccaaaguugagauugc

SEQ ID NO: 282270 - RNA, 24 nt, Artificial Sequence
  Synthetic
aucagacaccaaaguugagauugc

SEQ ID NO: 282271 - RNA, 18 nt, Artificial Sequence
  Synthetic
uuaugagaaguagauugc

SEQ ID NO: 282272 - RNA, 19 nt, Artificial Sequence
  Synthetic
uuuaugagaaguagauugc

SEQ ID NO: 282273 - RNA, 20 nt, Artificial Sequence
  Synthetic
uuuuaugagaaguagauugc

SEQ ID NO: 282274 - RNA, 21 nt, Artificial Sequence
  Synthetic
uuuuuaugagaaguagauugc

SEQ ID NO: 282275 - RNA, 22 nt, Artificial Sequence
  Synthetic
guuuuuaugagaaguagauugc

SEQ ID NO: 282276 - RNA, 23 nt, Artificial Sequence
  Synthetic
uguuuuuaugagaaguagauugc

SEQ ID NO: 282277 - RNA, 24 nt, Artificial Sequence
  Synthetic
uuguuuuuaugagaaguagauugc

SEQ ID NO: 282278 - RNA, 18 nt, Artificial Sequence
  Synthetic
ccaaggcaagaggauugc

SEQ ID NO: 282279 - RNA, 19 nt, Artificial Sequence
  Synthetic
gccaaggcaagaggauugc

SEQ ID NO: 282280 - RNA, 20 nt, Artificial Sequence
  Synthetic
ggccaaggcaagaggauugc

SEQ ID NO: 282281 - RNA, 21 nt, Artificial Sequence
  Synthetic
aggccaaggcaagaggauugc

SEQ ID NO: 282282 - RNA, 22 nt, Artificial Sequence
  Synthetic
gaggccaaggcaagaggauugc

SEQ ID NO: 282283 - RNA, 23 nt, Artificial Sequence
  Synthetic
ggaggccaaggcaagaggauugc

SEQ ID NO: 282284 - RNA, 24 nt, Artificial Sequence
  Synthetic
gggaggccaaggcaagaggauugc

SEQ ID NO: 282285 - RNA, 20 nt, Artificial Sequence
  Synthetic
cgcugaggcaggaggauugc

SEQ ID NO: 282286 - RNA, 21 nt, Artificial Sequence
  Synthetic
acgcugaggcaggaggauugc

SEQ ID NO: 282287 - RNA, 22 nt, Artificial Sequence
  Synthetic
gacgcugaggcaggaggauugc

SEQ ID NO: 282288 - RNA, 23 nt, Artificial Sequence
  Synthetic
ggacgcugaggcaggaggauugc

SEQ ID NO: 282289 - RNA, 24 nt, Artificial Sequence
  Synthetic
aggacgcugaggcaggaggauugc

SEQ ID NO: 282290 - RNA, 18 nt, Artificial Sequence
  Synthetic
cugaggugggaggauugc

SEQ ID NO: 282291 - RNA, 19 nt, Artificial Sequence
  Synthetic
gcugaggugggaggauugc

SEQ ID NO: 282292 - RNA, 20 nt, Artificial Sequence
  Synthetic
ggcugaggugggaggauugc

SEQ ID NO: 282293 - RNA, 21 nt, Artificial Sequence
  Synthetic
aggcugaggugggaggauugc

SEQ ID NO: 282294 - RNA, 22 nt, Artificial Sequence
  Synthetic
gaggcugaggugggaggauugc

SEQ ID NO: 282295 - RNA, 23 nt, Artificial Sequence
  Synthetic
ggaggcugaggugggaggauugc

SEQ ID NO: 282296 - RNA, 24 nt, Artificial Sequence
  Synthetic
aggaggcugaggugggaggauugc

SEQ ID NO: 282297 - RNA, 18 nt, Artificial Sequence
  Synthetic
ccaaagcagguggauugc

SEQ ID NO: 282298 - RNA, 19 nt, Artificial Sequence
  Synthetic
gccaaagcagguggauugc

SEQ ID NO: 282299 - RNA, 20 nt, Artificial Sequence
  Synthetic
ggccaaagcagguggauugc

SEQ ID NO: 282300 - RNA, 21 nt, Artificial Sequence
  Synthetic
aggccaaagcagguggauugc

SEQ ID NO: 282301 - RNA, 22 nt, Artificial Sequence
  Synthetic
gaggccaaagcagguggauugc

SEQ ID NO: 282302 - RNA, 23 nt, Artificial Sequence
  Synthetic
ggaggccaaagcagguggauugc

SEQ ID NO: 282303 - RNA, 24 nt, Artificial Sequence
  Synthetic
gggaggccaaagcagguggauugc

SEQ ID NO: 282304 - RNA, 18 nt, Artificial Sequence
  Synthetic
gaacagauuggugauugc

SEQ ID NO: 282305 - RNA, 19 nt, Artificial Sequence
  Synthetic
agaacagauuggugauugc

SEQ ID NO: 282306 - RNA, 20 nt, Artificial Sequence
  Synthetic
aagaacagauuggugauugc

SEQ ID NO: 282307 - RNA, 21 nt, Artificial Sequence
  Synthetic
gaagaacagauuggugauugc

SEQ ID NO: 282308 - RNA, 22 nt, Artificial Sequence
  Synthetic
ugaagaacagauuggugauugc

SEQ ID NO: 282309 - RNA, 23 nt, Artificial Sequence
  Synthetic
augaagaacagauuggugauugc

SEQ ID NO: 282310 - RNA, 24 nt, Artificial Sequence
  Synthetic
aaugaagaacagauuggugauugc

SEQ ID NO: 282311 - RNA, 18 nt, Artificial Sequence
  Synthetic
aggaucagucuauauugc

SEQ ID NO: 282312 - RNA, 19 nt, Artificial Sequence
  Synthetic
caggaucagucuauauugc

SEQ ID NO: 282313 - RNA, 20 nt, Artificial Sequence
  Synthetic
gcaggaucagucuauauugc

SEQ ID NO: 282314 - RNA, 21 nt, Artificial Sequence
  Synthetic
agcaggaucagucuauauugc

SEQ ID NO: 282315 - RNA, 22 nt, Artificial Sequence
  Synthetic
aagcaggaucagucuauauugc

SEQ ID NO: 282316 - RNA, 23 nt, Artificial Sequence
  Synthetic
uaagcaggaucagucuauauugc

SEQ ID NO: 282317 - RNA, 24 nt, Artificial Sequence
  Synthetic
auaagcaggaucagucuauauugc

SEQ ID NO: 282318 - RNA, 18 nt, Artificial Sequence
  Synthetic
caauauauuguauauugc

SEQ ID NO: 282319 - RNA, 19 nt, Artificial Sequence
  Synthetic
gcaauauauuguauauugc

SEQ ID NO: 282320 - RNA, 20 nt, Artificial Sequence
  Synthetic
ugcaauauauuguauauugc

SEQ ID NO: 282321 - RNA, 21 nt, Artificial Sequence
  Synthetic
gugcaauauauuguauauugc

SEQ ID NO: 282322 - RNA, 22 nt, Artificial Sequence
  Synthetic
ugugcaauauauuguauauugc

SEQ ID NO: 282323 - RNA, 23 nt, Artificial Sequence
  Synthetic
cugugcaauauauuguauauugc

SEQ ID NO: 282324 - RNA, 24 nt, Artificial Sequence
  Synthetic
ucugugcaauauauuguauauugc

SEQ ID NO: 282325 - RNA, 18 nt, Artificial Sequence
  Synthetic
gaaacuuaauuauauugc

SEQ ID NO: 282326 - RNA, 19 nt, Artificial Sequence
  Synthetic
agaaacuuaauuauauugc

SEQ ID NO: 282327 - RNA, 20 nt, Artificial Sequence
  Synthetic
uagaaacuuaauuauauugc

SEQ ID NO: 282328 - RNA, 21 nt, Artificial Sequence
  Synthetic
uuagaaacuuaauuauauugc

SEQ ID NO: 282329 - RNA, 22 nt, Artificial Sequence
  Synthetic
guuagaaacuuaauuauauugc

SEQ ID NO: 282330 - RNA, 23 nt, Artificial Sequence
  Synthetic
aguuagaaacuuaauuauauugc

SEQ ID NO: 282331 - RNA, 24 nt, Artificial Sequence
  Synthetic
gaguuagaaacuuaauuauauugc

SEQ ID NO: 282332 - RNA, 18 nt, Artificial Sequence
  Synthetic
uucucagcaaacuauugc

SEQ ID NO: 282333 - RNA, 19 nt, Artificial Sequence
  Synthetic
guucucagcaaacuauugc

SEQ ID NO: 282334 - RNA, 20 nt, Artificial Sequence
  Synthetic
cguucucagcaaacuauugc

SEQ ID NO: 282335 - RNA, 21 nt, Artificial Sequence
  Synthetic
ucguucucagcaaacuauugc

SEQ ID NO: 282336 - RNA, 22 nt, Artificial Sequence
  Synthetic
aucguucucagcaaacuauugc

SEQ ID NO: 282337 - RNA, 23 nt, Artificial Sequence
  Synthetic
caucguucucagcaaacuauugc

SEQ ID NO: 282338 - RNA, 24 nt, Artificial Sequence
  Synthetic
ccaucguucucagcaaacuauugc

SEQ ID NO: 282339 - RNA, 18 nt, Artificial Sequence
  Synthetic
uucucaguaaacuauugc

SEQ ID NO: 282340 - RNA, 19 nt, Artificial Sequence
  Synthetic
auucucaguaaacuauugc

SEQ ID NO: 282341 - RNA, 20 nt, Artificial Sequence
  Synthetic
cauucucaguaaacuauugc

SEQ ID NO: 282342 - RNA, 21 nt, Artificial Sequence
  Synthetic
ucauucucaguaaacuauugc

SEQ ID NO: 282343 - RNA, 22 nt, Artificial Sequence
  Synthetic
aucauucucaguaaacuauugc

SEQ ID NO: 282344 - RNA, 23 nt, Artificial Sequence
  Synthetic
caucauucucaguaaacuauugc

SEQ ID NO: 282345 - RNA, 24 nt, Artificial Sequence
  Synthetic
ucaucauucucaguaaacuauugc

SEQ ID NO: 282346 - RNA, 18 nt, Artificial Sequence
  Synthetic
cuggggcgagaguauugc

SEQ ID NO: 282347 - RNA, 19 nt, Artificial Sequence
  Synthetic
gcuggggcgagaguauugc

SEQ ID NO: 282348 - RNA, 20 nt, Artificial Sequence
  Synthetic
agcuggggcgagaguauugc

SEQ ID NO: 282349 - RNA, 21 nt, Artificial Sequence
  Synthetic
aagcuggggcgagaguauugc

SEQ ID NO: 282350 - RNA, 22 nt, Artificial Sequence
  Synthetic
gaagcuggggcgagaguauugc

SEQ ID NO: 282351 - RNA, 23 nt, Artificial Sequence
  Synthetic
ggaagcuggggcgagaguauugc

SEQ ID NO: 282352 - RNA, 24 nt, Artificial Sequence
  Synthetic
gggaagcuggggcgagaguauugc

SEQ ID NO: 282353 - RNA, 18 nt, Artificial Sequence
  Synthetic
uauuuucuuuuguauugc

SEQ ID NO: 282354 - RNA, 19 nt, Artificial Sequence
  Synthetic
uuauuuucuuuuguauugc

SEQ ID NO: 282355 - RNA, 20 nt, Artificial Sequence
  Synthetic
uuuauuuucuuuuguauugc

SEQ ID NO: 282356 - RNA, 21 nt, Artificial Sequence
  Synthetic
auuuauuuucuuuuguauugc

SEQ ID NO: 282357 - RNA, 22 nt, Artificial Sequence
  Synthetic
aauuuauuuucuuuuguauugc

SEQ ID NO: 282358 - RNA, 23 nt, Artificial Sequence
  Synthetic
gaauuuauuuucuuuuguauugc

SEQ ID NO: 282359 - RNA, 24 nt, Artificial Sequence
  Synthetic
agaauuuauuuucuuuuguauugc

SEQ ID NO: 282360 - RNA, 18 nt, Artificial Sequence
  Synthetic
gaacuagguucuuauugc

SEQ ID NO: 282361 - RNA, 19 nt, Artificial Sequence
  Synthetic
agaacuagguucuuauugc

SEQ ID NO: 282362 - RNA, 20 nt, Artificial Sequence
  Synthetic
cagaacuagguucuuauugc

SEQ ID NO: 282363 - RNA, 21 nt, Artificial Sequence
  Synthetic
acagaacuagguucuuauugc

SEQ ID NO: 282364 - RNA, 22 nt, Artificial Sequence
  Synthetic
cacagaacuagguucuuauugc

SEQ ID NO: 282365 - RNA, 23 nt, Artificial Sequence
  Synthetic
ccacagaacuagguucuuauugc

SEQ ID NO: 282366 - RNA, 24 nt, Artificial Sequence
  Synthetic
gccacagaacuagguucuuauugc

SEQ ID NO: 282367 - RNA, 18 nt, Artificial Sequence
  Synthetic
gaaugaacuauuuauugc

SEQ ID NO: 282368 - RNA, 19 nt, Artificial Sequence
  Synthetic
ugaaugaacuauuuauugc

SEQ ID NO: 282369 - RNA, 20 nt, Artificial Sequence
  Synthetic
uugaaugaacuauuuauugc

SEQ ID NO: 282370 - RNA, 21 nt, Artificial Sequence
  Synthetic
uuugaaugaacuauuuauugc

SEQ ID NO: 282371 - RNA, 22 nt, Artificial Sequence
  Synthetic
cuuugaaugaacuauuuauugc

SEQ ID NO: 282372 - RNA, 23 nt, Artificial Sequence
  Synthetic
acuuugaaugaacuauuuauugc

SEQ ID NO: 282373 - RNA, 24 nt, Artificial Sequence
  Synthetic
cacuuugaaugaacuauuuauugc

SEQ ID NO: 282374 - RNA, 18 nt, Artificial Sequence
  Synthetic
agaauuuuuagaacuugc

SEQ ID NO: 282375 - RNA, 19 nt, Artificial Sequence
  Synthetic
cagaauuuuuagaacuugc

SEQ ID NO: 282376 - RNA, 20 nt, Artificial Sequence
  Synthetic
acagaauuuuuagaacuugc

SEQ ID NO: 282377 - RNA, 21 nt, Artificial Sequence
  Synthetic
cacagaauuuuuagaacuugc

SEQ ID NO: 282378 - RNA, 22 nt, Artificial Sequence
  Synthetic
gcacagaauuuuuagaacuugc

SEQ ID NO: 282379 - RNA, 23 nt, Artificial Sequence
  Synthetic
ugcacagaauuuuuagaacuugc

SEQ ID NO: 282380 - RNA, 24 nt, Artificial Sequence
  Synthetic
augcacagaauuuuuagaacuugc

SEQ ID NO: 282381 - RNA, 18 nt, Artificial Sequence
  Synthetic
uggguucaacuaacuugc

SEQ ID NO: 282382 - RNA, 19 nt, Artificial Sequence
  Synthetic
uuggguucaacuaacuugc

SEQ ID NO: 282383 - RNA, 20 nt, Artificial Sequence
  Synthetic
uuuggguucaacuaacuugc

SEQ ID NO: 282384 - RNA, 21 nt, Artificial Sequence
  Synthetic
cuuuggguucaacuaacuugc

SEQ ID NO: 282385 - RNA, 22 nt, Artificial Sequence
  Synthetic
ucuuuggguucaacuaacuugc

SEQ ID NO: 282386 - RNA, 23 nt, Artificial Sequence
  Synthetic
cucuuuggguucaacuaacuugc

SEQ ID NO: 282387 - RNA, 24 nt, Artificial Sequence
  Synthetic
ucucuuuggguucaacuaacuugc

SEQ ID NO: 282388 - RNA, 18 nt, Artificial Sequence
  Synthetic
caauauucacucacuugc

SEQ ID NO: 282389 - RNA, 19 nt, Artificial Sequence
  Synthetic
gcaauauucacucacuugc

SEQ ID NO: 282390 - RNA, 20 nt, Artificial Sequence
  Synthetic
ggcaauauucacucacuugc

SEQ ID NO: 282391 - RNA, 21 nt, Artificial Sequence
  Synthetic
uggcaauauucacucacuugc

SEQ ID NO: 282392 - RNA, 22 nt, Artificial Sequence
  Synthetic
uuggcaauauucacucacuugc

SEQ ID NO: 282393 - RNA, 23 nt, Artificial Sequence
  Synthetic
guuggcaauauucacucacuugc

SEQ ID NO: 282394 - RNA, 24 nt, Artificial Sequence
  Synthetic
uguuggcaauauucacucacuugc

SEQ ID NO: 282395 - RNA, 18 nt, Artificial Sequence
  Synthetic
aucauaucaaagacuugc

SEQ ID NO: 282396 - RNA, 19 nt, Artificial Sequence
  Synthetic
aaucauaucaaagacuugc

SEQ ID NO: 282397 - RNA, 20 nt, Artificial Sequence
  Synthetic
aaaucauaucaaagacuugc

SEQ ID NO: 282398 - RNA, 21 nt, Artificial Sequence
  Synthetic
caaaucauaucaaagacuugc

SEQ ID NO: 282399 - RNA, 22 nt, Artificial Sequence
  Synthetic
ccaaaucauaucaaagacuugc

SEQ ID NO: 282400 - RNA, 23 nt, Artificial Sequence
  Synthetic
uccaaaucauaucaaagacuugc

SEQ ID NO: 282401 - RNA, 24 nt, Artificial Sequence
  Synthetic
auccaaaucauaucaaagacuugc

SEQ ID NO: 282402 - RNA, 18 nt, Artificial Sequence
  Synthetic
cccgacuuccugacuugc

SEQ ID NO: 282403 - RNA, 19 nt, Artificial Sequence
  Synthetic
ucccgacuuccugacuugc

SEQ ID NO: 282404 - RNA, 20 nt, Artificial Sequence
  Synthetic
uucccgacuuccugacuugc

SEQ ID NO: 282405 - RNA, 21 nt, Artificial Sequence
  Synthetic
auucccgacuuccugacuugc

SEQ ID NO: 282406 - RNA, 22 nt, Artificial Sequence
  Synthetic
uauucccgacuuccugacuugc

SEQ ID NO: 282407 - RNA, 23 nt, Artificial Sequence
  Synthetic
cuauucccgacuuccugacuugc

SEQ ID NO: 282408 - RNA, 24 nt, Artificial Sequence
  Synthetic
ucuauucccgacuuccugacuugc

SEQ ID NO: 282409 - RNA, 18 nt, Artificial Sequence
  Synthetic
gcagcuauauuuacuugc

SEQ ID NO: 282410 - RNA, 19 nt, Artificial Sequence
  Synthetic
ggcagcuauauuuacuugc

SEQ ID NO: 282411 - RNA, 20 nt, Artificial Sequence
  Synthetic
cggcagcuauauuuacuugc

SEQ ID NO: 282412 - RNA, 21 nt, Artificial Sequence
  Synthetic
acggcagcuauauuuacuugc

SEQ ID NO: 282413 - RNA, 22 nt, Artificial Sequence
  Synthetic
uacggcagcuauauuuacuugc

SEQ ID NO: 282414 - RNA, 23 nt, Artificial Sequence
  Synthetic
cuacggcagcuauauuuacuugc

SEQ ID NO: 282415 - RNA, 24 nt, Artificial Sequence
  Synthetic
ucuacggcagcuauauuuacuugc

SEQ ID NO: 282416 - RNA, 18 nt, Artificial Sequence
  Synthetic
auaaugggguggccuugc

SEQ ID NO: 282417 - RNA, 19 nt, Artificial Sequence
  Synthetic
uauaaugggguggccuugc

SEQ ID NO: 282418 - RNA, 20 nt, Artificial Sequence
  Synthetic
uuauaaugggguggccuugc

SEQ ID NO: 282419 - RNA, 21 nt, Artificial Sequence
  Synthetic
auuauaaugggguggccuugc

SEQ ID NO: 282420 - RNA, 22 nt, Artificial Sequence
  Synthetic
aauuauaaugggguggccuugc

SEQ ID NO: 282421 - RNA, 23 nt, Artificial Sequence
  Synthetic
aaauuauaaugggguggccuugc

SEQ ID NO: 282422 - RNA, 24 nt, Artificial Sequence
  Synthetic
uaaauuauaaugggguggccuugc

SEQ ID NO: 282423 - RNA, 18 nt, Artificial Sequence
  Synthetic
ccaauccaaacuccuugc

SEQ ID NO: 282424 - RNA, 19 nt, Artificial Sequence
  Synthetic
uccaauccaaacuccuugc

SEQ ID NO: 282425 - RNA, 20 nt, Artificial Sequence
  Synthetic
uuccaauccaaacuccuugc

SEQ ID NO: 282426 - RNA, 21 nt, Artificial Sequence
  Synthetic
auuccaauccaaacuccuugc

SEQ ID NO: 282427 - RNA, 22 nt, Artificial Sequence
  Synthetic
aauuccaauccaaacuccuugc

SEQ ID NO: 282428 - RNA, 23 nt, Artificial Sequence
  Synthetic
caauuccaauccaaacuccuugc

SEQ ID NO: 282429 - RNA, 24 nt, Artificial Sequence
  Synthetic
ccaauuccaauccaaacuccuugc

SEQ ID NO: 282430 - RNA, 18 nt, Artificial Sequence
  Synthetic
gugcucacaaaugcuugc

SEQ ID NO: 282431 - RNA, 19 nt, Artificial Sequence
  Synthetic
ugugcucacaaaugcuugc

SEQ ID NO: 282432 - RNA, 20 nt, Artificial Sequence
  Synthetic
uugugcucacaaaugcuugc

SEQ ID NO: 282433 - RNA, 21 nt, Artificial Sequence
  Synthetic
uuugugcucacaaaugcuugc

SEQ ID NO: 282434 - RNA, 22 nt, Artificial Sequence
  Synthetic
uuuugugcucacaaaugcuugc

SEQ ID NO: 282435 - RNA, 23 nt, Artificial Sequence
  Synthetic
guuuugugcucacaaaugcuugc

SEQ ID NO: 282436 - RNA, 24 nt, Artificial Sequence
  Synthetic
gguuuugugcucacaaaugcuugc

SEQ ID NO: 282437 - RNA, 18 nt, Artificial Sequence
  Synthetic
aaacagcuaaaaucuugc

SEQ ID NO: 282438 - RNA, 19 nt, Artificial Sequence
  Synthetic
uaaacagcuaaaaucuugc

SEQ ID NO: 282439 - RNA, 20 nt, Artificial Sequence
  Synthetic
uuaaacagcuaaaaucuugc

SEQ ID NO: 282440 - RNA, 21 nt, Artificial Sequence
  Synthetic
auuaaacagcuaaaaucuugc

SEQ ID NO: 282441 - RNA, 22 nt, Artificial Sequence
  Synthetic
uauuaaacagcuaaaaucuugc

SEQ ID NO: 282442 - RNA, 23 nt, Artificial Sequence
  Synthetic
cuauuaaacagcuaaaaucuugc

SEQ ID NO: 282443 - RNA, 24 nt, Artificial Sequence
  Synthetic
gcuauuaaacagcuaaaaucuugc

SEQ ID NO: 282444 - RNA, 18 nt, Artificial Sequence
  Synthetic
cugacuuugaaaucuugc

SEQ ID NO: 282445 - RNA, 19 nt, Artificial Sequence
  Synthetic
acugacuuugaaaucuugc

SEQ ID NO: 282446 - RNA, 20 nt, Artificial Sequence
  Synthetic
uacugacuuugaaaucuugc

SEQ ID NO: 282447 - RNA, 21 nt, Artificial Sequence
  Synthetic
uuacugacuuugaaaucuugc

SEQ ID NO: 282448 - RNA, 22 nt, Artificial Sequence
  Synthetic
uuuacugacuuugaaaucuugc

SEQ ID NO: 282449 - RNA, 23 nt, Artificial Sequence
  Synthetic
uuuuacugacuuugaaaucuugc

SEQ ID NO: 282450 - RNA, 24 nt, Artificial Sequence
  Synthetic
auuuuacugacuuugaaaucuugc

SEQ ID NO: 282451 - RNA, 18 nt, Artificial Sequence
  Synthetic
aguuggcugucaucuugc

SEQ ID NO: 282452 - RNA, 19 nt, Artificial Sequence
  Synthetic
aaguuggcugucaucuugc

SEQ ID NO: 282453 - RNA, 20 nt, Artificial Sequence
  Synthetic
aaaguuggcugucaucuugc

SEQ ID NO: 282454 - RNA, 21 nt, Artificial Sequence
  Synthetic
aaaaguuggcugucaucuugc

SEQ ID NO: 282455 - RNA, 22 nt, Artificial Sequence
  Synthetic
aaaaaguuggcugucaucuugc

SEQ ID NO: 282456 - RNA, 23 nt, Artificial Sequence
  Synthetic
caaaaaguuggcugucaucuugc

SEQ ID NO: 282457 - RNA, 24 nt, Artificial Sequence
  Synthetic
acaaaaaguuggcugucaucuugc

SEQ ID NO: 282458 - RNA, 18 nt, Artificial Sequence
  Synthetic
agaaaaauauagucuugc

SEQ ID NO: 282459 - RNA, 19 nt, Artificial Sequence
  Synthetic
uagaaaaauauagucuugc

SEQ ID NO: 282460 - RNA, 20 nt, Artificial Sequence
  Synthetic
uuagaaaaauauagucuugc

SEQ ID NO: 282461 - RNA, 21 nt, Artificial Sequence
  Synthetic
cuuagaaaaauauagucuugc

SEQ ID NO: 282462 - RNA, 22 nt, Artificial Sequence
  Synthetic
acuuagaaaaauauagucuugc

SEQ ID NO: 282463 - RNA, 23 nt, Artificial Sequence
  Synthetic
aacuuagaaaaauauagucuugc

SEQ ID NO: 282464 - RNA, 24 nt, Artificial Sequence
  Synthetic
gaacuuagaaaaauauagucuugc

SEQ ID NO: 282465 - RNA, 18 nt, Artificial Sequence
  Synthetic
uauuagaaaucuucuugc

SEQ ID NO: 282466 - RNA, 19 nt, Artificial Sequence
  Synthetic
uuauuagaaaucuucuugc

SEQ ID NO: 282467 - RNA, 20 nt, Artificial Sequence
  Synthetic
auuauuagaaaucuucuugc

SEQ ID NO: 282468 - RNA, 21 nt, Artificial Sequence
  Synthetic
cauuauuagaaaucuucuugc

SEQ ID NO: 282469 - RNA, 22 nt, Artificial Sequence
  Synthetic
gcauuauuagaaaucuucuugc

SEQ ID NO: 282470 - RNA, 23 nt, Artificial Sequence
  Synthetic
agcauuauuagaaaucuucuugc

SEQ ID NO: 282471 - RNA, 24 nt, Artificial Sequence
  Synthetic
aagcauuauuagaaaucuucuugc

SEQ ID NO: 282472 - RNA, 18 nt, Artificial Sequence
  Synthetic
uucugcuucuguucuugc

SEQ ID NO: 282473 - RNA, 19 nt, Artificial Sequence
  Synthetic
cuucugcuucuguucuugc

SEQ ID NO: 282474 - RNA, 20 nt, Artificial Sequence
  Synthetic
gcuucugcuucuguucuugc

SEQ ID NO: 282475 - RNA, 21 nt, Artificial Sequence
  Synthetic
ugcuucugcuucuguucuugc

SEQ ID NO: 282476 - RNA, 22 nt, Artificial Sequence
  Synthetic
gugcuucugcuucuguucuugc

SEQ ID NO: 282477 - RNA, 23 nt, Artificial Sequence
  Synthetic
agugcuucugcuucuguucuugc

SEQ ID NO: 282478 - RNA, 24 nt, Artificial Sequence
  Synthetic
gagugcuucugcuucuguucuugc

SEQ ID NO: 282479 - RNA, 18 nt, Artificial Sequence
  Synthetic
aagugaucaguuucuugc

SEQ ID NO: 282480 - RNA, 19 nt, Artificial Sequence
  Synthetic
uaagugaucaguuucuugc

SEQ ID NO: 282481 - RNA, 20 nt, Artificial Sequence
  Synthetic
guaagugaucaguuucuugc

SEQ ID NO: 282482 - RNA, 21 nt, Artificial Sequence
  Synthetic
gguaagugaucaguuucuugc

SEQ ID NO: 282483 - RNA, 22 nt, Artificial Sequence
  Synthetic
agguaagugaucaguuucuugc

SEQ ID NO: 282484 - RNA, 23 nt, Artificial Sequence
  Synthetic
cagguaagugaucaguuucuugc

SEQ ID NO: 282485 - RNA, 24 nt, Artificial Sequence
  Synthetic
acagguaagugaucaguuucuugc

SEQ ID NO: 282486 - RNA, 18 nt, Artificial Sequence
  Synthetic
agaguuguauuuucuugc

SEQ ID NO: 282487 - RNA, 19 nt, Artificial Sequence
  Synthetic
uagaguuguauuuucuugc

SEQ ID NO: 282488 - RNA, 20 nt, Artificial Sequence
  Synthetic
auagaguuguauuuucuugc

SEQ ID NO: 282489 - RNA, 21 nt, Artificial Sequence
  Synthetic
cauagaguuguauuuucuugc

SEQ ID NO: 282490 - RNA, 22 nt, Artificial Sequence
  Synthetic
gcauagaguuguauuuucuugc

SEQ ID NO: 282491 - RNA, 23 nt, Artificial Sequence
  Synthetic
agcauagaguuguauuuucuugc

SEQ ID NO: 282492 - RNA, 24 nt, Artificial Sequence
  Synthetic
cagcauagaguuguauuuucuugc

SEQ ID NO: 282493 - RNA, 18 nt, Artificial Sequence
  Synthetic
gcaacucacaaaaguugc

SEQ ID NO: 282494 - RNA, 19 nt, Artificial Sequence
  Synthetic
ugcaacucacaaaaguugc

SEQ ID NO: 282495 - RNA, 20 nt, Artificial Sequence
  Synthetic
augcaacucacaaaaguugc

SEQ ID NO: 282496 - RNA, 21 nt, Artificial Sequence
  Synthetic
aaugcaacucacaaaaguugc

SEQ ID NO: 282497 - RNA, 22 nt, Artificial Sequence
  Synthetic
aaaugcaacucacaaaaguugc

SEQ ID NO: 282498 - RNA, 23 nt, Artificial Sequence
  Synthetic
uaaaugcaacucacaaaaguugc

SEQ ID NO: 282499 - RNA, 24 nt, Artificial Sequence
  Synthetic
uuaaaugcaacucacaaaaguugc

SEQ ID NO: 282500 - RNA, 18 nt, Artificial Sequence
  Synthetic
aaaaauauaggaaguugc

SEQ ID NO: 282501 - RNA, 19 nt, Artificial Sequence
  Synthetic
gaaaaauauaggaaguugc

SEQ ID NO: 282502 - RNA, 20 nt, Artificial Sequence
  Synthetic
ugaaaaauauaggaaguugc

SEQ ID NO: 282503 - RNA, 21 nt, Artificial Sequence
  Synthetic
uugaaaaauauaggaaguugc

SEQ ID NO: 282504 - RNA, 22 nt, Artificial Sequence
  Synthetic
uuugaaaaauauaggaaguugc

SEQ ID NO: 282505 - RNA, 23 nt, Artificial Sequence
  Synthetic
auuugaaaaauauaggaaguugc

SEQ ID NO: 282506 - RNA, 24 nt, Artificial Sequence
  Synthetic
aauuugaaaaauauaggaaguugc

SEQ ID NO: 282507 - RNA, 18 nt, Artificial Sequence
  Synthetic
uagcuaaaaugaaguugc

SEQ ID NO: 282508 - RNA, 19 nt, Artificial Sequence
  Synthetic
uuagcuaaaaugaaguugc

SEQ ID NO: 282509 - RNA, 20 nt, Artificial Sequence
  Synthetic
cuuagcuaaaaugaaguugc

SEQ ID NO: 282510 - RNA, 21 nt, Artificial Sequence
  Synthetic
acuuagcuaaaaugaaguugc

SEQ ID NO: 282511 - RNA, 22 nt, Artificial Sequence
  Synthetic
uacuuagcuaaaaugaaguugc

SEQ ID NO: 282512 - RNA, 23 nt, Artificial Sequence
  Synthetic
auacuuagcuaaaaugaaguugc

SEQ ID NO: 282513 - RNA, 24 nt, Artificial Sequence
  Synthetic
cauacuuagcuaaaaugaaguugc

SEQ ID NO: 282514 - RNA, 18 nt, Artificial Sequence
  Synthetic
cuuuaauagugcaguugc

SEQ ID NO: 282515 - RNA, 19 nt, Artificial Sequence
  Synthetic
ucuuuaauagugcaguugc

SEQ ID NO: 282516 - RNA, 20 nt, Artificial Sequence
  Synthetic
uucuuuaauagugcaguugc

SEQ ID NO: 282517 - RNA, 21 nt, Artificial Sequence
  Synthetic
guucuuuaauagugcaguugc

SEQ ID NO: 282518 - RNA, 22 nt, Artificial Sequence
  Synthetic
gguucuuuaauagugcaguugc

SEQ ID NO: 282519 - RNA, 23 nt, Artificial Sequence
  Synthetic
agguucuuuaauagugcaguugc

SEQ ID NO: 282520 - RNA, 24 nt, Artificial Sequence
  Synthetic
aagguucuuuaauagugcaguugc

SEQ ID NO: 282521 - RNA, 18 nt, Artificial Sequence
  Synthetic
aauaggaagcagaguugc

SEQ ID NO: 282522 - RNA, 19 nt, Artificial Sequence
  Synthetic
gaauaggaagcagaguugc

SEQ ID NO: 282523 - RNA, 20 nt, Artificial Sequence
  Synthetic
agaauaggaagcagaguugc

SEQ ID NO: 282524 - RNA, 21 nt, Artificial Sequence
  Synthetic
uagaauaggaagcagaguugc

SEQ ID NO: 282525 - RNA, 22 nt, Artificial Sequence
  Synthetic
uuagaauaggaagcagaguugc

SEQ ID NO: 282526 - RNA, 23 nt, Artificial Sequence
  Synthetic
guuagaauaggaagcagaguugc

SEQ ID NO: 282527 - RNA, 24 nt, Artificial Sequence
  Synthetic
uguuagaauaggaagcagaguugc

SEQ ID NO: 282528 - RNA, 18 nt, Artificial Sequence
  Synthetic
cugaggugggagaguugc

SEQ ID NO: 282529 - RNA, 19 nt, Artificial Sequence
  Synthetic
ucugaggugggagaguugc

SEQ ID NO: 282530 - RNA, 20 nt, Artificial Sequence
  Synthetic
gucugaggugggagaguugc

SEQ ID NO: 282531 - RNA, 21 nt, Artificial Sequence
  Synthetic
agucugaggugggagaguugc

SEQ ID NO: 282532 - RNA, 22 nt, Artificial Sequence
  Synthetic
gagucugaggugggagaguugc

SEQ ID NO: 282533 - RNA, 23 nt, Artificial Sequence
  Synthetic
ggagucugaggugggagaguugc

SEQ ID NO: 282534 - RNA, 24 nt, Artificial Sequence
  Synthetic
gggagucugaggugggagaguugc

SEQ ID NO: 282535 - RNA, 18 nt, Artificial Sequence
  Synthetic
cugauacauaguaguugc

SEQ ID NO: 282536 - RNA, 19 nt, Artificial Sequence
  Synthetic
ucugauacauaguaguugc

SEQ ID NO: 282537 - RNA, 20 nt, Artificial Sequence
  Synthetic
gucugauacauaguaguugc

SEQ ID NO: 282538 - RNA, 21 nt, Artificial Sequence
  Synthetic
ugucugauacauaguaguugc

SEQ ID NO: 282539 - RNA, 22 nt, Artificial Sequence
  Synthetic
gugucugauacauaguaguugc

SEQ ID NO: 282540 - RNA, 23 nt, Artificial Sequence
  Synthetic
agugucugauacauaguaguugc

SEQ ID NO: 282541 - RNA, 24 nt, Artificial Sequence
  Synthetic
cagugucugauacauaguaguugc

SEQ ID NO: 282542 - RNA, 18 nt, Artificial Sequence
  Synthetic
acguauuuauguaguugc

SEQ ID NO: 282543 - RNA, 19 nt, Artificial Sequence
  Synthetic
uacguauuuauguaguugc

SEQ ID NO: 282544 - RNA, 20 nt, Artificial Sequence
  Synthetic
auacguauuuauguaguugc

SEQ ID NO: 282545 - RNA, 21 nt, Artificial Sequence
  Synthetic
uauacguauuuauguaguugc

SEQ ID NO: 282546 - RNA, 22 nt, Artificial Sequence
  Synthetic
guauacguauuuauguaguugc

SEQ ID NO: 282547 - RNA, 23 nt, Artificial Sequence
  Synthetic
gguauacguauuuauguaguugc

SEQ ID NO: 282548 - RNA, 24 nt, Artificial Sequence
  Synthetic
ugguauacguauuuauguaguugc

SEQ ID NO: 282549 - RNA, 18 nt, Artificial Sequence
  Synthetic
ugacaucaaguuaguugc

SEQ ID NO: 282550 - RNA, 19 nt, Artificial Sequence
  Synthetic
augacaucaaguuaguugc

SEQ ID NO: 282551 - RNA, 20 nt, Artificial Sequence
  Synthetic
aaugacaucaaguuaguugc

SEQ ID NO: 282552 - RNA, 21 nt, Artificial Sequence
  Synthetic
caaugacaucaaguuaguugc

SEQ ID NO: 282553 - RNA, 22 nt, Artificial Sequence
  Synthetic
ucaaugacaucaaguuaguugc

SEQ ID NO: 282554 - RNA, 23 nt, Artificial Sequence
  Synthetic
uucaaugacaucaaguuaguugc

SEQ ID NO: 282555 - RNA, 24 nt, Artificial Sequence
  Synthetic
auucaaugacaucaaguuaguugc

SEQ ID NO: 282556 - RNA, 18 nt, Artificial Sequence
  Synthetic
ugauuaucuugacguugc

SEQ ID NO: 282557 - RNA, 19 nt, Artificial Sequence
  Synthetic
gugauuaucuugacguugc

SEQ ID NO: 282558 - RNA, 20 nt, Artificial Sequence
  Synthetic
ugugauuaucuugacguugc

SEQ ID NO: 282559 - RNA, 21 nt, Artificial Sequence
  Synthetic
uugugauuaucuugacguugc

SEQ ID NO: 282560 - RNA, 22 nt, Artificial Sequence
  Synthetic
guugugauuaucuugacguugc

SEQ ID NO: 282561 - RNA, 23 nt, Artificial Sequence
  Synthetic
aguugugauuaucuugacguugc

SEQ ID NO: 282562 - RNA, 24 nt, Artificial Sequence
  Synthetic
uaguugugauuaucuugacguugc

SEQ ID NO: 282563 - RNA, 18 nt, Artificial Sequence
  Synthetic
ccgacaggagaagguugc

SEQ ID NO: 282564 - RNA, 19 nt, Artificial Sequence
  Synthetic
accgacaggagaagguugc

SEQ ID NO: 282565 - RNA, 20 nt, Artificial Sequence
  Synthetic
gaccgacaggagaagguugc

SEQ ID NO: 282566 - RNA, 21 nt, Artificial Sequence
  Synthetic
agaccgacaggagaagguugc

SEQ ID NO: 282567 - RNA, 22 nt, Artificial Sequence
  Synthetic
aagaccgacaggagaagguugc

SEQ ID NO: 282568 - RNA, 23 nt, Artificial Sequence
  Synthetic
aaagaccgacaggagaagguugc

SEQ ID NO: 282569 - RNA, 24 nt, Artificial Sequence
  Synthetic
aaaagaccgacaggagaagguugc

SEQ ID NO: 282570 - RNA, 18 nt, Artificial Sequence
  Synthetic
uggcugugguaagguugc

SEQ ID NO: 282571 - RNA, 19 nt, Artificial Sequence
  Synthetic
auggcugugguaagguugc

SEQ ID NO: 282572 - RNA, 20 nt, Artificial Sequence
  Synthetic
cauggcugugguaagguugc

SEQ ID NO: 282573 - RNA, 21 nt, Artificial Sequence
  Synthetic
ucauggcugugguaagguugc

SEQ ID NO: 282574 - RNA, 22 nt, Artificial Sequence
  Synthetic
aucauggcugugguaagguugc

SEQ ID NO: 282575 - RNA, 23 nt, Artificial Sequence
  Synthetic
aaucauggcugugguaagguugc

SEQ ID NO: 282576 - RNA, 24 nt, Artificial Sequence
  Synthetic
aaaucauggcugugguaagguugc

SEQ ID NO: 282577 - RNA, 18 nt, Artificial Sequence
  Synthetic
ccgagguggguggguugc

SEQ ID NO: 282578 - RNA, 19 nt, Artificial Sequence
  Synthetic
gccgagguggguggguugc

SEQ ID NO: 282579 - RNA, 20 nt, Artificial Sequence
  Synthetic
ggccgagguggguggguugc

SEQ ID NO: 282580 - RNA, 21 nt, Artificial Sequence
  Synthetic
aggccgagguggguggguugc

SEQ ID NO: 282581 - RNA, 22 nt, Artificial Sequence
  Synthetic
gaggccgagguggguggguugc

SEQ ID NO: 282582 - RNA, 23 nt, Artificial Sequence
  Synthetic
ggaggccgagguggguggguugc

SEQ ID NO: 282583 - RNA, 24 nt, Artificial Sequence
  Synthetic
gggaggccgagguggguggguugc

SEQ ID NO: 282584 - RNA, 18 nt, Artificial Sequence
  Synthetic
aaauaguugcaugguugc

SEQ ID NO: 282585 - RNA, 19 nt, Artificial Sequence
  Synthetic
caaauaguugcaugguugc

SEQ ID NO: 282586 - RNA, 20 nt, Artificial Sequence
  Synthetic
acaaauaguugcaugguugc

SEQ ID NO: 282587 - RNA, 21 nt, Artificial Sequence
  Synthetic
gacaaauaguugcaugguugc

SEQ ID NO: 282588 - RNA, 22 nt, Artificial Sequence
  Synthetic
agacaaauaguugcaugguugc

SEQ ID NO: 282589 - RNA, 23 nt, Artificial Sequence
  Synthetic
uagacaaauaguugcaugguugc

SEQ ID NO: 282590 - RNA, 24 nt, Artificial Sequence
  Synthetic
uuagacaaauaguugcaugguugc

SEQ ID NO: 282591 - RNA, 18 nt, Artificial Sequence
  Synthetic
ggguuguuuugugguugc

SEQ ID NO: 282592 - RNA, 19 nt, Artificial Sequence
  Synthetic
aggguuguuuugugguugc

SEQ ID NO: 282593 - RNA, 20 nt, Artificial Sequence
  Synthetic
uaggguuguuuugugguugc

SEQ ID NO: 282594 - RNA, 21 nt, Artificial Sequence
  Synthetic
guaggguuguuuugugguugc

SEQ ID NO: 282595 - RNA, 22 nt, Artificial Sequence
  Synthetic
uguaggguuguuuugugguugc

SEQ ID NO: 282596 - RNA, 23 nt, Artificial Sequence
  Synthetic
guguaggguuguuuugugguugc

SEQ ID NO: 282597 - RNA, 24 nt, Artificial Sequence
  Synthetic
aguguaggguuguuuugugguugc

SEQ ID NO: 282598 - RNA, 18 nt, Artificial Sequence
  Synthetic
aguuucuauauugguugc

SEQ ID NO: 282599 - RNA, 19 nt, Artificial Sequence
  Synthetic
aaguuucuauauugguugc

SEQ ID NO: 282600 - RNA, 20 nt, Artificial Sequence
  Synthetic
uaaguuucuauauugguugc

SEQ ID NO: 282601 - RNA, 21 nt, Artificial Sequence
  Synthetic
cuaaguuucuauauugguugc

SEQ ID NO: 282602 - RNA, 22 nt, Artificial Sequence
  Synthetic
gcuaaguuucuauauugguugc

SEQ ID NO: 282603 - RNA, 23 nt, Artificial Sequence
  Synthetic
ugcuaaguuucuauauugguugc

SEQ ID NO: 282604 - RNA, 24 nt, Artificial Sequence
  Synthetic
cugcuaaguuucuauauugguugc

SEQ ID NO: 282605 - RNA, 18 nt, Artificial Sequence
  Synthetic
aauacaguaugauguugc

SEQ ID NO: 282606 - RNA, 19 nt, Artificial Sequence
  Synthetic
caauacaguaugauguugc

SEQ ID NO: 282607 - RNA, 20 nt, Artificial Sequence
  Synthetic
ucaauacaguaugauguugc

SEQ ID NO: 282608 - RNA, 21 nt, Artificial Sequence
  Synthetic
aucaauacaguaugauguugc

SEQ ID NO: 282609 - RNA, 22 nt, Artificial Sequence
  Synthetic
uaucaauacaguaugauguugc

SEQ ID NO: 282610 - RNA, 23 nt, Artificial Sequence
  Synthetic
cuaucaauacaguaugauguugc

SEQ ID NO: 282611 - RNA, 24 nt, Artificial Sequence
  Synthetic
gcuaucaauacaguaugauguugc

SEQ ID NO: 282612 - RNA, 18 nt, Artificial Sequence
  Synthetic
cacaauaaaaacuguugc

SEQ ID NO: 282613 - RNA, 19 nt, Artificial Sequence
  Synthetic
ucacaauaaaaacuguugc

SEQ ID NO: 282614 - RNA, 20 nt, Artificial Sequence
  Synthetic
aucacaauaaaaacuguugc

SEQ ID NO: 282615 - RNA, 21 nt, Artificial Sequence
  Synthetic
uaucacaauaaaaacuguugc

SEQ ID NO: 282616 - RNA, 22 nt, Artificial Sequence
  Synthetic
cuaucacaauaaaaacuguugc

SEQ ID NO: 282617 - RNA, 23 nt, Artificial Sequence
  Synthetic
gcuaucacaauaaaaacuguugc

SEQ ID NO: 282618 - RNA, 24 nt, Artificial Sequence
  Synthetic
ggcuaucacaauaaaaacuguugc

SEQ ID NO: 282619 - RNA, 18 nt, Artificial Sequence
  Synthetic
ggagucucgcacuguugc

SEQ ID NO: 282620 - RNA, 19 nt, Artificial Sequence
  Synthetic
uggagucucgcacuguugc

SEQ ID NO: 282621 - RNA, 20 nt, Artificial Sequence
  Synthetic
auggagucucgcacuguugc

SEQ ID NO: 282622 - RNA, 21 nt, Artificial Sequence
  Synthetic
gauggagucucgcacuguugc

SEQ ID NO: 282623 - RNA, 22 nt, Artificial Sequence
  Synthetic
agauggagucucgcacuguugc

SEQ ID NO: 282624 - RNA, 23 nt, Artificial Sequence
  Synthetic
gagauggagucucgcacuguugc

SEQ ID NO: 282625 - RNA, 24 nt, Artificial Sequence
  Synthetic
ugagauggagucucgcacuguugc

SEQ ID NO: 282626 - RNA, 18 nt, Artificial Sequence
  Synthetic
aguaauccuugcuguugc

SEQ ID NO: 282627 - RNA, 19 nt, Artificial Sequence
  Synthetic
aaguaauccuugcuguugc

SEQ ID NO: 282628 - RNA, 20 nt, Artificial Sequence
  Synthetic
uaaguaauccuugcuguugc

SEQ ID NO: 282629 - RNA, 21 nt, Artificial Sequence
  Synthetic
uuaaguaauccuugcuguugc

SEQ ID NO: 282630 - RNA, 22 nt, Artificial Sequence
  Synthetic
uuuaaguaauccuugcuguugc

SEQ ID NO: 282631 - RNA, 23 nt, Artificial Sequence
  Synthetic
uuuuaaguaauccuugcuguugc

SEQ ID NO: 282632 - RNA, 24 nt, Artificial Sequence
  Synthetic
uuuuuaaguaauccuugcuguugc

SEQ ID NO: 282633 - RNA, 18 nt, Artificial Sequence
  Synthetic
agaaggacacucuguugc

SEQ ID NO: 282634 - RNA, 19 nt, Artificial Sequence
  Synthetic
uagaaggacacucuguugc

SEQ ID NO: 282635 - RNA, 20 nt, Artificial Sequence
  Synthetic
uuagaaggacacucuguugc

SEQ ID NO: 282636 - RNA, 21 nt, Artificial Sequence
  Synthetic
uuuagaaggacacucuguugc

SEQ ID NO: 282637 - RNA, 22 nt, Artificial Sequence
  Synthetic
guuuagaaggacacucuguugc

SEQ ID NO: 282638 - RNA, 23 nt, Artificial Sequence
  Synthetic
gguuuagaaggacacucuguugc

SEQ ID NO: 282639 - RNA, 24 nt, Artificial Sequence
  Synthetic
ugguuuagaaggacacucuguugc

SEQ ID NO: 282640 - RNA, 18 nt, Artificial Sequence
  Synthetic
ggagucuuucucuguugc

SEQ ID NO: 282641 - RNA, 19 nt, Artificial Sequence
  Synthetic
uggagucuuucucuguugc

SEQ ID NO: 282642 - RNA, 20 nt, Artificial Sequence
  Synthetic
auggagucuuucucuguugc

SEQ ID NO: 282643 - RNA, 21 nt, Artificial Sequence
  Synthetic
gauggagucuuucucuguugc

SEQ ID NO: 282644 - RNA, 22 nt, Artificial Sequence
  Synthetic
agauggagucuuucucuguugc

SEQ ID NO: 282645 - RNA, 23 nt, Artificial Sequence
  Synthetic
gagauggagucuuucucuguugc

SEQ ID NO: 282646 - RNA, 24 nt, Artificial Sequence
  Synthetic
ugagauggagucuuucucuguugc

SEQ ID NO: 282647 - RNA, 18 nt, Artificial Sequence
  Synthetic
uuugagugagaguguugc

SEQ ID NO: 282648 - RNA, 19 nt, Artificial Sequence
  Synthetic
uuuugagugagaguguugc

SEQ ID NO: 282649 - RNA, 20 nt, Artificial Sequence
  Synthetic
uuuuugagugagaguguugc

SEQ ID NO: 282650 - RNA, 21 nt, Artificial Sequence
  Synthetic
uuuuuugagugagaguguugc

SEQ ID NO: 282651 - RNA, 22 nt, Artificial Sequence
  Synthetic
uuuuuuugagugagaguguugc

SEQ ID NO: 282652 - RNA, 23 nt, Artificial Sequence
  Synthetic
uuuuuuuugagugagaguguugc

SEQ ID NO: 282653 - RNA, 24 nt, Artificial Sequence
  Synthetic
uuuuuuuuugagugagaguguugc

SEQ ID NO: 282654 - RNA, 18 nt, Artificial Sequence
  Synthetic
auuguaaguuaguguugc

SEQ ID NO: 282655 - RNA, 19 nt, Artificial Sequence
  Synthetic
aauuguaaguuaguguugc

SEQ ID NO: 282656 - RNA, 20 nt, Artificial Sequence
  Synthetic
uaauuguaaguuaguguugc

SEQ ID NO: 282657 - RNA, 21 nt, Artificial Sequence
  Synthetic
uuaauuguaaguuaguguugc

SEQ ID NO: 282658 - RNA, 22 nt, Artificial Sequence
  Synthetic
auuaauuguaaguuaguguugc

SEQ ID NO: 282659 - RNA, 23 nt, Artificial Sequence
  Synthetic
aauuaauuguaaguuaguguugc

SEQ ID NO: 282660 - RNA, 24 nt, Artificial Sequence
  Synthetic
aaauuaauuguaaguuaguguugc

SEQ ID NO: 282661 - RNA, 18 nt, Artificial Sequence
  Synthetic
ucuaacauugcguguugc

SEQ ID NO: 282662 - RNA, 19 nt, Artificial Sequence
  Synthetic
uucuaacauugcguguugc

SEQ ID NO: 282663 - RNA, 20 nt, Artificial Sequence
  Synthetic
uuucuaacauugcguguugc

SEQ ID NO: 282664 - RNA, 21 nt, Artificial Sequence
  Synthetic
guuucuaacauugcguguugc

SEQ ID NO: 282665 - RNA, 22 nt, Artificial Sequence
  Synthetic
gguuucuaacauugcguguugc

SEQ ID NO: 282666 - RNA, 23 nt, Artificial Sequence
  Synthetic
agguuucuaacauugcguguugc

SEQ ID NO: 282667 - RNA, 24 nt, Artificial Sequence
  Synthetic
uagguuucuaacauugcguguugc

SEQ ID NO: 282668 - RNA, 18 nt, Artificial Sequence
  Synthetic
uuugaacaaaauuguugc

SEQ ID NO: 282669 - RNA, 19 nt, Artificial Sequence
  Synthetic
auuugaacaaaauuguugc

SEQ ID NO: 282670 - RNA, 20 nt, Artificial Sequence
  Synthetic
aauuugaacaaaauuguugc

SEQ ID NO: 282671 - RNA, 21 nt, Artificial Sequence
  Synthetic
gaauuugaacaaaauuguugc

SEQ ID NO: 282672 - RNA, 22 nt, Artificial Sequence
  Synthetic
agaauuugaacaaaauuguugc

SEQ ID NO: 282673 - RNA, 23 nt, Artificial Sequence
  Synthetic
aagaauuugaacaaaauuguugc

SEQ ID NO: 282674 - RNA, 24 nt, Artificial Sequence
  Synthetic
gaagaauuugaacaaaauuguugc

SEQ ID NO: 282675 - RNA, 18 nt, Artificial Sequence
  Synthetic
cauuucauuguuuguugc

SEQ ID NO: 282676 - RNA, 19 nt, Artificial Sequence
  Synthetic
gcauuucauuguuuguugc

SEQ ID NO: 282677 - RNA, 20 nt, Artificial Sequence
  Synthetic
agcauuucauuguuuguugc

SEQ ID NO: 282678 - RNA, 21 nt, Artificial Sequence
  Synthetic
gagcauuucauuguuuguugc

SEQ ID NO: 282679 - RNA, 22 nt, Artificial Sequence
  Synthetic
agagcauuucauuguuuguugc

SEQ ID NO: 282680 - RNA, 23 nt, Artificial Sequence
  Synthetic
gagagcauuucauuguuuguugc

SEQ ID NO: 282681 - RNA, 24 nt, Artificial Sequence
  Synthetic
cgagagcauuucauuguuuguugc

SEQ ID NO: 282682 - RNA, 18 nt, Artificial Sequence
  Synthetic
cccuuccccaaaauuugc

SEQ ID NO: 282683 - RNA, 19 nt, Artificial Sequence
  Synthetic
ccccuuccccaaaauuugc

SEQ ID NO: 282684 - RNA, 20 nt, Artificial Sequence
  Synthetic
cccccuuccccaaaauuugc

SEQ ID NO: 282685 - RNA, 21 nt, Artificial Sequence
  Synthetic
ucccccuuccccaaaauuugc

SEQ ID NO: 282686 - RNA, 22 nt, Artificial Sequence
  Synthetic
cucccccuuccccaaaauuugc

SEQ ID NO: 282687 - RNA, 23 nt, Artificial Sequence
  Synthetic
ccucccccuuccccaaaauuugc

SEQ ID NO: 282688 - RNA, 24 nt, Artificial Sequence
  Synthetic
cccucccccuuccccaaaauuugc

SEQ ID NO: 282689 - RNA, 18 nt, Artificial Sequence
  Synthetic
aucacaucugaaauuugc

SEQ ID NO: 282690 - RNA, 19 nt, Artificial Sequence
  Synthetic
aaucacaucugaaauuugc

SEQ ID NO: 282691 - RNA, 20 nt, Artificial Sequence
  Synthetic
uaaucacaucugaaauuugc

SEQ ID NO: 282692 - RNA, 21 nt, Artificial Sequence
  Synthetic
uuaaucacaucugaaauuugc

SEQ ID NO: 282693 - RNA, 22 nt, Artificial Sequence
  Synthetic
cuuaaucacaucugaaauuugc

SEQ ID NO: 282694 - RNA, 23 nt, Artificial Sequence
  Synthetic
acuuaaucacaucugaaauuugc

SEQ ID NO: 282695 - RNA, 24 nt, Artificial Sequence
  Synthetic
cacuuaaucacaucugaaauuugc

SEQ ID NO: 282696 - RNA, 18 nt, Artificial Sequence
  Synthetic
uagaacuuugaaauuugc

SEQ ID NO: 282697 - RNA, 19 nt, Artificial Sequence
  Synthetic
auagaacuuugaaauuugc

SEQ ID NO: 282698 - RNA, 20 nt, Artificial Sequence
  Synthetic
cauagaacuuugaaauuugc

SEQ ID NO: 282699 - RNA, 21 nt, Artificial Sequence
  Synthetic
ucauagaacuuugaaauuugc

SEQ ID NO: 282700 - RNA, 22 nt, Artificial Sequence
  Synthetic
gucauagaacuuugaaauuugc

SEQ ID NO: 282701 - RNA, 23 nt, Artificial Sequence
  Synthetic
agucauagaacuuugaaauuugc

SEQ ID NO: 282702 - RNA, 24 nt, Artificial Sequence
  Synthetic
gagucauagaacuuugaaauuugc

SEQ ID NO: 282703 - RNA, 18 nt, Artificial Sequence
  Synthetic
cuuuugguucccauuugc

SEQ ID NO: 282704 - RNA, 19 nt, Artificial Sequence
  Synthetic
gcuuuugguucccauuugc

SEQ ID NO: 282705 - RNA, 20 nt, Artificial Sequence
  Synthetic
ugcuuuugguucccauuugc

SEQ ID NO: 282706 - RNA, 21 nt, Artificial Sequence
  Synthetic
uugcuuuugguucccauuugc

SEQ ID NO: 282707 - RNA, 22 nt, Artificial Sequence
  Synthetic
cuugcuuuugguucccauuugc

SEQ ID NO: 282708 - RNA, 23 nt, Artificial Sequence
  Synthetic
gcuugcuuuugguucccauuugc

SEQ ID NO: 282709 - RNA, 24 nt, Artificial Sequence
  Synthetic
ugcuugcuuuugguucccauuugc

SEQ ID NO: 282710 - RNA, 18 nt, Artificial Sequence
  Synthetic
ugagagugauguauuugc

SEQ ID NO: 282711 - RNA, 19 nt, Artificial Sequence
  Synthetic
gugagagugauguauuugc

SEQ ID NO: 282712 - RNA, 20 nt, Artificial Sequence
  Synthetic
agugagagugauguauuugc

SEQ ID NO: 282713 - RNA, 21 nt, Artificial Sequence
  Synthetic
uagugagagugauguauuugc

SEQ ID NO: 282714 - RNA, 22 nt, Artificial Sequence
  Synthetic
guagugagagugauguauuugc

SEQ ID NO: 282715 - RNA, 23 nt, Artificial Sequence
  Synthetic
gguagugagagugauguauuugc

SEQ ID NO: 282716 - RNA, 24 nt, Artificial Sequence
  Synthetic
ugguagugagagugauguauuugc

SEQ ID NO: 282717 - RNA, 18 nt, Artificial Sequence
  Synthetic
ucucuguccauuauuugc

SEQ ID NO: 282718 - RNA, 19 nt, Artificial Sequence
  Synthetic
gucucuguccauuauuugc

SEQ ID NO: 282719 - RNA, 20 nt, Artificial Sequence
  Synthetic
ugucucuguccauuauuugc

SEQ ID NO: 282720 - RNA, 21 nt, Artificial Sequence
  Synthetic
uugucucuguccauuauuugc

SEQ ID NO: 282721 - RNA, 22 nt, Artificial Sequence
  Synthetic
auugucucuguccauuauuugc

SEQ ID NO: 282722 - RNA, 23 nt, Artificial Sequence
  Synthetic
cauugucucuguccauuauuugc

SEQ ID NO: 282723 - RNA, 24 nt, Artificial Sequence
  Synthetic
ucauugucucuguccauuauuugc

SEQ ID NO: 282724 - RNA, 18 nt, Artificial Sequence
  Synthetic
augucacauuuuauuugc

SEQ ID NO: 282725 - RNA, 19 nt, Artificial Sequence
  Synthetic
uaugucacauuuuauuugc

SEQ ID NO: 282726 - RNA, 20 nt, Artificial Sequence
  Synthetic
cuaugucacauuuuauuugc

SEQ ID NO: 282727 - RNA, 21 nt, Artificial Sequence
  Synthetic
ucuaugucacauuuuauuugc

SEQ ID NO: 282728 - RNA, 22 nt, Artificial Sequence
  Synthetic
uucuaugucacauuuuauuugc

SEQ ID NO: 282729 - RNA, 23 nt, Artificial Sequence
  Synthetic
uuucuaugucacauuuuauuugc

SEQ ID NO: 282730 - RNA, 24 nt, Artificial Sequence
  Synthetic
uuuucuaugucacauuuuauuugc

SEQ ID NO: 282731 - RNA, 18 nt, Artificial Sequence
  Synthetic
uaauggacaaagcuuugc

SEQ ID NO: 282732 - RNA, 19 nt, Artificial Sequence
  Synthetic
auaauggacaaagcuuugc

SEQ ID NO: 282733 - RNA, 20 nt, Artificial Sequence
  Synthetic
cauaauggacaaagcuuugc

SEQ ID NO: 282734 - RNA, 21 nt, Artificial Sequence
  Synthetic
gcauaauggacaaagcuuugc

SEQ ID NO: 282735 - RNA, 22 nt, Artificial Sequence
  Synthetic
agcauaauggacaaagcuuugc

SEQ ID NO: 282736 - RNA, 23 nt, Artificial Sequence
  Synthetic
gagcauaauggacaaagcuuugc

SEQ ID NO: 282737 - RNA, 24 nt, Artificial Sequence
  Synthetic
ggagcauaauggacaaagcuuugc

SEQ ID NO: 282738 - RNA, 18 nt, Artificial Sequence
  Synthetic
uagcuucuuccgcuuugc

SEQ ID NO: 282739 - RNA, 19 nt, Artificial Sequence
  Synthetic
cuagcuucuuccgcuuugc

SEQ ID NO: 282740 - RNA, 20 nt, Artificial Sequence
  Synthetic
ucuagcuucuuccgcuuugc

SEQ ID NO: 282741 - RNA, 21 nt, Artificial Sequence
  Synthetic
uucuagcuucuuccgcuuugc

SEQ ID NO: 282742 - RNA, 22 nt, Artificial Sequence
  Synthetic
uuucuagcuucuuccgcuuugc

SEQ ID NO: 282743 - RNA, 23 nt, Artificial Sequence
  Synthetic
uuuucuagcuucuuccgcuuugc

SEQ ID NO: 282744 - RNA, 24 nt, Artificial Sequence
  Synthetic
auuuucuagcuucuuccgcuuugc

SEQ ID NO: 282745 - RNA, 18 nt, Artificial Sequence
  Synthetic
guacuugcaucucuuugc

SEQ ID NO: 282746 - RNA, 19 nt, Artificial Sequence
  Synthetic
uguacuugcaucucuuugc

SEQ ID NO: 282747 - RNA, 20 nt, Artificial Sequence
  Synthetic
cuguacuugcaucucuuugc

SEQ ID NO: 282748 - RNA, 21 nt, Artificial Sequence
  Synthetic
ccuguacuugcaucucuuugc

SEQ ID NO: 282749 - RNA, 22 nt, Artificial Sequence
  Synthetic
uccuguacuugcaucucuuugc

SEQ ID NO: 282750 - RNA, 23 nt, Artificial Sequence
  Synthetic
uuccuguacuugcaucucuuugc

SEQ ID NO: 282751 - RNA, 24 nt, Artificial Sequence
  Synthetic
cuuccuguacuugcaucucuuugc

SEQ ID NO: 282752 - RNA, 18 nt, Artificial Sequence
  Synthetic
uauuucuaaguucuuugc

SEQ ID NO: 282753 - RNA, 19 nt, Artificial Sequence
  Synthetic
uuauuucuaaguucuuugc

SEQ ID NO: 282754 - RNA, 20 nt, Artificial Sequence
  Synthetic
auuauuucuaaguucuuugc

SEQ ID NO: 282755 - RNA, 21 nt, Artificial Sequence
  Synthetic
aauuauuucuaaguucuuugc

SEQ ID NO: 282756 - RNA, 22 nt, Artificial Sequence
  Synthetic
gaauuauuucuaaguucuuugc

SEQ ID NO: 282757 - RNA, 23 nt, Artificial Sequence
  Synthetic
agaauuauuucuaaguucuuugc

SEQ ID NO: 282758 - RNA, 24 nt, Artificial Sequence
  Synthetic
gagaauuauuucuaaguucuuugc

SEQ ID NO: 282759 - RNA, 18 nt, Artificial Sequence
  Synthetic
caggaugagagaguuugc

SEQ ID NO: 282760 - RNA, 19 nt, Artificial Sequence
  Synthetic
ucaggaugagagaguuugc

SEQ ID NO: 282761 - RNA, 20 nt, Artificial Sequence
  Synthetic
gucaggaugagagaguuugc

SEQ ID NO: 282762 - RNA, 21 nt, Artificial Sequence
  Synthetic
ugucaggaugagagaguuugc

SEQ ID NO: 282763 - RNA, 22 nt, Artificial Sequence
  Synthetic
gugucaggaugagagaguuugc

SEQ ID NO: 282764 - RNA, 23 nt, Artificial Sequence
  Synthetic
ugugucaggaugagagaguuugc

SEQ ID NO: 282765 - RNA, 24 nt, Artificial Sequence
  Synthetic
uugugucaggaugagagaguuugc

SEQ ID NO: 282766 - RNA, 18 nt, Artificial Sequence
  Synthetic
cuugcauugauaguuugc

SEQ ID NO: 282767 - RNA, 19 nt, Artificial Sequence
  Synthetic
ccuugcauugauaguuugc

SEQ ID NO: 282768 - RNA, 20 nt, Artificial Sequence
  Synthetic
uccuugcauugauaguuugc

SEQ ID NO: 282769 - RNA, 21 nt, Artificial Sequence
  Synthetic
cuccuugcauugauaguuugc

SEQ ID NO: 282770 - RNA, 22 nt, Artificial Sequence
  Synthetic
ucuccuugcauugauaguuugc

SEQ ID NO: 282771 - RNA, 23 nt, Artificial Sequence
  Synthetic
uucuccuugcauugauaguuugc

SEQ ID NO: 282772 - RNA, 24 nt, Artificial Sequence
  Synthetic
uuucuccuugcauugauaguuugc

SEQ ID NO: 282773 - RNA, 18 nt, Artificial Sequence
  Synthetic
auggaaccccagguuugc

SEQ ID NO: 282774 - RNA, 19 nt, Artificial Sequence
  Synthetic
cauggaaccccagguuugc

SEQ ID NO: 282775 - RNA, 20 nt, Artificial Sequence
  Synthetic
ccauggaaccccagguuugc

SEQ ID NO: 282776 - RNA, 21 nt, Artificial Sequence
  Synthetic
accauggaaccccagguuugc

SEQ ID NO: 282777 - RNA, 22 nt, Artificial Sequence
  Synthetic
aaccauggaaccccagguuugc

SEQ ID NO: 282778 - RNA, 23 nt, Artificial Sequence
  Synthetic
gaaccauggaaccccagguuugc

SEQ ID NO: 282779 - RNA, 24 nt, Artificial Sequence
  Synthetic
ugaaccauggaaccccagguuugc

SEQ ID NO: 282780 - RNA, 18 nt, Artificial Sequence
  Synthetic
uucaaaucccauguuugc

SEQ ID NO: 282781 - RNA, 19 nt, Artificial Sequence
  Synthetic
auucaaaucccauguuugc

SEQ ID NO: 282782 - RNA, 20 nt, Artificial Sequence
  Synthetic
cauucaaaucccauguuugc

SEQ ID NO: 282783 - RNA, 21 nt, Artificial Sequence
  Synthetic
gcauucaaaucccauguuugc

SEQ ID NO: 282784 - RNA, 22 nt, Artificial Sequence
  Synthetic
agcauucaaaucccauguuugc

SEQ ID NO: 282785 - RNA, 23 nt, Artificial Sequence
  Synthetic
aagcauucaaaucccauguuugc

SEQ ID NO: 282786 - RNA, 24 nt, Artificial Sequence
  Synthetic
caagcauucaaaucccauguuugc

SEQ ID NO: 282787 - RNA, 18 nt, Artificial Sequence
  Synthetic
uagcacaaagguguuugc

SEQ ID NO: 282788 - RNA, 19 nt, Artificial Sequence
  Synthetic
uuagcacaaagguguuugc

SEQ ID NO: 282789 - RNA, 20 nt, Artificial Sequence
  Synthetic
auuagcacaaagguguuugc

SEQ ID NO: 282790 - RNA, 21 nt, Artificial Sequence
  Synthetic
uauuagcacaaagguguuugc

SEQ ID NO: 282791 - RNA, 22 nt, Artificial Sequence
  Synthetic
uuauuagcacaaagguguuugc

SEQ ID NO: 282792 - RNA, 23 nt, Artificial Sequence
  Synthetic
uuuauuagcacaaagguguuugc

SEQ ID NO: 282793 - RNA, 24 nt, Artificial Sequence
  Synthetic
cuuuauuagcacaaagguguuugc

SEQ ID NO: 282794 - RNA, 18 nt, Artificial Sequence
  Synthetic
uuugugccauguguuugc

SEQ ID NO: 282795 - RNA, 19 nt, Artificial Sequence
  Synthetic
auuugugccauguguuugc

SEQ ID NO: 282796 - RNA, 20 nt, Artificial Sequence
  Synthetic
cauuugugccauguguuugc

SEQ ID NO: 282797 - RNA, 21 nt, Artificial Sequence
  Synthetic
ucauuugugccauguguuugc

SEQ ID NO: 282798 - RNA, 22 nt, Artificial Sequence
  Synthetic
uucauuugugccauguguuugc

SEQ ID NO: 282799 - RNA, 23 nt, Artificial Sequence
  Synthetic
cuucauuugugccauguguuugc

SEQ ID NO: 282800 - RNA, 24 nt, Artificial Sequence
  Synthetic
gcuucauuugugccauguguuugc

SEQ ID NO: 282801 - RNA, 18 nt, Artificial Sequence
  Synthetic
caauaaaaguguguuugc

SEQ ID NO: 282802 - RNA, 19 nt, Artificial Sequence
  Synthetic
ccaauaaaaguguguuugc

SEQ ID NO: 282803 - RNA, 20 nt, Artificial Sequence
  Synthetic
uccaauaaaaguguguuugc

SEQ ID NO: 282804 - RNA, 21 nt, Artificial Sequence
  Synthetic
uuccaauaaaaguguguuugc

SEQ ID NO: 282805 - RNA, 22 nt, Artificial Sequence
  Synthetic
guuccaauaaaaguguguuugc

SEQ ID NO: 282806 - RNA, 23 nt, Artificial Sequence
  Synthetic
uguuccaauaaaaguguguuugc

SEQ ID NO: 282807 - RNA, 24 nt, Artificial Sequence
  Synthetic
guguuccaauaaaaguguguuugc

SEQ ID NO: 282808 - RNA, 18 nt, Artificial Sequence
  Synthetic
cuuuuuuauuuuguuugc

SEQ ID NO: 282809 - RNA, 19 nt, Artificial Sequence
  Synthetic
gcuuuuuuauuuuguuugc

SEQ ID NO: 282810 - RNA, 20 nt, Artificial Sequence
  Synthetic
ugcuuuuuuauuuuguuugc

SEQ ID NO: 282811 - RNA, 21 nt, Artificial Sequence
  Synthetic
cugcuuuuuuauuuuguuugc

SEQ ID NO: 282812 - RNA, 22 nt, Artificial Sequence
  Synthetic
ccugcuuuuuuauuuuguuugc

SEQ ID NO: 282813 - RNA, 23 nt, Artificial Sequence
  Synthetic
uccugcuuuuuuauuuuguuugc

SEQ ID NO: 282814 - RNA, 24 nt, Artificial Sequence
  Synthetic
auccugcuuuuuuauuuuguuugc

SEQ ID NO: 282815 - RNA, 18 nt, Artificial Sequence
  Synthetic
ucaacguauaaauuuugc

SEQ ID NO: 282816 - RNA, 19 nt, Artificial Sequence
  Synthetic
uucaacguauaaauuuugc

SEQ ID NO: 282817 - RNA, 20 nt, Artificial Sequence
  Synthetic
uuucaacguauaaauuuugc

SEQ ID NO: 282818 - RNA, 21 nt, Artificial Sequence
  Synthetic
auuucaacguauaaauuuugc

SEQ ID NO: 282819 - RNA, 22 nt, Artificial Sequence
  Synthetic
gauuucaacguauaaauuuugc

SEQ ID NO: 282820 - RNA, 23 nt, Artificial Sequence
  Synthetic
ggauuucaacguauaaauuuugc

SEQ ID NO: 282821 - RNA, 24 nt, Artificial Sequence
  Synthetic
aggauuucaacguauaaauuuugc

SEQ ID NO: 282822 - RNA, 18 nt, Artificial Sequence
  Synthetic
caugaaauaauauuuugc

SEQ ID NO: 282823 - RNA, 19 nt, Artificial Sequence
  Synthetic
ucaugaaauaauauuuugc

SEQ ID NO: 282824 - RNA, 20 nt, Artificial Sequence
  Synthetic
uucaugaaauaauauuuugc

SEQ ID NO: 282825 - RNA, 21 nt, Artificial Sequence
  Synthetic
uuucaugaaauaauauuuugc

SEQ ID NO: 282826 - RNA, 22 nt, Artificial Sequence
  Synthetic
uuuucaugaaauaauauuuugc

SEQ ID NO: 282827 - RNA, 23 nt, Artificial Sequence
  Synthetic
auuuucaugaaauaauauuuugc

SEQ ID NO: 282828 - RNA, 24 nt, Artificial Sequence
  Synthetic
aauuuucaugaaauaauauuuugc

SEQ ID NO: 282829 - RNA, 18 nt, Artificial Sequence
  Synthetic
augucuuuuauauuuugc

SEQ ID NO: 282830 - RNA, 19 nt, Artificial Sequence
  Synthetic
aaugucuuuuauauuuugc

SEQ ID NO: 282831 - RNA, 20 nt, Artificial Sequence
  Synthetic
aaaugucuuuuauauuuugc

SEQ ID NO: 282832 - RNA, 21 nt, Artificial Sequence
  Synthetic
aaaaugucuuuuauauuuugc

SEQ ID NO: 282833 - RNA, 22 nt, Artificial Sequence
  Synthetic
aaaaaugucuuuuauauuuugc

SEQ ID NO: 282834 - RNA, 23 nt, Artificial Sequence
  Synthetic
caaaaaugucuuuuauauuuugc

SEQ ID NO: 282835 - RNA, 24 nt, Artificial Sequence
  Synthetic
ucaaaaaugucuuuuauauuuugc

SEQ ID NO: 282836 - RNA, 18 nt, Artificial Sequence
  Synthetic
aggauagauaacuuuugc

SEQ ID NO: 282837 - RNA, 19 nt, Artificial Sequence
  Synthetic
uaggauagauaacuuuugc

SEQ ID NO: 282838 - RNA, 20 nt, Artificial Sequence
  Synthetic
auaggauagauaacuuuugc

SEQ ID NO: 282839 - RNA, 21 nt, Artificial Sequence
  Synthetic
uauaggauagauaacuuuugc

SEQ ID NO: 282840 - RNA, 22 nt, Artificial Sequence
  Synthetic
uuauaggauagauaacuuuugc

SEQ ID NO: 282841 - RNA, 23 nt, Artificial Sequence
  Synthetic
uuuauaggauagauaacuuuugc

SEQ ID NO: 282842 - RNA, 24 nt, Artificial Sequence
  Synthetic
auuuauaggauagauaacuuuugc

SEQ ID NO: 282843 - RNA, 24 nt, Artificial Sequence
  Synthetic
uuuuauaggauagauaacuuuugc

SEQ ID NO: 282844 - RNA, 18 nt, Artificial Sequence
  Synthetic
ucaagaaaggacuuuugc

SEQ ID NO: 282845 - RNA, 19 nt, Artificial Sequence
  Synthetic
uucaagaaaggacuuuugc

SEQ ID NO: 282846 - RNA, 20 nt, Artificial Sequence
  Synthetic
cuucaagaaaggacuuuugc

SEQ ID NO: 282847 - RNA, 21 nt, Artificial Sequence
  Synthetic
ucuucaagaaaggacuuuugc

SEQ ID NO: 282848 - RNA, 22 nt, Artificial Sequence
  Synthetic
cucuucaagaaaggacuuuugc

SEQ ID NO: 282849 - RNA, 23 nt, Artificial Sequence
  Synthetic
acucuucaagaaaggacuuuugc

SEQ ID NO: 282850 - RNA, 24 nt, Artificial Sequence
  Synthetic
cacucuucaagaaaggacuuuugc

SEQ ID NO: 282851 - RNA, 18 nt, Artificial Sequence
  Synthetic
auauauucuuccuuuugc

SEQ ID NO: 282852 - RNA, 19 nt, Artificial Sequence
  Synthetic
cauauauucuuccuuuugc

SEQ ID NO: 282853 - RNA, 20 nt, Artificial Sequence
  Synthetic
acauauauucuuccuuuugc

SEQ ID NO: 282854 - RNA, 21 nt, Artificial Sequence
  Synthetic
aacauauauucuuccuuuugc

SEQ ID NO: 282855 - RNA, 22 nt, Artificial Sequence
  Synthetic
uaacauauauucuuccuuuugc

SEQ ID NO: 282856 - RNA, 23 nt, Artificial Sequence
  Synthetic
uuaacauauauucuuccuuuugc

SEQ ID NO: 282857 - RNA, 24 nt, Artificial Sequence
  Synthetic
uuuaacauauauucuuccuuuugc

SEQ ID NO: 282858 - RNA, 18 nt, Artificial Sequence
  Synthetic
ccacagaguugguuuugc

SEQ ID NO: 282859 - RNA, 19 nt, Artificial Sequence
  Synthetic
accacagaguugguuuugc

SEQ ID NO: 282860 - RNA, 20 nt, Artificial Sequence
  Synthetic
aaccacagaguugguuuugc

SEQ ID NO: 282861 - RNA, 21 nt, Artificial Sequence
  Synthetic
aaaccacagaguugguuuugc

SEQ ID NO: 282862 - RNA, 22 nt, Artificial Sequence
  Synthetic
aaaaccacagaguugguuuugc

SEQ ID NO: 282863 - RNA, 23 nt, Artificial Sequence
  Synthetic
uaaaaccacagaguugguuuugc

SEQ ID NO: 282864 - RNA, 24 nt, Artificial Sequence
  Synthetic
auaaaaccacagaguugguuuugc

SEQ ID NO: 282865 - RNA, 18 nt, Artificial Sequence
  Synthetic
auuuagcuguuguuuugc

SEQ ID NO: 282866 - RNA, 19 nt, Artificial Sequence
  Synthetic
cauuuagcuguuguuuugc

SEQ ID NO: 282867 - RNA, 20 nt, Artificial Sequence
  Synthetic
ccauuuagcuguuguuuugc

SEQ ID NO: 282868 - RNA, 21 nt, Artificial Sequence
  Synthetic
uccauuuagcuguuguuuugc

SEQ ID NO: 282869 - RNA, 22 nt, Artificial Sequence
  Synthetic
cuccauuuagcuguuguuuugc

SEQ ID NO: 282870 - RNA, 23 nt, Artificial Sequence
  Synthetic
ucuccauuuagcuguuguuuugc

SEQ ID NO: 282871 - RNA, 24 nt, Artificial Sequence
  Synthetic
aucuccauuuagcuguuguuuugc

SEQ ID NO: 282872 - RNA, 18 nt, Artificial Sequence
  Synthetic
ccauuagaucauuuuugc

SEQ ID NO: 282873 - RNA, 19 nt, Artificial Sequence
  Synthetic
cccauuagaucauuuuugc

SEQ ID NO: 282874 - RNA, 20 nt, Artificial Sequence
  Synthetic
ucccauuagaucauuuuugc

SEQ ID NO: 282875 - RNA, 21 nt, Artificial Sequence
  Synthetic
aucccauuagaucauuuuugc

SEQ ID NO: 282876 - RNA, 22 nt, Artificial Sequence
  Synthetic
caucccauuagaucauuuuugc

SEQ ID NO: 282877 - RNA, 23 nt, Artificial Sequence
  Synthetic
acaucccauuagaucauuuuugc

SEQ ID NO: 282878 - RNA, 24 nt, Artificial Sequence
  Synthetic
cacaucccauuagaucauuuuugc

SEQ ID NO: 282879 - RNA, 18 nt, Artificial Sequence
  Synthetic
auucuuuaauauuuuugc

SEQ ID NO: 282880 - RNA, 19 nt, Artificial Sequence
  Synthetic
uauucuuuaauauuuuugc

SEQ ID NO: 282881 - RNA, 20 nt, Artificial Sequence
  Synthetic
guauucuuuaauauuuuugc

SEQ ID NO: 282882 - RNA, 21 nt, Artificial Sequence
  Synthetic
aguauucuuuaauauuuuugc

SEQ ID NO: 282883 - RNA, 22 nt, Artificial Sequence
  Synthetic
aaguauucuuuaauauuuuugc

SEQ ID NO: 282884 - RNA, 23 nt, Artificial Sequence
  Synthetic
uaaguauucuuuaauauuuuugc

SEQ ID NO: 282885 - RNA, 24 nt, Artificial Sequence
  Synthetic
auaaguauucuuuaauauuuuugc

SEQ ID NO: 282886 - RNA, 18 nt, Artificial Sequence
  Synthetic
auuuuguuuuauuuuugc

SEQ ID NO: 282887 - RNA, 19 nt, Artificial Sequence
  Synthetic
uauuuuguuuuauuuuugc

SEQ ID NO: 282888 - RNA, 20 nt, Artificial Sequence
  Synthetic
uuauuuuguuuuauuuuugc

SEQ ID NO: 282889 - RNA, 21 nt, Artificial Sequence
  Synthetic
cuuauuuuguuuuauuuuugc

SEQ ID NO: 282890 - RNA, 22 nt, Artificial Sequence
  Synthetic
acuuauuuuguuuuauuuuugc

SEQ ID NO: 282891 - RNA, 23 nt, Artificial Sequence
  Synthetic
gacuuauuuuguuuuauuuuugc

SEQ ID NO: 282892 - RNA, 24 nt, Artificial Sequence
  Synthetic
agacuuauuuuguuuuauuuuugc

SEQ ID NO: 282893 - RNA, 18 nt, Artificial Sequence
  Synthetic
ggcaacauagcuuuuugc

SEQ ID NO: 282894 - RNA, 19 nt, Artificial Sequence
  Synthetic
gggcaacauagcuuuuugc

SEQ ID NO: 282895 - RNA, 20 nt, Artificial Sequence
  Synthetic
agggcaacauagcuuuuugc

SEQ ID NO: 282896 - RNA, 21 nt, Artificial Sequence
  Synthetic
cagggcaacauagcuuuuugc

SEQ ID NO: 282897 - RNA, 22 nt, Artificial Sequence
  Synthetic
acagggcaacauagcuuuuugc

SEQ ID NO: 282898 - RNA, 23 nt, Artificial Sequence
  Synthetic
gacagggcaacauagcuuuuugc

SEQ ID NO: 282899 - RNA, 24 nt, Artificial Sequence
  Synthetic
ugacagggcaacauagcuuuuugc

SEQ ID NO: 282900 - RNA, 18 nt, Artificial Sequence
  Synthetic
ccaacuuuaauuuuuugc

SEQ ID NO: 282901 - RNA, 19 nt, Artificial Sequence
  Synthetic
cccaacuuuaauuuuuugc

SEQ ID NO: 282902 - RNA, 20 nt, Artificial Sequence
  Synthetic
acccaacuuuaauuuuuugc

SEQ ID NO: 282903 - RNA, 21 nt, Artificial Sequence
  Synthetic
uacccaacuuuaauuuuuugc

SEQ ID NO: 282904 - RNA, 22 nt, Artificial Sequence
  Synthetic
auacccaacuuuaauuuuuugc

SEQ ID NO: 282905 - RNA, 23 nt, Artificial Sequence
  Synthetic
uauacccaacuuuaauuuuuugc

SEQ ID NO: 282906 - RNA, 24 nt, Artificial Sequence
  Synthetic
uuauacccaacuuuaauuuuuugc

SEQ ID NO: 282907 - RNA, 18 nt, Artificial Sequence
  Synthetic
cuuuuccagguuuuuugc

SEQ ID NO: 282908 - RNA, 19 nt, Artificial Sequence
  Synthetic
ccuuuuccagguuuuuugc

SEQ ID NO: 282909 - RNA, 20 nt, Artificial Sequence
  Synthetic
cccuuuuccagguuuuuugc

SEQ ID NO: 282910 - RNA, 21 nt, Artificial Sequence
  Synthetic
ucccuuuuccagguuuuuugc

SEQ ID NO: 282911 - RNA, 22 nt, Artificial Sequence
  Synthetic
aucccuuuuccagguuuuuugc

SEQ ID NO: 282912 - RNA, 23 nt, Artificial Sequence
  Synthetic
gaucccuuuuccagguuuuuugc

SEQ ID NO: 282913 - RNA, 24 nt, Artificial Sequence
  Synthetic
ugaucccuuuuccagguuuuuugc

SEQ ID NO: 282914 - RNA, 18 nt, Artificial Sequence
  Synthetic
cacaaagagaaaaaaauc

SEQ ID NO: 282915 - RNA, 19 nt, Artificial Sequence
  Synthetic
ccacaaagagaaaaaaauc

SEQ ID NO: 282916 - RNA, 20 nt, Artificial Sequence
  Synthetic
accacaaagagaaaaaaauc

SEQ ID NO: 282917 - RNA, 21 nt, Artificial Sequence
  Synthetic
uaccacaaagagaaaaaaauc

SEQ ID NO: 282918 - RNA, 22 nt, Artificial Sequence
  Synthetic
uuaccacaaagagaaaaaaauc

SEQ ID NO: 282919 - RNA, 23 nt, Artificial Sequence
  Synthetic
uuuaccacaaagagaaaaaaauc

SEQ ID NO: 282920 - RNA, 24 nt, Artificial Sequence
  Synthetic
auuuaccacaaagagaaaaaaauc

SEQ ID NO: 282921 - RNA, 18 nt, Artificial Sequence
  Synthetic
cucuugaauaaaaaaauc

SEQ ID NO: 282922 - RNA, 19 nt, Artificial Sequence
  Synthetic
acucuugaauaaaaaaauc

SEQ ID NO: 282923 - RNA, 20 nt, Artificial Sequence
  Synthetic
cacucuugaauaaaaaaauc

SEQ ID NO: 282924 - RNA, 21 nt, Artificial Sequence
  Synthetic
ucacucuugaauaaaaaaauc

SEQ ID NO: 282925 - RNA, 22 nt, Artificial Sequence
  Synthetic
cucacucuugaauaaaaaaauc

SEQ ID NO: 282926 - RNA, 23 nt, Artificial Sequence
  Synthetic
ucucacucuugaauaaaaaaauc

SEQ ID NO: 282927 - RNA, 24 nt, Artificial Sequence
  Synthetic
cucucacucuugaauaaaaaaauc

SEQ ID NO: 282928 - RNA, 18 nt, Artificial Sequence
  Synthetic
uuacgcuuucaaaaaauc

SEQ ID NO: 282929 - RNA, 19 nt, Artificial Sequence
  Synthetic
guuacgcuuucaaaaaauc

SEQ ID NO: 282930 - RNA, 20 nt, Artificial Sequence
  Synthetic
uguuacgcuuucaaaaaauc

SEQ ID NO: 282931 - RNA, 21 nt, Artificial Sequence
  Synthetic
auguuacgcuuucaaaaaauc

SEQ ID NO: 282932 - RNA, 22 nt, Artificial Sequence
  Synthetic
aauguuacgcuuucaaaaaauc

SEQ ID NO: 282933 - RNA, 23 nt, Artificial Sequence
  Synthetic
aaauguuacgcuuucaaaaaauc

SEQ ID NO: 282934 - RNA, 24 nt, Artificial Sequence
  Synthetic
aaaauguuacgcuuucaaaaaauc

SEQ ID NO: 282935 - RNA, 18 nt, Artificial Sequence
  Synthetic
gaagccaaggaaaaaauc

SEQ ID NO: 282936 - RNA, 19 nt, Artificial Sequence
  Synthetic
agaagccaaggaaaaaauc

SEQ ID NO: 282937 - RNA, 20 nt, Artificial Sequence
  Synthetic
cagaagccaaggaaaaaauc

SEQ ID NO: 282938 - RNA, 21 nt, Artificial Sequence
  Synthetic
ucagaagccaaggaaaaaauc

SEQ ID NO: 282939 - RNA, 22 nt, Artificial Sequence
  Synthetic
aucagaagccaaggaaaaaauc

SEQ ID NO: 282940 - RNA, 23 nt, Artificial Sequence
  Synthetic
aaucagaagccaaggaaaaaauc

SEQ ID NO: 282941 - RNA, 24 nt, Artificial Sequence
  Synthetic
aaaucagaagccaaggaaaaaauc

SEQ ID NO: 282942 - RNA, 18 nt, Artificial Sequence
  Synthetic
uuauaagaauaaaaaauc

SEQ ID NO: 282943 - RNA, 19 nt, Artificial Sequence
  Synthetic
auuauaagaauaaaaaauc

SEQ ID NO: 282944 - RNA, 20 nt, Artificial Sequence
  Synthetic
aauuauaagaauaaaaaauc

SEQ ID NO: 282945 - RNA, 21 nt, Artificial Sequence
  Synthetic
aaauuauaagaauaaaaaauc

SEQ ID NO: 282946 - RNA, 22 nt, Artificial Sequence
  Synthetic
uaaauuauaagaauaaaaaauc

SEQ ID NO: 282947 - RNA, 23 nt, Artificial Sequence
  Synthetic
auaaauuauaagaauaaaaaauc

SEQ ID NO: 282948 - RNA, 24 nt, Artificial Sequence
  Synthetic
uauaaauuauaagaauaaaaaauc

SEQ ID NO: 282949 - RNA, 18 nt, Artificial Sequence
  Synthetic
acagcacacacaaaaauc

SEQ ID NO: 282950 - RNA, 19 nt, Artificial Sequence
  Synthetic
gacagcacacacaaaaauc

SEQ ID NO: 282951 - RNA, 20 nt, Artificial Sequence
  Synthetic
agacagcacacacaaaaauc

SEQ ID NO: 282952 - RNA, 21 nt, Artificial Sequence
  Synthetic
uagacagcacacacaaaaauc

SEQ ID NO: 282953 - RNA, 22 nt, Artificial Sequence
  Synthetic
guagacagcacacacaaaaauc

SEQ ID NO: 282954 - RNA, 23 nt, Artificial Sequence
  Synthetic
uguagacagcacacacaaaaauc

SEQ ID NO: 282955 - RNA, 24 nt, Artificial Sequence
  Synthetic
guguagacagcacacacaaaaauc

SEQ ID NO: 282956 - RNA, 18 nt, Artificial Sequence
  Synthetic
gcaaccacuccaaaaauc

SEQ ID NO: 282957 - RNA, 19 nt, Artificial Sequence
  Synthetic
ugcaaccacuccaaaaauc

SEQ ID NO: 282958 - RNA, 20 nt, Artificial Sequence
  Synthetic
uugcaaccacuccaaaaauc

SEQ ID NO: 282959 - RNA, 21 nt, Artificial Sequence
  Synthetic
auugcaaccacuccaaaaauc

SEQ ID NO: 282960 - RNA, 22 nt, Artificial Sequence
  Synthetic
uauugcaaccacuccaaaaauc

SEQ ID NO: 282961 - RNA, 23 nt, Artificial Sequence
  Synthetic
auauugcaaccacuccaaaaauc

SEQ ID NO: 282962 - RNA, 24 nt, Artificial Sequence
  Synthetic
uauauugcaaccacuccaaaaauc

SEQ ID NO: 282963 - RNA, 18 nt, Artificial Sequence
  Synthetic
acuguugucucaaaaauc

SEQ ID NO: 282964 - RNA, 19 nt, Artificial Sequence
  Synthetic
cacuguugucucaaaaauc

SEQ ID NO: 282965 - RNA, 20 nt, Artificial Sequence
  Synthetic
ucacuguugucucaaaaauc

SEQ ID NO: 282966 - RNA, 21 nt, Artificial Sequence
  Synthetic
aucacuguugucucaaaaauc

SEQ ID NO: 282967 - RNA, 22 nt, Artificial Sequence
  Synthetic
aaucacuguugucucaaaaauc

SEQ ID NO: 282968 - RNA, 23 nt, Artificial Sequence
  Synthetic
aaaucacuguugucucaaaaauc

SEQ ID NO: 282969 - RNA, 24 nt, Artificial Sequence
  Synthetic
gaaaucacuguugucucaaaaauc

SEQ ID NO: 282970 - RNA, 18 nt, Artificial Sequence
  Synthetic
auaaaaaagagaaaaauc

SEQ ID NO: 282971 - RNA, 19 nt, Artificial Sequence
  Synthetic
aauaaaaaagagaaaaauc

SEQ ID NO: 282972 - RNA, 20 nt, Artificial Sequence
  Synthetic
uaauaaaaaagagaaaaauc

SEQ ID NO: 282973 - RNA, 21 nt, Artificial Sequence
  Synthetic
uuaauaaaaaagagaaaaauc

SEQ ID NO: 282974 - RNA, 22 nt, Artificial Sequence
  Synthetic
auuaauaaaaaagagaaaaauc

SEQ ID NO: 282975 - RNA, 23 nt, Artificial Sequence
  Synthetic
aauuaauaaaaaagagaaaaauc

SEQ ID NO: 282976 - RNA, 24 nt, Artificial Sequence
  Synthetic
gaauuaauaaaaaagagaaaaauc

SEQ ID NO: 282977 - RNA, 18 nt, Artificial Sequence
  Synthetic
ggaaaaaggagaaaaauc

SEQ ID NO: 282978 - RNA, 19 nt, Artificial Sequence
  Synthetic
aggaaaaaggagaaaaauc

SEQ ID NO: 282979 - RNA, 20 nt, Artificial Sequence
  Synthetic
aaggaaaaaggagaaaaauc

SEQ ID NO: 282980 - RNA, 21 nt, Artificial Sequence
  Synthetic
aaaggaaaaaggagaaaaauc

SEQ ID NO: 282981 - RNA, 22 nt, Artificial Sequence
  Synthetic
aaaaggaaaaaggagaaaaauc

SEQ ID NO: 282982 - RNA, 23 nt, Artificial Sequence
  Synthetic
aaaaaggaaaaaggagaaaaauc

SEQ ID NO: 282983 - RNA, 24 nt, Artificial Sequence
  Synthetic
uaaaaaggaaaaaggagaaaaauc

SEQ ID NO: 282984 - RNA, 18 nt, Artificial Sequence
  Synthetic
ggauguuucugaaaaauc

SEQ ID NO: 282985 - RNA, 19 nt, Artificial Sequence
  Synthetic
aggauguuucugaaaaauc

SEQ ID NO: 282986 - RNA, 20 nt, Artificial Sequence
  Synthetic
aaggauguuucugaaaaauc

SEQ ID NO: 282987 - RNA, 21 nt, Artificial Sequence
  Synthetic
caaggauguuucugaaaaauc

SEQ ID NO: 282988 - RNA, 22 nt, Artificial Sequence
  Synthetic
ccaaggauguuucugaaaaauc

SEQ ID NO: 282989 - RNA, 23 nt, Artificial Sequence
  Synthetic
accaaggauguuucugaaaaauc

SEQ ID NO: 282990 - RNA, 24 nt, Artificial Sequence
  Synthetic
caccaaggauguuucugaaaaauc

SEQ ID NO: 282991 - RNA, 18 nt, Artificial Sequence
  Synthetic
uguggacuaauaaaaauc

SEQ ID NO: 282992 - RNA, 19 nt, Artificial Sequence
  Synthetic
cuguggacuaauaaaaauc

SEQ ID NO: 282993 - RNA, 20 nt, Artificial Sequence
  Synthetic
acuguggacuaauaaaaauc

SEQ ID NO: 282994 - RNA, 21 nt, Artificial Sequence
  Synthetic
uacuguggacuaauaaaaauc

SEQ ID NO: 282995 - RNA, 22 nt, Artificial Sequence
  Synthetic
cuacuguggacuaauaaaaauc

SEQ ID NO: 282996 - RNA, 23 nt, Artificial Sequence
  Synthetic
ccuacuguggacuaauaaaaauc

SEQ ID NO: 282997 - RNA, 24 nt, Artificial Sequence
  Synthetic
accuacuguggacuaauaaaaauc

SEQ ID NO: 282998 - RNA, 18 nt, Artificial Sequence
  Synthetic
uggcgaucauuaaaaauc

SEQ ID NO: 282999 - RNA, 19 nt, Artificial Sequence
  Synthetic
auggcgaucauuaaaaauc

SEQ ID NO: 283000 - RNA, 20 nt, Artificial Sequence
  Synthetic
aauggcgaucauuaaaaauc

SEQ ID NO: 283001 - RNA, 21 nt, Artificial Sequence
  Synthetic
gaauggcgaucauuaaaaauc

SEQ ID NO: 283002 - RNA, 22 nt, Artificial Sequence
  Synthetic
agaauggcgaucauuaaaaauc

SEQ ID NO: 283003 - RNA, 23 nt, Artificial Sequence
  Synthetic
uagaauggcgaucauuaaaaauc

SEQ ID NO: 283004 - RNA, 24 nt, Artificial Sequence
  Synthetic
uuagaauggcgaucauuaaaaauc

SEQ ID NO: 283005 - RNA, 18 nt, Artificial Sequence
  Synthetic
cuggccauguuaaaaauc

SEQ ID NO: 283006 - RNA, 19 nt, Artificial Sequence
  Synthetic
acuggccauguuaaaaauc

SEQ ID NO: 283007 - RNA, 20 nt, Artificial Sequence
  Synthetic
gacuggccauguuaaaaauc

SEQ ID NO: 283008 - RNA, 21 nt, Artificial Sequence
  Synthetic
ggacuggccauguuaaaaauc

SEQ ID NO: 283009 - RNA, 22 nt, Artificial Sequence
  Synthetic
uggacuggccauguuaaaaauc

SEQ ID NO: 283010 - RNA, 23 nt, Artificial Sequence
  Synthetic
auggacuggccauguuaaaaauc

SEQ ID NO: 283011 - RNA, 24 nt, Artificial Sequence
  Synthetic
aauggacuggccauguuaaaaauc

SEQ ID NO: 283012 - RNA, 18 nt, Artificial Sequence
  Synthetic
agaguugaaaacaaaauc

SEQ ID NO: 283013 - RNA, 19 nt, Artificial Sequence
  Synthetic
cagaguugaaaacaaaauc

SEQ ID NO: 283014 - RNA, 20 nt, Artificial Sequence
  Synthetic
acagaguugaaaacaaaauc

SEQ ID NO: 283015 - RNA, 21 nt, Artificial Sequence
  Synthetic
cacagaguugaaaacaaaauc

SEQ ID NO: 283016 - RNA, 22 nt, Artificial Sequence
  Synthetic
ucacagaguugaaaacaaaauc

SEQ ID NO: 283017 - RNA, 23 nt, Artificial Sequence
  Synthetic
aucacagaguugaaaacaaaauc

SEQ ID NO: 283018 - RNA, 24 nt, Artificial Sequence
  Synthetic
aaucacagaguugaaaacaaaauc

SEQ ID NO: 283019 - RNA, 18 nt, Artificial Sequence
  Synthetic
cuauccaguaacaaaauc

SEQ ID NO: 283020 - RNA, 19 nt, Artificial Sequence
  Synthetic
gcuauccaguaacaaaauc

SEQ ID NO: 283021 - RNA, 20 nt, Artificial Sequence
  Synthetic
agcuauccaguaacaaaauc

SEQ ID NO: 283022 - RNA, 21 nt, Artificial Sequence
  Synthetic
uagcuauccaguaacaaaauc

SEQ ID NO: 283023 - RNA, 22 nt, Artificial Sequence
  Synthetic
uuagcuauccaguaacaaaauc

SEQ ID NO: 283024 - RNA, 23 nt, Artificial Sequence
  Synthetic
cuuagcuauccaguaacaaaauc

SEQ ID NO: 283025 - RNA, 24 nt, Artificial Sequence
  Synthetic
acuuagcuauccaguaacaaaauc

SEQ ID NO: 283026 - RNA, 18 nt, Artificial Sequence
  Synthetic
aucaacaaaaccaaaauc

SEQ ID NO: 283027 - RNA, 19 nt, Artificial Sequence
  Synthetic
aaucaacaaaaccaaaauc

SEQ ID NO: 283028 - RNA, 20 nt, Artificial Sequence
  Synthetic
aaaucaacaaaaccaaaauc

SEQ ID NO: 283029 - RNA, 21 nt, Artificial Sequence
  Synthetic
aaaaucaacaaaaccaaaauc

SEQ ID NO: 283030 - RNA, 22 nt, Artificial Sequence
  Synthetic
aaaaaucaacaaaaccaaaauc

SEQ ID NO: 283031 - RNA, 23 nt, Artificial Sequence
  Synthetic
aaaaaaucaacaaaaccaaaauc

SEQ ID NO: 283032 - RNA, 24 nt, Artificial Sequence
  Synthetic
gaaaaaaucaacaaaaccaaaauc

SEQ ID NO: 283033 - RNA, 18 nt, Artificial Sequence
  Synthetic
ggaauaaugcucaaaauc

SEQ ID NO: 283034 - RNA, 19 nt, Artificial Sequence
  Synthetic
aggaauaaugcucaaaauc

SEQ ID NO: 283035 - RNA, 20 nt, Artificial Sequence
  Synthetic
uaggaauaaugcucaaaauc

SEQ ID NO: 283036 - RNA, 21 nt, Artificial Sequence
  Synthetic
uuaggaauaaugcucaaaauc

SEQ ID NO: 283037 - RNA, 22 nt, Artificial Sequence
  Synthetic
guuaggaauaaugcucaaaauc

SEQ ID NO: 283038 - RNA, 23 nt, Artificial Sequence
  Synthetic
uguuaggaauaaugcucaaaauc

SEQ ID NO: 283039 - RNA, 24 nt, Artificial Sequence
  Synthetic
guguuaggaauaaugcucaaaauc

SEQ ID NO: 283040 - RNA, 18 nt, Artificial Sequence
  Synthetic
gaaaggaaugucaaaauc

SEQ ID NO: 283041 - RNA, 19 nt, Artificial Sequence
  Synthetic
ugaaaggaaugucaaaauc

SEQ ID NO: 283042 - RNA, 20 nt, Artificial Sequence
  Synthetic
uugaaaggaaugucaaaauc

SEQ ID NO: 283043 - RNA, 21 nt, Artificial Sequence
  Synthetic
uuugaaaggaaugucaaaauc

SEQ ID NO: 283044 - RNA, 22 nt, Artificial Sequence
  Synthetic
uuuugaaaggaaugucaaaauc

SEQ ID NO: 283045 - RNA, 23 nt, Artificial Sequence
  Synthetic
auuuugaaaggaaugucaaaauc

SEQ ID NO: 283046 - RNA, 24 nt, Artificial Sequence
  Synthetic
aauuuugaaaggaaugucaaaauc

SEQ ID NO: 283047 - RNA, 18 nt, Artificial Sequence
  Synthetic
aaccaggaugucaaaauc

SEQ ID NO: 283048 - RNA, 19 nt, Artificial Sequence
  Synthetic
aaaccaggaugucaaaauc

SEQ ID NO: 283049 - RNA, 20 nt, Artificial Sequence
  Synthetic
aaaaccaggaugucaaaauc

SEQ ID NO: 283050 - RNA, 21 nt, Artificial Sequence
  Synthetic
caaaaccaggaugucaaaauc

SEQ ID NO: 283051 - RNA, 22 nt, Artificial Sequence
  Synthetic
acaaaaccaggaugucaaaauc

SEQ ID NO: 283052 - RNA, 23 nt, Artificial Sequence
  Synthetic
cacaaaaccaggaugucaaaauc

SEQ ID NO: 283053 - RNA, 24 nt, Artificial Sequence
  Synthetic
ucacaaaaccaggaugucaaaauc

SEQ ID NO: 283054 - RNA, 19 nt, Artificial Sequence
  Synthetic
acaaauaaacuagaaaauc

SEQ ID NO: 283055 - RNA, 20 nt, Artificial Sequence
  Synthetic
cacaaauaaacuagaaaauc

SEQ ID NO: 283056 - RNA, 21 nt, Artificial Sequence
  Synthetic
acacaaauaaacuagaaaauc

SEQ ID NO: 283057 - RNA, 22 nt, Artificial Sequence
  Synthetic
uacacaaauaaacuagaaaauc

SEQ ID NO: 283058 - RNA, 23 nt, Artificial Sequence
  Synthetic
cuacacaaauaaacuagaaaauc

SEQ ID NO: 283059 - RNA, 24 nt, Artificial Sequence
  Synthetic
ucuacacaaauaaacuagaaaauc

SEQ ID NO: 283060 - RNA, 20 nt, Artificial Sequence
  Synthetic
cgcaaauaaacuagaaaauc

SEQ ID NO: 283061 - RNA, 18 nt, Artificial Sequence
  Synthetic
ucugcauaauugaaaauc

SEQ ID NO: 283062 - RNA, 19 nt, Artificial Sequence
  Synthetic
cucugcauaauugaaaauc

SEQ ID NO: 283063 - RNA, 20 nt, Artificial Sequence
  Synthetic
ucucugcauaauugaaaauc

SEQ ID NO: 283064 - RNA, 21 nt, Artificial Sequence
  Synthetic
uucucugcauaauugaaaauc

SEQ ID NO: 283065 - RNA, 22 nt, Artificial Sequence
  Synthetic
uuucucugcauaauugaaaauc

SEQ ID NO: 283066 - RNA, 23 nt, Artificial Sequence
  Synthetic
uuuucucugcauaauugaaaauc

SEQ ID NO: 283067 - RNA, 24 nt, Artificial Sequence
  Synthetic
uuuuucucugcauaauugaaaauc

SEQ ID NO: 283068 - RNA, 18 nt, Artificial Sequence
  Synthetic
gaauccuagaauaaaauc

SEQ ID NO: 283069 - RNA, 19 nt, Artificial Sequence
  Synthetic
agaauccuagaauaaaauc

SEQ ID NO: 283070 - RNA, 20 nt, Artificial Sequence
  Synthetic
aagaauccuagaauaaaauc

SEQ ID NO: 283071 - RNA, 21 nt, Artificial Sequence
  Synthetic
uaagaauccuagaauaaaauc

SEQ ID NO: 283072 - RNA, 22 nt, Artificial Sequence
  Synthetic
auaagaauccuagaauaaaauc

SEQ ID NO: 283073 - RNA, 23 nt, Artificial Sequence
  Synthetic
uauaagaauccuagaauaaaauc

SEQ ID NO: 283074 - RNA, 24 nt, Artificial Sequence
  Synthetic
cuauaagaauccuagaauaaaauc

SEQ ID NO: 283075 - RNA, 18 nt, Artificial Sequence
  Synthetic
acuuuccuuacuaaaauc

SEQ ID NO: 283076 - RNA, 19 nt, Artificial Sequence
  Synthetic
cacuuuccuuacuaaaauc

SEQ ID NO: 283077 - RNA, 20 nt, Artificial Sequence
  Synthetic
ucacuuuccuuacuaaaauc

SEQ ID NO: 283078 - RNA, 21 nt, Artificial Sequence
  Synthetic
cucacuuuccuuacuaaaauc

SEQ ID NO: 283079 - RNA, 22 nt, Artificial Sequence
  Synthetic
acucacuuuccuuacuaaaauc

SEQ ID NO: 283080 - RNA, 23 nt, Artificial Sequence
  Synthetic
aacucacuuuccuuacuaaaauc

SEQ ID NO: 283081 - RNA, 24 nt, Artificial Sequence
  Synthetic
uaacucacuuuccuuacuaaaauc

SEQ ID NO: 283082 - RNA, 18 nt, Artificial Sequence
  Synthetic
aucaucuggaguaaaauc

SEQ ID NO: 283083 - RNA, 19 nt, Artificial Sequence
  Synthetic
gaucaucuggaguaaaauc

SEQ ID NO: 283084 - RNA, 20 nt, Artificial Sequence
  Synthetic
agaucaucuggaguaaaauc

SEQ ID NO: 283085 - RNA, 21 nt, Artificial Sequence
  Synthetic
aagaucaucuggaguaaaauc

SEQ ID NO: 283086 - RNA, 22 nt, Artificial Sequence
  Synthetic
gaagaucaucuggaguaaaauc

SEQ ID NO: 283087 - RNA, 23 nt, Artificial Sequence
  Synthetic
ugaagaucaucuggaguaaaauc

SEQ ID NO: 283088 - RNA, 24 nt, Artificial Sequence
  Synthetic
cugaagaucaucuggaguaaaauc

SEQ ID NO: 283089 - RNA, 18 nt, Artificial Sequence
  Synthetic
uagaauauggguaaaauc

SEQ ID NO: 283090 - RNA, 19 nt, Artificial Sequence
  Synthetic
uuagaauauggguaaaauc

SEQ ID NO: 283091 - RNA, 20 nt, Artificial Sequence
  Synthetic
uuuagaauauggguaaaauc

SEQ ID NO: 283092 - RNA, 21 nt, Artificial Sequence
  Synthetic
guuuagaauauggguaaaauc

SEQ ID NO: 283093 - RNA, 22 nt, Artificial Sequence
  Synthetic
uguuuagaauauggguaaaauc

SEQ ID NO: 283094 - RNA, 23 nt, Artificial Sequence
  Synthetic
auguuuagaauauggguaaaauc

SEQ ID NO: 283095 - RNA, 24 nt, Artificial Sequence
  Synthetic
aauguuuagaauauggguaaaauc

SEQ ID NO: 283096 - RNA, 18 nt, Artificial Sequence
  Synthetic
uguaaaugaauuaaaauc

SEQ ID NO: 283097 - RNA, 19 nt, Artificial Sequence
  Synthetic
auguaaaugaauuaaaauc

SEQ ID NO: 283098 - RNA, 20 nt, Artificial Sequence
  Synthetic
uauguaaaugaauuaaaauc

SEQ ID NO: 283099 - RNA, 21 nt, Artificial Sequence
  Synthetic
guauguaaaugaauuaaaauc

SEQ ID NO: 283100 - RNA, 22 nt, Artificial Sequence
  Synthetic
aguauguaaaugaauuaaaauc

SEQ ID NO: 283101 - RNA, 23 nt, Artificial Sequence
  Synthetic
aaguauguaaaugaauuaaaauc

SEQ ID NO: 283102 - RNA, 24 nt, Artificial Sequence
  Synthetic
uaaguauguaaaugaauuaaaauc

SEQ ID NO: 283103 - RNA, 18 nt, Artificial Sequence
  Synthetic
gagacucagauuaaaauc

SEQ ID NO: 283104 - RNA, 19 nt, Artificial Sequence
  Synthetic
agagacucagauuaaaauc

SEQ ID NO: 283105 - RNA, 20 nt, Artificial Sequence
  Synthetic
cagagacucagauuaaaauc

SEQ ID NO: 283106 - RNA, 21 nt, Artificial Sequence
  Synthetic
ccagagacucagauuaaaauc

SEQ ID NO: 283107 - RNA, 22 nt, Artificial Sequence
  Synthetic
cccagagacucagauuaaaauc

SEQ ID NO: 283108 - RNA, 23 nt, Artificial Sequence
  Synthetic
ccccagagacucagauuaaaauc

SEQ ID NO: 283109 - RNA, 24 nt, Artificial Sequence
  Synthetic
uccccagagacucagauuaaaauc

SEQ ID NO: 283110 - RNA, 18 nt, Artificial Sequence
  Synthetic
auuauaaaacuuaaaauc

SEQ ID NO: 283111 - RNA, 19 nt, Artificial Sequence
  Synthetic
aauuauaaaacuuaaaauc

SEQ ID NO: 283112 - RNA, 20 nt, Artificial Sequence
  Synthetic
uaauuauaaaacuuaaaauc

SEQ ID NO: 283113 - RNA, 21 nt, Artificial Sequence
  Synthetic
guaauuauaaaacuuaaaauc

SEQ ID NO: 283114 - RNA, 22 nt, Artificial Sequence
  Synthetic
aguaauuauaaaacuuaaaauc

SEQ ID NO: 283115 - RNA, 23 nt, Artificial Sequence
  Synthetic
aaguaauuauaaaacuuaaaauc

SEQ ID NO: 283116 - RNA, 24 nt, Artificial Sequence
  Synthetic
uaaguaauuauaaaacuuaaaauc

SEQ ID NO: 283117 - RNA, 18 nt, Artificial Sequence
  Synthetic
auucaaugucuuaaaauc

SEQ ID NO: 283118 - RNA, 19 nt, Artificial Sequence
  Synthetic
aauucaaugucuuaaaauc

SEQ ID NO: 283119 - RNA, 20 nt, Artificial Sequence
  Synthetic
aaauucaaugucuuaaaauc

SEQ ID NO: 283120 - RNA, 21 nt, Artificial Sequence
  Synthetic
aaaauucaaugucuuaaaauc

SEQ ID NO: 283121 - RNA, 22 nt, Artificial Sequence
  Synthetic
aaaaauucaaugucuuaaaauc

SEQ ID NO: 283122 - RNA, 23 nt, Artificial Sequence
  Synthetic
gaaaaauucaaugucuuaaaauc

SEQ ID NO: 283123 - RNA, 24 nt, Artificial Sequence
  Synthetic
ugaaaaauucaaugucuuaaaauc

SEQ ID NO: 283124 - RNA, 18 nt, Artificial Sequence
  Synthetic
gacauauuauuuaaaauc

SEQ ID NO: 283125 - RNA, 19 nt, Artificial Sequence
  Synthetic
ggacauauuauuuaaaauc

SEQ ID NO: 283126 - RNA, 20 nt, Artificial Sequence
  Synthetic
uggacauauuauuuaaaauc

SEQ ID NO: 283127 - RNA, 21 nt, Artificial Sequence
  Synthetic
guggacauauuauuuaaaauc

SEQ ID NO: 283128 - RNA, 22 nt, Artificial Sequence
  Synthetic
aguggacauauuauuuaaaauc

SEQ ID NO: 283129 - RNA, 23 nt, Artificial Sequence
  Synthetic
caguggacauauuauuuaaaauc

SEQ ID NO: 283130 - RNA, 24 nt, Artificial Sequence
  Synthetic
acaguggacauauuauuuaaaauc

SEQ ID NO: 283131 - RNA, 18 nt, Artificial Sequence
  Synthetic
uuuauucucucacaaauc

SEQ ID NO: 283132 - RNA, 19 nt, Artificial Sequence
  Synthetic
auuuauucucucacaaauc

SEQ ID NO: 283133 - RNA, 20 nt, Artificial Sequence
  Synthetic
cauuuauucucucacaaauc

SEQ ID NO: 283134 - RNA, 21 nt, Artificial Sequence
  Synthetic
acauuuauucucucacaaauc

SEQ ID NO: 283135 - RNA, 22 nt, Artificial Sequence
  Synthetic
gacauuuauucucucacaaauc

SEQ ID NO: 283136 - RNA, 23 nt, Artificial Sequence
  Synthetic
agacauuuauucucucacaaauc

SEQ ID NO: 283137 - RNA, 24 nt, Artificial Sequence
  Synthetic
uagacauuuauucucucacaaauc

SEQ ID NO: 283138 - RNA, 18 nt, Artificial Sequence
  Synthetic
uuuaacaccagacaaauc

SEQ ID NO: 283139 - RNA, 19 nt, Artificial Sequence
  Synthetic
auuuaacaccagacaaauc

SEQ ID NO: 283140 - RNA, 20 nt, Artificial Sequence
  Synthetic
cauuuaacaccagacaaauc

SEQ ID NO: 283141 - RNA, 21 nt, Artificial Sequence
  Synthetic
ucauuuaacaccagacaaauc

SEQ ID NO: 283142 - RNA, 22 nt, Artificial Sequence
  Synthetic
aucauuuaacaccagacaaauc

SEQ ID NO: 283143 - RNA, 23 nt, Artificial Sequence
  Synthetic
caucauuuaacaccagacaaauc

SEQ ID NO: 283144 - RNA, 24 nt, Artificial Sequence
  Synthetic
gcaucauuuaacaccagacaaauc

SEQ ID NO: 283145 - RNA, 18 nt, Artificial Sequence
  Synthetic
uauuaaaacuuacaaauc

SEQ ID NO: 283146 - RNA, 19 nt, Artificial Sequence
  Synthetic
auauuaaaacuuacaaauc

SEQ ID NO: 283147 - RNA, 20 nt, Artificial Sequence
  Synthetic
cauauuaaaacuuacaaauc

SEQ ID NO: 283148 - RNA, 21 nt, Artificial Sequence
  Synthetic
ccauauuaaaacuuacaaauc

SEQ ID NO: 283149 - RNA, 22 nt, Artificial Sequence
  Synthetic
uccauauuaaaacuuacaaauc

SEQ ID NO: 283150 - RNA, 23 nt, Artificial Sequence
  Synthetic
uuccauauuaaaacuuacaaauc

SEQ ID NO: 283151 - RNA, 24 nt, Artificial Sequence
  Synthetic
cuuccauauuaaaacuuacaaauc

SEQ ID NO: 283152 - RNA, 18 nt, Artificial Sequence
  Synthetic
cagguaaucucccaaauc

SEQ ID NO: 283153 - RNA, 19 nt, Artificial Sequence
  Synthetic
acagguaaucucccaaauc

SEQ ID NO: 283154 - RNA, 20 nt, Artificial Sequence
  Synthetic
aacagguaaucucccaaauc

SEQ ID NO: 283155 - RNA, 21 nt, Artificial Sequence
  Synthetic
uaacagguaaucucccaaauc

SEQ ID NO: 283156 - RNA, 22 nt, Artificial Sequence
  Synthetic
auaacagguaaucucccaaauc

SEQ ID NO: 283157 - RNA, 23 nt, Artificial Sequence
  Synthetic
uauaacagguaaucucccaaauc

SEQ ID NO: 283158 - RNA, 24 nt, Artificial Sequence
  Synthetic
cuauaacagguaaucucccaaauc

SEQ ID NO: 283159 - RNA, 18 nt, Artificial Sequence
  Synthetic
cauggaagcugccaaauc

SEQ ID NO: 283160 - RNA, 19 nt, Artificial Sequence
  Synthetic
acauggaagcugccaaauc

SEQ ID NO: 283161 - RNA, 20 nt, Artificial Sequence
  Synthetic
cacauggaagcugccaaauc

SEQ ID NO: 283162 - RNA, 21 nt, Artificial Sequence
  Synthetic
ccacauggaagcugccaaauc

SEQ ID NO: 283163 - RNA, 22 nt, Artificial Sequence
  Synthetic
accacauggaagcugccaaauc

SEQ ID NO: 283164 - RNA, 23 nt, Artificial Sequence
  Synthetic
caccacauggaagcugccaaauc

SEQ ID NO: 283165 - RNA, 24 nt, Artificial Sequence
  Synthetic
acaccacauggaagcugccaaauc

SEQ ID NO: 283166 - RNA, 18 nt, Artificial Sequence
  Synthetic
guaaauagcauccaaauc

SEQ ID NO: 283167 - RNA, 19 nt, Artificial Sequence
  Synthetic
uguaaauagcauccaaauc

SEQ ID NO: 283168 - RNA, 20 nt, Artificial Sequence
  Synthetic
guguaaauagcauccaaauc

SEQ ID NO: 283169 - RNA, 21 nt, Artificial Sequence
  Synthetic
uguguaaauagcauccaaauc

SEQ ID NO: 283170 - RNA, 22 nt, Artificial Sequence
  Synthetic
cuguguaaauagcauccaaauc

SEQ ID NO: 283171 - RNA, 23 nt, Artificial Sequence
  Synthetic
acuguguaaauagcauccaaauc

SEQ ID NO: 283172 - RNA, 24 nt, Artificial Sequence
  Synthetic
aacuguguaaauagcauccaaauc

SEQ ID NO: 283173 - RNA, 18 nt, Artificial Sequence
  Synthetic
aggcagccuauccaaauc

SEQ ID NO: 283174 - RNA, 19 nt, Artificial Sequence
  Synthetic
caggcagccuauccaaauc

SEQ ID NO: 283175 - RNA, 20 nt, Artificial Sequence
  Synthetic
ccaggcagccuauccaaauc

SEQ ID NO: 283176 - RNA, 21 nt, Artificial Sequence
  Synthetic
accaggcagccuauccaaauc

SEQ ID NO: 283177 - RNA, 22 nt, Artificial Sequence
  Synthetic
uaccaggcagccuauccaaauc

SEQ ID NO: 283178 - RNA, 23 nt, Artificial Sequence
  Synthetic
cuaccaggcagccuauccaaauc

SEQ ID NO: 283179 - RNA, 24 nt, Artificial Sequence
  Synthetic
acuaccaggcagccuauccaaauc

SEQ ID NO: 283180 - RNA, 18 nt, Artificial Sequence
  Synthetic
uucuuacauaagcaaauc

SEQ ID NO: 283181 - RNA, 19 nt, Artificial Sequence
  Synthetic
guucuuacauaagcaaauc

SEQ ID NO: 283182 - RNA, 20 nt, Artificial Sequence
  Synthetic
gguucuuacauaagcaaauc

SEQ ID NO: 283183 - RNA, 21 nt, Artificial Sequence
  Synthetic
ggguucuuacauaagcaaauc

SEQ ID NO: 283184 - RNA, 22 nt, Artificial Sequence
  Synthetic
uggguucuuacauaagcaaauc

SEQ ID NO: 283185 - RNA, 23 nt, Artificial Sequence
  Synthetic
uuggguucuuacauaagcaaauc

SEQ ID NO: 283186 - RNA, 24 nt, Artificial Sequence
  Synthetic
uuuggguucuuacauaagcaaauc

SEQ ID NO: 283187 - RNA, 18 nt, Artificial Sequence
  Synthetic
aaggggaaccagcaaauc

SEQ ID NO: 283188 - RNA, 19 nt, Artificial Sequence
  Synthetic
caaggggaaccagcaaauc

SEQ ID NO: 283189 - RNA, 20 nt, Artificial Sequence
  Synthetic
acaaggggaaccagcaaauc

SEQ ID NO: 283190 - RNA, 21 nt, Artificial Sequence
  Synthetic
aacaaggggaaccagcaaauc

SEQ ID NO: 283191 - RNA, 22 nt, Artificial Sequence
  Synthetic
gaacaaggggaaccagcaaauc

SEQ ID NO: 283192 - RNA, 23 nt, Artificial Sequence
  Synthetic
agaacaaggggaaccagcaaauc

SEQ ID NO: 283193 - RNA, 24 nt, Artificial Sequence
  Synthetic
aagaacaaggggaaccagcaaauc

SEQ ID NO: 283194 - RNA, 18 nt, Artificial Sequence
  Synthetic
aaacaacaguggcaaauc

SEQ ID NO: 283195 - RNA, 19 nt, Artificial Sequence
  Synthetic
gaaacaacaguggcaaauc

SEQ ID NO: 283196 - RNA, 20 nt, Artificial Sequence
  Synthetic
ggaaacaacaguggcaaauc

SEQ ID NO: 283197 - RNA, 21 nt, Artificial Sequence
  Synthetic
aggaaacaacaguggcaaauc

SEQ ID NO: 283198 - RNA, 22 nt, Artificial Sequence
  Synthetic
aaggaaacaacaguggcaaauc

SEQ ID NO: 283199 - RNA, 23 nt, Artificial Sequence
  Synthetic
uaaggaaacaacaguggcaaauc

SEQ ID NO: 283200 - RNA, 24 nt, Artificial Sequence
  Synthetic
auaaggaaacaacaguggcaaauc

SEQ ID NO: 283201 - RNA, 18 nt, Artificial Sequence
  Synthetic
aaacaguguaugcaaauc

SEQ ID NO: 283202 - RNA, 19 nt, Artificial Sequence
  Synthetic
caaacaguguaugcaaauc

SEQ ID NO: 283203 - RNA, 20 nt, Artificial Sequence
  Synthetic
ccaaacaguguaugcaaauc

SEQ ID NO: 283204 - RNA, 21 nt, Artificial Sequence
  Synthetic
uccaaacaguguaugcaaauc

SEQ ID NO: 283205 - RNA, 22 nt, Artificial Sequence
  Synthetic
uuccaaacaguguaugcaaauc

SEQ ID NO: 283206 - RNA, 23 nt, Artificial Sequence
  Synthetic
auuccaaacaguguaugcaaauc

SEQ ID NO: 283207 - RNA, 24 nt, Artificial Sequence
  Synthetic
uauuccaaacaguguaugcaaauc

SEQ ID NO: 283208 - RNA, 18 nt, Artificial Sequence
  Synthetic
ugauggcaucugcaaauc

SEQ ID NO: 283209 - RNA, 19 nt, Artificial Sequence
  Synthetic
augauggcaucugcaaauc

SEQ ID NO: 283210 - RNA, 20 nt, Artificial Sequence
  Synthetic
uaugauggcaucugcaaauc

SEQ ID NO: 283211 - RNA, 21 nt, Artificial Sequence
  Synthetic
guaugauggcaucugcaaauc

SEQ ID NO: 283212 - RNA, 22 nt, Artificial Sequence
  Synthetic
uguaugauggcaucugcaaauc

SEQ ID NO: 283213 - RNA, 23 nt, Artificial Sequence
  Synthetic
uuguaugauggcaucugcaaauc

SEQ ID NO: 283214 - RNA, 24 nt, Artificial Sequence
  Synthetic
cuuguaugauggcaucugcaaauc

SEQ ID NO: 283215 - RNA, 18 nt, Artificial Sequence
  Synthetic
aauaagcaaccucaaauc

SEQ ID NO: 283216 - RNA, 19 nt, Artificial Sequence
  Synthetic
uaauaagcaaccucaaauc

SEQ ID NO: 283217 - RNA, 20 nt, Artificial Sequence
  Synthetic
guaauaagcaaccucaaauc

SEQ ID NO: 283218 - RNA, 21 nt, Artificial Sequence
  Synthetic
aguaauaagcaaccucaaauc

SEQ ID NO: 283219 - RNA, 22 nt, Artificial Sequence
  Synthetic
caguaauaagcaaccucaaauc

SEQ ID NO: 283220 - RNA, 23 nt, Artificial Sequence
  Synthetic
acaguaauaagcaaccucaaauc

SEQ ID NO: 283221 - RNA, 24 nt, Artificial Sequence
  Synthetic
uacaguaauaagcaaccucaaauc

SEQ ID NO: 283222 - RNA, 18 nt, Artificial Sequence
  Synthetic
cagcacccaagucaaauc

SEQ ID NO: 283223 - RNA, 19 nt, Artificial Sequence
  Synthetic
acagcacccaagucaaauc

SEQ ID NO: 283224 - RNA, 20 nt, Artificial Sequence
  Synthetic
aacagcacccaagucaaauc

SEQ ID NO: 283225 - RNA, 21 nt, Artificial Sequence
  Synthetic
uaacagcacccaagucaaauc

SEQ ID NO: 283226 - RNA, 22 nt, Artificial Sequence
  Synthetic
uuaacagcacccaagucaaauc

SEQ ID NO: 283227 - RNA, 23 nt, Artificial Sequence
  Synthetic
uuuaacagcacccaagucaaauc

SEQ ID NO: 283228 - RNA, 24 nt, Artificial Sequence
  Synthetic
uuuuaacagcacccaagucaaauc

SEQ ID NO: 283229 - RNA, 18 nt, Artificial Sequence
  Synthetic
guaaaagaaaaagaaauc

SEQ ID NO: 283230 - RNA, 19 nt, Artificial Sequence
  Synthetic
aguaaaagaaaaagaaauc

SEQ ID NO: 283231 - RNA, 20 nt, Artificial Sequence
  Synthetic
aaguaaaagaaaaagaaauc

SEQ ID NO: 283232 - RNA, 21 nt, Artificial Sequence
  Synthetic
aaaguaaaagaaaaagaaauc

SEQ ID NO: 283233 - RNA, 22 nt, Artificial Sequence
  Synthetic
aaaaguaaaagaaaaagaaauc

SEQ ID NO: 283234 - RNA, 23 nt, Artificial Sequence
  Synthetic
aaaaaguaaaagaaaaagaaauc

SEQ ID NO: 283235 - RNA, 24 nt, Artificial Sequence
  Synthetic
aaaaaaguaaaagaaaaagaaauc

SEQ ID NO: 283236 - RNA, 18 nt, Artificial Sequence
  Synthetic
uuuaaauaggcagaaauc

SEQ ID NO: 283237 - RNA, 19 nt, Artificial Sequence
  Synthetic
uuuuaaauaggcagaaauc

SEQ ID NO: 283238 - RNA, 20 nt, Artificial Sequence
  Synthetic
cuuuuaaauaggcagaaauc

SEQ ID NO: 283239 - RNA, 21 nt, Artificial Sequence
  Synthetic
gcuuuuaaauaggcagaaauc

SEQ ID NO: 283240 - RNA, 22 nt, Artificial Sequence
  Synthetic
ugcuuuuaaauaggcagaaauc

SEQ ID NO: 283241 - RNA, 23 nt, Artificial Sequence
  Synthetic
cugcuuuuaaauaggcagaaauc

SEQ ID NO: 283242 - RNA, 24 nt, Artificial Sequence
  Synthetic
acugcuuuuaaauaggcagaaauc

SEQ ID NO: 283243 - RNA, 18 nt, Artificial Sequence
  Synthetic
acagcaagggcagaaauc

SEQ ID NO: 283244 - RNA, 19 nt, Artificial Sequence
  Synthetic
aacagcaagggcagaaauc

SEQ ID NO: 283245 - RNA, 20 nt, Artificial Sequence
  Synthetic
gaacagcaagggcagaaauc

SEQ ID NO: 283246 - RNA, 21 nt, Artificial Sequence
  Synthetic
agaacagcaagggcagaaauc

SEQ ID NO: 283247 - RNA, 22 nt, Artificial Sequence
  Synthetic
uagaacagcaagggcagaaauc

SEQ ID NO: 283248 - RNA, 23 nt, Artificial Sequence
  Synthetic
guagaacagcaagggcagaaauc

SEQ ID NO: 283249 - RNA, 24 nt, Artificial Sequence
  Synthetic
gguagaacagcaagggcagaaauc

SEQ ID NO: 283250 - RNA, 18 nt, Artificial Sequence
  Synthetic
aaauuuguuucagaaauc

SEQ ID NO: 283251 - RNA, 19 nt, Artificial Sequence
  Synthetic
uaaauuuguuucagaaauc

SEQ ID NO: 283252 - RNA, 20 nt, Artificial Sequence
  Synthetic
uuaaauuuguuucagaaauc

SEQ ID NO: 283253 - RNA, 21 nt, Artificial Sequence
  Synthetic
uuuaaauuuguuucagaaauc

SEQ ID NO: 283254 - RNA, 22 nt, Artificial Sequence
  Synthetic
guuuaaauuuguuucagaaauc

SEQ ID NO: 283255 - RNA, 23 nt, Artificial Sequence
  Synthetic
uguuuaaauuuguuucagaaauc

SEQ ID NO: 283256 - RNA, 24 nt, Artificial Sequence
  Synthetic
cuguuuaaauuuguuucagaaauc

SEQ ID NO: 283257 - RNA, 18 nt, Artificial Sequence
  Synthetic
uuguucaauauagaaauc

SEQ ID NO: 283258 - RNA, 19 nt, Artificial Sequence
  Synthetic
auuguucaauauagaaauc

SEQ ID NO: 283259 - RNA, 20 nt, Artificial Sequence
  Synthetic
uauuguucaauauagaaauc

SEQ ID NO: 283260 - RNA, 21 nt, Artificial Sequence
  Synthetic
guauuguucaauauagaaauc

SEQ ID NO: 283261 - RNA, 22 nt, Artificial Sequence
  Synthetic
cguauuguucaauauagaaauc

SEQ ID NO: 283262 - RNA, 23 nt, Artificial Sequence
  Synthetic
gcguauuguucaauauagaaauc

SEQ ID NO: 283263 - RNA, 24 nt, Artificial Sequence
  Synthetic
agcguauuguucaauauagaaauc

SEQ ID NO: 283264 - RNA, 18 nt, Artificial Sequence
  Synthetic
augaguguaacugaaauc

SEQ ID NO: 283265 - RNA, 19 nt, Artificial Sequence
  Synthetic
caugaguguaacugaaauc

SEQ ID NO: 283266 - RNA, 20 nt, Artificial Sequence
  Synthetic
acaugaguguaacugaaauc

SEQ ID NO: 283267 - RNA, 21 nt, Artificial Sequence
  Synthetic
gacaugaguguaacugaaauc

SEQ ID NO: 283268 - RNA, 22 nt, Artificial Sequence
  Synthetic
agacaugaguguaacugaaauc

SEQ ID NO: 283269 - RNA, 23 nt, Artificial Sequence
  Synthetic
aagacaugaguguaacugaaauc

SEQ ID NO: 283270 - RNA, 24 nt, Artificial Sequence
  Synthetic
uaagacaugaguguaacugaaauc

SEQ ID NO: 283271 - RNA, 18 nt, Artificial Sequence
  Synthetic
aaugagaacucugaaauc

SEQ ID NO: 283272 - RNA, 19 nt, Artificial Sequence
  Synthetic
aaaugagaacucugaaauc

SEQ ID NO: 283273 - RNA, 20 nt, Artificial Sequence
  Synthetic
caaaugagaacucugaaauc

SEQ ID NO: 283274 - RNA, 21 nt, Artificial Sequence
  Synthetic
acaaaugagaacucugaaauc

SEQ ID NO: 283275 - RNA, 22 nt, Artificial Sequence
  Synthetic
cacaaaugagaacucugaaauc

SEQ ID NO: 283276 - RNA, 23 nt, Artificial Sequence
  Synthetic
ucacaaaugagaacucugaaauc

SEQ ID NO: 283277 - RNA, 24 nt, Artificial Sequence
  Synthetic
uucacaaaugagaacucugaaauc

SEQ ID NO: 283278 - RNA, 18 nt, Artificial Sequence
  Synthetic
caucuaugaugugaaauc

SEQ ID NO: 283279 - RNA, 19 nt, Artificial Sequence
  Synthetic
acaucuaugaugugaaauc

SEQ ID NO: 283280 - RNA, 20 nt, Artificial Sequence
  Synthetic
aacaucuaugaugugaaauc

SEQ ID NO: 283281 - RNA, 21 nt, Artificial Sequence
  Synthetic
uaacaucuaugaugugaaauc

SEQ ID NO: 283282 - RNA, 22 nt, Artificial Sequence
  Synthetic
auaacaucuaugaugugaaauc

SEQ ID NO: 283283 - RNA, 23 nt, Artificial Sequence
  Synthetic
uauaacaucuaugaugugaaauc

SEQ ID NO: 283284 - RNA, 24 nt, Artificial Sequence
  Synthetic
auauaacaucuaugaugugaaauc

SEQ ID NO: 283285 - RNA, 18 nt, Artificial Sequence
  Synthetic
ggaguugcuugugaaauc

SEQ ID NO: 283286 - RNA, 19 nt, Artificial Sequence
  Synthetic
aggaguugcuugugaaauc

SEQ ID NO: 283287 - RNA, 20 nt, Artificial Sequence
  Synthetic
caggaguugcuugugaaauc

SEQ ID NO: 283288 - RNA, 21 nt, Artificial Sequence
  Synthetic
ucaggaguugcuugugaaauc

SEQ ID NO: 283289 - RNA, 22 nt, Artificial Sequence
  Synthetic
gucaggaguugcuugugaaauc

SEQ ID NO: 283290 - RNA, 23 nt, Artificial Sequence
  Synthetic
cgucaggaguugcuugugaaauc

SEQ ID NO: 283291 - RNA, 24 nt, Artificial Sequence
  Synthetic
ucgucaggaguugcuugugaaauc

SEQ ID NO: 283292 - RNA, 18 nt, Artificial Sequence
  Synthetic
guagcuugcaaauaaauc

SEQ ID NO: 283293 - RNA, 19 nt, Artificial Sequence
  Synthetic
aguagcuugcaaauaaauc

SEQ ID NO: 283294 - RNA, 20 nt, Artificial Sequence
  Synthetic
aaguagcuugcaaauaaauc

SEQ ID NO: 283295 - RNA, 21 nt, Artificial Sequence
  Synthetic
gaaguagcuugcaaauaaauc

SEQ ID NO: 283296 - RNA, 22 nt, Artificial Sequence
  Synthetic
agaaguagcuugcaaauaaauc

SEQ ID NO: 283297 - RNA, 23 nt, Artificial Sequence
  Synthetic
aagaaguagcuugcaaauaaauc

SEQ ID NO: 283298 - RNA, 24 nt, Artificial Sequence
  Synthetic
aaagaaguagcuugcaaauaaauc

SEQ ID NO: 283299 - RNA, 18 nt, Artificial Sequence
  Synthetic
ugcucugccuaauaaauc

SEQ ID NO: 283300 - RNA, 19 nt, Artificial Sequence
  Synthetic
cugcucugccuaauaaauc

SEQ ID NO: 283301 - RNA, 20 nt, Artificial Sequence
  Synthetic
acugcucugccuaauaaauc

SEQ ID NO: 283302 - RNA, 21 nt, Artificial Sequence
  Synthetic
cacugcucugccuaauaaauc

SEQ ID NO: 283303 - RNA, 22 nt, Artificial Sequence
  Synthetic
ucacugcucugccuaauaaauc

SEQ ID NO: 283304 - RNA, 23 nt, Artificial Sequence
  Synthetic
gucacugcucugccuaauaaauc

SEQ ID NO: 283305 - RNA, 24 nt, Artificial Sequence
  Synthetic
agucacugcucugccuaauaaauc

SEQ ID NO: 283306 - RNA, 18 nt, Artificial Sequence
  Synthetic
gcaucuuugucauaaauc

SEQ ID NO: 283307 - RNA, 19 nt, Artificial Sequence
  Synthetic
ggcaucuuugucauaaauc

SEQ ID NO: 283308 - RNA, 20 nt, Artificial Sequence
  Synthetic
uggcaucuuugucauaaauc

SEQ ID NO: 283309 - RNA, 21 nt, Artificial Sequence
  Synthetic
auggcaucuuugucauaaauc

SEQ ID NO: 283310 - RNA, 22 nt, Artificial Sequence
  Synthetic
cauggcaucuuugucauaaauc

SEQ ID NO: 283311 - RNA, 23 nt, Artificial Sequence
  Synthetic
ucauggcaucuuugucauaaauc

SEQ ID NO: 283312 - RNA, 24 nt, Artificial Sequence
  Synthetic
uucauggcaucuuugucauaaauc

SEQ ID NO: 283313 - RNA, 18 nt, Artificial Sequence
  Synthetic
acuucuauaggauaaauc

SEQ ID NO: 283314 - RNA, 19 nt, Artificial Sequence
  Synthetic
aacuucuauaggauaaauc

SEQ ID NO: 283315 - RNA, 20 nt, Artificial Sequence
  Synthetic
aaacuucuauaggauaaauc

SEQ ID NO: 283316 - RNA, 21 nt, Artificial Sequence
  Synthetic
gaaacuucuauaggauaaauc

SEQ ID NO: 283317 - RNA, 22 nt, Artificial Sequence
  Synthetic
ggaaacuucuauaggauaaauc

SEQ ID NO: 283318 - RNA, 23 nt, Artificial Sequence
  Synthetic
aggaaacuucuauaggauaaauc

SEQ ID NO: 283319 - RNA, 24 nt, Artificial Sequence
  Synthetic
caggaaacuucuauaggauaaauc

SEQ ID NO: 283320 - RNA, 18 nt, Artificial Sequence
  Synthetic
aaauauuggggauaaauc

SEQ ID NO: 283321 - RNA, 19 nt, Artificial Sequence
  Synthetic
aaaauauuggggauaaauc

SEQ ID NO: 283322 - RNA, 20 nt, Artificial Sequence
  Synthetic
caaaauauuggggauaaauc

SEQ ID NO: 283323 - RNA, 21 nt, Artificial Sequence
  Synthetic
acaaaauauuggggauaaauc

SEQ ID NO: 283324 - RNA, 22 nt, Artificial Sequence
  Synthetic
aacaaaauauuggggauaaauc

SEQ ID NO: 283325 - RNA, 23 nt, Artificial Sequence
  Synthetic
aaacaaaauauuggggauaaauc

SEQ ID NO: 283326 - RNA, 24 nt, Artificial Sequence
  Synthetic
caaacaaaauauuggggauaaauc

SEQ ID NO: 283327 - RNA, 18 nt, Artificial Sequence
  Synthetic
auaaauuggauauaaauc

SEQ ID NO: 283328 - RNA, 19 nt, Artificial Sequence
  Synthetic
aauaaauuggauauaaauc

SEQ ID NO: 283329 - RNA, 20 nt, Artificial Sequence
  Synthetic
aaauaaauuggauauaaauc

SEQ ID NO: 283330 - RNA, 21 nt, Artificial Sequence
  Synthetic
gaaauaaauuggauauaaauc

SEQ ID NO: 283331 - RNA, 22 nt, Artificial Sequence
  Synthetic
ggaaauaaauuggauauaaauc

SEQ ID NO: 283332 - RNA, 23 nt, Artificial Sequence
  Synthetic
uggaaauaaauuggauauaaauc

SEQ ID NO: 283333 - RNA, 24 nt, Artificial Sequence
  Synthetic
uuggaaauaaauuggauauaaauc

SEQ ID NO: 283334 - RNA, 18 nt, Artificial Sequence
  Synthetic
ucaccagaggacuaaauc

SEQ ID NO: 283335 - RNA, 19 nt, Artificial Sequence
  Synthetic
uucaccagaggacuaaauc

SEQ ID NO: 283336 - RNA, 20 nt, Artificial Sequence
  Synthetic
auucaccagaggacuaaauc

SEQ ID NO: 283337 - RNA, 21 nt, Artificial Sequence
  Synthetic
cauucaccagaggacuaaauc

SEQ ID NO: 283338 - RNA, 22 nt, Artificial Sequence
  Synthetic
ucauucaccagaggacuaaauc

SEQ ID NO: 283339 - RNA, 23 nt, Artificial Sequence
  Synthetic
uucauucaccagaggacuaaauc

SEQ ID NO: 283340 - RNA, 24 nt, Artificial Sequence
  Synthetic
guucauucaccagaggacuaaauc

SEQ ID NO: 283341 - RNA, 18 nt, Artificial Sequence
  Synthetic
cccaguaucuacuaaauc

SEQ ID NO: 283342 - RNA, 19 nt, Artificial Sequence
  Synthetic
acccaguaucuacuaaauc

SEQ ID NO: 283343 - RNA, 20 nt, Artificial Sequence
  Synthetic
cacccaguaucuacuaaauc

SEQ ID NO: 283344 - RNA, 21 nt, Artificial Sequence
  Synthetic
ccacccaguaucuacuaaauc

SEQ ID NO: 283345 - RNA, 22 nt, Artificial Sequence
  Synthetic
uccacccaguaucuacuaaauc

SEQ ID NO: 283346 - RNA, 23 nt, Artificial Sequence
  Synthetic
cuccacccaguaucuacuaaauc

SEQ ID NO: 283347 - RNA, 24 nt, Artificial Sequence
  Synthetic
gcuccacccaguaucuacuaaauc

SEQ ID NO: 283348 - RNA, 18 nt, Artificial Sequence
  Synthetic
caguagcagagcuaaauc

SEQ ID NO: 283349 - RNA, 19 nt, Artificial Sequence
  Synthetic
acaguagcagagcuaaauc

SEQ ID NO: 283350 - RNA, 20 nt, Artificial Sequence
  Synthetic
cacaguagcagagcuaaauc

SEQ ID NO: 283351 - RNA, 21 nt, Artificial Sequence
  Synthetic
acacaguagcagagcuaaauc

SEQ ID NO: 283352 - RNA, 22 nt, Artificial Sequence
  Synthetic
uacacaguagcagagcuaaauc

SEQ ID NO: 283353 - RNA, 23 nt, Artificial Sequence
  Synthetic
auacacaguagcagagcuaaauc

SEQ ID NO: 283354 - RNA, 24 nt, Artificial Sequence
  Synthetic
gauacacaguagcagagcuaaauc

SEQ ID NO: 283355 - RNA, 18 nt, Artificial Sequence
  Synthetic
uuuccuguuagcuaaauc

SEQ ID NO: 283356 - RNA, 19 nt, Artificial Sequence
  Synthetic
auuuccuguuagcuaaauc

SEQ ID NO: 283357 - RNA, 20 nt, Artificial Sequence
  Synthetic
aauuuccuguuagcuaaauc

SEQ ID NO: 283358 - RNA, 21 nt, Artificial Sequence
  Synthetic
uaauuuccuguuagcuaaauc

SEQ ID NO: 283359 - RNA, 22 nt, Artificial Sequence
  Synthetic
uuaauuuccuguuagcuaaauc

SEQ ID NO: 283360 - RNA, 23 nt, Artificial Sequence
  Synthetic
auuaauuuccuguuagcuaaauc

SEQ ID NO: 283361 - RNA, 24 nt, Artificial Sequence
  Synthetic
gauuaauuuccuguuagcuaaauc

SEQ ID NO: 283362 - RNA, 18 nt, Artificial Sequence
  Synthetic
gcuugcugacuguaaauc

SEQ ID NO: 283363 - RNA, 19 nt, Artificial Sequence
  Synthetic
agcuugcugacuguaaauc

SEQ ID NO: 283364 - RNA, 20 nt, Artificial Sequence
  Synthetic
cagcuugcugacuguaaauc

SEQ ID NO: 283365 - RNA, 21 nt, Artificial Sequence
  Synthetic
ccagcuugcugacuguaaauc

SEQ ID NO: 283366 - RNA, 22 nt, Artificial Sequence
  Synthetic
uccagcuugcugacuguaaauc

SEQ ID NO: 283367 - RNA, 23 nt, Artificial Sequence
  Synthetic
cuccagcuugcugacuguaaauc

SEQ ID NO: 283368 - RNA, 24 nt, Artificial Sequence
  Synthetic
ucuccagcuugcugacuguaaauc

SEQ ID NO: 283369 - RNA, 18 nt, Artificial Sequence
  Synthetic
uaguuuaggcauuaaauc

SEQ ID NO: 283370 - RNA, 19 nt, Artificial Sequence
  Synthetic
auaguuuaggcauuaaauc

SEQ ID NO: 283371 - RNA, 20 nt, Artificial Sequence
  Synthetic
cauaguuuaggcauuaaauc

SEQ ID NO: 283372 - RNA, 21 nt, Artificial Sequence
  Synthetic
gcauaguuuaggcauuaaauc

SEQ ID NO: 283373 - RNA, 22 nt, Artificial Sequence
  Synthetic
agcauaguuuaggcauuaaauc

SEQ ID NO: 283374 - RNA, 23 nt, Artificial Sequence
  Synthetic
aagcauaguuuaggcauuaaauc

SEQ ID NO: 283375 - RNA, 24 nt, Artificial Sequence
  Synthetic
aaagcauaguuuaggcauuaaauc

SEQ ID NO: 283376 - RNA, 18 nt, Artificial Sequence
  Synthetic
gauugugguccuuaaauc

SEQ ID NO: 283377 - RNA, 19 nt, Artificial Sequence
  Synthetic
agauugugguccuuaaauc

SEQ ID NO: 283378 - RNA, 20 nt, Artificial Sequence
  Synthetic
gagauugugguccuuaaauc

SEQ ID NO: 283379 - RNA, 21 nt, Artificial Sequence
  Synthetic
ugagauugugguccuuaaauc

SEQ ID NO: 283380 - RNA, 22 nt, Artificial Sequence
  Synthetic
cugagauugugguccuuaaauc

SEQ ID NO: 283381 - RNA, 23 nt, Artificial Sequence
  Synthetic
ucugagauugugguccuuaaauc

SEQ ID NO: 283382 - RNA, 24 nt, Artificial Sequence
  Synthetic
cucugagauugugguccuuaaauc

SEQ ID NO: 283383 - RNA, 18 nt, Artificial Sequence
  Synthetic
auuuuuuuuucuuaaauc

SEQ ID NO: 283384 - RNA, 19 nt, Artificial Sequence
  Synthetic
cauuuuuuuuucuuaaauc

SEQ ID NO: 283385 - RNA, 20 nt, Artificial Sequence
  Synthetic
acauuuuuuuuucuuaaauc

SEQ ID NO: 283386 - RNA, 21 nt, Artificial Sequence
  Synthetic
aacauuuuuuuuucuuaaauc

SEQ ID NO: 283387 - RNA, 22 nt, Artificial Sequence
  Synthetic
uaacauuuuuuuuucuuaaauc

SEQ ID NO: 283388 - RNA, 23 nt, Artificial Sequence
  Synthetic
uuaacauuuuuuuuucuuaaauc

SEQ ID NO: 283389 - RNA, 24 nt, Artificial Sequence
  Synthetic
cuuaacauuuuuuuuucuuaaauc

SEQ ID NO: 283390 - RNA, 18 nt, Artificial Sequence
  Synthetic
ugguacaauauuuaaauc

SEQ ID NO: 283391 - RNA, 19 nt, Artificial Sequence
  Synthetic
uugguacaauauuuaaauc

SEQ ID NO: 283392 - RNA, 20 nt, Artificial Sequence
  Synthetic
auugguacaauauuuaaauc

SEQ ID NO: 283393 - RNA, 21 nt, Artificial Sequence
  Synthetic
uauugguacaauauuuaaauc

SEQ ID NO: 283394 - RNA, 22 nt, Artificial Sequence
  Synthetic
uuauugguacaauauuuaaauc

SEQ ID NO: 283395 - RNA, 23 nt, Artificial Sequence
  Synthetic
uuuauugguacaauauuuaaauc

SEQ ID NO: 283396 - RNA, 24 nt, Artificial Sequence
  Synthetic
uuuuauugguacaauauuuaaauc

SEQ ID NO: 283397 - RNA, 18 nt, Artificial Sequence
  Synthetic
caagauuuuauuuaaauc

SEQ ID NO: 283398 - RNA, 19 nt, Artificial Sequence
  Synthetic
ucaagauuuuauuuaaauc

SEQ ID NO: 283399 - RNA, 20 nt, Artificial Sequence
  Synthetic
aucaagauuuuauuuaaauc

SEQ ID NO: 283400 - RNA, 21 nt, Artificial Sequence
  Synthetic
uaucaagauuuuauuuaaauc

SEQ ID NO: 283401 - RNA, 22 nt, Artificial Sequence
  Synthetic
uuaucaagauuuuauuuaaauc

SEQ ID NO: 283402 - RNA, 23 nt, Artificial Sequence
  Synthetic
cuuaucaagauuuuauuuaaauc

SEQ ID NO: 283403 - RNA, 24 nt, Artificial Sequence
  Synthetic
gcuuaucaagauuuuauuuaaauc

SEQ ID NO: 283404 - RNA, 18 nt, Artificial Sequence
  Synthetic
gcucucagauuuuaaauc

SEQ ID NO: 283405 - RNA, 19 nt, Artificial Sequence
  Synthetic
agcucucagauuuuaaauc

SEQ ID NO: 283406 - RNA, 20 nt, Artificial Sequence
  Synthetic
cagcucucagauuuuaaauc

SEQ ID NO: 283407 - RNA, 21 nt, Artificial Sequence
  Synthetic
ucagcucucagauuuuaaauc

SEQ ID NO: 283408 - RNA, 22 nt, Artificial Sequence
  Synthetic
aucagcucucagauuuuaaauc

SEQ ID NO: 283409 - RNA, 23 nt, Artificial Sequence
  Synthetic
aaucagcucucagauuuuaaauc

SEQ ID NO: 283410 - RNA, 24 nt, Artificial Sequence
  Synthetic
aaaucagcucucagauuuuaaauc

SEQ ID NO: 283411 - RNA, 18 nt, Artificial Sequence
  Synthetic
aaagaagucuuuuaaauc

SEQ ID NO: 283412 - RNA, 19 nt, Artificial Sequence
  Synthetic
gaaagaagucuuuuaaauc

SEQ ID NO: 283413 - RNA, 20 nt, Artificial Sequence
  Synthetic
agaaagaagucuuuuaaauc

SEQ ID NO: 283414 - RNA, 21 nt, Artificial Sequence
  Synthetic
gagaaagaagucuuuuaaauc

SEQ ID NO: 283415 - RNA, 22 nt, Artificial Sequence
  Synthetic
ggagaaagaagucuuuuaaauc

SEQ ID NO: 283416 - RNA, 23 nt, Artificial Sequence
  Synthetic
aggagaaagaagucuuuuaaauc

SEQ ID NO: 283417 - RNA, 24 nt, Artificial Sequence
  Synthetic
aaggagaaagaagucuuuuaaauc

SEQ ID NO: 283418 - RNA, 18 nt, Artificial Sequence
  Synthetic
gacuuugagggaacaauc

SEQ ID NO: 283419 - RNA, 19 nt, Artificial Sequence
  Synthetic
agacuuugagggaacaauc

SEQ ID NO: 283420 - RNA, 20 nt, Artificial Sequence
  Synthetic
gagacuuugagggaacaauc

SEQ ID NO: 283421 - RNA, 21 nt, Artificial Sequence
  Synthetic
ugagacuuugagggaacaauc

SEQ ID NO: 283422 - RNA, 22 nt, Artificial Sequence
  Synthetic
cugagacuuugagggaacaauc

SEQ ID NO: 283423 - RNA, 23 nt, Artificial Sequence
  Synthetic
acugagacuuugagggaacaauc

SEQ ID NO: 283424 - RNA, 24 nt, Artificial Sequence
  Synthetic
gacugagacuuugagggaacaauc

SEQ ID NO: 283425 - RNA, 18 nt, Artificial Sequence
  Synthetic
ugaaaugugauaacaauc

SEQ ID NO: 283426 - RNA, 19 nt, Artificial Sequence
  Synthetic
cugaaaugugauaacaauc

SEQ ID NO: 283427 - RNA, 20 nt, Artificial Sequence
  Synthetic
acugaaaugugauaacaauc

SEQ ID NO: 283428 - RNA, 21 nt, Artificial Sequence
  Synthetic
cacugaaaugugauaacaauc

SEQ ID NO: 283429 - RNA, 22 nt, Artificial Sequence
  Synthetic
ucacugaaaugugauaacaauc

SEQ ID NO: 283430 - RNA, 23 nt, Artificial Sequence
  Synthetic
cucacugaaaugugauaacaauc

SEQ ID NO: 283431 - RNA, 24 nt, Artificial Sequence
  Synthetic
ucucacugaaaugugauaacaauc

SEQ ID NO: 283432 - RNA, 18 nt, Artificial Sequence
  Synthetic
uuauaauuuaacacaauc

SEQ ID NO: 283433 - RNA, 19 nt, Artificial Sequence
  Synthetic
uuuauaauuuaacacaauc

SEQ ID NO: 283434 - RNA, 20 nt, Artificial Sequence
  Synthetic
auuuauaauuuaacacaauc

SEQ ID NO: 283435 - RNA, 21 nt, Artificial Sequence
  Synthetic
cauuuauaauuuaacacaauc

SEQ ID NO: 283436 - RNA, 22 nt, Artificial Sequence
  Synthetic
gcauuuauaauuuaacacaauc

SEQ ID NO: 283437 - RNA, 23 nt, Artificial Sequence
  Synthetic
ugcauuuauaauuuaacacaauc

SEQ ID NO: 283438 - RNA, 24 nt, Artificial Sequence
  Synthetic
augcauuuauaauuuaacacaauc

SEQ ID NO: 283439 - RNA, 18 nt, Artificial Sequence
  Synthetic
aauccaccugggacaauc

SEQ ID NO: 283440 - RNA, 19 nt, Artificial Sequence
  Synthetic
aaauccaccugggacaauc

SEQ ID NO: 283441 - RNA, 20 nt, Artificial Sequence
  Synthetic
uaaauccaccugggacaauc

SEQ ID NO: 283442 - RNA, 21 nt, Artificial Sequence
  Synthetic
auaaauccaccugggacaauc

SEQ ID NO: 283443 - RNA, 22 nt, Artificial Sequence
  Synthetic
aauaaauccaccugggacaauc

SEQ ID NO: 283444 - RNA, 23 nt, Artificial Sequence
  Synthetic
gaauaaauccaccugggacaauc

SEQ ID NO: 283445 - RNA, 24 nt, Artificial Sequence
  Synthetic
agaauaaauccaccugggacaauc

SEQ ID NO: 283446 - RNA, 18 nt, Artificial Sequence
  Synthetic
ggcuuauuugugacaauc

SEQ ID NO: 283447 - RNA, 19 nt, Artificial Sequence
  Synthetic
uggcuuauuugugacaauc

SEQ ID NO: 283448 - RNA, 20 nt, Artificial Sequence
  Synthetic
auggcuuauuugugacaauc

SEQ ID NO: 283449 - RNA, 21 nt, Artificial Sequence
  Synthetic
uauggcuuauuugugacaauc

SEQ ID NO: 283450 - RNA, 22 nt, Artificial Sequence
  Synthetic
cuauggcuuauuugugacaauc

SEQ ID NO: 283451 - RNA, 23 nt, Artificial Sequence
  Synthetic
ucuauggcuuauuugugacaauc

SEQ ID NO: 283452 - RNA, 24 nt, Artificial Sequence
  Synthetic
cucuauggcuuauuugugacaauc

SEQ ID NO: 283453 - RNA, 18 nt, Artificial Sequence
  Synthetic
aaaagaagcccuacaauc

SEQ ID NO: 283454 - RNA, 19 nt, Artificial Sequence
  Synthetic
uaaaagaagcccuacaauc

SEQ ID NO: 283455 - RNA, 20 nt, Artificial Sequence
  Synthetic
uuaaaagaagcccuacaauc

SEQ ID NO: 283456 - RNA, 21 nt, Artificial Sequence
  Synthetic
auuaaaagaagcccuacaauc

SEQ ID NO: 283457 - RNA, 22 nt, Artificial Sequence
  Synthetic
gauuaaaagaagcccuacaauc

SEQ ID NO: 283458 - RNA, 23 nt, Artificial Sequence
  Synthetic
ggauuaaaagaagcccuacaauc

SEQ ID NO: 283459 - RNA, 24 nt, Artificial Sequence
  Synthetic
uggauuaaaagaagcccuacaauc

SEQ ID NO: 283460 - RNA, 18 nt, Artificial Sequence
  Synthetic
gucucauguuuuacaauc

SEQ ID NO: 283461 - RNA, 19 nt, Artificial Sequence
  Synthetic
ugucucauguuuuacaauc

SEQ ID NO: 283462 - RNA, 20 nt, Artificial Sequence
  Synthetic
gugucucauguuuuacaauc

SEQ ID NO: 283463 - RNA, 21 nt, Artificial Sequence
  Synthetic
ugugucucauguuuuacaauc

SEQ ID NO: 283464 - RNA, 22 nt, Artificial Sequence
  Synthetic
gugugucucauguuuuacaauc

SEQ ID NO: 283465 - RNA, 23 nt, Artificial Sequence
  Synthetic
ugugugucucauguuuuacaauc

SEQ ID NO: 283466 - RNA, 24 nt, Artificial Sequence
  Synthetic
cugugugucucauguuuuacaauc

SEQ ID NO: 283467 - RNA, 18 nt, Artificial Sequence
  Synthetic
aacacauagcacccaauc

SEQ ID NO: 283468 - RNA, 19 nt, Artificial Sequence
  Synthetic
aaacacauagcacccaauc

SEQ ID NO: 283469 - RNA, 20 nt, Artificial Sequence
  Synthetic
uaaacacauagcacccaauc

SEQ ID NO: 283470 - RNA, 21 nt, Artificial Sequence
  Synthetic
uuaaacacauagcacccaauc

SEQ ID NO: 283471 - RNA, 22 nt, Artificial Sequence
  Synthetic
cuuaaacacauagcacccaauc

SEQ ID NO: 283472 - RNA, 23 nt, Artificial Sequence
  Synthetic
gcuuaaacacauagcacccaauc

SEQ ID NO: 283473 - RNA, 24 nt, Artificial Sequence
  Synthetic
agcuuaaacacauagcacccaauc

SEQ ID NO: 283474 - RNA, 18 nt, Artificial Sequence
  Synthetic
ccccaccaacccccaauc

SEQ ID NO: 283475 - RNA, 19 nt, Artificial Sequence
  Synthetic
cccccaccaacccccaauc

SEQ ID NO: 283476 - RNA, 20 nt, Artificial Sequence
  Synthetic
ccccccaccaacccccaauc

SEQ ID NO: 283477 - RNA, 21 nt, Artificial Sequence
  Synthetic
cccccccaccaacccccaauc

SEQ ID NO: 283478 - RNA, 22 nt, Artificial Sequence
  Synthetic
ccccccccaccaacccccaauc

SEQ ID NO: 283479 - RNA, 23 nt, Artificial Sequence
  Synthetic
uccccccccaccaacccccaauc

SEQ ID NO: 283480 - RNA, 24 nt, Artificial Sequence
  Synthetic
cuccccccccaccaacccccaauc

SEQ ID NO: 283481 - RNA, 18 nt, Artificial Sequence
  Synthetic
cauguguuaccgccaauc

SEQ ID NO: 283482 - RNA, 19 nt, Artificial Sequence
  Synthetic
acauguguuaccgccaauc

SEQ ID NO: 283483 - RNA, 20 nt, Artificial Sequence
  Synthetic
aacauguguuaccgccaauc

SEQ ID NO: 283484 - RNA, 21 nt, Artificial Sequence
  Synthetic
uaacauguguuaccgccaauc

SEQ ID NO: 283485 - RNA, 22 nt, Artificial Sequence
  Synthetic
guaacauguguuaccgccaauc

SEQ ID NO: 283486 - RNA, 23 nt, Artificial Sequence
  Synthetic
aguaacauguguuaccgccaauc

SEQ ID NO: 283487 - RNA, 24 nt, Artificial Sequence
  Synthetic
aaguaacauguguuaccgccaauc

SEQ ID NO: 283488 - RNA, 18 nt, Artificial Sequence
  Synthetic
cagaaugagaaagcaauc

SEQ ID NO: 283489 - RNA, 19 nt, Artificial Sequence
  Synthetic
ccagaaugagaaagcaauc

SEQ ID NO: 283490 - RNA, 20 nt, Artificial Sequence
  Synthetic
uccagaaugagaaagcaauc

SEQ ID NO: 283491 - RNA, 21 nt, Artificial Sequence
  Synthetic
uuccagaaugagaaagcaauc

SEQ ID NO: 283492 - RNA, 22 nt, Artificial Sequence
  Synthetic
uuuccagaaugagaaagcaauc

SEQ ID NO: 283493 - RNA, 23 nt, Artificial Sequence
  Synthetic
cuuuccagaaugagaaagcaauc

SEQ ID NO: 283494 - RNA, 24 nt, Artificial Sequence
  Synthetic
ccuuuccagaaugagaaagcaauc

SEQ ID NO: 283495 - RNA, 18 nt, Artificial Sequence
  Synthetic
cuuuuaacuaaagcaauc

SEQ ID NO: 283496 - RNA, 19 nt, Artificial Sequence
  Synthetic
gcuuuuaacuaaagcaauc

SEQ ID NO: 283497 - RNA, 20 nt, Artificial Sequence
  Synthetic
ggcuuuuaacuaaagcaauc

SEQ ID NO: 283498 - RNA, 21 nt, Artificial Sequence
  Synthetic
aggcuuuuaacuaaagcaauc

SEQ ID NO: 283499 - RNA, 22 nt, Artificial Sequence
  Synthetic
gaggcuuuuaacuaaagcaauc

SEQ ID NO: 283500 - RNA, 23 nt, Artificial Sequence
  Synthetic
ggaggcuuuuaacuaaagcaauc

SEQ ID NO: 283501 - RNA, 24 nt, Artificial Sequence
  Synthetic
aggaggcuuuuaacuaaagcaauc

SEQ ID NO: 283502 - RNA, 18 nt, Artificial Sequence
  Synthetic
aaaacaagaccagcaauc

SEQ ID NO: 283503 - RNA, 19 nt, Artificial Sequence
  Synthetic
aaaaacaagaccagcaauc

SEQ ID NO: 283504 - RNA, 20 nt, Artificial Sequence
  Synthetic
gaaaaacaagaccagcaauc

SEQ ID NO: 283505 - RNA, 18 nt, Artificial Sequence
  Synthetic
augcccauaggagcaauc

SEQ ID NO: 283506 - RNA, 19 nt, Artificial Sequence
  Synthetic
uaugcccauaggagcaauc

SEQ ID NO: 283507 - RNA, 20 nt, Artificial Sequence
  Synthetic
auaugcccauaggagcaauc

SEQ ID NO: 283508 - RNA, 21 nt, Artificial Sequence
  Synthetic
uauaugcccauaggagcaauc

SEQ ID NO: 283509 - RNA, 22 nt, Artificial Sequence
  Synthetic
uuauaugcccauaggagcaauc

SEQ ID NO: 283510 - RNA, 23 nt, Artificial Sequence
  Synthetic
auuauaugcccauaggagcaauc

SEQ ID NO: 283511 - RNA, 24 nt, Artificial Sequence
  Synthetic
aauuauaugcccauaggagcaauc

SEQ ID NO: 283512 - RNA, 18 nt, Artificial Sequence
  Synthetic
cuagaauagaaggcaauc

SEQ ID NO: 283513 - RNA, 19 nt, Artificial Sequence
  Synthetic
ucuagaauagaaggcaauc

SEQ ID NO: 283514 - RNA, 20 nt, Artificial Sequence
  Synthetic
cucuagaauagaaggcaauc

SEQ ID NO: 283515 - RNA, 21 nt, Artificial Sequence
  Synthetic
ccucuagaauagaaggcaauc

SEQ ID NO: 283516 - RNA, 22 nt, Artificial Sequence
  Synthetic
uccucuagaauagaaggcaauc

SEQ ID NO: 283517 - RNA, 23 nt, Artificial Sequence
  Synthetic
cuccucuagaauagaaggcaauc

SEQ ID NO: 283518 - RNA, 24 nt, Artificial Sequence
  Synthetic
gcuccucuagaauagaaggcaauc

SEQ ID NO: 283519 - RNA, 18 nt, Artificial Sequence
  Synthetic
uauagaugaauugcaauc

SEQ ID NO: 283520 - RNA, 19 nt, Artificial Sequence
  Synthetic
auauagaugaauugcaauc

SEQ ID NO: 283521 - RNA, 20 nt, Artificial Sequence
  Synthetic
uauauagaugaauugcaauc

SEQ ID NO: 283522 - RNA, 21 nt, Artificial Sequence
  Synthetic
auauauagaugaauugcaauc

SEQ ID NO: 283523 - RNA, 22 nt, Artificial Sequence
  Synthetic
aauauauagaugaauugcaauc

SEQ ID NO: 283524 - RNA, 23 nt, Artificial Sequence
  Synthetic
aaauauauagaugaauugcaauc

SEQ ID NO: 283525 - RNA, 24 nt, Artificial Sequence
  Synthetic
aaaauauauagaugaauugcaauc

SEQ ID NO: 283526 - RNA, 18 nt, Artificial Sequence
  Synthetic
ugaauuuuacuugcaauc

SEQ ID NO: 283527 - RNA, 19 nt, Artificial Sequence
  Synthetic
uugaauuuuacuugcaauc

SEQ ID NO: 283528 - RNA, 20 nt, Artificial Sequence
  Synthetic
guugaauuuuacuugcaauc

SEQ ID NO: 283529 - RNA, 21 nt, Artificial Sequence
  Synthetic
aguugaauuuuacuugcaauc

SEQ ID NO: 283530 - RNA, 22 nt, Artificial Sequence
  Synthetic
uaguugaauuuuacuugcaauc

SEQ ID NO: 283531 - RNA, 23 nt, Artificial Sequence
  Synthetic
auaguugaauuuuacuugcaauc

SEQ ID NO: 283532 - RNA, 24 nt, Artificial Sequence
  Synthetic
gauaguugaauuuuacuugcaauc

SEQ ID NO: 283533 - RNA, 18 nt, Artificial Sequence
  Synthetic
uuaguuugcuuugcaauc

SEQ ID NO: 283534 - RNA, 19 nt, Artificial Sequence
  Synthetic
uuuaguuugcuuugcaauc

SEQ ID NO: 283535 - RNA, 20 nt, Artificial Sequence
  Synthetic
auuuaguuugcuuugcaauc

SEQ ID NO: 283536 - RNA, 21 nt, Artificial Sequence
  Synthetic
cauuuaguuugcuuugcaauc

SEQ ID NO: 283537 - RNA, 22 nt, Artificial Sequence
  Synthetic
gcauuuaguuugcuuugcaauc

SEQ ID NO: 283538 - RNA, 23 nt, Artificial Sequence
  Synthetic
ugcauuuaguuugcuuugcaauc

SEQ ID NO: 283539 - RNA, 24 nt, Artificial Sequence
  Synthetic
augcauuuaguuugcuuugcaauc

SEQ ID NO: 283540 - RNA, 18 nt, Artificial Sequence
  Synthetic
cuccaucagacaucaauc

SEQ ID NO: 283541 - RNA, 19 nt, Artificial Sequence
  Synthetic
ucuccaucagacaucaauc

SEQ ID NO: 283542 - RNA, 20 nt, Artificial Sequence
  Synthetic
gucuccaucagacaucaauc

SEQ ID NO: 283543 - RNA, 21 nt, Artificial Sequence
  Synthetic
agucuccaucagacaucaauc

SEQ ID NO: 283544 - RNA, 22 nt, Artificial Sequence
  Synthetic
uagucuccaucagacaucaauc

SEQ ID NO: 283545 - RNA, 23 nt, Artificial Sequence
  Synthetic
uuagucuccaucagacaucaauc

SEQ ID NO: 283546 - RNA, 24 nt, Artificial Sequence
  Synthetic
cuuagucuccaucagacaucaauc

SEQ ID NO: 283547 - RNA, 18 nt, Artificial Sequence
  Synthetic
ucuucuuagccaucaauc

SEQ ID NO: 283548 - RNA, 19 nt, Artificial Sequence
  Synthetic
cucuucuuagccaucaauc

SEQ ID NO: 283549 - RNA, 20 nt, Artificial Sequence
  Synthetic
gcucuucuuagccaucaauc

SEQ ID NO: 283550 - RNA, 21 nt, Artificial Sequence
  Synthetic
ugcucuucuuagccaucaauc

SEQ ID NO: 283551 - RNA, 22 nt, Artificial Sequence
  Synthetic
uugcucuucuuagccaucaauc

SEQ ID NO: 283552 - RNA, 23 nt, Artificial Sequence
  Synthetic
uuugcucuucuuagccaucaauc

SEQ ID NO: 283553 - RNA, 24 nt, Artificial Sequence
  Synthetic
cuuugcucuucuuagccaucaauc

SEQ ID NO: 283554 - RNA, 18 nt, Artificial Sequence
  Synthetic
ggauuuuugcccucaauc

SEQ ID NO: 283555 - RNA, 19 nt, Artificial Sequence
  Synthetic
aggauuuuugcccucaauc

SEQ ID NO: 283556 - RNA, 20 nt, Artificial Sequence
  Synthetic
uaggauuuuugcccucaauc

SEQ ID NO: 283557 - RNA, 21 nt, Artificial Sequence
  Synthetic
auaggauuuuugcccucaauc

SEQ ID NO: 283558 - RNA, 22 nt, Artificial Sequence
  Synthetic
gauaggauuuuugcccucaauc

SEQ ID NO: 283559 - RNA, 23 nt, Artificial Sequence
  Synthetic
agauaggauuuuugcccucaauc

SEQ ID NO: 283560 - RNA, 24 nt, Artificial Sequence
  Synthetic
gagauaggauuuuugcccucaauc

SEQ ID NO: 283561 - RNA, 18 nt, Artificial Sequence
  Synthetic
cacaucgccaagucaauc

SEQ ID NO: 283562 - RNA, 19 nt, Artificial Sequence
  Synthetic
ccacaucgccaagucaauc

SEQ ID NO: 283563 - RNA, 20 nt, Artificial Sequence
  Synthetic
cccacaucgccaagucaauc

SEQ ID NO: 283564 - RNA, 21 nt, Artificial Sequence
  Synthetic
gcccacaucgccaagucaauc

SEQ ID NO: 283565 - RNA, 22 nt, Artificial Sequence
  Synthetic
agcccacaucgccaagucaauc

SEQ ID NO: 283566 - RNA, 23 nt, Artificial Sequence
  Synthetic
gagcccacaucgccaagucaauc

SEQ ID NO: 283567 - RNA, 24 nt, Artificial Sequence
  Synthetic
agagcccacaucgccaagucaauc

SEQ ID NO: 283568 - RNA, 18 nt, Artificial Sequence
  Synthetic
uuuuuuuuuuugucaauc

SEQ ID NO: 283569 - RNA, 19 nt, Artificial Sequence
  Synthetic
uuuuuuuuuuuugucaauc

SEQ ID NO: 283570 - RNA, 20 nt, Artificial Sequence
  Synthetic
guuuuuuuuuuuugucaauc

SEQ ID NO: 283571 - RNA, 21 nt, Artificial Sequence
  Synthetic
gguuuuuuuuuuuugucaauc

SEQ ID NO: 283572 - RNA, 22 nt, Artificial Sequence
  Synthetic
ugguuuuuuuuuuuugucaauc

SEQ ID NO: 283573 - RNA, 23 nt, Artificial Sequence
  Synthetic
augguuuuuuuuuuuugucaauc

SEQ ID NO: 283574 - RNA, 24 nt, Artificial Sequence
  Synthetic
uaugguuuuuuuuuuuugucaauc

SEQ ID NO: 283575 - RNA, 18 nt, Artificial Sequence
  Synthetic
aauuacuucaauucaauc

SEQ ID NO: 283576 - RNA, 19 nt, Artificial Sequence
  Synthetic
uaauuacuucaauucaauc

SEQ ID NO: 283577 - RNA, 20 nt, Artificial Sequence
  Synthetic
auaauuacuucaauucaauc

SEQ ID NO: 283578 - RNA, 21 nt, Artificial Sequence
  Synthetic
cauaauuacuucaauucaauc

SEQ ID NO: 283579 - RNA, 22 nt, Artificial Sequence
  Synthetic
acauaauuacuucaauucaauc

SEQ ID NO: 283580 - RNA, 23 nt, Artificial Sequence
  Synthetic
aacauaauuacuucaauucaauc

SEQ ID NO: 283581 - RNA, 24 nt, Artificial Sequence
  Synthetic
caacauaauuacuucaauucaauc

SEQ ID NO: 283582 - RNA, 18 nt, Artificial Sequence
  Synthetic
cguauaaaagguucaauc

SEQ ID NO: 283583 - RNA, 19 nt, Artificial Sequence
  Synthetic
ccguauaaaagguucaauc

SEQ ID NO: 283584 - RNA, 20 nt, Artificial Sequence
  Synthetic
uccguauaaaagguucaauc

SEQ ID NO: 283585 - RNA, 21 nt, Artificial Sequence
  Synthetic
cuccguauaaaagguucaauc

SEQ ID NO: 283586 - RNA, 22 nt, Artificial Sequence
  Synthetic
acuccguauaaaagguucaauc

SEQ ID NO: 283587 - RNA, 23 nt, Artificial Sequence
  Synthetic
uacuccguauaaaagguucaauc

SEQ ID NO: 283588 - RNA, 24 nt, Artificial Sequence
  Synthetic
auacuccguauaaaagguucaauc

SEQ ID NO: 283589 - RNA, 18 nt, Artificial Sequence
  Synthetic
ugguuacaaaaaagaauc

SEQ ID NO: 283590 - RNA, 19 nt, Artificial Sequence
  Synthetic
gugguuacaaaaaagaauc

SEQ ID NO: 283591 - RNA, 20 nt, Artificial Sequence
  Synthetic
ggugguuacaaaaaagaauc

SEQ ID NO: 283592 - RNA, 21 nt, Artificial Sequence
  Synthetic
aggugguuacaaaaaagaauc

SEQ ID NO: 283593 - RNA, 22 nt, Artificial Sequence
  Synthetic
aaggugguuacaaaaaagaauc

SEQ ID NO: 283594 - RNA, 23 nt, Artificial Sequence
  Synthetic
uaaggugguuacaaaaaagaauc

SEQ ID NO: 283595 - RNA, 24 nt, Artificial Sequence
  Synthetic
uuaaggugguuacaaaaaagaauc

SEQ ID NO: 283596 - RNA, 18 nt, Artificial Sequence
  Synthetic
gaaaugacccaaagaauc

SEQ ID NO: 283597 - RNA, 19 nt, Artificial Sequence
  Synthetic
agaaaugacccaaagaauc

SEQ ID NO: 283598 - RNA, 20 nt, Artificial Sequence
  Synthetic
cagaaaugacccaaagaauc

SEQ ID NO: 283599 - RNA, 21 nt, Artificial Sequence
  Synthetic
ucagaaaugacccaaagaauc

SEQ ID NO: 283600 - RNA, 22 nt, Artificial Sequence
  Synthetic
uucagaaaugacccaaagaauc

SEQ ID NO: 283601 - RNA, 23 nt, Artificial Sequence
  Synthetic
cuucagaaaugacccaaagaauc

SEQ ID NO: 283602 - RNA, 24 nt, Artificial Sequence
  Synthetic
ccuucagaaaugacccaaagaauc

SEQ ID NO: 283603 - RNA, 18 nt, Artificial Sequence
  Synthetic
auuccuuauacaagaauc

SEQ ID NO: 283604 - RNA, 19 nt, Artificial Sequence
  Synthetic
aauuccuuauacaagaauc

SEQ ID NO: 283605 - RNA, 20 nt, Artificial Sequence
  Synthetic
uaauuccuuauacaagaauc

SEQ ID NO: 283606 - RNA, 21 nt, Artificial Sequence
  Synthetic
uuaauuccuuauacaagaauc

SEQ ID NO: 283607 - RNA, 22 nt, Artificial Sequence
  Synthetic
uuuaauuccuuauacaagaauc

SEQ ID NO: 283608 - RNA, 23 nt, Artificial Sequence
  Synthetic
uuuuaauuccuuauacaagaauc

SEQ ID NO: 283609 - RNA, 24 nt, Artificial Sequence
  Synthetic
cuuuuaauuccuuauacaagaauc

SEQ ID NO: 283610 - RNA, 18 nt, Artificial Sequence
  Synthetic
gaauacuagggaagaauc

SEQ ID NO: 283611 - RNA, 19 nt, Artificial Sequence
  Synthetic
agaauacuagggaagaauc

SEQ ID NO: 283612 - RNA, 20 nt, Artificial Sequence
  Synthetic
uagaauacuagggaagaauc

SEQ ID NO: 283613 - RNA, 21 nt, Artificial Sequence
  Synthetic
guagaauacuagggaagaauc

SEQ ID NO: 283614 - RNA, 22 nt, Artificial Sequence
  Synthetic
uguagaauacuagggaagaauc

SEQ ID NO: 283615 - RNA, 23 nt, Artificial Sequence
  Synthetic
auguagaauacuagggaagaauc

SEQ ID NO: 283616 - RNA, 24 nt, Artificial Sequence
  Synthetic
gauguagaauacuagggaagaauc

SEQ ID NO: 283617 - RNA, 18 nt, Artificial Sequence
  Synthetic
ugagaauauuccagaauc

SEQ ID NO: 283618 - RNA, 19 nt, Artificial Sequence
  Synthetic
augagaauauuccagaauc

SEQ ID NO: 283619 - RNA, 20 nt, Artificial Sequence
  Synthetic
caugagaauauuccagaauc

SEQ ID NO: 283620 - RNA, 21 nt, Artificial Sequence
  Synthetic
acaugagaauauuccagaauc

SEQ ID NO: 283621 - RNA, 22 nt, Artificial Sequence
  Synthetic
gacaugagaauauuccagaauc

SEQ ID NO: 283622 - RNA, 23 nt, Artificial Sequence
  Synthetic
agacaugagaauauuccagaauc

SEQ ID NO: 283623 - RNA, 24 nt, Artificial Sequence
  Synthetic
gagacaugagaauauuccagaauc

SEQ ID NO: 283624 - RNA, 18 nt, Artificial Sequence
  Synthetic
ccugugguaggcagaauc

SEQ ID NO: 283625 - RNA, 19 nt, Artificial Sequence
  Synthetic
cccugugguaggcagaauc

SEQ ID NO: 283626 - RNA, 20 nt, Artificial Sequence
  Synthetic
ccccugugguaggcagaauc

SEQ ID NO: 283627 - RNA, 21 nt, Artificial Sequence
  Synthetic
cccccugugguaggcagaauc

SEQ ID NO: 283628 - RNA, 22 nt, Artificial Sequence
  Synthetic
ucccccugugguaggcagaauc

SEQ ID NO: 283629 - RNA, 23 nt, Artificial Sequence
  Synthetic
uucccccugugguaggcagaauc

SEQ ID NO: 283630 - RNA, 24 nt, Artificial Sequence
  Synthetic
uuucccccugugguaggcagaauc

SEQ ID NO: 283631 - RNA, 18 nt, Artificial Sequence
  Synthetic
uaauuuaaugggagaauc

SEQ ID NO: 283632 - RNA, 19 nt, Artificial Sequence
  Synthetic
auaauuuaaugggagaauc

SEQ ID NO: 283633 - RNA, 20 nt, Artificial Sequence
  Synthetic
uauaauuuaaugggagaauc

SEQ ID NO: 283634 - RNA, 21 nt, Artificial Sequence
  Synthetic
uuauaauuuaaugggagaauc

SEQ ID NO: 283635 - RNA, 22 nt, Artificial Sequence
  Synthetic
guuauaauuuaaugggagaauc

SEQ ID NO: 283636 - RNA, 23 nt, Artificial Sequence
  Synthetic
uguuauaauuuaaugggagaauc

SEQ ID NO: 283637 - RNA, 24 nt, Artificial Sequence
  Synthetic
cuguuauaauuuaaugggagaauc

SEQ ID NO: 283638 - RNA, 18 nt, Artificial Sequence
  Synthetic
agagacaaauauagaauc

SEQ ID NO: 283639 - RNA, 19 nt, Artificial Sequence
  Synthetic
aagagacaaauauagaauc

SEQ ID NO: 283640 - RNA, 20 nt, Artificial Sequence
  Synthetic
gaagagacaaauauagaauc

SEQ ID NO: 283641 - RNA, 21 nt, Artificial Sequence
  Synthetic
ugaagagacaaauauagaauc

SEQ ID NO: 283642 - RNA, 22 nt, Artificial Sequence
  Synthetic
gugaagagacaaauauagaauc

SEQ ID NO: 283643 - RNA, 23 nt, Artificial Sequence
  Synthetic
agugaagagacaaauauagaauc

SEQ ID NO: 283644 - RNA, 24 nt, Artificial Sequence
  Synthetic
aagugaagagacaaauauagaauc

SEQ ID NO: 283645 - RNA, 18 nt, Artificial Sequence
  Synthetic
uucccuuauccuagaauc

SEQ ID NO: 283646 - RNA, 19 nt, Artificial Sequence
  Synthetic
uuucccuuauccuagaauc

SEQ ID NO: 283647 - RNA, 20 nt, Artificial Sequence
  Synthetic
uuuucccuuauccuagaauc

SEQ ID NO: 283648 - RNA, 21 nt, Artificial Sequence
  Synthetic
cuuuucccuuauccuagaauc

SEQ ID NO: 283649 - RNA, 22 nt, Artificial Sequence
  Synthetic
acuuuucccuuauccuagaauc

SEQ ID NO: 283650 - RNA, 23 nt, Artificial Sequence
  Synthetic
aacuuuucccuuauccuagaauc

SEQ ID NO: 283651 - RNA, 24 nt, Artificial Sequence
  Synthetic
aaacuuuucccuuauccuagaauc

SEQ ID NO: 283652 - RNA, 18 nt, Artificial Sequence
  Synthetic
ccaagaucuucuagaauc

SEQ ID NO: 283653 - RNA, 19 nt, Artificial Sequence
  Synthetic
cccaagaucuucuagaauc

SEQ ID NO: 283654 - RNA, 20 nt, Artificial Sequence
  Synthetic
gcccaagaucuucuagaauc

SEQ ID NO: 283655 - RNA, 21 nt, Artificial Sequence
  Synthetic
agcccaagaucuucuagaauc

SEQ ID NO: 283656 - RNA, 22 nt, Artificial Sequence
  Synthetic
cagcccaagaucuucuagaauc

SEQ ID NO: 283657 - RNA, 23 nt, Artificial Sequence
  Synthetic
gcagcccaagaucuucuagaauc

SEQ ID NO: 283658 - RNA, 24 nt, Artificial Sequence
  Synthetic
ggcagcccaagaucuucuagaauc

SEQ ID NO: 283659 - RNA, 18 nt, Artificial Sequence
  Synthetic
uuuuauaaaaguagaauc

SEQ ID NO: 283660 - RNA, 19 nt, Artificial Sequence
  Synthetic
auuuuauaaaaguagaauc

SEQ ID NO: 283661 - RNA, 20 nt, Artificial Sequence
  Synthetic
aauuuuauaaaaguagaauc

SEQ ID NO: 283662 - RNA, 21 nt, Artificial Sequence
  Synthetic
gaauuuuauaaaaguagaauc

SEQ ID NO: 283663 - RNA, 22 nt, Artificial Sequence
  Synthetic
agaauuuuauaaaaguagaauc

SEQ ID NO: 283664 - RNA, 23 nt, Artificial Sequence
  Synthetic
uagaauuuuauaaaaguagaauc

SEQ ID NO: 283665 - RNA, 24 nt, Artificial Sequence
  Synthetic
auagaauuuuauaaaaguagaauc

SEQ ID NO: 283666 - RNA, 18 nt, Artificial Sequence
  Synthetic
guuuucucuuuuagaauc

SEQ ID NO: 283667 - RNA, 19 nt, Artificial Sequence
  Synthetic
gguuuucucuuuuagaauc

SEQ ID NO: 283668 - RNA, 20 nt, Artificial Sequence
  Synthetic
ggguuuucucuuuuagaauc

SEQ ID NO: 283669 - RNA, 21 nt, Artificial Sequence
  Synthetic
uggguuuucucuuuuagaauc

SEQ ID NO: 283670 - RNA, 22 nt, Artificial Sequence
  Synthetic
auggguuuucucuuuuagaauc

SEQ ID NO: 283671 - RNA, 23 nt, Artificial Sequence
  Synthetic
aauggguuuucucuuuuagaauc

SEQ ID NO: 283672 - RNA, 24 nt, Artificial Sequence
  Synthetic
caauggguuuucucuuuuagaauc

SEQ ID NO: 283673 - RNA, 18 nt, Artificial Sequence
  Synthetic
auuuaucuuuaaggaauc

SEQ ID NO: 283674 - RNA, 19 nt, Artificial Sequence
  Synthetic
aauuuaucuuuaaggaauc

SEQ ID NO: 283675 - RNA, 20 nt, Artificial Sequence
  Synthetic
uaauuuaucuuuaaggaauc

SEQ ID NO: 283676 - RNA, 21 nt, Artificial Sequence
  Synthetic
auaauuuaucuuuaaggaauc

SEQ ID NO: 283677 - RNA, 22 nt, Artificial Sequence
  Synthetic
uauaauuuaucuuuaaggaauc

SEQ ID NO: 283678 - RNA, 23 nt, Artificial Sequence
  Synthetic
uuauaauuuaucuuuaaggaauc

SEQ ID NO: 283679 - RNA, 24 nt, Artificial Sequence
  Synthetic
uuuauaauuuaucuuuaaggaauc

SEQ ID NO: 283680 - RNA, 18 nt, Artificial Sequence
  Synthetic
agaauuaggaggggaauc

SEQ ID NO: 283681 - RNA, 19 nt, Artificial Sequence
  Synthetic
aagaauuaggaggggaauc

SEQ ID NO: 283682 - RNA, 20 nt, Artificial Sequence
  Synthetic
caagaauuaggaggggaauc

SEQ ID NO: 283683 - RNA, 21 nt, Artificial Sequence
  Synthetic
ccaagaauuaggaggggaauc

SEQ ID NO: 283684 - RNA, 22 nt, Artificial Sequence
  Synthetic
accaagaauuaggaggggaauc

SEQ ID NO: 283685 - RNA, 23 nt, Artificial Sequence
  Synthetic
uaccaagaauuaggaggggaauc

SEQ ID NO: 283686 - RNA, 24 nt, Artificial Sequence
  Synthetic
auaccaagaauuaggaggggaauc

SEQ ID NO: 283687 - RNA, 18 nt, Artificial Sequence
  Synthetic
ugggcucccuugggaauc

SEQ ID NO: 283688 - RNA, 19 nt, Artificial Sequence
  Synthetic
cugggcucccuugggaauc

SEQ ID NO: 283689 - RNA, 20 nt, Artificial Sequence
  Synthetic
acugggcucccuugggaauc

SEQ ID NO: 283690 - RNA, 21 nt, Artificial Sequence
  Synthetic
gacugggcucccuugggaauc

SEQ ID NO: 283691 - RNA, 22 nt, Artificial Sequence
  Synthetic
ugacugggcucccuugggaauc

SEQ ID NO: 283692 - RNA, 23 nt, Artificial Sequence
  Synthetic
cugacugggcucccuugggaauc

SEQ ID NO: 283693 - RNA, 24 nt, Artificial Sequence
  Synthetic
ucugacugggcucccuugggaauc

SEQ ID NO: 283694 - RNA, 18 nt, Artificial Sequence
  Synthetic
aggaggauggcaugaauc

SEQ ID NO: 283695 - RNA, 19 nt, Artificial Sequence
  Synthetic
caggaggauggcaugaauc

SEQ ID NO: 283696 - RNA, 20 nt, Artificial Sequence
  Synthetic
gcaggaggauggcaugaauc

SEQ ID NO: 283697 - RNA, 21 nt, Artificial Sequence
  Synthetic
ggcaggaggauggcaugaauc

SEQ ID NO: 283698 - RNA, 22 nt, Artificial Sequence
  Synthetic
aggcaggaggauggcaugaauc

SEQ ID NO: 283699 - RNA, 23 nt, Artificial Sequence
  Synthetic
gaggcaggaggauggcaugaauc

SEQ ID NO: 283700 - RNA, 24 nt, Artificial Sequence
  Synthetic
ugaggcaggaggauggcaugaauc

SEQ ID NO: 283701 - RNA, 18 nt, Artificial Sequence
  Synthetic
uagggacauggaugaauc

SEQ ID NO: 283702 - RNA, 19 nt, Artificial Sequence
  Synthetic
guagggacauggaugaauc

SEQ ID NO: 283703 - RNA, 20 nt, Artificial Sequence
  Synthetic
uguagggacauggaugaauc

SEQ ID NO: 283704 - RNA, 21 nt, Artificial Sequence
  Synthetic
uuguagggacauggaugaauc

SEQ ID NO: 283705 - RNA, 22 nt, Artificial Sequence
  Synthetic
uuuguagggacauggaugaauc

SEQ ID NO: 283706 - RNA, 23 nt, Artificial Sequence
  Synthetic
cuuuguagggacauggaugaauc

SEQ ID NO: 283707 - RNA, 24 nt, Artificial Sequence
  Synthetic
acuuuguagggacauggaugaauc

SEQ ID NO: 283708 - RNA, 18 nt, Artificial Sequence
  Synthetic
uaauagagaauaugaauc

SEQ ID NO: 283709 - RNA, 19 nt, Artificial Sequence
  Synthetic
auaauagagaauaugaauc

SEQ ID NO: 283710 - RNA, 20 nt, Artificial Sequence
  Synthetic
aauaauagagaauaugaauc

SEQ ID NO: 283711 - RNA, 21 nt, Artificial Sequence
  Synthetic
aaauaauagagaauaugaauc

SEQ ID NO: 283712 - RNA, 22 nt, Artificial Sequence
  Synthetic
gaaauaauagagaauaugaauc

SEQ ID NO: 283713 - RNA, 23 nt, Artificial Sequence
  Synthetic
agaaauaauagagaauaugaauc

SEQ ID NO: 283714 - RNA, 24 nt, Artificial Sequence
  Synthetic
aagaaauaauagagaauaugaauc

SEQ ID NO: 283715 - RNA, 18 nt, Artificial Sequence
  Synthetic
gguggagguaacugaauc

SEQ ID NO: 283716 - RNA, 19 nt, Artificial Sequence
  Synthetic
agguggagguaacugaauc

SEQ ID NO: 283717 - RNA, 20 nt, Artificial Sequence
  Synthetic
cagguggagguaacugaauc

SEQ ID NO: 283718 - RNA, 21 nt, Artificial Sequence
  Synthetic
ccagguggagguaacugaauc

SEQ ID NO: 283719 - RNA, 22 nt, Artificial Sequence
  Synthetic
accagguggagguaacugaauc

SEQ ID NO: 283720 - RNA, 23 nt, Artificial Sequence
  Synthetic
gaccagguggagguaacugaauc

SEQ ID NO: 283721 - RNA, 24 nt, Artificial Sequence
  Synthetic
agaccagguggagguaacugaauc

SEQ ID NO: 283722 - RNA, 18 nt, Artificial Sequence
  Synthetic
uauauacaugccugaauc

SEQ ID NO: 283723 - RNA, 19 nt, Artificial Sequence
  Synthetic
auauauacaugccugaauc

SEQ ID NO: 283724 - RNA, 20 nt, Artificial Sequence
  Synthetic
aauauauacaugccugaauc

SEQ ID NO: 283725 - RNA, 21 nt, Artificial Sequence
  Synthetic
aaauauauacaugccugaauc

SEQ ID NO: 283726 - RNA, 22 nt, Artificial Sequence
  Synthetic
aaaauauauacaugccugaauc

SEQ ID NO: 283727 - RNA, 23 nt, Artificial Sequence
  Synthetic
aaaaauauauacaugccugaauc

SEQ ID NO: 283728 - RNA, 24 nt, Artificial Sequence
  Synthetic
aaaaaauauauacaugccugaauc

SEQ ID NO: 283729 - RNA, 18 nt, Artificial Sequence
  Synthetic
uucuccugauagugaauc

SEQ ID NO: 283730 - RNA, 19 nt, Artificial Sequence
  Synthetic
guucuccugauagugaauc

SEQ ID NO: 283731 - RNA, 20 nt, Artificial Sequence
  Synthetic
uguucuccugauagugaauc

SEQ ID NO: 283732 - RNA, 21 nt, Artificial Sequence
  Synthetic
cuguucuccugauagugaauc

SEQ ID NO: 283733 - RNA, 22 nt, Artificial Sequence
  Synthetic
gcuguucuccugauagugaauc

SEQ ID NO: 283734 - RNA, 23 nt, Artificial Sequence
  Synthetic
ugcuguucuccugauagugaauc

SEQ ID NO: 283735 - RNA, 24 nt, Artificial Sequence
  Synthetic
augcuguucuccugauagugaauc

SEQ ID NO: 283736 - RNA, 18 nt, Artificial Sequence
  Synthetic
auugaaauuuugugaauc

SEQ ID NO: 283737 - RNA, 19 nt, Artificial Sequence
  Synthetic
gauugaaauuuugugaauc

SEQ ID NO: 283738 - RNA, 20 nt, Artificial Sequence
  Synthetic
ugauugaaauuuugugaauc

SEQ ID NO: 283739 - RNA, 21 nt, Artificial Sequence
  Synthetic
uugauugaaauuuugugaauc

SEQ ID NO: 283740 - RNA, 22 nt, Artificial Sequence
  Synthetic
auugauugaaauuuugugaauc

SEQ ID NO: 283741 - RNA, 23 nt, Artificial Sequence
  Synthetic
uauugauugaaauuuugugaauc

SEQ ID NO: 283742 - RNA, 24 nt, Artificial Sequence
  Synthetic
auauugauugaaauuuugugaauc

SEQ ID NO: 283743 - RNA, 18 nt, Artificial Sequence
  Synthetic
ggugcagauaauugaauc

SEQ ID NO: 283744 - RNA, 19 nt, Artificial Sequence
  Synthetic
aggugcagauaauugaauc

SEQ ID NO: 283745 - RNA, 20 nt, Artificial Sequence
  Synthetic
caggugcagauaauugaauc

SEQ ID NO: 283746 - RNA, 21 nt, Artificial Sequence
  Synthetic
ccaggugcagauaauugaauc

SEQ ID NO: 283747 - RNA, 22 nt, Artificial Sequence
  Synthetic
gccaggugcagauaauugaauc

SEQ ID NO: 283748 - RNA, 23 nt, Artificial Sequence
  Synthetic
agccaggugcagauaauugaauc

SEQ ID NO: 283749 - RNA, 24 nt, Artificial Sequence
  Synthetic
gagccaggugcagauaauugaauc

SEQ ID NO: 283750 - RNA, 18 nt, Artificial Sequence
  Synthetic
gugagagguaauugaauc

SEQ ID NO: 283751 - RNA, 19 nt, Artificial Sequence
  Synthetic
agugagagguaauugaauc

SEQ ID NO: 283752 - RNA, 20 nt, Artificial Sequence
  Synthetic
cagugagagguaauugaauc

SEQ ID NO: 283753 - RNA, 21 nt, Artificial Sequence
  Synthetic
ccagugagagguaauugaauc

SEQ ID NO: 283754 - RNA, 22 nt, Artificial Sequence
  Synthetic
cccagugagagguaauugaauc

SEQ ID NO: 283755 - RNA, 23 nt, Artificial Sequence
  Synthetic
acccagugagagguaauugaauc

SEQ ID NO: 283756 - RNA, 24 nt, Artificial Sequence
  Synthetic
gacccagugagagguaauugaauc

SEQ ID NO: 283757 - RNA, 18 nt, Artificial Sequence
  Synthetic
aggcaaaugcauugaauc

SEQ ID NO: 283758 - RNA, 19 nt, Artificial Sequence
  Synthetic
gaggcaaaugcauugaauc

SEQ ID NO: 283759 - RNA, 20 nt, Artificial Sequence
  Synthetic
agaggcaaaugcauugaauc

SEQ ID NO: 283760 - RNA, 21 nt, Artificial Sequence
  Synthetic
gagaggcaaaugcauugaauc

SEQ ID NO: 283761 - RNA, 22 nt, Artificial Sequence
  Synthetic
agagaggcaaaugcauugaauc

SEQ ID NO: 283762 - RNA, 23 nt, Artificial Sequence
  Synthetic
gagagaggcaaaugcauugaauc

SEQ ID NO: 283763 - RNA, 24 nt, Artificial Sequence
  Synthetic
agagagaggcaaaugcauugaauc

SEQ ID NO: 283764 - RNA, 18 nt, Artificial Sequence
  Synthetic
aggagaaucacuugaauc

SEQ ID NO: 283765 - RNA, 19 nt, Artificial Sequence
  Synthetic
caggagaaucacuugaauc

SEQ ID NO: 283766 - RNA, 20 nt, Artificial Sequence
  Synthetic
gcaggagaaucacuugaauc

SEQ ID NO: 283767 - RNA, 21 nt, Artificial Sequence
  Synthetic
ggcaggagaaucacuugaauc

SEQ ID NO: 283768 - RNA, 22 nt, Artificial Sequence
  Synthetic
aggcaggagaaucacuugaauc

SEQ ID NO: 283769 - RNA, 23 nt, Artificial Sequence
  Synthetic
gaggcaggagaaucacuugaauc

SEQ ID NO: 283770 - RNA, 24 nt, Artificial Sequence
  Synthetic
ugaggcaggagaaucacuugaauc

SEQ ID NO: 283771 - RNA, 18 nt, Artificial Sequence
  Synthetic
cuacuguugccuugaauc

SEQ ID NO: 283772 - RNA, 19 nt, Artificial Sequence
  Synthetic
ucuacuguugccuugaauc

SEQ ID NO: 283773 - RNA, 20 nt, Artificial Sequence
  Synthetic
uucuacuguugccuugaauc

SEQ ID NO: 283774 - RNA, 21 nt, Artificial Sequence
  Synthetic
uuucuacuguugccuugaauc

SEQ ID NO: 283775 - RNA, 22 nt, Artificial Sequence
  Synthetic
auuucuacuguugccuugaauc

SEQ ID NO: 283776 - RNA, 23 nt, Artificial Sequence
  Synthetic
gauuucuacuguugccuugaauc

SEQ ID NO: 283777 - RNA, 24 nt, Artificial Sequence
  Synthetic
agauuucuacuguugccuugaauc

SEQ ID NO: 283778 - RNA, 18 nt, Artificial Sequence
  Synthetic
ggggaugccauuugaauc

SEQ ID NO: 283779 - RNA, 19 nt, Artificial Sequence
  Synthetic
aggggaugccauuugaauc

SEQ ID NO: 283780 - RNA, 20 nt, Artificial Sequence
  Synthetic
uaggggaugccauuugaauc

SEQ ID NO: 283781 - RNA, 21 nt, Artificial Sequence
  Synthetic
uuaggggaugccauuugaauc

SEQ ID NO: 283782 - RNA, 22 nt, Artificial Sequence
  Synthetic
auuaggggaugccauuugaauc

SEQ ID NO: 283783 - RNA, 23 nt, Artificial Sequence
  Synthetic
aauuaggggaugccauuugaauc

SEQ ID NO: 283784 - RNA, 24 nt, Artificial Sequence
  Synthetic
caauuaggggaugccauuugaauc

SEQ ID NO: 283785 - RNA, 18 nt, Artificial Sequence
  Synthetic
ugggaggucauuugaauc

SEQ ID NO: 283786 - RNA, 19 nt, Artificial Sequence
  Synthetic
gugggaggucauuugaauc

SEQ ID NO: 283787 - RNA, 20 nt, Artificial Sequence
  Synthetic
agugggaggucauuugaauc

SEQ ID NO: 283788 - RNA, 21 nt, Artificial Sequence
  Synthetic
cagugggaggucauuugaauc

SEQ ID NO: 283789 - RNA, 22 nt, Artificial Sequence
  Synthetic
ccagugggaggucauuugaauc

SEQ ID NO: 283790 - RNA, 23 nt, Artificial Sequence
  Synthetic
uccagugggaggucauuugaauc

SEQ ID NO: 283791 - RNA, 24 nt, Artificial Sequence
  Synthetic
auccagugggaggucauuugaauc

SEQ ID NO: 283792 - RNA, 18 nt, Artificial Sequence
  Synthetic
gaaggcaagagaauaauc

SEQ ID NO: 283793 - RNA, 19 nt, Artificial Sequence
  Synthetic
agaaggcaagagaauaauc

SEQ ID NO: 283794 - RNA, 20 nt, Artificial Sequence
  Synthetic
cagaaggcaagagaauaauc

SEQ ID NO: 283795 - RNA, 21 nt, Artificial Sequence
  Synthetic
ccagaaggcaagagaauaauc

SEQ ID NO: 283796 - RNA, 22 nt, Artificial Sequence
  Synthetic
accagaaggcaagagaauaauc

SEQ ID NO: 283797 - RNA, 23 nt, Artificial Sequence
  Synthetic
uaccagaaggcaagagaauaauc

SEQ ID NO: 283798 - RNA, 24 nt, Artificial Sequence
  Synthetic
uuaccagaaggcaagagaauaauc

SEQ ID NO: 283799 - RNA, 18 nt, Artificial Sequence
  Synthetic
ucuaauaauuuaauaauc

SEQ ID NO: 283800 - RNA, 19 nt, Artificial Sequence
  Synthetic
uucuaauaauuuaauaauc

SEQ ID NO: 283801 - RNA, 20 nt, Artificial Sequence
  Synthetic
uuucuaauaauuuaauaauc

SEQ ID NO: 283802 - RNA, 21 nt, Artificial Sequence
  Synthetic
cuuucuaauaauuuaauaauc

SEQ ID NO: 283803 - RNA, 22 nt, Artificial Sequence
  Synthetic
ccuuucuaauaauuuaauaauc

SEQ ID NO: 283804 - RNA, 23 nt, Artificial Sequence
  Synthetic
uccuuucuaauaauuuaauaauc

SEQ ID NO: 283805 - RNA, 24 nt, Artificial Sequence
  Synthetic
uuccuuucuaauaauuuaauaauc

SEQ ID NO: 283806 - RNA, 18 nt, Artificial Sequence
  Synthetic
ccuucucauuuaauaauc

SEQ ID NO: 283807 - RNA, 19 nt, Artificial Sequence
  Synthetic
cccuucucauuuaauaauc

SEQ ID NO: 283808 - RNA, 20 nt, Artificial Sequence
  Synthetic
acccuucucauuuaauaauc

SEQ ID NO: 283809 - RNA, 21 nt, Artificial Sequence
  Synthetic
gacccuucucauuuaauaauc

SEQ ID NO: 283810 - RNA, 22 nt, Artificial Sequence
  Synthetic
agacccuucucauuuaauaauc

SEQ ID NO: 283811 - RNA, 23 nt, Artificial Sequence
  Synthetic
cagacccuucucauuuaauaauc

SEQ ID NO: 283812 - RNA, 24 nt, Artificial Sequence
  Synthetic
ccagacccuucucauuuaauaauc

SEQ ID NO: 283813 - RNA, 18 nt, Artificial Sequence
  Synthetic
agggacagaugcauaauc

SEQ ID NO: 283814 - RNA, 19 nt, Artificial Sequence
  Synthetic
gagggacagaugcauaauc

SEQ ID NO: 283815 - RNA, 20 nt, Artificial Sequence
  Synthetic
agagggacagaugcauaauc

SEQ ID NO: 283816 - RNA, 21 nt, Artificial Sequence
  Synthetic
uagagggacagaugcauaauc

SEQ ID NO: 283817 - RNA, 22 nt, Artificial Sequence
  Synthetic
cuagagggacagaugcauaauc

SEQ ID NO: 283818 - RNA, 23 nt, Artificial Sequence
  Synthetic
gcuagagggacagaugcauaauc

SEQ ID NO: 283819 - RNA, 24 nt, Artificial Sequence
  Synthetic
agcuagagggacagaugcauaauc

SEQ ID NO: 283820 - RNA, 18 nt, Artificial Sequence
  Synthetic
agauaaauauagauaauc

SEQ ID NO: 283821 - RNA, 19 nt, Artificial Sequence
  Synthetic
uagauaaauauagauaauc

SEQ ID NO: 283822 - RNA, 20 nt, Artificial Sequence
  Synthetic
auagauaaauauagauaauc

SEQ ID NO: 283823 - RNA, 21 nt, Artificial Sequence
  Synthetic
aauagauaaauauagauaauc

SEQ ID NO: 283824 - RNA, 22 nt, Artificial Sequence
  Synthetic
aaauagauaaauauagauaauc

SEQ ID NO: 283825 - RNA, 23 nt, Artificial Sequence
  Synthetic
uaaauagauaaauauagauaauc

SEQ ID NO: 283826 - RNA, 24 nt, Artificial Sequence
  Synthetic
auaaauagauaaauauagauaauc

SEQ ID NO: 283827 - RNA, 18 nt, Artificial Sequence
  Synthetic
uugaauuaaaggauaauc

SEQ ID NO: 283828 - RNA, 19 nt, Artificial Sequence
  Synthetic
auugaauuaaaggauaauc

SEQ ID NO: 283829 - RNA, 20 nt, Artificial Sequence
  Synthetic
gauugaauuaaaggauaauc

SEQ ID NO: 283830 - RNA, 21 nt, Artificial Sequence
  Synthetic
agauugaauuaaaggauaauc

SEQ ID NO: 283831 - RNA, 22 nt, Artificial Sequence
  Synthetic
cagauugaauuaaaggauaauc

SEQ ID NO: 283832 - RNA, 23 nt, Artificial Sequence
  Synthetic
acagauugaauuaaaggauaauc

SEQ ID NO: 283833 - RNA, 24 nt, Artificial Sequence
  Synthetic
uacagauugaauuaaaggauaauc

SEQ ID NO: 283834 - RNA, 18 nt, Artificial Sequence
  Synthetic
acguaaggaaggauaauc

SEQ ID NO: 283835 - RNA, 19 nt, Artificial Sequence
  Synthetic
cacguaaggaaggauaauc

SEQ ID NO: 283836 - RNA, 20 nt, Artificial Sequence
  Synthetic
gcacguaaggaaggauaauc

SEQ ID NO: 283837 - RNA, 21 nt, Artificial Sequence
  Synthetic
agcacguaaggaaggauaauc

SEQ ID NO: 283838 - RNA, 22 nt, Artificial Sequence
  Synthetic
aagcacguaaggaaggauaauc

SEQ ID NO: 283839 - RNA, 23 nt, Artificial Sequence
  Synthetic
uaagcacguaaggaaggauaauc

SEQ ID NO: 283840 - RNA, 24 nt, Artificial Sequence
  Synthetic
auaagcacguaaggaaggauaauc

SEQ ID NO: 283841 - RNA, 18 nt, Artificial Sequence
  Synthetic
cuaaagaaguugauaauc

SEQ ID NO: 283842 - RNA, 19 nt, Artificial Sequence
  Synthetic
ucuaaagaaguugauaauc

SEQ ID NO: 283843 - RNA, 20 nt, Artificial Sequence
  Synthetic
uucuaaagaaguugauaauc

SEQ ID NO: 283844 - RNA, 21 nt, Artificial Sequence
  Synthetic
uuucuaaagaaguugauaauc

SEQ ID NO: 283845 - RNA, 22 nt, Artificial Sequence
  Synthetic
uuuucuaaagaaguugauaauc

SEQ ID NO: 283846 - RNA, 23 nt, Artificial Sequence
  Synthetic
auuuucuaaagaaguugauaauc

SEQ ID NO: 283847 - RNA, 24 nt, Artificial Sequence
  Synthetic
cauuuucuaaagaaguugauaauc

SEQ ID NO: 283848 - RNA, 18 nt, Artificial Sequence
  Synthetic
cuuuugggguauauaauc

SEQ ID NO: 283849 - RNA, 19 nt, Artificial Sequence
  Synthetic
ccuuuugggguauauaauc

SEQ ID NO: 283850 - RNA, 20 nt, Artificial Sequence
  Synthetic
uccuuuugggguauauaauc

SEQ ID NO: 283851 - RNA, 21 nt, Artificial Sequence
  Synthetic
auccuuuugggguauauaauc

SEQ ID NO: 283852 - RNA, 22 nt, Artificial Sequence
  Synthetic
aauccuuuugggguauauaauc

SEQ ID NO: 283853 - RNA, 23 nt, Artificial Sequence
  Synthetic
uaauccuuuugggguauauaauc

SEQ ID NO: 283854 - RNA, 24 nt, Artificial Sequence
  Synthetic
cuaauccuuuugggguauauaauc

SEQ ID NO: 283855 - RNA, 18 nt, Artificial Sequence
  Synthetic
gcaccauaugcuauaauc

SEQ ID NO: 283856 - RNA, 19 nt, Artificial Sequence
  Synthetic
agcaccauaugcuauaauc

SEQ ID NO: 283857 - RNA, 20 nt, Artificial Sequence
  Synthetic
uagcaccauaugcuauaauc

SEQ ID NO: 283858 - RNA, 21 nt, Artificial Sequence
  Synthetic
uuagcaccauaugcuauaauc

SEQ ID NO: 283859 - RNA, 22 nt, Artificial Sequence
  Synthetic
uuuagcaccauaugcuauaauc

SEQ ID NO: 283860 - RNA, 23 nt, Artificial Sequence
  Synthetic
auuuagcaccauaugcuauaauc

SEQ ID NO: 283861 - RNA, 24 nt, Artificial Sequence
  Synthetic
aauuuagcaccauaugcuauaauc

SEQ ID NO: 283862 - RNA, 18 nt, Artificial Sequence
  Synthetic
uuguccaaugguauaauc

SEQ ID NO: 283863 - RNA, 19 nt, Artificial Sequence
  Synthetic
uuuguccaaugguauaauc

SEQ ID NO: 283864 - RNA, 20 nt, Artificial Sequence
  Synthetic
cuuuguccaaugguauaauc

SEQ ID NO: 283865 - RNA, 21 nt, Artificial Sequence
  Synthetic
acuuuguccaaugguauaauc

SEQ ID NO: 283866 - RNA, 22 nt, Artificial Sequence
  Synthetic
gacuuuguccaaugguauaauc

SEQ ID NO: 283867 - RNA, 23 nt, Artificial Sequence
  Synthetic
ugacuuuguccaaugguauaauc

SEQ ID NO: 283868 - RNA, 24 nt, Artificial Sequence
  Synthetic
cugacuuuguccaaugguauaauc

SEQ ID NO: 283869 - RNA, 18 nt, Artificial Sequence
  Synthetic
agugucucuuggcuaauc

SEQ ID NO: 283870 - RNA, 19 nt, Artificial Sequence
  Synthetic
cagugucucuuggcuaauc

SEQ ID NO: 283871 - RNA, 20 nt, Artificial Sequence
  Synthetic
gcagugucucuuggcuaauc

SEQ ID NO: 283872 - RNA, 21 nt, Artificial Sequence
  Synthetic
agcagugucucuuggcuaauc

SEQ ID NO: 283873 - RNA, 22 nt, Artificial Sequence
  Synthetic
cagcagugucucuuggcuaauc

SEQ ID NO: 283874 - RNA, 23 nt, Artificial Sequence
  Synthetic
gcagcagugucucuuggcuaauc

SEQ ID NO: 283875 - RNA, 24 nt, Artificial Sequence
  Synthetic
agcagcagugucucuuggcuaauc

SEQ ID NO: 283876 - RNA, 18 nt, Artificial Sequence
  Synthetic
aaaacauguaaucuaauc

SEQ ID NO: 283877 - RNA, 19 nt, Artificial Sequence
  Synthetic
aaaaacauguaaucuaauc

SEQ ID NO: 283878 - RNA, 20 nt, Artificial Sequence
  Synthetic
caaaaacauguaaucuaauc

SEQ ID NO: 283879 - RNA, 21 nt, Artificial Sequence
  Synthetic
acaaaaacauguaaucuaauc

SEQ ID NO: 283880 - RNA, 22 nt, Artificial Sequence
  Synthetic
uacaaaaacauguaaucuaauc

SEQ ID NO: 283881 - RNA, 23 nt, Artificial Sequence
  Synthetic
uuacaaaaacauguaaucuaauc

SEQ ID NO: 283882 - RNA, 24 nt, Artificial Sequence
  Synthetic
uuuacaaaaacauguaaucuaauc

SEQ ID NO: 283883 - RNA, 18 nt, Artificial Sequence
  Synthetic
uaaguauuauaaguaauc

SEQ ID NO: 283884 - RNA, 19 nt, Artificial Sequence
  Synthetic
uuaaguauuauaaguaauc

SEQ ID NO: 283885 - RNA, 20 nt, Artificial Sequence
  Synthetic
auuaaguauuauaaguaauc

SEQ ID NO: 283886 - RNA, 21 nt, Artificial Sequence
  Synthetic
uauuaaguauuauaaguaauc

SEQ ID NO: 283887 - RNA, 22 nt, Artificial Sequence
  Synthetic
guauuaaguauuauaaguaauc

SEQ ID NO: 283888 - RNA, 23 nt, Artificial Sequence
  Synthetic
uguauuaaguauuauaaguaauc

SEQ ID NO: 283889 - RNA, 24 nt, Artificial Sequence
  Synthetic
uuguauuaaguauuauaaguaauc

SEQ ID NO: 283890 - RNA, 18 nt, Artificial Sequence
  Synthetic
auugugucaaauguaauc

SEQ ID NO: 283891 - RNA, 19 nt, Artificial Sequence
  Synthetic
uauugugucaaauguaauc

SEQ ID NO: 283892 - RNA, 20 nt, Artificial Sequence
  Synthetic
uuauugugucaaauguaauc

SEQ ID NO: 283893 - RNA, 21 nt, Artificial Sequence
  Synthetic
auuauugugucaaauguaauc

SEQ ID NO: 283894 - RNA, 22 nt, Artificial Sequence
  Synthetic
gauuauugugucaaauguaauc

SEQ ID NO: 283895 - RNA, 23 nt, Artificial Sequence
  Synthetic
ugauuauugugucaaauguaauc

SEQ ID NO: 283896 - RNA, 24 nt, Artificial Sequence
  Synthetic
augauuauugugucaaauguaauc

SEQ ID NO: 283897 - RNA, 18 nt, Artificial Sequence
  Synthetic
uauagaagggcuguaauc

SEQ ID NO: 283898 - RNA, 19 nt, Artificial Sequence
  Synthetic
uuauagaagggcuguaauc

SEQ ID NO: 283899 - RNA, 20 nt, Artificial Sequence
  Synthetic
auuauagaagggcuguaauc

SEQ ID NO: 283900 - RNA, 21 nt, Artificial Sequence
  Synthetic
aauuauagaagggcuguaauc

SEQ ID NO: 283901 - RNA, 22 nt, Artificial Sequence
  Synthetic
uaauuauagaagggcuguaauc

SEQ ID NO: 283902 - RNA, 23 nt, Artificial Sequence
  Synthetic
uuaauuauagaagggcuguaauc

SEQ ID NO: 283903 - RNA, 24 nt, Artificial Sequence
  Synthetic
auuaauuauagaagggcuguaauc

SEQ ID NO: 283904 - RNA, 18 nt, Artificial Sequence
  Synthetic
acacuagccucuguaauc

SEQ ID NO: 283905 - RNA, 19 nt, Artificial Sequence
  Synthetic
aacacuagccucuguaauc

SEQ ID NO: 283906 - RNA, 20 nt, Artificial Sequence
  Synthetic
aaacacuagccucuguaauc

SEQ ID NO: 283907 - RNA, 21 nt, Artificial Sequence
  Synthetic
uaaacacuagccucuguaauc

SEQ ID NO: 283908 - RNA, 22 nt, Artificial Sequence
  Synthetic
cuaaacacuagccucuguaauc

SEQ ID NO: 283909 - RNA, 23 nt, Artificial Sequence
  Synthetic
ccuaaacacuagccucuguaauc

SEQ ID NO: 283910 - RNA, 24 nt, Artificial Sequence
  Synthetic
uccuaaacacuagccucuguaauc

SEQ ID NO: 283911 - RNA, 18 nt, Artificial Sequence
  Synthetic
cacaacucauuuguaauc

SEQ ID NO: 283912 - RNA, 19 nt, Artificial Sequence
  Synthetic
acacaacucauuuguaauc

SEQ ID NO: 283913 - RNA, 20 nt, Artificial Sequence
  Synthetic
aacacaacucauuuguaauc

SEQ ID NO: 283914 - RNA, 21 nt, Artificial Sequence
  Synthetic
gaacacaacucauuuguaauc

SEQ ID NO: 283915 - RNA, 22 nt, Artificial Sequence
  Synthetic
agaacacaacucauuuguaauc

SEQ ID NO: 283916 - RNA, 23 nt, Artificial Sequence
  Synthetic
cagaacacaacucauuuguaauc

SEQ ID NO: 283917 - RNA, 24 nt, Artificial Sequence
  Synthetic
gcagaacacaacucauuuguaauc

SEQ ID NO: 283918 - RNA, 18 nt, Artificial Sequence
  Synthetic
aacuaguuucaauuaauc

SEQ ID NO: 283919 - RNA, 19 nt, Artificial Sequence
  Synthetic
gaacuaguuucaauuaauc

SEQ ID NO: 283920 - RNA, 20 nt, Artificial Sequence
  Synthetic
ugaacuaguuucaauuaauc

SEQ ID NO: 283921 - RNA, 21 nt, Artificial Sequence
  Synthetic
uugaacuaguuucaauuaauc

SEQ ID NO: 283922 - RNA, 22 nt, Artificial Sequence
  Synthetic
cuugaacuaguuucaauuaauc

SEQ ID NO: 283923 - RNA, 23 nt, Artificial Sequence
  Synthetic
acuugaacuaguuucaauuaauc

SEQ ID NO: 283924 - RNA, 24 nt, Artificial Sequence
  Synthetic
gacuugaacuaguuucaauuaauc

SEQ ID NO: 283925 - RNA, 18 nt, Artificial Sequence
  Synthetic
ggggaugucuaauuaauc

SEQ ID NO: 283926 - RNA, 19 nt, Artificial Sequence
  Synthetic
uggggaugucuaauuaauc

SEQ ID NO: 283927 - RNA, 20 nt, Artificial Sequence
  Synthetic
uuggggaugucuaauuaauc

SEQ ID NO: 283928 - RNA, 21 nt, Artificial Sequence
  Synthetic
guuggggaugucuaauuaauc

SEQ ID NO: 283929 - RNA, 22 nt, Artificial Sequence
  Synthetic
gguuggggaugucuaauuaauc

SEQ ID NO: 283930 - RNA, 23 nt, Artificial Sequence
  Synthetic
ggguuggggaugucuaauuaauc

SEQ ID NO: 283931 - RNA, 24 nt, Artificial Sequence
  Synthetic
uggguuggggaugucuaauuaauc

SEQ ID NO: 283932 - RNA, 18 nt, Artificial Sequence
  Synthetic
ugaguugccgcauuaauc

SEQ ID NO: 283933 - RNA, 19 nt, Artificial Sequence
  Synthetic
cugaguugccgcauuaauc

SEQ ID NO: 283934 - RNA, 20 nt, Artificial Sequence
  Synthetic
acugaguugccgcauuaauc

SEQ ID NO: 283935 - RNA, 21 nt, Artificial Sequence
  Synthetic
uacugaguugccgcauuaauc

SEQ ID NO: 283936 - RNA, 22 nt, Artificial Sequence
  Synthetic
auacugaguugccgcauuaauc

SEQ ID NO: 283937 - RNA, 23 nt, Artificial Sequence
  Synthetic
gauacugaguugccgcauuaauc

SEQ ID NO: 283938 - RNA, 24 nt, Artificial Sequence
  Synthetic
agauacugaguugccgcauuaauc

SEQ ID NO: 283939 - RNA, 18 nt, Artificial Sequence
  Synthetic
caaagagguagauuaauc

SEQ ID NO: 283940 - RNA, 19 nt, Artificial Sequence
  Synthetic
gcaaagagguagauuaauc

SEQ ID NO: 283941 - RNA, 20 nt, Artificial Sequence
  Synthetic
agcaaagagguagauuaauc

SEQ ID NO: 283942 - RNA, 21 nt, Artificial Sequence
  Synthetic
aagcaaagagguagauuaauc

SEQ ID NO: 283943 - RNA, 22 nt, Artificial Sequence
  Synthetic
uaagcaaagagguagauuaauc

SEQ ID NO: 283944 - RNA, 23 nt, Artificial Sequence
  Synthetic
auaagcaaagagguagauuaauc

SEQ ID NO: 283945 - RNA, 24 nt, Artificial Sequence
  Synthetic
aauaagcaaagagguagauuaauc

SEQ ID NO: 283946 - RNA, 18 nt, Artificial Sequence
  Synthetic
gcaucuggaggauuaauc

SEQ ID NO: 283947 - RNA, 19 nt, Artificial Sequence
  Synthetic
ugcaucuggaggauuaauc

SEQ ID NO: 283948 - RNA, 20 nt, Artificial Sequence
  Synthetic
augcaucuggaggauuaauc

SEQ ID NO: 283949 - RNA, 21 nt, Artificial Sequence
  Synthetic
uaugcaucuggaggauuaauc

SEQ ID NO: 283950 - RNA, 22 nt, Artificial Sequence
  Synthetic
cuaugcaucuggaggauuaauc

SEQ ID NO: 283951 - RNA, 23 nt, Artificial Sequence
  Synthetic
acuaugcaucuggaggauuaauc

SEQ ID NO: 283952 - RNA, 24 nt, Artificial Sequence
  Synthetic
aacuaugcaucuggaggauuaauc

SEQ ID NO: 283953 - RNA, 18 nt, Artificial Sequence
  Synthetic
ugagagagaugauuaauc

SEQ ID NO: 283954 - RNA, 19 nt, Artificial Sequence
  Synthetic
uugagagagaugauuaauc

SEQ ID NO: 283955 - RNA, 20 nt, Artificial Sequence
  Synthetic
cuugagagagaugauuaauc

SEQ ID NO: 283956 - RNA, 21 nt, Artificial Sequence
  Synthetic
ccuugagagagaugauuaauc

SEQ ID NO: 283957 - RNA, 22 nt, Artificial Sequence
  Synthetic
uccuugagagagaugauuaauc

SEQ ID NO: 283958 - RNA, 23 nt, Artificial Sequence
  Synthetic
cuccuugagagagaugauuaauc

SEQ ID NO: 283959 - RNA, 24 nt, Artificial Sequence
  Synthetic
ucuccuugagagagaugauuaauc

SEQ ID NO: 283960 - RNA, 18 nt, Artificial Sequence
  Synthetic
aacucagucauauuaauc

SEQ ID NO: 283961 - RNA, 19 nt, Artificial Sequence
  Synthetic
caacucagucauauuaauc

SEQ ID NO: 283962 - RNA, 20 nt, Artificial Sequence
  Synthetic
acaacucagucauauuaauc

SEQ ID NO: 283963 - RNA, 21 nt, Artificial Sequence
  Synthetic
cacaacucagucauauuaauc

SEQ ID NO: 283964 - RNA, 22 nt, Artificial Sequence
  Synthetic
ccacaacucagucauauuaauc

SEQ ID NO: 283965 - RNA, 23 nt, Artificial Sequence
  Synthetic
accacaacucagucauauuaauc

SEQ ID NO: 283966 - RNA, 24 nt, Artificial Sequence
  Synthetic
caccacaacucagucauauuaauc

SEQ ID NO: 283967 - RNA, 18 nt, Artificial Sequence
  Synthetic
auuuccucuuccuuaauc

SEQ ID NO: 283968 - RNA, 19 nt, Artificial Sequence
  Synthetic
gauuuccucuuccuuaauc

SEQ ID NO: 283969 - RNA, 20 nt, Artificial Sequence
  Synthetic
ugauuuccucuuccuuaauc

SEQ ID NO: 283970 - RNA, 21 nt, Artificial Sequence
  Synthetic
uugauuuccucuuccuuaauc

SEQ ID NO: 283971 - RNA, 22 nt, Artificial Sequence
  Synthetic
uuugauuuccucuuccuuaauc

SEQ ID NO: 283972 - RNA, 23 nt, Artificial Sequence
  Synthetic
cuuugauuuccucuuccuuaauc

SEQ ID NO: 283973 - RNA, 24 nt, Artificial Sequence
  Synthetic
gcuuugauuuccucuuccuuaauc

SEQ ID NO: 283974 - RNA, 18 nt, Artificial Sequence
  Synthetic
ucaaaaguaaaguuaauc

SEQ ID NO: 283975 - RNA, 19 nt, Artificial Sequence
  Synthetic
cucaaaaguaaaguuaauc

SEQ ID NO: 283976 - RNA, 20 nt, Artificial Sequence
  Synthetic
ucucaaaaguaaaguuaauc

SEQ ID NO: 283977 - RNA, 21 nt, Artificial Sequence
  Synthetic
uucucaaaaguaaaguuaauc

SEQ ID NO: 283978 - RNA, 22 nt, Artificial Sequence
  Synthetic
uuucucaaaaguaaaguuaauc

SEQ ID NO: 283979 - RNA, 23 nt, Artificial Sequence
  Synthetic
auuucucaaaaguaaaguuaauc

SEQ ID NO: 283980 - RNA, 24 nt, Artificial Sequence
  Synthetic
aauuucucaaaaguaaaguuaauc

SEQ ID NO: 283981 - RNA, 18 nt, Artificial Sequence
  Synthetic
gagagauacggguuaauc

SEQ ID NO: 283982 - RNA, 19 nt, Artificial Sequence
  Synthetic
agagagauacggguuaauc

SEQ ID NO: 283983 - RNA, 20 nt, Artificial Sequence
  Synthetic
aagagagauacggguuaauc

SEQ ID NO: 283984 - RNA, 21 nt, Artificial Sequence
  Synthetic
gaagagagauacggguuaauc

SEQ ID NO: 283985 - RNA, 22 nt, Artificial Sequence
  Synthetic
ggaagagagauacggguuaauc

SEQ ID NO: 283986 - RNA, 23 nt, Artificial Sequence
  Synthetic
aggaagagagauacggguuaauc

SEQ ID NO: 283987 - RNA, 24 nt, Artificial Sequence
  Synthetic
gaggaagagagauacggguuaauc

SEQ ID NO: 283988 - RNA, 18 nt, Artificial Sequence
  Synthetic
caugcaugagaaaacauc

SEQ ID NO: 283989 - RNA, 19 nt, Artificial Sequence
  Synthetic
ucaugcaugagaaaacauc

SEQ ID NO: 283990 - RNA, 20 nt, Artificial Sequence
  Synthetic
uucaugcaugagaaaacauc

SEQ ID NO: 283991 - RNA, 21 nt, Artificial Sequence
  Synthetic
auucaugcaugagaaaacauc

SEQ ID NO: 283992 - RNA, 22 nt, Artificial Sequence
  Synthetic
uauucaugcaugagaaaacauc

SEQ ID NO: 283993 - RNA, 23 nt, Artificial Sequence
  Synthetic
auauucaugcaugagaaaacauc

SEQ ID NO: 283994 - RNA, 24 nt, Artificial Sequence
  Synthetic
cauauucaugcaugagaaaacauc

SEQ ID NO: 283995 - RNA, 18 nt, Artificial Sequence
  Synthetic
aggucccugucaaacauc

SEQ ID NO: 283996 - RNA, 19 nt, Artificial Sequence
  Synthetic
aaggucccugucaaacauc

SEQ ID NO: 283997 - RNA, 20 nt, Artificial Sequence
  Synthetic
caaggucccugucaaacauc

SEQ ID NO: 283998 - RNA, 21 nt, Artificial Sequence
  Synthetic
acaaggucccugucaaacauc

SEQ ID NO: 283999 - RNA, 22 nt, Artificial Sequence
  Synthetic
aacaaggucccugucaaacauc

SEQ ID NO: 284000 - RNA, 23 nt, Artificial Sequence
  Synthetic
caacaaggucccugucaaacauc

SEQ ID NO: 284001 - RNA, 24 nt, Artificial Sequence
  Synthetic
acaacaaggucccugucaaacauc

SEQ ID NO: 284002 - RNA, 18 nt, Artificial Sequence
  Synthetic
agcuucuauuacaacauc

SEQ ID NO: 284003 - RNA, 19 nt, Artificial Sequence
  Synthetic
cagcuucuauuacaacauc

SEQ ID NO: 284004 - RNA, 20 nt, Artificial Sequence
  Synthetic
acagcuucuauuacaacauc

SEQ ID NO: 284005 - RNA, 21 nt, Artificial Sequence
  Synthetic
uacagcuucuauuacaacauc

SEQ ID NO: 284006 - RNA, 22 nt, Artificial Sequence
  Synthetic
guacagcuucuauuacaacauc

SEQ ID NO: 284007 - RNA, 23 nt, Artificial Sequence
  Synthetic
aguacagcuucuauuacaacauc

SEQ ID NO: 284008 - RNA, 24 nt, Artificial Sequence
  Synthetic
aaguacagcuucuauuacaacauc

SEQ ID NO: 284009 - RNA, 18 nt, Artificial Sequence
  Synthetic
ccaacuccucugaacauc

SEQ ID NO: 284010 - RNA, 19 nt, Artificial Sequence
  Synthetic
uccaacuccucugaacauc

SEQ ID NO: 284011 - RNA, 20 nt, Artificial Sequence
  Synthetic
cuccaacuccucugaacauc

SEQ ID NO: 284012 - RNA, 21 nt, Artificial Sequence
  Synthetic
ucuccaacuccucugaacauc

SEQ ID NO: 284013 - RNA, 22 nt, Artificial Sequence
  Synthetic
aucuccaacuccucugaacauc

SEQ ID NO: 284014 - RNA, 23 nt, Artificial Sequence
  Synthetic
gaucuccaacuccucugaacauc

SEQ ID NO: 284015 - RNA, 24 nt, Artificial Sequence
  Synthetic
ugaucuccaacuccucugaacauc

SEQ ID NO: 284016 - RNA, 18 nt, Artificial Sequence
  Synthetic
uagguaagucugaacauc

SEQ ID NO: 284017 - RNA, 19 nt, Artificial Sequence
  Synthetic
auagguaagucugaacauc

SEQ ID NO: 284018 - RNA, 20 nt, Artificial Sequence
  Synthetic
aauagguaagucugaacauc

SEQ ID NO: 284019 - RNA, 21 nt, Artificial Sequence
  Synthetic
gaauagguaagucugaacauc

SEQ ID NO: 284020 - RNA, 22 nt, Artificial Sequence
  Synthetic
ugaauagguaagucugaacauc

SEQ ID NO: 284021 - RNA, 23 nt, Artificial Sequence
  Synthetic
uugaauagguaagucugaacauc

SEQ ID NO: 284022 - RNA, 24 nt, Artificial Sequence
  Synthetic
uuugaauagguaagucugaacauc

SEQ ID NO: 284023 - RNA, 18 nt, Artificial Sequence
  Synthetic
uuagucgcuccuaacauc

SEQ ID NO: 284024 - RNA, 19 nt, Artificial Sequence
  Synthetic
auuagucgcuccuaacauc

SEQ ID NO: 284025 - RNA, 20 nt, Artificial Sequence
  Synthetic
uauuagucgcuccuaacauc

SEQ ID NO: 284026 - RNA, 21 nt, Artificial Sequence
  Synthetic
cuauuagucgcuccuaacauc

SEQ ID NO: 284027 - RNA, 22 nt, Artificial Sequence
  Synthetic
acuauuagucgcuccuaacauc

SEQ ID NO: 284028 - RNA, 23 nt, Artificial Sequence
  Synthetic
aacuauuagucgcuccuaacauc

SEQ ID NO: 284029 - RNA, 24 nt, Artificial Sequence
  Synthetic
aaacuauuagucgcuccuaacauc

SEQ ID NO: 284030 - RNA, 18 nt, Artificial Sequence
  Synthetic
gcauaauaguuuaacauc

SEQ ID NO: 284031 - RNA, 19 nt, Artificial Sequence
  Synthetic
ugcauaauaguuuaacauc

SEQ ID NO: 284032 - RNA, 20 nt, Artificial Sequence
  Synthetic
uugcauaauaguuuaacauc

SEQ ID NO: 284033 - RNA, 21 nt, Artificial Sequence
  Synthetic
auugcauaauaguuuaacauc

SEQ ID NO: 284034 - RNA, 22 nt, Artificial Sequence
  Synthetic
aauugcauaauaguuuaacauc

SEQ ID NO: 284035 - RNA, 23 nt, Artificial Sequence
  Synthetic
uaauugcauaauaguuuaacauc

SEQ ID NO: 284036 - RNA, 24 nt, Artificial Sequence
  Synthetic
cuaauugcauaauaguuuaacauc

SEQ ID NO: 284037 - RNA, 18 nt, Artificial Sequence
  Synthetic
agcuaauaggaacacauc

SEQ ID NO: 284038 - RNA, 19 nt, Artificial Sequence
  Synthetic
cagcuaauaggaacacauc

SEQ ID NO: 284039 - RNA, 20 nt, Artificial Sequence
  Synthetic
gcagcuaauaggaacacauc

SEQ ID NO: 284040 - RNA, 21 nt, Artificial Sequence
  Synthetic
ugcagcuaauaggaacacauc

SEQ ID NO: 284041 - RNA, 22 nt, Artificial Sequence
  Synthetic
uugcagcuaauaggaacacauc

SEQ ID NO: 284042 - RNA, 23 nt, Artificial Sequence
  Synthetic
uuugcagcuaauaggaacacauc

SEQ ID NO: 284043 - RNA, 24 nt, Artificial Sequence
  Synthetic
auuugcagcuaauaggaacacauc

SEQ ID NO: 284044 - RNA, 18 nt, Artificial Sequence
  Synthetic
ucuaauuaaagacacauc

SEQ ID NO: 284045 - RNA, 19 nt, Artificial Sequence
  Synthetic
uucuaauuaaagacacauc

SEQ ID NO: 284046 - RNA, 20 nt, Artificial Sequence
  Synthetic
auucuaauuaaagacacauc

SEQ ID NO: 284047 - RNA, 21 nt, Artificial Sequence
  Synthetic
cauucuaauuaaagacacauc

SEQ ID NO: 284048 - RNA, 22 nt, Artificial Sequence
  Synthetic
acauucuaauuaaagacacauc

SEQ ID NO: 284049 - RNA, 23 nt, Artificial Sequence
  Synthetic
aacauucuaauuaaagacacauc

SEQ ID NO: 284050 - RNA, 24 nt, Artificial Sequence
  Synthetic
aaacauucuaauuaaagacacauc

SEQ ID NO: 284051 - RNA, 18 nt, Artificial Sequence
  Synthetic
aaaugggcaagacacauc

SEQ ID NO: 284052 - RNA, 19 nt, Artificial Sequence
  Synthetic
gaaaugggcaagacacauc

SEQ ID NO: 284053 - RNA, 20 nt, Artificial Sequence
  Synthetic
ggaaaugggcaagacacauc

SEQ ID NO: 284054 - RNA, 21 nt, Artificial Sequence
  Synthetic
aggaaaugggcaagacacauc

SEQ ID NO: 284055 - RNA, 22 nt, Artificial Sequence
  Synthetic
uaggaaaugggcaagacacauc

SEQ ID NO: 284056 - RNA, 23 nt, Artificial Sequence
  Synthetic
uuaggaaaugggcaagacacauc

SEQ ID NO: 284057 - RNA, 24 nt, Artificial Sequence
  Synthetic
auuaggaaaugggcaagacacauc

SEQ ID NO: 284058 - RNA, 18 nt, Artificial Sequence
  Synthetic
uuucuuucauuacacauc

SEQ ID NO: 284059 - RNA, 19 nt, Artificial Sequence
  Synthetic
uuuucuuucauuacacauc

SEQ ID NO: 284060 - RNA, 20 nt, Artificial Sequence
  Synthetic
auuuucuuucauuacacauc

SEQ ID NO: 284061 - RNA, 21 nt, Artificial Sequence
  Synthetic
cauuuucuuucauuacacauc

SEQ ID NO: 284062 - RNA, 22 nt, Artificial Sequence
  Synthetic
ucauuuucuuucauuacacauc

SEQ ID NO: 284063 - RNA, 23 nt, Artificial Sequence
  Synthetic
uucauuuucuuucauuacacauc

SEQ ID NO: 284064 - RNA, 24 nt, Artificial Sequence
  Synthetic
auucauuuucuuucauuacacauc

SEQ ID NO: 284065 - RNA, 18 nt, Artificial Sequence
  Synthetic
gaaccggggccccacauc

SEQ ID NO: 284066 - RNA, 19 nt, Artificial Sequence
  Synthetic
ggaaccggggccccacauc

SEQ ID NO: 284067 - RNA, 20 nt, Artificial Sequence
  Synthetic
aggaaccggggccccacauc

SEQ ID NO: 284068 - RNA, 21 nt, Artificial Sequence
  Synthetic
uaggaaccggggccccacauc

SEQ ID NO: 284069 - RNA, 22 nt, Artificial Sequence
  Synthetic
uuaggaaccggggccccacauc

SEQ ID NO: 284070 - RNA, 23 nt, Artificial Sequence
  Synthetic
guuaggaaccggggccccacauc

SEQ ID NO: 284071 - RNA, 24 nt, Artificial Sequence
  Synthetic
uguuaggaaccggggccccacauc

SEQ ID NO: 284072 - RNA, 18 nt, Artificial Sequence
  Synthetic
augugaaacaagcacauc

SEQ ID NO: 284073 - RNA, 19 nt, Artificial Sequence
  Synthetic
aaugugaaacaagcacauc

SEQ ID NO: 284074 - RNA, 20 nt, Artificial Sequence
  Synthetic
uaaugugaaacaagcacauc

SEQ ID NO: 284075 - RNA, 21 nt, Artificial Sequence
  Synthetic
guaaugugaaacaagcacauc

SEQ ID NO: 284076 - RNA, 22 nt, Artificial Sequence
  Synthetic
uguaaugugaaacaagcacauc

SEQ ID NO: 284077 - RNA, 23 nt, Artificial Sequence
  Synthetic
auguaaugugaaacaagcacauc

SEQ ID NO: 284078 - RNA, 24 nt, Artificial Sequence
  Synthetic
cauguaaugugaaacaagcacauc

SEQ ID NO: 284079 - RNA, 18 nt, Artificial Sequence
  Synthetic
augcauaauaaucacauc

SEQ ID NO: 284080 - RNA, 19 nt, Artificial Sequence
  Synthetic
aaugcauaauaaucacauc

SEQ ID NO: 284081 - RNA, 20 nt, Artificial Sequence
  Synthetic
caaugcauaauaaucacauc

SEQ ID NO: 284082 - RNA, 21 nt, Artificial Sequence
  Synthetic
gcaaugcauaauaaucacauc

SEQ ID NO: 284083 - RNA, 22 nt, Artificial Sequence
  Synthetic
ugcaaugcauaauaaucacauc

SEQ ID NO: 284084 - RNA, 23 nt, Artificial Sequence
  Synthetic
augcaaugcauaauaaucacauc

SEQ ID NO: 284085 - RNA, 24 nt, Artificial Sequence
  Synthetic
caugcaaugcauaauaaucacauc

SEQ ID NO: 284086 - RNA, 18 nt, Artificial Sequence
  Synthetic
agcucuaucgcucacauc

SEQ ID NO: 284087 - RNA, 19 nt, Artificial Sequence
  Synthetic
cagcucuaucgcucacauc

SEQ ID NO: 284088 - RNA, 20 nt, Artificial Sequence
  Synthetic
acagcucuaucgcucacauc

SEQ ID NO: 284089 - RNA, 21 nt, Artificial Sequence
  Synthetic
cacagcucuaucgcucacauc

SEQ ID NO: 284090 - RNA, 22 nt, Artificial Sequence
  Synthetic
acacagcucuaucgcucacauc

SEQ ID NO: 284091 - RNA, 23 nt, Artificial Sequence
  Synthetic
aacacagcucuaucgcucacauc

SEQ ID NO: 284092 - RNA, 24 nt, Artificial Sequence
  Synthetic
caacacagcucuaucgcucacauc

SEQ ID NO: 284093 - RNA, 18 nt, Artificial Sequence
  Synthetic
auaugaaauagucacauc

SEQ ID NO: 284094 - RNA, 19 nt, Artificial Sequence
  Synthetic
aauaugaaauagucacauc

SEQ ID NO: 284095 - RNA, 20 nt, Artificial Sequence
  Synthetic
caauaugaaauagucacauc

SEQ ID NO: 284096 - RNA, 21 nt, Artificial Sequence
  Synthetic
ucaauaugaaauagucacauc

SEQ ID NO: 284097 - RNA, 22 nt, Artificial Sequence
  Synthetic
uucaauaugaaauagucacauc

SEQ ID NO: 284098 - RNA, 23 nt, Artificial Sequence
  Synthetic
auucaauaugaaauagucacauc

SEQ ID NO: 284099 - RNA, 24 nt, Artificial Sequence
  Synthetic
cauucaauaugaaauagucacauc

SEQ ID NO: 284100 - RNA, 18 nt, Artificial Sequence
  Synthetic
uuuguauuacgucacauc

SEQ ID NO: 284101 - RNA, 19 nt, Artificial Sequence
  Synthetic
uuuuguauuacgucacauc

SEQ ID NO: 284102 - RNA, 20 nt, Artificial Sequence
  Synthetic
auuuuguauuacgucacauc

SEQ ID NO: 284103 - RNA, 21 nt, Artificial Sequence
  Synthetic
uauuuuguauuacgucacauc

SEQ ID NO: 284104 - RNA, 22 nt, Artificial Sequence
  Synthetic
guauuuuguauuacgucacauc

SEQ ID NO: 284105 - RNA, 23 nt, Artificial Sequence
  Synthetic
uguauuuuguauuacgucacauc

SEQ ID NO: 284106 - RNA, 24 nt, Artificial Sequence
  Synthetic
guguauuuuguauuacgucacauc

SEQ ID NO: 284107 - RNA, 18 nt, Artificial Sequence
  Synthetic
uaugcucuuggucacauc

SEQ ID NO: 284108 - RNA, 19 nt, Artificial Sequence
  Synthetic
uuaugcucuuggucacauc

SEQ ID NO: 284109 - RNA, 20 nt, Artificial Sequence
  Synthetic
uuuaugcucuuggucacauc

SEQ ID NO: 284110 - RNA, 21 nt, Artificial Sequence
  Synthetic
uuuuaugcucuuggucacauc

SEQ ID NO: 284111 - RNA, 22 nt, Artificial Sequence
  Synthetic
guuuuaugcucuuggucacauc

SEQ ID NO: 284112 - RNA, 23 nt, Artificial Sequence
  Synthetic
aguuuuaugcucuuggucacauc

SEQ ID NO: 284113 - RNA, 24 nt, Artificial Sequence
  Synthetic
caguuuuaugcucuuggucacauc

SEQ ID NO: 284114 - RNA, 18 nt, Artificial Sequence
  Synthetic
auucaauaaauucacauc

SEQ ID NO: 284115 - RNA, 19 nt, Artificial Sequence
  Synthetic
uauucaauaaauucacauc

SEQ ID NO: 284116 - RNA, 20 nt, Artificial Sequence
  Synthetic
uuauucaauaaauucacauc

SEQ ID NO: 284117 - RNA, 21 nt, Artificial Sequence
  Synthetic
auuauucaauaaauucacauc

SEQ ID NO: 284118 - RNA, 22 nt, Artificial Sequence
  Synthetic
uauuauucaauaaauucacauc

SEQ ID NO: 284119 - RNA, 23 nt, Artificial Sequence
  Synthetic
uuauuauucaauaaauucacauc

SEQ ID NO: 284120 - RNA, 24 nt, Artificial Sequence
  Synthetic
auuauuauucaauaaauucacauc

SEQ ID NO: 284121 - RNA, 18 nt, Artificial Sequence
  Synthetic
gcacuagccauucacauc

SEQ ID NO: 284122 - RNA, 19 nt, Artificial Sequence
  Synthetic
ugcacuagccauucacauc

SEQ ID NO: 284123 - RNA, 20 nt, Artificial Sequence
  Synthetic
cugcacuagccauucacauc

SEQ ID NO: 284124 - RNA, 21 nt, Artificial Sequence
  Synthetic
gcugcacuagccauucacauc

SEQ ID NO: 284125 - RNA, 22 nt, Artificial Sequence
  Synthetic
ggcugcacuagccauucacauc

SEQ ID NO: 284126 - RNA, 23 nt, Artificial Sequence
  Synthetic
gggcugcacuagccauucacauc

SEQ ID NO: 284127 - RNA, 24 nt, Artificial Sequence
  Synthetic
agggcugcacuagccauucacauc

SEQ ID NO: 284128 - RNA, 18 nt, Artificial Sequence
  Synthetic
uaaaaaaauuuucacauc

SEQ ID NO: 284129 - RNA, 19 nt, Artificial Sequence
  Synthetic
guaaaaaaauuuucacauc

SEQ ID NO: 284130 - RNA, 20 nt, Artificial Sequence
  Synthetic
aguaaaaaaauuuucacauc

SEQ ID NO: 284131 - RNA, 21 nt, Artificial Sequence
  Synthetic
gaguaaaaaaauuuucacauc

SEQ ID NO: 284132 - RNA, 22 nt, Artificial Sequence
  Synthetic
agaguaaaaaaauuuucacauc

SEQ ID NO: 284133 - RNA, 23 nt, Artificial Sequence
  Synthetic
aagaguaaaaaaauuuucacauc

SEQ ID NO: 284134 - RNA, 24 nt, Artificial Sequence
  Synthetic
uaagaguaaaaaaauuuucacauc

SEQ ID NO: 284135 - RNA, 18 nt, Artificial Sequence
  Synthetic
uaggugaacugagacauc

SEQ ID NO: 284136 - RNA, 19 nt, Artificial Sequence
  Synthetic
guaggugaacugagacauc

SEQ ID NO: 284137 - RNA, 20 nt, Artificial Sequence
  Synthetic
uguaggugaacugagacauc

SEQ ID NO: 284138 - RNA, 21 nt, Artificial Sequence
  Synthetic
cuguaggugaacugagacauc

SEQ ID NO: 284139 - RNA, 22 nt, Artificial Sequence
  Synthetic
ucuguaggugaacugagacauc

SEQ ID NO: 284140 - RNA, 23 nt, Artificial Sequence
  Synthetic
uucuguaggugaacugagacauc

SEQ ID NO: 284141 - RNA, 24 nt, Artificial Sequence
  Synthetic
uuucuguaggugaacugagacauc

SEQ ID NO: 284142 - RNA, 18 nt, Artificial Sequence
  Synthetic
gacuucugccuggacauc

SEQ ID NO: 284143 - RNA, 19 nt, Artificial Sequence
  Synthetic
agacuucugccuggacauc

SEQ ID NO: 284144 - RNA, 20 nt, Artificial Sequence
  Synthetic
cagacuucugccuggacauc

SEQ ID NO: 284145 - RNA, 21 nt, Artificial Sequence
  Synthetic
gcagacuucugccuggacauc

SEQ ID NO: 284146 - RNA, 22 nt, Artificial Sequence
  Synthetic
agcagacuucugccuggacauc

SEQ ID NO: 284147 - RNA, 23 nt, Artificial Sequence
  Synthetic
cagcagacuucugccuggacauc

SEQ ID NO: 284148 - RNA, 24 nt, Artificial Sequence
  Synthetic
gcagcagacuucugccuggacauc

SEQ ID NO: 284149 - RNA, 18 nt, Artificial Sequence
  Synthetic
gaucccucccaugacauc

SEQ ID NO: 284150 - RNA, 19 nt, Artificial Sequence
  Synthetic
ggaucccucccaugacauc

SEQ ID NO: 284151 - RNA, 20 nt, Artificial Sequence
  Synthetic
uggaucccucccaugacauc

SEQ ID NO: 284152 - RNA, 21 nt, Artificial Sequence
  Synthetic
cuggaucccucccaugacauc

SEQ ID NO: 284153 - RNA, 22 nt, Artificial Sequence
  Synthetic
acuggaucccucccaugacauc

SEQ ID NO: 284154 - RNA, 23 nt, Artificial Sequence
  Synthetic
cacuggaucccucccaugacauc

SEQ ID NO: 284155 - RNA, 24 nt, Artificial Sequence
  Synthetic
ccacuggaucccucccaugacauc

SEQ ID NO: 284156 - RNA, 18 nt, Artificial Sequence
  Synthetic
aaagauauaauauacauc

SEQ ID NO: 284157 - RNA, 19 nt, Artificial Sequence
  Synthetic
aaaagauauaauauacauc

SEQ ID NO: 284158 - RNA, 20 nt, Artificial Sequence
  Synthetic
uaaaagauauaauauacauc

SEQ ID NO: 284159 - RNA, 21 nt, Artificial Sequence
  Synthetic
uuaaaagauauaauauacauc

SEQ ID NO: 284160 - RNA, 22 nt, Artificial Sequence
  Synthetic
auuaaaagauauaauauacauc

SEQ ID NO: 284161 - RNA, 23 nt, Artificial Sequence
  Synthetic
uauuaaaagauauaauauacauc

SEQ ID NO: 284162 - RNA, 24 nt, Artificial Sequence
  Synthetic
auauuaaaagauauaauauacauc

SEQ ID NO: 284163 - RNA, 18 nt, Artificial Sequence
  Synthetic
aaaugccuauuauacauc

SEQ ID NO: 284164 - RNA, 19 nt, Artificial Sequence
  Synthetic
gaaaugccuauuauacauc

SEQ ID NO: 284165 - RNA, 20 nt, Artificial Sequence
  Synthetic
ugaaaugccuauuauacauc

SEQ ID NO: 284166 - RNA, 21 nt, Artificial Sequence
  Synthetic
uugaaaugccuauuauacauc

SEQ ID NO: 284167 - RNA, 22 nt, Artificial Sequence
  Synthetic
uuugaaaugccuauuauacauc

SEQ ID NO: 284168 - RNA, 23 nt, Artificial Sequence
  Synthetic
auuugaaaugccuauuauacauc

SEQ ID NO: 284169 - RNA, 24 nt, Artificial Sequence
  Synthetic
cauuugaaaugccuauuauacauc

SEQ ID NO: 284170 - RNA, 18 nt, Artificial Sequence
  Synthetic
aaggaaauaaaguacauc

SEQ ID NO: 284171 - RNA, 19 nt, Artificial Sequence
  Synthetic
aaaggaaauaaaguacauc

SEQ ID NO: 284172 - RNA, 20 nt, Artificial Sequence
  Synthetic
gaaaggaaauaaaguacauc

SEQ ID NO: 284173 - RNA, 21 nt, Artificial Sequence
  Synthetic
ugaaaggaaauaaaguacauc

SEQ ID NO: 284174 - RNA, 22 nt, Artificial Sequence
  Synthetic
augaaaggaaauaaaguacauc

SEQ ID NO: 284175 - RNA, 23 nt, Artificial Sequence
  Synthetic
aaugaaaggaaauaaaguacauc

SEQ ID NO: 284176 - RNA, 24 nt, Artificial Sequence
  Synthetic
aaaugaaaggaaauaaaguacauc

SEQ ID NO: 284177 - RNA, 18 nt, Artificial Sequence
  Synthetic
cauuuuugguuguacauc

SEQ ID NO: 284178 - RNA, 19 nt, Artificial Sequence
  Synthetic
acauuuuugguuguacauc

SEQ ID NO: 284179 - RNA, 20 nt, Artificial Sequence
  Synthetic
gacauuuuugguuguacauc

SEQ ID NO: 284180 - RNA, 21 nt, Artificial Sequence
  Synthetic
agacauuuuugguuguacauc

SEQ ID NO: 284181 - RNA, 22 nt, Artificial Sequence
  Synthetic
gagacauuuuugguuguacauc

SEQ ID NO: 284182 - RNA, 23 nt, Artificial Sequence
  Synthetic
ggagacauuuuugguuguacauc

SEQ ID NO: 284183 - RNA, 24 nt, Artificial Sequence
  Synthetic
aggagacauuuuugguuguacauc

SEQ ID NO: 284184 - RNA, 18 nt, Artificial Sequence
  Synthetic
agcaacaucagcaccauc

SEQ ID NO: 284185 - RNA, 19 nt, Artificial Sequence
  Synthetic
cagcaacaucagcaccauc

SEQ ID NO: 284186 - RNA, 20 nt, Artificial Sequence
  Synthetic
ccagcaacaucagcaccauc

SEQ ID NO: 284187 - RNA, 21 nt, Artificial Sequence
  Synthetic
accagcaacaucagcaccauc

SEQ ID NO: 284188 - RNA, 22 nt, Artificial Sequence
  Synthetic
gaccagcaacaucagcaccauc

SEQ ID NO: 284189 - RNA, 23 nt, Artificial Sequence
  Synthetic
ggaccagcaacaucagcaccauc

SEQ ID NO: 284190 - RNA, 24 nt, Artificial Sequence
  Synthetic
uggaccagcaacaucagcaccauc

SEQ ID NO: 284191 - RNA, 18 nt, Artificial Sequence
  Synthetic
gcaggagaugucaccauc

SEQ ID NO: 284192 - RNA, 19 nt, Artificial Sequence
  Synthetic
agcaggagaugucaccauc

SEQ ID NO: 284193 - RNA, 20 nt, Artificial Sequence
  Synthetic
cagcaggagaugucaccauc

SEQ ID NO: 284194 - RNA, 21 nt, Artificial Sequence
  Synthetic
gcagcaggagaugucaccauc

SEQ ID NO: 284195 - RNA, 22 nt, Artificial Sequence
  Synthetic
ggcagcaggagaugucaccauc

SEQ ID NO: 284196 - RNA, 23 nt, Artificial Sequence
  Synthetic
aggcagcaggagaugucaccauc

SEQ ID NO: 284197 - RNA, 24 nt, Artificial Sequence
  Synthetic
caggcagcaggagaugucaccauc

SEQ ID NO: 284198 - RNA, 18 nt, Artificial Sequence
  Synthetic
ugaacuagagagaccauc

SEQ ID NO: 284199 - RNA, 19 nt, Artificial Sequence
  Synthetic
cugaacuagagagaccauc

SEQ ID NO: 284200 - RNA, 20 nt, Artificial Sequence
  Synthetic
gcugaacuagagagaccauc

SEQ ID NO: 284201 - RNA, 21 nt, Artificial Sequence
  Synthetic
cgcugaacuagagagaccauc

SEQ ID NO: 284202 - RNA, 22 nt, Artificial Sequence
  Synthetic
ccgcugaacuagagagaccauc

SEQ ID NO: 284203 - RNA, 23 nt, Artificial Sequence
  Synthetic
uccgcugaacuagagagaccauc

SEQ ID NO: 284204 - RNA, 24 nt, Artificial Sequence
  Synthetic
uuccgcugaacuagagagaccauc

SEQ ID NO: 284205 - RNA, 18 nt, Artificial Sequence
  Synthetic
agagguauagguaccauc

SEQ ID NO: 284206 - RNA, 19 nt, Artificial Sequence
  Synthetic
uagagguauagguaccauc

SEQ ID NO: 284207 - RNA, 20 nt, Artificial Sequence
  Synthetic
cuagagguauagguaccauc

SEQ ID NO: 284208 - RNA, 21 nt, Artificial Sequence
  Synthetic
ucuagagguauagguaccauc

SEQ ID NO: 284209 - RNA, 22 nt, Artificial Sequence
  Synthetic
cucuagagguauagguaccauc

SEQ ID NO: 284210 - RNA, 23 nt, Artificial Sequence
  Synthetic
acucuagagguauagguaccauc

SEQ ID NO: 284211 - RNA, 24 nt, Artificial Sequence
  Synthetic
aacucuagagguauagguaccauc

SEQ ID NO: 284212 - RNA, 18 nt, Artificial Sequence
  Synthetic
uuuacuagacuuaccauc

SEQ ID NO: 284213 - RNA, 19 nt, Artificial Sequence
  Synthetic
uuuuacuagacuuaccauc

SEQ ID NO: 284214 - RNA, 20 nt, Artificial Sequence
  Synthetic
guuuuacuagacuuaccauc

SEQ ID NO: 284215 - RNA, 21 nt, Artificial Sequence
  Synthetic
cguuuuacuagacuuaccauc

SEQ ID NO: 284216 - RNA, 22 nt, Artificial Sequence
  Synthetic
ccguuuuacuagacuuaccauc

SEQ ID NO: 284217 - RNA, 23 nt, Artificial Sequence
  Synthetic
accguuuuacuagacuuaccauc

SEQ ID NO: 284218 - RNA, 24 nt, Artificial Sequence
  Synthetic
caccguuuuacuagacuuaccauc

SEQ ID NO: 284219 - RNA, 18 nt, Artificial Sequence
  Synthetic
cuaaucucuuuacccauc

SEQ ID NO: 284220 - RNA, 19 nt, Artificial Sequence
  Synthetic
ucuaaucucuuuacccauc

SEQ ID NO: 284221 - RNA, 20 nt, Artificial Sequence
  Synthetic
uucuaaucucuuuacccauc

SEQ ID NO: 284222 - RNA, 21 nt, Artificial Sequence
  Synthetic
uuucuaaucucuuuacccauc

SEQ ID NO: 284223 - RNA, 22 nt, Artificial Sequence
  Synthetic
cuuucuaaucucuuuacccauc

SEQ ID NO: 284224 - RNA, 23 nt, Artificial Sequence
  Synthetic
gcuuucuaaucucuuuacccauc

SEQ ID NO: 284225 - RNA, 24 nt, Artificial Sequence
  Synthetic
ggcuuucuaaucucuuuacccauc

SEQ ID NO: 284226 - RNA, 18 nt, Artificial Sequence
  Synthetic
agucugcucaaccccauc

SEQ ID NO: 284227 - RNA, 19 nt, Artificial Sequence
  Synthetic
uagucugcucaaccccauc

SEQ ID NO: 284228 - RNA, 20 nt, Artificial Sequence
  Synthetic
uuagucugcucaaccccauc

SEQ ID NO: 284229 - RNA, 21 nt, Artificial Sequence
  Synthetic
uuuagucugcucaaccccauc

SEQ ID NO: 284230 - RNA, 22 nt, Artificial Sequence
  Synthetic
cuuuagucugcucaaccccauc

SEQ ID NO: 284231 - RNA, 23 nt, Artificial Sequence
  Synthetic
ccuuuagucugcucaaccccauc

SEQ ID NO: 284232 - RNA, 24 nt, Artificial Sequence
  Synthetic
uccuuuagucugcucaaccccauc

SEQ ID NO: 284233 - RNA, 18 nt, Artificial Sequence
  Synthetic
uuuugacucccccccauc

SEQ ID NO: 284234 - RNA, 19 nt, Artificial Sequence
  Synthetic
uuuuugacucccccccauc

SEQ ID NO: 284235 - RNA, 20 nt, Artificial Sequence
  Synthetic
cuuuuugacucccccccauc

SEQ ID NO: 284236 - RNA, 21 nt, Artificial Sequence
  Synthetic
ucuuuuugacucccccccauc

SEQ ID NO: 284237 - RNA, 22 nt, Artificial Sequence
  Synthetic
uucuuuuugacucccccccauc

SEQ ID NO: 284238 - RNA, 23 nt, Artificial Sequence
  Synthetic
uuucuuuuugacucccccccauc

SEQ ID NO: 284239 - RNA, 24 nt, Artificial Sequence
  Synthetic
cuuucuuuuugacucccccccauc

SEQ ID NO: 284240 - RNA, 18 nt, Artificial Sequence
  Synthetic
cacugcaaccuccccauc

SEQ ID NO: 284241 - RNA, 19 nt, Artificial Sequence
  Synthetic
ucacugcaaccuccccauc

SEQ ID NO: 284242 - RNA, 20 nt, Artificial Sequence
  Synthetic
cucacugcaaccuccccauc

SEQ ID NO: 284243 - RNA, 21 nt, Artificial Sequence
  Synthetic
gcucacugcaaccuccccauc

SEQ ID NO: 284244 - RNA, 22 nt, Artificial Sequence
  Synthetic
agcucacugcaaccuccccauc

SEQ ID NO: 284245 - RNA, 23 nt, Artificial Sequence
  Synthetic
cagcucacugcaaccuccccauc

SEQ ID NO: 284246 - RNA, 24 nt, Artificial Sequence
  Synthetic
acagcucacugcaaccuccccauc

SEQ ID NO: 284247 - RNA, 18 nt, Artificial Sequence
  Synthetic
auguaaaacaacgccauc

SEQ ID NO: 284248 - RNA, 19 nt, Artificial Sequence
  Synthetic
uauguaaaacaacgccauc

SEQ ID NO: 284249 - RNA, 20 nt, Artificial Sequence
  Synthetic
uuauguaaaacaacgccauc

SEQ ID NO: 284250 - RNA, 21 nt, Artificial Sequence
  Synthetic
uuuauguaaaacaacgccauc

SEQ ID NO: 284251 - RNA, 22 nt, Artificial Sequence
  Synthetic
uuuuauguaaaacaacgccauc

SEQ ID NO: 284252 - RNA, 23 nt, Artificial Sequence
  Synthetic
auuuuauguaaaacaacgccauc

SEQ ID NO: 284253 - RNA, 24 nt, Artificial Sequence
  Synthetic
uauuuuauguaaaacaacgccauc

SEQ ID NO: 284254 - RNA, 18 nt, Artificial Sequence
  Synthetic
auuaauuagcaggccauc

SEQ ID NO: 284255 - RNA, 19 nt, Artificial Sequence
  Synthetic
aauuaauuagcaggccauc

SEQ ID NO: 284256 - RNA, 20 nt, Artificial Sequence
  Synthetic
caauuaauuagcaggccauc

SEQ ID NO: 284257 - RNA, 21 nt, Artificial Sequence
  Synthetic
acaauuaauuagcaggccauc

SEQ ID NO: 284258 - RNA, 22 nt, Artificial Sequence
  Synthetic
aacaauuaauuagcaggccauc

SEQ ID NO: 284259 - RNA, 23 nt, Artificial Sequence
  Synthetic
caacaauuaauuagcaggccauc

SEQ ID NO: 284260 - RNA, 24 nt, Artificial Sequence
  Synthetic
ucaacaauuaauuagcaggccauc

SEQ ID NO: 284261 - RNA, 18 nt, Artificial Sequence
  Synthetic
uuggaaaaggaugccauc

SEQ ID NO: 284262 - RNA, 19 nt, Artificial Sequence
  Synthetic
auuggaaaaggaugccauc

SEQ ID NO: 284263 - RNA, 20 nt, Artificial Sequence
  Synthetic
uauuggaaaaggaugccauc

SEQ ID NO: 284264 - RNA, 21 nt, Artificial Sequence
  Synthetic
cuauuggaaaaggaugccauc

SEQ ID NO: 284265 - RNA, 22 nt, Artificial Sequence
  Synthetic
ucuauuggaaaaggaugccauc

SEQ ID NO: 284266 - RNA, 23 nt, Artificial Sequence
  Synthetic
uucuauuggaaaaggaugccauc

SEQ ID NO: 284267 - RNA, 24 nt, Artificial Sequence
  Synthetic
cuucuauuggaaaaggaugccauc

SEQ ID NO: 284268 - RNA, 18 nt, Artificial Sequence
  Synthetic
cucucccaggcugccauc

SEQ ID NO: 284269 - RNA, 19 nt, Artificial Sequence
  Synthetic
acucucccaggcugccauc

SEQ ID NO: 284270 - RNA, 20 nt, Artificial Sequence
  Synthetic
aacucucccaggcugccauc

SEQ ID NO: 284271 - RNA, 21 nt, Artificial Sequence
  Synthetic
uaacucucccaggcugccauc

SEQ ID NO: 284272 - RNA, 22 nt, Artificial Sequence
  Synthetic
auaacucucccaggcugccauc

SEQ ID NO: 284273 - RNA, 23 nt, Artificial Sequence
  Synthetic
aauaacucucccaggcugccauc

SEQ ID NO: 284274 - RNA, 24 nt, Artificial Sequence
  Synthetic
aaauaacucucccaggcugccauc

SEQ ID NO: 284275 - RNA, 18 nt, Artificial Sequence
  Synthetic
ugcagcuugcuugccauc

SEQ ID NO: 284276 - RNA, 19 nt, Artificial Sequence
  Synthetic
gugcagcuugcuugccauc

SEQ ID NO: 284277 - RNA, 20 nt, Artificial Sequence
  Synthetic
agugcagcuugcuugccauc

SEQ ID NO: 284278 - RNA, 21 nt, Artificial Sequence
  Synthetic
cagugcagcuugcuugccauc

SEQ ID NO: 284279 - RNA, 22 nt, Artificial Sequence
  Synthetic
ccagugcagcuugcuugccauc

SEQ ID NO: 284280 - RNA, 23 nt, Artificial Sequence
  Synthetic
cccagugcagcuugcuugccauc

SEQ ID NO: 284281 - RNA, 24 nt, Artificial Sequence
  Synthetic
ucccagugcagcuugcuugccauc

SEQ ID NO: 284282 - RNA, 18 nt, Artificial Sequence
  Synthetic
auauaaguaaaauccauc

SEQ ID NO: 284283 - RNA, 19 nt, Artificial Sequence
  Synthetic
aauauaaguaaaauccauc

SEQ ID NO: 284284 - RNA, 20 nt, Artificial Sequence
  Synthetic
gaauauaaguaaaauccauc

SEQ ID NO: 284285 - RNA, 21 nt, Artificial Sequence
  Synthetic
ugaauauaaguaaaauccauc

SEQ ID NO: 284286 - RNA, 22 nt, Artificial Sequence
  Synthetic
gugaauauaaguaaaauccauc

SEQ ID NO: 284287 - RNA, 23 nt, Artificial Sequence
  Synthetic
agugaauauaaguaaaauccauc

SEQ ID NO: 284288 - RNA, 24 nt, Artificial Sequence
  Synthetic
aagugaauauaaguaaaauccauc

SEQ ID NO: 284289 - RNA, 18 nt, Artificial Sequence
  Synthetic
uuucuucuauacuccauc

SEQ ID NO: 284290 - RNA, 19 nt, Artificial Sequence
  Synthetic
cuuucuucuauacuccauc

SEQ ID NO: 284291 - RNA, 20 nt, Artificial Sequence
  Synthetic
ucuuucuucuauacuccauc

SEQ ID NO: 284292 - RNA, 21 nt, Artificial Sequence
  Synthetic
uucuuucuucuauacuccauc

SEQ ID NO: 284293 - RNA, 22 nt, Artificial Sequence
  Synthetic
uuucuuucuucuauacuccauc

SEQ ID NO: 284294 - RNA, 23 nt, Artificial Sequence
  Synthetic
auuucuuucuucuauacuccauc

SEQ ID NO: 284295 - RNA, 24 nt, Artificial Sequence
  Synthetic
cauuucuuucuucuauacuccauc

SEQ ID NO: 284296 - RNA, 18 nt, Artificial Sequence
  Synthetic
auuuaccaaagguccauc

SEQ ID NO: 284297 - RNA, 19 nt, Artificial Sequence
  Synthetic
aauuuaccaaagguccauc

SEQ ID NO: 284298 - RNA, 20 nt, Artificial Sequence
  Synthetic
aaauuuaccaaagguccauc

SEQ ID NO: 284299 - RNA, 21 nt, Artificial Sequence
  Synthetic
gaaauuuaccaaagguccauc

SEQ ID NO: 284300 - RNA, 22 nt, Artificial Sequence
  Synthetic
ugaaauuuaccaaagguccauc

SEQ ID NO: 284301 - RNA, 23 nt, Artificial Sequence
  Synthetic
uugaaauuuaccaaagguccauc

SEQ ID NO: 284302 - RNA, 24 nt, Artificial Sequence
  Synthetic
guugaaauuuaccaaagguccauc

SEQ ID NO: 284303 - RNA, 18 nt, Artificial Sequence
  Synthetic
acauugacguauuccauc

SEQ ID NO: 284304 - RNA, 19 nt, Artificial Sequence
  Synthetic
cacauugacguauuccauc

SEQ ID NO: 284305 - RNA, 20 nt, Artificial Sequence
  Synthetic
acacauugacguauuccauc

SEQ ID NO: 284306 - RNA, 21 nt, Artificial Sequence
  Synthetic
cacacauugacguauuccauc

SEQ ID NO: 284307 - RNA, 22 nt, Artificial Sequence
  Synthetic
ccacacauugacguauuccauc

SEQ ID NO: 284308 - RNA, 23 nt, Artificial Sequence
  Synthetic
gccacacauugacguauuccauc

SEQ ID NO: 284309 - RNA, 24 nt, Artificial Sequence
  Synthetic
ugccacacauugacguauuccauc

SEQ ID NO: 284310 - RNA, 18 nt, Artificial Sequence
  Synthetic
uuuauuuucucuuccauc

SEQ ID NO: 284311 - RNA, 19 nt, Artificial Sequence
  Synthetic
cuuuauuuucucuuccauc

SEQ ID NO: 284312 - RNA, 20 nt, Artificial Sequence
  Synthetic
ccuuuauuuucucuuccauc

SEQ ID NO: 284313 - RNA, 21 nt, Artificial Sequence
  Synthetic
uccuuuauuuucucuuccauc

SEQ ID NO: 284314 - RNA, 22 nt, Artificial Sequence
  Synthetic
cuccuuuauuuucucuuccauc

SEQ ID NO: 284315 - RNA, 23 nt, Artificial Sequence
  Synthetic
acuccuuuauuuucucuuccauc

SEQ ID NO: 284316 - RNA, 24 nt, Artificial Sequence
  Synthetic
aacuccuuuauuuucucuuccauc

SEQ ID NO: 284317 - RNA, 18 nt, Artificial Sequence
  Synthetic
agacauaggguuuccauc

SEQ ID NO: 284318 - RNA, 19 nt, Artificial Sequence
  Synthetic
aagacauaggguuuccauc

SEQ ID NO: 284319 - RNA, 20 nt, Artificial Sequence
  Synthetic
gaagacauaggguuuccauc

SEQ ID NO: 284320 - RNA, 21 nt, Artificial Sequence
  Synthetic
ggaagacauaggguuuccauc

SEQ ID NO: 284321 - RNA, 22 nt, Artificial Sequence
  Synthetic
aggaagacauaggguuuccauc

SEQ ID NO: 284322 - RNA, 23 nt, Artificial Sequence
  Synthetic
gaggaagacauaggguuuccauc

SEQ ID NO: 284323 - RNA, 24 nt, Artificial Sequence
  Synthetic
ggaggaagacauaggguuuccauc

SEQ ID NO: 284324 - RNA, 18 nt, Artificial Sequence
  Synthetic
aaauacuacaaaagcauc

SEQ ID NO: 284325 - RNA, 19 nt, Artificial Sequence
  Synthetic
caaauacuacaaaagcauc

SEQ ID NO: 284326 - RNA, 20 nt, Artificial Sequence
  Synthetic
ucaaauacuacaaaagcauc

SEQ ID NO: 284327 - RNA, 21 nt, Artificial Sequence
  Synthetic
gucaaauacuacaaaagcauc

SEQ ID NO: 284328 - RNA, 22 nt, Artificial Sequence
  Synthetic
ugucaaauacuacaaaagcauc

SEQ ID NO: 284329 - RNA, 23 nt, Artificial Sequence
  Synthetic
gugucaaauacuacaaaagcauc

SEQ ID NO: 284330 - RNA, 24 nt, Artificial Sequence
  Synthetic
ggugucaaauacuacaaaagcauc

SEQ ID NO: 284331 - RNA, 18 nt, Artificial Sequence
  Synthetic
cuucuuucccaaagcauc

SEQ ID NO: 284332 - RNA, 19 nt, Artificial Sequence
  Synthetic
ccuucuuucccaaagcauc

SEQ ID NO: 284333 - RNA, 20 nt, Artificial Sequence
  Synthetic
accuucuuucccaaagcauc

SEQ ID NO: 284334 - RNA, 21 nt, Artificial Sequence
  Synthetic
gaccuucuuucccaaagcauc

SEQ ID NO: 284335 - RNA, 22 nt, Artificial Sequence
  Synthetic
ggaccuucuuucccaaagcauc

SEQ ID NO: 284336 - RNA, 23 nt, Artificial Sequence
  Synthetic
gggaccuucuuucccaaagcauc

SEQ ID NO: 284337 - RNA, 24 nt, Artificial Sequence
  Synthetic
agggaccuucuuucccaaagcauc

SEQ ID NO: 284338 - RNA, 18 nt, Artificial Sequence
  Synthetic
uuauacuccuaaagcauc

SEQ ID NO: 284339 - RNA, 19 nt, Artificial Sequence
  Synthetic
uuuauacuccuaaagcauc

SEQ ID NO: 284340 - RNA, 20 nt, Artificial Sequence
  Synthetic
cuuuauacuccuaaagcauc

SEQ ID NO: 284341 - RNA, 21 nt, Artificial Sequence
  Synthetic
ucuuuauacuccuaaagcauc

SEQ ID NO: 284342 - RNA, 22 nt, Artificial Sequence
  Synthetic
aucuuuauacuccuaaagcauc

SEQ ID NO: 284343 - RNA, 23 nt, Artificial Sequence
  Synthetic
caucuuuauacuccuaaagcauc

SEQ ID NO: 284344 - RNA, 24 nt, Artificial Sequence
  Synthetic
ucaucuuuauacuccuaaagcauc

SEQ ID NO: 284345 - RNA, 18 nt, Artificial Sequence
  Synthetic
gggucccagaucagcauc

SEQ ID NO: 284346 - RNA, 19 nt, Artificial Sequence
  Synthetic
ugggucccagaucagcauc

SEQ ID NO: 284347 - RNA, 20 nt, Artificial Sequence
  Synthetic
gugggucccagaucagcauc

SEQ ID NO: 284348 - RNA, 21 nt, Artificial Sequence
  Synthetic
ugugggucccagaucagcauc

SEQ ID NO: 284349 - RNA, 22 nt, Artificial Sequence
  Synthetic
gugugggucccagaucagcauc

SEQ ID NO: 284350 - RNA, 23 nt, Artificial Sequence
  Synthetic
agugugggucccagaucagcauc

SEQ ID NO: 284351 - RNA, 24 nt, Artificial Sequence
  Synthetic
aagugugggucccagaucagcauc

SEQ ID NO: 284352 - RNA, 18 nt, Artificial Sequence
  Synthetic
ccauuuguguagagcauc

SEQ ID NO: 284353 - RNA, 19 nt, Artificial Sequence
  Synthetic
accauuuguguagagcauc

SEQ ID NO: 284354 - RNA, 20 nt, Artificial Sequence
  Synthetic
aaccauuuguguagagcauc

SEQ ID NO: 284355 - RNA, 21 nt, Artificial Sequence
  Synthetic
aaaccauuuguguagagcauc

SEQ ID NO: 284356 - RNA, 22 nt, Artificial Sequence
  Synthetic
gaaaccauuuguguagagcauc

SEQ ID NO: 284357 - RNA, 23 nt, Artificial Sequence
  Synthetic
ggaaaccauuuguguagagcauc

SEQ ID NO: 284358 - RNA, 24 nt, Artificial Sequence
  Synthetic
uggaaaccauuuguguagagcauc

SEQ ID NO: 284359 - RNA, 18 nt, Artificial Sequence
  Synthetic
guuauuuccccuagcauc

SEQ ID NO: 284360 - RNA, 19 nt, Artificial Sequence
  Synthetic
aguuauuuccccuagcauc

SEQ ID NO: 284361 - RNA, 20 nt, Artificial Sequence
  Synthetic
gaguuauuuccccuagcauc

SEQ ID NO: 284362 - RNA, 21 nt, Artificial Sequence
  Synthetic
agaguuauuuccccuagcauc

SEQ ID NO: 284363 - RNA, 22 nt, Artificial Sequence
  Synthetic
cagaguuauuuccccuagcauc

SEQ ID NO: 284364 - RNA, 23 nt, Artificial Sequence
  Synthetic
ucagaguuauuuccccuagcauc

SEQ ID NO: 284365 - RNA, 24 nt, Artificial Sequence
  Synthetic
cucagaguuauuuccccuagcauc

SEQ ID NO: 284366 - RNA, 18 nt, Artificial Sequence
  Synthetic
accaauauuccuagcauc

SEQ ID NO: 284367 - RNA, 19 nt, Artificial Sequence
  Synthetic
aaccaauauuccuagcauc

SEQ ID NO: 284368 - RNA, 20 nt, Artificial Sequence
  Synthetic
caaccaauauuccuagcauc

SEQ ID NO: 284369 - RNA, 21 nt, Artificial Sequence
  Synthetic
acaaccaauauuccuagcauc

SEQ ID NO: 284370 - RNA, 22 nt, Artificial Sequence
  Synthetic
aacaaccaauauuccuagcauc

SEQ ID NO: 284371 - RNA, 23 nt, Artificial Sequence
  Synthetic
uaacaaccaauauuccuagcauc

SEQ ID NO: 284372 - RNA, 24 nt, Artificial Sequence
  Synthetic
uuaacaaccaauauuccuagcauc

SEQ ID NO: 284373 - RNA, 18 nt, Artificial Sequence
  Synthetic
gugauuauuauuagcauc

SEQ ID NO: 284374 - RNA, 19 nt, Artificial Sequence
  Synthetic
ugugauuauuauuagcauc

SEQ ID NO: 284375 - RNA, 20 nt, Artificial Sequence
  Synthetic
gugugauuauuauuagcauc

SEQ ID NO: 284376 - RNA, 21 nt, Artificial Sequence
  Synthetic
ugugugauuauuauuagcauc

SEQ ID NO: 284377 - RNA, 22 nt, Artificial Sequence
  Synthetic
cugugugauuauuauuagcauc

SEQ ID NO: 284378 - RNA, 23 nt, Artificial Sequence
  Synthetic
ccugugugauuauuauuagcauc

SEQ ID NO: 284379 - RNA, 24 nt, Artificial Sequence
  Synthetic
cccugugugauuauuauuagcauc

SEQ ID NO: 284380 - RNA, 18 nt, Artificial Sequence
  Synthetic
ugagaguuuaaaggcauc

SEQ ID NO: 284381 - RNA, 19 nt, Artificial Sequence
  Synthetic
cugagaguuuaaaggcauc

SEQ ID NO: 284382 - RNA, 20 nt, Artificial Sequence
  Synthetic
acugagaguuuaaaggcauc

SEQ ID NO: 284383 - RNA, 21 nt, Artificial Sequence
  Synthetic
cacugagaguuuaaaggcauc

SEQ ID NO: 284384 - RNA, 22 nt, Artificial Sequence
  Synthetic
acacugagaguuuaaaggcauc

SEQ ID NO: 284385 - RNA, 23 nt, Artificial Sequence
  Synthetic
gacacugagaguuuaaaggcauc

SEQ ID NO: 284386 - RNA, 24 nt, Artificial Sequence
  Synthetic
ugacacugagaguuuaaaggcauc

SEQ ID NO: 284387 - RNA, 18 nt, Artificial Sequence
  Synthetic
ggcgauuccucaggcauc

SEQ ID NO: 284388 - RNA, 19 nt, Artificial Sequence
  Synthetic
uggcgauuccucaggcauc

SEQ ID NO: 284389 - RNA, 20 nt, Artificial Sequence
  Synthetic
guggcgauuccucaggcauc

SEQ ID NO: 284390 - RNA, 21 nt, Artificial Sequence
  Synthetic
uguggcgauuccucaggcauc

SEQ ID NO: 284391 - RNA, 22 nt, Artificial Sequence
  Synthetic
guguggcgauuccucaggcauc

SEQ ID NO: 284392 - RNA, 23 nt, Artificial Sequence
  Synthetic
aguguggcgauuccucaggcauc

SEQ ID NO: 284393 - RNA, 24 nt, Artificial Sequence
  Synthetic
caguguggcgauuccucaggcauc

SEQ ID NO: 284394 - RNA, 18 nt, Artificial Sequence
  Synthetic
agcucugacagaggcauc

SEQ ID NO: 284395 - RNA, 19 nt, Artificial Sequence
  Synthetic
cagcucugacagaggcauc

SEQ ID NO: 284396 - RNA, 20 nt, Artificial Sequence
  Synthetic
ucagcucugacagaggcauc

SEQ ID NO: 284397 - RNA, 21 nt, Artificial Sequence
  Synthetic
uucagcucugacagaggcauc

SEQ ID NO: 284398 - RNA, 22 nt, Artificial Sequence
  Synthetic
uuucagcucugacagaggcauc

SEQ ID NO: 284399 - RNA, 23 nt, Artificial Sequence
  Synthetic
cuuucagcucugacagaggcauc

SEQ ID NO: 284400 - RNA, 24 nt, Artificial Sequence
  Synthetic
gcuuucagcucugacagaggcauc

SEQ ID NO: 284401 - RNA, 18 nt, Artificial Sequence
  Synthetic
acagccaaagguggcauc

SEQ ID NO: 284402 - RNA, 19 nt, Artificial Sequence
  Synthetic
uacagccaaagguggcauc

SEQ ID NO: 284403 - RNA, 20 nt, Artificial Sequence
  Synthetic
auacagccaaagguggcauc

SEQ ID NO: 284404 - RNA, 21 nt, Artificial Sequence
  Synthetic
gauacagccaaagguggcauc

SEQ ID NO: 284405 - RNA, 22 nt, Artificial Sequence
  Synthetic
agauacagccaaagguggcauc

SEQ ID NO: 284406 - RNA, 23 nt, Artificial Sequence
  Synthetic
gagauacagccaaagguggcauc

SEQ ID NO: 284407 - RNA, 24 nt, Artificial Sequence
  Synthetic
ggagauacagccaaagguggcauc

SEQ ID NO: 284408 - RNA, 18 nt, Artificial Sequence
  Synthetic
uugaugcucuguggcauc

SEQ ID NO: 284409 - RNA, 19 nt, Artificial Sequence
  Synthetic
guugaugcucuguggcauc

SEQ ID NO: 284410 - RNA, 20 nt, Artificial Sequence
  Synthetic
uguugaugcucuguggcauc

SEQ ID NO: 284411 - RNA, 21 nt, Artificial Sequence
  Synthetic
uuguugaugcucuguggcauc

SEQ ID NO: 284412 - RNA, 22 nt, Artificial Sequence
  Synthetic
cuuguugaugcucuguggcauc

SEQ ID NO: 284413 - RNA, 23 nt, Artificial Sequence
  Synthetic
ucuuguugaugcucuguggcauc

SEQ ID NO: 284414 - RNA, 24 nt, Artificial Sequence
  Synthetic
uucuuguugaugcucuguggcauc

SEQ ID NO: 284415 - RNA, 18 nt, Artificial Sequence
  Synthetic
ugaaaauucauuggcauc

SEQ ID NO: 284416 - RNA, 19 nt, Artificial Sequence
  Synthetic
uugaaaauucauuggcauc

SEQ ID NO: 284417 - RNA, 20 nt, Artificial Sequence
  Synthetic
uuugaaaauucauuggcauc

SEQ ID NO: 284418 - RNA, 21 nt, Artificial Sequence
  Synthetic
guuugaaaauucauuggcauc

SEQ ID NO: 284419 - RNA, 22 nt, Artificial Sequence
  Synthetic
aguuugaaaauucauuggcauc

SEQ ID NO: 284420 - RNA, 23 nt, Artificial Sequence
  Synthetic
uaguuugaaaauucauuggcauc

SEQ ID NO: 284421 - RNA, 24 nt, Artificial Sequence
  Synthetic
guaguuugaaaauucauuggcauc

SEQ ID NO: 284422 - RNA, 18 nt, Artificial Sequence
  Synthetic
acuuggggaaaaugcauc

SEQ ID NO: 284423 - RNA, 19 nt, Artificial Sequence
  Synthetic
aacuuggggaaaaugcauc

SEQ ID NO: 284424 - RNA, 20 nt, Artificial Sequence
  Synthetic
caacuuggggaaaaugcauc

SEQ ID NO: 284425 - RNA, 21 nt, Artificial Sequence
  Synthetic
ccaacuuggggaaaaugcauc

SEQ ID NO: 284426 - RNA, 22 nt, Artificial Sequence
  Synthetic
uccaacuuggggaaaaugcauc

SEQ ID NO: 284427 - RNA, 23 nt, Artificial Sequence
  Synthetic
cuccaacuuggggaaaaugcauc

SEQ ID NO: 284428 - RNA, 24 nt, Artificial Sequence
  Synthetic
acuccaacuuggggaaaaugcauc

SEQ ID NO: 284429 - RNA, 18 nt, Artificial Sequence
  Synthetic
uaguuugaaccaugcauc

SEQ ID NO: 284430 - RNA, 19 nt, Artificial Sequence
  Synthetic
auaguuugaaccaugcauc

SEQ ID NO: 284431 - RNA, 20 nt, Artificial Sequence
  Synthetic
gauaguuugaaccaugcauc

SEQ ID NO: 284432 - RNA, 21 nt, Artificial Sequence
  Synthetic
ugauaguuugaaccaugcauc

SEQ ID NO: 284433 - RNA, 22 nt, Artificial Sequence
  Synthetic
cugauaguuugaaccaugcauc

SEQ ID NO: 284434 - RNA, 23 nt, Artificial Sequence
  Synthetic
gcugauaguuugaaccaugcauc

SEQ ID NO: 284435 - RNA, 24 nt, Artificial Sequence
  Synthetic
ugcugauaguuugaaccaugcauc

SEQ ID NO: 284436 - RNA, 18 nt, Artificial Sequence
  Synthetic
ccagaagaacuaugcauc

SEQ ID NO: 284437 - RNA, 19 nt, Artificial Sequence
  Synthetic
accagaagaacuaugcauc

SEQ ID NO: 284438 - RNA, 20 nt, Artificial Sequence
  Synthetic
caccagaagaacuaugcauc

SEQ ID NO: 284439 - RNA, 21 nt, Artificial Sequence
  Synthetic
ccaccagaagaacuaugcauc

SEQ ID NO: 284440 - RNA, 22 nt, Artificial Sequence
  Synthetic
uccaccagaagaacuaugcauc

SEQ ID NO: 284441 - RNA, 23 nt, Artificial Sequence
  Synthetic
auccaccagaagaacuaugcauc

SEQ ID NO: 284442 - RNA, 24 nt, Artificial Sequence
  Synthetic
aauccaccagaagaacuaugcauc

SEQ ID NO: 284443 - RNA, 18 nt, Artificial Sequence
  Synthetic
ccauaugugguaugcauc

SEQ ID NO: 284444 - RNA, 19 nt, Artificial Sequence
  Synthetic
cccauaugugguaugcauc

SEQ ID NO: 284445 - RNA, 20 nt, Artificial Sequence
  Synthetic
gcccauaugugguaugcauc

SEQ ID NO: 284446 - RNA, 21 nt, Artificial Sequence
  Synthetic
agcccauaugugguaugcauc

SEQ ID NO: 284447 - RNA, 22 nt, Artificial Sequence
  Synthetic
uagcccauaugugguaugcauc

SEQ ID NO: 284448 - RNA, 23 nt, Artificial Sequence
  Synthetic
guagcccauaugugguaugcauc

SEQ ID NO: 284449 - RNA, 24 nt, Artificial Sequence
  Synthetic
uguagcccauaugugguaugcauc

SEQ ID NO: 284450 - RNA, 18 nt, Artificial Sequence
  Synthetic
auguaauuuaucugcauc

SEQ ID NO: 284451 - RNA, 19 nt, Artificial Sequence
  Synthetic
gauguaauuuaucugcauc

SEQ ID NO: 284452 - RNA, 20 nt, Artificial Sequence
  Synthetic
agauguaauuuaucugcauc

SEQ ID NO: 284453 - RNA, 21 nt, Artificial Sequence
  Synthetic
gagauguaauuuaucugcauc

SEQ ID NO: 284454 - RNA, 22 nt, Artificial Sequence
  Synthetic
ugagauguaauuuaucugcauc

SEQ ID NO: 284455 - RNA, 23 nt, Artificial Sequence
  Synthetic
cugagauguaauuuaucugcauc

SEQ ID NO: 284456 - RNA, 24 nt, Artificial Sequence
  Synthetic
acugagauguaauuuaucugcauc

SEQ ID NO: 284457 - RNA, 18 nt, Artificial Sequence
  Synthetic
uugggucucuagugcauc

SEQ ID NO: 284458 - RNA, 19 nt, Artificial Sequence
  Synthetic
guugggucucuagugcauc

SEQ ID NO: 284459 - RNA, 20 nt, Artificial Sequence
  Synthetic
aguugggucucuagugcauc

SEQ ID NO: 284460 - RNA, 21 nt, Artificial Sequence
  Synthetic
gaguugggucucuagugcauc

SEQ ID NO: 284461 - RNA, 22 nt, Artificial Sequence
  Synthetic
cgaguugggucucuagugcauc

SEQ ID NO: 284462 - RNA, 23 nt, Artificial Sequence
  Synthetic
ucgaguugggucucuagugcauc

SEQ ID NO: 284463 - RNA, 24 nt, Artificial Sequence
  Synthetic
gucgaguugggucucuagugcauc

SEQ ID NO: 284464 - RNA, 18 nt, Artificial Sequence
  Synthetic
gccuuuuguucuugcauc

SEQ ID NO: 284465 - RNA, 19 nt, Artificial Sequence
  Synthetic
ugccuuuuguucuugcauc

SEQ ID NO: 284466 - RNA, 20 nt, Artificial Sequence
  Synthetic
cugccuuuuguucuugcauc

SEQ ID NO: 284467 - RNA, 21 nt, Artificial Sequence
  Synthetic
gcugccuuuuguucuugcauc

SEQ ID NO: 284468 - RNA, 22 nt, Artificial Sequence
  Synthetic
ugcugccuuuuguucuugcauc

SEQ ID NO: 284469 - RNA, 23 nt, Artificial Sequence
  Synthetic
gugcugccuuuuguucuugcauc

SEQ ID NO: 284470 - RNA, 24 nt, Artificial Sequence
  Synthetic
ggugcugccuuuuguucuugcauc

SEQ ID NO: 284471 - RNA, 18 nt, Artificial Sequence
  Synthetic
aacauuugaaaaaucauc

SEQ ID NO: 284472 - RNA, 19 nt, Artificial Sequence
  Synthetic
gaacauuugaaaaaucauc

SEQ ID NO: 284473 - RNA, 20 nt, Artificial Sequence
  Synthetic
ggaacauuugaaaaaucauc

SEQ ID NO: 284474 - RNA, 21 nt, Artificial Sequence
  Synthetic
gggaacauuugaaaaaucauc

SEQ ID NO: 284475 - RNA, 22 nt, Artificial Sequence
  Synthetic
ugggaacauuugaaaaaucauc

SEQ ID NO: 284476 - RNA, 23 nt, Artificial Sequence
  Synthetic
augggaacauuugaaaaaucauc

SEQ ID NO: 284477 - RNA, 24 nt, Artificial Sequence
  Synthetic
aaugggaacauuugaaaaaucauc

SEQ ID NO: 284478 - RNA, 18 nt, Artificial Sequence
  Synthetic
aagagccagaacaucauc

SEQ ID NO: 284479 - RNA, 19 nt, Artificial Sequence
  Synthetic
aaagagccagaacaucauc

SEQ ID NO: 284480 - RNA, 20 nt, Artificial Sequence
  Synthetic
uaaagagccagaacaucauc

SEQ ID NO: 284481 - RNA, 21 nt, Artificial Sequence
  Synthetic
uuaaagagccagaacaucauc

SEQ ID NO: 284482 - RNA, 22 nt, Artificial Sequence
  Synthetic
cuuaaagagccagaacaucauc

SEQ ID NO: 284483 - RNA, 23 nt, Artificial Sequence
  Synthetic
ucuuaaagagccagaacaucauc

SEQ ID NO: 284484 - RNA, 24 nt, Artificial Sequence
  Synthetic
uucuuaaagagccagaacaucauc

SEQ ID NO: 284485 - RNA, 18 nt, Artificial Sequence
  Synthetic
ggauggagaaccaucauc

SEQ ID NO: 284486 - RNA, 19 nt, Artificial Sequence
  Synthetic
gggauggagaaccaucauc

SEQ ID NO: 284487 - RNA, 20 nt, Artificial Sequence
  Synthetic
ggggauggagaaccaucauc

SEQ ID NO: 284488 - RNA, 21 nt, Artificial Sequence
  Synthetic
uggggauggagaaccaucauc

SEQ ID NO: 284489 - RNA, 22 nt, Artificial Sequence
  Synthetic
guggggauggagaaccaucauc

SEQ ID NO: 284490 - RNA, 23 nt, Artificial Sequence
  Synthetic
uguggggauggagaaccaucauc

SEQ ID NO: 284491 - RNA, 24 nt, Artificial Sequence
  Synthetic
uuguggggauggagaaccaucauc

SEQ ID NO: 284492 - RNA, 18 nt, Artificial Sequence
  Synthetic
ccaucaucagccaucauc

SEQ ID NO: 284493 - RNA, 19 nt, Artificial Sequence
  Synthetic
accaucaucagccaucauc

SEQ ID NO: 284494 - RNA, 20 nt, Artificial Sequence
  Synthetic
uaccaucaucagccaucauc

SEQ ID NO: 284495 - RNA, 21 nt, Artificial Sequence
  Synthetic
uuaccaucaucagccaucauc

SEQ ID NO: 284496 - RNA, 22 nt, Artificial Sequence
  Synthetic
uuuaccaucaucagccaucauc

SEQ ID NO: 284497 - RNA, 23 nt, Artificial Sequence
  Synthetic
auuuaccaucaucagccaucauc

SEQ ID NO: 284498 - RNA, 24 nt, Artificial Sequence
  Synthetic
aauuuaccaucaucagccaucauc

SEQ ID NO: 284499 - RNA, 18 nt, Artificial Sequence
  Synthetic
guguauucuuccaucauc

SEQ ID NO: 284500 - RNA, 19 nt, Artificial Sequence
  Synthetic
cguguauucuuccaucauc

SEQ ID NO: 284501 - RNA, 20 nt, Artificial Sequence
  Synthetic
ucguguauucuuccaucauc

SEQ ID NO: 284502 - RNA, 21 nt, Artificial Sequence
  Synthetic
uucguguauucuuccaucauc

SEQ ID NO: 284503 - RNA, 22 nt, Artificial Sequence
  Synthetic
guucguguauucuuccaucauc

SEQ ID NO: 284504 - RNA, 23 nt, Artificial Sequence
  Synthetic
uguucguguauucuuccaucauc

SEQ ID NO: 284505 - RNA, 24 nt, Artificial Sequence
  Synthetic
guguucguguauucuuccaucauc

SEQ ID NO: 284506 - RNA, 18 nt, Artificial Sequence
  Synthetic
gacaucauuuccaucauc

SEQ ID NO: 284507 - RNA, 19 nt, Artificial Sequence
  Synthetic
ugacaucauuuccaucauc

SEQ ID NO: 284508 - RNA, 20 nt, Artificial Sequence
  Synthetic
cugacaucauuuccaucauc

SEQ ID NO: 284509 - RNA, 21 nt, Artificial Sequence
  Synthetic
acugacaucauuuccaucauc

SEQ ID NO: 284510 - RNA, 22 nt, Artificial Sequence
  Synthetic
uacugacaucauuuccaucauc

SEQ ID NO: 284511 - RNA, 23 nt, Artificial Sequence
  Synthetic
cuacugacaucauuuccaucauc

SEQ ID NO: 284512 - RNA, 24 nt, Artificial Sequence
  Synthetic
ucuacugacaucauuuccaucauc

SEQ ID NO: 284513 - RNA, 18 nt, Artificial Sequence
  Synthetic
augaucauuagcaucauc

SEQ ID NO: 284514 - RNA, 19 nt, Artificial Sequence
  Synthetic
aaugaucauuagcaucauc

SEQ ID NO: 284515 - RNA, 20 nt, Artificial Sequence
  Synthetic
uaaugaucauuagcaucauc

SEQ ID NO: 284516 - RNA, 21 nt, Artificial Sequence
  Synthetic
cuaaugaucauuagcaucauc

SEQ ID NO: 284517 - RNA, 22 nt, Artificial Sequence
  Synthetic
gcuaaugaucauuagcaucauc

SEQ ID NO: 284518 - RNA, 23 nt, Artificial Sequence
  Synthetic
cgcuaaugaucauuagcaucauc

SEQ ID NO: 284519 - RNA, 24 nt, Artificial Sequence
  Synthetic
acgcuaaugaucauuagcaucauc

SEQ ID NO: 284520 - RNA, 18 nt, Artificial Sequence
  Synthetic
uaauucagcaucaucauc

SEQ ID NO: 284521 - RNA, 19 nt, Artificial Sequence
  Synthetic
cuaauucagcaucaucauc

SEQ ID NO: 284522 - RNA, 20 nt, Artificial Sequence
  Synthetic
gcuaauucagcaucaucauc

SEQ ID NO: 284523 - RNA, 21 nt, Artificial Sequence
  Synthetic
ggcuaauucagcaucaucauc

SEQ ID NO: 284524 - RNA, 22 nt, Artificial Sequence
  Synthetic
uggcuaauucagcaucaucauc

SEQ ID NO: 284525 - RNA, 23 nt, Artificial Sequence
  Synthetic
cuggcuaauucagcaucaucauc

SEQ ID NO: 284526 - RNA, 24 nt, Artificial Sequence
  Synthetic
ccuggcuaauucagcaucaucauc

SEQ ID NO: 284527 - RNA, 18 nt, Artificial Sequence
  Synthetic
gagaacucacucaucauc

SEQ ID NO: 284528 - RNA, 19 nt, Artificial Sequence
  Synthetic
agagaacucacucaucauc

SEQ ID NO: 284529 - RNA, 20 nt, Artificial Sequence
  Synthetic
cagagaacucacucaucauc

SEQ ID NO: 284530 - RNA, 21 nt, Artificial Sequence
  Synthetic
ucagagaacucacucaucauc

SEQ ID NO: 284531 - RNA, 22 nt, Artificial Sequence
  Synthetic
cucagagaacucacucaucauc

SEQ ID NO: 284532 - RNA, 23 nt, Artificial Sequence
  Synthetic
ucucagagaacucacucaucauc

SEQ ID NO: 284533 - RNA, 24 nt, Artificial Sequence
  Synthetic
aucucagagaacucacucaucauc

SEQ ID NO: 284534 - RNA, 18 nt, Artificial Sequence
  Synthetic
caggcaugagagaucauc

SEQ ID NO: 284535 - RNA, 19 nt, Artificial Sequence
  Synthetic
gcaggcaugagagaucauc

SEQ ID NO: 284536 - RNA, 20 nt, Artificial Sequence
  Synthetic
ugcaggcaugagagaucauc

SEQ ID NO: 284537 - RNA, 21 nt, Artificial Sequence
  Synthetic
uugcaggcaugagagaucauc

SEQ ID NO: 284538 - RNA, 22 nt, Artificial Sequence
  Synthetic
cuugcaggcaugagagaucauc

SEQ ID NO: 284539 - RNA, 23 nt, Artificial Sequence
  Synthetic
acuugcaggcaugagagaucauc

SEQ ID NO: 284540 - RNA, 24 nt, Artificial Sequence
  Synthetic
gacuugcaggcaugagagaucauc

SEQ ID NO: 284541 - RNA, 18 nt, Artificial Sequence
  Synthetic
auccaccucauuaucauc

SEQ ID NO: 284542 - RNA, 19 nt, Artificial Sequence
  Synthetic
aauccaccucauuaucauc

SEQ ID NO: 284543 - RNA, 20 nt, Artificial Sequence
  Synthetic
aaauccaccucauuaucauc

SEQ ID NO: 284544 - RNA, 21 nt, Artificial Sequence
  Synthetic
caaauccaccucauuaucauc

SEQ ID NO: 284545 - RNA, 22 nt, Artificial Sequence
  Synthetic
ccaaauccaccucauuaucauc

SEQ ID NO: 284546 - RNA, 23 nt, Artificial Sequence
  Synthetic
gccaaauccaccucauuaucauc

SEQ ID NO: 284547 - RNA, 24 nt, Artificial Sequence
  Synthetic
ggccaaauccaccucauuaucauc

SEQ ID NO: 284548 - RNA, 18 nt, Artificial Sequence
  Synthetic
acucucuuucuuaucauc

SEQ ID NO: 284549 - RNA, 19 nt, Artificial Sequence
  Synthetic
cacucucuuucuuaucauc

SEQ ID NO: 284550 - RNA, 20 nt, Artificial Sequence
  Synthetic
gcacucucuuucuuaucauc

SEQ ID NO: 284551 - RNA, 21 nt, Artificial Sequence
  Synthetic
ugcacucucuuucuuaucauc

SEQ ID NO: 284552 - RNA, 22 nt, Artificial Sequence
  Synthetic
augcacucucuuucuuaucauc

SEQ ID NO: 284553 - RNA, 23 nt, Artificial Sequence
  Synthetic
caugcacucucuuucuuaucauc

SEQ ID NO: 284554 - RNA, 24 nt, Artificial Sequence
  Synthetic
ccaugcacucucuuucuuaucauc

SEQ ID NO: 284555 - RNA, 18 nt, Artificial Sequence
  Synthetic
caucaagcgcagcucauc

SEQ ID NO: 284556 - RNA, 19 nt, Artificial Sequence
  Synthetic
gcaucaagcgcagcucauc

SEQ ID NO: 284557 - RNA, 20 nt, Artificial Sequence
  Synthetic
ugcaucaagcgcagcucauc

SEQ ID NO: 284558 - RNA, 21 nt, Artificial Sequence
  Synthetic
augcaucaagcgcagcucauc

SEQ ID NO: 284559 - RNA, 22 nt, Artificial Sequence
  Synthetic
gaugcaucaagcgcagcucauc

SEQ ID NO: 284560 - RNA, 23 nt, Artificial Sequence
  Synthetic
agaugcaucaagcgcagcucauc

SEQ ID NO: 284561 - RNA, 24 nt, Artificial Sequence
  Synthetic
aagaugcaucaagcgcagcucauc

SEQ ID NO: 284562 - RNA, 18 nt, Artificial Sequence
  Synthetic
gugguagauuagcucauc

SEQ ID NO: 284563 - RNA, 19 nt, Artificial Sequence
  Synthetic
ggugguagauuagcucauc

SEQ ID NO: 284564 - RNA, 20 nt, Artificial Sequence
  Synthetic
aggugguagauuagcucauc

SEQ ID NO: 284565 - RNA, 21 nt, Artificial Sequence
  Synthetic
aaggugguagauuagcucauc

SEQ ID NO: 284566 - RNA, 22 nt, Artificial Sequence
  Synthetic
gaaggugguagauuagcucauc

SEQ ID NO: 284567 - RNA, 23 nt, Artificial Sequence
  Synthetic
agaaggugguagauuagcucauc

SEQ ID NO: 284568 - RNA, 24 nt, Artificial Sequence
  Synthetic
gagaaggugguagauuagcucauc

SEQ ID NO: 284569 - RNA, 18 nt, Artificial Sequence
  Synthetic
ccuaggccucaucucauc

SEQ ID NO: 284570 - RNA, 19 nt, Artificial Sequence
  Synthetic
gccuaggccucaucucauc

SEQ ID NO: 284571 - RNA, 20 nt, Artificial Sequence
  Synthetic
agccuaggccucaucucauc

SEQ ID NO: 284572 - RNA, 21 nt, Artificial Sequence
  Synthetic
cagccuaggccucaucucauc

SEQ ID NO: 284573 - RNA, 22 nt, Artificial Sequence
  Synthetic
ucagccuaggccucaucucauc

SEQ ID NO: 284574 - RNA, 23 nt, Artificial Sequence
  Synthetic
uucagccuaggccucaucucauc

SEQ ID NO: 284575 - RNA, 24 nt, Artificial Sequence
  Synthetic
uuucagccuaggccucaucucauc

SEQ ID NO: 284576 - RNA, 18 nt, Artificial Sequence
  Synthetic
augggagguacucucauc

SEQ ID NO: 284577 - RNA, 19 nt, Artificial Sequence
  Synthetic
caugggagguacucucauc

SEQ ID NO: 284578 - RNA, 20 nt, Artificial Sequence
  Synthetic
ucaugggagguacucucauc

SEQ ID NO: 284579 - RNA, 21 nt, Artificial Sequence
  Synthetic
cucaugggagguacucucauc

SEQ ID NO: 284580 - RNA, 22 nt, Artificial Sequence
  Synthetic
gcucaugggagguacucucauc

SEQ ID NO: 284581 - RNA, 23 nt, Artificial Sequence
  Synthetic
ggcucaugggagguacucucauc

SEQ ID NO: 284582 - RNA, 24 nt, Artificial Sequence
  Synthetic
aggcucaugggagguacucucauc

SEQ ID NO: 284583 - RNA, 18 nt, Artificial Sequence
  Synthetic
caucgaaagucucucauc

SEQ ID NO: 284584 - RNA, 19 nt, Artificial Sequence
  Synthetic
acaucgaaagucucucauc

SEQ ID NO: 284585 - RNA, 20 nt, Artificial Sequence
  Synthetic
aacaucgaaagucucucauc

SEQ ID NO: 284586 - RNA, 21 nt, Artificial Sequence
  Synthetic
uaacaucgaaagucucucauc

SEQ ID NO: 284587 - RNA, 22 nt, Artificial Sequence
  Synthetic
uuaacaucgaaagucucucauc

SEQ ID NO: 284588 - RNA, 23 nt, Artificial Sequence
  Synthetic
uuuaacaucgaaagucucucauc

SEQ ID NO: 284589 - RNA, 24 nt, Artificial Sequence
  Synthetic
uuuuaacaucgaaagucucucauc

SEQ ID NO: 284590 - RNA, 18 nt, Artificial Sequence
  Synthetic
uucuuuugucgucucauc

SEQ ID NO: 284591 - RNA, 19 nt, Artificial Sequence
  Synthetic
auucuuuugucgucucauc

SEQ ID NO: 284592 - RNA, 20 nt, Artificial Sequence
  Synthetic
aauucuuuugucgucucauc

SEQ ID NO: 284593 - RNA, 21 nt, Artificial Sequence
  Synthetic
caauucuuuugucgucucauc

SEQ ID NO: 284594 - RNA, 22 nt, Artificial Sequence
  Synthetic
acaauucuuuugucgucucauc

SEQ ID NO: 284595 - RNA, 23 nt, Artificial Sequence
  Synthetic
cacaauucuuuugucgucucauc

SEQ ID NO: 284596 - RNA, 24 nt, Artificial Sequence
  Synthetic
gcacaauucuuuugucgucucauc

SEQ ID NO: 284597 - RNA, 18 nt, Artificial Sequence
  Synthetic
agucuagaaccagucauc

SEQ ID NO: 284598 - RNA, 19 nt, Artificial Sequence
  Synthetic
uagucuagaaccagucauc

SEQ ID NO: 284599 - RNA, 20 nt, Artificial Sequence
  Synthetic
uuagucuagaaccagucauc

SEQ ID NO: 284600 - RNA, 21 nt, Artificial Sequence
  Synthetic
cuuagucuagaaccagucauc

SEQ ID NO: 284601 - RNA, 22 nt, Artificial Sequence
  Synthetic
ucuuagucuagaaccagucauc

SEQ ID NO: 284602 - RNA, 23 nt, Artificial Sequence
  Synthetic
cucuuagucuagaaccagucauc

SEQ ID NO: 284603 - RNA, 24 nt, Artificial Sequence
  Synthetic
gcucuuagucuagaaccagucauc

SEQ ID NO: 284604 - RNA, 18 nt, Artificial Sequence
  Synthetic
agccucuggucagucauc

SEQ ID NO: 284605 - RNA, 19 nt, Artificial Sequence
  Synthetic
uagccucuggucagucauc

SEQ ID NO: 284606 - RNA, 20 nt, Artificial Sequence
  Synthetic
auagccucuggucagucauc

SEQ ID NO: 284607 - RNA, 21 nt, Artificial Sequence
  Synthetic
aauagccucuggucagucauc

SEQ ID NO: 284608 - RNA, 22 nt, Artificial Sequence
  Synthetic
gaauagccucuggucagucauc

SEQ ID NO: 284609 - RNA, 23 nt, Artificial Sequence
  Synthetic
ugaauagccucuggucagucauc

SEQ ID NO: 284610 - RNA, 24 nt, Artificial Sequence
  Synthetic
uugaauagccucuggucagucauc

SEQ ID NO: 284611 - RNA, 18 nt, Artificial Sequence
  Synthetic
cugaagaacugagucauc

SEQ ID NO: 284612 - RNA, 19 nt, Artificial Sequence
  Synthetic
acugaagaacugagucauc

SEQ ID NO: 284613 - RNA, 20 nt, Artificial Sequence
  Synthetic
aacugaagaacugagucauc

SEQ ID NO: 284614 - RNA, 21 nt, Artificial Sequence
  Synthetic
aaacugaagaacugagucauc

SEQ ID NO: 284615 - RNA, 22 nt, Artificial Sequence
  Synthetic
aaaacugaagaacugagucauc

SEQ ID NO: 284616 - RNA, 23 nt, Artificial Sequence
  Synthetic
caaaacugaagaacugagucauc

SEQ ID NO: 284617 - RNA, 24 nt, Artificial Sequence
  Synthetic
ucaaaacugaagaacugagucauc

SEQ ID NO: 284618 - RNA, 18 nt, Artificial Sequence
  Synthetic
ucagcaucacuagucauc

SEQ ID NO: 284619 - RNA, 19 nt, Artificial Sequence
  Synthetic
cucagcaucacuagucauc

SEQ ID NO: 284620 - RNA, 20 nt, Artificial Sequence
  Synthetic
gcucagcaucacuagucauc

SEQ ID NO: 284621 - RNA, 21 nt, Artificial Sequence
  Synthetic
ugcucagcaucacuagucauc

SEQ ID NO: 284622 - RNA, 22 nt, Artificial Sequence
  Synthetic
gugcucagcaucacuagucauc

SEQ ID NO: 284623 - RNA, 23 nt, Artificial Sequence
  Synthetic
ggugcucagcaucacuagucauc

SEQ ID NO: 284624 - RNA, 24 nt, Artificial Sequence
  Synthetic
aggugcucagcaucacuagucauc

SEQ ID NO: 284625 - RNA, 18 nt, Artificial Sequence
  Synthetic
auggcauauuuagucauc

SEQ ID NO: 284626 - RNA, 19 nt, Artificial Sequence
  Synthetic
aauggcauauuuagucauc

SEQ ID NO: 284627 - RNA, 20 nt, Artificial Sequence
  Synthetic
caauggcauauuuagucauc

SEQ ID NO: 284628 - RNA, 21 nt, Artificial Sequence
  Synthetic
ccaauggcauauuuagucauc

SEQ ID NO: 284629 - RNA, 22 nt, Artificial Sequence
  Synthetic
cccaauggcauauuuagucauc

SEQ ID NO: 284630 - RNA, 23 nt, Artificial Sequence
  Synthetic
ucccaauggcauauuuagucauc

SEQ ID NO: 284631 - RNA, 24 nt, Artificial Sequence
  Synthetic
aucccaauggcauauuuagucauc

SEQ ID NO: 284632 - RNA, 18 nt, Artificial Sequence
  Synthetic
ucuucagagcccgucauc

SEQ ID NO: 284633 - RNA, 19 nt, Artificial Sequence
  Synthetic
uucuucagagcccgucauc

SEQ ID NO: 284634 - RNA, 20 nt, Artificial Sequence
  Synthetic
uuucuucagagcccgucauc

SEQ ID NO: 284635 - RNA, 21 nt, Artificial Sequence
  Synthetic
uuuucuucagagcccgucauc

SEQ ID NO: 284636 - RNA, 22 nt, Artificial Sequence
  Synthetic
guuuucuucagagcccgucauc

SEQ ID NO: 284637 - RNA, 23 nt, Artificial Sequence
  Synthetic
aguuuucuucagagcccgucauc

SEQ ID NO: 284638 - RNA, 24 nt, Artificial Sequence
  Synthetic
aaguuuucuucagagcccgucauc

SEQ ID NO: 284639 - RNA, 18 nt, Artificial Sequence
  Synthetic
uaauuauaacaugucauc

SEQ ID NO: 284640 - RNA, 19 nt, Artificial Sequence
  Synthetic
cuaauuauaacaugucauc

SEQ ID NO: 284641 - RNA, 20 nt, Artificial Sequence
  Synthetic
ccuaauuauaacaugucauc

SEQ ID NO: 284642 - RNA, 21 nt, Artificial Sequence
  Synthetic
uccuaauuauaacaugucauc

SEQ ID NO: 284643 - RNA, 22 nt, Artificial Sequence
  Synthetic
auccuaauuauaacaugucauc

SEQ ID NO: 284644 - RNA, 23 nt, Artificial Sequence
  Synthetic
uauccuaauuauaacaugucauc

SEQ ID NO: 284645 - RNA, 24 nt, Artificial Sequence
  Synthetic
auauccuaauuauaacaugucauc

SEQ ID NO: 284646 - RNA, 18 nt, Artificial Sequence
  Synthetic
uaaacuuccucugucauc

SEQ ID NO: 284647 - RNA, 19 nt, Artificial Sequence
  Synthetic
auaaacuuccucugucauc

SEQ ID NO: 284648 - RNA, 20 nt, Artificial Sequence
  Synthetic
gauaaacuuccucugucauc

SEQ ID NO: 284649 - RNA, 21 nt, Artificial Sequence
  Synthetic
ugauaaacuuccucugucauc

SEQ ID NO: 284650 - RNA, 22 nt, Artificial Sequence
  Synthetic
augauaaacuuccucugucauc

SEQ ID NO: 284651 - RNA, 23 nt, Artificial Sequence
  Synthetic
uaugauaaacuuccucugucauc

SEQ ID NO: 284652 - RNA, 24 nt, Artificial Sequence
  Synthetic
cuaugauaaacuuccucugucauc

SEQ ID NO: 284653 - RNA, 18 nt, Artificial Sequence
  Synthetic
uucuaacauggugucauc

SEQ ID NO: 284654 - RNA, 19 nt, Artificial Sequence
  Synthetic
uuucuaacauggugucauc

SEQ ID NO: 284655 - RNA, 20 nt, Artificial Sequence
  Synthetic
cuuucuaacauggugucauc

SEQ ID NO: 284656 - RNA, 21 nt, Artificial Sequence
  Synthetic
ucuuucuaacauggugucauc

SEQ ID NO: 284657 - RNA, 22 nt, Artificial Sequence
  Synthetic
gucuuucuaacauggugucauc

SEQ ID NO: 284658 - RNA, 23 nt, Artificial Sequence
  Synthetic
ugucuuucuaacauggugucauc

SEQ ID NO: 284659 - RNA, 24 nt, Artificial Sequence
  Synthetic
uugucuuucuaacauggugucauc

SEQ ID NO: 284660 - RNA, 18 nt, Artificial Sequence
  Synthetic
cucaaggcacaauucauc

SEQ ID NO: 284661 - RNA, 19 nt, Artificial Sequence
  Synthetic
acucaaggcacaauucauc

SEQ ID NO: 284662 - RNA, 20 nt, Artificial Sequence
  Synthetic
gacucaaggcacaauucauc

SEQ ID NO: 284663 - RNA, 21 nt, Artificial Sequence
  Synthetic
agacucaaggcacaauucauc

SEQ ID NO: 284664 - RNA, 22 nt, Artificial Sequence
  Synthetic
gagacucaaggcacaauucauc

SEQ ID NO: 284665 - RNA, 23 nt, Artificial Sequence
  Synthetic
ugagacucaaggcacaauucauc

SEQ ID NO: 284666 - RNA, 24 nt, Artificial Sequence
  Synthetic
gugagacucaaggcacaauucauc

SEQ ID NO: 284667 - RNA, 18 nt, Artificial Sequence
  Synthetic
uaaaaggaucaauucauc

SEQ ID NO: 284668 - RNA, 19 nt, Artificial Sequence
  Synthetic
auaaaaggaucaauucauc

SEQ ID NO: 284669 - RNA, 20 nt, Artificial Sequence
  Synthetic
gauaaaaggaucaauucauc

SEQ ID NO: 284670 - RNA, 21 nt, Artificial Sequence
  Synthetic
ugauaaaaggaucaauucauc

SEQ ID NO: 284671 - RNA, 22 nt, Artificial Sequence
  Synthetic
augauaaaaggaucaauucauc

SEQ ID NO: 284672 - RNA, 23 nt, Artificial Sequence
  Synthetic
aaugauaaaaggaucaauucauc

SEQ ID NO: 284673 - RNA, 24 nt, Artificial Sequence
  Synthetic
uaaugauaaaaggaucaauucauc

SEQ ID NO: 284674 - RNA, 18 nt, Artificial Sequence
  Synthetic
caaauagcaauauucauc

SEQ ID NO: 284675 - RNA, 19 nt, Artificial Sequence
  Synthetic
gcaaauagcaauauucauc

SEQ ID NO: 284676 - RNA, 20 nt, Artificial Sequence
  Synthetic
ugcaaauagcaauauucauc

SEQ ID NO: 284677 - RNA, 21 nt, Artificial Sequence
  Synthetic
cugcaaauagcaauauucauc

SEQ ID NO: 284678 - RNA, 22 nt, Artificial Sequence
  Synthetic
ccugcaaauagcaauauucauc

SEQ ID NO: 284679 - RNA, 23 nt, Artificial Sequence
  Synthetic
uccugcaaauagcaauauucauc

SEQ ID NO: 284680 - RNA, 24 nt, Artificial Sequence
  Synthetic
auccugcaaauagcaauauucauc

SEQ ID NO: 284681 - RNA, 18 nt, Artificial Sequence
  Synthetic
auaaagugaagcuucauc

SEQ ID NO: 284682 - RNA, 19 nt, Artificial Sequence
  Synthetic
gauaaagugaagcuucauc

SEQ ID NO: 284683 - RNA, 20 nt, Artificial Sequence
  Synthetic
ugauaaagugaagcuucauc

SEQ ID NO: 284684 - RNA, 21 nt, Artificial Sequence
  Synthetic
cugauaaagugaagcuucauc

SEQ ID NO: 284685 - RNA, 22 nt, Artificial Sequence
  Synthetic
acugauaaagugaagcuucauc

SEQ ID NO: 284686 - RNA, 23 nt, Artificial Sequence
  Synthetic
aacugauaaagugaagcuucauc

SEQ ID NO: 284687 - RNA, 24 nt, Artificial Sequence
  Synthetic
uaacugauaaagugaagcuucauc

SEQ ID NO: 284688 - RNA, 18 nt, Artificial Sequence
  Synthetic
ucuauauuacauuucauc

SEQ ID NO: 284689 - RNA, 19 nt, Artificial Sequence
  Synthetic
gucuauauuacauuucauc

SEQ ID NO: 284690 - RNA, 20 nt, Artificial Sequence
  Synthetic
ugucuauauuacauuucauc

SEQ ID NO: 284691 - RNA, 21 nt, Artificial Sequence
  Synthetic
cugucuauauuacauuucauc

SEQ ID NO: 284692 - RNA, 22 nt, Artificial Sequence
  Synthetic
acugucuauauuacauuucauc

SEQ ID NO: 284693 - RNA, 23 nt, Artificial Sequence
  Synthetic
aacugucuauauuacauuucauc

SEQ ID NO: 284694 - RNA, 24 nt, Artificial Sequence
  Synthetic
aaacugucuauauuacauuucauc

SEQ ID NO: 284695 - RNA, 18 nt, Artificial Sequence
  Synthetic
aaaagacaagcuuucauc

SEQ ID NO: 284696 - RNA, 19 nt, Artificial Sequence
  Synthetic
aaaaagacaagcuuucauc

SEQ ID NO: 284697 - RNA, 20 nt, Artificial Sequence
  Synthetic
gaaaaagacaagcuuucauc

SEQ ID NO: 284698 - RNA, 21 nt, Artificial Sequence
  Synthetic
agaaaaagacaagcuuucauc

SEQ ID NO: 284699 - RNA, 22 nt, Artificial Sequence
  Synthetic
gagaaaaagacaagcuuucauc

SEQ ID NO: 284700 - RNA, 23 nt, Artificial Sequence
  Synthetic
agagaaaaagacaagcuuucauc

SEQ ID NO: 284701 - RNA, 24 nt, Artificial Sequence
  Synthetic
gagagaaaaagacaagcuuucauc

SEQ ID NO: 284702 - RNA, 18 nt, Artificial Sequence
  Synthetic
uucccaaagucuuucauc

SEQ ID NO: 284703 - RNA, 19 nt, Artificial Sequence
  Synthetic
cuucccaaagucuuucauc

SEQ ID NO: 284704 - RNA, 20 nt, Artificial Sequence
  Synthetic
ucuucccaaagucuuucauc

SEQ ID NO: 284705 - RNA, 21 nt, Artificial Sequence
  Synthetic
gucuucccaaagucuuucauc

SEQ ID NO: 284706 - RNA, 22 nt, Artificial Sequence
  Synthetic
agucuucccaaagucuuucauc

SEQ ID NO: 284707 - RNA, 23 nt, Artificial Sequence
  Synthetic
aagucuucccaaagucuuucauc

SEQ ID NO: 284708 - RNA, 24 nt, Artificial Sequence
  Synthetic
caagucuucccaaagucuuucauc

SEQ ID NO: 284709 - RNA, 18 nt, Artificial Sequence
  Synthetic
ugagcuuguauuuucauc

SEQ ID NO: 284710 - RNA, 19 nt, Artificial Sequence
  Synthetic
cugagcuuguauuuucauc

SEQ ID NO: 284711 - RNA, 20 nt, Artificial Sequence
  Synthetic
ucugagcuuguauuuucauc

SEQ ID NO: 284712 - RNA, 21 nt, Artificial Sequence
  Synthetic
cucugagcuuguauuuucauc

SEQ ID NO: 284713 - RNA, 22 nt, Artificial Sequence
  Synthetic
gcucugagcuuguauuuucauc

SEQ ID NO: 284714 - RNA, 23 nt, Artificial Sequence
  Synthetic
ggcucugagcuuguauuuucauc

SEQ ID NO: 284715 - RNA, 24 nt, Artificial Sequence
  Synthetic
uggcucugagcuuguauuuucauc

SEQ ID NO: 284716 - RNA, 18 nt, Artificial Sequence
  Synthetic
gcuuuugguguuuucauc

SEQ ID NO: 284717 - RNA, 19 nt, Artificial Sequence
  Synthetic
ugcuuuugguguuuucauc

SEQ ID NO: 284718 - RNA, 20 nt, Artificial Sequence
  Synthetic
uugcuuuugguguuuucauc

SEQ ID NO: 284719 - RNA, 21 nt, Artificial Sequence
  Synthetic
auugcuuuugguguuuucauc

SEQ ID NO: 284720 - RNA, 22 nt, Artificial Sequence
  Synthetic
cauugcuuuugguguuuucauc

SEQ ID NO: 284721 - RNA, 23 nt, Artificial Sequence
  Synthetic
ccauugcuuuugguguuuucauc

SEQ ID NO: 284722 - RNA, 24 nt, Artificial Sequence
  Synthetic
gccauugcuuuugguguuuucauc

SEQ ID NO: 284723 - RNA, 18 nt, Artificial Sequence
  Synthetic
uucagcuuagaaaagauc

SEQ ID NO: 284724 - RNA, 19 nt, Artificial Sequence
  Synthetic
auucagcuuagaaaagauc

SEQ ID NO: 284725 - RNA, 20 nt, Artificial Sequence
  Synthetic
uauucagcuuagaaaagauc

SEQ ID NO: 284726 - RNA, 21 nt, Artificial Sequence
  Synthetic
uuauucagcuuagaaaagauc

SEQ ID NO: 284727 - RNA, 22 nt, Artificial Sequence
  Synthetic
uuuauucagcuuagaaaagauc

SEQ ID NO: 284728 - RNA, 23 nt, Artificial Sequence
  Synthetic
auuuauucagcuuagaaaagauc

SEQ ID NO: 284729 - RNA, 24 nt, Artificial Sequence
  Synthetic
uauuuauucagcuuagaaaagauc

SEQ ID NO: 284730 - RNA, 18 nt, Artificial Sequence
  Synthetic
aauuacuaauaaaagauc

SEQ ID NO: 284731 - RNA, 19 nt, Artificial Sequence
  Synthetic
aaauuacuaauaaaagauc

SEQ ID NO: 284732 - RNA, 20 nt, Artificial Sequence
  Synthetic
caaauuacuaauaaaagauc

SEQ ID NO: 284733 - RNA, 21 nt, Artificial Sequence
  Synthetic
gcaaauuacuaauaaaagauc

SEQ ID NO: 284734 - RNA, 22 nt, Artificial Sequence
  Synthetic
ugcaaauuacuaauaaaagauc

SEQ ID NO: 284735 - RNA, 23 nt, Artificial Sequence
  Synthetic
uugcaaauuacuaauaaaagauc

SEQ ID NO: 284736 - RNA, 24 nt, Artificial Sequence
  Synthetic
cuugcaaauuacuaauaaaagauc

SEQ ID NO: 284737 - RNA, 18 nt, Artificial Sequence
  Synthetic
uuuaaaccaacaaagauc

SEQ ID NO: 284738 - RNA, 19 nt, Artificial Sequence
  Synthetic
cuuuaaaccaacaaagauc

SEQ ID NO: 284739 - RNA, 20 nt, Artificial Sequence
  Synthetic
acuuuaaaccaacaaagauc

SEQ ID NO: 284740 - RNA, 21 nt, Artificial Sequence
  Synthetic
gacuuuaaaccaacaaagauc

SEQ ID NO: 284741 - RNA, 22 nt, Artificial Sequence
  Synthetic
agacuuuaaaccaacaaagauc

SEQ ID NO: 284742 - RNA, 23 nt, Artificial Sequence
  Synthetic
cagacuuuaaaccaacaaagauc

SEQ ID NO: 284743 - RNA, 24 nt, Artificial Sequence
  Synthetic
acagacuuuaaaccaacaaagauc

SEQ ID NO: 284744 - RNA, 18 nt, Artificial Sequence
  Synthetic
ucuagguaaugaaagauc

SEQ ID NO: 284745 - RNA, 19 nt, Artificial Sequence
  Synthetic
aucuagguaaugaaagauc

SEQ ID NO: 284746 - RNA, 20 nt, Artificial Sequence
  Synthetic
caucuagguaaugaaagauc

SEQ ID NO: 284747 - RNA, 21 nt, Artificial Sequence
  Synthetic
ucaucuagguaaugaaagauc

SEQ ID NO: 284748 - RNA, 22 nt, Artificial Sequence
  Synthetic
gucaucuagguaaugaaagauc

SEQ ID NO: 284749 - RNA, 23 nt, Artificial Sequence
  Synthetic
ugucaucuagguaaugaaagauc

SEQ ID NO: 284750 - RNA, 24 nt, Artificial Sequence
  Synthetic
gugucaucuagguaaugaaagauc

SEQ ID NO: 284751 - RNA, 18 nt, Artificial Sequence
  Synthetic
cugucugccuacaagauc

SEQ ID NO: 284752 - RNA, 19 nt, Artificial Sequence
  Synthetic
gcugucugccuacaagauc

SEQ ID NO: 284753 - RNA, 20 nt, Artificial Sequence
  Synthetic
ggcugucugccuacaagauc

SEQ ID NO: 284754 - RNA, 21 nt, Artificial Sequence
  Synthetic
aggcugucugccuacaagauc

SEQ ID NO: 284755 - RNA, 22 nt, Artificial Sequence
  Synthetic
uaggcugucugccuacaagauc

SEQ ID NO: 284756 - RNA, 23 nt, Artificial Sequence
  Synthetic
auaggcugucugccuacaagauc

SEQ ID NO: 284757 - RNA, 24 nt, Artificial Sequence
  Synthetic
aauaggcugucugccuacaagauc

SEQ ID NO: 284758 - RNA, 18 nt, Artificial Sequence
  Synthetic
cauaauguauccaagauc

SEQ ID NO: 284759 - RNA, 19 nt, Artificial Sequence
  Synthetic
gcauaauguauccaagauc

SEQ ID NO: 284760 - RNA, 20 nt, Artificial Sequence
  Synthetic
ugcauaauguauccaagauc

SEQ ID NO: 284761 - RNA, 21 nt, Artificial Sequence
  Synthetic
uugcauaauguauccaagauc

SEQ ID NO: 284762 - RNA, 22 nt, Artificial Sequence
  Synthetic
uuugcauaauguauccaagauc

SEQ ID NO: 284763 - RNA, 23 nt, Artificial Sequence
  Synthetic
cuuugcauaauguauccaagauc

SEQ ID NO: 284764 - RNA, 24 nt, Artificial Sequence
  Synthetic
ucuuugcauaauguauccaagauc

SEQ ID NO: 284765 - RNA, 18 nt, Artificial Sequence
  Synthetic
gcugcgaaguccaagauc

SEQ ID NO: 284766 - RNA, 19 nt, Artificial Sequence
  Synthetic
ggcugcgaaguccaagauc

SEQ ID NO: 284767 - RNA, 20 nt, Artificial Sequence
  Synthetic
aggcugcgaaguccaagauc

SEQ ID NO: 284768 - RNA, 21 nt, Artificial Sequence
  Synthetic
gaggcugcgaaguccaagauc

SEQ ID NO: 284769 - RNA, 22 nt, Artificial Sequence
  Synthetic
ggaggcugcgaaguccaagauc

SEQ ID NO: 284770 - RNA, 23 nt, Artificial Sequence
  Synthetic
uggaggcugcgaaguccaagauc

SEQ ID NO: 284771 - RNA, 24 nt, Artificial Sequence
  Synthetic
cuggaggcugcgaaguccaagauc

SEQ ID NO: 284772 - RNA, 18 nt, Artificial Sequence
  Synthetic
aaguggagggagaagauc

SEQ ID NO: 284773 - RNA, 19 nt, Artificial Sequence
  Synthetic
caaguggagggagaagauc

SEQ ID NO: 284774 - RNA, 20 nt, Artificial Sequence
  Synthetic
acaaguggagggagaagauc

SEQ ID NO: 284775 - RNA, 21 nt, Artificial Sequence
  Synthetic
cacaaguggagggagaagauc

SEQ ID NO: 284776 - RNA, 22 nt, Artificial Sequence
  Synthetic
acacaaguggagggagaagauc

SEQ ID NO: 284777 - RNA, 23 nt, Artificial Sequence
  Synthetic
aacacaaguggagggagaagauc

SEQ ID NO: 284778 - RNA, 24 nt, Artificial Sequence
  Synthetic
gaacacaaguggagggagaagauc

SEQ ID NO: 284779 - RNA, 18 nt, Artificial Sequence
  Synthetic
augcuuuccccuaagauc

SEQ ID NO: 284780 - RNA, 19 nt, Artificial Sequence
  Synthetic
aaugcuuuccccuaagauc

SEQ ID NO: 284781 - RNA, 20 nt, Artificial Sequence
  Synthetic
gaaugcuuuccccuaagauc

SEQ ID NO: 284782 - RNA, 21 nt, Artificial Sequence
  Synthetic
ugaaugcuuuccccuaagauc

SEQ ID NO: 284783 - RNA, 22 nt, Artificial Sequence
  Synthetic
cugaaugcuuuccccuaagauc

SEQ ID NO: 284784 - RNA, 23 nt, Artificial Sequence
  Synthetic
acugaaugcuuuccccuaagauc

SEQ ID NO: 284785 - RNA, 24 nt, Artificial Sequence
  Synthetic
cacugaaugcuuuccccuaagauc

SEQ ID NO: 284786 - RNA, 18 nt, Artificial Sequence
  Synthetic
uaauugaaugcuaagauc

SEQ ID NO: 284787 - RNA, 19 nt, Artificial Sequence
  Synthetic
auaauugaaugcuaagauc

SEQ ID NO: 284788 - RNA, 20 nt, Artificial Sequence
  Synthetic
gauaauugaaugcuaagauc

SEQ ID NO: 284789 - RNA, 21 nt, Artificial Sequence
  Synthetic
ugauaauugaaugcuaagauc

SEQ ID NO: 284790 - RNA, 22 nt, Artificial Sequence
  Synthetic
augauaauugaaugcuaagauc

SEQ ID NO: 284791 - RNA, 23 nt, Artificial Sequence
  Synthetic
aaugauaauugaaugcuaagauc

SEQ ID NO: 284792 - RNA, 24 nt, Artificial Sequence
  Synthetic
aaaugauaauugaaugcuaagauc

SEQ ID NO: 284793 - RNA, 18 nt, Artificial Sequence
  Synthetic
cuuuuaaacaaccagauc

SEQ ID NO: 284794 - RNA, 19 nt, Artificial Sequence
  Synthetic
acuuuuaaacaaccagauc

SEQ ID NO: 284795 - RNA, 20 nt, Artificial Sequence
  Synthetic
uacuuuuaaacaaccagauc

SEQ ID NO: 284796 - RNA, 21 nt, Artificial Sequence
  Synthetic
cuacuuuuaaacaaccagauc

SEQ ID NO: 284797 - RNA, 22 nt, Artificial Sequence
  Synthetic
ccuacuuuuaaacaaccagauc

SEQ ID NO: 284798 - RNA, 23 nt, Artificial Sequence
  Synthetic
accuacuuuuaaacaaccagauc

SEQ ID NO: 284799 - RNA, 24 nt, Artificial Sequence
  Synthetic
uaccuacuuuuaaacaaccagauc

SEQ ID NO: 284800 - RNA, 18 nt, Artificial Sequence
  Synthetic
gauucugaaugccagauc

SEQ ID NO: 284801 - RNA, 19 nt, Artificial Sequence
  Synthetic
ggauucugaaugccagauc

SEQ ID NO: 284802 - RNA, 20 nt, Artificial Sequence
  Synthetic
gggauucugaaugccagauc

SEQ ID NO: 284803 - RNA, 21 nt, Artificial Sequence
  Synthetic
agggauucugaaugccagauc

SEQ ID NO: 284804 - RNA, 22 nt, Artificial Sequence
  Synthetic
gagggauucugaaugccagauc

SEQ ID NO: 284805 - RNA, 23 nt, Artificial Sequence
  Synthetic
ugagggauucugaaugccagauc

SEQ ID NO: 284806 - RNA, 24 nt, Artificial Sequence
  Synthetic
uugagggauucugaaugccagauc

SEQ ID NO: 284807 - RNA, 18 nt, Artificial Sequence
  Synthetic
ugaguguugcuccagauc

SEQ ID NO: 284808 - RNA, 19 nt, Artificial Sequence
  Synthetic
augaguguugcuccagauc

SEQ ID NO: 284809 - RNA, 20 nt, Artificial Sequence
  Synthetic
uaugaguguugcuccagauc

SEQ ID NO: 284810 - RNA, 21 nt, Artificial Sequence
  Synthetic
guaugaguguugcuccagauc

SEQ ID NO: 284811 - RNA, 22 nt, Artificial Sequence
  Synthetic
aguaugaguguugcuccagauc

SEQ ID NO: 284812 - RNA, 23 nt, Artificial Sequence
  Synthetic
aaguaugaguguugcuccagauc

SEQ ID NO: 284813 - RNA, 24 nt, Artificial Sequence
  Synthetic
aaaguaugaguguugcuccagauc

SEQ ID NO: 284814 - RNA, 18 nt, Artificial Sequence
  Synthetic
ggccgaggcaggcagauc

SEQ ID NO: 284815 - RNA, 19 nt, Artificial Sequence
  Synthetic
aggccgaggcaggcagauc

SEQ ID NO: 284816 - RNA, 20 nt, Artificial Sequence
  Synthetic
gaggccgaggcaggcagauc

SEQ ID NO: 284817 - RNA, 21 nt, Artificial Sequence
  Synthetic
ggaggccgaggcaggcagauc

SEQ ID NO: 284818 - RNA, 22 nt, Artificial Sequence
  Synthetic
gggaggccgaggcaggcagauc

SEQ ID NO: 284819 - RNA, 23 nt, Artificial Sequence
  Synthetic
ugggaggccgaggcaggcagauc

SEQ ID NO: 284820 - RNA, 24 nt, Artificial Sequence
  Synthetic
uugggaggccgaggcaggcagauc

SEQ ID NO: 284821 - RNA, 18 nt, Artificial Sequence
  Synthetic
ggccaaggcgggcagauc

SEQ ID NO: 284822 - RNA, 19 nt, Artificial Sequence
  Synthetic
aggccaaggcgggcagauc

SEQ ID NO: 284823 - RNA, 20 nt, Artificial Sequence
  Synthetic
gaggccaaggcgggcagauc

SEQ ID NO: 284824 - RNA, 21 nt, Artificial Sequence
  Synthetic
ggaggccaaggcgggcagauc

SEQ ID NO: 284825 - RNA, 22 nt, Artificial Sequence
  Synthetic
gggaggccaaggcgggcagauc

SEQ ID NO: 284826 - RNA, 23 nt, Artificial Sequence
  Synthetic
ugggaggccaaggcgggcagauc

SEQ ID NO: 284827 - RNA, 24 nt, Artificial Sequence
  Synthetic
uugggaggccaaggcgggcagauc

SEQ ID NO: 284828 - RNA, 18 nt, Artificial Sequence
  Synthetic
ggccgaggcgggcagauc

SEQ ID NO: 284829 - RNA, 19 nt, Artificial Sequence
  Synthetic
aggccgaggcgggcagauc

SEQ ID NO: 284830 - RNA, 20 nt, Artificial Sequence
  Synthetic
gaggccgaggcgggcagauc

SEQ ID NO: 284831 - RNA, 24 nt, Artificial Sequence
  Synthetic
uugggaggccgaggcgggcagauc

SEQ ID NO: 284832 - RNA, 18 nt, Artificial Sequence
  Synthetic
ggccaaggugggcagauc

SEQ ID NO: 284833 - RNA, 19 nt, Artificial Sequence
  Synthetic
aggccaaggugggcagauc

SEQ ID NO: 284834 - RNA, 20 nt, Artificial Sequence
  Synthetic
gaggccaaggugggcagauc

SEQ ID NO: 284835 - RNA, 18 nt, Artificial Sequence
  Synthetic
ggccgaggugggcagauc

SEQ ID NO: 284836 - RNA, 19 nt, Artificial Sequence
  Synthetic
aggccgaggugggcagauc

SEQ ID NO: 284837 - RNA, 20 nt, Artificial Sequence
  Synthetic
gaggccgaggugggcagauc

SEQ ID NO: 284838 - RNA, 21 nt, Artificial Sequence
  Synthetic
ggaggccgaggugggcagauc

SEQ ID NO: 284839 - RNA, 22 nt, Artificial Sequence
  Synthetic
gggaggccgaggugggcagauc

SEQ ID NO: 284840 - RNA, 23 nt, Artificial Sequence
  Synthetic
ugggaggccgaggugggcagauc

SEQ ID NO: 284841 - RNA, 24 nt, Artificial Sequence
  Synthetic
uugggaggccgaggugggcagauc

SEQ ID NO: 284842 - RNA, 18 nt, Artificial Sequence
  Synthetic
ggcugaggugggcagauc

SEQ ID NO: 284843 - RNA, 19 nt, Artificial Sequence
  Synthetic
aggcugaggugggcagauc

SEQ ID NO: 284844 - RNA, 20 nt, Artificial Sequence
  Synthetic
gaggcugaggugggcagauc

SEQ ID NO: 284845 - RNA, 18 nt, Artificial Sequence
  Synthetic
uucuuauugccagagauc

SEQ ID NO: 284846 - RNA, 19 nt, Artificial Sequence
  Synthetic
guucuuauugccagagauc

SEQ ID NO: 284847 - RNA, 20 nt, Artificial Sequence
  Synthetic
gguucuuauugccagagauc

SEQ ID NO: 284848 - RNA, 21 nt, Artificial Sequence
  Synthetic
agguucuuauugccagagauc

SEQ ID NO: 284849 - RNA, 22 nt, Artificial Sequence
  Synthetic
uagguucuuauugccagagauc

SEQ ID NO: 284850 - RNA, 23 nt, Artificial Sequence
  Synthetic
cuagguucuuauugccagagauc

SEQ ID NO: 284851 - RNA, 24 nt, Artificial Sequence
  Synthetic
acuagguucuuauugccagagauc

SEQ ID NO: 284852 - RNA, 18 nt, Artificial Sequence
  Synthetic
gagauguugguagagauc

SEQ ID NO: 284853 - RNA, 19 nt, Artificial Sequence
  Synthetic
ugagauguugguagagauc

SEQ ID NO: 284854 - RNA, 20 nt, Artificial Sequence
  Synthetic
uugagauguugguagagauc

SEQ ID NO: 284855 - RNA, 21 nt, Artificial Sequence
  Synthetic
cuugagauguugguagagauc

SEQ ID NO: 284856 - RNA, 22 nt, Artificial Sequence
  Synthetic
ucuugagauguugguagagauc

SEQ ID NO: 284857 - RNA, 23 nt, Artificial Sequence
  Synthetic
gucuugagauguugguagagauc

SEQ ID NO: 284858 - RNA, 24 nt, Artificial Sequence
  Synthetic
agucuugagauguugguagagauc

SEQ ID NO: 284859 - RNA, 18 nt, Artificial Sequence
  Synthetic
gacccuuucaaggagauc

SEQ ID NO: 284860 - RNA, 19 nt, Artificial Sequence
  Synthetic
ugacccuuucaaggagauc

SEQ ID NO: 284861 - RNA, 20 nt, Artificial Sequence
  Synthetic
uugacccuuucaaggagauc

SEQ ID NO: 284862 - RNA, 21 nt, Artificial Sequence
  Synthetic
cuugacccuuucaaggagauc

SEQ ID NO: 284863 - RNA, 22 nt, Artificial Sequence
  Synthetic
acuugacccuuucaaggagauc

SEQ ID NO: 284864 - RNA, 23 nt, Artificial Sequence
  Synthetic
uacuugacccuuucaaggagauc

SEQ ID NO: 284865 - RNA, 24 nt, Artificial Sequence
  Synthetic
cuacuugacccuuucaaggagauc

SEQ ID NO: 284866 - RNA, 18 nt, Artificial Sequence
  Synthetic
cuaaaauaccaggagauc

SEQ ID NO: 284867 - RNA, 19 nt, Artificial Sequence
  Synthetic
gcuaaaauaccaggagauc

SEQ ID NO: 284868 - RNA, 20 nt, Artificial Sequence
  Synthetic
ggcuaaaauaccaggagauc

SEQ ID NO: 284869 - RNA, 21 nt, Artificial Sequence
  Synthetic
gggcuaaaauaccaggagauc

SEQ ID NO: 284870 - RNA, 22 nt, Artificial Sequence
  Synthetic
agggcuaaaauaccaggagauc

SEQ ID NO: 284871 - RNA, 23 nt, Artificial Sequence
  Synthetic
aagggcuaaaauaccaggagauc

SEQ ID NO: 284872 - RNA, 24 nt, Artificial Sequence
  Synthetic
caagggcuaaaauaccaggagauc

SEQ ID NO: 284873 - RNA, 18 nt, Artificial Sequence
  Synthetic
aauaaccugccugagauc

SEQ ID NO: 284874 - RNA, 19 nt, Artificial Sequence
  Synthetic
uaauaaccugccugagauc

SEQ ID NO: 284875 - RNA, 20 nt, Artificial Sequence
  Synthetic
auaauaaccugccugagauc

SEQ ID NO: 284876 - RNA, 21 nt, Artificial Sequence
  Synthetic
gauaauaaccugccugagauc

SEQ ID NO: 284877 - RNA, 22 nt, Artificial Sequence
  Synthetic
ggauaauaaccugccugagauc

SEQ ID NO: 284878 - RNA, 23 nt, Artificial Sequence
  Synthetic
aggauaauaaccugccugagauc

SEQ ID NO: 284879 - RNA, 24 nt, Artificial Sequence
  Synthetic
aaggauaauaaccugccugagauc

SEQ ID NO: 284880 - RNA, 18 nt, Artificial Sequence
  Synthetic
acuuguuaaugugagauc

SEQ ID NO: 284881 - RNA, 19 nt, Artificial Sequence
  Synthetic
cacuuguuaaugugagauc

SEQ ID NO: 284882 - RNA, 20 nt, Artificial Sequence
  Synthetic
ucacuuguuaaugugagauc

SEQ ID NO: 284883 - RNA, 21 nt, Artificial Sequence
  Synthetic
aucacuuguuaaugugagauc

SEQ ID NO: 284884 - RNA, 22 nt, Artificial Sequence
  Synthetic
caucacuuguuaaugugagauc

SEQ ID NO: 284885 - RNA, 23 nt, Artificial Sequence
  Synthetic
acaucacuuguuaaugugagauc

SEQ ID NO: 284886 - RNA, 24 nt, Artificial Sequence
  Synthetic
aacaucacuuguuaaugugagauc

SEQ ID NO: 284887 - RNA, 18 nt, Artificial Sequence
  Synthetic
cuuaauucaaaauagauc

SEQ ID NO: 284888 - RNA, 19 nt, Artificial Sequence
  Synthetic
acuuaauucaaaauagauc

SEQ ID NO: 284889 - RNA, 20 nt, Artificial Sequence
  Synthetic
aacuuaauucaaaauagauc

SEQ ID NO: 284890 - RNA, 21 nt, Artificial Sequence
  Synthetic
aaacuuaauucaaaauagauc

SEQ ID NO: 284891 - RNA, 22 nt, Artificial Sequence
  Synthetic
aaaacuuaauucaaaauagauc

SEQ ID NO: 284892 - RNA, 23 nt, Artificial Sequence
  Synthetic
aaaaacuuaauucaaaauagauc

SEQ ID NO: 284893 - RNA, 24 nt, Artificial Sequence
  Synthetic
uaaaaacuuaauucaaaauagauc

SEQ ID NO: 284894 - RNA, 18 nt, Artificial Sequence
  Synthetic
aauuacaaaaaguagauc

SEQ ID NO: 284895 - RNA, 19 nt, Artificial Sequence
  Synthetic
gaauuacaaaaaguagauc

SEQ ID NO: 284896 - RNA, 20 nt, Artificial Sequence
  Synthetic
agaauuacaaaaaguagauc

SEQ ID NO: 284897 - RNA, 21 nt, Artificial Sequence
  Synthetic
cagaauuacaaaaaguagauc

SEQ ID NO: 284898 - RNA, 22 nt, Artificial Sequence
  Synthetic
gcagaauuacaaaaaguagauc

SEQ ID NO: 284899 - RNA, 23 nt, Artificial Sequence
  Synthetic
agcagaauuacaaaaaguagauc

SEQ ID NO: 284900 - RNA, 24 nt, Artificial Sequence
  Synthetic
cagcagaauuacaaaaaguagauc

SEQ ID NO: 284901 - RNA, 18 nt, Artificial Sequence
  Synthetic
aagugaaguuuuuagauc

SEQ ID NO: 284902 - RNA, 19 nt, Artificial Sequence
  Synthetic
caagugaaguuuuuagauc

SEQ ID NO: 284903 - RNA, 20 nt, Artificial Sequence
  Synthetic
acaagugaaguuuuuagauc

SEQ ID NO: 284904 - RNA, 21 nt, Artificial Sequence
  Synthetic
cacaagugaaguuuuuagauc

SEQ ID NO: 284905 - RNA, 22 nt, Artificial Sequence
  Synthetic
acacaagugaaguuuuuagauc

SEQ ID NO: 284906 - RNA, 23 nt, Artificial Sequence
  Synthetic
aacacaagugaaguuuuuagauc

SEQ ID NO: 284907 - RNA, 24 nt, Artificial Sequence
  Synthetic
gaacacaagugaaguuuuuagauc

SEQ ID NO: 284908 - RNA, 18 nt, Artificial Sequence
  Synthetic
uacaaguggcccacgauc

SEQ ID NO: 284909 - RNA, 19 nt, Artificial Sequence
  Synthetic
guacaaguggcccacgauc

SEQ ID NO: 284910 - RNA, 20 nt, Artificial Sequence
  Synthetic
uguacaaguggcccacgauc

SEQ ID NO: 284911 - RNA, 21 nt, Artificial Sequence
  Synthetic
auguacaaguggcccacgauc

SEQ ID NO: 284912 - RNA, 22 nt, Artificial Sequence
  Synthetic
cauguacaaguggcccacgauc

SEQ ID NO: 284913 - RNA, 23 nt, Artificial Sequence
  Synthetic
acauguacaaguggcccacgauc

SEQ ID NO: 284914 - RNA, 24 nt, Artificial Sequence
  Synthetic
aacauguacaaguggcccacgauc

SEQ ID NO: 284915 - RNA, 18 nt, Artificial Sequence
  Synthetic
gcacguuacaauccgauc

SEQ ID NO: 284916 - RNA, 19 nt, Artificial Sequence
  Synthetic
ugcacguuacaauccgauc

SEQ ID NO: 284917 - RNA, 20 nt, Artificial Sequence
  Synthetic
uugcacguuacaauccgauc

SEQ ID NO: 284918 - RNA, 21 nt, Artificial Sequence
  Synthetic
guugcacguuacaauccgauc

SEQ ID NO: 284919 - RNA, 22 nt, Artificial Sequence
  Synthetic
uguugcacguuacaauccgauc

SEQ ID NO: 284920 - RNA, 23 nt, Artificial Sequence
  Synthetic
uuguugcacguuacaauccgauc

SEQ ID NO: 284921 - RNA, 24 nt, Artificial Sequence
  Synthetic
uuuguugcacguuacaauccgauc

SEQ ID NO: 284922 - RNA, 18 nt, Artificial Sequence
  Synthetic
aauauaauuccugcgauc

SEQ ID NO: 284923 - RNA, 19 nt, Artificial Sequence
  Synthetic
uaauauaauuccugcgauc

SEQ ID NO: 284924 - RNA, 20 nt, Artificial Sequence
  Synthetic
guaauauaauuccugcgauc

SEQ ID NO: 284925 - RNA, 21 nt, Artificial Sequence
  Synthetic
uguaauauaauuccugcgauc

SEQ ID NO: 284926 - RNA, 22 nt, Artificial Sequence
  Synthetic
auguaauauaauuccugcgauc

SEQ ID NO: 284927 - RNA, 23 nt, Artificial Sequence
  Synthetic
uauguaauauaauuccugcgauc

SEQ ID NO: 284928 - RNA, 24 nt, Artificial Sequence
  Synthetic
uuauguaauauaauuccugcgauc

SEQ ID NO: 284929 - RNA, 18 nt, Artificial Sequence
  Synthetic
accaauacuuaaucgauc

SEQ ID NO: 284930 - RNA, 19 nt, Artificial Sequence
  Synthetic
uaccaauacuuaaucgauc

SEQ ID NO: 284931 - RNA, 20 nt, Artificial Sequence
  Synthetic
auaccaauacuuaaucgauc

SEQ ID NO: 284932 - RNA, 21 nt, Artificial Sequence
  Synthetic
cauaccaauacuuaaucgauc

SEQ ID NO: 284933 - RNA, 22 nt, Artificial Sequence
  Synthetic
ccauaccaauacuuaaucgauc

SEQ ID NO: 284934 - RNA, 23 nt, Artificial Sequence
  Synthetic
uccauaccaauacuuaaucgauc

SEQ ID NO: 284935 - RNA, 24 nt, Artificial Sequence
  Synthetic
cuccauaccaauacuuaaucgauc

SEQ ID NO: 284936 - RNA, 18 nt, Artificial Sequence
  Synthetic
ggcaauuccucaaggauc

SEQ ID NO: 284937 - RNA, 19 nt, Artificial Sequence
  Synthetic
uggcaauuccucaaggauc

SEQ ID NO: 284938 - RNA, 20 nt, Artificial Sequence
  Synthetic
guggcaauuccucaaggauc

SEQ ID NO: 284939 - RNA, 21 nt, Artificial Sequence
  Synthetic
uguggcaauuccucaaggauc

SEQ ID NO: 284940 - RNA, 22 nt, Artificial Sequence
  Synthetic
guguggcaauuccucaaggauc

SEQ ID NO: 284941 - RNA, 23 nt, Artificial Sequence
  Synthetic
aguguggcaauuccucaaggauc

SEQ ID NO: 284942 - RNA, 24 nt, Artificial Sequence
  Synthetic
caguguggcaauuccucaaggauc

SEQ ID NO: 284943 - RNA, 18 nt, Artificial Sequence
  Synthetic
cuuuauuagucaaggauc

SEQ ID NO: 284944 - RNA, 19 nt, Artificial Sequence
  Synthetic
ucuuuauuagucaaggauc

SEQ ID NO: 284945 - RNA, 20 nt, Artificial Sequence
  Synthetic
aucuuuauuagucaaggauc

SEQ ID NO: 284946 - RNA, 21 nt, Artificial Sequence
  Synthetic
uaucuuuauuagucaaggauc

SEQ ID NO: 284947 - RNA, 22 nt, Artificial Sequence
  Synthetic
cuaucuuuauuagucaaggauc

SEQ ID NO: 284948 - RNA, 23 nt, Artificial Sequence
  Synthetic
ucuaucuuuauuagucaaggauc

SEQ ID NO: 284949 - RNA, 24 nt, Artificial Sequence
  Synthetic
aucuaucuuuauuagucaaggauc

SEQ ID NO: 284950 - RNA, 18 nt, Artificial Sequence
  Synthetic
ggccgaggcagaaggauc

SEQ ID NO: 284951 - RNA, 19 nt, Artificial Sequence
  Synthetic
aggccgaggcagaaggauc

SEQ ID NO: 284952 - RNA, 20 nt, Artificial Sequence
  Synthetic
gaggccgaggcagaaggauc

SEQ ID NO: 284953 - RNA, 21 nt, Artificial Sequence
  Synthetic
ggaggccgaggcagaaggauc

SEQ ID NO: 284954 - RNA, 22 nt, Artificial Sequence
  Synthetic
gggaggccgaggcagaaggauc

SEQ ID NO: 284955 - RNA, 23 nt, Artificial Sequence
  Synthetic
ugggaggccgaggcagaaggauc

SEQ ID NO: 284956 - RNA, 24 nt, Artificial Sequence
  Synthetic
uugggaggccgaggcagaaggauc

SEQ ID NO: 284957 - RNA, 18 nt, Artificial Sequence
  Synthetic
caaaguuauagaaggauc

SEQ ID NO: 284958 - RNA, 19 nt, Artificial Sequence
  Synthetic
ccaaaguuauagaaggauc

SEQ ID NO: 284959 - RNA, 20 nt, Artificial Sequence
  Synthetic
accaaaguuauagaaggauc

SEQ ID NO: 284960 - RNA, 21 nt, Artificial Sequence
  Synthetic
aaccaaaguuauagaaggauc

SEQ ID NO: 284961 - RNA, 22 nt, Artificial Sequence
  Synthetic
uaaccaaaguuauagaaggauc

SEQ ID NO: 284962 - RNA, 23 nt, Artificial Sequence
  Synthetic
cuaaccaaaguuauagaaggauc

SEQ ID NO: 284963 - RNA, 24 nt, Artificial Sequence
  Synthetic
gcuaaccaaaguuauagaaggauc

SEQ ID NO: 284964 - RNA, 18 nt, Artificial Sequence
  Synthetic
uccuaacuucuaaggauc

SEQ ID NO: 284965 - RNA, 19 nt, Artificial Sequence
  Synthetic
uuccuaacuucuaaggauc

SEQ ID NO: 284966 - RNA, 20 nt, Artificial Sequence
  Synthetic
auuccuaacuucuaaggauc

SEQ ID NO: 284967 - RNA, 21 nt, Artificial Sequence
  Synthetic
cauuccuaacuucuaaggauc

SEQ ID NO: 284968 - RNA, 22 nt, Artificial Sequence
  Synthetic
ccauuccuaacuucuaaggauc

SEQ ID NO: 284969 - RNA, 23 nt, Artificial Sequence
  Synthetic
accauuccuaacuucuaaggauc

SEQ ID NO: 284970 - RNA, 24 nt, Artificial Sequence
  Synthetic
gaccauuccuaacuucuaaggauc

SEQ ID NO: 284971 - RNA, 18 nt, Artificial Sequence
  Synthetic
uuugagguguacaggauc

SEQ ID NO: 284972 - RNA, 19 nt, Artificial Sequence
  Synthetic
cuuugagguguacaggauc

SEQ ID NO: 284973 - RNA, 20 nt, Artificial Sequence
  Synthetic
ucuuugagguguacaggauc

SEQ ID NO: 284974 - RNA, 21 nt, Artificial Sequence
  Synthetic
aucuuugagguguacaggauc

SEQ ID NO: 284975 - RNA, 22 nt, Artificial Sequence
  Synthetic
aaucuuugagguguacaggauc

SEQ ID NO: 284976 - RNA, 23 nt, Artificial Sequence
  Synthetic
aaaucuuugagguguacaggauc

SEQ ID NO: 284977 - RNA, 24 nt, Artificial Sequence
  Synthetic
aaaaucuuugagguguacaggauc

SEQ ID NO: 284978 - RNA, 18 nt, Artificial Sequence
  Synthetic
ucaaaaucugggaggauc

SEQ ID NO: 284979 - RNA, 19 nt, Artificial Sequence
  Synthetic
gucaaaaucugggaggauc

SEQ ID NO: 284980 - RNA, 20 nt, Artificial Sequence
  Synthetic
ugucaaaaucugggaggauc

SEQ ID NO: 284981 - RNA, 21 nt, Artificial Sequence
  Synthetic
augucaaaaucugggaggauc

SEQ ID NO: 284982 - RNA, 22 nt, Artificial Sequence
  Synthetic
aaugucaaaaucugggaggauc

SEQ ID NO: 284983 - RNA, 23 nt, Artificial Sequence
  Synthetic
gaaugucaaaaucugggaggauc

SEQ ID NO: 284984 - RNA, 24 nt, Artificial Sequence
  Synthetic
ggaaugucaaaaucugggaggauc

SEQ ID NO: 284985 - RNA, 18 nt, Artificial Sequence
  Synthetic
uagauuuuaaauaggauc

SEQ ID NO: 284986 - RNA, 19 nt, Artificial Sequence
  Synthetic
guagauuuuaaauaggauc

SEQ ID NO: 284987 - RNA, 20 nt, Artificial Sequence
  Synthetic
uguagauuuuaaauaggauc

SEQ ID NO: 284988 - RNA, 21 nt, Artificial Sequence
  Synthetic
auguagauuuuaaauaggauc

SEQ ID NO: 284989 - RNA, 22 nt, Artificial Sequence
  Synthetic
aauguagauuuuaaauaggauc

SEQ ID NO: 284990 - RNA, 23 nt, Artificial Sequence
  Synthetic
uaauguagauuuuaaauaggauc

SEQ ID NO: 284991 - RNA, 24 nt, Artificial Sequence
  Synthetic
cuaauguagauuuuaaauaggauc

SEQ ID NO: 284992 - RNA, 18 nt, Artificial Sequence
  Synthetic
uuagauucucauaggauc

SEQ ID NO: 284993 - RNA, 19 nt, Artificial Sequence
  Synthetic
auuagauucucauaggauc

SEQ ID NO: 284994 - RNA, 20 nt, Artificial Sequence
  Synthetic
uauuagauucucauaggauc

SEQ ID NO: 284995 - RNA, 21 nt, Artificial Sequence
  Synthetic
guauuagauucucauaggauc

SEQ ID NO: 284996 - RNA, 22 nt, Artificial Sequence
  Synthetic
gguauuagauucucauaggauc

SEQ ID NO: 284997 - RNA, 23 nt, Artificial Sequence
  Synthetic
cgguauuagauucucauaggauc

SEQ ID NO: 284998 - RNA, 24 nt, Artificial Sequence
  Synthetic
gcgguauuagauucucauaggauc

SEQ ID NO: 284999 - RNA, 18 nt, Artificial Sequence
  Synthetic
guaaaagucacuaggauc

SEQ ID NO: 285000 - RNA, 19 nt, Artificial Sequence
  Synthetic
gguaaaagucacuaggauc

SEQ ID NO: 285001 - RNA, 20 nt, Artificial Sequence
  Synthetic
cgguaaaagucacuaggauc

SEQ ID NO: 285002 - RNA, 21 nt, Artificial Sequence
  Synthetic
acgguaaaagucacuaggauc

SEQ ID NO: 285003 - RNA, 22 nt, Artificial Sequence
  Synthetic
aacgguaaaagucacuaggauc

SEQ ID NO: 285004 - RNA, 23 nt, Artificial Sequence
  Synthetic
aaacgguaaaagucacuaggauc

SEQ ID NO: 285005 - RNA, 24 nt, Artificial Sequence
  Synthetic
gaaacgguaaaagucacuaggauc

SEQ ID NO: 285006 - RNA, 18 nt, Artificial Sequence
  Synthetic
ccugcaaagccuaggauc

SEQ ID NO: 285007 - RNA, 19 nt, Artificial Sequence
  Synthetic
accugcaaagccuaggauc

SEQ ID NO: 285008 - RNA, 20 nt, Artificial Sequence
  Synthetic
uaccugcaaagccuaggauc

SEQ ID NO: 285009 - RNA, 21 nt, Artificial Sequence
  Synthetic
uuaccugcaaagccuaggauc

SEQ ID NO: 285010 - RNA, 22 nt, Artificial Sequence
  Synthetic
auuaccugcaaagccuaggauc

SEQ ID NO: 285011 - RNA, 23 nt, Artificial Sequence
  Synthetic
uauuaccugcaaagccuaggauc

SEQ ID NO: 285012 - RNA, 24 nt, Artificial Sequence
  Synthetic
guauuaccugcaaagccuaggauc

SEQ ID NO: 285013 - RNA, 18 nt, Artificial Sequence
  Synthetic
auaaaugaauguaggauc

SEQ ID NO: 285014 - RNA, 19 nt, Artificial Sequence
  Synthetic
gauaaaugaauguaggauc

SEQ ID NO: 285015 - RNA, 20 nt, Artificial Sequence
  Synthetic
agauaaaugaauguaggauc

SEQ ID NO: 285016 - RNA, 21 nt, Artificial Sequence
  Synthetic
aagauaaaugaauguaggauc

SEQ ID NO: 285017 - RNA, 22 nt, Artificial Sequence
  Synthetic
gaagauaaaugaauguaggauc

SEQ ID NO: 285018 - RNA, 23 nt, Artificial Sequence
  Synthetic
ugaagauaaaugaauguaggauc

SEQ ID NO: 285019 - RNA, 24 nt, Artificial Sequence
  Synthetic
cugaagauaaaugaauguaggauc

SEQ ID NO: 285020 - RNA, 18 nt, Artificial Sequence
  Synthetic
gugaugcuugaacggauc

SEQ ID NO: 285021 - RNA, 19 nt, Artificial Sequence
  Synthetic
agugaugcuugaacggauc

SEQ ID NO: 285022 - RNA, 20 nt, Artificial Sequence
  Synthetic
cagugaugcuugaacggauc

SEQ ID NO: 285023 - RNA, 21 nt, Artificial Sequence
  Synthetic
acagugaugcuugaacggauc

SEQ ID NO: 285024 - RNA, 22 nt, Artificial Sequence
  Synthetic
cacagugaugcuugaacggauc

SEQ ID NO: 285025 - RNA, 23 nt, Artificial Sequence
  Synthetic
ucacagugaugcuugaacggauc

SEQ ID NO: 285026 - RNA, 24 nt, Artificial Sequence
  Synthetic
gucacagugaugcuugaacggauc

SEQ ID NO: 285027 - RNA, 18 nt, Artificial Sequence
  Synthetic
ggcagaggcgggcggauc

SEQ ID NO: 285028 - RNA, 19 nt, Artificial Sequence
  Synthetic
aggcagaggcgggcggauc

SEQ ID NO: 285029 - RNA, 20 nt, Artificial Sequence
  Synthetic
gaggcagaggcgggcggauc

SEQ ID NO: 285030 - RNA, 21 nt, Artificial Sequence
  Synthetic
ggaggcagaggcgggcggauc

SEQ ID NO: 285031 - RNA, 22 nt, Artificial Sequence
  Synthetic
gggaggcagaggcgggcggauc

SEQ ID NO: 285032 - RNA, 23 nt, Artificial Sequence
  Synthetic
ugggaggcagaggcgggcggauc

SEQ ID NO: 285033 - RNA, 24 nt, Artificial Sequence
  Synthetic
uugggaggcagaggcgggcggauc

SEQ ID NO: 285034 - RNA, 21 nt, Artificial Sequence
  Synthetic
ggaggccgaggcgggcggauc

SEQ ID NO: 285035 - RNA, 22 nt, Artificial Sequence
  Synthetic
aggaggccgaggcgggcggauc

SEQ ID NO: 285036 - RNA, 23 nt, Artificial Sequence
  Synthetic
caggaggccgaggcgggcggauc

SEQ ID NO: 285037 - RNA, 24 nt, Artificial Sequence
  Synthetic
ucaggaggccgaggcgggcggauc

SEQ ID NO: 285038 - RNA, 22 nt, Artificial Sequence
  Synthetic
gggaggccgaggcgggcggauc

SEQ ID NO: 285039 - RNA, 23 nt, Artificial Sequence
  Synthetic
ggggaggccgaggcgggcggauc

SEQ ID NO: 285040 - RNA, 24 nt, Artificial Sequence
  Synthetic
uggggaggccgaggcgggcggauc

SEQ ID NO: 285041 - RNA, 23 nt, Artificial Sequence
  Synthetic
ugggaggccgaggcgggcggauc

SEQ ID NO: 285042 - RNA, 24 nt, Artificial Sequence
  Synthetic
cugggaggccgaggcgggcggauc

SEQ ID NO: 285043 - RNA, 24 nt, Artificial Sequence
  Synthetic
uugggaggccgaggcgggcggauc

SEQ ID NO: 285044 - RNA, 18 nt, Artificial Sequence
  Synthetic
ggaugaggcgggcggauc

SEQ ID NO: 285045 - RNA, 19 nt, Artificial Sequence
  Synthetic
aggaugaggcgggcggauc

SEQ ID NO: 285046 - RNA, 20 nt, Artificial Sequence
  Synthetic
gaggaugaggcgggcggauc

SEQ ID NO: 285047 - RNA, 21 nt, Artificial Sequence
  Synthetic
ggaggaugaggcgggcggauc

SEQ ID NO: 285048 - RNA, 22 nt, Artificial Sequence
  Synthetic
gggaggaugaggcgggcggauc

SEQ ID NO: 285049 - RNA, 23 nt, Artificial Sequence
  Synthetic
ugggaggaugaggcgggcggauc

SEQ ID NO: 285050 - RNA, 24 nt, Artificial Sequence
  Synthetic
uugggaggaugaggcgggcggauc

SEQ ID NO: 285051 - RNA, 18 nt, Artificial Sequence
  Synthetic
ggccaaggugggcggauc

SEQ ID NO: 285052 - RNA, 19 nt, Artificial Sequence
  Synthetic
aggccaaggugggcggauc

SEQ ID NO: 285053 - RNA, 20 nt, Artificial Sequence
  Synthetic
gaggccaaggugggcggauc

SEQ ID NO: 285054 - RNA, 21 nt, Artificial Sequence
  Synthetic
ggaggccaaggugggcggauc

SEQ ID NO: 285055 - RNA, 22 nt, Artificial Sequence
  Synthetic
gggaggccaaggugggcggauc

SEQ ID NO: 285056 - RNA, 23 nt, Artificial Sequence
  Synthetic
ugggaggccaaggugggcggauc

SEQ ID NO: 285057 - RNA, 24 nt, Artificial Sequence
  Synthetic
uugggaggccaaggugggcggauc

SEQ ID NO: 285058 - RNA, 18 nt, Artificial Sequence
  Synthetic
ggcgauuccucagggauc

SEQ ID NO: 285059 - RNA, 19 nt, Artificial Sequence
  Synthetic
uggcgauuccucagggauc

SEQ ID NO: 285060 - RNA, 20 nt, Artificial Sequence
  Synthetic
guggcgauuccucagggauc

SEQ ID NO: 285061 - RNA, 21 nt, Artificial Sequence
  Synthetic
uguggcgauuccucagggauc

SEQ ID NO: 285062 - RNA, 22 nt, Artificial Sequence
  Synthetic
guguggcgauuccucagggauc

SEQ ID NO: 285063 - RNA, 23 nt, Artificial Sequence
  Synthetic
aguguggcgauuccucagggauc

SEQ ID NO: 285064 - RNA, 24 nt, Artificial Sequence
  Synthetic
caguguggcgauuccucagggauc

SEQ ID NO: 285065 - RNA, 23 nt, Artificial Sequence
  Synthetic
gguguggcgauuccucagggauc

SEQ ID NO: 285066 - RNA, 24 nt, Artificial Sequence
  Synthetic
cgguguggcgauuccucagggauc

SEQ ID NO: 285067 - RNA, 18 nt, Artificial Sequence
  Synthetic
aagaaauaccgagggauc

SEQ ID NO: 285068 - RNA, 19 nt, Artificial Sequence
  Synthetic
gaagaaauaccgagggauc

SEQ ID NO: 285069 - RNA, 20 nt, Artificial Sequence
  Synthetic
ggaagaaauaccgagggauc

SEQ ID NO: 285070 - RNA, 21 nt, Artificial Sequence
  Synthetic
uggaagaaauaccgagggauc

SEQ ID NO: 285071 - RNA, 22 nt, Artificial Sequence
  Synthetic
uuggaagaaauaccgagggauc

SEQ ID NO: 285072 - RNA, 23 nt, Artificial Sequence
  Synthetic
uuuggaagaaauaccgagggauc

SEQ ID NO: 285073 - RNA, 24 nt, Artificial Sequence
  Synthetic
auuuggaagaaauaccgagggauc

SEQ ID NO: 285074 - RNA, 18 nt, Artificial Sequence
  Synthetic
acauguucuugcgggauc

SEQ ID NO: 285075 - RNA, 19 nt, Artificial Sequence
  Synthetic
gacauguucuugcgggauc

SEQ ID NO: 285076 - RNA, 20 nt, Artificial Sequence
  Synthetic
ugacauguucuugcgggauc

SEQ ID NO: 285077 - RNA, 21 nt, Artificial Sequence
  Synthetic
cugacauguucuugcgggauc

SEQ ID NO: 285078 - RNA, 22 nt, Artificial Sequence
  Synthetic
ucugacauguucuugcgggauc

SEQ ID NO: 285079 - RNA, 23 nt, Artificial Sequence
  Synthetic
cucugacauguucuugcgggauc

SEQ ID NO: 285080 - RNA, 24 nt, Artificial Sequence
  Synthetic
ccucugacauguucuugcgggauc

SEQ ID NO: 285081 - RNA, 18 nt, Artificial Sequence
  Synthetic
uugcuauccguggggauc

SEQ ID NO: 285082 - RNA, 19 nt, Artificial Sequence
  Synthetic
uuugcuauccguggggauc

SEQ ID NO: 285083 - RNA, 20 nt, Artificial Sequence
  Synthetic
auuugcuauccguggggauc

SEQ ID NO: 285084 - RNA, 21 nt, Artificial Sequence
  Synthetic
gauuugcuauccguggggauc

SEQ ID NO: 285085 - RNA, 22 nt, Artificial Sequence
  Synthetic
ggauuugcuauccguggggauc

SEQ ID NO: 285086 - RNA, 23 nt, Artificial Sequence
  Synthetic
uggauuugcuauccguggggauc

SEQ ID NO: 285087 - RNA, 24 nt, Artificial Sequence
  Synthetic
guggauuugcuauccguggggauc

SEQ ID NO: 285088 - RNA, 18 nt, Artificial Sequence
  Synthetic
uaacuauuuacugggauc

SEQ ID NO: 285089 - RNA, 19 nt, Artificial Sequence
  Synthetic
uuaacuauuuacugggauc

SEQ ID NO: 285090 - RNA, 20 nt, Artificial Sequence
  Synthetic
cuuaacuauuuacugggauc

SEQ ID NO: 285091 - RNA, 21 nt, Artificial Sequence
  Synthetic
ucuuaacuauuuacugggauc

SEQ ID NO: 285092 - RNA, 22 nt, Artificial Sequence
  Synthetic
cucuuaacuauuuacugggauc

SEQ ID NO: 285093 - RNA, 23 nt, Artificial Sequence
  Synthetic
ucucuuaacuauuuacugggauc

SEQ ID NO: 285094 - RNA, 24 nt, Artificial Sequence
  Synthetic
uucucuuaacuauuuacugggauc

SEQ ID NO: 285095 - RNA, 18 nt, Artificial Sequence
  Synthetic
aauguaguggaauggauc

SEQ ID NO: 285096 - RNA, 19 nt, Artificial Sequence
  Synthetic
aaauguaguggaauggauc

SEQ ID NO: 285097 - RNA, 20 nt, Artificial Sequence
  Synthetic
aaaauguaguggaauggauc

SEQ ID NO: 285098 - RNA, 21 nt, Artificial Sequence
  Synthetic
caaaauguaguggaauggauc

SEQ ID NO: 285099 - RNA, 22 nt, Artificial Sequence
  Synthetic
ucaaaauguaguggaauggauc

SEQ ID NO: 285100 - RNA, 23 nt, Artificial Sequence
  Synthetic
uucaaaauguaguggaauggauc

SEQ ID NO: 285101 - RNA, 24 nt, Artificial Sequence
  Synthetic
auucaaaauguaguggaauggauc

SEQ ID NO: 285102 - RNA, 18 nt, Artificial Sequence
  Synthetic
auuuggaggcccuggauc

SEQ ID NO: 285103 - RNA, 19 nt, Artificial Sequence
  Synthetic
uauuuggaggcccuggauc

SEQ ID NO: 285104 - RNA, 20 nt, Artificial Sequence
  Synthetic
uuauuuggaggcccuggauc

SEQ ID NO: 285105 - RNA, 21 nt, Artificial Sequence
  Synthetic
cuuauuuggaggcccuggauc

SEQ ID NO: 285106 - RNA, 22 nt, Artificial Sequence
  Synthetic
ucuuauuuggaggcccuggauc

SEQ ID NO: 285107 - RNA, 23 nt, Artificial Sequence
  Synthetic
aucuuauuuggaggcccuggauc

SEQ ID NO: 285108 - RNA, 24 nt, Artificial Sequence
  Synthetic
uaucuuauuuggaggcccuggauc

SEQ ID NO: 285109 - RNA, 18 nt, Artificial Sequence
  Synthetic
ggaaaauggaucuggauc

SEQ ID NO: 285110 - RNA, 19 nt, Artificial Sequence
  Synthetic
gggaaaauggaucuggauc

SEQ ID NO: 285111 - RNA, 20 nt, Artificial Sequence
  Synthetic
agggaaaauggaucuggauc

SEQ ID NO: 285112 - RNA, 21 nt, Artificial Sequence
  Synthetic
aagggaaaauggaucuggauc

SEQ ID NO: 285113 - RNA, 22 nt, Artificial Sequence
  Synthetic
gaagggaaaauggaucuggauc

SEQ ID NO: 285114 - RNA, 23 nt, Artificial Sequence
  Synthetic
agaagggaaaauggaucuggauc

SEQ ID NO: 285115 - RNA, 24 nt, Artificial Sequence
  Synthetic
aagaagggaaaauggaucuggauc

SEQ ID NO: 285116 - RNA, 18 nt, Artificial Sequence
  Synthetic
ggcugaagcagguggauc

SEQ ID NO: 285117 - RNA, 19 nt, Artificial Sequence
  Synthetic
aggcugaagcagguggauc

SEQ ID NO: 285118 - RNA, 20 nt, Artificial Sequence
  Synthetic
gaggcugaagcagguggauc

SEQ ID NO: 285119 - RNA, 21 nt, Artificial Sequence
  Synthetic
ggaggcugaagcagguggauc

SEQ ID NO: 285120 - RNA, 22 nt, Artificial Sequence
  Synthetic
gggaggcugaagcagguggauc

SEQ ID NO: 285121 - RNA, 23 nt, Artificial Sequence
  Synthetic
ugggaggcugaagcagguggauc

SEQ ID NO: 285122 - RNA, 24 nt, Artificial Sequence
  Synthetic
uugggaggcugaagcagguggauc

SEQ ID NO: 285123 - RNA, 18 nt, Artificial Sequence
  Synthetic
ggccgaggcagguggauc

SEQ ID NO: 285124 - RNA, 19 nt, Artificial Sequence
  Synthetic
aggccgaggcagguggauc

SEQ ID NO: 285125 - RNA, 20 nt, Artificial Sequence
  Synthetic
gaggccgaggcagguggauc

SEQ ID NO: 285126 - RNA, 21 nt, Artificial Sequence
  Synthetic
ggaggccgaggcagguggauc

SEQ ID NO: 285127 - RNA, 22 nt, Artificial Sequence
  Synthetic
gggaggccgaggcagguggauc

SEQ ID NO: 285128 - RNA, 23 nt, Artificial Sequence
  Synthetic
ugggaggccgaggcagguggauc

SEQ ID NO: 285129 - RNA, 24 nt, Artificial Sequence
  Synthetic
uugggaggccgaggcagguggauc

SEQ ID NO: 285130 - RNA, 18 nt, Artificial Sequence
  Synthetic
ggcugaggcagguggauc

SEQ ID NO: 285131 - RNA, 19 nt, Artificial Sequence
  Synthetic
aggcugaggcagguggauc

SEQ ID NO: 285132 - RNA, 20 nt, Artificial Sequence
  Synthetic
gaggcugaggcagguggauc

SEQ ID NO: 285133 - RNA, 21 nt, Artificial Sequence
  Synthetic
ggaggcugaggcagguggauc

SEQ ID NO: 285134 - RNA, 22 nt, Artificial Sequence
  Synthetic
gggaggcugaggcagguggauc

SEQ ID NO: 285135 - RNA, 23 nt, Artificial Sequence
  Synthetic
ugggaggcugaggcagguggauc

SEQ ID NO: 285136 - RNA, 24 nt, Artificial Sequence
  Synthetic
uugggaggcugaggcagguggauc

SEQ ID NO: 285137 - RNA, 18 nt, Artificial Sequence
  Synthetic
ggcugaggcggguggauc

SEQ ID NO: 285138 - RNA, 19 nt, Artificial Sequence
  Synthetic
aggcugaggcggguggauc

SEQ ID NO: 285139 - RNA, 20 nt, Artificial Sequence
  Synthetic
gaggcugaggcggguggauc

SEQ ID NO: 285140 - RNA, 21 nt, Artificial Sequence
  Synthetic
ggaggcugaggcggguggauc

SEQ ID NO: 285141 - RNA, 22 nt, Artificial Sequence
  Synthetic
gggaggcugaggcggguggauc

SEQ ID NO: 285142 - RNA, 23 nt, Artificial Sequence
  Synthetic
ugggaggcugaggcggguggauc

SEQ ID NO: 285143 - RNA, 24 nt, Artificial Sequence
  Synthetic
uugggaggcugaggcggguggauc

SEQ ID NO: 285144 - RNA, 18 nt, Artificial Sequence
  Synthetic
ggccaagguggguggauc

SEQ ID NO: 285145 - RNA, 19 nt, Artificial Sequence
  Synthetic
aggccaagguggguggauc

SEQ ID NO: 285146 - RNA, 20 nt, Artificial Sequence
  Synthetic
gaggccaagguggguggauc

SEQ ID NO: 285147 - RNA, 21 nt, Artificial Sequence
  Synthetic
ggaggccaagguggguggauc

SEQ ID NO: 285148 - RNA, 22 nt, Artificial Sequence
  Synthetic
gggaggccaagguggguggauc

SEQ ID NO: 285149 - RNA, 23 nt, Artificial Sequence
  Synthetic
cgggaggccaagguggguggauc

SEQ ID NO: 285150 - RNA, 24 nt, Artificial Sequence
  Synthetic
ucgggaggccaagguggguggauc

SEQ ID NO: 285151 - RNA, 18 nt, Artificial Sequence
  Synthetic
uccuccaaaugguggauc

SEQ ID NO: 285152 - RNA, 19 nt, Artificial Sequence
  Synthetic
uuccuccaaaugguggauc

SEQ ID NO: 285153 - RNA, 20 nt, Artificial Sequence
  Synthetic
uuuccuccaaaugguggauc

SEQ ID NO: 285154 - RNA, 21 nt, Artificial Sequence
  Synthetic
auuuccuccaaaugguggauc

SEQ ID NO: 285155 - RNA, 22 nt, Artificial Sequence
  Synthetic
gauuuccuccaaaugguggauc

SEQ ID NO: 285156 - RNA, 23 nt, Artificial Sequence
  Synthetic
agauuuccuccaaaugguggauc

SEQ ID NO: 285157 - RNA, 24 nt, Artificial Sequence
  Synthetic
uagauuuccuccaaaugguggauc

SEQ ID NO: 285158 - RNA, 18 nt, Artificial Sequence
  Synthetic
aucccagaauuguggauc

SEQ ID NO: 285159 - RNA, 19 nt, Artificial Sequence
  Synthetic
aaucccagaauuguggauc

SEQ ID NO: 285160 - RNA, 20 nt, Artificial Sequence
  Synthetic
aaaucccagaauuguggauc

SEQ ID NO: 285161 - RNA, 21 nt, Artificial Sequence
  Synthetic
gaaaucccagaauuguggauc

SEQ ID NO: 285162 - RNA, 22 nt, Artificial Sequence
  Synthetic
agaaaucccagaauuguggauc

SEQ ID NO: 285163 - RNA, 23 nt, Artificial Sequence
  Synthetic
gagaaaucccagaauuguggauc

SEQ ID NO: 285164 - RNA, 24 nt, Artificial Sequence
  Synthetic
agagaaaucccagaauuguggauc

SEQ ID NO: 285165 - RNA, 18 nt, Artificial Sequence
  Synthetic
gguggaggcaauuggauc

SEQ ID NO: 285166 - RNA, 19 nt, Artificial Sequence
  Synthetic
agguggaggcaauuggauc

SEQ ID NO: 285167 - RNA, 20 nt, Artificial Sequence
  Synthetic
cagguggaggcaauuggauc

SEQ ID NO: 285168 - RNA, 21 nt, Artificial Sequence
  Synthetic
ccagguggaggcaauuggauc

SEQ ID NO: 285169 - RNA, 22 nt, Artificial Sequence
  Synthetic
accagguggaggcaauuggauc

SEQ ID NO: 285170 - RNA, 23 nt, Artificial Sequence
  Synthetic
gaccagguggaggcaauuggauc

SEQ ID NO: 285171 - RNA, 24 nt, Artificial Sequence
  Synthetic
agaccagguggaggcaauuggauc

SEQ ID NO: 285172 - RNA, 18 nt, Artificial Sequence
  Synthetic
cauacccuagauuggauc

SEQ ID NO: 285173 - RNA, 19 nt, Artificial Sequence
  Synthetic
ucauacccuagauuggauc

SEQ ID NO: 285174 - RNA, 20 nt, Artificial Sequence
  Synthetic
aucauacccuagauuggauc

SEQ ID NO: 285175 - RNA, 21 nt, Artificial Sequence
  Synthetic
aaucauacccuagauuggauc

SEQ ID NO: 285176 - RNA, 22 nt, Artificial Sequence
  Synthetic
aaaucauacccuagauuggauc

SEQ ID NO: 285177 - RNA, 23 nt, Artificial Sequence
  Synthetic
caaaucauacccuagauuggauc

SEQ ID NO: 285178 - RNA, 24 nt, Artificial Sequence
  Synthetic
ccaaaucauacccuagauuggauc

SEQ ID NO: 285179 - RNA, 18 nt, Artificial Sequence
  Synthetic
gagauucuggauuggauc

SEQ ID NO: 285180 - RNA, 19 nt, Artificial Sequence
  Synthetic
ggagauucuggauuggauc

SEQ ID NO: 285181 - RNA, 20 nt, Artificial Sequence
  Synthetic
aggagauucuggauuggauc

SEQ ID NO: 285182 - RNA, 21 nt, Artificial Sequence
  Synthetic
uaggagauucuggauuggauc

SEQ ID NO: 285183 - RNA, 22 nt, Artificial Sequence
  Synthetic
guaggagauucuggauuggauc

SEQ ID NO: 285184 - RNA, 23 nt, Artificial Sequence
  Synthetic
aguaggagauucuggauuggauc

SEQ ID NO: 285185 - RNA, 24 nt, Artificial Sequence
  Synthetic
caguaggagauucuggauuggauc

SEQ ID NO: 285186 - RNA, 18 nt, Artificial Sequence
  Synthetic
uucugcaguccuuggauc

SEQ ID NO: 285187 - RNA, 19 nt, Artificial Sequence
  Synthetic
auucugcaguccuuggauc

SEQ ID NO: 285188 - RNA, 20 nt, Artificial Sequence
  Synthetic
cauucugcaguccuuggauc

SEQ ID NO: 285189 - RNA, 21 nt, Artificial Sequence
  Synthetic
ccauucugcaguccuuggauc

SEQ ID NO: 285190 - RNA, 22 nt, Artificial Sequence
  Synthetic
uccauucugcaguccuuggauc

SEQ ID NO: 285191 - RNA, 23 nt, Artificial Sequence
  Synthetic
auccauucugcaguccuuggauc

SEQ ID NO: 285192 - RNA, 24 nt, Artificial Sequence
  Synthetic
cauccauucugcaguccuuggauc

SEQ ID NO: 285193 - RNA, 18 nt, Artificial Sequence
  Synthetic
ggccgaggcaguuggauc

SEQ ID NO: 285194 - RNA, 19 nt, Artificial Sequence
  Synthetic
aggccgaggcaguuggauc

SEQ ID NO: 285195 - RNA, 20 nt, Artificial Sequence
  Synthetic
gaggccgaggcaguuggauc

SEQ ID NO: 285196 - RNA, 21 nt, Artificial Sequence
  Synthetic
ggaggccgaggcaguuggauc

SEQ ID NO: 285197 - RNA, 22 nt, Artificial Sequence
  Synthetic
gggaggccgaggcaguuggauc

SEQ ID NO: 285198 - RNA, 23 nt, Artificial Sequence
  Synthetic
ugggaggccgaggcaguuggauc

SEQ ID NO: 285199 - RNA, 24 nt, Artificial Sequence
  Synthetic
uugggaggccgaggcaguuggauc

SEQ ID NO: 285200 - RNA, 18 nt, Artificial Sequence
  Synthetic
gacacucagcuuuggauc

SEQ ID NO: 285201 - RNA, 19 nt, Artificial Sequence
  Synthetic
ugacacucagcuuuggauc

SEQ ID NO: 285202 - RNA, 20 nt, Artificial Sequence
  Synthetic
gugacacucagcuuuggauc

SEQ ID NO: 285203 - RNA, 21 nt, Artificial Sequence
  Synthetic
agugacacucagcuuuggauc

SEQ ID NO: 285204 - RNA, 22 nt, Artificial Sequence
  Synthetic
cagugacacucagcuuuggauc

SEQ ID NO: 285205 - RNA, 23 nt, Artificial Sequence
  Synthetic
gcagugacacucagcuuuggauc

SEQ ID NO: 285206 - RNA, 24 nt, Artificial Sequence
  Synthetic
agcagugacacucagcuuuggauc

SEQ ID NO: 285207 - RNA, 18 nt, Artificial Sequence
  Synthetic
uucucccuucuuuggauc

SEQ ID NO: 285208 - RNA, 19 nt, Artificial Sequence
  Synthetic
uuucucccuucuuuggauc

SEQ ID NO: 285209 - RNA, 20 nt, Artificial Sequence
  Synthetic
uuuucucccuucuuuggauc

SEQ ID NO: 285210 - RNA, 21 nt, Artificial Sequence
  Synthetic
auuuucucccuucuuuggauc

SEQ ID NO: 285211 - RNA, 22 nt, Artificial Sequence
  Synthetic
aauuuucucccuucuuuggauc

SEQ ID NO: 285212 - RNA, 23 nt, Artificial Sequence
  Synthetic
uaauuuucucccuucuuuggauc

SEQ ID NO: 285213 - RNA, 24 nt, Artificial Sequence
  Synthetic
uuaauuuucucccuucuuuggauc

SEQ ID NO: 285214 - RNA, 18 nt, Artificial Sequence
  Synthetic
ccaacacauguaaugauc

SEQ ID NO: 285215 - RNA, 19 nt, Artificial Sequence
  Synthetic
accaacacauguaaugauc

SEQ ID NO: 285216 - RNA, 20 nt, Artificial Sequence
  Synthetic
caccaacacauguaaugauc

SEQ ID NO: 285217 - RNA, 21 nt, Artificial Sequence
  Synthetic
ucaccaacacauguaaugauc

SEQ ID NO: 285218 - RNA, 22 nt, Artificial Sequence
  Synthetic
uucaccaacacauguaaugauc

SEQ ID NO: 285219 - RNA, 23 nt, Artificial Sequence
  Synthetic
cuucaccaacacauguaaugauc

SEQ ID NO: 285220 - RNA, 24 nt, Artificial Sequence
  Synthetic
ccuucaccaacacauguaaugauc

SEQ ID NO: 285221 - RNA, 18 nt, Artificial Sequence
  Synthetic
ucuuguuuuaucaugauc

SEQ ID NO: 285222 - RNA, 19 nt, Artificial Sequence
  Synthetic
gucuuguuuuaucaugauc

SEQ ID NO: 285223 - RNA, 20 nt, Artificial Sequence
  Synthetic
ugucuuguuuuaucaugauc

SEQ ID NO: 285224 - RNA, 21 nt, Artificial Sequence
  Synthetic
cugucuuguuuuaucaugauc

SEQ ID NO: 285225 - RNA, 22 nt, Artificial Sequence
  Synthetic
ccugucuuguuuuaucaugauc

SEQ ID NO: 285226 - RNA, 23 nt, Artificial Sequence
  Synthetic
accugucuuguuuuaucaugauc

SEQ ID NO: 285227 - RNA, 24 nt, Artificial Sequence
  Synthetic
caccugucuuguuuuaucaugauc

SEQ ID NO: 285228 - RNA, 18 nt, Artificial Sequence
  Synthetic
aauuagagagcgaugauc

SEQ ID NO: 285229 - RNA, 19 nt, Artificial Sequence
  Synthetic
gaauuagagagcgaugauc

SEQ ID NO: 285230 - RNA, 20 nt, Artificial Sequence
  Synthetic
agaauuagagagcgaugauc

SEQ ID NO: 285231 - RNA, 21 nt, Artificial Sequence
  Synthetic
uagaauuagagagcgaugauc

SEQ ID NO: 285232 - RNA, 22 nt, Artificial Sequence
  Synthetic
uuagaauuagagagcgaugauc

SEQ ID NO: 285233 - RNA, 23 nt, Artificial Sequence
  Synthetic
uuuagaauuagagagcgaugauc

SEQ ID NO: 285234 - RNA, 24 nt, Artificial Sequence
  Synthetic
uuuuagaauuagagagcgaugauc

SEQ ID NO: 285235 - RNA, 18 nt, Artificial Sequence
  Synthetic
aaagcuauaacuaugauc

SEQ ID NO: 285236 - RNA, 19 nt, Artificial Sequence
  Synthetic
caaagcuauaacuaugauc

SEQ ID NO: 285237 - RNA, 20 nt, Artificial Sequence
  Synthetic
ucaaagcuauaacuaugauc

SEQ ID NO: 285238 - RNA, 21 nt, Artificial Sequence
  Synthetic
uucaaagcuauaacuaugauc

SEQ ID NO: 285239 - RNA, 22 nt, Artificial Sequence
  Synthetic
cuucaaagcuauaacuaugauc

SEQ ID NO: 285240 - RNA, 23 nt, Artificial Sequence
  Synthetic
acuucaaagcuauaacuaugauc

SEQ ID NO: 285241 - RNA, 24 nt, Artificial Sequence
  Synthetic
aacuucaaagcuauaacuaugauc

SEQ ID NO: 285242 - RNA, 18 nt, Artificial Sequence
  Synthetic
ggccgaggcgggcugauc

SEQ ID NO: 285243 - RNA, 19 nt, Artificial Sequence
  Synthetic
aggccgaggcgggcugauc

SEQ ID NO: 285244 - RNA, 20 nt, Artificial Sequence
  Synthetic
gaggccgaggcgggcugauc

SEQ ID NO: 285245 - RNA, 21 nt, Artificial Sequence
  Synthetic
ggaggccgaggcgggcugauc

SEQ ID NO: 285246 - RNA, 22 nt, Artificial Sequence
  Synthetic
gggaggccgaggcgggcugauc

SEQ ID NO: 285247 - RNA, 23 nt, Artificial Sequence
  Synthetic
ugggaggccgaggcgggcugauc

SEQ ID NO: 285248 - RNA, 24 nt, Artificial Sequence
  Synthetic
uugggaggccgaggcgggcugauc

SEQ ID NO: 285249 - RNA, 18 nt, Artificial Sequence
  Synthetic
cucacauugugucugauc

SEQ ID NO: 285250 - RNA, 19 nt, Artificial Sequence
  Synthetic
ccucacauugugucugauc

SEQ ID NO: 285251 - RNA, 20 nt, Artificial Sequence
  Synthetic
accucacauugugucugauc

SEQ ID NO: 285252 - RNA, 21 nt, Artificial Sequence
  Synthetic
aaccucacauugugucugauc

SEQ ID NO: 285253 - RNA, 22 nt, Artificial Sequence
  Synthetic
aaaccucacauugugucugauc

SEQ ID NO: 285254 - RNA, 23 nt, Artificial Sequence
  Synthetic
gaaaccucacauugugucugauc

SEQ ID NO: 285255 - RNA, 24 nt, Artificial Sequence
  Synthetic
ugaaaccucacauugugucugauc

SEQ ID NO: 285256 - RNA, 18 nt, Artificial Sequence
  Synthetic
uuuccagggaaugugauc

SEQ ID NO: 285257 - RNA, 19 nt, Artificial Sequence
  Synthetic
cuuuccagggaaugugauc

SEQ ID NO: 285258 - RNA, 20 nt, Artificial Sequence
  Synthetic
acuuuccagggaaugugauc

SEQ ID NO: 285259 - RNA, 21 nt, Artificial Sequence
  Synthetic
uacuuuccagggaaugugauc

SEQ ID NO: 285260 - RNA, 22 nt, Artificial Sequence
  Synthetic
uuacuuuccagggaaugugauc

SEQ ID NO: 285261 - RNA, 23 nt, Artificial Sequence
  Synthetic
uuuacuuuccagggaaugugauc

SEQ ID NO: 285262 - RNA, 24 nt, Artificial Sequence
  Synthetic
guuuacuuuccagggaaugugauc

SEQ ID NO: 285263 - RNA, 18 nt, Artificial Sequence
  Synthetic
gcuggaugcuaugugauc

SEQ ID NO: 285264 - RNA, 19 nt, Artificial Sequence
  Synthetic
ugcuggaugcuaugugauc

SEQ ID NO: 285265 - RNA, 20 nt, Artificial Sequence
  Synthetic
cugcuggaugcuaugugauc

SEQ ID NO: 285266 - RNA, 21 nt, Artificial Sequence
  Synthetic
ucugcuggaugcuaugugauc

SEQ ID NO: 285267 - RNA, 22 nt, Artificial Sequence
  Synthetic
cucugcuggaugcuaugugauc

SEQ ID NO: 285268 - RNA, 23 nt, Artificial Sequence
  Synthetic
gcucugcuggaugcuaugugauc

SEQ ID NO: 285269 - RNA, 24 nt, Artificial Sequence
  Synthetic
ggcucugcuggaugcuaugugauc

SEQ ID NO: 285270 - RNA, 18 nt, Artificial Sequence
  Synthetic
guaauugugggugugauc

SEQ ID NO: 285271 - RNA, 19 nt, Artificial Sequence
  Synthetic
aguaauugugggugugauc

SEQ ID NO: 285272 - RNA, 20 nt, Artificial Sequence
  Synthetic
caguaauugugggugugauc

SEQ ID NO: 285273 - RNA, 21 nt, Artificial Sequence
  Synthetic
ucaguaauugugggugugauc

SEQ ID NO: 285274 - RNA, 22 nt, Artificial Sequence
  Synthetic
aucaguaauugugggugugauc

SEQ ID NO: 285275 - RNA, 23 nt, Artificial Sequence
  Synthetic
aaucaguaauugugggugugauc

SEQ ID NO: 285276 - RNA, 24 nt, Artificial Sequence
  Synthetic
aaaucaguaauugugggugugauc

SEQ ID NO: 285277 - RNA, 18 nt, Artificial Sequence
  Synthetic
guuguacaauuugugauc

SEQ ID NO: 285278 - RNA, 19 nt, Artificial Sequence
  Synthetic
uguuguacaauuugugauc

SEQ ID NO: 285279 - RNA, 20 nt, Artificial Sequence
  Synthetic
cuguuguacaauuugugauc

SEQ ID NO: 285280 - RNA, 21 nt, Artificial Sequence
  Synthetic
gcuguuguacaauuugugauc

SEQ ID NO: 285281 - RNA, 22 nt, Artificial Sequence
  Synthetic
ugcuguuguacaauuugugauc

SEQ ID NO: 285282 - RNA, 23 nt, Artificial Sequence
  Synthetic
cugcuguuguacaauuugugauc

SEQ ID NO: 285283 - RNA, 24 nt, Artificial Sequence
  Synthetic
ccugcuguuguacaauuugugauc

SEQ ID NO: 285284 - RNA, 18 nt, Artificial Sequence
  Synthetic
caacauaucagauugauc

SEQ ID NO: 285285 - RNA, 19 nt, Artificial Sequence
  Synthetic
ccaacauaucagauugauc

SEQ ID NO: 285286 - RNA, 20 nt, Artificial Sequence
  Synthetic
accaacauaucagauugauc

SEQ ID NO: 285287 - RNA, 21 nt, Artificial Sequence
  Synthetic
gaccaacauaucagauugauc

SEQ ID NO: 285288 - RNA, 22 nt, Artificial Sequence
  Synthetic
ggaccaacauaucagauugauc

SEQ ID NO: 285289 - RNA, 23 nt, Artificial Sequence
  Synthetic
aggaccaacauaucagauugauc

SEQ ID NO: 285290 - RNA, 24 nt, Artificial Sequence
  Synthetic
gaggaccaacauaucagauugauc

SEQ ID NO: 285291 - RNA, 18 nt, Artificial Sequence
  Synthetic
ucugcugaugucuugauc

SEQ ID NO: 285292 - RNA, 19 nt, Artificial Sequence
  Synthetic
aucugcugaugucuugauc

SEQ ID NO: 285293 - RNA, 20 nt, Artificial Sequence
  Synthetic
aaucugcugaugucuugauc

SEQ ID NO: 285294 - RNA, 21 nt, Artificial Sequence
  Synthetic
gaaucugcugaugucuugauc

SEQ ID NO: 285295 - RNA, 22 nt, Artificial Sequence
  Synthetic
ugaaucugcugaugucuugauc

SEQ ID NO: 285296 - RNA, 23 nt, Artificial Sequence
  Synthetic
augaaucugcugaugucuugauc

SEQ ID NO: 285297 - RNA, 24 nt, Artificial Sequence
  Synthetic
aaugaaucugcugaugucuugauc

SEQ ID NO: 285298 - RNA, 18 nt, Artificial Sequence
  Synthetic
auuuacuaaauguugauc

SEQ ID NO: 285299 - RNA, 19 nt, Artificial Sequence
  Synthetic
aauuuacuaaauguugauc

SEQ ID NO: 285300 - RNA, 20 nt, Artificial Sequence
  Synthetic
uaauuuacuaaauguugauc

SEQ ID NO: 285301 - RNA, 21 nt, Artificial Sequence
  Synthetic
cuaauuuacuaaauguugauc

SEQ ID NO: 285302 - RNA, 22 nt, Artificial Sequence
  Synthetic
ucuaauuuacuaaauguugauc

SEQ ID NO: 285303 - RNA, 23 nt, Artificial Sequence
  Synthetic
aucuaauuuacuaaauguugauc

SEQ ID NO: 285304 - RNA, 24 nt, Artificial Sequence
  Synthetic
caucuaauuuacuaaauguugauc

SEQ ID NO: 285305 - RNA, 18 nt, Artificial Sequence
  Synthetic
uagaucuaacauuugauc

SEQ ID NO: 285306 - RNA, 19 nt, Artificial Sequence
  Synthetic
guagaucuaacauuugauc

SEQ ID NO: 285307 - RNA, 20 nt, Artificial Sequence
  Synthetic
aguagaucuaacauuugauc

SEQ ID NO: 285308 - RNA, 21 nt, Artificial Sequence
  Synthetic
aaguagaucuaacauuugauc

SEQ ID NO: 285309 - RNA, 22 nt, Artificial Sequence
  Synthetic
aaaguagaucuaacauuugauc

SEQ ID NO: 285310 - RNA, 23 nt, Artificial Sequence
  Synthetic
aaaaguagaucuaacauuugauc

SEQ ID NO: 285311 - RNA, 24 nt, Artificial Sequence
  Synthetic
uaaaaguagaucuaacauuugauc

SEQ ID NO: 285312 - RNA, 18 nt, Artificial Sequence
  Synthetic
uuaucuuuuccuuugauc

SEQ ID NO: 285313 - RNA, 19 nt, Artificial Sequence
  Synthetic
auuaucuuuuccuuugauc

SEQ ID NO: 285314 - RNA, 20 nt, Artificial Sequence
  Synthetic
aauuaucuuuuccuuugauc

SEQ ID NO: 285315 - RNA, 21 nt, Artificial Sequence
  Synthetic
uaauuaucuuuuccuuugauc

SEQ ID NO: 285316 - RNA, 22 nt, Artificial Sequence
  Synthetic
uuaauuaucuuuuccuuugauc

SEQ ID NO: 285317 - RNA, 23 nt, Artificial Sequence
  Synthetic
cuuaauuaucuuuuccuuugauc

SEQ ID NO: 285318 - RNA, 24 nt, Artificial Sequence
  Synthetic
ucuuaauuaucuuuuccuuugauc

SEQ ID NO: 285319 - RNA, 18 nt, Artificial Sequence
  Synthetic
uccuucauaguuuugauc

SEQ ID NO: 285320 - RNA, 19 nt, Artificial Sequence
  Synthetic
auccuucauaguuuugauc

SEQ ID NO: 285321 - RNA, 20 nt, Artificial Sequence
  Synthetic
cauccuucauaguuuugauc

SEQ ID NO: 285322 - RNA, 21 nt, Artificial Sequence
  Synthetic
acauccuucauaguuuugauc

SEQ ID NO: 285323 - RNA, 22 nt, Artificial Sequence
  Synthetic
gacauccuucauaguuuugauc

SEQ ID NO: 285324 - RNA, 23 nt, Artificial Sequence
  Synthetic
cgacauccuucauaguuuugauc

SEQ ID NO: 285325 - RNA, 24 nt, Artificial Sequence
  Synthetic
acgacauccuucauaguuuugauc

SEQ ID NO: 285326 - RNA, 18 nt, Artificial Sequence
  Synthetic
agaaaauacaaaaauauc

SEQ ID NO: 285327 - RNA, 19 nt, Artificial Sequence
  Synthetic
aagaaaauacaaaaauauc

SEQ ID NO: 285328 - RNA, 20 nt, Artificial Sequence
  Synthetic
uaagaaaauacaaaaauauc

SEQ ID NO: 285329 - RNA, 21 nt, Artificial Sequence
  Synthetic
auaagaaaauacaaaaauauc

SEQ ID NO: 285330 - RNA, 22 nt, Artificial Sequence
  Synthetic
aauaagaaaauacaaaaauauc

SEQ ID NO: 285331 - RNA, 23 nt, Artificial Sequence
  Synthetic
aaauaagaaaauacaaaaauauc

SEQ ID NO: 285332 - RNA, 24 nt, Artificial Sequence
  Synthetic
gaaauaagaaaauacaaaaauauc

SEQ ID NO: 285333 - RNA, 18 nt, Artificial Sequence
  Synthetic
cacaaaaaauaaaauauc

SEQ ID NO: 285334 - RNA, 19 nt, Artificial Sequence
  Synthetic
ccacaaaaaauaaaauauc

SEQ ID NO: 285335 - RNA, 20 nt, Artificial Sequence
  Synthetic
accacaaaaaauaaaauauc

SEQ ID NO: 285336 - RNA, 21 nt, Artificial Sequence
  Synthetic
aaccacaaaaaauaaaauauc

SEQ ID NO: 285337 - RNA, 22 nt, Artificial Sequence
  Synthetic
uaaccacaaaaaauaaaauauc

SEQ ID NO: 285338 - RNA, 23 nt, Artificial Sequence
  Synthetic
auaaccacaaaaaauaaaauauc

SEQ ID NO: 285339 - RNA, 24 nt, Artificial Sequence
  Synthetic
aauaaccacaaaaaauaaaauauc

SEQ ID NO: 285340 - RNA, 18 nt, Artificial Sequence
  Synthetic
acuauaaaauaaaauauc

SEQ ID NO: 285341 - RNA, 19 nt, Artificial Sequence
  Synthetic
gacuauaaaauaaaauauc

SEQ ID NO: 285342 - RNA, 20 nt, Artificial Sequence
  Synthetic
agacuauaaaauaaaauauc

SEQ ID NO: 285343 - RNA, 21 nt, Artificial Sequence
  Synthetic
uagacuauaaaauaaaauauc

SEQ ID NO: 285344 - RNA, 22 nt, Artificial Sequence
  Synthetic
guagacuauaaaauaaaauauc

SEQ ID NO: 285345 - RNA, 23 nt, Artificial Sequence
  Synthetic
uguagacuauaaaauaaaauauc

SEQ ID NO: 285346 - RNA, 24 nt, Artificial Sequence
  Synthetic
guguagacuauaaaauaaaauauc

SEQ ID NO: 285347 - RNA, 18 nt, Artificial Sequence
  Synthetic
gcagaaacuuaaaauauc

SEQ ID NO: 285348 - RNA, 19 nt, Artificial Sequence
  Synthetic
agcagaaacuuaaaauauc

SEQ ID NO: 285349 - RNA, 20 nt, Artificial Sequence
  Synthetic
aagcagaaacuuaaaauauc

SEQ ID NO: 285350 - RNA, 21 nt, Artificial Sequence
  Synthetic
caagcagaaacuuaaaauauc

SEQ ID NO: 285351 - RNA, 22 nt, Artificial Sequence
  Synthetic
acaagcagaaacuuaaaauauc

SEQ ID NO: 285352 - RNA, 23 nt, Artificial Sequence
  Synthetic
aacaagcagaaacuuaaaauauc

SEQ ID NO: 285353 - RNA, 24 nt, Artificial Sequence
  Synthetic
caacaagcagaaacuuaaaauauc

SEQ ID NO: 285354 - RNA, 18 nt, Artificial Sequence
  Synthetic
gauuucaagugaaauauc

SEQ ID NO: 285355 - RNA, 19 nt, Artificial Sequence
  Synthetic
agauuucaagugaaauauc

SEQ ID NO: 285356 - RNA, 20 nt, Artificial Sequence
  Synthetic
gagauuucaagugaaauauc

SEQ ID NO: 285357 - RNA, 21 nt, Artificial Sequence
  Synthetic
ggagauuucaagugaaauauc

SEQ ID NO: 285358 - RNA, 22 nt, Artificial Sequence
  Synthetic
uggagauuucaagugaaauauc

SEQ ID NO: 285359 - RNA, 23 nt, Artificial Sequence
  Synthetic
auggagauuucaagugaaauauc

SEQ ID NO: 285360 - RNA, 24 nt, Artificial Sequence
  Synthetic
cauggagauuucaagugaaauauc

SEQ ID NO: 285361 - RNA, 18 nt, Artificial Sequence
  Synthetic
ccuauuuaauuaaauauc

SEQ ID NO: 285362 - RNA, 19 nt, Artificial Sequence
  Synthetic
uccuauuuaauuaaauauc

SEQ ID NO: 285363 - RNA, 20 nt, Artificial Sequence
  Synthetic
guccuauuuaauuaaauauc

SEQ ID NO: 285364 - RNA, 21 nt, Artificial Sequence
  Synthetic
uguccuauuuaauuaaauauc

SEQ ID NO: 285365 - RNA, 22 nt, Artificial Sequence
  Synthetic
uuguccuauuuaauuaaauauc

SEQ ID NO: 285366 - RNA, 23 nt, Artificial Sequence
  Synthetic
auuguccuauuuaauuaaauauc

SEQ ID NO: 285367 - RNA, 24 nt, Artificial Sequence
  Synthetic
aauuguccuauuuaauuaaauauc

SEQ ID NO: 285368 - RNA, 18 nt, Artificial Sequence
  Synthetic
uggacauuuagcaauauc

SEQ ID NO: 285369 - RNA, 19 nt, Artificial Sequence
  Synthetic
guggacauuuagcaauauc

SEQ ID NO: 285370 - RNA, 20 nt, Artificial Sequence
  Synthetic
aguggacauuuagcaauauc

SEQ ID NO: 285371 - RNA, 21 nt, Artificial Sequence
  Synthetic
aaguggacauuuagcaauauc

SEQ ID NO: 285372 - RNA, 22 nt, Artificial Sequence
  Synthetic
caaguggacauuuagcaauauc

SEQ ID NO: 285373 - RNA, 23 nt, Artificial Sequence
  Synthetic
ccaaguggacauuuagcaauauc

SEQ ID NO: 285374 - RNA, 24 nt, Artificial Sequence
  Synthetic
accaaguggacauuuagcaauauc

SEQ ID NO: 285375 - RNA, 18 nt, Artificial Sequence
  Synthetic
auaggaagaaucaauauc

SEQ ID NO: 285376 - RNA, 19 nt, Artificial Sequence
  Synthetic
gauaggaagaaucaauauc

SEQ ID NO: 285377 - RNA, 20 nt, Artificial Sequence
  Synthetic
ggauaggaagaaucaauauc

SEQ ID NO: 285378 - RNA, 21 nt, Artificial Sequence
  Synthetic
uggauaggaagaaucaauauc

SEQ ID NO: 285379 - RNA, 22 nt, Artificial Sequence
  Synthetic
auggauaggaagaaucaauauc

SEQ ID NO: 285380 - RNA, 23 nt, Artificial Sequence
  Synthetic
cauggauaggaagaaucaauauc

SEQ ID NO: 285381 - RNA, 24 nt, Artificial Sequence
  Synthetic
ucauggauaggaagaaucaauauc

SEQ ID NO: 285382 - RNA, 18 nt, Artificial Sequence
  Synthetic
guaggaagaaucaauauc

SEQ ID NO: 285383 - RNA, 19 nt, Artificial Sequence
  Synthetic
gguaggaagaaucaauauc

SEQ ID NO: 285384 - RNA, 20 nt, Artificial Sequence
  Synthetic
ggguaggaagaaucaauauc

SEQ ID NO: 285385 - RNA, 21 nt, Artificial Sequence
  Synthetic
uggguaggaagaaucaauauc

SEQ ID NO: 285386 - RNA, 22 nt, Artificial Sequence
  Synthetic
auggguaggaagaaucaauauc

SEQ ID NO: 285387 - RNA, 23 nt, Artificial Sequence
  Synthetic
cauggguaggaagaaucaauauc

SEQ ID NO: 285388 - RNA, 24 nt, Artificial Sequence
  Synthetic
ucauggguaggaagaaucaauauc

SEQ ID NO: 285389 - RNA, 18 nt, Artificial Sequence
  Synthetic
uuuauauuuaucaauauc

SEQ ID NO: 285390 - RNA, 19 nt, Artificial Sequence
  Synthetic
uuuuauauuuaucaauauc

SEQ ID NO: 285391 - RNA, 20 nt, Artificial Sequence
  Synthetic
cuuuuauauuuaucaauauc

SEQ ID NO: 285392 - RNA, 21 nt, Artificial Sequence
  Synthetic
ucuuuuauauuuaucaauauc

SEQ ID NO: 285393 - RNA, 22 nt, Artificial Sequence
  Synthetic
uucuuuuauauuuaucaauauc

SEQ ID NO: 285394 - RNA, 23 nt, Artificial Sequence
  Synthetic
uuucuuuuauauuuaucaauauc

SEQ ID NO: 285395 - RNA, 24 nt, Artificial Sequence
  Synthetic
auuucuuuuauauuuaucaauauc

SEQ ID NO: 285396 - RNA, 18 nt, Artificial Sequence
  Synthetic
acuuugguucagaauauc

SEQ ID NO: 285397 - RNA, 19 nt, Artificial Sequence
  Synthetic
cacuuugguucagaauauc

SEQ ID NO: 285398 - RNA, 20 nt, Artificial Sequence
  Synthetic
ccacuuugguucagaauauc

SEQ ID NO: 285399 - RNA, 21 nt, Artificial Sequence
  Synthetic
accacuuugguucagaauauc

SEQ ID NO: 285400 - RNA, 22 nt, Artificial Sequence
  Synthetic
gaccacuuugguucagaauauc

SEQ ID NO: 285401 - RNA, 23 nt, Artificial Sequence
  Synthetic
ugaccacuuugguucagaauauc

SEQ ID NO: 285402 - RNA, 24 nt, Artificial Sequence
  Synthetic
augaccacuuugguucagaauauc

SEQ ID NO: 285403 - RNA, 18 nt, Artificial Sequence
  Synthetic
aaaaaucagaauaauauc

SEQ ID NO: 285404 - RNA, 19 nt, Artificial Sequence
  Synthetic
uaaaaaucagaauaauauc

SEQ ID NO: 285405 - RNA, 20 nt, Artificial Sequence
  Synthetic
auaaaaaucagaauaauauc

SEQ ID NO: 285406 - RNA, 21 nt, Artificial Sequence
  Synthetic
cauaaaaaucagaauaauauc

SEQ ID NO: 285407 - RNA, 22 nt, Artificial Sequence
  Synthetic
ucauaaaaaucagaauaauauc

SEQ ID NO: 285408 - RNA, 23 nt, Artificial Sequence
  Synthetic
aucauaaaaaucagaauaauauc

SEQ ID NO: 285409 - RNA, 24 nt, Artificial Sequence
  Synthetic
gaucauaaaaaucagaauaauauc

SEQ ID NO: 285410 - RNA, 18 nt, Artificial Sequence
  Synthetic
aucaauuagaauaauauc

SEQ ID NO: 285411 - RNA, 19 nt, Artificial Sequence
  Synthetic
uaucaauuagaauaauauc

SEQ ID NO: 285412 - RNA, 20 nt, Artificial Sequence
  Synthetic
guaucaauuagaauaauauc

SEQ ID NO: 285413 - RNA, 21 nt, Artificial Sequence
  Synthetic
uguaucaauuagaauaauauc

SEQ ID NO: 285414 - RNA, 22 nt, Artificial Sequence
  Synthetic
cuguaucaauuagaauaauauc

SEQ ID NO: 285415 - RNA, 23 nt, Artificial Sequence
  Synthetic
acuguaucaauuagaauaauauc

SEQ ID NO: 285416 - RNA, 24 nt, Artificial Sequence
  Synthetic
cacuguaucaauuagaauaauauc

SEQ ID NO: 285417 - RNA, 18 nt, Artificial Sequence
  Synthetic
uuaucuuuuccuaauauc

SEQ ID NO: 285418 - RNA, 19 nt, Artificial Sequence
  Synthetic
uuuaucuuuuccuaauauc

SEQ ID NO: 285419 - RNA, 20 nt, Artificial Sequence
  Synthetic
cuuuaucuuuuccuaauauc

SEQ ID NO: 285420 - RNA, 21 nt, Artificial Sequence
  Synthetic
gcuuuaucuuuuccuaauauc

SEQ ID NO: 285421 - RNA, 22 nt, Artificial Sequence
  Synthetic
ugcuuuaucuuuuccuaauauc

SEQ ID NO: 285422 - RNA, 23 nt, Artificial Sequence
  Synthetic
cugcuuuaucuuuuccuaauauc

SEQ ID NO: 285423 - RNA, 24 nt, Artificial Sequence
  Synthetic
acugcuuuaucuuuuccuaauauc

SEQ ID NO: 285424 - RNA, 18 nt, Artificial Sequence
  Synthetic
cuagacaauaguaauauc

SEQ ID NO: 285425 - RNA, 19 nt, Artificial Sequence
  Synthetic
ucuagacaauaguaauauc

SEQ ID NO: 285426 - RNA, 20 nt, Artificial Sequence
  Synthetic
uucuagacaauaguaauauc

SEQ ID NO: 285427 - RNA, 21 nt, Artificial Sequence
  Synthetic
guucuagacaauaguaauauc

SEQ ID NO: 285428 - RNA, 22 nt, Artificial Sequence
  Synthetic
aguucuagacaauaguaauauc

SEQ ID NO: 285429 - RNA, 23 nt, Artificial Sequence
  Synthetic
gaguucuagacaauaguaauauc

SEQ ID NO: 285430 - RNA, 24 nt, Artificial Sequence
  Synthetic
ggaguucuagacaauaguaauauc

SEQ ID NO: 285431 - RNA, 18 nt, Artificial Sequence
  Synthetic
cuagcauuaguccauauc

SEQ ID NO: 285432 - RNA, 19 nt, Artificial Sequence
  Synthetic
ucuagcauuaguccauauc

SEQ ID NO: 285433 - RNA, 20 nt, Artificial Sequence
  Synthetic
uucuagcauuaguccauauc

SEQ ID NO: 285434 - RNA, 21 nt, Artificial Sequence
  Synthetic
cuucuagcauuaguccauauc

SEQ ID NO: 285435 - RNA, 22 nt, Artificial Sequence
  Synthetic
gcuucuagcauuaguccauauc

SEQ ID NO: 285436 - RNA, 23 nt, Artificial Sequence
  Synthetic
ugcuucuagcauuaguccauauc

SEQ ID NO: 285437 - RNA, 24 nt, Artificial Sequence
  Synthetic
cugcuucuagcauuaguccauauc

SEQ ID NO: 285438 - RNA, 18 nt, Artificial Sequence
  Synthetic
uggaggaguuagcauauc

SEQ ID NO: 285439 - RNA, 19 nt, Artificial Sequence
  Synthetic
auggaggaguuagcauauc

SEQ ID NO: 285440 - RNA, 20 nt, Artificial Sequence
  Synthetic
aauggaggaguuagcauauc

SEQ ID NO: 285441 - RNA, 21 nt, Artificial Sequence
  Synthetic
gaauggaggaguuagcauauc

SEQ ID NO: 285442 - RNA, 22 nt, Artificial Sequence
  Synthetic
agaauggaggaguuagcauauc

SEQ ID NO: 285443 - RNA, 23 nt, Artificial Sequence
  Synthetic
gagaauggaggaguuagcauauc

SEQ ID NO: 285444 - RNA, 24 nt, Artificial Sequence
  Synthetic
agagaauggaggaguuagcauauc

SEQ ID NO: 285445 - RNA, 18 nt, Artificial Sequence
  Synthetic
uuaggccccgggcauauc

SEQ ID NO: 285446 - RNA, 19 nt, Artificial Sequence
  Synthetic
cuuaggccccgggcauauc

SEQ ID NO: 285447 - RNA, 20 nt, Artificial Sequence
  Synthetic
ucuuaggccccgggcauauc

SEQ ID NO: 285448 - RNA, 21 nt, Artificial Sequence
  Synthetic
aucuuaggccccgggcauauc

SEQ ID NO: 285449 - RNA, 22 nt, Artificial Sequence
  Synthetic
aaucuuaggccccgggcauauc

SEQ ID NO: 285450 - RNA, 23 nt, Artificial Sequence
  Synthetic
aaaucuuaggccccgggcauauc

SEQ ID NO: 285451 - RNA, 24 nt, Artificial Sequence
  Synthetic
gaaaucuuaggccccgggcauauc

SEQ ID NO: 285452 - RNA, 18 nt, Artificial Sequence
  Synthetic
uggcauaaaauucauauc

SEQ ID NO: 285453 - RNA, 19 nt, Artificial Sequence
  Synthetic
uuggcauaaaauucauauc

SEQ ID NO: 285454 - RNA, 20 nt, Artificial Sequence
  Synthetic
uuuggcauaaaauucauauc

SEQ ID NO: 285455 - RNA, 21 nt, Artificial Sequence
  Synthetic
cuuuggcauaaaauucauauc

SEQ ID NO: 285456 - RNA, 22 nt, Artificial Sequence
  Synthetic
gcuuuggcauaaaauucauauc

SEQ ID NO: 285457 - RNA, 23 nt, Artificial Sequence
  Synthetic
agcuuuggcauaaaauucauauc

SEQ ID NO: 285458 - RNA, 24 nt, Artificial Sequence
  Synthetic
aagcuuuggcauaaaauucauauc

SEQ ID NO: 285459 - RNA, 18 nt, Artificial Sequence
  Synthetic
ggagugacaauucauauc

SEQ ID NO: 285460 - RNA, 19 nt, Artificial Sequence
  Synthetic
uggagugacaauucauauc

SEQ ID NO: 285461 - RNA, 20 nt, Artificial Sequence
  Synthetic
uuggagugacaauucauauc

SEQ ID NO: 285462 - RNA, 21 nt, Artificial Sequence
  Synthetic
cuuggagugacaauucauauc

SEQ ID NO: 285463 - RNA, 22 nt, Artificial Sequence
  Synthetic
acuuggagugacaauucauauc

SEQ ID NO: 285464 - RNA, 23 nt, Artificial Sequence
  Synthetic
aacuuggagugacaauucauauc

SEQ ID NO: 285465 - RNA, 24 nt, Artificial Sequence
  Synthetic
aaacuuggagugacaauucauauc

SEQ ID NO: 285466 - RNA, 18 nt, Artificial Sequence
  Synthetic
uuuacccagacagauauc

SEQ ID NO: 285467 - RNA, 19 nt, Artificial Sequence
  Synthetic
uuuuacccagacagauauc

SEQ ID NO: 285468 - RNA, 20 nt, Artificial Sequence
  Synthetic
guuuuacccagacagauauc

SEQ ID NO: 285469 - RNA, 21 nt, Artificial Sequence
  Synthetic
uguuuuacccagacagauauc

SEQ ID NO: 285470 - RNA, 22 nt, Artificial Sequence
  Synthetic
uuguuuuacccagacagauauc

SEQ ID NO: 285471 - RNA, 23 nt, Artificial Sequence
  Synthetic
uuuguuuuacccagacagauauc

SEQ ID NO: 285472 - RNA, 24 nt, Artificial Sequence
  Synthetic
auuuguuuuacccagacagauauc

SEQ ID NO: 285473 - RNA, 18 nt, Artificial Sequence
  Synthetic
gagaaaguacuagauauc

SEQ ID NO: 285474 - RNA, 19 nt, Artificial Sequence
  Synthetic
ugagaaaguacuagauauc

SEQ ID NO: 285475 - RNA, 20 nt, Artificial Sequence
  Synthetic
gugagaaaguacuagauauc

SEQ ID NO: 285476 - RNA, 21 nt, Artificial Sequence
  Synthetic
agugagaaaguacuagauauc

SEQ ID NO: 285477 - RNA, 22 nt, Artificial Sequence
  Synthetic
uagugagaaaguacuagauauc

SEQ ID NO: 285478 - RNA, 23 nt, Artificial Sequence
  Synthetic
uuagugagaaaguacuagauauc

SEQ ID NO: 285479 - RNA, 24 nt, Artificial Sequence
  Synthetic
guuagugagaaaguacuagauauc

SEQ ID NO: 285480 - RNA, 18 nt, Artificial Sequence
  Synthetic
agcuauuaucuagauauc

SEQ ID NO: 285481 - RNA, 19 nt, Artificial Sequence
  Synthetic
gagcuauuaucuagauauc

SEQ ID NO: 285482 - RNA, 20 nt, Artificial Sequence
  Synthetic
ggagcuauuaucuagauauc

SEQ ID NO: 285483 - RNA, 21 nt, Artificial Sequence
  Synthetic
aggagcuauuaucuagauauc

SEQ ID NO: 285484 - RNA, 22 nt, Artificial Sequence
  Synthetic
aaggagcuauuaucuagauauc

SEQ ID NO: 285485 - RNA, 23 nt, Artificial Sequence
  Synthetic
caaggagcuauuaucuagauauc

SEQ ID NO: 285486 - RNA, 24 nt, Artificial Sequence
  Synthetic
ccaaggagcuauuaucuagauauc

SEQ ID NO: 285487 - RNA, 18 nt, Artificial Sequence
  Synthetic
ccaaggaagggugauauc

SEQ ID NO: 285488 - RNA, 19 nt, Artificial Sequence
  Synthetic
uccaaggaagggugauauc

SEQ ID NO: 285489 - RNA, 20 nt, Artificial Sequence
  Synthetic
uuccaaggaagggugauauc

SEQ ID NO: 285490 - RNA, 21 nt, Artificial Sequence
  Synthetic
cuuccaaggaagggugauauc

SEQ ID NO: 285491 - RNA, 22 nt, Artificial Sequence
  Synthetic
acuuccaaggaagggugauauc

SEQ ID NO: 285492 - RNA, 23 nt, Artificial Sequence
  Synthetic
cacuuccaaggaagggugauauc

SEQ ID NO: 285493 - RNA, 24 nt, Artificial Sequence
  Synthetic
gcacuuccaaggaagggugauauc

SEQ ID NO: 285494 - RNA, 18 nt, Artificial Sequence
  Synthetic
cugauaaauggugauauc

SEQ ID NO: 285495 - RNA, 19 nt, Artificial Sequence
  Synthetic
acugauaaauggugauauc

SEQ ID NO: 285496 - RNA, 20 nt, Artificial Sequence
  Synthetic
aacugauaaauggugauauc

SEQ ID NO: 285497 - RNA, 21 nt, Artificial Sequence
  Synthetic
uaacugauaaauggugauauc

SEQ ID NO: 285498 - RNA, 22 nt, Artificial Sequence
  Synthetic
auaacugauaaauggugauauc

SEQ ID NO: 285499 - RNA, 23 nt, Artificial Sequence
  Synthetic
cauaacugauaaauggugauauc

SEQ ID NO: 285500 - RNA, 24 nt, Artificial Sequence
  Synthetic
ucauaacugauaaauggugauauc

SEQ ID NO: 285501 - RNA, 18 nt, Artificial Sequence
  Synthetic
auguggcacauauauauc

SEQ ID NO: 285502 - RNA, 19 nt, Artificial Sequence
  Synthetic
aauguggcacauauauauc

SEQ ID NO: 285503 - RNA, 20 nt, Artificial Sequence
  Synthetic
aaauguggcacauauauauc

SEQ ID NO: 285504 - RNA, 21 nt, Artificial Sequence
  Synthetic
aaaauguggcacauauauauc

SEQ ID NO: 285505 - RNA, 22 nt, Artificial Sequence
  Synthetic
gaaaauguggcacauauauauc

SEQ ID NO: 285506 - RNA, 23 nt, Artificial Sequence
  Synthetic
agaaaauguggcacauauauauc

SEQ ID NO: 285507 - RNA, 24 nt, Artificial Sequence
  Synthetic
aagaaaauguggcacauauauauc

SEQ ID NO: 285508 - RNA, 18 nt, Artificial Sequence
  Synthetic
augcuuggcauauauauc

SEQ ID NO: 285509 - RNA, 19 nt, Artificial Sequence
  Synthetic
aaugcuuggcauauauauc

SEQ ID NO: 285510 - RNA, 20 nt, Artificial Sequence
  Synthetic
caaugcuuggcauauauauc

SEQ ID NO: 285511 - RNA, 21 nt, Artificial Sequence
  Synthetic
ucaaugcuuggcauauauauc

SEQ ID NO: 285512 - RNA, 22 nt, Artificial Sequence
  Synthetic
gucaaugcuuggcauauauauc

SEQ ID NO: 285513 - RNA, 23 nt, Artificial Sequence
  Synthetic
ggucaaugcuuggcauauauauc

SEQ ID NO: 285514 - RNA, 24 nt, Artificial Sequence
  Synthetic
aggucaaugcuuggcauauauauc

SEQ ID NO: 285515 - RNA, 18 nt, Artificial Sequence
  Synthetic
cauauauauauauauauc

SEQ ID NO: 285516 - RNA, 19 nt, Artificial Sequence
  Synthetic
acauauauauauauauauc

SEQ ID NO: 285517 - RNA, 20 nt, Artificial Sequence
  Synthetic
uacauauauauauauauauc

SEQ ID NO: 285518 - RNA, 21 nt, Artificial Sequence
  Synthetic
auacauauauauauauauauc

SEQ ID NO: 285519 - RNA, 22 nt, Artificial Sequence
  Synthetic
uauacauauauauauauauauc

SEQ ID NO: 285520 - RNA, 23 nt, Artificial Sequence
  Synthetic
auauacauauauauauauauauc

SEQ ID NO: 285521 - RNA, 24 nt, Artificial Sequence
  Synthetic
uauauacauauauauauauauauc

SEQ ID NO: 285522 - RNA, 18 nt, Artificial Sequence
  Synthetic
acgacaugauuguauauc

SEQ ID NO: 285523 - RNA, 19 nt, Artificial Sequence
  Synthetic
gacgacaugauuguauauc

SEQ ID NO: 285524 - RNA, 20 nt, Artificial Sequence
  Synthetic
agacgacaugauuguauauc

SEQ ID NO: 285525 - RNA, 18 nt, Artificial Sequence
  Synthetic
ccagcagugccuuauauc

SEQ ID NO: 285526 - RNA, 19 nt, Artificial Sequence
  Synthetic
cccagcagugccuuauauc

SEQ ID NO: 285527 - RNA, 20 nt, Artificial Sequence
  Synthetic
ucccagcagugccuuauauc

SEQ ID NO: 285528 - RNA, 21 nt, Artificial Sequence
  Synthetic
uucccagcagugccuuauauc

SEQ ID NO: 285529 - RNA, 22 nt, Artificial Sequence
  Synthetic
guucccagcagugccuuauauc

SEQ ID NO: 285530 - RNA, 23 nt, Artificial Sequence
  Synthetic
uguucccagcagugccuuauauc

SEQ ID NO: 285531 - RNA, 24 nt, Artificial Sequence
  Synthetic
guguucccagcagugccuuauauc

SEQ ID NO: 285532 - RNA, 18 nt, Artificial Sequence
  Synthetic
aaguuucaggcuuauauc

SEQ ID NO: 285533 - RNA, 19 nt, Artificial Sequence
  Synthetic
aaaguuucaggcuuauauc

SEQ ID NO: 285534 - RNA, 20 nt, Artificial Sequence
  Synthetic
gaaaguuucaggcuuauauc

SEQ ID NO: 285535 - RNA, 21 nt, Artificial Sequence
  Synthetic
ggaaaguuucaggcuuauauc

SEQ ID NO: 285536 - RNA, 22 nt, Artificial Sequence
  Synthetic
aggaaaguuucaggcuuauauc

SEQ ID NO: 285537 - RNA, 23 nt, Artificial Sequence
  Synthetic
caggaaaguuucaggcuuauauc

SEQ ID NO: 285538 - RNA, 24 nt, Artificial Sequence
  Synthetic
ucaggaaaguuucaggcuuauauc

SEQ ID NO: 285539 - RNA, 18 nt, Artificial Sequence
  Synthetic
auacucuguauuuauauc

SEQ ID NO: 285540 - RNA, 19 nt, Artificial Sequence
  Synthetic
cauacucuguauuuauauc

SEQ ID NO: 285541 - RNA, 20 nt, Artificial Sequence
  Synthetic
acauacucuguauuuauauc

SEQ ID NO: 285542 - RNA, 21 nt, Artificial Sequence
  Synthetic
uacauacucuguauuuauauc

SEQ ID NO: 285543 - RNA, 22 nt, Artificial Sequence
  Synthetic
auacauacucuguauuuauauc

SEQ ID NO: 285544 - RNA, 23 nt, Artificial Sequence
  Synthetic
aauacauacucuguauuuauauc

SEQ ID NO: 285545 - RNA, 24 nt, Artificial Sequence
  Synthetic
aaauacauacucuguauuuauauc

SEQ ID NO: 285546 - RNA, 18 nt, Artificial Sequence
  Synthetic
gcacauugauuuuauauc

SEQ ID NO: 285547 - RNA, 19 nt, Artificial Sequence
  Synthetic
ugcacauugauuuuauauc

SEQ ID NO: 285548 - RNA, 20 nt, Artificial Sequence
  Synthetic
uugcacauugauuuuauauc

SEQ ID NO: 285549 - RNA, 21 nt, Artificial Sequence
  Synthetic
uuugcacauugauuuuauauc

SEQ ID NO: 285550 - RNA, 22 nt, Artificial Sequence
  Synthetic
uuuugcacauugauuuuauauc

SEQ ID NO: 285551 - RNA, 23 nt, Artificial Sequence
  Synthetic
uuuuugcacauugauuuuauauc

SEQ ID NO: 285552 - RNA, 24 nt, Artificial Sequence
  Synthetic
auuuuugcacauugauuuuauauc

SEQ ID NO: 285553 - RNA, 18 nt, Artificial Sequence
  Synthetic
aaaaauuuuuuuuauauc

SEQ ID NO: 285554 - RNA, 19 nt, Artificial Sequence
  Synthetic
gaaaaauuuuuuuuauauc

SEQ ID NO: 285555 - RNA, 20 nt, Artificial Sequence
  Synthetic
ugaaaaauuuuuuuuauauc

SEQ ID NO: 285556 - RNA, 21 nt, Artificial Sequence
  Synthetic
gugaaaaauuuuuuuuauauc

SEQ ID NO: 285557 - RNA, 22 nt, Artificial Sequence
  Synthetic
agugaaaaauuuuuuuuauauc

SEQ ID NO: 285558 - RNA, 23 nt, Artificial Sequence
  Synthetic
aagugaaaaauuuuuuuuauauc

SEQ ID NO: 285559 - RNA, 24 nt, Artificial Sequence
  Synthetic
gaagugaaaaauuuuuuuuauauc

SEQ ID NO: 285560 - RNA, 18 nt, Artificial Sequence
  Synthetic
aagcugcagcaaacuauc

SEQ ID NO: 285561 - RNA, 19 nt, Artificial Sequence
  Synthetic
gaagcugcagcaaacuauc

SEQ ID NO: 285562 - RNA, 20 nt, Artificial Sequence
  Synthetic
agaagcugcagcaaacuauc

SEQ ID NO: 285563 - RNA, 21 nt, Artificial Sequence
  Synthetic
gagaagcugcagcaaacuauc

SEQ ID NO: 285564 - RNA, 22 nt, Artificial Sequence
  Synthetic
ggagaagcugcagcaaacuauc

SEQ ID NO: 285565 - RNA, 23 nt, Artificial Sequence
  Synthetic
uggagaagcugcagcaaacuauc

SEQ ID NO: 285566 - RNA, 24 nt, Artificial Sequence
  Synthetic
auggagaagcugcagcaaacuauc

SEQ ID NO: 285567 - RNA, 18 nt, Artificial Sequence
  Synthetic
gcauuuacauaaacuauc

SEQ ID NO: 285568 - RNA, 19 nt, Artificial Sequence
  Synthetic
ggcauuuacauaaacuauc

SEQ ID NO: 285569 - RNA, 20 nt, Artificial Sequence
  Synthetic
aggcauuuacauaaacuauc

SEQ ID NO: 285570 - RNA, 21 nt, Artificial Sequence
  Synthetic
aaggcauuuacauaaacuauc

SEQ ID NO: 285571 - RNA, 22 nt, Artificial Sequence
  Synthetic
aaaggcauuuacauaaacuauc

SEQ ID NO: 285572 - RNA, 23 nt, Artificial Sequence
  Synthetic
aaaaggcauuuacauaaacuauc

SEQ ID NO: 285573 - RNA, 24 nt, Artificial Sequence
  Synthetic
gaaaaggcauuuacauaaacuauc

SEQ ID NO: 285574 - RNA, 18 nt, Artificial Sequence
  Synthetic
aaaucugaaauaacuauc

SEQ ID NO: 285575 - RNA, 19 nt, Artificial Sequence
  Synthetic
caaaucugaaauaacuauc

SEQ ID NO: 285576 - RNA, 20 nt, Artificial Sequence
  Synthetic
ccaaaucugaaauaacuauc

SEQ ID NO: 285577 - RNA, 21 nt, Artificial Sequence
  Synthetic
gccaaaucugaaauaacuauc

SEQ ID NO: 285578 - RNA, 22 nt, Artificial Sequence
  Synthetic
agccaaaucugaaauaacuauc

SEQ ID NO: 285579 - RNA, 23 nt, Artificial Sequence
  Synthetic
uagccaaaucugaaauaacuauc

SEQ ID NO: 285580 - RNA, 24 nt, Artificial Sequence
  Synthetic
cuagccaaaucugaaauaacuauc

SEQ ID NO: 285581 - RNA, 18 nt, Artificial Sequence
  Synthetic
aauaauuugaacacuauc

SEQ ID NO: 285582 - RNA, 19 nt, Artificial Sequence
  Synthetic
uaauaauuugaacacuauc

SEQ ID NO: 285583 - RNA, 20 nt, Artificial Sequence
  Synthetic
uuaauaauuugaacacuauc

SEQ ID NO: 285584 - RNA, 21 nt, Artificial Sequence
  Synthetic
auuaauaauuugaacacuauc

SEQ ID NO: 285585 - RNA, 22 nt, Artificial Sequence
  Synthetic
uauuaauaauuugaacacuauc

SEQ ID NO: 285586 - RNA, 23 nt, Artificial Sequence
  Synthetic
cuauuaauaauuugaacacuauc

SEQ ID NO: 285587 - RNA, 24 nt, Artificial Sequence
  Synthetic
gcuauuaauaauuugaacacuauc

SEQ ID NO: 285588 - RNA, 18 nt, Artificial Sequence
  Synthetic
gagaauucacucacuauc

SEQ ID NO: 285589 - RNA, 19 nt, Artificial Sequence
  Synthetic
ggagaauucacucacuauc

SEQ ID NO: 285590 - RNA, 20 nt, Artificial Sequence
  Synthetic
gggagaauucacucacuauc

SEQ ID NO: 285591 - RNA, 21 nt, Artificial Sequence
  Synthetic
ugggagaauucacucacuauc

SEQ ID NO: 285592 - RNA, 22 nt, Artificial Sequence
  Synthetic
uugggagaauucacucacuauc

SEQ ID NO: 285593 - RNA, 23 nt, Artificial Sequence
  Synthetic
uuugggagaauucacucacuauc

SEQ ID NO: 285594 - RNA, 24 nt, Artificial Sequence
  Synthetic
uuuugggagaauucacucacuauc

SEQ ID NO: 285595 - RNA, 18 nt, Artificial Sequence
  Synthetic
ugagacuuauucacuauc

SEQ ID NO: 285596 - RNA, 19 nt, Artificial Sequence
  Synthetic
augagacuuauucacuauc

SEQ ID NO: 285597 - RNA, 20 nt, Artificial Sequence
  Synthetic
caugagacuuauucacuauc

SEQ ID NO: 285598 - RNA, 21 nt, Artificial Sequence
  Synthetic
ucaugagacuuauucacuauc

SEQ ID NO: 285599 - RNA, 22 nt, Artificial Sequence
  Synthetic
cucaugagacuuauucacuauc

SEQ ID NO: 285600 - RNA, 23 nt, Artificial Sequence
  Synthetic
ucucaugagacuuauucacuauc

SEQ ID NO: 285601 - RNA, 24 nt, Artificial Sequence
  Synthetic
aucucaugagacuuauucacuauc

SEQ ID NO: 285602 - RNA, 18 nt, Artificial Sequence
  Synthetic
uccccagugaggacuauc

SEQ ID NO: 285603 - RNA, 19 nt, Artificial Sequence
  Synthetic
cuccccagugaggacuauc

SEQ ID NO: 285604 - RNA, 20 nt, Artificial Sequence
  Synthetic
ccuccccagugaggacuauc

SEQ ID NO: 285605 - RNA, 21 nt, Artificial Sequence
  Synthetic
uccuccccagugaggacuauc

SEQ ID NO: 285606 - RNA, 22 nt, Artificial Sequence
  Synthetic
guccuccccagugaggacuauc

SEQ ID NO: 285607 - RNA, 23 nt, Artificial Sequence
  Synthetic
uguccuccccagugaggacuauc

SEQ ID NO: 285608 - RNA, 24 nt, Artificial Sequence
  Synthetic
guguccuccccagugaggacuauc

SEQ ID NO: 285609 - RNA, 18 nt, Artificial Sequence
  Synthetic
gcaauguaaaugacuauc

SEQ ID NO: 285610 - RNA, 19 nt, Artificial Sequence
  Synthetic
ugcaauguaaaugacuauc

SEQ ID NO: 285611 - RNA, 20 nt, Artificial Sequence
  Synthetic
uugcaauguaaaugacuauc

SEQ ID NO: 285612 - RNA, 21 nt, Artificial Sequence
  Synthetic
auugcaauguaaaugacuauc

SEQ ID NO: 285613 - RNA, 22 nt, Artificial Sequence
  Synthetic
aauugcaauguaaaugacuauc

SEQ ID NO: 285614 - RNA, 23 nt, Artificial Sequence
  Synthetic
caauugcaauguaaaugacuauc

SEQ ID NO: 285615 - RNA, 24 nt, Artificial Sequence
  Synthetic
ucaauugcaauguaaaugacuauc

SEQ ID NO: 285616 - RNA, 18 nt, Artificial Sequence
  Synthetic
aagaguuuuaauacuauc

SEQ ID NO: 285617 - RNA, 19 nt, Artificial Sequence
  Synthetic
aaagaguuuuaauacuauc

SEQ ID NO: 285618 - RNA, 20 nt, Artificial Sequence
  Synthetic
uaaagaguuuuaauacuauc

SEQ ID NO: 285619 - RNA, 21 nt, Artificial Sequence
  Synthetic
guaaagaguuuuaauacuauc

SEQ ID NO: 285620 - RNA, 22 nt, Artificial Sequence
  Synthetic
gguaaagaguuuuaauacuauc

SEQ ID NO: 285621 - RNA, 23 nt, Artificial Sequence
  Synthetic
agguaaagaguuuuaauacuauc

SEQ ID NO: 285622 - RNA, 24 nt, Artificial Sequence
  Synthetic
uagguaaagaguuuuaauacuauc

SEQ ID NO: 285623 - RNA, 18 nt, Artificial Sequence
  Synthetic
caauacauuucuacuauc

SEQ ID NO: 285624 - RNA, 19 nt, Artificial Sequence
  Synthetic
ccaauacauuucuacuauc

SEQ ID NO: 285625 - RNA, 20 nt, Artificial Sequence
  Synthetic
accaauacauuucuacuauc

SEQ ID NO: 285626 - RNA, 21 nt, Artificial Sequence
  Synthetic
caccaauacauuucuacuauc

SEQ ID NO: 285627 - RNA, 22 nt, Artificial Sequence
  Synthetic
gcaccaauacauuucuacuauc

SEQ ID NO: 285628 - RNA, 23 nt, Artificial Sequence
  Synthetic
ugcaccaauacauuucuacuauc

SEQ ID NO: 285629 - RNA, 24 nt, Artificial Sequence
  Synthetic
cugcaccaauacauuucuacuauc

SEQ ID NO: 285630 - RNA, 18 nt, Artificial Sequence
  Synthetic
ugagacuaauuuacuauc

SEQ ID NO: 285631 - RNA, 19 nt, Artificial Sequence
  Synthetic
augagacuaauuuacuauc

SEQ ID NO: 285632 - RNA, 20 nt, Artificial Sequence
  Synthetic
caugagacuaauuuacuauc

SEQ ID NO: 285633 - RNA, 21 nt, Artificial Sequence
  Synthetic
ucaugagacuaauuuacuauc

SEQ ID NO: 285634 - RNA, 22 nt, Artificial Sequence
  Synthetic
cucaugagacuaauuuacuauc

SEQ ID NO: 285635 - RNA, 23 nt, Artificial Sequence
  Synthetic
ucucaugagacuaauuuacuauc

SEQ ID NO: 285636 - RNA, 24 nt, Artificial Sequence
  Synthetic
aucucaugagacuaauuuacuauc

SEQ ID NO: 285637 - RNA, 18 nt, Artificial Sequence
  Synthetic
ccuauaaucauaccuauc

SEQ ID NO: 285638 - RNA, 19 nt, Artificial Sequence
  Synthetic
uccuauaaucauaccuauc

SEQ ID NO: 285639 - RNA, 20 nt, Artificial Sequence
  Synthetic
uuccuauaaucauaccuauc

SEQ ID NO: 285640 - RNA, 21 nt, Artificial Sequence
  Synthetic
cuuccuauaaucauaccuauc

SEQ ID NO: 285641 - RNA, 22 nt, Artificial Sequence
  Synthetic
ccuuccuauaaucauaccuauc

SEQ ID NO: 285642 - RNA, 23 nt, Artificial Sequence
  Synthetic
accuuccuauaaucauaccuauc

SEQ ID NO: 285643 - RNA, 24 nt, Artificial Sequence
  Synthetic
aaccuuccuauaaucauaccuauc

SEQ ID NO: 285644 - RNA, 18 nt, Artificial Sequence
  Synthetic
uaauacuaauuaccuauc

SEQ ID NO: 285645 - RNA, 19 nt, Artificial Sequence
  Synthetic
uuaauacuaauuaccuauc

SEQ ID NO: 285646 - RNA, 20 nt, Artificial Sequence
  Synthetic
auuaauacuaauuaccuauc

SEQ ID NO: 285647 - RNA, 21 nt, Artificial Sequence
  Synthetic
aauuaauacuaauuaccuauc

SEQ ID NO: 285648 - RNA, 22 nt, Artificial Sequence
  Synthetic
aaauuaauacuaauuaccuauc

SEQ ID NO: 285649 - RNA, 23 nt, Artificial Sequence
  Synthetic
uaaauuaauacuaauuaccuauc

SEQ ID NO: 285650 - RNA, 24 nt, Artificial Sequence
  Synthetic
uuaaauuaauacuaauuaccuauc

SEQ ID NO: 285651 - RNA, 18 nt, Artificial Sequence
  Synthetic
accccucauuuaccuauc

SEQ ID NO: 285652 - RNA, 19 nt, Artificial Sequence
  Synthetic
aaccccucauuuaccuauc

SEQ ID NO: 285653 - RNA, 20 nt, Artificial Sequence
  Synthetic
uaaccccucauuuaccuauc

SEQ ID NO: 285654 - RNA, 21 nt, Artificial Sequence
  Synthetic
guaaccccucauuuaccuauc

SEQ ID NO: 285655 - RNA, 22 nt, Artificial Sequence
  Synthetic
aguaaccccucauuuaccuauc

SEQ ID NO: 285656 - RNA, 23 nt, Artificial Sequence
  Synthetic
uaguaaccccucauuuaccuauc

SEQ ID NO: 285657 - RNA, 24 nt, Artificial Sequence
  Synthetic
auaguaaccccucauuuaccuauc

SEQ ID NO: 285658 - RNA, 18 nt, Artificial Sequence
  Synthetic
ggccaagaagagccuauc

SEQ ID NO: 285659 - RNA, 19 nt, Artificial Sequence
  Synthetic
aggccaagaagagccuauc

SEQ ID NO: 285660 - RNA, 20 nt, Artificial Sequence
  Synthetic
uaggccaagaagagccuauc

SEQ ID NO: 285661 - RNA, 21 nt, Artificial Sequence
  Synthetic
auaggccaagaagagccuauc

SEQ ID NO: 285662 - RNA, 22 nt, Artificial Sequence
  Synthetic
uauaggccaagaagagccuauc

SEQ ID NO: 285663 - RNA, 23 nt, Artificial Sequence
  Synthetic
uuauaggccaagaagagccuauc

SEQ ID NO: 285664 - RNA, 24 nt, Artificial Sequence
  Synthetic
auuauaggccaagaagagccuauc

SEQ ID NO: 285665 - RNA, 18 nt, Artificial Sequence
  Synthetic
auucuacuauauccuauc

SEQ ID NO: 285666 - RNA, 19 nt, Artificial Sequence
  Synthetic
uauucuacuauauccuauc

SEQ ID NO: 285667 - RNA, 20 nt, Artificial Sequence
  Synthetic
uuauucuacuauauccuauc

SEQ ID NO: 285668 - RNA, 21 nt, Artificial Sequence
  Synthetic
cuuauucuacuauauccuauc

SEQ ID NO: 285669 - RNA, 22 nt, Artificial Sequence
  Synthetic
ccuuauucuacuauauccuauc

SEQ ID NO: 285670 - RNA, 23 nt, Artificial Sequence
  Synthetic
uccuuauucuacuauauccuauc

SEQ ID NO: 285671 - RNA, 24 nt, Artificial Sequence
  Synthetic
uuccuuauucuacuauauccuauc

SEQ ID NO: 285672 - RNA, 18 nt, Artificial Sequence
  Synthetic
ccaucagaucccgcuauc

SEQ ID NO: 285673 - RNA, 19 nt, Artificial Sequence
  Synthetic
accaucagaucccgcuauc

SEQ ID NO: 285674 - RNA, 20 nt, Artificial Sequence
  Synthetic
aaccaucagaucccgcuauc

SEQ ID NO: 285675 - RNA, 21 nt, Artificial Sequence
  Synthetic
aaaccaucagaucccgcuauc

SEQ ID NO: 285676 - RNA, 22 nt, Artificial Sequence
  Synthetic
aaaaccaucagaucccgcuauc

SEQ ID NO: 285677 - RNA, 23 nt, Artificial Sequence
  Synthetic
uaaaaccaucagaucccgcuauc

SEQ ID NO: 285678 - RNA, 24 nt, Artificial Sequence
  Synthetic
auaaaaccaucagaucccgcuauc

SEQ ID NO: 285679 - RNA, 18 nt, Artificial Sequence
  Synthetic
aucaucaaaaaugcuauc

SEQ ID NO: 285680 - RNA, 19 nt, Artificial Sequence
  Synthetic
aaucaucaaaaaugcuauc

SEQ ID NO: 285681 - RNA, 20 nt, Artificial Sequence
  Synthetic
gaaucaucaaaaaugcuauc

SEQ ID NO: 285682 - RNA, 21 nt, Artificial Sequence
  Synthetic
ugaaucaucaaaaaugcuauc

SEQ ID NO: 285683 - RNA, 22 nt, Artificial Sequence
  Synthetic
cugaaucaucaaaaaugcuauc

SEQ ID NO: 285684 - RNA, 23 nt, Artificial Sequence
  Synthetic
ccugaaucaucaaaaaugcuauc

SEQ ID NO: 285685 - RNA, 24 nt, Artificial Sequence
  Synthetic
gccugaaucaucaaaaaugcuauc

SEQ ID NO: 285686 - RNA, 18 nt, Artificial Sequence
  Synthetic
gugucuagaaaugcuauc

SEQ ID NO: 285687 - RNA, 19 nt, Artificial Sequence
  Synthetic
ugugucuagaaaugcuauc

SEQ ID NO: 285688 - RNA, 20 nt, Artificial Sequence
  Synthetic
gugugucuagaaaugcuauc

SEQ ID NO: 285689 - RNA, 21 nt, Artificial Sequence
  Synthetic
ggugugucuagaaaugcuauc

SEQ ID NO: 285690 - RNA, 22 nt, Artificial Sequence
  Synthetic
gggugugucuagaaaugcuauc

SEQ ID NO: 285691 - RNA, 23 nt, Artificial Sequence
  Synthetic
agggugugucuagaaaugcuauc

SEQ ID NO: 285692 - RNA, 24 nt, Artificial Sequence
  Synthetic
cagggugugucuagaaaugcuauc

SEQ ID NO: 285693 - RNA, 18 nt, Artificial Sequence
  Synthetic
aagaacucagcugcuauc

SEQ ID NO: 285694 - RNA, 19 nt, Artificial Sequence
  Synthetic
caagaacucagcugcuauc

SEQ ID NO: 285695 - RNA, 20 nt, Artificial Sequence
  Synthetic
ucaagaacucagcugcuauc

SEQ ID NO: 285696 - RNA, 21 nt, Artificial Sequence
  Synthetic
cucaagaacucagcugcuauc

SEQ ID NO: 285697 - RNA, 22 nt, Artificial Sequence
  Synthetic
gcucaagaacucagcugcuauc

SEQ ID NO: 285698 - RNA, 23 nt, Artificial Sequence
  Synthetic
cgcucaagaacucagcugcuauc

SEQ ID NO: 285699 - RNA, 24 nt, Artificial Sequence
  Synthetic
ucgcucaagaacucagcugcuauc

SEQ ID NO: 285700 - RNA, 18 nt, Artificial Sequence
  Synthetic
guaaacugggcugcuauc

SEQ ID NO: 285701 - RNA, 19 nt, Artificial Sequence
  Synthetic
aguaaacugggcugcuauc

SEQ ID NO: 285702 - RNA, 20 nt, Artificial Sequence
  Synthetic
caguaaacugggcugcuauc

SEQ ID NO: 285703 - RNA, 21 nt, Artificial Sequence
  Synthetic
acaguaaacugggcugcuauc

SEQ ID NO: 285704 - RNA, 22 nt, Artificial Sequence
  Synthetic
uacaguaaacugggcugcuauc

SEQ ID NO: 285705 - RNA, 23 nt, Artificial Sequence
  Synthetic
auacaguaaacugggcugcuauc

SEQ ID NO: 285706 - RNA, 24 nt, Artificial Sequence
  Synthetic
cauacaguaaacugggcugcuauc

SEQ ID NO: 285707 - RNA, 18 nt, Artificial Sequence
  Synthetic
gagagagauggaucuauc

SEQ ID NO: 285708 - RNA, 19 nt, Artificial Sequence
  Synthetic
agagagagauggaucuauc

SEQ ID NO: 285709 - RNA, 20 nt, Artificial Sequence
  Synthetic
aagagagagauggaucuauc

SEQ ID NO: 285710 - RNA, 21 nt, Artificial Sequence
  Synthetic
aaagagagagauggaucuauc

SEQ ID NO: 285711 - RNA, 22 nt, Artificial Sequence
  Synthetic
uaaagagagagauggaucuauc

SEQ ID NO: 285712 - RNA, 23 nt, Artificial Sequence
  Synthetic
guaaagagagagauggaucuauc

SEQ ID NO: 285713 - RNA, 24 nt, Artificial Sequence
  Synthetic
uguaaagagagagauggaucuauc

SEQ ID NO: 285714 - RNA, 18 nt, Artificial Sequence
  Synthetic
ccuaacauaugaucuauc

SEQ ID NO: 285715 - RNA, 19 nt, Artificial Sequence
  Synthetic
gccuaacauaugaucuauc

SEQ ID NO: 285716 - RNA, 20 nt, Artificial Sequence
  Synthetic
ggccuaacauaugaucuauc

SEQ ID NO: 285717 - RNA, 21 nt, Artificial Sequence
  Synthetic
uggccuaacauaugaucuauc

SEQ ID NO: 285718 - RNA, 22 nt, Artificial Sequence
  Synthetic
guggccuaacauaugaucuauc

SEQ ID NO: 285719 - RNA, 23 nt, Artificial Sequence
  Synthetic
uguggccuaacauaugaucuauc

SEQ ID NO: 285720 - RNA, 24 nt, Artificial Sequence
  Synthetic
cuguggccuaacauaugaucuauc

SEQ ID NO: 285721 - RNA, 18 nt, Artificial Sequence
  Synthetic
uuauaggggaacucuauc

SEQ ID NO: 285722 - RNA, 19 nt, Artificial Sequence
  Synthetic
cuuauaggggaacucuauc

SEQ ID NO: 285723 - RNA, 20 nt, Artificial Sequence
  Synthetic
gcuuauaggggaacucuauc

SEQ ID NO: 285724 - RNA, 21 nt, Artificial Sequence
  Synthetic
ugcuuauaggggaacucuauc

SEQ ID NO: 285725 - RNA, 22 nt, Artificial Sequence
  Synthetic
cugcuuauaggggaacucuauc

SEQ ID NO: 285726 - RNA, 23 nt, Artificial Sequence
  Synthetic
ucugcuuauaggggaacucuauc

SEQ ID NO: 285727 - RNA, 24 nt, Artificial Sequence
  Synthetic
aucugcuuauaggggaacucuauc

SEQ ID NO: 285728 - RNA, 18 nt, Artificial Sequence
  Synthetic
guuuaugccaagucuauc

SEQ ID NO: 285729 - RNA, 19 nt, Artificial Sequence
  Synthetic
uguuuaugccaagucuauc

SEQ ID NO: 285730 - RNA, 20 nt, Artificial Sequence
  Synthetic
uuguuuaugccaagucuauc

SEQ ID NO: 285731 - RNA, 21 nt, Artificial Sequence
  Synthetic
uuuguuuaugccaagucuauc

SEQ ID NO: 285732 - RNA, 22 nt, Artificial Sequence
  Synthetic
guuuguuuaugccaagucuauc

SEQ ID NO: 285733 - RNA, 23 nt, Artificial Sequence
  Synthetic
aguuuguuuaugccaagucuauc

SEQ ID NO: 285734 - RNA, 24 nt, Artificial Sequence
  Synthetic
uaguuuguuuaugccaagucuauc

SEQ ID NO: 285735 - RNA, 18 nt, Artificial Sequence
  Synthetic
uaguuauugcagucuauc

SEQ ID NO: 285736 - RNA, 19 nt, Artificial Sequence
  Synthetic
auaguuauugcagucuauc

SEQ ID NO: 285737 - RNA, 20 nt, Artificial Sequence
  Synthetic
cauaguuauugcagucuauc

SEQ ID NO: 285738 - RNA, 21 nt, Artificial Sequence
  Synthetic
acauaguuauugcagucuauc

SEQ ID NO: 285739 - RNA, 22 nt, Artificial Sequence
  Synthetic
uacauaguuauugcagucuauc

SEQ ID NO: 285740 - RNA, 23 nt, Artificial Sequence
  Synthetic
auacauaguuauugcagucuauc

SEQ ID NO: 285741 - RNA, 24 nt, Artificial Sequence
  Synthetic
uauacauaguuauugcagucuauc

SEQ ID NO: 285742 - RNA, 18 nt, Artificial Sequence
  Synthetic
caauaaguggagucuauc

SEQ ID NO: 285743 - RNA, 19 nt, Artificial Sequence
  Synthetic
ucaauaaguggagucuauc

SEQ ID NO: 285744 - RNA, 20 nt, Artificial Sequence
  Synthetic
uucaauaaguggagucuauc

SEQ ID NO: 285745 - RNA, 21 nt, Artificial Sequence
  Synthetic
auucaauaaguggagucuauc

SEQ ID NO: 285746 - RNA, 22 nt, Artificial Sequence
  Synthetic
cauucaauaaguggagucuauc

SEQ ID NO: 285747 - RNA, 23 nt, Artificial Sequence
  Synthetic
gcauucaauaaguggagucuauc

SEQ ID NO: 285748 - RNA, 24 nt, Artificial Sequence
  Synthetic
ugcauucaauaaguggagucuauc

SEQ ID NO: 285749 - RNA, 18 nt, Artificial Sequence
  Synthetic
accucuucuguuucuauc

SEQ ID NO: 285750 - RNA, 19 nt, Artificial Sequence
  Synthetic
uaccucuucuguuucuauc

SEQ ID NO: 285751 - RNA, 20 nt, Artificial Sequence
  Synthetic
uuaccucuucuguuucuauc

SEQ ID NO: 285752 - RNA, 21 nt, Artificial Sequence
  Synthetic
auuaccucuucuguuucuauc

SEQ ID NO: 285753 - RNA, 22 nt, Artificial Sequence
  Synthetic
gauuaccucuucuguuucuauc

SEQ ID NO: 285754 - RNA, 23 nt, Artificial Sequence
  Synthetic
agauuaccucuucuguuucuauc

SEQ ID NO: 285755 - RNA, 24 nt, Artificial Sequence
  Synthetic
cagauuaccucuucuguuucuauc

SEQ ID NO: 285756 - RNA, 18 nt, Artificial Sequence
  Synthetic
uauaggcaugcaaguauc

SEQ ID NO: 285757 - RNA, 19 nt, Artificial Sequence
  Synthetic
auauaggcaugcaaguauc

SEQ ID NO: 285758 - RNA, 20 nt, Artificial Sequence
  Synthetic
gauauaggcaugcaaguauc

SEQ ID NO: 285759 - RNA, 21 nt, Artificial Sequence
  Synthetic
ugauauaggcaugcaaguauc

SEQ ID NO: 285760 - RNA, 22 nt, Artificial Sequence
  Synthetic
uugauauaggcaugcaaguauc

SEQ ID NO: 285761 - RNA, 23 nt, Artificial Sequence
  Synthetic
uuugauauaggcaugcaaguauc

SEQ ID NO: 285762 - RNA, 24 nt, Artificial Sequence
  Synthetic
uuuugauauaggcaugcaaguauc

SEQ ID NO: 285763 - RNA, 18 nt, Artificial Sequence
  Synthetic
gagggauccagaaguauc

SEQ ID NO: 285764 - RNA, 19 nt, Artificial Sequence
  Synthetic
cgagggauccagaaguauc

SEQ ID NO: 285765 - RNA, 20 nt, Artificial Sequence
  Synthetic
ccgagggauccagaaguauc

SEQ ID NO: 285766 - RNA, 21 nt, Artificial Sequence
  Synthetic
accgagggauccagaaguauc

SEQ ID NO: 285767 - RNA, 22 nt, Artificial Sequence
  Synthetic
uaccgagggauccagaaguauc

SEQ ID NO: 285768 - RNA, 23 nt, Artificial Sequence
  Synthetic
auaccgagggauccagaaguauc

SEQ ID NO: 285769 - RNA, 24 nt, Artificial Sequence
  Synthetic
aauaccgagggauccagaaguauc

SEQ ID NO: 285770 - RNA, 18 nt, Artificial Sequence
  Synthetic
gguuggaacuacaguauc

SEQ ID NO: 285771 - RNA, 19 nt, Artificial Sequence
  Synthetic
agguuggaacuacaguauc

SEQ ID NO: 285772 - RNA, 20 nt, Artificial Sequence
  Synthetic
aagguuggaacuacaguauc

SEQ ID NO: 285773 - RNA, 21 nt, Artificial Sequence
  Synthetic
gaagguuggaacuacaguauc

SEQ ID NO: 285774 - RNA, 22 nt, Artificial Sequence
  Synthetic
ugaagguuggaacuacaguauc

SEQ ID NO: 285775 - RNA, 23 nt, Artificial Sequence
  Synthetic
uugaagguuggaacuacaguauc

SEQ ID NO: 285776 - RNA, 24 nt, Artificial Sequence
  Synthetic
cuugaagguuggaacuacaguauc

SEQ ID NO: 285777 - RNA, 18 nt, Artificial Sequence
  Synthetic
aaauuuuggcucaguauc

SEQ ID NO: 285778 - RNA, 19 nt, Artificial Sequence
  Synthetic
caaauuuuggcucaguauc

SEQ ID NO: 285779 - RNA, 20 nt, Artificial Sequence
  Synthetic
ucaaauuuuggcucaguauc

SEQ ID NO: 285780 - RNA, 21 nt, Artificial Sequence
  Synthetic
cucaaauuuuggcucaguauc

SEQ ID NO: 285781 - RNA, 22 nt, Artificial Sequence
  Synthetic
ucucaaauuuuggcucaguauc

SEQ ID NO: 285782 - RNA, 23 nt, Artificial Sequence
  Synthetic
aucucaaauuuuggcucaguauc

SEQ ID NO: 285783 - RNA, 24 nt, Artificial Sequence
  Synthetic
aaucucaaauuuuggcucaguauc

SEQ ID NO: 285784 - RNA, 18 nt, Artificial Sequence
  Synthetic
cagaaaaacaagaguauc

SEQ ID NO: 285785 - RNA, 19 nt, Artificial Sequence
  Synthetic
gcagaaaaacaagaguauc

SEQ ID NO: 285786 - RNA, 20 nt, Artificial Sequence
  Synthetic
ggcagaaaaacaagaguauc

SEQ ID NO: 285787 - RNA, 21 nt, Artificial Sequence
  Synthetic
cggcagaaaaacaagaguauc

SEQ ID NO: 285788 - RNA, 22 nt, Artificial Sequence
  Synthetic
ucggcagaaaaacaagaguauc

SEQ ID NO: 285789 - RNA, 23 nt, Artificial Sequence
  Synthetic
aucggcagaaaaacaagaguauc

SEQ ID NO: 285790 - RNA, 24 nt, Artificial Sequence
  Synthetic
aaucggcagaaaaacaagaguauc

SEQ ID NO: 285791 - RNA, 18 nt, Artificial Sequence
  Synthetic
auagcagacaagaguauc

SEQ ID NO: 285792 - RNA, 19 nt, Artificial Sequence
  Synthetic
uauagcagacaagaguauc

SEQ ID NO: 285793 - RNA, 20 nt, Artificial Sequence
  Synthetic
auauagcagacaagaguauc

SEQ ID NO: 285794 - RNA, 21 nt, Artificial Sequence
  Synthetic
aauauagcagacaagaguauc

SEQ ID NO: 285795 - RNA, 22 nt, Artificial Sequence
  Synthetic
aaauauagcagacaagaguauc

SEQ ID NO: 285796 - RNA, 23 nt, Artificial Sequence
  Synthetic
caaauauagcagacaagaguauc

SEQ ID NO: 285797 - RNA, 24 nt, Artificial Sequence
  Synthetic
gcaaauauagcagacaagaguauc

SEQ ID NO: 285798 - RNA, 18 nt, Artificial Sequence
  Synthetic
gcacguauaaugaguauc

SEQ ID NO: 285799 - RNA, 19 nt, Artificial Sequence
  Synthetic
ggcacguauaaugaguauc

SEQ ID NO: 285800 - RNA, 20 nt, Artificial Sequence
  Synthetic
uggcacguauaaugaguauc

SEQ ID NO: 285801 - RNA, 21 nt, Artificial Sequence
  Synthetic
auggcacguauaaugaguauc

SEQ ID NO: 285802 - RNA, 22 nt, Artificial Sequence
  Synthetic
cauggcacguauaaugaguauc

SEQ ID NO: 285803 - RNA, 23 nt, Artificial Sequence
  Synthetic
gcauggcacguauaaugaguauc

SEQ ID NO: 285804 - RNA, 24 nt, Artificial Sequence
  Synthetic
ugcauggcacguauaaugaguauc

SEQ ID NO: 285805 - RNA, 18 nt, Artificial Sequence
  Synthetic
uguaguuaacguaguauc

SEQ ID NO: 285806 - RNA, 19 nt, Artificial Sequence
  Synthetic
auguaguuaacguaguauc

SEQ ID NO: 285807 - RNA, 20 nt, Artificial Sequence
  Synthetic
aauguaguuaacguaguauc

SEQ ID NO: 285808 - RNA, 21 nt, Artificial Sequence
  Synthetic
aaauguaguuaacguaguauc

SEQ ID NO: 285809 - RNA, 22 nt, Artificial Sequence
  Synthetic
gaaauguaguuaacguaguauc

SEQ ID NO: 285810 - RNA, 23 nt, Artificial Sequence
  Synthetic
ugaaauguaguuaacguaguauc

SEQ ID NO: 285811 - RNA, 24 nt, Artificial Sequence
  Synthetic
augaaauguaguuaacguaguauc

SEQ ID NO: 285812 - RNA, 18 nt, Artificial Sequence
  Synthetic
uagcuggcuaaccguauc

SEQ ID NO: 285813 - RNA, 19 nt, Artificial Sequence
  Synthetic
auagcuggcuaaccguauc

SEQ ID NO: 285814 - RNA, 20 nt, Artificial Sequence
  Synthetic
gauagcuggcuaaccguauc

SEQ ID NO: 285815 - RNA, 21 nt, Artificial Sequence
  Synthetic
ggauagcuggcuaaccguauc

SEQ ID NO: 285816 - RNA, 22 nt, Artificial Sequence
  Synthetic
gggauagcuggcuaaccguauc

SEQ ID NO: 285817 - RNA, 23 nt, Artificial Sequence
  Synthetic
ugggauagcuggcuaaccguauc

SEQ ID NO: 285818 - RNA, 24 nt, Artificial Sequence
  Synthetic
cugggauagcuggcuaaccguauc

SEQ ID NO: 285819 - RNA, 18 nt, Artificial Sequence
  Synthetic
uacauguucuuucguauc

SEQ ID NO: 285820 - RNA, 19 nt, Artificial Sequence
  Synthetic
uuacauguucuuucguauc

SEQ ID NO: 285821 - RNA, 20 nt, Artificial Sequence
  Synthetic
auuacauguucuuucguauc

SEQ ID NO: 285822 - RNA, 21 nt, Artificial Sequence
  Synthetic
aauuacauguucuuucguauc

SEQ ID NO: 285823 - RNA, 22 nt, Artificial Sequence
  Synthetic
caauuacauguucuuucguauc

SEQ ID NO: 285824 - RNA, 23 nt, Artificial Sequence
  Synthetic
ccaauuacauguucuuucguauc

SEQ ID NO: 285825 - RNA, 24 nt, Artificial Sequence
  Synthetic
gccaauuacauguucuuucguauc

SEQ ID NO: 285826 - RNA, 18 nt, Artificial Sequence
  Synthetic
cucuuuccucuagguauc

SEQ ID NO: 285827 - RNA, 19 nt, Artificial Sequence
  Synthetic
ucucuuuccucuagguauc

SEQ ID NO: 285828 - RNA, 20 nt, Artificial Sequence
  Synthetic
uucucuuuccucuagguauc

SEQ ID NO: 285829 - RNA, 21 nt, Artificial Sequence
  Synthetic
guucucuuuccucuagguauc

SEQ ID NO: 285830 - RNA, 22 nt, Artificial Sequence
  Synthetic
gguucucuuuccucuagguauc

SEQ ID NO: 285831 - RNA, 23 nt, Artificial Sequence
  Synthetic
agguucucuuuccucuagguauc

SEQ ID NO: 285832 - RNA, 24 nt, Artificial Sequence
  Synthetic
gagguucucuuuccucuagguauc

SEQ ID NO: 285833 - RNA, 18 nt, Artificial Sequence
  Synthetic
uagagcaccugauguauc

SEQ ID NO: 285834 - RNA, 19 nt, Artificial Sequence
  Synthetic
auagagcaccugauguauc

SEQ ID NO: 285835 - RNA, 20 nt, Artificial Sequence
  Synthetic
uauagagcaccugauguauc

SEQ ID NO: 285836 - RNA, 21 nt, Artificial Sequence
  Synthetic
auauagagcaccugauguauc

SEQ ID NO: 285837 - RNA, 22 nt, Artificial Sequence
  Synthetic
uauauagagcaccugauguauc

SEQ ID NO: 285838 - RNA, 23 nt, Artificial Sequence
  Synthetic
uuauauagagcaccugauguauc

SEQ ID NO: 285839 - RNA, 24 nt, Artificial Sequence
  Synthetic
auuauauagagcaccugauguauc

SEQ ID NO: 285840 - RNA, 18 nt, Artificial Sequence
  Synthetic
uauaaguuucuauguauc

SEQ ID NO: 285841 - RNA, 19 nt, Artificial Sequence
  Synthetic
auauaaguuucuauguauc

SEQ ID NO: 285842 - RNA, 20 nt, Artificial Sequence
  Synthetic
uauauaaguuucuauguauc

SEQ ID NO: 285843 - RNA, 21 nt, Artificial Sequence
  Synthetic
auauauaaguuucuauguauc

SEQ ID NO: 285844 - RNA, 22 nt, Artificial Sequence
  Synthetic
aauauauaaguuucuauguauc

SEQ ID NO: 285845 - RNA, 23 nt, Artificial Sequence
  Synthetic
aaauauauaaguuucuauguauc

SEQ ID NO: 285846 - RNA, 24 nt, Artificial Sequence
  Synthetic
aaaauauauaaguuucuauguauc

SEQ ID NO: 285847 - RNA, 18 nt, Artificial Sequence
  Synthetic
uuccuccaccacuguauc

SEQ ID NO: 285848 - RNA, 19 nt, Artificial Sequence
  Synthetic
uuuccuccaccacuguauc

SEQ ID NO: 285849 - RNA, 20 nt, Artificial Sequence
  Synthetic
uuuuccuccaccacuguauc

SEQ ID NO: 285850 - RNA, 21 nt, Artificial Sequence
  Synthetic
uuuuuccuccaccacuguauc

SEQ ID NO: 285851 - RNA, 22 nt, Artificial Sequence
  Synthetic
uuuuuuccuccaccacuguauc

SEQ ID NO: 285852 - RNA, 23 nt, Artificial Sequence
  Synthetic
uuuuuuuccuccaccacuguauc

SEQ ID NO: 285853 - RNA, 24 nt, Artificial Sequence
  Synthetic
guuuuuuuccuccaccacuguauc

SEQ ID NO: 285854 - RNA, 18 nt, Artificial Sequence
  Synthetic
uagcauuaaccguguauc

SEQ ID NO: 285855 - RNA, 19 nt, Artificial Sequence
  Synthetic
uuagcauuaaccguguauc

SEQ ID NO: 285856 - RNA, 20 nt, Artificial Sequence
  Synthetic
uuuagcauuaaccguguauc

SEQ ID NO: 285857 - RNA, 21 nt, Artificial Sequence
  Synthetic
auuuagcauuaaccguguauc

SEQ ID NO: 285858 - RNA, 22 nt, Artificial Sequence
  Synthetic
uauuuagcauuaaccguguauc

SEQ ID NO: 285859 - RNA, 23 nt, Artificial Sequence
  Synthetic
auauuuagcauuaaccguguauc

SEQ ID NO: 285860 - RNA, 24 nt, Artificial Sequence
  Synthetic
cauauuuagcauuaaccguguauc

SEQ ID NO: 285861 - RNA, 18 nt, Artificial Sequence
  Synthetic
uguaccccccauuguauc

SEQ ID NO: 285862 - RNA, 19 nt, Artificial Sequence
  Synthetic
cuguaccccccauuguauc

SEQ ID NO: 285863 - RNA, 20 nt, Artificial Sequence
  Synthetic
ccuguaccccccauuguauc

SEQ ID NO: 285864 - RNA, 21 nt, Artificial Sequence
  Synthetic
gccuguaccccccauuguauc

SEQ ID NO: 285865 - RNA, 22 nt, Artificial Sequence
  Synthetic
ugccuguaccccccauuguauc

SEQ ID NO: 285866 - RNA, 23 nt, Artificial Sequence
  Synthetic
augccuguaccccccauuguauc

SEQ ID NO: 285867 - RNA, 24 nt, Artificial Sequence
  Synthetic
aaugccuguaccccccauuguauc

SEQ ID NO: 285868 - RNA, 18 nt, Artificial Sequence
  Synthetic
guacauugauuuuguauc

SEQ ID NO: 285869 - RNA, 19 nt, Artificial Sequence
  Synthetic
aguacauugauuuuguauc

SEQ ID NO: 285870 - RNA, 20 nt, Artificial Sequence
  Synthetic
uaguacauugauuuuguauc

SEQ ID NO: 285871 - RNA, 21 nt, Artificial Sequence
  Synthetic
uuaguacauugauuuuguauc

SEQ ID NO: 285872 - RNA, 22 nt, Artificial Sequence
  Synthetic
uuuaguacauugauuuuguauc

SEQ ID NO: 285873 - RNA, 23 nt, Artificial Sequence
  Synthetic
uuuuaguacauugauuuuguauc

SEQ ID NO: 285874 - RNA, 24 nt, Artificial Sequence
  Synthetic
auuuuaguacauugauuuuguauc

SEQ ID NO: 285875 - RNA, 20 nt, Artificial Sequence
  Synthetic
uuguacauugauuuuguauc

SEQ ID NO: 285876 - RNA, 18 nt, Artificial Sequence
  Synthetic
gcacguugauuuuguauc

SEQ ID NO: 285877 - RNA, 19 nt, Artificial Sequence
  Synthetic
ugcacguugauuuuguauc

SEQ ID NO: 285878 - RNA, 20 nt, Artificial Sequence
  Synthetic
uugcacguugauuuuguauc

SEQ ID NO: 285879 - RNA, 21 nt, Artificial Sequence
  Synthetic
uuugcacguugauuuuguauc

SEQ ID NO: 285880 - RNA, 22 nt, Artificial Sequence
  Synthetic
uuuugcacguugauuuuguauc

SEQ ID NO: 285881 - RNA, 23 nt, Artificial Sequence
  Synthetic
uuuuugcacguugauuuuguauc

SEQ ID NO: 285882 - RNA, 24 nt, Artificial Sequence
  Synthetic
auuuuugcacguugauuuuguauc

SEQ ID NO: 285883 - RNA, 18 nt, Artificial Sequence
  Synthetic
ucacgacaaaaaauuauc

SEQ ID NO: 285884 - RNA, 19 nt, Artificial Sequence
  Synthetic
cucacgacaaaaaauuauc

SEQ ID NO: 285885 - RNA, 20 nt, Artificial Sequence
  Synthetic
acucacgacaaaaaauuauc

SEQ ID NO: 285886 - RNA, 21 nt, Artificial Sequence
  Synthetic
cacucacgacaaaaaauuauc

SEQ ID NO: 285887 - RNA, 22 nt, Artificial Sequence
  Synthetic
ccacucacgacaaaaaauuauc

SEQ ID NO: 285888 - RNA, 23 nt, Artificial Sequence
  Synthetic
gccacucacgacaaaaaauuauc

SEQ ID NO: 285889 - RNA, 24 nt, Artificial Sequence
  Synthetic
agccacucacgacaaaaaauuauc

SEQ ID NO: 285890 - RNA, 18 nt, Artificial Sequence
  Synthetic
aaauucaauaaaauuauc

SEQ ID NO: 285891 - RNA, 19 nt, Artificial Sequence
  Synthetic
gaaauucaauaaaauuauc

SEQ ID NO: 285892 - RNA, 20 nt, Artificial Sequence
  Synthetic
agaaauucaauaaaauuauc

SEQ ID NO: 285893 - RNA, 21 nt, Artificial Sequence
  Synthetic
gagaaauucaauaaaauuauc

SEQ ID NO: 285894 - RNA, 22 nt, Artificial Sequence
  Synthetic
ugagaaauucaauaaaauuauc

SEQ ID NO: 285895 - RNA, 23 nt, Artificial Sequence
  Synthetic
cugagaaauucaauaaaauuauc

SEQ ID NO: 285896 - RNA, 24 nt, Artificial Sequence
  Synthetic
gcugagaaauucaauaaaauuauc

SEQ ID NO: 285897 - RNA, 18 nt, Artificial Sequence
  Synthetic
ucagucuguaaaauuauc

SEQ ID NO: 285898 - RNA, 19 nt, Artificial Sequence
  Synthetic
gucagucuguaaaauuauc

SEQ ID NO: 285899 - RNA, 20 nt, Artificial Sequence
  Synthetic
ugucagucuguaaaauuauc

SEQ ID NO: 285900 - RNA, 21 nt, Artificial Sequence
  Synthetic
augucagucuguaaaauuauc

SEQ ID NO: 285901 - RNA, 22 nt, Artificial Sequence
  Synthetic
caugucagucuguaaaauuauc

SEQ ID NO: 285902 - RNA, 23 nt, Artificial Sequence
  Synthetic
ucaugucagucuguaaaauuauc

SEQ ID NO: 285903 - RNA, 24 nt, Artificial Sequence
  Synthetic
uucaugucagucuguaaaauuauc

SEQ ID NO: 285904 - RNA, 18 nt, Artificial Sequence
  Synthetic
uuagagcaugaaauuauc

SEQ ID NO: 285905 - RNA, 19 nt, Artificial Sequence
  Synthetic
cuuagagcaugaaauuauc

SEQ ID NO: 285906 - RNA, 20 nt, Artificial Sequence
  Synthetic
ucuuagagcaugaaauuauc

SEQ ID NO: 285907 - RNA, 21 nt, Artificial Sequence
  Synthetic
uucuuagagcaugaaauuauc

SEQ ID NO: 285908 - RNA, 22 nt, Artificial Sequence
  Synthetic
auucuuagagcaugaaauuauc

SEQ ID NO: 285909 - RNA, 23 nt, Artificial Sequence
  Synthetic
cauucuuagagcaugaaauuauc

SEQ ID NO: 285910 - RNA, 24 nt, Artificial Sequence
  Synthetic
ccauucuuagagcaugaaauuauc

SEQ ID NO: 285911 - RNA, 18 nt, Artificial Sequence
  Synthetic
aaguguauuucaauuauc

SEQ ID NO: 285912 - RNA, 19 nt, Artificial Sequence
  Synthetic
uaaguguauuucaauuauc

SEQ ID NO: 285913 - RNA, 20 nt, Artificial Sequence
  Synthetic
cuaaguguauuucaauuauc

SEQ ID NO: 285914 - RNA, 21 nt, Artificial Sequence
  Synthetic
gcuaaguguauuucaauuauc

SEQ ID NO: 285915 - RNA, 22 nt, Artificial Sequence
  Synthetic
ugcuaaguguauuucaauuauc

SEQ ID NO: 285916 - RNA, 23 nt, Artificial Sequence
  Synthetic
uugcuaaguguauuucaauuauc

SEQ ID NO: 285917 - RNA, 24 nt, Artificial Sequence
  Synthetic
auugcuaaguguauuucaauuauc

SEQ ID NO: 285918 - RNA, 18 nt, Artificial Sequence
  Synthetic
acaagugaaggaauuauc

SEQ ID NO: 285919 - RNA, 19 nt, Artificial Sequence
  Synthetic
gacaagugaaggaauuauc

SEQ ID NO: 285920 - RNA, 20 nt, Artificial Sequence
  Synthetic
agacaagugaaggaauuauc

SEQ ID NO: 285921 - RNA, 21 nt, Artificial Sequence
  Synthetic
aagacaagugaaggaauuauc

SEQ ID NO: 285922 - RNA, 22 nt, Artificial Sequence
  Synthetic
aaagacaagugaaggaauuauc

SEQ ID NO: 285923 - RNA, 23 nt, Artificial Sequence
  Synthetic
aaaagacaagugaaggaauuauc

SEQ ID NO: 285924 - RNA, 24 nt, Artificial Sequence
  Synthetic
uaaaagacaagugaaggaauuauc

SEQ ID NO: 285925 - RNA, 18 nt, Artificial Sequence
  Synthetic
cacauaacuguaauuauc

SEQ ID NO: 285926 - RNA, 19 nt, Artificial Sequence
  Synthetic
gcacauaacuguaauuauc

SEQ ID NO: 285927 - RNA, 20 nt, Artificial Sequence
  Synthetic
agcacauaacuguaauuauc

SEQ ID NO: 285928 - RNA, 21 nt, Artificial Sequence
  Synthetic
cagcacauaacuguaauuauc

SEQ ID NO: 285929 - RNA, 22 nt, Artificial Sequence
  Synthetic
gcagcacauaacuguaauuauc

SEQ ID NO: 285930 - RNA, 23 nt, Artificial Sequence
  Synthetic
ugcagcacauaacuguaauuauc

SEQ ID NO: 285931 - RNA, 24 nt, Artificial Sequence
  Synthetic
augcagcacauaacuguaauuauc

SEQ ID NO: 285932 - RNA, 18 nt, Artificial Sequence
  Synthetic
uuuaaguguguaauuauc

SEQ ID NO: 285933 - RNA, 19 nt, Artificial Sequence
  Synthetic
uuuuaaguguguaauuauc

SEQ ID NO: 285934 - RNA, 20 nt, Artificial Sequence
  Synthetic
auuuuaaguguguaauuauc

SEQ ID NO: 285935 - RNA, 21 nt, Artificial Sequence
  Synthetic
aauuuuaaguguguaauuauc

SEQ ID NO: 285936 - RNA, 22 nt, Artificial Sequence
  Synthetic
caauuuuaaguguguaauuauc

SEQ ID NO: 285937 - RNA, 23 nt, Artificial Sequence
  Synthetic
ccaauuuuaaguguguaauuauc

SEQ ID NO: 285938 - RNA, 24 nt, Artificial Sequence
  Synthetic
accaauuuuaaguguguaauuauc

SEQ ID NO: 285939 - RNA, 18 nt, Artificial Sequence
  Synthetic
uuuauagcaaccauuauc

SEQ ID NO: 285940 - RNA, 19 nt, Artificial Sequence
  Synthetic
uuuuauagcaaccauuauc

SEQ ID NO: 285941 - RNA, 20 nt, Artificial Sequence
  Synthetic
cuuuuauagcaaccauuauc

SEQ ID NO: 285942 - RNA, 21 nt, Artificial Sequence
  Synthetic
ucuuuuauagcaaccauuauc

SEQ ID NO: 285943 - RNA, 22 nt, Artificial Sequence
  Synthetic
uucuuuuauagcaaccauuauc

SEQ ID NO: 285944 - RNA, 23 nt, Artificial Sequence
  Synthetic
auucuuuuauagcaaccauuauc

SEQ ID NO: 285945 - RNA, 24 nt, Artificial Sequence
  Synthetic
uauucuuuuauagcaaccauuauc

SEQ ID NO: 285946 - RNA, 18 nt, Artificial Sequence
  Synthetic
guugucuuuaccauuauc

SEQ ID NO: 285947 - RNA, 19 nt, Artificial Sequence
  Synthetic
uguugucuuuaccauuauc

SEQ ID NO: 285948 - RNA, 20 nt, Artificial Sequence
  Synthetic
auguugucuuuaccauuauc

SEQ ID NO: 285949 - RNA, 21 nt, Artificial Sequence
  Synthetic
aauguugucuuuaccauuauc

SEQ ID NO: 285950 - RNA, 22 nt, Artificial Sequence
  Synthetic
gaauguugucuuuaccauuauc

SEQ ID NO: 285951 - RNA, 23 nt, Artificial Sequence
  Synthetic
ugaauguugucuuuaccauuauc

SEQ ID NO: 285952 - RNA, 24 nt, Artificial Sequence
  Synthetic
cugaauguugucuuuaccauuauc

SEQ ID NO: 285953 - RNA, 18 nt, Artificial Sequence
  Synthetic
gcauuuucccccauuauc

SEQ ID NO: 285954 - RNA, 19 nt, Artificial Sequence
  Synthetic
agcauuuucccccauuauc

SEQ ID NO: 285955 - RNA, 20 nt, Artificial Sequence
  Synthetic
aagcauuuucccccauuauc

SEQ ID NO: 285956 - RNA, 21 nt, Artificial Sequence
  Synthetic
uaagcauuuucccccauuauc

SEQ ID NO: 285957 - RNA, 22 nt, Artificial Sequence
  Synthetic
auaagcauuuucccccauuauc

SEQ ID NO: 285958 - RNA, 23 nt, Artificial Sequence
  Synthetic
cauaagcauuuucccccauuauc

SEQ ID NO: 285959 - RNA, 24 nt, Artificial Sequence
  Synthetic
gcauaagcauuuucccccauuauc

SEQ ID NO: 285960 - RNA, 18 nt, Artificial Sequence
  Synthetic
ggccuuuuauggauuauc

SEQ ID NO: 285961 - RNA, 19 nt, Artificial Sequence
  Synthetic
uggccuuuuauggauuauc

SEQ ID NO: 285962 - RNA, 20 nt, Artificial Sequence
  Synthetic
guggccuuuuauggauuauc

SEQ ID NO: 285963 - RNA, 21 nt, Artificial Sequence
  Synthetic
uguggccuuuuauggauuauc

SEQ ID NO: 285964 - RNA, 22 nt, Artificial Sequence
  Synthetic
cuguggccuuuuauggauuauc

SEQ ID NO: 285965 - RNA, 23 nt, Artificial Sequence
  Synthetic
gcuguggccuuuuauggauuauc

SEQ ID NO: 285966 - RNA, 24 nt, Artificial Sequence
  Synthetic
ugcuguggccuuuuauggauuauc

SEQ ID NO: 285967 - RNA, 18 nt, Artificial Sequence
  Synthetic
gaaugguuccauauuauc

SEQ ID NO: 285968 - RNA, 19 nt, Artificial Sequence
  Synthetic
ggaaugguuccauauuauc

SEQ ID NO: 285969 - RNA, 20 nt, Artificial Sequence
  Synthetic
aggaaugguuccauauuauc

SEQ ID NO: 285970 - RNA, 21 nt, Artificial Sequence
  Synthetic
uaggaaugguuccauauuauc

SEQ ID NO: 285971 - RNA, 22 nt, Artificial Sequence
  Synthetic
auaggaaugguuccauauuauc

SEQ ID NO: 285972 - RNA, 23 nt, Artificial Sequence
  Synthetic
gauaggaaugguuccauauuauc

SEQ ID NO: 285973 - RNA, 24 nt, Artificial Sequence
  Synthetic
ggauaggaaugguuccauauuauc

SEQ ID NO: 285974 - RNA, 18 nt, Artificial Sequence
  Synthetic
gaaaugcacguuauuauc

SEQ ID NO: 285975 - RNA, 19 nt, Artificial Sequence
  Synthetic
agaaaugcacguuauuauc

SEQ ID NO: 285976 - RNA, 20 nt, Artificial Sequence
  Synthetic
uagaaaugcacguuauuauc

SEQ ID NO: 285977 - RNA, 21 nt, Artificial Sequence
  Synthetic
cuagaaaugcacguuauuauc

SEQ ID NO: 285978 - RNA, 22 nt, Artificial Sequence
  Synthetic
acuagaaaugcacguuauuauc

SEQ ID NO: 285979 - RNA, 23 nt, Artificial Sequence
  Synthetic
uacuagaaaugcacguuauuauc

SEQ ID NO: 285980 - RNA, 24 nt, Artificial Sequence
  Synthetic
cuacuagaaaugcacguuauuauc

SEQ ID NO: 285981 - RNA, 18 nt, Artificial Sequence
  Synthetic
acucuucagguuauuauc

SEQ ID NO: 285982 - RNA, 19 nt, Artificial Sequence
  Synthetic
cacucuucagguuauuauc

SEQ ID NO: 285983 - RNA, 20 nt, Artificial Sequence
  Synthetic
acacucuucagguuauuauc

SEQ ID NO: 285984 - RNA, 21 nt, Artificial Sequence
  Synthetic
aacacucuucagguuauuauc

SEQ ID NO: 285985 - RNA, 22 nt, Artificial Sequence
  Synthetic
aaacacucuucagguuauuauc

SEQ ID NO: 285986 - RNA, 23 nt, Artificial Sequence
  Synthetic
aaaacacucuucagguuauuauc

SEQ ID NO: 285987 - RNA, 24 nt, Artificial Sequence
  Synthetic
gaaaacacucuucagguuauuauc

SEQ ID NO: 285988 - RNA, 18 nt, Artificial Sequence
  Synthetic
auaagaugugaacuuauc

SEQ ID NO: 285989 - RNA, 19 nt, Artificial Sequence
  Synthetic
aauaagaugugaacuuauc

SEQ ID NO: 285990 - RNA, 20 nt, Artificial Sequence
  Synthetic
uaauaagaugugaacuuauc

SEQ ID NO: 285991 - RNA, 21 nt, Artificial Sequence
  Synthetic
auaauaagaugugaacuuauc

SEQ ID NO: 285992 - RNA, 22 nt, Artificial Sequence
  Synthetic
aauaauaagaugugaacuuauc

SEQ ID NO: 285993 - RNA, 23 nt, Artificial Sequence
  Synthetic
uaauaauaagaugugaacuuauc

SEQ ID NO: 285994 - RNA, 24 nt, Artificial Sequence
  Synthetic
cuaauaauaagaugugaacuuauc

SEQ ID NO: 285995 - RNA, 18 nt, Artificial Sequence
  Synthetic
auaugcagaauacuuauc

SEQ ID NO: 285996 - RNA, 19 nt, Artificial Sequence
  Synthetic
aauaugcagaauacuuauc

SEQ ID NO: 285997 - RNA, 20 nt, Artificial Sequence
  Synthetic
uaauaugcagaauacuuauc

SEQ ID NO: 285998 - RNA, 21 nt, Artificial Sequence
  Synthetic
uuaauaugcagaauacuuauc

SEQ ID NO: 285999 - RNA, 22 nt, Artificial Sequence
  Synthetic
uuuaauaugcagaauacuuauc

SEQ ID NO: 286000 - RNA, 23 nt, Artificial Sequence
  Synthetic
guuuaauaugcagaauacuuauc

SEQ ID NO: 286001 - RNA, 24 nt, Artificial Sequence
  Synthetic
aguuuaauaugcagaauacuuauc

SEQ ID NO: 286002 - RNA, 18 nt, Artificial Sequence
  Synthetic
auccacccuguccuuauc

SEQ ID NO: 286003 - RNA, 19 nt, Artificial Sequence
  Synthetic
gauccacccuguccuuauc

SEQ ID NO: 286004 - RNA, 20 nt, Artificial Sequence
  Synthetic
agauccacccuguccuuauc

SEQ ID NO: 286005 - RNA, 21 nt, Artificial Sequence
  Synthetic
uagauccacccuguccuuauc

SEQ ID NO: 286006 - RNA, 22 nt, Artificial Sequence
  Synthetic
auagauccacccuguccuuauc

SEQ ID NO: 286007 - RNA, 23 nt, Artificial Sequence
  Synthetic
aauagauccacccuguccuuauc

SEQ ID NO: 286008 - RNA, 24 nt, Artificial Sequence
  Synthetic
caauagauccacccuguccuuauc

SEQ ID NO: 286009 - RNA, 18 nt, Artificial Sequence
  Synthetic
caccacuaauuccuuauc

SEQ ID NO: 286010 - RNA, 19 nt, Artificial Sequence
  Synthetic
ucaccacuaauuccuuauc

SEQ ID NO: 286011 - RNA, 20 nt, Artificial Sequence
  Synthetic
uucaccacuaauuccuuauc

SEQ ID NO: 286012 - RNA, 21 nt, Artificial Sequence
  Synthetic
uuucaccacuaauuccuuauc

SEQ ID NO: 286013 - RNA, 22 nt, Artificial Sequence
  Synthetic
cuuucaccacuaauuccuuauc

SEQ ID NO: 286014 - RNA, 23 nt, Artificial Sequence
  Synthetic
ucuuucaccacuaauuccuuauc

SEQ ID NO: 286015 - RNA, 24 nt, Artificial Sequence
  Synthetic
uucuuucaccacuaauuccuuauc

SEQ ID NO: 286016 - RNA, 18 nt, Artificial Sequence
  Synthetic
auguggaaaaagcuuauc

SEQ ID NO: 286017 - RNA, 19 nt, Artificial Sequence
  Synthetic
cauguggaaaaagcuuauc

SEQ ID NO: 286018 - RNA, 20 nt, Artificial Sequence
  Synthetic
ucauguggaaaaagcuuauc

SEQ ID NO: 286019 - RNA, 21 nt, Artificial Sequence
  Synthetic
gucauguggaaaaagcuuauc

SEQ ID NO: 286020 - RNA, 22 nt, Artificial Sequence
  Synthetic
ugucauguggaaaaagcuuauc

SEQ ID NO: 286021 - RNA, 23 nt, Artificial Sequence
  Synthetic
augucauguggaaaaagcuuauc

SEQ ID NO: 286022 - RNA, 24 nt, Artificial Sequence
  Synthetic
gaugucauguggaaaaagcuuauc

SEQ ID NO: 286023 - RNA, 18 nt, Artificial Sequence
  Synthetic
uugucgcuuaggcuuauc

SEQ ID NO: 286024 - RNA, 19 nt, Artificial Sequence
  Synthetic
auugucgcuuaggcuuauc

SEQ ID NO: 286025 - RNA, 20 nt, Artificial Sequence
  Synthetic
aauugucgcuuaggcuuauc

SEQ ID NO: 286026 - RNA, 21 nt, Artificial Sequence
  Synthetic
gaauugucgcuuaggcuuauc

SEQ ID NO: 286027 - RNA, 22 nt, Artificial Sequence
  Synthetic
ggaauugucgcuuaggcuuauc

SEQ ID NO: 286028 - RNA, 23 nt, Artificial Sequence
  Synthetic
gggaauugucgcuuaggcuuauc

SEQ ID NO: 286029 - RNA, 24 nt, Artificial Sequence
  Synthetic
ggggaauugucgcuuaggcuuauc

SEQ ID NO: 286030 - RNA, 18 nt, Artificial Sequence
  Synthetic
aacuccugcgaucuuauc

SEQ ID NO: 286031 - RNA, 19 nt, Artificial Sequence
  Synthetic
caacuccugcgaucuuauc

SEQ ID NO: 286032 - RNA, 20 nt, Artificial Sequence
  Synthetic
ccaacuccugcgaucuuauc

SEQ ID NO: 286033 - RNA, 21 nt, Artificial Sequence
  Synthetic
cccaacuccugcgaucuuauc

SEQ ID NO: 286034 - RNA, 22 nt, Artificial Sequence
  Synthetic
gcccaacuccugcgaucuuauc

SEQ ID NO: 286035 - RNA, 23 nt, Artificial Sequence
  Synthetic
ugcccaacuccugcgaucuuauc

SEQ ID NO: 286036 - RNA, 24 nt, Artificial Sequence
  Synthetic
uugcccaacuccugcgaucuuauc

SEQ ID NO: 286037 - RNA, 18 nt, Artificial Sequence
  Synthetic
guggacacacaaguuauc

SEQ ID NO: 286038 - RNA, 19 nt, Artificial Sequence
  Synthetic
aguggacacacaaguuauc

SEQ ID NO: 286039 - RNA, 20 nt, Artificial Sequence
  Synthetic
aaguggacacacaaguuauc

SEQ ID NO: 286040 - RNA, 21 nt, Artificial Sequence
  Synthetic
gaaguggacacacaaguuauc

SEQ ID NO: 286041 - RNA, 22 nt, Artificial Sequence
  Synthetic
ggaaguggacacacaaguuauc

SEQ ID NO: 286042 - RNA, 23 nt, Artificial Sequence
  Synthetic
aggaaguggacacacaaguuauc

SEQ ID NO: 286043 - RNA, 24 nt, Artificial Sequence
  Synthetic
gaggaaguggacacacaaguuauc

SEQ ID NO: 286044 - RNA, 18 nt, Artificial Sequence
  Synthetic
gcugcuacccaaguuauc

SEQ ID NO: 286045 - RNA, 19 nt, Artificial Sequence
  Synthetic
agcugcuacccaaguuauc

SEQ ID NO: 286046 - RNA, 20 nt, Artificial Sequence
  Synthetic
uagcugcuacccaaguuauc

SEQ ID NO: 286047 - RNA, 21 nt, Artificial Sequence
  Synthetic
guagcugcuacccaaguuauc

SEQ ID NO: 286048 - RNA, 22 nt, Artificial Sequence
  Synthetic
gguagcugcuacccaaguuauc

SEQ ID NO: 286049 - RNA, 23 nt, Artificial Sequence
  Synthetic
agguagcugcuacccaaguuauc

SEQ ID NO: 286050 - RNA, 24 nt, Artificial Sequence
  Synthetic
gagguagcugcuacccaaguuauc

SEQ ID NO: 286051 - RNA, 18 nt, Artificial Sequence
  Synthetic
cuaugacuagaaguuauc

SEQ ID NO: 286052 - RNA, 19 nt, Artificial Sequence
  Synthetic
gcuaugacuagaaguuauc

SEQ ID NO: 286053 - RNA, 20 nt, Artificial Sequence
  Synthetic
ggcuaugacuagaaguuauc

SEQ ID NO: 286054 - RNA, 21 nt, Artificial Sequence
  Synthetic
aggcuaugacuagaaguuauc

SEQ ID NO: 286055 - RNA, 22 nt, Artificial Sequence
  Synthetic
caggcuaugacuagaaguuauc

SEQ ID NO: 286056 - RNA, 23 nt, Artificial Sequence
  Synthetic
ccaggcuaugacuagaaguuauc

SEQ ID NO: 286057 - RNA, 24 nt, Artificial Sequence
  Synthetic
cccaggcuaugacuagaaguuauc

SEQ ID NO: 286058 - RNA, 18 nt, Artificial Sequence
  Synthetic
uaaaauagggauguuauc

SEQ ID NO: 286059 - RNA, 19 nt, Artificial Sequence
  Synthetic
cuaaaauagggauguuauc

SEQ ID NO: 286060 - RNA, 20 nt, Artificial Sequence
  Synthetic
ucuaaaauagggauguuauc

SEQ ID NO: 286061 - RNA, 21 nt, Artificial Sequence
  Synthetic
uucuaaaauagggauguuauc

SEQ ID NO: 286062 - RNA, 22 nt, Artificial Sequence
  Synthetic
auucuaaaauagggauguuauc

SEQ ID NO: 286063 - RNA, 23 nt, Artificial Sequence
  Synthetic
uauucuaaaauagggauguuauc

SEQ ID NO: 286064 - RNA, 24 nt, Artificial Sequence
  Synthetic
guauucuaaaauagggauguuauc

SEQ ID NO: 286065 - RNA, 18 nt, Artificial Sequence
  Synthetic
uauuccuacucauuuauc

SEQ ID NO: 286066 - RNA, 19 nt, Artificial Sequence
  Synthetic
auauuccuacucauuuauc

SEQ ID NO: 286067 - RNA, 20 nt, Artificial Sequence
  Synthetic
cauauuccuacucauuuauc

SEQ ID NO: 286068 - RNA, 21 nt, Artificial Sequence
  Synthetic
acauauuccuacucauuuauc

SEQ ID NO: 286069 - RNA, 22 nt, Artificial Sequence
  Synthetic
cacauauuccuacucauuuauc

SEQ ID NO: 286070 - RNA, 23 nt, Artificial Sequence
  Synthetic
ucacauauuccuacucauuuauc

SEQ ID NO: 286071 - RNA, 24 nt, Artificial Sequence
  Synthetic
cucacauauuccuacucauuuauc

SEQ ID NO: 286072 - RNA, 18 nt, Artificial Sequence
  Synthetic
auaauaaauagauuuauc

SEQ ID NO: 286073 - RNA, 19 nt, Artificial Sequence
  Synthetic
cauaauaaauagauuuauc

SEQ ID NO: 286074 - RNA, 20 nt, Artificial Sequence
  Synthetic
ucauaauaaauagauuuauc

SEQ ID NO: 286075 - RNA, 21 nt, Artificial Sequence
  Synthetic
uucauaauaaauagauuuauc

SEQ ID NO: 286076 - RNA, 22 nt, Artificial Sequence
  Synthetic
cuucauaauaaauagauuuauc

SEQ ID NO: 286077 - RNA, 23 nt, Artificial Sequence
  Synthetic
ccuucauaauaaauagauuuauc

SEQ ID NO: 286078 - RNA, 24 nt, Artificial Sequence
  Synthetic
accuucauaauaaauagauuuauc

SEQ ID NO: 286079 - RNA, 18 nt, Artificial Sequence
  Synthetic
cuuuauuguauauuuauc

SEQ ID NO: 286080 - RNA, 19 nt, Artificial Sequence
  Synthetic
acuuuauuguauauuuauc

SEQ ID NO: 286081 - RNA, 20 nt, Artificial Sequence
  Synthetic
cacuuuauuguauauuuauc

SEQ ID NO: 286082 - RNA, 21 nt, Artificial Sequence
  Synthetic
ucacuuuauuguauauuuauc

SEQ ID NO: 286083 - RNA, 22 nt, Artificial Sequence
  Synthetic
cucacuuuauuguauauuuauc

SEQ ID NO: 286084 - RNA, 23 nt, Artificial Sequence
  Synthetic
acucacuuuauuguauauuuauc

SEQ ID NO: 286085 - RNA, 24 nt, Artificial Sequence
  Synthetic
aacucacuuuauuguauauuuauc

SEQ ID NO: 286086 - RNA, 18 nt, Artificial Sequence
  Synthetic
acagguucuaccuuuauc

SEQ ID NO: 286087 - RNA, 19 nt, Artificial Sequence
  Synthetic
gacagguucuaccuuuauc

SEQ ID NO: 286088 - RNA, 20 nt, Artificial Sequence
  Synthetic
ugacagguucuaccuuuauc

SEQ ID NO: 286089 - RNA, 21 nt, Artificial Sequence
  Synthetic
uugacagguucuaccuuuauc

SEQ ID NO: 286090 - RNA, 22 nt, Artificial Sequence
  Synthetic
uuugacagguucuaccuuuauc

SEQ ID NO: 286091 - RNA, 23 nt, Artificial Sequence
  Synthetic
guuugacagguucuaccuuuauc

SEQ ID NO: 286092 - RNA, 24 nt, Artificial Sequence
  Synthetic
cguuugacagguucuaccuuuauc

SEQ ID NO: 286093 - RNA, 18 nt, Artificial Sequence
  Synthetic
aaugccagagccuuuauc

SEQ ID NO: 286094 - RNA, 19 nt, Artificial Sequence
  Synthetic
aaaugccagagccuuuauc

SEQ ID NO: 286095 - RNA, 20 nt, Artificial Sequence
  Synthetic
caaaugccagagccuuuauc

SEQ ID NO: 286096 - RNA, 21 nt, Artificial Sequence
  Synthetic
ccaaaugccagagccuuuauc

SEQ ID NO: 286097 - RNA, 22 nt, Artificial Sequence
  Synthetic
accaaaugccagagccuuuauc

SEQ ID NO: 286098 - RNA, 23 nt, Artificial Sequence
  Synthetic
caccaaaugccagagccuuuauc

SEQ ID NO: 286099 - RNA, 24 nt, Artificial Sequence
  Synthetic
acaccaaaugccagagccuuuauc

SEQ ID NO: 286100 - RNA, 18 nt, Artificial Sequence
  Synthetic
acguaugauggguuuauc

SEQ ID NO: 286101 - RNA, 19 nt, Artificial Sequence
  Synthetic
aacguaugauggguuuauc

SEQ ID NO: 286102 - RNA, 20 nt, Artificial Sequence
  Synthetic
caacguaugauggguuuauc

SEQ ID NO: 286103 - RNA, 21 nt, Artificial Sequence
  Synthetic
ucaacguaugauggguuuauc

SEQ ID NO: 286104 - RNA, 22 nt, Artificial Sequence
  Synthetic
uucaacguaugauggguuuauc

SEQ ID NO: 286105 - RNA, 23 nt, Artificial Sequence
  Synthetic
uuucaacguaugauggguuuauc

SEQ ID NO: 286106 - RNA, 24 nt, Artificial Sequence
  Synthetic
uuuucaacguaugauggguuuauc

SEQ ID NO: 286107 - RNA, 18 nt, Artificial Sequence
  Synthetic
gguaucuuaguguuuauc

SEQ ID NO: 286108 - RNA, 19 nt, Artificial Sequence
  Synthetic
agguaucuuaguguuuauc

SEQ ID NO: 286109 - RNA, 20 nt, Artificial Sequence
  Synthetic
uagguaucuuaguguuuauc

SEQ ID NO: 286110 - RNA, 21 nt, Artificial Sequence
  Synthetic
uuagguaucuuaguguuuauc

SEQ ID NO: 286111 - RNA, 22 nt, Artificial Sequence
  Synthetic
auuagguaucuuaguguuuauc

SEQ ID NO: 286112 - RNA, 23 nt, Artificial Sequence
  Synthetic
gauuagguaucuuaguguuuauc

SEQ ID NO: 286113 - RNA, 24 nt, Artificial Sequence
  Synthetic
ugauuagguaucuuaguguuuauc

SEQ ID NO: 286114 - RNA, 18 nt, Artificial Sequence
  Synthetic
acgacaugauuguuuauc

SEQ ID NO: 286115 - RNA, 19 nt, Artificial Sequence
  Synthetic
gacgacaugauuguuuauc

SEQ ID NO: 286116 - RNA, 20 nt, Artificial Sequence
  Synthetic
agacgacaugauuguuuauc

SEQ ID NO: 286117 - RNA, 21 nt, Artificial Sequence
  Synthetic
cagacgacaugauuguuuauc

SEQ ID NO: 286118 - RNA, 22 nt, Artificial Sequence
  Synthetic
gcagacgacaugauuguuuauc

SEQ ID NO: 286119 - RNA, 23 nt, Artificial Sequence
  Synthetic
ugcagacgacaugauuguuuauc

SEQ ID NO: 286120 - RNA, 24 nt, Artificial Sequence
  Synthetic
uugcagacgacaugauuguuuauc

SEQ ID NO: 286121 - RNA, 18 nt, Artificial Sequence
  Synthetic
acaagaugccuuuuuauc

SEQ ID NO: 286122 - RNA, 19 nt, Artificial Sequence
  Synthetic
gacaagaugccuuuuuauc

SEQ ID NO: 286123 - RNA, 20 nt, Artificial Sequence
  Synthetic
ggacaagaugccuuuuuauc

SEQ ID NO: 286124 - RNA, 21 nt, Artificial Sequence
  Synthetic
uggacaagaugccuuuuuauc

SEQ ID NO: 286125 - RNA, 22 nt, Artificial Sequence
  Synthetic
guggacaagaugccuuuuuauc

SEQ ID NO: 286126 - RNA, 23 nt, Artificial Sequence
  Synthetic
uguggacaagaugccuuuuuauc

SEQ ID NO: 286127 - RNA, 24 nt, Artificial Sequence
  Synthetic
cuguggacaagaugccuuuuuauc

SEQ ID NO: 286128 - RNA, 18 nt, Artificial Sequence
  Synthetic
uuguuguguguuuuuauc

SEQ ID NO: 286129 - RNA, 19 nt, Artificial Sequence
  Synthetic
uuuguuguguguuuuuauc

SEQ ID NO: 286130 - RNA, 20 nt, Artificial Sequence
  Synthetic
guuuguuguguguuuuuauc

SEQ ID NO: 286131 - RNA, 21 nt, Artificial Sequence
  Synthetic
aguuuguuguguguuuuuauc

SEQ ID NO: 286132 - RNA, 22 nt, Artificial Sequence
  Synthetic
uaguuuguuguguguuuuuauc

SEQ ID NO: 286133 - RNA, 23 nt, Artificial Sequence
  Synthetic
cuaguuuguuguguguuuuuauc

SEQ ID NO: 286134 - RNA, 24 nt, Artificial Sequence
  Synthetic
ccuaguuuguuguguguuuuuauc

SEQ ID NO: 286135 - RNA, 18 nt, Artificial Sequence
  Synthetic
gaucucacuugaaaacuc

SEQ ID NO: 286136 - RNA, 19 nt, Artificial Sequence
  Synthetic
agaucucacuugaaaacuc

SEQ ID NO: 286137 - RNA, 20 nt, Artificial Sequence
  Synthetic
cagaucucacuugaaaacuc

SEQ ID NO: 286138 - RNA, 21 nt, Artificial Sequence
  Synthetic
ccagaucucacuugaaaacuc

SEQ ID NO: 286139 - RNA, 22 nt, Artificial Sequence
  Synthetic
uccagaucucacuugaaaacuc

SEQ ID NO: 286140 - RNA, 23 nt, Artificial Sequence
  Synthetic
uuccagaucucacuugaaaacuc

SEQ ID NO: 286141 - RNA, 24 nt, Artificial Sequence
  Synthetic
auuccagaucucacuugaaaacuc

SEQ ID NO: 286142 - RNA, 18 nt, Artificial Sequence
  Synthetic
gagucuggucacaaacuc

SEQ ID NO: 286143 - RNA, 19 nt, Artificial Sequence
  Synthetic
cgagucuggucacaaacuc

SEQ ID NO: 286144 - RNA, 20 nt, Artificial Sequence
  Synthetic
ccgagucuggucacaaacuc

SEQ ID NO: 286145 - RNA, 21 nt, Artificial Sequence
  Synthetic
gccgagucuggucacaaacuc

SEQ ID NO: 286146 - RNA, 22 nt, Artificial Sequence
  Synthetic
ugccgagucuggucacaaacuc

SEQ ID NO: 286147 - RNA, 23 nt, Artificial Sequence
  Synthetic
uugccgagucuggucacaaacuc

SEQ ID NO: 286148 - RNA, 24 nt, Artificial Sequence
  Synthetic
uuugccgagucuggucacaaacuc

SEQ ID NO: 286149 - RNA, 18 nt, Artificial Sequence
  Synthetic
cuacaguacaccaaacuc

SEQ ID NO: 286150 - RNA, 19 nt, Artificial Sequence
  Synthetic
ucuacaguacaccaaacuc

SEQ ID NO: 286151 - RNA, 20 nt, Artificial Sequence
  Synthetic
cucuacaguacaccaaacuc

SEQ ID NO: 286152 - RNA, 21 nt, Artificial Sequence
  Synthetic
acucuacaguacaccaaacuc

SEQ ID NO: 286153 - RNA, 22 nt, Artificial Sequence
  Synthetic
aacucuacaguacaccaaacuc

SEQ ID NO: 286154 - RNA, 23 nt, Artificial Sequence
  Synthetic
caacucuacaguacaccaaacuc

SEQ ID NO: 286155 - RNA, 24 nt, Artificial Sequence
  Synthetic
ucaacucuacaguacaccaaacuc

SEQ ID NO: 286156 - RNA, 18 nt, Artificial Sequence
  Synthetic
cacugcagccucaaacuc

SEQ ID NO: 286157 - RNA, 19 nt, Artificial Sequence
  Synthetic
ucacugcagccucaaacuc

SEQ ID NO: 286158 - RNA, 20 nt, Artificial Sequence
  Synthetic
cucacugcagccucaaacuc

SEQ ID NO: 286159 - RNA, 24 nt, Artificial Sequence
  Synthetic
auagcucacugcagccucaaacuc

SEQ ID NO: 286160 - RNA, 18 nt, Artificial Sequence
  Synthetic
ccaccuggucucaaacuc

SEQ ID NO: 286161 - RNA, 19 nt, Artificial Sequence
  Synthetic
cccaccuggucucaaacuc

SEQ ID NO: 286162 - RNA, 20 nt, Artificial Sequence
  Synthetic
gcccaccuggucucaaacuc

SEQ ID NO: 286163 - RNA, 21 nt, Artificial Sequence
  Synthetic
ugcccaccuggucucaaacuc

SEQ ID NO: 286164 - RNA, 22 nt, Artificial Sequence
  Synthetic
uugcccaccuggucucaaacuc

SEQ ID NO: 286165 - RNA, 23 nt, Artificial Sequence
  Synthetic
guugcccaccuggucucaaacuc

SEQ ID NO: 286166 - RNA, 24 nt, Artificial Sequence
  Synthetic
uguugcccaccuggucucaaacuc

SEQ ID NO: 286167 - RNA, 18 nt, Artificial Sequence
  Synthetic
ccaucuggucucaaacuc

SEQ ID NO: 286168 - RNA, 19 nt, Artificial Sequence
  Synthetic
accaucuggucucaaacuc

SEQ ID NO: 286169 - RNA, 20 nt, Artificial Sequence
  Synthetic
caccaucuggucucaaacuc

SEQ ID NO: 286170 - RNA, 21 nt, Artificial Sequence
  Synthetic
ucaccaucuggucucaaacuc

SEQ ID NO: 286171 - RNA, 22 nt, Artificial Sequence
  Synthetic
uucaccaucuggucucaaacuc

SEQ ID NO: 286172 - RNA, 23 nt, Artificial Sequence
  Synthetic
uuucaccaucuggucucaaacuc

SEQ ID NO: 286173 - RNA, 24 nt, Artificial Sequence
  Synthetic
guuucaccaucuggucucaaacuc

SEQ ID NO: 286174 - RNA, 18 nt, Artificial Sequence
  Synthetic
ggcaaaagucagaaacuc

SEQ ID NO: 286175 - RNA, 19 nt, Artificial Sequence
  Synthetic
uggcaaaagucagaaacuc

SEQ ID NO: 286176 - RNA, 20 nt, Artificial Sequence
  Synthetic
cuggcaaaagucagaaacuc

SEQ ID NO: 286177 - RNA, 21 nt, Artificial Sequence
  Synthetic
gcuggcaaaagucagaaacuc

SEQ ID NO: 286178 - RNA, 22 nt, Artificial Sequence
  Synthetic
ggcuggcaaaagucagaaacuc

SEQ ID NO: 286179 - RNA, 23 nt, Artificial Sequence
  Synthetic
uggcuggcaaaagucagaaacuc

SEQ ID NO: 286180 - RNA, 24 nt, Artificial Sequence
  Synthetic
auggcuggcaaaagucagaaacuc

SEQ ID NO: 286181 - RNA, 18 nt, Artificial Sequence
  Synthetic
gauauaagguagaaacuc

SEQ ID NO: 286182 - RNA, 19 nt, Artificial Sequence
  Synthetic
ugauauaagguagaaacuc

SEQ ID NO: 286183 - RNA, 20 nt, Artificial Sequence
  Synthetic
uugauauaagguagaaacuc

SEQ ID NO: 286184 - RNA, 21 nt, Artificial Sequence
  Synthetic
auugauauaagguagaaacuc

SEQ ID NO: 286185 - RNA, 22 nt, Artificial Sequence
  Synthetic
gauugauauaagguagaaacuc

SEQ ID NO: 286186 - RNA, 23 nt, Artificial Sequence
  Synthetic
ggauugauauaagguagaaacuc

SEQ ID NO: 286187 - RNA, 24 nt, Artificial Sequence
  Synthetic
cggauugauauaagguagaaacuc

SEQ ID NO: 286188 - RNA, 18 nt, Artificial Sequence
  Synthetic
uuaucccuugggaaacuc

SEQ ID NO: 286189 - RNA, 19 nt, Artificial Sequence
  Synthetic
uuuaucccuugggaaacuc

SEQ ID NO: 286190 - RNA, 20 nt, Artificial Sequence
  Synthetic
cuuuaucccuugggaaacuc

SEQ ID NO: 286191 - RNA, 21 nt, Artificial Sequence
  Synthetic
gcuuuaucccuugggaaacuc

SEQ ID NO: 286192 - RNA, 22 nt, Artificial Sequence
  Synthetic
agcuuuaucccuugggaaacuc

SEQ ID NO: 286193 - RNA, 23 nt, Artificial Sequence
  Synthetic
gagcuuuaucccuugggaaacuc

SEQ ID NO: 286194 - RNA, 24 nt, Artificial Sequence
  Synthetic
ggagcuuuaucccuugggaaacuc

SEQ ID NO: 286195 - RNA, 18 nt, Artificial Sequence
  Synthetic
aauaacagaaauaaacuc

SEQ ID NO: 286196 - RNA, 19 nt, Artificial Sequence
  Synthetic
gaauaacagaaauaaacuc

SEQ ID NO: 286197 - RNA, 20 nt, Artificial Sequence
  Synthetic
agaauaacagaaauaaacuc

SEQ ID NO: 286198 - RNA, 21 nt, Artificial Sequence
  Synthetic
gagaauaacagaaauaaacuc

SEQ ID NO: 286199 - RNA, 22 nt, Artificial Sequence
  Synthetic
ugagaauaacagaaauaaacuc

SEQ ID NO: 286200 - RNA, 23 nt, Artificial Sequence
  Synthetic
uugagaauaacagaaauaaacuc

SEQ ID NO: 286201 - RNA, 24 nt, Artificial Sequence
  Synthetic
uuugagaauaacagaaauaaacuc

SEQ ID NO: 286202 - RNA, 18 nt, Artificial Sequence
  Synthetic
uaaauaccaacuaaacuc

SEQ ID NO: 286203 - RNA, 19 nt, Artificial Sequence
  Synthetic
auaaauaccaacuaaacuc

SEQ ID NO: 286204 - RNA, 20 nt, Artificial Sequence
  Synthetic
gauaaauaccaacuaaacuc

SEQ ID NO: 286205 - RNA, 21 nt, Artificial Sequence
  Synthetic
cgauaaauaccaacuaaacuc

SEQ ID NO: 286206 - RNA, 22 nt, Artificial Sequence
  Synthetic
acgauaaauaccaacuaaacuc

SEQ ID NO: 286207 - RNA, 23 nt, Artificial Sequence
  Synthetic
gacgauaaauaccaacuaaacuc

SEQ ID NO: 286208 - RNA, 24 nt, Artificial Sequence
  Synthetic
agacgauaaauaccaacuaaacuc

SEQ ID NO: 286209 - RNA, 18 nt, Artificial Sequence
  Synthetic
ugggaucuaauuaaacuc

SEQ ID NO: 286210 - RNA, 19 nt, Artificial Sequence
  Synthetic
augggaucuaauuaaacuc

SEQ ID NO: 286211 - RNA, 20 nt, Artificial Sequence
  Synthetic
aaugggaucuaauuaaacuc

SEQ ID NO: 286212 - RNA, 21 nt, Artificial Sequence
  Synthetic
aaaugggaucuaauuaaacuc

SEQ ID NO: 286213 - RNA, 22 nt, Artificial Sequence
  Synthetic
caaaugggaucuaauuaaacuc

SEQ ID NO: 286214 - RNA, 23 nt, Artificial Sequence
  Synthetic
acaaaugggaucuaauuaaacuc

SEQ ID NO: 286215 - RNA, 24 nt, Artificial Sequence
  Synthetic
gacaaaugggaucuaauuaaacuc

SEQ ID NO: 286216 - RNA, 18 nt, Artificial Sequence
  Synthetic
uaauuuauuuuuaaacuc

SEQ ID NO: 286217 - RNA, 19 nt, Artificial Sequence
  Synthetic
auaauuuauuuuuaaacuc

SEQ ID NO: 286218 - RNA, 20 nt, Artificial Sequence
  Synthetic
gauaauuuauuuuuaaacuc

SEQ ID NO: 286219 - RNA, 21 nt, Artificial Sequence
  Synthetic
cgauaauuuauuuuuaaacuc

SEQ ID NO: 286220 - RNA, 22 nt, Artificial Sequence
  Synthetic
acgauaauuuauuuuuaaacuc

SEQ ID NO: 286221 - RNA, 23 nt, Artificial Sequence
  Synthetic
aacgauaauuuauuuuuaaacuc

SEQ ID NO: 286222 - RNA, 24 nt, Artificial Sequence
  Synthetic
aaacgauaauuuauuuuuaaacuc

SEQ ID NO: 286223 - RNA, 18 nt, Artificial Sequence
  Synthetic
acaggaugcugacaacuc

SEQ ID NO: 286224 - RNA, 19 nt, Artificial Sequence
  Synthetic
uacaggaugcugacaacuc

SEQ ID NO: 286225 - RNA, 20 nt, Artificial Sequence
  Synthetic
auacaggaugcugacaacuc

SEQ ID NO: 286226 - RNA, 21 nt, Artificial Sequence
  Synthetic
cauacaggaugcugacaacuc

SEQ ID NO: 286227 - RNA, 22 nt, Artificial Sequence
  Synthetic
acauacaggaugcugacaacuc

SEQ ID NO: 286228 - RNA, 23 nt, Artificial Sequence
  Synthetic
cacauacaggaugcugacaacuc

SEQ ID NO: 286229 - RNA, 24 nt, Artificial Sequence
  Synthetic
gcacauacaggaugcugacaacuc

SEQ ID NO: 286230 - RNA, 18 nt, Artificial Sequence
  Synthetic
aaugacuugccccaacuc

SEQ ID NO: 286231 - RNA, 19 nt, Artificial Sequence
  Synthetic
aaaugacuugccccaacuc

SEQ ID NO: 286232 - RNA, 20 nt, Artificial Sequence
  Synthetic
uaaaugacuugccccaacuc

SEQ ID NO: 286233 - RNA, 21 nt, Artificial Sequence
  Synthetic
uuaaaugacuugccccaacuc

SEQ ID NO: 286234 - RNA, 22 nt, Artificial Sequence
  Synthetic
guuaaaugacuugccccaacuc

SEQ ID NO: 286235 - RNA, 23 nt, Artificial Sequence
  Synthetic
aguuaaaugacuugccccaacuc

SEQ ID NO: 286236 - RNA, 24 nt, Artificial Sequence
  Synthetic
caguuaaaugacuugccccaacuc

SEQ ID NO: 286237 - RNA, 18 nt, Artificial Sequence
  Synthetic
caggcugguauccaacuc

SEQ ID NO: 286238 - RNA, 19 nt, Artificial Sequence
  Synthetic
ccaggcugguauccaacuc

SEQ ID NO: 286239 - RNA, 20 nt, Artificial Sequence
  Synthetic
cccaggcugguauccaacuc

SEQ ID NO: 286240 - RNA, 21 nt, Artificial Sequence
  Synthetic
ucccaggcugguauccaacuc

SEQ ID NO: 286241 - RNA, 22 nt, Artificial Sequence
  Synthetic
cucccaggcugguauccaacuc

SEQ ID NO: 286242 - RNA, 23 nt, Artificial Sequence
  Synthetic
ccucccaggcugguauccaacuc

SEQ ID NO: 286243 - RNA, 24 nt, Artificial Sequence
  Synthetic
gccucccaggcugguauccaacuc

SEQ ID NO: 286244 - RNA, 18 nt, Artificial Sequence
  Synthetic
ucucuuccauggcaacuc

SEQ ID NO: 286245 - RNA, 19 nt, Artificial Sequence
  Synthetic
uucucuuccauggcaacuc

SEQ ID NO: 286246 - RNA, 20 nt, Artificial Sequence
  Synthetic
uuucucuuccauggcaacuc

SEQ ID NO: 286247 - RNA, 21 nt, Artificial Sequence
  Synthetic
cuuucucuuccauggcaacuc

SEQ ID NO: 286248 - RNA, 22 nt, Artificial Sequence
  Synthetic
acuuucucuuccauggcaacuc

SEQ ID NO: 286249 - RNA, 23 nt, Artificial Sequence
  Synthetic
aacuuucucuuccauggcaacuc

SEQ ID NO: 286250 - RNA, 24 nt, Artificial Sequence
  Synthetic
gaacuuucucuuccauggcaacuc

SEQ ID NO: 286251 - RNA, 18 nt, Artificial Sequence
  Synthetic
aaccacuucacucaacuc

SEQ ID NO: 286252 - RNA, 19 nt, Artificial Sequence
  Synthetic
uaaccacuucacucaacuc

SEQ ID NO: 286253 - RNA, 20 nt, Artificial Sequence
  Synthetic
auaaccacuucacucaacuc

SEQ ID NO: 286254 - RNA, 21 nt, Artificial Sequence
  Synthetic
uauaaccacuucacucaacuc

SEQ ID NO: 286255 - RNA, 22 nt, Artificial Sequence
  Synthetic
uuauaaccacuucacucaacuc

SEQ ID NO: 286256 - RNA, 23 nt, Artificial Sequence
  Synthetic
uuuauaaccacuucacucaacuc

SEQ ID NO: 286257 - RNA, 24 nt, Artificial Sequence
  Synthetic
auuuauaaccacuucacucaacuc

SEQ ID NO: 286258 - RNA, 18 nt, Artificial Sequence
  Synthetic
aagagcuacagucaacuc

SEQ ID NO: 286259 - RNA, 19 nt, Artificial Sequence
  Synthetic
aaagagcuacagucaacuc

SEQ ID NO: 286260 - RNA, 20 nt, Artificial Sequence
  Synthetic
aaaagagcuacagucaacuc

SEQ ID NO: 286261 - RNA, 21 nt, Artificial Sequence
  Synthetic
uaaaagagcuacagucaacuc

SEQ ID NO: 286262 - RNA, 22 nt, Artificial Sequence
  Synthetic
guaaaagagcuacagucaacuc

SEQ ID NO: 286263 - RNA, 23 nt, Artificial Sequence
  Synthetic
aguaaaagagcuacagucaacuc

SEQ ID NO: 286264 - RNA, 24 nt, Artificial Sequence
  Synthetic
aaguaaaagagcuacagucaacuc

SEQ ID NO: 286265 - RNA, 18 nt, Artificial Sequence
  Synthetic
gagcagcucacagaacuc

SEQ ID NO: 286266 - RNA, 19 nt, Artificial Sequence
  Synthetic
ggagcagcucacagaacuc

SEQ ID NO: 286267 - RNA, 20 nt, Artificial Sequence
  Synthetic
uggagcagcucacagaacuc

SEQ ID NO: 286268 - RNA, 21 nt, Artificial Sequence
  Synthetic
cuggagcagcucacagaacuc

SEQ ID NO: 286269 - RNA, 22 nt, Artificial Sequence
  Synthetic
gcuggagcagcucacagaacuc

SEQ ID NO: 286270 - RNA, 23 nt, Artificial Sequence
  Synthetic
ugcuggagcagcucacagaacuc

SEQ ID NO: 286271 - RNA, 24 nt, Artificial Sequence
  Synthetic
uugcuggagcagcucacagaacuc

SEQ ID NO: 286272 - RNA, 18 nt, Artificial Sequence
  Synthetic
cuacuaaauccagaacuc

SEQ ID NO: 286273 - RNA, 19 nt, Artificial Sequence
  Synthetic
ucuacuaaauccagaacuc

SEQ ID NO: 286274 - RNA, 20 nt, Artificial Sequence
  Synthetic
aucuacuaaauccagaacuc

SEQ ID NO: 286275 - RNA, 21 nt, Artificial Sequence
  Synthetic
uaucuacuaaauccagaacuc

SEQ ID NO: 286276 - RNA, 22 nt, Artificial Sequence
  Synthetic
guaucuacuaaauccagaacuc

SEQ ID NO: 286277 - RNA, 23 nt, Artificial Sequence
  Synthetic
aguaucuacuaaauccagaacuc

SEQ ID NO: 286278 - RNA, 24 nt, Artificial Sequence
  Synthetic
caguaucuacuaaauccagaacuc

SEQ ID NO: 286279 - RNA, 18 nt, Artificial Sequence
  Synthetic
ugcuacauugcagaacuc

SEQ ID NO: 286280 - RNA, 19 nt, Artificial Sequence
  Synthetic
uugcuacauugcagaacuc

SEQ ID NO: 286281 - RNA, 20 nt, Artificial Sequence
  Synthetic
cuugcuacauugcagaacuc

SEQ ID NO: 286282 - RNA, 21 nt, Artificial Sequence
  Synthetic
gcuugcuacauugcagaacuc

SEQ ID NO: 286283 - RNA, 22 nt, Artificial Sequence
  Synthetic
agcuugcuacauugcagaacuc

SEQ ID NO: 286284 - RNA, 23 nt, Artificial Sequence
  Synthetic
aagcuugcuacauugcagaacuc

SEQ ID NO: 286285 - RNA, 24 nt, Artificial Sequence
  Synthetic
caagcuugcuacauugcagaacuc

SEQ ID NO: 286286 - RNA, 18 nt, Artificial Sequence
  Synthetic
ugguuccaccacgaacuc

SEQ ID NO: 286287 - RNA, 19 nt, Artificial Sequence
  Synthetic
uugguuccaccacgaacuc

SEQ ID NO: 286288 - RNA, 20 nt, Artificial Sequence
  Synthetic
uuugguuccaccacgaacuc

SEQ ID NO: 286289 - RNA, 21 nt, Artificial Sequence
  Synthetic
auuugguuccaccacgaacuc

SEQ ID NO: 286290 - RNA, 22 nt, Artificial Sequence
  Synthetic
uauuugguuccaccacgaacuc

SEQ ID NO: 286291 - RNA, 23 nt, Artificial Sequence
  Synthetic
auauuugguuccaccacgaacuc

SEQ ID NO: 286292 - RNA, 24 nt, Artificial Sequence
  Synthetic
uauauuugguuccaccacgaacuc

SEQ ID NO: 286293 - RNA, 18 nt, Artificial Sequence
  Synthetic
caggcuggccucgaacuc

SEQ ID NO: 286294 - RNA, 19 nt, Artificial Sequence
  Synthetic
ccaggcuggccucgaacuc

SEQ ID NO: 286295 - RNA, 20 nt, Artificial Sequence
  Synthetic
uccaggcuggccucgaacuc

SEQ ID NO: 286296 - RNA, 21 nt, Artificial Sequence
  Synthetic
guccaggcuggccucgaacuc

SEQ ID NO: 286297 - RNA, 22 nt, Artificial Sequence
  Synthetic
uguccaggcuggccucgaacuc

SEQ ID NO: 286298 - RNA, 23 nt, Artificial Sequence
  Synthetic
uuguccaggcuggccucgaacuc

SEQ ID NO: 286299 - RNA, 24 nt, Artificial Sequence
  Synthetic
guuguccaggcuggccucgaacuc

SEQ ID NO: 286300 - RNA, 18 nt, Artificial Sequence
  Synthetic
agauuggaucucgaacuc

SEQ ID NO: 286301 - RNA, 19 nt, Artificial Sequence
  Synthetic
uagauuggaucucgaacuc

SEQ ID NO: 286302 - RNA, 20 nt, Artificial Sequence
  Synthetic
cuagauuggaucucgaacuc

SEQ ID NO: 286303 - RNA, 21 nt, Artificial Sequence
  Synthetic
ccuagauuggaucucgaacuc

SEQ ID NO: 286304 - RNA, 22 nt, Artificial Sequence
  Synthetic
cccuagauuggaucucgaacuc

SEQ ID NO: 286305 - RNA, 23 nt, Artificial Sequence
  Synthetic
acccuagauuggaucucgaacuc

SEQ ID NO: 286306 - RNA, 24 nt, Artificial Sequence
  Synthetic
uacccuagauuggaucucgaacuc

SEQ ID NO: 286307 - RNA, 18 nt, Artificial Sequence
  Synthetic
acugagagucaggaacuc

SEQ ID NO: 286308 - RNA, 19 nt, Artificial Sequence
  Synthetic
cacugagagucaggaacuc

SEQ ID NO: 286309 - RNA, 20 nt, Artificial Sequence
  Synthetic
gcacugagagucaggaacuc

SEQ ID NO: 286310 - RNA, 21 nt, Artificial Sequence
  Synthetic
agcacugagagucaggaacuc

SEQ ID NO: 286311 - RNA, 22 nt, Artificial Sequence
  Synthetic
cagcacugagagucaggaacuc

SEQ ID NO: 286312 - RNA, 23 nt, Artificial Sequence
  Synthetic
gcagcacugagagucaggaacuc

SEQ ID NO: 286313 - RNA, 24 nt, Artificial Sequence
  Synthetic
ggcagcacugagagucaggaacuc

SEQ ID NO: 286314 - RNA, 18 nt, Artificial Sequence
  Synthetic
uugggauucaaugaacuc

SEQ ID NO: 286315 - RNA, 19 nt, Artificial Sequence
  Synthetic
uuugggauucaaugaacuc

SEQ ID NO: 286316 - RNA, 20 nt, Artificial Sequence
  Synthetic
cuuugggauucaaugaacuc

SEQ ID NO: 286317 - RNA, 21 nt, Artificial Sequence
  Synthetic
gcuuugggauucaaugaacuc

SEQ ID NO: 286318 - RNA, 22 nt, Artificial Sequence
  Synthetic
ugcuuugggauucaaugaacuc

SEQ ID NO: 286319 - RNA, 23 nt, Artificial Sequence
  Synthetic
augcuuugggauucaaugaacuc

SEQ ID NO: 286320 - RNA, 24 nt, Artificial Sequence
  Synthetic
caugcuuugggauucaaugaacuc

SEQ ID NO: 286321 - RNA, 18 nt, Artificial Sequence
  Synthetic
cgagaaucacuugaacuc

SEQ ID NO: 286322 - RNA, 19 nt, Artificial Sequence
  Synthetic
acgagaaucacuugaacuc

SEQ ID NO: 286323 - RNA, 20 nt, Artificial Sequence
  Synthetic
cacgagaaucacuugaacuc

SEQ ID NO: 286324 - RNA, 21 nt, Artificial Sequence
  Synthetic
gcacgagaaucacuugaacuc

SEQ ID NO: 286325 - RNA, 22 nt, Artificial Sequence
  Synthetic
ggcacgagaaucacuugaacuc

SEQ ID NO: 286326 - RNA, 23 nt, Artificial Sequence
  Synthetic
aggcacgagaaucacuugaacuc

SEQ ID NO: 286327 - RNA, 24 nt, Artificial Sequence
  Synthetic
gaggcacgagaaucacuugaacuc

SEQ ID NO: 286328 - RNA, 18 nt, Artificial Sequence
  Synthetic
ucacugagccuugaacuc

SEQ ID NO: 286329 - RNA, 19 nt, Artificial Sequence
  Synthetic
cucacugagccuugaacuc

SEQ ID NO: 286330 - RNA, 20 nt, Artificial Sequence
  Synthetic
gcucacugagccuugaacuc

SEQ ID NO: 286331 - RNA, 21 nt, Artificial Sequence
  Synthetic
agcucacugagccuugaacuc

SEQ ID NO: 286332 - RNA, 22 nt, Artificial Sequence
  Synthetic
uagcucacugagccuugaacuc

SEQ ID NO: 286333 - RNA, 23 nt, Artificial Sequence
  Synthetic
auagcucacugagccuugaacuc

SEQ ID NO: 286334 - RNA, 24 nt, Artificial Sequence
  Synthetic
cauagcucacugagccuugaacuc

SEQ ID NO: 286335 - RNA, 18 nt, Artificial Sequence
  Synthetic
caggcuggucuugaacuc

SEQ ID NO: 286336 - RNA, 19 nt, Artificial Sequence
  Synthetic
ccaggcuggucuugaacuc

SEQ ID NO: 286337 - RNA, 20 nt, Artificial Sequence
  Synthetic
cccaggcuggucuugaacuc

SEQ ID NO: 286338 - RNA, 24 nt, Artificial Sequence
  Synthetic
guugcccaggcuggucuugaacuc

SEQ ID NO: 286339 - RNA, 18 nt, Artificial Sequence
  Synthetic
caggcuguucuugaacuc

SEQ ID NO: 286340 - RNA, 19 nt, Artificial Sequence
  Synthetic
ccaggcuguucuugaacuc

SEQ ID NO: 286341 - RNA, 20 nt, Artificial Sequence
  Synthetic
cccaggcuguucuugaacuc

SEQ ID NO: 286342 - RNA, 21 nt, Artificial Sequence
  Synthetic
gcccaggcuguucuugaacuc

SEQ ID NO: 286343 - RNA, 22 nt, Artificial Sequence
  Synthetic
ugcccaggcuguucuugaacuc

SEQ ID NO: 286344 - RNA, 23 nt, Artificial Sequence
  Synthetic
uugcccaggcuguucuugaacuc

SEQ ID NO: 286345 - RNA, 24 nt, Artificial Sequence
  Synthetic
guugcccaggcuguucuugaacuc

SEQ ID NO: 286346 - RNA, 18 nt, Artificial Sequence
  Synthetic
gcauuuugcaaauaacuc

SEQ ID NO: 286347 - RNA, 19 nt, Artificial Sequence
  Synthetic
ugcauuuugcaaauaacuc

SEQ ID NO: 286348 - RNA, 20 nt, Artificial Sequence
  Synthetic
uugcauuuugcaaauaacuc

SEQ ID NO: 286349 - RNA, 21 nt, Artificial Sequence
  Synthetic
auugcauuuugcaaauaacuc

SEQ ID NO: 286350 - RNA, 22 nt, Artificial Sequence
  Synthetic
cauugcauuuugcaaauaacuc

SEQ ID NO: 286351 - RNA, 23 nt, Artificial Sequence
  Synthetic
gcauugcauuuugcaaauaacuc

SEQ ID NO: 286352 - RNA, 24 nt, Artificial Sequence
  Synthetic
ugcauugcauuuugcaaauaacuc

SEQ ID NO: 286353 - RNA, 18 nt, Artificial Sequence
  Synthetic
cuuaauaaguaauaacuc

SEQ ID NO: 286354 - RNA, 19 nt, Artificial Sequence
  Synthetic
ucuuaauaaguaauaacuc

SEQ ID NO: 286355 - RNA, 20 nt, Artificial Sequence
  Synthetic
aucuuaauaaguaauaacuc

SEQ ID NO: 286356 - RNA, 21 nt, Artificial Sequence
  Synthetic
uaucuuaauaaguaauaacuc

SEQ ID NO: 286357 - RNA, 22 nt, Artificial Sequence
  Synthetic
guaucuuaauaaguaauaacuc

SEQ ID NO: 286358 - RNA, 23 nt, Artificial Sequence
  Synthetic
uguaucuuaauaaguaauaacuc

SEQ ID NO: 286359 - RNA, 24 nt, Artificial Sequence
  Synthetic
cuguaucuuaauaaguaauaacuc

SEQ ID NO: 286360 - RNA, 18 nt, Artificial Sequence
  Synthetic
aucaggauuuuauaacuc

SEQ ID NO: 286361 - RNA, 19 nt, Artificial Sequence
  Synthetic
gaucaggauuuuauaacuc

SEQ ID NO: 286362 - RNA, 20 nt, Artificial Sequence
  Synthetic
ugaucaggauuuuauaacuc

SEQ ID NO: 286363 - RNA, 21 nt, Artificial Sequence
  Synthetic
gugaucaggauuuuauaacuc

SEQ ID NO: 286364 - RNA, 22 nt, Artificial Sequence
  Synthetic
ggugaucaggauuuuauaacuc

SEQ ID NO: 286365 - RNA, 23 nt, Artificial Sequence
  Synthetic
uggugaucaggauuuuauaacuc

SEQ ID NO: 286366 - RNA, 24 nt, Artificial Sequence
  Synthetic
cuggugaucaggauuuuauaacuc

SEQ ID NO: 286367 - RNA, 18 nt, Artificial Sequence
  Synthetic
augguuuccaauuaacuc

SEQ ID NO: 286368 - RNA, 19 nt, Artificial Sequence
  Synthetic
caugguuuccaauuaacuc

SEQ ID NO: 286369 - RNA, 20 nt, Artificial Sequence
  Synthetic
ucaugguuuccaauuaacuc

SEQ ID NO: 286370 - RNA, 21 nt, Artificial Sequence
  Synthetic
gucaugguuuccaauuaacuc

SEQ ID NO: 286371 - RNA, 22 nt, Artificial Sequence
  Synthetic
ggucaugguuuccaauuaacuc

SEQ ID NO: 286372 - RNA, 23 nt, Artificial Sequence
  Synthetic
aggucaugguuuccaauuaacuc

SEQ ID NO: 286373 - RNA, 24 nt, Artificial Sequence
  Synthetic
uaggucaugguuuccaauuaacuc

SEQ ID NO: 286374 - RNA, 18 nt, Artificial Sequence
  Synthetic
cuuuuuaccauuuaacuc

SEQ ID NO: 286375 - RNA, 19 nt, Artificial Sequence
  Synthetic
ccuuuuuaccauuuaacuc

SEQ ID NO: 286376 - RNA, 20 nt, Artificial Sequence
  Synthetic
uccuuuuuaccauuuaacuc

SEQ ID NO: 286377 - RNA, 21 nt, Artificial Sequence
  Synthetic
guccuuuuuaccauuuaacuc

SEQ ID NO: 286378 - RNA, 22 nt, Artificial Sequence
  Synthetic
cguccuuuuuaccauuuaacuc

SEQ ID NO: 286379 - RNA, 23 nt, Artificial Sequence
  Synthetic
gcguccuuuuuaccauuuaacuc

SEQ ID NO: 286380 - RNA, 24 nt, Artificial Sequence
  Synthetic
ggcguccuuuuuaccauuuaacuc

SEQ ID NO: 286381 - RNA, 18 nt, Artificial Sequence
  Synthetic
uuggaggaugaaacacuc

SEQ ID NO: 286382 - RNA, 19 nt, Artificial Sequence
  Synthetic
auuggaggaugaaacacuc

SEQ ID NO: 286383 - RNA, 20 nt, Artificial Sequence
  Synthetic
uauuggaggaugaaacacuc

SEQ ID NO: 286384 - RNA, 21 nt, Artificial Sequence
  Synthetic
uuauuggaggaugaaacacuc

SEQ ID NO: 286385 - RNA, 22 nt, Artificial Sequence
  Synthetic
uuuauuggaggaugaaacacuc

SEQ ID NO: 286386 - RNA, 23 nt, Artificial Sequence
  Synthetic
uuuuauuggaggaugaaacacuc

SEQ ID NO: 286387 - RNA, 24 nt, Artificial Sequence
  Synthetic
guuuuauuggaggaugaaacacuc

SEQ ID NO: 286388 - RNA, 18 nt, Artificial Sequence
  Synthetic
agccucugugaaacacuc

SEQ ID NO: 286389 - RNA, 19 nt, Artificial Sequence
  Synthetic
uagccucugugaaacacuc

SEQ ID NO: 286390 - RNA, 20 nt, Artificial Sequence
  Synthetic
uuagccucugugaaacacuc

SEQ ID NO: 286391 - RNA, 21 nt, Artificial Sequence
  Synthetic
uuuagccucugugaaacacuc

SEQ ID NO: 286392 - RNA, 22 nt, Artificial Sequence
  Synthetic
auuuagccucugugaaacacuc

SEQ ID NO: 286393 - RNA, 23 nt, Artificial Sequence
  Synthetic
uauuuagccucugugaaacacuc

SEQ ID NO: 286394 - RNA, 24 nt, Artificial Sequence
  Synthetic
guauuuagccucugugaaacacuc

SEQ ID NO: 286395 - RNA, 18 nt, Artificial Sequence
  Synthetic
ggcaguaaguaaacacuc

SEQ ID NO: 286396 - RNA, 19 nt, Artificial Sequence
  Synthetic
gggcaguaaguaaacacuc

SEQ ID NO: 286397 - RNA, 20 nt, Artificial Sequence
  Synthetic
agggcaguaaguaaacacuc

SEQ ID NO: 286398 - RNA, 21 nt, Artificial Sequence
  Synthetic
aagggcaguaaguaaacacuc

SEQ ID NO: 286399 - RNA, 22 nt, Artificial Sequence
  Synthetic
aaagggcaguaaguaaacacuc

SEQ ID NO: 286400 - RNA, 23 nt, Artificial Sequence
  Synthetic
caaagggcaguaaguaaacacuc

SEQ ID NO: 286401 - RNA, 24 nt, Artificial Sequence
  Synthetic
gcaaagggcaguaaguaaacacuc

SEQ ID NO: 286402 - RNA, 18 nt, Artificial Sequence
  Synthetic
aucacuuugcuaacacuc

SEQ ID NO: 286403 - RNA, 19 nt, Artificial Sequence
  Synthetic
caucacuuugcuaacacuc

SEQ ID NO: 286404 - RNA, 20 nt, Artificial Sequence
  Synthetic
ccaucacuuugcuaacacuc

SEQ ID NO: 286405 - RNA, 21 nt, Artificial Sequence
  Synthetic
cccaucacuuugcuaacacuc

SEQ ID NO: 286406 - RNA, 22 nt, Artificial Sequence
  Synthetic
acccaucacuuugcuaacacuc

SEQ ID NO: 286407 - RNA, 23 nt, Artificial Sequence
  Synthetic
aacccaucacuuugcuaacacuc

SEQ ID NO: 286408 - RNA, 24 nt, Artificial Sequence
  Synthetic
gaacccaucacuuugcuaacacuc

SEQ ID NO: 286409 - RNA, 18 nt, Artificial Sequence
  Synthetic
accaagggaugcacacuc

SEQ ID NO: 286410 - RNA, 19 nt, Artificial Sequence
  Synthetic
uaccaagggaugcacacuc

SEQ ID NO: 286411 - RNA, 20 nt, Artificial Sequence
  Synthetic
auaccaagggaugcacacuc

SEQ ID NO: 286412 - RNA, 21 nt, Artificial Sequence
  Synthetic
cauaccaagggaugcacacuc

SEQ ID NO: 286413 - RNA, 22 nt, Artificial Sequence
  Synthetic
ccauaccaagggaugcacacuc

SEQ ID NO: 286414 - RNA, 23 nt, Artificial Sequence
  Synthetic
gccauaccaagggaugcacacuc

SEQ ID NO: 286415 - RNA, 24 nt, Artificial Sequence
  Synthetic
agccauaccaagggaugcacacuc

SEQ ID NO: 286416 - RNA, 18 nt, Artificial Sequence
  Synthetic
aaggggaacaucacacuc

SEQ ID NO: 286417 - RNA, 19 nt, Artificial Sequence
  Synthetic
gaaggggaacaucacacuc

SEQ ID NO: 286418 - RNA, 20 nt, Artificial Sequence
  Synthetic
ggaaggggaacaucacacuc

SEQ ID NO: 286419 - RNA, 21 nt, Artificial Sequence
  Synthetic
aggaaggggaacaucacacuc

SEQ ID NO: 286420 - RNA, 22 nt, Artificial Sequence
  Synthetic
caggaaggggaacaucacacuc

SEQ ID NO: 286421 - RNA, 23 nt, Artificial Sequence
  Synthetic
acaggaaggggaacaucacacuc

SEQ ID NO: 286422 - RNA, 24 nt, Artificial Sequence
  Synthetic
cacaggaaggggaacaucacacuc

SEQ ID NO: 286423 - RNA, 18 nt, Artificial Sequence
  Synthetic
aaggggaauaucacacuc

SEQ ID NO: 286424 - RNA, 19 nt, Artificial Sequence
  Synthetic
gaaggggaauaucacacuc

SEQ ID NO: 286425 - RNA, 20 nt, Artificial Sequence
  Synthetic
ggaaggggaauaucacacuc

SEQ ID NO: 286426 - RNA, 21 nt, Artificial Sequence
  Synthetic
aggaaggggaauaucacacuc

SEQ ID NO: 286427 - RNA, 22 nt, Artificial Sequence
  Synthetic
caggaaggggaauaucacacuc

SEQ ID NO: 286428 - RNA, 23 nt, Artificial Sequence
  Synthetic
acaggaaggggaauaucacacuc

SEQ ID NO: 286429 - RNA, 24 nt, Artificial Sequence
  Synthetic
cacaggaaggggaauaucacacuc

SEQ ID NO: 286430 - RNA, 18 nt, Artificial Sequence
  Synthetic
uguaaguauuggacacuc

SEQ ID NO: 286431 - RNA, 19 nt, Artificial Sequence
  Synthetic
uuguaaguauuggacacuc

SEQ ID NO: 286432 - RNA, 20 nt, Artificial Sequence
  Synthetic
guuguaaguauuggacacuc

SEQ ID NO: 286433 - RNA, 21 nt, Artificial Sequence
  Synthetic
aguuguaaguauuggacacuc

SEQ ID NO: 286434 - RNA, 22 nt, Artificial Sequence
  Synthetic
uaguuguaaguauuggacacuc

SEQ ID NO: 286435 - RNA, 23 nt, Artificial Sequence
  Synthetic
auaguuguaaguauuggacacuc

SEQ ID NO: 286436 - RNA, 24 nt, Artificial Sequence
  Synthetic
aauaguuguaaguauuggacacuc

SEQ ID NO: 286437 - RNA, 18 nt, Artificial Sequence
  Synthetic
guuaguuuaaauacacuc

SEQ ID NO: 286438 - RNA, 19 nt, Artificial Sequence
  Synthetic
uguuaguuuaaauacacuc

SEQ ID NO: 286439 - RNA, 20 nt, Artificial Sequence
  Synthetic
guguuaguuuaaauacacuc

SEQ ID NO: 286440 - RNA, 21 nt, Artificial Sequence
  Synthetic
aguguuaguuuaaauacacuc

SEQ ID NO: 286441 - RNA, 22 nt, Artificial Sequence
  Synthetic
aaguguuaguuuaaauacacuc

SEQ ID NO: 286442 - RNA, 23 nt, Artificial Sequence
  Synthetic
aaaguguuaguuuaaauacacuc

SEQ ID NO: 286443 - RNA, 24 nt, Artificial Sequence
  Synthetic
uaaaguguuaguuuaaauacacuc

SEQ ID NO: 286444 - RNA, 18 nt, Artificial Sequence
  Synthetic
uaucugguauauacacuc

SEQ ID NO: 286445 - RNA, 19 nt, Artificial Sequence
  Synthetic
auaucugguauauacacuc

SEQ ID NO: 286446 - RNA, 20 nt, Artificial Sequence
  Synthetic
aauaucugguauauacacuc

SEQ ID NO: 286447 - RNA, 21 nt, Artificial Sequence
  Synthetic
aaauaucugguauauacacuc

SEQ ID NO: 286448 - RNA, 22 nt, Artificial Sequence
  Synthetic
aaaauaucugguauauacacuc

SEQ ID NO: 286449 - RNA, 23 nt, Artificial Sequence
  Synthetic
caaaauaucugguauauacacuc

SEQ ID NO: 286450 - RNA, 24 nt, Artificial Sequence
  Synthetic
ucaaaauaucugguauauacacuc

SEQ ID NO: 286451 - RNA, 18 nt, Artificial Sequence
  Synthetic
auuauagcguuuacacuc

SEQ ID NO: 286452 - RNA, 19 nt, Artificial Sequence
  Synthetic
gauuauagcguuuacacuc

SEQ ID NO: 286453 - RNA, 20 nt, Artificial Sequence
  Synthetic
ugauuauagcguuuacacuc

SEQ ID NO: 286454 - RNA, 21 nt, Artificial Sequence
  Synthetic
gugauuauagcguuuacacuc

SEQ ID NO: 286455 - RNA, 22 nt, Artificial Sequence
  Synthetic
agugauuauagcguuuacacuc

SEQ ID NO: 286456 - RNA, 23 nt, Artificial Sequence
  Synthetic
aagugauuauagcguuuacacuc

SEQ ID NO: 286457 - RNA, 24 nt, Artificial Sequence
  Synthetic
aaagugauuauagcguuuacacuc

SEQ ID NO: 286458 - RNA, 18 nt, Artificial Sequence
  Synthetic
gauccaguuuuaccacuc

SEQ ID NO: 286459 - RNA, 19 nt, Artificial Sequence
  Synthetic
agauccaguuuuaccacuc

SEQ ID NO: 286460 - RNA, 20 nt, Artificial Sequence
  Synthetic
gagauccaguuuuaccacuc

SEQ ID NO: 286461 - RNA, 21 nt, Artificial Sequence
  Synthetic
agagauccaguuuuaccacuc

SEQ ID NO: 286462 - RNA, 22 nt, Artificial Sequence
  Synthetic
gagagauccaguuuuaccacuc

SEQ ID NO: 286463 - RNA, 23 nt, Artificial Sequence
  Synthetic
agagagauccaguuuuaccacuc

SEQ ID NO: 286464 - RNA, 24 nt, Artificial Sequence
  Synthetic
aagagagauccaguuuuaccacuc

SEQ ID NO: 286465 - RNA, 18 nt, Artificial Sequence
  Synthetic
agggaaccaaacccacuc

SEQ ID NO: 286466 - RNA, 19 nt, Artificial Sequence
  Synthetic
aagggaaccaaacccacuc

SEQ ID NO: 286467 - RNA, 20 nt, Artificial Sequence
  Synthetic
uaagggaaccaaacccacuc

SEQ ID NO: 286468 - RNA, 21 nt, Artificial Sequence
  Synthetic
auaagggaaccaaacccacuc

SEQ ID NO: 286469 - RNA, 22 nt, Artificial Sequence
  Synthetic
uauaagggaaccaaacccacuc

SEQ ID NO: 286470 - RNA, 23 nt, Artificial Sequence
  Synthetic
uuauaagggaaccaaacccacuc

SEQ ID NO: 286471 - RNA, 24 nt, Artificial Sequence
  Synthetic
uuuauaagggaaccaaacccacuc

SEQ ID NO: 286472 - RNA, 18 nt, Artificial Sequence
  Synthetic
acauuuauaaagccacuc

SEQ ID NO: 286473 - RNA, 19 nt, Artificial Sequence
  Synthetic
gacauuuauaaagccacuc

SEQ ID NO: 286474 - RNA, 20 nt, Artificial Sequence
  Synthetic
ggacauuuauaaagccacuc

SEQ ID NO: 286475 - RNA, 21 nt, Artificial Sequence
  Synthetic
uggacauuuauaaagccacuc

SEQ ID NO: 286476 - RNA, 22 nt, Artificial Sequence
  Synthetic
auggacauuuauaaagccacuc

SEQ ID NO: 286477 - RNA, 23 nt, Artificial Sequence
  Synthetic
aauggacauuuauaaagccacuc

SEQ ID NO: 286478 - RNA, 24 nt, Artificial Sequence
  Synthetic
gaauggacauuuauaaagccacuc

SEQ ID NO: 286479 - RNA, 18 nt, Artificial Sequence
  Synthetic
acuggcugugguccacuc

SEQ ID NO: 286480 - RNA, 19 nt, Artificial Sequence
  Synthetic
cacuggcugugguccacuc

SEQ ID NO: 286481 - RNA, 20 nt, Artificial Sequence
  Synthetic
ccacuggcugugguccacuc

SEQ ID NO: 286482 - RNA, 21 nt, Artificial Sequence
  Synthetic
accacuggcugugguccacuc

SEQ ID NO: 286483 - RNA, 22 nt, Artificial Sequence
  Synthetic
caccacuggcugugguccacuc

SEQ ID NO: 286484 - RNA, 23 nt, Artificial Sequence
  Synthetic
acaccacuggcugugguccacuc

SEQ ID NO: 286485 - RNA, 24 nt, Artificial Sequence
  Synthetic
cacaccacuggcugugguccacuc

SEQ ID NO: 286486 - RNA, 18 nt, Artificial Sequence
  Synthetic
gggauguucauuccacuc

SEQ ID NO: 286487 - RNA, 19 nt, Artificial Sequence
  Synthetic
ugggauguucauuccacuc

SEQ ID NO: 286488 - RNA, 20 nt, Artificial Sequence
  Synthetic
uugggauguucauuccacuc

SEQ ID NO: 286489 - RNA, 21 nt, Artificial Sequence
  Synthetic
uuugggauguucauuccacuc

SEQ ID NO: 286490 - RNA, 22 nt, Artificial Sequence
  Synthetic
uuuugggauguucauuccacuc

SEQ ID NO: 286491 - RNA, 23 nt, Artificial Sequence
  Synthetic
cuuuugggauguucauuccacuc

SEQ ID NO: 286492 - RNA, 24 nt, Artificial Sequence
  Synthetic
ucuuuugggauguucauuccacuc

SEQ ID NO: 286493 - RNA, 18 nt, Artificial Sequence
  Synthetic
ccuguaaucccagcacuc

SEQ ID NO: 286494 - RNA, 19 nt, Artificial Sequence
  Synthetic
gccuguaaucccagcacuc

SEQ ID NO: 286495 - RNA, 20 nt, Artificial Sequence
  Synthetic
cgccuguaaucccagcacuc

SEQ ID NO: 286496 - RNA, 18 nt, Artificial Sequence
  Synthetic
aucauauuuccagcacuc

SEQ ID NO: 286497 - RNA, 19 nt, Artificial Sequence
  Synthetic
aaucauauuuccagcacuc

SEQ ID NO: 286498 - RNA, 20 nt, Artificial Sequence
  Synthetic
caaucauauuuccagcacuc

SEQ ID NO: 286499 - RNA, 21 nt, Artificial Sequence
  Synthetic
ucaaucauauuuccagcacuc

SEQ ID NO: 286500 - RNA, 22 nt, Artificial Sequence
  Synthetic
aucaaucauauuuccagcacuc

SEQ ID NO: 286501 - RNA, 23 nt, Artificial Sequence
  Synthetic
aaucaaucauauuuccagcacuc

SEQ ID NO: 286502 - RNA, 24 nt, Artificial Sequence
  Synthetic
gaaucaaucauauuuccagcacuc

SEQ ID NO: 286503 - RNA, 18 nt, Artificial Sequence
  Synthetic
cugauuguaagagcacuc

SEQ ID NO: 286504 - RNA, 19 nt, Artificial Sequence
  Synthetic
acugauuguaagagcacuc

SEQ ID NO: 286505 - RNA, 20 nt, Artificial Sequence
  Synthetic
aacugauuguaagagcacuc

SEQ ID NO: 286506 - RNA, 21 nt, Artificial Sequence
  Synthetic
uaacugauuguaagagcacuc

SEQ ID NO: 286507 - RNA, 22 nt, Artificial Sequence
  Synthetic
cuaacugauuguaagagcacuc

SEQ ID NO: 286508 - RNA, 23 nt, Artificial Sequence
  Synthetic
ucuaacugauuguaagagcacuc

SEQ ID NO: 286509 - RNA, 24 nt, Artificial Sequence
  Synthetic
cucuaacugauuguaagagcacuc

SEQ ID NO: 286510 - RNA, 18 nt, Artificial Sequence
  Synthetic
uacacacaccacgcacuc

SEQ ID NO: 286511 - RNA, 19 nt, Artificial Sequence
  Synthetic
uuacacacaccacgcacuc

SEQ ID NO: 286512 - RNA, 20 nt, Artificial Sequence
  Synthetic
auuacacacaccacgcacuc

SEQ ID NO: 286513 - RNA, 21 nt, Artificial Sequence
  Synthetic
gauuacacacaccacgcacuc

SEQ ID NO: 286514 - RNA, 22 nt, Artificial Sequence
  Synthetic
ugauuacacacaccacgcacuc

SEQ ID NO: 286515 - RNA, 23 nt, Artificial Sequence
  Synthetic
augauuacacacaccacgcacuc

SEQ ID NO: 286516 - RNA, 24 nt, Artificial Sequence
  Synthetic
uaugauuacacacaccacgcacuc

SEQ ID NO: 286517 - RNA, 18 nt, Artificial Sequence
  Synthetic
ccuaaacauugggcacuc

SEQ ID NO: 286518 - RNA, 19 nt, Artificial Sequence
  Synthetic
gccuaaacauugggcacuc

SEQ ID NO: 286519 - RNA, 20 nt, Artificial Sequence
  Synthetic
ggccuaaacauugggcacuc

SEQ ID NO: 286520 - RNA, 21 nt, Artificial Sequence
  Synthetic
gggccuaaacauugggcacuc

SEQ ID NO: 286521 - RNA, 22 nt, Artificial Sequence
  Synthetic
ugggccuaaacauugggcacuc

SEQ ID NO: 286522 - RNA, 23 nt, Artificial Sequence
  Synthetic
gugggccuaaacauugggcacuc

SEQ ID NO: 286523 - RNA, 24 nt, Artificial Sequence
  Synthetic
agugggccuaaacauugggcacuc

SEQ ID NO: 286524 - RNA, 18 nt, Artificial Sequence
  Synthetic
guacuugaaacugcacuc

SEQ ID NO: 286525 - RNA, 19 nt, Artificial Sequence
  Synthetic
uguacuugaaacugcacuc

SEQ ID NO: 286526 - RNA, 20 nt, Artificial Sequence
  Synthetic
cuguacuugaaacugcacuc

SEQ ID NO: 286527 - RNA, 21 nt, Artificial Sequence
  Synthetic
ucuguacuugaaacugcacuc

SEQ ID NO: 286528 - RNA, 22 nt, Artificial Sequence
  Synthetic
aucuguacuugaaacugcacuc

SEQ ID NO: 286529 - RNA, 23 nt, Artificial Sequence
  Synthetic
aaucuguacuugaaacugcacuc

SEQ ID NO: 286530 - RNA, 24 nt, Artificial Sequence
  Synthetic
caaucuguacuugaaacugcacuc

SEQ ID NO: 286531 - RNA, 18 nt, Artificial Sequence
  Synthetic
ucaaucacaauugcacuc

SEQ ID NO: 286532 - RNA, 19 nt, Artificial Sequence
  Synthetic
uucaaucacaauugcacuc

SEQ ID NO: 286533 - RNA, 20 nt, Artificial Sequence
  Synthetic
auucaaucacaauugcacuc

SEQ ID NO: 286534 - RNA, 21 nt, Artificial Sequence
  Synthetic
gauucaaucacaauugcacuc

SEQ ID NO: 286535 - RNA, 22 nt, Artificial Sequence
  Synthetic
ggauucaaucacaauugcacuc

SEQ ID NO: 286536 - RNA, 23 nt, Artificial Sequence
  Synthetic
aggauucaaucacaauugcacuc

SEQ ID NO: 286537 - RNA, 24 nt, Artificial Sequence
  Synthetic
caggauucaaucacaauugcacuc

SEQ ID NO: 286538 - RNA, 18 nt, Artificial Sequence
  Synthetic
aacccagcaauugcacuc

SEQ ID NO: 286539 - RNA, 19 nt, Artificial Sequence
  Synthetic
caacccagcaauugcacuc

SEQ ID NO: 286540 - RNA, 20 nt, Artificial Sequence
  Synthetic
acaacccagcaauugcacuc

SEQ ID NO: 286541 - RNA, 21 nt, Artificial Sequence
  Synthetic
uacaacccagcaauugcacuc

SEQ ID NO: 286542 - RNA, 22 nt, Artificial Sequence
  Synthetic
auacaacccagcaauugcacuc

SEQ ID NO: 286543 - RNA, 23 nt, Artificial Sequence
  Synthetic
cauacaacccagcaauugcacuc

SEQ ID NO: 286544 - RNA, 24 nt, Artificial Sequence
  Synthetic
ccauacaacccagcaauugcacuc

SEQ ID NO: 286545 - RNA, 18 nt, Artificial Sequence
  Synthetic
gguuugcaguuaucacuc

SEQ ID NO: 286546 - RNA, 19 nt, Artificial Sequence
  Synthetic
ugguuugcaguuaucacuc

SEQ ID NO: 286547 - RNA, 20 nt, Artificial Sequence
  Synthetic
gugguuugcaguuaucacuc

SEQ ID NO: 286548 - RNA, 21 nt, Artificial Sequence
  Synthetic
agugguuugcaguuaucacuc

SEQ ID NO: 286549 - RNA, 22 nt, Artificial Sequence
  Synthetic
aagugguuugcaguuaucacuc

SEQ ID NO: 286550 - RNA, 23 nt, Artificial Sequence
  Synthetic
aaagugguuugcaguuaucacuc

SEQ ID NO: 286551 - RNA, 24 nt, Artificial Sequence
  Synthetic
caaagugguuugcaguuaucacuc

SEQ ID NO: 286552 - RNA, 18 nt, Artificial Sequence
  Synthetic
ccagcacacugcucacuc

SEQ ID NO: 286553 - RNA, 19 nt, Artificial Sequence
  Synthetic
uccagcacacugcucacuc

SEQ ID NO: 286554 - RNA, 20 nt, Artificial Sequence
  Synthetic
uuccagcacacugcucacuc

SEQ ID NO: 286555 - RNA, 21 nt, Artificial Sequence
  Synthetic
uuuccagcacacugcucacuc

SEQ ID NO: 286556 - RNA, 22 nt, Artificial Sequence
  Synthetic
auuuccagcacacugcucacuc

SEQ ID NO: 286557 - RNA, 23 nt, Artificial Sequence
  Synthetic
aauuuccagcacacugcucacuc

SEQ ID NO: 286558 - RNA, 24 nt, Artificial Sequence
  Synthetic
caauuuccagcacacugcucacuc

SEQ ID NO: 286559 - RNA, 18 nt, Artificial Sequence
  Synthetic
uacuuagcuuagucacuc

SEQ ID NO: 286560 - RNA, 19 nt, Artificial Sequence
  Synthetic
cuacuuagcuuagucacuc

SEQ ID NO: 286561 - RNA, 20 nt, Artificial Sequence
  Synthetic
ucuacuuagcuuagucacuc

SEQ ID NO: 286562 - RNA, 21 nt, Artificial Sequence
  Synthetic
uucuacuuagcuuagucacuc

SEQ ID NO: 286563 - RNA, 22 nt, Artificial Sequence
  Synthetic
auucuacuuagcuuagucacuc

SEQ ID NO: 286564 - RNA, 23 nt, Artificial Sequence
  Synthetic
cauucuacuuagcuuagucacuc

SEQ ID NO: 286565 - RNA, 24 nt, Artificial Sequence
  Synthetic
gcauucuacuuagcuuagucacuc

SEQ ID NO: 286566 - RNA, 18 nt, Artificial Sequence
  Synthetic
cauuauuaaaguucacuc

SEQ ID NO: 286567 - RNA, 19 nt, Artificial Sequence
  Synthetic
ucauuauuaaaguucacuc

SEQ ID NO: 286568 - RNA, 20 nt, Artificial Sequence
  Synthetic
cucauuauuaaaguucacuc

SEQ ID NO: 286569 - RNA, 21 nt, Artificial Sequence
  Synthetic
ucucauuauuaaaguucacuc

SEQ ID NO: 286570 - RNA, 22 nt, Artificial Sequence
  Synthetic
cucucauuauuaaaguucacuc

SEQ ID NO: 286571 - RNA, 23 nt, Artificial Sequence
  Synthetic
acucucauuauuaaaguucacuc

SEQ ID NO: 286572 - RNA, 24 nt, Artificial Sequence
  Synthetic
gacucucauuauuaaaguucacuc

SEQ ID NO: 286573 - RNA, 18 nt, Artificial Sequence
  Synthetic
acauuuuuccuuucacuc

SEQ ID NO: 286574 - RNA, 19 nt, Artificial Sequence
  Synthetic
cacauuuuuccuuucacuc

SEQ ID NO: 286575 - RNA, 20 nt, Artificial Sequence
  Synthetic
ucacauuuuuccuuucacuc

SEQ ID NO: 286576 - RNA, 21 nt, Artificial Sequence
  Synthetic
aucacauuuuuccuuucacuc

SEQ ID NO: 286577 - RNA, 22 nt, Artificial Sequence
  Synthetic
uaucacauuuuuccuuucacuc

SEQ ID NO: 286578 - RNA, 23 nt, Artificial Sequence
  Synthetic
cuaucacauuuuuccuuucacuc

SEQ ID NO: 286579 - RNA, 24 nt, Artificial Sequence
  Synthetic
ccuaucacauuuuuccuuucacuc

SEQ ID NO: 286580 - RNA, 18 nt, Artificial Sequence
  Synthetic
uugaaucugcuuucacuc

SEQ ID NO: 286581 - RNA, 19 nt, Artificial Sequence
  Synthetic
uuugaaucugcuuucacuc

SEQ ID NO: 286582 - RNA, 20 nt, Artificial Sequence
  Synthetic
guuugaaucugcuuucacuc

SEQ ID NO: 286583 - RNA, 21 nt, Artificial Sequence
  Synthetic
uguuugaaucugcuuucacuc

SEQ ID NO: 286584 - RNA, 22 nt, Artificial Sequence
  Synthetic
uuguuugaaucugcuuucacuc

SEQ ID NO: 286585 - RNA, 23 nt, Artificial Sequence
  Synthetic
uuuguuugaaucugcuuucacuc

SEQ ID NO: 286586 - RNA, 24 nt, Artificial Sequence
  Synthetic
uuuuguuugaaucugcuuucacuc

SEQ ID NO: 286587 - RNA, 18 nt, Artificial Sequence
  Synthetic
caagagccauuuucacuc

SEQ ID NO: 286588 - RNA, 19 nt, Artificial Sequence
  Synthetic
ccaagagccauuuucacuc

SEQ ID NO: 286589 - RNA, 20 nt, Artificial Sequence
  Synthetic
accaagagccauuuucacuc

SEQ ID NO: 286590 - RNA, 21 nt, Artificial Sequence
  Synthetic
uaccaagagccauuuucacuc

SEQ ID NO: 286591 - RNA, 22 nt, Artificial Sequence
  Synthetic
uuaccaagagccauuuucacuc

SEQ ID NO: 286592 - RNA, 23 nt, Artificial Sequence
  Synthetic
guuaccaagagccauuuucacuc

SEQ ID NO: 286593 - RNA, 24 nt, Artificial Sequence
  Synthetic
aguuaccaagagccauuuucacuc

SEQ ID NO: 286594 - RNA, 18 nt, Artificial Sequence
  Synthetic
caagauagcacaagacuc

SEQ ID NO: 286595 - RNA, 19 nt, Artificial Sequence
  Synthetic
acaagauagcacaagacuc

SEQ ID NO: 286596 - RNA, 20 nt, Artificial Sequence
  Synthetic
cacaagauagcacaagacuc

SEQ ID NO: 286597 - RNA, 21 nt, Artificial Sequence
  Synthetic
ucacaagauagcacaagacuc

SEQ ID NO: 286598 - RNA, 22 nt, Artificial Sequence
  Synthetic
cucacaagauagcacaagacuc

SEQ ID NO: 286599 - RNA, 23 nt, Artificial Sequence
  Synthetic
ucucacaagauagcacaagacuc

SEQ ID NO: 286600 - RNA, 24 nt, Artificial Sequence
  Synthetic
aucucacaagauagcacaagacuc

SEQ ID NO: 286601 - RNA, 18 nt, Artificial Sequence
  Synthetic
uuugucguuagaagacuc

SEQ ID NO: 286602 - RNA, 19 nt, Artificial Sequence
  Synthetic
uuuugucguuagaagacuc

SEQ ID NO: 286603 - RNA, 20 nt, Artificial Sequence
  Synthetic
uuuuugucguuagaagacuc

SEQ ID NO: 286604 - RNA, 21 nt, Artificial Sequence
  Synthetic
guuuuugucguuagaagacuc

SEQ ID NO: 286605 - RNA, 22 nt, Artificial Sequence
  Synthetic
uguuuuugucguuagaagacuc

SEQ ID NO: 286606 - RNA, 23 nt, Artificial Sequence
  Synthetic
cuguuuuugucguuagaagacuc

SEQ ID NO: 286607 - RNA, 24 nt, Artificial Sequence
  Synthetic
gcuguuuuugucguuagaagacuc

SEQ ID NO: 286608 - RNA, 18 nt, Artificial Sequence
  Synthetic
accuagauaaccagacuc

SEQ ID NO: 286609 - RNA, 19 nt, Artificial Sequence
  Synthetic
aaccuagauaaccagacuc

SEQ ID NO: 286610 - RNA, 20 nt, Artificial Sequence
  Synthetic
gaaccuagauaaccagacuc

SEQ ID NO: 286611 - RNA, 21 nt, Artificial Sequence
  Synthetic
ggaaccuagauaaccagacuc

SEQ ID NO: 286612 - RNA, 22 nt, Artificial Sequence
  Synthetic
uggaaccuagauaaccagacuc

SEQ ID NO: 286613 - RNA, 23 nt, Artificial Sequence
  Synthetic
uuggaaccuagauaaccagacuc

SEQ ID NO: 286614 - RNA, 24 nt, Artificial Sequence
  Synthetic
auuggaaccuagauaaccagacuc

SEQ ID NO: 286615 - RNA, 18 nt, Artificial Sequence
  Synthetic
gugugggugcaucgacuc

SEQ ID NO: 286616 - RNA, 19 nt, Artificial Sequence
  Synthetic
agugugggugcaucgacuc

SEQ ID NO: 286617 - RNA, 20 nt, Artificial Sequence
  Synthetic
uagugugggugcaucgacuc

SEQ ID NO: 286618 - RNA, 21 nt, Artificial Sequence
  Synthetic
guagugugggugcaucgacuc

SEQ ID NO: 286619 - RNA, 22 nt, Artificial Sequence
  Synthetic
gguagugugggugcaucgacuc

SEQ ID NO: 286620 - RNA, 23 nt, Artificial Sequence
  Synthetic
ugguagugugggugcaucgacuc

SEQ ID NO: 286621 - RNA, 24 nt, Artificial Sequence
  Synthetic
uugguagugugggugcaucgacuc

SEQ ID NO: 286622 - RNA, 18 nt, Artificial Sequence
  Synthetic
gaaacuccaaaaggacuc

SEQ ID NO: 286623 - RNA, 19 nt, Artificial Sequence
  Synthetic
ggaaacuccaaaaggacuc

SEQ ID NO: 286624 - RNA, 20 nt, Artificial Sequence
  Synthetic
gggaaacuccaaaaggacuc

SEQ ID NO: 286625 - RNA, 21 nt, Artificial Sequence
  Synthetic
ugggaaacuccaaaaggacuc

SEQ ID NO: 286626 - RNA, 22 nt, Artificial Sequence
  Synthetic
cugggaaacuccaaaaggacuc

SEQ ID NO: 286627 - RNA, 23 nt, Artificial Sequence
  Synthetic
acugggaaacuccaaaaggacuc

SEQ ID NO: 286628 - RNA, 24 nt, Artificial Sequence
  Synthetic
uacugggaaacuccaaaaggacuc

SEQ ID NO: 286629 - RNA, 18 nt, Artificial Sequence
  Synthetic
uaacaaucaguaggacuc

SEQ ID NO: 286630 - RNA, 19 nt, Artificial Sequence
  Synthetic
uuaacaaucaguaggacuc

SEQ ID NO: 286631 - RNA, 20 nt, Artificial Sequence
  Synthetic
guuaacaaucaguaggacuc

SEQ ID NO: 286632 - RNA, 21 nt, Artificial Sequence
  Synthetic
uguuaacaaucaguaggacuc

SEQ ID NO: 286633 - RNA, 22 nt, Artificial Sequence
  Synthetic
cuguuaacaaucaguaggacuc

SEQ ID NO: 286634 - RNA, 23 nt, Artificial Sequence
  Synthetic
ccuguuaacaaucaguaggacuc

SEQ ID NO: 286635 - RNA, 24 nt, Artificial Sequence
  Synthetic
accuguuaacaaucaguaggacuc

SEQ ID NO: 286636 - RNA, 18 nt, Artificial Sequence
  Synthetic
cagguuuaccugggacuc

SEQ ID NO: 286637 - RNA, 19 nt, Artificial Sequence
  Synthetic
ucagguuuaccugggacuc

SEQ ID NO: 286638 - RNA, 20 nt, Artificial Sequence
  Synthetic
cucagguuuaccugggacuc

SEQ ID NO: 286639 - RNA, 21 nt, Artificial Sequence
  Synthetic
ucucagguuuaccugggacuc

SEQ ID NO: 286640 - RNA, 22 nt, Artificial Sequence
  Synthetic
cucucagguuuaccugggacuc

SEQ ID NO: 286641 - RNA, 23 nt, Artificial Sequence
  Synthetic
ccucucagguuuaccugggacuc

SEQ ID NO: 286642 - RNA, 24 nt, Artificial Sequence
  Synthetic
gccucucagguuuaccugggacuc

SEQ ID NO: 286643 - RNA, 18 nt, Artificial Sequence
  Synthetic
augagaacacauggacuc

SEQ ID NO: 286644 - RNA, 19 nt, Artificial Sequence
  Synthetic
aaugagaacacauggacuc

SEQ ID NO: 286645 - RNA, 20 nt, Artificial Sequence
  Synthetic
caaugagaacacauggacuc

SEQ ID NO: 286646 - RNA, 21 nt, Artificial Sequence
  Synthetic
acaaugagaacacauggacuc

SEQ ID NO: 286647 - RNA, 22 nt, Artificial Sequence
  Synthetic
aacaaugagaacacauggacuc

SEQ ID NO: 286648 - RNA, 23 nt, Artificial Sequence
  Synthetic
gaacaaugagaacacauggacuc

SEQ ID NO: 286649 - RNA, 24 nt, Artificial Sequence
  Synthetic
ugaacaaugagaacacauggacuc

SEQ ID NO: 286650 - RNA, 18 nt, Artificial Sequence
  Synthetic
ucuguucucugaugacuc

SEQ ID NO: 286651 - RNA, 19 nt, Artificial Sequence
  Synthetic
aucuguucucugaugacuc

SEQ ID NO: 286652 - RNA, 20 nt, Artificial Sequence
  Synthetic
caucuguucucugaugacuc

SEQ ID NO: 286653 - RNA, 21 nt, Artificial Sequence
  Synthetic
ccaucuguucucugaugacuc

SEQ ID NO: 286654 - RNA, 22 nt, Artificial Sequence
  Synthetic
cccaucuguucucugaugacuc

SEQ ID NO: 286655 - RNA, 23 nt, Artificial Sequence
  Synthetic
ucccaucuguucucugaugacuc

SEQ ID NO: 286656 - RNA, 24 nt, Artificial Sequence
  Synthetic
uucccaucuguucucugaugacuc

SEQ ID NO: 286657 - RNA, 18 nt, Artificial Sequence
  Synthetic
ugggcucugaacugacuc

SEQ ID NO: 286658 - RNA, 19 nt, Artificial Sequence
  Synthetic
gugggcucugaacugacuc

SEQ ID NO: 286659 - RNA, 20 nt, Artificial Sequence
  Synthetic
cgugggcucugaacugacuc

SEQ ID NO: 286660 - RNA, 21 nt, Artificial Sequence
  Synthetic
acgugggcucugaacugacuc

SEQ ID NO: 286661 - RNA, 22 nt, Artificial Sequence
  Synthetic
aacgugggcucugaacugacuc

SEQ ID NO: 286662 - RNA, 23 nt, Artificial Sequence
  Synthetic
gaacgugggcucugaacugacuc

SEQ ID NO: 286663 - RNA, 24 nt, Artificial Sequence
  Synthetic
agaacgugggcucugaacugacuc

SEQ ID NO: 286664 - RNA, 18 nt, Artificial Sequence
  Synthetic
aaaguuccuuccugacuc

SEQ ID NO: 286665 - RNA, 19 nt, Artificial Sequence
  Synthetic
uaaaguuccuuccugacuc

SEQ ID NO: 286666 - RNA, 20 nt, Artificial Sequence
  Synthetic
auaaaguuccuuccugacuc

SEQ ID NO: 286667 - RNA, 21 nt, Artificial Sequence
  Synthetic
uauaaaguuccuuccugacuc

SEQ ID NO: 286668 - RNA, 22 nt, Artificial Sequence
  Synthetic
auauaaaguuccuuccugacuc

SEQ ID NO: 286669 - RNA, 23 nt, Artificial Sequence
  Synthetic
cauauaaaguuccuuccugacuc

SEQ ID NO: 286670 - RNA, 24 nt, Artificial Sequence
  Synthetic
gcauauaaaguuccuuccugacuc

SEQ ID NO: 286671 - RNA, 18 nt, Artificial Sequence
  Synthetic
auuccuucacagugacuc

SEQ ID NO: 286672 - RNA, 19 nt, Artificial Sequence
  Synthetic
cauuccuucacagugacuc

SEQ ID NO: 286673 - RNA, 20 nt, Artificial Sequence
  Synthetic
gcauuccuucacagugacuc

SEQ ID NO: 286674 - RNA, 21 nt, Artificial Sequence
  Synthetic
agcauuccuucacagugacuc

SEQ ID NO: 286675 - RNA, 22 nt, Artificial Sequence
  Synthetic
uagcauuccuucacagugacuc

SEQ ID NO: 286676 - RNA, 23 nt, Artificial Sequence
  Synthetic
guagcauuccuucacagugacuc

SEQ ID NO: 286677 - RNA, 24 nt, Artificial Sequence
  Synthetic
gguagcauuccuucacagugacuc

SEQ ID NO: 286678 - RNA, 18 nt, Artificial Sequence
  Synthetic
uuggguauuuauugacuc

SEQ ID NO: 286679 - RNA, 19 nt, Artificial Sequence
  Synthetic
auuggguauuuauugacuc

SEQ ID NO: 286680 - RNA, 20 nt, Artificial Sequence
  Synthetic
uauuggguauuuauugacuc

SEQ ID NO: 286681 - RNA, 21 nt, Artificial Sequence
  Synthetic
auauuggguauuuauugacuc

SEQ ID NO: 286682 - RNA, 22 nt, Artificial Sequence
  Synthetic
cauauuggguauuuauugacuc

SEQ ID NO: 286683 - RNA, 23 nt, Artificial Sequence
  Synthetic
acauauuggguauuuauugacuc

SEQ ID NO: 286684 - RNA, 24 nt, Artificial Sequence
  Synthetic
aacauauuggguauuuauugacuc

SEQ ID NO: 286685 - RNA, 18 nt, Artificial Sequence
  Synthetic
ugaauaaacucuugacuc

SEQ ID NO: 286686 - RNA, 19 nt, Artificial Sequence
  Synthetic
cugaauaaacucuugacuc

SEQ ID NO: 286687 - RNA, 20 nt, Artificial Sequence
  Synthetic
acugaauaaacucuugacuc

SEQ ID NO: 286688 - RNA, 21 nt, Artificial Sequence
  Synthetic
aacugaauaaacucuugacuc

SEQ ID NO: 286689 - RNA, 22 nt, Artificial Sequence
  Synthetic
aaacugaauaaacucuugacuc

SEQ ID NO: 286690 - RNA, 23 nt, Artificial Sequence
  Synthetic
caaacugaauaaacucuugacuc

SEQ ID NO: 286691 - RNA, 24 nt, Artificial Sequence
  Synthetic
acaaacugaauaaacucuugacuc

SEQ ID NO: 286692 - RNA, 18 nt, Artificial Sequence
  Synthetic
cugagcuuauccauacuc

SEQ ID NO: 286693 - RNA, 19 nt, Artificial Sequence
  Synthetic
ucugagcuuauccauacuc

SEQ ID NO: 286694 - RNA, 20 nt, Artificial Sequence
  Synthetic
aucugagcuuauccauacuc

SEQ ID NO: 286695 - RNA, 21 nt, Artificial Sequence
  Synthetic
uaucugagcuuauccauacuc

SEQ ID NO: 286696 - RNA, 22 nt, Artificial Sequence
  Synthetic
uuaucugagcuuauccauacuc

SEQ ID NO: 286697 - RNA, 23 nt, Artificial Sequence
  Synthetic
uuuaucugagcuuauccauacuc

SEQ ID NO: 286698 - RNA, 24 nt, Artificial Sequence
  Synthetic
cuuuaucugagcuuauccauacuc

SEQ ID NO: 286699 - RNA, 18 nt, Artificial Sequence
  Synthetic
cuguagucccagauacuc

SEQ ID NO: 286700 - RNA, 19 nt, Artificial Sequence
  Synthetic
ccuguagucccagauacuc

SEQ ID NO: 286701 - RNA, 20 nt, Artificial Sequence
  Synthetic
gccuguagucccagauacuc

SEQ ID NO: 286702 - RNA, 21 nt, Artificial Sequence
  Synthetic
ugccuguagucccagauacuc

SEQ ID NO: 286703 - RNA, 22 nt, Artificial Sequence
  Synthetic
augccuguagucccagauacuc

SEQ ID NO: 286704 - RNA, 23 nt, Artificial Sequence
  Synthetic
aaugccuguagucccagauacuc

SEQ ID NO: 286705 - RNA, 24 nt, Artificial Sequence
  Synthetic
aaaugccuguagucccagauacuc

SEQ ID NO: 286706 - RNA, 23 nt, Artificial Sequence
  Synthetic
caugccuguagucccagauacuc

SEQ ID NO: 286707 - RNA, 24 nt, Artificial Sequence
  Synthetic
acaugccuguagucccagauacuc

SEQ ID NO: 286708 - RNA, 18 nt, Artificial Sequence
  Synthetic
ucaguuccaaggauacuc

SEQ ID NO: 286709 - RNA, 19 nt, Artificial Sequence
  Synthetic
uucaguuccaaggauacuc

SEQ ID NO: 286710 - RNA, 20 nt, Artificial Sequence
  Synthetic
uuucaguuccaaggauacuc

SEQ ID NO: 286711 - RNA, 21 nt, Artificial Sequence
  Synthetic
uuuucaguuccaaggauacuc

SEQ ID NO: 286712 - RNA, 22 nt, Artificial Sequence
  Synthetic
uuuuucaguuccaaggauacuc

SEQ ID NO: 286713 - RNA, 23 nt, Artificial Sequence
  Synthetic
auuuuucaguuccaaggauacuc

SEQ ID NO: 286714 - RNA, 24 nt, Artificial Sequence
  Synthetic
cauuuuucaguuccaaggauacuc

SEQ ID NO: 286715 - RNA, 18 nt, Artificial Sequence
  Synthetic
ugccucgaaaugauacuc

SEQ ID NO: 286716 - RNA, 19 nt, Artificial Sequence
  Synthetic
uugccucgaaaugauacuc

SEQ ID NO: 286717 - RNA, 20 nt, Artificial Sequence
  Synthetic
uuugccucgaaaugauacuc

SEQ ID NO: 286718 - RNA, 21 nt, Artificial Sequence
  Synthetic
auuugccucgaaaugauacuc

SEQ ID NO: 286719 - RNA, 22 nt, Artificial Sequence
  Synthetic
aauuugccucgaaaugauacuc

SEQ ID NO: 286720 - RNA, 23 nt, Artificial Sequence
  Synthetic
gaauuugccucgaaaugauacuc

SEQ ID NO: 286721 - RNA, 24 nt, Artificial Sequence
  Synthetic
agaauuugccucgaaaugauacuc

SEQ ID NO: 286722 - RNA, 18 nt, Artificial Sequence
  Synthetic
ugaagacuccauauacuc

SEQ ID NO: 286723 - RNA, 19 nt, Artificial Sequence
  Synthetic
augaagacuccauauacuc

SEQ ID NO: 286724 - RNA, 20 nt, Artificial Sequence
  Synthetic
aaugaagacuccauauacuc

SEQ ID NO: 286725 - RNA, 21 nt, Artificial Sequence
  Synthetic
gaaugaagacuccauauacuc

SEQ ID NO: 286726 - RNA, 22 nt, Artificial Sequence
  Synthetic
ugaaugaagacuccauauacuc

SEQ ID NO: 286727 - RNA, 23 nt, Artificial Sequence
  Synthetic
augaaugaagacuccauauacuc

SEQ ID NO: 286728 - RNA, 24 nt, Artificial Sequence
  Synthetic
uaugaaugaagacuccauauacuc

SEQ ID NO: 286729 - RNA, 18 nt, Artificial Sequence
  Synthetic
ugagcaccuccuauacuc

SEQ ID NO: 286730 - RNA, 19 nt, Artificial Sequence
  Synthetic
uugagcaccuccuauacuc

SEQ ID NO: 286731 - RNA, 20 nt, Artificial Sequence
  Synthetic
auugagcaccuccuauacuc

SEQ ID NO: 286732 - RNA, 21 nt, Artificial Sequence
  Synthetic
aauugagcaccuccuauacuc

SEQ ID NO: 286733 - RNA, 22 nt, Artificial Sequence
  Synthetic
caauugagcaccuccuauacuc

SEQ ID NO: 286734 - RNA, 23 nt, Artificial Sequence
  Synthetic
ucaauugagcaccuccuauacuc

SEQ ID NO: 286735 - RNA, 24 nt, Artificial Sequence
  Synthetic
aucaauugagcaccuccuauacuc

SEQ ID NO: 286736 - RNA, 18 nt, Artificial Sequence
  Synthetic
agcucaaauguuauacuc

SEQ ID NO: 286737 - RNA, 19 nt, Artificial Sequence
  Synthetic
cagcucaaauguuauacuc

SEQ ID NO: 286738 - RNA, 20 nt, Artificial Sequence
  Synthetic
ucagcucaaauguuauacuc

SEQ ID NO: 286739 - RNA, 21 nt, Artificial Sequence
  Synthetic
cucagcucaaauguuauacuc

SEQ ID NO: 286740 - RNA, 22 nt, Artificial Sequence
  Synthetic
ucucagcucaaauguuauacuc

SEQ ID NO: 286741 - RNA, 23 nt, Artificial Sequence
  Synthetic
gucucagcucaaauguuauacuc

SEQ ID NO: 286742 - RNA, 24 nt, Artificial Sequence
  Synthetic
ggucucagcucaaauguuauacuc

SEQ ID NO: 286743 - RNA, 18 nt, Artificial Sequence
  Synthetic
cuauaaucccaacuacuc

SEQ ID NO: 286744 - RNA, 19 nt, Artificial Sequence
  Synthetic
ccuauaaucccaacuacuc

SEQ ID NO: 286745 - RNA, 20 nt, Artificial Sequence
  Synthetic
accuauaaucccaacuacuc

SEQ ID NO: 286746 - RNA, 21 nt, Artificial Sequence
  Synthetic
caccuauaaucccaacuacuc

SEQ ID NO: 286747 - RNA, 22 nt, Artificial Sequence
  Synthetic
acaccuauaaucccaacuacuc

SEQ ID NO: 286748 - RNA, 23 nt, Artificial Sequence
  Synthetic
cacaccuauaaucccaacuacuc

SEQ ID NO: 286749 - RNA, 24 nt, Artificial Sequence
  Synthetic
acacaccuauaaucccaacuacuc

SEQ ID NO: 286750 - RNA, 18 nt, Artificial Sequence
  Synthetic
cuguaaucccaacuacuc

SEQ ID NO: 286751 - RNA, 19 nt, Artificial Sequence
  Synthetic
ccuguaaucccaacuacuc

SEQ ID NO: 286752 - RNA, 20 nt, Artificial Sequence
  Synthetic
gccuguaaucccaacuacuc

SEQ ID NO: 286753 - RNA, 21 nt, Artificial Sequence
  Synthetic
cgccuguaaucccaacuacuc

SEQ ID NO: 286754 - RNA, 22 nt, Artificial Sequence
  Synthetic
acgccuguaaucccaacuacuc

SEQ ID NO: 286755 - RNA, 23 nt, Artificial Sequence
  Synthetic
cacgccuguaaucccaacuacuc

SEQ ID NO: 286756 - RNA, 24 nt, Artificial Sequence
  Synthetic
acacgccuguaaucccaacuacuc

SEQ ID NO: 286757 - RNA, 18 nt, Artificial Sequence
  Synthetic
ccuguagucccacuacuc

SEQ ID NO: 286758 - RNA, 19 nt, Artificial Sequence
  Synthetic
gccuguagucccacuacuc

SEQ ID NO: 286759 - RNA, 20 nt, Artificial Sequence
  Synthetic
cgccuguagucccacuacuc

SEQ ID NO: 286760 - RNA, 21 nt, Artificial Sequence
  Synthetic
gcgccuguagucccacuacuc

SEQ ID NO: 286761 - RNA, 22 nt, Artificial Sequence
  Synthetic
ggcgccuguagucccacuacuc

SEQ ID NO: 286762 - RNA, 23 nt, Artificial Sequence
  Synthetic
gggcgccuguagucccacuacuc

SEQ ID NO: 286763 - RNA, 24 nt, Artificial Sequence
  Synthetic
ugggcgccuguagucccacuacuc

SEQ ID NO: 286764 - RNA, 18 nt, Artificial Sequence
  Synthetic
uuucuaaguagacuacuc

SEQ ID NO: 286765 - RNA, 19 nt, Artificial Sequence
  Synthetic
auuucuaaguagacuacuc

SEQ ID NO: 286766 - RNA, 20 nt, Artificial Sequence
  Synthetic
uauuucuaaguagacuacuc

SEQ ID NO: 286767 - RNA, 21 nt, Artificial Sequence
  Synthetic
uuauuucuaaguagacuacuc

SEQ ID NO: 286768 - RNA, 22 nt, Artificial Sequence
  Synthetic
auuauuucuaaguagacuacuc

SEQ ID NO: 286769 - RNA, 23 nt, Artificial Sequence
  Synthetic
gauuauuucuaaguagacuacuc

SEQ ID NO: 286770 - RNA, 24 nt, Artificial Sequence
  Synthetic
ugauuauuucuaaguagacuacuc

SEQ ID NO: 286771 - RNA, 18 nt, Artificial Sequence
  Synthetic
uucaaacauugacuacuc

SEQ ID NO: 286772 - RNA, 19 nt, Artificial Sequence
  Synthetic
uuucaaacauugacuacuc

SEQ ID NO: 286773 - RNA, 20 nt, Artificial Sequence
  Synthetic
guuucaaacauugacuacuc

SEQ ID NO: 286774 - RNA, 21 nt, Artificial Sequence
  Synthetic
gguuucaaacauugacuacuc

SEQ ID NO: 286775 - RNA, 22 nt, Artificial Sequence
  Synthetic
agguuucaaacauugacuacuc

SEQ ID NO: 286776 - RNA, 23 nt, Artificial Sequence
  Synthetic
gagguuucaaacauugacuacuc

SEQ ID NO: 286777 - RNA, 24 nt, Artificial Sequence
  Synthetic
ggagguuucaaacauugacuacuc

SEQ ID NO: 286778 - RNA, 18 nt, Artificial Sequence
  Synthetic
cuguaaccccagcuacuc

SEQ ID NO: 286779 - RNA, 19 nt, Artificial Sequence
  Synthetic
ccuguaaccccagcuacuc

SEQ ID NO: 286780 - RNA, 20 nt, Artificial Sequence
  Synthetic
gccuguaaccccagcuacuc

SEQ ID NO: 286781 - RNA, 21 nt, Artificial Sequence
  Synthetic
ugccuguaaccccagcuacuc

SEQ ID NO: 286782 - RNA, 22 nt, Artificial Sequence
  Synthetic
augccuguaaccccagcuacuc

SEQ ID NO: 286783 - RNA, 23 nt, Artificial Sequence
  Synthetic
caugccuguaaccccagcuacuc

SEQ ID NO: 286784 - RNA, 24 nt, Artificial Sequence
  Synthetic
gcaugccuguaaccccagcuacuc

SEQ ID NO: 286785 - RNA, 18 nt, Artificial Sequence
  Synthetic
cuguagccccagcuacuc

SEQ ID NO: 286786 - RNA, 19 nt, Artificial Sequence
  Synthetic
ccuguagccccagcuacuc

SEQ ID NO: 286787 - RNA, 20 nt, Artificial Sequence
  Synthetic
cccuguagccccagcuacuc

SEQ ID NO: 286788 - RNA, 21 nt, Artificial Sequence
  Synthetic
ccccuguagccccagcuacuc

SEQ ID NO: 286789 - RNA, 22 nt, Artificial Sequence
  Synthetic
gccccuguagccccagcuacuc

SEQ ID NO: 286790 - RNA, 23 nt, Artificial Sequence
  Synthetic
ugccccuguagccccagcuacuc

SEQ ID NO: 286791 - RNA, 24 nt, Artificial Sequence
  Synthetic
gugccccuguagccccagcuacuc

SEQ ID NO: 286792 - RNA, 20 nt, Artificial Sequence
  Synthetic
gccuguagccccagcuacuc

SEQ ID NO: 286793 - RNA, 21 nt, Artificial Sequence
  Synthetic
ugccuguagccccagcuacuc

SEQ ID NO: 286794 - RNA, 22 nt, Artificial Sequence
  Synthetic
augccuguagccccagcuacuc

SEQ ID NO: 286795 - RNA, 23 nt, Artificial Sequence
  Synthetic
caugccuguagccccagcuacuc

SEQ ID NO: 286796 - RNA, 24 nt, Artificial Sequence
  Synthetic
gcaugccuguagccccagcuacuc

SEQ ID NO: 286797 - RNA, 18 nt, Artificial Sequence
  Synthetic
cucuaaucccagcuacuc

SEQ ID NO: 286798 - RNA, 19 nt, Artificial Sequence
  Synthetic
ccucuaaucccagcuacuc

SEQ ID NO: 286799 - RNA, 20 nt, Artificial Sequence
  Synthetic
gccucuaaucccagcuacuc

SEQ ID NO: 286800 - RNA, 21 nt, Artificial Sequence
  Synthetic
ugccucuaaucccagcuacuc

SEQ ID NO: 286801 - RNA, 22 nt, Artificial Sequence
  Synthetic
gugccucuaaucccagcuacuc

SEQ ID NO: 286802 - RNA, 23 nt, Artificial Sequence
  Synthetic
agugccucuaaucccagcuacuc

SEQ ID NO: 286803 - RNA, 24 nt, Artificial Sequence
  Synthetic
gagugccucuaaucccagcuacuc

SEQ ID NO: 286804 - RNA, 21 nt, Artificial Sequence
  Synthetic
cgccuguaaucccagcuacuc

SEQ ID NO: 286805 - RNA, 22 nt, Artificial Sequence
  Synthetic
gcgccuguaaucccagcuacuc

SEQ ID NO: 286806 - RNA, 23 nt, Artificial Sequence
  Synthetic
ggcgccuguaaucccagcuacuc

SEQ ID NO: 286807 - RNA, 24 nt, Artificial Sequence
  Synthetic
gggcgccuguaaucccagcuacuc

SEQ ID NO: 286808 - RNA, 21 nt, Artificial Sequence
  Synthetic
ugccuguaaucccagcuacuc

SEQ ID NO: 286809 - RNA, 22 nt, Artificial Sequence
  Synthetic
gugccuguaaucccagcuacuc

SEQ ID NO: 286810 - RNA, 23 nt, Artificial Sequence
  Synthetic
ggugccuguaaucccagcuacuc

SEQ ID NO: 286811 - RNA, 24 nt, Artificial Sequence
  Synthetic
aggugccuguaaucccagcuacuc

SEQ ID NO: 286812 - RNA, 18 nt, Artificial Sequence
  Synthetic
uuguaaucccagcuacuc

SEQ ID NO: 286813 - RNA, 19 nt, Artificial Sequence
  Synthetic
cuuguaaucccagcuacuc

SEQ ID NO: 286814 - RNA, 20 nt, Artificial Sequence
  Synthetic
gcuuguaaucccagcuacuc

SEQ ID NO: 286815 - RNA, 21 nt, Artificial Sequence
  Synthetic
ugcuuguaaucccagcuacuc

SEQ ID NO: 286816 - RNA, 22 nt, Artificial Sequence
  Synthetic
augcuuguaaucccagcuacuc

SEQ ID NO: 286817 - RNA, 23 nt, Artificial Sequence
  Synthetic
caugcuuguaaucccagcuacuc

SEQ ID NO: 286818 - RNA, 24 nt, Artificial Sequence
  Synthetic
gcaugcuuguaaucccagcuacuc

SEQ ID NO: 286819 - RNA, 18 nt, Artificial Sequence
  Synthetic
ugauagucccagcuacuc

SEQ ID NO: 286820 - RNA, 19 nt, Artificial Sequence
  Synthetic
cugauagucccagcuacuc

SEQ ID NO: 286821 - RNA, 20 nt, Artificial Sequence
  Synthetic
gcugauagucccagcuacuc

SEQ ID NO: 286822 - RNA, 21 nt, Artificial Sequence
  Synthetic
ugcugauagucccagcuacuc

SEQ ID NO: 286823 - RNA, 22 nt, Artificial Sequence
  Synthetic
uugcugauagucccagcuacuc

SEQ ID NO: 286824 - RNA, 23 nt, Artificial Sequence
  Synthetic
cuugcugauagucccagcuacuc

SEQ ID NO: 286825 - RNA, 24 nt, Artificial Sequence
  Synthetic
gcuugcugauagucccagcuacuc

SEQ ID NO: 286826 - RNA, 18 nt, Artificial Sequence
  Synthetic
cuauagucccagcuacuc

SEQ ID NO: 286827 - RNA, 19 nt, Artificial Sequence
  Synthetic
ccuauagucccagcuacuc

SEQ ID NO: 286828 - RNA, 20 nt, Artificial Sequence
  Synthetic
gccuauagucccagcuacuc

SEQ ID NO: 286829 - RNA, 21 nt, Artificial Sequence
  Synthetic
cgccuauagucccagcuacuc

SEQ ID NO: 286830 - RNA, 22 nt, Artificial Sequence
  Synthetic
gcgccuauagucccagcuacuc

SEQ ID NO: 286831 - RNA, 23 nt, Artificial Sequence
  Synthetic
ggcgccuauagucccagcuacuc

SEQ ID NO: 286832 - RNA, 24 nt, Artificial Sequence
  Synthetic
gggcgccuauagucccagcuacuc

SEQ ID NO: 286833 - RNA, 18 nt, Artificial Sequence
  Synthetic
cgguagucccagcuacuc

SEQ ID NO: 286834 - RNA, 19 nt, Artificial Sequence
  Synthetic
ccgguagucccagcuacuc

SEQ ID NO: 286835 - RNA, 20 nt, Artificial Sequence
  Synthetic
gccgguagucccagcuacuc

SEQ ID NO: 286836 - RNA, 21 nt, Artificial Sequence
  Synthetic
ugccgguagucccagcuacuc

SEQ ID NO: 286837 - RNA, 22 nt, Artificial Sequence
  Synthetic
gugccgguagucccagcuacuc

SEQ ID NO: 286838 - RNA, 23 nt, Artificial Sequence
  Synthetic
ugugccgguagucccagcuacuc

SEQ ID NO: 286839 - RNA, 24 nt, Artificial Sequence
  Synthetic
augugccgguagucccagcuacuc

SEQ ID NO: 286840 - RNA, 18 nt, Artificial Sequence
  Synthetic
cuguagucccagcuacuc

SEQ ID NO: 286841 - RNA, 19 nt, Artificial Sequence
  Synthetic
ccuguagucccagcuacuc

SEQ ID NO: 286842 - RNA, 20 nt, Artificial Sequence
  Synthetic
accuguagucccagcuacuc

SEQ ID NO: 286843 - RNA, 21 nt, Artificial Sequence
  Synthetic
caccuguagucccagcuacuc

SEQ ID NO: 286844 - RNA, 22 nt, Artificial Sequence
  Synthetic
gcaccuguagucccagcuacuc

SEQ ID NO: 286845 - RNA, 23 nt, Artificial Sequence
  Synthetic
ggcaccuguagucccagcuacuc

SEQ ID NO: 286846 - RNA, 24 nt, Artificial Sequence
  Synthetic
aggcaccuguagucccagcuacuc

SEQ ID NO: 286847 - RNA, 21 nt, Artificial Sequence
  Synthetic
cgccuguagucccagcuacuc

SEQ ID NO: 286848 - RNA, 22 nt, Artificial Sequence
  Synthetic
acgccuguagucccagcuacuc

SEQ ID NO: 286849 - RNA, 23 nt, Artificial Sequence
  Synthetic
uacgccuguagucccagcuacuc

SEQ ID NO: 286850 - RNA, 24 nt, Artificial Sequence
  Synthetic
guacgccuguagucccagcuacuc

SEQ ID NO: 286851 - RNA, 22 nt, Artificial Sequence
  Synthetic
gcgccuguagucccagcuacuc

SEQ ID NO: 286852 - RNA, 23 nt, Artificial Sequence
  Synthetic
cgcgccuguagucccagcuacuc

SEQ ID NO: 286853 - RNA, 24 nt, Artificial Sequence
  Synthetic
acgcgccuguagucccagcuacuc

SEQ ID NO: 286854 - RNA, 23 nt, Artificial Sequence
  Synthetic
ggcgccuguagucccagcuacuc

SEQ ID NO: 286855 - RNA, 24 nt, Artificial Sequence
  Synthetic
aggcgccuguagucccagcuacuc

SEQ ID NO: 286856 - RNA, 21 nt, Artificial Sequence
  Synthetic
ugccuguagucccagcuacuc

SEQ ID NO: 286857 - RNA, 22 nt, Artificial Sequence
  Synthetic
gugccuguagucccagcuacuc

SEQ ID NO: 286858 - RNA, 23 nt, Artificial Sequence
  Synthetic
ggugccuguagucccagcuacuc

SEQ ID NO: 286859 - RNA, 24 nt, Artificial Sequence
  Synthetic
gggugccuguagucccagcuacuc

SEQ ID NO: 286860 - RNA, 23 nt, Artificial Sequence
  Synthetic
ugugccuguagucccagcuacuc

SEQ ID NO: 286861 - RNA, 24 nt, Artificial Sequence
  Synthetic
augugccuguagucccagcuacuc

SEQ ID NO: 286862 - RNA, 24 nt, Artificial Sequence
  Synthetic
gugugccuguagucccagcuacuc

SEQ ID NO: 286863 - RNA, 19 nt, Artificial Sequence
  Synthetic
ucuguagucccagcuacuc

SEQ ID NO: 286864 - RNA, 20 nt, Artificial Sequence
  Synthetic
aucuguagucccagcuacuc

SEQ ID NO: 286865 - RNA, 21 nt, Artificial Sequence
  Synthetic
caucuguagucccagcuacuc

SEQ ID NO: 286866 - RNA, 22 nt, Artificial Sequence
  Synthetic
gcaucuguagucccagcuacuc

SEQ ID NO: 286867 - RNA, 23 nt, Artificial Sequence
  Synthetic
ggcaucuguagucccagcuacuc

SEQ ID NO: 286868 - RNA, 24 nt, Artificial Sequence
  Synthetic
aggcaucuguagucccagcuacuc

SEQ ID NO: 286869 - RNA, 18 nt, Artificial Sequence
  Synthetic
uuguagucccagcuacuc

SEQ ID NO: 286870 - RNA, 19 nt, Artificial Sequence
  Synthetic
cuuguagucccagcuacuc

SEQ ID NO: 286871 - RNA, 20 nt, Artificial Sequence
  Synthetic
gcuuguagucccagcuacuc

SEQ ID NO: 286872 - RNA, 21 nt, Artificial Sequence
  Synthetic
cgcuuguagucccagcuacuc

SEQ ID NO: 286873 - RNA, 22 nt, Artificial Sequence
  Synthetic
gcgcuuguagucccagcuacuc

SEQ ID NO: 286874 - RNA, 23 nt, Artificial Sequence
  Synthetic
ugcgcuuguagucccagcuacuc

SEQ ID NO: 286875 - RNA, 24 nt, Artificial Sequence
  Synthetic
augcgcuuguagucccagcuacuc

SEQ ID NO: 286876 - RNA, 21 nt, Artificial Sequence
  Synthetic
ugccuguggucccagcuacuc

SEQ ID NO: 286877 - RNA, 22 nt, Artificial Sequence
  Synthetic
gugccuguggucccagcuacuc

SEQ ID NO: 286878 - RNA, 23 nt, Artificial Sequence
  Synthetic
ggugccuguggucccagcuacuc

SEQ ID NO: 286879 - RNA, 24 nt, Artificial Sequence
  Synthetic
gggugccuguggucccagcuacuc

SEQ ID NO: 286880 - RNA, 18 nt, Artificial Sequence
  Synthetic
cuguaaucucagcuacuc

SEQ ID NO: 286881 - RNA, 19 nt, Artificial Sequence
  Synthetic
ccuguaaucucagcuacuc

SEQ ID NO: 286882 - RNA, 20 nt, Artificial Sequence
  Synthetic
accuguaaucucagcuacuc

SEQ ID NO: 286883 - RNA, 22 nt, Artificial Sequence
  Synthetic
gcaccuguaaucucagcuacuc

SEQ ID NO: 286884 - RNA, 23 nt, Artificial Sequence
  Synthetic
cgcaccuguaaucucagcuacuc

SEQ ID NO: 286885 - RNA, 24 nt, Artificial Sequence
  Synthetic
acgcaccuguaaucucagcuacuc

SEQ ID NO: 286886 - RNA, 20 nt, Artificial Sequence
  Synthetic
gccuguaaucucagcuacuc

SEQ ID NO: 286887 - RNA, 21 nt, Artificial Sequence
  Synthetic
ugccuguaaucucagcuacuc

SEQ ID NO: 286888 - RNA, 22 nt, Artificial Sequence
  Synthetic
augccuguaaucucagcuacuc

SEQ ID NO: 286889 - RNA, 23 nt, Artificial Sequence
  Synthetic
caugccuguaaucucagcuacuc

SEQ ID NO: 286890 - RNA, 24 nt, Artificial Sequence
  Synthetic
gcaugccuguaaucucagcuacuc

SEQ ID NO: 286891 - RNA, 18 nt, Artificial Sequence
  Synthetic
cgguggucucagcuacuc

SEQ ID NO: 286892 - RNA, 19 nt, Artificial Sequence
  Synthetic
ccgguggucucagcuacuc

SEQ ID NO: 286893 - RNA, 20 nt, Artificial Sequence
  Synthetic
accgguggucucagcuacuc

SEQ ID NO: 286894 - RNA, 21 nt, Artificial Sequence
  Synthetic
caccgguggucucagcuacuc

SEQ ID NO: 286895 - RNA, 22 nt, Artificial Sequence
  Synthetic
gcaccgguggucucagcuacuc

SEQ ID NO: 286896 - RNA, 23 nt, Artificial Sequence
  Synthetic
ugcaccgguggucucagcuacuc

SEQ ID NO: 286897 - RNA, 24 nt, Artificial Sequence
  Synthetic
augcaccgguggucucagcuacuc

SEQ ID NO: 286898 - RNA, 18 nt, Artificial Sequence
  Synthetic
aguacugaguagcuacuc

SEQ ID NO: 286899 - RNA, 19 nt, Artificial Sequence
  Synthetic
uaguacugaguagcuacuc

SEQ ID NO: 286900 - RNA, 20 nt, Artificial Sequence
  Synthetic
guaguacugaguagcuacuc

SEQ ID NO: 286901 - RNA, 21 nt, Artificial Sequence
  Synthetic
aguaguacugaguagcuacuc

SEQ ID NO: 286902 - RNA, 22 nt, Artificial Sequence
  Synthetic
uaguaguacugaguagcuacuc

SEQ ID NO: 286903 - RNA, 23 nt, Artificial Sequence
  Synthetic
guaguaguacugaguagcuacuc

SEQ ID NO: 286904 - RNA, 24 nt, Artificial Sequence
  Synthetic
aguaguaguacugaguagcuacuc

SEQ ID NO: 286905 - RNA, 18 nt, Artificial Sequence
  Synthetic
uuguagccuuagcuacuc

SEQ ID NO: 286906 - RNA, 19 nt, Artificial Sequence
  Synthetic
cuuguagccuuagcuacuc

SEQ ID NO: 286907 - RNA, 20 nt, Artificial Sequence
  Synthetic
gcuuguagccuuagcuacuc

SEQ ID NO: 286908 - RNA, 21 nt, Artificial Sequence
  Synthetic
ggcuuguagccuuagcuacuc

SEQ ID NO: 286909 - RNA, 22 nt, Artificial Sequence
  Synthetic
gggcuuguagccuuagcuacuc

SEQ ID NO: 286910 - RNA, 23 nt, Artificial Sequence
  Synthetic
ugggcuuguagccuuagcuacuc

SEQ ID NO: 286911 - RNA, 24 nt, Artificial Sequence
  Synthetic
gugggcuuguagccuuagcuacuc

SEQ ID NO: 286912 - RNA, 18 nt, Artificial Sequence
  Synthetic
acuggaugugggcuacuc

SEQ ID NO: 286913 - RNA, 19 nt, Artificial Sequence
  Synthetic
cacuggaugugggcuacuc

SEQ ID NO: 286914 - RNA, 20 nt, Artificial Sequence
  Synthetic
gcacuggaugugggcuacuc

SEQ ID NO: 286915 - RNA, 21 nt, Artificial Sequence
  Synthetic
ugcacuggaugugggcuacuc

SEQ ID NO: 286916 - RNA, 22 nt, Artificial Sequence
  Synthetic
augcacuggaugugggcuacuc

SEQ ID NO: 286917 - RNA, 23 nt, Artificial Sequence
  Synthetic
caugcacuggaugugggcuacuc

SEQ ID NO: 286918 - RNA, 24 nt, Artificial Sequence
  Synthetic
ucaugcacuggaugugggcuacuc

SEQ ID NO: 286919 - RNA, 18 nt, Artificial Sequence
  Synthetic
cuguaguuccugcuacuc

SEQ ID NO: 286920 - RNA, 19 nt, Artificial Sequence
  Synthetic
ccuguaguuccugcuacuc

SEQ ID NO: 286921 - RNA, 20 nt, Artificial Sequence
  Synthetic
gccuguaguuccugcuacuc

SEQ ID NO: 286922 - RNA, 21 nt, Artificial Sequence
  Synthetic
ugccuguaguuccugcuacuc

SEQ ID NO: 286923 - RNA, 22 nt, Artificial Sequence
  Synthetic
gugccuguaguuccugcuacuc

SEQ ID NO: 286924 - RNA, 23 nt, Artificial Sequence
  Synthetic
cgugccuguaguuccugcuacuc

SEQ ID NO: 286925 - RNA, 24 nt, Artificial Sequence
  Synthetic
acgugccuguaguuccugcuacuc

SEQ ID NO: 286926 - RNA, 18 nt, Artificial Sequence
  Synthetic
cuguagucccaucuacuc

SEQ ID NO: 286927 - RNA, 19 nt, Artificial Sequence
  Synthetic
ccuguagucccaucuacuc

SEQ ID NO: 286928 - RNA, 20 nt, Artificial Sequence
  Synthetic
gccuguagucccaucuacuc

SEQ ID NO: 286929 - RNA, 21 nt, Artificial Sequence
  Synthetic
ugccuguagucccaucuacuc

SEQ ID NO: 286930 - RNA, 22 nt, Artificial Sequence
  Synthetic
gugccuguagucccaucuacuc

SEQ ID NO: 286931 - RNA, 23 nt, Artificial Sequence
  Synthetic
cgugccuguagucccaucuacuc

SEQ ID NO: 286932 - RNA, 24 nt, Artificial Sequence
  Synthetic
gcgugccuguagucccaucuacuc

SEQ ID NO: 286933 - RNA, 18 nt, Artificial Sequence
  Synthetic
cagucaccuuaucuacuc

SEQ ID NO: 286934 - RNA, 19 nt, Artificial Sequence
  Synthetic
ucagucaccuuaucuacuc

SEQ ID NO: 286935 - RNA, 20 nt, Artificial Sequence
  Synthetic
uucagucaccuuaucuacuc

SEQ ID NO: 286936 - RNA, 21 nt, Artificial Sequence
  Synthetic
uuucagucaccuuaucuacuc

SEQ ID NO: 286937 - RNA, 22 nt, Artificial Sequence
  Synthetic
auuucagucaccuuaucuacuc

SEQ ID NO: 286938 - RNA, 23 nt, Artificial Sequence
  Synthetic
gauuucagucaccuuaucuacuc

SEQ ID NO: 286939 - RNA, 24 nt, Artificial Sequence
  Synthetic
ugauuucagucaccuuaucuacuc

SEQ ID NO: 286940 - RNA, 18 nt, Artificial Sequence
  Synthetic
gcuuuaccagcucuacuc

SEQ ID NO: 286941 - RNA, 19 nt, Artificial Sequence
  Synthetic
ggcuuuaccagcucuacuc

SEQ ID NO: 286942 - RNA, 20 nt, Artificial Sequence
  Synthetic
cggcuuuaccagcucuacuc

SEQ ID NO: 286943 - RNA, 21 nt, Artificial Sequence
  Synthetic
ucggcuuuaccagcucuacuc

SEQ ID NO: 286944 - RNA, 22 nt, Artificial Sequence
  Synthetic
uucggcuuuaccagcucuacuc

SEQ ID NO: 286945 - RNA, 23 nt, Artificial Sequence
  Synthetic
cuucggcuuuaccagcucuacuc

SEQ ID NO: 286946 - RNA, 24 nt, Artificial Sequence
  Synthetic
ucuucggcuuuaccagcucuacuc

SEQ ID NO: 286947 - RNA, 18 nt, Artificial Sequence
  Synthetic
uuucugcagggucuacuc

SEQ ID NO: 286948 - RNA, 19 nt, Artificial Sequence
  Synthetic
auuucugcagggucuacuc

SEQ ID NO: 286949 - RNA, 20 nt, Artificial Sequence
  Synthetic
uauuucugcagggucuacuc

SEQ ID NO: 286950 - RNA, 21 nt, Artificial Sequence
  Synthetic
auauuucugcagggucuacuc

SEQ ID NO: 286951 - RNA, 22 nt, Artificial Sequence
  Synthetic
uauauuucugcagggucuacuc

SEQ ID NO: 286952 - RNA, 23 nt, Artificial Sequence
  Synthetic
auauauuucugcagggucuacuc

SEQ ID NO: 286953 - RNA, 24 nt, Artificial Sequence
  Synthetic
uauauauuucugcagggucuacuc

SEQ ID NO: 286954 - RNA, 18 nt, Artificial Sequence
  Synthetic
guucaucugauucuacuc

SEQ ID NO: 286955 - RNA, 19 nt, Artificial Sequence
  Synthetic
aguucaucugauucuacuc

SEQ ID NO: 286956 - RNA, 20 nt, Artificial Sequence
  Synthetic
gaguucaucugauucuacuc

SEQ ID NO: 286957 - RNA, 21 nt, Artificial Sequence
  Synthetic
ugaguucaucugauucuacuc

SEQ ID NO: 286958 - RNA, 22 nt, Artificial Sequence
  Synthetic
augaguucaucugauucuacuc

SEQ ID NO: 286959 - RNA, 23 nt, Artificial Sequence
  Synthetic
aaugaguucaucugauucuacuc

SEQ ID NO: 286960 - RNA, 24 nt, Artificial Sequence
  Synthetic
uaaugaguucaucugauucuacuc

SEQ ID NO: 286961 - RNA, 18 nt, Artificial Sequence
  Synthetic
guagaauuugcaguacuc

SEQ ID NO: 286962 - RNA, 19 nt, Artificial Sequence
  Synthetic
aguagaauuugcaguacuc

SEQ ID NO: 286963 - RNA, 20 nt, Artificial Sequence
  Synthetic
aaguagaauuugcaguacuc

SEQ ID NO: 286964 - RNA, 21 nt, Artificial Sequence
  Synthetic
gaaguagaauuugcaguacuc

SEQ ID NO: 286965 - RNA, 22 nt, Artificial Sequence
  Synthetic
ugaaguagaauuugcaguacuc

SEQ ID NO: 286966 - RNA, 23 nt, Artificial Sequence
  Synthetic
cugaaguagaauuugcaguacuc

SEQ ID NO: 286967 - RNA, 24 nt, Artificial Sequence
  Synthetic
ucugaaguagaauuugcaguacuc

SEQ ID NO: 286968 - RNA, 18 nt, Artificial Sequence
  Synthetic
ugggauacuacuguacuc

SEQ ID NO: 286969 - RNA, 19 nt, Artificial Sequence
  Synthetic
uugggauacuacuguacuc

SEQ ID NO: 286970 - RNA, 20 nt, Artificial Sequence
  Synthetic
cuugggauacuacuguacuc

SEQ ID NO: 286971 - RNA, 21 nt, Artificial Sequence
  Synthetic
ucuugggauacuacuguacuc

SEQ ID NO: 286972 - RNA, 22 nt, Artificial Sequence
  Synthetic
cucuugggauacuacuguacuc

SEQ ID NO: 286973 - RNA, 23 nt, Artificial Sequence
  Synthetic
ucucuugggauacuacuguacuc

SEQ ID NO: 286974 - RNA, 24 nt, Artificial Sequence
  Synthetic
cucucuugggauacuacuguacuc

SEQ ID NO: 286975 - RNA, 18 nt, Artificial Sequence
  Synthetic
gauuuuaauuuuguacuc

SEQ ID NO: 286976 - RNA, 19 nt, Artificial Sequence
  Synthetic
ggauuuuaauuuuguacuc

SEQ ID NO: 286977 - RNA, 20 nt, Artificial Sequence
  Synthetic
aggauuuuaauuuuguacuc

SEQ ID NO: 286978 - RNA, 21 nt, Artificial Sequence
  Synthetic
uaggauuuuaauuuuguacuc

SEQ ID NO: 286979 - RNA, 22 nt, Artificial Sequence
  Synthetic
guaggauuuuaauuuuguacuc

SEQ ID NO: 286980 - RNA, 23 nt, Artificial Sequence
  Synthetic
uguaggauuuuaauuuuguacuc

SEQ ID NO: 286981 - RNA, 24 nt, Artificial Sequence
  Synthetic
uuguaggauuuuaauuuuguacuc

SEQ ID NO: 286982 - RNA, 18 nt, Artificial Sequence
  Synthetic
ggguuugugaaauuacuc

SEQ ID NO: 286983 - RNA, 19 nt, Artificial Sequence
  Synthetic
gggguuugugaaauuacuc

SEQ ID NO: 286984 - RNA, 20 nt, Artificial Sequence
  Synthetic
agggguuugugaaauuacuc

SEQ ID NO: 286985 - RNA, 21 nt, Artificial Sequence
  Synthetic
aagggguuugugaaauuacuc

SEQ ID NO: 286986 - RNA, 22 nt, Artificial Sequence
  Synthetic
uaagggguuugugaaauuacuc

SEQ ID NO: 286987 - RNA, 23 nt, Artificial Sequence
  Synthetic
auaagggguuugugaaauuacuc

SEQ ID NO: 286988 - RNA, 24 nt, Artificial Sequence
  Synthetic
uauaagggguuugugaaauuacuc

SEQ ID NO: 286989 - RNA, 18 nt, Artificial Sequence
  Synthetic
uacaaguuggaauuacuc

SEQ ID NO: 286990 - RNA, 19 nt, Artificial Sequence
  Synthetic
cuacaaguuggaauuacuc

SEQ ID NO: 286991 - RNA, 20 nt, Artificial Sequence
  Synthetic
gcuacaaguuggaauuacuc

SEQ ID NO: 286992 - RNA, 21 nt, Artificial Sequence
  Synthetic
agcuacaaguuggaauuacuc

SEQ ID NO: 286993 - RNA, 22 nt, Artificial Sequence
  Synthetic
uagcuacaaguuggaauuacuc

SEQ ID NO: 286994 - RNA, 23 nt, Artificial Sequence
  Synthetic
uuagcuacaaguuggaauuacuc

SEQ ID NO: 286995 - RNA, 24 nt, Artificial Sequence
  Synthetic
cuuagcuacaaguuggaauuacuc

SEQ ID NO: 286996 - RNA, 18 nt, Artificial Sequence
  Synthetic
gaagaaugaguauuacuc

SEQ ID NO: 286997 - RNA, 19 nt, Artificial Sequence
  Synthetic
ugaagaaugaguauuacuc

SEQ ID NO: 286998 - RNA, 20 nt, Artificial Sequence
  Synthetic
augaagaaugaguauuacuc

SEQ ID NO: 286999 - RNA, 21 nt, Artificial Sequence
  Synthetic
gaugaagaaugaguauuacuc

SEQ ID NO: 287000 - RNA, 22 nt, Artificial Sequence
  Synthetic
agaugaagaaugaguauuacuc

SEQ ID NO: 287001 - RNA, 23 nt, Artificial Sequence
  Synthetic
cagaugaagaaugaguauuacuc

SEQ ID NO: 287002 - RNA, 24 nt, Artificial Sequence
  Synthetic
gcagaugaagaaugaguauuacuc

SEQ ID NO: 287003 - RNA, 18 nt, Artificial Sequence
  Synthetic
augccuuaaagguuacuc

SEQ ID NO: 287004 - RNA, 19 nt, Artificial Sequence
  Synthetic
aaugccuuaaagguuacuc

SEQ ID NO: 287005 - RNA, 20 nt, Artificial Sequence
  Synthetic
uaaugccuuaaagguuacuc

SEQ ID NO: 287006 - RNA, 21 nt, Artificial Sequence
  Synthetic
auaaugccuuaaagguuacuc

SEQ ID NO: 287007 - RNA, 22 nt, Artificial Sequence
  Synthetic
aauaaugccuuaaagguuacuc

SEQ ID NO: 287008 - RNA, 23 nt, Artificial Sequence
  Synthetic
aaauaaugccuuaaagguuacuc

SEQ ID NO: 287009 - RNA, 24 nt, Artificial Sequence
  Synthetic
caaauaaugccuuaaagguuacuc

SEQ ID NO: 287010 - RNA, 18 nt, Artificial Sequence
  Synthetic
gcuuaucccauguuacuc

SEQ ID NO: 287011 - RNA, 19 nt, Artificial Sequence
  Synthetic
agcuuaucccauguuacuc

SEQ ID NO: 287012 - RNA, 20 nt, Artificial Sequence
  Synthetic
uagcuuaucccauguuacuc

SEQ ID NO: 287013 - RNA, 21 nt, Artificial Sequence
  Synthetic
uuagcuuaucccauguuacuc

SEQ ID NO: 287014 - RNA, 22 nt, Artificial Sequence
  Synthetic
cuuagcuuaucccauguuacuc

SEQ ID NO: 287015 - RNA, 23 nt, Artificial Sequence
  Synthetic
ucuuagcuuaucccauguuacuc

SEQ ID NO: 287016 - RNA, 24 nt, Artificial Sequence
  Synthetic
gucuuagcuuaucccauguuacuc

SEQ ID NO: 287017 - RNA, 18 nt, Artificial Sequence
  Synthetic
gguuugugcaauuuacuc

SEQ ID NO: 287018 - RNA, 19 nt, Artificial Sequence
  Synthetic
ugguuugugcaauuuacuc

SEQ ID NO: 287019 - RNA, 20 nt, Artificial Sequence
  Synthetic
uugguuugugcaauuuacuc

SEQ ID NO: 287020 - RNA, 21 nt, Artificial Sequence
  Synthetic
cuugguuugugcaauuuacuc

SEQ ID NO: 287021 - RNA, 22 nt, Artificial Sequence
  Synthetic
gcuugguuugugcaauuuacuc

SEQ ID NO: 287022 - RNA, 23 nt, Artificial Sequence
  Synthetic
ugcuugguuugugcaauuuacuc

SEQ ID NO: 287023 - RNA, 24 nt, Artificial Sequence
  Synthetic
uugcuugguuugugcaauuuacuc

SEQ ID NO: 287024 - RNA, 18 nt, Artificial Sequence
  Synthetic
uucugaaugucuuuacuc

SEQ ID NO: 287025 - RNA, 19 nt, Artificial Sequence
  Synthetic
guucugaaugucuuuacuc

SEQ ID NO: 287026 - RNA, 20 nt, Artificial Sequence
  Synthetic
gguucugaaugucuuuacuc

SEQ ID NO: 287027 - RNA, 21 nt, Artificial Sequence
  Synthetic
ugguucugaaugucuuuacuc

SEQ ID NO: 287028 - RNA, 22 nt, Artificial Sequence
  Synthetic
uugguucugaaugucuuuacuc

SEQ ID NO: 287029 - RNA, 23 nt, Artificial Sequence
  Synthetic
cuugguucugaaugucuuuacuc

SEQ ID NO: 287030 - RNA, 24 nt, Artificial Sequence
  Synthetic
ccuugguucugaaugucuuuacuc

SEQ ID NO: 287031 - RNA, 18 nt, Artificial Sequence
  Synthetic
accugugggcuuuuacuc

SEQ ID NO: 287032 - RNA, 19 nt, Artificial Sequence
  Synthetic
aaccugugggcuuuuacuc

SEQ ID NO: 287033 - RNA, 20 nt, Artificial Sequence
  Synthetic
caaccugugggcuuuuacuc

SEQ ID NO: 287034 - RNA, 21 nt, Artificial Sequence
  Synthetic
ucaaccugugggcuuuuacuc

SEQ ID NO: 287035 - RNA, 22 nt, Artificial Sequence
  Synthetic
uucaaccugugggcuuuuacuc

SEQ ID NO: 287036 - RNA, 23 nt, Artificial Sequence
  Synthetic
cuucaaccugugggcuuuuacuc

SEQ ID NO: 287037 - RNA, 24 nt, Artificial Sequence
  Synthetic
acuucaaccugugggcuuuuacuc

SEQ ID NO: 287038 - RNA, 18 nt, Artificial Sequence
  Synthetic
auaaggggaaaaaaccuc

SEQ ID NO: 287039 - RNA, 19 nt, Artificial Sequence
  Synthetic
aauaaggggaaaaaaccuc

SEQ ID NO: 287040 - RNA, 20 nt, Artificial Sequence
  Synthetic
aaauaaggggaaaaaaccuc

SEQ ID NO: 287041 - RNA, 21 nt, Artificial Sequence
  Synthetic
aaaauaaggggaaaaaaccuc

SEQ ID NO: 287042 - RNA, 22 nt, Artificial Sequence
  Synthetic
aaaaauaaggggaaaaaaccuc

SEQ ID NO: 287043 - RNA, 23 nt, Artificial Sequence
  Synthetic
uaaaaauaaggggaaaaaaccuc

SEQ ID NO: 287044 - RNA, 24 nt, Artificial Sequence
  Synthetic
auaaaaauaaggggaaaaaaccuc

SEQ ID NO: 287045 - RNA, 18 nt, Artificial Sequence
  Synthetic
uugcacucacgaaaccuc

SEQ ID NO: 287046 - RNA, 19 nt, Artificial Sequence
  Synthetic
auugcacucacgaaaccuc

SEQ ID NO: 287047 - RNA, 20 nt, Artificial Sequence
  Synthetic
aauugcacucacgaaaccuc

SEQ ID NO: 287048 - RNA, 21 nt, Artificial Sequence
  Synthetic
caauugcacucacgaaaccuc

SEQ ID NO: 287049 - RNA, 22 nt, Artificial Sequence
  Synthetic
acaauugcacucacgaaaccuc

SEQ ID NO: 287050 - RNA, 23 nt, Artificial Sequence
  Synthetic
cacaauugcacucacgaaaccuc

SEQ ID NO: 287051 - RNA, 24 nt, Artificial Sequence
  Synthetic
ucacaauugcacucacgaaaccuc

SEQ ID NO: 287052 - RNA, 18 nt, Artificial Sequence
  Synthetic
cuaagaaugcccaaccuc

SEQ ID NO: 287053 - RNA, 19 nt, Artificial Sequence
  Synthetic
acuaagaaugcccaaccuc

SEQ ID NO: 287054 - RNA, 20 nt, Artificial Sequence
  Synthetic
gacuaagaaugcccaaccuc

SEQ ID NO: 287055 - RNA, 21 nt, Artificial Sequence
  Synthetic
ugacuaagaaugcccaaccuc

SEQ ID NO: 287056 - RNA, 22 nt, Artificial Sequence
  Synthetic
gugacuaagaaugcccaaccuc

SEQ ID NO: 287057 - RNA, 23 nt, Artificial Sequence
  Synthetic
ugugacuaagaaugcccaaccuc

SEQ ID NO: 287058 - RNA, 24 nt, Artificial Sequence
  Synthetic
cugugacuaagaaugcccaaccuc

SEQ ID NO: 287059 - RNA, 18 nt, Artificial Sequence
  Synthetic
gcgucaguguccaaccuc

SEQ ID NO: 287060 - RNA, 19 nt, Artificial Sequence
  Synthetic
agcgucaguguccaaccuc

SEQ ID NO: 287061 - RNA, 20 nt, Artificial Sequence
  Synthetic
cagcgucaguguccaaccuc

SEQ ID NO: 287062 - RNA, 21 nt, Artificial Sequence
  Synthetic
acagcgucaguguccaaccuc

SEQ ID NO: 287063 - RNA, 22 nt, Artificial Sequence
  Synthetic
aacagcgucaguguccaaccuc

SEQ ID NO: 287064 - RNA, 23 nt, Artificial Sequence
  Synthetic
uaacagcgucaguguccaaccuc

SEQ ID NO: 287065 - RNA, 24 nt, Artificial Sequence
  Synthetic
auaacagcgucaguguccaaccuc

SEQ ID NO: 287066 - RNA, 18 nt, Artificial Sequence
  Synthetic
agcuaaaucaagaaccuc

SEQ ID NO: 287067 - RNA, 19 nt, Artificial Sequence
  Synthetic
gagcuaaaucaagaaccuc

SEQ ID NO: 287068 - RNA, 20 nt, Artificial Sequence
  Synthetic
agagcuaaaucaagaaccuc

SEQ ID NO: 287069 - RNA, 21 nt, Artificial Sequence
  Synthetic
cagagcuaaaucaagaaccuc

SEQ ID NO: 287070 - RNA, 22 nt, Artificial Sequence
  Synthetic
gcagagcuaaaucaagaaccuc

SEQ ID NO: 287071 - RNA, 23 nt, Artificial Sequence
  Synthetic
agcagagcuaaaucaagaaccuc

SEQ ID NO: 287072 - RNA, 24 nt, Artificial Sequence
  Synthetic
uagcagagcuaaaucaagaaccuc

SEQ ID NO: 287073 - RNA, 18 nt, Artificial Sequence
  Synthetic
ucugaugucauacaccuc

SEQ ID NO: 287074 - RNA, 19 nt, Artificial Sequence
  Synthetic
uucugaugucauacaccuc

SEQ ID NO: 287075 - RNA, 20 nt, Artificial Sequence
  Synthetic
uuucugaugucauacaccuc

SEQ ID NO: 287076 - RNA, 21 nt, Artificial Sequence
  Synthetic
guuucugaugucauacaccuc

SEQ ID NO: 287077 - RNA, 22 nt, Artificial Sequence
  Synthetic
aguuucugaugucauacaccuc

SEQ ID NO: 287078 - RNA, 23 nt, Artificial Sequence
  Synthetic
caguuucugaugucauacaccuc

SEQ ID NO: 287079 - RNA, 24 nt, Artificial Sequence
  Synthetic
ccaguuucugaugucauacaccuc

SEQ ID NO: 287080 - RNA, 18 nt, Artificial Sequence
  Synthetic
cagugcaaauaccaccuc

SEQ ID NO: 287081 - RNA, 19 nt, Artificial Sequence
  Synthetic
ucagugcaaauaccaccuc

SEQ ID NO: 287082 - RNA, 20 nt, Artificial Sequence
  Synthetic
uucagugcaaauaccaccuc

SEQ ID NO: 287083 - RNA, 21 nt, Artificial Sequence
  Synthetic
auucagugcaaauaccaccuc

SEQ ID NO: 287084 - RNA, 22 nt, Artificial Sequence
  Synthetic
cauucagugcaaauaccaccuc

SEQ ID NO: 287085 - RNA, 23 nt, Artificial Sequence
  Synthetic
gcauucagugcaaauaccaccuc

SEQ ID NO: 287086 - RNA, 24 nt, Artificial Sequence
  Synthetic
agcauucagugcaaauaccaccuc

SEQ ID NO: 287087 - RNA, 18 nt, Artificial Sequence
  Synthetic
gaaccuugcuaccaccuc

SEQ ID NO: 287088 - RNA, 19 nt, Artificial Sequence
  Synthetic
ggaaccuugcuaccaccuc

SEQ ID NO: 287089 - RNA, 20 nt, Artificial Sequence
  Synthetic
uggaaccuugcuaccaccuc

SEQ ID NO: 287090 - RNA, 21 nt, Artificial Sequence
  Synthetic
guggaaccuugcuaccaccuc

SEQ ID NO: 287091 - RNA, 22 nt, Artificial Sequence
  Synthetic
uguggaaccuugcuaccaccuc

SEQ ID NO: 287092 - RNA, 23 nt, Artificial Sequence
  Synthetic
cuguggaaccuugcuaccaccuc

SEQ ID NO: 287093 - RNA, 24 nt, Artificial Sequence
  Synthetic
ucuguggaaccuugcuaccaccuc

SEQ ID NO: 287094 - RNA, 18 nt, Artificial Sequence
  Synthetic
ggaaacuauuaccaccuc

SEQ ID NO: 287095 - RNA, 19 nt, Artificial Sequence
  Synthetic
aggaaacuauuaccaccuc

SEQ ID NO: 287096 - RNA, 20 nt, Artificial Sequence
  Synthetic
caggaaacuauuaccaccuc

SEQ ID NO: 287097 - RNA, 21 nt, Artificial Sequence
  Synthetic
ucaggaaacuauuaccaccuc

SEQ ID NO: 287098 - RNA, 22 nt, Artificial Sequence
  Synthetic
uucaggaaacuauuaccaccuc

SEQ ID NO: 287099 - RNA, 23 nt, Artificial Sequence
  Synthetic
cuucaggaaacuauuaccaccuc

SEQ ID NO: 287100 - RNA, 24 nt, Artificial Sequence
  Synthetic
acuucaggaaacuauuaccaccuc

SEQ ID NO: 287101 - RNA, 21 nt, Artificial Sequence
  Synthetic
gcucacugcaaccuccaccuc

SEQ ID NO: 287102 - RNA, 22 nt, Artificial Sequence
  Synthetic
agcucacugcaaccuccaccuc

SEQ ID NO: 287103 - RNA, 23 nt, Artificial Sequence
  Synthetic
cagcucacugcaaccuccaccuc

SEQ ID NO: 287104 - RNA, 24 nt, Artificial Sequence
  Synthetic
acagcucacugcaaccuccaccuc

SEQ ID NO: 287105 - RNA, 18 nt, Artificial Sequence
  Synthetic
ucucuccaagaucaccuc

SEQ ID NO: 287106 - RNA, 19 nt, Artificial Sequence
  Synthetic
cucucuccaagaucaccuc

SEQ ID NO: 287107 - RNA, 20 nt, Artificial Sequence
  Synthetic
acucucuccaagaucaccuc

SEQ ID NO: 287108 - RNA, 21 nt, Artificial Sequence
  Synthetic
gacucucuccaagaucaccuc

SEQ ID NO: 287109 - RNA, 22 nt, Artificial Sequence
  Synthetic
ugacucucuccaagaucaccuc

SEQ ID NO: 287110 - RNA, 23 nt, Artificial Sequence
  Synthetic
uugacucucuccaagaucaccuc

SEQ ID NO: 287111 - RNA, 24 nt, Artificial Sequence
  Synthetic
auugacucucuccaagaucaccuc

SEQ ID NO: 287112 - RNA, 18 nt, Artificial Sequence
  Synthetic
ggccuguuucuucaccuc

SEQ ID NO: 287113 - RNA, 19 nt, Artificial Sequence
  Synthetic
gggccuguuucuucaccuc

SEQ ID NO: 287114 - RNA, 20 nt, Artificial Sequence
  Synthetic
ugggccuguuucuucaccuc

SEQ ID NO: 287115 - RNA, 21 nt, Artificial Sequence
  Synthetic
cugggccuguuucuucaccuc

SEQ ID NO: 287116 - RNA, 22 nt, Artificial Sequence
  Synthetic
ucugggccuguuucuucaccuc

SEQ ID NO: 287117 - RNA, 23 nt, Artificial Sequence
  Synthetic
cucugggccuguuucuucaccuc

SEQ ID NO: 287118 - RNA, 24 nt, Artificial Sequence
  Synthetic
acucugggccuguuucuucaccuc

SEQ ID NO: 287119 - RNA, 18 nt, Artificial Sequence
  Synthetic
aauuuaguaccagaccuc

SEQ ID NO: 287120 - RNA, 19 nt, Artificial Sequence
  Synthetic
uaauuuaguaccagaccuc

SEQ ID NO: 287121 - RNA, 20 nt, Artificial Sequence
  Synthetic
guaauuuaguaccagaccuc

SEQ ID NO: 287122 - RNA, 21 nt, Artificial Sequence
  Synthetic
aguaauuuaguaccagaccuc

SEQ ID NO: 287123 - RNA, 22 nt, Artificial Sequence
  Synthetic
gaguaauuuaguaccagaccuc

SEQ ID NO: 287124 - RNA, 23 nt, Artificial Sequence
  Synthetic
ugaguaauuuaguaccagaccuc

SEQ ID NO: 287125 - RNA, 24 nt, Artificial Sequence
  Synthetic
uugaguaauuuaguaccagaccuc

SEQ ID NO: 287126 - RNA, 18 nt, Artificial Sequence
  Synthetic
cccagacccccagaccuc

SEQ ID NO: 287127 - RNA, 19 nt, Artificial Sequence
  Synthetic
acccagacccccagaccuc

SEQ ID NO: 287128 - RNA, 20 nt, Artificial Sequence
  Synthetic
aacccagacccccagaccuc

SEQ ID NO: 287129 - RNA, 21 nt, Artificial Sequence
  Synthetic
aaacccagacccccagaccuc

SEQ ID NO: 287130 - RNA, 22 nt, Artificial Sequence
  Synthetic
uaaacccagacccccagaccuc

SEQ ID NO: 287131 - RNA, 23 nt, Artificial Sequence
  Synthetic
auaaacccagacccccagaccuc

SEQ ID NO: 287132 - RNA, 24 nt, Artificial Sequence
  Synthetic
cauaaacccagacccccagaccuc

SEQ ID NO: 287133 - RNA, 18 nt, Artificial Sequence
  Synthetic
auaaaaccaucagaccuc

SEQ ID NO: 287134 - RNA, 19 nt, Artificial Sequence
  Synthetic
uauaaaaccaucagaccuc

SEQ ID NO: 287135 - RNA, 20 nt, Artificial Sequence
  Synthetic
uuauaaaaccaucagaccuc

SEQ ID NO: 287136 - RNA, 21 nt, Artificial Sequence
  Synthetic
cuuauaaaaccaucagaccuc

SEQ ID NO: 287137 - RNA, 22 nt, Artificial Sequence
  Synthetic
ccuuauaaaaccaucagaccuc

SEQ ID NO: 287138 - RNA, 23 nt, Artificial Sequence
  Synthetic
cccuuauaaaaccaucagaccuc

SEQ ID NO: 287139 - RNA, 24 nt, Artificial Sequence
  Synthetic
ccccuuauaaaaccaucagaccuc

SEQ ID NO: 287140 - RNA, 18 nt, Artificial Sequence
  Synthetic
cauggcgcuagagaccuc

SEQ ID NO: 287141 - RNA, 19 nt, Artificial Sequence
  Synthetic
ccauggcgcuagagaccuc

SEQ ID NO: 287142 - RNA, 20 nt, Artificial Sequence
  Synthetic
gccauggcgcuagagaccuc

SEQ ID NO: 287143 - RNA, 21 nt, Artificial Sequence
  Synthetic
agccauggcgcuagagaccuc

SEQ ID NO: 287144 - RNA, 22 nt, Artificial Sequence
  Synthetic
gagccauggcgcuagagaccuc

SEQ ID NO: 287145 - RNA, 23 nt, Artificial Sequence
  Synthetic
agagccauggcgcuagagaccuc

SEQ ID NO: 287146 - RNA, 24 nt, Artificial Sequence
  Synthetic
uagagccauggcgcuagagaccuc

SEQ ID NO: 287147 - RNA, 18 nt, Artificial Sequence
  Synthetic
uuugugcuucuggaccuc

SEQ ID NO: 287148 - RNA, 19 nt, Artificial Sequence
  Synthetic
cuuugugcuucuggaccuc

SEQ ID NO: 287149 - RNA, 20 nt, Artificial Sequence
  Synthetic
gcuuugugcuucuggaccuc

SEQ ID NO: 287150 - RNA, 21 nt, Artificial Sequence
  Synthetic
ugcuuugugcuucuggaccuc

SEQ ID NO: 287151 - RNA, 22 nt, Artificial Sequence
  Synthetic
augcuuugugcuucuggaccuc

SEQ ID NO: 287152 - RNA, 23 nt, Artificial Sequence
  Synthetic
aaugcuuugugcuucuggaccuc

SEQ ID NO: 287153 - RNA, 24 nt, Artificial Sequence
  Synthetic
gaaugcuuugugcuucuggaccuc

SEQ ID NO: 287154 - RNA, 18 nt, Artificial Sequence
  Synthetic
aaaggcauucaugaccuc

SEQ ID NO: 287155 - RNA, 19 nt, Artificial Sequence
  Synthetic
uaaaggcauucaugaccuc

SEQ ID NO: 287156 - RNA, 20 nt, Artificial Sequence
  Synthetic
auaaaggcauucaugaccuc

SEQ ID NO: 287157 - RNA, 21 nt, Artificial Sequence
  Synthetic
uauaaaggcauucaugaccuc

SEQ ID NO: 287158 - RNA, 22 nt, Artificial Sequence
  Synthetic
uuauaaaggcauucaugaccuc

SEQ ID NO: 287159 - RNA, 23 nt, Artificial Sequence
  Synthetic
cuuauaaaggcauucaugaccuc

SEQ ID NO: 287160 - RNA, 24 nt, Artificial Sequence
  Synthetic
ucuuauaaaggcauucaugaccuc

SEQ ID NO: 287161 - RNA, 18 nt, Artificial Sequence
  Synthetic
gauuuuauucaauaccuc

SEQ ID NO: 287162 - RNA, 19 nt, Artificial Sequence
  Synthetic
agauuuuauucaauaccuc

SEQ ID NO: 287163 - RNA, 20 nt, Artificial Sequence
  Synthetic
cagauuuuauucaauaccuc

SEQ ID NO: 287164 - RNA, 21 nt, Artificial Sequence
  Synthetic
acagauuuuauucaauaccuc

SEQ ID NO: 287165 - RNA, 22 nt, Artificial Sequence
  Synthetic
aacagauuuuauucaauaccuc

SEQ ID NO: 287166 - RNA, 23 nt, Artificial Sequence
  Synthetic
aaacagauuuuauucaauaccuc

SEQ ID NO: 287167 - RNA, 24 nt, Artificial Sequence
  Synthetic
aaaacagauuuuauucaauaccuc

SEQ ID NO: 287168 - RNA, 18 nt, Artificial Sequence
  Synthetic
ccaaauugauaauaccuc

SEQ ID NO: 287169 - RNA, 19 nt, Artificial Sequence
  Synthetic
uccaaauugauaauaccuc

SEQ ID NO: 287170 - RNA, 20 nt, Artificial Sequence
  Synthetic
cuccaaauugauaauaccuc

SEQ ID NO: 287171 - RNA, 21 nt, Artificial Sequence
  Synthetic
gcuccaaauugauaauaccuc

SEQ ID NO: 287172 - RNA, 22 nt, Artificial Sequence
  Synthetic
ggcuccaaauugauaauaccuc

SEQ ID NO: 287173 - RNA, 23 nt, Artificial Sequence
  Synthetic
uggcuccaaauugauaauaccuc

SEQ ID NO: 287174 - RNA, 24 nt, Artificial Sequence
  Synthetic
guggcuccaaauugauaauaccuc

SEQ ID NO: 287175 - RNA, 18 nt, Artificial Sequence
  Synthetic
gacucuuaggcauaccuc

SEQ ID NO: 287176 - RNA, 19 nt, Artificial Sequence
  Synthetic
agacucuuaggcauaccuc

SEQ ID NO: 287177 - RNA, 20 nt, Artificial Sequence
  Synthetic
aagacucuuaggcauaccuc

SEQ ID NO: 287178 - RNA, 21 nt, Artificial Sequence
  Synthetic
aaagacucuuaggcauaccuc

SEQ ID NO: 287179 - RNA, 22 nt, Artificial Sequence
  Synthetic
caaagacucuuaggcauaccuc

SEQ ID NO: 287180 - RNA, 23 nt, Artificial Sequence
  Synthetic
gcaaagacucuuaggcauaccuc

SEQ ID NO: 287181 - RNA, 24 nt, Artificial Sequence
  Synthetic
ugcaaagacucuuaggcauaccuc

SEQ ID NO: 287182 - RNA, 18 nt, Artificial Sequence
  Synthetic
aaggauaucagauaccuc

SEQ ID NO: 287183 - RNA, 19 nt, Artificial Sequence
  Synthetic
gaaggauaucagauaccuc

SEQ ID NO: 287184 - RNA, 20 nt, Artificial Sequence
  Synthetic
agaaggauaucagauaccuc

SEQ ID NO: 287185 - RNA, 21 nt, Artificial Sequence
  Synthetic
uagaaggauaucagauaccuc

SEQ ID NO: 287186 - RNA, 22 nt, Artificial Sequence
  Synthetic
cuagaaggauaucagauaccuc

SEQ ID NO: 287187 - RNA, 23 nt, Artificial Sequence
  Synthetic
acuagaaggauaucagauaccuc

SEQ ID NO: 287188 - RNA, 24 nt, Artificial Sequence
  Synthetic
uacuagaaggauaucagauaccuc

SEQ ID NO: 287189 - RNA, 18 nt, Artificial Sequence
  Synthetic
gaauuagaacauuaccuc

SEQ ID NO: 287190 - RNA, 19 nt, Artificial Sequence
  Synthetic
agaauuagaacauuaccuc

SEQ ID NO: 287191 - RNA, 20 nt, Artificial Sequence
  Synthetic
aagaauuagaacauuaccuc

SEQ ID NO: 287192 - RNA, 21 nt, Artificial Sequence
  Synthetic
caagaauuagaacauuaccuc

SEQ ID NO: 287193 - RNA, 22 nt, Artificial Sequence
  Synthetic
ucaagaauuagaacauuaccuc

SEQ ID NO: 287194 - RNA, 23 nt, Artificial Sequence
  Synthetic
uucaagaauuagaacauuaccuc

SEQ ID NO: 287195 - RNA, 24 nt, Artificial Sequence
  Synthetic
guucaagaauuagaacauuaccuc

SEQ ID NO: 287196 - RNA, 18 nt, Artificial Sequence
  Synthetic
aggauuauguauuaccuc

SEQ ID NO: 287197 - RNA, 19 nt, Artificial Sequence
  Synthetic
aaggauuauguauuaccuc

SEQ ID NO: 287198 - RNA, 20 nt, Artificial Sequence
  Synthetic
gaaggauuauguauuaccuc

SEQ ID NO: 287199 - RNA, 21 nt, Artificial Sequence
  Synthetic
agaaggauuauguauuaccuc

SEQ ID NO: 287200 - RNA, 22 nt, Artificial Sequence
  Synthetic
cagaaggauuauguauuaccuc

SEQ ID NO: 287201 - RNA, 23 nt, Artificial Sequence
  Synthetic
ucagaaggauuauguauuaccuc

SEQ ID NO: 287202 - RNA, 24 nt, Artificial Sequence
  Synthetic
aucagaaggauuauguauuaccuc

SEQ ID NO: 287203 - RNA, 18 nt, Artificial Sequence
  Synthetic
uuaagcuaugcuuaccuc

SEQ ID NO: 287204 - RNA, 19 nt, Artificial Sequence
  Synthetic
auuaagcuaugcuuaccuc

SEQ ID NO: 287205 - RNA, 20 nt, Artificial Sequence
  Synthetic
aauuaagcuaugcuuaccuc

SEQ ID NO: 287206 - RNA, 21 nt, Artificial Sequence
  Synthetic
aaauuaagcuaugcuuaccuc

SEQ ID NO: 287207 - RNA, 22 nt, Artificial Sequence
  Synthetic
caaauuaagcuaugcuuaccuc

SEQ ID NO: 287208 - RNA, 23 nt, Artificial Sequence
  Synthetic
gcaaauuaagcuaugcuuaccuc

SEQ ID NO: 287209 - RNA, 24 nt, Artificial Sequence
  Synthetic
ugcaaauuaagcuaugcuuaccuc

SEQ ID NO: 287210 - RNA, 18 nt, Artificial Sequence
  Synthetic
uaagagaauccaacccuc

SEQ ID NO: 287211 - RNA, 19 nt, Artificial Sequence
  Synthetic
auaagagaauccaacccuc

SEQ ID NO: 287212 - RNA, 20 nt, Artificial Sequence
  Synthetic
gauaagagaauccaacccuc

SEQ ID NO: 287213 - RNA, 21 nt, Artificial Sequence
  Synthetic
ugauaagagaauccaacccuc

SEQ ID NO: 287214 - RNA, 22 nt, Artificial Sequence
  Synthetic
augauaagagaauccaacccuc

SEQ ID NO: 287215 - RNA, 23 nt, Artificial Sequence
  Synthetic
gaugauaagagaauccaacccuc

SEQ ID NO: 287216 - RNA, 24 nt, Artificial Sequence
  Synthetic
ugaugauaagagaauccaacccuc

SEQ ID NO: 287217 - RNA, 18 nt, Artificial Sequence
  Synthetic
acacucuuauuaacccuc

SEQ ID NO: 287218 - RNA, 19 nt, Artificial Sequence
  Synthetic
cacacucuuauuaacccuc

SEQ ID NO: 287219 - RNA, 20 nt, Artificial Sequence
  Synthetic
acacacucuuauuaacccuc

SEQ ID NO: 287220 - RNA, 21 nt, Artificial Sequence
  Synthetic
cacacacucuuauuaacccuc

SEQ ID NO: 287221 - RNA, 22 nt, Artificial Sequence
  Synthetic
acacacacucuuauuaacccuc

SEQ ID NO: 287222 - RNA, 23 nt, Artificial Sequence
  Synthetic
cacacacacucuuauuaacccuc

SEQ ID NO: 287223 - RNA, 24 nt, Artificial Sequence
  Synthetic
acacacacacucuuauuaacccuc

SEQ ID NO: 287224 - RNA, 18 nt, Artificial Sequence
  Synthetic
gcacuguaacacacccuc

SEQ ID NO: 287225 - RNA, 19 nt, Artificial Sequence
  Synthetic
agcacuguaacacacccuc

SEQ ID NO: 287226 - RNA, 20 nt, Artificial Sequence
  Synthetic
gagcacuguaacacacccuc

SEQ ID NO: 287227 - RNA, 21 nt, Artificial Sequence
  Synthetic
agagcacuguaacacacccuc

SEQ ID NO: 287228 - RNA, 22 nt, Artificial Sequence
  Synthetic
cagagcacuguaacacacccuc

SEQ ID NO: 287229 - RNA, 23 nt, Artificial Sequence
  Synthetic
acagagcacuguaacacacccuc

SEQ ID NO: 287230 - RNA, 24 nt, Artificial Sequence
  Synthetic
aacagagcacuguaacacacccuc

SEQ ID NO: 287231 - RNA, 18 nt, Artificial Sequence
  Synthetic
guaacuauggacacccuc

SEQ ID NO: 287232 - RNA, 19 nt, Artificial Sequence
  Synthetic
uguaacuauggacacccuc

SEQ ID NO: 287233 - RNA, 20 nt, Artificial Sequence
  Synthetic
auguaacuauggacacccuc

SEQ ID NO: 287234 - RNA, 21 nt, Artificial Sequence
  Synthetic
cauguaacuauggacacccuc

SEQ ID NO: 287235 - RNA, 22 nt, Artificial Sequence
  Synthetic
gcauguaacuauggacacccuc

SEQ ID NO: 287236 - RNA, 23 nt, Artificial Sequence
  Synthetic
ugcauguaacuauggacacccuc

SEQ ID NO: 287237 - RNA, 24 nt, Artificial Sequence
  Synthetic
uugcauguaacuauggacacccuc

SEQ ID NO: 287238 - RNA, 18 nt, Artificial Sequence
  Synthetic
ccugagugcaccacccuc

SEQ ID NO: 287239 - RNA, 19 nt, Artificial Sequence
  Synthetic
cccugagugcaccacccuc

SEQ ID NO: 287240 - RNA, 20 nt, Artificial Sequence
  Synthetic
ucccugagugcaccacccuc

SEQ ID NO: 287241 - RNA, 21 nt, Artificial Sequence
  Synthetic
cucccugagugcaccacccuc

SEQ ID NO: 287242 - RNA, 22 nt, Artificial Sequence
  Synthetic
ccucccugagugcaccacccuc

SEQ ID NO: 287243 - RNA, 23 nt, Artificial Sequence
  Synthetic
cccucccugagugcaccacccuc

SEQ ID NO: 287244 - RNA, 24 nt, Artificial Sequence
  Synthetic
gcccucccugagugcaccacccuc

SEQ ID NO: 287245 - RNA, 18 nt, Artificial Sequence
  Synthetic
uauggugcucccacccuc

SEQ ID NO: 287246 - RNA, 19 nt, Artificial Sequence
  Synthetic
uuauggugcucccacccuc

SEQ ID NO: 287247 - RNA, 20 nt, Artificial Sequence
  Synthetic
uuuauggugcucccacccuc

SEQ ID NO: 287248 - RNA, 21 nt, Artificial Sequence
  Synthetic
guuuauggugcucccacccuc

SEQ ID NO: 287249 - RNA, 22 nt, Artificial Sequence
  Synthetic
uguuuauggugcucccacccuc

SEQ ID NO: 287250 - RNA, 23 nt, Artificial Sequence
  Synthetic
guguuuauggugcucccacccuc

SEQ ID NO: 287251 - RNA, 24 nt, Artificial Sequence
  Synthetic
uguguuuauggugcucccacccuc

SEQ ID NO: 287252 - RNA, 18 nt, Artificial Sequence
  Synthetic
uccucuugacugacccuc

SEQ ID NO: 287253 - RNA, 19 nt, Artificial Sequence
  Synthetic
guccucuugacugacccuc

SEQ ID NO: 287254 - RNA, 20 nt, Artificial Sequence
  Synthetic
aguccucuugacugacccuc

SEQ ID NO: 287255 - RNA, 21 nt, Artificial Sequence
  Synthetic
uaguccucuugacugacccuc

SEQ ID NO: 287256 - RNA, 22 nt, Artificial Sequence
  Synthetic
uuaguccucuugacugacccuc

SEQ ID NO: 287257 - RNA, 23 nt, Artificial Sequence
  Synthetic
cuuaguccucuugacugacccuc

SEQ ID NO: 287258 - RNA, 24 nt, Artificial Sequence
  Synthetic
ccuuaguccucuugacugacccuc

SEQ ID NO: 287259 - RNA, 18 nt, Artificial Sequence
  Synthetic
cccuuucagaauacccuc

SEQ ID NO: 287260 - RNA, 19 nt, Artificial Sequence
  Synthetic
ucccuuucagaauacccuc

SEQ ID NO: 287261 - RNA, 20 nt, Artificial Sequence
  Synthetic
cucccuuucagaauacccuc

SEQ ID NO: 287262 - RNA, 21 nt, Artificial Sequence
  Synthetic
ccucccuuucagaauacccuc

SEQ ID NO: 287263 - RNA, 22 nt, Artificial Sequence
  Synthetic
gccucccuuucagaauacccuc

SEQ ID NO: 287264 - RNA, 23 nt, Artificial Sequence
  Synthetic
ugccucccuuucagaauacccuc

SEQ ID NO: 287265 - RNA, 24 nt, Artificial Sequence
  Synthetic
uugccucccuuucagaauacccuc

SEQ ID NO: 287266 - RNA, 18 nt, Artificial Sequence
  Synthetic
ugcuuuuuuuuuacccuc

SEQ ID NO: 287267 - RNA, 19 nt, Artificial Sequence
  Synthetic
gugcuuuuuuuuuacccuc

SEQ ID NO: 287268 - RNA, 20 nt, Artificial Sequence
  Synthetic
agugcuuuuuuuuuacccuc

SEQ ID NO: 287269 - RNA, 21 nt, Artificial Sequence
  Synthetic
cagugcuuuuuuuuuacccuc

SEQ ID NO: 287270 - RNA, 22 nt, Artificial Sequence
  Synthetic
ccagugcuuuuuuuuuacccuc

SEQ ID NO: 287271 - RNA, 23 nt, Artificial Sequence
  Synthetic
uccagugcuuuuuuuuuacccuc

SEQ ID NO: 287272 - RNA, 24 nt, Artificial Sequence
  Synthetic
uuccagugcuuuuuuuuuacccuc

SEQ ID NO: 287273 - RNA, 18 nt, Artificial Sequence
  Synthetic
caguuacuucacccccuc

SEQ ID NO: 287274 - RNA, 19 nt, Artificial Sequence
  Synthetic
ucaguuacuucacccccuc

SEQ ID NO: 287275 - RNA, 20 nt, Artificial Sequence
  Synthetic
uucaguuacuucacccccuc

SEQ ID NO: 287276 - RNA, 21 nt, Artificial Sequence
  Synthetic
auucaguuacuucacccccuc

SEQ ID NO: 287277 - RNA, 22 nt, Artificial Sequence
  Synthetic
aauucaguuacuucacccccuc

SEQ ID NO: 287278 - RNA, 23 nt, Artificial Sequence
  Synthetic
uaauucaguuacuucacccccuc

SEQ ID NO: 287279 - RNA, 24 nt, Artificial Sequence
  Synthetic
auaauucaguuacuucacccccuc

SEQ ID NO: 287280 - RNA, 18 nt, Artificial Sequence
  Synthetic
ugauauauuaucccccuc

SEQ ID NO: 287281 - RNA, 19 nt, Artificial Sequence
  Synthetic
uugauauauuaucccccuc

SEQ ID NO: 287282 - RNA, 20 nt, Artificial Sequence
  Synthetic
cuugauauauuaucccccuc

SEQ ID NO: 287283 - RNA, 21 nt, Artificial Sequence
  Synthetic
ucuugauauauuaucccccuc

SEQ ID NO: 287284 - RNA, 22 nt, Artificial Sequence
  Synthetic
aucuugauauauuaucccccuc

SEQ ID NO: 287285 - RNA, 23 nt, Artificial Sequence
  Synthetic
aaucuugauauauuaucccccuc

SEQ ID NO: 287286 - RNA, 24 nt, Artificial Sequence
  Synthetic
aaaucuugauauauuaucccccuc

SEQ ID NO: 287287 - RNA, 18 nt, Artificial Sequence
  Synthetic
uguuauuucaaagcccuc

SEQ ID NO: 287288 - RNA, 19 nt, Artificial Sequence
  Synthetic
guguuauuucaaagcccuc

SEQ ID NO: 287289 - RNA, 20 nt, Artificial Sequence
  Synthetic
gguguuauuucaaagcccuc

SEQ ID NO: 287290 - RNA, 21 nt, Artificial Sequence
  Synthetic
ugguguuauuucaaagcccuc

SEQ ID NO: 287291 - RNA, 22 nt, Artificial Sequence
  Synthetic
augguguuauuucaaagcccuc

SEQ ID NO: 287292 - RNA, 23 nt, Artificial Sequence
  Synthetic
gaugguguuauuucaaagcccuc

SEQ ID NO: 287293 - RNA, 24 nt, Artificial Sequence
  Synthetic
ugaugguguuauuucaaagcccuc

SEQ ID NO: 287294 - RNA, 18 nt, Artificial Sequence
  Synthetic
aauucuccuucagcccuc

SEQ ID NO: 287295 - RNA, 19 nt, Artificial Sequence
  Synthetic
gaauucuccuucagcccuc

SEQ ID NO: 287296 - RNA, 20 nt, Artificial Sequence
  Synthetic
cgaauucuccuucagcccuc

SEQ ID NO: 287297 - RNA, 21 nt, Artificial Sequence
  Synthetic
gcgaauucuccuucagcccuc

SEQ ID NO: 287298 - RNA, 22 nt, Artificial Sequence
  Synthetic
ggcgaauucuccuucagcccuc

SEQ ID NO: 287299 - RNA, 23 nt, Artificial Sequence
  Synthetic
uggcgaauucuccuucagcccuc

SEQ ID NO: 287300 - RNA, 24 nt, Artificial Sequence
  Synthetic
uuggcgaauucuccuucagcccuc

SEQ ID NO: 287301 - RNA, 18 nt, Artificial Sequence
  Synthetic
cagaccauugaggcccuc

SEQ ID NO: 287302 - RNA, 19 nt, Artificial Sequence
  Synthetic
acagaccauugaggcccuc

SEQ ID NO: 287303 - RNA, 20 nt, Artificial Sequence
  Synthetic
aacagaccauugaggcccuc

SEQ ID NO: 287304 - RNA, 21 nt, Artificial Sequence
  Synthetic
aaacagaccauugaggcccuc

SEQ ID NO: 287305 - RNA, 22 nt, Artificial Sequence
  Synthetic
gaaacagaccauugaggcccuc

SEQ ID NO: 287306 - RNA, 23 nt, Artificial Sequence
  Synthetic
cgaaacagaccauugaggcccuc

SEQ ID NO: 287307 - RNA, 24 nt, Artificial Sequence
  Synthetic
ucgaaacagaccauugaggcccuc

SEQ ID NO: 287308 - RNA, 18 nt, Artificial Sequence
  Synthetic
ugcaggggcagggcccuc

SEQ ID NO: 287309 - RNA, 19 nt, Artificial Sequence
  Synthetic
cugcaggggcagggcccuc

SEQ ID NO: 287310 - RNA, 20 nt, Artificial Sequence
  Synthetic
gcugcaggggcagggcccuc

SEQ ID NO: 287311 - RNA, 21 nt, Artificial Sequence
  Synthetic
ugcugcaggggcagggcccuc

SEQ ID NO: 287312 - RNA, 22 nt, Artificial Sequence
  Synthetic
uugcugcaggggcagggcccuc

SEQ ID NO: 287313 - RNA, 23 nt, Artificial Sequence
  Synthetic
uuugcugcaggggcagggcccuc

SEQ ID NO: 287314 - RNA, 24 nt, Artificial Sequence
  Synthetic
guuugcugcaggggcagggcccuc

SEQ ID NO: 287315 - RNA, 18 nt, Artificial Sequence
  Synthetic
aguaaagaugaugcccuc

SEQ ID NO: 287316 - RNA, 19 nt, Artificial Sequence
  Synthetic
aaguaaagaugaugcccuc

SEQ ID NO: 287317 - RNA, 20 nt, Artificial Sequence
  Synthetic
uaaguaaagaugaugcccuc

SEQ ID NO: 287318 - RNA, 21 nt, Artificial Sequence
  Synthetic
guaaguaaagaugaugcccuc

SEQ ID NO: 287319 - RNA, 22 nt, Artificial Sequence
  Synthetic
uguaaguaaagaugaugcccuc

SEQ ID NO: 287320 - RNA, 23 nt, Artificial Sequence
  Synthetic
auguaaguaaagaugaugcccuc

SEQ ID NO: 287321 - RNA, 24 nt, Artificial Sequence
  Synthetic
gauguaaguaaagaugaugcccuc

SEQ ID NO: 287322 - RNA, 18 nt, Artificial Sequence
  Synthetic
auugccgagguugcccuc

SEQ ID NO: 287323 - RNA, 19 nt, Artificial Sequence
  Synthetic
aauugccgagguugcccuc

SEQ ID NO: 287324 - RNA, 20 nt, Artificial Sequence
  Synthetic
caauugccgagguugcccuc

SEQ ID NO: 287325 - RNA, 21 nt, Artificial Sequence
  Synthetic
ccaauugccgagguugcccuc

SEQ ID NO: 287326 - RNA, 22 nt, Artificial Sequence
  Synthetic
gccaauugccgagguugcccuc

SEQ ID NO: 287327 - RNA, 23 nt, Artificial Sequence
  Synthetic
agccaauugccgagguugcccuc

SEQ ID NO: 287328 - RNA, 24 nt, Artificial Sequence
  Synthetic
uagccaauugccgagguugcccuc

SEQ ID NO: 287329 - RNA, 18 nt, Artificial Sequence
  Synthetic
cuauauaguaccucccuc

SEQ ID NO: 287330 - RNA, 19 nt, Artificial Sequence
  Synthetic
ucuauauaguaccucccuc

SEQ ID NO: 287331 - RNA, 20 nt, Artificial Sequence
  Synthetic
aucuauauaguaccucccuc

SEQ ID NO: 287332 - RNA, 21 nt, Artificial Sequence
  Synthetic
aaucuauauaguaccucccuc

SEQ ID NO: 287333 - RNA, 22 nt, Artificial Sequence
  Synthetic
gaaucuauauaguaccucccuc

SEQ ID NO: 287334 - RNA, 23 nt, Artificial Sequence
  Synthetic
agaaucuauauaguaccucccuc

SEQ ID NO: 287335 - RNA, 24 nt, Artificial Sequence
  Synthetic
uagaaucuauauaguaccucccuc

SEQ ID NO: 287336 - RNA, 18 nt, Artificial Sequence
  Synthetic
cucuaccuuccuucccuc

SEQ ID NO: 287337 - RNA, 19 nt, Artificial Sequence
  Synthetic
ucucuaccuuccuucccuc

SEQ ID NO: 287338 - RNA, 20 nt, Artificial Sequence
  Synthetic
cucucuaccuuccuucccuc

SEQ ID NO: 287339 - RNA, 21 nt, Artificial Sequence
  Synthetic
ucucucuaccuuccuucccuc

SEQ ID NO: 287340 - RNA, 22 nt, Artificial Sequence
  Synthetic
uucucucuaccuuccuucccuc

SEQ ID NO: 287341 - RNA, 23 nt, Artificial Sequence
  Synthetic
cuucucucuaccuuccuucccuc

SEQ ID NO: 287342 - RNA, 24 nt, Artificial Sequence
  Synthetic
acuucucucuaccuuccuucccuc

SEQ ID NO: 287343 - RNA, 18 nt, Artificial Sequence
  Synthetic
cauguuccauguucccuc

SEQ ID NO: 287344 - RNA, 19 nt, Artificial Sequence
  Synthetic
gcauguuccauguucccuc

SEQ ID NO: 287345 - RNA, 20 nt, Artificial Sequence
  Synthetic
ugcauguuccauguucccuc

SEQ ID NO: 287346 - RNA, 21 nt, Artificial Sequence
  Synthetic
uugcauguuccauguucccuc

SEQ ID NO: 287347 - RNA, 22 nt, Artificial Sequence
  Synthetic
uuugcauguuccauguucccuc

SEQ ID NO: 287348 - RNA, 23 nt, Artificial Sequence
  Synthetic
cuuugcauguuccauguucccuc

SEQ ID NO: 287349 - RNA, 24 nt, Artificial Sequence
  Synthetic
ucuuugcauguuccauguucccuc

SEQ ID NO: 287350 - RNA, 18 nt, Artificial Sequence
  Synthetic
uuguuuugguuuucccuc

SEQ ID NO: 287351 - RNA, 19 nt, Artificial Sequence
  Synthetic
uuuguuuugguuuucccuc

SEQ ID NO: 287352 - RNA, 20 nt, Artificial Sequence
  Synthetic
uuuuguuuugguuuucccuc

SEQ ID NO: 287353 - RNA, 21 nt, Artificial Sequence
  Synthetic
guuuuguuuugguuuucccuc

SEQ ID NO: 287354 - RNA, 22 nt, Artificial Sequence
  Synthetic
uguuuuguuuugguuuucccuc

SEQ ID NO: 287355 - RNA, 23 nt, Artificial Sequence
  Synthetic
auguuuuguuuugguuuucccuc

SEQ ID NO: 287356 - RNA, 24 nt, Artificial Sequence
  Synthetic
aauguuuuguuuugguuuucccuc

SEQ ID NO: 287357 - RNA, 18 nt, Artificial Sequence
  Synthetic
gcuucguccuaaagccuc

SEQ ID NO: 287358 - RNA, 19 nt, Artificial Sequence
  Synthetic
ggcuucguccuaaagccuc

SEQ ID NO: 287359 - RNA, 20 nt, Artificial Sequence
  Synthetic
gggcuucguccuaaagccuc

SEQ ID NO: 287360 - RNA, 21 nt, Artificial Sequence
  Synthetic
agggcuucguccuaaagccuc

SEQ ID NO: 287361 - RNA, 22 nt, Artificial Sequence
  Synthetic
gagggcuucguccuaaagccuc

SEQ ID NO: 287362 - RNA, 23 nt, Artificial Sequence
  Synthetic
agagggcuucguccuaaagccuc

SEQ ID NO: 287363 - RNA, 24 nt, Artificial Sequence
  Synthetic
gagagggcuucguccuaaagccuc

SEQ ID NO: 287364 - RNA, 18 nt, Artificial Sequence
  Synthetic
cuuggaauucccagccuc

SEQ ID NO: 287365 - RNA, 19 nt, Artificial Sequence
  Synthetic
ucuuggaauucccagccuc

SEQ ID NO: 287366 - RNA, 20 nt, Artificial Sequence
  Synthetic
aucuuggaauucccagccuc

SEQ ID NO: 287367 - RNA, 21 nt, Artificial Sequence
  Synthetic
gaucuuggaauucccagccuc

SEQ ID NO: 287368 - RNA, 22 nt, Artificial Sequence
  Synthetic
ugaucuuggaauucccagccuc

SEQ ID NO: 287369 - RNA, 23 nt, Artificial Sequence
  Synthetic
uugaucuuggaauucccagccuc

SEQ ID NO: 287370 - RNA, 24 nt, Artificial Sequence
  Synthetic
cuugaucuuggaauucccagccuc

SEQ ID NO: 287371 - RNA, 18 nt, Artificial Sequence
  Synthetic
cuuggacuucccagccuc

SEQ ID NO: 287372 - RNA, 19 nt, Artificial Sequence
  Synthetic
ucuuggacuucccagccuc

SEQ ID NO: 287373 - RNA, 20 nt, Artificial Sequence
  Synthetic
aucuuggacuucccagccuc

SEQ ID NO: 287374 - RNA, 21 nt, Artificial Sequence
  Synthetic
uaucuuggacuucccagccuc

SEQ ID NO: 287375 - RNA, 22 nt, Artificial Sequence
  Synthetic
uuaucuuggacuucccagccuc

SEQ ID NO: 287376 - RNA, 23 nt, Artificial Sequence
  Synthetic
uuuaucuuggacuucccagccuc

SEQ ID NO: 287377 - RNA, 24 nt, Artificial Sequence
  Synthetic
cuuuaucuuggacuucccagccuc

SEQ ID NO: 287378 - RNA, 18 nt, Artificial Sequence
  Synthetic
guuaggacuuagagccuc

SEQ ID NO: 287379 - RNA, 19 nt, Artificial Sequence
  Synthetic
uguuaggacuuagagccuc

SEQ ID NO: 287380 - RNA, 20 nt, Artificial Sequence
  Synthetic
auguuaggacuuagagccuc

SEQ ID NO: 287381 - RNA, 21 nt, Artificial Sequence
  Synthetic
aauguuaggacuuagagccuc

SEQ ID NO: 287382 - RNA, 22 nt, Artificial Sequence
  Synthetic
gaauguuaggacuuagagccuc

SEQ ID NO: 287383 - RNA, 23 nt, Artificial Sequence
  Synthetic
ggaauguuaggacuuagagccuc

SEQ ID NO: 287384 - RNA, 24 nt, Artificial Sequence
  Synthetic
uggaauguuaggacuuagagccuc

SEQ ID NO: 287385 - RNA, 18 nt, Artificial Sequence
  Synthetic
gauuuuggaucuagccuc

SEQ ID NO: 287386 - RNA, 19 nt, Artificial Sequence
  Synthetic
ugauuuuggaucuagccuc

SEQ ID NO: 287387 - RNA, 20 nt, Artificial Sequence
  Synthetic
uugauuuuggaucuagccuc

SEQ ID NO: 287388 - RNA, 21 nt, Artificial Sequence
  Synthetic
cuugauuuuggaucuagccuc

SEQ ID NO: 287389 - RNA, 22 nt, Artificial Sequence
  Synthetic
ucuugauuuuggaucuagccuc

SEQ ID NO: 287390 - RNA, 23 nt, Artificial Sequence
  Synthetic
aucuugauuuuggaucuagccuc

SEQ ID NO: 287391 - RNA, 24 nt, Artificial Sequence
  Synthetic
aaucuugauuuuggaucuagccuc

SEQ ID NO: 287392 - RNA, 18 nt, Artificial Sequence
  Synthetic
agauugagaccccgccuc

SEQ ID NO: 287393 - RNA, 19 nt, Artificial Sequence
  Synthetic
cagauugagaccccgccuc

SEQ ID NO: 287394 - RNA, 20 nt, Artificial Sequence
  Synthetic
acagauugagaccccgccuc

SEQ ID NO: 287395 - RNA, 21 nt, Artificial Sequence
  Synthetic
aacagauugagaccccgccuc

SEQ ID NO: 287396 - RNA, 22 nt, Artificial Sequence
  Synthetic
caacagauugagaccccgccuc

SEQ ID NO: 287397 - RNA, 23 nt, Artificial Sequence
  Synthetic
gcaacagauugagaccccgccuc

SEQ ID NO: 287398 - RNA, 24 nt, Artificial Sequence
  Synthetic
ggcaacagauugagaccccgccuc

SEQ ID NO: 287399 - RNA, 18 nt, Artificial Sequence
  Synthetic
aaaacuuuaccaggccuc

SEQ ID NO: 287400 - RNA, 19 nt, Artificial Sequence
  Synthetic
gaaaacuuuaccaggccuc

SEQ ID NO: 287401 - RNA, 20 nt, Artificial Sequence
  Synthetic
ugaaaacuuuaccaggccuc

SEQ ID NO: 287402 - RNA, 21 nt, Artificial Sequence
  Synthetic
augaaaacuuuaccaggccuc

SEQ ID NO: 287403 - RNA, 22 nt, Artificial Sequence
  Synthetic
caugaaaacuuuaccaggccuc

SEQ ID NO: 287404 - RNA, 23 nt, Artificial Sequence
  Synthetic
ccaugaaaacuuuaccaggccuc

SEQ ID NO: 287405 - RNA, 24 nt, Artificial Sequence
  Synthetic
uccaugaaaacuuuaccaggccuc

SEQ ID NO: 287406 - RNA, 18 nt, Artificial Sequence
  Synthetic
gucucaaguccaggccuc

SEQ ID NO: 287407 - RNA, 19 nt, Artificial Sequence
  Synthetic
agucucaaguccaggccuc

SEQ ID NO: 287408 - RNA, 20 nt, Artificial Sequence
  Synthetic
cagucucaaguccaggccuc

SEQ ID NO: 287409 - RNA, 21 nt, Artificial Sequence
  Synthetic
ccagucucaaguccaggccuc

SEQ ID NO: 287410 - RNA, 22 nt, Artificial Sequence
  Synthetic
accagucucaaguccaggccuc

SEQ ID NO: 287411 - RNA, 23 nt, Artificial Sequence
  Synthetic
caccagucucaaguccaggccuc

SEQ ID NO: 287412 - RNA, 24 nt, Artificial Sequence
  Synthetic
acaccagucucaaguccaggccuc

SEQ ID NO: 287413 - RNA, 18 nt, Artificial Sequence
  Synthetic
ggcuccuggggaggccuc

SEQ ID NO: 287414 - RNA, 19 nt, Artificial Sequence
  Synthetic
uggcuccuggggaggccuc

SEQ ID NO: 287415 - RNA, 20 nt, Artificial Sequence
  Synthetic
uuggcuccuggggaggccuc

SEQ ID NO: 287416 - RNA, 21 nt, Artificial Sequence
  Synthetic
cuuggcuccuggggaggccuc

SEQ ID NO: 287417 - RNA, 22 nt, Artificial Sequence
  Synthetic
gcuuggcuccuggggaggccuc

SEQ ID NO: 287418 - RNA, 23 nt, Artificial Sequence
  Synthetic
ugcuuggcuccuggggaggccuc

SEQ ID NO: 287419 - RNA, 24 nt, Artificial Sequence
  Synthetic
uugcuuggcuccuggggaggccuc

SEQ ID NO: 287420 - RNA, 18 nt, Artificial Sequence
  Synthetic
cauggcuggggaggccuc

SEQ ID NO: 287421 - RNA, 19 nt, Artificial Sequence
  Synthetic
acauggcuggggaggccuc

SEQ ID NO: 287422 - RNA, 20 nt, Artificial Sequence
  Synthetic
cacauggcuggggaggccuc

SEQ ID NO: 287423 - RNA, 21 nt, Artificial Sequence
  Synthetic
ccacauggcuggggaggccuc

SEQ ID NO: 287424 - RNA, 22 nt, Artificial Sequence
  Synthetic
uccacauggcuggggaggccuc

SEQ ID NO: 287425 - RNA, 23 nt, Artificial Sequence
  Synthetic
uuccacauggcuggggaggccuc

SEQ ID NO: 287426 - RNA, 24 nt, Artificial Sequence
  Synthetic
guuccacauggcuggggaggccuc

SEQ ID NO: 287427 - RNA, 19 nt, Artificial Sequence
  Synthetic
gcauggcuggggaggccuc

SEQ ID NO: 287428 - RNA, 20 nt, Artificial Sequence
  Synthetic
agcauggcuggggaggccuc

SEQ ID NO: 287429 - RNA, 21 nt, Artificial Sequence
  Synthetic
cagcauggcuggggaggccuc

SEQ ID NO: 287430 - RNA, 22 nt, Artificial Sequence
  Synthetic
ucagcauggcuggggaggccuc

SEQ ID NO: 287431 - RNA, 23 nt, Artificial Sequence
  Synthetic
uucagcauggcuggggaggccuc

SEQ ID NO: 287432 - RNA, 24 nt, Artificial Sequence
  Synthetic
guucagcauggcuggggaggccuc

SEQ ID NO: 287433 - RNA, 20 nt, Artificial Sequence
  Synthetic
ugcauggcuggggaggccuc

SEQ ID NO: 287434 - RNA, 21 nt, Artificial Sequence
  Synthetic
uugcauggcuggggaggccuc

SEQ ID NO: 287435 - RNA, 22 nt, Artificial Sequence
  Synthetic
uuugcauggcuggggaggccuc

SEQ ID NO: 287436 - RNA, 23 nt, Artificial Sequence
  Synthetic
guuugcauggcuggggaggccuc

SEQ ID NO: 287437 - RNA, 24 nt, Artificial Sequence
  Synthetic
gguuugcauggcuggggaggccuc

SEQ ID NO: 287438 - RNA, 18 nt, Artificial Sequence
  Synthetic
uauggcuggggaggccuc

SEQ ID NO: 287439 - RNA, 19 nt, Artificial Sequence
  Synthetic
auauggcuggggaggccuc

SEQ ID NO: 287440 - RNA, 20 nt, Artificial Sequence
  Synthetic
aauauggcuggggaggccuc

SEQ ID NO: 287441 - RNA, 21 nt, Artificial Sequence
  Synthetic
caauauggcuggggaggccuc

SEQ ID NO: 287442 - RNA, 22 nt, Artificial Sequence
  Synthetic
ucaauauggcuggggaggccuc

SEQ ID NO: 287443 - RNA, 23 nt, Artificial Sequence
  Synthetic
uucaauauggcuggggaggccuc

SEQ ID NO: 287444 - RNA, 24 nt, Artificial Sequence
  Synthetic
guucaauauggcuggggaggccuc

SEQ ID NO: 287445 - RNA, 18 nt, Artificial Sequence
  Synthetic
uguggcuggggaggccuc

SEQ ID NO: 287446 - RNA, 19 nt, Artificial Sequence
  Synthetic
guguggcuggggaggccuc

SEQ ID NO: 287447 - RNA, 20 nt, Artificial Sequence
  Synthetic
uguguggcuggggaggccuc

SEQ ID NO: 287448 - RNA, 21 nt, Artificial Sequence
  Synthetic
cuguguggcuggggaggccuc

SEQ ID NO: 287449 - RNA, 22 nt, Artificial Sequence
  Synthetic
ucuguguggcuggggaggccuc

SEQ ID NO: 287450 - RNA, 23 nt, Artificial Sequence
  Synthetic
uucuguguggcuggggaggccuc

SEQ ID NO: 287451 - RNA, 24 nt, Artificial Sequence
  Synthetic
guucuguguggcuggggaggccuc

SEQ ID NO: 287452 - RNA, 18 nt, Artificial Sequence
  Synthetic
agcuucuggggaggccuc

SEQ ID NO: 287453 - RNA, 19 nt, Artificial Sequence
  Synthetic
cagcuucuggggaggccuc

SEQ ID NO: 287454 - RNA, 20 nt, Artificial Sequence
  Synthetic
ucagcuucuggggaggccuc

SEQ ID NO: 287455 - RNA, 21 nt, Artificial Sequence
  Synthetic
cucagcuucuggggaggccuc

SEQ ID NO: 287456 - RNA, 22 nt, Artificial Sequence
  Synthetic
acucagcuucuggggaggccuc

SEQ ID NO: 287457 - RNA, 23 nt, Artificial Sequence
  Synthetic
uacucagcuucuggggaggccuc

SEQ ID NO: 287458 - RNA, 24 nt, Artificial Sequence
  Synthetic
cuacucagcuucuggggaggccuc

SEQ ID NO: 287459 - RNA, 18 nt, Artificial Sequence
  Synthetic
uguuucuggggaggccuc

SEQ ID NO: 287460 - RNA, 19 nt, Artificial Sequence
  Synthetic
cuguuucuggggaggccuc

SEQ ID NO: 287461 - RNA, 20 nt, Artificial Sequence
  Synthetic
ucuguuucuggggaggccuc

SEQ ID NO: 287462 - RNA, 21 nt, Artificial Sequence
  Synthetic
aucuguuucuggggaggccuc

SEQ ID NO: 287463 - RNA, 22 nt, Artificial Sequence
  Synthetic
caucuguuucuggggaggccuc

SEQ ID NO: 287464 - RNA, 23 nt, Artificial Sequence
  Synthetic
acaucuguuucuggggaggccuc

SEQ ID NO: 287465 - RNA, 24 nt, Artificial Sequence
  Synthetic
aacaucuguuucuggggaggccuc

SEQ ID NO: 287466 - RNA, 18 nt, Artificial Sequence
  Synthetic
gcugcacucugaggccuc

SEQ ID NO: 287467 - RNA, 19 nt, Artificial Sequence
  Synthetic
ggcugcacucugaggccuc

SEQ ID NO: 287468 - RNA, 20 nt, Artificial Sequence
  Synthetic
uggcugcacucugaggccuc

SEQ ID NO: 287469 - RNA, 21 nt, Artificial Sequence
  Synthetic
cuggcugcacucugaggccuc

SEQ ID NO: 287470 - RNA, 22 nt, Artificial Sequence
  Synthetic
gcuggcugcacucugaggccuc

SEQ ID NO: 287471 - RNA, 23 nt, Artificial Sequence
  Synthetic
ugcuggcugcacucugaggccuc

SEQ ID NO: 287472 - RNA, 24 nt, Artificial Sequence
  Synthetic
uugcuggcugcacucugaggccuc

SEQ ID NO: 287473 - RNA, 18 nt, Artificial Sequence
  Synthetic
cauggcuggguaggccuc

SEQ ID NO: 287474 - RNA, 19 nt, Artificial Sequence
  Synthetic
acauggcuggguaggccuc

SEQ ID NO: 287475 - RNA, 20 nt, Artificial Sequence
  Synthetic
cacauggcuggguaggccuc

SEQ ID NO: 287476 - RNA, 21 nt, Artificial Sequence
  Synthetic
ccacauggcuggguaggccuc

SEQ ID NO: 287477 - RNA, 22 nt, Artificial Sequence
  Synthetic
uccacauggcuggguaggccuc

SEQ ID NO: 287478 - RNA, 23 nt, Artificial Sequence
  Synthetic
uuccacauggcuggguaggccuc

SEQ ID NO: 287479 - RNA, 24 nt, Artificial Sequence
  Synthetic
guuccacauggcuggguaggccuc

SEQ ID NO: 287480 - RNA, 18 nt, Artificial Sequence
  Synthetic
aucaggucacacggccuc

SEQ ID NO: 287481 - RNA, 19 nt, Artificial Sequence
  Synthetic
aaucaggucacacggccuc

SEQ ID NO: 287482 - RNA, 20 nt, Artificial Sequence
  Synthetic
gaaucaggucacacggccuc

SEQ ID NO: 287483 - RNA, 21 nt, Artificial Sequence
  Synthetic
ugaaucaggucacacggccuc

SEQ ID NO: 287484 - RNA, 22 nt, Artificial Sequence
  Synthetic
cugaaucaggucacacggccuc

SEQ ID NO: 287485 - RNA, 23 nt, Artificial Sequence
  Synthetic
ucugaaucaggucacacggccuc

SEQ ID NO: 287486 - RNA, 24 nt, Artificial Sequence
  Synthetic
cucugaaucaggucacacggccuc

SEQ ID NO: 287487 - RNA, 18 nt, Artificial Sequence
  Synthetic
gauaaaacccuuggccuc

SEQ ID NO: 287488 - RNA, 19 nt, Artificial Sequence
  Synthetic
ugauaaaacccuuggccuc

SEQ ID NO: 287489 - RNA, 20 nt, Artificial Sequence
  Synthetic
augauaaaacccuuggccuc

SEQ ID NO: 287490 - RNA, 21 nt, Artificial Sequence
  Synthetic
aaugauaaaacccuuggccuc

SEQ ID NO: 287491 - RNA, 22 nt, Artificial Sequence
  Synthetic
aaaugauaaaacccuuggccuc

SEQ ID NO: 287492 - RNA, 23 nt, Artificial Sequence
  Synthetic
aaaaugauaaaacccuuggccuc

SEQ ID NO: 287493 - RNA, 24 nt, Artificial Sequence
  Synthetic
gaaaaugauaaaacccuuggccuc

SEQ ID NO: 287494 - RNA, 18 nt, Artificial Sequence
  Synthetic
agagaauaucaaugccuc

SEQ ID NO: 287495 - RNA, 19 nt, Artificial Sequence
  Synthetic
cagagaauaucaaugccuc

SEQ ID NO: 287496 - RNA, 20 nt, Artificial Sequence
  Synthetic
acagagaauaucaaugccuc

SEQ ID NO: 287497 - RNA, 21 nt, Artificial Sequence
  Synthetic
aacagagaauaucaaugccuc

SEQ ID NO: 287498 - RNA, 22 nt, Artificial Sequence
  Synthetic
uaacagagaauaucaaugccuc

SEQ ID NO: 287499 - RNA, 23 nt, Artificial Sequence
  Synthetic
auaacagagaauaucaaugccuc

SEQ ID NO: 287500 - RNA, 24 nt, Artificial Sequence
  Synthetic
gauaacagagaauaucaaugccuc

SEQ ID NO: 287501 - RNA, 18 nt, Artificial Sequence
  Synthetic
ucauuugucuaaugccuc

SEQ ID NO: 287502 - RNA, 19 nt, Artificial Sequence
  Synthetic
uucauuugucuaaugccuc

SEQ ID NO: 287503 - RNA, 20 nt, Artificial Sequence
  Synthetic
cuucauuugucuaaugccuc

SEQ ID NO: 287504 - RNA, 21 nt, Artificial Sequence
  Synthetic
acuucauuugucuaaugccuc

SEQ ID NO: 287505 - RNA, 22 nt, Artificial Sequence
  Synthetic
cacuucauuugucuaaugccuc

SEQ ID NO: 287506 - RNA, 23 nt, Artificial Sequence
  Synthetic
ucacuucauuugucuaaugccuc

SEQ ID NO: 287507 - RNA, 24 nt, Artificial Sequence
  Synthetic
uucacuucauuugucuaaugccuc

SEQ ID NO: 287508 - RNA, 18 nt, Artificial Sequence
  Synthetic
ucugauuucaacugccuc

SEQ ID NO: 287509 - RNA, 19 nt, Artificial Sequence
  Synthetic
aucugauuucaacugccuc

SEQ ID NO: 287510 - RNA, 20 nt, Artificial Sequence
  Synthetic
aaucugauuucaacugccuc

SEQ ID NO: 287511 - RNA, 21 nt, Artificial Sequence
  Synthetic
aaaucugauuucaacugccuc

SEQ ID NO: 287512 - RNA, 22 nt, Artificial Sequence
  Synthetic
aaaaucugauuucaacugccuc

SEQ ID NO: 287513 - RNA, 23 nt, Artificial Sequence
  Synthetic
caaaaucugauuucaacugccuc

SEQ ID NO: 287514 - RNA, 24 nt, Artificial Sequence
  Synthetic
ucaaaaucugauuucaacugccuc

SEQ ID NO: 287515 - RNA, 18 nt, Artificial Sequence
  Synthetic
ccaauuuagagcugccuc

SEQ ID NO: 287516 - RNA, 19 nt, Artificial Sequence
  Synthetic
gccaauuuagagcugccuc

SEQ ID NO: 287517 - RNA, 20 nt, Artificial Sequence
  Synthetic
ugccaauuuagagcugccuc

SEQ ID NO: 287518 - RNA, 21 nt, Artificial Sequence
  Synthetic
uugccaauuuagagcugccuc

SEQ ID NO: 287519 - RNA, 22 nt, Artificial Sequence
  Synthetic
auugccaauuuagagcugccuc

SEQ ID NO: 287520 - RNA, 23 nt, Artificial Sequence
  Synthetic
uauugccaauuuagagcugccuc

SEQ ID NO: 287521 - RNA, 24 nt, Artificial Sequence
  Synthetic
auauugccaauuuagagcugccuc

SEQ ID NO: 287522 - RNA, 18 nt, Artificial Sequence
  Synthetic
uuauauacaggcugccuc

SEQ ID NO: 287523 - RNA, 19 nt, Artificial Sequence
  Synthetic
auuauauacaggcugccuc

SEQ ID NO: 287524 - RNA, 20 nt, Artificial Sequence
  Synthetic
cauuauauacaggcugccuc

SEQ ID NO: 287525 - RNA, 21 nt, Artificial Sequence
  Synthetic
ucauuauauacaggcugccuc

SEQ ID NO: 287526 - RNA, 22 nt, Artificial Sequence
  Synthetic
gucauuauauacaggcugccuc

SEQ ID NO: 287527 - RNA, 23 nt, Artificial Sequence
  Synthetic
agucauuauauacaggcugccuc

SEQ ID NO: 287528 - RNA, 24 nt, Artificial Sequence
  Synthetic
uagucauuauauacaggcugccuc

SEQ ID NO: 287529 - RNA, 18 nt, Artificial Sequence
  Synthetic
cucucagcucagugccuc

SEQ ID NO: 287530 - RNA, 19 nt, Artificial Sequence
  Synthetic
ccucucagcucagugccuc

SEQ ID NO: 287531 - RNA, 20 nt, Artificial Sequence
  Synthetic
gccucucagcucagugccuc

SEQ ID NO: 287532 - RNA, 21 nt, Artificial Sequence
  Synthetic
cgccucucagcucagugccuc

SEQ ID NO: 287533 - RNA, 22 nt, Artificial Sequence
  Synthetic
gcgccucucagcucagugccuc

SEQ ID NO: 287534 - RNA, 23 nt, Artificial Sequence
  Synthetic
ugcgccucucagcucagugccuc

SEQ ID NO: 287535 - RNA, 24 nt, Artificial Sequence
  Synthetic
cugcgccucucagcucagugccuc

SEQ ID NO: 287536 - RNA, 18 nt, Artificial Sequence
  Synthetic
cugucuugauggugccuc

SEQ ID NO: 287537 - RNA, 19 nt, Artificial Sequence
  Synthetic
ucugucuugauggugccuc

SEQ ID NO: 287538 - RNA, 20 nt, Artificial Sequence
  Synthetic
aucugucuugauggugccuc

SEQ ID NO: 287539 - RNA, 21 nt, Artificial Sequence
  Synthetic
uaucugucuugauggugccuc

SEQ ID NO: 287540 - RNA, 22 nt, Artificial Sequence
  Synthetic
auaucugucuugauggugccuc

SEQ ID NO: 287541 - RNA, 23 nt, Artificial Sequence
  Synthetic
aauaucugucuugauggugccuc

SEQ ID NO: 287542 - RNA, 24 nt, Artificial Sequence
  Synthetic
uaauaucugucuugauggugccuc

SEQ ID NO: 287543 - RNA, 18 nt, Artificial Sequence
  Synthetic
acacuaaauauuugccuc

SEQ ID NO: 287544 - RNA, 19 nt, Artificial Sequence
  Synthetic
aacacuaaauauuugccuc

SEQ ID NO: 287545 - RNA, 20 nt, Artificial Sequence
  Synthetic
uaacacuaaauauuugccuc

SEQ ID NO: 287546 - RNA, 21 nt, Artificial Sequence
  Synthetic
guaacacuaaauauuugccuc

SEQ ID NO: 287547 - RNA, 22 nt, Artificial Sequence
  Synthetic
uguaacacuaaauauuugccuc

SEQ ID NO: 287548 - RNA, 23 nt, Artificial Sequence
  Synthetic
cuguaacacuaaauauuugccuc

SEQ ID NO: 287549 - RNA, 24 nt, Artificial Sequence
  Synthetic
ucuguaacacuaaauauuugccuc

SEQ ID NO: 287550 - RNA, 18 nt, Artificial Sequence
  Synthetic
gaccauaccuuuugccuc

SEQ ID NO: 287551 - RNA, 19 nt, Artificial Sequence
  Synthetic
ugaccauaccuuuugccuc

SEQ ID NO: 287552 - RNA, 20 nt, Artificial Sequence
  Synthetic
cugaccauaccuuuugccuc

SEQ ID NO: 287553 - RNA, 21 nt, Artificial Sequence
  Synthetic
ucugaccauaccuuuugccuc

SEQ ID NO: 287554 - RNA, 22 nt, Artificial Sequence
  Synthetic
cucugaccauaccuuuugccuc

SEQ ID NO: 287555 - RNA, 23 nt, Artificial Sequence
  Synthetic
acucugaccauaccuuuugccuc

SEQ ID NO: 287556 - RNA, 24 nt, Artificial Sequence
  Synthetic
aacucugaccauaccuuuugccuc

SEQ ID NO: 287557 - RNA, 18 nt, Artificial Sequence
  Synthetic
uuaaccugcagaauccuc

SEQ ID NO: 287558 - RNA, 19 nt, Artificial Sequence
  Synthetic
uuuaaccugcagaauccuc

SEQ ID NO: 287559 - RNA, 20 nt, Artificial Sequence
  Synthetic
auuuaaccugcagaauccuc

SEQ ID NO: 287560 - RNA, 21 nt, Artificial Sequence
  Synthetic
cauuuaaccugcagaauccuc

SEQ ID NO: 287561 - RNA, 22 nt, Artificial Sequence
  Synthetic
gcauuuaaccugcagaauccuc

SEQ ID NO: 287562 - RNA, 23 nt, Artificial Sequence
  Synthetic
ugcauuuaaccugcagaauccuc

SEQ ID NO: 287563 - RNA, 24 nt, Artificial Sequence
  Synthetic
cugcauuuaaccugcagaauccuc

SEQ ID NO: 287564 - RNA, 18 nt, Artificial Sequence
  Synthetic
gcugagguuauaauccuc

SEQ ID NO: 287565 - RNA, 19 nt, Artificial Sequence
  Synthetic
cgcugagguuauaauccuc

SEQ ID NO: 287566 - RNA, 20 nt, Artificial Sequence
  Synthetic
ccgcugagguuauaauccuc

SEQ ID NO: 287567 - RNA, 21 nt, Artificial Sequence
  Synthetic
uccgcugagguuauaauccuc

SEQ ID NO: 287568 - RNA, 22 nt, Artificial Sequence
  Synthetic
uuccgcugagguuauaauccuc

SEQ ID NO: 287569 - RNA, 23 nt, Artificial Sequence
  Synthetic
uuuccgcugagguuauaauccuc

SEQ ID NO: 287570 - RNA, 24 nt, Artificial Sequence
  Synthetic
cuuuccgcugagguuauaauccuc

SEQ ID NO: 287571 - RNA, 18 nt, Artificial Sequence
  Synthetic
uucuccugcgucauccuc

SEQ ID NO: 287572 - RNA, 19 nt, Artificial Sequence
  Synthetic
auucuccugcgucauccuc

SEQ ID NO: 287573 - RNA, 20 nt, Artificial Sequence
  Synthetic
cauucuccugcgucauccuc

SEQ ID NO: 287574 - RNA, 21 nt, Artificial Sequence
  Synthetic
ccauucuccugcgucauccuc

SEQ ID NO: 287575 - RNA, 22 nt, Artificial Sequence
  Synthetic
gccauucuccugcgucauccuc

SEQ ID NO: 287576 - RNA, 23 nt, Artificial Sequence
  Synthetic
cgccauucuccugcgucauccuc

SEQ ID NO: 287577 - RNA, 24 nt, Artificial Sequence
  Synthetic
acgccauucuccugcgucauccuc

SEQ ID NO: 287578 - RNA, 18 nt, Artificial Sequence
  Synthetic
gaguguacuuucauccuc

SEQ ID NO: 287579 - RNA, 19 nt, Artificial Sequence
  Synthetic
ggaguguacuuucauccuc

SEQ ID NO: 287580 - RNA, 20 nt, Artificial Sequence
  Synthetic
uggaguguacuuucauccuc

SEQ ID NO: 287581 - RNA, 21 nt, Artificial Sequence
  Synthetic
uuggaguguacuuucauccuc

SEQ ID NO: 287582 - RNA, 22 nt, Artificial Sequence
  Synthetic
cuuggaguguacuuucauccuc

SEQ ID NO: 287583 - RNA, 23 nt, Artificial Sequence
  Synthetic
acuuggaguguacuuucauccuc

SEQ ID NO: 287584 - RNA, 24 nt, Artificial Sequence
  Synthetic
aacuuggaguguacuuucauccuc

SEQ ID NO: 287585 - RNA, 18 nt, Artificial Sequence
  Synthetic
auguagcuuuucauccuc

SEQ ID NO: 287586 - RNA, 19 nt, Artificial Sequence
  Synthetic
uauguagcuuuucauccuc

SEQ ID NO: 287587 - RNA, 20 nt, Artificial Sequence
  Synthetic
cuauguagcuuuucauccuc

SEQ ID NO: 287588 - RNA, 21 nt, Artificial Sequence
  Synthetic
ccuauguagcuuuucauccuc

SEQ ID NO: 287589 - RNA, 22 nt, Artificial Sequence
  Synthetic
cccuauguagcuuuucauccuc

SEQ ID NO: 287590 - RNA, 23 nt, Artificial Sequence
  Synthetic
gcccuauguagcuuuucauccuc

SEQ ID NO: 287591 - RNA, 24 nt, Artificial Sequence
  Synthetic
ugcccuauguagcuuuucauccuc

SEQ ID NO: 287592 - RNA, 18 nt, Artificial Sequence
  Synthetic
uguucauacaugauccuc

SEQ ID NO: 287593 - RNA, 19 nt, Artificial Sequence
  Synthetic
guguucauacaugauccuc

SEQ ID NO: 287594 - RNA, 20 nt, Artificial Sequence
  Synthetic
gguguucauacaugauccuc

SEQ ID NO: 287595 - RNA, 21 nt, Artificial Sequence
  Synthetic
agguguucauacaugauccuc

SEQ ID NO: 287596 - RNA, 22 nt, Artificial Sequence
  Synthetic
cagguguucauacaugauccuc

SEQ ID NO: 287597 - RNA, 23 nt, Artificial Sequence
  Synthetic
ucagguguucauacaugauccuc

SEQ ID NO: 287598 - RNA, 24 nt, Artificial Sequence
  Synthetic
aucagguguucauacaugauccuc

SEQ ID NO: 287599 - RNA, 18 nt, Artificial Sequence
  Synthetic
aguaggccucugauccuc

SEQ ID NO: 287600 - RNA, 19 nt, Artificial Sequence
  Synthetic
caguaggccucugauccuc

SEQ ID NO: 287601 - RNA, 20 nt, Artificial Sequence
  Synthetic
ccaguaggccucugauccuc

SEQ ID NO: 287602 - RNA, 21 nt, Artificial Sequence
  Synthetic
uccaguaggccucugauccuc

SEQ ID NO: 287603 - RNA, 22 nt, Artificial Sequence
  Synthetic
uuccaguaggccucugauccuc

SEQ ID NO: 287604 - RNA, 23 nt, Artificial Sequence
  Synthetic
auuccaguaggccucugauccuc

SEQ ID NO: 287605 - RNA, 24 nt, Artificial Sequence
  Synthetic
gauuccaguaggccucugauccuc

SEQ ID NO: 287606 - RNA, 18 nt, Artificial Sequence
  Synthetic
cuuauucucuguauccuc

SEQ ID NO: 287607 - RNA, 19 nt, Artificial Sequence
  Synthetic
ccuuauucucuguauccuc

SEQ ID NO: 287608 - RNA, 20 nt, Artificial Sequence
  Synthetic
uccuuauucucuguauccuc

SEQ ID NO: 287609 - RNA, 21 nt, Artificial Sequence
  Synthetic
uuccuuauucucuguauccuc

SEQ ID NO: 287610 - RNA, 22 nt, Artificial Sequence
  Synthetic
uuuccuuauucucuguauccuc

SEQ ID NO: 287611 - RNA, 23 nt, Artificial Sequence
  Synthetic
guuuccuuauucucuguauccuc

SEQ ID NO: 287612 - RNA, 24 nt, Artificial Sequence
  Synthetic
gguuuccuuauucucuguauccuc

SEQ ID NO: 287613 - RNA, 18 nt, Artificial Sequence
  Synthetic
acugauuauaaacuccuc

SEQ ID NO: 287614 - RNA, 19 nt, Artificial Sequence
  Synthetic
aacugauuauaaacuccuc

SEQ ID NO: 287615 - RNA, 20 nt, Artificial Sequence
  Synthetic
caacugauuauaaacuccuc

SEQ ID NO: 287616 - RNA, 21 nt, Artificial Sequence
  Synthetic
ccaacugauuauaaacuccuc

SEQ ID NO: 287617 - RNA, 22 nt, Artificial Sequence
  Synthetic
uccaacugauuauaaacuccuc

SEQ ID NO: 287618 - RNA, 23 nt, Artificial Sequence
  Synthetic
uuccaacugauuauaaacuccuc

SEQ ID NO: 287619 - RNA, 24 nt, Artificial Sequence
  Synthetic
uuuccaacugauuauaaacuccuc

SEQ ID NO: 287620 - RNA, 18 nt, Artificial Sequence
  Synthetic
uucugauagcuacuccuc

SEQ ID NO: 287621 - RNA, 19 nt, Artificial Sequence
  Synthetic
auucugauagcuacuccuc

SEQ ID NO: 287622 - RNA, 20 nt, Artificial Sequence
  Synthetic
cauucugauagcuacuccuc

SEQ ID NO: 287623 - RNA, 21 nt, Artificial Sequence
  Synthetic
ccauucugauagcuacuccuc

SEQ ID NO: 287624 - RNA, 22 nt, Artificial Sequence
  Synthetic
accauucugauagcuacuccuc

SEQ ID NO: 287625 - RNA, 23 nt, Artificial Sequence
  Synthetic
uaccauucugauagcuacuccuc

SEQ ID NO: 287626 - RNA, 24 nt, Artificial Sequence
  Synthetic
cuaccauucugauagcuacuccuc

SEQ ID NO: 287627 - RNA, 18 nt, Artificial Sequence
  Synthetic
caauuuguuuggcuccuc

SEQ ID NO: 287628 - RNA, 19 nt, Artificial Sequence
  Synthetic
ccaauuuguuuggcuccuc

SEQ ID NO: 287629 - RNA, 20 nt, Artificial Sequence
  Synthetic
gccaauuuguuuggcuccuc

SEQ ID NO: 287630 - RNA, 21 nt, Artificial Sequence
  Synthetic
agccaauuuguuuggcuccuc

SEQ ID NO: 287631 - RNA, 22 nt, Artificial Sequence
  Synthetic
cagccaauuuguuuggcuccuc

SEQ ID NO: 287632 - RNA, 23 nt, Artificial Sequence
  Synthetic
acagccaauuuguuuggcuccuc

SEQ ID NO: 287633 - RNA, 24 nt, Artificial Sequence
  Synthetic
uacagccaauuuguuuggcuccuc

SEQ ID NO: 287634 - RNA, 18 nt, Artificial Sequence
  Synthetic
gugguaagaacucuccuc

SEQ ID NO: 287635 - RNA, 19 nt, Artificial Sequence
  Synthetic
ggugguaagaacucuccuc

SEQ ID NO: 287636 - RNA, 20 nt, Artificial Sequence
  Synthetic
cggugguaagaacucuccuc

SEQ ID NO: 287637 - RNA, 21 nt, Artificial Sequence
  Synthetic
gcggugguaagaacucuccuc

SEQ ID NO: 287638 - RNA, 22 nt, Artificial Sequence
  Synthetic
ugcggugguaagaacucuccuc

SEQ ID NO: 287639 - RNA, 23 nt, Artificial Sequence
  Synthetic
uugcggugguaagaacucuccuc

SEQ ID NO: 287640 - RNA, 24 nt, Artificial Sequence
  Synthetic
uuugcggugguaagaacucuccuc

SEQ ID NO: 287641 - RNA, 18 nt, Artificial Sequence
  Synthetic
augucacucauucuccuc

SEQ ID NO: 287642 - RNA, 19 nt, Artificial Sequence
  Synthetic
uaugucacucauucuccuc

SEQ ID NO: 287643 - RNA, 20 nt, Artificial Sequence
  Synthetic
auaugucacucauucuccuc

SEQ ID NO: 287644 - RNA, 21 nt, Artificial Sequence
  Synthetic
cauaugucacucauucuccuc

SEQ ID NO: 287645 - RNA, 22 nt, Artificial Sequence
  Synthetic
ccauaugucacucauucuccuc

SEQ ID NO: 287646 - RNA, 23 nt, Artificial Sequence
  Synthetic
uccauaugucacucauucuccuc

SEQ ID NO: 287647 - RNA, 24 nt, Artificial Sequence
  Synthetic
cuccauaugucacucauucuccuc

SEQ ID NO: 287648 - RNA, 18 nt, Artificial Sequence
  Synthetic
ggccucuuaaaaguccuc

SEQ ID NO: 287649 - RNA, 19 nt, Artificial Sequence
  Synthetic
aggccucuuaaaaguccuc

SEQ ID NO: 287650 - RNA, 20 nt, Artificial Sequence
  Synthetic
uaggccucuuaaaaguccuc

SEQ ID NO: 287651 - RNA, 21 nt, Artificial Sequence
  Synthetic
cuaggccucuuaaaaguccuc

SEQ ID NO: 287652 - RNA, 22 nt, Artificial Sequence
  Synthetic
ccuaggccucuuaaaaguccuc

SEQ ID NO: 287653 - RNA, 23 nt, Artificial Sequence
  Synthetic
cccuaggccucuuaaaaguccuc

SEQ ID NO: 287654 - RNA, 24 nt, Artificial Sequence
  Synthetic
ccccuaggccucuuaaaaguccuc

SEQ ID NO: 287655 - RNA, 18 nt, Artificial Sequence
  Synthetic
ugcucaaggcaaguccuc

SEQ ID NO: 287656 - RNA, 19 nt, Artificial Sequence
  Synthetic
uugcucaaggcaaguccuc

SEQ ID NO: 287657 - RNA, 20 nt, Artificial Sequence
  Synthetic
cuugcucaaggcaaguccuc

SEQ ID NO: 287658 - RNA, 21 nt, Artificial Sequence
  Synthetic
ucuugcucaaggcaaguccuc

SEQ ID NO: 287659 - RNA, 22 nt, Artificial Sequence
  Synthetic
uucuugcucaaggcaaguccuc

SEQ ID NO: 287660 - RNA, 23 nt, Artificial Sequence
  Synthetic
guucuugcucaaggcaaguccuc

SEQ ID NO: 287661 - RNA, 24 nt, Artificial Sequence
  Synthetic
aguucuugcucaaggcaaguccuc

SEQ ID NO: 287662 - RNA, 18 nt, Artificial Sequence
  Synthetic
uuuuccuacuuaguccuc

SEQ ID NO: 287663 - RNA, 19 nt, Artificial Sequence
  Synthetic
uuuuuccuacuuaguccuc

SEQ ID NO: 287664 - RNA, 20 nt, Artificial Sequence
  Synthetic
uuuuuuccuacuuaguccuc

SEQ ID NO: 287665 - RNA, 21 nt, Artificial Sequence
  Synthetic
cuuuuuuccuacuuaguccuc

SEQ ID NO: 287666 - RNA, 22 nt, Artificial Sequence
  Synthetic
ccuuuuuuccuacuuaguccuc

SEQ ID NO: 287667 - RNA, 23 nt, Artificial Sequence
  Synthetic
accuuuuuuccuacuuaguccuc

SEQ ID NO: 287668 - RNA, 24 nt, Artificial Sequence
  Synthetic
uaccuuuuuuccuacuuaguccuc

SEQ ID NO: 287669 - RNA, 18 nt, Artificial Sequence
  Synthetic
auuguaucacauguccuc

SEQ ID NO: 287670 - RNA, 19 nt, Artificial Sequence
  Synthetic
cauuguaucacauguccuc

SEQ ID NO: 287671 - RNA, 20 nt, Artificial Sequence
  Synthetic
ucauuguaucacauguccuc

SEQ ID NO: 287672 - RNA, 21 nt, Artificial Sequence
  Synthetic
aucauuguaucacauguccuc

SEQ ID NO: 287673 - RNA, 22 nt, Artificial Sequence
  Synthetic
caucauuguaucacauguccuc

SEQ ID NO: 287674 - RNA, 23 nt, Artificial Sequence
  Synthetic
ccaucauuguaucacauguccuc

SEQ ID NO: 287675 - RNA, 24 nt, Artificial Sequence
  Synthetic
gccaucauuguaucacauguccuc

SEQ ID NO: 287676 - RNA, 18 nt, Artificial Sequence
  Synthetic
uacuucacauuuguccuc

SEQ ID NO: 287677 - RNA, 19 nt, Artificial Sequence
  Synthetic
cuacuucacauuuguccuc

SEQ ID NO: 287678 - RNA, 20 nt, Artificial Sequence
  Synthetic
acuacuucacauuuguccuc

SEQ ID NO: 287679 - RNA, 21 nt, Artificial Sequence
  Synthetic
aacuacuucacauuuguccuc

SEQ ID NO: 287680 - RNA, 22 nt, Artificial Sequence
  Synthetic
caacuacuucacauuuguccuc

SEQ ID NO: 287681 - RNA, 23 nt, Artificial Sequence
  Synthetic
gcaacuacuucacauuuguccuc

SEQ ID NO: 287682 - RNA, 24 nt, Artificial Sequence
  Synthetic
ggcaacuacuucacauuuguccuc

SEQ ID NO: 287683 - RNA, 18 nt, Artificial Sequence
  Synthetic
gauagucucaaauuccuc

SEQ ID NO: 287684 - RNA, 19 nt, Artificial Sequence
  Synthetic
ggauagucucaaauuccuc

SEQ ID NO: 287685 - RNA, 20 nt, Artificial Sequence
  Synthetic
uggauagucucaaauuccuc

SEQ ID NO: 287686 - RNA, 21 nt, Artificial Sequence
  Synthetic
guggauagucucaaauuccuc

SEQ ID NO: 287687 - RNA, 22 nt, Artificial Sequence
  Synthetic
cguggauagucucaaauuccuc

SEQ ID NO: 287688 - RNA, 23 nt, Artificial Sequence
  Synthetic
ccguggauagucucaaauuccuc

SEQ ID NO: 287689 - RNA, 24 nt, Artificial Sequence
  Synthetic
uccguggauagucucaaauuccuc

SEQ ID NO: 287690 - RNA, 18 nt, Artificial Sequence
  Synthetic
uaagaaaauaaauuccuc

SEQ ID NO: 287691 - RNA, 19 nt, Artificial Sequence
  Synthetic
uuaagaaaauaaauuccuc

SEQ ID NO: 287692 - RNA, 20 nt, Artificial Sequence
  Synthetic
cuuaagaaaauaaauuccuc

SEQ ID NO: 287693 - RNA, 21 nt, Artificial Sequence
  Synthetic
acuuaagaaaauaaauuccuc

SEQ ID NO: 287694 - RNA, 22 nt, Artificial Sequence
  Synthetic
uacuuaagaaaauaaauuccuc

SEQ ID NO: 287695 - RNA, 23 nt, Artificial Sequence
  Synthetic
guacuuaagaaaauaaauuccuc

SEQ ID NO: 287696 - RNA, 24 nt, Artificial Sequence
  Synthetic
aguacuuaagaaaauaaauuccuc

SEQ ID NO: 287697 - RNA, 18 nt, Artificial Sequence
  Synthetic
gcacucgcauuauuccuc

SEQ ID NO: 287698 - RNA, 19 nt, Artificial Sequence
  Synthetic
agcacucgcauuauuccuc

SEQ ID NO: 287699 - RNA, 20 nt, Artificial Sequence
  Synthetic
cagcacucgcauuauuccuc

SEQ ID NO: 287700 - RNA, 21 nt, Artificial Sequence
  Synthetic
acagcacucgcauuauuccuc

SEQ ID NO: 287701 - RNA, 22 nt, Artificial Sequence
  Synthetic
gacagcacucgcauuauuccuc

SEQ ID NO: 287702 - RNA, 23 nt, Artificial Sequence
  Synthetic
ugacagcacucgcauuauuccuc

SEQ ID NO: 287703 - RNA, 24 nt, Artificial Sequence
  Synthetic
uugacagcacucgcauuauuccuc

SEQ ID NO: 287704 - RNA, 18 nt, Artificial Sequence
  Synthetic
ucuucuuaaggcuuccuc

SEQ ID NO: 287705 - RNA, 19 nt, Artificial Sequence
  Synthetic
aucuucuuaaggcuuccuc

SEQ ID NO: 287706 - RNA, 20 nt, Artificial Sequence
  Synthetic
aaucuucuuaaggcuuccuc

SEQ ID NO: 287707 - RNA, 21 nt, Artificial Sequence
  Synthetic
uaaucuucuuaaggcuuccuc

SEQ ID NO: 287708 - RNA, 22 nt, Artificial Sequence
  Synthetic
cuaaucuucuuaaggcuuccuc

SEQ ID NO: 287709 - RNA, 23 nt, Artificial Sequence
  Synthetic
ccuaaucuucuuaaggcuuccuc

SEQ ID NO: 287710 - RNA, 24 nt, Artificial Sequence
  Synthetic
cccuaaucuucuuaaggcuuccuc

SEQ ID NO: 287711 - RNA, 18 nt, Artificial Sequence
  Synthetic
aaaagccauaaguuccuc

SEQ ID NO: 287712 - RNA, 19 nt, Artificial Sequence
  Synthetic
gaaaagccauaaguuccuc

SEQ ID NO: 287713 - RNA, 20 nt, Artificial Sequence
  Synthetic
agaaaagccauaaguuccuc

SEQ ID NO: 287714 - RNA, 21 nt, Artificial Sequence
  Synthetic
aagaaaagccauaaguuccuc

SEQ ID NO: 287715 - RNA, 22 nt, Artificial Sequence
  Synthetic
gaagaaaagccauaaguuccuc

SEQ ID NO: 287716 - RNA, 23 nt, Artificial Sequence
  Synthetic
agaagaaaagccauaaguuccuc

SEQ ID NO: 287717 - RNA, 24 nt, Artificial Sequence
  Synthetic
gagaagaaaagccauaaguuccuc

SEQ ID NO: 287718 - RNA, 18 nt, Artificial Sequence
  Synthetic
gcacuuuaccuguuccuc

SEQ ID NO: 287719 - RNA, 19 nt, Artificial Sequence
  Synthetic
ggcacuuuaccuguuccuc

SEQ ID NO: 287720 - RNA, 20 nt, Artificial Sequence
  Synthetic
uggcacuuuaccuguuccuc

SEQ ID NO: 287721 - RNA, 21 nt, Artificial Sequence
  Synthetic
auggcacuuuaccuguuccuc

SEQ ID NO: 287722 - RNA, 22 nt, Artificial Sequence
  Synthetic
aauggcacuuuaccuguuccuc

SEQ ID NO: 287723 - RNA, 23 nt, Artificial Sequence
  Synthetic
caauggcacuuuaccuguuccuc

SEQ ID NO: 287724 - RNA, 24 nt, Artificial Sequence
  Synthetic
gcaauggcacuuuaccuguuccuc

SEQ ID NO: 287725 - RNA, 18 nt, Artificial Sequence
  Synthetic
gguguaauucuguuccuc

SEQ ID NO: 287726 - RNA, 19 nt, Artificial Sequence
  Synthetic
agguguaauucuguuccuc

SEQ ID NO: 287727 - RNA, 20 nt, Artificial Sequence
  Synthetic
aagguguaauucuguuccuc

SEQ ID NO: 287728 - RNA, 21 nt, Artificial Sequence
  Synthetic
aaagguguaauucuguuccuc

SEQ ID NO: 287729 - RNA, 22 nt, Artificial Sequence
  Synthetic
gaaagguguaauucuguuccuc

SEQ ID NO: 287730 - RNA, 23 nt, Artificial Sequence
  Synthetic
agaaagguguaauucuguuccuc

SEQ ID NO: 287731 - RNA, 24 nt, Artificial Sequence
  Synthetic
aagaaagguguaauucuguuccuc

SEQ ID NO: 287732 - RNA, 18 nt, Artificial Sequence
  Synthetic
aaacacugugauuuccuc

SEQ ID NO: 287733 - RNA, 19 nt, Artificial Sequence
  Synthetic
gaaacacugugauuuccuc

SEQ ID NO: 287734 - RNA, 20 nt, Artificial Sequence
  Synthetic
agaaacacugugauuuccuc

SEQ ID NO: 287735 - RNA, 21 nt, Artificial Sequence
  Synthetic
cagaaacacugugauuuccuc

SEQ ID NO: 287736 - RNA, 22 nt, Artificial Sequence
  Synthetic
acagaaacacugugauuuccuc

SEQ ID NO: 287737 - RNA, 23 nt, Artificial Sequence
  Synthetic
aacagaaacacugugauuuccuc

SEQ ID NO: 287738 - RNA, 24 nt, Artificial Sequence
  Synthetic
aaacagaaacacugugauuuccuc

SEQ ID NO: 287739 - RNA, 18 nt, Artificial Sequence
  Synthetic
agcaauuuuucuuuccuc

SEQ ID NO: 287740 - RNA, 19 nt, Artificial Sequence
  Synthetic
aagcaauuuuucuuuccuc

SEQ ID NO: 287741 - RNA, 20 nt, Artificial Sequence
  Synthetic
uaagcaauuuuucuuuccuc

SEQ ID NO: 287742 - RNA, 21 nt, Artificial Sequence
  Synthetic
auaagcaauuuuucuuuccuc

SEQ ID NO: 287743 - RNA, 22 nt, Artificial Sequence
  Synthetic
cauaagcaauuuuucuuuccuc

SEQ ID NO: 287744 - RNA, 23 nt, Artificial Sequence
  Synthetic
ccauaagcaauuuuucuuuccuc

SEQ ID NO: 287745 - RNA, 24 nt, Artificial Sequence
  Synthetic
accauaagcaauuuuucuuuccuc

SEQ ID NO: 287746 - RNA, 18 nt, Artificial Sequence
  Synthetic
cgguuugacaguuuccuc

SEQ ID NO: 287747 - RNA, 19 nt, Artificial Sequence
  Synthetic
gcgguuugacaguuuccuc

SEQ ID NO: 287748 - RNA, 20 nt, Artificial Sequence
  Synthetic
ggcgguuugacaguuuccuc

SEQ ID NO: 287749 - RNA, 21 nt, Artificial Sequence
  Synthetic
aggcgguuugacaguuuccuc

SEQ ID NO: 287750 - RNA, 22 nt, Artificial Sequence
  Synthetic
aaggcgguuugacaguuuccuc

SEQ ID NO: 287751 - RNA, 23 nt, Artificial Sequence
  Synthetic
uaaggcgguuugacaguuuccuc

SEQ ID NO: 287752 - RNA, 24 nt, Artificial Sequence
  Synthetic
uuaaggcgguuugacaguuuccuc

SEQ ID NO: 287753 - RNA, 18 nt, Artificial Sequence
  Synthetic
cuuacaucuuguuuccuc

SEQ ID NO: 287754 - RNA, 19 nt, Artificial Sequence
  Synthetic
gcuuacaucuuguuuccuc

SEQ ID NO: 287755 - RNA, 20 nt, Artificial Sequence
  Synthetic
ugcuuacaucuuguuuccuc

SEQ ID NO: 287756 - RNA, 21 nt, Artificial Sequence
  Synthetic
augcuuacaucuuguuuccuc

SEQ ID NO: 287757 - RNA, 22 nt, Artificial Sequence
  Synthetic
uaugcuuacaucuuguuuccuc

SEQ ID NO: 287758 - RNA, 23 nt, Artificial Sequence
  Synthetic
auaugcuuacaucuuguuuccuc

SEQ ID NO: 287759 - RNA, 24 nt, Artificial Sequence
  Synthetic
uauaugcuuacaucuuguuuccuc

SEQ ID NO: 287760 - RNA, 18 nt, Artificial Sequence
  Synthetic
ccccaaaucccaaagcuc

SEQ ID NO: 287761 - RNA, 19 nt, Artificial Sequence
  Synthetic
uccccaaaucccaaagcuc

SEQ ID NO: 287762 - RNA, 20 nt, Artificial Sequence
  Synthetic
uuccccaaaucccaaagcuc

SEQ ID NO: 287763 - RNA, 21 nt, Artificial Sequence
  Synthetic
cuuccccaaaucccaaagcuc

SEQ ID NO: 287764 - RNA, 22 nt, Artificial Sequence
  Synthetic
ucuuccccaaaucccaaagcuc

SEQ ID NO: 287765 - RNA, 23 nt, Artificial Sequence
  Synthetic
uucuuccccaaaucccaaagcuc

SEQ ID NO: 287766 - RNA, 24 nt, Artificial Sequence
  Synthetic
auucuuccccaaaucccaaagcuc

SEQ ID NO: 287767 - RNA, 18 nt, Artificial Sequence
  Synthetic
gugaaccuuaagaagcuc

SEQ ID NO: 287768 - RNA, 19 nt, Artificial Sequence
  Synthetic
ugugaaccuuaagaagcuc

SEQ ID NO: 287769 - RNA, 20 nt, Artificial Sequence
  Synthetic
uugugaaccuuaagaagcuc

SEQ ID NO: 287770 - RNA, 21 nt, Artificial Sequence
  Synthetic
uuugugaaccuuaagaagcuc

SEQ ID NO: 287771 - RNA, 22 nt, Artificial Sequence
  Synthetic
uuuugugaaccuuaagaagcuc

SEQ ID NO: 287772 - RNA, 23 nt, Artificial Sequence
  Synthetic
auuuugugaaccuuaagaagcuc

SEQ ID NO: 287773 - RNA, 24 nt, Artificial Sequence
  Synthetic
uauuuugugaaccuuaagaagcuc

SEQ ID NO: 287774 - RNA, 18 nt, Artificial Sequence
  Synthetic
uaaugugcagcgaagcuc

SEQ ID NO: 287775 - RNA, 19 nt, Artificial Sequence
  Synthetic
cuaaugugcagcgaagcuc

SEQ ID NO: 287776 - RNA, 20 nt, Artificial Sequence
  Synthetic
ucuaaugugcagcgaagcuc

SEQ ID NO: 287777 - RNA, 21 nt, Artificial Sequence
  Synthetic
aucuaaugugcagcgaagcuc

SEQ ID NO: 287778 - RNA, 22 nt, Artificial Sequence
  Synthetic
aaucuaaugugcagcgaagcuc

SEQ ID NO: 287779 - RNA, 23 nt, Artificial Sequence
  Synthetic
caaucuaaugugcagcgaagcuc

SEQ ID NO: 287780 - RNA, 24 nt, Artificial Sequence
  Synthetic
ucaaucuaaugugcagcgaagcuc

SEQ ID NO: 287781 - RNA, 18 nt, Artificial Sequence
  Synthetic
aaacuuccagugaagcuc

SEQ ID NO: 287782 - RNA, 19 nt, Artificial Sequence
  Synthetic
aaaacuuccagugaagcuc

SEQ ID NO: 287783 - RNA, 20 nt, Artificial Sequence
  Synthetic
aaaaacuuccagugaagcuc

SEQ ID NO: 287784 - RNA, 21 nt, Artificial Sequence
  Synthetic
gaaaaacuuccagugaagcuc

SEQ ID NO: 287785 - RNA, 22 nt, Artificial Sequence
  Synthetic
agaaaaacuuccagugaagcuc

SEQ ID NO: 287786 - RNA, 23 nt, Artificial Sequence
  Synthetic
gagaaaaacuuccagugaagcuc

SEQ ID NO: 287787 - RNA, 24 nt, Artificial Sequence
  Synthetic
ggagaaaaacuuccagugaagcuc

SEQ ID NO: 287788 - RNA, 18 nt, Artificial Sequence
  Synthetic
cacuuuuauuuuaagcuc

SEQ ID NO: 287789 - RNA, 19 nt, Artificial Sequence
  Synthetic
ucacuuuuauuuuaagcuc

SEQ ID NO: 287790 - RNA, 20 nt, Artificial Sequence
  Synthetic
uucacuuuuauuuuaagcuc

SEQ ID NO: 287791 - RNA, 21 nt, Artificial Sequence
  Synthetic
uuucacuuuuauuuuaagcuc

SEQ ID NO: 287792 - RNA, 22 nt, Artificial Sequence
  Synthetic
uuuucacuuuuauuuuaagcuc

SEQ ID NO: 287793 - RNA, 23 nt, Artificial Sequence
  Synthetic
uuuuucacuuuuauuuuaagcuc

SEQ ID NO: 287794 - RNA, 24 nt, Artificial Sequence
  Synthetic
uuuuuucacuuuuauuuuaagcuc

SEQ ID NO: 287795 - RNA, 18 nt, Artificial Sequence
  Synthetic
aggcuuggugaacagcuc

SEQ ID NO: 287796 - RNA, 19 nt, Artificial Sequence
  Synthetic
aaggcuuggugaacagcuc

SEQ ID NO: 287797 - RNA, 20 nt, Artificial Sequence
  Synthetic
caaggcuuggugaacagcuc

SEQ ID NO: 287798 - RNA, 21 nt, Artificial Sequence
  Synthetic
gcaaggcuuggugaacagcuc

SEQ ID NO: 287799 - RNA, 22 nt, Artificial Sequence
  Synthetic
ugcaaggcuuggugaacagcuc

SEQ ID NO: 287800 - RNA, 23 nt, Artificial Sequence
  Synthetic
augcaaggcuuggugaacagcuc

SEQ ID NO: 287801 - RNA, 24 nt, Artificial Sequence
  Synthetic
aaugcaaggcuuggugaacagcuc

SEQ ID NO: 287802 - RNA, 18 nt, Artificial Sequence
  Synthetic
auuugguugucacagcuc

SEQ ID NO: 287803 - RNA, 19 nt, Artificial Sequence
  Synthetic
uauuugguugucacagcuc

SEQ ID NO: 287804 - RNA, 20 nt, Artificial Sequence
  Synthetic
auauuugguugucacagcuc

SEQ ID NO: 287805 - RNA, 21 nt, Artificial Sequence
  Synthetic
cauauuugguugucacagcuc

SEQ ID NO: 287806 - RNA, 22 nt, Artificial Sequence
  Synthetic
acauauuugguugucacagcuc

SEQ ID NO: 287807 - RNA, 23 nt, Artificial Sequence
  Synthetic
aacauauuugguugucacagcuc

SEQ ID NO: 287808 - RNA, 24 nt, Artificial Sequence
  Synthetic
aaacauauuugguugucacagcuc

SEQ ID NO: 287809 - RNA, 18 nt, Artificial Sequence
  Synthetic
ugucauacaauacagcuc

SEQ ID NO: 287810 - RNA, 19 nt, Artificial Sequence
  Synthetic
gugucauacaauacagcuc

SEQ ID NO: 287811 - RNA, 20 nt, Artificial Sequence
  Synthetic
ugugucauacaauacagcuc

SEQ ID NO: 287812 - RNA, 21 nt, Artificial Sequence
  Synthetic
augugucauacaauacagcuc

SEQ ID NO: 287813 - RNA, 22 nt, Artificial Sequence
  Synthetic
aaugugucauacaauacagcuc

SEQ ID NO: 287814 - RNA, 23 nt, Artificial Sequence
  Synthetic
aaaugugucauacaauacagcuc

SEQ ID NO: 287815 - RNA, 24 nt, Artificial Sequence
  Synthetic
uaaaugugucauacaauacagcuc

SEQ ID NO: 287816 - RNA, 18 nt, Artificial Sequence
  Synthetic
gggaagagcugccagcuc

SEQ ID NO: 287817 - RNA, 19 nt, Artificial Sequence
  Synthetic
ggggaagagcugccagcuc

SEQ ID NO: 287818 - RNA, 20 nt, Artificial Sequence
  Synthetic
aggggaagagcugccagcuc

SEQ ID NO: 287819 - RNA, 21 nt, Artificial Sequence
  Synthetic
gaggggaagagcugccagcuc

SEQ ID NO: 287820 - RNA, 22 nt, Artificial Sequence
  Synthetic
ggaggggaagagcugccagcuc

SEQ ID NO: 287821 - RNA, 23 nt, Artificial Sequence
  Synthetic
uggaggggaagagcugccagcuc

SEQ ID NO: 287822 - RNA, 24 nt, Artificial Sequence
  Synthetic
auggaggggaagagcugccagcuc

SEQ ID NO: 287823 - RNA, 18 nt, Artificial Sequence
  Synthetic
uaauaaucacaucagcuc

SEQ ID NO: 287824 - RNA, 19 nt, Artificial Sequence
  Synthetic
uuaauaaucacaucagcuc

SEQ ID NO: 287825 - RNA, 20 nt, Artificial Sequence
  Synthetic
uuuaauaaucacaucagcuc

SEQ ID NO: 287826 - RNA, 21 nt, Artificial Sequence
  Synthetic
uuuuaauaaucacaucagcuc

SEQ ID NO: 287827 - RNA, 22 nt, Artificial Sequence
  Synthetic
cuuuuaauaaucacaucagcuc

SEQ ID NO: 287828 - RNA, 23 nt, Artificial Sequence
  Synthetic
gcuuuuaauaaucacaucagcuc

SEQ ID NO: 287829 - RNA, 24 nt, Artificial Sequence
  Synthetic
ggcuuuuaauaaucacaucagcuc

SEQ ID NO: 287830 - RNA, 18 nt, Artificial Sequence
  Synthetic
gaugcuggacaagagcuc

SEQ ID NO: 287831 - RNA, 19 nt, Artificial Sequence
  Synthetic
agaugcuggacaagagcuc

SEQ ID NO: 287832 - RNA, 20 nt, Artificial Sequence
  Synthetic
uagaugcuggacaagagcuc

SEQ ID NO: 287833 - RNA, 21 nt, Artificial Sequence
  Synthetic
cuagaugcuggacaagagcuc

SEQ ID NO: 287834 - RNA, 22 nt, Artificial Sequence
  Synthetic
ccuagaugcuggacaagagcuc

SEQ ID NO: 287835 - RNA, 23 nt, Artificial Sequence
  Synthetic
cccuagaugcuggacaagagcuc

SEQ ID NO: 287836 - RNA, 24 nt, Artificial Sequence
  Synthetic
ucccuagaugcuggacaagagcuc

SEQ ID NO: 287837 - RNA, 18 nt, Artificial Sequence
  Synthetic
ccuggcuuacaagagcuc

SEQ ID NO: 287838 - RNA, 19 nt, Artificial Sequence
  Synthetic
gccuggcuuacaagagcuc

SEQ ID NO: 287839 - RNA, 20 nt, Artificial Sequence
  Synthetic
ggccuggcuuacaagagcuc

SEQ ID NO: 287840 - RNA, 21 nt, Artificial Sequence
  Synthetic
aggccuggcuuacaagagcuc

SEQ ID NO: 287841 - RNA, 22 nt, Artificial Sequence
  Synthetic
caggccuggcuuacaagagcuc

SEQ ID NO: 287842 - RNA, 23 nt, Artificial Sequence
  Synthetic
ccaggccuggcuuacaagagcuc

SEQ ID NO: 287843 - RNA, 24 nt, Artificial Sequence
  Synthetic
accaggccuggcuuacaagagcuc

SEQ ID NO: 287844 - RNA, 18 nt, Artificial Sequence
  Synthetic
auccugaugaaggagcuc

SEQ ID NO: 287845 - RNA, 19 nt, Artificial Sequence
  Synthetic
gauccugaugaaggagcuc

SEQ ID NO: 287846 - RNA, 20 nt, Artificial Sequence
  Synthetic
ugauccugaugaaggagcuc

SEQ ID NO: 287847 - RNA, 21 nt, Artificial Sequence
  Synthetic
uugauccugaugaaggagcuc

SEQ ID NO: 287848 - RNA, 22 nt, Artificial Sequence
  Synthetic
uuugauccugaugaaggagcuc

SEQ ID NO: 287849 - RNA, 23 nt, Artificial Sequence
  Synthetic
guuugauccugaugaaggagcuc

SEQ ID NO: 287850 - RNA, 24 nt, Artificial Sequence
  Synthetic
gguuugauccugaugaaggagcuc

SEQ ID NO: 287851 - RNA, 18 nt, Artificial Sequence
  Synthetic
aauagucuuaaggagcuc

SEQ ID NO: 287852 - RNA, 19 nt, Artificial Sequence
  Synthetic
uaauagucuuaaggagcuc

SEQ ID NO: 287853 - RNA, 20 nt, Artificial Sequence
  Synthetic
auaauagucuuaaggagcuc

SEQ ID NO: 287854 - RNA, 21 nt, Artificial Sequence
  Synthetic
uauaauagucuuaaggagcuc

SEQ ID NO: 287855 - RNA, 22 nt, Artificial Sequence
  Synthetic
auauaauagucuuaaggagcuc

SEQ ID NO: 287856 - RNA, 23 nt, Artificial Sequence
  Synthetic
gauauaauagucuuaaggagcuc

SEQ ID NO: 287857 - RNA, 24 nt, Artificial Sequence
  Synthetic
ggauauaauagucuuaaggagcuc

SEQ ID NO: 287858 - RNA, 18 nt, Artificial Sequence
  Synthetic
ucauucucuauggagcuc

SEQ ID NO: 287859 - RNA, 19 nt, Artificial Sequence
  Synthetic
uucauucucuauggagcuc

SEQ ID NO: 287860 - RNA, 20 nt, Artificial Sequence
  Synthetic
uuucauucucuauggagcuc

SEQ ID NO: 287861 - RNA, 21 nt, Artificial Sequence
  Synthetic
auuucauucucuauggagcuc

SEQ ID NO: 287862 - RNA, 22 nt, Artificial Sequence
  Synthetic
uauuucauucucuauggagcuc

SEQ ID NO: 287863 - RNA, 23 nt, Artificial Sequence
  Synthetic
cuauuucauucucuauggagcuc

SEQ ID NO: 287864 - RNA, 24 nt, Artificial Sequence
  Synthetic
gcuauuucauucucuauggagcuc

SEQ ID NO: 287865 - RNA, 18 nt, Artificial Sequence
  Synthetic
ggcguaauuacauagcuc

SEQ ID NO: 287866 - RNA, 19 nt, Artificial Sequence
  Synthetic
aggcguaauuacauagcuc

SEQ ID NO: 287867 - RNA, 20 nt, Artificial Sequence
  Synthetic
caggcguaauuacauagcuc

SEQ ID NO: 287868 - RNA, 21 nt, Artificial Sequence
  Synthetic
acaggcguaauuacauagcuc

SEQ ID NO: 287869 - RNA, 22 nt, Artificial Sequence
  Synthetic
aacaggcguaauuacauagcuc

SEQ ID NO: 287870 - RNA, 23 nt, Artificial Sequence
  Synthetic
aaacaggcguaauuacauagcuc

SEQ ID NO: 287871 - RNA, 24 nt, Artificial Sequence
  Synthetic
gaaacaggcguaauuacauagcuc

SEQ ID NO: 287872 - RNA, 18 nt, Artificial Sequence
  Synthetic
accaaaacuuuauagcuc

SEQ ID NO: 287873 - RNA, 19 nt, Artificial Sequence
  Synthetic
caccaaaacuuuauagcuc

SEQ ID NO: 287874 - RNA, 20 nt, Artificial Sequence
  Synthetic
ccaccaaaacuuuauagcuc

SEQ ID NO: 287875 - RNA, 21 nt, Artificial Sequence
  Synthetic
cccaccaaaacuuuauagcuc

SEQ ID NO: 287876 - RNA, 22 nt, Artificial Sequence
  Synthetic
acccaccaaaacuuuauagcuc

SEQ ID NO: 287877 - RNA, 23 nt, Artificial Sequence
  Synthetic
aacccaccaaaacuuuauagcuc

SEQ ID NO: 287878 - RNA, 24 nt, Artificial Sequence
  Synthetic
gaacccaccaaaacuuuauagcuc

SEQ ID NO: 287879 - RNA, 18 nt, Artificial Sequence
  Synthetic
agcagccugaccuagcuc

SEQ ID NO: 287880 - RNA, 19 nt, Artificial Sequence
  Synthetic
aagcagccugaccuagcuc

SEQ ID NO: 287881 - RNA, 20 nt, Artificial Sequence
  Synthetic
aaagcagccugaccuagcuc

SEQ ID NO: 287882 - RNA, 21 nt, Artificial Sequence
  Synthetic
caaagcagccugaccuagcuc

SEQ ID NO: 287883 - RNA, 22 nt, Artificial Sequence
  Synthetic
gcaaagcagccugaccuagcuc

SEQ ID NO: 287884 - RNA, 23 nt, Artificial Sequence
  Synthetic
ggcaaagcagccugaccuagcuc

SEQ ID NO: 287885 - RNA, 24 nt, Artificial Sequence
  Synthetic
gggcaaagcagccugaccuagcuc

SEQ ID NO: 287886 - RNA, 18 nt, Artificial Sequence
  Synthetic
cuuugcuuggucuagcuc

SEQ ID NO: 287887 - RNA, 19 nt, Artificial Sequence
  Synthetic
gcuuugcuuggucuagcuc

SEQ ID NO: 287888 - RNA, 20 nt, Artificial Sequence
  Synthetic
ugcuuugcuuggucuagcuc

SEQ ID NO: 287889 - RNA, 21 nt, Artificial Sequence
  Synthetic
uugcuuugcuuggucuagcuc

SEQ ID NO: 287890 - RNA, 22 nt, Artificial Sequence
  Synthetic
uuugcuuugcuuggucuagcuc

SEQ ID NO: 287891 - RNA, 23 nt, Artificial Sequence
  Synthetic
auuugcuuugcuuggucuagcuc

SEQ ID NO: 287892 - RNA, 24 nt, Artificial Sequence
  Synthetic
aauuugcuuugcuuggucuagcuc

SEQ ID NO: 287893 - RNA, 18 nt, Artificial Sequence
  Synthetic
gguuacaugguguagcuc

SEQ ID NO: 287894 - RNA, 19 nt, Artificial Sequence
  Synthetic
ugguuacaugguguagcuc

SEQ ID NO: 287895 - RNA, 20 nt, Artificial Sequence
  Synthetic
gugguuacaugguguagcuc

SEQ ID NO: 287896 - RNA, 21 nt, Artificial Sequence
  Synthetic
agugguuacaugguguagcuc

SEQ ID NO: 287897 - RNA, 22 nt, Artificial Sequence
  Synthetic
aagugguuacaugguguagcuc

SEQ ID NO: 287898 - RNA, 23 nt, Artificial Sequence
  Synthetic
uaagugguuacaugguguagcuc

SEQ ID NO: 287899 - RNA, 24 nt, Artificial Sequence
  Synthetic
uuaagugguuacaugguguagcuc

SEQ ID NO: 287900 - RNA, 18 nt, Artificial Sequence
  Synthetic
gaauaugacuuguagcuc

SEQ ID NO: 287901 - RNA, 19 nt, Artificial Sequence
  Synthetic
ugaauaugacuuguagcuc

SEQ ID NO: 287902 - RNA, 20 nt, Artificial Sequence
  Synthetic
cugaauaugacuuguagcuc

SEQ ID NO: 287903 - RNA, 21 nt, Artificial Sequence
  Synthetic
ccugaauaugacuuguagcuc

SEQ ID NO: 287904 - RNA, 22 nt, Artificial Sequence
  Synthetic
accugaauaugacuuguagcuc

SEQ ID NO: 287905 - RNA, 23 nt, Artificial Sequence
  Synthetic
caccugaauaugacuuguagcuc

SEQ ID NO: 287906 - RNA, 24 nt, Artificial Sequence
  Synthetic
ccaccugaauaugacuuguagcuc

SEQ ID NO: 287907 - RNA, 18 nt, Artificial Sequence
  Synthetic
aggaacagaaguuagcuc

SEQ ID NO: 287908 - RNA, 19 nt, Artificial Sequence
  Synthetic
aaggaacagaaguuagcuc

SEQ ID NO: 287909 - RNA, 20 nt, Artificial Sequence
  Synthetic
aaaggaacagaaguuagcuc

SEQ ID NO: 287910 - RNA, 21 nt, Artificial Sequence
  Synthetic
aaaaggaacagaaguuagcuc

SEQ ID NO: 287911 - RNA, 22 nt, Artificial Sequence
  Synthetic
gaaaaggaacagaaguuagcuc

SEQ ID NO: 287912 - RNA, 23 nt, Artificial Sequence
  Synthetic
ggaaaaggaacagaaguuagcuc

SEQ ID NO: 287913 - RNA, 24 nt, Artificial Sequence
  Synthetic
aggaaaaggaacagaaguuagcuc

SEQ ID NO: 287914 - RNA, 18 nt, Artificial Sequence
  Synthetic
uaauaacuucuuuagcuc

SEQ ID NO: 287915 - RNA, 19 nt, Artificial Sequence
  Synthetic
uuaauaacuucuuuagcuc

SEQ ID NO: 287916 - RNA, 20 nt, Artificial Sequence
  Synthetic
auuaauaacuucuuuagcuc

SEQ ID NO: 287917 - RNA, 21 nt, Artificial Sequence
  Synthetic
uauuaauaacuucuuuagcuc

SEQ ID NO: 287918 - RNA, 22 nt, Artificial Sequence
  Synthetic
auauuaauaacuucuuuagcuc

SEQ ID NO: 287919 - RNA, 23 nt, Artificial Sequence
  Synthetic
aauauuaauaacuucuuuagcuc

SEQ ID NO: 287920 - RNA, 24 nt, Artificial Sequence
  Synthetic
uaauauuaauaacuucuuuagcuc

SEQ ID NO: 287921 - RNA, 18 nt, Artificial Sequence
  Synthetic
augcuuauugauacgcuc

SEQ ID NO: 287922 - RNA, 19 nt, Artificial Sequence
  Synthetic
caugcuuauugauacgcuc

SEQ ID NO: 287923 - RNA, 20 nt, Artificial Sequence
  Synthetic
acaugcuuauugauacgcuc

SEQ ID NO: 287924 - RNA, 21 nt, Artificial Sequence
  Synthetic
gacaugcuuauugauacgcuc

SEQ ID NO: 287925 - RNA, 22 nt, Artificial Sequence
  Synthetic
ggacaugcuuauugauacgcuc

SEQ ID NO: 287926 - RNA, 23 nt, Artificial Sequence
  Synthetic
aggacaugcuuauugauacgcuc

SEQ ID NO: 287927 - RNA, 24 nt, Artificial Sequence
  Synthetic
gaggacaugcuuauugauacgcuc

SEQ ID NO: 287928 - RNA, 18 nt, Artificial Sequence
  Synthetic
auccuucggcaagcgcuc

SEQ ID NO: 287929 - RNA, 19 nt, Artificial Sequence
  Synthetic
cauccuucggcaagcgcuc

SEQ ID NO: 287930 - RNA, 20 nt, Artificial Sequence
  Synthetic
ucauccuucggcaagcgcuc

SEQ ID NO: 287931 - RNA, 21 nt, Artificial Sequence
  Synthetic
cucauccuucggcaagcgcuc

SEQ ID NO: 287932 - RNA, 22 nt, Artificial Sequence
  Synthetic
ucucauccuucggcaagcgcuc

SEQ ID NO: 287933 - RNA, 23 nt, Artificial Sequence
  Synthetic
cucucauccuucggcaagcgcuc

SEQ ID NO: 287934 - RNA, 24 nt, Artificial Sequence
  Synthetic
ucucucauccuucggcaagcgcuc

SEQ ID NO: 287935 - RNA, 18 nt, Artificial Sequence
  Synthetic
aaacaaaacagaucgcuc

SEQ ID NO: 287936 - RNA, 19 nt, Artificial Sequence
  Synthetic
aaaacaaaacagaucgcuc

SEQ ID NO: 287937 - RNA, 20 nt, Artificial Sequence
  Synthetic
aaaaacaaaacagaucgcuc

SEQ ID NO: 287938 - RNA, 21 nt, Artificial Sequence
  Synthetic
aaaaaacaaaacagaucgcuc

SEQ ID NO: 287939 - RNA, 22 nt, Artificial Sequence
  Synthetic
aaaaaaacaaaacagaucgcuc

SEQ ID NO: 287940 - RNA, 23 nt, Artificial Sequence
  Synthetic
aaaaaaaacaaaacagaucgcuc

SEQ ID NO: 287941 - RNA, 24 nt, Artificial Sequence
  Synthetic
aaaaaaaaacaaaacagaucgcuc

SEQ ID NO: 287942 - RNA, 18 nt, Artificial Sequence
  Synthetic
uucuagcagcaaaggcuc

SEQ ID NO: 287943 - RNA, 19 nt, Artificial Sequence
  Synthetic
cuucuagcagcaaaggcuc

SEQ ID NO: 287944 - RNA, 20 nt, Artificial Sequence
  Synthetic
acuucuagcagcaaaggcuc

SEQ ID NO: 287945 - RNA, 21 nt, Artificial Sequence
  Synthetic
gacuucuagcagcaaaggcuc

SEQ ID NO: 287946 - RNA, 22 nt, Artificial Sequence
  Synthetic
ugacuucuagcagcaaaggcuc

SEQ ID NO: 287947 - RNA, 23 nt, Artificial Sequence
  Synthetic
uugacuucuagcagcaaaggcuc

SEQ ID NO: 287948 - RNA, 24 nt, Artificial Sequence
  Synthetic
auugacuucuagcagcaaaggcuc

SEQ ID NO: 287949 - RNA, 18 nt, Artificial Sequence
  Synthetic
cugagauggggaaggcuc

SEQ ID NO: 287950 - RNA, 19 nt, Artificial Sequence
  Synthetic
acugagauggggaaggcuc

SEQ ID NO: 287951 - RNA, 20 nt, Artificial Sequence
  Synthetic
uacugagauggggaaggcuc

SEQ ID NO: 287952 - RNA, 21 nt, Artificial Sequence
  Synthetic
uuacugagauggggaaggcuc

SEQ ID NO: 287953 - RNA, 22 nt, Artificial Sequence
  Synthetic
uuuacugagauggggaaggcuc

SEQ ID NO: 287954 - RNA, 23 nt, Artificial Sequence
  Synthetic
auuuacugagauggggaaggcuc

SEQ ID NO: 287955 - RNA, 24 nt, Artificial Sequence
  Synthetic
cauuuacugagauggggaaggcuc

SEQ ID NO: 287956 - RNA, 18 nt, Artificial Sequence
  Synthetic
uucaugcaaugaaggcuc

SEQ ID NO: 287957 - RNA, 19 nt, Artificial Sequence
  Synthetic
cuucaugcaaugaaggcuc

SEQ ID NO: 287958 - RNA, 20 nt, Artificial Sequence
  Synthetic
gcuucaugcaaugaaggcuc

SEQ ID NO: 287959 - RNA, 21 nt, Artificial Sequence
  Synthetic
agcuucaugcaaugaaggcuc

SEQ ID NO: 287960 - RNA, 22 nt, Artificial Sequence
  Synthetic
uagcuucaugcaaugaaggcuc

SEQ ID NO: 287961 - RNA, 23 nt, Artificial Sequence
  Synthetic
guagcuucaugcaaugaaggcuc

SEQ ID NO: 287962 - RNA, 24 nt, Artificial Sequence
  Synthetic
gguagcuucaugcaaugaaggcuc

SEQ ID NO: 287963 - RNA, 18 nt, Artificial Sequence
  Synthetic
uuaucccucugaaggcuc

SEQ ID NO: 287964 - RNA, 19 nt, Artificial Sequence
  Synthetic
auuaucccucugaaggcuc

SEQ ID NO: 287965 - RNA, 20 nt, Artificial Sequence
  Synthetic
aauuaucccucugaaggcuc

SEQ ID NO: 287966 - RNA, 21 nt, Artificial Sequence
  Synthetic
caauuaucccucugaaggcuc

SEQ ID NO: 287967 - RNA, 22 nt, Artificial Sequence
  Synthetic
ucaauuaucccucugaaggcuc

SEQ ID NO: 287968 - RNA, 23 nt, Artificial Sequence
  Synthetic
gucaauuaucccucugaaggcuc

SEQ ID NO: 287969 - RNA, 24 nt, Artificial Sequence
  Synthetic
ggucaauuaucccucugaaggcuc

SEQ ID NO: 287970 - RNA, 18 nt, Artificial Sequence
  Synthetic
cuagagaugaucaggcuc

SEQ ID NO: 287971 - RNA, 19 nt, Artificial Sequence
  Synthetic
ccuagagaugaucaggcuc

SEQ ID NO: 287972 - RNA, 20 nt, Artificial Sequence
  Synthetic
accuagagaugaucaggcuc

SEQ ID NO: 287973 - RNA, 21 nt, Artificial Sequence
  Synthetic
uaccuagagaugaucaggcuc

SEQ ID NO: 287974 - RNA, 22 nt, Artificial Sequence
  Synthetic
uuaccuagagaugaucaggcuc

SEQ ID NO: 287975 - RNA, 23 nt, Artificial Sequence
  Synthetic
uuuaccuagagaugaucaggcuc

SEQ ID NO: 287976 - RNA, 24 nt, Artificial Sequence
  Synthetic
guuuaccuagagaugaucaggcuc

SEQ ID NO: 287977 - RNA, 18 nt, Artificial Sequence
  Synthetic
gagaaaaucuucaggcuc

SEQ ID NO: 287978 - RNA, 19 nt, Artificial Sequence
  Synthetic
ugagaaaaucuucaggcuc

SEQ ID NO: 287979 - RNA, 20 nt, Artificial Sequence
  Synthetic
augagaaaaucuucaggcuc

SEQ ID NO: 287980 - RNA, 21 nt, Artificial Sequence
  Synthetic
aaugagaaaaucuucaggcuc

SEQ ID NO: 287981 - RNA, 22 nt, Artificial Sequence
  Synthetic
aaaugagaaaaucuucaggcuc

SEQ ID NO: 287982 - RNA, 23 nt, Artificial Sequence
  Synthetic
aaaaugagaaaaucuucaggcuc

SEQ ID NO: 287983 - RNA, 24 nt, Artificial Sequence
  Synthetic
aaaaaugagaaaaucuucaggcuc

SEQ ID NO: 287984 - RNA, 18 nt, Artificial Sequence
  Synthetic
ccaccaacuccuaggcuc

SEQ ID NO: 287985 - RNA, 19 nt, Artificial Sequence
  Synthetic
gccaccaacuccuaggcuc

SEQ ID NO: 287986 - RNA, 20 nt, Artificial Sequence
  Synthetic
agccaccaacuccuaggcuc

SEQ ID NO: 287987 - RNA, 21 nt, Artificial Sequence
  Synthetic
cagccaccaacuccuaggcuc

SEQ ID NO: 287988 - RNA, 22 nt, Artificial Sequence
  Synthetic
gcagccaccaacuccuaggcuc

SEQ ID NO: 287989 - RNA, 23 nt, Artificial Sequence
  Synthetic
ugcagccaccaacuccuaggcuc

SEQ ID NO: 287990 - RNA, 24 nt, Artificial Sequence
  Synthetic
cugcagccaccaacuccuaggcuc

SEQ ID NO: 287991 - RNA, 18 nt, Artificial Sequence
  Synthetic
cccuuauaaaagcggcuc

SEQ ID NO: 287992 - RNA, 19 nt, Artificial Sequence
  Synthetic
gcccuuauaaaagcggcuc

SEQ ID NO: 287993 - RNA, 20 nt, Artificial Sequence
  Synthetic
ugcccuuauaaaagcggcuc

SEQ ID NO: 287994 - RNA, 21 nt, Artificial Sequence
  Synthetic
gugcccuuauaaaagcggcuc

SEQ ID NO: 287995 - RNA, 22 nt, Artificial Sequence
  Synthetic
agugcccuuauaaaagcggcuc

SEQ ID NO: 287996 - RNA, 23 nt, Artificial Sequence
  Synthetic
cagugcccuuauaaaagcggcuc

SEQ ID NO: 287997 - RNA, 24 nt, Artificial Sequence
  Synthetic
ucagugcccuuauaaaagcggcuc

SEQ ID NO: 287998 - RNA, 18 nt, Artificial Sequence
  Synthetic
aguugaucgcaucggcuc

SEQ ID NO: 287999 - RNA, 19 nt, Artificial Sequence
  Synthetic
caguugaucgcaucggcuc

SEQ ID NO: 288000 - RNA, 20 nt, Artificial Sequence
  Synthetic
ccaguugaucgcaucggcuc

SEQ ID NO: 288001 - RNA, 21 nt, Artificial Sequence
  Synthetic
uccaguugaucgcaucggcuc

SEQ ID NO: 288002 - RNA, 22 nt, Artificial Sequence
  Synthetic
uuccaguugaucgcaucggcuc

SEQ ID NO: 288003 - RNA, 23 nt, Artificial Sequence
  Synthetic
cuuccaguugaucgcaucggcuc

SEQ ID NO: 288004 - RNA, 24 nt, Artificial Sequence
  Synthetic
ucuuccaguugaucgcaucggcuc

SEQ ID NO: 288005 - RNA, 18 nt, Artificial Sequence
  Synthetic
aauguaaucaaagggcuc

SEQ ID NO: 288006 - RNA, 19 nt, Artificial Sequence
  Synthetic
aaauguaaucaaagggcuc

SEQ ID NO: 288007 - RNA, 20 nt, Artificial Sequence
  Synthetic
gaaauguaaucaaagggcuc

SEQ ID NO: 288008 - RNA, 21 nt, Artificial Sequence
  Synthetic
ugaaauguaaucaaagggcuc

SEQ ID NO: 288009 - RNA, 22 nt, Artificial Sequence
  Synthetic
uugaaauguaaucaaagggcuc

SEQ ID NO: 288010 - RNA, 23 nt, Artificial Sequence
  Synthetic
guugaaauguaaucaaagggcuc

SEQ ID NO: 288011 - RNA, 24 nt, Artificial Sequence
  Synthetic
aguugaaauguaaucaaagggcuc

SEQ ID NO: 288012 - RNA, 18 nt, Artificial Sequence
  Synthetic
aaaucacuaauggggcuc

SEQ ID NO: 288013 - RNA, 19 nt, Artificial Sequence
  Synthetic
aaaaucacuaauggggcuc

SEQ ID NO: 288014 - RNA, 20 nt, Artificial Sequence
  Synthetic
aaaaaucacuaauggggcuc

SEQ ID NO: 288015 - RNA, 21 nt, Artificial Sequence
  Synthetic
aaaaaaucacuaauggggcuc

SEQ ID NO: 288016 - RNA, 22 nt, Artificial Sequence
  Synthetic
aaaaaaaucacuaauggggcuc

SEQ ID NO: 288017 - RNA, 23 nt, Artificial Sequence
  Synthetic
uaaaaaaaucacuaauggggcuc

SEQ ID NO: 288018 - RNA, 24 nt, Artificial Sequence
  Synthetic
uuaaaaaaaucacuaauggggcuc

SEQ ID NO: 288019 - RNA, 18 nt, Artificial Sequence
  Synthetic
aauuuuucacuggggcuc

SEQ ID NO: 288020 - RNA, 19 nt, Artificial Sequence
  Synthetic
aaauuuuucacuggggcuc

SEQ ID NO: 288021 - RNA, 20 nt, Artificial Sequence
  Synthetic
aaaauuuuucacuggggcuc

SEQ ID NO: 288022 - RNA, 21 nt, Artificial Sequence
  Synthetic
uaaaauuuuucacuggggcuc

SEQ ID NO: 288023 - RNA, 22 nt, Artificial Sequence
  Synthetic
auaaaauuuuucacuggggcuc

SEQ ID NO: 288024 - RNA, 23 nt, Artificial Sequence
  Synthetic
gauaaaauuuuucacuggggcuc

SEQ ID NO: 288025 - RNA, 24 nt, Artificial Sequence
  Synthetic
ugauaaaauuuuucacuggggcuc

SEQ ID NO: 288026 - RNA, 18 nt, Artificial Sequence
  Synthetic
cguggucucagugggcuc

SEQ ID NO: 288027 - RNA, 19 nt, Artificial Sequence
  Synthetic
gcguggucucagugggcuc

SEQ ID NO: 288028 - RNA, 20 nt, Artificial Sequence
  Synthetic
cgcguggucucagugggcuc

SEQ ID NO: 288029 - RNA, 21 nt, Artificial Sequence
  Synthetic
ccgcguggucucagugggcuc

SEQ ID NO: 288030 - RNA, 22 nt, Artificial Sequence
  Synthetic
cccgcguggucucagugggcuc

SEQ ID NO: 288031 - RNA, 23 nt, Artificial Sequence
  Synthetic
gcccgcguggucucagugggcuc

SEQ ID NO: 288032 - RNA, 24 nt, Artificial Sequence
  Synthetic
ggcccgcguggucucagugggcuc

SEQ ID NO: 288033 - RNA, 18 nt, Artificial Sequence
  Synthetic
ugacccauaccauggcuc

SEQ ID NO: 288034 - RNA, 19 nt, Artificial Sequence
  Synthetic
gugacccauaccauggcuc

SEQ ID NO: 288035 - RNA, 20 nt, Artificial Sequence
  Synthetic
ugugacccauaccauggcuc

SEQ ID NO: 288036 - RNA, 21 nt, Artificial Sequence
  Synthetic
cugugacccauaccauggcuc

SEQ ID NO: 288037 - RNA, 22 nt, Artificial Sequence
  Synthetic
acugugacccauaccauggcuc

SEQ ID NO: 288038 - RNA, 23 nt, Artificial Sequence
  Synthetic
uacugugacccauaccauggcuc

SEQ ID NO: 288039 - RNA, 24 nt, Artificial Sequence
  Synthetic
uuacugugacccauaccauggcuc

SEQ ID NO: 288040 - RNA, 18 nt, Artificial Sequence
  Synthetic
aaguuguaaauauggcuc

SEQ ID NO: 288041 - RNA, 19 nt, Artificial Sequence
  Synthetic
aaaguuguaaauauggcuc

SEQ ID NO: 288042 - RNA, 20 nt, Artificial Sequence
  Synthetic
caaaguuguaaauauggcuc

SEQ ID NO: 288043 - RNA, 21 nt, Artificial Sequence
  Synthetic
ucaaaguuguaaauauggcuc

SEQ ID NO: 288044 - RNA, 22 nt, Artificial Sequence
  Synthetic
aucaaaguuguaaauauggcuc

SEQ ID NO: 288045 - RNA, 23 nt, Artificial Sequence
  Synthetic
aaucaaaguuguaaauauggcuc

SEQ ID NO: 288046 - RNA, 24 nt, Artificial Sequence
  Synthetic
uaaucaaaguuguaaauauggcuc

SEQ ID NO: 288047 - RNA, 18 nt, Artificial Sequence
  Synthetic
aauuguacuuccuggcuc

SEQ ID NO: 288048 - RNA, 19 nt, Artificial Sequence
  Synthetic
aaauuguacuuccuggcuc

SEQ ID NO: 288049 - RNA, 20 nt, Artificial Sequence
  Synthetic
caaauuguacuuccuggcuc

SEQ ID NO: 288050 - RNA, 21 nt, Artificial Sequence
  Synthetic
acaaauuguacuuccuggcuc

SEQ ID NO: 288051 - RNA, 22 nt, Artificial Sequence
  Synthetic
uacaaauuguacuuccuggcuc

SEQ ID NO: 288052 - RNA, 23 nt, Artificial Sequence
  Synthetic
auacaaauuguacuuccuggcuc

SEQ ID NO: 288053 - RNA, 24 nt, Artificial Sequence
  Synthetic
gauacaaauuguacuuccuggcuc

SEQ ID NO: 288054 - RNA, 18 nt, Artificial Sequence
  Synthetic
gaugcacacaauuggcuc

SEQ ID NO: 288055 - RNA, 19 nt, Artificial Sequence
  Synthetic
agaugcacacaauuggcuc

SEQ ID NO: 288056 - RNA, 20 nt, Artificial Sequence
  Synthetic
gagaugcacacaauuggcuc

SEQ ID NO: 288057 - RNA, 21 nt, Artificial Sequence
  Synthetic
ggagaugcacacaauuggcuc

SEQ ID NO: 288058 - RNA, 22 nt, Artificial Sequence
  Synthetic
aggagaugcacacaauuggcuc

SEQ ID NO: 288059 - RNA, 23 nt, Artificial Sequence
  Synthetic
gaggagaugcacacaauuggcuc

SEQ ID NO: 288060 - RNA, 24 nt, Artificial Sequence
  Synthetic
ggaggagaugcacacaauuggcuc

SEQ ID NO: 288061 - RNA, 18 nt, Artificial Sequence
  Synthetic
caggcauuugcuuggcuc

SEQ ID NO: 288062 - RNA, 19 nt, Artificial Sequence
  Synthetic
acaggcauuugcuuggcuc

SEQ ID NO: 288063 - RNA, 20 nt, Artificial Sequence
  Synthetic
cacaggcauuugcuuggcuc

SEQ ID NO: 288064 - RNA, 21 nt, Artificial Sequence
  Synthetic
gcacaggcauuugcuuggcuc

SEQ ID NO: 288065 - RNA, 22 nt, Artificial Sequence
  Synthetic
ggcacaggcauuugcuuggcuc

SEQ ID NO: 288066 - RNA, 23 nt, Artificial Sequence
  Synthetic
uggcacaggcauuugcuuggcuc

SEQ ID NO: 288067 - RNA, 24 nt, Artificial Sequence
  Synthetic
guggcacaggcauuugcuuggcuc

SEQ ID NO: 288068 - RNA, 18 nt, Artificial Sequence
  Synthetic
aaauaaccaaaaaugcuc

SEQ ID NO: 288069 - RNA, 19 nt, Artificial Sequence
  Synthetic
aaaauaaccaaaaaugcuc

SEQ ID NO: 288070 - RNA, 20 nt, Artificial Sequence
  Synthetic
aaaaauaaccaaaaaugcuc

SEQ ID NO: 288071 - RNA, 21 nt, Artificial Sequence
  Synthetic
caaaaauaaccaaaaaugcuc

SEQ ID NO: 288072 - RNA, 22 nt, Artificial Sequence
  Synthetic
gcaaaaauaaccaaaaaugcuc

SEQ ID NO: 288073 - RNA, 23 nt, Artificial Sequence
  Synthetic
agcaaaaauaaccaaaaaugcuc

SEQ ID NO: 288074 - RNA, 24 nt, Artificial Sequence
  Synthetic
aagcaaaaauaaccaaaaaugcuc

SEQ ID NO: 288075 - RNA, 18 nt, Artificial Sequence
  Synthetic
auauaaggcauaaugcuc

SEQ ID NO: 288076 - RNA, 19 nt, Artificial Sequence
  Synthetic
uauauaaggcauaaugcuc

SEQ ID NO: 288077 - RNA, 20 nt, Artificial Sequence
  Synthetic
auauauaaggcauaaugcuc

SEQ ID NO: 288078 - RNA, 21 nt, Artificial Sequence
  Synthetic
uauauauaaggcauaaugcuc

SEQ ID NO: 288079 - RNA, 22 nt, Artificial Sequence
  Synthetic
auauauauaaggcauaaugcuc

SEQ ID NO: 288080 - RNA, 23 nt, Artificial Sequence
  Synthetic
aauauauauaaggcauaaugcuc

SEQ ID NO: 288081 - RNA, 24 nt, Artificial Sequence
  Synthetic
aaauauauauaaggcauaaugcuc

SEQ ID NO: 288082 - RNA, 18 nt, Artificial Sequence
  Synthetic
auuacaacauuaaugcuc

SEQ ID NO: 288083 - RNA, 19 nt, Artificial Sequence
  Synthetic
uauuacaacauuaaugcuc

SEQ ID NO: 288084 - RNA, 20 nt, Artificial Sequence
  Synthetic
uuauuacaacauuaaugcuc

SEQ ID NO: 288085 - RNA, 21 nt, Artificial Sequence
  Synthetic
auuauuacaacauuaaugcuc

SEQ ID NO: 288086 - RNA, 22 nt, Artificial Sequence
  Synthetic
aauuauuacaacauuaaugcuc

SEQ ID NO: 288087 - RNA, 23 nt, Artificial Sequence
  Synthetic
gaauuauuacaacauuaaugcuc

SEQ ID NO: 288088 - RNA, 24 nt, Artificial Sequence
  Synthetic
ggaauuauuacaacauuaaugcuc

SEQ ID NO: 288089 - RNA, 18 nt, Artificial Sequence
  Synthetic
uccaaaauauacaugcuc

SEQ ID NO: 288090 - RNA, 19 nt, Artificial Sequence
  Synthetic
uuccaaaauauacaugcuc

SEQ ID NO: 288091 - RNA, 20 nt, Artificial Sequence
  Synthetic
uuuccaaaauauacaugcuc

SEQ ID NO: 288092 - RNA, 21 nt, Artificial Sequence
  Synthetic
auuuccaaaauauacaugcuc

SEQ ID NO: 288093 - RNA, 22 nt, Artificial Sequence
  Synthetic
cauuuccaaaauauacaugcuc

SEQ ID NO: 288094 - RNA, 23 nt, Artificial Sequence
  Synthetic
acauuuccaaaauauacaugcuc

SEQ ID NO: 288095 - RNA, 24 nt, Artificial Sequence
  Synthetic
cacauuuccaaaauauacaugcuc

SEQ ID NO: 288096 - RNA, 18 nt, Artificial Sequence
  Synthetic
auccuuaccaucaugcuc

SEQ ID NO: 288097 - RNA, 19 nt, Artificial Sequence
  Synthetic
uauccuuaccaucaugcuc

SEQ ID NO: 288098 - RNA, 20 nt, Artificial Sequence
  Synthetic
cuauccuuaccaucaugcuc

SEQ ID NO: 288099 - RNA, 21 nt, Artificial Sequence
  Synthetic
ucuauccuuaccaucaugcuc

SEQ ID NO: 288100 - RNA, 22 nt, Artificial Sequence
  Synthetic
uucuauccuuaccaucaugcuc

SEQ ID NO: 288101 - RNA, 23 nt, Artificial Sequence
  Synthetic
auucuauccuuaccaucaugcuc

SEQ ID NO: 288102 - RNA, 24 nt, Artificial Sequence
  Synthetic
cauucuauccuuaccaucaugcuc

SEQ ID NO: 288103 - RNA, 18 nt, Artificial Sequence
  Synthetic
cuguaguccuagaugcuc

SEQ ID NO: 288104 - RNA, 19 nt, Artificial Sequence
  Synthetic
ccuguaguccuagaugcuc

SEQ ID NO: 288105 - RNA, 20 nt, Artificial Sequence
  Synthetic
gccuguaguccuagaugcuc

SEQ ID NO: 288106 - RNA, 21 nt, Artificial Sequence
  Synthetic
agccuguaguccuagaugcuc

SEQ ID NO: 288107 - RNA, 22 nt, Artificial Sequence
  Synthetic
aagccuguaguccuagaugcuc

SEQ ID NO: 288108 - RNA, 23 nt, Artificial Sequence
  Synthetic
caagccuguaguccuagaugcuc

SEQ ID NO: 288109 - RNA, 24 nt, Artificial Sequence
  Synthetic
gcaagccuguaguccuagaugcuc

SEQ ID NO: 288110 - RNA, 18 nt, Artificial Sequence
  Synthetic
uaucuugaugggaugcuc

SEQ ID NO: 288111 - RNA, 19 nt, Artificial Sequence
  Synthetic
auaucuugaugggaugcuc

SEQ ID NO: 288112 - RNA, 20 nt, Artificial Sequence
  Synthetic
gauaucuugaugggaugcuc

SEQ ID NO: 288113 - RNA, 21 nt, Artificial Sequence
  Synthetic
ggauaucuugaugggaugcuc

SEQ ID NO: 288114 - RNA, 22 nt, Artificial Sequence
  Synthetic
gggauaucuugaugggaugcuc

SEQ ID NO: 288115 - RNA, 23 nt, Artificial Sequence
  Synthetic
agggauaucuugaugggaugcuc

SEQ ID NO: 288116 - RNA, 24 nt, Artificial Sequence
  Synthetic
uagggauaucuugaugggaugcuc

SEQ ID NO: 288117 - RNA, 18 nt, Artificial Sequence
  Synthetic
acaguagagaugaugcuc

SEQ ID NO: 288118 - RNA, 19 nt, Artificial Sequence
  Synthetic
gacaguagagaugaugcuc

SEQ ID NO: 288119 - RNA, 20 nt, Artificial Sequence
  Synthetic
ugacaguagagaugaugcuc

SEQ ID NO: 288120 - RNA, 21 nt, Artificial Sequence
  Synthetic
uugacaguagagaugaugcuc

SEQ ID NO: 288121 - RNA, 22 nt, Artificial Sequence
  Synthetic
uuugacaguagagaugaugcuc

SEQ ID NO: 288122 - RNA, 23 nt, Artificial Sequence
  Synthetic
auuugacaguagagaugaugcuc

SEQ ID NO: 288123 - RNA, 24 nt, Artificial Sequence
  Synthetic
cauuugacaguagagaugaugcuc

SEQ ID NO: 288124 - RNA, 18 nt, Artificial Sequence
  Synthetic
gucuaguuagugaugcuc

SEQ ID NO: 288125 - RNA, 19 nt, Artificial Sequence
  Synthetic
ugucuaguuagugaugcuc

SEQ ID NO: 288126 - RNA, 20 nt, Artificial Sequence
  Synthetic
cugucuaguuagugaugcuc

SEQ ID NO: 288127 - RNA, 21 nt, Artificial Sequence
  Synthetic
acugucuaguuagugaugcuc

SEQ ID NO: 288128 - RNA, 22 nt, Artificial Sequence
  Synthetic
gacugucuaguuagugaugcuc

SEQ ID NO: 288129 - RNA, 23 nt, Artificial Sequence
  Synthetic
ggacugucuaguuagugaugcuc

SEQ ID NO: 288130 - RNA, 24 nt, Artificial Sequence
  Synthetic
uggacugucuaguuagugaugcuc

SEQ ID NO: 288131 - RNA, 18 nt, Artificial Sequence
  Synthetic
gucuaccacaauaugcuc

SEQ ID NO: 288132 - RNA, 19 nt, Artificial Sequence
  Synthetic
agucuaccacaauaugcuc

SEQ ID NO: 288133 - RNA, 20 nt, Artificial Sequence
  Synthetic
cagucuaccacaauaugcuc

SEQ ID NO: 288134 - RNA, 21 nt, Artificial Sequence
  Synthetic
gcagucuaccacaauaugcuc

SEQ ID NO: 288135 - RNA, 22 nt, Artificial Sequence
  Synthetic
ugcagucuaccacaauaugcuc

SEQ ID NO: 288136 - RNA, 23 nt, Artificial Sequence
  Synthetic
augcagucuaccacaauaugcuc

SEQ ID NO: 288137 - RNA, 24 nt, Artificial Sequence
  Synthetic
aaugcagucuaccacaauaugcuc

SEQ ID NO: 288138 - RNA, 18 nt, Artificial Sequence
  Synthetic
gaaaggcuagauaugcuc

SEQ ID NO: 288139 - RNA, 19 nt, Artificial Sequence
  Synthetic
ggaaaggcuagauaugcuc

SEQ ID NO: 288140 - RNA, 20 nt, Artificial Sequence
  Synthetic
uggaaaggcuagauaugcuc

SEQ ID NO: 288141 - RNA, 21 nt, Artificial Sequence
  Synthetic
uuggaaaggcuagauaugcuc

SEQ ID NO: 288142 - RNA, 22 nt, Artificial Sequence
  Synthetic
guuggaaaggcuagauaugcuc

SEQ ID NO: 288143 - RNA, 23 nt, Artificial Sequence
  Synthetic
uguuggaaaggcuagauaugcuc

SEQ ID NO: 288144 - RNA, 24 nt, Artificial Sequence
  Synthetic
auguuggaaaggcuagauaugcuc

SEQ ID NO: 288145 - RNA, 18 nt, Artificial Sequence
  Synthetic
uccuuguucuuuaugcuc

SEQ ID NO: 288146 - RNA, 19 nt, Artificial Sequence
  Synthetic
cuccuuguucuuuaugcuc

SEQ ID NO: 288147 - RNA, 20 nt, Artificial Sequence
  Synthetic
ucuccuuguucuuuaugcuc

SEQ ID NO: 288148 - RNA, 21 nt, Artificial Sequence
  Synthetic
cucuccuuguucuuuaugcuc

SEQ ID NO: 288149 - RNA, 22 nt, Artificial Sequence
  Synthetic
ccucuccuuguucuuuaugcuc

SEQ ID NO: 288150 - RNA, 23 nt, Artificial Sequence
  Synthetic
cccucuccuuguucuuuaugcuc

SEQ ID NO: 288151 - RNA, 24 nt, Artificial Sequence
  Synthetic
gcccucuccuuguucuuuaugcuc

SEQ ID NO: 288152 - RNA, 18 nt, Artificial Sequence
  Synthetic
aacuacaaaccacugcuc

SEQ ID NO: 288153 - RNA, 19 nt, Artificial Sequence
  Synthetic
gaacuacaaaccacugcuc

SEQ ID NO: 288154 - RNA, 20 nt, Artificial Sequence
  Synthetic
agaacuacaaaccacugcuc

SEQ ID NO: 288155 - RNA, 21 nt, Artificial Sequence
  Synthetic
gagaacuacaaaccacugcuc

SEQ ID NO: 288156 - RNA, 22 nt, Artificial Sequence
  Synthetic
ggagaacuacaaaccacugcuc

SEQ ID NO: 288157 - RNA, 23 nt, Artificial Sequence
  Synthetic
aggagaacuacaaaccacugcuc

SEQ ID NO: 288158 - RNA, 24 nt, Artificial Sequence
  Synthetic
aaggagaacuacaaaccacugcuc

SEQ ID NO: 288159 - RNA, 18 nt, Artificial Sequence
  Synthetic
gauaaaggaccacugcuc

SEQ ID NO: 288160 - RNA, 19 nt, Artificial Sequence
  Synthetic
ugauaaaggaccacugcuc

SEQ ID NO: 288161 - RNA, 20 nt, Artificial Sequence
  Synthetic
augauaaaggaccacugcuc

SEQ ID NO: 288162 - RNA, 21 nt, Artificial Sequence
  Synthetic
gaugauaaaggaccacugcuc

SEQ ID NO: 288163 - RNA, 22 nt, Artificial Sequence
  Synthetic
ugaugauaaaggaccacugcuc

SEQ ID NO: 288164 - RNA, 23 nt, Artificial Sequence
  Synthetic
augaugauaaaggaccacugcuc

SEQ ID NO: 288165 - RNA, 24 nt, Artificial Sequence
  Synthetic
gaugaugauaaaggaccacugcuc

SEQ ID NO: 288166 - RNA, 18 nt, Artificial Sequence
  Synthetic
aguuuuaauggccugcuc

SEQ ID NO: 288167 - RNA, 19 nt, Artificial Sequence
  Synthetic
uaguuuuaauggccugcuc

SEQ ID NO: 288168 - RNA, 20 nt, Artificial Sequence
  Synthetic
auaguuuuaauggccugcuc

SEQ ID NO: 288169 - RNA, 21 nt, Artificial Sequence
  Synthetic
gauaguuuuaauggccugcuc

SEQ ID NO: 288170 - RNA, 22 nt, Artificial Sequence
  Synthetic
agauaguuuuaauggccugcuc

SEQ ID NO: 288171 - RNA, 23 nt, Artificial Sequence
  Synthetic
cagauaguuuuaauggccugcuc

SEQ ID NO: 288172 - RNA, 24 nt, Artificial Sequence
  Synthetic
ccagauaguuuuaauggccugcuc

SEQ ID NO: 288173 - RNA, 20 nt, Artificial Sequence
  Synthetic
accuguagucccagcugcuc

SEQ ID NO: 288174 - RNA, 21 nt, Artificial Sequence
  Synthetic
caccuguagucccagcugcuc

SEQ ID NO: 288175 - RNA, 22 nt, Artificial Sequence
  Synthetic
acaccuguagucccagcugcuc

SEQ ID NO: 288176 - RNA, 23 nt, Artificial Sequence
  Synthetic
cacaccuguagucccagcugcuc

SEQ ID NO: 288177 - RNA, 24 nt, Artificial Sequence
  Synthetic
acacaccuguagucccagcugcuc

SEQ ID NO: 288178 - RNA, 18 nt, Artificial Sequence
  Synthetic
ugaauaacagugcugcuc

SEQ ID NO: 288179 - RNA, 19 nt, Artificial Sequence
  Synthetic
augaauaacagugcugcuc

SEQ ID NO: 288180 - RNA, 20 nt, Artificial Sequence
  Synthetic
aaugaauaacagugcugcuc

SEQ ID NO: 288181 - RNA, 21 nt, Artificial Sequence
  Synthetic
uaaugaauaacagugcugcuc

SEQ ID NO: 288182 - RNA, 22 nt, Artificial Sequence
  Synthetic
uuaaugaauaacagugcugcuc

SEQ ID NO: 288183 - RNA, 23 nt, Artificial Sequence
  Synthetic
auuaaugaauaacagugcugcuc

SEQ ID NO: 288184 - RNA, 24 nt, Artificial Sequence
  Synthetic
aauuaaugaauaacagugcugcuc

SEQ ID NO: 288185 - RNA, 18 nt, Artificial Sequence
  Synthetic
guagucuucucagugcuc

SEQ ID NO: 288186 - RNA, 19 nt, Artificial Sequence
  Synthetic
aguagucuucucagugcuc

SEQ ID NO: 288187 - RNA, 20 nt, Artificial Sequence
  Synthetic
uaguagucuucucagugcuc

SEQ ID NO: 288188 - RNA, 21 nt, Artificial Sequence
  Synthetic
auaguagucuucucagugcuc

SEQ ID NO: 288189 - RNA, 22 nt, Artificial Sequence
  Synthetic
uauaguagucuucucagugcuc

SEQ ID NO: 288190 - RNA, 23 nt, Artificial Sequence
  Synthetic
cuauaguagucuucucagugcuc

SEQ ID NO: 288191 - RNA, 24 nt, Artificial Sequence
  Synthetic
acuauaguagucuucucagugcuc

SEQ ID NO: 288192 - RNA, 18 nt, Artificial Sequence
  Synthetic
auuguacagugagugcuc

SEQ ID NO: 288193 - RNA, 19 nt, Artificial Sequence
  Synthetic
aauuguacagugagugcuc

SEQ ID NO: 288194 - RNA, 20 nt, Artificial Sequence
  Synthetic
gaauuguacagugagugcuc

SEQ ID NO: 288195 - RNA, 21 nt, Artificial Sequence
  Synthetic
agaauuguacagugagugcuc

SEQ ID NO: 288196 - RNA, 22 nt, Artificial Sequence
  Synthetic
aagaauuguacagugagugcuc

SEQ ID NO: 288197 - RNA, 23 nt, Artificial Sequence
  Synthetic
aaagaauuguacagugagugcuc

SEQ ID NO: 288198 - RNA, 24 nt, Artificial Sequence
  Synthetic
gaaagaauuguacagugagugcuc

SEQ ID NO: 288199 - RNA, 18 nt, Artificial Sequence
  Synthetic
cgcacauagugagugcuc

SEQ ID NO: 288200 - RNA, 19 nt, Artificial Sequence
  Synthetic
ucgcacauagugagugcuc

SEQ ID NO: 288201 - RNA, 20 nt, Artificial Sequence
  Synthetic
cucgcacauagugagugcuc

SEQ ID NO: 288202 - RNA, 21 nt, Artificial Sequence
  Synthetic
acucgcacauagugagugcuc

SEQ ID NO: 288203 - RNA, 22 nt, Artificial Sequence
  Synthetic
aacucgcacauagugagugcuc

SEQ ID NO: 288204 - RNA, 23 nt, Artificial Sequence
  Synthetic
uaacucgcacauagugagugcuc

SEQ ID NO: 288205 - RNA, 24 nt, Artificial Sequence
  Synthetic
guaacucgcacauagugagugcuc

SEQ ID NO: 288206 - RNA, 18 nt, Artificial Sequence
  Synthetic
gagaagaaaauagugcuc

SEQ ID NO: 288207 - RNA, 19 nt, Artificial Sequence
  Synthetic
ggagaagaaaauagugcuc

SEQ ID NO: 288208 - RNA, 20 nt, Artificial Sequence
  Synthetic
uggagaagaaaauagugcuc

SEQ ID NO: 288209 - RNA, 21 nt, Artificial Sequence
  Synthetic
uuggagaagaaaauagugcuc

SEQ ID NO: 288210 - RNA, 22 nt, Artificial Sequence
  Synthetic
auuggagaagaaaauagugcuc

SEQ ID NO: 288211 - RNA, 23 nt, Artificial Sequence
  Synthetic
gauuggagaagaaaauagugcuc

SEQ ID NO: 288212 - RNA, 24 nt, Artificial Sequence
  Synthetic
agauuggagaagaaaauagugcuc

SEQ ID NO: 288213 - RNA, 18 nt, Artificial Sequence
  Synthetic
guguucacuuccgugcuc

SEQ ID NO: 288214 - RNA, 19 nt, Artificial Sequence
  Synthetic
aguguucacuuccgugcuc

SEQ ID NO: 288215 - RNA, 20 nt, Artificial Sequence
  Synthetic
uaguguucacuuccgugcuc

SEQ ID NO: 288216 - RNA, 21 nt, Artificial Sequence
  Synthetic
uuaguguucacuuccgugcuc

SEQ ID NO: 288217 - RNA, 22 nt, Artificial Sequence
  Synthetic
guuaguguucacuuccgugcuc

SEQ ID NO: 288218 - RNA, 23 nt, Artificial Sequence
  Synthetic
uguuaguguucacuuccgugcuc

SEQ ID NO: 288219 - RNA, 24 nt, Artificial Sequence
  Synthetic
uuguuaguguucacuuccgugcuc

SEQ ID NO: 288220 - RNA, 18 nt, Artificial Sequence
  Synthetic
uugaaauggccugugcuc

SEQ ID NO: 288221 - RNA, 19 nt, Artificial Sequence
  Synthetic
uuugaaauggccugugcuc

SEQ ID NO: 288222 - RNA, 20 nt, Artificial Sequence
  Synthetic
guuugaaauggccugugcuc

SEQ ID NO: 288223 - RNA, 21 nt, Artificial Sequence
  Synthetic
gguuugaaauggccugugcuc

SEQ ID NO: 288224 - RNA, 22 nt, Artificial Sequence
  Synthetic
agguuugaaauggccugugcuc

SEQ ID NO: 288225 - RNA, 23 nt, Artificial Sequence
  Synthetic
cagguuugaaauggccugugcuc

SEQ ID NO: 288226 - RNA, 24 nt, Artificial Sequence
  Synthetic
acagguuugaaauggccugugcuc

SEQ ID NO: 288227 - RNA, 18 nt, Artificial Sequence
  Synthetic
cauaggucccgugugcuc

SEQ ID NO: 288228 - RNA, 19 nt, Artificial Sequence
  Synthetic
gcauaggucccgugugcuc

SEQ ID NO: 288229 - RNA, 20 nt, Artificial Sequence
  Synthetic
agcauaggucccgugugcuc

SEQ ID NO: 288230 - RNA, 21 nt, Artificial Sequence
  Synthetic
aagcauaggucccgugugcuc

SEQ ID NO: 288231 - RNA, 22 nt, Artificial Sequence
  Synthetic
gaagcauaggucccgugugcuc

SEQ ID NO: 288232 - RNA, 23 nt, Artificial Sequence
  Synthetic
ggaagcauaggucccgugugcuc

SEQ ID NO: 288233 - RNA, 24 nt, Artificial Sequence
  Synthetic
aggaagcauaggucccgugugcuc

SEQ ID NO: 288234 - RNA, 18 nt, Artificial Sequence
  Synthetic
caacuuaucuuugugcuc

SEQ ID NO: 288235 - RNA, 19 nt, Artificial Sequence
  Synthetic
acaacuuaucuuugugcuc

SEQ ID NO: 288236 - RNA, 20 nt, Artificial Sequence
  Synthetic
cacaacuuaucuuugugcuc

SEQ ID NO: 288237 - RNA, 21 nt, Artificial Sequence
  Synthetic
ccacaacuuaucuuugugcuc

SEQ ID NO: 288238 - RNA, 22 nt, Artificial Sequence
  Synthetic
accacaacuuaucuuugugcuc

SEQ ID NO: 288239 - RNA, 23 nt, Artificial Sequence
  Synthetic
aaccacaacuuaucuuugugcuc

SEQ ID NO: 288240 - RNA, 24 nt, Artificial Sequence
  Synthetic
aaaccacaacuuaucuuugugcuc

SEQ ID NO: 288241 - RNA, 18 nt, Artificial Sequence
  Synthetic
cuacuucaaaaauugcuc

SEQ ID NO: 288242 - RNA, 19 nt, Artificial Sequence
  Synthetic
ucuacuucaaaaauugcuc

SEQ ID NO: 288243 - RNA, 20 nt, Artificial Sequence
  Synthetic
uucuacuucaaaaauugcuc

SEQ ID NO: 288244 - RNA, 21 nt, Artificial Sequence
  Synthetic
auucuacuucaaaaauugcuc

SEQ ID NO: 288245 - RNA, 22 nt, Artificial Sequence
  Synthetic
aauucuacuucaaaaauugcuc

SEQ ID NO: 288246 - RNA, 23 nt, Artificial Sequence
  Synthetic
gaauucuacuucaaaaauugcuc

SEQ ID NO: 288247 - RNA, 24 nt, Artificial Sequence
  Synthetic
ugaauucuacuucaaaaauugcuc

SEQ ID NO: 288248 - RNA, 18 nt, Artificial Sequence
  Synthetic
agguuuuuugcauugcuc

SEQ ID NO: 288249 - RNA, 19 nt, Artificial Sequence
  Synthetic
cagguuuuuugcauugcuc

SEQ ID NO: 288250 - RNA, 20 nt, Artificial Sequence
  Synthetic
ucagguuuuuugcauugcuc

SEQ ID NO: 288251 - RNA, 21 nt, Artificial Sequence
  Synthetic
uucagguuuuuugcauugcuc

SEQ ID NO: 288252 - RNA, 22 nt, Artificial Sequence
  Synthetic
guucagguuuuuugcauugcuc

SEQ ID NO: 288253 - RNA, 23 nt, Artificial Sequence
  Synthetic
aguucagguuuuuugcauugcuc

SEQ ID NO: 288254 - RNA, 24 nt, Artificial Sequence
  Synthetic
gaguucagguuuuuugcauugcuc

SEQ ID NO: 288255 - RNA, 18 nt, Artificial Sequence
  Synthetic
gcgcaaaugguauugcuc

SEQ ID NO: 288256 - RNA, 19 nt, Artificial Sequence
  Synthetic
agcgcaaaugguauugcuc

SEQ ID NO: 288257 - RNA, 20 nt, Artificial Sequence
  Synthetic
gagcgcaaaugguauugcuc

SEQ ID NO: 288258 - RNA, 21 nt, Artificial Sequence
  Synthetic
ggagcgcaaaugguauugcuc

SEQ ID NO: 288259 - RNA, 22 nt, Artificial Sequence
  Synthetic
uggagcgcaaaugguauugcuc

SEQ ID NO: 288260 - RNA, 23 nt, Artificial Sequence
  Synthetic
cuggagcgcaaaugguauugcuc

SEQ ID NO: 288261 - RNA, 24 nt, Artificial Sequence
  Synthetic
ucuggagcgcaaaugguauugcuc

SEQ ID NO: 288262 - RNA, 18 nt, Artificial Sequence
  Synthetic
aauuuuuagaacuugcuc

SEQ ID NO: 288263 - RNA, 19 nt, Artificial Sequence
  Synthetic
gaauuuuuagaacuugcuc

SEQ ID NO: 288264 - RNA, 20 nt, Artificial Sequence
  Synthetic
agaauuuuuagaacuugcuc

SEQ ID NO: 288265 - RNA, 21 nt, Artificial Sequence
  Synthetic
cagaauuuuuagaacuugcuc

SEQ ID NO: 288266 - RNA, 22 nt, Artificial Sequence
  Synthetic
acagaauuuuuagaacuugcuc

SEQ ID NO: 288267 - RNA, 23 nt, Artificial Sequence
  Synthetic
cacagaauuuuuagaacuugcuc

SEQ ID NO: 288268 - RNA, 24 nt, Artificial Sequence
  Synthetic
gcacagaauuuuuagaacuugcuc

SEQ ID NO: 288269 - RNA, 18 nt, Artificial Sequence
  Synthetic
aucgguugucacuugcuc

SEQ ID NO: 288270 - RNA, 19 nt, Artificial Sequence
  Synthetic
gaucgguugucacuugcuc

SEQ ID NO: 288271 - RNA, 20 nt, Artificial Sequence
  Synthetic
ugaucgguugucacuugcuc

SEQ ID NO: 288272 - RNA, 21 nt, Artificial Sequence
  Synthetic
uugaucgguugucacuugcuc

SEQ ID NO: 288273 - RNA, 22 nt, Artificial Sequence
  Synthetic
cuugaucgguugucacuugcuc

SEQ ID NO: 288274 - RNA, 23 nt, Artificial Sequence
  Synthetic
ucuugaucgguugucacuugcuc

SEQ ID NO: 288275 - RNA, 24 nt, Artificial Sequence
  Synthetic
gucuugaucgguugucacuugcuc

SEQ ID NO: 288276 - RNA, 18 nt, Artificial Sequence
  Synthetic
ccuccacauugcuugcuc

SEQ ID NO: 288277 - RNA, 19 nt, Artificial Sequence
  Synthetic
gccuccacauugcuugcuc

SEQ ID NO: 288278 - RNA, 20 nt, Artificial Sequence
  Synthetic
ugccuccacauugcuugcuc

SEQ ID NO: 288279 - RNA, 21 nt, Artificial Sequence
  Synthetic
cugccuccacauugcuugcuc

SEQ ID NO: 288280 - RNA, 22 nt, Artificial Sequence
  Synthetic
acugccuccacauugcuugcuc

SEQ ID NO: 288281 - RNA, 23 nt, Artificial Sequence
  Synthetic
uacugccuccacauugcuugcuc

SEQ ID NO: 288282 - RNA, 24 nt, Artificial Sequence
  Synthetic
auacugccuccacauugcuugcuc

SEQ ID NO: 288283 - RNA, 18 nt, Artificial Sequence
  Synthetic
ugaacagacuucuugcuc

SEQ ID NO: 288284 - RNA, 19 nt, Artificial Sequence
  Synthetic
uugaacagacuucuugcuc

SEQ ID NO: 288285 - RNA, 20 nt, Artificial Sequence
  Synthetic
cuugaacagacuucuugcuc

SEQ ID NO: 288286 - RNA, 21 nt, Artificial Sequence
  Synthetic
acuugaacagacuucuugcuc

SEQ ID NO: 288287 - RNA, 22 nt, Artificial Sequence
  Synthetic
gacuugaacagacuucuugcuc

SEQ ID NO: 288288 - RNA, 23 nt, Artificial Sequence
  Synthetic
ggacuugaacagacuucuugcuc

SEQ ID NO: 288289 - RNA, 24 nt, Artificial Sequence
  Synthetic
aggacuugaacagacuucuugcuc

SEQ ID NO: 288290 - RNA, 18 nt, Artificial Sequence
  Synthetic
aagaaaucgaauuugcuc

SEQ ID NO: 288291 - RNA, 19 nt, Artificial Sequence
  Synthetic
caagaaaucgaauuugcuc

SEQ ID NO: 288292 - RNA, 20 nt, Artificial Sequence
  Synthetic
acaagaaaucgaauuugcuc

SEQ ID NO: 288293 - RNA, 21 nt, Artificial Sequence
  Synthetic
gacaagaaaucgaauuugcuc

SEQ ID NO: 288294 - RNA, 22 nt, Artificial Sequence
  Synthetic
ggacaagaaaucgaauuugcuc

SEQ ID NO: 288295 - RNA, 23 nt, Artificial Sequence
  Synthetic
gggacaagaaaucgaauuugcuc

SEQ ID NO: 288296 - RNA, 24 nt, Artificial Sequence
  Synthetic
ggggacaagaaaucgaauuugcuc

SEQ ID NO: 288297 - RNA, 18 nt, Artificial Sequence
  Synthetic
guuagagccuuuuugcuc

SEQ ID NO: 288298 - RNA, 19 nt, Artificial Sequence
  Synthetic
uguuagagccuuuuugcuc

SEQ ID NO: 288299 - RNA, 20 nt, Artificial Sequence
  Synthetic
uuguuagagccuuuuugcuc

SEQ ID NO: 288300 - RNA, 21 nt, Artificial Sequence
  Synthetic
cuuguuagagccuuuuugcuc

SEQ ID NO: 288301 - RNA, 22 nt, Artificial Sequence
  Synthetic
acuuguuagagccuuuuugcuc

SEQ ID NO: 288302 - RNA, 23 nt, Artificial Sequence
  Synthetic
gacuuguuagagccuuuuugcuc

SEQ ID NO: 288303 - RNA, 24 nt, Artificial Sequence
  Synthetic
agacuuguuagagccuuuuugcuc

SEQ ID NO: 288304 - RNA, 18 nt, Artificial Sequence
  Synthetic
uaacaccagacaaaucuc

SEQ ID NO: 288305 - RNA, 19 nt, Artificial Sequence
  Synthetic
uuaacaccagacaaaucuc

SEQ ID NO: 288306 - RNA, 20 nt, Artificial Sequence
  Synthetic
uuuaacaccagacaaaucuc

SEQ ID NO: 288307 - RNA, 21 nt, Artificial Sequence
  Synthetic
auuuaacaccagacaaaucuc

SEQ ID NO: 288308 - RNA, 22 nt, Artificial Sequence
  Synthetic
cauuuaacaccagacaaaucuc

SEQ ID NO: 288309 - RNA, 23 nt, Artificial Sequence
  Synthetic
ucauuuaacaccagacaaaucuc

SEQ ID NO: 288310 - RNA, 24 nt, Artificial Sequence
  Synthetic
aucauuuaacaccagacaaaucuc

SEQ ID NO: 288311 - RNA, 18 nt, Artificial Sequence
  Synthetic
auaaaaccaucaaaucuc

SEQ ID NO: 288312 - RNA, 19 nt, Artificial Sequence
  Synthetic
uauaaaaccaucaaaucuc

SEQ ID NO: 288313 - RNA, 20 nt, Artificial Sequence
  Synthetic
uuauaaaaccaucaaaucuc

SEQ ID NO: 288314 - RNA, 21 nt, Artificial Sequence
  Synthetic
cuuauaaaaccaucaaaucuc

SEQ ID NO: 288315 - RNA, 22 nt, Artificial Sequence
  Synthetic
ccuuauaaaaccaucaaaucuc

SEQ ID NO: 288316 - RNA, 23 nt, Artificial Sequence
  Synthetic
cccuuauaaaaccaucaaaucuc

SEQ ID NO: 288317 - RNA, 24 nt, Artificial Sequence
  Synthetic
ccccuuauaaaaccaucaaaucuc

SEQ ID NO: 288318 - RNA, 18 nt, Artificial Sequence
  Synthetic
cauuugaacagaaaucuc

SEQ ID NO: 288319 - RNA, 19 nt, Artificial Sequence
  Synthetic
acauuugaacagaaaucuc

SEQ ID NO: 288320 - RNA, 20 nt, Artificial Sequence
  Synthetic
gacauuugaacagaaaucuc

SEQ ID NO: 288321 - RNA, 21 nt, Artificial Sequence
  Synthetic
ugacauuugaacagaaaucuc

SEQ ID NO: 288322 - RNA, 22 nt, Artificial Sequence
  Synthetic
gugacauuugaacagaaaucuc

SEQ ID NO: 288323 - RNA, 23 nt, Artificial Sequence
  Synthetic
ggugacauuugaacagaaaucuc

SEQ ID NO: 288324 - RNA, 24 nt, Artificial Sequence
  Synthetic
aggugacauuugaacagaaaucuc

SEQ ID NO: 288325 - RNA, 18 nt, Artificial Sequence
  Synthetic
uauuugaacagaaaucuc

SEQ ID NO: 288326 - RNA, 19 nt, Artificial Sequence
  Synthetic
auauuugaacagaaaucuc

SEQ ID NO: 288327 - RNA, 20 nt, Artificial Sequence
  Synthetic
gauauuugaacagaaaucuc

SEQ ID NO: 288328 - RNA, 21 nt, Artificial Sequence
  Synthetic
ugauauuugaacagaaaucuc

SEQ ID NO: 288329 - RNA, 22 nt, Artificial Sequence
  Synthetic
gugauauuugaacagaaaucuc

SEQ ID NO: 288330 - RNA, 23 nt, Artificial Sequence
  Synthetic
ugugauauuugaacagaaaucuc

SEQ ID NO: 288331 - RNA, 24 nt, Artificial Sequence
  Synthetic
augugauauuugaacagaaaucuc

SEQ ID NO: 288332 - RNA, 18 nt, Artificial Sequence
  Synthetic
augugauguaucaaucuc

SEQ ID NO: 288333 - RNA, 19 nt, Artificial Sequence
  Synthetic
uaugugauguaucaaucuc

SEQ ID NO: 288334 - RNA, 20 nt, Artificial Sequence
  Synthetic
guaugugauguaucaaucuc

SEQ ID NO: 288335 - RNA, 21 nt, Artificial Sequence
  Synthetic
gguaugugauguaucaaucuc

SEQ ID NO: 288336 - RNA, 22 nt, Artificial Sequence
  Synthetic
ggguaugugauguaucaaucuc

SEQ ID NO: 288337 - RNA, 23 nt, Artificial Sequence
  Synthetic
uggguaugugauguaucaaucuc

SEQ ID NO: 288338 - RNA, 24 nt, Artificial Sequence
  Synthetic
uuggguaugugauguaucaaucuc

SEQ ID NO: 288339 - RNA, 18 nt, Artificial Sequence
  Synthetic
cugaggcagaagaaucuc

SEQ ID NO: 288340 - RNA, 19 nt, Artificial Sequence
  Synthetic
gcugaggcagaagaaucuc

SEQ ID NO: 288341 - RNA, 20 nt, Artificial Sequence
  Synthetic
ggcugaggcagaagaaucuc

SEQ ID NO: 288342 - RNA, 21 nt, Artificial Sequence
  Synthetic
aggcugaggcagaagaaucuc

SEQ ID NO: 288343 - RNA, 22 nt, Artificial Sequence
  Synthetic
gaggcugaggcagaagaaucuc

SEQ ID NO: 288344 - RNA, 23 nt, Artificial Sequence
  Synthetic
ggaggcugaggcagaagaaucuc

SEQ ID NO: 288345 - RNA, 24 nt, Artificial Sequence
  Synthetic
gggaggcugaggcagaagaaucuc

SEQ ID NO: 288346 - RNA, 18 nt, Artificial Sequence
  Synthetic
acaacggaccagaaucuc

SEQ ID NO: 288347 - RNA, 19 nt, Artificial Sequence
  Synthetic
cacaacggaccagaaucuc

SEQ ID NO: 288348 - RNA, 20 nt, Artificial Sequence
  Synthetic
acacaacggaccagaaucuc

SEQ ID NO: 288349 - RNA, 21 nt, Artificial Sequence
  Synthetic
uacacaacggaccagaaucuc

SEQ ID NO: 288350 - RNA, 22 nt, Artificial Sequence
  Synthetic
auacacaacggaccagaaucuc

SEQ ID NO: 288351 - RNA, 23 nt, Artificial Sequence
  Synthetic
aauacacaacggaccagaaucuc

SEQ ID NO: 288352 - RNA, 24 nt, Artificial Sequence
  Synthetic
aaauacacaacggaccagaaucuc

SEQ ID NO: 288353 - RNA, 18 nt, Artificial Sequence
  Synthetic
caacuaaaucagaaucuc

SEQ ID NO: 288354 - RNA, 19 nt, Artificial Sequence
  Synthetic
ccaacuaaaucagaaucuc

SEQ ID NO: 288355 - RNA, 20 nt, Artificial Sequence
  Synthetic
uccaacuaaaucagaaucuc

SEQ ID NO: 288356 - RNA, 21 nt, Artificial Sequence
  Synthetic
auccaacuaaaucagaaucuc

SEQ ID NO: 288357 - RNA, 22 nt, Artificial Sequence
  Synthetic
cauccaacuaaaucagaaucuc

SEQ ID NO: 288358 - RNA, 23 nt, Artificial Sequence
  Synthetic
ccauccaacuaaaucagaaucuc

SEQ ID NO: 288359 - RNA, 24 nt, Artificial Sequence
  Synthetic
cccauccaacuaaaucagaaucuc

SEQ ID NO: 288360 - RNA, 18 nt, Artificial Sequence
  Synthetic
uacagcuugaggaaucuc

SEQ ID NO: 288361 - RNA, 19 nt, Artificial Sequence
  Synthetic
auacagcuugaggaaucuc

SEQ ID NO: 288362 - RNA, 20 nt, Artificial Sequence
  Synthetic
cauacagcuugaggaaucuc

SEQ ID NO: 288363 - RNA, 21 nt, Artificial Sequence
  Synthetic
gcauacagcuugaggaaucuc

SEQ ID NO: 288364 - RNA, 22 nt, Artificial Sequence
  Synthetic
ugcauacagcuugaggaaucuc

SEQ ID NO: 288365 - RNA, 23 nt, Artificial Sequence
  Synthetic
cugcauacagcuugaggaaucuc

SEQ ID NO: 288366 - RNA, 24 nt, Artificial Sequence
  Synthetic
ccugcauacagcuugaggaaucuc

SEQ ID NO: 288367 - RNA, 18 nt, Artificial Sequence
  Synthetic
uagcuccacuggaaucuc

SEQ ID NO: 288368 - RNA, 19 nt, Artificial Sequence
  Synthetic
uuagcuccacuggaaucuc

SEQ ID NO: 288369 - RNA, 20 nt, Artificial Sequence
  Synthetic
uuuagcuccacuggaaucuc

SEQ ID NO: 288370 - RNA, 21 nt, Artificial Sequence
  Synthetic
cuuuagcuccacuggaaucuc

SEQ ID NO: 288371 - RNA, 22 nt, Artificial Sequence
  Synthetic
acuuuagcuccacuggaaucuc

SEQ ID NO: 288372 - RNA, 23 nt, Artificial Sequence
  Synthetic
aacuuuagcuccacuggaaucuc

SEQ ID NO: 288373 - RNA, 24 nt, Artificial Sequence
  Synthetic
aaacuuuagcuccacuggaaucuc

SEQ ID NO: 288374 - RNA, 18 nt, Artificial Sequence
  Synthetic
ucaaccaugaugaaucuc

SEQ ID NO: 288375 - RNA, 19 nt, Artificial Sequence
  Synthetic
aucaaccaugaugaaucuc

SEQ ID NO: 288376 - RNA, 20 nt, Artificial Sequence
  Synthetic
aaucaaccaugaugaaucuc

SEQ ID NO: 288377 - RNA, 21 nt, Artificial Sequence
  Synthetic
uaaucaaccaugaugaaucuc

SEQ ID NO: 288378 - RNA, 22 nt, Artificial Sequence
  Synthetic
guaaucaaccaugaugaaucuc

SEQ ID NO: 288379 - RNA, 23 nt, Artificial Sequence
  Synthetic
aguaaucaaccaugaugaaucuc

SEQ ID NO: 288380 - RNA, 24 nt, Artificial Sequence
  Synthetic
aaguaaucaaccaugaugaaucuc

SEQ ID NO: 288381 - RNA, 18 nt, Artificial Sequence
  Synthetic
cuuauuuauuugaaucuc

SEQ ID NO: 288382 - RNA, 19 nt, Artificial Sequence
  Synthetic
gcuuauuuauuugaaucuc

SEQ ID NO: 288383 - RNA, 20 nt, Artificial Sequence
  Synthetic
ugcuuauuuauuugaaucuc

SEQ ID NO: 288384 - RNA, 21 nt, Artificial Sequence
  Synthetic
gugcuuauuuauuugaaucuc

SEQ ID NO: 288385 - RNA, 22 nt, Artificial Sequence
  Synthetic
ugugcuuauuuauuugaaucuc

SEQ ID NO: 288386 - RNA, 23 nt, Artificial Sequence
  Synthetic
uugugcuuauuuauuugaaucuc

SEQ ID NO: 288387 - RNA, 24 nt, Artificial Sequence
  Synthetic
auugugcuuauuuauuugaaucuc

SEQ ID NO: 288388 - RNA, 18 nt, Artificial Sequence
  Synthetic
uacaggaaaaauaaucuc

SEQ ID NO: 288389 - RNA, 19 nt, Artificial Sequence
  Synthetic
cuacaggaaaaauaaucuc

SEQ ID NO: 288390 - RNA, 20 nt, Artificial Sequence
  Synthetic
ucuacaggaaaaauaaucuc

SEQ ID NO: 288391 - RNA, 21 nt, Artificial Sequence
  Synthetic
uucuacaggaaaaauaaucuc

SEQ ID NO: 288392 - RNA, 22 nt, Artificial Sequence
  Synthetic
uuucuacaggaaaaauaaucuc

SEQ ID NO: 288393 - RNA, 23 nt, Artificial Sequence
  Synthetic
uuuucuacaggaaaaauaaucuc

SEQ ID NO: 288394 - RNA, 24 nt, Artificial Sequence
  Synthetic
guuuucuacaggaaaaauaaucuc

SEQ ID NO: 288395 - RNA, 18 nt, Artificial Sequence
  Synthetic
aucucuauuucuaaucuc

SEQ ID NO: 288396 - RNA, 19 nt, Artificial Sequence
  Synthetic
uaucucuauuucuaaucuc

SEQ ID NO: 288397 - RNA, 20 nt, Artificial Sequence
  Synthetic
uuaucucuauuucuaaucuc

SEQ ID NO: 288398 - RNA, 21 nt, Artificial Sequence
  Synthetic
uuuaucucuauuucuaaucuc

SEQ ID NO: 288399 - RNA, 22 nt, Artificial Sequence
  Synthetic
auuuaucucuauuucuaaucuc

SEQ ID NO: 288400 - RNA, 23 nt, Artificial Sequence
  Synthetic
aauuuaucucuauuucuaaucuc

SEQ ID NO: 288401 - RNA, 24 nt, Artificial Sequence
  Synthetic
aaauuuaucucuauuucuaaucuc

SEQ ID NO: 288402 - RNA, 18 nt, Artificial Sequence
  Synthetic
uagagcugaaaacaucuc

SEQ ID NO: 288403 - RNA, 19 nt, Artificial Sequence
  Synthetic
uuagagcugaaaacaucuc

SEQ ID NO: 288404 - RNA, 20 nt, Artificial Sequence
  Synthetic
guuagagcugaaaacaucuc

SEQ ID NO: 288405 - RNA, 21 nt, Artificial Sequence
  Synthetic
uguuagagcugaaaacaucuc

SEQ ID NO: 288406 - RNA, 22 nt, Artificial Sequence
  Synthetic
cuguuagagcugaaaacaucuc

SEQ ID NO: 288407 - RNA, 23 nt, Artificial Sequence
  Synthetic
acuguuagagcugaaaacaucuc

SEQ ID NO: 288408 - RNA, 24 nt, Artificial Sequence
  Synthetic
aacuguuagagcugaaaacaucuc

SEQ ID NO: 288409 - RNA, 18 nt, Artificial Sequence
  Synthetic
uugaagccucaacaucuc

SEQ ID NO: 288410 - RNA, 19 nt, Artificial Sequence
  Synthetic
auugaagccucaacaucuc

SEQ ID NO: 288411 - RNA, 20 nt, Artificial Sequence
  Synthetic
gauugaagccucaacaucuc

SEQ ID NO: 288412 - RNA, 21 nt, Artificial Sequence
  Synthetic
ugauugaagccucaacaucuc

SEQ ID NO: 288413 - RNA, 22 nt, Artificial Sequence
  Synthetic
gugauugaagccucaacaucuc

SEQ ID NO: 288414 - RNA, 23 nt, Artificial Sequence
  Synthetic
ugugauugaagccucaacaucuc

SEQ ID NO: 288415 - RNA, 24 nt, Artificial Sequence
  Synthetic
gugugauugaagccucaacaucuc

SEQ ID NO: 288416 - RNA, 18 nt, Artificial Sequence
  Synthetic
cuaagagguccacaucuc

SEQ ID NO: 288417 - RNA, 19 nt, Artificial Sequence
  Synthetic
ucuaagagguccacaucuc

SEQ ID NO: 288418 - RNA, 20 nt, Artificial Sequence
  Synthetic
cucuaagagguccacaucuc

SEQ ID NO: 288419 - RNA, 21 nt, Artificial Sequence
  Synthetic
ccucuaagagguccacaucuc

SEQ ID NO: 288420 - RNA, 22 nt, Artificial Sequence
  Synthetic
gccucuaagagguccacaucuc

SEQ ID NO: 288421 - RNA, 23 nt, Artificial Sequence
  Synthetic
ggccucuaagagguccacaucuc

SEQ ID NO: 288422 - RNA, 24 nt, Artificial Sequence
  Synthetic
uggccucuaagagguccacaucuc

SEQ ID NO: 288423 - RNA, 18 nt, Artificial Sequence
  Synthetic
uuuacuagagcacaucuc

SEQ ID NO: 288424 - RNA, 19 nt, Artificial Sequence
  Synthetic
guuuacuagagcacaucuc

SEQ ID NO: 288425 - RNA, 20 nt, Artificial Sequence
  Synthetic
uguuuacuagagcacaucuc

SEQ ID NO: 288426 - RNA, 21 nt, Artificial Sequence
  Synthetic
auguuuacuagagcacaucuc

SEQ ID NO: 288427 - RNA, 22 nt, Artificial Sequence
  Synthetic
cauguuuacuagagcacaucuc

SEQ ID NO: 288428 - RNA, 23 nt, Artificial Sequence
  Synthetic
acauguuuacuagagcacaucuc

SEQ ID NO: 288429 - RNA, 24 nt, Artificial Sequence
  Synthetic
cacauguuuacuagagcacaucuc

SEQ ID NO: 288430 - RNA, 18 nt, Artificial Sequence
  Synthetic
auguaagcaucacaucuc

SEQ ID NO: 288431 - RNA, 19 nt, Artificial Sequence
  Synthetic
uauguaagcaucacaucuc

SEQ ID NO: 288432 - RNA, 20 nt, Artificial Sequence
  Synthetic
uuauguaagcaucacaucuc

SEQ ID NO: 288433 - RNA, 21 nt, Artificial Sequence
  Synthetic
cuuauguaagcaucacaucuc

SEQ ID NO: 288434 - RNA, 22 nt, Artificial Sequence
  Synthetic
acuuauguaagcaucacaucuc

SEQ ID NO: 288435 - RNA, 23 nt, Artificial Sequence
  Synthetic
uacuuauguaagcaucacaucuc

SEQ ID NO: 288436 - RNA, 24 nt, Artificial Sequence
  Synthetic
auacuuauguaagcaucacaucuc

SEQ ID NO: 288437 - RNA, 18 nt, Artificial Sequence
  Synthetic
ugaaucuaaauccaucuc

SEQ ID NO: 288438 - RNA, 19 nt, Artificial Sequence
  Synthetic
gugaaucuaaauccaucuc

SEQ ID NO: 288439 - RNA, 20 nt, Artificial Sequence
  Synthetic
ggugaaucuaaauccaucuc

SEQ ID NO: 288440 - RNA, 21 nt, Artificial Sequence
  Synthetic
aggugaaucuaaauccaucuc

SEQ ID NO: 288441 - RNA, 22 nt, Artificial Sequence
  Synthetic
uaggugaaucuaaauccaucuc

SEQ ID NO: 288442 - RNA, 23 nt, Artificial Sequence
  Synthetic
uuaggugaaucuaaauccaucuc

SEQ ID NO: 288443 - RNA, 24 nt, Artificial Sequence
  Synthetic
uuuaggugaaucuaaauccaucuc

SEQ ID NO: 288444 - RNA, 18 nt, Artificial Sequence
  Synthetic
aucaccaccauccaucuc

SEQ ID NO: 288445 - RNA, 19 nt, Artificial Sequence
  Synthetic
caucaccaccauccaucuc

SEQ ID NO: 288446 - RNA, 20 nt, Artificial Sequence
  Synthetic
ccaucaccaccauccaucuc

SEQ ID NO: 288447 - RNA, 21 nt, Artificial Sequence
  Synthetic
gccaucaccaccauccaucuc

SEQ ID NO: 288448 - RNA, 22 nt, Artificial Sequence
  Synthetic
ugccaucaccaccauccaucuc

SEQ ID NO: 288449 - RNA, 23 nt, Artificial Sequence
  Synthetic
cugccaucaccaccauccaucuc

SEQ ID NO: 288450 - RNA, 24 nt, Artificial Sequence
  Synthetic
gcugccaucaccaccauccaucuc

SEQ ID NO: 288451 - RNA, 18 nt, Artificial Sequence
  Synthetic
cucuucaguuuccaucuc

SEQ ID NO: 288452 - RNA, 19 nt, Artificial Sequence
  Synthetic
acucuucaguuuccaucuc

SEQ ID NO: 288453 - RNA, 20 nt, Artificial Sequence
  Synthetic
cacucuucaguuuccaucuc

SEQ ID NO: 288454 - RNA, 21 nt, Artificial Sequence
  Synthetic
ucacucuucaguuuccaucuc

SEQ ID NO: 288455 - RNA, 22 nt, Artificial Sequence
  Synthetic
uucacucuucaguuuccaucuc

SEQ ID NO: 288456 - RNA, 23 nt, Artificial Sequence
  Synthetic
uuucacucuucaguuuccaucuc

SEQ ID NO: 288457 - RNA, 24 nt, Artificial Sequence
  Synthetic
auuucacucuucaguuuccaucuc

SEQ ID NO: 288458 - RNA, 18 nt, Artificial Sequence
  Synthetic
guuaaauuuccucaucuc

SEQ ID NO: 288459 - RNA, 19 nt, Artificial Sequence
  Synthetic
uguuaaauuuccucaucuc

SEQ ID NO: 288460 - RNA, 20 nt, Artificial Sequence
  Synthetic
cuguuaaauuuccucaucuc

SEQ ID NO: 288461 - RNA, 21 nt, Artificial Sequence
  Synthetic
gcuguuaaauuuccucaucuc

SEQ ID NO: 288462 - RNA, 22 nt, Artificial Sequence
  Synthetic
ggcuguuaaauuuccucaucuc

SEQ ID NO: 288463 - RNA, 23 nt, Artificial Sequence
  Synthetic
uggcuguuaaauuuccucaucuc

SEQ ID NO: 288464 - RNA, 24 nt, Artificial Sequence
  Synthetic
uuggcuguuaaauuuccucaucuc

SEQ ID NO: 288465 - RNA, 18 nt, Artificial Sequence
  Synthetic
aggaaauuacuucaucuc

SEQ ID NO: 288466 - RNA, 19 nt, Artificial Sequence
  Synthetic
gaggaaauuacuucaucuc

SEQ ID NO: 288467 - RNA, 20 nt, Artificial Sequence
  Synthetic
ugaggaaauuacuucaucuc

SEQ ID NO: 288468 - RNA, 21 nt, Artificial Sequence
  Synthetic
augaggaaauuacuucaucuc

SEQ ID NO: 288469 - RNA, 22 nt, Artificial Sequence
  Synthetic
gaugaggaaauuacuucaucuc

SEQ ID NO: 288470 - RNA, 23 nt, Artificial Sequence
  Synthetic
agaugaggaaauuacuucaucuc

SEQ ID NO: 288471 - RNA, 24 nt, Artificial Sequence
  Synthetic
gagaugaggaaauuacuucaucuc

SEQ ID NO: 288472 - RNA, 18 nt, Artificial Sequence
  Synthetic
gcaguuuaguaagaucuc

SEQ ID NO: 288473 - RNA, 19 nt, Artificial Sequence
  Synthetic
ugcaguuuaguaagaucuc

SEQ ID NO: 288474 - RNA, 20 nt, Artificial Sequence
  Synthetic
uugcaguuuaguaagaucuc

SEQ ID NO: 288475 - RNA, 21 nt, Artificial Sequence
  Synthetic
cuugcaguuuaguaagaucuc

SEQ ID NO: 288476 - RNA, 22 nt, Artificial Sequence
  Synthetic
acuugcaguuuaguaagaucuc

SEQ ID NO: 288477 - RNA, 23 nt, Artificial Sequence
  Synthetic
aacuugcaguuuaguaagaucuc

SEQ ID NO: 288478 - RNA, 24 nt, Artificial Sequence
  Synthetic
gaacuugcaguuuaguaagaucuc

SEQ ID NO: 288479 - RNA, 18 nt, Artificial Sequence
  Synthetic
caaaauuccacagaucuc

SEQ ID NO: 288480 - RNA, 19 nt, Artificial Sequence
  Synthetic
ucaaaauuccacagaucuc

SEQ ID NO: 288481 - RNA, 20 nt, Artificial Sequence
  Synthetic
uucaaaauuccacagaucuc

SEQ ID NO: 288482 - RNA, 21 nt, Artificial Sequence
  Synthetic
guucaaaauuccacagaucuc

SEQ ID NO: 288483 - RNA, 22 nt, Artificial Sequence
  Synthetic
uguucaaaauuccacagaucuc

SEQ ID NO: 288484 - RNA, 23 nt, Artificial Sequence
  Synthetic
auguucaaaauuccacagaucuc

SEQ ID NO: 288485 - RNA, 24 nt, Artificial Sequence
  Synthetic
cauguucaaaauuccacagaucuc

SEQ ID NO: 288486 - RNA, 18 nt, Artificial Sequence
  Synthetic
aagagcuucacagaucuc

SEQ ID NO: 288487 - RNA, 19 nt, Artificial Sequence
  Synthetic
uaagagcuucacagaucuc

SEQ ID NO: 288488 - RNA, 20 nt, Artificial Sequence
  Synthetic
auaagagcuucacagaucuc

SEQ ID NO: 288489 - RNA, 21 nt, Artificial Sequence
  Synthetic
aauaagagcuucacagaucuc

SEQ ID NO: 288490 - RNA, 22 nt, Artificial Sequence
  Synthetic
aaauaagagcuucacagaucuc

SEQ ID NO: 288491 - RNA, 23 nt, Artificial Sequence
  Synthetic
aaaauaagagcuucacagaucuc

SEQ ID NO: 288492 - RNA, 24 nt, Artificial Sequence
  Synthetic
uaaaauaagagcuucacagaucuc

SEQ ID NO: 288493 - RNA, 18 nt, Artificial Sequence
  Synthetic
aaaaaaaaaccagaucuc

SEQ ID NO: 288494 - RNA, 19 nt, Artificial Sequence
  Synthetic
uaaaaaaaaaccagaucuc

SEQ ID NO: 288495 - RNA, 20 nt, Artificial Sequence
  Synthetic
uuaaaaaaaaaccagaucuc

SEQ ID NO: 288496 - RNA, 21 nt, Artificial Sequence
  Synthetic
uuuaaaaaaaaaccagaucuc

SEQ ID NO: 288497 - RNA, 22 nt, Artificial Sequence
  Synthetic
cuuuaaaaaaaaaccagaucuc

SEQ ID NO: 288498 - RNA, 23 nt, Artificial Sequence
  Synthetic
acuuuaaaaaaaaaccagaucuc

SEQ ID NO: 288499 - RNA, 24 nt, Artificial Sequence
  Synthetic
cacuuuaaaaaaaaaccagaucuc

SEQ ID NO: 288500 - RNA, 18 nt, Artificial Sequence
  Synthetic
uguuggacagcagaucuc

SEQ ID NO: 288501 - RNA, 19 nt, Artificial Sequence
  Synthetic
auguuggacagcagaucuc

SEQ ID NO: 288502 - RNA, 20 nt, Artificial Sequence
  Synthetic
aauguuggacagcagaucuc

SEQ ID NO: 288503 - RNA, 21 nt, Artificial Sequence
  Synthetic
gaauguuggacagcagaucuc

SEQ ID NO: 288504 - RNA, 22 nt, Artificial Sequence
  Synthetic
agaauguuggacagcagaucuc

SEQ ID NO: 288505 - RNA, 23 nt, Artificial Sequence
  Synthetic
uagaauguuggacagcagaucuc

SEQ ID NO: 288506 - RNA, 24 nt, Artificial Sequence
  Synthetic
guagaauguuggacagcagaucuc

SEQ ID NO: 288507 - RNA, 18 nt, Artificial Sequence
  Synthetic
ucaaaaccaucagaucuc

SEQ ID NO: 288508 - RNA, 19 nt, Artificial Sequence
  Synthetic
uucaaaaccaucagaucuc

SEQ ID NO: 288509 - RNA, 20 nt, Artificial Sequence
  Synthetic
uuucaaaaccaucagaucuc

SEQ ID NO: 288510 - RNA, 21 nt, Artificial Sequence
  Synthetic
uuuucaaaaccaucagaucuc

SEQ ID NO: 288511 - RNA, 22 nt, Artificial Sequence
  Synthetic
cuuuucaaaaccaucagaucuc

SEQ ID NO: 288512 - RNA, 23 nt, Artificial Sequence
  Synthetic
gcuuuucaaaaccaucagaucuc

SEQ ID NO: 288513 - RNA, 24 nt, Artificial Sequence
  Synthetic
cgcuuuucaaaaccaucagaucuc

SEQ ID NO: 288514 - RNA, 21 nt, Artificial Sequence
  Synthetic
uuuauaaaaccaucagaucuc

SEQ ID NO: 288515 - RNA, 22 nt, Artificial Sequence
  Synthetic
cuuuauaaaaccaucagaucuc

SEQ ID NO: 288516 - RNA, 23 nt, Artificial Sequence
  Synthetic
ucuuuauaaaaccaucagaucuc

SEQ ID NO: 288517 - RNA, 24 nt, Artificial Sequence
  Synthetic
cucuuuauaaaaccaucagaucuc

SEQ ID NO: 288518 - RNA, 18 nt, Artificial Sequence
  Synthetic
aucugcguaucagaucuc

SEQ ID NO: 288519 - RNA, 19 nt, Artificial Sequence
  Synthetic
gaucugcguaucagaucuc

SEQ ID NO: 288520 - RNA, 20 nt, Artificial Sequence
  Synthetic
ggaucugcguaucagaucuc

SEQ ID NO: 288521 - RNA, 21 nt, Artificial Sequence
  Synthetic
uggaucugcguaucagaucuc

SEQ ID NO: 288522 - RNA, 22 nt, Artificial Sequence
  Synthetic
cuggaucugcguaucagaucuc

SEQ ID NO: 288523 - RNA, 23 nt, Artificial Sequence
  Synthetic
acuggaucugcguaucagaucuc

SEQ ID NO: 288524 - RNA, 24 nt, Artificial Sequence
  Synthetic
aacuggaucugcguaucagaucuc

SEQ ID NO: 288525 - RNA, 18 nt, Artificial Sequence
  Synthetic
caaauagaaaaggaucuc

SEQ ID NO: 288526 - RNA, 19 nt, Artificial Sequence
  Synthetic
ccaaauagaaaaggaucuc

SEQ ID NO: 288527 - RNA, 20 nt, Artificial Sequence
  Synthetic
accaaauagaaaaggaucuc

SEQ ID NO: 288528 - RNA, 21 nt, Artificial Sequence
  Synthetic
aaccaaauagaaaaggaucuc

SEQ ID NO: 288529 - RNA, 22 nt, Artificial Sequence
  Synthetic
gaaccaaauagaaaaggaucuc

SEQ ID NO: 288530 - RNA, 23 nt, Artificial Sequence
  Synthetic
ugaaccaaauagaaaaggaucuc

SEQ ID NO: 288531 - RNA, 24 nt, Artificial Sequence
  Synthetic
gugaaccaaauagaaaaggaucuc

SEQ ID NO: 288532 - RNA, 18 nt, Artificial Sequence
  Synthetic
cugaggcgggaggaucuc

SEQ ID NO: 288533 - RNA, 19 nt, Artificial Sequence
  Synthetic
gcugaggcgggaggaucuc

SEQ ID NO: 288534 - RNA, 20 nt, Artificial Sequence
  Synthetic
ggcugaggcgggaggaucuc

SEQ ID NO: 288535 - RNA, 21 nt, Artificial Sequence
  Synthetic
aggcugaggcgggaggaucuc

SEQ ID NO: 288536 - RNA, 22 nt, Artificial Sequence
  Synthetic
gaggcugaggcgggaggaucuc

SEQ ID NO: 288537 - RNA, 23 nt, Artificial Sequence
  Synthetic
ggaggcugaggcgggaggaucuc

SEQ ID NO: 288538 - RNA, 24 nt, Artificial Sequence
  Synthetic
gggaggcugaggcgggaggaucuc

SEQ ID NO: 288539 - RNA, 18 nt, Artificial Sequence
  Synthetic
gcguauugaauggaucuc

SEQ ID NO: 288540 - RNA, 19 nt, Artificial Sequence
  Synthetic
agcguauugaauggaucuc

SEQ ID NO: 288541 - RNA, 20 nt, Artificial Sequence
  Synthetic
uagcguauugaauggaucuc

SEQ ID NO: 288542 - RNA, 21 nt, Artificial Sequence
  Synthetic
auagcguauugaauggaucuc

SEQ ID NO: 288543 - RNA, 22 nt, Artificial Sequence
  Synthetic
uauagcguauugaauggaucuc

SEQ ID NO: 288544 - RNA, 23 nt, Artificial Sequence
  Synthetic
auauagcguauugaauggaucuc

SEQ ID NO: 288545 - RNA, 24 nt, Artificial Sequence
  Synthetic
aauauagcguauugaauggaucuc

SEQ ID NO: 288546 - RNA, 18 nt, Artificial Sequence
  Synthetic
auaaaaccauuggaucuc

SEQ ID NO: 288547 - RNA, 19 nt, Artificial Sequence
  Synthetic
uauaaaaccauuggaucuc

SEQ ID NO: 288548 - RNA, 20 nt, Artificial Sequence
  Synthetic
uuauaaaaccauuggaucuc

SEQ ID NO: 288549 - RNA, 21 nt, Artificial Sequence
  Synthetic
cuuauaaaaccauuggaucuc

SEQ ID NO: 288550 - RNA, 22 nt, Artificial Sequence
  Synthetic
ccuuauaaaaccauuggaucuc

SEQ ID NO: 288551 - RNA, 23 nt, Artificial Sequence
  Synthetic
cccuuauaaaaccauuggaucuc

SEQ ID NO: 288552 - RNA, 24 nt, Artificial Sequence
  Synthetic
ccccuuauaaaaccauuggaucuc

SEQ ID NO: 288553 - RNA, 18 nt, Artificial Sequence
  Synthetic
cugaggugacaugaucuc

SEQ ID NO: 288554 - RNA, 19 nt, Artificial Sequence
  Synthetic
gcugaggugacaugaucuc

SEQ ID NO: 288555 - RNA, 20 nt, Artificial Sequence
  Synthetic
ggcugaggugacaugaucuc

SEQ ID NO: 288556 - RNA, 21 nt, Artificial Sequence
  Synthetic
aggcugaggugacaugaucuc

SEQ ID NO: 288557 - RNA, 22 nt, Artificial Sequence
  Synthetic
gaggcugaggugacaugaucuc

SEQ ID NO: 288558 - RNA, 23 nt, Artificial Sequence
  Synthetic
ggaggcugaggugacaugaucuc

SEQ ID NO: 288559 - RNA, 24 nt, Artificial Sequence
  Synthetic
aggaggcugaggugacaugaucuc

SEQ ID NO: 288560 - RNA, 18 nt, Artificial Sequence
  Synthetic
cacucuucuccugaucuc

SEQ ID NO: 288561 - RNA, 19 nt, Artificial Sequence
  Synthetic
acacucuucuccugaucuc

SEQ ID NO: 288562 - RNA, 20 nt, Artificial Sequence
  Synthetic
uacacucuucuccugaucuc

SEQ ID NO: 288563 - RNA, 21 nt, Artificial Sequence
  Synthetic
uuacacucuucuccugaucuc

SEQ ID NO: 288564 - RNA, 22 nt, Artificial Sequence
  Synthetic
cuuacacucuucuccugaucuc

SEQ ID NO: 288565 - RNA, 23 nt, Artificial Sequence
  Synthetic
ucuuacacucuucuccugaucuc

SEQ ID NO: 288566 - RNA, 24 nt, Artificial Sequence
  Synthetic
aucuuacacucuucuccugaucuc

SEQ ID NO: 288567 - RNA, 18 nt, Artificial Sequence
  Synthetic
gaaaacaucucugaucuc

SEQ ID NO: 288568 - RNA, 19 nt, Artificial Sequence
  Synthetic
ggaaaacaucucugaucuc

SEQ ID NO: 288569 - RNA, 20 nt, Artificial Sequence
  Synthetic
gggaaaacaucucugaucuc

SEQ ID NO: 288570 - RNA, 21 nt, Artificial Sequence
  Synthetic
ugggaaaacaucucugaucuc

SEQ ID NO: 288571 - RNA, 22 nt, Artificial Sequence
  Synthetic
augggaaaacaucucugaucuc

SEQ ID NO: 288572 - RNA, 23 nt, Artificial Sequence
  Synthetic
uaugggaaaacaucucugaucuc

SEQ ID NO: 288573 - RNA, 24 nt, Artificial Sequence
  Synthetic
auaugggaaaacaucucugaucuc

SEQ ID NO: 288574 - RNA, 18 nt, Artificial Sequence
  Synthetic
guuauacaaggauaucuc

SEQ ID NO: 288575 - RNA, 19 nt, Artificial Sequence
  Synthetic
uguuauacaaggauaucuc

SEQ ID NO: 288576 - RNA, 20 nt, Artificial Sequence
  Synthetic
auguuauacaaggauaucuc

SEQ ID NO: 288577 - RNA, 21 nt, Artificial Sequence
  Synthetic
uauguuauacaaggauaucuc

SEQ ID NO: 288578 - RNA, 22 nt, Artificial Sequence
  Synthetic
uuauguuauacaaggauaucuc

SEQ ID NO: 288579 - RNA, 23 nt, Artificial Sequence
  Synthetic
cuuauguuauacaaggauaucuc

SEQ ID NO: 288580 - RNA, 24 nt, Artificial Sequence
  Synthetic
acuuauguuauacaaggauaucuc

SEQ ID NO: 288581 - RNA, 18 nt, Artificial Sequence
  Synthetic
uuucuuuuccacuaucuc

SEQ ID NO: 288582 - RNA, 19 nt, Artificial Sequence
  Synthetic
cuuucuuuuccacuaucuc

SEQ ID NO: 288583 - RNA, 20 nt, Artificial Sequence
  Synthetic
ucuuucuuuuccacuaucuc

SEQ ID NO: 288584 - RNA, 21 nt, Artificial Sequence
  Synthetic
uucuuucuuuuccacuaucuc

SEQ ID NO: 288585 - RNA, 22 nt, Artificial Sequence
  Synthetic
auucuuucuuuuccacuaucuc

SEQ ID NO: 288586 - RNA, 23 nt, Artificial Sequence
  Synthetic
cauucuuucuuuuccacuaucuc

SEQ ID NO: 288587 - RNA, 24 nt, Artificial Sequence
  Synthetic
ucauucuuucuuuuccacuaucuc

SEQ ID NO: 288588 - RNA, 18 nt, Artificial Sequence
  Synthetic
aaaaaaauagucuaucuc

SEQ ID NO: 288589 - RNA, 19 nt, Artificial Sequence
  Synthetic
gaaaaaaauagucuaucuc

SEQ ID NO: 288590 - RNA, 20 nt, Artificial Sequence
  Synthetic
ggaaaaaaauagucuaucuc

SEQ ID NO: 288591 - RNA, 21 nt, Artificial Sequence
  Synthetic
uggaaaaaaauagucuaucuc

SEQ ID NO: 288592 - RNA, 22 nt, Artificial Sequence
  Synthetic
cuggaaaaaaauagucuaucuc

SEQ ID NO: 288593 - RNA, 23 nt, Artificial Sequence
  Synthetic
acuggaaaaaaauagucuaucuc

SEQ ID NO: 288594 - RNA, 24 nt, Artificial Sequence
  Synthetic
aacuggaaaaaaauagucuaucuc

SEQ ID NO: 288595 - RNA, 18 nt, Artificial Sequence
  Synthetic
gaaaaccaugucuaucuc

SEQ ID NO: 288596 - RNA, 19 nt, Artificial Sequence
  Synthetic
ggaaaaccaugucuaucuc

SEQ ID NO: 288597 - RNA, 20 nt, Artificial Sequence
  Synthetic
gggaaaaccaugucuaucuc

SEQ ID NO: 288598 - RNA, 21 nt, Artificial Sequence
  Synthetic
ggggaaaaccaugucuaucuc

SEQ ID NO: 288599 - RNA, 22 nt, Artificial Sequence
  Synthetic
gggggaaaaccaugucuaucuc

SEQ ID NO: 288600 - RNA, 23 nt, Artificial Sequence
  Synthetic
ugggggaaaaccaugucuaucuc

SEQ ID NO: 288601 - RNA, 24 nt, Artificial Sequence
  Synthetic
augggggaaaaccaugucuaucuc

SEQ ID NO: 288602 - RNA, 18 nt, Artificial Sequence
  Synthetic
aacauuugacaguaucuc

SEQ ID NO: 288603 - RNA, 19 nt, Artificial Sequence
  Synthetic
gaacauuugacaguaucuc

SEQ ID NO: 288604 - RNA, 20 nt, Artificial Sequence
  Synthetic
agaacauuugacaguaucuc

SEQ ID NO: 288605 - RNA, 21 nt, Artificial Sequence
  Synthetic
gagaacauuugacaguaucuc

SEQ ID NO: 288606 - RNA, 22 nt, Artificial Sequence
  Synthetic
agagaacauuugacaguaucuc

SEQ ID NO: 288607 - RNA, 23 nt, Artificial Sequence
  Synthetic
cagagaacauuugacaguaucuc

SEQ ID NO: 288608 - RNA, 24 nt, Artificial Sequence
  Synthetic
ccagagaacauuugacaguaucuc

SEQ ID NO: 288609 - RNA, 18 nt, Artificial Sequence
  Synthetic
aucaauuggcuguaucuc

SEQ ID NO: 288610 - RNA, 19 nt, Artificial Sequence
  Synthetic
caucaauuggcuguaucuc

SEQ ID NO: 288611 - RNA, 20 nt, Artificial Sequence
  Synthetic
gcaucaauuggcuguaucuc

SEQ ID NO: 288612 - RNA, 21 nt, Artificial Sequence
  Synthetic
agcaucaauuggcuguaucuc

SEQ ID NO: 288613 - RNA, 22 nt, Artificial Sequence
  Synthetic
aagcaucaauuggcuguaucuc

SEQ ID NO: 288614 - RNA, 23 nt, Artificial Sequence
  Synthetic
gaagcaucaauuggcuguaucuc

SEQ ID NO: 288615 - RNA, 24 nt, Artificial Sequence
  Synthetic
ugaagcaucaauuggcuguaucuc

SEQ ID NO: 288616 - RNA, 18 nt, Artificial Sequence
  Synthetic
agaugagcuguguaucuc

SEQ ID NO: 288617 - RNA, 19 nt, Artificial Sequence
  Synthetic
aagaugagcuguguaucuc

SEQ ID NO: 288618 - RNA, 20 nt, Artificial Sequence
  Synthetic
caagaugagcuguguaucuc

SEQ ID NO: 288619 - RNA, 21 nt, Artificial Sequence
  Synthetic
gcaagaugagcuguguaucuc

SEQ ID NO: 288620 - RNA, 22 nt, Artificial Sequence
  Synthetic
agcaagaugagcuguguaucuc

SEQ ID NO: 288621 - RNA, 23 nt, Artificial Sequence
  Synthetic
uagcaagaugagcuguguaucuc

SEQ ID NO: 288622 - RNA, 24 nt, Artificial Sequence
  Synthetic
auagcaagaugagcuguguaucuc

SEQ ID NO: 288623 - RNA, 18 nt, Artificial Sequence
  Synthetic
uacaauaagauuuaucuc

SEQ ID NO: 288624 - RNA, 19 nt, Artificial Sequence
  Synthetic
uuacaauaagauuuaucuc

SEQ ID NO: 288625 - RNA, 20 nt, Artificial Sequence
  Synthetic
uuuacaauaagauuuaucuc

SEQ ID NO: 288626 - RNA, 21 nt, Artificial Sequence
  Synthetic
auuuacaauaagauuuaucuc

SEQ ID NO: 288627 - RNA, 22 nt, Artificial Sequence
  Synthetic
cauuuacaauaagauuuaucuc

SEQ ID NO: 288628 - RNA, 23 nt, Artificial Sequence
  Synthetic
ucauuuacaauaagauuuaucuc

SEQ ID NO: 288629 - RNA, 24 nt, Artificial Sequence
  Synthetic
uucauuuacaauaagauuuaucuc

SEQ ID NO: 288630 - RNA, 18 nt, Artificial Sequence
  Synthetic
ccugucaugcuuuaucuc

SEQ ID NO: 288631 - RNA, 19 nt, Artificial Sequence
  Synthetic
accugucaugcuuuaucuc

SEQ ID NO: 288632 - RNA, 20 nt, Artificial Sequence
  Synthetic
caccugucaugcuuuaucuc

SEQ ID NO: 288633 - RNA, 21 nt, Artificial Sequence
  Synthetic
ccaccugucaugcuuuaucuc

SEQ ID NO: 288634 - RNA, 22 nt, Artificial Sequence
  Synthetic
accaccugucaugcuuuaucuc

SEQ ID NO: 288635 - RNA, 23 nt, Artificial Sequence
  Synthetic
gaccaccugucaugcuuuaucuc

SEQ ID NO: 288636 - RNA, 24 nt, Artificial Sequence
  Synthetic
ggaccaccugucaugcuuuaucuc

SEQ ID NO: 288637 - RNA, 18 nt, Artificial Sequence
  Synthetic
acuucauguuuaacucuc

SEQ ID NO: 288638 - RNA, 19 nt, Artificial Sequence
  Synthetic
cacuucauguuuaacucuc

SEQ ID NO: 288639 - RNA, 20 nt, Artificial Sequence
  Synthetic
ucacuucauguuuaacucuc

SEQ ID NO: 288640 - RNA, 21 nt, Artificial Sequence
  Synthetic
gucacuucauguuuaacucuc

SEQ ID NO: 288641 - RNA, 22 nt, Artificial Sequence
  Synthetic
ugucacuucauguuuaacucuc

SEQ ID NO: 288642 - RNA, 23 nt, Artificial Sequence
  Synthetic
uugucacuucauguuuaacucuc

SEQ ID NO: 288643 - RNA, 24 nt, Artificial Sequence
  Synthetic
auugucacuucauguuuaacucuc

SEQ ID NO: 288644 - RNA, 18 nt, Artificial Sequence
  Synthetic
cacaaaagucacacucuc

SEQ ID NO: 288645 - RNA, 19 nt, Artificial Sequence
  Synthetic
acacaaaagucacacucuc

SEQ ID NO: 288646 - RNA, 20 nt, Artificial Sequence
  Synthetic
cacacaaaagucacacucuc

SEQ ID NO: 288647 - RNA, 21 nt, Artificial Sequence
  Synthetic
acacacaaaagucacacucuc

SEQ ID NO: 288648 - RNA, 22 nt, Artificial Sequence
  Synthetic
cacacacaaaagucacacucuc

SEQ ID NO: 288649 - RNA, 23 nt, Artificial Sequence
  Synthetic
acacacacaaaagucacacucuc

SEQ ID NO: 288650 - RNA, 24 nt, Artificial Sequence
  Synthetic
cacacacacaaaagucacacucuc

SEQ ID NO: 288651 - RNA, 18 nt, Artificial Sequence
  Synthetic
aaagucuugaccacucuc

SEQ ID NO: 288652 - RNA, 19 nt, Artificial Sequence
  Synthetic
aaaagucuugaccacucuc

SEQ ID NO: 288653 - RNA, 20 nt, Artificial Sequence
  Synthetic
caaaagucuugaccacucuc

SEQ ID NO: 288654 - RNA, 21 nt, Artificial Sequence
  Synthetic
ucaaaagucuugaccacucuc

SEQ ID NO: 288655 - RNA, 22 nt, Artificial Sequence
  Synthetic
gucaaaagucuugaccacucuc

SEQ ID NO: 288656 - RNA, 23 nt, Artificial Sequence
  Synthetic
agucaaaagucuugaccacucuc

SEQ ID NO: 288657 - RNA, 24 nt, Artificial Sequence
  Synthetic
aagucaaaagucuugaccacucuc

SEQ ID NO: 288658 - RNA, 18 nt, Artificial Sequence
  Synthetic
ucucucucucucacucuc

SEQ ID NO: 288659 - RNA, 19 nt, Artificial Sequence
  Synthetic
cucucucucucucacucuc

SEQ ID NO: 288660 - RNA, 20 nt, Artificial Sequence
  Synthetic
ucucucucucucucacucuc

SEQ ID NO: 288661 - RNA, 21 nt, Artificial Sequence
  Synthetic
cucucucucucucucacucuc

SEQ ID NO: 288662 - RNA, 22 nt, Artificial Sequence
  Synthetic
ucucucucucucucucacucuc

SEQ ID NO: 288663 - RNA, 23 nt, Artificial Sequence
  Synthetic
cucucucucucucucucacucuc

SEQ ID NO: 288664 - RNA, 24 nt, Artificial Sequence
  Synthetic
ucucucucucucucucucacucuc

SEQ ID NO: 288665 - RNA, 18 nt, Artificial Sequence
  Synthetic
augcuggcuuugacucuc

SEQ ID NO: 288666 - RNA, 19 nt, Artificial Sequence
  Synthetic
aaugcuggcuuugacucuc

SEQ ID NO: 288667 - RNA, 20 nt, Artificial Sequence
  Synthetic
uaaugcuggcuuugacucuc

SEQ ID NO: 288668 - RNA, 21 nt, Artificial Sequence
  Synthetic
uuaaugcuggcuuugacucuc

SEQ ID NO: 288669 - RNA, 22 nt, Artificial Sequence
  Synthetic
guuaaugcuggcuuugacucuc

SEQ ID NO: 288670 - RNA, 23 nt, Artificial Sequence
  Synthetic
uguuaaugcuggcuuugacucuc

SEQ ID NO: 288671 - RNA, 24 nt, Artificial Sequence
  Synthetic
auguuaaugcuggcuuugacucuc

SEQ ID NO: 288672 - RNA, 18 nt, Artificial Sequence
  Synthetic
caauuacaugauacucuc

SEQ ID NO: 288673 - RNA, 19 nt, Artificial Sequence
  Synthetic
ucaauuacaugauacucuc

SEQ ID NO: 288674 - RNA, 20 nt, Artificial Sequence
  Synthetic
gucaauuacaugauacucuc

SEQ ID NO: 288675 - RNA, 21 nt, Artificial Sequence
  Synthetic
ugucaauuacaugauacucuc

SEQ ID NO: 288676 - RNA, 22 nt, Artificial Sequence
  Synthetic
augucaauuacaugauacucuc

SEQ ID NO: 288677 - RNA, 23 nt, Artificial Sequence
  Synthetic
aaugucaauuacaugauacucuc

SEQ ID NO: 288678 - RNA, 24 nt, Artificial Sequence
  Synthetic
caaugucaauuacaugauacucuc

SEQ ID NO: 288679 - RNA, 18 nt, Artificial Sequence
  Synthetic
gugaaaaccuuaccucuc

SEQ ID NO: 288680 - RNA, 19 nt, Artificial Sequence
  Synthetic
ggugaaaaccuuaccucuc

SEQ ID NO: 288681 - RNA, 20 nt, Artificial Sequence
  Synthetic
aggugaaaaccuuaccucuc

SEQ ID NO: 288682 - RNA, 21 nt, Artificial Sequence
  Synthetic
gaggugaaaaccuuaccucuc

SEQ ID NO: 288683 - RNA, 22 nt, Artificial Sequence
  Synthetic
agaggugaaaaccuuaccucuc

SEQ ID NO: 288684 - RNA, 23 nt, Artificial Sequence
  Synthetic
cagaggugaaaaccuuaccucuc

SEQ ID NO: 288685 - RNA, 24 nt, Artificial Sequence
  Synthetic
ucagaggugaaaaccuuaccucuc

SEQ ID NO: 288686 - RNA, 18 nt, Artificial Sequence
  Synthetic
cauauccacuucccucuc

SEQ ID NO: 288687 - RNA, 19 nt, Artificial Sequence
  Synthetic
ucauauccacuucccucuc

SEQ ID NO: 288688 - RNA, 20 nt, Artificial Sequence
  Synthetic
uucauauccacuucccucuc

SEQ ID NO: 288689 - RNA, 21 nt, Artificial Sequence
  Synthetic
auucauauccacuucccucuc

SEQ ID NO: 288690 - RNA, 22 nt, Artificial Sequence
  Synthetic
aauucauauccacuucccucuc

SEQ ID NO: 288691 - RNA, 23 nt, Artificial Sequence
  Synthetic
caauucauauccacuucccucuc

SEQ ID NO: 288692 - RNA, 24 nt, Artificial Sequence
  Synthetic
gcaauucauauccacuucccucuc

SEQ ID NO: 288693 - RNA, 18 nt, Artificial Sequence
  Synthetic
uucuacagccagccucuc

SEQ ID NO: 288694 - RNA, 19 nt, Artificial Sequence
  Synthetic
uuucuacagccagccucuc

SEQ ID NO: 288695 - RNA, 20 nt, Artificial Sequence
  Synthetic
auuucuacagccagccucuc

SEQ ID NO: 288696 - RNA, 21 nt, Artificial Sequence
  Synthetic
aauuucuacagccagccucuc

SEQ ID NO: 288697 - RNA, 22 nt, Artificial Sequence
  Synthetic
aaauuucuacagccagccucuc

SEQ ID NO: 288698 - RNA, 23 nt, Artificial Sequence
  Synthetic
caaauuucuacagccagccucuc

SEQ ID NO: 288699 - RNA, 24 nt, Artificial Sequence
  Synthetic
gcaaauuucuacagccagccucuc

SEQ ID NO: 288700 - RNA, 18 nt, Artificial Sequence
  Synthetic
gagugugaucugccucuc

SEQ ID NO: 288701 - RNA, 19 nt, Artificial Sequence
  Synthetic
ugagugugaucugccucuc

SEQ ID NO: 288702 - RNA, 20 nt, Artificial Sequence
  Synthetic
gugagugugaucugccucuc

SEQ ID NO: 288703 - RNA, 21 nt, Artificial Sequence
  Synthetic
ugugagugugaucugccucuc

SEQ ID NO: 288704 - RNA, 22 nt, Artificial Sequence
  Synthetic
gugugagugugaucugccucuc

SEQ ID NO: 288705 - RNA, 23 nt, Artificial Sequence
  Synthetic
ugugugagugugaucugccucuc

SEQ ID NO: 288706 - RNA, 24 nt, Artificial Sequence
  Synthetic
augugugagugugaucugccucuc

SEQ ID NO: 288707 - RNA, 18 nt, Artificial Sequence
  Synthetic
aaauauguccuuccucuc

SEQ ID NO: 288708 - RNA, 19 nt, Artificial Sequence
  Synthetic
caaauauguccuuccucuc

SEQ ID NO: 288709 - RNA, 20 nt, Artificial Sequence
  Synthetic
ucaaauauguccuuccucuc

SEQ ID NO: 288710 - RNA, 21 nt, Artificial Sequence
  Synthetic
uucaaauauguccuuccucuc

SEQ ID NO: 288711 - RNA, 22 nt, Artificial Sequence
  Synthetic
auucaaauauguccuuccucuc

SEQ ID NO: 288712 - RNA, 23 nt, Artificial Sequence
  Synthetic
uauucaaauauguccuuccucuc

SEQ ID NO: 288713 - RNA, 24 nt, Artificial Sequence
  Synthetic
auauucaaauauguccuuccucuc

SEQ ID NO: 288714 - RNA, 18 nt, Artificial Sequence
  Synthetic
ucuccucuuguuccucuc

SEQ ID NO: 288715 - RNA, 19 nt, Artificial Sequence
  Synthetic
uucuccucuuguuccucuc

SEQ ID NO: 288716 - RNA, 20 nt, Artificial Sequence
  Synthetic
guucuccucuuguuccucuc

SEQ ID NO: 288717 - RNA, 21 nt, Artificial Sequence
  Synthetic
aguucuccucuuguuccucuc

SEQ ID NO: 288718 - RNA, 22 nt, Artificial Sequence
  Synthetic
gaguucuccucuuguuccucuc

SEQ ID NO: 288719 - RNA, 23 nt, Artificial Sequence
  Synthetic
agaguucuccucuuguuccucuc

SEQ ID NO: 288720 - RNA, 24 nt, Artificial Sequence
  Synthetic
cagaguucuccucuuguuccucuc

SEQ ID NO: 288721 - RNA, 18 nt, Artificial Sequence
  Synthetic
cauuacuuuaaagcucuc

SEQ ID NO: 288722 - RNA, 19 nt, Artificial Sequence
  Synthetic
acauuacuuuaaagcucuc

SEQ ID NO: 288723 - RNA, 20 nt, Artificial Sequence
  Synthetic
cacauuacuuuaaagcucuc

SEQ ID NO: 288724 - RNA, 21 nt, Artificial Sequence
  Synthetic
acacauuacuuuaaagcucuc

SEQ ID NO: 288725 - RNA, 22 nt, Artificial Sequence
  Synthetic
uacacauuacuuuaaagcucuc

SEQ ID NO: 288726 - RNA, 23 nt, Artificial Sequence
  Synthetic
auacacauuacuuuaaagcucuc

SEQ ID NO: 288727 - RNA, 24 nt, Artificial Sequence
  Synthetic
aauacacauuacuuuaaagcucuc

SEQ ID NO: 288728 - RNA, 18 nt, Artificial Sequence
  Synthetic
auugugucagaagcucuc

SEQ ID NO: 288729 - RNA, 19 nt, Artificial Sequence
  Synthetic
cauugugucagaagcucuc

SEQ ID NO: 288730 - RNA, 20 nt, Artificial Sequence
  Synthetic
gcauugugucagaagcucuc

SEQ ID NO: 288731 - RNA, 21 nt, Artificial Sequence
  Synthetic
ugcauugugucagaagcucuc

SEQ ID NO: 288732 - RNA, 22 nt, Artificial Sequence
  Synthetic
augcauugugucagaagcucuc

SEQ ID NO: 288733 - RNA, 23 nt, Artificial Sequence
  Synthetic
aaugcauugugucagaagcucuc

SEQ ID NO: 288734 - RNA, 24 nt, Artificial Sequence
  Synthetic
aaaugcauugugucagaagcucuc

SEQ ID NO: 288735 - RNA, 18 nt, Artificial Sequence
  Synthetic
uuguugugaccagcucuc

SEQ ID NO: 288736 - RNA, 19 nt, Artificial Sequence
  Synthetic
uuuguugugaccagcucuc

SEQ ID NO: 288737 - RNA, 20 nt, Artificial Sequence
  Synthetic
cuuuguugugaccagcucuc

SEQ ID NO: 288738 - RNA, 21 nt, Artificial Sequence
  Synthetic
ucuuuguugugaccagcucuc

SEQ ID NO: 288739 - RNA, 22 nt, Artificial Sequence
  Synthetic
gucuuuguugugaccagcucuc

SEQ ID NO: 288740 - RNA, 23 nt, Artificial Sequence
  Synthetic
agucuuuguugugaccagcucuc

SEQ ID NO: 288741 - RNA, 24 nt, Artificial Sequence
  Synthetic
cagucuuuguugugaccagcucuc

SEQ ID NO: 288742 - RNA, 18 nt, Artificial Sequence
  Synthetic
augaaaccaucagcucuc

SEQ ID NO: 288743 - RNA, 19 nt, Artificial Sequence
  Synthetic
uaugaaaccaucagcucuc

SEQ ID NO: 288744 - RNA, 20 nt, Artificial Sequence
  Synthetic
uuaugaaaccaucagcucuc

SEQ ID NO: 288745 - RNA, 21 nt, Artificial Sequence
  Synthetic
cuuaugaaaccaucagcucuc

SEQ ID NO: 288746 - RNA, 22 nt, Artificial Sequence
  Synthetic
ccuuaugaaaccaucagcucuc

SEQ ID NO: 288747 - RNA, 23 nt, Artificial Sequence
  Synthetic
cccuuaugaaaccaucagcucuc

SEQ ID NO: 288748 - RNA, 24 nt, Artificial Sequence
  Synthetic
ccccuuaugaaaccaucagcucuc

SEQ ID NO: 288749 - RNA, 18 nt, Artificial Sequence
  Synthetic
guacuucaaagagcucuc

SEQ ID NO: 288750 - RNA, 19 nt, Artificial Sequence
  Synthetic
uguacuucaaagagcucuc

SEQ ID NO: 288751 - RNA, 20 nt, Artificial Sequence
  Synthetic
cuguacuucaaagagcucuc

SEQ ID NO: 288752 - RNA, 21 nt, Artificial Sequence
  Synthetic
ccuguacuucaaagagcucuc

SEQ ID NO: 288753 - RNA, 22 nt, Artificial Sequence
  Synthetic
cccuguacuucaaagagcucuc

SEQ ID NO: 288754 - RNA, 23 nt, Artificial Sequence
  Synthetic
ucccuguacuucaaagagcucuc

SEQ ID NO: 288755 - RNA, 24 nt, Artificial Sequence
  Synthetic
gucccuguacuucaaagagcucuc

SEQ ID NO: 288756 - RNA, 18 nt, Artificial Sequence
  Synthetic
aagggcacuuucgcucuc

SEQ ID NO: 288757 - RNA, 19 nt, Artificial Sequence
  Synthetic
uaagggcacuuucgcucuc

SEQ ID NO: 288758 - RNA, 20 nt, Artificial Sequence
  Synthetic
uuaagggcacuuucgcucuc

SEQ ID NO: 288759 - RNA, 21 nt, Artificial Sequence
  Synthetic
uuuaagggcacuuucgcucuc

SEQ ID NO: 288760 - RNA, 22 nt, Artificial Sequence
  Synthetic
guuuaagggcacuuucgcucuc

SEQ ID NO: 288761 - RNA, 23 nt, Artificial Sequence
  Synthetic
uguuuaagggcacuuucgcucuc

SEQ ID NO: 288762 - RNA, 24 nt, Artificial Sequence
  Synthetic
auguuuaagggcacuuucgcucuc

SEQ ID NO: 288763 - RNA, 18 nt, Artificial Sequence
  Synthetic
gacaaccaaauggcucuc

SEQ ID NO: 288764 - RNA, 19 nt, Artificial Sequence
  Synthetic
agacaaccaaauggcucuc

SEQ ID NO: 288765 - RNA, 20 nt, Artificial Sequence
  Synthetic
aagacaaccaaauggcucuc

SEQ ID NO: 288766 - RNA, 21 nt, Artificial Sequence
  Synthetic
caagacaaccaaauggcucuc

SEQ ID NO: 288767 - RNA, 22 nt, Artificial Sequence
  Synthetic
gcaagacaaccaaauggcucuc

SEQ ID NO: 288768 - RNA, 23 nt, Artificial Sequence
  Synthetic
agcaagacaaccaaauggcucuc

SEQ ID NO: 288769 - RNA, 24 nt, Artificial Sequence
  Synthetic
cagcaagacaaccaaauggcucuc

SEQ ID NO: 288770 - RNA, 18 nt, Artificial Sequence
  Synthetic
uaaucaggagcugcucuc

SEQ ID NO: 288771 - RNA, 19 nt, Artificial Sequence
  Synthetic
uuaaucaggagcugcucuc

SEQ ID NO: 288772 - RNA, 20 nt, Artificial Sequence
  Synthetic
guuaaucaggagcugcucuc

SEQ ID NO: 288773 - RNA, 21 nt, Artificial Sequence
  Synthetic
gguuaaucaggagcugcucuc

SEQ ID NO: 288774 - RNA, 22 nt, Artificial Sequence
  Synthetic
ggguuaaucaggagcugcucuc

SEQ ID NO: 288775 - RNA, 23 nt, Artificial Sequence
  Synthetic
cggguuaaucaggagcugcucuc

SEQ ID NO: 288776 - RNA, 24 nt, Artificial Sequence
  Synthetic
acggguuaaucaggagcugcucuc

SEQ ID NO: 288777 - RNA, 18 nt, Artificial Sequence
  Synthetic
cucugacccucugcucuc

SEQ ID NO: 288778 - RNA, 19 nt, Artificial Sequence
  Synthetic
ccucugacccucugcucuc

SEQ ID NO: 288779 - RNA, 20 nt, Artificial Sequence
  Synthetic
uccucugacccucugcucuc

SEQ ID NO: 288780 - RNA, 21 nt, Artificial Sequence
  Synthetic
cuccucugacccucugcucuc

SEQ ID NO: 288781 - RNA, 22 nt, Artificial Sequence
  Synthetic
ucuccucugacccucugcucuc

SEQ ID NO: 288782 - RNA, 23 nt, Artificial Sequence
  Synthetic
gucuccucugacccucugcucuc

SEQ ID NO: 288783 - RNA, 24 nt, Artificial Sequence
  Synthetic
agucuccucugacccucugcucuc

SEQ ID NO: 288784 - RNA, 18 nt, Artificial Sequence
  Synthetic
uauagagggucugcucuc

SEQ ID NO: 288785 - RNA, 19 nt, Artificial Sequence
  Synthetic
uuauagagggucugcucuc

SEQ ID NO: 288786 - RNA, 20 nt, Artificial Sequence
  Synthetic
uuuauagagggucugcucuc

SEQ ID NO: 288787 - RNA, 21 nt, Artificial Sequence
  Synthetic
auuuauagagggucugcucuc

SEQ ID NO: 288788 - RNA, 22 nt, Artificial Sequence
  Synthetic
gauuuauagagggucugcucuc

SEQ ID NO: 288789 - RNA, 23 nt, Artificial Sequence
  Synthetic
ugauuuauagagggucugcucuc

SEQ ID NO: 288790 - RNA, 24 nt, Artificial Sequence
  Synthetic
gugauuuauagagggucugcucuc

SEQ ID NO: 288791 - RNA, 18 nt, Artificial Sequence
  Synthetic
agcauuucaguugcucuc

SEQ ID NO: 288792 - RNA, 19 nt, Artificial Sequence
  Synthetic
cagcauuucaguugcucuc

SEQ ID NO: 288793 - RNA, 20 nt, Artificial Sequence
  Synthetic
gcagcauuucaguugcucuc

SEQ ID NO: 288794 - RNA, 21 nt, Artificial Sequence
  Synthetic
agcagcauuucaguugcucuc

SEQ ID NO: 288795 - RNA, 22 nt, Artificial Sequence
  Synthetic
aagcagcauuucaguugcucuc

SEQ ID NO: 288796 - RNA, 23 nt, Artificial Sequence
  Synthetic
gaagcagcauuucaguugcucuc

SEQ ID NO: 288797 - RNA, 24 nt, Artificial Sequence
  Synthetic
ggaagcagcauuucaguugcucuc

SEQ ID NO: 288798 - RNA, 18 nt, Artificial Sequence
  Synthetic
aaaguuuuuaaaucucuc

SEQ ID NO: 288799 - RNA, 19 nt, Artificial Sequence
  Synthetic
aaaaguuuuuaaaucucuc

SEQ ID NO: 288800 - RNA, 20 nt, Artificial Sequence
  Synthetic
uaaaaguuuuuaaaucucuc

SEQ ID NO: 288801 - RNA, 21 nt, Artificial Sequence
  Synthetic
auaaaaguuuuuaaaucucuc

SEQ ID NO: 288802 - RNA, 22 nt, Artificial Sequence
  Synthetic
gauaaaaguuuuuaaaucucuc

SEQ ID NO: 288803 - RNA, 23 nt, Artificial Sequence
  Synthetic
agauaaaaguuuuuaaaucucuc

SEQ ID NO: 288804 - RNA, 24 nt, Artificial Sequence
  Synthetic
gagauaaaaguuuuuaaaucucuc

SEQ ID NO: 288805 - RNA, 18 nt, Artificial Sequence
  Synthetic
guuccuuuucuaucucuc

SEQ ID NO: 288806 - RNA, 19 nt, Artificial Sequence
  Synthetic
uguuccuuuucuaucucuc

SEQ ID NO: 288807 - RNA, 20 nt, Artificial Sequence
  Synthetic
uuguuccuuuucuaucucuc

SEQ ID NO: 288808 - RNA, 21 nt, Artificial Sequence
  Synthetic
uuuguuccuuuucuaucucuc

SEQ ID NO: 288809 - RNA, 22 nt, Artificial Sequence
  Synthetic
auuuguuccuuuucuaucucuc

SEQ ID NO: 288810 - RNA, 23 nt, Artificial Sequence
  Synthetic
uauuuguuccuuuucuaucucuc

SEQ ID NO: 288811 - RNA, 24 nt, Artificial Sequence
  Synthetic
cuauuuguuccuuuucuaucucuc

SEQ ID NO: 288812 - RNA, 18 nt, Artificial Sequence
  Synthetic
uaagaauuuuuaucucuc

SEQ ID NO: 288813 - RNA, 19 nt, Artificial Sequence
  Synthetic
cuaagaauuuuuaucucuc

SEQ ID NO: 288814 - RNA, 20 nt, Artificial Sequence
  Synthetic
gcuaagaauuuuuaucucuc

SEQ ID NO: 288815 - RNA, 21 nt, Artificial Sequence
  Synthetic
agcuaagaauuuuuaucucuc

SEQ ID NO: 288816 - RNA, 22 nt, Artificial Sequence
  Synthetic
uagcuaagaauuuuuaucucuc

SEQ ID NO: 288817 - RNA, 23 nt, Artificial Sequence
  Synthetic
auagcuaagaauuuuuaucucuc

SEQ ID NO: 288818 - RNA, 24 nt, Artificial Sequence
  Synthetic
aauagcuaagaauuuuuaucucuc

SEQ ID NO: 288819 - RNA, 18 nt, Artificial Sequence
  Synthetic
caucuucccuccucucuc

SEQ ID NO: 288820 - RNA, 19 nt, Artificial Sequence
  Synthetic
acaucuucccuccucucuc

SEQ ID NO: 288821 - RNA, 20 nt, Artificial Sequence
  Synthetic
uacaucuucccuccucucuc

SEQ ID NO: 288822 - RNA, 21 nt, Artificial Sequence
  Synthetic
cuacaucuucccuccucucuc

SEQ ID NO: 288823 - RNA, 22 nt, Artificial Sequence
  Synthetic
ccuacaucuucccuccucucuc

SEQ ID NO: 288824 - RNA, 23 nt, Artificial Sequence
  Synthetic
uccuacaucuucccuccucucuc

SEQ ID NO: 288825 - RNA, 24 nt, Artificial Sequence
  Synthetic
uuccuacaucuucccuccucucuc

SEQ ID NO: 288826 - RNA, 18 nt, Artificial Sequence
  Synthetic
cugugucucagcucucuc

SEQ ID NO: 288827 - RNA, 19 nt, Artificial Sequence
  Synthetic
gcugugucucagcucucuc

SEQ ID NO: 288828 - RNA, 20 nt, Artificial Sequence
  Synthetic
agcugugucucagcucucuc

SEQ ID NO: 288829 - RNA, 21 nt, Artificial Sequence
  Synthetic
uagcugugucucagcucucuc

SEQ ID NO: 288830 - RNA, 22 nt, Artificial Sequence
  Synthetic
auagcugugucucagcucucuc

SEQ ID NO: 288831 - RNA, 23 nt, Artificial Sequence
  Synthetic
aauagcugugucucagcucucuc

SEQ ID NO: 288832 - RNA, 24 nt, Artificial Sequence
  Synthetic
gaauagcugugucucagcucucuc

SEQ ID NO: 288833 - RNA, 18 nt, Artificial Sequence
  Synthetic
uugaggucuuucucucuc

SEQ ID NO: 288834 - RNA, 19 nt, Artificial Sequence
  Synthetic
auugaggucuuucucucuc

SEQ ID NO: 288835 - RNA, 20 nt, Artificial Sequence
  Synthetic
uauugaggucuuucucucuc

SEQ ID NO: 288836 - RNA, 21 nt, Artificial Sequence
  Synthetic
guauugaggucuuucucucuc

SEQ ID NO: 288837 - RNA, 22 nt, Artificial Sequence
  Synthetic
uguauugaggucuuucucucuc

SEQ ID NO: 288838 - RNA, 23 nt, Artificial Sequence
  Synthetic
uuguauugaggucuuucucucuc

SEQ ID NO: 288839 - RNA, 24 nt, Artificial Sequence
  Synthetic
auuguauugaggucuuucucucuc

SEQ ID NO: 288840 - RNA, 18 nt, Artificial Sequence
  Synthetic
ucuuaucuugggucucuc

SEQ ID NO: 288841 - RNA, 19 nt, Artificial Sequence
  Synthetic
aucuuaucuugggucucuc

SEQ ID NO: 288842 - RNA, 20 nt, Artificial Sequence
  Synthetic
caucuuaucuugggucucuc

SEQ ID NO: 288843 - RNA, 21 nt, Artificial Sequence
  Synthetic
ucaucuuaucuugggucucuc

SEQ ID NO: 288844 - RNA, 22 nt, Artificial Sequence
  Synthetic
aucaucuuaucuugggucucuc

SEQ ID NO: 288845 - RNA, 23 nt, Artificial Sequence
  Synthetic
aaucaucuuaucuugggucucuc

SEQ ID NO: 288846 - RNA, 24 nt, Artificial Sequence
  Synthetic
uaaucaucuuaucuugggucucuc

SEQ ID NO: 288847 - RNA, 18 nt, Artificial Sequence
  Synthetic
acacauccucauucucuc

SEQ ID NO: 288848 - RNA, 19 nt, Artificial Sequence
  Synthetic
gacacauccucauucucuc

SEQ ID NO: 288849 - RNA, 20 nt, Artificial Sequence
  Synthetic
ggacacauccucauucucuc

SEQ ID NO: 288850 - RNA, 21 nt, Artificial Sequence
  Synthetic
gggacacauccucauucucuc

SEQ ID NO: 288851 - RNA, 22 nt, Artificial Sequence
  Synthetic
ggggacacauccucauucucuc

SEQ ID NO: 288852 - RNA, 23 nt, Artificial Sequence
  Synthetic
aggggacacauccucauucucuc

SEQ ID NO: 288853 - RNA, 24 nt, Artificial Sequence
  Synthetic
gaggggacacauccucauucucuc

SEQ ID NO: 288854 - RNA, 18 nt, Artificial Sequence
  Synthetic
guaacauuaacuucucuc

SEQ ID NO: 288855 - RNA, 19 nt, Artificial Sequence
  Synthetic
aguaacauuaacuucucuc

SEQ ID NO: 288856 - RNA, 20 nt, Artificial Sequence
  Synthetic
aaguaacauuaacuucucuc

SEQ ID NO: 288857 - RNA, 21 nt, Artificial Sequence
  Synthetic
gaaguaacauuaacuucucuc

SEQ ID NO: 288858 - RNA, 22 nt, Artificial Sequence
  Synthetic
ugaaguaacauuaacuucucuc

SEQ ID NO: 288859 - RNA, 23 nt, Artificial Sequence
  Synthetic
augaaguaacauuaacuucucuc

SEQ ID NO: 288860 - RNA, 24 nt, Artificial Sequence
  Synthetic
aaugaaguaacauuaacuucucuc

SEQ ID NO: 288861 - RNA, 18 nt, Artificial Sequence
  Synthetic
cugaguuuuuguucucuc

SEQ ID NO: 288862 - RNA, 19 nt, Artificial Sequence
  Synthetic
ucugaguuuuuguucucuc

SEQ ID NO: 288863 - RNA, 20 nt, Artificial Sequence
  Synthetic
uucugaguuuuuguucucuc

SEQ ID NO: 288864 - RNA, 21 nt, Artificial Sequence
  Synthetic
cuucugaguuuuuguucucuc

SEQ ID NO: 288865 - RNA, 22 nt, Artificial Sequence
  Synthetic
gcuucugaguuuuuguucucuc

SEQ ID NO: 288866 - RNA, 23 nt, Artificial Sequence
  Synthetic
agcuucugaguuuuuguucucuc

SEQ ID NO: 288867 - RNA, 24 nt, Artificial Sequence
  Synthetic
uagcuucugaguuuuuguucucuc

SEQ ID NO: 288868 - RNA, 18 nt, Artificial Sequence
  Synthetic
aaagaaaagaaaagucuc

SEQ ID NO: 288869 - RNA, 19 nt, Artificial Sequence
  Synthetic
aaaagaaaagaaaagucuc

SEQ ID NO: 288870 - RNA, 20 nt, Artificial Sequence
  Synthetic
gaaaagaaaagaaaagucuc

SEQ ID NO: 288871 - RNA, 21 nt, Artificial Sequence
  Synthetic
agaaaagaaaagaaaagucuc

SEQ ID NO: 288872 - RNA, 22 nt, Artificial Sequence
  Synthetic
aagaaaagaaaagaaaagucuc

SEQ ID NO: 288873 - RNA, 23 nt, Artificial Sequence
  Synthetic
gaagaaaagaaaagaaaagucuc

SEQ ID NO: 288874 - RNA, 24 nt, Artificial Sequence
  Synthetic
ggaagaaaagaaaagaaaagucuc

SEQ ID NO: 288875 - RNA, 18 nt, Artificial Sequence
  Synthetic
augaugaaugaaagucuc

SEQ ID NO: 288876 - RNA, 19 nt, Artificial Sequence
  Synthetic
aaugaugaaugaaagucuc

SEQ ID NO: 288877 - RNA, 20 nt, Artificial Sequence
  Synthetic
caaugaugaaugaaagucuc

SEQ ID NO: 288878 - RNA, 21 nt, Artificial Sequence
  Synthetic
ucaaugaugaaugaaagucuc

SEQ ID NO: 288879 - RNA, 22 nt, Artificial Sequence
  Synthetic
gucaaugaugaaugaaagucuc

SEQ ID NO: 288880 - RNA, 23 nt, Artificial Sequence
  Synthetic
ggucaaugaugaaugaaagucuc

SEQ ID NO: 288881 - RNA, 24 nt, Artificial Sequence
  Synthetic
uggucaaugaugaaugaaagucuc

SEQ ID NO: 288882 - RNA, 18 nt, Artificial Sequence
  Synthetic
auuaaguuugaaagucuc

SEQ ID NO: 288883 - RNA, 19 nt, Artificial Sequence
  Synthetic
uauuaaguuugaaagucuc

SEQ ID NO: 288884 - RNA, 20 nt, Artificial Sequence
  Synthetic
auauuaaguuugaaagucuc

SEQ ID NO: 288885 - RNA, 21 nt, Artificial Sequence
  Synthetic
cauauuaaguuugaaagucuc

SEQ ID NO: 288886 - RNA, 22 nt, Artificial Sequence
  Synthetic
ucauauuaaguuugaaagucuc

SEQ ID NO: 288887 - RNA, 23 nt, Artificial Sequence
  Synthetic
gucauauuaaguuugaaagucuc

SEQ ID NO: 288888 - RNA, 24 nt, Artificial Sequence
  Synthetic
cgucauauuaaguuugaaagucuc

SEQ ID NO: 288889 - RNA, 18 nt, Artificial Sequence
  Synthetic
aaccauucaacaagucuc

SEQ ID NO: 288890 - RNA, 19 nt, Artificial Sequence
  Synthetic
aaaccauucaacaagucuc

SEQ ID NO: 288891 - RNA, 20 nt, Artificial Sequence
  Synthetic
aaaaccauucaacaagucuc

SEQ ID NO: 288892 - RNA, 18 nt, Artificial Sequence
  Synthetic
agccauucaacaagucuc

SEQ ID NO: 288893 - RNA, 19 nt, Artificial Sequence
  Synthetic
aagccauucaacaagucuc

SEQ ID NO: 288894 - RNA, 20 nt, Artificial Sequence
  Synthetic
aaagccauucaacaagucuc

SEQ ID NO: 288895 - RNA, 21 nt, Artificial Sequence
  Synthetic
caaagccauucaacaagucuc

SEQ ID NO: 288896 - RNA, 22 nt, Artificial Sequence
  Synthetic
ucaaagccauucaacaagucuc

SEQ ID NO: 288897 - RNA, 23 nt, Artificial Sequence
  Synthetic
gucaaagccauucaacaagucuc

SEQ ID NO: 288898 - RNA, 24 nt, Artificial Sequence
  Synthetic
ggucaaagccauucaacaagucuc

SEQ ID NO: 288899 - RNA, 18 nt, Artificial Sequence
  Synthetic
aagauuuuuucaagucuc

SEQ ID NO: 288900 - RNA, 19 nt, Artificial Sequence
  Synthetic
gaagauuuuuucaagucuc

SEQ ID NO: 288901 - RNA, 20 nt, Artificial Sequence
  Synthetic
ugaagauuuuuucaagucuc

SEQ ID NO: 288902 - RNA, 21 nt, Artificial Sequence
  Synthetic
gugaagauuuuuucaagucuc

SEQ ID NO: 288903 - RNA, 22 nt, Artificial Sequence
  Synthetic
ugugaagauuuuuucaagucuc

SEQ ID NO: 288904 - RNA, 23 nt, Artificial Sequence
  Synthetic
gugugaagauuuuuucaagucuc

SEQ ID NO: 288905 - RNA, 24 nt, Artificial Sequence
  Synthetic
ugugugaagauuuuuucaagucuc

SEQ ID NO: 288906 - RNA, 18 nt, Artificial Sequence
  Synthetic
aaaagagaaagaagucuc

SEQ ID NO: 288907 - RNA, 19 nt, Artificial Sequence
  Synthetic
aaaaagagaaagaagucuc

SEQ ID NO: 288908 - RNA, 20 nt, Artificial Sequence
  Synthetic
aaaaaagagaaagaagucuc

SEQ ID NO: 288909 - RNA, 21 nt, Artificial Sequence
  Synthetic
gaaaaaagagaaagaagucuc

SEQ ID NO: 288910 - RNA, 22 nt, Artificial Sequence
  Synthetic
agaaaaaagagaaagaagucuc

SEQ ID NO: 288911 - RNA, 23 nt, Artificial Sequence
  Synthetic
aagaaaaaagagaaagaagucuc

SEQ ID NO: 288912 - RNA, 24 nt, Artificial Sequence
  Synthetic
aaagaaaaaagagaaagaagucuc

SEQ ID NO: 288913 - RNA, 18 nt, Artificial Sequence
  Synthetic
auuaaauugagaagucuc

SEQ ID NO: 288914 - RNA, 19 nt, Artificial Sequence
  Synthetic
cauuaaauugagaagucuc

SEQ ID NO: 288915 - RNA, 20 nt, Artificial Sequence
  Synthetic
acauuaaauugagaagucuc

SEQ ID NO: 288916 - RNA, 21 nt, Artificial Sequence
  Synthetic
cacauuaaauugagaagucuc

SEQ ID NO: 288917 - RNA, 22 nt, Artificial Sequence
  Synthetic
ucacauuaaauugagaagucuc

SEQ ID NO: 288918 - RNA, 23 nt, Artificial Sequence
  Synthetic
gucacauuaaauugagaagucuc

SEQ ID NO: 288919 - RNA, 24 nt, Artificial Sequence
  Synthetic
agucacauuaaauugagaagucuc

SEQ ID NO: 288920 - RNA, 18 nt, Artificial Sequence
  Synthetic
acucauguuugaagucuc

SEQ ID NO: 288921 - RNA, 19 nt, Artificial Sequence
  Synthetic
cacucauguuugaagucuc

SEQ ID NO: 288922 - RNA, 20 nt, Artificial Sequence
  Synthetic
acacucauguuugaagucuc

SEQ ID NO: 288923 - RNA, 21 nt, Artificial Sequence
  Synthetic
gacacucauguuugaagucuc

SEQ ID NO: 288924 - RNA, 22 nt, Artificial Sequence
  Synthetic
agacacucauguuugaagucuc

SEQ ID NO: 288925 - RNA, 23 nt, Artificial Sequence
  Synthetic
gagacacucauguuugaagucuc

SEQ ID NO: 288926 - RNA, 24 nt, Artificial Sequence
  Synthetic
agagacacucauguuugaagucuc

SEQ ID NO: 288927 - RNA, 18 nt, Artificial Sequence
  Synthetic
ugguacugaauaagucuc

SEQ ID NO: 288928 - RNA, 19 nt, Artificial Sequence
  Synthetic
augguacugaauaagucuc

SEQ ID NO: 288929 - RNA, 20 nt, Artificial Sequence
  Synthetic
caugguacugaauaagucuc

SEQ ID NO: 288930 - RNA, 21 nt, Artificial Sequence
  Synthetic
ucaugguacugaauaagucuc

SEQ ID NO: 288931 - RNA, 22 nt, Artificial Sequence
  Synthetic
cucaugguacugaauaagucuc

SEQ ID NO: 288932 - RNA, 23 nt, Artificial Sequence
  Synthetic
ucucaugguacugaauaagucuc

SEQ ID NO: 288933 - RNA, 24 nt, Artificial Sequence
  Synthetic
uucucaugguacugaauaagucuc

SEQ ID NO: 288934 - RNA, 18 nt, Artificial Sequence
  Synthetic
acuacccuucccagucuc

SEQ ID NO: 288935 - RNA, 19 nt, Artificial Sequence
  Synthetic
cacuacccuucccagucuc

SEQ ID NO: 288936 - RNA, 20 nt, Artificial Sequence
  Synthetic
ccacuacccuucccagucuc

SEQ ID NO: 288937 - RNA, 21 nt, Artificial Sequence
  Synthetic
accacuacccuucccagucuc

SEQ ID NO: 288938 - RNA, 22 nt, Artificial Sequence
  Synthetic
uaccacuacccuucccagucuc

SEQ ID NO: 288939 - RNA, 23 nt, Artificial Sequence
  Synthetic
cuaccacuacccuucccagucuc

SEQ ID NO: 288940 - RNA, 24 nt, Artificial Sequence
  Synthetic
ccuaccacuacccuucccagucuc

SEQ ID NO: 288941 - RNA, 18 nt, Artificial Sequence
  Synthetic
cacaauagacauagucuc

SEQ ID NO: 288942 - RNA, 19 nt, Artificial Sequence
  Synthetic
acacaauagacauagucuc

SEQ ID NO: 288943 - RNA, 20 nt, Artificial Sequence
  Synthetic
gacacaauagacauagucuc

SEQ ID NO: 288944 - RNA, 21 nt, Artificial Sequence
  Synthetic
agacacaauagacauagucuc

SEQ ID NO: 288945 - RNA, 22 nt, Artificial Sequence
  Synthetic
cagacacaauagacauagucuc

SEQ ID NO: 288946 - RNA, 23 nt, Artificial Sequence
  Synthetic
ucagacacaauagacauagucuc

SEQ ID NO: 288947 - RNA, 24 nt, Artificial Sequence
  Synthetic
gucagacacaauagacauagucuc

SEQ ID NO: 288948 - RNA, 18 nt, Artificial Sequence
  Synthetic
gcugagagcaguagucuc

SEQ ID NO: 288949 - RNA, 19 nt, Artificial Sequence
  Synthetic
ugcugagagcaguagucuc

SEQ ID NO: 288950 - RNA, 20 nt, Artificial Sequence
  Synthetic
uugcugagagcaguagucuc

SEQ ID NO: 288951 - RNA, 21 nt, Artificial Sequence
  Synthetic
uuugcugagagcaguagucuc

SEQ ID NO: 288952 - RNA, 22 nt, Artificial Sequence
  Synthetic
guuugcugagagcaguagucuc

SEQ ID NO: 288953 - RNA, 23 nt, Artificial Sequence
  Synthetic
gguuugcugagagcaguagucuc

SEQ ID NO: 288954 - RNA, 24 nt, Artificial Sequence
  Synthetic
ugguuugcugagagcaguagucuc

SEQ ID NO: 288955 - RNA, 18 nt, Artificial Sequence
  Synthetic
auacgugcagcccgucuc

SEQ ID NO: 288956 - RNA, 19 nt, Artificial Sequence
  Synthetic
aauacgugcagcccgucuc

SEQ ID NO: 288957 - RNA, 20 nt, Artificial Sequence
  Synthetic
caauacgugcagcccgucuc

SEQ ID NO: 288958 - RNA, 21 nt, Artificial Sequence
  Synthetic
ccaauacgugcagcccgucuc

SEQ ID NO: 288959 - RNA, 22 nt, Artificial Sequence
  Synthetic
accaauacgugcagcccgucuc

SEQ ID NO: 288960 - RNA, 23 nt, Artificial Sequence
  Synthetic
aaccaauacgugcagcccgucuc

SEQ ID NO: 288961 - RNA, 24 nt, Artificial Sequence
  Synthetic
caaccaauacgugcagcccgucuc

SEQ ID NO: 288962 - RNA, 18 nt, Artificial Sequence
  Synthetic
aaaacacaucaucgucuc

SEQ ID NO: 288963 - RNA, 19 nt, Artificial Sequence
  Synthetic
caaaacacaucaucgucuc

SEQ ID NO: 288964 - RNA, 20 nt, Artificial Sequence
  Synthetic
acaaaacacaucaucgucuc

SEQ ID NO: 288965 - RNA, 21 nt, Artificial Sequence
  Synthetic
uacaaaacacaucaucgucuc

SEQ ID NO: 288966 - RNA, 22 nt, Artificial Sequence
  Synthetic
guacaaaacacaucaucgucuc

SEQ ID NO: 288967 - RNA, 23 nt, Artificial Sequence
  Synthetic
cguacaaaacacaucaucgucuc

SEQ ID NO: 288968 - RNA, 24 nt, Artificial Sequence
  Synthetic
gcguacaaaacacaucaucgucuc

SEQ ID NO: 288969 - RNA, 18 nt, Artificial Sequence
  Synthetic
uguuguacaauaggucuc

SEQ ID NO: 288970 - RNA, 19 nt, Artificial Sequence
  Synthetic
auguuguacaauaggucuc

SEQ ID NO: 288971 - RNA, 20 nt, Artificial Sequence
  Synthetic
cauguuguacaauaggucuc

SEQ ID NO: 288972 - RNA, 21 nt, Artificial Sequence
  Synthetic
ccauguuguacaauaggucuc

SEQ ID NO: 288973 - RNA, 22 nt, Artificial Sequence
  Synthetic
uccauguuguacaauaggucuc

SEQ ID NO: 288974 - RNA, 23 nt, Artificial Sequence
  Synthetic
auccauguuguacaauaggucuc

SEQ ID NO: 288975 - RNA, 24 nt, Artificial Sequence
  Synthetic
uauccauguuguacaauaggucuc

SEQ ID NO: 288976 - RNA, 18 nt, Artificial Sequence
  Synthetic
aaccacugcaugggucuc

SEQ ID NO: 288977 - RNA, 19 nt, Artificial Sequence
  Synthetic
gaaccacugcaugggucuc

SEQ ID NO: 288978 - RNA, 20 nt, Artificial Sequence
  Synthetic
agaaccacugcaugggucuc

SEQ ID NO: 288979 - RNA, 21 nt, Artificial Sequence
  Synthetic
cagaaccacugcaugggucuc

SEQ ID NO: 288980 - RNA, 22 nt, Artificial Sequence
  Synthetic
acagaaccacugcaugggucuc

SEQ ID NO: 288981 - RNA, 23 nt, Artificial Sequence
  Synthetic
cacagaaccacugcaugggucuc

SEQ ID NO: 288982 - RNA, 24 nt, Artificial Sequence
  Synthetic
ucacagaaccacugcaugggucuc

SEQ ID NO: 288983 - RNA, 18 nt, Artificial Sequence
  Synthetic
auacacagaccuggucuc

SEQ ID NO: 288984 - RNA, 19 nt, Artificial Sequence
  Synthetic
cauacacagaccuggucuc

SEQ ID NO: 288985 - RNA, 20 nt, Artificial Sequence
  Synthetic
ucauacacagaccuggucuc

SEQ ID NO: 288986 - RNA, 21 nt, Artificial Sequence
  Synthetic
uucauacacagaccuggucuc

SEQ ID NO: 288987 - RNA, 22 nt, Artificial Sequence
  Synthetic
auucauacacagaccuggucuc

SEQ ID NO: 288988 - RNA, 23 nt, Artificial Sequence
  Synthetic
gauucauacacagaccuggucuc

SEQ ID NO: 288989 - RNA, 24 nt, Artificial Sequence
  Synthetic
ugauucauacacagaccuggucuc

SEQ ID NO: 288990 - RNA, 18 nt, Artificial Sequence
  Synthetic
aucuaggcugcuggucuc

SEQ ID NO: 288991 - RNA, 19 nt, Artificial Sequence
  Synthetic
caucuaggcugcuggucuc

SEQ ID NO: 288992 - RNA, 20 nt, Artificial Sequence
  Synthetic
ccaucuaggcugcuggucuc

SEQ ID NO: 288993 - RNA, 21 nt, Artificial Sequence
  Synthetic
uccaucuaggcugcuggucuc

SEQ ID NO: 288994 - RNA, 22 nt, Artificial Sequence
  Synthetic
guccaucuaggcugcuggucuc

SEQ ID NO: 288995 - RNA, 23 nt, Artificial Sequence
  Synthetic
cguccaucuaggcugcuggucuc

SEQ ID NO: 288996 - RNA, 24 nt, Artificial Sequence
  Synthetic
acguccaucuaggcugcuggucuc

SEQ ID NO: 288997 - RNA, 18 nt, Artificial Sequence
  Synthetic
gaauagugagaaugucuc

SEQ ID NO: 288998 - RNA, 19 nt, Artificial Sequence
  Synthetic
agaauagugagaaugucuc

SEQ ID NO: 288999 - RNA, 20 nt, Artificial Sequence
  Synthetic
cagaauagugagaaugucuc

SEQ ID NO: 289000 - RNA, 21 nt, Artificial Sequence
  Synthetic
acagaauagugagaaugucuc

SEQ ID NO: 289001 - RNA, 22 nt, Artificial Sequence
  Synthetic
aacagaauagugagaaugucuc

SEQ ID NO: 289002 - RNA, 23 nt, Artificial Sequence
  Synthetic
aaacagaauagugagaaugucuc

SEQ ID NO: 289003 - RNA, 24 nt, Artificial Sequence
  Synthetic
gaaacagaauagugagaaugucuc

SEQ ID NO: 289004 - RNA, 18 nt, Artificial Sequence
  Synthetic
cagaauaggucaugucuc

SEQ ID NO: 289005 - RNA, 19 nt, Artificial Sequence
  Synthetic
gcagaauaggucaugucuc

SEQ ID NO: 289006 - RNA, 20 nt, Artificial Sequence
  Synthetic
ggcagaauaggucaugucuc

SEQ ID NO: 289007 - RNA, 21 nt, Artificial Sequence
  Synthetic
cggcagaauaggucaugucuc

SEQ ID NO: 289008 - RNA, 22 nt, Artificial Sequence
  Synthetic
ccggcagaauaggucaugucuc

SEQ ID NO: 289009 - RNA, 23 nt, Artificial Sequence
  Synthetic
cccggcagaauaggucaugucuc

SEQ ID NO: 289010 - RNA, 24 nt, Artificial Sequence
  Synthetic
ucccggcagaauaggucaugucuc

SEQ ID NO: 289011 - RNA, 18 nt, Artificial Sequence
  Synthetic
caauggggaagaugucuc

SEQ ID NO: 289012 - RNA, 19 nt, Artificial Sequence
  Synthetic
acaauggggaagaugucuc

SEQ ID NO: 289013 - RNA, 20 nt, Artificial Sequence
  Synthetic
gacaauggggaagaugucuc

SEQ ID NO: 289014 - RNA, 21 nt, Artificial Sequence
  Synthetic
agacaauggggaagaugucuc

SEQ ID NO: 289015 - RNA, 22 nt, Artificial Sequence
  Synthetic
aagacaauggggaagaugucuc

SEQ ID NO: 289016 - RNA, 23 nt, Artificial Sequence
  Synthetic
caagacaauggggaagaugucuc

SEQ ID NO: 289017 - RNA, 24 nt, Artificial Sequence
  Synthetic
ccaagacaauggggaagaugucuc

SEQ ID NO: 289018 - RNA, 18 nt, Artificial Sequence
  Synthetic
agggugagacccugucuc

SEQ ID NO: 289019 - RNA, 19 nt, Artificial Sequence
  Synthetic
cagggugagacccugucuc

SEQ ID NO: 289020 - RNA, 20 nt, Artificial Sequence
  Synthetic
gcagggugagacccugucuc

SEQ ID NO: 289021 - RNA, 21 nt, Artificial Sequence
  Synthetic
agcagggugagacccugucuc

SEQ ID NO: 289022 - RNA, 22 nt, Artificial Sequence
  Synthetic
cagcagggugagacccugucuc

SEQ ID NO: 289023 - RNA, 23 nt, Artificial Sequence
  Synthetic
gcagcagggugagacccugucuc

SEQ ID NO: 289024 - RNA, 24 nt, Artificial Sequence
  Synthetic
ggcagcagggugagacccugucuc

SEQ ID NO: 289025 - RNA, 18 nt, Artificial Sequence
  Synthetic
cuugcuaaugccugucuc

SEQ ID NO: 289026 - RNA, 19 nt, Artificial Sequence
  Synthetic
ucuugcuaaugccugucuc

SEQ ID NO: 289027 - RNA, 20 nt, Artificial Sequence
  Synthetic
cucuugcuaaugccugucuc

SEQ ID NO: 289028 - RNA, 21 nt, Artificial Sequence
  Synthetic
ccucuugcuaaugccugucuc

SEQ ID NO: 289029 - RNA, 22 nt, Artificial Sequence
  Synthetic
accucuugcuaaugccugucuc

SEQ ID NO: 289030 - RNA, 23 nt, Artificial Sequence
  Synthetic
aaccucuugcuaaugccugucuc

SEQ ID NO: 289031 - RNA, 24 nt, Artificial Sequence
  Synthetic
gaaccucuugcuaaugccugucuc

SEQ ID NO: 289032 - RNA, 18 nt, Artificial Sequence
  Synthetic
aggaguagauucugucuc

SEQ ID NO: 289033 - RNA, 19 nt, Artificial Sequence
  Synthetic
caggaguagauucugucuc

SEQ ID NO: 289034 - RNA, 20 nt, Artificial Sequence
  Synthetic
ccaggaguagauucugucuc

SEQ ID NO: 289035 - RNA, 21 nt, Artificial Sequence
  Synthetic
accaggaguagauucugucuc

SEQ ID NO: 289036 - RNA, 22 nt, Artificial Sequence
  Synthetic
caccaggaguagauucugucuc

SEQ ID NO: 289037 - RNA, 23 nt, Artificial Sequence
  Synthetic
ucaccaggaguagauucugucuc

SEQ ID NO: 289038 - RNA, 24 nt, Artificial Sequence
  Synthetic
uucaccaggaguagauucugucuc

SEQ ID NO: 289039 - RNA, 18 nt, Artificial Sequence
  Synthetic
uuaagauugacgugucuc

SEQ ID NO: 289040 - RNA, 19 nt, Artificial Sequence
  Synthetic
uuuaagauugacgugucuc

SEQ ID NO: 289041 - RNA, 20 nt, Artificial Sequence
  Synthetic
cuuuaagauugacgugucuc

SEQ ID NO: 289042 - RNA, 21 nt, Artificial Sequence
  Synthetic
ccuuuaagauugacgugucuc

SEQ ID NO: 289043 - RNA, 22 nt, Artificial Sequence
  Synthetic
uccuuuaagauugacgugucuc

SEQ ID NO: 289044 - RNA, 23 nt, Artificial Sequence
  Synthetic
auccuuuaagauugacgugucuc

SEQ ID NO: 289045 - RNA, 24 nt, Artificial Sequence
  Synthetic
cauccuuuaagauugacgugucuc

SEQ ID NO: 289046 - RNA, 18 nt, Artificial Sequence
  Synthetic
uguguguacaggugucuc

SEQ ID NO: 289047 - RNA, 19 nt, Artificial Sequence
  Synthetic
cuguguguacaggugucuc

SEQ ID NO: 289048 - RNA, 20 nt, Artificial Sequence
  Synthetic
acuguguguacaggugucuc

SEQ ID NO: 289049 - RNA, 21 nt, Artificial Sequence
  Synthetic
cacuguguguacaggugucuc

SEQ ID NO: 289050 - RNA, 22 nt, Artificial Sequence
  Synthetic
ccacuguguguacaggugucuc

SEQ ID NO: 289051 - RNA, 23 nt, Artificial Sequence
  Synthetic
uccacuguguguacaggugucuc

SEQ ID NO: 289052 - RNA, 24 nt, Artificial Sequence
  Synthetic
auccacuguguguacaggugucuc

SEQ ID NO: 289053 - RNA, 18 nt, Artificial Sequence
  Synthetic
guaguuuuauuuugucuc

SEQ ID NO: 289054 - RNA, 19 nt, Artificial Sequence
  Synthetic
cguaguuuuauuuugucuc

SEQ ID NO: 289055 - RNA, 20 nt, Artificial Sequence
  Synthetic
ucguaguuuuauuuugucuc

SEQ ID NO: 289056 - RNA, 21 nt, Artificial Sequence
  Synthetic
aucguaguuuuauuuugucuc

SEQ ID NO: 289057 - RNA, 22 nt, Artificial Sequence
  Synthetic
aaucguaguuuuauuuugucuc

SEQ ID NO: 289058 - RNA, 23 nt, Artificial Sequence
  Synthetic
aaaucguaguuuuauuuugucuc

SEQ ID NO: 289059 - RNA, 24 nt, Artificial Sequence
  Synthetic
aaaaucguaguuuuauuuugucuc

SEQ ID NO: 289060 - RNA, 18 nt, Artificial Sequence
  Synthetic
aaauauuacuaaauucuc

SEQ ID NO: 289061 - RNA, 19 nt, Artificial Sequence
  Synthetic
uaaauauuacuaaauucuc

SEQ ID NO: 289062 - RNA, 20 nt, Artificial Sequence
  Synthetic
cuaaauauuacuaaauucuc

SEQ ID NO: 289063 - RNA, 21 nt, Artificial Sequence
  Synthetic
ucuaaauauuacuaaauucuc

SEQ ID NO: 289064 - RNA, 22 nt, Artificial Sequence
  Synthetic
aucuaaauauuacuaaauucuc

SEQ ID NO: 289065 - RNA, 23 nt, Artificial Sequence
  Synthetic
gaucuaaauauuacuaaauucuc

SEQ ID NO: 289066 - RNA, 24 nt, Artificial Sequence
  Synthetic
ggaucuaaauauuacuaaauucuc

SEQ ID NO: 289067 - RNA, 18 nt, Artificial Sequence
  Synthetic
cugaccccuccaauucuc

SEQ ID NO: 289068 - RNA, 19 nt, Artificial Sequence
  Synthetic
ucugaccccuccaauucuc

SEQ ID NO: 289069 - RNA, 20 nt, Artificial Sequence
  Synthetic
uucugaccccuccaauucuc

SEQ ID NO: 289070 - RNA, 21 nt, Artificial Sequence
  Synthetic
cuucugaccccuccaauucuc

SEQ ID NO: 289071 - RNA, 22 nt, Artificial Sequence
  Synthetic
ucuucugaccccuccaauucuc

SEQ ID NO: 289072 - RNA, 23 nt, Artificial Sequence
  Synthetic
gucuucugaccccuccaauucuc

SEQ ID NO: 289073 - RNA, 24 nt, Artificial Sequence
  Synthetic
ugucuucugaccccuccaauucuc

SEQ ID NO: 289074 - RNA, 18 nt, Artificial Sequence
  Synthetic
caacugugacccauucuc

SEQ ID NO: 289075 - RNA, 19 nt, Artificial Sequence
  Synthetic
ucaacugugacccauucuc

SEQ ID NO: 289076 - RNA, 20 nt, Artificial Sequence
  Synthetic
uucaacugugacccauucuc

SEQ ID NO: 289077 - RNA, 21 nt, Artificial Sequence
  Synthetic
guucaacugugacccauucuc

SEQ ID NO: 289078 - RNA, 22 nt, Artificial Sequence
  Synthetic
cguucaacugugacccauucuc

SEQ ID NO: 289079 - RNA, 23 nt, Artificial Sequence
  Synthetic
acguucaacugugacccauucuc

SEQ ID NO: 289080 - RNA, 24 nt, Artificial Sequence
  Synthetic
uacguucaacugugacccauucuc

SEQ ID NO: 289081 - RNA, 18 nt, Artificial Sequence
  Synthetic
cuaggccuucccauucuc

SEQ ID NO: 289082 - RNA, 19 nt, Artificial Sequence
  Synthetic
ucuaggccuucccauucuc

SEQ ID NO: 289083 - RNA, 20 nt, Artificial Sequence
  Synthetic
uucuaggccuucccauucuc

SEQ ID NO: 289084 - RNA, 21 nt, Artificial Sequence
  Synthetic
uuucuaggccuucccauucuc

SEQ ID NO: 289085 - RNA, 22 nt, Artificial Sequence
  Synthetic
auuucuaggccuucccauucuc

SEQ ID NO: 289086 - RNA, 23 nt, Artificial Sequence
  Synthetic
uauuucuaggccuucccauucuc

SEQ ID NO: 289087 - RNA, 24 nt, Artificial Sequence
  Synthetic
guauuucuaggccuucccauucuc

SEQ ID NO: 289088 - RNA, 18 nt, Artificial Sequence
  Synthetic
uuuuuuaacuccauucuc

SEQ ID NO: 289089 - RNA, 19 nt, Artificial Sequence
  Synthetic
auuuuuuaacuccauucuc

SEQ ID NO: 289090 - RNA, 20 nt, Artificial Sequence
  Synthetic
uauuuuuuaacuccauucuc

SEQ ID NO: 289091 - RNA, 21 nt, Artificial Sequence
  Synthetic
uuauuuuuuaacuccauucuc

SEQ ID NO: 289092 - RNA, 22 nt, Artificial Sequence
  Synthetic
uuuauuuuuuaacuccauucuc

SEQ ID NO: 289093 - RNA, 23 nt, Artificial Sequence
  Synthetic
uuuuauuuuuuaacuccauucuc

SEQ ID NO: 289094 - RNA, 24 nt, Artificial Sequence
  Synthetic
uuuuuauuuuuuaacuccauucuc

SEQ ID NO: 289095 - RNA, 18 nt, Artificial Sequence
  Synthetic
augaaggucuucauucuc

SEQ ID NO: 289096 - RNA, 19 nt, Artificial Sequence
  Synthetic
caugaaggucuucauucuc

SEQ ID NO: 289097 - RNA, 20 nt, Artificial Sequence
  Synthetic
ccaugaaggucuucauucuc

SEQ ID NO: 289098 - RNA, 21 nt, Artificial Sequence
  Synthetic
accaugaaggucuucauucuc

SEQ ID NO: 289099 - RNA, 22 nt, Artificial Sequence
  Synthetic
gaccaugaaggucuucauucuc

SEQ ID NO: 289100 - RNA, 23 nt, Artificial Sequence
  Synthetic
ugaccaugaaggucuucauucuc

SEQ ID NO: 289101 - RNA, 24 nt, Artificial Sequence
  Synthetic
augaccaugaaggucuucauucuc

SEQ ID NO: 289102 - RNA, 18 nt, Artificial Sequence
  Synthetic
auauaucauuucauucuc

SEQ ID NO: 289103 - RNA, 19 nt, Artificial Sequence
  Synthetic
cauauaucauuucauucuc

SEQ ID NO: 289104 - RNA, 20 nt, Artificial Sequence
  Synthetic
acauauaucauuucauucuc

SEQ ID NO: 289105 - RNA, 21 nt, Artificial Sequence
  Synthetic
uacauauaucauuucauucuc

SEQ ID NO: 289106 - RNA, 22 nt, Artificial Sequence
  Synthetic
uuacauauaucauuucauucuc

SEQ ID NO: 289107 - RNA, 23 nt, Artificial Sequence
  Synthetic
cuuacauauaucauuucauucuc

SEQ ID NO: 289108 - RNA, 24 nt, Artificial Sequence
  Synthetic
ccuuacauauaucauuucauucuc

SEQ ID NO: 289109 - RNA, 18 nt, Artificial Sequence
  Synthetic
cccucccuuuucauucuc

SEQ ID NO: 289110 - RNA, 19 nt, Artificial Sequence
  Synthetic
gcccucccuuuucauucuc

SEQ ID NO: 289111 - RNA, 20 nt, Artificial Sequence
  Synthetic
ugcccucccuuuucauucuc

SEQ ID NO: 289112 - RNA, 21 nt, Artificial Sequence
  Synthetic
augcccucccuuuucauucuc

SEQ ID NO: 289113 - RNA, 22 nt, Artificial Sequence
  Synthetic
caugcccucccuuuucauucuc

SEQ ID NO: 289114 - RNA, 23 nt, Artificial Sequence
  Synthetic
ucaugcccucccuuuucauucuc

SEQ ID NO: 289115 - RNA, 24 nt, Artificial Sequence
  Synthetic
uucaugcccucccuuuucauucuc

SEQ ID NO: 289116 - RNA, 18 nt, Artificial Sequence
  Synthetic
ugaaccacagugauucuc

SEQ ID NO: 289117 - RNA, 19 nt, Artificial Sequence
  Synthetic
uugaaccacagugauucuc

SEQ ID NO: 289118 - RNA, 20 nt, Artificial Sequence
  Synthetic
cuugaaccacagugauucuc

SEQ ID NO: 289119 - RNA, 21 nt, Artificial Sequence
  Synthetic
ccuugaaccacagugauucuc

SEQ ID NO: 289120 - RNA, 22 nt, Artificial Sequence
  Synthetic
accuugaaccacagugauucuc

SEQ ID NO: 289121 - RNA, 23 nt, Artificial Sequence
  Synthetic
aaccuugaaccacagugauucuc

SEQ ID NO: 289122 - RNA, 24 nt, Artificial Sequence
  Synthetic
caaccuugaaccacagugauucuc

SEQ ID NO: 289123 - RNA, 18 nt, Artificial Sequence
  Synthetic
gaauucucugugauucuc

SEQ ID NO: 289124 - RNA, 19 nt, Artificial Sequence
  Synthetic
ggaauucucugugauucuc

SEQ ID NO: 289125 - RNA, 20 nt, Artificial Sequence
  Synthetic
gggaauucucugugauucuc

SEQ ID NO: 289126 - RNA, 21 nt, Artificial Sequence
  Synthetic
ggggaauucucugugauucuc

SEQ ID NO: 289127 - RNA, 22 nt, Artificial Sequence
  Synthetic
aggggaauucucugugauucuc

SEQ ID NO: 289128 - RNA, 23 nt, Artificial Sequence
  Synthetic
aaggggaauucucugugauucuc

SEQ ID NO: 289129 - RNA, 24 nt, Artificial Sequence
  Synthetic
caaggggaauucucugugauucuc

SEQ ID NO: 289130 - RNA, 18 nt, Artificial Sequence
  Synthetic
auugcaagugauauucuc

SEQ ID NO: 289131 - RNA, 19 nt, Artificial Sequence
  Synthetic
aauugcaagugauauucuc

SEQ ID NO: 289132 - RNA, 20 nt, Artificial Sequence
  Synthetic
caauugcaagugauauucuc

SEQ ID NO: 289133 - RNA, 21 nt, Artificial Sequence
  Synthetic
acaauugcaagugauauucuc

SEQ ID NO: 289134 - RNA, 22 nt, Artificial Sequence
  Synthetic
cacaauugcaagugauauucuc

SEQ ID NO: 289135 - RNA, 23 nt, Artificial Sequence
  Synthetic
ucacaauugcaagugauauucuc

SEQ ID NO: 289136 - RNA, 24 nt, Artificial Sequence
  Synthetic
uucacaauugcaagugauauucuc

SEQ ID NO: 289137 - RNA, 18 nt, Artificial Sequence
  Synthetic
ccaaaauucauuauucuc

SEQ ID NO: 289138 - RNA, 19 nt, Artificial Sequence
  Synthetic
accaaaauucauuauucuc

SEQ ID NO: 289139 - RNA, 20 nt, Artificial Sequence
  Synthetic
uaccaaaauucauuauucuc

SEQ ID NO: 289140 - RNA, 21 nt, Artificial Sequence
  Synthetic
uuaccaaaauucauuauucuc

SEQ ID NO: 289141 - RNA, 22 nt, Artificial Sequence
  Synthetic
auuaccaaaauucauuauucuc

SEQ ID NO: 289142 - RNA, 23 nt, Artificial Sequence
  Synthetic
cauuaccaaaauucauuauucuc

SEQ ID NO: 289143 - RNA, 24 nt, Artificial Sequence
  Synthetic
ccauuaccaaaauucauuauucuc

SEQ ID NO: 289144 - RNA, 18 nt, Artificial Sequence
  Synthetic
ugcaaauauauuauucuc

SEQ ID NO: 289145 - RNA, 19 nt, Artificial Sequence
  Synthetic
uugcaaauauauuauucuc

SEQ ID NO: 289146 - RNA, 20 nt, Artificial Sequence
  Synthetic
uuugcaaauauauuauucuc

SEQ ID NO: 289147 - RNA, 21 nt, Artificial Sequence
  Synthetic
cuuugcaaauauauuauucuc

SEQ ID NO: 289148 - RNA, 22 nt, Artificial Sequence
  Synthetic
ccuuugcaaauauauuauucuc

SEQ ID NO: 289149 - RNA, 23 nt, Artificial Sequence
  Synthetic
accuuugcaaauauauuauucuc

SEQ ID NO: 289150 - RNA, 24 nt, Artificial Sequence
  Synthetic
caccuuugcaaauauauuauucuc

SEQ ID NO: 289151 - RNA, 18 nt, Artificial Sequence
  Synthetic
gauuauaaauuuauucuc

SEQ ID NO: 289152 - RNA, 19 nt, Artificial Sequence
  Synthetic
agauuauaaauuuauucuc

SEQ ID NO: 289153 - RNA, 20 nt, Artificial Sequence
  Synthetic
uagauuauaaauuuauucuc

SEQ ID NO: 289154 - RNA, 21 nt, Artificial Sequence
  Synthetic
guagauuauaaauuuauucuc

SEQ ID NO: 289155 - RNA, 22 nt, Artificial Sequence
  Synthetic
aguagauuauaaauuuauucuc

SEQ ID NO: 289156 - RNA, 23 nt, Artificial Sequence
  Synthetic
caguagauuauaaauuuauucuc

SEQ ID NO: 289157 - RNA, 24 nt, Artificial Sequence
  Synthetic
gcaguagauuauaaauuuauucuc

SEQ ID NO: 289158 - RNA, 18 nt, Artificial Sequence
  Synthetic
ccuaggcauuuuauucuc

SEQ ID NO: 289159 - RNA, 19 nt, Artificial Sequence
  Synthetic
uccuaggcauuuuauucuc

SEQ ID NO: 289160 - RNA, 20 nt, Artificial Sequence
  Synthetic
uuccuaggcauuuuauucuc

SEQ ID NO: 289161 - RNA, 21 nt, Artificial Sequence
  Synthetic
auuccuaggcauuuuauucuc

SEQ ID NO: 289162 - RNA, 22 nt, Artificial Sequence
  Synthetic
gauuccuaggcauuuuauucuc

SEQ ID NO: 289163 - RNA, 23 nt, Artificial Sequence
  Synthetic
ggauuccuaggcauuuuauucuc

SEQ ID NO: 289164 - RNA, 24 nt, Artificial Sequence
  Synthetic
uggauuccuaggcauuuuauucuc

SEQ ID NO: 289165 - RNA, 18 nt, Artificial Sequence
  Synthetic
gcuuaaguuaaacuucuc

SEQ ID NO: 289166 - RNA, 19 nt, Artificial Sequence
  Synthetic
ggcuuaaguuaaacuucuc

SEQ ID NO: 289167 - RNA, 20 nt, Artificial Sequence
  Synthetic
gggcuuaaguuaaacuucuc

SEQ ID NO: 289168 - RNA, 21 nt, Artificial Sequence
  Synthetic
agggcuuaaguuaaacuucuc

SEQ ID NO: 289169 - RNA, 22 nt, Artificial Sequence
  Synthetic
aagggcuuaaguuaaacuucuc

SEQ ID NO: 289170 - RNA, 23 nt, Artificial Sequence
  Synthetic
gaagggcuuaaguuaaacuucuc

SEQ ID NO: 289171 - RNA, 24 nt, Artificial Sequence
  Synthetic
ggaagggcuuaaguuaaacuucuc

SEQ ID NO: 289172 - RNA, 18 nt, Artificial Sequence
  Synthetic
caccacuaccaacuucuc

SEQ ID NO: 289173 - RNA, 19 nt, Artificial Sequence
  Synthetic
gcaccacuaccaacuucuc

SEQ ID NO: 289174 - RNA, 20 nt, Artificial Sequence
  Synthetic
ggcaccacuaccaacuucuc

SEQ ID NO: 289175 - RNA, 21 nt, Artificial Sequence
  Synthetic
uggcaccacuaccaacuucuc

SEQ ID NO: 289176 - RNA, 22 nt, Artificial Sequence
  Synthetic
auggcaccacuaccaacuucuc

SEQ ID NO: 289177 - RNA, 23 nt, Artificial Sequence
  Synthetic
cauggcaccacuaccaacuucuc

SEQ ID NO: 289178 - RNA, 24 nt, Artificial Sequence
  Synthetic
gcauggcaccacuaccaacuucuc

SEQ ID NO: 289179 - RNA, 18 nt, Artificial Sequence
  Synthetic
ugucuuucguaacuucuc

SEQ ID NO: 289180 - RNA, 19 nt, Artificial Sequence
  Synthetic
uugucuuucguaacuucuc

SEQ ID NO: 289181 - RNA, 20 nt, Artificial Sequence
  Synthetic
uuugucuuucguaacuucuc

SEQ ID NO: 289182 - RNA, 21 nt, Artificial Sequence
  Synthetic
auuugucuuucguaacuucuc

SEQ ID NO: 289183 - RNA, 22 nt, Artificial Sequence
  Synthetic
uauuugucuuucguaacuucuc

SEQ ID NO: 289184 - RNA, 23 nt, Artificial Sequence
  Synthetic
auauuugucuuucguaacuucuc

SEQ ID NO: 289185 - RNA, 24 nt, Artificial Sequence
  Synthetic
cauauuugucuuucguaacuucuc

SEQ ID NO: 289186 - RNA, 18 nt, Artificial Sequence
  Synthetic
aucuucagaagacuucuc

SEQ ID NO: 289187 - RNA, 19 nt, Artificial Sequence
  Synthetic
caucuucagaagacuucuc

SEQ ID NO: 289188 - RNA, 20 nt, Artificial Sequence
  Synthetic
ucaucuucagaagacuucuc

SEQ ID NO: 289189 - RNA, 21 nt, Artificial Sequence
  Synthetic
uucaucuucagaagacuucuc

SEQ ID NO: 289190 - RNA, 22 nt, Artificial Sequence
  Synthetic
uuucaucuucagaagacuucuc

SEQ ID NO: 289191 - RNA, 23 nt, Artificial Sequence
  Synthetic
uuuucaucuucagaagacuucuc

SEQ ID NO: 289192 - RNA, 24 nt, Artificial Sequence
  Synthetic
auuuucaucuucagaagacuucuc

SEQ ID NO: 289193 - RNA, 18 nt, Artificial Sequence
  Synthetic
accuaacuuauacuucuc

SEQ ID NO: 289194 - RNA, 19 nt, Artificial Sequence
  Synthetic
uaccuaacuuauacuucuc

SEQ ID NO: 289195 - RNA, 20 nt, Artificial Sequence
  Synthetic
uuaccuaacuuauacuucuc

SEQ ID NO: 289196 - RNA, 21 nt, Artificial Sequence
  Synthetic
cuuaccuaacuuauacuucuc

SEQ ID NO: 289197 - RNA, 22 nt, Artificial Sequence
  Synthetic
acuuaccuaacuuauacuucuc

SEQ ID NO: 289198 - RNA, 23 nt, Artificial Sequence
  Synthetic
aacuuaccuaacuuauacuucuc

SEQ ID NO: 289199 - RNA, 24 nt, Artificial Sequence
  Synthetic
aaacuuaccuaacuuauacuucuc

SEQ ID NO: 289200 - RNA, 18 nt, Artificial Sequence
  Synthetic
gcuuauuguuuacuucuc

SEQ ID NO: 289201 - RNA, 19 nt, Artificial Sequence
  Synthetic
agcuuauuguuuacuucuc

SEQ ID NO: 289202 - RNA, 20 nt, Artificial Sequence
  Synthetic
aagcuuauuguuuacuucuc

SEQ ID NO: 289203 - RNA, 21 nt, Artificial Sequence
  Synthetic
aaagcuuauuguuuacuucuc

SEQ ID NO: 289204 - RNA, 22 nt, Artificial Sequence
  Synthetic
aaaagcuuauuguuuacuucuc

SEQ ID NO: 289205 - RNA, 23 nt, Artificial Sequence
  Synthetic
aaaaagcuuauuguuuacuucuc

SEQ ID NO: 289206 - RNA, 24 nt, Artificial Sequence
  Synthetic
uaaaaagcuuauuguuuacuucuc

SEQ ID NO: 289207 - RNA, 18 nt, Artificial Sequence
  Synthetic
caauacacgcaccuucuc

SEQ ID NO: 289208 - RNA, 19 nt, Artificial Sequence
  Synthetic
ucaauacacgcaccuucuc

SEQ ID NO: 289209 - RNA, 20 nt, Artificial Sequence
  Synthetic
uucaauacacgcaccuucuc

SEQ ID NO: 289210 - RNA, 21 nt, Artificial Sequence
  Synthetic
guucaauacacgcaccuucuc

SEQ ID NO: 289211 - RNA, 22 nt, Artificial Sequence
  Synthetic
uguucaauacacgcaccuucuc

SEQ ID NO: 289212 - RNA, 23 nt, Artificial Sequence
  Synthetic
auguucaauacacgcaccuucuc

SEQ ID NO: 289213 - RNA, 24 nt, Artificial Sequence
  Synthetic
aauguucaauacacgcaccuucuc

SEQ ID NO: 289214 - RNA, 18 nt, Artificial Sequence
  Synthetic
uccuuucucauccuucuc

SEQ ID NO: 289215 - RNA, 19 nt, Artificial Sequence
  Synthetic
uuccuuucucauccuucuc

SEQ ID NO: 289216 - RNA, 20 nt, Artificial Sequence
  Synthetic
auuccuuucucauccuucuc

SEQ ID NO: 289217 - RNA, 21 nt, Artificial Sequence
  Synthetic
uauuccuuucucauccuucuc

SEQ ID NO: 289218 - RNA, 22 nt, Artificial Sequence
  Synthetic
guauuccuuucucauccuucuc

SEQ ID NO: 289219 - RNA, 23 nt, Artificial Sequence
  Synthetic
uguauuccuuucucauccuucuc

SEQ ID NO: 289220 - RNA, 24 nt, Artificial Sequence
  Synthetic
auguauuccuuucucauccuucuc

SEQ ID NO: 289221 - RNA, 18 nt, Artificial Sequence
  Synthetic
aagcagccauuccuucuc

SEQ ID NO: 289222 - RNA, 19 nt, Artificial Sequence
  Synthetic
caagcagccauuccuucuc

SEQ ID NO: 289223 - RNA, 20 nt, Artificial Sequence
  Synthetic
ccaagcagccauuccuucuc

SEQ ID NO: 289224 - RNA, 21 nt, Artificial Sequence
  Synthetic
uccaagcagccauuccuucuc

SEQ ID NO: 289225 - RNA, 22 nt, Artificial Sequence
  Synthetic
guccaagcagccauuccuucuc

SEQ ID NO: 289226 - RNA, 23 nt, Artificial Sequence
  Synthetic
gguccaagcagccauuccuucuc

SEQ ID NO: 289227 - RNA, 24 nt, Artificial Sequence
  Synthetic
ggguccaagcagccauuccuucuc

SEQ ID NO: 289228 - RNA, 18 nt, Artificial Sequence
  Synthetic
ugagaaaguuuccuucuc

SEQ ID NO: 289229 - RNA, 19 nt, Artificial Sequence
  Synthetic
cugagaaaguuuccuucuc

SEQ ID NO: 289230 - RNA, 20 nt, Artificial Sequence
  Synthetic
ccugagaaaguuuccuucuc

SEQ ID NO: 289231 - RNA, 21 nt, Artificial Sequence
  Synthetic
accugagaaaguuuccuucuc

SEQ ID NO: 289232 - RNA, 22 nt, Artificial Sequence
  Synthetic
gaccugagaaaguuuccuucuc

SEQ ID NO: 289233 - RNA, 23 nt, Artificial Sequence
  Synthetic
agaccugagaaaguuuccuucuc

SEQ ID NO: 289234 - RNA, 24 nt, Artificial Sequence
  Synthetic
cagaccugagaaaguuuccuucuc

SEQ ID NO: 289235 - RNA, 18 nt, Artificial Sequence
  Synthetic
aauagcuaacagcuucuc

SEQ ID NO: 289236 - RNA, 19 nt, Artificial Sequence
  Synthetic
gaauagcuaacagcuucuc

SEQ ID NO: 289237 - RNA, 20 nt, Artificial Sequence
  Synthetic
ugaauagcuaacagcuucuc

SEQ ID NO: 289238 - RNA, 21 nt, Artificial Sequence
  Synthetic
augaauagcuaacagcuucuc

SEQ ID NO: 289239 - RNA, 22 nt, Artificial Sequence
  Synthetic
uaugaauagcuaacagcuucuc

SEQ ID NO: 289240 - RNA, 23 nt, Artificial Sequence
  Synthetic
auaugaauagcuaacagcuucuc

SEQ ID NO: 289241 - RNA, 24 nt, Artificial Sequence
  Synthetic
gauaugaauagcuaacagcuucuc

SEQ ID NO: 289242 - RNA, 18 nt, Artificial Sequence
  Synthetic
ugugauuacuagcuucuc

SEQ ID NO: 289243 - RNA, 19 nt, Artificial Sequence
  Synthetic
augugauuacuagcuucuc

SEQ ID NO: 289244 - RNA, 20 nt, Artificial Sequence
  Synthetic
uaugugauuacuagcuucuc

SEQ ID NO: 289245 - RNA, 21 nt, Artificial Sequence
  Synthetic
cuaugugauuacuagcuucuc

SEQ ID NO: 289246 - RNA, 22 nt, Artificial Sequence
  Synthetic
ucuaugugauuacuagcuucuc

SEQ ID NO: 289247 - RNA, 23 nt, Artificial Sequence
  Synthetic
uucuaugugauuacuagcuucuc

SEQ ID NO: 289248 - RNA, 24 nt, Artificial Sequence
  Synthetic
auucuaugugauuacuagcuucuc

SEQ ID NO: 289249 - RNA, 18 nt, Artificial Sequence
  Synthetic
ggauuggcauggcuucuc

SEQ ID NO: 289250 - RNA, 19 nt, Artificial Sequence
  Synthetic
uggauuggcauggcuucuc

SEQ ID NO: 289251 - RNA, 20 nt, Artificial Sequence
  Synthetic
guggauuggcauggcuucuc

SEQ ID NO: 289252 - RNA, 21 nt, Artificial Sequence
  Synthetic
gguggauuggcauggcuucuc

SEQ ID NO: 289253 - RNA, 22 nt, Artificial Sequence
  Synthetic
ggguggauuggcauggcuucuc

SEQ ID NO: 289254 - RNA, 23 nt, Artificial Sequence
  Synthetic
uggguggauuggcauggcuucuc

SEQ ID NO: 289255 - RNA, 24 nt, Artificial Sequence
  Synthetic
uuggguggauuggcauggcuucuc

SEQ ID NO: 289256 - RNA, 18 nt, Artificial Sequence
  Synthetic
uuccuccauuaucuucuc

SEQ ID NO: 289257 - RNA, 19 nt, Artificial Sequence
  Synthetic
cuuccuccauuaucuucuc

SEQ ID NO: 289258 - RNA, 20 nt, Artificial Sequence
  Synthetic
ucuuccuccauuaucuucuc

SEQ ID NO: 289259 - RNA, 21 nt, Artificial Sequence
  Synthetic
gucuuccuccauuaucuucuc

SEQ ID NO: 289260 - RNA, 22 nt, Artificial Sequence
  Synthetic
ggucuuccuccauuaucuucuc

SEQ ID NO: 289261 - RNA, 23 nt, Artificial Sequence
  Synthetic
gggucuuccuccauuaucuucuc

SEQ ID NO: 289262 - RNA, 24 nt, Artificial Sequence
  Synthetic
ugggucuuccuccauuaucuucuc

SEQ ID NO: 289263 - RNA, 18 nt, Artificial Sequence
  Synthetic
auuagaugugcucuucuc

SEQ ID NO: 289264 - RNA, 19 nt, Artificial Sequence
  Synthetic
aauuagaugugcucuucuc

SEQ ID NO: 289265 - RNA, 20 nt, Artificial Sequence
  Synthetic
uaauuagaugugcucuucuc

SEQ ID NO: 289266 - RNA, 21 nt, Artificial Sequence
  Synthetic
uuaauuagaugugcucuucuc

SEQ ID NO: 289267 - RNA, 22 nt, Artificial Sequence
  Synthetic
uuuaauuagaugugcucuucuc

SEQ ID NO: 289268 - RNA, 23 nt, Artificial Sequence
  Synthetic
cuuuaauuagaugugcucuucuc

SEQ ID NO: 289269 - RNA, 24 nt, Artificial Sequence
  Synthetic
acuuuaauuagaugugcucuucuc

SEQ ID NO: 289270 - RNA, 18 nt, Artificial Sequence
  Synthetic
cuuggaguugcucuucuc

SEQ ID NO: 289271 - RNA, 19 nt, Artificial Sequence
  Synthetic
ucuuggaguugcucuucuc

SEQ ID NO: 289272 - RNA, 20 nt, Artificial Sequence
  Synthetic
gucuuggaguugcucuucuc

SEQ ID NO: 289273 - RNA, 21 nt, Artificial Sequence
  Synthetic
ugucuuggaguugcucuucuc

SEQ ID NO: 289274 - RNA, 22 nt, Artificial Sequence
  Synthetic
gugucuuggaguugcucuucuc

SEQ ID NO: 289275 - RNA, 23 nt, Artificial Sequence
  Synthetic
ugugucuuggaguugcucuucuc

SEQ ID NO: 289276 - RNA, 24 nt, Artificial Sequence
  Synthetic
augugucuuggaguugcucuucuc

SEQ ID NO: 289277 - RNA, 18 nt, Artificial Sequence
  Synthetic
cuuccaugauuucuucuc

SEQ ID NO: 289278 - RNA, 19 nt, Artificial Sequence
  Synthetic
gcuuccaugauuucuucuc

SEQ ID NO: 289279 - RNA, 20 nt, Artificial Sequence
  Synthetic
ugcuuccaugauuucuucuc

SEQ ID NO: 289280 - RNA, 21 nt, Artificial Sequence
  Synthetic
uugcuuccaugauuucuucuc

SEQ ID NO: 289281 - RNA, 22 nt, Artificial Sequence
  Synthetic
uuugcuuccaugauuucuucuc

SEQ ID NO: 289282 - RNA, 23 nt, Artificial Sequence
  Synthetic
uuuugcuuccaugauuucuucuc

SEQ ID NO: 289283 - RNA, 24 nt, Artificial Sequence
  Synthetic
uuuuugcuuccaugauuucuucuc

SEQ ID NO: 289284 - RNA, 18 nt, Artificial Sequence
  Synthetic
ccuuacgguuuucuucuc

SEQ ID NO: 289285 - RNA, 19 nt, Artificial Sequence
  Synthetic
cccuuacgguuuucuucuc

SEQ ID NO: 289286 - RNA, 20 nt, Artificial Sequence
  Synthetic
acccuuacgguuuucuucuc

SEQ ID NO: 289287 - RNA, 21 nt, Artificial Sequence
  Synthetic
aacccuuacgguuuucuucuc

SEQ ID NO: 289288 - RNA, 22 nt, Artificial Sequence
  Synthetic
gaacccuuacgguuuucuucuc

SEQ ID NO: 289289 - RNA, 23 nt, Artificial Sequence
  Synthetic
ugaacccuuacgguuuucuucuc

SEQ ID NO: 289290 - RNA, 24 nt, Artificial Sequence
  Synthetic
augaacccuuacgguuuucuucuc

SEQ ID NO: 289291 - RNA, 18 nt, Artificial Sequence
  Synthetic
uuuccgaaaaaaguucuc

SEQ ID NO: 289292 - RNA, 19 nt, Artificial Sequence
  Synthetic
cuuuccgaaaaaaguucuc

SEQ ID NO: 289293 - RNA, 20 nt, Artificial Sequence
  Synthetic
acuuuccgaaaaaaguucuc

SEQ ID NO: 289294 - RNA, 21 nt, Artificial Sequence
  Synthetic
uacuuuccgaaaaaaguucuc

SEQ ID NO: 289295 - RNA, 22 nt, Artificial Sequence
  Synthetic
guacuuuccgaaaaaaguucuc

SEQ ID NO: 289296 - RNA, 23 nt, Artificial Sequence
  Synthetic
uguacuuuccgaaaaaaguucuc

SEQ ID NO: 289297 - RNA, 24 nt, Artificial Sequence
  Synthetic
auguacuuuccgaaaaaaguucuc

SEQ ID NO: 289298 - RNA, 18 nt, Artificial Sequence
  Synthetic
caucucuaacaaguucuc

SEQ ID NO: 289299 - RNA, 19 nt, Artificial Sequence
  Synthetic
gcaucucuaacaaguucuc

SEQ ID NO: 289300 - RNA, 20 nt, Artificial Sequence
  Synthetic
ugcaucucuaacaaguucuc

SEQ ID NO: 289301 - RNA, 21 nt, Artificial Sequence
  Synthetic
uugcaucucuaacaaguucuc

SEQ ID NO: 289302 - RNA, 22 nt, Artificial Sequence
  Synthetic
uuugcaucucuaacaaguucuc

SEQ ID NO: 289303 - RNA, 23 nt, Artificial Sequence
  Synthetic
auuugcaucucuaacaaguucuc

SEQ ID NO: 289304 - RNA, 24 nt, Artificial Sequence
  Synthetic
aauuugcaucucuaacaaguucuc

SEQ ID NO: 289305 - RNA, 18 nt, Artificial Sequence
  Synthetic
ugauuacucacaguucuc

SEQ ID NO: 289306 - RNA, 19 nt, Artificial Sequence
  Synthetic
uugauuacucacaguucuc

SEQ ID NO: 289307 - RNA, 20 nt, Artificial Sequence
  Synthetic
uuugauuacucacaguucuc

SEQ ID NO: 289308 - RNA, 21 nt, Artificial Sequence
  Synthetic
guuugauuacucacaguucuc

SEQ ID NO: 289309 - RNA, 22 nt, Artificial Sequence
  Synthetic
aguuugauuacucacaguucuc

SEQ ID NO: 289310 - RNA, 23 nt, Artificial Sequence
  Synthetic
aaguuugauuacucacaguucuc

SEQ ID NO: 289311 - RNA, 24 nt, Artificial Sequence
  Synthetic
gaaguuugauuacucacaguucuc

SEQ ID NO: 289312 - RNA, 18 nt, Artificial Sequence
  Synthetic
gauagugaaugaguucuc

SEQ ID NO: 289313 - RNA, 19 nt, Artificial Sequence
  Synthetic
ugauagugaaugaguucuc

SEQ ID NO: 289314 - RNA, 20 nt, Artificial Sequence
  Synthetic
gugauagugaaugaguucuc

SEQ ID NO: 289315 - RNA, 21 nt, Artificial Sequence
  Synthetic
cgugauagugaaugaguucuc

SEQ ID NO: 289316 - RNA, 22 nt, Artificial Sequence
  Synthetic
ucgugauagugaaugaguucuc

SEQ ID NO: 289317 - RNA, 23 nt, Artificial Sequence
  Synthetic
gucgugauagugaaugaguucuc

SEQ ID NO: 289318 - RNA, 24 nt, Artificial Sequence
  Synthetic
ugucgugauagugaaugaguucuc

SEQ ID NO: 289319 - RNA, 18 nt, Artificial Sequence
  Synthetic
aguaucagaaagguucuc

SEQ ID NO: 289320 - RNA, 19 nt, Artificial Sequence
  Synthetic
uaguaucagaaagguucuc

SEQ ID NO: 289321 - RNA, 20 nt, Artificial Sequence
  Synthetic
guaguaucagaaagguucuc

SEQ ID NO: 289322 - RNA, 21 nt, Artificial Sequence
  Synthetic
gguaguaucagaaagguucuc

SEQ ID NO: 289323 - RNA, 22 nt, Artificial Sequence
  Synthetic
ugguaguaucagaaagguucuc

SEQ ID NO: 289324 - RNA, 23 nt, Artificial Sequence
  Synthetic
uugguaguaucagaaagguucuc

SEQ ID NO: 289325 - RNA, 24 nt, Artificial Sequence
  Synthetic
auugguaguaucagaaagguucuc

SEQ ID NO: 289326 - RNA, 18 nt, Artificial Sequence
  Synthetic
guuacagguuggguucuc

SEQ ID NO: 289327 - RNA, 19 nt, Artificial Sequence
  Synthetic
uguuacagguuggguucuc

SEQ ID NO: 289328 - RNA, 20 nt, Artificial Sequence
  Synthetic
guguuacagguuggguucuc

SEQ ID NO: 289329 - RNA, 21 nt, Artificial Sequence
  Synthetic
gguguuacagguuggguucuc

SEQ ID NO: 289330 - RNA, 22 nt, Artificial Sequence
  Synthetic
agguguuacagguuggguucuc

SEQ ID NO: 289331 - RNA, 23 nt, Artificial Sequence
  Synthetic
uagguguuacagguuggguucuc

SEQ ID NO: 289332 - RNA, 24 nt, Artificial Sequence
  Synthetic
guagguguuacagguuggguucuc

SEQ ID NO: 289333 - RNA, 18 nt, Artificial Sequence
  Synthetic
gaaaauaucaguguucuc

SEQ ID NO: 289334 - RNA, 19 nt, Artificial Sequence
  Synthetic
ugaaaauaucaguguucuc

SEQ ID NO: 289335 - RNA, 20 nt, Artificial Sequence
  Synthetic
uugaaaauaucaguguucuc

SEQ ID NO: 289336 - RNA, 21 nt, Artificial Sequence
  Synthetic
cuugaaaauaucaguguucuc

SEQ ID NO: 289337 - RNA, 22 nt, Artificial Sequence
  Synthetic
ucuugaaaauaucaguguucuc

SEQ ID NO: 289338 - RNA, 23 nt, Artificial Sequence
  Synthetic
cucuugaaaauaucaguguucuc

SEQ ID NO: 289339 - RNA, 24 nt, Artificial Sequence
  Synthetic
ccucuugaaaauaucaguguucuc

SEQ ID NO: 289340 - RNA, 18 nt, Artificial Sequence
  Synthetic
gauauggggaguguucuc

SEQ ID NO: 289341 - RNA, 19 nt, Artificial Sequence
  Synthetic
ggauauggggaguguucuc

SEQ ID NO: 289342 - RNA, 20 nt, Artificial Sequence
  Synthetic
gggauauggggaguguucuc

SEQ ID NO: 289343 - RNA, 21 nt, Artificial Sequence
  Synthetic
cgggauauggggaguguucuc

SEQ ID NO: 289344 - RNA, 22 nt, Artificial Sequence
  Synthetic
acgggauauggggaguguucuc

SEQ ID NO: 289345 - RNA, 23 nt, Artificial Sequence
  Synthetic
aacgggauauggggaguguucuc

SEQ ID NO: 289346 - RNA, 24 nt, Artificial Sequence
  Synthetic
caacgggauauggggaguguucuc

SEQ ID NO: 289347 - RNA, 18 nt, Artificial Sequence
  Synthetic
uuuauuuaucuuguucuc

SEQ ID NO: 289348 - RNA, 19 nt, Artificial Sequence
  Synthetic
uuuuauuuaucuuguucuc

SEQ ID NO: 289349 - RNA, 20 nt, Artificial Sequence
  Synthetic
uuuuuauuuaucuuguucuc

SEQ ID NO: 289350 - RNA, 21 nt, Artificial Sequence
  Synthetic
cuuuuuauuuaucuuguucuc

SEQ ID NO: 289351 - RNA, 22 nt, Artificial Sequence
  Synthetic
acuuuuuauuuaucuuguucuc

SEQ ID NO: 289352 - RNA, 23 nt, Artificial Sequence
  Synthetic
uacuuuuuauuuaucuuguucuc

SEQ ID NO: 289353 - RNA, 24 nt, Artificial Sequence
  Synthetic
auacuuuuuauuuaucuuguucuc

SEQ ID NO: 289354 - RNA, 18 nt, Artificial Sequence
  Synthetic
gcaucaugaaaauuucuc

SEQ ID NO: 289355 - RNA, 19 nt, Artificial Sequence
  Synthetic
ggcaucaugaaaauuucuc

SEQ ID NO: 289356 - RNA, 20 nt, Artificial Sequence
  Synthetic
aggcaucaugaaaauuucuc

SEQ ID NO: 289357 - RNA, 21 nt, Artificial Sequence
  Synthetic
aaggcaucaugaaaauuucuc

SEQ ID NO: 289358 - RNA, 22 nt, Artificial Sequence
  Synthetic
aaaggcaucaugaaaauuucuc

SEQ ID NO: 289359 - RNA, 23 nt, Artificial Sequence
  Synthetic
uaaaggcaucaugaaaauuucuc

SEQ ID NO: 289360 - RNA, 24 nt, Artificial Sequence
  Synthetic
uuaaaggcaucaugaaaauuucuc

SEQ ID NO: 289361 - RNA, 18 nt, Artificial Sequence
  Synthetic
uaaagaagguaauuucuc

SEQ ID NO: 289362 - RNA, 19 nt, Artificial Sequence
  Synthetic
uuaaagaagguaauuucuc

SEQ ID NO: 289363 - RNA, 20 nt, Artificial Sequence
  Synthetic
auuaaagaagguaauuucuc

SEQ ID NO: 289364 - RNA, 21 nt, Artificial Sequence
  Synthetic
aauuaaagaagguaauuucuc

SEQ ID NO: 289365 - RNA, 22 nt, Artificial Sequence
  Synthetic
aaauuaaagaagguaauuucuc

SEQ ID NO: 289366 - RNA, 23 nt, Artificial Sequence
  Synthetic
gaaauuaaagaagguaauuucuc

SEQ ID NO: 289367 - RNA, 24 nt, Artificial Sequence
  Synthetic
ugaaauuaaagaagguaauuucuc

SEQ ID NO: 289368 - RNA, 18 nt, Artificial Sequence
  Synthetic
cugggagucccauuucuc

SEQ ID NO: 289369 - RNA, 19 nt, Artificial Sequence
  Synthetic
acugggagucccauuucuc

SEQ ID NO: 289370 - RNA, 20 nt, Artificial Sequence
  Synthetic
cacugggagucccauuucuc

SEQ ID NO: 289371 - RNA, 21 nt, Artificial Sequence
  Synthetic
ucacugggagucccauuucuc

SEQ ID NO: 289372 - RNA, 22 nt, Artificial Sequence
  Synthetic
gucacugggagucccauuucuc

SEQ ID NO: 289373 - RNA, 23 nt, Artificial Sequence
  Synthetic
ugucacugggagucccauuucuc

SEQ ID NO: 289374 - RNA, 24 nt, Artificial Sequence
  Synthetic
gugucacugggagucccauuucuc

SEQ ID NO: 289375 - RNA, 18 nt, Artificial Sequence
  Synthetic
ggaauauuucuauuucuc

SEQ ID NO: 289376 - RNA, 19 nt, Artificial Sequence
  Synthetic
uggaauauuucuauuucuc

SEQ ID NO: 289377 - RNA, 20 nt, Artificial Sequence
  Synthetic
uuggaauauuucuauuucuc

SEQ ID NO: 289378 - RNA, 21 nt, Artificial Sequence
  Synthetic
uuuggaauauuucuauuucuc

SEQ ID NO: 289379 - RNA, 22 nt, Artificial Sequence
  Synthetic
uuuuggaauauuucuauuucuc

SEQ ID NO: 289380 - RNA, 23 nt, Artificial Sequence
  Synthetic
auuuuggaauauuucuauuucuc

SEQ ID NO: 289381 - RNA, 24 nt, Artificial Sequence
  Synthetic
uauuuuggaauauuucuauuucuc

SEQ ID NO: 289382 - RNA, 18 nt, Artificial Sequence
  Synthetic
aguauaauaaacuuucuc

SEQ ID NO: 289383 - RNA, 19 nt, Artificial Sequence
  Synthetic
caguauaauaaacuuucuc

SEQ ID NO: 289384 - RNA, 20 nt, Artificial Sequence
  Synthetic
ucaguauaauaaacuuucuc

SEQ ID NO: 289385 - RNA, 21 nt, Artificial Sequence
  Synthetic
uucaguauaauaaacuuucuc

SEQ ID NO: 289386 - RNA, 22 nt, Artificial Sequence
  Synthetic
uuucaguauaauaaacuuucuc

SEQ ID NO: 289387 - RNA, 23 nt, Artificial Sequence
  Synthetic
uuuucaguauaauaaacuuucuc

SEQ ID NO: 289388 - RNA, 24 nt, Artificial Sequence
  Synthetic
auuuucaguauaauaaacuuucuc

SEQ ID NO: 289389 - RNA, 18 nt, Artificial Sequence
  Synthetic
uuuacuaguuacuuucuc

SEQ ID NO: 289390 - RNA, 19 nt, Artificial Sequence
  Synthetic
auuuacuaguuacuuucuc

SEQ ID NO: 289391 - RNA, 20 nt, Artificial Sequence
  Synthetic
uauuuacuaguuacuuucuc

SEQ ID NO: 289392 - RNA, 21 nt, Artificial Sequence
  Synthetic
uuauuuacuaguuacuuucuc

SEQ ID NO: 289393 - RNA, 22 nt, Artificial Sequence
  Synthetic
guuauuuacuaguuacuuucuc

SEQ ID NO: 289394 - RNA, 23 nt, Artificial Sequence
  Synthetic
aguuauuuacuaguuacuuucuc

SEQ ID NO: 289395 - RNA, 24 nt, Artificial Sequence
  Synthetic
aaguuauuuacuaguuacuuucuc

SEQ ID NO: 289396 - RNA, 18 nt, Artificial Sequence
  Synthetic
gucucuccauucuuucuc

SEQ ID NO: 289397 - RNA, 19 nt, Artificial Sequence
  Synthetic
ugucucuccauucuuucuc

SEQ ID NO: 289398 - RNA, 20 nt, Artificial Sequence
  Synthetic
cugucucuccauucuuucuc

SEQ ID NO: 289399 - RNA, 21 nt, Artificial Sequence
  Synthetic
ccugucucuccauucuuucuc

SEQ ID NO: 289400 - RNA, 22 nt, Artificial Sequence
  Synthetic
uccugucucuccauucuuucuc

SEQ ID NO: 289401 - RNA, 23 nt, Artificial Sequence
  Synthetic
cuccugucucuccauucuuucuc

SEQ ID NO: 289402 - RNA, 24 nt, Artificial Sequence
  Synthetic
ccuccugucucuccauucuuucuc

SEQ ID NO: 289403 - RNA, 18 nt, Artificial Sequence
  Synthetic
gaagccuauuucuuucuc

SEQ ID NO: 289404 - RNA, 19 nt, Artificial Sequence
  Synthetic
agaagccuauuucuuucuc

SEQ ID NO: 289405 - RNA, 20 nt, Artificial Sequence
  Synthetic
gagaagccuauuucuuucuc

SEQ ID NO: 289406 - RNA, 21 nt, Artificial Sequence
  Synthetic
agagaagccuauuucuuucuc

SEQ ID NO: 289407 - RNA, 22 nt, Artificial Sequence
  Synthetic
aagagaagccuauuucuuucuc

SEQ ID NO: 289408 - RNA, 23 nt, Artificial Sequence
  Synthetic
aaagagaagccuauuucuuucuc

SEQ ID NO: 289409 - RNA, 24 nt, Artificial Sequence
  Synthetic
aaaagagaagccuauuucuuucuc

SEQ ID NO: 289410 - RNA, 18 nt, Artificial Sequence
  Synthetic
uggugugggaaguuucuc

SEQ ID NO: 289411 - RNA, 19 nt, Artificial Sequence
  Synthetic
auggugugggaaguuucuc

SEQ ID NO: 289412 - RNA, 20 nt, Artificial Sequence
  Synthetic
cauggugugggaaguuucuc

SEQ ID NO: 289413 - RNA, 21 nt, Artificial Sequence
  Synthetic
ccauggugugggaaguuucuc

SEQ ID NO: 289414 - RNA, 22 nt, Artificial Sequence
  Synthetic
uccauggugugggaaguuucuc

SEQ ID NO: 289415 - RNA, 23 nt, Artificial Sequence
  Synthetic
cuccauggugugggaaguuucuc

SEQ ID NO: 289416 - RNA, 24 nt, Artificial Sequence
  Synthetic
ucuccauggugugggaaguuucuc

SEQ ID NO: 289417 - RNA, 18 nt, Artificial Sequence
  Synthetic
uacauccugauguuucuc

SEQ ID NO: 289418 - RNA, 19 nt, Artificial Sequence
  Synthetic
uuacauccugauguuucuc

SEQ ID NO: 289419 - RNA, 20 nt, Artificial Sequence
  Synthetic
cuuacauccugauguuucuc

SEQ ID NO: 289420 - RNA, 21 nt, Artificial Sequence
  Synthetic
ccuuacauccugauguuucuc

SEQ ID NO: 289421 - RNA, 22 nt, Artificial Sequence
  Synthetic
cccuuacauccugauguuucuc

SEQ ID NO: 289422 - RNA, 23 nt, Artificial Sequence
  Synthetic
ccccuuacauccugauguuucuc

SEQ ID NO: 289423 - RNA, 24 nt, Artificial Sequence
  Synthetic
gccccuuacauccugauguuucuc

SEQ ID NO: 289424 - RNA, 18 nt, Artificial Sequence
  Synthetic
aauuaacucuuguuucuc

SEQ ID NO: 289425 - RNA, 19 nt, Artificial Sequence
  Synthetic
aaauuaacucuuguuucuc

SEQ ID NO: 289426 - RNA, 20 nt, Artificial Sequence
  Synthetic
caaauuaacucuuguuucuc

SEQ ID NO: 289427 - RNA, 21 nt, Artificial Sequence
  Synthetic
ucaaauuaacucuuguuucuc

SEQ ID NO: 289428 - RNA, 22 nt, Artificial Sequence
  Synthetic
cucaaauuaacucuuguuucuc

SEQ ID NO: 289429 - RNA, 23 nt, Artificial Sequence
  Synthetic
ccucaaauuaacucuuguuucuc

SEQ ID NO: 289430 - RNA, 24 nt, Artificial Sequence
  Synthetic
uccucaaauuaacucuuguuucuc

SEQ ID NO: 289431 - RNA, 18 nt, Artificial Sequence
  Synthetic
auucagccaaauuuucuc

SEQ ID NO: 289432 - RNA, 19 nt, Artificial Sequence
  Synthetic
aauucagccaaauuuucuc

SEQ ID NO: 289433 - RNA, 20 nt, Artificial Sequence
  Synthetic
aaauucagccaaauuuucuc

SEQ ID NO: 289434 - RNA, 21 nt, Artificial Sequence
  Synthetic
aaaauucagccaaauuuucuc

SEQ ID NO: 289435 - RNA, 22 nt, Artificial Sequence
  Synthetic
uaaaauucagccaaauuuucuc

SEQ ID NO: 289436 - RNA, 23 nt, Artificial Sequence
  Synthetic
guaaaauucagccaaauuuucuc

SEQ ID NO: 289437 - RNA, 24 nt, Artificial Sequence
  Synthetic
uguaaaauucagccaaauuuucuc

SEQ ID NO: 289438 - RNA, 18 nt, Artificial Sequence
  Synthetic
uucuugagccauuuucuc

SEQ ID NO: 289439 - RNA, 19 nt, Artificial Sequence
  Synthetic
uuucuugagccauuuucuc

SEQ ID NO: 289440 - RNA, 20 nt, Artificial Sequence
  Synthetic
cuuucuugagccauuuucuc

SEQ ID NO: 289441 - RNA, 21 nt, Artificial Sequence
  Synthetic
gcuuucuugagccauuuucuc

SEQ ID NO: 289442 - RNA, 22 nt, Artificial Sequence
  Synthetic
ggcuuucuugagccauuuucuc

SEQ ID NO: 289443 - RNA, 23 nt, Artificial Sequence
  Synthetic
aggcuuucuugagccauuuucuc

SEQ ID NO: 289444 - RNA, 24 nt, Artificial Sequence
  Synthetic
caggcuuucuugagccauuuucuc

SEQ ID NO: 289445 - RNA, 18 nt, Artificial Sequence
  Synthetic
gcaugagucuauuuucuc

SEQ ID NO: 289446 - RNA, 19 nt, Artificial Sequence
  Synthetic
ugcaugagucuauuuucuc

SEQ ID NO: 289447 - RNA, 20 nt, Artificial Sequence
  Synthetic
augcaugagucuauuuucuc

SEQ ID NO: 289448 - RNA, 21 nt, Artificial Sequence
  Synthetic
uaugcaugagucuauuuucuc

SEQ ID NO: 289449 - RNA, 22 nt, Artificial Sequence
  Synthetic
auaugcaugagucuauuuucuc

SEQ ID NO: 289450 - RNA, 23 nt, Artificial Sequence
  Synthetic
aauaugcaugagucuauuuucuc

SEQ ID NO: 289451 - RNA, 24 nt, Artificial Sequence
  Synthetic
uaauaugcaugagucuauuuucuc

SEQ ID NO: 289452 - RNA, 18 nt, Artificial Sequence
  Synthetic
guuuucccaucuuuucuc

SEQ ID NO: 289453 - RNA, 19 nt, Artificial Sequence
  Synthetic
cguuuucccaucuuuucuc

SEQ ID NO: 289454 - RNA, 20 nt, Artificial Sequence
  Synthetic
ccguuuucccaucuuuucuc

SEQ ID NO: 289455 - RNA, 21 nt, Artificial Sequence
  Synthetic
gccguuuucccaucuuuucuc

SEQ ID NO: 289456 - RNA, 22 nt, Artificial Sequence
  Synthetic
ugccguuuucccaucuuuucuc

SEQ ID NO: 289457 - RNA, 23 nt, Artificial Sequence
  Synthetic
augccguuuucccaucuuuucuc

SEQ ID NO: 289458 - RNA, 24 nt, Artificial Sequence
  Synthetic
uaugccguuuucccaucuuuucuc

SEQ ID NO: 289459 - RNA, 18 nt, Artificial Sequence
  Synthetic
uuugccaugaguuuucuc

SEQ ID NO: 289460 - RNA, 19 nt, Artificial Sequence
  Synthetic
cuuugccaugaguuuucuc

SEQ ID NO: 289461 - RNA, 20 nt, Artificial Sequence
  Synthetic
acuuugccaugaguuuucuc

SEQ ID NO: 289462 - RNA, 21 nt, Artificial Sequence
  Synthetic
cacuuugccaugaguuuucuc

SEQ ID NO: 289463 - RNA, 22 nt, Artificial Sequence
  Synthetic
gcacuuugccaugaguuuucuc

SEQ ID NO: 289464 - RNA, 23 nt, Artificial Sequence
  Synthetic
ugcacuuugccaugaguuuucuc

SEQ ID NO: 289465 - RNA, 24 nt, Artificial Sequence
  Synthetic
cugcacuuugccaugaguuuucuc

SEQ ID NO: 289466 - RNA, 18 nt, Artificial Sequence
  Synthetic
uuaccaaaagguuuucuc

SEQ ID NO: 289467 - RNA, 19 nt, Artificial Sequence
  Synthetic
auuaccaaaagguuuucuc

SEQ ID NO: 289468 - RNA, 20 nt, Artificial Sequence
  Synthetic
aauuaccaaaagguuuucuc

SEQ ID NO: 289469 - RNA, 21 nt, Artificial Sequence
  Synthetic
aaauuaccaaaagguuuucuc

SEQ ID NO: 289470 - RNA, 22 nt, Artificial Sequence
  Synthetic
uaaauuaccaaaagguuuucuc

SEQ ID NO: 289471 - RNA, 23 nt, Artificial Sequence
  Synthetic
uuaaauuaccaaaagguuuucuc

SEQ ID NO: 289472 - RNA, 24 nt, Artificial Sequence
  Synthetic
uuuaaauuaccaaaagguuuucuc

SEQ ID NO: 289473 - RNA, 18 nt, Artificial Sequence
  Synthetic
cucuacccacuuuuucuc

SEQ ID NO: 289474 - RNA, 19 nt, Artificial Sequence
  Synthetic
acucuacccacuuuuucuc

SEQ ID NO: 289475 - RNA, 20 nt, Artificial Sequence
  Synthetic
uacucuacccacuuuuucuc

SEQ ID NO: 289476 - RNA, 21 nt, Artificial Sequence
  Synthetic
uuacucuacccacuuuuucuc

SEQ ID NO: 289477 - RNA, 22 nt, Artificial Sequence
  Synthetic
guuacucuacccacuuuuucuc

SEQ ID NO: 289478 - RNA, 23 nt, Artificial Sequence
  Synthetic
uguuacucuacccacuuuuucuc

SEQ ID NO: 289479 - RNA, 24 nt, Artificial Sequence
  Synthetic
guguuacucuacccacuuuuucuc

SEQ ID NO: 289480 - RNA, 18 nt, Artificial Sequence
  Synthetic
ucugguuggcuuuuucuc

SEQ ID NO: 289481 - RNA, 19 nt, Artificial Sequence
  Synthetic
aucugguuggcuuuuucuc

SEQ ID NO: 289482 - RNA, 20 nt, Artificial Sequence
  Synthetic
gaucugguuggcuuuuucuc

SEQ ID NO: 289483 - RNA, 21 nt, Artificial Sequence
  Synthetic
agaucugguuggcuuuuucuc

SEQ ID NO: 289484 - RNA, 22 nt, Artificial Sequence
  Synthetic
uagaucugguuggcuuuuucuc

SEQ ID NO: 289485 - RNA, 23 nt, Artificial Sequence
  Synthetic
uuagaucugguuggcuuuuucuc

SEQ ID NO: 289486 - RNA, 24 nt, Artificial Sequence
  Synthetic
cuuagaucugguuggcuuuuucuc

SEQ ID NO: 289487 - RNA, 18 nt, Artificial Sequence
  Synthetic
uaagcaaugcuuuuucuc

SEQ ID NO: 289488 - RNA, 19 nt, Artificial Sequence
  Synthetic
auaagcaaugcuuuuucuc

SEQ ID NO: 289489 - RNA, 20 nt, Artificial Sequence
  Synthetic
uauaagcaaugcuuuuucuc

SEQ ID NO: 289490 - RNA, 21 nt, Artificial Sequence
  Synthetic
uuauaagcaaugcuuuuucuc

SEQ ID NO: 289491 - RNA, 22 nt, Artificial Sequence
  Synthetic
uuuauaagcaaugcuuuuucuc

SEQ ID NO: 289492 - RNA, 23 nt, Artificial Sequence
  Synthetic
guuuauaagcaaugcuuuuucuc

SEQ ID NO: 289493 - RNA, 24 nt, Artificial Sequence
  Synthetic
aguuuauaagcaaugcuuuuucuc

SEQ ID NO: 289494 - RNA, 18 nt, Artificial Sequence
  Synthetic
acaacugaaaaaaaaguc

SEQ ID NO: 289495 - RNA, 19 nt, Artificial Sequence
  Synthetic
uacaacugaaaaaaaaguc

SEQ ID NO: 289496 - RNA, 20 nt, Artificial Sequence
  Synthetic
uuacaacugaaaaaaaaguc

SEQ ID NO: 289497 - RNA, 21 nt, Artificial Sequence
  Synthetic
uuuacaacugaaaaaaaaguc

SEQ ID NO: 289498 - RNA, 22 nt, Artificial Sequence
  Synthetic
cuuuacaacugaaaaaaaaguc

SEQ ID NO: 289499 - RNA, 23 nt, Artificial Sequence
  Synthetic
gcuuuacaacugaaaaaaaaguc

SEQ ID NO: 289500 - RNA, 24 nt, Artificial Sequence
  Synthetic
ugcuuuacaacugaaaaaaaaguc

SEQ ID NO: 289501 - RNA, 18 nt, Artificial Sequence
  Synthetic
ggcaaucauuaaaaaguc

SEQ ID NO: 289502 - RNA, 19 nt, Artificial Sequence
  Synthetic
uggcaaucauuaaaaaguc

SEQ ID NO: 289503 - RNA, 20 nt, Artificial Sequence
  Synthetic
auggcaaucauuaaaaaguc

SEQ ID NO: 289504 - RNA, 21 nt, Artificial Sequence
  Synthetic
aauggcaaucauuaaaaaguc

SEQ ID NO: 289505 - RNA, 22 nt, Artificial Sequence
  Synthetic
gaauggcaaucauuaaaaaguc

SEQ ID NO: 289506 - RNA, 23 nt, Artificial Sequence
  Synthetic
agaauggcaaucauuaaaaaguc

SEQ ID NO: 289507 - RNA, 24 nt, Artificial Sequence
  Synthetic
uagaauggcaaucauuaaaaaguc

SEQ ID NO: 289508 - RNA, 18 nt, Artificial Sequence
  Synthetic
ggcgaucauuaaaaaguc

SEQ ID NO: 289509 - RNA, 19 nt, Artificial Sequence
  Synthetic
aggcgaucauuaaaaaguc

SEQ ID NO: 289510 - RNA, 20 nt, Artificial Sequence
  Synthetic
aaggcgaucauuaaaaaguc

SEQ ID NO: 289511 - RNA, 21 nt, Artificial Sequence
  Synthetic
aaaggcgaucauuaaaaaguc

SEQ ID NO: 289512 - RNA, 22 nt, Artificial Sequence
  Synthetic
gaaaggcgaucauuaaaaaguc

SEQ ID NO: 289513 - RNA, 23 nt, Artificial Sequence
  Synthetic
agaaaggcgaucauuaaaaaguc

SEQ ID NO: 289514 - RNA, 24 nt, Artificial Sequence
  Synthetic
uagaaaggcgaucauuaaaaaguc

SEQ ID NO: 289515 - RNA, 19 nt, Artificial Sequence
  Synthetic
uggcgaucauuaaaaaguc

SEQ ID NO: 289516 - RNA, 20 nt, Artificial Sequence
  Synthetic
auggcgaucauuaaaaaguc

SEQ ID NO: 289517 - RNA, 22 nt, Artificial Sequence
  Synthetic
caauggcgaucauuaaaaaguc

SEQ ID NO: 289518 - RNA, 23 nt, Artificial Sequence
  Synthetic
acaauggcgaucauuaaaaaguc

SEQ ID NO: 289519 - RNA, 24 nt, Artificial Sequence
  Synthetic
uacaauggcgaucauuaaaaaguc

SEQ ID NO: 289520 - RNA, 18 nt, Artificial Sequence
  Synthetic
ggcauagugacaaaaguc

SEQ ID NO: 289521 - RNA, 19 nt, Artificial Sequence
  Synthetic
aggcauagugacaaaaguc

SEQ ID NO: 289522 - RNA, 20 nt, Artificial Sequence
  Synthetic
aaggcauagugacaaaaguc

SEQ ID NO: 289523 - RNA, 21 nt, Artificial Sequence
  Synthetic
aaaggcauagugacaaaaguc

SEQ ID NO: 289524 - RNA, 22 nt, Artificial Sequence
  Synthetic
caaaggcauagugacaaaaguc

SEQ ID NO: 289525 - RNA, 23 nt, Artificial Sequence
  Synthetic
acaaaggcauagugacaaaaguc

SEQ ID NO: 289526 - RNA, 24 nt, Artificial Sequence
  Synthetic
aacaaaggcauagugacaaaaguc

SEQ ID NO: 289527 - RNA, 18 nt, Artificial Sequence
  Synthetic
ggcaaucauucaaaaguc

SEQ ID NO: 289528 - RNA, 19 nt, Artificial Sequence
  Synthetic
uggcaaucauucaaaaguc

SEQ ID NO: 289529 - RNA, 20 nt, Artificial Sequence
  Synthetic
auggcaaucauucaaaaguc

SEQ ID NO: 289530 - RNA, 21 nt, Artificial Sequence
  Synthetic
aauggcaaucauucaaaaguc

SEQ ID NO: 289531 - RNA, 22 nt, Artificial Sequence
  Synthetic
gaauggcaaucauucaaaaguc

SEQ ID NO: 289532 - RNA, 23 nt, Artificial Sequence
  Synthetic
agaauggcaaucauucaaaaguc

SEQ ID NO: 289533 - RNA, 24 nt, Artificial Sequence
  Synthetic
uagaauggcaaucauucaaaaguc

SEQ ID NO: 289534 - RNA, 18 nt, Artificial Sequence
  Synthetic
uuuacuccaggaaaaguc

SEQ ID NO: 289535 - RNA, 19 nt, Artificial Sequence
  Synthetic
uuuuacuccaggaaaaguc

SEQ ID NO: 289536 - RNA, 20 nt, Artificial Sequence
  Synthetic
cuuuuacuccaggaaaaguc

SEQ ID NO: 289537 - RNA, 21 nt, Artificial Sequence
  Synthetic
gcuuuuacuccaggaaaaguc

SEQ ID NO: 289538 - RNA, 22 nt, Artificial Sequence
  Synthetic
ggcuuuuacuccaggaaaaguc

SEQ ID NO: 289539 - RNA, 23 nt, Artificial Sequence
  Synthetic
gggcuuuuacuccaggaaaaguc

SEQ ID NO: 289540 - RNA, 24 nt, Artificial Sequence
  Synthetic
ugggcuuuuacuccaggaaaaguc

SEQ ID NO: 289541 - RNA, 18 nt, Artificial Sequence
  Synthetic
ggcaaucauuuaaaaguc

SEQ ID NO: 289542 - RNA, 19 nt, Artificial Sequence
  Synthetic
uggcaaucauuuaaaaguc

SEQ ID NO: 289543 - RNA, 20 nt, Artificial Sequence
  Synthetic
auggcaaucauuuaaaaguc

SEQ ID NO: 289544 - RNA, 21 nt, Artificial Sequence
  Synthetic
aauggcaaucauuuaaaaguc

SEQ ID NO: 289545 - RNA, 22 nt, Artificial Sequence
  Synthetic
gaauggcaaucauuuaaaaguc

SEQ ID NO: 289546 - RNA, 23 nt, Artificial Sequence
  Synthetic
agaauggcaaucauuuaaaaguc

SEQ ID NO: 289547 - RNA, 24 nt, Artificial Sequence
  Synthetic
uagaauggcaaucauuuaaaaguc

SEQ ID NO: 289548 - RNA, 18 nt, Artificial Sequence
  Synthetic
auuugaaaaaacaaaguc

SEQ ID NO: 289549 - RNA, 19 nt, Artificial Sequence
  Synthetic
gauuugaaaaaacaaaguc

SEQ ID NO: 289550 - RNA, 20 nt, Artificial Sequence
  Synthetic
agauuugaaaaaacaaaguc

SEQ ID NO: 289551 - RNA, 21 nt, Artificial Sequence
  Synthetic
aagauuugaaaaaacaaaguc

SEQ ID NO: 289552 - RNA, 22 nt, Artificial Sequence
  Synthetic
gaagauuugaaaaaacaaaguc

SEQ ID NO: 289553 - RNA, 23 nt, Artificial Sequence
  Synthetic
cgaagauuugaaaaaacaaaguc

SEQ ID NO: 289554 - RNA, 24 nt, Artificial Sequence
  Synthetic
acgaagauuugaaaaaacaaaguc

SEQ ID NO: 289555 - RNA, 18 nt, Artificial Sequence
  Synthetic
agucacaugaacaaaguc

SEQ ID NO: 289556 - RNA, 19 nt, Artificial Sequence
  Synthetic
gagucacaugaacaaaguc

SEQ ID NO: 289557 - RNA, 20 nt, Artificial Sequence
  Synthetic
ggagucacaugaacaaaguc

SEQ ID NO: 289558 - RNA, 21 nt, Artificial Sequence
  Synthetic
gggagucacaugaacaaaguc

SEQ ID NO: 289559 - RNA, 22 nt, Artificial Sequence
  Synthetic
agggagucacaugaacaaaguc

SEQ ID NO: 289560 - RNA, 23 nt, Artificial Sequence
  Synthetic
uagggagucacaugaacaaaguc

SEQ ID NO: 289561 - RNA, 24 nt, Artificial Sequence
  Synthetic
guagggagucacaugaacaaaguc

SEQ ID NO: 289562 - RNA, 18 nt, Artificial Sequence
  Synthetic
ugggcggaucacaaaguc

SEQ ID NO: 289563 - RNA, 19 nt, Artificial Sequence
  Synthetic
gugggcggaucacaaaguc

SEQ ID NO: 289564 - RNA, 20 nt, Artificial Sequence
  Synthetic
ggugggcggaucacaaaguc

SEQ ID NO: 289565 - RNA, 21 nt, Artificial Sequence
  Synthetic
aggugggcggaucacaaaguc

SEQ ID NO: 289566 - RNA, 22 nt, Artificial Sequence
  Synthetic
aaggugggcggaucacaaaguc

SEQ ID NO: 289567 - RNA, 23 nt, Artificial Sequence
  Synthetic
caaggugggcggaucacaaaguc

SEQ ID NO: 289568 - RNA, 24 nt, Artificial Sequence
  Synthetic
ccaaggugggcggaucacaaaguc

SEQ ID NO: 289569 - RNA, 18 nt, Artificial Sequence
  Synthetic
guggccaagcccaaaguc

SEQ ID NO: 289570 - RNA, 19 nt, Artificial Sequence
  Synthetic
uguggccaagcccaaaguc

SEQ ID NO: 289571 - RNA, 20 nt, Artificial Sequence
  Synthetic
uuguggccaagcccaaaguc

SEQ ID NO: 289572 - RNA, 21 nt, Artificial Sequence
  Synthetic
cuuguggccaagcccaaaguc

SEQ ID NO: 289573 - RNA, 22 nt, Artificial Sequence
  Synthetic
ucuuguggccaagcccaaaguc

SEQ ID NO: 289574 - RNA, 23 nt, Artificial Sequence
  Synthetic
gucuuguggccaagcccaaaguc

SEQ ID NO: 289575 - RNA, 24 nt, Artificial Sequence
  Synthetic
ugucuuguggccaagcccaaaguc

SEQ ID NO: 289576 - RNA, 18 nt, Artificial Sequence
  Synthetic
ccuuggacucccaaaguc

SEQ ID NO: 289577 - RNA, 19 nt, Artificial Sequence
  Synthetic
accuuggacucccaaaguc

SEQ ID NO: 289578 - RNA, 20 nt, Artificial Sequence
  Synthetic
caccuuggacucccaaaguc

SEQ ID NO: 289579 - RNA, 21 nt, Artificial Sequence
  Synthetic
ccaccuuggacucccaaaguc

SEQ ID NO: 289580 - RNA, 22 nt, Artificial Sequence
  Synthetic
cccaccuuggacucccaaaguc

SEQ ID NO: 289581 - RNA, 23 nt, Artificial Sequence
  Synthetic
gcccaccuuggacucccaaaguc

SEQ ID NO: 289582 - RNA, 24 nt, Artificial Sequence
  Synthetic
cgcccaccuuggacucccaaaguc

SEQ ID NO: 289583 - RNA, 18 nt, Artificial Sequence
  Synthetic
ccucggccucccaaaguc

SEQ ID NO: 289584 - RNA, 19 nt, Artificial Sequence
  Synthetic
gccucggccucccaaaguc

SEQ ID NO: 289585 - RNA, 20 nt, Artificial Sequence
  Synthetic
ugccucggccucccaaaguc

SEQ ID NO: 289586 - RNA, 21 nt, Artificial Sequence
  Synthetic
cugccucggccucccaaaguc

SEQ ID NO: 289587 - RNA, 22 nt, Artificial Sequence
  Synthetic
gcugccucggccucccaaaguc

SEQ ID NO: 289588 - RNA, 23 nt, Artificial Sequence
  Synthetic
ggcugccucggccucccaaaguc

SEQ ID NO: 289589 - RNA, 24 nt, Artificial Sequence
  Synthetic
aggcugccucggccucccaaaguc

SEQ ID NO: 289590 - RNA, 18 nt, Artificial Sequence
  Synthetic
ccuuggccucccaaaguc

SEQ ID NO: 289591 - RNA, 19 nt, Artificial Sequence
  Synthetic
gccuuggccucccaaaguc

SEQ ID NO: 289592 - RNA, 20 nt, Artificial Sequence
  Synthetic
cgccuuggccucccaaaguc

SEQ ID NO: 289593 - RNA, 21 nt, Artificial Sequence
  Synthetic
ccgccuuggccucccaaaguc

SEQ ID NO: 289594 - RNA, 22 nt, Artificial Sequence
  Synthetic
cccgccuuggccucccaaaguc

SEQ ID NO: 289595 - RNA, 23 nt, Artificial Sequence
  Synthetic
gcccgccuuggccucccaaaguc

SEQ ID NO: 289596 - RNA, 24 nt, Artificial Sequence
  Synthetic
cgcccgccuuggccucccaaaguc

SEQ ID NO: 289597 - RNA, 18 nt, Artificial Sequence
  Synthetic
guugugaggagcaaaguc

SEQ ID NO: 289598 - RNA, 19 nt, Artificial Sequence
  Synthetic
aguugugaggagcaaaguc

SEQ ID NO: 289599 - RNA, 20 nt, Artificial Sequence
  Synthetic
caguugugaggagcaaaguc

SEQ ID NO: 289600 - RNA, 21 nt, Artificial Sequence
  Synthetic
acaguugugaggagcaaaguc

SEQ ID NO: 289601 - RNA, 22 nt, Artificial Sequence
  Synthetic
aacaguugugaggagcaaaguc

SEQ ID NO: 289602 - RNA, 23 nt, Artificial Sequence
  Synthetic
aaacaguugugaggagcaaaguc

SEQ ID NO: 289603 - RNA, 24 nt, Artificial Sequence
  Synthetic
caaacaguugugaggagcaaaguc

SEQ ID NO: 289604 - RNA, 18 nt, Artificial Sequence
  Synthetic
gaagagcuaggcaaaguc

SEQ ID NO: 289605 - RNA, 19 nt, Artificial Sequence
  Synthetic
ggaagagcuaggcaaaguc

SEQ ID NO: 289606 - RNA, 20 nt, Artificial Sequence
  Synthetic
uggaagagcuaggcaaaguc

SEQ ID NO: 289607 - RNA, 21 nt, Artificial Sequence
  Synthetic
uuggaagagcuaggcaaaguc

SEQ ID NO: 289608 - RNA, 22 nt, Artificial Sequence
  Synthetic
guuggaagagcuaggcaaaguc

SEQ ID NO: 289609 - RNA, 23 nt, Artificial Sequence
  Synthetic
aguuggaagagcuaggcaaaguc

SEQ ID NO: 289610 - RNA, 24 nt, Artificial Sequence
  Synthetic
uaguuggaagagcuaggcaaaguc

SEQ ID NO: 289611 - RNA, 18 nt, Artificial Sequence
  Synthetic
aauucccuggagaaaguc

SEQ ID NO: 289612 - RNA, 19 nt, Artificial Sequence
  Synthetic
uaauucccuggagaaaguc

SEQ ID NO: 289613 - RNA, 20 nt, Artificial Sequence
  Synthetic
uuaauucccuggagaaaguc

SEQ ID NO: 289614 - RNA, 21 nt, Artificial Sequence
  Synthetic
cuuaauucccuggagaaaguc

SEQ ID NO: 289615 - RNA, 22 nt, Artificial Sequence
  Synthetic
gcuuaauucccuggagaaaguc

SEQ ID NO: 289616 - RNA, 23 nt, Artificial Sequence
  Synthetic
ggcuuaauucccuggagaaaguc

SEQ ID NO: 289617 - RNA, 24 nt, Artificial Sequence
  Synthetic
gggcuuaauucccuggagaaaguc

SEQ ID NO: 289618 - RNA, 18 nt, Artificial Sequence
  Synthetic
auagaauuauagaaaguc

SEQ ID NO: 289619 - RNA, 19 nt, Artificial Sequence
  Synthetic
gauagaauuauagaaaguc

SEQ ID NO: 289620 - RNA, 20 nt, Artificial Sequence
  Synthetic
ugauagaauuauagaaaguc

SEQ ID NO: 289621 - RNA, 21 nt, Artificial Sequence
  Synthetic
uugauagaauuauagaaaguc

SEQ ID NO: 289622 - RNA, 22 nt, Artificial Sequence
  Synthetic
guugauagaauuauagaaaguc

SEQ ID NO: 289623 - RNA, 23 nt, Artificial Sequence
  Synthetic
uguugauagaauuauagaaaguc

SEQ ID NO: 289624 - RNA, 24 nt, Artificial Sequence
  Synthetic
uuguugauagaauuauagaaaguc

SEQ ID NO: 289625 - RNA, 18 nt, Artificial Sequence
  Synthetic
aauaaaaucuauaaaguc

SEQ ID NO: 289626 - RNA, 19 nt, Artificial Sequence
  Synthetic
aaauaaaaucuauaaaguc

SEQ ID NO: 289627 - RNA, 20 nt, Artificial Sequence
  Synthetic
caaauaaaaucuauaaaguc

SEQ ID NO: 289628 - RNA, 21 nt, Artificial Sequence
  Synthetic
ucaaauaaaaucuauaaaguc

SEQ ID NO: 289629 - RNA, 22 nt, Artificial Sequence
  Synthetic
aucaaauaaaaucuauaaaguc

SEQ ID NO: 289630 - RNA, 23 nt, Artificial Sequence
  Synthetic
aaucaaauaaaaucuauaaaguc

SEQ ID NO: 289631 - RNA, 24 nt, Artificial Sequence
  Synthetic
aaaucaaauaaaaucuauaaaguc

SEQ ID NO: 289632 - RNA, 18 nt, Artificial Sequence
  Synthetic
acuuccccuacuaaaguc

SEQ ID NO: 289633 - RNA, 19 nt, Artificial Sequence
  Synthetic
gacuuccccuacuaaaguc

SEQ ID NO: 289634 - RNA, 20 nt, Artificial Sequence
  Synthetic
ugacuuccccuacuaaaguc

SEQ ID NO: 289635 - RNA, 21 nt, Artificial Sequence
  Synthetic
gugacuuccccuacuaaaguc

SEQ ID NO: 289636 - RNA, 22 nt, Artificial Sequence
  Synthetic
agugacuuccccuacuaaaguc

SEQ ID NO: 289637 - RNA, 23 nt, Artificial Sequence
  Synthetic
cagugacuuccccuacuaaaguc

SEQ ID NO: 289638 - RNA, 24 nt, Artificial Sequence
  Synthetic
ccagugacuuccccuacuaaaguc

SEQ ID NO: 289639 - RNA, 18 nt, Artificial Sequence
  Synthetic
aaggucaggucuaaaguc

SEQ ID NO: 289640 - RNA, 19 nt, Artificial Sequence
  Synthetic
gaaggucaggucuaaaguc

SEQ ID NO: 289641 - RNA, 20 nt, Artificial Sequence
  Synthetic
ggaaggucaggucuaaaguc

SEQ ID NO: 289642 - RNA, 21 nt, Artificial Sequence
  Synthetic
aggaaggucaggucuaaaguc

SEQ ID NO: 289643 - RNA, 22 nt, Artificial Sequence
  Synthetic
aaggaaggucaggucuaaaguc

SEQ ID NO: 289644 - RNA, 23 nt, Artificial Sequence
  Synthetic
aaaggaaggucaggucuaaaguc

SEQ ID NO: 289645 - RNA, 24 nt, Artificial Sequence
  Synthetic
aaaaggaaggucaggucuaaaguc

SEQ ID NO: 289646 - RNA, 18 nt, Artificial Sequence
  Synthetic
acuguggcugguaaaguc

SEQ ID NO: 289647 - RNA, 19 nt, Artificial Sequence
  Synthetic
aacuguggcugguaaaguc

SEQ ID NO: 289648 - RNA, 20 nt, Artificial Sequence
  Synthetic
caacuguggcugguaaaguc

SEQ ID NO: 289649 - RNA, 21 nt, Artificial Sequence
  Synthetic
gcaacuguggcugguaaaguc

SEQ ID NO: 289650 - RNA, 22 nt, Artificial Sequence
  Synthetic
agcaacuguggcugguaaaguc

SEQ ID NO: 289651 - RNA, 23 nt, Artificial Sequence
  Synthetic
cagcaacuguggcugguaaaguc

SEQ ID NO: 289652 - RNA, 24 nt, Artificial Sequence
  Synthetic
ucagcaacuguggcugguaaaguc

SEQ ID NO: 289653 - RNA, 18 nt, Artificial Sequence
  Synthetic
uaauuagacuguaaaguc

SEQ ID NO: 289654 - RNA, 19 nt, Artificial Sequence
  Synthetic
guaauuagacuguaaaguc

SEQ ID NO: 289655 - RNA, 20 nt, Artificial Sequence
  Synthetic
uguaauuagacuguaaaguc

SEQ ID NO: 289656 - RNA, 21 nt, Artificial Sequence
  Synthetic
uuguaauuagacuguaaaguc

SEQ ID NO: 289657 - RNA, 22 nt, Artificial Sequence
  Synthetic
guuguaauuagacuguaaaguc

SEQ ID NO: 289658 - RNA, 23 nt, Artificial Sequence
  Synthetic
aguuguaauuagacuguaaaguc

SEQ ID NO: 289659 - RNA, 24 nt, Artificial Sequence
  Synthetic
uaguuguaauuagacuguaaaguc

SEQ ID NO: 289660 - RNA, 18 nt, Artificial Sequence
  Synthetic
uguaugcgcauuaaaguc

SEQ ID NO: 289661 - RNA, 19 nt, Artificial Sequence
  Synthetic
uuguaugcgcauuaaaguc

SEQ ID NO: 289662 - RNA, 20 nt, Artificial Sequence
  Synthetic
uuuguaugcgcauuaaaguc

SEQ ID NO: 289663 - RNA, 21 nt, Artificial Sequence
  Synthetic
auuuguaugcgcauuaaaguc

SEQ ID NO: 289664 - RNA, 22 nt, Artificial Sequence
  Synthetic
gauuuguaugcgcauuaaaguc

SEQ ID NO: 289665 - RNA, 23 nt, Artificial Sequence
  Synthetic
agauuuguaugcgcauuaaaguc

SEQ ID NO: 289666 - RNA, 24 nt, Artificial Sequence
  Synthetic
gagauuuguaugcgcauuaaaguc

SEQ ID NO: 289667 - RNA, 18 nt, Artificial Sequence
  Synthetic
gaaaagcucuuuaaaguc

SEQ ID NO: 289668 - RNA, 19 nt, Artificial Sequence
  Synthetic
ggaaaagcucuuuaaaguc

SEQ ID NO: 289669 - RNA, 20 nt, Artificial Sequence
  Synthetic
uggaaaagcucuuuaaaguc

SEQ ID NO: 289670 - RNA, 21 nt, Artificial Sequence
  Synthetic
uuggaaaagcucuuuaaaguc

SEQ ID NO: 289671 - RNA, 22 nt, Artificial Sequence
  Synthetic
uuuggaaaagcucuuuaaaguc

SEQ ID NO: 289672 - RNA, 23 nt, Artificial Sequence
  Synthetic
uuuuggaaaagcucuuuaaaguc

SEQ ID NO: 289673 - RNA, 24 nt, Artificial Sequence
  Synthetic
guuuuggaaaagcucuuuaaaguc

SEQ ID NO: 289674 - RNA, 18 nt, Artificial Sequence
  Synthetic
guaaaaaacaagcaaguc

SEQ ID NO: 289675 - RNA, 19 nt, Artificial Sequence
  Synthetic
gguaaaaaacaagcaaguc

SEQ ID NO: 289676 - RNA, 20 nt, Artificial Sequence
  Synthetic
ggguaaaaaacaagcaaguc

SEQ ID NO: 289677 - RNA, 21 nt, Artificial Sequence
  Synthetic
gggguaaaaaacaagcaaguc

SEQ ID NO: 289678 - RNA, 22 nt, Artificial Sequence
  Synthetic
agggguaaaaaacaagcaaguc

SEQ ID NO: 289679 - RNA, 23 nt, Artificial Sequence
  Synthetic
aagggguaaaaaacaagcaaguc

SEQ ID NO: 289680 - RNA, 24 nt, Artificial Sequence
  Synthetic
uaagggguaaaaaacaagcaaguc

SEQ ID NO: 289681 - RNA, 18 nt, Artificial Sequence
  Synthetic
aguuuaggaaggcaaguc

SEQ ID NO: 289682 - RNA, 19 nt, Artificial Sequence
  Synthetic
aaguuuaggaaggcaaguc

SEQ ID NO: 289683 - RNA, 20 nt, Artificial Sequence
  Synthetic
aaaguuuaggaaggcaaguc

SEQ ID NO: 289684 - RNA, 21 nt, Artificial Sequence
  Synthetic
caaaguuuaggaaggcaaguc

SEQ ID NO: 289685 - RNA, 22 nt, Artificial Sequence
  Synthetic
ccaaaguuuaggaaggcaaguc

SEQ ID NO: 289686 - RNA, 23 nt, Artificial Sequence
  Synthetic
uccaaaguuuaggaaggcaaguc

SEQ ID NO: 289687 - RNA, 24 nt, Artificial Sequence
  Synthetic
cuccaaaguuuaggaaggcaaguc

SEQ ID NO: 289688 - RNA, 18 nt, Artificial Sequence
  Synthetic
agagaccuaaaucaaguc

SEQ ID NO: 289689 - RNA, 19 nt, Artificial Sequence
  Synthetic
cagagaccuaaaucaaguc

SEQ ID NO: 289690 - RNA, 20 nt, Artificial Sequence
  Synthetic
gcagagaccuaaaucaaguc

SEQ ID NO: 289691 - RNA, 21 nt, Artificial Sequence
  Synthetic
agcagagaccuaaaucaaguc

SEQ ID NO: 289692 - RNA, 22 nt, Artificial Sequence
  Synthetic
gagcagagaccuaaaucaaguc

SEQ ID NO: 289693 - RNA, 23 nt, Artificial Sequence
  Synthetic
ugagcagagaccuaaaucaaguc

SEQ ID NO: 289694 - RNA, 24 nt, Artificial Sequence
  Synthetic
cugagcagagaccuaaaucaaguc

SEQ ID NO: 289695 - RNA, 18 nt, Artificial Sequence
  Synthetic
caugauaagaaagaaguc

SEQ ID NO: 289696 - RNA, 19 nt, Artificial Sequence
  Synthetic
gcaugauaagaaagaaguc

SEQ ID NO: 289697 - RNA, 20 nt, Artificial Sequence
  Synthetic
agcaugauaagaaagaaguc

SEQ ID NO: 289698 - RNA, 21 nt, Artificial Sequence
  Synthetic
aagcaugauaagaaagaaguc

SEQ ID NO: 289699 - RNA, 22 nt, Artificial Sequence
  Synthetic
caagcaugauaagaaagaaguc

SEQ ID NO: 289700 - RNA, 23 nt, Artificial Sequence
  Synthetic
acaagcaugauaagaaagaaguc

SEQ ID NO: 289701 - RNA, 24 nt, Artificial Sequence
  Synthetic
gacaagcaugauaagaaagaaguc

SEQ ID NO: 289702 - RNA, 18 nt, Artificial Sequence
  Synthetic
cauauaaaacuagaaguc

SEQ ID NO: 289703 - RNA, 19 nt, Artificial Sequence
  Synthetic
ucauauaaaacuagaaguc

SEQ ID NO: 289704 - RNA, 20 nt, Artificial Sequence
  Synthetic
cucauauaaaacuagaaguc

SEQ ID NO: 289705 - RNA, 21 nt, Artificial Sequence
  Synthetic
ucucauauaaaacuagaaguc

SEQ ID NO: 289706 - RNA, 22 nt, Artificial Sequence
  Synthetic
uucucauauaaaacuagaaguc

SEQ ID NO: 289707 - RNA, 23 nt, Artificial Sequence
  Synthetic
uuucucauauaaaacuagaaguc

SEQ ID NO: 289708 - RNA, 24 nt, Artificial Sequence
  Synthetic
uuuucucauauaaaacuagaaguc

SEQ ID NO: 289709 - RNA, 18 nt, Artificial Sequence
  Synthetic
cugacauccaaggaaguc

SEQ ID NO: 289710 - RNA, 19 nt, Artificial Sequence
  Synthetic
acugacauccaaggaaguc

SEQ ID NO: 289711 - RNA, 20 nt, Artificial Sequence
  Synthetic
aacugacauccaaggaaguc

SEQ ID NO: 289712 - RNA, 21 nt, Artificial Sequence
  Synthetic
caacugacauccaaggaaguc

SEQ ID NO: 289713 - RNA, 22 nt, Artificial Sequence
  Synthetic
gcaacugacauccaaggaaguc

SEQ ID NO: 289714 - RNA, 23 nt, Artificial Sequence
  Synthetic
ugcaacugacauccaaggaaguc

SEQ ID NO: 289715 - RNA, 24 nt, Artificial Sequence
  Synthetic
augcaacugacauccaaggaaguc

SEQ ID NO: 289716 - RNA, 18 nt, Artificial Sequence
  Synthetic
uggauugaaagggaaguc

SEQ ID NO: 289717 - RNA, 19 nt, Artificial Sequence
  Synthetic
uuggauugaaagggaaguc

SEQ ID NO: 289718 - RNA, 20 nt, Artificial Sequence
  Synthetic
guuggauugaaagggaaguc

SEQ ID NO: 289719 - RNA, 21 nt, Artificial Sequence
  Synthetic
aguuggauugaaagggaaguc

SEQ ID NO: 289720 - RNA, 22 nt, Artificial Sequence
  Synthetic
caguuggauugaaagggaaguc

SEQ ID NO: 289721 - RNA, 23 nt, Artificial Sequence
  Synthetic
ucaguuggauugaaagggaaguc

SEQ ID NO: 289722 - RNA, 24 nt, Artificial Sequence
  Synthetic
uucaguuggauugaaagggaaguc

SEQ ID NO: 289723 - RNA, 18 nt, Artificial Sequence
  Synthetic
aguaaucaugaugaaguc

SEQ ID NO: 289724 - RNA, 19 nt, Artificial Sequence
  Synthetic
uaguaaucaugaugaaguc

SEQ ID NO: 289725 - RNA, 20 nt, Artificial Sequence
  Synthetic
auaguaaucaugaugaaguc

SEQ ID NO: 289726 - RNA, 21 nt, Artificial Sequence
  Synthetic
uauaguaaucaugaugaaguc

SEQ ID NO: 289727 - RNA, 22 nt, Artificial Sequence
  Synthetic
auauaguaaucaugaugaaguc

SEQ ID NO: 289728 - RNA, 23 nt, Artificial Sequence
  Synthetic
aauauaguaaucaugaugaaguc

SEQ ID NO: 289729 - RNA, 24 nt, Artificial Sequence
  Synthetic
aaauauaguaaucaugaugaaguc

SEQ ID NO: 289730 - RNA, 18 nt, Artificial Sequence
  Synthetic
uguaggcuugaugaaguc

SEQ ID NO: 289731 - RNA, 19 nt, Artificial Sequence
  Synthetic
auguaggcuugaugaaguc

SEQ ID NO: 289732 - RNA, 20 nt, Artificial Sequence
  Synthetic
aauguaggcuugaugaaguc

SEQ ID NO: 289733 - RNA, 21 nt, Artificial Sequence
  Synthetic
gaauguaggcuugaugaaguc

SEQ ID NO: 289734 - RNA, 22 nt, Artificial Sequence
  Synthetic
agaauguaggcuugaugaaguc

SEQ ID NO: 289735 - RNA, 23 nt, Artificial Sequence
  Synthetic
uagaauguaggcuugaugaaguc

SEQ ID NO: 289736 - RNA, 24 nt, Artificial Sequence
  Synthetic
uuagaauguaggcuugaugaaguc

SEQ ID NO: 289737 - RNA, 18 nt, Artificial Sequence
  Synthetic
ggaaaggggacugaaguc

SEQ ID NO: 289738 - RNA, 19 nt, Artificial Sequence
  Synthetic
uggaaaggggacugaaguc

SEQ ID NO: 289739 - RNA, 20 nt, Artificial Sequence
  Synthetic
cuggaaaggggacugaaguc

SEQ ID NO: 289740 - RNA, 21 nt, Artificial Sequence
  Synthetic
ccuggaaaggggacugaaguc

SEQ ID NO: 289741 - RNA, 22 nt, Artificial Sequence
  Synthetic
cccuggaaaggggacugaaguc

SEQ ID NO: 289742 - RNA, 23 nt, Artificial Sequence
  Synthetic
ccccuggaaaggggacugaaguc

SEQ ID NO: 289743 - RNA, 24 nt, Artificial Sequence
  Synthetic
uccccuggaaaggggacugaaguc

SEQ ID NO: 289744 - RNA, 18 nt, Artificial Sequence
  Synthetic
uaaaacaaagcugaaguc

SEQ ID NO: 289745 - RNA, 19 nt, Artificial Sequence
  Synthetic
auaaaacaaagcugaaguc

SEQ ID NO: 289746 - RNA, 20 nt, Artificial Sequence
  Synthetic
gauaaaacaaagcugaaguc

SEQ ID NO: 289747 - RNA, 21 nt, Artificial Sequence
  Synthetic
ugauaaaacaaagcugaaguc

SEQ ID NO: 289748 - RNA, 22 nt, Artificial Sequence
  Synthetic
augauaaaacaaagcugaaguc

SEQ ID NO: 289749 - RNA, 23 nt, Artificial Sequence
  Synthetic
uaugauaaaacaaagcugaaguc

SEQ ID NO: 289750 - RNA, 24 nt, Artificial Sequence
  Synthetic
uuaugauaaaacaaagcugaaguc

SEQ ID NO: 289751 - RNA, 18 nt, Artificial Sequence
  Synthetic
gugcacaagucugaaguc

SEQ ID NO: 289752 - RNA, 19 nt, Artificial Sequence
  Synthetic
ugugcacaagucugaaguc

SEQ ID NO: 289753 - RNA, 20 nt, Artificial Sequence
  Synthetic
cugugcacaagucugaaguc

SEQ ID NO: 289754 - RNA, 21 nt, Artificial Sequence
  Synthetic
acugugcacaagucugaaguc

SEQ ID NO: 289755 - RNA, 22 nt, Artificial Sequence
  Synthetic
uacugugcacaagucugaaguc

SEQ ID NO: 289756 - RNA, 23 nt, Artificial Sequence
  Synthetic
auacugugcacaagucugaaguc

SEQ ID NO: 289757 - RNA, 24 nt, Artificial Sequence
  Synthetic
cauacugugcacaagucugaaguc

SEQ ID NO: 289758 - RNA, 18 nt, Artificial Sequence
  Synthetic
uaggacccccaauaaguc

SEQ ID NO: 289759 - RNA, 19 nt, Artificial Sequence
  Synthetic
auaggacccccaauaaguc

SEQ ID NO: 289760 - RNA, 20 nt, Artificial Sequence
  Synthetic
aauaggacccccaauaaguc

SEQ ID NO: 289761 - RNA, 21 nt, Artificial Sequence
  Synthetic
aaauaggacccccaauaaguc

SEQ ID NO: 289762 - RNA, 22 nt, Artificial Sequence
  Synthetic
gaaauaggacccccaauaaguc

SEQ ID NO: 289763 - RNA, 23 nt, Artificial Sequence
  Synthetic
agaaauaggacccccaauaaguc

SEQ ID NO: 289764 - RNA, 24 nt, Artificial Sequence
  Synthetic
cagaaauaggacccccaauaaguc

SEQ ID NO: 289765 - RNA, 18 nt, Artificial Sequence
  Synthetic
aaagcccugggauaaguc

SEQ ID NO: 289766 - RNA, 19 nt, Artificial Sequence
  Synthetic
aaaagcccugggauaaguc

SEQ ID NO: 289767 - RNA, 20 nt, Artificial Sequence
  Synthetic
gaaaagcccugggauaaguc

SEQ ID NO: 289768 - RNA, 21 nt, Artificial Sequence
  Synthetic
agaaaagcccugggauaaguc

SEQ ID NO: 289769 - RNA, 22 nt, Artificial Sequence
  Synthetic
aagaaaagcccugggauaaguc

SEQ ID NO: 289770 - RNA, 23 nt, Artificial Sequence
  Synthetic
uaagaaaagcccugggauaaguc

SEQ ID NO: 289771 - RNA, 24 nt, Artificial Sequence
  Synthetic
auaagaaaagcccugggauaaguc

SEQ ID NO: 289772 - RNA, 18 nt, Artificial Sequence
  Synthetic
uccaaauuauucuaaguc

SEQ ID NO: 289773 - RNA, 19 nt, Artificial Sequence
  Synthetic
uuccaaauuauucuaaguc

SEQ ID NO: 289774 - RNA, 20 nt, Artificial Sequence
  Synthetic
cuuccaaauuauucuaaguc

SEQ ID NO: 289775 - RNA, 21 nt, Artificial Sequence
  Synthetic
gcuuccaaauuauucuaaguc

SEQ ID NO: 289776 - RNA, 22 nt, Artificial Sequence
  Synthetic
ggcuuccaaauuauucuaaguc

SEQ ID NO: 289777 - RNA, 23 nt, Artificial Sequence
  Synthetic
uggcuuccaaauuauucuaaguc

SEQ ID NO: 289778 - RNA, 24 nt, Artificial Sequence
  Synthetic
guggcuuccaaauuauucuaaguc

SEQ ID NO: 289779 - RNA, 18 nt, Artificial Sequence
  Synthetic
cauggucagaaguaaguc

SEQ ID NO: 289780 - RNA, 19 nt, Artificial Sequence
  Synthetic
ucauggucagaaguaaguc

SEQ ID NO: 289781 - RNA, 20 nt, Artificial Sequence
  Synthetic
uucauggucagaaguaaguc

SEQ ID NO: 289782 - RNA, 21 nt, Artificial Sequence
  Synthetic
uuucauggucagaaguaaguc

SEQ ID NO: 289783 - RNA, 22 nt, Artificial Sequence
  Synthetic
cuuucauggucagaaguaaguc

SEQ ID NO: 289784 - RNA, 23 nt, Artificial Sequence
  Synthetic
ucuuucauggucagaaguaaguc

SEQ ID NO: 289785 - RNA, 24 nt, Artificial Sequence
  Synthetic
uucuuucauggucagaaguaaguc

SEQ ID NO: 289786 - RNA, 18 nt, Artificial Sequence
  Synthetic
aauggagagagguaaguc

SEQ ID NO: 289787 - RNA, 19 nt, Artificial Sequence
  Synthetic
gaauggagagagguaaguc

SEQ ID NO: 289788 - RNA, 20 nt, Artificial Sequence
  Synthetic
agaauggagagagguaaguc

SEQ ID NO: 289789 - RNA, 21 nt, Artificial Sequence
  Synthetic
aagaauggagagagguaaguc

SEQ ID NO: 289790 - RNA, 22 nt, Artificial Sequence
  Synthetic
aaagaauggagagagguaaguc

SEQ ID NO: 289791 - RNA, 23 nt, Artificial Sequence
  Synthetic
gaaagaauggagagagguaaguc

SEQ ID NO: 289792 - RNA, 24 nt, Artificial Sequence
  Synthetic
ggaaagaauggagagagguaaguc

SEQ ID NO: 289793 - RNA, 18 nt, Artificial Sequence
  Synthetic
acagauuuuugguaaguc

SEQ ID NO: 289794 - RNA, 19 nt, Artificial Sequence
  Synthetic
gacagauuuuugguaaguc

SEQ ID NO: 289795 - RNA, 20 nt, Artificial Sequence
  Synthetic
agacagauuuuugguaaguc

SEQ ID NO: 289796 - RNA, 21 nt, Artificial Sequence
  Synthetic
gagacagauuuuugguaaguc

SEQ ID NO: 289797 - RNA, 22 nt, Artificial Sequence
  Synthetic
ggagacagauuuuugguaaguc

SEQ ID NO: 289798 - RNA, 23 nt, Artificial Sequence
  Synthetic
gggagacagauuuuugguaaguc

SEQ ID NO: 289799 - RNA, 24 nt, Artificial Sequence
  Synthetic
ugggagacagauuuuugguaaguc

SEQ ID NO: 289800 - RNA, 18 nt, Artificial Sequence
  Synthetic
auuuaaauacuuuaaguc

SEQ ID NO: 289801 - RNA, 19 nt, Artificial Sequence
  Synthetic
uauuuaaauacuuuaaguc

SEQ ID NO: 289802 - RNA, 20 nt, Artificial Sequence
  Synthetic
cuauuuaaauacuuuaaguc

SEQ ID NO: 289803 - RNA, 21 nt, Artificial Sequence
  Synthetic
ccuauuuaaauacuuuaaguc

SEQ ID NO: 289804 - RNA, 22 nt, Artificial Sequence
  Synthetic
gccuauuuaaauacuuuaaguc

SEQ ID NO: 289805 - RNA, 23 nt, Artificial Sequence
  Synthetic
ugccuauuuaaauacuuuaaguc

SEQ ID NO: 289806 - RNA, 24 nt, Artificial Sequence
  Synthetic
cugccuauuuaaauacuuuaaguc

SEQ ID NO: 289807 - RNA, 18 nt, Artificial Sequence
  Synthetic
aauaucuuauuuuaaguc

SEQ ID NO: 289808 - RNA, 19 nt, Artificial Sequence
  Synthetic
aaauaucuuauuuuaaguc

SEQ ID NO: 289809 - RNA, 20 nt, Artificial Sequence
  Synthetic
aaaauaucuuauuuuaaguc

SEQ ID NO: 289810 - RNA, 21 nt, Artificial Sequence
  Synthetic
caaaauaucuuauuuuaaguc

SEQ ID NO: 289811 - RNA, 22 nt, Artificial Sequence
  Synthetic
gcaaaauaucuuauuuuaaguc

SEQ ID NO: 289812 - RNA, 23 nt, Artificial Sequence
  Synthetic
ugcaaaauaucuuauuuuaaguc

SEQ ID NO: 289813 - RNA, 24 nt, Artificial Sequence
  Synthetic
gugcaaaauaucuuauuuuaaguc

SEQ ID NO: 289814 - RNA, 18 nt, Artificial Sequence
  Synthetic
uugaagagcuucacaguc

SEQ ID NO: 289815 - RNA, 19 nt, Artificial Sequence
  Synthetic
uuugaagagcuucacaguc

SEQ ID NO: 289816 - RNA, 20 nt, Artificial Sequence
  Synthetic
cuuugaagagcuucacaguc

SEQ ID NO: 289817 - RNA, 21 nt, Artificial Sequence
  Synthetic
gcuuugaagagcuucacaguc

SEQ ID NO: 289818 - RNA, 22 nt, Artificial Sequence
  Synthetic
ugcuuugaagagcuucacaguc

SEQ ID NO: 289819 - RNA, 23 nt, Artificial Sequence
  Synthetic
cugcuuugaagagcuucacaguc

SEQ ID NO: 289820 - RNA, 24 nt, Artificial Sequence
  Synthetic
ccugcuuugaagagcuucacaguc

SEQ ID NO: 289821 - RNA, 18 nt, Artificial Sequence
  Synthetic
gagaaaggcuucacaguc

SEQ ID NO: 289822 - RNA, 19 nt, Artificial Sequence
  Synthetic
ugagaaaggcuucacaguc

SEQ ID NO: 289823 - RNA, 20 nt, Artificial Sequence
  Synthetic
uugagaaaggcuucacaguc

SEQ ID NO: 289824 - RNA, 21 nt, Artificial Sequence
  Synthetic
cuugagaaaggcuucacaguc

SEQ ID NO: 289825 - RNA, 22 nt, Artificial Sequence
  Synthetic
acuugagaaaggcuucacaguc

SEQ ID NO: 289826 - RNA, 23 nt, Artificial Sequence
  Synthetic
gacuugagaaaggcuucacaguc

SEQ ID NO: 289827 - RNA, 24 nt, Artificial Sequence
  Synthetic
ggacuugagaaaggcuucacaguc

SEQ ID NO: 289828 - RNA, 18 nt, Artificial Sequence
  Synthetic
uaacccaguccuacaguc

SEQ ID NO: 289829 - RNA, 19 nt, Artificial Sequence
  Synthetic
cuaacccaguccuacaguc

SEQ ID NO: 289830 - RNA, 20 nt, Artificial Sequence
  Synthetic
ucuaacccaguccuacaguc

SEQ ID NO: 289831 - RNA, 21 nt, Artificial Sequence
  Synthetic
uucuaacccaguccuacaguc

SEQ ID NO: 289832 - RNA, 22 nt, Artificial Sequence
  Synthetic
auucuaacccaguccuacaguc

SEQ ID NO: 289833 - RNA, 23 nt, Artificial Sequence
  Synthetic
cauucuaacccaguccuacaguc

SEQ ID NO: 289834 - RNA, 24 nt, Artificial Sequence
  Synthetic
ucauucuaacccaguccuacaguc

SEQ ID NO: 289835 - RNA, 18 nt, Artificial Sequence
  Synthetic
agugcugggauuacaguc

SEQ ID NO: 289836 - RNA, 19 nt, Artificial Sequence
  Synthetic
aagugcugggauuacaguc

SEQ ID NO: 289837 - RNA, 20 nt, Artificial Sequence
  Synthetic
aaagugcugggauuacaguc

SEQ ID NO: 289838 - RNA, 21 nt, Artificial Sequence
  Synthetic
caaagugcugggauuacaguc

SEQ ID NO: 289839 - RNA, 22 nt, Artificial Sequence
  Synthetic
ccaaagugcugggauuacaguc

SEQ ID NO: 289840 - RNA, 23 nt, Artificial Sequence
  Synthetic
cccaaagugcugggauuacaguc

SEQ ID NO: 289841 - RNA, 24 nt, Artificial Sequence
  Synthetic
ucccaaagugcugggauuacaguc

SEQ ID NO: 289842 - RNA, 18 nt, Artificial Sequence
  Synthetic
aggaguucgagaccaguc

SEQ ID NO: 289843 - RNA, 19 nt, Artificial Sequence
  Synthetic
caggaguucgagaccaguc

SEQ ID NO: 289844 - RNA, 20 nt, Artificial Sequence
  Synthetic
ccaggaguucgagaccaguc

SEQ ID NO: 289845 - RNA, 21 nt, Artificial Sequence
  Synthetic
cccaggaguucgagaccaguc

SEQ ID NO: 289846 - RNA, 22 nt, Artificial Sequence
  Synthetic
gcccaggaguucgagaccaguc

SEQ ID NO: 289847 - RNA, 23 nt, Artificial Sequence
  Synthetic
agcccaggaguucgagaccaguc

SEQ ID NO: 289848 - RNA, 24 nt, Artificial Sequence
  Synthetic
gagcccaggaguucgagaccaguc

SEQ ID NO: 289849 - RNA, 18 nt, Artificial Sequence
  Synthetic
agaaguuugagaccaguc

SEQ ID NO: 289850 - RNA, 19 nt, Artificial Sequence
  Synthetic
cagaaguuugagaccaguc

SEQ ID NO: 289851 - RNA, 20 nt, Artificial Sequence
  Synthetic
ccagaaguuugagaccaguc

SEQ ID NO: 289852 - RNA, 21 nt, Artificial Sequence
  Synthetic
cccagaaguuugagaccaguc

SEQ ID NO: 289853 - RNA, 22 nt, Artificial Sequence
  Synthetic
gcccagaaguuugagaccaguc

SEQ ID NO: 289854 - RNA, 23 nt, Artificial Sequence
  Synthetic
agcccagaaguuugagaccaguc

SEQ ID NO: 289855 - RNA, 24 nt, Artificial Sequence
  Synthetic
uagcccagaaguuugagaccaguc

SEQ ID NO: 289856 - RNA, 18 nt, Artificial Sequence
  Synthetic
ggagaagacauaccaguc

SEQ ID NO: 289857 - RNA, 19 nt, Artificial Sequence
  Synthetic
aggagaagacauaccaguc

SEQ ID NO: 289858 - RNA, 20 nt, Artificial Sequence
  Synthetic
uaggagaagacauaccaguc

SEQ ID NO: 289859 - RNA, 21 nt, Artificial Sequence
  Synthetic
cuaggagaagacauaccaguc

SEQ ID NO: 289860 - RNA, 22 nt, Artificial Sequence
  Synthetic
ucuaggagaagacauaccaguc

SEQ ID NO: 289861 - RNA, 23 nt, Artificial Sequence
  Synthetic
uucuaggagaagacauaccaguc

SEQ ID NO: 289862 - RNA, 24 nt, Artificial Sequence
  Synthetic
auucuaggagaagacauaccaguc

SEQ ID NO: 289863 - RNA, 18 nt, Artificial Sequence
  Synthetic
aaggcagcagccccaguc

SEQ ID NO: 289864 - RNA, 19 nt, Artificial Sequence
  Synthetic
aaaggcagcagccccaguc

SEQ ID NO: 289865 - RNA, 20 nt, Artificial Sequence
  Synthetic
gaaaggcagcagccccaguc

SEQ ID NO: 289866 - RNA, 21 nt, Artificial Sequence
  Synthetic
agaaaggcagcagccccaguc

SEQ ID NO: 289867 - RNA, 22 nt, Artificial Sequence
  Synthetic
aagaaaggcagcagccccaguc

SEQ ID NO: 289868 - RNA, 23 nt, Artificial Sequence
  Synthetic
aaagaaaggcagcagccccaguc

SEQ ID NO: 289869 - RNA, 24 nt, Artificial Sequence
  Synthetic
gaaagaaaggcagcagccccaguc

SEQ ID NO: 289870 - RNA, 18 nt, Artificial Sequence
  Synthetic
guagucauuaucccaguc

SEQ ID NO: 289871 - RNA, 19 nt, Artificial Sequence
  Synthetic
aguagucauuaucccaguc

SEQ ID NO: 289872 - RNA, 20 nt, Artificial Sequence
  Synthetic
aaguagucauuaucccaguc

SEQ ID NO: 289873 - RNA, 21 nt, Artificial Sequence
  Synthetic
caaguagucauuaucccaguc

SEQ ID NO: 289874 - RNA, 22 nt, Artificial Sequence
  Synthetic
gcaaguagucauuaucccaguc

SEQ ID NO: 289875 - RNA, 23 nt, Artificial Sequence
  Synthetic
agcaaguagucauuaucccaguc

SEQ ID NO: 289876 - RNA, 24 nt, Artificial Sequence
  Synthetic
cagcaaguagucauuaucccaguc

SEQ ID NO: 289877 - RNA, 18 nt, Artificial Sequence
  Synthetic
uucaugucuucuccaguc

SEQ ID NO: 289878 - RNA, 19 nt, Artificial Sequence
  Synthetic
cuucaugucuucuccaguc

SEQ ID NO: 289879 - RNA, 20 nt, Artificial Sequence
  Synthetic
ccuucaugucuucuccaguc

SEQ ID NO: 289880 - RNA, 21 nt, Artificial Sequence
  Synthetic
cccuucaugucuucuccaguc

SEQ ID NO: 289881 - RNA, 22 nt, Artificial Sequence
  Synthetic
ccccuucaugucuucuccaguc

SEQ ID NO: 289882 - RNA, 23 nt, Artificial Sequence
  Synthetic
cccccuucaugucuucuccaguc

SEQ ID NO: 289883 - RNA, 24 nt, Artificial Sequence
  Synthetic
ucccccuucaugucuucuccaguc

SEQ ID NO: 289884 - RNA, 18 nt, Artificial Sequence
  Synthetic
uucucuuaaauuccaguc

SEQ ID NO: 289885 - RNA, 19 nt, Artificial Sequence
  Synthetic
cuucucuuaaauuccaguc

SEQ ID NO: 289886 - RNA, 20 nt, Artificial Sequence
  Synthetic
gcuucucuuaaauuccaguc

SEQ ID NO: 289887 - RNA, 21 nt, Artificial Sequence
  Synthetic
ugcuucucuuaaauuccaguc

SEQ ID NO: 289888 - RNA, 22 nt, Artificial Sequence
  Synthetic
uugcuucucuuaaauuccaguc

SEQ ID NO: 289889 - RNA, 23 nt, Artificial Sequence
  Synthetic
guugcuucucuuaaauuccaguc

SEQ ID NO: 289890 - RNA, 24 nt, Artificial Sequence
  Synthetic
uguugcuucucuuaaauuccaguc

SEQ ID NO: 289891 - RNA, 18 nt, Artificial Sequence
  Synthetic
cugugccaaacagcaguc

SEQ ID NO: 289892 - RNA, 19 nt, Artificial Sequence
  Synthetic
acugugccaaacagcaguc

SEQ ID NO: 289893 - RNA, 20 nt, Artificial Sequence
  Synthetic
gacugugccaaacagcaguc

SEQ ID NO: 289894 - RNA, 21 nt, Artificial Sequence
  Synthetic
agacugugccaaacagcaguc

SEQ ID NO: 289895 - RNA, 22 nt, Artificial Sequence
  Synthetic
aagacugugccaaacagcaguc

SEQ ID NO: 289896 - RNA, 23 nt, Artificial Sequence
  Synthetic
uaagacugugccaaacagcaguc

SEQ ID NO: 289897 - RNA, 24 nt, Artificial Sequence
  Synthetic
cuaagacugugccaaacagcaguc

SEQ ID NO: 289898 - RNA, 18 nt, Artificial Sequence
  Synthetic
uacuuuauugcagcaguc

SEQ ID NO: 289899 - RNA, 19 nt, Artificial Sequence
  Synthetic
uuacuuuauugcagcaguc

SEQ ID NO: 289900 - RNA, 20 nt, Artificial Sequence
  Synthetic
uuuacuuuauugcagcaguc

SEQ ID NO: 289901 - RNA, 21 nt, Artificial Sequence
  Synthetic
auuuacuuuauugcagcaguc

SEQ ID NO: 289902 - RNA, 22 nt, Artificial Sequence
  Synthetic
uauuuacuuuauugcagcaguc

SEQ ID NO: 289903 - RNA, 23 nt, Artificial Sequence
  Synthetic
auauuuacuuuauugcagcaguc

SEQ ID NO: 289904 - RNA, 24 nt, Artificial Sequence
  Synthetic
gauauuuacuuuauugcagcaguc

SEQ ID NO: 289905 - RNA, 18 nt, Artificial Sequence
  Synthetic
cugggcaucagagcaguc

SEQ ID NO: 289906 - RNA, 19 nt, Artificial Sequence
  Synthetic
ucugggcaucagagcaguc

SEQ ID NO: 289907 - RNA, 20 nt, Artificial Sequence
  Synthetic
uucugggcaucagagcaguc

SEQ ID NO: 289908 - RNA, 21 nt, Artificial Sequence
  Synthetic
auucugggcaucagagcaguc

SEQ ID NO: 289909 - RNA, 22 nt, Artificial Sequence
  Synthetic
cauucugggcaucagagcaguc

SEQ ID NO: 289910 - RNA, 23 nt, Artificial Sequence
  Synthetic
acauucugggcaucagagcaguc

SEQ ID NO: 289911 - RNA, 24 nt, Artificial Sequence
  Synthetic
uacauucugggcaucagagcaguc

SEQ ID NO: 289912 - RNA, 18 nt, Artificial Sequence
  Synthetic
gguggaucugacgcaguc

SEQ ID NO: 289913 - RNA, 19 nt, Artificial Sequence
  Synthetic
ggguggaucugacgcaguc

SEQ ID NO: 289914 - RNA, 20 nt, Artificial Sequence
  Synthetic
cggguggaucugacgcaguc

SEQ ID NO: 289915 - RNA, 21 nt, Artificial Sequence
  Synthetic
acggguggaucugacgcaguc

SEQ ID NO: 289916 - RNA, 22 nt, Artificial Sequence
  Synthetic
aacggguggaucugacgcaguc

SEQ ID NO: 289917 - RNA, 23 nt, Artificial Sequence
  Synthetic
aaacggguggaucugacgcaguc

SEQ ID NO: 289918 - RNA, 24 nt, Artificial Sequence
  Synthetic
aaaacggguggaucugacgcaguc

SEQ ID NO: 289919 - RNA, 18 nt, Artificial Sequence
  Synthetic
aaaagaaaugcugcaguc

SEQ ID NO: 289920 - RNA, 19 nt, Artificial Sequence
  Synthetic
aaaaagaaaugcugcaguc

SEQ ID NO: 289921 - RNA, 20 nt, Artificial Sequence
  Synthetic
caaaaagaaaugcugcaguc

SEQ ID NO: 289922 - RNA, 21 nt, Artificial Sequence
  Synthetic
acaaaaagaaaugcugcaguc

SEQ ID NO: 289923 - RNA, 22 nt, Artificial Sequence
  Synthetic
aacaaaaagaaaugcugcaguc

SEQ ID NO: 289924 - RNA, 23 nt, Artificial Sequence
  Synthetic
uaacaaaaagaaaugcugcaguc

SEQ ID NO: 289925 - RNA, 24 nt, Artificial Sequence
  Synthetic
cuaacaaaaagaaaugcugcaguc

SEQ ID NO: 289926 - RNA, 18 nt, Artificial Sequence
  Synthetic
uguccacugaacucaguc

SEQ ID NO: 289927 - RNA, 19 nt, Artificial Sequence
  Synthetic
uuguccacugaacucaguc

SEQ ID NO: 289928 - RNA, 20 nt, Artificial Sequence
  Synthetic
auuguccacugaacucaguc

SEQ ID NO: 289929 - RNA, 21 nt, Artificial Sequence
  Synthetic
aauuguccacugaacucaguc

SEQ ID NO: 289930 - RNA, 22 nt, Artificial Sequence
  Synthetic
uaauuguccacugaacucaguc

SEQ ID NO: 289931 - RNA, 23 nt, Artificial Sequence
  Synthetic
auaauuguccacugaacucaguc

SEQ ID NO: 289932 - RNA, 24 nt, Artificial Sequence
  Synthetic
aauaauuguccacugaacucaguc

SEQ ID NO: 289933 - RNA, 18 nt, Artificial Sequence
  Synthetic
gaagagaugaccucaguc

SEQ ID NO: 289934 - RNA, 19 nt, Artificial Sequence
  Synthetic
agaagagaugaccucaguc

SEQ ID NO: 289935 - RNA, 20 nt, Artificial Sequence
  Synthetic
cagaagagaugaccucaguc

SEQ ID NO: 289936 - RNA, 21 nt, Artificial Sequence
  Synthetic
acagaagagaugaccucaguc

SEQ ID NO: 289937 - RNA, 22 nt, Artificial Sequence
  Synthetic
aacagaagagaugaccucaguc

SEQ ID NO: 289938 - RNA, 23 nt, Artificial Sequence
  Synthetic
aaacagaagagaugaccucaguc

SEQ ID NO: 289939 - RNA, 24 nt, Artificial Sequence
  Synthetic
gaaacagaagagaugaccucaguc

SEQ ID NO: 289940 - RNA, 18 nt, Artificial Sequence
  Synthetic
agugacccuaccucaguc

SEQ ID NO: 289941 - RNA, 19 nt, Artificial Sequence
  Synthetic
cagugacccuaccucaguc

SEQ ID NO: 289942 - RNA, 20 nt, Artificial Sequence
  Synthetic
gcagugacccuaccucaguc

SEQ ID NO: 289943 - RNA, 21 nt, Artificial Sequence
  Synthetic
ugcagugacccuaccucaguc

SEQ ID NO: 289944 - RNA, 22 nt, Artificial Sequence
  Synthetic
gugcagugacccuaccucaguc

SEQ ID NO: 289945 - RNA, 23 nt, Artificial Sequence
  Synthetic
ugugcagugacccuaccucaguc

SEQ ID NO: 289946 - RNA, 24 nt, Artificial Sequence
  Synthetic
uugugcagugacccuaccucaguc

SEQ ID NO: 289947 - RNA, 18 nt, Artificial Sequence
  Synthetic
ccaugccucaucucaguc

SEQ ID NO: 289948 - RNA, 19 nt, Artificial Sequence
  Synthetic
uccaugccucaucucaguc

SEQ ID NO: 289949 - RNA, 20 nt, Artificial Sequence
  Synthetic
cuccaugccucaucucaguc

SEQ ID NO: 289950 - RNA, 21 nt, Artificial Sequence
  Synthetic
ucuccaugccucaucucaguc

SEQ ID NO: 289951 - RNA, 22 nt, Artificial Sequence
  Synthetic
uucuccaugccucaucucaguc

SEQ ID NO: 289952 - RNA, 23 nt, Artificial Sequence
  Synthetic
auucuccaugccucaucucaguc

SEQ ID NO: 289953 - RNA, 24 nt, Artificial Sequence
  Synthetic
uauucuccaugccucaucucaguc

SEQ ID NO: 289954 - RNA, 18 nt, Artificial Sequence
  Synthetic
aguuugggggucucaguc

SEQ ID NO: 289955 - RNA, 19 nt, Artificial Sequence
  Synthetic
caguuugggggucucaguc

SEQ ID NO: 289956 - RNA, 20 nt, Artificial Sequence
  Synthetic
acaguuugggggucucaguc

SEQ ID NO: 289957 - RNA, 21 nt, Artificial Sequence
  Synthetic
cacaguuugggggucucaguc

SEQ ID NO: 289958 - RNA, 22 nt, Artificial Sequence
  Synthetic
acacaguuugggggucucaguc

SEQ ID NO: 289959 - RNA, 23 nt, Artificial Sequence
  Synthetic
aacacaguuugggggucucaguc

SEQ ID NO: 289960 - RNA, 24 nt, Artificial Sequence
  Synthetic
uaacacaguuugggggucucaguc

SEQ ID NO: 289961 - RNA, 18 nt, Artificial Sequence
  Synthetic
aaaccaucguagucaguc

SEQ ID NO: 289962 - RNA, 19 nt, Artificial Sequence
  Synthetic
caaaccaucguagucaguc

SEQ ID NO: 289963 - RNA, 20 nt, Artificial Sequence
  Synthetic
ucaaaccaucguagucaguc

SEQ ID NO: 289964 - RNA, 21 nt, Artificial Sequence
  Synthetic
gucaaaccaucguagucaguc

SEQ ID NO: 289965 - RNA, 22 nt, Artificial Sequence
  Synthetic
agucaaaccaucguagucaguc

SEQ ID NO: 289966 - RNA, 23 nt, Artificial Sequence
  Synthetic
aagucaaaccaucguagucaguc

SEQ ID NO: 289967 - RNA, 24 nt, Artificial Sequence
  Synthetic
uaagucaaaccaucguagucaguc

SEQ ID NO: 289968 - RNA, 18 nt, Artificial Sequence
  Synthetic
uuaaagugcaugucaguc

SEQ ID NO: 289969 - RNA, 19 nt, Artificial Sequence
  Synthetic
uuuaaagugcaugucaguc

SEQ ID NO: 289970 - RNA, 20 nt, Artificial Sequence
  Synthetic
auuuaaagugcaugucaguc

SEQ ID NO: 289971 - RNA, 21 nt, Artificial Sequence
  Synthetic
uauuuaaagugcaugucaguc

SEQ ID NO: 289972 - RNA, 22 nt, Artificial Sequence
  Synthetic
uuauuuaaagugcaugucaguc

SEQ ID NO: 289973 - RNA, 23 nt, Artificial Sequence
  Synthetic
uuuauuuaaagugcaugucaguc

SEQ ID NO: 289974 - RNA, 24 nt, Artificial Sequence
  Synthetic
uuuuauuuaaagugcaugucaguc

SEQ ID NO: 289975 - RNA, 18 nt, Artificial Sequence
  Synthetic
uguugucauaauucaguc

SEQ ID NO: 289976 - RNA, 19 nt, Artificial Sequence
  Synthetic
cuguugucauaauucaguc

SEQ ID NO: 289977 - RNA, 20 nt, Artificial Sequence
  Synthetic
acuguugucauaauucaguc

SEQ ID NO: 289978 - RNA, 21 nt, Artificial Sequence
  Synthetic
aacuguugucauaauucaguc

SEQ ID NO: 289979 - RNA, 22 nt, Artificial Sequence
  Synthetic
aaacuguugucauaauucaguc

SEQ ID NO: 289980 - RNA, 23 nt, Artificial Sequence
  Synthetic
gaaacuguugucauaauucaguc

SEQ ID NO: 289981 - RNA, 24 nt, Artificial Sequence
  Synthetic
ggaaacuguugucauaauucaguc

SEQ ID NO: 289982 - RNA, 18 nt, Artificial Sequence
  Synthetic
aaucccguggauucaguc

SEQ ID NO: 289983 - RNA, 19 nt, Artificial Sequence
  Synthetic
gaaucccguggauucaguc

SEQ ID NO: 289984 - RNA, 20 nt, Artificial Sequence
  Synthetic
ggaaucccguggauucaguc

SEQ ID NO: 289985 - RNA, 21 nt, Artificial Sequence
  Synthetic
aggaaucccguggauucaguc

SEQ ID NO: 289986 - RNA, 22 nt, Artificial Sequence
  Synthetic
aaggaaucccguggauucaguc

SEQ ID NO: 289987 - RNA, 23 nt, Artificial Sequence
  Synthetic
aaaggaaucccguggauucaguc

SEQ ID NO: 289988 - RNA, 24 nt, Artificial Sequence
  Synthetic
gaaaggaaucccguggauucaguc

SEQ ID NO: 289989 - RNA, 18 nt, Artificial Sequence
  Synthetic
gcuaaaaacuguucaguc

SEQ ID NO: 289990 - RNA, 19 nt, Artificial Sequence
  Synthetic
ugcuaaaaacuguucaguc

SEQ ID NO: 289991 - RNA, 20 nt, Artificial Sequence
  Synthetic
cugcuaaaaacuguucaguc

SEQ ID NO: 289992 - RNA, 21 nt, Artificial Sequence
  Synthetic
ucugcuaaaaacuguucaguc

SEQ ID NO: 289993 - RNA, 22 nt, Artificial Sequence
  Synthetic
cucugcuaaaaacuguucaguc

SEQ ID NO: 289994 - RNA, 23 nt, Artificial Sequence
  Synthetic
gcucugcuaaaaacuguucaguc

SEQ ID NO: 289995 - RNA, 24 nt, Artificial Sequence
  Synthetic
ugcucugcuaaaaacuguucaguc

SEQ ID NO: 289996 - RNA, 18 nt, Artificial Sequence
  Synthetic
gucagaaguauuucaguc

SEQ ID NO: 289997 - RNA, 19 nt, Artificial Sequence
  Synthetic
ggucagaaguauuucaguc

SEQ ID NO: 289998 - RNA, 20 nt, Artificial Sequence
  Synthetic
gggucagaaguauuucaguc

SEQ ID NO: 289999 - RNA, 21 nt, Artificial Sequence
  Synthetic
ggggucagaaguauuucaguc

SEQ ID NO: 290000 - RNA, 22 nt, Artificial Sequence
  Synthetic
uggggucagaaguauuucaguc

SEQ ID NO: 290001 - RNA, 23 nt, Artificial Sequence
  Synthetic
cuggggucagaaguauuucaguc

SEQ ID NO: 290002 - RNA, 24 nt, Artificial Sequence
  Synthetic
gcuggggucagaaguauuucaguc

SEQ ID NO: 290003 - RNA, 18 nt, Artificial Sequence
  Synthetic
uaccaaccaaaaagaguc

SEQ ID NO: 290004 - RNA, 19 nt, Artificial Sequence
  Synthetic
uuaccaaccaaaaagaguc

SEQ ID NO: 290005 - RNA, 20 nt, Artificial Sequence
  Synthetic
cuuaccaaccaaaaagaguc

SEQ ID NO: 290006 - RNA, 21 nt, Artificial Sequence
  Synthetic
gcuuaccaaccaaaaagaguc

SEQ ID NO: 290007 - RNA, 22 nt, Artificial Sequence
  Synthetic
agcuuaccaaccaaaaagaguc

SEQ ID NO: 290008 - RNA, 23 nt, Artificial Sequence
  Synthetic
uagcuuaccaaccaaaaagaguc

SEQ ID NO: 290009 - RNA, 24 nt, Artificial Sequence
  Synthetic
auagcuuaccaaccaaaaagaguc

SEQ ID NO: 290010 - RNA, 18 nt, Artificial Sequence
  Synthetic
gagaggaagcaaagaguc

SEQ ID NO: 290011 - RNA, 19 nt, Artificial Sequence
  Synthetic
ugagaggaagcaaagaguc

SEQ ID NO: 290012 - RNA, 20 nt, Artificial Sequence
  Synthetic
uugagaggaagcaaagaguc

SEQ ID NO: 290013 - RNA, 21 nt, Artificial Sequence
  Synthetic
uuugagaggaagcaaagaguc

SEQ ID NO: 290014 - RNA, 22 nt, Artificial Sequence
  Synthetic
guuugagaggaagcaaagaguc

SEQ ID NO: 290015 - RNA, 23 nt, Artificial Sequence
  Synthetic
aguuugagaggaagcaaagaguc

SEQ ID NO: 290016 - RNA, 24 nt, Artificial Sequence
  Synthetic
gaguuugagaggaagcaaagaguc

SEQ ID NO: 290017 - RNA, 18 nt, Artificial Sequence
  Synthetic
ggugugagagaaagaguc

SEQ ID NO: 290018 - RNA, 19 nt, Artificial Sequence
  Synthetic
aggugugagagaaagaguc

SEQ ID NO: 290019 - RNA, 20 nt, Artificial Sequence
  Synthetic
uaggugugagagaaagaguc

SEQ ID NO: 290020 - RNA, 21 nt, Artificial Sequence
  Synthetic
uuaggugugagagaaagaguc

SEQ ID NO: 290021 - RNA, 22 nt, Artificial Sequence
  Synthetic
uuuaggugugagagaaagaguc

SEQ ID NO: 290022 - RNA, 23 nt, Artificial Sequence
  Synthetic
auuuaggugugagagaaagaguc

SEQ ID NO: 290023 - RNA, 24 nt, Artificial Sequence
  Synthetic
aauuuaggugugagagaaagaguc

SEQ ID NO: 290024 - RNA, 18 nt, Artificial Sequence
  Synthetic
cucuucuggcacagaguc

SEQ ID NO: 290025 - RNA, 19 nt, Artificial Sequence
  Synthetic
ucucuucuggcacagaguc

SEQ ID NO: 290026 - RNA, 20 nt, Artificial Sequence
  Synthetic
aucucuucuggcacagaguc

SEQ ID NO: 290027 - RNA, 21 nt, Artificial Sequence
  Synthetic
aaucucuucuggcacagaguc

SEQ ID NO: 290028 - RNA, 22 nt, Artificial Sequence
  Synthetic
uaaucucuucuggcacagaguc

SEQ ID NO: 290029 - RNA, 23 nt, Artificial Sequence
  Synthetic
guaaucucuucuggcacagaguc

SEQ ID NO: 290030 - RNA, 24 nt, Artificial Sequence
  Synthetic
uguaaucucuucuggcacagaguc

SEQ ID NO: 290031 - RNA, 18 nt, Artificial Sequence
  Synthetic
cucaguagcuucagaguc

SEQ ID NO: 290032 - RNA, 19 nt, Artificial Sequence
  Synthetic
ucucaguagcuucagaguc

SEQ ID NO: 290033 - RNA, 20 nt, Artificial Sequence
  Synthetic
aucucaguagcuucagaguc

SEQ ID NO: 290034 - RNA, 21 nt, Artificial Sequence
  Synthetic
uaucucaguagcuucagaguc

SEQ ID NO: 290035 - RNA, 22 nt, Artificial Sequence
  Synthetic
uuaucucaguagcuucagaguc

SEQ ID NO: 290036 - RNA, 23 nt, Artificial Sequence
  Synthetic
auuaucucaguagcuucagaguc

SEQ ID NO: 290037 - RNA, 24 nt, Artificial Sequence
  Synthetic
uauuaucucaguagcuucagaguc

SEQ ID NO: 290038 - RNA, 18 nt, Artificial Sequence
  Synthetic
aucugcaguuagagaguc

SEQ ID NO: 290039 - RNA, 19 nt, Artificial Sequence
  Synthetic
aaucugcaguuagagaguc

SEQ ID NO: 290040 - RNA, 20 nt, Artificial Sequence
  Synthetic
aaaucugcaguuagagaguc

SEQ ID NO: 290041 - RNA, 21 nt, Artificial Sequence
  Synthetic
aaaaucugcaguuagagaguc

SEQ ID NO: 290042 - RNA, 22 nt, Artificial Sequence
  Synthetic
uaaaaucugcaguuagagaguc

SEQ ID NO: 290043 - RNA, 23 nt, Artificial Sequence
  Synthetic
guaaaaucugcaguuagagaguc

SEQ ID NO: 290044 - RNA, 24 nt, Artificial Sequence
  Synthetic
uguaaaaucugcaguuagagaguc

SEQ ID NO: 290045 - RNA, 18 nt, Artificial Sequence
  Synthetic
uccucuccaaggagaguc

SEQ ID NO: 290046 - RNA, 19 nt, Artificial Sequence
  Synthetic
auccucuccaaggagaguc

SEQ ID NO: 290047 - RNA, 20 nt, Artificial Sequence
  Synthetic
aauccucuccaaggagaguc

SEQ ID NO: 290048 - RNA, 21 nt, Artificial Sequence
  Synthetic
uaauccucuccaaggagaguc

SEQ ID NO: 290049 - RNA, 22 nt, Artificial Sequence
  Synthetic
guaauccucuccaaggagaguc

SEQ ID NO: 290050 - RNA, 23 nt, Artificial Sequence
  Synthetic
gguaauccucuccaaggagaguc

SEQ ID NO: 290051 - RNA, 24 nt, Artificial Sequence
  Synthetic
agguaauccucuccaaggagaguc

SEQ ID NO: 290052 - RNA, 18 nt, Artificial Sequence
  Synthetic
cugccaguauggagaguc

SEQ ID NO: 290053 - RNA, 19 nt, Artificial Sequence
  Synthetic
gcugccaguauggagaguc

SEQ ID NO: 290054 - RNA, 20 nt, Artificial Sequence
  Synthetic
ugcugccaguauggagaguc

SEQ ID NO: 290055 - RNA, 21 nt, Artificial Sequence
  Synthetic
uugcugccaguauggagaguc

SEQ ID NO: 290056 - RNA, 22 nt, Artificial Sequence
  Synthetic
auugcugccaguauggagaguc

SEQ ID NO: 290057 - RNA, 23 nt, Artificial Sequence
  Synthetic
cauugcugccaguauggagaguc

SEQ ID NO: 290058 - RNA, 24 nt, Artificial Sequence
  Synthetic
acauugcugccaguauggagaguc

SEQ ID NO: 290059 - RNA, 18 nt, Artificial Sequence
  Synthetic
ccguaggugaugagaguc

SEQ ID NO: 290060 - RNA, 19 nt, Artificial Sequence
  Synthetic
uccguaggugaugagaguc

SEQ ID NO: 290061 - RNA, 20 nt, Artificial Sequence
  Synthetic
uuccguaggugaugagaguc

SEQ ID NO: 290062 - RNA, 21 nt, Artificial Sequence
  Synthetic
auuccguaggugaugagaguc

SEQ ID NO: 290063 - RNA, 22 nt, Artificial Sequence
  Synthetic
aauuccguaggugaugagaguc

SEQ ID NO: 290064 - RNA, 23 nt, Artificial Sequence
  Synthetic
uaauuccguaggugaugagaguc

SEQ ID NO: 290065 - RNA, 24 nt, Artificial Sequence
  Synthetic
uuaauuccguaggugaugagaguc

SEQ ID NO: 290066 - RNA, 18 nt, Artificial Sequence
  Synthetic
agggcagcacugagaguc

SEQ ID NO: 290067 - RNA, 19 nt, Artificial Sequence
  Synthetic
gagggcagcacugagaguc

SEQ ID NO: 290068 - RNA, 20 nt, Artificial Sequence
  Synthetic
ggagggcagcacugagaguc

SEQ ID NO: 290069 - RNA, 21 nt, Artificial Sequence
  Synthetic
gggagggcagcacugagaguc

SEQ ID NO: 290070 - RNA, 22 nt, Artificial Sequence
  Synthetic
agggagggcagcacugagaguc

SEQ ID NO: 290071 - RNA, 23 nt, Artificial Sequence
  Synthetic
gagggagggcagcacugagaguc

SEQ ID NO: 290072 - RNA, 24 nt, Artificial Sequence
  Synthetic
agagggagggcagcacugagaguc

SEQ ID NO: 290073 - RNA, 18 nt, Artificial Sequence
  Synthetic
gguuuacaagugagaguc

SEQ ID NO: 290074 - RNA, 19 nt, Artificial Sequence
  Synthetic
ugguuuacaagugagaguc

SEQ ID NO: 290075 - RNA, 20 nt, Artificial Sequence
  Synthetic
gugguuuacaagugagaguc

SEQ ID NO: 290076 - RNA, 21 nt, Artificial Sequence
  Synthetic
agugguuuacaagugagaguc

SEQ ID NO: 290077 - RNA, 22 nt, Artificial Sequence
  Synthetic
uagugguuuacaagugagaguc

SEQ ID NO: 290078 - RNA, 23 nt, Artificial Sequence
  Synthetic
uuagugguuuacaagugagaguc

SEQ ID NO: 290079 - RNA, 24 nt, Artificial Sequence
  Synthetic
guuagugguuuacaagugagaguc

SEQ ID NO: 290080 - RNA, 18 nt, Artificial Sequence
  Synthetic
gaagcaaaauugagaguc

SEQ ID NO: 290081 - RNA, 19 nt, Artificial Sequence
  Synthetic
ugaagcaaaauugagaguc

SEQ ID NO: 290082 - RNA, 20 nt, Artificial Sequence
  Synthetic
cugaagcaaaauugagaguc

SEQ ID NO: 290083 - RNA, 21 nt, Artificial Sequence
  Synthetic
acugaagcaaaauugagaguc

SEQ ID NO: 290084 - RNA, 22 nt, Artificial Sequence
  Synthetic
cacugaagcaaaauugagaguc

SEQ ID NO: 290085 - RNA, 23 nt, Artificial Sequence
  Synthetic
ucacugaagcaaaauugagaguc

SEQ ID NO: 290086 - RNA, 24 nt, Artificial Sequence
  Synthetic
aucacugaagcaaaauugagaguc

SEQ ID NO: 290087 - RNA, 18 nt, Artificial Sequence
  Synthetic
aaaccugaauugagaguc

SEQ ID NO: 290088 - RNA, 19 nt, Artificial Sequence
  Synthetic
gaaaccugaauugagaguc

SEQ ID NO: 290089 - RNA, 20 nt, Artificial Sequence
  Synthetic
ugaaaccugaauugagaguc

SEQ ID NO: 290090 - RNA, 21 nt, Artificial Sequence
  Synthetic
augaaaccugaauugagaguc

SEQ ID NO: 290091 - RNA, 22 nt, Artificial Sequence
  Synthetic
aaugaaaccugaauugagaguc

SEQ ID NO: 290092 - RNA, 23 nt, Artificial Sequence
  Synthetic
aaaugaaaccugaauugagaguc

SEQ ID NO: 290093 - RNA, 24 nt, Artificial Sequence
  Synthetic
gaaaugaaaccugaauugagaguc

SEQ ID NO: 290094 - RNA, 18 nt, Artificial Sequence
  Synthetic
aauaggguguugagaguc

SEQ ID NO: 290095 - RNA, 19 nt, Artificial Sequence
  Synthetic
aaauaggguguugagaguc

SEQ ID NO: 290096 - RNA, 20 nt, Artificial Sequence
  Synthetic
aaaauaggguguugagaguc

SEQ ID NO: 290097 - RNA, 21 nt, Artificial Sequence
  Synthetic
gaaaauaggguguugagaguc

SEQ ID NO: 290098 - RNA, 22 nt, Artificial Sequence
  Synthetic
ggaaaauaggguguugagaguc

SEQ ID NO: 290099 - RNA, 23 nt, Artificial Sequence
  Synthetic
aggaaaauaggguguugagaguc

SEQ ID NO: 290100 - RNA, 24 nt, Artificial Sequence
  Synthetic
aaggaaaauaggguguugagaguc

SEQ ID NO: 290101 - RNA, 18 nt, Artificial Sequence
  Synthetic
aauaauacccuuagaguc

SEQ ID NO: 290102 - RNA, 19 nt, Artificial Sequence
  Synthetic
aaauaauacccuuagaguc

SEQ ID NO: 290103 - RNA, 20 nt, Artificial Sequence
  Synthetic
gaaauaauacccuuagaguc

SEQ ID NO: 290104 - RNA, 21 nt, Artificial Sequence
  Synthetic
ggaaauaauacccuuagaguc

SEQ ID NO: 290105 - RNA, 22 nt, Artificial Sequence
  Synthetic
gggaaauaauacccuuagaguc

SEQ ID NO: 290106 - RNA, 23 nt, Artificial Sequence
  Synthetic
ugggaaauaauacccuuagaguc

SEQ ID NO: 290107 - RNA, 24 nt, Artificial Sequence
  Synthetic
uugggaaauaauacccuuagaguc

SEQ ID NO: 290108 - RNA, 18 nt, Artificial Sequence
  Synthetic
uggugauugcaaggaguc

SEQ ID NO: 290109 - RNA, 19 nt, Artificial Sequence
  Synthetic
uuggugauugcaaggaguc

SEQ ID NO: 290110 - RNA, 20 nt, Artificial Sequence
  Synthetic
auuggugauugcaaggaguc

SEQ ID NO: 290111 - RNA, 21 nt, Artificial Sequence
  Synthetic
gauuggugauugcaaggaguc

SEQ ID NO: 290112 - RNA, 22 nt, Artificial Sequence
  Synthetic
agauuggugauugcaaggaguc

SEQ ID NO: 290113 - RNA, 23 nt, Artificial Sequence
  Synthetic
cagauuggugauugcaaggaguc

SEQ ID NO: 290114 - RNA, 24 nt, Artificial Sequence
  Synthetic
acagauuggugauugcaaggaguc

SEQ ID NO: 290115 - RNA, 18 nt, Artificial Sequence
  Synthetic
acaugugcacuaggaguc

SEQ ID NO: 290116 - RNA, 19 nt, Artificial Sequence
  Synthetic
gacaugugcacuaggaguc

SEQ ID NO: 290117 - RNA, 20 nt, Artificial Sequence
  Synthetic
ggacaugugcacuaggaguc

SEQ ID NO: 290118 - RNA, 21 nt, Artificial Sequence
  Synthetic
uggacaugugcacuaggaguc

SEQ ID NO: 290119 - RNA, 22 nt, Artificial Sequence
  Synthetic
cuggacaugugcacuaggaguc

SEQ ID NO: 290120 - RNA, 23 nt, Artificial Sequence
  Synthetic
acuggacaugugcacuaggaguc

SEQ ID NO: 290121 - RNA, 24 nt, Artificial Sequence
  Synthetic
cacuggacaugugcacuaggaguc

SEQ ID NO: 290122 - RNA, 18 nt, Artificial Sequence
  Synthetic
agacauccacugggaguc

SEQ ID NO: 290123 - RNA, 19 nt, Artificial Sequence
  Synthetic
cagacauccacugggaguc

SEQ ID NO: 290124 - RNA, 20 nt, Artificial Sequence
  Synthetic
ucagacauccacugggaguc

SEQ ID NO: 290125 - RNA, 21 nt, Artificial Sequence
  Synthetic
uucagacauccacugggaguc

SEQ ID NO: 290126 - RNA, 22 nt, Artificial Sequence
  Synthetic
uuucagacauccacugggaguc

SEQ ID NO: 290127 - RNA, 23 nt, Artificial Sequence
  Synthetic
guuucagacauccacugggaguc

SEQ ID NO: 290128 - RNA, 24 nt, Artificial Sequence
  Synthetic
aguuucagacauccacugggaguc

SEQ ID NO: 290129 - RNA, 18 nt, Artificial Sequence
  Synthetic
gggcagaucacuggaguc

SEQ ID NO: 290130 - RNA, 19 nt, Artificial Sequence
  Synthetic
ugggcagaucacuggaguc

SEQ ID NO: 290131 - RNA, 20 nt, Artificial Sequence
  Synthetic
augggcagaucacuggaguc

SEQ ID NO: 290132 - RNA, 21 nt, Artificial Sequence
  Synthetic
gaugggcagaucacuggaguc

SEQ ID NO: 290133 - RNA, 22 nt, Artificial Sequence
  Synthetic
ggaugggcagaucacuggaguc

SEQ ID NO: 290134 - RNA, 23 nt, Artificial Sequence
  Synthetic
gggaugggcagaucacuggaguc

SEQ ID NO: 290135 - RNA, 24 nt, Artificial Sequence
  Synthetic
ugggaugggcagaucacuggaguc

SEQ ID NO: 290136 - RNA, 18 nt, Artificial Sequence
  Synthetic
cuuuuuugcuuuggaguc

SEQ ID NO: 290137 - RNA, 19 nt, Artificial Sequence
  Synthetic
ucuuuuuugcuuuggaguc

SEQ ID NO: 290138 - RNA, 20 nt, Artificial Sequence
  Synthetic
cucuuuuuugcuuuggaguc

SEQ ID NO: 290139 - RNA, 21 nt, Artificial Sequence
  Synthetic
ucucuuuuuugcuuuggaguc

SEQ ID NO: 290140 - RNA, 22 nt, Artificial Sequence
  Synthetic
uucucuuuuuugcuuuggaguc

SEQ ID NO: 290141 - RNA, 23 nt, Artificial Sequence
  Synthetic
uuucucuuuuuugcuuuggaguc

SEQ ID NO: 290142 - RNA, 24 nt, Artificial Sequence
  Synthetic
uuuucucuuuuuugcuuuggaguc

SEQ ID NO: 290143 - RNA, 18 nt, Artificial Sequence
  Synthetic
gcuucuuuucaaugaguc

SEQ ID NO: 290144 - RNA, 19 nt, Artificial Sequence
  Synthetic
ugcuucuuuucaaugaguc

SEQ ID NO: 290145 - RNA, 20 nt, Artificial Sequence
  Synthetic
uugcuucuuuucaaugaguc

SEQ ID NO: 290146 - RNA, 21 nt, Artificial Sequence
  Synthetic
guugcuucuuuucaaugaguc

SEQ ID NO: 290147 - RNA, 22 nt, Artificial Sequence
  Synthetic
gguugcuucuuuucaaugaguc

SEQ ID NO: 290148 - RNA, 23 nt, Artificial Sequence
  Synthetic
agguugcuucuuuucaaugaguc

SEQ ID NO: 290149 - RNA, 24 nt, Artificial Sequence
  Synthetic
aagguugcuucuuuucaaugaguc

SEQ ID NO: 290150 - RNA, 18 nt, Artificial Sequence
  Synthetic
agguuuaauagaugaguc

SEQ ID NO: 290151 - RNA, 19 nt, Artificial Sequence
  Synthetic
gagguuuaauagaugaguc

SEQ ID NO: 290152 - RNA, 20 nt, Artificial Sequence
  Synthetic
agagguuuaauagaugaguc

SEQ ID NO: 290153 - RNA, 21 nt, Artificial Sequence
  Synthetic
cagagguuuaauagaugaguc

SEQ ID NO: 290154 - RNA, 22 nt, Artificial Sequence
  Synthetic
ucagagguuuaauagaugaguc

SEQ ID NO: 290155 - RNA, 23 nt, Artificial Sequence
  Synthetic
gucagagguuuaauagaugaguc

SEQ ID NO: 290156 - RNA, 24 nt, Artificial Sequence
  Synthetic
ugucagagguuuaauagaugaguc

SEQ ID NO: 290157 - RNA, 18 nt, Artificial Sequence
  Synthetic
uaacugagcauaugaguc

SEQ ID NO: 290158 - RNA, 19 nt, Artificial Sequence
  Synthetic
guaacugagcauaugaguc

SEQ ID NO: 290159 - RNA, 20 nt, Artificial Sequence
  Synthetic
gguaacugagcauaugaguc

SEQ ID NO: 290160 - RNA, 21 nt, Artificial Sequence
  Synthetic
agguaacugagcauaugaguc

SEQ ID NO: 290161 - RNA, 22 nt, Artificial Sequence
  Synthetic
gagguaacugagcauaugaguc

SEQ ID NO: 290162 - RNA, 23 nt, Artificial Sequence
  Synthetic
ugagguaacugagcauaugaguc

SEQ ID NO: 290163 - RNA, 24 nt, Artificial Sequence
  Synthetic
cugagguaacugagcauaugaguc

SEQ ID NO: 290164 - RNA, 18 nt, Artificial Sequence
  Synthetic
uccauuggcauaugaguc

SEQ ID NO: 290165 - RNA, 19 nt, Artificial Sequence
  Synthetic
guccauuggcauaugaguc

SEQ ID NO: 290166 - RNA, 20 nt, Artificial Sequence
  Synthetic
aguccauuggcauaugaguc

SEQ ID NO: 290167 - RNA, 21 nt, Artificial Sequence
  Synthetic
aaguccauuggcauaugaguc

SEQ ID NO: 290168 - RNA, 22 nt, Artificial Sequence
  Synthetic
gaaguccauuggcauaugaguc

SEQ ID NO: 290169 - RNA, 23 nt, Artificial Sequence
  Synthetic
agaaguccauuggcauaugaguc

SEQ ID NO: 290170 - RNA, 24 nt, Artificial Sequence
  Synthetic
gagaaguccauuggcauaugaguc

SEQ ID NO: 290171 - RNA, 18 nt, Artificial Sequence
  Synthetic
cugaagccaaucugaguc

SEQ ID NO: 290172 - RNA, 19 nt, Artificial Sequence
  Synthetic
ucugaagccaaucugaguc

SEQ ID NO: 290173 - RNA, 20 nt, Artificial Sequence
  Synthetic
aucugaagccaaucugaguc

SEQ ID NO: 290174 - RNA, 21 nt, Artificial Sequence
  Synthetic
caucugaagccaaucugaguc

SEQ ID NO: 290175 - RNA, 22 nt, Artificial Sequence
  Synthetic
acaucugaagccaaucugaguc

SEQ ID NO: 290176 - RNA, 23 nt, Artificial Sequence
  Synthetic
uacaucugaagccaaucugaguc

SEQ ID NO: 290177 - RNA, 24 nt, Artificial Sequence
  Synthetic
auacaucugaagccaaucugaguc

SEQ ID NO: 290178 - RNA, 18 nt, Artificial Sequence
  Synthetic
augagaggagagugaguc

SEQ ID NO: 290179 - RNA, 19 nt, Artificial Sequence
  Synthetic
gaugagaggagagugaguc

SEQ ID NO: 290180 - RNA, 20 nt, Artificial Sequence
  Synthetic
ggaugagaggagagugaguc

SEQ ID NO: 290181 - RNA, 21 nt, Artificial Sequence
  Synthetic
uggaugagaggagagugaguc

SEQ ID NO: 290182 - RNA, 22 nt, Artificial Sequence
  Synthetic
auggaugagaggagagugaguc

SEQ ID NO: 290183 - RNA, 23 nt, Artificial Sequence
  Synthetic
aauggaugagaggagagugaguc

SEQ ID NO: 290184 - RNA, 24 nt, Artificial Sequence
  Synthetic
caauggaugagaggagagugaguc

SEQ ID NO: 290185 - RNA, 18 nt, Artificial Sequence
  Synthetic
auacacuuagugugaguc

SEQ ID NO: 290186 - RNA, 19 nt, Artificial Sequence
  Synthetic
cauacacuuagugugaguc

SEQ ID NO: 290187 - RNA, 20 nt, Artificial Sequence
  Synthetic
ccauacacuuagugugaguc

SEQ ID NO: 290188 - RNA, 21 nt, Artificial Sequence
  Synthetic
uccauacacuuagugugaguc

SEQ ID NO: 290189 - RNA, 22 nt, Artificial Sequence
  Synthetic
cuccauacacuuagugugaguc

SEQ ID NO: 290190 - RNA, 23 nt, Artificial Sequence
  Synthetic
acuccauacacuuagugugaguc

SEQ ID NO: 290191 - RNA, 24 nt, Artificial Sequence
  Synthetic
aacuccauacacuuagugugaguc

SEQ ID NO: 290192 - RNA, 18 nt, Artificial Sequence
  Synthetic
agcugauugaauugaguc

SEQ ID NO: 290193 - RNA, 19 nt, Artificial Sequence
  Synthetic
cagcugauugaauugaguc

SEQ ID NO: 290194 - RNA, 20 nt, Artificial Sequence
  Synthetic
ucagcugauugaauugaguc

SEQ ID NO: 290195 - RNA, 21 nt, Artificial Sequence
  Synthetic
uucagcugauugaauugaguc

SEQ ID NO: 290196 - RNA, 22 nt, Artificial Sequence
  Synthetic
uuucagcugauugaauugaguc

SEQ ID NO: 290197 - RNA, 23 nt, Artificial Sequence
  Synthetic
auuucagcugauugaauugaguc

SEQ ID NO: 290198 - RNA, 24 nt, Artificial Sequence
  Synthetic
cauuucagcugauugaauugaguc

SEQ ID NO: 290199 - RNA, 18 nt, Artificial Sequence
  Synthetic
aggcagaucacuugaguc

SEQ ID NO: 290200 - RNA, 19 nt, Artificial Sequence
  Synthetic
caggcagaucacuugaguc

SEQ ID NO: 290201 - RNA, 20 nt, Artificial Sequence
  Synthetic
gcaggcagaucacuugaguc

SEQ ID NO: 290202 - RNA, 21 nt, Artificial Sequence
  Synthetic
ggcaggcagaucacuugaguc

SEQ ID NO: 290203 - RNA, 22 nt, Artificial Sequence
  Synthetic
aggcaggcagaucacuugaguc

SEQ ID NO: 290204 - RNA, 23 nt, Artificial Sequence
  Synthetic
gaggcaggcagaucacuugaguc

SEQ ID NO: 290205 - RNA, 24 nt, Artificial Sequence
  Synthetic
ugaggcaggcagaucacuugaguc

SEQ ID NO: 290206 - RNA, 18 nt, Artificial Sequence
  Synthetic
aaacucaguuuuugaguc

SEQ ID NO: 290207 - RNA, 19 nt, Artificial Sequence
  Synthetic
caaacucaguuuuugaguc

SEQ ID NO: 290208 - RNA, 20 nt, Artificial Sequence
  Synthetic
gcaaacucaguuuuugaguc

SEQ ID NO: 290209 - RNA, 21 nt, Artificial Sequence
  Synthetic
ugcaaacucaguuuuugaguc

SEQ ID NO: 290210 - RNA, 22 nt, Artificial Sequence
  Synthetic
cugcaaacucaguuuuugaguc

SEQ ID NO: 290211 - RNA, 23 nt, Artificial Sequence
  Synthetic
acugcaaacucaguuuuugaguc

SEQ ID NO: 290212 - RNA, 24 nt, Artificial Sequence
  Synthetic
gacugcaaacucaguuuuugaguc

SEQ ID NO: 290213 - RNA, 18 nt, Artificial Sequence
  Synthetic
augccuucugaaauaguc

SEQ ID NO: 290214 - RNA, 19 nt, Artificial Sequence
  Synthetic
aaugccuucugaaauaguc

SEQ ID NO: 290215 - RNA, 20 nt, Artificial Sequence
  Synthetic
aaaugccuucugaaauaguc

SEQ ID NO: 290216 - RNA, 21 nt, Artificial Sequence
  Synthetic
aaaaugccuucugaaauaguc

SEQ ID NO: 290217 - RNA, 22 nt, Artificial Sequence
  Synthetic
caaaaugccuucugaaauaguc

SEQ ID NO: 290218 - RNA, 23 nt, Artificial Sequence
  Synthetic
acaaaaugccuucugaaauaguc

SEQ ID NO: 290219 - RNA, 24 nt, Artificial Sequence
  Synthetic
gacaaaaugccuucugaaauaguc

SEQ ID NO: 290220 - RNA, 18 nt, Artificial Sequence
  Synthetic
ucucaaaagccaauaguc

SEQ ID NO: 290221 - RNA, 19 nt, Artificial Sequence
  Synthetic
uucucaaaagccaauaguc

SEQ ID NO: 290222 - RNA, 20 nt, Artificial Sequence
  Synthetic
auucucaaaagccaauaguc

SEQ ID NO: 290223 - RNA, 21 nt, Artificial Sequence
  Synthetic
uauucucaaaagccaauaguc

SEQ ID NO: 290224 - RNA, 22 nt, Artificial Sequence
  Synthetic
auauucucaaaagccaauaguc

SEQ ID NO: 290225 - RNA, 23 nt, Artificial Sequence
  Synthetic
aauauucucaaaagccaauaguc

SEQ ID NO: 290226 - RNA, 24 nt, Artificial Sequence
  Synthetic
caauauucucaaaagccaauaguc

SEQ ID NO: 290227 - RNA, 18 nt, Artificial Sequence
  Synthetic
auauaaacaggaauaguc

SEQ ID NO: 290228 - RNA, 19 nt, Artificial Sequence
  Synthetic
aauauaaacaggaauaguc

SEQ ID NO: 290229 - RNA, 20 nt, Artificial Sequence
  Synthetic
gaauauaaacaggaauaguc

SEQ ID NO: 290230 - RNA, 21 nt, Artificial Sequence
  Synthetic
agaauauaaacaggaauaguc

SEQ ID NO: 290231 - RNA, 22 nt, Artificial Sequence
  Synthetic
aagaauauaaacaggaauaguc

SEQ ID NO: 290232 - RNA, 23 nt, Artificial Sequence
  Synthetic
caagaauauaaacaggaauaguc

SEQ ID NO: 290233 - RNA, 24 nt, Artificial Sequence
  Synthetic
ucaagaauauaaacaggaauaguc

SEQ ID NO: 290234 - RNA, 18 nt, Artificial Sequence
  Synthetic
gaaucaaauauaauaguc

SEQ ID NO: 290235 - RNA, 19 nt, Artificial Sequence
  Synthetic
agaaucaaauauaauaguc

SEQ ID NO: 290236 - RNA, 20 nt, Artificial Sequence
  Synthetic
cagaaucaaauauaauaguc

SEQ ID NO: 290237 - RNA, 21 nt, Artificial Sequence
  Synthetic
gcagaaucaaauauaauaguc

SEQ ID NO: 290238 - RNA, 22 nt, Artificial Sequence
  Synthetic
ugcagaaucaaauauaauaguc

SEQ ID NO: 290239 - RNA, 23 nt, Artificial Sequence
  Synthetic
uugcagaaucaaauauaauaguc

SEQ ID NO: 290240 - RNA, 24 nt, Artificial Sequence
  Synthetic
auugcagaaucaaauauaauaguc

SEQ ID NO: 290241 - RNA, 18 nt, Artificial Sequence
  Synthetic
aguuuaaaauaacuaguc

SEQ ID NO: 290242 - RNA, 19 nt, Artificial Sequence
  Synthetic
caguuuaaaauaacuaguc

SEQ ID NO: 290243 - RNA, 20 nt, Artificial Sequence
  Synthetic
acaguuuaaaauaacuaguc

SEQ ID NO: 290244 - RNA, 21 nt, Artificial Sequence
  Synthetic
aacaguuuaaaauaacuaguc

SEQ ID NO: 290245 - RNA, 22 nt, Artificial Sequence
  Synthetic
caacaguuuaaaauaacuaguc

SEQ ID NO: 290246 - RNA, 23 nt, Artificial Sequence
  Synthetic
acaacaguuuaaaauaacuaguc

SEQ ID NO: 290247 - RNA, 24 nt, Artificial Sequence
  Synthetic
uacaacaguuuaaaauaacuaguc

SEQ ID NO: 290248 - RNA, 18 nt, Artificial Sequence
  Synthetic
gcaugggguacacuaguc

SEQ ID NO: 290249 - RNA, 19 nt, Artificial Sequence
  Synthetic
ugcaugggguacacuaguc

SEQ ID NO: 290250 - RNA, 20 nt, Artificial Sequence
  Synthetic
augcaugggguacacuaguc

SEQ ID NO: 290251 - RNA, 21 nt, Artificial Sequence
  Synthetic
caugcaugggguacacuaguc

SEQ ID NO: 290252 - RNA, 22 nt, Artificial Sequence
  Synthetic
ucaugcaugggguacacuaguc

SEQ ID NO: 290253 - RNA, 23 nt, Artificial Sequence
  Synthetic
aucaugcaugggguacacuaguc

SEQ ID NO: 290254 - RNA, 24 nt, Artificial Sequence
  Synthetic
gaucaugcaugggguacacuaguc

SEQ ID NO: 290255 - RNA, 18 nt, Artificial Sequence
  Synthetic
auguuggccaggcuaguc

SEQ ID NO: 290256 - RNA, 19 nt, Artificial Sequence
  Synthetic
cauguuggccaggcuaguc

SEQ ID NO: 290257 - RNA, 20 nt, Artificial Sequence
  Synthetic
ccauguuggccaggcuaguc

SEQ ID NO: 290258 - RNA, 21 nt, Artificial Sequence
  Synthetic
accauguuggccaggcuaguc

SEQ ID NO: 290259 - RNA, 22 nt, Artificial Sequence
  Synthetic
caccauguuggccaggcuaguc

SEQ ID NO: 290260 - RNA, 23 nt, Artificial Sequence
  Synthetic
ucaccauguuggccaggcuaguc

SEQ ID NO: 290261 - RNA, 24 nt, Artificial Sequence
  Synthetic
uucaccauguuggccaggcuaguc

SEQ ID NO: 290262 - RNA, 18 nt, Artificial Sequence
  Synthetic
gagaugaguaggcuaguc

SEQ ID NO: 290263 - RNA, 19 nt, Artificial Sequence
  Synthetic
ugagaugaguaggcuaguc

SEQ ID NO: 290264 - RNA, 20 nt, Artificial Sequence
  Synthetic
cugagaugaguaggcuaguc

SEQ ID NO: 290265 - RNA, 21 nt, Artificial Sequence
  Synthetic
ccugagaugaguaggcuaguc

SEQ ID NO: 290266 - RNA, 22 nt, Artificial Sequence
  Synthetic
uccugagaugaguaggcuaguc

SEQ ID NO: 290267 - RNA, 23 nt, Artificial Sequence
  Synthetic
cuccugagaugaguaggcuaguc

SEQ ID NO: 290268 - RNA, 24 nt, Artificial Sequence
  Synthetic
ccuccugagaugaguaggcuaguc

SEQ ID NO: 290269 - RNA, 18 nt, Artificial Sequence
  Synthetic
auuuauauuuaucuaguc

SEQ ID NO: 290270 - RNA, 19 nt, Artificial Sequence
  Synthetic
aauuuauauuuaucuaguc

SEQ ID NO: 290271 - RNA, 20 nt, Artificial Sequence
  Synthetic
aaauuuauauuuaucuaguc

SEQ ID NO: 290272 - RNA, 21 nt, Artificial Sequence
  Synthetic
aaaauuuauauuuaucuaguc

SEQ ID NO: 290273 - RNA, 22 nt, Artificial Sequence
  Synthetic
uaaaauuuauauuuaucuaguc

SEQ ID NO: 290274 - RNA, 23 nt, Artificial Sequence
  Synthetic
uuaaaauuuauauuuaucuaguc

SEQ ID NO: 290275 - RNA, 24 nt, Artificial Sequence
  Synthetic
guuaaaauuuauauuuaucuaguc

SEQ ID NO: 290276 - RNA, 18 nt, Artificial Sequence
  Synthetic
gagcugcuuagucuaguc

SEQ ID NO: 290277 - RNA, 19 nt, Artificial Sequence
  Synthetic
ggagcugcuuagucuaguc

SEQ ID NO: 290278 - RNA, 20 nt, Artificial Sequence
  Synthetic
uggagcugcuuagucuaguc

SEQ ID NO: 290279 - RNA, 21 nt, Artificial Sequence
  Synthetic
auggagcugcuuagucuaguc

SEQ ID NO: 290280 - RNA, 22 nt, Artificial Sequence
  Synthetic
aauggagcugcuuagucuaguc

SEQ ID NO: 290281 - RNA, 23 nt, Artificial Sequence
  Synthetic
caauggagcugcuuagucuaguc

SEQ ID NO: 290282 - RNA, 24 nt, Artificial Sequence
  Synthetic
ccaauggagcugcuuagucuaguc

SEQ ID NO: 290283 - RNA, 18 nt, Artificial Sequence
  Synthetic
gggggggaaaaaguaguc

SEQ ID NO: 290284 - RNA, 19 nt, Artificial Sequence
  Synthetic
ugggggggaaaaaguaguc

SEQ ID NO: 290285 - RNA, 20 nt, Artificial Sequence
  Synthetic
uugggggggaaaaaguaguc

SEQ ID NO: 290286 - RNA, 21 nt, Artificial Sequence
  Synthetic
auugggggggaaaaaguaguc

SEQ ID NO: 290287 - RNA, 22 nt, Artificial Sequence
  Synthetic
aauugggggggaaaaaguaguc

SEQ ID NO: 290288 - RNA, 23 nt, Artificial Sequence
  Synthetic
uaauugggggggaaaaaguaguc

SEQ ID NO: 290289 - RNA, 24 nt, Artificial Sequence
  Synthetic
auaauugggggggaaaaaguaguc

SEQ ID NO: 290290 - RNA, 18 nt, Artificial Sequence
  Synthetic
ugacccuucagaguaguc

SEQ ID NO: 290291 - RNA, 19 nt, Artificial Sequence
  Synthetic
augacccuucagaguaguc

SEQ ID NO: 290292 - RNA, 20 nt, Artificial Sequence
  Synthetic
aaugacccuucagaguaguc

SEQ ID NO: 290293 - RNA, 21 nt, Artificial Sequence
  Synthetic
gaaugacccuucagaguaguc

SEQ ID NO: 290294 - RNA, 22 nt, Artificial Sequence
  Synthetic
cgaaugacccuucagaguaguc

SEQ ID NO: 290295 - RNA, 23 nt, Artificial Sequence
  Synthetic
ucgaaugacccuucagaguaguc

SEQ ID NO: 290296 - RNA, 24 nt, Artificial Sequence
  Synthetic
uucgaaugacccuucagaguaguc

SEQ ID NO: 290297 - RNA, 18 nt, Artificial Sequence
  Synthetic
aacagaaaauccguaguc

SEQ ID NO: 290298 - RNA, 19 nt, Artificial Sequence
  Synthetic
aaacagaaaauccguaguc

SEQ ID NO: 290299 - RNA, 20 nt, Artificial Sequence
  Synthetic
gaaacagaaaauccguaguc

SEQ ID NO: 290300 - RNA, 21 nt, Artificial Sequence
  Synthetic
agaaacagaaaauccguaguc

SEQ ID NO: 290301 - RNA, 22 nt, Artificial Sequence
  Synthetic
aagaaacagaaaauccguaguc

SEQ ID NO: 290302 - RNA, 23 nt, Artificial Sequence
  Synthetic
gaagaaacagaaaauccguaguc

SEQ ID NO: 290303 - RNA, 24 nt, Artificial Sequence
  Synthetic
agaagaaacagaaaauccguaguc

SEQ ID NO: 290304 - RNA, 18 nt, Artificial Sequence
  Synthetic
uuacugcacaaauuaguc

SEQ ID NO: 290305 - RNA, 19 nt, Artificial Sequence
  Synthetic
uuuacugcacaaauuaguc

SEQ ID NO: 290306 - RNA, 20 nt, Artificial Sequence
  Synthetic
auuuacugcacaaauuaguc

SEQ ID NO: 290307 - RNA, 21 nt, Artificial Sequence
  Synthetic
uauuuacugcacaaauuaguc

SEQ ID NO: 290308 - RNA, 22 nt, Artificial Sequence
  Synthetic
cuauuuacugcacaaauuaguc

SEQ ID NO: 290309 - RNA, 23 nt, Artificial Sequence
  Synthetic
ucuauuuacugcacaaauuaguc

SEQ ID NO: 290310 - RNA, 24 nt, Artificial Sequence
  Synthetic
aucuauuuacugcacaaauuaguc

SEQ ID NO: 290311 - RNA, 18 nt, Artificial Sequence
  Synthetic
gagcuguuauaauuaguc

SEQ ID NO: 290312 - RNA, 19 nt, Artificial Sequence
  Synthetic
agagcuguuauaauuaguc

SEQ ID NO: 290313 - RNA, 20 nt, Artificial Sequence
  Synthetic
gagagcuguuauaauuaguc

SEQ ID NO: 290314 - RNA, 21 nt, Artificial Sequence
  Synthetic
agagagcuguuauaauuaguc

SEQ ID NO: 290315 - RNA, 22 nt, Artificial Sequence
  Synthetic
uagagagcuguuauaauuaguc

SEQ ID NO: 290316 - RNA, 23 nt, Artificial Sequence
  Synthetic
auagagagcuguuauaauuaguc

SEQ ID NO: 290317 - RNA, 24 nt, Artificial Sequence
  Synthetic
cauagagagcuguuauaauuaguc

SEQ ID NO: 290318 - RNA, 18 nt, Artificial Sequence
  Synthetic
cagaccacaccauuaguc

SEQ ID NO: 290319 - RNA, 19 nt, Artificial Sequence
  Synthetic
gcagaccacaccauuaguc

SEQ ID NO: 290320 - RNA, 20 nt, Artificial Sequence
  Synthetic
ugcagaccacaccauuaguc

SEQ ID NO: 290321 - RNA, 21 nt, Artificial Sequence
  Synthetic
augcagaccacaccauuaguc

SEQ ID NO: 290322 - RNA, 22 nt, Artificial Sequence
  Synthetic
gaugcagaccacaccauuaguc

SEQ ID NO: 290323 - RNA, 23 nt, Artificial Sequence
  Synthetic
ugaugcagaccacaccauuaguc

SEQ ID NO: 290324 - RNA, 24 nt, Artificial Sequence
  Synthetic
augaugcagaccacaccauuaguc

SEQ ID NO: 290325 - RNA, 18 nt, Artificial Sequence
  Synthetic
uaauuguuaaacuuaguc

SEQ ID NO: 290326 - RNA, 19 nt, Artificial Sequence
  Synthetic
auaauuguuaaacuuaguc

SEQ ID NO: 290327 - RNA, 20 nt, Artificial Sequence
  Synthetic
aauaauuguuaaacuuaguc

SEQ ID NO: 290328 - RNA, 21 nt, Artificial Sequence
  Synthetic
caauaauuguuaaacuuaguc

SEQ ID NO: 290329 - RNA, 22 nt, Artificial Sequence
  Synthetic
acaauaauuguuaaacuuaguc

SEQ ID NO: 290330 - RNA, 23 nt, Artificial Sequence
  Synthetic
aacaauaauuguuaaacuuaguc

SEQ ID NO: 290331 - RNA, 24 nt, Artificial Sequence
  Synthetic
uaacaauaauuguuaaacuuaguc

SEQ ID NO: 290332 - RNA, 18 nt, Artificial Sequence
  Synthetic
augagacugcucuuaguc

SEQ ID NO: 290333 - RNA, 19 nt, Artificial Sequence
  Synthetic
caugagacugcucuuaguc

SEQ ID NO: 290334 - RNA, 20 nt, Artificial Sequence
  Synthetic
acaugagacugcucuuaguc

SEQ ID NO: 290335 - RNA, 21 nt, Artificial Sequence
  Synthetic
gacaugagacugcucuuaguc

SEQ ID NO: 290336 - RNA, 22 nt, Artificial Sequence
  Synthetic
ggacaugagacugcucuuaguc

SEQ ID NO: 290337 - RNA, 23 nt, Artificial Sequence
  Synthetic
aggacaugagacugcucuuaguc

SEQ ID NO: 290338 - RNA, 24 nt, Artificial Sequence
  Synthetic
uaggacaugagacugcucuuaguc

SEQ ID NO: 290339 - RNA, 18 nt, Artificial Sequence
  Synthetic
uagaacuugccguuaguc

SEQ ID NO: 290340 - RNA, 19 nt, Artificial Sequence
  Synthetic
auagaacuugccguuaguc

SEQ ID NO: 290341 - RNA, 20 nt, Artificial Sequence
  Synthetic
aauagaacuugccguuaguc

SEQ ID NO: 290342 - RNA, 21 nt, Artificial Sequence
  Synthetic
uaauagaacuugccguuaguc

SEQ ID NO: 290343 - RNA, 22 nt, Artificial Sequence
  Synthetic
uuaauagaacuugccguuaguc

SEQ ID NO: 290344 - RNA, 23 nt, Artificial Sequence
  Synthetic
uuuaauagaacuugccguuaguc

SEQ ID NO: 290345 - RNA, 24 nt, Artificial Sequence
  Synthetic
cuuuaauagaacuugccguuaguc

SEQ ID NO: 290346 - RNA, 18 nt, Artificial Sequence
  Synthetic
ucaaggaauucguuaguc

SEQ ID NO: 290347 - RNA, 19 nt, Artificial Sequence
  Synthetic
cucaaggaauucguuaguc

SEQ ID NO: 290348 - RNA, 20 nt, Artificial Sequence
  Synthetic
acucaaggaauucguuaguc

SEQ ID NO: 290349 - RNA, 21 nt, Artificial Sequence
  Synthetic
cacucaaggaauucguuaguc

SEQ ID NO: 290350 - RNA, 22 nt, Artificial Sequence
  Synthetic
gcacucaaggaauucguuaguc

SEQ ID NO: 290351 - RNA, 23 nt, Artificial Sequence
  Synthetic
ugcacucaaggaauucguuaguc

SEQ ID NO: 290352 - RNA, 24 nt, Artificial Sequence
  Synthetic
cugcacucaaggaauucguuaguc

SEQ ID NO: 290353 - RNA, 18 nt, Artificial Sequence
  Synthetic
ggguuaaaaacuuuaguc

SEQ ID NO: 290354 - RNA, 19 nt, Artificial Sequence
  Synthetic
gggguuaaaaacuuuaguc

SEQ ID NO: 290355 - RNA, 20 nt, Artificial Sequence
  Synthetic
agggguuaaaaacuuuaguc

SEQ ID NO: 290356 - RNA, 21 nt, Artificial Sequence
  Synthetic
aagggguuaaaaacuuuaguc

SEQ ID NO: 290357 - RNA, 22 nt, Artificial Sequence
  Synthetic
aaagggguuaaaaacuuuaguc

SEQ ID NO: 290358 - RNA, 23 nt, Artificial Sequence
  Synthetic
aaaagggguuaaaaacuuuaguc

SEQ ID NO: 290359 - RNA, 24 nt, Artificial Sequence
  Synthetic
caaaagggguuaaaaacuuuaguc

SEQ ID NO: 290360 - RNA, 18 nt, Artificial Sequence
  Synthetic
augcaagaaacuuuaguc

SEQ ID NO: 290361 - RNA, 19 nt, Artificial Sequence
  Synthetic
gaugcaagaaacuuuaguc

SEQ ID NO: 290362 - RNA, 20 nt, Artificial Sequence
  Synthetic
ggaugcaagaaacuuuaguc

SEQ ID NO: 290363 - RNA, 21 nt, Artificial Sequence
  Synthetic
gggaugcaagaaacuuuaguc

SEQ ID NO: 290364 - RNA, 22 nt, Artificial Sequence
  Synthetic
cgggaugcaagaaacuuuaguc

SEQ ID NO: 290365 - RNA, 23 nt, Artificial Sequence
  Synthetic
acgggaugcaagaaacuuuaguc

SEQ ID NO: 290366 - RNA, 24 nt, Artificial Sequence
  Synthetic
cacgggaugcaagaaacuuuaguc

SEQ ID NO: 290367 - RNA, 18 nt, Artificial Sequence
  Synthetic
cuucuuccugguuuaguc

SEQ ID NO: 290368 - RNA, 19 nt, Artificial Sequence
  Synthetic
acuucuuccugguuuaguc

SEQ ID NO: 290369 - RNA, 20 nt, Artificial Sequence
  Synthetic
aacuucuuccugguuuaguc

SEQ ID NO: 290370 - RNA, 21 nt, Artificial Sequence
  Synthetic
caacuucuuccugguuuaguc

SEQ ID NO: 290371 - RNA, 22 nt, Artificial Sequence
  Synthetic
ucaacuucuuccugguuuaguc

SEQ ID NO: 290372 - RNA, 23 nt, Artificial Sequence
  Synthetic
uucaacuucuuccugguuuaguc

SEQ ID NO: 290373 - RNA, 24 nt, Artificial Sequence
  Synthetic
auucaacuucuuccugguuuaguc

SEQ ID NO: 290374 - RNA, 18 nt, Artificial Sequence
  Synthetic
gcuuuugguguuuuaguc

SEQ ID NO: 290375 - RNA, 19 nt, Artificial Sequence
  Synthetic
ugcuuuugguguuuuaguc

SEQ ID NO: 290376 - RNA, 20 nt, Artificial Sequence
  Synthetic
uugcuuuugguguuuuaguc

SEQ ID NO: 290377 - RNA, 21 nt, Artificial Sequence
  Synthetic
guugcuuuugguguuuuaguc

SEQ ID NO: 290378 - RNA, 22 nt, Artificial Sequence
  Synthetic
uguugcuuuugguguuuuaguc

SEQ ID NO: 290379 - RNA, 23 nt, Artificial Sequence
  Synthetic
cuguugcuuuugguguuuuaguc

SEQ ID NO: 290380 - RNA, 24 nt, Artificial Sequence
  Synthetic
gcuguugcuuuugguguuuuaguc

SEQ ID NO: 290381 - RNA, 18 nt, Artificial Sequence
  Synthetic
auuuaacauuuuuuaguc

SEQ ID NO: 290382 - RNA, 19 nt, Artificial Sequence
  Synthetic
uauuuaacauuuuuuaguc

SEQ ID NO: 290383 - RNA, 20 nt, Artificial Sequence
  Synthetic
auauuuaacauuuuuuaguc

SEQ ID NO: 290384 - RNA, 21 nt, Artificial Sequence
  Synthetic
aauauuuaacauuuuuuaguc

SEQ ID NO: 290385 - RNA, 22 nt, Artificial Sequence
  Synthetic
aaauauuuaacauuuuuuaguc

SEQ ID NO: 290386 - RNA, 23 nt, Artificial Sequence
  Synthetic
gaaauauuuaacauuuuuuaguc

SEQ ID NO: 290387 - RNA, 24 nt, Artificial Sequence
  Synthetic
agaaauauuuaacauuuuuuaguc

SEQ ID NO: 290388 - RNA, 18 nt, Artificial Sequence
  Synthetic
ccuuucgaauaucacguc

SEQ ID NO: 290389 - RNA, 19 nt, Artificial Sequence
  Synthetic
uccuuucgaauaucacguc

SEQ ID NO: 290390 - RNA, 20 nt, Artificial Sequence
  Synthetic
uuccuuucgaauaucacguc

SEQ ID NO: 290391 - RNA, 21 nt, Artificial Sequence
  Synthetic
cuuccuuucgaauaucacguc

SEQ ID NO: 290392 - RNA, 22 nt, Artificial Sequence
  Synthetic
gcuuccuuucgaauaucacguc

SEQ ID NO: 290393 - RNA, 23 nt, Artificial Sequence
  Synthetic
ugcuuccuuucgaauaucacguc

SEQ ID NO: 290394 - RNA, 24 nt, Artificial Sequence
  Synthetic
augcuuccuuucgaauaucacguc

SEQ ID NO: 290395 - RNA, 18 nt, Artificial Sequence
  Synthetic
cucaaagucuaauacguc

SEQ ID NO: 290396 - RNA, 19 nt, Artificial Sequence
  Synthetic
ccucaaagucuaauacguc

SEQ ID NO: 290397 - RNA, 20 nt, Artificial Sequence
  Synthetic
uccucaaagucuaauacguc

SEQ ID NO: 290398 - RNA, 21 nt, Artificial Sequence
  Synthetic
uuccucaaagucuaauacguc

SEQ ID NO: 290399 - RNA, 22 nt, Artificial Sequence
  Synthetic
cuuccucaaagucuaauacguc

SEQ ID NO: 290400 - RNA, 23 nt, Artificial Sequence
  Synthetic
acuuccucaaagucuaauacguc

SEQ ID NO: 290401 - RNA, 24 nt, Artificial Sequence
  Synthetic
aacuuccucaaagucuaauacguc

SEQ ID NO: 290402 - RNA, 18 nt, Artificial Sequence
  Synthetic
caauacgugcagcccguc

SEQ ID NO: 290403 - RNA, 19 nt, Artificial Sequence
  Synthetic
ccaauacgugcagcccguc

SEQ ID NO: 290404 - RNA, 20 nt, Artificial Sequence
  Synthetic
accaauacgugcagcccguc

SEQ ID NO: 290405 - RNA, 21 nt, Artificial Sequence
  Synthetic
aaccaauacgugcagcccguc

SEQ ID NO: 290406 - RNA, 22 nt, Artificial Sequence
  Synthetic
caaccaauacgugcagcccguc

SEQ ID NO: 290407 - RNA, 23 nt, Artificial Sequence
  Synthetic
ucaaccaauacgugcagcccguc

SEQ ID NO: 290408 - RNA, 24 nt, Artificial Sequence
  Synthetic
aucaaccaauacgugcagcccguc

SEQ ID NO: 290409 - RNA, 18 nt, Artificial Sequence
  Synthetic
aguguaaacaaagccguc

SEQ ID NO: 290410 - RNA, 19 nt, Artificial Sequence
  Synthetic
caguguaaacaaagccguc

SEQ ID NO: 290411 - RNA, 20 nt, Artificial Sequence
  Synthetic
acaguguaaacaaagccguc

SEQ ID NO: 290412 - RNA, 21 nt, Artificial Sequence
  Synthetic
cacaguguaaacaaagccguc

SEQ ID NO: 290413 - RNA, 22 nt, Artificial Sequence
  Synthetic
ucacaguguaaacaaagccguc

SEQ ID NO: 290414 - RNA, 23 nt, Artificial Sequence
  Synthetic
cucacaguguaaacaaagccguc

SEQ ID NO: 290415 - RNA, 24 nt, Artificial Sequence
  Synthetic
ccucacaguguaaacaaagccguc

SEQ ID NO: 290416 - RNA, 18 nt, Artificial Sequence
  Synthetic
ucuguuuauauagccguc

SEQ ID NO: 290417 - RNA, 19 nt, Artificial Sequence
  Synthetic
uucuguuuauauagccguc

SEQ ID NO: 290418 - RNA, 20 nt, Artificial Sequence
  Synthetic
auucuguuuauauagccguc

SEQ ID NO: 290419 - RNA, 21 nt, Artificial Sequence
  Synthetic
gauucuguuuauauagccguc

SEQ ID NO: 290420 - RNA, 22 nt, Artificial Sequence
  Synthetic
ugauucuguuuauauagccguc

SEQ ID NO: 290421 - RNA, 23 nt, Artificial Sequence
  Synthetic
augauucuguuuauauagccguc

SEQ ID NO: 290422 - RNA, 24 nt, Artificial Sequence
  Synthetic
aaugauucuguuuauauagccguc

SEQ ID NO: 290423 - RNA, 18 nt, Artificial Sequence
  Synthetic
ugaaugauacacaucguc

SEQ ID NO: 290424 - RNA, 19 nt, Artificial Sequence
  Synthetic
gugaaugauacacaucguc

SEQ ID NO: 290425 - RNA, 20 nt, Artificial Sequence
  Synthetic
ugugaaugauacacaucguc

SEQ ID NO: 290426 - RNA, 21 nt, Artificial Sequence
  Synthetic
uugugaaugauacacaucguc

SEQ ID NO: 290427 - RNA, 22 nt, Artificial Sequence
  Synthetic
uuugugaaugauacacaucguc

SEQ ID NO: 290428 - RNA, 23 nt, Artificial Sequence
  Synthetic
auuugugaaugauacacaucguc

SEQ ID NO: 290429 - RNA, 24 nt, Artificial Sequence
  Synthetic
uauuugugaaugauacacaucguc

SEQ ID NO: 290430 - RNA, 18 nt, Artificial Sequence
  Synthetic
caacuuaacaguaucguc

SEQ ID NO: 290431 - RNA, 19 nt, Artificial Sequence
  Synthetic
acaacuuaacaguaucguc

SEQ ID NO: 290432 - RNA, 20 nt, Artificial Sequence
  Synthetic
uacaacuuaacaguaucguc

SEQ ID NO: 290433 - RNA, 21 nt, Artificial Sequence
  Synthetic
auacaacuuaacaguaucguc

SEQ ID NO: 290434 - RNA, 22 nt, Artificial Sequence
  Synthetic
uauacaacuuaacaguaucguc

SEQ ID NO: 290435 - RNA, 23 nt, Artificial Sequence
  Synthetic
cuauacaacuuaacaguaucguc

SEQ ID NO: 290436 - RNA, 24 nt, Artificial Sequence
  Synthetic
ccuauacaacuuaacaguaucguc

SEQ ID NO: 290437 - RNA, 18 nt, Artificial Sequence
  Synthetic
cuuuagccuuggcucguc

SEQ ID NO: 290438 - RNA, 19 nt, Artificial Sequence
  Synthetic
ccuuuagccuuggcucguc

SEQ ID NO: 290439 - RNA, 20 nt, Artificial Sequence
  Synthetic
cccuuuagccuuggcucguc

SEQ ID NO: 290440 - RNA, 21 nt, Artificial Sequence
  Synthetic
ucccuuuagccuuggcucguc

SEQ ID NO: 290441 - RNA, 22 nt, Artificial Sequence
  Synthetic
aucccuuuagccuuggcucguc

SEQ ID NO: 290442 - RNA, 23 nt, Artificial Sequence
  Synthetic
uaucccuuuagccuuggcucguc

SEQ ID NO: 290443 - RNA, 24 nt, Artificial Sequence
  Synthetic
guaucccuuuagccuuggcucguc

SEQ ID NO: 290444 - RNA, 18 nt, Artificial Sequence
  Synthetic
ucagaauuugaagucguc

SEQ ID NO: 290445 - RNA, 19 nt, Artificial Sequence
  Synthetic
uucagaauuugaagucguc

SEQ ID NO: 290446 - RNA, 20 nt, Artificial Sequence
  Synthetic
uuucagaauuugaagucguc

SEQ ID NO: 290447 - RNA, 21 nt, Artificial Sequence
  Synthetic
auuucagaauuugaagucguc

SEQ ID NO: 290448 - RNA, 22 nt, Artificial Sequence
  Synthetic
gauuucagaauuugaagucguc

SEQ ID NO: 290449 - RNA, 23 nt, Artificial Sequence
  Synthetic
agauuucagaauuugaagucguc

SEQ ID NO: 290450 - RNA, 24 nt, Artificial Sequence
  Synthetic
gagauuucagaauuugaagucguc

SEQ ID NO: 290451 - RNA, 18 nt, Artificial Sequence
  Synthetic
ucaucuucuuuugucguc

SEQ ID NO: 290452 - RNA, 19 nt, Artificial Sequence
  Synthetic
uucaucuucuuuugucguc

SEQ ID NO: 290453 - RNA, 20 nt, Artificial Sequence
  Synthetic
uuucaucuucuuuugucguc

SEQ ID NO: 290454 - RNA, 21 nt, Artificial Sequence
  Synthetic
uuuucaucuucuuuugucguc

SEQ ID NO: 290455 - RNA, 22 nt, Artificial Sequence
  Synthetic
auuuucaucuucuuuugucguc

SEQ ID NO: 290456 - RNA, 23 nt, Artificial Sequence
  Synthetic
cauuuucaucuucuuuugucguc

SEQ ID NO: 290457 - RNA, 24 nt, Artificial Sequence
  Synthetic
acauuuucaucuucuuuugucguc

SEQ ID NO: 290458 - RNA, 18 nt, Artificial Sequence
  Synthetic
cagucaaaugaaaagguc

SEQ ID NO: 290459 - RNA, 19 nt, Artificial Sequence
  Synthetic
ucagucaaaugaaaagguc

SEQ ID NO: 290460 - RNA, 20 nt, Artificial Sequence
  Synthetic
uucagucaaaugaaaagguc

SEQ ID NO: 290461 - RNA, 21 nt, Artificial Sequence
  Synthetic
uuucagucaaaugaaaagguc

SEQ ID NO: 290462 - RNA, 22 nt, Artificial Sequence
  Synthetic
guuucagucaaaugaaaagguc

SEQ ID NO: 290463 - RNA, 23 nt, Artificial Sequence
  Synthetic
gguuucagucaaaugaaaagguc

SEQ ID NO: 290464 - RNA, 24 nt, Artificial Sequence
  Synthetic
agguuucagucaaaugaaaagguc

SEQ ID NO: 290465 - RNA, 18 nt, Artificial Sequence
  Synthetic
acaagaauugaaaagguc

SEQ ID NO: 290466 - RNA, 19 nt, Artificial Sequence
  Synthetic
aacaagaauugaaaagguc

SEQ ID NO: 290467 - RNA, 20 nt, Artificial Sequence
  Synthetic
aaacaagaauugaaaagguc

SEQ ID NO: 290468 - RNA, 21 nt, Artificial Sequence
  Synthetic
caaacaagaauugaaaagguc

SEQ ID NO: 290469 - RNA, 22 nt, Artificial Sequence
  Synthetic
ccaaacaagaauugaaaagguc

SEQ ID NO: 290470 - RNA, 23 nt, Artificial Sequence
  Synthetic
uccaaacaagaauugaaaagguc

SEQ ID NO: 290471 - RNA, 24 nt, Artificial Sequence
  Synthetic
cuccaaacaagaauugaaaagguc

SEQ ID NO: 290472 - RNA, 18 nt, Artificial Sequence
  Synthetic
ggagaauagucaaagguc

SEQ ID NO: 290473 - RNA, 19 nt, Artificial Sequence
  Synthetic
uggagaauagucaaagguc

SEQ ID NO: 290474 - RNA, 20 nt, Artificial Sequence
  Synthetic
auggagaauagucaaagguc

SEQ ID NO: 290475 - RNA, 21 nt, Artificial Sequence
  Synthetic
gauggagaauagucaaagguc

SEQ ID NO: 290476 - RNA, 22 nt, Artificial Sequence
  Synthetic
ggauggagaauagucaaagguc

SEQ ID NO: 290477 - RNA, 23 nt, Artificial Sequence
  Synthetic
aggauggagaauagucaaagguc

SEQ ID NO: 290478 - RNA, 24 nt, Artificial Sequence
  Synthetic
gaggauggagaauagucaaagguc

SEQ ID NO: 290479 - RNA, 18 nt, Artificial Sequence
  Synthetic
aaaaguguaggaaagguc

SEQ ID NO: 290480 - RNA, 19 nt, Artificial Sequence
  Synthetic
aaaaaguguaggaaagguc

SEQ ID NO: 290481 - RNA, 20 nt, Artificial Sequence
  Synthetic
uaaaaaguguaggaaagguc

SEQ ID NO: 290482 - RNA, 21 nt, Artificial Sequence
  Synthetic
auaaaaaguguaggaaagguc

SEQ ID NO: 290483 - RNA, 22 nt, Artificial Sequence
  Synthetic
aauaaaaaguguaggaaagguc

SEQ ID NO: 290484 - RNA, 23 nt, Artificial Sequence
  Synthetic
gaauaaaaaguguaggaaagguc

SEQ ID NO: 290485 - RNA, 24 nt, Artificial Sequence
  Synthetic
agaauaaaaaguguaggaaagguc

SEQ ID NO: 290486 - RNA, 18 nt, Artificial Sequence
  Synthetic
cgggcagaucacaagguc

SEQ ID NO: 290487 - RNA, 19 nt, Artificial Sequence
  Synthetic
gcgggcagaucacaagguc

SEQ ID NO: 290488 - RNA, 20 nt, Artificial Sequence
  Synthetic
ggcgggcagaucacaagguc

SEQ ID NO: 290489 - RNA, 21 nt, Artificial Sequence
  Synthetic
aggcgggcagaucacaagguc

SEQ ID NO: 290490 - RNA, 22 nt, Artificial Sequence
  Synthetic
caggcgggcagaucacaagguc

SEQ ID NO: 290491 - RNA, 23 nt, Artificial Sequence
  Synthetic
ccaggcgggcagaucacaagguc

SEQ ID NO: 290492 - RNA, 24 nt, Artificial Sequence
  Synthetic
cccaggcgggcagaucacaagguc

SEQ ID NO: 290493 - RNA, 18 nt, Artificial Sequence
  Synthetic
ucuugacuucucaagguc

SEQ ID NO: 290494 - RNA, 19 nt, Artificial Sequence
  Synthetic
uucuugacuucucaagguc

SEQ ID NO: 290495 - RNA, 20 nt, Artificial Sequence
  Synthetic
cuucuugacuucucaagguc

SEQ ID NO: 290496 - RNA, 21 nt, Artificial Sequence
  Synthetic
acuucuugacuucucaagguc

SEQ ID NO: 290497 - RNA, 22 nt, Artificial Sequence
  Synthetic
gacuucuugacuucucaagguc

SEQ ID NO: 290498 - RNA, 23 nt, Artificial Sequence
  Synthetic
agacuucuugacuucucaagguc

SEQ ID NO: 290499 - RNA, 24 nt, Artificial Sequence
  Synthetic
gagacuucuugacuucucaagguc

SEQ ID NO: 290500 - RNA, 18 nt, Artificial Sequence
  Synthetic
uucaaaaguuucaagguc

SEQ ID NO: 290501 - RNA, 19 nt, Artificial Sequence
  Synthetic
auucaaaaguuucaagguc

SEQ ID NO: 290502 - RNA, 20 nt, Artificial Sequence
  Synthetic
uauucaaaaguuucaagguc

SEQ ID NO: 290503 - RNA, 21 nt, Artificial Sequence
  Synthetic
cuauucaaaaguuucaagguc

SEQ ID NO: 290504 - RNA, 22 nt, Artificial Sequence
  Synthetic
ccuauucaaaaguuucaagguc

SEQ ID NO: 290505 - RNA, 23 nt, Artificial Sequence
  Synthetic
uccuauucaaaaguuucaagguc

SEQ ID NO: 290506 - RNA, 24 nt, Artificial Sequence
  Synthetic
guccuauucaaaaguuucaagguc

SEQ ID NO: 290507 - RNA, 18 nt, Artificial Sequence
  Synthetic
gucaagaaugcgaagguc

SEQ ID NO: 290508 - RNA, 19 nt, Artificial Sequence
  Synthetic
ggucaagaaugcgaagguc

SEQ ID NO: 290509 - RNA, 20 nt, Artificial Sequence
  Synthetic
gggucaagaaugcgaagguc

SEQ ID NO: 290510 - RNA, 21 nt, Artificial Sequence
  Synthetic
ugggucaagaaugcgaagguc

SEQ ID NO: 290511 - RNA, 22 nt, Artificial Sequence
  Synthetic
augggucaagaaugcgaagguc

SEQ ID NO: 290512 - RNA, 23 nt, Artificial Sequence
  Synthetic
uaugggucaagaaugcgaagguc

SEQ ID NO: 290513 - RNA, 24 nt, Artificial Sequence
  Synthetic
uuaugggucaagaaugcgaagguc

SEQ ID NO: 290514 - RNA, 18 nt, Artificial Sequence
  Synthetic
ugauggauauggaagguc

SEQ ID NO: 290515 - RNA, 19 nt, Artificial Sequence
  Synthetic
augauggauauggaagguc

SEQ ID NO: 290516 - RNA, 20 nt, Artificial Sequence
  Synthetic
aaugauggauauggaagguc

SEQ ID NO: 290517 - RNA, 21 nt, Artificial Sequence
  Synthetic
gaaugauggauauggaagguc

SEQ ID NO: 290518 - RNA, 22 nt, Artificial Sequence
  Synthetic
agaaugauggauauggaagguc

SEQ ID NO: 290519 - RNA, 23 nt, Artificial Sequence
  Synthetic
cagaaugauggauauggaagguc

SEQ ID NO: 290520 - RNA, 24 nt, Artificial Sequence
  Synthetic
acagaaugauggauauggaagguc

SEQ ID NO: 290521 - RNA, 18 nt, Artificial Sequence
  Synthetic
gucacaaacgugaagguc

SEQ ID NO: 290522 - RNA, 19 nt, Artificial Sequence
  Synthetic
ggucacaaacgugaagguc

SEQ ID NO: 290523 - RNA, 20 nt, Artificial Sequence
  Synthetic
gggucacaaacgugaagguc

SEQ ID NO: 290524 - RNA, 21 nt, Artificial Sequence
  Synthetic
ugggucacaaacgugaagguc

SEQ ID NO: 290525 - RNA, 22 nt, Artificial Sequence
  Synthetic
augggucacaaacgugaagguc

SEQ ID NO: 290526 - RNA, 23 nt, Artificial Sequence
  Synthetic
uaugggucacaaacgugaagguc

SEQ ID NO: 290527 - RNA, 24 nt, Artificial Sequence
  Synthetic
uuaugggucacaaacgugaagguc

SEQ ID NO: 290528 - RNA, 18 nt, Artificial Sequence
  Synthetic
aaugaaaugccuaagguc

SEQ ID NO: 290529 - RNA, 19 nt, Artificial Sequence
  Synthetic
caaugaaaugccuaagguc

SEQ ID NO: 290530 - RNA, 20 nt, Artificial Sequence
  Synthetic
gcaaugaaaugccuaagguc

SEQ ID NO: 290531 - RNA, 21 nt, Artificial Sequence
  Synthetic
ugcaaugaaaugccuaagguc

SEQ ID NO: 290532 - RNA, 22 nt, Artificial Sequence
  Synthetic
cugcaaugaaaugccuaagguc

SEQ ID NO: 290533 - RNA, 23 nt, Artificial Sequence
  Synthetic
ccugcaaugaaaugccuaagguc

SEQ ID NO: 290534 - RNA, 24 nt, Artificial Sequence
  Synthetic
accugcaaugaaaugccuaagguc

SEQ ID NO: 290535 - RNA, 18 nt, Artificial Sequence
  Synthetic
gucaagauggaccagguc

SEQ ID NO: 290536 - RNA, 19 nt, Artificial Sequence
  Synthetic
ugucaagauggaccagguc

SEQ ID NO: 290537 - RNA, 20 nt, Artificial Sequence
  Synthetic
uugucaagauggaccagguc

SEQ ID NO: 290538 - RNA, 21 nt, Artificial Sequence
  Synthetic
auugucaagauggaccagguc

SEQ ID NO: 290539 - RNA, 22 nt, Artificial Sequence
  Synthetic
aauugucaagauggaccagguc

SEQ ID NO: 290540 - RNA, 23 nt, Artificial Sequence
  Synthetic
aaauugucaagauggaccagguc

SEQ ID NO: 290541 - RNA, 24 nt, Artificial Sequence
  Synthetic
gaaauugucaagauggaccagguc

SEQ ID NO: 290542 - RNA, 18 nt, Artificial Sequence
  Synthetic
aacaaaaaaacccagguc

SEQ ID NO: 290543 - RNA, 19 nt, Artificial Sequence
  Synthetic
caacaaaaaaacccagguc

SEQ ID NO: 290544 - RNA, 20 nt, Artificial Sequence
  Synthetic
ccaacaaaaaaacccagguc

SEQ ID NO: 290545 - RNA, 21 nt, Artificial Sequence
  Synthetic
uccaacaaaaaaacccagguc

SEQ ID NO: 290546 - RNA, 22 nt, Artificial Sequence
  Synthetic
uuccaacaaaaaaacccagguc

SEQ ID NO: 290547 - RNA, 23 nt, Artificial Sequence
  Synthetic
uuuccaacaaaaaaacccagguc

SEQ ID NO: 290548 - RNA, 24 nt, Artificial Sequence
  Synthetic
uuuuccaacaaaaaaacccagguc

SEQ ID NO: 290549 - RNA, 18 nt, Artificial Sequence
  Synthetic
uugauacauccccagguc

SEQ ID NO: 290550 - RNA, 19 nt, Artificial Sequence
  Synthetic
uuugauacauccccagguc

SEQ ID NO: 290551 - RNA, 20 nt, Artificial Sequence
  Synthetic
auuugauacauccccagguc

SEQ ID NO: 290552 - RNA, 21 nt, Artificial Sequence
  Synthetic
cauuugauacauccccagguc

SEQ ID NO: 290553 - RNA, 22 nt, Artificial Sequence
  Synthetic
ucauuugauacauccccagguc

SEQ ID NO: 290554 - RNA, 23 nt, Artificial Sequence
  Synthetic
cucauuugauacauccccagguc

SEQ ID NO: 290555 - RNA, 24 nt, Artificial Sequence
  Synthetic
ucucauuugauacauccccagguc

SEQ ID NO: 290556 - RNA, 18 nt, Artificial Sequence
  Synthetic
aaucauuuuccccagguc

SEQ ID NO: 290557 - RNA, 19 nt, Artificial Sequence
  Synthetic
aaaucauuuuccccagguc

SEQ ID NO: 290558 - RNA, 20 nt, Artificial Sequence
  Synthetic
uaaaucauuuuccccagguc

SEQ ID NO: 290559 - RNA, 21 nt, Artificial Sequence
  Synthetic
uuaaaucauuuuccccagguc

SEQ ID NO: 290560 - RNA, 22 nt, Artificial Sequence
  Synthetic
uuuaaaucauuuuccccagguc

SEQ ID NO: 290561 - RNA, 23 nt, Artificial Sequence
  Synthetic
cuuuaaaucauuuuccccagguc

SEQ ID NO: 290562 - RNA, 24 nt, Artificial Sequence
  Synthetic
ccuuuaaaucauuuuccccagguc

SEQ ID NO: 290563 - RNA, 18 nt, Artificial Sequence
  Synthetic
guguuggccaggcagguc

SEQ ID NO: 290564 - RNA, 19 nt, Artificial Sequence
  Synthetic
uguguuggccaggcagguc

SEQ ID NO: 290565 - RNA, 20 nt, Artificial Sequence
  Synthetic
cuguguuggccaggcagguc

SEQ ID NO: 290566 - RNA, 21 nt, Artificial Sequence
  Synthetic
acuguguuggccaggcagguc

SEQ ID NO: 290567 - RNA, 22 nt, Artificial Sequence
  Synthetic
cacuguguuggccaggcagguc

SEQ ID NO: 290568 - RNA, 23 nt, Artificial Sequence
  Synthetic
ucacuguguuggccaggcagguc

SEQ ID NO: 290569 - RNA, 24 nt, Artificial Sequence
  Synthetic
uucacuguguuggccaggcagguc

SEQ ID NO: 290570 - RNA, 18 nt, Artificial Sequence
  Synthetic
uucuaugguguucagguc

SEQ ID NO: 290571 - RNA, 19 nt, Artificial Sequence
  Synthetic
cuucuaugguguucagguc

SEQ ID NO: 290572 - RNA, 20 nt, Artificial Sequence
  Synthetic
ucuucuaugguguucagguc

SEQ ID NO: 290573 - RNA, 21 nt, Artificial Sequence
  Synthetic
uucuucuaugguguucagguc

SEQ ID NO: 290574 - RNA, 22 nt, Artificial Sequence
  Synthetic
cuucuucuaugguguucagguc

SEQ ID NO: 290575 - RNA, 23 nt, Artificial Sequence
  Synthetic
gcuucuucuaugguguucagguc

SEQ ID NO: 290576 - RNA, 24 nt, Artificial Sequence
  Synthetic
ugcuucuucuaugguguucagguc

SEQ ID NO: 290577 - RNA, 18 nt, Artificial Sequence
  Synthetic
uuuggaagaaaagagguc

SEQ ID NO: 290578 - RNA, 19 nt, Artificial Sequence
  Synthetic
guuuggaagaaaagagguc

SEQ ID NO: 290579 - RNA, 20 nt, Artificial Sequence
  Synthetic
gguuuggaagaaaagagguc

SEQ ID NO: 290580 - RNA, 21 nt, Artificial Sequence
  Synthetic
ggguuuggaagaaaagagguc

SEQ ID NO: 290581 - RNA, 22 nt, Artificial Sequence
  Synthetic
uggguuuggaagaaaagagguc

SEQ ID NO: 290582 - RNA, 23 nt, Artificial Sequence
  Synthetic
uuggguuuggaagaaaagagguc

SEQ ID NO: 290583 - RNA, 24 nt, Artificial Sequence
  Synthetic
guuggguuuggaagaaaagagguc

SEQ ID NO: 290584 - RNA, 18 nt, Artificial Sequence
  Synthetic
uaacaaauaaacgagguc

SEQ ID NO: 290585 - RNA, 19 nt, Artificial Sequence
  Synthetic
uuaacaaauaaacgagguc

SEQ ID NO: 290586 - RNA, 20 nt, Artificial Sequence
  Synthetic
uuuaacaaauaaacgagguc

SEQ ID NO: 290587 - RNA, 21 nt, Artificial Sequence
  Synthetic
auuuaacaaauaaacgagguc

SEQ ID NO: 290588 - RNA, 22 nt, Artificial Sequence
  Synthetic
cauuuaacaaauaaacgagguc

SEQ ID NO: 290589 - RNA, 23 nt, Artificial Sequence
  Synthetic
gcauuuaacaaauaaacgagguc

SEQ ID NO: 290590 - RNA, 24 nt, Artificial Sequence
  Synthetic
ugcauuuaacaaauaaacgagguc

SEQ ID NO: 290591 - RNA, 18 nt, Artificial Sequence
  Synthetic
caggcagaucacgagguc

SEQ ID NO: 290592 - RNA, 19 nt, Artificial Sequence
  Synthetic
gcaggcagaucacgagguc

SEQ ID NO: 290593 - RNA, 20 nt, Artificial Sequence
  Synthetic
ggcaggcagaucacgagguc

SEQ ID NO: 290594 - RNA, 21 nt, Artificial Sequence
  Synthetic
aggcaggcagaucacgagguc

SEQ ID NO: 290595 - RNA, 22 nt, Artificial Sequence
  Synthetic
gaggcaggcagaucacgagguc

SEQ ID NO: 290596 - RNA, 23 nt, Artificial Sequence
  Synthetic
cgaggcaggcagaucacgagguc

SEQ ID NO: 290597 - RNA, 24 nt, Artificial Sequence
  Synthetic
ccgaggcaggcagaucacgagguc

SEQ ID NO: 290598 - RNA, 18 nt, Artificial Sequence
  Synthetic
ugggcagaucacgagguc

SEQ ID NO: 290599 - RNA, 19 nt, Artificial Sequence
  Synthetic
gugggcagaucacgagguc

SEQ ID NO: 290600 - RNA, 20 nt, Artificial Sequence
  Synthetic
ggugggcagaucacgagguc

SEQ ID NO: 290601 - RNA, 21 nt, Artificial Sequence
  Synthetic
aggugggcagaucacgagguc

SEQ ID NO: 290602 - RNA, 22 nt, Artificial Sequence
  Synthetic
gaggugggcagaucacgagguc

SEQ ID NO: 290603 - RNA, 23 nt, Artificial Sequence
  Synthetic
ugaggugggcagaucacgagguc

SEQ ID NO: 290604 - RNA, 24 nt, Artificial Sequence
  Synthetic
cugaggugggcagaucacgagguc

SEQ ID NO: 290605 - RNA, 18 nt, Artificial Sequence
  Synthetic
cagaaggaucacgagguc

SEQ ID NO: 290606 - RNA, 19 nt, Artificial Sequence
  Synthetic
gcagaaggaucacgagguc

SEQ ID NO: 290607 - RNA, 20 nt, Artificial Sequence
  Synthetic
ggcagaaggaucacgagguc

SEQ ID NO: 290608 - RNA, 21 nt, Artificial Sequence
  Synthetic
aggcagaaggaucacgagguc

SEQ ID NO: 290609 - RNA, 22 nt, Artificial Sequence
  Synthetic
gaggcagaaggaucacgagguc

SEQ ID NO: 290610 - RNA, 23 nt, Artificial Sequence
  Synthetic
cgaggcagaaggaucacgagguc

SEQ ID NO: 290611 - RNA, 24 nt, Artificial Sequence
  Synthetic
ccgaggcagaaggaucacgagguc

SEQ ID NO: 290612 - RNA, 18 nt, Artificial Sequence
  Synthetic
caggcggaucacgagguc

SEQ ID NO: 290613 - RNA, 19 nt, Artificial Sequence
  Synthetic
gcaggcggaucacgagguc

SEQ ID NO: 290614 - RNA, 20 nt, Artificial Sequence
  Synthetic
ggcaggcggaucacgagguc

SEQ ID NO: 290615 - RNA, 21 nt, Artificial Sequence
  Synthetic
aggcaggcggaucacgagguc

SEQ ID NO: 290616 - RNA, 22 nt, Artificial Sequence
  Synthetic
gaggcaggcggaucacgagguc

SEQ ID NO: 290617 - RNA, 23 nt, Artificial Sequence
  Synthetic
cgaggcaggcggaucacgagguc

SEQ ID NO: 290618 - RNA, 24 nt, Artificial Sequence
  Synthetic
ccgaggcaggcggaucacgagguc

SEQ ID NO: 290619 - RNA, 21 nt, Artificial Sequence
  Synthetic
aggcgggcggaucacgagguc

SEQ ID NO: 290620 - RNA, 22 nt, Artificial Sequence
  Synthetic
gaggcgggcggaucacgagguc

SEQ ID NO: 290621 - RNA, 23 nt, Artificial Sequence
  Synthetic
agaggcgggcggaucacgagguc

SEQ ID NO: 290622 - RNA, 24 nt, Artificial Sequence
  Synthetic
cagaggcgggcggaucacgagguc

SEQ ID NO: 290623 - RNA, 18 nt, Artificial Sequence
  Synthetic
ugggcggaucacgagguc

SEQ ID NO: 290624 - RNA, 19 nt, Artificial Sequence
  Synthetic
gugggcggaucacgagguc

SEQ ID NO: 290625 - RNA, 20 nt, Artificial Sequence
  Synthetic
ggugggcggaucacgagguc

SEQ ID NO: 290626 - RNA, 21 nt, Artificial Sequence
  Synthetic
aggugggcggaucacgagguc

SEQ ID NO: 290627 - RNA, 22 nt, Artificial Sequence
  Synthetic
aaggugggcggaucacgagguc

SEQ ID NO: 290628 - RNA, 23 nt, Artificial Sequence
  Synthetic
caaggugggcggaucacgagguc

SEQ ID NO: 290629 - RNA, 24 nt, Artificial Sequence
  Synthetic
ccaaggugggcggaucacgagguc

SEQ ID NO: 290630 - RNA, 18 nt, Artificial Sequence
  Synthetic
cagguggaucacgagguc

SEQ ID NO: 290631 - RNA, 19 nt, Artificial Sequence
  Synthetic
gcagguggaucacgagguc

SEQ ID NO: 290632 - RNA, 20 nt, Artificial Sequence
  Synthetic
agcagguggaucacgagguc

SEQ ID NO: 290633 - RNA, 21 nt, Artificial Sequence
  Synthetic
aagcagguggaucacgagguc

SEQ ID NO: 290634 - RNA, 22 nt, Artificial Sequence
  Synthetic
gaagcagguggaucacgagguc

SEQ ID NO: 290635 - RNA, 23 nt, Artificial Sequence
  Synthetic
ugaagcagguggaucacgagguc

SEQ ID NO: 290636 - RNA, 24 nt, Artificial Sequence
  Synthetic
cugaagcagguggaucacgagguc

SEQ ID NO: 290637 - RNA, 21 nt, Artificial Sequence
  Synthetic
aggcagguggaucacgagguc

SEQ ID NO: 290638 - RNA, 22 nt, Artificial Sequence
  Synthetic
gaggcagguggaucacgagguc

SEQ ID NO: 290639 - RNA, 23 nt, Artificial Sequence
  Synthetic
cgaggcagguggaucacgagguc

SEQ ID NO: 290640 - RNA, 24 nt, Artificial Sequence
  Synthetic
ccgaggcagguggaucacgagguc

SEQ ID NO: 290641 - RNA, 18 nt, Artificial Sequence
  Synthetic
cggguggaucacgagguc

SEQ ID NO: 290642 - RNA, 19 nt, Artificial Sequence
  Synthetic
gcggguggaucacgagguc

SEQ ID NO: 290643 - RNA, 20 nt, Artificial Sequence
  Synthetic
ggcggguggaucacgagguc

SEQ ID NO: 290644 - RNA, 18 nt, Artificial Sequence
  Synthetic
uggguggaucacgagguc

SEQ ID NO: 290645 - RNA, 19 nt, Artificial Sequence
  Synthetic
guggguggaucacgagguc

SEQ ID NO: 290646 - RNA, 20 nt, Artificial Sequence
  Synthetic
gguggguggaucacgagguc

SEQ ID NO: 290647 - RNA, 22 nt, Artificial Sequence
  Synthetic
aagguggguggaucacgagguc

SEQ ID NO: 290648 - RNA, 23 nt, Artificial Sequence
  Synthetic
caagguggguggaucacgagguc

SEQ ID NO: 290649 - RNA, 24 nt, Artificial Sequence
  Synthetic
ccaagguggguggaucacgagguc

SEQ ID NO: 290650 - RNA, 18 nt, Artificial Sequence
  Synthetic
caguuggaucacgagguc

SEQ ID NO: 290651 - RNA, 19 nt, Artificial Sequence
  Synthetic
gcaguuggaucacgagguc

SEQ ID NO: 290652 - RNA, 20 nt, Artificial Sequence
  Synthetic
ggcaguuggaucacgagguc

SEQ ID NO: 290653 - RNA, 21 nt, Artificial Sequence
  Synthetic
aggcaguuggaucacgagguc

SEQ ID NO: 290654 - RNA, 22 nt, Artificial Sequence
  Synthetic
gaggcaguuggaucacgagguc

SEQ ID NO: 290655 - RNA, 23 nt, Artificial Sequence
  Synthetic
cgaggcaguuggaucacgagguc

SEQ ID NO: 290656 - RNA, 24 nt, Artificial Sequence
  Synthetic
ccgaggcaguuggaucacgagguc

SEQ ID NO: 290657 - RNA, 18 nt, Artificial Sequence
  Synthetic
cgggcugaucacgagguc

SEQ ID NO: 290658 - RNA, 19 nt, Artificial Sequence
  Synthetic
gcgggcugaucacgagguc

SEQ ID NO: 290659 - RNA, 20 nt, Artificial Sequence
  Synthetic
ggcgggcugaucacgagguc

SEQ ID NO: 290660 - RNA, 21 nt, Artificial Sequence
  Synthetic
aggcgggcugaucacgagguc

SEQ ID NO: 290661 - RNA, 22 nt, Artificial Sequence
  Synthetic
gaggcgggcugaucacgagguc

SEQ ID NO: 290662 - RNA, 23 nt, Artificial Sequence
  Synthetic
cgaggcgggcugaucacgagguc

SEQ ID NO: 290663 - RNA, 24 nt, Artificial Sequence
  Synthetic
ccgaggcgggcugaucacgagguc

SEQ ID NO: 290664 - RNA, 18 nt, Artificial Sequence
  Synthetic
aauguguuaaccgagguc

SEQ ID NO: 290665 - RNA, 19 nt, Artificial Sequence
  Synthetic
aaauguguuaaccgagguc

SEQ ID NO: 290666 - RNA, 20 nt, Artificial Sequence
  Synthetic
aaaauguguuaaccgagguc

SEQ ID NO: 290667 - RNA, 21 nt, Artificial Sequence
  Synthetic
aaaaauguguuaaccgagguc

SEQ ID NO: 290668 - RNA, 22 nt, Artificial Sequence
  Synthetic
uaaaaauguguuaaccgagguc

SEQ ID NO: 290669 - RNA, 23 nt, Artificial Sequence
  Synthetic
uuaaaaauguguuaaccgagguc

SEQ ID NO: 290670 - RNA, 24 nt, Artificial Sequence
  Synthetic
cuuaaaaauguguuaaccgagguc

SEQ ID NO: 290671 - RNA, 18 nt, Artificial Sequence
  Synthetic
ggcuuauuucaggagguc

SEQ ID NO: 290672 - RNA, 19 nt, Artificial Sequence
  Synthetic
aggcuuauuucaggagguc

SEQ ID NO: 290673 - RNA, 20 nt, Artificial Sequence
  Synthetic
caggcuuauuucaggagguc

SEQ ID NO: 290674 - RNA, 21 nt, Artificial Sequence
  Synthetic
acaggcuuauuucaggagguc

SEQ ID NO: 290675 - RNA, 22 nt, Artificial Sequence
  Synthetic
aacaggcuuauuucaggagguc

SEQ ID NO: 290676 - RNA, 23 nt, Artificial Sequence
  Synthetic
caacaggcuuauuucaggagguc

SEQ ID NO: 290677 - RNA, 24 nt, Artificial Sequence
  Synthetic
ucaacaggcuuauuucaggagguc

SEQ ID NO: 290678 - RNA, 18 nt, Artificial Sequence
  Synthetic
gauggagaaacggagguc

SEQ ID NO: 290679 - RNA, 19 nt, Artificial Sequence
  Synthetic
agauggagaaacggagguc

SEQ ID NO: 290680 - RNA, 20 nt, Artificial Sequence
  Synthetic
cagauggagaaacggagguc

SEQ ID NO: 290681 - RNA, 21 nt, Artificial Sequence
  Synthetic
ucagauggagaaacggagguc

SEQ ID NO: 290682 - RNA, 22 nt, Artificial Sequence
  Synthetic
cucagauggagaaacggagguc

SEQ ID NO: 290683 - RNA, 23 nt, Artificial Sequence
  Synthetic
acucagauggagaaacggagguc

SEQ ID NO: 290684 - RNA, 24 nt, Artificial Sequence
  Synthetic
uacucagauggagaaacggagguc

SEQ ID NO: 290685 - RNA, 18 nt, Artificial Sequence
  Synthetic
aguucucaaagggagguc

SEQ ID NO: 290686 - RNA, 19 nt, Artificial Sequence
  Synthetic
uaguucucaaagggagguc

SEQ ID NO: 290687 - RNA, 20 nt, Artificial Sequence
  Synthetic
guaguucucaaagggagguc

SEQ ID NO: 290688 - RNA, 21 nt, Artificial Sequence
  Synthetic
aguaguucucaaagggagguc

SEQ ID NO: 290689 - RNA, 22 nt, Artificial Sequence
  Synthetic
uaguaguucucaaagggagguc

SEQ ID NO: 290690 - RNA, 23 nt, Artificial Sequence
  Synthetic
guaguaguucucaaagggagguc

SEQ ID NO: 290691 - RNA, 24 nt, Artificial Sequence
  Synthetic
aguaguaguucucaaagggagguc

SEQ ID NO: 290692 - RNA, 18 nt, Artificial Sequence
  Synthetic
cuucuaauuggggagguc

SEQ ID NO: 290693 - RNA, 19 nt, Artificial Sequence
  Synthetic
gcuucuaauuggggagguc

SEQ ID NO: 290694 - RNA, 20 nt, Artificial Sequence
  Synthetic
agcuucuaauuggggagguc

SEQ ID NO: 290695 - RNA, 21 nt, Artificial Sequence
  Synthetic
aagcuucuaauuggggagguc

SEQ ID NO: 290696 - RNA, 22 nt, Artificial Sequence
  Synthetic
uaagcuucuaauuggggagguc

SEQ ID NO: 290697 - RNA, 23 nt, Artificial Sequence
  Synthetic
uuaagcuucuaauuggggagguc

SEQ ID NO: 290698 - RNA, 24 nt, Artificial Sequence
  Synthetic
cuuaagcuucuaauuggggagguc

SEQ ID NO: 290699 - RNA, 18 nt, Artificial Sequence
  Synthetic
agcacaguauuggagguc

SEQ ID NO: 290700 - RNA, 19 nt, Artificial Sequence
  Synthetic
aagcacaguauuggagguc

SEQ ID NO: 290701 - RNA, 20 nt, Artificial Sequence
  Synthetic
aaagcacaguauuggagguc

SEQ ID NO: 290702 - RNA, 21 nt, Artificial Sequence
  Synthetic
gaaagcacaguauuggagguc

SEQ ID NO: 290703 - RNA, 22 nt, Artificial Sequence
  Synthetic
ggaaagcacaguauuggagguc

SEQ ID NO: 290704 - RNA, 23 nt, Artificial Sequence
  Synthetic
aggaaagcacaguauuggagguc

SEQ ID NO: 290705 - RNA, 24 nt, Artificial Sequence
  Synthetic
uaggaaagcacaguauuggagguc

SEQ ID NO: 290706 - RNA, 18 nt, Artificial Sequence
  Synthetic
auggugauuuuggagguc

SEQ ID NO: 290707 - RNA, 19 nt, Artificial Sequence
  Synthetic
cauggugauuuuggagguc

SEQ ID NO: 290708 - RNA, 20 nt, Artificial Sequence
  Synthetic
ccauggugauuuuggagguc

SEQ ID NO: 290709 - RNA, 21 nt, Artificial Sequence
  Synthetic
accauggugauuuuggagguc

SEQ ID NO: 290710 - RNA, 22 nt, Artificial Sequence
  Synthetic
caccauggugauuuuggagguc

SEQ ID NO: 290711 - RNA, 23 nt, Artificial Sequence
  Synthetic
acaccauggugauuuuggagguc

SEQ ID NO: 290712 - RNA, 24 nt, Artificial Sequence
  Synthetic
aacaccauggugauuuuggagguc

SEQ ID NO: 290713 - RNA, 18 nt, Artificial Sequence
  Synthetic
ugggcagaucaugagguc

SEQ ID NO: 290714 - RNA, 19 nt, Artificial Sequence
  Synthetic
gugggcagaucaugagguc

SEQ ID NO: 290715 - RNA, 20 nt, Artificial Sequence
  Synthetic
ggugggcagaucaugagguc

SEQ ID NO: 290716 - RNA, 21 nt, Artificial Sequence
  Synthetic
aggugggcagaucaugagguc

SEQ ID NO: 290717 - RNA, 22 nt, Artificial Sequence
  Synthetic
gaggugggcagaucaugagguc

SEQ ID NO: 290718 - RNA, 23 nt, Artificial Sequence
  Synthetic
cgaggugggcagaucaugagguc

SEQ ID NO: 290719 - RNA, 24 nt, Artificial Sequence
  Synthetic
ccgaggugggcagaucaugagguc

SEQ ID NO: 290720 - RNA, 18 nt, Artificial Sequence
  Synthetic
caggcggaucaugagguc

SEQ ID NO: 290721 - RNA, 19 nt, Artificial Sequence
  Synthetic
gcaggcggaucaugagguc

SEQ ID NO: 290722 - RNA, 20 nt, Artificial Sequence
  Synthetic
ggcaggcggaucaugagguc

SEQ ID NO: 290723 - RNA, 21 nt, Artificial Sequence
  Synthetic
aggcaggcggaucaugagguc

SEQ ID NO: 290724 - RNA, 22 nt, Artificial Sequence
  Synthetic
gaggcaggcggaucaugagguc

SEQ ID NO: 290725 - RNA, 23 nt, Artificial Sequence
  Synthetic
cgaggcaggcggaucaugagguc

SEQ ID NO: 290726 - RNA, 24 nt, Artificial Sequence
  Synthetic
ccgaggcaggcggaucaugagguc

SEQ ID NO: 290727 - RNA, 18 nt, Artificial Sequence
  Synthetic
cgggcggaucaugagguc

SEQ ID NO: 290728 - RNA, 19 nt, Artificial Sequence
  Synthetic
gcgggcggaucaugagguc

SEQ ID NO: 290729 - RNA, 20 nt, Artificial Sequence
  Synthetic
ggcgggcggaucaugagguc

SEQ ID NO: 290730 - RNA, 21 nt, Artificial Sequence
  Synthetic
aggcgggcggaucaugagguc

SEQ ID NO: 290731 - RNA, 22 nt, Artificial Sequence
  Synthetic
gaggcgggcggaucaugagguc

SEQ ID NO: 290732 - RNA, 23 nt, Artificial Sequence
  Synthetic
cgaggcgggcggaucaugagguc

SEQ ID NO: 290733 - RNA, 24 nt, Artificial Sequence
  Synthetic
ccgaggcgggcggaucaugagguc

SEQ ID NO: 290734 - RNA, 18 nt, Artificial Sequence
  Synthetic
uauuauauguuugagguc

SEQ ID NO: 290735 - RNA, 19 nt, Artificial Sequence
  Synthetic
guauuauauguuugagguc

SEQ ID NO: 290736 - RNA, 20 nt, Artificial Sequence
  Synthetic
uguauuauauguuugagguc

SEQ ID NO: 290737 - RNA, 21 nt, Artificial Sequence
  Synthetic
auguauuauauguuugagguc

SEQ ID NO: 290738 - RNA, 22 nt, Artificial Sequence
  Synthetic
aauguauuauauguuugagguc

SEQ ID NO: 290739 - RNA, 23 nt, Artificial Sequence
  Synthetic
uaauguauuauauguuugagguc

SEQ ID NO: 290740 - RNA, 24 nt, Artificial Sequence
  Synthetic
guaauguauuauauguuugagguc

SEQ ID NO: 290741 - RNA, 18 nt, Artificial Sequence
  Synthetic
uugagauaaacauagguc

SEQ ID NO: 290742 - RNA, 19 nt, Artificial Sequence
  Synthetic
guugagauaaacauagguc

SEQ ID NO: 290743 - RNA, 20 nt, Artificial Sequence
  Synthetic
aguugagauaaacauagguc

SEQ ID NO: 290744 - RNA, 21 nt, Artificial Sequence
  Synthetic
uaguugagauaaacauagguc

SEQ ID NO: 290745 - RNA, 22 nt, Artificial Sequence
  Synthetic
cuaguugagauaaacauagguc

SEQ ID NO: 290746 - RNA, 23 nt, Artificial Sequence
  Synthetic
gcuaguugagauaaacauagguc

SEQ ID NO: 290747 - RNA, 24 nt, Artificial Sequence
  Synthetic
ugcuaguugagauaaacauagguc

SEQ ID NO: 290748 - RNA, 18 nt, Artificial Sequence
  Synthetic
caggcagaucacuagguc

SEQ ID NO: 290749 - RNA, 19 nt, Artificial Sequence
  Synthetic
gcaggcagaucacuagguc

SEQ ID NO: 290750 - RNA, 20 nt, Artificial Sequence
  Synthetic
ggcaggcagaucacuagguc

SEQ ID NO: 290751 - RNA, 21 nt, Artificial Sequence
  Synthetic
aggcaggcagaucacuagguc

SEQ ID NO: 290752 - RNA, 22 nt, Artificial Sequence
  Synthetic
gaggcaggcagaucacuagguc

SEQ ID NO: 290753 - RNA, 23 nt, Artificial Sequence
  Synthetic
cgaggcaggcagaucacuagguc

SEQ ID NO: 290754 - RNA, 24 nt, Artificial Sequence
  Synthetic
ccgaggcaggcagaucacuagguc

SEQ ID NO: 290755 - RNA, 18 nt, Artificial Sequence
  Synthetic
aaaaccagagcuucgguc

SEQ ID NO: 290756 - RNA, 19 nt, Artificial Sequence
  Synthetic
uaaaaccagagcuucgguc

SEQ ID NO: 290757 - RNA, 20 nt, Artificial Sequence
  Synthetic
auaaaaccagagcuucgguc

SEQ ID NO: 290758 - RNA, 21 nt, Artificial Sequence
  Synthetic
uauaaaaccagagcuucgguc

SEQ ID NO: 290759 - RNA, 22 nt, Artificial Sequence
  Synthetic
auauaaaaccagagcuucgguc

SEQ ID NO: 290760 - RNA, 23 nt, Artificial Sequence
  Synthetic
cauauaaaaccagagcuucgguc

SEQ ID NO: 290761 - RNA, 24 nt, Artificial Sequence
  Synthetic
gcauauaaaaccagagcuucgguc

SEQ ID NO: 290762 - RNA, 18 nt, Artificial Sequence
  Synthetic
auuuagugcuuuucgguc

SEQ ID NO: 290763 - RNA, 19 nt, Artificial Sequence
  Synthetic
cauuuagugcuuuucgguc

SEQ ID NO: 290764 - RNA, 20 nt, Artificial Sequence
  Synthetic
ccauuuagugcuuuucgguc

SEQ ID NO: 290765 - RNA, 21 nt, Artificial Sequence
  Synthetic
cccauuuagugcuuuucgguc

SEQ ID NO: 290766 - RNA, 22 nt, Artificial Sequence
  Synthetic
acccauuuagugcuuuucgguc

SEQ ID NO: 290767 - RNA, 23 nt, Artificial Sequence
  Synthetic
gacccauuuagugcuuuucgguc

SEQ ID NO: 290768 - RNA, 24 nt, Artificial Sequence
  Synthetic
agacccauuuagugcuuuucgguc

SEQ ID NO: 290769 - RNA, 18 nt, Artificial Sequence
  Synthetic
ccuggugccaaaaggguc

SEQ ID NO: 290770 - RNA, 19 nt, Artificial Sequence
  Synthetic
uccuggugccaaaaggguc

SEQ ID NO: 290771 - RNA, 20 nt, Artificial Sequence
  Synthetic
uuccuggugccaaaaggguc

SEQ ID NO: 290772 - RNA, 21 nt, Artificial Sequence
  Synthetic
guuccuggugccaaaaggguc

SEQ ID NO: 290773 - RNA, 22 nt, Artificial Sequence
  Synthetic
aguuccuggugccaaaaggguc

SEQ ID NO: 290774 - RNA, 23 nt, Artificial Sequence
  Synthetic
caguuccuggugccaaaaggguc

SEQ ID NO: 290775 - RNA, 24 nt, Artificial Sequence
  Synthetic
ucaguuccuggugccaaaaggguc

SEQ ID NO: 290776 - RNA, 18 nt, Artificial Sequence
  Synthetic
gaugagagguuuaggguc

SEQ ID NO: 290777 - RNA, 19 nt, Artificial Sequence
  Synthetic
ugaugagagguuuaggguc

SEQ ID NO: 290778 - RNA, 20 nt, Artificial Sequence
  Synthetic
cugaugagagguuuaggguc

SEQ ID NO: 290779 - RNA, 21 nt, Artificial Sequence
  Synthetic
gcugaugagagguuuaggguc

SEQ ID NO: 290780 - RNA, 22 nt, Artificial Sequence
  Synthetic
agcugaugagagguuuaggguc

SEQ ID NO: 290781 - RNA, 23 nt, Artificial Sequence
  Synthetic
gagcugaugagagguuuaggguc

SEQ ID NO: 290782 - RNA, 24 nt, Artificial Sequence
  Synthetic
agagcugaugagagguuuaggguc

SEQ ID NO: 290783 - RNA, 18 nt, Artificial Sequence
  Synthetic
gaguuccacaaagggguc

SEQ ID NO: 290784 - RNA, 19 nt, Artificial Sequence
  Synthetic
cgaguuccacaaagggguc

SEQ ID NO: 290785 - RNA, 20 nt, Artificial Sequence
  Synthetic
gcgaguuccacaaagggguc

SEQ ID NO: 290786 - RNA, 21 nt, Artificial Sequence
  Synthetic
ugcgaguuccacaaagggguc

SEQ ID NO: 290787 - RNA, 22 nt, Artificial Sequence
  Synthetic
uugcgaguuccacaaagggguc

SEQ ID NO: 290788 - RNA, 23 nt, Artificial Sequence
  Synthetic
guugcgaguuccacaaagggguc

SEQ ID NO: 290789 - RNA, 24 nt, Artificial Sequence
  Synthetic
uguugcgaguuccacaaagggguc

SEQ ID NO: 290790 - RNA, 18 nt, Artificial Sequence
  Synthetic
ccggaagcacaagggguc

SEQ ID NO: 290791 - RNA, 19 nt, Artificial Sequence
  Synthetic
cccggaagcacaagggguc

SEQ ID NO: 290792 - RNA, 20 nt, Artificial Sequence
  Synthetic
ccccggaagcacaagggguc

SEQ ID NO: 290793 - RNA, 21 nt, Artificial Sequence
  Synthetic
accccggaagcacaagggguc

SEQ ID NO: 290794 - RNA, 22 nt, Artificial Sequence
  Synthetic
caccccggaagcacaagggguc

SEQ ID NO: 290795 - RNA, 23 nt, Artificial Sequence
  Synthetic
ucaccccggaagcacaagggguc

SEQ ID NO: 290796 - RNA, 24 nt, Artificial Sequence
  Synthetic
cucaccccggaagcacaagggguc

SEQ ID NO: 290797 - RNA, 18 nt, Artificial Sequence
  Synthetic
gugaguuuccaugggguc

SEQ ID NO: 290798 - RNA, 19 nt, Artificial Sequence
  Synthetic
agugaguuuccaugggguc

SEQ ID NO: 290799 - RNA, 20 nt, Artificial Sequence
  Synthetic
cagugaguuuccaugggguc

SEQ ID NO: 290800 - RNA, 21 nt, Artificial Sequence
  Synthetic
ucagugaguuuccaugggguc

SEQ ID NO: 290801 - RNA, 22 nt, Artificial Sequence
  Synthetic
gucagugaguuuccaugggguc

SEQ ID NO: 290802 - RNA, 23 nt, Artificial Sequence
  Synthetic
ugucagugaguuuccaugggguc

SEQ ID NO: 290803 - RNA, 24 nt, Artificial Sequence
  Synthetic
gugucagugaguuuccaugggguc

SEQ ID NO: 290804 - RNA, 18 nt, Artificial Sequence
  Synthetic
aggaauaaaagugggguc

SEQ ID NO: 290805 - RNA, 19 nt, Artificial Sequence
  Synthetic
aaggaauaaaagugggguc

SEQ ID NO: 290806 - RNA, 20 nt, Artificial Sequence
  Synthetic
caaggaauaaaagugggguc

SEQ ID NO: 290807 - RNA, 21 nt, Artificial Sequence
  Synthetic
acaaggaauaaaagugggguc

SEQ ID NO: 290808 - RNA, 22 nt, Artificial Sequence
  Synthetic
uacaaggaauaaaagugggguc

SEQ ID NO: 290809 - RNA, 23 nt, Artificial Sequence
  Synthetic
uuacaaggaauaaaagugggguc

SEQ ID NO: 290810 - RNA, 24 nt, Artificial Sequence
  Synthetic
auuacaaggaauaaaagugggguc

SEQ ID NO: 290811 - RNA, 18 nt, Artificial Sequence
  Synthetic
ggggacuguggugggguc

SEQ ID NO: 290812 - RNA, 19 nt, Artificial Sequence
  Synthetic
uggggacuguggugggguc

SEQ ID NO: 290813 - RNA, 20 nt, Artificial Sequence
  Synthetic
cuggggacuguggugggguc

SEQ ID NO: 290814 - RNA, 21 nt, Artificial Sequence
  Synthetic
ucuggggacuguggugggguc

SEQ ID NO: 290815 - RNA, 22 nt, Artificial Sequence
  Synthetic
cucuggggacuguggugggguc

SEQ ID NO: 290816 - RNA, 23 nt, Artificial Sequence
  Synthetic
acucuggggacuguggugggguc

SEQ ID NO: 290817 - RNA, 24 nt, Artificial Sequence
  Synthetic
cacucuggggacuguggugggguc

SEQ ID NO: 290818 - RNA, 18 nt, Artificial Sequence
  Synthetic
agggccuguugugggguc

SEQ ID NO: 290819 - RNA, 19 nt, Artificial Sequence
  Synthetic
cagggccuguugugggguc

SEQ ID NO: 290820 - RNA, 20 nt, Artificial Sequence
  Synthetic
ccagggccuguugugggguc

SEQ ID NO: 290821 - RNA, 21 nt, Artificial Sequence
  Synthetic
accagggccuguugugggguc

SEQ ID NO: 290822 - RNA, 22 nt, Artificial Sequence
  Synthetic
caccagggccuguugugggguc

SEQ ID NO: 290823 - RNA, 23 nt, Artificial Sequence
  Synthetic
acaccagggccuguugugggguc

SEQ ID NO: 290824 - RNA, 24 nt, Artificial Sequence
  Synthetic
cacaccagggccuguugugggguc

SEQ ID NO: 290825 - RNA, 18 nt, Artificial Sequence
  Synthetic
uuauuugaaauugggguc

SEQ ID NO: 290826 - RNA, 19 nt, Artificial Sequence
  Synthetic
uuuauuugaaauugggguc

SEQ ID NO: 290827 - RNA, 20 nt, Artificial Sequence
  Synthetic
uuuuauuugaaauugggguc

SEQ ID NO: 290828 - RNA, 21 nt, Artificial Sequence
  Synthetic
cuuuuauuugaaauugggguc

SEQ ID NO: 290829 - RNA, 22 nt, Artificial Sequence
  Synthetic
ucuuuuauuugaaauugggguc

SEQ ID NO: 290830 - RNA, 23 nt, Artificial Sequence
  Synthetic
gucuuuuauuugaaauugggguc

SEQ ID NO: 290831 - RNA, 24 nt, Artificial Sequence
  Synthetic
ggucuuuuauuugaaauugggguc

SEQ ID NO: 290832 - RNA, 18 nt, Artificial Sequence
  Synthetic
gcucucuggggauggguc

SEQ ID NO: 290833 - RNA, 19 nt, Artificial Sequence
  Synthetic
agcucucuggggauggguc

SEQ ID NO: 290834 - RNA, 20 nt, Artificial Sequence
  Synthetic
aagcucucuggggauggguc

SEQ ID NO: 290835 - RNA, 21 nt, Artificial Sequence
  Synthetic
gaagcucucuggggauggguc

SEQ ID NO: 290836 - RNA, 22 nt, Artificial Sequence
  Synthetic
agaagcucucuggggauggguc

SEQ ID NO: 290837 - RNA, 23 nt, Artificial Sequence
  Synthetic
cagaagcucucuggggauggguc

SEQ ID NO: 290838 - RNA, 24 nt, Artificial Sequence
  Synthetic
ucagaagcucucuggggauggguc

SEQ ID NO: 290839 - RNA, 18 nt, Artificial Sequence
  Synthetic
cugcaaaagggcuggguc

SEQ ID NO: 290840 - RNA, 19 nt, Artificial Sequence
  Synthetic
ucugcaaaagggcuggguc

SEQ ID NO: 290841 - RNA, 20 nt, Artificial Sequence
  Synthetic
uucugcaaaagggcuggguc

SEQ ID NO: 290842 - RNA, 21 nt, Artificial Sequence
  Synthetic
cuucugcaaaagggcuggguc

SEQ ID NO: 290843 - RNA, 22 nt, Artificial Sequence
  Synthetic
ucuucugcaaaagggcuggguc

SEQ ID NO: 290844 - RNA, 23 nt, Artificial Sequence
  Synthetic
uucuucugcaaaagggcuggguc

SEQ ID NO: 290845 - RNA, 24 nt, Artificial Sequence
  Synthetic
uuucuucugcaaaagggcuggguc

SEQ ID NO: 290846 - RNA, 18 nt, Artificial Sequence
  Synthetic
agacuagaggaguggguc

SEQ ID NO: 290847 - RNA, 19 nt, Artificial Sequence
  Synthetic
gagacuagaggaguggguc

SEQ ID NO: 290848 - RNA, 20 nt, Artificial Sequence
  Synthetic
ugagacuagaggaguggguc

SEQ ID NO: 290849 - RNA, 21 nt, Artificial Sequence
  Synthetic
gugagacuagaggaguggguc

SEQ ID NO: 290850 - RNA, 22 nt, Artificial Sequence
  Synthetic
agugagacuagaggaguggguc

SEQ ID NO: 290851 - RNA, 23 nt, Artificial Sequence
  Synthetic
cagugagacuagaggaguggguc

SEQ ID NO: 290852 - RNA, 24 nt, Artificial Sequence
  Synthetic
ucagugagacuagaggaguggguc

SEQ ID NO: 290853 - RNA, 18 nt, Artificial Sequence
  Synthetic
aaaacagagauuuggguc

SEQ ID NO: 290854 - RNA, 19 nt, Artificial Sequence
  Synthetic
uaaaacagagauuuggguc

SEQ ID NO: 290855 - RNA, 20 nt, Artificial Sequence
  Synthetic
cuaaaacagagauuuggguc

SEQ ID NO: 290856 - RNA, 21 nt, Artificial Sequence
  Synthetic
ucuaaaacagagauuuggguc

SEQ ID NO: 290857 - RNA, 22 nt, Artificial Sequence
  Synthetic
uucuaaaacagagauuuggguc

SEQ ID NO: 290858 - RNA, 23 nt, Artificial Sequence
  Synthetic
auucuaaaacagagauuuggguc

SEQ ID NO: 290859 - RNA, 24 nt, Artificial Sequence
  Synthetic
cauucuaaaacagagauuuggguc

SEQ ID NO: 290860 - RNA, 18 nt, Artificial Sequence
  Synthetic
aaaaaaaaaaaaaugguc

SEQ ID NO: 290861 - RNA, 19 nt, Artificial Sequence
  Synthetic
aaaaaaaaaaaaaaugguc

SEQ ID NO: 290862 - RNA, 20 nt, Artificial Sequence
  Synthetic
uaaaaaaaaaaaaaaugguc

SEQ ID NO: 290863 - RNA, 21 nt, Artificial Sequence
  Synthetic
guaaaaaaaaaaaaaaugguc

SEQ ID NO: 290864 - RNA, 22 nt, Artificial Sequence
  Synthetic
uguaaaaaaaaaaaaaaugguc

SEQ ID NO: 290865 - RNA, 23 nt, Artificial Sequence
  Synthetic
uuguaaaaaaaaaaaaaaugguc

SEQ ID NO: 290866 - RNA, 24 nt, Artificial Sequence
  Synthetic
guuguaaaaaaaaaaaaaaugguc

SEQ ID NO: 290867 - RNA, 18 nt, Artificial Sequence
  Synthetic
guauacuuaaaaaugguc

SEQ ID NO: 290868 - RNA, 19 nt, Artificial Sequence
  Synthetic
uguauacuuaaaaaugguc

SEQ ID NO: 290869 - RNA, 20 nt, Artificial Sequence
  Synthetic
cuguauacuuaaaaaugguc

SEQ ID NO: 290870 - RNA, 21 nt, Artificial Sequence
  Synthetic
acuguauacuuaaaaaugguc

SEQ ID NO: 290871 - RNA, 22 nt, Artificial Sequence
  Synthetic
aacuguauacuuaaaaaugguc

SEQ ID NO: 290872 - RNA, 23 nt, Artificial Sequence
  Synthetic
caacuguauacuuaaaaaugguc

SEQ ID NO: 290873 - RNA, 24 nt, Artificial Sequence
  Synthetic
ucaacuguauacuuaaaaaugguc

SEQ ID NO: 290874 - RNA, 18 nt, Artificial Sequence
  Synthetic
ugcuguagacaaaugguc

SEQ ID NO: 290875 - RNA, 19 nt, Artificial Sequence
  Synthetic
uugcuguagacaaaugguc

SEQ ID NO: 290876 - RNA, 20 nt, Artificial Sequence
  Synthetic
auugcuguagacaaaugguc

SEQ ID NO: 290877 - RNA, 21 nt, Artificial Sequence
  Synthetic
aauugcuguagacaaaugguc

SEQ ID NO: 290878 - RNA, 22 nt, Artificial Sequence
  Synthetic
uaauugcuguagacaaaugguc

SEQ ID NO: 290879 - RNA, 23 nt, Artificial Sequence
  Synthetic
auaauugcuguagacaaaugguc

SEQ ID NO: 290880 - RNA, 24 nt, Artificial Sequence
  Synthetic
aauaauugcuguagacaaaugguc

SEQ ID NO: 290881 - RNA, 18 nt, Artificial Sequence
  Synthetic
cgggcggaucacaugguc

SEQ ID NO: 290882 - RNA, 19 nt, Artificial Sequence
  Synthetic
gcgggcggaucacaugguc

SEQ ID NO: 290883 - RNA, 20 nt, Artificial Sequence
  Synthetic
ggcgggcggaucacaugguc

SEQ ID NO: 290884 - RNA, 21 nt, Artificial Sequence
  Synthetic
aggcgggcggaucacaugguc

SEQ ID NO: 290885 - RNA, 22 nt, Artificial Sequence
  Synthetic
gaggcgggcggaucacaugguc

SEQ ID NO: 290886 - RNA, 23 nt, Artificial Sequence
  Synthetic
ugaggcgggcggaucacaugguc

SEQ ID NO: 290887 - RNA, 24 nt, Artificial Sequence
  Synthetic
cugaggcgggcggaucacaugguc

SEQ ID NO: 290888 - RNA, 18 nt, Artificial Sequence
  Synthetic
ugccagucugccaugguc

SEQ ID NO: 290889 - RNA, 19 nt, Artificial Sequence
  Synthetic
augccagucugccaugguc

SEQ ID NO: 290890 - RNA, 20 nt, Artificial Sequence
  Synthetic
aaugccagucugccaugguc

SEQ ID NO: 290891 - RNA, 21 nt, Artificial Sequence
  Synthetic
uaaugccagucugccaugguc

SEQ ID NO: 290892 - RNA, 22 nt, Artificial Sequence
  Synthetic
cuaaugccagucugccaugguc

SEQ ID NO: 290893 - RNA, 23 nt, Artificial Sequence
  Synthetic
ccuaaugccagucugccaugguc

SEQ ID NO: 290894 - RNA, 24 nt, Artificial Sequence
  Synthetic
uccuaaugccagucugccaugguc

SEQ ID NO: 290895 - RNA, 18 nt, Artificial Sequence
  Synthetic
agauauucacagaugguc

SEQ ID NO: 290896 - RNA, 19 nt, Artificial Sequence
  Synthetic
cagauauucacagaugguc

SEQ ID NO: 290897 - RNA, 20 nt, Artificial Sequence
  Synthetic
ccagauauucacagaugguc

SEQ ID NO: 290898 - RNA, 21 nt, Artificial Sequence
  Synthetic
accagauauucacagaugguc

SEQ ID NO: 290899 - RNA, 22 nt, Artificial Sequence
  Synthetic
aaccagauauucacagaugguc

SEQ ID NO: 290900 - RNA, 23 nt, Artificial Sequence
  Synthetic
caaccagauauucacagaugguc

SEQ ID NO: 290901 - RNA, 24 nt, Artificial Sequence
  Synthetic
ucaaccagauauucacagaugguc

SEQ ID NO: 290902 - RNA, 18 nt, Artificial Sequence
  Synthetic
aaaagggaguagaugguc

SEQ ID NO: 290903 - RNA, 19 nt, Artificial Sequence
  Synthetic
aaaaagggaguagaugguc

SEQ ID NO: 290904 - RNA, 20 nt, Artificial Sequence
  Synthetic
aaaaaagggaguagaugguc

SEQ ID NO: 290905 - RNA, 21 nt, Artificial Sequence
  Synthetic
caaaaaagggaguagaugguc

SEQ ID NO: 290906 - RNA, 22 nt, Artificial Sequence
  Synthetic
ccaaaaaagggaguagaugguc

SEQ ID NO: 290907 - RNA, 23 nt, Artificial Sequence
  Synthetic
uccaaaaaagggaguagaugguc

SEQ ID NO: 290908 - RNA, 24 nt, Artificial Sequence
  Synthetic
cuccaaaaaagggaguagaugguc

SEQ ID NO: 290909 - RNA, 18 nt, Artificial Sequence
  Synthetic
aaaaacguagaacugguc

SEQ ID NO: 290910 - RNA, 19 nt, Artificial Sequence
  Synthetic
gaaaaacguagaacugguc

SEQ ID NO: 290911 - RNA, 20 nt, Artificial Sequence
  Synthetic
agaaaaacguagaacugguc

SEQ ID NO: 290912 - RNA, 21 nt, Artificial Sequence
  Synthetic
cagaaaaacguagaacugguc

SEQ ID NO: 290913 - RNA, 22 nt, Artificial Sequence
  Synthetic
ucagaaaaacguagaacugguc

SEQ ID NO: 290914 - RNA, 23 nt, Artificial Sequence
  Synthetic
cucagaaaaacguagaacugguc

SEQ ID NO: 290915 - RNA, 24 nt, Artificial Sequence
  Synthetic
ucucagaaaaacguagaacugguc

SEQ ID NO: 290916 - RNA, 18 nt, Artificial Sequence
  Synthetic
gguugggaaacacugguc

SEQ ID NO: 290917 - RNA, 19 nt, Artificial Sequence
  Synthetic
agguugggaaacacugguc

SEQ ID NO: 290918 - RNA, 20 nt, Artificial Sequence
  Synthetic
gagguugggaaacacugguc

SEQ ID NO: 290919 - RNA, 21 nt, Artificial Sequence
  Synthetic
ugagguugggaaacacugguc

SEQ ID NO: 290920 - RNA, 22 nt, Artificial Sequence
  Synthetic
gugagguugggaaacacugguc

SEQ ID NO: 290921 - RNA, 23 nt, Artificial Sequence
  Synthetic
ggugagguugggaaacacugguc

SEQ ID NO: 290922 - RNA, 24 nt, Artificial Sequence
  Synthetic
uggugagguugggaaacacugguc

SEQ ID NO: 290923 - RNA, 18 nt, Artificial Sequence
  Synthetic
guuugagaaccacugguc

SEQ ID NO: 290924 - RNA, 19 nt, Artificial Sequence
  Synthetic
aguuugagaaccacugguc

SEQ ID NO: 290925 - RNA, 20 nt, Artificial Sequence
  Synthetic
aaguuugagaaccacugguc

SEQ ID NO: 290926 - RNA, 21 nt, Artificial Sequence
  Synthetic
aaaguuugagaaccacugguc

SEQ ID NO: 290927 - RNA, 22 nt, Artificial Sequence
  Synthetic
uaaaguuugagaaccacugguc

SEQ ID NO: 290928 - RNA, 23 nt, Artificial Sequence
  Synthetic
cuaaaguuugagaaccacugguc

SEQ ID NO: 290929 - RNA, 24 nt, Artificial Sequence
  Synthetic
acuaaaguuugagaaccacugguc

SEQ ID NO: 290930 - RNA, 18 nt, Artificial Sequence
  Synthetic
aguugaaaaucacugguc

SEQ ID NO: 290931 - RNA, 19 nt, Artificial Sequence
  Synthetic
uaguugaaaaucacugguc

SEQ ID NO: 290932 - RNA, 20 nt, Artificial Sequence
  Synthetic
cuaguugaaaaucacugguc

SEQ ID NO: 290933 - RNA, 21 nt, Artificial Sequence
  Synthetic
ccuaguugaaaaucacugguc

SEQ ID NO: 290934 - RNA, 22 nt, Artificial Sequence
  Synthetic
cccuaguugaaaaucacugguc

SEQ ID NO: 290935 - RNA, 23 nt, Artificial Sequence
  Synthetic
ucccuaguugaaaaucacugguc

SEQ ID NO: 290936 - RNA, 24 nt, Artificial Sequence
  Synthetic
aucccuaguugaaaaucacugguc

SEQ ID NO: 290937 - RNA, 18 nt, Artificial Sequence
  Synthetic
aucuuggccagacugguc

SEQ ID NO: 290938 - RNA, 19 nt, Artificial Sequence
  Synthetic
caucuuggccagacugguc

SEQ ID NO: 290939 - RNA, 20 nt, Artificial Sequence
  Synthetic
ccaucuuggccagacugguc

SEQ ID NO: 290940 - RNA, 21 nt, Artificial Sequence
  Synthetic
accaucuuggccagacugguc

SEQ ID NO: 290941 - RNA, 22 nt, Artificial Sequence
  Synthetic
caccaucuuggccagacugguc

SEQ ID NO: 290942 - RNA, 23 nt, Artificial Sequence
  Synthetic
ucaccaucuuggccagacugguc

SEQ ID NO: 290943 - RNA, 24 nt, Artificial Sequence
  Synthetic
uucaccaucuuggccagacugguc

SEQ ID NO: 290944 - RNA, 18 nt, Artificial Sequence
  Synthetic
auguuagccggacugguc

SEQ ID NO: 290945 - RNA, 19 nt, Artificial Sequence
  Synthetic
cauguuagccggacugguc

SEQ ID NO: 290946 - RNA, 20 nt, Artificial Sequence
  Synthetic
ccauguuagccggacugguc

SEQ ID NO: 290947 - RNA, 21 nt, Artificial Sequence
  Synthetic
accauguuagccggacugguc

SEQ ID NO: 290948 - RNA, 22 nt, Artificial Sequence
  Synthetic
caccauguuagccggacugguc

SEQ ID NO: 290949 - RNA, 23 nt, Artificial Sequence
  Synthetic
ucaccauguuagccggacugguc

SEQ ID NO: 290950 - RNA, 24 nt, Artificial Sequence
  Synthetic
uucaccauguuagccggacugguc

SEQ ID NO: 290951 - RNA, 18 nt, Artificial Sequence
  Synthetic
ucauacacagaccugguc

SEQ ID NO: 290952 - RNA, 19 nt, Artificial Sequence
  Synthetic
uucauacacagaccugguc

SEQ ID NO: 290953 - RNA, 20 nt, Artificial Sequence
  Synthetic
auucauacacagaccugguc

SEQ ID NO: 290954 - RNA, 21 nt, Artificial Sequence
  Synthetic
gauucauacacagaccugguc

SEQ ID NO: 290955 - RNA, 22 nt, Artificial Sequence
  Synthetic
ugauucauacacagaccugguc

SEQ ID NO: 290956 - RNA, 23 nt, Artificial Sequence
  Synthetic
augauucauacacagaccugguc

SEQ ID NO: 290957 - RNA, 24 nt, Artificial Sequence
  Synthetic
gaugauucauacacagaccugguc

SEQ ID NO: 290958 - RNA, 18 nt, Artificial Sequence
  Synthetic
acaaucuggggccugguc

SEQ ID NO: 290959 - RNA, 19 nt, Artificial Sequence
  Synthetic
aacaaucuggggccugguc

SEQ ID NO: 290960 - RNA, 20 nt, Artificial Sequence
  Synthetic
uaacaaucuggggccugguc

SEQ ID NO: 290961 - RNA, 21 nt, Artificial Sequence
  Synthetic
auaacaaucuggggccugguc

SEQ ID NO: 290962 - RNA, 22 nt, Artificial Sequence
  Synthetic
gauaacaaucuggggccugguc

SEQ ID NO: 290963 - RNA, 23 nt, Artificial Sequence
  Synthetic
ugauaacaaucuggggccugguc

SEQ ID NO: 290964 - RNA, 24 nt, Artificial Sequence
  Synthetic
gugauaacaaucuggggccugguc

SEQ ID NO: 290965 - RNA, 18 nt, Artificial Sequence
  Synthetic
ccucauaccauccugguc

SEQ ID NO: 290966 - RNA, 19 nt, Artificial Sequence
  Synthetic
uccucauaccauccugguc

SEQ ID NO: 290967 - RNA, 20 nt, Artificial Sequence
  Synthetic
cuccucauaccauccugguc

SEQ ID NO: 290968 - RNA, 21 nt, Artificial Sequence
  Synthetic
acuccucauaccauccugguc

SEQ ID NO: 290969 - RNA, 22 nt, Artificial Sequence
  Synthetic
cacuccucauaccauccugguc

SEQ ID NO: 290970 - RNA, 23 nt, Artificial Sequence
  Synthetic
ucacuccucauaccauccugguc

SEQ ID NO: 290971 - RNA, 24 nt, Artificial Sequence
  Synthetic
cucacuccucauaccauccugguc

SEQ ID NO: 290972 - RNA, 18 nt, Artificial Sequence
  Synthetic
cuagcccugguccugguc

SEQ ID NO: 290973 - RNA, 19 nt, Artificial Sequence
  Synthetic
ucuagcccugguccugguc

SEQ ID NO: 290974 - RNA, 20 nt, Artificial Sequence
  Synthetic
uucuagcccugguccugguc

SEQ ID NO: 290975 - RNA, 21 nt, Artificial Sequence
  Synthetic
auucuagcccugguccugguc

SEQ ID NO: 290976 - RNA, 22 nt, Artificial Sequence
  Synthetic
uauucuagcccugguccugguc

SEQ ID NO: 290977 - RNA, 23 nt, Artificial Sequence
  Synthetic
uuauucuagcccugguccugguc

SEQ ID NO: 290978 - RNA, 24 nt, Artificial Sequence
  Synthetic
uuuauucuagcccugguccugguc

SEQ ID NO: 290979 - RNA, 18 nt, Artificial Sequence
  Synthetic
acguuggucaagcugguc

SEQ ID NO: 290980 - RNA, 19 nt, Artificial Sequence
  Synthetic
cacguuggucaagcugguc

SEQ ID NO: 290981 - RNA, 20 nt, Artificial Sequence
  Synthetic
ccacguuggucaagcugguc

SEQ ID NO: 290982 - RNA, 21 nt, Artificial Sequence
  Synthetic
uccacguuggucaagcugguc

SEQ ID NO: 290983 - RNA, 22 nt, Artificial Sequence
  Synthetic
cuccacguuggucaagcugguc

SEQ ID NO: 290984 - RNA, 23 nt, Artificial Sequence
  Synthetic
ucuccacguuggucaagcugguc

SEQ ID NO: 290985 - RNA, 24 nt, Artificial Sequence
  Synthetic
uucuccacguuggucaagcugguc

SEQ ID NO: 290986 - RNA, 18 nt, Artificial Sequence
  Synthetic
auguugcccaggcugguc

SEQ ID NO: 290987 - RNA, 19 nt, Artificial Sequence
  Synthetic
cauguugcccaggcugguc

SEQ ID NO: 290988 - RNA, 20 nt, Artificial Sequence
  Synthetic
ccauguugcccaggcugguc

SEQ ID NO: 290989 - RNA, 21 nt, Artificial Sequence
  Synthetic
accauguugcccaggcugguc

SEQ ID NO: 290990 - RNA, 22 nt, Artificial Sequence
  Synthetic
caccauguugcccaggcugguc

SEQ ID NO: 290991 - RNA, 23 nt, Artificial Sequence
  Synthetic
ucaccauguugcccaggcugguc

SEQ ID NO: 290992 - RNA, 24 nt, Artificial Sequence
  Synthetic
uucaccauguugcccaggcugguc

SEQ ID NO: 290993 - RNA, 19 nt, Artificial Sequence
  Synthetic
uauguugcccaggcugguc

SEQ ID NO: 290994 - RNA, 20 nt, Artificial Sequence
  Synthetic
uuauguugcccaggcugguc

SEQ ID NO: 290995 - RNA, 21 nt, Artificial Sequence
  Synthetic
auuauguugcccaggcugguc

SEQ ID NO: 290996 - RNA, 22 nt, Artificial Sequence
  Synthetic
cauuauguugcccaggcugguc

SEQ ID NO: 290997 - RNA, 23 nt, Artificial Sequence
  Synthetic
ucauuauguugcccaggcugguc

SEQ ID NO: 290998 - RNA, 24 nt, Artificial Sequence
  Synthetic
gucauuauguugcccaggcugguc

SEQ ID NO: 290999 - RNA, 18 nt, Artificial Sequence
  Synthetic
augucggccaggcugguc

SEQ ID NO: 291000 - RNA, 19 nt, Artificial Sequence
  Synthetic
caugucggccaggcugguc

SEQ ID NO: 291001 - RNA, 20 nt, Artificial Sequence
  Synthetic
ccaugucggccaggcugguc

SEQ ID NO: 291002 - RNA, 21 nt, Artificial Sequence
  Synthetic
gccaugucggccaggcugguc

SEQ ID NO: 291003 - RNA, 22 nt, Artificial Sequence
  Synthetic
cgccaugucggccaggcugguc

SEQ ID NO: 291004 - RNA, 23 nt, Artificial Sequence
  Synthetic
ucgccaugucggccaggcugguc

SEQ ID NO: 291005 - RNA, 24 nt, Artificial Sequence
  Synthetic
uucgccaugucggccaggcugguc

SEQ ID NO: 291006 - RNA, 18 nt, Artificial Sequence
  Synthetic
aucuuggccaggcugguc

SEQ ID NO: 291007 - RNA, 19 nt, Artificial Sequence
  Synthetic
caucuuggccaggcugguc

SEQ ID NO: 291008 - RNA, 20 nt, Artificial Sequence
  Synthetic
ccaucuuggccaggcugguc

SEQ ID NO: 291009 - RNA, 21 nt, Artificial Sequence
  Synthetic
accaucuuggccaggcugguc

SEQ ID NO: 291010 - RNA, 22 nt, Artificial Sequence
  Synthetic
caccaucuuggccaggcugguc

SEQ ID NO: 291011 - RNA, 23 nt, Artificial Sequence
  Synthetic
ucaccaucuuggccaggcugguc

SEQ ID NO: 291012 - RNA, 24 nt, Artificial Sequence
  Synthetic
uucaccaucuuggccaggcugguc

SEQ ID NO: 291013 - RNA, 18 nt, Artificial Sequence
  Synthetic
acguuggccaggcugguc

SEQ ID NO: 291014 - RNA, 19 nt, Artificial Sequence
  Synthetic
cacguuggccaggcugguc

SEQ ID NO: 291015 - RNA, 20 nt, Artificial Sequence
  Synthetic
ccacguuggccaggcugguc

SEQ ID NO: 291016 - RNA, 21 nt, Artificial Sequence
  Synthetic
accacguuggccaggcugguc

SEQ ID NO: 291017 - RNA, 22 nt, Artificial Sequence
  Synthetic
caccacguuggccaggcugguc

SEQ ID NO: 291018 - RNA, 23 nt, Artificial Sequence
  Synthetic
ucaccacguuggccaggcugguc

SEQ ID NO: 291019 - RNA, 24 nt, Artificial Sequence
  Synthetic
uucaccacguuggccaggcugguc

SEQ ID NO: 291020 - RNA, 18 nt, Artificial Sequence
  Synthetic
auguuggccaggcugguc

SEQ ID NO: 291021 - RNA, 19 nt, Artificial Sequence
  Synthetic
cauguuggccaggcugguc

SEQ ID NO: 291022 - RNA, 20 nt, Artificial Sequence
  Synthetic
ccauguuggccaggcugguc

SEQ ID NO: 291023 - RNA, 19 nt, Artificial Sequence
  Synthetic
gauguuggccaggcugguc

SEQ ID NO: 291024 - RNA, 20 nt, Artificial Sequence
  Synthetic
ugauguuggccaggcugguc

SEQ ID NO: 291025 - RNA, 21 nt, Artificial Sequence
  Synthetic
augauguuggccaggcugguc

SEQ ID NO: 291026 - RNA, 22 nt, Artificial Sequence
  Synthetic
caugauguuggccaggcugguc

SEQ ID NO: 291027 - RNA, 23 nt, Artificial Sequence
  Synthetic
ucaugauguuggccaggcugguc

SEQ ID NO: 291028 - RNA, 24 nt, Artificial Sequence
  Synthetic
uucaugauguuggccaggcugguc

SEQ ID NO: 291029 - RNA, 18 nt, Artificial Sequence
  Synthetic
cauuuggccaggcugguc

SEQ ID NO: 291030 - RNA, 19 nt, Artificial Sequence
  Synthetic
ccauuuggccaggcugguc

SEQ ID NO: 291031 - RNA, 20 nt, Artificial Sequence
  Synthetic
accauuuggccaggcugguc

SEQ ID NO: 291032 - RNA, 21 nt, Artificial Sequence
  Synthetic
caccauuuggccaggcugguc

SEQ ID NO: 291033 - RNA, 22 nt, Artificial Sequence
  Synthetic
ucaccauuuggccaggcugguc

SEQ ID NO: 291034 - RNA, 23 nt, Artificial Sequence
  Synthetic
uucaccauuuggccaggcugguc

SEQ ID NO: 291035 - RNA, 24 nt, Artificial Sequence
  Synthetic
uuucaccauuuggccaggcugguc

SEQ ID NO: 291036 - RNA, 18 nt, Artificial Sequence
  Synthetic
auguuagucaggcugguc

SEQ ID NO: 291037 - RNA, 19 nt, Artificial Sequence
  Synthetic
cauguuagucaggcugguc

SEQ ID NO: 291038 - RNA, 20 nt, Artificial Sequence
  Synthetic
ccauguuagucaggcugguc

SEQ ID NO: 291039 - RNA, 21 nt, Artificial Sequence
  Synthetic
accauguuagucaggcugguc

SEQ ID NO: 291040 - RNA, 22 nt, Artificial Sequence
  Synthetic
caccauguuagucaggcugguc

SEQ ID NO: 291041 - RNA, 23 nt, Artificial Sequence
  Synthetic
ucaccauguuagucaggcugguc

SEQ ID NO: 291042 - RNA, 24 nt, Artificial Sequence
  Synthetic
uucaccauguuagucaggcugguc

SEQ ID NO: 291043 - RNA, 18 nt, Artificial Sequence
  Synthetic
augucggucaggcugguc

SEQ ID NO: 291044 - RNA, 19 nt, Artificial Sequence
  Synthetic
caugucggucaggcugguc

SEQ ID NO: 291045 - RNA, 20 nt, Artificial Sequence
  Synthetic
gcaugucggucaggcugguc

SEQ ID NO: 291046 - RNA, 21 nt, Artificial Sequence
  Synthetic
agcaugucggucaggcugguc

SEQ ID NO: 291047 - RNA, 22 nt, Artificial Sequence
  Synthetic
cagcaugucggucaggcugguc

SEQ ID NO: 291048 - RNA, 23 nt, Artificial Sequence
  Synthetic
ucagcaugucggucaggcugguc

SEQ ID NO: 291049 - RNA, 24 nt, Artificial Sequence
  Synthetic
uucagcaugucggucaggcugguc

SEQ ID NO: 291050 - RNA, 18 nt, Artificial Sequence
  Synthetic
auguuggucaggcugguc

SEQ ID NO: 291051 - RNA, 19 nt, Artificial Sequence
  Synthetic
cauguuggucaggcugguc

SEQ ID NO: 291052 - RNA, 20 nt, Artificial Sequence
  Synthetic
acauguuggucaggcugguc

SEQ ID NO: 291053 - RNA, 21 nt, Artificial Sequence
  Synthetic
cacauguuggucaggcugguc

SEQ ID NO: 291054 - RNA, 22 nt, Artificial Sequence
  Synthetic
ucacauguuggucaggcugguc

SEQ ID NO: 291055 - RNA, 23 nt, Artificial Sequence
  Synthetic
uucacauguuggucaggcugguc

SEQ ID NO: 291056 - RNA, 24 nt, Artificial Sequence
  Synthetic
uuucacauguuggucaggcugguc

SEQ ID NO: 291057 - RNA, 21 nt, Artificial Sequence
  Synthetic
uccauguuggucaggcugguc

SEQ ID NO: 291058 - RNA, 22 nt, Artificial Sequence
  Synthetic
cuccauguuggucaggcugguc

SEQ ID NO: 291059 - RNA, 23 nt, Artificial Sequence
  Synthetic
ucuccauguuggucaggcugguc

SEQ ID NO: 291060 - RNA, 24 nt, Artificial Sequence
  Synthetic
uucuccauguuggucaggcugguc

SEQ ID NO: 291061 - RNA, 18 nt, Artificial Sequence
  Synthetic
ccaugaagccaucugguc

SEQ ID NO: 291062 - RNA, 19 nt, Artificial Sequence
  Synthetic
cccaugaagccaucugguc

SEQ ID NO: 291063 - RNA, 20 nt, Artificial Sequence
  Synthetic
ucccaugaagccaucugguc

SEQ ID NO: 291064 - RNA, 21 nt, Artificial Sequence
  Synthetic
cucccaugaagccaucugguc

SEQ ID NO: 291065 - RNA, 22 nt, Artificial Sequence
  Synthetic
ucucccaugaagccaucugguc

SEQ ID NO: 291066 - RNA, 23 nt, Artificial Sequence
  Synthetic
uucucccaugaagccaucugguc

SEQ ID NO: 291067 - RNA, 24 nt, Artificial Sequence
  Synthetic
auucucccaugaagccaucugguc

SEQ ID NO: 291068 - RNA, 18 nt, Artificial Sequence
  Synthetic
cugugaauccaucugguc

SEQ ID NO: 291069 - RNA, 19 nt, Artificial Sequence
  Synthetic
gcugugaauccaucugguc

SEQ ID NO: 291070 - RNA, 20 nt, Artificial Sequence
  Synthetic
agcugugaauccaucugguc

SEQ ID NO: 291071 - RNA, 21 nt, Artificial Sequence
  Synthetic
cagcugugaauccaucugguc

SEQ ID NO: 291072 - RNA, 22 nt, Artificial Sequence
  Synthetic
ucagcugugaauccaucugguc

SEQ ID NO: 291073 - RNA, 23 nt, Artificial Sequence
  Synthetic
uucagcugugaauccaucugguc

SEQ ID NO: 291074 - RNA, 24 nt, Artificial Sequence
  Synthetic
auucagcugugaauccaucugguc

SEQ ID NO: 291075 - RNA, 20 nt, Artificial Sequence
  Synthetic
ggcugugaauccaucugguc

SEQ ID NO: 291076 - RNA, 21 nt, Artificial Sequence
  Synthetic
cggcugugaauccaucugguc

SEQ ID NO: 291077 - RNA, 22 nt, Artificial Sequence
  Synthetic
ucggcugugaauccaucugguc

SEQ ID NO: 291078 - RNA, 23 nt, Artificial Sequence
  Synthetic
uucggcugugaauccaucugguc

SEQ ID NO: 291079 - RNA, 24 nt, Artificial Sequence
  Synthetic
auucggcugugaauccaucugguc

SEQ ID NO: 291080 - RNA, 18 nt, Artificial Sequence
  Synthetic
aaaguguggucucugguc

SEQ ID NO: 291081 - RNA, 19 nt, Artificial Sequence
  Synthetic
caaaguguggucucugguc

SEQ ID NO: 291082 - RNA, 20 nt, Artificial Sequence
  Synthetic
ucaaaguguggucucugguc

SEQ ID NO: 291083 - RNA, 21 nt, Artificial Sequence
  Synthetic
cucaaaguguggucucugguc

SEQ ID NO: 291084 - RNA, 22 nt, Artificial Sequence
  Synthetic
acucaaaguguggucucugguc

SEQ ID NO: 291085 - RNA, 23 nt, Artificial Sequence
  Synthetic
uacucaaaguguggucucugguc

SEQ ID NO: 291086 - RNA, 24 nt, Artificial Sequence
  Synthetic
cuacucaaaguguggucucugguc

SEQ ID NO: 291087 - RNA, 18 nt, Artificial Sequence
  Synthetic
auguuggccagucugguc

SEQ ID NO: 291088 - RNA, 19 nt, Artificial Sequence
  Synthetic
cauguuggccagucugguc

SEQ ID NO: 291089 - RNA, 20 nt, Artificial Sequence
  Synthetic
ccauguuggccagucugguc

SEQ ID NO: 291090 - RNA, 21 nt, Artificial Sequence
  Synthetic
accauguuggccagucugguc

SEQ ID NO: 291091 - RNA, 22 nt, Artificial Sequence
  Synthetic
caccauguuggccagucugguc

SEQ ID NO: 291092 - RNA, 23 nt, Artificial Sequence
  Synthetic
ucaccauguuggccagucugguc

SEQ ID NO: 291093 - RNA, 24 nt, Artificial Sequence
  Synthetic
uucaccauguuggccagucugguc

SEQ ID NO: 291094 - RNA, 18 nt, Artificial Sequence
  Synthetic
cugugaauccgucugguc

SEQ ID NO: 291095 - RNA, 19 nt, Artificial Sequence
  Synthetic
gcugugaauccgucugguc

SEQ ID NO: 291096 - RNA, 20 nt, Artificial Sequence
  Synthetic
agcugugaauccgucugguc

SEQ ID NO: 291097 - RNA, 21 nt, Artificial Sequence
  Synthetic
cagcugugaauccgucugguc

SEQ ID NO: 291098 - RNA, 22 nt, Artificial Sequence
  Synthetic
ucagcugugaauccgucugguc

SEQ ID NO: 291099 - RNA, 23 nt, Artificial Sequence
  Synthetic
uucagcugugaauccgucugguc

SEQ ID NO: 291100 - RNA, 24 nt, Artificial Sequence
  Synthetic
auucagcugugaauccgucugguc

SEQ ID NO: 291101 - RNA, 20 nt, Artificial Sequence
  Synthetic
ggcugugaauccgucugguc

SEQ ID NO: 291102 - RNA, 21 nt, Artificial Sequence
  Synthetic
cggcugugaauccgucugguc

SEQ ID NO: 291103 - RNA, 22 nt, Artificial Sequence
  Synthetic
ucggcugugaauccgucugguc

SEQ ID NO: 291104 - RNA, 23 nt, Artificial Sequence
  Synthetic
uucggcugugaauccgucugguc

SEQ ID NO: 291105 - RNA, 24 nt, Artificial Sequence
  Synthetic
auucggcugugaauccgucugguc

SEQ ID NO: 291106 - RNA, 18 nt, Artificial Sequence
  Synthetic
acagcuacucuucugguc

SEQ ID NO: 291107 - RNA, 19 nt, Artificial Sequence
  Synthetic
uacagcuacucuucugguc

SEQ ID NO: 291108 - RNA, 20 nt, Artificial Sequence
  Synthetic
guacagcuacucuucugguc

SEQ ID NO: 291109 - RNA, 21 nt, Artificial Sequence
  Synthetic
uguacagcuacucuucugguc

SEQ ID NO: 291110 - RNA, 22 nt, Artificial Sequence
  Synthetic
uuguacagcuacucuucugguc

SEQ ID NO: 291111 - RNA, 23 nt, Artificial Sequence
  Synthetic
guuguacagcuacucuucugguc

SEQ ID NO: 291112 - RNA, 24 nt, Artificial Sequence
  Synthetic
aguuguacagcuacucuucugguc

SEQ ID NO: 291113 - RNA, 18 nt, Artificial Sequence
  Synthetic
uuaauaaauuuucugguc

SEQ ID NO: 291114 - RNA, 19 nt, Artificial Sequence
  Synthetic
cuuaauaaauuuucugguc

SEQ ID NO: 291115 - RNA, 20 nt, Artificial Sequence
  Synthetic
ccuuaauaaauuuucugguc

SEQ ID NO: 291116 - RNA, 21 nt, Artificial Sequence
  Synthetic
gccuuaauaaauuuucugguc

SEQ ID NO: 291117 - RNA, 22 nt, Artificial Sequence
  Synthetic
ugccuuaauaaauuuucugguc

SEQ ID NO: 291118 - RNA, 23 nt, Artificial Sequence
  Synthetic
uugccuuaauaaauuuucugguc

SEQ ID NO: 291119 - RNA, 24 nt, Artificial Sequence
  Synthetic
auugccuuaauaaauuuucugguc

SEQ ID NO: 291120 - RNA, 18 nt, Artificial Sequence
  Synthetic
uucuggucucucgugguc

SEQ ID NO: 291121 - RNA, 19 nt, Artificial Sequence
  Synthetic
uuucuggucucucgugguc

SEQ ID NO: 291122 - RNA, 20 nt, Artificial Sequence
  Synthetic
cuuucuggucucucgugguc

SEQ ID NO: 291123 - RNA, 21 nt, Artificial Sequence
  Synthetic
ucuuucuggucucucgugguc

SEQ ID NO: 291124 - RNA, 22 nt, Artificial Sequence
  Synthetic
uucuuucuggucucucgugguc

SEQ ID NO: 291125 - RNA, 23 nt, Artificial Sequence
  Synthetic
auucuuucuggucucucgugguc

SEQ ID NO: 291126 - RNA, 24 nt, Artificial Sequence
  Synthetic
aauucuuucuggucucucgugguc

SEQ ID NO: 291127 - RNA, 18 nt, Artificial Sequence
  Synthetic
auugucuauagugugguc

SEQ ID NO: 291128 - RNA, 19 nt, Artificial Sequence
  Synthetic
uauugucuauagugugguc

SEQ ID NO: 291129 - RNA, 20 nt, Artificial Sequence
  Synthetic
uuauugucuauagugugguc

SEQ ID NO: 291130 - RNA, 21 nt, Artificial Sequence
  Synthetic
auuauugucuauagugugguc

SEQ ID NO: 291131 - RNA, 22 nt, Artificial Sequence
  Synthetic
uauuauugucuauagugugguc

SEQ ID NO: 291132 - RNA, 23 nt, Artificial Sequence
  Synthetic
guauuauugucuauagugugguc

SEQ ID NO: 291133 - RNA, 24 nt, Artificial Sequence
  Synthetic
gguauuauugucuauagugugguc

SEQ ID NO: 291134 - RNA, 18 nt, Artificial Sequence
  Synthetic
auucuuuugaaauugguc

SEQ ID NO: 291135 - RNA, 19 nt, Artificial Sequence
  Synthetic
cauucuuuugaaauugguc

SEQ ID NO: 291136 - RNA, 20 nt, Artificial Sequence
  Synthetic
ucauucuuuugaaauugguc

SEQ ID NO: 291137 - RNA, 21 nt, Artificial Sequence
  Synthetic
aucauucuuuugaaauugguc

SEQ ID NO: 291138 - RNA, 22 nt, Artificial Sequence
  Synthetic
uaucauucuuuugaaauugguc

SEQ ID NO: 291139 - RNA, 23 nt, Artificial Sequence
  Synthetic
cuaucauucuuuugaaauugguc

SEQ ID NO: 291140 - RNA, 24 nt, Artificial Sequence
  Synthetic
gcuaucauucuuuugaaauugguc

SEQ ID NO: 291141 - RNA, 18 nt, Artificial Sequence
  Synthetic
auucuauaggaauugguc

SEQ ID NO: 291142 - RNA, 19 nt, Artificial Sequence
  Synthetic
cauucuauaggaauugguc

SEQ ID NO: 291143 - RNA, 20 nt, Artificial Sequence
  Synthetic
acauucuauaggaauugguc

SEQ ID NO: 291144 - RNA, 21 nt, Artificial Sequence
  Synthetic
gacauucuauaggaauugguc

SEQ ID NO: 291145 - RNA, 22 nt, Artificial Sequence
  Synthetic
ugacauucuauaggaauugguc

SEQ ID NO: 291146 - RNA, 23 nt, Artificial Sequence
  Synthetic
uugacauucuauaggaauugguc

SEQ ID NO: 291147 - RNA, 24 nt, Artificial Sequence
  Synthetic
auugacauucuauaggaauugguc

SEQ ID NO: 291148 - RNA, 18 nt, Artificial Sequence
  Synthetic
ccuagaauauaauugguc

SEQ ID NO: 291149 - RNA, 19 nt, Artificial Sequence
  Synthetic
cccuagaauauaauugguc

SEQ ID NO: 291150 - RNA, 20 nt, Artificial Sequence
  Synthetic
ucccuagaauauaauugguc

SEQ ID NO: 291151 - RNA, 21 nt, Artificial Sequence
  Synthetic
uucccuagaauauaauugguc

SEQ ID NO: 291152 - RNA, 22 nt, Artificial Sequence
  Synthetic
uuucccuagaauauaauugguc

SEQ ID NO: 291153 - RNA, 23 nt, Artificial Sequence
  Synthetic
auuucccuagaauauaauugguc

SEQ ID NO: 291154 - RNA, 24 nt, Artificial Sequence
  Synthetic
cauuucccuagaauauaauugguc

SEQ ID NO: 291155 - RNA, 18 nt, Artificial Sequence
  Synthetic
auuuugauggcauugguc

SEQ ID NO: 291156 - RNA, 19 nt, Artificial Sequence
  Synthetic
gauuuugauggcauugguc

SEQ ID NO: 291157 - RNA, 20 nt, Artificial Sequence
  Synthetic
ugauuuugauggcauugguc

SEQ ID NO: 291158 - RNA, 21 nt, Artificial Sequence
  Synthetic
uugauuuugauggcauugguc

SEQ ID NO: 291159 - RNA, 22 nt, Artificial Sequence
  Synthetic
guugauuuugauggcauugguc

SEQ ID NO: 291160 - RNA, 23 nt, Artificial Sequence
  Synthetic
aguugauuuugauggcauugguc

SEQ ID NO: 291161 - RNA, 24 nt, Artificial Sequence
  Synthetic
caguugauuuugauggcauugguc

SEQ ID NO: 291162 - RNA, 18 nt, Artificial Sequence
  Synthetic
cugggugcuucauugguc

SEQ ID NO: 291163 - RNA, 19 nt, Artificial Sequence
  Synthetic
ccugggugcuucauugguc

SEQ ID NO: 291164 - RNA, 20 nt, Artificial Sequence
  Synthetic
uccugggugcuucauugguc

SEQ ID NO: 291165 - RNA, 21 nt, Artificial Sequence
  Synthetic
uuccugggugcuucauugguc

SEQ ID NO: 291166 - RNA, 22 nt, Artificial Sequence
  Synthetic
uuuccugggugcuucauugguc

SEQ ID NO: 291167 - RNA, 23 nt, Artificial Sequence
  Synthetic
guuuccugggugcuucauugguc

SEQ ID NO: 291168 - RNA, 24 nt, Artificial Sequence
  Synthetic
uguuuccugggugcuucauugguc

SEQ ID NO: 291169 - RNA, 18 nt, Artificial Sequence
  Synthetic
uauacaagcauauugguc

SEQ ID NO: 291170 - RNA, 19 nt, Artificial Sequence
  Synthetic
uuauacaagcauauugguc

SEQ ID NO: 291171 - RNA, 20 nt, Artificial Sequence
  Synthetic
cuuauacaagcauauugguc

SEQ ID NO: 291172 - RNA, 21 nt, Artificial Sequence
  Synthetic
gcuuauacaagcauauugguc

SEQ ID NO: 291173 - RNA, 22 nt, Artificial Sequence
  Synthetic
agcuuauacaagcauauugguc

SEQ ID NO: 291174 - RNA, 23 nt, Artificial Sequence
  Synthetic
aagcuuauacaagcauauugguc

SEQ ID NO: 291175 - RNA, 24 nt, Artificial Sequence
  Synthetic
uaagcuuauacaagcauauugguc

SEQ ID NO: 291176 - RNA, 18 nt, Artificial Sequence
  Synthetic
gggcuguugaauuugguc

SEQ ID NO: 291177 - RNA, 19 nt, Artificial Sequence
  Synthetic
agggcuguugaauuugguc

SEQ ID NO: 291178 - RNA, 20 nt, Artificial Sequence
  Synthetic
aagggcuguugaauuugguc

SEQ ID NO: 291179 - RNA, 21 nt, Artificial Sequence
  Synthetic
gaagggcuguugaauuugguc

SEQ ID NO: 291180 - RNA, 22 nt, Artificial Sequence
  Synthetic
ugaagggcuguugaauuugguc

SEQ ID NO: 291181 - RNA, 23 nt, Artificial Sequence
  Synthetic
augaagggcuguugaauuugguc

SEQ ID NO: 291182 - RNA, 24 nt, Artificial Sequence
  Synthetic
caugaagggcuguugaauuugguc

SEQ ID NO: 291183 - RNA, 18 nt, Artificial Sequence
  Synthetic
cagugaugacauuugguc

SEQ ID NO: 291184 - RNA, 19 nt, Artificial Sequence
  Synthetic
ccagugaugacauuugguc

SEQ ID NO: 291185 - RNA, 20 nt, Artificial Sequence
  Synthetic
accagugaugacauuugguc

SEQ ID NO: 291186 - RNA, 21 nt, Artificial Sequence
  Synthetic
caccagugaugacauuugguc

SEQ ID NO: 291187 - RNA, 22 nt, Artificial Sequence
  Synthetic
ucaccagugaugacauuugguc

SEQ ID NO: 291188 - RNA, 23 nt, Artificial Sequence
  Synthetic
uucaccagugaugacauuugguc

SEQ ID NO: 291189 - RNA, 24 nt, Artificial Sequence
  Synthetic
uuucaccagugaugacauuugguc

SEQ ID NO: 291190 - RNA, 18 nt, Artificial Sequence
  Synthetic
accuuuuuuuuuuugguc

SEQ ID NO: 291191 - RNA, 19 nt, Artificial Sequence
  Synthetic
aaccuuuuuuuuuuugguc

SEQ ID NO: 291192 - RNA, 20 nt, Artificial Sequence
  Synthetic
aaaccuuuuuuuuuuugguc

SEQ ID NO: 291193 - RNA, 21 nt, Artificial Sequence
  Synthetic
aaaaccuuuuuuuuuuugguc

SEQ ID NO: 291194 - RNA, 22 nt, Artificial Sequence
  Synthetic
caaaaccuuuuuuuuuuugguc

SEQ ID NO: 291195 - RNA, 23 nt, Artificial Sequence
  Synthetic
acaaaaccuuuuuuuuuuugguc

SEQ ID NO: 291196 - RNA, 24 nt, Artificial Sequence
  Synthetic
uacaaaaccuuuuuuuuuuugguc

SEQ ID NO: 291197 - RNA, 18 nt, Artificial Sequence
  Synthetic
uuccugauucaaaauguc

SEQ ID NO: 291198 - RNA, 19 nt, Artificial Sequence
  Synthetic
guuccugauucaaaauguc

SEQ ID NO: 291199 - RNA, 20 nt, Artificial Sequence
  Synthetic
aguuccugauucaaaauguc

SEQ ID NO: 291200 - RNA, 21 nt, Artificial Sequence
  Synthetic
gaguuccugauucaaaauguc

SEQ ID NO: 291201 - RNA, 22 nt, Artificial Sequence
  Synthetic
agaguuccugauucaaaauguc

SEQ ID NO: 291202 - RNA, 23 nt, Artificial Sequence
  Synthetic
cagaguuccugauucaaaauguc

SEQ ID NO: 291203 - RNA, 24 nt, Artificial Sequence
  Synthetic
ccagaguuccugauucaaaauguc

SEQ ID NO: 291204 - RNA, 18 nt, Artificial Sequence
  Synthetic
uuuaguggugaaaauguc

SEQ ID NO: 291205 - RNA, 19 nt, Artificial Sequence
  Synthetic
guuuaguggugaaaauguc

SEQ ID NO: 291206 - RNA, 20 nt, Artificial Sequence
  Synthetic
uguuuaguggugaaaauguc

SEQ ID NO: 291207 - RNA, 21 nt, Artificial Sequence
  Synthetic
guguuuaguggugaaaauguc

SEQ ID NO: 291208 - RNA, 22 nt, Artificial Sequence
  Synthetic
gguguuuaguggugaaaauguc

SEQ ID NO: 291209 - RNA, 23 nt, Artificial Sequence
  Synthetic
agguguuuaguggugaaaauguc

SEQ ID NO: 291210 - RNA, 24 nt, Artificial Sequence
  Synthetic
aagguguuuaguggugaaaauguc

SEQ ID NO: 291211 - RNA, 18 nt, Artificial Sequence
  Synthetic
uugaaauuugaaaauguc

SEQ ID NO: 291212 - RNA, 19 nt, Artificial Sequence
  Synthetic
auugaaauuugaaaauguc

SEQ ID NO: 291213 - RNA, 20 nt, Artificial Sequence
  Synthetic
uauugaaauuugaaaauguc

SEQ ID NO: 291214 - RNA, 21 nt, Artificial Sequence
  Synthetic
auauugaaauuugaaaauguc

SEQ ID NO: 291215 - RNA, 22 nt, Artificial Sequence
  Synthetic
gauauugaaauuugaaaauguc

SEQ ID NO: 291216 - RNA, 23 nt, Artificial Sequence
  Synthetic
cgauauugaaauuugaaaauguc

SEQ ID NO: 291217 - RNA, 24 nt, Artificial Sequence
  Synthetic
ccgauauugaaauuugaaaauguc

SEQ ID NO: 291218 - RNA, 18 nt, Artificial Sequence
  Synthetic
gauacaguuagaaauguc

SEQ ID NO: 291219 - RNA, 19 nt, Artificial Sequence
  Synthetic
agauacaguuagaaauguc

SEQ ID NO: 291220 - RNA, 20 nt, Artificial Sequence
  Synthetic
uagauacaguuagaaauguc

SEQ ID NO: 291221 - RNA, 21 nt, Artificial Sequence
  Synthetic
cuagauacaguuagaaauguc

SEQ ID NO: 291222 - RNA, 22 nt, Artificial Sequence
  Synthetic
ucuagauacaguuagaaauguc

SEQ ID NO: 291223 - RNA, 23 nt, Artificial Sequence
  Synthetic
cucuagauacaguuagaaauguc

SEQ ID NO: 291224 - RNA, 24 nt, Artificial Sequence
  Synthetic
ucucuagauacaguuagaaauguc

SEQ ID NO: 291225 - RNA, 18 nt, Artificial Sequence
  Synthetic
ucucaaaugugaaauguc

SEQ ID NO: 291226 - RNA, 19 nt, Artificial Sequence
  Synthetic
uucucaaaugugaaauguc

SEQ ID NO: 291227 - RNA, 20 nt, Artificial Sequence
  Synthetic
uuucucaaaugugaaauguc

SEQ ID NO: 291228 - RNA, 21 nt, Artificial Sequence
  Synthetic
uuuucucaaaugugaaauguc

SEQ ID NO: 291229 - RNA, 22 nt, Artificial Sequence
  Synthetic
cuuuucucaaaugugaaauguc

SEQ ID NO: 291230 - RNA, 23 nt, Artificial Sequence
  Synthetic
ccuuuucucaaaugugaaauguc

SEQ ID NO: 291231 - RNA, 24 nt, Artificial Sequence
  Synthetic
cccuuuucucaaaugugaaauguc

SEQ ID NO: 291232 - RNA, 18 nt, Artificial Sequence
  Synthetic
caaugccagcacaauguc

SEQ ID NO: 291233 - RNA, 19 nt, Artificial Sequence
  Synthetic
ccaaugccagcacaauguc

SEQ ID NO: 291234 - RNA, 20 nt, Artificial Sequence
  Synthetic
cccaaugccagcacaauguc

SEQ ID NO: 291235 - RNA, 21 nt, Artificial Sequence
  Synthetic
ucccaaugccagcacaauguc

SEQ ID NO: 291236 - RNA, 22 nt, Artificial Sequence
  Synthetic
uucccaaugccagcacaauguc

SEQ ID NO: 291237 - RNA, 23 nt, Artificial Sequence
  Synthetic
guucccaaugccagcacaauguc

SEQ ID NO: 291238 - RNA, 24 nt, Artificial Sequence
  Synthetic
uguucccaaugccagcacaauguc

SEQ ID NO: 291239 - RNA, 18 nt, Artificial Sequence
  Synthetic
auugugaagaccaauguc

SEQ ID NO: 291240 - RNA, 19 nt, Artificial Sequence
  Synthetic
uauugugaagaccaauguc

SEQ ID NO: 291241 - RNA, 20 nt, Artificial Sequence
  Synthetic
uuauugugaagaccaauguc

SEQ ID NO: 291242 - RNA, 21 nt, Artificial Sequence
  Synthetic
auuauugugaagaccaauguc

SEQ ID NO: 291243 - RNA, 22 nt, Artificial Sequence
  Synthetic
aauuauugugaagaccaauguc

SEQ ID NO: 291244 - RNA, 23 nt, Artificial Sequence
  Synthetic
aaauuauugugaagaccaauguc

SEQ ID NO: 291245 - RNA, 24 nt, Artificial Sequence
  Synthetic
aaaauuauugugaagaccaauguc

SEQ ID NO: 291246 - RNA, 18 nt, Artificial Sequence
  Synthetic
acugcccagaccaauguc

SEQ ID NO: 291247 - RNA, 19 nt, Artificial Sequence
  Synthetic
cacugcccagaccaauguc

SEQ ID NO: 291248 - RNA, 20 nt, Artificial Sequence
  Synthetic
ccacugcccagaccaauguc

SEQ ID NO: 291249 - RNA, 21 nt, Artificial Sequence
  Synthetic
accacugcccagaccaauguc

SEQ ID NO: 291250 - RNA, 22 nt, Artificial Sequence
  Synthetic
aaccacugcccagaccaauguc

SEQ ID NO: 291251 - RNA, 23 nt, Artificial Sequence
  Synthetic
aaaccacugcccagaccaauguc

SEQ ID NO: 291252 - RNA, 24 nt, Artificial Sequence
  Synthetic
gaaaccacugcccagaccaauguc

SEQ ID NO: 291253 - RNA, 18 nt, Artificial Sequence
  Synthetic
aaucucccaggcaauguc

SEQ ID NO: 291254 - RNA, 19 nt, Artificial Sequence
  Synthetic
aaaucucccaggcaauguc

SEQ ID NO: 291255 - RNA, 20 nt, Artificial Sequence
  Synthetic
aaaaucucccaggcaauguc

SEQ ID NO: 291256 - RNA, 21 nt, Artificial Sequence
  Synthetic
caaaaucucccaggcaauguc

SEQ ID NO: 291257 - RNA, 22 nt, Artificial Sequence
  Synthetic
gcaaaaucucccaggcaauguc

SEQ ID NO: 291258 - RNA, 23 nt, Artificial Sequence
  Synthetic
ugcaaaaucucccaggcaauguc

SEQ ID NO: 291259 - RNA, 24 nt, Artificial Sequence
  Synthetic
cugcaaaaucucccaggcaauguc

SEQ ID NO: 291260 - RNA, 18 nt, Artificial Sequence
  Synthetic
augaccaagcucaauguc

SEQ ID NO: 291261 - RNA, 19 nt, Artificial Sequence
  Synthetic
caugaccaagcucaauguc

SEQ ID NO: 291262 - RNA, 20 nt, Artificial Sequence
  Synthetic
gcaugaccaagcucaauguc

SEQ ID NO: 291263 - RNA, 21 nt, Artificial Sequence
  Synthetic
cgcaugaccaagcucaauguc

SEQ ID NO: 291264 - RNA, 22 nt, Artificial Sequence
  Synthetic
gcgcaugaccaagcucaauguc

SEQ ID NO: 291265 - RNA, 23 nt, Artificial Sequence
  Synthetic
ggcgcaugaccaagcucaauguc

SEQ ID NO: 291266 - RNA, 24 nt, Artificial Sequence
  Synthetic
aggcgcaugaccaagcucaauguc

SEQ ID NO: 291267 - RNA, 18 nt, Artificial Sequence
  Synthetic
agaauauaccagaauguc

SEQ ID NO: 291268 - RNA, 19 nt, Artificial Sequence
  Synthetic
gagaauauaccagaauguc

SEQ ID NO: 291269 - RNA, 20 nt, Artificial Sequence
  Synthetic
ggagaauauaccagaauguc

SEQ ID NO: 291270 - RNA, 21 nt, Artificial Sequence
  Synthetic
gggagaauauaccagaauguc

SEQ ID NO: 291271 - RNA, 22 nt, Artificial Sequence
  Synthetic
ugggagaauauaccagaauguc

SEQ ID NO: 291272 - RNA, 23 nt, Artificial Sequence
  Synthetic
augggagaauauaccagaauguc

SEQ ID NO: 291273 - RNA, 24 nt, Artificial Sequence
  Synthetic
caugggagaauauaccagaauguc

SEQ ID NO: 291274 - RNA, 18 nt, Artificial Sequence
  Synthetic
acccuauaugugaauguc

SEQ ID NO: 291275 - RNA, 19 nt, Artificial Sequence
  Synthetic
cacccuauaugugaauguc

SEQ ID NO: 291276 - RNA, 20 nt, Artificial Sequence
  Synthetic
ccacccuauaugugaauguc

SEQ ID NO: 291277 - RNA, 21 nt, Artificial Sequence
  Synthetic
gccacccuauaugugaauguc

SEQ ID NO: 291278 - RNA, 22 nt, Artificial Sequence
  Synthetic
ggccacccuauaugugaauguc

SEQ ID NO: 291279 - RNA, 23 nt, Artificial Sequence
  Synthetic
uggccacccuauaugugaauguc

SEQ ID NO: 291280 - RNA, 24 nt, Artificial Sequence
  Synthetic
guggccacccuauaugugaauguc

SEQ ID NO: 291281 - RNA, 18 nt, Artificial Sequence
  Synthetic
gagacauuugguaauguc

SEQ ID NO: 291282 - RNA, 19 nt, Artificial Sequence
  Synthetic
ggagacauuugguaauguc

SEQ ID NO: 291283 - RNA, 20 nt, Artificial Sequence
  Synthetic
aggagacauuugguaauguc

SEQ ID NO: 291284 - RNA, 21 nt, Artificial Sequence
  Synthetic
caggagacauuugguaauguc

SEQ ID NO: 291285 - RNA, 22 nt, Artificial Sequence
  Synthetic
ucaggagacauuugguaauguc

SEQ ID NO: 291286 - RNA, 23 nt, Artificial Sequence
  Synthetic
cucaggagacauuugguaauguc

SEQ ID NO: 291287 - RNA, 24 nt, Artificial Sequence
  Synthetic
ccucaggagacauuugguaauguc

SEQ ID NO: 291288 - RNA, 18 nt, Artificial Sequence
  Synthetic
aucuucauuguuaauguc

SEQ ID NO: 291289 - RNA, 19 nt, Artificial Sequence
  Synthetic
gaucuucauuguuaauguc

SEQ ID NO: 291290 - RNA, 20 nt, Artificial Sequence
  Synthetic
cgaucuucauuguuaauguc

SEQ ID NO: 291291 - RNA, 21 nt, Artificial Sequence
  Synthetic
acgaucuucauuguuaauguc

SEQ ID NO: 291292 - RNA, 22 nt, Artificial Sequence
  Synthetic
aacgaucuucauuguuaauguc

SEQ ID NO: 291293 - RNA, 23 nt, Artificial Sequence
  Synthetic
caacgaucuucauuguuaauguc

SEQ ID NO: 291294 - RNA, 24 nt, Artificial Sequence
  Synthetic
ccaacgaucuucauuguuaauguc

SEQ ID NO: 291295 - RNA, 18 nt, Artificial Sequence
  Synthetic
cuaacgccaaaacauguc

SEQ ID NO: 291296 - RNA, 19 nt, Artificial Sequence
  Synthetic
ucuaacgccaaaacauguc

SEQ ID NO: 291297 - RNA, 20 nt, Artificial Sequence
  Synthetic
uucuaacgccaaaacauguc

SEQ ID NO: 291298 - RNA, 21 nt, Artificial Sequence
  Synthetic
guucuaacgccaaaacauguc

SEQ ID NO: 291299 - RNA, 22 nt, Artificial Sequence
  Synthetic
aguucuaacgccaaaacauguc

SEQ ID NO: 291300 - RNA, 23 nt, Artificial Sequence
  Synthetic
aaguucuaacgccaaaacauguc

SEQ ID NO: 291301 - RNA, 24 nt, Artificial Sequence
  Synthetic
aaaguucuaacgccaaaacauguc

SEQ ID NO: 291302 - RNA, 18 nt, Artificial Sequence
  Synthetic
ucugugggaacacauguc

SEQ ID NO: 291303 - RNA, 19 nt, Artificial Sequence
  Synthetic
uucugugggaacacauguc

SEQ ID NO: 291304 - RNA, 20 nt, Artificial Sequence
  Synthetic
cuucugugggaacacauguc

SEQ ID NO: 291305 - RNA, 21 nt, Artificial Sequence
  Synthetic
ucuucugugggaacacauguc

SEQ ID NO: 291306 - RNA, 22 nt, Artificial Sequence
  Synthetic
uucuucugugggaacacauguc

SEQ ID NO: 291307 - RNA, 23 nt, Artificial Sequence
  Synthetic
cuucuucugugggaacacauguc

SEQ ID NO: 291308 - RNA, 24 nt, Artificial Sequence
  Synthetic
gcuucuucugugggaacacauguc

SEQ ID NO: 291309 - RNA, 18 nt, Artificial Sequence
  Synthetic
ccacaauccccacauguc

SEQ ID NO: 291310 - RNA, 19 nt, Artificial Sequence
  Synthetic
cccacaauccccacauguc

SEQ ID NO: 291311 - RNA, 20 nt, Artificial Sequence
  Synthetic
ccccacaauccccacauguc

SEQ ID NO: 291312 - RNA, 21 nt, Artificial Sequence
  Synthetic
uccccacaauccccacauguc

SEQ ID NO: 291313 - RNA, 22 nt, Artificial Sequence
  Synthetic
auccccacaauccccacauguc

SEQ ID NO: 291314 - RNA, 23 nt, Artificial Sequence
  Synthetic
aauccccacaauccccacauguc

SEQ ID NO: 291315 - RNA, 24 nt, Artificial Sequence
  Synthetic
uaauccccacaauccccacauguc

SEQ ID NO: 291316 - RNA, 18 nt, Artificial Sequence
  Synthetic
cugacagcaucccauguc

SEQ ID NO: 291317 - RNA, 19 nt, Artificial Sequence
  Synthetic
gcugacagcaucccauguc

SEQ ID NO: 291318 - RNA, 20 nt, Artificial Sequence
  Synthetic
agcugacagcaucccauguc

SEQ ID NO: 291319 - RNA, 21 nt, Artificial Sequence
  Synthetic
uagcugacagcaucccauguc

SEQ ID NO: 291320 - RNA, 22 nt, Artificial Sequence
  Synthetic
uuagcugacagcaucccauguc

SEQ ID NO: 291321 - RNA, 23 nt, Artificial Sequence
  Synthetic
uuuagcugacagcaucccauguc

SEQ ID NO: 291322 - RNA, 24 nt, Artificial Sequence
  Synthetic
cuuuagcugacagcaucccauguc

SEQ ID NO: 291323 - RNA, 18 nt, Artificial Sequence
  Synthetic
aguuuaaaacuccauguc

SEQ ID NO: 291324 - RNA, 19 nt, Artificial Sequence
  Synthetic
aaguuuaaaacuccauguc

SEQ ID NO: 291325 - RNA, 20 nt, Artificial Sequence
  Synthetic
gaaguuuaaaacuccauguc

SEQ ID NO: 291326 - RNA, 21 nt, Artificial Sequence
  Synthetic
agaaguuuaaaacuccauguc

SEQ ID NO: 291327 - RNA, 22 nt, Artificial Sequence
  Synthetic
cagaaguuuaaaacuccauguc

SEQ ID NO: 291328 - RNA, 23 nt, Artificial Sequence
  Synthetic
gcagaaguuuaaaacuccauguc

SEQ ID NO: 291329 - RNA, 24 nt, Artificial Sequence
  Synthetic
agcagaaguuuaaaacuccauguc

SEQ ID NO: 291330 - RNA, 18 nt, Artificial Sequence
  Synthetic
uauccuucugagcauguc

SEQ ID NO: 291331 - RNA, 19 nt, Artificial Sequence
  Synthetic
auauccuucugagcauguc

SEQ ID NO: 291332 - RNA, 20 nt, Artificial Sequence
  Synthetic
aauauccuucugagcauguc

SEQ ID NO: 291333 - RNA, 21 nt, Artificial Sequence
  Synthetic
aaauauccuucugagcauguc

SEQ ID NO: 291334 - RNA, 22 nt, Artificial Sequence
  Synthetic
gaaauauccuucugagcauguc

SEQ ID NO: 291335 - RNA, 23 nt, Artificial Sequence
  Synthetic
ggaaauauccuucugagcauguc

SEQ ID NO: 291336 - RNA, 24 nt, Artificial Sequence
  Synthetic
uggaaauauccuucugagcauguc

SEQ ID NO: 291337 - RNA, 18 nt, Artificial Sequence
  Synthetic
uuagucccuaggcauguc

SEQ ID NO: 291338 - RNA, 19 nt, Artificial Sequence
  Synthetic
auuagucccuaggcauguc

SEQ ID NO: 291339 - RNA, 20 nt, Artificial Sequence
  Synthetic
aauuagucccuaggcauguc

SEQ ID NO: 291340 - RNA, 21 nt, Artificial Sequence
  Synthetic
caauuagucccuaggcauguc

SEQ ID NO: 291341 - RNA, 22 nt, Artificial Sequence
  Synthetic
ccaauuagucccuaggcauguc

SEQ ID NO: 291342 - RNA, 23 nt, Artificial Sequence
  Synthetic
uccaauuagucccuaggcauguc

SEQ ID NO: 291343 - RNA, 24 nt, Artificial Sequence
  Synthetic
auccaauuagucccuaggcauguc

SEQ ID NO: 291344 - RNA, 18 nt, Artificial Sequence
  Synthetic
auggguaaauugcauguc

SEQ ID NO: 291345 - RNA, 19 nt, Artificial Sequence
  Synthetic
cauggguaaauugcauguc

SEQ ID NO: 291346 - RNA, 20 nt, Artificial Sequence
  Synthetic
acauggguaaauugcauguc

SEQ ID NO: 291347 - RNA, 21 nt, Artificial Sequence
  Synthetic
uacauggguaaauugcauguc

SEQ ID NO: 291348 - RNA, 22 nt, Artificial Sequence
  Synthetic
uuacauggguaaauugcauguc

SEQ ID NO: 291349 - RNA, 23 nt, Artificial Sequence
  Synthetic
guuacauggguaaauugcauguc

SEQ ID NO: 291350 - RNA, 24 nt, Artificial Sequence
  Synthetic
uguuacauggguaaauugcauguc

SEQ ID NO: 291351 - RNA, 18 nt, Artificial Sequence
  Synthetic
aacacaauguaucauguc

SEQ ID NO: 291352 - RNA, 19 nt, Artificial Sequence
  Synthetic
aaacacaauguaucauguc

SEQ ID NO: 291353 - RNA, 20 nt, Artificial Sequence
  Synthetic
uaaacacaauguaucauguc

SEQ ID NO: 291354 - RNA, 21 nt, Artificial Sequence
  Synthetic
auaaacacaauguaucauguc

SEQ ID NO: 291355 - RNA, 22 nt, Artificial Sequence
  Synthetic
uauaaacacaauguaucauguc

SEQ ID NO: 291356 - RNA, 23 nt, Artificial Sequence
  Synthetic
uuauaaacacaauguaucauguc

SEQ ID NO: 291357 - RNA, 24 nt, Artificial Sequence
  Synthetic
cuuauaaacacaauguaucauguc

SEQ ID NO: 291358 - RNA, 18 nt, Artificial Sequence
  Synthetic
uauagguaaacucauguc

SEQ ID NO: 291359 - RNA, 19 nt, Artificial Sequence
  Synthetic
auauagguaaacucauguc

SEQ ID NO: 291360 - RNA, 20 nt, Artificial Sequence
  Synthetic
uauauagguaaacucauguc

SEQ ID NO: 291361 - RNA, 21 nt, Artificial Sequence
  Synthetic
uuauauagguaaacucauguc

SEQ ID NO: 291362 - RNA, 22 nt, Artificial Sequence
  Synthetic
guuauauagguaaacucauguc

SEQ ID NO: 291363 - RNA, 23 nt, Artificial Sequence
  Synthetic
uguuauauagguaaacucauguc

SEQ ID NO: 291364 - RNA, 24 nt, Artificial Sequence
  Synthetic
uuguuauauagguaaacucauguc

SEQ ID NO: 291365 - RNA, 18 nt, Artificial Sequence
  Synthetic
aagauagauauucauguc

SEQ ID NO: 291366 - RNA, 19 nt, Artificial Sequence
  Synthetic
gaagauagauauucauguc

SEQ ID NO: 291367 - RNA, 20 nt, Artificial Sequence
  Synthetic
ugaagauagauauucauguc

SEQ ID NO: 291368 - RNA, 21 nt, Artificial Sequence
  Synthetic
cugaagauagauauucauguc

SEQ ID NO: 291369 - RNA, 22 nt, Artificial Sequence
  Synthetic
ccugaagauagauauucauguc

SEQ ID NO: 291370 - RNA, 23 nt, Artificial Sequence
  Synthetic
gccugaagauagauauucauguc

SEQ ID NO: 291371 - RNA, 24 nt, Artificial Sequence
  Synthetic
ugccugaagauagauauucauguc

SEQ ID NO: 291372 - RNA, 18 nt, Artificial Sequence
  Synthetic
auauauaugguucauguc

SEQ ID NO: 291373 - RNA, 19 nt, Artificial Sequence
  Synthetic
cauauauaugguucauguc

SEQ ID NO: 291374 - RNA, 20 nt, Artificial Sequence
  Synthetic
gcauauauaugguucauguc

SEQ ID NO: 291375 - RNA, 21 nt, Artificial Sequence
  Synthetic
agcauauauaugguucauguc

SEQ ID NO: 291376 - RNA, 22 nt, Artificial Sequence
  Synthetic
aagcauauauaugguucauguc

SEQ ID NO: 291377 - RNA, 23 nt, Artificial Sequence
  Synthetic
aaagcauauauaugguucauguc

SEQ ID NO: 291378 - RNA, 24 nt, Artificial Sequence
  Synthetic
uaaagcauauauaugguucauguc

SEQ ID NO: 291379 - RNA, 18 nt, Artificial Sequence
  Synthetic
aggugacuauuucauguc

SEQ ID NO: 291380 - RNA, 19 nt, Artificial Sequence
  Synthetic
caggugacuauuucauguc

SEQ ID NO: 291381 - RNA, 20 nt, Artificial Sequence
  Synthetic
ccaggugacuauuucauguc

SEQ ID NO: 291382 - RNA, 21 nt, Artificial Sequence
  Synthetic
uccaggugacuauuucauguc

SEQ ID NO: 291383 - RNA, 22 nt, Artificial Sequence
  Synthetic
uuccaggugacuauuucauguc

SEQ ID NO: 291384 - RNA, 23 nt, Artificial Sequence
  Synthetic
uuuccaggugacuauuucauguc

SEQ ID NO: 291385 - RNA, 24 nt, Artificial Sequence
  Synthetic
uuuuccaggugacuauuucauguc

SEQ ID NO: 291386 - RNA, 18 nt, Artificial Sequence
  Synthetic
gggaaucugccagauguc

SEQ ID NO: 291387 - RNA, 19 nt, Artificial Sequence
  Synthetic
agggaaucugccagauguc

SEQ ID NO: 291388 - RNA, 20 nt, Artificial Sequence
  Synthetic
cagggaaucugccagauguc

SEQ ID NO: 291389 - RNA, 21 nt, Artificial Sequence
  Synthetic
ucagggaaucugccagauguc

SEQ ID NO: 291390 - RNA, 22 nt, Artificial Sequence
  Synthetic
cucagggaaucugccagauguc

SEQ ID NO: 291391 - RNA, 23 nt, Artificial Sequence
  Synthetic
ucucagggaaucugccagauguc

SEQ ID NO: 291392 - RNA, 24 nt, Artificial Sequence
  Synthetic
cucucagggaaucugccagauguc

SEQ ID NO: 291393 - RNA, 18 nt, Artificial Sequence
  Synthetic
uaauuguuuugagauguc

SEQ ID NO: 291394 - RNA, 19 nt, Artificial Sequence
  Synthetic
guaauuguuuugagauguc

SEQ ID NO: 291395 - RNA, 20 nt, Artificial Sequence
  Synthetic
uguaauuguuuugagauguc

SEQ ID NO: 291396 - RNA, 21 nt, Artificial Sequence
  Synthetic
uuguaauuguuuugagauguc

SEQ ID NO: 291397 - RNA, 22 nt, Artificial Sequence
  Synthetic
auuguaauuguuuugagauguc

SEQ ID NO: 291398 - RNA, 23 nt, Artificial Sequence
  Synthetic
uauuguaauuguuuugagauguc

SEQ ID NO: 291399 - RNA, 24 nt, Artificial Sequence
  Synthetic
cuauuguaauuguuuugagauguc

SEQ ID NO: 291400 - RNA, 18 nt, Artificial Sequence
  Synthetic
cgggcggaucaugauguc

SEQ ID NO: 291401 - RNA, 19 nt, Artificial Sequence
  Synthetic
gcgggcggaucaugauguc

SEQ ID NO: 291402 - RNA, 20 nt, Artificial Sequence
  Synthetic
ggcgggcggaucaugauguc

SEQ ID NO: 291403 - RNA, 21 nt, Artificial Sequence
  Synthetic
aggcgggcggaucaugauguc

SEQ ID NO: 291404 - RNA, 22 nt, Artificial Sequence
  Synthetic
aaggcgggcggaucaugauguc

SEQ ID NO: 291405 - RNA, 23 nt, Artificial Sequence
  Synthetic
caaggcgggcggaucaugauguc

SEQ ID NO: 291406 - RNA, 24 nt, Artificial Sequence
  Synthetic
ccaaggcgggcggaucaugauguc

SEQ ID NO: 291407 - RNA, 18 nt, Artificial Sequence
  Synthetic
cuccugugauaugauguc

SEQ ID NO: 291408 - RNA, 19 nt, Artificial Sequence
  Synthetic
ucuccugugauaugauguc

SEQ ID NO: 291409 - RNA, 20 nt, Artificial Sequence
  Synthetic
gucuccugugauaugauguc

SEQ ID NO: 291410 - RNA, 21 nt, Artificial Sequence
  Synthetic
ugucuccugugauaugauguc

SEQ ID NO: 291411 - RNA, 22 nt, Artificial Sequence
  Synthetic
augucuccugugauaugauguc

SEQ ID NO: 291412 - RNA, 23 nt, Artificial Sequence
  Synthetic
caugucuccugugauaugauguc

SEQ ID NO: 291413 - RNA, 24 nt, Artificial Sequence
  Synthetic
ucaugucuccugugauaugauguc

SEQ ID NO: 291414 - RNA, 18 nt, Artificial Sequence
  Synthetic
cccaggaagggugauguc

SEQ ID NO: 291415 - RNA, 19 nt, Artificial Sequence
  Synthetic
ucccaggaagggugauguc

SEQ ID NO: 291416 - RNA, 20 nt, Artificial Sequence
  Synthetic
uucccaggaagggugauguc

SEQ ID NO: 291417 - RNA, 21 nt, Artificial Sequence
  Synthetic
uuucccaggaagggugauguc

SEQ ID NO: 291418 - RNA, 22 nt, Artificial Sequence
  Synthetic
auuucccaggaagggugauguc

SEQ ID NO: 291419 - RNA, 23 nt, Artificial Sequence
  Synthetic
cauuucccaggaagggugauguc

SEQ ID NO: 291420 - RNA, 24 nt, Artificial Sequence
  Synthetic
gcauuucccaggaagggugauguc

SEQ ID NO: 291421 - RNA, 18 nt, Artificial Sequence
  Synthetic
ggauuguuaguugauguc

SEQ ID NO: 291422 - RNA, 19 nt, Artificial Sequence
  Synthetic
uggauuguuaguugauguc

SEQ ID NO: 291423 - RNA, 20 nt, Artificial Sequence
  Synthetic
guggauuguuaguugauguc

SEQ ID NO: 291424 - RNA, 21 nt, Artificial Sequence
  Synthetic
uguggauuguuaguugauguc

SEQ ID NO: 291425 - RNA, 22 nt, Artificial Sequence
  Synthetic
auguggauuguuaguugauguc

SEQ ID NO: 291426 - RNA, 23 nt, Artificial Sequence
  Synthetic
gauguggauuguuaguugauguc

SEQ ID NO: 291427 - RNA, 24 nt, Artificial Sequence
  Synthetic
agauguggauuguuaguugauguc

SEQ ID NO: 291428 - RNA, 18 nt, Artificial Sequence
  Synthetic
ucaaauucugcauauguc

SEQ ID NO: 291429 - RNA, 19 nt, Artificial Sequence
  Synthetic
gucaaauucugcauauguc

SEQ ID NO: 291430 - RNA, 20 nt, Artificial Sequence
  Synthetic
agucaaauucugcauauguc

SEQ ID NO: 291431 - RNA, 21 nt, Artificial Sequence
  Synthetic
cagucaaauucugcauauguc

SEQ ID NO: 291432 - RNA, 22 nt, Artificial Sequence
  Synthetic
gcagucaaauucugcauauguc

SEQ ID NO: 291433 - RNA, 23 nt, Artificial Sequence
  Synthetic
agcagucaaauucugcauauguc

SEQ ID NO: 291434 - RNA, 24 nt, Artificial Sequence
  Synthetic
aagcagucaaauucugcauauguc

SEQ ID NO: 291435 - RNA, 18 nt, Artificial Sequence
  Synthetic
aaacacuauuuauauguc

SEQ ID NO: 291436 - RNA, 19 nt, Artificial Sequence
  Synthetic
gaaacacuauuuauauguc

SEQ ID NO: 291437 - RNA, 20 nt, Artificial Sequence
  Synthetic
agaaacacuauuuauauguc

SEQ ID NO: 291438 - RNA, 21 nt, Artificial Sequence
  Synthetic
aagaaacacuauuuauauguc

SEQ ID NO: 291439 - RNA, 22 nt, Artificial Sequence
  Synthetic
aaagaaacacuauuuauauguc

SEQ ID NO: 291440 - RNA, 23 nt, Artificial Sequence
  Synthetic
gaaagaaacacuauuuauauguc

SEQ ID NO: 291441 - RNA, 24 nt, Artificial Sequence
  Synthetic
ggaaagaaacacuauuuauauguc

SEQ ID NO: 291442 - RNA, 18 nt, Artificial Sequence
  Synthetic
aaguuaaauggguauguc

SEQ ID NO: 291443 - RNA, 19 nt, Artificial Sequence
  Synthetic
gaaguuaaauggguauguc

SEQ ID NO: 291444 - RNA, 20 nt, Artificial Sequence
  Synthetic
agaaguuaaauggguauguc

SEQ ID NO: 291445 - RNA, 21 nt, Artificial Sequence
  Synthetic
gagaaguuaaauggguauguc

SEQ ID NO: 291446 - RNA, 22 nt, Artificial Sequence
  Synthetic
ggagaaguuaaauggguauguc

SEQ ID NO: 291447 - RNA, 23 nt, Artificial Sequence
  Synthetic
aggagaaguuaaauggguauguc

SEQ ID NO: 291448 - RNA, 24 nt, Artificial Sequence
  Synthetic
caggagaaguuaaauggguauguc

SEQ ID NO: 291449 - RNA, 18 nt, Artificial Sequence
  Synthetic
accuucuauauguauguc

SEQ ID NO: 291450 - RNA, 19 nt, Artificial Sequence
  Synthetic
caccuucuauauguauguc

SEQ ID NO: 291451 - RNA, 20 nt, Artificial Sequence
  Synthetic
ucaccuucuauauguauguc

SEQ ID NO: 291452 - RNA, 21 nt, Artificial Sequence
  Synthetic
aucaccuucuauauguauguc

SEQ ID NO: 291453 - RNA, 22 nt, Artificial Sequence
  Synthetic
caucaccuucuauauguauguc

SEQ ID NO: 291454 - RNA, 23 nt, Artificial Sequence
  Synthetic
gcaucaccuucuauauguauguc

SEQ ID NO: 291455 - RNA, 24 nt, Artificial Sequence
  Synthetic
agcaucaccuucuauauguauguc

SEQ ID NO: 291456 - RNA, 18 nt, Artificial Sequence
  Synthetic
auuaauccauuguauguc

SEQ ID NO: 291457 - RNA, 19 nt, Artificial Sequence
  Synthetic
cauuaauccauuguauguc

SEQ ID NO: 291458 - RNA, 20 nt, Artificial Sequence
  Synthetic
ucauuaauccauuguauguc

SEQ ID NO: 291459 - RNA, 21 nt, Artificial Sequence
  Synthetic
uucauuaauccauuguauguc

SEQ ID NO: 291460 - RNA, 22 nt, Artificial Sequence
  Synthetic
cuucauuaauccauuguauguc

SEQ ID NO: 291461 - RNA, 23 nt, Artificial Sequence
  Synthetic
ucuucauuaauccauuguauguc

SEQ ID NO: 291462 - RNA, 24 nt, Artificial Sequence
  Synthetic
gucuucauuaauccauuguauguc

SEQ ID NO: 291463 - RNA, 18 nt, Artificial Sequence
  Synthetic
aaaaaaaaaaauuauguc

SEQ ID NO: 291464 - RNA, 19 nt, Artificial Sequence
  Synthetic
aaaaaaaaaaaauuauguc

SEQ ID NO: 291465 - RNA, 20 nt, Artificial Sequence
  Synthetic
aaaaaaaaaaaaauuauguc

SEQ ID NO: 291466 - RNA, 21 nt, Artificial Sequence
  Synthetic
aaaaaaaaaaaaaauuauguc

SEQ ID NO: 291467 - RNA, 22 nt, Artificial Sequence
  Synthetic
aaaaaaaaaaaaaaauuauguc

SEQ ID NO: 291468 - RNA, 23 nt, Artificial Sequence
  Synthetic
aaaaaaaaaaaaaaaauuauguc

SEQ ID NO: 291469 - RNA, 24 nt, Artificial Sequence
  Synthetic
aaaaaaaaaaaaaaaaauuauguc

SEQ ID NO: 291470 - RNA, 18 nt, Artificial Sequence
  Synthetic
agucagucuuauuauguc

SEQ ID NO: 291471 - RNA, 19 nt, Artificial Sequence
  Synthetic
gagucagucuuauuauguc

SEQ ID NO: 291472 - RNA, 20 nt, Artificial Sequence
  Synthetic
agagucagucuuauuauguc

SEQ ID NO: 291473 - RNA, 21 nt, Artificial Sequence
  Synthetic
cagagucagucuuauuauguc

SEQ ID NO: 291474 - RNA, 22 nt, Artificial Sequence
  Synthetic
ucagagucagucuuauuauguc

SEQ ID NO: 291475 - RNA, 23 nt, Artificial Sequence
  Synthetic
uucagagucagucuuauuauguc

SEQ ID NO: 291476 - RNA, 24 nt, Artificial Sequence
  Synthetic
uuucagagucagucuuauuauguc

SEQ ID NO: 291477 - RNA, 18 nt, Artificial Sequence
  Synthetic
uuguaauugcaaacuguc

SEQ ID NO: 291478 - RNA, 19 nt, Artificial Sequence
  Synthetic
uuuguaauugcaaacuguc

SEQ ID NO: 291479 - RNA, 20 nt, Artificial Sequence
  Synthetic
uuuuguaauugcaaacuguc

SEQ ID NO: 291480 - RNA, 21 nt, Artificial Sequence
  Synthetic
cuuuuguaauugcaaacuguc

SEQ ID NO: 291481 - RNA, 22 nt, Artificial Sequence
  Synthetic
ucuuuuguaauugcaaacuguc

SEQ ID NO: 291482 - RNA, 23 nt, Artificial Sequence
  Synthetic
uucuuuuguaauugcaaacuguc

SEQ ID NO: 291483 - RNA, 24 nt, Artificial Sequence
  Synthetic
uuucuuuuguaauugcaaacuguc

SEQ ID NO: 291484 - RNA, 18 nt, Artificial Sequence
  Synthetic
agguccaagggaacuguc

SEQ ID NO: 291485 - RNA, 19 nt, Artificial Sequence
  Synthetic
cagguccaagggaacuguc

SEQ ID NO: 291486 - RNA, 20 nt, Artificial Sequence
  Synthetic
gcagguccaagggaacuguc

SEQ ID NO: 291487 - RNA, 21 nt, Artificial Sequence
  Synthetic
agcagguccaagggaacuguc

SEQ ID NO: 291488 - RNA, 22 nt, Artificial Sequence
  Synthetic
cagcagguccaagggaacuguc

SEQ ID NO: 291489 - RNA, 23 nt, Artificial Sequence
  Synthetic
gcagcagguccaagggaacuguc

SEQ ID NO: 291490 - RNA, 24 nt, Artificial Sequence
  Synthetic
ggcagcagguccaagggaacuguc

SEQ ID NO: 291491 - RNA, 18 nt, Artificial Sequence
  Synthetic
auuguauuuuuaacuguc

SEQ ID NO: 291492 - RNA, 19 nt, Artificial Sequence
  Synthetic
aauuguauuuuuaacuguc

SEQ ID NO: 291493 - RNA, 20 nt, Artificial Sequence
  Synthetic
aaauuguauuuuuaacuguc

SEQ ID NO: 291494 - RNA, 21 nt, Artificial Sequence
  Synthetic
aaaauuguauuuuuaacuguc

SEQ ID NO: 291495 - RNA, 22 nt, Artificial Sequence
  Synthetic
uaaaauuguauuuuuaacuguc

SEQ ID NO: 291496 - RNA, 23 nt, Artificial Sequence
  Synthetic
auaaaauuguauuuuuaacuguc

SEQ ID NO: 291497 - RNA, 24 nt, Artificial Sequence
  Synthetic
uauaaaauuguauuuuuaacuguc

SEQ ID NO: 291498 - RNA, 18 nt, Artificial Sequence
  Synthetic
cuuuaugaugacacuguc

SEQ ID NO: 291499 - RNA, 19 nt, Artificial Sequence
  Synthetic
acuuuaugaugacacuguc

SEQ ID NO: 291500 - RNA, 20 nt, Artificial Sequence
  Synthetic
gacuuuaugaugacacuguc

SEQ ID NO: 291501 - RNA, 21 nt, Artificial Sequence
  Synthetic
ugacuuuaugaugacacuguc

SEQ ID NO: 291502 - RNA, 22 nt, Artificial Sequence
  Synthetic
augacuuuaugaugacacuguc

SEQ ID NO: 291503 - RNA, 23 nt, Artificial Sequence
  Synthetic
gaugacuuuaugaugacacuguc

SEQ ID NO: 291504 - RNA, 24 nt, Artificial Sequence
  Synthetic
ugaugacuuuaugaugacacuguc

SEQ ID NO: 291505 - RNA, 18 nt, Artificial Sequence
  Synthetic
caaagaagauucacuguc

SEQ ID NO: 291506 - RNA, 19 nt, Artificial Sequence
  Synthetic
acaaagaagauucacuguc

SEQ ID NO: 291507 - RNA, 20 nt, Artificial Sequence
  Synthetic
gacaaagaagauucacuguc

SEQ ID NO: 291508 - RNA, 21 nt, Artificial Sequence
  Synthetic
ugacaaagaagauucacuguc

SEQ ID NO: 291509 - RNA, 22 nt, Artificial Sequence
  Synthetic
cugacaaagaagauucacuguc

SEQ ID NO: 291510 - RNA, 23 nt, Artificial Sequence
  Synthetic
ccugacaaagaagauucacuguc

SEQ ID NO: 291511 - RNA, 24 nt, Artificial Sequence
  Synthetic
uccugacaaagaagauucacuguc

SEQ ID NO: 291512 - RNA, 18 nt, Artificial Sequence
  Synthetic
uccugguccaggacuguc

SEQ ID NO: 291513 - RNA, 19 nt, Artificial Sequence
  Synthetic
guccugguccaggacuguc

SEQ ID NO: 291514 - RNA, 20 nt, Artificial Sequence
  Synthetic
gguccugguccaggacuguc

SEQ ID NO: 291515 - RNA, 21 nt, Artificial Sequence
  Synthetic
ugguccugguccaggacuguc

SEQ ID NO: 291516 - RNA, 22 nt, Artificial Sequence
  Synthetic
cugguccugguccaggacuguc

SEQ ID NO: 291517 - RNA, 23 nt, Artificial Sequence
  Synthetic
ccugguccugguccaggacuguc

SEQ ID NO: 291518 - RNA, 24 nt, Artificial Sequence
  Synthetic
cccugguccugguccaggacuguc

SEQ ID NO: 291519 - RNA, 18 nt, Artificial Sequence
  Synthetic
agagcugugucuacuguc

SEQ ID NO: 291520 - RNA, 19 nt, Artificial Sequence
  Synthetic
uagagcugugucuacuguc

SEQ ID NO: 291521 - RNA, 20 nt, Artificial Sequence
  Synthetic
uuagagcugugucuacuguc

SEQ ID NO: 291522 - RNA, 21 nt, Artificial Sequence
  Synthetic
guuagagcugugucuacuguc

SEQ ID NO: 291523 - RNA, 22 nt, Artificial Sequence
  Synthetic
aguuagagcugugucuacuguc

SEQ ID NO: 291524 - RNA, 23 nt, Artificial Sequence
  Synthetic
uaguuagagcugugucuacuguc

SEQ ID NO: 291525 - RNA, 24 nt, Artificial Sequence
  Synthetic
cuaguuagagcugugucuacuguc

SEQ ID NO: 291526 - RNA, 18 nt, Artificial Sequence
  Synthetic
cuuuuuguuucuacuguc

SEQ ID NO: 291527 - RNA, 19 nt, Artificial Sequence
  Synthetic
gcuuuuuguuucuacuguc

SEQ ID NO: 291528 - RNA, 20 nt, Artificial Sequence
  Synthetic
ugcuuuuuguuucuacuguc

SEQ ID NO: 291529 - RNA, 21 nt, Artificial Sequence
  Synthetic
uugcuuuuuguuucuacuguc

SEQ ID NO: 291530 - RNA, 22 nt, Artificial Sequence
  Synthetic
uuugcuuuuuguuucuacuguc

SEQ ID NO: 291531 - RNA, 23 nt, Artificial Sequence
  Synthetic
auuugcuuuuuguuucuacuguc

SEQ ID NO: 291532 - RNA, 24 nt, Artificial Sequence
  Synthetic
gauuugcuuuuuguuucuacuguc

SEQ ID NO: 291533 - RNA, 18 nt, Artificial Sequence
  Synthetic
aaacaacaaaguacuguc

SEQ ID NO: 291534 - RNA, 19 nt, Artificial Sequence
  Synthetic
aaaacaacaaaguacuguc

SEQ ID NO: 291535 - RNA, 20 nt, Artificial Sequence
  Synthetic
caaaacaacaaaguacuguc

SEQ ID NO: 291536 - RNA, 21 nt, Artificial Sequence
  Synthetic
ucaaaacaacaaaguacuguc

SEQ ID NO: 291537 - RNA, 22 nt, Artificial Sequence
  Synthetic
aucaaaacaacaaaguacuguc

SEQ ID NO: 291538 - RNA, 23 nt, Artificial Sequence
  Synthetic
aaucaaaacaacaaaguacuguc

SEQ ID NO: 291539 - RNA, 24 nt, Artificial Sequence
  Synthetic
caaucaaaacaacaaaguacuguc

SEQ ID NO: 291540 - RNA, 18 nt, Artificial Sequence
  Synthetic
aaaugguuucuuacuguc

SEQ ID NO: 291541 - RNA, 19 nt, Artificial Sequence
  Synthetic
aaaaugguuucuuacuguc

SEQ ID NO: 291542 - RNA, 20 nt, Artificial Sequence
  Synthetic
gaaaaugguuucuuacuguc

SEQ ID NO: 291543 - RNA, 21 nt, Artificial Sequence
  Synthetic
ggaaaaugguuucuuacuguc

SEQ ID NO: 291544 - RNA, 22 nt, Artificial Sequence
  Synthetic
aggaaaaugguuucuuacuguc

SEQ ID NO: 291545 - RNA, 23 nt, Artificial Sequence
  Synthetic
uaggaaaaugguuucuuacuguc

SEQ ID NO: 291546 - RNA, 24 nt, Artificial Sequence
  Synthetic
uuaggaaaaugguuucuuacuguc

SEQ ID NO: 291547 - RNA, 18 nt, Artificial Sequence
  Synthetic
uggaguucaagaccuguc

SEQ ID NO: 291548 - RNA, 19 nt, Artificial Sequence
  Synthetic
uuggaguucaagaccuguc

SEQ ID NO: 291549 - RNA, 20 nt, Artificial Sequence
  Synthetic
guuggaguucaagaccuguc

SEQ ID NO: 291550 - RNA, 21 nt, Artificial Sequence
  Synthetic
uguuggaguucaagaccuguc

SEQ ID NO: 291551 - RNA, 22 nt, Artificial Sequence
  Synthetic
auguuggaguucaagaccuguc

SEQ ID NO: 291552 - RNA, 23 nt, Artificial Sequence
  Synthetic
gauguuggaguucaagaccuguc

SEQ ID NO: 291553 - RNA, 24 nt, Artificial Sequence
  Synthetic
ggauguuggaguucaagaccuguc

SEQ ID NO: 291554 - RNA, 18 nt, Artificial Sequence
  Synthetic
uuuaucaguggaccuguc

SEQ ID NO: 291555 - RNA, 19 nt, Artificial Sequence
  Synthetic
cuuuaucaguggaccuguc

SEQ ID NO: 291556 - RNA, 20 nt, Artificial Sequence
  Synthetic
acuuuaucaguggaccuguc

SEQ ID NO: 291557 - RNA, 21 nt, Artificial Sequence
  Synthetic
aacuuuaucaguggaccuguc

SEQ ID NO: 291558 - RNA, 22 nt, Artificial Sequence
  Synthetic
aaacuuuaucaguggaccuguc

SEQ ID NO: 291559 - RNA, 23 nt, Artificial Sequence
  Synthetic
gaaacuuuaucaguggaccuguc

SEQ ID NO: 291560 - RNA, 24 nt, Artificial Sequence
  Synthetic
ggaaacuuuaucaguggaccuguc

SEQ ID NO: 291561 - RNA, 18 nt, Artificial Sequence
  Synthetic
ucucuuguaugaccuguc

SEQ ID NO: 291562 - RNA, 19 nt, Artificial Sequence
  Synthetic
gucucuuguaugaccuguc

SEQ ID NO: 291563 - RNA, 20 nt, Artificial Sequence
  Synthetic
ggucucuuguaugaccuguc

SEQ ID NO: 291564 - RNA, 21 nt, Artificial Sequence
  Synthetic
uggucucuuguaugaccuguc

SEQ ID NO: 291565 - RNA, 22 nt, Artificial Sequence
  Synthetic
guggucucuuguaugaccuguc

SEQ ID NO: 291566 - RNA, 23 nt, Artificial Sequence
  Synthetic
uguggucucuuguaugaccuguc

SEQ ID NO: 291567 - RNA, 24 nt, Artificial Sequence
  Synthetic
uuguggucucuuguaugaccuguc

SEQ ID NO: 291568 - RNA, 18 nt, Artificial Sequence
  Synthetic
acauauauauccccuguc

SEQ ID NO: 291569 - RNA, 19 nt, Artificial Sequence
  Synthetic
aacauauauauccccuguc

SEQ ID NO: 291570 - RNA, 20 nt, Artificial Sequence
  Synthetic
aaacauauauauccccuguc

SEQ ID NO: 291571 - RNA, 21 nt, Artificial Sequence
  Synthetic
uaaacauauauauccccuguc

SEQ ID NO: 291572 - RNA, 22 nt, Artificial Sequence
  Synthetic
auaaacauauauauccccuguc

SEQ ID NO: 291573 - RNA, 23 nt, Artificial Sequence
  Synthetic
uauaaacauauauauccccuguc

SEQ ID NO: 291574 - RNA, 24 nt, Artificial Sequence
  Synthetic
auauaaacauauauauccccuguc

SEQ ID NO: 291575 - RNA, 18 nt, Artificial Sequence
  Synthetic
cacacaccgaggccuguc

SEQ ID NO: 291576 - RNA, 19 nt, Artificial Sequence
  Synthetic
ucacacaccgaggccuguc

SEQ ID NO: 291577 - RNA, 20 nt, Artificial Sequence
  Synthetic
aucacacaccgaggccuguc

SEQ ID NO: 291578 - RNA, 21 nt, Artificial Sequence
  Synthetic
caucacacaccgaggccuguc

SEQ ID NO: 291579 - RNA, 22 nt, Artificial Sequence
  Synthetic
acaucacacaccgaggccuguc

SEQ ID NO: 291580 - RNA, 23 nt, Artificial Sequence
  Synthetic
aacaucacacaccgaggccuguc

SEQ ID NO: 291581 - RNA, 24 nt, Artificial Sequence
  Synthetic
gaacaucacacaccgaggccuguc

SEQ ID NO: 291582 - RNA, 18 nt, Artificial Sequence
  Synthetic
cacacacugaggccuguc

SEQ ID NO: 291583 - RNA, 19 nt, Artificial Sequence
  Synthetic
acacacacugaggccuguc

SEQ ID NO: 291584 - RNA, 20 nt, Artificial Sequence
  Synthetic
aacacacacugaggccuguc

SEQ ID NO: 291585 - RNA, 21 nt, Artificial Sequence
  Synthetic
caacacacacugaggccuguc

SEQ ID NO: 291586 - RNA, 22 nt, Artificial Sequence
  Synthetic
acaacacacacugaggccuguc

SEQ ID NO: 291587 - RNA, 23 nt, Artificial Sequence
  Synthetic
aacaacacacacugaggccuguc

SEQ ID NO: 291588 - RNA, 24 nt, Artificial Sequence
  Synthetic
gaacaacacacacugaggccuguc

SEQ ID NO: 291589 - RNA, 18 nt, Artificial Sequence
  Synthetic
cacacaccagggccuguc

SEQ ID NO: 291590 - RNA, 19 nt, Artificial Sequence
  Synthetic
ucacacaccagggccuguc

SEQ ID NO: 291591 - RNA, 20 nt, Artificial Sequence
  Synthetic
aucacacaccagggccuguc

SEQ ID NO: 291592 - RNA, 21 nt, Artificial Sequence
  Synthetic
caucacacaccagggccuguc

SEQ ID NO: 291593 - RNA, 22 nt, Artificial Sequence
  Synthetic
acaucacacaccagggccuguc

SEQ ID NO: 291594 - RNA, 23 nt, Artificial Sequence
  Synthetic
aacaucacacaccagggccuguc

SEQ ID NO: 291595 - RNA, 24 nt, Artificial Sequence
  Synthetic
gaacaucacacaccagggccuguc

SEQ ID NO: 291596 - RNA, 18 nt, Artificial Sequence
  Synthetic
cacacaccggggccuguc

SEQ ID NO: 291597 - RNA, 19 nt, Artificial Sequence
  Synthetic
ucacacaccggggccuguc

SEQ ID NO: 291598 - RNA, 20 nt, Artificial Sequence
  Synthetic
aucacacaccggggccuguc

SEQ ID NO: 291599 - RNA, 21 nt, Artificial Sequence
  Synthetic
caucacacaccggggccuguc

SEQ ID NO: 291600 - RNA, 22 nt, Artificial Sequence
  Synthetic
acaucacacaccggggccuguc

SEQ ID NO: 291601 - RNA, 23 nt, Artificial Sequence
  Synthetic
aacaucacacaccggggccuguc

SEQ ID NO: 291602 - RNA, 24 nt, Artificial Sequence
  Synthetic
gaacaucacacaccggggccuguc

SEQ ID NO: 291603 - RNA, 18 nt, Artificial Sequence
  Synthetic
uccacagaucugccuguc

SEQ ID NO: 291604 - RNA, 19 nt, Artificial Sequence
  Synthetic
cuccacagaucugccuguc

SEQ ID NO: 291605 - RNA, 20 nt, Artificial Sequence
  Synthetic
ccuccacagaucugccuguc

SEQ ID NO: 291606 - RNA, 21 nt, Artificial Sequence
  Synthetic
uccuccacagaucugccuguc

SEQ ID NO: 291607 - RNA, 22 nt, Artificial Sequence
  Synthetic
cuccuccacagaucugccuguc

SEQ ID NO: 291608 - RNA, 23 nt, Artificial Sequence
  Synthetic
ccuccuccacagaucugccuguc

SEQ ID NO: 291609 - RNA, 24 nt, Artificial Sequence
  Synthetic
uccuccuccacagaucugccuguc

SEQ ID NO: 291610 - RNA, 18 nt, Artificial Sequence
  Synthetic
acagagugagauccuguc

SEQ ID NO: 291611 - RNA, 19 nt, Artificial Sequence
  Synthetic
gacagagugagauccuguc

SEQ ID NO: 291612 - RNA, 20 nt, Artificial Sequence
  Synthetic
ugacagagugagauccuguc

SEQ ID NO: 291613 - RNA, 21 nt, Artificial Sequence
  Synthetic
gugacagagugagauccuguc

SEQ ID NO: 291614 - RNA, 22 nt, Artificial Sequence
  Synthetic
ggugacagagugagauccuguc

SEQ ID NO: 291615 - RNA, 23 nt, Artificial Sequence
  Synthetic
gggugacagagugagauccuguc

SEQ ID NO: 291616 - RNA, 24 nt, Artificial Sequence
  Synthetic
ugggugacagagugagauccuguc

SEQ ID NO: 291617 - RNA, 18 nt, Artificial Sequence
  Synthetic
acagccccagcuccuguc

SEQ ID NO: 291618 - RNA, 19 nt, Artificial Sequence
  Synthetic
cacagccccagcuccuguc

SEQ ID NO: 291619 - RNA, 20 nt, Artificial Sequence
  Synthetic
ucacagccccagcuccuguc

SEQ ID NO: 291620 - RNA, 21 nt, Artificial Sequence
  Synthetic
cucacagccccagcuccuguc

SEQ ID NO: 291621 - RNA, 22 nt, Artificial Sequence
  Synthetic
acucacagccccagcuccuguc

SEQ ID NO: 291622 - RNA, 23 nt, Artificial Sequence
  Synthetic
uacucacagccccagcuccuguc

SEQ ID NO: 291623 - RNA, 24 nt, Artificial Sequence
  Synthetic
uuacucacagccccagcuccuguc

SEQ ID NO: 291624 - RNA, 18 nt, Artificial Sequence
  Synthetic
cuauaauugagagcuguc

SEQ ID NO: 291625 - RNA, 19 nt, Artificial Sequence
  Synthetic
ccuauaauugagagcuguc

SEQ ID NO: 291626 - RNA, 20 nt, Artificial Sequence
  Synthetic
cccuauaauugagagcuguc

SEQ ID NO: 291627 - RNA, 21 nt, Artificial Sequence
  Synthetic
ccccuauaauugagagcuguc

SEQ ID NO: 291628 - RNA, 22 nt, Artificial Sequence
  Synthetic
gccccuauaauugagagcuguc

SEQ ID NO: 291629 - RNA, 23 nt, Artificial Sequence
  Synthetic
cgccccuauaauugagagcuguc

SEQ ID NO: 291630 - RNA, 24 nt, Artificial Sequence
  Synthetic
acgccccuauaauugagagcuguc

SEQ ID NO: 291631 - RNA, 18 nt, Artificial Sequence
  Synthetic
uaaucuuuuggcgcuguc

SEQ ID NO: 291632 - RNA, 19 nt, Artificial Sequence
  Synthetic
cuaaucuuuuggcgcuguc

SEQ ID NO: 291633 - RNA, 20 nt, Artificial Sequence
  Synthetic
gcuaaucuuuuggcgcuguc

SEQ ID NO: 291634 - RNA, 21 nt, Artificial Sequence
  Synthetic
ugcuaaucuuuuggcgcuguc

SEQ ID NO: 291635 - RNA, 22 nt, Artificial Sequence
  Synthetic
cugcuaaucuuuuggcgcuguc

SEQ ID NO: 291636 - RNA, 23 nt, Artificial Sequence
  Synthetic
gcugcuaaucuuuuggcgcuguc

SEQ ID NO: 291637 - RNA, 24 nt, Artificial Sequence
  Synthetic
agcugcuaaucuuuuggcgcuguc

SEQ ID NO: 291638 - RNA, 18 nt, Artificial Sequence
  Synthetic
cccuugggucuggcuguc

SEQ ID NO: 291639 - RNA, 19 nt, Artificial Sequence
  Synthetic
acccuugggucuggcuguc

SEQ ID NO: 291640 - RNA, 20 nt, Artificial Sequence
  Synthetic
gacccuugggucuggcuguc

SEQ ID NO: 291641 - RNA, 21 nt, Artificial Sequence
  Synthetic
ggacccuugggucuggcuguc

SEQ ID NO: 291642 - RNA, 22 nt, Artificial Sequence
  Synthetic
uggacccuugggucuggcuguc

SEQ ID NO: 291643 - RNA, 23 nt, Artificial Sequence
  Synthetic
uuggacccuugggucuggcuguc

SEQ ID NO: 291644 - RNA, 24 nt, Artificial Sequence
  Synthetic
uuuggacccuugggucuggcuguc

SEQ ID NO: 291645 - RNA, 18 nt, Artificial Sequence
  Synthetic
ucaauaucaauugcuguc

SEQ ID NO: 291646 - RNA, 19 nt, Artificial Sequence
  Synthetic
gucaauaucaauugcuguc

SEQ ID NO: 291647 - RNA, 20 nt, Artificial Sequence
  Synthetic
agucaauaucaauugcuguc

SEQ ID NO: 291648 - RNA, 21 nt, Artificial Sequence
  Synthetic
cagucaauaucaauugcuguc

SEQ ID NO: 291649 - RNA, 22 nt, Artificial Sequence
  Synthetic
acagucaauaucaauugcuguc

SEQ ID NO: 291650 - RNA, 23 nt, Artificial Sequence
  Synthetic
uacagucaauaucaauugcuguc

SEQ ID NO: 291651 - RNA, 24 nt, Artificial Sequence
  Synthetic
auacagucaauaucaauugcuguc

SEQ ID NO: 291652 - RNA, 18 nt, Artificial Sequence
  Synthetic
gcacauuaaggaucuguc

SEQ ID NO: 291653 - RNA, 19 nt, Artificial Sequence
  Synthetic
ugcacauuaaggaucuguc

SEQ ID NO: 291654 - RNA, 20 nt, Artificial Sequence
  Synthetic
augcacauuaaggaucuguc

SEQ ID NO: 291655 - RNA, 21 nt, Artificial Sequence
  Synthetic
gaugcacauuaaggaucuguc

SEQ ID NO: 291656 - RNA, 22 nt, Artificial Sequence
  Synthetic
agaugcacauuaaggaucuguc

SEQ ID NO: 291657 - RNA, 23 nt, Artificial Sequence
  Synthetic
cagaugcacauuaaggaucuguc

SEQ ID NO: 291658 - RNA, 24 nt, Artificial Sequence
  Synthetic
gcagaugcacauuaaggaucuguc

SEQ ID NO: 291659 - RNA, 18 nt, Artificial Sequence
  Synthetic
uuugguugagcuucuguc

SEQ ID NO: 291660 - RNA, 19 nt, Artificial Sequence
  Synthetic
cuuugguugagcuucuguc

SEQ ID NO: 291661 - RNA, 20 nt, Artificial Sequence
  Synthetic
acuuugguugagcuucuguc

SEQ ID NO: 291662 - RNA, 21 nt, Artificial Sequence
  Synthetic
uacuuugguugagcuucuguc

SEQ ID NO: 291663 - RNA, 22 nt, Artificial Sequence
  Synthetic
cuacuuugguugagcuucuguc

SEQ ID NO: 291664 - RNA, 23 nt, Artificial Sequence
  Synthetic
acuacuuugguugagcuucuguc

SEQ ID NO: 291665 - RNA, 24 nt, Artificial Sequence
  Synthetic
uacuacuuugguugagcuucuguc

SEQ ID NO: 291666 - RNA, 18 nt, Artificial Sequence
  Synthetic
cguuuaaacuguucuguc

SEQ ID NO: 291667 - RNA, 19 nt, Artificial Sequence
  Synthetic
acguuuaaacuguucuguc

SEQ ID NO: 291668 - RNA, 20 nt, Artificial Sequence
  Synthetic
cacguuuaaacuguucuguc

SEQ ID NO: 291669 - RNA, 21 nt, Artificial Sequence
  Synthetic
gcacguuuaaacuguucuguc

SEQ ID NO: 291670 - RNA, 22 nt, Artificial Sequence
  Synthetic
agcacguuuaaacuguucuguc

SEQ ID NO: 291671 - RNA, 23 nt, Artificial Sequence
  Synthetic
aagcacguuuaaacuguucuguc

SEQ ID NO: 291672 - RNA, 24 nt, Artificial Sequence
  Synthetic
gaagcacguuuaaacuguucuguc

SEQ ID NO: 291673 - RNA, 18 nt, Artificial Sequence
  Synthetic
uauauaaugagaaguguc

SEQ ID NO: 291674 - RNA, 19 nt, Artificial Sequence
  Synthetic
auauauaaugagaaguguc

SEQ ID NO: 291675 - RNA, 20 nt, Artificial Sequence
  Synthetic
gauauauaaugagaaguguc

SEQ ID NO: 291676 - RNA, 21 nt, Artificial Sequence
  Synthetic
ugauauauaaugagaaguguc

SEQ ID NO: 291677 - RNA, 22 nt, Artificial Sequence
  Synthetic
augauauauaaugagaaguguc

SEQ ID NO: 291678 - RNA, 23 nt, Artificial Sequence
  Synthetic
caugauauauaaugagaaguguc

SEQ ID NO: 291679 - RNA, 24 nt, Artificial Sequence
  Synthetic
ucaugauauauaaugagaaguguc

SEQ ID NO: 291680 - RNA, 18 nt, Artificial Sequence
  Synthetic
caccuucugugaaguguc

SEQ ID NO: 291681 - RNA, 19 nt, Artificial Sequence
  Synthetic
ucaccuucugugaaguguc

SEQ ID NO: 291682 - RNA, 20 nt, Artificial Sequence
  Synthetic
uucaccuucugugaaguguc

SEQ ID NO: 291683 - RNA, 21 nt, Artificial Sequence
  Synthetic
cuucaccuucugugaaguguc

SEQ ID NO: 291684 - RNA, 22 nt, Artificial Sequence
  Synthetic
ucuucaccuucugugaaguguc

SEQ ID NO: 291685 - RNA, 23 nt, Artificial Sequence
  Synthetic
aucuucaccuucugugaaguguc

SEQ ID NO: 291686 - RNA, 24 nt, Artificial Sequence
  Synthetic
aaucuucaccuucugugaaguguc

SEQ ID NO: 291687 - RNA, 18 nt, Artificial Sequence
  Synthetic
uacucucuucccaguguc

SEQ ID NO: 291688 - RNA, 19 nt, Artificial Sequence
  Synthetic
auacucucuucccaguguc

SEQ ID NO: 291689 - RNA, 20 nt, Artificial Sequence
  Synthetic
aauacucucuucccaguguc

SEQ ID NO: 291690 - RNA, 21 nt, Artificial Sequence
  Synthetic
aaauacucucuucccaguguc

SEQ ID NO: 291691 - RNA, 22 nt, Artificial Sequence
  Synthetic
caaauacucucuucccaguguc

SEQ ID NO: 291692 - RNA, 23 nt, Artificial Sequence
  Synthetic
gcaaauacucucuucccaguguc

SEQ ID NO: 291693 - RNA, 24 nt, Artificial Sequence
  Synthetic
ggcaaauacucucuucccaguguc

SEQ ID NO: 291694 - RNA, 18 nt, Artificial Sequence
  Synthetic
acuuucuuuuccaguguc

SEQ ID NO: 291695 - RNA, 19 nt, Artificial Sequence
  Synthetic
aacuuucuuuuccaguguc

SEQ ID NO: 291696 - RNA, 20 nt, Artificial Sequence
  Synthetic
aaacuuucuuuuccaguguc

SEQ ID NO: 291697 - RNA, 21 nt, Artificial Sequence
  Synthetic
uaaacuuucuuuuccaguguc

SEQ ID NO: 291698 - RNA, 22 nt, Artificial Sequence
  Synthetic
uuaaacuuucuuuuccaguguc

SEQ ID NO: 291699 - RNA, 23 nt, Artificial Sequence
  Synthetic
uuuaaacuuucuuuuccaguguc

SEQ ID NO: 291700 - RNA, 24 nt, Artificial Sequence
  Synthetic
uuuuaaacuuucuuuuccaguguc

SEQ ID NO: 291701 - RNA, 18 nt, Artificial Sequence
  Synthetic
gaaguggcuggcaguguc

SEQ ID NO: 291702 - RNA, 19 nt, Artificial Sequence
  Synthetic
ggaaguggcuggcaguguc

SEQ ID NO: 291703 - RNA, 20 nt, Artificial Sequence
  Synthetic
aggaaguggcuggcaguguc

SEQ ID NO: 291704 - RNA, 21 nt, Artificial Sequence
  Synthetic
aaggaaguggcuggcaguguc

SEQ ID NO: 291705 - RNA, 22 nt, Artificial Sequence
  Synthetic
caaggaaguggcuggcaguguc

SEQ ID NO: 291706 - RNA, 23 nt, Artificial Sequence
  Synthetic
acaaggaaguggcuggcaguguc

SEQ ID NO: 291707 - RNA, 24 nt, Artificial Sequence
  Synthetic
gacaaggaaguggcuggcaguguc

SEQ ID NO: 291708 - RNA, 18 nt, Artificial Sequence
  Synthetic
cauucagguaguaguguc

SEQ ID NO: 291709 - RNA, 19 nt, Artificial Sequence
  Synthetic
acauucagguaguaguguc

SEQ ID NO: 291710 - RNA, 20 nt, Artificial Sequence
  Synthetic
cacauucagguaguaguguc

SEQ ID NO: 291711 - RNA, 21 nt, Artificial Sequence
  Synthetic
acacauucagguaguaguguc

SEQ ID NO: 291712 - RNA, 22 nt, Artificial Sequence
  Synthetic
uacacauucagguaguaguguc

SEQ ID NO: 291713 - RNA, 23 nt, Artificial Sequence
  Synthetic
uuacacauucagguaguaguguc

SEQ ID NO: 291714 - RNA, 24 nt, Artificial Sequence
  Synthetic
guuacacauucagguaguaguguc

SEQ ID NO: 291715 - RNA, 18 nt, Artificial Sequence
  Synthetic
gucugagaucaagguguc

SEQ ID NO: 291716 - RNA, 19 nt, Artificial Sequence
  Synthetic
agucugagaucaagguguc

SEQ ID NO: 291717 - RNA, 20 nt, Artificial Sequence
  Synthetic
aagucugagaucaagguguc

SEQ ID NO: 291718 - RNA, 21 nt, Artificial Sequence
  Synthetic
gaagucugagaucaagguguc

SEQ ID NO: 291719 - RNA, 22 nt, Artificial Sequence
  Synthetic
agaagucugagaucaagguguc

SEQ ID NO: 291720 - RNA, 23 nt, Artificial Sequence
  Synthetic
uagaagucugagaucaagguguc

SEQ ID NO: 291721 - RNA, 24 nt, Artificial Sequence
  Synthetic
auagaagucugagaucaagguguc

SEQ ID NO: 291722 - RNA, 18 nt, Artificial Sequence
  Synthetic
ccaaaauccccagguguc

SEQ ID NO: 291723 - RNA, 19 nt, Artificial Sequence
  Synthetic
uccaaaauccccagguguc

SEQ ID NO: 291724 - RNA, 20 nt, Artificial Sequence
  Synthetic
cuccaaaauccccagguguc

SEQ ID NO: 291725 - RNA, 21 nt, Artificial Sequence
  Synthetic
ucuccaaaauccccagguguc

SEQ ID NO: 291726 - RNA, 22 nt, Artificial Sequence
  Synthetic
aucuccaaaauccccagguguc

SEQ ID NO: 291727 - RNA, 23 nt, Artificial Sequence
  Synthetic
aaucuccaaaauccccagguguc

SEQ ID NO: 291728 - RNA, 24 nt, Artificial Sequence
  Synthetic
uaaucuccaaaauccccagguguc

SEQ ID NO: 291729 - RNA, 18 nt, Artificial Sequence
  Synthetic
aaaaggaguucagguguc

SEQ ID NO: 291730 - RNA, 19 nt, Artificial Sequence
  Synthetic
gaaaaggaguucagguguc

SEQ ID NO: 291731 - RNA, 20 nt, Artificial Sequence
  Synthetic
ggaaaaggaguucagguguc

SEQ ID NO: 291732 - RNA, 21 nt, Artificial Sequence
  Synthetic
uggaaaaggaguucagguguc

SEQ ID NO: 291733 - RNA, 22 nt, Artificial Sequence
  Synthetic
guggaaaaggaguucagguguc

SEQ ID NO: 291734 - RNA, 23 nt, Artificial Sequence
  Synthetic
uguggaaaaggaguucagguguc

SEQ ID NO: 291735 - RNA, 24 nt, Artificial Sequence
  Synthetic
cuguggaaaaggaguucagguguc

SEQ ID NO: 291736 - RNA, 18 nt, Artificial Sequence
  Synthetic
agaauuaguucugguguc

SEQ ID NO: 291737 - RNA, 19 nt, Artificial Sequence
  Synthetic
aagaauuaguucugguguc

SEQ ID NO: 291738 - RNA, 20 nt, Artificial Sequence
  Synthetic
gaagaauuaguucugguguc

SEQ ID NO: 291739 - RNA, 21 nt, Artificial Sequence
  Synthetic
ggaagaauuaguucugguguc

SEQ ID NO: 291740 - RNA, 22 nt, Artificial Sequence
  Synthetic
aggaagaauuaguucugguguc

SEQ ID NO: 291741 - RNA, 23 nt, Artificial Sequence
  Synthetic
aaggaagaauuaguucugguguc

SEQ ID NO: 291742 - RNA, 24 nt, Artificial Sequence
  Synthetic
aaaggaagaauuaguucugguguc

SEQ ID NO: 291743 - RNA, 18 nt, Artificial Sequence
  Synthetic
ccccauauaguugguguc

SEQ ID NO: 291744 - RNA, 19 nt, Artificial Sequence
  Synthetic
accccauauaguugguguc

SEQ ID NO: 291745 - RNA, 20 nt, Artificial Sequence
  Synthetic
aaccccauauaguugguguc

SEQ ID NO: 291746 - RNA, 21 nt, Artificial Sequence
  Synthetic
uaaccccauauaguugguguc

SEQ ID NO: 291747 - RNA, 22 nt, Artificial Sequence
  Synthetic
uuaaccccauauaguugguguc

SEQ ID NO: 291748 - RNA, 23 nt, Artificial Sequence
  Synthetic
auuaaccccauauaguugguguc

SEQ ID NO: 291749 - RNA, 24 nt, Artificial Sequence
  Synthetic
gauuaaccccauauaguugguguc

SEQ ID NO: 291750 - RNA, 18 nt, Artificial Sequence
  Synthetic
accagcagauuugguguc

SEQ ID NO: 291751 - RNA, 19 nt, Artificial Sequence
  Synthetic
uaccagcagauuugguguc

SEQ ID NO: 291752 - RNA, 20 nt, Artificial Sequence
  Synthetic
auaccagcagauuugguguc

SEQ ID NO: 291753 - RNA, 21 nt, Artificial Sequence
  Synthetic
aauaccagcagauuugguguc

SEQ ID NO: 291754 - RNA, 22 nt, Artificial Sequence
  Synthetic
aaauaccagcagauuugguguc

SEQ ID NO: 291755 - RNA, 23 nt, Artificial Sequence
  Synthetic
aaaauaccagcagauuugguguc

SEQ ID NO: 291756 - RNA, 24 nt, Artificial Sequence
  Synthetic
caaaauaccagcagauuugguguc

SEQ ID NO: 291757 - RNA, 18 nt, Artificial Sequence
  Synthetic
auaucaguggaauguguc

SEQ ID NO: 291758 - RNA, 19 nt, Artificial Sequence
  Synthetic
aauaucaguggaauguguc

SEQ ID NO: 291759 - RNA, 20 nt, Artificial Sequence
  Synthetic
aaauaucaguggaauguguc

SEQ ID NO: 291760 - RNA, 21 nt, Artificial Sequence
  Synthetic
aaaauaucaguggaauguguc

SEQ ID NO: 291761 - RNA, 22 nt, Artificial Sequence
  Synthetic
gaaaauaucaguggaauguguc

SEQ ID NO: 291762 - RNA, 23 nt, Artificial Sequence
  Synthetic
ugaaaauaucaguggaauguguc

SEQ ID NO: 291763 - RNA, 24 nt, Artificial Sequence
  Synthetic
augaaaauaucaguggaauguguc

SEQ ID NO: 291764 - RNA, 18 nt, Artificial Sequence
  Synthetic
aacaacuaauaauguguc

SEQ ID NO: 291765 - RNA, 19 nt, Artificial Sequence
  Synthetic
uaacaacuaauaauguguc

SEQ ID NO: 291766 - RNA, 20 nt, Artificial Sequence
  Synthetic
auaacaacuaauaauguguc

SEQ ID NO: 291767 - RNA, 21 nt, Artificial Sequence
  Synthetic
aauaacaacuaauaauguguc

SEQ ID NO: 291768 - RNA, 22 nt, Artificial Sequence
  Synthetic
aaauaacaacuaauaauguguc

SEQ ID NO: 291769 - RNA, 23 nt, Artificial Sequence
  Synthetic
aaaauaacaacuaauaauguguc

SEQ ID NO: 291770 - RNA, 24 nt, Artificial Sequence
  Synthetic
aaaaauaacaacuaauaauguguc

SEQ ID NO: 291771 - RNA, 18 nt, Artificial Sequence
  Synthetic
ggugaggagcgauguguc

SEQ ID NO: 291772 - RNA, 19 nt, Artificial Sequence
  Synthetic
gggugaggagcgauguguc

SEQ ID NO: 291773 - RNA, 20 nt, Artificial Sequence
  Synthetic
ugggugaggagcgauguguc

SEQ ID NO: 291774 - RNA, 21 nt, Artificial Sequence
  Synthetic
augggugaggagcgauguguc

SEQ ID NO: 291775 - RNA, 22 nt, Artificial Sequence
  Synthetic
aaugggugaggagcgauguguc

SEQ ID NO: 291776 - RNA, 23 nt, Artificial Sequence
  Synthetic
gaaugggugaggagcgauguguc

SEQ ID NO: 291777 - RNA, 24 nt, Artificial Sequence
  Synthetic
ggaaugggugaggagcgauguguc

SEQ ID NO: 291778 - RNA, 18 nt, Artificial Sequence
  Synthetic
guagcaccaggauguguc

SEQ ID NO: 291779 - RNA, 19 nt, Artificial Sequence
  Synthetic
aguagcaccaggauguguc

SEQ ID NO: 291780 - RNA, 20 nt, Artificial Sequence
  Synthetic
aaguagcaccaggauguguc

SEQ ID NO: 291781 - RNA, 21 nt, Artificial Sequence
  Synthetic
aaaguagcaccaggauguguc

SEQ ID NO: 291782 - RNA, 22 nt, Artificial Sequence
  Synthetic
uaaaguagcaccaggauguguc

SEQ ID NO: 291783 - RNA, 23 nt, Artificial Sequence
  Synthetic
auaaaguagcaccaggauguguc

SEQ ID NO: 291784 - RNA, 24 nt, Artificial Sequence
  Synthetic
gauaaaguagcaccaggauguguc

SEQ ID NO: 291785 - RNA, 18 nt, Artificial Sequence
  Synthetic
ucacccuguugauguguc

SEQ ID NO: 291786 - RNA, 19 nt, Artificial Sequence
  Synthetic
cucacccuguugauguguc

SEQ ID NO: 291787 - RNA, 20 nt, Artificial Sequence
  Synthetic
ucucacccuguugauguguc

SEQ ID NO: 291788 - RNA, 21 nt, Artificial Sequence
  Synthetic
uucucacccuguugauguguc

SEQ ID NO: 291789 - RNA, 22 nt, Artificial Sequence
  Synthetic
cuucucacccuguugauguguc

SEQ ID NO: 291790 - RNA, 23 nt, Artificial Sequence
  Synthetic
ucuucucacccuguugauguguc

SEQ ID NO: 291791 - RNA, 24 nt, Artificial Sequence
  Synthetic
uucuucucacccuguugauguguc

SEQ ID NO: 291792 - RNA, 18 nt, Artificial Sequence
  Synthetic
aaccuuaugauauguguc

SEQ ID NO: 291793 - RNA, 19 nt, Artificial Sequence
  Synthetic
aaaccuuaugauauguguc

SEQ ID NO: 291794 - RNA, 20 nt, Artificial Sequence
  Synthetic
gaaaccuuaugauauguguc

SEQ ID NO: 291795 - RNA, 21 nt, Artificial Sequence
  Synthetic
agaaaccuuaugauauguguc

SEQ ID NO: 291796 - RNA, 22 nt, Artificial Sequence
  Synthetic
aagaaaccuuaugauauguguc

SEQ ID NO: 291797 - RNA, 23 nt, Artificial Sequence
  Synthetic
gaagaaaccuuaugauauguguc

SEQ ID NO: 291798 - RNA, 24 nt, Artificial Sequence
  Synthetic
agaagaaaccuuaugauauguguc

SEQ ID NO: 291799 - RNA, 18 nt, Artificial Sequence
  Synthetic
ugggagaguguauguguc

SEQ ID NO: 291800 - RNA, 19 nt, Artificial Sequence
  Synthetic
uugggagaguguauguguc

SEQ ID NO: 291801 - RNA, 20 nt, Artificial Sequence
  Synthetic
cuugggagaguguauguguc

SEQ ID NO: 291802 - RNA, 18 nt, Artificial Sequence
  Synthetic
ugggaggguguauguguc

SEQ ID NO: 291803 - RNA, 19 nt, Artificial Sequence
  Synthetic
uugggaggguguauguguc

SEQ ID NO: 291804 - RNA, 20 nt, Artificial Sequence
  Synthetic
cuugggaggguguauguguc

SEQ ID NO: 291805 - RNA, 21 nt, Artificial Sequence
  Synthetic
ucuugggaggguguauguguc

SEQ ID NO: 291806 - RNA, 22 nt, Artificial Sequence
  Synthetic
gucuugggaggguguauguguc

SEQ ID NO: 291807 - RNA, 23 nt, Artificial Sequence
  Synthetic
agucuugggaggguguauguguc

SEQ ID NO: 291808 - RNA, 24 nt, Artificial Sequence
  Synthetic
uagucuugggaggguguauguguc

SEQ ID NO: 291809 - RNA, 18 nt, Artificial Sequence
  Synthetic
ugguagguuguauguguc

SEQ ID NO: 291810 - RNA, 19 nt, Artificial Sequence
  Synthetic
uugguagguuguauguguc

SEQ ID NO: 291811 - RNA, 20 nt, Artificial Sequence
  Synthetic
cuugguagguuguauguguc

SEQ ID NO: 291812 - RNA, 21 nt, Artificial Sequence
  Synthetic
ucuugguagguuguauguguc

SEQ ID NO: 291813 - RNA, 22 nt, Artificial Sequence
  Synthetic
aucuugguagguuguauguguc

SEQ ID NO: 291814 - RNA, 23 nt, Artificial Sequence
  Synthetic
aaucuugguagguuguauguguc

SEQ ID NO: 291815 - RNA, 24 nt, Artificial Sequence
  Synthetic
uaaucuugguagguuguauguguc

SEQ ID NO: 291816 - RNA, 18 nt, Artificial Sequence
  Synthetic
aucugacaauuauguguc

SEQ ID NO: 291817 - RNA, 19 nt, Artificial Sequence
  Synthetic
aaucugacaauuauguguc

SEQ ID NO: 291818 - RNA, 20 nt, Artificial Sequence
  Synthetic
gaaucugacaauuauguguc

SEQ ID NO: 291819 - RNA, 21 nt, Artificial Sequence
  Synthetic
ugaaucugacaauuauguguc

SEQ ID NO: 291820 - RNA, 22 nt, Artificial Sequence
  Synthetic
gugaaucugacaauuauguguc

SEQ ID NO: 291821 - RNA, 23 nt, Artificial Sequence
  Synthetic
ggugaaucugacaauuauguguc

SEQ ID NO: 291822 - RNA, 24 nt, Artificial Sequence
  Synthetic
uggugaaucugacaauuauguguc

SEQ ID NO: 291823 - RNA, 18 nt, Artificial Sequence
  Synthetic
cucauucuugacuguguc

SEQ ID NO: 291824 - RNA, 19 nt, Artificial Sequence
  Synthetic
ccucauucuugacuguguc

SEQ ID NO: 291825 - RNA, 20 nt, Artificial Sequence
  Synthetic
cccucauucuugacuguguc

SEQ ID NO: 291826 - RNA, 21 nt, Artificial Sequence
  Synthetic
acccucauucuugacuguguc

SEQ ID NO: 291827 - RNA, 22 nt, Artificial Sequence
  Synthetic
aacccucauucuugacuguguc

SEQ ID NO: 291828 - RNA, 23 nt, Artificial Sequence
  Synthetic
aaacccucauucuugacuguguc

SEQ ID NO: 291829 - RNA, 24 nt, Artificial Sequence
  Synthetic
uaaacccucauucuugacuguguc

SEQ ID NO: 291830 - RNA, 18 nt, Artificial Sequence
  Synthetic
uauccacugagcuguguc

SEQ ID NO: 291831 - RNA, 19 nt, Artificial Sequence
  Synthetic
cuauccacugagcuguguc

SEQ ID NO: 291832 - RNA, 20 nt, Artificial Sequence
  Synthetic
acuauccacugagcuguguc

SEQ ID NO: 291833 - RNA, 21 nt, Artificial Sequence
  Synthetic
cacuauccacugagcuguguc

SEQ ID NO: 291834 - RNA, 22 nt, Artificial Sequence
  Synthetic
ucacuauccacugagcuguguc

SEQ ID NO: 291835 - RNA, 23 nt, Artificial Sequence
  Synthetic
gucacuauccacugagcuguguc

SEQ ID NO: 291836 - RNA, 24 nt, Artificial Sequence
  Synthetic
agucacuauccacugagcuguguc

SEQ ID NO: 291837 - RNA, 18 nt, Artificial Sequence
  Synthetic
aguugaaauaucuguguc

SEQ ID NO: 291838 - RNA, 19 nt, Artificial Sequence
  Synthetic
caguugaaauaucuguguc

SEQ ID NO: 291839 - RNA, 20 nt, Artificial Sequence
  Synthetic
acaguugaaauaucuguguc

SEQ ID NO: 291840 - RNA, 21 nt, Artificial Sequence
  Synthetic
cacaguugaaauaucuguguc

SEQ ID NO: 291841 - RNA, 22 nt, Artificial Sequence
  Synthetic
ucacaguugaaauaucuguguc

SEQ ID NO: 291842 - RNA, 23 nt, Artificial Sequence
  Synthetic
aucacaguugaaauaucuguguc

SEQ ID NO: 291843 - RNA, 24 nt, Artificial Sequence
  Synthetic
aaucacaguugaaauaucuguguc

SEQ ID NO: 291844 - RNA, 18 nt, Artificial Sequence
  Synthetic
ugugcuuucuucuguguc

SEQ ID NO: 291845 - RNA, 19 nt, Artificial Sequence
  Synthetic
uugugcuuucuucuguguc

SEQ ID NO: 291846 - RNA, 20 nt, Artificial Sequence
  Synthetic
uuugugcuuucuucuguguc

SEQ ID NO: 291847 - RNA, 21 nt, Artificial Sequence
  Synthetic
uuuugugcuuucuucuguguc

SEQ ID NO: 291848 - RNA, 22 nt, Artificial Sequence
  Synthetic
auuuugugcuuucuucuguguc

SEQ ID NO: 291849 - RNA, 23 nt, Artificial Sequence
  Synthetic
uauuuugugcuuucuucuguguc

SEQ ID NO: 291850 - RNA, 24 nt, Artificial Sequence
  Synthetic
auauuuugugcuuucuucuguguc

SEQ ID NO: 291851 - RNA, 18 nt, Artificial Sequence
  Synthetic
uuauaauccccguguguc

SEQ ID NO: 291852 - RNA, 19 nt, Artificial Sequence
  Synthetic
auuauaauccccguguguc

SEQ ID NO: 291853 - RNA, 20 nt, Artificial Sequence
  Synthetic
aauuauaauccccguguguc

SEQ ID NO: 291854 - RNA, 21 nt, Artificial Sequence
  Synthetic
gaauuauaauccccguguguc

SEQ ID NO: 291855 - RNA, 22 nt, Artificial Sequence
  Synthetic
ugaauuauaauccccguguguc

SEQ ID NO: 291856 - RNA, 23 nt, Artificial Sequence
  Synthetic
uugaauuauaauccccguguguc

SEQ ID NO: 291857 - RNA, 24 nt, Artificial Sequence
  Synthetic
uuugaauuauaauccccguguguc

SEQ ID NO: 291858 - RNA, 18 nt, Artificial Sequence
  Synthetic
uuuggcccaggguguguc

SEQ ID NO: 291859 - RNA, 19 nt, Artificial Sequence
  Synthetic
uuuuggcccaggguguguc

SEQ ID NO: 291860 - RNA, 20 nt, Artificial Sequence
  Synthetic
cuuuuggcccaggguguguc

SEQ ID NO: 291861 - RNA, 21 nt, Artificial Sequence
  Synthetic
ccuuuuggcccaggguguguc

SEQ ID NO: 291862 - RNA, 22 nt, Artificial Sequence
  Synthetic
cccuuuuggcccaggguguguc

SEQ ID NO: 291863 - RNA, 23 nt, Artificial Sequence
  Synthetic
ucccuuuuggcccaggguguguc

SEQ ID NO: 291864 - RNA, 24 nt, Artificial Sequence
  Synthetic
uucccuuuuggcccaggguguguc

SEQ ID NO: 291865 - RNA, 18 nt, Artificial Sequence
  Synthetic
guuuagagccuguguguc

SEQ ID NO: 291866 - RNA, 19 nt, Artificial Sequence
  Synthetic
gguuuagagccuguguguc

SEQ ID NO: 291867 - RNA, 20 nt, Artificial Sequence
  Synthetic
agguuuagagccuguguguc

SEQ ID NO: 291868 - RNA, 21 nt, Artificial Sequence
  Synthetic
aagguuuagagccuguguguc

SEQ ID NO: 291869 - RNA, 22 nt, Artificial Sequence
  Synthetic
caagguuuagagccuguguguc

SEQ ID NO: 291870 - RNA, 23 nt, Artificial Sequence
  Synthetic
ucaagguuuagagccuguguguc

SEQ ID NO: 291871 - RNA, 24 nt, Artificial Sequence
  Synthetic
aucaagguuuagagccuguguguc

SEQ ID NO: 291872 - RNA, 18 nt, Artificial Sequence
  Synthetic
ucagcuugcuauuguguc

SEQ ID NO: 291873 - RNA, 19 nt, Artificial Sequence
  Synthetic
gucagcuugcuauuguguc

SEQ ID NO: 291874 - RNA, 20 nt, Artificial Sequence
  Synthetic
ugucagcuugcuauuguguc

SEQ ID NO: 291875 - RNA, 21 nt, Artificial Sequence
  Synthetic
cugucagcuugcuauuguguc

SEQ ID NO: 291876 - RNA, 22 nt, Artificial Sequence
  Synthetic
acugucagcuugcuauuguguc

SEQ ID NO: 291877 - RNA, 23 nt, Artificial Sequence
  Synthetic
uacugucagcuugcuauuguguc

SEQ ID NO: 291878 - RNA, 24 nt, Artificial Sequence
  Synthetic
cuacugucagcuugcuauuguguc

SEQ ID NO: 291879 - RNA, 18 nt, Artificial Sequence
  Synthetic
cauagguaaacuuguguc

SEQ ID NO: 291880 - RNA, 19 nt, Artificial Sequence
  Synthetic
acauagguaaacuuguguc

SEQ ID NO: 291881 - RNA, 20 nt, Artificial Sequence
  Synthetic
uacauagguaaacuuguguc

SEQ ID NO: 291882 - RNA, 21 nt, Artificial Sequence
  Synthetic
uuacauagguaaacuuguguc

SEQ ID NO: 291883 - RNA, 22 nt, Artificial Sequence
  Synthetic
guuacauagguaaacuuguguc

SEQ ID NO: 291884 - RNA, 23 nt, Artificial Sequence
  Synthetic
uguuacauagguaaacuuguguc

SEQ ID NO: 291885 - RNA, 24 nt, Artificial Sequence
  Synthetic
uuguuacauagguaaacuuguguc

SEQ ID NO: 291886 - RNA, 18 nt, Artificial Sequence
  Synthetic
ugugcucuuuguuguguc

SEQ ID NO: 291887 - RNA, 19 nt, Artificial Sequence
  Synthetic
augugcucuuuguuguguc

SEQ ID NO: 291888 - RNA, 20 nt, Artificial Sequence
  Synthetic
gaugugcucuuuguuguguc

SEQ ID NO: 291889 - RNA, 21 nt, Artificial Sequence
  Synthetic
ugaugugcucuuuguuguguc

SEQ ID NO: 291890 - RNA, 22 nt, Artificial Sequence
  Synthetic
cugaugugcucuuuguuguguc

SEQ ID NO: 291891 - RNA, 23 nt, Artificial Sequence
  Synthetic
ucugaugugcucuuuguuguguc

SEQ ID NO: 291892 - RNA, 24 nt, Artificial Sequence
  Synthetic
gucugaugugcucuuuguuguguc

SEQ ID NO: 291893 - RNA, 18 nt, Artificial Sequence
  Synthetic
gcuugcuagauuuguguc

SEQ ID NO: 291894 - RNA, 19 nt, Artificial Sequence
  Synthetic
ugcuugcuagauuuguguc

SEQ ID NO: 291895 - RNA, 20 nt, Artificial Sequence
  Synthetic
uugcuugcuagauuuguguc

SEQ ID NO: 291896 - RNA, 21 nt, Artificial Sequence
  Synthetic
guugcuugcuagauuuguguc

SEQ ID NO: 291897 - RNA, 22 nt, Artificial Sequence
  Synthetic
uguugcuugcuagauuuguguc

SEQ ID NO: 291898 - RNA, 23 nt, Artificial Sequence
  Synthetic
uuguugcuugcuagauuuguguc

SEQ ID NO: 291899 - RNA, 24 nt, Artificial Sequence
  Synthetic
uuuguugcuugcuagauuuguguc

SEQ ID NO: 291900 - RNA, 18 nt, Artificial Sequence
  Synthetic
aguguggguguuuguguc

SEQ ID NO: 291901 - RNA, 19 nt, Artificial Sequence
  Synthetic
aaguguggguguuuguguc

SEQ ID NO: 291902 - RNA, 20 nt, Artificial Sequence
  Synthetic
uaaguguggguguuuguguc

SEQ ID NO: 291903 - RNA, 21 nt, Artificial Sequence
  Synthetic
guaaguguggguguuuguguc

SEQ ID NO: 291904 - RNA, 22 nt, Artificial Sequence
  Synthetic
uguaaguguggguguuuguguc

SEQ ID NO: 291905 - RNA, 23 nt, Artificial Sequence
  Synthetic
auguaaguguggguguuuguguc

SEQ ID NO: 291906 - RNA, 24 nt, Artificial Sequence
  Synthetic
gauguaaguguggguguuuguguc

SEQ ID NO: 291907 - RNA, 18 nt, Artificial Sequence
  Synthetic
ccuuccaucuuuuguguc

SEQ ID NO: 291908 - RNA, 19 nt, Artificial Sequence
  Synthetic
uccuuccaucuuuuguguc

SEQ ID NO: 291909 - RNA, 20 nt, Artificial Sequence
  Synthetic
cuccuuccaucuuuuguguc

SEQ ID NO: 291910 - RNA, 21 nt, Artificial Sequence
  Synthetic
gcuccuuccaucuuuuguguc

SEQ ID NO: 291911 - RNA, 22 nt, Artificial Sequence
  Synthetic
agcuccuuccaucuuuuguguc

SEQ ID NO: 291912 - RNA, 23 nt, Artificial Sequence
  Synthetic
aagcuccuuccaucuuuuguguc

SEQ ID NO: 291913 - RNA, 24 nt, Artificial Sequence
  Synthetic
caagcuccuuccaucuuuuguguc

SEQ ID NO: 291914 - RNA, 18 nt, Artificial Sequence
  Synthetic
uuuguuacaagaauuguc

SEQ ID NO: 291915 - RNA, 19 nt, Artificial Sequence
  Synthetic
auuuguuacaagaauuguc

SEQ ID NO: 291916 - RNA, 20 nt, Artificial Sequence
  Synthetic
uauuuguuacaagaauuguc

SEQ ID NO: 291917 - RNA, 21 nt, Artificial Sequence
  Synthetic
uuauuuguuacaagaauuguc

SEQ ID NO: 291918 - RNA, 22 nt, Artificial Sequence
  Synthetic
uuuauuuguuacaagaauuguc

SEQ ID NO: 291919 - RNA, 23 nt, Artificial Sequence
  Synthetic
uuuuauuuguuacaagaauuguc

SEQ ID NO: 291920 - RNA, 24 nt, Artificial Sequence
  Synthetic
guuuuauuuguuacaagaauuguc

SEQ ID NO: 291921 - RNA, 18 nt, Artificial Sequence
  Synthetic
ucaagauauagaauuguc

SEQ ID NO: 291922 - RNA, 19 nt, Artificial Sequence
  Synthetic
uucaagauauagaauuguc

SEQ ID NO: 291923 - RNA, 20 nt, Artificial Sequence
  Synthetic
uuucaagauauagaauuguc

SEQ ID NO: 291924 - RNA, 21 nt, Artificial Sequence
  Synthetic
uuuucaagauauagaauuguc

SEQ ID NO: 291925 - RNA, 22 nt, Artificial Sequence
  Synthetic
uuuuucaagauauagaauuguc

SEQ ID NO: 291926 - RNA, 23 nt, Artificial Sequence
  Synthetic
uuuuuucaagauauagaauuguc

SEQ ID NO: 291927 - RNA, 24 nt, Artificial Sequence
  Synthetic
uuuuuuucaagauauagaauuguc

SEQ ID NO: 291928 - RNA, 18 nt, Artificial Sequence
  Synthetic
augccuauuauaauuguc

SEQ ID NO: 291929 - RNA, 19 nt, Artificial Sequence
  Synthetic
aaugccuauuauaauuguc

SEQ ID NO: 291930 - RNA, 20 nt, Artificial Sequence
  Synthetic
caaugccuauuauaauuguc

SEQ ID NO: 291931 - RNA, 21 nt, Artificial Sequence
  Synthetic
acaaugccuauuauaauuguc

SEQ ID NO: 291932 - RNA, 22 nt, Artificial Sequence
  Synthetic
uacaaugccuauuauaauuguc

SEQ ID NO: 291933 - RNA, 23 nt, Artificial Sequence
  Synthetic
uuacaaugccuauuauaauuguc

SEQ ID NO: 291934 - RNA, 24 nt, Artificial Sequence
  Synthetic
cuuacaaugccuauuauaauuguc

SEQ ID NO: 291935 - RNA, 18 nt, Artificial Sequence
  Synthetic
ccagagcacaacauuguc

SEQ ID NO: 291936 - RNA, 19 nt, Artificial Sequence
  Synthetic
gccagagcacaacauuguc

SEQ ID NO: 291937 - RNA, 20 nt, Artificial Sequence
  Synthetic
ggccagagcacaacauuguc

SEQ ID NO: 291938 - RNA, 21 nt, Artificial Sequence
  Synthetic
uggccagagcacaacauuguc

SEQ ID NO: 291939 - RNA, 22 nt, Artificial Sequence
  Synthetic
auggccagagcacaacauuguc

SEQ ID NO: 291940 - RNA, 23 nt, Artificial Sequence
  Synthetic
uauggccagagcacaacauuguc

SEQ ID NO: 291941 - RNA, 24 nt, Artificial Sequence
  Synthetic
uuauggccagagcacaacauuguc

SEQ ID NO: 291942 - RNA, 18 nt, Artificial Sequence
  Synthetic
gugguuaagcacauuguc

SEQ ID NO: 291943 - RNA, 19 nt, Artificial Sequence
  Synthetic
agugguuaagcacauuguc

SEQ ID NO: 291944 - RNA, 20 nt, Artificial Sequence
  Synthetic
cagugguuaagcacauuguc

SEQ ID NO: 291945 - RNA, 21 nt, Artificial Sequence
  Synthetic
gcagugguuaagcacauuguc

SEQ ID NO: 291946 - RNA, 22 nt, Artificial Sequence
  Synthetic
ugcagugguuaagcacauuguc

SEQ ID NO: 291947 - RNA, 23 nt, Artificial Sequence
  Synthetic
gugcagugguuaagcacauuguc

SEQ ID NO: 291948 - RNA, 24 nt, Artificial Sequence
  Synthetic
ugugcagugguuaagcacauuguc

SEQ ID NO: 291949 - RNA, 18 nt, Artificial Sequence
  Synthetic
ucuuugcuaaucauuguc

SEQ ID NO: 291950 - RNA, 19 nt, Artificial Sequence
  Synthetic
aucuuugcuaaucauuguc

SEQ ID NO: 291951 - RNA, 20 nt, Artificial Sequence
  Synthetic
uaucuuugcuaaucauuguc

SEQ ID NO: 291952 - RNA, 21 nt, Artificial Sequence
  Synthetic
uuaucuuugcuaaucauuguc

SEQ ID NO: 291953 - RNA, 22 nt, Artificial Sequence
  Synthetic
uuuaucuuugcuaaucauuguc

SEQ ID NO: 291954 - RNA, 23 nt, Artificial Sequence
  Synthetic
auuuaucuuugcuaaucauuguc

SEQ ID NO: 291955 - RNA, 24 nt, Artificial Sequence
  Synthetic
uauuuaucuuugcuaaucauuguc

SEQ ID NO: 291956 - RNA, 18 nt, Artificial Sequence
  Synthetic
uauuaauggcauauuguc

SEQ ID NO: 291957 - RNA, 19 nt, Artificial Sequence
  Synthetic
auauuaauggcauauuguc

SEQ ID NO: 291958 - RNA, 20 nt, Artificial Sequence
  Synthetic
aauauuaauggcauauuguc

SEQ ID NO: 291959 - RNA, 21 nt, Artificial Sequence
  Synthetic
aaauauuaauggcauauuguc

SEQ ID NO: 291960 - RNA, 22 nt, Artificial Sequence
  Synthetic
gaaauauuaauggcauauuguc

SEQ ID NO: 291961 - RNA, 23 nt, Artificial Sequence
  Synthetic
ugaaauauuaauggcauauuguc

SEQ ID NO: 291962 - RNA, 24 nt, Artificial Sequence
  Synthetic
augaaauauuaauggcauauuguc

SEQ ID NO: 291963 - RNA, 18 nt, Artificial Sequence
  Synthetic
gacaugucuucuauuguc

SEQ ID NO: 291964 - RNA, 19 nt, Artificial Sequence
  Synthetic
ugacaugucuucuauuguc

SEQ ID NO: 291965 - RNA, 20 nt, Artificial Sequence
  Synthetic
augacaugucuucuauuguc

SEQ ID NO: 291966 - RNA, 21 nt, Artificial Sequence
  Synthetic
uaugacaugucuucuauuguc

SEQ ID NO: 291967 - RNA, 22 nt, Artificial Sequence
  Synthetic
auaugacaugucuucuauuguc

SEQ ID NO: 291968 - RNA, 23 nt, Artificial Sequence
  Synthetic
aauaugacaugucuucuauuguc

SEQ ID NO: 291969 - RNA, 24 nt, Artificial Sequence
  Synthetic
aaauaugacaugucuucuauuguc

SEQ ID NO: 291970 - RNA, 18 nt, Artificial Sequence
  Synthetic
agaaguaaaauacuuguc

SEQ ID NO: 291971 - RNA, 19 nt, Artificial Sequence
  Synthetic
aagaaguaaaauacuuguc

SEQ ID NO: 291972 - RNA, 20 nt, Artificial Sequence
  Synthetic
caagaaguaaaauacuuguc

SEQ ID NO: 291973 - RNA, 21 nt, Artificial Sequence
  Synthetic
acaagaaguaaaauacuuguc

SEQ ID NO: 291974 - RNA, 22 nt, Artificial Sequence
  Synthetic
gacaagaaguaaaauacuuguc

SEQ ID NO: 291975 - RNA, 23 nt, Artificial Sequence
  Synthetic
agacaagaaguaaaauacuuguc

SEQ ID NO: 291976 - RNA, 24 nt, Artificial Sequence
  Synthetic
uagacaagaaguaaaauacuuguc

SEQ ID NO: 291977 - RNA, 18 nt, Artificial Sequence
  Synthetic
uuaaagcuacuccuuguc

SEQ ID NO: 291978 - RNA, 19 nt, Artificial Sequence
  Synthetic
uuuaaagcuacuccuuguc

SEQ ID NO: 291979 - RNA, 20 nt, Artificial Sequence
  Synthetic
uuuuaaagcuacuccuuguc

SEQ ID NO: 291980 - RNA, 21 nt, Artificial Sequence
  Synthetic
guuuuaaagcuacuccuuguc

SEQ ID NO: 291981 - RNA, 22 nt, Artificial Sequence
  Synthetic
aguuuuaaagcuacuccuuguc

SEQ ID NO: 291982 - RNA, 23 nt, Artificial Sequence
  Synthetic
uaguuuuaaagcuacuccuuguc

SEQ ID NO: 291983 - RNA, 24 nt, Artificial Sequence
  Synthetic
uuaguuuuaaagcuacuccuuguc

SEQ ID NO: 291984 - RNA, 18 nt, Artificial Sequence
  Synthetic
auguuguccaggcuuguc

SEQ ID NO: 291985 - RNA, 19 nt, Artificial Sequence
  Synthetic
cauguuguccaggcuuguc

SEQ ID NO: 291986 - RNA, 20 nt, Artificial Sequence
  Synthetic
ccauguuguccaggcuuguc

SEQ ID NO: 291987 - RNA, 21 nt, Artificial Sequence
  Synthetic
accauguuguccaggcuuguc

SEQ ID NO: 291988 - RNA, 22 nt, Artificial Sequence
  Synthetic
caccauguuguccaggcuuguc

SEQ ID NO: 291989 - RNA, 23 nt, Artificial Sequence
  Synthetic
ucaccauguuguccaggcuuguc

SEQ ID NO: 291990 - RNA, 24 nt, Artificial Sequence
  Synthetic
uucaccauguuguccaggcuuguc

SEQ ID NO: 291991 - RNA, 18 nt, Artificial Sequence
  Synthetic
aacugagcauugcuuguc

SEQ ID NO: 291992 - RNA, 19 nt, Artificial Sequence
  Synthetic
uaacugagcauugcuuguc

SEQ ID NO: 291993 - RNA, 20 nt, Artificial Sequence
  Synthetic
uuaacugagcauugcuuguc

SEQ ID NO: 291994 - RNA, 21 nt, Artificial Sequence
  Synthetic
guuaacugagcauugcuuguc

SEQ ID NO: 291995 - RNA, 22 nt, Artificial Sequence
  Synthetic
aguuaacugagcauugcuuguc

SEQ ID NO: 291996 - RNA, 23 nt, Artificial Sequence
  Synthetic
aaguuaacugagcauugcuuguc

SEQ ID NO: 291997 - RNA, 24 nt, Artificial Sequence
  Synthetic
uaaguuaacugagcauugcuuguc

SEQ ID NO: 291998 - RNA, 18 nt, Artificial Sequence
  Synthetic
cuuugucacgugguuguc

SEQ ID NO: 291999 - RNA, 19 nt, Artificial Sequence
  Synthetic
gcuuugucacgugguuguc

SEQ ID NO: 292000 - RNA, 20 nt, Artificial Sequence
  Synthetic
ggcuuugucacgugguuguc

SEQ ID NO: 292001 - RNA, 21 nt, Artificial Sequence
  Synthetic
gggcuuugucacgugguuguc

SEQ ID NO: 292002 - RNA, 22 nt, Artificial Sequence
  Synthetic
agggcuuugucacgugguuguc

SEQ ID NO: 292003 - RNA, 23 nt, Artificial Sequence
  Synthetic
aagggcuuugucacgugguuguc

SEQ ID NO: 292004 - RNA, 24 nt, Artificial Sequence
  Synthetic
gaagggcuuugucacgugguuguc

SEQ ID NO: 292005 - RNA, 18 nt, Artificial Sequence
  Synthetic
gacuucagccauguuguc

SEQ ID NO: 292006 - RNA, 19 nt, Artificial Sequence
  Synthetic
ugacuucagccauguuguc

SEQ ID NO: 292007 - RNA, 20 nt, Artificial Sequence
  Synthetic
uugacuucagccauguuguc

SEQ ID NO: 292008 - RNA, 21 nt, Artificial Sequence
  Synthetic
guugacuucagccauguuguc

SEQ ID NO: 292009 - RNA, 22 nt, Artificial Sequence
  Synthetic
gguugacuucagccauguuguc

SEQ ID NO: 292010 - RNA, 23 nt, Artificial Sequence
  Synthetic
agguugacuucagccauguuguc

SEQ ID NO: 292011 - RNA, 24 nt, Artificial Sequence
  Synthetic
cagguugacuucagccauguuguc

SEQ ID NO: 292012 - RNA, 18 nt, Artificial Sequence
  Synthetic
gauaacagagauguuguc

SEQ ID NO: 292013 - RNA, 19 nt, Artificial Sequence
  Synthetic
ggauaacagagauguuguc

SEQ ID NO: 292014 - RNA, 20 nt, Artificial Sequence
  Synthetic
aggauaacagagauguuguc

SEQ ID NO: 292015 - RNA, 21 nt, Artificial Sequence
  Synthetic
aaggauaacagagauguuguc

SEQ ID NO: 292016 - RNA, 22 nt, Artificial Sequence
  Synthetic
caaggauaacagagauguuguc

SEQ ID NO: 292017 - RNA, 23 nt, Artificial Sequence
  Synthetic
ucaaggauaacagagauguuguc

SEQ ID NO: 292018 - RNA, 24 nt, Artificial Sequence
  Synthetic
uucaaggauaacagagauguuguc

SEQ ID NO: 292019 - RNA, 18 nt, Artificial Sequence
  Synthetic
aaagcugcuucuguuguc

SEQ ID NO: 292020 - RNA, 19 nt, Artificial Sequence
  Synthetic
uaaagcugcuucuguuguc

SEQ ID NO: 292021 - RNA, 20 nt, Artificial Sequence
  Synthetic
guaaagcugcuucuguuguc

SEQ ID NO: 292022 - RNA, 21 nt, Artificial Sequence
  Synthetic
uguaaagcugcuucuguuguc

SEQ ID NO: 292023 - RNA, 22 nt, Artificial Sequence
  Synthetic
uuguaaagcugcuucuguuguc

SEQ ID NO: 292024 - RNA, 23 nt, Artificial Sequence
  Synthetic
cuuguaaagcugcuucuguuguc

SEQ ID NO: 292025 - RNA, 24 nt, Artificial Sequence
  Synthetic
ucuuguaaagcugcuucuguuguc

SEQ ID NO: 292026 - RNA, 18 nt, Artificial Sequence
  Synthetic
ugauuggagaguguuguc

SEQ ID NO: 292027 - RNA, 19 nt, Artificial Sequence
  Synthetic
uugauuggagaguguuguc

SEQ ID NO: 292028 - RNA, 20 nt, Artificial Sequence
  Synthetic
cuugauuggagaguguuguc

SEQ ID NO: 292029 - RNA, 21 nt, Artificial Sequence
  Synthetic
ucuugauuggagaguguuguc

SEQ ID NO: 292030 - RNA, 22 nt, Artificial Sequence
  Synthetic
cucuugauuggagaguguuguc

SEQ ID NO: 292031 - RNA, 23 nt, Artificial Sequence
  Synthetic
ucucuugauuggagaguguuguc

SEQ ID NO: 292032 - RNA, 24 nt, Artificial Sequence
  Synthetic
cucucuugauuggagaguguuguc

SEQ ID NO: 292033 - RNA, 18 nt, Artificial Sequence
  Synthetic
aacuuaauuuguguuguc

SEQ ID NO: 292034 - RNA, 19 nt, Artificial Sequence
  Synthetic
gaacuuaauuuguguuguc

SEQ ID NO: 292035 - RNA, 20 nt, Artificial Sequence
  Synthetic
ugaacuuaauuuguguuguc

SEQ ID NO: 292036 - RNA, 21 nt, Artificial Sequence
  Synthetic
gugaacuuaauuuguguuguc

SEQ ID NO: 292037 - RNA, 22 nt, Artificial Sequence
  Synthetic
ggugaacuuaauuuguguuguc

SEQ ID NO: 292038 - RNA, 23 nt, Artificial Sequence
  Synthetic
aggugaacuuaauuuguguuguc

SEQ ID NO: 292039 - RNA, 24 nt, Artificial Sequence
  Synthetic
aaggugaacuuaauuuguguuguc

SEQ ID NO: 292040 - RNA, 18 nt, Artificial Sequence
  Synthetic
guguccauuuguguuguc

SEQ ID NO: 292041 - RNA, 19 nt, Artificial Sequence
  Synthetic
uguguccauuuguguuguc

SEQ ID NO: 292042 - RNA, 20 nt, Artificial Sequence
  Synthetic
auguguccauuuguguuguc

SEQ ID NO: 292043 - RNA, 21 nt, Artificial Sequence
  Synthetic
gauguguccauuuguguuguc

SEQ ID NO: 292044 - RNA, 22 nt, Artificial Sequence
  Synthetic
ugauguguccauuuguguuguc

SEQ ID NO: 292045 - RNA, 23 nt, Artificial Sequence
  Synthetic
uugauguguccauuuguguuguc

SEQ ID NO: 292046 - RNA, 24 nt, Artificial Sequence
  Synthetic
auugauguguccauuuguguuguc

SEQ ID NO: 292047 - RNA, 18 nt, Artificial Sequence
  Synthetic
uacucaugaaaauuuguc

SEQ ID NO: 292048 - RNA, 19 nt, Artificial Sequence
  Synthetic
uuacucaugaaaauuuguc

SEQ ID NO: 292049 - RNA, 20 nt, Artificial Sequence
  Synthetic
auuacucaugaaaauuuguc

SEQ ID NO: 292050 - RNA, 21 nt, Artificial Sequence
  Synthetic
uauuacucaugaaaauuuguc

SEQ ID NO: 292051 - RNA, 22 nt, Artificial Sequence
  Synthetic
guauuacucaugaaaauuuguc

SEQ ID NO: 292052 - RNA, 23 nt, Artificial Sequence
  Synthetic
aguauuacucaugaaaauuuguc

SEQ ID NO: 292053 - RNA, 24 nt, Artificial Sequence
  Synthetic
gaguauuacucaugaaaauuuguc

SEQ ID NO: 292054 - RNA, 18 nt, Artificial Sequence
  Synthetic
aauaaauauagauuuguc

SEQ ID NO: 292055 - RNA, 19 nt, Artificial Sequence
  Synthetic
aaauaaauauagauuuguc

SEQ ID NO: 292056 - RNA, 20 nt, Artificial Sequence
  Synthetic
uaaauaaauauagauuuguc

SEQ ID NO: 292057 - RNA, 21 nt, Artificial Sequence
  Synthetic
uuaaauaaauauagauuuguc

SEQ ID NO: 292058 - RNA, 22 nt, Artificial Sequence
  Synthetic
uuuaaauaaauauagauuuguc

SEQ ID NO: 292059 - RNA, 23 nt, Artificial Sequence
  Synthetic
auuuaaauaaauauagauuuguc

SEQ ID NO: 292060 - RNA, 24 nt, Artificial Sequence
  Synthetic
cauuuaaauaaauauagauuuguc

SEQ ID NO: 292061 - RNA, 18 nt, Artificial Sequence
  Synthetic
uguuuuagcugauuuguc

SEQ ID NO: 292062 - RNA, 19 nt, Artificial Sequence
  Synthetic
uuguuuuagcugauuuguc

SEQ ID NO: 292063 - RNA, 20 nt, Artificial Sequence
  Synthetic
uuuguuuuagcugauuuguc

SEQ ID NO: 292064 - RNA, 21 nt, Artificial Sequence
  Synthetic
uuuuguuuuagcugauuuguc

SEQ ID NO: 292065 - RNA, 22 nt, Artificial Sequence
  Synthetic
guuuuguuuuagcugauuuguc

SEQ ID NO: 292066 - RNA, 23 nt, Artificial Sequence
  Synthetic
uguuuuguuuuagcugauuuguc

SEQ ID NO: 292067 - RNA, 24 nt, Artificial Sequence
  Synthetic
auguuuuguuuuagcugauuuguc

SEQ ID NO: 292068 - RNA, 18 nt, Artificial Sequence
  Synthetic
aaauguuuucuauuuguc

SEQ ID NO: 292069 - RNA, 19 nt, Artificial Sequence
  Synthetic
uaaauguuuucuauuuguc

SEQ ID NO: 292070 - RNA, 20 nt, Artificial Sequence
  Synthetic
uuaaauguuuucuauuuguc

SEQ ID NO: 292071 - RNA, 21 nt, Artificial Sequence
  Synthetic
cuuaaauguuuucuauuuguc

SEQ ID NO: 292072 - RNA, 22 nt, Artificial Sequence
  Synthetic
ccuuaaauguuuucuauuuguc

SEQ ID NO: 292073 - RNA, 23 nt, Artificial Sequence
  Synthetic
cccuuaaauguuuucuauuuguc

SEQ ID NO: 292074 - RNA, 24 nt, Artificial Sequence
  Synthetic
gcccuuaaauguuuucuauuuguc

SEQ ID NO: 292075 - RNA, 18 nt, Artificial Sequence
  Synthetic
ucuuaacaguuauuuguc

SEQ ID NO: 292076 - RNA, 19 nt, Artificial Sequence
  Synthetic
uucuuaacaguuauuuguc

SEQ ID NO: 292077 - RNA, 20 nt, Artificial Sequence
  Synthetic
auucuuaacaguuauuuguc

SEQ ID NO: 292078 - RNA, 21 nt, Artificial Sequence
  Synthetic
gauucuuaacaguuauuuguc

SEQ ID NO: 292079 - RNA, 22 nt, Artificial Sequence
  Synthetic
agauucuuaacaguuauuuguc

SEQ ID NO: 292080 - RNA, 23 nt, Artificial Sequence
  Synthetic
aagauucuuaacaguuauuuguc

SEQ ID NO: 292081 - RNA, 24 nt, Artificial Sequence
  Synthetic
gaagauucuuaacaguuauuuguc

SEQ ID NO: 292082 - RNA, 18 nt, Artificial Sequence
  Synthetic
gcauuugaaaaguuuguc

SEQ ID NO: 292083 - RNA, 19 nt, Artificial Sequence
  Synthetic
ugcauuugaaaaguuuguc

SEQ ID NO: 292084 - RNA, 20 nt, Artificial Sequence
  Synthetic
cugcauuugaaaaguuuguc

SEQ ID NO: 292085 - RNA, 21 nt, Artificial Sequence
  Synthetic
gcugcauuugaaaaguuuguc

SEQ ID NO: 292086 - RNA, 22 nt, Artificial Sequence
  Synthetic
ugcugcauuugaaaaguuuguc

SEQ ID NO: 292087 - RNA, 23 nt, Artificial Sequence
  Synthetic
augcugcauuugaaaaguuuguc

SEQ ID NO: 292088 - RNA, 24 nt, Artificial Sequence
  Synthetic
gaugcugcauuugaaaaguuuguc

SEQ ID NO: 292089 - RNA, 18 nt, Artificial Sequence
  Synthetic
ggaaugaauaaguuuguc

SEQ ID NO: 292090 - RNA, 19 nt, Artificial Sequence
  Synthetic
aggaaugaauaaguuuguc

SEQ ID NO: 292091 - RNA, 20 nt, Artificial Sequence
  Synthetic
gaggaaugaauaaguuuguc

SEQ ID NO: 292092 - RNA, 21 nt, Artificial Sequence
  Synthetic
ggaggaaugaauaaguuuguc

SEQ ID NO: 292093 - RNA, 22 nt, Artificial Sequence
  Synthetic
aggaggaaugaauaaguuuguc

SEQ ID NO: 292094 - RNA, 23 nt, Artificial Sequence
  Synthetic
gaggaggaaugaauaaguuuguc

SEQ ID NO: 292095 - RNA, 24 nt, Artificial Sequence
  Synthetic
ggaggaggaaugaauaaguuuguc

SEQ ID NO: 292096 - RNA, 18 nt, Artificial Sequence
  Synthetic
cguacuauuccguuuguc

SEQ ID NO: 292097 - RNA, 19 nt, Artificial Sequence
  Synthetic
acguacuauuccguuuguc

SEQ ID NO: 292098 - RNA, 20 nt, Artificial Sequence
  Synthetic
cacguacuauuccguuuguc

SEQ ID NO: 292099 - RNA, 21 nt, Artificial Sequence
  Synthetic
gcacguacuauuccguuuguc

SEQ ID NO: 292100 - RNA, 22 nt, Artificial Sequence
  Synthetic
ugcacguacuauuccguuuguc

SEQ ID NO: 292101 - RNA, 23 nt, Artificial Sequence
  Synthetic
uugcacguacuauuccguuuguc

SEQ ID NO: 292102 - RNA, 24 nt, Artificial Sequence
  Synthetic
uuugcacguacuauuccguuuguc

SEQ ID NO: 292103 - RNA, 18 nt, Artificial Sequence
  Synthetic
aaauuuugucuguuuguc

SEQ ID NO: 292104 - RNA, 19 nt, Artificial Sequence
  Synthetic
caaauuuugucuguuuguc

SEQ ID NO: 292105 - RNA, 20 nt, Artificial Sequence
  Synthetic
gcaaauuuugucuguuuguc

SEQ ID NO: 292106 - RNA, 21 nt, Artificial Sequence
  Synthetic
ggcaaauuuugucuguuuguc

SEQ ID NO: 292107 - RNA, 22 nt, Artificial Sequence
  Synthetic
aggcaaauuuugucuguuuguc

SEQ ID NO: 292108 - RNA, 23 nt, Artificial Sequence
  Synthetic
aaggcaaauuuugucuguuuguc

SEQ ID NO: 292109 - RNA, 24 nt, Artificial Sequence
  Synthetic
aaaggcaaauuuugucuguuuguc

SEQ ID NO: 292110 - RNA, 18 nt, Artificial Sequence
  Synthetic
auuugacguguguuuguc

SEQ ID NO: 292111 - RNA, 19 nt, Artificial Sequence
  Synthetic
uauuugacguguguuuguc

SEQ ID NO: 292112 - RNA, 20 nt, Artificial Sequence
  Synthetic
uuauuugacguguguuuguc

SEQ ID NO: 292113 - RNA, 21 nt, Artificial Sequence
  Synthetic
guuauuugacguguguuuguc

SEQ ID NO: 292114 - RNA, 22 nt, Artificial Sequence
  Synthetic
uguuauuugacguguguuuguc

SEQ ID NO: 292115 - RNA, 23 nt, Artificial Sequence
  Synthetic
guguuauuugacguguguuuguc

SEQ ID NO: 292116 - RNA, 24 nt, Artificial Sequence
  Synthetic
gguguuauuugacguguguuuguc

SEQ ID NO: 292117 - RNA, 18 nt, Artificial Sequence
  Synthetic
auaucuuaggauuuuguc

SEQ ID NO: 292118 - RNA, 19 nt, Artificial Sequence
  Synthetic
gauaucuuaggauuuuguc

SEQ ID NO: 292119 - RNA, 20 nt, Artificial Sequence
  Synthetic
agauaucuuaggauuuuguc

SEQ ID NO: 292120 - RNA, 21 nt, Artificial Sequence
  Synthetic
uagauaucuuaggauuuuguc

SEQ ID NO: 292121 - RNA, 22 nt, Artificial Sequence
  Synthetic
auagauaucuuaggauuuuguc

SEQ ID NO: 292122 - RNA, 23 nt, Artificial Sequence
  Synthetic
aauagauaucuuaggauuuuguc

SEQ ID NO: 292123 - RNA, 24 nt, Artificial Sequence
  Synthetic
uaauagauaucuuaggauuuuguc

SEQ ID NO: 292124 - RNA, 18 nt, Artificial Sequence
  Synthetic
gcuuguucuacuuuuguc

SEQ ID NO: 292125 - RNA, 19 nt, Artificial Sequence
  Synthetic
agcuuguucuacuuuuguc

SEQ ID NO: 292126 - RNA, 20 nt, Artificial Sequence
  Synthetic
gagcuuguucuacuuuuguc

SEQ ID NO: 292127 - RNA, 21 nt, Artificial Sequence
  Synthetic
cgagcuuguucuacuuuuguc

SEQ ID NO: 292128 - RNA, 22 nt, Artificial Sequence
  Synthetic
ccgagcuuguucuacuuuuguc

SEQ ID NO: 292129 - RNA, 23 nt, Artificial Sequence
  Synthetic
gccgagcuuguucuacuuuuguc

SEQ ID NO: 292130 - RNA, 24 nt, Artificial Sequence
  Synthetic
agccgagcuuguucuacuuuuguc

SEQ ID NO: 292131 - RNA, 18 nt, Artificial Sequence
  Synthetic
caauuaucuccuuuuguc

SEQ ID NO: 292132 - RNA, 19 nt, Artificial Sequence
  Synthetic
ucaauuaucuccuuuuguc

SEQ ID NO: 292133 - RNA, 20 nt, Artificial Sequence
  Synthetic
uucaauuaucuccuuuuguc

SEQ ID NO: 292134 - RNA, 21 nt, Artificial Sequence
  Synthetic
cuucaauuaucuccuuuuguc

SEQ ID NO: 292135 - RNA, 22 nt, Artificial Sequence
  Synthetic
gcuucaauuaucuccuuuuguc

SEQ ID NO: 292136 - RNA, 23 nt, Artificial Sequence
  Synthetic
ugcuucaauuaucuccuuuuguc

SEQ ID NO: 292137 - RNA, 24 nt, Artificial Sequence
  Synthetic
augcuucaauuaucuccuuuuguc

SEQ ID NO: 292138 - RNA, 18 nt, Artificial Sequence
  Synthetic
auauuucuugcuuuuguc

SEQ ID NO: 292139 - RNA, 19 nt, Artificial Sequence
  Synthetic
uauauuucuugcuuuuguc

SEQ ID NO: 292140 - RNA, 20 nt, Artificial Sequence
  Synthetic
auauauuucuugcuuuuguc

SEQ ID NO: 292141 - RNA, 21 nt, Artificial Sequence
  Synthetic
cauauauuucuugcuuuuguc

SEQ ID NO: 292142 - RNA, 22 nt, Artificial Sequence
  Synthetic
ucauauauuucuugcuuuuguc

SEQ ID NO: 292143 - RNA, 23 nt, Artificial Sequence
  Synthetic
uucauauauuucuugcuuuuguc

SEQ ID NO: 292144 - RNA, 24 nt, Artificial Sequence
  Synthetic
cuucauauauuucuugcuuuuguc

SEQ ID NO: 292145 - RNA, 18 nt, Artificial Sequence
  Synthetic
gaaaaugagauuuuuguc

SEQ ID NO: 292146 - RNA, 19 nt, Artificial Sequence
  Synthetic
agaaaaugagauuuuuguc

SEQ ID NO: 292147 - RNA, 20 nt, Artificial Sequence
  Synthetic
gagaaaaugagauuuuuguc

SEQ ID NO: 292148 - RNA, 21 nt, Artificial Sequence
  Synthetic
agagaaaaugagauuuuuguc

SEQ ID NO: 292149 - RNA, 22 nt, Artificial Sequence
  Synthetic
aagagaaaaugagauuuuuguc

SEQ ID NO: 292150 - RNA, 23 nt, Artificial Sequence
  Synthetic
aaagagaaaaugagauuuuuguc

SEQ ID NO: 292151 - RNA, 24 nt, Artificial Sequence
  Synthetic
uaaagagaaaaugagauuuuuguc

SEQ ID NO: 292152 - RNA, 18 nt, Artificial Sequence
  Synthetic
uaugauuuucuuuuuguc

SEQ ID NO: 292153 - RNA, 19 nt, Artificial Sequence
  Synthetic
uuaugauuuucuuuuuguc

SEQ ID NO: 292154 - RNA, 20 nt, Artificial Sequence
  Synthetic
auuaugauuuucuuuuuguc

SEQ ID NO: 292155 - RNA, 21 nt, Artificial Sequence
  Synthetic
aauuaugauuuucuuuuuguc

SEQ ID NO: 292156 - RNA, 22 nt, Artificial Sequence
  Synthetic
uaauuaugauuuucuuuuuguc

SEQ ID NO: 292157 - RNA, 23 nt, Artificial Sequence
  Synthetic
uuaauuaugauuuucuuuuuguc

SEQ ID NO: 292158 - RNA, 24 nt, Artificial Sequence
  Synthetic
uuuaauuaugauuuucuuuuuguc

SEQ ID NO: 292159 - RNA, 18 nt, Artificial Sequence
  Synthetic
auuuuuagaguuuuuguc

SEQ ID NO: 292160 - RNA, 19 nt, Artificial Sequence
  Synthetic
cauuuuuagaguuuuuguc

SEQ ID NO: 292161 - RNA, 20 nt, Artificial Sequence
  Synthetic
acauuuuuagaguuuuuguc

SEQ ID NO: 292162 - RNA, 21 nt, Artificial Sequence
  Synthetic
uacauuuuuagaguuuuuguc

SEQ ID NO: 292163 - RNA, 22 nt, Artificial Sequence
  Synthetic
auacauuuuuagaguuuuuguc

SEQ ID NO: 292164 - RNA, 23 nt, Artificial Sequence
  Synthetic
aauacauuuuuagaguuuuuguc

SEQ ID NO: 292165 - RNA, 24 nt, Artificial Sequence
  Synthetic
gaauacauuuuuagaguuuuuguc

SEQ ID NO: 292166 - RNA, 18 nt, Artificial Sequence
  Synthetic
uaaaauguaguuuuuguc

SEQ ID NO: 292167 - RNA, 19 nt, Artificial Sequence
  Synthetic
auaaaauguaguuuuuguc

SEQ ID NO: 292168 - RNA, 20 nt, Artificial Sequence
  Synthetic
gauaaaauguaguuuuuguc

SEQ ID NO: 292169 - RNA, 21 nt, Artificial Sequence
  Synthetic
ugauaaaauguaguuuuuguc

SEQ ID NO: 292170 - RNA, 22 nt, Artificial Sequence
  Synthetic
gugauaaaauguaguuuuuguc

SEQ ID NO: 292171 - RNA, 23 nt, Artificial Sequence
  Synthetic
ugugauaaaauguaguuuuuguc

SEQ ID NO: 292172 - RNA, 24 nt, Artificial Sequence
  Synthetic
augugauaaaauguaguuuuuguc

SEQ ID NO: 292173 - RNA, 18 nt, Artificial Sequence
  Synthetic
augaucuuguuuuuuguc

SEQ ID NO: 292174 - RNA, 19 nt, Artificial Sequence
  Synthetic
gaugaucuuguuuuuuguc

SEQ ID NO: 292175 - RNA, 20 nt, Artificial Sequence
  Synthetic
cgaugaucuuguuuuuuguc

SEQ ID NO: 292176 - RNA, 21 nt, Artificial Sequence
  Synthetic
ucgaugaucuuguuuuuuguc

SEQ ID NO: 292177 - RNA, 22 nt, Artificial Sequence
  Synthetic
uucgaugaucuuguuuuuuguc

SEQ ID NO: 292178 - RNA, 23 nt, Artificial Sequence
  Synthetic
uuucgaugaucuuguuuuuuguc

SEQ ID NO: 292179 - RNA, 24 nt, Artificial Sequence
  Synthetic
cuuucgaugaucuuguuuuuuguc

SEQ ID NO: 292180 - RNA, 18 nt, Artificial Sequence
  Synthetic
uacuuucuaaaaaaauuc

SEQ ID NO: 292181 - RNA, 19 nt, Artificial Sequence
  Synthetic
cuacuuucuaaaaaaauuc

SEQ ID NO: 292182 - RNA, 20 nt, Artificial Sequence
  Synthetic
acuacuuucuaaaaaaauuc

SEQ ID NO: 292183 - RNA, 21 nt, Artificial Sequence
  Synthetic
cacuacuuucuaaaaaaauuc

SEQ ID NO: 292184 - RNA, 22 nt, Artificial Sequence
  Synthetic
acacuacuuucuaaaaaaauuc

SEQ ID NO: 292185 - RNA, 23 nt, Artificial Sequence
  Synthetic
aacacuacuuucuaaaaaaauuc

SEQ ID NO: 292186 - RNA, 24 nt, Artificial Sequence
  Synthetic
aaacacuacuuucuaaaaaaauuc

SEQ ID NO: 292187 - RNA, 18 nt, Artificial Sequence
  Synthetic
auguaaaaacaaaaauuc

SEQ ID NO: 292188 - RNA, 19 nt, Artificial Sequence
  Synthetic
aauguaaaaacaaaaauuc

SEQ ID NO: 292189 - RNA, 20 nt, Artificial Sequence
  Synthetic
aaauguaaaaacaaaaauuc

SEQ ID NO: 292190 - RNA, 21 nt, Artificial Sequence
  Synthetic
uaaauguaaaaacaaaaauuc

SEQ ID NO: 292191 - RNA, 22 nt, Artificial Sequence
  Synthetic
uuaaauguaaaaacaaaaauuc

SEQ ID NO: 292192 - RNA, 23 nt, Artificial Sequence
  Synthetic
uuuaaauguaaaaacaaaaauuc

SEQ ID NO: 292193 - RNA, 24 nt, Artificial Sequence
  Synthetic
uuuuaaauguaaaaacaaaaauuc

SEQ ID NO: 292194 - RNA, 18 nt, Artificial Sequence
  Synthetic
agaaaaggagaaaaauuc

SEQ ID NO: 292195 - RNA, 19 nt, Artificial Sequence
  Synthetic
aagaaaaggagaaaaauuc

SEQ ID NO: 292196 - RNA, 20 nt, Artificial Sequence
  Synthetic
aaagaaaaggagaaaaauuc

SEQ ID NO: 292197 - RNA, 21 nt, Artificial Sequence
  Synthetic
aaaagaaaaggagaaaaauuc

SEQ ID NO: 292198 - RNA, 22 nt, Artificial Sequence
  Synthetic
gaaaagaaaaggagaaaaauuc

SEQ ID NO: 292199 - RNA, 23 nt, Artificial Sequence
  Synthetic
agaaaagaaaaggagaaaaauuc

SEQ ID NO: 292200 - RNA, 24 nt, Artificial Sequence
  Synthetic
aagaaaagaaaaggagaaaaauuc

SEQ ID NO: 292201 - RNA, 18 nt, Artificial Sequence
  Synthetic
augucagaggaaaaauuc

SEQ ID NO: 292202 - RNA, 19 nt, Artificial Sequence
  Synthetic
gaugucagaggaaaaauuc

SEQ ID NO: 292203 - RNA, 20 nt, Artificial Sequence
  Synthetic
cgaugucagaggaaaaauuc

SEQ ID NO: 292204 - RNA, 21 nt, Artificial Sequence
  Synthetic
gcgaugucagaggaaaaauuc

SEQ ID NO: 292205 - RNA, 22 nt, Artificial Sequence
  Synthetic
agcgaugucagaggaaaaauuc

SEQ ID NO: 292206 - RNA, 23 nt, Artificial Sequence
  Synthetic
gagcgaugucagaggaaaaauuc

SEQ ID NO: 292207 - RNA, 24 nt, Artificial Sequence
  Synthetic
agagcgaugucagaggaaaaauuc

SEQ ID NO: 292208 - RNA, 18 nt, Artificial Sequence
  Synthetic
caaucucuuuaaaaauuc

SEQ ID NO: 292209 - RNA, 19 nt, Artificial Sequence
  Synthetic
ucaaucucuuuaaaaauuc

SEQ ID NO: 292210 - RNA, 20 nt, Artificial Sequence
  Synthetic
aucaaucucuuuaaaaauuc

SEQ ID NO: 292211 - RNA, 21 nt, Artificial Sequence
  Synthetic
uaucaaucucuuuaaaaauuc

SEQ ID NO: 292212 - RNA, 22 nt, Artificial Sequence
  Synthetic
guaucaaucucuuuaaaaauuc

SEQ ID NO: 292213 - RNA, 23 nt, Artificial Sequence
  Synthetic
aguaucaaucucuuuaaaaauuc

SEQ ID NO: 292214 - RNA, 24 nt, Artificial Sequence
  Synthetic
gaguaucaaucucuuuaaaaauuc

SEQ ID NO: 292215 - RNA, 18 nt, Artificial Sequence
  Synthetic
aaaaaauacucaaaauuc

SEQ ID NO: 292216 - RNA, 19 nt, Artificial Sequence
  Synthetic
aaaaaaauacucaaaauuc

SEQ ID NO: 292217 - RNA, 20 nt, Artificial Sequence
  Synthetic
gaaaaaaauacucaaaauuc

SEQ ID NO: 292218 - RNA, 21 nt, Artificial Sequence
  Synthetic
agaaaaaaauacucaaaauuc

SEQ ID NO: 292219 - RNA, 22 nt, Artificial Sequence
  Synthetic
uagaaaaaaauacucaaaauuc

SEQ ID NO: 292220 - RNA, 23 nt, Artificial Sequence
  Synthetic
guagaaaaaaauacucaaaauuc

SEQ ID NO: 292221 - RNA, 24 nt, Artificial Sequence
  Synthetic
aguagaaaaaaauacucaaaauuc

SEQ ID NO: 292222 - RNA, 18 nt, Artificial Sequence
  Synthetic
uuugauugcucaaaauuc

SEQ ID NO: 292223 - RNA, 19 nt, Artificial Sequence
  Synthetic
guuugauugcucaaaauuc

SEQ ID NO: 292224 - RNA, 20 nt, Artificial Sequence
  Synthetic
aguuugauugcucaaaauuc

SEQ ID NO: 292225 - RNA, 21 nt, Artificial Sequence
  Synthetic
gaguuugauugcucaaaauuc

SEQ ID NO: 292226 - RNA, 22 nt, Artificial Sequence
  Synthetic
ggaguuugauugcucaaaauuc

SEQ ID NO: 292227 - RNA, 23 nt, Artificial Sequence
  Synthetic
aggaguuugauugcucaaaauuc

SEQ ID NO: 292228 - RNA, 24 nt, Artificial Sequence
  Synthetic
aaggaguuugauugcucaaaauuc

SEQ ID NO: 292229 - RNA, 18 nt, Artificial Sequence
  Synthetic
uacccaauacgaaaauuc

SEQ ID NO: 292230 - RNA, 19 nt, Artificial Sequence
  Synthetic
cuacccaauacgaaaauuc

SEQ ID NO: 292231 - RNA, 20 nt, Artificial Sequence
  Synthetic
ucuacccaauacgaaaauuc

SEQ ID NO: 292232 - RNA, 21 nt, Artificial Sequence
  Synthetic
uucuacccaauacgaaaauuc

SEQ ID NO: 292233 - RNA, 22 nt, Artificial Sequence
  Synthetic
uuucuacccaauacgaaaauuc

SEQ ID NO: 292234 - RNA, 23 nt, Artificial Sequence
  Synthetic
auuucuacccaauacgaaaauuc

SEQ ID NO: 292235 - RNA, 24 nt, Artificial Sequence
  Synthetic
uauuucuacccaauacgaaaauuc

SEQ ID NO: 292236 - RNA, 18 nt, Artificial Sequence
  Synthetic
caucccccuugaaaauuc

SEQ ID NO: 292237 - RNA, 19 nt, Artificial Sequence
  Synthetic
acaucccccuugaaaauuc

SEQ ID NO: 292238 - RNA, 20 nt, Artificial Sequence
  Synthetic
cacaucccccuugaaaauuc

SEQ ID NO: 292239 - RNA, 21 nt, Artificial Sequence
  Synthetic
ccacaucccccuugaaaauuc

SEQ ID NO: 292240 - RNA, 22 nt, Artificial Sequence
  Synthetic
accacaucccccuugaaaauuc

SEQ ID NO: 292241 - RNA, 23 nt, Artificial Sequence
  Synthetic
caccacaucccccuugaaaauuc

SEQ ID NO: 292242 - RNA, 24 nt, Artificial Sequence
  Synthetic
ccaccacaucccccuugaaaauuc

SEQ ID NO: 292243 - RNA, 18 nt, Artificial Sequence
  Synthetic
uuauggaagauaaaauuc

SEQ ID NO: 292244 - RNA, 19 nt, Artificial Sequence
  Synthetic
guuauggaagauaaaauuc

SEQ ID NO: 292245 - RNA, 20 nt, Artificial Sequence
  Synthetic
aguuauggaagauaaaauuc

SEQ ID NO: 292246 - RNA, 21 nt, Artificial Sequence
  Synthetic
caguuauggaagauaaaauuc

SEQ ID NO: 292247 - RNA, 22 nt, Artificial Sequence
  Synthetic
ucaguuauggaagauaaaauuc

SEQ ID NO: 292248 - RNA, 23 nt, Artificial Sequence
  Synthetic
uucaguuauggaagauaaaauuc

SEQ ID NO: 292249 - RNA, 24 nt, Artificial Sequence
  Synthetic
uuucaguuauggaagauaaaauuc

SEQ ID NO: 292250 - RNA, 18 nt, Artificial Sequence
  Synthetic
ucagauaaagacaaauuc

SEQ ID NO: 292251 - RNA, 19 nt, Artificial Sequence
  Synthetic
gucagauaaagacaaauuc

SEQ ID NO: 292252 - RNA, 20 nt, Artificial Sequence
  Synthetic
ugucagauaaagacaaauuc

SEQ ID NO: 292253 - RNA, 21 nt, Artificial Sequence
  Synthetic
cugucagauaaagacaaauuc

SEQ ID NO: 292254 - RNA, 22 nt, Artificial Sequence
  Synthetic
ucugucagauaaagacaaauuc

SEQ ID NO: 292255 - RNA, 23 nt, Artificial Sequence
  Synthetic
aucugucagauaaagacaaauuc

SEQ ID NO: 292256 - RNA, 24 nt, Artificial Sequence
  Synthetic
uaucugucagauaaagacaaauuc

SEQ ID NO: 292257 - RNA, 18 nt, Artificial Sequence
  Synthetic
auauuugcauacaaauuc

SEQ ID NO: 292258 - RNA, 19 nt, Artificial Sequence
  Synthetic
uauauuugcauacaaauuc

SEQ ID NO: 292259 - RNA, 20 nt, Artificial Sequence
  Synthetic
guauauuugcauacaaauuc

SEQ ID NO: 292260 - RNA, 21 nt, Artificial Sequence
  Synthetic
uguauauuugcauacaaauuc

SEQ ID NO: 292261 - RNA, 22 nt, Artificial Sequence
  Synthetic
auguauauuugcauacaaauuc

SEQ ID NO: 292262 - RNA, 23 nt, Artificial Sequence
  Synthetic
gauguauauuugcauacaaauuc

SEQ ID NO: 292263 - RNA, 24 nt, Artificial Sequence
  Synthetic
ggauguauauuugcauacaaauuc

SEQ ID NO: 292264 - RNA, 18 nt, Artificial Sequence
  Synthetic
uuauuuaaauucaaauuc

SEQ ID NO: 292265 - RNA, 19 nt, Artificial Sequence
  Synthetic
uuuauuuaaauucaaauuc

SEQ ID NO: 292266 - RNA, 20 nt, Artificial Sequence
  Synthetic
cuuuauuuaaauucaaauuc

SEQ ID NO: 292267 - RNA, 21 nt, Artificial Sequence
  Synthetic
ucuuuauuuaaauucaaauuc

SEQ ID NO: 292268 - RNA, 22 nt, Artificial Sequence
  Synthetic
cucuuuauuuaaauucaaauuc

SEQ ID NO: 292269 - RNA, 23 nt, Artificial Sequence
  Synthetic
acucuuuauuuaaauucaaauuc

SEQ ID NO: 292270 - RNA, 24 nt, Artificial Sequence
  Synthetic
uacucuuuauuuaaauucaaauuc

SEQ ID NO: 292271 - RNA, 18 nt, Artificial Sequence
  Synthetic
aggccaacauucaaauuc

SEQ ID NO: 292272 - RNA, 19 nt, Artificial Sequence
  Synthetic
caggccaacauucaaauuc

SEQ ID NO: 292273 - RNA, 20 nt, Artificial Sequence
  Synthetic
acaggccaacauucaaauuc

SEQ ID NO: 292274 - RNA, 21 nt, Artificial Sequence
  Synthetic
gacaggccaacauucaaauuc

SEQ ID NO: 292275 - RNA, 22 nt, Artificial Sequence
  Synthetic
agacaggccaacauucaaauuc

SEQ ID NO: 292276 - RNA, 23 nt, Artificial Sequence
  Synthetic
aagacaggccaacauucaaauuc

SEQ ID NO: 292277 - RNA, 24 nt, Artificial Sequence
  Synthetic
caagacaggccaacauucaaauuc

SEQ ID NO: 292278 - RNA, 18 nt, Artificial Sequence
  Synthetic
cuacugaaacagaaauuc

SEQ ID NO: 292279 - RNA, 19 nt, Artificial Sequence
  Synthetic
ccuacugaaacagaaauuc

SEQ ID NO: 292280 - RNA, 20 nt, Artificial Sequence
  Synthetic
accuacugaaacagaaauuc

SEQ ID NO: 292281 - RNA, 21 nt, Artificial Sequence
  Synthetic
gaccuacugaaacagaaauuc

SEQ ID NO: 292282 - RNA, 22 nt, Artificial Sequence
  Synthetic
agaccuacugaaacagaaauuc

SEQ ID NO: 292283 - RNA, 23 nt, Artificial Sequence
  Synthetic
cagaccuacugaaacagaaauuc

SEQ ID NO: 292284 - RNA, 24 nt, Artificial Sequence
  Synthetic
acagaccuacugaaacagaaauuc

SEQ ID NO: 292285 - RNA, 18 nt, Artificial Sequence
  Synthetic
acuagcuaugagaaauuc

SEQ ID NO: 292286 - RNA, 19 nt, Artificial Sequence
  Synthetic
uacuagcuaugagaaauuc

SEQ ID NO: 292287 - RNA, 20 nt, Artificial Sequence
  Synthetic
cuacuagcuaugagaaauuc

SEQ ID NO: 292288 - RNA, 21 nt, Artificial Sequence
  Synthetic
acuacuagcuaugagaaauuc

SEQ ID NO: 292289 - RNA, 22 nt, Artificial Sequence
  Synthetic
cacuacuagcuaugagaaauuc

SEQ ID NO: 292290 - RNA, 23 nt, Artificial Sequence
  Synthetic
ucacuacuagcuaugagaaauuc

SEQ ID NO: 292291 - RNA, 24 nt, Artificial Sequence
  Synthetic
uucacuacuagcuaugagaaauuc

SEQ ID NO: 292292 - RNA, 18 nt, Artificial Sequence
  Synthetic
auggcauaucugaaauuc

SEQ ID NO: 292293 - RNA, 19 nt, Artificial Sequence
  Synthetic
aauggcauaucugaaauuc

SEQ ID NO: 292294 - RNA, 20 nt, Artificial Sequence
  Synthetic
uaauggcauaucugaaauuc

SEQ ID NO: 292295 - RNA, 21 nt, Artificial Sequence
  Synthetic
auaauggcauaucugaaauuc

SEQ ID NO: 292296 - RNA, 22 nt, Artificial Sequence
  Synthetic
cauaauggcauaucugaaauuc

SEQ ID NO: 292297 - RNA, 23 nt, Artificial Sequence
  Synthetic
acauaauggcauaucugaaauuc

SEQ ID NO: 292298 - RNA, 24 nt, Artificial Sequence
  Synthetic
aacauaauggcauaucugaaauuc

SEQ ID NO: 292299 - RNA, 18 nt, Artificial Sequence
  Synthetic
auaguuuaugugaaauuc

SEQ ID NO: 292300 - RNA, 19 nt, Artificial Sequence
  Synthetic
cauaguuuaugugaaauuc

SEQ ID NO: 292301 - RNA, 20 nt, Artificial Sequence
  Synthetic
ucauaguuuaugugaaauuc

SEQ ID NO: 292302 - RNA, 21 nt, Artificial Sequence
  Synthetic
uucauaguuuaugugaaauuc

SEQ ID NO: 292303 - RNA, 22 nt, Artificial Sequence
  Synthetic
auucauaguuuaugugaaauuc

SEQ ID NO: 292304 - RNA, 23 nt, Artificial Sequence
  Synthetic
gauucauaguuuaugugaaauuc

SEQ ID NO: 292305 - RNA, 24 nt, Artificial Sequence
  Synthetic
ggauucauaguuuaugugaaauuc

SEQ ID NO: 292306 - RNA, 18 nt, Artificial Sequence
  Synthetic
aaucuacaaaauaaauuc

SEQ ID NO: 292307 - RNA, 19 nt, Artificial Sequence
  Synthetic
aaaucuacaaaauaaauuc

SEQ ID NO: 292308 - RNA, 20 nt, Artificial Sequence
  Synthetic
caaaucuacaaaauaaauuc

SEQ ID NO: 292309 - RNA, 21 nt, Artificial Sequence
  Synthetic
acaaaucuacaaaauaaauuc

SEQ ID NO: 292310 - RNA, 22 nt, Artificial Sequence
  Synthetic
aacaaaucuacaaaauaaauuc

SEQ ID NO: 292311 - RNA, 23 nt, Artificial Sequence
  Synthetic
aaacaaaucuacaaaauaaauuc

SEQ ID NO: 292312 - RNA, 24 nt, Artificial Sequence
  Synthetic
gaaacaaaucuacaaaauaaauuc

SEQ ID NO: 292313 - RNA, 18 nt, Artificial Sequence
  Synthetic
cucuucuuaucuaaauuc

SEQ ID NO: 292314 - RNA, 19 nt, Artificial Sequence
  Synthetic
ccucuucuuaucuaaauuc

SEQ ID NO: 292315 - RNA, 20 nt, Artificial Sequence
  Synthetic
uccucuucuuaucuaaauuc

SEQ ID NO: 292316 - RNA, 21 nt, Artificial Sequence
  Synthetic
uuccucuucuuaucuaaauuc

SEQ ID NO: 292317 - RNA, 22 nt, Artificial Sequence
  Synthetic
uuuccucuucuuaucuaaauuc

SEQ ID NO: 292318 - RNA, 23 nt, Artificial Sequence
  Synthetic
uuuuccucuucuuaucuaaauuc

SEQ ID NO: 292319 - RNA, 24 nt, Artificial Sequence
  Synthetic
guuuuccucuucuuaucuaaauuc

SEQ ID NO: 292320 - RNA, 18 nt, Artificial Sequence
  Synthetic
uuuuuuucugcacaauuc

SEQ ID NO: 292321 - RNA, 19 nt, Artificial Sequence
  Synthetic
auuuuuuucugcacaauuc

SEQ ID NO: 292322 - RNA, 20 nt, Artificial Sequence
  Synthetic
aauuuuuuucugcacaauuc

SEQ ID NO: 292323 - RNA, 21 nt, Artificial Sequence
  Synthetic
uaauuuuuuucugcacaauuc

SEQ ID NO: 292324 - RNA, 22 nt, Artificial Sequence
  Synthetic
uuaauuuuuuucugcacaauuc

SEQ ID NO: 292325 - RNA, 23 nt, Artificial Sequence
  Synthetic
cuuaauuuuuuucugcacaauuc

SEQ ID NO: 292326 - RNA, 24 nt, Artificial Sequence
  Synthetic
acuuaauuuuuuucugcacaauuc

SEQ ID NO: 292327 - RNA, 18 nt, Artificial Sequence
  Synthetic
uguucagcaugacaauuc

SEQ ID NO: 292328 - RNA, 19 nt, Artificial Sequence
  Synthetic
uuguucagcaugacaauuc

SEQ ID NO: 292329 - RNA, 20 nt, Artificial Sequence
  Synthetic
cuuguucagcaugacaauuc

SEQ ID NO: 292330 - RNA, 21 nt, Artificial Sequence
  Synthetic
ccuuguucagcaugacaauuc

SEQ ID NO: 292331 - RNA, 22 nt, Artificial Sequence
  Synthetic
uccuuguucagcaugacaauuc

SEQ ID NO: 292332 - RNA, 23 nt, Artificial Sequence
  Synthetic
auccuuguucagcaugacaauuc

SEQ ID NO: 292333 - RNA, 24 nt, Artificial Sequence
  Synthetic
aauccuuguucagcaugacaauuc

SEQ ID NO: 292334 - RNA, 18 nt, Artificial Sequence
  Synthetic
agaccaaaaguacaauuc

SEQ ID NO: 292335 - RNA, 19 nt, Artificial Sequence
  Synthetic
aagaccaaaaguacaauuc

SEQ ID NO: 292336 - RNA, 20 nt, Artificial Sequence
  Synthetic
aaagaccaaaaguacaauuc

SEQ ID NO: 292337 - RNA, 21 nt, Artificial Sequence
  Synthetic
aaaagaccaaaaguacaauuc

SEQ ID NO: 292338 - RNA, 22 nt, Artificial Sequence
  Synthetic
uaaaagaccaaaaguacaauuc

SEQ ID NO: 292339 - RNA, 23 nt, Artificial Sequence
  Synthetic
cuaaaagaccaaaaguacaauuc

SEQ ID NO: 292340 - RNA, 24 nt, Artificial Sequence
  Synthetic
ccuaaaagaccaaaaguacaauuc

SEQ ID NO: 292341 - RNA, 18 nt, Artificial Sequence
  Synthetic
aaaaggucuguacaauuc

SEQ ID NO: 292342 - RNA, 19 nt, Artificial Sequence
  Synthetic
aaaaaggucuguacaauuc

SEQ ID NO: 292343 - RNA, 20 nt, Artificial Sequence
  Synthetic
gaaaaaggucuguacaauuc

SEQ ID NO: 292344 - RNA, 21 nt, Artificial Sequence
  Synthetic
ggaaaaaggucuguacaauuc

SEQ ID NO: 292345 - RNA, 22 nt, Artificial Sequence
  Synthetic
aggaaaaaggucuguacaauuc

SEQ ID NO: 292346 - RNA, 23 nt, Artificial Sequence
  Synthetic
aaggaaaaaggucuguacaauuc

SEQ ID NO: 292347 - RNA, 24 nt, Artificial Sequence
  Synthetic
caaggaaaaaggucuguacaauuc

SEQ ID NO: 292348 - RNA, 18 nt, Artificial Sequence
  Synthetic
ggggaaauaaggcaauuc

SEQ ID NO: 292349 - RNA, 19 nt, Artificial Sequence
  Synthetic
gggggaaauaaggcaauuc

SEQ ID NO: 292350 - RNA, 20 nt, Artificial Sequence
  Synthetic
ugggggaaauaaggcaauuc

SEQ ID NO: 292351 - RNA, 21 nt, Artificial Sequence
  Synthetic
uugggggaaauaaggcaauuc

SEQ ID NO: 292352 - RNA, 22 nt, Artificial Sequence
  Synthetic
guugggggaaauaaggcaauuc

SEQ ID NO: 292353 - RNA, 23 nt, Artificial Sequence
  Synthetic
uguugggggaaauaaggcaauuc

SEQ ID NO: 292354 - RNA, 24 nt, Artificial Sequence
  Synthetic
uuguugggggaaauaaggcaauuc

SEQ ID NO: 292355 - RNA, 18 nt, Artificial Sequence
  Synthetic
cugacagguaggcaauuc

SEQ ID NO: 292356 - RNA, 19 nt, Artificial Sequence
  Synthetic
ccugacagguaggcaauuc

SEQ ID NO: 292357 - RNA, 20 nt, Artificial Sequence
  Synthetic
uccugacagguaggcaauuc

SEQ ID NO: 292358 - RNA, 21 nt, Artificial Sequence
  Synthetic
auccugacagguaggcaauuc

SEQ ID NO: 292359 - RNA, 22 nt, Artificial Sequence
  Synthetic
uauccugacagguaggcaauuc

SEQ ID NO: 292360 - RNA, 23 nt, Artificial Sequence
  Synthetic
uuauccugacagguaggcaauuc

SEQ ID NO: 292361 - RNA, 24 nt, Artificial Sequence
  Synthetic
cuuauccugacagguaggcaauuc

SEQ ID NO: 292362 - RNA, 18 nt, Artificial Sequence
  Synthetic
uggauacguuugcaauuc

SEQ ID NO: 292363 - RNA, 19 nt, Artificial Sequence
  Synthetic
auggauacguuugcaauuc

SEQ ID NO: 292364 - RNA, 20 nt, Artificial Sequence
  Synthetic
cauggauacguuugcaauuc

SEQ ID NO: 292365 - RNA, 21 nt, Artificial Sequence
  Synthetic
ccauggauacguuugcaauuc

SEQ ID NO: 292366 - RNA, 22 nt, Artificial Sequence
  Synthetic
uccauggauacguuugcaauuc

SEQ ID NO: 292367 - RNA, 23 nt, Artificial Sequence
  Synthetic
uuccauggauacguuugcaauuc

SEQ ID NO: 292368 - RNA, 24 nt, Artificial Sequence
  Synthetic
uuuccauggauacguuugcaauuc

SEQ ID NO: 292369 - RNA, 18 nt, Artificial Sequence
  Synthetic
gaauagagaaaucaauuc

SEQ ID NO: 292370 - RNA, 19 nt, Artificial Sequence
  Synthetic
agaauagagaaaucaauuc

SEQ ID NO: 292371 - RNA, 20 nt, Artificial Sequence
  Synthetic
cagaauagagaaaucaauuc

SEQ ID NO: 292372 - RNA, 21 nt, Artificial Sequence
  Synthetic
acagaauagagaaaucaauuc

SEQ ID NO: 292373 - RNA, 22 nt, Artificial Sequence
  Synthetic
aacagaauagagaaaucaauuc

SEQ ID NO: 292374 - RNA, 23 nt, Artificial Sequence
  Synthetic
caacagaauagagaaaucaauuc

SEQ ID NO: 292375 - RNA, 24 nt, Artificial Sequence
  Synthetic
ccaacagaauagagaaaucaauuc

SEQ ID NO: 292376 - RNA, 18 nt, Artificial Sequence
  Synthetic
aaaagaagaaaagaauuc

SEQ ID NO: 292377 - RNA, 19 nt, Artificial Sequence
  Synthetic
aaaaagaagaaaagaauuc

SEQ ID NO: 292378 - RNA, 20 nt, Artificial Sequence
  Synthetic
aaaaaagaagaaaagaauuc

SEQ ID NO: 292379 - RNA, 21 nt, Artificial Sequence
  Synthetic
gaaaaaagaagaaaagaauuc

SEQ ID NO: 292380 - RNA, 22 nt, Artificial Sequence
  Synthetic
ggaaaaaagaagaaaagaauuc

SEQ ID NO: 292381 - RNA, 23 nt, Artificial Sequence
  Synthetic
gggaaaaaagaagaaaagaauuc

SEQ ID NO: 292382 - RNA, 24 nt, Artificial Sequence
  Synthetic
ggggaaaaaagaagaaaagaauuc

SEQ ID NO: 292383 - RNA, 18 nt, Artificial Sequence
  Synthetic
uuucuugaaugagaauuc

SEQ ID NO: 292384 - RNA, 19 nt, Artificial Sequence
  Synthetic
guuucuugaaugagaauuc

SEQ ID NO: 292385 - RNA, 20 nt, Artificial Sequence
  Synthetic
aguuucuugaaugagaauuc

SEQ ID NO: 292386 - RNA, 21 nt, Artificial Sequence
  Synthetic
caguuucuugaaugagaauuc

SEQ ID NO: 292387 - RNA, 22 nt, Artificial Sequence
  Synthetic
acaguuucuugaaugagaauuc

SEQ ID NO: 292388 - RNA, 23 nt, Artificial Sequence
  Synthetic
aacaguuucuugaaugagaauuc

SEQ ID NO: 292389 - RNA, 24 nt, Artificial Sequence
  Synthetic
gaacaguuucuugaaugagaauuc

SEQ ID NO: 292390 - RNA, 18 nt, Artificial Sequence
  Synthetic
gaucauugacuagaauuc

SEQ ID NO: 292391 - RNA, 19 nt, Artificial Sequence
  Synthetic
ggaucauugacuagaauuc

SEQ ID NO: 292392 - RNA, 20 nt, Artificial Sequence
  Synthetic
aggaucauugacuagaauuc

SEQ ID NO: 292393 - RNA, 21 nt, Artificial Sequence
  Synthetic
uaggaucauugacuagaauuc

SEQ ID NO: 292394 - RNA, 22 nt, Artificial Sequence
  Synthetic
guaggaucauugacuagaauuc

SEQ ID NO: 292395 - RNA, 23 nt, Artificial Sequence
  Synthetic
gguaggaucauugacuagaauuc

SEQ ID NO: 292396 - RNA, 24 nt, Artificial Sequence
  Synthetic
ugguaggaucauugacuagaauuc

SEQ ID NO: 292397 - RNA, 18 nt, Artificial Sequence
  Synthetic
uucucauggcuagaauuc

SEQ ID NO: 292398 - RNA, 19 nt, Artificial Sequence
  Synthetic
uuucucauggcuagaauuc

SEQ ID NO: 292399 - RNA, 20 nt, Artificial Sequence
  Synthetic
uuuucucauggcuagaauuc

SEQ ID NO: 292400 - RNA, 21 nt, Artificial Sequence
  Synthetic
uuuuucucauggcuagaauuc

SEQ ID NO: 292401 - RNA, 22 nt, Artificial Sequence
  Synthetic
auuuuucucauggcuagaauuc

SEQ ID NO: 292402 - RNA, 23 nt, Artificial Sequence
  Synthetic
uauuuuucucauggcuagaauuc

SEQ ID NO: 292403 - RNA, 24 nt, Artificial Sequence
  Synthetic
uuauuuuucucauggcuagaauuc

SEQ ID NO: 292404 - RNA, 18 nt, Artificial Sequence
  Synthetic
uguaucuccagggaauuc

SEQ ID NO: 292405 - RNA, 19 nt, Artificial Sequence
  Synthetic
cuguaucuccagggaauuc

SEQ ID NO: 292406 - RNA, 20 nt, Artificial Sequence
  Synthetic
gcuguaucuccagggaauuc

SEQ ID NO: 292407 - RNA, 21 nt, Artificial Sequence
  Synthetic
ggcuguaucuccagggaauuc

SEQ ID NO: 292408 - RNA, 22 nt, Artificial Sequence
  Synthetic
uggcuguaucuccagggaauuc

SEQ ID NO: 292409 - RNA, 23 nt, Artificial Sequence
  Synthetic
uuggcuguaucuccagggaauuc

SEQ ID NO: 292410 - RNA, 24 nt, Artificial Sequence
  Synthetic
auuggcuguaucuccagggaauuc

SEQ ID NO: 292411 - RNA, 18 nt, Artificial Sequence
  Synthetic
gaacccuaaguggaauuc

SEQ ID NO: 292412 - RNA, 19 nt, Artificial Sequence
  Synthetic
agaacccuaaguggaauuc

SEQ ID NO: 292413 - RNA, 20 nt, Artificial Sequence
  Synthetic
aagaacccuaaguggaauuc

SEQ ID NO: 292414 - RNA, 21 nt, Artificial Sequence
  Synthetic
aaagaacccuaaguggaauuc

SEQ ID NO: 292415 - RNA, 22 nt, Artificial Sequence
  Synthetic
aaaagaacccuaaguggaauuc

SEQ ID NO: 292416 - RNA, 23 nt, Artificial Sequence
  Synthetic
gaaaagaacccuaaguggaauuc

SEQ ID NO: 292417 - RNA, 24 nt, Artificial Sequence
  Synthetic
cgaaaagaacccuaaguggaauuc

SEQ ID NO: 292418 - RNA, 18 nt, Artificial Sequence
  Synthetic
aauuauuagaaugaauuc

SEQ ID NO: 292419 - RNA, 19 nt, Artificial Sequence
  Synthetic
aaauuauuagaaugaauuc

SEQ ID NO: 292420 - RNA, 20 nt, Artificial Sequence
  Synthetic
aaaauuauuagaaugaauuc

SEQ ID NO: 292421 - RNA, 21 nt, Artificial Sequence
  Synthetic
aaaaauuauuagaaugaauuc

SEQ ID NO: 292422 - RNA, 22 nt, Artificial Sequence
  Synthetic
uaaaaauuauuagaaugaauuc

SEQ ID NO: 292423 - RNA, 23 nt, Artificial Sequence
  Synthetic
cuaaaaauuauuagaaugaauuc

SEQ ID NO: 292424 - RNA, 24 nt, Artificial Sequence
  Synthetic
ucuaaaaauuauuagaaugaauuc

SEQ ID NO: 292425 - RNA, 18 nt, Artificial Sequence
  Synthetic
cauuugacaggugaauuc

SEQ ID NO: 292426 - RNA, 19 nt, Artificial Sequence
  Synthetic
ucauuugacaggugaauuc

SEQ ID NO: 292427 - RNA, 20 nt, Artificial Sequence
  Synthetic
uucauuugacaggugaauuc

SEQ ID NO: 292428 - RNA, 21 nt, Artificial Sequence
  Synthetic
uuucauuugacaggugaauuc

SEQ ID NO: 292429 - RNA, 22 nt, Artificial Sequence
  Synthetic
uuuucauuugacaggugaauuc

SEQ ID NO: 292430 - RNA, 23 nt, Artificial Sequence
  Synthetic
uuuuucauuugacaggugaauuc

SEQ ID NO: 292431 - RNA, 24 nt, Artificial Sequence
  Synthetic
uuuuuucauuugacaggugaauuc

SEQ ID NO: 292432 - RNA, 18 nt, Artificial Sequence
  Synthetic
ccuuaauaaaaauaauuc

SEQ ID NO: 292433 - RNA, 19 nt, Artificial Sequence
  Synthetic
cccuuaauaaaaauaauuc

SEQ ID NO: 292434 - RNA, 20 nt, Artificial Sequence
  Synthetic
ucccuuaauaaaaauaauuc

SEQ ID NO: 292435 - RNA, 21 nt, Artificial Sequence
  Synthetic
aucccuuaauaaaaauaauuc

SEQ ID NO: 292436 - RNA, 22 nt, Artificial Sequence
  Synthetic
uaucccuuaauaaaaauaauuc

SEQ ID NO: 292437 - RNA, 23 nt, Artificial Sequence
  Synthetic
auaucccuuaauaaaaauaauuc

SEQ ID NO: 292438 - RNA, 24 nt, Artificial Sequence
  Synthetic
aauaucccuuaauaaaaauaauuc

SEQ ID NO: 292439 - RNA, 18 nt, Artificial Sequence
  Synthetic
ccugucucaaaauaauuc

SEQ ID NO: 292440 - RNA, 19 nt, Artificial Sequence
  Synthetic
accugucucaaaauaauuc

SEQ ID NO: 292441 - RNA, 20 nt, Artificial Sequence
  Synthetic
uaccugucucaaaauaauuc

SEQ ID NO: 292442 - RNA, 21 nt, Artificial Sequence
  Synthetic
uuaccugucucaaaauaauuc

SEQ ID NO: 292443 - RNA, 22 nt, Artificial Sequence
  Synthetic
uuuaccugucucaaaauaauuc

SEQ ID NO: 292444 - RNA, 23 nt, Artificial Sequence
  Synthetic
auuuaccugucucaaaauaauuc

SEQ ID NO: 292445 - RNA, 24 nt, Artificial Sequence
  Synthetic
gauuuaccugucucaaaauaauuc

SEQ ID NO: 292446 - RNA, 18 nt, Artificial Sequence
  Synthetic
caauucuucacauaauuc

SEQ ID NO: 292447 - RNA, 19 nt, Artificial Sequence
  Synthetic
gcaauucuucacauaauuc

SEQ ID NO: 292448 - RNA, 20 nt, Artificial Sequence
  Synthetic
agcaauucuucacauaauuc

SEQ ID NO: 292449 - RNA, 21 nt, Artificial Sequence
  Synthetic
aagcaauucuucacauaauuc

SEQ ID NO: 292450 - RNA, 22 nt, Artificial Sequence
  Synthetic
gaagcaauucuucacauaauuc

SEQ ID NO: 292451 - RNA, 23 nt, Artificial Sequence
  Synthetic
ggaagcaauucuucacauaauuc

SEQ ID NO: 292452 - RNA, 24 nt, Artificial Sequence
  Synthetic
uggaagcaauucuucacauaauuc

SEQ ID NO: 292453 - RNA, 18 nt, Artificial Sequence
  Synthetic
uuaaaauccugauaauuc

SEQ ID NO: 292454 - RNA, 19 nt, Artificial Sequence
  Synthetic
uuuaaaauccugauaauuc

SEQ ID NO: 292455 - RNA, 20 nt, Artificial Sequence
  Synthetic
guuuaaaauccugauaauuc

SEQ ID NO: 292456 - RNA, 21 nt, Artificial Sequence
  Synthetic
uguuuaaaauccugauaauuc

SEQ ID NO: 292457 - RNA, 22 nt, Artificial Sequence
  Synthetic
auguuuaaaauccugauaauuc

SEQ ID NO: 292458 - RNA, 23 nt, Artificial Sequence
  Synthetic
cauguuuaaaauccugauaauuc

SEQ ID NO: 292459 - RNA, 24 nt, Artificial Sequence
  Synthetic
ucauguuuaaaauccugauaauuc

SEQ ID NO: 292460 - RNA, 18 nt, Artificial Sequence
  Synthetic
augaguauuauauaauuc

SEQ ID NO: 292461 - RNA, 19 nt, Artificial Sequence
  Synthetic
uaugaguauuauauaauuc

SEQ ID NO: 292462 - RNA, 20 nt, Artificial Sequence
  Synthetic
auaugaguauuauauaauuc

SEQ ID NO: 292463 - RNA, 21 nt, Artificial Sequence
  Synthetic
uauaugaguauuauauaauuc

SEQ ID NO: 292464 - RNA, 22 nt, Artificial Sequence
  Synthetic
cuauaugaguauuauauaauuc

SEQ ID NO: 292465 - RNA, 23 nt, Artificial Sequence
  Synthetic
ucuauaugaguauuauauaauuc

SEQ ID NO: 292466 - RNA, 24 nt, Artificial Sequence
  Synthetic
uucuauaugaguauuauauaauuc

SEQ ID NO: 292467 - RNA, 18 nt, Artificial Sequence
  Synthetic
uauuggacuuucuaauuc

SEQ ID NO: 292468 - RNA, 19 nt, Artificial Sequence
  Synthetic
guauuggacuuucuaauuc

SEQ ID NO: 292469 - RNA, 20 nt, Artificial Sequence
  Synthetic
aguauuggacuuucuaauuc

SEQ ID NO: 292470 - RNA, 21 nt, Artificial Sequence
  Synthetic
caguauuggacuuucuaauuc

SEQ ID NO: 292471 - RNA, 22 nt, Artificial Sequence
  Synthetic
acaguauuggacuuucuaauuc

SEQ ID NO: 292472 - RNA, 23 nt, Artificial Sequence
  Synthetic
uacaguauuggacuuucuaauuc

SEQ ID NO: 292473 - RNA, 24 nt, Artificial Sequence
  Synthetic
uuacaguauuggacuuucuaauuc

SEQ ID NO: 292474 - RNA, 18 nt, Artificial Sequence
  Synthetic
cuuagcaacuauuaauuc

SEQ ID NO: 292475 - RNA, 19 nt, Artificial Sequence
  Synthetic
ucuuagcaacuauuaauuc

SEQ ID NO: 292476 - RNA, 20 nt, Artificial Sequence
  Synthetic
uucuuagcaacuauuaauuc

SEQ ID NO: 292477 - RNA, 21 nt, Artificial Sequence
  Synthetic
uuucuuagcaacuauuaauuc

SEQ ID NO: 292478 - RNA, 22 nt, Artificial Sequence
  Synthetic
uuuucuuagcaacuauuaauuc

SEQ ID NO: 292479 - RNA, 23 nt, Artificial Sequence
  Synthetic
auuuucuuagcaacuauuaauuc

SEQ ID NO: 292480 - RNA, 24 nt, Artificial Sequence
  Synthetic
cauuuucuuagcaacuauuaauuc

SEQ ID NO: 292481 - RNA, 18 nt, Artificial Sequence
  Synthetic
gcacauuaaccuuaauuc

SEQ ID NO: 292482 - RNA, 19 nt, Artificial Sequence
  Synthetic
ugcacauuaaccuuaauuc

SEQ ID NO: 292483 - RNA, 20 nt, Artificial Sequence
  Synthetic
cugcacauuaaccuuaauuc

SEQ ID NO: 292484 - RNA, 21 nt, Artificial Sequence
  Synthetic
acugcacauuaaccuuaauuc

SEQ ID NO: 292485 - RNA, 22 nt, Artificial Sequence
  Synthetic
cacugcacauuaaccuuaauuc

SEQ ID NO: 292486 - RNA, 23 nt, Artificial Sequence
  Synthetic
ucacugcacauuaaccuuaauuc

SEQ ID NO: 292487 - RNA, 24 nt, Artificial Sequence
  Synthetic
cucacugcacauuaaccuuaauuc

SEQ ID NO: 292488 - RNA, 18 nt, Artificial Sequence
  Synthetic
gggccauugucuuaauuc

SEQ ID NO: 292489 - RNA, 19 nt, Artificial Sequence
  Synthetic
ugggccauugucuuaauuc

SEQ ID NO: 292490 - RNA, 20 nt, Artificial Sequence
  Synthetic
gugggccauugucuuaauuc

SEQ ID NO: 292491 - RNA, 21 nt, Artificial Sequence
  Synthetic
ugugggccauugucuuaauuc

SEQ ID NO: 292492 - RNA, 22 nt, Artificial Sequence
  Synthetic
cugugggccauugucuuaauuc

SEQ ID NO: 292493 - RNA, 23 nt, Artificial Sequence
  Synthetic
ucugugggccauugucuuaauuc

SEQ ID NO: 292494 - RNA, 24 nt, Artificial Sequence
  Synthetic
uucugugggccauugucuuaauuc

SEQ ID NO: 292495 - RNA, 18 nt, Artificial Sequence
  Synthetic
uaucucauaauuuaauuc

SEQ ID NO: 292496 - RNA, 19 nt, Artificial Sequence
  Synthetic
cuaucucauaauuuaauuc

SEQ ID NO: 292497 - RNA, 20 nt, Artificial Sequence
  Synthetic
ccuaucucauaauuuaauuc

SEQ ID NO: 292498 - RNA, 21 nt, Artificial Sequence
  Synthetic
uccuaucucauaauuuaauuc

SEQ ID NO: 292499 - RNA, 22 nt, Artificial Sequence
  Synthetic
auccuaucucauaauuuaauuc

SEQ ID NO: 292500 - RNA, 23 nt, Artificial Sequence
  Synthetic
aauccuaucucauaauuuaauuc

SEQ ID NO: 292501 - RNA, 24 nt, Artificial Sequence
  Synthetic
uaauccuaucucauaauuuaauuc

SEQ ID NO: 292502 - RNA, 18 nt, Artificial Sequence
  Synthetic
aauguguuauuuuaauuc

SEQ ID NO: 292503 - RNA, 19 nt, Artificial Sequence
  Synthetic
aaauguguuauuuuaauuc

SEQ ID NO: 292504 - RNA, 20 nt, Artificial Sequence
  Synthetic
caaauguguuauuuuaauuc

SEQ ID NO: 292505 - RNA, 21 nt, Artificial Sequence
  Synthetic
gcaaauguguuauuuuaauuc

SEQ ID NO: 292506 - RNA, 22 nt, Artificial Sequence
  Synthetic
ggcaaauguguuauuuuaauuc

SEQ ID NO: 292507 - RNA, 23 nt, Artificial Sequence
  Synthetic
uggcaaauguguuauuuuaauuc

SEQ ID NO: 292508 - RNA, 24 nt, Artificial Sequence
  Synthetic
auggcaaauguguuauuuuaauuc

SEQ ID NO: 292509 - RNA, 18 nt, Artificial Sequence
  Synthetic
gggaugaugaaaacauuc

SEQ ID NO: 292510 - RNA, 19 nt, Artificial Sequence
  Synthetic
ugggaugaugaaaacauuc

SEQ ID NO: 292511 - RNA, 20 nt, Artificial Sequence
  Synthetic
uugggaugaugaaaacauuc

SEQ ID NO: 292512 - RNA, 21 nt, Artificial Sequence
  Synthetic
uuugggaugaugaaaacauuc

SEQ ID NO: 292513 - RNA, 22 nt, Artificial Sequence
  Synthetic
guuugggaugaugaaaacauuc

SEQ ID NO: 292514 - RNA, 23 nt, Artificial Sequence
  Synthetic
aguuugggaugaugaaaacauuc

SEQ ID NO: 292515 - RNA, 24 nt, Artificial Sequence
  Synthetic
caguuugggaugaugaaaacauuc

SEQ ID NO: 292516 - RNA, 18 nt, Artificial Sequence
  Synthetic
augggcaaugaaacauuc

SEQ ID NO: 292517 - RNA, 19 nt, Artificial Sequence
  Synthetic
caugggcaaugaaacauuc

SEQ ID NO: 292518 - RNA, 20 nt, Artificial Sequence
  Synthetic
ucaugggcaaugaaacauuc

SEQ ID NO: 292519 - RNA, 21 nt, Artificial Sequence
  Synthetic
uucaugggcaaugaaacauuc

SEQ ID NO: 292520 - RNA, 22 nt, Artificial Sequence
  Synthetic
cuucaugggcaaugaaacauuc

SEQ ID NO: 292521 - RNA, 23 nt, Artificial Sequence
  Synthetic
ucuucaugggcaaugaaacauuc

SEQ ID NO: 292522 - RNA, 24 nt, Artificial Sequence
  Synthetic
gucuucaugggcaaugaaacauuc

SEQ ID NO: 292523 - RNA, 18 nt, Artificial Sequence
  Synthetic
caauuuagaacaacauuc

SEQ ID NO: 292524 - RNA, 19 nt, Artificial Sequence
  Synthetic
acaauuuagaacaacauuc

SEQ ID NO: 292525 - RNA, 20 nt, Artificial Sequence
  Synthetic
cacaauuuagaacaacauuc

SEQ ID NO: 292526 - RNA, 21 nt, Artificial Sequence
  Synthetic
acacaauuuagaacaacauuc

SEQ ID NO: 292527 - RNA, 22 nt, Artificial Sequence
  Synthetic
aacacaauuuagaacaacauuc

SEQ ID NO: 292528 - RNA, 23 nt, Artificial Sequence
  Synthetic
gaacacaauuuagaacaacauuc

SEQ ID NO: 292529 - RNA, 24 nt, Artificial Sequence
  Synthetic
ugaacacaauuuagaacaacauuc

SEQ ID NO: 292530 - RNA, 18 nt, Artificial Sequence
  Synthetic
acucauuuaacaacauuc

SEQ ID NO: 292531 - RNA, 19 nt, Artificial Sequence
  Synthetic
uacucauuuaacaacauuc

SEQ ID NO: 292532 - RNA, 20 nt, Artificial Sequence
  Synthetic
uuacucauuuaacaacauuc

SEQ ID NO: 292533 - RNA, 21 nt, Artificial Sequence
  Synthetic
auuacucauuuaacaacauuc

SEQ ID NO: 292534 - RNA, 22 nt, Artificial Sequence
  Synthetic
gauuacucauuuaacaacauuc

SEQ ID NO: 292535 - RNA, 23 nt, Artificial Sequence
  Synthetic
ugauuacucauuuaacaacauuc

SEQ ID NO: 292536 - RNA, 24 nt, Artificial Sequence
  Synthetic
gugauuacucauuuaacaacauuc

SEQ ID NO: 292537 - RNA, 18 nt, Artificial Sequence
  Synthetic
auucccccacuaacauuc

SEQ ID NO: 292538 - RNA, 19 nt, Artificial Sequence
  Synthetic
gauucccccacuaacauuc

SEQ ID NO: 292539 - RNA, 20 nt, Artificial Sequence
  Synthetic
ggauucccccacuaacauuc

SEQ ID NO: 292540 - RNA, 21 nt, Artificial Sequence
  Synthetic
cggauucccccacuaacauuc

SEQ ID NO: 292541 - RNA, 22 nt, Artificial Sequence
  Synthetic
acggauucccccacuaacauuc

SEQ ID NO: 292542 - RNA, 23 nt, Artificial Sequence
  Synthetic
aacggauucccccacuaacauuc

SEQ ID NO: 292543 - RNA, 24 nt, Artificial Sequence
  Synthetic
uaacggauucccccacuaacauuc

SEQ ID NO: 292544 - RNA, 18 nt, Artificial Sequence
  Synthetic
uuugagagguucacauuc

SEQ ID NO: 292545 - RNA, 19 nt, Artificial Sequence
  Synthetic
cuuugagagguucacauuc

SEQ ID NO: 292546 - RNA, 20 nt, Artificial Sequence
  Synthetic
ccuuugagagguucacauuc

SEQ ID NO: 292547 - RNA, 21 nt, Artificial Sequence
  Synthetic
gccuuugagagguucacauuc

SEQ ID NO: 292548 - RNA, 22 nt, Artificial Sequence
  Synthetic
ugccuuugagagguucacauuc

SEQ ID NO: 292549 - RNA, 23 nt, Artificial Sequence
  Synthetic
cugccuuugagagguucacauuc

SEQ ID NO: 292550 - RNA, 24 nt, Artificial Sequence
  Synthetic
ucugccuuugagagguucacauuc

SEQ ID NO: 292551 - RNA, 18 nt, Artificial Sequence
  Synthetic
gcucauaugcagacauuc

SEQ ID NO: 292552 - RNA, 19 nt, Artificial Sequence
  Synthetic
agcucauaugcagacauuc

SEQ ID NO: 292553 - RNA, 20 nt, Artificial Sequence
  Synthetic
uagcucauaugcagacauuc

SEQ ID NO: 292554 - RNA, 21 nt, Artificial Sequence
  Synthetic
cuagcucauaugcagacauuc

SEQ ID NO: 292555 - RNA, 22 nt, Artificial Sequence
  Synthetic
ucuagcucauaugcagacauuc

SEQ ID NO: 292556 - RNA, 23 nt, Artificial Sequence
  Synthetic
aucuagcucauaugcagacauuc

SEQ ID NO: 292557 - RNA, 24 nt, Artificial Sequence
  Synthetic
aaucuagcucauaugcagacauuc

SEQ ID NO: 292558 - RNA, 18 nt, Artificial Sequence
  Synthetic
acauuugugaauacauuc

SEQ ID NO: 292559 - RNA, 19 nt, Artificial Sequence
  Synthetic
cacauuugugaauacauuc

SEQ ID NO: 292560 - RNA, 20 nt, Artificial Sequence
  Synthetic
ccacauuugugaauacauuc

SEQ ID NO: 292561 - RNA, 21 nt, Artificial Sequence
  Synthetic
accacauuugugaauacauuc

SEQ ID NO: 292562 - RNA, 22 nt, Artificial Sequence
  Synthetic
caccacauuugugaauacauuc

SEQ ID NO: 292563 - RNA, 23 nt, Artificial Sequence
  Synthetic
ucaccacauuugugaauacauuc

SEQ ID NO: 292564 - RNA, 24 nt, Artificial Sequence
  Synthetic
uucaccacauuugugaauacauuc

SEQ ID NO: 292565 - RNA, 18 nt, Artificial Sequence
  Synthetic
gaugguguuaaaccauuc

SEQ ID NO: 292566 - RNA, 19 nt, Artificial Sequence
  Synthetic
ggaugguguuaaaccauuc

SEQ ID NO: 292567 - RNA, 20 nt, Artificial Sequence
  Synthetic
aggaugguguuaaaccauuc

SEQ ID NO: 292568 - RNA, 21 nt, Artificial Sequence
  Synthetic
gaggaugguguuaaaccauuc

SEQ ID NO: 292569 - RNA, 22 nt, Artificial Sequence
  Synthetic
agaggaugguguuaaaccauuc

SEQ ID NO: 292570 - RNA, 23 nt, Artificial Sequence
  Synthetic
aagaggaugguguuaaaccauuc

SEQ ID NO: 292571 - RNA, 24 nt, Artificial Sequence
  Synthetic
caagaggaugguguuaaaccauuc

SEQ ID NO: 292572 - RNA, 18 nt, Artificial Sequence
  Synthetic
aauuuaucaccaccauuc

SEQ ID NO: 292573 - RNA, 19 nt, Artificial Sequence
  Synthetic
aaauuuaucaccaccauuc

SEQ ID NO: 292574 - RNA, 20 nt, Artificial Sequence
  Synthetic
caaauuuaucaccaccauuc

SEQ ID NO: 292575 - RNA, 21 nt, Artificial Sequence
  Synthetic
ccaaauuuaucaccaccauuc

SEQ ID NO: 292576 - RNA, 22 nt, Artificial Sequence
  Synthetic
uccaaauuuaucaccaccauuc

SEQ ID NO: 292577 - RNA, 23 nt, Artificial Sequence
  Synthetic
uuccaaauuuaucaccaccauuc

SEQ ID NO: 292578 - RNA, 24 nt, Artificial Sequence
  Synthetic
uuuccaaauuuaucaccaccauuc

SEQ ID NO: 292579 - RNA, 18 nt, Artificial Sequence
  Synthetic
gagggagagggcccauuc

SEQ ID NO: 292580 - RNA, 19 nt, Artificial Sequence
  Synthetic
ggagggagagggcccauuc

SEQ ID NO: 292581 - RNA, 20 nt, Artificial Sequence
  Synthetic
gggagggagagggcccauuc

SEQ ID NO: 292582 - RNA, 21 nt, Artificial Sequence
  Synthetic
ggggagggagagggcccauuc

SEQ ID NO: 292583 - RNA, 22 nt, Artificial Sequence
  Synthetic
aggggagggagagggcccauuc

SEQ ID NO: 292584 - RNA, 23 nt, Artificial Sequence
  Synthetic
uaggggagggagagggcccauuc

SEQ ID NO: 292585 - RNA, 24 nt, Artificial Sequence
  Synthetic
uuaggggagggagagggcccauuc

SEQ ID NO: 292586 - RNA, 18 nt, Artificial Sequence
  Synthetic
gguuagaaaugcccauuc

SEQ ID NO: 292587 - RNA, 19 nt, Artificial Sequence
  Synthetic
ugguuagaaaugcccauuc

SEQ ID NO: 292588 - RNA, 20 nt, Artificial Sequence
  Synthetic
augguuagaaaugcccauuc

SEQ ID NO: 292589 - RNA, 21 nt, Artificial Sequence
  Synthetic
gaugguuagaaaugcccauuc

SEQ ID NO: 292590 - RNA, 22 nt, Artificial Sequence
  Synthetic
ggaugguuagaaaugcccauuc

SEQ ID NO: 292591 - RNA, 23 nt, Artificial Sequence
  Synthetic
gggaugguuagaaaugcccauuc

SEQ ID NO: 292592 - RNA, 24 nt, Artificial Sequence
  Synthetic
ggggaugguuagaaaugcccauuc

SEQ ID NO: 292593 - RNA, 18 nt, Artificial Sequence
  Synthetic
aagggcauuaagccauuc

SEQ ID NO: 292594 - RNA, 19 nt, Artificial Sequence
  Synthetic
gaagggcauuaagccauuc

SEQ ID NO: 292595 - RNA, 20 nt, Artificial Sequence
  Synthetic
ggaagggcauuaagccauuc

SEQ ID NO: 292596 - RNA, 21 nt, Artificial Sequence
  Synthetic
aggaagggcauuaagccauuc

SEQ ID NO: 292597 - RNA, 22 nt, Artificial Sequence
  Synthetic
caggaagggcauuaagccauuc

SEQ ID NO: 292598 - RNA, 23 nt, Artificial Sequence
  Synthetic
ccaggaagggcauuaagccauuc

SEQ ID NO: 292599 - RNA, 24 nt, Artificial Sequence
  Synthetic
cccaggaagggcauuaagccauuc

SEQ ID NO: 292600 - RNA, 18 nt, Artificial Sequence
  Synthetic
uaguauuacuggccauuc

SEQ ID NO: 292601 - RNA, 19 nt, Artificial Sequence
  Synthetic
cuaguauuacuggccauuc

SEQ ID NO: 292602 - RNA, 20 nt, Artificial Sequence
  Synthetic
ucuaguauuacuggccauuc

SEQ ID NO: 292603 - RNA, 21 nt, Artificial Sequence
  Synthetic
uucuaguauuacuggccauuc

SEQ ID NO: 292604 - RNA, 22 nt, Artificial Sequence
  Synthetic
uuucuaguauuacuggccauuc

SEQ ID NO: 292605 - RNA, 23 nt, Artificial Sequence
  Synthetic
auuucuaguauuacuggccauuc

SEQ ID NO: 292606 - RNA, 24 nt, Artificial Sequence
  Synthetic
gauuucuaguauuacuggccauuc

SEQ ID NO: 292607 - RNA, 18 nt, Artificial Sequence
  Synthetic
gcaagcauucauccauuc

SEQ ID NO: 292608 - RNA, 19 nt, Artificial Sequence
  Synthetic
agcaagcauucauccauuc

SEQ ID NO: 292609 - RNA, 20 nt, Artificial Sequence
  Synthetic
gagcaagcauucauccauuc

SEQ ID NO: 292610 - RNA, 21 nt, Artificial Sequence
  Synthetic
ggagcaagcauucauccauuc

SEQ ID NO: 292611 - RNA, 22 nt, Artificial Sequence
  Synthetic
aggagcaagcauucauccauuc

SEQ ID NO: 292612 - RNA, 23 nt, Artificial Sequence
  Synthetic
caggagcaagcauucauccauuc

SEQ ID NO: 292613 - RNA, 24 nt, Artificial Sequence
  Synthetic
ucaggagcaagcauucauccauuc

SEQ ID NO: 292614 - RNA, 18 nt, Artificial Sequence
  Synthetic
cuacuuaauuuuccauuc

SEQ ID NO: 292615 - RNA, 19 nt, Artificial Sequence
  Synthetic
gcuacuuaauuuuccauuc

SEQ ID NO: 292616 - RNA, 20 nt, Artificial Sequence
  Synthetic
ugcuacuuaauuuuccauuc

SEQ ID NO: 292617 - RNA, 21 nt, Artificial Sequence
  Synthetic
uugcuacuuaauuuuccauuc

SEQ ID NO: 292618 - RNA, 22 nt, Artificial Sequence
  Synthetic
uuugcuacuuaauuuuccauuc

SEQ ID NO: 292619 - RNA, 23 nt, Artificial Sequence
  Synthetic
cuuugcuacuuaauuuuccauuc

SEQ ID NO: 292620 - RNA, 24 nt, Artificial Sequence
  Synthetic
ccuuugcuacuuaauuuuccauuc

SEQ ID NO: 292621 - RNA, 18 nt, Artificial Sequence
  Synthetic
uucccaucaaaagcauuc

SEQ ID NO: 292622 - RNA, 19 nt, Artificial Sequence
  Synthetic
uuucccaucaaaagcauuc

SEQ ID NO: 292623 - RNA, 20 nt, Artificial Sequence
  Synthetic
auuucccaucaaaagcauuc

SEQ ID NO: 292624 - RNA, 21 nt, Artificial Sequence
  Synthetic
cauuucccaucaaaagcauuc

SEQ ID NO: 292625 - RNA, 22 nt, Artificial Sequence
  Synthetic
ucauuucccaucaaaagcauuc

SEQ ID NO: 292626 - RNA, 23 nt, Artificial Sequence
  Synthetic
uucauuucccaucaaaagcauuc

SEQ ID NO: 292627 - RNA, 24 nt, Artificial Sequence
  Synthetic
guucauuucccaucaaaagcauuc

SEQ ID NO: 292628 - RNA, 18 nt, Artificial Sequence
  Synthetic
uuuagauuaagagcauuc

SEQ ID NO: 292629 - RNA, 19 nt, Artificial Sequence
  Synthetic
uuuuagauuaagagcauuc

SEQ ID NO: 292630 - RNA, 20 nt, Artificial Sequence
  Synthetic
guuuuagauuaagagcauuc

SEQ ID NO: 292631 - RNA, 21 nt, Artificial Sequence
  Synthetic
aguuuuagauuaagagcauuc

SEQ ID NO: 292632 - RNA, 22 nt, Artificial Sequence
  Synthetic
gaguuuuagauuaagagcauuc

SEQ ID NO: 292633 - RNA, 23 nt, Artificial Sequence
  Synthetic
agaguuuuagauuaagagcauuc

SEQ ID NO: 292634 - RNA, 24 nt, Artificial Sequence
  Synthetic
gagaguuuuagauuaagagcauuc

SEQ ID NO: 292635 - RNA, 18 nt, Artificial Sequence
  Synthetic
ggacccucauaggcauuc

SEQ ID NO: 292636 - RNA, 19 nt, Artificial Sequence
  Synthetic
uggacccucauaggcauuc

SEQ ID NO: 292637 - RNA, 20 nt, Artificial Sequence
  Synthetic
uuggacccucauaggcauuc

SEQ ID NO: 292638 - RNA, 21 nt, Artificial Sequence
  Synthetic
cuuggacccucauaggcauuc

SEQ ID NO: 292639 - RNA, 22 nt, Artificial Sequence
  Synthetic
ucuuggacccucauaggcauuc

SEQ ID NO: 292640 - RNA, 23 nt, Artificial Sequence
  Synthetic
gucuuggacccucauaggcauuc

SEQ ID NO: 292641 - RNA, 24 nt, Artificial Sequence
  Synthetic
agucuuggacccucauaggcauuc

SEQ ID NO: 292642 - RNA, 18 nt, Artificial Sequence
  Synthetic
cacaucucaugggcauuc

SEQ ID NO: 292643 - RNA, 19 nt, Artificial Sequence
  Synthetic
gcacaucucaugggcauuc

SEQ ID NO: 292644 - RNA, 20 nt, Artificial Sequence
  Synthetic
agcacaucucaugggcauuc

SEQ ID NO: 292645 - RNA, 21 nt, Artificial Sequence
  Synthetic
gagcacaucucaugggcauuc

SEQ ID NO: 292646 - RNA, 22 nt, Artificial Sequence
  Synthetic
agagcacaucucaugggcauuc

SEQ ID NO: 292647 - RNA, 23 nt, Artificial Sequence
  Synthetic
uagagcacaucucaugggcauuc

SEQ ID NO: 292648 - RNA, 24 nt, Artificial Sequence
  Synthetic
cuagagcacaucucaugggcauuc

SEQ ID NO: 292649 - RNA, 18 nt, Artificial Sequence
  Synthetic
uggacauaacuggcauuc

SEQ ID NO: 292650 - RNA, 19 nt, Artificial Sequence
  Synthetic
auggacauaacuggcauuc

SEQ ID NO: 292651 - RNA, 20 nt, Artificial Sequence
  Synthetic
aauggacauaacuggcauuc

SEQ ID NO: 292652 - RNA, 21 nt, Artificial Sequence
  Synthetic
uaauggacauaacuggcauuc

SEQ ID NO: 292653 - RNA, 22 nt, Artificial Sequence
  Synthetic
auaauggacauaacuggcauuc

SEQ ID NO: 292654 - RNA, 23 nt, Artificial Sequence
  Synthetic
gauaauggacauaacuggcauuc

SEQ ID NO: 292655 - RNA, 24 nt, Artificial Sequence
  Synthetic
ggauaauggacauaacuggcauuc

SEQ ID NO: 292656 - RNA, 18 nt, Artificial Sequence
  Synthetic
cuucucccauaugcauuc

SEQ ID NO: 292657 - RNA, 19 nt, Artificial Sequence
  Synthetic
ucuucucccauaugcauuc

SEQ ID NO: 292658 - RNA, 20 nt, Artificial Sequence
  Synthetic
cucuucucccauaugcauuc

SEQ ID NO: 292659 - RNA, 21 nt, Artificial Sequence
  Synthetic
acucuucucccauaugcauuc

SEQ ID NO: 292660 - RNA, 22 nt, Artificial Sequence
  Synthetic
cacucuucucccauaugcauuc

SEQ ID NO: 292661 - RNA, 23 nt, Artificial Sequence
  Synthetic
ucacucuucucccauaugcauuc

SEQ ID NO: 292662 - RNA, 24 nt, Artificial Sequence
  Synthetic
uucacucuucucccauaugcauuc

SEQ ID NO: 292663 - RNA, 18 nt, Artificial Sequence
  Synthetic
cuuugucuccuugcauuc

SEQ ID NO: 292664 - RNA, 19 nt, Artificial Sequence
  Synthetic
ucuuugucuccuugcauuc

SEQ ID NO: 292665 - RNA, 20 nt, Artificial Sequence
  Synthetic
cucuuugucuccuugcauuc

SEQ ID NO: 292666 - RNA, 21 nt, Artificial Sequence
  Synthetic
ucucuuugucuccuugcauuc

SEQ ID NO: 292667 - RNA, 22 nt, Artificial Sequence
  Synthetic
cucucuuugucuccuugcauuc

SEQ ID NO: 292668 - RNA, 23 nt, Artificial Sequence
  Synthetic
gcucucuuugucuccuugcauuc

SEQ ID NO: 292669 - RNA, 24 nt, Artificial Sequence
  Synthetic
ugcucucuuugucuccuugcauuc

SEQ ID NO: 292670 - RNA, 18 nt, Artificial Sequence
  Synthetic
gcuguggugcuugcauuc

SEQ ID NO: 292671 - RNA, 19 nt, Artificial Sequence
  Synthetic
ggcuguggugcuugcauuc

SEQ ID NO: 292672 - RNA, 20 nt, Artificial Sequence
  Synthetic
gggcuguggugcuugcauuc

SEQ ID NO: 292673 - RNA, 21 nt, Artificial Sequence
  Synthetic
ugggcuguggugcuugcauuc

SEQ ID NO: 292674 - RNA, 22 nt, Artificial Sequence
  Synthetic
cugggcuguggugcuugcauuc

SEQ ID NO: 292675 - RNA, 23 nt, Artificial Sequence
  Synthetic
gcugggcuguggugcuugcauuc

SEQ ID NO: 292676 - RNA, 24 nt, Artificial Sequence
  Synthetic
ggcugggcuguggugcuugcauuc

SEQ ID NO: 292677 - RNA, 18 nt, Artificial Sequence
  Synthetic
uuaaccccaaaaucauuc

SEQ ID NO: 292678 - RNA, 19 nt, Artificial Sequence
  Synthetic
guuaaccccaaaaucauuc

SEQ ID NO: 292679 - RNA, 20 nt, Artificial Sequence
  Synthetic
uguuaaccccaaaaucauuc

SEQ ID NO: 292680 - RNA, 21 nt, Artificial Sequence
  Synthetic
uuguuaaccccaaaaucauuc

SEQ ID NO: 292681 - RNA, 22 nt, Artificial Sequence
  Synthetic
auuguuaaccccaaaaucauuc

SEQ ID NO: 292682 - RNA, 23 nt, Artificial Sequence
  Synthetic
cauuguuaaccccaaaaucauuc

SEQ ID NO: 292683 - RNA, 24 nt, Artificial Sequence
  Synthetic
ucauuguuaaccccaaaaucauuc

SEQ ID NO: 292684 - RNA, 18 nt, Artificial Sequence
  Synthetic
aacugcgcaccaucauuc

SEQ ID NO: 292685 - RNA, 19 nt, Artificial Sequence
  Synthetic
aaacugcgcaccaucauuc

SEQ ID NO: 292686 - RNA, 20 nt, Artificial Sequence
  Synthetic
aaaacugcgcaccaucauuc

SEQ ID NO: 292687 - RNA, 21 nt, Artificial Sequence
  Synthetic
caaaacugcgcaccaucauuc

SEQ ID NO: 292688 - RNA, 22 nt, Artificial Sequence
  Synthetic
acaaaacugcgcaccaucauuc

SEQ ID NO: 292689 - RNA, 23 nt, Artificial Sequence
  Synthetic
aacaaaacugcgcaccaucauuc

SEQ ID NO: 292690 - RNA, 24 nt, Artificial Sequence
  Synthetic
aaacaaaacugcgcaccaucauuc

SEQ ID NO: 292691 - RNA, 18 nt, Artificial Sequence
  Synthetic
caauuuaauagaucauuc

SEQ ID NO: 292692 - RNA, 19 nt, Artificial Sequence
  Synthetic
ucaauuuaauagaucauuc

SEQ ID NO: 292693 - RNA, 20 nt, Artificial Sequence
  Synthetic
cucaauuuaauagaucauuc

SEQ ID NO: 292694 - RNA, 21 nt, Artificial Sequence
  Synthetic
ccucaauuuaauagaucauuc

SEQ ID NO: 292695 - RNA, 22 nt, Artificial Sequence
  Synthetic
accucaauuuaauagaucauuc

SEQ ID NO: 292696 - RNA, 23 nt, Artificial Sequence
  Synthetic
caccucaauuuaauagaucauuc

SEQ ID NO: 292697 - RNA, 24 nt, Artificial Sequence
  Synthetic
ucaccucaauuuaauagaucauuc

SEQ ID NO: 292698 - RNA, 18 nt, Artificial Sequence
  Synthetic
ucugcugcucccucauuc

SEQ ID NO: 292699 - RNA, 19 nt, Artificial Sequence
  Synthetic
uucugcugcucccucauuc

SEQ ID NO: 292700 - RNA, 20 nt, Artificial Sequence
  Synthetic
auucugcugcucccucauuc

SEQ ID NO: 292701 - RNA, 21 nt, Artificial Sequence
  Synthetic
gauucugcugcucccucauuc

SEQ ID NO: 292702 - RNA, 22 nt, Artificial Sequence
  Synthetic
ugauucugcugcucccucauuc

SEQ ID NO: 292703 - RNA, 23 nt, Artificial Sequence
  Synthetic
gugauucugcugcucccucauuc

SEQ ID NO: 292704 - RNA, 24 nt, Artificial Sequence
  Synthetic
agugauucugcugcucccucauuc

SEQ ID NO: 292705 - RNA, 18 nt, Artificial Sequence
  Synthetic
aucucagcauccucauuc

SEQ ID NO: 292706 - RNA, 19 nt, Artificial Sequence
  Synthetic
caucucagcauccucauuc

SEQ ID NO: 292707 - RNA, 20 nt, Artificial Sequence
  Synthetic
gcaucucagcauccucauuc

SEQ ID NO: 292708 - RNA, 21 nt, Artificial Sequence
  Synthetic
agcaucucagcauccucauuc

SEQ ID NO: 292709 - RNA, 22 nt, Artificial Sequence
  Synthetic
cagcaucucagcauccucauuc

SEQ ID NO: 292710 - RNA, 23 nt, Artificial Sequence
  Synthetic
ccagcaucucagcauccucauuc

SEQ ID NO: 292711 - RNA, 24 nt, Artificial Sequence
  Synthetic
gccagcaucucagcauccucauuc

SEQ ID NO: 292712 - RNA, 18 nt, Artificial Sequence
  Synthetic
ggcuaucucugcucauuc

SEQ ID NO: 292713 - RNA, 19 nt, Artificial Sequence
  Synthetic
gggcuaucucugcucauuc

SEQ ID NO: 292714 - RNA, 20 nt, Artificial Sequence
  Synthetic
ggggcuaucucugcucauuc

SEQ ID NO: 292715 - RNA, 21 nt, Artificial Sequence
  Synthetic
uggggcuaucucugcucauuc

SEQ ID NO: 292716 - RNA, 22 nt, Artificial Sequence
  Synthetic
uuggggcuaucucugcucauuc

SEQ ID NO: 292717 - RNA, 23 nt, Artificial Sequence
  Synthetic
cuuggggcuaucucugcucauuc

SEQ ID NO: 292718 - RNA, 24 nt, Artificial Sequence
  Synthetic
gcuuggggcuaucucugcucauuc

SEQ ID NO: 292719 - RNA, 18 nt, Artificial Sequence
  Synthetic
gaucuaugugucucauuc

SEQ ID NO: 292720 - RNA, 19 nt, Artificial Sequence
  Synthetic
ugaucuaugugucucauuc

SEQ ID NO: 292721 - RNA, 20 nt, Artificial Sequence
  Synthetic
cugaucuaugugucucauuc

SEQ ID NO: 292722 - RNA, 21 nt, Artificial Sequence
  Synthetic
ucugaucuaugugucucauuc

SEQ ID NO: 292723 - RNA, 22 nt, Artificial Sequence
  Synthetic
gucugaucuaugugucucauuc

SEQ ID NO: 292724 - RNA, 23 nt, Artificial Sequence
  Synthetic
ugucugaucuaugugucucauuc

SEQ ID NO: 292725 - RNA, 24 nt, Artificial Sequence
  Synthetic
augucugaucuaugugucucauuc

SEQ ID NO: 292726 - RNA, 18 nt, Artificial Sequence
  Synthetic
aaaacagcuuucucauuc

SEQ ID NO: 292727 - RNA, 19 nt, Artificial Sequence
  Synthetic
gaaaacagcuuucucauuc

SEQ ID NO: 292728 - RNA, 20 nt, Artificial Sequence
  Synthetic
agaaaacagcuuucucauuc

SEQ ID NO: 292729 - RNA, 21 nt, Artificial Sequence
  Synthetic
cagaaaacagcuuucucauuc

SEQ ID NO: 292730 - RNA, 22 nt, Artificial Sequence
  Synthetic
acagaaaacagcuuucucauuc

SEQ ID NO: 292731 - RNA, 23 nt, Artificial Sequence
  Synthetic
gacagaaaacagcuuucucauuc

SEQ ID NO: 292732 - RNA, 24 nt, Artificial Sequence
  Synthetic
cgacagaaaacagcuuucucauuc

SEQ ID NO: 292733 - RNA, 18 nt, Artificial Sequence
  Synthetic
aaaccauucaagucauuc

SEQ ID NO: 292734 - RNA, 19 nt, Artificial Sequence
  Synthetic
caaaccauucaagucauuc

SEQ ID NO: 292735 - RNA, 20 nt, Artificial Sequence
  Synthetic
gcaaaccauucaagucauuc

SEQ ID NO: 292736 - RNA, 21 nt, Artificial Sequence
  Synthetic
ugcaaaccauucaagucauuc

SEQ ID NO: 292737 - RNA, 22 nt, Artificial Sequence
  Synthetic
augcaaaccauucaagucauuc

SEQ ID NO: 292738 - RNA, 23 nt, Artificial Sequence
  Synthetic
caugcaaaccauucaagucauuc

SEQ ID NO: 292739 - RNA, 24 nt, Artificial Sequence
  Synthetic
ccaugcaaaccauucaagucauuc

SEQ ID NO: 292740 - RNA, 18 nt, Artificial Sequence
  Synthetic
cccucuaugaagucauuc

SEQ ID NO: 292741 - RNA, 19 nt, Artificial Sequence
  Synthetic
gcccucuaugaagucauuc

SEQ ID NO: 292742 - RNA, 20 nt, Artificial Sequence
  Synthetic
agcccucuaugaagucauuc

SEQ ID NO: 292743 - RNA, 21 nt, Artificial Sequence
  Synthetic
cagcccucuaugaagucauuc

SEQ ID NO: 292744 - RNA, 22 nt, Artificial Sequence
  Synthetic
gcagcccucuaugaagucauuc

SEQ ID NO: 292745 - RNA, 23 nt, Artificial Sequence
  Synthetic
agcagcccucuaugaagucauuc

SEQ ID NO: 292746 - RNA, 24 nt, Artificial Sequence
  Synthetic
aagcagcccucuaugaagucauuc

SEQ ID NO: 292747 - RNA, 18 nt, Artificial Sequence
  Synthetic
uguacccaguagucauuc

SEQ ID NO: 292748 - RNA, 19 nt, Artificial Sequence
  Synthetic
auguacccaguagucauuc

SEQ ID NO: 292749 - RNA, 20 nt, Artificial Sequence
  Synthetic
uauguacccaguagucauuc

SEQ ID NO: 292750 - RNA, 21 nt, Artificial Sequence
  Synthetic
uuauguacccaguagucauuc

SEQ ID NO: 292751 - RNA, 22 nt, Artificial Sequence
  Synthetic
guuauguacccaguagucauuc

SEQ ID NO: 292752 - RNA, 23 nt, Artificial Sequence
  Synthetic
cguuauguacccaguagucauuc

SEQ ID NO: 292753 - RNA, 24 nt, Artificial Sequence
  Synthetic
ucguuauguacccaguagucauuc

SEQ ID NO: 292754 - RNA, 18 nt, Artificial Sequence
  Synthetic
uagaacauuaauucauuc

SEQ ID NO: 292755 - RNA, 19 nt, Artificial Sequence
  Synthetic
auagaacauuaauucauuc

SEQ ID NO: 292756 - RNA, 20 nt, Artificial Sequence
  Synthetic
uauagaacauuaauucauuc

SEQ ID NO: 292757 - RNA, 21 nt, Artificial Sequence
  Synthetic
uuauagaacauuaauucauuc

SEQ ID NO: 292758 - RNA, 22 nt, Artificial Sequence
  Synthetic
uuuauagaacauuaauucauuc

SEQ ID NO: 292759 - RNA, 23 nt, Artificial Sequence
  Synthetic
auuuauagaacauuaauucauuc

SEQ ID NO: 292760 - RNA, 24 nt, Artificial Sequence
  Synthetic
gauuuauagaacauuaauucauuc

SEQ ID NO: 292761 - RNA, 18 nt, Artificial Sequence
  Synthetic
uucuuauaggauucauuc

SEQ ID NO: 292762 - RNA, 19 nt, Artificial Sequence
  Synthetic
auucuuauaggauucauuc

SEQ ID NO: 292763 - RNA, 20 nt, Artificial Sequence
  Synthetic
aauucuuauaggauucauuc

SEQ ID NO: 292764 - RNA, 21 nt, Artificial Sequence
  Synthetic
aaauucuuauaggauucauuc

SEQ ID NO: 292765 - RNA, 22 nt, Artificial Sequence
  Synthetic
gaaauucuuauaggauucauuc

SEQ ID NO: 292766 - RNA, 23 nt, Artificial Sequence
  Synthetic
ugaaauucuuauaggauucauuc

SEQ ID NO: 292767 - RNA, 24 nt, Artificial Sequence
  Synthetic
cugaaauucuuauaggauucauuc

SEQ ID NO: 292768 - RNA, 18 nt, Artificial Sequence
  Synthetic
guuaaaccauauucauuc

SEQ ID NO: 292769 - RNA, 19 nt, Artificial Sequence
  Synthetic
aguuaaaccauauucauuc

SEQ ID NO: 292770 - RNA, 20 nt, Artificial Sequence
  Synthetic
aaguuaaaccauauucauuc

SEQ ID NO: 292771 - RNA, 21 nt, Artificial Sequence
  Synthetic
caaguuaaaccauauucauuc

SEQ ID NO: 292772 - RNA, 22 nt, Artificial Sequence
  Synthetic
ucaaguuaaaccauauucauuc

SEQ ID NO: 292773 - RNA, 23 nt, Artificial Sequence
  Synthetic
cucaaguuaaaccauauucauuc

SEQ ID NO: 292774 - RNA, 24 nt, Artificial Sequence
  Synthetic
ucucaaguuaaaccauauucauuc

SEQ ID NO: 292775 - RNA, 18 nt, Artificial Sequence
  Synthetic
ccacacuccccuucauuc

SEQ ID NO: 292776 - RNA, 19 nt, Artificial Sequence
  Synthetic
uccacacuccccuucauuc

SEQ ID NO: 292777 - RNA, 20 nt, Artificial Sequence
  Synthetic
uuccacacuccccuucauuc

SEQ ID NO: 292778 - RNA, 21 nt, Artificial Sequence
  Synthetic
auuccacacuccccuucauuc

SEQ ID NO: 292779 - RNA, 22 nt, Artificial Sequence
  Synthetic
cauuccacacuccccuucauuc

SEQ ID NO: 292780 - RNA, 23 nt, Artificial Sequence
  Synthetic
ucauuccacacuccccuucauuc

SEQ ID NO: 292781 - RNA, 24 nt, Artificial Sequence
  Synthetic
uucauuccacacuccccuucauuc

SEQ ID NO: 292782 - RNA, 18 nt, Artificial Sequence
  Synthetic
uuaccauuugcuucauuc

SEQ ID NO: 292783 - RNA, 19 nt, Artificial Sequence
  Synthetic
guuaccauuugcuucauuc

SEQ ID NO: 292784 - RNA, 20 nt, Artificial Sequence
  Synthetic
uguuaccauuugcuucauuc

SEQ ID NO: 292785 - RNA, 21 nt, Artificial Sequence
  Synthetic
uuguuaccauuugcuucauuc

SEQ ID NO: 292786 - RNA, 22 nt, Artificial Sequence
  Synthetic
auuguuaccauuugcuucauuc

SEQ ID NO: 292787 - RNA, 23 nt, Artificial Sequence
  Synthetic
cauuguuaccauuugcuucauuc

SEQ ID NO: 292788 - RNA, 24 nt, Artificial Sequence
  Synthetic
ucauuguuaccauuugcuucauuc

SEQ ID NO: 292789 - RNA, 18 nt, Artificial Sequence
  Synthetic
acucuuaaaauuucauuc

SEQ ID NO: 292790 - RNA, 19 nt, Artificial Sequence
  Synthetic
uacucuuaaaauuucauuc

SEQ ID NO: 292791 - RNA, 20 nt, Artificial Sequence
  Synthetic
uuacucuuaaaauuucauuc

SEQ ID NO: 292792 - RNA, 21 nt, Artificial Sequence
  Synthetic
uuuacucuuaaaauuucauuc

SEQ ID NO: 292793 - RNA, 22 nt, Artificial Sequence
  Synthetic
cuuuacucuuaaaauuucauuc

SEQ ID NO: 292794 - RNA, 23 nt, Artificial Sequence
  Synthetic
acuuuacucuuaaaauuucauuc

SEQ ID NO: 292795 - RNA, 24 nt, Artificial Sequence
  Synthetic
uacuuuacucuuaaaauuucauuc

SEQ ID NO: 292796 - RNA, 18 nt, Artificial Sequence
  Synthetic
caaauggguuuaagauuc

SEQ ID NO: 292797 - RNA, 19 nt, Artificial Sequence
  Synthetic
ucaaauggguuuaagauuc

SEQ ID NO: 292798 - RNA, 20 nt, Artificial Sequence
  Synthetic
uucaaauggguuuaagauuc

SEQ ID NO: 292799 - RNA, 21 nt, Artificial Sequence
  Synthetic
guucaaauggguuuaagauuc

SEQ ID NO: 292800 - RNA, 22 nt, Artificial Sequence
  Synthetic
uguucaaauggguuuaagauuc

SEQ ID NO: 292801 - RNA, 23 nt, Artificial Sequence
  Synthetic
cuguucaaauggguuuaagauuc

SEQ ID NO: 292802 - RNA, 24 nt, Artificial Sequence
  Synthetic
acuguucaaauggguuuaagauuc

SEQ ID NO: 292803 - RNA, 18 nt, Artificial Sequence
  Synthetic
uugugaagaaacagauuc

SEQ ID NO: 292804 - RNA, 19 nt, Artificial Sequence
  Synthetic
auugugaagaaacagauuc

SEQ ID NO: 292805 - RNA, 20 nt, Artificial Sequence
  Synthetic
uauugugaagaaacagauuc

SEQ ID NO: 292806 - RNA, 21 nt, Artificial Sequence
  Synthetic
uuauugugaagaaacagauuc

SEQ ID NO: 292807 - RNA, 22 nt, Artificial Sequence
  Synthetic
guuauugugaagaaacagauuc

SEQ ID NO: 292808 - RNA, 23 nt, Artificial Sequence
  Synthetic
aguuauugugaagaaacagauuc

SEQ ID NO: 292809 - RNA, 24 nt, Artificial Sequence
  Synthetic
gaguuauugugaagaaacagauuc

SEQ ID NO: 292810 - RNA, 18 nt, Artificial Sequence
  Synthetic
uaaaaaccugacagauuc

SEQ ID NO: 292811 - RNA, 19 nt, Artificial Sequence
  Synthetic
uuaaaaaccugacagauuc

SEQ ID NO: 292812 - RNA, 20 nt, Artificial Sequence
  Synthetic
uuuaaaaaccugacagauuc

SEQ ID NO: 292813 - RNA, 21 nt, Artificial Sequence
  Synthetic
cuuuaaaaaccugacagauuc

SEQ ID NO: 292814 - RNA, 22 nt, Artificial Sequence
  Synthetic
acuuuaaaaaccugacagauuc

SEQ ID NO: 292815 - RNA, 23 nt, Artificial Sequence
  Synthetic
aacuuuaaaaaccugacagauuc

SEQ ID NO: 292816 - RNA, 24 nt, Artificial Sequence
  Synthetic
gaacuuuaaaaaccugacagauuc

SEQ ID NO: 292817 - RNA, 18 nt, Artificial Sequence
  Synthetic
aaagaucagcccagauuc

SEQ ID NO: 292818 - RNA, 19 nt, Artificial Sequence
  Synthetic
aaaagaucagcccagauuc

SEQ ID NO: 292819 - RNA, 20 nt, Artificial Sequence
  Synthetic
caaaagaucagcccagauuc

SEQ ID NO: 292820 - RNA, 21 nt, Artificial Sequence
  Synthetic
ucaaaagaucagcccagauuc

SEQ ID NO: 292821 - RNA, 22 nt, Artificial Sequence
  Synthetic
cucaaaagaucagcccagauuc

SEQ ID NO: 292822 - RNA, 23 nt, Artificial Sequence
  Synthetic
ccucaaaagaucagcccagauuc

SEQ ID NO: 292823 - RNA, 24 nt, Artificial Sequence
  Synthetic
accucaaaagaucagcccagauuc

SEQ ID NO: 292824 - RNA, 18 nt, Artificial Sequence
  Synthetic
agagaagugggcagauuc

SEQ ID NO: 292825 - RNA, 19 nt, Artificial Sequence
  Synthetic
gagagaagugggcagauuc

SEQ ID NO: 292826 - RNA, 20 nt, Artificial Sequence
  Synthetic
ggagagaagugggcagauuc

SEQ ID NO: 292827 - RNA, 21 nt, Artificial Sequence
  Synthetic
uggagagaagugggcagauuc

SEQ ID NO: 292828 - RNA, 22 nt, Artificial Sequence
  Synthetic
auggagagaagugggcagauuc

SEQ ID NO: 292829 - RNA, 23 nt, Artificial Sequence
  Synthetic
gauggagagaagugggcagauuc

SEQ ID NO: 292830 - RNA, 24 nt, Artificial Sequence
  Synthetic
ggauggagagaagugggcagauuc

SEQ ID NO: 292831 - RNA, 18 nt, Artificial Sequence
  Synthetic
uaagcuggucucagauuc

SEQ ID NO: 292832 - RNA, 19 nt, Artificial Sequence
  Synthetic
cuaagcuggucucagauuc

SEQ ID NO: 292833 - RNA, 20 nt, Artificial Sequence
  Synthetic
ccuaagcuggucucagauuc

SEQ ID NO: 292834 - RNA, 21 nt, Artificial Sequence
  Synthetic
gccuaagcuggucucagauuc

SEQ ID NO: 292835 - RNA, 22 nt, Artificial Sequence
  Synthetic
ugccuaagcuggucucagauuc

SEQ ID NO: 292836 - RNA, 23 nt, Artificial Sequence
  Synthetic
uugccuaagcuggucucagauuc

SEQ ID NO: 292837 - RNA, 24 nt, Artificial Sequence
  Synthetic
auugccuaagcuggucucagauuc

SEQ ID NO: 292838 - RNA, 18 nt, Artificial Sequence
  Synthetic
ugagagaaugucagauuc

SEQ ID NO: 292839 - RNA, 19 nt, Artificial Sequence
  Synthetic
gugagagaaugucagauuc

SEQ ID NO: 292840 - RNA, 20 nt, Artificial Sequence
  Synthetic
agugagagaaugucagauuc

SEQ ID NO: 292841 - RNA, 21 nt, Artificial Sequence
  Synthetic
uagugagagaaugucagauuc

SEQ ID NO: 292842 - RNA, 22 nt, Artificial Sequence
  Synthetic
guagugagagaaugucagauuc

SEQ ID NO: 292843 - RNA, 23 nt, Artificial Sequence
  Synthetic
gguagugagagaaugucagauuc

SEQ ID NO: 292844 - RNA, 24 nt, Artificial Sequence
  Synthetic
cgguagugagagaaugucagauuc

SEQ ID NO: 292845 - RNA, 18 nt, Artificial Sequence
  Synthetic
uuagugacaaagagauuc

SEQ ID NO: 292846 - RNA, 19 nt, Artificial Sequence
  Synthetic
cuuagugacaaagagauuc

SEQ ID NO: 292847 - RNA, 20 nt, Artificial Sequence
  Synthetic
gcuuagugacaaagagauuc

SEQ ID NO: 292848 - RNA, 21 nt, Artificial Sequence
  Synthetic
agcuuagugacaaagagauuc

SEQ ID NO: 292849 - RNA, 22 nt, Artificial Sequence
  Synthetic
uagcuuagugacaaagagauuc

SEQ ID NO: 292850 - RNA, 23 nt, Artificial Sequence
  Synthetic
auagcuuagugacaaagagauuc

SEQ ID NO: 292851 - RNA, 24 nt, Artificial Sequence
  Synthetic
aauagcuuagugacaaagagauuc

SEQ ID NO: 292852 - RNA, 18 nt, Artificial Sequence
  Synthetic
cuuaucauuuagagauuc

SEQ ID NO: 292853 - RNA, 19 nt, Artificial Sequence
  Synthetic
ucuuaucauuuagagauuc

SEQ ID NO: 292854 - RNA, 20 nt, Artificial Sequence
  Synthetic
cucuuaucauuuagagauuc

SEQ ID NO: 292855 - RNA, 21 nt, Artificial Sequence
  Synthetic
ucucuuaucauuuagagauuc

SEQ ID NO: 292856 - RNA, 22 nt, Artificial Sequence
  Synthetic
aucucuuaucauuuagagauuc

SEQ ID NO: 292857 - RNA, 23 nt, Artificial Sequence
  Synthetic
aaucucuuaucauuuagagauuc

SEQ ID NO: 292858 - RNA, 24 nt, Artificial Sequence
  Synthetic
uaaucucuuaucauuuagagauuc

SEQ ID NO: 292859 - RNA, 18 nt, Artificial Sequence
  Synthetic
cuguagaaggugagauuc

SEQ ID NO: 292860 - RNA, 19 nt, Artificial Sequence
  Synthetic
ccuguagaaggugagauuc

SEQ ID NO: 292861 - RNA, 20 nt, Artificial Sequence
  Synthetic
uccuguagaaggugagauuc

SEQ ID NO: 292862 - RNA, 21 nt, Artificial Sequence
  Synthetic
cuccuguagaaggugagauuc

SEQ ID NO: 292863 - RNA, 22 nt, Artificial Sequence
  Synthetic
ucuccuguagaaggugagauuc

SEQ ID NO: 292864 - RNA, 23 nt, Artificial Sequence
  Synthetic
uucuccuguagaaggugagauuc

SEQ ID NO: 292865 - RNA, 24 nt, Artificial Sequence
  Synthetic
auucuccuguagaaggugagauuc

SEQ ID NO: 292866 - RNA, 18 nt, Artificial Sequence
  Synthetic
auuguagcauugagauuc

SEQ ID NO: 292867 - RNA, 19 nt, Artificial Sequence
  Synthetic
aauuguagcauugagauuc

SEQ ID NO: 292868 - RNA, 20 nt, Artificial Sequence
  Synthetic
caauuguagcauugagauuc

SEQ ID NO: 292869 - RNA, 21 nt, Artificial Sequence
  Synthetic
ccaauuguagcauugagauuc

SEQ ID NO: 292870 - RNA, 22 nt, Artificial Sequence
  Synthetic
cccaauuguagcauugagauuc

SEQ ID NO: 292871 - RNA, 23 nt, Artificial Sequence
  Synthetic
gcccaauuguagcauugagauuc

SEQ ID NO: 292872 - RNA, 24 nt, Artificial Sequence
  Synthetic
ugcccaauuguagcauugagauuc

SEQ ID NO: 292873 - RNA, 18 nt, Artificial Sequence
  Synthetic
caccucauaaauagauuc

SEQ ID NO: 292874 - RNA, 19 nt, Artificial Sequence
  Synthetic
gcaccucauaaauagauuc

SEQ ID NO: 292875 - RNA, 20 nt, Artificial Sequence
  Synthetic
agcaccucauaaauagauuc

SEQ ID NO: 292876 - RNA, 21 nt, Artificial Sequence
  Synthetic
cagcaccucauaaauagauuc

SEQ ID NO: 292877 - RNA, 22 nt, Artificial Sequence
  Synthetic
acagcaccucauaaauagauuc

SEQ ID NO: 292878 - RNA, 23 nt, Artificial Sequence
  Synthetic
gacagcaccucauaaauagauuc

SEQ ID NO: 292879 - RNA, 24 nt, Artificial Sequence
  Synthetic
agacagcaccucauaaauagauuc

SEQ ID NO: 292880 - RNA, 18 nt, Artificial Sequence
  Synthetic
ccgaguguuuauagauuc

SEQ ID NO: 292881 - RNA, 19 nt, Artificial Sequence
  Synthetic
accgaguguuuauagauuc

SEQ ID NO: 292882 - RNA, 20 nt, Artificial Sequence
  Synthetic
uaccgaguguuuauagauuc

SEQ ID NO: 292883 - RNA, 21 nt, Artificial Sequence
  Synthetic
auaccgaguguuuauagauuc

SEQ ID NO: 292884 - RNA, 22 nt, Artificial Sequence
  Synthetic
uauaccgaguguuuauagauuc

SEQ ID NO: 292885 - RNA, 23 nt, Artificial Sequence
  Synthetic
uuauaccgaguguuuauagauuc

SEQ ID NO: 292886 - RNA, 24 nt, Artificial Sequence
  Synthetic
cuuauaccgaguguuuauagauuc

SEQ ID NO: 292887 - RNA, 18 nt, Artificial Sequence
  Synthetic
cuccuguguguuagauuc

SEQ ID NO: 292888 - RNA, 19 nt, Artificial Sequence
  Synthetic
ccuccuguguguuagauuc

SEQ ID NO: 292889 - RNA, 20 nt, Artificial Sequence
  Synthetic
cccuccuguguguuagauuc

SEQ ID NO: 292890 - RNA, 21 nt, Artificial Sequence
  Synthetic
gcccuccuguguguuagauuc

SEQ ID NO: 292891 - RNA, 22 nt, Artificial Sequence
  Synthetic
ugcccuccuguguguuagauuc

SEQ ID NO: 292892 - RNA, 23 nt, Artificial Sequence
  Synthetic
gugcccuccuguguguuagauuc

SEQ ID NO: 292893 - RNA, 24 nt, Artificial Sequence
  Synthetic
ugugcccuccuguguguuagauuc

SEQ ID NO: 292894 - RNA, 18 nt, Artificial Sequence
  Synthetic
aacuuugauuuuagauuc

SEQ ID NO: 292895 - RNA, 19 nt, Artificial Sequence
  Synthetic
caacuuugauuuuagauuc

SEQ ID NO: 292896 - RNA, 20 nt, Artificial Sequence
  Synthetic
ucaacuuugauuuuagauuc

SEQ ID NO: 292897 - RNA, 21 nt, Artificial Sequence
  Synthetic
uucaacuuugauuuuagauuc

SEQ ID NO: 292898 - RNA, 22 nt, Artificial Sequence
  Synthetic
uuucaacuuugauuuuagauuc

SEQ ID NO: 292899 - RNA, 23 nt, Artificial Sequence
  Synthetic
uuuucaacuuugauuuuagauuc

SEQ ID NO: 292900 - RNA, 24 nt, Artificial Sequence
  Synthetic
uuuuucaacuuugauuuuagauuc

SEQ ID NO: 292901 - RNA, 18 nt, Artificial Sequence
  Synthetic
uuguaaagaugacgauuc

SEQ ID NO: 292902 - RNA, 19 nt, Artificial Sequence
  Synthetic
uuuguaaagaugacgauuc

SEQ ID NO: 292903 - RNA, 20 nt, Artificial Sequence
  Synthetic
auuuguaaagaugacgauuc

SEQ ID NO: 292904 - RNA, 21 nt, Artificial Sequence
  Synthetic
uauuuguaaagaugacgauuc

SEQ ID NO: 292905 - RNA, 22 nt, Artificial Sequence
  Synthetic
cuauuuguaaagaugacgauuc

SEQ ID NO: 292906 - RNA, 23 nt, Artificial Sequence
  Synthetic
acuauuuguaaagaugacgauuc

SEQ ID NO: 292907 - RNA, 24 nt, Artificial Sequence
  Synthetic
gacuauuuguaaagaugacgauuc

SEQ ID NO: 292908 - RNA, 18 nt, Artificial Sequence
  Synthetic
uuggaauacucucgauuc

SEQ ID NO: 292909 - RNA, 19 nt, Artificial Sequence
  Synthetic
uuuggaauacucucgauuc

SEQ ID NO: 292910 - RNA, 20 nt, Artificial Sequence
  Synthetic
auuuggaauacucucgauuc

SEQ ID NO: 292911 - RNA, 21 nt, Artificial Sequence
  Synthetic
uauuuggaauacucucgauuc

SEQ ID NO: 292912 - RNA, 22 nt, Artificial Sequence
  Synthetic
guauuuggaauacucucgauuc

SEQ ID NO: 292913 - RNA, 23 nt, Artificial Sequence
  Synthetic
aguauuuggaauacucucgauuc

SEQ ID NO: 292914 - RNA, 24 nt, Artificial Sequence
  Synthetic
aaguauuuggaauacucucgauuc

SEQ ID NO: 292915 - RNA, 18 nt, Artificial Sequence
  Synthetic
uaucuguucaagggauuc

SEQ ID NO: 292916 - RNA, 19 nt, Artificial Sequence
  Synthetic
uuaucuguucaagggauuc

SEQ ID NO: 292917 - RNA, 20 nt, Artificial Sequence
  Synthetic
uuuaucuguucaagggauuc

SEQ ID NO: 292918 - RNA, 21 nt, Artificial Sequence
  Synthetic
uuuuaucuguucaagggauuc

SEQ ID NO: 292919 - RNA, 22 nt, Artificial Sequence
  Synthetic
auuuuaucuguucaagggauuc

SEQ ID NO: 292920 - RNA, 23 nt, Artificial Sequence
  Synthetic
aauuuuaucuguucaagggauuc

SEQ ID NO: 292921 - RNA, 24 nt, Artificial Sequence
  Synthetic
uaauuuuaucuguucaagggauuc

SEQ ID NO: 292922 - RNA, 18 nt, Artificial Sequence
  Synthetic
gaugaaaguaugggauuc

SEQ ID NO: 292923 - RNA, 19 nt, Artificial Sequence
  Synthetic
ggaugaaaguaugggauuc

SEQ ID NO: 292924 - RNA, 20 nt, Artificial Sequence
  Synthetic
uggaugaaaguaugggauuc

SEQ ID NO: 292925 - RNA, 21 nt, Artificial Sequence
  Synthetic
uuggaugaaaguaugggauuc

SEQ ID NO: 292926 - RNA, 22 nt, Artificial Sequence
  Synthetic
guuggaugaaaguaugggauuc

SEQ ID NO: 292927 - RNA, 23 nt, Artificial Sequence
  Synthetic
aguuggaugaaaguaugggauuc

SEQ ID NO: 292928 - RNA, 24 nt, Artificial Sequence
  Synthetic
caguuggaugaaaguaugggauuc

SEQ ID NO: 292929 - RNA, 18 nt, Artificial Sequence
  Synthetic
cacgcagcaucuggauuc

SEQ ID NO: 292930 - RNA, 19 nt, Artificial Sequence
  Synthetic
ccacgcagcaucuggauuc

SEQ ID NO: 292931 - RNA, 20 nt, Artificial Sequence
  Synthetic
cccacgcagcaucuggauuc

SEQ ID NO: 292932 - RNA, 21 nt, Artificial Sequence
  Synthetic
ccccacgcagcaucuggauuc

SEQ ID NO: 292933 - RNA, 22 nt, Artificial Sequence
  Synthetic
cccccacgcagcaucuggauuc

SEQ ID NO: 292934 - RNA, 23 nt, Artificial Sequence
  Synthetic
acccccacgcagcaucuggauuc

SEQ ID NO: 292935 - RNA, 24 nt, Artificial Sequence
  Synthetic
aacccccacgcagcaucuggauuc

SEQ ID NO: 292936 - RNA, 18 nt, Artificial Sequence
  Synthetic
uguaugcccucuggauuc

SEQ ID NO: 292937 - RNA, 19 nt, Artificial Sequence
  Synthetic
auguaugcccucuggauuc

SEQ ID NO: 292938 - RNA, 20 nt, Artificial Sequence
  Synthetic
gauguaugcccucuggauuc

SEQ ID NO: 292939 - RNA, 21 nt, Artificial Sequence
  Synthetic
agauguaugcccucuggauuc

SEQ ID NO: 292940 - RNA, 22 nt, Artificial Sequence
  Synthetic
aagauguaugcccucuggauuc

SEQ ID NO: 292941 - RNA, 23 nt, Artificial Sequence
  Synthetic
aaagauguaugcccucuggauuc

SEQ ID NO: 292942 - RNA, 24 nt, Artificial Sequence
  Synthetic
aaaagauguaugcccucuggauuc

SEQ ID NO: 292943 - RNA, 18 nt, Artificial Sequence
  Synthetic
aaucucaguauuggauuc

SEQ ID NO: 292944 - RNA, 19 nt, Artificial Sequence
  Synthetic
aaaucucaguauuggauuc

SEQ ID NO: 292945 - RNA, 20 nt, Artificial Sequence
  Synthetic
uaaaucucaguauuggauuc

SEQ ID NO: 292946 - RNA, 21 nt, Artificial Sequence
  Synthetic
guaaaucucaguauuggauuc

SEQ ID NO: 292947 - RNA, 22 nt, Artificial Sequence
  Synthetic
aguaaaucucaguauuggauuc

SEQ ID NO: 292948 - RNA, 23 nt, Artificial Sequence
  Synthetic
aaguaaaucucaguauuggauuc

SEQ ID NO: 292949 - RNA, 24 nt, Artificial Sequence
  Synthetic
caaguaaaucucaguauuggauuc

SEQ ID NO: 292950 - RNA, 18 nt, Artificial Sequence
  Synthetic
uaucucaauucaugauuc

SEQ ID NO: 292951 - RNA, 19 nt, Artificial Sequence
  Synthetic
auaucucaauucaugauuc

SEQ ID NO: 292952 - RNA, 20 nt, Artificial Sequence
  Synthetic
aauaucucaauucaugauuc

SEQ ID NO: 292953 - RNA, 21 nt, Artificial Sequence
  Synthetic
caauaucucaauucaugauuc

SEQ ID NO: 292954 - RNA, 22 nt, Artificial Sequence
  Synthetic
acaauaucucaauucaugauuc

SEQ ID NO: 292955 - RNA, 23 nt, Artificial Sequence
  Synthetic
aacaauaucucaauucaugauuc

SEQ ID NO: 292956 - RNA, 24 nt, Artificial Sequence
  Synthetic
gaacaauaucucaauucaugauuc

SEQ ID NO: 292957 - RNA, 18 nt, Artificial Sequence
  Synthetic
cucuaccacagaugauuc

SEQ ID NO: 292958 - RNA, 19 nt, Artificial Sequence
  Synthetic
ucucuaccacagaugauuc

SEQ ID NO: 292959 - RNA, 20 nt, Artificial Sequence
  Synthetic
uucucuaccacagaugauuc

SEQ ID NO: 292960 - RNA, 21 nt, Artificial Sequence
  Synthetic
cuucucuaccacagaugauuc

SEQ ID NO: 292961 - RNA, 22 nt, Artificial Sequence
  Synthetic
gcuucucuaccacagaugauuc

SEQ ID NO: 292962 - RNA, 23 nt, Artificial Sequence
  Synthetic
ugcuucucuaccacagaugauuc

SEQ ID NO: 292963 - RNA, 24 nt, Artificial Sequence
  Synthetic
augcuucucuaccacagaugauuc

SEQ ID NO: 292964 - RNA, 18 nt, Artificial Sequence
  Synthetic
ugccucccaggaugauuc

SEQ ID NO: 292965 - RNA, 19 nt, Artificial Sequence
  Synthetic
cugccucccaggaugauuc

SEQ ID NO: 292966 - RNA, 20 nt, Artificial Sequence
  Synthetic
ccugccucccaggaugauuc

SEQ ID NO: 292967 - RNA, 21 nt, Artificial Sequence
  Synthetic
gccugccucccaggaugauuc

SEQ ID NO: 292968 - RNA, 22 nt, Artificial Sequence
  Synthetic
agccugccucccaggaugauuc

SEQ ID NO: 292969 - RNA, 23 nt, Artificial Sequence
  Synthetic
cagccugccucccaggaugauuc

SEQ ID NO: 292970 - RNA, 24 nt, Artificial Sequence
  Synthetic
ucagccugccucccaggaugauuc

SEQ ID NO: 292971 - RNA, 18 nt, Artificial Sequence
  Synthetic
cgcaaaucucuaugauuc

SEQ ID NO: 292972 - RNA, 19 nt, Artificial Sequence
  Synthetic
acgcaaaucucuaugauuc

SEQ ID NO: 292973 - RNA, 20 nt, Artificial Sequence
  Synthetic
gacgcaaaucucuaugauuc

SEQ ID NO: 292974 - RNA, 21 nt, Artificial Sequence
  Synthetic
agacgcaaaucucuaugauuc

SEQ ID NO: 292975 - RNA, 22 nt, Artificial Sequence
  Synthetic
cagacgcaaaucucuaugauuc

SEQ ID NO: 292976 - RNA, 23 nt, Artificial Sequence
  Synthetic
acagacgcaaaucucuaugauuc

SEQ ID NO: 292977 - RNA, 24 nt, Artificial Sequence
  Synthetic
uacagacgcaaaucucuaugauuc

SEQ ID NO: 292978 - RNA, 18 nt, Artificial Sequence
  Synthetic
aauaagucucuaugauuc

SEQ ID NO: 292979 - RNA, 19 nt, Artificial Sequence
  Synthetic
aaauaagucucuaugauuc

SEQ ID NO: 292980 - RNA, 20 nt, Artificial Sequence
  Synthetic
aaaauaagucucuaugauuc

SEQ ID NO: 292981 - RNA, 21 nt, Artificial Sequence
  Synthetic
aaaaauaagucucuaugauuc

SEQ ID NO: 292982 - RNA, 22 nt, Artificial Sequence
  Synthetic
caaaaauaagucucuaugauuc

SEQ ID NO: 292983 - RNA, 23 nt, Artificial Sequence
  Synthetic
ucaaaaauaagucucuaugauuc

SEQ ID NO: 292984 - RNA, 24 nt, Artificial Sequence
  Synthetic
uucaaaaauaagucucuaugauuc

SEQ ID NO: 292985 - RNA, 18 nt, Artificial Sequence
  Synthetic
aauuaacaaaacugauuc

SEQ ID NO: 292986 - RNA, 19 nt, Artificial Sequence
  Synthetic
aaauuaacaaaacugauuc

SEQ ID NO: 292987 - RNA, 20 nt, Artificial Sequence
  Synthetic
uaaauuaacaaaacugauuc

SEQ ID NO: 292988 - RNA, 21 nt, Artificial Sequence
  Synthetic
auaaauuaacaaaacugauuc

SEQ ID NO: 292989 - RNA, 22 nt, Artificial Sequence
  Synthetic
cauaaauuaacaaaacugauuc

SEQ ID NO: 292990 - RNA, 23 nt, Artificial Sequence
  Synthetic
acauaaauuaacaaaacugauuc

SEQ ID NO: 292991 - RNA, 24 nt, Artificial Sequence
  Synthetic
gacauaaauuaacaaaacugauuc

SEQ ID NO: 292992 - RNA, 18 nt, Artificial Sequence
  Synthetic
gugacagagcucugauuc

SEQ ID NO: 292993 - RNA, 19 nt, Artificial Sequence
  Synthetic
agugacagagcucugauuc

SEQ ID NO: 292994 - RNA, 20 nt, Artificial Sequence
  Synthetic
cagugacagagcucugauuc

SEQ ID NO: 292995 - RNA, 21 nt, Artificial Sequence
  Synthetic
ucagugacagagcucugauuc

SEQ ID NO: 292996 - RNA, 22 nt, Artificial Sequence
  Synthetic
aucagugacagagcucugauuc

SEQ ID NO: 292997 - RNA, 23 nt, Artificial Sequence
  Synthetic
aaucagugacagagcucugauuc

SEQ ID NO: 292998 - RNA, 24 nt, Artificial Sequence
  Synthetic
caaucagugacagagcucugauuc

SEQ ID NO: 292999 - RNA, 18 nt, Artificial Sequence
  Synthetic
caaguuuccaagugauuc

SEQ ID NO: 293000 - RNA, 19 nt, Artificial Sequence
  Synthetic
ccaaguuuccaagugauuc

SEQ ID NO: 293001 - RNA, 20 nt, Artificial Sequence
  Synthetic
uccaaguuuccaagugauuc

SEQ ID NO: 293002 - RNA, 21 nt, Artificial Sequence
  Synthetic
uuccaaguuuccaagugauuc

SEQ ID NO: 293003 - RNA, 22 nt, Artificial Sequence
  Synthetic
uuuccaaguuuccaagugauuc

SEQ ID NO: 293004 - RNA, 23 nt, Artificial Sequence
  Synthetic
auuuccaaguuuccaagugauuc

SEQ ID NO: 293005 - RNA, 24 nt, Artificial Sequence
  Synthetic
gauuuccaaguuuccaagugauuc

SEQ ID NO: 293006 - RNA, 18 nt, Artificial Sequence
  Synthetic
uucuuugggcagugauuc

SEQ ID NO: 293007 - RNA, 19 nt, Artificial Sequence
  Synthetic
uuucuuugggcagugauuc

SEQ ID NO: 293008 - RNA, 20 nt, Artificial Sequence
  Synthetic
guuucuuugggcagugauuc

SEQ ID NO: 293009 - RNA, 21 nt, Artificial Sequence
  Synthetic
aguuucuuugggcagugauuc

SEQ ID NO: 293010 - RNA, 22 nt, Artificial Sequence
  Synthetic
uaguuucuuugggcagugauuc

SEQ ID NO: 293011 - RNA, 23 nt, Artificial Sequence
  Synthetic
auaguuucuuugggcagugauuc

SEQ ID NO: 293012 - RNA, 24 nt, Artificial Sequence
  Synthetic
aauaguuucuuugggcagugauuc

SEQ ID NO: 293013 - RNA, 18 nt, Artificial Sequence
  Synthetic
uauauucuauagugauuc

SEQ ID NO: 293014 - RNA, 19 nt, Artificial Sequence
  Synthetic
cuauauucuauagugauuc

SEQ ID NO: 293015 - RNA, 20 nt, Artificial Sequence
  Synthetic
gcuauauucuauagugauuc

SEQ ID NO: 293016 - RNA, 21 nt, Artificial Sequence
  Synthetic
ugcuauauucuauagugauuc

SEQ ID NO: 293017 - RNA, 22 nt, Artificial Sequence
  Synthetic
augcuauauucuauagugauuc

SEQ ID NO: 293018 - RNA, 23 nt, Artificial Sequence
  Synthetic
aaugcuauauucuauagugauuc

SEQ ID NO: 293019 - RNA, 24 nt, Artificial Sequence
  Synthetic
aaaugcuauauucuauagugauuc

SEQ ID NO: 293020 - RNA, 18 nt, Artificial Sequence
  Synthetic
gaguuuaaaucgugauuc

SEQ ID NO: 293021 - RNA, 19 nt, Artificial Sequence
  Synthetic
ugaguuuaaaucgugauuc

SEQ ID NO: 293022 - RNA, 20 nt, Artificial Sequence
  Synthetic
cugaguuuaaaucgugauuc

SEQ ID NO: 293023 - RNA, 21 nt, Artificial Sequence
  Synthetic
ccugaguuuaaaucgugauuc

SEQ ID NO: 293024 - RNA, 22 nt, Artificial Sequence
  Synthetic
gccugaguuuaaaucgugauuc

SEQ ID NO: 293025 - RNA, 23 nt, Artificial Sequence
  Synthetic
ugccugaguuuaaaucgugauuc

SEQ ID NO: 293026 - RNA, 24 nt, Artificial Sequence
  Synthetic
cugccugaguuuaaaucgugauuc

SEQ ID NO: 293027 - RNA, 18 nt, Artificial Sequence
  Synthetic
guacagguuuggugauuc

SEQ ID NO: 293028 - RNA, 19 nt, Artificial Sequence
  Synthetic
gguacagguuuggugauuc

SEQ ID NO: 293029 - RNA, 20 nt, Artificial Sequence
  Synthetic
agguacagguuuggugauuc

SEQ ID NO: 293030 - RNA, 21 nt, Artificial Sequence
  Synthetic
uagguacagguuuggugauuc

SEQ ID NO: 293031 - RNA, 22 nt, Artificial Sequence
  Synthetic
uuagguacagguuuggugauuc

SEQ ID NO: 293032 - RNA, 23 nt, Artificial Sequence
  Synthetic
guuagguacagguuuggugauuc

SEQ ID NO: 293033 - RNA, 24 nt, Artificial Sequence
  Synthetic
uguuagguacagguuuggugauuc

SEQ ID NO: 293034 - RNA, 18 nt, Artificial Sequence
  Synthetic
uauccacugaaaauauuc

SEQ ID NO: 293035 - RNA, 19 nt, Artificial Sequence
  Synthetic
guauccacugaaaauauuc

SEQ ID NO: 293036 - RNA, 20 nt, Artificial Sequence
  Synthetic
aguauccacugaaaauauuc

SEQ ID NO: 293037 - RNA, 21 nt, Artificial Sequence
  Synthetic
uaguauccacugaaaauauuc

SEQ ID NO: 293038 - RNA, 22 nt, Artificial Sequence
  Synthetic
auaguauccacugaaaauauuc

SEQ ID NO: 293039 - RNA, 23 nt, Artificial Sequence
  Synthetic
aauaguauccacugaaaauauuc

SEQ ID NO: 293040 - RNA, 24 nt, Artificial Sequence
  Synthetic
uaauaguauccacugaaaauauuc

SEQ ID NO: 293041 - RNA, 18 nt, Artificial Sequence
  Synthetic
agaauuaaacaaauauuc

SEQ ID NO: 293042 - RNA, 19 nt, Artificial Sequence
  Synthetic
uagaauuaaacaaauauuc

SEQ ID NO: 293043 - RNA, 20 nt, Artificial Sequence
  Synthetic
auagaauuaaacaaauauuc

SEQ ID NO: 293044 - RNA, 21 nt, Artificial Sequence
  Synthetic
aauagaauuaaacaaauauuc

SEQ ID NO: 293045 - RNA, 22 nt, Artificial Sequence
  Synthetic
aaauagaauuaaacaaauauuc

SEQ ID NO: 293046 - RNA, 23 nt, Artificial Sequence
  Synthetic
uaaauagaauuaaacaaauauuc

SEQ ID NO: 293047 - RNA, 24 nt, Artificial Sequence
  Synthetic
auaaauagaauuaaacaaauauuc

SEQ ID NO: 293048 - RNA, 18 nt, Artificial Sequence
  Synthetic
uguacacaacaaauauuc

SEQ ID NO: 293049 - RNA, 19 nt, Artificial Sequence
  Synthetic
uuguacacaacaaauauuc

SEQ ID NO: 293050 - RNA, 20 nt, Artificial Sequence
  Synthetic
auuguacacaacaaauauuc

SEQ ID NO: 293051 - RNA, 21 nt, Artificial Sequence
  Synthetic
aauuguacacaacaaauauuc

SEQ ID NO: 293052 - RNA, 22 nt, Artificial Sequence
  Synthetic
uaauuguacacaacaaauauuc

SEQ ID NO: 293053 - RNA, 23 nt, Artificial Sequence
  Synthetic
guaauuguacacaacaaauauuc

SEQ ID NO: 293054 - RNA, 24 nt, Artificial Sequence
  Synthetic
aguaauuguacacaacaaauauuc

SEQ ID NO: 293055 - RNA, 18 nt, Artificial Sequence
  Synthetic
caaguucagggaauauuc

SEQ ID NO: 293056 - RNA, 19 nt, Artificial Sequence
  Synthetic
acaaguucagggaauauuc

SEQ ID NO: 293057 - RNA, 20 nt, Artificial Sequence
  Synthetic
gacaaguucagggaauauuc

SEQ ID NO: 293058 - RNA, 21 nt, Artificial Sequence
  Synthetic
ggacaaguucagggaauauuc

SEQ ID NO: 293059 - RNA, 22 nt, Artificial Sequence
  Synthetic
cggacaaguucagggaauauuc

SEQ ID NO: 293060 - RNA, 23 nt, Artificial Sequence
  Synthetic
gcggacaaguucagggaauauuc

SEQ ID NO: 293061 - RNA, 24 nt, Artificial Sequence
  Synthetic
ggcggacaaguucagggaauauuc

SEQ ID NO: 293062 - RNA, 18 nt, Artificial Sequence
  Synthetic
acuuccacuguaauauuc

SEQ ID NO: 293063 - RNA, 19 nt, Artificial Sequence
  Synthetic
uacuuccacuguaauauuc

SEQ ID NO: 293064 - RNA, 20 nt, Artificial Sequence
  Synthetic
auacuuccacuguaauauuc

SEQ ID NO: 293065 - RNA, 21 nt, Artificial Sequence
  Synthetic
gauacuuccacuguaauauuc

SEQ ID NO: 293066 - RNA, 22 nt, Artificial Sequence
  Synthetic
ggauacuuccacuguaauauuc

SEQ ID NO: 293067 - RNA, 23 nt, Artificial Sequence
  Synthetic
uggauacuuccacuguaauauuc

SEQ ID NO: 293068 - RNA, 24 nt, Artificial Sequence
  Synthetic
uuggauacuuccacuguaauauuc

SEQ ID NO: 293069 - RNA, 18 nt, Artificial Sequence
  Synthetic
uauaaaugauuaauauuc

SEQ ID NO: 293070 - RNA, 19 nt, Artificial Sequence
  Synthetic
uuauaaaugauuaauauuc

SEQ ID NO: 293071 - RNA, 20 nt, Artificial Sequence
  Synthetic
guuauaaaugauuaauauuc

SEQ ID NO: 293072 - RNA, 21 nt, Artificial Sequence
  Synthetic
cguuauaaaugauuaauauuc

SEQ ID NO: 293073 - RNA, 22 nt, Artificial Sequence
  Synthetic
acguuauaaaugauuaauauuc

SEQ ID NO: 293074 - RNA, 23 nt, Artificial Sequence
  Synthetic
cacguuauaaaugauuaauauuc

SEQ ID NO: 293075 - RNA, 24 nt, Artificial Sequence
  Synthetic
acacguuauaaaugauuaauauuc

SEQ ID NO: 293076 - RNA, 18 nt, Artificial Sequence
  Synthetic
agguggauuuuaauauuc

SEQ ID NO: 293077 - RNA, 19 nt, Artificial Sequence
  Synthetic
uagguggauuuuaauauuc

SEQ ID NO: 293078 - RNA, 20 nt, Artificial Sequence
  Synthetic
auagguggauuuuaauauuc

SEQ ID NO: 293079 - RNA, 21 nt, Artificial Sequence
  Synthetic
aauagguggauuuuaauauuc

SEQ ID NO: 293080 - RNA, 22 nt, Artificial Sequence
  Synthetic
uaauagguggauuuuaauauuc

SEQ ID NO: 293081 - RNA, 23 nt, Artificial Sequence
  Synthetic
auaauagguggauuuuaauauuc

SEQ ID NO: 293082 - RNA, 24 nt, Artificial Sequence
  Synthetic
cauaauagguggauuuuaauauuc

SEQ ID NO: 293083 - RNA, 18 nt, Artificial Sequence
  Synthetic
agacaaguuaacauauuc

SEQ ID NO: 293084 - RNA, 19 nt, Artificial Sequence
  Synthetic
aagacaaguuaacauauuc

SEQ ID NO: 293085 - RNA, 20 nt, Artificial Sequence
  Synthetic
aaagacaaguuaacauauuc

SEQ ID NO: 293086 - RNA, 21 nt, Artificial Sequence
  Synthetic
uaaagacaaguuaacauauuc

SEQ ID NO: 293087 - RNA, 22 nt, Artificial Sequence
  Synthetic
guaaagacaaguuaacauauuc

SEQ ID NO: 293088 - RNA, 23 nt, Artificial Sequence
  Synthetic
uguaaagacaaguuaacauauuc

SEQ ID NO: 293089 - RNA, 24 nt, Artificial Sequence
  Synthetic
guguaaagacaaguuaacauauuc

SEQ ID NO: 293090 - RNA, 18 nt, Artificial Sequence
  Synthetic
cuggaccaauacauauuc

SEQ ID NO: 293091 - RNA, 19 nt, Artificial Sequence
  Synthetic
acuggaccaauacauauuc

SEQ ID NO: 293092 - RNA, 20 nt, Artificial Sequence
  Synthetic
cacuggaccaauacauauuc

SEQ ID NO: 293093 - RNA, 21 nt, Artificial Sequence
  Synthetic
ccacuggaccaauacauauuc

SEQ ID NO: 293094 - RNA, 22 nt, Artificial Sequence
  Synthetic
cccacuggaccaauacauauuc

SEQ ID NO: 293095 - RNA, 23 nt, Artificial Sequence
  Synthetic
gcccacuggaccaauacauauuc

SEQ ID NO: 293096 - RNA, 24 nt, Artificial Sequence
  Synthetic
ugcccacuggaccaauacauauuc

SEQ ID NO: 293097 - RNA, 18 nt, Artificial Sequence
  Synthetic
uaauaauuguacauauuc

SEQ ID NO: 293098 - RNA, 19 nt, Artificial Sequence
  Synthetic
auaauaauuguacauauuc

SEQ ID NO: 293099 - RNA, 20 nt, Artificial Sequence
  Synthetic
aauaauaauuguacauauuc

SEQ ID NO: 293100 - RNA, 21 nt, Artificial Sequence
  Synthetic
aaauaauaauuguacauauuc

SEQ ID NO: 293101 - RNA, 22 nt, Artificial Sequence
  Synthetic
caaauaauaauuguacauauuc

SEQ ID NO: 293102 - RNA, 23 nt, Artificial Sequence
  Synthetic
acaaauaauaauuguacauauuc

SEQ ID NO: 293103 - RNA, 24 nt, Artificial Sequence
  Synthetic
gacaaauaauaauuguacauauuc

SEQ ID NO: 293104 - RNA, 18 nt, Artificial Sequence
  Synthetic
agaaucaaauccauauuc

SEQ ID NO: 293105 - RNA, 19 nt, Artificial Sequence
  Synthetic
gagaaucaaauccauauuc

SEQ ID NO: 293106 - RNA, 20 nt, Artificial Sequence
  Synthetic
agagaaucaaauccauauuc

SEQ ID NO: 293107 - RNA, 21 nt, Artificial Sequence
  Synthetic
cagagaaucaaauccauauuc

SEQ ID NO: 293108 - RNA, 22 nt, Artificial Sequence
  Synthetic
gcagagaaucaaauccauauuc

SEQ ID NO: 293109 - RNA, 23 nt, Artificial Sequence
  Synthetic
agcagagaaucaaauccauauuc

SEQ ID NO: 293110 - RNA, 24 nt, Artificial Sequence
  Synthetic
aagcagagaaucaaauccauauuc

SEQ ID NO: 293111 - RNA, 18 nt, Artificial Sequence
  Synthetic
cuugaccaauccauauuc

SEQ ID NO: 293112 - RNA, 19 nt, Artificial Sequence
  Synthetic
acuugaccaauccauauuc

SEQ ID NO: 293113 - RNA, 20 nt, Artificial Sequence
  Synthetic
gacuugaccaauccauauuc

SEQ ID NO: 293114 - RNA, 21 nt, Artificial Sequence
  Synthetic
ugacuugaccaauccauauuc

SEQ ID NO: 293115 - RNA, 22 nt, Artificial Sequence
  Synthetic
gugacuugaccaauccauauuc

SEQ ID NO: 293116 - RNA, 23 nt, Artificial Sequence
  Synthetic
agugacuugaccaauccauauuc

SEQ ID NO: 293117 - RNA, 24 nt, Artificial Sequence
  Synthetic
aagugacuugaccaauccauauuc

SEQ ID NO: 293118 - RNA, 18 nt, Artificial Sequence
  Synthetic
aaagcucuagucauauuc

SEQ ID NO: 293119 - RNA, 19 nt, Artificial Sequence
  Synthetic
gaaagcucuagucauauuc

SEQ ID NO: 293120 - RNA, 20 nt, Artificial Sequence
  Synthetic
ugaaagcucuagucauauuc

SEQ ID NO: 293121 - RNA, 21 nt, Artificial Sequence
  Synthetic
uugaaagcucuagucauauuc

SEQ ID NO: 293122 - RNA, 22 nt, Artificial Sequence
  Synthetic
cuugaaagcucuagucauauuc

SEQ ID NO: 293123 - RNA, 23 nt, Artificial Sequence
  Synthetic
ucuugaaagcucuagucauauuc

SEQ ID NO: 293124 - RNA, 24 nt, Artificial Sequence
  Synthetic
uucuugaaagcucuagucauauuc

SEQ ID NO: 293125 - RNA, 18 nt, Artificial Sequence
  Synthetic
uuaguggacuucauauuc

SEQ ID NO: 293126 - RNA, 19 nt, Artificial Sequence
  Synthetic
auuaguggacuucauauuc

SEQ ID NO: 293127 - RNA, 20 nt, Artificial Sequence
  Synthetic
aauuaguggacuucauauuc

SEQ ID NO: 293128 - RNA, 21 nt, Artificial Sequence
  Synthetic
gaauuaguggacuucauauuc

SEQ ID NO: 293129 - RNA, 22 nt, Artificial Sequence
  Synthetic
agaauuaguggacuucauauuc

SEQ ID NO: 293130 - RNA, 23 nt, Artificial Sequence
  Synthetic
aagaauuaguggacuucauauuc

SEQ ID NO: 293131 - RNA, 24 nt, Artificial Sequence
  Synthetic
aaagaauuaguggacuucauauuc

SEQ ID NO: 293132 - RNA, 18 nt, Artificial Sequence
  Synthetic
gagccaggcuucauauuc

SEQ ID NO: 293133 - RNA, 19 nt, Artificial Sequence
  Synthetic
ugagccaggcuucauauuc

SEQ ID NO: 293134 - RNA, 20 nt, Artificial Sequence
  Synthetic
augagccaggcuucauauuc

SEQ ID NO: 293135 - RNA, 21 nt, Artificial Sequence
  Synthetic
uaugagccaggcuucauauuc

SEQ ID NO: 293136 - RNA, 22 nt, Artificial Sequence
  Synthetic
uuaugagccaggcuucauauuc

SEQ ID NO: 293137 - RNA, 23 nt, Artificial Sequence
  Synthetic
guuaugagccaggcuucauauuc

SEQ ID NO: 293138 - RNA, 24 nt, Artificial Sequence
  Synthetic
gguuaugagccaggcuucauauuc

SEQ ID NO: 293139 - RNA, 18 nt, Artificial Sequence
  Synthetic
augcauauguucauauuc

SEQ ID NO: 293140 - RNA, 19 nt, Artificial Sequence
  Synthetic
aaugcauauguucauauuc

SEQ ID NO: 293141 - RNA, 20 nt, Artificial Sequence
  Synthetic
aaaugcauauguucauauuc

SEQ ID NO: 293142 - RNA, 21 nt, Artificial Sequence
  Synthetic
gaaaugcauauguucauauuc

SEQ ID NO: 293143 - RNA, 22 nt, Artificial Sequence
  Synthetic
agaaaugcauauguucauauuc

SEQ ID NO: 293144 - RNA, 23 nt, Artificial Sequence
  Synthetic
cagaaaugcauauguucauauuc

SEQ ID NO: 293145 - RNA, 24 nt, Artificial Sequence
  Synthetic
acagaaaugcauauguucauauuc

SEQ ID NO: 293146 - RNA, 18 nt, Artificial Sequence
  Synthetic
ugcuuuuugaagauauuc

SEQ ID NO: 293147 - RNA, 19 nt, Artificial Sequence
  Synthetic
gugcuuuuugaagauauuc

SEQ ID NO: 293148 - RNA, 20 nt, Artificial Sequence
  Synthetic
agugcuuuuugaagauauuc

SEQ ID NO: 293149 - RNA, 21 nt, Artificial Sequence
  Synthetic
uagugcuuuuugaagauauuc

SEQ ID NO: 293150 - RNA, 22 nt, Artificial Sequence
  Synthetic
uuagugcuuuuugaagauauuc

SEQ ID NO: 293151 - RNA, 23 nt, Artificial Sequence
  Synthetic
auuagugcuuuuugaagauauuc

SEQ ID NO: 293152 - RNA, 24 nt, Artificial Sequence
  Synthetic
aauuagugcuuuuugaagauauuc

SEQ ID NO: 293153 - RNA, 18 nt, Artificial Sequence
  Synthetic
uguccagcuaagauauuc

SEQ ID NO: 293154 - RNA, 19 nt, Artificial Sequence
  Synthetic
auguccagcuaagauauuc

SEQ ID NO: 293155 - RNA, 20 nt, Artificial Sequence
  Synthetic
uauguccagcuaagauauuc

SEQ ID NO: 293156 - RNA, 21 nt, Artificial Sequence
  Synthetic
guauguccagcuaagauauuc

SEQ ID NO: 293157 - RNA, 22 nt, Artificial Sequence
  Synthetic
cguauguccagcuaagauauuc

SEQ ID NO: 293158 - RNA, 23 nt, Artificial Sequence
  Synthetic
acguauguccagcuaagauauuc

SEQ ID NO: 293159 - RNA, 24 nt, Artificial Sequence
  Synthetic
cacguauguccagcuaagauauuc

SEQ ID NO: 293160 - RNA, 18 nt, Artificial Sequence
  Synthetic
gaugcuagugagauauuc

SEQ ID NO: 293161 - RNA, 19 nt, Artificial Sequence
  Synthetic
ggaugcuagugagauauuc

SEQ ID NO: 293162 - RNA, 20 nt, Artificial Sequence
  Synthetic
uggaugcuagugagauauuc

SEQ ID NO: 293163 - RNA, 21 nt, Artificial Sequence
  Synthetic
auggaugcuagugagauauuc

SEQ ID NO: 293164 - RNA, 22 nt, Artificial Sequence
  Synthetic
aauggaugcuagugagauauuc

SEQ ID NO: 293165 - RNA, 23 nt, Artificial Sequence
  Synthetic
gaauggaugcuagugagauauuc

SEQ ID NO: 293166 - RNA, 24 nt, Artificial Sequence
  Synthetic
agaauggaugcuagugagauauuc

SEQ ID NO: 293167 - RNA, 18 nt, Artificial Sequence
  Synthetic
uacagauacuugauauuc

SEQ ID NO: 293168 - RNA, 19 nt, Artificial Sequence
  Synthetic
auacagauacuugauauuc

SEQ ID NO: 293169 - RNA, 20 nt, Artificial Sequence
  Synthetic
uauacagauacuugauauuc

SEQ ID NO: 293170 - RNA, 21 nt, Artificial Sequence
  Synthetic
auauacagauacuugauauuc

SEQ ID NO: 293171 - RNA, 22 nt, Artificial Sequence
  Synthetic
uauauacagauacuugauauuc

SEQ ID NO: 293172 - RNA, 23 nt, Artificial Sequence
  Synthetic
uuauauacagauacuugauauuc

SEQ ID NO: 293173 - RNA, 24 nt, Artificial Sequence
  Synthetic
cuuauauacagauacuugauauuc

SEQ ID NO: 293174 - RNA, 18 nt, Artificial Sequence
  Synthetic
ucaaaaacuuugauauuc

SEQ ID NO: 293175 - RNA, 19 nt, Artificial Sequence
  Synthetic
cucaaaaacuuugauauuc

SEQ ID NO: 293176 - RNA, 20 nt, Artificial Sequence
  Synthetic
acucaaaaacuuugauauuc

SEQ ID NO: 293177 - RNA, 21 nt, Artificial Sequence
  Synthetic
aacucaaaaacuuugauauuc

SEQ ID NO: 293178 - RNA, 22 nt, Artificial Sequence
  Synthetic
gaacucaaaaacuuugauauuc

SEQ ID NO: 293179 - RNA, 23 nt, Artificial Sequence
  Synthetic
ugaacucaaaaacuuugauauuc

SEQ ID NO: 293180 - RNA, 24 nt, Artificial Sequence
  Synthetic
augaacucaaaaacuuugauauuc

SEQ ID NO: 293181 - RNA, 18 nt, Artificial Sequence
  Synthetic
uuagaaggccauauauuc

SEQ ID NO: 293182 - RNA, 19 nt, Artificial Sequence
  Synthetic
uuuagaaggccauauauuc

SEQ ID NO: 293183 - RNA, 20 nt, Artificial Sequence
  Synthetic
uuuuagaaggccauauauuc

SEQ ID NO: 293184 - RNA, 21 nt, Artificial Sequence
  Synthetic
guuuuagaaggccauauauuc

SEQ ID NO: 293185 - RNA, 22 nt, Artificial Sequence
  Synthetic
uguuuuagaaggccauauauuc

SEQ ID NO: 293186 - RNA, 23 nt, Artificial Sequence
  Synthetic
guguuuuagaaggccauauauuc

SEQ ID NO: 293187 - RNA, 24 nt, Artificial Sequence
  Synthetic
gguguuuuagaaggccauauauuc

SEQ ID NO: 293188 - RNA, 18 nt, Artificial Sequence
  Synthetic
gguaggggucauauauuc

SEQ ID NO: 293189 - RNA, 19 nt, Artificial Sequence
  Synthetic
agguaggggucauauauuc

SEQ ID NO: 293190 - RNA, 20 nt, Artificial Sequence
  Synthetic
uagguaggggucauauauuc

SEQ ID NO: 293191 - RNA, 21 nt, Artificial Sequence
  Synthetic
guagguaggggucauauauuc

SEQ ID NO: 293192 - RNA, 22 nt, Artificial Sequence
  Synthetic
uguagguaggggucauauauuc

SEQ ID NO: 293193 - RNA, 23 nt, Artificial Sequence
  Synthetic
auguagguaggggucauauauuc

SEQ ID NO: 293194 - RNA, 24 nt, Artificial Sequence
  Synthetic
uauguagguaggggucauauauuc

SEQ ID NO: 293195 - RNA, 18 nt, Artificial Sequence
  Synthetic
aguuaagaauauauauuc

SEQ ID NO: 293196 - RNA, 19 nt, Artificial Sequence
  Synthetic
uaguuaagaauauauauuc

SEQ ID NO: 293197 - RNA, 20 nt, Artificial Sequence
  Synthetic
auaguuaagaauauauauuc

SEQ ID NO: 293198 - RNA, 21 nt, Artificial Sequence
  Synthetic
aauaguuaagaauauauauuc

SEQ ID NO: 293199 - RNA, 22 nt, Artificial Sequence
  Synthetic
uaauaguuaagaauauauauuc

SEQ ID NO: 293200 - RNA, 23 nt, Artificial Sequence
  Synthetic
auaauaguuaagaauauauauuc

SEQ ID NO: 293201 - RNA, 24 nt, Artificial Sequence
  Synthetic
cauaauaguuaagaauauauauuc

SEQ ID NO: 293202 - RNA, 18 nt, Artificial Sequence
  Synthetic
aaaauccuuacuauauuc

SEQ ID NO: 293203 - RNA, 19 nt, Artificial Sequence
  Synthetic
uaaaauccuuacuauauuc

SEQ ID NO: 293204 - RNA, 20 nt, Artificial Sequence
  Synthetic
cuaaaauccuuacuauauuc

SEQ ID NO: 293205 - RNA, 21 nt, Artificial Sequence
  Synthetic
acuaaaauccuuacuauauuc

SEQ ID NO: 293206 - RNA, 22 nt, Artificial Sequence
  Synthetic
aacuaaaauccuuacuauauuc

SEQ ID NO: 293207 - RNA, 23 nt, Artificial Sequence
  Synthetic
uaacuaaaauccuuacuauauuc

SEQ ID NO: 293208 - RNA, 24 nt, Artificial Sequence
  Synthetic
guaacuaaaauccuuacuauauuc

SEQ ID NO: 293209 - RNA, 18 nt, Artificial Sequence
  Synthetic
uacaacucaccuauauuc

SEQ ID NO: 293210 - RNA, 19 nt, Artificial Sequence
  Synthetic
auacaacucaccuauauuc

SEQ ID NO: 293211 - RNA, 20 nt, Artificial Sequence
  Synthetic
cauacaacucaccuauauuc

SEQ ID NO: 293212 - RNA, 21 nt, Artificial Sequence
  Synthetic
ccauacaacucaccuauauuc

SEQ ID NO: 293213 - RNA, 22 nt, Artificial Sequence
  Synthetic
uccauacaacucaccuauauuc

SEQ ID NO: 293214 - RNA, 23 nt, Artificial Sequence
  Synthetic
uuccauacaacucaccuauauuc

SEQ ID NO: 293215 - RNA, 24 nt, Artificial Sequence
  Synthetic
guuccauacaacucaccuauauuc

SEQ ID NO: 293216 - RNA, 18 nt, Artificial Sequence
  Synthetic
ucucauaaagcuauauuc

SEQ ID NO: 293217 - RNA, 19 nt, Artificial Sequence
  Synthetic
gucucauaaagcuauauuc

SEQ ID NO: 293218 - RNA, 20 nt, Artificial Sequence
  Synthetic
ugucucauaaagcuauauuc

SEQ ID NO: 293219 - RNA, 21 nt, Artificial Sequence
  Synthetic
uugucucauaaagcuauauuc

SEQ ID NO: 293220 - RNA, 22 nt, Artificial Sequence
  Synthetic
auugucucauaaagcuauauuc

SEQ ID NO: 293221 - RNA, 23 nt, Artificial Sequence
  Synthetic
cauugucucauaaagcuauauuc

SEQ ID NO: 293222 - RNA, 24 nt, Artificial Sequence
  Synthetic
ccauugucucauaaagcuauauuc

SEQ ID NO: 293223 - RNA, 18 nt, Artificial Sequence
  Synthetic
cucauaaagcuuauauuc

SEQ ID NO: 293224 - RNA, 19 nt, Artificial Sequence
  Synthetic
ccucauaaagcuuauauuc

SEQ ID NO: 293225 - RNA, 20 nt, Artificial Sequence
  Synthetic
cccucauaaagcuuauauuc

SEQ ID NO: 293226 - RNA, 21 nt, Artificial Sequence
  Synthetic
acccucauaaagcuuauauuc

SEQ ID NO: 293227 - RNA, 22 nt, Artificial Sequence
  Synthetic
uacccucauaaagcuuauauuc

SEQ ID NO: 293228 - RNA, 23 nt, Artificial Sequence
  Synthetic
cuacccucauaaagcuuauauuc

SEQ ID NO: 293229 - RNA, 24 nt, Artificial Sequence
  Synthetic
ccuacccucauaaagcuuauauuc

SEQ ID NO: 293230 - RNA, 18 nt, Artificial Sequence
  Synthetic
cuuugcauucuuauauuc

SEQ ID NO: 293231 - RNA, 19 nt, Artificial Sequence
  Synthetic
acuuugcauucuuauauuc

SEQ ID NO: 293232 - RNA, 20 nt, Artificial Sequence
  Synthetic
uacuuugcauucuuauauuc

SEQ ID NO: 293233 - RNA, 21 nt, Artificial Sequence
  Synthetic
uuacuuugcauucuuauauuc

SEQ ID NO: 293234 - RNA, 22 nt, Artificial Sequence
  Synthetic
uuuacuuugcauucuuauauuc

SEQ ID NO: 293235 - RNA, 23 nt, Artificial Sequence
  Synthetic
uuuuacuuugcauucuuauauuc

SEQ ID NO: 293236 - RNA, 24 nt, Artificial Sequence
  Synthetic
uuuuuacuuugcauucuuauauuc

SEQ ID NO: 293237 - RNA, 18 nt, Artificial Sequence
  Synthetic
uuucucucauuuauauuc

SEQ ID NO: 293238 - RNA, 19 nt, Artificial Sequence
  Synthetic
uuuucucucauuuauauuc

SEQ ID NO: 293239 - RNA, 20 nt, Artificial Sequence
  Synthetic
auuuucucucauuuauauuc

SEQ ID NO: 293240 - RNA, 21 nt, Artificial Sequence
  Synthetic
gauuuucucucauuuauauuc

SEQ ID NO: 293241 - RNA, 22 nt, Artificial Sequence
  Synthetic
ggauuuucucucauuuauauuc

SEQ ID NO: 293242 - RNA, 23 nt, Artificial Sequence
  Synthetic
aggauuuucucucauuuauauuc

SEQ ID NO: 293243 - RNA, 24 nt, Artificial Sequence
  Synthetic
caggauuuucucucauuuauauuc

SEQ ID NO: 293244 - RNA, 18 nt, Artificial Sequence
  Synthetic
uaagauaaggaacuauuc

SEQ ID NO: 293245 - RNA, 19 nt, Artificial Sequence
  Synthetic
auaagauaaggaacuauuc

SEQ ID NO: 293246 - RNA, 20 nt, Artificial Sequence
  Synthetic
gauaagauaaggaacuauuc

SEQ ID NO: 293247 - RNA, 21 nt, Artificial Sequence
  Synthetic
agauaagauaaggaacuauuc

SEQ ID NO: 293248 - RNA, 22 nt, Artificial Sequence
  Synthetic
cagauaagauaaggaacuauuc

SEQ ID NO: 293249 - RNA, 23 nt, Artificial Sequence
  Synthetic
ucagauaagauaaggaacuauuc

SEQ ID NO: 293250 - RNA, 24 nt, Artificial Sequence
  Synthetic
uucagauaagauaaggaacuauuc

SEQ ID NO: 293251 - RNA, 18 nt, Artificial Sequence
  Synthetic
agggacaugugacuauuc

SEQ ID NO: 293252 - RNA, 19 nt, Artificial Sequence
  Synthetic
cagggacaugugacuauuc

SEQ ID NO: 293253 - RNA, 20 nt, Artificial Sequence
  Synthetic
ucagggacaugugacuauuc

SEQ ID NO: 293254 - RNA, 21 nt, Artificial Sequence
  Synthetic
uucagggacaugugacuauuc

SEQ ID NO: 293255 - RNA, 22 nt, Artificial Sequence
  Synthetic
uuucagggacaugugacuauuc

SEQ ID NO: 293256 - RNA, 23 nt, Artificial Sequence
  Synthetic
guuucagggacaugugacuauuc

SEQ ID NO: 293257 - RNA, 24 nt, Artificial Sequence
  Synthetic
gguuucagggacaugugacuauuc

SEQ ID NO: 293258 - RNA, 18 nt, Artificial Sequence
  Synthetic
cccgaaauauuccuauuc

SEQ ID NO: 293259 - RNA, 19 nt, Artificial Sequence
  Synthetic
ucccgaaauauuccuauuc

SEQ ID NO: 293260 - RNA, 20 nt, Artificial Sequence
  Synthetic
cucccgaaauauuccuauuc

SEQ ID NO: 293261 - RNA, 21 nt, Artificial Sequence
  Synthetic
acucccgaaauauuccuauuc

SEQ ID NO: 293262 - RNA, 22 nt, Artificial Sequence
  Synthetic
uacucccgaaauauuccuauuc

SEQ ID NO: 293263 - RNA, 23 nt, Artificial Sequence
  Synthetic
uuacucccgaaauauuccuauuc

SEQ ID NO: 293264 - RNA, 24 nt, Artificial Sequence
  Synthetic
uuuacucccgaaauauuccuauuc

SEQ ID NO: 293265 - RNA, 18 nt, Artificial Sequence
  Synthetic
uuaauuuacuuccuauuc

SEQ ID NO: 293266 - RNA, 19 nt, Artificial Sequence
  Synthetic
auuaauuuacuuccuauuc

SEQ ID NO: 293267 - RNA, 20 nt, Artificial Sequence
  Synthetic
aauuaauuuacuuccuauuc

SEQ ID NO: 293268 - RNA, 21 nt, Artificial Sequence
  Synthetic
aaauuaauuuacuuccuauuc

SEQ ID NO: 293269 - RNA, 22 nt, Artificial Sequence
  Synthetic
caaauuaauuuacuuccuauuc

SEQ ID NO: 293270 - RNA, 23 nt, Artificial Sequence
  Synthetic
ucaaauuaauuuacuuccuauuc

SEQ ID NO: 293271 - RNA, 24 nt, Artificial Sequence
  Synthetic
uucaaauuaauuuacuuccuauuc

SEQ ID NO: 293272 - RNA, 18 nt, Artificial Sequence
  Synthetic
gucuccuuacuucuauuc

SEQ ID NO: 293273 - RNA, 19 nt, Artificial Sequence
  Synthetic
ggucuccuuacuucuauuc

SEQ ID NO: 293274 - RNA, 20 nt, Artificial Sequence
  Synthetic
uggucuccuuacuucuauuc

SEQ ID NO: 293275 - RNA, 21 nt, Artificial Sequence
  Synthetic
uuggucuccuuacuucuauuc

SEQ ID NO: 293276 - RNA, 22 nt, Artificial Sequence
  Synthetic
cuuggucuccuuacuucuauuc

SEQ ID NO: 293277 - RNA, 23 nt, Artificial Sequence
  Synthetic
gcuuggucuccuuacuucuauuc

SEQ ID NO: 293278 - RNA, 24 nt, Artificial Sequence
  Synthetic
ugcuuggucuccuuacuucuauuc

SEQ ID NO: 293279 - RNA, 18 nt, Artificial Sequence
  Synthetic
uuguuucaccuucuauuc

SEQ ID NO: 293280 - RNA, 19 nt, Artificial Sequence
  Synthetic
cuuguuucaccuucuauuc

SEQ ID NO: 293281 - RNA, 20 nt, Artificial Sequence
  Synthetic
gcuuguuucaccuucuauuc

SEQ ID NO: 293282 - RNA, 21 nt, Artificial Sequence
  Synthetic
ugcuuguuucaccuucuauuc

SEQ ID NO: 293283 - RNA, 22 nt, Artificial Sequence
  Synthetic
uugcuuguuucaccuucuauuc

SEQ ID NO: 293284 - RNA, 23 nt, Artificial Sequence
  Synthetic
cuugcuuguuucaccuucuauuc

SEQ ID NO: 293285 - RNA, 24 nt, Artificial Sequence
  Synthetic
acuugcuuguuucaccuucuauuc

SEQ ID NO: 293286 - RNA, 18 nt, Artificial Sequence
  Synthetic
acaaucagauuucuauuc

SEQ ID NO: 293287 - RNA, 19 nt, Artificial Sequence
  Synthetic
aacaaucagauuucuauuc

SEQ ID NO: 293288 - RNA, 20 nt, Artificial Sequence
  Synthetic
gaacaaucagauuucuauuc

SEQ ID NO: 293289 - RNA, 21 nt, Artificial Sequence
  Synthetic
ugaacaaucagauuucuauuc

SEQ ID NO: 293290 - RNA, 22 nt, Artificial Sequence
  Synthetic
cugaacaaucagauuucuauuc

SEQ ID NO: 293291 - RNA, 23 nt, Artificial Sequence
  Synthetic
gcugaacaaucagauuucuauuc

SEQ ID NO: 293292 - RNA, 24 nt, Artificial Sequence
  Synthetic
agcugaacaaucagauuucuauuc

SEQ ID NO: 293293 - RNA, 18 nt, Artificial Sequence
  Synthetic
aaaguuguagaaguauuc

SEQ ID NO: 293294 - RNA, 19 nt, Artificial Sequence
  Synthetic
uaaaguuguagaaguauuc

SEQ ID NO: 293295 - RNA, 20 nt, Artificial Sequence
  Synthetic
guaaaguuguagaaguauuc

SEQ ID NO: 293296 - RNA, 21 nt, Artificial Sequence
  Synthetic
uguaaaguuguagaaguauuc

SEQ ID NO: 293297 - RNA, 22 nt, Artificial Sequence
  Synthetic
uuguaaaguuguagaaguauuc

SEQ ID NO: 293298 - RNA, 23 nt, Artificial Sequence
  Synthetic
cuuguaaaguuguagaaguauuc

SEQ ID NO: 293299 - RNA, 24 nt, Artificial Sequence
  Synthetic
ccuuguaaaguuguagaaguauuc

SEQ ID NO: 293300 - RNA, 18 nt, Artificial Sequence
  Synthetic
gcacuuuucacaguauuc

SEQ ID NO: 293301 - RNA, 19 nt, Artificial Sequence
  Synthetic
ggcacuuuucacaguauuc

SEQ ID NO: 293302 - RNA, 20 nt, Artificial Sequence
  Synthetic
uggcacuuuucacaguauuc

SEQ ID NO: 293303 - RNA, 21 nt, Artificial Sequence
  Synthetic
uuggcacuuuucacaguauuc

SEQ ID NO: 293304 - RNA, 22 nt, Artificial Sequence
  Synthetic
uuuggcacuuuucacaguauuc

SEQ ID NO: 293305 - RNA, 23 nt, Artificial Sequence
  Synthetic
cuuuggcacuuuucacaguauuc

SEQ ID NO: 293306 - RNA, 24 nt, Artificial Sequence
  Synthetic
acuuuggcacuuuucacaguauuc

SEQ ID NO: 293307 - RNA, 18 nt, Artificial Sequence
  Synthetic
uuuucuucuggaguauuc

SEQ ID NO: 293308 - RNA, 19 nt, Artificial Sequence
  Synthetic
cuuuucuucuggaguauuc

SEQ ID NO: 293309 - RNA, 20 nt, Artificial Sequence
  Synthetic
ccuuuucuucuggaguauuc

SEQ ID NO: 293310 - RNA, 21 nt, Artificial Sequence
  Synthetic
uccuuuucuucuggaguauuc

SEQ ID NO: 293311 - RNA, 22 nt, Artificial Sequence
  Synthetic
cuccuuuucuucuggaguauuc

SEQ ID NO: 293312 - RNA, 23 nt, Artificial Sequence
  Synthetic
acuccuuuucuucuggaguauuc

SEQ ID NO: 293313 - RNA, 24 nt, Artificial Sequence
  Synthetic
cacuccuuuucuucuggaguauuc

SEQ ID NO: 293314 - RNA, 18 nt, Artificial Sequence
  Synthetic
caacucaaagagguauuc

SEQ ID NO: 293315 - RNA, 19 nt, Artificial Sequence
  Synthetic
acaacucaaagagguauuc

SEQ ID NO: 293316 - RNA, 20 nt, Artificial Sequence
  Synthetic
uacaacucaaagagguauuc

SEQ ID NO: 293317 - RNA, 21 nt, Artificial Sequence
  Synthetic
uuacaacucaaagagguauuc

SEQ ID NO: 293318 - RNA, 22 nt, Artificial Sequence
  Synthetic
cuuacaacucaaagagguauuc

SEQ ID NO: 293319 - RNA, 23 nt, Artificial Sequence
  Synthetic
ccuuacaacucaaagagguauuc

SEQ ID NO: 293320 - RNA, 24 nt, Artificial Sequence
  Synthetic
accuuacaacucaaagagguauuc

SEQ ID NO: 293321 - RNA, 18 nt, Artificial Sequence
  Synthetic
caucagugugguguauuc

SEQ ID NO: 293322 - RNA, 19 nt, Artificial Sequence
  Synthetic
ccaucagugugguguauuc

SEQ ID NO: 293323 - RNA, 20 nt, Artificial Sequence
  Synthetic
accaucagugugguguauuc

SEQ ID NO: 293324 - RNA, 21 nt, Artificial Sequence
  Synthetic
gaccaucagugugguguauuc

SEQ ID NO: 293325 - RNA, 22 nt, Artificial Sequence
  Synthetic
ggaccaucagugugguguauuc

SEQ ID NO: 293326 - RNA, 23 nt, Artificial Sequence
  Synthetic
aggaccaucagugugguguauuc

SEQ ID NO: 293327 - RNA, 24 nt, Artificial Sequence
  Synthetic
caggaccaucagugugguguauuc

SEQ ID NO: 293328 - RNA, 18 nt, Artificial Sequence
  Synthetic
uaacaaugcauuguauuc

SEQ ID NO: 293329 - RNA, 19 nt, Artificial Sequence
  Synthetic
auaacaaugcauuguauuc

SEQ ID NO: 293330 - RNA, 20 nt, Artificial Sequence
  Synthetic
aauaacaaugcauuguauuc

SEQ ID NO: 293331 - RNA, 21 nt, Artificial Sequence
  Synthetic
uaauaacaaugcauuguauuc

SEQ ID NO: 293332 - RNA, 22 nt, Artificial Sequence
  Synthetic
uuaauaacaaugcauuguauuc

SEQ ID NO: 293333 - RNA, 23 nt, Artificial Sequence
  Synthetic
guuaauaacaaugcauuguauuc

SEQ ID NO: 293334 - RNA, 24 nt, Artificial Sequence
  Synthetic
aguuaauaacaaugcauuguauuc

SEQ ID NO: 293335 - RNA, 18 nt, Artificial Sequence
  Synthetic
uuuacuggaguuguauuc

SEQ ID NO: 293336 - RNA, 19 nt, Artificial Sequence
  Synthetic
auuuacuggaguuguauuc

SEQ ID NO: 293337 - RNA, 20 nt, Artificial Sequence
  Synthetic
uauuuacuggaguuguauuc

SEQ ID NO: 293338 - RNA, 21 nt, Artificial Sequence
  Synthetic
guauuuacuggaguuguauuc

SEQ ID NO: 293339 - RNA, 22 nt, Artificial Sequence
  Synthetic
uguauuuacuggaguuguauuc

SEQ ID NO: 293340 - RNA, 23 nt, Artificial Sequence
  Synthetic
guguauuuacuggaguuguauuc

SEQ ID NO: 293341 - RNA, 24 nt, Artificial Sequence
  Synthetic
gguguauuuacuggaguuguauuc

SEQ ID NO: 293342 - RNA, 18 nt, Artificial Sequence
  Synthetic
acuucugaauuuguauuc

SEQ ID NO: 293343 - RNA, 19 nt, Artificial Sequence
  Synthetic
uacuucugaauuuguauuc

SEQ ID NO: 293344 - RNA, 20 nt, Artificial Sequence
  Synthetic
uuacuucugaauuuguauuc

SEQ ID NO: 293345 - RNA, 21 nt, Artificial Sequence
  Synthetic
uuuacuucugaauuuguauuc

SEQ ID NO: 293346 - RNA, 22 nt, Artificial Sequence
  Synthetic
auuuacuucugaauuuguauuc

SEQ ID NO: 293347 - RNA, 23 nt, Artificial Sequence
  Synthetic
uauuuacuucugaauuuguauuc

SEQ ID NO: 293348 - RNA, 24 nt, Artificial Sequence
  Synthetic
uuauuuacuucugaauuuguauuc

SEQ ID NO: 293349 - RNA, 18 nt, Artificial Sequence
  Synthetic
uguuuuuauuuuguauuc

SEQ ID NO: 293350 - RNA, 19 nt, Artificial Sequence
  Synthetic
uuguuuuuauuuuguauuc

SEQ ID NO: 293351 - RNA, 20 nt, Artificial Sequence
  Synthetic
uuuguuuuuauuuuguauuc

SEQ ID NO: 293352 - RNA, 21 nt, Artificial Sequence
  Synthetic
uuuuguuuuuauuuuguauuc

SEQ ID NO: 293353 - RNA, 22 nt, Artificial Sequence
  Synthetic
auuuuguuuuuauuuuguauuc

SEQ ID NO: 293354 - RNA, 23 nt, Artificial Sequence
  Synthetic
aauuuuguuuuuauuuuguauuc

SEQ ID NO: 293355 - RNA, 24 nt, Artificial Sequence
  Synthetic
aaauuuuguuuuuauuuuguauuc

SEQ ID NO: 293356 - RNA, 18 nt, Artificial Sequence
  Synthetic
cuugucacguaauuauuc

SEQ ID NO: 293357 - RNA, 19 nt, Artificial Sequence
  Synthetic
ucuugucacguaauuauuc

SEQ ID NO: 293358 - RNA, 20 nt, Artificial Sequence
  Synthetic
cucuugucacguaauuauuc

SEQ ID NO: 293359 - RNA, 21 nt, Artificial Sequence
  Synthetic
gcucuugucacguaauuauuc

SEQ ID NO: 293360 - RNA, 22 nt, Artificial Sequence
  Synthetic
agcucuugucacguaauuauuc

SEQ ID NO: 293361 - RNA, 23 nt, Artificial Sequence
  Synthetic
uagcucuugucacguaauuauuc

SEQ ID NO: 293362 - RNA, 24 nt, Artificial Sequence
  Synthetic
cuagcucuugucacguaauuauuc

SEQ ID NO: 293363 - RNA, 18 nt, Artificial Sequence
  Synthetic
acugaguuuuaauuauuc

SEQ ID NO: 293364 - RNA, 19 nt, Artificial Sequence
  Synthetic
uacugaguuuuaauuauuc

SEQ ID NO: 293365 - RNA, 20 nt, Artificial Sequence
  Synthetic
uuacugaguuuuaauuauuc

SEQ ID NO: 293366 - RNA, 21 nt, Artificial Sequence
  Synthetic
cuuacugaguuuuaauuauuc

SEQ ID NO: 293367 - RNA, 22 nt, Artificial Sequence
  Synthetic
acuuacugaguuuuaauuauuc

SEQ ID NO: 293368 - RNA, 23 nt, Artificial Sequence
  Synthetic
cacuuacugaguuuuaauuauuc

SEQ ID NO: 293369 - RNA, 24 nt, Artificial Sequence
  Synthetic
ccacuuacugaguuuuaauuauuc

SEQ ID NO: 293370 - RNA, 18 nt, Artificial Sequence
  Synthetic
caaggguuuauauuauuc

SEQ ID NO: 293371 - RNA, 19 nt, Artificial Sequence
  Synthetic
ucaaggguuuauauuauuc

SEQ ID NO: 293372 - RNA, 20 nt, Artificial Sequence
  Synthetic
gucaaggguuuauauuauuc

SEQ ID NO: 293373 - RNA, 21 nt, Artificial Sequence
  Synthetic
ggucaaggguuuauauuauuc

SEQ ID NO: 293374 - RNA, 22 nt, Artificial Sequence
  Synthetic
aggucaaggguuuauauuauuc

SEQ ID NO: 293375 - RNA, 23 nt, Artificial Sequence
  Synthetic
aaggucaaggguuuauauuauuc

SEQ ID NO: 293376 - RNA, 24 nt, Artificial Sequence
  Synthetic
aaaggucaaggguuuauauuauuc

SEQ ID NO: 293377 - RNA, 18 nt, Artificial Sequence
  Synthetic
cagucuuaccuauuauuc

SEQ ID NO: 293378 - RNA, 19 nt, Artificial Sequence
  Synthetic
acagucuuaccuauuauuc

SEQ ID NO: 293379 - RNA, 20 nt, Artificial Sequence
  Synthetic
aacagucuuaccuauuauuc

SEQ ID NO: 293380 - RNA, 21 nt, Artificial Sequence
  Synthetic
caacagucuuaccuauuauuc

SEQ ID NO: 293381 - RNA, 22 nt, Artificial Sequence
  Synthetic
acaacagucuuaccuauuauuc

SEQ ID NO: 293382 - RNA, 23 nt, Artificial Sequence
  Synthetic
aacaacagucuuaccuauuauuc

SEQ ID NO: 293383 - RNA, 24 nt, Artificial Sequence
  Synthetic
aaacaacagucuuaccuauuauuc

SEQ ID NO: 293384 - RNA, 18 nt, Artificial Sequence
  Synthetic
gugugacaaguauuauuc

SEQ ID NO: 293385 - RNA, 19 nt, Artificial Sequence
  Synthetic
ugugugacaaguauuauuc

SEQ ID NO: 293386 - RNA, 20 nt, Artificial Sequence
  Synthetic
cugugugacaaguauuauuc

SEQ ID NO: 293387 - RNA, 21 nt, Artificial Sequence
  Synthetic
acugugugacaaguauuauuc

SEQ ID NO: 293388 - RNA, 22 nt, Artificial Sequence
  Synthetic
uacugugugacaaguauuauuc

SEQ ID NO: 293389 - RNA, 23 nt, Artificial Sequence
  Synthetic
cuacugugugacaaguauuauuc

SEQ ID NO: 293390 - RNA, 24 nt, Artificial Sequence
  Synthetic
ccuacugugugacaaguauuauuc

SEQ ID NO: 293391 - RNA, 18 nt, Artificial Sequence
  Synthetic
agaaucaugugguuauuc

SEQ ID NO: 293392 - RNA, 19 nt, Artificial Sequence
  Synthetic
uagaaucaugugguuauuc

SEQ ID NO: 293393 - RNA, 20 nt, Artificial Sequence
  Synthetic
auagaaucaugugguuauuc

SEQ ID NO: 293394 - RNA, 21 nt, Artificial Sequence
  Synthetic
uauagaaucaugugguuauuc

SEQ ID NO: 293395 - RNA, 22 nt, Artificial Sequence
  Synthetic
auauagaaucaugugguuauuc

SEQ ID NO: 293396 - RNA, 23 nt, Artificial Sequence
  Synthetic
uauauagaaucaugugguuauuc

SEQ ID NO: 293397 - RNA, 24 nt, Artificial Sequence
  Synthetic
auauauagaaucaugugguuauuc

SEQ ID NO: 293398 - RNA, 18 nt, Artificial Sequence
  Synthetic
uuaaauaacuuguuauuc

SEQ ID NO: 293399 - RNA, 19 nt, Artificial Sequence
  Synthetic
guuaaauaacuuguuauuc

SEQ ID NO: 293400 - RNA, 20 nt, Artificial Sequence
  Synthetic
uguuaaauaacuuguuauuc

SEQ ID NO: 293401 - RNA, 21 nt, Artificial Sequence
  Synthetic
guguuaaauaacuuguuauuc

SEQ ID NO: 293402 - RNA, 22 nt, Artificial Sequence
  Synthetic
uguguuaaauaacuuguuauuc

SEQ ID NO: 293403 - RNA, 23 nt, Artificial Sequence
  Synthetic
auguguuaaauaacuuguuauuc

SEQ ID NO: 293404 - RNA, 24 nt, Artificial Sequence
  Synthetic
uauguguuaaauaacuuguuauuc

SEQ ID NO: 293405 - RNA, 18 nt, Artificial Sequence
  Synthetic
uccuauugacauuuauuc

SEQ ID NO: 293406 - RNA, 19 nt, Artificial Sequence
  Synthetic
uuccuauugacauuuauuc

SEQ ID NO: 293407 - RNA, 20 nt, Artificial Sequence
  Synthetic
uuuccuauugacauuuauuc

SEQ ID NO: 293408 - RNA, 21 nt, Artificial Sequence
  Synthetic
uuuuccuauugacauuuauuc

SEQ ID NO: 293409 - RNA, 22 nt, Artificial Sequence
  Synthetic
uuuuuccuauugacauuuauuc

SEQ ID NO: 293410 - RNA, 23 nt, Artificial Sequence
  Synthetic
auuuuuccuauugacauuuauuc

SEQ ID NO: 293411 - RNA, 24 nt, Artificial Sequence
  Synthetic
aauuuuuccuauugacauuuauuc

SEQ ID NO: 293412 - RNA, 18 nt, Artificial Sequence
  Synthetic
cagugaccccauuuauuc

SEQ ID NO: 293413 - RNA, 19 nt, Artificial Sequence
  Synthetic
ccagugaccccauuuauuc

SEQ ID NO: 293414 - RNA, 20 nt, Artificial Sequence
  Synthetic
accagugaccccauuuauuc

SEQ ID NO: 293415 - RNA, 21 nt, Artificial Sequence
  Synthetic
gaccagugaccccauuuauuc

SEQ ID NO: 293416 - RNA, 22 nt, Artificial Sequence
  Synthetic
ugaccagugaccccauuuauuc

SEQ ID NO: 293417 - RNA, 23 nt, Artificial Sequence
  Synthetic
cugaccagugaccccauuuauuc

SEQ ID NO: 293418 - RNA, 24 nt, Artificial Sequence
  Synthetic
gcugaccagugaccccauuuauuc

SEQ ID NO: 293419 - RNA, 18 nt, Artificial Sequence
  Synthetic
aucuccuaugauuuauuc

SEQ ID NO: 293420 - RNA, 19 nt, Artificial Sequence
  Synthetic
uaucuccuaugauuuauuc

SEQ ID NO: 293421 - RNA, 20 nt, Artificial Sequence
  Synthetic
auaucuccuaugauuuauuc

SEQ ID NO: 293422 - RNA, 21 nt, Artificial Sequence
  Synthetic
uauaucuccuaugauuuauuc

SEQ ID NO: 293423 - RNA, 22 nt, Artificial Sequence
  Synthetic
auauaucuccuaugauuuauuc

SEQ ID NO: 293424 - RNA, 23 nt, Artificial Sequence
  Synthetic
uauauaucuccuaugauuuauuc

SEQ ID NO: 293425 - RNA, 24 nt, Artificial Sequence
  Synthetic
uuauauaucuccuaugauuuauuc

SEQ ID NO: 293426 - RNA, 18 nt, Artificial Sequence
  Synthetic
aacaauauugauuuauuc

SEQ ID NO: 293427 - RNA, 19 nt, Artificial Sequence
  Synthetic
caacaauauugauuuauuc

SEQ ID NO: 293428 - RNA, 20 nt, Artificial Sequence
  Synthetic
acaacaauauugauuuauuc

SEQ ID NO: 293429 - RNA, 21 nt, Artificial Sequence
  Synthetic
aacaacaauauugauuuauuc

SEQ ID NO: 293430 - RNA, 22 nt, Artificial Sequence
  Synthetic
uaacaacaauauugauuuauuc

SEQ ID NO: 293431 - RNA, 23 nt, Artificial Sequence
  Synthetic
auaacaacaauauugauuuauuc

SEQ ID NO: 293432 - RNA, 24 nt, Artificial Sequence
  Synthetic
aauaacaacaauauugauuuauuc

SEQ ID NO: 293433 - RNA, 18 nt, Artificial Sequence
  Synthetic
cuacacagcuauuuauuc

SEQ ID NO: 293434 - RNA, 19 nt, Artificial Sequence
  Synthetic
ucuacacagcuauuuauuc

SEQ ID NO: 293435 - RNA, 20 nt, Artificial Sequence
  Synthetic
uucuacacagcuauuuauuc

SEQ ID NO: 293436 - RNA, 21 nt, Artificial Sequence
  Synthetic
cuucuacacagcuauuuauuc

SEQ ID NO: 293437 - RNA, 22 nt, Artificial Sequence
  Synthetic
ucuucuacacagcuauuuauuc

SEQ ID NO: 293438 - RNA, 23 nt, Artificial Sequence
  Synthetic
uucuucuacacagcuauuuauuc

SEQ ID NO: 293439 - RNA, 24 nt, Artificial Sequence
  Synthetic
uuucuucuacacagcuauuuauuc

SEQ ID NO: 293440 - RNA, 18 nt, Artificial Sequence
  Synthetic
uaauuaaauuauuuauuc

SEQ ID NO: 293441 - RNA, 19 nt, Artificial Sequence
  Synthetic
guaauuaaauuauuuauuc

SEQ ID NO: 293442 - RNA, 20 nt, Artificial Sequence
  Synthetic
uguaauuaaauuauuuauuc

SEQ ID NO: 293443 - RNA, 21 nt, Artificial Sequence
  Synthetic
cuguaauuaaauuauuuauuc

SEQ ID NO: 293444 - RNA, 22 nt, Artificial Sequence
  Synthetic
gcuguaauuaaauuauuuauuc

SEQ ID NO: 293445 - RNA, 23 nt, Artificial Sequence
  Synthetic
agcuguaauuaaauuauuuauuc

SEQ ID NO: 293446 - RNA, 24 nt, Artificial Sequence
  Synthetic
aagcuguaauuaaauuauuuauuc

SEQ ID NO: 293447 - RNA, 18 nt, Artificial Sequence
  Synthetic
caaccaauuacuuuauuc

SEQ ID NO: 293448 - RNA, 19 nt, Artificial Sequence
  Synthetic
ucaaccaauuacuuuauuc

SEQ ID NO: 293449 - RNA, 20 nt, Artificial Sequence
  Synthetic
uucaaccaauuacuuuauuc

SEQ ID NO: 293450 - RNA, 21 nt, Artificial Sequence
  Synthetic
uuucaaccaauuacuuuauuc

SEQ ID NO: 293451 - RNA, 22 nt, Artificial Sequence
  Synthetic
auuucaaccaauuacuuuauuc

SEQ ID NO: 293452 - RNA, 23 nt, Artificial Sequence
  Synthetic
aauuucaaccaauuacuuuauuc

SEQ ID NO: 293453 - RNA, 24 nt, Artificial Sequence
  Synthetic
aaauuucaaccaauuacuuuauuc

SEQ ID NO: 293454 - RNA, 18 nt, Artificial Sequence
  Synthetic
gugcacaaaucuuuauuc

SEQ ID NO: 293455 - RNA, 19 nt, Artificial Sequence
  Synthetic
cgugcacaaaucuuuauuc

SEQ ID NO: 293456 - RNA, 20 nt, Artificial Sequence
  Synthetic
acgugcacaaaucuuuauuc

SEQ ID NO: 293457 - RNA, 21 nt, Artificial Sequence
  Synthetic
uacgugcacaaaucuuuauuc

SEQ ID NO: 293458 - RNA, 22 nt, Artificial Sequence
  Synthetic
auacgugcacaaaucuuuauuc

SEQ ID NO: 293459 - RNA, 23 nt, Artificial Sequence
  Synthetic
aauacgugcacaaaucuuuauuc

SEQ ID NO: 293460 - RNA, 24 nt, Artificial Sequence
  Synthetic
aaauacgugcacaaaucuuuauuc

SEQ ID NO: 293461 - RNA, 18 nt, Artificial Sequence
  Synthetic
cucccuugcucuuuauuc

SEQ ID NO: 293462 - RNA, 19 nt, Artificial Sequence
  Synthetic
ucucccuugcucuuuauuc

SEQ ID NO: 293463 - RNA, 20 nt, Artificial Sequence
  Synthetic
cucucccuugcucuuuauuc

SEQ ID NO: 293464 - RNA, 21 nt, Artificial Sequence
  Synthetic
ucucucccuugcucuuuauuc

SEQ ID NO: 293465 - RNA, 22 nt, Artificial Sequence
  Synthetic
uucucucccuugcucuuuauuc

SEQ ID NO: 293466 - RNA, 23 nt, Artificial Sequence
  Synthetic
cuucucucccuugcucuuuauuc

SEQ ID NO: 293467 - RNA, 24 nt, Artificial Sequence
  Synthetic
ccuucucucccuugcucuuuauuc

SEQ ID NO: 293468 - RNA, 18 nt, Artificial Sequence
  Synthetic
ccuugagaaaguuuauuc

SEQ ID NO: 293469 - RNA, 19 nt, Artificial Sequence
  Synthetic
uccuugagaaaguuuauuc

SEQ ID NO: 293470 - RNA, 20 nt, Artificial Sequence
  Synthetic
guccuugagaaaguuuauuc

SEQ ID NO: 293471 - RNA, 21 nt, Artificial Sequence
  Synthetic
aguccuugagaaaguuuauuc

SEQ ID NO: 293472 - RNA, 22 nt, Artificial Sequence
  Synthetic
aaguccuugagaaaguuuauuc

SEQ ID NO: 293473 - RNA, 23 nt, Artificial Sequence
  Synthetic
caaguccuugagaaaguuuauuc

SEQ ID NO: 293474 - RNA, 24 nt, Artificial Sequence
  Synthetic
ccaaguccuugagaaaguuuauuc

SEQ ID NO: 293475 - RNA, 18 nt, Artificial Sequence
  Synthetic
uauaguuuguuuuuauuc

SEQ ID NO: 293476 - RNA, 19 nt, Artificial Sequence
  Synthetic
uuauaguuuguuuuuauuc

SEQ ID NO: 293477 - RNA, 20 nt, Artificial Sequence
  Synthetic
uuuauaguuuguuuuuauuc

SEQ ID NO: 293478 - RNA, 21 nt, Artificial Sequence
  Synthetic
uuuuauaguuuguuuuuauuc

SEQ ID NO: 293479 - RNA, 22 nt, Artificial Sequence
  Synthetic
cuuuuauaguuuguuuuuauuc

SEQ ID NO: 293480 - RNA, 23 nt, Artificial Sequence
  Synthetic
ccuuuuauaguuuguuuuuauuc

SEQ ID NO: 293481 - RNA, 24 nt, Artificial Sequence
  Synthetic
uccuuuuauaguuuguuuuuauuc

SEQ ID NO: 293482 - RNA, 18 nt, Artificial Sequence
  Synthetic
ucuccuuugaaaaacuuc

SEQ ID NO: 293483 - RNA, 19 nt, Artificial Sequence
  Synthetic
aucuccuuugaaaaacuuc

SEQ ID NO: 293484 - RNA, 20 nt, Artificial Sequence
  Synthetic
uaucuccuuugaaaaacuuc

SEQ ID NO: 293485 - RNA, 21 nt, Artificial Sequence
  Synthetic
uuaucuccuuugaaaaacuuc

SEQ ID NO: 293486 - RNA, 22 nt, Artificial Sequence
  Synthetic
cuuaucuccuuugaaaaacuuc

SEQ ID NO: 293487 - RNA, 23 nt, Artificial Sequence
  Synthetic
ucuuaucuccuuugaaaaacuuc

SEQ ID NO: 293488 - RNA, 24 nt, Artificial Sequence
  Synthetic
cucuuaucuccuuugaaaaacuuc

SEQ ID NO: 293489 - RNA, 18 nt, Artificial Sequence
  Synthetic
caaaaaagacaaaacuuc

SEQ ID NO: 293490 - RNA, 19 nt, Artificial Sequence
  Synthetic
acaaaaaagacaaaacuuc

SEQ ID NO: 293491 - RNA, 20 nt, Artificial Sequence
  Synthetic
cacaaaaaagacaaaacuuc

SEQ ID NO: 293492 - RNA, 21 nt, Artificial Sequence
  Synthetic
ucacaaaaaagacaaaacuuc

SEQ ID NO: 293493 - RNA, 22 nt, Artificial Sequence
  Synthetic
cucacaaaaaagacaaaacuuc

SEQ ID NO: 293494 - RNA, 23 nt, Artificial Sequence
  Synthetic
gcucacaaaaaagacaaaacuuc

SEQ ID NO: 293495 - RNA, 24 nt, Artificial Sequence
  Synthetic
ugcucacaaaaaagacaaaacuuc

SEQ ID NO: 293496 - RNA, 18 nt, Artificial Sequence
  Synthetic
auggacaagcaaaacuuc

SEQ ID NO: 293497 - RNA, 19 nt, Artificial Sequence
  Synthetic
aauggacaagcaaaacuuc

SEQ ID NO: 293498 - RNA, 20 nt, Artificial Sequence
  Synthetic
caauggacaagcaaaacuuc

SEQ ID NO: 293499 - RNA, 21 nt, Artificial Sequence
  Synthetic
acaauggacaagcaaaacuuc

SEQ ID NO: 293500 - RNA, 22 nt, Artificial Sequence
  Synthetic
aacaauggacaagcaaaacuuc

SEQ ID NO: 293501 - RNA, 23 nt, Artificial Sequence
  Synthetic
gaacaauggacaagcaaaacuuc

SEQ ID NO: 293502 - RNA, 24 nt, Artificial Sequence
  Synthetic
agaacaauggacaagcaaaacuuc

SEQ ID NO: 293503 - RNA, 18 nt, Artificial Sequence
  Synthetic
agcauguuguaaaacuuc

SEQ ID NO: 293504 - RNA, 19 nt, Artificial Sequence
  Synthetic
uagcauguuguaaaacuuc

SEQ ID NO: 293505 - RNA, 20 nt, Artificial Sequence
  Synthetic
uuagcauguuguaaaacuuc

SEQ ID NO: 293506 - RNA, 21 nt, Artificial Sequence
  Synthetic
auuagcauguuguaaaacuuc

SEQ ID NO: 293507 - RNA, 22 nt, Artificial Sequence
  Synthetic
aauuagcauguuguaaaacuuc

SEQ ID NO: 293508 - RNA, 23 nt, Artificial Sequence
  Synthetic
aaauuagcauguuguaaaacuuc

SEQ ID NO: 293509 - RNA, 24 nt, Artificial Sequence
  Synthetic
uaaauuagcauguuguaaaacuuc

SEQ ID NO: 293510 - RNA, 18 nt, Artificial Sequence
  Synthetic
uuauugccaugaaacuuc

SEQ ID NO: 293511 - RNA, 19 nt, Artificial Sequence
  Synthetic
uuuauugccaugaaacuuc

SEQ ID NO: 293512 - RNA, 20 nt, Artificial Sequence
  Synthetic
uuuuauugccaugaaacuuc

SEQ ID NO: 293513 - RNA, 21 nt, Artificial Sequence
  Synthetic
uuuuuauugccaugaaacuuc

SEQ ID NO: 293514 - RNA, 22 nt, Artificial Sequence
  Synthetic
cuuuuuauugccaugaaacuuc

SEQ ID NO: 293515 - RNA, 23 nt, Artificial Sequence
  Synthetic
ccuuuuuauugccaugaaacuuc

SEQ ID NO: 293516 - RNA, 24 nt, Artificial Sequence
  Synthetic
uccuuuuuauugccaugaaacuuc

SEQ ID NO: 293517 - RNA, 18 nt, Artificial Sequence
  Synthetic
uaaaccaucauaaacuuc

SEQ ID NO: 293518 - RNA, 19 nt, Artificial Sequence
  Synthetic
auaaaccaucauaaacuuc

SEQ ID NO: 293519 - RNA, 20 nt, Artificial Sequence
  Synthetic
aauaaaccaucauaaacuuc

SEQ ID NO: 293520 - RNA, 21 nt, Artificial Sequence
  Synthetic
aaauaaaccaucauaaacuuc

SEQ ID NO: 293521 - RNA, 22 nt, Artificial Sequence
  Synthetic
gaaauaaaccaucauaaacuuc

SEQ ID NO: 293522 - RNA, 23 nt, Artificial Sequence
  Synthetic
agaaauaaaccaucauaaacuuc

SEQ ID NO: 293523 - RNA, 24 nt, Artificial Sequence
  Synthetic
cagaaauaaaccaucauaaacuuc

SEQ ID NO: 293524 - RNA, 18 nt, Artificial Sequence
  Synthetic
ugguugguuguaaacuuc

SEQ ID NO: 293525 - RNA, 19 nt, Artificial Sequence
  Synthetic
augguugguuguaaacuuc

SEQ ID NO: 293526 - RNA, 20 nt, Artificial Sequence
  Synthetic
caugguugguuguaaacuuc

SEQ ID NO: 293527 - RNA, 21 nt, Artificial Sequence
  Synthetic
ccaugguugguuguaaacuuc

SEQ ID NO: 293528 - RNA, 22 nt, Artificial Sequence
  Synthetic
accaugguugguuguaaacuuc

SEQ ID NO: 293529 - RNA, 23 nt, Artificial Sequence
  Synthetic
caccaugguugguuguaaacuuc

SEQ ID NO: 293530 - RNA, 24 nt, Artificial Sequence
  Synthetic
ccaccaugguugguuguaaacuuc

SEQ ID NO: 293531 - RNA, 18 nt, Artificial Sequence
  Synthetic
gauuuugauuuaaacuuc

SEQ ID NO: 293532 - RNA, 19 nt, Artificial Sequence
  Synthetic
ugauuuugauuuaaacuuc

SEQ ID NO: 293533 - RNA, 20 nt, Artificial Sequence
  Synthetic
augauuuugauuuaaacuuc

SEQ ID NO: 293534 - RNA, 21 nt, Artificial Sequence
  Synthetic
aaugauuuugauuuaaacuuc

SEQ ID NO: 293535 - RNA, 22 nt, Artificial Sequence
  Synthetic
aaaugauuuugauuuaaacuuc

SEQ ID NO: 293536 - RNA, 23 nt, Artificial Sequence
  Synthetic
caaaugauuuugauuuaaacuuc

SEQ ID NO: 293537 - RNA, 24 nt, Artificial Sequence
  Synthetic
ccaaaugauuuugauuuaaacuuc

SEQ ID NO: 293538 - RNA, 18 nt, Artificial Sequence
  Synthetic
acacuuccuuuaaacuuc

SEQ ID NO: 293539 - RNA, 19 nt, Artificial Sequence
  Synthetic
aacacuuccuuuaaacuuc

SEQ ID NO: 293540 - RNA, 20 nt, Artificial Sequence
  Synthetic
gaacacuuccuuuaaacuuc

SEQ ID NO: 293541 - RNA, 21 nt, Artificial Sequence
  Synthetic
ggaacacuuccuuuaaacuuc

SEQ ID NO: 293542 - RNA, 22 nt, Artificial Sequence
  Synthetic
aggaacacuuccuuuaaacuuc

SEQ ID NO: 293543 - RNA, 23 nt, Artificial Sequence
  Synthetic
aaggaacacuuccuuuaaacuuc

SEQ ID NO: 293544 - RNA, 24 nt, Artificial Sequence
  Synthetic
aaaggaacacuuccuuuaaacuuc

SEQ ID NO: 293545 - RNA, 18 nt, Artificial Sequence
  Synthetic
uuggaaacgcacaacuuc

SEQ ID NO: 293546 - RNA, 19 nt, Artificial Sequence
  Synthetic
uuuggaaacgcacaacuuc

SEQ ID NO: 293547 - RNA, 20 nt, Artificial Sequence
  Synthetic
cuuuggaaacgcacaacuuc

SEQ ID NO: 293548 - RNA, 21 nt, Artificial Sequence
  Synthetic
gcuuuggaaacgcacaacuuc

SEQ ID NO: 293549 - RNA, 22 nt, Artificial Sequence
  Synthetic
ugcuuuggaaacgcacaacuuc

SEQ ID NO: 293550 - RNA, 23 nt, Artificial Sequence
  Synthetic
cugcuuuggaaacgcacaacuuc

SEQ ID NO: 293551 - RNA, 24 nt, Artificial Sequence
  Synthetic
acugcuuuggaaacgcacaacuuc

SEQ ID NO: 293552 - RNA, 18 nt, Artificial Sequence
  Synthetic
ccagaguuuagcaacuuc

SEQ ID NO: 293553 - RNA, 19 nt, Artificial Sequence
  Synthetic
cccagaguuuagcaacuuc

SEQ ID NO: 293554 - RNA, 20 nt, Artificial Sequence
  Synthetic
acccagaguuuagcaacuuc

SEQ ID NO: 293555 - RNA, 21 nt, Artificial Sequence
  Synthetic
aacccagaguuuagcaacuuc

SEQ ID NO: 293556 - RNA, 22 nt, Artificial Sequence
  Synthetic
caacccagaguuuagcaacuuc

SEQ ID NO: 293557 - RNA, 23 nt, Artificial Sequence
  Synthetic
gcaacccagaguuuagcaacuuc

SEQ ID NO: 293558 - RNA, 24 nt, Artificial Sequence
  Synthetic
ggcaacccagaguuuagcaacuuc

SEQ ID NO: 293559 - RNA, 18 nt, Artificial Sequence
  Synthetic
uaugcuauacucaacuuc

SEQ ID NO: 293560 - RNA, 19 nt, Artificial Sequence
  Synthetic
uuaugcuauacucaacuuc

SEQ ID NO: 293561 - RNA, 20 nt, Artificial Sequence
  Synthetic
guuaugcuauacucaacuuc

SEQ ID NO: 293562 - RNA, 21 nt, Artificial Sequence
  Synthetic
uguuaugcuauacucaacuuc

SEQ ID NO: 293563 - RNA, 22 nt, Artificial Sequence
  Synthetic
uuguuaugcuauacucaacuuc

SEQ ID NO: 293564 - RNA, 23 nt, Artificial Sequence
  Synthetic
uuuguuaugcuauacucaacuuc

SEQ ID NO: 293565 - RNA, 24 nt, Artificial Sequence
  Synthetic
auuuguuaugcuauacucaacuuc

SEQ ID NO: 293566 - RNA, 18 nt, Artificial Sequence
  Synthetic
aaucucugauucaacuuc

SEQ ID NO: 293567 - RNA, 19 nt, Artificial Sequence
  Synthetic
uaaucucugauucaacuuc

SEQ ID NO: 293568 - RNA, 20 nt, Artificial Sequence
  Synthetic
guaaucucugauucaacuuc

SEQ ID NO: 293569 - RNA, 21 nt, Artificial Sequence
  Synthetic
gguaaucucugauucaacuuc

SEQ ID NO: 293570 - RNA, 22 nt, Artificial Sequence
  Synthetic
agguaaucucugauucaacuuc

SEQ ID NO: 293571 - RNA, 23 nt, Artificial Sequence
  Synthetic
aagguaaucucugauucaacuuc

SEQ ID NO: 293572 - RNA, 24 nt, Artificial Sequence
  Synthetic
gaagguaaucucugauucaacuuc

SEQ ID NO: 293573 - RNA, 18 nt, Artificial Sequence
  Synthetic
aagaaagcagagaacuuc

SEQ ID NO: 293574 - RNA, 19 nt, Artificial Sequence
  Synthetic
caagaaagcagagaacuuc

SEQ ID NO: 293575 - RNA, 20 nt, Artificial Sequence
  Synthetic
ccaagaaagcagagaacuuc

SEQ ID NO: 293576 - RNA, 21 nt, Artificial Sequence
  Synthetic
gccaagaaagcagagaacuuc

SEQ ID NO: 293577 - RNA, 22 nt, Artificial Sequence
  Synthetic
agccaagaaagcagagaacuuc

SEQ ID NO: 293578 - RNA, 23 nt, Artificial Sequence
  Synthetic
aagccaagaaagcagagaacuuc

SEQ ID NO: 293579 - RNA, 24 nt, Artificial Sequence
  Synthetic
gaagccaagaaagcagagaacuuc

SEQ ID NO: 293580 - RNA, 18 nt, Artificial Sequence
  Synthetic
auggagauuaggaacuuc

SEQ ID NO: 293581 - RNA, 19 nt, Artificial Sequence
  Synthetic
gauggagauuaggaacuuc

SEQ ID NO: 293582 - RNA, 20 nt, Artificial Sequence
  Synthetic
agauggagauuaggaacuuc

SEQ ID NO: 293583 - RNA, 21 nt, Artificial Sequence
  Synthetic
cagauggagauuaggaacuuc

SEQ ID NO: 293584 - RNA, 22 nt, Artificial Sequence
  Synthetic
ucagauggagauuaggaacuuc

SEQ ID NO: 293585 - RNA, 23 nt, Artificial Sequence
  Synthetic
cucagauggagauuaggaacuuc

SEQ ID NO: 293586 - RNA, 24 nt, Artificial Sequence
  Synthetic
ucucagauggagauuaggaacuuc

SEQ ID NO: 293587 - RNA, 18 nt, Artificial Sequence
  Synthetic
ccuuugaaccugaacuuc

SEQ ID NO: 293588 - RNA, 19 nt, Artificial Sequence
  Synthetic
cccuuugaaccugaacuuc

SEQ ID NO: 293589 - RNA, 20 nt, Artificial Sequence
  Synthetic
acccuuugaaccugaacuuc

SEQ ID NO: 293590 - RNA, 21 nt, Artificial Sequence
  Synthetic
uacccuuugaaccugaacuuc

SEQ ID NO: 293591 - RNA, 22 nt, Artificial Sequence
  Synthetic
guacccuuugaaccugaacuuc

SEQ ID NO: 293592 - RNA, 23 nt, Artificial Sequence
  Synthetic
uguacccuuugaaccugaacuuc

SEQ ID NO: 293593 - RNA, 24 nt, Artificial Sequence
  Synthetic
cuguacccuuugaaccugaacuuc

SEQ ID NO: 293594 - RNA, 18 nt, Artificial Sequence
  Synthetic
cauguuuucucuaacuuc

SEQ ID NO: 293595 - RNA, 19 nt, Artificial Sequence
  Synthetic
acauguuuucucuaacuuc

SEQ ID NO: 293596 - RNA, 20 nt, Artificial Sequence
  Synthetic
uacauguuuucucuaacuuc

SEQ ID NO: 293597 - RNA, 21 nt, Artificial Sequence
  Synthetic
auacauguuuucucuaacuuc

SEQ ID NO: 293598 - RNA, 22 nt, Artificial Sequence
  Synthetic
gauacauguuuucucuaacuuc

SEQ ID NO: 293599 - RNA, 23 nt, Artificial Sequence
  Synthetic
ugauacauguuuucucuaacuuc

SEQ ID NO: 293600 - RNA, 24 nt, Artificial Sequence
  Synthetic
augauacauguuuucucuaacuuc

SEQ ID NO: 293601 - RNA, 18 nt, Artificial Sequence
  Synthetic
gccaaguccuguaacuuc

SEQ ID NO: 293602 - RNA, 19 nt, Artificial Sequence
  Synthetic
agccaaguccuguaacuuc

SEQ ID NO: 293603 - RNA, 20 nt, Artificial Sequence
  Synthetic
aagccaaguccuguaacuuc

SEQ ID NO: 293604 - RNA, 21 nt, Artificial Sequence
  Synthetic
caagccaaguccuguaacuuc

SEQ ID NO: 293605 - RNA, 22 nt, Artificial Sequence
  Synthetic
ucaagccaaguccuguaacuuc

SEQ ID NO: 293606 - RNA, 23 nt, Artificial Sequence
  Synthetic
cucaagccaaguccuguaacuuc

SEQ ID NO: 293607 - RNA, 24 nt, Artificial Sequence
  Synthetic
gcucaagccaaguccuguaacuuc

SEQ ID NO: 293608 - RNA, 18 nt, Artificial Sequence
  Synthetic
ugagauuuaucacacuuc

SEQ ID NO: 293609 - RNA, 19 nt, Artificial Sequence
  Synthetic
cugagauuuaucacacuuc

SEQ ID NO: 293610 - RNA, 20 nt, Artificial Sequence
  Synthetic
gcugagauuuaucacacuuc

SEQ ID NO: 293611 - RNA, 21 nt, Artificial Sequence
  Synthetic
agcugagauuuaucacacuuc

SEQ ID NO: 293612 - RNA, 22 nt, Artificial Sequence
  Synthetic
aagcugagauuuaucacacuuc

SEQ ID NO: 293613 - RNA, 23 nt, Artificial Sequence
  Synthetic
uaagcugagauuuaucacacuuc

SEQ ID NO: 293614 - RNA, 24 nt, Artificial Sequence
  Synthetic
uuaagcugagauuuaucacacuuc

SEQ ID NO: 293615 - RNA, 18 nt, Artificial Sequence
  Synthetic
uuuccaauuugacacuuc

SEQ ID NO: 293616 - RNA, 19 nt, Artificial Sequence
  Synthetic
guuuccaauuugacacuuc

SEQ ID NO: 293617 - RNA, 20 nt, Artificial Sequence
  Synthetic
aguuuccaauuugacacuuc

SEQ ID NO: 293618 - RNA, 21 nt, Artificial Sequence
  Synthetic
gaguuuccaauuugacacuuc

SEQ ID NO: 293619 - RNA, 22 nt, Artificial Sequence
  Synthetic
ugaguuuccaauuugacacuuc

SEQ ID NO: 293620 - RNA, 23 nt, Artificial Sequence
  Synthetic
cugaguuuccaauuugacacuuc

SEQ ID NO: 293621 - RNA, 24 nt, Artificial Sequence
  Synthetic
gcugaguuuccaauuugacacuuc

SEQ ID NO: 293622 - RNA, 18 nt, Artificial Sequence
  Synthetic
ugcuaaugggaccacuuc

SEQ ID NO: 293623 - RNA, 19 nt, Artificial Sequence
  Synthetic
augcuaaugggaccacuuc

SEQ ID NO: 293624 - RNA, 20 nt, Artificial Sequence
  Synthetic
aaugcuaaugggaccacuuc

SEQ ID NO: 293625 - RNA, 21 nt, Artificial Sequence
  Synthetic
caaugcuaaugggaccacuuc

SEQ ID NO: 293626 - RNA, 22 nt, Artificial Sequence
  Synthetic
gcaaugcuaaugggaccacuuc

SEQ ID NO: 293627 - RNA, 23 nt, Artificial Sequence
  Synthetic
ggcaaugcuaaugggaccacuuc

SEQ ID NO: 293628 - RNA, 24 nt, Artificial Sequence
  Synthetic
aggcaaugcuaaugggaccacuuc

SEQ ID NO: 293629 - RNA, 18 nt, Artificial Sequence
  Synthetic
auacaccuuucccacuuc

SEQ ID NO: 293630 - RNA, 19 nt, Artificial Sequence
  Synthetic
aauacaccuuucccacuuc

SEQ ID NO: 293631 - RNA, 20 nt, Artificial Sequence
  Synthetic
caauacaccuuucccacuuc

SEQ ID NO: 293632 - RNA, 21 nt, Artificial Sequence
  Synthetic
acaauacaccuuucccacuuc

SEQ ID NO: 293633 - RNA, 22 nt, Artificial Sequence
  Synthetic
aacaauacaccuuucccacuuc

SEQ ID NO: 293634 - RNA, 23 nt, Artificial Sequence
  Synthetic
caacaauacaccuuucccacuuc

SEQ ID NO: 293635 - RNA, 24 nt, Artificial Sequence
  Synthetic
ccaacaauacaccuuucccacuuc

SEQ ID NO: 293636 - RNA, 18 nt, Artificial Sequence
  Synthetic
guaaucagcauccacuuc

SEQ ID NO: 293637 - RNA, 19 nt, Artificial Sequence
  Synthetic
uguaaucagcauccacuuc

SEQ ID NO: 293638 - RNA, 20 nt, Artificial Sequence
  Synthetic
auguaaucagcauccacuuc

SEQ ID NO: 293639 - RNA, 21 nt, Artificial Sequence
  Synthetic
cauguaaucagcauccacuuc

SEQ ID NO: 293640 - RNA, 22 nt, Artificial Sequence
  Synthetic
ucauguaaucagcauccacuuc

SEQ ID NO: 293641 - RNA, 23 nt, Artificial Sequence
  Synthetic
gucauguaaucagcauccacuuc

SEQ ID NO: 293642 - RNA, 24 nt, Artificial Sequence
  Synthetic
agucauguaaucagcauccacuuc

SEQ ID NO: 293643 - RNA, 18 nt, Artificial Sequence
  Synthetic
cuguaaucccagcacuuc

SEQ ID NO: 293644 - RNA, 19 nt, Artificial Sequence
  Synthetic
ccuguaaucccagcacuuc

SEQ ID NO: 293645 - RNA, 20 nt, Artificial Sequence
  Synthetic
gccuguaaucccagcacuuc

SEQ ID NO: 293646 - RNA, 21 nt, Artificial Sequence
  Synthetic
cgccuguaaucccagcacuuc

SEQ ID NO: 293647 - RNA, 22 nt, Artificial Sequence
  Synthetic
acgccuguaaucccagcacuuc

SEQ ID NO: 293648 - RNA, 23 nt, Artificial Sequence
  Synthetic
cacgccuguaaucccagcacuuc

SEQ ID NO: 293649 - RNA, 24 nt, Artificial Sequence
  Synthetic
ucacgccuguaaucccagcacuuc

SEQ ID NO: 293650 - RNA, 18 nt, Artificial Sequence
  Synthetic
auugcacacaggcacuuc

SEQ ID NO: 293651 - RNA, 19 nt, Artificial Sequence
  Synthetic
uauugcacacaggcacuuc

SEQ ID NO: 293652 - RNA, 20 nt, Artificial Sequence
  Synthetic
cuauugcacacaggcacuuc

SEQ ID NO: 293653 - RNA, 21 nt, Artificial Sequence
  Synthetic
acuauugcacacaggcacuuc

SEQ ID NO: 293654 - RNA, 22 nt, Artificial Sequence
  Synthetic
gacuauugcacacaggcacuuc

SEQ ID NO: 293655 - RNA, 23 nt, Artificial Sequence
  Synthetic
ugacuauugcacacaggcacuuc

SEQ ID NO: 293656 - RNA, 24 nt, Artificial Sequence
  Synthetic
uugacuauugcacacaggcacuuc

SEQ ID NO: 293657 - RNA, 18 nt, Artificial Sequence
  Synthetic
cuauguguuaggcacuuc

SEQ ID NO: 293658 - RNA, 19 nt, Artificial Sequence
  Synthetic
acuauguguuaggcacuuc

SEQ ID NO: 293659 - RNA, 20 nt, Artificial Sequence
  Synthetic
uacuauguguuaggcacuuc

SEQ ID NO: 293660 - RNA, 21 nt, Artificial Sequence
  Synthetic
uuacuauguguuaggcacuuc

SEQ ID NO: 293661 - RNA, 22 nt, Artificial Sequence
  Synthetic
cuuacuauguguuaggcacuuc

SEQ ID NO: 293662 - RNA, 23 nt, Artificial Sequence
  Synthetic
acuuacuauguguuaggcacuuc

SEQ ID NO: 293663 - RNA, 24 nt, Artificial Sequence
  Synthetic
cacuuacuauguguuaggcacuuc

SEQ ID NO: 293664 - RNA, 18 nt, Artificial Sequence
  Synthetic
aguaauguaagucacuuc

SEQ ID NO: 293665 - RNA, 19 nt, Artificial Sequence
  Synthetic
uaguaauguaagucacuuc

SEQ ID NO: 293666 - RNA, 20 nt, Artificial Sequence
  Synthetic
uuaguaauguaagucacuuc

SEQ ID NO: 293667 - RNA, 21 nt, Artificial Sequence
  Synthetic
guuaguaauguaagucacuuc

SEQ ID NO: 293668 - RNA, 22 nt, Artificial Sequence
  Synthetic
gguuaguaauguaagucacuuc

SEQ ID NO: 293669 - RNA, 23 nt, Artificial Sequence
  Synthetic
agguuaguaauguaagucacuuc

SEQ ID NO: 293670 - RNA, 24 nt, Artificial Sequence
  Synthetic
uagguuaguaauguaagucacuuc

SEQ ID NO: 293671 - RNA, 18 nt, Artificial Sequence
  Synthetic
uuuccuucaguucacuuc

SEQ ID NO: 293672 - RNA, 19 nt, Artificial Sequence
  Synthetic
cuuuccuucaguucacuuc

SEQ ID NO: 293673 - RNA, 20 nt, Artificial Sequence
  Synthetic
ccuuuccuucaguucacuuc

SEQ ID NO: 293674 - RNA, 21 nt, Artificial Sequence
  Synthetic
uccuuuccuucaguucacuuc

SEQ ID NO: 293675 - RNA, 22 nt, Artificial Sequence
  Synthetic
cuccuuuccuucaguucacuuc

SEQ ID NO: 293676 - RNA, 23 nt, Artificial Sequence
  Synthetic
ccuccuuuccuucaguucacuuc

SEQ ID NO: 293677 - RNA, 24 nt, Artificial Sequence
  Synthetic
uccuccuuuccuucaguucacuuc

SEQ ID NO: 293678 - RNA, 18 nt, Artificial Sequence
  Synthetic
uuuguuuucaaagacuuc

SEQ ID NO: 293679 - RNA, 19 nt, Artificial Sequence
  Synthetic
cuuuguuuucaaagacuuc

SEQ ID NO: 293680 - RNA, 20 nt, Artificial Sequence
  Synthetic
ucuuuguuuucaaagacuuc

SEQ ID NO: 293681 - RNA, 21 nt, Artificial Sequence
  Synthetic
aucuuuguuuucaaagacuuc

SEQ ID NO: 293682 - RNA, 22 nt, Artificial Sequence
  Synthetic
aaucuuuguuuucaaagacuuc

SEQ ID NO: 293683 - RNA, 23 nt, Artificial Sequence
  Synthetic
caaucuuuguuuucaaagacuuc

SEQ ID NO: 293684 - RNA, 24 nt, Artificial Sequence
  Synthetic
acaaucuuuguuuucaaagacuuc

SEQ ID NO: 293685 - RNA, 18 nt, Artificial Sequence
  Synthetic
agaaggaaacaagacuuc

SEQ ID NO: 293686 - RNA, 19 nt, Artificial Sequence
  Synthetic
gagaaggaaacaagacuuc

SEQ ID NO: 293687 - RNA, 20 nt, Artificial Sequence
  Synthetic
agagaaggaaacaagacuuc

SEQ ID NO: 293688 - RNA, 21 nt, Artificial Sequence
  Synthetic
uagagaaggaaacaagacuuc

SEQ ID NO: 293689 - RNA, 22 nt, Artificial Sequence
  Synthetic
auagagaaggaaacaagacuuc

SEQ ID NO: 293690 - RNA, 23 nt, Artificial Sequence
  Synthetic
aauagagaaggaaacaagacuuc

SEQ ID NO: 293691 - RNA, 24 nt, Artificial Sequence
  Synthetic
uaauagagaaggaaacaagacuuc

SEQ ID NO: 293692 - RNA, 18 nt, Artificial Sequence
  Synthetic
aggucuaaauaagacuuc

SEQ ID NO: 293693 - RNA, 19 nt, Artificial Sequence
  Synthetic
uaggucuaaauaagacuuc

SEQ ID NO: 293694 - RNA, 20 nt, Artificial Sequence
  Synthetic
uuaggucuaaauaagacuuc

SEQ ID NO: 293695 - RNA, 21 nt, Artificial Sequence
  Synthetic
guuaggucuaaauaagacuuc

SEQ ID NO: 293696 - RNA, 22 nt, Artificial Sequence
  Synthetic
aguuaggucuaaauaagacuuc

SEQ ID NO: 293697 - RNA, 23 nt, Artificial Sequence
  Synthetic
aaguuaggucuaaauaagacuuc

SEQ ID NO: 293698 - RNA, 24 nt, Artificial Sequence
  Synthetic
gaaguuaggucuaaauaagacuuc

SEQ ID NO: 293699 - RNA, 18 nt, Artificial Sequence
  Synthetic
gucagaaguagagacuuc

SEQ ID NO: 293700 - RNA, 19 nt, Artificial Sequence
  Synthetic
agucagaaguagagacuuc

SEQ ID NO: 293701 - RNA, 20 nt, Artificial Sequence
  Synthetic
gagucagaaguagagacuuc

SEQ ID NO: 293702 - RNA, 21 nt, Artificial Sequence
  Synthetic
ugagucagaaguagagacuuc

SEQ ID NO: 293703 - RNA, 22 nt, Artificial Sequence
  Synthetic
cugagucagaaguagagacuuc

SEQ ID NO: 293704 - RNA, 23 nt, Artificial Sequence
  Synthetic
ucugagucagaaguagagacuuc

SEQ ID NO: 293705 - RNA, 24 nt, Artificial Sequence
  Synthetic
cucugagucagaaguagagacuuc

SEQ ID NO: 293706 - RNA, 18 nt, Artificial Sequence
  Synthetic
gcccauguaugagacuuc

SEQ ID NO: 293707 - RNA, 19 nt, Artificial Sequence
  Synthetic
agcccauguaugagacuuc

SEQ ID NO: 293708 - RNA, 20 nt, Artificial Sequence
  Synthetic
cagcccauguaugagacuuc

SEQ ID NO: 293709 - RNA, 21 nt, Artificial Sequence
  Synthetic
ucagcccauguaugagacuuc

SEQ ID NO: 293710 - RNA, 22 nt, Artificial Sequence
  Synthetic
uucagcccauguaugagacuuc

SEQ ID NO: 293711 - RNA, 23 nt, Artificial Sequence
  Synthetic
guucagcccauguaugagacuuc

SEQ ID NO: 293712 - RNA, 24 nt, Artificial Sequence
  Synthetic
gguucagcccauguaugagacuuc

SEQ ID NO: 293713 - RNA, 18 nt, Artificial Sequence
  Synthetic
ggaguuaugcaggacuuc

SEQ ID NO: 293714 - RNA, 19 nt, Artificial Sequence
  Synthetic
aggaguuaugcaggacuuc

SEQ ID NO: 293715 - RNA, 20 nt, Artificial Sequence
  Synthetic
aaggaguuaugcaggacuuc

SEQ ID NO: 293716 - RNA, 21 nt, Artificial Sequence
  Synthetic
aaaggaguuaugcaggacuuc

SEQ ID NO: 293717 - RNA, 22 nt, Artificial Sequence
  Synthetic
gaaaggaguuaugcaggacuuc

SEQ ID NO: 293718 - RNA, 23 nt, Artificial Sequence
  Synthetic
agaaaggaguuaugcaggacuuc

SEQ ID NO: 293719 - RNA, 24 nt, Artificial Sequence
  Synthetic
uagaaaggaguuaugcaggacuuc

SEQ ID NO: 293720 - RNA, 18 nt, Artificial Sequence
  Synthetic
aaguugggagaggacuuc

SEQ ID NO: 293721 - RNA, 19 nt, Artificial Sequence
  Synthetic
uaaguugggagaggacuuc

SEQ ID NO: 293722 - RNA, 20 nt, Artificial Sequence
  Synthetic
auaaguugggagaggacuuc

SEQ ID NO: 293723 - RNA, 21 nt, Artificial Sequence
  Synthetic
aauaaguugggagaggacuuc

SEQ ID NO: 293724 - RNA, 22 nt, Artificial Sequence
  Synthetic
gaauaaguugggagaggacuuc

SEQ ID NO: 293725 - RNA, 23 nt, Artificial Sequence
  Synthetic
agaauaaguugggagaggacuuc

SEQ ID NO: 293726 - RNA, 24 nt, Artificial Sequence
  Synthetic
cagaauaaguugggagaggacuuc

SEQ ID NO: 293727 - RNA, 18 nt, Artificial Sequence
  Synthetic
cccuuuuaaagggacuuc

SEQ ID NO: 293728 - RNA, 19 nt, Artificial Sequence
  Synthetic
acccuuuuaaagggacuuc

SEQ ID NO: 293729 - RNA, 20 nt, Artificial Sequence
  Synthetic
uacccuuuuaaagggacuuc

SEQ ID NO: 293730 - RNA, 21 nt, Artificial Sequence
  Synthetic
cuacccuuuuaaagggacuuc

SEQ ID NO: 293731 - RNA, 22 nt, Artificial Sequence
  Synthetic
ucuacccuuuuaaagggacuuc

SEQ ID NO: 293732 - RNA, 23 nt, Artificial Sequence
  Synthetic
cucuacccuuuuaaagggacuuc

SEQ ID NO: 293733 - RNA, 24 nt, Artificial Sequence
  Synthetic
ccucuacccuuuuaaagggacuuc

SEQ ID NO: 293734 - RNA, 18 nt, Artificial Sequence
  Synthetic
ccccuccuaauggacuuc

SEQ ID NO: 293735 - RNA, 19 nt, Artificial Sequence
  Synthetic
uccccuccuaauggacuuc

SEQ ID NO: 293736 - RNA, 20 nt, Artificial Sequence
  Synthetic
cuccccuccuaauggacuuc

SEQ ID NO: 293737 - RNA, 21 nt, Artificial Sequence
  Synthetic
acuccccuccuaauggacuuc

SEQ ID NO: 293738 - RNA, 22 nt, Artificial Sequence
  Synthetic
aacuccccuccuaauggacuuc

SEQ ID NO: 293739 - RNA, 23 nt, Artificial Sequence
  Synthetic
uaacuccccuccuaauggacuuc

SEQ ID NO: 293740 - RNA, 24 nt, Artificial Sequence
  Synthetic
cuaacuccccuccuaauggacuuc

SEQ ID NO: 293741 - RNA, 18 nt, Artificial Sequence
  Synthetic
agaauccggcuggacuuc

SEQ ID NO: 293742 - RNA, 19 nt, Artificial Sequence
  Synthetic
aagaauccggcuggacuuc

SEQ ID NO: 293743 - RNA, 20 nt, Artificial Sequence
  Synthetic
gaagaauccggcuggacuuc

SEQ ID NO: 293744 - RNA, 21 nt, Artificial Sequence
  Synthetic
agaagaauccggcuggacuuc

SEQ ID NO: 293745 - RNA, 22 nt, Artificial Sequence
  Synthetic
gagaagaauccggcuggacuuc

SEQ ID NO: 293746 - RNA, 23 nt, Artificial Sequence
  Synthetic
agagaagaauccggcuggacuuc

SEQ ID NO: 293747 - RNA, 24 nt, Artificial Sequence
  Synthetic
uagagaagaauccggcuggacuuc

SEQ ID NO: 293748 - RNA, 18 nt, Artificial Sequence
  Synthetic
gccugaagcaaugacuuc

SEQ ID NO: 293749 - RNA, 19 nt, Artificial Sequence
  Synthetic
ugccugaagcaaugacuuc

SEQ ID NO: 293750 - RNA, 20 nt, Artificial Sequence
  Synthetic
uugccugaagcaaugacuuc

SEQ ID NO: 293751 - RNA, 21 nt, Artificial Sequence
  Synthetic
uuugccugaagcaaugacuuc

SEQ ID NO: 293752 - RNA, 22 nt, Artificial Sequence
  Synthetic
guuugccugaagcaaugacuuc

SEQ ID NO: 293753 - RNA, 23 nt, Artificial Sequence
  Synthetic
uguuugccugaagcaaugacuuc

SEQ ID NO: 293754 - RNA, 24 nt, Artificial Sequence
  Synthetic
guguuugccugaagcaaugacuuc

SEQ ID NO: 293755 - RNA, 18 nt, Artificial Sequence
  Synthetic
gucuggguacaugacuuc

SEQ ID NO: 293756 - RNA, 19 nt, Artificial Sequence
  Synthetic
ugucuggguacaugacuuc

SEQ ID NO: 293757 - RNA, 20 nt, Artificial Sequence
  Synthetic
gugucuggguacaugacuuc

SEQ ID NO: 293758 - RNA, 21 nt, Artificial Sequence
  Synthetic
agugucuggguacaugacuuc

SEQ ID NO: 293759 - RNA, 22 nt, Artificial Sequence
  Synthetic
uagugucuggguacaugacuuc

SEQ ID NO: 293760 - RNA, 23 nt, Artificial Sequence
  Synthetic
uuagugucuggguacaugacuuc

SEQ ID NO: 293761 - RNA, 24 nt, Artificial Sequence
  Synthetic
guuagugucuggguacaugacuuc

SEQ ID NO: 293762 - RNA, 18 nt, Artificial Sequence
  Synthetic
cguggucucgcugacuuc

SEQ ID NO: 293763 - RNA, 19 nt, Artificial Sequence
  Synthetic
ucguggucucgcugacuuc

SEQ ID NO: 293764 - RNA, 20 nt, Artificial Sequence
  Synthetic
uucguggucucgcugacuuc

SEQ ID NO: 293765 - RNA, 21 nt, Artificial Sequence
  Synthetic
guucguggucucgcugacuuc

SEQ ID NO: 293766 - RNA, 22 nt, Artificial Sequence
  Synthetic
gguucguggucucgcugacuuc

SEQ ID NO: 293767 - RNA, 23 nt, Artificial Sequence
  Synthetic
ggguucguggucucgcugacuuc

SEQ ID NO: 293768 - RNA, 24 nt, Artificial Sequence
  Synthetic
uggguucguggucucgcugacuuc

SEQ ID NO: 293769 - RNA, 18 nt, Artificial Sequence
  Synthetic
accucuuucugugacuuc

SEQ ID NO: 293770 - RNA, 19 nt, Artificial Sequence
  Synthetic
aaccucuuucugugacuuc

SEQ ID NO: 293771 - RNA, 20 nt, Artificial Sequence
  Synthetic
gaaccucuuucugugacuuc

SEQ ID NO: 293772 - RNA, 21 nt, Artificial Sequence
  Synthetic
cgaaccucuuucugugacuuc

SEQ ID NO: 293773 - RNA, 22 nt, Artificial Sequence
  Synthetic
ccgaaccucuuucugugacuuc

SEQ ID NO: 293774 - RNA, 23 nt, Artificial Sequence
  Synthetic
uccgaaccucuuucugugacuuc

SEQ ID NO: 293775 - RNA, 24 nt, Artificial Sequence
  Synthetic
uuccgaaccucuuucugugacuuc

SEQ ID NO: 293776 - RNA, 18 nt, Artificial Sequence
  Synthetic
acauaggaauaauacuuc

SEQ ID NO: 293777 - RNA, 19 nt, Artificial Sequence
  Synthetic
aacauaggaauaauacuuc

SEQ ID NO: 293778 - RNA, 20 nt, Artificial Sequence
  Synthetic
caacauaggaauaauacuuc

SEQ ID NO: 293779 - RNA, 21 nt, Artificial Sequence
  Synthetic
acaacauaggaauaauacuuc

SEQ ID NO: 293780 - RNA, 22 nt, Artificial Sequence
  Synthetic
cacaacauaggaauaauacuuc

SEQ ID NO: 293781 - RNA, 23 nt, Artificial Sequence
  Synthetic
ccacaacauaggaauaauacuuc

SEQ ID NO: 293782 - RNA, 24 nt, Artificial Sequence
  Synthetic
uccacaacauaggaauaauacuuc

SEQ ID NO: 293783 - RNA, 18 nt, Artificial Sequence
  Synthetic
gacuucuuuuaauacuuc

SEQ ID NO: 293784 - RNA, 19 nt, Artificial Sequence
  Synthetic
ugacuucuuuuaauacuuc

SEQ ID NO: 293785 - RNA, 20 nt, Artificial Sequence
  Synthetic
gugacuucuuuuaauacuuc

SEQ ID NO: 293786 - RNA, 21 nt, Artificial Sequence
  Synthetic
ugugacuucuuuuaauacuuc

SEQ ID NO: 293787 - RNA, 22 nt, Artificial Sequence
  Synthetic
uugugacuucuuuuaauacuuc

SEQ ID NO: 293788 - RNA, 23 nt, Artificial Sequence
  Synthetic
auugugacuucuuuuaauacuuc

SEQ ID NO: 293789 - RNA, 24 nt, Artificial Sequence
  Synthetic
uauugugacuucuuuuaauacuuc

SEQ ID NO: 293790 - RNA, 18 nt, Artificial Sequence
  Synthetic
cauuucaaaauauacuuc

SEQ ID NO: 293791 - RNA, 19 nt, Artificial Sequence
  Synthetic
ucauuucaaaauauacuuc

SEQ ID NO: 293792 - RNA, 20 nt, Artificial Sequence
  Synthetic
uucauuucaaaauauacuuc

SEQ ID NO: 293793 - RNA, 21 nt, Artificial Sequence
  Synthetic
uuucauuucaaaauauacuuc

SEQ ID NO: 293794 - RNA, 22 nt, Artificial Sequence
  Synthetic
auuucauuucaaaauauacuuc

SEQ ID NO: 293795 - RNA, 23 nt, Artificial Sequence
  Synthetic
aauuucauuucaaaauauacuuc

SEQ ID NO: 293796 - RNA, 24 nt, Artificial Sequence
  Synthetic
aaauuucauuucaaaauauacuuc

SEQ ID NO: 293797 - RNA, 18 nt, Artificial Sequence
  Synthetic
cccuuauucauauacuuc

SEQ ID NO: 293798 - RNA, 19 nt, Artificial Sequence
  Synthetic
ucccuuauucauauacuuc

SEQ ID NO: 293799 - RNA, 20 nt, Artificial Sequence
  Synthetic
uucccuuauucauauacuuc

SEQ ID NO: 293800 - RNA, 21 nt, Artificial Sequence
  Synthetic
auucccuuauucauauacuuc

SEQ ID NO: 293801 - RNA, 22 nt, Artificial Sequence
  Synthetic
cauucccuuauucauauacuuc

SEQ ID NO: 293802 - RNA, 23 nt, Artificial Sequence
  Synthetic
ucauucccuuauucauauacuuc

SEQ ID NO: 293803 - RNA, 24 nt, Artificial Sequence
  Synthetic
aucauucccuuauucauauacuuc

SEQ ID NO: 293804 - RNA, 18 nt, Artificial Sequence
  Synthetic
ugaauaggacaguacuuc

SEQ ID NO: 293805 - RNA, 19 nt, Artificial Sequence
  Synthetic
uugaauaggacaguacuuc

SEQ ID NO: 293806 - RNA, 20 nt, Artificial Sequence
  Synthetic
uuugaauaggacaguacuuc

SEQ ID NO: 293807 - RNA, 21 nt, Artificial Sequence
  Synthetic
uuuugaauaggacaguacuuc

SEQ ID NO: 293808 - RNA, 22 nt, Artificial Sequence
  Synthetic
guuuugaauaggacaguacuuc

SEQ ID NO: 293809 - RNA, 23 nt, Artificial Sequence
  Synthetic
aguuuugaauaggacaguacuuc

SEQ ID NO: 293810 - RNA, 24 nt, Artificial Sequence
  Synthetic
caguuuugaauaggacaguacuuc

SEQ ID NO: 293811 - RNA, 18 nt, Artificial Sequence
  Synthetic
auacacagccauuacuuc

SEQ ID NO: 293812 - RNA, 19 nt, Artificial Sequence
  Synthetic
uauacacagccauuacuuc

SEQ ID NO: 293813 - RNA, 20 nt, Artificial Sequence
  Synthetic
uuauacacagccauuacuuc

SEQ ID NO: 293814 - RNA, 21 nt, Artificial Sequence
  Synthetic
auuauacacagccauuacuuc

SEQ ID NO: 293815 - RNA, 22 nt, Artificial Sequence
  Synthetic
uauuauacacagccauuacuuc

SEQ ID NO: 293816 - RNA, 23 nt, Artificial Sequence
  Synthetic
auauuauacacagccauuacuuc

SEQ ID NO: 293817 - RNA, 24 nt, Artificial Sequence
  Synthetic
aauauuauacacagccauuacuuc

SEQ ID NO: 293818 - RNA, 18 nt, Artificial Sequence
  Synthetic
uucucuuacgguuacuuc

SEQ ID NO: 293819 - RNA, 19 nt, Artificial Sequence
  Synthetic
uuucucuuacgguuacuuc

SEQ ID NO: 293820 - RNA, 20 nt, Artificial Sequence
  Synthetic
guuucucuuacgguuacuuc

SEQ ID NO: 293821 - RNA, 21 nt, Artificial Sequence
  Synthetic
aguuucucuuacgguuacuuc

SEQ ID NO: 293822 - RNA, 22 nt, Artificial Sequence
  Synthetic
caguuucucuuacgguuacuuc

SEQ ID NO: 293823 - RNA, 23 nt, Artificial Sequence
  Synthetic
ucaguuucucuuacgguuacuuc

SEQ ID NO: 293824 - RNA, 24 nt, Artificial Sequence
  Synthetic
aucaguuucucuuacgguuacuuc

SEQ ID NO: 293825 - RNA, 18 nt, Artificial Sequence
  Synthetic
ugggauauggguuacuuc

SEQ ID NO: 293826 - RNA, 19 nt, Artificial Sequence
  Synthetic
cugggauauggguuacuuc

SEQ ID NO: 293827 - RNA, 20 nt, Artificial Sequence
  Synthetic
ccugggauauggguuacuuc

SEQ ID NO: 293828 - RNA, 21 nt, Artificial Sequence
  Synthetic
uccugggauauggguuacuuc

SEQ ID NO: 293829 - RNA, 22 nt, Artificial Sequence
  Synthetic
cuccugggauauggguuacuuc

SEQ ID NO: 293830 - RNA, 23 nt, Artificial Sequence
  Synthetic
acuccugggauauggguuacuuc

SEQ ID NO: 293831 - RNA, 24 nt, Artificial Sequence
  Synthetic
cacuccugggauauggguuacuuc

SEQ ID NO: 293832 - RNA, 18 nt, Artificial Sequence
  Synthetic
caggagaaugguuacuuc

SEQ ID NO: 293833 - RNA, 19 nt, Artificial Sequence
  Synthetic
ucaggagaaugguuacuuc

SEQ ID NO: 293834 - RNA, 20 nt, Artificial Sequence
  Synthetic
uucaggagaaugguuacuuc

SEQ ID NO: 293835 - RNA, 21 nt, Artificial Sequence
  Synthetic
auucaggagaaugguuacuuc

SEQ ID NO: 293836 - RNA, 22 nt, Artificial Sequence
  Synthetic
aauucaggagaaugguuacuuc

SEQ ID NO: 293837 - RNA, 23 nt, Artificial Sequence
  Synthetic
aaauucaggagaaugguuacuuc

SEQ ID NO: 293838 - RNA, 24 nt, Artificial Sequence
  Synthetic
aaaauucaggagaaugguuacuuc

SEQ ID NO: 293839 - RNA, 18 nt, Artificial Sequence
  Synthetic
aauaauucucuuuacuuc

SEQ ID NO: 293840 - RNA, 19 nt, Artificial Sequence
  Synthetic
aaauaauucucuuuacuuc

SEQ ID NO: 293841 - RNA, 20 nt, Artificial Sequence
  Synthetic
aaaauaauucucuuuacuuc

SEQ ID NO: 293842 - RNA, 21 nt, Artificial Sequence
  Synthetic
aaaaauaauucucuuuacuuc

SEQ ID NO: 293843 - RNA, 22 nt, Artificial Sequence
  Synthetic
uaaaaauaauucucuuuacuuc

SEQ ID NO: 293844 - RNA, 23 nt, Artificial Sequence
  Synthetic
cuaaaaauaauucucuuuacuuc

SEQ ID NO: 293845 - RNA, 24 nt, Artificial Sequence
  Synthetic
ccuaaaaauaauucucuuuacuuc

SEQ ID NO: 293846 - RNA, 18 nt, Artificial Sequence
  Synthetic
caguauaaauuaaccuuc

SEQ ID NO: 293847 - RNA, 19 nt, Artificial Sequence
  Synthetic
acaguauaaauuaaccuuc

SEQ ID NO: 293848 - RNA, 20 nt, Artificial Sequence
  Synthetic
uacaguauaaauuaaccuuc

SEQ ID NO: 293849 - RNA, 21 nt, Artificial Sequence
  Synthetic
guacaguauaaauuaaccuuc

SEQ ID NO: 293850 - RNA, 22 nt, Artificial Sequence
  Synthetic
uguacaguauaaauuaaccuuc

SEQ ID NO: 293851 - RNA, 23 nt, Artificial Sequence
  Synthetic
auguacaguauaaauuaaccuuc

SEQ ID NO: 293852 - RNA, 24 nt, Artificial Sequence
  Synthetic
aauguacaguauaaauuaaccuuc

SEQ ID NO: 293853 - RNA, 18 nt, Artificial Sequence
  Synthetic
uuaucucacugcaccuuc

SEQ ID NO: 293854 - RNA, 19 nt, Artificial Sequence
  Synthetic
uuuaucucacugcaccuuc

SEQ ID NO: 293855 - RNA, 20 nt, Artificial Sequence
  Synthetic
auuuaucucacugcaccuuc

SEQ ID NO: 293856 - RNA, 21 nt, Artificial Sequence
  Synthetic
gauuuaucucacugcaccuuc

SEQ ID NO: 293857 - RNA, 22 nt, Artificial Sequence
  Synthetic
agauuuaucucacugcaccuuc

SEQ ID NO: 293858 - RNA, 23 nt, Artificial Sequence
  Synthetic
cagauuuaucucacugcaccuuc

SEQ ID NO: 293859 - RNA, 24 nt, Artificial Sequence
  Synthetic
ccagauuuaucucacugcaccuuc

SEQ ID NO: 293860 - RNA, 18 nt, Artificial Sequence
  Synthetic
auguucuaugucaccuuc

SEQ ID NO: 293861 - RNA, 19 nt, Artificial Sequence
  Synthetic
gauguucuaugucaccuuc

SEQ ID NO: 293862 - RNA, 20 nt, Artificial Sequence
  Synthetic
ugauguucuaugucaccuuc

SEQ ID NO: 293863 - RNA, 21 nt, Artificial Sequence
  Synthetic
uugauguucuaugucaccuuc

SEQ ID NO: 293864 - RNA, 22 nt, Artificial Sequence
  Synthetic
guugauguucuaugucaccuuc

SEQ ID NO: 293865 - RNA, 23 nt, Artificial Sequence
  Synthetic
uguugauguucuaugucaccuuc

SEQ ID NO: 293866 - RNA, 24 nt, Artificial Sequence
  Synthetic
auguugauguucuaugucaccuuc

SEQ ID NO: 293867 - RNA, 18 nt, Artificial Sequence
  Synthetic
caaaucccugucaccuuc

SEQ ID NO: 293868 - RNA, 19 nt, Artificial Sequence
  Synthetic
ucaaaucccugucaccuuc

SEQ ID NO: 293869 - RNA, 20 nt, Artificial Sequence
  Synthetic
gucaaaucccugucaccuuc

SEQ ID NO: 293870 - RNA, 21 nt, Artificial Sequence
  Synthetic
ugucaaaucccugucaccuuc

SEQ ID NO: 293871 - RNA, 22 nt, Artificial Sequence
  Synthetic
uugucaaaucccugucaccuuc

SEQ ID NO: 293872 - RNA, 23 nt, Artificial Sequence
  Synthetic
uuugucaaaucccugucaccuuc

SEQ ID NO: 293873 - RNA, 24 nt, Artificial Sequence
  Synthetic
uuuugucaaaucccugucaccuuc

SEQ ID NO: 293874 - RNA, 18 nt, Artificial Sequence
  Synthetic
aagccacaaaauaccuuc

SEQ ID NO: 293875 - RNA, 19 nt, Artificial Sequence
  Synthetic
uaagccacaaaauaccuuc

SEQ ID NO: 293876 - RNA, 20 nt, Artificial Sequence
  Synthetic
auaagccacaaaauaccuuc

SEQ ID NO: 293877 - RNA, 21 nt, Artificial Sequence
  Synthetic
cauaagccacaaaauaccuuc

SEQ ID NO: 293878 - RNA, 22 nt, Artificial Sequence
  Synthetic
ccauaagccacaaaauaccuuc

SEQ ID NO: 293879 - RNA, 23 nt, Artificial Sequence
  Synthetic
gccauaagccacaaaauaccuuc

SEQ ID NO: 293880 - RNA, 24 nt, Artificial Sequence
  Synthetic
agccauaagccacaaaauaccuuc

SEQ ID NO: 293881 - RNA, 18 nt, Artificial Sequence
  Synthetic
uugcaagguuuuaccuuc

SEQ ID NO: 293882 - RNA, 19 nt, Artificial Sequence
  Synthetic
uuugcaagguuuuaccuuc

SEQ ID NO: 293883 - RNA, 20 nt, Artificial Sequence
  Synthetic
uuuugcaagguuuuaccuuc

SEQ ID NO: 293884 - RNA, 21 nt, Artificial Sequence
  Synthetic
uuuuugcaagguuuuaccuuc

SEQ ID NO: 293885 - RNA, 22 nt, Artificial Sequence
  Synthetic
auuuuugcaagguuuuaccuuc

SEQ ID NO: 293886 - RNA, 23 nt, Artificial Sequence
  Synthetic
uauuuuugcaagguuuuaccuuc

SEQ ID NO: 293887 - RNA, 24 nt, Artificial Sequence
  Synthetic
auauuuuugcaagguuuuaccuuc

SEQ ID NO: 293888 - RNA, 18 nt, Artificial Sequence
  Synthetic
aaucagcuugagcccuuc

SEQ ID NO: 293889 - RNA, 19 nt, Artificial Sequence
  Synthetic
uaaucagcuugagcccuuc

SEQ ID NO: 293890 - RNA, 20 nt, Artificial Sequence
  Synthetic
auaaucagcuugagcccuuc

SEQ ID NO: 293891 - RNA, 21 nt, Artificial Sequence
  Synthetic
aauaaucagcuugagcccuuc

SEQ ID NO: 293892 - RNA, 22 nt, Artificial Sequence
  Synthetic
aaauaaucagcuugagcccuuc

SEQ ID NO: 293893 - RNA, 23 nt, Artificial Sequence
  Synthetic
aaaauaaucagcuugagcccuuc

SEQ ID NO: 293894 - RNA, 24 nt, Artificial Sequence
  Synthetic
gaaaauaaucagcuugagcccuuc

SEQ ID NO: 293895 - RNA, 18 nt, Artificial Sequence
  Synthetic
uugcaguuauggcccuuc

SEQ ID NO: 293896 - RNA, 19 nt, Artificial Sequence
  Synthetic
uuugcaguuauggcccuuc

SEQ ID NO: 293897 - RNA, 20 nt, Artificial Sequence
  Synthetic
cuuugcaguuauggcccuuc

SEQ ID NO: 293898 - RNA, 21 nt, Artificial Sequence
  Synthetic
ccuuugcaguuauggcccuuc

SEQ ID NO: 293899 - RNA, 22 nt, Artificial Sequence
  Synthetic
uccuuugcaguuauggcccuuc

SEQ ID NO: 293900 - RNA, 23 nt, Artificial Sequence
  Synthetic
auccuuugcaguuauggcccuuc

SEQ ID NO: 293901 - RNA, 24 nt, Artificial Sequence
  Synthetic
uauccuuugcaguuauggcccuuc

SEQ ID NO: 293902 - RNA, 18 nt, Artificial Sequence
  Synthetic
ggaacaaacaaagccuuc

SEQ ID NO: 293903 - RNA, 19 nt, Artificial Sequence
  Synthetic
aggaacaaacaaagccuuc

SEQ ID NO: 293904 - RNA, 20 nt, Artificial Sequence
  Synthetic
aaggaacaaacaaagccuuc

SEQ ID NO: 293905 - RNA, 21 nt, Artificial Sequence
  Synthetic
aaaggaacaaacaaagccuuc

SEQ ID NO: 293906 - RNA, 22 nt, Artificial Sequence
  Synthetic
aaaaggaacaaacaaagccuuc

SEQ ID NO: 293907 - RNA, 23 nt, Artificial Sequence
  Synthetic
gaaaaggaacaaacaaagccuuc

SEQ ID NO: 293908 - RNA, 24 nt, Artificial Sequence
  Synthetic
ugaaaaggaacaaacaaagccuuc

SEQ ID NO: 293909 - RNA, 18 nt, Artificial Sequence
  Synthetic
cucauuucacaggccuuc

SEQ ID NO: 293910 - RNA, 19 nt, Artificial Sequence
  Synthetic
ucucauuucacaggccuuc

SEQ ID NO: 293911 - RNA, 20 nt, Artificial Sequence
  Synthetic
aucucauuucacaggccuuc

SEQ ID NO: 293912 - RNA, 21 nt, Artificial Sequence
  Synthetic
caucucauuucacaggccuuc

SEQ ID NO: 293913 - RNA, 22 nt, Artificial Sequence
  Synthetic
ucaucucauuucacaggccuuc

SEQ ID NO: 293914 - RNA, 23 nt, Artificial Sequence
  Synthetic
uucaucucauuucacaggccuuc

SEQ ID NO: 293915 - RNA, 24 nt, Artificial Sequence
  Synthetic
uuucaucucauuucacaggccuuc

SEQ ID NO: 293916 - RNA, 18 nt, Artificial Sequence
  Synthetic
ccuagggacauggccuuc

SEQ ID NO: 293917 - RNA, 19 nt, Artificial Sequence
  Synthetic
uccuagggacauggccuuc

SEQ ID NO: 293918 - RNA, 20 nt, Artificial Sequence
  Synthetic
auccuagggacauggccuuc

SEQ ID NO: 293919 - RNA, 21 nt, Artificial Sequence
  Synthetic
cauccuagggacauggccuuc

SEQ ID NO: 293920 - RNA, 22 nt, Artificial Sequence
  Synthetic
ucauccuagggacauggccuuc

SEQ ID NO: 293921 - RNA, 23 nt, Artificial Sequence
  Synthetic
gucauccuagggacauggccuuc

SEQ ID NO: 293922 - RNA, 24 nt, Artificial Sequence
  Synthetic
ggucauccuagggacauggccuuc

SEQ ID NO: 293923 - RNA, 18 nt, Artificial Sequence
  Synthetic
gaagcacguauggccuuc

SEQ ID NO: 293924 - RNA, 19 nt, Artificial Sequence
  Synthetic
ugaagcacguauggccuuc

SEQ ID NO: 293925 - RNA, 20 nt, Artificial Sequence
  Synthetic
augaagcacguauggccuuc

SEQ ID NO: 293926 - RNA, 21 nt, Artificial Sequence
  Synthetic
caugaagcacguauggccuuc

SEQ ID NO: 293927 - RNA, 22 nt, Artificial Sequence
  Synthetic
ucaugaagcacguauggccuuc

SEQ ID NO: 293928 - RNA, 23 nt, Artificial Sequence
  Synthetic
uucaugaagcacguauggccuuc

SEQ ID NO: 293929 - RNA, 24 nt, Artificial Sequence
  Synthetic
guucaugaagcacguauggccuuc

SEQ ID NO: 293930 - RNA, 18 nt, Artificial Sequence
  Synthetic
uauuuauaccuggccuuc

SEQ ID NO: 293931 - RNA, 19 nt, Artificial Sequence
  Synthetic
cuauuuauaccuggccuuc

SEQ ID NO: 293932 - RNA, 20 nt, Artificial Sequence
  Synthetic
acuauuuauaccuggccuuc

SEQ ID NO: 293933 - RNA, 21 nt, Artificial Sequence
  Synthetic
cacuauuuauaccuggccuuc

SEQ ID NO: 293934 - RNA, 22 nt, Artificial Sequence
  Synthetic
acacuauuuauaccuggccuuc

SEQ ID NO: 293935 - RNA, 23 nt, Artificial Sequence
  Synthetic
gacacuauuuauaccuggccuuc

SEQ ID NO: 293936 - RNA, 24 nt, Artificial Sequence
  Synthetic
ggacacuauuuauaccuggccuuc

SEQ ID NO: 293937 - RNA, 18 nt, Artificial Sequence
  Synthetic
aaacgaggugaugccuuc

SEQ ID NO: 293938 - RNA, 19 nt, Artificial Sequence
  Synthetic
aaaacgaggugaugccuuc

SEQ ID NO: 293939 - RNA, 20 nt, Artificial Sequence
  Synthetic
uaaaacgaggugaugccuuc

SEQ ID NO: 293940 - RNA, 21 nt, Artificial Sequence
  Synthetic
auaaaacgaggugaugccuuc

SEQ ID NO: 293941 - RNA, 22 nt, Artificial Sequence
  Synthetic
uauaaaacgaggugaugccuuc

SEQ ID NO: 293942 - RNA, 23 nt, Artificial Sequence
  Synthetic
cuauaaaacgaggugaugccuuc

SEQ ID NO: 293943 - RNA, 24 nt, Artificial Sequence
  Synthetic
gcuauaaaacgaggugaugccuuc

SEQ ID NO: 293944 - RNA, 18 nt, Artificial Sequence
  Synthetic
gacuugaucauugccuuc

SEQ ID NO: 293945 - RNA, 19 nt, Artificial Sequence
  Synthetic
agacuugaucauugccuuc

SEQ ID NO: 293946 - RNA, 20 nt, Artificial Sequence
  Synthetic
cagacuugaucauugccuuc

SEQ ID NO: 293947 - RNA, 21 nt, Artificial Sequence
  Synthetic
acagacuugaucauugccuuc

SEQ ID NO: 293948 - RNA, 22 nt, Artificial Sequence
  Synthetic
aacagacuugaucauugccuuc

SEQ ID NO: 293949 - RNA, 23 nt, Artificial Sequence
  Synthetic
aaacagacuugaucauugccuuc

SEQ ID NO: 293950 - RNA, 24 nt, Artificial Sequence
  Synthetic
gaaacagacuugaucauugccuuc

SEQ ID NO: 293951 - RNA, 18 nt, Artificial Sequence
  Synthetic
gcuguuuguauauccuuc

SEQ ID NO: 293952 - RNA, 19 nt, Artificial Sequence
  Synthetic
agcuguuuguauauccuuc

SEQ ID NO: 293953 - RNA, 20 nt, Artificial Sequence
  Synthetic
cagcuguuuguauauccuuc

SEQ ID NO: 293954 - RNA, 21 nt, Artificial Sequence
  Synthetic
ucagcuguuuguauauccuuc

SEQ ID NO: 293955 - RNA, 22 nt, Artificial Sequence
  Synthetic
gucagcuguuuguauauccuuc

SEQ ID NO: 293956 - RNA, 23 nt, Artificial Sequence
  Synthetic
ugucagcuguuuguauauccuuc

SEQ ID NO: 293957 - RNA, 24 nt, Artificial Sequence
  Synthetic
uugucagcuguuuguauauccuuc

SEQ ID NO: 293958 - RNA, 18 nt, Artificial Sequence
  Synthetic
gaaauuggaagcuccuuc

SEQ ID NO: 293959 - RNA, 19 nt, Artificial Sequence
  Synthetic
ugaaauuggaagcuccuuc

SEQ ID NO: 293960 - RNA, 20 nt, Artificial Sequence
  Synthetic
uugaaauuggaagcuccuuc

SEQ ID NO: 293961 - RNA, 21 nt, Artificial Sequence
  Synthetic
cuugaaauuggaagcuccuuc

SEQ ID NO: 293962 - RNA, 22 nt, Artificial Sequence
  Synthetic
gcuugaaauuggaagcuccuuc

SEQ ID NO: 293963 - RNA, 23 nt, Artificial Sequence
  Synthetic
ugcuugaaauuggaagcuccuuc

SEQ ID NO: 293964 - RNA, 24 nt, Artificial Sequence
  Synthetic
uugcuugaaauuggaagcuccuuc

SEQ ID NO: 293965 - RNA, 18 nt, Artificial Sequence
  Synthetic
cuucauaacugcuccuuc

SEQ ID NO: 293966 - RNA, 19 nt, Artificial Sequence
  Synthetic
gcuucauaacugcuccuuc

SEQ ID NO: 293967 - RNA, 20 nt, Artificial Sequence
  Synthetic
agcuucauaacugcuccuuc

SEQ ID NO: 293968 - RNA, 21 nt, Artificial Sequence
  Synthetic
uagcuucauaacugcuccuuc

SEQ ID NO: 293969 - RNA, 22 nt, Artificial Sequence
  Synthetic
uuagcuucauaacugcuccuuc

SEQ ID NO: 293970 - RNA, 23 nt, Artificial Sequence
  Synthetic
uuuagcuucauaacugcuccuuc

SEQ ID NO: 293971 - RNA, 24 nt, Artificial Sequence
  Synthetic
uuuuagcuucauaacugcuccuuc

SEQ ID NO: 293972 - RNA, 18 nt, Artificial Sequence
  Synthetic
aucagccauaucuccuuc

SEQ ID NO: 293973 - RNA, 19 nt, Artificial Sequence
  Synthetic
aaucagccauaucuccuuc

SEQ ID NO: 293974 - RNA, 20 nt, Artificial Sequence
  Synthetic
caaucagccauaucuccuuc

SEQ ID NO: 293975 - RNA, 21 nt, Artificial Sequence
  Synthetic
gcaaucagccauaucuccuuc

SEQ ID NO: 293976 - RNA, 22 nt, Artificial Sequence
  Synthetic
ugcaaucagccauaucuccuuc

SEQ ID NO: 293977 - RNA, 23 nt, Artificial Sequence
  Synthetic
augcaaucagccauaucuccuuc

SEQ ID NO: 293978 - RNA, 24 nt, Artificial Sequence
  Synthetic
uaugcaaucagccauaucuccuuc

SEQ ID NO: 293979 - RNA, 18 nt, Artificial Sequence
  Synthetic
acuccuugugucuccuuc

SEQ ID NO: 293980 - RNA, 19 nt, Artificial Sequence
  Synthetic
gacuccuugugucuccuuc

SEQ ID NO: 293981 - RNA, 20 nt, Artificial Sequence
  Synthetic
ggacuccuugugucuccuuc

SEQ ID NO: 293982 - RNA, 21 nt, Artificial Sequence
  Synthetic
aggacuccuugugucuccuuc

SEQ ID NO: 293983 - RNA, 22 nt, Artificial Sequence
  Synthetic
aaggacuccuugugucuccuuc

SEQ ID NO: 293984 - RNA, 23 nt, Artificial Sequence
  Synthetic
uaaggacuccuugugucuccuuc

SEQ ID NO: 293985 - RNA, 24 nt, Artificial Sequence
  Synthetic
guaaggacuccuugugucuccuuc

SEQ ID NO: 293986 - RNA, 18 nt, Artificial Sequence
  Synthetic
ugcuaaaccauguccuuc

SEQ ID NO: 293987 - RNA, 19 nt, Artificial Sequence
  Synthetic
uugcuaaaccauguccuuc

SEQ ID NO: 293988 - RNA, 20 nt, Artificial Sequence
  Synthetic
cuugcuaaaccauguccuuc

SEQ ID NO: 293989 - RNA, 21 nt, Artificial Sequence
  Synthetic
ucuugcuaaaccauguccuuc

SEQ ID NO: 293990 - RNA, 22 nt, Artificial Sequence
  Synthetic
cucuugcuaaaccauguccuuc

SEQ ID NO: 293991 - RNA, 23 nt, Artificial Sequence
  Synthetic
acucuugcuaaaccauguccuuc

SEQ ID NO: 293992 - RNA, 24 nt, Artificial Sequence
  Synthetic
uacucuugcuaaaccauguccuuc

SEQ ID NO: 293993 - RNA, 18 nt, Artificial Sequence
  Synthetic
aaaagugguauguccuuc

SEQ ID NO: 293994 - RNA, 19 nt, Artificial Sequence
  Synthetic
caaaagugguauguccuuc

SEQ ID NO: 293995 - RNA, 20 nt, Artificial Sequence
  Synthetic
ccaaaagugguauguccuuc

SEQ ID NO: 293996 - RNA, 21 nt, Artificial Sequence
  Synthetic
accaaaagugguauguccuuc

SEQ ID NO: 293997 - RNA, 22 nt, Artificial Sequence
  Synthetic
uaccaaaagugguauguccuuc

SEQ ID NO: 293998 - RNA, 23 nt, Artificial Sequence
  Synthetic
guaccaaaagugguauguccuuc

SEQ ID NO: 293999 - RNA, 24 nt, Artificial Sequence
  Synthetic
uguaccaaaagugguauguccuuc

SEQ ID NO: 294000 - RNA, 18 nt, Artificial Sequence
  Synthetic
uuuaaccacuauuccuuc

SEQ ID NO: 294001 - RNA, 19 nt, Artificial Sequence
  Synthetic
uuuuaaccacuauuccuuc

SEQ ID NO: 294002 - RNA, 20 nt, Artificial Sequence
  Synthetic
uuuuuaaccacuauuccuuc

SEQ ID NO: 294003 - RNA, 21 nt, Artificial Sequence
  Synthetic
auuuuuaaccacuauuccuuc

SEQ ID NO: 294004 - RNA, 22 nt, Artificial Sequence
  Synthetic
uauuuuuaaccacuauuccuuc

SEQ ID NO: 294005 - RNA, 23 nt, Artificial Sequence
  Synthetic
auauuuuuaaccacuauuccuuc

SEQ ID NO: 294006 - RNA, 24 nt, Artificial Sequence
  Synthetic
uauauuuuuaaccacuauuccuuc

SEQ ID NO: 294007 - RNA, 18 nt, Artificial Sequence
  Synthetic
auguuuagcgcuuccuuc

SEQ ID NO: 294008 - RNA, 19 nt, Artificial Sequence
  Synthetic
cauguuuagcgcuuccuuc

SEQ ID NO: 294009 - RNA, 20 nt, Artificial Sequence
  Synthetic
ccauguuuagcgcuuccuuc

SEQ ID NO: 294010 - RNA, 21 nt, Artificial Sequence
  Synthetic
uccauguuuagcgcuuccuuc

SEQ ID NO: 294011 - RNA, 22 nt, Artificial Sequence
  Synthetic
uuccauguuuagcgcuuccuuc

SEQ ID NO: 294012 - RNA, 23 nt, Artificial Sequence
  Synthetic
uuuccauguuuagcgcuuccuuc

SEQ ID NO: 294013 - RNA, 24 nt, Artificial Sequence
  Synthetic
cuuuccauguuuagcgcuuccuuc

SEQ ID NO: 294014 - RNA, 18 nt, Artificial Sequence
  Synthetic
gaaaaaaaaucuuccuuc

SEQ ID NO: 294015 - RNA, 19 nt, Artificial Sequence
  Synthetic
ugaaaaaaaaucuuccuuc

SEQ ID NO: 294016 - RNA, 20 nt, Artificial Sequence
  Synthetic
cugaaaaaaaaucuuccuuc

SEQ ID NO: 294017 - RNA, 21 nt, Artificial Sequence
  Synthetic
acugaaaaaaaaucuuccuuc

SEQ ID NO: 294018 - RNA, 22 nt, Artificial Sequence
  Synthetic
uacugaaaaaaaaucuuccuuc

SEQ ID NO: 294019 - RNA, 23 nt, Artificial Sequence
  Synthetic
uuacugaaaaaaaaucuuccuuc

SEQ ID NO: 294020 - RNA, 24 nt, Artificial Sequence
  Synthetic
auuacugaaaaaaaaucuuccuuc

SEQ ID NO: 294021 - RNA, 18 nt, Artificial Sequence
  Synthetic
aggcucugaucuuccuuc

SEQ ID NO: 294022 - RNA, 19 nt, Artificial Sequence
  Synthetic
caggcucugaucuuccuuc

SEQ ID NO: 294023 - RNA, 20 nt, Artificial Sequence
  Synthetic
ccaggcucugaucuuccuuc

SEQ ID NO: 294024 - RNA, 21 nt, Artificial Sequence
  Synthetic
accaggcucugaucuuccuuc

SEQ ID NO: 294025 - RNA, 22 nt, Artificial Sequence
  Synthetic
gaccaggcucugaucuuccuuc

SEQ ID NO: 294026 - RNA, 23 nt, Artificial Sequence
  Synthetic
agaccaggcucugaucuuccuuc

SEQ ID NO: 294027 - RNA, 24 nt, Artificial Sequence
  Synthetic
aagaccaggcucugaucuuccuuc

SEQ ID NO: 294028 - RNA, 18 nt, Artificial Sequence
  Synthetic
ugaauaggaauuuccuuc

SEQ ID NO: 294029 - RNA, 19 nt, Artificial Sequence
  Synthetic
gugaauaggaauuuccuuc

SEQ ID NO: 294030 - RNA, 20 nt, Artificial Sequence
  Synthetic
agugaauaggaauuuccuuc

SEQ ID NO: 294031 - RNA, 21 nt, Artificial Sequence
  Synthetic
gagugaauaggaauuuccuuc

SEQ ID NO: 294032 - RNA, 22 nt, Artificial Sequence
  Synthetic
ugagugaauaggaauuuccuuc

SEQ ID NO: 294033 - RNA, 23 nt, Artificial Sequence
  Synthetic
gugagugaauaggaauuuccuuc

SEQ ID NO: 294034 - RNA, 24 nt, Artificial Sequence
  Synthetic
agugagugaauaggaauuuccuuc

SEQ ID NO: 294035 - RNA, 18 nt, Artificial Sequence
  Synthetic
aaaaucaguauuuccuuc

SEQ ID NO: 294036 - RNA, 19 nt, Artificial Sequence
  Synthetic
uaaaaucaguauuuccuuc

SEQ ID NO: 294037 - RNA, 20 nt, Artificial Sequence
  Synthetic
uuaaaaucaguauuuccuuc

SEQ ID NO: 294038 - RNA, 21 nt, Artificial Sequence
  Synthetic
uuuaaaaucaguauuuccuuc

SEQ ID NO: 294039 - RNA, 22 nt, Artificial Sequence
  Synthetic
uuuuaaaaucaguauuuccuuc

SEQ ID NO: 294040 - RNA, 23 nt, Artificial Sequence
  Synthetic
guuuuaaaaucaguauuuccuuc

SEQ ID NO: 294041 - RNA, 24 nt, Artificial Sequence
  Synthetic
uguuuuaaaaucaguauuuccuuc

SEQ ID NO: 294042 - RNA, 18 nt, Artificial Sequence
  Synthetic
agaaucauuauuuccuuc

SEQ ID NO: 294043 - RNA, 19 nt, Artificial Sequence
  Synthetic
uagaaucauuauuuccuuc

SEQ ID NO: 294044 - RNA, 20 nt, Artificial Sequence
  Synthetic
auagaaucauuauuuccuuc

SEQ ID NO: 294045 - RNA, 21 nt, Artificial Sequence
  Synthetic
gauagaaucauuauuuccuuc

SEQ ID NO: 294046 - RNA, 22 nt, Artificial Sequence
  Synthetic
agauagaaucauuauuuccuuc

SEQ ID NO: 294047 - RNA, 23 nt, Artificial Sequence
  Synthetic
uagauagaaucauuauuuccuuc

SEQ ID NO: 294048 - RNA, 24 nt, Artificial Sequence
  Synthetic
uuagauagaaucauuauuuccuuc

SEQ ID NO: 294049 - RNA, 18 nt, Artificial Sequence
  Synthetic
aacacuuuuuuuuccuuc

SEQ ID NO: 294050 - RNA, 19 nt, Artificial Sequence
  Synthetic
uaacacuuuuuuuuccuuc

SEQ ID NO: 294051 - RNA, 20 nt, Artificial Sequence
  Synthetic
guaacacuuuuuuuuccuuc

SEQ ID NO: 294052 - RNA, 21 nt, Artificial Sequence
  Synthetic
uguaacacuuuuuuuuccuuc

SEQ ID NO: 294053 - RNA, 22 nt, Artificial Sequence
  Synthetic
uuguaacacuuuuuuuuccuuc

SEQ ID NO: 294054 - RNA, 23 nt, Artificial Sequence
  Synthetic
cuuguaacacuuuuuuuuccuuc

SEQ ID NO: 294055 - RNA, 24 nt, Artificial Sequence
  Synthetic
ucuuguaacacuuuuuuuuccuuc

SEQ ID NO: 294056 - RNA, 18 nt, Artificial Sequence
  Synthetic
agcaagauuaaaagcuuc

SEQ ID NO: 294057 - RNA, 19 nt, Artificial Sequence
  Synthetic
cagcaagauuaaaagcuuc

SEQ ID NO: 294058 - RNA, 20 nt, Artificial Sequence
  Synthetic
ccagcaagauuaaaagcuuc

SEQ ID NO: 294059 - RNA, 21 nt, Artificial Sequence
  Synthetic
cccagcaagauuaaaagcuuc

SEQ ID NO: 294060 - RNA, 22 nt, Artificial Sequence
  Synthetic
ccccagcaagauuaaaagcuuc

SEQ ID NO: 294061 - RNA, 23 nt, Artificial Sequence
  Synthetic
cccccagcaagauuaaaagcuuc

SEQ ID NO: 294062 - RNA, 24 nt, Artificial Sequence
  Synthetic
ucccccagcaagauuaaaagcuuc

SEQ ID NO: 294063 - RNA, 18 nt, Artificial Sequence
  Synthetic
ggauaccuucaaagcuuc

SEQ ID NO: 294064 - RNA, 19 nt, Artificial Sequence
  Synthetic
aggauaccuucaaagcuuc

SEQ ID NO: 294065 - RNA, 20 nt, Artificial Sequence
  Synthetic
aaggauaccuucaaagcuuc

SEQ ID NO: 294066 - RNA, 21 nt, Artificial Sequence
  Synthetic
uaaggauaccuucaaagcuuc

SEQ ID NO: 294067 - RNA, 22 nt, Artificial Sequence
  Synthetic
uuaaggauaccuucaaagcuuc

SEQ ID NO: 294068 - RNA, 23 nt, Artificial Sequence
  Synthetic
auuaaggauaccuucaaagcuuc

SEQ ID NO: 294069 - RNA, 24 nt, Artificial Sequence
  Synthetic
cauuaaggauaccuucaaagcuuc

SEQ ID NO: 294070 - RNA, 18 nt, Artificial Sequence
  Synthetic
acauagauugaaagcuuc

SEQ ID NO: 294071 - RNA, 19 nt, Artificial Sequence
  Synthetic
cacauagauugaaagcuuc

SEQ ID NO: 294072 - RNA, 20 nt, Artificial Sequence
  Synthetic
ucacauagauugaaagcuuc

SEQ ID NO: 294073 - RNA, 21 nt, Artificial Sequence
  Synthetic
cucacauagauugaaagcuuc

SEQ ID NO: 294074 - RNA, 22 nt, Artificial Sequence
  Synthetic
ucucacauagauugaaagcuuc

SEQ ID NO: 294075 - RNA, 23 nt, Artificial Sequence
  Synthetic
uucucacauagauugaaagcuuc

SEQ ID NO: 294076 - RNA, 24 nt, Artificial Sequence
  Synthetic
auucucacauagauugaaagcuuc

SEQ ID NO: 294077 - RNA, 18 nt, Artificial Sequence
  Synthetic
ccucugggaugaagcuuc

SEQ ID NO: 294078 - RNA, 19 nt, Artificial Sequence
  Synthetic
cccucugggaugaagcuuc

SEQ ID NO: 294079 - RNA, 20 nt, Artificial Sequence
  Synthetic
ccccucugggaugaagcuuc

SEQ ID NO: 294080 - RNA, 21 nt, Artificial Sequence
  Synthetic
gccccucugggaugaagcuuc

SEQ ID NO: 294081 - RNA, 22 nt, Artificial Sequence
  Synthetic
ugccccucugggaugaagcuuc

SEQ ID NO: 294082 - RNA, 23 nt, Artificial Sequence
  Synthetic
gugccccucugggaugaagcuuc

SEQ ID NO: 294083 - RNA, 24 nt, Artificial Sequence
  Synthetic
ggugccccucugggaugaagcuuc

SEQ ID NO: 294084 - RNA, 18 nt, Artificial Sequence
  Synthetic
uaggacuuuauaagcuuc

SEQ ID NO: 294085 - RNA, 19 nt, Artificial Sequence
  Synthetic
guaggacuuuauaagcuuc

SEQ ID NO: 294086 - RNA, 20 nt, Artificial Sequence
  Synthetic
uguaggacuuuauaagcuuc

SEQ ID NO: 294087 - RNA, 21 nt, Artificial Sequence
  Synthetic
guguaggacuuuauaagcuuc

SEQ ID NO: 294088 - RNA, 22 nt, Artificial Sequence
  Synthetic
aguguaggacuuuauaagcuuc

SEQ ID NO: 294089 - RNA, 23 nt, Artificial Sequence
  Synthetic
aaguguaggacuuuauaagcuuc

SEQ ID NO: 294090 - RNA, 24 nt, Artificial Sequence
  Synthetic
aaaguguaggacuuuauaagcuuc

SEQ ID NO: 294091 - RNA, 18 nt, Artificial Sequence
  Synthetic
aaggaaagacacagcuuc

SEQ ID NO: 294092 - RNA, 19 nt, Artificial Sequence
  Synthetic
uaaggaaagacacagcuuc

SEQ ID NO: 294093 - RNA, 20 nt, Artificial Sequence
  Synthetic
cuaaggaaagacacagcuuc

SEQ ID NO: 294094 - RNA, 21 nt, Artificial Sequence
  Synthetic
acuaaggaaagacacagcuuc

SEQ ID NO: 294095 - RNA, 22 nt, Artificial Sequence
  Synthetic
uacuaaggaaagacacagcuuc

SEQ ID NO: 294096 - RNA, 23 nt, Artificial Sequence
  Synthetic
auacuaaggaaagacacagcuuc

SEQ ID NO: 294097 - RNA, 24 nt, Artificial Sequence
  Synthetic
cauacuaaggaaagacacagcuuc

SEQ ID NO: 294098 - RNA, 18 nt, Artificial Sequence
  Synthetic
agcguaagacccagcuuc

SEQ ID NO: 294099 - RNA, 19 nt, Artificial Sequence
  Synthetic
gagcguaagacccagcuuc

SEQ ID NO: 294100 - RNA, 20 nt, Artificial Sequence
  Synthetic
agagcguaagacccagcuuc

SEQ ID NO: 294101 - RNA, 21 nt, Artificial Sequence
  Synthetic
cagagcguaagacccagcuuc

SEQ ID NO: 294102 - RNA, 22 nt, Artificial Sequence
  Synthetic
acagagcguaagacccagcuuc

SEQ ID NO: 294103 - RNA, 23 nt, Artificial Sequence
  Synthetic
aacagagcguaagacccagcuuc

SEQ ID NO: 294104 - RNA, 24 nt, Artificial Sequence
  Synthetic
caacagagcguaagacccagcuuc

SEQ ID NO: 294105 - RNA, 18 nt, Artificial Sequence
  Synthetic
ucagcgaguaucagcuuc

SEQ ID NO: 294106 - RNA, 19 nt, Artificial Sequence
  Synthetic
uucagcgaguaucagcuuc

SEQ ID NO: 294107 - RNA, 20 nt, Artificial Sequence
  Synthetic
guucagcgaguaucagcuuc

SEQ ID NO: 294108 - RNA, 21 nt, Artificial Sequence
  Synthetic
uguucagcgaguaucagcuuc

SEQ ID NO: 294109 - RNA, 22 nt, Artificial Sequence
  Synthetic
auguucagcgaguaucagcuuc

SEQ ID NO: 294110 - RNA, 23 nt, Artificial Sequence
  Synthetic
cauguucagcgaguaucagcuuc

SEQ ID NO: 294111 - RNA, 24 nt, Artificial Sequence
  Synthetic
gcauguucagcgaguaucagcuuc

SEQ ID NO: 294112 - RNA, 18 nt, Artificial Sequence
  Synthetic
cagcaucuacucagcuuc

SEQ ID NO: 294113 - RNA, 19 nt, Artificial Sequence
  Synthetic
ccagcaucuacucagcuuc

SEQ ID NO: 294114 - RNA, 20 nt, Artificial Sequence
  Synthetic
accagcaucuacucagcuuc

SEQ ID NO: 294115 - RNA, 21 nt, Artificial Sequence
  Synthetic
caccagcaucuacucagcuuc

SEQ ID NO: 294116 - RNA, 22 nt, Artificial Sequence
  Synthetic
acaccagcaucuacucagcuuc

SEQ ID NO: 294117 - RNA, 23 nt, Artificial Sequence
  Synthetic
gacaccagcaucuacucagcuuc

SEQ ID NO: 294118 - RNA, 24 nt, Artificial Sequence
  Synthetic
ggacaccagcaucuacucagcuuc

SEQ ID NO: 294119 - RNA, 18 nt, Artificial Sequence
  Synthetic
uacucaauugugagcuuc

SEQ ID NO: 294120 - RNA, 19 nt, Artificial Sequence
  Synthetic
cuacucaauugugagcuuc

SEQ ID NO: 294121 - RNA, 20 nt, Artificial Sequence
  Synthetic
ccuacucaauugugagcuuc

SEQ ID NO: 294122 - RNA, 21 nt, Artificial Sequence
  Synthetic
cccuacucaauugugagcuuc

SEQ ID NO: 294123 - RNA, 22 nt, Artificial Sequence
  Synthetic
ccccuacucaauugugagcuuc

SEQ ID NO: 294124 - RNA, 23 nt, Artificial Sequence
  Synthetic
cccccuacucaauugugagcuuc

SEQ ID NO: 294125 - RNA, 24 nt, Artificial Sequence
  Synthetic
ucccccuacucaauugugagcuuc

SEQ ID NO: 294126 - RNA, 18 nt, Artificial Sequence
  Synthetic
aguguaagacauagcuuc

SEQ ID NO: 294127 - RNA, 19 nt, Artificial Sequence
  Synthetic
gaguguaagacauagcuuc

SEQ ID NO: 294128 - RNA, 20 nt, Artificial Sequence
  Synthetic
ggaguguaagacauagcuuc

SEQ ID NO: 294129 - RNA, 21 nt, Artificial Sequence
  Synthetic
aggaguguaagacauagcuuc

SEQ ID NO: 294130 - RNA, 22 nt, Artificial Sequence
  Synthetic
aaggaguguaagacauagcuuc

SEQ ID NO: 294131 - RNA, 23 nt, Artificial Sequence
  Synthetic
gaaggaguguaagacauagcuuc

SEQ ID NO: 294132 - RNA, 24 nt, Artificial Sequence
  Synthetic
agaaggaguguaagacauagcuuc

SEQ ID NO: 294133 - RNA, 18 nt, Artificial Sequence
  Synthetic
cacugcaaccuccgcuuc

SEQ ID NO: 294134 - RNA, 19 nt, Artificial Sequence
  Synthetic
ucacugcaaccuccgcuuc

SEQ ID NO: 294135 - RNA, 20 nt, Artificial Sequence
  Synthetic
cucacugcaaccuccgcuuc

SEQ ID NO: 294136 - RNA, 21 nt, Artificial Sequence
  Synthetic
gcucacugcaaccuccgcuuc

SEQ ID NO: 294137 - RNA, 22 nt, Artificial Sequence
  Synthetic
ggcucacugcaaccuccgcuuc

SEQ ID NO: 294138 - RNA, 23 nt, Artificial Sequence
  Synthetic
cggcucacugcaaccuccgcuuc

SEQ ID NO: 294139 - RNA, 24 nt, Artificial Sequence
  Synthetic
ucggcucacugcaaccuccgcuuc

SEQ ID NO: 294140 - RNA, 18 nt, Artificial Sequence
  Synthetic
cuguaaucucagcgcuuc

SEQ ID NO: 294141 - RNA, 19 nt, Artificial Sequence
  Synthetic
ccuguaaucucagcgcuuc

SEQ ID NO: 294142 - RNA, 20 nt, Artificial Sequence
  Synthetic
gccuguaaucucagcgcuuc

SEQ ID NO: 294143 - RNA, 21 nt, Artificial Sequence
  Synthetic
ugccuguaaucucagcgcuuc

SEQ ID NO: 294144 - RNA, 22 nt, Artificial Sequence
  Synthetic
augccuguaaucucagcgcuuc

SEQ ID NO: 294145 - RNA, 23 nt, Artificial Sequence
  Synthetic
caugccuguaaucucagcgcuuc

SEQ ID NO: 294146 - RNA, 24 nt, Artificial Sequence
  Synthetic
ucaugccuguaaucucagcgcuuc

SEQ ID NO: 294147 - RNA, 18 nt, Artificial Sequence
  Synthetic
uaaaucaaggaaggcuuc

SEQ ID NO: 294148 - RNA, 19 nt, Artificial Sequence
  Synthetic
cuaaaucaaggaaggcuuc

SEQ ID NO: 294149 - RNA, 20 nt, Artificial Sequence
  Synthetic
gcuaaaucaaggaaggcuuc

SEQ ID NO: 294150 - RNA, 21 nt, Artificial Sequence
  Synthetic
agcuaaaucaaggaaggcuuc

SEQ ID NO: 294151 - RNA, 22 nt, Artificial Sequence
  Synthetic
uagcuaaaucaaggaaggcuuc

SEQ ID NO: 294152 - RNA, 23 nt, Artificial Sequence
  Synthetic
uuagcuaaaucaaggaaggcuuc

SEQ ID NO: 294153 - RNA, 24 nt, Artificial Sequence
  Synthetic
guuagcuaaaucaaggaaggcuuc

SEQ ID NO: 294154 - RNA, 18 nt, Artificial Sequence
  Synthetic
ugaggaaauuaaggcuuc

SEQ ID NO: 294155 - RNA, 19 nt, Artificial Sequence
  Synthetic
uugaggaaauuaaggcuuc

SEQ ID NO: 294156 - RNA, 20 nt, Artificial Sequence
  Synthetic
guugaggaaauuaaggcuuc

SEQ ID NO: 294157 - RNA, 21 nt, Artificial Sequence
  Synthetic
aguugaggaaauuaaggcuuc

SEQ ID NO: 294158 - RNA, 22 nt, Artificial Sequence
  Synthetic
caguugaggaaauuaaggcuuc

SEQ ID NO: 294159 - RNA, 23 nt, Artificial Sequence
  Synthetic
acaguugaggaaauuaaggcuuc

SEQ ID NO: 294160 - RNA, 24 nt, Artificial Sequence
  Synthetic
cacaguugaggaaauuaaggcuuc

SEQ ID NO: 294161 - RNA, 18 nt, Artificial Sequence
  Synthetic
agggcugaagcaggcuuc

SEQ ID NO: 294162 - RNA, 19 nt, Artificial Sequence
  Synthetic
aagggcugaagcaggcuuc

SEQ ID NO: 294163 - RNA, 20 nt, Artificial Sequence
  Synthetic
caagggcugaagcaggcuuc

SEQ ID NO: 294164 - RNA, 21 nt, Artificial Sequence
  Synthetic
acaagggcugaagcaggcuuc

SEQ ID NO: 294165 - RNA, 22 nt, Artificial Sequence
  Synthetic
aacaagggcugaagcaggcuuc

SEQ ID NO: 294166 - RNA, 23 nt, Artificial Sequence
  Synthetic
uaacaagggcugaagcaggcuuc

SEQ ID NO: 294167 - RNA, 24 nt, Artificial Sequence
  Synthetic
uuaacaagggcugaagcaggcuuc

SEQ ID NO: 294168 - RNA, 18 nt, Artificial Sequence
  Synthetic
uccuucuguggaggcuuc

SEQ ID NO: 294169 - RNA, 19 nt, Artificial Sequence
  Synthetic
cuccuucuguggaggcuuc

SEQ ID NO: 294170 - RNA, 20 nt, Artificial Sequence
  Synthetic
ucuccuucuguggaggcuuc

SEQ ID NO: 294171 - RNA, 21 nt, Artificial Sequence
  Synthetic
aucuccuucuguggaggcuuc

SEQ ID NO: 294172 - RNA, 22 nt, Artificial Sequence
  Synthetic
caucuccuucuguggaggcuuc

SEQ ID NO: 294173 - RNA, 23 nt, Artificial Sequence
  Synthetic
gcaucuccuucuguggaggcuuc

SEQ ID NO: 294174 - RNA, 24 nt, Artificial Sequence
  Synthetic
agcaucuccuucuguggaggcuuc

SEQ ID NO: 294175 - RNA, 18 nt, Artificial Sequence
  Synthetic
gucaguuuuugaggcuuc

SEQ ID NO: 294176 - RNA, 19 nt, Artificial Sequence
  Synthetic
agucaguuuuugaggcuuc

SEQ ID NO: 294177 - RNA, 20 nt, Artificial Sequence
  Synthetic
cagucaguuuuugaggcuuc

SEQ ID NO: 294178 - RNA, 21 nt, Artificial Sequence
  Synthetic
ucagucaguuuuugaggcuuc

SEQ ID NO: 294179 - RNA, 22 nt, Artificial Sequence
  Synthetic
uucagucaguuuuugaggcuuc

SEQ ID NO: 294180 - RNA, 23 nt, Artificial Sequence
  Synthetic
uuucagucaguuuuugaggcuuc

SEQ ID NO: 294181 - RNA, 24 nt, Artificial Sequence
  Synthetic
auuucagucaguuuuugaggcuuc

SEQ ID NO: 294182 - RNA, 18 nt, Artificial Sequence
  Synthetic
gguuuuagacuuggcuuc

SEQ ID NO: 294183 - RNA, 19 nt, Artificial Sequence
  Synthetic
agguuuuagacuuggcuuc

SEQ ID NO: 294184 - RNA, 20 nt, Artificial Sequence
  Synthetic
cagguuuuagacuuggcuuc

SEQ ID NO: 294185 - RNA, 21 nt, Artificial Sequence
  Synthetic
gcagguuuuagacuuggcuuc

SEQ ID NO: 294186 - RNA, 22 nt, Artificial Sequence
  Synthetic
agcagguuuuagacuuggcuuc

SEQ ID NO: 294187 - RNA, 23 nt, Artificial Sequence
  Synthetic
uagcagguuuuagacuuggcuuc

SEQ ID NO: 294188 - RNA, 24 nt, Artificial Sequence
  Synthetic
guagcagguuuuagacuuggcuuc

SEQ ID NO: 294189 - RNA, 18 nt, Artificial Sequence
  Synthetic
agcugcaaauuuggcuuc

SEQ ID NO: 294190 - RNA, 19 nt, Artificial Sequence
  Synthetic
cagcugcaaauuuggcuuc

SEQ ID NO: 294191 - RNA, 20 nt, Artificial Sequence
  Synthetic
gcagcugcaaauuuggcuuc

SEQ ID NO: 294192 - RNA, 21 nt, Artificial Sequence
  Synthetic
ggcagcugcaaauuuggcuuc

SEQ ID NO: 294193 - RNA, 22 nt, Artificial Sequence
  Synthetic
uggcagcugcaaauuuggcuuc

SEQ ID NO: 294194 - RNA, 23 nt, Artificial Sequence
  Synthetic
guggcagcugcaaauuuggcuuc

SEQ ID NO: 294195 - RNA, 24 nt, Artificial Sequence
  Synthetic
uguggcagcugcaaauuuggcuuc

SEQ ID NO: 294196 - RNA, 18 nt, Artificial Sequence
  Synthetic
ggcuuaguggaaugcuuc

SEQ ID NO: 294197 - RNA, 19 nt, Artificial Sequence
  Synthetic
gggcuuaguggaaugcuuc

SEQ ID NO: 294198 - RNA, 20 nt, Artificial Sequence
  Synthetic
agggcuuaguggaaugcuuc

SEQ ID NO: 294199 - RNA, 21 nt, Artificial Sequence
  Synthetic
gagggcuuaguggaaugcuuc

SEQ ID NO: 294200 - RNA, 22 nt, Artificial Sequence
  Synthetic
ugagggcuuaguggaaugcuuc

SEQ ID NO: 294201 - RNA, 23 nt, Artificial Sequence
  Synthetic
augagggcuuaguggaaugcuuc

SEQ ID NO: 294202 - RNA, 24 nt, Artificial Sequence
  Synthetic
aaugagggcuuaguggaaugcuuc

SEQ ID NO: 294203 - RNA, 18 nt, Artificial Sequence
  Synthetic
uuuaaaaauauaugcuuc

SEQ ID NO: 294204 - RNA, 19 nt, Artificial Sequence
  Synthetic
cuuuaaaaauauaugcuuc

SEQ ID NO: 294205 - RNA, 20 nt, Artificial Sequence
  Synthetic
acuuuaaaaauauaugcuuc

SEQ ID NO: 294206 - RNA, 21 nt, Artificial Sequence
  Synthetic
uacuuuaaaaauauaugcuuc

SEQ ID NO: 294207 - RNA, 22 nt, Artificial Sequence
  Synthetic
cuacuuuaaaaauauaugcuuc

SEQ ID NO: 294208 - RNA, 23 nt, Artificial Sequence
  Synthetic
gcuacuuuaaaaauauaugcuuc

SEQ ID NO: 294209 - RNA, 24 nt, Artificial Sequence
  Synthetic
agcuacuuuaaaaauauaugcuuc

SEQ ID NO: 294210 - RNA, 18 nt, Artificial Sequence
  Synthetic
aaauuacacuacugcuuc

SEQ ID NO: 294211 - RNA, 19 nt, Artificial Sequence
  Synthetic
aaaauuacacuacugcuuc

SEQ ID NO: 294212 - RNA, 20 nt, Artificial Sequence
  Synthetic
uaaaauuacacuacugcuuc

SEQ ID NO: 294213 - RNA, 21 nt, Artificial Sequence
  Synthetic
guaaaauuacacuacugcuuc

SEQ ID NO: 294214 - RNA, 22 nt, Artificial Sequence
  Synthetic
uguaaaauuacacuacugcuuc

SEQ ID NO: 294215 - RNA, 23 nt, Artificial Sequence
  Synthetic
guguaaaauuacacuacugcuuc

SEQ ID NO: 294216 - RNA, 24 nt, Artificial Sequence
  Synthetic
aguguaaaauuacacuacugcuuc

SEQ ID NO: 294217 - RNA, 18 nt, Artificial Sequence
  Synthetic
agucucaugaccugcuuc

SEQ ID NO: 294218 - RNA, 19 nt, Artificial Sequence
  Synthetic
uagucucaugaccugcuuc

SEQ ID NO: 294219 - RNA, 20 nt, Artificial Sequence
  Synthetic
auagucucaugaccugcuuc

SEQ ID NO: 294220 - RNA, 21 nt, Artificial Sequence
  Synthetic
gauagucucaugaccugcuuc

SEQ ID NO: 294221 - RNA, 22 nt, Artificial Sequence
  Synthetic
ugauagucucaugaccugcuuc

SEQ ID NO: 294222 - RNA, 23 nt, Artificial Sequence
  Synthetic
augauagucucaugaccugcuuc

SEQ ID NO: 294223 - RNA, 24 nt, Artificial Sequence
  Synthetic
uaugauagucucaugaccugcuuc

SEQ ID NO: 294224 - RNA, 18 nt, Artificial Sequence
  Synthetic
cucaauacugccugcuuc

SEQ ID NO: 294225 - RNA, 19 nt, Artificial Sequence
  Synthetic
gcucaauacugccugcuuc

SEQ ID NO: 294226 - RNA, 20 nt, Artificial Sequence
  Synthetic
ugcucaauacugccugcuuc

SEQ ID NO: 294227 - RNA, 21 nt, Artificial Sequence
  Synthetic
uugcucaauacugccugcuuc

SEQ ID NO: 294228 - RNA, 22 nt, Artificial Sequence
  Synthetic
cuugcucaauacugccugcuuc

SEQ ID NO: 294229 - RNA, 23 nt, Artificial Sequence
  Synthetic
ucuugcucaauacugccugcuuc

SEQ ID NO: 294230 - RNA, 24 nt, Artificial Sequence
  Synthetic
cucuugcucaauacugccugcuuc

SEQ ID NO: 294231 - RNA, 18 nt, Artificial Sequence
  Synthetic
cuuuggguaagcugcuuc

SEQ ID NO: 294232 - RNA, 19 nt, Artificial Sequence
  Synthetic
ucuuuggguaagcugcuuc

SEQ ID NO: 294233 - RNA, 20 nt, Artificial Sequence
  Synthetic
gucuuuggguaagcugcuuc

SEQ ID NO: 294234 - RNA, 21 nt, Artificial Sequence
  Synthetic
ggucuuuggguaagcugcuuc

SEQ ID NO: 294235 - RNA, 22 nt, Artificial Sequence
  Synthetic
aggucuuuggguaagcugcuuc

SEQ ID NO: 294236 - RNA, 23 nt, Artificial Sequence
  Synthetic
uaggucuuuggguaagcugcuuc

SEQ ID NO: 294237 - RNA, 24 nt, Artificial Sequence
  Synthetic
guaggucuuuggguaagcugcuuc

SEQ ID NO: 294238 - RNA, 18 nt, Artificial Sequence
  Synthetic
aacuuucucugcugcuuc

SEQ ID NO: 294239 - RNA, 19 nt, Artificial Sequence
  Synthetic
gaacuuucucugcugcuuc

SEQ ID NO: 294240 - RNA, 20 nt, Artificial Sequence
  Synthetic
agaacuuucucugcugcuuc

SEQ ID NO: 294241 - RNA, 21 nt, Artificial Sequence
  Synthetic
cagaacuuucucugcugcuuc

SEQ ID NO: 294242 - RNA, 22 nt, Artificial Sequence
  Synthetic
acagaacuuucucugcugcuuc

SEQ ID NO: 294243 - RNA, 23 nt, Artificial Sequence
  Synthetic
uacagaacuuucucugcugcuuc

SEQ ID NO: 294244 - RNA, 24 nt, Artificial Sequence
  Synthetic
uuacagaacuuucucugcugcuuc

SEQ ID NO: 294245 - RNA, 18 nt, Artificial Sequence
  Synthetic
acaugcccuaagugcuuc

SEQ ID NO: 294246 - RNA, 19 nt, Artificial Sequence
  Synthetic
aacaugcccuaagugcuuc

SEQ ID NO: 294247 - RNA, 20 nt, Artificial Sequence
  Synthetic
aaacaugcccuaagugcuuc

SEQ ID NO: 294248 - RNA, 21 nt, Artificial Sequence
  Synthetic
caaacaugcccuaagugcuuc

SEQ ID NO: 294249 - RNA, 22 nt, Artificial Sequence
  Synthetic
acaaacaugcccuaagugcuuc

SEQ ID NO: 294250 - RNA, 23 nt, Artificial Sequence
  Synthetic
gacaaacaugcccuaagugcuuc

SEQ ID NO: 294251 - RNA, 24 nt, Artificial Sequence
  Synthetic
agacaaacaugcccuaagugcuuc

SEQ ID NO: 294252 - RNA, 18 nt, Artificial Sequence
  Synthetic
auaggugaagagugcuuc

SEQ ID NO: 294253 - RNA, 19 nt, Artificial Sequence
  Synthetic
uauaggugaagagugcuuc

SEQ ID NO: 294254 - RNA, 20 nt, Artificial Sequence
  Synthetic
uuauaggugaagagugcuuc

SEQ ID NO: 294255 - RNA, 21 nt, Artificial Sequence
  Synthetic
uuuauaggugaagagugcuuc

SEQ ID NO: 294256 - RNA, 22 nt, Artificial Sequence
  Synthetic
cuuuauaggugaagagugcuuc

SEQ ID NO: 294257 - RNA, 23 nt, Artificial Sequence
  Synthetic
gcuuuauaggugaagagugcuuc

SEQ ID NO: 294258 - RNA, 24 nt, Artificial Sequence
  Synthetic
agcuuuauaggugaagagugcuuc

SEQ ID NO: 294259 - RNA, 18 nt, Artificial Sequence
  Synthetic
uucugcugccuuugcuuc

SEQ ID NO: 294260 - RNA, 19 nt, Artificial Sequence
  Synthetic
auucugcugccuuugcuuc

SEQ ID NO: 294261 - RNA, 20 nt, Artificial Sequence
  Synthetic
aauucugcugccuuugcuuc

SEQ ID NO: 294262 - RNA, 21 nt, Artificial Sequence
  Synthetic
aaauucugcugccuuugcuuc

SEQ ID NO: 294263 - RNA, 22 nt, Artificial Sequence
  Synthetic
uaaauucugcugccuuugcuuc

SEQ ID NO: 294264 - RNA, 23 nt, Artificial Sequence
  Synthetic
cuaaauucugcugccuuugcuuc

SEQ ID NO: 294265 - RNA, 24 nt, Artificial Sequence
  Synthetic
gcuaaauucugcugccuuugcuuc

SEQ ID NO: 294266 - RNA, 18 nt, Artificial Sequence
  Synthetic
auacuauuuacaaucuuc

SEQ ID NO: 294267 - RNA, 19 nt, Artificial Sequence
  Synthetic
gauacuauuuacaaucuuc

SEQ ID NO: 294268 - RNA, 20 nt, Artificial Sequence
  Synthetic
agauacuauuuacaaucuuc

SEQ ID NO: 294269 - RNA, 21 nt, Artificial Sequence
  Synthetic
cagauacuauuuacaaucuuc

SEQ ID NO: 294270 - RNA, 22 nt, Artificial Sequence
  Synthetic
ucagauacuauuuacaaucuuc

SEQ ID NO: 294271 - RNA, 23 nt, Artificial Sequence
  Synthetic
uucagauacuauuuacaaucuuc

SEQ ID NO: 294272 - RNA, 24 nt, Artificial Sequence
  Synthetic
auucagauacuauuuacaaucuuc

SEQ ID NO: 294273 - RNA, 18 nt, Artificial Sequence
  Synthetic
gcuauguuauuaaucuuc

SEQ ID NO: 294274 - RNA, 19 nt, Artificial Sequence
  Synthetic
cgcuauguuauuaaucuuc

SEQ ID NO: 294275 - RNA, 20 nt, Artificial Sequence
  Synthetic
ccgcuauguuauuaaucuuc

SEQ ID NO: 294276 - RNA, 21 nt, Artificial Sequence
  Synthetic
accgcuauguuauuaaucuuc

SEQ ID NO: 294277 - RNA, 22 nt, Artificial Sequence
  Synthetic
uaccgcuauguuauuaaucuuc

SEQ ID NO: 294278 - RNA, 23 nt, Artificial Sequence
  Synthetic
auaccgcuauguuauuaaucuuc

SEQ ID NO: 294279 - RNA, 24 nt, Artificial Sequence
  Synthetic
uauaccgcuauguuauuaaucuuc

SEQ ID NO: 294280 - RNA, 18 nt, Artificial Sequence
  Synthetic
ugcuauuuaacacucuuc

SEQ ID NO: 294281 - RNA, 19 nt, Artificial Sequence
  Synthetic
augcuauuuaacacucuuc

SEQ ID NO: 294282 - RNA, 20 nt, Artificial Sequence
  Synthetic
uaugcuauuuaacacucuuc

SEQ ID NO: 294283 - RNA, 21 nt, Artificial Sequence
  Synthetic
uuaugcuauuuaacacucuuc

SEQ ID NO: 294284 - RNA, 22 nt, Artificial Sequence
  Synthetic
cuuaugcuauuuaacacucuuc

SEQ ID NO: 294285 - RNA, 23 nt, Artificial Sequence
  Synthetic
ucuuaugcuauuuaacacucuuc

SEQ ID NO: 294286 - RNA, 24 nt, Artificial Sequence
  Synthetic
uucuuaugcuauuuaacacucuuc

SEQ ID NO: 294287 - RNA, 18 nt, Artificial Sequence
  Synthetic
gaaggggaaagacucuuc

SEQ ID NO: 294288 - RNA, 19 nt, Artificial Sequence
  Synthetic
agaaggggaaagacucuuc

SEQ ID NO: 294289 - RNA, 20 nt, Artificial Sequence
  Synthetic
gagaaggggaaagacucuuc

SEQ ID NO: 294290 - RNA, 21 nt, Artificial Sequence
  Synthetic
agagaaggggaaagacucuuc

SEQ ID NO: 294291 - RNA, 22 nt, Artificial Sequence
  Synthetic
gagagaaggggaaagacucuuc

SEQ ID NO: 294292 - RNA, 23 nt, Artificial Sequence
  Synthetic
agagagaaggggaaagacucuuc

SEQ ID NO: 294293 - RNA, 24 nt, Artificial Sequence
  Synthetic
aagagagaaggggaaagacucuuc

SEQ ID NO: 294294 - RNA, 18 nt, Artificial Sequence
  Synthetic
cuuuauuuuguacucuuc

SEQ ID NO: 294295 - RNA, 19 nt, Artificial Sequence
  Synthetic
acuuuauuuuguacucuuc

SEQ ID NO: 294296 - RNA, 20 nt, Artificial Sequence
  Synthetic
uacuuuauuuuguacucuuc

SEQ ID NO: 294297 - RNA, 21 nt, Artificial Sequence
  Synthetic
cuacuuuauuuuguacucuuc

SEQ ID NO: 294298 - RNA, 22 nt, Artificial Sequence
  Synthetic
ucuacuuuauuuuguacucuuc

SEQ ID NO: 294299 - RNA, 23 nt, Artificial Sequence
  Synthetic
uucuacuuuauuuuguacucuuc

SEQ ID NO: 294300 - RNA, 24 nt, Artificial Sequence
  Synthetic
cuucuacuuuauuuuguacucuuc

SEQ ID NO: 294301 - RNA, 18 nt, Artificial Sequence
  Synthetic
agaguucaucaccucuuc

SEQ ID NO: 294302 - RNA, 19 nt, Artificial Sequence
  Synthetic
uagaguucaucaccucuuc

SEQ ID NO: 294303 - RNA, 20 nt, Artificial Sequence
  Synthetic
auagaguucaucaccucuuc

SEQ ID NO: 294304 - RNA, 21 nt, Artificial Sequence
  Synthetic
cauagaguucaucaccucuuc

SEQ ID NO: 294305 - RNA, 22 nt, Artificial Sequence
  Synthetic
acauagaguucaucaccucuuc

SEQ ID NO: 294306 - RNA, 23 nt, Artificial Sequence
  Synthetic
aacauagaguucaucaccucuuc

SEQ ID NO: 294307 - RNA, 24 nt, Artificial Sequence
  Synthetic
aaacauagaguucaucaccucuuc

SEQ ID NO: 294308 - RNA, 18 nt, Artificial Sequence
  Synthetic
gaugugaaagaccucuuc

SEQ ID NO: 294309 - RNA, 19 nt, Artificial Sequence
  Synthetic
ggaugugaaagaccucuuc

SEQ ID NO: 294310 - RNA, 20 nt, Artificial Sequence
  Synthetic
gggaugugaaagaccucuuc

SEQ ID NO: 294311 - RNA, 21 nt, Artificial Sequence
  Synthetic
agggaugugaaagaccucuuc

SEQ ID NO: 294312 - RNA, 22 nt, Artificial Sequence
  Synthetic
aagggaugugaaagaccucuuc

SEQ ID NO: 294313 - RNA, 23 nt, Artificial Sequence
  Synthetic
gaagggaugugaaagaccucuuc

SEQ ID NO: 294314 - RNA, 24 nt, Artificial Sequence
  Synthetic
agaagggaugugaaagaccucuuc

SEQ ID NO: 294315 - RNA, 18 nt, Artificial Sequence
  Synthetic
gaugugaaggaccucuuc

SEQ ID NO: 294316 - RNA, 19 nt, Artificial Sequence
  Synthetic
ggaugugaaggaccucuuc

SEQ ID NO: 294317 - RNA, 20 nt, Artificial Sequence
  Synthetic
gggaugugaaggaccucuuc

SEQ ID NO: 294318 - RNA, 18 nt, Artificial Sequence
  Synthetic
ccaaagcccuaccucuuc

SEQ ID NO: 294319 - RNA, 19 nt, Artificial Sequence
  Synthetic
gccaaagcccuaccucuuc

SEQ ID NO: 294320 - RNA, 20 nt, Artificial Sequence
  Synthetic
ggccaaagcccuaccucuuc

SEQ ID NO: 294321 - RNA, 21 nt, Artificial Sequence
  Synthetic
uggccaaagcccuaccucuuc

SEQ ID NO: 294322 - RNA, 22 nt, Artificial Sequence
  Synthetic
uuggccaaagcccuaccucuuc

SEQ ID NO: 294323 - RNA, 23 nt, Artificial Sequence
  Synthetic
cuuggccaaagcccuaccucuuc

SEQ ID NO: 294324 - RNA, 24 nt, Artificial Sequence
  Synthetic
ucuuggccaaagcccuaccucuuc

SEQ ID NO: 294325 - RNA, 18 nt, Artificial Sequence
  Synthetic
cuauuuauacuccucuuc

SEQ ID NO: 294326 - RNA, 19 nt, Artificial Sequence
  Synthetic
acuauuuauacuccucuuc

SEQ ID NO: 294327 - RNA, 20 nt, Artificial Sequence
  Synthetic
cacuauuuauacuccucuuc

SEQ ID NO: 294328 - RNA, 21 nt, Artificial Sequence
  Synthetic
gcacuauuuauacuccucuuc

SEQ ID NO: 294329 - RNA, 22 nt, Artificial Sequence
  Synthetic
ggcacuauuuauacuccucuuc

SEQ ID NO: 294330 - RNA, 23 nt, Artificial Sequence
  Synthetic
uggcacuauuuauacuccucuuc

SEQ ID NO: 294331 - RNA, 24 nt, Artificial Sequence
  Synthetic
auggcacuauuuauacuccucuuc

SEQ ID NO: 294332 - RNA, 18 nt, Artificial Sequence
  Synthetic
gccugguugguccucuuc

SEQ ID NO: 294333 - RNA, 19 nt, Artificial Sequence
  Synthetic
ggccugguugguccucuuc

SEQ ID NO: 294334 - RNA, 20 nt, Artificial Sequence
  Synthetic
aggccugguugguccucuuc

SEQ ID NO: 294335 - RNA, 21 nt, Artificial Sequence
  Synthetic
uaggccugguugguccucuuc

SEQ ID NO: 294336 - RNA, 22 nt, Artificial Sequence
  Synthetic
guaggccugguugguccucuuc

SEQ ID NO: 294337 - RNA, 23 nt, Artificial Sequence
  Synthetic
aguaggccugguugguccucuuc

SEQ ID NO: 294338 - RNA, 24 nt, Artificial Sequence
  Synthetic
aaguaggccugguugguccucuuc

SEQ ID NO: 294339 - RNA, 18 nt, Artificial Sequence
  Synthetic
acuugcauuuuccucuuc

SEQ ID NO: 294340 - RNA, 19 nt, Artificial Sequence
  Synthetic
cacuugcauuuuccucuuc

SEQ ID NO: 294341 - RNA, 20 nt, Artificial Sequence
  Synthetic
gcacuugcauuuuccucuuc

SEQ ID NO: 294342 - RNA, 21 nt, Artificial Sequence
  Synthetic
ugcacuugcauuuuccucuuc

SEQ ID NO: 294343 - RNA, 22 nt, Artificial Sequence
  Synthetic
cugcacuugcauuuuccucuuc

SEQ ID NO: 294344 - RNA, 23 nt, Artificial Sequence
  Synthetic
ucugcacuugcauuuuccucuuc

SEQ ID NO: 294345 - RNA, 24 nt, Artificial Sequence
  Synthetic
cucugcacuugcauuuuccucuuc

SEQ ID NO: 294346 - RNA, 18 nt, Artificial Sequence
  Synthetic
augaauaaacagcucuuc

SEQ ID NO: 294347 - RNA, 19 nt, Artificial Sequence
  Synthetic
gaugaauaaacagcucuuc

SEQ ID NO: 294348 - RNA, 20 nt, Artificial Sequence
  Synthetic
ugaugaauaaacagcucuuc

SEQ ID NO: 294349 - RNA, 21 nt, Artificial Sequence
  Synthetic
augaugaauaaacagcucuuc

SEQ ID NO: 294350 - RNA, 22 nt, Artificial Sequence
  Synthetic
caugaugaauaaacagcucuuc

SEQ ID NO: 294351 - RNA, 23 nt, Artificial Sequence
  Synthetic
ccaugaugaauaaacagcucuuc

SEQ ID NO: 294352 - RNA, 24 nt, Artificial Sequence
  Synthetic
cccaugaugaauaaacagcucuuc

SEQ ID NO: 294353 - RNA, 18 nt, Artificial Sequence
  Synthetic
ugugucuuucggcucuuc

SEQ ID NO: 294354 - RNA, 19 nt, Artificial Sequence
  Synthetic
augugucuuucggcucuuc

SEQ ID NO: 294355 - RNA, 20 nt, Artificial Sequence
  Synthetic
aaugugucuuucggcucuuc

SEQ ID NO: 294356 - RNA, 21 nt, Artificial Sequence
  Synthetic
aaaugugucuuucggcucuuc

SEQ ID NO: 294357 - RNA, 22 nt, Artificial Sequence
  Synthetic
aaaaugugucuuucggcucuuc

SEQ ID NO: 294358 - RNA, 23 nt, Artificial Sequence
  Synthetic
gaaaaugugucuuucggcucuuc

SEQ ID NO: 294359 - RNA, 24 nt, Artificial Sequence
  Synthetic
ugaaaaugugucuuucggcucuuc

SEQ ID NO: 294360 - RNA, 18 nt, Artificial Sequence
  Synthetic
gucuuggaguugcucuuc

SEQ ID NO: 294361 - RNA, 19 nt, Artificial Sequence
  Synthetic
ugucuuggaguugcucuuc

SEQ ID NO: 294362 - RNA, 20 nt, Artificial Sequence
  Synthetic
gugucuuggaguugcucuuc

SEQ ID NO: 294363 - RNA, 21 nt, Artificial Sequence
  Synthetic
ugugucuuggaguugcucuuc

SEQ ID NO: 294364 - RNA, 22 nt, Artificial Sequence
  Synthetic
augugucuuggaguugcucuuc

SEQ ID NO: 294365 - RNA, 23 nt, Artificial Sequence
  Synthetic
uaugugucuuggaguugcucuuc

SEQ ID NO: 294366 - RNA, 24 nt, Artificial Sequence
  Synthetic
uuaugugucuuggaguugcucuuc

SEQ ID NO: 294367 - RNA, 18 nt, Artificial Sequence
  Synthetic
agugaaacuacucucuuc

SEQ ID NO: 294368 - RNA, 19 nt, Artificial Sequence
  Synthetic
aagugaaacuacucucuuc

SEQ ID NO: 294369 - RNA, 20 nt, Artificial Sequence
  Synthetic
caagugaaacuacucucuuc

SEQ ID NO: 294370 - RNA, 21 nt, Artificial Sequence
  Synthetic
ccaagugaaacuacucucuuc

SEQ ID NO: 294371 - RNA, 22 nt, Artificial Sequence
  Synthetic
uccaagugaaacuacucucuuc

SEQ ID NO: 294372 - RNA, 23 nt, Artificial Sequence
  Synthetic
cuccaagugaaacuacucucuuc

SEQ ID NO: 294373 - RNA, 24 nt, Artificial Sequence
  Synthetic
acuccaagugaaacuacucucuuc

SEQ ID NO: 294374 - RNA, 18 nt, Artificial Sequence
  Synthetic
uuugugaaugcucucuuc

SEQ ID NO: 294375 - RNA, 19 nt, Artificial Sequence
  Synthetic
auuugugaaugcucucuuc

SEQ ID NO: 294376 - RNA, 20 nt, Artificial Sequence
  Synthetic
uauuugugaaugcucucuuc

SEQ ID NO: 294377 - RNA, 21 nt, Artificial Sequence
  Synthetic
uuauuugugaaugcucucuuc

SEQ ID NO: 294378 - RNA, 22 nt, Artificial Sequence
  Synthetic
uuuauuugugaaugcucucuuc

SEQ ID NO: 294379 - RNA, 23 nt, Artificial Sequence
  Synthetic
auuuauuugugaaugcucucuuc

SEQ ID NO: 294380 - RNA, 24 nt, Artificial Sequence
  Synthetic
aauuuauuugugaaugcucucuuc

SEQ ID NO: 294381 - RNA, 18 nt, Artificial Sequence
  Synthetic
ugcuagcuaucucucuuc

SEQ ID NO: 294382 - RNA, 19 nt, Artificial Sequence
  Synthetic
augcuagcuaucucucuuc

SEQ ID NO: 294383 - RNA, 20 nt, Artificial Sequence
  Synthetic
aaugcuagcuaucucucuuc

SEQ ID NO: 294384 - RNA, 21 nt, Artificial Sequence
  Synthetic
caaugcuagcuaucucucuuc

SEQ ID NO: 294385 - RNA, 22 nt, Artificial Sequence
  Synthetic
ucaaugcuagcuaucucucuuc

SEQ ID NO: 294386 - RNA, 23 nt, Artificial Sequence
  Synthetic
cucaaugcuagcuaucucucuuc

SEQ ID NO: 294387 - RNA, 24 nt, Artificial Sequence
  Synthetic
acucaaugcuagcuaucucucuuc

SEQ ID NO: 294388 - RNA, 18 nt, Artificial Sequence
  Synthetic
auaaaaaucucucucuuc

SEQ ID NO: 294389 - RNA, 19 nt, Artificial Sequence
  Synthetic
aauaaaaaucucucucuuc

SEQ ID NO: 294390 - RNA, 20 nt, Artificial Sequence
  Synthetic
aaauaaaaaucucucucuuc

SEQ ID NO: 294391 - RNA, 21 nt, Artificial Sequence
  Synthetic
aaaauaaaaaucucucucuuc

SEQ ID NO: 294392 - RNA, 22 nt, Artificial Sequence
  Synthetic
aaaaauaaaaaucucucucuuc

SEQ ID NO: 294393 - RNA, 23 nt, Artificial Sequence
  Synthetic
aaaaaauaaaaaucucucucuuc

SEQ ID NO: 294394 - RNA, 24 nt, Artificial Sequence
  Synthetic
gaaaaaauaaaaaucucucucuuc

SEQ ID NO: 294395 - RNA, 18 nt, Artificial Sequence
  Synthetic
gaccuuaauuuucucuuc

SEQ ID NO: 294396 - RNA, 19 nt, Artificial Sequence
  Synthetic
ggaccuuaauuuucucuuc

SEQ ID NO: 294397 - RNA, 20 nt, Artificial Sequence
  Synthetic
uggaccuuaauuuucucuuc

SEQ ID NO: 294398 - RNA, 21 nt, Artificial Sequence
  Synthetic
cuggaccuuaauuuucucuuc

SEQ ID NO: 294399 - RNA, 22 nt, Artificial Sequence
  Synthetic
ucuggaccuuaauuuucucuuc

SEQ ID NO: 294400 - RNA, 23 nt, Artificial Sequence
  Synthetic
uucuggaccuuaauuuucucuuc

SEQ ID NO: 294401 - RNA, 24 nt, Artificial Sequence
  Synthetic
uuucuggaccuuaauuuucucuuc

SEQ ID NO: 294402 - RNA, 18 nt, Artificial Sequence
  Synthetic
auugguauucaagucuuc

SEQ ID NO: 294403 - RNA, 19 nt, Artificial Sequence
  Synthetic
aauugguauucaagucuuc

SEQ ID NO: 294404 - RNA, 20 nt, Artificial Sequence
  Synthetic
uaauugguauucaagucuuc

SEQ ID NO: 294405 - RNA, 21 nt, Artificial Sequence
  Synthetic
guaauugguauucaagucuuc

SEQ ID NO: 294406 - RNA, 22 nt, Artificial Sequence
  Synthetic
gguaauugguauucaagucuuc

SEQ ID NO: 294407 - RNA, 23 nt, Artificial Sequence
  Synthetic
ugguaauugguauucaagucuuc

SEQ ID NO: 294408 - RNA, 24 nt, Artificial Sequence
  Synthetic
cugguaauugguauucaagucuuc

SEQ ID NO: 294409 - RNA, 18 nt, Artificial Sequence
  Synthetic
ggacuggaugaagucuuc

SEQ ID NO: 294410 - RNA, 19 nt, Artificial Sequence
  Synthetic
gggacuggaugaagucuuc

SEQ ID NO: 294411 - RNA, 20 nt, Artificial Sequence
  Synthetic
ugggacuggaugaagucuuc

SEQ ID NO: 294412 - RNA, 21 nt, Artificial Sequence
  Synthetic
augggacuggaugaagucuuc

SEQ ID NO: 294413 - RNA, 22 nt, Artificial Sequence
  Synthetic
caugggacuggaugaagucuuc

SEQ ID NO: 294414 - RNA, 23 nt, Artificial Sequence
  Synthetic
acaugggacuggaugaagucuuc

SEQ ID NO: 294415 - RNA, 24 nt, Artificial Sequence
  Synthetic
gacaugggacuggaugaagucuuc

SEQ ID NO: 294416 - RNA, 18 nt, Artificial Sequence
  Synthetic
agaugaugugcagucuuc

SEQ ID NO: 294417 - RNA, 19 nt, Artificial Sequence
  Synthetic
cagaugaugugcagucuuc

SEQ ID NO: 294418 - RNA, 20 nt, Artificial Sequence
  Synthetic
ucagaugaugugcagucuuc

SEQ ID NO: 294419 - RNA, 21 nt, Artificial Sequence
  Synthetic
aucagaugaugugcagucuuc

SEQ ID NO: 294420 - RNA, 22 nt, Artificial Sequence
  Synthetic
caucagaugaugugcagucuuc

SEQ ID NO: 294421 - RNA, 23 nt, Artificial Sequence
  Synthetic
gcaucagaugaugugcagucuuc

SEQ ID NO: 294422 - RNA, 24 nt, Artificial Sequence
  Synthetic
ugcaucagaugaugugcagucuuc

SEQ ID NO: 294423 - RNA, 18 nt, Artificial Sequence
  Synthetic
cuggggaucagagucuuc

SEQ ID NO: 294424 - RNA, 19 nt, Artificial Sequence
  Synthetic
gcuggggaucagagucuuc

SEQ ID NO: 294425 - RNA, 20 nt, Artificial Sequence
  Synthetic
agcuggggaucagagucuuc

SEQ ID NO: 294426 - RNA, 21 nt, Artificial Sequence
  Synthetic
gagcuggggaucagagucuuc

SEQ ID NO: 294427 - RNA, 22 nt, Artificial Sequence
  Synthetic
ugagcuggggaucagagucuuc

SEQ ID NO: 294428 - RNA, 23 nt, Artificial Sequence
  Synthetic
uugagcuggggaucagagucuuc

SEQ ID NO: 294429 - RNA, 24 nt, Artificial Sequence
  Synthetic
cuugagcuggggaucagagucuuc

SEQ ID NO: 294430 - RNA, 18 nt, Artificial Sequence
  Synthetic
acaugccauuccgucuuc

SEQ ID NO: 294431 - RNA, 19 nt, Artificial Sequence
  Synthetic
uacaugccauuccgucuuc

SEQ ID NO: 294432 - RNA, 20 nt, Artificial Sequence
  Synthetic
guacaugccauuccgucuuc

SEQ ID NO: 294433 - RNA, 21 nt, Artificial Sequence
  Synthetic
cguacaugccauuccgucuuc

SEQ ID NO: 294434 - RNA, 22 nt, Artificial Sequence
  Synthetic
ucguacaugccauuccgucuuc

SEQ ID NO: 294435 - RNA, 23 nt, Artificial Sequence
  Synthetic
aucguacaugccauuccgucuuc

SEQ ID NO: 294436 - RNA, 24 nt, Artificial Sequence
  Synthetic
uaucguacaugccauuccgucuuc

SEQ ID NO: 294437 - RNA, 18 nt, Artificial Sequence
  Synthetic
ccccacuggaaggucuuc

SEQ ID NO: 294438 - RNA, 19 nt, Artificial Sequence
  Synthetic
cccccacuggaaggucuuc

SEQ ID NO: 294439 - RNA, 20 nt, Artificial Sequence
  Synthetic
ucccccacuggaaggucuuc

SEQ ID NO: 294440 - RNA, 21 nt, Artificial Sequence
  Synthetic
gucccccacuggaaggucuuc

SEQ ID NO: 294441 - RNA, 22 nt, Artificial Sequence
  Synthetic
ugucccccacuggaaggucuuc

SEQ ID NO: 294442 - RNA, 23 nt, Artificial Sequence
  Synthetic
cugucccccacuggaaggucuuc

SEQ ID NO: 294443 - RNA, 24 nt, Artificial Sequence
  Synthetic
gcugucccccacuggaaggucuuc

SEQ ID NO: 294444 - RNA, 18 nt, Artificial Sequence
  Synthetic
auuuuguguauggucuuc

SEQ ID NO: 294445 - RNA, 19 nt, Artificial Sequence
  Synthetic
cauuuuguguauggucuuc

SEQ ID NO: 294446 - RNA, 20 nt, Artificial Sequence
  Synthetic
ucauuuuguguauggucuuc

SEQ ID NO: 294447 - RNA, 21 nt, Artificial Sequence
  Synthetic
aucauuuuguguauggucuuc

SEQ ID NO: 294448 - RNA, 22 nt, Artificial Sequence
  Synthetic
aaucauuuuguguauggucuuc

SEQ ID NO: 294449 - RNA, 23 nt, Artificial Sequence
  Synthetic
aaaucauuuuguguauggucuuc

SEQ ID NO: 294450 - RNA, 24 nt, Artificial Sequence
  Synthetic
gaaaucauuuuguguauggucuuc

SEQ ID NO: 294451 - RNA, 18 nt, Artificial Sequence
  Synthetic
gacacagucuuugucuuc

SEQ ID NO: 294452 - RNA, 19 nt, Artificial Sequence
  Synthetic
agacacagucuuugucuuc

SEQ ID NO: 294453 - RNA, 20 nt, Artificial Sequence
  Synthetic
cagacacagucuuugucuuc

SEQ ID NO: 294454 - RNA, 21 nt, Artificial Sequence
  Synthetic
gcagacacagucuuugucuuc

SEQ ID NO: 294455 - RNA, 22 nt, Artificial Sequence
  Synthetic
ggcagacacagucuuugucuuc

SEQ ID NO: 294456 - RNA, 23 nt, Artificial Sequence
  Synthetic
aggcagacacagucuuugucuuc

SEQ ID NO: 294457 - RNA, 24 nt, Artificial Sequence
  Synthetic
caggcagacacagucuuugucuuc

SEQ ID NO: 294458 - RNA, 18 nt, Artificial Sequence
  Synthetic
caaauuuguuaauucuuc

SEQ ID NO: 294459 - RNA, 19 nt, Artificial Sequence
  Synthetic
ucaaauuuguuaauucuuc

SEQ ID NO: 294460 - RNA, 20 nt, Artificial Sequence
  Synthetic
uucaaauuuguuaauucuuc

SEQ ID NO: 294461 - RNA, 21 nt, Artificial Sequence
  Synthetic
uuucaaauuuguuaauucuuc

SEQ ID NO: 294462 - RNA, 22 nt, Artificial Sequence
  Synthetic
auuucaaauuuguuaauucuuc

SEQ ID NO: 294463 - RNA, 23 nt, Artificial Sequence
  Synthetic
aauuucaaauuuguuaauucuuc

SEQ ID NO: 294464 - RNA, 24 nt, Artificial Sequence
  Synthetic
uaauuucaaauuuguuaauucuuc

SEQ ID NO: 294465 - RNA, 18 nt, Artificial Sequence
  Synthetic
aaauuuagcacauucuuc

SEQ ID NO: 294466 - RNA, 19 nt, Artificial Sequence
  Synthetic
gaaauuuagcacauucuuc

SEQ ID NO: 294467 - RNA, 20 nt, Artificial Sequence
  Synthetic
ggaaauuuagcacauucuuc

SEQ ID NO: 294468 - RNA, 21 nt, Artificial Sequence
  Synthetic
uggaaauuuagcacauucuuc

SEQ ID NO: 294469 - RNA, 22 nt, Artificial Sequence
  Synthetic
guggaaauuuagcacauucuuc

SEQ ID NO: 294470 - RNA, 23 nt, Artificial Sequence
  Synthetic
aguggaaauuuagcacauucuuc

SEQ ID NO: 294471 - RNA, 24 nt, Artificial Sequence
  Synthetic
aaguggaaauuuagcacauucuuc

SEQ ID NO: 294472 - RNA, 18 nt, Artificial Sequence
  Synthetic
acaucuuugccauucuuc

SEQ ID NO: 294473 - RNA, 19 nt, Artificial Sequence
  Synthetic
cacaucuuugccauucuuc

SEQ ID NO: 294474 - RNA, 20 nt, Artificial Sequence
  Synthetic
ccacaucuuugccauucuuc

SEQ ID NO: 294475 - RNA, 21 nt, Artificial Sequence
  Synthetic
accacaucuuugccauucuuc

SEQ ID NO: 294476 - RNA, 22 nt, Artificial Sequence
  Synthetic
caccacaucuuugccauucuuc

SEQ ID NO: 294477 - RNA, 23 nt, Artificial Sequence
  Synthetic
ucaccacaucuuugccauucuuc

SEQ ID NO: 294478 - RNA, 24 nt, Artificial Sequence
  Synthetic
cucaccacaucuuugccauucuuc

SEQ ID NO: 294479 - RNA, 18 nt, Artificial Sequence
  Synthetic
aggaaccagggauucuuc

SEQ ID NO: 294480 - RNA, 19 nt, Artificial Sequence
  Synthetic
aaggaaccagggauucuuc

SEQ ID NO: 294481 - RNA, 20 nt, Artificial Sequence
  Synthetic
gaaggaaccagggauucuuc

SEQ ID NO: 294482 - RNA, 21 nt, Artificial Sequence
  Synthetic
ugaaggaaccagggauucuuc

SEQ ID NO: 294483 - RNA, 22 nt, Artificial Sequence
  Synthetic
gugaaggaaccagggauucuuc

SEQ ID NO: 294484 - RNA, 23 nt, Artificial Sequence
  Synthetic
agugaaggaaccagggauucuuc

SEQ ID NO: 294485 - RNA, 24 nt, Artificial Sequence
  Synthetic
gagugaaggaaccagggauucuuc

SEQ ID NO: 294486 - RNA, 18 nt, Artificial Sequence
  Synthetic
ucuuccuauggauucuuc

SEQ ID NO: 294487 - RNA, 19 nt, Artificial Sequence
  Synthetic
uucuuccuauggauucuuc

SEQ ID NO: 294488 - RNA, 20 nt, Artificial Sequence
  Synthetic
uuucuuccuauggauucuuc

SEQ ID NO: 294489 - RNA, 21 nt, Artificial Sequence
  Synthetic
auuucuuccuauggauucuuc

SEQ ID NO: 294490 - RNA, 22 nt, Artificial Sequence
  Synthetic
aauuucuuccuauggauucuuc

SEQ ID NO: 294491 - RNA, 23 nt, Artificial Sequence
  Synthetic
caauuucuuccuauggauucuuc

SEQ ID NO: 294492 - RNA, 24 nt, Artificial Sequence
  Synthetic
ccaauuucuuccuauggauucuuc

SEQ ID NO: 294493 - RNA, 18 nt, Artificial Sequence
  Synthetic
aaggucucuggauucuuc

SEQ ID NO: 294494 - RNA, 19 nt, Artificial Sequence
  Synthetic
caaggucucuggauucuuc

SEQ ID NO: 294495 - RNA, 20 nt, Artificial Sequence
  Synthetic
ucaaggucucuggauucuuc

SEQ ID NO: 294496 - RNA, 21 nt, Artificial Sequence
  Synthetic
aucaaggucucuggauucuuc

SEQ ID NO: 294497 - RNA, 22 nt, Artificial Sequence
  Synthetic
uaucaaggucucuggauucuuc

SEQ ID NO: 294498 - RNA, 23 nt, Artificial Sequence
  Synthetic
uuaucaaggucucuggauucuuc

SEQ ID NO: 294499 - RNA, 24 nt, Artificial Sequence
  Synthetic
uuuaucaaggucucuggauucuuc

SEQ ID NO: 294500 - RNA, 18 nt, Artificial Sequence
  Synthetic
auccagagcuccuucuuc

SEQ ID NO: 294501 - RNA, 19 nt, Artificial Sequence
  Synthetic
gauccagagcuccuucuuc

SEQ ID NO: 294502 - RNA, 20 nt, Artificial Sequence
  Synthetic
ggauccagagcuccuucuuc

SEQ ID NO: 294503 - RNA, 21 nt, Artificial Sequence
  Synthetic
cggauccagagcuccuucuuc

SEQ ID NO: 294504 - RNA, 22 nt, Artificial Sequence
  Synthetic
acggauccagagcuccuucuuc

SEQ ID NO: 294505 - RNA, 23 nt, Artificial Sequence
  Synthetic
aacggauccagagcuccuucuuc

SEQ ID NO: 294506 - RNA, 24 nt, Artificial Sequence
  Synthetic
gaacggauccagagcuccuucuuc

SEQ ID NO: 294507 - RNA, 18 nt, Artificial Sequence
  Synthetic
auuucacuuuccuucuuc

SEQ ID NO: 294508 - RNA, 19 nt, Artificial Sequence
  Synthetic
aauuucacuuuccuucuuc

SEQ ID NO: 294509 - RNA, 20 nt, Artificial Sequence
  Synthetic
caauuucacuuuccuucuuc

SEQ ID NO: 294510 - RNA, 21 nt, Artificial Sequence
  Synthetic
acaauuucacuuuccuucuuc

SEQ ID NO: 294511 - RNA, 22 nt, Artificial Sequence
  Synthetic
cacaauuucacuuuccuucuuc

SEQ ID NO: 294512 - RNA, 23 nt, Artificial Sequence
  Synthetic
ucacaauuucacuuuccuucuuc

SEQ ID NO: 294513 - RNA, 24 nt, Artificial Sequence
  Synthetic
gucacaauuucacuuuccuucuuc

SEQ ID NO: 294514 - RNA, 18 nt, Artificial Sequence
  Synthetic
gcaggcaguggcuucuuc

SEQ ID NO: 294515 - RNA, 19 nt, Artificial Sequence
  Synthetic
agcaggcaguggcuucuuc

SEQ ID NO: 294516 - RNA, 20 nt, Artificial Sequence
  Synthetic
aagcaggcaguggcuucuuc

SEQ ID NO: 294517 - RNA, 21 nt, Artificial Sequence
  Synthetic
caagcaggcaguggcuucuuc

SEQ ID NO: 294518 - RNA, 22 nt, Artificial Sequence
  Synthetic
ccaagcaggcaguggcuucuuc

SEQ ID NO: 294519 - RNA, 23 nt, Artificial Sequence
  Synthetic
uccaagcaggcaguggcuucuuc

SEQ ID NO: 294520 - RNA, 24 nt, Artificial Sequence
  Synthetic
guccaagcaggcaguggcuucuuc

SEQ ID NO: 294521 - RNA, 18 nt, Artificial Sequence
  Synthetic
aaaauacucaucuucuuc

SEQ ID NO: 294522 - RNA, 19 nt, Artificial Sequence
  Synthetic
aaaaauacucaucuucuuc

SEQ ID NO: 294523 - RNA, 20 nt, Artificial Sequence
  Synthetic
aaaaaauacucaucuucuuc

SEQ ID NO: 294524 - RNA, 21 nt, Artificial Sequence
  Synthetic
aaaaaaauacucaucuucuuc

SEQ ID NO: 294525 - RNA, 22 nt, Artificial Sequence
  Synthetic
aaaaaaaauacucaucuucuuc

SEQ ID NO: 294526 - RNA, 23 nt, Artificial Sequence
  Synthetic
aaaaaaaaauacucaucuucuuc

SEQ ID NO: 294527 - RNA, 24 nt, Artificial Sequence
  Synthetic
aaaaaaaaaauacucaucuucuuc

SEQ ID NO: 294528 - RNA, 18 nt, Artificial Sequence
  Synthetic
uccaauguauucuucuuc

SEQ ID NO: 294529 - RNA, 19 nt, Artificial Sequence
  Synthetic
uuccaauguauucuucuuc

SEQ ID NO: 294530 - RNA, 20 nt, Artificial Sequence
  Synthetic
uuuccaauguauucuucuuc

SEQ ID NO: 294531 - RNA, 21 nt, Artificial Sequence
  Synthetic
uuuuccaauguauucuucuuc

SEQ ID NO: 294532 - RNA, 22 nt, Artificial Sequence
  Synthetic
auuuuccaauguauucuucuuc

SEQ ID NO: 294533 - RNA, 23 nt, Artificial Sequence
  Synthetic
cauuuuccaauguauucuucuuc

SEQ ID NO: 294534 - RNA, 24 nt, Artificial Sequence
  Synthetic
ccauuuuccaauguauucuucuuc

SEQ ID NO: 294535 - RNA, 18 nt, Artificial Sequence
  Synthetic
ugaaagcaacuguucuuc

SEQ ID NO: 294536 - RNA, 19 nt, Artificial Sequence
  Synthetic
uugaaagcaacuguucuuc

SEQ ID NO: 294537 - RNA, 20 nt, Artificial Sequence
  Synthetic
uuugaaagcaacuguucuuc

SEQ ID NO: 294538 - RNA, 21 nt, Artificial Sequence
  Synthetic
auuugaaagcaacuguucuuc

SEQ ID NO: 294539 - RNA, 22 nt, Artificial Sequence
  Synthetic
uauuugaaagcaacuguucuuc

SEQ ID NO: 294540 - RNA, 23 nt, Artificial Sequence
  Synthetic
auauuugaaagcaacuguucuuc

SEQ ID NO: 294541 - RNA, 24 nt, Artificial Sequence
  Synthetic
gauauuugaaagcaacuguucuuc

SEQ ID NO: 294542 - RNA, 18 nt, Artificial Sequence
  Synthetic
aauucuuauuuguucuuc

SEQ ID NO: 294543 - RNA, 19 nt, Artificial Sequence
  Synthetic
uaauucuuauuuguucuuc

SEQ ID NO: 294544 - RNA, 20 nt, Artificial Sequence
  Synthetic
guaauucuuauuuguucuuc

SEQ ID NO: 294545 - RNA, 21 nt, Artificial Sequence
  Synthetic
aguaauucuuauuuguucuuc

SEQ ID NO: 294546 - RNA, 22 nt, Artificial Sequence
  Synthetic
caguaauucuuauuuguucuuc

SEQ ID NO: 294547 - RNA, 23 nt, Artificial Sequence
  Synthetic
ucaguaauucuuauuuguucuuc

SEQ ID NO: 294548 - RNA, 24 nt, Artificial Sequence
  Synthetic
uucaguaauucuuauuuguucuuc

SEQ ID NO: 294549 - RNA, 18 nt, Artificial Sequence
  Synthetic
acacacacuuuguucuuc

SEQ ID NO: 294550 - RNA, 19 nt, Artificial Sequence
  Synthetic
cacacacacuuuguucuuc

SEQ ID NO: 294551 - RNA, 20 nt, Artificial Sequence
  Synthetic
acacacacacuuuguucuuc

SEQ ID NO: 294552 - RNA, 21 nt, Artificial Sequence
  Synthetic
uacacacacacuuuguucuuc

SEQ ID NO: 294553 - RNA, 22 nt, Artificial Sequence
  Synthetic
auacacacacacuuuguucuuc

SEQ ID NO: 294554 - RNA, 23 nt, Artificial Sequence
  Synthetic
cauacacacacacuuuguucuuc

SEQ ID NO: 294555 - RNA, 24 nt, Artificial Sequence
  Synthetic
ccauacacacacacuuuguucuuc

SEQ ID NO: 294556 - RNA, 18 nt, Artificial Sequence
  Synthetic
aaaaauaaauauuucuuc

SEQ ID NO: 294557 - RNA, 19 nt, Artificial Sequence
  Synthetic
gaaaaauaaauauuucuuc

SEQ ID NO: 294558 - RNA, 20 nt, Artificial Sequence
  Synthetic
agaaaaauaaauauuucuuc

SEQ ID NO: 294559 - RNA, 21 nt, Artificial Sequence
  Synthetic
aagaaaaauaaauauuucuuc

SEQ ID NO: 294560 - RNA, 22 nt, Artificial Sequence
  Synthetic
uaagaaaaauaaauauuucuuc

SEQ ID NO: 294561 - RNA, 23 nt, Artificial Sequence
  Synthetic
auaagaaaaauaaauauuucuuc

SEQ ID NO: 294562 - RNA, 24 nt, Artificial Sequence
  Synthetic
uauaagaaaaauaaauauuucuuc

SEQ ID NO: 294563 - RNA, 18 nt, Artificial Sequence
  Synthetic
agaauacucccuuucuuc

SEQ ID NO: 294564 - RNA, 19 nt, Artificial Sequence
  Synthetic
cagaauacucccuuucuuc

SEQ ID NO: 294565 - RNA, 20 nt, Artificial Sequence
  Synthetic
acagaauacucccuuucuuc

SEQ ID NO: 294566 - RNA, 21 nt, Artificial Sequence
  Synthetic
aacagaauacucccuuucuuc

SEQ ID NO: 294567 - RNA, 22 nt, Artificial Sequence
  Synthetic
caacagaauacucccuuucuuc

SEQ ID NO: 294568 - RNA, 23 nt, Artificial Sequence
  Synthetic
acaacagaauacucccuuucuuc

SEQ ID NO: 294569 - RNA, 24 nt, Artificial Sequence
  Synthetic
aacaacagaauacucccuuucuuc

SEQ ID NO: 294570 - RNA, 18 nt, Artificial Sequence
  Synthetic
gcuguuggggcuuucuuc

SEQ ID NO: 294571 - RNA, 19 nt, Artificial Sequence
  Synthetic
ugcuguuggggcuuucuuc

SEQ ID NO: 294572 - RNA, 20 nt, Artificial Sequence
  Synthetic
augcuguuggggcuuucuuc

SEQ ID NO: 294573 - RNA, 21 nt, Artificial Sequence
  Synthetic
gaugcuguuggggcuuucuuc

SEQ ID NO: 294574 - RNA, 22 nt, Artificial Sequence
  Synthetic
ugaugcuguuggggcuuucuuc

SEQ ID NO: 294575 - RNA, 23 nt, Artificial Sequence
  Synthetic
gugaugcuguuggggcuuucuuc

SEQ ID NO: 294576 - RNA, 24 nt, Artificial Sequence
  Synthetic
ggugaugcuguuggggcuuucuuc

SEQ ID NO: 294577 - RNA, 18 nt, Artificial Sequence
  Synthetic
uuuaauagcaguuucuuc

SEQ ID NO: 294578 - RNA, 19 nt, Artificial Sequence
  Synthetic
cuuuaauagcaguuucuuc

SEQ ID NO: 294579 - RNA, 20 nt, Artificial Sequence
  Synthetic
ucuuuaauagcaguuucuuc

SEQ ID NO: 294580 - RNA, 21 nt, Artificial Sequence
  Synthetic
aucuuuaauagcaguuucuuc

SEQ ID NO: 294581 - RNA, 22 nt, Artificial Sequence
  Synthetic
uaucuuuaauagcaguuucuuc

SEQ ID NO: 294582 - RNA, 23 nt, Artificial Sequence
  Synthetic
uuaucuuuaauagcaguuucuuc

SEQ ID NO: 294583 - RNA, 24 nt, Artificial Sequence
  Synthetic
cuuaucuuuaauagcaguuucuuc

SEQ ID NO: 294584 - RNA, 18 nt, Artificial Sequence
  Synthetic
ugauuuaaacuuuucuuc

SEQ ID NO: 294585 - RNA, 19 nt, Artificial Sequence
  Synthetic
uugauuuaaacuuuucuuc

SEQ ID NO: 294586 - RNA, 20 nt, Artificial Sequence
  Synthetic
guugauuuaaacuuuucuuc

SEQ ID NO: 294587 - RNA, 21 nt, Artificial Sequence
  Synthetic
gguugauuuaaacuuuucuuc

SEQ ID NO: 294588 - RNA, 22 nt, Artificial Sequence
  Synthetic
ugguugauuuaaacuuuucuuc

SEQ ID NO: 294589 - RNA, 23 nt, Artificial Sequence
  Synthetic
cugguugauuuaaacuuuucuuc

SEQ ID NO: 294590 - RNA, 24 nt, Artificial Sequence
  Synthetic
gcugguugauuuaaacuuuucuuc

SEQ ID NO: 294591 - RNA, 18 nt, Artificial Sequence
  Synthetic
uuguuauuucuuuucuuc

SEQ ID NO: 294592 - RNA, 19 nt, Artificial Sequence
  Synthetic
uuuguuauuucuuuucuuc

SEQ ID NO: 294593 - RNA, 20 nt, Artificial Sequence
  Synthetic
cuuuguuauuucuuuucuuc

SEQ ID NO: 294594 - RNA, 21 nt, Artificial Sequence
  Synthetic
ucuuuguuauuucuuuucuuc

SEQ ID NO: 294595 - RNA, 22 nt, Artificial Sequence
  Synthetic
aucuuuguuauuucuuuucuuc

SEQ ID NO: 294596 - RNA, 23 nt, Artificial Sequence
  Synthetic
gaucuuuguuauuucuuuucuuc

SEQ ID NO: 294597 - RNA, 24 nt, Artificial Sequence
  Synthetic
ugaucuuuguuauuucuuuucuuc

SEQ ID NO: 294598 - RNA, 18 nt, Artificial Sequence
  Synthetic
ugcaagaugaaaaaguuc

SEQ ID NO: 294599 - RNA, 19 nt, Artificial Sequence
  Synthetic
augcaagaugaaaaaguuc

SEQ ID NO: 294600 - RNA, 20 nt, Artificial Sequence
  Synthetic
uaugcaagaugaaaaaguuc

SEQ ID NO: 294601 - RNA, 21 nt, Artificial Sequence
  Synthetic
uuaugcaagaugaaaaaguuc

SEQ ID NO: 294602 - RNA, 22 nt, Artificial Sequence
  Synthetic
guuaugcaagaugaaaaaguuc

SEQ ID NO: 294603 - RNA, 23 nt, Artificial Sequence
  Synthetic
aguuaugcaagaugaaaaaguuc

SEQ ID NO: 294604 - RNA, 24 nt, Artificial Sequence
  Synthetic
caguuaugcaagaugaaaaaguuc

SEQ ID NO: 294605 - RNA, 18 nt, Artificial Sequence
  Synthetic
gaaaaaugggaaaaguuc

SEQ ID NO: 294606 - RNA, 19 nt, Artificial Sequence
  Synthetic
agaaaaaugggaaaaguuc

SEQ ID NO: 294607 - RNA, 20 nt, Artificial Sequence
  Synthetic
uagaaaaaugggaaaaguuc

SEQ ID NO: 294608 - RNA, 21 nt, Artificial Sequence
  Synthetic
auagaaaaaugggaaaaguuc

SEQ ID NO: 294609 - RNA, 22 nt, Artificial Sequence
  Synthetic
aauagaaaaaugggaaaaguuc

SEQ ID NO: 294610 - RNA, 23 nt, Artificial Sequence
  Synthetic
caauagaaaaaugggaaaaguuc

SEQ ID NO: 294611 - RNA, 24 nt, Artificial Sequence
  Synthetic
ccaauagaaaaaugggaaaaguuc

SEQ ID NO: 294612 - RNA, 18 nt, Artificial Sequence
  Synthetic
ugguaagguuaaaaguuc

SEQ ID NO: 294613 - RNA, 19 nt, Artificial Sequence
  Synthetic
uugguaagguuaaaaguuc

SEQ ID NO: 294614 - RNA, 20 nt, Artificial Sequence
  Synthetic
guugguaagguuaaaaguuc

SEQ ID NO: 294615 - RNA, 21 nt, Artificial Sequence
  Synthetic
uguugguaagguuaaaaguuc

SEQ ID NO: 294616 - RNA, 22 nt, Artificial Sequence
  Synthetic
uuguugguaagguuaaaaguuc

SEQ ID NO: 294617 - RNA, 23 nt, Artificial Sequence
  Synthetic
cuuguugguaagguuaaaaguuc

SEQ ID NO: 294618 - RNA, 24 nt, Artificial Sequence
  Synthetic
acuuguugguaagguuaaaaguuc

SEQ ID NO: 294619 - RNA, 18 nt, Artificial Sequence
  Synthetic
ucaaucuggagaaaguuc

SEQ ID NO: 294620 - RNA, 19 nt, Artificial Sequence
  Synthetic
cucaaucuggagaaaguuc

SEQ ID NO: 294621 - RNA, 20 nt, Artificial Sequence
  Synthetic
ccucaaucuggagaaaguuc

SEQ ID NO: 294622 - RNA, 21 nt, Artificial Sequence
  Synthetic
cccucaaucuggagaaaguuc

SEQ ID NO: 294623 - RNA, 22 nt, Artificial Sequence
  Synthetic
gcccucaaucuggagaaaguuc

SEQ ID NO: 294624 - RNA, 23 nt, Artificial Sequence
  Synthetic
ugcccucaaucuggagaaaguuc

SEQ ID NO: 294625 - RNA, 24 nt, Artificial Sequence
  Synthetic
uugcccucaaucuggagaaaguuc

SEQ ID NO: 294626 - RNA, 18 nt, Artificial Sequence
  Synthetic
auuaacuggggaaaguuc

SEQ ID NO: 294627 - RNA, 19 nt, Artificial Sequence
  Synthetic
aauuaacuggggaaaguuc

SEQ ID NO: 294628 - RNA, 20 nt, Artificial Sequence
  Synthetic
aaauuaacuggggaaaguuc

SEQ ID NO: 294629 - RNA, 21 nt, Artificial Sequence
  Synthetic
uaaauuaacuggggaaaguuc

SEQ ID NO: 294630 - RNA, 22 nt, Artificial Sequence
  Synthetic
auaaauuaacuggggaaaguuc

SEQ ID NO: 294631 - RNA, 23 nt, Artificial Sequence
  Synthetic
aauaaauuaacuggggaaaguuc

SEQ ID NO: 294632 - RNA, 24 nt, Artificial Sequence
  Synthetic
gaauaaauuaacuggggaaaguuc

SEQ ID NO: 294633 - RNA, 18 nt, Artificial Sequence
  Synthetic
uauccaaaacuaaaguuc

SEQ ID NO: 294634 - RNA, 19 nt, Artificial Sequence
  Synthetic
uuauccaaaacuaaaguuc

SEQ ID NO: 294635 - RNA, 20 nt, Artificial Sequence
  Synthetic
uuuauccaaaacuaaaguuc

SEQ ID NO: 294636 - RNA, 21 nt, Artificial Sequence
  Synthetic
uuuuauccaaaacuaaaguuc

SEQ ID NO: 294637 - RNA, 22 nt, Artificial Sequence
  Synthetic
auuuuauccaaaacuaaaguuc

SEQ ID NO: 294638 - RNA, 23 nt, Artificial Sequence
  Synthetic
uauuuuauccaaaacuaaaguuc

SEQ ID NO: 294639 - RNA, 24 nt, Artificial Sequence
  Synthetic
cuauuuuauccaaaacuaaaguuc

SEQ ID NO: 294640 - RNA, 18 nt, Artificial Sequence
  Synthetic
caaaaggcggacaaguuc

SEQ ID NO: 294641 - RNA, 19 nt, Artificial Sequence
  Synthetic
ccaaaaggcggacaaguuc

SEQ ID NO: 294642 - RNA, 20 nt, Artificial Sequence
  Synthetic
uccaaaaggcggacaaguuc

SEQ ID NO: 294643 - RNA, 21 nt, Artificial Sequence
  Synthetic
auccaaaaggcggacaaguuc

SEQ ID NO: 294644 - RNA, 22 nt, Artificial Sequence
  Synthetic
uauccaaaaggcggacaaguuc

SEQ ID NO: 294645 - RNA, 23 nt, Artificial Sequence
  Synthetic
auauccaaaaggcggacaaguuc

SEQ ID NO: 294646 - RNA, 24 nt, Artificial Sequence
  Synthetic
aauauccaaaaggcggacaaguuc

SEQ ID NO: 294647 - RNA, 18 nt, Artificial Sequence
  Synthetic
gagggaucucucaaguuc

SEQ ID NO: 294648 - RNA, 19 nt, Artificial Sequence
  Synthetic
ugagggaucucucaaguuc

SEQ ID NO: 294649 - RNA, 20 nt, Artificial Sequence
  Synthetic
cugagggaucucucaaguuc

SEQ ID NO: 294650 - RNA, 21 nt, Artificial Sequence
  Synthetic
ucugagggaucucucaaguuc

SEQ ID NO: 294651 - RNA, 22 nt, Artificial Sequence
  Synthetic
aucugagggaucucucaaguuc

SEQ ID NO: 294652 - RNA, 23 nt, Artificial Sequence
  Synthetic
aaucugagggaucucucaaguuc

SEQ ID NO: 294653 - RNA, 24 nt, Artificial Sequence
  Synthetic
uaaucugagggaucucucaaguuc

SEQ ID NO: 294654 - RNA, 18 nt, Artificial Sequence
  Synthetic
ccuugaggccagaaguuc

SEQ ID NO: 294655 - RNA, 19 nt, Artificial Sequence
  Synthetic
cccuugaggccagaaguuc

SEQ ID NO: 294656 - RNA, 20 nt, Artificial Sequence
  Synthetic
ucccuugaggccagaaguuc

SEQ ID NO: 294657 - RNA, 21 nt, Artificial Sequence
  Synthetic
aucccuugaggccagaaguuc

SEQ ID NO: 294658 - RNA, 22 nt, Artificial Sequence
  Synthetic
gaucccuugaggccagaaguuc

SEQ ID NO: 294659 - RNA, 23 nt, Artificial Sequence
  Synthetic
ggaucccuugaggccagaaguuc

SEQ ID NO: 294660 - RNA, 24 nt, Artificial Sequence
  Synthetic
aggaucccuugaggccagaaguuc

SEQ ID NO: 294661 - RNA, 18 nt, Artificial Sequence
  Synthetic
guuauagcuuagaaguuc

SEQ ID NO: 294662 - RNA, 19 nt, Artificial Sequence
  Synthetic
uguuauagcuuagaaguuc

SEQ ID NO: 294663 - RNA, 20 nt, Artificial Sequence
  Synthetic
auguuauagcuuagaaguuc

SEQ ID NO: 294664 - RNA, 21 nt, Artificial Sequence
  Synthetic
gauguuauagcuuagaaguuc

SEQ ID NO: 294665 - RNA, 22 nt, Artificial Sequence
  Synthetic
ggauguuauagcuuagaaguuc

SEQ ID NO: 294666 - RNA, 23 nt, Artificial Sequence
  Synthetic
aggauguuauagcuuagaaguuc

SEQ ID NO: 294667 - RNA, 24 nt, Artificial Sequence
  Synthetic
gaggauguuauagcuuagaaguuc

SEQ ID NO: 294668 - RNA, 18 nt, Artificial Sequence
  Synthetic
aaaacaguuuggaaguuc

SEQ ID NO: 294669 - RNA, 19 nt, Artificial Sequence
  Synthetic
gaaaacaguuuggaaguuc

SEQ ID NO: 294670 - RNA, 20 nt, Artificial Sequence
  Synthetic
ugaaaacaguuuggaaguuc

SEQ ID NO: 294671 - RNA, 21 nt, Artificial Sequence
  Synthetic
uugaaaacaguuuggaaguuc

SEQ ID NO: 294672 - RNA, 22 nt, Artificial Sequence
  Synthetic
uuugaaaacaguuuggaaguuc

SEQ ID NO: 294673 - RNA, 23 nt, Artificial Sequence
  Synthetic
cuuugaaaacaguuuggaaguuc

SEQ ID NO: 294674 - RNA, 24 nt, Artificial Sequence
  Synthetic
acuuugaaaacaguuuggaaguuc

SEQ ID NO: 294675 - RNA, 18 nt, Artificial Sequence
  Synthetic
gauaggagacauaaguuc

SEQ ID NO: 294676 - RNA, 19 nt, Artificial Sequence
  Synthetic
agauaggagacauaaguuc

SEQ ID NO: 294677 - RNA, 20 nt, Artificial Sequence
  Synthetic
uagauaggagacauaaguuc

SEQ ID NO: 294678 - RNA, 21 nt, Artificial Sequence
  Synthetic
uuagauaggagacauaaguuc

SEQ ID NO: 294679 - RNA, 22 nt, Artificial Sequence
  Synthetic
guuagauaggagacauaaguuc

SEQ ID NO: 294680 - RNA, 23 nt, Artificial Sequence
  Synthetic
aguuagauaggagacauaaguuc

SEQ ID NO: 294681 - RNA, 24 nt, Artificial Sequence
  Synthetic
caguuagauaggagacauaaguuc

SEQ ID NO: 294682 - RNA, 18 nt, Artificial Sequence
  Synthetic
gcuagaucugauaaguuc

SEQ ID NO: 294683 - RNA, 19 nt, Artificial Sequence
  Synthetic
ugcuagaucugauaaguuc

SEQ ID NO: 294684 - RNA, 20 nt, Artificial Sequence
  Synthetic
cugcuagaucugauaaguuc

SEQ ID NO: 294685 - RNA, 21 nt, Artificial Sequence
  Synthetic
acugcuagaucugauaaguuc

SEQ ID NO: 294686 - RNA, 22 nt, Artificial Sequence
  Synthetic
aacugcuagaucugauaaguuc

SEQ ID NO: 294687 - RNA, 23 nt, Artificial Sequence
  Synthetic
uaacugcuagaucugauaaguuc

SEQ ID NO: 294688 - RNA, 24 nt, Artificial Sequence
  Synthetic
auaacugcuagaucugauaaguuc

SEQ ID NO: 294689 - RNA, 18 nt, Artificial Sequence
  Synthetic
uuuucuuuauguaaguuc

SEQ ID NO: 294690 - RNA, 19 nt, Artificial Sequence
  Synthetic
guuuucuuuauguaaguuc

SEQ ID NO: 294691 - RNA, 20 nt, Artificial Sequence
  Synthetic
uguuuucuuuauguaaguuc

SEQ ID NO: 294692 - RNA, 21 nt, Artificial Sequence
  Synthetic
auguuuucuuuauguaaguuc

SEQ ID NO: 294693 - RNA, 22 nt, Artificial Sequence
  Synthetic
aauguuuucuuuauguaaguuc

SEQ ID NO: 294694 - RNA, 23 nt, Artificial Sequence
  Synthetic
gaauguuuucuuuauguaaguuc

SEQ ID NO: 294695 - RNA, 24 nt, Artificial Sequence
  Synthetic
ugaauguuuucuuuauguaaguuc

SEQ ID NO: 294696 - RNA, 19 nt, Artificial Sequence
  Synthetic
auuauuauacuuuaaguuc

SEQ ID NO: 294697 - RNA, 20 nt, Artificial Sequence
  Synthetic
cauuauuauacuuuaaguuc

SEQ ID NO: 294698 - RNA, 21 nt, Artificial Sequence
  Synthetic
ucauuauuauacuuuaaguuc

SEQ ID NO: 294699 - RNA, 22 nt, Artificial Sequence
  Synthetic
uucauuauuauacuuuaaguuc

SEQ ID NO: 294700 - RNA, 23 nt, Artificial Sequence
  Synthetic
uuucauuauuauacuuuaaguuc

SEQ ID NO: 294701 - RNA, 24 nt, Artificial Sequence
  Synthetic
uuuucauuauuauacuuuaaguuc

SEQ ID NO: 294702 - RNA, 18 nt, Artificial Sequence
  Synthetic
aacuuuuauuuuaaguuc

SEQ ID NO: 294703 - RNA, 19 nt, Artificial Sequence
  Synthetic
uaacuuuuauuuuaaguuc

SEQ ID NO: 294704 - RNA, 20 nt, Artificial Sequence
  Synthetic
uuaacuuuuauuuuaaguuc

SEQ ID NO: 294705 - RNA, 21 nt, Artificial Sequence
  Synthetic
cuuaacuuuuauuuuaaguuc

SEQ ID NO: 294706 - RNA, 22 nt, Artificial Sequence
  Synthetic
ucuuaacuuuuauuuuaaguuc

SEQ ID NO: 294707 - RNA, 23 nt, Artificial Sequence
  Synthetic
uucuuaacuuuuauuuuaaguuc

SEQ ID NO: 294708 - RNA, 24 nt, Artificial Sequence
  Synthetic
uuucuuaacuuuuauuuuaaguuc

SEQ ID NO: 294709 - RNA, 18 nt, Artificial Sequence
  Synthetic
uguauuggcucacaguuc

SEQ ID NO: 294710 - RNA, 19 nt, Artificial Sequence
  Synthetic
auguauuggcucacaguuc

SEQ ID NO: 294711 - RNA, 20 nt, Artificial Sequence
  Synthetic
aauguauuggcucacaguuc

SEQ ID NO: 294712 - RNA, 21 nt, Artificial Sequence
  Synthetic
aaauguauuggcucacaguuc

SEQ ID NO: 294713 - RNA, 22 nt, Artificial Sequence
  Synthetic
aaaauguauuggcucacaguuc

SEQ ID NO: 294714 - RNA, 23 nt, Artificial Sequence
  Synthetic
aaaaauguauuggcucacaguuc

SEQ ID NO: 294715 - RNA, 24 nt, Artificial Sequence
  Synthetic
caaaaauguauuggcucacaguuc

SEQ ID NO: 294716 - RNA, 18 nt, Artificial Sequence
  Synthetic
ucuuauuucucacaguuc

SEQ ID NO: 294717 - RNA, 19 nt, Artificial Sequence
  Synthetic
aucuuauuucucacaguuc

SEQ ID NO: 294718 - RNA, 20 nt, Artificial Sequence
  Synthetic
aaucuuauuucucacaguuc

SEQ ID NO: 294719 - RNA, 21 nt, Artificial Sequence
  Synthetic
gaaucuuauuucucacaguuc

SEQ ID NO: 294720 - RNA, 22 nt, Artificial Sequence
  Synthetic
agaaucuuauuucucacaguuc

SEQ ID NO: 294721 - RNA, 23 nt, Artificial Sequence
  Synthetic
cagaaucuuauuucucacaguuc

SEQ ID NO: 294722 - RNA, 24 nt, Artificial Sequence
  Synthetic
acagaaucuuauuucucacaguuc

SEQ ID NO: 294723 - RNA, 18 nt, Artificial Sequence
  Synthetic
aaugauaaaauacaguuc

SEQ ID NO: 294724 - RNA, 19 nt, Artificial Sequence
  Synthetic
aaaugauaaaauacaguuc

SEQ ID NO: 294725 - RNA, 20 nt, Artificial Sequence
  Synthetic
gaaaugauaaaauacaguuc

SEQ ID NO: 294726 - RNA, 21 nt, Artificial Sequence
  Synthetic
agaaaugauaaaauacaguuc

SEQ ID NO: 294727 - RNA, 22 nt, Artificial Sequence
  Synthetic
aagaaaugauaaaauacaguuc

SEQ ID NO: 294728 - RNA, 23 nt, Artificial Sequence
  Synthetic
uaagaaaugauaaaauacaguuc

SEQ ID NO: 294729 - RNA, 24 nt, Artificial Sequence
  Synthetic
auaagaaaugauaaaauacaguuc

SEQ ID NO: 294730 - RNA, 18 nt, Artificial Sequence
  Synthetic
uuuaguuuccuacaguuc

SEQ ID NO: 294731 - RNA, 19 nt, Artificial Sequence
  Synthetic
cuuuaguuuccuacaguuc

SEQ ID NO: 294732 - RNA, 20 nt, Artificial Sequence
  Synthetic
gcuuuaguuuccuacaguuc

SEQ ID NO: 294733 - RNA, 21 nt, Artificial Sequence
  Synthetic
ugcuuuaguuuccuacaguuc

SEQ ID NO: 294734 - RNA, 22 nt, Artificial Sequence
  Synthetic
uugcuuuaguuuccuacaguuc

SEQ ID NO: 294735 - RNA, 23 nt, Artificial Sequence
  Synthetic
cuugcuuuaguuuccuacaguuc

SEQ ID NO: 294736 - RNA, 24 nt, Artificial Sequence
  Synthetic
gcuugcuuuaguuuccuacaguuc

SEQ ID NO: 294737 - RNA, 18 nt, Artificial Sequence
  Synthetic
ucuguugucuuacaguuc

SEQ ID NO: 294738 - RNA, 19 nt, Artificial Sequence
  Synthetic
gucuguugucuuacaguuc

SEQ ID NO: 294739 - RNA, 20 nt, Artificial Sequence
  Synthetic
agucuguugucuuacaguuc

SEQ ID NO: 294740 - RNA, 21 nt, Artificial Sequence
  Synthetic
aagucuguugucuuacaguuc

SEQ ID NO: 294741 - RNA, 22 nt, Artificial Sequence
  Synthetic
gaagucuguugucuuacaguuc

SEQ ID NO: 294742 - RNA, 23 nt, Artificial Sequence
  Synthetic
agaagucuguugucuuacaguuc

SEQ ID NO: 294743 - RNA, 24 nt, Artificial Sequence
  Synthetic
aagaagucuguugucuuacaguuc

SEQ ID NO: 294744 - RNA, 18 nt, Artificial Sequence
  Synthetic
gucuuaagccuccaguuc

SEQ ID NO: 294745 - RNA, 19 nt, Artificial Sequence
  Synthetic
agucuuaagccuccaguuc

SEQ ID NO: 294746 - RNA, 20 nt, Artificial Sequence
  Synthetic
gagucuuaagccuccaguuc

SEQ ID NO: 294747 - RNA, 21 nt, Artificial Sequence
  Synthetic
ugagucuuaagccuccaguuc

SEQ ID NO: 294748 - RNA, 22 nt, Artificial Sequence
  Synthetic
uugagucuuaagccuccaguuc

SEQ ID NO: 294749 - RNA, 23 nt, Artificial Sequence
  Synthetic
cuugagucuuaagccuccaguuc

SEQ ID NO: 294750 - RNA, 24 nt, Artificial Sequence
  Synthetic
ucuugagucuuaagccuccaguuc

SEQ ID NO: 294751 - RNA, 18 nt, Artificial Sequence
  Synthetic
auguauuucuugcaguuc

SEQ ID NO: 294752 - RNA, 19 nt, Artificial Sequence
  Synthetic
aauguauuucuugcaguuc

SEQ ID NO: 294753 - RNA, 20 nt, Artificial Sequence
  Synthetic
aaauguauuucuugcaguuc

SEQ ID NO: 294754 - RNA, 21 nt, Artificial Sequence
  Synthetic
gaaauguauuucuugcaguuc

SEQ ID NO: 294755 - RNA, 22 nt, Artificial Sequence
  Synthetic
agaaauguauuucuugcaguuc

SEQ ID NO: 294756 - RNA, 23 nt, Artificial Sequence
  Synthetic
cagaaauguauuucuugcaguuc

SEQ ID NO: 294757 - RNA, 24 nt, Artificial Sequence
  Synthetic
acagaaauguauuucuugcaguuc

SEQ ID NO: 294758 - RNA, 18 nt, Artificial Sequence
  Synthetic
uauuucacgauucaguuc

SEQ ID NO: 294759 - RNA, 19 nt, Artificial Sequence
  Synthetic
guauuucacgauucaguuc

SEQ ID NO: 294760 - RNA, 20 nt, Artificial Sequence
  Synthetic
gguauuucacgauucaguuc

SEQ ID NO: 294761 - RNA, 21 nt, Artificial Sequence
  Synthetic
ugguauuucacgauucaguuc

SEQ ID NO: 294762 - RNA, 22 nt, Artificial Sequence
  Synthetic
augguauuucacgauucaguuc

SEQ ID NO: 294763 - RNA, 23 nt, Artificial Sequence
  Synthetic
uaugguauuucacgauucaguuc

SEQ ID NO: 294764 - RNA, 24 nt, Artificial Sequence
  Synthetic
uuaugguauuucacgauucaguuc

SEQ ID NO: 294765 - RNA, 18 nt, Artificial Sequence
  Synthetic
uagauguuacaagaguuc

SEQ ID NO: 294766 - RNA, 19 nt, Artificial Sequence
  Synthetic
guagauguuacaagaguuc

SEQ ID NO: 294767 - RNA, 20 nt, Artificial Sequence
  Synthetic
uguagauguuacaagaguuc

SEQ ID NO: 294768 - RNA, 21 nt, Artificial Sequence
  Synthetic
auguagauguuacaagaguuc

SEQ ID NO: 294769 - RNA, 22 nt, Artificial Sequence
  Synthetic
aauguagauguuacaagaguuc

SEQ ID NO: 294770 - RNA, 23 nt, Artificial Sequence
  Synthetic
caauguagauguuacaagaguuc

SEQ ID NO: 294771 - RNA, 24 nt, Artificial Sequence
  Synthetic
ucaauguagauguuacaagaguuc

SEQ ID NO: 294772 - RNA, 18 nt, Artificial Sequence
  Synthetic
ucuauggauacagaguuc

SEQ ID NO: 294773 - RNA, 19 nt, Artificial Sequence
  Synthetic
cucuauggauacagaguuc

SEQ ID NO: 294774 - RNA, 20 nt, Artificial Sequence
  Synthetic
gcucuauggauacagaguuc

SEQ ID NO: 294775 - RNA, 21 nt, Artificial Sequence
  Synthetic
ggcucuauggauacagaguuc

SEQ ID NO: 294776 - RNA, 22 nt, Artificial Sequence
  Synthetic
uggcucuauggauacagaguuc

SEQ ID NO: 294777 - RNA, 23 nt, Artificial Sequence
  Synthetic
uuggcucuauggauacagaguuc

SEQ ID NO: 294778 - RNA, 24 nt, Artificial Sequence
  Synthetic
uuuggcucuauggauacagaguuc

SEQ ID NO: 294779 - RNA, 18 nt, Artificial Sequence
  Synthetic
agauuuucaggggaguuc

SEQ ID NO: 294780 - RNA, 19 nt, Artificial Sequence
  Synthetic
cagauuuucaggggaguuc

SEQ ID NO: 294781 - RNA, 20 nt, Artificial Sequence
  Synthetic
ucagauuuucaggggaguuc

SEQ ID NO: 294782 - RNA, 21 nt, Artificial Sequence
  Synthetic
aucagauuuucaggggaguuc

SEQ ID NO: 294783 - RNA, 22 nt, Artificial Sequence
  Synthetic
caucagauuuucaggggaguuc

SEQ ID NO: 294784 - RNA, 23 nt, Artificial Sequence
  Synthetic
ucaucagauuuucaggggaguuc

SEQ ID NO: 294785 - RNA, 24 nt, Artificial Sequence
  Synthetic
cucaucagauuuucaggggaguuc

SEQ ID NO: 294786 - RNA, 18 nt, Artificial Sequence
  Synthetic
gugguggugaaugaguuc

SEQ ID NO: 294787 - RNA, 19 nt, Artificial Sequence
  Synthetic
ugugguggugaaugaguuc

SEQ ID NO: 294788 - RNA, 20 nt, Artificial Sequence
  Synthetic
augugguggugaaugaguuc

SEQ ID NO: 294789 - RNA, 21 nt, Artificial Sequence
  Synthetic
uaugugguggugaaugaguuc

SEQ ID NO: 294790 - RNA, 22 nt, Artificial Sequence
  Synthetic
cuaugugguggugaaugaguuc

SEQ ID NO: 294791 - RNA, 23 nt, Artificial Sequence
  Synthetic
acuaugugguggugaaugaguuc

SEQ ID NO: 294792 - RNA, 24 nt, Artificial Sequence
  Synthetic
cacuaugugguggugaaugaguuc

SEQ ID NO: 294793 - RNA, 18 nt, Artificial Sequence
  Synthetic
aaaaagcuugaugaguuc

SEQ ID NO: 294794 - RNA, 19 nt, Artificial Sequence
  Synthetic
uaaaaagcuugaugaguuc

SEQ ID NO: 294795 - RNA, 20 nt, Artificial Sequence
  Synthetic
auaaaaagcuugaugaguuc

SEQ ID NO: 294796 - RNA, 21 nt, Artificial Sequence
  Synthetic
aauaaaaagcuugaugaguuc

SEQ ID NO: 294797 - RNA, 22 nt, Artificial Sequence
  Synthetic
aaauaaaaagcuugaugaguuc

SEQ ID NO: 294798 - RNA, 23 nt, Artificial Sequence
  Synthetic
gaaauaaaaagcuugaugaguuc

SEQ ID NO: 294799 - RNA, 24 nt, Artificial Sequence
  Synthetic
agaaauaaaaagcuugaugaguuc

SEQ ID NO: 294800 - RNA, 18 nt, Artificial Sequence
  Synthetic
aauaaacccacugaguuc

SEQ ID NO: 294801 - RNA, 19 nt, Artificial Sequence
  Synthetic
aaauaaacccacugaguuc

SEQ ID NO: 294802 - RNA, 20 nt, Artificial Sequence
  Synthetic
caaauaaacccacugaguuc

SEQ ID NO: 294803 - RNA, 21 nt, Artificial Sequence
  Synthetic
ccaaauaaacccacugaguuc

SEQ ID NO: 294804 - RNA, 22 nt, Artificial Sequence
  Synthetic
cccaaauaaacccacugaguuc

SEQ ID NO: 294805 - RNA, 23 nt, Artificial Sequence
  Synthetic
acccaaauaaacccacugaguuc

SEQ ID NO: 294806 - RNA, 24 nt, Artificial Sequence
  Synthetic
gacccaaauaaacccacugaguuc

SEQ ID NO: 294807 - RNA, 18 nt, Artificial Sequence
  Synthetic
acagcuucuguugaguuc

SEQ ID NO: 294808 - RNA, 19 nt, Artificial Sequence
  Synthetic
uacagcuucuguugaguuc

SEQ ID NO: 294809 - RNA, 20 nt, Artificial Sequence
  Synthetic
cuacagcuucuguugaguuc

SEQ ID NO: 294810 - RNA, 21 nt, Artificial Sequence
  Synthetic
ucuacagcuucuguugaguuc

SEQ ID NO: 294811 - RNA, 22 nt, Artificial Sequence
  Synthetic
gucuacagcuucuguugaguuc

SEQ ID NO: 294812 - RNA, 23 nt, Artificial Sequence
  Synthetic
ggucuacagcuucuguugaguuc

SEQ ID NO: 294813 - RNA, 24 nt, Artificial Sequence
  Synthetic
uggucuacagcuucuguugaguuc

SEQ ID NO: 294814 - RNA, 18 nt, Artificial Sequence
  Synthetic
uagaauguauuugaguuc

SEQ ID NO: 294815 - RNA, 19 nt, Artificial Sequence
  Synthetic
guagaauguauuugaguuc

SEQ ID NO: 294816 - RNA, 20 nt, Artificial Sequence
  Synthetic
uguagaauguauuugaguuc

SEQ ID NO: 294817 - RNA, 21 nt, Artificial Sequence
  Synthetic
uuguagaauguauuugaguuc

SEQ ID NO: 294818 - RNA, 22 nt, Artificial Sequence
  Synthetic
auuguagaauguauuugaguuc

SEQ ID NO: 294819 - RNA, 23 nt, Artificial Sequence
  Synthetic
uauuguagaauguauuugaguuc

SEQ ID NO: 294820 - RNA, 24 nt, Artificial Sequence
  Synthetic
auauuguagaauguauuugaguuc

SEQ ID NO: 294821 - RNA, 18 nt, Artificial Sequence
  Synthetic
gaaugcaugcaauaguuc

SEQ ID NO: 294822 - RNA, 19 nt, Artificial Sequence
  Synthetic
agaaugcaugcaauaguuc

SEQ ID NO: 294823 - RNA, 20 nt, Artificial Sequence
  Synthetic
gagaaugcaugcaauaguuc

SEQ ID NO: 294824 - RNA, 21 nt, Artificial Sequence
  Synthetic
ugagaaugcaugcaauaguuc

SEQ ID NO: 294825 - RNA, 22 nt, Artificial Sequence
  Synthetic
uugagaaugcaugcaauaguuc

SEQ ID NO: 294826 - RNA, 23 nt, Artificial Sequence
  Synthetic
guugagaaugcaugcaauaguuc

SEQ ID NO: 294827 - RNA, 24 nt, Artificial Sequence
  Synthetic
uguugagaaugcaugcaauaguuc

SEQ ID NO: 294828 - RNA, 18 nt, Artificial Sequence
  Synthetic
gggaaaacuuaauaguuc

SEQ ID NO: 294829 - RNA, 19 nt, Artificial Sequence
  Synthetic
agggaaaacuuaauaguuc

SEQ ID NO: 294830 - RNA, 20 nt, Artificial Sequence
  Synthetic
aagggaaaacuuaauaguuc

SEQ ID NO: 294831 - RNA, 21 nt, Artificial Sequence
  Synthetic
caagggaaaacuuaauaguuc

SEQ ID NO: 294832 - RNA, 22 nt, Artificial Sequence
  Synthetic
ucaagggaaaacuuaauaguuc

SEQ ID NO: 294833 - RNA, 23 nt, Artificial Sequence
  Synthetic
aucaagggaaaacuuaauaguuc

SEQ ID NO: 294834 - RNA, 24 nt, Artificial Sequence
  Synthetic
caucaagggaaaacuuaauaguuc

SEQ ID NO: 294835 - RNA, 18 nt, Artificial Sequence
  Synthetic
ucuuuuuuaacauaguuc

SEQ ID NO: 294836 - RNA, 19 nt, Artificial Sequence
  Synthetic
cucuuuuuuaacauaguuc

SEQ ID NO: 294837 - RNA, 20 nt, Artificial Sequence
  Synthetic
acucuuuuuuaacauaguuc

SEQ ID NO: 294838 - RNA, 21 nt, Artificial Sequence
  Synthetic
uacucuuuuuuaacauaguuc

SEQ ID NO: 294839 - RNA, 22 nt, Artificial Sequence
  Synthetic
cuacucuuuuuuaacauaguuc

SEQ ID NO: 294840 - RNA, 23 nt, Artificial Sequence
  Synthetic
acuacucuuuuuuaacauaguuc

SEQ ID NO: 294841 - RNA, 24 nt, Artificial Sequence
  Synthetic
cacuacucuuuuuuaacauaguuc

SEQ ID NO: 294842 - RNA, 18 nt, Artificial Sequence
  Synthetic
uuuguuggcucauaguuc

SEQ ID NO: 294843 - RNA, 19 nt, Artificial Sequence
  Synthetic
auuuguuggcucauaguuc

SEQ ID NO: 294844 - RNA, 20 nt, Artificial Sequence
  Synthetic
gauuuguuggcucauaguuc

SEQ ID NO: 294845 - RNA, 21 nt, Artificial Sequence
  Synthetic
ggauuuguuggcucauaguuc

SEQ ID NO: 294846 - RNA, 22 nt, Artificial Sequence
  Synthetic
gggauuuguuggcucauaguuc

SEQ ID NO: 294847 - RNA, 23 nt, Artificial Sequence
  Synthetic
agggauuuguuggcucauaguuc

SEQ ID NO: 294848 - RNA, 24 nt, Artificial Sequence
  Synthetic
cagggauuuguuggcucauaguuc

SEQ ID NO: 294849 - RNA, 18 nt, Artificial Sequence
  Synthetic
aauuacugcucauaguuc

SEQ ID NO: 294850 - RNA, 19 nt, Artificial Sequence
  Synthetic
uaauuacugcucauaguuc

SEQ ID NO: 294851 - RNA, 20 nt, Artificial Sequence
  Synthetic
cuaauuacugcucauaguuc

SEQ ID NO: 294852 - RNA, 21 nt, Artificial Sequence
  Synthetic
ucuaauuacugcucauaguuc

SEQ ID NO: 294853 - RNA, 22 nt, Artificial Sequence
  Synthetic
aucuaauuacugcucauaguuc

SEQ ID NO: 294854 - RNA, 23 nt, Artificial Sequence
  Synthetic
aaucuaauuacugcucauaguuc

SEQ ID NO: 294855 - RNA, 24 nt, Artificial Sequence
  Synthetic
aaaucuaauuacugcucauaguuc

SEQ ID NO: 294856 - RNA, 18 nt, Artificial Sequence
  Synthetic
agggauaauguauaguuc

SEQ ID NO: 294857 - RNA, 19 nt, Artificial Sequence
  Synthetic
gagggauaauguauaguuc

SEQ ID NO: 294858 - RNA, 20 nt, Artificial Sequence
  Synthetic
ggagggauaauguauaguuc

SEQ ID NO: 294859 - RNA, 21 nt, Artificial Sequence
  Synthetic
uggagggauaauguauaguuc

SEQ ID NO: 294860 - RNA, 22 nt, Artificial Sequence
  Synthetic
cuggagggauaauguauaguuc

SEQ ID NO: 294861 - RNA, 23 nt, Artificial Sequence
  Synthetic
acuggagggauaauguauaguuc

SEQ ID NO: 294862 - RNA, 24 nt, Artificial Sequence
  Synthetic
uacuggagggauaauguauaguuc

SEQ ID NO: 294863 - RNA, 18 nt, Artificial Sequence
  Synthetic
ugaauuuuaugcuaguuc

SEQ ID NO: 294864 - RNA, 19 nt, Artificial Sequence
  Synthetic
augaauuuuaugcuaguuc

SEQ ID NO: 294865 - RNA, 20 nt, Artificial Sequence
  Synthetic
gaugaauuuuaugcuaguuc

SEQ ID NO: 294866 - RNA, 21 nt, Artificial Sequence
  Synthetic
agaugaauuuuaugcuaguuc

SEQ ID NO: 294867 - RNA, 22 nt, Artificial Sequence
  Synthetic
aagaugaauuuuaugcuaguuc

SEQ ID NO: 294868 - RNA, 23 nt, Artificial Sequence
  Synthetic
aaagaugaauuuuaugcuaguuc

SEQ ID NO: 294869 - RNA, 24 nt, Artificial Sequence
  Synthetic
aaaagaugaauuuuaugcuaguuc

SEQ ID NO: 294870 - RNA, 18 nt, Artificial Sequence
  Synthetic
uuuccaggacucuaguuc

SEQ ID NO: 294871 - RNA, 19 nt, Artificial Sequence
  Synthetic
guuuccaggacucuaguuc

SEQ ID NO: 294872 - RNA, 20 nt, Artificial Sequence
  Synthetic
gguuuccaggacucuaguuc

SEQ ID NO: 294873 - RNA, 21 nt, Artificial Sequence
  Synthetic
agguuuccaggacucuaguuc

SEQ ID NO: 294874 - RNA, 22 nt, Artificial Sequence
  Synthetic
aagguuuccaggacucuaguuc

SEQ ID NO: 294875 - RNA, 23 nt, Artificial Sequence
  Synthetic
aaagguuuccaggacucuaguuc

SEQ ID NO: 294876 - RNA, 24 nt, Artificial Sequence
  Synthetic
uaaagguuuccaggacucuaguuc

SEQ ID NO: 294877 - RNA, 18 nt, Artificial Sequence
  Synthetic
cuuuccaaugucuaguuc

SEQ ID NO: 294878 - RNA, 19 nt, Artificial Sequence
  Synthetic
acuuuccaaugucuaguuc

SEQ ID NO: 294879 - RNA, 20 nt, Artificial Sequence
  Synthetic
uacuuuccaaugucuaguuc

SEQ ID NO: 294880 - RNA, 21 nt, Artificial Sequence
  Synthetic
cuacuuuccaaugucuaguuc

SEQ ID NO: 294881 - RNA, 22 nt, Artificial Sequence
  Synthetic
ccuacuuuccaaugucuaguuc

SEQ ID NO: 294882 - RNA, 23 nt, Artificial Sequence
  Synthetic
accuacuuuccaaugucuaguuc

SEQ ID NO: 294883 - RNA, 24 nt, Artificial Sequence
  Synthetic
uaccuacuuuccaaugucuaguuc

SEQ ID NO: 294884 - RNA, 18 nt, Artificial Sequence
  Synthetic
gcauucuucacguaguuc

SEQ ID NO: 294885 - RNA, 19 nt, Artificial Sequence
  Synthetic
ugcauucuucacguaguuc

SEQ ID NO: 294886 - RNA, 20 nt, Artificial Sequence
  Synthetic
cugcauucuucacguaguuc

SEQ ID NO: 294887 - RNA, 21 nt, Artificial Sequence
  Synthetic
ucugcauucuucacguaguuc

SEQ ID NO: 294888 - RNA, 22 nt, Artificial Sequence
  Synthetic
uucugcauucuucacguaguuc

SEQ ID NO: 294889 - RNA, 23 nt, Artificial Sequence
  Synthetic
cuucugcauucuucacguaguuc

SEQ ID NO: 294890 - RNA, 24 nt, Artificial Sequence
  Synthetic
gcuucugcauucuucacguaguuc

SEQ ID NO: 294891 - RNA, 18 nt, Artificial Sequence
  Synthetic
cuacauauucauuaguuc

SEQ ID NO: 294892 - RNA, 19 nt, Artificial Sequence
  Synthetic
acuacauauucauuaguuc

SEQ ID NO: 294893 - RNA, 20 nt, Artificial Sequence
  Synthetic
cacuacauauucauuaguuc

SEQ ID NO: 294894 - RNA, 21 nt, Artificial Sequence
  Synthetic
ccacuacauauucauuaguuc

SEQ ID NO: 294895 - RNA, 22 nt, Artificial Sequence
  Synthetic
uccacuacauauucauuaguuc

SEQ ID NO: 294896 - RNA, 23 nt, Artificial Sequence
  Synthetic
uuccacuacauauucauuaguuc

SEQ ID NO: 294897 - RNA, 24 nt, Artificial Sequence
  Synthetic
uuuccacuacauauucauuaguuc

SEQ ID NO: 294898 - RNA, 18 nt, Artificial Sequence
  Synthetic
cucucccauuuuuaguuc

SEQ ID NO: 294899 - RNA, 19 nt, Artificial Sequence
  Synthetic
gcucucccauuuuuaguuc

SEQ ID NO: 294900 - RNA, 20 nt, Artificial Sequence
  Synthetic
agcucucccauuuuuaguuc

SEQ ID NO: 294901 - RNA, 21 nt, Artificial Sequence
  Synthetic
gagcucucccauuuuuaguuc

SEQ ID NO: 294902 - RNA, 22 nt, Artificial Sequence
  Synthetic
agagcucucccauuuuuaguuc

SEQ ID NO: 294903 - RNA, 23 nt, Artificial Sequence
  Synthetic
aagagcucucccauuuuuaguuc

SEQ ID NO: 294904 - RNA, 24 nt, Artificial Sequence
  Synthetic
uaagagcucucccauuuuuaguuc

SEQ ID NO: 294905 - RNA, 18 nt, Artificial Sequence
  Synthetic
aaugcaaaggaaacguuc

SEQ ID NO: 294906 - RNA, 19 nt, Artificial Sequence
  Synthetic
gaaugcaaaggaaacguuc

SEQ ID NO: 294907 - RNA, 20 nt, Artificial Sequence
  Synthetic
ugaaugcaaaggaaacguuc

SEQ ID NO: 294908 - RNA, 21 nt, Artificial Sequence
  Synthetic
gugaaugcaaaggaaacguuc

SEQ ID NO: 294909 - RNA, 22 nt, Artificial Sequence
  Synthetic
ugugaaugcaaaggaaacguuc

SEQ ID NO: 294910 - RNA, 23 nt, Artificial Sequence
  Synthetic
uugugaaugcaaaggaaacguuc

SEQ ID NO: 294911 - RNA, 24 nt, Artificial Sequence
  Synthetic
guugugaaugcaaaggaaacguuc

SEQ ID NO: 294912 - RNA, 18 nt, Artificial Sequence
  Synthetic
ugcacaaguuauacguuc

SEQ ID NO: 294913 - RNA, 19 nt, Artificial Sequence
  Synthetic
cugcacaaguuauacguuc

SEQ ID NO: 294914 - RNA, 20 nt, Artificial Sequence
  Synthetic
acugcacaaguuauacguuc

SEQ ID NO: 294915 - RNA, 21 nt, Artificial Sequence
  Synthetic
aacugcacaaguuauacguuc

SEQ ID NO: 294916 - RNA, 22 nt, Artificial Sequence
  Synthetic
uaacugcacaaguuauacguuc

SEQ ID NO: 294917 - RNA, 23 nt, Artificial Sequence
  Synthetic
cuaacugcacaaguuauacguuc

SEQ ID NO: 294918 - RNA, 24 nt, Artificial Sequence
  Synthetic
acuaacugcacaaguuauacguuc

SEQ ID NO: 294919 - RNA, 18 nt, Artificial Sequence
  Synthetic
cuuuauuucucaccguuc

SEQ ID NO: 294920 - RNA, 19 nt, Artificial Sequence
  Synthetic
ccuuuauuucucaccguuc

SEQ ID NO: 294921 - RNA, 20 nt, Artificial Sequence
  Synthetic
accuuuauuucucaccguuc

SEQ ID NO: 294922 - RNA, 21 nt, Artificial Sequence
  Synthetic
gaccuuuauuucucaccguuc

SEQ ID NO: 294923 - RNA, 22 nt, Artificial Sequence
  Synthetic
agaccuuuauuucucaccguuc

SEQ ID NO: 294924 - RNA, 23 nt, Artificial Sequence
  Synthetic
cagaccuuuauuucucaccguuc

SEQ ID NO: 294925 - RNA, 24 nt, Artificial Sequence
  Synthetic
acagaccuuuauuucucaccguuc

SEQ ID NO: 294926 - RNA, 18 nt, Artificial Sequence
  Synthetic
ggccucagcugaccguuc

SEQ ID NO: 294927 - RNA, 19 nt, Artificial Sequence
  Synthetic
gggccucagcugaccguuc

SEQ ID NO: 294928 - RNA, 20 nt, Artificial Sequence
  Synthetic
agggccucagcugaccguuc

SEQ ID NO: 294929 - RNA, 21 nt, Artificial Sequence
  Synthetic
aagggccucagcugaccguuc

SEQ ID NO: 294930 - RNA, 22 nt, Artificial Sequence
  Synthetic
uaagggccucagcugaccguuc

SEQ ID NO: 294931 - RNA, 23 nt, Artificial Sequence
  Synthetic
guaagggccucagcugaccguuc

SEQ ID NO: 294932 - RNA, 24 nt, Artificial Sequence
  Synthetic
aguaagggccucagcugaccguuc

SEQ ID NO: 294933 - RNA, 18 nt, Artificial Sequence
  Synthetic
aaugaugcuaauccguuc

SEQ ID NO: 294934 - RNA, 19 nt, Artificial Sequence
  Synthetic
uaaugaugcuaauccguuc

SEQ ID NO: 294935 - RNA, 20 nt, Artificial Sequence
  Synthetic
auaaugaugcuaauccguuc

SEQ ID NO: 294936 - RNA, 21 nt, Artificial Sequence
  Synthetic
aauaaugaugcuaauccguuc

SEQ ID NO: 294937 - RNA, 22 nt, Artificial Sequence
  Synthetic
caauaaugaugcuaauccguuc

SEQ ID NO: 294938 - RNA, 23 nt, Artificial Sequence
  Synthetic
acaauaaugaugcuaauccguuc

SEQ ID NO: 294939 - RNA, 24 nt, Artificial Sequence
  Synthetic
cacaauaaugaugcuaauccguuc

SEQ ID NO: 294940 - RNA, 18 nt, Artificial Sequence
  Synthetic
ggggaagggacagcguuc

SEQ ID NO: 294941 - RNA, 19 nt, Artificial Sequence
  Synthetic
cggggaagggacagcguuc

SEQ ID NO: 294942 - RNA, 20 nt, Artificial Sequence
  Synthetic
gcggggaagggacagcguuc

SEQ ID NO: 294943 - RNA, 21 nt, Artificial Sequence
  Synthetic
agcggggaagggacagcguuc

SEQ ID NO: 294944 - RNA, 22 nt, Artificial Sequence
  Synthetic
uagcggggaagggacagcguuc

SEQ ID NO: 294945 - RNA, 23 nt, Artificial Sequence
  Synthetic
uuagcggggaagggacagcguuc

SEQ ID NO: 294946 - RNA, 24 nt, Artificial Sequence
  Synthetic
uuuagcggggaagggacagcguuc

SEQ ID NO: 294947 - RNA, 18 nt, Artificial Sequence
  Synthetic
uauucucaaaccucguuc

SEQ ID NO: 294948 - RNA, 19 nt, Artificial Sequence
  Synthetic
auauucucaaaccucguuc

SEQ ID NO: 294949 - RNA, 20 nt, Artificial Sequence
  Synthetic
aauauucucaaaccucguuc

SEQ ID NO: 294950 - RNA, 21 nt, Artificial Sequence
  Synthetic
aaauauucucaaaccucguuc

SEQ ID NO: 294951 - RNA, 22 nt, Artificial Sequence
  Synthetic
uaaauauucucaaaccucguuc

SEQ ID NO: 294952 - RNA, 23 nt, Artificial Sequence
  Synthetic
auaaauauucucaaaccucguuc

SEQ ID NO: 294953 - RNA, 24 nt, Artificial Sequence
  Synthetic
aauaaauauucucaaaccucguuc

SEQ ID NO: 294954 - RNA, 18 nt, Artificial Sequence
  Synthetic
aacacaguagaaagguuc

SEQ ID NO: 294955 - RNA, 19 nt, Artificial Sequence
  Synthetic
gaacacaguagaaagguuc

SEQ ID NO: 294956 - RNA, 20 nt, Artificial Sequence
  Synthetic
agaacacaguagaaagguuc

SEQ ID NO: 294957 - RNA, 21 nt, Artificial Sequence
  Synthetic
uagaacacaguagaaagguuc

SEQ ID NO: 294958 - RNA, 22 nt, Artificial Sequence
  Synthetic
auagaacacaguagaaagguuc

SEQ ID NO: 294959 - RNA, 23 nt, Artificial Sequence
  Synthetic
uauagaacacaguagaaagguuc

SEQ ID NO: 294960 - RNA, 24 nt, Artificial Sequence
  Synthetic
cuauagaacacaguagaaagguuc

SEQ ID NO: 294961 - RNA, 18 nt, Artificial Sequence
  Synthetic
ccauuaugaugaagguuc

SEQ ID NO: 294962 - RNA, 19 nt, Artificial Sequence
  Synthetic
cccauuaugaugaagguuc

SEQ ID NO: 294963 - RNA, 20 nt, Artificial Sequence
  Synthetic
ucccauuaugaugaagguuc

SEQ ID NO: 294964 - RNA, 21 nt, Artificial Sequence
  Synthetic
cucccauuaugaugaagguuc

SEQ ID NO: 294965 - RNA, 22 nt, Artificial Sequence
  Synthetic
gcucccauuaugaugaagguuc

SEQ ID NO: 294966 - RNA, 23 nt, Artificial Sequence
  Synthetic
ggcucccauuaugaugaagguuc

SEQ ID NO: 294967 - RNA, 24 nt, Artificial Sequence
  Synthetic
uggcucccauuaugaugaagguuc

SEQ ID NO: 294968 - RNA, 18 nt, Artificial Sequence
  Synthetic
auugauuuuuuaagguuc

SEQ ID NO: 294969 - RNA, 19 nt, Artificial Sequence
  Synthetic
aauugauuuuuuaagguuc

SEQ ID NO: 294970 - RNA, 20 nt, Artificial Sequence
  Synthetic
aaauugauuuuuuaagguuc

SEQ ID NO: 294971 - RNA, 21 nt, Artificial Sequence
  Synthetic
aaaauugauuuuuuaagguuc

SEQ ID NO: 294972 - RNA, 22 nt, Artificial Sequence
  Synthetic
caaaauugauuuuuuaagguuc

SEQ ID NO: 294973 - RNA, 23 nt, Artificial Sequence
  Synthetic
ccaaaauugauuuuuuaagguuc

SEQ ID NO: 294974 - RNA, 24 nt, Artificial Sequence
  Synthetic
cccaaaauugauuuuuuaagguuc

SEQ ID NO: 294975 - RNA, 18 nt, Artificial Sequence
  Synthetic
ccauuccuucccagguuc

SEQ ID NO: 294976 - RNA, 19 nt, Artificial Sequence
  Synthetic
uccauuccuucccagguuc

SEQ ID NO: 294977 - RNA, 20 nt, Artificial Sequence
  Synthetic
auccauuccuucccagguuc

SEQ ID NO: 294978 - RNA, 21 nt, Artificial Sequence
  Synthetic
uauccauuccuucccagguuc

SEQ ID NO: 294979 - RNA, 22 nt, Artificial Sequence
  Synthetic
auauccauuccuucccagguuc

SEQ ID NO: 294980 - RNA, 23 nt, Artificial Sequence
  Synthetic
aauauccauuccuucccagguuc

SEQ ID NO: 294981 - RNA, 24 nt, Artificial Sequence
  Synthetic
uaauauccauuccuucccagguuc

SEQ ID NO: 294982 - RNA, 18 nt, Artificial Sequence
  Synthetic
guagacagugauagguuc

SEQ ID NO: 294983 - RNA, 19 nt, Artificial Sequence
  Synthetic
aguagacagugauagguuc

SEQ ID NO: 294984 - RNA, 20 nt, Artificial Sequence
  Synthetic
caguagacagugauagguuc

SEQ ID NO: 294985 - RNA, 21 nt, Artificial Sequence
  Synthetic
ucaguagacagugauagguuc

SEQ ID NO: 294986 - RNA, 22 nt, Artificial Sequence
  Synthetic
aucaguagacagugauagguuc

SEQ ID NO: 294987 - RNA, 23 nt, Artificial Sequence
  Synthetic
gaucaguagacagugauagguuc

SEQ ID NO: 294988 - RNA, 24 nt, Artificial Sequence
  Synthetic
agaucaguagacagugauagguuc

SEQ ID NO: 294989 - RNA, 18 nt, Artificial Sequence
  Synthetic
cagggacagauuagguuc

SEQ ID NO: 294990 - RNA, 19 nt, Artificial Sequence
  Synthetic
acagggacagauuagguuc

SEQ ID NO: 294991 - RNA, 20 nt, Artificial Sequence
  Synthetic
aacagggacagauuagguuc

SEQ ID NO: 294992 - RNA, 21 nt, Artificial Sequence
  Synthetic
aaacagggacagauuagguuc

SEQ ID NO: 294993 - RNA, 22 nt, Artificial Sequence
  Synthetic
uaaacagggacagauuagguuc

SEQ ID NO: 294994 - RNA, 23 nt, Artificial Sequence
  Synthetic
uuaaacagggacagauuagguuc

SEQ ID NO: 294995 - RNA, 24 nt, Artificial Sequence
  Synthetic
auuaaacagggacagauuagguuc

SEQ ID NO: 294996 - RNA, 18 nt, Artificial Sequence
  Synthetic
uaggaguuauuuagguuc

SEQ ID NO: 294997 - RNA, 19 nt, Artificial Sequence
  Synthetic
uuaggaguuauuuagguuc

SEQ ID NO: 294998 - RNA, 20 nt, Artificial Sequence
  Synthetic
guuaggaguuauuuagguuc

SEQ ID NO: 294999 - RNA, 21 nt, Artificial Sequence
  Synthetic
uguuaggaguuauuuagguuc

SEQ ID NO: 295000 - RNA, 22 nt, Artificial Sequence
  Synthetic
uuguuaggaguuauuuagguuc

SEQ ID NO: 295001 - RNA, 23 nt, Artificial Sequence
  Synthetic
auuguuaggaguuauuuagguuc

SEQ ID NO: 295002 - RNA, 24 nt, Artificial Sequence
  Synthetic
aauuguuaggaguuauuuagguuc

SEQ ID NO: 295003 - RNA, 18 nt, Artificial Sequence
  Synthetic
aguuguuuuucacgguuc

SEQ ID NO: 295004 - RNA, 19 nt, Artificial Sequence
  Synthetic
caguuguuuuucacgguuc

SEQ ID NO: 295005 - RNA, 20 nt, Artificial Sequence
  Synthetic
gcaguuguuuuucacgguuc

SEQ ID NO: 295006 - RNA, 21 nt, Artificial Sequence
  Synthetic
ggcaguuguuuuucacgguuc

SEQ ID NO: 295007 - RNA, 22 nt, Artificial Sequence
  Synthetic
aggcaguuguuuuucacgguuc

SEQ ID NO: 295008 - RNA, 23 nt, Artificial Sequence
  Synthetic
caggcaguuguuuuucacgguuc

SEQ ID NO: 295009 - RNA, 24 nt, Artificial Sequence
  Synthetic
acaggcaguuguuuuucacgguuc

SEQ ID NO: 295010 - RNA, 18 nt, Artificial Sequence
  Synthetic
ucccaugcacuaggguuc

SEQ ID NO: 295011 - RNA, 19 nt, Artificial Sequence
  Synthetic
uucccaugcacuaggguuc

SEQ ID NO: 295012 - RNA, 20 nt, Artificial Sequence
  Synthetic
guucccaugcacuaggguuc

SEQ ID NO: 295013 - RNA, 21 nt, Artificial Sequence
  Synthetic
uguucccaugcacuaggguuc

SEQ ID NO: 295014 - RNA, 22 nt, Artificial Sequence
  Synthetic
uuguucccaugcacuaggguuc

SEQ ID NO: 295015 - RNA, 23 nt, Artificial Sequence
  Synthetic
auuguucccaugcacuaggguuc

SEQ ID NO: 295016 - RNA, 24 nt, Artificial Sequence
  Synthetic
uauuguucccaugcacuaggguuc

SEQ ID NO: 295017 - RNA, 18 nt, Artificial Sequence
  Synthetic
uggaguauuuuaggguuc

SEQ ID NO: 295018 - RNA, 19 nt, Artificial Sequence
  Synthetic
auggaguauuuuaggguuc

SEQ ID NO: 295019 - RNA, 20 nt, Artificial Sequence
  Synthetic
uauggaguauuuuaggguuc

SEQ ID NO: 295020 - RNA, 21 nt, Artificial Sequence
  Synthetic
cuauggaguauuuuaggguuc

SEQ ID NO: 295021 - RNA, 22 nt, Artificial Sequence
  Synthetic
acuauggaguauuuuaggguuc

SEQ ID NO: 295022 - RNA, 23 nt, Artificial Sequence
  Synthetic
aacuauggaguauuuuaggguuc

SEQ ID NO: 295023 - RNA, 24 nt, Artificial Sequence
  Synthetic
aaacuauggaguauuuuaggguuc

SEQ ID NO: 295024 - RNA, 18 nt, Artificial Sequence
  Synthetic
auaccagucgagggguuc

SEQ ID NO: 295025 - RNA, 19 nt, Artificial Sequence
  Synthetic
cauaccagucgagggguuc

SEQ ID NO: 295026 - RNA, 20 nt, Artificial Sequence
  Synthetic
acauaccagucgagggguuc

SEQ ID NO: 295027 - RNA, 21 nt, Artificial Sequence
  Synthetic
gacauaccagucgagggguuc

SEQ ID NO: 295028 - RNA, 22 nt, Artificial Sequence
  Synthetic
agacauaccagucgagggguuc

SEQ ID NO: 295029 - RNA, 23 nt, Artificial Sequence
  Synthetic
aagacauaccagucgagggguuc

SEQ ID NO: 295030 - RNA, 24 nt, Artificial Sequence
  Synthetic
gaagacauaccagucgagggguuc

SEQ ID NO: 295031 - RNA, 18 nt, Artificial Sequence
  Synthetic
uucuguagagauggguuc

SEQ ID NO: 295032 - RNA, 19 nt, Artificial Sequence
  Synthetic
uuucuguagagauggguuc

SEQ ID NO: 295033 - RNA, 20 nt, Artificial Sequence
  Synthetic
uuuucuguagagauggguuc

SEQ ID NO: 295034 - RNA, 21 nt, Artificial Sequence
  Synthetic
guuuucuguagagauggguuc

SEQ ID NO: 295035 - RNA, 22 nt, Artificial Sequence
  Synthetic
uguuuucuguagagauggguuc

SEQ ID NO: 295036 - RNA, 23 nt, Artificial Sequence
  Synthetic
uuguuuucuguagagauggguuc

SEQ ID NO: 295037 - RNA, 24 nt, Artificial Sequence
  Synthetic
uuuguuuucuguagagauggguuc

SEQ ID NO: 295038 - RNA, 18 nt, Artificial Sequence
  Synthetic
ccuccgccuccuggguuc

SEQ ID NO: 295039 - RNA, 19 nt, Artificial Sequence
  Synthetic
accuccgccuccuggguuc

SEQ ID NO: 295040 - RNA, 20 nt, Artificial Sequence
  Synthetic
aaccuccgccuccuggguuc

SEQ ID NO: 295041 - RNA, 19 nt, Artificial Sequence
  Synthetic
gccuccgccuccuggguuc

SEQ ID NO: 295042 - RNA, 20 nt, Artificial Sequence
  Synthetic
agccuccgccuccuggguuc

SEQ ID NO: 295043 - RNA, 21 nt, Artificial Sequence
  Synthetic
cagccuccgccuccuggguuc

SEQ ID NO: 295044 - RNA, 22 nt, Artificial Sequence
  Synthetic
gcagccuccgccuccuggguuc

SEQ ID NO: 295045 - RNA, 23 nt, Artificial Sequence
  Synthetic
ugcagccuccgccuccuggguuc

SEQ ID NO: 295046 - RNA, 24 nt, Artificial Sequence
  Synthetic
cugcagccuccgccuccuggguuc

SEQ ID NO: 295047 - RNA, 18 nt, Artificial Sequence
  Synthetic
uuuaucaaagaaugguuc

SEQ ID NO: 295048 - RNA, 19 nt, Artificial Sequence
  Synthetic
cuuuaucaaagaaugguuc

SEQ ID NO: 295049 - RNA, 20 nt, Artificial Sequence
  Synthetic
gcuuuaucaaagaaugguuc

SEQ ID NO: 295050 - RNA, 21 nt, Artificial Sequence
  Synthetic
ugcuuuaucaaagaaugguuc

SEQ ID NO: 295051 - RNA, 22 nt, Artificial Sequence
  Synthetic
augcuuuaucaaagaaugguuc

SEQ ID NO: 295052 - RNA, 23 nt, Artificial Sequence
  Synthetic
aaugcuuuaucaaagaaugguuc

SEQ ID NO: 295053 - RNA, 24 nt, Artificial Sequence
  Synthetic
aaaugcuuuaucaaagaaugguuc

SEQ ID NO: 295054 - RNA, 18 nt, Artificial Sequence
  Synthetic
aggcaaggaacaugguuc

SEQ ID NO: 295055 - RNA, 19 nt, Artificial Sequence
  Synthetic
gaggcaaggaacaugguuc

SEQ ID NO: 295056 - RNA, 20 nt, Artificial Sequence
  Synthetic
agaggcaaggaacaugguuc

SEQ ID NO: 295057 - RNA, 21 nt, Artificial Sequence
  Synthetic
uagaggcaaggaacaugguuc

SEQ ID NO: 295058 - RNA, 22 nt, Artificial Sequence
  Synthetic
auagaggcaaggaacaugguuc

SEQ ID NO: 295059 - RNA, 23 nt, Artificial Sequence
  Synthetic
cauagaggcaaggaacaugguuc

SEQ ID NO: 295060 - RNA, 24 nt, Artificial Sequence
  Synthetic
ucauagaggcaaggaacaugguuc

SEQ ID NO: 295061 - RNA, 18 nt, Artificial Sequence
  Synthetic
uaauaucccugaugguuc

SEQ ID NO: 295062 - RNA, 19 nt, Artificial Sequence
  Synthetic
auaauaucccugaugguuc

SEQ ID NO: 295063 - RNA, 20 nt, Artificial Sequence
  Synthetic
uauaauaucccugaugguuc

SEQ ID NO: 295064 - RNA, 21 nt, Artificial Sequence
  Synthetic
guauaauaucccugaugguuc

SEQ ID NO: 295065 - RNA, 22 nt, Artificial Sequence
  Synthetic
uguauaauaucccugaugguuc

SEQ ID NO: 295066 - RNA, 23 nt, Artificial Sequence
  Synthetic
uuguauaauaucccugaugguuc

SEQ ID NO: 295067 - RNA, 24 nt, Artificial Sequence
  Synthetic
auuguauaauaucccugaugguuc

SEQ ID NO: 295068 - RNA, 18 nt, Artificial Sequence
  Synthetic
cuuaaacccauaugguuc

SEQ ID NO: 295069 - RNA, 19 nt, Artificial Sequence
  Synthetic
acuuaaacccauaugguuc

SEQ ID NO: 295070 - RNA, 20 nt, Artificial Sequence
  Synthetic
cacuuaaacccauaugguuc

SEQ ID NO: 295071 - RNA, 21 nt, Artificial Sequence
  Synthetic
ccacuuaaacccauaugguuc

SEQ ID NO: 295072 - RNA, 22 nt, Artificial Sequence
  Synthetic
gccacuuaaacccauaugguuc

SEQ ID NO: 295073 - RNA, 23 nt, Artificial Sequence
  Synthetic
agccacuuaaacccauaugguuc

SEQ ID NO: 295074 - RNA, 24 nt, Artificial Sequence
  Synthetic
aagccacuuaaacccauaugguuc

SEQ ID NO: 295075 - RNA, 18 nt, Artificial Sequence
  Synthetic
ccucugacucccugguuc

SEQ ID NO: 295076 - RNA, 19 nt, Artificial Sequence
  Synthetic
accucugacucccugguuc

SEQ ID NO: 295077 - RNA, 20 nt, Artificial Sequence
  Synthetic
aaccucugacucccugguuc

SEQ ID NO: 295078 - RNA, 21 nt, Artificial Sequence
  Synthetic
caaccucugacucccugguuc

SEQ ID NO: 295079 - RNA, 22 nt, Artificial Sequence
  Synthetic
gcaaccucugacucccugguuc

SEQ ID NO: 295080 - RNA, 23 nt, Artificial Sequence
  Synthetic
ugcaaccucugacucccugguuc

SEQ ID NO: 295081 - RNA, 24 nt, Artificial Sequence
  Synthetic
cugcaaccucugacucccugguuc

SEQ ID NO: 295082 - RNA, 18 nt, Artificial Sequence
  Synthetic
ugcugaugcugcugguuc

SEQ ID NO: 295083 - RNA, 19 nt, Artificial Sequence
  Synthetic
augcugaugcugcugguuc

SEQ ID NO: 295084 - RNA, 20 nt, Artificial Sequence
  Synthetic
gaugcugaugcugcugguuc

SEQ ID NO: 295085 - RNA, 21 nt, Artificial Sequence
  Synthetic
ugaugcugaugcugcugguuc

SEQ ID NO: 295086 - RNA, 22 nt, Artificial Sequence
  Synthetic
gugaugcugaugcugcugguuc

SEQ ID NO: 295087 - RNA, 23 nt, Artificial Sequence
  Synthetic
agugaugcugaugcugcugguuc

SEQ ID NO: 295088 - RNA, 24 nt, Artificial Sequence
  Synthetic
aagugaugcugaugcugcugguuc

SEQ ID NO: 295089 - RNA, 18 nt, Artificial Sequence
  Synthetic
aauguagagaagugguuc

SEQ ID NO: 295090 - RNA, 19 nt, Artificial Sequence
  Synthetic
aaauguagagaagugguuc

SEQ ID NO: 295091 - RNA, 20 nt, Artificial Sequence
  Synthetic
aaaauguagagaagugguuc

SEQ ID NO: 295092 - RNA, 21 nt, Artificial Sequence
  Synthetic
aaaaauguagagaagugguuc

SEQ ID NO: 295093 - RNA, 22 nt, Artificial Sequence
  Synthetic
aaaaaauguagagaagugguuc

SEQ ID NO: 295094 - RNA, 23 nt, Artificial Sequence
  Synthetic
aaaaaaauguagagaagugguuc

SEQ ID NO: 295095 - RNA, 24 nt, Artificial Sequence
  Synthetic
aaaaaaaauguagagaagugguuc

SEQ ID NO: 295096 - RNA, 18 nt, Artificial Sequence
  Synthetic
gugagcacaacuugguuc

SEQ ID NO: 295097 - RNA, 19 nt, Artificial Sequence
  Synthetic
ggugagcacaacuugguuc

SEQ ID NO: 295098 - RNA, 20 nt, Artificial Sequence
  Synthetic
uggugagcacaacuugguuc

SEQ ID NO: 295099 - RNA, 21 nt, Artificial Sequence
  Synthetic
guggugagcacaacuugguuc

SEQ ID NO: 295100 - RNA, 22 nt, Artificial Sequence
  Synthetic
gguggugagcacaacuugguuc

SEQ ID NO: 295101 - RNA, 23 nt, Artificial Sequence
  Synthetic
agguggugagcacaacuugguuc

SEQ ID NO: 295102 - RNA, 24 nt, Artificial Sequence
  Synthetic
cagguggugagcacaacuugguuc

SEQ ID NO: 295103 - RNA, 18 nt, Artificial Sequence
  Synthetic
uucauggacauuugguuc

SEQ ID NO: 295104 - RNA, 19 nt, Artificial Sequence
  Synthetic
guucauggacauuugguuc

SEQ ID NO: 295105 - RNA, 20 nt, Artificial Sequence
  Synthetic
gguucauggacauuugguuc

SEQ ID NO: 295106 - RNA, 21 nt, Artificial Sequence
  Synthetic
agguucauggacauuugguuc

SEQ ID NO: 295107 - RNA, 22 nt, Artificial Sequence
  Synthetic
cagguucauggacauuugguuc

SEQ ID NO: 295108 - RNA, 23 nt, Artificial Sequence
  Synthetic
ccagguucauggacauuugguuc

SEQ ID NO: 295109 - RNA, 24 nt, Artificial Sequence
  Synthetic
cccagguucauggacauuugguuc

SEQ ID NO: 295110 - RNA, 18 nt, Artificial Sequence
  Synthetic
augauucauauuugguuc

SEQ ID NO: 295111 - RNA, 19 nt, Artificial Sequence
  Synthetic
gaugauucauauuugguuc

SEQ ID NO: 295112 - RNA, 20 nt, Artificial Sequence
  Synthetic
agaugauucauauuugguuc

SEQ ID NO: 295113 - RNA, 21 nt, Artificial Sequence
  Synthetic
cagaugauucauauuugguuc

SEQ ID NO: 295114 - RNA, 22 nt, Artificial Sequence
  Synthetic
acagaugauucauauuugguuc

SEQ ID NO: 295115 - RNA, 23 nt, Artificial Sequence
  Synthetic
aacagaugauucauauuugguuc

SEQ ID NO: 295116 - RNA, 24 nt, Artificial Sequence
  Synthetic
uaacagaugauucauauuugguuc

SEQ ID NO: 295117 - RNA, 18 nt, Artificial Sequence
  Synthetic
agauuuggaguaauguuc

SEQ ID NO: 295118 - RNA, 19 nt, Artificial Sequence
  Synthetic
uagauuuggaguaauguuc

SEQ ID NO: 295119 - RNA, 20 nt, Artificial Sequence
  Synthetic
guagauuuggaguaauguuc

SEQ ID NO: 295120 - RNA, 21 nt, Artificial Sequence
  Synthetic
uguagauuuggaguaauguuc

SEQ ID NO: 295121 - RNA, 22 nt, Artificial Sequence
  Synthetic
cuguagauuuggaguaauguuc

SEQ ID NO: 295122 - RNA, 23 nt, Artificial Sequence
  Synthetic
ucuguagauuuggaguaauguuc

SEQ ID NO: 295123 - RNA, 24 nt, Artificial Sequence
  Synthetic
cucuguagauuuggaguaauguuc

SEQ ID NO: 295124 - RNA, 18 nt, Artificial Sequence
  Synthetic
guaacuaaaaacauguuc

SEQ ID NO: 295125 - RNA, 19 nt, Artificial Sequence
  Synthetic
gguaacuaaaaacauguuc

SEQ ID NO: 295126 - RNA, 20 nt, Artificial Sequence
  Synthetic
ugguaacuaaaaacauguuc

SEQ ID NO: 295127 - RNA, 21 nt, Artificial Sequence
  Synthetic
uugguaacuaaaaacauguuc

SEQ ID NO: 295128 - RNA, 22 nt, Artificial Sequence
  Synthetic
uuugguaacuaaaaacauguuc

SEQ ID NO: 295129 - RNA, 23 nt, Artificial Sequence
  Synthetic
uuuugguaacuaaaaacauguuc

SEQ ID NO: 295130 - RNA, 24 nt, Artificial Sequence
  Synthetic
auuuugguaacuaaaaacauguuc

SEQ ID NO: 295131 - RNA, 18 nt, Artificial Sequence
  Synthetic
uuuaaagcuagcauguuc

SEQ ID NO: 295132 - RNA, 19 nt, Artificial Sequence
  Synthetic
auuuaaagcuagcauguuc

SEQ ID NO: 295133 - RNA, 20 nt, Artificial Sequence
  Synthetic
cauuuaaagcuagcauguuc

SEQ ID NO: 295134 - RNA, 21 nt, Artificial Sequence
  Synthetic
acauuuaaagcuagcauguuc

SEQ ID NO: 295135 - RNA, 22 nt, Artificial Sequence
  Synthetic
aacauuuaaagcuagcauguuc

SEQ ID NO: 295136 - RNA, 23 nt, Artificial Sequence
  Synthetic
uaacauuuaaagcuagcauguuc

SEQ ID NO: 295137 - RNA, 24 nt, Artificial Sequence
  Synthetic
cuaacauuuaaagcuagcauguuc

SEQ ID NO: 295138 - RNA, 18 nt, Artificial Sequence
  Synthetic
gaagucuaacgcauguuc

SEQ ID NO: 295139 - RNA, 19 nt, Artificial Sequence
  Synthetic
agaagucuaacgcauguuc

SEQ ID NO: 295140 - RNA, 20 nt, Artificial Sequence
  Synthetic
cagaagucuaacgcauguuc

SEQ ID NO: 295141 - RNA, 21 nt, Artificial Sequence
  Synthetic
gcagaagucuaacgcauguuc

SEQ ID NO: 295142 - RNA, 22 nt, Artificial Sequence
  Synthetic
ugcagaagucuaacgcauguuc

SEQ ID NO: 295143 - RNA, 23 nt, Artificial Sequence
  Synthetic
gugcagaagucuaacgcauguuc

SEQ ID NO: 295144 - RNA, 24 nt, Artificial Sequence
  Synthetic
ggugcagaagucuaacgcauguuc

SEQ ID NO: 295145 - RNA, 18 nt, Artificial Sequence
  Synthetic
auauuaucugucauguuc

SEQ ID NO: 295146 - RNA, 19 nt, Artificial Sequence
  Synthetic
uauauuaucugucauguuc

SEQ ID NO: 295147 - RNA, 20 nt, Artificial Sequence
  Synthetic
auauauuaucugucauguuc

SEQ ID NO: 295148 - RNA, 21 nt, Artificial Sequence
  Synthetic
gauauauuaucugucauguuc

SEQ ID NO: 295149 - RNA, 22 nt, Artificial Sequence
  Synthetic
agauauauuaucugucauguuc

SEQ ID NO: 295150 - RNA, 23 nt, Artificial Sequence
  Synthetic
cagauauauuaucugucauguuc

SEQ ID NO: 295151 - RNA, 24 nt, Artificial Sequence
  Synthetic
gcagauauauuaucugucauguuc

SEQ ID NO: 295152 - RNA, 18 nt, Artificial Sequence
  Synthetic
ccuaaauuauucauguuc

SEQ ID NO: 295153 - RNA, 19 nt, Artificial Sequence
  Synthetic
gccuaaauuauucauguuc

SEQ ID NO: 295154 - RNA, 20 nt, Artificial Sequence
  Synthetic
ugccuaaauuauucauguuc

SEQ ID NO: 295155 - RNA, 21 nt, Artificial Sequence
  Synthetic
cugccuaaauuauucauguuc

SEQ ID NO: 295156 - RNA, 22 nt, Artificial Sequence
  Synthetic
ccugccuaaauuauucauguuc

SEQ ID NO: 295157 - RNA, 23 nt, Artificial Sequence
  Synthetic
uccugccuaaauuauucauguuc

SEQ ID NO: 295158 - RNA, 24 nt, Artificial Sequence
  Synthetic
cuccugccuaaauuauucauguuc

SEQ ID NO: 295159 - RNA, 18 nt, Artificial Sequence
  Synthetic
uuuggaagaaagauguuc

SEQ ID NO: 295160 - RNA, 19 nt, Artificial Sequence
  Synthetic
guuuggaagaaagauguuc

SEQ ID NO: 295161 - RNA, 20 nt, Artificial Sequence
  Synthetic
uguuuggaagaaagauguuc

SEQ ID NO: 295162 - RNA, 21 nt, Artificial Sequence
  Synthetic
auguuuggaagaaagauguuc

SEQ ID NO: 295163 - RNA, 22 nt, Artificial Sequence
  Synthetic
uauguuuggaagaaagauguuc

SEQ ID NO: 295164 - RNA, 23 nt, Artificial Sequence
  Synthetic
uuauguuuggaagaaagauguuc

SEQ ID NO: 295165 - RNA, 24 nt, Artificial Sequence
  Synthetic
auuauguuuggaagaaagauguuc

SEQ ID NO: 295166 - RNA, 18 nt, Artificial Sequence
  Synthetic
gcuagcagaaguauguuc

SEQ ID NO: 295167 - RNA, 19 nt, Artificial Sequence
  Synthetic
agcuagcagaaguauguuc

SEQ ID NO: 295168 - RNA, 20 nt, Artificial Sequence
  Synthetic
aagcuagcagaaguauguuc

SEQ ID NO: 295169 - RNA, 21 nt, Artificial Sequence
  Synthetic
gaagcuagcagaaguauguuc

SEQ ID NO: 295170 - RNA, 22 nt, Artificial Sequence
  Synthetic
ggaagcuagcagaaguauguuc

SEQ ID NO: 295171 - RNA, 23 nt, Artificial Sequence
  Synthetic
uggaagcuagcagaaguauguuc

SEQ ID NO: 295172 - RNA, 24 nt, Artificial Sequence
  Synthetic
uuggaagcuagcagaaguauguuc

SEQ ID NO: 295173 - RNA, 18 nt, Artificial Sequence
  Synthetic
cauugaguggcacuguuc

SEQ ID NO: 295174 - RNA, 19 nt, Artificial Sequence
  Synthetic
ccauugaguggcacuguuc

SEQ ID NO: 295175 - RNA, 20 nt, Artificial Sequence
  Synthetic
accauugaguggcacuguuc

SEQ ID NO: 295176 - RNA, 21 nt, Artificial Sequence
  Synthetic
aaccauugaguggcacuguuc

SEQ ID NO: 295177 - RNA, 22 nt, Artificial Sequence
  Synthetic
gaaccauugaguggcacuguuc

SEQ ID NO: 295178 - RNA, 23 nt, Artificial Sequence
  Synthetic
ugaaccauugaguggcacuguuc

SEQ ID NO: 295179 - RNA, 24 nt, Artificial Sequence
  Synthetic
augaaccauugaguggcacuguuc

SEQ ID NO: 295180 - RNA, 18 nt, Artificial Sequence
  Synthetic
acuuauuucucacuguuc

SEQ ID NO: 295181 - RNA, 19 nt, Artificial Sequence
  Synthetic
aacuuauuucucacuguuc

SEQ ID NO: 295182 - RNA, 20 nt, Artificial Sequence
  Synthetic
aaacuuauuucucacuguuc

SEQ ID NO: 295183 - RNA, 21 nt, Artificial Sequence
  Synthetic
aaaacuuauuucucacuguuc

SEQ ID NO: 295184 - RNA, 22 nt, Artificial Sequence
  Synthetic
aaaaacuuauuucucacuguuc

SEQ ID NO: 295185 - RNA, 23 nt, Artificial Sequence
  Synthetic
caaaaacuuauuucucacuguuc

SEQ ID NO: 295186 - RNA, 24 nt, Artificial Sequence
  Synthetic
acaaaaacuuauuucucacuguuc

SEQ ID NO: 295187 - RNA, 18 nt, Artificial Sequence
  Synthetic
guguugcccaggcuguuc

SEQ ID NO: 295188 - RNA, 19 nt, Artificial Sequence
  Synthetic
uguguugcccaggcuguuc

SEQ ID NO: 295189 - RNA, 20 nt, Artificial Sequence
  Synthetic
cuguguugcccaggcuguuc

SEQ ID NO: 295190 - RNA, 21 nt, Artificial Sequence
  Synthetic
acuguguugcccaggcuguuc

SEQ ID NO: 295191 - RNA, 22 nt, Artificial Sequence
  Synthetic
cacuguguugcccaggcuguuc

SEQ ID NO: 295192 - RNA, 23 nt, Artificial Sequence
  Synthetic
ucacuguguugcccaggcuguuc

SEQ ID NO: 295193 - RNA, 24 nt, Artificial Sequence
  Synthetic
cucacuguguugcccaggcuguuc

SEQ ID NO: 295194 - RNA, 18 nt, Artificial Sequence
  Synthetic
auauuggccaggcuguuc

SEQ ID NO: 295195 - RNA, 19 nt, Artificial Sequence
  Synthetic
cauauuggccaggcuguuc

SEQ ID NO: 295196 - RNA, 20 nt, Artificial Sequence
  Synthetic
ccauauuggccaggcuguuc

SEQ ID NO: 295197 - RNA, 21 nt, Artificial Sequence
  Synthetic
accauauuggccaggcuguuc

SEQ ID NO: 295198 - RNA, 22 nt, Artificial Sequence
  Synthetic
caccauauuggccaggcuguuc

SEQ ID NO: 295199 - RNA, 23 nt, Artificial Sequence
  Synthetic
ucaccauauuggccaggcuguuc

SEQ ID NO: 295200 - RNA, 24 nt, Artificial Sequence
  Synthetic
uucaccauauuggccaggcuguuc

SEQ ID NO: 295201 - RNA, 18 nt, Artificial Sequence
  Synthetic
gaugugaauaugcuguuc

SEQ ID NO: 295202 - RNA, 19 nt, Artificial Sequence
  Synthetic
agaugugaauaugcuguuc

SEQ ID NO: 295203 - RNA, 20 nt, Artificial Sequence
  Synthetic
gagaugugaauaugcuguuc

SEQ ID NO: 295204 - RNA, 21 nt, Artificial Sequence
  Synthetic
agagaugugaauaugcuguuc

SEQ ID NO: 295205 - RNA, 22 nt, Artificial Sequence
  Synthetic
cagagaugugaauaugcuguuc

SEQ ID NO: 295206 - RNA, 23 nt, Artificial Sequence
  Synthetic
ccagagaugugaauaugcuguuc

SEQ ID NO: 295207 - RNA, 24 nt, Artificial Sequence
  Synthetic
cccagagaugugaauaugcuguuc

SEQ ID NO: 295208 - RNA, 18 nt, Artificial Sequence
  Synthetic
agauaauuuuaucuguuc

SEQ ID NO: 295209 - RNA, 19 nt, Artificial Sequence
  Synthetic
aagauaauuuuaucuguuc

SEQ ID NO: 295210 - RNA, 20 nt, Artificial Sequence
  Synthetic
aaagauaauuuuaucuguuc

SEQ ID NO: 295211 - RNA, 21 nt, Artificial Sequence
  Synthetic
caaagauaauuuuaucuguuc

SEQ ID NO: 295212 - RNA, 22 nt, Artificial Sequence
  Synthetic
acaaagauaauuuuaucuguuc

SEQ ID NO: 295213 - RNA, 23 nt, Artificial Sequence
  Synthetic
aacaaagauaauuuuaucuguuc

SEQ ID NO: 295214 - RNA, 24 nt, Artificial Sequence
  Synthetic
uaacaaagauaauuuuaucuguuc

SEQ ID NO: 295215 - RNA, 18 nt, Artificial Sequence
  Synthetic
uagccauaguuucuguuc

SEQ ID NO: 295216 - RNA, 19 nt, Artificial Sequence
  Synthetic
uuagccauaguuucuguuc

SEQ ID NO: 295217 - RNA, 20 nt, Artificial Sequence
  Synthetic
uuuagccauaguuucuguuc

SEQ ID NO: 295218 - RNA, 21 nt, Artificial Sequence
  Synthetic
uuuuagccauaguuucuguuc

SEQ ID NO: 295219 - RNA, 22 nt, Artificial Sequence
  Synthetic
uuuuuagccauaguuucuguuc

SEQ ID NO: 295220 - RNA, 23 nt, Artificial Sequence
  Synthetic
cuuuuuagccauaguuucuguuc

SEQ ID NO: 295221 - RNA, 24 nt, Artificial Sequence
  Synthetic
gcuuuuuagccauaguuucuguuc

SEQ ID NO: 295222 - RNA, 18 nt, Artificial Sequence
  Synthetic
gagauguauuuucuguuc

SEQ ID NO: 295223 - RNA, 19 nt, Artificial Sequence
  Synthetic
agagauguauuuucuguuc

SEQ ID NO: 295224 - RNA, 20 nt, Artificial Sequence
  Synthetic
uagagauguauuuucuguuc

SEQ ID NO: 295225 - RNA, 21 nt, Artificial Sequence
  Synthetic
uuagagauguauuuucuguuc

SEQ ID NO: 295226 - RNA, 22 nt, Artificial Sequence
  Synthetic
uuuagagauguauuuucuguuc

SEQ ID NO: 295227 - RNA, 23 nt, Artificial Sequence
  Synthetic
auuuagagauguauuuucuguuc

SEQ ID NO: 295228 - RNA, 24 nt, Artificial Sequence
  Synthetic
aauuuagagauguauuuucuguuc

SEQ ID NO: 295229 - RNA, 18 nt, Artificial Sequence
  Synthetic
cccaguucccaaguguuc

SEQ ID NO: 295230 - RNA, 19 nt, Artificial Sequence
  Synthetic
ucccaguucccaaguguuc

SEQ ID NO: 295231 - RNA, 20 nt, Artificial Sequence
  Synthetic
aucccaguucccaaguguuc

SEQ ID NO: 295232 - RNA, 21 nt, Artificial Sequence
  Synthetic
caucccaguucccaaguguuc

SEQ ID NO: 295233 - RNA, 22 nt, Artificial Sequence
  Synthetic
gcaucccaguucccaaguguuc

SEQ ID NO: 295234 - RNA, 23 nt, Artificial Sequence
  Synthetic
ggcaucccaguucccaaguguuc

SEQ ID NO: 295235 - RNA, 24 nt, Artificial Sequence
  Synthetic
aggcaucccaguucccaaguguuc

SEQ ID NO: 295236 - RNA, 18 nt, Artificial Sequence
  Synthetic
aauguccucuaaguguuc

SEQ ID NO: 295237 - RNA, 19 nt, Artificial Sequence
  Synthetic
caauguccucuaaguguuc

SEQ ID NO: 295238 - RNA, 20 nt, Artificial Sequence
  Synthetic
acaauguccucuaaguguuc

SEQ ID NO: 295239 - RNA, 21 nt, Artificial Sequence
  Synthetic
uacaauguccucuaaguguuc

SEQ ID NO: 295240 - RNA, 22 nt, Artificial Sequence
  Synthetic
cuacaauguccucuaaguguuc

SEQ ID NO: 295241 - RNA, 23 nt, Artificial Sequence
  Synthetic
ccuacaauguccucuaaguguuc

SEQ ID NO: 295242 - RNA, 24 nt, Artificial Sequence
  Synthetic
cccuacaauguccucuaaguguuc

SEQ ID NO: 295243 - RNA, 18 nt, Artificial Sequence
  Synthetic
uaauauuucuaaguguuc

SEQ ID NO: 295244 - RNA, 19 nt, Artificial Sequence
  Synthetic
uuaauauuucuaaguguuc

SEQ ID NO: 295245 - RNA, 20 nt, Artificial Sequence
  Synthetic
uuuaauauuucuaaguguuc

SEQ ID NO: 295246 - RNA, 21 nt, Artificial Sequence
  Synthetic
uuuuaauauuucuaaguguuc

SEQ ID NO: 295247 - RNA, 22 nt, Artificial Sequence
  Synthetic
auuuuaauauuucuaaguguuc

SEQ ID NO: 295248 - RNA, 23 nt, Artificial Sequence
  Synthetic
aauuuuaauauuucuaaguguuc

SEQ ID NO: 295249 - RNA, 24 nt, Artificial Sequence
  Synthetic
gaauuuuaauauuucuaaguguuc

SEQ ID NO: 295250 - RNA, 18 nt, Artificial Sequence
  Synthetic
gucuauuuaggaguguuc

SEQ ID NO: 295251 - RNA, 19 nt, Artificial Sequence
  Synthetic
ugucuauuuaggaguguuc

SEQ ID NO: 295252 - RNA, 20 nt, Artificial Sequence
  Synthetic
augucuauuuaggaguguuc

SEQ ID NO: 295253 - RNA, 21 nt, Artificial Sequence
  Synthetic
uaugucuauuuaggaguguuc

SEQ ID NO: 295254 - RNA, 22 nt, Artificial Sequence
  Synthetic
guaugucuauuuaggaguguuc

SEQ ID NO: 295255 - RNA, 23 nt, Artificial Sequence
  Synthetic
aguaugucuauuuaggaguguuc

SEQ ID NO: 295256 - RNA, 24 nt, Artificial Sequence
  Synthetic
caguaugucuauuuaggaguguuc

SEQ ID NO: 295257 - RNA, 18 nt, Artificial Sequence
  Synthetic
uugcccaaaaucguguuc

SEQ ID NO: 295258 - RNA, 19 nt, Artificial Sequence
  Synthetic
uuugcccaaaaucguguuc

SEQ ID NO: 295259 - RNA, 20 nt, Artificial Sequence
  Synthetic
uuuugcccaaaaucguguuc

SEQ ID NO: 295260 - RNA, 21 nt, Artificial Sequence
  Synthetic
auuuugcccaaaaucguguuc

SEQ ID NO: 295261 - RNA, 22 nt, Artificial Sequence
  Synthetic
uauuuugcccaaaaucguguuc

SEQ ID NO: 295262 - RNA, 23 nt, Artificial Sequence
  Synthetic
cuauuuugcccaaaaucguguuc

SEQ ID NO: 295263 - RNA, 24 nt, Artificial Sequence
  Synthetic
ucuauuuugcccaaaaucguguuc

SEQ ID NO: 295264 - RNA, 18 nt, Artificial Sequence
  Synthetic
uuuuuaaaagugguguuc

SEQ ID NO: 295265 - RNA, 19 nt, Artificial Sequence
  Synthetic
uuuuuuaaaagugguguuc

SEQ ID NO: 295266 - RNA, 20 nt, Artificial Sequence
  Synthetic
auuuuuuaaaagugguguuc

SEQ ID NO: 295267 - RNA, 21 nt, Artificial Sequence
  Synthetic
aauuuuuuaaaagugguguuc

SEQ ID NO: 295268 - RNA, 22 nt, Artificial Sequence
  Synthetic
aaauuuuuuaaaagugguguuc

SEQ ID NO: 295269 - RNA, 23 nt, Artificial Sequence
  Synthetic
aaaauuuuuuaaaagugguguuc

SEQ ID NO: 295270 - RNA, 24 nt, Artificial Sequence
  Synthetic
aaaaauuuuuuaaaagugguguuc

SEQ ID NO: 295271 - RNA, 18 nt, Artificial Sequence
  Synthetic
ccuugaggcucuguguuc

SEQ ID NO: 295272 - RNA, 19 nt, Artificial Sequence
  Synthetic
cccuugaggcucuguguuc

SEQ ID NO: 295273 - RNA, 20 nt, Artificial Sequence
  Synthetic
ccccuugaggcucuguguuc

SEQ ID NO: 295274 - RNA, 21 nt, Artificial Sequence
  Synthetic
accccuugaggcucuguguuc

SEQ ID NO: 295275 - RNA, 22 nt, Artificial Sequence
  Synthetic
caccccuugaggcucuguguuc

SEQ ID NO: 295276 - RNA, 23 nt, Artificial Sequence
  Synthetic
ccaccccuugaggcucuguguuc

SEQ ID NO: 295277 - RNA, 24 nt, Artificial Sequence
  Synthetic
uccaccccuugaggcucuguguuc

SEQ ID NO: 295278 - RNA, 18 nt, Artificial Sequence
  Synthetic
acauacacacguguguuc

SEQ ID NO: 295279 - RNA, 19 nt, Artificial Sequence
  Synthetic
cacauacacacguguguuc

SEQ ID NO: 295280 - RNA, 20 nt, Artificial Sequence
  Synthetic
ccacauacacacguguguuc

SEQ ID NO: 295281 - RNA, 21 nt, Artificial Sequence
  Synthetic
cccacauacacacguguguuc

SEQ ID NO: 295282 - RNA, 22 nt, Artificial Sequence
  Synthetic
ccccacauacacacguguguuc

SEQ ID NO: 295283 - RNA, 23 nt, Artificial Sequence
  Synthetic
cccccacauacacacguguguuc

SEQ ID NO: 295284 - RNA, 24 nt, Artificial Sequence
  Synthetic
acccccacauacacacguguguuc

SEQ ID NO: 295285 - RNA, 18 nt, Artificial Sequence
  Synthetic
auugauuacuguguguuc

SEQ ID NO: 295286 - RNA, 19 nt, Artificial Sequence
  Synthetic
cauugauuacuguguguuc

SEQ ID NO: 295287 - RNA, 20 nt, Artificial Sequence
  Synthetic
ccauugauuacuguguguuc

SEQ ID NO: 295288 - RNA, 21 nt, Artificial Sequence
  Synthetic
gccauugauuacuguguguuc

SEQ ID NO: 295289 - RNA, 22 nt, Artificial Sequence
  Synthetic
ugccauugauuacuguguguuc

SEQ ID NO: 295290 - RNA, 23 nt, Artificial Sequence
  Synthetic
uugccauugauuacuguguguuc

SEQ ID NO: 295291 - RNA, 24 nt, Artificial Sequence
  Synthetic
uuugccauugauuacuguguguuc

SEQ ID NO: 295292 - RNA, 18 nt, Artificial Sequence
  Synthetic
gcauuugcgcaauuguuc

SEQ ID NO: 295293 - RNA, 19 nt, Artificial Sequence
  Synthetic
agcauuugcgcaauuguuc

SEQ ID NO: 295294 - RNA, 20 nt, Artificial Sequence
  Synthetic
gagcauuugcgcaauuguuc

SEQ ID NO: 295295 - RNA, 21 nt, Artificial Sequence
  Synthetic
agagcauuugcgcaauuguuc

SEQ ID NO: 295296 - RNA, 22 nt, Artificial Sequence
  Synthetic
gagagcauuugcgcaauuguuc

SEQ ID NO: 295297 - RNA, 23 nt, Artificial Sequence
  Synthetic
ggagagcauuugcgcaauuguuc

SEQ ID NO: 295298 - RNA, 24 nt, Artificial Sequence
  Synthetic
aggagagcauuugcgcaauuguuc

SEQ ID NO: 295299 - RNA, 18 nt, Artificial Sequence
  Synthetic
gggaugugugcauuguuc

SEQ ID NO: 295300 - RNA, 19 nt, Artificial Sequence
  Synthetic
agggaugugugcauuguuc

SEQ ID NO: 295301 - RNA, 20 nt, Artificial Sequence
  Synthetic
cagggaugugugcauuguuc

SEQ ID NO: 295302 - RNA, 21 nt, Artificial Sequence
  Synthetic
ccagggaugugugcauuguuc

SEQ ID NO: 295303 - RNA, 22 nt, Artificial Sequence
  Synthetic
uccagggaugugugcauuguuc

SEQ ID NO: 295304 - RNA, 23 nt, Artificial Sequence
  Synthetic
auccagggaugugugcauuguuc

SEQ ID NO: 295305 - RNA, 24 nt, Artificial Sequence
  Synthetic
cauccagggaugugugcauuguuc

SEQ ID NO: 295306 - RNA, 18 nt, Artificial Sequence
  Synthetic
cuuuagaaaagauuguuc

SEQ ID NO: 295307 - RNA, 19 nt, Artificial Sequence
  Synthetic
gcuuuagaaaagauuguuc

SEQ ID NO: 295308 - RNA, 20 nt, Artificial Sequence
  Synthetic
ggcuuuagaaaagauuguuc

SEQ ID NO: 295309 - RNA, 21 nt, Artificial Sequence
  Synthetic
uggcuuuagaaaagauuguuc

SEQ ID NO: 295310 - RNA, 22 nt, Artificial Sequence
  Synthetic
guggcuuuagaaaagauuguuc

SEQ ID NO: 295311 - RNA, 23 nt, Artificial Sequence
  Synthetic
uguggcuuuagaaaagauuguuc

SEQ ID NO: 295312 - RNA, 24 nt, Artificial Sequence
  Synthetic
uuguggcuuuagaaaagauuguuc

SEQ ID NO: 295313 - RNA, 18 nt, Artificial Sequence
  Synthetic
aauugauuguacuuguuc

SEQ ID NO: 295314 - RNA, 19 nt, Artificial Sequence
  Synthetic
gaauugauuguacuuguuc

SEQ ID NO: 295315 - RNA, 20 nt, Artificial Sequence
  Synthetic
agaauugauuguacuuguuc

SEQ ID NO: 295316 - RNA, 21 nt, Artificial Sequence
  Synthetic
aagaauugauuguacuuguuc

SEQ ID NO: 295317 - RNA, 22 nt, Artificial Sequence
  Synthetic
uaagaauugauuguacuuguuc

SEQ ID NO: 295318 - RNA, 23 nt, Artificial Sequence
  Synthetic
uuaagaauugauuguacuuguuc

SEQ ID NO: 295319 - RNA, 24 nt, Artificial Sequence
  Synthetic
cuuaagaauugauuguacuuguuc

SEQ ID NO: 295320 - RNA, 18 nt, Artificial Sequence
  Synthetic
uaaacugucaucuuguuc

SEQ ID NO: 295321 - RNA, 19 nt, Artificial Sequence
  Synthetic
auaaacugucaucuuguuc

SEQ ID NO: 295322 - RNA, 20 nt, Artificial Sequence
  Synthetic
aauaaacugucaucuuguuc

SEQ ID NO: 295323 - RNA, 21 nt, Artificial Sequence
  Synthetic
aaauaaacugucaucuuguuc

SEQ ID NO: 295324 - RNA, 22 nt, Artificial Sequence
  Synthetic
gaaauaaacugucaucuuguuc

SEQ ID NO: 295325 - RNA, 23 nt, Artificial Sequence
  Synthetic
ugaaauaaacugucaucuuguuc

SEQ ID NO: 295326 - RNA, 24 nt, Artificial Sequence
  Synthetic
augaaauaaacugucaucuuguuc

SEQ ID NO: 295327 - RNA, 18 nt, Artificial Sequence
  Synthetic
ucuucauguuucuuguuc

SEQ ID NO: 295328 - RNA, 19 nt, Artificial Sequence
  Synthetic
uucuucauguuucuuguuc

SEQ ID NO: 295329 - RNA, 20 nt, Artificial Sequence
  Synthetic
uuucuucauguuucuuguuc

SEQ ID NO: 295330 - RNA, 21 nt, Artificial Sequence
  Synthetic
uuuucuucauguuucuuguuc

SEQ ID NO: 295331 - RNA, 22 nt, Artificial Sequence
  Synthetic
guuuucuucauguuucuuguuc

SEQ ID NO: 295332 - RNA, 23 nt, Artificial Sequence
  Synthetic
aguuuucuucauguuucuuguuc

SEQ ID NO: 295333 - RNA, 24 nt, Artificial Sequence
  Synthetic
uaguuuucuucauguuucuuguuc

SEQ ID NO: 295334 - RNA, 18 nt, Artificial Sequence
  Synthetic
gggguuuuuuaguuguuc

SEQ ID NO: 295335 - RNA, 19 nt, Artificial Sequence
  Synthetic
ugggguuuuuuaguuguuc

SEQ ID NO: 295336 - RNA, 20 nt, Artificial Sequence
  Synthetic
uugggguuuuuuaguuguuc

SEQ ID NO: 295337 - RNA, 21 nt, Artificial Sequence
  Synthetic
auugggguuuuuuaguuguuc

SEQ ID NO: 295338 - RNA, 22 nt, Artificial Sequence
  Synthetic
gauugggguuuuuuaguuguuc

SEQ ID NO: 295339 - RNA, 23 nt, Artificial Sequence
  Synthetic
agauugggguuuuuuaguuguuc

SEQ ID NO: 295340 - RNA, 24 nt, Artificial Sequence
  Synthetic
cagauugggguuuuuuaguuguuc

SEQ ID NO: 295341 - RNA, 18 nt, Artificial Sequence
  Synthetic
acuaaaaauaauuuguuc

SEQ ID NO: 295342 - RNA, 19 nt, Artificial Sequence
  Synthetic
aacuaaaaauaauuuguuc

SEQ ID NO: 295343 - RNA, 20 nt, Artificial Sequence
  Synthetic
caacuaaaaauaauuuguuc

SEQ ID NO: 295344 - RNA, 21 nt, Artificial Sequence
  Synthetic
ucaacuaaaaauaauuuguuc

SEQ ID NO: 295345 - RNA, 22 nt, Artificial Sequence
  Synthetic
cucaacuaaaaauaauuuguuc

SEQ ID NO: 295346 - RNA, 23 nt, Artificial Sequence
  Synthetic
gcucaacuaaaaauaauuuguuc

SEQ ID NO: 295347 - RNA, 24 nt, Artificial Sequence
  Synthetic
agcucaacuaaaaauaauuuguuc

SEQ ID NO: 295348 - RNA, 18 nt, Artificial Sequence
  Synthetic
uaaggucauucuuuguuc

SEQ ID NO: 295349 - RNA, 19 nt, Artificial Sequence
  Synthetic
auaaggucauucuuuguuc

SEQ ID NO: 295350 - RNA, 20 nt, Artificial Sequence
  Synthetic
aauaaggucauucuuuguuc

SEQ ID NO: 295351 - RNA, 21 nt, Artificial Sequence
  Synthetic
uaauaaggucauucuuuguuc

SEQ ID NO: 295352 - RNA, 22 nt, Artificial Sequence
  Synthetic
guaauaaggucauucuuuguuc

SEQ ID NO: 295353 - RNA, 23 nt, Artificial Sequence
  Synthetic
uguaauaaggucauucuuuguuc

SEQ ID NO: 295354 - RNA, 24 nt, Artificial Sequence
  Synthetic
auguaauaaggucauucuuuguuc

SEQ ID NO: 295355 - RNA, 18 nt, Artificial Sequence
  Synthetic
uccuuuugaaguuuguuc

SEQ ID NO: 295356 - RNA, 19 nt, Artificial Sequence
  Synthetic
uuccuuuugaaguuuguuc

SEQ ID NO: 295357 - RNA, 20 nt, Artificial Sequence
  Synthetic
uuuccuuuugaaguuuguuc

SEQ ID NO: 295358 - RNA, 21 nt, Artificial Sequence
  Synthetic
auuuccuuuugaaguuuguuc

SEQ ID NO: 295359 - RNA, 22 nt, Artificial Sequence
  Synthetic
cauuuccuuuugaaguuuguuc

SEQ ID NO: 295360 - RNA, 23 nt, Artificial Sequence
  Synthetic
acauuuccuuuugaaguuuguuc

SEQ ID NO: 295361 - RNA, 24 nt, Artificial Sequence
  Synthetic
aacauuuccuuuugaaguuuguuc

SEQ ID NO: 295362 - RNA, 18 nt, Artificial Sequence
  Synthetic
caacccuccauuuuguuc

SEQ ID NO: 295363 - RNA, 19 nt, Artificial Sequence
  Synthetic
ucaacccuccauuuuguuc

SEQ ID NO: 295364 - RNA, 20 nt, Artificial Sequence
  Synthetic
gucaacccuccauuuuguuc

SEQ ID NO: 295365 - RNA, 21 nt, Artificial Sequence
  Synthetic
ugucaacccuccauuuuguuc

SEQ ID NO: 295366 - RNA, 22 nt, Artificial Sequence
  Synthetic
uugucaacccuccauuuuguuc

SEQ ID NO: 295367 - RNA, 23 nt, Artificial Sequence
  Synthetic
uuugucaacccuccauuuuguuc

SEQ ID NO: 295368 - RNA, 24 nt, Artificial Sequence
  Synthetic
cuuugucaacccuccauuuuguuc

SEQ ID NO: 295369 - RNA, 18 nt, Artificial Sequence
  Synthetic
ucugcugagagaaauuuc

SEQ ID NO: 295370 - RNA, 19 nt, Artificial Sequence
  Synthetic
gucugcugagagaaauuuc

SEQ ID NO: 295371 - RNA, 20 nt, Artificial Sequence
  Synthetic
ugucugcugagagaaauuuc

SEQ ID NO: 295372 - RNA, 21 nt, Artificial Sequence
  Synthetic
cugucugcugagagaaauuuc

SEQ ID NO: 295373 - RNA, 22 nt, Artificial Sequence
  Synthetic
ccugucugcugagagaaauuuc

SEQ ID NO: 295374 - RNA, 23 nt, Artificial Sequence
  Synthetic
gccugucugcugagagaaauuuc

SEQ ID NO: 295375 - RNA, 24 nt, Artificial Sequence
  Synthetic
ugccugucugcugagagaaauuuc

SEQ ID NO: 295376 - RNA, 18 nt, Artificial Sequence
  Synthetic
uggcuguaucuaaauuuc

SEQ ID NO: 295377 - RNA, 19 nt, Artificial Sequence
  Synthetic
uuggcuguaucuaaauuuc

SEQ ID NO: 295378 - RNA, 20 nt, Artificial Sequence
  Synthetic
guuggcuguaucuaaauuuc

SEQ ID NO: 295379 - RNA, 21 nt, Artificial Sequence
  Synthetic
aguuggcuguaucuaaauuuc

SEQ ID NO: 295380 - RNA, 22 nt, Artificial Sequence
  Synthetic
caguuggcuguaucuaaauuuc

SEQ ID NO: 295381 - RNA, 23 nt, Artificial Sequence
  Synthetic
acaguuggcuguaucuaaauuuc

SEQ ID NO: 295382 - RNA, 24 nt, Artificial Sequence
  Synthetic
uacaguuggcuguaucuaaauuuc

SEQ ID NO: 295383 - RNA, 18 nt, Artificial Sequence
  Synthetic
aaauuuaaaguaaauuuc

SEQ ID NO: 295384 - RNA, 19 nt, Artificial Sequence
  Synthetic
aaaauuuaaaguaaauuuc

SEQ ID NO: 295385 - RNA, 20 nt, Artificial Sequence
  Synthetic
gaaaauuuaaaguaaauuuc

SEQ ID NO: 295386 - RNA, 21 nt, Artificial Sequence
  Synthetic
ggaaaauuuaaaguaaauuuc

SEQ ID NO: 295387 - RNA, 22 nt, Artificial Sequence
  Synthetic
aggaaaauuuaaaguaaauuuc

SEQ ID NO: 295388 - RNA, 23 nt, Artificial Sequence
  Synthetic
aaggaaaauuuaaaguaaauuuc

SEQ ID NO: 295389 - RNA, 24 nt, Artificial Sequence
  Synthetic
aaaggaaaauuuaaaguaaauuuc

SEQ ID NO: 295390 - RNA, 18 nt, Artificial Sequence
  Synthetic
auuauuuuauuaaauuuc

SEQ ID NO: 295391 - RNA, 19 nt, Artificial Sequence
  Synthetic
cauuauuuuauuaaauuuc

SEQ ID NO: 295392 - RNA, 20 nt, Artificial Sequence
  Synthetic
ucauuauuuuauuaaauuuc

SEQ ID NO: 295393 - RNA, 21 nt, Artificial Sequence
  Synthetic
aucauuauuuuauuaaauuuc

SEQ ID NO: 295394 - RNA, 22 nt, Artificial Sequence
  Synthetic
caucauuauuuuauuaaauuuc

SEQ ID NO: 295395 - RNA, 23 nt, Artificial Sequence
  Synthetic
ucaucauuauuuuauuaaauuuc

SEQ ID NO: 295396 - RNA, 24 nt, Artificial Sequence
  Synthetic
uucaucauuauuuuauuaaauuuc

SEQ ID NO: 295397 - RNA, 18 nt, Artificial Sequence
  Synthetic
gcuauguauuuaaauuuc

SEQ ID NO: 295398 - RNA, 19 nt, Artificial Sequence
  Synthetic
ugcuauguauuuaaauuuc

SEQ ID NO: 295399 - RNA, 20 nt, Artificial Sequence
  Synthetic
augcuauguauuuaaauuuc

SEQ ID NO: 295400 - RNA, 21 nt, Artificial Sequence
  Synthetic
aaugcuauguauuuaaauuuc

SEQ ID NO: 295401 - RNA, 22 nt, Artificial Sequence
  Synthetic
caaugcuauguauuuaaauuuc

SEQ ID NO: 295402 - RNA, 23 nt, Artificial Sequence
  Synthetic
gcaaugcuauguauuuaaauuuc

SEQ ID NO: 295403 - RNA, 24 nt, Artificial Sequence
  Synthetic
ugcaaugcuauguauuuaaauuuc

SEQ ID NO: 295404 - RNA, 18 nt, Artificial Sequence
  Synthetic
caauuauagaacaauuuc

SEQ ID NO: 295405 - RNA, 19 nt, Artificial Sequence
  Synthetic
gcaauuauagaacaauuuc

SEQ ID NO: 295406 - RNA, 20 nt, Artificial Sequence
  Synthetic
agcaauuauagaacaauuuc

SEQ ID NO: 295407 - RNA, 21 nt, Artificial Sequence
  Synthetic
cagcaauuauagaacaauuuc

SEQ ID NO: 295408 - RNA, 22 nt, Artificial Sequence
  Synthetic
gcagcaauuauagaacaauuuc

SEQ ID NO: 295409 - RNA, 23 nt, Artificial Sequence
  Synthetic
ugcagcaauuauagaacaauuuc

SEQ ID NO: 295410 - RNA, 24 nt, Artificial Sequence
  Synthetic
augcagcaauuauagaacaauuuc

SEQ ID NO: 295411 - RNA, 18 nt, Artificial Sequence
  Synthetic
ccuacacaagccaauuuc

SEQ ID NO: 295412 - RNA, 19 nt, Artificial Sequence
  Synthetic
uccuacacaagccaauuuc

SEQ ID NO: 295413 - RNA, 20 nt, Artificial Sequence
  Synthetic
auccuacacaagccaauuuc

SEQ ID NO: 295414 - RNA, 21 nt, Artificial Sequence
  Synthetic
aauccuacacaagccaauuuc

SEQ ID NO: 295415 - RNA, 22 nt, Artificial Sequence
  Synthetic
caauccuacacaagccaauuuc

SEQ ID NO: 295416 - RNA, 23 nt, Artificial Sequence
  Synthetic
acaauccuacacaagccaauuuc

SEQ ID NO: 295417 - RNA, 24 nt, Artificial Sequence
  Synthetic
cacaauccuacacaagccaauuuc

SEQ ID NO: 295418 - RNA, 18 nt, Artificial Sequence
  Synthetic
acagcugaaggcaauuuc

SEQ ID NO: 295419 - RNA, 19 nt, Artificial Sequence
  Synthetic
uacagcugaaggcaauuuc

SEQ ID NO: 295420 - RNA, 20 nt, Artificial Sequence
  Synthetic
cuacagcugaaggcaauuuc

SEQ ID NO: 295421 - RNA, 21 nt, Artificial Sequence
  Synthetic
ccuacagcugaaggcaauuuc

SEQ ID NO: 295422 - RNA, 22 nt, Artificial Sequence
  Synthetic
accuacagcugaaggcaauuuc

SEQ ID NO: 295423 - RNA, 23 nt, Artificial Sequence
  Synthetic
uaccuacagcugaaggcaauuuc

SEQ ID NO: 295424 - RNA, 24 nt, Artificial Sequence
  Synthetic
uuaccuacagcugaaggcaauuuc

SEQ ID NO: 295425 - RNA, 18 nt, Artificial Sequence
  Synthetic
ggauaaauuggcaauuuc

SEQ ID NO: 295426 - RNA, 19 nt, Artificial Sequence
  Synthetic
gggauaaauuggcaauuuc

SEQ ID NO: 295427 - RNA, 20 nt, Artificial Sequence
  Synthetic
agggauaaauuggcaauuuc

SEQ ID NO: 295428 - RNA, 21 nt, Artificial Sequence
  Synthetic
gagggauaaauuggcaauuuc

SEQ ID NO: 295429 - RNA, 22 nt, Artificial Sequence
  Synthetic
ugagggauaaauuggcaauuuc

SEQ ID NO: 295430 - RNA, 23 nt, Artificial Sequence
  Synthetic
cugagggauaaauuggcaauuuc

SEQ ID NO: 295431 - RNA, 24 nt, Artificial Sequence
  Synthetic
gcugagggauaaauuggcaauuuc

SEQ ID NO: 295432 - RNA, 18 nt, Artificial Sequence
  Synthetic
cuaaaaagugucaauuuc

SEQ ID NO: 295433 - RNA, 19 nt, Artificial Sequence
  Synthetic
ccuaaaaagugucaauuuc

SEQ ID NO: 295434 - RNA, 20 nt, Artificial Sequence
  Synthetic
gccuaaaaagugucaauuuc

SEQ ID NO: 295435 - RNA, 21 nt, Artificial Sequence
  Synthetic
agccuaaaaagugucaauuuc

SEQ ID NO: 295436 - RNA, 22 nt, Artificial Sequence
  Synthetic
aagccuaaaaagugucaauuuc

SEQ ID NO: 295437 - RNA, 23 nt, Artificial Sequence
  Synthetic
gaagccuaaaaagugucaauuuc

SEQ ID NO: 295438 - RNA, 24 nt, Artificial Sequence
  Synthetic
ugaagccuaaaaagugucaauuuc

SEQ ID NO: 295439 - RNA, 18 nt, Artificial Sequence
  Synthetic
cugaguugggagaauuuc

SEQ ID NO: 295440 - RNA, 19 nt, Artificial Sequence
  Synthetic
gcugaguugggagaauuuc

SEQ ID NO: 295441 - RNA, 20 nt, Artificial Sequence
  Synthetic
ggcugaguugggagaauuuc

SEQ ID NO: 295442 - RNA, 21 nt, Artificial Sequence
  Synthetic
aggcugaguugggagaauuuc

SEQ ID NO: 295443 - RNA, 22 nt, Artificial Sequence
  Synthetic
gaggcugaguugggagaauuuc

SEQ ID NO: 295444 - RNA, 23 nt, Artificial Sequence
  Synthetic
ggaggcugaguugggagaauuuc

SEQ ID NO: 295445 - RNA, 24 nt, Artificial Sequence
  Synthetic
gggaggcugaguugggagaauuuc

SEQ ID NO: 295446 - RNA, 18 nt, Artificial Sequence
  Synthetic
uaauccuucaugaauuuc

SEQ ID NO: 295447 - RNA, 19 nt, Artificial Sequence
  Synthetic
uuaauccuucaugaauuuc

SEQ ID NO: 295448 - RNA, 20 nt, Artificial Sequence
  Synthetic
uuuaauccuucaugaauuuc

SEQ ID NO: 295449 - RNA, 21 nt, Artificial Sequence
  Synthetic
uuuuaauccuucaugaauuuc

SEQ ID NO: 295450 - RNA, 22 nt, Artificial Sequence
  Synthetic
guuuuaauccuucaugaauuuc

SEQ ID NO: 295451 - RNA, 23 nt, Artificial Sequence
  Synthetic
uguuuuaauccuucaugaauuuc

SEQ ID NO: 295452 - RNA, 24 nt, Artificial Sequence
  Synthetic
uuguuuuaauccuucaugaauuuc

SEQ ID NO: 295453 - RNA, 18 nt, Artificial Sequence
  Synthetic
aaacucuucaugaauuuc

SEQ ID NO: 295454 - RNA, 19 nt, Artificial Sequence
  Synthetic
aaaacucuucaugaauuuc

SEQ ID NO: 295455 - RNA, 20 nt, Artificial Sequence
  Synthetic
caaaacucuucaugaauuuc

SEQ ID NO: 295456 - RNA, 21 nt, Artificial Sequence
  Synthetic
ccaaaacucuucaugaauuuc

SEQ ID NO: 295457 - RNA, 22 nt, Artificial Sequence
  Synthetic
uccaaaacucuucaugaauuuc

SEQ ID NO: 295458 - RNA, 23 nt, Artificial Sequence
  Synthetic
auccaaaacucuucaugaauuuc

SEQ ID NO: 295459 - RNA, 24 nt, Artificial Sequence
  Synthetic
aauccaaaacucuucaugaauuuc

SEQ ID NO: 295460 - RNA, 18 nt, Artificial Sequence
  Synthetic
uguucucgauugaauuuc

SEQ ID NO: 295461 - RNA, 19 nt, Artificial Sequence
  Synthetic
uuguucucgauugaauuuc

SEQ ID NO: 295462 - RNA, 20 nt, Artificial Sequence
  Synthetic
cuuguucucgauugaauuuc

SEQ ID NO: 295463 - RNA, 21 nt, Artificial Sequence
  Synthetic
acuuguucucgauugaauuuc

SEQ ID NO: 295464 - RNA, 22 nt, Artificial Sequence
  Synthetic
aacuuguucucgauugaauuuc

SEQ ID NO: 295465 - RNA, 23 nt, Artificial Sequence
  Synthetic
gaacuuguucucgauugaauuuc

SEQ ID NO: 295466 - RNA, 24 nt, Artificial Sequence
  Synthetic
agaacuuguucucgauugaauuuc

SEQ ID NO: 295467 - RNA, 18 nt, Artificial Sequence
  Synthetic
caugggggaaauaauuuc

SEQ ID NO: 295468 - RNA, 19 nt, Artificial Sequence
  Synthetic
acaugggggaaauaauuuc

SEQ ID NO: 295469 - RNA, 20 nt, Artificial Sequence
  Synthetic
aacaugggggaaauaauuuc

SEQ ID NO: 295470 - RNA, 21 nt, Artificial Sequence
  Synthetic
aaacaugggggaaauaauuuc

SEQ ID NO: 295471 - RNA, 22 nt, Artificial Sequence
  Synthetic
aaaacaugggggaaauaauuuc

SEQ ID NO: 295472 - RNA, 23 nt, Artificial Sequence
  Synthetic
aaaaacaugggggaaauaauuuc

SEQ ID NO: 295473 - RNA, 24 nt, Artificial Sequence
  Synthetic
aaaaaacaugggggaaauaauuuc

SEQ ID NO: 295474 - RNA, 18 nt, Artificial Sequence
  Synthetic
ggauuuuguuauaauuuc

SEQ ID NO: 295475 - RNA, 19 nt, Artificial Sequence
  Synthetic
aggauuuuguuauaauuuc

SEQ ID NO: 295476 - RNA, 20 nt, Artificial Sequence
  Synthetic
gaggauuuuguuauaauuuc

SEQ ID NO: 295477 - RNA, 21 nt, Artificial Sequence
  Synthetic
ggaggauuuuguuauaauuuc

SEQ ID NO: 295478 - RNA, 22 nt, Artificial Sequence
  Synthetic
gggaggauuuuguuauaauuuc

SEQ ID NO: 295479 - RNA, 23 nt, Artificial Sequence
  Synthetic
ggggaggauuuuguuauaauuuc

SEQ ID NO: 295480 - RNA, 24 nt, Artificial Sequence
  Synthetic
uggggaggauuuuguuauaauuuc

SEQ ID NO: 295481 - RNA, 18 nt, Artificial Sequence
  Synthetic
agcauuuaagguaauuuc

SEQ ID NO: 295482 - RNA, 19 nt, Artificial Sequence
  Synthetic
uagcauuuaagguaauuuc

SEQ ID NO: 295483 - RNA, 20 nt, Artificial Sequence
  Synthetic
cuagcauuuaagguaauuuc

SEQ ID NO: 295484 - RNA, 21 nt, Artificial Sequence
  Synthetic
acuagcauuuaagguaauuuc

SEQ ID NO: 295485 - RNA, 22 nt, Artificial Sequence
  Synthetic
aacuagcauuuaagguaauuuc

SEQ ID NO: 295486 - RNA, 23 nt, Artificial Sequence
  Synthetic
aaacuagcauuuaagguaauuuc

SEQ ID NO: 295487 - RNA, 24 nt, Artificial Sequence
  Synthetic
aaaacuagcauuuaagguaauuuc

SEQ ID NO: 295488 - RNA, 18 nt, Artificial Sequence
  Synthetic
cuuaagcauuuuaauuuc

SEQ ID NO: 295489 - RNA, 19 nt, Artificial Sequence
  Synthetic
acuuaagcauuuuaauuuc

SEQ ID NO: 295490 - RNA, 20 nt, Artificial Sequence
  Synthetic
cacuuaagcauuuuaauuuc

SEQ ID NO: 295491 - RNA, 21 nt, Artificial Sequence
  Synthetic
ucacuuaagcauuuuaauuuc

SEQ ID NO: 295492 - RNA, 22 nt, Artificial Sequence
  Synthetic
uucacuuaagcauuuuaauuuc

SEQ ID NO: 295493 - RNA, 23 nt, Artificial Sequence
  Synthetic
uuucacuuaagcauuuuaauuuc

SEQ ID NO: 295494 - RNA, 24 nt, Artificial Sequence
  Synthetic
uuuucacuuaagcauuuuaauuuc

SEQ ID NO: 295495 - RNA, 18 nt, Artificial Sequence
  Synthetic
gugacuugaaaacauuuc

SEQ ID NO: 295496 - RNA, 19 nt, Artificial Sequence
  Synthetic
ugugacuugaaaacauuuc

SEQ ID NO: 295497 - RNA, 20 nt, Artificial Sequence
  Synthetic
augugacuugaaaacauuuc

SEQ ID NO: 295498 - RNA, 21 nt, Artificial Sequence
  Synthetic
aaugugacuugaaaacauuuc

SEQ ID NO: 295499 - RNA, 22 nt, Artificial Sequence
  Synthetic
aaaugugacuugaaaacauuuc

SEQ ID NO: 295500 - RNA, 23 nt, Artificial Sequence
  Synthetic
gaaaugugacuugaaaacauuuc

SEQ ID NO: 295501 - RNA, 24 nt, Artificial Sequence
  Synthetic
agaaaugugacuugaaaacauuuc

SEQ ID NO: 295502 - RNA, 18 nt, Artificial Sequence
  Synthetic
ugaugaauaaaacauuuc

SEQ ID NO: 295503 - RNA, 19 nt, Artificial Sequence
  Synthetic
cugaugaauaaaacauuuc

SEQ ID NO: 295504 - RNA, 20 nt, Artificial Sequence
  Synthetic
ucugaugaauaaaacauuuc

SEQ ID NO: 295505 - RNA, 21 nt, Artificial Sequence
  Synthetic
uucugaugaauaaaacauuuc

SEQ ID NO: 295506 - RNA, 22 nt, Artificial Sequence
  Synthetic
cuucugaugaauaaaacauuuc

SEQ ID NO: 295507 - RNA, 23 nt, Artificial Sequence
  Synthetic
ucuucugaugaauaaaacauuuc

SEQ ID NO: 295508 - RNA, 24 nt, Artificial Sequence
  Synthetic
gucuucugaugaauaaaacauuuc

SEQ ID NO: 295509 - RNA, 18 nt, Artificial Sequence
  Synthetic
acuauugagaaacauuuc

SEQ ID NO: 295510 - RNA, 19 nt, Artificial Sequence
  Synthetic
uacuauugagaaacauuuc

SEQ ID NO: 295511 - RNA, 20 nt, Artificial Sequence
  Synthetic
auacuauugagaaacauuuc

SEQ ID NO: 295512 - RNA, 21 nt, Artificial Sequence
  Synthetic
aauacuauugagaaacauuuc

SEQ ID NO: 295513 - RNA, 22 nt, Artificial Sequence
  Synthetic
aaauacuauugagaaacauuuc

SEQ ID NO: 295514 - RNA, 23 nt, Artificial Sequence
  Synthetic
aaaauacuauugagaaacauuuc

SEQ ID NO: 295515 - RNA, 24 nt, Artificial Sequence
  Synthetic
caaaauacuauugagaaacauuuc

SEQ ID NO: 295516 - RNA, 18 nt, Artificial Sequence
  Synthetic
guaguaaucagacauuuc

SEQ ID NO: 295517 - RNA, 19 nt, Artificial Sequence
  Synthetic
gguaguaaucagacauuuc

SEQ ID NO: 295518 - RNA, 20 nt, Artificial Sequence
  Synthetic
ugguaguaaucagacauuuc

SEQ ID NO: 295519 - RNA, 21 nt, Artificial Sequence
  Synthetic
uugguaguaaucagacauuuc

SEQ ID NO: 295520 - RNA, 22 nt, Artificial Sequence
  Synthetic
cuugguaguaaucagacauuuc

SEQ ID NO: 295521 - RNA, 23 nt, Artificial Sequence
  Synthetic
acuugguaguaaucagacauuuc

SEQ ID NO: 295522 - RNA, 24 nt, Artificial Sequence
  Synthetic
cacuugguaguaaucagacauuuc

SEQ ID NO: 295523 - RNA, 18 nt, Artificial Sequence
  Synthetic
cugagccugauacauuuc

SEQ ID NO: 295524 - RNA, 19 nt, Artificial Sequence
  Synthetic
ucugagccugauacauuuc

SEQ ID NO: 295525 - RNA, 20 nt, Artificial Sequence
  Synthetic
cucugagccugauacauuuc

SEQ ID NO: 295526 - RNA, 21 nt, Artificial Sequence
  Synthetic
ucucugagccugauacauuuc

SEQ ID NO: 295527 - RNA, 22 nt, Artificial Sequence
  Synthetic
gucucugagccugauacauuuc

SEQ ID NO: 295528 - RNA, 23 nt, Artificial Sequence
  Synthetic
agucucugagccugauacauuuc

SEQ ID NO: 295529 - RNA, 24 nt, Artificial Sequence
  Synthetic
aagucucugagccugauacauuuc

SEQ ID NO: 295530 - RNA, 18 nt, Artificial Sequence
  Synthetic
gucuauucacuacauuuc

SEQ ID NO: 295531 - RNA, 19 nt, Artificial Sequence
  Synthetic
ugucuauucacuacauuuc

SEQ ID NO: 295532 - RNA, 20 nt, Artificial Sequence
  Synthetic
gugucuauucacuacauuuc

SEQ ID NO: 295533 - RNA, 21 nt, Artificial Sequence
  Synthetic
ugugucuauucacuacauuuc

SEQ ID NO: 295534 - RNA, 22 nt, Artificial Sequence
  Synthetic
uugugucuauucacuacauuuc

SEQ ID NO: 295535 - RNA, 23 nt, Artificial Sequence
  Synthetic
guugugucuauucacuacauuuc

SEQ ID NO: 295536 - RNA, 24 nt, Artificial Sequence
  Synthetic
gguugugucuauucacuacauuuc

SEQ ID NO: 295537 - RNA, 18 nt, Artificial Sequence
  Synthetic
cacugggagucccauuuc

SEQ ID NO: 295538 - RNA, 19 nt, Artificial Sequence
  Synthetic
ucacugggagucccauuuc

SEQ ID NO: 295539 - RNA, 20 nt, Artificial Sequence
  Synthetic
gucacugggagucccauuuc

SEQ ID NO: 295540 - RNA, 21 nt, Artificial Sequence
  Synthetic
ugucacugggagucccauuuc

SEQ ID NO: 295541 - RNA, 22 nt, Artificial Sequence
  Synthetic
gugucacugggagucccauuuc

SEQ ID NO: 295542 - RNA, 23 nt, Artificial Sequence
  Synthetic
ugugucacugggagucccauuuc

SEQ ID NO: 295543 - RNA, 24 nt, Artificial Sequence
  Synthetic
cugugucacugggagucccauuuc

SEQ ID NO: 295544 - RNA, 18 nt, Artificial Sequence
  Synthetic
aauucuuauugccauuuc

SEQ ID NO: 295545 - RNA, 19 nt, Artificial Sequence
  Synthetic
uaauucuuauugccauuuc

SEQ ID NO: 295546 - RNA, 20 nt, Artificial Sequence
  Synthetic
cuaauucuuauugccauuuc

SEQ ID NO: 295547 - RNA, 21 nt, Artificial Sequence
  Synthetic
acuaauucuuauugccauuuc

SEQ ID NO: 295548 - RNA, 22 nt, Artificial Sequence
  Synthetic
cacuaauucuuauugccauuuc

SEQ ID NO: 295549 - RNA, 23 nt, Artificial Sequence
  Synthetic
ccacuaauucuuauugccauuuc

SEQ ID NO: 295550 - RNA, 24 nt, Artificial Sequence
  Synthetic
gccacuaauucuuauugccauuuc

SEQ ID NO: 295551 - RNA, 18 nt, Artificial Sequence
  Synthetic
uucacuucauuccauuuc

SEQ ID NO: 295552 - RNA, 19 nt, Artificial Sequence
  Synthetic
cuucacuucauuccauuuc

SEQ ID NO: 295553 - RNA, 20 nt, Artificial Sequence
  Synthetic
ucuucacuucauuccauuuc

SEQ ID NO: 295554 - RNA, 21 nt, Artificial Sequence
  Synthetic
uucuucacuucauuccauuuc

SEQ ID NO: 295555 - RNA, 22 nt, Artificial Sequence
  Synthetic
uuucuucacuucauuccauuuc

SEQ ID NO: 295556 - RNA, 23 nt, Artificial Sequence
  Synthetic
auuucuucacuucauuccauuuc

SEQ ID NO: 295557 - RNA, 24 nt, Artificial Sequence
  Synthetic
cauuucuucacuucauuccauuuc

SEQ ID NO: 295558 - RNA, 18 nt, Artificial Sequence
  Synthetic
ggcccagggcagcauuuc

SEQ ID NO: 295559 - RNA, 19 nt, Artificial Sequence
  Synthetic
uggcccagggcagcauuuc

SEQ ID NO: 295560 - RNA, 20 nt, Artificial Sequence
  Synthetic
uuggcccagggcagcauuuc

SEQ ID NO: 295561 - RNA, 21 nt, Artificial Sequence
  Synthetic
uuuggcccagggcagcauuuc

SEQ ID NO: 295562 - RNA, 22 nt, Artificial Sequence
  Synthetic
uuuuggcccagggcagcauuuc

SEQ ID NO: 295563 - RNA, 23 nt, Artificial Sequence
  Synthetic
uuuuuggcccagggcagcauuuc

SEQ ID NO: 295564 - RNA, 24 nt, Artificial Sequence
  Synthetic
cuuuuuggcccagggcagcauuuc

SEQ ID NO: 295565 - RNA, 18 nt, Artificial Sequence
  Synthetic
cuuuaucuuacgcauuuc

SEQ ID NO: 295566 - RNA, 19 nt, Artificial Sequence
  Synthetic
ccuuuaucuuacgcauuuc

SEQ ID NO: 295567 - RNA, 20 nt, Artificial Sequence
  Synthetic
accuuuaucuuacgcauuuc

SEQ ID NO: 295568 - RNA, 21 nt, Artificial Sequence
  Synthetic
uaccuuuaucuuacgcauuuc

SEQ ID NO: 295569 - RNA, 22 nt, Artificial Sequence
  Synthetic
cuaccuuuaucuuacgcauuuc

SEQ ID NO: 295570 - RNA, 23 nt, Artificial Sequence
  Synthetic
acuaccuuuaucuuacgcauuuc

SEQ ID NO: 295571 - RNA, 24 nt, Artificial Sequence
  Synthetic
aacuaccuuuaucuuacgcauuuc

SEQ ID NO: 295572 - RNA, 18 nt, Artificial Sequence
  Synthetic
gaaaacuucuggcauuuc

SEQ ID NO: 295573 - RNA, 19 nt, Artificial Sequence
  Synthetic
ugaaaacuucuggcauuuc

SEQ ID NO: 295574 - RNA, 20 nt, Artificial Sequence
  Synthetic
augaaaacuucuggcauuuc

SEQ ID NO: 295575 - RNA, 21 nt, Artificial Sequence
  Synthetic
caugaaaacuucuggcauuuc

SEQ ID NO: 295576 - RNA, 22 nt, Artificial Sequence
  Synthetic
ccaugaaaacuucuggcauuuc

SEQ ID NO: 295577 - RNA, 23 nt, Artificial Sequence
  Synthetic
gccaugaaaacuucuggcauuuc

SEQ ID NO: 295578 - RNA, 24 nt, Artificial Sequence
  Synthetic
ugccaugaaaacuucuggcauuuc

SEQ ID NO: 295579 - RNA, 18 nt, Artificial Sequence
  Synthetic
gagguauuguggcauuuc

SEQ ID NO: 295580 - RNA, 19 nt, Artificial Sequence
  Synthetic
ggagguauuguggcauuuc

SEQ ID NO: 295581 - RNA, 20 nt, Artificial Sequence
  Synthetic
aggagguauuguggcauuuc

SEQ ID NO: 295582 - RNA, 21 nt, Artificial Sequence
  Synthetic
aaggagguauuguggcauuuc

SEQ ID NO: 295583 - RNA, 22 nt, Artificial Sequence
  Synthetic
uaaggagguauuguggcauuuc

SEQ ID NO: 295584 - RNA, 23 nt, Artificial Sequence
  Synthetic
auaaggagguauuguggcauuuc

SEQ ID NO: 295585 - RNA, 24 nt, Artificial Sequence
  Synthetic
aauaaggagguauuguggcauuuc

SEQ ID NO: 295586 - RNA, 18 nt, Artificial Sequence
  Synthetic
gaugauauaaaucauuuc

SEQ ID NO: 295587 - RNA, 19 nt, Artificial Sequence
  Synthetic
ugaugauauaaaucauuuc

SEQ ID NO: 295588 - RNA, 20 nt, Artificial Sequence
  Synthetic
augaugauauaaaucauuuc

SEQ ID NO: 295589 - RNA, 21 nt, Artificial Sequence
  Synthetic
aaugaugauauaaaucauuuc

SEQ ID NO: 295590 - RNA, 22 nt, Artificial Sequence
  Synthetic
aaaugaugauauaaaucauuuc

SEQ ID NO: 295591 - RNA, 23 nt, Artificial Sequence
  Synthetic
aaaaugaugauauaaaucauuuc

SEQ ID NO: 295592 - RNA, 24 nt, Artificial Sequence
  Synthetic
aaaaaugaugauauaaaucauuuc

SEQ ID NO: 295593 - RNA, 18 nt, Artificial Sequence
  Synthetic
cucaaaaaccaucauuuc

SEQ ID NO: 295594 - RNA, 19 nt, Artificial Sequence
  Synthetic
ucucaaaaaccaucauuuc

SEQ ID NO: 295595 - RNA, 20 nt, Artificial Sequence
  Synthetic
cucucaaaaaccaucauuuc

SEQ ID NO: 295596 - RNA, 21 nt, Artificial Sequence
  Synthetic
ucucucaaaaaccaucauuuc

SEQ ID NO: 295597 - RNA, 22 nt, Artificial Sequence
  Synthetic
cucucucaaaaaccaucauuuc

SEQ ID NO: 295598 - RNA, 23 nt, Artificial Sequence
  Synthetic
acucucucaaaaaccaucauuuc

SEQ ID NO: 295599 - RNA, 24 nt, Artificial Sequence
  Synthetic
uacucucucaaaaaccaucauuuc

SEQ ID NO: 295600 - RNA, 18 nt, Artificial Sequence
  Synthetic
acucuaguucaucauuuc

SEQ ID NO: 295601 - RNA, 19 nt, Artificial Sequence
  Synthetic
aacucuaguucaucauuuc

SEQ ID NO: 295602 - RNA, 20 nt, Artificial Sequence
  Synthetic
aaacucuaguucaucauuuc

SEQ ID NO: 295603 - RNA, 21 nt, Artificial Sequence
  Synthetic
gaaacucuaguucaucauuuc

SEQ ID NO: 295604 - RNA, 22 nt, Artificial Sequence
  Synthetic
agaaacucuaguucaucauuuc

SEQ ID NO: 295605 - RNA, 23 nt, Artificial Sequence
  Synthetic
gagaaacucuaguucaucauuuc

SEQ ID NO: 295606 - RNA, 24 nt, Artificial Sequence
  Synthetic
agagaaacucuaguucaucauuuc

SEQ ID NO: 295607 - RNA, 18 nt, Artificial Sequence
  Synthetic
caauucuauccucauuuc

SEQ ID NO: 295608 - RNA, 19 nt, Artificial Sequence
  Synthetic
ccaauucuauccucauuuc

SEQ ID NO: 295609 - RNA, 20 nt, Artificial Sequence
  Synthetic
cccaauucuauccucauuuc

SEQ ID NO: 295610 - RNA, 21 nt, Artificial Sequence
  Synthetic
ucccaauucuauccucauuuc

SEQ ID NO: 295611 - RNA, 22 nt, Artificial Sequence
  Synthetic
cucccaauucuauccucauuuc

SEQ ID NO: 295612 - RNA, 23 nt, Artificial Sequence
  Synthetic
ccucccaauucuauccucauuuc

SEQ ID NO: 295613 - RNA, 24 nt, Artificial Sequence
  Synthetic
accucccaauucuauccucauuuc

SEQ ID NO: 295614 - RNA, 18 nt, Artificial Sequence
  Synthetic
cauaauaauucucauuuc

SEQ ID NO: 295615 - RNA, 19 nt, Artificial Sequence
  Synthetic
gcauaauaauucucauuuc

SEQ ID NO: 295616 - RNA, 20 nt, Artificial Sequence
  Synthetic
agcauaauaauucucauuuc

SEQ ID NO: 295617 - RNA, 21 nt, Artificial Sequence
  Synthetic
uagcauaauaauucucauuuc

SEQ ID NO: 295618 - RNA, 22 nt, Artificial Sequence
  Synthetic
auagcauaauaauucucauuuc

SEQ ID NO: 295619 - RNA, 23 nt, Artificial Sequence
  Synthetic
cauagcauaauaauucucauuuc

SEQ ID NO: 295620 - RNA, 24 nt, Artificial Sequence
  Synthetic
acauagcauaauaauucucauuuc

SEQ ID NO: 295621 - RNA, 18 nt, Artificial Sequence
  Synthetic
gauuauuuuauucauuuc

SEQ ID NO: 295622 - RNA, 19 nt, Artificial Sequence
  Synthetic
agauuauuuuauucauuuc

SEQ ID NO: 295623 - RNA, 20 nt, Artificial Sequence
  Synthetic
gagauuauuuuauucauuuc

SEQ ID NO: 295624 - RNA, 21 nt, Artificial Sequence
  Synthetic
ugagauuauuuuauucauuuc

SEQ ID NO: 295625 - RNA, 22 nt, Artificial Sequence
  Synthetic
gugagauuauuuuauucauuuc

SEQ ID NO: 295626 - RNA, 23 nt, Artificial Sequence
  Synthetic
agugagauuauuuuauucauuuc

SEQ ID NO: 295627 - RNA, 24 nt, Artificial Sequence
  Synthetic
gagugagauuauuuuauucauuuc

SEQ ID NO: 295628 - RNA, 18 nt, Artificial Sequence
  Synthetic
uggcccaagcuucauuuc

SEQ ID NO: 295629 - RNA, 19 nt, Artificial Sequence
  Synthetic
uuggcccaagcuucauuuc

SEQ ID NO: 295630 - RNA, 20 nt, Artificial Sequence
  Synthetic
cuuggcccaagcuucauuuc

SEQ ID NO: 295631 - RNA, 21 nt, Artificial Sequence
  Synthetic
gcuuggcccaagcuucauuuc

SEQ ID NO: 295632 - RNA, 22 nt, Artificial Sequence
  Synthetic
cgcuuggcccaagcuucauuuc

SEQ ID NO: 295633 - RNA, 23 nt, Artificial Sequence
  Synthetic
gcgcuuggcccaagcuucauuuc

SEQ ID NO: 295634 - RNA, 24 nt, Artificial Sequence
  Synthetic
ugcgcuuggcccaagcuucauuuc

SEQ ID NO: 295635 - RNA, 18 nt, Artificial Sequence
  Synthetic
ugguuuucacaagauuuc

SEQ ID NO: 295636 - RNA, 19 nt, Artificial Sequence
  Synthetic
uugguuuucacaagauuuc

SEQ ID NO: 295637 - RNA, 20 nt, Artificial Sequence
  Synthetic
uuugguuuucacaagauuuc

SEQ ID NO: 295638 - RNA, 21 nt, Artificial Sequence
  Synthetic
cuuugguuuucacaagauuuc

SEQ ID NO: 295639 - RNA, 22 nt, Artificial Sequence
  Synthetic
acuuugguuuucacaagauuuc

SEQ ID NO: 295640 - RNA, 23 nt, Artificial Sequence
  Synthetic
aacuuugguuuucacaagauuuc

SEQ ID NO: 295641 - RNA, 24 nt, Artificial Sequence
  Synthetic
aaacuuugguuuucacaagauuuc

SEQ ID NO: 295642 - RNA, 18 nt, Artificial Sequence
  Synthetic
ucagaaagcugagauuuc

SEQ ID NO: 295643 - RNA, 19 nt, Artificial Sequence
  Synthetic
uucagaaagcugagauuuc

SEQ ID NO: 295644 - RNA, 20 nt, Artificial Sequence
  Synthetic
uuucagaaagcugagauuuc

SEQ ID NO: 295645 - RNA, 21 nt, Artificial Sequence
  Synthetic
guuucagaaagcugagauuuc

SEQ ID NO: 295646 - RNA, 22 nt, Artificial Sequence
  Synthetic
aguuucagaaagcugagauuuc

SEQ ID NO: 295647 - RNA, 23 nt, Artificial Sequence
  Synthetic
uaguuucagaaagcugagauuuc

SEQ ID NO: 295648 - RNA, 24 nt, Artificial Sequence
  Synthetic
uuaguuucagaaagcugagauuuc

SEQ ID NO: 295649 - RNA, 18 nt, Artificial Sequence
  Synthetic
aagacaugcauagauuuc

SEQ ID NO: 295650 - RNA, 19 nt, Artificial Sequence
  Synthetic
aaagacaugcauagauuuc

SEQ ID NO: 295651 - RNA, 20 nt, Artificial Sequence
  Synthetic
uaaagacaugcauagauuuc

SEQ ID NO: 295652 - RNA, 21 nt, Artificial Sequence
  Synthetic
uuaaagacaugcauagauuuc

SEQ ID NO: 295653 - RNA, 22 nt, Artificial Sequence
  Synthetic
cuuaaagacaugcauagauuuc

SEQ ID NO: 295654 - RNA, 23 nt, Artificial Sequence
  Synthetic
acuuaaagacaugcauagauuuc

SEQ ID NO: 295655 - RNA, 24 nt, Artificial Sequence
  Synthetic
aacuuaaagacaugcauagauuuc

SEQ ID NO: 295656 - RNA, 18 nt, Artificial Sequence
  Synthetic
aucccauaucuagauuuc

SEQ ID NO: 295657 - RNA, 19 nt, Artificial Sequence
  Synthetic
aaucccauaucuagauuuc

SEQ ID NO: 295658 - RNA, 20 nt, Artificial Sequence
  Synthetic
caaucccauaucuagauuuc

SEQ ID NO: 295659 - RNA, 21 nt, Artificial Sequence
  Synthetic
ccaaucccauaucuagauuuc

SEQ ID NO: 295660 - RNA, 22 nt, Artificial Sequence
  Synthetic
cccaaucccauaucuagauuuc

SEQ ID NO: 295661 - RNA, 23 nt, Artificial Sequence
  Synthetic
acccaaucccauaucuagauuuc

SEQ ID NO: 295662 - RNA, 24 nt, Artificial Sequence
  Synthetic
cacccaaucccauaucuagauuuc

SEQ ID NO: 295663 - RNA, 18 nt, Artificial Sequence
  Synthetic
ucauccuuuguagauuuc

SEQ ID NO: 295664 - RNA, 19 nt, Artificial Sequence
  Synthetic
uucauccuuuguagauuuc

SEQ ID NO: 295665 - RNA, 20 nt, Artificial Sequence
  Synthetic
cuucauccuuuguagauuuc

SEQ ID NO: 295666 - RNA, 21 nt, Artificial Sequence
  Synthetic
ucuucauccuuuguagauuuc

SEQ ID NO: 295667 - RNA, 22 nt, Artificial Sequence
  Synthetic
cucuucauccuuuguagauuuc

SEQ ID NO: 295668 - RNA, 23 nt, Artificial Sequence
  Synthetic
ccucuucauccuuuguagauuuc

SEQ ID NO: 295669 - RNA, 24 nt, Artificial Sequence
  Synthetic
gccucuucauccuuuguagauuuc

SEQ ID NO: 295670 - RNA, 18 nt, Artificial Sequence
  Synthetic
cucuaaggauuagauuuc

SEQ ID NO: 295671 - RNA, 19 nt, Artificial Sequence
  Synthetic
ccucuaaggauuagauuuc

SEQ ID NO: 295672 - RNA, 20 nt, Artificial Sequence
  Synthetic
gccucuaaggauuagauuuc

SEQ ID NO: 295673 - RNA, 21 nt, Artificial Sequence
  Synthetic
agccucuaaggauuagauuuc

SEQ ID NO: 295674 - RNA, 22 nt, Artificial Sequence
  Synthetic
aagccucuaaggauuagauuuc

SEQ ID NO: 295675 - RNA, 23 nt, Artificial Sequence
  Synthetic
gaagccucuaaggauuagauuuc

SEQ ID NO: 295676 - RNA, 24 nt, Artificial Sequence
  Synthetic
agaagccucuaaggauuagauuuc

SEQ ID NO: 295677 - RNA, 18 nt, Artificial Sequence
  Synthetic
uaucuuaacuucgauuuc

SEQ ID NO: 295678 - RNA, 19 nt, Artificial Sequence
  Synthetic
auaucuuaacuucgauuuc

SEQ ID NO: 295679 - RNA, 20 nt, Artificial Sequence
  Synthetic
gauaucuuaacuucgauuuc

SEQ ID NO: 295680 - RNA, 21 nt, Artificial Sequence
  Synthetic
agauaucuuaacuucgauuuc

SEQ ID NO: 295681 - RNA, 22 nt, Artificial Sequence
  Synthetic
uagauaucuuaacuucgauuuc

SEQ ID NO: 295682 - RNA, 23 nt, Artificial Sequence
  Synthetic
cuagauaucuuaacuucgauuuc

SEQ ID NO: 295683 - RNA, 24 nt, Artificial Sequence
  Synthetic
acuagauaucuuaacuucgauuuc

SEQ ID NO: 295684 - RNA, 18 nt, Artificial Sequence
  Synthetic
cugaggcaagaggauuuc

SEQ ID NO: 295685 - RNA, 19 nt, Artificial Sequence
  Synthetic
gcugaggcaagaggauuuc

SEQ ID NO: 295686 - RNA, 20 nt, Artificial Sequence
  Synthetic
agcugaggcaagaggauuuc

SEQ ID NO: 295687 - RNA, 21 nt, Artificial Sequence
  Synthetic
aagcugaggcaagaggauuuc

SEQ ID NO: 295688 - RNA, 22 nt, Artificial Sequence
  Synthetic
gaagcugaggcaagaggauuuc

SEQ ID NO: 295689 - RNA, 23 nt, Artificial Sequence
  Synthetic
ggaagcugaggcaagaggauuuc

SEQ ID NO: 295690 - RNA, 24 nt, Artificial Sequence
  Synthetic
gggaagcugaggcaagaggauuuc

SEQ ID NO: 295691 - RNA, 18 nt, Artificial Sequence
  Synthetic
aauaaaacggaggauuuc

SEQ ID NO: 295692 - RNA, 19 nt, Artificial Sequence
  Synthetic
caauaaaacggaggauuuc

SEQ ID NO: 295693 - RNA, 20 nt, Artificial Sequence
  Synthetic
ccaauaaaacggaggauuuc

SEQ ID NO: 295694 - RNA, 21 nt, Artificial Sequence
  Synthetic
accaauaaaacggaggauuuc

SEQ ID NO: 295695 - RNA, 22 nt, Artificial Sequence
  Synthetic
uaccaauaaaacggaggauuuc

SEQ ID NO: 295696 - RNA, 23 nt, Artificial Sequence
  Synthetic
guaccaauaaaacggaggauuuc

SEQ ID NO: 295697 - RNA, 24 nt, Artificial Sequence
  Synthetic
gguaccaauaaaacggaggauuuc

SEQ ID NO: 295698 - RNA, 18 nt, Artificial Sequence
  Synthetic
acccagaagugggauuuc

SEQ ID NO: 295699 - RNA, 19 nt, Artificial Sequence
  Synthetic
uacccagaagugggauuuc

SEQ ID NO: 295700 - RNA, 20 nt, Artificial Sequence
  Synthetic
guacccagaagugggauuuc

SEQ ID NO: 295701 - RNA, 21 nt, Artificial Sequence
  Synthetic
uguacccagaagugggauuuc

SEQ ID NO: 295702 - RNA, 22 nt, Artificial Sequence
  Synthetic
auguacccagaagugggauuuc

SEQ ID NO: 295703 - RNA, 23 nt, Artificial Sequence
  Synthetic
uauguacccagaagugggauuuc

SEQ ID NO: 295704 - RNA, 24 nt, Artificial Sequence
  Synthetic
guauguacccagaagugggauuuc

SEQ ID NO: 295705 - RNA, 18 nt, Artificial Sequence
  Synthetic
gggcaucaaauggauuuc

SEQ ID NO: 295706 - RNA, 19 nt, Artificial Sequence
  Synthetic
ugggcaucaaauggauuuc

SEQ ID NO: 295707 - RNA, 20 nt, Artificial Sequence
  Synthetic
augggcaucaaauggauuuc

SEQ ID NO: 295708 - RNA, 21 nt, Artificial Sequence
  Synthetic
caugggcaucaaauggauuuc

SEQ ID NO: 295709 - RNA, 22 nt, Artificial Sequence
  Synthetic
ccaugggcaucaaauggauuuc

SEQ ID NO: 295710 - RNA, 23 nt, Artificial Sequence
  Synthetic
uccaugggcaucaaauggauuuc

SEQ ID NO: 295711 - RNA, 24 nt, Artificial Sequence
  Synthetic
uuccaugggcaucaaauggauuuc

SEQ ID NO: 295712 - RNA, 18 nt, Artificial Sequence
  Synthetic
agcaauccgauggauuuc

SEQ ID NO: 295713 - RNA, 19 nt, Artificial Sequence
  Synthetic
uagcaauccgauggauuuc

SEQ ID NO: 295714 - RNA, 20 nt, Artificial Sequence
  Synthetic
guagcaauccgauggauuuc

SEQ ID NO: 295715 - RNA, 21 nt, Artificial Sequence
  Synthetic
aguagcaauccgauggauuuc

SEQ ID NO: 295716 - RNA, 22 nt, Artificial Sequence
  Synthetic
caguagcaauccgauggauuuc

SEQ ID NO: 295717 - RNA, 23 nt, Artificial Sequence
  Synthetic
gcaguagcaauccgauggauuuc

SEQ ID NO: 295718 - RNA, 24 nt, Artificial Sequence
  Synthetic
ggcaguagcaauccgauggauuuc

SEQ ID NO: 295719 - RNA, 18 nt, Artificial Sequence
  Synthetic
uuuguaaaaaaugauuuc

SEQ ID NO: 295720 - RNA, 19 nt, Artificial Sequence
  Synthetic
guuuguaaaaaaugauuuc

SEQ ID NO: 295721 - RNA, 20 nt, Artificial Sequence
  Synthetic
aguuuguaaaaaaugauuuc

SEQ ID NO: 295722 - RNA, 21 nt, Artificial Sequence
  Synthetic
aaguuuguaaaaaaugauuuc

SEQ ID NO: 295723 - RNA, 22 nt, Artificial Sequence
  Synthetic
aaaguuuguaaaaaaugauuuc

SEQ ID NO: 295724 - RNA, 23 nt, Artificial Sequence
  Synthetic
aaaaguuuguaaaaaaugauuuc

SEQ ID NO: 295725 - RNA, 24 nt, Artificial Sequence
  Synthetic
uaaaaguuuguaaaaaaugauuuc

SEQ ID NO: 295726 - RNA, 18 nt, Artificial Sequence
  Synthetic
cacugaagcaaugauuuc

SEQ ID NO: 295727 - RNA, 19 nt, Artificial Sequence
  Synthetic
ccacugaagcaaugauuuc

SEQ ID NO: 295728 - RNA, 20 nt, Artificial Sequence
  Synthetic
accacugaagcaaugauuuc

SEQ ID NO: 295729 - RNA, 21 nt, Artificial Sequence
  Synthetic
uaccacugaagcaaugauuuc

SEQ ID NO: 295730 - RNA, 22 nt, Artificial Sequence
  Synthetic
guaccacugaagcaaugauuuc

SEQ ID NO: 295731 - RNA, 23 nt, Artificial Sequence
  Synthetic
gguaccacugaagcaaugauuuc

SEQ ID NO: 295732 - RNA, 24 nt, Artificial Sequence
  Synthetic
ggguaccacugaagcaaugauuuc

SEQ ID NO: 295733 - RNA, 18 nt, Artificial Sequence
  Synthetic
aaguaaccugaugauuuc

SEQ ID NO: 295734 - RNA, 19 nt, Artificial Sequence
  Synthetic
caaguaaccugaugauuuc

SEQ ID NO: 295735 - RNA, 20 nt, Artificial Sequence
  Synthetic
acaaguaaccugaugauuuc

SEQ ID NO: 295736 - RNA, 21 nt, Artificial Sequence
  Synthetic
gacaaguaaccugaugauuuc

SEQ ID NO: 295737 - RNA, 22 nt, Artificial Sequence
  Synthetic
ugacaaguaaccugaugauuuc

SEQ ID NO: 295738 - RNA, 23 nt, Artificial Sequence
  Synthetic
cugacaaguaaccugaugauuuc

SEQ ID NO: 295739 - RNA, 24 nt, Artificial Sequence
  Synthetic
ccugacaaguaaccugaugauuuc

SEQ ID NO: 295740 - RNA, 18 nt, Artificial Sequence
  Synthetic
gggcuagauucugauuuc

SEQ ID NO: 295741 - RNA, 19 nt, Artificial Sequence
  Synthetic
agggcuagauucugauuuc

SEQ ID NO: 295742 - RNA, 20 nt, Artificial Sequence
  Synthetic
aagggcuagauucugauuuc

SEQ ID NO: 295743 - RNA, 21 nt, Artificial Sequence
  Synthetic
gaagggcuagauucugauuuc

SEQ ID NO: 295744 - RNA, 22 nt, Artificial Sequence
  Synthetic
ggaagggcuagauucugauuuc

SEQ ID NO: 295745 - RNA, 23 nt, Artificial Sequence
  Synthetic
gggaagggcuagauucugauuuc

SEQ ID NO: 295746 - RNA, 24 nt, Artificial Sequence
  Synthetic
agggaagggcuagauucugauuuc

SEQ ID NO: 295747 - RNA, 18 nt, Artificial Sequence
  Synthetic
aggcuauugcaauauuuc

SEQ ID NO: 295748 - RNA, 19 nt, Artificial Sequence
  Synthetic
uaggcuauugcaauauuuc

SEQ ID NO: 295749 - RNA, 20 nt, Artificial Sequence
  Synthetic
guaggcuauugcaauauuuc

SEQ ID NO: 295750 - RNA, 21 nt, Artificial Sequence
  Synthetic
aguaggcuauugcaauauuuc

SEQ ID NO: 295751 - RNA, 22 nt, Artificial Sequence
  Synthetic
uaguaggcuauugcaauauuuc

SEQ ID NO: 295752 - RNA, 23 nt, Artificial Sequence
  Synthetic
uuaguaggcuauugcaauauuuc

SEQ ID NO: 295753 - RNA, 24 nt, Artificial Sequence
  Synthetic
auuaguaggcuauugcaauauuuc

SEQ ID NO: 295754 - RNA, 18 nt, Artificial Sequence
  Synthetic
ucuuuagaagaauauuuc

SEQ ID NO: 295755 - RNA, 19 nt, Artificial Sequence
  Synthetic
uucuuuagaagaauauuuc

SEQ ID NO: 295756 - RNA, 20 nt, Artificial Sequence
  Synthetic
uuucuuuagaagaauauuuc

SEQ ID NO: 295757 - RNA, 21 nt, Artificial Sequence
  Synthetic
cuuucuuuagaagaauauuuc

SEQ ID NO: 295758 - RNA, 22 nt, Artificial Sequence
  Synthetic
gcuuucuuuagaagaauauuuc

SEQ ID NO: 295759 - RNA, 23 nt, Artificial Sequence
  Synthetic
agcuuucuuuagaagaauauuuc

SEQ ID NO: 295760 - RNA, 24 nt, Artificial Sequence
  Synthetic
aagcuuucuuuagaagaauauuuc

SEQ ID NO: 295761 - RNA, 18 nt, Artificial Sequence
  Synthetic
cacauagucccauauuuc

SEQ ID NO: 295762 - RNA, 19 nt, Artificial Sequence
  Synthetic
ucacauagucccauauuuc

SEQ ID NO: 295763 - RNA, 20 nt, Artificial Sequence
  Synthetic
uucacauagucccauauuuc

SEQ ID NO: 295764 - RNA, 21 nt, Artificial Sequence
  Synthetic
uuucacauagucccauauuuc

SEQ ID NO: 295765 - RNA, 22 nt, Artificial Sequence
  Synthetic
uuuucacauagucccauauuuc

SEQ ID NO: 295766 - RNA, 23 nt, Artificial Sequence
  Synthetic
cuuuucacauagucccauauuuc

SEQ ID NO: 295767 - RNA, 24 nt, Artificial Sequence
  Synthetic
ucuuuucacauagucccauauuuc

SEQ ID NO: 295768 - RNA, 18 nt, Artificial Sequence
  Synthetic
uuguuauugucauauuuc

SEQ ID NO: 295769 - RNA, 19 nt, Artificial Sequence
  Synthetic
uuuguuauugucauauuuc

SEQ ID NO: 295770 - RNA, 20 nt, Artificial Sequence
  Synthetic
auuuguuauugucauauuuc

SEQ ID NO: 295771 - RNA, 21 nt, Artificial Sequence
  Synthetic
aauuuguuauugucauauuuc

SEQ ID NO: 295772 - RNA, 22 nt, Artificial Sequence
  Synthetic
caauuuguuauugucauauuuc

SEQ ID NO: 295773 - RNA, 23 nt, Artificial Sequence
  Synthetic
ccaauuuguuauugucauauuuc

SEQ ID NO: 295774 - RNA, 24 nt, Artificial Sequence
  Synthetic
uccaauuuguuauugucauauuuc

SEQ ID NO: 295775 - RNA, 18 nt, Artificial Sequence
  Synthetic
uguacccuaggauauuuc

SEQ ID NO: 295776 - RNA, 19 nt, Artificial Sequence
  Synthetic
uuguacccuaggauauuuc

SEQ ID NO: 295777 - RNA, 20 nt, Artificial Sequence
  Synthetic
uuuguacccuaggauauuuc

SEQ ID NO: 295778 - RNA, 21 nt, Artificial Sequence
  Synthetic
uuuuguacccuaggauauuuc

SEQ ID NO: 295779 - RNA, 22 nt, Artificial Sequence
  Synthetic
auuuuguacccuaggauauuuc

SEQ ID NO: 295780 - RNA, 23 nt, Artificial Sequence
  Synthetic
aauuuuguacccuaggauauuuc

SEQ ID NO: 295781 - RNA, 24 nt, Artificial Sequence
  Synthetic
uaauuuuguacccuaggauauuuc

SEQ ID NO: 295782 - RNA, 18 nt, Artificial Sequence
  Synthetic
uguaaagucugauauuuc

SEQ ID NO: 295783 - RNA, 19 nt, Artificial Sequence
  Synthetic
auguaaagucugauauuuc

SEQ ID NO: 295784 - RNA, 20 nt, Artificial Sequence
  Synthetic
gauguaaagucugauauuuc

SEQ ID NO: 295785 - RNA, 21 nt, Artificial Sequence
  Synthetic
agauguaaagucugauauuuc

SEQ ID NO: 295786 - RNA, 22 nt, Artificial Sequence
  Synthetic
aagauguaaagucugauauuuc

SEQ ID NO: 295787 - RNA, 23 nt, Artificial Sequence
  Synthetic
caagauguaaagucugauauuuc

SEQ ID NO: 295788 - RNA, 24 nt, Artificial Sequence
  Synthetic
gcaagauguaaagucugauauuuc

SEQ ID NO: 295789 - RNA, 18 nt, Artificial Sequence
  Synthetic
aggugugaacacuauuuc

SEQ ID NO: 295790 - RNA, 19 nt, Artificial Sequence
  Synthetic
uaggugugaacacuauuuc

SEQ ID NO: 295791 - RNA, 20 nt, Artificial Sequence
  Synthetic
cuaggugugaacacuauuuc

SEQ ID NO: 295792 - RNA, 21 nt, Artificial Sequence
  Synthetic
gcuaggugugaacacuauuuc

SEQ ID NO: 295793 - RNA, 22 nt, Artificial Sequence
  Synthetic
agcuaggugugaacacuauuuc

SEQ ID NO: 295794 - RNA, 23 nt, Artificial Sequence
  Synthetic
aagcuaggugugaacacuauuuc

SEQ ID NO: 295795 - RNA, 24 nt, Artificial Sequence
  Synthetic
aaagcuaggugugaacacuauuuc

SEQ ID NO: 295796 - RNA, 18 nt, Artificial Sequence
  Synthetic
uuuauuuaaaucuauuuc

SEQ ID NO: 295797 - RNA, 19 nt, Artificial Sequence
  Synthetic
auuuauuuaaaucuauuuc

SEQ ID NO: 295798 - RNA, 20 nt, Artificial Sequence
  Synthetic
uauuuauuuaaaucuauuuc

SEQ ID NO: 295799 - RNA, 21 nt, Artificial Sequence
  Synthetic
uuauuuauuuaaaucuauuuc

SEQ ID NO: 295800 - RNA, 22 nt, Artificial Sequence
  Synthetic
guuauuuauuuaaaucuauuuc

SEQ ID NO: 295801 - RNA, 23 nt, Artificial Sequence
  Synthetic
uguuauuuauuuaaaucuauuuc

SEQ ID NO: 295802 - RNA, 24 nt, Artificial Sequence
  Synthetic
guguuauuuauuuaaaucuauuuc

SEQ ID NO: 295803 - RNA, 18 nt, Artificial Sequence
  Synthetic
cauuuugagaucuauuuc

SEQ ID NO: 295804 - RNA, 19 nt, Artificial Sequence
  Synthetic
acauuuugagaucuauuuc

SEQ ID NO: 295805 - RNA, 20 nt, Artificial Sequence
  Synthetic
uacauuuugagaucuauuuc

SEQ ID NO: 295806 - RNA, 21 nt, Artificial Sequence
  Synthetic
auacauuuugagaucuauuuc

SEQ ID NO: 295807 - RNA, 22 nt, Artificial Sequence
  Synthetic
aauacauuuugagaucuauuuc

SEQ ID NO: 295808 - RNA, 23 nt, Artificial Sequence
  Synthetic
gaauacauuuugagaucuauuuc

SEQ ID NO: 295809 - RNA, 24 nt, Artificial Sequence
  Synthetic
ggaauacauuuugagaucuauuuc

SEQ ID NO: 295810 - RNA, 18 nt, Artificial Sequence
  Synthetic
ucaaauaauaucuauuuc

SEQ ID NO: 295811 - RNA, 19 nt, Artificial Sequence
  Synthetic
aucaaauaauaucuauuuc

SEQ ID NO: 295812 - RNA, 20 nt, Artificial Sequence
  Synthetic
caucaaauaauaucuauuuc

SEQ ID NO: 295813 - RNA, 21 nt, Artificial Sequence
  Synthetic
acaucaaauaauaucuauuuc

SEQ ID NO: 295814 - RNA, 22 nt, Artificial Sequence
  Synthetic
uacaucaaauaauaucuauuuc

SEQ ID NO: 295815 - RNA, 23 nt, Artificial Sequence
  Synthetic
cuacaucaaauaauaucuauuuc

SEQ ID NO: 295816 - RNA, 24 nt, Artificial Sequence
  Synthetic
ucuacaucaaauaauaucuauuuc

SEQ ID NO: 295817 - RNA, 18 nt, Artificial Sequence
  Synthetic
agacaugauacguauuuc

SEQ ID NO: 295818 - RNA, 19 nt, Artificial Sequence
  Synthetic
aagacaugauacguauuuc

SEQ ID NO: 295819 - RNA, 20 nt, Artificial Sequence
  Synthetic
uaagacaugauacguauuuc

SEQ ID NO: 295820 - RNA, 21 nt, Artificial Sequence
  Synthetic
cuaagacaugauacguauuuc

SEQ ID NO: 295821 - RNA, 22 nt, Artificial Sequence
  Synthetic
gcuaagacaugauacguauuuc

SEQ ID NO: 295822 - RNA, 23 nt, Artificial Sequence
  Synthetic
agcuaagacaugauacguauuuc

SEQ ID NO: 295823 - RNA, 24 nt, Artificial Sequence
  Synthetic
uagcuaagacaugauacguauuuc

SEQ ID NO: 295824 - RNA, 18 nt, Artificial Sequence
  Synthetic
auuggaguaucguauuuc

SEQ ID NO: 295825 - RNA, 19 nt, Artificial Sequence
  Synthetic
aauuggaguaucguauuuc

SEQ ID NO: 295826 - RNA, 20 nt, Artificial Sequence
  Synthetic
aaauuggaguaucguauuuc

SEQ ID NO: 295827 - RNA, 21 nt, Artificial Sequence
  Synthetic
uaaauuggaguaucguauuuc

SEQ ID NO: 295828 - RNA, 22 nt, Artificial Sequence
  Synthetic
auaaauuggaguaucguauuuc

SEQ ID NO: 295829 - RNA, 23 nt, Artificial Sequence
  Synthetic
aauaaauuggaguaucguauuuc

SEQ ID NO: 295830 - RNA, 24 nt, Artificial Sequence
  Synthetic
gaauaaauuggaguaucguauuuc

SEQ ID NO: 295831 - RNA, 18 nt, Artificial Sequence
  Synthetic
ucaucaaaaggguauuuc

SEQ ID NO: 295832 - RNA, 19 nt, Artificial Sequence
  Synthetic
gucaucaaaaggguauuuc

SEQ ID NO: 295833 - RNA, 20 nt, Artificial Sequence
  Synthetic
agucaucaaaaggguauuuc

SEQ ID NO: 295834 - RNA, 21 nt, Artificial Sequence
  Synthetic
aagucaucaaaaggguauuuc

SEQ ID NO: 295835 - RNA, 22 nt, Artificial Sequence
  Synthetic
aaagucaucaaaaggguauuuc

SEQ ID NO: 295836 - RNA, 23 nt, Artificial Sequence
  Synthetic
caaagucaucaaaaggguauuuc

SEQ ID NO: 295837 - RNA, 24 nt, Artificial Sequence
  Synthetic
ccaaagucaucaaaaggguauuuc

SEQ ID NO: 295838 - RNA, 18 nt, Artificial Sequence
  Synthetic
uuaaaaaggauguauuuc

SEQ ID NO: 295839 - RNA, 19 nt, Artificial Sequence
  Synthetic
uuuaaaaaggauguauuuc

SEQ ID NO: 295840 - RNA, 20 nt, Artificial Sequence
  Synthetic
cuuuaaaaaggauguauuuc

SEQ ID NO: 295841 - RNA, 21 nt, Artificial Sequence
  Synthetic
acuuuaaaaaggauguauuuc

SEQ ID NO: 295842 - RNA, 22 nt, Artificial Sequence
  Synthetic
gacuuuaaaaaggauguauuuc

SEQ ID NO: 295843 - RNA, 23 nt, Artificial Sequence
  Synthetic
ggacuuuaaaaaggauguauuuc

SEQ ID NO: 295844 - RNA, 24 nt, Artificial Sequence
  Synthetic
gggacuuuaaaaaggauguauuuc

SEQ ID NO: 295845 - RNA, 18 nt, Artificial Sequence
  Synthetic
aucuguuaacuguauuuc

SEQ ID NO: 295846 - RNA, 19 nt, Artificial Sequence
  Synthetic
uaucuguuaacuguauuuc

SEQ ID NO: 295847 - RNA, 20 nt, Artificial Sequence
  Synthetic
guaucuguuaacuguauuuc

SEQ ID NO: 295848 - RNA, 21 nt, Artificial Sequence
  Synthetic
gguaucuguuaacuguauuuc

SEQ ID NO: 295849 - RNA, 22 nt, Artificial Sequence
  Synthetic
ggguaucuguuaacuguauuuc

SEQ ID NO: 295850 - RNA, 23 nt, Artificial Sequence
  Synthetic
uggguaucuguuaacuguauuuc

SEQ ID NO: 295851 - RNA, 24 nt, Artificial Sequence
  Synthetic
auggguaucuguuaacuguauuuc

SEQ ID NO: 295852 - RNA, 18 nt, Artificial Sequence
  Synthetic
gugagccugguguauuuc

SEQ ID NO: 295853 - RNA, 19 nt, Artificial Sequence
  Synthetic
agugagccugguguauuuc

SEQ ID NO: 295854 - RNA, 20 nt, Artificial Sequence
  Synthetic
aagugagccugguguauuuc

SEQ ID NO: 295855 - RNA, 21 nt, Artificial Sequence
  Synthetic
gaagugagccugguguauuuc

SEQ ID NO: 295856 - RNA, 22 nt, Artificial Sequence
  Synthetic
ggaagugagccugguguauuuc

SEQ ID NO: 295857 - RNA, 23 nt, Artificial Sequence
  Synthetic
aggaagugagccugguguauuuc

SEQ ID NO: 295858 - RNA, 24 nt, Artificial Sequence
  Synthetic
gaggaagugagccugguguauuuc

SEQ ID NO: 295859 - RNA, 18 nt, Artificial Sequence
  Synthetic
uccuugaaguuguauuuc

SEQ ID NO: 295860 - RNA, 19 nt, Artificial Sequence
  Synthetic
auccuugaaguuguauuuc

SEQ ID NO: 295861 - RNA, 20 nt, Artificial Sequence
  Synthetic
aauccuugaaguuguauuuc

SEQ ID NO: 295862 - RNA, 21 nt, Artificial Sequence
  Synthetic
uaauccuugaaguuguauuuc

SEQ ID NO: 295863 - RNA, 22 nt, Artificial Sequence
  Synthetic
auaauccuugaaguuguauuuc

SEQ ID NO: 295864 - RNA, 23 nt, Artificial Sequence
  Synthetic
aauaauccuugaaguuguauuuc

SEQ ID NO: 295865 - RNA, 24 nt, Artificial Sequence
  Synthetic
uaauaauccuugaaguuguauuuc

SEQ ID NO: 295866 - RNA, 18 nt, Artificial Sequence
  Synthetic
aauuauuaacauuauuuc

SEQ ID NO: 295867 - RNA, 19 nt, Artificial Sequence
  Synthetic
caauuauuaacauuauuuc

SEQ ID NO: 295868 - RNA, 20 nt, Artificial Sequence
  Synthetic
ucaauuauuaacauuauuuc

SEQ ID NO: 295869 - RNA, 21 nt, Artificial Sequence
  Synthetic
uucaauuauuaacauuauuuc

SEQ ID NO: 295870 - RNA, 22 nt, Artificial Sequence
  Synthetic
cuucaauuauuaacauuauuuc

SEQ ID NO: 295871 - RNA, 23 nt, Artificial Sequence
  Synthetic
ccuucaauuauuaacauuauuuc

SEQ ID NO: 295872 - RNA, 24 nt, Artificial Sequence
  Synthetic
gccuucaauuauuaacauuauuuc

SEQ ID NO: 295873 - RNA, 18 nt, Artificial Sequence
  Synthetic
uacaaugacuauuauuuc

SEQ ID NO: 295874 - RNA, 19 nt, Artificial Sequence
  Synthetic
auacaaugacuauuauuuc

SEQ ID NO: 295875 - RNA, 20 nt, Artificial Sequence
  Synthetic
aauacaaugacuauuauuuc

SEQ ID NO: 295876 - RNA, 21 nt, Artificial Sequence
  Synthetic
uaauacaaugacuauuauuuc

SEQ ID NO: 295877 - RNA, 22 nt, Artificial Sequence
  Synthetic
auaauacaaugacuauuauuuc

SEQ ID NO: 295878 - RNA, 23 nt, Artificial Sequence
  Synthetic
gauaauacaaugacuauuauuuc

SEQ ID NO: 295879 - RNA, 24 nt, Artificial Sequence
  Synthetic
ggauaauacaaugacuauuauuuc

SEQ ID NO: 295880 - RNA, 18 nt, Artificial Sequence
  Synthetic
uauuauuuguauuauuuc

SEQ ID NO: 295881 - RNA, 19 nt, Artificial Sequence
  Synthetic
uuauuauuuguauuauuuc

SEQ ID NO: 295882 - RNA, 20 nt, Artificial Sequence
  Synthetic
auuauuauuuguauuauuuc

SEQ ID NO: 295883 - RNA, 21 nt, Artificial Sequence
  Synthetic
uauuauuauuuguauuauuuc

SEQ ID NO: 295884 - RNA, 22 nt, Artificial Sequence
  Synthetic
guauuauuauuuguauuauuuc

SEQ ID NO: 295885 - RNA, 23 nt, Artificial Sequence
  Synthetic
aguauuauuauuuguauuauuuc

SEQ ID NO: 295886 - RNA, 24 nt, Artificial Sequence
  Synthetic
caguauuauuauuuguauuauuuc

SEQ ID NO: 295887 - RNA, 18 nt, Artificial Sequence
  Synthetic
gaucaacaggcuuauuuc

SEQ ID NO: 295888 - RNA, 19 nt, Artificial Sequence
  Synthetic
agaucaacaggcuuauuuc

SEQ ID NO: 295889 - RNA, 20 nt, Artificial Sequence
  Synthetic
aagaucaacaggcuuauuuc

SEQ ID NO: 295890 - RNA, 21 nt, Artificial Sequence
  Synthetic
gaagaucaacaggcuuauuuc

SEQ ID NO: 295891 - RNA, 22 nt, Artificial Sequence
  Synthetic
agaagaucaacaggcuuauuuc

SEQ ID NO: 295892 - RNA, 23 nt, Artificial Sequence
  Synthetic
gagaagaucaacaggcuuauuuc

SEQ ID NO: 295893 - RNA, 24 nt, Artificial Sequence
  Synthetic
ggagaagaucaacaggcuuauuuc

SEQ ID NO: 295894 - RNA, 18 nt, Artificial Sequence
  Synthetic
gucaugucauguuauuuc

SEQ ID NO: 295895 - RNA, 19 nt, Artificial Sequence
  Synthetic
agucaugucauguuauuuc

SEQ ID NO: 295896 - RNA, 20 nt, Artificial Sequence
  Synthetic
aagucaugucauguuauuuc

SEQ ID NO: 295897 - RNA, 21 nt, Artificial Sequence
  Synthetic
aaagucaugucauguuauuuc

SEQ ID NO: 295898 - RNA, 22 nt, Artificial Sequence
  Synthetic
gaaagucaugucauguuauuuc

SEQ ID NO: 295899 - RNA, 23 nt, Artificial Sequence
  Synthetic
agaaagucaugucauguuauuuc

SEQ ID NO: 295900 - RNA, 24 nt, Artificial Sequence
  Synthetic
gagaaagucaugucauguuauuuc

SEQ ID NO: 295901 - RNA, 18 nt, Artificial Sequence
  Synthetic
uacuguauuauuuauuuc

SEQ ID NO: 295902 - RNA, 19 nt, Artificial Sequence
  Synthetic
auacuguauuauuuauuuc

SEQ ID NO: 295903 - RNA, 20 nt, Artificial Sequence
  Synthetic
uauacuguauuauuuauuuc

SEQ ID NO: 295904 - RNA, 21 nt, Artificial Sequence
  Synthetic
auauacuguauuauuuauuuc

SEQ ID NO: 295905 - RNA, 22 nt, Artificial Sequence
  Synthetic
uauauacuguauuauuuauuuc

SEQ ID NO: 295906 - RNA, 23 nt, Artificial Sequence
  Synthetic
auauauacuguauuauuuauuuc

SEQ ID NO: 295907 - RNA, 24 nt, Artificial Sequence
  Synthetic
aauauauacuguauuauuuauuuc

SEQ ID NO: 295908 - RNA, 18 nt, Artificial Sequence
  Synthetic
aaucccucucuuuauuuc

SEQ ID NO: 295909 - RNA, 19 nt, Artificial Sequence
  Synthetic
aaaucccucucuuuauuuc

SEQ ID NO: 295910 - RNA, 20 nt, Artificial Sequence
  Synthetic
uaaaucccucucuuuauuuc

SEQ ID NO: 295911 - RNA, 21 nt, Artificial Sequence
  Synthetic
uuaaaucccucucuuuauuuc

SEQ ID NO: 295912 - RNA, 22 nt, Artificial Sequence
  Synthetic
auuaaaucccucucuuuauuuc

SEQ ID NO: 295913 - RNA, 23 nt, Artificial Sequence
  Synthetic
uauuaaaucccucucuuuauuuc

SEQ ID NO: 295914 - RNA, 24 nt, Artificial Sequence
  Synthetic
auauuaaaucccucucuuuauuuc

SEQ ID NO: 295915 - RNA, 18 nt, Artificial Sequence
  Synthetic
ccugugacuccaacuuuc

SEQ ID NO: 295916 - RNA, 19 nt, Artificial Sequence
  Synthetic
accugugacuccaacuuuc

SEQ ID NO: 295917 - RNA, 20 nt, Artificial Sequence
  Synthetic
caccugugacuccaacuuuc

SEQ ID NO: 295918 - RNA, 21 nt, Artificial Sequence
  Synthetic
ucaccugugacuccaacuuuc

SEQ ID NO: 295919 - RNA, 22 nt, Artificial Sequence
  Synthetic
gucaccugugacuccaacuuuc

SEQ ID NO: 295920 - RNA, 23 nt, Artificial Sequence
  Synthetic
ugucaccugugacuccaacuuuc

SEQ ID NO: 295921 - RNA, 24 nt, Artificial Sequence
  Synthetic
gugucaccugugacuccaacuuuc

SEQ ID NO: 295922 - RNA, 18 nt, Artificial Sequence
  Synthetic
augagggacucaacuuuc

SEQ ID NO: 295923 - RNA, 19 nt, Artificial Sequence
  Synthetic
aaugagggacucaacuuuc

SEQ ID NO: 295924 - RNA, 20 nt, Artificial Sequence
  Synthetic
aaaugagggacucaacuuuc

SEQ ID NO: 295925 - RNA, 21 nt, Artificial Sequence
  Synthetic
gaaaugagggacucaacuuuc

SEQ ID NO: 295926 - RNA, 22 nt, Artificial Sequence
  Synthetic
agaaaugagggacucaacuuuc

SEQ ID NO: 295927 - RNA, 23 nt, Artificial Sequence
  Synthetic
cagaaaugagggacucaacuuuc

SEQ ID NO: 295928 - RNA, 24 nt, Artificial Sequence
  Synthetic
gcagaaaugagggacucaacuuuc

SEQ ID NO: 295929 - RNA, 18 nt, Artificial Sequence
  Synthetic
gacuuagagauaacuuuc

SEQ ID NO: 295930 - RNA, 19 nt, Artificial Sequence
  Synthetic
cgacuuagagauaacuuuc

SEQ ID NO: 295931 - RNA, 20 nt, Artificial Sequence
  Synthetic
ccgacuuagagauaacuuuc

SEQ ID NO: 295932 - RNA, 21 nt, Artificial Sequence
  Synthetic
cccgacuuagagauaacuuuc

SEQ ID NO: 295933 - RNA, 22 nt, Artificial Sequence
  Synthetic
gcccgacuuagagauaacuuuc

SEQ ID NO: 295934 - RNA, 23 nt, Artificial Sequence
  Synthetic
ggcccgacuuagagauaacuuuc

SEQ ID NO: 295935 - RNA, 24 nt, Artificial Sequence
  Synthetic
uggcccgacuuagagauaacuuuc

SEQ ID NO: 295936 - RNA, 18 nt, Artificial Sequence
  Synthetic
gagaguuaaguaacuuuc

SEQ ID NO: 295937 - RNA, 19 nt, Artificial Sequence
  Synthetic
agagaguuaaguaacuuuc

SEQ ID NO: 295938 - RNA, 20 nt, Artificial Sequence
  Synthetic
cagagaguuaaguaacuuuc

SEQ ID NO: 295939 - RNA, 21 nt, Artificial Sequence
  Synthetic
ccagagaguuaaguaacuuuc

SEQ ID NO: 295940 - RNA, 22 nt, Artificial Sequence
  Synthetic
uccagagaguuaaguaacuuuc

SEQ ID NO: 295941 - RNA, 23 nt, Artificial Sequence
  Synthetic
uuccagagaguuaaguaacuuuc

SEQ ID NO: 295942 - RNA, 24 nt, Artificial Sequence
  Synthetic
auuccagagaguuaaguaacuuuc

SEQ ID NO: 295943 - RNA, 18 nt, Artificial Sequence
  Synthetic
aaaaaauuguuaacuuuc

SEQ ID NO: 295944 - RNA, 19 nt, Artificial Sequence
  Synthetic
aaaaaaauuguuaacuuuc

SEQ ID NO: 295945 - RNA, 20 nt, Artificial Sequence
  Synthetic
aaaaaaaauuguuaacuuuc

SEQ ID NO: 295946 - RNA, 21 nt, Artificial Sequence
  Synthetic
gaaaaaaaauuguuaacuuuc

SEQ ID NO: 295947 - RNA, 22 nt, Artificial Sequence
  Synthetic
agaaaaaaaauuguuaacuuuc

SEQ ID NO: 295948 - RNA, 23 nt, Artificial Sequence
  Synthetic
cagaaaaaaaauuguuaacuuuc

SEQ ID NO: 295949 - RNA, 24 nt, Artificial Sequence
  Synthetic
ucagaaaaaaaauuguuaacuuuc

SEQ ID NO: 295950 - RNA, 18 nt, Artificial Sequence
  Synthetic
aaugcuuuuaacacuuuc

SEQ ID NO: 295951 - RNA, 19 nt, Artificial Sequence
  Synthetic
aaaugcuuuuaacacuuuc

SEQ ID NO: 295952 - RNA, 20 nt, Artificial Sequence
  Synthetic
gaaaugcuuuuaacacuuuc

SEQ ID NO: 295953 - RNA, 21 nt, Artificial Sequence
  Synthetic
ugaaaugcuuuuaacacuuuc

SEQ ID NO: 295954 - RNA, 22 nt, Artificial Sequence
  Synthetic
augaaaugcuuuuaacacuuuc

SEQ ID NO: 295955 - RNA, 23 nt, Artificial Sequence
  Synthetic
uaugaaaugcuuuuaacacuuuc

SEQ ID NO: 295956 - RNA, 24 nt, Artificial Sequence
  Synthetic
uuaugaaaugcuuuuaacacuuuc

SEQ ID NO: 295957 - RNA, 18 nt, Artificial Sequence
  Synthetic
uaaagaauguugacuuuc

SEQ ID NO: 295958 - RNA, 19 nt, Artificial Sequence
  Synthetic
uuaaagaauguugacuuuc

SEQ ID NO: 295959 - RNA, 20 nt, Artificial Sequence
  Synthetic
auuaaagaauguugacuuuc

SEQ ID NO: 295960 - RNA, 21 nt, Artificial Sequence
  Synthetic
uauuaaagaauguugacuuuc

SEQ ID NO: 295961 - RNA, 22 nt, Artificial Sequence
  Synthetic
auauuaaagaauguugacuuuc

SEQ ID NO: 295962 - RNA, 23 nt, Artificial Sequence
  Synthetic
aauauuaaagaauguugacuuuc

SEQ ID NO: 295963 - RNA, 24 nt, Artificial Sequence
  Synthetic
uaauauuaaagaauguugacuuuc

SEQ ID NO: 295964 - RNA, 18 nt, Artificial Sequence
  Synthetic
aaauauguuuauacuuuc

SEQ ID NO: 295965 - RNA, 19 nt, Artificial Sequence
  Synthetic
uaaauauguuuauacuuuc

SEQ ID NO: 295966 - RNA, 20 nt, Artificial Sequence
  Synthetic
cuaaauauguuuauacuuuc

SEQ ID NO: 295967 - RNA, 21 nt, Artificial Sequence
  Synthetic
ccuaaauauguuuauacuuuc

SEQ ID NO: 295968 - RNA, 22 nt, Artificial Sequence
  Synthetic
cccuaaauauguuuauacuuuc

SEQ ID NO: 295969 - RNA, 23 nt, Artificial Sequence
  Synthetic
acccuaaauauguuuauacuuuc

SEQ ID NO: 295970 - RNA, 24 nt, Artificial Sequence
  Synthetic
cacccuaaauauguuuauacuuuc

SEQ ID NO: 295971 - RNA, 18 nt, Artificial Sequence
  Synthetic
aagguagugucuacuuuc

SEQ ID NO: 295972 - RNA, 19 nt, Artificial Sequence
  Synthetic
caagguagugucuacuuuc

SEQ ID NO: 295973 - RNA, 20 nt, Artificial Sequence
  Synthetic
ccaagguagugucuacuuuc

SEQ ID NO: 295974 - RNA, 21 nt, Artificial Sequence
  Synthetic
accaagguagugucuacuuuc

SEQ ID NO: 295975 - RNA, 22 nt, Artificial Sequence
  Synthetic
caccaagguagugucuacuuuc

SEQ ID NO: 295976 - RNA, 23 nt, Artificial Sequence
  Synthetic
ccaccaagguagugucuacuuuc

SEQ ID NO: 295977 - RNA, 24 nt, Artificial Sequence
  Synthetic
accaccaagguagugucuacuuuc

SEQ ID NO: 295978 - RNA, 18 nt, Artificial Sequence
  Synthetic
uguuuuaaaauuacuuuc

SEQ ID NO: 295979 - RNA, 19 nt, Artificial Sequence
  Synthetic
guguuuuaaaauuacuuuc

SEQ ID NO: 295980 - RNA, 20 nt, Artificial Sequence
  Synthetic
uguguuuuaaaauuacuuuc

SEQ ID NO: 295981 - RNA, 21 nt, Artificial Sequence
  Synthetic
cuguguuuuaaaauuacuuuc

SEQ ID NO: 295982 - RNA, 22 nt, Artificial Sequence
  Synthetic
gcuguguuuuaaaauuacuuuc

SEQ ID NO: 295983 - RNA, 23 nt, Artificial Sequence
  Synthetic
ugcuguguuuuaaaauuacuuuc

SEQ ID NO: 295984 - RNA, 24 nt, Artificial Sequence
  Synthetic
augcuguguuuuaaaauuacuuuc

SEQ ID NO: 295985 - RNA, 18 nt, Artificial Sequence
  Synthetic
uugcuuccauuuacuuuc

SEQ ID NO: 295986 - RNA, 19 nt, Artificial Sequence
  Synthetic
uuugcuuccauuuacuuuc

SEQ ID NO: 295987 - RNA, 20 nt, Artificial Sequence
  Synthetic
guuugcuuccauuuacuuuc

SEQ ID NO: 295988 - RNA, 21 nt, Artificial Sequence
  Synthetic
uguuugcuuccauuuacuuuc

SEQ ID NO: 295989 - RNA, 22 nt, Artificial Sequence
  Synthetic
cuguuugcuuccauuuacuuuc

SEQ ID NO: 295990 - RNA, 23 nt, Artificial Sequence
  Synthetic
ucuguuugcuuccauuuacuuuc

SEQ ID NO: 295991 - RNA, 24 nt, Artificial Sequence
  Synthetic
cucuguuugcuuccauuuacuuuc

SEQ ID NO: 295992 - RNA, 18 nt, Artificial Sequence
  Synthetic
aucacaagguuuacuuuc

SEQ ID NO: 295993 - RNA, 19 nt, Artificial Sequence
  Synthetic
uaucacaagguuuacuuuc

SEQ ID NO: 295994 - RNA, 20 nt, Artificial Sequence
  Synthetic
cuaucacaagguuuacuuuc

SEQ ID NO: 295995 - RNA, 21 nt, Artificial Sequence
  Synthetic
ucuaucacaagguuuacuuuc

SEQ ID NO: 295996 - RNA, 22 nt, Artificial Sequence
  Synthetic
uucuaucacaagguuuacuuuc

SEQ ID NO: 295997 - RNA, 23 nt, Artificial Sequence
  Synthetic
auucuaucacaagguuuacuuuc

SEQ ID NO: 295998 - RNA, 24 nt, Artificial Sequence
  Synthetic
uauucuaucacaagguuuacuuuc

SEQ ID NO: 295999 - RNA, 18 nt, Artificial Sequence
  Synthetic
uuuauguuggaaccuuuc

SEQ ID NO: 296000 - RNA, 19 nt, Artificial Sequence
  Synthetic
cuuuauguuggaaccuuuc

SEQ ID NO: 296001 - RNA, 20 nt, Artificial Sequence
  Synthetic
gcuuuauguuggaaccuuuc

SEQ ID NO: 296002 - RNA, 21 nt, Artificial Sequence
  Synthetic
ggcuuuauguuggaaccuuuc

SEQ ID NO: 296003 - RNA, 22 nt, Artificial Sequence
  Synthetic
cggcuuuauguuggaaccuuuc

SEQ ID NO: 296004 - RNA, 23 nt, Artificial Sequence
  Synthetic
ucggcuuuauguuggaaccuuuc

SEQ ID NO: 296005 - RNA, 24 nt, Artificial Sequence
  Synthetic
uucggcuuuauguuggaaccuuuc

SEQ ID NO: 296006 - RNA, 18 nt, Artificial Sequence
  Synthetic
ucacccuaaacaccuuuc

SEQ ID NO: 296007 - RNA, 19 nt, Artificial Sequence
  Synthetic
uucacccuaaacaccuuuc

SEQ ID NO: 296008 - RNA, 20 nt, Artificial Sequence
  Synthetic
uuucacccuaaacaccuuuc

SEQ ID NO: 296009 - RNA, 21 nt, Artificial Sequence
  Synthetic
uuuucacccuaaacaccuuuc

SEQ ID NO: 296010 - RNA, 22 nt, Artificial Sequence
  Synthetic
cuuuucacccuaaacaccuuuc

SEQ ID NO: 296011 - RNA, 23 nt, Artificial Sequence
  Synthetic
ucuuuucacccuaaacaccuuuc

SEQ ID NO: 296012 - RNA, 24 nt, Artificial Sequence
  Synthetic
cucuuuucacccuaaacaccuuuc

SEQ ID NO: 296013 - RNA, 18 nt, Artificial Sequence
  Synthetic
aguguuuacucaccuuuc

SEQ ID NO: 296014 - RNA, 19 nt, Artificial Sequence
  Synthetic
uaguguuuacucaccuuuc

SEQ ID NO: 296015 - RNA, 20 nt, Artificial Sequence
  Synthetic
auaguguuuacucaccuuuc

SEQ ID NO: 296016 - RNA, 21 nt, Artificial Sequence
  Synthetic
uauaguguuuacucaccuuuc

SEQ ID NO: 296017 - RNA, 22 nt, Artificial Sequence
  Synthetic
auauaguguuuacucaccuuuc

SEQ ID NO: 296018 - RNA, 23 nt, Artificial Sequence
  Synthetic
aauauaguguuuacucaccuuuc

SEQ ID NO: 296019 - RNA, 24 nt, Artificial Sequence
  Synthetic
uaauauaguguuuacucaccuuuc

SEQ ID NO: 296020 - RNA, 18 nt, Artificial Sequence
  Synthetic
auucuacuugacccuuuc

SEQ ID NO: 296021 - RNA, 19 nt, Artificial Sequence
  Synthetic
cauucuacuugacccuuuc

SEQ ID NO: 296022 - RNA, 20 nt, Artificial Sequence
  Synthetic
gcauucuacuugacccuuuc

SEQ ID NO: 296023 - RNA, 21 nt, Artificial Sequence
  Synthetic
ggcauucuacuugacccuuuc

SEQ ID NO: 296024 - RNA, 22 nt, Artificial Sequence
  Synthetic
aggcauucuacuugacccuuuc

SEQ ID NO: 296025 - RNA, 23 nt, Artificial Sequence
  Synthetic
uaggcauucuacuugacccuuuc

SEQ ID NO: 296026 - RNA, 24 nt, Artificial Sequence
  Synthetic
auaggcauucuacuugacccuuuc

SEQ ID NO: 296027 - RNA, 18 nt, Artificial Sequence
  Synthetic
caugguuucaccccuuuc

SEQ ID NO: 296028 - RNA, 19 nt, Artificial Sequence
  Synthetic
ucaugguuucaccccuuuc

SEQ ID NO: 296029 - RNA, 20 nt, Artificial Sequence
  Synthetic
cucaugguuucaccccuuuc

SEQ ID NO: 296030 - RNA, 21 nt, Artificial Sequence
  Synthetic
ccucaugguuucaccccuuuc

SEQ ID NO: 296031 - RNA, 22 nt, Artificial Sequence
  Synthetic
gccucaugguuucaccccuuuc

SEQ ID NO: 296032 - RNA, 23 nt, Artificial Sequence
  Synthetic
agccucaugguuucaccccuuuc

SEQ ID NO: 296033 - RNA, 24 nt, Artificial Sequence
  Synthetic
aagccucaugguuucaccccuuuc

SEQ ID NO: 296034 - RNA, 18 nt, Artificial Sequence
  Synthetic
uguuauguaaucccuuuc

SEQ ID NO: 296035 - RNA, 19 nt, Artificial Sequence
  Synthetic
uuguuauguaaucccuuuc

SEQ ID NO: 296036 - RNA, 20 nt, Artificial Sequence
  Synthetic
auuguuauguaaucccuuuc

SEQ ID NO: 296037 - RNA, 21 nt, Artificial Sequence
  Synthetic
uauuguuauguaaucccuuuc

SEQ ID NO: 296038 - RNA, 22 nt, Artificial Sequence
  Synthetic
uuauuguuauguaaucccuuuc

SEQ ID NO: 296039 - RNA, 23 nt, Artificial Sequence
  Synthetic
cuuauuguuauguaaucccuuuc

SEQ ID NO: 296040 - RNA, 24 nt, Artificial Sequence
  Synthetic
gcuuauuguuauguaaucccuuuc

SEQ ID NO: 296041 - RNA, 18 nt, Artificial Sequence
  Synthetic
ucuucuuuucucccuuuc

SEQ ID NO: 296042 - RNA, 19 nt, Artificial Sequence
  Synthetic
aucuucuuuucucccuuuc

SEQ ID NO: 296043 - RNA, 20 nt, Artificial Sequence
  Synthetic
gaucuucuuuucucccuuuc

SEQ ID NO: 296044 - RNA, 21 nt, Artificial Sequence
  Synthetic
ugaucuucuuuucucccuuuc

SEQ ID NO: 296045 - RNA, 22 nt, Artificial Sequence
  Synthetic
uugaucuucuuuucucccuuuc

SEQ ID NO: 296046 - RNA, 23 nt, Artificial Sequence
  Synthetic
auugaucuucuuuucucccuuuc

SEQ ID NO: 296047 - RNA, 24 nt, Artificial Sequence
  Synthetic
gauugaucuucuuuucucccuuuc

SEQ ID NO: 296048 - RNA, 18 nt, Artificial Sequence
  Synthetic
aucaaauuugagccuuuc

SEQ ID NO: 296049 - RNA, 19 nt, Artificial Sequence
  Synthetic
aaucaaauuugagccuuuc

SEQ ID NO: 296050 - RNA, 20 nt, Artificial Sequence
  Synthetic
uaaucaaauuugagccuuuc

SEQ ID NO: 296051 - RNA, 21 nt, Artificial Sequence
  Synthetic
cuaaucaaauuugagccuuuc

SEQ ID NO: 296052 - RNA, 22 nt, Artificial Sequence
  Synthetic
ccuaaucaaauuugagccuuuc

SEQ ID NO: 296053 - RNA, 23 nt, Artificial Sequence
  Synthetic
gccuaaucaaauuugagccuuuc

SEQ ID NO: 296054 - RNA, 24 nt, Artificial Sequence
  Synthetic
ggccuaaucaaauuugagccuuuc

SEQ ID NO: 296055 - RNA, 18 nt, Artificial Sequence
  Synthetic
uacucugcacugccuuuc

SEQ ID NO: 296056 - RNA, 19 nt, Artificial Sequence
  Synthetic
uuacucugcacugccuuuc

SEQ ID NO: 296057 - RNA, 20 nt, Artificial Sequence
  Synthetic
guuacucugcacugccuuuc

SEQ ID NO: 296058 - RNA, 21 nt, Artificial Sequence
  Synthetic
cguuacucugcacugccuuuc

SEQ ID NO: 296059 - RNA, 22 nt, Artificial Sequence
  Synthetic
ucguuacucugcacugccuuuc

SEQ ID NO: 296060 - RNA, 23 nt, Artificial Sequence
  Synthetic
uucguuacucugcacugccuuuc

SEQ ID NO: 296061 - RNA, 24 nt, Artificial Sequence
  Synthetic
uuucguuacucugcacugccuuuc

SEQ ID NO: 296062 - RNA, 18 nt, Artificial Sequence
  Synthetic
uacauagauacuccuuuc

SEQ ID NO: 296063 - RNA, 19 nt, Artificial Sequence
  Synthetic
auacauagauacuccuuuc

SEQ ID NO: 296064 - RNA, 20 nt, Artificial Sequence
  Synthetic
uauacauagauacuccuuuc

SEQ ID NO: 296065 - RNA, 21 nt, Artificial Sequence
  Synthetic
auauacauagauacuccuuuc

SEQ ID NO: 296066 - RNA, 22 nt, Artificial Sequence
  Synthetic
aauauacauagauacuccuuuc

SEQ ID NO: 296067 - RNA, 23 nt, Artificial Sequence
  Synthetic
uaauauacauagauacuccuuuc

SEQ ID NO: 296068 - RNA, 24 nt, Artificial Sequence
  Synthetic
auaauauacauagauacuccuuuc

SEQ ID NO: 296069 - RNA, 18 nt, Artificial Sequence
  Synthetic
ggauauuuagcuccuuuc

SEQ ID NO: 296070 - RNA, 19 nt, Artificial Sequence
  Synthetic
uggauauuuagcuccuuuc

SEQ ID NO: 296071 - RNA, 20 nt, Artificial Sequence
  Synthetic
cuggauauuuagcuccuuuc

SEQ ID NO: 296072 - RNA, 21 nt, Artificial Sequence
  Synthetic
ucuggauauuuagcuccuuuc

SEQ ID NO: 296073 - RNA, 22 nt, Artificial Sequence
  Synthetic
cucuggauauuuagcuccuuuc

SEQ ID NO: 296074 - RNA, 23 nt, Artificial Sequence
  Synthetic
ucucuggauauuuagcuccuuuc

SEQ ID NO: 296075 - RNA, 24 nt, Artificial Sequence
  Synthetic
cucucuggauauuuagcuccuuuc

SEQ ID NO: 296076 - RNA, 18 nt, Artificial Sequence
  Synthetic
ggaauggugaguccuuuc

SEQ ID NO: 296077 - RNA, 19 nt, Artificial Sequence
  Synthetic
uggaauggugaguccuuuc

SEQ ID NO: 296078 - RNA, 20 nt, Artificial Sequence
  Synthetic
cuggaauggugaguccuuuc

SEQ ID NO: 296079 - RNA, 21 nt, Artificial Sequence
  Synthetic
ucuggaauggugaguccuuuc

SEQ ID NO: 296080 - RNA, 22 nt, Artificial Sequence
  Synthetic
aucuggaauggugaguccuuuc

SEQ ID NO: 296081 - RNA, 23 nt, Artificial Sequence
  Synthetic
caucuggaauggugaguccuuuc

SEQ ID NO: 296082 - RNA, 24 nt, Artificial Sequence
  Synthetic
gcaucuggaauggugaguccuuuc

SEQ ID NO: 296083 - RNA, 18 nt, Artificial Sequence
  Synthetic
gacaaacgcuguccuuuc

SEQ ID NO: 296084 - RNA, 19 nt, Artificial Sequence
  Synthetic
agacaaacgcuguccuuuc

SEQ ID NO: 296085 - RNA, 20 nt, Artificial Sequence
  Synthetic
cagacaaacgcuguccuuuc

SEQ ID NO: 296086 - RNA, 21 nt, Artificial Sequence
  Synthetic
acagacaaacgcuguccuuuc

SEQ ID NO: 296087 - RNA, 22 nt, Artificial Sequence
  Synthetic
aacagacaaacgcuguccuuuc

SEQ ID NO: 296088 - RNA, 23 nt, Artificial Sequence
  Synthetic
aaacagacaaacgcuguccuuuc

SEQ ID NO: 296089 - RNA, 24 nt, Artificial Sequence
  Synthetic
aaaacagacaaacgcuguccuuuc

SEQ ID NO: 296090 - RNA, 18 nt, Artificial Sequence
  Synthetic
gacucuugaaaagcuuuc

SEQ ID NO: 296091 - RNA, 19 nt, Artificial Sequence
  Synthetic
ugacucuugaaaagcuuuc

SEQ ID NO: 296092 - RNA, 20 nt, Artificial Sequence
  Synthetic
augacucuugaaaagcuuuc

SEQ ID NO: 296093 - RNA, 21 nt, Artificial Sequence
  Synthetic
gaugacucuugaaaagcuuuc

SEQ ID NO: 296094 - RNA, 22 nt, Artificial Sequence
  Synthetic
ugaugacucuugaaaagcuuuc

SEQ ID NO: 296095 - RNA, 23 nt, Artificial Sequence
  Synthetic
cugaugacucuugaaaagcuuuc

SEQ ID NO: 296096 - RNA, 24 nt, Artificial Sequence
  Synthetic
ucugaugacucuugaaaagcuuuc

SEQ ID NO: 296097 - RNA, 18 nt, Artificial Sequence
  Synthetic
gagcuuuuacaggcuuuc

SEQ ID NO: 296098 - RNA, 19 nt, Artificial Sequence
  Synthetic
agagcuuuuacaggcuuuc

SEQ ID NO: 296099 - RNA, 20 nt, Artificial Sequence
  Synthetic
aagagcuuuuacaggcuuuc

SEQ ID NO: 296100 - RNA, 21 nt, Artificial Sequence
  Synthetic
aaagagcuuuuacaggcuuuc

SEQ ID NO: 296101 - RNA, 22 nt, Artificial Sequence
  Synthetic
uaaagagcuuuuacaggcuuuc

SEQ ID NO: 296102 - RNA, 23 nt, Artificial Sequence
  Synthetic
cuaaagagcuuuuacaggcuuuc

SEQ ID NO: 296103 - RNA, 24 nt, Artificial Sequence
  Synthetic
ucuaaagagcuuuuacaggcuuuc

SEQ ID NO: 296104 - RNA, 18 nt, Artificial Sequence
  Synthetic
ggcagcgugagggcuuuc

SEQ ID NO: 296105 - RNA, 19 nt, Artificial Sequence
  Synthetic
aggcagcgugagggcuuuc

SEQ ID NO: 296106 - RNA, 20 nt, Artificial Sequence
  Synthetic
gaggcagcgugagggcuuuc

SEQ ID NO: 296107 - RNA, 21 nt, Artificial Sequence
  Synthetic
ggaggcagcgugagggcuuuc

SEQ ID NO: 296108 - RNA, 22 nt, Artificial Sequence
  Synthetic
uggaggcagcgugagggcuuuc

SEQ ID NO: 296109 - RNA, 23 nt, Artificial Sequence
  Synthetic
auggaggcagcgugagggcuuuc

SEQ ID NO: 296110 - RNA, 24 nt, Artificial Sequence
  Synthetic
cauggaggcagcgugagggcuuuc

SEQ ID NO: 296111 - RNA, 18 nt, Artificial Sequence
  Synthetic
uccucuuccuuggcuuuc

SEQ ID NO: 296112 - RNA, 19 nt, Artificial Sequence
  Synthetic
guccucuuccuuggcuuuc

SEQ ID NO: 296113 - RNA, 20 nt, Artificial Sequence
  Synthetic
uguccucuuccuuggcuuuc

SEQ ID NO: 296114 - RNA, 21 nt, Artificial Sequence
  Synthetic
uuguccucuuccuuggcuuuc

SEQ ID NO: 296115 - RNA, 22 nt, Artificial Sequence
  Synthetic
guuguccucuuccuuggcuuuc

SEQ ID NO: 296116 - RNA, 23 nt, Artificial Sequence
  Synthetic
aguuguccucuuccuuggcuuuc

SEQ ID NO: 296117 - RNA, 24 nt, Artificial Sequence
  Synthetic
aaguuguccucuuccuuggcuuuc

SEQ ID NO: 296118 - RNA, 18 nt, Artificial Sequence
  Synthetic
ucuggauuagaugcuuuc

SEQ ID NO: 296119 - RNA, 19 nt, Artificial Sequence
  Synthetic
uucuggauuagaugcuuuc

SEQ ID NO: 296120 - RNA, 20 nt, Artificial Sequence
  Synthetic
uuucuggauuagaugcuuuc

SEQ ID NO: 296121 - RNA, 21 nt, Artificial Sequence
  Synthetic
auuucuggauuagaugcuuuc

SEQ ID NO: 296122 - RNA, 22 nt, Artificial Sequence
  Synthetic
cauuucuggauuagaugcuuuc

SEQ ID NO: 296123 - RNA, 23 nt, Artificial Sequence
  Synthetic
ccauuucuggauuagaugcuuuc

SEQ ID NO: 296124 - RNA, 24 nt, Artificial Sequence
  Synthetic
gccauuucuggauuagaugcuuuc

SEQ ID NO: 296125 - RNA, 18 nt, Artificial Sequence
  Synthetic
aaaauauguauugcuuuc

SEQ ID NO: 296126 - RNA, 19 nt, Artificial Sequence
  Synthetic
aaaaauauguauugcuuuc

SEQ ID NO: 296127 - RNA, 20 nt, Artificial Sequence
  Synthetic
aaaaaauauguauugcuuuc

SEQ ID NO: 296128 - RNA, 21 nt, Artificial Sequence
  Synthetic
caaaaaauauguauugcuuuc

SEQ ID NO: 296129 - RNA, 22 nt, Artificial Sequence
  Synthetic
ccaaaaaauauguauugcuuuc

SEQ ID NO: 296130 - RNA, 23 nt, Artificial Sequence
  Synthetic
uccaaaaaauauguauugcuuuc

SEQ ID NO: 296131 - RNA, 24 nt, Artificial Sequence
  Synthetic
auccaaaaaauauguauugcuuuc

SEQ ID NO: 296132 - RNA, 18 nt, Artificial Sequence
  Synthetic
aagcuauguuuaucuuuc

SEQ ID NO: 296133 - RNA, 19 nt, Artificial Sequence
  Synthetic
uaagcuauguuuaucuuuc

SEQ ID NO: 296134 - RNA, 20 nt, Artificial Sequence
  Synthetic
uuaagcuauguuuaucuuuc

SEQ ID NO: 296135 - RNA, 21 nt, Artificial Sequence
  Synthetic
auuaagcuauguuuaucuuuc

SEQ ID NO: 296136 - RNA, 22 nt, Artificial Sequence
  Synthetic
aauuaagcuauguuuaucuuuc

SEQ ID NO: 296137 - RNA, 23 nt, Artificial Sequence
  Synthetic
aaauuaagcuauguuuaucuuuc

SEQ ID NO: 296138 - RNA, 24 nt, Artificial Sequence
  Synthetic
aaaauuaagcuauguuuaucuuuc

SEQ ID NO: 296139 - RNA, 18 nt, Artificial Sequence
  Synthetic
acaaaauugaacucuuuc

SEQ ID NO: 296140 - RNA, 19 nt, Artificial Sequence
  Synthetic
cacaaaauugaacucuuuc

SEQ ID NO: 296141 - RNA, 20 nt, Artificial Sequence
  Synthetic
acacaaaauugaacucuuuc

SEQ ID NO: 296142 - RNA, 21 nt, Artificial Sequence
  Synthetic
cacacaaaauugaacucuuuc

SEQ ID NO: 296143 - RNA, 22 nt, Artificial Sequence
  Synthetic
acacacaaaauugaacucuuuc

SEQ ID NO: 296144 - RNA, 23 nt, Artificial Sequence
  Synthetic
cacacacaaaauugaacucuuuc

SEQ ID NO: 296145 - RNA, 24 nt, Artificial Sequence
  Synthetic
acacacacaaaauugaacucuuuc

SEQ ID NO: 296146 - RNA, 18 nt, Artificial Sequence
  Synthetic
gacuugguuugcucuuuc

SEQ ID NO: 296147 - RNA, 19 nt, Artificial Sequence
  Synthetic
agacuugguuugcucuuuc

SEQ ID NO: 296148 - RNA, 20 nt, Artificial Sequence
  Synthetic
uagacuugguuugcucuuuc

SEQ ID NO: 296149 - RNA, 21 nt, Artificial Sequence
  Synthetic
uuagacuugguuugcucuuuc

SEQ ID NO: 296150 - RNA, 22 nt, Artificial Sequence
  Synthetic
auuagacuugguuugcucuuuc

SEQ ID NO: 296151 - RNA, 23 nt, Artificial Sequence
  Synthetic
aauuagacuugguuugcucuuuc

SEQ ID NO: 296152 - RNA, 24 nt, Artificial Sequence
  Synthetic
aaauuagacuugguuugcucuuuc

SEQ ID NO: 296153 - RNA, 18 nt, Artificial Sequence
  Synthetic
aaucucaucaucucuuuc

SEQ ID NO: 296154 - RNA, 19 nt, Artificial Sequence
  Synthetic
caaucucaucaucucuuuc

SEQ ID NO: 296155 - RNA, 20 nt, Artificial Sequence
  Synthetic
acaaucucaucaucucuuuc

SEQ ID NO: 296156 - RNA, 21 nt, Artificial Sequence
  Synthetic
uacaaucucaucaucucuuuc

SEQ ID NO: 296157 - RNA, 22 nt, Artificial Sequence
  Synthetic
guacaaucucaucaucucuuuc

SEQ ID NO: 296158 - RNA, 23 nt, Artificial Sequence
  Synthetic
uguacaaucucaucaucucuuuc

SEQ ID NO: 296159 - RNA, 24 nt, Artificial Sequence
  Synthetic
cuguacaaucucaucaucucuuuc

SEQ ID NO: 296160 - RNA, 18 nt, Artificial Sequence
  Synthetic
ucuccauuuuucucuuuc

SEQ ID NO: 296161 - RNA, 19 nt, Artificial Sequence
  Synthetic
gucuccauuuuucucuuuc

SEQ ID NO: 296162 - RNA, 20 nt, Artificial Sequence
  Synthetic
agucuccauuuuucucuuuc

SEQ ID NO: 296163 - RNA, 21 nt, Artificial Sequence
  Synthetic
uagucuccauuuuucucuuuc

SEQ ID NO: 296164 - RNA, 22 nt, Artificial Sequence
  Synthetic
auagucuccauuuuucucuuuc

SEQ ID NO: 296165 - RNA, 23 nt, Artificial Sequence
  Synthetic
cauagucuccauuuuucucuuuc

SEQ ID NO: 296166 - RNA, 24 nt, Artificial Sequence
  Synthetic
acauagucuccauuuuucucuuuc

SEQ ID NO: 296167 - RNA, 18 nt, Artificial Sequence
  Synthetic
gugaauaaaaauucuuuc

SEQ ID NO: 296168 - RNA, 19 nt, Artificial Sequence
  Synthetic
ggugaauaaaaauucuuuc

SEQ ID NO: 296169 - RNA, 20 nt, Artificial Sequence
  Synthetic
aggugaauaaaaauucuuuc

SEQ ID NO: 296170 - RNA, 21 nt, Artificial Sequence
  Synthetic
uaggugaauaaaaauucuuuc

SEQ ID NO: 296171 - RNA, 22 nt, Artificial Sequence
  Synthetic
cuaggugaauaaaaauucuuuc

SEQ ID NO: 296172 - RNA, 23 nt, Artificial Sequence
  Synthetic
ucuaggugaauaaaaauucuuuc

SEQ ID NO: 296173 - RNA, 24 nt, Artificial Sequence
  Synthetic
aucuaggugaauaaaaauucuuuc

SEQ ID NO: 296174 - RNA, 18 nt, Artificial Sequence
  Synthetic
uucuucgugaauucuuuc

SEQ ID NO: 296175 - RNA, 19 nt, Artificial Sequence
  Synthetic
cuucuucgugaauucuuuc

SEQ ID NO: 296176 - RNA, 20 nt, Artificial Sequence
  Synthetic
ccuucuucgugaauucuuuc

SEQ ID NO: 296177 - RNA, 21 nt, Artificial Sequence
  Synthetic
accuucuucgugaauucuuuc

SEQ ID NO: 296178 - RNA, 22 nt, Artificial Sequence
  Synthetic
caccuucuucgugaauucuuuc

SEQ ID NO: 296179 - RNA, 23 nt, Artificial Sequence
  Synthetic
gcaccuucuucgugaauucuuuc

SEQ ID NO: 296180 - RNA, 24 nt, Artificial Sequence
  Synthetic
ugcaccuucuucgugaauucuuuc

SEQ ID NO: 296181 - RNA, 18 nt, Artificial Sequence
  Synthetic
auuacauuuaauucuuuc

SEQ ID NO: 296182 - RNA, 19 nt, Artificial Sequence
  Synthetic
cauuacauuuaauucuuuc

SEQ ID NO: 296183 - RNA, 20 nt, Artificial Sequence
  Synthetic
acauuacauuuaauucuuuc

SEQ ID NO: 296184 - RNA, 21 nt, Artificial Sequence
  Synthetic
uacauuacauuuaauucuuuc

SEQ ID NO: 296185 - RNA, 22 nt, Artificial Sequence
  Synthetic
uuacauuacauuuaauucuuuc

SEQ ID NO: 296186 - RNA, 23 nt, Artificial Sequence
  Synthetic
uuuacauuacauuuaauucuuuc

SEQ ID NO: 296187 - RNA, 24 nt, Artificial Sequence
  Synthetic
cuuuacauuacauuuaauucuuuc

SEQ ID NO: 296188 - RNA, 18 nt, Artificial Sequence
  Synthetic
gucauuuggucuucuuuc

SEQ ID NO: 296189 - RNA, 19 nt, Artificial Sequence
  Synthetic
ugucauuuggucuucuuuc

SEQ ID NO: 296190 - RNA, 20 nt, Artificial Sequence
  Synthetic
uugucauuuggucuucuuuc

SEQ ID NO: 296191 - RNA, 21 nt, Artificial Sequence
  Synthetic
guugucauuuggucuucuuuc

SEQ ID NO: 296192 - RNA, 22 nt, Artificial Sequence
  Synthetic
gguugucauuuggucuucuuuc

SEQ ID NO: 296193 - RNA, 23 nt, Artificial Sequence
  Synthetic
ugguugucauuuggucuucuuuc

SEQ ID NO: 296194 - RNA, 24 nt, Artificial Sequence
  Synthetic
uugguugucauuuggucuucuuuc

SEQ ID NO: 296195 - RNA, 18 nt, Artificial Sequence
  Synthetic
gaauuuauugguucuuuc

SEQ ID NO: 296196 - RNA, 19 nt, Artificial Sequence
  Synthetic
agaauuuauugguucuuuc

SEQ ID NO: 296197 - RNA, 20 nt, Artificial Sequence
  Synthetic
uagaauuuauugguucuuuc

SEQ ID NO: 296198 - RNA, 21 nt, Artificial Sequence
  Synthetic
cuagaauuuauugguucuuuc

SEQ ID NO: 296199 - RNA, 22 nt, Artificial Sequence
  Synthetic
ccuagaauuuauugguucuuuc

SEQ ID NO: 296200 - RNA, 23 nt, Artificial Sequence
  Synthetic
uccuagaauuuauugguucuuuc

SEQ ID NO: 296201 - RNA, 24 nt, Artificial Sequence
  Synthetic
uuccuagaauuuauugguucuuuc

SEQ ID NO: 296202 - RNA, 18 nt, Artificial Sequence
  Synthetic
ugcacagauuguucuuuc

SEQ ID NO: 296203 - RNA, 19 nt, Artificial Sequence
  Synthetic
cugcacagauuguucuuuc

SEQ ID NO: 296204 - RNA, 20 nt, Artificial Sequence
  Synthetic
ucugcacagauuguucuuuc

SEQ ID NO: 296205 - RNA, 21 nt, Artificial Sequence
  Synthetic
cucugcacagauuguucuuuc

SEQ ID NO: 296206 - RNA, 22 nt, Artificial Sequence
  Synthetic
ucucugcacagauuguucuuuc

SEQ ID NO: 296207 - RNA, 23 nt, Artificial Sequence
  Synthetic
gucucugcacagauuguucuuuc

SEQ ID NO: 296208 - RNA, 24 nt, Artificial Sequence
  Synthetic
ugucucugcacagauuguucuuuc

SEQ ID NO: 296209 - RNA, 18 nt, Artificial Sequence
  Synthetic
uaauuuuccauuucuuuc

SEQ ID NO: 296210 - RNA, 19 nt, Artificial Sequence
  Synthetic
uuaauuuuccauuucuuuc

SEQ ID NO: 296211 - RNA, 20 nt, Artificial Sequence
  Synthetic
uuuaauuuuccauuucuuuc

SEQ ID NO: 296212 - RNA, 21 nt, Artificial Sequence
  Synthetic
auuuaauuuuccauuucuuuc

SEQ ID NO: 296213 - RNA, 22 nt, Artificial Sequence
  Synthetic
aauuuaauuuuccauuucuuuc

SEQ ID NO: 296214 - RNA, 23 nt, Artificial Sequence
  Synthetic
caauuuaauuuuccauuucuuuc

SEQ ID NO: 296215 - RNA, 24 nt, Artificial Sequence
  Synthetic
gcaauuuaauuuuccauuucuuuc

SEQ ID NO: 296216 - RNA, 18 nt, Artificial Sequence
  Synthetic
uaaagaaaucuuucuuuc

SEQ ID NO: 296217 - RNA, 19 nt, Artificial Sequence
  Synthetic
uuaaagaaaucuuucuuuc

SEQ ID NO: 296218 - RNA, 20 nt, Artificial Sequence
  Synthetic
uuuaaagaaaucuuucuuuc

SEQ ID NO: 296219 - RNA, 21 nt, Artificial Sequence
  Synthetic
uuuuaaagaaaucuuucuuuc

SEQ ID NO: 296220 - RNA, 22 nt, Artificial Sequence
  Synthetic
uuuuuaaagaaaucuuucuuuc

SEQ ID NO: 296221 - RNA, 23 nt, Artificial Sequence
  Synthetic
uuuuuuaaagaaaucuuucuuuc

SEQ ID NO: 296222 - RNA, 24 nt, Artificial Sequence
  Synthetic
uuuuuuuaaagaaaucuuucuuuc

SEQ ID NO: 296223 - RNA, 18 nt, Artificial Sequence
  Synthetic
cucaagacauuuucuuuc

SEQ ID NO: 296224 - RNA, 19 nt, Artificial Sequence
  Synthetic
ccucaagacauuuucuuuc

SEQ ID NO: 296225 - RNA, 20 nt, Artificial Sequence
  Synthetic
accucaagacauuuucuuuc

SEQ ID NO: 296226 - RNA, 21 nt, Artificial Sequence
  Synthetic
aaccucaagacauuuucuuuc

SEQ ID NO: 296227 - RNA, 22 nt, Artificial Sequence
  Synthetic
uaaccucaagacauuuucuuuc

SEQ ID NO: 296228 - RNA, 23 nt, Artificial Sequence
  Synthetic
cuaaccucaagacauuuucuuuc

SEQ ID NO: 296229 - RNA, 24 nt, Artificial Sequence
  Synthetic
ucuaaccucaagacauuuucuuuc

SEQ ID NO: 296230 - RNA, 18 nt, Artificial Sequence
  Synthetic
uuucuuuucuuuucuuuc

SEQ ID NO: 296231 - RNA, 19 nt, Artificial Sequence
  Synthetic
cuuucuuuucuuuucuuuc

SEQ ID NO: 296232 - RNA, 20 nt, Artificial Sequence
  Synthetic
ucuuucuuuucuuuucuuuc

SEQ ID NO: 296233 - RNA, 21 nt, Artificial Sequence
  Synthetic
uucuuucuuuucuuuucuuuc

SEQ ID NO: 296234 - RNA, 22 nt, Artificial Sequence
  Synthetic
uuucuuucuuuucuuuucuuuc

SEQ ID NO: 296235 - RNA, 23 nt, Artificial Sequence
  Synthetic
cuuucuuucuuuucuuuucuuuc

SEQ ID NO: 296236 - RNA, 24 nt, Artificial Sequence
  Synthetic
ucuuucuuucuuuucuuuucuuuc

SEQ ID NO: 296237 - RNA, 18 nt, Artificial Sequence
  Synthetic
agaggaaguaaaaguuuc

SEQ ID NO: 296238 - RNA, 19 nt, Artificial Sequence
  Synthetic
aagaggaaguaaaaguuuc

SEQ ID NO: 296239 - RNA, 20 nt, Artificial Sequence
  Synthetic
gaagaggaaguaaaaguuuc

SEQ ID NO: 296240 - RNA, 21 nt, Artificial Sequence
  Synthetic
ugaagaggaaguaaaaguuuc

SEQ ID NO: 296241 - RNA, 22 nt, Artificial Sequence
  Synthetic
gugaagaggaaguaaaaguuuc

SEQ ID NO: 296242 - RNA, 23 nt, Artificial Sequence
  Synthetic
agugaagaggaaguaaaaguuuc

SEQ ID NO: 296243 - RNA, 24 nt, Artificial Sequence
  Synthetic
uagugaagaggaaguaaaaguuuc

SEQ ID NO: 296244 - RNA, 18 nt, Artificial Sequence
  Synthetic
gucuuuuagggaaguuuc

SEQ ID NO: 296245 - RNA, 19 nt, Artificial Sequence
  Synthetic
ugucuuuuagggaaguuuc

SEQ ID NO: 296246 - RNA, 20 nt, Artificial Sequence
  Synthetic
uugucuuuuagggaaguuuc

SEQ ID NO: 296247 - RNA, 21 nt, Artificial Sequence
  Synthetic
auugucuuuuagggaaguuuc

SEQ ID NO: 296248 - RNA, 22 nt, Artificial Sequence
  Synthetic
aauugucuuuuagggaaguuuc

SEQ ID NO: 296249 - RNA, 23 nt, Artificial Sequence
  Synthetic
caauugucuuuuagggaaguuuc

SEQ ID NO: 296250 - RNA, 24 nt, Artificial Sequence
  Synthetic
ccaauugucuuuuagggaaguuuc

SEQ ID NO: 296251 - RNA, 18 nt, Artificial Sequence
  Synthetic
cuagaaugaauaaguuuc

SEQ ID NO: 296252 - RNA, 19 nt, Artificial Sequence
  Synthetic
ucuagaaugaauaaguuuc

SEQ ID NO: 296253 - RNA, 20 nt, Artificial Sequence
  Synthetic
uucuagaaugaauaaguuuc

SEQ ID NO: 296254 - RNA, 21 nt, Artificial Sequence
  Synthetic
auucuagaaugaauaaguuuc

SEQ ID NO: 296255 - RNA, 22 nt, Artificial Sequence
  Synthetic
uauucuagaaugaauaaguuuc

SEQ ID NO: 296256 - RNA, 23 nt, Artificial Sequence
  Synthetic
auauucuagaaugaauaaguuuc

SEQ ID NO: 296257 - RNA, 24 nt, Artificial Sequence
  Synthetic
aauauucuagaaugaauaaguuuc

SEQ ID NO: 296258 - RNA, 18 nt, Artificial Sequence
  Synthetic
aagacaaaaguaaguuuc

SEQ ID NO: 296259 - RNA, 19 nt, Artificial Sequence
  Synthetic
uaagacaaaaguaaguuuc

SEQ ID NO: 296260 - RNA, 20 nt, Artificial Sequence
  Synthetic
uuaagacaaaaguaaguuuc

SEQ ID NO: 296261 - RNA, 21 nt, Artificial Sequence
  Synthetic
guuaagacaaaaguaaguuuc

SEQ ID NO: 296262 - RNA, 22 nt, Artificial Sequence
  Synthetic
gguuaagacaaaaguaaguuuc

SEQ ID NO: 296263 - RNA, 23 nt, Artificial Sequence
  Synthetic
ugguuaagacaaaaguaaguuuc

SEQ ID NO: 296264 - RNA, 24 nt, Artificial Sequence
  Synthetic
gugguuaagacaaaaguaaguuuc

SEQ ID NO: 296265 - RNA, 18 nt, Artificial Sequence
  Synthetic
gccacgaugguaaguuuc

SEQ ID NO: 296266 - RNA, 19 nt, Artificial Sequence
  Synthetic
ugccacgaugguaaguuuc

SEQ ID NO: 296267 - RNA, 20 nt, Artificial Sequence
  Synthetic
augccacgaugguaaguuuc

SEQ ID NO: 296268 - RNA, 21 nt, Artificial Sequence
  Synthetic
uaugccacgaugguaaguuuc

SEQ ID NO: 296269 - RNA, 22 nt, Artificial Sequence
  Synthetic
uuaugccacgaugguaaguuuc

SEQ ID NO: 296270 - RNA, 23 nt, Artificial Sequence
  Synthetic
cuuaugccacgaugguaaguuuc

SEQ ID NO: 296271 - RNA, 24 nt, Artificial Sequence
  Synthetic
ccuuaugccacgaugguaaguuuc

SEQ ID NO: 296272 - RNA, 18 nt, Artificial Sequence
  Synthetic
gccaugauuguaaguuuc

SEQ ID NO: 296273 - RNA, 19 nt, Artificial Sequence
  Synthetic
ugccaugauuguaaguuuc

SEQ ID NO: 296274 - RNA, 20 nt, Artificial Sequence
  Synthetic
cugccaugauuguaaguuuc

SEQ ID NO: 296275 - RNA, 22 nt, Artificial Sequence
  Synthetic
uucugccaugauuguaaguuuc

SEQ ID NO: 296276 - RNA, 23 nt, Artificial Sequence
  Synthetic
cuucugccaugauuguaaguuuc

SEQ ID NO: 296277 - RNA, 24 nt, Artificial Sequence
  Synthetic
ccuucugccaugauuguaaguuuc

SEQ ID NO: 296278 - RNA, 18 nt, Artificial Sequence
  Synthetic
uccaugauuguaaguuuc

SEQ ID NO: 296279 - RNA, 19 nt, Artificial Sequence
  Synthetic
cuccaugauuguaaguuuc

SEQ ID NO: 296280 - RNA, 20 nt, Artificial Sequence
  Synthetic
ccuccaugauuguaaguuuc

SEQ ID NO: 296281 - RNA, 21 nt, Artificial Sequence
  Synthetic
uccuccaugauuguaaguuuc

SEQ ID NO: 296282 - RNA, 22 nt, Artificial Sequence
  Synthetic
uuccuccaugauuguaaguuuc

SEQ ID NO: 296283 - RNA, 23 nt, Artificial Sequence
  Synthetic
cuuccuccaugauuguaaguuuc

SEQ ID NO: 296284 - RNA, 24 nt, Artificial Sequence
  Synthetic
ccuuccuccaugauuguaaguuuc

SEQ ID NO: 296285 - RNA, 18 nt, Artificial Sequence
  Synthetic
acuaugauuguaaguuuc

SEQ ID NO: 296286 - RNA, 19 nt, Artificial Sequence
  Synthetic
uacuaugauuguaaguuuc

SEQ ID NO: 296287 - RNA, 20 nt, Artificial Sequence
  Synthetic
cuacuaugauuguaaguuuc

SEQ ID NO: 296288 - RNA, 21 nt, Artificial Sequence
  Synthetic
ucuacuaugauuguaaguuuc

SEQ ID NO: 296289 - RNA, 22 nt, Artificial Sequence
  Synthetic
uucuacuaugauuguaaguuuc

SEQ ID NO: 296290 - RNA, 23 nt, Artificial Sequence
  Synthetic
cuucuacuaugauuguaaguuuc

SEQ ID NO: 296291 - RNA, 24 nt, Artificial Sequence
  Synthetic
ccuucuacuaugauuguaaguuuc

SEQ ID NO: 296292 - RNA, 18 nt, Artificial Sequence
  Synthetic
auagaacaauagaguuuc

SEQ ID NO: 296293 - RNA, 19 nt, Artificial Sequence
  Synthetic
uauagaacaauagaguuuc

SEQ ID NO: 296294 - RNA, 20 nt, Artificial Sequence
  Synthetic
uuauagaacaauagaguuuc

SEQ ID NO: 296295 - RNA, 21 nt, Artificial Sequence
  Synthetic
uuuauagaacaauagaguuuc

SEQ ID NO: 296296 - RNA, 22 nt, Artificial Sequence
  Synthetic
auuuauagaacaauagaguuuc

SEQ ID NO: 296297 - RNA, 23 nt, Artificial Sequence
  Synthetic
aauuuauagaacaauagaguuuc

SEQ ID NO: 296298 - RNA, 24 nt, Artificial Sequence
  Synthetic
aaauuuauagaacaauagaguuuc

SEQ ID NO: 296299 - RNA, 18 nt, Artificial Sequence
  Synthetic
cauuaagaauauaguuuc

SEQ ID NO: 296300 - RNA, 19 nt, Artificial Sequence
  Synthetic
gcauuaagaauauaguuuc

SEQ ID NO: 296301 - RNA, 20 nt, Artificial Sequence
  Synthetic
agcauuaagaauauaguuuc

SEQ ID NO: 296302 - RNA, 21 nt, Artificial Sequence
  Synthetic
uagcauuaagaauauaguuuc

SEQ ID NO: 296303 - RNA, 22 nt, Artificial Sequence
  Synthetic
auagcauuaagaauauaguuuc

SEQ ID NO: 296304 - RNA, 23 nt, Artificial Sequence
  Synthetic
aauagcauuaagaauauaguuuc

SEQ ID NO: 296305 - RNA, 24 nt, Artificial Sequence
  Synthetic
caauagcauuaagaauauaguuuc

SEQ ID NO: 296306 - RNA, 18 nt, Artificial Sequence
  Synthetic
gaaaggggguauaguuuc

SEQ ID NO: 296307 - RNA, 19 nt, Artificial Sequence
  Synthetic
ugaaaggggguauaguuuc

SEQ ID NO: 296308 - RNA, 20 nt, Artificial Sequence
  Synthetic
gugaaaggggguauaguuuc

SEQ ID NO: 296309 - RNA, 21 nt, Artificial Sequence
  Synthetic
ugugaaaggggguauaguuuc

SEQ ID NO: 296310 - RNA, 22 nt, Artificial Sequence
  Synthetic
cugugaaaggggguauaguuuc

SEQ ID NO: 296311 - RNA, 23 nt, Artificial Sequence
  Synthetic
acugugaaaggggguauaguuuc

SEQ ID NO: 296312 - RNA, 24 nt, Artificial Sequence
  Synthetic
uacugugaaaggggguauaguuuc

SEQ ID NO: 296313 - RNA, 18 nt, Artificial Sequence
  Synthetic
uaaaaauaaccuaguuuc

SEQ ID NO: 296314 - RNA, 19 nt, Artificial Sequence
  Synthetic
auaaaaauaaccuaguuuc

SEQ ID NO: 296315 - RNA, 20 nt, Artificial Sequence
  Synthetic
aauaaaaauaaccuaguuuc

SEQ ID NO: 296316 - RNA, 21 nt, Artificial Sequence
  Synthetic
gaauaaaaauaaccuaguuuc

SEQ ID NO: 296317 - RNA, 22 nt, Artificial Sequence
  Synthetic
agaauaaaaauaaccuaguuuc

SEQ ID NO: 296318 - RNA, 23 nt, Artificial Sequence
  Synthetic
gagaauaaaaauaaccuaguuuc

SEQ ID NO: 296319 - RNA, 24 nt, Artificial Sequence
  Synthetic
agagaauaaaaauaaccuaguuuc

SEQ ID NO: 296320 - RNA, 18 nt, Artificial Sequence
  Synthetic
ucuugaguuaguaguuuc

SEQ ID NO: 296321 - RNA, 19 nt, Artificial Sequence
  Synthetic
aucuugaguuaguaguuuc

SEQ ID NO: 296322 - RNA, 20 nt, Artificial Sequence
  Synthetic
gaucuugaguuaguaguuuc

SEQ ID NO: 296323 - RNA, 21 nt, Artificial Sequence
  Synthetic
ugaucuugaguuaguaguuuc

SEQ ID NO: 296324 - RNA, 22 nt, Artificial Sequence
  Synthetic
uugaucuugaguuaguaguuuc

SEQ ID NO: 296325 - RNA, 23 nt, Artificial Sequence
  Synthetic
cuugaucuugaguuaguaguuuc

SEQ ID NO: 296326 - RNA, 24 nt, Artificial Sequence
  Synthetic
gcuugaucuugaguuaguaguuuc

SEQ ID NO: 296327 - RNA, 18 nt, Artificial Sequence
  Synthetic
ucuucuuuuuguaguuuc

SEQ ID NO: 296328 - RNA, 19 nt, Artificial Sequence
  Synthetic
uucuucuuuuuguaguuuc

SEQ ID NO: 296329 - RNA, 20 nt, Artificial Sequence
  Synthetic
auucuucuuuuuguaguuuc

SEQ ID NO: 296330 - RNA, 21 nt, Artificial Sequence
  Synthetic
cauucuucuuuuuguaguuuc

SEQ ID NO: 296331 - RNA, 22 nt, Artificial Sequence
  Synthetic
ucauucuucuuuuuguaguuuc

SEQ ID NO: 296332 - RNA, 23 nt, Artificial Sequence
  Synthetic
uucauucuucuuuuuguaguuuc

SEQ ID NO: 296333 - RNA, 24 nt, Artificial Sequence
  Synthetic
auucauucuucuuuuuguaguuuc

SEQ ID NO: 296334 - RNA, 18 nt, Artificial Sequence
  Synthetic
accuacugcaaagguuuc

SEQ ID NO: 296335 - RNA, 19 nt, Artificial Sequence
  Synthetic
gaccuacugcaaagguuuc

SEQ ID NO: 296336 - RNA, 20 nt, Artificial Sequence
  Synthetic
agaccuacugcaaagguuuc

SEQ ID NO: 296337 - RNA, 21 nt, Artificial Sequence
  Synthetic
gagaccuacugcaaagguuuc

SEQ ID NO: 296338 - RNA, 22 nt, Artificial Sequence
  Synthetic
ggagaccuacugcaaagguuuc

SEQ ID NO: 296339 - RNA, 23 nt, Artificial Sequence
  Synthetic
aggagaccuacugcaaagguuuc

SEQ ID NO: 296340 - RNA, 24 nt, Artificial Sequence
  Synthetic
aaggagaccuacugcaaagguuuc

SEQ ID NO: 296341 - RNA, 18 nt, Artificial Sequence
  Synthetic
gaagcagagaaagguuuc

SEQ ID NO: 296342 - RNA, 19 nt, Artificial Sequence
  Synthetic
agaagcagagaaagguuuc

SEQ ID NO: 296343 - RNA, 20 nt, Artificial Sequence
  Synthetic
aagaagcagagaaagguuuc

SEQ ID NO: 296344 - RNA, 21 nt, Artificial Sequence
  Synthetic
aaagaagcagagaaagguuuc

SEQ ID NO: 296345 - RNA, 22 nt, Artificial Sequence
  Synthetic
aaaagaagcagagaaagguuuc

SEQ ID NO: 296346 - RNA, 23 nt, Artificial Sequence
  Synthetic
aaaaagaagcagagaaagguuuc

SEQ ID NO: 296347 - RNA, 24 nt, Artificial Sequence
  Synthetic
uaaaaagaagcagagaaagguuuc

SEQ ID NO: 296348 - RNA, 18 nt, Artificial Sequence
  Synthetic
uggccaccuaaagguuuc

SEQ ID NO: 296349 - RNA, 19 nt, Artificial Sequence
  Synthetic
uuggccaccuaaagguuuc

SEQ ID NO: 296350 - RNA, 20 nt, Artificial Sequence
  Synthetic
cuuggccaccuaaagguuuc

SEQ ID NO: 296351 - RNA, 21 nt, Artificial Sequence
  Synthetic
ucuuggccaccuaaagguuuc

SEQ ID NO: 296352 - RNA, 22 nt, Artificial Sequence
  Synthetic
gucuuggccaccuaaagguuuc

SEQ ID NO: 296353 - RNA, 23 nt, Artificial Sequence
  Synthetic
agucuuggccaccuaaagguuuc

SEQ ID NO: 296354 - RNA, 24 nt, Artificial Sequence
  Synthetic
aagucuuggccaccuaaagguuuc

SEQ ID NO: 296355 - RNA, 18 nt, Artificial Sequence
  Synthetic
aaaagacuuaaagguuuc

SEQ ID NO: 296356 - RNA, 19 nt, Artificial Sequence
  Synthetic
aaaaagacuuaaagguuuc

SEQ ID NO: 296357 - RNA, 20 nt, Artificial Sequence
  Synthetic
uaaaaagacuuaaagguuuc

SEQ ID NO: 296358 - RNA, 21 nt, Artificial Sequence
  Synthetic
uuaaaaagacuuaaagguuuc

SEQ ID NO: 296359 - RNA, 22 nt, Artificial Sequence
  Synthetic
cuuaaaaagacuuaaagguuuc

SEQ ID NO: 296360 - RNA, 23 nt, Artificial Sequence
  Synthetic
gcuuaaaaagacuuaaagguuuc

SEQ ID NO: 296361 - RNA, 24 nt, Artificial Sequence
  Synthetic
agcuuaaaaagacuuaaagguuuc

SEQ ID NO: 296362 - RNA, 18 nt, Artificial Sequence
  Synthetic
ggugacauucaagguuuc

SEQ ID NO: 296363 - RNA, 19 nt, Artificial Sequence
  Synthetic
uggugacauucaagguuuc

SEQ ID NO: 296364 - RNA, 20 nt, Artificial Sequence
  Synthetic
cuggugacauucaagguuuc

SEQ ID NO: 296365 - RNA, 21 nt, Artificial Sequence
  Synthetic
ucuggugacauucaagguuuc

SEQ ID NO: 296366 - RNA, 22 nt, Artificial Sequence
  Synthetic
aucuggugacauucaagguuuc

SEQ ID NO: 296367 - RNA, 23 nt, Artificial Sequence
  Synthetic
aaucuggugacauucaagguuuc

SEQ ID NO: 296368 - RNA, 24 nt, Artificial Sequence
  Synthetic
aaaucuggugacauucaagguuuc

SEQ ID NO: 296369 - RNA, 18 nt, Artificial Sequence
  Synthetic
auuuuccuuucagguuuc

SEQ ID NO: 296370 - RNA, 19 nt, Artificial Sequence
  Synthetic
uauuuuccuuucagguuuc

SEQ ID NO: 296371 - RNA, 20 nt, Artificial Sequence
  Synthetic
guauuuuccuuucagguuuc

SEQ ID NO: 296372 - RNA, 21 nt, Artificial Sequence
  Synthetic
uguauuuuccuuucagguuuc

SEQ ID NO: 296373 - RNA, 22 nt, Artificial Sequence
  Synthetic
auguauuuuccuuucagguuuc

SEQ ID NO: 296374 - RNA, 23 nt, Artificial Sequence
  Synthetic
aauguauuuuccuuucagguuuc

SEQ ID NO: 296375 - RNA, 24 nt, Artificial Sequence
  Synthetic
aaauguauuuuccuuucagguuuc

SEQ ID NO: 296376 - RNA, 18 nt, Artificial Sequence
  Synthetic
aaaccacaucuagguuuc

SEQ ID NO: 296377 - RNA, 19 nt, Artificial Sequence
  Synthetic
uaaaccacaucuagguuuc

SEQ ID NO: 296378 - RNA, 20 nt, Artificial Sequence
  Synthetic
guaaaccacaucuagguuuc

SEQ ID NO: 296379 - RNA, 21 nt, Artificial Sequence
  Synthetic
aguaaaccacaucuagguuuc

SEQ ID NO: 296380 - RNA, 22 nt, Artificial Sequence
  Synthetic
gaguaaaccacaucuagguuuc

SEQ ID NO: 296381 - RNA, 23 nt, Artificial Sequence
  Synthetic
agaguaaaccacaucuagguuuc

SEQ ID NO: 296382 - RNA, 24 nt, Artificial Sequence
  Synthetic
aagaguaaaccacaucuagguuuc

SEQ ID NO: 296383 - RNA, 18 nt, Artificial Sequence
  Synthetic
uauuucaggcuggguuuc

SEQ ID NO: 296384 - RNA, 19 nt, Artificial Sequence
  Synthetic
auauuucaggcuggguuuc

SEQ ID NO: 296385 - RNA, 20 nt, Artificial Sequence
  Synthetic
cauauuucaggcuggguuuc

SEQ ID NO: 296386 - RNA, 21 nt, Artificial Sequence
  Synthetic
acauauuucaggcuggguuuc

SEQ ID NO: 296387 - RNA, 22 nt, Artificial Sequence
  Synthetic
uacauauuucaggcuggguuuc

SEQ ID NO: 296388 - RNA, 23 nt, Artificial Sequence
  Synthetic
cuacauauuucaggcuggguuuc

SEQ ID NO: 296389 - RNA, 24 nt, Artificial Sequence
  Synthetic
gcuacauauuucaggcuggguuuc

SEQ ID NO: 296390 - RNA, 18 nt, Artificial Sequence
  Synthetic
uuauacucaaaugguuuc

SEQ ID NO: 296391 - RNA, 19 nt, Artificial Sequence
  Synthetic
uuuauacucaaaugguuuc

SEQ ID NO: 296392 - RNA, 20 nt, Artificial Sequence
  Synthetic
uuuuauacucaaaugguuuc

SEQ ID NO: 296393 - RNA, 21 nt, Artificial Sequence
  Synthetic
auuuuauacucaaaugguuuc

SEQ ID NO: 296394 - RNA, 22 nt, Artificial Sequence
  Synthetic
uauuuuauacucaaaugguuuc

SEQ ID NO: 296395 - RNA, 23 nt, Artificial Sequence
  Synthetic
guauuuuauacucaaaugguuuc

SEQ ID NO: 296396 - RNA, 24 nt, Artificial Sequence
  Synthetic
aguauuuuauacucaaaugguuuc

SEQ ID NO: 296397 - RNA, 18 nt, Artificial Sequence
  Synthetic
aaaggaaaacaugguuuc

SEQ ID NO: 296398 - RNA, 19 nt, Artificial Sequence
  Synthetic
aaaaggaaaacaugguuuc

SEQ ID NO: 296399 - RNA, 20 nt, Artificial Sequence
  Synthetic
uaaaaggaaaacaugguuuc

SEQ ID NO: 296400 - RNA, 21 nt, Artificial Sequence
  Synthetic
cuaaaaggaaaacaugguuuc

SEQ ID NO: 296401 - RNA, 22 nt, Artificial Sequence
  Synthetic
ccuaaaaggaaaacaugguuuc

SEQ ID NO: 296402 - RNA, 23 nt, Artificial Sequence
  Synthetic
gccuaaaaggaaaacaugguuuc

SEQ ID NO: 296403 - RNA, 24 nt, Artificial Sequence
  Synthetic
ggccuaaaaggaaaacaugguuuc

SEQ ID NO: 296404 - RNA, 18 nt, Artificial Sequence
  Synthetic
cucucccucucugguuuc

SEQ ID NO: 296405 - RNA, 19 nt, Artificial Sequence
  Synthetic
ucucucccucucugguuuc

SEQ ID NO: 296406 - RNA, 20 nt, Artificial Sequence
  Synthetic
gucucucccucucugguuuc

SEQ ID NO: 296407 - RNA, 21 nt, Artificial Sequence
  Synthetic
agucucucccucucugguuuc

SEQ ID NO: 296408 - RNA, 22 nt, Artificial Sequence
  Synthetic
aagucucucccucucugguuuc

SEQ ID NO: 296409 - RNA, 23 nt, Artificial Sequence
  Synthetic
uaagucucucccucucugguuuc

SEQ ID NO: 296410 - RNA, 24 nt, Artificial Sequence
  Synthetic
auaagucucucccucucugguuuc

SEQ ID NO: 296411 - RNA, 18 nt, Artificial Sequence
  Synthetic
agcaaagauugugguuuc

SEQ ID NO: 296412 - RNA, 19 nt, Artificial Sequence
  Synthetic
gagcaaagauugugguuuc

SEQ ID NO: 296413 - RNA, 20 nt, Artificial Sequence
  Synthetic
ugagcaaagauugugguuuc

SEQ ID NO: 296414 - RNA, 21 nt, Artificial Sequence
  Synthetic
augagcaaagauugugguuuc

SEQ ID NO: 296415 - RNA, 22 nt, Artificial Sequence
  Synthetic
gaugagcaaagauugugguuuc

SEQ ID NO: 296416 - RNA, 23 nt, Artificial Sequence
  Synthetic
ggaugagcaaagauugugguuuc

SEQ ID NO: 296417 - RNA, 24 nt, Artificial Sequence
  Synthetic
uggaugagcaaagauugugguuuc

SEQ ID NO: 296418 - RNA, 18 nt, Artificial Sequence
  Synthetic
cucucucaacaauguuuc

SEQ ID NO: 296419 - RNA, 19 nt, Artificial Sequence
  Synthetic
ucucucucaacaauguuuc

SEQ ID NO: 296420 - RNA, 20 nt, Artificial Sequence
  Synthetic
uucucucucaacaauguuuc

SEQ ID NO: 296421 - RNA, 21 nt, Artificial Sequence
  Synthetic
cuucucucucaacaauguuuc

SEQ ID NO: 296422 - RNA, 22 nt, Artificial Sequence
  Synthetic
gcuucucucucaacaauguuuc

SEQ ID NO: 296423 - RNA, 23 nt, Artificial Sequence
  Synthetic
ugcuucucucucaacaauguuuc

SEQ ID NO: 296424 - RNA, 24 nt, Artificial Sequence
  Synthetic
augcuucucucucaacaauguuuc

SEQ ID NO: 296425 - RNA, 18 nt, Artificial Sequence
  Synthetic
cuuuaccccuaauguuuc

SEQ ID NO: 296426 - RNA, 19 nt, Artificial Sequence
  Synthetic
ccuuuaccccuaauguuuc

SEQ ID NO: 296427 - RNA, 20 nt, Artificial Sequence
  Synthetic
cccuuuaccccuaauguuuc

SEQ ID NO: 296428 - RNA, 21 nt, Artificial Sequence
  Synthetic
ucccuuuaccccuaauguuuc

SEQ ID NO: 296429 - RNA, 22 nt, Artificial Sequence
  Synthetic
uucccuuuaccccuaauguuuc

SEQ ID NO: 296430 - RNA, 23 nt, Artificial Sequence
  Synthetic
uuucccuuuaccccuaauguuuc

SEQ ID NO: 296431 - RNA, 24 nt, Artificial Sequence
  Synthetic
guuucccuuuaccccuaauguuuc

SEQ ID NO: 296432 - RNA, 18 nt, Artificial Sequence
  Synthetic
aucaauuuggcauguuuc

SEQ ID NO: 296433 - RNA, 19 nt, Artificial Sequence
  Synthetic
aaucaauuuggcauguuuc

SEQ ID NO: 296434 - RNA, 20 nt, Artificial Sequence
  Synthetic
aaaucaauuuggcauguuuc

SEQ ID NO: 296435 - RNA, 21 nt, Artificial Sequence
  Synthetic
aaaaucaauuuggcauguuuc

SEQ ID NO: 296436 - RNA, 22 nt, Artificial Sequence
  Synthetic
uaaaaucaauuuggcauguuuc

SEQ ID NO: 296437 - RNA, 23 nt, Artificial Sequence
  Synthetic
auaaaaucaauuuggcauguuuc

SEQ ID NO: 296438 - RNA, 24 nt, Artificial Sequence
  Synthetic
gauaaaaucaauuuggcauguuuc

SEQ ID NO: 296439 - RNA, 18 nt, Artificial Sequence
  Synthetic
ugguagauugcauguuuc

SEQ ID NO: 296440 - RNA, 19 nt, Artificial Sequence
  Synthetic
uugguagauugcauguuuc

SEQ ID NO: 296441 - RNA, 20 nt, Artificial Sequence
  Synthetic
auugguagauugcauguuuc

SEQ ID NO: 296442 - RNA, 21 nt, Artificial Sequence
  Synthetic
uauugguagauugcauguuuc

SEQ ID NO: 296443 - RNA, 22 nt, Artificial Sequence
  Synthetic
auauugguagauugcauguuuc

SEQ ID NO: 296444 - RNA, 23 nt, Artificial Sequence
  Synthetic
aauauugguagauugcauguuuc

SEQ ID NO: 296445 - RNA, 24 nt, Artificial Sequence
  Synthetic
caauauugguagauugcauguuuc

SEQ ID NO: 296446 - RNA, 18 nt, Artificial Sequence
  Synthetic
uuaugugaaauauguuuc

SEQ ID NO: 296447 - RNA, 19 nt, Artificial Sequence
  Synthetic
auuaugugaaauauguuuc

SEQ ID NO: 296448 - RNA, 20 nt, Artificial Sequence
  Synthetic
aauuaugugaaauauguuuc

SEQ ID NO: 296449 - RNA, 21 nt, Artificial Sequence
  Synthetic
aaauuaugugaaauauguuuc

SEQ ID NO: 296450 - RNA, 22 nt, Artificial Sequence
  Synthetic
gaaauuaugugaaauauguuuc

SEQ ID NO: 296451 - RNA, 23 nt, Artificial Sequence
  Synthetic
agaaauuaugugaaauauguuuc

SEQ ID NO: 296452 - RNA, 24 nt, Artificial Sequence
  Synthetic
uagaaauuaugugaaauauguuuc

SEQ ID NO: 296453 - RNA, 18 nt, Artificial Sequence
  Synthetic
uuaaggaaauacuguuuc

SEQ ID NO: 296454 - RNA, 19 nt, Artificial Sequence
  Synthetic
uuuaaggaaauacuguuuc

SEQ ID NO: 296455 - RNA, 20 nt, Artificial Sequence
  Synthetic
auuuaaggaaauacuguuuc

SEQ ID NO: 296456 - RNA, 21 nt, Artificial Sequence
  Synthetic
cauuuaaggaaauacuguuuc

SEQ ID NO: 296457 - RNA, 22 nt, Artificial Sequence
  Synthetic
acauuuaaggaaauacuguuuc

SEQ ID NO: 296458 - RNA, 23 nt, Artificial Sequence
  Synthetic
cacauuuaaggaaauacuguuuc

SEQ ID NO: 296459 - RNA, 24 nt, Artificial Sequence
  Synthetic
ccacauuuaaggaaauacuguuuc

SEQ ID NO: 296460 - RNA, 18 nt, Artificial Sequence
  Synthetic
uguuuaugaggcuguuuc

SEQ ID NO: 296461 - RNA, 19 nt, Artificial Sequence
  Synthetic
guguuuaugaggcuguuuc

SEQ ID NO: 296462 - RNA, 20 nt, Artificial Sequence
  Synthetic
uguguuuaugaggcuguuuc

SEQ ID NO: 296463 - RNA, 21 nt, Artificial Sequence
  Synthetic
guguguuuaugaggcuguuuc

SEQ ID NO: 296464 - RNA, 22 nt, Artificial Sequence
  Synthetic
gguguguuuaugaggcuguuuc

SEQ ID NO: 296465 - RNA, 23 nt, Artificial Sequence
  Synthetic
ggguguguuuaugaggcuguuuc

SEQ ID NO: 296466 - RNA, 24 nt, Artificial Sequence
  Synthetic
uggguguguuuaugaggcuguuuc

SEQ ID NO: 296467 - RNA, 18 nt, Artificial Sequence
  Synthetic
cauagcaacaucuguuuc

SEQ ID NO: 296468 - RNA, 19 nt, Artificial Sequence
  Synthetic
gcauagcaacaucuguuuc

SEQ ID NO: 296469 - RNA, 20 nt, Artificial Sequence
  Synthetic
agcauagcaacaucuguuuc

SEQ ID NO: 296470 - RNA, 21 nt, Artificial Sequence
  Synthetic
aagcauagcaacaucuguuuc

SEQ ID NO: 296471 - RNA, 22 nt, Artificial Sequence
  Synthetic
gaagcauagcaacaucuguuuc

SEQ ID NO: 296472 - RNA, 23 nt, Artificial Sequence
  Synthetic
ggaagcauagcaacaucuguuuc

SEQ ID NO: 296473 - RNA, 24 nt, Artificial Sequence
  Synthetic
aggaagcauagcaacaucuguuuc

SEQ ID NO: 296474 - RNA, 18 nt, Artificial Sequence
  Synthetic
cuaugggaauucuguuuc

SEQ ID NO: 296475 - RNA, 19 nt, Artificial Sequence
  Synthetic
acuaugggaauucuguuuc

SEQ ID NO: 296476 - RNA, 20 nt, Artificial Sequence
  Synthetic
uacuaugggaauucuguuuc

SEQ ID NO: 296477 - RNA, 21 nt, Artificial Sequence
  Synthetic
uuacuaugggaauucuguuuc

SEQ ID NO: 296478 - RNA, 22 nt, Artificial Sequence
  Synthetic
uuuacuaugggaauucuguuuc

SEQ ID NO: 296479 - RNA, 23 nt, Artificial Sequence
  Synthetic
uuuuacuaugggaauucuguuuc

SEQ ID NO: 296480 - RNA, 24 nt, Artificial Sequence
  Synthetic
cuuuuacuaugggaauucuguuuc

SEQ ID NO: 296481 - RNA, 18 nt, Artificial Sequence
  Synthetic
uuaccagucaaguguuuc

SEQ ID NO: 296482 - RNA, 19 nt, Artificial Sequence
  Synthetic
cuuaccagucaaguguuuc

SEQ ID NO: 296483 - RNA, 20 nt, Artificial Sequence
  Synthetic
ccuuaccagucaaguguuuc

SEQ ID NO: 296484 - RNA, 21 nt, Artificial Sequence
  Synthetic
cccuuaccagucaaguguuuc

SEQ ID NO: 296485 - RNA, 22 nt, Artificial Sequence
  Synthetic
ucccuuaccagucaaguguuuc

SEQ ID NO: 296486 - RNA, 23 nt, Artificial Sequence
  Synthetic
uucccuuaccagucaaguguuuc

SEQ ID NO: 296487 - RNA, 24 nt, Artificial Sequence
  Synthetic
guucccuuaccagucaaguguuuc

SEQ ID NO: 296488 - RNA, 18 nt, Artificial Sequence
  Synthetic
uucccuuaccaguguuuc

SEQ ID NO: 296489 - RNA, 19 nt, Artificial Sequence
  Synthetic
uuucccuuaccaguguuuc

SEQ ID NO: 296490 - RNA, 20 nt, Artificial Sequence
  Synthetic
uuuucccuuaccaguguuuc

SEQ ID NO: 296491 - RNA, 21 nt, Artificial Sequence
  Synthetic
auuuucccuuaccaguguuuc

SEQ ID NO: 296492 - RNA, 22 nt, Artificial Sequence
  Synthetic
cauuuucccuuaccaguguuuc

SEQ ID NO: 296493 - RNA, 23 nt, Artificial Sequence
  Synthetic
ucauuuucccuuaccaguguuuc

SEQ ID NO: 296494 - RNA, 24 nt, Artificial Sequence
  Synthetic
uucauuuucccuuaccaguguuuc

SEQ ID NO: 296495 - RNA, 18 nt, Artificial Sequence
  Synthetic
auucuuaacauguguuuc

SEQ ID NO: 296496 - RNA, 19 nt, Artificial Sequence
  Synthetic
cauucuuaacauguguuuc

SEQ ID NO: 296497 - RNA, 20 nt, Artificial Sequence
  Synthetic
ucauucuuaacauguguuuc

SEQ ID NO: 296498 - RNA, 21 nt, Artificial Sequence
  Synthetic
gucauucuuaacauguguuuc

SEQ ID NO: 296499 - RNA, 22 nt, Artificial Sequence
  Synthetic
ggucauucuuaacauguguuuc

SEQ ID NO: 296500 - RNA, 23 nt, Artificial Sequence
  Synthetic
gggucauucuuaacauguguuuc

SEQ ID NO: 296501 - RNA, 24 nt, Artificial Sequence
  Synthetic
ugggucauucuuaacauguguuuc

SEQ ID NO: 296502 - RNA, 18 nt, Artificial Sequence
  Synthetic
aggaggguuguguguuuc

SEQ ID NO: 296503 - RNA, 19 nt, Artificial Sequence
  Synthetic
uaggaggguuguguguuuc

SEQ ID NO: 296504 - RNA, 20 nt, Artificial Sequence
  Synthetic
cuaggaggguuguguguuuc

SEQ ID NO: 296505 - RNA, 21 nt, Artificial Sequence
  Synthetic
acuaggaggguuguguguuuc

SEQ ID NO: 296506 - RNA, 22 nt, Artificial Sequence
  Synthetic
aacuaggaggguuguguguuuc

SEQ ID NO: 296507 - RNA, 23 nt, Artificial Sequence
  Synthetic
aaacuaggaggguuguguguuuc

SEQ ID NO: 296508 - RNA, 24 nt, Artificial Sequence
  Synthetic
uaaacuaggaggguuguguguuuc

SEQ ID NO: 296509 - RNA, 18 nt, Artificial Sequence
  Synthetic
uuaggaaucgauuguuuc

SEQ ID NO: 296510 - RNA, 19 nt, Artificial Sequence
  Synthetic
uuuaggaaucgauuguuuc

SEQ ID NO: 296511 - RNA, 20 nt, Artificial Sequence
  Synthetic
cuuuaggaaucgauuguuuc

SEQ ID NO: 296512 - RNA, 21 nt, Artificial Sequence
  Synthetic
ccuuuaggaaucgauuguuuc

SEQ ID NO: 296513 - RNA, 22 nt, Artificial Sequence
  Synthetic
accuuuaggaaucgauuguuuc

SEQ ID NO: 296514 - RNA, 23 nt, Artificial Sequence
  Synthetic
gaccuuuaggaaucgauuguuuc

SEQ ID NO: 296515 - RNA, 24 nt, Artificial Sequence
  Synthetic
agaccuuuaggaaucgauuguuuc

SEQ ID NO: 296516 - RNA, 18 nt, Artificial Sequence
  Synthetic
agugcucaugauuguuuc

SEQ ID NO: 296517 - RNA, 19 nt, Artificial Sequence
  Synthetic
aagugcucaugauuguuuc

SEQ ID NO: 296518 - RNA, 20 nt, Artificial Sequence
  Synthetic
aaagugcucaugauuguuuc

SEQ ID NO: 296519 - RNA, 21 nt, Artificial Sequence
  Synthetic
uaaagugcucaugauuguuuc

SEQ ID NO: 296520 - RNA, 22 nt, Artificial Sequence
  Synthetic
guaaagugcucaugauuguuuc

SEQ ID NO: 296521 - RNA, 23 nt, Artificial Sequence
  Synthetic
uguaaagugcucaugauuguuuc

SEQ ID NO: 296522 - RNA, 24 nt, Artificial Sequence
  Synthetic
guguaaagugcucaugauuguuuc

SEQ ID NO: 296523 - RNA, 18 nt, Artificial Sequence
  Synthetic
ugauuuuuuuauuguuuc

SEQ ID NO: 296524 - RNA, 19 nt, Artificial Sequence
  Synthetic
cugauuuuuuuauuguuuc

SEQ ID NO: 296525 - RNA, 20 nt, Artificial Sequence
  Synthetic
ccugauuuuuuuauuguuuc

SEQ ID NO: 296526 - RNA, 21 nt, Artificial Sequence
  Synthetic
cccugauuuuuuuauuguuuc

SEQ ID NO: 296527 - RNA, 22 nt, Artificial Sequence
  Synthetic
gcccugauuuuuuuauuguuuc

SEQ ID NO: 296528 - RNA, 23 nt, Artificial Sequence
  Synthetic
ugcccugauuuuuuuauuguuuc

SEQ ID NO: 296529 - RNA, 24 nt, Artificial Sequence
  Synthetic
uugcccugauuuuuuuauuguuuc

SEQ ID NO: 296530 - RNA, 18 nt, Artificial Sequence
  Synthetic
acaaguuuucuuuguuuc

SEQ ID NO: 296531 - RNA, 19 nt, Artificial Sequence
  Synthetic
aacaaguuuucuuuguuuc

SEQ ID NO: 296532 - RNA, 20 nt, Artificial Sequence
  Synthetic
aaacaaguuuucuuuguuuc

SEQ ID NO: 296533 - RNA, 21 nt, Artificial Sequence
  Synthetic
aaaacaaguuuucuuuguuuc

SEQ ID NO: 296534 - RNA, 22 nt, Artificial Sequence
  Synthetic
aaaaacaaguuuucuuuguuuc

SEQ ID NO: 296535 - RNA, 23 nt, Artificial Sequence
  Synthetic
aaaaaacaaguuuucuuuguuuc

SEQ ID NO: 296536 - RNA, 24 nt, Artificial Sequence
  Synthetic
uaaaaaacaaguuuucuuuguuuc

SEQ ID NO: 296537 - RNA, 18 nt, Artificial Sequence
  Synthetic
cacauaucuuuuuguuuc

SEQ ID NO: 296538 - RNA, 19 nt, Artificial Sequence
  Synthetic
ucacauaucuuuuuguuuc

SEQ ID NO: 296539 - RNA, 20 nt, Artificial Sequence
  Synthetic
uucacauaucuuuuuguuuc

SEQ ID NO: 296540 - RNA, 21 nt, Artificial Sequence
  Synthetic
uuucacauaucuuuuuguuuc

SEQ ID NO: 296541 - RNA, 22 nt, Artificial Sequence
  Synthetic
cuuucacauaucuuuuuguuuc

SEQ ID NO: 296542 - RNA, 23 nt, Artificial Sequence
  Synthetic
ucuuucacauaucuuuuuguuuc

SEQ ID NO: 296543 - RNA, 24 nt, Artificial Sequence
  Synthetic
uucuuucacauaucuuuuuguuuc

SEQ ID NO: 296544 - RNA, 18 nt, Artificial Sequence
  Synthetic
aacauguguuuuuguuuc

SEQ ID NO: 296545 - RNA, 19 nt, Artificial Sequence
  Synthetic
uaacauguguuuuuguuuc

SEQ ID NO: 296546 - RNA, 20 nt, Artificial Sequence
  Synthetic
auaacauguguuuuuguuuc

SEQ ID NO: 296547 - RNA, 21 nt, Artificial Sequence
  Synthetic
aauaacauguguuuuuguuuc

SEQ ID NO: 296548 - RNA, 22 nt, Artificial Sequence
  Synthetic
gaauaacauguguuuuuguuuc

SEQ ID NO: 296549 - RNA, 23 nt, Artificial Sequence
  Synthetic
agaauaacauguguuuuuguuuc

SEQ ID NO: 296550 - RNA, 24 nt, Artificial Sequence
  Synthetic
cagaauaacauguguuuuuguuuc

SEQ ID NO: 296551 - RNA, 18 nt, Artificial Sequence
  Synthetic
uuaaaaugucaaauuuuc

SEQ ID NO: 296552 - RNA, 19 nt, Artificial Sequence
  Synthetic
uuuaaaaugucaaauuuuc

SEQ ID NO: 296553 - RNA, 20 nt, Artificial Sequence
  Synthetic
auuuaaaaugucaaauuuuc

SEQ ID NO: 296554 - RNA, 21 nt, Artificial Sequence
  Synthetic
uauuuaaaaugucaaauuuuc

SEQ ID NO: 296555 - RNA, 22 nt, Artificial Sequence
  Synthetic
uuauuuaaaaugucaaauuuuc

SEQ ID NO: 296556 - RNA, 23 nt, Artificial Sequence
  Synthetic
guuauuuaaaaugucaaauuuuc

SEQ ID NO: 296557 - RNA, 24 nt, Artificial Sequence
  Synthetic
uguuauuuaaaaugucaaauuuuc

SEQ ID NO: 296558 - RNA, 18 nt, Artificial Sequence
  Synthetic
ugagacuguccaauuuuc

SEQ ID NO: 296559 - RNA, 19 nt, Artificial Sequence
  Synthetic
cugagacuguccaauuuuc

SEQ ID NO: 296560 - RNA, 20 nt, Artificial Sequence
  Synthetic
ccugagacuguccaauuuuc

SEQ ID NO: 296561 - RNA, 21 nt, Artificial Sequence
  Synthetic
uccugagacuguccaauuuuc

SEQ ID NO: 296562 - RNA, 22 nt, Artificial Sequence
  Synthetic
uuccugagacuguccaauuuuc

SEQ ID NO: 296563 - RNA, 23 nt, Artificial Sequence
  Synthetic
uuuccugagacuguccaauuuuc

SEQ ID NO: 296564 - RNA, 24 nt, Artificial Sequence
  Synthetic
uuuuccugagacuguccaauuuuc

SEQ ID NO: 296565 - RNA, 18 nt, Artificial Sequence
  Synthetic
agggccuagagaauuuuc

SEQ ID NO: 296566 - RNA, 19 nt, Artificial Sequence
  Synthetic
cagggccuagagaauuuuc

SEQ ID NO: 296567 - RNA, 20 nt, Artificial Sequence
  Synthetic
ucagggccuagagaauuuuc

SEQ ID NO: 296568 - RNA, 21 nt, Artificial Sequence
  Synthetic
gucagggccuagagaauuuuc

SEQ ID NO: 296569 - RNA, 22 nt, Artificial Sequence
  Synthetic
agucagggccuagagaauuuuc

SEQ ID NO: 296570 - RNA, 23 nt, Artificial Sequence
  Synthetic
aagucagggccuagagaauuuuc

SEQ ID NO: 296571 - RNA, 24 nt, Artificial Sequence
  Synthetic
uaagucagggccuagagaauuuuc

SEQ ID NO: 296572 - RNA, 18 nt, Artificial Sequence
  Synthetic
uaauaacacggaauuuuc

SEQ ID NO: 296573 - RNA, 19 nt, Artificial Sequence
  Synthetic
uuaauaacacggaauuuuc

SEQ ID NO: 296574 - RNA, 20 nt, Artificial Sequence
  Synthetic
cuuaauaacacggaauuuuc

SEQ ID NO: 296575 - RNA, 21 nt, Artificial Sequence
  Synthetic
acuuaauaacacggaauuuuc

SEQ ID NO: 296576 - RNA, 22 nt, Artificial Sequence
  Synthetic
aacuuaauaacacggaauuuuc

SEQ ID NO: 296577 - RNA, 23 nt, Artificial Sequence
  Synthetic
aaacuuaauaacacggaauuuuc

SEQ ID NO: 296578 - RNA, 24 nt, Artificial Sequence
  Synthetic
caaacuuaauaacacggaauuuuc

SEQ ID NO: 296579 - RNA, 18 nt, Artificial Sequence
  Synthetic
cuuaaagucugaauuuuc

SEQ ID NO: 296580 - RNA, 19 nt, Artificial Sequence
  Synthetic
ccuuaaagucugaauuuuc

SEQ ID NO: 296581 - RNA, 20 nt, Artificial Sequence
  Synthetic
uccuuaaagucugaauuuuc

SEQ ID NO: 296582 - RNA, 21 nt, Artificial Sequence
  Synthetic
cuccuuaaagucugaauuuuc

SEQ ID NO: 296583 - RNA, 22 nt, Artificial Sequence
  Synthetic
ccuccuuaaagucugaauuuuc

SEQ ID NO: 296584 - RNA, 23 nt, Artificial Sequence
  Synthetic
cccuccuuaaagucugaauuuuc

SEQ ID NO: 296585 - RNA, 24 nt, Artificial Sequence
  Synthetic
ccccuccuuaaagucugaauuuuc

SEQ ID NO: 296586 - RNA, 18 nt, Artificial Sequence
  Synthetic
auaccugauauaauuuuc

SEQ ID NO: 296587 - RNA, 19 nt, Artificial Sequence
  Synthetic
aauaccugauauaauuuuc

SEQ ID NO: 296588 - RNA, 20 nt, Artificial Sequence
  Synthetic
caauaccugauauaauuuuc

SEQ ID NO: 296589 - RNA, 21 nt, Artificial Sequence
  Synthetic
ucaauaccugauauaauuuuc

SEQ ID NO: 296590 - RNA, 22 nt, Artificial Sequence
  Synthetic
cucaauaccugauauaauuuuc

SEQ ID NO: 296591 - RNA, 23 nt, Artificial Sequence
  Synthetic
ucucaauaccugauauaauuuuc

SEQ ID NO: 296592 - RNA, 24 nt, Artificial Sequence
  Synthetic
uucucaauaccugauauaauuuuc

SEQ ID NO: 296593 - RNA, 18 nt, Artificial Sequence
  Synthetic
caacucuuucuaauuuuc

SEQ ID NO: 296594 - RNA, 19 nt, Artificial Sequence
  Synthetic
acaacucuuucuaauuuuc

SEQ ID NO: 296595 - RNA, 20 nt, Artificial Sequence
  Synthetic
cacaacucuuucuaauuuuc

SEQ ID NO: 296596 - RNA, 21 nt, Artificial Sequence
  Synthetic
gcacaacucuuucuaauuuuc

SEQ ID NO: 296597 - RNA, 22 nt, Artificial Sequence
  Synthetic
agcacaacucuuucuaauuuuc

SEQ ID NO: 296598 - RNA, 23 nt, Artificial Sequence
  Synthetic
cagcacaacucuuucuaauuuuc

SEQ ID NO: 296599 - RNA, 24 nt, Artificial Sequence
  Synthetic
acagcacaacucuuucuaauuuuc

SEQ ID NO: 296600 - RNA, 18 nt, Artificial Sequence
  Synthetic
uuaauagaaguaauuuuc

SEQ ID NO: 296601 - RNA, 19 nt, Artificial Sequence
  Synthetic
guuaauagaaguaauuuuc

SEQ ID NO: 296602 - RNA, 20 nt, Artificial Sequence
  Synthetic
aguuaauagaaguaauuuuc

SEQ ID NO: 296603 - RNA, 21 nt, Artificial Sequence
  Synthetic
aaguuaauagaaguaauuuuc

SEQ ID NO: 296604 - RNA, 22 nt, Artificial Sequence
  Synthetic
aaaguuaauagaaguaauuuuc

SEQ ID NO: 296605 - RNA, 23 nt, Artificial Sequence
  Synthetic
uaaaguuaauagaaguaauuuuc

SEQ ID NO: 296606 - RNA, 24 nt, Artificial Sequence
  Synthetic
uuaaaguuaauagaaguaauuuuc

SEQ ID NO: 296607 - RNA, 18 nt, Artificial Sequence
  Synthetic
aaaaaguaaaacauuuuc

SEQ ID NO: 296608 - RNA, 19 nt, Artificial Sequence
  Synthetic
gaaaaaguaaaacauuuuc

SEQ ID NO: 296609 - RNA, 20 nt, Artificial Sequence
  Synthetic
ugaaaaaguaaaacauuuuc

SEQ ID NO: 296610 - RNA, 21 nt, Artificial Sequence
  Synthetic
augaaaaaguaaaacauuuuc

SEQ ID NO: 296611 - RNA, 22 nt, Artificial Sequence
  Synthetic
aaugaaaaaguaaaacauuuuc

SEQ ID NO: 296612 - RNA, 23 nt, Artificial Sequence
  Synthetic
aaaugaaaaaguaaaacauuuuc

SEQ ID NO: 296613 - RNA, 24 nt, Artificial Sequence
  Synthetic
caaaugaaaaaguaaaacauuuuc

SEQ ID NO: 296614 - RNA, 18 nt, Artificial Sequence
  Synthetic
auacaaagaaacauuuuc

SEQ ID NO: 296615 - RNA, 19 nt, Artificial Sequence
  Synthetic
aauacaaagaaacauuuuc

SEQ ID NO: 296616 - RNA, 20 nt, Artificial Sequence
  Synthetic
aaauacaaagaaacauuuuc

SEQ ID NO: 296617 - RNA, 21 nt, Artificial Sequence
  Synthetic
caaauacaaagaaacauuuuc

SEQ ID NO: 296618 - RNA, 22 nt, Artificial Sequence
  Synthetic
acaaauacaaagaaacauuuuc

SEQ ID NO: 296619 - RNA, 23 nt, Artificial Sequence
  Synthetic
uacaaauacaaagaaacauuuuc

SEQ ID NO: 296620 - RNA, 24 nt, Artificial Sequence
  Synthetic
uuacaaauacaaagaaacauuuuc

SEQ ID NO: 296621 - RNA, 18 nt, Artificial Sequence
  Synthetic
agccugcagcacauuuuc

SEQ ID NO: 296622 - RNA, 19 nt, Artificial Sequence
  Synthetic
uagccugcagcacauuuuc

SEQ ID NO: 296623 - RNA, 20 nt, Artificial Sequence
  Synthetic
guagccugcagcacauuuuc

SEQ ID NO: 296624 - RNA, 21 nt, Artificial Sequence
  Synthetic
aguagccugcagcacauuuuc

SEQ ID NO: 296625 - RNA, 22 nt, Artificial Sequence
  Synthetic
gaguagccugcagcacauuuuc

SEQ ID NO: 296626 - RNA, 23 nt, Artificial Sequence
  Synthetic
ugaguagccugcagcacauuuuc

SEQ ID NO: 296627 - RNA, 24 nt, Artificial Sequence
  Synthetic
cugaguagccugcagcacauuuuc

SEQ ID NO: 296628 - RNA, 18 nt, Artificial Sequence
  Synthetic
uugagugcaaccauuuuc

SEQ ID NO: 296629 - RNA, 19 nt, Artificial Sequence
  Synthetic
cuugagugcaaccauuuuc

SEQ ID NO: 296630 - RNA, 20 nt, Artificial Sequence
  Synthetic
ucuugagugcaaccauuuuc

SEQ ID NO: 296631 - RNA, 21 nt, Artificial Sequence
  Synthetic
cucuugagugcaaccauuuuc

SEQ ID NO: 296632 - RNA, 22 nt, Artificial Sequence
  Synthetic
ucucuugagugcaaccauuuuc

SEQ ID NO: 296633 - RNA, 23 nt, Artificial Sequence
  Synthetic
cucucuugagugcaaccauuuuc

SEQ ID NO: 296634 - RNA, 24 nt, Artificial Sequence
  Synthetic
ucucucuugagugcaaccauuuuc

SEQ ID NO: 296635 - RNA, 18 nt, Artificial Sequence
  Synthetic
auuaaaugacccauuuuc

SEQ ID NO: 296636 - RNA, 19 nt, Artificial Sequence
  Synthetic
gauuaaaugacccauuuuc

SEQ ID NO: 296637 - RNA, 20 nt, Artificial Sequence
  Synthetic
ggauuaaaugacccauuuuc

SEQ ID NO: 296638 - RNA, 21 nt, Artificial Sequence
  Synthetic
aggauuaaaugacccauuuuc

SEQ ID NO: 296639 - RNA, 22 nt, Artificial Sequence
  Synthetic
gaggauuaaaugacccauuuuc

SEQ ID NO: 296640 - RNA, 23 nt, Artificial Sequence
  Synthetic
agaggauuaaaugacccauuuuc

SEQ ID NO: 296641 - RNA, 24 nt, Artificial Sequence
  Synthetic
cagaggauuaaaugacccauuuuc

SEQ ID NO: 296642 - RNA, 18 nt, Artificial Sequence
  Synthetic
uccgggugcugcauuuuc

SEQ ID NO: 296643 - RNA, 19 nt, Artificial Sequence
  Synthetic
uuccgggugcugcauuuuc

SEQ ID NO: 296644 - RNA, 20 nt, Artificial Sequence
  Synthetic
auuccgggugcugcauuuuc

SEQ ID NO: 296645 - RNA, 21 nt, Artificial Sequence
  Synthetic
cauuccgggugcugcauuuuc

SEQ ID NO: 296646 - RNA, 22 nt, Artificial Sequence
  Synthetic
ucauuccgggugcugcauuuuc

SEQ ID NO: 296647 - RNA, 23 nt, Artificial Sequence
  Synthetic
gucauuccgggugcugcauuuuc

SEQ ID NO: 296648 - RNA, 24 nt, Artificial Sequence
  Synthetic
agucauuccgggugcugcauuuuc

SEQ ID NO: 296649 - RNA, 18 nt, Artificial Sequence
  Synthetic
acaaauuaaaucauuuuc

SEQ ID NO: 296650 - RNA, 19 nt, Artificial Sequence
  Synthetic
uacaaauuaaaucauuuuc

SEQ ID NO: 296651 - RNA, 20 nt, Artificial Sequence
  Synthetic
auacaaauuaaaucauuuuc

SEQ ID NO: 296652 - RNA, 21 nt, Artificial Sequence
  Synthetic
aauacaaauuaaaucauuuuc

SEQ ID NO: 296653 - RNA, 22 nt, Artificial Sequence
  Synthetic
aaauacaaauuaaaucauuuuc

SEQ ID NO: 296654 - RNA, 23 nt, Artificial Sequence
  Synthetic
aaaauacaaauuaaaucauuuuc

SEQ ID NO: 296655 - RNA, 24 nt, Artificial Sequence
  Synthetic
aaaaauacaaauuaaaucauuuuc

SEQ ID NO: 296656 - RNA, 18 nt, Artificial Sequence
  Synthetic
gagaacucacucauuuuc

SEQ ID NO: 296657 - RNA, 19 nt, Artificial Sequence
  Synthetic
ggagaacucacucauuuuc

SEQ ID NO: 296658 - RNA, 20 nt, Artificial Sequence
  Synthetic
uggagaacucacucauuuuc

SEQ ID NO: 296659 - RNA, 21 nt, Artificial Sequence
  Synthetic
uuggagaacucacucauuuuc

SEQ ID NO: 296660 - RNA, 22 nt, Artificial Sequence
  Synthetic
cuuggagaacucacucauuuuc

SEQ ID NO: 296661 - RNA, 23 nt, Artificial Sequence
  Synthetic
ucuuggagaacucacucauuuuc

SEQ ID NO: 296662 - RNA, 24 nt, Artificial Sequence
  Synthetic
aucuuggagaacucacucauuuuc

SEQ ID NO: 296663 - RNA, 18 nt, Artificial Sequence
  Synthetic
aauacugaagucauuuuc

SEQ ID NO: 296664 - RNA, 19 nt, Artificial Sequence
  Synthetic
aaauacugaagucauuuuc

SEQ ID NO: 296665 - RNA, 20 nt, Artificial Sequence
  Synthetic
gaaauacugaagucauuuuc

SEQ ID NO: 296666 - RNA, 21 nt, Artificial Sequence
  Synthetic
cgaaauacugaagucauuuuc

SEQ ID NO: 296667 - RNA, 22 nt, Artificial Sequence
  Synthetic
ucgaaauacugaagucauuuuc

SEQ ID NO: 296668 - RNA, 23 nt, Artificial Sequence
  Synthetic
aucgaaauacugaagucauuuuc

SEQ ID NO: 296669 - RNA, 24 nt, Artificial Sequence
  Synthetic
caucgaaauacugaagucauuuuc

SEQ ID NO: 296670 - RNA, 18 nt, Artificial Sequence
  Synthetic
cggccucaucagauuuuc

SEQ ID NO: 296671 - RNA, 19 nt, Artificial Sequence
  Synthetic
gcggccucaucagauuuuc

SEQ ID NO: 296672 - RNA, 20 nt, Artificial Sequence
  Synthetic
ugcggccucaucagauuuuc

SEQ ID NO: 296673 - RNA, 21 nt, Artificial Sequence
  Synthetic
uugcggccucaucagauuuuc

SEQ ID NO: 296674 - RNA, 22 nt, Artificial Sequence
  Synthetic
guugcggccucaucagauuuuc

SEQ ID NO: 296675 - RNA, 23 nt, Artificial Sequence
  Synthetic
cguugcggccucaucagauuuuc

SEQ ID NO: 296676 - RNA, 24 nt, Artificial Sequence
  Synthetic
gcguugcggccucaucagauuuuc

SEQ ID NO: 296677 - RNA, 18 nt, Artificial Sequence
  Synthetic
aagcauccucagauuuuc

SEQ ID NO: 296678 - RNA, 19 nt, Artificial Sequence
  Synthetic
aaagcauccucagauuuuc

SEQ ID NO: 296679 - RNA, 20 nt, Artificial Sequence
  Synthetic
caaagcauccucagauuuuc

SEQ ID NO: 296680 - RNA, 21 nt, Artificial Sequence
  Synthetic
ccaaagcauccucagauuuuc

SEQ ID NO: 296681 - RNA, 22 nt, Artificial Sequence
  Synthetic
uccaaagcauccucagauuuuc

SEQ ID NO: 296682 - RNA, 23 nt, Artificial Sequence
  Synthetic
auccaaagcauccucagauuuuc

SEQ ID NO: 296683 - RNA, 24 nt, Artificial Sequence
  Synthetic
gauccaaagcauccucagauuuuc

SEQ ID NO: 296684 - RNA, 18 nt, Artificial Sequence
  Synthetic
aaaucaauucagauuuuc

SEQ ID NO: 296685 - RNA, 19 nt, Artificial Sequence
  Synthetic
aaaaucaauucagauuuuc

SEQ ID NO: 296686 - RNA, 20 nt, Artificial Sequence
  Synthetic
gaaaaucaauucagauuuuc

SEQ ID NO: 296687 - RNA, 21 nt, Artificial Sequence
  Synthetic
ugaaaaucaauucagauuuuc

SEQ ID NO: 296688 - RNA, 22 nt, Artificial Sequence
  Synthetic
gugaaaaucaauucagauuuuc

SEQ ID NO: 296689 - RNA, 23 nt, Artificial Sequence
  Synthetic
agugaaaaucaauucagauuuuc

SEQ ID NO: 296690 - RNA, 24 nt, Artificial Sequence
  Synthetic
uagugaaaaucaauucagauuuuc

SEQ ID NO: 296691 - RNA, 18 nt, Artificial Sequence
  Synthetic
agccuuuuucagauuuuc

SEQ ID NO: 296692 - RNA, 19 nt, Artificial Sequence
  Synthetic
aagccuuuuucagauuuuc

SEQ ID NO: 296693 - RNA, 20 nt, Artificial Sequence
  Synthetic
caagccuuuuucagauuuuc

SEQ ID NO: 296694 - RNA, 21 nt, Artificial Sequence
  Synthetic
ccaagccuuuuucagauuuuc

SEQ ID NO: 296695 - RNA, 22 nt, Artificial Sequence
  Synthetic
cccaagccuuuuucagauuuuc

SEQ ID NO: 296696 - RNA, 23 nt, Artificial Sequence
  Synthetic
ccccaagccuuuuucagauuuuc

SEQ ID NO: 296697 - RNA, 24 nt, Artificial Sequence
  Synthetic
uccccaagccuuuuucagauuuuc

SEQ ID NO: 296698 - RNA, 18 nt, Artificial Sequence
  Synthetic
cccugaauggagauuuuc

SEQ ID NO: 296699 - RNA, 19 nt, Artificial Sequence
  Synthetic
gcccugaauggagauuuuc

SEQ ID NO: 296700 - RNA, 20 nt, Artificial Sequence
  Synthetic
cgcccugaauggagauuuuc

SEQ ID NO: 296701 - RNA, 21 nt, Artificial Sequence
  Synthetic
acgcccugaauggagauuuuc

SEQ ID NO: 296702 - RNA, 22 nt, Artificial Sequence
  Synthetic
gacgcccugaauggagauuuuc

SEQ ID NO: 296703 - RNA, 23 nt, Artificial Sequence
  Synthetic
ugacgcccugaauggagauuuuc

SEQ ID NO: 296704 - RNA, 24 nt, Artificial Sequence
  Synthetic
augacgcccugaauggagauuuuc

SEQ ID NO: 296705 - RNA, 18 nt, Artificial Sequence
  Synthetic
guuucaucauagauuuuc

SEQ ID NO: 296706 - RNA, 19 nt, Artificial Sequence
  Synthetic
uguuucaucauagauuuuc

SEQ ID NO: 296707 - RNA, 20 nt, Artificial Sequence
  Synthetic
uuguuucaucauagauuuuc

SEQ ID NO: 296708 - RNA, 21 nt, Artificial Sequence
  Synthetic
cuuguuucaucauagauuuuc

SEQ ID NO: 296709 - RNA, 22 nt, Artificial Sequence
  Synthetic
ucuuguuucaucauagauuuuc

SEQ ID NO: 296710 - RNA, 23 nt, Artificial Sequence
  Synthetic
gucuuguuucaucauagauuuuc

SEQ ID NO: 296711 - RNA, 24 nt, Artificial Sequence
  Synthetic
ugucuuguuucaucauagauuuuc

SEQ ID NO: 296712 - RNA, 18 nt, Artificial Sequence
  Synthetic
uguauaguuaugauuuuc

SEQ ID NO: 296713 - RNA, 19 nt, Artificial Sequence
  Synthetic
auguauaguuaugauuuuc

SEQ ID NO: 296714 - RNA, 20 nt, Artificial Sequence
  Synthetic
gauguauaguuaugauuuuc

SEQ ID NO: 296715 - RNA, 21 nt, Artificial Sequence
  Synthetic
ggauguauaguuaugauuuuc

SEQ ID NO: 296716 - RNA, 22 nt, Artificial Sequence
  Synthetic
uggauguauaguuaugauuuuc

SEQ ID NO: 296717 - RNA, 23 nt, Artificial Sequence
  Synthetic
cuggauguauaguuaugauuuuc

SEQ ID NO: 296718 - RNA, 24 nt, Artificial Sequence
  Synthetic
ucuggauguauaguuaugauuuuc

SEQ ID NO: 296719 - RNA, 18 nt, Artificial Sequence
  Synthetic
guguauuucuugauuuuc

SEQ ID NO: 296720 - RNA, 19 nt, Artificial Sequence
  Synthetic
uguguauuucuugauuuuc

SEQ ID NO: 296721 - RNA, 20 nt, Artificial Sequence
  Synthetic
guguguauuucuugauuuuc

SEQ ID NO: 296722 - RNA, 21 nt, Artificial Sequence
  Synthetic
uguguguauuucuugauuuuc

SEQ ID NO: 296723 - RNA, 22 nt, Artificial Sequence
  Synthetic
guguguguauuucuugauuuuc

SEQ ID NO: 296724 - RNA, 23 nt, Artificial Sequence
  Synthetic
uguguguguauuucuugauuuuc

SEQ ID NO: 296725 - RNA, 24 nt, Artificial Sequence
  Synthetic
guguguguguauuucuugauuuuc

SEQ ID NO: 296726 - RNA, 18 nt, Artificial Sequence
  Synthetic
agaacgaaacauauuuuc

SEQ ID NO: 296727 - RNA, 19 nt, Artificial Sequence
  Synthetic
cagaacgaaacauauuuuc

SEQ ID NO: 296728 - RNA, 20 nt, Artificial Sequence
  Synthetic
ccagaacgaaacauauuuuc

SEQ ID NO: 296729 - RNA, 21 nt, Artificial Sequence
  Synthetic
cccagaacgaaacauauuuuc

SEQ ID NO: 296730 - RNA, 22 nt, Artificial Sequence
  Synthetic
acccagaacgaaacauauuuuc

SEQ ID NO: 296731 - RNA, 23 nt, Artificial Sequence
  Synthetic
uacccagaacgaaacauauuuuc

SEQ ID NO: 296732 - RNA, 24 nt, Artificial Sequence
  Synthetic
guacccagaacgaaacauauuuuc

SEQ ID NO: 296733 - RNA, 18 nt, Artificial Sequence
  Synthetic
auguguacacauauuuuc

SEQ ID NO: 296734 - RNA, 19 nt, Artificial Sequence
  Synthetic
uauguguacacauauuuuc

SEQ ID NO: 296735 - RNA, 20 nt, Artificial Sequence
  Synthetic
auauguguacacauauuuuc

SEQ ID NO: 296736 - RNA, 21 nt, Artificial Sequence
  Synthetic
aauauguguacacauauuuuc

SEQ ID NO: 296737 - RNA, 22 nt, Artificial Sequence
  Synthetic
gaauauguguacacauauuuuc

SEQ ID NO: 296738 - RNA, 23 nt, Artificial Sequence
  Synthetic
ugaauauguguacacauauuuuc

SEQ ID NO: 296739 - RNA, 24 nt, Artificial Sequence
  Synthetic
cugaauauguguacacauauuuuc

SEQ ID NO: 296740 - RNA, 18 nt, Artificial Sequence
  Synthetic
gcguccuuucguauuuuc

SEQ ID NO: 296741 - RNA, 19 nt, Artificial Sequence
  Synthetic
ugcguccuuucguauuuuc

SEQ ID NO: 296742 - RNA, 20 nt, Artificial Sequence
  Synthetic
uugcguccuuucguauuuuc

SEQ ID NO: 296743 - RNA, 21 nt, Artificial Sequence
  Synthetic
uuugcguccuuucguauuuuc

SEQ ID NO: 296744 - RNA, 22 nt, Artificial Sequence
  Synthetic
guuugcguccuuucguauuuuc

SEQ ID NO: 296745 - RNA, 23 nt, Artificial Sequence
  Synthetic
uguuugcguccuuucguauuuuc

SEQ ID NO: 296746 - RNA, 24 nt, Artificial Sequence
  Synthetic
uuguuugcguccuuucguauuuuc

SEQ ID NO: 296747 - RNA, 18 nt, Artificial Sequence
  Synthetic
uuuuuacguuguauuuuc

SEQ ID NO: 296748 - RNA, 19 nt, Artificial Sequence
  Synthetic
cuuuuuacguuguauuuuc

SEQ ID NO: 296749 - RNA, 20 nt, Artificial Sequence
  Synthetic
ucuuuuuacguuguauuuuc

SEQ ID NO: 296750 - RNA, 21 nt, Artificial Sequence
  Synthetic
uucuuuuuacguuguauuuuc

SEQ ID NO: 296751 - RNA, 22 nt, Artificial Sequence
  Synthetic
auucuuuuuacguuguauuuuc

SEQ ID NO: 296752 - RNA, 23 nt, Artificial Sequence
  Synthetic
uauucuuuuuacguuguauuuuc

SEQ ID NO: 296753 - RNA, 24 nt, Artificial Sequence
  Synthetic
uuauucuuuuuacguuguauuuuc

SEQ ID NO: 296754 - RNA, 18 nt, Artificial Sequence
  Synthetic
auuaaaagccuuauuuuc

SEQ ID NO: 296755 - RNA, 19 nt, Artificial Sequence
  Synthetic
uauuaaaagccuuauuuuc

SEQ ID NO: 296756 - RNA, 20 nt, Artificial Sequence
  Synthetic
guauuaaaagccuuauuuuc

SEQ ID NO: 296757 - RNA, 21 nt, Artificial Sequence
  Synthetic
aguauuaaaagccuuauuuuc

SEQ ID NO: 296758 - RNA, 22 nt, Artificial Sequence
  Synthetic
aaguauuaaaagccuuauuuuc

SEQ ID NO: 296759 - RNA, 23 nt, Artificial Sequence
  Synthetic
aaaguauuaaaagccuuauuuuc

SEQ ID NO: 296760 - RNA, 24 nt, Artificial Sequence
  Synthetic
caaaguauuaaaagccuuauuuuc

SEQ ID NO: 296761 - RNA, 18 nt, Artificial Sequence
  Synthetic
ucuuaucguugacuuuuc

SEQ ID NO: 296762 - RNA, 19 nt, Artificial Sequence
  Synthetic
aucuuaucguugacuuuuc

SEQ ID NO: 296763 - RNA, 20 nt, Artificial Sequence
  Synthetic
aaucuuaucguugacuuuuc

SEQ ID NO: 296764 - RNA, 21 nt, Artificial Sequence
  Synthetic
aaaucuuaucguugacuuuuc

SEQ ID NO: 296765 - RNA, 22 nt, Artificial Sequence
  Synthetic
aaaaucuuaucguugacuuuuc

SEQ ID NO: 296766 - RNA, 23 nt, Artificial Sequence
  Synthetic
caaaaucuuaucguugacuuuuc

SEQ ID NO: 296767 - RNA, 24 nt, Artificial Sequence
  Synthetic
ccaaaaucuuaucguugacuuuuc

SEQ ID NO: 296768 - RNA, 18 nt, Artificial Sequence
  Synthetic
aaacauuaccuacuuuuc

SEQ ID NO: 296769 - RNA, 19 nt, Artificial Sequence
  Synthetic
caaacauuaccuacuuuuc

SEQ ID NO: 296770 - RNA, 20 nt, Artificial Sequence
  Synthetic
ccaaacauuaccuacuuuuc

SEQ ID NO: 296771 - RNA, 21 nt, Artificial Sequence
  Synthetic
cccaaacauuaccuacuuuuc

SEQ ID NO: 296772 - RNA, 22 nt, Artificial Sequence
  Synthetic
acccaaacauuaccuacuuuuc

SEQ ID NO: 296773 - RNA, 23 nt, Artificial Sequence
  Synthetic
uacccaaacauuaccuacuuuuc

SEQ ID NO: 296774 - RNA, 24 nt, Artificial Sequence
  Synthetic
uuacccaaacauuaccuacuuuuc

SEQ ID NO: 296775 - RNA, 18 nt, Artificial Sequence
  Synthetic
cagaauuccuuccuuuuc

SEQ ID NO: 296776 - RNA, 19 nt, Artificial Sequence
  Synthetic
gcagaauuccuuccuuuuc

SEQ ID NO: 296777 - RNA, 20 nt, Artificial Sequence
  Synthetic
agcagaauuccuuccuuuuc

SEQ ID NO: 296778 - RNA, 21 nt, Artificial Sequence
  Synthetic
uagcagaauuccuuccuuuuc

SEQ ID NO: 296779 - RNA, 22 nt, Artificial Sequence
  Synthetic
auagcagaauuccuuccuuuuc

SEQ ID NO: 296780 - RNA, 23 nt, Artificial Sequence
  Synthetic
gauagcagaauuccuuccuuuuc

SEQ ID NO: 296781 - RNA, 24 nt, Artificial Sequence
  Synthetic
cgauagcagaauuccuuccuuuuc

SEQ ID NO: 296782 - RNA, 18 nt, Artificial Sequence
  Synthetic
auuuuagaguuccuuuuc

SEQ ID NO: 296783 - RNA, 19 nt, Artificial Sequence
  Synthetic
aauuuuagaguuccuuuuc

SEQ ID NO: 296784 - RNA, 20 nt, Artificial Sequence
  Synthetic
uaauuuuagaguuccuuuuc

SEQ ID NO: 296785 - RNA, 21 nt, Artificial Sequence
  Synthetic
auaauuuuagaguuccuuuuc

SEQ ID NO: 296786 - RNA, 22 nt, Artificial Sequence
  Synthetic
uauaauuuuagaguuccuuuuc

SEQ ID NO: 296787 - RNA, 23 nt, Artificial Sequence
  Synthetic
auauaauuuuagaguuccuuuuc

SEQ ID NO: 296788 - RNA, 24 nt, Artificial Sequence
  Synthetic
aauauaauuuuagaguuccuuuuc

SEQ ID NO: 296789 - RNA, 18 nt, Artificial Sequence
  Synthetic
uguccuguucagcuuuuc

SEQ ID NO: 296790 - RNA, 19 nt, Artificial Sequence
  Synthetic
cuguccuguucagcuuuuc

SEQ ID NO: 296791 - RNA, 20 nt, Artificial Sequence
  Synthetic
acuguccuguucagcuuuuc

SEQ ID NO: 296792 - RNA, 21 nt, Artificial Sequence
  Synthetic
aacuguccuguucagcuuuuc

SEQ ID NO: 296793 - RNA, 22 nt, Artificial Sequence
  Synthetic
uaacuguccuguucagcuuuuc

SEQ ID NO: 296794 - RNA, 23 nt, Artificial Sequence
  Synthetic
cuaacuguccuguucagcuuuuc

SEQ ID NO: 296795 - RNA, 24 nt, Artificial Sequence
  Synthetic
ucuaacuguccuguucagcuuuuc

SEQ ID NO: 296796 - RNA, 18 nt, Artificial Sequence
  Synthetic
ccagauuuguagcuuuuc

SEQ ID NO: 296797 - RNA, 19 nt, Artificial Sequence
  Synthetic
gccagauuuguagcuuuuc

SEQ ID NO: 296798 - RNA, 20 nt, Artificial Sequence
  Synthetic
agccagauuuguagcuuuuc

SEQ ID NO: 296799 - RNA, 21 nt, Artificial Sequence
  Synthetic
aagccagauuuguagcuuuuc

SEQ ID NO: 296800 - RNA, 22 nt, Artificial Sequence
  Synthetic
aaagccagauuuguagcuuuuc

SEQ ID NO: 296801 - RNA, 23 nt, Artificial Sequence
  Synthetic
gaaagccagauuuguagcuuuuc

SEQ ID NO: 296802 - RNA, 24 nt, Artificial Sequence
  Synthetic
agaaagccagauuuguagcuuuuc

SEQ ID NO: 296803 - RNA, 18 nt, Artificial Sequence
  Synthetic
auauaauuaaugcuuuuc

SEQ ID NO: 296804 - RNA, 19 nt, Artificial Sequence
  Synthetic
cauauaauuaaugcuuuuc

SEQ ID NO: 296805 - RNA, 20 nt, Artificial Sequence
  Synthetic
gcauauaauuaaugcuuuuc

SEQ ID NO: 296806 - RNA, 21 nt, Artificial Sequence
  Synthetic
ugcauauaauuaaugcuuuuc

SEQ ID NO: 296807 - RNA, 22 nt, Artificial Sequence
  Synthetic
augcauauaauuaaugcuuuuc

SEQ ID NO: 296808 - RNA, 23 nt, Artificial Sequence
  Synthetic
caugcauauaauuaaugcuuuuc

SEQ ID NO: 296809 - RNA, 24 nt, Artificial Sequence
  Synthetic
gcaugcauauaauuaaugcuuuuc

SEQ ID NO: 296810 - RNA, 18 nt, Artificial Sequence
  Synthetic
uuuccaaacgugcuuuuc

SEQ ID NO: 296811 - RNA, 19 nt, Artificial Sequence
  Synthetic
uuuuccaaacgugcuuuuc

SEQ ID NO: 296812 - RNA, 20 nt, Artificial Sequence
  Synthetic
uuuuuccaaacgugcuuuuc

SEQ ID NO: 296813 - RNA, 21 nt, Artificial Sequence
  Synthetic
cuuuuuccaaacgugcuuuuc

SEQ ID NO: 296814 - RNA, 22 nt, Artificial Sequence
  Synthetic
ucuuuuuccaaacgugcuuuuc

SEQ ID NO: 296815 - RNA, 23 nt, Artificial Sequence
  Synthetic
gucuuuuuccaaacgugcuuuuc

SEQ ID NO: 296816 - RNA, 24 nt, Artificial Sequence
  Synthetic
ugucuuuuuccaaacgugcuuuuc

SEQ ID NO: 296817 - RNA, 18 nt, Artificial Sequence
  Synthetic
uuccucuuuuugcuuuuc

SEQ ID NO: 296818 - RNA, 19 nt, Artificial Sequence
  Synthetic
auuccucuuuuugcuuuuc

SEQ ID NO: 296819 - RNA, 20 nt, Artificial Sequence
  Synthetic
uauuccucuuuuugcuuuuc

SEQ ID NO: 296820 - RNA, 21 nt, Artificial Sequence
  Synthetic
uuauuccucuuuuugcuuuuc

SEQ ID NO: 296821 - RNA, 22 nt, Artificial Sequence
  Synthetic
auuauuccucuuuuugcuuuuc

SEQ ID NO: 296822 - RNA, 23 nt, Artificial Sequence
  Synthetic
uauuauuccucuuuuugcuuuuc

SEQ ID NO: 296823 - RNA, 24 nt, Artificial Sequence
  Synthetic
uuauuauuccucuuuuugcuuuuc

SEQ ID NO: 296824 - RNA, 18 nt, Artificial Sequence
  Synthetic
aacucccacacucuuuuc

SEQ ID NO: 296825 - RNA, 19 nt, Artificial Sequence
  Synthetic
caacucccacacucuuuuc

SEQ ID NO: 296826 - RNA, 20 nt, Artificial Sequence
  Synthetic
ucaacucccacacucuuuuc

SEQ ID NO: 296827 - RNA, 21 nt, Artificial Sequence
  Synthetic
gucaacucccacacucuuuuc

SEQ ID NO: 296828 - RNA, 22 nt, Artificial Sequence
  Synthetic
agucaacucccacacucuuuuc

SEQ ID NO: 296829 - RNA, 23 nt, Artificial Sequence
  Synthetic
cagucaacucccacacucuuuuc

SEQ ID NO: 296830 - RNA, 24 nt, Artificial Sequence
  Synthetic
ucagucaacucccacacucuuuuc

SEQ ID NO: 296831 - RNA, 18 nt, Artificial Sequence
  Synthetic
aaugaacucagucuuuuc

SEQ ID NO: 296832 - RNA, 19 nt, Artificial Sequence
  Synthetic
caaugaacucagucuuuuc

SEQ ID NO: 296833 - RNA, 20 nt, Artificial Sequence
  Synthetic
acaaugaacucagucuuuuc

SEQ ID NO: 296834 - RNA, 21 nt, Artificial Sequence
  Synthetic
aacaaugaacucagucuuuuc

SEQ ID NO: 296835 - RNA, 22 nt, Artificial Sequence
  Synthetic
gaacaaugaacucagucuuuuc

SEQ ID NO: 296836 - RNA, 23 nt, Artificial Sequence
  Synthetic
agaacaaugaacucagucuuuuc

SEQ ID NO: 296837 - RNA, 24 nt, Artificial Sequence
  Synthetic
uagaacaaugaacucagucuuuuc

SEQ ID NO: 296838 - RNA, 18 nt, Artificial Sequence
  Synthetic
ccuaaugcaggucuuuuc

SEQ ID NO: 296839 - RNA, 19 nt, Artificial Sequence
  Synthetic
uccuaaugcaggucuuuuc

SEQ ID NO: 296840 - RNA, 20 nt, Artificial Sequence
  Synthetic
cuccuaaugcaggucuuuuc

SEQ ID NO: 296841 - RNA, 21 nt, Artificial Sequence
  Synthetic
ucuccuaaugcaggucuuuuc

SEQ ID NO: 296842 - RNA, 22 nt, Artificial Sequence
  Synthetic
gucuccuaaugcaggucuuuuc

SEQ ID NO: 296843 - RNA, 23 nt, Artificial Sequence
  Synthetic
ugucuccuaaugcaggucuuuuc

SEQ ID NO: 296844 - RNA, 24 nt, Artificial Sequence
  Synthetic
cugucuccuaaugcaggucuuuuc

SEQ ID NO: 296845 - RNA, 18 nt, Artificial Sequence
  Synthetic
cuaugauuuugucuuuuc

SEQ ID NO: 296846 - RNA, 19 nt, Artificial Sequence
  Synthetic
ucuaugauuuugucuuuuc

SEQ ID NO: 296847 - RNA, 20 nt, Artificial Sequence
  Synthetic
cucuaugauuuugucuuuuc

SEQ ID NO: 296848 - RNA, 21 nt, Artificial Sequence
  Synthetic
ucucuaugauuuugucuuuuc

SEQ ID NO: 296849 - RNA, 22 nt, Artificial Sequence
  Synthetic
aucucuaugauuuugucuuuuc

SEQ ID NO: 296850 - RNA, 23 nt, Artificial Sequence
  Synthetic
caucucuaugauuuugucuuuuc

SEQ ID NO: 296851 - RNA, 24 nt, Artificial Sequence
  Synthetic
ccaucucuaugauuuugucuuuuc

SEQ ID NO: 296852 - RNA, 18 nt, Artificial Sequence
  Synthetic
cugguaaaaguucuuuuc

SEQ ID NO: 296853 - RNA, 19 nt, Artificial Sequence
  Synthetic
ucugguaaaaguucuuuuc

SEQ ID NO: 296854 - RNA, 20 nt, Artificial Sequence
  Synthetic
aucugguaaaaguucuuuuc

SEQ ID NO: 296855 - RNA, 21 nt, Artificial Sequence
  Synthetic
caucugguaaaaguucuuuuc

SEQ ID NO: 296856 - RNA, 22 nt, Artificial Sequence
  Synthetic
acaucugguaaaaguucuuuuc

SEQ ID NO: 296857 - RNA, 23 nt, Artificial Sequence
  Synthetic
aacaucugguaaaaguucuuuuc

SEQ ID NO: 296858 - RNA, 24 nt, Artificial Sequence
  Synthetic
uaacaucugguaaaaguucuuuuc

SEQ ID NO: 296859 - RNA, 18 nt, Artificial Sequence
  Synthetic
aggagagaaaaaguuuuc

SEQ ID NO: 296860 - RNA, 19 nt, Artificial Sequence
  Synthetic
caggagagaaaaaguuuuc

SEQ ID NO: 296861 - RNA, 20 nt, Artificial Sequence
  Synthetic
acaggagagaaaaaguuuuc

SEQ ID NO: 296862 - RNA, 21 nt, Artificial Sequence
  Synthetic
aacaggagagaaaaaguuuuc

SEQ ID NO: 296863 - RNA, 22 nt, Artificial Sequence
  Synthetic
aaacaggagagaaaaaguuuuc

SEQ ID NO: 296864 - RNA, 23 nt, Artificial Sequence
  Synthetic
gaaacaggagagaaaaaguuuuc

SEQ ID NO: 296865 - RNA, 24 nt, Artificial Sequence
  Synthetic
ggaaacaggagagaaaaaguuuuc

SEQ ID NO: 296866 - RNA, 18 nt, Artificial Sequence
  Synthetic
gauuagcuggaaguuuuc

SEQ ID NO: 296867 - RNA, 19 nt, Artificial Sequence
  Synthetic
ugauuagcuggaaguuuuc

SEQ ID NO: 296868 - RNA, 20 nt, Artificial Sequence
  Synthetic
gugauuagcuggaaguuuuc

SEQ ID NO: 296869 - RNA, 21 nt, Artificial Sequence
  Synthetic
ugugauuagcuggaaguuuuc

SEQ ID NO: 296870 - RNA, 22 nt, Artificial Sequence
  Synthetic
gugugauuagcuggaaguuuuc

SEQ ID NO: 296871 - RNA, 23 nt, Artificial Sequence
  Synthetic
agugugauuagcuggaaguuuuc

SEQ ID NO: 296872 - RNA, 24 nt, Artificial Sequence
  Synthetic
aagugugauuagcuggaaguuuuc

SEQ ID NO: 296873 - RNA, 18 nt, Artificial Sequence
  Synthetic
uucuauuuuuaaguuuuc

SEQ ID NO: 296874 - RNA, 19 nt, Artificial Sequence
  Synthetic
guucuauuuuuaaguuuuc

SEQ ID NO: 296875 - RNA, 20 nt, Artificial Sequence
  Synthetic
aguucuauuuuuaaguuuuc

SEQ ID NO: 296876 - RNA, 21 nt, Artificial Sequence
  Synthetic
uaguucuauuuuuaaguuuuc

SEQ ID NO: 296877 - RNA, 22 nt, Artificial Sequence
  Synthetic
guaguucuauuuuuaaguuuuc

SEQ ID NO: 296878 - RNA, 23 nt, Artificial Sequence
  Synthetic
gguaguucuauuuuuaaguuuuc

SEQ ID NO: 296879 - RNA, 24 nt, Artificial Sequence
  Synthetic
ugguaguucuauuuuuaaguuuuc

SEQ ID NO: 296880 - RNA, 18 nt, Artificial Sequence
  Synthetic
ccaacuuuaucaguuuuc

SEQ ID NO: 296881 - RNA, 19 nt, Artificial Sequence
  Synthetic
uccaacuuuaucaguuuuc

SEQ ID NO: 296882 - RNA, 20 nt, Artificial Sequence
  Synthetic
uuccaacuuuaucaguuuuc

SEQ ID NO: 296883 - RNA, 21 nt, Artificial Sequence
  Synthetic
auuccaacuuuaucaguuuuc

SEQ ID NO: 296884 - RNA, 22 nt, Artificial Sequence
  Synthetic
cauuccaacuuuaucaguuuuc

SEQ ID NO: 296885 - RNA, 23 nt, Artificial Sequence
  Synthetic
acauuccaacuuuaucaguuuuc

SEQ ID NO: 296886 - RNA, 24 nt, Artificial Sequence
  Synthetic
gacauuccaacuuuaucaguuuuc

SEQ ID NO: 296887 - RNA, 18 nt, Artificial Sequence
  Synthetic
aaguuauuaggaguuuuc

SEQ ID NO: 296888 - RNA, 19 nt, Artificial Sequence
  Synthetic
aaaguuauuaggaguuuuc

SEQ ID NO: 296889 - RNA, 20 nt, Artificial Sequence
  Synthetic
aaaaguuauuaggaguuuuc

SEQ ID NO: 296890 - RNA, 21 nt, Artificial Sequence
  Synthetic
gaaaaguuauuaggaguuuuc

SEQ ID NO: 296891 - RNA, 22 nt, Artificial Sequence
  Synthetic
ggaaaaguuauuaggaguuuuc

SEQ ID NO: 296892 - RNA, 23 nt, Artificial Sequence
  Synthetic
aggaaaaguuauuaggaguuuuc

SEQ ID NO: 296893 - RNA, 24 nt, Artificial Sequence
  Synthetic
gaggaaaaguuauuaggaguuuuc

SEQ ID NO: 296894 - RNA, 18 nt, Artificial Sequence
  Synthetic
gauuauucaugaguuuuc

SEQ ID NO: 296895 - RNA, 19 nt, Artificial Sequence
  Synthetic
ggauuauucaugaguuuuc

SEQ ID NO: 296896 - RNA, 20 nt, Artificial Sequence
  Synthetic
uggauuauucaugaguuuuc

SEQ ID NO: 296897 - RNA, 21 nt, Artificial Sequence
  Synthetic
guggauuauucaugaguuuuc

SEQ ID NO: 296898 - RNA, 22 nt, Artificial Sequence
  Synthetic
gguggauuauucaugaguuuuc

SEQ ID NO: 296899 - RNA, 23 nt, Artificial Sequence
  Synthetic
ggguggauuauucaugaguuuuc

SEQ ID NO: 296900 - RNA, 24 nt, Artificial Sequence
  Synthetic
gggguggauuauucaugaguuuuc

SEQ ID NO: 296901 - RNA, 18 nt, Artificial Sequence
  Synthetic
ucugggguuugaguuuuc

SEQ ID NO: 296902 - RNA, 19 nt, Artificial Sequence
  Synthetic
uucugggguuugaguuuuc

SEQ ID NO: 296903 - RNA, 20 nt, Artificial Sequence
  Synthetic
cuucugggguuugaguuuuc

SEQ ID NO: 296904 - RNA, 21 nt, Artificial Sequence
  Synthetic
gcuucugggguuugaguuuuc

SEQ ID NO: 296905 - RNA, 22 nt, Artificial Sequence
  Synthetic
ugcuucugggguuugaguuuuc

SEQ ID NO: 296906 - RNA, 23 nt, Artificial Sequence
  Synthetic
uugcuucugggguuugaguuuuc

SEQ ID NO: 296907 - RNA, 24 nt, Artificial Sequence
  Synthetic
guugcuucugggguuugaguuuuc

SEQ ID NO: 296908 - RNA, 18 nt, Artificial Sequence
  Synthetic
gauggcaucuuaguuuuc

SEQ ID NO: 296909 - RNA, 19 nt, Artificial Sequence
  Synthetic
agauggcaucuuaguuuuc

SEQ ID NO: 296910 - RNA, 20 nt, Artificial Sequence
  Synthetic
uagauggcaucuuaguuuuc

SEQ ID NO: 296911 - RNA, 21 nt, Artificial Sequence
  Synthetic
auagauggcaucuuaguuuuc

SEQ ID NO: 296912 - RNA, 22 nt, Artificial Sequence
  Synthetic
uauagauggcaucuuaguuuuc

SEQ ID NO: 296913 - RNA, 23 nt, Artificial Sequence
  Synthetic
guauagauggcaucuuaguuuuc

SEQ ID NO: 296914 - RNA, 24 nt, Artificial Sequence
  Synthetic
uguauagauggcaucuuaguuuuc

SEQ ID NO: 296915 - RNA, 18 nt, Artificial Sequence
  Synthetic
ccaacuuuccucguuuuc

SEQ ID NO: 296916 - RNA, 19 nt, Artificial Sequence
  Synthetic
accaacuuuccucguuuuc

SEQ ID NO: 296917 - RNA, 20 nt, Artificial Sequence
  Synthetic
gaccaacuuuccucguuuuc

SEQ ID NO: 296918 - RNA, 21 nt, Artificial Sequence
  Synthetic
ugaccaacuuuccucguuuuc

SEQ ID NO: 296919 - RNA, 22 nt, Artificial Sequence
  Synthetic
gugaccaacuuuccucguuuuc

SEQ ID NO: 296920 - RNA, 23 nt, Artificial Sequence
  Synthetic
ggugaccaacuuuccucguuuuc

SEQ ID NO: 296921 - RNA, 24 nt, Artificial Sequence
  Synthetic
gggugaccaacuuuccucguuuuc

SEQ ID NO: 296922 - RNA, 18 nt, Artificial Sequence
  Synthetic
gguuaaggaaagguuuuc

SEQ ID NO: 296923 - RNA, 19 nt, Artificial Sequence
  Synthetic
ugguuaaggaaagguuuuc

SEQ ID NO: 296924 - RNA, 20 nt, Artificial Sequence
  Synthetic
uugguuaaggaaagguuuuc

SEQ ID NO: 296925 - RNA, 21 nt, Artificial Sequence
  Synthetic
auugguuaaggaaagguuuuc

SEQ ID NO: 296926 - RNA, 22 nt, Artificial Sequence
  Synthetic
gauugguuaaggaaagguuuuc

SEQ ID NO: 296927 - RNA, 23 nt, Artificial Sequence
  Synthetic
ugauugguuaaggaaagguuuuc

SEQ ID NO: 296928 - RNA, 24 nt, Artificial Sequence
  Synthetic
cugauugguuaaggaaagguuuuc

SEQ ID NO: 296929 - RNA, 18 nt, Artificial Sequence
  Synthetic
aagggaagagagguuuuc

SEQ ID NO: 296930 - RNA, 19 nt, Artificial Sequence
  Synthetic
caagggaagagagguuuuc

SEQ ID NO: 296931 - RNA, 20 nt, Artificial Sequence
  Synthetic
ccaagggaagagagguuuuc

SEQ ID NO: 296932 - RNA, 21 nt, Artificial Sequence
  Synthetic
uccaagggaagagagguuuuc

SEQ ID NO: 296933 - RNA, 22 nt, Artificial Sequence
  Synthetic
auccaagggaagagagguuuuc

SEQ ID NO: 296934 - RNA, 23 nt, Artificial Sequence
  Synthetic
aauccaagggaagagagguuuuc

SEQ ID NO: 296935 - RNA, 24 nt, Artificial Sequence
  Synthetic
gaauccaagggaagagagguuuuc

SEQ ID NO: 296936 - RNA, 18 nt, Artificial Sequence
  Synthetic
aaaccuguauugguuuuc

SEQ ID NO: 296937 - RNA, 19 nt, Artificial Sequence
  Synthetic
aaaaccuguauugguuuuc

SEQ ID NO: 296938 - RNA, 20 nt, Artificial Sequence
  Synthetic
caaaaccuguauugguuuuc

SEQ ID NO: 296939 - RNA, 21 nt, Artificial Sequence
  Synthetic
ucaaaaccuguauugguuuuc

SEQ ID NO: 296940 - RNA, 22 nt, Artificial Sequence
  Synthetic
cucaaaaccuguauugguuuuc

SEQ ID NO: 296941 - RNA, 23 nt, Artificial Sequence
  Synthetic
ucucaaaaccuguauugguuuuc

SEQ ID NO: 296942 - RNA, 24 nt, Artificial Sequence
  Synthetic
cucucaaaaccuguauugguuuuc

SEQ ID NO: 296943 - RNA, 18 nt, Artificial Sequence
  Synthetic
aguaaagauuugguuuuc

SEQ ID NO: 296944 - RNA, 19 nt, Artificial Sequence
  Synthetic
uaguaaagauuugguuuuc

SEQ ID NO: 296945 - RNA, 20 nt, Artificial Sequence
  Synthetic
uuaguaaagauuugguuuuc

SEQ ID NO: 296946 - RNA, 21 nt, Artificial Sequence
  Synthetic
cuuaguaaagauuugguuuuc

SEQ ID NO: 296947 - RNA, 22 nt, Artificial Sequence
  Synthetic
ucuuaguaaagauuugguuuuc

SEQ ID NO: 296948 - RNA, 23 nt, Artificial Sequence
  Synthetic
uucuuaguaaagauuugguuuuc

SEQ ID NO: 296949 - RNA, 24 nt, Artificial Sequence
  Synthetic
uuucuuaguaaagauuugguuuuc

SEQ ID NO: 296950 - RNA, 18 nt, Artificial Sequence
  Synthetic
caguuaaugaauguuuuc

SEQ ID NO: 296951 - RNA, 19 nt, Artificial Sequence
  Synthetic
acaguuaaugaauguuuuc

SEQ ID NO: 296952 - RNA, 20 nt, Artificial Sequence
  Synthetic
aacaguuaaugaauguuuuc

SEQ ID NO: 296953 - RNA, 21 nt, Artificial Sequence
  Synthetic
uaacaguuaaugaauguuuuc

SEQ ID NO: 296954 - RNA, 22 nt, Artificial Sequence
  Synthetic
guaacaguuaaugaauguuuuc

SEQ ID NO: 296955 - RNA, 23 nt, Artificial Sequence
  Synthetic
aguaacaguuaaugaauguuuuc

SEQ ID NO: 296956 - RNA, 24 nt, Artificial Sequence
  Synthetic
aaguaacaguuaaugaauguuuuc

SEQ ID NO: 296957 - RNA, 18 nt, Artificial Sequence
  Synthetic
auaaugaaucauguuuuc

SEQ ID NO: 296958 - RNA, 19 nt, Artificial Sequence
  Synthetic
aauaaugaaucauguuuuc

SEQ ID NO: 296959 - RNA, 20 nt, Artificial Sequence
  Synthetic
aaauaaugaaucauguuuuc

SEQ ID NO: 296960 - RNA, 21 nt, Artificial Sequence
  Synthetic
gaaauaaugaaucauguuuuc

SEQ ID NO: 296961 - RNA, 22 nt, Artificial Sequence
  Synthetic
ugaaauaaugaaucauguuuuc

SEQ ID NO: 296962 - RNA, 23 nt, Artificial Sequence
  Synthetic
uugaaauaaugaaucauguuuuc

SEQ ID NO: 296963 - RNA, 24 nt, Artificial Sequence
  Synthetic
guugaaauaaugaaucauguuuuc

SEQ ID NO: 296964 - RNA, 18 nt, Artificial Sequence
  Synthetic
cauccaggcccuguuuuc

SEQ ID NO: 296965 - RNA, 19 nt, Artificial Sequence
  Synthetic
ucauccaggcccuguuuuc

SEQ ID NO: 296966 - RNA, 20 nt, Artificial Sequence
  Synthetic
cucauccaggcccuguuuuc

SEQ ID NO: 296967 - RNA, 21 nt, Artificial Sequence
  Synthetic
ccucauccaggcccuguuuuc

SEQ ID NO: 296968 - RNA, 22 nt, Artificial Sequence
  Synthetic
uccucauccaggcccuguuuuc

SEQ ID NO: 296969 - RNA, 23 nt, Artificial Sequence
  Synthetic
guccucauccaggcccuguuuuc

SEQ ID NO: 296970 - RNA, 24 nt, Artificial Sequence
  Synthetic
aguccucauccaggcccuguuuuc

SEQ ID NO: 296971 - RNA, 18 nt, Artificial Sequence
  Synthetic
cccucaugauguguuuuc

SEQ ID NO: 296972 - RNA, 19 nt, Artificial Sequence
  Synthetic
ccccucaugauguguuuuc

SEQ ID NO: 296973 - RNA, 20 nt, Artificial Sequence
  Synthetic
uccccucaugauguguuuuc

SEQ ID NO: 296974 - RNA, 21 nt, Artificial Sequence
  Synthetic
uuccccucaugauguguuuuc

SEQ ID NO: 296975 - RNA, 22 nt, Artificial Sequence
  Synthetic
uuuccccucaugauguguuuuc

SEQ ID NO: 296976 - RNA, 23 nt, Artificial Sequence
  Synthetic
auuuccccucaugauguguuuuc

SEQ ID NO: 296977 - RNA, 24 nt, Artificial Sequence
  Synthetic
uauuuccccucaugauguguuuuc

SEQ ID NO: 296978 - RNA, 18 nt, Artificial Sequence
  Synthetic
auaaaauugcuuguuuuc

SEQ ID NO: 296979 - RNA, 19 nt, Artificial Sequence
  Synthetic
cauaaaauugcuuguuuuc

SEQ ID NO: 296980 - RNA, 20 nt, Artificial Sequence
  Synthetic
ucauaaaauugcuuguuuuc

SEQ ID NO: 296981 - RNA, 21 nt, Artificial Sequence
  Synthetic
aucauaaaauugcuuguuuuc

SEQ ID NO: 296982 - RNA, 22 nt, Artificial Sequence
  Synthetic
gaucauaaaauugcuuguuuuc

SEQ ID NO: 296983 - RNA, 23 nt, Artificial Sequence
  Synthetic
agaucauaaaauugcuuguuuuc

SEQ ID NO: 296984 - RNA, 24 nt, Artificial Sequence
  Synthetic
aagaucauaaaauugcuuguuuuc

SEQ ID NO: 296985 - RNA, 18 nt, Artificial Sequence
  Synthetic
cccgacauaguuguuuuc

SEQ ID NO: 296986 - RNA, 19 nt, Artificial Sequence
  Synthetic
ccccgacauaguuguuuuc

SEQ ID NO: 296987 - RNA, 20 nt, Artificial Sequence
  Synthetic
cccccgacauaguuguuuuc

SEQ ID NO: 296988 - RNA, 21 nt, Artificial Sequence
  Synthetic
ucccccgacauaguuguuuuc

SEQ ID NO: 296989 - RNA, 22 nt, Artificial Sequence
  Synthetic
uucccccgacauaguuguuuuc

SEQ ID NO: 296990 - RNA, 23 nt, Artificial Sequence
  Synthetic
uuucccccgacauaguuguuuuc

SEQ ID NO: 296991 - RNA, 24 nt, Artificial Sequence
  Synthetic
uuuucccccgacauaguuguuuuc

SEQ ID NO: 296992 - RNA, 18 nt, Artificial Sequence
  Synthetic
ugcuuaaguguuguuuuc

SEQ ID NO: 296993 - RNA, 19 nt, Artificial Sequence
  Synthetic
augcuuaaguguuguuuuc

SEQ ID NO: 296994 - RNA, 20 nt, Artificial Sequence
  Synthetic
uaugcuuaaguguuguuuuc

SEQ ID NO: 296995 - RNA, 21 nt, Artificial Sequence
  Synthetic
guaugcuuaaguguuguuuuc

SEQ ID NO: 296996 - RNA, 22 nt, Artificial Sequence
  Synthetic
gguaugcuuaaguguuguuuuc

SEQ ID NO: 296997 - RNA, 23 nt, Artificial Sequence
  Synthetic
ugguaugcuuaaguguuguuuuc

SEQ ID NO: 296998 - RNA, 24 nt, Artificial Sequence
  Synthetic
gugguaugcuuaaguguuguuuuc

SEQ ID NO: 296999 - RNA, 18 nt, Artificial Sequence
  Synthetic
cagaaaugauuuguuuuc

SEQ ID NO: 297000 - RNA, 19 nt, Artificial Sequence
  Synthetic
gcagaaaugauuuguuuuc

SEQ ID NO: 297001 - RNA, 20 nt, Artificial Sequence
  Synthetic
ugcagaaaugauuuguuuuc

SEQ ID NO: 297002 - RNA, 21 nt, Artificial Sequence
  Synthetic
uugcagaaaugauuuguuuuc

SEQ ID NO: 297003 - RNA, 22 nt, Artificial Sequence
  Synthetic
cuugcagaaaugauuuguuuuc

SEQ ID NO: 297004 - RNA, 23 nt, Artificial Sequence
  Synthetic
acuugcagaaaugauuuguuuuc

SEQ ID NO: 297005 - RNA, 24 nt, Artificial Sequence
  Synthetic
uacuugcagaaaugauuuguuuuc

SEQ ID NO: 297006 - RNA, 18 nt, Artificial Sequence
  Synthetic
ugaagauucuuuguuuuc

SEQ ID NO: 297007 - RNA, 19 nt, Artificial Sequence
  Synthetic
cugaagauucuuuguuuuc

SEQ ID NO: 297008 - RNA, 20 nt, Artificial Sequence
  Synthetic
acugaagauucuuuguuuuc

SEQ ID NO: 297009 - RNA, 21 nt, Artificial Sequence
  Synthetic
cacugaagauucuuuguuuuc

SEQ ID NO: 297010 - RNA, 22 nt, Artificial Sequence
  Synthetic
ucacugaagauucuuuguuuuc

SEQ ID NO: 297011 - RNA, 23 nt, Artificial Sequence
  Synthetic
cucacugaagauucuuuguuuuc

SEQ ID NO: 297012 - RNA, 24 nt, Artificial Sequence
  Synthetic
ucucacugaagauucuuuguuuuc

SEQ ID NO: 297013 - RNA, 18 nt, Artificial Sequence
  Synthetic
aggugaccucaauuuuuc

SEQ ID NO: 297014 - RNA, 19 nt, Artificial Sequence
  Synthetic
aaggugaccucaauuuuuc

SEQ ID NO: 297015 - RNA, 20 nt, Artificial Sequence
  Synthetic
aaaggugaccucaauuuuuc

SEQ ID NO: 297016 - RNA, 21 nt, Artificial Sequence
  Synthetic
aaaaggugaccucaauuuuuc

SEQ ID NO: 297017 - RNA, 22 nt, Artificial Sequence
  Synthetic
uaaaaggugaccucaauuuuuc

SEQ ID NO: 297018 - RNA, 23 nt, Artificial Sequence
  Synthetic
auaaaaggugaccucaauuuuuc

SEQ ID NO: 297019 - RNA, 24 nt, Artificial Sequence
  Synthetic
uauaaaaggugaccucaauuuuuc

SEQ ID NO: 297020 - RNA, 18 nt, Artificial Sequence
  Synthetic
agaugaaugacauuuuuc

SEQ ID NO: 297021 - RNA, 19 nt, Artificial Sequence
  Synthetic
aagaugaaugacauuuuuc

SEQ ID NO: 297022 - RNA, 20 nt, Artificial Sequence
  Synthetic
aaagaugaaugacauuuuuc

SEQ ID NO: 297023 - RNA, 21 nt, Artificial Sequence
  Synthetic
gaaagaugaaugacauuuuuc

SEQ ID NO: 297024 - RNA, 22 nt, Artificial Sequence
  Synthetic
agaaagaugaaugacauuuuuc

SEQ ID NO: 297025 - RNA, 23 nt, Artificial Sequence
  Synthetic
aagaaagaugaaugacauuuuuc

SEQ ID NO: 297026 - RNA, 24 nt, Artificial Sequence
  Synthetic
uaagaaagaugaaugacauuuuuc

SEQ ID NO: 297027 - RNA, 18 nt, Artificial Sequence
  Synthetic
ugcagugcuacauuuuuc

SEQ ID NO: 297028 - RNA, 19 nt, Artificial Sequence
  Synthetic
cugcagugcuacauuuuuc

SEQ ID NO: 297029 - RNA, 20 nt, Artificial Sequence
  Synthetic
acugcagugcuacauuuuuc

SEQ ID NO: 297030 - RNA, 21 nt, Artificial Sequence
  Synthetic
aacugcagugcuacauuuuuc

SEQ ID NO: 297031 - RNA, 22 nt, Artificial Sequence
  Synthetic
uaacugcagugcuacauuuuuc

SEQ ID NO: 297032 - RNA, 23 nt, Artificial Sequence
  Synthetic
guaacugcagugcuacauuuuuc

SEQ ID NO: 297033 - RNA, 24 nt, Artificial Sequence
  Synthetic
uguaacugcagugcuacauuuuuc

SEQ ID NO: 297034 - RNA, 18 nt, Artificial Sequence
  Synthetic
aaauuugggucauuuuuc

SEQ ID NO: 297035 - RNA, 19 nt, Artificial Sequence
  Synthetic
uaaauuugggucauuuuuc

SEQ ID NO: 297036 - RNA, 20 nt, Artificial Sequence
  Synthetic
auaaauuugggucauuuuuc

SEQ ID NO: 297037 - RNA, 21 nt, Artificial Sequence
  Synthetic
aauaaauuugggucauuuuuc

SEQ ID NO: 297038 - RNA, 22 nt, Artificial Sequence
  Synthetic
aaauaaauuugggucauuuuuc

SEQ ID NO: 297039 - RNA, 23 nt, Artificial Sequence
  Synthetic
caaauaaauuugggucauuuuuc

SEQ ID NO: 297040 - RNA, 24 nt, Artificial Sequence
  Synthetic
ucaaauaaauuugggucauuuuuc

SEQ ID NO: 297041 - RNA, 18 nt, Artificial Sequence
  Synthetic
gaaaugccuucauuuuuc

SEQ ID NO: 297042 - RNA, 19 nt, Artificial Sequence
  Synthetic
ggaaaugccuucauuuuuc

SEQ ID NO: 297043 - RNA, 20 nt, Artificial Sequence
  Synthetic
uggaaaugccuucauuuuuc

SEQ ID NO: 297044 - RNA, 21 nt, Artificial Sequence
  Synthetic
auggaaaugccuucauuuuuc

SEQ ID NO: 297045 - RNA, 22 nt, Artificial Sequence
  Synthetic
gauggaaaugccuucauuuuuc

SEQ ID NO: 297046 - RNA, 23 nt, Artificial Sequence
  Synthetic
ugauggaaaugccuucauuuuuc

SEQ ID NO: 297047 - RNA, 24 nt, Artificial Sequence
  Synthetic
uugauggaaaugccuucauuuuuc

SEQ ID NO: 297048 - RNA, 18 nt, Artificial Sequence
  Synthetic
caaaaaguuggauuuuuc

SEQ ID NO: 297049 - RNA, 19 nt, Artificial Sequence
  Synthetic
ucaaaaaguuggauuuuuc

SEQ ID NO: 297050 - RNA, 20 nt, Artificial Sequence
  Synthetic
cucaaaaaguuggauuuuuc

SEQ ID NO: 297051 - RNA, 21 nt, Artificial Sequence
  Synthetic
ccucaaaaaguuggauuuuuc

SEQ ID NO: 297052 - RNA, 22 nt, Artificial Sequence
  Synthetic
uccucaaaaaguuggauuuuuc

SEQ ID NO: 297053 - RNA, 23 nt, Artificial Sequence
  Synthetic
uuccucaaaaaguuggauuuuuc

SEQ ID NO: 297054 - RNA, 24 nt, Artificial Sequence
  Synthetic
auuccucaaaaaguuggauuuuuc

SEQ ID NO: 297055 - RNA, 18 nt, Artificial Sequence
  Synthetic
gaucacccaaacuuuuuc

SEQ ID NO: 297056 - RNA, 19 nt, Artificial Sequence
  Synthetic
ggaucacccaaacuuuuuc

SEQ ID NO: 297057 - RNA, 20 nt, Artificial Sequence
  Synthetic
aggaucacccaaacuuuuuc

SEQ ID NO: 297058 - RNA, 21 nt, Artificial Sequence
  Synthetic
aaggaucacccaaacuuuuuc

SEQ ID NO: 297059 - RNA, 22 nt, Artificial Sequence
  Synthetic
uaaggaucacccaaacuuuuuc

SEQ ID NO: 297060 - RNA, 23 nt, Artificial Sequence
  Synthetic
cuaaggaucacccaaacuuuuuc

SEQ ID NO: 297061 - RNA, 24 nt, Artificial Sequence
  Synthetic
gcuaaggaucacccaaacuuuuuc

SEQ ID NO: 297062 - RNA, 18 nt, Artificial Sequence
  Synthetic
auuauagacaacuuuuuc

SEQ ID NO: 297063 - RNA, 19 nt, Artificial Sequence
  Synthetic
gauuauagacaacuuuuuc

SEQ ID NO: 297064 - RNA, 20 nt, Artificial Sequence
  Synthetic
agauuauagacaacuuuuuc

SEQ ID NO: 297065 - RNA, 21 nt, Artificial Sequence
  Synthetic
aagauuauagacaacuuuuuc

SEQ ID NO: 297066 - RNA, 22 nt, Artificial Sequence
  Synthetic
aaagauuauagacaacuuuuuc

SEQ ID NO: 297067 - RNA, 23 nt, Artificial Sequence
  Synthetic
caaagauuauagacaacuuuuuc

SEQ ID NO: 297068 - RNA, 24 nt, Artificial Sequence
  Synthetic
acaaagauuauagacaacuuuuuc

SEQ ID NO: 297069 - RNA, 18 nt, Artificial Sequence
  Synthetic
agagauuuauacuuuuuc

SEQ ID NO: 297070 - RNA, 19 nt, Artificial Sequence
  Synthetic
uagagauuuauacuuuuuc

SEQ ID NO: 297071 - RNA, 20 nt, Artificial Sequence
  Synthetic
auagagauuuauacuuuuuc

SEQ ID NO: 297072 - RNA, 21 nt, Artificial Sequence
  Synthetic
uauagagauuuauacuuuuuc

SEQ ID NO: 297073 - RNA, 22 nt, Artificial Sequence
  Synthetic
auauagagauuuauacuuuuuc

SEQ ID NO: 297074 - RNA, 23 nt, Artificial Sequence
  Synthetic
aauauagagauuuauacuuuuuc

SEQ ID NO: 297075 - RNA, 24 nt, Artificial Sequence
  Synthetic
aaauauagagauuuauacuuuuuc

SEQ ID NO: 297076 - RNA, 18 nt, Artificial Sequence
  Synthetic
ucagauguugucuuuuuc

SEQ ID NO: 297077 - RNA, 19 nt, Artificial Sequence
  Synthetic
uucagauguugucuuuuuc

SEQ ID NO: 297078 - RNA, 20 nt, Artificial Sequence
  Synthetic
cuucagauguugucuuuuuc

SEQ ID NO: 297079 - RNA, 21 nt, Artificial Sequence
  Synthetic
acuucagauguugucuuuuuc

SEQ ID NO: 297080 - RNA, 22 nt, Artificial Sequence
  Synthetic
cacuucagauguugucuuuuuc

SEQ ID NO: 297081 - RNA, 23 nt, Artificial Sequence
  Synthetic
ucacuucagauguugucuuuuuc

SEQ ID NO: 297082 - RNA, 24 nt, Artificial Sequence
  Synthetic
cucacuucagauguugucuuuuuc

SEQ ID NO: 297083 - RNA, 18 nt, Artificial Sequence
  Synthetic
ggcaccaggcaguuuuuc

SEQ ID NO: 297084 - RNA, 19 nt, Artificial Sequence
  Synthetic
aggcaccaggcaguuuuuc

SEQ ID NO: 297085 - RNA, 20 nt, Artificial Sequence
  Synthetic
caggcaccaggcaguuuuuc

SEQ ID NO: 297086 - RNA, 21 nt, Artificial Sequence
  Synthetic
ucaggcaccaggcaguuuuuc

SEQ ID NO: 297087 - RNA, 22 nt, Artificial Sequence
  Synthetic
cucaggcaccaggcaguuuuuc

SEQ ID NO: 297088 - RNA, 23 nt, Artificial Sequence
  Synthetic
ucucaggcaccaggcaguuuuuc

SEQ ID NO: 297089 - RNA, 24 nt, Artificial Sequence
  Synthetic
uucucaggcaccaggcaguuuuuc

SEQ ID NO: 297090 - RNA, 18 nt, Artificial Sequence
  Synthetic
uucucuuguucguuuuuc

SEQ ID NO: 297091 - RNA, 19 nt, Artificial Sequence
  Synthetic
cuucucuuguucguuuuuc

SEQ ID NO: 297092 - RNA, 20 nt, Artificial Sequence
  Synthetic
acuucucuuguucguuuuuc

SEQ ID NO: 297093 - RNA, 21 nt, Artificial Sequence
  Synthetic
uacuucucuuguucguuuuuc

SEQ ID NO: 297094 - RNA, 22 nt, Artificial Sequence
  Synthetic
cuacuucucuuguucguuuuuc

SEQ ID NO: 297095 - RNA, 23 nt, Artificial Sequence
  Synthetic
ucuacuucucuuguucguuuuuc

SEQ ID NO: 297096 - RNA, 24 nt, Artificial Sequence
  Synthetic
uucuacuucucuuguucguuuuuc

SEQ ID NO: 297097 - RNA, 18 nt, Artificial Sequence
  Synthetic
gaaucucaguuguuuuuc

SEQ ID NO: 297098 - RNA, 19 nt, Artificial Sequence
  Synthetic
ugaaucucaguuguuuuuc

SEQ ID NO: 297099 - RNA, 20 nt, Artificial Sequence
  Synthetic
cugaaucucaguuguuuuuc

SEQ ID NO: 297100 - RNA, 21 nt, Artificial Sequence
  Synthetic
gcugaaucucaguuguuuuuc

SEQ ID NO: 297101 - RNA, 22 nt, Artificial Sequence
  Synthetic
agcugaaucucaguuguuuuuc

SEQ ID NO: 297102 - RNA, 23 nt, Artificial Sequence
  Synthetic
aagcugaaucucaguuguuuuuc

SEQ ID NO: 297103 - RNA, 24 nt, Artificial Sequence
  Synthetic
caagcugaaucucaguuguuuuuc

SEQ ID NO: 297104 - RNA, 18 nt, Artificial Sequence
  Synthetic
aacagaugacauuuuuuc

SEQ ID NO: 297105 - RNA, 19 nt, Artificial Sequence
  Synthetic
aaacagaugacauuuuuuc

SEQ ID NO: 297106 - RNA, 20 nt, Artificial Sequence
  Synthetic
aaaacagaugacauuuuuuc

SEQ ID NO: 297107 - RNA, 21 nt, Artificial Sequence
  Synthetic
gaaaacagaugacauuuuuuc

SEQ ID NO: 297108 - RNA, 22 nt, Artificial Sequence
  Synthetic
agaaaacagaugacauuuuuuc

SEQ ID NO: 297109 - RNA, 23 nt, Artificial Sequence
  Synthetic
gagaaaacagaugacauuuuuuc

SEQ ID NO: 297110 - RNA, 24 nt, Artificial Sequence
  Synthetic
ugagaaaacagaugacauuuuuuc

SEQ ID NO: 297111 - RNA, 18 nt, Artificial Sequence
  Synthetic
uagagaguagauuuuuuc

SEQ ID NO: 297112 - RNA, 19 nt, Artificial Sequence
  Synthetic
auagagaguagauuuuuuc

SEQ ID NO: 297113 - RNA, 20 nt, Artificial Sequence
  Synthetic
aauagagaguagauuuuuuc

SEQ ID NO: 297114 - RNA, 21 nt, Artificial Sequence
  Synthetic
aaauagagaguagauuuuuuc

SEQ ID NO: 297115 - RNA, 22 nt, Artificial Sequence
  Synthetic
gaaauagagaguagauuuuuuc

SEQ ID NO: 297116 - RNA, 23 nt, Artificial Sequence
  Synthetic
ugaaauagagaguagauuuuuuc

SEQ ID NO: 297117 - RNA, 24 nt, Artificial Sequence
  Synthetic
augaaauagagaguagauuuuuuc

SEQ ID NO: 297118 - RNA, 18 nt, Artificial Sequence
  Synthetic
aguuuaaggacuuuuuuc

SEQ ID NO: 297119 - RNA, 19 nt, Artificial Sequence
  Synthetic
aaguuuaaggacuuuuuuc

SEQ ID NO: 297120 - RNA, 20 nt, Artificial Sequence
  Synthetic
gaaguuuaaggacuuuuuuc

SEQ ID NO: 297121 - RNA, 21 nt, Artificial Sequence
  Synthetic
agaaguuuaaggacuuuuuuc

SEQ ID NO: 297122 - RNA, 22 nt, Artificial Sequence
  Synthetic
uagaaguuuaaggacuuuuuuc

SEQ ID NO: 297123 - RNA, 23 nt, Artificial Sequence
  Synthetic
guagaaguuuaaggacuuuuuuc

SEQ ID NO: 297124 - RNA, 24 nt, Artificial Sequence
  Synthetic
gguagaaguuuaaggacuuuuuuc

SEQ ID NO: 297125 - RNA, 18 nt, Artificial Sequence
  Synthetic
uucucuauaauuuuuuuc

SEQ ID NO: 297126 - RNA, 19 nt, Artificial Sequence
  Synthetic
uuucucuauaauuuuuuuc

SEQ ID NO: 297127 - RNA, 20 nt, Artificial Sequence
  Synthetic
uuuucucuauaauuuuuuuc

SEQ ID NO: 297128 - RNA, 21 nt, Artificial Sequence
  Synthetic
cuuuucucuauaauuuuuuuc

SEQ ID NO: 297129 - RNA, 22 nt, Artificial Sequence
  Synthetic
acuuuucucuauaauuuuuuuc

SEQ ID NO: 297130 - RNA, 23 nt, Artificial Sequence
  Synthetic
aacuuuucucuauaauuuuuuuc

SEQ ID NO: 297131 - RNA, 24 nt, Artificial Sequence
  Synthetic
caacuuuucucuauaauuuuuuuc

SEQ ID NO: 297132 - RNA, 18 nt, Artificial Sequence
  Synthetic
gaauuacccauuuuuuuc

SEQ ID NO: 297133 - RNA, 19 nt, Artificial Sequence
  Synthetic
agaauuacccauuuuuuuc

SEQ ID NO: 297134 - RNA, 20 nt, Artificial Sequence
  Synthetic
uagaauuacccauuuuuuuc

SEQ ID NO: 297135 - RNA, 21 nt, Artificial Sequence
  Synthetic
uuagaauuacccauuuuuuuc

SEQ ID NO: 297136 - RNA, 22 nt, Artificial Sequence
  Synthetic
uuuagaauuacccauuuuuuuc

SEQ ID NO: 297137 - RNA, 23 nt, Artificial Sequence
  Synthetic
auuuagaauuacccauuuuuuuc

SEQ ID NO: 297138 - RNA, 24 nt, Artificial Sequence
  Synthetic
gauuuagaauuacccauuuuuuuc

SEQ ID NO: 297139 - RNA, 18 nt, Artificial Sequence
  Synthetic
aguuuuuucuuuuuuuuc

SEQ ID NO: 297140 - RNA, 19 nt, Artificial Sequence
  Synthetic
caguuuuuucuuuuuuuuc

SEQ ID NO: 297141 - RNA, 20 nt, Artificial Sequence
  Synthetic
ccaguuuuuucuuuuuuuuc

SEQ ID NO: 297142 - RNA, 21 nt, Artificial Sequence
  Synthetic
uccaguuuuuucuuuuuuuuc

SEQ ID NO: 297143 - RNA, 22 nt, Artificial Sequence
  Synthetic
auccaguuuuuucuuuuuuuuc

SEQ ID NO: 297144 - RNA, 23 nt, Artificial Sequence
  Synthetic
aauccaguuuuuucuuuuuuuuc

SEQ ID NO: 297145 - RNA, 24 nt, Artificial Sequence
  Synthetic
gaauccaguuuuuucuuuuuuuuc

SEQ ID NO: 297146 - RNA, 18 nt, Artificial Sequence
  Synthetic
auugaaucuuuuuuuuuc

SEQ ID NO: 297147 - RNA, 19 nt, Artificial Sequence
  Synthetic
uauugaaucuuuuuuuuuc

SEQ ID NO: 297148 - RNA, 20 nt, Artificial Sequence
  Synthetic
auauugaaucuuuuuuuuuc

SEQ ID NO: 297149 - RNA, 21 nt, Artificial Sequence
  Synthetic
cauauugaaucuuuuuuuuuc

SEQ ID NO: 297150 - RNA, 22 nt, Artificial Sequence
  Synthetic
ucauauugaaucuuuuuuuuuc

SEQ ID NO: 297151 - RNA, 23 nt, Artificial Sequence
  Synthetic
aucauauugaaucuuuuuuuuuc

SEQ ID NO: 297152 - RNA, 24 nt, Artificial Sequence
  Synthetic
aaucauauugaaucuuuuuuuuuc

SEQ ID NO: 297153 - RNA, 18 nt, Artificial Sequence
  Synthetic
cuuuuuuuuuuuuuuuuc

SEQ ID NO: 297154 - RNA, 19 nt, Artificial Sequence
  Synthetic
ucuuuuuuuuuuuuuuuuc

SEQ ID NO: 297155 - RNA, 20 nt, Artificial Sequence
  Synthetic
cucuuuuuuuuuuuuuuuuc

SEQ ID NO: 297156 - RNA, 21 nt, Artificial Sequence
  Synthetic
ccucuuuuuuuuuuuuuuuuc

SEQ ID NO: 297157 - RNA, 22 nt, Artificial Sequence
  Synthetic
accucuuuuuuuuuuuuuuuuc

SEQ ID NO: 297158 - RNA, 23 nt, Artificial Sequence
  Synthetic
uaccucuuuuuuuuuuuuuuuuc

SEQ ID NO: 297159 - RNA, 24 nt, Artificial Sequence
  Synthetic
auaccucuuuuuuuuuuuuuuuuc

SEQ ID NO: 297160 - RNA, 18 nt, Artificial Sequence
  Synthetic
aaaaaaaaaaaaaaaaag

SEQ ID NO: 297161 - RNA, 19 nt, Artificial Sequence
  Synthetic
aaaaaaaaaaaaaaaaaag

SEQ ID NO: 297162 - RNA, 20 nt, Artificial Sequence
  Synthetic
aaaaaaaaaaaaaaaaaaag

SEQ ID NO: 297163 - RNA, 21 nt, Artificial Sequence
  Synthetic
aaaaaaaaaaaaaaaaaaaag

SEQ ID NO: 297164 - RNA, 22 nt, Artificial Sequence
  Synthetic
caaaaaaaaaaaaaaaaaaaag

SEQ ID NO: 297165 - RNA, 23 nt, Artificial Sequence
  Synthetic
acaaaaaaaaaaaaaaaaaaaag

SEQ ID NO: 297166 - RNA, 24 nt, Artificial Sequence
  Synthetic
uacaaaaaaaaaaaaaaaaaaaag

SEQ ID NO: 297167 - RNA, 21 nt, Artificial Sequence
  Synthetic
acaaaaaaaaaaaaaaaaaag

SEQ ID NO: 297168 - RNA, 22 nt, Artificial Sequence
  Synthetic
uacaaaaaaaaaaaaaaaaaag

SEQ ID NO: 297169 - RNA, 23 nt, Artificial Sequence
  Synthetic
auacaaaaaaaaaaaaaaaaaag

SEQ ID NO: 297170 - RNA, 24 nt, Artificial Sequence
  Synthetic
aauacaaaaaaaaaaaaaaaaaag

SEQ ID NO: 297171 - RNA, 21 nt, Artificial Sequence
  Synthetic
ucaaaaaaaaaaaaaaaaaag

SEQ ID NO: 297172 - RNA, 22 nt, Artificial Sequence
  Synthetic
cucaaaaaaaaaaaaaaaaaag

SEQ ID NO: 297173 - RNA, 23 nt, Artificial Sequence
  Synthetic
ucucaaaaaaaaaaaaaaaaaag

SEQ ID NO: 297174 - RNA, 24 nt, Artificial Sequence
  Synthetic
aucucaaaaaaaaaaaaaaaaaag

SEQ ID NO: 297175 - RNA, 18 nt, Artificial Sequence
  Synthetic
cuuaaaaaaaaaaaaaag

SEQ ID NO: 297176 - RNA, 19 nt, Artificial Sequence
  Synthetic
acuuaaaaaaaaaaaaaag

SEQ ID NO: 297177 - RNA, 20 nt, Artificial Sequence
  Synthetic
aacuuaaaaaaaaaaaaaag

SEQ ID NO: 297178 - RNA, 21 nt, Artificial Sequence
  Synthetic
caacuuaaaaaaaaaaaaaag

SEQ ID NO: 297179 - RNA, 22 nt, Artificial Sequence
  Synthetic
ucaacuuaaaaaaaaaaaaaag

SEQ ID NO: 297180 - RNA, 23 nt, Artificial Sequence
  Synthetic
cucaacuuaaaaaaaaaaaaaag

SEQ ID NO: 297181 - RNA, 24 nt, Artificial Sequence
  Synthetic
gcucaacuuaaaaaaaaaaaaaag

SEQ ID NO: 297182 - RNA, 18 nt, Artificial Sequence
  Synthetic
ggggaaaaaaaaaaaaag

SEQ ID NO: 297183 - RNA, 19 nt, Artificial Sequence
  Synthetic
gggggaaaaaaaaaaaaag

SEQ ID NO: 297184 - RNA, 20 nt, Artificial Sequence
  Synthetic
agggggaaaaaaaaaaaaag

SEQ ID NO: 297185 - RNA, 21 nt, Artificial Sequence
  Synthetic
uagggggaaaaaaaaaaaaag

SEQ ID NO: 297186 - RNA, 22 nt, Artificial Sequence
  Synthetic
uuagggggaaaaaaaaaaaaag

SEQ ID NO: 297187 - RNA, 23 nt, Artificial Sequence
  Synthetic
auuagggggaaaaaaaaaaaaag

SEQ ID NO: 297188 - RNA, 24 nt, Artificial Sequence
  Synthetic
uauuagggggaaaaaaaaaaaaag

SEQ ID NO: 297189 - RNA, 18 nt, Artificial Sequence
  Synthetic
auaauaaaaaaaaaaaag

SEQ ID NO: 297190 - RNA, 19 nt, Artificial Sequence
  Synthetic
uauaauaaaaaaaaaaaag

SEQ ID NO: 297191 - RNA, 20 nt, Artificial Sequence
  Synthetic
guauaauaaaaaaaaaaaag

SEQ ID NO: 297192 - RNA, 21 nt, Artificial Sequence
  Synthetic
aguauaauaaaaaaaaaaaag

SEQ ID NO: 297193 - RNA, 22 nt, Artificial Sequence
  Synthetic
aaguauaauaaaaaaaaaaaag

SEQ ID NO: 297194 - RNA, 23 nt, Artificial Sequence
  Synthetic
aaaguauaauaaaaaaaaaaaag

SEQ ID NO: 297195 - RNA, 24 nt, Artificial Sequence
  Synthetic
uaaaguauaauaaaaaaaaaaaag

SEQ ID NO: 297196 - RNA, 18 nt, Artificial Sequence
  Synthetic
uccgucucaaaaaaaaag

SEQ ID NO: 297197 - RNA, 19 nt, Artificial Sequence
  Synthetic
cuccgucucaaaaaaaaag

SEQ ID NO: 297198 - RNA, 20 nt, Artificial Sequence
  Synthetic
acuccgucucaaaaaaaaag

SEQ ID NO: 297199 - RNA, 21 nt, Artificial Sequence
  Synthetic
gacuccgucucaaaaaaaaag

SEQ ID NO: 297200 - RNA, 22 nt, Artificial Sequence
  Synthetic
agacuccgucucaaaaaaaaag

SEQ ID NO: 297201 - RNA, 23 nt, Artificial Sequence
  Synthetic
aagacuccgucucaaaaaaaaag

SEQ ID NO: 297202 - RNA, 24 nt, Artificial Sequence
  Synthetic
caagacuccgucucaaaaaaaaag

SEQ ID NO: 297203 - RNA, 18 nt, Artificial Sequence
  Synthetic
uuaaaaagaaaaaaaaag

SEQ ID NO: 297204 - RNA, 19 nt, Artificial Sequence
  Synthetic
uuuaaaaagaaaaaaaaag

SEQ ID NO: 297205 - RNA, 20 nt, Artificial Sequence
  Synthetic
uuuuaaaaagaaaaaaaaag

SEQ ID NO: 297206 - RNA, 21 nt, Artificial Sequence
  Synthetic
auuuuaaaaagaaaaaaaaag

SEQ ID NO: 297207 - RNA, 22 nt, Artificial Sequence
  Synthetic
aauuuuaaaaagaaaaaaaaag

SEQ ID NO: 297208 - RNA, 23 nt, Artificial Sequence
  Synthetic
aaauuuuaaaaagaaaaaaaaag

SEQ ID NO: 297209 - RNA, 24 nt, Artificial Sequence
  Synthetic
uaaauuuuaaaaagaaaaaaaaag

SEQ ID NO: 297210 - RNA, 18 nt, Artificial Sequence
  Synthetic
auggaaagaaaaaaaaag

SEQ ID NO: 297211 - RNA, 19 nt, Artificial Sequence
  Synthetic
aauggaaagaaaaaaaaag

SEQ ID NO: 297212 - RNA, 20 nt, Artificial Sequence
  Synthetic
aaauggaaagaaaaaaaaag

SEQ ID NO: 297213 - RNA, 21 nt, Artificial Sequence
  Synthetic
caaauggaaagaaaaaaaaag

SEQ ID NO: 297214 - RNA, 22 nt, Artificial Sequence
  Synthetic
gcaaauggaaagaaaaaaaaag

SEQ ID NO: 297215 - RNA, 23 nt, Artificial Sequence
  Synthetic
agcaaauggaaagaaaaaaaaag

SEQ ID NO: 297216 - RNA, 24 nt, Artificial Sequence
  Synthetic
cagcaaauggaaagaaaaaaaaag

SEQ ID NO: 297217 - RNA, 18 nt, Artificial Sequence
  Synthetic
agugcugugaaaaaaaag

SEQ ID NO: 297218 - RNA, 19 nt, Artificial Sequence
  Synthetic
aagugcugugaaaaaaaag

SEQ ID NO: 297219 - RNA, 20 nt, Artificial Sequence
  Synthetic
uaagugcugugaaaaaaaag

SEQ ID NO: 297220 - RNA, 21 nt, Artificial Sequence
  Synthetic
auaagugcugugaaaaaaaag

SEQ ID NO: 297221 - RNA, 22 nt, Artificial Sequence
  Synthetic
gauaagugcugugaaaaaaaag

SEQ ID NO: 297222 - RNA, 23 nt, Artificial Sequence
  Synthetic
ugauaagugcugugaaaaaaaag

SEQ ID NO: 297223 - RNA, 24 nt, Artificial Sequence
  Synthetic
gugauaagugcugugaaaaaaaag

SEQ ID NO: 297224 - RNA, 18 nt, Artificial Sequence
  Synthetic
accaagccacaaaaaaag

SEQ ID NO: 297225 - RNA, 19 nt, Artificial Sequence
  Synthetic
aaccaagccacaaaaaaag

SEQ ID NO: 297226 - RNA, 20 nt, Artificial Sequence
  Synthetic
gaaccaagccacaaaaaaag

SEQ ID NO: 297227 - RNA, 21 nt, Artificial Sequence
  Synthetic
ugaaccaagccacaaaaaaag

SEQ ID NO: 297228 - RNA, 22 nt, Artificial Sequence
  Synthetic
uugaaccaagccacaaaaaaag

SEQ ID NO: 297229 - RNA, 23 nt, Artificial Sequence
  Synthetic
auugaaccaagccacaaaaaaag

SEQ ID NO: 297230 - RNA, 24 nt, Artificial Sequence
  Synthetic
aauugaaccaagccacaaaaaaag

SEQ ID NO: 297231 - RNA, 18 nt, Artificial Sequence
  Synthetic
uuugugaugcaaaaaaag

SEQ ID NO: 297232 - RNA, 19 nt, Artificial Sequence
  Synthetic
guuugugaugcaaaaaaag

SEQ ID NO: 297233 - RNA, 20 nt, Artificial Sequence
  Synthetic
cguuugugaugcaaaaaaag

SEQ ID NO: 297234 - RNA, 21 nt, Artificial Sequence
  Synthetic
gcguuugugaugcaaaaaaag

SEQ ID NO: 297235 - RNA, 22 nt, Artificial Sequence
  Synthetic
ggcguuugugaugcaaaaaaag

SEQ ID NO: 297236 - RNA, 23 nt, Artificial Sequence
  Synthetic
aggcguuugugaugcaaaaaaag

SEQ ID NO: 297237 - RNA, 24 nt, Artificial Sequence
  Synthetic
aaggcguuugugaugcaaaaaaag

SEQ ID NO: 297238 - RNA, 18 nt, Artificial Sequence
  Synthetic
uuuauuucagaaaaaaag

SEQ ID NO: 297239 - RNA, 19 nt, Artificial Sequence
  Synthetic
auuuauuucagaaaaaaag

SEQ ID NO: 297240 - RNA, 20 nt, Artificial Sequence
  Synthetic
aauuuauuucagaaaaaaag

SEQ ID NO: 297241 - RNA, 21 nt, Artificial Sequence
  Synthetic
aaauuuauuucagaaaaaaag

SEQ ID NO: 297242 - RNA, 22 nt, Artificial Sequence
  Synthetic
aaaauuuauuucagaaaaaaag

SEQ ID NO: 297243 - RNA, 23 nt, Artificial Sequence
  Synthetic
uaaaauuuauuucagaaaaaaag

SEQ ID NO: 297244 - RNA, 24 nt, Artificial Sequence
  Synthetic
cuaaaauuuauuucagaaaaaaag

SEQ ID NO: 297245 - RNA, 18 nt, Artificial Sequence
  Synthetic
gaggaaagggaaaaaaag

SEQ ID NO: 297246 - RNA, 19 nt, Artificial Sequence
  Synthetic
ggaggaaagggaaaaaaag

SEQ ID NO: 297247 - RNA, 20 nt, Artificial Sequence
  Synthetic
aggaggaaagggaaaaaaag

SEQ ID NO: 297248 - RNA, 21 nt, Artificial Sequence
  Synthetic
gaggaggaaagggaaaaaaag

SEQ ID NO: 297249 - RNA, 22 nt, Artificial Sequence
  Synthetic
ggaggaggaaagggaaaaaaag

SEQ ID NO: 297250 - RNA, 23 nt, Artificial Sequence
  Synthetic
aggaggaggaaagggaaaaaaag

SEQ ID NO: 297251 - RNA, 24 nt, Artificial Sequence
  Synthetic
aaggaggaggaaagggaaaaaaag

SEQ ID NO: 297252 - RNA, 18 nt, Artificial Sequence
  Synthetic
uuuuuccuggaaaaaaag

SEQ ID NO: 297253 - RNA, 19 nt, Artificial Sequence
  Synthetic
uuuuuuccuggaaaaaaag

SEQ ID NO: 297254 - RNA, 20 nt, Artificial Sequence
  Synthetic
uuuuuuuccuggaaaaaaag

SEQ ID NO: 297255 - RNA, 21 nt, Artificial Sequence
  Synthetic
uuuuuuuuccuggaaaaaaag

SEQ ID NO: 297256 - RNA, 22 nt, Artificial Sequence
  Synthetic
cuuuuuuuuccuggaaaaaaag

SEQ ID NO: 297257 - RNA, 23 nt, Artificial Sequence
  Synthetic
ucuuuuuuuuccuggaaaaaaag

SEQ ID NO: 297258 - RNA, 24 nt, Artificial Sequence
  Synthetic
uucuuuuuuuuccuggaaaaaaag

SEQ ID NO: 297259 - RNA, 18 nt, Artificial Sequence
  Synthetic
gauaauuuggaaaaaaag

SEQ ID NO: 297260 - RNA, 19 nt, Artificial Sequence
  Synthetic
ggauaauuuggaaaaaaag

SEQ ID NO: 297261 - RNA, 20 nt, Artificial Sequence
  Synthetic
gggauaauuuggaaaaaaag

SEQ ID NO: 297262 - RNA, 21 nt, Artificial Sequence
  Synthetic
agggauaauuuggaaaaaaag

SEQ ID NO: 297263 - RNA, 22 nt, Artificial Sequence
  Synthetic
aagggauaauuuggaaaaaaag

SEQ ID NO: 297264 - RNA, 23 nt, Artificial Sequence
  Synthetic
aaagggauaauuuggaaaaaaag

SEQ ID NO: 297265 - RNA, 24 nt, Artificial Sequence
  Synthetic
aaaagggauaauuuggaaaaaaag

SEQ ID NO: 297266 - RNA, 18 nt, Artificial Sequence
  Synthetic
uuacucauuuaaaaaaag

SEQ ID NO: 297267 - RNA, 19 nt, Artificial Sequence
  Synthetic
uuuacucauuuaaaaaaag

SEQ ID NO: 297268 - RNA, 20 nt, Artificial Sequence
  Synthetic
guuuacucauuuaaaaaaag

SEQ ID NO: 297269 - RNA, 21 nt, Artificial Sequence
  Synthetic
aguuuacucauuuaaaaaaag

SEQ ID NO: 297270 - RNA, 22 nt, Artificial Sequence
  Synthetic
uaguuuacucauuuaaaaaaag

SEQ ID NO: 297271 - RNA, 23 nt, Artificial Sequence
  Synthetic
cuaguuuacucauuuaaaaaaag

SEQ ID NO: 297272 - RNA, 24 nt, Artificial Sequence
  Synthetic
ucuaguuuacucauuuaaaaaaag

SEQ ID NO: 297273 - RNA, 18 nt, Artificial Sequence
  Synthetic
acuacaaucacaaaaaag

SEQ ID NO: 297274 - RNA, 19 nt, Artificial Sequence
  Synthetic
gacuacaaucacaaaaaag

SEQ ID NO: 297275 - RNA, 20 nt, Artificial Sequence
  Synthetic
agacuacaaucacaaaaaag

SEQ ID NO: 297276 - RNA, 21 nt, Artificial Sequence
  Synthetic
aagacuacaaucacaaaaaag

SEQ ID NO: 297277 - RNA, 22 nt, Artificial Sequence
  Synthetic
aaagacuacaaucacaaaaaag

SEQ ID NO: 297278 - RNA, 23 nt, Artificial Sequence
  Synthetic
uaaagacuacaaucacaaaaaag

SEQ ID NO: 297279 - RNA, 24 nt, Artificial Sequence
  Synthetic
cuaaagacuacaaucacaaaaaag

SEQ ID NO: 297280 - RNA, 18 nt, Artificial Sequence
  Synthetic
auuuuugucucaaaaaag

SEQ ID NO: 297281 - RNA, 19 nt, Artificial Sequence
  Synthetic
uauuuuugucucaaaaaag

SEQ ID NO: 297282 - RNA, 20 nt, Artificial Sequence
  Synthetic
auauuuuugucucaaaaaag

SEQ ID NO: 297283 - RNA, 21 nt, Artificial Sequence
  Synthetic
aauauuuuugucucaaaaaag

SEQ ID NO: 297284 - RNA, 22 nt, Artificial Sequence
  Synthetic
gaauauuuuugucucaaaaaag

SEQ ID NO: 297285 - RNA, 23 nt, Artificial Sequence
  Synthetic
agaauauuuuugucucaaaaaag

SEQ ID NO: 297286 - RNA, 24 nt, Artificial Sequence
  Synthetic
gagaauauuuuugucucaaaaaag

SEQ ID NO: 297287 - RNA, 18 nt, Artificial Sequence
  Synthetic
aauuguaggggaaaaaag

SEQ ID NO: 297288 - RNA, 19 nt, Artificial Sequence
  Synthetic
caauuguaggggaaaaaag

SEQ ID NO: 297289 - RNA, 20 nt, Artificial Sequence
  Synthetic
gcaauuguaggggaaaaaag

SEQ ID NO: 297290 - RNA, 21 nt, Artificial Sequence
  Synthetic
ugcaauuguaggggaaaaaag

SEQ ID NO: 297291 - RNA, 22 nt, Artificial Sequence
  Synthetic
augcaauuguaggggaaaaaag

SEQ ID NO: 297292 - RNA, 23 nt, Artificial Sequence
  Synthetic
gaugcaauuguaggggaaaaaag

SEQ ID NO: 297293 - RNA, 24 nt, Artificial Sequence
  Synthetic
agaugcaauuguaggggaaaaaag

SEQ ID NO: 297294 - RNA, 18 nt, Artificial Sequence
  Synthetic
gcuaaagacugaaaaaag

SEQ ID NO: 297295 - RNA, 19 nt, Artificial Sequence
  Synthetic
ugcuaaagacugaaaaaag

SEQ ID NO: 297296 - RNA, 20 nt, Artificial Sequence
  Synthetic
uugcuaaagacugaaaaaag

SEQ ID NO: 297297 - RNA, 21 nt, Artificial Sequence
  Synthetic
uuugcuaaagacugaaaaaag

SEQ ID NO: 297298 - RNA, 22 nt, Artificial Sequence
  Synthetic
auuugcuaaagacugaaaaaag

SEQ ID NO: 297299 - RNA, 23 nt, Artificial Sequence
  Synthetic
aauuugcuaaagacugaaaaaag

SEQ ID NO: 297300 - RNA, 24 nt, Artificial Sequence
  Synthetic
gaauuugcuaaagacugaaaaaag

SEQ ID NO: 297301 - RNA, 18 nt, Artificial Sequence
  Synthetic
caacauaaaaacaaaaag

SEQ ID NO: 297302 - RNA, 19 nt, Artificial Sequence
  Synthetic
ccaacauaaaaacaaaaag

SEQ ID NO: 297303 - RNA, 20 nt, Artificial Sequence
  Synthetic
accaacauaaaaacaaaaag

SEQ ID NO: 297304 - RNA, 21 nt, Artificial Sequence
  Synthetic
aaccaacauaaaaacaaaaag

SEQ ID NO: 297305 - RNA, 22 nt, Artificial Sequence
  Synthetic
aaaccaacauaaaaacaaaaag

SEQ ID NO: 297306 - RNA, 23 nt, Artificial Sequence
  Synthetic
gaaaccaacauaaaaacaaaaag

SEQ ID NO: 297307 - RNA, 24 nt, Artificial Sequence
  Synthetic
agaaaccaacauaaaaacaaaaag

SEQ ID NO: 297308 - RNA, 18 nt, Artificial Sequence
  Synthetic
agaaagcagcacaaaaag

SEQ ID NO: 297309 - RNA, 19 nt, Artificial Sequence
  Synthetic
aagaaagcagcacaaaaag

SEQ ID NO: 297310 - RNA, 20 nt, Artificial Sequence
  Synthetic
gaagaaagcagcacaaaaag

SEQ ID NO: 297311 - RNA, 21 nt, Artificial Sequence
  Synthetic
agaagaaagcagcacaaaaag

SEQ ID NO: 297312 - RNA, 22 nt, Artificial Sequence
  Synthetic
aagaagaaagcagcacaaaaag

SEQ ID NO: 297313 - RNA, 23 nt, Artificial Sequence
  Synthetic
aaagaagaaagcagcacaaaaag

SEQ ID NO: 297314 - RNA, 24 nt, Artificial Sequence
  Synthetic
aaaagaagaaagcagcacaaaaag

SEQ ID NO: 297315 - RNA, 18 nt, Artificial Sequence
  Synthetic
acaucuuaugacaaaaag

SEQ ID NO: 297316 - RNA, 19 nt, Artificial Sequence
  Synthetic
uacaucuuaugacaaaaag

SEQ ID NO: 297317 - RNA, 20 nt, Artificial Sequence
  Synthetic
guacaucuuaugacaaaaag

SEQ ID NO: 297318 - RNA, 21 nt, Artificial Sequence
  Synthetic
aguacaucuuaugacaaaaag

SEQ ID NO: 297319 - RNA, 22 nt, Artificial Sequence
  Synthetic
caguacaucuuaugacaaaaag

SEQ ID NO: 297320 - RNA, 23 nt, Artificial Sequence
  Synthetic
ucaguacaucuuaugacaaaaag

SEQ ID NO: 297321 - RNA, 24 nt, Artificial Sequence
  Synthetic
cucaguacaucuuaugacaaaaag

SEQ ID NO: 297322 - RNA, 18 nt, Artificial Sequence
  Synthetic
uuuauaauagccaaaaag

SEQ ID NO: 297323 - RNA, 19 nt, Artificial Sequence
  Synthetic
auuuauaauagccaaaaag

SEQ ID NO: 297324 - RNA, 20 nt, Artificial Sequence
  Synthetic
uauuuauaauagccaaaaag

SEQ ID NO: 297325 - RNA, 21 nt, Artificial Sequence
  Synthetic
uuauuuauaauagccaaaaag

SEQ ID NO: 297326 - RNA, 22 nt, Artificial Sequence
  Synthetic
auuauuuauaauagccaaaaag

SEQ ID NO: 297327 - RNA, 23 nt, Artificial Sequence
  Synthetic
cauuauuuauaauagccaaaaag

SEQ ID NO: 297328 - RNA, 24 nt, Artificial Sequence
  Synthetic
gcauuauuuauaauagccaaaaag

SEQ ID NO: 297329 - RNA, 18 nt, Artificial Sequence
  Synthetic
aggaugccuuccaaaaag

SEQ ID NO: 297330 - RNA, 19 nt, Artificial Sequence
  Synthetic
aaggaugccuuccaaaaag

SEQ ID NO: 297331 - RNA, 20 nt, Artificial Sequence
  Synthetic
uaaggaugccuuccaaaaag

SEQ ID NO: 297332 - RNA, 21 nt, Artificial Sequence
  Synthetic
auaaggaugccuuccaaaaag

SEQ ID NO: 297333 - RNA, 22 nt, Artificial Sequence
  Synthetic
uauaaggaugccuuccaaaaag

SEQ ID NO: 297334 - RNA, 23 nt, Artificial Sequence
  Synthetic
guauaaggaugccuuccaaaaag

SEQ ID NO: 297335 - RNA, 24 nt, Artificial Sequence
  Synthetic
uguauaaggaugccuuccaaaaag

SEQ ID NO: 297336 - RNA, 18 nt, Artificial Sequence
  Synthetic
aaugugaauagcaaaaag

SEQ ID NO: 297337 - RNA, 19 nt, Artificial Sequence
  Synthetic
aaaugugaauagcaaaaag

SEQ ID NO: 297338 - RNA, 20 nt, Artificial Sequence
  Synthetic
uaaaugugaauagcaaaaag

SEQ ID NO: 297339 - RNA, 21 nt, Artificial Sequence
  Synthetic
auaaaugugaauagcaaaaag

SEQ ID NO: 297340 - RNA, 22 nt, Artificial Sequence
  Synthetic
uauaaaugugaauagcaaaaag

SEQ ID NO: 297341 - RNA, 23 nt, Artificial Sequence
  Synthetic
guauaaaugugaauagcaaaaag

SEQ ID NO: 297342 - RNA, 24 nt, Artificial Sequence
  Synthetic
aguauaaaugugaauagcaaaaag

SEQ ID NO: 297343 - RNA, 18 nt, Artificial Sequence
  Synthetic
cauagcaguagcaaaaag

SEQ ID NO: 297344 - RNA, 19 nt, Artificial Sequence
  Synthetic
ucauagcaguagcaaaaag

SEQ ID NO: 297345 - RNA, 20 nt, Artificial Sequence
  Synthetic
uucauagcaguagcaaaaag

SEQ ID NO: 297346 - RNA, 21 nt, Artificial Sequence
  Synthetic
guucauagcaguagcaaaaag

SEQ ID NO: 297347 - RNA, 22 nt, Artificial Sequence
  Synthetic
gguucauagcaguagcaaaaag

SEQ ID NO: 297348 - RNA, 23 nt, Artificial Sequence
  Synthetic
ugguucauagcaguagcaaaaag

SEQ ID NO: 297349 - RNA, 24 nt, Artificial Sequence
  Synthetic
gugguucauagcaguagcaaaaag

SEQ ID NO: 297350 - RNA, 18 nt, Artificial Sequence
  Synthetic
aacaaccccaucaaaaag

SEQ ID NO: 297351 - RNA, 19 nt, Artificial Sequence
  Synthetic
aaacaaccccaucaaaaag

SEQ ID NO: 297352 - RNA, 20 nt, Artificial Sequence
  Synthetic
caaacaaccccaucaaaaag

SEQ ID NO: 297353 - RNA, 21 nt, Artificial Sequence
  Synthetic
acaaacaaccccaucaaaaag

SEQ ID NO: 297354 - RNA, 22 nt, Artificial Sequence
  Synthetic
aacaaacaaccccaucaaaaag

SEQ ID NO: 297355 - RNA, 23 nt, Artificial Sequence
  Synthetic
aaacaaacaaccccaucaaaaag

SEQ ID NO: 297356 - RNA, 24 nt, Artificial Sequence
  Synthetic
aaaacaaacaaccccaucaaaaag

SEQ ID NO: 297357 - RNA, 18 nt, Artificial Sequence
  Synthetic
ucuaugauggucaaaaag

SEQ ID NO: 297358 - RNA, 19 nt, Artificial Sequence
  Synthetic
gucuaugauggucaaaaag

SEQ ID NO: 297359 - RNA, 20 nt, Artificial Sequence
  Synthetic
ugucuaugauggucaaaaag

SEQ ID NO: 297360 - RNA, 21 nt, Artificial Sequence
  Synthetic
uugucuaugauggucaaaaag

SEQ ID NO: 297361 - RNA, 22 nt, Artificial Sequence
  Synthetic
auugucuaugauggucaaaaag

SEQ ID NO: 297362 - RNA, 23 nt, Artificial Sequence
  Synthetic
cauugucuaugauggucaaaaag

SEQ ID NO: 297363 - RNA, 24 nt, Artificial Sequence
  Synthetic
gcauugucuaugauggucaaaaag

SEQ ID NO: 297364 - RNA, 18 nt, Artificial Sequence
  Synthetic
aaaaaaagaaagaaaaag

SEQ ID NO: 297365 - RNA, 19 nt, Artificial Sequence
  Synthetic
aaaaaaaagaaagaaaaag

SEQ ID NO: 297366 - RNA, 20 nt, Artificial Sequence
  Synthetic
aaaaaaaaagaaagaaaaag

SEQ ID NO: 297367 - RNA, 21 nt, Artificial Sequence
  Synthetic
aaaaaaaaaagaaagaaaaag

SEQ ID NO: 297368 - RNA, 22 nt, Artificial Sequence
  Synthetic
aaaaaaaaaaagaaagaaaaag

SEQ ID NO: 297369 - RNA, 23 nt, Artificial Sequence
  Synthetic
aaaaaaaaaaaagaaagaaaaag

SEQ ID NO: 297370 - RNA, 24 nt, Artificial Sequence
  Synthetic
caaaaaaaaaaaagaaagaaaaag

SEQ ID NO: 297371 - RNA, 18 nt, Artificial Sequence
  Synthetic
uccgagaggcagaaaaag

SEQ ID NO: 297372 - RNA, 19 nt, Artificial Sequence
  Synthetic
cuccgagaggcagaaaaag

SEQ ID NO: 297373 - RNA, 20 nt, Artificial Sequence
  Synthetic
ucuccgagaggcagaaaaag

SEQ ID NO: 297374 - RNA, 21 nt, Artificial Sequence
  Synthetic
aucuccgagaggcagaaaaag

SEQ ID NO: 297375 - RNA, 22 nt, Artificial Sequence
  Synthetic
gaucuccgagaggcagaaaaag

SEQ ID NO: 297376 - RNA, 23 nt, Artificial Sequence
  Synthetic
agaucuccgagaggcagaaaaag

SEQ ID NO: 297377 - RNA, 24 nt, Artificial Sequence
  Synthetic
aagaucuccgagaggcagaaaaag

SEQ ID NO: 297378 - RNA, 18 nt, Artificial Sequence
  Synthetic
acagagagagagaaaaag

SEQ ID NO: 297379 - RNA, 19 nt, Artificial Sequence
  Synthetic
aacagagagagagaaaaag

SEQ ID NO: 297380 - RNA, 20 nt, Artificial Sequence
  Synthetic
aaacagagagagagaaaaag

SEQ ID NO: 297381 - RNA, 21 nt, Artificial Sequence
  Synthetic
gaaacagagagagagaaaaag

SEQ ID NO: 297382 - RNA, 22 nt, Artificial Sequence
  Synthetic
agaaacagagagagagaaaaag

SEQ ID NO: 297383 - RNA, 23 nt, Artificial Sequence
  Synthetic
uagaaacagagagagagaaaaag

SEQ ID NO: 297384 - RNA, 24 nt, Artificial Sequence
  Synthetic
guagaaacagagagagagaaaaag

SEQ ID NO: 297385 - RNA, 18 nt, Artificial Sequence
  Synthetic
caugaaaaugagaaaaag

SEQ ID NO: 297386 - RNA, 19 nt, Artificial Sequence
  Synthetic
ccaugaaaaugagaaaaag

SEQ ID NO: 297387 - RNA, 20 nt, Artificial Sequence
  Synthetic
uccaugaaaaugagaaaaag

SEQ ID NO: 297388 - RNA, 21 nt, Artificial Sequence
  Synthetic
auccaugaaaaugagaaaaag

SEQ ID NO: 297389 - RNA, 22 nt, Artificial Sequence
  Synthetic
aauccaugaaaaugagaaaaag

SEQ ID NO: 297390 - RNA, 23 nt, Artificial Sequence
  Synthetic
aaauccaugaaaaugagaaaaag

SEQ ID NO: 297391 - RNA, 24 nt, Artificial Sequence
  Synthetic
uaaauccaugaaaaugagaaaaag

SEQ ID NO: 297392 - RNA, 18 nt, Artificial Sequence
  Synthetic
uccaaucaauagaaaaag

SEQ ID NO: 297393 - RNA, 19 nt, Artificial Sequence
  Synthetic
uuccaaucaauagaaaaag

SEQ ID NO: 297394 - RNA, 20 nt, Artificial Sequence
  Synthetic
auuccaaucaauagaaaaag

SEQ ID NO: 297395 - RNA, 18 nt, Artificial Sequence
  Synthetic
auaagaaacuagaaaaag

SEQ ID NO: 297396 - RNA, 19 nt, Artificial Sequence
  Synthetic
cauaagaaacuagaaaaag

SEQ ID NO: 297397 - RNA, 20 nt, Artificial Sequence
  Synthetic
ccauaagaaacuagaaaaag

SEQ ID NO: 297398 - RNA, 21 nt, Artificial Sequence
  Synthetic
gccauaagaaacuagaaaaag

SEQ ID NO: 297399 - RNA, 22 nt, Artificial Sequence
  Synthetic
cgccauaagaaacuagaaaaag

SEQ ID NO: 297400 - RNA, 23 nt, Artificial Sequence
  Synthetic
ucgccauaagaaacuagaaaaag

SEQ ID NO: 297401 - RNA, 24 nt, Artificial Sequence
  Synthetic
uucgccauaagaaacuagaaaaag

SEQ ID NO: 297402 - RNA, 18 nt, Artificial Sequence
  Synthetic
uuaagaaacuagaaaaag

SEQ ID NO: 297403 - RNA, 19 nt, Artificial Sequence
  Synthetic
cuuaagaaacuagaaaaag

SEQ ID NO: 297404 - RNA, 20 nt, Artificial Sequence
  Synthetic
ccuuaagaaacuagaaaaag

SEQ ID NO: 297405 - RNA, 21 nt, Artificial Sequence
  Synthetic
accuuaagaaacuagaaaaag

SEQ ID NO: 297406 - RNA, 22 nt, Artificial Sequence
  Synthetic
uaccuuaagaaacuagaaaaag

SEQ ID NO: 297407 - RNA, 23 nt, Artificial Sequence
  Synthetic
cuaccuuaagaaacuagaaaaag

SEQ ID NO: 297408 - RNA, 24 nt, Artificial Sequence
  Synthetic
ucuaccuuaagaaacuagaaaaag

SEQ ID NO: 297409 - RNA, 18 nt, Artificial Sequence
  Synthetic
uugucauguuagaaaaag

SEQ ID NO: 297410 - RNA, 19 nt, Artificial Sequence
  Synthetic
guugucauguuagaaaaag

SEQ ID NO: 297411 - RNA, 20 nt, Artificial Sequence
  Synthetic
aguugucauguuagaaaaag

SEQ ID NO: 297412 - RNA, 21 nt, Artificial Sequence
  Synthetic
caguugucauguuagaaaaag

SEQ ID NO: 297413 - RNA, 22 nt, Artificial Sequence
  Synthetic
acaguugucauguuagaaaaag

SEQ ID NO: 297414 - RNA, 23 nt, Artificial Sequence
  Synthetic
aacaguugucauguuagaaaaag

SEQ ID NO: 297415 - RNA, 24 nt, Artificial Sequence
  Synthetic
caacaguugucauguuagaaaaag

SEQ ID NO: 297416 - RNA, 18 nt, Artificial Sequence
  Synthetic
aagguaaaaaggaaaaag

SEQ ID NO: 297417 - RNA, 19 nt, Artificial Sequence
  Synthetic
aaagguaaaaaggaaaaag

SEQ ID NO: 297418 - RNA, 20 nt, Artificial Sequence
  Synthetic
caaagguaaaaaggaaaaag

SEQ ID NO: 297419 - RNA, 21 nt, Artificial Sequence
  Synthetic
acaaagguaaaaaggaaaaag

SEQ ID NO: 297420 - RNA, 22 nt, Artificial Sequence
  Synthetic
aacaaagguaaaaaggaaaaag

SEQ ID NO: 297421 - RNA, 23 nt, Artificial Sequence
  Synthetic
uaacaaagguaaaaaggaaaaag

SEQ ID NO: 297422 - RNA, 24 nt, Artificial Sequence
  Synthetic
cuaacaaagguaaaaaggaaaaag

SEQ ID NO: 297423 - RNA, 18 nt, Artificial Sequence
  Synthetic
aaggaaagcaggaaaaag

SEQ ID NO: 297424 - RNA, 19 nt, Artificial Sequence
  Synthetic
gaaggaaagcaggaaaaag

SEQ ID NO: 297425 - RNA, 20 nt, Artificial Sequence
  Synthetic
ggaaggaaagcaggaaaaag

SEQ ID NO: 297426 - RNA, 21 nt, Artificial Sequence
  Synthetic
aggaaggaaagcaggaaaaag

SEQ ID NO: 297427 - RNA, 22 nt, Artificial Sequence
  Synthetic
gaggaaggaaagcaggaaaaag

SEQ ID NO: 297428 - RNA, 23 nt, Artificial Sequence
  Synthetic
agaggaaggaaagcaggaaaaag

SEQ ID NO: 297429 - RNA, 24 nt, Artificial Sequence
  Synthetic
gagaggaaggaaagcaggaaaaag

SEQ ID NO: 297430 - RNA, 18 nt, Artificial Sequence
  Synthetic
gagaaaugcaggaaaaag

SEQ ID NO: 297431 - RNA, 19 nt, Artificial Sequence
  Synthetic
ugagaaaugcaggaaaaag

SEQ ID NO: 297432 - RNA, 20 nt, Artificial Sequence
  Synthetic
gugagaaaugcaggaaaaag

SEQ ID NO: 297433 - RNA, 21 nt, Artificial Sequence
  Synthetic
ugugagaaaugcaggaaaaag

SEQ ID NO: 297434 - RNA, 22 nt, Artificial Sequence
  Synthetic
gugugagaaaugcaggaaaaag

SEQ ID NO: 297435 - RNA, 23 nt, Artificial Sequence
  Synthetic
ugugugagaaaugcaggaaaaag

SEQ ID NO: 297436 - RNA, 24 nt, Artificial Sequence
  Synthetic
uugugugagaaaugcaggaaaaag

SEQ ID NO: 297437 - RNA, 18 nt, Artificial Sequence
  Synthetic
augugaggugggaaaaag

SEQ ID NO: 297438 - RNA, 19 nt, Artificial Sequence
  Synthetic
aaugugaggugggaaaaag

SEQ ID NO: 297439 - RNA, 20 nt, Artificial Sequence
  Synthetic
uaaugugaggugggaaaaag

SEQ ID NO: 297440 - RNA, 21 nt, Artificial Sequence
  Synthetic
auaaugugaggugggaaaaag

SEQ ID NO: 297441 - RNA, 22 nt, Artificial Sequence
  Synthetic
cauaaugugaggugggaaaaag

SEQ ID NO: 297442 - RNA, 23 nt, Artificial Sequence
  Synthetic
ucauaaugugaggugggaaaaag

SEQ ID NO: 297443 - RNA, 24 nt, Artificial Sequence
  Synthetic
uucauaaugugaggugggaaaaag

SEQ ID NO: 297444 - RNA, 18 nt, Artificial Sequence
  Synthetic
ccuggaagguggaaaaag

SEQ ID NO: 297445 - RNA, 19 nt, Artificial Sequence
  Synthetic
cccuggaagguggaaaaag

SEQ ID NO: 297446 - RNA, 20 nt, Artificial Sequence
  Synthetic
ccccuggaagguggaaaaag

SEQ ID NO: 297447 - RNA, 21 nt, Artificial Sequence
  Synthetic
cccccuggaagguggaaaaag

SEQ ID NO: 297448 - RNA, 22 nt, Artificial Sequence
  Synthetic
gcccccuggaagguggaaaaag

SEQ ID NO: 297449 - RNA, 23 nt, Artificial Sequence
  Synthetic
agcccccuggaagguggaaaaag

SEQ ID NO: 297450 - RNA, 24 nt, Artificial Sequence
  Synthetic
cagcccccuggaagguggaaaaag

SEQ ID NO: 297451 - RNA, 18 nt, Artificial Sequence
  Synthetic
uaauuuugaaugaaaaag

SEQ ID NO: 297452 - RNA, 19 nt, Artificial Sequence
  Synthetic
auaauuuugaaugaaaaag

SEQ ID NO: 297453 - RNA, 20 nt, Artificial Sequence
  Synthetic
cauaauuuugaaugaaaaag

SEQ ID NO: 297454 - RNA, 21 nt, Artificial Sequence
  Synthetic
acauaauuuugaaugaaaaag

SEQ ID NO: 297455 - RNA, 22 nt, Artificial Sequence
  Synthetic
aacauaauuuugaaugaaaaag

SEQ ID NO: 297456 - RNA, 23 nt, Artificial Sequence
  Synthetic
aaacauaauuuugaaugaaaaag

SEQ ID NO: 297457 - RNA, 24 nt, Artificial Sequence
  Synthetic
uaaacauaauuuugaaugaaaaag

SEQ ID NO: 297458 - RNA, 18 nt, Artificial Sequence
  Synthetic
aaaacaauugugaaaaag

SEQ ID NO: 297459 - RNA, 19 nt, Artificial Sequence
  Synthetic
caaaacaauugugaaaaag

SEQ ID NO: 297460 - RNA, 20 nt, Artificial Sequence
  Synthetic
ccaaaacaauugugaaaaag

SEQ ID NO: 297461 - RNA, 21 nt, Artificial Sequence
  Synthetic
gccaaaacaauugugaaaaag

SEQ ID NO: 297462 - RNA, 22 nt, Artificial Sequence
  Synthetic
agccaaaacaauugugaaaaag

SEQ ID NO: 297463 - RNA, 23 nt, Artificial Sequence
  Synthetic
uagccaaaacaauugugaaaaag

SEQ ID NO: 297464 - RNA, 24 nt, Artificial Sequence
  Synthetic
auagccaaaacaauugugaaaaag

SEQ ID NO: 297465 - RNA, 18 nt, Artificial Sequence
  Synthetic
uaaauacuuuugaaaaag

SEQ ID NO: 297466 - RNA, 19 nt, Artificial Sequence
  Synthetic
uuaaauacuuuugaaaaag

SEQ ID NO: 297467 - RNA, 20 nt, Artificial Sequence
  Synthetic
auuaaauacuuuugaaaaag

SEQ ID NO: 297468 - RNA, 21 nt, Artificial Sequence
  Synthetic
cauuaaauacuuuugaaaaag

SEQ ID NO: 297469 - RNA, 22 nt, Artificial Sequence
  Synthetic
ucauuaaauacuuuugaaaaag

SEQ ID NO: 297470 - RNA, 23 nt, Artificial Sequence
  Synthetic
gucauuaaauacuuuugaaaaag

SEQ ID NO: 297471 - RNA, 24 nt, Artificial Sequence
  Synthetic
agucauuaaauacuuuugaaaaag

SEQ ID NO: 297472 - RNA, 18 nt, Artificial Sequence
  Synthetic
uagaggcagaauaaaaag

SEQ ID NO: 297473 - RNA, 19 nt, Artificial Sequence
  Synthetic
uuagaggcagaauaaaaag

SEQ ID NO: 297474 - RNA, 20 nt, Artificial Sequence
  Synthetic
guuagaggcagaauaaaaag

SEQ ID NO: 297475 - RNA, 21 nt, Artificial Sequence
  Synthetic
aguuagaggcagaauaaaaag

SEQ ID NO: 297476 - RNA, 22 nt, Artificial Sequence
  Synthetic
uaguuagaggcagaauaaaaag

SEQ ID NO: 297477 - RNA, 23 nt, Artificial Sequence
  Synthetic
cuaguuagaggcagaauaaaaag

SEQ ID NO: 297478 - RNA, 24 nt, Artificial Sequence
  Synthetic
gcuaguuagaggcagaauaaaaag

SEQ ID NO: 297479 - RNA, 18 nt, Artificial Sequence
  Synthetic
auagagugggauaaaaag

SEQ ID NO: 297480 - RNA, 19 nt, Artificial Sequence
  Synthetic
cauagagugggauaaaaag

SEQ ID NO: 297481 - RNA, 20 nt, Artificial Sequence
  Synthetic
ccauagagugggauaaaaag

SEQ ID NO: 297482 - RNA, 21 nt, Artificial Sequence
  Synthetic
accauagagugggauaaaaag

SEQ ID NO: 297483 - RNA, 22 nt, Artificial Sequence
  Synthetic
gaccauagagugggauaaaaag

SEQ ID NO: 297484 - RNA, 23 nt, Artificial Sequence
  Synthetic
ugaccauagagugggauaaaaag

SEQ ID NO: 297485 - RNA, 24 nt, Artificial Sequence
  Synthetic
uugaccauagagugggauaaaaag

SEQ ID NO: 297486 - RNA, 18 nt, Artificial Sequence
  Synthetic
cuuaugggugauaaaaag

SEQ ID NO: 297487 - RNA, 19 nt, Artificial Sequence
  Synthetic
acuuaugggugauaaaaag

SEQ ID NO: 297488 - RNA, 20 nt, Artificial Sequence
  Synthetic
aacuuaugggugauaaaaag

SEQ ID NO: 297489 - RNA, 21 nt, Artificial Sequence
  Synthetic
aaacuuaugggugauaaaaag

SEQ ID NO: 297490 - RNA, 22 nt, Artificial Sequence
  Synthetic
caaacuuaugggugauaaaaag

SEQ ID NO: 297491 - RNA, 23 nt, Artificial Sequence
  Synthetic
ucaaacuuaugggugauaaaaag

SEQ ID NO: 297492 - RNA, 24 nt, Artificial Sequence
  Synthetic
aucaaacuuaugggugauaaaaag

SEQ ID NO: 297493 - RNA, 18 nt, Artificial Sequence
  Synthetic
uuaugauagccuaaaaag

SEQ ID NO: 297494 - RNA, 19 nt, Artificial Sequence
  Synthetic
cuuaugauagccuaaaaag

SEQ ID NO: 297495 - RNA, 20 nt, Artificial Sequence
  Synthetic
ccuuaugauagccuaaaaag

SEQ ID NO: 297496 - RNA, 21 nt, Artificial Sequence
  Synthetic
uccuuaugauagccuaaaaag

SEQ ID NO: 297497 - RNA, 22 nt, Artificial Sequence
  Synthetic
auccuuaugauagccuaaaaag

SEQ ID NO: 297498 - RNA, 23 nt, Artificial Sequence
  Synthetic
uauccuuaugauagccuaaaaag

SEQ ID NO: 297499 - RNA, 24 nt, Artificial Sequence
  Synthetic
uuauccuuaugauagccuaaaaag

SEQ ID NO: 297500 - RNA, 18 nt, Artificial Sequence
  Synthetic
uuauauaaaaguaaaaag

SEQ ID NO: 297501 - RNA, 19 nt, Artificial Sequence
  Synthetic
uuuauauaaaaguaaaaag

SEQ ID NO: 297502 - RNA, 20 nt, Artificial Sequence
  Synthetic
auuuauauaaaaguaaaaag

SEQ ID NO: 297503 - RNA, 21 nt, Artificial Sequence
  Synthetic
gauuuauauaaaaguaaaaag

SEQ ID NO: 297504 - RNA, 22 nt, Artificial Sequence
  Synthetic
ugauuuauauaaaaguaaaaag

SEQ ID NO: 297505 - RNA, 23 nt, Artificial Sequence
  Synthetic
gugauuuauauaaaaguaaaaag

SEQ ID NO: 297506 - RNA, 24 nt, Artificial Sequence
  Synthetic
agugauuuauauaaaaguaaaaag

SEQ ID NO: 297507 - RNA, 18 nt, Artificial Sequence
  Synthetic
agcuuuugacuuaaaaag

SEQ ID NO: 297508 - RNA, 19 nt, Artificial Sequence
  Synthetic
cagcuuuugacuuaaaaag

SEQ ID NO: 297509 - RNA, 20 nt, Artificial Sequence
  Synthetic
acagcuuuugacuuaaaaag

SEQ ID NO: 297510 - RNA, 21 nt, Artificial Sequence
  Synthetic
aacagcuuuugacuuaaaaag

SEQ ID NO: 297511 - RNA, 22 nt, Artificial Sequence
  Synthetic
gaacagcuuuugacuuaaaaag

SEQ ID NO: 297512 - RNA, 23 nt, Artificial Sequence
  Synthetic
ggaacagcuuuugacuuaaaaag

SEQ ID NO: 297513 - RNA, 24 nt, Artificial Sequence
  Synthetic
aggaacagcuuuugacuuaaaaag

SEQ ID NO: 297514 - RNA, 18 nt, Artificial Sequence
  Synthetic
uuuuucagccuuaaaaag

SEQ ID NO: 297515 - RNA, 19 nt, Artificial Sequence
  Synthetic
auuuuucagccuuaaaaag

SEQ ID NO: 297516 - RNA, 20 nt, Artificial Sequence
  Synthetic
uauuuuucagccuuaaaaag

SEQ ID NO: 297517 - RNA, 21 nt, Artificial Sequence
  Synthetic
auauuuuucagccuuaaaaag

SEQ ID NO: 297518 - RNA, 22 nt, Artificial Sequence
  Synthetic
aauauuuuucagccuuaaaaag

SEQ ID NO: 297519 - RNA, 23 nt, Artificial Sequence
  Synthetic
gaauauuuuucagccuuaaaaag

SEQ ID NO: 297520 - RNA, 24 nt, Artificial Sequence
  Synthetic
ggaauauuuuucagccuuaaaaag

SEQ ID NO: 297521 - RNA, 18 nt, Artificial Sequence
  Synthetic
aggaaaacauuuaaaaag

SEQ ID NO: 297522 - RNA, 19 nt, Artificial Sequence
  Synthetic
uaggaaaacauuuaaaaag

SEQ ID NO: 297523 - RNA, 20 nt, Artificial Sequence
  Synthetic
uuaggaaaacauuuaaaaag

SEQ ID NO: 297524 - RNA, 21 nt, Artificial Sequence
  Synthetic
uuuaggaaaacauuuaaaaag

SEQ ID NO: 297525 - RNA, 22 nt, Artificial Sequence
  Synthetic
guuuaggaaaacauuuaaaaag

SEQ ID NO: 297526 - RNA, 23 nt, Artificial Sequence
  Synthetic
uguuuaggaaaacauuuaaaaag

SEQ ID NO: 297527 - RNA, 24 nt, Artificial Sequence
  Synthetic
auguuuaggaaaacauuuaaaaag

SEQ ID NO: 297528 - RNA, 18 nt, Artificial Sequence
  Synthetic
uauaauggagaacaaaag

SEQ ID NO: 297529 - RNA, 19 nt, Artificial Sequence
  Synthetic
guauaauggagaacaaaag

SEQ ID NO: 297530 - RNA, 20 nt, Artificial Sequence
  Synthetic
uguauaauggagaacaaaag

SEQ ID NO: 297531 - RNA, 21 nt, Artificial Sequence
  Synthetic
uuguauaauggagaacaaaag

SEQ ID NO: 297532 - RNA, 22 nt, Artificial Sequence
  Synthetic
uuuguauaauggagaacaaaag

SEQ ID NO: 297533 - RNA, 23 nt, Artificial Sequence
  Synthetic
cuuuguauaauggagaacaaaag

SEQ ID NO: 297534 - RNA, 24 nt, Artificial Sequence
  Synthetic
ucuuuguauaauggagaacaaaag

SEQ ID NO: 297535 - RNA, 18 nt, Artificial Sequence
  Synthetic
uuguaagcgucacaaaag

SEQ ID NO: 297536 - RNA, 19 nt, Artificial Sequence
  Synthetic
auuguaagcgucacaaaag

SEQ ID NO: 297537 - RNA, 20 nt, Artificial Sequence
  Synthetic
gauuguaagcgucacaaaag

SEQ ID NO: 297538 - RNA, 21 nt, Artificial Sequence
  Synthetic
agauuguaagcgucacaaaag

SEQ ID NO: 297539 - RNA, 22 nt, Artificial Sequence
  Synthetic
uagauuguaagcgucacaaaag

SEQ ID NO: 297540 - RNA, 23 nt, Artificial Sequence
  Synthetic
cuagauuguaagcgucacaaaag

SEQ ID NO: 297541 - RNA, 24 nt, Artificial Sequence
  Synthetic
acuagauuguaagcgucacaaaag

SEQ ID NO: 297542 - RNA, 18 nt, Artificial Sequence
  Synthetic
uuaaccaauggacaaaag

SEQ ID NO: 297543 - RNA, 19 nt, Artificial Sequence
  Synthetic
cuuaaccaauggacaaaag

SEQ ID NO: 297544 - RNA, 20 nt, Artificial Sequence
  Synthetic
acuuaaccaauggacaaaag

SEQ ID NO: 297545 - RNA, 21 nt, Artificial Sequence
  Synthetic
cacuuaaccaauggacaaaag

SEQ ID NO: 297546 - RNA, 22 nt, Artificial Sequence
  Synthetic
gcacuuaaccaauggacaaaag

SEQ ID NO: 297547 - RNA, 23 nt, Artificial Sequence
  Synthetic
agcacuuaaccaauggacaaaag

SEQ ID NO: 297548 - RNA, 24 nt, Artificial Sequence
  Synthetic
uagcacuuaaccaauggacaaaag

SEQ ID NO: 297549 - RNA, 18 nt, Artificial Sequence
  Synthetic
ugucuggggugacaaaag

SEQ ID NO: 297550 - RNA, 19 nt, Artificial Sequence
  Synthetic
gugucuggggugacaaaag

SEQ ID NO: 297551 - RNA, 20 nt, Artificial Sequence
  Synthetic
ggugucuggggugacaaaag

SEQ ID NO: 297552 - RNA, 21 nt, Artificial Sequence
  Synthetic
uggugucuggggugacaaaag

SEQ ID NO: 297553 - RNA, 22 nt, Artificial Sequence
  Synthetic
guggugucuggggugacaaaag

SEQ ID NO: 297554 - RNA, 23 nt, Artificial Sequence
  Synthetic
uguggugucuggggugacaaaag

SEQ ID NO: 297555 - RNA, 24 nt, Artificial Sequence
  Synthetic
cuguggugucuggggugacaaaag

SEQ ID NO: 297556 - RNA, 18 nt, Artificial Sequence
  Synthetic
cucucuguucuacaaaag

SEQ ID NO: 297557 - RNA, 19 nt, Artificial Sequence
  Synthetic
acucucuguucuacaaaag

SEQ ID NO: 297558 - RNA, 20 nt, Artificial Sequence
  Synthetic
aacucucuguucuacaaaag

SEQ ID NO: 297559 - RNA, 21 nt, Artificial Sequence
  Synthetic
uaacucucuguucuacaaaag

SEQ ID NO: 297560 - RNA, 22 nt, Artificial Sequence
  Synthetic
uuaacucucuguucuacaaaag

SEQ ID NO: 297561 - RNA, 23 nt, Artificial Sequence
  Synthetic
auuaacucucuguucuacaaaag

SEQ ID NO: 297562 - RNA, 24 nt, Artificial Sequence
  Synthetic
aauuaacucucuguucuacaaaag

SEQ ID NO: 297563 - RNA, 18 nt, Artificial Sequence
  Synthetic
uuugaauuaguacaaaag

SEQ ID NO: 297564 - RNA, 19 nt, Artificial Sequence
  Synthetic
cuuugaauuaguacaaaag

SEQ ID NO: 297565 - RNA, 20 nt, Artificial Sequence
  Synthetic
ccuuugaauuaguacaaaag

SEQ ID NO: 297566 - RNA, 21 nt, Artificial Sequence
  Synthetic
gccuuugaauuaguacaaaag

SEQ ID NO: 297567 - RNA, 22 nt, Artificial Sequence
  Synthetic
ugccuuugaauuaguacaaaag

SEQ ID NO: 297568 - RNA, 23 nt, Artificial Sequence
  Synthetic
augccuuugaauuaguacaaaag

SEQ ID NO: 297569 - RNA, 24 nt, Artificial Sequence
  Synthetic
caugccuuugaauuaguacaaaag

SEQ ID NO: 297570 - RNA, 18 nt, Artificial Sequence
  Synthetic
uaauuuugauuacaaaag

SEQ ID NO: 297571 - RNA, 19 nt, Artificial Sequence
  Synthetic
uuaauuuugauuacaaaag

SEQ ID NO: 297572 - RNA, 20 nt, Artificial Sequence
  Synthetic
cuuaauuuugauuacaaaag

SEQ ID NO: 297573 - RNA, 21 nt, Artificial Sequence
  Synthetic
acuuaauuuugauuacaaaag

SEQ ID NO: 297574 - RNA, 22 nt, Artificial Sequence
  Synthetic
aacuuaauuuugauuacaaaag

SEQ ID NO: 297575 - RNA, 23 nt, Artificial Sequence
  Synthetic
aaacuuaauuuugauuacaaaag

SEQ ID NO: 297576 - RNA, 24 nt, Artificial Sequence
  Synthetic
caaacuuaauuuugauuacaaaag

SEQ ID NO: 297577 - RNA, 18 nt, Artificial Sequence
  Synthetic
acaaaaauaaaccaaaag

SEQ ID NO: 297578 - RNA, 19 nt, Artificial Sequence
  Synthetic
aacaaaaauaaaccaaaag

SEQ ID NO: 297579 - RNA, 20 nt, Artificial Sequence
  Synthetic
aaacaaaaauaaaccaaaag

SEQ ID NO: 297580 - RNA, 21 nt, Artificial Sequence
  Synthetic
uaaacaaaaauaaaccaaaag

SEQ ID NO: 297581 - RNA, 22 nt, Artificial Sequence
  Synthetic
auaaacaaaaauaaaccaaaag

SEQ ID NO: 297582 - RNA, 23 nt, Artificial Sequence
  Synthetic
uauaaacaaaaauaaaccaaaag

SEQ ID NO: 297583 - RNA, 24 nt, Artificial Sequence
  Synthetic
auauaaacaaaaauaaaccaaaag

SEQ ID NO: 297584 - RNA, 18 nt, Artificial Sequence
  Synthetic
uagcuauauaaccaaaag

SEQ ID NO: 297585 - RNA, 19 nt, Artificial Sequence
  Synthetic
cuagcuauauaaccaaaag

SEQ ID NO: 297586 - RNA, 20 nt, Artificial Sequence
  Synthetic
ucuagcuauauaaccaaaag

SEQ ID NO: 297587 - RNA, 21 nt, Artificial Sequence
  Synthetic
uucuagcuauauaaccaaaag

SEQ ID NO: 297588 - RNA, 22 nt, Artificial Sequence
  Synthetic
uuucuagcuauauaaccaaaag

SEQ ID NO: 297589 - RNA, 23 nt, Artificial Sequence
  Synthetic
cuuucuagcuauauaaccaaaag

SEQ ID NO: 297590 - RNA, 24 nt, Artificial Sequence
  Synthetic
acuuucuagcuauauaaccaaaag

SEQ ID NO: 297591 - RNA, 18 nt, Artificial Sequence
  Synthetic
ccaccaccaccccaaaag

SEQ ID NO: 297592 - RNA, 19 nt, Artificial Sequence
  Synthetic
cccaccaccaccccaaaag

SEQ ID NO: 297593 - RNA, 20 nt, Artificial Sequence
  Synthetic
ccccaccaccaccccaaaag

SEQ ID NO: 297594 - RNA, 21 nt, Artificial Sequence
  Synthetic
cccccaccaccaccccaaaag

SEQ ID NO: 297595 - RNA, 22 nt, Artificial Sequence
  Synthetic
ccccccaccaccaccccaaaag

SEQ ID NO: 297596 - RNA, 23 nt, Artificial Sequence
  Synthetic
gccccccaccaccaccccaaaag

SEQ ID NO: 297597 - RNA, 24 nt, Artificial Sequence
  Synthetic
cgccccccaccaccaccccaaaag

SEQ ID NO: 297598 - RNA, 18 nt, Artificial Sequence
  Synthetic
ggaccaagcucccaaaag

SEQ ID NO: 297599 - RNA, 19 nt, Artificial Sequence
  Synthetic
gggaccaagcucccaaaag

SEQ ID NO: 297600 - RNA, 20 nt, Artificial Sequence
  Synthetic
ugggaccaagcucccaaaag

SEQ ID NO: 297601 - RNA, 21 nt, Artificial Sequence
  Synthetic
augggaccaagcucccaaaag

SEQ ID NO: 297602 - RNA, 22 nt, Artificial Sequence
  Synthetic
gaugggaccaagcucccaaaag

SEQ ID NO: 297603 - RNA, 23 nt, Artificial Sequence
  Synthetic
agaugggaccaagcucccaaaag

SEQ ID NO: 297604 - RNA, 24 nt, Artificial Sequence
  Synthetic
aagaugggaccaagcucccaaaag

SEQ ID NO: 297605 - RNA, 18 nt, Artificial Sequence
  Synthetic
uuacgggaaauccaaaag

SEQ ID NO: 297606 - RNA, 19 nt, Artificial Sequence
  Synthetic
auuacgggaaauccaaaag

SEQ ID NO: 297607 - RNA, 20 nt, Artificial Sequence
  Synthetic
cauuacgggaaauccaaaag

SEQ ID NO: 297608 - RNA, 21 nt, Artificial Sequence
  Synthetic
ucauuacgggaaauccaaaag

SEQ ID NO: 297609 - RNA, 22 nt, Artificial Sequence
  Synthetic
aucauuacgggaaauccaaaag

SEQ ID NO: 297610 - RNA, 23 nt, Artificial Sequence
  Synthetic
aaucauuacgggaaauccaaaag

SEQ ID NO: 297611 - RNA, 24 nt, Artificial Sequence
  Synthetic
aaaucauuacgggaaauccaaaag

SEQ ID NO: 297612 - RNA, 18 nt, Artificial Sequence
  Synthetic
uuagggaauauccaaaag

SEQ ID NO: 297613 - RNA, 19 nt, Artificial Sequence
  Synthetic
uuuagggaauauccaaaag

SEQ ID NO: 297614 - RNA, 20 nt, Artificial Sequence
  Synthetic
guuuagggaauauccaaaag

SEQ ID NO: 297615 - RNA, 21 nt, Artificial Sequence
  Synthetic
uguuuagggaauauccaaaag

SEQ ID NO: 297616 - RNA, 22 nt, Artificial Sequence
  Synthetic
cuguuuagggaauauccaaaag

SEQ ID NO: 297617 - RNA, 23 nt, Artificial Sequence
  Synthetic
ccuguuuagggaauauccaaaag

SEQ ID NO: 297618 - RNA, 24 nt, Artificial Sequence
  Synthetic
uccuguuuagggaauauccaaaag

SEQ ID NO: 297619 - RNA, 18 nt, Artificial Sequence
  Synthetic
gaggagaaugagcaaaag

SEQ ID NO: 297620 - RNA, 19 nt, Artificial Sequence
  Synthetic
ggaggagaaugagcaaaag

SEQ ID NO: 297621 - RNA, 20 nt, Artificial Sequence
  Synthetic
aggaggagaaugagcaaaag

SEQ ID NO: 297622 - RNA, 21 nt, Artificial Sequence
  Synthetic
aaggaggagaaugagcaaaag

SEQ ID NO: 297623 - RNA, 22 nt, Artificial Sequence
  Synthetic
gaaggaggagaaugagcaaaag

SEQ ID NO: 297624 - RNA, 23 nt, Artificial Sequence
  Synthetic
ggaaggaggagaaugagcaaaag

SEQ ID NO: 297625 - RNA, 24 nt, Artificial Sequence
  Synthetic
aggaaggaggagaaugagcaaaag

SEQ ID NO: 297626 - RNA, 18 nt, Artificial Sequence
  Synthetic
auacugaaugggcaaaag

SEQ ID NO: 297627 - RNA, 19 nt, Artificial Sequence
  Synthetic
cauacugaaugggcaaaag

SEQ ID NO: 297628 - RNA, 20 nt, Artificial Sequence
  Synthetic
ucauacugaaugggcaaaag

SEQ ID NO: 297629 - RNA, 21 nt, Artificial Sequence
  Synthetic
aucauacugaaugggcaaaag

SEQ ID NO: 297630 - RNA, 22 nt, Artificial Sequence
  Synthetic
uaucauacugaaugggcaaaag

SEQ ID NO: 297631 - RNA, 23 nt, Artificial Sequence
  Synthetic
uuaucauacugaaugggcaaaag

SEQ ID NO: 297632 - RNA, 24 nt, Artificial Sequence
  Synthetic
auuaucauacugaaugggcaaaag

SEQ ID NO: 297633 - RNA, 18 nt, Artificial Sequence
  Synthetic
ucuuuagaacugcaaaag

SEQ ID NO: 297634 - RNA, 19 nt, Artificial Sequence
  Synthetic
cucuuuagaacugcaaaag

SEQ ID NO: 297635 - RNA, 20 nt, Artificial Sequence
  Synthetic
ucucuuuagaacugcaaaag

SEQ ID NO: 297636 - RNA, 21 nt, Artificial Sequence
  Synthetic
cucucuuuagaacugcaaaag

SEQ ID NO: 297637 - RNA, 22 nt, Artificial Sequence
  Synthetic
acucucuuuagaacugcaaaag

SEQ ID NO: 297638 - RNA, 23 nt, Artificial Sequence
  Synthetic
uacucucuuuagaacugcaaaag

SEQ ID NO: 297639 - RNA, 24 nt, Artificial Sequence
  Synthetic
uuacucucuuuagaacugcaaaag

SEQ ID NO: 297640 - RNA, 18 nt, Artificial Sequence
  Synthetic
aauucagcaaaucaaaag

SEQ ID NO: 297641 - RNA, 19 nt, Artificial Sequence
  Synthetic
gaauucagcaaaucaaaag

SEQ ID NO: 297642 - RNA, 20 nt, Artificial Sequence
  Synthetic
agaauucagcaaaucaaaag

SEQ ID NO: 297643 - RNA, 21 nt, Artificial Sequence
  Synthetic
aagaauucagcaaaucaaaag

SEQ ID NO: 297644 - RNA, 22 nt, Artificial Sequence
  Synthetic
aaagaauucagcaaaucaaaag

SEQ ID NO: 297645 - RNA, 23 nt, Artificial Sequence
  Synthetic
aaaagaauucagcaaaucaaaag

SEQ ID NO: 297646 - RNA, 24 nt, Artificial Sequence
  Synthetic
uaaaagaauucagcaaaucaaaag

SEQ ID NO: 297647 - RNA, 18 nt, Artificial Sequence
  Synthetic
ggaagaagauaucaaaag

SEQ ID NO: 297648 - RNA, 19 nt, Artificial Sequence
  Synthetic
aggaagaagauaucaaaag

SEQ ID NO: 297649 - RNA, 20 nt, Artificial Sequence
  Synthetic
aaggaagaagauaucaaaag

SEQ ID NO: 297650 - RNA, 21 nt, Artificial Sequence
  Synthetic
aaaggaagaagauaucaaaag

SEQ ID NO: 297651 - RNA, 22 nt, Artificial Sequence
  Synthetic
aaaaggaagaagauaucaaaag

SEQ ID NO: 297652 - RNA, 23 nt, Artificial Sequence
  Synthetic
aaaaaggaagaagauaucaaaag

SEQ ID NO: 297653 - RNA, 24 nt, Artificial Sequence
  Synthetic
caaaaaggaagaagauaucaaaag

SEQ ID NO: 297654 - RNA, 18 nt, Artificial Sequence
  Synthetic
gaaauaaaaguucaaaag

SEQ ID NO: 297655 - RNA, 19 nt, Artificial Sequence
  Synthetic
agaaauaaaaguucaaaag

SEQ ID NO: 297656 - RNA, 20 nt, Artificial Sequence
  Synthetic
cagaaauaaaaguucaaaag

SEQ ID NO: 297657 - RNA, 21 nt, Artificial Sequence
  Synthetic
gcagaaauaaaaguucaaaag

SEQ ID NO: 297658 - RNA, 22 nt, Artificial Sequence
  Synthetic
agcagaaauaaaaguucaaaag

SEQ ID NO: 297659 - RNA, 23 nt, Artificial Sequence
  Synthetic
gagcagaaauaaaaguucaaaag

SEQ ID NO: 297660 - RNA, 24 nt, Artificial Sequence
  Synthetic
agagcagaaauaaaaguucaaaag

SEQ ID NO: 297661 - RNA, 18 nt, Artificial Sequence
  Synthetic
uaucagaacuuucaaaag

SEQ ID NO: 297662 - RNA, 19 nt, Artificial Sequence
  Synthetic
auaucagaacuuucaaaag

SEQ ID NO: 297663 - RNA, 20 nt, Artificial Sequence
  Synthetic
aauaucagaacuuucaaaag

SEQ ID NO: 297664 - RNA, 21 nt, Artificial Sequence
  Synthetic
aaauaucagaacuuucaaaag

SEQ ID NO: 297665 - RNA, 22 nt, Artificial Sequence
  Synthetic
uaaauaucagaacuuucaaaag

SEQ ID NO: 297666 - RNA, 23 nt, Artificial Sequence
  Synthetic
cuaaauaucagaacuuucaaaag

SEQ ID NO: 297667 - RNA, 24 nt, Artificial Sequence
  Synthetic
ucuaaauaucagaacuuucaaaag

SEQ ID NO: 297668 - RNA, 18 nt, Artificial Sequence
  Synthetic
agggaaagaaaagaaaag

SEQ ID NO: 297669 - RNA, 19 nt, Artificial Sequence
  Synthetic
gagggaaagaaaagaaaag

SEQ ID NO: 297670 - RNA, 20 nt, Artificial Sequence
  Synthetic
ggagggaaagaaaagaaaag

SEQ ID NO: 297671 - RNA, 21 nt, Artificial Sequence
  Synthetic
gggagggaaagaaaagaaaag

SEQ ID NO: 297672 - RNA, 22 nt, Artificial Sequence
  Synthetic
agggagggaaagaaaagaaaag

SEQ ID NO: 297673 - RNA, 23 nt, Artificial Sequence
  Synthetic
gagggagggaaagaaaagaaaag

SEQ ID NO: 297674 - RNA, 24 nt, Artificial Sequence
  Synthetic
ggagggagggaaagaaaagaaaag

SEQ ID NO: 297675 - RNA, 18 nt, Artificial Sequence
  Synthetic
aaacccuccaaagaaaag

SEQ ID NO: 297676 - RNA, 19 nt, Artificial Sequence
  Synthetic
aaaacccuccaaagaaaag

SEQ ID NO: 297677 - RNA, 20 nt, Artificial Sequence
  Synthetic
aaaaacccuccaaagaaaag

SEQ ID NO: 297678 - RNA, 21 nt, Artificial Sequence
  Synthetic
gaaaaacccuccaaagaaaag

SEQ ID NO: 297679 - RNA, 22 nt, Artificial Sequence
  Synthetic
agaaaaacccuccaaagaaaag

SEQ ID NO: 297680 - RNA, 23 nt, Artificial Sequence
  Synthetic
aagaaaaacccuccaaagaaaag

SEQ ID NO: 297681 - RNA, 24 nt, Artificial Sequence
  Synthetic
gaagaaaaacccuccaaagaaaag

SEQ ID NO: 297682 - RNA, 18 nt, Artificial Sequence
  Synthetic
aaaggaaagaaagaaaag

SEQ ID NO: 297683 - RNA, 19 nt, Artificial Sequence
  Synthetic
aaaaggaaagaaagaaaag

SEQ ID NO: 297684 - RNA, 20 nt, Artificial Sequence
  Synthetic
aaaaaggaaagaaagaaaag

SEQ ID NO: 297685 - RNA, 21 nt, Artificial Sequence
  Synthetic
aaaaaaggaaagaaagaaaag

SEQ ID NO: 297686 - RNA, 22 nt, Artificial Sequence
  Synthetic
aaaaaaaggaaagaaagaaaag

SEQ ID NO: 297687 - RNA, 23 nt, Artificial Sequence
  Synthetic
uaaaaaaaggaaagaaagaaaag

SEQ ID NO: 297688 - RNA, 24 nt, Artificial Sequence
  Synthetic
auaaaaaaaggaaagaaagaaaag

SEQ ID NO: 297689 - RNA, 18 nt, Artificial Sequence
  Synthetic
aucuaugugaaagaaaag

SEQ ID NO: 297690 - RNA, 19 nt, Artificial Sequence
  Synthetic
uaucuaugugaaagaaaag

SEQ ID NO: 297691 - RNA, 20 nt, Artificial Sequence
  Synthetic
auaucuaugugaaagaaaag

SEQ ID NO: 297692 - RNA, 21 nt, Artificial Sequence
  Synthetic
aauaucuaugugaaagaaaag

SEQ ID NO: 297693 - RNA, 22 nt, Artificial Sequence
  Synthetic
aaauaucuaugugaaagaaaag

SEQ ID NO: 297694 - RNA, 23 nt, Artificial Sequence
  Synthetic
gaaauaucuaugugaaagaaaag

SEQ ID NO: 297695 - RNA, 24 nt, Artificial Sequence
  Synthetic
ggaaauaucuaugugaaagaaaag

SEQ ID NO: 297696 - RNA, 18 nt, Artificial Sequence
  Synthetic
aauuuaaauaaagaaaag

SEQ ID NO: 297697 - RNA, 19 nt, Artificial Sequence
  Synthetic
uaauuuaaauaaagaaaag

SEQ ID NO: 297698 - RNA, 20 nt, Artificial Sequence
  Synthetic
auaauuuaaauaaagaaaag

SEQ ID NO: 297699 - RNA, 21 nt, Artificial Sequence
  Synthetic
uauaauuuaaauaaagaaaag

SEQ ID NO: 297700 - RNA, 22 nt, Artificial Sequence
  Synthetic
guauaauuuaaauaaagaaaag

SEQ ID NO: 297701 - RNA, 23 nt, Artificial Sequence
  Synthetic
uguauaauuuaaauaaagaaaag

SEQ ID NO: 297702 - RNA, 24 nt, Artificial Sequence
  Synthetic
uuguauaauuuaaauaaagaaaag

SEQ ID NO: 297703 - RNA, 18 nt, Artificial Sequence
  Synthetic
caaaugcauuaagaaaag

SEQ ID NO: 297704 - RNA, 19 nt, Artificial Sequence
  Synthetic
acaaaugcauuaagaaaag

SEQ ID NO: 297705 - RNA, 20 nt, Artificial Sequence
  Synthetic
gacaaaugcauuaagaaaag

SEQ ID NO: 297706 - RNA, 21 nt, Artificial Sequence
  Synthetic
ggacaaaugcauuaagaaaag

SEQ ID NO: 297707 - RNA, 22 nt, Artificial Sequence
  Synthetic
aggacaaaugcauuaagaaaag

SEQ ID NO: 297708 - RNA, 23 nt, Artificial Sequence
  Synthetic
caggacaaaugcauuaagaaaag

SEQ ID NO: 297709 - RNA, 24 nt, Artificial Sequence
  Synthetic
acaggacaaaugcauuaagaaaag

SEQ ID NO: 297710 - RNA, 18 nt, Artificial Sequence
  Synthetic
agcuggagaacagaaaag

SEQ ID NO: 297711 - RNA, 19 nt, Artificial Sequence
  Synthetic
gagcuggagaacagaaaag

SEQ ID NO: 297712 - RNA, 20 nt, Artificial Sequence
  Synthetic
ugagcuggagaacagaaaag

SEQ ID NO: 297713 - RNA, 21 nt, Artificial Sequence
  Synthetic
uugagcuggagaacagaaaag

SEQ ID NO: 297714 - RNA, 22 nt, Artificial Sequence
  Synthetic
auugagcuggagaacagaaaag

SEQ ID NO: 297715 - RNA, 23 nt, Artificial Sequence
  Synthetic
uauugagcuggagaacagaaaag

SEQ ID NO: 297716 - RNA, 24 nt, Artificial Sequence
  Synthetic
auauugagcuggagaacagaaaag

SEQ ID NO: 297717 - RNA, 18 nt, Artificial Sequence
  Synthetic
gaagcugcagcagaaaag

SEQ ID NO: 297718 - RNA, 19 nt, Artificial Sequence
  Synthetic
ggaagcugcagcagaaaag

SEQ ID NO: 297719 - RNA, 20 nt, Artificial Sequence
  Synthetic
aggaagcugcagcagaaaag

SEQ ID NO: 297720 - RNA, 21 nt, Artificial Sequence
  Synthetic
gaggaagcugcagcagaaaag

SEQ ID NO: 297721 - RNA, 22 nt, Artificial Sequence
  Synthetic
ugaggaagcugcagcagaaaag

SEQ ID NO: 297722 - RNA, 23 nt, Artificial Sequence
  Synthetic
gugaggaagcugcagcagaaaag

SEQ ID NO: 297723 - RNA, 24 nt, Artificial Sequence
  Synthetic
ggugaggaagcugcagcagaaaag

SEQ ID NO: 297724 - RNA, 18 nt, Artificial Sequence
  Synthetic
aaaccagucagagaaaag

SEQ ID NO: 297725 - RNA, 19 nt, Artificial Sequence
  Synthetic
uaaaccagucagagaaaag

SEQ ID NO: 297726 - RNA, 20 nt, Artificial Sequence
  Synthetic
uuaaaccagucagagaaaag

SEQ ID NO: 297727 - RNA, 21 nt, Artificial Sequence
  Synthetic
uuuaaaccagucagagaaaag

SEQ ID NO: 297728 - RNA, 22 nt, Artificial Sequence
  Synthetic
uuuuaaaccagucagagaaaag

SEQ ID NO: 297729 - RNA, 23 nt, Artificial Sequence
  Synthetic
auuuuaaaccagucagagaaaag

SEQ ID NO: 297730 - RNA, 24 nt, Artificial Sequence
  Synthetic
gauuuuaaaccagucagagaaaag

SEQ ID NO: 297731 - RNA, 18 nt, Artificial Sequence
  Synthetic
agaagaccaauagaaaag

SEQ ID NO: 297732 - RNA, 19 nt, Artificial Sequence
  Synthetic
gagaagaccaauagaaaag

SEQ ID NO: 297733 - RNA, 20 nt, Artificial Sequence
  Synthetic
agagaagaccaauagaaaag

SEQ ID NO: 297734 - RNA, 21 nt, Artificial Sequence
  Synthetic
aagagaagaccaauagaaaag

SEQ ID NO: 297735 - RNA, 22 nt, Artificial Sequence
  Synthetic
uaagagaagaccaauagaaaag

SEQ ID NO: 297736 - RNA, 23 nt, Artificial Sequence
  Synthetic
uuaagagaagaccaauagaaaag

SEQ ID NO: 297737 - RNA, 24 nt, Artificial Sequence
  Synthetic
auuaagagaagaccaauagaaaag

SEQ ID NO: 297738 - RNA, 18 nt, Artificial Sequence
  Synthetic
gccuagaagguagaaaag

SEQ ID NO: 297739 - RNA, 19 nt, Artificial Sequence
  Synthetic
agccuagaagguagaaaag

SEQ ID NO: 297740 - RNA, 20 nt, Artificial Sequence
  Synthetic
aagccuagaagguagaaaag

SEQ ID NO: 297741 - RNA, 21 nt, Artificial Sequence
  Synthetic
aaagccuagaagguagaaaag

SEQ ID NO: 297742 - RNA, 22 nt, Artificial Sequence
  Synthetic
caaagccuagaagguagaaaag

SEQ ID NO: 297743 - RNA, 23 nt, Artificial Sequence
  Synthetic
ucaaagccuagaagguagaaaag

SEQ ID NO: 297744 - RNA, 24 nt, Artificial Sequence
  Synthetic
cucaaagccuagaagguagaaaag

SEQ ID NO: 297745 - RNA, 18 nt, Artificial Sequence
  Synthetic
cuauacagccacgaaaag

SEQ ID NO: 297746 - RNA, 19 nt, Artificial Sequence
  Synthetic
acuauacagccacgaaaag

SEQ ID NO: 297747 - RNA, 20 nt, Artificial Sequence
  Synthetic
uacuauacagccacgaaaag

SEQ ID NO: 297748 - RNA, 21 nt, Artificial Sequence
  Synthetic
auacuauacagccacgaaaag

SEQ ID NO: 297749 - RNA, 22 nt, Artificial Sequence
  Synthetic
aauacuauacagccacgaaaag

SEQ ID NO: 297750 - RNA, 23 nt, Artificial Sequence
  Synthetic
aaauacuauacagccacgaaaag

SEQ ID NO: 297751 - RNA, 24 nt, Artificial Sequence
  Synthetic
aaaauacuauacagccacgaaaag

SEQ ID NO: 297752 - RNA, 18 nt, Artificial Sequence
  Synthetic
gaguuuucaaaggaaaag

SEQ ID NO: 297753 - RNA, 19 nt, Artificial Sequence
  Synthetic
ggaguuuucaaaggaaaag

SEQ ID NO: 297754 - RNA, 20 nt, Artificial Sequence
  Synthetic
gggaguuuucaaaggaaaag

SEQ ID NO: 297755 - RNA, 21 nt, Artificial Sequence
  Synthetic
ugggaguuuucaaaggaaaag

SEQ ID NO: 297756 - RNA, 22 nt, Artificial Sequence
  Synthetic
augggaguuuucaaaggaaaag

SEQ ID NO: 297757 - RNA, 23 nt, Artificial Sequence
  Synthetic
aaugggaguuuucaaaggaaaag

SEQ ID NO: 297758 - RNA, 24 nt, Artificial Sequence
  Synthetic
uaaugggaguuuucaaaggaaaag

SEQ ID NO: 297759 - RNA, 18 nt, Artificial Sequence
  Synthetic
ucuaaacaauaggaaaag

SEQ ID NO: 297760 - RNA, 19 nt, Artificial Sequence
  Synthetic
uucuaaacaauaggaaaag

SEQ ID NO: 297761 - RNA, 20 nt, Artificial Sequence
  Synthetic
auucuaaacaauaggaaaag

SEQ ID NO: 297762 - RNA, 21 nt, Artificial Sequence
  Synthetic
uauucuaaacaauaggaaaag

SEQ ID NO: 297763 - RNA, 22 nt, Artificial Sequence
  Synthetic
cuauucuaaacaauaggaaaag

SEQ ID NO: 297764 - RNA, 23 nt, Artificial Sequence
  Synthetic
acuauucuaaacaauaggaaaag

SEQ ID NO: 297765 - RNA, 24 nt, Artificial Sequence
  Synthetic
aacuauucuaaacaauaggaaaag

SEQ ID NO: 297766 - RNA, 18 nt, Artificial Sequence
  Synthetic
ccauucgaguaggaaaag

SEQ ID NO: 297767 - RNA, 19 nt, Artificial Sequence
  Synthetic
accauucgaguaggaaaag

SEQ ID NO: 297768 - RNA, 20 nt, Artificial Sequence
  Synthetic
caccauucgaguaggaaaag

SEQ ID NO: 297769 - RNA, 21 nt, Artificial Sequence
  Synthetic
acaccauucgaguaggaaaag

SEQ ID NO: 297770 - RNA, 22 nt, Artificial Sequence
  Synthetic
aacaccauucgaguaggaaaag

SEQ ID NO: 297771 - RNA, 23 nt, Artificial Sequence
  Synthetic
aaacaccauucgaguaggaaaag

SEQ ID NO: 297772 - RNA, 24 nt, Artificial Sequence
  Synthetic
uaaacaccauucgaguaggaaaag

SEQ ID NO: 297773 - RNA, 18 nt, Artificial Sequence
  Synthetic
guauucaauuaggaaaag

SEQ ID NO: 297774 - RNA, 19 nt, Artificial Sequence
  Synthetic
gguauucaauuaggaaaag

SEQ ID NO: 297775 - RNA, 20 nt, Artificial Sequence
  Synthetic
ggguauucaauuaggaaaag

SEQ ID NO: 297776 - RNA, 18 nt, Artificial Sequence
  Synthetic
guauucaguuaggaaaag

SEQ ID NO: 297777 - RNA, 19 nt, Artificial Sequence
  Synthetic
gguauucaguuaggaaaag

SEQ ID NO: 297778 - RNA, 20 nt, Artificial Sequence
  Synthetic
agguauucaguuaggaaaag

SEQ ID NO: 297779 - RNA, 21 nt, Artificial Sequence
  Synthetic
aagguauucaguuaggaaaag

SEQ ID NO: 297780 - RNA, 22 nt, Artificial Sequence
  Synthetic
aaagguauucaguuaggaaaag

SEQ ID NO: 297781 - RNA, 23 nt, Artificial Sequence
  Synthetic
aaaagguauucaguuaggaaaag

SEQ ID NO: 297782 - RNA, 24 nt, Artificial Sequence
  Synthetic
uaaaagguauucaguuaggaaaag

SEQ ID NO: 297783 - RNA, 18 nt, Artificial Sequence
  Synthetic
uucuuugcuggggaaaag

SEQ ID NO: 297784 - RNA, 19 nt, Artificial Sequence
  Synthetic
guucuuugcuggggaaaag

SEQ ID NO: 297785 - RNA, 20 nt, Artificial Sequence
  Synthetic
aguucuuugcuggggaaaag

SEQ ID NO: 297786 - RNA, 21 nt, Artificial Sequence
  Synthetic
aaguucuuugcuggggaaaag

SEQ ID NO: 297787 - RNA, 22 nt, Artificial Sequence
  Synthetic
uaaguucuuugcuggggaaaag

SEQ ID NO: 297788 - RNA, 23 nt, Artificial Sequence
  Synthetic
cuaaguucuuugcuggggaaaag

SEQ ID NO: 297789 - RNA, 24 nt, Artificial Sequence
  Synthetic
ucuaaguucuuugcuggggaaaag

SEQ ID NO: 297790 - RNA, 18 nt, Artificial Sequence
  Synthetic
cacuacauuggggaaaag

SEQ ID NO: 297791 - RNA, 19 nt, Artificial Sequence
  Synthetic
ucacuacauuggggaaaag

SEQ ID NO: 297792 - RNA, 20 nt, Artificial Sequence
  Synthetic
aucacuacauuggggaaaag

SEQ ID NO: 297793 - RNA, 21 nt, Artificial Sequence
  Synthetic
aaucacuacauuggggaaaag

SEQ ID NO: 297794 - RNA, 22 nt, Artificial Sequence
  Synthetic
aaaucacuacauuggggaaaag

SEQ ID NO: 297795 - RNA, 23 nt, Artificial Sequence
  Synthetic
caaaucacuacauuggggaaaag

SEQ ID NO: 297796 - RNA, 24 nt, Artificial Sequence
  Synthetic
acaaaucacuacauuggggaaaag

SEQ ID NO: 297797 - RNA, 18 nt, Artificial Sequence
  Synthetic
auguguuauugggaaaag

SEQ ID NO: 297798 - RNA, 19 nt, Artificial Sequence
  Synthetic
uauguguuauugggaaaag

SEQ ID NO: 297799 - RNA, 20 nt, Artificial Sequence
  Synthetic
auauguguuauugggaaaag

SEQ ID NO: 297800 - RNA, 21 nt, Artificial Sequence
  Synthetic
gauauguguuauugggaaaag

SEQ ID NO: 297801 - RNA, 22 nt, Artificial Sequence
  Synthetic
agauauguguuauugggaaaag

SEQ ID NO: 297802 - RNA, 23 nt, Artificial Sequence
  Synthetic
uagauauguguuauugggaaaag

SEQ ID NO: 297803 - RNA, 24 nt, Artificial Sequence
  Synthetic
uuagauauguguuauugggaaaag

SEQ ID NO: 297804 - RNA, 18 nt, Artificial Sequence
  Synthetic
uaauagaauauggaaaag

SEQ ID NO: 297805 - RNA, 19 nt, Artificial Sequence
  Synthetic
auaauagaauauggaaaag

SEQ ID NO: 297806 - RNA, 20 nt, Artificial Sequence
  Synthetic
gauaauagaauauggaaaag

SEQ ID NO: 297807 - RNA, 21 nt, Artificial Sequence
  Synthetic
agauaauagaauauggaaaag

SEQ ID NO: 297808 - RNA, 22 nt, Artificial Sequence
  Synthetic
cagauaauagaauauggaaaag

SEQ ID NO: 297809 - RNA, 23 nt, Artificial Sequence
  Synthetic
ccagauaauagaauauggaaaag

SEQ ID NO: 297810 - RNA, 24 nt, Artificial Sequence
  Synthetic
uccagauaauagaauauggaaaag

SEQ ID NO: 297811 - RNA, 18 nt, Artificial Sequence
  Synthetic
auuuuuaguauggaaaag

SEQ ID NO: 297812 - RNA, 19 nt, Artificial Sequence
  Synthetic
cauuuuuaguauggaaaag

SEQ ID NO: 297813 - RNA, 20 nt, Artificial Sequence
  Synthetic
acauuuuuaguauggaaaag

SEQ ID NO: 297814 - RNA, 21 nt, Artificial Sequence
  Synthetic
uacauuuuuaguauggaaaag

SEQ ID NO: 297815 - RNA, 22 nt, Artificial Sequence
  Synthetic
auacauuuuuaguauggaaaag

SEQ ID NO: 297816 - RNA, 23 nt, Artificial Sequence
  Synthetic
uauacauuuuuaguauggaaaag

SEQ ID NO: 297817 - RNA, 24 nt, Artificial Sequence
  Synthetic
guauacauuuuuaguauggaaaag

SEQ ID NO: 297818 - RNA, 18 nt, Artificial Sequence
  Synthetic
gugaucccaguggaaaag

SEQ ID NO: 297819 - RNA, 19 nt, Artificial Sequence
  Synthetic
cgugaucccaguggaaaag

SEQ ID NO: 297820 - RNA, 20 nt, Artificial Sequence
  Synthetic
acgugaucccaguggaaaag

SEQ ID NO: 297821 - RNA, 21 nt, Artificial Sequence
  Synthetic
gacgugaucccaguggaaaag

SEQ ID NO: 297822 - RNA, 22 nt, Artificial Sequence
  Synthetic
cgacgugaucccaguggaaaag

SEQ ID NO: 297823 - RNA, 23 nt, Artificial Sequence
  Synthetic
acgacgugaucccaguggaaaag

SEQ ID NO: 297824 - RNA, 24 nt, Artificial Sequence
  Synthetic
uacgacgugaucccaguggaaaag

SEQ ID NO: 297825 - RNA, 18 nt, Artificial Sequence
  Synthetic
gaagguugcuuggaaaag

SEQ ID NO: 297826 - RNA, 19 nt, Artificial Sequence
  Synthetic
agaagguugcuuggaaaag

SEQ ID NO: 297827 - RNA, 20 nt, Artificial Sequence
  Synthetic
gagaagguugcuuggaaaag

SEQ ID NO: 297828 - RNA, 21 nt, Artificial Sequence
  Synthetic
ggagaagguugcuuggaaaag

SEQ ID NO: 297829 - RNA, 22 nt, Artificial Sequence
  Synthetic
aggagaagguugcuuggaaaag

SEQ ID NO: 297830 - RNA, 23 nt, Artificial Sequence
  Synthetic
caggagaagguugcuuggaaaag

SEQ ID NO: 297831 - RNA, 24 nt, Artificial Sequence
  Synthetic
acaggagaagguugcuuggaaaag

SEQ ID NO: 297832 - RNA, 18 nt, Artificial Sequence
  Synthetic
cuugacaauuuggaaaag

SEQ ID NO: 297833 - RNA, 19 nt, Artificial Sequence
  Synthetic
ucuugacaauuuggaaaag

SEQ ID NO: 297834 - RNA, 20 nt, Artificial Sequence
  Synthetic
aucuugacaauuuggaaaag

SEQ ID NO: 297835 - RNA, 21 nt, Artificial Sequence
  Synthetic
aaucuugacaauuuggaaaag

SEQ ID NO: 297836 - RNA, 22 nt, Artificial Sequence
  Synthetic
aaaucuugacaauuuggaaaag

SEQ ID NO: 297837 - RNA, 23 nt, Artificial Sequence
  Synthetic
aaaaucuugacaauuuggaaaag

SEQ ID NO: 297838 - RNA, 24 nt, Artificial Sequence
  Synthetic
gaaaaucuugacaauuuggaaaag

SEQ ID NO: 297839 - RNA, 18 nt, Artificial Sequence
  Synthetic
accuuucuacaugaaaag

SEQ ID NO: 297840 - RNA, 19 nt, Artificial Sequence
  Synthetic
gaccuuucuacaugaaaag

SEQ ID NO: 297841 - RNA, 20 nt, Artificial Sequence
  Synthetic
ugaccuuucuacaugaaaag

SEQ ID NO: 297842 - RNA, 21 nt, Artificial Sequence
  Synthetic
gugaccuuucuacaugaaaag

SEQ ID NO: 297843 - RNA, 22 nt, Artificial Sequence
  Synthetic
ugugaccuuucuacaugaaaag

SEQ ID NO: 297844 - RNA, 23 nt, Artificial Sequence
  Synthetic
uugugaccuuucuacaugaaaag

SEQ ID NO: 297845 - RNA, 24 nt, Artificial Sequence
  Synthetic
auugugaccuuucuacaugaaaag

SEQ ID NO: 297846 - RNA, 18 nt, Artificial Sequence
  Synthetic
aacugaaaucaugaaaag

SEQ ID NO: 297847 - RNA, 19 nt, Artificial Sequence
  Synthetic
uaacugaaaucaugaaaag

SEQ ID NO: 297848 - RNA, 20 nt, Artificial Sequence
  Synthetic
guaacugaaaucaugaaaag

SEQ ID NO: 297849 - RNA, 21 nt, Artificial Sequence
  Synthetic
uguaacugaaaucaugaaaag

SEQ ID NO: 297850 - RNA, 22 nt, Artificial Sequence
  Synthetic
guguaacugaaaucaugaaaag

SEQ ID NO: 297851 - RNA, 23 nt, Artificial Sequence
  Synthetic
aguguaacugaaaucaugaaaag

SEQ ID NO: 297852 - RNA, 24 nt, Artificial Sequence
  Synthetic
gaguguaacugaaaucaugaaaag

SEQ ID NO: 297853 - RNA, 18 nt, Artificial Sequence
  Synthetic
gcucucaguuaugaaaag

SEQ ID NO: 297854 - RNA, 19 nt, Artificial Sequence
  Synthetic
ggcucucaguuaugaaaag

SEQ ID NO: 297855 - RNA, 20 nt, Artificial Sequence
  Synthetic
uggcucucaguuaugaaaag

SEQ ID NO: 297856 - RNA, 21 nt, Artificial Sequence
  Synthetic
cuggcucucaguuaugaaaag

SEQ ID NO: 297857 - RNA, 22 nt, Artificial Sequence
  Synthetic
ucuggcucucaguuaugaaaag

SEQ ID NO: 297858 - RNA, 23 nt, Artificial Sequence
  Synthetic
uucuggcucucaguuaugaaaag

SEQ ID NO: 297859 - RNA, 24 nt, Artificial Sequence
  Synthetic
uuucuggcucucaguuaugaaaag

SEQ ID NO: 297860 - RNA, 18 nt, Artificial Sequence
  Synthetic
gugcgaggaucugaaaag

SEQ ID NO: 297861 - RNA, 19 nt, Artificial Sequence
  Synthetic
agugcgaggaucugaaaag

SEQ ID NO: 297862 - RNA, 20 nt, Artificial Sequence
  Synthetic
uagugcgaggaucugaaaag

SEQ ID NO: 297863 - RNA, 21 nt, Artificial Sequence
  Synthetic
auagugcgaggaucugaaaag

SEQ ID NO: 297864 - RNA, 22 nt, Artificial Sequence
  Synthetic
aauagugcgaggaucugaaaag

SEQ ID NO: 297865 - RNA, 23 nt, Artificial Sequence
  Synthetic
aaauagugcgaggaucugaaaag

SEQ ID NO: 297866 - RNA, 24 nt, Artificial Sequence
  Synthetic
caaauagugcgaggaucugaaaag

SEQ ID NO: 297867 - RNA, 18 nt, Artificial Sequence
  Synthetic
uucacaaaaagugaaaag

SEQ ID NO: 297868 - RNA, 19 nt, Artificial Sequence
  Synthetic
uuucacaaaaagugaaaag

SEQ ID NO: 297869 - RNA, 20 nt, Artificial Sequence
  Synthetic
guuucacaaaaagugaaaag

SEQ ID NO: 297870 - RNA, 21 nt, Artificial Sequence
  Synthetic
aguuucacaaaaagugaaaag

SEQ ID NO: 297871 - RNA, 22 nt, Artificial Sequence
  Synthetic
aaguuucacaaaaagugaaaag

SEQ ID NO: 297872 - RNA, 23 nt, Artificial Sequence
  Synthetic
caaguuucacaaaaagugaaaag

SEQ ID NO: 297873 - RNA, 24 nt, Artificial Sequence
  Synthetic
ucaaguuucacaaaaagugaaaag

SEQ ID NO: 297874 - RNA, 18 nt, Artificial Sequence
  Synthetic
ccaaaucuaggugaaaag

SEQ ID NO: 297875 - RNA, 19 nt, Artificial Sequence
  Synthetic
uccaaaucuaggugaaaag

SEQ ID NO: 297876 - RNA, 20 nt, Artificial Sequence
  Synthetic
cuccaaaucuaggugaaaag

SEQ ID NO: 297877 - RNA, 21 nt, Artificial Sequence
  Synthetic
acuccaaaucuaggugaaaag

SEQ ID NO: 297878 - RNA, 22 nt, Artificial Sequence
  Synthetic
aacuccaaaucuaggugaaaag

SEQ ID NO: 297879 - RNA, 23 nt, Artificial Sequence
  Synthetic
aaacuccaaaucuaggugaaaag

SEQ ID NO: 297880 - RNA, 24 nt, Artificial Sequence
  Synthetic
aaaacuccaaaucuaggugaaaag

SEQ ID NO: 297881 - RNA, 18 nt, Artificial Sequence
  Synthetic
ugagacauauuugaaaag

SEQ ID NO: 297882 - RNA, 19 nt, Artificial Sequence
  Synthetic
uugagacauauuugaaaag

SEQ ID NO: 297883 - RNA, 20 nt, Artificial Sequence
  Synthetic
uuugagacauauuugaaaag

SEQ ID NO: 297884 - RNA, 21 nt, Artificial Sequence
  Synthetic
auuugagacauauuugaaaag

SEQ ID NO: 297885 - RNA, 22 nt, Artificial Sequence
  Synthetic
aauuugagacauauuugaaaag

SEQ ID NO: 297886 - RNA, 23 nt, Artificial Sequence
  Synthetic
uaauuugagacauauuugaaaag

SEQ ID NO: 297887 - RNA, 24 nt, Artificial Sequence
  Synthetic
auaauuugagacauauuugaaaag

SEQ ID NO: 297888 - RNA, 18 nt, Artificial Sequence
  Synthetic
gaauaagacuuugaaaag

SEQ ID NO: 297889 - RNA, 19 nt, Artificial Sequence
  Synthetic
ugaauaagacuuugaaaag

SEQ ID NO: 297890 - RNA, 20 nt, Artificial Sequence
  Synthetic
augaauaagacuuugaaaag

SEQ ID NO: 297891 - RNA, 21 nt, Artificial Sequence
  Synthetic
caugaauaagacuuugaaaag

SEQ ID NO: 297892 - RNA, 22 nt, Artificial Sequence
  Synthetic
ucaugaauaagacuuugaaaag

SEQ ID NO: 297893 - RNA, 23 nt, Artificial Sequence
  Synthetic
gucaugaauaagacuuugaaaag

SEQ ID NO: 297894 - RNA, 24 nt, Artificial Sequence
  Synthetic
ggucaugaauaagacuuugaaaag

SEQ ID NO: 297895 - RNA, 18 nt, Artificial Sequence
  Synthetic
cuggaucaaaaauaaaag

SEQ ID NO: 297896 - RNA, 19 nt, Artificial Sequence
  Synthetic
ccuggaucaaaaauaaaag

SEQ ID NO: 297897 - RNA, 20 nt, Artificial Sequence
  Synthetic
accuggaucaaaaauaaaag

SEQ ID NO: 297898 - RNA, 21 nt, Artificial Sequence
  Synthetic
uaccuggaucaaaaauaaaag

SEQ ID NO: 297899 - RNA, 22 nt, Artificial Sequence
  Synthetic
cuaccuggaucaaaaauaaaag

SEQ ID NO: 297900 - RNA, 23 nt, Artificial Sequence
  Synthetic
acuaccuggaucaaaaauaaaag

SEQ ID NO: 297901 - RNA, 24 nt, Artificial Sequence
  Synthetic
uacuaccuggaucaaaaauaaaag

SEQ ID NO: 297902 - RNA, 18 nt, Artificial Sequence
  Synthetic
ccccaucuucaauaaaag

SEQ ID NO: 297903 - RNA, 19 nt, Artificial Sequence
  Synthetic
accccaucuucaauaaaag

SEQ ID NO: 297904 - RNA, 20 nt, Artificial Sequence
  Synthetic
caccccaucuucaauaaaag

SEQ ID NO: 297905 - RNA, 21 nt, Artificial Sequence
  Synthetic
ccaccccaucuucaauaaaag

SEQ ID NO: 297906 - RNA, 22 nt, Artificial Sequence
  Synthetic
cccaccccaucuucaauaaaag

SEQ ID NO: 297907 - RNA, 23 nt, Artificial Sequence
  Synthetic
ucccaccccaucuucaauaaaag

SEQ ID NO: 297908 - RNA, 24 nt, Artificial Sequence
  Synthetic
uucccaccccaucuucaauaaaag

SEQ ID NO: 297909 - RNA, 18 nt, Artificial Sequence
  Synthetic
aagcagggauaauaaaag

SEQ ID NO: 297910 - RNA, 19 nt, Artificial Sequence
  Synthetic
aaagcagggauaauaaaag

SEQ ID NO: 297911 - RNA, 20 nt, Artificial Sequence
  Synthetic
uaaagcagggauaauaaaag

SEQ ID NO: 297912 - RNA, 21 nt, Artificial Sequence
  Synthetic
cuaaagcagggauaauaaaag

SEQ ID NO: 297913 - RNA, 22 nt, Artificial Sequence
  Synthetic
gcuaaagcagggauaauaaaag

SEQ ID NO: 297914 - RNA, 23 nt, Artificial Sequence
  Synthetic
agcuaaagcagggauaauaaaag

SEQ ID NO: 297915 - RNA, 24 nt, Artificial Sequence
  Synthetic
uagcuaaagcagggauaauaaaag

SEQ ID NO: 297916 - RNA, 18 nt, Artificial Sequence
  Synthetic
ugcacucccuaauaaaag

SEQ ID NO: 297917 - RNA, 19 nt, Artificial Sequence
  Synthetic
cugcacucccuaauaaaag

SEQ ID NO: 297918 - RNA, 20 nt, Artificial Sequence
  Synthetic
ccugcacucccuaauaaaag

SEQ ID NO: 297919 - RNA, 21 nt, Artificial Sequence
  Synthetic
gccugcacucccuaauaaaag

SEQ ID NO: 297920 - RNA, 22 nt, Artificial Sequence
  Synthetic
ggccugcacucccuaauaaaag

SEQ ID NO: 297921 - RNA, 23 nt, Artificial Sequence
  Synthetic
gggccugcacucccuaauaaaag

SEQ ID NO: 297922 - RNA, 24 nt, Artificial Sequence
  Synthetic
ggggccugcacucccuaauaaaag

SEQ ID NO: 297923 - RNA, 18 nt, Artificial Sequence
  Synthetic
gauggacugugauaaaag

SEQ ID NO: 297924 - RNA, 19 nt, Artificial Sequence
  Synthetic
ugauggacugugauaaaag

SEQ ID NO: 297925 - RNA, 20 nt, Artificial Sequence
  Synthetic
uugauggacugugauaaaag

SEQ ID NO: 297926 - RNA, 21 nt, Artificial Sequence
  Synthetic
uuugauggacugugauaaaag

SEQ ID NO: 297927 - RNA, 22 nt, Artificial Sequence
  Synthetic
uuuugauggacugugauaaaag

SEQ ID NO: 297928 - RNA, 23 nt, Artificial Sequence
  Synthetic
auuuugauggacugugauaaaag

SEQ ID NO: 297929 - RNA, 24 nt, Artificial Sequence
  Synthetic
uauuuugauggacugugauaaaag

SEQ ID NO: 297930 - RNA, 18 nt, Artificial Sequence
  Synthetic
ugaguggauugauaaaag

SEQ ID NO: 297931 - RNA, 19 nt, Artificial Sequence
  Synthetic
cugaguggauugauaaaag

SEQ ID NO: 297932 - RNA, 20 nt, Artificial Sequence
  Synthetic
gcugaguggauugauaaaag

SEQ ID NO: 297933 - RNA, 21 nt, Artificial Sequence
  Synthetic
agcugaguggauugauaaaag

SEQ ID NO: 297934 - RNA, 22 nt, Artificial Sequence
  Synthetic
uagcugaguggauugauaaaag

SEQ ID NO: 297935 - RNA, 23 nt, Artificial Sequence
  Synthetic
uuagcugaguggauugauaaaag

SEQ ID NO: 297936 - RNA, 24 nt, Artificial Sequence
  Synthetic
uuuagcugaguggauugauaaaag

SEQ ID NO: 297937 - RNA, 18 nt, Artificial Sequence
  Synthetic
uguaauugcaacuaaaag

SEQ ID NO: 297938 - RNA, 19 nt, Artificial Sequence
  Synthetic
auguaauugcaacuaaaag

SEQ ID NO: 297939 - RNA, 20 nt, Artificial Sequence
  Synthetic
cauguaauugcaacuaaaag

SEQ ID NO: 297940 - RNA, 21 nt, Artificial Sequence
  Synthetic
acauguaauugcaacuaaaag

SEQ ID NO: 297941 - RNA, 22 nt, Artificial Sequence
  Synthetic
cacauguaauugcaacuaaaag

SEQ ID NO: 297942 - RNA, 23 nt, Artificial Sequence
  Synthetic
gcacauguaauugcaacuaaaag

SEQ ID NO: 297943 - RNA, 24 nt, Artificial Sequence
  Synthetic
ggcacauguaauugcaacuaaaag

SEQ ID NO: 297944 - RNA, 18 nt, Artificial Sequence
  Synthetic
cuauaugugaacuaaaag

SEQ ID NO: 297945 - RNA, 19 nt, Artificial Sequence
  Synthetic
acuauaugugaacuaaaag

SEQ ID NO: 297946 - RNA, 20 nt, Artificial Sequence
  Synthetic
gacuauaugugaacuaaaag

SEQ ID NO: 297947 - RNA, 21 nt, Artificial Sequence
  Synthetic
ugacuauaugugaacuaaaag

SEQ ID NO: 297948 - RNA, 22 nt, Artificial Sequence
  Synthetic
gugacuauaugugaacuaaaag

SEQ ID NO: 297949 - RNA, 23 nt, Artificial Sequence
  Synthetic
ugugacuauaugugaacuaaaag

SEQ ID NO: 297950 - RNA, 24 nt, Artificial Sequence
  Synthetic
gugugacuauaugugaacuaaaag

SEQ ID NO: 297951 - RNA, 18 nt, Artificial Sequence
  Synthetic
ugugugugugccuaaaag

SEQ ID NO: 297952 - RNA, 19 nt, Artificial Sequence
  Synthetic
gugugugugugccuaaaag

SEQ ID NO: 297953 - RNA, 20 nt, Artificial Sequence
  Synthetic
agugugugugugccuaaaag

SEQ ID NO: 297954 - RNA, 21 nt, Artificial Sequence
  Synthetic
gagugugugugugccuaaaag

SEQ ID NO: 297955 - RNA, 22 nt, Artificial Sequence
  Synthetic
ugagugugugugugccuaaaag

SEQ ID NO: 297956 - RNA, 23 nt, Artificial Sequence
  Synthetic
cugagugugugugugccuaaaag

SEQ ID NO: 297957 - RNA, 24 nt, Artificial Sequence
  Synthetic
ucugagugugugugugccuaaaag

SEQ ID NO: 297958 - RNA, 18 nt, Artificial Sequence
  Synthetic
gaaagcuuauccuaaaag

SEQ ID NO: 297959 - RNA, 19 nt, Artificial Sequence
  Synthetic
ugaaagcuuauccuaaaag

SEQ ID NO: 297960 - RNA, 20 nt, Artificial Sequence
  Synthetic
uugaaagcuuauccuaaaag

SEQ ID NO: 297961 - RNA, 21 nt, Artificial Sequence
  Synthetic
uuugaaagcuuauccuaaaag

SEQ ID NO: 297962 - RNA, 22 nt, Artificial Sequence
  Synthetic
auuugaaagcuuauccuaaaag

SEQ ID NO: 297963 - RNA, 23 nt, Artificial Sequence
  Synthetic
uauuugaaagcuuauccuaaaag

SEQ ID NO: 297964 - RNA, 24 nt, Artificial Sequence
  Synthetic
auauuugaaagcuuauccuaaaag

SEQ ID NO: 297965 - RNA, 18 nt, Artificial Sequence
  Synthetic
aaagccauguccuaaaag

SEQ ID NO: 297966 - RNA, 19 nt, Artificial Sequence
  Synthetic
gaaagccauguccuaaaag

SEQ ID NO: 297967 - RNA, 20 nt, Artificial Sequence
  Synthetic
agaaagccauguccuaaaag

SEQ ID NO: 297968 - RNA, 21 nt, Artificial Sequence
  Synthetic
uagaaagccauguccuaaaag

SEQ ID NO: 297969 - RNA, 22 nt, Artificial Sequence
  Synthetic
auagaaagccauguccuaaaag

SEQ ID NO: 297970 - RNA, 23 nt, Artificial Sequence
  Synthetic
cauagaaagccauguccuaaaag

SEQ ID NO: 297971 - RNA, 24 nt, Artificial Sequence
  Synthetic
ucauagaaagccauguccuaaaag

SEQ ID NO: 297972 - RNA, 18 nt, Artificial Sequence
  Synthetic
aaaaagaugggcuaaaag

SEQ ID NO: 297973 - RNA, 19 nt, Artificial Sequence
  Synthetic
aaaaaagaugggcuaaaag

SEQ ID NO: 297974 - RNA, 20 nt, Artificial Sequence
  Synthetic
aaaaaaagaugggcuaaaag

SEQ ID NO: 297975 - RNA, 21 nt, Artificial Sequence
  Synthetic
gaaaaaaagaugggcuaaaag

SEQ ID NO: 297976 - RNA, 22 nt, Artificial Sequence
  Synthetic
ggaaaaaaagaugggcuaaaag

SEQ ID NO: 297977 - RNA, 23 nt, Artificial Sequence
  Synthetic
uggaaaaaaagaugggcuaaaag

SEQ ID NO: 297978 - RNA, 24 nt, Artificial Sequence
  Synthetic
cuggaaaaaaagaugggcuaaaag

SEQ ID NO: 297979 - RNA, 18 nt, Artificial Sequence
  Synthetic
gcaggcaggcucuaaaag

SEQ ID NO: 297980 - RNA, 19 nt, Artificial Sequence
  Synthetic
ugcaggcaggcucuaaaag

SEQ ID NO: 297981 - RNA, 20 nt, Artificial Sequence
  Synthetic
augcaggcaggcucuaaaag

SEQ ID NO: 297982 - RNA, 21 nt, Artificial Sequence
  Synthetic
aaugcaggcaggcucuaaaag

SEQ ID NO: 297983 - RNA, 22 nt, Artificial Sequence
  Synthetic
aaaugcaggcaggcucuaaaag

SEQ ID NO: 297984 - RNA, 23 nt, Artificial Sequence
  Synthetic
gaaaugcaggcaggcucuaaaag

SEQ ID NO: 297985 - RNA, 24 nt, Artificial Sequence
  Synthetic
agaaaugcaggcaggcucuaaaag

SEQ ID NO: 297986 - RNA, 18 nt, Artificial Sequence
  Synthetic
gcagguaaaaaguaaaag

SEQ ID NO: 297987 - RNA, 19 nt, Artificial Sequence
  Synthetic
agcagguaaaaaguaaaag

SEQ ID NO: 297988 - RNA, 20 nt, Artificial Sequence
  Synthetic
cagcagguaaaaaguaaaag

SEQ ID NO: 297989 - RNA, 21 nt, Artificial Sequence
  Synthetic
gcagcagguaaaaaguaaaag

SEQ ID NO: 297990 - RNA, 22 nt, Artificial Sequence
  Synthetic
ggcagcagguaaaaaguaaaag

SEQ ID NO: 297991 - RNA, 23 nt, Artificial Sequence
  Synthetic
aggcagcagguaaaaaguaaaag

SEQ ID NO: 297992 - RNA, 24 nt, Artificial Sequence
  Synthetic
aaggcagcagguaaaaaguaaaag

SEQ ID NO: 297993 - RNA, 18 nt, Artificial Sequence
  Synthetic
gggucuucaaaguaaaag

SEQ ID NO: 297994 - RNA, 19 nt, Artificial Sequence
  Synthetic
ggggucuucaaaguaaaag

SEQ ID NO: 297995 - RNA, 20 nt, Artificial Sequence
  Synthetic
uggggucuucaaaguaaaag

SEQ ID NO: 297996 - RNA, 21 nt, Artificial Sequence
  Synthetic
auggggucuucaaaguaaaag

SEQ ID NO: 297997 - RNA, 22 nt, Artificial Sequence
  Synthetic
gauggggucuucaaaguaaaag

SEQ ID NO: 297998 - RNA, 23 nt, Artificial Sequence
  Synthetic
cgauggggucuucaaaguaaaag

SEQ ID NO: 297999 - RNA, 24 nt, Artificial Sequence
  Synthetic
acgauggggucuucaaaguaaaag

SEQ ID NO: 298000 - RNA, 18 nt, Artificial Sequence
  Synthetic
gcacucaucaaguaaaag

SEQ ID NO: 298001 - RNA, 19 nt, Artificial Sequence
  Synthetic
ugcacucaucaaguaaaag

SEQ ID NO: 298002 - RNA, 20 nt, Artificial Sequence
  Synthetic
cugcacucaucaaguaaaag

SEQ ID NO: 298003 - RNA, 21 nt, Artificial Sequence
  Synthetic
ucugcacucaucaaguaaaag

SEQ ID NO: 298004 - RNA, 22 nt, Artificial Sequence
  Synthetic
uucugcacucaucaaguaaaag

SEQ ID NO: 298005 - RNA, 23 nt, Artificial Sequence
  Synthetic
uuucugcacucaucaaguaaaag

SEQ ID NO: 298006 - RNA, 24 nt, Artificial Sequence
  Synthetic
uuuucugcacucaucaaguaaaag

SEQ ID NO: 298007 - RNA, 18 nt, Artificial Sequence
  Synthetic
gaguaguagcaguaaaag

SEQ ID NO: 298008 - RNA, 19 nt, Artificial Sequence
  Synthetic
ugaguaguagcaguaaaag

SEQ ID NO: 298009 - RNA, 20 nt, Artificial Sequence
  Synthetic
augaguaguagcaguaaaag

SEQ ID NO: 298010 - RNA, 21 nt, Artificial Sequence
  Synthetic
aaugaguaguagcaguaaaag

SEQ ID NO: 298011 - RNA, 22 nt, Artificial Sequence
  Synthetic
gaaugaguaguagcaguaaaag

SEQ ID NO: 298012 - RNA, 23 nt, Artificial Sequence
  Synthetic
agaaugaguaguagcaguaaaag

SEQ ID NO: 298013 - RNA, 24 nt, Artificial Sequence
  Synthetic
gagaaugaguaguagcaguaaaag

SEQ ID NO: 298014 - RNA, 18 nt, Artificial Sequence
  Synthetic
acauaggagggguaaaag

SEQ ID NO: 298015 - RNA, 19 nt, Artificial Sequence
  Synthetic
gacauaggagggguaaaag

SEQ ID NO: 298016 - RNA, 20 nt, Artificial Sequence
  Synthetic
agacauaggagggguaaaag

SEQ ID NO: 298017 - RNA, 21 nt, Artificial Sequence
  Synthetic
aagacauaggagggguaaaag

SEQ ID NO: 298018 - RNA, 22 nt, Artificial Sequence
  Synthetic
gaagacauaggagggguaaaag

SEQ ID NO: 298019 - RNA, 23 nt, Artificial Sequence
  Synthetic
ugaagacauaggagggguaaaag

SEQ ID NO: 298020 - RNA, 24 nt, Artificial Sequence
  Synthetic
uugaagacauaggagggguaaaag

SEQ ID NO: 298021 - RNA, 18 nt, Artificial Sequence
  Synthetic
gaccaggcauuguaaaag

SEQ ID NO: 298022 - RNA, 19 nt, Artificial Sequence
  Synthetic
agaccaggcauuguaaaag

SEQ ID NO: 298023 - RNA, 20 nt, Artificial Sequence
  Synthetic
aagaccaggcauuguaaaag

SEQ ID NO: 298024 - RNA, 21 nt, Artificial Sequence
  Synthetic
caagaccaggcauuguaaaag

SEQ ID NO: 298025 - RNA, 22 nt, Artificial Sequence
  Synthetic
acaagaccaggcauuguaaaag

SEQ ID NO: 298026 - RNA, 23 nt, Artificial Sequence
  Synthetic
aacaagaccaggcauuguaaaag

SEQ ID NO: 298027 - RNA, 24 nt, Artificial Sequence
  Synthetic
caacaagaccaggcauuguaaaag

SEQ ID NO: 298028 - RNA, 18 nt, Artificial Sequence
  Synthetic
gugagagugaauuaaaag

SEQ ID NO: 298029 - RNA, 19 nt, Artificial Sequence
  Synthetic
ugugagagugaauuaaaag

SEQ ID NO: 298030 - RNA, 20 nt, Artificial Sequence
  Synthetic
augugagagugaauuaaaag

SEQ ID NO: 298031 - RNA, 21 nt, Artificial Sequence
  Synthetic
uaugugagagugaauuaaaag

SEQ ID NO: 298032 - RNA, 22 nt, Artificial Sequence
  Synthetic
uuaugugagagugaauuaaaag

SEQ ID NO: 298033 - RNA, 23 nt, Artificial Sequence
  Synthetic
guuaugugagagugaauuaaaag

SEQ ID NO: 298034 - RNA, 24 nt, Artificial Sequence
  Synthetic
gguuaugugagagugaauuaaaag

SEQ ID NO: 298035 - RNA, 18 nt, Artificial Sequence
  Synthetic
auuuuuaauaauuaaaag

SEQ ID NO: 298036 - RNA, 19 nt, Artificial Sequence
  Synthetic
gauuuuuaauaauuaaaag

SEQ ID NO: 298037 - RNA, 20 nt, Artificial Sequence
  Synthetic
agauuuuuaauaauuaaaag

SEQ ID NO: 298038 - RNA, 21 nt, Artificial Sequence
  Synthetic
aagauuuuuaauaauuaaaag

SEQ ID NO: 298039 - RNA, 22 nt, Artificial Sequence
  Synthetic
caagauuuuuaauaauuaaaag

SEQ ID NO: 298040 - RNA, 23 nt, Artificial Sequence
  Synthetic
gcaagauuuuuaauaauuaaaag

SEQ ID NO: 298041 - RNA, 24 nt, Artificial Sequence
  Synthetic
ugcaagauuuuuaauaauuaaaag

SEQ ID NO: 298042 - RNA, 18 nt, Artificial Sequence
  Synthetic
cauuguggcuauuaaaag

SEQ ID NO: 298043 - RNA, 19 nt, Artificial Sequence
  Synthetic
ccauuguggcuauuaaaag

SEQ ID NO: 298044 - RNA, 20 nt, Artificial Sequence
  Synthetic
uccauuguggcuauuaaaag

SEQ ID NO: 298045 - RNA, 21 nt, Artificial Sequence
  Synthetic
uuccauuguggcuauuaaaag

SEQ ID NO: 298046 - RNA, 22 nt, Artificial Sequence
  Synthetic
guuccauuguggcuauuaaaag

SEQ ID NO: 298047 - RNA, 23 nt, Artificial Sequence
  Synthetic
aguuccauuguggcuauuaaaag

SEQ ID NO: 298048 - RNA, 24 nt, Artificial Sequence
  Synthetic
uaguuccauuguggcuauuaaaag

SEQ ID NO: 298049 - RNA, 18 nt, Artificial Sequence
  Synthetic
aauuuucauuauuaaaag

SEQ ID NO: 298050 - RNA, 19 nt, Artificial Sequence
  Synthetic
aaauuuucauuauuaaaag

SEQ ID NO: 298051 - RNA, 20 nt, Artificial Sequence
  Synthetic
gaaauuuucauuauuaaaag

SEQ ID NO: 298052 - RNA, 21 nt, Artificial Sequence
  Synthetic
ugaaauuuucauuauuaaaag

SEQ ID NO: 298053 - RNA, 22 nt, Artificial Sequence
  Synthetic
augaaauuuucauuauuaaaag

SEQ ID NO: 298054 - RNA, 23 nt, Artificial Sequence
  Synthetic
aaugaaauuuucauuauuaaaag

SEQ ID NO: 298055 - RNA, 24 nt, Artificial Sequence
  Synthetic
aaaugaaauuuucauuauuaaaag

SEQ ID NO: 298056 - RNA, 18 nt, Artificial Sequence
  Synthetic
cauguucucacuuaaaag

SEQ ID NO: 298057 - RNA, 19 nt, Artificial Sequence
  Synthetic
acauguucucacuuaaaag

SEQ ID NO: 298058 - RNA, 20 nt, Artificial Sequence
  Synthetic
cacauguucucacuuaaaag

SEQ ID NO: 298059 - RNA, 21 nt, Artificial Sequence
  Synthetic
ucacauguucucacuuaaaag

SEQ ID NO: 298060 - RNA, 22 nt, Artificial Sequence
  Synthetic
aucacauguucucacuuaaaag

SEQ ID NO: 298061 - RNA, 23 nt, Artificial Sequence
  Synthetic
uaucacauguucucacuuaaaag

SEQ ID NO: 298062 - RNA, 24 nt, Artificial Sequence
  Synthetic
auaucacauguucucacuuaaaag

SEQ ID NO: 298063 - RNA, 18 nt, Artificial Sequence
  Synthetic
acuuugaaaucuuaaaag

SEQ ID NO: 298064 - RNA, 19 nt, Artificial Sequence
  Synthetic
aacuuugaaaucuuaaaag

SEQ ID NO: 298065 - RNA, 20 nt, Artificial Sequence
  Synthetic
gaacuuugaaaucuuaaaag

SEQ ID NO: 298066 - RNA, 21 nt, Artificial Sequence
  Synthetic
ugaacuuugaaaucuuaaaag

SEQ ID NO: 298067 - RNA, 22 nt, Artificial Sequence
  Synthetic
augaacuuugaaaucuuaaaag

SEQ ID NO: 298068 - RNA, 23 nt, Artificial Sequence
  Synthetic
aaugaacuuugaaaucuuaaaag

SEQ ID NO: 298069 - RNA, 24 nt, Artificial Sequence
  Synthetic
aaaugaacuuugaaaucuuaaaag

SEQ ID NO: 298070 - RNA, 18 nt, Artificial Sequence
  Synthetic
aaaggagaaucuuaaaag

SEQ ID NO: 298071 - RNA, 19 nt, Artificial Sequence
  Synthetic
caaaggagaaucuuaaaag

SEQ ID NO: 298072 - RNA, 20 nt, Artificial Sequence
  Synthetic
acaaaggagaaucuuaaaag

SEQ ID NO: 298073 - RNA, 21 nt, Artificial Sequence
  Synthetic
uacaaaggagaaucuuaaaag

SEQ ID NO: 298074 - RNA, 22 nt, Artificial Sequence
  Synthetic
guacaaaggagaaucuuaaaag

SEQ ID NO: 298075 - RNA, 23 nt, Artificial Sequence
  Synthetic
aguacaaaggagaaucuuaaaag

SEQ ID NO: 298076 - RNA, 24 nt, Artificial Sequence
  Synthetic
uaguacaaaggagaaucuuaaaag

SEQ ID NO: 298077 - RNA, 18 nt, Artificial Sequence
  Synthetic
cccucuggaucuuaaaag

SEQ ID NO: 298078 - RNA, 19 nt, Artificial Sequence
  Synthetic
acccucuggaucuuaaaag

SEQ ID NO: 298079 - RNA, 20 nt, Artificial Sequence
  Synthetic
uacccucuggaucuuaaaag

SEQ ID NO: 298080 - RNA, 21 nt, Artificial Sequence
  Synthetic
guacccucuggaucuuaaaag

SEQ ID NO: 298081 - RNA, 22 nt, Artificial Sequence
  Synthetic
uguacccucuggaucuuaaaag

SEQ ID NO: 298082 - RNA, 23 nt, Artificial Sequence
  Synthetic
auguacccucuggaucuuaaaag

SEQ ID NO: 298083 - RNA, 24 nt, Artificial Sequence
  Synthetic
cauguacccucuggaucuuaaaag

SEQ ID NO: 298084 - RNA, 18 nt, Artificial Sequence
  Synthetic
agccacguucuuuaaaag

SEQ ID NO: 298085 - RNA, 19 nt, Artificial Sequence
  Synthetic
uagccacguucuuuaaaag

SEQ ID NO: 298086 - RNA, 20 nt, Artificial Sequence
  Synthetic
guagccacguucuuuaaaag

SEQ ID NO: 298087 - RNA, 21 nt, Artificial Sequence
  Synthetic
aguagccacguucuuuaaaag

SEQ ID NO: 298088 - RNA, 22 nt, Artificial Sequence
  Synthetic
uaguagccacguucuuuaaaag

SEQ ID NO: 298089 - RNA, 23 nt, Artificial Sequence
  Synthetic
cuaguagccacguucuuuaaaag

SEQ ID NO: 298090 - RNA, 24 nt, Artificial Sequence
  Synthetic
ucuaguagccacguucuuuaaaag

SEQ ID NO: 298091 - RNA, 18 nt, Artificial Sequence
  Synthetic
cauaauuaauuuuaaaag

SEQ ID NO: 298092 - RNA, 19 nt, Artificial Sequence
  Synthetic
acauaauuaauuuuaaaag

SEQ ID NO: 298093 - RNA, 20 nt, Artificial Sequence
  Synthetic
cacauaauuaauuuuaaaag

SEQ ID NO: 298094 - RNA, 21 nt, Artificial Sequence
  Synthetic
ucacauaauuaauuuuaaaag

SEQ ID NO: 298095 - RNA, 22 nt, Artificial Sequence
  Synthetic
aucacauaauuaauuuuaaaag

SEQ ID NO: 298096 - RNA, 23 nt, Artificial Sequence
  Synthetic
aaucacauaauuaauuuuaaaag

SEQ ID NO: 298097 - RNA, 24 nt, Artificial Sequence
  Synthetic
uaaucacauaauuaauuuuaaaag

SEQ ID NO: 298098 - RNA, 18 nt, Artificial Sequence
  Synthetic
aaaagggacaaaacaaag

SEQ ID NO: 298099 - RNA, 19 nt, Artificial Sequence
  Synthetic
aaaaagggacaaaacaaag

SEQ ID NO: 298100 - RNA, 20 nt, Artificial Sequence
  Synthetic
aaaaaagggacaaaacaaag

SEQ ID NO: 298101 - RNA, 21 nt, Artificial Sequence
  Synthetic
aaaaaaagggacaaaacaaag

SEQ ID NO: 298102 - RNA, 22 nt, Artificial Sequence
  Synthetic
aaaaaaaagggacaaaacaaag

SEQ ID NO: 298103 - RNA, 23 nt, Artificial Sequence
  Synthetic
aaaaaaaaagggacaaaacaaag

SEQ ID NO: 298104 - RNA, 24 nt, Artificial Sequence
  Synthetic
gaaaaaaaaagggacaaaacaaag

SEQ ID NO: 298105 - RNA, 18 nt, Artificial Sequence
  Synthetic
cguuaugauaaaacaaag

SEQ ID NO: 298106 - RNA, 19 nt, Artificial Sequence
  Synthetic
gcguuaugauaaaacaaag

SEQ ID NO: 298107 - RNA, 20 nt, Artificial Sequence
  Synthetic
agcguuaugauaaaacaaag

SEQ ID NO: 298108 - RNA, 21 nt, Artificial Sequence
  Synthetic
cagcguuaugauaaaacaaag

SEQ ID NO: 298109 - RNA, 22 nt, Artificial Sequence
  Synthetic
ccagcguuaugauaaaacaaag

SEQ ID NO: 298110 - RNA, 23 nt, Artificial Sequence
  Synthetic
accagcguuaugauaaaacaaag

SEQ ID NO: 298111 - RNA, 24 nt, Artificial Sequence
  Synthetic
aaccagcguuaugauaaaacaaag

SEQ ID NO: 298112 - RNA, 18 nt, Artificial Sequence
  Synthetic
uacacaaaggaaacaaag

SEQ ID NO: 298113 - RNA, 19 nt, Artificial Sequence
  Synthetic
uuacacaaaggaaacaaag

SEQ ID NO: 298114 - RNA, 20 nt, Artificial Sequence
  Synthetic
uuuacacaaaggaaacaaag

SEQ ID NO: 298115 - RNA, 21 nt, Artificial Sequence
  Synthetic
uuuuacacaaaggaaacaaag

SEQ ID NO: 298116 - RNA, 22 nt, Artificial Sequence
  Synthetic
uuuuuacacaaaggaaacaaag

SEQ ID NO: 298117 - RNA, 23 nt, Artificial Sequence
  Synthetic
cuuuuuacacaaaggaaacaaag

SEQ ID NO: 298118 - RNA, 24 nt, Artificial Sequence
  Synthetic
acuuuuuacacaaaggaaacaaag

SEQ ID NO: 298119 - RNA, 18 nt, Artificial Sequence
  Synthetic
auaguaacugaaacaaag

SEQ ID NO: 298120 - RNA, 19 nt, Artificial Sequence
  Synthetic
uauaguaacugaaacaaag

SEQ ID NO: 298121 - RNA, 20 nt, Artificial Sequence
  Synthetic
uuauaguaacugaaacaaag

SEQ ID NO: 298122 - RNA, 21 nt, Artificial Sequence
  Synthetic
auuauaguaacugaaacaaag

SEQ ID NO: 298123 - RNA, 22 nt, Artificial Sequence
  Synthetic
aauuauaguaacugaaacaaag

SEQ ID NO: 298124 - RNA, 23 nt, Artificial Sequence
  Synthetic
gaauuauaguaacugaaacaaag

SEQ ID NO: 298125 - RNA, 24 nt, Artificial Sequence
  Synthetic
agaauuauaguaacugaaacaaag

SEQ ID NO: 298126 - RNA, 18 nt, Artificial Sequence
  Synthetic
uuauaaauaucaacaaag

SEQ ID NO: 298127 - RNA, 19 nt, Artificial Sequence
  Synthetic
cuuauaaauaucaacaaag

SEQ ID NO: 298128 - RNA, 20 nt, Artificial Sequence
  Synthetic
ccuuauaaauaucaacaaag

SEQ ID NO: 298129 - RNA, 21 nt, Artificial Sequence
  Synthetic
accuuauaaauaucaacaaag

SEQ ID NO: 298130 - RNA, 22 nt, Artificial Sequence
  Synthetic
gaccuuauaaauaucaacaaag

SEQ ID NO: 298131 - RNA, 23 nt, Artificial Sequence
  Synthetic
agaccuuauaaauaucaacaaag

SEQ ID NO: 298132 - RNA, 24 nt, Artificial Sequence
  Synthetic
cagaccuuauaaauaucaacaaag

SEQ ID NO: 298133 - RNA, 18 nt, Artificial Sequence
  Synthetic
uaagcaaaaagaacaaag

SEQ ID NO: 298134 - RNA, 19 nt, Artificial Sequence
  Synthetic
cuaagcaaaaagaacaaag

SEQ ID NO: 298135 - RNA, 20 nt, Artificial Sequence
  Synthetic
ccuaagcaaaaagaacaaag

SEQ ID NO: 298136 - RNA, 21 nt, Artificial Sequence
  Synthetic
uccuaagcaaaaagaacaaag

SEQ ID NO: 298137 - RNA, 22 nt, Artificial Sequence
  Synthetic
auccuaagcaaaaagaacaaag

SEQ ID NO: 298138 - RNA, 23 nt, Artificial Sequence
  Synthetic
aauccuaagcaaaaagaacaaag

SEQ ID NO: 298139 - RNA, 24 nt, Artificial Sequence
  Synthetic
caauccuaagcaaaaagaacaaag

SEQ ID NO: 298140 - RNA, 18 nt, Artificial Sequence
  Synthetic
uaagccaaaagaacaaag

SEQ ID NO: 298141 - RNA, 19 nt, Artificial Sequence
  Synthetic
cuaagccaaaagaacaaag

SEQ ID NO: 298142 - RNA, 20 nt, Artificial Sequence
  Synthetic
ccuaagccaaaagaacaaag

SEQ ID NO: 298143 - RNA, 18 nt, Artificial Sequence
  Synthetic
ugagccaaaagaacaaag

SEQ ID NO: 298144 - RNA, 19 nt, Artificial Sequence
  Synthetic
cugagccaaaagaacaaag

SEQ ID NO: 298145 - RNA, 20 nt, Artificial Sequence
  Synthetic
ccugagccaaaagaacaaag

SEQ ID NO: 298146 - RNA, 18 nt, Artificial Sequence
  Synthetic
guaaauaaaagaacaaag

SEQ ID NO: 298147 - RNA, 19 nt, Artificial Sequence
  Synthetic
uguaaauaaaagaacaaag

SEQ ID NO: 298148 - RNA, 20 nt, Artificial Sequence
  Synthetic
auguaaauaaaagaacaaag

SEQ ID NO: 298149 - RNA, 21 nt, Artificial Sequence
  Synthetic
uauguaaauaaaagaacaaag

SEQ ID NO: 298150 - RNA, 22 nt, Artificial Sequence
  Synthetic
uuauguaaauaaaagaacaaag

SEQ ID NO: 298151 - RNA, 23 nt, Artificial Sequence
  Synthetic
auuauguaaauaaaagaacaaag

SEQ ID NO: 298152 - RNA, 24 nt, Artificial Sequence
  Synthetic
uauuauguaaauaaaagaacaaag

SEQ ID NO: 298153 - RNA, 18 nt, Artificial Sequence
  Synthetic
caguguggaagaacaaag

SEQ ID NO: 298154 - RNA, 19 nt, Artificial Sequence
  Synthetic
acaguguggaagaacaaag

SEQ ID NO: 298155 - RNA, 20 nt, Artificial Sequence
  Synthetic
cacaguguggaagaacaaag

SEQ ID NO: 298156 - RNA, 21 nt, Artificial Sequence
  Synthetic
acacaguguggaagaacaaag

SEQ ID NO: 298157 - RNA, 22 nt, Artificial Sequence
  Synthetic
cacacaguguggaagaacaaag

SEQ ID NO: 298158 - RNA, 23 nt, Artificial Sequence
  Synthetic
acacacaguguggaagaacaaag

SEQ ID NO: 298159 - RNA, 24 nt, Artificial Sequence
  Synthetic
uacacacaguguggaagaacaaag

SEQ ID NO: 298160 - RNA, 18 nt, Artificial Sequence
  Synthetic
aggaaggagagaacaaag

SEQ ID NO: 298161 - RNA, 19 nt, Artificial Sequence
  Synthetic
aaggaaggagagaacaaag

SEQ ID NO: 298162 - RNA, 20 nt, Artificial Sequence
  Synthetic
aaaggaaggagagaacaaag

SEQ ID NO: 298163 - RNA, 21 nt, Artificial Sequence
  Synthetic
gaaaggaaggagagaacaaag

SEQ ID NO: 298164 - RNA, 22 nt, Artificial Sequence
  Synthetic
ggaaaggaaggagagaacaaag

SEQ ID NO: 298165 - RNA, 23 nt, Artificial Sequence
  Synthetic
aggaaaggaaggagagaacaaag

SEQ ID NO: 298166 - RNA, 24 nt, Artificial Sequence
  Synthetic
aaggaaaggaaggagagaacaaag

SEQ ID NO: 298167 - RNA, 18 nt, Artificial Sequence
  Synthetic
uaaguugaaugaacaaag

SEQ ID NO: 298168 - RNA, 19 nt, Artificial Sequence
  Synthetic
cuaaguugaaugaacaaag

SEQ ID NO: 298169 - RNA, 20 nt, Artificial Sequence
  Synthetic
acuaaguugaaugaacaaag

SEQ ID NO: 298170 - RNA, 21 nt, Artificial Sequence
  Synthetic
aacuaaguugaaugaacaaag

SEQ ID NO: 298171 - RNA, 22 nt, Artificial Sequence
  Synthetic
gaacuaaguugaaugaacaaag

SEQ ID NO: 298172 - RNA, 23 nt, Artificial Sequence
  Synthetic
agaacuaaguugaaugaacaaag

SEQ ID NO: 298173 - RNA, 24 nt, Artificial Sequence
  Synthetic
aagaacuaaguugaaugaacaaag

SEQ ID NO: 298174 - RNA, 18 nt, Artificial Sequence
  Synthetic
augugucagugaacaaag

SEQ ID NO: 298175 - RNA, 19 nt, Artificial Sequence
  Synthetic
aaugugucagugaacaaag

SEQ ID NO: 298176 - RNA, 20 nt, Artificial Sequence
  Synthetic
gaaugugucagugaacaaag

SEQ ID NO: 298177 - RNA, 21 nt, Artificial Sequence
  Synthetic
ugaaugugucagugaacaaag

SEQ ID NO: 298178 - RNA, 22 nt, Artificial Sequence
  Synthetic
uugaaugugucagugaacaaag

SEQ ID NO: 298179 - RNA, 23 nt, Artificial Sequence
  Synthetic
uuugaaugugucagugaacaaag

SEQ ID NO: 298180 - RNA, 24 nt, Artificial Sequence
  Synthetic
uuuugaaugugucagugaacaaag

SEQ ID NO: 298181 - RNA, 18 nt, Artificial Sequence
  Synthetic
auuguuuguaacacaaag

SEQ ID NO: 298182 - RNA, 19 nt, Artificial Sequence
  Synthetic
gauuguuuguaacacaaag

SEQ ID NO: 298183 - RNA, 20 nt, Artificial Sequence
  Synthetic
ggauuguuuguaacacaaag

SEQ ID NO: 298184 - RNA, 21 nt, Artificial Sequence
  Synthetic
uggauuguuuguaacacaaag

SEQ ID NO: 298185 - RNA, 22 nt, Artificial Sequence
  Synthetic
uuggauuguuuguaacacaaag

SEQ ID NO: 298186 - RNA, 23 nt, Artificial Sequence
  Synthetic
auuggauuguuuguaacacaaag

SEQ ID NO: 298187 - RNA, 24 nt, Artificial Sequence
  Synthetic
gauuggauuguuuguaacacaaag

SEQ ID NO: 298188 - RNA, 18 nt, Artificial Sequence
  Synthetic
gaacauauggacacaaag

SEQ ID NO: 298189 - RNA, 19 nt, Artificial Sequence
  Synthetic
agaacauauggacacaaag

SEQ ID NO: 298190 - RNA, 20 nt, Artificial Sequence
  Synthetic
gagaacauauggacacaaag

SEQ ID NO: 298191 - RNA, 21 nt, Artificial Sequence
  Synthetic
ugagaacauauggacacaaag

SEQ ID NO: 298192 - RNA, 22 nt, Artificial Sequence
  Synthetic
augagaacauauggacacaaag

SEQ ID NO: 298193 - RNA, 23 nt, Artificial Sequence
  Synthetic
gaugagaacauauggacacaaag

SEQ ID NO: 298194 - RNA, 24 nt, Artificial Sequence
  Synthetic
ugaugagaacauauggacacaaag

SEQ ID NO: 298195 - RNA, 18 nt, Artificial Sequence
  Synthetic
cauagacuuuacacaaag

SEQ ID NO: 298196 - RNA, 19 nt, Artificial Sequence
  Synthetic
ucauagacuuuacacaaag

SEQ ID NO: 298197 - RNA, 20 nt, Artificial Sequence
  Synthetic
gucauagacuuuacacaaag

SEQ ID NO: 298198 - RNA, 21 nt, Artificial Sequence
  Synthetic
ggucauagacuuuacacaaag

SEQ ID NO: 298199 - RNA, 22 nt, Artificial Sequence
  Synthetic
aggucauagacuuuacacaaag

SEQ ID NO: 298200 - RNA, 23 nt, Artificial Sequence
  Synthetic
caggucauagacuuuacacaaag

SEQ ID NO: 298201 - RNA, 24 nt, Artificial Sequence
  Synthetic
gcaggucauagacuuuacacaaag

SEQ ID NO: 298202 - RNA, 18 nt, Artificial Sequence
  Synthetic
agccacucucccacaaag

SEQ ID NO: 298203 - RNA, 19 nt, Artificial Sequence
  Synthetic
aagccacucucccacaaag

SEQ ID NO: 298204 - RNA, 20 nt, Artificial Sequence
  Synthetic
uaagccacucucccacaaag

SEQ ID NO: 298205 - RNA, 21 nt, Artificial Sequence
  Synthetic
guaagccacucucccacaaag

SEQ ID NO: 298206 - RNA, 22 nt, Artificial Sequence
  Synthetic
uguaagccacucucccacaaag

SEQ ID NO: 298207 - RNA, 23 nt, Artificial Sequence
  Synthetic
guguaagccacucucccacaaag

SEQ ID NO: 298208 - RNA, 24 nt, Artificial Sequence
  Synthetic
gguguaagccacucucccacaaag

SEQ ID NO: 298209 - RNA, 18 nt, Artificial Sequence
  Synthetic
cccguaagagccacaaag

SEQ ID NO: 298210 - RNA, 19 nt, Artificial Sequence
  Synthetic
acccguaagagccacaaag

SEQ ID NO: 298211 - RNA, 20 nt, Artificial Sequence
  Synthetic
uacccguaagagccacaaag

SEQ ID NO: 298212 - RNA, 21 nt, Artificial Sequence
  Synthetic
auacccguaagagccacaaag

SEQ ID NO: 298213 - RNA, 22 nt, Artificial Sequence
  Synthetic
gauacccguaagagccacaaag

SEQ ID NO: 298214 - RNA, 23 nt, Artificial Sequence
  Synthetic
ugauacccguaagagccacaaag

SEQ ID NO: 298215 - RNA, 24 nt, Artificial Sequence
  Synthetic
augauacccguaagagccacaaag

SEQ ID NO: 298216 - RNA, 18 nt, Artificial Sequence
  Synthetic
caaaucaaugccacaaag

SEQ ID NO: 298217 - RNA, 19 nt, Artificial Sequence
  Synthetic
ucaaaucaaugccacaaag

SEQ ID NO: 298218 - RNA, 20 nt, Artificial Sequence
  Synthetic
aucaaaucaaugccacaaag

SEQ ID NO: 298219 - RNA, 21 nt, Artificial Sequence
  Synthetic
uaucaaaucaaugccacaaag

SEQ ID NO: 298220 - RNA, 22 nt, Artificial Sequence
  Synthetic
uuaucaaaucaaugccacaaag

SEQ ID NO: 298221 - RNA, 23 nt, Artificial Sequence
  Synthetic
cuuaucaaaucaaugccacaaag

SEQ ID NO: 298222 - RNA, 24 nt, Artificial Sequence
  Synthetic
ucuuaucaaaucaaugccacaaag

SEQ ID NO: 298223 - RNA, 18 nt, Artificial Sequence
  Synthetic
agauugaguuccacaaag

SEQ ID NO: 298224 - RNA, 19 nt, Artificial Sequence
  Synthetic
cagauugaguuccacaaag

SEQ ID NO: 298225 - RNA, 20 nt, Artificial Sequence
  Synthetic
ucagauugaguuccacaaag

SEQ ID NO: 298226 - RNA, 21 nt, Artificial Sequence
  Synthetic
gucagauugaguuccacaaag

SEQ ID NO: 298227 - RNA, 22 nt, Artificial Sequence
  Synthetic
ggucagauugaguuccacaaag

SEQ ID NO: 298228 - RNA, 23 nt, Artificial Sequence
  Synthetic
uggucagauugaguuccacaaag

SEQ ID NO: 298229 - RNA, 24 nt, Artificial Sequence
  Synthetic
auggucagauugaguuccacaaag

SEQ ID NO: 298230 - RNA, 18 nt, Artificial Sequence
  Synthetic
auagccaaugggacaaag

SEQ ID NO: 298231 - RNA, 19 nt, Artificial Sequence
  Synthetic
aauagccaaugggacaaag

SEQ ID NO: 298232 - RNA, 20 nt, Artificial Sequence
  Synthetic
aaauagccaaugggacaaag

SEQ ID NO: 298233 - RNA, 21 nt, Artificial Sequence
  Synthetic
uaaauagccaaugggacaaag

SEQ ID NO: 298234 - RNA, 22 nt, Artificial Sequence
  Synthetic
uuaaauagccaaugggacaaag

SEQ ID NO: 298235 - RNA, 23 nt, Artificial Sequence
  Synthetic
cuuaaauagccaaugggacaaag

SEQ ID NO: 298236 - RNA, 24 nt, Artificial Sequence
  Synthetic
ucuuaaauagccaaugggacaaag

SEQ ID NO: 298237 - RNA, 18 nt, Artificial Sequence
  Synthetic
uucaaggaggugacaaag

SEQ ID NO: 298238 - RNA, 19 nt, Artificial Sequence
  Synthetic
guucaaggaggugacaaag

SEQ ID NO: 298239 - RNA, 20 nt, Artificial Sequence
  Synthetic
aguucaaggaggugacaaag

SEQ ID NO: 298240 - RNA, 21 nt, Artificial Sequence
  Synthetic
uaguucaaggaggugacaaag

SEQ ID NO: 298241 - RNA, 22 nt, Artificial Sequence
  Synthetic
auaguucaaggaggugacaaag

SEQ ID NO: 298242 - RNA, 23 nt, Artificial Sequence
  Synthetic
aauaguucaaggaggugacaaag

SEQ ID NO: 298243 - RNA, 24 nt, Artificial Sequence
  Synthetic
uaauaguucaaggaggugacaaag

SEQ ID NO: 298244 - RNA, 18 nt, Artificial Sequence
  Synthetic
agagguggauugacaaag

SEQ ID NO: 298245 - RNA, 19 nt, Artificial Sequence
  Synthetic
aagagguggauugacaaag

SEQ ID NO: 298246 - RNA, 20 nt, Artificial Sequence
  Synthetic
uaagagguggauugacaaag

SEQ ID NO: 298247 - RNA, 21 nt, Artificial Sequence
  Synthetic
uuaagagguggauugacaaag

SEQ ID NO: 298248 - RNA, 22 nt, Artificial Sequence
  Synthetic
auuaagagguggauugacaaag

SEQ ID NO: 298249 - RNA, 23 nt, Artificial Sequence
  Synthetic
cauuaagagguggauugacaaag

SEQ ID NO: 298250 - RNA, 24 nt, Artificial Sequence
  Synthetic
acauuaagagguggauugacaaag

SEQ ID NO: 298251 - RNA, 18 nt, Artificial Sequence
  Synthetic
ucagagguauugacaaag

SEQ ID NO: 298252 - RNA, 19 nt, Artificial Sequence
  Synthetic
uucagagguauugacaaag

SEQ ID NO: 298253 - RNA, 20 nt, Artificial Sequence
  Synthetic
cuucagagguauugacaaag

SEQ ID NO: 298254 - RNA, 21 nt, Artificial Sequence
  Synthetic
acuucagagguauugacaaag

SEQ ID NO: 298255 - RNA, 22 nt, Artificial Sequence
  Synthetic
aacuucagagguauugacaaag

SEQ ID NO: 298256 - RNA, 23 nt, Artificial Sequence
  Synthetic
aaacuucagagguauugacaaag

SEQ ID NO: 298257 - RNA, 24 nt, Artificial Sequence
  Synthetic
gaaacuucagagguauugacaaag

SEQ ID NO: 298258 - RNA, 18 nt, Artificial Sequence
  Synthetic
guagcucaagauacaaag

SEQ ID NO: 298259 - RNA, 19 nt, Artificial Sequence
  Synthetic
aguagcucaagauacaaag

SEQ ID NO: 298260 - RNA, 20 nt, Artificial Sequence
  Synthetic
gaguagcucaagauacaaag

SEQ ID NO: 298261 - RNA, 21 nt, Artificial Sequence
  Synthetic
ggaguagcucaagauacaaag

SEQ ID NO: 298262 - RNA, 22 nt, Artificial Sequence
  Synthetic
gggaguagcucaagauacaaag

SEQ ID NO: 298263 - RNA, 23 nt, Artificial Sequence
  Synthetic
ggggaguagcucaagauacaaag

SEQ ID NO: 298264 - RNA, 24 nt, Artificial Sequence
  Synthetic
uggggaguagcucaagauacaaag

SEQ ID NO: 298265 - RNA, 18 nt, Artificial Sequence
  Synthetic
auaaauaccuauacaaag

SEQ ID NO: 298266 - RNA, 19 nt, Artificial Sequence
  Synthetic
uauaaauaccuauacaaag

SEQ ID NO: 298267 - RNA, 20 nt, Artificial Sequence
  Synthetic
uuauaaauaccuauacaaag

SEQ ID NO: 298268 - RNA, 21 nt, Artificial Sequence
  Synthetic
uuuauaaauaccuauacaaag

SEQ ID NO: 298269 - RNA, 22 nt, Artificial Sequence
  Synthetic
uuuuauaaauaccuauacaaag

SEQ ID NO: 298270 - RNA, 23 nt, Artificial Sequence
  Synthetic
auuuuauaaauaccuauacaaag

SEQ ID NO: 298271 - RNA, 24 nt, Artificial Sequence
  Synthetic
cauuuuauaaauaccuauacaaag

SEQ ID NO: 298272 - RNA, 18 nt, Artificial Sequence
  Synthetic
aaauggcaggcuacaaag

SEQ ID NO: 298273 - RNA, 19 nt, Artificial Sequence
  Synthetic
aaaauggcaggcuacaaag

SEQ ID NO: 298274 - RNA, 20 nt, Artificial Sequence
  Synthetic
gaaaauggcaggcuacaaag

SEQ ID NO: 298275 - RNA, 21 nt, Artificial Sequence
  Synthetic
agaaaauggcaggcuacaaag

SEQ ID NO: 298276 - RNA, 22 nt, Artificial Sequence
  Synthetic
cagaaaauggcaggcuacaaag

SEQ ID NO: 298277 - RNA, 23 nt, Artificial Sequence
  Synthetic
ccagaaaauggcaggcuacaaag

SEQ ID NO: 298278 - RNA, 24 nt, Artificial Sequence
  Synthetic
gccagaaaauggcaggcuacaaag

SEQ ID NO: 298279 - RNA, 18 nt, Artificial Sequence
  Synthetic
cugaugguugcuacaaag

SEQ ID NO: 298280 - RNA, 19 nt, Artificial Sequence
  Synthetic
acugaugguugcuacaaag

SEQ ID NO: 298281 - RNA, 20 nt, Artificial Sequence
  Synthetic
gacugaugguugcuacaaag

SEQ ID NO: 298282 - RNA, 21 nt, Artificial Sequence
  Synthetic
agacugaugguugcuacaaag

SEQ ID NO: 298283 - RNA, 22 nt, Artificial Sequence
  Synthetic
gagacugaugguugcuacaaag

SEQ ID NO: 298284 - RNA, 23 nt, Artificial Sequence
  Synthetic
ggagacugaugguugcuacaaag

SEQ ID NO: 298285 - RNA, 24 nt, Artificial Sequence
  Synthetic
uggagacugaugguugcuacaaag

SEQ ID NO: 298286 - RNA, 18 nt, Artificial Sequence
  Synthetic
aaaaaugaaaguacaaag

SEQ ID NO: 298287 - RNA, 19 nt, Artificial Sequence
  Synthetic
gaaaaaugaaaguacaaag

SEQ ID NO: 298288 - RNA, 20 nt, Artificial Sequence
  Synthetic
agaaaaaugaaaguacaaag

SEQ ID NO: 298289 - RNA, 21 nt, Artificial Sequence
  Synthetic
aagaaaaaugaaaguacaaag

SEQ ID NO: 298290 - RNA, 22 nt, Artificial Sequence
  Synthetic
aaagaaaaaugaaaguacaaag

SEQ ID NO: 298291 - RNA, 23 nt, Artificial Sequence
  Synthetic
caaagaaaaaugaaaguacaaag

SEQ ID NO: 298292 - RNA, 24 nt, Artificial Sequence
  Synthetic
gcaaagaaaaaugaaaguacaaag

SEQ ID NO: 298293 - RNA, 18 nt, Artificial Sequence
  Synthetic
ucuaccagagguacaaag

SEQ ID NO: 298294 - RNA, 19 nt, Artificial Sequence
  Synthetic
uucuaccagagguacaaag

SEQ ID NO: 298295 - RNA, 20 nt, Artificial Sequence
  Synthetic
auucuaccagagguacaaag

SEQ ID NO: 298296 - RNA, 21 nt, Artificial Sequence
  Synthetic
aauucuaccagagguacaaag

SEQ ID NO: 298297 - RNA, 22 nt, Artificial Sequence
  Synthetic
gaauucuaccagagguacaaag

SEQ ID NO: 298298 - RNA, 23 nt, Artificial Sequence
  Synthetic
ugaauucuaccagagguacaaag

SEQ ID NO: 298299 - RNA, 24 nt, Artificial Sequence
  Synthetic
cugaauucuaccagagguacaaag

SEQ ID NO: 298300 - RNA, 18 nt, Artificial Sequence
  Synthetic
ggguuaauuauuacaaag

SEQ ID NO: 298301 - RNA, 19 nt, Artificial Sequence
  Synthetic
uggguuaauuauuacaaag

SEQ ID NO: 298302 - RNA, 20 nt, Artificial Sequence
  Synthetic
cuggguuaauuauuacaaag

SEQ ID NO: 298303 - RNA, 21 nt, Artificial Sequence
  Synthetic
acuggguuaauuauuacaaag

SEQ ID NO: 298304 - RNA, 22 nt, Artificial Sequence
  Synthetic
uacuggguuaauuauuacaaag

SEQ ID NO: 298305 - RNA, 23 nt, Artificial Sequence
  Synthetic
auacuggguuaauuauuacaaag

SEQ ID NO: 298306 - RNA, 24 nt, Artificial Sequence
  Synthetic
cauacuggguuaauuauuacaaag

SEQ ID NO: 298307 - RNA, 18 nt, Artificial Sequence
  Synthetic
aaaaaaaaaaaaccaaag

SEQ ID NO: 298308 - RNA, 19 nt, Artificial Sequence
  Synthetic
aaaaaaaaaaaaaccaaag

SEQ ID NO: 298309 - RNA, 20 nt, Artificial Sequence
  Synthetic
aaaaaaaaaaaaaaccaaag

SEQ ID NO: 298310 - RNA, 21 nt, Artificial Sequence
  Synthetic
caaaaaaaaaaaaaaccaaag

SEQ ID NO: 298311 - RNA, 22 nt, Artificial Sequence
  Synthetic
acaaaaaaaaaaaaaaccaaag

SEQ ID NO: 298312 - RNA, 23 nt, Artificial Sequence
  Synthetic
aacaaaaaaaaaaaaaaccaaag

SEQ ID NO: 298313 - RNA, 24 nt, Artificial Sequence
  Synthetic
aaacaaaaaaaaaaaaaaccaaag

SEQ ID NO: 298314 - RNA, 18 nt, Artificial Sequence
  Synthetic
uucaaucagacaccaaag

SEQ ID NO: 298315 - RNA, 19 nt, Artificial Sequence
  Synthetic
uuucaaucagacaccaaag

SEQ ID NO: 298316 - RNA, 20 nt, Artificial Sequence
  Synthetic
cuuucaaucagacaccaaag

SEQ ID NO: 298317 - RNA, 21 nt, Artificial Sequence
  Synthetic
ucuuucaaucagacaccaaag

SEQ ID NO: 298318 - RNA, 22 nt, Artificial Sequence
  Synthetic
cucuuucaaucagacaccaaag

SEQ ID NO: 298319 - RNA, 23 nt, Artificial Sequence
  Synthetic
ucucuuucaaucagacaccaaag

SEQ ID NO: 298320 - RNA, 24 nt, Artificial Sequence
  Synthetic
uucucuuucaaucagacaccaaag

SEQ ID NO: 298321 - RNA, 18 nt, Artificial Sequence
  Synthetic
uuuguauagggaccaaag

SEQ ID NO: 298322 - RNA, 19 nt, Artificial Sequence
  Synthetic
guuuguauagggaccaaag

SEQ ID NO: 298323 - RNA, 20 nt, Artificial Sequence
  Synthetic
uguuuguauagggaccaaag

SEQ ID NO: 298324 - RNA, 21 nt, Artificial Sequence
  Synthetic
auguuuguauagggaccaaag

SEQ ID NO: 298325 - RNA, 22 nt, Artificial Sequence
  Synthetic
aauguuuguauagggaccaaag

SEQ ID NO: 298326 - RNA, 23 nt, Artificial Sequence
  Synthetic
gaauguuuguauagggaccaaag

SEQ ID NO: 298327 - RNA, 24 nt, Artificial Sequence
  Synthetic
ugaauguuuguauagggaccaaag

SEQ ID NO: 298328 - RNA, 18 nt, Artificial Sequence
  Synthetic
agugcuaugggaccaaag

SEQ ID NO: 298329 - RNA, 19 nt, Artificial Sequence
  Synthetic
aagugcuaugggaccaaag

SEQ ID NO: 298330 - RNA, 20 nt, Artificial Sequence
  Synthetic
uaagugcuaugggaccaaag

SEQ ID NO: 298331 - RNA, 21 nt, Artificial Sequence
  Synthetic
auaagugcuaugggaccaaag

SEQ ID NO: 298332 - RNA, 22 nt, Artificial Sequence
  Synthetic
gauaagugcuaugggaccaaag

SEQ ID NO: 298333 - RNA, 23 nt, Artificial Sequence
  Synthetic
ugauaagugcuaugggaccaaag

SEQ ID NO: 298334 - RNA, 24 nt, Artificial Sequence
  Synthetic
augauaagugcuaugggaccaaag

SEQ ID NO: 298335 - RNA, 18 nt, Artificial Sequence
  Synthetic
aucauucugauaccaaag

SEQ ID NO: 298336 - RNA, 19 nt, Artificial Sequence
  Synthetic
caucauucugauaccaaag

SEQ ID NO: 298337 - RNA, 20 nt, Artificial Sequence
  Synthetic
gcaucauucugauaccaaag

SEQ ID NO: 298338 - RNA, 18 nt, Artificial Sequence
  Synthetic
gcuaggcauauaccaaag

SEQ ID NO: 298339 - RNA, 19 nt, Artificial Sequence
  Synthetic
agcuaggcauauaccaaag

SEQ ID NO: 298340 - RNA, 20 nt, Artificial Sequence
  Synthetic
gagcuaggcauauaccaaag

SEQ ID NO: 298341 - RNA, 21 nt, Artificial Sequence
  Synthetic
ggagcuaggcauauaccaaag

SEQ ID NO: 298342 - RNA, 22 nt, Artificial Sequence
  Synthetic
gggagcuaggcauauaccaaag

SEQ ID NO: 298343 - RNA, 23 nt, Artificial Sequence
  Synthetic
ugggagcuaggcauauaccaaag

SEQ ID NO: 298344 - RNA, 24 nt, Artificial Sequence
  Synthetic
uugggagcuaggcauauaccaaag

SEQ ID NO: 298345 - RNA, 18 nt, Artificial Sequence
  Synthetic
aguuaaaaugccccaaag

SEQ ID NO: 298346 - RNA, 19 nt, Artificial Sequence
  Synthetic
aaguuaaaaugccccaaag

SEQ ID NO: 298347 - RNA, 20 nt, Artificial Sequence
  Synthetic
uaaguuaaaaugccccaaag

SEQ ID NO: 298348 - RNA, 21 nt, Artificial Sequence
  Synthetic
auaaguuaaaaugccccaaag

SEQ ID NO: 298349 - RNA, 22 nt, Artificial Sequence
  Synthetic
aauaaguuaaaaugccccaaag

SEQ ID NO: 298350 - RNA, 23 nt, Artificial Sequence
  Synthetic
uaauaaguuaaaaugccccaaag

SEQ ID NO: 298351 - RNA, 24 nt, Artificial Sequence
  Synthetic
cuaauaaguuaaaaugccccaaag

SEQ ID NO: 298352 - RNA, 18 nt, Artificial Sequence
  Synthetic
uucaguuucagcccaaag

SEQ ID NO: 298353 - RNA, 19 nt, Artificial Sequence
  Synthetic
uuucaguuucagcccaaag

SEQ ID NO: 298354 - RNA, 20 nt, Artificial Sequence
  Synthetic
uuuucaguuucagcccaaag

SEQ ID NO: 298355 - RNA, 21 nt, Artificial Sequence
  Synthetic
uuuuucaguuucagcccaaag

SEQ ID NO: 298356 - RNA, 22 nt, Artificial Sequence
  Synthetic
cuuuuucaguuucagcccaaag

SEQ ID NO: 298357 - RNA, 23 nt, Artificial Sequence
  Synthetic
gcuuuuucaguuucagcccaaag

SEQ ID NO: 298358 - RNA, 24 nt, Artificial Sequence
  Synthetic
ugcuuuuucaguuucagcccaaag

SEQ ID NO: 298359 - RNA, 18 nt, Artificial Sequence
  Synthetic
uucggcaagaagccaaag

SEQ ID NO: 298360 - RNA, 19 nt, Artificial Sequence
  Synthetic
auucggcaagaagccaaag

SEQ ID NO: 298361 - RNA, 20 nt, Artificial Sequence
  Synthetic
aauucggcaagaagccaaag

SEQ ID NO: 298362 - RNA, 21 nt, Artificial Sequence
  Synthetic
aaauucggcaagaagccaaag

SEQ ID NO: 298363 - RNA, 22 nt, Artificial Sequence
  Synthetic
aaaauucggcaagaagccaaag

SEQ ID NO: 298364 - RNA, 23 nt, Artificial Sequence
  Synthetic
uaaaauucggcaagaagccaaag

SEQ ID NO: 298365 - RNA, 24 nt, Artificial Sequence
  Synthetic
auaaaauucggcaagaagccaaag

SEQ ID NO: 298366 - RNA, 18 nt, Artificial Sequence
  Synthetic
gugugcccaaggccaaag

SEQ ID NO: 298367 - RNA, 19 nt, Artificial Sequence
  Synthetic
agugugcccaaggccaaag

SEQ ID NO: 298368 - RNA, 20 nt, Artificial Sequence
  Synthetic
gagugugcccaaggccaaag

SEQ ID NO: 298369 - RNA, 21 nt, Artificial Sequence
  Synthetic
agagugugcccaaggccaaag

SEQ ID NO: 298370 - RNA, 22 nt, Artificial Sequence
  Synthetic
cagagugugcccaaggccaaag

SEQ ID NO: 298371 - RNA, 23 nt, Artificial Sequence
  Synthetic
acagagugugcccaaggccaaag

SEQ ID NO: 298372 - RNA, 24 nt, Artificial Sequence
  Synthetic
gacagagugugcccaaggccaaag

SEQ ID NO: 298373 - RNA, 18 nt, Artificial Sequence
  Synthetic
uaaugugccaggccaaag

SEQ ID NO: 298374 - RNA, 19 nt, Artificial Sequence
  Synthetic
cuaaugugccaggccaaag

SEQ ID NO: 298375 - RNA, 20 nt, Artificial Sequence
  Synthetic
ucuaaugugccaggccaaag

SEQ ID NO: 298376 - RNA, 21 nt, Artificial Sequence
  Synthetic
gucuaaugugccaggccaaag

SEQ ID NO: 298377 - RNA, 22 nt, Artificial Sequence
  Synthetic
ggucuaaugugccaggccaaag

SEQ ID NO: 298378 - RNA, 23 nt, Artificial Sequence
  Synthetic
uggucuaaugugccaggccaaag

SEQ ID NO: 298379 - RNA, 24 nt, Artificial Sequence
  Synthetic
auggucuaaugugccaggccaaag

SEQ ID NO: 298380 - RNA, 18 nt, Artificial Sequence
  Synthetic
uuauaaagcuguccaaag

SEQ ID NO: 298381 - RNA, 19 nt, Artificial Sequence
  Synthetic
guuauaaagcuguccaaag

SEQ ID NO: 298382 - RNA, 20 nt, Artificial Sequence
  Synthetic
uguuauaaagcuguccaaag

SEQ ID NO: 298383 - RNA, 21 nt, Artificial Sequence
  Synthetic
uuguuauaaagcuguccaaag

SEQ ID NO: 298384 - RNA, 22 nt, Artificial Sequence
  Synthetic
auuguuauaaagcuguccaaag

SEQ ID NO: 298385 - RNA, 23 nt, Artificial Sequence
  Synthetic
uauuguuauaaagcuguccaaag

SEQ ID NO: 298386 - RNA, 24 nt, Artificial Sequence
  Synthetic
auauuguuauaaagcuguccaaag

SEQ ID NO: 298387 - RNA, 18 nt, Artificial Sequence
  Synthetic
cuacacaagguuccaaag

SEQ ID NO: 298388 - RNA, 19 nt, Artificial Sequence
  Synthetic
acuacacaagguuccaaag

SEQ ID NO: 298389 - RNA, 20 nt, Artificial Sequence
  Synthetic
cacuacacaagguuccaaag

SEQ ID NO: 298390 - RNA, 21 nt, Artificial Sequence
  Synthetic
ucacuacacaagguuccaaag

SEQ ID NO: 298391 - RNA, 22 nt, Artificial Sequence
  Synthetic
uucacuacacaagguuccaaag

SEQ ID NO: 298392 - RNA, 23 nt, Artificial Sequence
  Synthetic
auucacuacacaagguuccaaag

SEQ ID NO: 298393 - RNA, 24 nt, Artificial Sequence
  Synthetic
gauucacuacacaagguuccaaag

SEQ ID NO: 298394 - RNA, 18 nt, Artificial Sequence
  Synthetic
ucaugguggaaagcaaag

SEQ ID NO: 298395 - RNA, 19 nt, Artificial Sequence
  Synthetic
aucaugguggaaagcaaag

SEQ ID NO: 298396 - RNA, 20 nt, Artificial Sequence
  Synthetic
aaucaugguggaaagcaaag

SEQ ID NO: 298397 - RNA, 21 nt, Artificial Sequence
  Synthetic
uaaucaugguggaaagcaaag

SEQ ID NO: 298398 - RNA, 22 nt, Artificial Sequence
  Synthetic
auaaucaugguggaaagcaaag

SEQ ID NO: 298399 - RNA, 23 nt, Artificial Sequence
  Synthetic
uauaaucaugguggaaagcaaag

SEQ ID NO: 298400 - RNA, 24 nt, Artificial Sequence
  Synthetic
uuauaaucaugguggaaagcaaag

SEQ ID NO: 298401 - RNA, 18 nt, Artificial Sequence
  Synthetic
agcaggagggaagcaaag

SEQ ID NO: 298402 - RNA, 19 nt, Artificial Sequence
  Synthetic
uagcaggagggaagcaaag

SEQ ID NO: 298403 - RNA, 20 nt, Artificial Sequence
  Synthetic
auagcaggagggaagcaaag

SEQ ID NO: 298404 - RNA, 21 nt, Artificial Sequence
  Synthetic
gauagcaggagggaagcaaag

SEQ ID NO: 298405 - RNA, 22 nt, Artificial Sequence
  Synthetic
ugauagcaggagggaagcaaag

SEQ ID NO: 298406 - RNA, 23 nt, Artificial Sequence
  Synthetic
augauagcaggagggaagcaaag

SEQ ID NO: 298407 - RNA, 24 nt, Artificial Sequence
  Synthetic
gaugauagcaggagggaagcaaag

SEQ ID NO: 298408 - RNA, 18 nt, Artificial Sequence
  Synthetic
uaaucugaugaagcaaag

SEQ ID NO: 298409 - RNA, 19 nt, Artificial Sequence
  Synthetic
guaaucugaugaagcaaag

SEQ ID NO: 298410 - RNA, 20 nt, Artificial Sequence
  Synthetic
aguaaucugaugaagcaaag

SEQ ID NO: 298411 - RNA, 21 nt, Artificial Sequence
  Synthetic
uaguaaucugaugaagcaaag

SEQ ID NO: 298412 - RNA, 22 nt, Artificial Sequence
  Synthetic
cuaguaaucugaugaagcaaag

SEQ ID NO: 298413 - RNA, 23 nt, Artificial Sequence
  Synthetic
ucuaguaaucugaugaagcaaag

SEQ ID NO: 298414 - RNA, 24 nt, Artificial Sequence
  Synthetic
uucuaguaaucugaugaagcaaag

SEQ ID NO: 298415 - RNA, 18 nt, Artificial Sequence
  Synthetic
uaagcuucauaagcaaag

SEQ ID NO: 298416 - RNA, 19 nt, Artificial Sequence
  Synthetic
cuaagcuucauaagcaaag

SEQ ID NO: 298417 - RNA, 20 nt, Artificial Sequence
  Synthetic
acuaagcuucauaagcaaag

SEQ ID NO: 298418 - RNA, 21 nt, Artificial Sequence
  Synthetic
aacuaagcuucauaagcaaag

SEQ ID NO: 298419 - RNA, 22 nt, Artificial Sequence
  Synthetic
aaacuaagcuucauaagcaaag

SEQ ID NO: 298420 - RNA, 23 nt, Artificial Sequence
  Synthetic
caaacuaagcuucauaagcaaag

SEQ ID NO: 298421 - RNA, 24 nt, Artificial Sequence
  Synthetic
ccaaacuaagcuucauaagcaaag

SEQ ID NO: 298422 - RNA, 18 nt, Artificial Sequence
  Synthetic
uaaguuucauaagcaaag

SEQ ID NO: 298423 - RNA, 19 nt, Artificial Sequence
  Synthetic
cuaaguuucauaagcaaag

SEQ ID NO: 298424 - RNA, 20 nt, Artificial Sequence
  Synthetic
acuaaguuucauaagcaaag

SEQ ID NO: 298425 - RNA, 21 nt, Artificial Sequence
  Synthetic
aacuaaguuucauaagcaaag

SEQ ID NO: 298426 - RNA, 22 nt, Artificial Sequence
  Synthetic
aaacuaaguuucauaagcaaag

SEQ ID NO: 298427 - RNA, 23 nt, Artificial Sequence
  Synthetic
caaacuaaguuucauaagcaaag

SEQ ID NO: 298428 - RNA, 24 nt, Artificial Sequence
  Synthetic
ccaaacuaaguuucauaagcaaag

SEQ ID NO: 298429 - RNA, 18 nt, Artificial Sequence
  Synthetic
guuagcagaacagcaaag

SEQ ID NO: 298430 - RNA, 19 nt, Artificial Sequence
  Synthetic
uguuagcagaacagcaaag

SEQ ID NO: 298431 - RNA, 20 nt, Artificial Sequence
  Synthetic
auguuagcagaacagcaaag

SEQ ID NO: 298432 - RNA, 21 nt, Artificial Sequence
  Synthetic
uauguuagcagaacagcaaag

SEQ ID NO: 298433 - RNA, 22 nt, Artificial Sequence
  Synthetic
auauguuagcagaacagcaaag

SEQ ID NO: 298434 - RNA, 23 nt, Artificial Sequence
  Synthetic
gauauguuagcagaacagcaaag

SEQ ID NO: 298435 - RNA, 24 nt, Artificial Sequence
  Synthetic
ggauauguuagcagaacagcaaag

SEQ ID NO: 298436 - RNA, 18 nt, Artificial Sequence
  Synthetic
gcuaaucauacagcaaag

SEQ ID NO: 298437 - RNA, 19 nt, Artificial Sequence
  Synthetic
ggcuaaucauacagcaaag

SEQ ID NO: 298438 - RNA, 20 nt, Artificial Sequence
  Synthetic
uggcuaaucauacagcaaag

SEQ ID NO: 298439 - RNA, 21 nt, Artificial Sequence
  Synthetic
auggcuaaucauacagcaaag

SEQ ID NO: 298440 - RNA, 22 nt, Artificial Sequence
  Synthetic
aauggcuaaucauacagcaaag

SEQ ID NO: 298441 - RNA, 23 nt, Artificial Sequence
  Synthetic
aaauggcuaaucauacagcaaag

SEQ ID NO: 298442 - RNA, 24 nt, Artificial Sequence
  Synthetic
aaaauggcuaaucauacagcaaag

SEQ ID NO: 298443 - RNA, 18 nt, Artificial Sequence
  Synthetic
gagaagugccgagcaaag

SEQ ID NO: 298444 - RNA, 19 nt, Artificial Sequence
  Synthetic
ggagaagugccgagcaaag

SEQ ID NO: 298445 - RNA, 20 nt, Artificial Sequence
  Synthetic
aggagaagugccgagcaaag

SEQ ID NO: 298446 - RNA, 21 nt, Artificial Sequence
  Synthetic
aaggagaagugccgagcaaag

SEQ ID NO: 298447 - RNA, 22 nt, Artificial Sequence
  Synthetic
gaaggagaagugccgagcaaag

SEQ ID NO: 298448 - RNA, 23 nt, Artificial Sequence
  Synthetic
agaaggagaagugccgagcaaag

SEQ ID NO: 298449 - RNA, 24 nt, Artificial Sequence
  Synthetic
aagaaggagaagugccgagcaaag

SEQ ID NO: 298450 - RNA, 18 nt, Artificial Sequence
  Synthetic
gagaagugcugagcaaag

SEQ ID NO: 298451 - RNA, 19 nt, Artificial Sequence
  Synthetic
ggagaagugcugagcaaag

SEQ ID NO: 298452 - RNA, 20 nt, Artificial Sequence
  Synthetic
aggagaagugcugagcaaag

SEQ ID NO: 298453 - RNA, 21 nt, Artificial Sequence
  Synthetic
aaggagaagugcugagcaaag

SEQ ID NO: 298454 - RNA, 22 nt, Artificial Sequence
  Synthetic
aaaggagaagugcugagcaaag

SEQ ID NO: 298455 - RNA, 23 nt, Artificial Sequence
  Synthetic
gaaaggagaagugcugagcaaag

SEQ ID NO: 298456 - RNA, 24 nt, Artificial Sequence
  Synthetic
agaaaggagaagugcugagcaaag

SEQ ID NO: 298457 - RNA, 18 nt, Artificial Sequence
  Synthetic
uauucccauuuagcaaag

SEQ ID NO: 298458 - RNA, 19 nt, Artificial Sequence
  Synthetic
auauucccauuuagcaaag

SEQ ID NO: 298459 - RNA, 20 nt, Artificial Sequence
  Synthetic
aauauucccauuuagcaaag

SEQ ID NO: 298460 - RNA, 21 nt, Artificial Sequence
  Synthetic
uaauauucccauuuagcaaag

SEQ ID NO: 298461 - RNA, 22 nt, Artificial Sequence
  Synthetic
uuaauauucccauuuagcaaag

SEQ ID NO: 298462 - RNA, 23 nt, Artificial Sequence
  Synthetic
guuaauauucccauuuagcaaag

SEQ ID NO: 298463 - RNA, 24 nt, Artificial Sequence
  Synthetic
uguuaauauucccauuuagcaaag

SEQ ID NO: 298464 - RNA, 18 nt, Artificial Sequence
  Synthetic
ucauggugaagggcaaag

SEQ ID NO: 298465 - RNA, 19 nt, Artificial Sequence
  Synthetic
uucauggugaagggcaaag

SEQ ID NO: 298466 - RNA, 20 nt, Artificial Sequence
  Synthetic
auucauggugaagggcaaag

SEQ ID NO: 298467 - RNA, 21 nt, Artificial Sequence
  Synthetic
cauucauggugaagggcaaag

SEQ ID NO: 298468 - RNA, 22 nt, Artificial Sequence
  Synthetic
ccauucauggugaagggcaaag

SEQ ID NO: 298469 - RNA, 23 nt, Artificial Sequence
  Synthetic
uccauucauggugaagggcaaag

SEQ ID NO: 298470 - RNA, 24 nt, Artificial Sequence
  Synthetic
uuccauucauggugaagggcaaag

SEQ ID NO: 298471 - RNA, 18 nt, Artificial Sequence
  Synthetic
gggccucuuugggcaaag

SEQ ID NO: 298472 - RNA, 19 nt, Artificial Sequence
  Synthetic
agggccucuuugggcaaag

SEQ ID NO: 298473 - RNA, 20 nt, Artificial Sequence
  Synthetic
aagggccucuuugggcaaag

SEQ ID NO: 298474 - RNA, 21 nt, Artificial Sequence
  Synthetic
caagggccucuuugggcaaag

SEQ ID NO: 298475 - RNA, 22 nt, Artificial Sequence
  Synthetic
gcaagggccucuuugggcaaag

SEQ ID NO: 298476 - RNA, 23 nt, Artificial Sequence
  Synthetic
ugcaagggccucuuugggcaaag

SEQ ID NO: 298477 - RNA, 24 nt, Artificial Sequence
  Synthetic
cugcaagggccucuuugggcaaag

SEQ ID NO: 298478 - RNA, 18 nt, Artificial Sequence
  Synthetic
auaauauauauggcaaag

SEQ ID NO: 298479 - RNA, 19 nt, Artificial Sequence
  Synthetic
uauaauauauauggcaaag

SEQ ID NO: 298480 - RNA, 20 nt, Artificial Sequence
  Synthetic
guauaauauauauggcaaag

SEQ ID NO: 298481 - RNA, 21 nt, Artificial Sequence
  Synthetic
aguauaauauauauggcaaag

SEQ ID NO: 298482 - RNA, 22 nt, Artificial Sequence
  Synthetic
caguauaauauauauggcaaag

SEQ ID NO: 298483 - RNA, 23 nt, Artificial Sequence
  Synthetic
gcaguauaauauauauggcaaag

SEQ ID NO: 298484 - RNA, 24 nt, Artificial Sequence
  Synthetic
ugcaguauaauauauauggcaaag

SEQ ID NO: 298485 - RNA, 18 nt, Artificial Sequence
  Synthetic
uuacaggggagugcaaag

SEQ ID NO: 298486 - RNA, 19 nt, Artificial Sequence
  Synthetic
uuuacaggggagugcaaag

SEQ ID NO: 298487 - RNA, 20 nt, Artificial Sequence
  Synthetic
uuuuacaggggagugcaaag

SEQ ID NO: 298488 - RNA, 21 nt, Artificial Sequence
  Synthetic
auuuuacaggggagugcaaag

SEQ ID NO: 298489 - RNA, 22 nt, Artificial Sequence
  Synthetic
gauuuuacaggggagugcaaag

SEQ ID NO: 298490 - RNA, 23 nt, Artificial Sequence
  Synthetic
ggauuuuacaggggagugcaaag

SEQ ID NO: 298491 - RNA, 24 nt, Artificial Sequence
  Synthetic
uggauuuuacaggggagugcaaag

SEQ ID NO: 298492 - RNA, 18 nt, Artificial Sequence
  Synthetic
uacaugaaggaaucaaag

SEQ ID NO: 298493 - RNA, 19 nt, Artificial Sequence
  Synthetic
guacaugaaggaaucaaag

SEQ ID NO: 298494 - RNA, 20 nt, Artificial Sequence
  Synthetic
gguacaugaaggaaucaaag

SEQ ID NO: 298495 - RNA, 21 nt, Artificial Sequence
  Synthetic
ugguacaugaaggaaucaaag

SEQ ID NO: 298496 - RNA, 22 nt, Artificial Sequence
  Synthetic
uugguacaugaaggaaucaaag

SEQ ID NO: 298497 - RNA, 23 nt, Artificial Sequence
  Synthetic
auugguacaugaaggaaucaaag

SEQ ID NO: 298498 - RNA, 24 nt, Artificial Sequence
  Synthetic
aauugguacaugaaggaaucaaag

SEQ ID NO: 298499 - RNA, 18 nt, Artificial Sequence
  Synthetic
cuagaaagggaaucaaag

SEQ ID NO: 298500 - RNA, 19 nt, Artificial Sequence
  Synthetic
ucuagaaagggaaucaaag

SEQ ID NO: 298501 - RNA, 20 nt, Artificial Sequence
  Synthetic
uucuagaaagggaaucaaag

SEQ ID NO: 298502 - RNA, 21 nt, Artificial Sequence
  Synthetic
uuucuagaaagggaaucaaag

SEQ ID NO: 298503 - RNA, 22 nt, Artificial Sequence
  Synthetic
auuucuagaaagggaaucaaag

SEQ ID NO: 298504 - RNA, 23 nt, Artificial Sequence
  Synthetic
uauuucuagaaagggaaucaaag

SEQ ID NO: 298505 - RNA, 24 nt, Artificial Sequence
  Synthetic
uuauuucuagaaagggaaucaaag

SEQ ID NO: 298506 - RNA, 18 nt, Artificial Sequence
  Synthetic
cuccucaccuaaucaaag

SEQ ID NO: 298507 - RNA, 19 nt, Artificial Sequence
  Synthetic
ccuccucaccuaaucaaag

SEQ ID NO: 298508 - RNA, 20 nt, Artificial Sequence
  Synthetic
uccuccucaccuaaucaaag

SEQ ID NO: 298509 - RNA, 21 nt, Artificial Sequence
  Synthetic
cuccuccucaccuaaucaaag

SEQ ID NO: 298510 - RNA, 22 nt, Artificial Sequence
  Synthetic
ccuccuccucaccuaaucaaag

SEQ ID NO: 298511 - RNA, 23 nt, Artificial Sequence
  Synthetic
cccuccuccucaccuaaucaaag

SEQ ID NO: 298512 - RNA, 24 nt, Artificial Sequence
  Synthetic
ucccuccuccucaccuaaucaaag

SEQ ID NO: 298513 - RNA, 18 nt, Artificial Sequence
  Synthetic
caucuuuauuaaucaaag

SEQ ID NO: 298514 - RNA, 19 nt, Artificial Sequence
  Synthetic
acaucuuuauuaaucaaag

SEQ ID NO: 298515 - RNA, 20 nt, Artificial Sequence
  Synthetic
cacaucuuuauuaaucaaag

SEQ ID NO: 298516 - RNA, 21 nt, Artificial Sequence
  Synthetic
gcacaucuuuauuaaucaaag

SEQ ID NO: 298517 - RNA, 22 nt, Artificial Sequence
  Synthetic
agcacaucuuuauuaaucaaag

SEQ ID NO: 298518 - RNA, 23 nt, Artificial Sequence
  Synthetic
aagcacaucuuuauuaaucaaag

SEQ ID NO: 298519 - RNA, 24 nt, Artificial Sequence
  Synthetic
caagcacaucuuuauuaaucaaag

SEQ ID NO: 298520 - RNA, 18 nt, Artificial Sequence
  Synthetic
caggacauuuaaucaaag

SEQ ID NO: 298521 - RNA, 19 nt, Artificial Sequence
  Synthetic
acaggacauuuaaucaaag

SEQ ID NO: 298522 - RNA, 20 nt, Artificial Sequence
  Synthetic
gacaggacauuuaaucaaag

SEQ ID NO: 298523 - RNA, 21 nt, Artificial Sequence
  Synthetic
ugacaggacauuuaaucaaag

SEQ ID NO: 298524 - RNA, 22 nt, Artificial Sequence
  Synthetic
augacaggacauuuaaucaaag

SEQ ID NO: 298525 - RNA, 23 nt, Artificial Sequence
  Synthetic
caugacaggacauuuaaucaaag

SEQ ID NO: 298526 - RNA, 24 nt, Artificial Sequence
  Synthetic
ucaugacaggacauuuaaucaaag

SEQ ID NO: 298527 - RNA, 18 nt, Artificial Sequence
  Synthetic
uuuuuuuuuuaaucaaag

SEQ ID NO: 298528 - RNA, 19 nt, Artificial Sequence
  Synthetic
uuuuuuuuuuuaaucaaag

SEQ ID NO: 298529 - RNA, 20 nt, Artificial Sequence
  Synthetic
cuuuuuuuuuuuaaucaaag

SEQ ID NO: 298530 - RNA, 21 nt, Artificial Sequence
  Synthetic
ucuuuuuuuuuuuaaucaaag

SEQ ID NO: 298531 - RNA, 22 nt, Artificial Sequence
  Synthetic
aucuuuuuuuuuuuaaucaaag

SEQ ID NO: 298532 - RNA, 23 nt, Artificial Sequence
  Synthetic
aaucuuuuuuuuuuuaaucaaag

SEQ ID NO: 298533 - RNA, 24 nt, Artificial Sequence
  Synthetic
uaaucuuuuuuuuuuuaaucaaag

SEQ ID NO: 298534 - RNA, 18 nt, Artificial Sequence
  Synthetic
cuuaaagagauaucaaag

SEQ ID NO: 298535 - RNA, 19 nt, Artificial Sequence
  Synthetic
acuuaaagagauaucaaag

SEQ ID NO: 298536 - RNA, 20 nt, Artificial Sequence
  Synthetic
gacuuaaagagauaucaaag

SEQ ID NO: 298537 - RNA, 21 nt, Artificial Sequence
  Synthetic
agacuuaaagagauaucaaag

SEQ ID NO: 298538 - RNA, 22 nt, Artificial Sequence
  Synthetic
gagacuuaaagagauaucaaag

SEQ ID NO: 298539 - RNA, 23 nt, Artificial Sequence
  Synthetic
agagacuuaaagagauaucaaag

SEQ ID NO: 298540 - RNA, 24 nt, Artificial Sequence
  Synthetic
gagagacuuaaagagauaucaaag

SEQ ID NO: 298541 - RNA, 18 nt, Artificial Sequence
  Synthetic
ugaaaccgcagcucaaag

SEQ ID NO: 298542 - RNA, 19 nt, Artificial Sequence
  Synthetic
cugaaaccgcagcucaaag

SEQ ID NO: 298543 - RNA, 20 nt, Artificial Sequence
  Synthetic
ccugaaaccgcagcucaaag

SEQ ID NO: 298544 - RNA, 21 nt, Artificial Sequence
  Synthetic
gccugaaaccgcagcucaaag

SEQ ID NO: 298545 - RNA, 22 nt, Artificial Sequence
  Synthetic
agccugaaaccgcagcucaaag

SEQ ID NO: 298546 - RNA, 23 nt, Artificial Sequence
  Synthetic
aagccugaaaccgcagcucaaag

SEQ ID NO: 298547 - RNA, 24 nt, Artificial Sequence
  Synthetic
aaagccugaaaccgcagcucaaag

SEQ ID NO: 298548 - RNA, 18 nt, Artificial Sequence
  Synthetic
gauuuacaaugcucaaag

SEQ ID NO: 298549 - RNA, 19 nt, Artificial Sequence
  Synthetic
agauuuacaaugcucaaag

SEQ ID NO: 298550 - RNA, 20 nt, Artificial Sequence
  Synthetic
aagauuuacaaugcucaaag

SEQ ID NO: 298551 - RNA, 21 nt, Artificial Sequence
  Synthetic
uaagauuuacaaugcucaaag

SEQ ID NO: 298552 - RNA, 22 nt, Artificial Sequence
  Synthetic
cuaagauuuacaaugcucaaag

SEQ ID NO: 298553 - RNA, 23 nt, Artificial Sequence
  Synthetic
ucuaagauuuacaaugcucaaag

SEQ ID NO: 298554 - RNA, 24 nt, Artificial Sequence
  Synthetic
gucuaagauuuacaaugcucaaag

SEQ ID NO: 298555 - RNA, 18 nt, Artificial Sequence
  Synthetic
uuugaacaugucucaaag

SEQ ID NO: 298556 - RNA, 19 nt, Artificial Sequence
  Synthetic
auuugaacaugucucaaag

SEQ ID NO: 298557 - RNA, 20 nt, Artificial Sequence
  Synthetic
uauuugaacaugucucaaag

SEQ ID NO: 298558 - RNA, 21 nt, Artificial Sequence
  Synthetic
auauuugaacaugucucaaag

SEQ ID NO: 298559 - RNA, 22 nt, Artificial Sequence
  Synthetic
gauauuugaacaugucucaaag

SEQ ID NO: 298560 - RNA, 23 nt, Artificial Sequence
  Synthetic
agauauuugaacaugucucaaag

SEQ ID NO: 298561 - RNA, 24 nt, Artificial Sequence
  Synthetic
cagauauuugaacaugucucaaag

SEQ ID NO: 298562 - RNA, 18 nt, Artificial Sequence
  Synthetic
uuaucuauaaauucaaag

SEQ ID NO: 298563 - RNA, 19 nt, Artificial Sequence
  Synthetic
uuuaucuauaaauucaaag

SEQ ID NO: 298564 - RNA, 20 nt, Artificial Sequence
  Synthetic
cuuuaucuauaaauucaaag

SEQ ID NO: 298565 - RNA, 21 nt, Artificial Sequence
  Synthetic
ucuuuaucuauaaauucaaag

SEQ ID NO: 298566 - RNA, 22 nt, Artificial Sequence
  Synthetic
aucuuuaucuauaaauucaaag

SEQ ID NO: 298567 - RNA, 23 nt, Artificial Sequence
  Synthetic
gaucuuuaucuauaaauucaaag

SEQ ID NO: 298568 - RNA, 24 nt, Artificial Sequence
  Synthetic
ugaucuuuaucuauaaauucaaag

SEQ ID NO: 298569 - RNA, 18 nt, Artificial Sequence
  Synthetic
aauugacagaauucaaag

SEQ ID NO: 298570 - RNA, 19 nt, Artificial Sequence
  Synthetic
aaauugacagaauucaaag

SEQ ID NO: 298571 - RNA, 20 nt, Artificial Sequence
  Synthetic
gaaauugacagaauucaaag

SEQ ID NO: 298572 - RNA, 21 nt, Artificial Sequence
  Synthetic
agaaauugacagaauucaaag

SEQ ID NO: 298573 - RNA, 22 nt, Artificial Sequence
  Synthetic
cagaaauugacagaauucaaag

SEQ ID NO: 298574 - RNA, 23 nt, Artificial Sequence
  Synthetic
gcagaaauugacagaauucaaag

SEQ ID NO: 298575 - RNA, 24 nt, Artificial Sequence
  Synthetic
ugcagaaauugacagaauucaaag

SEQ ID NO: 298576 - RNA, 18 nt, Artificial Sequence
  Synthetic
aaaugaguuaauucaaag

SEQ ID NO: 298577 - RNA, 19 nt, Artificial Sequence
  Synthetic
aaaaugaguuaauucaaag

SEQ ID NO: 298578 - RNA, 20 nt, Artificial Sequence
  Synthetic
uaaaaugaguuaauucaaag

SEQ ID NO: 298579 - RNA, 21 nt, Artificial Sequence
  Synthetic
uuaaaaugaguuaauucaaag

SEQ ID NO: 298580 - RNA, 22 nt, Artificial Sequence
  Synthetic
uuuaaaaugaguuaauucaaag

SEQ ID NO: 298581 - RNA, 23 nt, Artificial Sequence
  Synthetic
uuuuaaaaugaguuaauucaaag

SEQ ID NO: 298582 - RNA, 24 nt, Artificial Sequence
  Synthetic
cuuuuaaaaugaguuaauucaaag

SEQ ID NO: 298583 - RNA, 18 nt, Artificial Sequence
  Synthetic
ggaugggguaguucaaag

SEQ ID NO: 298584 - RNA, 19 nt, Artificial Sequence
  Synthetic
gggaugggguaguucaaag

SEQ ID NO: 298585 - RNA, 20 nt, Artificial Sequence
  Synthetic
ggggaugggguaguucaaag

SEQ ID NO: 298586 - RNA, 21 nt, Artificial Sequence
  Synthetic
uggggaugggguaguucaaag

SEQ ID NO: 298587 - RNA, 22 nt, Artificial Sequence
  Synthetic
cuggggaugggguaguucaaag

SEQ ID NO: 298588 - RNA, 23 nt, Artificial Sequence
  Synthetic
ucuggggaugggguaguucaaag

SEQ ID NO: 298589 - RNA, 24 nt, Artificial Sequence
  Synthetic
uucuggggaugggguaguucaaag

SEQ ID NO: 298590 - RNA, 18 nt, Artificial Sequence
  Synthetic
aacuaacucauuucaaag

SEQ ID NO: 298591 - RNA, 19 nt, Artificial Sequence
  Synthetic
aaacuaacucauuucaaag

SEQ ID NO: 298592 - RNA, 20 nt, Artificial Sequence
  Synthetic
aaaacuaacucauuucaaag

SEQ ID NO: 298593 - RNA, 21 nt, Artificial Sequence
  Synthetic
gaaaacuaacucauuucaaag

SEQ ID NO: 298594 - RNA, 22 nt, Artificial Sequence
  Synthetic
ugaaaacuaacucauuucaaag

SEQ ID NO: 298595 - RNA, 23 nt, Artificial Sequence
  Synthetic
gugaaaacuaacucauuucaaag

SEQ ID NO: 298596 - RNA, 24 nt, Artificial Sequence
  Synthetic
agugaaaacuaacucauuucaaag

SEQ ID NO: 298597 - RNA, 18 nt, Artificial Sequence
  Synthetic
uauacagugcaaagaaag

SEQ ID NO: 298598 - RNA, 19 nt, Artificial Sequence
  Synthetic
cuauacagugcaaagaaag

SEQ ID NO: 298599 - RNA, 20 nt, Artificial Sequence
  Synthetic
acuauacagugcaaagaaag

SEQ ID NO: 298600 - RNA, 21 nt, Artificial Sequence
  Synthetic
aacuauacagugcaaagaaag

SEQ ID NO: 298601 - RNA, 22 nt, Artificial Sequence
  Synthetic
gaacuauacagugcaaagaaag

SEQ ID NO: 298602 - RNA, 23 nt, Artificial Sequence
  Synthetic
ugaacuauacagugcaaagaaag

SEQ ID NO: 298603 - RNA, 24 nt, Artificial Sequence
  Synthetic
augaacuauacagugcaaagaaag

SEQ ID NO: 298604 - RNA, 18 nt, Artificial Sequence
  Synthetic
caagagcaagaaagaaag

SEQ ID NO: 298605 - RNA, 19 nt, Artificial Sequence
  Synthetic
gcaagagcaagaaagaaag

SEQ ID NO: 298606 - RNA, 20 nt, Artificial Sequence
  Synthetic
agcaagagcaagaaagaaag

SEQ ID NO: 298607 - RNA, 21 nt, Artificial Sequence
  Synthetic
gagcaagagcaagaaagaaag

SEQ ID NO: 298608 - RNA, 22 nt, Artificial Sequence
  Synthetic
agagcaagagcaagaaagaaag

SEQ ID NO: 298609 - RNA, 23 nt, Artificial Sequence
  Synthetic
gagagcaagagcaagaaagaaag

SEQ ID NO: 298610 - RNA, 24 nt, Artificial Sequence
  Synthetic
agagagcaagagcaagaaagaaag

SEQ ID NO: 298611 - RNA, 18 nt, Artificial Sequence
  Synthetic
cguagcauauaaagaaag

SEQ ID NO: 298612 - RNA, 19 nt, Artificial Sequence
  Synthetic
ccguagcauauaaagaaag

SEQ ID NO: 298613 - RNA, 20 nt, Artificial Sequence
  Synthetic
accguagcauauaaagaaag

SEQ ID NO: 298614 - RNA, 21 nt, Artificial Sequence
  Synthetic
uaccguagcauauaaagaaag

SEQ ID NO: 298615 - RNA, 22 nt, Artificial Sequence
  Synthetic
auaccguagcauauaaagaaag

SEQ ID NO: 298616 - RNA, 23 nt, Artificial Sequence
  Synthetic
gauaccguagcauauaaagaaag

SEQ ID NO: 298617 - RNA, 24 nt, Artificial Sequence
  Synthetic
ugauaccguagcauauaaagaaag

SEQ ID NO: 298618 - RNA, 18 nt, Artificial Sequence
  Synthetic
uuuuuccauuaaagaaag

SEQ ID NO: 298619 - RNA, 19 nt, Artificial Sequence
  Synthetic
auuuuuccauuaaagaaag

SEQ ID NO: 298620 - RNA, 20 nt, Artificial Sequence
  Synthetic
uauuuuuccauuaaagaaag

SEQ ID NO: 298621 - RNA, 21 nt, Artificial Sequence
  Synthetic
cuauuuuuccauuaaagaaag

SEQ ID NO: 298622 - RNA, 22 nt, Artificial Sequence
  Synthetic
acuauuuuuccauuaaagaaag

SEQ ID NO: 298623 - RNA, 23 nt, Artificial Sequence
  Synthetic
aacuauuuuuccauuaaagaaag

SEQ ID NO: 298624 - RNA, 24 nt, Artificial Sequence
  Synthetic
aaacuauuuuuccauuaaagaaag

SEQ ID NO: 298625 - RNA, 18 nt, Artificial Sequence
  Synthetic
gaguggaagccaagaaag

SEQ ID NO: 298626 - RNA, 19 nt, Artificial Sequence
  Synthetic
agaguggaagccaagaaag

SEQ ID NO: 298627 - RNA, 20 nt, Artificial Sequence
  Synthetic
aagaguggaagccaagaaag

SEQ ID NO: 298628 - RNA, 21 nt, Artificial Sequence
  Synthetic
aaagaguggaagccaagaaag

SEQ ID NO: 298629 - RNA, 22 nt, Artificial Sequence
  Synthetic
aaaagaguggaagccaagaaag

SEQ ID NO: 298630 - RNA, 23 nt, Artificial Sequence
  Synthetic
caaaagaguggaagccaagaaag

SEQ ID NO: 298631 - RNA, 24 nt, Artificial Sequence
  Synthetic
ccaaaagaguggaagccaagaaag

SEQ ID NO: 298632 - RNA, 18 nt, Artificial Sequence
  Synthetic
aauugcagaagaagaaag

SEQ ID NO: 298633 - RNA, 19 nt, Artificial Sequence
  Synthetic
gaauugcagaagaagaaag

SEQ ID NO: 298634 - RNA, 20 nt, Artificial Sequence
  Synthetic
ggaauugcagaagaagaaag

SEQ ID NO: 298635 - RNA, 21 nt, Artificial Sequence
  Synthetic
gggaauugcagaagaagaaag

SEQ ID NO: 298636 - RNA, 22 nt, Artificial Sequence
  Synthetic
cgggaauugcagaagaagaaag

SEQ ID NO: 298637 - RNA, 23 nt, Artificial Sequence
  Synthetic
ucgggaauugcagaagaagaaag

SEQ ID NO: 298638 - RNA, 24 nt, Artificial Sequence
  Synthetic
aucgggaauugcagaagaagaaag

SEQ ID NO: 298639 - RNA, 18 nt, Artificial Sequence
  Synthetic
gauuaauucugaagaaag

SEQ ID NO: 298640 - RNA, 19 nt, Artificial Sequence
  Synthetic
ggauuaauucugaagaaag

SEQ ID NO: 298641 - RNA, 20 nt, Artificial Sequence
  Synthetic
cggauuaauucugaagaaag

SEQ ID NO: 298642 - RNA, 21 nt, Artificial Sequence
  Synthetic
acggauuaauucugaagaaag

SEQ ID NO: 298643 - RNA, 22 nt, Artificial Sequence
  Synthetic
cacggauuaauucugaagaaag

SEQ ID NO: 298644 - RNA, 23 nt, Artificial Sequence
  Synthetic
gcacggauuaauucugaagaaag

SEQ ID NO: 298645 - RNA, 24 nt, Artificial Sequence
  Synthetic
cgcacggauuaauucugaagaaag

SEQ ID NO: 298646 - RNA, 18 nt, Artificial Sequence
  Synthetic
aacacaggaauaagaaag

SEQ ID NO: 298647 - RNA, 19 nt, Artificial Sequence
  Synthetic
gaacacaggaauaagaaag

SEQ ID NO: 298648 - RNA, 20 nt, Artificial Sequence
  Synthetic
ugaacacaggaauaagaaag

SEQ ID NO: 298649 - RNA, 21 nt, Artificial Sequence
  Synthetic
uugaacacaggaauaagaaag

SEQ ID NO: 298650 - RNA, 22 nt, Artificial Sequence
  Synthetic
guugaacacaggaauaagaaag

SEQ ID NO: 298651 - RNA, 23 nt, Artificial Sequence
  Synthetic
uguugaacacaggaauaagaaag

SEQ ID NO: 298652 - RNA, 24 nt, Artificial Sequence
  Synthetic
cuguugaacacaggaauaagaaag

SEQ ID NO: 298653 - RNA, 18 nt, Artificial Sequence
  Synthetic
cuaacgugaauaagaaag

SEQ ID NO: 298654 - RNA, 19 nt, Artificial Sequence
  Synthetic
acuaacgugaauaagaaag

SEQ ID NO: 298655 - RNA, 20 nt, Artificial Sequence
  Synthetic
aacuaacgugaauaagaaag

SEQ ID NO: 298656 - RNA, 21 nt, Artificial Sequence
  Synthetic
caacuaacgugaauaagaaag

SEQ ID NO: 298657 - RNA, 22 nt, Artificial Sequence
  Synthetic
gcaacuaacgugaauaagaaag

SEQ ID NO: 298658 - RNA, 23 nt, Artificial Sequence
  Synthetic
agcaacuaacgugaauaagaaag

SEQ ID NO: 298659 - RNA, 24 nt, Artificial Sequence
  Synthetic
uagcaacuaacgugaauaagaaag

SEQ ID NO: 298660 - RNA, 18 nt, Artificial Sequence
  Synthetic
aauggaaugguaagaaag

SEQ ID NO: 298661 - RNA, 19 nt, Artificial Sequence
  Synthetic
aaauggaaugguaagaaag

SEQ ID NO: 298662 - RNA, 20 nt, Artificial Sequence
  Synthetic
uaaauggaaugguaagaaag

SEQ ID NO: 298663 - RNA, 21 nt, Artificial Sequence
  Synthetic
auaaauggaaugguaagaaag

SEQ ID NO: 298664 - RNA, 22 nt, Artificial Sequence
  Synthetic
cauaaauggaaugguaagaaag

SEQ ID NO: 298665 - RNA, 23 nt, Artificial Sequence
  Synthetic
ccauaaauggaaugguaagaaag

SEQ ID NO: 298666 - RNA, 24 nt, Artificial Sequence
  Synthetic
cccauaaauggaaugguaagaaag

SEQ ID NO: 298667 - RNA, 18 nt, Artificial Sequence
  Synthetic
auucuauacuuaagaaag

SEQ ID NO: 298668 - RNA, 19 nt, Artificial Sequence
  Synthetic
gauucuauacuuaagaaag

SEQ ID NO: 298669 - RNA, 20 nt, Artificial Sequence
  Synthetic
ugauucuauacuuaagaaag

SEQ ID NO: 298670 - RNA, 21 nt, Artificial Sequence
  Synthetic
uugauucuauacuuaagaaag

SEQ ID NO: 298671 - RNA, 22 nt, Artificial Sequence
  Synthetic
guugauucuauacuuaagaaag

SEQ ID NO: 298672 - RNA, 23 nt, Artificial Sequence
  Synthetic
aguugauucuauacuuaagaaag

SEQ ID NO: 298673 - RNA, 24 nt, Artificial Sequence
  Synthetic
gaguugauucuauacuuaagaaag

SEQ ID NO: 298674 - RNA, 18 nt, Artificial Sequence
  Synthetic
gcuagugaguuaagaaag

SEQ ID NO: 298675 - RNA, 19 nt, Artificial Sequence
  Synthetic
ugcuagugaguuaagaaag

SEQ ID NO: 298676 - RNA, 20 nt, Artificial Sequence
  Synthetic
augcuagugaguuaagaaag

SEQ ID NO: 298677 - RNA, 21 nt, Artificial Sequence
  Synthetic
uaugcuagugaguuaagaaag

SEQ ID NO: 298678 - RNA, 22 nt, Artificial Sequence
  Synthetic
guaugcuagugaguuaagaaag

SEQ ID NO: 298679 - RNA, 23 nt, Artificial Sequence
  Synthetic
aguaugcuagugaguuaagaaag

SEQ ID NO: 298680 - RNA, 24 nt, Artificial Sequence
  Synthetic
caguaugcuagugaguuaagaaag

SEQ ID NO: 298681 - RNA, 18 nt, Artificial Sequence
  Synthetic
uuucaaauacacagaaag

SEQ ID NO: 298682 - RNA, 19 nt, Artificial Sequence
  Synthetic
uuuucaaauacacagaaag

SEQ ID NO: 298683 - RNA, 20 nt, Artificial Sequence
  Synthetic
uuuuucaaauacacagaaag

SEQ ID NO: 298684 - RNA, 21 nt, Artificial Sequence
  Synthetic
auuuuucaaauacacagaaag

SEQ ID NO: 298685 - RNA, 22 nt, Artificial Sequence
  Synthetic
aauuuuucaaauacacagaaag

SEQ ID NO: 298686 - RNA, 23 nt, Artificial Sequence
  Synthetic
aaauuuuucaaauacacagaaag

SEQ ID NO: 298687 - RNA, 24 nt, Artificial Sequence
  Synthetic
aaaauuuuucaaauacacagaaag

SEQ ID NO: 298688 - RNA, 18 nt, Artificial Sequence
  Synthetic
gacuagcaagacagaaag

SEQ ID NO: 298689 - RNA, 19 nt, Artificial Sequence
  Synthetic
agacuagcaagacagaaag

SEQ ID NO: 298690 - RNA, 20 nt, Artificial Sequence
  Synthetic
aagacuagcaagacagaaag

SEQ ID NO: 298691 - RNA, 21 nt, Artificial Sequence
  Synthetic
gaagacuagcaagacagaaag

SEQ ID NO: 298692 - RNA, 22 nt, Artificial Sequence
  Synthetic
agaagacuagcaagacagaaag

SEQ ID NO: 298693 - RNA, 23 nt, Artificial Sequence
  Synthetic
gagaagacuagcaagacagaaag

SEQ ID NO: 298694 - RNA, 24 nt, Artificial Sequence
  Synthetic
agagaagacuagcaagacagaaag

SEQ ID NO: 298695 - RNA, 18 nt, Artificial Sequence
  Synthetic
gaugcgucaagcagaaag

SEQ ID NO: 298696 - RNA, 19 nt, Artificial Sequence
  Synthetic
ggaugcgucaagcagaaag

SEQ ID NO: 298697 - RNA, 20 nt, Artificial Sequence
  Synthetic
aggaugcgucaagcagaaag

SEQ ID NO: 298698 - RNA, 21 nt, Artificial Sequence
  Synthetic
gaggaugcgucaagcagaaag

SEQ ID NO: 298699 - RNA, 22 nt, Artificial Sequence
  Synthetic
ggaggaugcgucaagcagaaag

SEQ ID NO: 298700 - RNA, 23 nt, Artificial Sequence
  Synthetic
aggaggaugcgucaagcagaaag

SEQ ID NO: 298701 - RNA, 24 nt, Artificial Sequence
  Synthetic
gaggaggaugcgucaagcagaaag

SEQ ID NO: 298702 - RNA, 18 nt, Artificial Sequence
  Synthetic
acuugagaaggcagaaag

SEQ ID NO: 298703 - RNA, 19 nt, Artificial Sequence
  Synthetic
uacuugagaaggcagaaag

SEQ ID NO: 298704 - RNA, 20 nt, Artificial Sequence
  Synthetic
guacuugagaaggcagaaag

SEQ ID NO: 298705 - RNA, 21 nt, Artificial Sequence
  Synthetic
gguacuugagaaggcagaaag

SEQ ID NO: 298706 - RNA, 22 nt, Artificial Sequence
  Synthetic
agguacuugagaaggcagaaag

SEQ ID NO: 298707 - RNA, 23 nt, Artificial Sequence
  Synthetic
cagguacuugagaaggcagaaag

SEQ ID NO: 298708 - RNA, 24 nt, Artificial Sequence
  Synthetic
acagguacuugagaaggcagaaag

SEQ ID NO: 298709 - RNA, 18 nt, Artificial Sequence
  Synthetic
ucauaugguggcagaaag

SEQ ID NO: 298710 - RNA, 19 nt, Artificial Sequence
  Synthetic
uucauaugguggcagaaag

SEQ ID NO: 298711 - RNA, 20 nt, Artificial Sequence
  Synthetic
cuucauaugguggcagaaag

SEQ ID NO: 298712 - RNA, 21 nt, Artificial Sequence
  Synthetic
ucuucauaugguggcagaaag

SEQ ID NO: 298713 - RNA, 22 nt, Artificial Sequence
  Synthetic
uucuucauaugguggcagaaag

SEQ ID NO: 298714 - RNA, 23 nt, Artificial Sequence
  Synthetic
cuucuucauaugguggcagaaag

SEQ ID NO: 298715 - RNA, 24 nt, Artificial Sequence
  Synthetic
ccuucuucauaugguggcagaaag

SEQ ID NO: 298716 - RNA, 18 nt, Artificial Sequence
  Synthetic
caauguuaacucagaaag

SEQ ID NO: 298717 - RNA, 19 nt, Artificial Sequence
  Synthetic
ccaauguuaacucagaaag

SEQ ID NO: 298718 - RNA, 20 nt, Artificial Sequence
  Synthetic
cccaauguuaacucagaaag

SEQ ID NO: 298719 - RNA, 21 nt, Artificial Sequence
  Synthetic
gcccaauguuaacucagaaag

SEQ ID NO: 298720 - RNA, 22 nt, Artificial Sequence
  Synthetic
agcccaauguuaacucagaaag

SEQ ID NO: 298721 - RNA, 23 nt, Artificial Sequence
  Synthetic
aagcccaauguuaacucagaaag

SEQ ID NO: 298722 - RNA, 24 nt, Artificial Sequence
  Synthetic
uaagcccaauguuaacucagaaag

SEQ ID NO: 298723 - RNA, 18 nt, Artificial Sequence
  Synthetic
aaggaggaauucagaaag

SEQ ID NO: 298724 - RNA, 19 nt, Artificial Sequence
  Synthetic
uaaggaggaauucagaaag

SEQ ID NO: 298725 - RNA, 20 nt, Artificial Sequence
  Synthetic
cuaaggaggaauucagaaag

SEQ ID NO: 298726 - RNA, 21 nt, Artificial Sequence
  Synthetic
ucuaaggaggaauucagaaag

SEQ ID NO: 298727 - RNA, 22 nt, Artificial Sequence
  Synthetic
uucuaaggaggaauucagaaag

SEQ ID NO: 298728 - RNA, 23 nt, Artificial Sequence
  Synthetic
auucuaaggaggaauucagaaag

SEQ ID NO: 298729 - RNA, 24 nt, Artificial Sequence
  Synthetic
gauucuaaggaggaauucagaaag

SEQ ID NO: 298730 - RNA, 18 nt, Artificial Sequence
  Synthetic
gaaggguaauucagaaag

SEQ ID NO: 298731 - RNA, 19 nt, Artificial Sequence
  Synthetic
ggaaggguaauucagaaag

SEQ ID NO: 298732 - RNA, 20 nt, Artificial Sequence
  Synthetic
gggaaggguaauucagaaag

SEQ ID NO: 298733 - RNA, 21 nt, Artificial Sequence
  Synthetic
agggaaggguaauucagaaag

SEQ ID NO: 298734 - RNA, 22 nt, Artificial Sequence
  Synthetic
cagggaaggguaauucagaaag

SEQ ID NO: 298735 - RNA, 23 nt, Artificial Sequence
  Synthetic
gcagggaaggguaauucagaaag

SEQ ID NO: 298736 - RNA, 24 nt, Artificial Sequence
  Synthetic
agcagggaaggguaauucagaaag

SEQ ID NO: 298737 - RNA, 18 nt, Artificial Sequence
  Synthetic
cacaacagauucagaaag

SEQ ID NO: 298738 - RNA, 19 nt, Artificial Sequence
  Synthetic
acacaacagauucagaaag

SEQ ID NO: 298739 - RNA, 20 nt, Artificial Sequence
  Synthetic
uacacaacagauucagaaag

SEQ ID NO: 298740 - RNA, 21 nt, Artificial Sequence
  Synthetic
auacacaacagauucagaaag

SEQ ID NO: 298741 - RNA, 22 nt, Artificial Sequence
  Synthetic
uauacacaacagauucagaaag

SEQ ID NO: 298742 - RNA, 23 nt, Artificial Sequence
  Synthetic
guauacacaacagauucagaaag

SEQ ID NO: 298743 - RNA, 24 nt, Artificial Sequence
  Synthetic
aguauacacaacagauucagaaag

SEQ ID NO: 298744 - RNA, 18 nt, Artificial Sequence
  Synthetic
uaauuuaguuucagaaag

SEQ ID NO: 298745 - RNA, 19 nt, Artificial Sequence
  Synthetic
cuaauuuaguuucagaaag

SEQ ID NO: 298746 - RNA, 20 nt, Artificial Sequence
  Synthetic
gcuaauuuaguuucagaaag

SEQ ID NO: 298747 - RNA, 21 nt, Artificial Sequence
  Synthetic
agcuaauuuaguuucagaaag

SEQ ID NO: 298748 - RNA, 22 nt, Artificial Sequence
  Synthetic
aagcuaauuuaguuucagaaag

SEQ ID NO: 298749 - RNA, 23 nt, Artificial Sequence
  Synthetic
gaagcuaauuuaguuucagaaag

SEQ ID NO: 298750 - RNA, 24 nt, Artificial Sequence
  Synthetic
agaagcuaauuuaguuucagaaag

SEQ ID NO: 298751 - RNA, 18 nt, Artificial Sequence
  Synthetic
gaugaugaaaagagaaag

SEQ ID NO: 298752 - RNA, 19 nt, Artificial Sequence
  Synthetic
ugaugaugaaaagagaaag

SEQ ID NO: 298753 - RNA, 20 nt, Artificial Sequence
  Synthetic
augaugaugaaaagagaaag

SEQ ID NO: 298754 - RNA, 21 nt, Artificial Sequence
  Synthetic
aaugaugaugaaaagagaaag

SEQ ID NO: 298755 - RNA, 22 nt, Artificial Sequence
  Synthetic
aaaugaugaugaaaagagaaag

SEQ ID NO: 298756 - RNA, 23 nt, Artificial Sequence
  Synthetic
uaaaugaugaugaaaagagaaag

SEQ ID NO: 298757 - RNA, 24 nt, Artificial Sequence
  Synthetic
auaaaugaugaugaaaagagaaag

SEQ ID NO: 298758 - RNA, 18 nt, Artificial Sequence
  Synthetic
aucauuauaaagagaaag

SEQ ID NO: 298759 - RNA, 19 nt, Artificial Sequence
  Synthetic
uaucauuauaaagagaaag

SEQ ID NO: 298760 - RNA, 20 nt, Artificial Sequence
  Synthetic
auaucauuauaaagagaaag

SEQ ID NO: 298761 - RNA, 21 nt, Artificial Sequence
  Synthetic
uauaucauuauaaagagaaag

SEQ ID NO: 298762 - RNA, 22 nt, Artificial Sequence
  Synthetic
uuauaucauuauaaagagaaag

SEQ ID NO: 298763 - RNA, 23 nt, Artificial Sequence
  Synthetic
uuuauaucauuauaaagagaaag

SEQ ID NO: 298764 - RNA, 24 nt, Artificial Sequence
  Synthetic
uuuuauaucauuauaaagagaaag

SEQ ID NO: 298765 - RNA, 18 nt, Artificial Sequence
  Synthetic
gaaagcagagagagaaag

SEQ ID NO: 298766 - RNA, 19 nt, Artificial Sequence
  Synthetic
agaaagcagagagagaaag

SEQ ID NO: 298767 - RNA, 20 nt, Artificial Sequence
  Synthetic
aagaaagcagagagagaaag

SEQ ID NO: 298768 - RNA, 21 nt, Artificial Sequence
  Synthetic
aaagaaagcagagagagaaag

SEQ ID NO: 298769 - RNA, 22 nt, Artificial Sequence
  Synthetic
gaaagaaagcagagagagaaag

SEQ ID NO: 298770 - RNA, 23 nt, Artificial Sequence
  Synthetic
agaaagaaagcagagagagaaag

SEQ ID NO: 298771 - RNA, 24 nt, Artificial Sequence
  Synthetic
aagaaagaaagcagagagagaaag

SEQ ID NO: 298772 - RNA, 18 nt, Artificial Sequence
  Synthetic
ugagagagagagagaaag

SEQ ID NO: 298773 - RNA, 19 nt, Artificial Sequence
  Synthetic
uugagagagagagagaaag

SEQ ID NO: 298774 - RNA, 20 nt, Artificial Sequence
  Synthetic
auugagagagagagagaaag

SEQ ID NO: 298775 - RNA, 21 nt, Artificial Sequence
  Synthetic
gauugagagagagagagaaag

SEQ ID NO: 298776 - RNA, 22 nt, Artificial Sequence
  Synthetic
agauugagagagagagagaaag

SEQ ID NO: 298777 - RNA, 23 nt, Artificial Sequence
  Synthetic
gagauugagagagagagagaaag

SEQ ID NO: 298778 - RNA, 24 nt, Artificial Sequence
  Synthetic
agagauugagagagagagagaaag

SEQ ID NO: 298779 - RNA, 18 nt, Artificial Sequence
  Synthetic
aaaaucagugagagaaag

SEQ ID NO: 298780 - RNA, 19 nt, Artificial Sequence
  Synthetic
caaaaucagugagagaaag

SEQ ID NO: 298781 - RNA, 20 nt, Artificial Sequence
  Synthetic
ucaaaaucagugagagaaag

SEQ ID NO: 298782 - RNA, 21 nt, Artificial Sequence
  Synthetic
aucaaaaucagugagagaaag

SEQ ID NO: 298783 - RNA, 22 nt, Artificial Sequence
  Synthetic
caucaaaaucagugagagaaag

SEQ ID NO: 298784 - RNA, 23 nt, Artificial Sequence
  Synthetic
ucaucaaaaucagugagagaaag

SEQ ID NO: 298785 - RNA, 24 nt, Artificial Sequence
  Synthetic
cucaucaaaaucagugagagaaag

SEQ ID NO: 298786 - RNA, 18 nt, Artificial Sequence
  Synthetic
aaaugaaguuagagaaag

SEQ ID NO: 298787 - RNA, 19 nt, Artificial Sequence
  Synthetic
gaaaugaaguuagagaaag

SEQ ID NO: 298788 - RNA, 20 nt, Artificial Sequence
  Synthetic
ggaaaugaaguuagagaaag

SEQ ID NO: 298789 - RNA, 21 nt, Artificial Sequence
  Synthetic
uggaaaugaaguuagagaaag

SEQ ID NO: 298790 - RNA, 22 nt, Artificial Sequence
  Synthetic
cuggaaaugaaguuagagaaag

SEQ ID NO: 298791 - RNA, 23 nt, Artificial Sequence
  Synthetic
gcuggaaaugaaguuagagaaag

SEQ ID NO: 298792 - RNA, 24 nt, Artificial Sequence
  Synthetic
agcuggaaaugaaguuagagaaag

SEQ ID NO: 298793 - RNA, 18 nt, Artificial Sequence
  Synthetic
uauuucauaaggagaaag

SEQ ID NO: 298794 - RNA, 19 nt, Artificial Sequence
  Synthetic
guauuucauaaggagaaag

SEQ ID NO: 298795 - RNA, 20 nt, Artificial Sequence
  Synthetic
aguauuucauaaggagaaag

SEQ ID NO: 298796 - RNA, 21 nt, Artificial Sequence
  Synthetic
uaguauuucauaaggagaaag

SEQ ID NO: 298797 - RNA, 22 nt, Artificial Sequence
  Synthetic
guaguauuucauaaggagaaag

SEQ ID NO: 298798 - RNA, 23 nt, Artificial Sequence
  Synthetic
gguaguauuucauaaggagaaag

SEQ ID NO: 298799 - RNA, 24 nt, Artificial Sequence
  Synthetic
ugguaguauuucauaaggagaaag

SEQ ID NO: 298800 - RNA, 18 nt, Artificial Sequence
  Synthetic
aaagauaacaggagaaag

SEQ ID NO: 298801 - RNA, 19 nt, Artificial Sequence
  Synthetic
aaaagauaacaggagaaag

SEQ ID NO: 298802 - RNA, 20 nt, Artificial Sequence
  Synthetic
aaaaagauaacaggagaaag

SEQ ID NO: 298803 - RNA, 21 nt, Artificial Sequence
  Synthetic
aaaaaagauaacaggagaaag

SEQ ID NO: 298804 - RNA, 22 nt, Artificial Sequence
  Synthetic
aaaaaaagauaacaggagaaag

SEQ ID NO: 298805 - RNA, 23 nt, Artificial Sequence
  Synthetic
aaaaaaaagauaacaggagaaag

SEQ ID NO: 298806 - RNA, 24 nt, Artificial Sequence
  Synthetic
aaaaaaaaagauaacaggagaaag

SEQ ID NO: 298807 - RNA, 18 nt, Artificial Sequence
  Synthetic
aauccccacaggagaaag

SEQ ID NO: 298808 - RNA, 19 nt, Artificial Sequence
  Synthetic
aaauccccacaggagaaag

SEQ ID NO: 298809 - RNA, 20 nt, Artificial Sequence
  Synthetic
aaaauccccacaggagaaag

SEQ ID NO: 298810 - RNA, 21 nt, Artificial Sequence
  Synthetic
uaaaauccccacaggagaaag

SEQ ID NO: 298811 - RNA, 22 nt, Artificial Sequence
  Synthetic
uuaaaauccccacaggagaaag

SEQ ID NO: 298812 - RNA, 23 nt, Artificial Sequence
  Synthetic
auuaaaauccccacaggagaaag

SEQ ID NO: 298813 - RNA, 24 nt, Artificial Sequence
  Synthetic
cauuaaaauccccacaggagaaag

SEQ ID NO: 298814 - RNA, 18 nt, Artificial Sequence
  Synthetic
gagacaggagggagaaag

SEQ ID NO: 298815 - RNA, 19 nt, Artificial Sequence
  Synthetic
ggagacaggagggagaaag

SEQ ID NO: 298816 - RNA, 20 nt, Artificial Sequence
  Synthetic
gggagacaggagggagaaag

SEQ ID NO: 298817 - RNA, 21 nt, Artificial Sequence
  Synthetic
ugggagacaggagggagaaag

SEQ ID NO: 298818 - RNA, 22 nt, Artificial Sequence
  Synthetic
gugggagacaggagggagaaag

SEQ ID NO: 298819 - RNA, 23 nt, Artificial Sequence
  Synthetic
ggugggagacaggagggagaaag

SEQ ID NO: 298820 - RNA, 24 nt, Artificial Sequence
  Synthetic
uggugggagacaggagggagaaag

SEQ ID NO: 298821 - RNA, 18 nt, Artificial Sequence
  Synthetic
uggcucuuggggagaaag

SEQ ID NO: 298822 - RNA, 19 nt, Artificial Sequence
  Synthetic
auggcucuuggggagaaag

SEQ ID NO: 298823 - RNA, 20 nt, Artificial Sequence
  Synthetic
uauggcucuuggggagaaag

SEQ ID NO: 298824 - RNA, 21 nt, Artificial Sequence
  Synthetic
auauggcucuuggggagaaag

SEQ ID NO: 298825 - RNA, 22 nt, Artificial Sequence
  Synthetic
aauauggcucuuggggagaaag

SEQ ID NO: 298826 - RNA, 23 nt, Artificial Sequence
  Synthetic
aaauauggcucuuggggagaaag

SEQ ID NO: 298827 - RNA, 24 nt, Artificial Sequence
  Synthetic
uaaauauggcucuuggggagaaag

SEQ ID NO: 298828 - RNA, 18 nt, Artificial Sequence
  Synthetic
ggaucaacugggagaaag

SEQ ID NO: 298829 - RNA, 19 nt, Artificial Sequence
  Synthetic
gggaucaacugggagaaag

SEQ ID NO: 298830 - RNA, 20 nt, Artificial Sequence
  Synthetic
ugggaucaacugggagaaag

SEQ ID NO: 298831 - RNA, 21 nt, Artificial Sequence
  Synthetic
gugggaucaacugggagaaag

SEQ ID NO: 298832 - RNA, 22 nt, Artificial Sequence
  Synthetic
ugugggaucaacugggagaaag

SEQ ID NO: 298833 - RNA, 23 nt, Artificial Sequence
  Synthetic
augugggaucaacugggagaaag

SEQ ID NO: 298834 - RNA, 24 nt, Artificial Sequence
  Synthetic
gaugugggaucaacugggagaaag

SEQ ID NO: 298835 - RNA, 18 nt, Artificial Sequence
  Synthetic
ggaaugggccugagaaag

SEQ ID NO: 298836 - RNA, 19 nt, Artificial Sequence
  Synthetic
aggaaugggccugagaaag

SEQ ID NO: 298837 - RNA, 20 nt, Artificial Sequence
  Synthetic
uaggaaugggccugagaaag

SEQ ID NO: 298838 - RNA, 21 nt, Artificial Sequence
  Synthetic
uuaggaaugggccugagaaag

SEQ ID NO: 298839 - RNA, 22 nt, Artificial Sequence
  Synthetic
cuuaggaaugggccugagaaag

SEQ ID NO: 298840 - RNA, 23 nt, Artificial Sequence
  Synthetic
ccuuaggaaugggccugagaaag

SEQ ID NO: 298841 - RNA, 24 nt, Artificial Sequence
  Synthetic
gccuuaggaaugggccugagaaag

SEQ ID NO: 298842 - RNA, 18 nt, Artificial Sequence
  Synthetic
gauugagaauugagaaag

SEQ ID NO: 298843 - RNA, 19 nt, Artificial Sequence
  Synthetic
ugauugagaauugagaaag

SEQ ID NO: 298844 - RNA, 20 nt, Artificial Sequence
  Synthetic
augauugagaauugagaaag

SEQ ID NO: 298845 - RNA, 21 nt, Artificial Sequence
  Synthetic
caugauugagaauugagaaag

SEQ ID NO: 298846 - RNA, 22 nt, Artificial Sequence
  Synthetic
gcaugauugagaauugagaaag

SEQ ID NO: 298847 - RNA, 23 nt, Artificial Sequence
  Synthetic
ggcaugauugagaauugagaaag

SEQ ID NO: 298848 - RNA, 24 nt, Artificial Sequence
  Synthetic
aggcaugauugagaauugagaaag

SEQ ID NO: 298849 - RNA, 18 nt, Artificial Sequence
  Synthetic
cagaaaggcuugagaaag

SEQ ID NO: 298850 - RNA, 19 nt, Artificial Sequence
  Synthetic
ccagaaaggcuugagaaag

SEQ ID NO: 298851 - RNA, 20 nt, Artificial Sequence
  Synthetic
accagaaaggcuugagaaag

SEQ ID NO: 298852 - RNA, 21 nt, Artificial Sequence
  Synthetic
gaccagaaaggcuugagaaag

SEQ ID NO: 298853 - RNA, 22 nt, Artificial Sequence
  Synthetic
ggaccagaaaggcuugagaaag

SEQ ID NO: 298854 - RNA, 23 nt, Artificial Sequence
  Synthetic
aggaccagaaaggcuugagaaag

SEQ ID NO: 298855 - RNA, 24 nt, Artificial Sequence
  Synthetic
uaggaccagaaaggcuugagaaag

SEQ ID NO: 298856 - RNA, 18 nt, Artificial Sequence
  Synthetic
ugcagugccaauagaaag

SEQ ID NO: 298857 - RNA, 19 nt, Artificial Sequence
  Synthetic
uugcagugccaauagaaag

SEQ ID NO: 298858 - RNA, 20 nt, Artificial Sequence
  Synthetic
uuugcagugccaauagaaag

SEQ ID NO: 298859 - RNA, 21 nt, Artificial Sequence
  Synthetic
guuugcagugccaauagaaag

SEQ ID NO: 298860 - RNA, 22 nt, Artificial Sequence
  Synthetic
gguuugcagugccaauagaaag

SEQ ID NO: 298861 - RNA, 23 nt, Artificial Sequence
  Synthetic
agguuugcagugccaauagaaag

SEQ ID NO: 298862 - RNA, 24 nt, Artificial Sequence
  Synthetic
gagguuugcagugccaauagaaag

SEQ ID NO: 298863 - RNA, 18 nt, Artificial Sequence
  Synthetic
aacugcacagauagaaag

SEQ ID NO: 298864 - RNA, 19 nt, Artificial Sequence
  Synthetic
caacugcacagauagaaag

SEQ ID NO: 298865 - RNA, 20 nt, Artificial Sequence
  Synthetic
acaacugcacagauagaaag

SEQ ID NO: 298866 - RNA, 21 nt, Artificial Sequence
  Synthetic
cacaacugcacagauagaaag

SEQ ID NO: 298867 - RNA, 22 nt, Artificial Sequence
  Synthetic
ccacaacugcacagauagaaag

SEQ ID NO: 298868 - RNA, 23 nt, Artificial Sequence
  Synthetic
cccacaacugcacagauagaaag

SEQ ID NO: 298869 - RNA, 24 nt, Artificial Sequence
  Synthetic
ucccacaacugcacagauagaaag

SEQ ID NO: 298870 - RNA, 18 nt, Artificial Sequence
  Synthetic
gagagggaggauagaaag

SEQ ID NO: 298871 - RNA, 19 nt, Artificial Sequence
  Synthetic
agagagggaggauagaaag

SEQ ID NO: 298872 - RNA, 20 nt, Artificial Sequence
  Synthetic
gagagagggaggauagaaag

SEQ ID NO: 298873 - RNA, 21 nt, Artificial Sequence
  Synthetic
ggagagagggaggauagaaag

SEQ ID NO: 298874 - RNA, 22 nt, Artificial Sequence
  Synthetic
aggagagagggaggauagaaag

SEQ ID NO: 298875 - RNA, 23 nt, Artificial Sequence
  Synthetic
aaggagagagggaggauagaaag

SEQ ID NO: 298876 - RNA, 24 nt, Artificial Sequence
  Synthetic
gaaggagagagggaggauagaaag

SEQ ID NO: 298877 - RNA, 18 nt, Artificial Sequence
  Synthetic
gcaaugacuucuagaaag

SEQ ID NO: 298878 - RNA, 19 nt, Artificial Sequence
  Synthetic
agcaaugacuucuagaaag

SEQ ID NO: 298879 - RNA, 20 nt, Artificial Sequence
  Synthetic
aagcaaugacuucuagaaag

SEQ ID NO: 298880 - RNA, 21 nt, Artificial Sequence
  Synthetic
gaagcaaugacuucuagaaag

SEQ ID NO: 298881 - RNA, 22 nt, Artificial Sequence
  Synthetic
ugaagcaaugacuucuagaaag

SEQ ID NO: 298882 - RNA, 23 nt, Artificial Sequence
  Synthetic
cugaagcaaugacuucuagaaag

SEQ ID NO: 298883 - RNA, 24 nt, Artificial Sequence
  Synthetic
ccugaagcaaugacuucuagaaag

SEQ ID NO: 298884 - RNA, 18 nt, Artificial Sequence
  Synthetic
gugauagguucuagaaag

SEQ ID NO: 298885 - RNA, 19 nt, Artificial Sequence
  Synthetic
agugauagguucuagaaag

SEQ ID NO: 298886 - RNA, 20 nt, Artificial Sequence
  Synthetic
cagugauagguucuagaaag

SEQ ID NO: 298887 - RNA, 21 nt, Artificial Sequence
  Synthetic
acagugauagguucuagaaag

SEQ ID NO: 298888 - RNA, 22 nt, Artificial Sequence
  Synthetic
gacagugauagguucuagaaag

SEQ ID NO: 298889 - RNA, 23 nt, Artificial Sequence
  Synthetic
agacagugauagguucuagaaag

SEQ ID NO: 298890 - RNA, 24 nt, Artificial Sequence
  Synthetic
uagacagugauagguucuagaaag

SEQ ID NO: 298891 - RNA, 18 nt, Artificial Sequence
  Synthetic
cuagccauauguagaaag

SEQ ID NO: 298892 - RNA, 19 nt, Artificial Sequence
  Synthetic
gcuagccauauguagaaag

SEQ ID NO: 298893 - RNA, 20 nt, Artificial Sequence
  Synthetic
ggcuagccauauguagaaag

SEQ ID NO: 298894 - RNA, 21 nt, Artificial Sequence
  Synthetic
uggcuagccauauguagaaag

SEQ ID NO: 298895 - RNA, 22 nt, Artificial Sequence
  Synthetic
cuggcuagccauauguagaaag

SEQ ID NO: 298896 - RNA, 23 nt, Artificial Sequence
  Synthetic
acuggcuagccauauguagaaag

SEQ ID NO: 298897 - RNA, 24 nt, Artificial Sequence
  Synthetic
aacuggcuagccauauguagaaag

SEQ ID NO: 298898 - RNA, 24 nt, Artificial Sequence
  Synthetic
gacuggcuagccauauguagaaag

SEQ ID NO: 298899 - RNA, 18 nt, Artificial Sequence
  Synthetic
cguguaaaguguagaaag

SEQ ID NO: 298900 - RNA, 19 nt, Artificial Sequence
  Synthetic
ucguguaaaguguagaaag

SEQ ID NO: 298901 - RNA, 20 nt, Artificial Sequence
  Synthetic
aucguguaaaguguagaaag

SEQ ID NO: 298902 - RNA, 21 nt, Artificial Sequence
  Synthetic
caucguguaaaguguagaaag

SEQ ID NO: 298903 - RNA, 22 nt, Artificial Sequence
  Synthetic
ccaucguguaaaguguagaaag

SEQ ID NO: 298904 - RNA, 23 nt, Artificial Sequence
  Synthetic
cccaucguguaaaguguagaaag

SEQ ID NO: 298905 - RNA, 24 nt, Artificial Sequence
  Synthetic
ccccaucguguaaaguguagaaag

SEQ ID NO: 298906 - RNA, 18 nt, Artificial Sequence
  Synthetic
ggaaaacaauuuagaaag

SEQ ID NO: 298907 - RNA, 19 nt, Artificial Sequence
  Synthetic
aggaaaacaauuuagaaag

SEQ ID NO: 298908 - RNA, 20 nt, Artificial Sequence
  Synthetic
aaggaaaacaauuuagaaag

SEQ ID NO: 298909 - RNA, 21 nt, Artificial Sequence
  Synthetic
aaaggaaaacaauuuagaaag

SEQ ID NO: 298910 - RNA, 22 nt, Artificial Sequence
  Synthetic
gaaaggaaaacaauuuagaaag

SEQ ID NO: 298911 - RNA, 23 nt, Artificial Sequence
  Synthetic
agaaaggaaaacaauuuagaaag

SEQ ID NO: 298912 - RNA, 24 nt, Artificial Sequence
  Synthetic
gagaaaggaaaacaauuuagaaag

SEQ ID NO: 298913 - RNA, 18 nt, Artificial Sequence
  Synthetic
gaguuucaguuuagaaag

SEQ ID NO: 298914 - RNA, 19 nt, Artificial Sequence
  Synthetic
agaguuucaguuuagaaag

SEQ ID NO: 298915 - RNA, 20 nt, Artificial Sequence
  Synthetic
uagaguuucaguuuagaaag

SEQ ID NO: 298916 - RNA, 21 nt, Artificial Sequence
  Synthetic
auagaguuucaguuuagaaag

SEQ ID NO: 298917 - RNA, 22 nt, Artificial Sequence
  Synthetic
uauagaguuucaguuuagaaag

SEQ ID NO: 298918 - RNA, 23 nt, Artificial Sequence
  Synthetic
guauagaguuucaguuuagaaag

SEQ ID NO: 298919 - RNA, 24 nt, Artificial Sequence
  Synthetic
gguauagaguuucaguuuagaaag

SEQ ID NO: 298920 - RNA, 18 nt, Artificial Sequence
  Synthetic
aaaugaaagaaacgaaag

SEQ ID NO: 298921 - RNA, 19 nt, Artificial Sequence
  Synthetic
aaaaugaaagaaacgaaag

SEQ ID NO: 298922 - RNA, 20 nt, Artificial Sequence
  Synthetic
gaaaaugaaagaaacgaaag

SEQ ID NO: 298923 - RNA, 21 nt, Artificial Sequence
  Synthetic
agaaaaugaaagaaacgaaag

SEQ ID NO: 298924 - RNA, 22 nt, Artificial Sequence
  Synthetic
gagaaaaugaaagaaacgaaag

SEQ ID NO: 298925 - RNA, 23 nt, Artificial Sequence
  Synthetic
ugagaaaaugaaagaaacgaaag

SEQ ID NO: 298926 - RNA, 24 nt, Artificial Sequence
  Synthetic
augagaaaaugaaagaaacgaaag

SEQ ID NO: 298927 - RNA, 18 nt, Artificial Sequence
  Synthetic
aauuaggcacuccgaaag

SEQ ID NO: 298928 - RNA, 19 nt, Artificial Sequence
  Synthetic
gaauuaggcacuccgaaag

SEQ ID NO: 298929 - RNA, 20 nt, Artificial Sequence
  Synthetic
cgaauuaggcacuccgaaag

SEQ ID NO: 298930 - RNA, 21 nt, Artificial Sequence
  Synthetic
acgaauuaggcacuccgaaag

SEQ ID NO: 298931 - RNA, 22 nt, Artificial Sequence
  Synthetic
cacgaauuaggcacuccgaaag

SEQ ID NO: 298932 - RNA, 23 nt, Artificial Sequence
  Synthetic
acacgaauuaggcacuccgaaag

SEQ ID NO: 298933 - RNA, 24 nt, Artificial Sequence
  Synthetic
aacacgaauuaggcacuccgaaag

SEQ ID NO: 298934 - RNA, 18 nt, Artificial Sequence
  Synthetic
cauuucacauggcgaaag

SEQ ID NO: 298935 - RNA, 19 nt, Artificial Sequence
  Synthetic
gcauuucacauggcgaaag

SEQ ID NO: 298936 - RNA, 20 nt, Artificial Sequence
  Synthetic
ggcauuucacauggcgaaag

SEQ ID NO: 298937 - RNA, 21 nt, Artificial Sequence
  Synthetic
aggcauuucacauggcgaaag

SEQ ID NO: 298938 - RNA, 22 nt, Artificial Sequence
  Synthetic
uaggcauuucacauggcgaaag

SEQ ID NO: 298939 - RNA, 23 nt, Artificial Sequence
  Synthetic
guaggcauuucacauggcgaaag

SEQ ID NO: 298940 - RNA, 24 nt, Artificial Sequence
  Synthetic
uguaggcauuucacauggcgaaag

SEQ ID NO: 298941 - RNA, 18 nt, Artificial Sequence
  Synthetic
auaaccucaaaaggaaag

SEQ ID NO: 298942 - RNA, 19 nt, Artificial Sequence
  Synthetic
gauaaccucaaaaggaaag

SEQ ID NO: 298943 - RNA, 20 nt, Artificial Sequence
  Synthetic
ugauaaccucaaaaggaaag

SEQ ID NO: 298944 - RNA, 21 nt, Artificial Sequence
  Synthetic
augauaaccucaaaaggaaag

SEQ ID NO: 298945 - RNA, 22 nt, Artificial Sequence
  Synthetic
aaugauaaccucaaaaggaaag

SEQ ID NO: 298946 - RNA, 23 nt, Artificial Sequence
  Synthetic
uaaugauaaccucaaaaggaaag

SEQ ID NO: 298947 - RNA, 24 nt, Artificial Sequence
  Synthetic
guaaugauaaccucaaaaggaaag

SEQ ID NO: 298948 - RNA, 18 nt, Artificial Sequence
  Synthetic
accagaagaaaaggaaag

SEQ ID NO: 298949 - RNA, 19 nt, Artificial Sequence
  Synthetic
gaccagaagaaaaggaaag

SEQ ID NO: 298950 - RNA, 20 nt, Artificial Sequence
  Synthetic
ugaccagaagaaaaggaaag

SEQ ID NO: 298951 - RNA, 21 nt, Artificial Sequence
  Synthetic
augaccagaagaaaaggaaag

SEQ ID NO: 298952 - RNA, 22 nt, Artificial Sequence
  Synthetic
caugaccagaagaaaaggaaag

SEQ ID NO: 298953 - RNA, 23 nt, Artificial Sequence
  Synthetic
ucaugaccagaagaaaaggaaag

SEQ ID NO: 298954 - RNA, 24 nt, Artificial Sequence
  Synthetic
aucaugaccagaagaaaaggaaag

SEQ ID NO: 298955 - RNA, 18 nt, Artificial Sequence
  Synthetic
ggauccagcaaaggaaag

SEQ ID NO: 298956 - RNA, 19 nt, Artificial Sequence
  Synthetic
aggauccagcaaaggaaag

SEQ ID NO: 298957 - RNA, 20 nt, Artificial Sequence
  Synthetic
aaggauccagcaaaggaaag

SEQ ID NO: 298958 - RNA, 21 nt, Artificial Sequence
  Synthetic
gaaggauccagcaaaggaaag

SEQ ID NO: 298959 - RNA, 22 nt, Artificial Sequence
  Synthetic
agaaggauccagcaaaggaaag

SEQ ID NO: 298960 - RNA, 23 nt, Artificial Sequence
  Synthetic
gagaaggauccagcaaaggaaag

SEQ ID NO: 298961 - RNA, 24 nt, Artificial Sequence
  Synthetic
ugagaaggauccagcaaaggaaag

SEQ ID NO: 298962 - RNA, 18 nt, Artificial Sequence
  Synthetic
uagaaggggaaaggaaag

SEQ ID NO: 298963 - RNA, 19 nt, Artificial Sequence
  Synthetic
auagaaggggaaaggaaag

SEQ ID NO: 298964 - RNA, 20 nt, Artificial Sequence
  Synthetic
aauagaaggggaaaggaaag

SEQ ID NO: 298965 - RNA, 21 nt, Artificial Sequence
  Synthetic
uaauagaaggggaaaggaaag

SEQ ID NO: 298966 - RNA, 22 nt, Artificial Sequence
  Synthetic
cuaauagaaggggaaaggaaag

SEQ ID NO: 298967 - RNA, 23 nt, Artificial Sequence
  Synthetic
acuaauagaaggggaaaggaaag

SEQ ID NO: 298968 - RNA, 24 nt, Artificial Sequence
  Synthetic
gacuaauagaaggggaaaggaaag

SEQ ID NO: 298969 - RNA, 18 nt, Artificial Sequence
  Synthetic
gaguguuugaaaggaaag

SEQ ID NO: 298970 - RNA, 19 nt, Artificial Sequence
  Synthetic
ggaguguuugaaaggaaag

SEQ ID NO: 298971 - RNA, 20 nt, Artificial Sequence
  Synthetic
gggaguguuugaaaggaaag

SEQ ID NO: 298972 - RNA, 21 nt, Artificial Sequence
  Synthetic
ugggaguguuugaaaggaaag

SEQ ID NO: 298973 - RNA, 22 nt, Artificial Sequence
  Synthetic
gugggaguguuugaaaggaaag

SEQ ID NO: 298974 - RNA, 23 nt, Artificial Sequence
  Synthetic
agugggaguguuugaaaggaaag

SEQ ID NO: 298975 - RNA, 24 nt, Artificial Sequence
  Synthetic
aagugggaguguuugaaaggaaag

SEQ ID NO: 298976 - RNA, 18 nt, Artificial Sequence
  Synthetic
ggaagagaggaaggaaag

SEQ ID NO: 298977 - RNA, 19 nt, Artificial Sequence
  Synthetic
aggaagagaggaaggaaag

SEQ ID NO: 298978 - RNA, 20 nt, Artificial Sequence
  Synthetic
aaggaagagaggaaggaaag

SEQ ID NO: 298979 - RNA, 21 nt, Artificial Sequence
  Synthetic
gaaggaagagaggaaggaaag

SEQ ID NO: 298980 - RNA, 22 nt, Artificial Sequence
  Synthetic
agaaggaagagaggaaggaaag

SEQ ID NO: 298981 - RNA, 23 nt, Artificial Sequence
  Synthetic
aagaaggaagagaggaaggaaag

SEQ ID NO: 298982 - RNA, 24 nt, Artificial Sequence
  Synthetic
aaagaaggaagagaggaaggaaag

SEQ ID NO: 298983 - RNA, 18 nt, Artificial Sequence
  Synthetic
guuaaugaaacaggaaag

SEQ ID NO: 298984 - RNA, 19 nt, Artificial Sequence
  Synthetic
gguuaaugaaacaggaaag

SEQ ID NO: 298985 - RNA, 20 nt, Artificial Sequence
  Synthetic
ggguuaaugaaacaggaaag

SEQ ID NO: 298986 - RNA, 21 nt, Artificial Sequence
  Synthetic
aggguuaaugaaacaggaaag

SEQ ID NO: 298987 - RNA, 22 nt, Artificial Sequence
  Synthetic
uaggguuaaugaaacaggaaag

SEQ ID NO: 298988 - RNA, 23 nt, Artificial Sequence
  Synthetic
auaggguuaaugaaacaggaaag

SEQ ID NO: 298989 - RNA, 24 nt, Artificial Sequence
  Synthetic
aauaggguuaaugaaacaggaaag

SEQ ID NO: 298990 - RNA, 18 nt, Artificial Sequence
  Synthetic
aaacuuuagucaggaaag

SEQ ID NO: 298991 - RNA, 19 nt, Artificial Sequence
  Synthetic
gaaacuuuagucaggaaag

SEQ ID NO: 298992 - RNA, 20 nt, Artificial Sequence
  Synthetic
agaaacuuuagucaggaaag

SEQ ID NO: 298993 - RNA, 21 nt, Artificial Sequence
  Synthetic
aagaaacuuuagucaggaaag

SEQ ID NO: 298994 - RNA, 22 nt, Artificial Sequence
  Synthetic
caagaaacuuuagucaggaaag

SEQ ID NO: 298995 - RNA, 23 nt, Artificial Sequence
  Synthetic
gcaagaaacuuuagucaggaaag

SEQ ID NO: 298996 - RNA, 24 nt, Artificial Sequence
  Synthetic
ugcaagaaacuuuagucaggaaag

SEQ ID NO: 298997 - RNA, 18 nt, Artificial Sequence
  Synthetic
gguauaguuucaggaaag

SEQ ID NO: 298998 - RNA, 19 nt, Artificial Sequence
  Synthetic
ggguauaguuucaggaaag

SEQ ID NO: 298999 - RNA, 20 nt, Artificial Sequence
  Synthetic
gggguauaguuucaggaaag

SEQ ID NO: 299000 - RNA, 21 nt, Artificial Sequence
  Synthetic
ggggguauaguuucaggaaag

SEQ ID NO: 299001 - RNA, 22 nt, Artificial Sequence
  Synthetic
aggggguauaguuucaggaaag

SEQ ID NO: 299002 - RNA, 23 nt, Artificial Sequence
  Synthetic
aaggggguauaguuucaggaaag

SEQ ID NO: 299003 - RNA, 24 nt, Artificial Sequence
  Synthetic
aaaggggguauaguuucaggaaag

SEQ ID NO: 299004 - RNA, 18 nt, Artificial Sequence
  Synthetic
gagaaguacugaggaaag

SEQ ID NO: 299005 - RNA, 19 nt, Artificial Sequence
  Synthetic
ggagaaguacugaggaaag

SEQ ID NO: 299006 - RNA, 20 nt, Artificial Sequence
  Synthetic
aggagaaguacugaggaaag

SEQ ID NO: 299007 - RNA, 21 nt, Artificial Sequence
  Synthetic
aaggagaaguacugaggaaag

SEQ ID NO: 299008 - RNA, 22 nt, Artificial Sequence
  Synthetic
gaaggagaaguacugaggaaag

SEQ ID NO: 299009 - RNA, 23 nt, Artificial Sequence
  Synthetic
ggaaggagaaguacugaggaaag

SEQ ID NO: 299010 - RNA, 24 nt, Artificial Sequence
  Synthetic
aggaaggagaaguacugaggaaag

SEQ ID NO: 299011 - RNA, 18 nt, Artificial Sequence
  Synthetic
aaagaggagugaggaaag

SEQ ID NO: 299012 - RNA, 19 nt, Artificial Sequence
  Synthetic
aaaagaggagugaggaaag

SEQ ID NO: 299013 - RNA, 20 nt, Artificial Sequence
  Synthetic
caaaagaggagugaggaaag

SEQ ID NO: 299014 - RNA, 21 nt, Artificial Sequence
  Synthetic
acaaaagaggagugaggaaag

SEQ ID NO: 299015 - RNA, 22 nt, Artificial Sequence
  Synthetic
gacaaaagaggagugaggaaag

SEQ ID NO: 299016 - RNA, 23 nt, Artificial Sequence
  Synthetic
ggacaaaagaggagugaggaaag

SEQ ID NO: 299017 - RNA, 24 nt, Artificial Sequence
  Synthetic
aggacaaaagaggagugaggaaag

SEQ ID NO: 299018 - RNA, 18 nt, Artificial Sequence
  Synthetic
uuggccaggugaggaaag

SEQ ID NO: 299019 - RNA, 19 nt, Artificial Sequence
  Synthetic
auuggccaggugaggaaag

SEQ ID NO: 299020 - RNA, 20 nt, Artificial Sequence
  Synthetic
aauuggccaggugaggaaag

SEQ ID NO: 299021 - RNA, 21 nt, Artificial Sequence
  Synthetic
aaauuggccaggugaggaaag

SEQ ID NO: 299022 - RNA, 22 nt, Artificial Sequence
  Synthetic
aaaauuggccaggugaggaaag

SEQ ID NO: 299023 - RNA, 23 nt, Artificial Sequence
  Synthetic
uaaaauuggccaggugaggaaag

SEQ ID NO: 299024 - RNA, 24 nt, Artificial Sequence
  Synthetic
uuaaaauuggccaggugaggaaag

SEQ ID NO: 299025 - RNA, 18 nt, Artificial Sequence
  Synthetic
ucagugaaaauaggaaag

SEQ ID NO: 299026 - RNA, 19 nt, Artificial Sequence
  Synthetic
uucagugaaaauaggaaag

SEQ ID NO: 299027 - RNA, 20 nt, Artificial Sequence
  Synthetic
cuucagugaaaauaggaaag

SEQ ID NO: 299028 - RNA, 21 nt, Artificial Sequence
  Synthetic
ccuucagugaaaauaggaaag

SEQ ID NO: 299029 - RNA, 22 nt, Artificial Sequence
  Synthetic
cccuucagugaaaauaggaaag

SEQ ID NO: 299030 - RNA, 23 nt, Artificial Sequence
  Synthetic
ucccuucagugaaaauaggaaag

SEQ ID NO: 299031 - RNA, 24 nt, Artificial Sequence
  Synthetic
gucccuucagugaaaauaggaaag

SEQ ID NO: 299032 - RNA, 18 nt, Artificial Sequence
  Synthetic
gagguaauuauaggaaag

SEQ ID NO: 299033 - RNA, 19 nt, Artificial Sequence
  Synthetic
agagguaauuauaggaaag

SEQ ID NO: 299034 - RNA, 20 nt, Artificial Sequence
  Synthetic
aagagguaauuauaggaaag

SEQ ID NO: 299035 - RNA, 21 nt, Artificial Sequence
  Synthetic
gaagagguaauuauaggaaag

SEQ ID NO: 299036 - RNA, 22 nt, Artificial Sequence
  Synthetic
ggaagagguaauuauaggaaag

SEQ ID NO: 299037 - RNA, 23 nt, Artificial Sequence
  Synthetic
uggaagagguaauuauaggaaag

SEQ ID NO: 299038 - RNA, 24 nt, Artificial Sequence
  Synthetic
guggaagagguaauuauaggaaag

SEQ ID NO: 299039 - RNA, 18 nt, Artificial Sequence
  Synthetic
aaugggaaguuaggaaag

SEQ ID NO: 299040 - RNA, 19 nt, Artificial Sequence
  Synthetic
uaaugggaaguuaggaaag

SEQ ID NO: 299041 - RNA, 20 nt, Artificial Sequence
  Synthetic
guaaugggaaguuaggaaag

SEQ ID NO: 299042 - RNA, 21 nt, Artificial Sequence
  Synthetic
aguaaugggaaguuaggaaag

SEQ ID NO: 299043 - RNA, 22 nt, Artificial Sequence
  Synthetic
uaguaaugggaaguuaggaaag

SEQ ID NO: 299044 - RNA, 23 nt, Artificial Sequence
  Synthetic
auaguaaugggaaguuaggaaag

SEQ ID NO: 299045 - RNA, 24 nt, Artificial Sequence
  Synthetic
uauaguaaugggaaguuaggaaag

SEQ ID NO: 299046 - RNA, 18 nt, Artificial Sequence
  Synthetic
agccugagcaacggaaag

SEQ ID NO: 299047 - RNA, 19 nt, Artificial Sequence
  Synthetic
uagccugagcaacggaaag

SEQ ID NO: 299048 - RNA, 20 nt, Artificial Sequence
  Synthetic
uuagccugagcaacggaaag

SEQ ID NO: 299049 - RNA, 21 nt, Artificial Sequence
  Synthetic
uuuagccugagcaacggaaag

SEQ ID NO: 299050 - RNA, 22 nt, Artificial Sequence
  Synthetic
uuuuagccugagcaacggaaag

SEQ ID NO: 299051 - RNA, 23 nt, Artificial Sequence
  Synthetic
uuuuuagccugagcaacggaaag

SEQ ID NO: 299052 - RNA, 24 nt, Artificial Sequence
  Synthetic
auuuuuagccugagcaacggaaag

SEQ ID NO: 299053 - RNA, 18 nt, Artificial Sequence
  Synthetic
ccugccaaggagggaaag

SEQ ID NO: 299054 - RNA, 19 nt, Artificial Sequence
  Synthetic
uccugccaaggagggaaag

SEQ ID NO: 299055 - RNA, 20 nt, Artificial Sequence
  Synthetic
auccugccaaggagggaaag

SEQ ID NO: 299056 - RNA, 21 nt, Artificial Sequence
  Synthetic
aauccugccaaggagggaaag

SEQ ID NO: 299057 - RNA, 22 nt, Artificial Sequence
  Synthetic
gaauccugccaaggagggaaag

SEQ ID NO: 299058 - RNA, 23 nt, Artificial Sequence
  Synthetic
ugaauccugccaaggagggaaag

SEQ ID NO: 299059 - RNA, 24 nt, Artificial Sequence
  Synthetic
cugaauccugccaaggagggaaag

SEQ ID NO: 299060 - RNA, 18 nt, Artificial Sequence
  Synthetic
uacaugaaaaggggaaag

SEQ ID NO: 299061 - RNA, 19 nt, Artificial Sequence
  Synthetic
cuacaugaaaaggggaaag

SEQ ID NO: 299062 - RNA, 20 nt, Artificial Sequence
  Synthetic
ucuacaugaaaaggggaaag

SEQ ID NO: 299063 - RNA, 21 nt, Artificial Sequence
  Synthetic
uucuacaugaaaaggggaaag

SEQ ID NO: 299064 - RNA, 22 nt, Artificial Sequence
  Synthetic
uuucuacaugaaaaggggaaag

SEQ ID NO: 299065 - RNA, 23 nt, Artificial Sequence
  Synthetic
cuuucuacaugaaaaggggaaag

SEQ ID NO: 299066 - RNA, 24 nt, Artificial Sequence
  Synthetic
ccuuucuacaugaaaaggggaaag

SEQ ID NO: 299067 - RNA, 18 nt, Artificial Sequence
  Synthetic
accaagacacugggaaag

SEQ ID NO: 299068 - RNA, 19 nt, Artificial Sequence
  Synthetic
aaccaagacacugggaaag

SEQ ID NO: 299069 - RNA, 20 nt, Artificial Sequence
  Synthetic
caaccaagacacugggaaag

SEQ ID NO: 299070 - RNA, 21 nt, Artificial Sequence
  Synthetic
ucaaccaagacacugggaaag

SEQ ID NO: 299071 - RNA, 22 nt, Artificial Sequence
  Synthetic
aucaaccaagacacugggaaag

SEQ ID NO: 299072 - RNA, 23 nt, Artificial Sequence
  Synthetic
uaucaaccaagacacugggaaag

SEQ ID NO: 299073 - RNA, 24 nt, Artificial Sequence
  Synthetic
auaucaaccaagacacugggaaag

SEQ ID NO: 299074 - RNA, 18 nt, Artificial Sequence
  Synthetic
uuuaugugccugggaaag

SEQ ID NO: 299075 - RNA, 19 nt, Artificial Sequence
  Synthetic
cuuuaugugccugggaaag

SEQ ID NO: 299076 - RNA, 20 nt, Artificial Sequence
  Synthetic
acuuuaugugccugggaaag

SEQ ID NO: 299077 - RNA, 21 nt, Artificial Sequence
  Synthetic
aacuuuaugugccugggaaag

SEQ ID NO: 299078 - RNA, 22 nt, Artificial Sequence
  Synthetic
gaacuuuaugugccugggaaag

SEQ ID NO: 299079 - RNA, 23 nt, Artificial Sequence
  Synthetic
ugaacuuuaugugccugggaaag

SEQ ID NO: 299080 - RNA, 24 nt, Artificial Sequence
  Synthetic
augaacuuuaugugccugggaaag

SEQ ID NO: 299081 - RNA, 18 nt, Artificial Sequence
  Synthetic
gaguaacugaauggaaag

SEQ ID NO: 299082 - RNA, 19 nt, Artificial Sequence
  Synthetic
agaguaacugaauggaaag

SEQ ID NO: 299083 - RNA, 20 nt, Artificial Sequence
  Synthetic
gagaguaacugaauggaaag

SEQ ID NO: 299084 - RNA, 21 nt, Artificial Sequence
  Synthetic
ggagaguaacugaauggaaag

SEQ ID NO: 299085 - RNA, 22 nt, Artificial Sequence
  Synthetic
aggagaguaacugaauggaaag

SEQ ID NO: 299086 - RNA, 23 nt, Artificial Sequence
  Synthetic
aaggagaguaacugaauggaaag

SEQ ID NO: 299087 - RNA, 24 nt, Artificial Sequence
  Synthetic
aaaggagaguaacugaauggaaag

SEQ ID NO: 299088 - RNA, 18 nt, Artificial Sequence
  Synthetic
ugcuuacugaguggaaag

SEQ ID NO: 299089 - RNA, 19 nt, Artificial Sequence
  Synthetic
augcuuacugaguggaaag

SEQ ID NO: 299090 - RNA, 20 nt, Artificial Sequence
  Synthetic
uaugcuuacugaguggaaag

SEQ ID NO: 299091 - RNA, 21 nt, Artificial Sequence
  Synthetic
auaugcuuacugaguggaaag

SEQ ID NO: 299092 - RNA, 22 nt, Artificial Sequence
  Synthetic
aauaugcuuacugaguggaaag

SEQ ID NO: 299093 - RNA, 23 nt, Artificial Sequence
  Synthetic
caauaugcuuacugaguggaaag

SEQ ID NO: 299094 - RNA, 24 nt, Artificial Sequence
  Synthetic
gcaauaugcuuacugaguggaaag

SEQ ID NO: 299095 - RNA, 18 nt, Artificial Sequence
  Synthetic
aaguaauuauguggaaag

SEQ ID NO: 299096 - RNA, 19 nt, Artificial Sequence
  Synthetic
aaaguaauuauguggaaag

SEQ ID NO: 299097 - RNA, 20 nt, Artificial Sequence
  Synthetic
gaaaguaauuauguggaaag

SEQ ID NO: 299098 - RNA, 21 nt, Artificial Sequence
  Synthetic
ggaaaguaauuauguggaaag

SEQ ID NO: 299099 - RNA, 22 nt, Artificial Sequence
  Synthetic
uggaaaguaauuauguggaaag

SEQ ID NO: 299100 - RNA, 23 nt, Artificial Sequence
  Synthetic
uuggaaaguaauuauguggaaag

SEQ ID NO: 299101 - RNA, 24 nt, Artificial Sequence
  Synthetic
cuuggaaaguaauuauguggaaag

SEQ ID NO: 299102 - RNA, 18 nt, Artificial Sequence
  Synthetic
ucuggcugucuuggaaag

SEQ ID NO: 299103 - RNA, 19 nt, Artificial Sequence
  Synthetic
gucuggcugucuuggaaag

SEQ ID NO: 299104 - RNA, 20 nt, Artificial Sequence
  Synthetic
ggucuggcugucuuggaaag

SEQ ID NO: 299105 - RNA, 21 nt, Artificial Sequence
  Synthetic
gggucuggcugucuuggaaag

SEQ ID NO: 299106 - RNA, 22 nt, Artificial Sequence
  Synthetic
ugggucuggcugucuuggaaag

SEQ ID NO: 299107 - RNA, 23 nt, Artificial Sequence
  Synthetic
uugggucuggcugucuuggaaag

SEQ ID NO: 299108 - RNA, 24 nt, Artificial Sequence
  Synthetic
cuugggucuggcugucuuggaaag

SEQ ID NO: 299109 - RNA, 18 nt, Artificial Sequence
  Synthetic
caaaaugaagaaugaaag

SEQ ID NO: 299110 - RNA, 19 nt, Artificial Sequence
  Synthetic
ccaaaaugaagaaugaaag

SEQ ID NO: 299111 - RNA, 20 nt, Artificial Sequence
  Synthetic
cccaaaaugaagaaugaaag

SEQ ID NO: 299112 - RNA, 21 nt, Artificial Sequence
  Synthetic
ucccaaaaugaagaaugaaag

SEQ ID NO: 299113 - RNA, 22 nt, Artificial Sequence
  Synthetic
gucccaaaaugaagaaugaaag

SEQ ID NO: 299114 - RNA, 23 nt, Artificial Sequence
  Synthetic
agucccaaaaugaagaaugaaag

SEQ ID NO: 299115 - RNA, 24 nt, Artificial Sequence
  Synthetic
cagucccaaaaugaagaaugaaag

SEQ ID NO: 299116 - RNA, 18 nt, Artificial Sequence
  Synthetic
uucaaaggagaaugaaag

SEQ ID NO: 299117 - RNA, 19 nt, Artificial Sequence
  Synthetic
uuucaaaggagaaugaaag

SEQ ID NO: 299118 - RNA, 20 nt, Artificial Sequence
  Synthetic
uuuucaaaggagaaugaaag

SEQ ID NO: 299119 - RNA, 21 nt, Artificial Sequence
  Synthetic
auuuucaaaggagaaugaaag

SEQ ID NO: 299120 - RNA, 22 nt, Artificial Sequence
  Synthetic
gauuuucaaaggagaaugaaag

SEQ ID NO: 299121 - RNA, 23 nt, Artificial Sequence
  Synthetic
ggauuuucaaaggagaaugaaag

SEQ ID NO: 299122 - RNA, 24 nt, Artificial Sequence
  Synthetic
uggauuuucaaaggagaaugaaag

SEQ ID NO: 299123 - RNA, 18 nt, Artificial Sequence
  Synthetic
gaaagaagauaaugaaag

SEQ ID NO: 299124 - RNA, 19 nt, Artificial Sequence
  Synthetic
ugaaagaagauaaugaaag

SEQ ID NO: 299125 - RNA, 20 nt, Artificial Sequence
  Synthetic
augaaagaagauaaugaaag

SEQ ID NO: 299126 - RNA, 21 nt, Artificial Sequence
  Synthetic
aaugaaagaagauaaugaaag

SEQ ID NO: 299127 - RNA, 22 nt, Artificial Sequence
  Synthetic
aaaugaaagaagauaaugaaag

SEQ ID NO: 299128 - RNA, 23 nt, Artificial Sequence
  Synthetic
gaaaugaaagaagauaaugaaag

SEQ ID NO: 299129 - RNA, 24 nt, Artificial Sequence
  Synthetic
agaaaugaaagaagauaaugaaag

SEQ ID NO: 299130 - RNA, 18 nt, Artificial Sequence
  Synthetic
ucugcuucuagaugaaag

SEQ ID NO: 299131 - RNA, 19 nt, Artificial Sequence
  Synthetic
gucugcuucuagaugaaag

SEQ ID NO: 299132 - RNA, 20 nt, Artificial Sequence
  Synthetic
ugucugcuucuagaugaaag

SEQ ID NO: 299133 - RNA, 21 nt, Artificial Sequence
  Synthetic
gugucugcuucuagaugaaag

SEQ ID NO: 299134 - RNA, 22 nt, Artificial Sequence
  Synthetic
cgugucugcuucuagaugaaag

SEQ ID NO: 299135 - RNA, 23 nt, Artificial Sequence
  Synthetic
acgugucugcuucuagaugaaag

SEQ ID NO: 299136 - RNA, 24 nt, Artificial Sequence
  Synthetic
aacgugucugcuucuagaugaaag

SEQ ID NO: 299137 - RNA, 18 nt, Artificial Sequence
  Synthetic
ugguuguuaugaugaaag

SEQ ID NO: 299138 - RNA, 19 nt, Artificial Sequence
  Synthetic
uugguuguuaugaugaaag

SEQ ID NO: 299139 - RNA, 20 nt, Artificial Sequence
  Synthetic
uuugguuguuaugaugaaag

SEQ ID NO: 299140 - RNA, 21 nt, Artificial Sequence
  Synthetic
uuuugguuguuaugaugaaag

SEQ ID NO: 299141 - RNA, 22 nt, Artificial Sequence
  Synthetic
uuuuugguuguuaugaugaaag

SEQ ID NO: 299142 - RNA, 23 nt, Artificial Sequence
  Synthetic
auuuuugguuguuaugaugaaag

SEQ ID NO: 299143 - RNA, 24 nt, Artificial Sequence
  Synthetic
cauuuuugguuguuaugaugaaag

SEQ ID NO: 299144 - RNA, 18 nt, Artificial Sequence
  Synthetic
agaaauacuugaugaaag

SEQ ID NO: 299145 - RNA, 19 nt, Artificial Sequence
  Synthetic
aagaaauacuugaugaaag

SEQ ID NO: 299146 - RNA, 20 nt, Artificial Sequence
  Synthetic
caagaaauacuugaugaaag

SEQ ID NO: 299147 - RNA, 21 nt, Artificial Sequence
  Synthetic
ucaagaaauacuugaugaaag

SEQ ID NO: 299148 - RNA, 22 nt, Artificial Sequence
  Synthetic
uucaagaaauacuugaugaaag

SEQ ID NO: 299149 - RNA, 23 nt, Artificial Sequence
  Synthetic
auucaagaaauacuugaugaaag

SEQ ID NO: 299150 - RNA, 24 nt, Artificial Sequence
  Synthetic
gauucaagaaauacuugaugaaag

SEQ ID NO: 299151 - RNA, 18 nt, Artificial Sequence
  Synthetic
cagaaggaaauaugaaag

SEQ ID NO: 299152 - RNA, 19 nt, Artificial Sequence
  Synthetic
gcagaaggaaauaugaaag

SEQ ID NO: 299153 - RNA, 20 nt, Artificial Sequence
  Synthetic
ugcagaaggaaauaugaaag

SEQ ID NO: 299154 - RNA, 21 nt, Artificial Sequence
  Synthetic
cugcagaaggaaauaugaaag

SEQ ID NO: 299155 - RNA, 22 nt, Artificial Sequence
  Synthetic
ucugcagaaggaaauaugaaag

SEQ ID NO: 299156 - RNA, 23 nt, Artificial Sequence
  Synthetic
aucugcagaaggaaauaugaaag

SEQ ID NO: 299157 - RNA, 24 nt, Artificial Sequence
  Synthetic
uaucugcagaaggaaauaugaaag

SEQ ID NO: 299158 - RNA, 18 nt, Artificial Sequence
  Synthetic
gaaaaauggaacugaaag

SEQ ID NO: 299159 - RNA, 19 nt, Artificial Sequence
  Synthetic
agaaaaauggaacugaaag

SEQ ID NO: 299160 - RNA, 20 nt, Artificial Sequence
  Synthetic
aagaaaaauggaacugaaag

SEQ ID NO: 299161 - RNA, 21 nt, Artificial Sequence
  Synthetic
uaagaaaaauggaacugaaag

SEQ ID NO: 299162 - RNA, 22 nt, Artificial Sequence
  Synthetic
auaagaaaaauggaacugaaag

SEQ ID NO: 299163 - RNA, 23 nt, Artificial Sequence
  Synthetic
aauaagaaaaauggaacugaaag

SEQ ID NO: 299164 - RNA, 24 nt, Artificial Sequence
  Synthetic
caauaagaaaaauggaacugaaag

SEQ ID NO: 299165 - RNA, 18 nt, Artificial Sequence
  Synthetic
guuucaaaucacugaaag

SEQ ID NO: 299166 - RNA, 19 nt, Artificial Sequence
  Synthetic
aguuucaaaucacugaaag

SEQ ID NO: 299167 - RNA, 20 nt, Artificial Sequence
  Synthetic
gaguuucaaaucacugaaag

SEQ ID NO: 299168 - RNA, 21 nt, Artificial Sequence
  Synthetic
ggaguuucaaaucacugaaag

SEQ ID NO: 299169 - RNA, 22 nt, Artificial Sequence
  Synthetic
uggaguuucaaaucacugaaag

SEQ ID NO: 299170 - RNA, 23 nt, Artificial Sequence
  Synthetic
cuggaguuucaaaucacugaaag

SEQ ID NO: 299171 - RNA, 24 nt, Artificial Sequence
  Synthetic
acuggaguuucaaaucacugaaag

SEQ ID NO: 299172 - RNA, 18 nt, Artificial Sequence
  Synthetic
agaccuauaaucugaaag

SEQ ID NO: 299173 - RNA, 19 nt, Artificial Sequence
  Synthetic
aagaccuauaaucugaaag

SEQ ID NO: 299174 - RNA, 20 nt, Artificial Sequence
  Synthetic
uaagaccuauaaucugaaag

SEQ ID NO: 299175 - RNA, 21 nt, Artificial Sequence
  Synthetic
uuaagaccuauaaucugaaag

SEQ ID NO: 299176 - RNA, 22 nt, Artificial Sequence
  Synthetic
uuuaagaccuauaaucugaaag

SEQ ID NO: 299177 - RNA, 23 nt, Artificial Sequence
  Synthetic
uuuuaagaccuauaaucugaaag

SEQ ID NO: 299178 - RNA, 24 nt, Artificial Sequence
  Synthetic
uuuuuaagaccuauaaucugaaag

SEQ ID NO: 299179 - RNA, 18 nt, Artificial Sequence
  Synthetic
ggaacauuaaagugaaag

SEQ ID NO: 299180 - RNA, 19 nt, Artificial Sequence
  Synthetic
gggaacauuaaagugaaag

SEQ ID NO: 299181 - RNA, 20 nt, Artificial Sequence
  Synthetic
agggaacauuaaagugaaag

SEQ ID NO: 299182 - RNA, 21 nt, Artificial Sequence
  Synthetic
gagggaacauuaaagugaaag

SEQ ID NO: 299183 - RNA, 22 nt, Artificial Sequence
  Synthetic
cgagggaacauuaaagugaaag

SEQ ID NO: 299184 - RNA, 23 nt, Artificial Sequence
  Synthetic
gcgagggaacauuaaagugaaag

SEQ ID NO: 299185 - RNA, 24 nt, Artificial Sequence
  Synthetic
ggcgagggaacauuaaagugaaag

SEQ ID NO: 299186 - RNA, 18 nt, Artificial Sequence
  Synthetic
uacuucaucucgugaaag

SEQ ID NO: 299187 - RNA, 19 nt, Artificial Sequence
  Synthetic
uuacuucaucucgugaaag

SEQ ID NO: 299188 - RNA, 20 nt, Artificial Sequence
  Synthetic
auuacuucaucucgugaaag

SEQ ID NO: 299189 - RNA, 21 nt, Artificial Sequence
  Synthetic
aauuacuucaucucgugaaag

SEQ ID NO: 299190 - RNA, 22 nt, Artificial Sequence
  Synthetic
aaauuacuucaucucgugaaag

SEQ ID NO: 299191 - RNA, 23 nt, Artificial Sequence
  Synthetic
gaaauuacuucaucucgugaaag

SEQ ID NO: 299192 - RNA, 24 nt, Artificial Sequence
  Synthetic
ggaaauuacuucaucucgugaaag

SEQ ID NO: 299193 - RNA, 18 nt, Artificial Sequence
  Synthetic
ucaagcagaaggugaaag

SEQ ID NO: 299194 - RNA, 19 nt, Artificial Sequence
  Synthetic
gucaagcagaaggugaaag

SEQ ID NO: 299195 - RNA, 20 nt, Artificial Sequence
  Synthetic
ugucaagcagaaggugaaag

SEQ ID NO: 299196 - RNA, 21 nt, Artificial Sequence
  Synthetic
uugucaagcagaaggugaaag

SEQ ID NO: 299197 - RNA, 22 nt, Artificial Sequence
  Synthetic
guugucaagcagaaggugaaag

SEQ ID NO: 299198 - RNA, 23 nt, Artificial Sequence
  Synthetic
aguugucaagcagaaggugaaag

SEQ ID NO: 299199 - RNA, 24 nt, Artificial Sequence
  Synthetic
uaguugucaagcagaaggugaaag

SEQ ID NO: 299200 - RNA, 18 nt, Artificial Sequence
  Synthetic
agaucucagcugugaaag

SEQ ID NO: 299201 - RNA, 19 nt, Artificial Sequence
  Synthetic
uagaucucagcugugaaag

SEQ ID NO: 299202 - RNA, 20 nt, Artificial Sequence
  Synthetic
cuagaucucagcugugaaag

SEQ ID NO: 299203 - RNA, 21 nt, Artificial Sequence
  Synthetic
ucuagaucucagcugugaaag

SEQ ID NO: 299204 - RNA, 22 nt, Artificial Sequence
  Synthetic
cucuagaucucagcugugaaag

SEQ ID NO: 299205 - RNA, 23 nt, Artificial Sequence
  Synthetic
gcucuagaucucagcugugaaag

SEQ ID NO: 299206 - RNA, 24 nt, Artificial Sequence
  Synthetic
ggcucuagaucucagcugugaaag

SEQ ID NO: 299207 - RNA, 18 nt, Artificial Sequence
  Synthetic
aacccccaaucuugaaag

SEQ ID NO: 299208 - RNA, 19 nt, Artificial Sequence
  Synthetic
caacccccaaucuugaaag

SEQ ID NO: 299209 - RNA, 20 nt, Artificial Sequence
  Synthetic
ccaacccccaaucuugaaag

SEQ ID NO: 299210 - RNA, 21 nt, Artificial Sequence
  Synthetic
accaacccccaaucuugaaag

SEQ ID NO: 299211 - RNA, 22 nt, Artificial Sequence
  Synthetic
caccaacccccaaucuugaaag

SEQ ID NO: 299212 - RNA, 23 nt, Artificial Sequence
  Synthetic
ccaccaacccccaaucuugaaag

SEQ ID NO: 299213 - RNA, 24 nt, Artificial Sequence
  Synthetic
cccaccaacccccaaucuugaaag

SEQ ID NO: 299214 - RNA, 18 nt, Artificial Sequence
  Synthetic
uuuuuuaaucguugaaag

SEQ ID NO: 299215 - RNA, 19 nt, Artificial Sequence
  Synthetic
auuuuuuaaucguugaaag

SEQ ID NO: 299216 - RNA, 20 nt, Artificial Sequence
  Synthetic
cauuuuuuaaucguugaaag

SEQ ID NO: 299217 - RNA, 21 nt, Artificial Sequence
  Synthetic
acauuuuuuaaucguugaaag

SEQ ID NO: 299218 - RNA, 22 nt, Artificial Sequence
  Synthetic
uacauuuuuuaaucguugaaag

SEQ ID NO: 299219 - RNA, 23 nt, Artificial Sequence
  Synthetic
auacauuuuuuaaucguugaaag

SEQ ID NO: 299220 - RNA, 24 nt, Artificial Sequence
  Synthetic
gauacauuuuuuaaucguugaaag

SEQ ID NO: 299221 - RNA, 18 nt, Artificial Sequence
  Synthetic
gaagguucuuguugaaag

SEQ ID NO: 299222 - RNA, 19 nt, Artificial Sequence
  Synthetic
ugaagguucuuguugaaag

SEQ ID NO: 299223 - RNA, 20 nt, Artificial Sequence
  Synthetic
gugaagguucuuguugaaag

SEQ ID NO: 299224 - RNA, 21 nt, Artificial Sequence
  Synthetic
ugugaagguucuuguugaaag

SEQ ID NO: 299225 - RNA, 22 nt, Artificial Sequence
  Synthetic
uugugaagguucuuguugaaag

SEQ ID NO: 299226 - RNA, 23 nt, Artificial Sequence
  Synthetic
auugugaagguucuuguugaaag

SEQ ID NO: 299227 - RNA, 24 nt, Artificial Sequence
  Synthetic
aauugugaagguucuuguugaaag

SEQ ID NO: 299228 - RNA, 18 nt, Artificial Sequence
  Synthetic
aaaacaagaauuugaaag

SEQ ID NO: 299229 - RNA, 19 nt, Artificial Sequence
  Synthetic
aaaaacaagaauuugaaag

SEQ ID NO: 299230 - RNA, 20 nt, Artificial Sequence
  Synthetic
gaaaaacaagaauuugaaag

SEQ ID NO: 299231 - RNA, 21 nt, Artificial Sequence
  Synthetic
agaaaaacaagaauuugaaag

SEQ ID NO: 299232 - RNA, 22 nt, Artificial Sequence
  Synthetic
cagaaaaacaagaauuugaaag

SEQ ID NO: 299233 - RNA, 23 nt, Artificial Sequence
  Synthetic
ccagaaaaacaagaauuugaaag

SEQ ID NO: 299234 - RNA, 24 nt, Artificial Sequence
  Synthetic
accagaaaaacaagaauuugaaag

SEQ ID NO: 299235 - RNA, 18 nt, Artificial Sequence
  Synthetic
uuauaaaccauuugaaag

SEQ ID NO: 299236 - RNA, 19 nt, Artificial Sequence
  Synthetic
uuuauaaaccauuugaaag

SEQ ID NO: 299237 - RNA, 20 nt, Artificial Sequence
  Synthetic
guuuauaaaccauuugaaag

SEQ ID NO: 299238 - RNA, 21 nt, Artificial Sequence
  Synthetic
gguuuauaaaccauuugaaag

SEQ ID NO: 299239 - RNA, 22 nt, Artificial Sequence
  Synthetic
ugguuuauaaaccauuugaaag

SEQ ID NO: 299240 - RNA, 23 nt, Artificial Sequence
  Synthetic
cugguuuauaaaccauuugaaag

SEQ ID NO: 299241 - RNA, 24 nt, Artificial Sequence
  Synthetic
acugguuuauaaaccauuugaaag

SEQ ID NO: 299242 - RNA, 18 nt, Artificial Sequence
  Synthetic
aguauugcuaaaauaaag

SEQ ID NO: 299243 - RNA, 19 nt, Artificial Sequence
  Synthetic
uaguauugcuaaaauaaag

SEQ ID NO: 299244 - RNA, 20 nt, Artificial Sequence
  Synthetic
auaguauugcuaaaauaaag

SEQ ID NO: 299245 - RNA, 21 nt, Artificial Sequence
  Synthetic
aauaguauugcuaaaauaaag

SEQ ID NO: 299246 - RNA, 22 nt, Artificial Sequence
  Synthetic
caauaguauugcuaaaauaaag

SEQ ID NO: 299247 - RNA, 23 nt, Artificial Sequence
  Synthetic
gcaauaguauugcuaaaauaaag

SEQ ID NO: 299248 - RNA, 24 nt, Artificial Sequence
  Synthetic
ugcaauaguauugcuaaaauaaag

SEQ ID NO: 299249 - RNA, 18 nt, Artificial Sequence
  Synthetic
aaagaaauggaaauaaag

SEQ ID NO: 299250 - RNA, 19 nt, Artificial Sequence
  Synthetic
uaaagaaauggaaauaaag

SEQ ID NO: 299251 - RNA, 20 nt, Artificial Sequence
  Synthetic
guaaagaaauggaaauaaag

SEQ ID NO: 299252 - RNA, 21 nt, Artificial Sequence
  Synthetic
uguaaagaaauggaaauaaag

SEQ ID NO: 299253 - RNA, 22 nt, Artificial Sequence
  Synthetic
auguaaagaaauggaaauaaag

SEQ ID NO: 299254 - RNA, 23 nt, Artificial Sequence
  Synthetic
uauguaaagaaauggaaauaaag

SEQ ID NO: 299255 - RNA, 24 nt, Artificial Sequence
  Synthetic
guauguaaagaaauggaaauaaag

SEQ ID NO: 299256 - RNA, 18 nt, Artificial Sequence
  Synthetic
uuaaaaagguaaauaaag

SEQ ID NO: 299257 - RNA, 19 nt, Artificial Sequence
  Synthetic
uuuaaaaagguaaauaaag

SEQ ID NO: 299258 - RNA, 20 nt, Artificial Sequence
  Synthetic
uuuuaaaaagguaaauaaag

SEQ ID NO: 299259 - RNA, 21 nt, Artificial Sequence
  Synthetic
cuuuuaaaaagguaaauaaag

SEQ ID NO: 299260 - RNA, 22 nt, Artificial Sequence
  Synthetic
ucuuuuaaaaagguaaauaaag

SEQ ID NO: 299261 - RNA, 23 nt, Artificial Sequence
  Synthetic
gucuuuuaaaaagguaaauaaag

SEQ ID NO: 299262 - RNA, 24 nt, Artificial Sequence
  Synthetic
agucuuuuaaaaagguaaauaaag

SEQ ID NO: 299263 - RNA, 18 nt, Artificial Sequence
  Synthetic
ccacuuaguugaauaaag

SEQ ID NO: 299264 - RNA, 19 nt, Artificial Sequence
  Synthetic
uccacuuaguugaauaaag

SEQ ID NO: 299265 - RNA, 20 nt, Artificial Sequence
  Synthetic
auccacuuaguugaauaaag

SEQ ID NO: 299266 - RNA, 21 nt, Artificial Sequence
  Synthetic
cauccacuuaguugaauaaag

SEQ ID NO: 299267 - RNA, 22 nt, Artificial Sequence
  Synthetic
ccauccacuuaguugaauaaag

SEQ ID NO: 299268 - RNA, 23 nt, Artificial Sequence
  Synthetic
accauccacuuaguugaauaaag

SEQ ID NO: 299269 - RNA, 24 nt, Artificial Sequence
  Synthetic
caccauccacuuaguugaauaaag

SEQ ID NO: 299270 - RNA, 18 nt, Artificial Sequence
  Synthetic
ugugaaauaauaauaaag

SEQ ID NO: 299271 - RNA, 19 nt, Artificial Sequence
  Synthetic
gugugaaauaauaauaaag

SEQ ID NO: 299272 - RNA, 20 nt, Artificial Sequence
  Synthetic
ugugugaaauaauaauaaag

SEQ ID NO: 299273 - RNA, 21 nt, Artificial Sequence
  Synthetic
uugugugaaauaauaauaaag

SEQ ID NO: 299274 - RNA, 22 nt, Artificial Sequence
  Synthetic
uuugugugaaauaauaauaaag

SEQ ID NO: 299275 - RNA, 23 nt, Artificial Sequence
  Synthetic
auuugugugaaauaauaauaaag

SEQ ID NO: 299276 - RNA, 24 nt, Artificial Sequence
  Synthetic
uauuugugugaaauaauaauaaag

SEQ ID NO: 299277 - RNA, 18 nt, Artificial Sequence
  Synthetic
auauuugauauaauaaag

SEQ ID NO: 299278 - RNA, 19 nt, Artificial Sequence
  Synthetic
gauauuugauauaauaaag

SEQ ID NO: 299279 - RNA, 20 nt, Artificial Sequence
  Synthetic
ugauauuugauauaauaaag

SEQ ID NO: 299280 - RNA, 21 nt, Artificial Sequence
  Synthetic
augauauuugauauaauaaag

SEQ ID NO: 299281 - RNA, 22 nt, Artificial Sequence
  Synthetic
aaugauauuugauauaauaaag

SEQ ID NO: 299282 - RNA, 23 nt, Artificial Sequence
  Synthetic
aaaugauauuugauauaauaaag

SEQ ID NO: 299283 - RNA, 24 nt, Artificial Sequence
  Synthetic
aaaaugauauuugauauaauaaag

SEQ ID NO: 299284 - RNA, 19 nt, Artificial Sequence
  Synthetic
gcuagccagacuaauaaag

SEQ ID NO: 299285 - RNA, 20 nt, Artificial Sequence
  Synthetic
ugcuagccagacuaauaaag

SEQ ID NO: 299286 - RNA, 21 nt, Artificial Sequence
  Synthetic
cugcuagccagacuaauaaag

SEQ ID NO: 299287 - RNA, 22 nt, Artificial Sequence
  Synthetic
acugcuagccagacuaauaaag

SEQ ID NO: 299288 - RNA, 23 nt, Artificial Sequence
  Synthetic
gacugcuagccagacuaauaaag

SEQ ID NO: 299289 - RNA, 24 nt, Artificial Sequence
  Synthetic
agacugcuagccagacuaauaaag

SEQ ID NO: 299290 - RNA, 18 nt, Artificial Sequence
  Synthetic
agcugaagccacauaaag

SEQ ID NO: 299291 - RNA, 19 nt, Artificial Sequence
  Synthetic
aagcugaagccacauaaag

SEQ ID NO: 299292 - RNA, 20 nt, Artificial Sequence
  Synthetic
caagcugaagccacauaaag

SEQ ID NO: 299293 - RNA, 21 nt, Artificial Sequence
  Synthetic
ccaagcugaagccacauaaag

SEQ ID NO: 299294 - RNA, 22 nt, Artificial Sequence
  Synthetic
accaagcugaagccacauaaag

SEQ ID NO: 299295 - RNA, 23 nt, Artificial Sequence
  Synthetic
aaccaagcugaagccacauaaag

SEQ ID NO: 299296 - RNA, 24 nt, Artificial Sequence
  Synthetic
aaaccaagcugaagccacauaaag

SEQ ID NO: 299297 - RNA, 18 nt, Artificial Sequence
  Synthetic
uuuuugugcaccauaaag

SEQ ID NO: 299298 - RNA, 19 nt, Artificial Sequence
  Synthetic
auuuuugugcaccauaaag

SEQ ID NO: 299299 - RNA, 20 nt, Artificial Sequence
  Synthetic
uauuuuugugcaccauaaag

SEQ ID NO: 299300 - RNA, 21 nt, Artificial Sequence
  Synthetic
cuauuuuugugcaccauaaag

SEQ ID NO: 299301 - RNA, 22 nt, Artificial Sequence
  Synthetic
gcuauuuuugugcaccauaaag

SEQ ID NO: 299302 - RNA, 23 nt, Artificial Sequence
  Synthetic
agcuauuuuugugcaccauaaag

SEQ ID NO: 299303 - RNA, 24 nt, Artificial Sequence
  Synthetic
cagcuauuuuugugcaccauaaag

SEQ ID NO: 299304 - RNA, 18 nt, Artificial Sequence
  Synthetic
guagaugugagcauaaag

SEQ ID NO: 299305 - RNA, 19 nt, Artificial Sequence
  Synthetic
aguagaugugagcauaaag

SEQ ID NO: 299306 - RNA, 20 nt, Artificial Sequence
  Synthetic
aaguagaugugagcauaaag

SEQ ID NO: 299307 - RNA, 21 nt, Artificial Sequence
  Synthetic
aaaguagaugugagcauaaag

SEQ ID NO: 299308 - RNA, 22 nt, Artificial Sequence
  Synthetic
aaaaguagaugugagcauaaag

SEQ ID NO: 299309 - RNA, 23 nt, Artificial Sequence
  Synthetic
caaaaguagaugugagcauaaag

SEQ ID NO: 299310 - RNA, 24 nt, Artificial Sequence
  Synthetic
acaaaaguagaugugagcauaaag

SEQ ID NO: 299311 - RNA, 18 nt, Artificial Sequence
  Synthetic
acauuugugagcauaaag

SEQ ID NO: 299312 - RNA, 19 nt, Artificial Sequence
  Synthetic
cacauuugugagcauaaag

SEQ ID NO: 299313 - RNA, 20 nt, Artificial Sequence
  Synthetic
acacauuugugagcauaaag

SEQ ID NO: 299314 - RNA, 21 nt, Artificial Sequence
  Synthetic
aacacauuugugagcauaaag

SEQ ID NO: 299315 - RNA, 22 nt, Artificial Sequence
  Synthetic
caacacauuugugagcauaaag

SEQ ID NO: 299316 - RNA, 23 nt, Artificial Sequence
  Synthetic
ccaacacauuugugagcauaaag

SEQ ID NO: 299317 - RNA, 24 nt, Artificial Sequence
  Synthetic
cccaacacauuugugagcauaaag

SEQ ID NO: 299318 - RNA, 18 nt, Artificial Sequence
  Synthetic
ccuggauuuugcauaaag

SEQ ID NO: 299319 - RNA, 19 nt, Artificial Sequence
  Synthetic
accuggauuuugcauaaag

SEQ ID NO: 299320 - RNA, 20 nt, Artificial Sequence
  Synthetic
uaccuggauuuugcauaaag

SEQ ID NO: 299321 - RNA, 21 nt, Artificial Sequence
  Synthetic
guaccuggauuuugcauaaag

SEQ ID NO: 299322 - RNA, 22 nt, Artificial Sequence
  Synthetic
aguaccuggauuuugcauaaag

SEQ ID NO: 299323 - RNA, 23 nt, Artificial Sequence
  Synthetic
gaguaccuggauuuugcauaaag

SEQ ID NO: 299324 - RNA, 24 nt, Artificial Sequence
  Synthetic
ugaguaccuggauuuugcauaaag

SEQ ID NO: 299325 - RNA, 18 nt, Artificial Sequence
  Synthetic
caggcuuucaucauaaag

SEQ ID NO: 299326 - RNA, 19 nt, Artificial Sequence
  Synthetic
ccaggcuuucaucauaaag

SEQ ID NO: 299327 - RNA, 20 nt, Artificial Sequence
  Synthetic
accaggcuuucaucauaaag

SEQ ID NO: 299328 - RNA, 21 nt, Artificial Sequence
  Synthetic
caccaggcuuucaucauaaag

SEQ ID NO: 299329 - RNA, 22 nt, Artificial Sequence
  Synthetic
ucaccaggcuuucaucauaaag

SEQ ID NO: 299330 - RNA, 23 nt, Artificial Sequence
  Synthetic
cucaccaggcuuucaucauaaag

SEQ ID NO: 299331 - RNA, 24 nt, Artificial Sequence
  Synthetic
gcucaccaggcuuucaucauaaag

SEQ ID NO: 299332 - RNA, 18 nt, Artificial Sequence
  Synthetic
acaugaucccucauaaag

SEQ ID NO: 299333 - RNA, 19 nt, Artificial Sequence
  Synthetic
cacaugaucccucauaaag

SEQ ID NO: 299334 - RNA, 20 nt, Artificial Sequence
  Synthetic
acacaugaucccucauaaag

SEQ ID NO: 299335 - RNA, 21 nt, Artificial Sequence
  Synthetic
gacacaugaucccucauaaag

SEQ ID NO: 299336 - RNA, 22 nt, Artificial Sequence
  Synthetic
ggacacaugaucccucauaaag

SEQ ID NO: 299337 - RNA, 23 nt, Artificial Sequence
  Synthetic
uggacacaugaucccucauaaag

SEQ ID NO: 299338 - RNA, 24 nt, Artificial Sequence
  Synthetic
uuggacacaugaucccucauaaag

SEQ ID NO: 299339 - RNA, 18 nt, Artificial Sequence
  Synthetic
uuccuguucuucauaaag

SEQ ID NO: 299340 - RNA, 19 nt, Artificial Sequence
  Synthetic
auuccuguucuucauaaag

SEQ ID NO: 299341 - RNA, 20 nt, Artificial Sequence
  Synthetic
aauuccuguucuucauaaag

SEQ ID NO: 299342 - RNA, 21 nt, Artificial Sequence
  Synthetic
uaauuccuguucuucauaaag

SEQ ID NO: 299343 - RNA, 22 nt, Artificial Sequence
  Synthetic
cuaauuccuguucuucauaaag

SEQ ID NO: 299344 - RNA, 23 nt, Artificial Sequence
  Synthetic
acuaauuccuguucuucauaaag

SEQ ID NO: 299345 - RNA, 24 nt, Artificial Sequence
  Synthetic
aacuaauuccuguucuucauaaag

SEQ ID NO: 299346 - RNA, 18 nt, Artificial Sequence
  Synthetic
aauaggaguuucauaaag

SEQ ID NO: 299347 - RNA, 19 nt, Artificial Sequence
  Synthetic
uaauaggaguuucauaaag

SEQ ID NO: 299348 - RNA, 20 nt, Artificial Sequence
  Synthetic
guaauaggaguuucauaaag

SEQ ID NO: 299349 - RNA, 21 nt, Artificial Sequence
  Synthetic
uguaauaggaguuucauaaag

SEQ ID NO: 299350 - RNA, 22 nt, Artificial Sequence
  Synthetic
auguaauaggaguuucauaaag

SEQ ID NO: 299351 - RNA, 23 nt, Artificial Sequence
  Synthetic
aauguaauaggaguuucauaaag

SEQ ID NO: 299352 - RNA, 24 nt, Artificial Sequence
  Synthetic
aaauguaauaggaguuucauaaag

SEQ ID NO: 299353 - RNA, 18 nt, Artificial Sequence
  Synthetic
uaagaaauaucgauaaag

SEQ ID NO: 299354 - RNA, 19 nt, Artificial Sequence
  Synthetic
uuaagaaauaucgauaaag

SEQ ID NO: 299355 - RNA, 20 nt, Artificial Sequence
  Synthetic
uuuaagaaauaucgauaaag

SEQ ID NO: 299356 - RNA, 21 nt, Artificial Sequence
  Synthetic
uuuuaagaaauaucgauaaag

SEQ ID NO: 299357 - RNA, 22 nt, Artificial Sequence
  Synthetic
auuuuaagaaauaucgauaaag

SEQ ID NO: 299358 - RNA, 23 nt, Artificial Sequence
  Synthetic
cauuuuaagaaauaucgauaaag

SEQ ID NO: 299359 - RNA, 24 nt, Artificial Sequence
  Synthetic
acauuuuaagaaauaucgauaaag

SEQ ID NO: 299360 - RNA, 18 nt, Artificial Sequence
  Synthetic
gaagggacauggauaaag

SEQ ID NO: 299361 - RNA, 19 nt, Artificial Sequence
  Synthetic
ugaagggacauggauaaag

SEQ ID NO: 299362 - RNA, 20 nt, Artificial Sequence
  Synthetic
uugaagggacauggauaaag

SEQ ID NO: 299363 - RNA, 21 nt, Artificial Sequence
  Synthetic
uuugaagggacauggauaaag

SEQ ID NO: 299364 - RNA, 22 nt, Artificial Sequence
  Synthetic
cuuugaagggacauggauaaag

SEQ ID NO: 299365 - RNA, 23 nt, Artificial Sequence
  Synthetic
ccuuugaagggacauggauaaag

SEQ ID NO: 299366 - RNA, 24 nt, Artificial Sequence
  Synthetic
uccuuugaagggacauggauaaag

SEQ ID NO: 299367 - RNA, 18 nt, Artificial Sequence
  Synthetic
caguauauucauauaaag

SEQ ID NO: 299368 - RNA, 19 nt, Artificial Sequence
  Synthetic
ucaguauauucauauaaag

SEQ ID NO: 299369 - RNA, 20 nt, Artificial Sequence
  Synthetic
aucaguauauucauauaaag

SEQ ID NO: 299370 - RNA, 21 nt, Artificial Sequence
  Synthetic
gaucaguauauucauauaaag

SEQ ID NO: 299371 - RNA, 22 nt, Artificial Sequence
  Synthetic
agaucaguauauucauauaaag

SEQ ID NO: 299372 - RNA, 23 nt, Artificial Sequence
  Synthetic
gagaucaguauauucauauaaag

SEQ ID NO: 299373 - RNA, 24 nt, Artificial Sequence
  Synthetic
ggagaucaguauauucauauaaag

SEQ ID NO: 299374 - RNA, 18 nt, Artificial Sequence
  Synthetic
aaaucauuggcuauaaag

SEQ ID NO: 299375 - RNA, 19 nt, Artificial Sequence
  Synthetic
gaaaucauuggcuauaaag

SEQ ID NO: 299376 - RNA, 20 nt, Artificial Sequence
  Synthetic
agaaaucauuggcuauaaag

SEQ ID NO: 299377 - RNA, 21 nt, Artificial Sequence
  Synthetic
aagaaaucauuggcuauaaag

SEQ ID NO: 299378 - RNA, 22 nt, Artificial Sequence
  Synthetic
aaagaaaucauuggcuauaaag

SEQ ID NO: 299379 - RNA, 23 nt, Artificial Sequence
  Synthetic
caaagaaaucauuggcuauaaag

SEQ ID NO: 299380 - RNA, 24 nt, Artificial Sequence
  Synthetic
acaaagaaaucauuggcuauaaag

SEQ ID NO: 299381 - RNA, 18 nt, Artificial Sequence
  Synthetic
caaauaaaaucuauaaag

SEQ ID NO: 299382 - RNA, 19 nt, Artificial Sequence
  Synthetic
ucaaauaaaaucuauaaag

SEQ ID NO: 299383 - RNA, 20 nt, Artificial Sequence
  Synthetic
aucaaauaaaaucuauaaag

SEQ ID NO: 299384 - RNA, 21 nt, Artificial Sequence
  Synthetic
aaucaaauaaaaucuauaaag

SEQ ID NO: 299385 - RNA, 22 nt, Artificial Sequence
  Synthetic
aaaucaaauaaaaucuauaaag

SEQ ID NO: 299386 - RNA, 23 nt, Artificial Sequence
  Synthetic
aaaaucaaauaaaaucuauaaag

SEQ ID NO: 299387 - RNA, 24 nt, Artificial Sequence
  Synthetic
uaaaaucaaauaaaaucuauaaag

SEQ ID NO: 299388 - RNA, 18 nt, Artificial Sequence
  Synthetic
uguuuuuugucuauaaag

SEQ ID NO: 299389 - RNA, 19 nt, Artificial Sequence
  Synthetic
uuguuuuuugucuauaaag

SEQ ID NO: 299390 - RNA, 20 nt, Artificial Sequence
  Synthetic
cuuguuuuuugucuauaaag

SEQ ID NO: 299391 - RNA, 21 nt, Artificial Sequence
  Synthetic
gcuuguuuuuugucuauaaag

SEQ ID NO: 299392 - RNA, 22 nt, Artificial Sequence
  Synthetic
ugcuuguuuuuugucuauaaag

SEQ ID NO: 299393 - RNA, 23 nt, Artificial Sequence
  Synthetic
uugcuuguuuuuugucuauaaag

SEQ ID NO: 299394 - RNA, 24 nt, Artificial Sequence
  Synthetic
uuugcuuguuuuuugucuauaaag

SEQ ID NO: 299395 - RNA, 18 nt, Artificial Sequence
  Synthetic
cuuuugaaauguauaaag

SEQ ID NO: 299396 - RNA, 19 nt, Artificial Sequence
  Synthetic
gcuuuugaaauguauaaag

SEQ ID NO: 299397 - RNA, 20 nt, Artificial Sequence
  Synthetic
agcuuuugaaauguauaaag

SEQ ID NO: 299398 - RNA, 21 nt, Artificial Sequence
  Synthetic
aagcuuuugaaauguauaaag

SEQ ID NO: 299399 - RNA, 22 nt, Artificial Sequence
  Synthetic
aaagcuuuugaaauguauaaag

SEQ ID NO: 299400 - RNA, 23 nt, Artificial Sequence
  Synthetic
caaagcuuuugaaauguauaaag

SEQ ID NO: 299401 - RNA, 24 nt, Artificial Sequence
  Synthetic
gcaaagcuuuugaaauguauaaag

SEQ ID NO: 299402 - RNA, 18 nt, Artificial Sequence
  Synthetic
uggguacucauuauaaag

SEQ ID NO: 299403 - RNA, 19 nt, Artificial Sequence
  Synthetic
uuggguacucauuauaaag

SEQ ID NO: 299404 - RNA, 20 nt, Artificial Sequence
  Synthetic
auuggguacucauuauaaag

SEQ ID NO: 299405 - RNA, 21 nt, Artificial Sequence
  Synthetic
cauuggguacucauuauaaag

SEQ ID NO: 299406 - RNA, 22 nt, Artificial Sequence
  Synthetic
acauuggguacucauuauaaag

SEQ ID NO: 299407 - RNA, 23 nt, Artificial Sequence
  Synthetic
aacauuggguacucauuauaaag

SEQ ID NO: 299408 - RNA, 24 nt, Artificial Sequence
  Synthetic
aaacauuggguacucauuauaaag

SEQ ID NO: 299409 - RNA, 18 nt, Artificial Sequence
  Synthetic
uuuuuucugcuuauaaag

SEQ ID NO: 299410 - RNA, 19 nt, Artificial Sequence
  Synthetic
auuuuuucugcuuauaaag

SEQ ID NO: 299411 - RNA, 20 nt, Artificial Sequence
  Synthetic
cauuuuuucugcuuauaaag

SEQ ID NO: 299412 - RNA, 21 nt, Artificial Sequence
  Synthetic
ucauuuuuucugcuuauaaag

SEQ ID NO: 299413 - RNA, 22 nt, Artificial Sequence
  Synthetic
aucauuuuuucugcuuauaaag

SEQ ID NO: 299414 - RNA, 23 nt, Artificial Sequence
  Synthetic
aaucauuuuuucugcuuauaaag

SEQ ID NO: 299415 - RNA, 24 nt, Artificial Sequence
  Synthetic
aaaucauuuuuucugcuuauaaag

SEQ ID NO: 299416 - RNA, 18 nt, Artificial Sequence
  Synthetic
cauaucaacaaacuaaag

SEQ ID NO: 299417 - RNA, 19 nt, Artificial Sequence
  Synthetic
ccauaucaacaaacuaaag

SEQ ID NO: 299418 - RNA, 20 nt, Artificial Sequence
  Synthetic
accauaucaacaaacuaaag

SEQ ID NO: 299419 - RNA, 21 nt, Artificial Sequence
  Synthetic
uaccauaucaacaaacuaaag

SEQ ID NO: 299420 - RNA, 22 nt, Artificial Sequence
  Synthetic
cuaccauaucaacaaacuaaag

SEQ ID NO: 299421 - RNA, 23 nt, Artificial Sequence
  Synthetic
ucuaccauaucaacaaacuaaag

SEQ ID NO: 299422 - RNA, 24 nt, Artificial Sequence
  Synthetic
aucuaccauaucaacaaacuaaag

SEQ ID NO: 299423 - RNA, 18 nt, Artificial Sequence
  Synthetic
acagcuuagaaacuaaag

SEQ ID NO: 299424 - RNA, 19 nt, Artificial Sequence
  Synthetic
uacagcuuagaaacuaaag

SEQ ID NO: 299425 - RNA, 20 nt, Artificial Sequence
  Synthetic
auacagcuuagaaacuaaag

SEQ ID NO: 299426 - RNA, 21 nt, Artificial Sequence
  Synthetic
aauacagcuuagaaacuaaag

SEQ ID NO: 299427 - RNA, 22 nt, Artificial Sequence
  Synthetic
uaauacagcuuagaaacuaaag

SEQ ID NO: 299428 - RNA, 23 nt, Artificial Sequence
  Synthetic
uuaauacagcuuagaaacuaaag

SEQ ID NO: 299429 - RNA, 24 nt, Artificial Sequence
  Synthetic
uuuaauacagcuuagaaacuaaag

SEQ ID NO: 299430 - RNA, 18 nt, Artificial Sequence
  Synthetic
aaguuagaauaacuaaag

SEQ ID NO: 299431 - RNA, 19 nt, Artificial Sequence
  Synthetic
uaaguuagaauaacuaaag

SEQ ID NO: 299432 - RNA, 20 nt, Artificial Sequence
  Synthetic
auaaguuagaauaacuaaag

SEQ ID NO: 299433 - RNA, 21 nt, Artificial Sequence
  Synthetic
cauaaguuagaauaacuaaag

SEQ ID NO: 299434 - RNA, 22 nt, Artificial Sequence
  Synthetic
acauaaguuagaauaacuaaag

SEQ ID NO: 299435 - RNA, 23 nt, Artificial Sequence
  Synthetic
uacauaaguuagaauaacuaaag

SEQ ID NO: 299436 - RNA, 24 nt, Artificial Sequence
  Synthetic
uuacauaaguuagaauaacuaaag

SEQ ID NO: 299437 - RNA, 18 nt, Artificial Sequence
  Synthetic
accaguuuugcacuaaag

SEQ ID NO: 299438 - RNA, 19 nt, Artificial Sequence
  Synthetic
uaccaguuuugcacuaaag

SEQ ID NO: 299439 - RNA, 20 nt, Artificial Sequence
  Synthetic
cuaccaguuuugcacuaaag

SEQ ID NO: 299440 - RNA, 21 nt, Artificial Sequence
  Synthetic
ccuaccaguuuugcacuaaag

SEQ ID NO: 299441 - RNA, 22 nt, Artificial Sequence
  Synthetic
accuaccaguuuugcacuaaag

SEQ ID NO: 299442 - RNA, 23 nt, Artificial Sequence
  Synthetic
caccuaccaguuuugcacuaaag

SEQ ID NO: 299443 - RNA, 24 nt, Artificial Sequence
  Synthetic
acaccuaccaguuuugcacuaaag

SEQ ID NO: 299444 - RNA, 18 nt, Artificial Sequence
  Synthetic
agaagauucaaccuaaag

SEQ ID NO: 299445 - RNA, 19 nt, Artificial Sequence
  Synthetic
aagaagauucaaccuaaag

SEQ ID NO: 299446 - RNA, 20 nt, Artificial Sequence
  Synthetic
aaagaagauucaaccuaaag

SEQ ID NO: 299447 - RNA, 21 nt, Artificial Sequence
  Synthetic
aaaagaagauucaaccuaaag

SEQ ID NO: 299448 - RNA, 22 nt, Artificial Sequence
  Synthetic
gaaaagaagauucaaccuaaag

SEQ ID NO: 299449 - RNA, 23 nt, Artificial Sequence
  Synthetic
ggaaaagaagauucaaccuaaag

SEQ ID NO: 299450 - RNA, 24 nt, Artificial Sequence
  Synthetic
uggaaaagaagauucaaccuaaag

SEQ ID NO: 299451 - RNA, 18 nt, Artificial Sequence
  Synthetic
uuucucaccacccuaaag

SEQ ID NO: 299452 - RNA, 19 nt, Artificial Sequence
  Synthetic
cuuucucaccacccuaaag

SEQ ID NO: 299453 - RNA, 20 nt, Artificial Sequence
  Synthetic
acuuucucaccacccuaaag

SEQ ID NO: 299454 - RNA, 21 nt, Artificial Sequence
  Synthetic
cacuuucucaccacccuaaag

SEQ ID NO: 299455 - RNA, 22 nt, Artificial Sequence
  Synthetic
ucacuuucucaccacccuaaag

SEQ ID NO: 299456 - RNA, 23 nt, Artificial Sequence
  Synthetic
aucacuuucucaccacccuaaag

SEQ ID NO: 299457 - RNA, 24 nt, Artificial Sequence
  Synthetic
uaucacuuucucaccacccuaaag

SEQ ID NO: 299458 - RNA, 18 nt, Artificial Sequence
  Synthetic
acgugcuuucuccuaaag

SEQ ID NO: 299459 - RNA, 19 nt, Artificial Sequence
  Synthetic
uacgugcuuucuccuaaag

SEQ ID NO: 299460 - RNA, 20 nt, Artificial Sequence
  Synthetic
guacgugcuuucuccuaaag

SEQ ID NO: 299461 - RNA, 21 nt, Artificial Sequence
  Synthetic
uguacgugcuuucuccuaaag

SEQ ID NO: 299462 - RNA, 22 nt, Artificial Sequence
  Synthetic
uuguacgugcuuucuccuaaag

SEQ ID NO: 299463 - RNA, 23 nt, Artificial Sequence
  Synthetic
cuuguacgugcuuucuccuaaag

SEQ ID NO: 299464 - RNA, 24 nt, Artificial Sequence
  Synthetic
ccuuguacgugcuuucuccuaaag

SEQ ID NO: 299465 - RNA, 18 nt, Artificial Sequence
  Synthetic
caagagaccaagcuaaag

SEQ ID NO: 299466 - RNA, 19 nt, Artificial Sequence
  Synthetic
ucaagagaccaagcuaaag

SEQ ID NO: 299467 - RNA, 20 nt, Artificial Sequence
  Synthetic
uucaagagaccaagcuaaag

SEQ ID NO: 299468 - RNA, 21 nt, Artificial Sequence
  Synthetic
guucaagagaccaagcuaaag

SEQ ID NO: 299469 - RNA, 22 nt, Artificial Sequence
  Synthetic
uguucaagagaccaagcuaaag

SEQ ID NO: 299470 - RNA, 23 nt, Artificial Sequence
  Synthetic
auguucaagagaccaagcuaaag

SEQ ID NO: 299471 - RNA, 24 nt, Artificial Sequence
  Synthetic
gauguucaagagaccaagcuaaag

SEQ ID NO: 299472 - RNA, 18 nt, Artificial Sequence
  Synthetic
ucucgauagaagcuaaag

SEQ ID NO: 299473 - RNA, 19 nt, Artificial Sequence
  Synthetic
cucucgauagaagcuaaag

SEQ ID NO: 299474 - RNA, 20 nt, Artificial Sequence
  Synthetic
ucucucgauagaagcuaaag

SEQ ID NO: 299475 - RNA, 21 nt, Artificial Sequence
  Synthetic
gucucucgauagaagcuaaag

SEQ ID NO: 299476 - RNA, 22 nt, Artificial Sequence
  Synthetic
agucucucgauagaagcuaaag

SEQ ID NO: 299477 - RNA, 23 nt, Artificial Sequence
  Synthetic
cagucucucgauagaagcuaaag

SEQ ID NO: 299478 - RNA, 24 nt, Artificial Sequence
  Synthetic
acagucucucgauagaagcuaaag

SEQ ID NO: 299479 - RNA, 18 nt, Artificial Sequence
  Synthetic
aucaccgcauagcuaaag

SEQ ID NO: 299480 - RNA, 19 nt, Artificial Sequence
  Synthetic
gaucaccgcauagcuaaag

SEQ ID NO: 299481 - RNA, 20 nt, Artificial Sequence
  Synthetic
agaucaccgcauagcuaaag

SEQ ID NO: 299482 - RNA, 21 nt, Artificial Sequence
  Synthetic
uagaucaccgcauagcuaaag

SEQ ID NO: 299483 - RNA, 22 nt, Artificial Sequence
  Synthetic
auagaucaccgcauagcuaaag

SEQ ID NO: 299484 - RNA, 23 nt, Artificial Sequence
  Synthetic
aauagaucaccgcauagcuaaag

SEQ ID NO: 299485 - RNA, 24 nt, Artificial Sequence
  Synthetic
aaauagaucaccgcauagcuaaag

SEQ ID NO: 299486 - RNA, 18 nt, Artificial Sequence
  Synthetic
ccugccugauagcuaaag

SEQ ID NO: 299487 - RNA, 19 nt, Artificial Sequence
  Synthetic
uccugccugauagcuaaag

SEQ ID NO: 299488 - RNA, 20 nt, Artificial Sequence
  Synthetic
cuccugccugauagcuaaag

SEQ ID NO: 299489 - RNA, 21 nt, Artificial Sequence
  Synthetic
acuccugccugauagcuaaag

SEQ ID NO: 299490 - RNA, 22 nt, Artificial Sequence
  Synthetic
aacuccugccugauagcuaaag

SEQ ID NO: 299491 - RNA, 23 nt, Artificial Sequence
  Synthetic
gaacuccugccugauagcuaaag

SEQ ID NO: 299492 - RNA, 24 nt, Artificial Sequence
  Synthetic
ggaacuccugccugauagcuaaag

SEQ ID NO: 299493 - RNA, 18 nt, Artificial Sequence
  Synthetic
gugacaagguagcuaaag

SEQ ID NO: 299494 - RNA, 19 nt, Artificial Sequence
  Synthetic
agugacaagguagcuaaag

SEQ ID NO: 299495 - RNA, 20 nt, Artificial Sequence
  Synthetic
gagugacaagguagcuaaag

SEQ ID NO: 299496 - RNA, 21 nt, Artificial Sequence
  Synthetic
ugagugacaagguagcuaaag

SEQ ID NO: 299497 - RNA, 22 nt, Artificial Sequence
  Synthetic
uugagugacaagguagcuaaag

SEQ ID NO: 299498 - RNA, 23 nt, Artificial Sequence
  Synthetic
uuugagugacaagguagcuaaag

SEQ ID NO: 299499 - RNA, 24 nt, Artificial Sequence
  Synthetic
auuugagugacaagguagcuaaag

SEQ ID NO: 299500 - RNA, 18 nt, Artificial Sequence
  Synthetic
aacugugggaggcuaaag

SEQ ID NO: 299501 - RNA, 19 nt, Artificial Sequence
  Synthetic
gaacugugggaggcuaaag

SEQ ID NO: 299502 - RNA, 20 nt, Artificial Sequence
  Synthetic
agaacugugggaggcuaaag

SEQ ID NO: 299503 - RNA, 21 nt, Artificial Sequence
  Synthetic
cagaacugugggaggcuaaag

SEQ ID NO: 299504 - RNA, 22 nt, Artificial Sequence
  Synthetic
ccagaacugugggaggcuaaag

SEQ ID NO: 299505 - RNA, 23 nt, Artificial Sequence
  Synthetic
cccagaacugugggaggcuaaag

SEQ ID NO: 299506 - RNA, 24 nt, Artificial Sequence
  Synthetic
ucccagaacugugggaggcuaaag

SEQ ID NO: 299507 - RNA, 18 nt, Artificial Sequence
  Synthetic
auguuaguaaugcuaaag

SEQ ID NO: 299508 - RNA, 19 nt, Artificial Sequence
  Synthetic
aauguuaguaaugcuaaag

SEQ ID NO: 299509 - RNA, 20 nt, Artificial Sequence
  Synthetic
aaauguuaguaaugcuaaag

SEQ ID NO: 299510 - RNA, 21 nt, Artificial Sequence
  Synthetic
uaaauguuaguaaugcuaaag

SEQ ID NO: 299511 - RNA, 22 nt, Artificial Sequence
  Synthetic
cuaaauguuaguaaugcuaaag

SEQ ID NO: 299512 - RNA, 23 nt, Artificial Sequence
  Synthetic
ccuaaauguuaguaaugcuaaag

SEQ ID NO: 299513 - RNA, 24 nt, Artificial Sequence
  Synthetic
accuaaauguuaguaaugcuaaag

SEQ ID NO: 299514 - RNA, 18 nt, Artificial Sequence
  Synthetic
gaauuuuguuuucuaaag

SEQ ID NO: 299515 - RNA, 19 nt, Artificial Sequence
  Synthetic
ugaauuuuguuuucuaaag

SEQ ID NO: 299516 - RNA, 20 nt, Artificial Sequence
  Synthetic
gugaauuuuguuuucuaaag

SEQ ID NO: 299517 - RNA, 21 nt, Artificial Sequence
  Synthetic
cgugaauuuuguuuucuaaag

SEQ ID NO: 299518 - RNA, 22 nt, Artificial Sequence
  Synthetic
acgugaauuuuguuuucuaaag

SEQ ID NO: 299519 - RNA, 23 nt, Artificial Sequence
  Synthetic
gacgugaauuuuguuuucuaaag

SEQ ID NO: 299520 - RNA, 24 nt, Artificial Sequence
  Synthetic
agacgugaauuuuguuuucuaaag

SEQ ID NO: 299521 - RNA, 18 nt, Artificial Sequence
  Synthetic
ggguaaugcaaaguaaag

SEQ ID NO: 299522 - RNA, 19 nt, Artificial Sequence
  Synthetic
cggguaaugcaaaguaaag

SEQ ID NO: 299523 - RNA, 20 nt, Artificial Sequence
  Synthetic
acggguaaugcaaaguaaag

SEQ ID NO: 299524 - RNA, 21 nt, Artificial Sequence
  Synthetic
aacggguaaugcaaaguaaag

SEQ ID NO: 299525 - RNA, 22 nt, Artificial Sequence
  Synthetic
aaacggguaaugcaaaguaaag

SEQ ID NO: 299526 - RNA, 23 nt, Artificial Sequence
  Synthetic
gaaacggguaaugcaaaguaaag

SEQ ID NO: 299527 - RNA, 24 nt, Artificial Sequence
  Synthetic
ugaaacggguaaugcaaaguaaag

SEQ ID NO: 299528 - RNA, 18 nt, Artificial Sequence
  Synthetic
uggggccugaaaguaaag

SEQ ID NO: 299529 - RNA, 19 nt, Artificial Sequence
  Synthetic
auggggccugaaaguaaag

SEQ ID NO: 299530 - RNA, 20 nt, Artificial Sequence
  Synthetic
aauggggccugaaaguaaag

SEQ ID NO: 299531 - RNA, 21 nt, Artificial Sequence
  Synthetic
aaauggggccugaaaguaaag

SEQ ID NO: 299532 - RNA, 22 nt, Artificial Sequence
  Synthetic
gaaauggggccugaaaguaaag

SEQ ID NO: 299533 - RNA, 23 nt, Artificial Sequence
  Synthetic
agaaauggggccugaaaguaaag

SEQ ID NO: 299534 - RNA, 24 nt, Artificial Sequence
  Synthetic
gagaaauggggccugaaaguaaag

SEQ ID NO: 299535 - RNA, 18 nt, Artificial Sequence
  Synthetic
cacuuucuguaaguaaag

SEQ ID NO: 299536 - RNA, 19 nt, Artificial Sequence
  Synthetic
ucacuuucuguaaguaaag

SEQ ID NO: 299537 - RNA, 20 nt, Artificial Sequence
  Synthetic
aucacuuucuguaaguaaag

SEQ ID NO: 299538 - RNA, 21 nt, Artificial Sequence
  Synthetic
aaucacuuucuguaaguaaag

SEQ ID NO: 299539 - RNA, 22 nt, Artificial Sequence
  Synthetic
aaaucacuuucuguaaguaaag

SEQ ID NO: 299540 - RNA, 23 nt, Artificial Sequence
  Synthetic
gaaaucacuuucuguaaguaaag

SEQ ID NO: 299541 - RNA, 24 nt, Artificial Sequence
  Synthetic
ggaaaucacuuucuguaaguaaag

SEQ ID NO: 299542 - RNA, 18 nt, Artificial Sequence
  Synthetic
caagacagugcaguaaag

SEQ ID NO: 299543 - RNA, 19 nt, Artificial Sequence
  Synthetic
acaagacagugcaguaaag

SEQ ID NO: 299544 - RNA, 20 nt, Artificial Sequence
  Synthetic
aacaagacagugcaguaaag

SEQ ID NO: 299545 - RNA, 21 nt, Artificial Sequence
  Synthetic
uaacaagacagugcaguaaag

SEQ ID NO: 299546 - RNA, 22 nt, Artificial Sequence
  Synthetic
cuaacaagacagugcaguaaag

SEQ ID NO: 299547 - RNA, 23 nt, Artificial Sequence
  Synthetic
acuaacaagacagugcaguaaag

SEQ ID NO: 299548 - RNA, 24 nt, Artificial Sequence
  Synthetic
aacuaacaagacagugcaguaaag

SEQ ID NO: 299549 - RNA, 18 nt, Artificial Sequence
  Synthetic
auauugucaucaguaaag

SEQ ID NO: 299550 - RNA, 19 nt, Artificial Sequence
  Synthetic
uauauugucaucaguaaag

SEQ ID NO: 299551 - RNA, 20 nt, Artificial Sequence
  Synthetic
uuauauugucaucaguaaag

SEQ ID NO: 299552 - RNA, 21 nt, Artificial Sequence
  Synthetic
uuuauauugucaucaguaaag

SEQ ID NO: 299553 - RNA, 22 nt, Artificial Sequence
  Synthetic
uuuuauauugucaucaguaaag

SEQ ID NO: 299554 - RNA, 23 nt, Artificial Sequence
  Synthetic
auuuuauauugucaucaguaaag

SEQ ID NO: 299555 - RNA, 24 nt, Artificial Sequence
  Synthetic
uauuuuauauugucaucaguaaag

SEQ ID NO: 299556 - RNA, 18 nt, Artificial Sequence
  Synthetic
auaauuaaacgaguaaag

SEQ ID NO: 299557 - RNA, 19 nt, Artificial Sequence
  Synthetic
cauaauuaaacgaguaaag

SEQ ID NO: 299558 - RNA, 20 nt, Artificial Sequence
  Synthetic
gcauaauuaaacgaguaaag

SEQ ID NO: 299559 - RNA, 21 nt, Artificial Sequence
  Synthetic
ugcauaauuaaacgaguaaag

SEQ ID NO: 299560 - RNA, 22 nt, Artificial Sequence
  Synthetic
uugcauaauuaaacgaguaaag

SEQ ID NO: 299561 - RNA, 23 nt, Artificial Sequence
  Synthetic
auugcauaauuaaacgaguaaag

SEQ ID NO: 299562 - RNA, 24 nt, Artificial Sequence
  Synthetic
gauugcauaauuaaacgaguaaag

SEQ ID NO: 299563 - RNA, 18 nt, Artificial Sequence
  Synthetic
uuuguaguuuuaguaaag

SEQ ID NO: 299564 - RNA, 19 nt, Artificial Sequence
  Synthetic
uuuuguaguuuuaguaaag

SEQ ID NO: 299565 - RNA, 20 nt, Artificial Sequence
  Synthetic
uuuuuguaguuuuaguaaag

SEQ ID NO: 299566 - RNA, 21 nt, Artificial Sequence
  Synthetic
auuuuuguaguuuuaguaaag

SEQ ID NO: 299567 - RNA, 22 nt, Artificial Sequence
  Synthetic
aauuuuuguaguuuuaguaaag

SEQ ID NO: 299568 - RNA, 23 nt, Artificial Sequence
  Synthetic
uaauuuuuguaguuuuaguaaag

SEQ ID NO: 299569 - RNA, 24 nt, Artificial Sequence
  Synthetic
cuaauuuuuguaguuuuaguaaag

SEQ ID NO: 299570 - RNA, 18 nt, Artificial Sequence
  Synthetic
auuuauacagacguaaag

SEQ ID NO: 299571 - RNA, 19 nt, Artificial Sequence
  Synthetic
aauuuauacagacguaaag

SEQ ID NO: 299572 - RNA, 20 nt, Artificial Sequence
  Synthetic
aaauuuauacagacguaaag

SEQ ID NO: 299573 - RNA, 21 nt, Artificial Sequence
  Synthetic
caaauuuauacagacguaaag

SEQ ID NO: 299574 - RNA, 22 nt, Artificial Sequence
  Synthetic
ucaaauuuauacagacguaaag

SEQ ID NO: 299575 - RNA, 23 nt, Artificial Sequence
  Synthetic
gucaaauuuauacagacguaaag

SEQ ID NO: 299576 - RNA, 24 nt, Artificial Sequence
  Synthetic
agucaaauuuauacagacguaaag

SEQ ID NO: 299577 - RNA, 18 nt, Artificial Sequence
  Synthetic
gaugguagagggguaaag

SEQ ID NO: 299578 - RNA, 19 nt, Artificial Sequence
  Synthetic
agaugguagagggguaaag

SEQ ID NO: 299579 - RNA, 20 nt, Artificial Sequence
  Synthetic
uagaugguagagggguaaag

SEQ ID NO: 299580 - RNA, 21 nt, Artificial Sequence
  Synthetic
uuagaugguagagggguaaag

SEQ ID NO: 299581 - RNA, 22 nt, Artificial Sequence
  Synthetic
guuagaugguagagggguaaag

SEQ ID NO: 299582 - RNA, 23 nt, Artificial Sequence
  Synthetic
aguuagaugguagagggguaaag

SEQ ID NO: 299583 - RNA, 24 nt, Artificial Sequence
  Synthetic
aaguuagaugguagagggguaaag

SEQ ID NO: 299584 - RNA, 18 nt, Artificial Sequence
  Synthetic
gguuuuuaggggguaaag

SEQ ID NO: 299585 - RNA, 19 nt, Artificial Sequence
  Synthetic
agguuuuuaggggguaaag

SEQ ID NO: 299586 - RNA, 20 nt, Artificial Sequence
  Synthetic
gagguuuuuaggggguaaag

SEQ ID NO: 299587 - RNA, 21 nt, Artificial Sequence
  Synthetic
ugagguuuuuaggggguaaag

SEQ ID NO: 299588 - RNA, 22 nt, Artificial Sequence
  Synthetic
uugagguuuuuaggggguaaag

SEQ ID NO: 299589 - RNA, 23 nt, Artificial Sequence
  Synthetic
uuugagguuuuuaggggguaaag

SEQ ID NO: 299590 - RNA, 24 nt, Artificial Sequence
  Synthetic
uuuugagguuuuuaggggguaaag

SEQ ID NO: 299591 - RNA, 18 nt, Artificial Sequence
  Synthetic
gaagaugguuugguaaag

SEQ ID NO: 299592 - RNA, 19 nt, Artificial Sequence
  Synthetic
ugaagaugguuugguaaag

SEQ ID NO: 299593 - RNA, 20 nt, Artificial Sequence
  Synthetic
cugaagaugguuugguaaag

SEQ ID NO: 299594 - RNA, 21 nt, Artificial Sequence
  Synthetic
ccugaagaugguuugguaaag

SEQ ID NO: 299595 - RNA, 22 nt, Artificial Sequence
  Synthetic
cccugaagaugguuugguaaag

SEQ ID NO: 299596 - RNA, 23 nt, Artificial Sequence
  Synthetic
acccugaagaugguuugguaaag

SEQ ID NO: 299597 - RNA, 24 nt, Artificial Sequence
  Synthetic
uacccugaagaugguuugguaaag

SEQ ID NO: 299598 - RNA, 18 nt, Artificial Sequence
  Synthetic
auuuacagaaauguaaag

SEQ ID NO: 299599 - RNA, 19 nt, Artificial Sequence
  Synthetic
uauuuacagaaauguaaag

SEQ ID NO: 299600 - RNA, 20 nt, Artificial Sequence
  Synthetic
auauuuacagaaauguaaag

SEQ ID NO: 299601 - RNA, 21 nt, Artificial Sequence
  Synthetic
uauauuuacagaaauguaaag

SEQ ID NO: 299602 - RNA, 22 nt, Artificial Sequence
  Synthetic
auauauuuacagaaauguaaag

SEQ ID NO: 299603 - RNA, 23 nt, Artificial Sequence
  Synthetic
aauauauuuacagaaauguaaag

SEQ ID NO: 299604 - RNA, 24 nt, Artificial Sequence
  Synthetic
aaauauauuuacagaaauguaaag

SEQ ID NO: 299605 - RNA, 18 nt, Artificial Sequence
  Synthetic
guguuuuuagauguaaag

SEQ ID NO: 299606 - RNA, 19 nt, Artificial Sequence
  Synthetic
aguguuuuuagauguaaag

SEQ ID NO: 299607 - RNA, 20 nt, Artificial Sequence
  Synthetic
aaguguuuuuagauguaaag

SEQ ID NO: 299608 - RNA, 21 nt, Artificial Sequence
  Synthetic
gaaguguuuuuagauguaaag

SEQ ID NO: 299609 - RNA, 22 nt, Artificial Sequence
  Synthetic
ggaaguguuuuuagauguaaag

SEQ ID NO: 299610 - RNA, 23 nt, Artificial Sequence
  Synthetic
aggaaguguuuuuagauguaaag

SEQ ID NO: 299611 - RNA, 24 nt, Artificial Sequence
  Synthetic
uaggaaguguuuuuagauguaaag

SEQ ID NO: 299612 - RNA, 18 nt, Artificial Sequence
  Synthetic
uccuguguagcuguaaag

SEQ ID NO: 299613 - RNA, 19 nt, Artificial Sequence
  Synthetic
uuccuguguagcuguaaag

SEQ ID NO: 299614 - RNA, 20 nt, Artificial Sequence
  Synthetic
cuuccuguguagcuguaaag

SEQ ID NO: 299615 - RNA, 21 nt, Artificial Sequence
  Synthetic
ccuuccuguguagcuguaaag

SEQ ID NO: 299616 - RNA, 22 nt, Artificial Sequence
  Synthetic
uccuuccuguguagcuguaaag

SEQ ID NO: 299617 - RNA, 23 nt, Artificial Sequence
  Synthetic
cuccuuccuguguagcuguaaag

SEQ ID NO: 299618 - RNA, 24 nt, Artificial Sequence
  Synthetic
gcuccuuccuguguagcuguaaag

SEQ ID NO: 299619 - RNA, 18 nt, Artificial Sequence
  Synthetic
acuaucuggauuguaaag

SEQ ID NO: 299620 - RNA, 19 nt, Artificial Sequence
  Synthetic
aacuaucuggauuguaaag

SEQ ID NO: 299621 - RNA, 20 nt, Artificial Sequence
  Synthetic
aaacuaucuggauuguaaag

SEQ ID NO: 299622 - RNA, 21 nt, Artificial Sequence
  Synthetic
gaaacuaucuggauuguaaag

SEQ ID NO: 299623 - RNA, 22 nt, Artificial Sequence
  Synthetic
agaaacuaucuggauuguaaag

SEQ ID NO: 299624 - RNA, 23 nt, Artificial Sequence
  Synthetic
gagaaacuaucuggauuguaaag

SEQ ID NO: 299625 - RNA, 24 nt, Artificial Sequence
  Synthetic
ggagaaacuaucuggauuguaaag

SEQ ID NO: 299626 - RNA, 18 nt, Artificial Sequence
  Synthetic
ugcuuuuauuuuguaaag

SEQ ID NO: 299627 - RNA, 19 nt, Artificial Sequence
  Synthetic
gugcuuuuauuuuguaaag

SEQ ID NO: 299628 - RNA, 20 nt, Artificial Sequence
  Synthetic
ugugcuuuuauuuuguaaag

SEQ ID NO: 299629 - RNA, 21 nt, Artificial Sequence
  Synthetic
gugugcuuuuauuuuguaaag

SEQ ID NO: 299630 - RNA, 22 nt, Artificial Sequence
  Synthetic
ggugugcuuuuauuuuguaaag

SEQ ID NO: 299631 - RNA, 23 nt, Artificial Sequence
  Synthetic
aggugugcuuuuauuuuguaaag

SEQ ID NO: 299632 - RNA, 24 nt, Artificial Sequence
  Synthetic
gaggugugcuuuuauuuuguaaag

SEQ ID NO: 299633 - RNA, 18 nt, Artificial Sequence
  Synthetic
ccuaguccaaaauuaaag

SEQ ID NO: 299634 - RNA, 19 nt, Artificial Sequence
  Synthetic
cccuaguccaaaauuaaag

SEQ ID NO: 299635 - RNA, 20 nt, Artificial Sequence
  Synthetic
ucccuaguccaaaauuaaag

SEQ ID NO: 299636 - RNA, 21 nt, Artificial Sequence
  Synthetic
cucccuaguccaaaauuaaag

SEQ ID NO: 299637 - RNA, 22 nt, Artificial Sequence
  Synthetic
acucccuaguccaaaauuaaag

SEQ ID NO: 299638 - RNA, 23 nt, Artificial Sequence
  Synthetic
uacucccuaguccaaaauuaaag

SEQ ID NO: 299639 - RNA, 24 nt, Artificial Sequence
  Synthetic
guacucccuaguccaaaauuaaag

SEQ ID NO: 299640 - RNA, 18 nt, Artificial Sequence
  Synthetic
gaagacaaacaauuaaag

SEQ ID NO: 299641 - RNA, 19 nt, Artificial Sequence
  Synthetic
agaagacaaacaauuaaag

SEQ ID NO: 299642 - RNA, 20 nt, Artificial Sequence
  Synthetic
gagaagacaaacaauuaaag

SEQ ID NO: 299643 - RNA, 21 nt, Artificial Sequence
  Synthetic
agagaagacaaacaauuaaag

SEQ ID NO: 299644 - RNA, 22 nt, Artificial Sequence
  Synthetic
gagagaagacaaacaauuaaag

SEQ ID NO: 299645 - RNA, 23 nt, Artificial Sequence
  Synthetic
ugagagaagacaaacaauuaaag

SEQ ID NO: 299646 - RNA, 24 nt, Artificial Sequence
  Synthetic
augagagaagacaaacaauuaaag

SEQ ID NO: 299647 - RNA, 18 nt, Artificial Sequence
  Synthetic
caauucuaucaauuaaag

SEQ ID NO: 299648 - RNA, 19 nt, Artificial Sequence
  Synthetic
ccaauucuaucaauuaaag

SEQ ID NO: 299649 - RNA, 20 nt, Artificial Sequence
  Synthetic
uccaauucuaucaauuaaag

SEQ ID NO: 299650 - RNA, 21 nt, Artificial Sequence
  Synthetic
guccaauucuaucaauuaaag

SEQ ID NO: 299651 - RNA, 22 nt, Artificial Sequence
  Synthetic
uguccaauucuaucaauuaaag

SEQ ID NO: 299652 - RNA, 23 nt, Artificial Sequence
  Synthetic
uuguccaauucuaucaauuaaag

SEQ ID NO: 299653 - RNA, 24 nt, Artificial Sequence
  Synthetic
guuguccaauucuaucaauuaaag

SEQ ID NO: 299654 - RNA, 18 nt, Artificial Sequence
  Synthetic
uagaagaugagauuaaag

SEQ ID NO: 299655 - RNA, 19 nt, Artificial Sequence
  Synthetic
cuagaagaugagauuaaag

SEQ ID NO: 299656 - RNA, 20 nt, Artificial Sequence
  Synthetic
ucuagaagaugagauuaaag

SEQ ID NO: 299657 - RNA, 21 nt, Artificial Sequence
  Synthetic
aucuagaagaugagauuaaag

SEQ ID NO: 299658 - RNA, 22 nt, Artificial Sequence
  Synthetic
uaucuagaagaugagauuaaag

SEQ ID NO: 299659 - RNA, 23 nt, Artificial Sequence
  Synthetic
uuaucuagaagaugagauuaaag

SEQ ID NO: 299660 - RNA, 24 nt, Artificial Sequence
  Synthetic
uuuaucuagaagaugagauuaaag

SEQ ID NO: 299661 - RNA, 18 nt, Artificial Sequence
  Synthetic
aaaagaguguuauuaaag

SEQ ID NO: 299662 - RNA, 19 nt, Artificial Sequence
  Synthetic
aaaaagaguguuauuaaag

SEQ ID NO: 299663 - RNA, 20 nt, Artificial Sequence
  Synthetic
uaaaaagaguguuauuaaag

SEQ ID NO: 299664 - RNA, 21 nt, Artificial Sequence
  Synthetic
auaaaaagaguguuauuaaag

SEQ ID NO: 299665 - RNA, 22 nt, Artificial Sequence
  Synthetic
aauaaaaagaguguuauuaaag

SEQ ID NO: 299666 - RNA, 23 nt, Artificial Sequence
  Synthetic
uaauaaaaagaguguuauuaaag

SEQ ID NO: 299667 - RNA, 24 nt, Artificial Sequence
  Synthetic
cuaauaaaaagaguguuauuaaag

SEQ ID NO: 299668 - RNA, 18 nt, Artificial Sequence
  Synthetic
acagggcaaaacuuaaag

SEQ ID NO: 299669 - RNA, 19 nt, Artificial Sequence
  Synthetic
uacagggcaaaacuuaaag

SEQ ID NO: 299670 - RNA, 20 nt, Artificial Sequence
  Synthetic
auacagggcaaaacuuaaag

SEQ ID NO: 299671 - RNA, 21 nt, Artificial Sequence
  Synthetic
gauacagggcaaaacuuaaag

SEQ ID NO: 299672 - RNA, 22 nt, Artificial Sequence
  Synthetic
agauacagggcaaaacuuaaag

SEQ ID NO: 299673 - RNA, 23 nt, Artificial Sequence
  Synthetic
aagauacagggcaaaacuuaaag

SEQ ID NO: 299674 - RNA, 24 nt, Artificial Sequence
  Synthetic
aaagauacagggcaaaacuuaaag

SEQ ID NO: 299675 - RNA, 18 nt, Artificial Sequence
  Synthetic
uucgaugguggcuuaaag

SEQ ID NO: 299676 - RNA, 19 nt, Artificial Sequence
  Synthetic
guucgaugguggcuuaaag

SEQ ID NO: 299677 - RNA, 20 nt, Artificial Sequence
  Synthetic
uguucgaugguggcuuaaag

SEQ ID NO: 299678 - RNA, 21 nt, Artificial Sequence
  Synthetic
auguucgaugguggcuuaaag

SEQ ID NO: 299679 - RNA, 22 nt, Artificial Sequence
  Synthetic
cauguucgaugguggcuuaaag

SEQ ID NO: 299680 - RNA, 23 nt, Artificial Sequence
  Synthetic
gcauguucgaugguggcuuaaag

SEQ ID NO: 299681 - RNA, 24 nt, Artificial Sequence
  Synthetic
agcauguucgaugguggcuuaaag

SEQ ID NO: 299682 - RNA, 18 nt, Artificial Sequence
  Synthetic
uaucuaaacugcuuaaag

SEQ ID NO: 299683 - RNA, 19 nt, Artificial Sequence
  Synthetic
auaucuaaacugcuuaaag

SEQ ID NO: 299684 - RNA, 20 nt, Artificial Sequence
  Synthetic
aauaucuaaacugcuuaaag

SEQ ID NO: 299685 - RNA, 21 nt, Artificial Sequence
  Synthetic
aaauaucuaaacugcuuaaag

SEQ ID NO: 299686 - RNA, 22 nt, Artificial Sequence
  Synthetic
aaaauaucuaaacugcuuaaag

SEQ ID NO: 299687 - RNA, 23 nt, Artificial Sequence
  Synthetic
uaaaauaucuaaacugcuuaaag

SEQ ID NO: 299688 - RNA, 24 nt, Artificial Sequence
  Synthetic
uuaaaauaucuaaacugcuuaaag

SEQ ID NO: 299689 - RNA, 18 nt, Artificial Sequence
  Synthetic
caaacaaaaaucuuaaag

SEQ ID NO: 299690 - RNA, 19 nt, Artificial Sequence
  Synthetic
gcaaacaaaaaucuuaaag

SEQ ID NO: 299691 - RNA, 20 nt, Artificial Sequence
  Synthetic
agcaaacaaaaaucuuaaag

SEQ ID NO: 299692 - RNA, 21 nt, Artificial Sequence
  Synthetic
gagcaaacaaaaaucuuaaag

SEQ ID NO: 299693 - RNA, 22 nt, Artificial Sequence
  Synthetic
ugagcaaacaaaaaucuuaaag

SEQ ID NO: 299694 - RNA, 23 nt, Artificial Sequence
  Synthetic
augagcaaacaaaaaucuuaaag

SEQ ID NO: 299695 - RNA, 24 nt, Artificial Sequence
  Synthetic
aaugagcaaacaaaaaucuuaaag

SEQ ID NO: 299696 - RNA, 18 nt, Artificial Sequence
  Synthetic
uguugaccaaucuuaaag

SEQ ID NO: 299697 - RNA, 19 nt, Artificial Sequence
  Synthetic
uuguugaccaaucuuaaag

SEQ ID NO: 299698 - RNA, 20 nt, Artificial Sequence
  Synthetic
auuguugaccaaucuuaaag

SEQ ID NO: 299699 - RNA, 21 nt, Artificial Sequence
  Synthetic
gauuguugaccaaucuuaaag

SEQ ID NO: 299700 - RNA, 22 nt, Artificial Sequence
  Synthetic
agauuguugaccaaucuuaaag

SEQ ID NO: 299701 - RNA, 23 nt, Artificial Sequence
  Synthetic
cagauuguugaccaaucuuaaag

SEQ ID NO: 299702 - RNA, 24 nt, Artificial Sequence
  Synthetic
ucagauuguugaccaaucuuaaag

SEQ ID NO: 299703 - RNA, 18 nt, Artificial Sequence
  Synthetic
ucaaauguccucuuaaag

SEQ ID NO: 299704 - RNA, 19 nt, Artificial Sequence
  Synthetic
uucaaauguccucuuaaag

SEQ ID NO: 299705 - RNA, 20 nt, Artificial Sequence
  Synthetic
auucaaauguccucuuaaag

SEQ ID NO: 299706 - RNA, 21 nt, Artificial Sequence
  Synthetic
gauucaaauguccucuuaaag

SEQ ID NO: 299707 - RNA, 22 nt, Artificial Sequence
  Synthetic
cgauucaaauguccucuuaaag

SEQ ID NO: 299708 - RNA, 23 nt, Artificial Sequence
  Synthetic
ucgauucaaauguccucuuaaag

SEQ ID NO: 299709 - RNA, 24 nt, Artificial Sequence
  Synthetic
gucgauucaaauguccucuuaaag

SEQ ID NO: 299710 - RNA, 18 nt, Artificial Sequence
  Synthetic
cagaaaaucacguuaaag

SEQ ID NO: 299711 - RNA, 19 nt, Artificial Sequence
  Synthetic
acagaaaaucacguuaaag

SEQ ID NO: 299712 - RNA, 20 nt, Artificial Sequence
  Synthetic
aacagaaaaucacguuaaag

SEQ ID NO: 299713 - RNA, 21 nt, Artificial Sequence
  Synthetic
uaacagaaaaucacguuaaag

SEQ ID NO: 299714 - RNA, 22 nt, Artificial Sequence
  Synthetic
uuaacagaaaaucacguuaaag

SEQ ID NO: 299715 - RNA, 23 nt, Artificial Sequence
  Synthetic
auuaacagaaaaucacguuaaag

SEQ ID NO: 299716 - RNA, 24 nt, Artificial Sequence
  Synthetic
uauuaacagaaaaucacguuaaag

SEQ ID NO: 299717 - RNA, 18 nt, Artificial Sequence
  Synthetic
uaugcuuuucuguuaaag

SEQ ID NO: 299718 - RNA, 19 nt, Artificial Sequence
  Synthetic
guaugcuuuucuguuaaag

SEQ ID NO: 299719 - RNA, 20 nt, Artificial Sequence
  Synthetic
uguaugcuuuucuguuaaag

SEQ ID NO: 299720 - RNA, 21 nt, Artificial Sequence
  Synthetic
guguaugcuuuucuguuaaag

SEQ ID NO: 299721 - RNA, 22 nt, Artificial Sequence
  Synthetic
uguguaugcuuuucuguuaaag

SEQ ID NO: 299722 - RNA, 23 nt, Artificial Sequence
  Synthetic
auguguaugcuuuucuguuaaag

SEQ ID NO: 299723 - RNA, 24 nt, Artificial Sequence
  Synthetic
aauguguaugcuuuucuguuaaag

SEQ ID NO: 299724 - RNA, 18 nt, Artificial Sequence
  Synthetic
uggugaaagaauuuaaag

SEQ ID NO: 299725 - RNA, 19 nt, Artificial Sequence
  Synthetic
guggugaaagaauuuaaag

SEQ ID NO: 299726 - RNA, 20 nt, Artificial Sequence
  Synthetic
gguggugaaagaauuuaaag

SEQ ID NO: 299727 - RNA, 21 nt, Artificial Sequence
  Synthetic
agguggugaaagaauuuaaag

SEQ ID NO: 299728 - RNA, 22 nt, Artificial Sequence
  Synthetic
cagguggugaaagaauuuaaag

SEQ ID NO: 299729 - RNA, 23 nt, Artificial Sequence
  Synthetic
gcagguggugaaagaauuuaaag

SEQ ID NO: 299730 - RNA, 24 nt, Artificial Sequence
  Synthetic
agcagguggugaaagaauuuaaag

SEQ ID NO: 299731 - RNA, 18 nt, Artificial Sequence
  Synthetic
accucaaugcauuuaaag

SEQ ID NO: 299732 - RNA, 19 nt, Artificial Sequence
  Synthetic
aaccucaaugcauuuaaag

SEQ ID NO: 299733 - RNA, 20 nt, Artificial Sequence
  Synthetic
uaaccucaaugcauuuaaag

SEQ ID NO: 299734 - RNA, 21 nt, Artificial Sequence
  Synthetic
guaaccucaaugcauuuaaag

SEQ ID NO: 299735 - RNA, 22 nt, Artificial Sequence
  Synthetic
aguaaccucaaugcauuuaaag

SEQ ID NO: 299736 - RNA, 23 nt, Artificial Sequence
  Synthetic
caguaaccucaaugcauuuaaag

SEQ ID NO: 299737 - RNA, 24 nt, Artificial Sequence
  Synthetic
ccaguaaccucaaugcauuuaaag

SEQ ID NO: 299738 - RNA, 18 nt, Artificial Sequence
  Synthetic
auuuuuuucacuuuaaag

SEQ ID NO: 299739 - RNA, 19 nt, Artificial Sequence
  Synthetic
uauuuuuuucacuuuaaag

SEQ ID NO: 299740 - RNA, 20 nt, Artificial Sequence
  Synthetic
auauuuuuuucacuuuaaag

SEQ ID NO: 299741 - RNA, 21 nt, Artificial Sequence
  Synthetic
cauauuuuuuucacuuuaaag

SEQ ID NO: 299742 - RNA, 22 nt, Artificial Sequence
  Synthetic
ucauauuuuuuucacuuuaaag

SEQ ID NO: 299743 - RNA, 23 nt, Artificial Sequence
  Synthetic
aucauauuuuuuucacuuuaaag

SEQ ID NO: 299744 - RNA, 24 nt, Artificial Sequence
  Synthetic
caucauauuuuuuucacuuuaaag

SEQ ID NO: 299745 - RNA, 18 nt, Artificial Sequence
  Synthetic
agaauaaauucuuuaaag

SEQ ID NO: 299746 - RNA, 19 nt, Artificial Sequence
  Synthetic
uagaauaaauucuuuaaag

SEQ ID NO: 299747 - RNA, 20 nt, Artificial Sequence
  Synthetic
guagaauaaauucuuuaaag

SEQ ID NO: 299748 - RNA, 21 nt, Artificial Sequence
  Synthetic
aguagaauaaauucuuuaaag

SEQ ID NO: 299749 - RNA, 22 nt, Artificial Sequence
  Synthetic
gaguagaauaaauucuuuaaag

SEQ ID NO: 299750 - RNA, 23 nt, Artificial Sequence
  Synthetic
agaguagaauaaauucuuuaaag

SEQ ID NO: 299751 - RNA, 24 nt, Artificial Sequence
  Synthetic
uagaguagaauaaauucuuuaaag

SEQ ID NO: 299752 - RNA, 18 nt, Artificial Sequence
  Synthetic
uuaugguaaaguuuaaag

SEQ ID NO: 299753 - RNA, 19 nt, Artificial Sequence
  Synthetic
cuuaugguaaaguuuaaag

SEQ ID NO: 299754 - RNA, 20 nt, Artificial Sequence
  Synthetic
ucuuaugguaaaguuuaaag

SEQ ID NO: 299755 - RNA, 21 nt, Artificial Sequence
  Synthetic
aucuuaugguaaaguuuaaag

SEQ ID NO: 299756 - RNA, 22 nt, Artificial Sequence
  Synthetic
gaucuuaugguaaaguuuaaag

SEQ ID NO: 299757 - RNA, 23 nt, Artificial Sequence
  Synthetic
agaucuuaugguaaaguuuaaag

SEQ ID NO: 299758 - RNA, 24 nt, Artificial Sequence
  Synthetic
aagaucuuaugguaaaguuuaaag

SEQ ID NO: 299759 - RNA, 18 nt, Artificial Sequence
  Synthetic
ggacacugaaguuuaaag

SEQ ID NO: 299760 - RNA, 19 nt, Artificial Sequence
  Synthetic
aggacacugaaguuuaaag

SEQ ID NO: 299761 - RNA, 20 nt, Artificial Sequence
  Synthetic
aaggacacugaaguuuaaag

SEQ ID NO: 299762 - RNA, 21 nt, Artificial Sequence
  Synthetic
caaggacacugaaguuuaaag

SEQ ID NO: 299763 - RNA, 22 nt, Artificial Sequence
  Synthetic
ccaaggacacugaaguuuaaag

SEQ ID NO: 299764 - RNA, 23 nt, Artificial Sequence
  Synthetic
accaaggacacugaaguuuaaag

SEQ ID NO: 299765 - RNA, 24 nt, Artificial Sequence
  Synthetic
uaccaaggacacugaaguuuaaag

SEQ ID NO: 299766 - RNA, 18 nt, Artificial Sequence
  Synthetic
uguuguuguuguuuaaag

SEQ ID NO: 299767 - RNA, 19 nt, Artificial Sequence
  Synthetic
uuguuguuguuguuuaaag

SEQ ID NO: 299768 - RNA, 20 nt, Artificial Sequence
  Synthetic
guuguuguuguuguuuaaag

SEQ ID NO: 299769 - RNA, 21 nt, Artificial Sequence
  Synthetic
uguuguuguuguuguuuaaag

SEQ ID NO: 299770 - RNA, 22 nt, Artificial Sequence
  Synthetic
uuguuguuguuguuguuuaaag

SEQ ID NO: 299771 - RNA, 23 nt, Artificial Sequence
  Synthetic
auuguuguuguuguuguuuaaag

SEQ ID NO: 299772 - RNA, 24 nt, Artificial Sequence
  Synthetic
uauuguuguuguuguuguuuaaag

SEQ ID NO: 299773 - RNA, 18 nt, Artificial Sequence
  Synthetic
aaaguuggcauuuuaaag

SEQ ID NO: 299774 - RNA, 19 nt, Artificial Sequence
  Synthetic
caaaguuggcauuuuaaag

SEQ ID NO: 299775 - RNA, 20 nt, Artificial Sequence
  Synthetic
gcaaaguuggcauuuuaaag

SEQ ID NO: 299776 - RNA, 21 nt, Artificial Sequence
  Synthetic
agcaaaguuggcauuuuaaag

SEQ ID NO: 299777 - RNA, 22 nt, Artificial Sequence
  Synthetic
aagcaaaguuggcauuuuaaag

SEQ ID NO: 299778 - RNA, 23 nt, Artificial Sequence
  Synthetic
uaagcaaaguuggcauuuuaaag

SEQ ID NO: 299779 - RNA, 24 nt, Artificial Sequence
  Synthetic
guaagcaaaguuggcauuuuaaag

SEQ ID NO: 299780 - RNA, 18 nt, Artificial Sequence
  Synthetic
gaauuuuaucuuuuaaag

SEQ ID NO: 299781 - RNA, 19 nt, Artificial Sequence
  Synthetic
agaauuuuaucuuuuaaag

SEQ ID NO: 299782 - RNA, 20 nt, Artificial Sequence
  Synthetic
uagaauuuuaucuuuuaaag

SEQ ID NO: 299783 - RNA, 21 nt, Artificial Sequence
  Synthetic
auagaauuuuaucuuuuaaag

SEQ ID NO: 299784 - RNA, 22 nt, Artificial Sequence
  Synthetic
uauagaauuuuaucuuuuaaag

SEQ ID NO: 299785 - RNA, 23 nt, Artificial Sequence
  Synthetic
cuauagaauuuuaucuuuuaaag

SEQ ID NO: 299786 - RNA, 24 nt, Artificial Sequence
  Synthetic
acuauagaauuuuaucuuuuaaag

SEQ ID NO: 299787 - RNA, 18 nt, Artificial Sequence
  Synthetic
gaagaaauauuuuuaaag

SEQ ID NO: 299788 - RNA, 19 nt, Artificial Sequence
  Synthetic
agaagaaauauuuuuaaag

SEQ ID NO: 299789 - RNA, 20 nt, Artificial Sequence
  Synthetic
aagaagaaauauuuuuaaag

SEQ ID NO: 299790 - RNA, 21 nt, Artificial Sequence
  Synthetic
aaagaagaaauauuuuuaaag

SEQ ID NO: 299791 - RNA, 22 nt, Artificial Sequence
  Synthetic
gaaagaagaaauauuuuuaaag

SEQ ID NO: 299792 - RNA, 23 nt, Artificial Sequence
  Synthetic
ggaaagaagaaauauuuuuaaag

SEQ ID NO: 299793 - RNA, 24 nt, Artificial Sequence
  Synthetic
aggaaagaagaaauauuuuuaaag

SEQ ID NO: 299794 - RNA, 18 nt, Artificial Sequence
  Synthetic
aacaaagaggaaaacaag

SEQ ID NO: 299795 - RNA, 19 nt, Artificial Sequence
  Synthetic
gaacaaagaggaaaacaag

SEQ ID NO: 299796 - RNA, 20 nt, Artificial Sequence
  Synthetic
agaacaaagaggaaaacaag

SEQ ID NO: 299797 - RNA, 21 nt, Artificial Sequence
  Synthetic
aagaacaaagaggaaaacaag

SEQ ID NO: 299798 - RNA, 22 nt, Artificial Sequence
  Synthetic
gaagaacaaagaggaaaacaag

SEQ ID NO: 299799 - RNA, 23 nt, Artificial Sequence
  Synthetic
ggaagaacaaagaggaaaacaag

SEQ ID NO: 299800 - RNA, 24 nt, Artificial Sequence
  Synthetic
uggaagaacaaagaggaaaacaag

SEQ ID NO: 299801 - RNA, 18 nt, Artificial Sequence
  Synthetic
uguaccuaggcaaacaag

SEQ ID NO: 299802 - RNA, 19 nt, Artificial Sequence
  Synthetic
guguaccuaggcaaacaag

SEQ ID NO: 299803 - RNA, 20 nt, Artificial Sequence
  Synthetic
gguguaccuaggcaaacaag

SEQ ID NO: 299804 - RNA, 21 nt, Artificial Sequence
  Synthetic
agguguaccuaggcaaacaag

SEQ ID NO: 299805 - RNA, 22 nt, Artificial Sequence
  Synthetic
uagguguaccuaggcaaacaag

SEQ ID NO: 299806 - RNA, 23 nt, Artificial Sequence
  Synthetic
guagguguaccuaggcaaacaag

SEQ ID NO: 299807 - RNA, 24 nt, Artificial Sequence
  Synthetic
aguagguguaccuaggcaaacaag

SEQ ID NO: 299808 - RNA, 18 nt, Artificial Sequence
  Synthetic
aauaaggagagaaacaag

SEQ ID NO: 299809 - RNA, 19 nt, Artificial Sequence
  Synthetic
aaauaaggagagaaacaag

SEQ ID NO: 299810 - RNA, 20 nt, Artificial Sequence
  Synthetic
aaaauaaggagagaaacaag

SEQ ID NO: 299811 - RNA, 21 nt, Artificial Sequence
  Synthetic
uaaaauaaggagagaaacaag

SEQ ID NO: 299812 - RNA, 22 nt, Artificial Sequence
  Synthetic
auaaaauaaggagagaaacaag

SEQ ID NO: 299813 - RNA, 23 nt, Artificial Sequence
  Synthetic
aauaaaauaaggagagaaacaag

SEQ ID NO: 299814 - RNA, 24 nt, Artificial Sequence
  Synthetic
aaauaaaauaaggagagaaacaag

SEQ ID NO: 299815 - RNA, 18 nt, Artificial Sequence
  Synthetic
cuuuaccugagaaacaag

SEQ ID NO: 299816 - RNA, 19 nt, Artificial Sequence
  Synthetic
gcuuuaccugagaaacaag

SEQ ID NO: 299817 - RNA, 20 nt, Artificial Sequence
  Synthetic
agcuuuaccugagaaacaag

SEQ ID NO: 299818 - RNA, 21 nt, Artificial Sequence
  Synthetic
gagcuuuaccugagaaacaag

SEQ ID NO: 299819 - RNA, 22 nt, Artificial Sequence
  Synthetic
agagcuuuaccugagaaacaag

SEQ ID NO: 299820 - RNA, 23 nt, Artificial Sequence
  Synthetic
cagagcuuuaccugagaaacaag

SEQ ID NO: 299821 - RNA, 24 nt, Artificial Sequence
  Synthetic
ccagagcuuuaccugagaaacaag

SEQ ID NO: 299822 - RNA, 18 nt, Artificial Sequence
  Synthetic
accagccuggccaacaag

SEQ ID NO: 299823 - RNA, 19 nt, Artificial Sequence
  Synthetic
gaccagccuggccaacaag

SEQ ID NO: 299824 - RNA, 20 nt, Artificial Sequence
  Synthetic
agaccagccuggccaacaag

SEQ ID NO: 299825 - RNA, 21 nt, Artificial Sequence
  Synthetic
aagaccagccuggccaacaag

SEQ ID NO: 299826 - RNA, 22 nt, Artificial Sequence
  Synthetic
caagaccagccuggccaacaag

SEQ ID NO: 299827 - RNA, 23 nt, Artificial Sequence
  Synthetic
ucaagaccagccuggccaacaag

SEQ ID NO: 299828 - RNA, 24 nt, Artificial Sequence
  Synthetic
uucaagaccagccuggccaacaag

SEQ ID NO: 299829 - RNA, 18 nt, Artificial Sequence
  Synthetic
accguccuggccaacaag

SEQ ID NO: 299830 - RNA, 19 nt, Artificial Sequence
  Synthetic
gaccguccuggccaacaag

SEQ ID NO: 299831 - RNA, 20 nt, Artificial Sequence
  Synthetic
agaccguccuggccaacaag

SEQ ID NO: 299832 - RNA, 21 nt, Artificial Sequence
  Synthetic
gagaccguccuggccaacaag

SEQ ID NO: 299833 - RNA, 22 nt, Artificial Sequence
  Synthetic
cgagaccguccuggccaacaag

SEQ ID NO: 299834 - RNA, 23 nt, Artificial Sequence
  Synthetic
ucgagaccguccuggccaacaag

SEQ ID NO: 299835 - RNA, 24 nt, Artificial Sequence
  Synthetic
aucgagaccguccuggccaacaag

SEQ ID NO: 299836 - RNA, 18 nt, Artificial Sequence
  Synthetic
agggagcaacgcaacaag

SEQ ID NO: 299837 - RNA, 19 nt, Artificial Sequence
  Synthetic
aagggagcaacgcaacaag

SEQ ID NO: 299838 - RNA, 20 nt, Artificial Sequence
  Synthetic
aaagggagcaacgcaacaag

SEQ ID NO: 299839 - RNA, 21 nt, Artificial Sequence
  Synthetic
uaaagggagcaacgcaacaag

SEQ ID NO: 299840 - RNA, 22 nt, Artificial Sequence
  Synthetic
guaaagggagcaacgcaacaag

SEQ ID NO: 299841 - RNA, 23 nt, Artificial Sequence
  Synthetic
gguaaagggagcaacgcaacaag

SEQ ID NO: 299842 - RNA, 24 nt, Artificial Sequence
  Synthetic
ugguaaagggagcaacgcaacaag

SEQ ID NO: 299843 - RNA, 18 nt, Artificial Sequence
  Synthetic
agugaucaaugcaacaag

SEQ ID NO: 299844 - RNA, 19 nt, Artificial Sequence
  Synthetic
aagugaucaaugcaacaag

SEQ ID NO: 299845 - RNA, 20 nt, Artificial Sequence
  Synthetic
aaagugaucaaugcaacaag

SEQ ID NO: 299846 - RNA, 21 nt, Artificial Sequence
  Synthetic
uaaagugaucaaugcaacaag

SEQ ID NO: 299847 - RNA, 22 nt, Artificial Sequence
  Synthetic
guaaagugaucaaugcaacaag

SEQ ID NO: 299848 - RNA, 23 nt, Artificial Sequence
  Synthetic
gguaaagugaucaaugcaacaag

SEQ ID NO: 299849 - RNA, 24 nt, Artificial Sequence
  Synthetic
ugguaaagugaucaaugcaacaag

SEQ ID NO: 299850 - RNA, 18 nt, Artificial Sequence
  Synthetic
cuacaguagaucaacaag

SEQ ID NO: 299851 - RNA, 19 nt, Artificial Sequence
  Synthetic
ucuacaguagaucaacaag

SEQ ID NO: 299852 - RNA, 20 nt, Artificial Sequence
  Synthetic
aucuacaguagaucaacaag

SEQ ID NO: 299853 - RNA, 21 nt, Artificial Sequence
  Synthetic
aaucuacaguagaucaacaag

SEQ ID NO: 299854 - RNA, 22 nt, Artificial Sequence
  Synthetic
aaaucuacaguagaucaacaag

SEQ ID NO: 299855 - RNA, 23 nt, Artificial Sequence
  Synthetic
aaaaucuacaguagaucaacaag

SEQ ID NO: 299856 - RNA, 24 nt, Artificial Sequence
  Synthetic
aaaaaucuacaguagaucaacaag

SEQ ID NO: 299857 - RNA, 18 nt, Artificial Sequence
  Synthetic
caaaaaguuuucaacaag

SEQ ID NO: 299858 - RNA, 19 nt, Artificial Sequence
  Synthetic
ccaaaaaguuuucaacaag

SEQ ID NO: 299859 - RNA, 20 nt, Artificial Sequence
  Synthetic
gccaaaaaguuuucaacaag

SEQ ID NO: 299860 - RNA, 21 nt, Artificial Sequence
  Synthetic
agccaaaaaguuuucaacaag

SEQ ID NO: 299861 - RNA, 22 nt, Artificial Sequence
  Synthetic
gagccaaaaaguuuucaacaag

SEQ ID NO: 299862 - RNA, 23 nt, Artificial Sequence
  Synthetic
ggagccaaaaaguuuucaacaag

SEQ ID NO: 299863 - RNA, 24 nt, Artificial Sequence
  Synthetic
aggagccaaaaaguuuucaacaag

SEQ ID NO: 299864 - RNA, 18 nt, Artificial Sequence
  Synthetic
aaggucaugaagaacaag

SEQ ID NO: 299865 - RNA, 19 nt, Artificial Sequence
  Synthetic
caaggucaugaagaacaag

SEQ ID NO: 299866 - RNA, 20 nt, Artificial Sequence
  Synthetic
ucaaggucaugaagaacaag

SEQ ID NO: 299867 - RNA, 21 nt, Artificial Sequence
  Synthetic
uucaaggucaugaagaacaag

SEQ ID NO: 299868 - RNA, 22 nt, Artificial Sequence
  Synthetic
uuucaaggucaugaagaacaag

SEQ ID NO: 299869 - RNA, 23 nt, Artificial Sequence
  Synthetic
guuucaaggucaugaagaacaag

SEQ ID NO: 299870 - RNA, 24 nt, Artificial Sequence
  Synthetic
aguuucaaggucaugaagaacaag

SEQ ID NO: 299871 - RNA, 18 nt, Artificial Sequence
  Synthetic
auggaagauaagaacaag

SEQ ID NO: 299872 - RNA, 19 nt, Artificial Sequence
  Synthetic
gauggaagauaagaacaag

SEQ ID NO: 299873 - RNA, 20 nt, Artificial Sequence
  Synthetic
ugauggaagauaagaacaag

SEQ ID NO: 299874 - RNA, 21 nt, Artificial Sequence
  Synthetic
augauggaagauaagaacaag

SEQ ID NO: 299875 - RNA, 22 nt, Artificial Sequence
  Synthetic
caugauggaagauaagaacaag

SEQ ID NO: 299876 - RNA, 23 nt, Artificial Sequence
  Synthetic
ucaugauggaagauaagaacaag

SEQ ID NO: 299877 - RNA, 24 nt, Artificial Sequence
  Synthetic
cucaugauggaagauaagaacaag

SEQ ID NO: 299878 - RNA, 18 nt, Artificial Sequence
  Synthetic
auacuuucuaagaacaag

SEQ ID NO: 299879 - RNA, 19 nt, Artificial Sequence
  Synthetic
cauacuuucuaagaacaag

SEQ ID NO: 299880 - RNA, 20 nt, Artificial Sequence
  Synthetic
acauacuuucuaagaacaag

SEQ ID NO: 299881 - RNA, 21 nt, Artificial Sequence
  Synthetic
cacauacuuucuaagaacaag

SEQ ID NO: 299882 - RNA, 22 nt, Artificial Sequence
  Synthetic
acacauacuuucuaagaacaag

SEQ ID NO: 299883 - RNA, 23 nt, Artificial Sequence
  Synthetic
aacacauacuuucuaagaacaag

SEQ ID NO: 299884 - RNA, 24 nt, Artificial Sequence
  Synthetic
aaacacauacuuucuaagaacaag

SEQ ID NO: 299885 - RNA, 18 nt, Artificial Sequence
  Synthetic
ucauaaaaagagaacaag

SEQ ID NO: 299886 - RNA, 19 nt, Artificial Sequence
  Synthetic
cucauaaaaagagaacaag

SEQ ID NO: 299887 - RNA, 20 nt, Artificial Sequence
  Synthetic
ccucauaaaaagagaacaag

SEQ ID NO: 299888 - RNA, 21 nt, Artificial Sequence
  Synthetic
cccucauaaaaagagaacaag

SEQ ID NO: 299889 - RNA, 22 nt, Artificial Sequence
  Synthetic
ucccucauaaaaagagaacaag

SEQ ID NO: 299890 - RNA, 23 nt, Artificial Sequence
  Synthetic
aucccucauaaaaagagaacaag

SEQ ID NO: 299891 - RNA, 24 nt, Artificial Sequence
  Synthetic
caucccucauaaaaagagaacaag

SEQ ID NO: 299892 - RNA, 18 nt, Artificial Sequence
  Synthetic
aucacagacuagaacaag

SEQ ID NO: 299893 - RNA, 19 nt, Artificial Sequence
  Synthetic
caucacagacuagaacaag

SEQ ID NO: 299894 - RNA, 20 nt, Artificial Sequence
  Synthetic
ccaucacagacuagaacaag

SEQ ID NO: 299895 - RNA, 21 nt, Artificial Sequence
  Synthetic
cccaucacagacuagaacaag

SEQ ID NO: 299896 - RNA, 22 nt, Artificial Sequence
  Synthetic
ccccaucacagacuagaacaag

SEQ ID NO: 299897 - RNA, 23 nt, Artificial Sequence
  Synthetic
accccaucacagacuagaacaag

SEQ ID NO: 299898 - RNA, 24 nt, Artificial Sequence
  Synthetic
gaccccaucacagacuagaacaag

SEQ ID NO: 299899 - RNA, 18 nt, Artificial Sequence
  Synthetic
gugaagugguagaacaag

SEQ ID NO: 299900 - RNA, 19 nt, Artificial Sequence
  Synthetic
agugaagugguagaacaag

SEQ ID NO: 299901 - RNA, 20 nt, Artificial Sequence
  Synthetic
aagugaagugguagaacaag

SEQ ID NO: 299902 - RNA, 21 nt, Artificial Sequence
  Synthetic
gaagugaagugguagaacaag

SEQ ID NO: 299903 - RNA, 22 nt, Artificial Sequence
  Synthetic
ugaagugaagugguagaacaag

SEQ ID NO: 299904 - RNA, 23 nt, Artificial Sequence
  Synthetic
augaagugaagugguagaacaag

SEQ ID NO: 299905 - RNA, 24 nt, Artificial Sequence
  Synthetic
caugaagugaagugguagaacaag

SEQ ID NO: 299906 - RNA, 18 nt, Artificial Sequence
  Synthetic
aaaaaucaaacuaacaag

SEQ ID NO: 299907 - RNA, 19 nt, Artificial Sequence
  Synthetic
uaaaaaucaaacuaacaag

SEQ ID NO: 299908 - RNA, 20 nt, Artificial Sequence
  Synthetic
guaaaaaucaaacuaacaag

SEQ ID NO: 299909 - RNA, 21 nt, Artificial Sequence
  Synthetic
aguaaaaaucaaacuaacaag

SEQ ID NO: 299910 - RNA, 22 nt, Artificial Sequence
  Synthetic
uaguaaaaaucaaacuaacaag

SEQ ID NO: 299911 - RNA, 23 nt, Artificial Sequence
  Synthetic
uuaguaaaaaucaaacuaacaag

SEQ ID NO: 299912 - RNA, 24 nt, Artificial Sequence
  Synthetic
uuuaguaaaaaucaaacuaacaag

SEQ ID NO: 299913 - RNA, 18 nt, Artificial Sequence
  Synthetic
aguagagaaacuaacaag

SEQ ID NO: 299914 - RNA, 19 nt, Artificial Sequence
  Synthetic
caguagagaaacuaacaag

SEQ ID NO: 299915 - RNA, 20 nt, Artificial Sequence
  Synthetic
gcaguagagaaacuaacaag

SEQ ID NO: 299916 - RNA, 21 nt, Artificial Sequence
  Synthetic
agcaguagagaaacuaacaag

SEQ ID NO: 299917 - RNA, 22 nt, Artificial Sequence
  Synthetic
gagcaguagagaaacuaacaag

SEQ ID NO: 299918 - RNA, 23 nt, Artificial Sequence
  Synthetic
agagcaguagagaaacuaacaag

SEQ ID NO: 299919 - RNA, 24 nt, Artificial Sequence
  Synthetic
aagagcaguagagaaacuaacaag

SEQ ID NO: 299920 - RNA, 18 nt, Artificial Sequence
  Synthetic
cauuuccuagcuaacaag

SEQ ID NO: 299921 - RNA, 19 nt, Artificial Sequence
  Synthetic
ucauuuccuagcuaacaag

SEQ ID NO: 299922 - RNA, 20 nt, Artificial Sequence
  Synthetic
cucauuuccuagcuaacaag

SEQ ID NO: 299923 - RNA, 21 nt, Artificial Sequence
  Synthetic
acucauuuccuagcuaacaag

SEQ ID NO: 299924 - RNA, 22 nt, Artificial Sequence
  Synthetic
uacucauuuccuagcuaacaag

SEQ ID NO: 299925 - RNA, 23 nt, Artificial Sequence
  Synthetic
cuacucauuuccuagcuaacaag

SEQ ID NO: 299926 - RNA, 24 nt, Artificial Sequence
  Synthetic
ccuacucauuuccuagcuaacaag

SEQ ID NO: 299927 - RNA, 18 nt, Artificial Sequence
  Synthetic
uuuaaugacuguaacaag

SEQ ID NO: 299928 - RNA, 19 nt, Artificial Sequence
  Synthetic
cuuuaaugacuguaacaag

SEQ ID NO: 299929 - RNA, 20 nt, Artificial Sequence
  Synthetic
gcuuuaaugacuguaacaag

SEQ ID NO: 299930 - RNA, 21 nt, Artificial Sequence
  Synthetic
ugcuuuaaugacuguaacaag

SEQ ID NO: 299931 - RNA, 22 nt, Artificial Sequence
  Synthetic
uugcuuuaaugacuguaacaag

SEQ ID NO: 299932 - RNA, 23 nt, Artificial Sequence
  Synthetic
uuugcuuuaaugacuguaacaag

SEQ ID NO: 299933 - RNA, 24 nt, Artificial Sequence
  Synthetic
cuuugcuuuaaugacuguaacaag

SEQ ID NO: 299934 - RNA, 18 nt, Artificial Sequence
  Synthetic
aaaagacagauuaacaag

SEQ ID NO: 299935 - RNA, 19 nt, Artificial Sequence
  Synthetic
caaaagacagauuaacaag

SEQ ID NO: 299936 - RNA, 20 nt, Artificial Sequence
  Synthetic
acaaaagacagauuaacaag

SEQ ID NO: 299937 - RNA, 21 nt, Artificial Sequence
  Synthetic
gacaaaagacagauuaacaag

SEQ ID NO: 299938 - RNA, 22 nt, Artificial Sequence
  Synthetic
ugacaaaagacagauuaacaag

SEQ ID NO: 299939 - RNA, 23 nt, Artificial Sequence
  Synthetic
gugacaaaagacagauuaacaag

SEQ ID NO: 299940 - RNA, 24 nt, Artificial Sequence
  Synthetic
agugacaaaagacagauuaacaag

SEQ ID NO: 299941 - RNA, 18 nt, Artificial Sequence
  Synthetic
auagagacauuuaacaag

SEQ ID NO: 299942 - RNA, 19 nt, Artificial Sequence
  Synthetic
uauagagacauuuaacaag

SEQ ID NO: 299943 - RNA, 20 nt, Artificial Sequence
  Synthetic
guauagagacauuuaacaag

SEQ ID NO: 299944 - RNA, 21 nt, Artificial Sequence
  Synthetic
aguauagagacauuuaacaag

SEQ ID NO: 299945 - RNA, 22 nt, Artificial Sequence
  Synthetic
aaguauagagacauuuaacaag

SEQ ID NO: 299946 - RNA, 23 nt, Artificial Sequence
  Synthetic
aaaguauagagacauuuaacaag

SEQ ID NO: 299947 - RNA, 24 nt, Artificial Sequence
  Synthetic
gaaaguauagagacauuuaacaag

SEQ ID NO: 299948 - RNA, 18 nt, Artificial Sequence
  Synthetic
gaauaauuauuuaacaag

SEQ ID NO: 299949 - RNA, 19 nt, Artificial Sequence
  Synthetic
ugaauaauuauuuaacaag

SEQ ID NO: 299950 - RNA, 20 nt, Artificial Sequence
  Synthetic
augaauaauuauuuaacaag

SEQ ID NO: 299951 - RNA, 21 nt, Artificial Sequence
  Synthetic
gaugaauaauuauuuaacaag

SEQ ID NO: 299952 - RNA, 22 nt, Artificial Sequence
  Synthetic
ugaugaauaauuauuuaacaag

SEQ ID NO: 299953 - RNA, 23 nt, Artificial Sequence
  Synthetic
cugaugaauaauuauuuaacaag

SEQ ID NO: 299954 - RNA, 24 nt, Artificial Sequence
  Synthetic
ucugaugaauaauuauuuaacaag

SEQ ID NO: 299955 - RNA, 18 nt, Artificial Sequence
  Synthetic
uggaggguggaacacaag

SEQ ID NO: 299956 - RNA, 19 nt, Artificial Sequence
  Synthetic
cuggaggguggaacacaag

SEQ ID NO: 299957 - RNA, 20 nt, Artificial Sequence
  Synthetic
acuggaggguggaacacaag

SEQ ID NO: 299958 - RNA, 21 nt, Artificial Sequence
  Synthetic
uacuggaggguggaacacaag

SEQ ID NO: 299959 - RNA, 22 nt, Artificial Sequence
  Synthetic
cuacuggaggguggaacacaag

SEQ ID NO: 299960 - RNA, 23 nt, Artificial Sequence
  Synthetic
ccuacuggaggguggaacacaag

SEQ ID NO: 299961 - RNA, 24 nt, Artificial Sequence
  Synthetic
gccuacuggaggguggaacacaag

SEQ ID NO: 299962 - RNA, 18 nt, Artificial Sequence
  Synthetic
agaaaguuggaacacaag

SEQ ID NO: 299963 - RNA, 19 nt, Artificial Sequence
  Synthetic
cagaaaguuggaacacaag

SEQ ID NO: 299964 - RNA, 20 nt, Artificial Sequence
  Synthetic
gcagaaaguuggaacacaag

SEQ ID NO: 299965 - RNA, 21 nt, Artificial Sequence
  Synthetic
agcagaaaguuggaacacaag

SEQ ID NO: 299966 - RNA, 22 nt, Artificial Sequence
  Synthetic
aagcagaaaguuggaacacaag

SEQ ID NO: 299967 - RNA, 23 nt, Artificial Sequence
  Synthetic
caagcagaaaguuggaacacaag

SEQ ID NO: 299968 - RNA, 24 nt, Artificial Sequence
  Synthetic
ucaagcagaaaguuggaacacaag

SEQ ID NO: 299969 - RNA, 18 nt, Artificial Sequence
  Synthetic
guaaaacccccacacaag

SEQ ID NO: 299970 - RNA, 19 nt, Artificial Sequence
  Synthetic
cguaaaacccccacacaag

SEQ ID NO: 299971 - RNA, 20 nt, Artificial Sequence
  Synthetic
ccguaaaacccccacacaag

SEQ ID NO: 299972 - RNA, 21 nt, Artificial Sequence
  Synthetic
gccguaaaacccccacacaag

SEQ ID NO: 299973 - RNA, 22 nt, Artificial Sequence
  Synthetic
agccguaaaacccccacacaag

SEQ ID NO: 299974 - RNA, 23 nt, Artificial Sequence
  Synthetic
aagccguaaaacccccacacaag

SEQ ID NO: 299975 - RNA, 24 nt, Artificial Sequence
  Synthetic
gaagccguaaaacccccacacaag

SEQ ID NO: 299976 - RNA, 18 nt, Artificial Sequence
  Synthetic
gucagagggucacacaag

SEQ ID NO: 299977 - RNA, 19 nt, Artificial Sequence
  Synthetic
agucagagggucacacaag

SEQ ID NO: 299978 - RNA, 20 nt, Artificial Sequence
  Synthetic
gagucagagggucacacaag

SEQ ID NO: 299979 - RNA, 21 nt, Artificial Sequence
  Synthetic
ggagucagagggucacacaag

SEQ ID NO: 299980 - RNA, 22 nt, Artificial Sequence
  Synthetic
uggagucagagggucacacaag

SEQ ID NO: 299981 - RNA, 23 nt, Artificial Sequence
  Synthetic
auggagucagagggucacacaag

SEQ ID NO: 299982 - RNA, 24 nt, Artificial Sequence
  Synthetic
aauggagucagagggucacacaag

SEQ ID NO: 299983 - RNA, 18 nt, Artificial Sequence
  Synthetic
cguuuuaauucacacaag

SEQ ID NO: 299984 - RNA, 19 nt, Artificial Sequence
  Synthetic
ucguuuuaauucacacaag

SEQ ID NO: 299985 - RNA, 20 nt, Artificial Sequence
  Synthetic
gucguuuuaauucacacaag

SEQ ID NO: 299986 - RNA, 21 nt, Artificial Sequence
  Synthetic
ggucguuuuaauucacacaag

SEQ ID NO: 299987 - RNA, 22 nt, Artificial Sequence
  Synthetic
aggucguuuuaauucacacaag

SEQ ID NO: 299988 - RNA, 23 nt, Artificial Sequence
  Synthetic
uaggucguuuuaauucacacaag

SEQ ID NO: 299989 - RNA, 24 nt, Artificial Sequence
  Synthetic
auaggucguuuuaauucacacaag

SEQ ID NO: 299990 - RNA, 18 nt, Artificial Sequence
  Synthetic
aaggcugacagacacaag

SEQ ID NO: 299991 - RNA, 19 nt, Artificial Sequence
  Synthetic
uaaggcugacagacacaag

SEQ ID NO: 299992 - RNA, 20 nt, Artificial Sequence
  Synthetic
auaaggcugacagacacaag

SEQ ID NO: 299993 - RNA, 21 nt, Artificial Sequence
  Synthetic
aauaaggcugacagacacaag

SEQ ID NO: 299994 - RNA, 22 nt, Artificial Sequence
  Synthetic
aaauaaggcugacagacacaag

SEQ ID NO: 299995 - RNA, 23 nt, Artificial Sequence
  Synthetic
gaaauaaggcugacagacacaag

SEQ ID NO: 299996 - RNA, 24 nt, Artificial Sequence
  Synthetic
ugaaauaaggcugacagacacaag

SEQ ID NO: 299997 - RNA, 18 nt, Artificial Sequence
  Synthetic
aucccuuuucuacacaag

SEQ ID NO: 299998 - RNA, 19 nt, Artificial Sequence
  Synthetic
uaucccuuuucuacacaag

SEQ ID NO: 299999 - RNA, 20 nt, Artificial Sequence
  Synthetic
cuaucccuuuucuacacaag

SEQ ID NO: 300000 - RNA, 21 nt, Artificial Sequence
  Synthetic
acuaucccuuuucuacacaag

SEQ ID NO: 300001 - RNA, 22 nt, Artificial Sequence
  Synthetic
uacuaucccuuuucuacacaag

SEQ ID NO: 300002 - RNA, 23 nt, Artificial Sequence
  Synthetic
uuacuaucccuuuucuacacaag

SEQ ID NO: 300003 - RNA, 24 nt, Artificial Sequence
  Synthetic
guuacuaucccuuuucuacacaag

SEQ ID NO: 300004 - RNA, 18 nt, Artificial Sequence
  Synthetic
uugauauaauaccacaag

SEQ ID NO: 300005 - RNA, 19 nt, Artificial Sequence
  Synthetic
guugauauaauaccacaag

SEQ ID NO: 300006 - RNA, 20 nt, Artificial Sequence
  Synthetic
gguugauauaauaccacaag

SEQ ID NO: 300007 - RNA, 21 nt, Artificial Sequence
  Synthetic
agguugauauaauaccacaag

SEQ ID NO: 300008 - RNA, 22 nt, Artificial Sequence
  Synthetic
aagguugauauaauaccacaag

SEQ ID NO: 300009 - RNA, 23 nt, Artificial Sequence
  Synthetic
gaagguugauauaauaccacaag

SEQ ID NO: 300010 - RNA, 24 nt, Artificial Sequence
  Synthetic
ugaagguugauauaauaccacaag

SEQ ID NO: 300011 - RNA, 18 nt, Artificial Sequence
  Synthetic
aaacagacaacccacaag

SEQ ID NO: 300012 - RNA, 19 nt, Artificial Sequence
  Synthetic
uaaacagacaacccacaag

SEQ ID NO: 300013 - RNA, 20 nt, Artificial Sequence
  Synthetic
guaaacagacaacccacaag

SEQ ID NO: 300014 - RNA, 21 nt, Artificial Sequence
  Synthetic
aguaaacagacaacccacaag

SEQ ID NO: 300015 - RNA, 22 nt, Artificial Sequence
  Synthetic
gaguaaacagacaacccacaag

SEQ ID NO: 300016 - RNA, 23 nt, Artificial Sequence
  Synthetic
agaguaaacagacaacccacaag

SEQ ID NO: 300017 - RNA, 24 nt, Artificial Sequence
  Synthetic
cagaguaaacagacaacccacaag

SEQ ID NO: 300018 - RNA, 18 nt, Artificial Sequence
  Synthetic
gaccauccuggccacaag

SEQ ID NO: 300019 - RNA, 19 nt, Artificial Sequence
  Synthetic
agaccauccuggccacaag

SEQ ID NO: 300020 - RNA, 20 nt, Artificial Sequence
  Synthetic
gagaccauccuggccacaag

SEQ ID NO: 300021 - RNA, 21 nt, Artificial Sequence
  Synthetic
cgagaccauccuggccacaag

SEQ ID NO: 300022 - RNA, 22 nt, Artificial Sequence
  Synthetic
ucgagaccauccuggccacaag

SEQ ID NO: 300023 - RNA, 23 nt, Artificial Sequence
  Synthetic
aucgagaccauccuggccacaag

SEQ ID NO: 300024 - RNA, 24 nt, Artificial Sequence
  Synthetic
gaucgagaccauccuggccacaag

SEQ ID NO: 300025 - RNA, 18 nt, Artificial Sequence
  Synthetic
gacaaauuguagcacaag

SEQ ID NO: 300026 - RNA, 19 nt, Artificial Sequence
  Synthetic
ugacaaauuguagcacaag

SEQ ID NO: 300027 - RNA, 20 nt, Artificial Sequence
  Synthetic
augacaaauuguagcacaag

SEQ ID NO: 300028 - RNA, 21 nt, Artificial Sequence
  Synthetic
gaugacaaauuguagcacaag

SEQ ID NO: 300029 - RNA, 22 nt, Artificial Sequence
  Synthetic
ugaugacaaauuguagcacaag

SEQ ID NO: 300030 - RNA, 23 nt, Artificial Sequence
  Synthetic
augaugacaaauuguagcacaag

SEQ ID NO: 300031 - RNA, 24 nt, Artificial Sequence
  Synthetic
caugaugacaaauuguagcacaag

SEQ ID NO: 300032 - RNA, 18 nt, Artificial Sequence
  Synthetic
aaaaucagguaucacaag

SEQ ID NO: 300033 - RNA, 19 nt, Artificial Sequence
  Synthetic
caaaaucagguaucacaag

SEQ ID NO: 300034 - RNA, 20 nt, Artificial Sequence
  Synthetic
ccaaaaucagguaucacaag

SEQ ID NO: 300035 - RNA, 21 nt, Artificial Sequence
  Synthetic
accaaaaucagguaucacaag

SEQ ID NO: 300036 - RNA, 22 nt, Artificial Sequence
  Synthetic
caccaaaaucagguaucacaag

SEQ ID NO: 300037 - RNA, 23 nt, Artificial Sequence
  Synthetic
acaccaaaaucagguaucacaag

SEQ ID NO: 300038 - RNA, 24 nt, Artificial Sequence
  Synthetic
cacaccaaaaucagguaucacaag

SEQ ID NO: 300039 - RNA, 18 nt, Artificial Sequence
  Synthetic
uugacacuucaggacaag

SEQ ID NO: 300040 - RNA, 19 nt, Artificial Sequence
  Synthetic
uuugacacuucaggacaag

SEQ ID NO: 300041 - RNA, 20 nt, Artificial Sequence
  Synthetic
uuuugacacuucaggacaag

SEQ ID NO: 300042 - RNA, 21 nt, Artificial Sequence
  Synthetic
auuuugacacuucaggacaag

SEQ ID NO: 300043 - RNA, 22 nt, Artificial Sequence
  Synthetic
gauuuugacacuucaggacaag

SEQ ID NO: 300044 - RNA, 23 nt, Artificial Sequence
  Synthetic
ugauuuugacacuucaggacaag

SEQ ID NO: 300045 - RNA, 24 nt, Artificial Sequence
  Synthetic
uugauuuugacacuucaggacaag

SEQ ID NO: 300046 - RNA, 18 nt, Artificial Sequence
  Synthetic
aauaauaaaggggacaag

SEQ ID NO: 300047 - RNA, 19 nt, Artificial Sequence
  Synthetic
caauaauaaaggggacaag

SEQ ID NO: 300048 - RNA, 20 nt, Artificial Sequence
  Synthetic
acaauaauaaaggggacaag

SEQ ID NO: 300049 - RNA, 21 nt, Artificial Sequence
  Synthetic
aacaauaauaaaggggacaag

SEQ ID NO: 300050 - RNA, 22 nt, Artificial Sequence
  Synthetic
caacaauaauaaaggggacaag

SEQ ID NO: 300051 - RNA, 23 nt, Artificial Sequence
  Synthetic
acaacaauaauaaaggggacaag

SEQ ID NO: 300052 - RNA, 24 nt, Artificial Sequence
  Synthetic
aacaacaauaauaaaggggacaag

SEQ ID NO: 300053 - RNA, 18 nt, Artificial Sequence
  Synthetic
uuucgguauuuggacaag

SEQ ID NO: 300054 - RNA, 19 nt, Artificial Sequence
  Synthetic
auuucgguauuuggacaag

SEQ ID NO: 300055 - RNA, 20 nt, Artificial Sequence
  Synthetic
uauuucgguauuuggacaag

SEQ ID NO: 300056 - RNA, 21 nt, Artificial Sequence
  Synthetic
guauuucgguauuuggacaag

SEQ ID NO: 300057 - RNA, 22 nt, Artificial Sequence
  Synthetic
uguauuucgguauuuggacaag

SEQ ID NO: 300058 - RNA, 23 nt, Artificial Sequence
  Synthetic
auguauuucgguauuuggacaag

SEQ ID NO: 300059 - RNA, 24 nt, Artificial Sequence
  Synthetic
gauguauuucgguauuuggacaag

SEQ ID NO: 300060 - RNA, 18 nt, Artificial Sequence
  Synthetic
agagaucugaaugacaag

SEQ ID NO: 300061 - RNA, 19 nt, Artificial Sequence
  Synthetic
cagagaucugaaugacaag

SEQ ID NO: 300062 - RNA, 20 nt, Artificial Sequence
  Synthetic
acagagaucugaaugacaag

SEQ ID NO: 300063 - RNA, 21 nt, Artificial Sequence
  Synthetic
aacagagaucugaaugacaag

SEQ ID NO: 300064 - RNA, 22 nt, Artificial Sequence
  Synthetic
aaacagagaucugaaugacaag

SEQ ID NO: 300065 - RNA, 23 nt, Artificial Sequence
  Synthetic
uaaacagagaucugaaugacaag

SEQ ID NO: 300066 - RNA, 24 nt, Artificial Sequence
  Synthetic
uuaaacagagaucugaaugacaag

SEQ ID NO: 300067 - RNA, 18 nt, Artificial Sequence
  Synthetic
acuuuugugaaugacaag

SEQ ID NO: 300068 - RNA, 19 nt, Artificial Sequence
  Synthetic
aacuuuugugaaugacaag

SEQ ID NO: 300069 - RNA, 20 nt, Artificial Sequence
  Synthetic
gaacuuuugugaaugacaag

SEQ ID NO: 300070 - RNA, 21 nt, Artificial Sequence
  Synthetic
ggaacuuuugugaaugacaag

SEQ ID NO: 300071 - RNA, 22 nt, Artificial Sequence
  Synthetic
aggaacuuuugugaaugacaag

SEQ ID NO: 300072 - RNA, 23 nt, Artificial Sequence
  Synthetic
aaggaacuuuugugaaugacaag

SEQ ID NO: 300073 - RNA, 24 nt, Artificial Sequence
  Synthetic
gaaggaacuuuugugaaugacaag

SEQ ID NO: 300074 - RNA, 18 nt, Artificial Sequence
  Synthetic
ugguaugauaaugacaag

SEQ ID NO: 300075 - RNA, 19 nt, Artificial Sequence
  Synthetic
gugguaugauaaugacaag

SEQ ID NO: 300076 - RNA, 20 nt, Artificial Sequence
  Synthetic
ugugguaugauaaugacaag

SEQ ID NO: 300077 - RNA, 21 nt, Artificial Sequence
  Synthetic
uugugguaugauaaugacaag

SEQ ID NO: 300078 - RNA, 22 nt, Artificial Sequence
  Synthetic
cuugugguaugauaaugacaag

SEQ ID NO: 300079 - RNA, 23 nt, Artificial Sequence
  Synthetic
acuugugguaugauaaugacaag

SEQ ID NO: 300080 - RNA, 24 nt, Artificial Sequence
  Synthetic
aacuugugguaugauaaugacaag

SEQ ID NO: 300081 - RNA, 18 nt, Artificial Sequence
  Synthetic
ucacauagcacugacaag

SEQ ID NO: 300082 - RNA, 19 nt, Artificial Sequence
  Synthetic
uucacauagcacugacaag

SEQ ID NO: 300083 - RNA, 20 nt, Artificial Sequence
  Synthetic
guucacauagcacugacaag

SEQ ID NO: 300084 - RNA, 21 nt, Artificial Sequence
  Synthetic
uguucacauagcacugacaag

SEQ ID NO: 300085 - RNA, 22 nt, Artificial Sequence
  Synthetic
auguucacauagcacugacaag

SEQ ID NO: 300086 - RNA, 23 nt, Artificial Sequence
  Synthetic
uauguucacauagcacugacaag

SEQ ID NO: 300087 - RNA, 24 nt, Artificial Sequence
  Synthetic
auauguucacauagcacugacaag

SEQ ID NO: 300088 - RNA, 18 nt, Artificial Sequence
  Synthetic
gcaggagaaagauacaag

SEQ ID NO: 300089 - RNA, 19 nt, Artificial Sequence
  Synthetic
agcaggagaaagauacaag

SEQ ID NO: 300090 - RNA, 20 nt, Artificial Sequence
  Synthetic
aagcaggagaaagauacaag

SEQ ID NO: 300091 - RNA, 21 nt, Artificial Sequence
  Synthetic
uaagcaggagaaagauacaag

SEQ ID NO: 300092 - RNA, 22 nt, Artificial Sequence
  Synthetic
uuaagcaggagaaagauacaag

SEQ ID NO: 300093 - RNA, 23 nt, Artificial Sequence
  Synthetic
uuuaagcaggagaaagauacaag

SEQ ID NO: 300094 - RNA, 24 nt, Artificial Sequence
  Synthetic
cuuuaagcaggagaaagauacaag

SEQ ID NO: 300095 - RNA, 18 nt, Artificial Sequence
  Synthetic
gcaaguggaagauacaag

SEQ ID NO: 300096 - RNA, 19 nt, Artificial Sequence
  Synthetic
agcaaguggaagauacaag

SEQ ID NO: 300097 - RNA, 20 nt, Artificial Sequence
  Synthetic
uagcaaguggaagauacaag

SEQ ID NO: 300098 - RNA, 21 nt, Artificial Sequence
  Synthetic
uuagcaaguggaagauacaag

SEQ ID NO: 300099 - RNA, 22 nt, Artificial Sequence
  Synthetic
cuuagcaaguggaagauacaag

SEQ ID NO: 300100 - RNA, 23 nt, Artificial Sequence
  Synthetic
acuuagcaaguggaagauacaag

SEQ ID NO: 300101 - RNA, 24 nt, Artificial Sequence
  Synthetic
cacuuagcaaguggaagauacaag

SEQ ID NO: 300102 - RNA, 18 nt, Artificial Sequence
  Synthetic
gguauguauguauacaag

SEQ ID NO: 300103 - RNA, 19 nt, Artificial Sequence
  Synthetic
ugguauguauguauacaag

SEQ ID NO: 300104 - RNA, 20 nt, Artificial Sequence
  Synthetic
gugguauguauguauacaag

SEQ ID NO: 300105 - RNA, 21 nt, Artificial Sequence
  Synthetic
ugugguauguauguauacaag

SEQ ID NO: 300106 - RNA, 22 nt, Artificial Sequence
  Synthetic
augugguauguauguauacaag

SEQ ID NO: 300107 - RNA, 23 nt, Artificial Sequence
  Synthetic
caugugguauguauguauacaag

SEQ ID NO: 300108 - RNA, 24 nt, Artificial Sequence
  Synthetic
ucaugugguauguauguauacaag

SEQ ID NO: 300109 - RNA, 18 nt, Artificial Sequence
  Synthetic
uggcuuuuaagcuacaag

SEQ ID NO: 300110 - RNA, 19 nt, Artificial Sequence
  Synthetic
uuggcuuuuaagcuacaag

SEQ ID NO: 300111 - RNA, 20 nt, Artificial Sequence
  Synthetic
auuggcuuuuaagcuacaag

SEQ ID NO: 300112 - RNA, 21 nt, Artificial Sequence
  Synthetic
gauuggcuuuuaagcuacaag

SEQ ID NO: 300113 - RNA, 22 nt, Artificial Sequence
  Synthetic
agauuggcuuuuaagcuacaag

SEQ ID NO: 300114 - RNA, 23 nt, Artificial Sequence
  Synthetic
uagauuggcuuuuaagcuacaag

SEQ ID NO: 300115 - RNA, 24 nt, Artificial Sequence
  Synthetic
auagauuggcuuuuaagcuacaag

SEQ ID NO: 300116 - RNA, 18 nt, Artificial Sequence
  Synthetic
uucaaucuuagcuacaag

SEQ ID NO: 300117 - RNA, 19 nt, Artificial Sequence
  Synthetic
uuucaaucuuagcuacaag

SEQ ID NO: 300118 - RNA, 20 nt, Artificial Sequence
  Synthetic
uuuucaaucuuagcuacaag

SEQ ID NO: 300119 - RNA, 21 nt, Artificial Sequence
  Synthetic
guuuucaaucuuagcuacaag

SEQ ID NO: 300120 - RNA, 22 nt, Artificial Sequence
  Synthetic
aguuuucaaucuuagcuacaag

SEQ ID NO: 300121 - RNA, 23 nt, Artificial Sequence
  Synthetic
uaguuuucaaucuuagcuacaag

SEQ ID NO: 300122 - RNA, 24 nt, Artificial Sequence
  Synthetic
uuaguuuucaaucuuagcuacaag

SEQ ID NO: 300123 - RNA, 18 nt, Artificial Sequence
  Synthetic
cuccagaugaaguacaag

SEQ ID NO: 300124 - RNA, 19 nt, Artificial Sequence
  Synthetic
gcuccagaugaaguacaag

SEQ ID NO: 300125 - RNA, 20 nt, Artificial Sequence
  Synthetic
ggcuccagaugaaguacaag

SEQ ID NO: 300126 - RNA, 21 nt, Artificial Sequence
  Synthetic
uggcuccagaugaaguacaag

SEQ ID NO: 300127 - RNA, 22 nt, Artificial Sequence
  Synthetic
cuggcuccagaugaaguacaag

SEQ ID NO: 300128 - RNA, 23 nt, Artificial Sequence
  Synthetic
gcuggcuccagaugaaguacaag

SEQ ID NO: 300129 - RNA, 24 nt, Artificial Sequence
  Synthetic
agcuggcuccagaugaaguacaag

SEQ ID NO: 300130 - RNA, 18 nt, Artificial Sequence
  Synthetic
uucuaccagagguacaag

SEQ ID NO: 300131 - RNA, 19 nt, Artificial Sequence
  Synthetic
auucuaccagagguacaag

SEQ ID NO: 300132 - RNA, 20 nt, Artificial Sequence
  Synthetic
aauucuaccagagguacaag

SEQ ID NO: 300133 - RNA, 18 nt, Artificial Sequence
  Synthetic
auaaccaaccaaaccaag

SEQ ID NO: 300134 - RNA, 19 nt, Artificial Sequence
  Synthetic
uauaaccaaccaaaccaag

SEQ ID NO: 300135 - RNA, 20 nt, Artificial Sequence
  Synthetic
uuauaaccaaccaaaccaag

SEQ ID NO: 300136 - RNA, 18 nt, Artificial Sequence
  Synthetic
guuuuauuuuaaaccaag

SEQ ID NO: 300137 - RNA, 19 nt, Artificial Sequence
  Synthetic
uguuuuauuuuaaaccaag

SEQ ID NO: 300138 - RNA, 20 nt, Artificial Sequence
  Synthetic
guguuuuauuuuaaaccaag

SEQ ID NO: 300139 - RNA, 21 nt, Artificial Sequence
  Synthetic
aguguuuuauuuuaaaccaag

SEQ ID NO: 300140 - RNA, 22 nt, Artificial Sequence
  Synthetic
uaguguuuuauuuuaaaccaag

SEQ ID NO: 300141 - RNA, 23 nt, Artificial Sequence
  Synthetic
uuaguguuuuauuuuaaaccaag

SEQ ID NO: 300142 - RNA, 24 nt, Artificial Sequence
  Synthetic
uuuaguguuuuauuuuaaaccaag

SEQ ID NO: 300143 - RNA, 18 nt, Artificial Sequence
  Synthetic
ggggagaauggaaccaag

SEQ ID NO: 300144 - RNA, 19 nt, Artificial Sequence
  Synthetic
uggggagaauggaaccaag

SEQ ID NO: 300145 - RNA, 20 nt, Artificial Sequence
  Synthetic
auggggagaauggaaccaag

SEQ ID NO: 300146 - RNA, 21 nt, Artificial Sequence
  Synthetic
gauggggagaauggaaccaag

SEQ ID NO: 300147 - RNA, 22 nt, Artificial Sequence
  Synthetic
ugauggggagaauggaaccaag

SEQ ID NO: 300148 - RNA, 23 nt, Artificial Sequence
  Synthetic
gugauggggagaauggaaccaag

SEQ ID NO: 300149 - RNA, 24 nt, Artificial Sequence
  Synthetic
agugauggggagaauggaaccaag

SEQ ID NO: 300150 - RNA, 18 nt, Artificial Sequence
  Synthetic
ccacagagccuaaccaag

SEQ ID NO: 300151 - RNA, 19 nt, Artificial Sequence
  Synthetic
cccacagagccuaaccaag

SEQ ID NO: 300152 - RNA, 20 nt, Artificial Sequence
  Synthetic
ccccacagagccuaaccaag

SEQ ID NO: 300153 - RNA, 21 nt, Artificial Sequence
  Synthetic
uccccacagagccuaaccaag

SEQ ID NO: 300154 - RNA, 22 nt, Artificial Sequence
  Synthetic
cuccccacagagccuaaccaag

SEQ ID NO: 300155 - RNA, 23 nt, Artificial Sequence
  Synthetic
acuccccacagagccuaaccaag

SEQ ID NO: 300156 - RNA, 24 nt, Artificial Sequence
  Synthetic
aacuccccacagagccuaaccaag

SEQ ID NO: 300157 - RNA, 18 nt, Artificial Sequence
  Synthetic
cccccaacucccaccaag

SEQ ID NO: 300158 - RNA, 19 nt, Artificial Sequence
  Synthetic
acccccaacucccaccaag

SEQ ID NO: 300159 - RNA, 20 nt, Artificial Sequence
  Synthetic
aacccccaacucccaccaag

SEQ ID NO: 300160 - RNA, 21 nt, Artificial Sequence
  Synthetic
caacccccaacucccaccaag

SEQ ID NO: 300161 - RNA, 22 nt, Artificial Sequence
  Synthetic
acaacccccaacucccaccaag

SEQ ID NO: 300162 - RNA, 23 nt, Artificial Sequence
  Synthetic
uacaacccccaacucccaccaag

SEQ ID NO: 300163 - RNA, 24 nt, Artificial Sequence
  Synthetic
cuacaacccccaacucccaccaag

SEQ ID NO: 300164 - RNA, 18 nt, Artificial Sequence
  Synthetic
aucagaccuuccaccaag

SEQ ID NO: 300165 - RNA, 19 nt, Artificial Sequence
  Synthetic
uaucagaccuuccaccaag

SEQ ID NO: 300166 - RNA, 20 nt, Artificial Sequence
  Synthetic
uuaucagaccuuccaccaag

SEQ ID NO: 300167 - RNA, 21 nt, Artificial Sequence
  Synthetic
guuaucagaccuuccaccaag

SEQ ID NO: 300168 - RNA, 22 nt, Artificial Sequence
  Synthetic
gguuaucagaccuuccaccaag

SEQ ID NO: 300169 - RNA, 23 nt, Artificial Sequence
  Synthetic
agguuaucagaccuuccaccaag

SEQ ID NO: 300170 - RNA, 24 nt, Artificial Sequence
  Synthetic
aagguuaucagaccuuccaccaag

SEQ ID NO: 300171 - RNA, 18 nt, Artificial Sequence
  Synthetic
uuauuauuuagcaccaag

SEQ ID NO: 300172 - RNA, 19 nt, Artificial Sequence
  Synthetic
auuauuauuuagcaccaag

SEQ ID NO: 300173 - RNA, 20 nt, Artificial Sequence
  Synthetic
uauuauuauuuagcaccaag

SEQ ID NO: 300174 - RNA, 21 nt, Artificial Sequence
  Synthetic
auauuauuauuuagcaccaag

SEQ ID NO: 300175 - RNA, 22 nt, Artificial Sequence
  Synthetic
aauauuauuauuuagcaccaag

SEQ ID NO: 300176 - RNA, 23 nt, Artificial Sequence
  Synthetic
gaauauuauuauuuagcaccaag

SEQ ID NO: 300177 - RNA, 24 nt, Artificial Sequence
  Synthetic
ggaauauuauuauuuagcaccaag

SEQ ID NO: 300178 - RNA, 18 nt, Artificial Sequence
  Synthetic
gcacuuugagagaccaag

SEQ ID NO: 300179 - RNA, 19 nt, Artificial Sequence
  Synthetic
agcacuuugagagaccaag

SEQ ID NO: 300180 - RNA, 20 nt, Artificial Sequence
  Synthetic
cagcacuuugagagaccaag

SEQ ID NO: 300181 - RNA, 21 nt, Artificial Sequence
  Synthetic
ccagcacuuugagagaccaag

SEQ ID NO: 300182 - RNA, 22 nt, Artificial Sequence
  Synthetic
cccagcacuuugagagaccaag

SEQ ID NO: 300183 - RNA, 23 nt, Artificial Sequence
  Synthetic
ucccagcacuuugagagaccaag

SEQ ID NO: 300184 - RNA, 24 nt, Artificial Sequence
  Synthetic
aucccagcacuuugagagaccaag

SEQ ID NO: 300185 - RNA, 18 nt, Artificial Sequence
  Synthetic
uagggaagguugaccaag

SEQ ID NO: 300186 - RNA, 19 nt, Artificial Sequence
  Synthetic
guagggaagguugaccaag

SEQ ID NO: 300187 - RNA, 20 nt, Artificial Sequence
  Synthetic
aguagggaagguugaccaag

SEQ ID NO: 300188 - RNA, 21 nt, Artificial Sequence
  Synthetic
aaguagggaagguugaccaag

SEQ ID NO: 300189 - RNA, 22 nt, Artificial Sequence
  Synthetic
gaaguagggaagguugaccaag

SEQ ID NO: 300190 - RNA, 23 nt, Artificial Sequence
  Synthetic
agaaguagggaagguugaccaag

SEQ ID NO: 300191 - RNA, 24 nt, Artificial Sequence
  Synthetic
aagaaguagggaagguugaccaag

SEQ ID NO: 300192 - RNA, 18 nt, Artificial Sequence
  Synthetic
ugaugcuauaauaccaag

SEQ ID NO: 300193 - RNA, 19 nt, Artificial Sequence
  Synthetic
augaugcuauaauaccaag

SEQ ID NO: 300194 - RNA, 20 nt, Artificial Sequence
  Synthetic
uaugaugcuauaauaccaag

SEQ ID NO: 300195 - RNA, 21 nt, Artificial Sequence
  Synthetic
guaugaugcuauaauaccaag

SEQ ID NO: 300196 - RNA, 22 nt, Artificial Sequence
  Synthetic
uguaugaugcuauaauaccaag

SEQ ID NO: 300197 - RNA, 23 nt, Artificial Sequence
  Synthetic
auguaugaugcuauaauaccaag

SEQ ID NO: 300198 - RNA, 24 nt, Artificial Sequence
  Synthetic
uauguaugaugcuauaauaccaag

SEQ ID NO: 300199 - RNA, 18 nt, Artificial Sequence
  Synthetic
aauaaauauauuaccaag

SEQ ID NO: 300200 - RNA, 19 nt, Artificial Sequence
  Synthetic
aaauaaauauauuaccaag

SEQ ID NO: 300201 - RNA, 20 nt, Artificial Sequence
  Synthetic
aaaauaaauauauuaccaag

SEQ ID NO: 300202 - RNA, 21 nt, Artificial Sequence
  Synthetic
uaaaauaaauauauuaccaag

SEQ ID NO: 300203 - RNA, 22 nt, Artificial Sequence
  Synthetic
guaaaauaaauauauuaccaag

SEQ ID NO: 300204 - RNA, 23 nt, Artificial Sequence
  Synthetic
gguaaaauaaauauauuaccaag

SEQ ID NO: 300205 - RNA, 24 nt, Artificial Sequence
  Synthetic
agguaaaauaaauauauuaccaag

SEQ ID NO: 300206 - RNA, 18 nt, Artificial Sequence
  Synthetic
accauaacuuuuaccaag

SEQ ID NO: 300207 - RNA, 19 nt, Artificial Sequence
  Synthetic
uaccauaacuuuuaccaag

SEQ ID NO: 300208 - RNA, 20 nt, Artificial Sequence
  Synthetic
guaccauaacuuuuaccaag

SEQ ID NO: 300209 - RNA, 21 nt, Artificial Sequence
  Synthetic
uguaccauaacuuuuaccaag

SEQ ID NO: 300210 - RNA, 22 nt, Artificial Sequence
  Synthetic
guguaccauaacuuuuaccaag

SEQ ID NO: 300211 - RNA, 23 nt, Artificial Sequence
  Synthetic
uguguaccauaacuuuuaccaag

SEQ ID NO: 300212 - RNA, 24 nt, Artificial Sequence
  Synthetic
cuguguaccauaacuuuuaccaag

SEQ ID NO: 300213 - RNA, 18 nt, Artificial Sequence
  Synthetic
acuuggguaaaacccaag

SEQ ID NO: 300214 - RNA, 19 nt, Artificial Sequence
  Synthetic
cacuuggguaaaacccaag

SEQ ID NO: 300215 - RNA, 20 nt, Artificial Sequence
  Synthetic
acacuuggguaaaacccaag

SEQ ID NO: 300216 - RNA, 21 nt, Artificial Sequence
  Synthetic
gacacuuggguaaaacccaag

SEQ ID NO: 300217 - RNA, 22 nt, Artificial Sequence
  Synthetic
ugacacuuggguaaaacccaag

SEQ ID NO: 300218 - RNA, 23 nt, Artificial Sequence
  Synthetic
augacacuuggguaaaacccaag

SEQ ID NO: 300219 - RNA, 24 nt, Artificial Sequence
  Synthetic
aaugacacuuggguaaaacccaag

SEQ ID NO: 300220 - RNA, 18 nt, Artificial Sequence
  Synthetic
uuucccugagcccccaag

SEQ ID NO: 300221 - RNA, 19 nt, Artificial Sequence
  Synthetic
uuuucccugagcccccaag

SEQ ID NO: 300222 - RNA, 20 nt, Artificial Sequence
  Synthetic
uuuuucccugagcccccaag

SEQ ID NO: 300223 - RNA, 21 nt, Artificial Sequence
  Synthetic
cuuuuucccugagcccccaag

SEQ ID NO: 300224 - RNA, 22 nt, Artificial Sequence
  Synthetic
ccuuuuucccugagcccccaag

SEQ ID NO: 300225 - RNA, 23 nt, Artificial Sequence
  Synthetic
cccuuuuucccugagcccccaag

SEQ ID NO: 300226 - RNA, 24 nt, Artificial Sequence
  Synthetic
ucccuuuuucccugagcccccaag

SEQ ID NO: 300227 - RNA, 18 nt, Artificial Sequence
  Synthetic
aaggcaagagagcccaag

SEQ ID NO: 300228 - RNA, 19 nt, Artificial Sequence
  Synthetic
gaaggcaagagagcccaag

SEQ ID NO: 300229 - RNA, 20 nt, Artificial Sequence
  Synthetic
agaaggcaagagagcccaag

SEQ ID NO: 300230 - RNA, 21 nt, Artificial Sequence
  Synthetic
uagaaggcaagagagcccaag

SEQ ID NO: 300231 - RNA, 22 nt, Artificial Sequence
  Synthetic
uuagaaggcaagagagcccaag

SEQ ID NO: 300232 - RNA, 23 nt, Artificial Sequence
  Synthetic
guuagaaggcaagagagcccaag

SEQ ID NO: 300233 - RNA, 24 nt, Artificial Sequence
  Synthetic
aguuagaaggcaagagagcccaag

SEQ ID NO: 300234 - RNA, 18 nt, Artificial Sequence
  Synthetic
gaguugcaguagcccaag

SEQ ID NO: 300235 - RNA, 19 nt, Artificial Sequence
  Synthetic
agaguugcaguagcccaag

SEQ ID NO: 300236 - RNA, 20 nt, Artificial Sequence
  Synthetic
cagaguugcaguagcccaag

SEQ ID NO: 300237 - RNA, 21 nt, Artificial Sequence
  Synthetic
acagaguugcaguagcccaag

SEQ ID NO: 300238 - RNA, 22 nt, Artificial Sequence
  Synthetic
aacagaguugcaguagcccaag

SEQ ID NO: 300239 - RNA, 23 nt, Artificial Sequence
  Synthetic
uaacagaguugcaguagcccaag

SEQ ID NO: 300240 - RNA, 24 nt, Artificial Sequence
  Synthetic
uuaacagaguugcaguagcccaag

SEQ ID NO: 300241 - RNA, 18 nt, Artificial Sequence
  Synthetic
agaauagggaggcccaag

SEQ ID NO: 300242 - RNA, 19 nt, Artificial Sequence
  Synthetic
cagaauagggaggcccaag

SEQ ID NO: 300243 - RNA, 20 nt, Artificial Sequence
  Synthetic
ucagaauagggaggcccaag

SEQ ID NO: 300244 - RNA, 21 nt, Artificial Sequence
  Synthetic
cucagaauagggaggcccaag

SEQ ID NO: 300245 - RNA, 22 nt, Artificial Sequence
  Synthetic
ucucagaauagggaggcccaag

SEQ ID NO: 300246 - RNA, 23 nt, Artificial Sequence
  Synthetic
gucucagaauagggaggcccaag

SEQ ID NO: 300247 - RNA, 24 nt, Artificial Sequence
  Synthetic
ugucucagaauagggaggcccaag

SEQ ID NO: 300248 - RNA, 18 nt, Artificial Sequence
  Synthetic
gucuugcuauugcccaag

SEQ ID NO: 300249 - RNA, 19 nt, Artificial Sequence
  Synthetic
ggucuugcuauugcccaag

SEQ ID NO: 300250 - RNA, 20 nt, Artificial Sequence
  Synthetic
gggucuugcuauugcccaag

SEQ ID NO: 300251 - RNA, 21 nt, Artificial Sequence
  Synthetic
agggucuugcuauugcccaag

SEQ ID NO: 300252 - RNA, 22 nt, Artificial Sequence
  Synthetic
cagggucuugcuauugcccaag

SEQ ID NO: 300253 - RNA, 23 nt, Artificial Sequence
  Synthetic
acagggucuugcuauugcccaag

SEQ ID NO: 300254 - RNA, 24 nt, Artificial Sequence
  Synthetic
gacagggucuugcuauugcccaag

SEQ ID NO: 300255 - RNA, 18 nt, Artificial Sequence
  Synthetic
cuucaggacaaucccaag

SEQ ID NO: 300256 - RNA, 19 nt, Artificial Sequence
  Synthetic
ucuucaggacaaucccaag

SEQ ID NO: 300257 - RNA, 20 nt, Artificial Sequence
  Synthetic
uucuucaggacaaucccaag

SEQ ID NO: 300258 - RNA, 21 nt, Artificial Sequence
  Synthetic
guucuucaggacaaucccaag

SEQ ID NO: 300259 - RNA, 22 nt, Artificial Sequence
  Synthetic
uguucuucaggacaaucccaag

SEQ ID NO: 300260 - RNA, 23 nt, Artificial Sequence
  Synthetic
uuguucuucaggacaaucccaag

SEQ ID NO: 300261 - RNA, 24 nt, Artificial Sequence
  Synthetic
uuuguucuucaggacaaucccaag

SEQ ID NO: 300262 - RNA, 18 nt, Artificial Sequence
  Synthetic
auagcaaguauucccaag

SEQ ID NO: 300263 - RNA, 19 nt, Artificial Sequence
  Synthetic
uauagcaaguauucccaag

SEQ ID NO: 300264 - RNA, 20 nt, Artificial Sequence
  Synthetic
cuauagcaaguauucccaag

SEQ ID NO: 300265 - RNA, 21 nt, Artificial Sequence
  Synthetic
gcuauagcaaguauucccaag

SEQ ID NO: 300266 - RNA, 22 nt, Artificial Sequence
  Synthetic
ugcuauagcaaguauucccaag

SEQ ID NO: 300267 - RNA, 23 nt, Artificial Sequence
  Synthetic
uugcuauagcaaguauucccaag

SEQ ID NO: 300268 - RNA, 24 nt, Artificial Sequence
  Synthetic
auugcuauagcaaguauucccaag

SEQ ID NO: 300269 - RNA, 18 nt, Artificial Sequence
  Synthetic
gcacauugggaggccaag

SEQ ID NO: 300270 - RNA, 19 nt, Artificial Sequence
  Synthetic
agcacauugggaggccaag

SEQ ID NO: 300271 - RNA, 20 nt, Artificial Sequence
  Synthetic
cagcacauugggaggccaag

SEQ ID NO: 300272 - RNA, 21 nt, Artificial Sequence
  Synthetic
ccagcacauugggaggccaag

SEQ ID NO: 300273 - RNA, 22 nt, Artificial Sequence
  Synthetic
cccagcacauugggaggccaag

SEQ ID NO: 300274 - RNA, 23 nt, Artificial Sequence
  Synthetic
ucccagcacauugggaggccaag

SEQ ID NO: 300275 - RNA, 24 nt, Artificial Sequence
  Synthetic
aucccagcacauugggaggccaag

SEQ ID NO: 300276 - RNA, 18 nt, Artificial Sequence
  Synthetic
gcacuuugggaggccaag

SEQ ID NO: 300277 - RNA, 19 nt, Artificial Sequence
  Synthetic
agcacuuugggaggccaag

SEQ ID NO: 300278 - RNA, 20 nt, Artificial Sequence
  Synthetic
aagcacuuugggaggccaag

SEQ ID NO: 300279 - RNA, 21 nt, Artificial Sequence
  Synthetic
caagcacuuugggaggccaag

SEQ ID NO: 300280 - RNA, 22 nt, Artificial Sequence
  Synthetic
ccaagcacuuugggaggccaag

SEQ ID NO: 300281 - RNA, 23 nt, Artificial Sequence
  Synthetic
uccaagcacuuugggaggccaag

SEQ ID NO: 300282 - RNA, 24 nt, Artificial Sequence
  Synthetic
auccaagcacuuugggaggccaag

SEQ ID NO: 300283 - RNA, 21 nt, Artificial Sequence
  Synthetic
ccagcacuuugggaggccaag

SEQ ID NO: 300284 - RNA, 22 nt, Artificial Sequence
  Synthetic
accagcacuuugggaggccaag

SEQ ID NO: 300285 - RNA, 23 nt, Artificial Sequence
  Synthetic
uaccagcacuuugggaggccaag

SEQ ID NO: 300286 - RNA, 24 nt, Artificial Sequence
  Synthetic
auaccagcacuuugggaggccaag

SEQ ID NO: 300287 - RNA, 18 nt, Artificial Sequence
  Synthetic
gcauuuuuggaggccaag

SEQ ID NO: 300288 - RNA, 19 nt, Artificial Sequence
  Synthetic
agcauuuuuggaggccaag

SEQ ID NO: 300289 - RNA, 20 nt, Artificial Sequence
  Synthetic
cagcauuuuuggaggccaag

SEQ ID NO: 300290 - RNA, 21 nt, Artificial Sequence
  Synthetic
ccagcauuuuuggaggccaag

SEQ ID NO: 300291 - RNA, 22 nt, Artificial Sequence
  Synthetic
cccagcauuuuuggaggccaag

SEQ ID NO: 300292 - RNA, 23 nt, Artificial Sequence
  Synthetic
ucccagcauuuuuggaggccaag

SEQ ID NO: 300293 - RNA, 24 nt, Artificial Sequence
  Synthetic
aucccagcauuuuuggaggccaag

SEQ ID NO: 300294 - RNA, 18 nt, Artificial Sequence
  Synthetic
uagauauuauaggccaag

SEQ ID NO: 300295 - RNA, 19 nt, Artificial Sequence
  Synthetic
auagauauuauaggccaag

SEQ ID NO: 300296 - RNA, 20 nt, Artificial Sequence
  Synthetic
aauagauauuauaggccaag

SEQ ID NO: 300297 - RNA, 21 nt, Artificial Sequence
  Synthetic
aaauagauauuauaggccaag

SEQ ID NO: 300298 - RNA, 22 nt, Artificial Sequence
  Synthetic
caaauagauauuauaggccaag

SEQ ID NO: 300299 - RNA, 23 nt, Artificial Sequence
  Synthetic
ccaaauagauauuauaggccaag

SEQ ID NO: 300300 - RNA, 24 nt, Artificial Sequence
  Synthetic
uccaaauagauauuauaggccaag

SEQ ID NO: 300301 - RNA, 18 nt, Artificial Sequence
  Synthetic
agauauuuaaaugccaag

SEQ ID NO: 300302 - RNA, 19 nt, Artificial Sequence
  Synthetic
cagauauuuaaaugccaag

SEQ ID NO: 300303 - RNA, 20 nt, Artificial Sequence
  Synthetic
acagauauuuaaaugccaag

SEQ ID NO: 300304 - RNA, 21 nt, Artificial Sequence
  Synthetic
aacagauauuuaaaugccaag

SEQ ID NO: 300305 - RNA, 22 nt, Artificial Sequence
  Synthetic
uaacagauauuuaaaugccaag

SEQ ID NO: 300306 - RNA, 23 nt, Artificial Sequence
  Synthetic
guaacagauauuuaaaugccaag

SEQ ID NO: 300307 - RNA, 24 nt, Artificial Sequence
  Synthetic
aguaacagauauuuaaaugccaag

SEQ ID NO: 300308 - RNA, 18 nt, Artificial Sequence
  Synthetic
guacugaauccugccaag

SEQ ID NO: 300309 - RNA, 19 nt, Artificial Sequence
  Synthetic
uguacugaauccugccaag

SEQ ID NO: 300310 - RNA, 20 nt, Artificial Sequence
  Synthetic
cuguacugaauccugccaag

SEQ ID NO: 300311 - RNA, 21 nt, Artificial Sequence
  Synthetic
acuguacugaauccugccaag

SEQ ID NO: 300312 - RNA, 22 nt, Artificial Sequence
  Synthetic
aacuguacugaauccugccaag

SEQ ID NO: 300313 - RNA, 23 nt, Artificial Sequence
  Synthetic
uaacuguacugaauccugccaag

SEQ ID NO: 300314 - RNA, 24 nt, Artificial Sequence
  Synthetic
cuaacuguacugaauccugccaag

SEQ ID NO: 300315 - RNA, 18 nt, Artificial Sequence
  Synthetic
gaccauaagauugccaag

SEQ ID NO: 300316 - RNA, 19 nt, Artificial Sequence
  Synthetic
ugaccauaagauugccaag

SEQ ID NO: 300317 - RNA, 20 nt, Artificial Sequence
  Synthetic
augaccauaagauugccaag

SEQ ID NO: 300318 - RNA, 21 nt, Artificial Sequence
  Synthetic
uaugaccauaagauugccaag

SEQ ID NO: 300319 - RNA, 22 nt, Artificial Sequence
  Synthetic
auaugaccauaagauugccaag

SEQ ID NO: 300320 - RNA, 23 nt, Artificial Sequence
  Synthetic
uauaugaccauaagauugccaag

SEQ ID NO: 300321 - RNA, 24 nt, Artificial Sequence
  Synthetic
auauaugaccauaagauugccaag

SEQ ID NO: 300322 - RNA, 18 nt, Artificial Sequence
  Synthetic
caacacauuuuugccaag

SEQ ID NO: 300323 - RNA, 19 nt, Artificial Sequence
  Synthetic
ucaacacauuuuugccaag

SEQ ID NO: 300324 - RNA, 20 nt, Artificial Sequence
  Synthetic
gucaacacauuuuugccaag

SEQ ID NO: 300325 - RNA, 21 nt, Artificial Sequence
  Synthetic
agucaacacauuuuugccaag

SEQ ID NO: 300326 - RNA, 22 nt, Artificial Sequence
  Synthetic
cagucaacacauuuuugccaag

SEQ ID NO: 300327 - RNA, 23 nt, Artificial Sequence
  Synthetic
acagucaacacauuuuugccaag

SEQ ID NO: 300328 - RNA, 24 nt, Artificial Sequence
  Synthetic
uacagucaacacauuuuugccaag

SEQ ID NO: 300329 - RNA, 18 nt, Artificial Sequence
  Synthetic
ggcagaauaaaauccaag

SEQ ID NO: 300330 - RNA, 19 nt, Artificial Sequence
  Synthetic
aggcagaauaaaauccaag

SEQ ID NO: 300331 - RNA, 20 nt, Artificial Sequence
  Synthetic
uaggcagaauaaaauccaag

SEQ ID NO: 300332 - RNA, 21 nt, Artificial Sequence
  Synthetic
auaggcagaauaaaauccaag

SEQ ID NO: 300333 - RNA, 22 nt, Artificial Sequence
  Synthetic
aauaggcagaauaaaauccaag

SEQ ID NO: 300334 - RNA, 23 nt, Artificial Sequence
  Synthetic
aaauaggcagaauaaaauccaag

SEQ ID NO: 300335 - RNA, 24 nt, Artificial Sequence
  Synthetic
caaauaggcagaauaaaauccaag

SEQ ID NO: 300336 - RNA, 18 nt, Artificial Sequence
  Synthetic
guaacccagaaauccaag

SEQ ID NO: 300337 - RNA, 19 nt, Artificial Sequence
  Synthetic
uguaacccagaaauccaag

SEQ ID NO: 300338 - RNA, 20 nt, Artificial Sequence
  Synthetic
uuguaacccagaaauccaag

SEQ ID NO: 300339 - RNA, 21 nt, Artificial Sequence
  Synthetic
auuguaacccagaaauccaag

SEQ ID NO: 300340 - RNA, 22 nt, Artificial Sequence
  Synthetic
gauuguaacccagaaauccaag

SEQ ID NO: 300341 - RNA, 23 nt, Artificial Sequence
  Synthetic
ugauuguaacccagaaauccaag

SEQ ID NO: 300342 - RNA, 24 nt, Artificial Sequence
  Synthetic
cugauuguaacccagaaauccaag

SEQ ID NO: 300343 - RNA, 18 nt, Artificial Sequence
  Synthetic
cguggugccucauccaag

SEQ ID NO: 300344 - RNA, 19 nt, Artificial Sequence
  Synthetic
acguggugccucauccaag

SEQ ID NO: 300345 - RNA, 20 nt, Artificial Sequence
  Synthetic
gacguggugccucauccaag

SEQ ID NO: 300346 - RNA, 21 nt, Artificial Sequence
  Synthetic
agacguggugccucauccaag

SEQ ID NO: 300347 - RNA, 22 nt, Artificial Sequence
  Synthetic
gagacguggugccucauccaag

SEQ ID NO: 300348 - RNA, 23 nt, Artificial Sequence
  Synthetic
ugagacguggugccucauccaag

SEQ ID NO: 300349 - RNA, 24 nt, Artificial Sequence
  Synthetic
gugagacguggugccucauccaag

SEQ ID NO: 300350 - RNA, 18 nt, Artificial Sequence
  Synthetic
ucucauuagauauccaag

SEQ ID NO: 300351 - RNA, 19 nt, Artificial Sequence
  Synthetic
gucucauuagauauccaag

SEQ ID NO: 300352 - RNA, 20 nt, Artificial Sequence
  Synthetic
agucucauuagauauccaag

SEQ ID NO: 300353 - RNA, 21 nt, Artificial Sequence
  Synthetic
gagucucauuagauauccaag

SEQ ID NO: 300354 - RNA, 22 nt, Artificial Sequence
  Synthetic
agagucucauuagauauccaag

SEQ ID NO: 300355 - RNA, 23 nt, Artificial Sequence
  Synthetic
cagagucucauuagauauccaag

SEQ ID NO: 300356 - RNA, 24 nt, Artificial Sequence
  Synthetic
ucagagucucauuagauauccaag

SEQ ID NO: 300357 - RNA, 18 nt, Artificial Sequence
  Synthetic
gauauauaaaacuccaag

SEQ ID NO: 300358 - RNA, 19 nt, Artificial Sequence
  Synthetic
ggauauauaaaacuccaag

SEQ ID NO: 300359 - RNA, 20 nt, Artificial Sequence
  Synthetic
uggauauauaaaacuccaag

SEQ ID NO: 300360 - RNA, 21 nt, Artificial Sequence
  Synthetic
guggauauauaaaacuccaag

SEQ ID NO: 300361 - RNA, 22 nt, Artificial Sequence
  Synthetic
aguggauauauaaaacuccaag

SEQ ID NO: 300362 - RNA, 23 nt, Artificial Sequence
  Synthetic
aaguggauauauaaaacuccaag

SEQ ID NO: 300363 - RNA, 24 nt, Artificial Sequence
  Synthetic
aaaguggauauauaaaacuccaag

SEQ ID NO: 300364 - RNA, 18 nt, Artificial Sequence
  Synthetic
aaguauguagacuccaag

SEQ ID NO: 300365 - RNA, 19 nt, Artificial Sequence
  Synthetic
uaaguauguagacuccaag

SEQ ID NO: 300366 - RNA, 20 nt, Artificial Sequence
  Synthetic
guaaguauguagacuccaag

SEQ ID NO: 300367 - RNA, 21 nt, Artificial Sequence
  Synthetic
aguaaguauguagacuccaag

SEQ ID NO: 300368 - RNA, 22 nt, Artificial Sequence
  Synthetic
gaguaaguauguagacuccaag

SEQ ID NO: 300369 - RNA, 23 nt, Artificial Sequence
  Synthetic
agaguaaguauguagacuccaag

SEQ ID NO: 300370 - RNA, 24 nt, Artificial Sequence
  Synthetic
gagaguaaguauguagacuccaag

SEQ ID NO: 300371 - RNA, 18 nt, Artificial Sequence
  Synthetic
uccuguaggaccuccaag

SEQ ID NO: 300372 - RNA, 19 nt, Artificial Sequence
  Synthetic
guccuguaggaccuccaag

SEQ ID NO: 300373 - RNA, 20 nt, Artificial Sequence
  Synthetic
uguccuguaggaccuccaag

SEQ ID NO: 300374 - RNA, 21 nt, Artificial Sequence
  Synthetic
cuguccuguaggaccuccaag

SEQ ID NO: 300375 - RNA, 22 nt, Artificial Sequence
  Synthetic
gcuguccuguaggaccuccaag

SEQ ID NO: 300376 - RNA, 23 nt, Artificial Sequence
  Synthetic
ugcuguccuguaggaccuccaag

SEQ ID NO: 300377 - RNA, 24 nt, Artificial Sequence
  Synthetic
cugcuguccuguaggaccuccaag

SEQ ID NO: 300378 - RNA, 18 nt, Artificial Sequence
  Synthetic
gcacuuugggaguccaag

SEQ ID NO: 300379 - RNA, 19 nt, Artificial Sequence
  Synthetic
agcacuuugggaguccaag

SEQ ID NO: 300380 - RNA, 20 nt, Artificial Sequence
  Synthetic
cagcacuuugggaguccaag

SEQ ID NO: 300381 - RNA, 21 nt, Artificial Sequence
  Synthetic
ccagcacuuugggaguccaag

SEQ ID NO: 300382 - RNA, 22 nt, Artificial Sequence
  Synthetic
cccagcacuuugggaguccaag

SEQ ID NO: 300383 - RNA, 23 nt, Artificial Sequence
  Synthetic
ucccagcacuuugggaguccaag

SEQ ID NO: 300384 - RNA, 24 nt, Artificial Sequence
  Synthetic
aucccagcacuuugggaguccaag

SEQ ID NO: 300385 - RNA, 18 nt, Artificial Sequence
  Synthetic
ugcacuagacgguccaag

SEQ ID NO: 300386 - RNA, 19 nt, Artificial Sequence
  Synthetic
cugcacuagacgguccaag

SEQ ID NO: 300387 - RNA, 20 nt, Artificial Sequence
  Synthetic
ccugcacuagacgguccaag

SEQ ID NO: 300388 - RNA, 21 nt, Artificial Sequence
  Synthetic
gccugcacuagacgguccaag

SEQ ID NO: 300389 - RNA, 22 nt, Artificial Sequence
  Synthetic
agccugcacuagacgguccaag

SEQ ID NO: 300390 - RNA, 23 nt, Artificial Sequence
  Synthetic
aagccugcacuagacgguccaag

SEQ ID NO: 300391 - RNA, 24 nt, Artificial Sequence
  Synthetic
caagccugcacuagacgguccaag

SEQ ID NO: 300392 - RNA, 18 nt, Artificial Sequence
  Synthetic
agguuaauagauuccaag

SEQ ID NO: 300393 - RNA, 19 nt, Artificial Sequence
  Synthetic
gagguuaauagauuccaag

SEQ ID NO: 300394 - RNA, 20 nt, Artificial Sequence
  Synthetic
agagguuaauagauuccaag

SEQ ID NO: 300395 - RNA, 21 nt, Artificial Sequence
  Synthetic
aagagguuaauagauuccaag

SEQ ID NO: 300396 - RNA, 22 nt, Artificial Sequence
  Synthetic
aaagagguuaauagauuccaag

SEQ ID NO: 300397 - RNA, 23 nt, Artificial Sequence
  Synthetic
gaaagagguuaauagauuccaag

SEQ ID NO: 300398 - RNA, 24 nt, Artificial Sequence
  Synthetic
ggaaagagguuaauagauuccaag

SEQ ID NO: 300399 - RNA, 18 nt, Artificial Sequence
  Synthetic
aacuuucuuauuuccaag

SEQ ID NO: 300400 - RNA, 19 nt, Artificial Sequence
  Synthetic
uaacuuucuuauuuccaag

SEQ ID NO: 300401 - RNA, 20 nt, Artificial Sequence
  Synthetic
cuaacuuucuuauuuccaag

SEQ ID NO: 300402 - RNA, 21 nt, Artificial Sequence
  Synthetic
ucuaacuuucuuauuuccaag

SEQ ID NO: 300403 - RNA, 22 nt, Artificial Sequence
  Synthetic
aucuaacuuucuuauuuccaag

SEQ ID NO: 300404 - RNA, 23 nt, Artificial Sequence
  Synthetic
caucuaacuuucuuauuuccaag

SEQ ID NO: 300405 - RNA, 24 nt, Artificial Sequence
  Synthetic
acaucuaacuuucuuauuuccaag

SEQ ID NO: 300406 - RNA, 18 nt, Artificial Sequence
  Synthetic
gaauguuagcuuuccaag

SEQ ID NO: 300407 - RNA, 19 nt, Artificial Sequence
  Synthetic
ggaauguuagcuuuccaag

SEQ ID NO: 300408 - RNA, 20 nt, Artificial Sequence
  Synthetic
aggaauguuagcuuuccaag

SEQ ID NO: 300409 - RNA, 21 nt, Artificial Sequence
  Synthetic
aaggaauguuagcuuuccaag

SEQ ID NO: 300410 - RNA, 22 nt, Artificial Sequence
  Synthetic
gaaggaauguuagcuuuccaag

SEQ ID NO: 300411 - RNA, 23 nt, Artificial Sequence
  Synthetic
ggaaggaauguuagcuuuccaag

SEQ ID NO: 300412 - RNA, 24 nt, Artificial Sequence
  Synthetic
uggaaggaauguuagcuuuccaag

SEQ ID NO: 300413 - RNA, 18 nt, Artificial Sequence
  Synthetic
auauaagcaggaagcaag

SEQ ID NO: 300414 - RNA, 19 nt, Artificial Sequence
  Synthetic
aauauaagcaggaagcaag

SEQ ID NO: 300415 - RNA, 20 nt, Artificial Sequence
  Synthetic
uaauauaagcaggaagcaag

SEQ ID NO: 300416 - RNA, 21 nt, Artificial Sequence
  Synthetic
auaauauaagcaggaagcaag

SEQ ID NO: 300417 - RNA, 22 nt, Artificial Sequence
  Synthetic
uauaauauaagcaggaagcaag

SEQ ID NO: 300418 - RNA, 23 nt, Artificial Sequence
  Synthetic
uuauaauauaagcaggaagcaag

SEQ ID NO: 300419 - RNA, 24 nt, Artificial Sequence
  Synthetic
uuuauaauauaagcaggaagcaag

SEQ ID NO: 300420 - RNA, 18 nt, Artificial Sequence
  Synthetic
gugaaggggcacagcaag

SEQ ID NO: 300421 - RNA, 19 nt, Artificial Sequence
  Synthetic
ugugaaggggcacagcaag

SEQ ID NO: 300422 - RNA, 20 nt, Artificial Sequence
  Synthetic
cugugaaggggcacagcaag

SEQ ID NO: 300423 - RNA, 21 nt, Artificial Sequence
  Synthetic
acugugaaggggcacagcaag

SEQ ID NO: 300424 - RNA, 22 nt, Artificial Sequence
  Synthetic
uacugugaaggggcacagcaag

SEQ ID NO: 300425 - RNA, 23 nt, Artificial Sequence
  Synthetic
uuacugugaaggggcacagcaag

SEQ ID NO: 300426 - RNA, 24 nt, Artificial Sequence
  Synthetic
uuuacugugaaggggcacagcaag

SEQ ID NO: 300427 - RNA, 18 nt, Artificial Sequence
  Synthetic
aaagcuccacccagcaag

SEQ ID NO: 300428 - RNA, 19 nt, Artificial Sequence
  Synthetic
gaaagcuccacccagcaag

SEQ ID NO: 300429 - RNA, 20 nt, Artificial Sequence
  Synthetic
agaaagcuccacccagcaag

SEQ ID NO: 300430 - RNA, 21 nt, Artificial Sequence
  Synthetic
cagaaagcuccacccagcaag

SEQ ID NO: 300431 - RNA, 22 nt, Artificial Sequence
  Synthetic
ucagaaagcuccacccagcaag

SEQ ID NO: 300432 - RNA, 23 nt, Artificial Sequence
  Synthetic
uucagaaagcuccacccagcaag

SEQ ID NO: 300433 - RNA, 24 nt, Artificial Sequence
  Synthetic
guucagaaagcuccacccagcaag

SEQ ID NO: 300434 - RNA, 18 nt, Artificial Sequence
  Synthetic
uguauuauaagcagcaag

SEQ ID NO: 300435 - RNA, 19 nt, Artificial Sequence
  Synthetic
uuguauuauaagcagcaag

SEQ ID NO: 300436 - RNA, 20 nt, Artificial Sequence
  Synthetic
auuguauuauaagcagcaag

SEQ ID NO: 300437 - RNA, 21 nt, Artificial Sequence
  Synthetic
aauuguauuauaagcagcaag

SEQ ID NO: 300438 - RNA, 22 nt, Artificial Sequence
  Synthetic
caauuguauuauaagcagcaag

SEQ ID NO: 300439 - RNA, 23 nt, Artificial Sequence
  Synthetic
acaauuguauuauaagcagcaag

SEQ ID NO: 300440 - RNA, 24 nt, Artificial Sequence
  Synthetic
gacaauuguauuauaagcagcaag

SEQ ID NO: 300441 - RNA, 18 nt, Artificial Sequence
  Synthetic
gauuaugucaucagcaag

SEQ ID NO: 300442 - RNA, 19 nt, Artificial Sequence
  Synthetic
agauuaugucaucagcaag

SEQ ID NO: 300443 - RNA, 20 nt, Artificial Sequence
  Synthetic
aagauuaugucaucagcaag

SEQ ID NO: 300444 - RNA, 21 nt, Artificial Sequence
  Synthetic
uaagauuaugucaucagcaag

SEQ ID NO: 300445 - RNA, 22 nt, Artificial Sequence
  Synthetic
auaagauuaugucaucagcaag

SEQ ID NO: 300446 - RNA, 23 nt, Artificial Sequence
  Synthetic
uauaagauuaugucaucagcaag

SEQ ID NO: 300447 - RNA, 24 nt, Artificial Sequence
  Synthetic
guauaagauuaugucaucagcaag

SEQ ID NO: 300448 - RNA, 18 nt, Artificial Sequence
  Synthetic
acuaggaaccugagcaag

SEQ ID NO: 300449 - RNA, 19 nt, Artificial Sequence
  Synthetic
gacuaggaaccugagcaag

SEQ ID NO: 300450 - RNA, 20 nt, Artificial Sequence
  Synthetic
ugacuaggaaccugagcaag

SEQ ID NO: 300451 - RNA, 21 nt, Artificial Sequence
  Synthetic
augacuaggaaccugagcaag

SEQ ID NO: 300452 - RNA, 22 nt, Artificial Sequence
  Synthetic
aaugacuaggaaccugagcaag

SEQ ID NO: 300453 - RNA, 23 nt, Artificial Sequence
  Synthetic
gaaugacuaggaaccugagcaag

SEQ ID NO: 300454 - RNA, 24 nt, Artificial Sequence
  Synthetic
agaaugacuaggaaccugagcaag

SEQ ID NO: 300455 - RNA, 18 nt, Artificial Sequence
  Synthetic
uguuguagaaauagcaag

SEQ ID NO: 300456 - RNA, 19 nt, Artificial Sequence
  Synthetic
guguuguagaaauagcaag

SEQ ID NO: 300457 - RNA, 20 nt, Artificial Sequence
  Synthetic
aguguuguagaaauagcaag

SEQ ID NO: 300458 - RNA, 21 nt, Artificial Sequence
  Synthetic
gaguguuguagaaauagcaag

SEQ ID NO: 300459 - RNA, 22 nt, Artificial Sequence
  Synthetic
ugaguguuguagaaauagcaag

SEQ ID NO: 300460 - RNA, 23 nt, Artificial Sequence
  Synthetic
uugaguguuguagaaauagcaag

SEQ ID NO: 300461 - RNA, 24 nt, Artificial Sequence
  Synthetic
uuugaguguuguagaaauagcaag

SEQ ID NO: 300462 - RNA, 18 nt, Artificial Sequence
  Synthetic
gccagcgcaccuagcaag

SEQ ID NO: 300463 - RNA, 19 nt, Artificial Sequence
  Synthetic
ggccagcgcaccuagcaag

SEQ ID NO: 300464 - RNA, 20 nt, Artificial Sequence
  Synthetic
uggccagcgcaccuagcaag

SEQ ID NO: 300465 - RNA, 21 nt, Artificial Sequence
  Synthetic
cuggccagcgcaccuagcaag

SEQ ID NO: 300466 - RNA, 22 nt, Artificial Sequence
  Synthetic
ucuggccagcgcaccuagcaag

SEQ ID NO: 300467 - RNA, 23 nt, Artificial Sequence
  Synthetic
uucuggccagcgcaccuagcaag

SEQ ID NO: 300468 - RNA, 24 nt, Artificial Sequence
  Synthetic
cuucuggccagcgcaccuagcaag

SEQ ID NO: 300469 - RNA, 18 nt, Artificial Sequence
  Synthetic
uuagggucacuuagcaag

SEQ ID NO: 300470 - RNA, 19 nt, Artificial Sequence
  Synthetic
cuuagggucacuuagcaag

SEQ ID NO: 300471 - RNA, 20 nt, Artificial Sequence
  Synthetic
ccuuagggucacuuagcaag

SEQ ID NO: 300472 - RNA, 21 nt, Artificial Sequence
  Synthetic
uccuuagggucacuuagcaag

SEQ ID NO: 300473 - RNA, 22 nt, Artificial Sequence
  Synthetic
uuccuuagggucacuuagcaag

SEQ ID NO: 300474 - RNA, 23 nt, Artificial Sequence
  Synthetic
uuuccuuagggucacuuagcaag

SEQ ID NO: 300475 - RNA, 24 nt, Artificial Sequence
  Synthetic
auuuccuuagggucacuuagcaag

SEQ ID NO: 300476 - RNA, 18 nt, Artificial Sequence
  Synthetic
cacagaacccuuagcaag

SEQ ID NO: 300477 - RNA, 19 nt, Artificial Sequence
  Synthetic
ucacagaacccuuagcaag

SEQ ID NO: 300478 - RNA, 20 nt, Artificial Sequence
  Synthetic
cucacagaacccuuagcaag

SEQ ID NO: 300479 - RNA, 21 nt, Artificial Sequence
  Synthetic
ccucacagaacccuuagcaag

SEQ ID NO: 300480 - RNA, 22 nt, Artificial Sequence
  Synthetic
accucacagaacccuuagcaag

SEQ ID NO: 300481 - RNA, 23 nt, Artificial Sequence
  Synthetic
caccucacagaacccuuagcaag

SEQ ID NO: 300482 - RNA, 24 nt, Artificial Sequence
  Synthetic
ucaccucacagaacccuuagcaag

SEQ ID NO: 300483 - RNA, 18 nt, Artificial Sequence
  Synthetic
ucaaguuaucuuagcaag

SEQ ID NO: 300484 - RNA, 19 nt, Artificial Sequence
  Synthetic
uucaaguuaucuuagcaag

SEQ ID NO: 300485 - RNA, 20 nt, Artificial Sequence
  Synthetic
uuucaaguuaucuuagcaag

SEQ ID NO: 300486 - RNA, 21 nt, Artificial Sequence
  Synthetic
uuuucaaguuaucuuagcaag

SEQ ID NO: 300487 - RNA, 22 nt, Artificial Sequence
  Synthetic
guuuucaaguuaucuuagcaag

SEQ ID NO: 300488 - RNA, 23 nt, Artificial Sequence
  Synthetic
uguuuucaaguuaucuuagcaag

SEQ ID NO: 300489 - RNA, 24 nt, Artificial Sequence
  Synthetic
cuguuuucaaguuaucuuagcaag

SEQ ID NO: 300490 - RNA, 18 nt, Artificial Sequence
  Synthetic
aaugccucuuuuagcaag

SEQ ID NO: 300491 - RNA, 19 nt, Artificial Sequence
  Synthetic
caaugccucuuuuagcaag

SEQ ID NO: 300492 - RNA, 20 nt, Artificial Sequence
  Synthetic
ucaaugccucuuuuagcaag

SEQ ID NO: 300493 - RNA, 21 nt, Artificial Sequence
  Synthetic
cucaaugccucuuuuagcaag

SEQ ID NO: 300494 - RNA, 22 nt, Artificial Sequence
  Synthetic
ccucaaugccucuuuuagcaag

SEQ ID NO: 300495 - RNA, 23 nt, Artificial Sequence
  Synthetic
uccucaaugccucuuuuagcaag

SEQ ID NO: 300496 - RNA, 24 nt, Artificial Sequence
  Synthetic
uuccucaaugccucuuuuagcaag

SEQ ID NO: 300497 - RNA, 18 nt, Artificial Sequence
  Synthetic
uugaaauggaaaggcaag

SEQ ID NO: 300498 - RNA, 19 nt, Artificial Sequence
  Synthetic
uuugaaauggaaaggcaag

SEQ ID NO: 300499 - RNA, 20 nt, Artificial Sequence
  Synthetic
uuuugaaauggaaaggcaag

SEQ ID NO: 300500 - RNA, 21 nt, Artificial Sequence
  Synthetic
auuuugaaauggaaaggcaag

SEQ ID NO: 300501 - RNA, 22 nt, Artificial Sequence
  Synthetic
uauuuugaaauggaaaggcaag

SEQ ID NO: 300502 - RNA, 23 nt, Artificial Sequence
  Synthetic
guauuuugaaauggaaaggcaag

SEQ ID NO: 300503 - RNA, 24 nt, Artificial Sequence
  Synthetic
uguauuuugaaauggaaaggcaag

SEQ ID NO: 300504 - RNA, 18 nt, Artificial Sequence
  Synthetic
ggaaauuuucaaggcaag

SEQ ID NO: 300505 - RNA, 19 nt, Artificial Sequence
  Synthetic
gggaaauuuucaaggcaag

SEQ ID NO: 300506 - RNA, 20 nt, Artificial Sequence
  Synthetic
agggaaauuuucaaggcaag

SEQ ID NO: 300507 - RNA, 21 nt, Artificial Sequence
  Synthetic
gagggaaauuuucaaggcaag

SEQ ID NO: 300508 - RNA, 22 nt, Artificial Sequence
  Synthetic
ggagggaaauuuucaaggcaag

SEQ ID NO: 300509 - RNA, 23 nt, Artificial Sequence
  Synthetic
aggagggaaauuuucaaggcaag

SEQ ID NO: 300510 - RNA, 24 nt, Artificial Sequence
  Synthetic
uaggagggaaauuuucaaggcaag

SEQ ID NO: 300511 - RNA, 18 nt, Artificial Sequence
  Synthetic
aucuuggcagaaggcaag

SEQ ID NO: 300512 - RNA, 19 nt, Artificial Sequence
  Synthetic
aaucuuggcagaaggcaag

SEQ ID NO: 300513 - RNA, 20 nt, Artificial Sequence
  Synthetic
caaucuuggcagaaggcaag

SEQ ID NO: 300514 - RNA, 21 nt, Artificial Sequence
  Synthetic
acaaucuuggcagaaggcaag

SEQ ID NO: 300515 - RNA, 22 nt, Artificial Sequence
  Synthetic
cacaaucuuggcagaaggcaag

SEQ ID NO: 300516 - RNA, 23 nt, Artificial Sequence
  Synthetic
ucacaaucuuggcagaaggcaag

SEQ ID NO: 300517 - RNA, 24 nt, Artificial Sequence
  Synthetic
cucacaaucuuggcagaaggcaag

SEQ ID NO: 300518 - RNA, 18 nt, Artificial Sequence
  Synthetic
ugguuguuuuaaggcaag

SEQ ID NO: 300519 - RNA, 19 nt, Artificial Sequence
  Synthetic
uugguuguuuuaaggcaag

SEQ ID NO: 300520 - RNA, 20 nt, Artificial Sequence
  Synthetic
cuugguuguuuuaaggcaag

SEQ ID NO: 300521 - RNA, 21 nt, Artificial Sequence
  Synthetic
acuugguuguuuuaaggcaag

SEQ ID NO: 300522 - RNA, 22 nt, Artificial Sequence
  Synthetic
gacuugguuguuuuaaggcaag

SEQ ID NO: 300523 - RNA, 23 nt, Artificial Sequence
  Synthetic
cgacuugguuguuuuaaggcaag

SEQ ID NO: 300524 - RNA, 24 nt, Artificial Sequence
  Synthetic
gcgacuugguuguuuuaaggcaag

SEQ ID NO: 300525 - RNA, 18 nt, Artificial Sequence
  Synthetic
acuauggcaccaggcaag

SEQ ID NO: 300526 - RNA, 19 nt, Artificial Sequence
  Synthetic
aacuauggcaccaggcaag

SEQ ID NO: 300527 - RNA, 20 nt, Artificial Sequence
  Synthetic
caacuauggcaccaggcaag

SEQ ID NO: 300528 - RNA, 21 nt, Artificial Sequence
  Synthetic
acaacuauggcaccaggcaag

SEQ ID NO: 300529 - RNA, 22 nt, Artificial Sequence
  Synthetic
cacaacuauggcaccaggcaag

SEQ ID NO: 300530 - RNA, 23 nt, Artificial Sequence
  Synthetic
ucacaacuauggcaccaggcaag

SEQ ID NO: 300531 - RNA, 24 nt, Artificial Sequence
  Synthetic
cucacaacuauggcaccaggcaag

SEQ ID NO: 300532 - RNA, 18 nt, Artificial Sequence
  Synthetic
cgcgagguggggggcaag

SEQ ID NO: 300533 - RNA, 19 nt, Artificial Sequence
  Synthetic
ucgcgagguggggggcaag

SEQ ID NO: 300534 - RNA, 20 nt, Artificial Sequence
  Synthetic
gucgcgagguggggggcaag

SEQ ID NO: 300535 - RNA, 21 nt, Artificial Sequence
  Synthetic
ugucgcgagguggggggcaag

SEQ ID NO: 300536 - RNA, 22 nt, Artificial Sequence
  Synthetic
cugucgcgagguggggggcaag

SEQ ID NO: 300537 - RNA, 23 nt, Artificial Sequence
  Synthetic
ccugucgcgagguggggggcaag

SEQ ID NO: 300538 - RNA, 24 nt, Artificial Sequence
  Synthetic
gccugucgcgagguggggggcaag

SEQ ID NO: 300539 - RNA, 18 nt, Artificial Sequence
  Synthetic
ccaaaaucagugggcaag

SEQ ID NO: 300540 - RNA, 19 nt, Artificial Sequence
  Synthetic
uccaaaaucagugggcaag

SEQ ID NO: 300541 - RNA, 20 nt, Artificial Sequence
  Synthetic
uuccaaaaucagugggcaag

SEQ ID NO: 300542 - RNA, 21 nt, Artificial Sequence
  Synthetic
auuccaaaaucagugggcaag

SEQ ID NO: 300543 - RNA, 22 nt, Artificial Sequence
  Synthetic
uauuccaaaaucagugggcaag

SEQ ID NO: 300544 - RNA, 23 nt, Artificial Sequence
  Synthetic
cuauuccaaaaucagugggcaag

SEQ ID NO: 300545 - RNA, 24 nt, Artificial Sequence
  Synthetic
gcuauuccaaaaucagugggcaag

SEQ ID NO: 300546 - RNA, 18 nt, Artificial Sequence
  Synthetic
uugucacaugauggcaag

SEQ ID NO: 300547 - RNA, 19 nt, Artificial Sequence
  Synthetic
uuugucacaugauggcaag

SEQ ID NO: 300548 - RNA, 20 nt, Artificial Sequence
  Synthetic
cuuugucacaugauggcaag

SEQ ID NO: 300549 - RNA, 21 nt, Artificial Sequence
  Synthetic
ccuuugucacaugauggcaag

SEQ ID NO: 300550 - RNA, 22 nt, Artificial Sequence
  Synthetic
uccuuugucacaugauggcaag

SEQ ID NO: 300551 - RNA, 23 nt, Artificial Sequence
  Synthetic
auccuuugucacaugauggcaag

SEQ ID NO: 300552 - RNA, 24 nt, Artificial Sequence
  Synthetic
cauccuuugucacaugauggcaag

SEQ ID NO: 300553 - RNA, 18 nt, Artificial Sequence
  Synthetic
acuaugugaaguggcaag

SEQ ID NO: 300554 - RNA, 19 nt, Artificial Sequence
  Synthetic
uacuaugugaaguggcaag

SEQ ID NO: 300555 - RNA, 20 nt, Artificial Sequence
  Synthetic
auacuaugugaaguggcaag

SEQ ID NO: 300556 - RNA, 21 nt, Artificial Sequence
  Synthetic
gauacuaugugaaguggcaag

SEQ ID NO: 300557 - RNA, 22 nt, Artificial Sequence
  Synthetic
ugauacuaugugaaguggcaag

SEQ ID NO: 300558 - RNA, 23 nt, Artificial Sequence
  Synthetic
uugauacuaugugaaguggcaag

SEQ ID NO: 300559 - RNA, 24 nt, Artificial Sequence
  Synthetic
guugauacuaugugaaguggcaag

SEQ ID NO: 300560 - RNA, 18 nt, Artificial Sequence
  Synthetic
ccuguauaacuuggcaag

SEQ ID NO: 300561 - RNA, 19 nt, Artificial Sequence
  Synthetic
gccuguauaacuuggcaag

SEQ ID NO: 300562 - RNA, 20 nt, Artificial Sequence
  Synthetic
ugccuguauaacuuggcaag

SEQ ID NO: 300563 - RNA, 21 nt, Artificial Sequence
  Synthetic
augccuguauaacuuggcaag

SEQ ID NO: 300564 - RNA, 22 nt, Artificial Sequence
  Synthetic
aaugccuguauaacuuggcaag

SEQ ID NO: 300565 - RNA, 23 nt, Artificial Sequence
  Synthetic
uaaugccuguauaacuuggcaag

SEQ ID NO: 300566 - RNA, 24 nt, Artificial Sequence
  Synthetic
uuaaugccuguauaacuuggcaag

SEQ ID NO: 300567 - RNA, 18 nt, Artificial Sequence
  Synthetic
ucuuuauagcaaugcaag

SEQ ID NO: 300568 - RNA, 19 nt, Artificial Sequence
  Synthetic
uucuuuauagcaaugcaag

SEQ ID NO: 300569 - RNA, 20 nt, Artificial Sequence
  Synthetic
uuucuuuauagcaaugcaag

SEQ ID NO: 300570 - RNA, 18 nt, Artificial Sequence
  Synthetic
acagaacucacaugcaag

SEQ ID NO: 300571 - RNA, 19 nt, Artificial Sequence
  Synthetic
aacagaacucacaugcaag

SEQ ID NO: 300572 - RNA, 20 nt, Artificial Sequence
  Synthetic
gaacagaacucacaugcaag

SEQ ID NO: 300573 - RNA, 21 nt, Artificial Sequence
  Synthetic
ggaacagaacucacaugcaag

SEQ ID NO: 300574 - RNA, 22 nt, Artificial Sequence
  Synthetic
gggaacagaacucacaugcaag

SEQ ID NO: 300575 - RNA, 23 nt, Artificial Sequence
  Synthetic
agggaacagaacucacaugcaag

SEQ ID NO: 300576 - RNA, 24 nt, Artificial Sequence
  Synthetic
aagggaacagaacucacaugcaag

SEQ ID NO: 300577 - RNA, 18 nt, Artificial Sequence
  Synthetic
caaaaguguagaugcaag

SEQ ID NO: 300578 - RNA, 19 nt, Artificial Sequence
  Synthetic
acaaaaguguagaugcaag

SEQ ID NO: 300579 - RNA, 20 nt, Artificial Sequence
  Synthetic
gacaaaaguguagaugcaag

SEQ ID NO: 300580 - RNA, 21 nt, Artificial Sequence
  Synthetic
ugacaaaaguguagaugcaag

SEQ ID NO: 300581 - RNA, 22 nt, Artificial Sequence
  Synthetic
uugacaaaaguguagaugcaag

SEQ ID NO: 300582 - RNA, 23 nt, Artificial Sequence
  Synthetic
cuugacaaaaguguagaugcaag

SEQ ID NO: 300583 - RNA, 24 nt, Artificial Sequence
  Synthetic
ucuugacaaaaguguagaugcaag

SEQ ID NO: 300584 - RNA, 18 nt, Artificial Sequence
  Synthetic
uugcaaugaggaugcaag

SEQ ID NO: 300585 - RNA, 19 nt, Artificial Sequence
  Synthetic
auugcaaugaggaugcaag

SEQ ID NO: 300586 - RNA, 20 nt, Artificial Sequence
  Synthetic
uauugcaaugaggaugcaag

SEQ ID NO: 300587 - RNA, 21 nt, Artificial Sequence
  Synthetic
auauugcaaugaggaugcaag

SEQ ID NO: 300588 - RNA, 22 nt, Artificial Sequence
  Synthetic
aauauugcaaugaggaugcaag

SEQ ID NO: 300589 - RNA, 23 nt, Artificial Sequence
  Synthetic
aaauauugcaaugaggaugcaag

SEQ ID NO: 300590 - RNA, 24 nt, Artificial Sequence
  Synthetic
caaauauugcaaugaggaugcaag

SEQ ID NO: 300591 - RNA, 18 nt, Artificial Sequence
  Synthetic
aggucacgcugaugcaag

SEQ ID NO: 300592 - RNA, 19 nt, Artificial Sequence
  Synthetic
caggucacgcugaugcaag

SEQ ID NO: 300593 - RNA, 20 nt, Artificial Sequence
  Synthetic
ccaggucacgcugaugcaag

SEQ ID NO: 300594 - RNA, 21 nt, Artificial Sequence
  Synthetic
uccaggucacgcugaugcaag

SEQ ID NO: 300595 - RNA, 22 nt, Artificial Sequence
  Synthetic
auccaggucacgcugaugcaag

SEQ ID NO: 300596 - RNA, 23 nt, Artificial Sequence
  Synthetic
cauccaggucacgcugaugcaag

SEQ ID NO: 300597 - RNA, 24 nt, Artificial Sequence
  Synthetic
acauccaggucacgcugaugcaag

SEQ ID NO: 300598 - RNA, 18 nt, Artificial Sequence
  Synthetic
aaguuucaguuaugcaag

SEQ ID NO: 300599 - RNA, 19 nt, Artificial Sequence
  Synthetic
aaaguuucaguuaugcaag

SEQ ID NO: 300600 - RNA, 20 nt, Artificial Sequence
  Synthetic
uaaaguuucaguuaugcaag

SEQ ID NO: 300601 - RNA, 21 nt, Artificial Sequence
  Synthetic
auaaaguuucaguuaugcaag

SEQ ID NO: 300602 - RNA, 22 nt, Artificial Sequence
  Synthetic
uauaaaguuucaguuaugcaag

SEQ ID NO: 300603 - RNA, 23 nt, Artificial Sequence
  Synthetic
auauaaaguuucaguuaugcaag

SEQ ID NO: 300604 - RNA, 24 nt, Artificial Sequence
  Synthetic
gauauaaaguuucaguuaugcaag

SEQ ID NO: 300605 - RNA, 18 nt, Artificial Sequence
  Synthetic
ccacaucuaagcugcaag

SEQ ID NO: 300606 - RNA, 19 nt, Artificial Sequence
  Synthetic
gccacaucuaagcugcaag

SEQ ID NO: 300607 - RNA, 20 nt, Artificial Sequence
  Synthetic
ggccacaucuaagcugcaag

SEQ ID NO: 300608 - RNA, 21 nt, Artificial Sequence
  Synthetic
uggccacaucuaagcugcaag

SEQ ID NO: 300609 - RNA, 22 nt, Artificial Sequence
  Synthetic
auggccacaucuaagcugcaag

SEQ ID NO: 300610 - RNA, 23 nt, Artificial Sequence
  Synthetic
cauggccacaucuaagcugcaag

SEQ ID NO: 300611 - RNA, 24 nt, Artificial Sequence
  Synthetic
acauggccacaucuaagcugcaag

SEQ ID NO: 300612 - RNA, 18 nt, Artificial Sequence
  Synthetic
acaauuaccuugugcaag

SEQ ID NO: 300613 - RNA, 19 nt, Artificial Sequence
  Synthetic
uacaauuaccuugugcaag

SEQ ID NO: 300614 - RNA, 20 nt, Artificial Sequence
  Synthetic
guacaauuaccuugugcaag

SEQ ID NO: 300615 - RNA, 21 nt, Artificial Sequence
  Synthetic
uguacaauuaccuugugcaag

SEQ ID NO: 300616 - RNA, 22 nt, Artificial Sequence
  Synthetic
auguacaauuaccuugugcaag

SEQ ID NO: 300617 - RNA, 23 nt, Artificial Sequence
  Synthetic
aauguacaauuaccuugugcaag

SEQ ID NO: 300618 - RNA, 24 nt, Artificial Sequence
  Synthetic
gaauguacaauuaccuugugcaag

SEQ ID NO: 300619 - RNA, 18 nt, Artificial Sequence
  Synthetic
cugggaaccaauugcaag

SEQ ID NO: 300620 - RNA, 19 nt, Artificial Sequence
  Synthetic
ucugggaaccaauugcaag

SEQ ID NO: 300621 - RNA, 20 nt, Artificial Sequence
  Synthetic
uucugggaaccaauugcaag

SEQ ID NO: 300622 - RNA, 21 nt, Artificial Sequence
  Synthetic
auucugggaaccaauugcaag

SEQ ID NO: 300623 - RNA, 22 nt, Artificial Sequence
  Synthetic
aauucugggaaccaauugcaag

SEQ ID NO: 300624 - RNA, 23 nt, Artificial Sequence
  Synthetic
aaauucugggaaccaauugcaag

SEQ ID NO: 300625 - RNA, 24 nt, Artificial Sequence
  Synthetic
gaaauucugggaaccaauugcaag

SEQ ID NO: 300626 - RNA, 18 nt, Artificial Sequence
  Synthetic
ucauccacauguugcaag

SEQ ID NO: 300627 - RNA, 19 nt, Artificial Sequence
  Synthetic
uucauccacauguugcaag

SEQ ID NO: 300628 - RNA, 20 nt, Artificial Sequence
  Synthetic
uuucauccacauguugcaag

SEQ ID NO: 300629 - RNA, 21 nt, Artificial Sequence
  Synthetic
auuucauccacauguugcaag

SEQ ID NO: 300630 - RNA, 22 nt, Artificial Sequence
  Synthetic
aauuucauccacauguugcaag

SEQ ID NO: 300631 - RNA, 23 nt, Artificial Sequence
  Synthetic
gaauuucauccacauguugcaag

SEQ ID NO: 300632 - RNA, 24 nt, Artificial Sequence
  Synthetic
ggaauuucauccacauguugcaag

SEQ ID NO: 300633 - RNA, 18 nt, Artificial Sequence
  Synthetic
uuccccaaaauuugcaag

SEQ ID NO: 300634 - RNA, 19 nt, Artificial Sequence
  Synthetic
cuuccccaaaauuugcaag

SEQ ID NO: 300635 - RNA, 20 nt, Artificial Sequence
  Synthetic
ccuuccccaaaauuugcaag

SEQ ID NO: 300636 - RNA, 21 nt, Artificial Sequence
  Synthetic
cccuuccccaaaauuugcaag

SEQ ID NO: 300637 - RNA, 22 nt, Artificial Sequence
  Synthetic
ccccuuccccaaaauuugcaag

SEQ ID NO: 300638 - RNA, 23 nt, Artificial Sequence
  Synthetic
cccccuuccccaaaauuugcaag

SEQ ID NO: 300639 - RNA, 24 nt, Artificial Sequence
  Synthetic
ucccccuuccccaaaauuugcaag

SEQ ID NO: 300640 - RNA, 18 nt, Artificial Sequence
  Synthetic
ugggcacguaaaaucaag

SEQ ID NO: 300641 - RNA, 19 nt, Artificial Sequence
  Synthetic
gugggcacguaaaaucaag

SEQ ID NO: 300642 - RNA, 20 nt, Artificial Sequence
  Synthetic
ggugggcacguaaaaucaag

SEQ ID NO: 300643 - RNA, 21 nt, Artificial Sequence
  Synthetic
gggugggcacguaaaaucaag

SEQ ID NO: 300644 - RNA, 22 nt, Artificial Sequence
  Synthetic
agggugggcacguaaaaucaag

SEQ ID NO: 300645 - RNA, 23 nt, Artificial Sequence
  Synthetic
uagggugggcacguaaaaucaag

SEQ ID NO: 300646 - RNA, 24 nt, Artificial Sequence
  Synthetic
auagggugggcacguaaaaucaag

SEQ ID NO: 300647 - RNA, 18 nt, Artificial Sequence
  Synthetic
aacgagaugaucaucaag

SEQ ID NO: 300648 - RNA, 19 nt, Artificial Sequence
  Synthetic
caacgagaugaucaucaag

SEQ ID NO: 300649 - RNA, 20 nt, Artificial Sequence
  Synthetic
ucaacgagaugaucaucaag

SEQ ID NO: 300650 - RNA, 21 nt, Artificial Sequence
  Synthetic
aucaacgagaugaucaucaag

SEQ ID NO: 300651 - RNA, 22 nt, Artificial Sequence
  Synthetic
uaucaacgagaugaucaucaag

SEQ ID NO: 300652 - RNA, 23 nt, Artificial Sequence
  Synthetic
auaucaacgagaugaucaucaag

SEQ ID NO: 300653 - RNA, 24 nt, Artificial Sequence
  Synthetic
gauaucaacgagaugaucaucaag

SEQ ID NO: 300654 - RNA, 18 nt, Artificial Sequence
  Synthetic
agguacaaacucaucaag

SEQ ID NO: 300655 - RNA, 19 nt, Artificial Sequence
  Synthetic
cagguacaaacucaucaag

SEQ ID NO: 300656 - RNA, 20 nt, Artificial Sequence
  Synthetic
ccagguacaaacucaucaag

SEQ ID NO: 300657 - RNA, 21 nt, Artificial Sequence
  Synthetic
gccagguacaaacucaucaag

SEQ ID NO: 300658 - RNA, 22 nt, Artificial Sequence
  Synthetic
agccagguacaaacucaucaag

SEQ ID NO: 300659 - RNA, 23 nt, Artificial Sequence
  Synthetic
uagccagguacaaacucaucaag

SEQ ID NO: 300660 - RNA, 24 nt, Artificial Sequence
  Synthetic
cuagccagguacaaacucaucaag

SEQ ID NO: 300661 - RNA, 18 nt, Artificial Sequence
  Synthetic
ggguagguuuagaucaag

SEQ ID NO: 300662 - RNA, 19 nt, Artificial Sequence
  Synthetic
aggguagguuuagaucaag

SEQ ID NO: 300663 - RNA, 20 nt, Artificial Sequence
  Synthetic
uaggguagguuuagaucaag

SEQ ID NO: 300664 - RNA, 21 nt, Artificial Sequence
  Synthetic
uuaggguagguuuagaucaag

SEQ ID NO: 300665 - RNA, 22 nt, Artificial Sequence
  Synthetic
uuuaggguagguuuagaucaag

SEQ ID NO: 300666 - RNA, 23 nt, Artificial Sequence
  Synthetic
cuuuaggguagguuuagaucaag

SEQ ID NO: 300667 - RNA, 24 nt, Artificial Sequence
  Synthetic
acuuuaggguagguuuagaucaag

SEQ ID NO: 300668 - RNA, 18 nt, Artificial Sequence
  Synthetic
ugcauaccagcuaucaag

SEQ ID NO: 300669 - RNA, 19 nt, Artificial Sequence
  Synthetic
uugcauaccagcuaucaag

SEQ ID NO: 300670 - RNA, 20 nt, Artificial Sequence
  Synthetic
guugcauaccagcuaucaag

SEQ ID NO: 300671 - RNA, 21 nt, Artificial Sequence
  Synthetic
aguugcauaccagcuaucaag

SEQ ID NO: 300672 - RNA, 22 nt, Artificial Sequence
  Synthetic
caguugcauaccagcuaucaag

SEQ ID NO: 300673 - RNA, 23 nt, Artificial Sequence
  Synthetic
gcaguugcauaccagcuaucaag

SEQ ID NO: 300674 - RNA, 24 nt, Artificial Sequence
  Synthetic
agcaguugcauaccagcuaucaag

SEQ ID NO: 300675 - RNA, 18 nt, Artificial Sequence
  Synthetic
ucaaauuuuucuaucaag

SEQ ID NO: 300676 - RNA, 19 nt, Artificial Sequence
  Synthetic
gucaaauuuuucuaucaag

SEQ ID NO: 300677 - RNA, 20 nt, Artificial Sequence
  Synthetic
ugucaaauuuuucuaucaag

SEQ ID NO: 300678 - RNA, 21 nt, Artificial Sequence
  Synthetic
gugucaaauuuuucuaucaag

SEQ ID NO: 300679 - RNA, 22 nt, Artificial Sequence
  Synthetic
ugugucaaauuuuucuaucaag

SEQ ID NO: 300680 - RNA, 23 nt, Artificial Sequence
  Synthetic
cugugucaaauuuuucuaucaag

SEQ ID NO: 300681 - RNA, 24 nt, Artificial Sequence
  Synthetic
acugugucaaauuuuucuaucaag

SEQ ID NO: 300682 - RNA, 18 nt, Artificial Sequence
  Synthetic
ccguaucacaaacucaag

SEQ ID NO: 300683 - RNA, 19 nt, Artificial Sequence
  Synthetic
accguaucacaaacucaag

SEQ ID NO: 300684 - RNA, 20 nt, Artificial Sequence
  Synthetic
aaccguaucacaaacucaag

SEQ ID NO: 300685 - RNA, 21 nt, Artificial Sequence
  Synthetic
aaaccguaucacaaacucaag

SEQ ID NO: 300686 - RNA, 22 nt, Artificial Sequence
  Synthetic
aaaaccguaucacaaacucaag

SEQ ID NO: 300687 - RNA, 23 nt, Artificial Sequence
  Synthetic
uaaaaccguaucacaaacucaag

SEQ ID NO: 300688 - RNA, 24 nt, Artificial Sequence
  Synthetic
uuaaaaccguaucacaaacucaag

SEQ ID NO: 300689 - RNA, 18 nt, Artificial Sequence
  Synthetic
uuucuucugagacucaag

SEQ ID NO: 300690 - RNA, 19 nt, Artificial Sequence
  Synthetic
uuuucuucugagacucaag

SEQ ID NO: 300691 - RNA, 20 nt, Artificial Sequence
  Synthetic
auuuucuucugagacucaag

SEQ ID NO: 300692 - RNA, 21 nt, Artificial Sequence
  Synthetic
uauuuucuucugagacucaag

SEQ ID NO: 300693 - RNA, 22 nt, Artificial Sequence
  Synthetic
auauuuucuucugagacucaag

SEQ ID NO: 300694 - RNA, 23 nt, Artificial Sequence
  Synthetic
cauauuuucuucugagacucaag

SEQ ID NO: 300695 - RNA, 24 nt, Artificial Sequence
  Synthetic
acauauuuucuucugagacucaag

SEQ ID NO: 300696 - RNA, 18 nt, Artificial Sequence
  Synthetic
uugauugcauuacucaag

SEQ ID NO: 300697 - RNA, 19 nt, Artificial Sequence
  Synthetic
guugauugcauuacucaag

SEQ ID NO: 300698 - RNA, 20 nt, Artificial Sequence
  Synthetic
aguugauugcauuacucaag

SEQ ID NO: 300699 - RNA, 21 nt, Artificial Sequence
  Synthetic
caguugauugcauuacucaag

SEQ ID NO: 300700 - RNA, 22 nt, Artificial Sequence
  Synthetic
ccaguugauugcauuacucaag

SEQ ID NO: 300701 - RNA, 23 nt, Artificial Sequence
  Synthetic
gccaguugauugcauuacucaag

SEQ ID NO: 300702 - RNA, 24 nt, Artificial Sequence
  Synthetic
ugccaguugauugcauuacucaag

SEQ ID NO: 300703 - RNA, 18 nt, Artificial Sequence
  Synthetic
gcaguucucccccucaag

SEQ ID NO: 300704 - RNA, 19 nt, Artificial Sequence
  Synthetic
agcaguucucccccucaag

SEQ ID NO: 300705 - RNA, 20 nt, Artificial Sequence
  Synthetic
aagcaguucucccccucaag

SEQ ID NO: 300706 - RNA, 21 nt, Artificial Sequence
  Synthetic
aaagcaguucucccccucaag

SEQ ID NO: 300707 - RNA, 22 nt, Artificial Sequence
  Synthetic
gaaagcaguucucccccucaag

SEQ ID NO: 300708 - RNA, 23 nt, Artificial Sequence
  Synthetic
agaaagcaguucucccccucaag

SEQ ID NO: 300709 - RNA, 24 nt, Artificial Sequence
  Synthetic
cagaaagcaguucucccccucaag

SEQ ID NO: 300710 - RNA, 18 nt, Artificial Sequence
  Synthetic
gugaauaggugccucaag

SEQ ID NO: 300711 - RNA, 19 nt, Artificial Sequence
  Synthetic
ugugaauaggugccucaag

SEQ ID NO: 300712 - RNA, 20 nt, Artificial Sequence
  Synthetic
augugaauaggugccucaag

SEQ ID NO: 300713 - RNA, 21 nt, Artificial Sequence
  Synthetic
uaugugaauaggugccucaag

SEQ ID NO: 300714 - RNA, 22 nt, Artificial Sequence
  Synthetic
uuaugugaauaggugccucaag

SEQ ID NO: 300715 - RNA, 23 nt, Artificial Sequence
  Synthetic
auuaugugaauaggugccucaag

SEQ ID NO: 300716 - RNA, 24 nt, Artificial Sequence
  Synthetic
aauuaugugaauaggugccucaag

SEQ ID NO: 300717 - RNA, 18 nt, Artificial Sequence
  Synthetic
cucauucuggggcucaag

SEQ ID NO: 300718 - RNA, 19 nt, Artificial Sequence
  Synthetic
ucucauucuggggcucaag

SEQ ID NO: 300719 - RNA, 20 nt, Artificial Sequence
  Synthetic
gucucauucuggggcucaag

SEQ ID NO: 300720 - RNA, 21 nt, Artificial Sequence
  Synthetic
ugucucauucuggggcucaag

SEQ ID NO: 300721 - RNA, 22 nt, Artificial Sequence
  Synthetic
gugucucauucuggggcucaag

SEQ ID NO: 300722 - RNA, 23 nt, Artificial Sequence
  Synthetic
ugugucucauucuggggcucaag

SEQ ID NO: 300723 - RNA, 24 nt, Artificial Sequence
  Synthetic
augugucucauucuggggcucaag

SEQ ID NO: 300724 - RNA, 18 nt, Artificial Sequence
  Synthetic
ggucucagugggcucaag

SEQ ID NO: 300725 - RNA, 19 nt, Artificial Sequence
  Synthetic
uggucucagugggcucaag

SEQ ID NO: 300726 - RNA, 20 nt, Artificial Sequence
  Synthetic
guggucucagugggcucaag

SEQ ID NO: 300727 - RNA, 21 nt, Artificial Sequence
  Synthetic
cguggucucagugggcucaag

SEQ ID NO: 300728 - RNA, 22 nt, Artificial Sequence
  Synthetic
gcguggucucagugggcucaag

SEQ ID NO: 300729 - RNA, 23 nt, Artificial Sequence
  Synthetic
cgcguggucucagugggcucaag

SEQ ID NO: 300730 - RNA, 24 nt, Artificial Sequence
  Synthetic
ccgcguggucucagugggcucaag

SEQ ID NO: 300731 - RNA, 18 nt, Artificial Sequence
  Synthetic
gucuugaccacucucaag

SEQ ID NO: 300732 - RNA, 19 nt, Artificial Sequence
  Synthetic
agucuugaccacucucaag

SEQ ID NO: 300733 - RNA, 20 nt, Artificial Sequence
  Synthetic
aagucuugaccacucucaag

SEQ ID NO: 300734 - RNA, 21 nt, Artificial Sequence
  Synthetic
aaagucuugaccacucucaag

SEQ ID NO: 300735 - RNA, 22 nt, Artificial Sequence
  Synthetic
aaaagucuugaccacucucaag

SEQ ID NO: 300736 - RNA, 23 nt, Artificial Sequence
  Synthetic
caaaagucuugaccacucucaag

SEQ ID NO: 300737 - RNA, 24 nt, Artificial Sequence
  Synthetic
ucaaaagucuugaccacucucaag

SEQ ID NO: 300738 - RNA, 18 nt, Artificial Sequence
  Synthetic
agaagguaauuucucaag

SEQ ID NO: 300739 - RNA, 19 nt, Artificial Sequence
  Synthetic
aagaagguaauuucucaag

SEQ ID NO: 300740 - RNA, 20 nt, Artificial Sequence
  Synthetic
aaagaagguaauuucucaag

SEQ ID NO: 300741 - RNA, 21 nt, Artificial Sequence
  Synthetic
uaaagaagguaauuucucaag

SEQ ID NO: 300742 - RNA, 22 nt, Artificial Sequence
  Synthetic
uuaaagaagguaauuucucaag

SEQ ID NO: 300743 - RNA, 23 nt, Artificial Sequence
  Synthetic
auuaaagaagguaauuucucaag

SEQ ID NO: 300744 - RNA, 24 nt, Artificial Sequence
  Synthetic
aauuaaagaagguaauuucucaag

SEQ ID NO: 300745 - RNA, 18 nt, Artificial Sequence
  Synthetic
guucacauugaagucaag

SEQ ID NO: 300746 - RNA, 19 nt, Artificial Sequence
  Synthetic
aguucacauugaagucaag

SEQ ID NO: 300747 - RNA, 20 nt, Artificial Sequence
  Synthetic
uaguucacauugaagucaag

SEQ ID NO: 300748 - RNA, 21 nt, Artificial Sequence
  Synthetic
guaguucacauugaagucaag

SEQ ID NO: 300749 - RNA, 22 nt, Artificial Sequence
  Synthetic
uguaguucacauugaagucaag

SEQ ID NO: 300750 - RNA, 23 nt, Artificial Sequence
  Synthetic
auguaguucacauugaagucaag

SEQ ID NO: 300751 - RNA, 24 nt, Artificial Sequence
  Synthetic
uauguaguucacauugaagucaag

SEQ ID NO: 300752 - RNA, 18 nt, Artificial Sequence
  Synthetic
ggcacgaauguagucaag

SEQ ID NO: 300753 - RNA, 19 nt, Artificial Sequence
  Synthetic
uggcacgaauguagucaag

SEQ ID NO: 300754 - RNA, 20 nt, Artificial Sequence
  Synthetic
guggcacgaauguagucaag

SEQ ID NO: 300755 - RNA, 21 nt, Artificial Sequence
  Synthetic
aguggcacgaauguagucaag

SEQ ID NO: 300756 - RNA, 22 nt, Artificial Sequence
  Synthetic
gaguggcacgaauguagucaag

SEQ ID NO: 300757 - RNA, 23 nt, Artificial Sequence
  Synthetic
agaguggcacgaauguagucaag

SEQ ID NO: 300758 - RNA, 24 nt, Artificial Sequence
  Synthetic
gagaguggcacgaauguagucaag

SEQ ID NO: 300759 - RNA, 18 nt, Artificial Sequence
  Synthetic
gacuaaaguuuagucaag

SEQ ID NO: 300760 - RNA, 19 nt, Artificial Sequence
  Synthetic
ugacuaaaguuuagucaag

SEQ ID NO: 300761 - RNA, 20 nt, Artificial Sequence
  Synthetic
cugacuaaaguuuagucaag

SEQ ID NO: 300762 - RNA, 21 nt, Artificial Sequence
  Synthetic
ccugacuaaaguuuagucaag

SEQ ID NO: 300763 - RNA, 22 nt, Artificial Sequence
  Synthetic
gccugacuaaaguuuagucaag

SEQ ID NO: 300764 - RNA, 23 nt, Artificial Sequence
  Synthetic
agccugacuaaaguuuagucaag

SEQ ID NO: 300765 - RNA, 24 nt, Artificial Sequence
  Synthetic
aagccugacuaaaguuuagucaag

SEQ ID NO: 300766 - RNA, 18 nt, Artificial Sequence
  Synthetic
ggaggaggaugcgucaag

SEQ ID NO: 300767 - RNA, 19 nt, Artificial Sequence
  Synthetic
aggaggaggaugcgucaag

SEQ ID NO: 300768 - RNA, 20 nt, Artificial Sequence
  Synthetic
caggaggaggaugcgucaag

SEQ ID NO: 300769 - RNA, 21 nt, Artificial Sequence
  Synthetic
acaggaggaggaugcgucaag

SEQ ID NO: 300770 - RNA, 22 nt, Artificial Sequence
  Synthetic
cacaggaggaggaugcgucaag

SEQ ID NO: 300771 - RNA, 23 nt, Artificial Sequence
  Synthetic
ccacaggaggaggaugcgucaag

SEQ ID NO: 300772 - RNA, 24 nt, Artificial Sequence
  Synthetic
accacaggaggaggaugcgucaag

SEQ ID NO: 300773 - RNA, 18 nt, Artificial Sequence
  Synthetic
ggaguuagacaggucaag

SEQ ID NO: 300774 - RNA, 19 nt, Artificial Sequence
  Synthetic
aggaguuagacaggucaag

SEQ ID NO: 300775 - RNA, 20 nt, Artificial Sequence
  Synthetic
caggaguuagacaggucaag

SEQ ID NO: 300776 - RNA, 21 nt, Artificial Sequence
  Synthetic
gcaggaguuagacaggucaag

SEQ ID NO: 300777 - RNA, 22 nt, Artificial Sequence
  Synthetic
agcaggaguuagacaggucaag

SEQ ID NO: 300778 - RNA, 23 nt, Artificial Sequence
  Synthetic
aagcaggaguuagacaggucaag

SEQ ID NO: 300779 - RNA, 24 nt, Artificial Sequence
  Synthetic
gaagcaggaguuagacaggucaag

SEQ ID NO: 300780 - RNA, 18 nt, Artificial Sequence
  Synthetic
cauuuuccccaggucaag

SEQ ID NO: 300781 - RNA, 19 nt, Artificial Sequence
  Synthetic
ucauuuuccccaggucaag

SEQ ID NO: 300782 - RNA, 20 nt, Artificial Sequence
  Synthetic
aucauuuuccccaggucaag

SEQ ID NO: 300783 - RNA, 21 nt, Artificial Sequence
  Synthetic
aaucauuuuccccaggucaag

SEQ ID NO: 300784 - RNA, 22 nt, Artificial Sequence
  Synthetic
aaaucauuuuccccaggucaag

SEQ ID NO: 300785 - RNA, 23 nt, Artificial Sequence
  Synthetic
uaaaucauuuuccccaggucaag

SEQ ID NO: 300786 - RNA, 24 nt, Artificial Sequence
  Synthetic
uuaaaucauuuuccccaggucaag

SEQ ID NO: 300787 - RNA, 18 nt, Artificial Sequence
  Synthetic
accagagcuucggucaag

SEQ ID NO: 300788 - RNA, 19 nt, Artificial Sequence
  Synthetic
aaccagagcuucggucaag

SEQ ID NO: 300789 - RNA, 20 nt, Artificial Sequence
  Synthetic
aaaccagagcuucggucaag

SEQ ID NO: 300790 - RNA, 21 nt, Artificial Sequence
  Synthetic
aaaaccagagcuucggucaag

SEQ ID NO: 300791 - RNA, 22 nt, Artificial Sequence
  Synthetic
uaaaaccagagcuucggucaag

SEQ ID NO: 300792 - RNA, 23 nt, Artificial Sequence
  Synthetic
auaaaaccagagcuucggucaag

SEQ ID NO: 300793 - RNA, 24 nt, Artificial Sequence
  Synthetic
uauaaaaccagagcuucggucaag

SEQ ID NO: 300794 - RNA, 18 nt, Artificial Sequence
  Synthetic
uuuuuauuuuaugucaag

SEQ ID NO: 300795 - RNA, 19 nt, Artificial Sequence
  Synthetic
auuuuuauuuuaugucaag

SEQ ID NO: 300796 - RNA, 20 nt, Artificial Sequence
  Synthetic
gauuuuuauuuuaugucaag

SEQ ID NO: 300797 - RNA, 21 nt, Artificial Sequence
  Synthetic
ugauuuuuauuuuaugucaag

SEQ ID NO: 300798 - RNA, 22 nt, Artificial Sequence
  Synthetic
uugauuuuuauuuuaugucaag

SEQ ID NO: 300799 - RNA, 23 nt, Artificial Sequence
  Synthetic
guugauuuuuauuuuaugucaag

SEQ ID NO: 300800 - RNA, 24 nt, Artificial Sequence
  Synthetic
aguugauuuuuauuuuaugucaag

SEQ ID NO: 300801 - RNA, 18 nt, Artificial Sequence
  Synthetic
gcucuuuguugugucaag

SEQ ID NO: 300802 - RNA, 19 nt, Artificial Sequence
  Synthetic
ugcucuuuguugugucaag

SEQ ID NO: 300803 - RNA, 20 nt, Artificial Sequence
  Synthetic
gugcucuuuguugugucaag

SEQ ID NO: 300804 - RNA, 21 nt, Artificial Sequence
  Synthetic
ugugcucuuuguugugucaag

SEQ ID NO: 300805 - RNA, 22 nt, Artificial Sequence
  Synthetic
augugcucuuuguugugucaag

SEQ ID NO: 300806 - RNA, 23 nt, Artificial Sequence
  Synthetic
gaugugcucuuuguugugucaag

SEQ ID NO: 300807 - RNA, 24 nt, Artificial Sequence
  Synthetic
ugaugugcucuuuguugugucaag

SEQ ID NO: 300808 - RNA, 18 nt, Artificial Sequence
  Synthetic
acaaaugaaauugucaag

SEQ ID NO: 300809 - RNA, 19 nt, Artificial Sequence
  Synthetic
gacaaaugaaauugucaag

SEQ ID NO: 300810 - RNA, 20 nt, Artificial Sequence
  Synthetic
ugacaaaugaaauugucaag

SEQ ID NO: 300811 - RNA, 21 nt, Artificial Sequence
  Synthetic
augacaaaugaaauugucaag

SEQ ID NO: 300812 - RNA, 22 nt, Artificial Sequence
  Synthetic
caugacaaaugaaauugucaag

SEQ ID NO: 300813 - RNA, 23 nt, Artificial Sequence
  Synthetic
ccaugacaaaugaaauugucaag

SEQ ID NO: 300814 - RNA, 24 nt, Artificial Sequence
  Synthetic
gccaugacaaaugaaauugucaag

SEQ ID NO: 300815 - RNA, 18 nt, Artificial Sequence
  Synthetic
uucauuuuaguugucaag

SEQ ID NO: 300816 - RNA, 19 nt, Artificial Sequence
  Synthetic
uuucauuuuaguugucaag

SEQ ID NO: 300817 - RNA, 20 nt, Artificial Sequence
  Synthetic
auuucauuuuaguugucaag

SEQ ID NO: 300818 - RNA, 21 nt, Artificial Sequence
  Synthetic
uauuucauuuuaguugucaag

SEQ ID NO: 300819 - RNA, 22 nt, Artificial Sequence
  Synthetic
cuauuucauuuuaguugucaag

SEQ ID NO: 300820 - RNA, 23 nt, Artificial Sequence
  Synthetic
ucuauuucauuuuaguugucaag

SEQ ID NO: 300821 - RNA, 24 nt, Artificial Sequence
  Synthetic
aucuauuucauuuuaguugucaag

SEQ ID NO: 300822 - RNA, 18 nt, Artificial Sequence
  Synthetic
ugggagcuacaauucaag

SEQ ID NO: 300823 - RNA, 19 nt, Artificial Sequence
  Synthetic
augggagcuacaauucaag

SEQ ID NO: 300824 - RNA, 20 nt, Artificial Sequence
  Synthetic
uaugggagcuacaauucaag

SEQ ID NO: 300825 - RNA, 21 nt, Artificial Sequence
  Synthetic
uuaugggagcuacaauucaag

SEQ ID NO: 300826 - RNA, 22 nt, Artificial Sequence
  Synthetic
auuaugggagcuacaauucaag

SEQ ID NO: 300827 - RNA, 23 nt, Artificial Sequence
  Synthetic
gauuaugggagcuacaauucaag

SEQ ID NO: 300828 - RNA, 24 nt, Artificial Sequence
  Synthetic
ggauuaugggagcuacaauucaag

SEQ ID NO: 300829 - RNA, 18 nt, Artificial Sequence
  Synthetic
uaaggauuacaauucaag

SEQ ID NO: 300830 - RNA, 19 nt, Artificial Sequence
  Synthetic
auaaggauuacaauucaag

SEQ ID NO: 300831 - RNA, 20 nt, Artificial Sequence
  Synthetic
uauaaggauuacaauucaag

SEQ ID NO: 300832 - RNA, 21 nt, Artificial Sequence
  Synthetic
uuauaaggauuacaauucaag

SEQ ID NO: 300833 - RNA, 22 nt, Artificial Sequence
  Synthetic
auuauaaggauuacaauucaag

SEQ ID NO: 300834 - RNA, 23 nt, Artificial Sequence
  Synthetic
gauuauaaggauuacaauucaag

SEQ ID NO: 300835 - RNA, 24 nt, Artificial Sequence
  Synthetic
ggauuauaaggauuacaauucaag

SEQ ID NO: 300836 - RNA, 18 nt, Artificial Sequence
  Synthetic
uuggaguuacaauucaag

SEQ ID NO: 300837 - RNA, 19 nt, Artificial Sequence
  Synthetic
auuggaguuacaauucaag

SEQ ID NO: 300838 - RNA, 20 nt, Artificial Sequence
  Synthetic
uauuggaguuacaauucaag

SEQ ID NO: 300839 - RNA, 21 nt, Artificial Sequence
  Synthetic
uuauuggaguuacaauucaag

SEQ ID NO: 300840 - RNA, 22 nt, Artificial Sequence
  Synthetic
auuauuggaguuacaauucaag

SEQ ID NO: 300841 - RNA, 23 nt, Artificial Sequence
  Synthetic
gauuauuggaguuacaauucaag

SEQ ID NO: 300842 - RNA, 24 nt, Artificial Sequence
  Synthetic
ggauuauuggaguuacaauucaag

SEQ ID NO: 300843 - RNA, 18 nt, Artificial Sequence
  Synthetic
ugggaacugcaauucaag

SEQ ID NO: 300844 - RNA, 19 nt, Artificial Sequence
  Synthetic
augggaacugcaauucaag

SEQ ID NO: 300845 - RNA, 20 nt, Artificial Sequence
  Synthetic
uaugggaacugcaauucaag

SEQ ID NO: 300846 - RNA, 21 nt, Artificial Sequence
  Synthetic
uuaugggaacugcaauucaag

SEQ ID NO: 300847 - RNA, 22 nt, Artificial Sequence
  Synthetic
auuaugggaacugcaauucaag

SEQ ID NO: 300848 - RNA, 23 nt, Artificial Sequence
  Synthetic
gauuaugggaacugcaauucaag

SEQ ID NO: 300849 - RNA, 24 nt, Artificial Sequence
  Synthetic
ggauuaugggaacugcaauucaag

SEQ ID NO: 300850 - RNA, 18 nt, Artificial Sequence
  Synthetic
aacauguaggaauucaag

SEQ ID NO: 300851 - RNA, 19 nt, Artificial Sequence
  Synthetic
caacauguaggaauucaag

SEQ ID NO: 300852 - RNA, 20 nt, Artificial Sequence
  Synthetic
acaacauguaggaauucaag

SEQ ID NO: 300853 - RNA, 21 nt, Artificial Sequence
  Synthetic
cacaacauguaggaauucaag

SEQ ID NO: 300854 - RNA, 22 nt, Artificial Sequence
  Synthetic
ccacaacauguaggaauucaag

SEQ ID NO: 300855 - RNA, 23 nt, Artificial Sequence
  Synthetic
cccacaacauguaggaauucaag

SEQ ID NO: 300856 - RNA, 24 nt, Artificial Sequence
  Synthetic
ucccacaacauguaggaauucaag

SEQ ID NO: 300857 - RNA, 18 nt, Artificial Sequence
  Synthetic
uuuaauagaucauucaag

SEQ ID NO: 300858 - RNA, 19 nt, Artificial Sequence
  Synthetic
auuuaauagaucauucaag

SEQ ID NO: 300859 - RNA, 20 nt, Artificial Sequence
  Synthetic
aauuuaauagaucauucaag

SEQ ID NO: 300860 - RNA, 21 nt, Artificial Sequence
  Synthetic
caauuuaauagaucauucaag

SEQ ID NO: 300861 - RNA, 22 nt, Artificial Sequence
  Synthetic
ucaauuuaauagaucauucaag

SEQ ID NO: 300862 - RNA, 23 nt, Artificial Sequence
  Synthetic
cucaauuuaauagaucauucaag

SEQ ID NO: 300863 - RNA, 24 nt, Artificial Sequence
  Synthetic
ccucaauuuaauagaucauucaag

SEQ ID NO: 300864 - RNA, 18 nt, Artificial Sequence
  Synthetic
acccagccccuauucaag

SEQ ID NO: 300865 - RNA, 19 nt, Artificial Sequence
  Synthetic
uacccagccccuauucaag

SEQ ID NO: 300866 - RNA, 20 nt, Artificial Sequence
  Synthetic
uuacccagccccuauucaag

SEQ ID NO: 300867 - RNA, 21 nt, Artificial Sequence
  Synthetic
uuuacccagccccuauucaag

SEQ ID NO: 300868 - RNA, 22 nt, Artificial Sequence
  Synthetic
uuuuacccagccccuauucaag

SEQ ID NO: 300869 - RNA, 23 nt, Artificial Sequence
  Synthetic
auuuuacccagccccuauucaag

SEQ ID NO: 300870 - RNA, 24 nt, Artificial Sequence
  Synthetic
uauuuuacccagccccuauucaag

SEQ ID NO: 300871 - RNA, 18 nt, Artificial Sequence
  Synthetic
gcuauacucaacuucaag

SEQ ID NO: 300872 - RNA, 19 nt, Artificial Sequence
  Synthetic
ugcuauacucaacuucaag

SEQ ID NO: 300873 - RNA, 20 nt, Artificial Sequence
  Synthetic
augcuauacucaacuucaag

SEQ ID NO: 300874 - RNA, 21 nt, Artificial Sequence
  Synthetic
uaugcuauacucaacuucaag

SEQ ID NO: 300875 - RNA, 22 nt, Artificial Sequence
  Synthetic
uuaugcuauacucaacuucaag

SEQ ID NO: 300876 - RNA, 23 nt, Artificial Sequence
  Synthetic
guuaugcuauacucaacuucaag

SEQ ID NO: 300877 - RNA, 24 nt, Artificial Sequence
  Synthetic
uguuaugcuauacucaacuucaag

SEQ ID NO: 300878 - RNA, 18 nt, Artificial Sequence
  Synthetic
ccuucaguucacuucaag

SEQ ID NO: 300879 - RNA, 19 nt, Artificial Sequence
  Synthetic
uccuucaguucacuucaag

SEQ ID NO: 300880 - RNA, 20 nt, Artificial Sequence
  Synthetic
uuccuucaguucacuucaag

SEQ ID NO: 300881 - RNA, 21 nt, Artificial Sequence
  Synthetic
uuuccuucaguucacuucaag

SEQ ID NO: 300882 - RNA, 22 nt, Artificial Sequence
  Synthetic
cuuuccuucaguucacuucaag

SEQ ID NO: 300883 - RNA, 23 nt, Artificial Sequence
  Synthetic
ccuuuccuucaguucacuucaag

SEQ ID NO: 300884 - RNA, 24 nt, Artificial Sequence
  Synthetic
uccuuuccuucaguucacuucaag

SEQ ID NO: 300885 - RNA, 18 nt, Artificial Sequence
  Synthetic
auuucacaggccuucaag

SEQ ID NO: 300886 - RNA, 19 nt, Artificial Sequence
  Synthetic
cauuucacaggccuucaag

SEQ ID NO: 300887 - RNA, 20 nt, Artificial Sequence
  Synthetic
ucauuucacaggccuucaag

SEQ ID NO: 300888 - RNA, 21 nt, Artificial Sequence
  Synthetic
cucauuucacaggccuucaag

SEQ ID NO: 300889 - RNA, 22 nt, Artificial Sequence
  Synthetic
ucucauuucacaggccuucaag

SEQ ID NO: 300890 - RNA, 23 nt, Artificial Sequence
  Synthetic
aucucauuucacaggccuucaag

SEQ ID NO: 300891 - RNA, 24 nt, Artificial Sequence
  Synthetic
caucucauuucacaggccuucaag

SEQ ID NO: 300892 - RNA, 18 nt, Artificial Sequence
  Synthetic
ugacccaugggcuucaag

SEQ ID NO: 300893 - RNA, 19 nt, Artificial Sequence
  Synthetic
cugacccaugggcuucaag

SEQ ID NO: 300894 - RNA, 20 nt, Artificial Sequence
  Synthetic
ucugacccaugggcuucaag

SEQ ID NO: 300895 - RNA, 21 nt, Artificial Sequence
  Synthetic
uucugacccaugggcuucaag

SEQ ID NO: 300896 - RNA, 22 nt, Artificial Sequence
  Synthetic
cuucugacccaugggcuucaag

SEQ ID NO: 300897 - RNA, 23 nt, Artificial Sequence
  Synthetic
acuucugacccaugggcuucaag

SEQ ID NO: 300898 - RNA, 24 nt, Artificial Sequence
  Synthetic
aacuucugacccaugggcuucaag

SEQ ID NO: 300899 - RNA, 18 nt, Artificial Sequence
  Synthetic
guuguuaugaucuucaag

SEQ ID NO: 300900 - RNA, 19 nt, Artificial Sequence
  Synthetic
gguuguuaugaucuucaag

SEQ ID NO: 300901 - RNA, 20 nt, Artificial Sequence
  Synthetic
ggguuguuaugaucuucaag

SEQ ID NO: 300902 - RNA, 21 nt, Artificial Sequence
  Synthetic
aggguuguuaugaucuucaag

SEQ ID NO: 300903 - RNA, 22 nt, Artificial Sequence
  Synthetic
uaggguuguuaugaucuucaag

SEQ ID NO: 300904 - RNA, 23 nt, Artificial Sequence
  Synthetic
cuaggguuguuaugaucuucaag

SEQ ID NO: 300905 - RNA, 24 nt, Artificial Sequence
  Synthetic
ucuaggguuguuaugaucuucaag

SEQ ID NO: 300906 - RNA, 18 nt, Artificial Sequence
  Synthetic
gugaaagaccucuucaag

SEQ ID NO: 300907 - RNA, 19 nt, Artificial Sequence
  Synthetic
ugugaaagaccucuucaag

SEQ ID NO: 300908 - RNA, 20 nt, Artificial Sequence
  Synthetic
augugaaagaccucuucaag

SEQ ID NO: 300909 - RNA, 21 nt, Artificial Sequence
  Synthetic
gaugugaaagaccucuucaag

SEQ ID NO: 300910 - RNA, 22 nt, Artificial Sequence
  Synthetic
ggaugugaaagaccucuucaag

SEQ ID NO: 300911 - RNA, 23 nt, Artificial Sequence
  Synthetic
gggaugugaaagaccucuucaag

SEQ ID NO: 300912 - RNA, 24 nt, Artificial Sequence
  Synthetic
agggaugugaaagaccucuucaag

SEQ ID NO: 300913 - RNA, 18 nt, Artificial Sequence
  Synthetic
gugaaggaccucuucaag

SEQ ID NO: 300914 - RNA, 19 nt, Artificial Sequence
  Synthetic
ugugaaggaccucuucaag

SEQ ID NO: 300915 - RNA, 20 nt, Artificial Sequence
  Synthetic
augugaaggaccucuucaag

SEQ ID NO: 300916 - RNA, 18 nt, Artificial Sequence
  Synthetic
aauguauuugaguucaag

SEQ ID NO: 300917 - RNA, 19 nt, Artificial Sequence
  Synthetic
gaauguauuugaguucaag

SEQ ID NO: 300918 - RNA, 20 nt, Artificial Sequence
  Synthetic
agaauguauuugaguucaag

SEQ ID NO: 300919 - RNA, 21 nt, Artificial Sequence
  Synthetic
uagaauguauuugaguucaag

SEQ ID NO: 300920 - RNA, 22 nt, Artificial Sequence
  Synthetic
guagaauguauuugaguucaag

SEQ ID NO: 300921 - RNA, 23 nt, Artificial Sequence
  Synthetic
uguagaauguauuugaguucaag

SEQ ID NO: 300922 - RNA, 24 nt, Artificial Sequence
  Synthetic
uuguagaauguauuugaguucaag

SEQ ID NO: 300923 - RNA, 18 nt, Artificial Sequence
  Synthetic
uguagugcccgguucaag

SEQ ID NO: 300924 - RNA, 19 nt, Artificial Sequence
  Synthetic
cuguagugcccgguucaag

SEQ ID NO: 300925 - RNA, 20 nt, Artificial Sequence
  Synthetic
gcuguagugcccgguucaag

SEQ ID NO: 300926 - RNA, 21 nt, Artificial Sequence
  Synthetic
ugcuguagugcccgguucaag

SEQ ID NO: 300927 - RNA, 22 nt, Artificial Sequence
  Synthetic
gugcuguagugcccgguucaag

SEQ ID NO: 300928 - RNA, 23 nt, Artificial Sequence
  Synthetic
agugcuguagugcccgguucaag

SEQ ID NO: 300929 - RNA, 24 nt, Artificial Sequence
  Synthetic
cagugcuguagugcccgguucaag

SEQ ID NO: 300930 - RNA, 18 nt, Artificial Sequence
  Synthetic
guuauugcaguguucaag

SEQ ID NO: 300931 - RNA, 19 nt, Artificial Sequence
  Synthetic
uguuauugcaguguucaag

SEQ ID NO: 300932 - RNA, 20 nt, Artificial Sequence
  Synthetic
auguuauugcaguguucaag

SEQ ID NO: 300933 - RNA, 21 nt, Artificial Sequence
  Synthetic
uauguuauugcaguguucaag

SEQ ID NO: 300934 - RNA, 22 nt, Artificial Sequence
  Synthetic
auauguuauugcaguguucaag

SEQ ID NO: 300935 - RNA, 23 nt, Artificial Sequence
  Synthetic
aauauguuauugcaguguucaag

SEQ ID NO: 300936 - RNA, 24 nt, Artificial Sequence
  Synthetic
aaauauguuauugcaguguucaag

SEQ ID NO: 300937 - RNA, 18 nt, Artificial Sequence
  Synthetic
cuuguggcuguguucaag

SEQ ID NO: 300938 - RNA, 19 nt, Artificial Sequence
  Synthetic
gcuuguggcuguguucaag

SEQ ID NO: 300939 - RNA, 20 nt, Artificial Sequence
  Synthetic
ugcuuguggcuguguucaag

SEQ ID NO: 300940 - RNA, 21 nt, Artificial Sequence
  Synthetic
cugcuuguggcuguguucaag

SEQ ID NO: 300941 - RNA, 22 nt, Artificial Sequence
  Synthetic
ucugcuuguggcuguguucaag

SEQ ID NO: 300942 - RNA, 23 nt, Artificial Sequence
  Synthetic
uucugcuuguggcuguguucaag

SEQ ID NO: 300943 - RNA, 24 nt, Artificial Sequence
  Synthetic
cuucugcuuguggcuguguucaag

SEQ ID NO: 300944 - RNA, 18 nt, Artificial Sequence
  Synthetic
ugggaauuacauuucaag

SEQ ID NO: 300945 - RNA, 19 nt, Artificial Sequence
  Synthetic
cugggaauuacauuucaag

SEQ ID NO: 300946 - RNA, 20 nt, Artificial Sequence
  Synthetic
acugggaauuacauuucaag

SEQ ID NO: 300947 - RNA, 21 nt, Artificial Sequence
  Synthetic
cacugggaauuacauuucaag

SEQ ID NO: 300948 - RNA, 22 nt, Artificial Sequence
  Synthetic
acacugggaauuacauuucaag

SEQ ID NO: 300949 - RNA, 23 nt, Artificial Sequence
  Synthetic
aacacugggaauuacauuucaag

SEQ ID NO: 300950 - RNA, 24 nt, Artificial Sequence
  Synthetic
caacacugggaauuacauuucaag

SEQ ID NO: 300951 - RNA, 18 nt, Artificial Sequence
  Synthetic
ggugggauguauuucaag

SEQ ID NO: 300952 - RNA, 19 nt, Artificial Sequence
  Synthetic
aggugggauguauuucaag

SEQ ID NO: 300953 - RNA, 20 nt, Artificial Sequence
  Synthetic
aaggugggauguauuucaag

SEQ ID NO: 300954 - RNA, 21 nt, Artificial Sequence
  Synthetic
aaaggugggauguauuucaag

SEQ ID NO: 300955 - RNA, 22 nt, Artificial Sequence
  Synthetic
gaaaggugggauguauuucaag

SEQ ID NO: 300956 - RNA, 23 nt, Artificial Sequence
  Synthetic
ggaaaggugggauguauuucaag

SEQ ID NO: 300957 - RNA, 24 nt, Artificial Sequence
  Synthetic
aggaaaggugggauguauuucaag

SEQ ID NO: 300958 - RNA, 18 nt, Artificial Sequence
  Synthetic
uaaaaccuuccuuucaag

SEQ ID NO: 300959 - RNA, 19 nt, Artificial Sequence
  Synthetic
cuaaaaccuuccuuucaag

SEQ ID NO: 300960 - RNA, 20 nt, Artificial Sequence
  Synthetic
acuaaaaccuuccuuucaag

SEQ ID NO: 300961 - RNA, 21 nt, Artificial Sequence
  Synthetic
aacuaaaaccuuccuuucaag

SEQ ID NO: 300962 - RNA, 22 nt, Artificial Sequence
  Synthetic
uaacuaaaaccuuccuuucaag

SEQ ID NO: 300963 - RNA, 23 nt, Artificial Sequence
  Synthetic
auaacuaaaaccuuccuuucaag

SEQ ID NO: 300964 - RNA, 24 nt, Artificial Sequence
  Synthetic
cauaacuaaaaccuuccuuucaag

SEQ ID NO: 300965 - RNA, 18 nt, Artificial Sequence
  Synthetic
cgugaaauaaguuucaag

SEQ ID NO: 300966 - RNA, 19 nt, Artificial Sequence
  Synthetic
gcgugaaauaaguuucaag

SEQ ID NO: 300967 - RNA, 20 nt, Artificial Sequence
  Synthetic
ugcgugaaauaaguuucaag

SEQ ID NO: 300968 - RNA, 21 nt, Artificial Sequence
  Synthetic
cugcgugaaauaaguuucaag

SEQ ID NO: 300969 - RNA, 22 nt, Artificial Sequence
  Synthetic
ucugcgugaaauaaguuucaag

SEQ ID NO: 300970 - RNA, 23 nt, Artificial Sequence
  Synthetic
aucugcgugaaauaaguuucaag

SEQ ID NO: 300971 - RNA, 24 nt, Artificial Sequence
  Synthetic
caucugcgugaaauaaguuucaag

SEQ ID NO: 300972 - RNA, 18 nt, Artificial Sequence
  Synthetic
cuuaacauguguuucaag

SEQ ID NO: 300973 - RNA, 19 nt, Artificial Sequence
  Synthetic
ucuuaacauguguuucaag

SEQ ID NO: 300974 - RNA, 20 nt, Artificial Sequence
  Synthetic
uucuuaacauguguuucaag

SEQ ID NO: 300975 - RNA, 21 nt, Artificial Sequence
  Synthetic
auucuuaacauguguuucaag

SEQ ID NO: 300976 - RNA, 22 nt, Artificial Sequence
  Synthetic
cauucuuaacauguguuucaag

SEQ ID NO: 300977 - RNA, 23 nt, Artificial Sequence
  Synthetic
ucauucuuaacauguguuucaag

SEQ ID NO: 300978 - RNA, 24 nt, Artificial Sequence
  Synthetic
gucauucuuaacauguguuucaag

SEQ ID NO: 300979 - RNA, 18 nt, Artificial Sequence
  Synthetic
ggguuaauauuuuucaag

SEQ ID NO: 300980 - RNA, 19 nt, Artificial Sequence
  Synthetic
aggguuaauauuuuucaag

SEQ ID NO: 300981 - RNA, 20 nt, Artificial Sequence
  Synthetic
caggguuaauauuuuucaag

SEQ ID NO: 300982 - RNA, 21 nt, Artificial Sequence
  Synthetic
ucaggguuaauauuuuucaag

SEQ ID NO: 300983 - RNA, 22 nt, Artificial Sequence
  Synthetic
aucaggguuaauauuuuucaag

SEQ ID NO: 300984 - RNA, 23 nt, Artificial Sequence
  Synthetic
caucaggguuaauauuuuucaag

SEQ ID NO: 300985 - RNA, 24 nt, Artificial Sequence
  Synthetic
acaucaggguuaauauuuuucaag

SEQ ID NO: 300986 - RNA, 18 nt, Artificial Sequence
  Synthetic
gucucaaaaaaaaagaag

SEQ ID NO: 300987 - RNA, 19 nt, Artificial Sequence
  Synthetic
cgucucaaaaaaaaagaag

SEQ ID NO: 300988 - RNA, 20 nt, Artificial Sequence
  Synthetic
ccgucucaaaaaaaaagaag

SEQ ID NO: 300989 - RNA, 21 nt, Artificial Sequence
  Synthetic
uccgucucaaaaaaaaagaag

SEQ ID NO: 300990 - RNA, 22 nt, Artificial Sequence
  Synthetic
cuccgucucaaaaaaaaagaag

SEQ ID NO: 300991 - RNA, 23 nt, Artificial Sequence
  Synthetic
acuccgucucaaaaaaaaagaag

SEQ ID NO: 300992 - RNA, 24 nt, Artificial Sequence
  Synthetic
gacuccgucucaaaaaaaaagaag

SEQ ID NO: 300993 - RNA, 18 nt, Artificial Sequence
  Synthetic
gaacauucaaaaaagaag

SEQ ID NO: 300994 - RNA, 19 nt, Artificial Sequence
  Synthetic
agaacauucaaaaaagaag

SEQ ID NO: 300995 - RNA, 20 nt, Artificial Sequence
  Synthetic
uagaacauucaaaaaagaag

SEQ ID NO: 300996 - RNA, 21 nt, Artificial Sequence
  Synthetic
guagaacauucaaaaaagaag

SEQ ID NO: 300997 - RNA, 22 nt, Artificial Sequence
  Synthetic
aguagaacauucaaaaaagaag

SEQ ID NO: 300998 - RNA, 23 nt, Artificial Sequence
  Synthetic
uaguagaacauucaaaaaagaag

SEQ ID NO: 300999 - RNA, 24 nt, Artificial Sequence
  Synthetic
cuaguagaacauucaaaaaagaag

SEQ ID NO: 301000 - RNA, 18 nt, Artificial Sequence
  Synthetic
acauagaggaaaaagaag

SEQ ID NO: 301001 - RNA, 19 nt, Artificial Sequence
  Synthetic
aacauagaggaaaaagaag

SEQ ID NO: 301002 - RNA, 20 nt, Artificial Sequence
  Synthetic
aaacauagaggaaaaagaag

SEQ ID NO: 301003 - RNA, 21 nt, Artificial Sequence
  Synthetic
uaaacauagaggaaaaagaag

SEQ ID NO: 301004 - RNA, 22 nt, Artificial Sequence
  Synthetic
uuaaacauagaggaaaaagaag

SEQ ID NO: 301005 - RNA, 23 nt, Artificial Sequence
  Synthetic
uuuaaacauagaggaaaaagaag

SEQ ID NO: 301006 - RNA, 24 nt, Artificial Sequence
  Synthetic
uuuuaaacauagaggaaaaagaag

SEQ ID NO: 301007 - RNA, 18 nt, Artificial Sequence
  Synthetic
uagauaccuaaaaagaag

SEQ ID NO: 301008 - RNA, 19 nt, Artificial Sequence
  Synthetic
cuagauaccuaaaaagaag

SEQ ID NO: 301009 - RNA, 20 nt, Artificial Sequence
  Synthetic
gcuagauaccuaaaaagaag

SEQ ID NO: 301010 - RNA, 21 nt, Artificial Sequence
  Synthetic
agcuagauaccuaaaaagaag

SEQ ID NO: 301011 - RNA, 22 nt, Artificial Sequence
  Synthetic
uagcuagauaccuaaaaagaag

SEQ ID NO: 301012 - RNA, 23 nt, Artificial Sequence
  Synthetic
cuagcuagauaccuaaaaagaag

SEQ ID NO: 301013 - RNA, 24 nt, Artificial Sequence
  Synthetic
ucuagcuagauaccuaaaaagaag

SEQ ID NO: 301014 - RNA, 18 nt, Artificial Sequence
  Synthetic
uaugugaaagaaaagaag

SEQ ID NO: 301015 - RNA, 19 nt, Artificial Sequence
  Synthetic
cuaugugaaagaaaagaag

SEQ ID NO: 301016 - RNA, 20 nt, Artificial Sequence
  Synthetic
ucuaugugaaagaaaagaag

SEQ ID NO: 301017 - RNA, 21 nt, Artificial Sequence
  Synthetic
aucuaugugaaagaaaagaag

SEQ ID NO: 301018 - RNA, 22 nt, Artificial Sequence
  Synthetic
uaucuaugugaaagaaaagaag

SEQ ID NO: 301019 - RNA, 23 nt, Artificial Sequence
  Synthetic
auaucuaugugaaagaaaagaag

SEQ ID NO: 301020 - RNA, 24 nt, Artificial Sequence
  Synthetic
aauaucuaugugaaagaaaagaag

SEQ ID NO: 301021 - RNA, 18 nt, Artificial Sequence
  Synthetic
gaauaugaugaaaagaag

SEQ ID NO: 301022 - RNA, 19 nt, Artificial Sequence
  Synthetic
agaauaugaugaaaagaag

SEQ ID NO: 301023 - RNA, 20 nt, Artificial Sequence
  Synthetic
cagaauaugaugaaaagaag

SEQ ID NO: 301024 - RNA, 21 nt, Artificial Sequence
  Synthetic
ucagaauaugaugaaaagaag

SEQ ID NO: 301025 - RNA, 22 nt, Artificial Sequence
  Synthetic
cucagaauaugaugaaaagaag

SEQ ID NO: 301026 - RNA, 23 nt, Artificial Sequence
  Synthetic
ccucagaauaugaugaaaagaag

SEQ ID NO: 301027 - RNA, 24 nt, Artificial Sequence
  Synthetic
gccucagaauaugaugaaaagaag

SEQ ID NO: 301028 - RNA, 18 nt, Artificial Sequence
  Synthetic
uaugugaacuaaaagaag

SEQ ID NO: 301029 - RNA, 19 nt, Artificial Sequence
  Synthetic
auaugugaacuaaaagaag

SEQ ID NO: 301030 - RNA, 20 nt, Artificial Sequence
  Synthetic
uauaugugaacuaaaagaag

SEQ ID NO: 301031 - RNA, 21 nt, Artificial Sequence
  Synthetic
cuauaugugaacuaaaagaag

SEQ ID NO: 301032 - RNA, 22 nt, Artificial Sequence
  Synthetic
acuauaugugaacuaaaagaag

SEQ ID NO: 301033 - RNA, 23 nt, Artificial Sequence
  Synthetic
gacuauaugugaacuaaaagaag

SEQ ID NO: 301034 - RNA, 24 nt, Artificial Sequence
  Synthetic
ugacuauaugugaacuaaaagaag

SEQ ID NO: 301035 - RNA, 18 nt, Artificial Sequence
  Synthetic
caucacaauuaaaagaag

SEQ ID NO: 301036 - RNA, 19 nt, Artificial Sequence
  Synthetic
acaucacaauuaaaagaag

SEQ ID NO: 301037 - RNA, 20 nt, Artificial Sequence
  Synthetic
aacaucacaauuaaaagaag

SEQ ID NO: 301038 - RNA, 21 nt, Artificial Sequence
  Synthetic
uaacaucacaauuaaaagaag

SEQ ID NO: 301039 - RNA, 22 nt, Artificial Sequence
  Synthetic
uuaacaucacaauuaaaagaag

SEQ ID NO: 301040 - RNA, 23 nt, Artificial Sequence
  Synthetic
cuuaacaucacaauuaaaagaag

SEQ ID NO: 301041 - RNA, 24 nt, Artificial Sequence
  Synthetic
ccuuaacaucacaauuaaaagaag

SEQ ID NO: 301042 - RNA, 18 nt, Artificial Sequence
  Synthetic
gacuugggagcaaagaag

SEQ ID NO: 301043 - RNA, 19 nt, Artificial Sequence
  Synthetic
agacuugggagcaaagaag

SEQ ID NO: 301044 - RNA, 20 nt, Artificial Sequence
  Synthetic
gagacuugggagcaaagaag

SEQ ID NO: 301045 - RNA, 21 nt, Artificial Sequence
  Synthetic
ugagacuugggagcaaagaag

SEQ ID NO: 301046 - RNA, 22 nt, Artificial Sequence
  Synthetic
augagacuugggagcaaagaag

SEQ ID NO: 301047 - RNA, 23 nt, Artificial Sequence
  Synthetic
aaugagacuugggagcaaagaag

SEQ ID NO: 301048 - RNA, 24 nt, Artificial Sequence
  Synthetic
aaaugagacuugggagcaaagaag

SEQ ID NO: 301049 - RNA, 18 nt, Artificial Sequence
  Synthetic
auuuuccaggcaaagaag

SEQ ID NO: 301050 - RNA, 19 nt, Artificial Sequence
  Synthetic
cauuuuccaggcaaagaag

SEQ ID NO: 301051 - RNA, 20 nt, Artificial Sequence
  Synthetic
ccauuuuccaggcaaagaag

SEQ ID NO: 301052 - RNA, 21 nt, Artificial Sequence
  Synthetic
cccauuuuccaggcaaagaag

SEQ ID NO: 301053 - RNA, 22 nt, Artificial Sequence
  Synthetic
ucccauuuuccaggcaaagaag

SEQ ID NO: 301054 - RNA, 23 nt, Artificial Sequence
  Synthetic
uucccauuuuccaggcaaagaag

SEQ ID NO: 301055 - RNA, 24 nt, Artificial Sequence
  Synthetic
guucccauuuuccaggcaaagaag

SEQ ID NO: 301056 - RNA, 18 nt, Artificial Sequence
  Synthetic
agcaugauaagaaagaag

SEQ ID NO: 301057 - RNA, 19 nt, Artificial Sequence
  Synthetic
aagcaugauaagaaagaag

SEQ ID NO: 301058 - RNA, 20 nt, Artificial Sequence
  Synthetic
caagcaugauaagaaagaag

SEQ ID NO: 301059 - RNA, 21 nt, Artificial Sequence
  Synthetic
acaagcaugauaagaaagaag

SEQ ID NO: 301060 - RNA, 22 nt, Artificial Sequence
  Synthetic
gacaagcaugauaagaaagaag

SEQ ID NO: 301061 - RNA, 23 nt, Artificial Sequence
  Synthetic
agacaagcaugauaagaaagaag

SEQ ID NO: 301062 - RNA, 24 nt, Artificial Sequence
  Synthetic
gagacaagcaugauaagaaagaag

SEQ ID NO: 301063 - RNA, 18 nt, Artificial Sequence
  Synthetic
ccauaccgaggaaagaag

SEQ ID NO: 301064 - RNA, 19 nt, Artificial Sequence
  Synthetic
uccauaccgaggaaagaag

SEQ ID NO: 301065 - RNA, 20 nt, Artificial Sequence
  Synthetic
uuccauaccgaggaaagaag

SEQ ID NO: 301066 - RNA, 21 nt, Artificial Sequence
  Synthetic
guuccauaccgaggaaagaag

SEQ ID NO: 301067 - RNA, 22 nt, Artificial Sequence
  Synthetic
uguuccauaccgaggaaagaag

SEQ ID NO: 301068 - RNA, 23 nt, Artificial Sequence
  Synthetic
auguuccauaccgaggaaagaag

SEQ ID NO: 301069 - RNA, 24 nt, Artificial Sequence
  Synthetic
gauguuccauaccgaggaaagaag

SEQ ID NO: 301070 - RNA, 18 nt, Artificial Sequence
  Synthetic
aaaggcaggcuaaagaag

SEQ ID NO: 301071 - RNA, 19 nt, Artificial Sequence
  Synthetic
uaaaggcaggcuaaagaag

SEQ ID NO: 301072 - RNA, 20 nt, Artificial Sequence
  Synthetic
auaaaggcaggcuaaagaag

SEQ ID NO: 301073 - RNA, 21 nt, Artificial Sequence
  Synthetic
gauaaaggcaggcuaaagaag

SEQ ID NO: 301074 - RNA, 22 nt, Artificial Sequence
  Synthetic
agauaaaggcaggcuaaagaag

SEQ ID NO: 301075 - RNA, 23 nt, Artificial Sequence
  Synthetic
uagauaaaggcaggcuaaagaag

SEQ ID NO: 301076 - RNA, 24 nt, Artificial Sequence
  Synthetic
uuagauaaaggcaggcuaaagaag

SEQ ID NO: 301077 - RNA, 18 nt, Artificial Sequence
  Synthetic
uuguuuuaaggcaagaag

SEQ ID NO: 301078 - RNA, 19 nt, Artificial Sequence
  Synthetic
guuguuuuaaggcaagaag

SEQ ID NO: 301079 - RNA, 20 nt, Artificial Sequence
  Synthetic
gguuguuuuaaggcaagaag

SEQ ID NO: 301080 - RNA, 21 nt, Artificial Sequence
  Synthetic
ugguuguuuuaaggcaagaag

SEQ ID NO: 301081 - RNA, 22 nt, Artificial Sequence
  Synthetic
uugguuguuuuaaggcaagaag

SEQ ID NO: 301082 - RNA, 23 nt, Artificial Sequence
  Synthetic
cuugguuguuuuaaggcaagaag

SEQ ID NO: 301083 - RNA, 24 nt, Artificial Sequence
  Synthetic
acuugguuguuuuaaggcaagaag

SEQ ID NO: 301084 - RNA, 18 nt, Artificial Sequence
  Synthetic
ccgcagagaggcaagaag

SEQ ID NO: 301085 - RNA, 19 nt, Artificial Sequence
  Synthetic
cccgcagagaggcaagaag

SEQ ID NO: 301086 - RNA, 20 nt, Artificial Sequence
  Synthetic
ccccgcagagaggcaagaag

SEQ ID NO: 301087 - RNA, 21 nt, Artificial Sequence
  Synthetic
uccccgcagagaggcaagaag

SEQ ID NO: 301088 - RNA, 22 nt, Artificial Sequence
  Synthetic
guccccgcagagaggcaagaag

SEQ ID NO: 301089 - RNA, 23 nt, Artificial Sequence
  Synthetic
gguccccgcagagaggcaagaag

SEQ ID NO: 301090 - RNA, 24 nt, Artificial Sequence
  Synthetic
agguccccgcagagaggcaagaag

SEQ ID NO: 301091 - RNA, 18 nt, Artificial Sequence
  Synthetic
ucacaugauggcaagaag

SEQ ID NO: 301092 - RNA, 19 nt, Artificial Sequence
  Synthetic
gucacaugauggcaagaag

SEQ ID NO: 301093 - RNA, 20 nt, Artificial Sequence
  Synthetic
ugucacaugauggcaagaag

SEQ ID NO: 301094 - RNA, 21 nt, Artificial Sequence
  Synthetic
uugucacaugauggcaagaag

SEQ ID NO: 301095 - RNA, 22 nt, Artificial Sequence
  Synthetic
uuugucacaugauggcaagaag

SEQ ID NO: 301096 - RNA, 23 nt, Artificial Sequence
  Synthetic
cuuugucacaugauggcaagaag

SEQ ID NO: 301097 - RNA, 24 nt, Artificial Sequence
  Synthetic
ccuuugucacaugauggcaagaag

SEQ ID NO: 301098 - RNA, 18 nt, Artificial Sequence
  Synthetic
aagaagaagaagaagaag

SEQ ID NO: 301099 - RNA, 19 nt, Artificial Sequence
  Synthetic
uaagaagaagaagaagaag

SEQ ID NO: 301100 - RNA, 20 nt, Artificial Sequence
  Synthetic
auaagaagaagaagaagaag

SEQ ID NO: 301101 - RNA, 21 nt, Artificial Sequence
  Synthetic
cauaagaagaagaagaagaag

SEQ ID NO: 301102 - RNA, 22 nt, Artificial Sequence
  Synthetic
ccauaagaagaagaagaagaag

SEQ ID NO: 301103 - RNA, 23 nt, Artificial Sequence
  Synthetic
accauaagaagaagaagaagaag

SEQ ID NO: 301104 - RNA, 24 nt, Artificial Sequence
  Synthetic
uaccauaagaagaagaagaagaag

SEQ ID NO: 301105 - RNA, 18 nt, Artificial Sequence
  Synthetic
cauaagaagaagaagaag

SEQ ID NO: 301106 - RNA, 19 nt, Artificial Sequence
  Synthetic
ccauaagaagaagaagaag

SEQ ID NO: 301107 - RNA, 20 nt, Artificial Sequence
  Synthetic
accauaagaagaagaagaag

SEQ ID NO: 301108 - RNA, 21 nt, Artificial Sequence
  Synthetic
uaccauaagaagaagaagaag

SEQ ID NO: 301109 - RNA, 22 nt, Artificial Sequence
  Synthetic
cuaccauaagaagaagaagaag

SEQ ID NO: 301110 - RNA, 23 nt, Artificial Sequence
  Synthetic
ccuaccauaagaagaagaagaag

SEQ ID NO: 301111 - RNA, 24 nt, Artificial Sequence
  Synthetic
uccuaccauaagaagaagaagaag

SEQ ID NO: 301112 - RNA, 18 nt, Artificial Sequence
  Synthetic
uaccauaagaagaagaag

SEQ ID NO: 301113 - RNA, 19 nt, Artificial Sequence
  Synthetic
cuaccauaagaagaagaag

SEQ ID NO: 301114 - RNA, 20 nt, Artificial Sequence
  Synthetic
ccuaccauaagaagaagaag

SEQ ID NO: 301115 - RNA, 21 nt, Artificial Sequence
  Synthetic
uccuaccauaagaagaagaag

SEQ ID NO: 301116 - RNA, 22 nt, Artificial Sequence
  Synthetic
uuccuaccauaagaagaagaag

SEQ ID NO: 301117 - RNA, 23 nt, Artificial Sequence
  Synthetic
guuccuaccauaagaagaagaag

SEQ ID NO: 301118 - RNA, 24 nt, Artificial Sequence
  Synthetic
uguuccuaccauaagaagaagaag

SEQ ID NO: 301119 - RNA, 18 nt, Artificial Sequence
  Synthetic
uccuaccauaagaagaag

SEQ ID NO: 301120 - RNA, 19 nt, Artificial Sequence
  Synthetic
uuccuaccauaagaagaag

SEQ ID NO: 301121 - RNA, 20 nt, Artificial Sequence
  Synthetic
guuccuaccauaagaagaag

SEQ ID NO: 301122 - RNA, 21 nt, Artificial Sequence
  Synthetic
uguuccuaccauaagaagaag

SEQ ID NO: 301123 - RNA, 22 nt, Artificial Sequence
  Synthetic
guguuccuaccauaagaagaag

SEQ ID NO: 301124 - RNA, 23 nt, Artificial Sequence
  Synthetic
aguguuccuaccauaagaagaag

SEQ ID NO: 301125 - RNA, 24 nt, Artificial Sequence
  Synthetic
aaguguuccuaccauaagaagaag

SEQ ID NO: 301126 - RNA, 18 nt, Artificial Sequence
  Synthetic
gaguuagaugagaagaag

SEQ ID NO: 301127 - RNA, 19 nt, Artificial Sequence
  Synthetic
ugaguuagaugagaagaag

SEQ ID NO: 301128 - RNA, 20 nt, Artificial Sequence
  Synthetic
uugaguuagaugagaagaag

SEQ ID NO: 301129 - RNA, 21 nt, Artificial Sequence
  Synthetic
cuugaguuagaugagaagaag

SEQ ID NO: 301130 - RNA, 22 nt, Artificial Sequence
  Synthetic
ccuugaguuagaugagaagaag

SEQ ID NO: 301131 - RNA, 23 nt, Artificial Sequence
  Synthetic
uccuugaguuagaugagaagaag

SEQ ID NO: 301132 - RNA, 24 nt, Artificial Sequence
  Synthetic
auccuugaguuagaugagaagaag

SEQ ID NO: 301133 - RNA, 18 nt, Artificial Sequence
  Synthetic
ucaauaaaauagaagaag

SEQ ID NO: 301134 - RNA, 19 nt, Artificial Sequence
  Synthetic
gucaauaaaauagaagaag

SEQ ID NO: 301135 - RNA, 20 nt, Artificial Sequence
  Synthetic
agucaauaaaauagaagaag

SEQ ID NO: 301136 - RNA, 21 nt, Artificial Sequence
  Synthetic
aagucaauaaaauagaagaag

SEQ ID NO: 301137 - RNA, 22 nt, Artificial Sequence
  Synthetic
gaagucaauaaaauagaagaag

SEQ ID NO: 301138 - RNA, 23 nt, Artificial Sequence
  Synthetic
agaagucaauaaaauagaagaag

SEQ ID NO: 301139 - RNA, 24 nt, Artificial Sequence
  Synthetic
cagaagucaauaaaauagaagaag

SEQ ID NO: 301140 - RNA, 18 nt, Artificial Sequence
  Synthetic
cacauagaguagaagaag

SEQ ID NO: 301141 - RNA, 19 nt, Artificial Sequence
  Synthetic
gcacauagaguagaagaag

SEQ ID NO: 301142 - RNA, 20 nt, Artificial Sequence
  Synthetic
agcacauagaguagaagaag

SEQ ID NO: 301143 - RNA, 21 nt, Artificial Sequence
  Synthetic
aagcacauagaguagaagaag

SEQ ID NO: 301144 - RNA, 22 nt, Artificial Sequence
  Synthetic
caagcacauagaguagaagaag

SEQ ID NO: 301145 - RNA, 23 nt, Artificial Sequence
  Synthetic
ccaagcacauagaguagaagaag

SEQ ID NO: 301146 - RNA, 24 nt, Artificial Sequence
  Synthetic
gccaagcacauagaguagaagaag

SEQ ID NO: 301147 - RNA, 18 nt, Artificial Sequence
  Synthetic
agcuuugauucgaagaag

SEQ ID NO: 301148 - RNA, 19 nt, Artificial Sequence
  Synthetic
aagcuuugauucgaagaag

SEQ ID NO: 301149 - RNA, 20 nt, Artificial Sequence
  Synthetic
gaagcuuugauucgaagaag

SEQ ID NO: 301150 - RNA, 21 nt, Artificial Sequence
  Synthetic
ggaagcuuugauucgaagaag

SEQ ID NO: 301151 - RNA, 22 nt, Artificial Sequence
  Synthetic
aggaagcuuugauucgaagaag

SEQ ID NO: 301152 - RNA, 23 nt, Artificial Sequence
  Synthetic
uaggaagcuuugauucgaagaag

SEQ ID NO: 301153 - RNA, 24 nt, Artificial Sequence
  Synthetic
uuaggaagcuuugauucgaagaag

SEQ ID NO: 301154 - RNA, 18 nt, Artificial Sequence
  Synthetic
aguagucaaaggaagaag

SEQ ID NO: 301155 - RNA, 19 nt, Artificial Sequence
  Synthetic
aaguagucaaaggaagaag

SEQ ID NO: 301156 - RNA, 20 nt, Artificial Sequence
  Synthetic
aaaguagucaaaggaagaag

SEQ ID NO: 301157 - RNA, 21 nt, Artificial Sequence
  Synthetic
aaaaguagucaaaggaagaag

SEQ ID NO: 301158 - RNA, 22 nt, Artificial Sequence
  Synthetic
caaaaguagucaaaggaagaag

SEQ ID NO: 301159 - RNA, 23 nt, Artificial Sequence
  Synthetic
ucaaaaguagucaaaggaagaag

SEQ ID NO: 301160 - RNA, 24 nt, Artificial Sequence
  Synthetic
aucaaaaguagucaaaggaagaag

SEQ ID NO: 301161 - RNA, 18 nt, Artificial Sequence
  Synthetic
auuucaacaaugaagaag

SEQ ID NO: 301162 - RNA, 19 nt, Artificial Sequence
  Synthetic
aauuucaacaaugaagaag

SEQ ID NO: 301163 - RNA, 20 nt, Artificial Sequence
  Synthetic
caauuucaacaaugaagaag

SEQ ID NO: 301164 - RNA, 21 nt, Artificial Sequence
  Synthetic
gcaauuucaacaaugaagaag

SEQ ID NO: 301165 - RNA, 22 nt, Artificial Sequence
  Synthetic
ggcaauuucaacaaugaagaag

SEQ ID NO: 301166 - RNA, 23 nt, Artificial Sequence
  Synthetic
aggcaauuucaacaaugaagaag

SEQ ID NO: 301167 - RNA, 24 nt, Artificial Sequence
  Synthetic
aaggcaauuucaacaaugaagaag

SEQ ID NO: 301168 - RNA, 18 nt, Artificial Sequence
  Synthetic
aaggagaaagugaagaag

SEQ ID NO: 301169 - RNA, 19 nt, Artificial Sequence
  Synthetic
gaaggagaaagugaagaag

SEQ ID NO: 301170 - RNA, 20 nt, Artificial Sequence
  Synthetic
agaaggagaaagugaagaag

SEQ ID NO: 301171 - RNA, 21 nt, Artificial Sequence
  Synthetic
gagaaggagaaagugaagaag

SEQ ID NO: 301172 - RNA, 22 nt, Artificial Sequence
  Synthetic
ggagaaggagaaagugaagaag

SEQ ID NO: 301173 - RNA, 23 nt, Artificial Sequence
  Synthetic
aggagaaggagaaagugaagaag

SEQ ID NO: 301174 - RNA, 24 nt, Artificial Sequence
  Synthetic
aaggagaaggagaaagugaagaag

SEQ ID NO: 301175 - RNA, 18 nt, Artificial Sequence
  Synthetic
aauguugucaauaagaag

SEQ ID NO: 301176 - RNA, 19 nt, Artificial Sequence
  Synthetic
aaauguugucaauaagaag

SEQ ID NO: 301177 - RNA, 20 nt, Artificial Sequence
  Synthetic
caaauguugucaauaagaag

SEQ ID NO: 301178 - RNA, 21 nt, Artificial Sequence
  Synthetic
acaaauguugucaauaagaag

SEQ ID NO: 301179 - RNA, 22 nt, Artificial Sequence
  Synthetic
gacaaauguugucaauaagaag

SEQ ID NO: 301180 - RNA, 23 nt, Artificial Sequence
  Synthetic
ggacaaauguugucaauaagaag

SEQ ID NO: 301181 - RNA, 24 nt, Artificial Sequence
  Synthetic
cggacaaauguugucaauaagaag

SEQ ID NO: 301182 - RNA, 18 nt, Artificial Sequence
  Synthetic
uggagacuacauaagaag

SEQ ID NO: 301183 - RNA, 19 nt, Artificial Sequence
  Synthetic
uuggagacuacauaagaag

SEQ ID NO: 301184 - RNA, 20 nt, Artificial Sequence
  Synthetic
uuuggagacuacauaagaag

SEQ ID NO: 301185 - RNA, 21 nt, Artificial Sequence
  Synthetic
auuuggagacuacauaagaag

SEQ ID NO: 301186 - RNA, 22 nt, Artificial Sequence
  Synthetic
aauuuggagacuacauaagaag

SEQ ID NO: 301187 - RNA, 23 nt, Artificial Sequence
  Synthetic
aaauuuggagacuacauaagaag

SEQ ID NO: 301188 - RNA, 24 nt, Artificial Sequence
  Synthetic
caaauuuggagacuacauaagaag

SEQ ID NO: 301189 - RNA, 18 nt, Artificial Sequence
  Synthetic
uguuccuaccauaagaag

SEQ ID NO: 301190 - RNA, 19 nt, Artificial Sequence
  Synthetic
guguuccuaccauaagaag

SEQ ID NO: 301191 - RNA, 20 nt, Artificial Sequence
  Synthetic
aguguuccuaccauaagaag

SEQ ID NO: 301192 - RNA, 21 nt, Artificial Sequence
  Synthetic
aaguguuccuaccauaagaag

SEQ ID NO: 301193 - RNA, 22 nt, Artificial Sequence
  Synthetic
uaaguguuccuaccauaagaag

SEQ ID NO: 301194 - RNA, 23 nt, Artificial Sequence
  Synthetic
uuaaguguuccuaccauaagaag

SEQ ID NO: 301195 - RNA, 24 nt, Artificial Sequence
  Synthetic
cuuaaguguuccuaccauaagaag

SEQ ID NO: 301196 - RNA, 18 nt, Artificial Sequence
  Synthetic
ugguauuuuuauaagaag

SEQ ID NO: 301197 - RNA, 19 nt, Artificial Sequence
  Synthetic
augguauuuuuauaagaag

SEQ ID NO: 301198 - RNA, 20 nt, Artificial Sequence
  Synthetic
gaugguauuuuuauaagaag

SEQ ID NO: 301199 - RNA, 21 nt, Artificial Sequence
  Synthetic
agaugguauuuuuauaagaag

SEQ ID NO: 301200 - RNA, 22 nt, Artificial Sequence
  Synthetic
aagaugguauuuuuauaagaag

SEQ ID NO: 301201 - RNA, 23 nt, Artificial Sequence
  Synthetic
uaagaugguauuuuuauaagaag

SEQ ID NO: 301202 - RNA, 24 nt, Artificial Sequence
  Synthetic
uuaagaugguauuuuuauaagaag

SEQ ID NO: 301203 - RNA, 18 nt, Artificial Sequence
  Synthetic
agcuuauuaaguaagaag

SEQ ID NO: 301204 - RNA, 19 nt, Artificial Sequence
  Synthetic
aagcuuauuaaguaagaag

SEQ ID NO: 301205 - RNA, 20 nt, Artificial Sequence
  Synthetic
aaagcuuauuaaguaagaag

SEQ ID NO: 301206 - RNA, 21 nt, Artificial Sequence
  Synthetic
aaaagcuuauuaaguaagaag

SEQ ID NO: 301207 - RNA, 22 nt, Artificial Sequence
  Synthetic
gaaaagcuuauuaaguaagaag

SEQ ID NO: 301208 - RNA, 23 nt, Artificial Sequence
  Synthetic
agaaaagcuuauuaaguaagaag

SEQ ID NO: 301209 - RNA, 24 nt, Artificial Sequence
  Synthetic
cagaaaagcuuauuaaguaagaag

SEQ ID NO: 301210 - RNA, 18 nt, Artificial Sequence
  Synthetic
uuuuuucuacuuaagaag

SEQ ID NO: 301211 - RNA, 19 nt, Artificial Sequence
  Synthetic
guuuuuucuacuuaagaag

SEQ ID NO: 301212 - RNA, 20 nt, Artificial Sequence
  Synthetic
uguuuuuucuacuuaagaag

SEQ ID NO: 301213 - RNA, 21 nt, Artificial Sequence
  Synthetic
guguuuuuucuacuuaagaag

SEQ ID NO: 301214 - RNA, 22 nt, Artificial Sequence
  Synthetic
uguguuuuuucuacuuaagaag

SEQ ID NO: 301215 - RNA, 23 nt, Artificial Sequence
  Synthetic
cuguguuuuuucuacuuaagaag

SEQ ID NO: 301216 - RNA, 24 nt, Artificial Sequence
  Synthetic
ucuguguuuuuucuacuuaagaag

SEQ ID NO: 301217 - RNA, 18 nt, Artificial Sequence
  Synthetic
aaugacacauuuaagaag

SEQ ID NO: 301218 - RNA, 19 nt, Artificial Sequence
  Synthetic
uaaugacacauuuaagaag

SEQ ID NO: 301219 - RNA, 20 nt, Artificial Sequence
  Synthetic
cuaaugacacauuuaagaag

SEQ ID NO: 301220 - RNA, 21 nt, Artificial Sequence
  Synthetic
ccuaaugacacauuuaagaag

SEQ ID NO: 301221 - RNA, 22 nt, Artificial Sequence
  Synthetic
accuaaugacacauuuaagaag

SEQ ID NO: 301222 - RNA, 23 nt, Artificial Sequence
  Synthetic
caccuaaugacacauuuaagaag

SEQ ID NO: 301223 - RNA, 24 nt, Artificial Sequence
  Synthetic
ucaccuaaugacacauuuaagaag

SEQ ID NO: 301224 - RNA, 18 nt, Artificial Sequence
  Synthetic
agcaggcuagaacagaag

SEQ ID NO: 301225 - RNA, 19 nt, Artificial Sequence
  Synthetic
gagcaggcuagaacagaag

SEQ ID NO: 301226 - RNA, 20 nt, Artificial Sequence
  Synthetic
agagcaggcuagaacagaag

SEQ ID NO: 301227 - RNA, 21 nt, Artificial Sequence
  Synthetic
aagagcaggcuagaacagaag

SEQ ID NO: 301228 - RNA, 22 nt, Artificial Sequence
  Synthetic
gaagagcaggcuagaacagaag

SEQ ID NO: 301229 - RNA, 23 nt, Artificial Sequence
  Synthetic
agaagagcaggcuagaacagaag

SEQ ID NO: 301230 - RNA, 24 nt, Artificial Sequence
  Synthetic
cagaagagcaggcuagaacagaag

SEQ ID NO: 301231 - RNA, 18 nt, Artificial Sequence
  Synthetic
uuagaaguggaacagaag

SEQ ID NO: 301232 - RNA, 19 nt, Artificial Sequence
  Synthetic
uuuagaaguggaacagaag

SEQ ID NO: 301233 - RNA, 20 nt, Artificial Sequence
  Synthetic
guuuagaaguggaacagaag

SEQ ID NO: 301234 - RNA, 21 nt, Artificial Sequence
  Synthetic
uguuuagaaguggaacagaag

SEQ ID NO: 301235 - RNA, 22 nt, Artificial Sequence
  Synthetic
auguuuagaaguggaacagaag

SEQ ID NO: 301236 - RNA, 23 nt, Artificial Sequence
  Synthetic
gauguuuagaaguggaacagaag

SEQ ID NO: 301237 - RNA, 24 nt, Artificial Sequence
  Synthetic
agauguuuagaaguggaacagaag

SEQ ID NO: 301238 - RNA, 18 nt, Artificial Sequence
  Synthetic
aaaaugaguuaacagaag

SEQ ID NO: 301239 - RNA, 19 nt, Artificial Sequence
  Synthetic
aaaaaugaguuaacagaag

SEQ ID NO: 301240 - RNA, 20 nt, Artificial Sequence
  Synthetic
gaaaaaugaguuaacagaag

SEQ ID NO: 301241 - RNA, 21 nt, Artificial Sequence
  Synthetic
agaaaaaugaguuaacagaag

SEQ ID NO: 301242 - RNA, 22 nt, Artificial Sequence
  Synthetic
gagaaaaaugaguuaacagaag

SEQ ID NO: 301243 - RNA, 23 nt, Artificial Sequence
  Synthetic
ggagaaaaaugaguuaacagaag

SEQ ID NO: 301244 - RNA, 24 nt, Artificial Sequence
  Synthetic
gggagaaaaaugaguuaacagaag

SEQ ID NO: 301245 - RNA, 18 nt, Artificial Sequence
  Synthetic
uaucauagacuacagaag

SEQ ID NO: 301246 - RNA, 19 nt, Artificial Sequence
  Synthetic
auaucauagacuacagaag

SEQ ID NO: 301247 - RNA, 20 nt, Artificial Sequence
  Synthetic
uauaucauagacuacagaag

SEQ ID NO: 301248 - RNA, 21 nt, Artificial Sequence
  Synthetic
auauaucauagacuacagaag

SEQ ID NO: 301249 - RNA, 22 nt, Artificial Sequence
  Synthetic
gauauaucauagacuacagaag

SEQ ID NO: 301250 - RNA, 23 nt, Artificial Sequence
  Synthetic
agauauaucauagacuacagaag

SEQ ID NO: 301251 - RNA, 24 nt, Artificial Sequence
  Synthetic
cagauauaucauagacuacagaag

SEQ ID NO: 301252 - RNA, 18 nt, Artificial Sequence
  Synthetic
accugagggaaccagaag

SEQ ID NO: 301253 - RNA, 19 nt, Artificial Sequence
  Synthetic
aaccugagggaaccagaag

SEQ ID NO: 301254 - RNA, 20 nt, Artificial Sequence
  Synthetic
aaaccugagggaaccagaag

SEQ ID NO: 301255 - RNA, 21 nt, Artificial Sequence
  Synthetic
caaaccugagggaaccagaag

SEQ ID NO: 301256 - RNA, 22 nt, Artificial Sequence
  Synthetic
ucaaaccugagggaaccagaag

SEQ ID NO: 301257 - RNA, 23 nt, Artificial Sequence
  Synthetic
aucaaaccugagggaaccagaag

SEQ ID NO: 301258 - RNA, 24 nt, Artificial Sequence
  Synthetic
gaucaaaccugagggaaccagaag

SEQ ID NO: 301259 - RNA, 18 nt, Artificial Sequence
  Synthetic
aaauaugggcaccagaag

SEQ ID NO: 301260 - RNA, 19 nt, Artificial Sequence
  Synthetic
aaaauaugggcaccagaag

SEQ ID NO: 301261 - RNA, 20 nt, Artificial Sequence
  Synthetic
gaaaauaugggcaccagaag

SEQ ID NO: 301262 - RNA, 21 nt, Artificial Sequence
  Synthetic
agaaaauaugggcaccagaag

SEQ ID NO: 301263 - RNA, 22 nt, Artificial Sequence
  Synthetic
uagaaaauaugggcaccagaag

SEQ ID NO: 301264 - RNA, 23 nt, Artificial Sequence
  Synthetic
guagaaaauaugggcaccagaag

SEQ ID NO: 301265 - RNA, 24 nt, Artificial Sequence
  Synthetic
aguagaaaauaugggcaccagaag

SEQ ID NO: 301266 - RNA, 18 nt, Artificial Sequence
  Synthetic
aauucuucagaccagaag

SEQ ID NO: 301267 - RNA, 19 nt, Artificial Sequence
  Synthetic
gaauucuucagaccagaag

SEQ ID NO: 301268 - RNA, 20 nt, Artificial Sequence
  Synthetic
agaauucuucagaccagaag

SEQ ID NO: 301269 - RNA, 21 nt, Artificial Sequence
  Synthetic
cagaauucuucagaccagaag

SEQ ID NO: 301270 - RNA, 22 nt, Artificial Sequence
  Synthetic
gcagaauucuucagaccagaag

SEQ ID NO: 301271 - RNA, 23 nt, Artificial Sequence
  Synthetic
cgcagaauucuucagaccagaag

SEQ ID NO: 301272 - RNA, 24 nt, Artificial Sequence
  Synthetic
acgcagaauucuucagaccagaag

SEQ ID NO: 301273 - RNA, 18 nt, Artificial Sequence
  Synthetic
uuacaaccaugccagaag

SEQ ID NO: 301274 - RNA, 19 nt, Artificial Sequence
  Synthetic
cuuacaaccaugccagaag

SEQ ID NO: 301275 - RNA, 20 nt, Artificial Sequence
  Synthetic
acuuacaaccaugccagaag

SEQ ID NO: 301276 - RNA, 21 nt, Artificial Sequence
  Synthetic
aacuuacaaccaugccagaag

SEQ ID NO: 301277 - RNA, 22 nt, Artificial Sequence
  Synthetic
aaacuuacaaccaugccagaag

SEQ ID NO: 301278 - RNA, 23 nt, Artificial Sequence
  Synthetic
aaaacuuacaaccaugccagaag

SEQ ID NO: 301279 - RNA, 24 nt, Artificial Sequence
  Synthetic
gaaaacuuacaaccaugccagaag

SEQ ID NO: 301280 - RNA, 18 nt, Artificial Sequence
  Synthetic
ucugacgcaguccagaag

SEQ ID NO: 301281 - RNA, 19 nt, Artificial Sequence
  Synthetic
aucugacgcaguccagaag

SEQ ID NO: 301282 - RNA, 20 nt, Artificial Sequence
  Synthetic
gaucugacgcaguccagaag

SEQ ID NO: 301283 - RNA, 21 nt, Artificial Sequence
  Synthetic
ggaucugacgcaguccagaag

SEQ ID NO: 301284 - RNA, 22 nt, Artificial Sequence
  Synthetic
uggaucugacgcaguccagaag

SEQ ID NO: 301285 - RNA, 23 nt, Artificial Sequence
  Synthetic
guggaucugacgcaguccagaag

SEQ ID NO: 301286 - RNA, 24 nt, Artificial Sequence
  Synthetic
gguggaucugacgcaguccagaag

SEQ ID NO: 301287 - RNA, 18 nt, Artificial Sequence
  Synthetic
uuggaaccuuuccagaag

SEQ ID NO: 301288 - RNA, 19 nt, Artificial Sequence
  Synthetic
guuggaaccuuuccagaag

SEQ ID NO: 301289 - RNA, 20 nt, Artificial Sequence
  Synthetic
uguuggaaccuuuccagaag

SEQ ID NO: 301290 - RNA, 21 nt, Artificial Sequence
  Synthetic
auguuggaaccuuuccagaag

SEQ ID NO: 301291 - RNA, 22 nt, Artificial Sequence
  Synthetic
uauguuggaaccuuuccagaag

SEQ ID NO: 301292 - RNA, 23 nt, Artificial Sequence
  Synthetic
uuauguuggaaccuuuccagaag

SEQ ID NO: 301293 - RNA, 24 nt, Artificial Sequence
  Synthetic
uuuauguuggaaccuuuccagaag

SEQ ID NO: 301294 - RNA, 18 nt, Artificial Sequence
  Synthetic
uuaguugucaagcagaag

SEQ ID NO: 301295 - RNA, 19 nt, Artificial Sequence
  Synthetic
uuuaguugucaagcagaag

SEQ ID NO: 301296 - RNA, 20 nt, Artificial Sequence
  Synthetic
uuuuaguugucaagcagaag

SEQ ID NO: 301297 - RNA, 21 nt, Artificial Sequence
  Synthetic
auuuuaguugucaagcagaag

SEQ ID NO: 301298 - RNA, 22 nt, Artificial Sequence
  Synthetic
cauuuuaguugucaagcagaag

SEQ ID NO: 301299 - RNA, 23 nt, Artificial Sequence
  Synthetic
ucauuuuaguugucaagcagaag

SEQ ID NO: 301300 - RNA, 24 nt, Artificial Sequence
  Synthetic
uucauuuuaguugucaagcagaag

SEQ ID NO: 301301 - RNA, 18 nt, Artificial Sequence
  Synthetic
uauucuuggaagcagaag

SEQ ID NO: 301302 - RNA, 19 nt, Artificial Sequence
  Synthetic
auauucuuggaagcagaag

SEQ ID NO: 301303 - RNA, 20 nt, Artificial Sequence
  Synthetic
uauauucuuggaagcagaag

SEQ ID NO: 301304 - RNA, 21 nt, Artificial Sequence
  Synthetic
uuauauucuuggaagcagaag

SEQ ID NO: 301305 - RNA, 22 nt, Artificial Sequence
  Synthetic
cuuauauucuuggaagcagaag

SEQ ID NO: 301306 - RNA, 23 nt, Artificial Sequence
  Synthetic
gcuuauauucuuggaagcagaag

SEQ ID NO: 301307 - RNA, 24 nt, Artificial Sequence
  Synthetic
agcuuauauucuuggaagcagaag

SEQ ID NO: 301308 - RNA, 18 nt, Artificial Sequence
  Synthetic
auagauuguaagcagaag

SEQ ID NO: 301309 - RNA, 19 nt, Artificial Sequence
  Synthetic
aauagauuguaagcagaag

SEQ ID NO: 301310 - RNA, 20 nt, Artificial Sequence
  Synthetic
gaauagauuguaagcagaag

SEQ ID NO: 301311 - RNA, 21 nt, Artificial Sequence
  Synthetic
agaauagauuguaagcagaag

SEQ ID NO: 301312 - RNA, 22 nt, Artificial Sequence
  Synthetic
gagaauagauuguaagcagaag

SEQ ID NO: 301313 - RNA, 23 nt, Artificial Sequence
  Synthetic
agagaauagauuguaagcagaag

SEQ ID NO: 301314 - RNA, 24 nt, Artificial Sequence
  Synthetic
cagagaauagauuguaagcagaag

SEQ ID NO: 301315 - RNA, 18 nt, Artificial Sequence
  Synthetic
agagguacagagcagaag

SEQ ID NO: 301316 - RNA, 19 nt, Artificial Sequence
  Synthetic
gagagguacagagcagaag

SEQ ID NO: 301317 - RNA, 20 nt, Artificial Sequence
  Synthetic
agagagguacagagcagaag

SEQ ID NO: 301318 - RNA, 21 nt, Artificial Sequence
  Synthetic
aagagagguacagagcagaag

SEQ ID NO: 301319 - RNA, 22 nt, Artificial Sequence
  Synthetic
caagagagguacagagcagaag

SEQ ID NO: 301320 - RNA, 23 nt, Artificial Sequence
  Synthetic
acaagagagguacagagcagaag

SEQ ID NO: 301321 - RNA, 24 nt, Artificial Sequence
  Synthetic
aacaagagagguacagagcagaag

SEQ ID NO: 301322 - RNA, 18 nt, Artificial Sequence
  Synthetic
ggaggcauaaggcagaag

SEQ ID NO: 301323 - RNA, 19 nt, Artificial Sequence
  Synthetic
aggaggcauaaggcagaag

SEQ ID NO: 301324 - RNA, 20 nt, Artificial Sequence
  Synthetic
aaggaggcauaaggcagaag

SEQ ID NO: 301325 - RNA, 21 nt, Artificial Sequence
  Synthetic
caaggaggcauaaggcagaag

SEQ ID NO: 301326 - RNA, 22 nt, Artificial Sequence
  Synthetic
ccaaggaggcauaaggcagaag

SEQ ID NO: 301327 - RNA, 23 nt, Artificial Sequence
  Synthetic
accaaggaggcauaaggcagaag

SEQ ID NO: 301328 - RNA, 24 nt, Artificial Sequence
  Synthetic
gaccaaggaggcauaaggcagaag

SEQ ID NO: 301329 - RNA, 18 nt, Artificial Sequence
  Synthetic
agcaggauugggcagaag

SEQ ID NO: 301330 - RNA, 19 nt, Artificial Sequence
  Synthetic
gagcaggauugggcagaag

SEQ ID NO: 301331 - RNA, 20 nt, Artificial Sequence
  Synthetic
ggagcaggauugggcagaag

SEQ ID NO: 301332 - RNA, 21 nt, Artificial Sequence
  Synthetic
gggagcaggauugggcagaag

SEQ ID NO: 301333 - RNA, 22 nt, Artificial Sequence
  Synthetic
agggagcaggauugggcagaag

SEQ ID NO: 301334 - RNA, 23 nt, Artificial Sequence
  Synthetic
aagggagcaggauugggcagaag

SEQ ID NO: 301335 - RNA, 24 nt, Artificial Sequence
  Synthetic
aaagggagcaggauugggcagaag

SEQ ID NO: 301336 - RNA, 18 nt, Artificial Sequence
  Synthetic
ucacaaucauggcagaag

SEQ ID NO: 301337 - RNA, 19 nt, Artificial Sequence
  Synthetic
cucacaaucauggcagaag

SEQ ID NO: 301338 - RNA, 20 nt, Artificial Sequence
  Synthetic
ccucacaaucauggcagaag

SEQ ID NO: 301339 - RNA, 21 nt, Artificial Sequence
  Synthetic
gccucacaaucauggcagaag

SEQ ID NO: 301340 - RNA, 22 nt, Artificial Sequence
  Synthetic
ggccucacaaucauggcagaag

SEQ ID NO: 301341 - RNA, 23 nt, Artificial Sequence
  Synthetic
aggccucacaaucauggcagaag

SEQ ID NO: 301342 - RNA, 24 nt, Artificial Sequence
  Synthetic
gaggccucacaaucauggcagaag

SEQ ID NO: 301343 - RNA, 18 nt, Artificial Sequence
  Synthetic
uuacaaucauggcagaag

SEQ ID NO: 301344 - RNA, 19 nt, Artificial Sequence
  Synthetic
cuuacaaucauggcagaag

SEQ ID NO: 301345 - RNA, 20 nt, Artificial Sequence
  Synthetic
acuuacaaucauggcagaag

SEQ ID NO: 301346 - RNA, 21 nt, Artificial Sequence
  Synthetic
aacuuacaaucauggcagaag

SEQ ID NO: 301347 - RNA, 22 nt, Artificial Sequence
  Synthetic
aaacuuacaaucauggcagaag

SEQ ID NO: 301348 - RNA, 23 nt, Artificial Sequence
  Synthetic
gaaacuuacaaucauggcagaag

SEQ ID NO: 301349 - RNA, 24 nt, Artificial Sequence
  Synthetic
ggaaacuuacaaucauggcagaag

SEQ ID NO: 301350 - RNA, 18 nt, Artificial Sequence
  Synthetic
gaucgggaauugcagaag

SEQ ID NO: 301351 - RNA, 19 nt, Artificial Sequence
  Synthetic
ugaucgggaauugcagaag

SEQ ID NO: 301352 - RNA, 20 nt, Artificial Sequence
  Synthetic
uugaucgggaauugcagaag

SEQ ID NO: 301353 - RNA, 21 nt, Artificial Sequence
  Synthetic
auugaucgggaauugcagaag

SEQ ID NO: 301354 - RNA, 22 nt, Artificial Sequence
  Synthetic
aauugaucgggaauugcagaag

SEQ ID NO: 301355 - RNA, 23 nt, Artificial Sequence
  Synthetic
aaauugaucgggaauugcagaag

SEQ ID NO: 301356 - RNA, 24 nt, Artificial Sequence
  Synthetic
gaaauugaucgggaauugcagaag

SEQ ID NO: 301357 - RNA, 18 nt, Artificial Sequence
  Synthetic
agguggagacaucagaag

SEQ ID NO: 301358 - RNA, 19 nt, Artificial Sequence
  Synthetic
cagguggagacaucagaag

SEQ ID NO: 301359 - RNA, 20 nt, Artificial Sequence
  Synthetic
gcagguggagacaucagaag

SEQ ID NO: 301360 - RNA, 21 nt, Artificial Sequence
  Synthetic
ugcagguggagacaucagaag

SEQ ID NO: 301361 - RNA, 22 nt, Artificial Sequence
  Synthetic
cugcagguggagacaucagaag

SEQ ID NO: 301362 - RNA, 23 nt, Artificial Sequence
  Synthetic
ccugcagguggagacaucagaag

SEQ ID NO: 301363 - RNA, 24 nt, Artificial Sequence
  Synthetic
accugcagguggagacaucagaag

SEQ ID NO: 301364 - RNA, 18 nt, Artificial Sequence
  Synthetic
aggaggcaguaucagaag

SEQ ID NO: 301365 - RNA, 19 nt, Artificial Sequence
  Synthetic
aaggaggcaguaucagaag

SEQ ID NO: 301366 - RNA, 20 nt, Artificial Sequence
  Synthetic
gaaggaggcaguaucagaag

SEQ ID NO: 301367 - RNA, 21 nt, Artificial Sequence
  Synthetic
agaaggaggcaguaucagaag

SEQ ID NO: 301368 - RNA, 22 nt, Artificial Sequence
  Synthetic
gagaaggaggcaguaucagaag

SEQ ID NO: 301369 - RNA, 23 nt, Artificial Sequence
  Synthetic
ugagaaggaggcaguaucagaag

SEQ ID NO: 301370 - RNA, 24 nt, Artificial Sequence
  Synthetic
augagaaggaggcaguaucagaag

SEQ ID NO: 301371 - RNA, 18 nt, Artificial Sequence
  Synthetic
uaugaaacaacucagaag

SEQ ID NO: 301372 - RNA, 19 nt, Artificial Sequence
  Synthetic
auaugaaacaacucagaag

SEQ ID NO: 301373 - RNA, 20 nt, Artificial Sequence
  Synthetic
uauaugaaacaacucagaag

SEQ ID NO: 301374 - RNA, 21 nt, Artificial Sequence
  Synthetic
auauaugaaacaacucagaag

SEQ ID NO: 301375 - RNA, 22 nt, Artificial Sequence
  Synthetic
uauauaugaaacaacucagaag

SEQ ID NO: 301376 - RNA, 23 nt, Artificial Sequence
  Synthetic
auauauaugaaacaacucagaag

SEQ ID NO: 301377 - RNA, 24 nt, Artificial Sequence
  Synthetic
uauauauaugaaacaacucagaag

SEQ ID NO: 301378 - RNA, 18 nt, Artificial Sequence
  Synthetic
aucucucugagucagaag

SEQ ID NO: 301379 - RNA, 19 nt, Artificial Sequence
  Synthetic
caucucucugagucagaag

SEQ ID NO: 301380 - RNA, 20 nt, Artificial Sequence
  Synthetic
ucaucucucugagucagaag

SEQ ID NO: 301381 - RNA, 21 nt, Artificial Sequence
  Synthetic
uucaucucucugagucagaag

SEQ ID NO: 301382 - RNA, 22 nt, Artificial Sequence
  Synthetic
uuucaucucucugagucagaag

SEQ ID NO: 301383 - RNA, 23 nt, Artificial Sequence
  Synthetic
cuuucaucucucugagucagaag

SEQ ID NO: 301384 - RNA, 24 nt, Artificial Sequence
  Synthetic
ucuuucaucucucugagucagaag

SEQ ID NO: 301385 - RNA, 18 nt, Artificial Sequence
  Synthetic
gaaacagaucuucagaag

SEQ ID NO: 301386 - RNA, 19 nt, Artificial Sequence
  Synthetic
cgaaacagaucuucagaag

SEQ ID NO: 301387 - RNA, 20 nt, Artificial Sequence
  Synthetic
ccgaaacagaucuucagaag

SEQ ID NO: 301388 - RNA, 21 nt, Artificial Sequence
  Synthetic
gccgaaacagaucuucagaag

SEQ ID NO: 301389 - RNA, 22 nt, Artificial Sequence
  Synthetic
agccgaaacagaucuucagaag

SEQ ID NO: 301390 - RNA, 23 nt, Artificial Sequence
  Synthetic
gagccgaaacagaucuucagaag

SEQ ID NO: 301391 - RNA, 24 nt, Artificial Sequence
  Synthetic
ugagccgaaacagaucuucagaag

SEQ ID NO: 301392 - RNA, 18 nt, Artificial Sequence
  Synthetic
uuuccagcaguucagaag

SEQ ID NO: 301393 - RNA, 19 nt, Artificial Sequence
  Synthetic
cuuuccagcaguucagaag

SEQ ID NO: 301394 - RNA, 20 nt, Artificial Sequence
  Synthetic
acuuuccagcaguucagaag

SEQ ID NO: 301395 - RNA, 21 nt, Artificial Sequence
  Synthetic
gacuuuccagcaguucagaag

SEQ ID NO: 301396 - RNA, 22 nt, Artificial Sequence
  Synthetic
cgacuuuccagcaguucagaag

SEQ ID NO: 301397 - RNA, 23 nt, Artificial Sequence
  Synthetic
gcgacuuuccagcaguucagaag

SEQ ID NO: 301398 - RNA, 24 nt, Artificial Sequence
  Synthetic
ggcgacuuuccagcaguucagaag

SEQ ID NO: 301399 - RNA, 18 nt, Artificial Sequence
  Synthetic
cuauauuuauuucagaag

SEQ ID NO: 301400 - RNA, 19 nt, Artificial Sequence
  Synthetic
gcuauauuuauuucagaag

SEQ ID NO: 301401 - RNA, 20 nt, Artificial Sequence
  Synthetic
cgcuauauuuauuucagaag

SEQ ID NO: 301402 - RNA, 21 nt, Artificial Sequence
  Synthetic
ucgcuauauuuauuucagaag

SEQ ID NO: 301403 - RNA, 22 nt, Artificial Sequence
  Synthetic
aucgcuauauuuauuucagaag

SEQ ID NO: 301404 - RNA, 23 nt, Artificial Sequence
  Synthetic
aaucgcuauauuuauuucagaag

SEQ ID NO: 301405 - RNA, 24 nt, Artificial Sequence
  Synthetic
caaucgcuauauuuauuucagaag

SEQ ID NO: 301406 - RNA, 18 nt, Artificial Sequence
  Synthetic
gggagugaaaaagagaag

SEQ ID NO: 301407 - RNA, 19 nt, Artificial Sequence
  Synthetic
ggggagugaaaaagagaag

SEQ ID NO: 301408 - RNA, 20 nt, Artificial Sequence
  Synthetic
aggggagugaaaaagagaag

SEQ ID NO: 301409 - RNA, 21 nt, Artificial Sequence
  Synthetic
aaggggagugaaaaagagaag

SEQ ID NO: 301410 - RNA, 22 nt, Artificial Sequence
  Synthetic
aaaggggagugaaaaagagaag

SEQ ID NO: 301411 - RNA, 23 nt, Artificial Sequence
  Synthetic
caaaggggagugaaaaagagaag

SEQ ID NO: 301412 - RNA, 24 nt, Artificial Sequence
  Synthetic
ccaaaggggagugaaaaagagaag

SEQ ID NO: 301413 - RNA, 18 nt, Artificial Sequence
  Synthetic
auuggacagaaagagaag

SEQ ID NO: 301414 - RNA, 19 nt, Artificial Sequence
  Synthetic
gauuggacagaaagagaag

SEQ ID NO: 301415 - RNA, 20 nt, Artificial Sequence
  Synthetic
ggauuggacagaaagagaag

SEQ ID NO: 301416 - RNA, 21 nt, Artificial Sequence
  Synthetic
aggauuggacagaaagagaag

SEQ ID NO: 301417 - RNA, 22 nt, Artificial Sequence
  Synthetic
caggauuggacagaaagagaag

SEQ ID NO: 301418 - RNA, 23 nt, Artificial Sequence
  Synthetic
gcaggauuggacagaaagagaag

SEQ ID NO: 301419 - RNA, 24 nt, Artificial Sequence
  Synthetic
agcaggauuggacagaaagagaag

SEQ ID NO: 301420 - RNA, 18 nt, Artificial Sequence
  Synthetic
ugcaguacucaagagaag

SEQ ID NO: 301421 - RNA, 19 nt, Artificial Sequence
  Synthetic
uugcaguacucaagagaag

SEQ ID NO: 301422 - RNA, 20 nt, Artificial Sequence
  Synthetic
uuugcaguacucaagagaag

SEQ ID NO: 301423 - RNA, 21 nt, Artificial Sequence
  Synthetic
auuugcaguacucaagagaag

SEQ ID NO: 301424 - RNA, 22 nt, Artificial Sequence
  Synthetic
aauuugcaguacucaagagaag

SEQ ID NO: 301425 - RNA, 23 nt, Artificial Sequence
  Synthetic
gaauuugcaguacucaagagaag

SEQ ID NO: 301426 - RNA, 24 nt, Artificial Sequence
  Synthetic
agaauuugcaguacucaagagaag

SEQ ID NO: 301427 - RNA, 18 nt, Artificial Sequence
  Synthetic
uaaaaagcagaagagaag

SEQ ID NO: 301428 - RNA, 19 nt, Artificial Sequence
  Synthetic
uuaaaaagcagaagagaag

SEQ ID NO: 301429 - RNA, 20 nt, Artificial Sequence
  Synthetic
cuuaaaaagcagaagagaag

SEQ ID NO: 301430 - RNA, 21 nt, Artificial Sequence
  Synthetic
acuuaaaaagcagaagagaag

SEQ ID NO: 301431 - RNA, 22 nt, Artificial Sequence
  Synthetic
gacuuaaaaagcagaagagaag

SEQ ID NO: 301432 - RNA, 23 nt, Artificial Sequence
  Synthetic
ugacuuaaaaagcagaagagaag

SEQ ID NO: 301433 - RNA, 24 nt, Artificial Sequence
  Synthetic
uugacuuaaaaagcagaagagaag

SEQ ID NO: 301434 - RNA, 18 nt, Artificial Sequence
  Synthetic
gaaacaauggaagagaag

SEQ ID NO: 301435 - RNA, 19 nt, Artificial Sequence
  Synthetic
agaaacaauggaagagaag

SEQ ID NO: 301436 - RNA, 20 nt, Artificial Sequence
  Synthetic
gagaaacaauggaagagaag

SEQ ID NO: 301437 - RNA, 21 nt, Artificial Sequence
  Synthetic
ugagaaacaauggaagagaag

SEQ ID NO: 301438 - RNA, 22 nt, Artificial Sequence
  Synthetic
cugagaaacaauggaagagaag

SEQ ID NO: 301439 - RNA, 23 nt, Artificial Sequence
  Synthetic
gcugagaaacaauggaagagaag

SEQ ID NO: 301440 - RNA, 24 nt, Artificial Sequence
  Synthetic
ugcugagaaacaauggaagagaag

SEQ ID NO: 301441 - RNA, 18 nt, Artificial Sequence
  Synthetic
cugagaccugaagagaag

SEQ ID NO: 301442 - RNA, 19 nt, Artificial Sequence
  Synthetic
gcugagaccugaagagaag

SEQ ID NO: 301443 - RNA, 20 nt, Artificial Sequence
  Synthetic
agcugagaccugaagagaag

SEQ ID NO: 301444 - RNA, 21 nt, Artificial Sequence
  Synthetic
cagcugagaccugaagagaag

SEQ ID NO: 301445 - RNA, 22 nt, Artificial Sequence
  Synthetic
ucagcugagaccugaagagaag

SEQ ID NO: 301446 - RNA, 23 nt, Artificial Sequence
  Synthetic
cucagcugagaccugaagagaag

SEQ ID NO: 301447 - RNA, 24 nt, Artificial Sequence
  Synthetic
ccucagcugagaccugaagagaag

SEQ ID NO: 301448 - RNA, 18 nt, Artificial Sequence
  Synthetic
auuccaguguaagagaag

SEQ ID NO: 301449 - RNA, 19 nt, Artificial Sequence
  Synthetic
gauuccaguguaagagaag

SEQ ID NO: 301450 - RNA, 20 nt, Artificial Sequence
  Synthetic
ggauuccaguguaagagaag

SEQ ID NO: 301451 - RNA, 21 nt, Artificial Sequence
  Synthetic
aggauuccaguguaagagaag

SEQ ID NO: 301452 - RNA, 22 nt, Artificial Sequence
  Synthetic
aaggauuccaguguaagagaag

SEQ ID NO: 301453 - RNA, 23 nt, Artificial Sequence
  Synthetic
caaggauuccaguguaagagaag

SEQ ID NO: 301454 - RNA, 24 nt, Artificial Sequence
  Synthetic
gcaaggauuccaguguaagagaag

SEQ ID NO: 301455 - RNA, 18 nt, Artificial Sequence
  Synthetic
gaauagacaagagagaag

SEQ ID NO: 301456 - RNA, 19 nt, Artificial Sequence
  Synthetic
ggaauagacaagagagaag

SEQ ID NO: 301457 - RNA, 20 nt, Artificial Sequence
  Synthetic
gggaauagacaagagagaag

SEQ ID NO: 301458 - RNA, 21 nt, Artificial Sequence
  Synthetic
ugggaauagacaagagagaag

SEQ ID NO: 301459 - RNA, 22 nt, Artificial Sequence
  Synthetic
gugggaauagacaagagagaag

SEQ ID NO: 301460 - RNA, 23 nt, Artificial Sequence
  Synthetic
ugugggaauagacaagagagaag

SEQ ID NO: 301461 - RNA, 24 nt, Artificial Sequence
  Synthetic
gugugggaauagacaagagagaag

SEQ ID NO: 301462 - RNA, 18 nt, Artificial Sequence
  Synthetic
uuccagagcagagagaag

SEQ ID NO: 301463 - RNA, 19 nt, Artificial Sequence
  Synthetic
cuuccagagcagagagaag

SEQ ID NO: 301464 - RNA, 20 nt, Artificial Sequence
  Synthetic
ccuuccagagcagagagaag

SEQ ID NO: 301465 - RNA, 21 nt, Artificial Sequence
  Synthetic
accuuccagagcagagagaag

SEQ ID NO: 301466 - RNA, 22 nt, Artificial Sequence
  Synthetic
uaccuuccagagcagagagaag

SEQ ID NO: 301467 - RNA, 23 nt, Artificial Sequence
  Synthetic
auaccuuccagagcagagagaag

SEQ ID NO: 301468 - RNA, 24 nt, Artificial Sequence
  Synthetic
aauaccuuccagagcagagagaag

SEQ ID NO: 301469 - RNA, 18 nt, Artificial Sequence
  Synthetic
aagaagaagaaggagaag

SEQ ID NO: 301470 - RNA, 19 nt, Artificial Sequence
  Synthetic
gaagaagaagaaggagaag

SEQ ID NO: 301471 - RNA, 20 nt, Artificial Sequence
  Synthetic
agaagaagaagaaggagaag

SEQ ID NO: 301472 - RNA, 21 nt, Artificial Sequence
  Synthetic
aagaagaagaagaaggagaag

SEQ ID NO: 301473 - RNA, 22 nt, Artificial Sequence
  Synthetic
gaagaagaagaagaaggagaag

SEQ ID NO: 301474 - RNA, 23 nt, Artificial Sequence
  Synthetic
agaagaagaagaagaaggagaag

SEQ ID NO: 301475 - RNA, 24 nt, Artificial Sequence
  Synthetic
aagaagaagaagaagaaggagaag

SEQ ID NO: 301476 - RNA, 18 nt, Artificial Sequence
  Synthetic
auugggcagaaggagaag

SEQ ID NO: 301477 - RNA, 19 nt, Artificial Sequence
  Synthetic
gauugggcagaaggagaag

SEQ ID NO: 301478 - RNA, 20 nt, Artificial Sequence
  Synthetic
ggauugggcagaaggagaag

SEQ ID NO: 301479 - RNA, 21 nt, Artificial Sequence
  Synthetic
aggauugggcagaaggagaag

SEQ ID NO: 301480 - RNA, 22 nt, Artificial Sequence
  Synthetic
caggauugggcagaaggagaag

SEQ ID NO: 301481 - RNA, 23 nt, Artificial Sequence
  Synthetic
gcaggauugggcagaaggagaag

SEQ ID NO: 301482 - RNA, 24 nt, Artificial Sequence
  Synthetic
agcaggauugggcagaaggagaag

SEQ ID NO: 301483 - RNA, 18 nt, Artificial Sequence
  Synthetic
auuggagagcaggagaag

SEQ ID NO: 301484 - RNA, 19 nt, Artificial Sequence
  Synthetic
gauuggagagcaggagaag

SEQ ID NO: 301485 - RNA, 20 nt, Artificial Sequence
  Synthetic
agauuggagagcaggagaag

SEQ ID NO: 301486 - RNA, 21 nt, Artificial Sequence
  Synthetic
gagauuggagagcaggagaag

SEQ ID NO: 301487 - RNA, 22 nt, Artificial Sequence
  Synthetic
ggagauuggagagcaggagaag

SEQ ID NO: 301488 - RNA, 23 nt, Artificial Sequence
  Synthetic
aggagauuggagagcaggagaag

SEQ ID NO: 301489 - RNA, 24 nt, Artificial Sequence
  Synthetic
caggagauuggagagcaggagaag

SEQ ID NO: 301490 - RNA, 18 nt, Artificial Sequence
  Synthetic
aaguuuagcagggagaag

SEQ ID NO: 301491 - RNA, 19 nt, Artificial Sequence
  Synthetic
gaaguuuagcagggagaag

SEQ ID NO: 301492 - RNA, 20 nt, Artificial Sequence
  Synthetic
ggaaguuuagcagggagaag

SEQ ID NO: 301493 - RNA, 21 nt, Artificial Sequence
  Synthetic
gggaaguuuagcagggagaag

SEQ ID NO: 301494 - RNA, 22 nt, Artificial Sequence
  Synthetic
agggaaguuuagcagggagaag

SEQ ID NO: 301495 - RNA, 23 nt, Artificial Sequence
  Synthetic
uagggaaguuuagcagggagaag

SEQ ID NO: 301496 - RNA, 24 nt, Artificial Sequence
  Synthetic
cuagggaaguuuagcagggagaag

SEQ ID NO: 301497 - RNA, 18 nt, Artificial Sequence
  Synthetic
uaggggcagagggagaag

SEQ ID NO: 301498 - RNA, 19 nt, Artificial Sequence
  Synthetic
guaggggcagagggagaag

SEQ ID NO: 301499 - RNA, 20 nt, Artificial Sequence
  Synthetic
uguaggggcagagggagaag

SEQ ID NO: 301500 - RNA, 21 nt, Artificial Sequence
  Synthetic
guguaggggcagagggagaag

SEQ ID NO: 301501 - RNA, 22 nt, Artificial Sequence
  Synthetic
cguguaggggcagagggagaag

SEQ ID NO: 301502 - RNA, 23 nt, Artificial Sequence
  Synthetic
acguguaggggcagagggagaag

SEQ ID NO: 301503 - RNA, 24 nt, Artificial Sequence
  Synthetic
aacguguaggggcagagggagaag

SEQ ID NO: 301504 - RNA, 18 nt, Artificial Sequence
  Synthetic
ccugcuucaggggagaag

SEQ ID NO: 301505 - RNA, 19 nt, Artificial Sequence
  Synthetic
accugcuucaggggagaag

SEQ ID NO: 301506 - RNA, 20 nt, Artificial Sequence
  Synthetic
gaccugcuucaggggagaag

SEQ ID NO: 301507 - RNA, 21 nt, Artificial Sequence
  Synthetic
ugaccugcuucaggggagaag

SEQ ID NO: 301508 - RNA, 22 nt, Artificial Sequence
  Synthetic
augaccugcuucaggggagaag

SEQ ID NO: 301509 - RNA, 23 nt, Artificial Sequence
  Synthetic
caugaccugcuucaggggagaag

SEQ ID NO: 301510 - RNA, 24 nt, Artificial Sequence
  Synthetic
ucaugaccugcuucaggggagaag

SEQ ID NO: 301511 - RNA, 18 nt, Artificial Sequence
  Synthetic
gaaggcaguggggagaag

SEQ ID NO: 301512 - RNA, 19 nt, Artificial Sequence
  Synthetic
agaaggcaguggggagaag

SEQ ID NO: 301513 - RNA, 20 nt, Artificial Sequence
  Synthetic
gagaaggcaguggggagaag

SEQ ID NO: 301514 - RNA, 21 nt, Artificial Sequence
  Synthetic
cgagaaggcaguggggagaag

SEQ ID NO: 301515 - RNA, 22 nt, Artificial Sequence
  Synthetic
ccgagaaggcaguggggagaag

SEQ ID NO: 301516 - RNA, 23 nt, Artificial Sequence
  Synthetic
gccgagaaggcaguggggagaag

SEQ ID NO: 301517 - RNA, 24 nt, Artificial Sequence
  Synthetic
agccgagaaggcaguggggagaag

SEQ ID NO: 301518 - RNA, 18 nt, Artificial Sequence
  Synthetic
uugacacauugggagaag

SEQ ID NO: 301519 - RNA, 19 nt, Artificial Sequence
  Synthetic
uuugacacauugggagaag

SEQ ID NO: 301520 - RNA, 20 nt, Artificial Sequence
  Synthetic
auuugacacauugggagaag

SEQ ID NO: 301521 - RNA, 21 nt, Artificial Sequence
  Synthetic
aauuugacacauugggagaag

SEQ ID NO: 301522 - RNA, 22 nt, Artificial Sequence
  Synthetic
caauuugacacauugggagaag

SEQ ID NO: 301523 - RNA, 23 nt, Artificial Sequence
  Synthetic
ucaauuugacacauugggagaag

SEQ ID NO: 301524 - RNA, 24 nt, Artificial Sequence
  Synthetic
cucaauuugacacauugggagaag

SEQ ID NO: 301525 - RNA, 18 nt, Artificial Sequence
  Synthetic
ucuggaagcaaugagaag

SEQ ID NO: 301526 - RNA, 19 nt, Artificial Sequence
  Synthetic
uucuggaagcaaugagaag

SEQ ID NO: 301527 - RNA, 20 nt, Artificial Sequence
  Synthetic
auucuggaagcaaugagaag

SEQ ID NO: 301528 - RNA, 21 nt, Artificial Sequence
  Synthetic
cauucuggaagcaaugagaag

SEQ ID NO: 301529 - RNA, 22 nt, Artificial Sequence
  Synthetic
ucauucuggaagcaaugagaag

SEQ ID NO: 301530 - RNA, 23 nt, Artificial Sequence
  Synthetic
aucauucuggaagcaaugagaag

SEQ ID NO: 301531 - RNA, 24 nt, Artificial Sequence
  Synthetic
caucauucuggaagcaaugagaag

SEQ ID NO: 301532 - RNA, 18 nt, Artificial Sequence
  Synthetic
cuugaguuagaugagaag

SEQ ID NO: 301533 - RNA, 19 nt, Artificial Sequence
  Synthetic
ccuugaguuagaugagaag

SEQ ID NO: 301534 - RNA, 20 nt, Artificial Sequence
  Synthetic
uccuugaguuagaugagaag

SEQ ID NO: 301535 - RNA, 21 nt, Artificial Sequence
  Synthetic
auccuugaguuagaugagaag

SEQ ID NO: 301536 - RNA, 22 nt, Artificial Sequence
  Synthetic
gauccuugaguuagaugagaag

SEQ ID NO: 301537 - RNA, 23 nt, Artificial Sequence
  Synthetic
ggauccuugaguuagaugagaag

SEQ ID NO: 301538 - RNA, 24 nt, Artificial Sequence
  Synthetic
uggauccuugaguuagaugagaag

SEQ ID NO: 301539 - RNA, 18 nt, Artificial Sequence
  Synthetic
ccucagccuucugagaag

SEQ ID NO: 301540 - RNA, 19 nt, Artificial Sequence
  Synthetic
accucagccuucugagaag

SEQ ID NO: 301541 - RNA, 20 nt, Artificial Sequence
  Synthetic
caccucagccuucugagaag

SEQ ID NO: 301542 - RNA, 21 nt, Artificial Sequence
  Synthetic
ccaccucagccuucugagaag

SEQ ID NO: 301543 - RNA, 22 nt, Artificial Sequence
  Synthetic
cccaccucagccuucugagaag

SEQ ID NO: 301544 - RNA, 23 nt, Artificial Sequence
  Synthetic
ucccaccucagccuucugagaag

SEQ ID NO: 301545 - RNA, 24 nt, Artificial Sequence
  Synthetic
cucccaccucagccuucugagaag

SEQ ID NO: 301546 - RNA, 18 nt, Artificial Sequence
  Synthetic
agaguggguauugagaag

SEQ ID NO: 301547 - RNA, 19 nt, Artificial Sequence
  Synthetic
uagaguggguauugagaag

SEQ ID NO: 301548 - RNA, 20 nt, Artificial Sequence
  Synthetic
cuagaguggguauugagaag

SEQ ID NO: 301549 - RNA, 21 nt, Artificial Sequence
  Synthetic
gcuagaguggguauugagaag

SEQ ID NO: 301550 - RNA, 22 nt, Artificial Sequence
  Synthetic
agcuagaguggguauugagaag

SEQ ID NO: 301551 - RNA, 23 nt, Artificial Sequence
  Synthetic
aagcuagaguggguauugagaag

SEQ ID NO: 301552 - RNA, 24 nt, Artificial Sequence
  Synthetic
aaagcuagaguggguauugagaag

SEQ ID NO: 301553 - RNA, 18 nt, Artificial Sequence
  Synthetic
ugguggugaguugagaag

SEQ ID NO: 301554 - RNA, 19 nt, Artificial Sequence
  Synthetic
augguggugaguugagaag

SEQ ID NO: 301555 - RNA, 20 nt, Artificial Sequence
  Synthetic
uaugguggugaguugagaag

SEQ ID NO: 301556 - RNA, 21 nt, Artificial Sequence
  Synthetic
uuaugguggugaguugagaag

SEQ ID NO: 301557 - RNA, 22 nt, Artificial Sequence
  Synthetic
cuuaugguggugaguugagaag

SEQ ID NO: 301558 - RNA, 23 nt, Artificial Sequence
  Synthetic
ucuuaugguggugaguugagaag

SEQ ID NO: 301559 - RNA, 24 nt, Artificial Sequence
  Synthetic
gucuuaugguggugaguugagaag

SEQ ID NO: 301560 - RNA, 18 nt, Artificial Sequence
  Synthetic
auaacaaguguugagaag

SEQ ID NO: 301561 - RNA, 19 nt, Artificial Sequence
  Synthetic
aauaacaaguguugagaag

SEQ ID NO: 301562 - RNA, 20 nt, Artificial Sequence
  Synthetic
caauaacaaguguugagaag

SEQ ID NO: 301563 - RNA, 21 nt, Artificial Sequence
  Synthetic
acaauaacaaguguugagaag

SEQ ID NO: 301564 - RNA, 22 nt, Artificial Sequence
  Synthetic
gacaauaacaaguguugagaag

SEQ ID NO: 301565 - RNA, 23 nt, Artificial Sequence
  Synthetic
agacaauaacaaguguugagaag

SEQ ID NO: 301566 - RNA, 24 nt, Artificial Sequence
  Synthetic
cagacaauaacaaguguugagaag

SEQ ID NO: 301567 - RNA, 18 nt, Artificial Sequence
  Synthetic
aagucaauaaaauagaag

SEQ ID NO: 301568 - RNA, 19 nt, Artificial Sequence
  Synthetic
gaagucaauaaaauagaag

SEQ ID NO: 301569 - RNA, 20 nt, Artificial Sequence
  Synthetic
agaagucaauaaaauagaag

SEQ ID NO: 301570 - RNA, 21 nt, Artificial Sequence
  Synthetic
cagaagucaauaaaauagaag

SEQ ID NO: 301571 - RNA, 22 nt, Artificial Sequence
  Synthetic
gcagaagucaauaaaauagaag

SEQ ID NO: 301572 - RNA, 23 nt, Artificial Sequence
  Synthetic
agcagaagucaauaaaauagaag

SEQ ID NO: 301573 - RNA, 24 nt, Artificial Sequence
  Synthetic
gagcagaagucaauaaaauagaag

SEQ ID NO: 301574 - RNA, 18 nt, Artificial Sequence
  Synthetic
aagaugaagaaauagaag

SEQ ID NO: 301575 - RNA, 19 nt, Artificial Sequence
  Synthetic
aaagaugaagaaauagaag

SEQ ID NO: 301576 - RNA, 20 nt, Artificial Sequence
  Synthetic
gaaagaugaagaaauagaag

SEQ ID NO: 301577 - RNA, 21 nt, Artificial Sequence
  Synthetic
agaaagaugaagaaauagaag

SEQ ID NO: 301578 - RNA, 22 nt, Artificial Sequence
  Synthetic
aagaaagaugaagaaauagaag

SEQ ID NO: 301579 - RNA, 23 nt, Artificial Sequence
  Synthetic
aaagaaagaugaagaaauagaag

SEQ ID NO: 301580 - RNA, 24 nt, Artificial Sequence
  Synthetic
caaagaaagaugaagaaauagaag

SEQ ID NO: 301581 - RNA, 18 nt, Artificial Sequence
  Synthetic
uucuauugacaauagaag

SEQ ID NO: 301582 - RNA, 19 nt, Artificial Sequence
  Synthetic
guucuauugacaauagaag

SEQ ID NO: 301583 - RNA, 20 nt, Artificial Sequence
  Synthetic
gguucuauugacaauagaag

SEQ ID NO: 301584 - RNA, 21 nt, Artificial Sequence
  Synthetic
ggguucuauugacaauagaag

SEQ ID NO: 301585 - RNA, 22 nt, Artificial Sequence
  Synthetic
uggguucuauugacaauagaag

SEQ ID NO: 301586 - RNA, 23 nt, Artificial Sequence
  Synthetic
cuggguucuauugacaauagaag

SEQ ID NO: 301587 - RNA, 24 nt, Artificial Sequence
  Synthetic
acuggguucuauugacaauagaag

SEQ ID NO: 301588 - RNA, 18 nt, Artificial Sequence
  Synthetic
ugauuaucucaauagaag

SEQ ID NO: 301589 - RNA, 19 nt, Artificial Sequence
  Synthetic
augauuaucucaauagaag

SEQ ID NO: 301590 - RNA, 20 nt, Artificial Sequence
  Synthetic
caugauuaucucaauagaag

SEQ ID NO: 301591 - RNA, 21 nt, Artificial Sequence
  Synthetic
acaugauuaucucaauagaag

SEQ ID NO: 301592 - RNA, 22 nt, Artificial Sequence
  Synthetic
cacaugauuaucucaauagaag

SEQ ID NO: 301593 - RNA, 23 nt, Artificial Sequence
  Synthetic
ccacaugauuaucucaauagaag

SEQ ID NO: 301594 - RNA, 24 nt, Artificial Sequence
  Synthetic
accacaugauuaucucaauagaag

SEQ ID NO: 301595 - RNA, 18 nt, Artificial Sequence
  Synthetic
acuagggacuaauagaag

SEQ ID NO: 301596 - RNA, 19 nt, Artificial Sequence
  Synthetic
aacuagggacuaauagaag

SEQ ID NO: 301597 - RNA, 20 nt, Artificial Sequence
  Synthetic
aaacuagggacuaauagaag

SEQ ID NO: 301598 - RNA, 21 nt, Artificial Sequence
  Synthetic
gaaacuagggacuaauagaag

SEQ ID NO: 301599 - RNA, 22 nt, Artificial Sequence
  Synthetic
agaaacuagggacuaauagaag

SEQ ID NO: 301600 - RNA, 23 nt, Artificial Sequence
  Synthetic
uagaaacuagggacuaauagaag

SEQ ID NO: 301601 - RNA, 24 nt, Artificial Sequence
  Synthetic
guagaaacuagggacuaauagaag

SEQ ID NO: 301602 - RNA, 18 nt, Artificial Sequence
  Synthetic
guuaccucuuaauagaag

SEQ ID NO: 301603 - RNA, 19 nt, Artificial Sequence
  Synthetic
uguuaccucuuaauagaag

SEQ ID NO: 301604 - RNA, 20 nt, Artificial Sequence
  Synthetic
uuguuaccucuuaauagaag

SEQ ID NO: 301605 - RNA, 21 nt, Artificial Sequence
  Synthetic
cuuguuaccucuuaauagaag

SEQ ID NO: 301606 - RNA, 22 nt, Artificial Sequence
  Synthetic
ucuuguuaccucuuaauagaag

SEQ ID NO: 301607 - RNA, 23 nt, Artificial Sequence
  Synthetic
gucuuguuaccucuuaauagaag

SEQ ID NO: 301608 - RNA, 24 nt, Artificial Sequence
  Synthetic
ggucuuguuaccucuuaauagaag

SEQ ID NO: 301609 - RNA, 18 nt, Artificial Sequence
  Synthetic
uauacagggccauagaag

SEQ ID NO: 301610 - RNA, 19 nt, Artificial Sequence
  Synthetic
guauacagggccauagaag

SEQ ID NO: 301611 - RNA, 20 nt, Artificial Sequence
  Synthetic
gguauacagggccauagaag

SEQ ID NO: 301612 - RNA, 21 nt, Artificial Sequence
  Synthetic
ugguauacagggccauagaag

SEQ ID NO: 301613 - RNA, 22 nt, Artificial Sequence
  Synthetic
cugguauacagggccauagaag

SEQ ID NO: 301614 - RNA, 23 nt, Artificial Sequence
  Synthetic
acugguauacagggccauagaag

SEQ ID NO: 301615 - RNA, 24 nt, Artificial Sequence
  Synthetic
aacugguauacagggccauagaag

SEQ ID NO: 301616 - RNA, 18 nt, Artificial Sequence
  Synthetic
uagucaaacucauagaag

SEQ ID NO: 301617 - RNA, 19 nt, Artificial Sequence
  Synthetic
uuagucaaacucauagaag

SEQ ID NO: 301618 - RNA, 20 nt, Artificial Sequence
  Synthetic
uuuagucaaacucauagaag

SEQ ID NO: 301619 - RNA, 21 nt, Artificial Sequence
  Synthetic
auuuagucaaacucauagaag

SEQ ID NO: 301620 - RNA, 22 nt, Artificial Sequence
  Synthetic
uauuuagucaaacucauagaag

SEQ ID NO: 301621 - RNA, 23 nt, Artificial Sequence
  Synthetic
uuauuuagucaaacucauagaag

SEQ ID NO: 301622 - RNA, 24 nt, Artificial Sequence
  Synthetic
auuauuuagucaaacucauagaag

SEQ ID NO: 301623 - RNA, 18 nt, Artificial Sequence
  Synthetic
aaucacuucucauagaag

SEQ ID NO: 301624 - RNA, 19 nt, Artificial Sequence
  Synthetic
gaaucacuucucauagaag

SEQ ID NO: 301625 - RNA, 20 nt, Artificial Sequence
  Synthetic
ggaaucacuucucauagaag

SEQ ID NO: 301626 - RNA, 21 nt, Artificial Sequence
  Synthetic
uggaaucacuucucauagaag

SEQ ID NO: 301627 - RNA, 22 nt, Artificial Sequence
  Synthetic
auggaaucacuucucauagaag

SEQ ID NO: 301628 - RNA, 23 nt, Artificial Sequence
  Synthetic
gauggaaucacuucucauagaag

SEQ ID NO: 301629 - RNA, 24 nt, Artificial Sequence
  Synthetic
agauggaaucacuucucauagaag

SEQ ID NO: 301630 - RNA, 18 nt, Artificial Sequence
  Synthetic
uccaucauccgauagaag

SEQ ID NO: 301631 - RNA, 19 nt, Artificial Sequence
  Synthetic
auccaucauccgauagaag

SEQ ID NO: 301632 - RNA, 20 nt, Artificial Sequence
  Synthetic
aauccaucauccgauagaag

SEQ ID NO: 301633 - RNA, 21 nt, Artificial Sequence
  Synthetic
aaauccaucauccgauagaag

SEQ ID NO: 301634 - RNA, 22 nt, Artificial Sequence
  Synthetic
aaaauccaucauccgauagaag

SEQ ID NO: 301635 - RNA, 23 nt, Artificial Sequence
  Synthetic
aaaaauccaucauccgauagaag

SEQ ID NO: 301636 - RNA, 24 nt, Artificial Sequence
  Synthetic
caaaaauccaucauccgauagaag

SEQ ID NO: 301637 - RNA, 18 nt, Artificial Sequence
  Synthetic
aguuuuuguugauagaag

SEQ ID NO: 301638 - RNA, 19 nt, Artificial Sequence
  Synthetic
caguuuuuguugauagaag

SEQ ID NO: 301639 - RNA, 20 nt, Artificial Sequence
  Synthetic
ccaguuuuuguugauagaag

SEQ ID NO: 301640 - RNA, 21 nt, Artificial Sequence
  Synthetic
cccaguuuuuguugauagaag

SEQ ID NO: 301641 - RNA, 22 nt, Artificial Sequence
  Synthetic
acccaguuuuuguugauagaag

SEQ ID NO: 301642 - RNA, 23 nt, Artificial Sequence
  Synthetic
aacccaguuuuuguugauagaag

SEQ ID NO: 301643 - RNA, 24 nt, Artificial Sequence
  Synthetic
gaacccaguuuuuguugauagaag

SEQ ID NO: 301644 - RNA, 18 nt, Artificial Sequence
  Synthetic
aaaaaauaucuauagaag

SEQ ID NO: 301645 - RNA, 19 nt, Artificial Sequence
  Synthetic
aaaaaaauaucuauagaag

SEQ ID NO: 301646 - RNA, 20 nt, Artificial Sequence
  Synthetic
aaaaaaaauaucuauagaag

SEQ ID NO: 301647 - RNA, 21 nt, Artificial Sequence
  Synthetic
aaaaaaaaauaucuauagaag

SEQ ID NO: 301648 - RNA, 22 nt, Artificial Sequence
  Synthetic
aaaaaaaaaauaucuauagaag

SEQ ID NO: 301649 - RNA, 23 nt, Artificial Sequence
  Synthetic
aaaaaaaaaaauaucuauagaag

SEQ ID NO: 301650 - RNA, 24 nt, Artificial Sequence
  Synthetic
aaaaaaaaaaaauaucuauagaag

SEQ ID NO: 301651 - RNA, 18 nt, Artificial Sequence
  Synthetic
gcauccacaguauagaag

SEQ ID NO: 301652 - RNA, 19 nt, Artificial Sequence
  Synthetic
ggcauccacaguauagaag

SEQ ID NO: 301653 - RNA, 20 nt, Artificial Sequence
  Synthetic
aggcauccacaguauagaag

SEQ ID NO: 301654 - RNA, 21 nt, Artificial Sequence
  Synthetic
gaggcauccacaguauagaag

SEQ ID NO: 301655 - RNA, 22 nt, Artificial Sequence
  Synthetic
cgaggcauccacaguauagaag

SEQ ID NO: 301656 - RNA, 23 nt, Artificial Sequence
  Synthetic
ccgaggcauccacaguauagaag

SEQ ID NO: 301657 - RNA, 24 nt, Artificial Sequence
  Synthetic
uccgaggcauccacaguauagaag

SEQ ID NO: 301658 - RNA, 18 nt, Artificial Sequence
  Synthetic
auuggggacuacuagaag

SEQ ID NO: 301659 - RNA, 19 nt, Artificial Sequence
  Synthetic
cauuggggacuacuagaag

SEQ ID NO: 301660 - RNA, 20 nt, Artificial Sequence
  Synthetic
acauuggggacuacuagaag

SEQ ID NO: 301661 - RNA, 21 nt, Artificial Sequence
  Synthetic
gacauuggggacuacuagaag

SEQ ID NO: 301662 - RNA, 22 nt, Artificial Sequence
  Synthetic
agacauuggggacuacuagaag

SEQ ID NO: 301663 - RNA, 23 nt, Artificial Sequence
  Synthetic
uagacauuggggacuacuagaag

SEQ ID NO: 301664 - RNA, 24 nt, Artificial Sequence
  Synthetic
auagacauuggggacuacuagaag

SEQ ID NO: 301665 - RNA, 18 nt, Artificial Sequence
  Synthetic
uauuucccuaccuagaag

SEQ ID NO: 301666 - RNA, 19 nt, Artificial Sequence
  Synthetic
uuauuucccuaccuagaag

SEQ ID NO: 301667 - RNA, 20 nt, Artificial Sequence
  Synthetic
uuuauuucccuaccuagaag

SEQ ID NO: 301668 - RNA, 21 nt, Artificial Sequence
  Synthetic
auuuauuucccuaccuagaag

SEQ ID NO: 301669 - RNA, 22 nt, Artificial Sequence
  Synthetic
uauuuauuucccuaccuagaag

SEQ ID NO: 301670 - RNA, 23 nt, Artificial Sequence
  Synthetic
guauuuauuucccuaccuagaag

SEQ ID NO: 301671 - RNA, 24 nt, Artificial Sequence
  Synthetic
aguauuuauuucccuaccuagaag

SEQ ID NO: 301672 - RNA, 18 nt, Artificial Sequence
  Synthetic
caaaaagauuccuagaag

SEQ ID NO: 301673 - RNA, 19 nt, Artificial Sequence
  Synthetic
ucaaaaagauuccuagaag

SEQ ID NO: 301674 - RNA, 20 nt, Artificial Sequence
  Synthetic
gucaaaaagauuccuagaag

SEQ ID NO: 301675 - RNA, 21 nt, Artificial Sequence
  Synthetic
agucaaaaagauuccuagaag

SEQ ID NO: 301676 - RNA, 22 nt, Artificial Sequence
  Synthetic
aagucaaaaagauuccuagaag

SEQ ID NO: 301677 - RNA, 23 nt, Artificial Sequence
  Synthetic
caagucaaaaagauuccuagaag

SEQ ID NO: 301678 - RNA, 24 nt, Artificial Sequence
  Synthetic
gcaagucaaaaagauuccuagaag

SEQ ID NO: 301679 - RNA, 18 nt, Artificial Sequence
  Synthetic
uuaguguuuaucuagaag

SEQ ID NO: 301680 - RNA, 19 nt, Artificial Sequence
  Synthetic
cuuaguguuuaucuagaag

SEQ ID NO: 301681 - RNA, 20 nt, Artificial Sequence
  Synthetic
ucuuaguguuuaucuagaag

SEQ ID NO: 301682 - RNA, 21 nt, Artificial Sequence
  Synthetic
aucuuaguguuuaucuagaag

SEQ ID NO: 301683 - RNA, 22 nt, Artificial Sequence
  Synthetic
uaucuuaguguuuaucuagaag

SEQ ID NO: 301684 - RNA, 23 nt, Artificial Sequence
  Synthetic
guaucuuaguguuuaucuagaag

SEQ ID NO: 301685 - RNA, 24 nt, Artificial Sequence
  Synthetic
gguaucuuaguguuuaucuagaag

SEQ ID NO: 301686 - RNA, 18 nt, Artificial Sequence
  Synthetic
gugagcauaaaguagaag

SEQ ID NO: 301687 - RNA, 19 nt, Artificial Sequence
  Synthetic
ugugagcauaaaguagaag

SEQ ID NO: 301688 - RNA, 20 nt, Artificial Sequence
  Synthetic
augugagcauaaaguagaag

SEQ ID NO: 301689 - RNA, 21 nt, Artificial Sequence
  Synthetic
gaugugagcauaaaguagaag

SEQ ID NO: 301690 - RNA, 22 nt, Artificial Sequence
  Synthetic
agaugugagcauaaaguagaag

SEQ ID NO: 301691 - RNA, 23 nt, Artificial Sequence
  Synthetic
uagaugugagcauaaaguagaag

SEQ ID NO: 301692 - RNA, 24 nt, Artificial Sequence
  Synthetic
guagaugugagcauaaaguagaag

SEQ ID NO: 301693 - RNA, 18 nt, Artificial Sequence
  Synthetic
aagcacauagaguagaag

SEQ ID NO: 301694 - RNA, 19 nt, Artificial Sequence
  Synthetic
caagcacauagaguagaag

SEQ ID NO: 301695 - RNA, 20 nt, Artificial Sequence
  Synthetic
ccaagcacauagaguagaag

SEQ ID NO: 301696 - RNA, 21 nt, Artificial Sequence
  Synthetic
gccaagcacauagaguagaag

SEQ ID NO: 301697 - RNA, 22 nt, Artificial Sequence
  Synthetic
ggccaagcacauagaguagaag

SEQ ID NO: 301698 - RNA, 23 nt, Artificial Sequence
  Synthetic
uggccaagcacauagaguagaag

SEQ ID NO: 301699 - RNA, 24 nt, Artificial Sequence
  Synthetic
auggccaagcacauagaguagaag

SEQ ID NO: 301700 - RNA, 18 nt, Artificial Sequence
  Synthetic
guuggaaucugguagaag

SEQ ID NO: 301701 - RNA, 19 nt, Artificial Sequence
  Synthetic
gguuggaaucugguagaag

SEQ ID NO: 301702 - RNA, 20 nt, Artificial Sequence
  Synthetic
agguuggaaucugguagaag

SEQ ID NO: 301703 - RNA, 21 nt, Artificial Sequence
  Synthetic
aagguuggaaucugguagaag

SEQ ID NO: 301704 - RNA, 22 nt, Artificial Sequence
  Synthetic
aaagguuggaaucugguagaag

SEQ ID NO: 301705 - RNA, 23 nt, Artificial Sequence
  Synthetic
uaaagguuggaaucugguagaag

SEQ ID NO: 301706 - RNA, 24 nt, Artificial Sequence
  Synthetic
cuaaagguuggaaucugguagaag

SEQ ID NO: 301707 - RNA, 18 nt, Artificial Sequence
  Synthetic
cuuuuauagauguagaag

SEQ ID NO: 301708 - RNA, 19 nt, Artificial Sequence
  Synthetic
ucuuuuauagauguagaag

SEQ ID NO: 301709 - RNA, 20 nt, Artificial Sequence
  Synthetic
uucuuuuauagauguagaag

SEQ ID NO: 301710 - RNA, 21 nt, Artificial Sequence
  Synthetic
cuucuuuuauagauguagaag

SEQ ID NO: 301711 - RNA, 22 nt, Artificial Sequence
  Synthetic
ucuucuuuuauagauguagaag

SEQ ID NO: 301712 - RNA, 23 nt, Artificial Sequence
  Synthetic
uucuucuuuuauagauguagaag

SEQ ID NO: 301713 - RNA, 24 nt, Artificial Sequence
  Synthetic
auucuucuuuuauagauguagaag

SEQ ID NO: 301714 - RNA, 18 nt, Artificial Sequence
  Synthetic
uuuauucuccuguagaag

SEQ ID NO: 301715 - RNA, 19 nt, Artificial Sequence
  Synthetic
cuuuauucuccuguagaag

SEQ ID NO: 301716 - RNA, 20 nt, Artificial Sequence
  Synthetic
acuuuauucuccuguagaag

SEQ ID NO: 301717 - RNA, 21 nt, Artificial Sequence
  Synthetic
uacuuuauucuccuguagaag

SEQ ID NO: 301718 - RNA, 22 nt, Artificial Sequence
  Synthetic
uuacuuuauucuccuguagaag

SEQ ID NO: 301719 - RNA, 23 nt, Artificial Sequence
  Synthetic
uuuacuuuauucuccuguagaag

SEQ ID NO: 301720 - RNA, 24 nt, Artificial Sequence
  Synthetic
guuuacuuuauucuccuguagaag

SEQ ID NO: 301721 - RNA, 18 nt, Artificial Sequence
  Synthetic
uagugacaaaauuagaag

SEQ ID NO: 301722 - RNA, 19 nt, Artificial Sequence
  Synthetic
uuagugacaaaauuagaag

SEQ ID NO: 301723 - RNA, 20 nt, Artificial Sequence
  Synthetic
guuagugacaaaauuagaag

SEQ ID NO: 301724 - RNA, 21 nt, Artificial Sequence
  Synthetic
aguuagugacaaaauuagaag

SEQ ID NO: 301725 - RNA, 22 nt, Artificial Sequence
  Synthetic
caguuagugacaaaauuagaag

SEQ ID NO: 301726 - RNA, 23 nt, Artificial Sequence
  Synthetic
acaguuagugacaaaauuagaag

SEQ ID NO: 301727 - RNA, 24 nt, Artificial Sequence
  Synthetic
aacaguuagugacaaaauuagaag

SEQ ID NO: 301728 - RNA, 18 nt, Artificial Sequence
  Synthetic
auuguauaguauuagaag

SEQ ID NO: 301729 - RNA, 19 nt, Artificial Sequence
  Synthetic
uauuguauaguauuagaag

SEQ ID NO: 301730 - RNA, 20 nt, Artificial Sequence
  Synthetic
auauuguauaguauuagaag

SEQ ID NO: 301731 - RNA, 21 nt, Artificial Sequence
  Synthetic
aauauuguauaguauuagaag

SEQ ID NO: 301732 - RNA, 22 nt, Artificial Sequence
  Synthetic
uaauauuguauaguauuagaag

SEQ ID NO: 301733 - RNA, 23 nt, Artificial Sequence
  Synthetic
cuaauauuguauaguauuagaag

SEQ ID NO: 301734 - RNA, 24 nt, Artificial Sequence
  Synthetic
ucuaauauuguauaguauuagaag

SEQ ID NO: 301735 - RNA, 18 nt, Artificial Sequence
  Synthetic
aggugaugguauuagaag

SEQ ID NO: 301736 - RNA, 19 nt, Artificial Sequence
  Synthetic
aaggugaugguauuagaag

SEQ ID NO: 301737 - RNA, 20 nt, Artificial Sequence
  Synthetic
caaggugaugguauuagaag

SEQ ID NO: 301738 - RNA, 21 nt, Artificial Sequence
  Synthetic
ucaaggugaugguauuagaag

SEQ ID NO: 301739 - RNA, 22 nt, Artificial Sequence
  Synthetic
cucaaggugaugguauuagaag

SEQ ID NO: 301740 - RNA, 23 nt, Artificial Sequence
  Synthetic
acucaaggugaugguauuagaag

SEQ ID NO: 301741 - RNA, 24 nt, Artificial Sequence
  Synthetic
cacucaaggugaugguauuagaag

SEQ ID NO: 301742 - RNA, 18 nt, Artificial Sequence
  Synthetic
ucaugaaugaguuagaag

SEQ ID NO: 301743 - RNA, 19 nt, Artificial Sequence
  Synthetic
cucaugaaugaguuagaag

SEQ ID NO: 301744 - RNA, 20 nt, Artificial Sequence
  Synthetic
ucucaugaaugaguuagaag

SEQ ID NO: 301745 - RNA, 21 nt, Artificial Sequence
  Synthetic
uucucaugaaugaguuagaag

SEQ ID NO: 301746 - RNA, 22 nt, Artificial Sequence
  Synthetic
guucucaugaaugaguuagaag

SEQ ID NO: 301747 - RNA, 23 nt, Artificial Sequence
  Synthetic
aguucucaugaaugaguuagaag

SEQ ID NO: 301748 - RNA, 24 nt, Artificial Sequence
  Synthetic
aaguucucaugaaugaguuagaag

SEQ ID NO: 301749 - RNA, 18 nt, Artificial Sequence
  Synthetic
cacucagauguuuagaag

SEQ ID NO: 301750 - RNA, 19 nt, Artificial Sequence
  Synthetic
acacucagauguuuagaag

SEQ ID NO: 301751 - RNA, 20 nt, Artificial Sequence
  Synthetic
gacacucagauguuuagaag

SEQ ID NO: 301752 - RNA, 21 nt, Artificial Sequence
  Synthetic
agacacucagauguuuagaag

SEQ ID NO: 301753 - RNA, 22 nt, Artificial Sequence
  Synthetic
gagacacucagauguuuagaag

SEQ ID NO: 301754 - RNA, 23 nt, Artificial Sequence
  Synthetic
ugagacacucagauguuuagaag

SEQ ID NO: 301755 - RNA, 24 nt, Artificial Sequence
  Synthetic
cugagacacucagauguuuagaag

SEQ ID NO: 301756 - RNA, 18 nt, Artificial Sequence
  Synthetic
guagauaaauccacgaag

SEQ ID NO: 301757 - RNA, 19 nt, Artificial Sequence
  Synthetic
gguagauaaauccacgaag

SEQ ID NO: 301758 - RNA, 20 nt, Artificial Sequence
  Synthetic
agguagauaaauccacgaag

SEQ ID NO: 301759 - RNA, 21 nt, Artificial Sequence
  Synthetic
aagguagauaaauccacgaag

SEQ ID NO: 301760 - RNA, 22 nt, Artificial Sequence
  Synthetic
aaagguagauaaauccacgaag

SEQ ID NO: 301761 - RNA, 23 nt, Artificial Sequence
  Synthetic
caaagguagauaaauccacgaag

SEQ ID NO: 301762 - RNA, 24 nt, Artificial Sequence
  Synthetic
ccaaagguagauaaauccacgaag

SEQ ID NO: 301763 - RNA, 18 nt, Artificial Sequence
  Synthetic
uagaaaccuucaccgaag

SEQ ID NO: 301764 - RNA, 19 nt, Artificial Sequence
  Synthetic
cuagaaaccuucaccgaag

SEQ ID NO: 301765 - RNA, 20 nt, Artificial Sequence
  Synthetic
gcuagaaaccuucaccgaag

SEQ ID NO: 301766 - RNA, 21 nt, Artificial Sequence
  Synthetic
agcuagaaaccuucaccgaag

SEQ ID NO: 301767 - RNA, 22 nt, Artificial Sequence
  Synthetic
cagcuagaaaccuucaccgaag

SEQ ID NO: 301768 - RNA, 23 nt, Artificial Sequence
  Synthetic
acagcuagaaaccuucaccgaag

SEQ ID NO: 301769 - RNA, 24 nt, Artificial Sequence
  Synthetic
gacagcuagaaaccuucaccgaag

SEQ ID NO: 301770 - RNA, 18 nt, Artificial Sequence
  Synthetic
cacuuugggaggccgaag

SEQ ID NO: 301771 - RNA, 19 nt, Artificial Sequence
  Synthetic
acacuuugggaggccgaag

SEQ ID NO: 301772 - RNA, 20 nt, Artificial Sequence
  Synthetic
aacacuuugggaggccgaag

SEQ ID NO: 301773 - RNA, 21 nt, Artificial Sequence
  Synthetic
caacacuuugggaggccgaag

SEQ ID NO: 301774 - RNA, 22 nt, Artificial Sequence
  Synthetic
ccaacacuuugggaggccgaag

SEQ ID NO: 301775 - RNA, 23 nt, Artificial Sequence
  Synthetic
cccaacacuuugggaggccgaag

SEQ ID NO: 301776 - RNA, 24 nt, Artificial Sequence
  Synthetic
ucccaacacuuugggaggccgaag

SEQ ID NO: 301777 - RNA, 18 nt, Artificial Sequence
  Synthetic
gagaagcgcccagcgaag

SEQ ID NO: 301778 - RNA, 19 nt, Artificial Sequence
  Synthetic
ggagaagcgcccagcgaag

SEQ ID NO: 301779 - RNA, 20 nt, Artificial Sequence
  Synthetic
aggagaagcgcccagcgaag

SEQ ID NO: 301780 - RNA, 21 nt, Artificial Sequence
  Synthetic
aaggagaagcgcccagcgaag

SEQ ID NO: 301781 - RNA, 22 nt, Artificial Sequence
  Synthetic
gaaggagaagcgcccagcgaag

SEQ ID NO: 301782 - RNA, 23 nt, Artificial Sequence
  Synthetic
ggaaggagaagcgcccagcgaag

SEQ ID NO: 301783 - RNA, 24 nt, Artificial Sequence
  Synthetic
aggaaggagaagcgcccagcgaag

SEQ ID NO: 301784 - RNA, 18 nt, Artificial Sequence
  Synthetic
accaggggcugggcgaag

SEQ ID NO: 301785 - RNA, 19 nt, Artificial Sequence
  Synthetic
aaccaggggcugggcgaag

SEQ ID NO: 301786 - RNA, 20 nt, Artificial Sequence
  Synthetic
uaaccaggggcugggcgaag

SEQ ID NO: 301787 - RNA, 21 nt, Artificial Sequence
  Synthetic
guaaccaggggcugggcgaag

SEQ ID NO: 301788 - RNA, 22 nt, Artificial Sequence
  Synthetic
aguaaccaggggcugggcgaag

SEQ ID NO: 301789 - RNA, 23 nt, Artificial Sequence
  Synthetic
uaguaaccaggggcugggcgaag

SEQ ID NO: 301790 - RNA, 24 nt, Artificial Sequence
  Synthetic
auaguaaccaggggcugggcgaag

SEQ ID NO: 301791 - RNA, 18 nt, Artificial Sequence
  Synthetic
uggcguaauauugcgaag

SEQ ID NO: 301792 - RNA, 19 nt, Artificial Sequence
  Synthetic
cuggcguaauauugcgaag

SEQ ID NO: 301793 - RNA, 20 nt, Artificial Sequence
  Synthetic
acuggcguaauauugcgaag

SEQ ID NO: 301794 - RNA, 21 nt, Artificial Sequence
  Synthetic
aacuggcguaauauugcgaag

SEQ ID NO: 301795 - RNA, 22 nt, Artificial Sequence
  Synthetic
uaacuggcguaauauugcgaag

SEQ ID NO: 301796 - RNA, 23 nt, Artificial Sequence
  Synthetic
guaacuggcguaauauugcgaag

SEQ ID NO: 301797 - RNA, 24 nt, Artificial Sequence
  Synthetic
aguaacuggcguaauauugcgaag

SEQ ID NO: 301798 - RNA, 18 nt, Artificial Sequence
  Synthetic
uaaaaggcaaaaaggaag

SEQ ID NO: 301799 - RNA, 19 nt, Artificial Sequence
  Synthetic
cuaaaaggcaaaaaggaag

SEQ ID NO: 301800 - RNA, 20 nt, Artificial Sequence
  Synthetic
acuaaaaggcaaaaaggaag

SEQ ID NO: 301801 - RNA, 21 nt, Artificial Sequence
  Synthetic
uacuaaaaggcaaaaaggaag

SEQ ID NO: 301802 - RNA, 22 nt, Artificial Sequence
  Synthetic
cuacuaaaaggcaaaaaggaag

SEQ ID NO: 301803 - RNA, 23 nt, Artificial Sequence
  Synthetic
acuacuaaaaggcaaaaaggaag

SEQ ID NO: 301804 - RNA, 24 nt, Artificial Sequence
  Synthetic
aacuacuaaaaggcaaaaaggaag

SEQ ID NO: 301805 - RNA, 18 nt, Artificial Sequence
  Synthetic
cacauggagaaaaggaag

SEQ ID NO: 301806 - RNA, 19 nt, Artificial Sequence
  Synthetic
acacauggagaaaaggaag

SEQ ID NO: 301807 - RNA, 20 nt, Artificial Sequence
  Synthetic
uacacauggagaaaaggaag

SEQ ID NO: 301808 - RNA, 21 nt, Artificial Sequence
  Synthetic
uuacacauggagaaaaggaag

SEQ ID NO: 301809 - RNA, 22 nt, Artificial Sequence
  Synthetic
auuacacauggagaaaaggaag

SEQ ID NO: 301810 - RNA, 23 nt, Artificial Sequence
  Synthetic
aauuacacauggagaaaaggaag

SEQ ID NO: 301811 - RNA, 24 nt, Artificial Sequence
  Synthetic
aaauuacacauggagaaaaggaag

SEQ ID NO: 301812 - RNA, 18 nt, Artificial Sequence
  Synthetic
cugcguaguaaaaggaag

SEQ ID NO: 301813 - RNA, 19 nt, Artificial Sequence
  Synthetic
gcugcguaguaaaaggaag

SEQ ID NO: 301814 - RNA, 20 nt, Artificial Sequence
  Synthetic
ugcugcguaguaaaaggaag

SEQ ID NO: 301815 - RNA, 21 nt, Artificial Sequence
  Synthetic
cugcugcguaguaaaaggaag

SEQ ID NO: 301816 - RNA, 22 nt, Artificial Sequence
  Synthetic
ccugcugcguaguaaaaggaag

SEQ ID NO: 301817 - RNA, 23 nt, Artificial Sequence
  Synthetic
gccugcugcguaguaaaaggaag

SEQ ID NO: 301818 - RNA, 24 nt, Artificial Sequence
  Synthetic
ugccugcugcguaguaaaaggaag

SEQ ID NO: 301819 - RNA, 18 nt, Artificial Sequence
  Synthetic
aaaaguagucaaaggaag

SEQ ID NO: 301820 - RNA, 19 nt, Artificial Sequence
  Synthetic
caaaaguagucaaaggaag

SEQ ID NO: 301821 - RNA, 20 nt, Artificial Sequence
  Synthetic
ucaaaaguagucaaaggaag

SEQ ID NO: 301822 - RNA, 21 nt, Artificial Sequence
  Synthetic
aucaaaaguagucaaaggaag

SEQ ID NO: 301823 - RNA, 22 nt, Artificial Sequence
  Synthetic
gaucaaaaguagucaaaggaag

SEQ ID NO: 301824 - RNA, 23 nt, Artificial Sequence
  Synthetic
agaucaaaaguagucaaaggaag

SEQ ID NO: 301825 - RNA, 24 nt, Artificial Sequence
  Synthetic
aagaucaaaaguagucaaaggaag

SEQ ID NO: 301826 - RNA, 18 nt, Artificial Sequence
  Synthetic
acccuuaaggaaaggaag

SEQ ID NO: 301827 - RNA, 19 nt, Artificial Sequence
  Synthetic
gacccuuaaggaaaggaag

SEQ ID NO: 301828 - RNA, 20 nt, Artificial Sequence
  Synthetic
ugacccuuaaggaaaggaag

SEQ ID NO: 301829 - RNA, 21 nt, Artificial Sequence
  Synthetic
cugacccuuaaggaaaggaag

SEQ ID NO: 301830 - RNA, 22 nt, Artificial Sequence
  Synthetic
ucugacccuuaaggaaaggaag

SEQ ID NO: 301831 - RNA, 23 nt, Artificial Sequence
  Synthetic
aucugacccuuaaggaaaggaag

SEQ ID NO: 301832 - RNA, 24 nt, Artificial Sequence
  Synthetic
aaucugacccuuaaggaaaggaag

SEQ ID NO: 301833 - RNA, 18 nt, Artificial Sequence
  Synthetic
agaaaugcuuaaaggaag

SEQ ID NO: 301834 - RNA, 19 nt, Artificial Sequence
  Synthetic
cagaaaugcuuaaaggaag

SEQ ID NO: 301835 - RNA, 20 nt, Artificial Sequence
  Synthetic
ccagaaaugcuuaaaggaag

SEQ ID NO: 301836 - RNA, 21 nt, Artificial Sequence
  Synthetic
uccagaaaugcuuaaaggaag

SEQ ID NO: 301837 - RNA, 22 nt, Artificial Sequence
  Synthetic
cuccagaaaugcuuaaaggaag

SEQ ID NO: 301838 - RNA, 23 nt, Artificial Sequence
  Synthetic
acuccagaaaugcuuaaaggaag

SEQ ID NO: 301839 - RNA, 24 nt, Artificial Sequence
  Synthetic
cacuccagaaaugcuuaaaggaag

SEQ ID NO: 301840 - RNA, 18 nt, Artificial Sequence
  Synthetic
ccguaugaagcaaggaag

SEQ ID NO: 301841 - RNA, 19 nt, Artificial Sequence
  Synthetic
accguaugaagcaaggaag

SEQ ID NO: 301842 - RNA, 20 nt, Artificial Sequence
  Synthetic
uaccguaugaagcaaggaag

SEQ ID NO: 301843 - RNA, 21 nt, Artificial Sequence
  Synthetic
uuaccguaugaagcaaggaag

SEQ ID NO: 301844 - RNA, 22 nt, Artificial Sequence
  Synthetic
auuaccguaugaagcaaggaag

SEQ ID NO: 301845 - RNA, 23 nt, Artificial Sequence
  Synthetic
uauuaccguaugaagcaaggaag

SEQ ID NO: 301846 - RNA, 24 nt, Artificial Sequence
  Synthetic
guauuaccguaugaagcaaggaag

SEQ ID NO: 301847 - RNA, 18 nt, Artificial Sequence
  Synthetic
cauaugucagcaaggaag

SEQ ID NO: 301848 - RNA, 19 nt, Artificial Sequence
  Synthetic
acauaugucagcaaggaag

SEQ ID NO: 301849 - RNA, 20 nt, Artificial Sequence
  Synthetic
aacauaugucagcaaggaag

SEQ ID NO: 301850 - RNA, 21 nt, Artificial Sequence
  Synthetic
gaacauaugucagcaaggaag

SEQ ID NO: 301851 - RNA, 22 nt, Artificial Sequence
  Synthetic
agaacauaugucagcaaggaag

SEQ ID NO: 301852 - RNA, 23 nt, Artificial Sequence
  Synthetic
uagaacauaugucagcaaggaag

SEQ ID NO: 301853 - RNA, 24 nt, Artificial Sequence
  Synthetic
auagaacauaugucagcaaggaag

SEQ ID NO: 301854 - RNA, 18 nt, Artificial Sequence
  Synthetic
acagaaaucucaaggaag

SEQ ID NO: 301855 - RNA, 19 nt, Artificial Sequence
  Synthetic
aacagaaaucucaaggaag

SEQ ID NO: 301856 - RNA, 20 nt, Artificial Sequence
  Synthetic
gaacagaaaucucaaggaag

SEQ ID NO: 301857 - RNA, 21 nt, Artificial Sequence
  Synthetic
ugaacagaaaucucaaggaag

SEQ ID NO: 301858 - RNA, 22 nt, Artificial Sequence
  Synthetic
uugaacagaaaucucaaggaag

SEQ ID NO: 301859 - RNA, 23 nt, Artificial Sequence
  Synthetic
uuugaacagaaaucucaaggaag

SEQ ID NO: 301860 - RNA, 24 nt, Artificial Sequence
  Synthetic
auuugaacagaaaucucaaggaag

SEQ ID NO: 301861 - RNA, 18 nt, Artificial Sequence
  Synthetic
acaguaucgucaaggaag

SEQ ID NO: 301862 - RNA, 19 nt, Artificial Sequence
  Synthetic
aacaguaucgucaaggaag

SEQ ID NO: 301863 - RNA, 20 nt, Artificial Sequence
  Synthetic
uaacaguaucgucaaggaag

SEQ ID NO: 301864 - RNA, 21 nt, Artificial Sequence
  Synthetic
uuaacaguaucgucaaggaag

SEQ ID NO: 301865 - RNA, 22 nt, Artificial Sequence
  Synthetic
cuuaacaguaucgucaaggaag

SEQ ID NO: 301866 - RNA, 23 nt, Artificial Sequence
  Synthetic
acuuaacaguaucgucaaggaag

SEQ ID NO: 301867 - RNA, 24 nt, Artificial Sequence
  Synthetic
aacuuaacaguaucgucaaggaag

SEQ ID NO: 301868 - RNA, 18 nt, Artificial Sequence
  Synthetic
uugaaaagcagaaggaag

SEQ ID NO: 301869 - RNA, 19 nt, Artificial Sequence
  Synthetic
uuugaaaagcagaaggaag

SEQ ID NO: 301870 - RNA, 20 nt, Artificial Sequence
  Synthetic
cuuugaaaagcagaaggaag

SEQ ID NO: 301871 - RNA, 21 nt, Artificial Sequence
  Synthetic
acuuugaaaagcagaaggaag

SEQ ID NO: 301872 - RNA, 22 nt, Artificial Sequence
  Synthetic
gacuuugaaaagcagaaggaag

SEQ ID NO: 301873 - RNA, 23 nt, Artificial Sequence
  Synthetic
agacuuugaaaagcagaaggaag

SEQ ID NO: 301874 - RNA, 24 nt, Artificial Sequence
  Synthetic
aagacuuugaaaagcagaaggaag

SEQ ID NO: 301875 - RNA, 18 nt, Artificial Sequence
  Synthetic
augaaaguuagaaggaag

SEQ ID NO: 301876 - RNA, 19 nt, Artificial Sequence
  Synthetic
caugaaaguuagaaggaag

SEQ ID NO: 301877 - RNA, 20 nt, Artificial Sequence
  Synthetic
ccaugaaaguuagaaggaag

SEQ ID NO: 301878 - RNA, 21 nt, Artificial Sequence
  Synthetic
uccaugaaaguuagaaggaag

SEQ ID NO: 301879 - RNA, 22 nt, Artificial Sequence
  Synthetic
uuccaugaaaguuagaaggaag

SEQ ID NO: 301880 - RNA, 23 nt, Artificial Sequence
  Synthetic
uuuccaugaaaguuagaaggaag

SEQ ID NO: 301881 - RNA, 24 nt, Artificial Sequence
  Synthetic
auuuccaugaaaguuagaaggaag

SEQ ID NO: 301882 - RNA, 18 nt, Artificial Sequence
  Synthetic
gaaagaaagggaaggaag

SEQ ID NO: 301883 - RNA, 19 nt, Artificial Sequence
  Synthetic
ggaaagaaagggaaggaag

SEQ ID NO: 301884 - RNA, 20 nt, Artificial Sequence
  Synthetic
aggaaagaaagggaaggaag

SEQ ID NO: 301885 - RNA, 21 nt, Artificial Sequence
  Synthetic
gaggaaagaaagggaaggaag

SEQ ID NO: 301886 - RNA, 22 nt, Artificial Sequence
  Synthetic
ggaggaaagaaagggaaggaag

SEQ ID NO: 301887 - RNA, 23 nt, Artificial Sequence
  Synthetic
gggaggaaagaaagggaaggaag

SEQ ID NO: 301888 - RNA, 24 nt, Artificial Sequence
  Synthetic
agggaggaaagaaagggaaggaag

SEQ ID NO: 301889 - RNA, 18 nt, Artificial Sequence
  Synthetic
acacauggacacaggaag

SEQ ID NO: 301890 - RNA, 19 nt, Artificial Sequence
  Synthetic
aacacauggacacaggaag

SEQ ID NO: 301891 - RNA, 20 nt, Artificial Sequence
  Synthetic
gaacacauggacacaggaag

SEQ ID NO: 301892 - RNA, 21 nt, Artificial Sequence
  Synthetic
agaacacauggacacaggaag

SEQ ID NO: 301893 - RNA, 22 nt, Artificial Sequence
  Synthetic
gagaacacauggacacaggaag

SEQ ID NO: 301894 - RNA, 23 nt, Artificial Sequence
  Synthetic
ugagaacacauggacacaggaag

SEQ ID NO: 301895 - RNA, 24 nt, Artificial Sequence
  Synthetic
augagaacacauggacacaggaag

SEQ ID NO: 301896 - RNA, 18 nt, Artificial Sequence
  Synthetic
ugcagguuguacaggaag

SEQ ID NO: 301897 - RNA, 19 nt, Artificial Sequence
  Synthetic
cugcagguuguacaggaag

SEQ ID NO: 301898 - RNA, 20 nt, Artificial Sequence
  Synthetic
ucugcagguuguacaggaag

SEQ ID NO: 301899 - RNA, 21 nt, Artificial Sequence
  Synthetic
uucugcagguuguacaggaag

SEQ ID NO: 301900 - RNA, 22 nt, Artificial Sequence
  Synthetic
auucugcagguuguacaggaag

SEQ ID NO: 301901 - RNA, 23 nt, Artificial Sequence
  Synthetic
gauucugcagguuguacaggaag

SEQ ID NO: 301902 - RNA, 24 nt, Artificial Sequence
  Synthetic
ugauucugcagguuguacaggaag

SEQ ID NO: 301903 - RNA, 18 nt, Artificial Sequence
  Synthetic
guggagaucaccaggaag

SEQ ID NO: 301904 - RNA, 19 nt, Artificial Sequence
  Synthetic
uguggagaucaccaggaag

SEQ ID NO: 301905 - RNA, 20 nt, Artificial Sequence
  Synthetic
uuguggagaucaccaggaag

SEQ ID NO: 301906 - RNA, 21 nt, Artificial Sequence
  Synthetic
cuuguggagaucaccaggaag

SEQ ID NO: 301907 - RNA, 22 nt, Artificial Sequence
  Synthetic
acuuguggagaucaccaggaag

SEQ ID NO: 301908 - RNA, 23 nt, Artificial Sequence
  Synthetic
cacuuguggagaucaccaggaag

SEQ ID NO: 301909 - RNA, 24 nt, Artificial Sequence
  Synthetic
acacuuguggagaucaccaggaag

SEQ ID NO: 301910 - RNA, 18 nt, Artificial Sequence
  Synthetic
ucacgugaacccaggaag

SEQ ID NO: 301911 - RNA, 19 nt, Artificial Sequence
  Synthetic
aucacgugaacccaggaag

SEQ ID NO: 301912 - RNA, 20 nt, Artificial Sequence
  Synthetic
gaucacgugaacccaggaag

SEQ ID NO: 301913 - RNA, 21 nt, Artificial Sequence
  Synthetic
ggaucacgugaacccaggaag

SEQ ID NO: 301914 - RNA, 22 nt, Artificial Sequence
  Synthetic
aggaucacgugaacccaggaag

SEQ ID NO: 301915 - RNA, 23 nt, Artificial Sequence
  Synthetic
aaggaucacgugaacccaggaag

SEQ ID NO: 301916 - RNA, 24 nt, Artificial Sequence
  Synthetic
gaaggaucacgugaacccaggaag

SEQ ID NO: 301917 - RNA, 18 nt, Artificial Sequence
  Synthetic
ccuucuccagccaggaag

SEQ ID NO: 301918 - RNA, 19 nt, Artificial Sequence
  Synthetic
cccuucuccagccaggaag

SEQ ID NO: 301919 - RNA, 20 nt, Artificial Sequence
  Synthetic
gcccuucuccagccaggaag

SEQ ID NO: 301920 - RNA, 21 nt, Artificial Sequence
  Synthetic
ugcccuucuccagccaggaag

SEQ ID NO: 301921 - RNA, 22 nt, Artificial Sequence
  Synthetic
cugcccuucuccagccaggaag

SEQ ID NO: 301922 - RNA, 23 nt, Artificial Sequence
  Synthetic
acugcccuucuccagccaggaag

SEQ ID NO: 301923 - RNA, 24 nt, Artificial Sequence
  Synthetic
aacugcccuucuccagccaggaag

SEQ ID NO: 301924 - RNA, 18 nt, Artificial Sequence
  Synthetic
ucacauggcagcaggaag

SEQ ID NO: 301925 - RNA, 19 nt, Artificial Sequence
  Synthetic
uucacauggcagcaggaag

SEQ ID NO: 301926 - RNA, 20 nt, Artificial Sequence
  Synthetic
cuucacauggcagcaggaag

SEQ ID NO: 301927 - RNA, 21 nt, Artificial Sequence
  Synthetic
ucuucacauggcagcaggaag

SEQ ID NO: 301928 - RNA, 22 nt, Artificial Sequence
  Synthetic
uucuucacauggcagcaggaag

SEQ ID NO: 301929 - RNA, 23 nt, Artificial Sequence
  Synthetic
cuucuucacauggcagcaggaag

SEQ ID NO: 301930 - RNA, 24 nt, Artificial Sequence
  Synthetic
ucuucuucacauggcagcaggaag

SEQ ID NO: 301931 - RNA, 18 nt, Artificial Sequence
  Synthetic
ucacaaggccgcaggaag

SEQ ID NO: 301932 - RNA, 19 nt, Artificial Sequence
  Synthetic
uucacaaggccgcaggaag

SEQ ID NO: 301933 - RNA, 20 nt, Artificial Sequence
  Synthetic
cuucacaaggccgcaggaag

SEQ ID NO: 301934 - RNA, 21 nt, Artificial Sequence
  Synthetic
ucuucacaaggccgcaggaag

SEQ ID NO: 301935 - RNA, 22 nt, Artificial Sequence
  Synthetic
uucuucacaaggccgcaggaag

SEQ ID NO: 301936 - RNA, 23 nt, Artificial Sequence
  Synthetic
cuucuucacaaggccgcaggaag

SEQ ID NO: 301937 - RNA, 24 nt, Artificial Sequence
  Synthetic
ucuucuucacaaggccgcaggaag

SEQ ID NO: 301938 - RNA, 18 nt, Artificial Sequence
  Synthetic
ucacaagguggcaggaag

SEQ ID NO: 301939 - RNA, 19 nt, Artificial Sequence
  Synthetic
uucacaagguggcaggaag

SEQ ID NO: 301940 - RNA, 20 nt, Artificial Sequence
  Synthetic
cuucacaagguggcaggaag

SEQ ID NO: 301941 - RNA, 21 nt, Artificial Sequence
  Synthetic
ucuucacaagguggcaggaag

SEQ ID NO: 301942 - RNA, 22 nt, Artificial Sequence
  Synthetic
uucuucacaagguggcaggaag

SEQ ID NO: 301943 - RNA, 23 nt, Artificial Sequence
  Synthetic
cuucuucacaagguggcaggaag

SEQ ID NO: 301944 - RNA, 24 nt, Artificial Sequence
  Synthetic
ccuucuucacaagguggcaggaag

SEQ ID NO: 301945 - RNA, 18 nt, Artificial Sequence
  Synthetic
ccuuuguagugcaggaag

SEQ ID NO: 301946 - RNA, 19 nt, Artificial Sequence
  Synthetic
uccuuuguagugcaggaag

SEQ ID NO: 301947 - RNA, 20 nt, Artificial Sequence
  Synthetic
auccuuuguagugcaggaag

SEQ ID NO: 301948 - RNA, 21 nt, Artificial Sequence
  Synthetic
aauccuuuguagugcaggaag

SEQ ID NO: 301949 - RNA, 22 nt, Artificial Sequence
  Synthetic
gaauccuuuguagugcaggaag

SEQ ID NO: 301950 - RNA, 23 nt, Artificial Sequence
  Synthetic
agaauccuuuguagugcaggaag

SEQ ID NO: 301951 - RNA, 24 nt, Artificial Sequence
  Synthetic
aagaauccuuuguagugcaggaag

SEQ ID NO: 301952 - RNA, 18 nt, Artificial Sequence
  Synthetic
gugagggcuuucaggaag

SEQ ID NO: 301953 - RNA, 19 nt, Artificial Sequence
  Synthetic
cgugagggcuuucaggaag

SEQ ID NO: 301954 - RNA, 20 nt, Artificial Sequence
  Synthetic
gcgugagggcuuucaggaag

SEQ ID NO: 301955 - RNA, 21 nt, Artificial Sequence
  Synthetic
agcgugagggcuuucaggaag

SEQ ID NO: 301956 - RNA, 22 nt, Artificial Sequence
  Synthetic
cagcgugagggcuuucaggaag

SEQ ID NO: 301957 - RNA, 23 nt, Artificial Sequence
  Synthetic
gcagcgugagggcuuucaggaag

SEQ ID NO: 301958 - RNA, 24 nt, Artificial Sequence
  Synthetic
ggcagcgugagggcuuucaggaag

SEQ ID NO: 301959 - RNA, 18 nt, Artificial Sequence
  Synthetic
aaucaaguggagaggaag

SEQ ID NO: 301960 - RNA, 19 nt, Artificial Sequence
  Synthetic
aaaucaaguggagaggaag

SEQ ID NO: 301961 - RNA, 20 nt, Artificial Sequence
  Synthetic
aaaaucaaguggagaggaag

SEQ ID NO: 301962 - RNA, 21 nt, Artificial Sequence
  Synthetic
uaaaaucaaguggagaggaag

SEQ ID NO: 301963 - RNA, 22 nt, Artificial Sequence
  Synthetic
guaaaaucaaguggagaggaag

SEQ ID NO: 301964 - RNA, 23 nt, Artificial Sequence
  Synthetic
cguaaaaucaaguggagaggaag

SEQ ID NO: 301965 - RNA, 24 nt, Artificial Sequence
  Synthetic
acguaaaaucaaguggagaggaag

SEQ ID NO: 301966 - RNA, 18 nt, Artificial Sequence
  Synthetic
acuagaagggggaggaag

SEQ ID NO: 301967 - RNA, 19 nt, Artificial Sequence
  Synthetic
uacuagaagggggaggaag

SEQ ID NO: 301968 - RNA, 20 nt, Artificial Sequence
  Synthetic
cuacuagaagggggaggaag

SEQ ID NO: 301969 - RNA, 21 nt, Artificial Sequence
  Synthetic
acuacuagaagggggaggaag

SEQ ID NO: 301970 - RNA, 22 nt, Artificial Sequence
  Synthetic
gacuacuagaagggggaggaag

SEQ ID NO: 301971 - RNA, 23 nt, Artificial Sequence
  Synthetic
ggacuacuagaagggggaggaag

SEQ ID NO: 301972 - RNA, 24 nt, Artificial Sequence
  Synthetic
gggacuacuagaagggggaggaag

SEQ ID NO: 301973 - RNA, 18 nt, Artificial Sequence
  Synthetic
accaggagcuggaggaag

SEQ ID NO: 301974 - RNA, 19 nt, Artificial Sequence
  Synthetic
uaccaggagcuggaggaag

SEQ ID NO: 301975 - RNA, 20 nt, Artificial Sequence
  Synthetic
uuaccaggagcuggaggaag

SEQ ID NO: 301976 - RNA, 21 nt, Artificial Sequence
  Synthetic
guuaccaggagcuggaggaag

SEQ ID NO: 301977 - RNA, 22 nt, Artificial Sequence
  Synthetic
uguuaccaggagcuggaggaag

SEQ ID NO: 301978 - RNA, 23 nt, Artificial Sequence
  Synthetic
auguuaccaggagcuggaggaag

SEQ ID NO: 301979 - RNA, 24 nt, Artificial Sequence
  Synthetic
gauguuaccaggagcuggaggaag

SEQ ID NO: 301980 - RNA, 18 nt, Artificial Sequence
  Synthetic
auaugagaaaugaggaag

SEQ ID NO: 301981 - RNA, 19 nt, Artificial Sequence
  Synthetic
uauaugagaaaugaggaag

SEQ ID NO: 301982 - RNA, 20 nt, Artificial Sequence
  Synthetic
cuauaugagaaaugaggaag

SEQ ID NO: 301983 - RNA, 21 nt, Artificial Sequence
  Synthetic
ucuauaugagaaaugaggaag

SEQ ID NO: 301984 - RNA, 22 nt, Artificial Sequence
  Synthetic
uucuauaugagaaaugaggaag

SEQ ID NO: 301985 - RNA, 23 nt, Artificial Sequence
  Synthetic
cuucuauaugagaaaugaggaag

SEQ ID NO: 301986 - RNA, 24 nt, Artificial Sequence
  Synthetic
acuucuauaugagaaaugaggaag

SEQ ID NO: 301987 - RNA, 18 nt, Artificial Sequence
  Synthetic
agaugaugcaauaggaag

SEQ ID NO: 301988 - RNA, 19 nt, Artificial Sequence
  Synthetic
uagaugaugcaauaggaag

SEQ ID NO: 301989 - RNA, 20 nt, Artificial Sequence
  Synthetic
uuagaugaugcaauaggaag

SEQ ID NO: 301990 - RNA, 21 nt, Artificial Sequence
  Synthetic
uuuagaugaugcaauaggaag

SEQ ID NO: 301991 - RNA, 22 nt, Artificial Sequence
  Synthetic
uuuuagaugaugcaauaggaag

SEQ ID NO: 301992 - RNA, 23 nt, Artificial Sequence
  Synthetic
uuuuuagaugaugcaauaggaag

SEQ ID NO: 301993 - RNA, 24 nt, Artificial Sequence
  Synthetic
uuuuuuagaugaugcaauaggaag

SEQ ID NO: 301994 - RNA, 18 nt, Artificial Sequence
  Synthetic
acuguugagccuaggaag

SEQ ID NO: 301995 - RNA, 19 nt, Artificial Sequence
  Synthetic
cacuguugagccuaggaag

SEQ ID NO: 301996 - RNA, 20 nt, Artificial Sequence
  Synthetic
acacuguugagccuaggaag

SEQ ID NO: 301997 - RNA, 21 nt, Artificial Sequence
  Synthetic
uacacuguugagccuaggaag

SEQ ID NO: 301998 - RNA, 22 nt, Artificial Sequence
  Synthetic
guacacuguugagccuaggaag

SEQ ID NO: 301999 - RNA, 23 nt, Artificial Sequence
  Synthetic
uguacacuguugagccuaggaag

SEQ ID NO: 302000 - RNA, 24 nt, Artificial Sequence
  Synthetic
guguacacuguugagccuaggaag

SEQ ID NO: 302001 - RNA, 18 nt, Artificial Sequence
  Synthetic
ggaggauugccuaggaag

SEQ ID NO: 302002 - RNA, 19 nt, Artificial Sequence
  Synthetic
gggaggauugccuaggaag

SEQ ID NO: 302003 - RNA, 20 nt, Artificial Sequence
  Synthetic
ugggaggauugccuaggaag

SEQ ID NO: 302004 - RNA, 21 nt, Artificial Sequence
  Synthetic
gugggaggauugccuaggaag

SEQ ID NO: 302005 - RNA, 22 nt, Artificial Sequence
  Synthetic
ggugggaggauugccuaggaag

SEQ ID NO: 302006 - RNA, 23 nt, Artificial Sequence
  Synthetic
aggugggaggauugccuaggaag

SEQ ID NO: 302007 - RNA, 24 nt, Artificial Sequence
  Synthetic
gaggugggaggauugccuaggaag

SEQ ID NO: 302008 - RNA, 18 nt, Artificial Sequence
  Synthetic
acugccuauaguaggaag

SEQ ID NO: 302009 - RNA, 19 nt, Artificial Sequence
  Synthetic
uacugccuauaguaggaag

SEQ ID NO: 302010 - RNA, 20 nt, Artificial Sequence
  Synthetic
auacugccuauaguaggaag

SEQ ID NO: 302011 - RNA, 21 nt, Artificial Sequence
  Synthetic
uauacugccuauaguaggaag

SEQ ID NO: 302012 - RNA, 22 nt, Artificial Sequence
  Synthetic
guauacugccuauaguaggaag

SEQ ID NO: 302013 - RNA, 23 nt, Artificial Sequence
  Synthetic
gguauacugccuauaguaggaag

SEQ ID NO: 302014 - RNA, 24 nt, Artificial Sequence
  Synthetic
agguauacugccuauaguaggaag

SEQ ID NO: 302015 - RNA, 18 nt, Artificial Sequence
  Synthetic
acauuuugugguaggaag

SEQ ID NO: 302016 - RNA, 19 nt, Artificial Sequence
  Synthetic
aacauuuugugguaggaag

SEQ ID NO: 302017 - RNA, 20 nt, Artificial Sequence
  Synthetic
caacauuuugugguaggaag

SEQ ID NO: 302018 - RNA, 21 nt, Artificial Sequence
  Synthetic
acaacauuuugugguaggaag

SEQ ID NO: 302019 - RNA, 22 nt, Artificial Sequence
  Synthetic
aacaacauuuugugguaggaag

SEQ ID NO: 302020 - RNA, 23 nt, Artificial Sequence
  Synthetic
caacaacauuuugugguaggaag

SEQ ID NO: 302021 - RNA, 24 nt, Artificial Sequence
  Synthetic
ucaacaacauuuugugguaggaag

SEQ ID NO: 302022 - RNA, 18 nt, Artificial Sequence
  Synthetic
guaagggugacccggaag

SEQ ID NO: 302023 - RNA, 19 nt, Artificial Sequence
  Synthetic
aguaagggugacccggaag

SEQ ID NO: 302024 - RNA, 20 nt, Artificial Sequence
  Synthetic
gaguaagggugacccggaag

SEQ ID NO: 302025 - RNA, 21 nt, Artificial Sequence
  Synthetic
ugaguaagggugacccggaag

SEQ ID NO: 302026 - RNA, 22 nt, Artificial Sequence
  Synthetic
augaguaagggugacccggaag

SEQ ID NO: 302027 - RNA, 23 nt, Artificial Sequence
  Synthetic
gaugaguaagggugacccggaag

SEQ ID NO: 302028 - RNA, 24 nt, Artificial Sequence
  Synthetic
agaugaguaagggugacccggaag

SEQ ID NO: 302029 - RNA, 18 nt, Artificial Sequence
  Synthetic
uucuugcaguuccggaag

SEQ ID NO: 302030 - RNA, 19 nt, Artificial Sequence
  Synthetic
uuucuugcaguuccggaag

SEQ ID NO: 302031 - RNA, 20 nt, Artificial Sequence
  Synthetic
auuucuugcaguuccggaag

SEQ ID NO: 302032 - RNA, 21 nt, Artificial Sequence
  Synthetic
uauuucuugcaguuccggaag

SEQ ID NO: 302033 - RNA, 22 nt, Artificial Sequence
  Synthetic
guauuucuugcaguuccggaag

SEQ ID NO: 302034 - RNA, 23 nt, Artificial Sequence
  Synthetic
uguauuucuugcaguuccggaag

SEQ ID NO: 302035 - RNA, 24 nt, Artificial Sequence
  Synthetic
auguauuucuugcaguuccggaag

SEQ ID NO: 302036 - RNA, 18 nt, Artificial Sequence
  Synthetic
acgagagaaaaagggaag

SEQ ID NO: 302037 - RNA, 19 nt, Artificial Sequence
  Synthetic
gacgagagaaaaagggaag

SEQ ID NO: 302038 - RNA, 20 nt, Artificial Sequence
  Synthetic
agacgagagaaaaagggaag

SEQ ID NO: 302039 - RNA, 21 nt, Artificial Sequence
  Synthetic
gagacgagagaaaaagggaag

SEQ ID NO: 302040 - RNA, 22 nt, Artificial Sequence
  Synthetic
ggagacgagagaaaaagggaag

SEQ ID NO: 302041 - RNA, 23 nt, Artificial Sequence
  Synthetic
aggagacgagagaaaaagggaag

SEQ ID NO: 302042 - RNA, 24 nt, Artificial Sequence
  Synthetic
gaggagacgagagaaaaagggaag

SEQ ID NO: 302043 - RNA, 18 nt, Artificial Sequence
  Synthetic
cuuuguuuuaaagggaag

SEQ ID NO: 302044 - RNA, 19 nt, Artificial Sequence
  Synthetic
acuuuguuuuaaagggaag

SEQ ID NO: 302045 - RNA, 20 nt, Artificial Sequence
  Synthetic
aacuuuguuuuaaagggaag

SEQ ID NO: 302046 - RNA, 21 nt, Artificial Sequence
  Synthetic
gaacuuuguuuuaaagggaag

SEQ ID NO: 302047 - RNA, 22 nt, Artificial Sequence
  Synthetic
ggaacuuuguuuuaaagggaag

SEQ ID NO: 302048 - RNA, 23 nt, Artificial Sequence
  Synthetic
uggaacuuuguuuuaaagggaag

SEQ ID NO: 302049 - RNA, 24 nt, Artificial Sequence
  Synthetic
uuggaacuuuguuuuaaagggaag

SEQ ID NO: 302050 - RNA, 18 nt, Artificial Sequence
  Synthetic
uauguuuugggagggaag

SEQ ID NO: 302051 - RNA, 19 nt, Artificial Sequence
  Synthetic
guauguuuugggagggaag

SEQ ID NO: 302052 - RNA, 20 nt, Artificial Sequence
  Synthetic
aguauguuuugggagggaag

SEQ ID NO: 302053 - RNA, 21 nt, Artificial Sequence
  Synthetic
aaguauguuuugggagggaag

SEQ ID NO: 302054 - RNA, 22 nt, Artificial Sequence
  Synthetic
aaaguauguuuugggagggaag

SEQ ID NO: 302055 - RNA, 23 nt, Artificial Sequence
  Synthetic
gaaaguauguuuugggagggaag

SEQ ID NO: 302056 - RNA, 24 nt, Artificial Sequence
  Synthetic
ggaaaguauguuuugggagggaag

SEQ ID NO: 302057 - RNA, 18 nt, Artificial Sequence
  Synthetic
gaaagagagugagggaag

SEQ ID NO: 302058 - RNA, 19 nt, Artificial Sequence
  Synthetic
agaaagagagugagggaag

SEQ ID NO: 302059 - RNA, 20 nt, Artificial Sequence
  Synthetic
aagaaagagagugagggaag

SEQ ID NO: 302060 - RNA, 21 nt, Artificial Sequence
  Synthetic
gaagaaagagagugagggaag

SEQ ID NO: 302061 - RNA, 22 nt, Artificial Sequence
  Synthetic
ggaagaaagagagugagggaag

SEQ ID NO: 302062 - RNA, 23 nt, Artificial Sequence
  Synthetic
aggaagaaagagagugagggaag

SEQ ID NO: 302063 - RNA, 24 nt, Artificial Sequence
  Synthetic
aaggaagaaagagagugagggaag

SEQ ID NO: 302064 - RNA, 18 nt, Artificial Sequence
  Synthetic
ucccagcuacucgggaag

SEQ ID NO: 302065 - RNA, 19 nt, Artificial Sequence
  Synthetic
gucccagcuacucgggaag

SEQ ID NO: 302066 - RNA, 20 nt, Artificial Sequence
  Synthetic
agucccagcuacucgggaag

SEQ ID NO: 302067 - RNA, 21 nt, Artificial Sequence
  Synthetic
uagucccagcuacucgggaag

SEQ ID NO: 302068 - RNA, 22 nt, Artificial Sequence
  Synthetic
guagucccagcuacucgggaag

SEQ ID NO: 302069 - RNA, 23 nt, Artificial Sequence
  Synthetic
uguagucccagcuacucgggaag

SEQ ID NO: 302070 - RNA, 24 nt, Artificial Sequence
  Synthetic
cuguagucccagcuacucgggaag

SEQ ID NO: 302071 - RNA, 18 nt, Artificial Sequence
  Synthetic
aguaaaaguuucgggaag

SEQ ID NO: 302072 - RNA, 19 nt, Artificial Sequence
  Synthetic
aaguaaaaguuucgggaag

SEQ ID NO: 302073 - RNA, 20 nt, Artificial Sequence
  Synthetic
gaaguaaaaguuucgggaag

SEQ ID NO: 302074 - RNA, 21 nt, Artificial Sequence
  Synthetic
ggaaguaaaaguuucgggaag

SEQ ID NO: 302075 - RNA, 22 nt, Artificial Sequence
  Synthetic
aggaaguaaaaguuucgggaag

SEQ ID NO: 302076 - RNA, 23 nt, Artificial Sequence
  Synthetic
gaggaaguaaaaguuucgggaag

SEQ ID NO: 302077 - RNA, 24 nt, Artificial Sequence
  Synthetic
agaggaaguaaaaguuucgggaag

SEQ ID NO: 302078 - RNA, 18 nt, Artificial Sequence
  Synthetic
agcaggaaaaaggggaag

SEQ ID NO: 302079 - RNA, 19 nt, Artificial Sequence
  Synthetic
aagcaggaaaaaggggaag

SEQ ID NO: 302080 - RNA, 20 nt, Artificial Sequence
  Synthetic
aaagcaggaaaaaggggaag

SEQ ID NO: 302081 - RNA, 21 nt, Artificial Sequence
  Synthetic
gaaagcaggaaaaaggggaag

SEQ ID NO: 302082 - RNA, 22 nt, Artificial Sequence
  Synthetic
ggaaagcaggaaaaaggggaag

SEQ ID NO: 302083 - RNA, 23 nt, Artificial Sequence
  Synthetic
aggaaagcaggaaaaaggggaag

SEQ ID NO: 302084 - RNA, 24 nt, Artificial Sequence
  Synthetic
aaggaaagcaggaaaaaggggaag

SEQ ID NO: 302085 - RNA, 18 nt, Artificial Sequence
  Synthetic
agaagggggaaggggaag

SEQ ID NO: 302086 - RNA, 19 nt, Artificial Sequence
  Synthetic
gagaagggggaaggggaag

SEQ ID NO: 302087 - RNA, 20 nt, Artificial Sequence
  Synthetic
ggagaagggggaaggggaag

SEQ ID NO: 302088 - RNA, 21 nt, Artificial Sequence
  Synthetic
gggagaagggggaaggggaag

SEQ ID NO: 302089 - RNA, 22 nt, Artificial Sequence
  Synthetic
ggggagaagggggaaggggaag

SEQ ID NO: 302090 - RNA, 23 nt, Artificial Sequence
  Synthetic
aggggagaagggggaaggggaag

SEQ ID NO: 302091 - RNA, 24 nt, Artificial Sequence
  Synthetic
caggggagaagggggaaggggaag

SEQ ID NO: 302092 - RNA, 18 nt, Artificial Sequence
  Synthetic
caggggagaagggggaag

SEQ ID NO: 302093 - RNA, 19 nt, Artificial Sequence
  Synthetic
ucaggggagaagggggaag

SEQ ID NO: 302094 - RNA, 20 nt, Artificial Sequence
  Synthetic
uucaggggagaagggggaag

SEQ ID NO: 302095 - RNA, 21 nt, Artificial Sequence
  Synthetic
cuucaggggagaagggggaag

SEQ ID NO: 302096 - RNA, 22 nt, Artificial Sequence
  Synthetic
gcuucaggggagaagggggaag

SEQ ID NO: 302097 - RNA, 23 nt, Artificial Sequence
  Synthetic
ugcuucaggggagaagggggaag

SEQ ID NO: 302098 - RNA, 24 nt, Artificial Sequence
  Synthetic
cugcuucaggggagaagggggaag

SEQ ID NO: 302099 - RNA, 18 nt, Artificial Sequence
  Synthetic
accaaagaaugggggaag

SEQ ID NO: 302100 - RNA, 19 nt, Artificial Sequence
  Synthetic
caccaaagaaugggggaag

SEQ ID NO: 302101 - RNA, 20 nt, Artificial Sequence
  Synthetic
ucaccaaagaaugggggaag

SEQ ID NO: 302102 - RNA, 21 nt, Artificial Sequence
  Synthetic
gucaccaaagaaugggggaag

SEQ ID NO: 302103 - RNA, 22 nt, Artificial Sequence
  Synthetic
ggucaccaaagaaugggggaag

SEQ ID NO: 302104 - RNA, 23 nt, Artificial Sequence
  Synthetic
uggucaccaaagaaugggggaag

SEQ ID NO: 302105 - RNA, 24 nt, Artificial Sequence
  Synthetic
guggucaccaaagaaugggggaag

SEQ ID NO: 302106 - RNA, 18 nt, Artificial Sequence
  Synthetic
guuguggggugggggaag

SEQ ID NO: 302107 - RNA, 19 nt, Artificial Sequence
  Synthetic
uguuguggggugggggaag

SEQ ID NO: 302108 - RNA, 20 nt, Artificial Sequence
  Synthetic
cuguuguggggugggggaag

SEQ ID NO: 302109 - RNA, 21 nt, Artificial Sequence
  Synthetic
acuguuguggggugggggaag

SEQ ID NO: 302110 - RNA, 22 nt, Artificial Sequence
  Synthetic
gacuguuguggggugggggaag

SEQ ID NO: 302111 - RNA, 23 nt, Artificial Sequence
  Synthetic
ggacuguuguggggugggggaag

SEQ ID NO: 302112 - RNA, 24 nt, Artificial Sequence
  Synthetic
gggacuguuguggggugggggaag

SEQ ID NO: 302113 - RNA, 18 nt, Artificial Sequence
  Synthetic
cagagggagaaugggaag

SEQ ID NO: 302114 - RNA, 19 nt, Artificial Sequence
  Synthetic
acagagggagaaugggaag

SEQ ID NO: 302115 - RNA, 20 nt, Artificial Sequence
  Synthetic
gacagagggagaaugggaag

SEQ ID NO: 302116 - RNA, 21 nt, Artificial Sequence
  Synthetic
ggacagagggagaaugggaag

SEQ ID NO: 302117 - RNA, 22 nt, Artificial Sequence
  Synthetic
aggacagagggagaaugggaag

SEQ ID NO: 302118 - RNA, 23 nt, Artificial Sequence
  Synthetic
aaggacagagggagaaugggaag

SEQ ID NO: 302119 - RNA, 24 nt, Artificial Sequence
  Synthetic
gaaggacagagggagaaugggaag

SEQ ID NO: 302120 - RNA, 18 nt, Artificial Sequence
  Synthetic
ucccagcuacuugggaag

SEQ ID NO: 302121 - RNA, 19 nt, Artificial Sequence
  Synthetic
gucccagcuacuugggaag

SEQ ID NO: 302122 - RNA, 20 nt, Artificial Sequence
  Synthetic
agucccagcuacuugggaag

SEQ ID NO: 302123 - RNA, 21 nt, Artificial Sequence
  Synthetic
uagucccagcuacuugggaag

SEQ ID NO: 302124 - RNA, 22 nt, Artificial Sequence
  Synthetic
guagucccagcuacuugggaag

SEQ ID NO: 302125 - RNA, 23 nt, Artificial Sequence
  Synthetic
uguagucccagcuacuugggaag

SEQ ID NO: 302126 - RNA, 24 nt, Artificial Sequence
  Synthetic
uuguagucccagcuacuugggaag

SEQ ID NO: 302127 - RNA, 18 nt, Artificial Sequence
  Synthetic
uuuguauuacuugggaag

SEQ ID NO: 302128 - RNA, 19 nt, Artificial Sequence
  Synthetic
auuuguauuacuugggaag

SEQ ID NO: 302129 - RNA, 20 nt, Artificial Sequence
  Synthetic
uauuuguauuacuugggaag

SEQ ID NO: 302130 - RNA, 21 nt, Artificial Sequence
  Synthetic
auauuuguauuacuugggaag

SEQ ID NO: 302131 - RNA, 22 nt, Artificial Sequence
  Synthetic
aauauuuguauuacuugggaag

SEQ ID NO: 302132 - RNA, 23 nt, Artificial Sequence
  Synthetic
aaauauuuguauuacuugggaag

SEQ ID NO: 302133 - RNA, 24 nt, Artificial Sequence
  Synthetic
uaaauauuuguauuacuugggaag

SEQ ID NO: 302134 - RNA, 18 nt, Artificial Sequence
  Synthetic
uugcuugagcuugggaag

SEQ ID NO: 302135 - RNA, 19 nt, Artificial Sequence
  Synthetic
auugcuugagcuugggaag

SEQ ID NO: 302136 - RNA, 20 nt, Artificial Sequence
  Synthetic
gauugcuugagcuugggaag

SEQ ID NO: 302137 - RNA, 21 nt, Artificial Sequence
  Synthetic
ggauugcuugagcuugggaag

SEQ ID NO: 302138 - RNA, 22 nt, Artificial Sequence
  Synthetic
aggauugcuugagcuugggaag

SEQ ID NO: 302139 - RNA, 23 nt, Artificial Sequence
  Synthetic
gaggauugcuugagcuugggaag

SEQ ID NO: 302140 - RNA, 24 nt, Artificial Sequence
  Synthetic
ggaggauugcuugagcuugggaag

SEQ ID NO: 302141 - RNA, 18 nt, Artificial Sequence
  Synthetic
ggagacgcauuugggaag

SEQ ID NO: 302142 - RNA, 19 nt, Artificial Sequence
  Synthetic
aggagacgcauuugggaag

SEQ ID NO: 302143 - RNA, 20 nt, Artificial Sequence
  Synthetic
aaggagacgcauuugggaag

SEQ ID NO: 302144 - RNA, 21 nt, Artificial Sequence
  Synthetic
aaaggagacgcauuugggaag

SEQ ID NO: 302145 - RNA, 22 nt, Artificial Sequence
  Synthetic
gaaaggagacgcauuugggaag

SEQ ID NO: 302146 - RNA, 23 nt, Artificial Sequence
  Synthetic
ggaaaggagacgcauuugggaag

SEQ ID NO: 302147 - RNA, 24 nt, Artificial Sequence
  Synthetic
gggaaaggagacgcauuugggaag

SEQ ID NO: 302148 - RNA, 18 nt, Artificial Sequence
  Synthetic
ucccaaggauuugggaag

SEQ ID NO: 302149 - RNA, 19 nt, Artificial Sequence
  Synthetic
aucccaaggauuugggaag

SEQ ID NO: 302150 - RNA, 20 nt, Artificial Sequence
  Synthetic
aaucccaaggauuugggaag

SEQ ID NO: 302151 - RNA, 21 nt, Artificial Sequence
  Synthetic
uaaucccaaggauuugggaag

SEQ ID NO: 302152 - RNA, 22 nt, Artificial Sequence
  Synthetic
guaaucccaaggauuugggaag

SEQ ID NO: 302153 - RNA, 23 nt, Artificial Sequence
  Synthetic
uguaaucccaaggauuugggaag

SEQ ID NO: 302154 - RNA, 24 nt, Artificial Sequence
  Synthetic
cuguaaucccaaggauuugggaag

SEQ ID NO: 302155 - RNA, 21 nt, Artificial Sequence
  Synthetic
uaaucccagcacuuugggaag

SEQ ID NO: 302156 - RNA, 22 nt, Artificial Sequence
  Synthetic
auaaucccagcacuuugggaag

SEQ ID NO: 302157 - RNA, 23 nt, Artificial Sequence
  Synthetic
uauaaucccagcacuuugggaag

SEQ ID NO: 302158 - RNA, 24 nt, Artificial Sequence
  Synthetic
cuauaaucccagcacuuugggaag

SEQ ID NO: 302159 - RNA, 22 nt, Artificial Sequence
  Synthetic
guaaucccagcacuuugggaag

SEQ ID NO: 302160 - RNA, 23 nt, Artificial Sequence
  Synthetic
uguaaucccagcacuuugggaag

SEQ ID NO: 302161 - RNA, 24 nt, Artificial Sequence
  Synthetic
cuguaaucccagcacuuugggaag

SEQ ID NO: 302162 - RNA, 18 nt, Artificial Sequence
  Synthetic
uauaagugaaaauggaag

SEQ ID NO: 302163 - RNA, 19 nt, Artificial Sequence
  Synthetic
auauaagugaaaauggaag

SEQ ID NO: 302164 - RNA, 20 nt, Artificial Sequence
  Synthetic
cauauaagugaaaauggaag

SEQ ID NO: 302165 - RNA, 21 nt, Artificial Sequence
  Synthetic
ucauauaagugaaaauggaag

SEQ ID NO: 302166 - RNA, 22 nt, Artificial Sequence
  Synthetic
uucauauaagugaaaauggaag

SEQ ID NO: 302167 - RNA, 23 nt, Artificial Sequence
  Synthetic
guucauauaagugaaaauggaag

SEQ ID NO: 302168 - RNA, 24 nt, Artificial Sequence
  Synthetic
gguucauauaagugaaaauggaag

SEQ ID NO: 302169 - RNA, 18 nt, Artificial Sequence
  Synthetic
ugacaaauaaaauggaag

SEQ ID NO: 302170 - RNA, 19 nt, Artificial Sequence
  Synthetic
augacaaauaaaauggaag

SEQ ID NO: 302171 - RNA, 20 nt, Artificial Sequence
  Synthetic
aaugacaaauaaaauggaag

SEQ ID NO: 302172 - RNA, 21 nt, Artificial Sequence
  Synthetic
aaaugacaaauaaaauggaag

SEQ ID NO: 302173 - RNA, 22 nt, Artificial Sequence
  Synthetic
aaaaugacaaauaaaauggaag

SEQ ID NO: 302174 - RNA, 23 nt, Artificial Sequence
  Synthetic
uaaaaugacaaauaaaauggaag

SEQ ID NO: 302175 - RNA, 24 nt, Artificial Sequence
  Synthetic
auaaaaugacaaauaaaauggaag

SEQ ID NO: 302176 - RNA, 18 nt, Artificial Sequence
  Synthetic
uguacuuuaaaauggaag

SEQ ID NO: 302177 - RNA, 19 nt, Artificial Sequence
  Synthetic
cuguacuuuaaaauggaag

SEQ ID NO: 302178 - RNA, 20 nt, Artificial Sequence
  Synthetic
ucuguacuuuaaaauggaag

SEQ ID NO: 302179 - RNA, 21 nt, Artificial Sequence
  Synthetic
gucuguacuuuaaaauggaag

SEQ ID NO: 302180 - RNA, 22 nt, Artificial Sequence
  Synthetic
ugucuguacuuuaaaauggaag

SEQ ID NO: 302181 - RNA, 23 nt, Artificial Sequence
  Synthetic
augucuguacuuuaaaauggaag

SEQ ID NO: 302182 - RNA, 24 nt, Artificial Sequence
  Synthetic
uaugucuguacuuuaaaauggaag

SEQ ID NO: 302183 - RNA, 18 nt, Artificial Sequence
  Synthetic
uugagauggcaauggaag

SEQ ID NO: 302184 - RNA, 19 nt, Artificial Sequence
  Synthetic
cuugagauggcaauggaag

SEQ ID NO: 302185 - RNA, 20 nt, Artificial Sequence
  Synthetic
ccuugagauggcaauggaag

SEQ ID NO: 302186 - RNA, 21 nt, Artificial Sequence
  Synthetic
gccuugagauggcaauggaag

SEQ ID NO: 302187 - RNA, 22 nt, Artificial Sequence
  Synthetic
agccuugagauggcaauggaag

SEQ ID NO: 302188 - RNA, 23 nt, Artificial Sequence
  Synthetic
aagccuugagauggcaauggaag

SEQ ID NO: 302189 - RNA, 24 nt, Artificial Sequence
  Synthetic
caagccuugagauggcaauggaag

SEQ ID NO: 302190 - RNA, 18 nt, Artificial Sequence
  Synthetic
agguagugucaauggaag

SEQ ID NO: 302191 - RNA, 19 nt, Artificial Sequence
  Synthetic
aagguagugucaauggaag

SEQ ID NO: 302192 - RNA, 20 nt, Artificial Sequence
  Synthetic
uaagguagugucaauggaag

SEQ ID NO: 302193 - RNA, 21 nt, Artificial Sequence
  Synthetic
uuaagguagugucaauggaag

SEQ ID NO: 302194 - RNA, 22 nt, Artificial Sequence
  Synthetic
auuaagguagugucaauggaag

SEQ ID NO: 302195 - RNA, 23 nt, Artificial Sequence
  Synthetic
aauuaagguagugucaauggaag

SEQ ID NO: 302196 - RNA, 24 nt, Artificial Sequence
  Synthetic
aaauuaagguagugucaauggaag

SEQ ID NO: 302197 - RNA, 18 nt, Artificial Sequence
  Synthetic
augauuccaugauggaag

SEQ ID NO: 302198 - RNA, 19 nt, Artificial Sequence
  Synthetic
caugauuccaugauggaag

SEQ ID NO: 302199 - RNA, 20 nt, Artificial Sequence
  Synthetic
ucaugauuccaugauggaag

SEQ ID NO: 302200 - RNA, 21 nt, Artificial Sequence
  Synthetic
gucaugauuccaugauggaag

SEQ ID NO: 302201 - RNA, 22 nt, Artificial Sequence
  Synthetic
ugucaugauuccaugauggaag

SEQ ID NO: 302202 - RNA, 23 nt, Artificial Sequence
  Synthetic
gugucaugauuccaugauggaag

SEQ ID NO: 302203 - RNA, 24 nt, Artificial Sequence
  Synthetic
ugugucaugauuccaugauggaag

SEQ ID NO: 302204 - RNA, 18 nt, Artificial Sequence
  Synthetic
aagucagcccccuggaag

SEQ ID NO: 302205 - RNA, 19 nt, Artificial Sequence
  Synthetic
caagucagcccccuggaag

SEQ ID NO: 302206 - RNA, 20 nt, Artificial Sequence
  Synthetic
ccaagucagcccccuggaag

SEQ ID NO: 302207 - RNA, 21 nt, Artificial Sequence
  Synthetic
uccaagucagcccccuggaag

SEQ ID NO: 302208 - RNA, 22 nt, Artificial Sequence
  Synthetic
auccaagucagcccccuggaag

SEQ ID NO: 302209 - RNA, 23 nt, Artificial Sequence
  Synthetic
aauccaagucagcccccuggaag

SEQ ID NO: 302210 - RNA, 24 nt, Artificial Sequence
  Synthetic
uaauccaagucagcccccuggaag

SEQ ID NO: 302211 - RNA, 18 nt, Artificial Sequence
  Synthetic
cagcuaucaagcuggaag

SEQ ID NO: 302212 - RNA, 19 nt, Artificial Sequence
  Synthetic
ccagcuaucaagcuggaag

SEQ ID NO: 302213 - RNA, 20 nt, Artificial Sequence
  Synthetic
accagcuaucaagcuggaag

SEQ ID NO: 302214 - RNA, 21 nt, Artificial Sequence
  Synthetic
uaccagcuaucaagcuggaag

SEQ ID NO: 302215 - RNA, 22 nt, Artificial Sequence
  Synthetic
auaccagcuaucaagcuggaag

SEQ ID NO: 302216 - RNA, 23 nt, Artificial Sequence
  Synthetic
cauaccagcuaucaagcuggaag

SEQ ID NO: 302217 - RNA, 24 nt, Artificial Sequence
  Synthetic
gcauaccagcuaucaagcuggaag

SEQ ID NO: 302218 - RNA, 18 nt, Artificial Sequence
  Synthetic
ugcagagcaggcuggaag

SEQ ID NO: 302219 - RNA, 19 nt, Artificial Sequence
  Synthetic
uugcagagcaggcuggaag

SEQ ID NO: 302220 - RNA, 20 nt, Artificial Sequence
  Synthetic
cuugcagagcaggcuggaag

SEQ ID NO: 302221 - RNA, 21 nt, Artificial Sequence
  Synthetic
acuugcagagcaggcuggaag

SEQ ID NO: 302222 - RNA, 22 nt, Artificial Sequence
  Synthetic
cacuugcagagcaggcuggaag

SEQ ID NO: 302223 - RNA, 23 nt, Artificial Sequence
  Synthetic
ccacuugcagagcaggcuggaag

SEQ ID NO: 302224 - RNA, 24 nt, Artificial Sequence
  Synthetic
cccacuugcagagcaggcuggaag

SEQ ID NO: 302225 - RNA, 18 nt, Artificial Sequence
  Synthetic
uuucuucaccucuggaag

SEQ ID NO: 302226 - RNA, 19 nt, Artificial Sequence
  Synthetic
guuucuucaccucuggaag

SEQ ID NO: 302227 - RNA, 20 nt, Artificial Sequence
  Synthetic
uguuucuucaccucuggaag

SEQ ID NO: 302228 - RNA, 21 nt, Artificial Sequence
  Synthetic
cuguuucuucaccucuggaag

SEQ ID NO: 302229 - RNA, 22 nt, Artificial Sequence
  Synthetic
ccuguuucuucaccucuggaag

SEQ ID NO: 302230 - RNA, 23 nt, Artificial Sequence
  Synthetic
gccuguuucuucaccucuggaag

SEQ ID NO: 302231 - RNA, 24 nt, Artificial Sequence
  Synthetic
ggccuguuucuucaccucuggaag

SEQ ID NO: 302232 - RNA, 18 nt, Artificial Sequence
  Synthetic
aguuacuuucucuggaag

SEQ ID NO: 302233 - RNA, 19 nt, Artificial Sequence
  Synthetic
uaguuacuuucucuggaag

SEQ ID NO: 302234 - RNA, 20 nt, Artificial Sequence
  Synthetic
cuaguuacuuucucuggaag

SEQ ID NO: 302235 - RNA, 21 nt, Artificial Sequence
  Synthetic
acuaguuacuuucucuggaag

SEQ ID NO: 302236 - RNA, 22 nt, Artificial Sequence
  Synthetic
uacuaguuacuuucucuggaag

SEQ ID NO: 302237 - RNA, 23 nt, Artificial Sequence
  Synthetic
uuacuaguuacuuucucuggaag

SEQ ID NO: 302238 - RNA, 24 nt, Artificial Sequence
  Synthetic
uuuacuaguuacuuucucuggaag

SEQ ID NO: 302239 - RNA, 18 nt, Artificial Sequence
  Synthetic
augaguuuucucuggaag

SEQ ID NO: 302240 - RNA, 19 nt, Artificial Sequence
  Synthetic
caugaguuuucucuggaag

SEQ ID NO: 302241 - RNA, 20 nt, Artificial Sequence
  Synthetic
ccaugaguuuucucuggaag

SEQ ID NO: 302242 - RNA, 21 nt, Artificial Sequence
  Synthetic
gccaugaguuuucucuggaag

SEQ ID NO: 302243 - RNA, 22 nt, Artificial Sequence
  Synthetic
ugccaugaguuuucucuggaag

SEQ ID NO: 302244 - RNA, 23 nt, Artificial Sequence
  Synthetic
uugccaugaguuuucucuggaag

SEQ ID NO: 302245 - RNA, 24 nt, Artificial Sequence
  Synthetic
uuugccaugaguuuucucuggaag

SEQ ID NO: 302246 - RNA, 18 nt, Artificial Sequence
  Synthetic
gaaacacuggucuggaag

SEQ ID NO: 302247 - RNA, 19 nt, Artificial Sequence
  Synthetic
ggaaacacuggucuggaag

SEQ ID NO: 302248 - RNA, 20 nt, Artificial Sequence
  Synthetic
gggaaacacuggucuggaag

SEQ ID NO: 302249 - RNA, 21 nt, Artificial Sequence
  Synthetic
ugggaaacacuggucuggaag

SEQ ID NO: 302250 - RNA, 22 nt, Artificial Sequence
  Synthetic
uugggaaacacuggucuggaag

SEQ ID NO: 302251 - RNA, 23 nt, Artificial Sequence
  Synthetic
guugggaaacacuggucuggaag

SEQ ID NO: 302252 - RNA, 24 nt, Artificial Sequence
  Synthetic
gguugggaaacacuggucuggaag

SEQ ID NO: 302253 - RNA, 18 nt, Artificial Sequence
  Synthetic
aauacagcacaguggaag

SEQ ID NO: 302254 - RNA, 19 nt, Artificial Sequence
  Synthetic
aaauacagcacaguggaag

SEQ ID NO: 302255 - RNA, 20 nt, Artificial Sequence
  Synthetic
uaaauacagcacaguggaag

SEQ ID NO: 302256 - RNA, 21 nt, Artificial Sequence
  Synthetic
cuaaauacagcacaguggaag

SEQ ID NO: 302257 - RNA, 22 nt, Artificial Sequence
  Synthetic
ucuaaauacagcacaguggaag

SEQ ID NO: 302258 - RNA, 23 nt, Artificial Sequence
  Synthetic
cucuaaauacagcacaguggaag

SEQ ID NO: 302259 - RNA, 24 nt, Artificial Sequence
  Synthetic
acucuaaauacagcacaguggaag

SEQ ID NO: 302260 - RNA, 18 nt, Artificial Sequence
  Synthetic
cucuuccuacaguggaag

SEQ ID NO: 302261 - RNA, 19 nt, Artificial Sequence
  Synthetic
acucuuccuacaguggaag

SEQ ID NO: 302262 - RNA, 20 nt, Artificial Sequence
  Synthetic
gacucuuccuacaguggaag

SEQ ID NO: 302263 - RNA, 21 nt, Artificial Sequence
  Synthetic
agacucuuccuacaguggaag

SEQ ID NO: 302264 - RNA, 22 nt, Artificial Sequence
  Synthetic
uagacucuuccuacaguggaag

SEQ ID NO: 302265 - RNA, 23 nt, Artificial Sequence
  Synthetic
guagacucuuccuacaguggaag

SEQ ID NO: 302266 - RNA, 24 nt, Artificial Sequence
  Synthetic
aguagacucuuccuacaguggaag

SEQ ID NO: 302267 - RNA, 18 nt, Artificial Sequence
  Synthetic
uuuuacucauaguggaag

SEQ ID NO: 302268 - RNA, 19 nt, Artificial Sequence
  Synthetic
cuuuuacucauaguggaag

SEQ ID NO: 302269 - RNA, 20 nt, Artificial Sequence
  Synthetic
gcuuuuacucauaguggaag

SEQ ID NO: 302270 - RNA, 21 nt, Artificial Sequence
  Synthetic
agcuuuuacucauaguggaag

SEQ ID NO: 302271 - RNA, 22 nt, Artificial Sequence
  Synthetic
gagcuuuuacucauaguggaag

SEQ ID NO: 302272 - RNA, 23 nt, Artificial Sequence
  Synthetic
ggagcuuuuacucauaguggaag

SEQ ID NO: 302273 - RNA, 24 nt, Artificial Sequence
  Synthetic
gggagcuuuuacucauaguggaag

SEQ ID NO: 302274 - RNA, 18 nt, Artificial Sequence
  Synthetic
ugcuuucacucguggaag

SEQ ID NO: 302275 - RNA, 19 nt, Artificial Sequence
  Synthetic
cugcuuucacucguggaag

SEQ ID NO: 302276 - RNA, 20 nt, Artificial Sequence
  Synthetic
ucugcuuucacucguggaag

SEQ ID NO: 302277 - RNA, 21 nt, Artificial Sequence
  Synthetic
aucugcuuucacucguggaag

SEQ ID NO: 302278 - RNA, 22 nt, Artificial Sequence
  Synthetic
aaucugcuuucacucguggaag

SEQ ID NO: 302279 - RNA, 23 nt, Artificial Sequence
  Synthetic
gaaucugcuuucacucguggaag

SEQ ID NO: 302280 - RNA, 24 nt, Artificial Sequence
  Synthetic
ugaaucugcuuucacucguggaag

SEQ ID NO: 302281 - RNA, 18 nt, Artificial Sequence
  Synthetic
ggcaccagaagguggaag

SEQ ID NO: 302282 - RNA, 19 nt, Artificial Sequence
  Synthetic
gggcaccagaagguggaag

SEQ ID NO: 302283 - RNA, 20 nt, Artificial Sequence
  Synthetic
ugggcaccagaagguggaag

SEQ ID NO: 302284 - RNA, 21 nt, Artificial Sequence
  Synthetic
augggcaccagaagguggaag

SEQ ID NO: 302285 - RNA, 22 nt, Artificial Sequence
  Synthetic
uaugggcaccagaagguggaag

SEQ ID NO: 302286 - RNA, 23 nt, Artificial Sequence
  Synthetic
auaugggcaccagaagguggaag

SEQ ID NO: 302287 - RNA, 24 nt, Artificial Sequence
  Synthetic
aauaugggcaccagaagguggaag

SEQ ID NO: 302288 - RNA, 18 nt, Artificial Sequence
  Synthetic
ucacaaucaugguggaag

SEQ ID NO: 302289 - RNA, 19 nt, Artificial Sequence
  Synthetic
cucacaaucaugguggaag

SEQ ID NO: 302290 - RNA, 20 nt, Artificial Sequence
  Synthetic
ccucacaaucaugguggaag

SEQ ID NO: 302291 - RNA, 21 nt, Artificial Sequence
  Synthetic
gccucacaaucaugguggaag

SEQ ID NO: 302292 - RNA, 22 nt, Artificial Sequence
  Synthetic
ggccucacaaucaugguggaag

SEQ ID NO: 302293 - RNA, 23 nt, Artificial Sequence
  Synthetic
aggccucacaaucaugguggaag

SEQ ID NO: 302294 - RNA, 24 nt, Artificial Sequence
  Synthetic
gaggccucacaaucaugguggaag

SEQ ID NO: 302295 - RNA, 18 nt, Artificial Sequence
  Synthetic
cacuuauggauguggaag

SEQ ID NO: 302296 - RNA, 19 nt, Artificial Sequence
  Synthetic
ccacuuauggauguggaag

SEQ ID NO: 302297 - RNA, 20 nt, Artificial Sequence
  Synthetic
uccacuuauggauguggaag

SEQ ID NO: 302298 - RNA, 21 nt, Artificial Sequence
  Synthetic
uuccacuuauggauguggaag

SEQ ID NO: 302299 - RNA, 22 nt, Artificial Sequence
  Synthetic
auuccacuuauggauguggaag

SEQ ID NO: 302300 - RNA, 23 nt, Artificial Sequence
  Synthetic
aauuccacuuauggauguggaag

SEQ ID NO: 302301 - RNA, 24 nt, Artificial Sequence
  Synthetic
uaauuccacuuauggauguggaag

SEQ ID NO: 302302 - RNA, 18 nt, Artificial Sequence
  Synthetic
uuacaaucacuguggaag

SEQ ID NO: 302303 - RNA, 19 nt, Artificial Sequence
  Synthetic
cuuacaaucacuguggaag

SEQ ID NO: 302304 - RNA, 20 nt, Artificial Sequence
  Synthetic
acuuacaaucacuguggaag

SEQ ID NO: 302305 - RNA, 21 nt, Artificial Sequence
  Synthetic
aacuuacaaucacuguggaag

SEQ ID NO: 302306 - RNA, 22 nt, Artificial Sequence
  Synthetic
aaacuuacaaucacuguggaag

SEQ ID NO: 302307 - RNA, 23 nt, Artificial Sequence
  Synthetic
gaaacuuacaaucacuguggaag

SEQ ID NO: 302308 - RNA, 24 nt, Artificial Sequence
  Synthetic
ggaaacuuacaaucacuguggaag

SEQ ID NO: 302309 - RNA, 18 nt, Artificial Sequence
  Synthetic
uuaaaugccuuguggaag

SEQ ID NO: 302310 - RNA, 19 nt, Artificial Sequence
  Synthetic
uuuaaaugccuuguggaag

SEQ ID NO: 302311 - RNA, 20 nt, Artificial Sequence
  Synthetic
guuuaaaugccuuguggaag

SEQ ID NO: 302312 - RNA, 21 nt, Artificial Sequence
  Synthetic
uguuuaaaugccuuguggaag

SEQ ID NO: 302313 - RNA, 22 nt, Artificial Sequence
  Synthetic
cuguuuaaaugccuuguggaag

SEQ ID NO: 302314 - RNA, 23 nt, Artificial Sequence
  Synthetic
ccuguuuaaaugccuuguggaag

SEQ ID NO: 302315 - RNA, 24 nt, Artificial Sequence
  Synthetic
cccuguuuaaaugccuuguggaag

SEQ ID NO: 302316 - RNA, 18 nt, Artificial Sequence
  Synthetic
aagacaagaaauuggaag

SEQ ID NO: 302317 - RNA, 19 nt, Artificial Sequence
  Synthetic
uaagacaagaaauuggaag

SEQ ID NO: 302318 - RNA, 20 nt, Artificial Sequence
  Synthetic
guaagacaagaaauuggaag

SEQ ID NO: 302319 - RNA, 21 nt, Artificial Sequence
  Synthetic
uguaagacaagaaauuggaag

SEQ ID NO: 302320 - RNA, 22 nt, Artificial Sequence
  Synthetic
auguaagacaagaaauuggaag

SEQ ID NO: 302321 - RNA, 23 nt, Artificial Sequence
  Synthetic
aauguaagacaagaaauuggaag

SEQ ID NO: 302322 - RNA, 24 nt, Artificial Sequence
  Synthetic
gaauguaagacaagaaauuggaag

SEQ ID NO: 302323 - RNA, 18 nt, Artificial Sequence
  Synthetic
agcuuauauucuuggaag

SEQ ID NO: 302324 - RNA, 19 nt, Artificial Sequence
  Synthetic
aagcuuauauucuuggaag

SEQ ID NO: 302325 - RNA, 20 nt, Artificial Sequence
  Synthetic
aaagcuuauauucuuggaag

SEQ ID NO: 302326 - RNA, 21 nt, Artificial Sequence
  Synthetic
uaaagcuuauauucuuggaag

SEQ ID NO: 302327 - RNA, 22 nt, Artificial Sequence
  Synthetic
auaaagcuuauauucuuggaag

SEQ ID NO: 302328 - RNA, 23 nt, Artificial Sequence
  Synthetic
cauaaagcuuauauucuuggaag

SEQ ID NO: 302329 - RNA, 24 nt, Artificial Sequence
  Synthetic
ucauaaagcuuauauucuuggaag

SEQ ID NO: 302330 - RNA, 18 nt, Artificial Sequence
  Synthetic
ucugaacguguuuggaag

SEQ ID NO: 302331 - RNA, 19 nt, Artificial Sequence
  Synthetic
uucugaacguguuuggaag

SEQ ID NO: 302332 - RNA, 20 nt, Artificial Sequence
  Synthetic
auucugaacguguuuggaag

SEQ ID NO: 302333 - RNA, 21 nt, Artificial Sequence
  Synthetic
uauucugaacguguuuggaag

SEQ ID NO: 302334 - RNA, 22 nt, Artificial Sequence
  Synthetic
auauucugaacguguuuggaag

SEQ ID NO: 302335 - RNA, 23 nt, Artificial Sequence
  Synthetic
cauauucugaacguguuuggaag

SEQ ID NO: 302336 - RNA, 24 nt, Artificial Sequence
  Synthetic
ucauauucugaacguguuuggaag

SEQ ID NO: 302337 - RNA, 18 nt, Artificial Sequence
  Synthetic
auaacuagauuuuggaag

SEQ ID NO: 302338 - RNA, 19 nt, Artificial Sequence
  Synthetic
aauaacuagauuuuggaag

SEQ ID NO: 302339 - RNA, 20 nt, Artificial Sequence
  Synthetic
gaauaacuagauuuuggaag

SEQ ID NO: 302340 - RNA, 21 nt, Artificial Sequence
  Synthetic
agaauaacuagauuuuggaag

SEQ ID NO: 302341 - RNA, 22 nt, Artificial Sequence
  Synthetic
cagaauaacuagauuuuggaag

SEQ ID NO: 302342 - RNA, 23 nt, Artificial Sequence
  Synthetic
acagaauaacuagauuuuggaag

SEQ ID NO: 302343 - RNA, 24 nt, Artificial Sequence
  Synthetic
cacagaauaacuagauuuuggaag

SEQ ID NO: 302344 - RNA, 18 nt, Artificial Sequence
  Synthetic
ucauggcagaaaaugaag

SEQ ID NO: 302345 - RNA, 19 nt, Artificial Sequence
  Synthetic
aucauggcagaaaaugaag

SEQ ID NO: 302346 - RNA, 20 nt, Artificial Sequence
  Synthetic
aaucauggcagaaaaugaag

SEQ ID NO: 302347 - RNA, 21 nt, Artificial Sequence
  Synthetic
aaaucauggcagaaaaugaag

SEQ ID NO: 302348 - RNA, 22 nt, Artificial Sequence
  Synthetic
aaaaucauggcagaaaaugaag

SEQ ID NO: 302349 - RNA, 23 nt, Artificial Sequence
  Synthetic
uaaaaucauggcagaaaaugaag

SEQ ID NO: 302350 - RNA, 24 nt, Artificial Sequence
  Synthetic
uuaaaaucauggcagaaaaugaag

SEQ ID NO: 302351 - RNA, 18 nt, Artificial Sequence
  Synthetic
uucaacaaguuaaugaag

SEQ ID NO: 302352 - RNA, 19 nt, Artificial Sequence
  Synthetic
auucaacaaguuaaugaag

SEQ ID NO: 302353 - RNA, 20 nt, Artificial Sequence
  Synthetic
aauucaacaaguuaaugaag

SEQ ID NO: 302354 - RNA, 21 nt, Artificial Sequence
  Synthetic
caauucaacaaguuaaugaag

SEQ ID NO: 302355 - RNA, 22 nt, Artificial Sequence
  Synthetic
acaauucaacaaguuaaugaag

SEQ ID NO: 302356 - RNA, 23 nt, Artificial Sequence
  Synthetic
aacaauucaacaaguuaaugaag

SEQ ID NO: 302357 - RNA, 24 nt, Artificial Sequence
  Synthetic
aaacaauucaacaaguuaaugaag

SEQ ID NO: 302358 - RNA, 18 nt, Artificial Sequence
  Synthetic
uguccuguguuaaugaag

SEQ ID NO: 302359 - RNA, 19 nt, Artificial Sequence
  Synthetic
auguccuguguuaaugaag

SEQ ID NO: 302360 - RNA, 20 nt, Artificial Sequence
  Synthetic
aauguccuguguuaaugaag

SEQ ID NO: 302361 - RNA, 21 nt, Artificial Sequence
  Synthetic
uaauguccuguguuaaugaag

SEQ ID NO: 302362 - RNA, 22 nt, Artificial Sequence
  Synthetic
auaauguccuguguuaaugaag

SEQ ID NO: 302363 - RNA, 23 nt, Artificial Sequence
  Synthetic
uauaauguccuguguuaaugaag

SEQ ID NO: 302364 - RNA, 24 nt, Artificial Sequence
  Synthetic
uuauaauguccuguguuaaugaag

SEQ ID NO: 302365 - RNA, 18 nt, Artificial Sequence
  Synthetic
gauuacauaaccaugaag

SEQ ID NO: 302366 - RNA, 19 nt, Artificial Sequence
  Synthetic
ggauuacauaaccaugaag

SEQ ID NO: 302367 - RNA, 20 nt, Artificial Sequence
  Synthetic
gggauuacauaaccaugaag

SEQ ID NO: 302368 - RNA, 21 nt, Artificial Sequence
  Synthetic
ugggauuacauaaccaugaag

SEQ ID NO: 302369 - RNA, 22 nt, Artificial Sequence
  Synthetic
augggauuacauaaccaugaag

SEQ ID NO: 302370 - RNA, 23 nt, Artificial Sequence
  Synthetic
uaugggauuacauaaccaugaag

SEQ ID NO: 302371 - RNA, 24 nt, Artificial Sequence
  Synthetic
uuaugggauuacauaaccaugaag

SEQ ID NO: 302372 - RNA, 18 nt, Artificial Sequence
  Synthetic
aucuuugugcucaugaag

SEQ ID NO: 302373 - RNA, 19 nt, Artificial Sequence
  Synthetic
uaucuuugugcucaugaag

SEQ ID NO: 302374 - RNA, 20 nt, Artificial Sequence
  Synthetic
uuaucuuugugcucaugaag

SEQ ID NO: 302375 - RNA, 21 nt, Artificial Sequence
  Synthetic
cuuaucuuugugcucaugaag

SEQ ID NO: 302376 - RNA, 22 nt, Artificial Sequence
  Synthetic
acuuaucuuugugcucaugaag

SEQ ID NO: 302377 - RNA, 23 nt, Artificial Sequence
  Synthetic
aacuuaucuuugugcucaugaag

SEQ ID NO: 302378 - RNA, 24 nt, Artificial Sequence
  Synthetic
caacuuaucuuugugcucaugaag

SEQ ID NO: 302379 - RNA, 18 nt, Artificial Sequence
  Synthetic
guaaggacauggaugaag

SEQ ID NO: 302380 - RNA, 19 nt, Artificial Sequence
  Synthetic
uguaaggacauggaugaag

SEQ ID NO: 302381 - RNA, 20 nt, Artificial Sequence
  Synthetic
uuguaaggacauggaugaag

SEQ ID NO: 302382 - RNA, 21 nt, Artificial Sequence
  Synthetic
uuuguaaggacauggaugaag

SEQ ID NO: 302383 - RNA, 22 nt, Artificial Sequence
  Synthetic
cuuuguaaggacauggaugaag

SEQ ID NO: 302384 - RNA, 23 nt, Artificial Sequence
  Synthetic
ccuuuguaaggacauggaugaag

SEQ ID NO: 302385 - RNA, 24 nt, Artificial Sequence
  Synthetic
uccuuuguaaggacauggaugaag

SEQ ID NO: 302386 - RNA, 18 nt, Artificial Sequence
  Synthetic
gcagggacauggaugaag

SEQ ID NO: 302387 - RNA, 19 nt, Artificial Sequence
  Synthetic
ggcagggacauggaugaag

SEQ ID NO: 302388 - RNA, 20 nt, Artificial Sequence
  Synthetic
uggcagggacauggaugaag

SEQ ID NO: 302389 - RNA, 21 nt, Artificial Sequence
  Synthetic
uuggcagggacauggaugaag

SEQ ID NO: 302390 - RNA, 22 nt, Artificial Sequence
  Synthetic
cuuggcagggacauggaugaag

SEQ ID NO: 302391 - RNA, 23 nt, Artificial Sequence
  Synthetic
ccuuggcagggacauggaugaag

SEQ ID NO: 302392 - RNA, 24 nt, Artificial Sequence
  Synthetic
uccuuggcagggacauggaugaag

SEQ ID NO: 302393 - RNA, 18 nt, Artificial Sequence
  Synthetic
guagggacauggaugaag

SEQ ID NO: 302394 - RNA, 19 nt, Artificial Sequence
  Synthetic
uguagggacauggaugaag

SEQ ID NO: 302395 - RNA, 20 nt, Artificial Sequence
  Synthetic
uuguagggacauggaugaag

SEQ ID NO: 302396 - RNA, 18 nt, Artificial Sequence
  Synthetic
guagggacguggaugaag

SEQ ID NO: 302397 - RNA, 19 nt, Artificial Sequence
  Synthetic
uguagggacguggaugaag

SEQ ID NO: 302398 - RNA, 20 nt, Artificial Sequence
  Synthetic
uuguagggacguggaugaag

SEQ ID NO: 302399 - RNA, 21 nt, Artificial Sequence
  Synthetic
uuuguagggacguggaugaag

SEQ ID NO: 302400 - RNA, 22 nt, Artificial Sequence
  Synthetic
cuuuguagggacguggaugaag

SEQ ID NO: 302401 - RNA, 23 nt, Artificial Sequence
  Synthetic
ccuuuguagggacguggaugaag

SEQ ID NO: 302402 - RNA, 24 nt, Artificial Sequence
  Synthetic
uccuuuguagggacguggaugaag

SEQ ID NO: 302403 - RNA, 18 nt, Artificial Sequence
  Synthetic
auauauuaagugaugaag

SEQ ID NO: 302404 - RNA, 19 nt, Artificial Sequence
  Synthetic
aauauauuaagugaugaag

SEQ ID NO: 302405 - RNA, 20 nt, Artificial Sequence
  Synthetic
aaauauauuaagugaugaag

SEQ ID NO: 302406 - RNA, 21 nt, Artificial Sequence
  Synthetic
uaaauauauuaagugaugaag

SEQ ID NO: 302407 - RNA, 22 nt, Artificial Sequence
  Synthetic
uuaaauauauuaagugaugaag

SEQ ID NO: 302408 - RNA, 23 nt, Artificial Sequence
  Synthetic
cuuaaauauauuaagugaugaag

SEQ ID NO: 302409 - RNA, 24 nt, Artificial Sequence
  Synthetic
ccuuaaauauauuaagugaugaag

SEQ ID NO: 302410 - RNA, 18 nt, Artificial Sequence
  Synthetic
uccaaggucauuaugaag

SEQ ID NO: 302411 - RNA, 19 nt, Artificial Sequence
  Synthetic
uuccaaggucauuaugaag

SEQ ID NO: 302412 - RNA, 20 nt, Artificial Sequence
  Synthetic
uuuccaaggucauuaugaag

SEQ ID NO: 302413 - RNA, 21 nt, Artificial Sequence
  Synthetic
auuuccaaggucauuaugaag

SEQ ID NO: 302414 - RNA, 22 nt, Artificial Sequence
  Synthetic
cauuuccaaggucauuaugaag

SEQ ID NO: 302415 - RNA, 23 nt, Artificial Sequence
  Synthetic
acauuuccaaggucauuaugaag

SEQ ID NO: 302416 - RNA, 24 nt, Artificial Sequence
  Synthetic
uacauuuccaaggucauuaugaag

SEQ ID NO: 302417 - RNA, 18 nt, Artificial Sequence
  Synthetic
aauacaauuuuuaugaag

SEQ ID NO: 302418 - RNA, 19 nt, Artificial Sequence
  Synthetic
caauacaauuuuuaugaag

SEQ ID NO: 302419 - RNA, 20 nt, Artificial Sequence
  Synthetic
ccaauacaauuuuuaugaag

SEQ ID NO: 302420 - RNA, 21 nt, Artificial Sequence
  Synthetic
gccaauacaauuuuuaugaag

SEQ ID NO: 302421 - RNA, 22 nt, Artificial Sequence
  Synthetic
ugccaauacaauuuuuaugaag

SEQ ID NO: 302422 - RNA, 23 nt, Artificial Sequence
  Synthetic
gugccaauacaauuuuuaugaag

SEQ ID NO: 302423 - RNA, 24 nt, Artificial Sequence
  Synthetic
ugugccaauacaauuuuuaugaag

SEQ ID NO: 302424 - RNA, 18 nt, Artificial Sequence
  Synthetic
auccaguaaagacugaag

SEQ ID NO: 302425 - RNA, 19 nt, Artificial Sequence
  Synthetic
cauccaguaaagacugaag

SEQ ID NO: 302426 - RNA, 20 nt, Artificial Sequence
  Synthetic
acauccaguaaagacugaag

SEQ ID NO: 302427 - RNA, 21 nt, Artificial Sequence
  Synthetic
aacauccaguaaagacugaag

SEQ ID NO: 302428 - RNA, 22 nt, Artificial Sequence
  Synthetic
aaacauccaguaaagacugaag

SEQ ID NO: 302429 - RNA, 23 nt, Artificial Sequence
  Synthetic
aaaacauccaguaaagacugaag

SEQ ID NO: 302430 - RNA, 24 nt, Artificial Sequence
  Synthetic
uaaaacauccaguaaagacugaag

SEQ ID NO: 302431 - RNA, 18 nt, Artificial Sequence
  Synthetic
uucccugaaggacugaag

SEQ ID NO: 302432 - RNA, 19 nt, Artificial Sequence
  Synthetic
guucccugaaggacugaag

SEQ ID NO: 302433 - RNA, 20 nt, Artificial Sequence
  Synthetic
uguucccugaaggacugaag

SEQ ID NO: 302434 - RNA, 21 nt, Artificial Sequence
  Synthetic
cuguucccugaaggacugaag

SEQ ID NO: 302435 - RNA, 22 nt, Artificial Sequence
  Synthetic
acuguucccugaaggacugaag

SEQ ID NO: 302436 - RNA, 23 nt, Artificial Sequence
  Synthetic
cacuguucccugaaggacugaag

SEQ ID NO: 302437 - RNA, 24 nt, Artificial Sequence
  Synthetic
acacuguucccugaaggacugaag

SEQ ID NO: 302438 - RNA, 18 nt, Artificial Sequence
  Synthetic
ugagcaacgauacugaag

SEQ ID NO: 302439 - RNA, 19 nt, Artificial Sequence
  Synthetic
cugagcaacgauacugaag

SEQ ID NO: 302440 - RNA, 20 nt, Artificial Sequence
  Synthetic
acugagcaacgauacugaag

SEQ ID NO: 302441 - RNA, 21 nt, Artificial Sequence
  Synthetic
gacugagcaacgauacugaag

SEQ ID NO: 302442 - RNA, 22 nt, Artificial Sequence
  Synthetic
agacugagcaacgauacugaag

SEQ ID NO: 302443 - RNA, 23 nt, Artificial Sequence
  Synthetic
aagacugagcaacgauacugaag

SEQ ID NO: 302444 - RNA, 24 nt, Artificial Sequence
  Synthetic
aaagacugagcaacgauacugaag

SEQ ID NO: 302445 - RNA, 18 nt, Artificial Sequence
  Synthetic
ucccccauuauccugaag

SEQ ID NO: 302446 - RNA, 19 nt, Artificial Sequence
  Synthetic
uucccccauuauccugaag

SEQ ID NO: 302447 - RNA, 20 nt, Artificial Sequence
  Synthetic
uuucccccauuauccugaag

SEQ ID NO: 302448 - RNA, 21 nt, Artificial Sequence
  Synthetic
uuuucccccauuauccugaag

SEQ ID NO: 302449 - RNA, 22 nt, Artificial Sequence
  Synthetic
auuuucccccauuauccugaag

SEQ ID NO: 302450 - RNA, 23 nt, Artificial Sequence
  Synthetic
cauuuucccccauuauccugaag

SEQ ID NO: 302451 - RNA, 24 nt, Artificial Sequence
  Synthetic
gcauuuucccccauuauccugaag

SEQ ID NO: 302452 - RNA, 18 nt, Artificial Sequence
  Synthetic
agugagauauuccugaag

SEQ ID NO: 302453 - RNA, 19 nt, Artificial Sequence
  Synthetic
uagugagauauuccugaag

SEQ ID NO: 302454 - RNA, 20 nt, Artificial Sequence
  Synthetic
cuagugagauauuccugaag

SEQ ID NO: 302455 - RNA, 21 nt, Artificial Sequence
  Synthetic
gcuagugagauauuccugaag

SEQ ID NO: 302456 - RNA, 22 nt, Artificial Sequence
  Synthetic
ugcuagugagauauuccugaag

SEQ ID NO: 302457 - RNA, 23 nt, Artificial Sequence
  Synthetic
augcuagugagauauuccugaag

SEQ ID NO: 302458 - RNA, 24 nt, Artificial Sequence
  Synthetic
gaugcuagugagauauuccugaag

SEQ ID NO: 302459 - RNA, 18 nt, Artificial Sequence
  Synthetic
ugugcauuguuccugaag

SEQ ID NO: 302460 - RNA, 19 nt, Artificial Sequence
  Synthetic
gugugcauuguuccugaag

SEQ ID NO: 302461 - RNA, 20 nt, Artificial Sequence
  Synthetic
ugugugcauuguuccugaag

SEQ ID NO: 302462 - RNA, 21 nt, Artificial Sequence
  Synthetic
augugugcauuguuccugaag

SEQ ID NO: 302463 - RNA, 22 nt, Artificial Sequence
  Synthetic
gaugugugcauuguuccugaag

SEQ ID NO: 302464 - RNA, 23 nt, Artificial Sequence
  Synthetic
ggaugugugcauuguuccugaag

SEQ ID NO: 302465 - RNA, 24 nt, Artificial Sequence
  Synthetic
gggaugugugcauuguuccugaag

SEQ ID NO: 302466 - RNA, 18 nt, Artificial Sequence
  Synthetic
cuacucgggaggcugaag

SEQ ID NO: 302467 - RNA, 19 nt, Artificial Sequence
  Synthetic
gcuacucgggaggcugaag

SEQ ID NO: 302468 - RNA, 20 nt, Artificial Sequence
  Synthetic
agcuacucgggaggcugaag

SEQ ID NO: 302469 - RNA, 21 nt, Artificial Sequence
  Synthetic
cagcuacucgggaggcugaag

SEQ ID NO: 302470 - RNA, 22 nt, Artificial Sequence
  Synthetic
ccagcuacucgggaggcugaag

SEQ ID NO: 302471 - RNA, 23 nt, Artificial Sequence
  Synthetic
cccagcuacucgggaggcugaag

SEQ ID NO: 302472 - RNA, 24 nt, Artificial Sequence
  Synthetic
ucccagcuacucgggaggcugaag

SEQ ID NO: 302473 - RNA, 18 nt, Artificial Sequence
  Synthetic
uaacuugggaggcugaag

SEQ ID NO: 302474 - RNA, 19 nt, Artificial Sequence
  Synthetic
cuaacuugggaggcugaag

SEQ ID NO: 302475 - RNA, 20 nt, Artificial Sequence
  Synthetic
gcuaacuugggaggcugaag

SEQ ID NO: 302476 - RNA, 21 nt, Artificial Sequence
  Synthetic
ggcuaacuugggaggcugaag

SEQ ID NO: 302477 - RNA, 22 nt, Artificial Sequence
  Synthetic
uggcuaacuugggaggcugaag

SEQ ID NO: 302478 - RNA, 23 nt, Artificial Sequence
  Synthetic
cuggcuaacuugggaggcugaag

SEQ ID NO: 302479 - RNA, 24 nt, Artificial Sequence
  Synthetic
ccuggcuaacuugggaggcugaag

SEQ ID NO: 302480 - RNA, 18 nt, Artificial Sequence
  Synthetic
cuacuugggaggcugaag

SEQ ID NO: 302481 - RNA, 19 nt, Artificial Sequence
  Synthetic
gcuacuugggaggcugaag

SEQ ID NO: 302482 - RNA, 20 nt, Artificial Sequence
  Synthetic
agcuacuugggaggcugaag

SEQ ID NO: 302483 - RNA, 21 nt, Artificial Sequence
  Synthetic
cagcuacuugggaggcugaag

SEQ ID NO: 302484 - RNA, 22 nt, Artificial Sequence
  Synthetic
ccagcuacuugggaggcugaag

SEQ ID NO: 302485 - RNA, 23 nt, Artificial Sequence
  Synthetic
cccagcuacuugggaggcugaag

SEQ ID NO: 302486 - RNA, 24 nt, Artificial Sequence
  Synthetic
ucccagcuacuugggaggcugaag

SEQ ID NO: 302487 - RNA, 18 nt, Artificial Sequence
  Synthetic
auggcaauagggcugaag

SEQ ID NO: 302488 - RNA, 19 nt, Artificial Sequence
  Synthetic
aauggcaauagggcugaag

SEQ ID NO: 302489 - RNA, 20 nt, Artificial Sequence
  Synthetic
aaauggcaauagggcugaag

SEQ ID NO: 302490 - RNA, 21 nt, Artificial Sequence
  Synthetic
caaauggcaauagggcugaag

SEQ ID NO: 302491 - RNA, 22 nt, Artificial Sequence
  Synthetic
ccaaauggcaauagggcugaag

SEQ ID NO: 302492 - RNA, 23 nt, Artificial Sequence
  Synthetic
cccaaauggcaauagggcugaag

SEQ ID NO: 302493 - RNA, 24 nt, Artificial Sequence
  Synthetic
ucccaaauggcaauagggcugaag

SEQ ID NO: 302494 - RNA, 18 nt, Artificial Sequence
  Synthetic
aauacugaaaaucugaag

SEQ ID NO: 302495 - RNA, 19 nt, Artificial Sequence
  Synthetic
aaauacugaaaaucugaag

SEQ ID NO: 302496 - RNA, 20 nt, Artificial Sequence
  Synthetic
uaaauacugaaaaucugaag

SEQ ID NO: 302497 - RNA, 21 nt, Artificial Sequence
  Synthetic
cuaaauacugaaaaucugaag

SEQ ID NO: 302498 - RNA, 22 nt, Artificial Sequence
  Synthetic
ucuaaauacugaaaaucugaag

SEQ ID NO: 302499 - RNA, 23 nt, Artificial Sequence
  Synthetic
cucuaaauacugaaaaucugaag

SEQ ID NO: 302500 - RNA, 24 nt, Artificial Sequence
  Synthetic
ucucuaaauacugaaaaucugaag

SEQ ID NO: 302501 - RNA, 18 nt, Artificial Sequence
  Synthetic
aacugagcaaaucugaag

SEQ ID NO: 302502 - RNA, 19 nt, Artificial Sequence
  Synthetic
aaacugagcaaaucugaag

SEQ ID NO: 302503 - RNA, 20 nt, Artificial Sequence
  Synthetic
gaaacugagcaaaucugaag

SEQ ID NO: 302504 - RNA, 21 nt, Artificial Sequence
  Synthetic
ggaaacugagcaaaucugaag

SEQ ID NO: 302505 - RNA, 22 nt, Artificial Sequence
  Synthetic
gggaaacugagcaaaucugaag

SEQ ID NO: 302506 - RNA, 23 nt, Artificial Sequence
  Synthetic
ugggaaacugagcaaaucugaag

SEQ ID NO: 302507 - RNA, 24 nt, Artificial Sequence
  Synthetic
uugggaaacugagcaaaucugaag

SEQ ID NO: 302508 - RNA, 18 nt, Artificial Sequence
  Synthetic
ugaaaauaugcucugaag

SEQ ID NO: 302509 - RNA, 19 nt, Artificial Sequence
  Synthetic
uugaaaauaugcucugaag

SEQ ID NO: 302510 - RNA, 20 nt, Artificial Sequence
  Synthetic
auugaaaauaugcucugaag

SEQ ID NO: 302511 - RNA, 21 nt, Artificial Sequence
  Synthetic
aauugaaaauaugcucugaag

SEQ ID NO: 302512 - RNA, 22 nt, Artificial Sequence
  Synthetic
aaauugaaaauaugcucugaag

SEQ ID NO: 302513 - RNA, 23 nt, Artificial Sequence
  Synthetic
uaaauugaaaauaugcucugaag

SEQ ID NO: 302514 - RNA, 24 nt, Artificial Sequence
  Synthetic
uuaaauugaaaauaugcucugaag

SEQ ID NO: 302515 - RNA, 18 nt, Artificial Sequence
  Synthetic
ggguagaucagucugaag

SEQ ID NO: 302516 - RNA, 19 nt, Artificial Sequence
  Synthetic
uggguagaucagucugaag

SEQ ID NO: 302517 - RNA, 20 nt, Artificial Sequence
  Synthetic
uuggguagaucagucugaag

SEQ ID NO: 302518 - RNA, 21 nt, Artificial Sequence
  Synthetic
guuggguagaucagucugaag

SEQ ID NO: 302519 - RNA, 22 nt, Artificial Sequence
  Synthetic
aguuggguagaucagucugaag

SEQ ID NO: 302520 - RNA, 23 nt, Artificial Sequence
  Synthetic
aaguuggguagaucagucugaag

SEQ ID NO: 302521 - RNA, 24 nt, Artificial Sequence
  Synthetic
aaaguuggguagaucagucugaag

SEQ ID NO: 302522 - RNA, 18 nt, Artificial Sequence
  Synthetic
ugaaaaagaaaagugaag

SEQ ID NO: 302523 - RNA, 19 nt, Artificial Sequence
  Synthetic
gugaaaaagaaaagugaag

SEQ ID NO: 302524 - RNA, 20 nt, Artificial Sequence
  Synthetic
agugaaaaagaaaagugaag

SEQ ID NO: 302525 - RNA, 21 nt, Artificial Sequence
  Synthetic
gagugaaaaagaaaagugaag

SEQ ID NO: 302526 - RNA, 22 nt, Artificial Sequence
  Synthetic
ugagugaaaaagaaaagugaag

SEQ ID NO: 302527 - RNA, 23 nt, Artificial Sequence
  Synthetic
augagugaaaaagaaaagugaag

SEQ ID NO: 302528 - RNA, 24 nt, Artificial Sequence
  Synthetic
gaugagugaaaaagaaaagugaag

SEQ ID NO: 302529 - RNA, 18 nt, Artificial Sequence
  Synthetic
gagaaggagaaagugaag

SEQ ID NO: 302530 - RNA, 19 nt, Artificial Sequence
  Synthetic
ggagaaggagaaagugaag

SEQ ID NO: 302531 - RNA, 20 nt, Artificial Sequence
  Synthetic
aggagaaggagaaagugaag

SEQ ID NO: 302532 - RNA, 21 nt, Artificial Sequence
  Synthetic
aaggagaaggagaaagugaag

SEQ ID NO: 302533 - RNA, 22 nt, Artificial Sequence
  Synthetic
gaaggagaaggagaaagugaag

SEQ ID NO: 302534 - RNA, 23 nt, Artificial Sequence
  Synthetic
agaaggagaaggagaaagugaag

SEQ ID NO: 302535 - RNA, 24 nt, Artificial Sequence
  Synthetic
aagaaggagaaggagaaagugaag

SEQ ID NO: 302536 - RNA, 18 nt, Artificial Sequence
  Synthetic
auagaaauuacagugaag

SEQ ID NO: 302537 - RNA, 19 nt, Artificial Sequence
  Synthetic
aauagaaauuacagugaag

SEQ ID NO: 302538 - RNA, 20 nt, Artificial Sequence
  Synthetic
gaauagaaauuacagugaag

SEQ ID NO: 302539 - RNA, 21 nt, Artificial Sequence
  Synthetic
agaauagaaauuacagugaag

SEQ ID NO: 302540 - RNA, 22 nt, Artificial Sequence
  Synthetic
aagaauagaaauuacagugaag

SEQ ID NO: 302541 - RNA, 23 nt, Artificial Sequence
  Synthetic
aaagaauagaaauuacagugaag

SEQ ID NO: 302542 - RNA, 24 nt, Artificial Sequence
  Synthetic
uaaagaauagaaauuacagugaag

SEQ ID NO: 302543 - RNA, 18 nt, Artificial Sequence
  Synthetic
auugauuuuacagugaag

SEQ ID NO: 302544 - RNA, 19 nt, Artificial Sequence
  Synthetic
uauugauuuuacagugaag

SEQ ID NO: 302545 - RNA, 20 nt, Artificial Sequence
  Synthetic
auauugauuuuacagugaag

SEQ ID NO: 302546 - RNA, 21 nt, Artificial Sequence
  Synthetic
uauauugauuuuacagugaag

SEQ ID NO: 302547 - RNA, 22 nt, Artificial Sequence
  Synthetic
uuauauugauuuuacagugaag

SEQ ID NO: 302548 - RNA, 23 nt, Artificial Sequence
  Synthetic
cuuauauugauuuuacagugaag

SEQ ID NO: 302549 - RNA, 24 nt, Artificial Sequence
  Synthetic
ucuuauauugauuuuacagugaag

SEQ ID NO: 302550 - RNA, 18 nt, Artificial Sequence
  Synthetic
gcuagcugcccagugaag

SEQ ID NO: 302551 - RNA, 19 nt, Artificial Sequence
  Synthetic
agcuagcugcccagugaag

SEQ ID NO: 302552 - RNA, 20 nt, Artificial Sequence
  Synthetic
uagcuagcugcccagugaag

SEQ ID NO: 302553 - RNA, 21 nt, Artificial Sequence
  Synthetic
auagcuagcugcccagugaag

SEQ ID NO: 302554 - RNA, 22 nt, Artificial Sequence
  Synthetic
uauagcuagcugcccagugaag

SEQ ID NO: 302555 - RNA, 23 nt, Artificial Sequence
  Synthetic
guauagcuagcugcccagugaag

SEQ ID NO: 302556 - RNA, 24 nt, Artificial Sequence
  Synthetic
cguauagcuagcugcccagugaag

SEQ ID NO: 302557 - RNA, 18 nt, Artificial Sequence
  Synthetic
uuaaauguccuagugaag

SEQ ID NO: 302558 - RNA, 19 nt, Artificial Sequence
  Synthetic
uuuaaauguccuagugaag

SEQ ID NO: 302559 - RNA, 20 nt, Artificial Sequence
  Synthetic
uuuuaaauguccuagugaag

SEQ ID NO: 302560 - RNA, 21 nt, Artificial Sequence
  Synthetic
auuuuaaauguccuagugaag

SEQ ID NO: 302561 - RNA, 22 nt, Artificial Sequence
  Synthetic
uauuuuaaauguccuagugaag

SEQ ID NO: 302562 - RNA, 23 nt, Artificial Sequence
  Synthetic
guauuuuaaauguccuagugaag

SEQ ID NO: 302563 - RNA, 24 nt, Artificial Sequence
  Synthetic
aguauuuuaaauguccuagugaag

SEQ ID NO: 302564 - RNA, 18 nt, Artificial Sequence
  Synthetic
gagaauauucuagugaag

SEQ ID NO: 302565 - RNA, 19 nt, Artificial Sequence
  Synthetic
ugagaauauucuagugaag

SEQ ID NO: 302566 - RNA, 20 nt, Artificial Sequence
  Synthetic
uugagaauauucuagugaag

SEQ ID NO: 302567 - RNA, 21 nt, Artificial Sequence
  Synthetic
uuugagaauauucuagugaag

SEQ ID NO: 302568 - RNA, 22 nt, Artificial Sequence
  Synthetic
guuugagaauauucuagugaag

SEQ ID NO: 302569 - RNA, 23 nt, Artificial Sequence
  Synthetic
aguuugagaauauucuagugaag

SEQ ID NO: 302570 - RNA, 24 nt, Artificial Sequence
  Synthetic
aaguuugagaauauucuagugaag

SEQ ID NO: 302571 - RNA, 18 nt, Artificial Sequence
  Synthetic
ucauggcagaaggugaag

SEQ ID NO: 302572 - RNA, 19 nt, Artificial Sequence
  Synthetic
aucauggcagaaggugaag

SEQ ID NO: 302573 - RNA, 20 nt, Artificial Sequence
  Synthetic
aaucauggcagaaggugaag

SEQ ID NO: 302574 - RNA, 21 nt, Artificial Sequence
  Synthetic
caaucauggcagaaggugaag

SEQ ID NO: 302575 - RNA, 22 nt, Artificial Sequence
  Synthetic
acaaucauggcagaaggugaag

SEQ ID NO: 302576 - RNA, 23 nt, Artificial Sequence
  Synthetic
uacaaucauggcagaaggugaag

SEQ ID NO: 302577 - RNA, 24 nt, Artificial Sequence
  Synthetic
uuacaaucauggcagaaggugaag

SEQ ID NO: 302578 - RNA, 18 nt, Artificial Sequence
  Synthetic
ugaaugcaacaggugaag

SEQ ID NO: 302579 - RNA, 19 nt, Artificial Sequence
  Synthetic
augaaugcaacaggugaag

SEQ ID NO: 302580 - RNA, 20 nt, Artificial Sequence
  Synthetic
uaugaaugcaacaggugaag

SEQ ID NO: 302581 - RNA, 21 nt, Artificial Sequence
  Synthetic
uuaugaaugcaacaggugaag

SEQ ID NO: 302582 - RNA, 22 nt, Artificial Sequence
  Synthetic
auuaugaaugcaacaggugaag

SEQ ID NO: 302583 - RNA, 23 nt, Artificial Sequence
  Synthetic
uauuaugaaugcaacaggugaag

SEQ ID NO: 302584 - RNA, 24 nt, Artificial Sequence
  Synthetic
cuauuaugaaugcaacaggugaag

SEQ ID NO: 302585 - RNA, 18 nt, Artificial Sequence
  Synthetic
caaaguacaccugugaag

SEQ ID NO: 302586 - RNA, 19 nt, Artificial Sequence
  Synthetic
ucaaaguacaccugugaag

SEQ ID NO: 302587 - RNA, 20 nt, Artificial Sequence
  Synthetic
uucaaaguacaccugugaag

SEQ ID NO: 302588 - RNA, 21 nt, Artificial Sequence
  Synthetic
auucaaaguacaccugugaag

SEQ ID NO: 302589 - RNA, 22 nt, Artificial Sequence
  Synthetic
gauucaaaguacaccugugaag

SEQ ID NO: 302590 - RNA, 23 nt, Artificial Sequence
  Synthetic
ugauucaaaguacaccugugaag

SEQ ID NO: 302591 - RNA, 24 nt, Artificial Sequence
  Synthetic
cugauucaaaguacaccugugaag

SEQ ID NO: 302592 - RNA, 18 nt, Artificial Sequence
  Synthetic
acaauugucucugugaag

SEQ ID NO: 302593 - RNA, 19 nt, Artificial Sequence
  Synthetic
gacaauugucucugugaag

SEQ ID NO: 302594 - RNA, 20 nt, Artificial Sequence
  Synthetic
ggacaauugucucugugaag

SEQ ID NO: 302595 - RNA, 21 nt, Artificial Sequence
  Synthetic
gggacaauugucucugugaag

SEQ ID NO: 302596 - RNA, 22 nt, Artificial Sequence
  Synthetic
agggacaauugucucugugaag

SEQ ID NO: 302597 - RNA, 23 nt, Artificial Sequence
  Synthetic
uagggacaauugucucugugaag

SEQ ID NO: 302598 - RNA, 24 nt, Artificial Sequence
  Synthetic
auagggacaauugucucugugaag

SEQ ID NO: 302599 - RNA, 18 nt, Artificial Sequence
  Synthetic
gagaagagaagugugaag

SEQ ID NO: 302600 - RNA, 19 nt, Artificial Sequence
  Synthetic
ggagaagagaagugugaag

SEQ ID NO: 302601 - RNA, 20 nt, Artificial Sequence
  Synthetic
aggagaagagaagugugaag

SEQ ID NO: 302602 - RNA, 21 nt, Artificial Sequence
  Synthetic
gaggagaagagaagugugaag

SEQ ID NO: 302603 - RNA, 22 nt, Artificial Sequence
  Synthetic
agaggagaagagaagugugaag

SEQ ID NO: 302604 - RNA, 23 nt, Artificial Sequence
  Synthetic
gagaggagaagagaagugugaag

SEQ ID NO: 302605 - RNA, 24 nt, Artificial Sequence
  Synthetic
agagaggagaagagaagugugaag

SEQ ID NO: 302606 - RNA, 18 nt, Artificial Sequence
  Synthetic
cuguucaagcuugugaag

SEQ ID NO: 302607 - RNA, 19 nt, Artificial Sequence
  Synthetic
gcuguucaagcuugugaag

SEQ ID NO: 302608 - RNA, 20 nt, Artificial Sequence
  Synthetic
agcuguucaagcuugugaag

SEQ ID NO: 302609 - RNA, 21 nt, Artificial Sequence
  Synthetic
cagcuguucaagcuugugaag

SEQ ID NO: 302610 - RNA, 22 nt, Artificial Sequence
  Synthetic
acagcuguucaagcuugugaag

SEQ ID NO: 302611 - RNA, 23 nt, Artificial Sequence
  Synthetic
uacagcuguucaagcuugugaag

SEQ ID NO: 302612 - RNA, 24 nt, Artificial Sequence
  Synthetic
cuacagcuguucaagcuugugaag

SEQ ID NO: 302613 - RNA, 18 nt, Artificial Sequence
  Synthetic
acacuacuggcauugaag

SEQ ID NO: 302614 - RNA, 19 nt, Artificial Sequence
  Synthetic
uacacuacuggcauugaag

SEQ ID NO: 302615 - RNA, 20 nt, Artificial Sequence
  Synthetic
cuacacuacuggcauugaag

SEQ ID NO: 302616 - RNA, 21 nt, Artificial Sequence
  Synthetic
gcuacacuacuggcauugaag

SEQ ID NO: 302617 - RNA, 22 nt, Artificial Sequence
  Synthetic
ugcuacacuacuggcauugaag

SEQ ID NO: 302618 - RNA, 23 nt, Artificial Sequence
  Synthetic
augcuacacuacuggcauugaag

SEQ ID NO: 302619 - RNA, 24 nt, Artificial Sequence
  Synthetic
gaugcuacacuacuggcauugaag

SEQ ID NO: 302620 - RNA, 18 nt, Artificial Sequence
  Synthetic
aagucaaacucauugaag

SEQ ID NO: 302621 - RNA, 19 nt, Artificial Sequence
  Synthetic
aaagucaaacucauugaag

SEQ ID NO: 302622 - RNA, 20 nt, Artificial Sequence
  Synthetic
aaaagucaaacucauugaag

SEQ ID NO: 302623 - RNA, 21 nt, Artificial Sequence
  Synthetic
aaaaagucaaacucauugaag

SEQ ID NO: 302624 - RNA, 22 nt, Artificial Sequence
  Synthetic
aaaaaagucaaacucauugaag

SEQ ID NO: 302625 - RNA, 23 nt, Artificial Sequence
  Synthetic
uaaaaaagucaaacucauugaag

SEQ ID NO: 302626 - RNA, 24 nt, Artificial Sequence
  Synthetic
cuaaaaaagucaaacucauugaag

SEQ ID NO: 302627 - RNA, 18 nt, Artificial Sequence
  Synthetic
uagaaaaugauauugaag

SEQ ID NO: 302628 - RNA, 19 nt, Artificial Sequence
  Synthetic
auagaaaaugauauugaag

SEQ ID NO: 302629 - RNA, 20 nt, Artificial Sequence
  Synthetic
aauagaaaaugauauugaag

SEQ ID NO: 302630 - RNA, 21 nt, Artificial Sequence
  Synthetic
gaauagaaaaugauauugaag

SEQ ID NO: 302631 - RNA, 22 nt, Artificial Sequence
  Synthetic
ggaauagaaaaugauauugaag

SEQ ID NO: 302632 - RNA, 23 nt, Artificial Sequence
  Synthetic
gggaauagaaaaugauauugaag

SEQ ID NO: 302633 - RNA, 24 nt, Artificial Sequence
  Synthetic
agggaauagaaaaugauauugaag

SEQ ID NO: 302634 - RNA, 18 nt, Artificial Sequence
  Synthetic
uaagaguaccuauugaag

SEQ ID NO: 302635 - RNA, 19 nt, Artificial Sequence
  Synthetic
guaagaguaccuauugaag

SEQ ID NO: 302636 - RNA, 20 nt, Artificial Sequence
  Synthetic
aguaagaguaccuauugaag

SEQ ID NO: 302637 - RNA, 21 nt, Artificial Sequence
  Synthetic
gaguaagaguaccuauugaag

SEQ ID NO: 302638 - RNA, 22 nt, Artificial Sequence
  Synthetic
agaguaagaguaccuauugaag

SEQ ID NO: 302639 - RNA, 23 nt, Artificial Sequence
  Synthetic
gagaguaagaguaccuauugaag

SEQ ID NO: 302640 - RNA, 24 nt, Artificial Sequence
  Synthetic
agagaguaagaguaccuauugaag

SEQ ID NO: 302641 - RNA, 18 nt, Artificial Sequence
  Synthetic
agcagcuaucuauugaag

SEQ ID NO: 302642 - RNA, 19 nt, Artificial Sequence
  Synthetic
uagcagcuaucuauugaag

SEQ ID NO: 302643 - RNA, 20 nt, Artificial Sequence
  Synthetic
uuagcagcuaucuauugaag

SEQ ID NO: 302644 - RNA, 21 nt, Artificial Sequence
  Synthetic
uuuagcagcuaucuauugaag

SEQ ID NO: 302645 - RNA, 22 nt, Artificial Sequence
  Synthetic
auuuagcagcuaucuauugaag

SEQ ID NO: 302646 - RNA, 23 nt, Artificial Sequence
  Synthetic
cauuuagcagcuaucuauugaag

SEQ ID NO: 302647 - RNA, 24 nt, Artificial Sequence
  Synthetic
ucauuuagcagcuaucuauugaag

SEQ ID NO: 302648 - RNA, 18 nt, Artificial Sequence
  Synthetic
ugaggaaaaguauugaag

SEQ ID NO: 302649 - RNA, 19 nt, Artificial Sequence
  Synthetic
gugaggaaaaguauugaag

SEQ ID NO: 302650 - RNA, 20 nt, Artificial Sequence
  Synthetic
ugugaggaaaaguauugaag

SEQ ID NO: 302651 - RNA, 21 nt, Artificial Sequence
  Synthetic
cugugaggaaaaguauugaag

SEQ ID NO: 302652 - RNA, 22 nt, Artificial Sequence
  Synthetic
ucugugaggaaaaguauugaag

SEQ ID NO: 302653 - RNA, 23 nt, Artificial Sequence
  Synthetic
aucugugaggaaaaguauugaag

SEQ ID NO: 302654 - RNA, 24 nt, Artificial Sequence
  Synthetic
uaucugugaggaaaaguauugaag

SEQ ID NO: 302655 - RNA, 18 nt, Artificial Sequence
  Synthetic
cuguugcauuuauugaag

SEQ ID NO: 302656 - RNA, 19 nt, Artificial Sequence
  Synthetic
ccuguugcauuuauugaag

SEQ ID NO: 302657 - RNA, 20 nt, Artificial Sequence
  Synthetic
cccuguugcauuuauugaag

SEQ ID NO: 302658 - RNA, 21 nt, Artificial Sequence
  Synthetic
ccccuguugcauuuauugaag

SEQ ID NO: 302659 - RNA, 22 nt, Artificial Sequence
  Synthetic
uccccuguugcauuuauugaag

SEQ ID NO: 302660 - RNA, 23 nt, Artificial Sequence
  Synthetic
auccccuguugcauuuauugaag

SEQ ID NO: 302661 - RNA, 24 nt, Artificial Sequence
  Synthetic
gauccccuguugcauuuauugaag

SEQ ID NO: 302662 - RNA, 18 nt, Artificial Sequence
  Synthetic
auuuauuuuuuauugaag

SEQ ID NO: 302663 - RNA, 19 nt, Artificial Sequence
  Synthetic
gauuuauuuuuuauugaag

SEQ ID NO: 302664 - RNA, 20 nt, Artificial Sequence
  Synthetic
ggauuuauuuuuuauugaag

SEQ ID NO: 302665 - RNA, 21 nt, Artificial Sequence
  Synthetic
uggauuuauuuuuuauugaag

SEQ ID NO: 302666 - RNA, 22 nt, Artificial Sequence
  Synthetic
uuggauuuauuuuuuauugaag

SEQ ID NO: 302667 - RNA, 23 nt, Artificial Sequence
  Synthetic
auuggauuuauuuuuuauugaag

SEQ ID NO: 302668 - RNA, 24 nt, Artificial Sequence
  Synthetic
uauuggauuuauuuuuuauugaag

SEQ ID NO: 302669 - RNA, 18 nt, Artificial Sequence
  Synthetic
caggagaaucacuugaag

SEQ ID NO: 302670 - RNA, 19 nt, Artificial Sequence
  Synthetic
gcaggagaaucacuugaag

SEQ ID NO: 302671 - RNA, 20 nt, Artificial Sequence
  Synthetic
agcaggagaaucacuugaag

SEQ ID NO: 302672 - RNA, 21 nt, Artificial Sequence
  Synthetic
aagcaggagaaucacuugaag

SEQ ID NO: 302673 - RNA, 22 nt, Artificial Sequence
  Synthetic
gaagcaggagaaucacuugaag

SEQ ID NO: 302674 - RNA, 23 nt, Artificial Sequence
  Synthetic
ugaagcaggagaaucacuugaag

SEQ ID NO: 302675 - RNA, 24 nt, Artificial Sequence
  Synthetic
cugaagcaggagaaucacuugaag

SEQ ID NO: 302676 - RNA, 18 nt, Artificial Sequence
  Synthetic
uucagucuugccuugaag

SEQ ID NO: 302677 - RNA, 19 nt, Artificial Sequence
  Synthetic
cuucagucuugccuugaag

SEQ ID NO: 302678 - RNA, 20 nt, Artificial Sequence
  Synthetic
ucuucagucuugccuugaag

SEQ ID NO: 302679 - RNA, 21 nt, Artificial Sequence
  Synthetic
uucuucagucuugccuugaag

SEQ ID NO: 302680 - RNA, 22 nt, Artificial Sequence
  Synthetic
auucuucagucuugccuugaag

SEQ ID NO: 302681 - RNA, 23 nt, Artificial Sequence
  Synthetic
gauucuucagucuugccuugaag

SEQ ID NO: 302682 - RNA, 24 nt, Artificial Sequence
  Synthetic
cgauucuucagucuugccuugaag

SEQ ID NO: 302683 - RNA, 18 nt, Artificial Sequence
  Synthetic
gugaauacauucuugaag

SEQ ID NO: 302684 - RNA, 19 nt, Artificial Sequence
  Synthetic
ugugaauacauucuugaag

SEQ ID NO: 302685 - RNA, 20 nt, Artificial Sequence
  Synthetic
uugugaauacauucuugaag

SEQ ID NO: 302686 - RNA, 21 nt, Artificial Sequence
  Synthetic
uuugugaauacauucuugaag

SEQ ID NO: 302687 - RNA, 22 nt, Artificial Sequence
  Synthetic
auuugugaauacauucuugaag

SEQ ID NO: 302688 - RNA, 23 nt, Artificial Sequence
  Synthetic
cauuugugaauacauucuugaag

SEQ ID NO: 302689 - RNA, 24 nt, Artificial Sequence
  Synthetic
acauuugugaauacauucuugaag

SEQ ID NO: 302690 - RNA, 18 nt, Artificial Sequence
  Synthetic
cuagaucgucaguugaag

SEQ ID NO: 302691 - RNA, 19 nt, Artificial Sequence
  Synthetic
acuagaucgucaguugaag

SEQ ID NO: 302692 - RNA, 20 nt, Artificial Sequence
  Synthetic
gacuagaucgucaguugaag

SEQ ID NO: 302693 - RNA, 21 nt, Artificial Sequence
  Synthetic
agacuagaucgucaguugaag

SEQ ID NO: 302694 - RNA, 22 nt, Artificial Sequence
  Synthetic
aagacuagaucgucaguugaag

SEQ ID NO: 302695 - RNA, 23 nt, Artificial Sequence
  Synthetic
aaagacuagaucgucaguugaag

SEQ ID NO: 302696 - RNA, 24 nt, Artificial Sequence
  Synthetic
aaaagacuagaucgucaguugaag

SEQ ID NO: 302697 - RNA, 18 nt, Artificial Sequence
  Synthetic
cuacuugggagguugaag

SEQ ID NO: 302698 - RNA, 19 nt, Artificial Sequence
  Synthetic
gcuacuugggagguugaag

SEQ ID NO: 302699 - RNA, 20 nt, Artificial Sequence
  Synthetic
agcuacuugggagguugaag

SEQ ID NO: 302700 - RNA, 21 nt, Artificial Sequence
  Synthetic
cagcuacuugggagguugaag

SEQ ID NO: 302701 - RNA, 22 nt, Artificial Sequence
  Synthetic
ccagcuacuugggagguugaag

SEQ ID NO: 302702 - RNA, 23 nt, Artificial Sequence
  Synthetic
cccagcuacuugggagguugaag

SEQ ID NO: 302703 - RNA, 24 nt, Artificial Sequence
  Synthetic
ucccagcuacuugggagguugaag

SEQ ID NO: 302704 - RNA, 18 nt, Artificial Sequence
  Synthetic
aguaauuggauguugaag

SEQ ID NO: 302705 - RNA, 19 nt, Artificial Sequence
  Synthetic
uaguaauuggauguugaag

SEQ ID NO: 302706 - RNA, 20 nt, Artificial Sequence
  Synthetic
uuaguaauuggauguugaag

SEQ ID NO: 302707 - RNA, 21 nt, Artificial Sequence
  Synthetic
uuuaguaauuggauguugaag

SEQ ID NO: 302708 - RNA, 22 nt, Artificial Sequence
  Synthetic
auuuaguaauuggauguugaag

SEQ ID NO: 302709 - RNA, 23 nt, Artificial Sequence
  Synthetic
uauuuaguaauuggauguugaag

SEQ ID NO: 302710 - RNA, 24 nt, Artificial Sequence
  Synthetic
uuauuuaguaauuggauguugaag

SEQ ID NO: 302711 - RNA, 18 nt, Artificial Sequence
  Synthetic
uaacuagcacuguugaag

SEQ ID NO: 302712 - RNA, 19 nt, Artificial Sequence
  Synthetic
guaacuagcacuguugaag

SEQ ID NO: 302713 - RNA, 20 nt, Artificial Sequence
  Synthetic
uguaacuagcacuguugaag

SEQ ID NO: 302714 - RNA, 21 nt, Artificial Sequence
  Synthetic
cuguaacuagcacuguugaag

SEQ ID NO: 302715 - RNA, 22 nt, Artificial Sequence
  Synthetic
ucuguaacuagcacuguugaag

SEQ ID NO: 302716 - RNA, 23 nt, Artificial Sequence
  Synthetic
gucuguaacuagcacuguugaag

SEQ ID NO: 302717 - RNA, 24 nt, Artificial Sequence
  Synthetic
agucuguaacuagcacuguugaag

SEQ ID NO: 302718 - RNA, 18 nt, Artificial Sequence
  Synthetic
aaaaaaggaaauuugaag

SEQ ID NO: 302719 - RNA, 19 nt, Artificial Sequence
  Synthetic
aaaaaaaggaaauuugaag

SEQ ID NO: 302720 - RNA, 20 nt, Artificial Sequence
  Synthetic
aaaaaaaaggaaauuugaag

SEQ ID NO: 302721 - RNA, 21 nt, Artificial Sequence
  Synthetic
aaaaaaaaaggaaauuugaag

SEQ ID NO: 302722 - RNA, 22 nt, Artificial Sequence
  Synthetic
aaaaaaaaaaggaaauuugaag

SEQ ID NO: 302723 - RNA, 23 nt, Artificial Sequence
  Synthetic
aaaaaaaaaaaggaaauuugaag

SEQ ID NO: 302724 - RNA, 24 nt, Artificial Sequence
  Synthetic
aaaaaaaaaaaaggaaauuugaag

SEQ ID NO: 302725 - RNA, 18 nt, Artificial Sequence
  Synthetic
gacugauuuuauuugaag

SEQ ID NO: 302726 - RNA, 19 nt, Artificial Sequence
  Synthetic
ggacugauuuuauuugaag

SEQ ID NO: 302727 - RNA, 20 nt, Artificial Sequence
  Synthetic
gggacugauuuuauuugaag

SEQ ID NO: 302728 - RNA, 21 nt, Artificial Sequence
  Synthetic
agggacugauuuuauuugaag

SEQ ID NO: 302729 - RNA, 22 nt, Artificial Sequence
  Synthetic
cagggacugauuuuauuugaag

SEQ ID NO: 302730 - RNA, 23 nt, Artificial Sequence
  Synthetic
acagggacugauuuuauuugaag

SEQ ID NO: 302731 - RNA, 24 nt, Artificial Sequence
  Synthetic
cacagggacugauuuuauuugaag

SEQ ID NO: 302732 - RNA, 18 nt, Artificial Sequence
  Synthetic
ucugaauguucuuugaag

SEQ ID NO: 302733 - RNA, 19 nt, Artificial Sequence
  Synthetic
gucugaauguucuuugaag

SEQ ID NO: 302734 - RNA, 20 nt, Artificial Sequence
  Synthetic
ugucugaauguucuuugaag

SEQ ID NO: 302735 - RNA, 21 nt, Artificial Sequence
  Synthetic
uugucugaauguucuuugaag

SEQ ID NO: 302736 - RNA, 22 nt, Artificial Sequence
  Synthetic
cuugucugaauguucuuugaag

SEQ ID NO: 302737 - RNA, 23 nt, Artificial Sequence
  Synthetic
ucuugucugaauguucuuugaag

SEQ ID NO: 302738 - RNA, 24 nt, Artificial Sequence
  Synthetic
uucuugucugaauguucuuugaag

SEQ ID NO: 302739 - RNA, 18 nt, Artificial Sequence
  Synthetic
uugcuaaacaguuugaag

SEQ ID NO: 302740 - RNA, 19 nt, Artificial Sequence
  Synthetic
guugcuaaacaguuugaag

SEQ ID NO: 302741 - RNA, 20 nt, Artificial Sequence
  Synthetic
aguugcuaaacaguuugaag

SEQ ID NO: 302742 - RNA, 21 nt, Artificial Sequence
  Synthetic
uaguugcuaaacaguuugaag

SEQ ID NO: 302743 - RNA, 22 nt, Artificial Sequence
  Synthetic
auaguugcuaaacaguuugaag

SEQ ID NO: 302744 - RNA, 23 nt, Artificial Sequence
  Synthetic
uauaguugcuaaacaguuugaag

SEQ ID NO: 302745 - RNA, 24 nt, Artificial Sequence
  Synthetic
uuauaguugcuaaacaguuugaag

SEQ ID NO: 302746 - RNA, 18 nt, Artificial Sequence
  Synthetic
uggaaggugauuuugaag

SEQ ID NO: 302747 - RNA, 19 nt, Artificial Sequence
  Synthetic
uuggaaggugauuuugaag

SEQ ID NO: 302748 - RNA, 20 nt, Artificial Sequence
  Synthetic
cuuggaaggugauuuugaag

SEQ ID NO: 302749 - RNA, 21 nt, Artificial Sequence
  Synthetic
acuuggaaggugauuuugaag

SEQ ID NO: 302750 - RNA, 22 nt, Artificial Sequence
  Synthetic
cacuuggaaggugauuuugaag

SEQ ID NO: 302751 - RNA, 23 nt, Artificial Sequence
  Synthetic
ucacuuggaaggugauuuugaag

SEQ ID NO: 302752 - RNA, 24 nt, Artificial Sequence
  Synthetic
cucacuuggaaggugauuuugaag

SEQ ID NO: 302753 - RNA, 18 nt, Artificial Sequence
  Synthetic
uugugauguguuuugaag

SEQ ID NO: 302754 - RNA, 19 nt, Artificial Sequence
  Synthetic
auugugauguguuuugaag

SEQ ID NO: 302755 - RNA, 20 nt, Artificial Sequence
  Synthetic
aauugugauguguuuugaag

SEQ ID NO: 302756 - RNA, 21 nt, Artificial Sequence
  Synthetic
uaauugugauguguuuugaag

SEQ ID NO: 302757 - RNA, 22 nt, Artificial Sequence
  Synthetic
uuaauugugauguguuuugaag

SEQ ID NO: 302758 - RNA, 23 nt, Artificial Sequence
  Synthetic
auuaauugugauguguuuugaag

SEQ ID NO: 302759 - RNA, 24 nt, Artificial Sequence
  Synthetic
gauuaauugugauguguuuugaag

SEQ ID NO: 302760 - RNA, 18 nt, Artificial Sequence
  Synthetic
aaaugcuugaaaaauaag

SEQ ID NO: 302761 - RNA, 19 nt, Artificial Sequence
  Synthetic
aaaaugcuugaaaaauaag

SEQ ID NO: 302762 - RNA, 20 nt, Artificial Sequence
  Synthetic
uaaaaugcuugaaaaauaag

SEQ ID NO: 302763 - RNA, 21 nt, Artificial Sequence
  Synthetic
uuaaaaugcuugaaaaauaag

SEQ ID NO: 302764 - RNA, 22 nt, Artificial Sequence
  Synthetic
uuuaaaaugcuugaaaaauaag

SEQ ID NO: 302765 - RNA, 23 nt, Artificial Sequence
  Synthetic
cuuuaaaaugcuugaaaaauaag

SEQ ID NO: 302766 - RNA, 24 nt, Artificial Sequence
  Synthetic
ccuuuaaaaugcuugaaaaauaag

SEQ ID NO: 302767 - RNA, 18 nt, Artificial Sequence
  Synthetic
guaguuaauaaaaauaag

SEQ ID NO: 302768 - RNA, 19 nt, Artificial Sequence
  Synthetic
gguaguuaauaaaaauaag

SEQ ID NO: 302769 - RNA, 20 nt, Artificial Sequence
  Synthetic
ggguaguuaauaaaaauaag

SEQ ID NO: 302770 - RNA, 21 nt, Artificial Sequence
  Synthetic
uggguaguuaauaaaaauaag

SEQ ID NO: 302771 - RNA, 22 nt, Artificial Sequence
  Synthetic
uuggguaguuaauaaaaauaag

SEQ ID NO: 302772 - RNA, 23 nt, Artificial Sequence
  Synthetic
uuuggguaguuaauaaaaauaag

SEQ ID NO: 302773 - RNA, 24 nt, Artificial Sequence
  Synthetic
uuuuggguaguuaauaaaaauaag

SEQ ID NO: 302774 - RNA, 18 nt, Artificial Sequence
  Synthetic
aaguggagugaaaauaag

SEQ ID NO: 302775 - RNA, 19 nt, Artificial Sequence
  Synthetic
gaaguggagugaaaauaag

SEQ ID NO: 302776 - RNA, 20 nt, Artificial Sequence
  Synthetic
agaaguggagugaaaauaag

SEQ ID NO: 302777 - RNA, 21 nt, Artificial Sequence
  Synthetic
cagaaguggagugaaaauaag

SEQ ID NO: 302778 - RNA, 22 nt, Artificial Sequence
  Synthetic
ucagaaguggagugaaaauaag

SEQ ID NO: 302779 - RNA, 23 nt, Artificial Sequence
  Synthetic
uucagaaguggagugaaaauaag

SEQ ID NO: 302780 - RNA, 24 nt, Artificial Sequence
  Synthetic
auucagaaguggagugaaaauaag

SEQ ID NO: 302781 - RNA, 18 nt, Artificial Sequence
  Synthetic
gaaaagaaauaaaauaag

SEQ ID NO: 302782 - RNA, 19 nt, Artificial Sequence
  Synthetic
agaaaagaaauaaaauaag

SEQ ID NO: 302783 - RNA, 20 nt, Artificial Sequence
  Synthetic
aagaaaagaaauaaaauaag

SEQ ID NO: 302784 - RNA, 21 nt, Artificial Sequence
  Synthetic
gaagaaaagaaauaaaauaag

SEQ ID NO: 302785 - RNA, 22 nt, Artificial Sequence
  Synthetic
ugaagaaaagaaauaaaauaag

SEQ ID NO: 302786 - RNA, 23 nt, Artificial Sequence
  Synthetic
uugaagaaaagaaauaaaauaag

SEQ ID NO: 302787 - RNA, 24 nt, Artificial Sequence
  Synthetic
auugaagaaaagaaauaaaauaag

SEQ ID NO: 302788 - RNA, 18 nt, Artificial Sequence
  Synthetic
augaaaaggucaaauaag

SEQ ID NO: 302789 - RNA, 19 nt, Artificial Sequence
  Synthetic
caugaaaaggucaaauaag

SEQ ID NO: 302790 - RNA, 20 nt, Artificial Sequence
  Synthetic
ucaugaaaaggucaaauaag

SEQ ID NO: 302791 - RNA, 21 nt, Artificial Sequence
  Synthetic
cucaugaaaaggucaaauaag

SEQ ID NO: 302792 - RNA, 22 nt, Artificial Sequence
  Synthetic
ccucaugaaaaggucaaauaag

SEQ ID NO: 302793 - RNA, 23 nt, Artificial Sequence
  Synthetic
uccucaugaaaaggucaaauaag

SEQ ID NO: 302794 - RNA, 24 nt, Artificial Sequence
  Synthetic
auccucaugaaaaggucaaauaag

SEQ ID NO: 302795 - RNA, 18 nt, Artificial Sequence
  Synthetic
uucugaguuucaaauaag

SEQ ID NO: 302796 - RNA, 19 nt, Artificial Sequence
  Synthetic
auucugaguuucaaauaag

SEQ ID NO: 302797 - RNA, 20 nt, Artificial Sequence
  Synthetic
cauucugaguuucaaauaag

SEQ ID NO: 302798 - RNA, 21 nt, Artificial Sequence
  Synthetic
acauucugaguuucaaauaag

SEQ ID NO: 302799 - RNA, 22 nt, Artificial Sequence
  Synthetic
aacauucugaguuucaaauaag

SEQ ID NO: 302800 - RNA, 23 nt, Artificial Sequence
  Synthetic
caacauucugaguuucaaauaag

SEQ ID NO: 302801 - RNA, 24 nt, Artificial Sequence
  Synthetic
ccaacauucugaguuucaaauaag

SEQ ID NO: 302802 - RNA, 18 nt, Artificial Sequence
  Synthetic
ccugggugaguaaauaag

SEQ ID NO: 302803 - RNA, 19 nt, Artificial Sequence
  Synthetic
gccugggugaguaaauaag

SEQ ID NO: 302804 - RNA, 20 nt, Artificial Sequence
  Synthetic
ugccugggugaguaaauaag

SEQ ID NO: 302805 - RNA, 21 nt, Artificial Sequence
  Synthetic
augccugggugaguaaauaag

SEQ ID NO: 302806 - RNA, 22 nt, Artificial Sequence
  Synthetic
aaugccugggugaguaaauaag

SEQ ID NO: 302807 - RNA, 23 nt, Artificial Sequence
  Synthetic
aaaugccugggugaguaaauaag

SEQ ID NO: 302808 - RNA, 24 nt, Artificial Sequence
  Synthetic
caaaugccugggugaguaaauaag

SEQ ID NO: 302809 - RNA, 18 nt, Artificial Sequence
  Synthetic
auacgcuauuuaaauaag

SEQ ID NO: 302810 - RNA, 19 nt, Artificial Sequence
  Synthetic
gauacgcuauuuaaauaag

SEQ ID NO: 302811 - RNA, 20 nt, Artificial Sequence
  Synthetic
ugauacgcuauuuaaauaag

SEQ ID NO: 302812 - RNA, 21 nt, Artificial Sequence
  Synthetic
cugauacgcuauuuaaauaag

SEQ ID NO: 302813 - RNA, 22 nt, Artificial Sequence
  Synthetic
acugauacgcuauuuaaauaag

SEQ ID NO: 302814 - RNA, 23 nt, Artificial Sequence
  Synthetic
cacugauacgcuauuuaaauaag

SEQ ID NO: 302815 - RNA, 24 nt, Artificial Sequence
  Synthetic
ccacugauacgcuauuuaaauaag

SEQ ID NO: 302816 - RNA, 18 nt, Artificial Sequence
  Synthetic
aauuuauaucacaauaag

SEQ ID NO: 302817 - RNA, 19 nt, Artificial Sequence
  Synthetic
aaauuuauaucacaauaag

SEQ ID NO: 302818 - RNA, 20 nt, Artificial Sequence
  Synthetic
caaauuuauaucacaauaag

SEQ ID NO: 302819 - RNA, 21 nt, Artificial Sequence
  Synthetic
ucaaauuuauaucacaauaag

SEQ ID NO: 302820 - RNA, 22 nt, Artificial Sequence
  Synthetic
uucaaauuuauaucacaauaag

SEQ ID NO: 302821 - RNA, 23 nt, Artificial Sequence
  Synthetic
uuucaaauuuauaucacaauaag

SEQ ID NO: 302822 - RNA, 24 nt, Artificial Sequence
  Synthetic
uuuucaaauuuauaucacaauaag

SEQ ID NO: 302823 - RNA, 18 nt, Artificial Sequence
  Synthetic
gaagauuuccucaauaag

SEQ ID NO: 302824 - RNA, 19 nt, Artificial Sequence
  Synthetic
agaagauuuccucaauaag

SEQ ID NO: 302825 - RNA, 20 nt, Artificial Sequence
  Synthetic
aagaagauuuccucaauaag

SEQ ID NO: 302826 - RNA, 21 nt, Artificial Sequence
  Synthetic
gaagaagauuuccucaauaag

SEQ ID NO: 302827 - RNA, 22 nt, Artificial Sequence
  Synthetic
ugaagaagauuuccucaauaag

SEQ ID NO: 302828 - RNA, 23 nt, Artificial Sequence
  Synthetic
gugaagaagauuuccucaauaag

SEQ ID NO: 302829 - RNA, 24 nt, Artificial Sequence
  Synthetic
ugugaagaagauuuccucaauaag

SEQ ID NO: 302830 - RNA, 18 nt, Artificial Sequence
  Synthetic
uaaagguaaaagaauaag

SEQ ID NO: 302831 - RNA, 19 nt, Artificial Sequence
  Synthetic
auaaagguaaaagaauaag

SEQ ID NO: 302832 - RNA, 20 nt, Artificial Sequence
  Synthetic
aauaaagguaaaagaauaag

SEQ ID NO: 302833 - RNA, 21 nt, Artificial Sequence
  Synthetic
caauaaagguaaaagaauaag

SEQ ID NO: 302834 - RNA, 22 nt, Artificial Sequence
  Synthetic
ucaauaaagguaaaagaauaag

SEQ ID NO: 302835 - RNA, 23 nt, Artificial Sequence
  Synthetic
cucaauaaagguaaaagaauaag

SEQ ID NO: 302836 - RNA, 24 nt, Artificial Sequence
  Synthetic
acucaauaaagguaaaagaauaag

SEQ ID NO: 302837 - RNA, 18 nt, Artificial Sequence
  Synthetic
caauaacaccagaauaag

SEQ ID NO: 302838 - RNA, 19 nt, Artificial Sequence
  Synthetic
ccaauaacaccagaauaag

SEQ ID NO: 302839 - RNA, 20 nt, Artificial Sequence
  Synthetic
gccaauaacaccagaauaag

SEQ ID NO: 302840 - RNA, 21 nt, Artificial Sequence
  Synthetic
ugccaauaacaccagaauaag

SEQ ID NO: 302841 - RNA, 22 nt, Artificial Sequence
  Synthetic
augccaauaacaccagaauaag

SEQ ID NO: 302842 - RNA, 23 nt, Artificial Sequence
  Synthetic
caugccaauaacaccagaauaag

SEQ ID NO: 302843 - RNA, 24 nt, Artificial Sequence
  Synthetic
ccaugccaauaacaccagaauaag

SEQ ID NO: 302844 - RNA, 18 nt, Artificial Sequence
  Synthetic
ggccacauauagaauaag

SEQ ID NO: 302845 - RNA, 19 nt, Artificial Sequence
  Synthetic
uggccacauauagaauaag

SEQ ID NO: 302846 - RNA, 20 nt, Artificial Sequence
  Synthetic
guggccacauauagaauaag

SEQ ID NO: 302847 - RNA, 21 nt, Artificial Sequence
  Synthetic
cguggccacauauagaauaag

SEQ ID NO: 302848 - RNA, 22 nt, Artificial Sequence
  Synthetic
gcguggccacauauagaauaag

SEQ ID NO: 302849 - RNA, 23 nt, Artificial Sequence
  Synthetic
ugcguggccacauauagaauaag

SEQ ID NO: 302850 - RNA, 24 nt, Artificial Sequence
  Synthetic
uugcguggccacauauagaauaag

SEQ ID NO: 302851 - RNA, 18 nt, Artificial Sequence
  Synthetic
aagaacauguagaauaag

SEQ ID NO: 302852 - RNA, 19 nt, Artificial Sequence
  Synthetic
caagaacauguagaauaag

SEQ ID NO: 302853 - RNA, 20 nt, Artificial Sequence
  Synthetic
ucaagaacauguagaauaag

SEQ ID NO: 302854 - RNA, 21 nt, Artificial Sequence
  Synthetic
gucaagaacauguagaauaag

SEQ ID NO: 302855 - RNA, 22 nt, Artificial Sequence
  Synthetic
agucaagaacauguagaauaag

SEQ ID NO: 302856 - RNA, 23 nt, Artificial Sequence
  Synthetic
cagucaagaacauguagaauaag

SEQ ID NO: 302857 - RNA, 24 nt, Artificial Sequence
  Synthetic
ucagucaagaacauguagaauaag

SEQ ID NO: 302858 - RNA, 18 nt, Artificial Sequence
  Synthetic
uugaggaaacugaauaag

SEQ ID NO: 302859 - RNA, 19 nt, Artificial Sequence
  Synthetic
guugaggaaacugaauaag

SEQ ID NO: 302860 - RNA, 20 nt, Artificial Sequence
  Synthetic
aguugaggaaacugaauaag

SEQ ID NO: 302861 - RNA, 21 nt, Artificial Sequence
  Synthetic
caguugaggaaacugaauaag

SEQ ID NO: 302862 - RNA, 22 nt, Artificial Sequence
  Synthetic
gcaguugaggaaacugaauaag

SEQ ID NO: 302863 - RNA, 23 nt, Artificial Sequence
  Synthetic
cgcaguugaggaaacugaauaag

SEQ ID NO: 302864 - RNA, 24 nt, Artificial Sequence
  Synthetic
ccgcaguugaggaaacugaauaag

SEQ ID NO: 302865 - RNA, 18 nt, Artificial Sequence
  Synthetic
ugaauaagugugaauaag

SEQ ID NO: 302866 - RNA, 19 nt, Artificial Sequence
  Synthetic
gugaauaagugugaauaag

SEQ ID NO: 302867 - RNA, 20 nt, Artificial Sequence
  Synthetic
agugaauaagugugaauaag

SEQ ID NO: 302868 - RNA, 21 nt, Artificial Sequence
  Synthetic
uagugaauaagugugaauaag

SEQ ID NO: 302869 - RNA, 22 nt, Artificial Sequence
  Synthetic
auagugaauaagugugaauaag

SEQ ID NO: 302870 - RNA, 23 nt, Artificial Sequence
  Synthetic
gauagugaauaagugugaauaag

SEQ ID NO: 302871 - RNA, 24 nt, Artificial Sequence
  Synthetic
ugauagugaauaagugugaauaag

SEQ ID NO: 302872 - RNA, 18 nt, Artificial Sequence
  Synthetic
uauacucuugugaauaag

SEQ ID NO: 302873 - RNA, 19 nt, Artificial Sequence
  Synthetic
uuauacucuugugaauaag

SEQ ID NO: 302874 - RNA, 20 nt, Artificial Sequence
  Synthetic
guuauacucuugugaauaag

SEQ ID NO: 302875 - RNA, 21 nt, Artificial Sequence
  Synthetic
cguuauacucuugugaauaag

SEQ ID NO: 302876 - RNA, 22 nt, Artificial Sequence
  Synthetic
ucguuauacucuugugaauaag

SEQ ID NO: 302877 - RNA, 23 nt, Artificial Sequence
  Synthetic
uucguuauacucuugugaauaag

SEQ ID NO: 302878 - RNA, 24 nt, Artificial Sequence
  Synthetic
uuucguuauacucuugugaauaag

SEQ ID NO: 302879 - RNA, 18 nt, Artificial Sequence
  Synthetic
uugaaguagaauaauaag

SEQ ID NO: 302880 - RNA, 19 nt, Artificial Sequence
  Synthetic
guugaaguagaauaauaag

SEQ ID NO: 302881 - RNA, 20 nt, Artificial Sequence
  Synthetic
aguugaaguagaauaauaag

SEQ ID NO: 302882 - RNA, 21 nt, Artificial Sequence
  Synthetic
gaguugaaguagaauaauaag

SEQ ID NO: 302883 - RNA, 22 nt, Artificial Sequence
  Synthetic
ugaguugaaguagaauaauaag

SEQ ID NO: 302884 - RNA, 23 nt, Artificial Sequence
  Synthetic
cugaguugaaguagaauaauaag

SEQ ID NO: 302885 - RNA, 24 nt, Artificial Sequence
  Synthetic
gcugaguugaaguagaauaauaag

SEQ ID NO: 302886 - RNA, 18 nt, Artificial Sequence
  Synthetic
gaaucaaaucauaauaag

SEQ ID NO: 302887 - RNA, 19 nt, Artificial Sequence
  Synthetic
agaaucaaaucauaauaag

SEQ ID NO: 302888 - RNA, 20 nt, Artificial Sequence
  Synthetic
cagaaucaaaucauaauaag

SEQ ID NO: 302889 - RNA, 21 nt, Artificial Sequence
  Synthetic
ccagaaucaaaucauaauaag

SEQ ID NO: 302890 - RNA, 22 nt, Artificial Sequence
  Synthetic
uccagaaucaaaucauaauaag

SEQ ID NO: 302891 - RNA, 23 nt, Artificial Sequence
  Synthetic
uuccagaaucaaaucauaauaag

SEQ ID NO: 302892 - RNA, 24 nt, Artificial Sequence
  Synthetic
auuccagaaucaaaucauaauaag

SEQ ID NO: 302893 - RNA, 18 nt, Artificial Sequence
  Synthetic
acagagacuccacauaag

SEQ ID NO: 302894 - RNA, 19 nt, Artificial Sequence
  Synthetic
gacagagacuccacauaag

SEQ ID NO: 302895 - RNA, 20 nt, Artificial Sequence
  Synthetic
agacagagacuccacauaag

SEQ ID NO: 302896 - RNA, 21 nt, Artificial Sequence
  Synthetic
aagacagagacuccacauaag

SEQ ID NO: 302897 - RNA, 22 nt, Artificial Sequence
  Synthetic
aaagacagagacuccacauaag

SEQ ID NO: 302898 - RNA, 23 nt, Artificial Sequence
  Synthetic
aaaagacagagacuccacauaag

SEQ ID NO: 302899 - RNA, 24 nt, Artificial Sequence
  Synthetic
aaaaagacagagacuccacauaag

SEQ ID NO: 302900 - RNA, 18 nt, Artificial Sequence
  Synthetic
gaagaaagaagacauaag

SEQ ID NO: 302901 - RNA, 19 nt, Artificial Sequence
  Synthetic
agaagaaagaagacauaag

SEQ ID NO: 302902 - RNA, 20 nt, Artificial Sequence
  Synthetic
gagaagaaagaagacauaag

SEQ ID NO: 302903 - RNA, 21 nt, Artificial Sequence
  Synthetic
agagaagaaagaagacauaag

SEQ ID NO: 302904 - RNA, 22 nt, Artificial Sequence
  Synthetic
aagagaagaaagaagacauaag

SEQ ID NO: 302905 - RNA, 23 nt, Artificial Sequence
  Synthetic
caagagaagaaagaagacauaag

SEQ ID NO: 302906 - RNA, 24 nt, Artificial Sequence
  Synthetic
acaagagaagaaagaagacauaag

SEQ ID NO: 302907 - RNA, 18 nt, Artificial Sequence
  Synthetic
gugaaauugagacauaag

SEQ ID NO: 302908 - RNA, 19 nt, Artificial Sequence
  Synthetic
agugaaauugagacauaag

SEQ ID NO: 302909 - RNA, 20 nt, Artificial Sequence
  Synthetic
aagugaaauugagacauaag

SEQ ID NO: 302910 - RNA, 21 nt, Artificial Sequence
  Synthetic
gaagugaaauugagacauaag

SEQ ID NO: 302911 - RNA, 22 nt, Artificial Sequence
  Synthetic
agaagugaaauugagacauaag

SEQ ID NO: 302912 - RNA, 23 nt, Artificial Sequence
  Synthetic
aagaagugaaauugagacauaag

SEQ ID NO: 302913 - RNA, 24 nt, Artificial Sequence
  Synthetic
aaagaagugaaauugagacauaag

SEQ ID NO: 302914 - RNA, 18 nt, Artificial Sequence
  Synthetic
ggagcagugguacauaag

SEQ ID NO: 302915 - RNA, 19 nt, Artificial Sequence
  Synthetic
aggagcagugguacauaag

SEQ ID NO: 302916 - RNA, 20 nt, Artificial Sequence
  Synthetic
uaggagcagugguacauaag

SEQ ID NO: 302917 - RNA, 21 nt, Artificial Sequence
  Synthetic
uuaggagcagugguacauaag

SEQ ID NO: 302918 - RNA, 22 nt, Artificial Sequence
  Synthetic
uuuaggagcagugguacauaag

SEQ ID NO: 302919 - RNA, 23 nt, Artificial Sequence
  Synthetic
uuuuaggagcagugguacauaag

SEQ ID NO: 302920 - RNA, 24 nt, Artificial Sequence
  Synthetic
cuuuuaggagcagugguacauaag

SEQ ID NO: 302921 - RNA, 18 nt, Artificial Sequence
  Synthetic
augaaaggauuacauaag

SEQ ID NO: 302922 - RNA, 19 nt, Artificial Sequence
  Synthetic
aaugaaaggauuacauaag

SEQ ID NO: 302923 - RNA, 20 nt, Artificial Sequence
  Synthetic
gaaugaaaggauuacauaag

SEQ ID NO: 302924 - RNA, 21 nt, Artificial Sequence
  Synthetic
ggaaugaaaggauuacauaag

SEQ ID NO: 302925 - RNA, 22 nt, Artificial Sequence
  Synthetic
uggaaugaaaggauuacauaag

SEQ ID NO: 302926 - RNA, 23 nt, Artificial Sequence
  Synthetic
cuggaaugaaaggauuacauaag

SEQ ID NO: 302927 - RNA, 24 nt, Artificial Sequence
  Synthetic
acuggaaugaaaggauuacauaag

SEQ ID NO: 302928 - RNA, 18 nt, Artificial Sequence
  Synthetic
cacaggcuauuacauaag

SEQ ID NO: 302929 - RNA, 19 nt, Artificial Sequence
  Synthetic
ucacaggcuauuacauaag

SEQ ID NO: 302930 - RNA, 20 nt, Artificial Sequence
  Synthetic
uucacaggcuauuacauaag

SEQ ID NO: 302931 - RNA, 21 nt, Artificial Sequence
  Synthetic
auucacaggcuauuacauaag

SEQ ID NO: 302932 - RNA, 22 nt, Artificial Sequence
  Synthetic
uauucacaggcuauuacauaag

SEQ ID NO: 302933 - RNA, 23 nt, Artificial Sequence
  Synthetic
uuauucacaggcuauuacauaag

SEQ ID NO: 302934 - RNA, 24 nt, Artificial Sequence
  Synthetic
uuuauucacaggcuauuacauaag

SEQ ID NO: 302935 - RNA, 18 nt, Artificial Sequence
  Synthetic
aaguguuccuaccauaag

SEQ ID NO: 302936 - RNA, 19 nt, Artificial Sequence
  Synthetic
uaaguguuccuaccauaag

SEQ ID NO: 302937 - RNA, 20 nt, Artificial Sequence
  Synthetic
uuaaguguuccuaccauaag

SEQ ID NO: 302938 - RNA, 21 nt, Artificial Sequence
  Synthetic
cuuaaguguuccuaccauaag

SEQ ID NO: 302939 - RNA, 22 nt, Artificial Sequence
  Synthetic
ucuuaaguguuccuaccauaag

SEQ ID NO: 302940 - RNA, 23 nt, Artificial Sequence
  Synthetic
gucuuaaguguuccuaccauaag

SEQ ID NO: 302941 - RNA, 24 nt, Artificial Sequence
  Synthetic
ugucuuaaguguuccuaccauaag

SEQ ID NO: 302942 - RNA, 18 nt, Artificial Sequence
  Synthetic
uaaugaaaguaccauaag

SEQ ID NO: 302943 - RNA, 19 nt, Artificial Sequence
  Synthetic
uuaaugaaaguaccauaag

SEQ ID NO: 302944 - RNA, 20 nt, Artificial Sequence
  Synthetic
cuuaaugaaaguaccauaag

SEQ ID NO: 302945 - RNA, 21 nt, Artificial Sequence
  Synthetic
ccuuaaugaaaguaccauaag

SEQ ID NO: 302946 - RNA, 22 nt, Artificial Sequence
  Synthetic
gccuuaaugaaaguaccauaag

SEQ ID NO: 302947 - RNA, 23 nt, Artificial Sequence
  Synthetic
ugccuuaaugaaaguaccauaag

SEQ ID NO: 302948 - RNA, 24 nt, Artificial Sequence
  Synthetic
augccuuaaugaaaguaccauaag

SEQ ID NO: 302949 - RNA, 18 nt, Artificial Sequence
  Synthetic
cuagggggcucccauaag

SEQ ID NO: 302950 - RNA, 19 nt, Artificial Sequence
  Synthetic
gcuagggggcucccauaag

SEQ ID NO: 302951 - RNA, 20 nt, Artificial Sequence
  Synthetic
ggcuagggggcucccauaag

SEQ ID NO: 302952 - RNA, 21 nt, Artificial Sequence
  Synthetic
gggcuagggggcucccauaag

SEQ ID NO: 302953 - RNA, 22 nt, Artificial Sequence
  Synthetic
ugggcuagggggcucccauaag

SEQ ID NO: 302954 - RNA, 23 nt, Artificial Sequence
  Synthetic
cugggcuagggggcucccauaag

SEQ ID NO: 302955 - RNA, 24 nt, Artificial Sequence
  Synthetic
ccugggcuagggggcucccauaag

SEQ ID NO: 302956 - RNA, 18 nt, Artificial Sequence
  Synthetic
ggcuggguacuccauaag

SEQ ID NO: 302957 - RNA, 19 nt, Artificial Sequence
  Synthetic
uggcuggguacuccauaag

SEQ ID NO: 302958 - RNA, 20 nt, Artificial Sequence
  Synthetic
guggcuggguacuccauaag

SEQ ID NO: 302959 - RNA, 21 nt, Artificial Sequence
  Synthetic
aguggcuggguacuccauaag

SEQ ID NO: 302960 - RNA, 22 nt, Artificial Sequence
  Synthetic
gaguggcuggguacuccauaag

SEQ ID NO: 302961 - RNA, 23 nt, Artificial Sequence
  Synthetic
ugaguggcuggguacuccauaag

SEQ ID NO: 302962 - RNA, 24 nt, Artificial Sequence
  Synthetic
uugaguggcuggguacuccauaag

SEQ ID NO: 302963 - RNA, 18 nt, Artificial Sequence
  Synthetic
cauuagcauaagcauaag

SEQ ID NO: 302964 - RNA, 19 nt, Artificial Sequence
  Synthetic
ucauuagcauaagcauaag

SEQ ID NO: 302965 - RNA, 20 nt, Artificial Sequence
  Synthetic
aucauuagcauaagcauaag

SEQ ID NO: 302966 - RNA, 21 nt, Artificial Sequence
  Synthetic
gaucauuagcauaagcauaag

SEQ ID NO: 302967 - RNA, 22 nt, Artificial Sequence
  Synthetic
agaucauuagcauaagcauaag

SEQ ID NO: 302968 - RNA, 23 nt, Artificial Sequence
  Synthetic
gagaucauuagcauaagcauaag

SEQ ID NO: 302969 - RNA, 24 nt, Artificial Sequence
  Synthetic
agagaucauuagcauaagcauaag

SEQ ID NO: 302970 - RNA, 18 nt, Artificial Sequence
  Synthetic
cagccuuggaggcauaag

SEQ ID NO: 302971 - RNA, 19 nt, Artificial Sequence
  Synthetic
acagccuuggaggcauaag

SEQ ID NO: 302972 - RNA, 20 nt, Artificial Sequence
  Synthetic
cacagccuuggaggcauaag

SEQ ID NO: 302973 - RNA, 21 nt, Artificial Sequence
  Synthetic
acacagccuuggaggcauaag

SEQ ID NO: 302974 - RNA, 22 nt, Artificial Sequence
  Synthetic
cacacagccuuggaggcauaag

SEQ ID NO: 302975 - RNA, 23 nt, Artificial Sequence
  Synthetic
ucacacagccuuggaggcauaag

SEQ ID NO: 302976 - RNA, 24 nt, Artificial Sequence
  Synthetic
cucacacagccuuggaggcauaag

SEQ ID NO: 302977 - RNA, 18 nt, Artificial Sequence
  Synthetic
aaaaacgcugggcauaag

SEQ ID NO: 302978 - RNA, 19 nt, Artificial Sequence
  Synthetic
aaaaaacgcugggcauaag

SEQ ID NO: 302979 - RNA, 20 nt, Artificial Sequence
  Synthetic
uaaaaaacgcugggcauaag

SEQ ID NO: 302980 - RNA, 21 nt, Artificial Sequence
  Synthetic
uuaaaaaacgcugggcauaag

SEQ ID NO: 302981 - RNA, 22 nt, Artificial Sequence
  Synthetic
uuuaaaaaacgcugggcauaag

SEQ ID NO: 302982 - RNA, 23 nt, Artificial Sequence
  Synthetic
auuuaaaaaacgcugggcauaag

SEQ ID NO: 302983 - RNA, 24 nt, Artificial Sequence
  Synthetic
aauuuaaaaaacgcugggcauaag

SEQ ID NO: 302984 - RNA, 18 nt, Artificial Sequence
  Synthetic
aaugguuaaaugcauaag

SEQ ID NO: 302985 - RNA, 19 nt, Artificial Sequence
  Synthetic
gaaugguuaaaugcauaag

SEQ ID NO: 302986 - RNA, 20 nt, Artificial Sequence
  Synthetic
ugaaugguuaaaugcauaag

SEQ ID NO: 302987 - RNA, 21 nt, Artificial Sequence
  Synthetic
augaaugguuaaaugcauaag

SEQ ID NO: 302988 - RNA, 22 nt, Artificial Sequence
  Synthetic
aaugaaugguuaaaugcauaag

SEQ ID NO: 302989 - RNA, 23 nt, Artificial Sequence
  Synthetic
uaaugaaugguuaaaugcauaag

SEQ ID NO: 302990 - RNA, 24 nt, Artificial Sequence
  Synthetic
auaaugaaugguuaaaugcauaag

SEQ ID NO: 302991 - RNA, 18 nt, Artificial Sequence
  Synthetic
uacauuuuauugcauaag

SEQ ID NO: 302992 - RNA, 19 nt, Artificial Sequence
  Synthetic
auacauuuuauugcauaag

SEQ ID NO: 302993 - RNA, 20 nt, Artificial Sequence
  Synthetic
uauacauuuuauugcauaag

SEQ ID NO: 302994 - RNA, 21 nt, Artificial Sequence
  Synthetic
guauacauuuuauugcauaag

SEQ ID NO: 302995 - RNA, 22 nt, Artificial Sequence
  Synthetic
aguauacauuuuauugcauaag

SEQ ID NO: 302996 - RNA, 23 nt, Artificial Sequence
  Synthetic
aaguauacauuuuauugcauaag

SEQ ID NO: 302997 - RNA, 24 nt, Artificial Sequence
  Synthetic
uaaguauacauuuuauugcauaag

SEQ ID NO: 302998 - RNA, 18 nt, Artificial Sequence
  Synthetic
caaucagcccaucauaag

SEQ ID NO: 302999 - RNA, 19 nt, Artificial Sequence
  Synthetic
ccaaucagcccaucauaag

SEQ ID NO: 303000 - RNA, 20 nt, Artificial Sequence
  Synthetic
cccaaucagcccaucauaag

SEQ ID NO: 303001 - RNA, 21 nt, Artificial Sequence
  Synthetic
ucccaaucagcccaucauaag

SEQ ID NO: 303002 - RNA, 22 nt, Artificial Sequence
  Synthetic
aucccaaucagcccaucauaag

SEQ ID NO: 303003 - RNA, 23 nt, Artificial Sequence
  Synthetic
caucccaaucagcccaucauaag

SEQ ID NO: 303004 - RNA, 24 nt, Artificial Sequence
  Synthetic
acaucccaaucagcccaucauaag

SEQ ID NO: 303005 - RNA, 18 nt, Artificial Sequence
  Synthetic
cauguucucacucauaag

SEQ ID NO: 303006 - RNA, 19 nt, Artificial Sequence
  Synthetic
gcauguucucacucauaag

SEQ ID NO: 303007 - RNA, 20 nt, Artificial Sequence
  Synthetic
cgcauguucucacucauaag

SEQ ID NO: 303008 - RNA, 21 nt, Artificial Sequence
  Synthetic
ccgcauguucucacucauaag

SEQ ID NO: 303009 - RNA, 22 nt, Artificial Sequence
  Synthetic
accgcauguucucacucauaag

SEQ ID NO: 303010 - RNA, 23 nt, Artificial Sequence
  Synthetic
caccgcauguucucacucauaag

SEQ ID NO: 303011 - RNA, 24 nt, Artificial Sequence
  Synthetic
acaccgcauguucucacucauaag

SEQ ID NO: 303012 - RNA, 18 nt, Artificial Sequence
  Synthetic
uugguaguauuucauaag

SEQ ID NO: 303013 - RNA, 19 nt, Artificial Sequence
  Synthetic
uuugguaguauuucauaag

SEQ ID NO: 303014 - RNA, 20 nt, Artificial Sequence
  Synthetic
cuuugguaguauuucauaag

SEQ ID NO: 303015 - RNA, 21 nt, Artificial Sequence
  Synthetic
gcuuugguaguauuucauaag

SEQ ID NO: 303016 - RNA, 22 nt, Artificial Sequence
  Synthetic
agcuuugguaguauuucauaag

SEQ ID NO: 303017 - RNA, 23 nt, Artificial Sequence
  Synthetic
aagcuuugguaguauuucauaag

SEQ ID NO: 303018 - RNA, 24 nt, Artificial Sequence
  Synthetic
aaagcuuugguaguauuucauaag

SEQ ID NO: 303019 - RNA, 18 nt, Artificial Sequence
  Synthetic
agugggaaaaaagauaag

SEQ ID NO: 303020 - RNA, 19 nt, Artificial Sequence
  Synthetic
aagugggaaaaaagauaag

SEQ ID NO: 303021 - RNA, 20 nt, Artificial Sequence
  Synthetic
uaagugggaaaaaagauaag

SEQ ID NO: 303022 - RNA, 21 nt, Artificial Sequence
  Synthetic
auaagugggaaaaaagauaag

SEQ ID NO: 303023 - RNA, 22 nt, Artificial Sequence
  Synthetic
uauaagugggaaaaaagauaag

SEQ ID NO: 303024 - RNA, 23 nt, Artificial Sequence
  Synthetic
uuauaagugggaaaaaagauaag

SEQ ID NO: 303025 - RNA, 24 nt, Artificial Sequence
  Synthetic
auuauaagugggaaaaaagauaag

SEQ ID NO: 303026 - RNA, 18 nt, Artificial Sequence
  Synthetic
agaugagacucagauaag

SEQ ID NO: 303027 - RNA, 19 nt, Artificial Sequence
  Synthetic
uagaugagacucagauaag

SEQ ID NO: 303028 - RNA, 20 nt, Artificial Sequence
  Synthetic
guagaugagacucagauaag

SEQ ID NO: 303029 - RNA, 21 nt, Artificial Sequence
  Synthetic
aguagaugagacucagauaag

SEQ ID NO: 303030 - RNA, 22 nt, Artificial Sequence
  Synthetic
gaguagaugagacucagauaag

SEQ ID NO: 303031 - RNA, 23 nt, Artificial Sequence
  Synthetic
agaguagaugagacucagauaag

SEQ ID NO: 303032 - RNA, 24 nt, Artificial Sequence
  Synthetic
aagaguagaugagacucagauaag

SEQ ID NO: 303033 - RNA, 18 nt, Artificial Sequence
  Synthetic
gccugaaaacuagauaag

SEQ ID NO: 303034 - RNA, 19 nt, Artificial Sequence
  Synthetic
ugccugaaaacuagauaag

SEQ ID NO: 303035 - RNA, 20 nt, Artificial Sequence
  Synthetic
uugccugaaaacuagauaag

SEQ ID NO: 303036 - RNA, 21 nt, Artificial Sequence
  Synthetic
uuugccugaaaacuagauaag

SEQ ID NO: 303037 - RNA, 22 nt, Artificial Sequence
  Synthetic
guuugccugaaaacuagauaag

SEQ ID NO: 303038 - RNA, 23 nt, Artificial Sequence
  Synthetic
aguuugccugaaaacuagauaag

SEQ ID NO: 303039 - RNA, 24 nt, Artificial Sequence
  Synthetic
uaguuugccugaaaacuagauaag

SEQ ID NO: 303040 - RNA, 18 nt, Artificial Sequence
  Synthetic
ggauaggaauacgauaag

SEQ ID NO: 303041 - RNA, 19 nt, Artificial Sequence
  Synthetic
uggauaggaauacgauaag

SEQ ID NO: 303042 - RNA, 20 nt, Artificial Sequence
  Synthetic
auggauaggaauacgauaag

SEQ ID NO: 303043 - RNA, 21 nt, Artificial Sequence
  Synthetic
cauggauaggaauacgauaag

SEQ ID NO: 303044 - RNA, 22 nt, Artificial Sequence
  Synthetic
gcauggauaggaauacgauaag

SEQ ID NO: 303045 - RNA, 23 nt, Artificial Sequence
  Synthetic
cgcauggauaggaauacgauaag

SEQ ID NO: 303046 - RNA, 24 nt, Artificial Sequence
  Synthetic
ccgcauggauaggaauacgauaag

SEQ ID NO: 303047 - RNA, 18 nt, Artificial Sequence
  Synthetic
ugacugcaaagggauaag

SEQ ID NO: 303048 - RNA, 19 nt, Artificial Sequence
  Synthetic
gugacugcaaagggauaag

SEQ ID NO: 303049 - RNA, 20 nt, Artificial Sequence
  Synthetic
agugacugcaaagggauaag

SEQ ID NO: 303050 - RNA, 21 nt, Artificial Sequence
  Synthetic
cagugacugcaaagggauaag

SEQ ID NO: 303051 - RNA, 22 nt, Artificial Sequence
  Synthetic
gcagugacugcaaagggauaag

SEQ ID NO: 303052 - RNA, 23 nt, Artificial Sequence
  Synthetic
ggcagugacugcaaagggauaag

SEQ ID NO: 303053 - RNA, 24 nt, Artificial Sequence
  Synthetic
aggcagugacugcaaagggauaag

SEQ ID NO: 303054 - RNA, 18 nt, Artificial Sequence
  Synthetic
cuacacaggauggauaag

SEQ ID NO: 303055 - RNA, 19 nt, Artificial Sequence
  Synthetic
gcuacacaggauggauaag

SEQ ID NO: 303056 - RNA, 20 nt, Artificial Sequence
  Synthetic
ggcuacacaggauggauaag

SEQ ID NO: 303057 - RNA, 21 nt, Artificial Sequence
  Synthetic
gggcuacacaggauggauaag

SEQ ID NO: 303058 - RNA, 22 nt, Artificial Sequence
  Synthetic
agggcuacacaggauggauaag

SEQ ID NO: 303059 - RNA, 23 nt, Artificial Sequence
  Synthetic
aagggcuacacaggauggauaag

SEQ ID NO: 303060 - RNA, 24 nt, Artificial Sequence
  Synthetic
gaagggcuacacaggauggauaag

SEQ ID NO: 303061 - RNA, 18 nt, Artificial Sequence
  Synthetic
guguaaagaguggauaag

SEQ ID NO: 303062 - RNA, 19 nt, Artificial Sequence
  Synthetic
aguguaaagaguggauaag

SEQ ID NO: 303063 - RNA, 20 nt, Artificial Sequence
  Synthetic
aaguguaaagaguggauaag

SEQ ID NO: 303064 - RNA, 21 nt, Artificial Sequence
  Synthetic
gaaguguaaagaguggauaag

SEQ ID NO: 303065 - RNA, 22 nt, Artificial Sequence
  Synthetic
ugaaguguaaagaguggauaag

SEQ ID NO: 303066 - RNA, 23 nt, Artificial Sequence
  Synthetic
cugaaguguaaagaguggauaag

SEQ ID NO: 303067 - RNA, 24 nt, Artificial Sequence
  Synthetic
ucugaaguguaaagaguggauaag

SEQ ID NO: 303068 - RNA, 18 nt, Artificial Sequence
  Synthetic
uugacauggaaugauaag

SEQ ID NO: 303069 - RNA, 19 nt, Artificial Sequence
  Synthetic
guugacauggaaugauaag

SEQ ID NO: 303070 - RNA, 20 nt, Artificial Sequence
  Synthetic
uguugacauggaaugauaag

SEQ ID NO: 303071 - RNA, 21 nt, Artificial Sequence
  Synthetic
cuguugacauggaaugauaag

SEQ ID NO: 303072 - RNA, 22 nt, Artificial Sequence
  Synthetic
ccuguugacauggaaugauaag

SEQ ID NO: 303073 - RNA, 23 nt, Artificial Sequence
  Synthetic
uccuguugacauggaaugauaag

SEQ ID NO: 303074 - RNA, 24 nt, Artificial Sequence
  Synthetic
cuccuguugacauggaaugauaag

SEQ ID NO: 303075 - RNA, 18 nt, Artificial Sequence
  Synthetic
guagccugcuaugauaag

SEQ ID NO: 303076 - RNA, 19 nt, Artificial Sequence
  Synthetic
aguagccugcuaugauaag

SEQ ID NO: 303077 - RNA, 20 nt, Artificial Sequence
  Synthetic
aaguagccugcuaugauaag

SEQ ID NO: 303078 - RNA, 21 nt, Artificial Sequence
  Synthetic
aaaguagccugcuaugauaag

SEQ ID NO: 303079 - RNA, 22 nt, Artificial Sequence
  Synthetic
uaaaguagccugcuaugauaag

SEQ ID NO: 303080 - RNA, 23 nt, Artificial Sequence
  Synthetic
cuaaaguagccugcuaugauaag

SEQ ID NO: 303081 - RNA, 24 nt, Artificial Sequence
  Synthetic
acuaaaguagccugcuaugauaag

SEQ ID NO: 303082 - RNA, 18 nt, Artificial Sequence
  Synthetic
guaauuuauucugauaag

SEQ ID NO: 303083 - RNA, 19 nt, Artificial Sequence
  Synthetic
gguaauuuauucugauaag

SEQ ID NO: 303084 - RNA, 20 nt, Artificial Sequence
  Synthetic
ggguaauuuauucugauaag

SEQ ID NO: 303085 - RNA, 21 nt, Artificial Sequence
  Synthetic
cggguaauuuauucugauaag

SEQ ID NO: 303086 - RNA, 22 nt, Artificial Sequence
  Synthetic
acggguaauuuauucugauaag

SEQ ID NO: 303087 - RNA, 23 nt, Artificial Sequence
  Synthetic
uacggguaauuuauucugauaag

SEQ ID NO: 303088 - RNA, 24 nt, Artificial Sequence
  Synthetic
auacggguaauuuauucugauaag

SEQ ID NO: 303089 - RNA, 18 nt, Artificial Sequence
  Synthetic
agaauucgucuugauaag

SEQ ID NO: 303090 - RNA, 19 nt, Artificial Sequence
  Synthetic
gagaauucgucuugauaag

SEQ ID NO: 303091 - RNA, 20 nt, Artificial Sequence
  Synthetic
agagaauucgucuugauaag

SEQ ID NO: 303092 - RNA, 21 nt, Artificial Sequence
  Synthetic
aagagaauucgucuugauaag

SEQ ID NO: 303093 - RNA, 22 nt, Artificial Sequence
  Synthetic
caagagaauucgucuugauaag

SEQ ID NO: 303094 - RNA, 23 nt, Artificial Sequence
  Synthetic
acaagagaauucgucuugauaag

SEQ ID NO: 303095 - RNA, 24 nt, Artificial Sequence
  Synthetic
gacaagagaauucgucuugauaag

SEQ ID NO: 303096 - RNA, 18 nt, Artificial Sequence
  Synthetic
uaucacuucuuugauaag

SEQ ID NO: 303097 - RNA, 19 nt, Artificial Sequence
  Synthetic
cuaucacuucuuugauaag

SEQ ID NO: 303098 - RNA, 20 nt, Artificial Sequence
  Synthetic
acuaucacuucuuugauaag

SEQ ID NO: 303099 - RNA, 21 nt, Artificial Sequence
  Synthetic
cacuaucacuucuuugauaag

SEQ ID NO: 303100 - RNA, 22 nt, Artificial Sequence
  Synthetic
gcacuaucacuucuuugauaag

SEQ ID NO: 303101 - RNA, 23 nt, Artificial Sequence
  Synthetic
agcacuaucacuucuuugauaag

SEQ ID NO: 303102 - RNA, 24 nt, Artificial Sequence
  Synthetic
uagcacuaucacuucuuugauaag

SEQ ID NO: 303103 - RNA, 18 nt, Artificial Sequence
  Synthetic
uuauuuuuggaauauaag

SEQ ID NO: 303104 - RNA, 19 nt, Artificial Sequence
  Synthetic
auuauuuuuggaauauaag

SEQ ID NO: 303105 - RNA, 20 nt, Artificial Sequence
  Synthetic
uauuauuuuuggaauauaag

SEQ ID NO: 303106 - RNA, 21 nt, Artificial Sequence
  Synthetic
cuauuauuuuuggaauauaag

SEQ ID NO: 303107 - RNA, 22 nt, Artificial Sequence
  Synthetic
ucuauuauuuuuggaauauaag

SEQ ID NO: 303108 - RNA, 23 nt, Artificial Sequence
  Synthetic
gucuauuauuuuuggaauauaag

SEQ ID NO: 303109 - RNA, 24 nt, Artificial Sequence
  Synthetic
ggucuauuauuuuuggaauauaag

SEQ ID NO: 303110 - RNA, 18 nt, Artificial Sequence
  Synthetic
cugaguaaauaauauaag

SEQ ID NO: 303111 - RNA, 19 nt, Artificial Sequence
  Synthetic
gcugaguaaauaauauaag

SEQ ID NO: 303112 - RNA, 20 nt, Artificial Sequence
  Synthetic
ggcugaguaaauaauauaag

SEQ ID NO: 303113 - RNA, 21 nt, Artificial Sequence
  Synthetic
aggcugaguaaauaauauaag

SEQ ID NO: 303114 - RNA, 22 nt, Artificial Sequence
  Synthetic
uaggcugaguaaauaauauaag

SEQ ID NO: 303115 - RNA, 23 nt, Artificial Sequence
  Synthetic
guaggcugaguaaauaauauaag

SEQ ID NO: 303116 - RNA, 24 nt, Artificial Sequence
  Synthetic
aguaggcugaguaaauaauauaag

SEQ ID NO: 303117 - RNA, 18 nt, Artificial Sequence
  Synthetic
auauuuuuauaauauaag

SEQ ID NO: 303118 - RNA, 19 nt, Artificial Sequence
  Synthetic
gauauuuuuauaauauaag

SEQ ID NO: 303119 - RNA, 20 nt, Artificial Sequence
  Synthetic
agauauuuuuauaauauaag

SEQ ID NO: 303120 - RNA, 21 nt, Artificial Sequence
  Synthetic
uagauauuuuuauaauauaag

SEQ ID NO: 303121 - RNA, 22 nt, Artificial Sequence
  Synthetic
uuagauauuuuuauaauauaag

SEQ ID NO: 303122 - RNA, 23 nt, Artificial Sequence
  Synthetic
uuuagauauuuuuauaauauaag

SEQ ID NO: 303123 - RNA, 24 nt, Artificial Sequence
  Synthetic
auuuagauauuuuuauaauauaag

SEQ ID NO: 303124 - RNA, 18 nt, Artificial Sequence
  Synthetic
gauuuggucugauauaag

SEQ ID NO: 303125 - RNA, 19 nt, Artificial Sequence
  Synthetic
cgauuuggucugauauaag

SEQ ID NO: 303126 - RNA, 20 nt, Artificial Sequence
  Synthetic
ucgauuuggucugauauaag

SEQ ID NO: 303127 - RNA, 21 nt, Artificial Sequence
  Synthetic
aucgauuuggucugauauaag

SEQ ID NO: 303128 - RNA, 22 nt, Artificial Sequence
  Synthetic
uaucgauuuggucugauauaag

SEQ ID NO: 303129 - RNA, 23 nt, Artificial Sequence
  Synthetic
auaucgauuuggucugauauaag

SEQ ID NO: 303130 - RNA, 24 nt, Artificial Sequence
  Synthetic
gauaucgauuuggucugauauaag

SEQ ID NO: 303131 - RNA, 18 nt, Artificial Sequence
  Synthetic
gguaaaauuuuauauaag

SEQ ID NO: 303132 - RNA, 19 nt, Artificial Sequence
  Synthetic
agguaaaauuuuauauaag

SEQ ID NO: 303133 - RNA, 20 nt, Artificial Sequence
  Synthetic
gagguaaaauuuuauauaag

SEQ ID NO: 303134 - RNA, 21 nt, Artificial Sequence
  Synthetic
ugagguaaaauuuuauauaag

SEQ ID NO: 303135 - RNA, 22 nt, Artificial Sequence
  Synthetic
uugagguaaaauuuuauauaag

SEQ ID NO: 303136 - RNA, 23 nt, Artificial Sequence
  Synthetic
auugagguaaaauuuuauauaag

SEQ ID NO: 303137 - RNA, 24 nt, Artificial Sequence
  Synthetic
aauugagguaaaauuuuauauaag

SEQ ID NO: 303138 - RNA, 18 nt, Artificial Sequence
  Synthetic
cauauauacuucuauaag

SEQ ID NO: 303139 - RNA, 19 nt, Artificial Sequence
  Synthetic
acauauauacuucuauaag

SEQ ID NO: 303140 - RNA, 20 nt, Artificial Sequence
  Synthetic
aacauauauacuucuauaag

SEQ ID NO: 303141 - RNA, 21 nt, Artificial Sequence
  Synthetic
uaacauauauacuucuauaag

SEQ ID NO: 303142 - RNA, 22 nt, Artificial Sequence
  Synthetic
uuaacauauauacuucuauaag

SEQ ID NO: 303143 - RNA, 23 nt, Artificial Sequence
  Synthetic
uuuaacauauauacuucuauaag

SEQ ID NO: 303144 - RNA, 24 nt, Artificial Sequence
  Synthetic
uuuuaacauauauacuucuauaag

SEQ ID NO: 303145 - RNA, 18 nt, Artificial Sequence
  Synthetic
aagacaacaaaguauaag

SEQ ID NO: 303146 - RNA, 19 nt, Artificial Sequence
  Synthetic
gaagacaacaaaguauaag

SEQ ID NO: 303147 - RNA, 20 nt, Artificial Sequence
  Synthetic
agaagacaacaaaguauaag

SEQ ID NO: 303148 - RNA, 21 nt, Artificial Sequence
  Synthetic
uagaagacaacaaaguauaag

SEQ ID NO: 303149 - RNA, 22 nt, Artificial Sequence
  Synthetic
auagaagacaacaaaguauaag

SEQ ID NO: 303150 - RNA, 23 nt, Artificial Sequence
  Synthetic
gauagaagacaacaaaguauaag

SEQ ID NO: 303151 - RNA, 24 nt, Artificial Sequence
  Synthetic
agauagaagacaacaaaguauaag

SEQ ID NO: 303152 - RNA, 18 nt, Artificial Sequence
  Synthetic
cugguaagaagguauaag

SEQ ID NO: 303153 - RNA, 19 nt, Artificial Sequence
  Synthetic
acugguaagaagguauaag

SEQ ID NO: 303154 - RNA, 20 nt, Artificial Sequence
  Synthetic
aacugguaagaagguauaag

SEQ ID NO: 303155 - RNA, 21 nt, Artificial Sequence
  Synthetic
uaacugguaagaagguauaag

SEQ ID NO: 303156 - RNA, 22 nt, Artificial Sequence
  Synthetic
uuaacugguaagaagguauaag

SEQ ID NO: 303157 - RNA, 23 nt, Artificial Sequence
  Synthetic
guuaacugguaagaagguauaag

SEQ ID NO: 303158 - RNA, 24 nt, Artificial Sequence
  Synthetic
aguuaacugguaagaagguauaag

SEQ ID NO: 303159 - RNA, 18 nt, Artificial Sequence
  Synthetic
cuggaguauugguauaag

SEQ ID NO: 303160 - RNA, 19 nt, Artificial Sequence
  Synthetic
acuggaguauugguauaag

SEQ ID NO: 303161 - RNA, 20 nt, Artificial Sequence
  Synthetic
aacuggaguauugguauaag

SEQ ID NO: 303162 - RNA, 21 nt, Artificial Sequence
  Synthetic
aaacuggaguauugguauaag

SEQ ID NO: 303163 - RNA, 22 nt, Artificial Sequence
  Synthetic
uaaacuggaguauugguauaag

SEQ ID NO: 303164 - RNA, 23 nt, Artificial Sequence
  Synthetic
uuaaacuggaguauugguauaag

SEQ ID NO: 303165 - RNA, 24 nt, Artificial Sequence
  Synthetic
cuuaaacuggaguauugguauaag

SEQ ID NO: 303166 - RNA, 18 nt, Artificial Sequence
  Synthetic
aaguagaaacauuauaag

SEQ ID NO: 303167 - RNA, 19 nt, Artificial Sequence
  Synthetic
uaaguagaaacauuauaag

SEQ ID NO: 303168 - RNA, 20 nt, Artificial Sequence
  Synthetic
cuaaguagaaacauuauaag

SEQ ID NO: 303169 - RNA, 21 nt, Artificial Sequence
  Synthetic
acuaaguagaaacauuauaag

SEQ ID NO: 303170 - RNA, 22 nt, Artificial Sequence
  Synthetic
cacuaaguagaaacauuauaag

SEQ ID NO: 303171 - RNA, 23 nt, Artificial Sequence
  Synthetic
ucacuaaguagaaacauuauaag

SEQ ID NO: 303172 - RNA, 24 nt, Artificial Sequence
  Synthetic
aucacuaaguagaaacauuauaag

SEQ ID NO: 303173 - RNA, 18 nt, Artificial Sequence
  Synthetic
uaauaugcacauuauaag

SEQ ID NO: 303174 - RNA, 19 nt, Artificial Sequence
  Synthetic
auaauaugcacauuauaag

SEQ ID NO: 303175 - RNA, 20 nt, Artificial Sequence
  Synthetic
aauaauaugcacauuauaag

SEQ ID NO: 303176 - RNA, 21 nt, Artificial Sequence
  Synthetic
aaauaauaugcacauuauaag

SEQ ID NO: 303177 - RNA, 22 nt, Artificial Sequence
  Synthetic
aaaauaauaugcacauuauaag

SEQ ID NO: 303178 - RNA, 23 nt, Artificial Sequence
  Synthetic
aaaaauaauaugcacauuauaag

SEQ ID NO: 303179 - RNA, 24 nt, Artificial Sequence
  Synthetic
aaaaaauaauaugcacauuauaag

SEQ ID NO: 303180 - RNA, 18 nt, Artificial Sequence
  Synthetic
uauguucucacuuauaag

SEQ ID NO: 303181 - RNA, 19 nt, Artificial Sequence
  Synthetic
guauguucucacuuauaag

SEQ ID NO: 303182 - RNA, 20 nt, Artificial Sequence
  Synthetic
uguauguucucacuuauaag

SEQ ID NO: 303183 - RNA, 21 nt, Artificial Sequence
  Synthetic
cuguauguucucacuuauaag

SEQ ID NO: 303184 - RNA, 22 nt, Artificial Sequence
  Synthetic
acuguauguucucacuuauaag

SEQ ID NO: 303185 - RNA, 23 nt, Artificial Sequence
  Synthetic
uacuguauguucucacuuauaag

SEQ ID NO: 303186 - RNA, 24 nt, Artificial Sequence
  Synthetic
auacuguauguucucacuuauaag

SEQ ID NO: 303187 - RNA, 18 nt, Artificial Sequence
  Synthetic
aacgacacagguuauaag

SEQ ID NO: 303188 - RNA, 19 nt, Artificial Sequence
  Synthetic
gaacgacacagguuauaag

SEQ ID NO: 303189 - RNA, 20 nt, Artificial Sequence
  Synthetic
ggaacgacacagguuauaag

SEQ ID NO: 303190 - RNA, 21 nt, Artificial Sequence
  Synthetic
aggaacgacacagguuauaag

SEQ ID NO: 303191 - RNA, 22 nt, Artificial Sequence
  Synthetic
gaggaacgacacagguuauaag

SEQ ID NO: 303192 - RNA, 23 nt, Artificial Sequence
  Synthetic
agaggaacgacacagguuauaag

SEQ ID NO: 303193 - RNA, 24 nt, Artificial Sequence
  Synthetic
aagaggaacgacacagguuauaag

SEQ ID NO: 303194 - RNA, 18 nt, Artificial Sequence
  Synthetic
uaacuuuuugguuauaag

SEQ ID NO: 303195 - RNA, 19 nt, Artificial Sequence
  Synthetic
auaacuuuuugguuauaag

SEQ ID NO: 303196 - RNA, 20 nt, Artificial Sequence
  Synthetic
uauaacuuuuugguuauaag

SEQ ID NO: 303197 - RNA, 21 nt, Artificial Sequence
  Synthetic
guauaacuuuuugguuauaag

SEQ ID NO: 303198 - RNA, 22 nt, Artificial Sequence
  Synthetic
gguauaacuuuuugguuauaag

SEQ ID NO: 303199 - RNA, 23 nt, Artificial Sequence
  Synthetic
ugguauaacuuuuugguuauaag

SEQ ID NO: 303200 - RNA, 24 nt, Artificial Sequence
  Synthetic
cugguauaacuuuuugguuauaag

SEQ ID NO: 303201 - RNA, 18 nt, Artificial Sequence
  Synthetic
uguuauuguguuuauaag

SEQ ID NO: 303202 - RNA, 19 nt, Artificial Sequence
  Synthetic
guguuauuguguuuauaag

SEQ ID NO: 303203 - RNA, 20 nt, Artificial Sequence
  Synthetic
uguguuauuguguuuauaag

SEQ ID NO: 303204 - RNA, 21 nt, Artificial Sequence
  Synthetic
uuguguuauuguguuuauaag

SEQ ID NO: 303205 - RNA, 22 nt, Artificial Sequence
  Synthetic
auuguguuauuguguuuauaag

SEQ ID NO: 303206 - RNA, 23 nt, Artificial Sequence
  Synthetic
cauuguguuauuguguuuauaag

SEQ ID NO: 303207 - RNA, 24 nt, Artificial Sequence
  Synthetic
acauuguguuauuguguuuauaag

SEQ ID NO: 303208 - RNA, 18 nt, Artificial Sequence
  Synthetic
auugaaggguuuuauaag

SEQ ID NO: 303209 - RNA, 19 nt, Artificial Sequence
  Synthetic
cauugaaggguuuuauaag

SEQ ID NO: 303210 - RNA, 20 nt, Artificial Sequence
  Synthetic
acauugaaggguuuuauaag

SEQ ID NO: 303211 - RNA, 21 nt, Artificial Sequence
  Synthetic
aacauugaaggguuuuauaag

SEQ ID NO: 303212 - RNA, 22 nt, Artificial Sequence
  Synthetic
aaacauugaaggguuuuauaag

SEQ ID NO: 303213 - RNA, 23 nt, Artificial Sequence
  Synthetic
gaaacauugaaggguuuuauaag

SEQ ID NO: 303214 - RNA, 24 nt, Artificial Sequence
  Synthetic
ggaaacauugaaggguuuuauaag

SEQ ID NO: 303215 - RNA, 18 nt, Artificial Sequence
  Synthetic
agaugguauuuuuauaag

SEQ ID NO: 303216 - RNA, 19 nt, Artificial Sequence
  Synthetic
aagaugguauuuuuauaag

SEQ ID NO: 303217 - RNA, 20 nt, Artificial Sequence
  Synthetic
uaagaugguauuuuuauaag

SEQ ID NO: 303218 - RNA, 21 nt, Artificial Sequence
  Synthetic
uuaagaugguauuuuuauaag

SEQ ID NO: 303219 - RNA, 22 nt, Artificial Sequence
  Synthetic
guuaagaugguauuuuuauaag

SEQ ID NO: 303220 - RNA, 23 nt, Artificial Sequence
  Synthetic
aguuaagaugguauuuuuauaag

SEQ ID NO: 303221 - RNA, 24 nt, Artificial Sequence
  Synthetic
aaguuaagaugguauuuuuauaag

SEQ ID NO: 303222 - RNA, 18 nt, Artificial Sequence
  Synthetic
agauaaggcaaaacuaag

SEQ ID NO: 303223 - RNA, 19 nt, Artificial Sequence
  Synthetic
uagauaaggcaaaacuaag

SEQ ID NO: 303224 - RNA, 20 nt, Artificial Sequence
  Synthetic
uuagauaaggcaaaacuaag

SEQ ID NO: 303225 - RNA, 21 nt, Artificial Sequence
  Synthetic
guuagauaaggcaaaacuaag

SEQ ID NO: 303226 - RNA, 22 nt, Artificial Sequence
  Synthetic
uguuagauaaggcaaaacuaag

SEQ ID NO: 303227 - RNA, 23 nt, Artificial Sequence
  Synthetic
cuguuagauaaggcaaaacuaag

SEQ ID NO: 303228 - RNA, 24 nt, Artificial Sequence
  Synthetic
ucuguuagauaaggcaaaacuaag

SEQ ID NO: 303229 - RNA, 18 nt, Artificial Sequence
  Synthetic
uggaauuauaaaacuaag

SEQ ID NO: 303230 - RNA, 19 nt, Artificial Sequence
  Synthetic
cuggaauuauaaaacuaag

SEQ ID NO: 303231 - RNA, 20 nt, Artificial Sequence
  Synthetic
ucuggaauuauaaaacuaag

SEQ ID NO: 303232 - RNA, 21 nt, Artificial Sequence
  Synthetic
uucuggaauuauaaaacuaag

SEQ ID NO: 303233 - RNA, 22 nt, Artificial Sequence
  Synthetic
guucuggaauuauaaaacuaag

SEQ ID NO: 303234 - RNA, 23 nt, Artificial Sequence
  Synthetic
aguucuggaauuauaaaacuaag

SEQ ID NO: 303235 - RNA, 24 nt, Artificial Sequence
  Synthetic
aaguucuggaauuauaaaacuaag

SEQ ID NO: 303236 - RNA, 18 nt, Artificial Sequence
  Synthetic
uuacagagaacaacuaag

SEQ ID NO: 303237 - RNA, 19 nt, Artificial Sequence
  Synthetic
auuacagagaacaacuaag

SEQ ID NO: 303238 - RNA, 20 nt, Artificial Sequence
  Synthetic
cauuacagagaacaacuaag

SEQ ID NO: 303239 - RNA, 21 nt, Artificial Sequence
  Synthetic
ccauuacagagaacaacuaag

SEQ ID NO: 303240 - RNA, 22 nt, Artificial Sequence
  Synthetic
accauuacagagaacaacuaag

SEQ ID NO: 303241 - RNA, 23 nt, Artificial Sequence
  Synthetic
caccauuacagagaacaacuaag

SEQ ID NO: 303242 - RNA, 24 nt, Artificial Sequence
  Synthetic
acaccauuacagagaacaacuaag

SEQ ID NO: 303243 - RNA, 18 nt, Artificial Sequence
  Synthetic
aagugacuuucaacuaag

SEQ ID NO: 303244 - RNA, 19 nt, Artificial Sequence
  Synthetic
caagugacuuucaacuaag

SEQ ID NO: 303245 - RNA, 20 nt, Artificial Sequence
  Synthetic
ucaagugacuuucaacuaag

SEQ ID NO: 303246 - RNA, 21 nt, Artificial Sequence
  Synthetic
uucaagugacuuucaacuaag

SEQ ID NO: 303247 - RNA, 22 nt, Artificial Sequence
  Synthetic
uuucaagugacuuucaacuaag

SEQ ID NO: 303248 - RNA, 23 nt, Artificial Sequence
  Synthetic
uuuucaagugacuuucaacuaag

SEQ ID NO: 303249 - RNA, 24 nt, Artificial Sequence
  Synthetic
cuuuucaagugacuuucaacuaag

SEQ ID NO: 303250 - RNA, 18 nt, Artificial Sequence
  Synthetic
cuuguaggagccacuaag

SEQ ID NO: 303251 - RNA, 19 nt, Artificial Sequence
  Synthetic
ccuuguaggagccacuaag

SEQ ID NO: 303252 - RNA, 20 nt, Artificial Sequence
  Synthetic
cccuuguaggagccacuaag

SEQ ID NO: 303253 - RNA, 21 nt, Artificial Sequence
  Synthetic
ucccuuguaggagccacuaag

SEQ ID NO: 303254 - RNA, 22 nt, Artificial Sequence
  Synthetic
aucccuuguaggagccacuaag

SEQ ID NO: 303255 - RNA, 23 nt, Artificial Sequence
  Synthetic
aaucccuuguaggagccacuaag

SEQ ID NO: 303256 - RNA, 24 nt, Artificial Sequence
  Synthetic
uaaucccuuguaggagccacuaag

SEQ ID NO: 303257 - RNA, 18 nt, Artificial Sequence
  Synthetic
ugaaucaaaagcacuaag

SEQ ID NO: 303258 - RNA, 19 nt, Artificial Sequence
  Synthetic
cugaaucaaaagcacuaag

SEQ ID NO: 303259 - RNA, 20 nt, Artificial Sequence
  Synthetic
acugaaucaaaagcacuaag

SEQ ID NO: 303260 - RNA, 21 nt, Artificial Sequence
  Synthetic
cacugaaucaaaagcacuaag

SEQ ID NO: 303261 - RNA, 22 nt, Artificial Sequence
  Synthetic
ccacugaaucaaaagcacuaag

SEQ ID NO: 303262 - RNA, 23 nt, Artificial Sequence
  Synthetic
cccacugaaucaaaagcacuaag

SEQ ID NO: 303263 - RNA, 24 nt, Artificial Sequence
  Synthetic
acccacugaaucaaaagcacuaag

SEQ ID NO: 303264 - RNA, 18 nt, Artificial Sequence
  Synthetic
aguugaaaaaucacuaag

SEQ ID NO: 303265 - RNA, 19 nt, Artificial Sequence
  Synthetic
aaguugaaaaaucacuaag

SEQ ID NO: 303266 - RNA, 20 nt, Artificial Sequence
  Synthetic
aaaguugaaaaaucacuaag

SEQ ID NO: 303267 - RNA, 21 nt, Artificial Sequence
  Synthetic
uaaaguugaaaaaucacuaag

SEQ ID NO: 303268 - RNA, 22 nt, Artificial Sequence
  Synthetic
cuaaaguugaaaaaucacuaag

SEQ ID NO: 303269 - RNA, 23 nt, Artificial Sequence
  Synthetic
ccuaaaguugaaaaaucacuaag

SEQ ID NO: 303270 - RNA, 24 nt, Artificial Sequence
  Synthetic
cccuaaaguugaaaaaucacuaag

SEQ ID NO: 303271 - RNA, 18 nt, Artificial Sequence
  Synthetic
ucuccuucagugacuaag

SEQ ID NO: 303272 - RNA, 19 nt, Artificial Sequence
  Synthetic
uucuccuucagugacuaag

SEQ ID NO: 303273 - RNA, 20 nt, Artificial Sequence
  Synthetic
uuucuccuucagugacuaag

SEQ ID NO: 303274 - RNA, 21 nt, Artificial Sequence
  Synthetic
guuucuccuucagugacuaag

SEQ ID NO: 303275 - RNA, 22 nt, Artificial Sequence
  Synthetic
uguuucuccuucagugacuaag

SEQ ID NO: 303276 - RNA, 23 nt, Artificial Sequence
  Synthetic
auguuucuccuucagugacuaag

SEQ ID NO: 303277 - RNA, 24 nt, Artificial Sequence
  Synthetic
cauguuucuccuucagugacuaag

SEQ ID NO: 303278 - RNA, 18 nt, Artificial Sequence
  Synthetic
caauuaauugcuacuaag

SEQ ID NO: 303279 - RNA, 19 nt, Artificial Sequence
  Synthetic
ccaauuaauugcuacuaag

SEQ ID NO: 303280 - RNA, 20 nt, Artificial Sequence
  Synthetic
gccaauuaauugcuacuaag

SEQ ID NO: 303281 - RNA, 21 nt, Artificial Sequence
  Synthetic
ugccaauuaauugcuacuaag

SEQ ID NO: 303282 - RNA, 22 nt, Artificial Sequence
  Synthetic
uugccaauuaauugcuacuaag

SEQ ID NO: 303283 - RNA, 23 nt, Artificial Sequence
  Synthetic
auugccaauuaauugcuacuaag

SEQ ID NO: 303284 - RNA, 24 nt, Artificial Sequence
  Synthetic
uauugccaauuaauugcuacuaag

SEQ ID NO: 303285 - RNA, 18 nt, Artificial Sequence
  Synthetic
cuuugcucuggaccuaag

SEQ ID NO: 303286 - RNA, 19 nt, Artificial Sequence
  Synthetic
ucuuugcucuggaccuaag

SEQ ID NO: 303287 - RNA, 20 nt, Artificial Sequence
  Synthetic
gucuuugcucuggaccuaag

SEQ ID NO: 303288 - RNA, 21 nt, Artificial Sequence
  Synthetic
ugucuuugcucuggaccuaag

SEQ ID NO: 303289 - RNA, 22 nt, Artificial Sequence
  Synthetic
augucuuugcucuggaccuaag

SEQ ID NO: 303290 - RNA, 23 nt, Artificial Sequence
  Synthetic
uaugucuuugcucuggaccuaag

SEQ ID NO: 303291 - RNA, 24 nt, Artificial Sequence
  Synthetic
auaugucuuugcucuggaccuaag

SEQ ID NO: 303292 - RNA, 18 nt, Artificial Sequence
  Synthetic
aaagaagacauaccuaag

SEQ ID NO: 303293 - RNA, 19 nt, Artificial Sequence
  Synthetic
aaaagaagacauaccuaag

SEQ ID NO: 303294 - RNA, 20 nt, Artificial Sequence
  Synthetic
uaaaagaagacauaccuaag

SEQ ID NO: 303295 - RNA, 21 nt, Artificial Sequence
  Synthetic
uuaaaagaagacauaccuaag

SEQ ID NO: 303296 - RNA, 22 nt, Artificial Sequence
  Synthetic
uuuaaaagaagacauaccuaag

SEQ ID NO: 303297 - RNA, 23 nt, Artificial Sequence
  Synthetic
uuuuaaaagaagacauaccuaag

SEQ ID NO: 303298 - RNA, 24 nt, Artificial Sequence
  Synthetic
auuuuaaaagaagacauaccuaag

SEQ ID NO: 303299 - RNA, 18 nt, Artificial Sequence
  Synthetic
cccuuaaauauaccuaag

SEQ ID NO: 303300 - RNA, 19 nt, Artificial Sequence
  Synthetic
acccuuaaauauaccuaag

SEQ ID NO: 303301 - RNA, 20 nt, Artificial Sequence
  Synthetic
uacccuuaaauauaccuaag

SEQ ID NO: 303302 - RNA, 21 nt, Artificial Sequence
  Synthetic
guacccuuaaauauaccuaag

SEQ ID NO: 303303 - RNA, 22 nt, Artificial Sequence
  Synthetic
aguacccuuaaauauaccuaag

SEQ ID NO: 303304 - RNA, 23 nt, Artificial Sequence
  Synthetic
aaguacccuuaaauauaccuaag

SEQ ID NO: 303305 - RNA, 24 nt, Artificial Sequence
  Synthetic
gaaguacccuuaaauauaccuaag

SEQ ID NO: 303306 - RNA, 18 nt, Artificial Sequence
  Synthetic
auauuuaauaucccuaag

SEQ ID NO: 303307 - RNA, 19 nt, Artificial Sequence
  Synthetic
aauauuuaauaucccuaag

SEQ ID NO: 303308 - RNA, 20 nt, Artificial Sequence
  Synthetic
gaauauuuaauaucccuaag

SEQ ID NO: 303309 - RNA, 21 nt, Artificial Sequence
  Synthetic
ggaauauuuaauaucccuaag

SEQ ID NO: 303310 - RNA, 22 nt, Artificial Sequence
  Synthetic
aggaauauuuaauaucccuaag

SEQ ID NO: 303311 - RNA, 23 nt, Artificial Sequence
  Synthetic
gaggaauauuuaauaucccuaag

SEQ ID NO: 303312 - RNA, 24 nt, Artificial Sequence
  Synthetic
ggaggaauauuuaauaucccuaag

SEQ ID NO: 303313 - RNA, 18 nt, Artificial Sequence
  Synthetic
uucaauuuuuucccuaag

SEQ ID NO: 303314 - RNA, 19 nt, Artificial Sequence
  Synthetic
cuucaauuuuuucccuaag

SEQ ID NO: 303315 - RNA, 20 nt, Artificial Sequence
  Synthetic
acuucaauuuuuucccuaag

SEQ ID NO: 303316 - RNA, 21 nt, Artificial Sequence
  Synthetic
cacuucaauuuuuucccuaag

SEQ ID NO: 303317 - RNA, 22 nt, Artificial Sequence
  Synthetic
ucacuucaauuuuuucccuaag

SEQ ID NO: 303318 - RNA, 23 nt, Artificial Sequence
  Synthetic
aucacuucaauuuuuucccuaag

SEQ ID NO: 303319 - RNA, 24 nt, Artificial Sequence
  Synthetic
aaucacuucaauuuuuucccuaag

SEQ ID NO: 303320 - RNA, 18 nt, Artificial Sequence
  Synthetic
gcuacgugguagccuaag

SEQ ID NO: 303321 - RNA, 19 nt, Artificial Sequence
  Synthetic
ugcuacgugguagccuaag

SEQ ID NO: 303322 - RNA, 20 nt, Artificial Sequence
  Synthetic
augcuacgugguagccuaag

SEQ ID NO: 303323 - RNA, 21 nt, Artificial Sequence
  Synthetic
aaugcuacgugguagccuaag

SEQ ID NO: 303324 - RNA, 22 nt, Artificial Sequence
  Synthetic
aaaugcuacgugguagccuaag

SEQ ID NO: 303325 - RNA, 23 nt, Artificial Sequence
  Synthetic
gaaaugcuacgugguagccuaag

SEQ ID NO: 303326 - RNA, 24 nt, Artificial Sequence
  Synthetic
ugaaaugcuacgugguagccuaag

SEQ ID NO: 303327 - RNA, 18 nt, Artificial Sequence
  Synthetic
ucauuuuggcugccuaag

SEQ ID NO: 303328 - RNA, 19 nt, Artificial Sequence
  Synthetic
aucauuuuggcugccuaag

SEQ ID NO: 303329 - RNA, 20 nt, Artificial Sequence
  Synthetic
uaucauuuuggcugccuaag

SEQ ID NO: 303330 - RNA, 21 nt, Artificial Sequence
  Synthetic
auaucauuuuggcugccuaag

SEQ ID NO: 303331 - RNA, 22 nt, Artificial Sequence
  Synthetic
aauaucauuuuggcugccuaag

SEQ ID NO: 303332 - RNA, 23 nt, Artificial Sequence
  Synthetic
aaauaucauuuuggcugccuaag

SEQ ID NO: 303333 - RNA, 24 nt, Artificial Sequence
  Synthetic
gaaauaucauuuuggcugccuaag

SEQ ID NO: 303334 - RNA, 18 nt, Artificial Sequence
  Synthetic
uauacaaauucagcuaag

SEQ ID NO: 303335 - RNA, 19 nt, Artificial Sequence
  Synthetic
uuauacaaauucagcuaag

SEQ ID NO: 303336 - RNA, 20 nt, Artificial Sequence
  Synthetic
auuauacaaauucagcuaag

SEQ ID NO: 303337 - RNA, 21 nt, Artificial Sequence
  Synthetic
aauuauacaaauucagcuaag

SEQ ID NO: 303338 - RNA, 22 nt, Artificial Sequence
  Synthetic
aaauuauacaaauucagcuaag

SEQ ID NO: 303339 - RNA, 23 nt, Artificial Sequence
  Synthetic
uaaauuauacaaauucagcuaag

SEQ ID NO: 303340 - RNA, 24 nt, Artificial Sequence
  Synthetic
uuaaauuauacaaauucagcuaag

SEQ ID NO: 303341 - RNA, 18 nt, Artificial Sequence
  Synthetic
gaacaaagcugagcuaag

SEQ ID NO: 303342 - RNA, 19 nt, Artificial Sequence
  Synthetic
ugaacaaagcugagcuaag

SEQ ID NO: 303343 - RNA, 20 nt, Artificial Sequence
  Synthetic
augaacaaagcugagcuaag

SEQ ID NO: 303344 - RNA, 21 nt, Artificial Sequence
  Synthetic
aaugaacaaagcugagcuaag

SEQ ID NO: 303345 - RNA, 22 nt, Artificial Sequence
  Synthetic
gaaugaacaaagcugagcuaag

SEQ ID NO: 303346 - RNA, 23 nt, Artificial Sequence
  Synthetic
ugaaugaacaaagcugagcuaag

SEQ ID NO: 303347 - RNA, 24 nt, Artificial Sequence
  Synthetic
uugaaugaacaaagcugagcuaag

SEQ ID NO: 303348 - RNA, 18 nt, Artificial Sequence
  Synthetic
uggauuuuuuuagcuaag

SEQ ID NO: 303349 - RNA, 19 nt, Artificial Sequence
  Synthetic
uuggauuuuuuuagcuaag

SEQ ID NO: 303350 - RNA, 20 nt, Artificial Sequence
  Synthetic
uuuggauuuuuuuagcuaag

SEQ ID NO: 303351 - RNA, 21 nt, Artificial Sequence
  Synthetic
auuuggauuuuuuuagcuaag

SEQ ID NO: 303352 - RNA, 22 nt, Artificial Sequence
  Synthetic
aauuuggauuuuuuuagcuaag

SEQ ID NO: 303353 - RNA, 23 nt, Artificial Sequence
  Synthetic
gaauuuggauuuuuuuagcuaag

SEQ ID NO: 303354 - RNA, 24 nt, Artificial Sequence
  Synthetic
agaauuuggauuuuuuuagcuaag

SEQ ID NO: 303355 - RNA, 18 nt, Artificial Sequence
  Synthetic
gcacuuuggaaggcuaag

SEQ ID NO: 303356 - RNA, 19 nt, Artificial Sequence
  Synthetic
agcacuuuggaaggcuaag

SEQ ID NO: 303357 - RNA, 20 nt, Artificial Sequence
  Synthetic
uagcacuuuggaaggcuaag

SEQ ID NO: 303358 - RNA, 21 nt, Artificial Sequence
  Synthetic
cuagcacuuuggaaggcuaag

SEQ ID NO: 303359 - RNA, 22 nt, Artificial Sequence
  Synthetic
ccuagcacuuuggaaggcuaag

SEQ ID NO: 303360 - RNA, 23 nt, Artificial Sequence
  Synthetic
uccuagcacuuuggaaggcuaag

SEQ ID NO: 303361 - RNA, 24 nt, Artificial Sequence
  Synthetic
auccuagcacuuuggaaggcuaag

SEQ ID NO: 303362 - RNA, 18 nt, Artificial Sequence
  Synthetic
cauuguagaauugcuaag

SEQ ID NO: 303363 - RNA, 19 nt, Artificial Sequence
  Synthetic
acauuguagaauugcuaag

SEQ ID NO: 303364 - RNA, 20 nt, Artificial Sequence
  Synthetic
aacauuguagaauugcuaag

SEQ ID NO: 303365 - RNA, 21 nt, Artificial Sequence
  Synthetic
gaacauuguagaauugcuaag

SEQ ID NO: 303366 - RNA, 22 nt, Artificial Sequence
  Synthetic
ggaacauuguagaauugcuaag

SEQ ID NO: 303367 - RNA, 23 nt, Artificial Sequence
  Synthetic
aggaacauuguagaauugcuaag

SEQ ID NO: 303368 - RNA, 24 nt, Artificial Sequence
  Synthetic
uaggaacauuguagaauugcuaag

SEQ ID NO: 303369 - RNA, 18 nt, Artificial Sequence
  Synthetic
cacauugaaaaaucuaag

SEQ ID NO: 303370 - RNA, 19 nt, Artificial Sequence
  Synthetic
acacauugaaaaaucuaag

SEQ ID NO: 303371 - RNA, 20 nt, Artificial Sequence
  Synthetic
aacacauugaaaaaucuaag

SEQ ID NO: 303372 - RNA, 21 nt, Artificial Sequence
  Synthetic
caacacauugaaaaaucuaag

SEQ ID NO: 303373 - RNA, 22 nt, Artificial Sequence
  Synthetic
ccaacacauugaaaaaucuaag

SEQ ID NO: 303374 - RNA, 23 nt, Artificial Sequence
  Synthetic
cccaacacauugaaaaaucuaag

SEQ ID NO: 303375 - RNA, 24 nt, Artificial Sequence
  Synthetic
gcccaacacauugaaaaaucuaag

SEQ ID NO: 303376 - RNA, 18 nt, Artificial Sequence
  Synthetic
uugguuaugucaucuaag

SEQ ID NO: 303377 - RNA, 19 nt, Artificial Sequence
  Synthetic
auugguuaugucaucuaag

SEQ ID NO: 303378 - RNA, 20 nt, Artificial Sequence
  Synthetic
aauugguuaugucaucuaag

SEQ ID NO: 303379 - RNA, 21 nt, Artificial Sequence
  Synthetic
aaauugguuaugucaucuaag

SEQ ID NO: 303380 - RNA, 22 nt, Artificial Sequence
  Synthetic
caaauugguuaugucaucuaag

SEQ ID NO: 303381 - RNA, 23 nt, Artificial Sequence
  Synthetic
ucaaauugguuaugucaucuaag

SEQ ID NO: 303382 - RNA, 24 nt, Artificial Sequence
  Synthetic
cucaaauugguuaugucaucuaag

SEQ ID NO: 303383 - RNA, 18 nt, Artificial Sequence
  Synthetic
gaccuggucuacucuaag

SEQ ID NO: 303384 - RNA, 19 nt, Artificial Sequence
  Synthetic
ggaccuggucuacucuaag

SEQ ID NO: 303385 - RNA, 20 nt, Artificial Sequence
  Synthetic
cggaccuggucuacucuaag

SEQ ID NO: 303386 - RNA, 21 nt, Artificial Sequence
  Synthetic
acggaccuggucuacucuaag

SEQ ID NO: 303387 - RNA, 22 nt, Artificial Sequence
  Synthetic
gacggaccuggucuacucuaag

SEQ ID NO: 303388 - RNA, 23 nt, Artificial Sequence
  Synthetic
ggacggaccuggucuacucuaag

SEQ ID NO: 303389 - RNA, 24 nt, Artificial Sequence
  Synthetic
uggacggaccuggucuacucuaag

SEQ ID NO: 303390 - RNA, 18 nt, Artificial Sequence
  Synthetic
gcuuauuaagagucuaag

SEQ ID NO: 303391 - RNA, 19 nt, Artificial Sequence
  Synthetic
cgcuuauuaagagucuaag

SEQ ID NO: 303392 - RNA, 20 nt, Artificial Sequence
  Synthetic
gcgcuuauuaagagucuaag

SEQ ID NO: 303393 - RNA, 21 nt, Artificial Sequence
  Synthetic
agcgcuuauuaagagucuaag

SEQ ID NO: 303394 - RNA, 22 nt, Artificial Sequence
  Synthetic
uagcgcuuauuaagagucuaag

SEQ ID NO: 303395 - RNA, 23 nt, Artificial Sequence
  Synthetic
auagcgcuuauuaagagucuaag

SEQ ID NO: 303396 - RNA, 24 nt, Artificial Sequence
  Synthetic
cauagcgcuuauuaagagucuaag

SEQ ID NO: 303397 - RNA, 18 nt, Artificial Sequence
  Synthetic
ggaagacuagagucuaag

SEQ ID NO: 303398 - RNA, 19 nt, Artificial Sequence
  Synthetic
gggaagacuagagucuaag

SEQ ID NO: 303399 - RNA, 20 nt, Artificial Sequence
  Synthetic
ugggaagacuagagucuaag

SEQ ID NO: 303400 - RNA, 21 nt, Artificial Sequence
  Synthetic
uugggaagacuagagucuaag

SEQ ID NO: 303401 - RNA, 22 nt, Artificial Sequence
  Synthetic
cuugggaagacuagagucuaag

SEQ ID NO: 303402 - RNA, 23 nt, Artificial Sequence
  Synthetic
ccuugggaagacuagagucuaag

SEQ ID NO: 303403 - RNA, 24 nt, Artificial Sequence
  Synthetic
accuugggaagacuagagucuaag

SEQ ID NO: 303404 - RNA, 18 nt, Artificial Sequence
  Synthetic
cccuaguagaugucuaag

SEQ ID NO: 303405 - RNA, 19 nt, Artificial Sequence
  Synthetic
ucccuaguagaugucuaag

SEQ ID NO: 303406 - RNA, 20 nt, Artificial Sequence
  Synthetic
uucccuaguagaugucuaag

SEQ ID NO: 303407 - RNA, 21 nt, Artificial Sequence
  Synthetic
auucccuaguagaugucuaag

SEQ ID NO: 303408 - RNA, 22 nt, Artificial Sequence
  Synthetic
aauucccuaguagaugucuaag

SEQ ID NO: 303409 - RNA, 23 nt, Artificial Sequence
  Synthetic
uaauucccuaguagaugucuaag

SEQ ID NO: 303410 - RNA, 24 nt, Artificial Sequence
  Synthetic
uuaauucccuaguagaugucuaag

SEQ ID NO: 303411 - RNA, 18 nt, Artificial Sequence
  Synthetic
aggaucccuaauucuaag

SEQ ID NO: 303412 - RNA, 19 nt, Artificial Sequence
  Synthetic
aaggaucccuaauucuaag

SEQ ID NO: 303413 - RNA, 20 nt, Artificial Sequence
  Synthetic
uaaggaucccuaauucuaag

SEQ ID NO: 303414 - RNA, 21 nt, Artificial Sequence
  Synthetic
uuaaggaucccuaauucuaag

SEQ ID NO: 303415 - RNA, 22 nt, Artificial Sequence
  Synthetic
uuuaaggaucccuaauucuaag

SEQ ID NO: 303416 - RNA, 23 nt, Artificial Sequence
  Synthetic
auuuaaggaucccuaauucuaag

SEQ ID NO: 303417 - RNA, 24 nt, Artificial Sequence
  Synthetic
aauuuaaggaucccuaauucuaag

SEQ ID NO: 303418 - RNA, 18 nt, Artificial Sequence
  Synthetic
uggcugcaugauucuaag

SEQ ID NO: 303419 - RNA, 19 nt, Artificial Sequence
  Synthetic
cuggcugcaugauucuaag

SEQ ID NO: 303420 - RNA, 20 nt, Artificial Sequence
  Synthetic
gcuggcugcaugauucuaag

SEQ ID NO: 303421 - RNA, 21 nt, Artificial Sequence
  Synthetic
agcuggcugcaugauucuaag

SEQ ID NO: 303422 - RNA, 22 nt, Artificial Sequence
  Synthetic
cagcuggcugcaugauucuaag

SEQ ID NO: 303423 - RNA, 23 nt, Artificial Sequence
  Synthetic
ucagcuggcugcaugauucuaag

SEQ ID NO: 303424 - RNA, 24 nt, Artificial Sequence
  Synthetic
uucagcuggcugcaugauucuaag

SEQ ID NO: 303425 - RNA, 18 nt, Artificial Sequence
  Synthetic
gaggcuuguccuucuaag

SEQ ID NO: 303426 - RNA, 19 nt, Artificial Sequence
  Synthetic
ggaggcuuguccuucuaag

SEQ ID NO: 303427 - RNA, 20 nt, Artificial Sequence
  Synthetic
gggaggcuuguccuucuaag

SEQ ID NO: 303428 - RNA, 21 nt, Artificial Sequence
  Synthetic
agggaggcuuguccuucuaag

SEQ ID NO: 303429 - RNA, 22 nt, Artificial Sequence
  Synthetic
uagggaggcuuguccuucuaag

SEQ ID NO: 303430 - RNA, 23 nt, Artificial Sequence
  Synthetic
cuagggaggcuuguccuucuaag

SEQ ID NO: 303431 - RNA, 24 nt, Artificial Sequence
  Synthetic
acuagggaggcuuguccuucuaag

SEQ ID NO: 303432 - RNA, 18 nt, Artificial Sequence
  Synthetic
uaguggggaauuucuaag

SEQ ID NO: 303433 - RNA, 19 nt, Artificial Sequence
  Synthetic
auaguggggaauuucuaag

SEQ ID NO: 303434 - RNA, 20 nt, Artificial Sequence
  Synthetic
cauaguggggaauuucuaag

SEQ ID NO: 303435 - RNA, 21 nt, Artificial Sequence
  Synthetic
ucauaguggggaauuucuaag

SEQ ID NO: 303436 - RNA, 22 nt, Artificial Sequence
  Synthetic
aucauaguggggaauuucuaag

SEQ ID NO: 303437 - RNA, 23 nt, Artificial Sequence
  Synthetic
aaucauaguggggaauuucuaag

SEQ ID NO: 303438 - RNA, 24 nt, Artificial Sequence
  Synthetic
aaaucauaguggggaauuucuaag

SEQ ID NO: 303439 - RNA, 18 nt, Artificial Sequence
  Synthetic
aaacauuuauaaaguaag

SEQ ID NO: 303440 - RNA, 19 nt, Artificial Sequence
  Synthetic
aaaacauuuauaaaguaag

SEQ ID NO: 303441 - RNA, 20 nt, Artificial Sequence
  Synthetic
uaaaacauuuauaaaguaag

SEQ ID NO: 303442 - RNA, 21 nt, Artificial Sequence
  Synthetic
guaaaacauuuauaaaguaag

SEQ ID NO: 303443 - RNA, 22 nt, Artificial Sequence
  Synthetic
aguaaaacauuuauaaaguaag

SEQ ID NO: 303444 - RNA, 23 nt, Artificial Sequence
  Synthetic
aaguaaaacauuuauaaaguaag

SEQ ID NO: 303445 - RNA, 24 nt, Artificial Sequence
  Synthetic
uaaguaaaacauuuauaaaguaag

SEQ ID NO: 303446 - RNA, 18 nt, Artificial Sequence
  Synthetic
gagaagugaggaaguaag

SEQ ID NO: 303447 - RNA, 19 nt, Artificial Sequence
  Synthetic
ugagaagugaggaaguaag

SEQ ID NO: 303448 - RNA, 20 nt, Artificial Sequence
  Synthetic
augagaagugaggaaguaag

SEQ ID NO: 303449 - RNA, 21 nt, Artificial Sequence
  Synthetic
aaugagaagugaggaaguaag

SEQ ID NO: 303450 - RNA, 22 nt, Artificial Sequence
  Synthetic
aaaugagaagugaggaaguaag

SEQ ID NO: 303451 - RNA, 23 nt, Artificial Sequence
  Synthetic
gaaaugagaagugaggaaguaag

SEQ ID NO: 303452 - RNA, 24 nt, Artificial Sequence
  Synthetic
ggaaaugagaagugaggaaguaag

SEQ ID NO: 303453 - RNA, 18 nt, Artificial Sequence
  Synthetic
agguauuguguaaguaag

SEQ ID NO: 303454 - RNA, 19 nt, Artificial Sequence
  Synthetic
aagguauuguguaaguaag

SEQ ID NO: 303455 - RNA, 20 nt, Artificial Sequence
  Synthetic
uaagguauuguguaaguaag

SEQ ID NO: 303456 - RNA, 21 nt, Artificial Sequence
  Synthetic
cuaagguauuguguaaguaag

SEQ ID NO: 303457 - RNA, 22 nt, Artificial Sequence
  Synthetic
gcuaagguauuguguaaguaag

SEQ ID NO: 303458 - RNA, 23 nt, Artificial Sequence
  Synthetic
ggcuaagguauuguguaaguaag

SEQ ID NO: 303459 - RNA, 24 nt, Artificial Sequence
  Synthetic
uggcuaagguauuguguaaguaag

SEQ ID NO: 303460 - RNA, 18 nt, Artificial Sequence
  Synthetic
cugaaaucuagcaguaag

SEQ ID NO: 303461 - RNA, 19 nt, Artificial Sequence
  Synthetic
ccugaaaucuagcaguaag

SEQ ID NO: 303462 - RNA, 20 nt, Artificial Sequence
  Synthetic
cccugaaaucuagcaguaag

SEQ ID NO: 303463 - RNA, 21 nt, Artificial Sequence
  Synthetic
ucccugaaaucuagcaguaag

SEQ ID NO: 303464 - RNA, 22 nt, Artificial Sequence
  Synthetic
uucccugaaaucuagcaguaag

SEQ ID NO: 303465 - RNA, 23 nt, Artificial Sequence
  Synthetic
uuucccugaaaucuagcaguaag

SEQ ID NO: 303466 - RNA, 24 nt, Artificial Sequence
  Synthetic
uuuucccugaaaucuagcaguaag

SEQ ID NO: 303467 - RNA, 18 nt, Artificial Sequence
  Synthetic
ggcagagguugcaguaag

SEQ ID NO: 303468 - RNA, 19 nt, Artificial Sequence
  Synthetic
aggcagagguugcaguaag

SEQ ID NO: 303469 - RNA, 20 nt, Artificial Sequence
  Synthetic
gaggcagagguugcaguaag

SEQ ID NO: 303470 - RNA, 21 nt, Artificial Sequence
  Synthetic
ggaggcagagguugcaguaag

SEQ ID NO: 303471 - RNA, 22 nt, Artificial Sequence
  Synthetic
aggaggcagagguugcaguaag

SEQ ID NO: 303472 - RNA, 23 nt, Artificial Sequence
  Synthetic
caggaggcagagguugcaguaag

SEQ ID NO: 303473 - RNA, 24 nt, Artificial Sequence
  Synthetic
ccaggaggcagagguugcaguaag

SEQ ID NO: 303474 - RNA, 18 nt, Artificial Sequence
  Synthetic
acacgauguaucaguaag

SEQ ID NO: 303475 - RNA, 19 nt, Artificial Sequence
  Synthetic
aacacgauguaucaguaag

SEQ ID NO: 303476 - RNA, 20 nt, Artificial Sequence
  Synthetic
caacacgauguaucaguaag

SEQ ID NO: 303477 - RNA, 21 nt, Artificial Sequence
  Synthetic
acaacacgauguaucaguaag

SEQ ID NO: 303478 - RNA, 22 nt, Artificial Sequence
  Synthetic
cacaacacgauguaucaguaag

SEQ ID NO: 303479 - RNA, 23 nt, Artificial Sequence
  Synthetic
gcacaacacgauguaucaguaag

SEQ ID NO: 303480 - RNA, 24 nt, Artificial Sequence
  Synthetic
cgcacaacacgauguaucaguaag

SEQ ID NO: 303481 - RNA, 18 nt, Artificial Sequence
  Synthetic
auaaaaauuaucaguaag

SEQ ID NO: 303482 - RNA, 19 nt, Artificial Sequence
  Synthetic
gauaaaaauuaucaguaag

SEQ ID NO: 303483 - RNA, 20 nt, Artificial Sequence
  Synthetic
agauaaaaauuaucaguaag

SEQ ID NO: 303484 - RNA, 21 nt, Artificial Sequence
  Synthetic
uagauaaaaauuaucaguaag

SEQ ID NO: 303485 - RNA, 22 nt, Artificial Sequence
  Synthetic
uuagauaaaaauuaucaguaag

SEQ ID NO: 303486 - RNA, 23 nt, Artificial Sequence
  Synthetic
auuagauaaaaauuaucaguaag

SEQ ID NO: 303487 - RNA, 24 nt, Artificial Sequence
  Synthetic
aauuagauaaaaauuaucaguaag

SEQ ID NO: 303488 - RNA, 18 nt, Artificial Sequence
  Synthetic
uuaaucauuuucaguaag

SEQ ID NO: 303489 - RNA, 19 nt, Artificial Sequence
  Synthetic
auuaaucauuuucaguaag

SEQ ID NO: 303490 - RNA, 20 nt, Artificial Sequence
  Synthetic
gauuaaucauuuucaguaag

SEQ ID NO: 303491 - RNA, 21 nt, Artificial Sequence
  Synthetic
agauuaaucauuuucaguaag

SEQ ID NO: 303492 - RNA, 22 nt, Artificial Sequence
  Synthetic
aagauuaaucauuuucaguaag

SEQ ID NO: 303493 - RNA, 23 nt, Artificial Sequence
  Synthetic
aaagauuaaucauuuucaguaag

SEQ ID NO: 303494 - RNA, 24 nt, Artificial Sequence
  Synthetic
uaaagauuaaucauuuucaguaag

SEQ ID NO: 303495 - RNA, 18 nt, Artificial Sequence
  Synthetic
gcugcagccucgaguaag

SEQ ID NO: 303496 - RNA, 19 nt, Artificial Sequence
  Synthetic
agcugcagccucgaguaag

SEQ ID NO: 303497 - RNA, 20 nt, Artificial Sequence
  Synthetic
uagcugcagccucgaguaag

SEQ ID NO: 303498 - RNA, 21 nt, Artificial Sequence
  Synthetic
auagcugcagccucgaguaag

SEQ ID NO: 303499 - RNA, 22 nt, Artificial Sequence
  Synthetic
aauagcugcagccucgaguaag

SEQ ID NO: 303500 - RNA, 23 nt, Artificial Sequence
  Synthetic
uaauagcugcagccucgaguaag

SEQ ID NO: 303501 - RNA, 24 nt, Artificial Sequence
  Synthetic
auaauagcugcagccucgaguaag

SEQ ID NO: 303502 - RNA, 18 nt, Artificial Sequence
  Synthetic
uaaauuugagcuaguaag

SEQ ID NO: 303503 - RNA, 19 nt, Artificial Sequence
  Synthetic
auaaauuugagcuaguaag

SEQ ID NO: 303504 - RNA, 20 nt, Artificial Sequence
  Synthetic
aauaaauuugagcuaguaag

SEQ ID NO: 303505 - RNA, 21 nt, Artificial Sequence
  Synthetic
aaauaaauuugagcuaguaag

SEQ ID NO: 303506 - RNA, 22 nt, Artificial Sequence
  Synthetic
aaaauaaauuugagcuaguaag

SEQ ID NO: 303507 - RNA, 23 nt, Artificial Sequence
  Synthetic
caaaauaaauuugagcuaguaag

SEQ ID NO: 303508 - RNA, 24 nt, Artificial Sequence
  Synthetic
ucaaaauaaauuugagcuaguaag

SEQ ID NO: 303509 - RNA, 18 nt, Artificial Sequence
  Synthetic
aaguuagaccuuaguaag

SEQ ID NO: 303510 - RNA, 19 nt, Artificial Sequence
  Synthetic
caaguuagaccuuaguaag

SEQ ID NO: 303511 - RNA, 20 nt, Artificial Sequence
  Synthetic
acaaguuagaccuuaguaag

SEQ ID NO: 303512 - RNA, 21 nt, Artificial Sequence
  Synthetic
uacaaguuagaccuuaguaag

SEQ ID NO: 303513 - RNA, 22 nt, Artificial Sequence
  Synthetic
uuacaaguuagaccuuaguaag

SEQ ID NO: 303514 - RNA, 23 nt, Artificial Sequence
  Synthetic
auuacaaguuagaccuuaguaag

SEQ ID NO: 303515 - RNA, 24 nt, Artificial Sequence
  Synthetic
aauuacaaguuagaccuuaguaag

SEQ ID NO: 303516 - RNA, 18 nt, Artificial Sequence
  Synthetic
aacuguaauuuuaguaag

SEQ ID NO: 303517 - RNA, 19 nt, Artificial Sequence
  Synthetic
aaacuguaauuuuaguaag

SEQ ID NO: 303518 - RNA, 20 nt, Artificial Sequence
  Synthetic
gaaacuguaauuuuaguaag

SEQ ID NO: 303519 - RNA, 21 nt, Artificial Sequence
  Synthetic
ugaaacuguaauuuuaguaag

SEQ ID NO: 303520 - RNA, 22 nt, Artificial Sequence
  Synthetic
augaaacuguaauuuuaguaag

SEQ ID NO: 303521 - RNA, 23 nt, Artificial Sequence
  Synthetic
caugaaacuguaauuuuaguaag

SEQ ID NO: 303522 - RNA, 24 nt, Artificial Sequence
  Synthetic
ucaugaaacuguaauuuuaguaag

SEQ ID NO: 303523 - RNA, 18 nt, Artificial Sequence
  Synthetic
uggacaugaaagcguaag

SEQ ID NO: 303524 - RNA, 19 nt, Artificial Sequence
  Synthetic
auggacaugaaagcguaag

SEQ ID NO: 303525 - RNA, 20 nt, Artificial Sequence
  Synthetic
uauggacaugaaagcguaag

SEQ ID NO: 303526 - RNA, 21 nt, Artificial Sequence
  Synthetic
cuauggacaugaaagcguaag

SEQ ID NO: 303527 - RNA, 22 nt, Artificial Sequence
  Synthetic
ccuauggacaugaaagcguaag

SEQ ID NO: 303528 - RNA, 23 nt, Artificial Sequence
  Synthetic
accuauggacaugaaagcguaag

SEQ ID NO: 303529 - RNA, 24 nt, Artificial Sequence
  Synthetic
caccuauggacaugaaagcguaag

SEQ ID NO: 303530 - RNA, 18 nt, Artificial Sequence
  Synthetic
gcaaagcuaaagcguaag

SEQ ID NO: 303531 - RNA, 19 nt, Artificial Sequence
  Synthetic
agcaaagcuaaagcguaag

SEQ ID NO: 303532 - RNA, 20 nt, Artificial Sequence
  Synthetic
gagcaaagcuaaagcguaag

SEQ ID NO: 303533 - RNA, 21 nt, Artificial Sequence
  Synthetic
agagcaaagcuaaagcguaag

SEQ ID NO: 303534 - RNA, 22 nt, Artificial Sequence
  Synthetic
aagagcaaagcuaaagcguaag

SEQ ID NO: 303535 - RNA, 23 nt, Artificial Sequence
  Synthetic
aaagagcaaagcuaaagcguaag

SEQ ID NO: 303536 - RNA, 24 nt, Artificial Sequence
  Synthetic
aaaagagcaaagcuaaagcguaag

SEQ ID NO: 303537 - RNA, 20 nt, Artificial Sequence
  Synthetic
cgcauguucucacucguaag

SEQ ID NO: 303538 - RNA, 21 nt, Artificial Sequence
  Synthetic
ccgcauguucucacucguaag

SEQ ID NO: 303539 - RNA, 22 nt, Artificial Sequence
  Synthetic
accgcauguucucacucguaag

SEQ ID NO: 303540 - RNA, 23 nt, Artificial Sequence
  Synthetic
caccgcauguucucacucguaag

SEQ ID NO: 303541 - RNA, 24 nt, Artificial Sequence
  Synthetic
gcaccgcauguucucacucguaag

SEQ ID NO: 303542 - RNA, 18 nt, Artificial Sequence
  Synthetic
agaucucagaaggguaag

SEQ ID NO: 303543 - RNA, 19 nt, Artificial Sequence
  Synthetic
aagaucucagaaggguaag

SEQ ID NO: 303544 - RNA, 20 nt, Artificial Sequence
  Synthetic
aaagaucucagaaggguaag

SEQ ID NO: 303545 - RNA, 21 nt, Artificial Sequence
  Synthetic
uaaagaucucagaaggguaag

SEQ ID NO: 303546 - RNA, 22 nt, Artificial Sequence
  Synthetic
cuaaagaucucagaaggguaag

SEQ ID NO: 303547 - RNA, 23 nt, Artificial Sequence
  Synthetic
ucuaaagaucucagaaggguaag

SEQ ID NO: 303548 - RNA, 24 nt, Artificial Sequence
  Synthetic
uucuaaagaucucagaaggguaag

SEQ ID NO: 303549 - RNA, 18 nt, Artificial Sequence
  Synthetic
cauucagauuaggguaag

SEQ ID NO: 303550 - RNA, 19 nt, Artificial Sequence
  Synthetic
acauucagauuaggguaag

SEQ ID NO: 303551 - RNA, 20 nt, Artificial Sequence
  Synthetic
cacauucagauuaggguaag

SEQ ID NO: 303552 - RNA, 21 nt, Artificial Sequence
  Synthetic
gcacauucagauuaggguaag

SEQ ID NO: 303553 - RNA, 22 nt, Artificial Sequence
  Synthetic
ggcacauucagauuaggguaag

SEQ ID NO: 303554 - RNA, 23 nt, Artificial Sequence
  Synthetic
uggcacauucagauuaggguaag

SEQ ID NO: 303555 - RNA, 24 nt, Artificial Sequence
  Synthetic
auggcacauucagauuaggguaag

SEQ ID NO: 303556 - RNA, 18 nt, Artificial Sequence
  Synthetic
cauuaaacauaauguaag

SEQ ID NO: 303557 - RNA, 19 nt, Artificial Sequence
  Synthetic
ucauuaaacauaauguaag

SEQ ID NO: 303558 - RNA, 20 nt, Artificial Sequence
  Synthetic
cucauuaaacauaauguaag

SEQ ID NO: 303559 - RNA, 21 nt, Artificial Sequence
  Synthetic
acucauuaaacauaauguaag

SEQ ID NO: 303560 - RNA, 22 nt, Artificial Sequence
  Synthetic
gacucauuaaacauaauguaag

SEQ ID NO: 303561 - RNA, 23 nt, Artificial Sequence
  Synthetic
ggacucauuaaacauaauguaag

SEQ ID NO: 303562 - RNA, 24 nt, Artificial Sequence
  Synthetic
aggacucauuaaacauaauguaag

SEQ ID NO: 303563 - RNA, 18 nt, Artificial Sequence
  Synthetic
cacucuaguagcuguaag

SEQ ID NO: 303564 - RNA, 19 nt, Artificial Sequence
  Synthetic
ccacucuaguagcuguaag

SEQ ID NO: 303565 - RNA, 20 nt, Artificial Sequence
  Synthetic
accacucuaguagcuguaag

SEQ ID NO: 303566 - RNA, 21 nt, Artificial Sequence
  Synthetic
gaccacucuaguagcuguaag

SEQ ID NO: 303567 - RNA, 22 nt, Artificial Sequence
  Synthetic
ugaccacucuaguagcuguaag

SEQ ID NO: 303568 - RNA, 23 nt, Artificial Sequence
  Synthetic
uugaccacucuaguagcuguaag

SEQ ID NO: 303569 - RNA, 24 nt, Artificial Sequence
  Synthetic
guugaccacucuaguagcuguaag

SEQ ID NO: 303570 - RNA, 18 nt, Artificial Sequence
  Synthetic
ccuaucaucggcuguaag

SEQ ID NO: 303571 - RNA, 19 nt, Artificial Sequence
  Synthetic
accuaucaucggcuguaag

SEQ ID NO: 303572 - RNA, 20 nt, Artificial Sequence
  Synthetic
aaccuaucaucggcuguaag

SEQ ID NO: 303573 - RNA, 21 nt, Artificial Sequence
  Synthetic
aaaccuaucaucggcuguaag

SEQ ID NO: 303574 - RNA, 22 nt, Artificial Sequence
  Synthetic
aaaaccuaucaucggcuguaag

SEQ ID NO: 303575 - RNA, 23 nt, Artificial Sequence
  Synthetic
aaaaaccuaucaucggcuguaag

SEQ ID NO: 303576 - RNA, 24 nt, Artificial Sequence
  Synthetic
uaaaaaccuaucaucggcuguaag

SEQ ID NO: 303577 - RNA, 18 nt, Artificial Sequence
  Synthetic
cuggaacaaugguguaag

SEQ ID NO: 303578 - RNA, 19 nt, Artificial Sequence
  Synthetic
ccuggaacaaugguguaag

SEQ ID NO: 303579 - RNA, 20 nt, Artificial Sequence
  Synthetic
gccuggaacaaugguguaag

SEQ ID NO: 303580 - RNA, 21 nt, Artificial Sequence
  Synthetic
ggccuggaacaaugguguaag

SEQ ID NO: 303581 - RNA, 22 nt, Artificial Sequence
  Synthetic
gggccuggaacaaugguguaag

SEQ ID NO: 303582 - RNA, 23 nt, Artificial Sequence
  Synthetic
ugggccuggaacaaugguguaag

SEQ ID NO: 303583 - RNA, 24 nt, Artificial Sequence
  Synthetic
gugggccuggaacaaugguguaag

SEQ ID NO: 303584 - RNA, 18 nt, Artificial Sequence
  Synthetic
uuuuguauaugguguaag

SEQ ID NO: 303585 - RNA, 19 nt, Artificial Sequence
  Synthetic
uuuuuguauaugguguaag

SEQ ID NO: 303586 - RNA, 20 nt, Artificial Sequence
  Synthetic
auuuuuguauaugguguaag

SEQ ID NO: 303587 - RNA, 21 nt, Artificial Sequence
  Synthetic
aauuuuuguauaugguguaag

SEQ ID NO: 303588 - RNA, 22 nt, Artificial Sequence
  Synthetic
uaauuuuuguauaugguguaag

SEQ ID NO: 303589 - RNA, 23 nt, Artificial Sequence
  Synthetic
uuaauuuuuguauaugguguaag

SEQ ID NO: 303590 - RNA, 24 nt, Artificial Sequence
  Synthetic
guuaauuuuuguauaugguguaag

SEQ ID NO: 303591 - RNA, 18 nt, Artificial Sequence
  Synthetic
agauaaacccauuguaag

SEQ ID NO: 303592 - RNA, 19 nt, Artificial Sequence
  Synthetic
cagauaaacccauuguaag

SEQ ID NO: 303593 - RNA, 20 nt, Artificial Sequence
  Synthetic
ccagauaaacccauuguaag

SEQ ID NO: 303594 - RNA, 21 nt, Artificial Sequence
  Synthetic
uccagauaaacccauuguaag

SEQ ID NO: 303595 - RNA, 22 nt, Artificial Sequence
  Synthetic
auccagauaaacccauuguaag

SEQ ID NO: 303596 - RNA, 23 nt, Artificial Sequence
  Synthetic
uauccagauaaacccauuguaag

SEQ ID NO: 303597 - RNA, 24 nt, Artificial Sequence
  Synthetic
auauccagauaaacccauuguaag

SEQ ID NO: 303598 - RNA, 18 nt, Artificial Sequence
  Synthetic
cagagaauagauuguaag

SEQ ID NO: 303599 - RNA, 19 nt, Artificial Sequence
  Synthetic
acagagaauagauuguaag

SEQ ID NO: 303600 - RNA, 20 nt, Artificial Sequence
  Synthetic
gacagagaauagauuguaag

SEQ ID NO: 303601 - RNA, 21 nt, Artificial Sequence
  Synthetic
agacagagaauagauuguaag

SEQ ID NO: 303602 - RNA, 22 nt, Artificial Sequence
  Synthetic
aagacagagaauagauuguaag

SEQ ID NO: 303603 - RNA, 23 nt, Artificial Sequence
  Synthetic
gaagacagagaauagauuguaag

SEQ ID NO: 303604 - RNA, 24 nt, Artificial Sequence
  Synthetic
ugaagacagagaauagauuguaag

SEQ ID NO: 303605 - RNA, 18 nt, Artificial Sequence
  Synthetic
auuauuaacacuuguaag

SEQ ID NO: 303606 - RNA, 19 nt, Artificial Sequence
  Synthetic
uauuauuaacacuuguaag

SEQ ID NO: 303607 - RNA, 20 nt, Artificial Sequence
  Synthetic
cuauuauuaacacuuguaag

SEQ ID NO: 303608 - RNA, 21 nt, Artificial Sequence
  Synthetic
ccuauuauuaacacuuguaag

SEQ ID NO: 303609 - RNA, 22 nt, Artificial Sequence
  Synthetic
uccuauuauuaacacuuguaag

SEQ ID NO: 303610 - RNA, 23 nt, Artificial Sequence
  Synthetic
uuccuauuauuaacacuuguaag

SEQ ID NO: 303611 - RNA, 24 nt, Artificial Sequence
  Synthetic
guuccuauuauuaacacuuguaag

SEQ ID NO: 303612 - RNA, 18 nt, Artificial Sequence
  Synthetic
ucacaaaaaccuuguaag

SEQ ID NO: 303613 - RNA, 19 nt, Artificial Sequence
  Synthetic
uucacaaaaaccuuguaag

SEQ ID NO: 303614 - RNA, 20 nt, Artificial Sequence
  Synthetic
cuucacaaaaaccuuguaag

SEQ ID NO: 303615 - RNA, 21 nt, Artificial Sequence
  Synthetic
ucuucacaaaaaccuuguaag

SEQ ID NO: 303616 - RNA, 22 nt, Artificial Sequence
  Synthetic
uucuucacaaaaaccuuguaag

SEQ ID NO: 303617 - RNA, 23 nt, Artificial Sequence
  Synthetic
guucuucacaaaaaccuuguaag

SEQ ID NO: 303618 - RNA, 24 nt, Artificial Sequence
  Synthetic
aguucuucacaaaaaccuuguaag

SEQ ID NO: 303619 - RNA, 18 nt, Artificial Sequence
  Synthetic
gaguauggaccuuguaag

SEQ ID NO: 303620 - RNA, 19 nt, Artificial Sequence
  Synthetic
agaguauggaccuuguaag

SEQ ID NO: 303621 - RNA, 20 nt, Artificial Sequence
  Synthetic
uagaguauggaccuuguaag

SEQ ID NO: 303622 - RNA, 21 nt, Artificial Sequence
  Synthetic
cuagaguauggaccuuguaag

SEQ ID NO: 303623 - RNA, 22 nt, Artificial Sequence
  Synthetic
gcuagaguauggaccuuguaag

SEQ ID NO: 303624 - RNA, 23 nt, Artificial Sequence
  Synthetic
agcuagaguauggaccuuguaag

SEQ ID NO: 303625 - RNA, 24 nt, Artificial Sequence
  Synthetic
cagcuagaguauggaccuuguaag

SEQ ID NO: 303626 - RNA, 18 nt, Artificial Sequence
  Synthetic
uuacaauccucuuguaag

SEQ ID NO: 303627 - RNA, 19 nt, Artificial Sequence
  Synthetic
uuuacaauccucuuguaag

SEQ ID NO: 303628 - RNA, 20 nt, Artificial Sequence
  Synthetic
uuuuacaauccucuuguaag

SEQ ID NO: 303629 - RNA, 21 nt, Artificial Sequence
  Synthetic
guuuuacaauccucuuguaag

SEQ ID NO: 303630 - RNA, 22 nt, Artificial Sequence
  Synthetic
cguuuuacaauccucuuguaag

SEQ ID NO: 303631 - RNA, 23 nt, Artificial Sequence
  Synthetic
gcguuuuacaauccucuuguaag

SEQ ID NO: 303632 - RNA, 24 nt, Artificial Sequence
  Synthetic
ugcguuuuacaauccucuuguaag

SEQ ID NO: 303633 - RNA, 18 nt, Artificial Sequence
  Synthetic
uagagaacucuuuguaag

SEQ ID NO: 303634 - RNA, 19 nt, Artificial Sequence
  Synthetic
uuagagaacucuuuguaag

SEQ ID NO: 303635 - RNA, 20 nt, Artificial Sequence
  Synthetic
guuagagaacucuuuguaag

SEQ ID NO: 303636 - RNA, 21 nt, Artificial Sequence
  Synthetic
gguuagagaacucuuuguaag

SEQ ID NO: 303637 - RNA, 22 nt, Artificial Sequence
  Synthetic
ugguuagagaacucuuuguaag

SEQ ID NO: 303638 - RNA, 23 nt, Artificial Sequence
  Synthetic
uugguuagagaacucuuuguaag

SEQ ID NO: 303639 - RNA, 24 nt, Artificial Sequence
  Synthetic
uuugguuagagaacucuuuguaag

SEQ ID NO: 303640 - RNA, 18 nt, Artificial Sequence
  Synthetic
gggcaugucaaaauuaag

SEQ ID NO: 303641 - RNA, 19 nt, Artificial Sequence
  Synthetic
ggggcaugucaaaauuaag

SEQ ID NO: 303642 - RNA, 20 nt, Artificial Sequence
  Synthetic
aggggcaugucaaaauuaag

SEQ ID NO: 303643 - RNA, 21 nt, Artificial Sequence
  Synthetic
uaggggcaugucaaaauuaag

SEQ ID NO: 303644 - RNA, 22 nt, Artificial Sequence
  Synthetic
auaggggcaugucaaaauuaag

SEQ ID NO: 303645 - RNA, 23 nt, Artificial Sequence
  Synthetic
cauaggggcaugucaaaauuaag

SEQ ID NO: 303646 - RNA, 24 nt, Artificial Sequence
  Synthetic
ucauaggggcaugucaaaauuaag

SEQ ID NO: 303647 - RNA, 18 nt, Artificial Sequence
  Synthetic
gacaauguauaaauuaag

SEQ ID NO: 303648 - RNA, 19 nt, Artificial Sequence
  Synthetic
ugacaauguauaaauuaag

SEQ ID NO: 303649 - RNA, 20 nt, Artificial Sequence
  Synthetic
augacaauguauaaauuaag

SEQ ID NO: 303650 - RNA, 21 nt, Artificial Sequence
  Synthetic
gaugacaauguauaaauuaag

SEQ ID NO: 303651 - RNA, 22 nt, Artificial Sequence
  Synthetic
ugaugacaauguauaaauuaag

SEQ ID NO: 303652 - RNA, 23 nt, Artificial Sequence
  Synthetic
cugaugacaauguauaaauuaag

SEQ ID NO: 303653 - RNA, 24 nt, Artificial Sequence
  Synthetic
acugaugacaauguauaaauuaag

SEQ ID NO: 303654 - RNA, 18 nt, Artificial Sequence
  Synthetic
uuucaucauuaaauuaag

SEQ ID NO: 303655 - RNA, 19 nt, Artificial Sequence
  Synthetic
uuuucaucauuaaauuaag

SEQ ID NO: 303656 - RNA, 20 nt, Artificial Sequence
  Synthetic
uuuuucaucauuaaauuaag

SEQ ID NO: 303657 - RNA, 21 nt, Artificial Sequence
  Synthetic
guuuuucaucauuaaauuaag

SEQ ID NO: 303658 - RNA, 22 nt, Artificial Sequence
  Synthetic
uguuuuucaucauuaaauuaag

SEQ ID NO: 303659 - RNA, 23 nt, Artificial Sequence
  Synthetic
auguuuuucaucauuaaauuaag

SEQ ID NO: 303660 - RNA, 24 nt, Artificial Sequence
  Synthetic
uauguuuuucaucauuaaauuaag

SEQ ID NO: 303661 - RNA, 18 nt, Artificial Sequence
  Synthetic
uauaaggggucaauuaag

SEQ ID NO: 303662 - RNA, 19 nt, Artificial Sequence
  Synthetic
auauaaggggucaauuaag

SEQ ID NO: 303663 - RNA, 20 nt, Artificial Sequence
  Synthetic
uauauaaggggucaauuaag

SEQ ID NO: 303664 - RNA, 21 nt, Artificial Sequence
  Synthetic
uuauauaaggggucaauuaag

SEQ ID NO: 303665 - RNA, 22 nt, Artificial Sequence
  Synthetic
auuauauaaggggucaauuaag

SEQ ID NO: 303666 - RNA, 23 nt, Artificial Sequence
  Synthetic
aauuauauaaggggucaauuaag

SEQ ID NO: 303667 - RNA, 24 nt, Artificial Sequence
  Synthetic
uaauuauauaaggggucaauuaag

SEQ ID NO: 303668 - RNA, 18 nt, Artificial Sequence
  Synthetic
cuucacuuuagaauuaag

SEQ ID NO: 303669 - RNA, 19 nt, Artificial Sequence
  Synthetic
ccuucacuuuagaauuaag

SEQ ID NO: 303670 - RNA, 20 nt, Artificial Sequence
  Synthetic
gccuucacuuuagaauuaag

SEQ ID NO: 303671 - RNA, 21 nt, Artificial Sequence
  Synthetic
ugccuucacuuuagaauuaag

SEQ ID NO: 303672 - RNA, 22 nt, Artificial Sequence
  Synthetic
uugccuucacuuuagaauuaag

SEQ ID NO: 303673 - RNA, 23 nt, Artificial Sequence
  Synthetic
uuugccuucacuuuagaauuaag

SEQ ID NO: 303674 - RNA, 24 nt, Artificial Sequence
  Synthetic
uuuugccuucacuuuagaauuaag

SEQ ID NO: 303675 - RNA, 18 nt, Artificial Sequence
  Synthetic
cgaaguacaggaauuaag

SEQ ID NO: 303676 - RNA, 19 nt, Artificial Sequence
  Synthetic
ccgaaguacaggaauuaag

SEQ ID NO: 303677 - RNA, 20 nt, Artificial Sequence
  Synthetic
gccgaaguacaggaauuaag

SEQ ID NO: 303678 - RNA, 21 nt, Artificial Sequence
  Synthetic
ugccgaaguacaggaauuaag

SEQ ID NO: 303679 - RNA, 22 nt, Artificial Sequence
  Synthetic
augccgaaguacaggaauuaag

SEQ ID NO: 303680 - RNA, 23 nt, Artificial Sequence
  Synthetic
uaugccgaaguacaggaauuaag

SEQ ID NO: 303681 - RNA, 24 nt, Artificial Sequence
  Synthetic
auaugccgaaguacaggaauuaag

SEQ ID NO: 303682 - RNA, 18 nt, Artificial Sequence
  Synthetic
ccuuuuaagugaauuaag

SEQ ID NO: 303683 - RNA, 19 nt, Artificial Sequence
  Synthetic
accuuuuaagugaauuaag

SEQ ID NO: 303684 - RNA, 20 nt, Artificial Sequence
  Synthetic
uaccuuuuaagugaauuaag

SEQ ID NO: 303685 - RNA, 21 nt, Artificial Sequence
  Synthetic
auaccuuuuaagugaauuaag

SEQ ID NO: 303686 - RNA, 22 nt, Artificial Sequence
  Synthetic
aauaccuuuuaagugaauuaag

SEQ ID NO: 303687 - RNA, 23 nt, Artificial Sequence
  Synthetic
uaauaccuuuuaagugaauuaag

SEQ ID NO: 303688 - RNA, 24 nt, Artificial Sequence
  Synthetic
cuaauaccuuuuaagugaauuaag

SEQ ID NO: 303689 - RNA, 18 nt, Artificial Sequence
  Synthetic
agcaacaucauaauuaag

SEQ ID NO: 303690 - RNA, 19 nt, Artificial Sequence
  Synthetic
aagcaacaucauaauuaag

SEQ ID NO: 303691 - RNA, 20 nt, Artificial Sequence
  Synthetic
aaagcaacaucauaauuaag

SEQ ID NO: 303692 - RNA, 21 nt, Artificial Sequence
  Synthetic
uaaagcaacaucauaauuaag

SEQ ID NO: 303693 - RNA, 22 nt, Artificial Sequence
  Synthetic
cuaaagcaacaucauaauuaag

SEQ ID NO: 303694 - RNA, 23 nt, Artificial Sequence
  Synthetic
ccuaaagcaacaucauaauuaag

SEQ ID NO: 303695 - RNA, 24 nt, Artificial Sequence
  Synthetic
accuaaagcaacaucauaauuaag

SEQ ID NO: 303696 - RNA, 18 nt, Artificial Sequence
  Synthetic
uauuuacuauuaauuaag

SEQ ID NO: 303697 - RNA, 19 nt, Artificial Sequence
  Synthetic
auauuuacuauuaauuaag

SEQ ID NO: 303698 - RNA, 20 nt, Artificial Sequence
  Synthetic
uauauuuacuauuaauuaag

SEQ ID NO: 303699 - RNA, 21 nt, Artificial Sequence
  Synthetic
auauauuuacuauuaauuaag

SEQ ID NO: 303700 - RNA, 22 nt, Artificial Sequence
  Synthetic
aauauauuuacuauuaauuaag

SEQ ID NO: 303701 - RNA, 23 nt, Artificial Sequence
  Synthetic
aaauauauuuacuauuaauuaag

SEQ ID NO: 303702 - RNA, 24 nt, Artificial Sequence
  Synthetic
aaaauauauuuacuauuaauuaag

SEQ ID NO: 303703 - RNA, 18 nt, Artificial Sequence
  Synthetic
aagugcgaggacauuaag

SEQ ID NO: 303704 - RNA, 19 nt, Artificial Sequence
  Synthetic
caagugcgaggacauuaag

SEQ ID NO: 303705 - RNA, 20 nt, Artificial Sequence
  Synthetic
acaagugcgaggacauuaag

SEQ ID NO: 303706 - RNA, 21 nt, Artificial Sequence
  Synthetic
aacaagugcgaggacauuaag

SEQ ID NO: 303707 - RNA, 22 nt, Artificial Sequence
  Synthetic
caacaagugcgaggacauuaag

SEQ ID NO: 303708 - RNA, 23 nt, Artificial Sequence
  Synthetic
acaacaagugcgaggacauuaag

SEQ ID NO: 303709 - RNA, 24 nt, Artificial Sequence
  Synthetic
aacaacaagugcgaggacauuaag

SEQ ID NO: 303710 - RNA, 18 nt, Artificial Sequence
  Synthetic
uaggguguccccauuaag

SEQ ID NO: 303711 - RNA, 19 nt, Artificial Sequence
  Synthetic
cuaggguguccccauuaag

SEQ ID NO: 303712 - RNA, 20 nt, Artificial Sequence
  Synthetic
ucuaggguguccccauuaag

SEQ ID NO: 303713 - RNA, 21 nt, Artificial Sequence
  Synthetic
uucuaggguguccccauuaag

SEQ ID NO: 303714 - RNA, 22 nt, Artificial Sequence
  Synthetic
uuucuaggguguccccauuaag

SEQ ID NO: 303715 - RNA, 23 nt, Artificial Sequence
  Synthetic
uuuucuaggguguccccauuaag

SEQ ID NO: 303716 - RNA, 24 nt, Artificial Sequence
  Synthetic
auuuucuaggguguccccauuaag

SEQ ID NO: 303717 - RNA, 18 nt, Artificial Sequence
  Synthetic
agaaagacaacgauuaag

SEQ ID NO: 303718 - RNA, 19 nt, Artificial Sequence
  Synthetic
gagaaagacaacgauuaag

SEQ ID NO: 303719 - RNA, 20 nt, Artificial Sequence
  Synthetic
ugagaaagacaacgauuaag

SEQ ID NO: 303720 - RNA, 21 nt, Artificial Sequence
  Synthetic
cugagaaagacaacgauuaag

SEQ ID NO: 303721 - RNA, 22 nt, Artificial Sequence
  Synthetic
ucugagaaagacaacgauuaag

SEQ ID NO: 303722 - RNA, 23 nt, Artificial Sequence
  Synthetic
uucugagaaagacaacgauuaag

SEQ ID NO: 303723 - RNA, 24 nt, Artificial Sequence
  Synthetic
guucugagaaagacaacgauuaag

SEQ ID NO: 303724 - RNA, 18 nt, Artificial Sequence
  Synthetic
aguuggcucgggauuaag

SEQ ID NO: 303725 - RNA, 19 nt, Artificial Sequence
  Synthetic
gaguuggcucgggauuaag

SEQ ID NO: 303726 - RNA, 20 nt, Artificial Sequence
  Synthetic
cgaguuggcucgggauuaag

SEQ ID NO: 303727 - RNA, 21 nt, Artificial Sequence
  Synthetic
acgaguuggcucgggauuaag

SEQ ID NO: 303728 - RNA, 22 nt, Artificial Sequence
  Synthetic
gacgaguuggcucgggauuaag

SEQ ID NO: 303729 - RNA, 23 nt, Artificial Sequence
  Synthetic
ggacgaguuggcucgggauuaag

SEQ ID NO: 303730 - RNA, 24 nt, Artificial Sequence
  Synthetic
gggacgaguuggcucgggauuaag

SEQ ID NO: 303731 - RNA, 18 nt, Artificial Sequence
  Synthetic
caccucugugggauuaag

SEQ ID NO: 303732 - RNA, 19 nt, Artificial Sequence
  Synthetic
ucaccucugugggauuaag

SEQ ID NO: 303733 - RNA, 20 nt, Artificial Sequence
  Synthetic
aucaccucugugggauuaag

SEQ ID NO: 303734 - RNA, 21 nt, Artificial Sequence
  Synthetic
uaucaccucugugggauuaag

SEQ ID NO: 303735 - RNA, 22 nt, Artificial Sequence
  Synthetic
uuaucaccucugugggauuaag

SEQ ID NO: 303736 - RNA, 23 nt, Artificial Sequence
  Synthetic
uuuaucaccucugugggauuaag

SEQ ID NO: 303737 - RNA, 24 nt, Artificial Sequence
  Synthetic
uuuuaucaccucugugggauuaag

SEQ ID NO: 303738 - RNA, 18 nt, Artificial Sequence
  Synthetic
ucaggauagaauauuaag

SEQ ID NO: 303739 - RNA, 19 nt, Artificial Sequence
  Synthetic
uucaggauagaauauuaag

SEQ ID NO: 303740 - RNA, 20 nt, Artificial Sequence
  Synthetic
auucaggauagaauauuaag

SEQ ID NO: 303741 - RNA, 21 nt, Artificial Sequence
  Synthetic
aauucaggauagaauauuaag

SEQ ID NO: 303742 - RNA, 22 nt, Artificial Sequence
  Synthetic
aaauucaggauagaauauuaag

SEQ ID NO: 303743 - RNA, 23 nt, Artificial Sequence
  Synthetic
gaaauucaggauagaauauuaag

SEQ ID NO: 303744 - RNA, 24 nt, Artificial Sequence
  Synthetic
ugaaauucaggauagaauauuaag

SEQ ID NO: 303745 - RNA, 18 nt, Artificial Sequence
  Synthetic
gccagaagagcuauuaag

SEQ ID NO: 303746 - RNA, 19 nt, Artificial Sequence
  Synthetic
ggccagaagagcuauuaag

SEQ ID NO: 303747 - RNA, 20 nt, Artificial Sequence
  Synthetic
aggccagaagagcuauuaag

SEQ ID NO: 303748 - RNA, 21 nt, Artificial Sequence
  Synthetic
gaggccagaagagcuauuaag

SEQ ID NO: 303749 - RNA, 22 nt, Artificial Sequence
  Synthetic
agaggccagaagagcuauuaag

SEQ ID NO: 303750 - RNA, 23 nt, Artificial Sequence
  Synthetic
uagaggccagaagagcuauuaag

SEQ ID NO: 303751 - RNA, 24 nt, Artificial Sequence
  Synthetic
auagaggccagaagagcuauuaag

SEQ ID NO: 303752 - RNA, 18 nt, Artificial Sequence
  Synthetic
agauggaaaauuauuaag

SEQ ID NO: 303753 - RNA, 19 nt, Artificial Sequence
  Synthetic
uagauggaaaauuauuaag

SEQ ID NO: 303754 - RNA, 20 nt, Artificial Sequence
  Synthetic
guagauggaaaauuauuaag

SEQ ID NO: 303755 - RNA, 21 nt, Artificial Sequence
  Synthetic
aguagauggaaaauuauuaag

SEQ ID NO: 303756 - RNA, 22 nt, Artificial Sequence
  Synthetic
caguagauggaaaauuauuaag

SEQ ID NO: 303757 - RNA, 23 nt, Artificial Sequence
  Synthetic
ucaguagauggaaaauuauuaag

SEQ ID NO: 303758 - RNA, 24 nt, Artificial Sequence
  Synthetic
gucaguagauggaaaauuauuaag

SEQ ID NO: 303759 - RNA, 18 nt, Artificial Sequence
  Synthetic
ucuuaagcaauuauuaag

SEQ ID NO: 303760 - RNA, 19 nt, Artificial Sequence
  Synthetic
uucuuaagcaauuauuaag

SEQ ID NO: 303761 - RNA, 20 nt, Artificial Sequence
  Synthetic
uuucuuaagcaauuauuaag

SEQ ID NO: 303762 - RNA, 21 nt, Artificial Sequence
  Synthetic
auuucuuaagcaauuauuaag

SEQ ID NO: 303763 - RNA, 22 nt, Artificial Sequence
  Synthetic
uauuucuuaagcaauuauuaag

SEQ ID NO: 303764 - RNA, 23 nt, Artificial Sequence
  Synthetic
auauuucuuaagcaauuauuaag

SEQ ID NO: 303765 - RNA, 24 nt, Artificial Sequence
  Synthetic
aauauuucuuaagcaauuauuaag

SEQ ID NO: 303766 - RNA, 18 nt, Artificial Sequence
  Synthetic
acucauuuuuaacuuaag

SEQ ID NO: 303767 - RNA, 19 nt, Artificial Sequence
  Synthetic
uacucauuuuuaacuuaag

SEQ ID NO: 303768 - RNA, 20 nt, Artificial Sequence
  Synthetic
auacucauuuuuaacuuaag

SEQ ID NO: 303769 - RNA, 21 nt, Artificial Sequence
  Synthetic
cauacucauuuuuaacuuaag

SEQ ID NO: 303770 - RNA, 22 nt, Artificial Sequence
  Synthetic
ucauacucauuuuuaacuuaag

SEQ ID NO: 303771 - RNA, 23 nt, Artificial Sequence
  Synthetic
uucauacucauuuuuaacuuaag

SEQ ID NO: 303772 - RNA, 24 nt, Artificial Sequence
  Synthetic
auucauacucauuuuuaacuuaag

SEQ ID NO: 303773 - RNA, 18 nt, Artificial Sequence
  Synthetic
uuucaaugaacacuuaag

SEQ ID NO: 303774 - RNA, 19 nt, Artificial Sequence
  Synthetic
cuuucaaugaacacuuaag

SEQ ID NO: 303775 - RNA, 20 nt, Artificial Sequence
  Synthetic
ucuuucaaugaacacuuaag

SEQ ID NO: 303776 - RNA, 21 nt, Artificial Sequence
  Synthetic
uucuuucaaugaacacuuaag

SEQ ID NO: 303777 - RNA, 22 nt, Artificial Sequence
  Synthetic
cuucuuucaaugaacacuuaag

SEQ ID NO: 303778 - RNA, 23 nt, Artificial Sequence
  Synthetic
ucuucuuucaaugaacacuuaag

SEQ ID NO: 303779 - RNA, 24 nt, Artificial Sequence
  Synthetic
uucuucuuucaaugaacacuuaag

SEQ ID NO: 303780 - RNA, 18 nt, Artificial Sequence
  Synthetic
aaauagugguuacuuaag

SEQ ID NO: 303781 - RNA, 19 nt, Artificial Sequence
  Synthetic
caaauagugguuacuuaag

SEQ ID NO: 303782 - RNA, 20 nt, Artificial Sequence
  Synthetic
acaaauagugguuacuuaag

SEQ ID NO: 303783 - RNA, 21 nt, Artificial Sequence
  Synthetic
aacaaauagugguuacuuaag

SEQ ID NO: 303784 - RNA, 22 nt, Artificial Sequence
  Synthetic
aaacaaauagugguuacuuaag

SEQ ID NO: 303785 - RNA, 23 nt, Artificial Sequence
  Synthetic
caaacaaauagugguuacuuaag

SEQ ID NO: 303786 - RNA, 24 nt, Artificial Sequence
  Synthetic
acaaacaaauagugguuacuuaag

SEQ ID NO: 303787 - RNA, 18 nt, Artificial Sequence
  Synthetic
agguuucaguuccuuaag

SEQ ID NO: 303788 - RNA, 19 nt, Artificial Sequence
  Synthetic
uagguuucaguuccuuaag

SEQ ID NO: 303789 - RNA, 20 nt, Artificial Sequence
  Synthetic
cuagguuucaguuccuuaag

SEQ ID NO: 303790 - RNA, 21 nt, Artificial Sequence
  Synthetic
gcuagguuucaguuccuuaag

SEQ ID NO: 303791 - RNA, 22 nt, Artificial Sequence
  Synthetic
agcuagguuucaguuccuuaag

SEQ ID NO: 303792 - RNA, 23 nt, Artificial Sequence
  Synthetic
cagcuagguuucaguuccuuaag

SEQ ID NO: 303793 - RNA, 24 nt, Artificial Sequence
  Synthetic
ccagcuagguuucaguuccuuaag

SEQ ID NO: 303794 - RNA, 18 nt, Artificial Sequence
  Synthetic
ugggaacaacagcuuaag

SEQ ID NO: 303795 - RNA, 19 nt, Artificial Sequence
  Synthetic
augggaacaacagcuuaag

SEQ ID NO: 303796 - RNA, 20 nt, Artificial Sequence
  Synthetic
uaugggaacaacagcuuaag

SEQ ID NO: 303797 - RNA, 21 nt, Artificial Sequence
  Synthetic
uuaugggaacaacagcuuaag

SEQ ID NO: 303798 - RNA, 22 nt, Artificial Sequence
  Synthetic
guuaugggaacaacagcuuaag

SEQ ID NO: 303799 - RNA, 23 nt, Artificial Sequence
  Synthetic
gguuaugggaacaacagcuuaag

SEQ ID NO: 303800 - RNA, 24 nt, Artificial Sequence
  Synthetic
ggguuaugggaacaacagcuuaag

SEQ ID NO: 303801 - RNA, 18 nt, Artificial Sequence
  Synthetic
ccugucuucuggcuuaag

SEQ ID NO: 303802 - RNA, 19 nt, Artificial Sequence
  Synthetic
accugucuucuggcuuaag

SEQ ID NO: 303803 - RNA, 20 nt, Artificial Sequence
  Synthetic
caccugucuucuggcuuaag

SEQ ID NO: 303804 - RNA, 21 nt, Artificial Sequence
  Synthetic
ucaccugucuucuggcuuaag

SEQ ID NO: 303805 - RNA, 22 nt, Artificial Sequence
  Synthetic
cucaccugucuucuggcuuaag

SEQ ID NO: 303806 - RNA, 23 nt, Artificial Sequence
  Synthetic
ucucaccugucuucuggcuuaag

SEQ ID NO: 303807 - RNA, 24 nt, Artificial Sequence
  Synthetic
cucucaccugucuucuggcuuaag

SEQ ID NO: 303808 - RNA, 18 nt, Artificial Sequence
  Synthetic
auuauuuuucugcuuaag

SEQ ID NO: 303809 - RNA, 19 nt, Artificial Sequence
  Synthetic
aauuauuuuucugcuuaag

SEQ ID NO: 303810 - RNA, 20 nt, Artificial Sequence
  Synthetic
uaauuauuuuucugcuuaag

SEQ ID NO: 303811 - RNA, 21 nt, Artificial Sequence
  Synthetic
cuaauuauuuuucugcuuaag

SEQ ID NO: 303812 - RNA, 22 nt, Artificial Sequence
  Synthetic
acuaauuauuuuucugcuuaag

SEQ ID NO: 303813 - RNA, 23 nt, Artificial Sequence
  Synthetic
cacuaauuauuuuucugcuuaag

SEQ ID NO: 303814 - RNA, 24 nt, Artificial Sequence
  Synthetic
ucacuaauuauuuuucugcuuaag

SEQ ID NO: 303815 - RNA, 18 nt, Artificial Sequence
  Synthetic
aauuuggugagucuuaag

SEQ ID NO: 303816 - RNA, 19 nt, Artificial Sequence
  Synthetic
uaauuuggugagucuuaag

SEQ ID NO: 303817 - RNA, 20 nt, Artificial Sequence
  Synthetic
cuaauuuggugagucuuaag

SEQ ID NO: 303818 - RNA, 21 nt, Artificial Sequence
  Synthetic
gcuaauuuggugagucuuaag

SEQ ID NO: 303819 - RNA, 22 nt, Artificial Sequence
  Synthetic
ggcuaauuuggugagucuuaag

SEQ ID NO: 303820 - RNA, 23 nt, Artificial Sequence
  Synthetic
uggcuaauuuggugagucuuaag

SEQ ID NO: 303821 - RNA, 24 nt, Artificial Sequence
  Synthetic
uuggcuaauuuggugagucuuaag

SEQ ID NO: 303822 - RNA, 18 nt, Artificial Sequence
  Synthetic
aauagcuuuagucuuaag

SEQ ID NO: 303823 - RNA, 19 nt, Artificial Sequence
  Synthetic
uaauagcuuuagucuuaag

SEQ ID NO: 303824 - RNA, 20 nt, Artificial Sequence
  Synthetic
auaauagcuuuagucuuaag

SEQ ID NO: 303825 - RNA, 21 nt, Artificial Sequence
  Synthetic
aauaauagcuuuagucuuaag

SEQ ID NO: 303826 - RNA, 22 nt, Artificial Sequence
  Synthetic
aaauaauagcuuuagucuuaag

SEQ ID NO: 303827 - RNA, 23 nt, Artificial Sequence
  Synthetic
aaaauaauagcuuuagucuuaag

SEQ ID NO: 303828 - RNA, 24 nt, Artificial Sequence
  Synthetic
uaaaauaauagcuuuagucuuaag

SEQ ID NO: 303829 - RNA, 18 nt, Artificial Sequence
  Synthetic
guucagggaguucuuaag

SEQ ID NO: 303830 - RNA, 19 nt, Artificial Sequence
  Synthetic
cguucagggaguucuuaag

SEQ ID NO: 303831 - RNA, 20 nt, Artificial Sequence
  Synthetic
ccguucagggaguucuuaag

SEQ ID NO: 303832 - RNA, 21 nt, Artificial Sequence
  Synthetic
accguucagggaguucuuaag

SEQ ID NO: 303833 - RNA, 22 nt, Artificial Sequence
  Synthetic
gaccguucagggaguucuuaag

SEQ ID NO: 303834 - RNA, 23 nt, Artificial Sequence
  Synthetic
ugaccguucagggaguucuuaag

SEQ ID NO: 303835 - RNA, 24 nt, Artificial Sequence
  Synthetic
cugaccguucagggaguucuuaag

SEQ ID NO: 303836 - RNA, 18 nt, Artificial Sequence
  Synthetic
aucaguggauaaguuaag

SEQ ID NO: 303837 - RNA, 19 nt, Artificial Sequence
  Synthetic
caucaguggauaaguuaag

SEQ ID NO: 303838 - RNA, 20 nt, Artificial Sequence
  Synthetic
acaucaguggauaaguuaag

SEQ ID NO: 303839 - RNA, 21 nt, Artificial Sequence
  Synthetic
uacaucaguggauaaguuaag

SEQ ID NO: 303840 - RNA, 22 nt, Artificial Sequence
  Synthetic
cuacaucaguggauaaguuaag

SEQ ID NO: 303841 - RNA, 23 nt, Artificial Sequence
  Synthetic
ucuacaucaguggauaaguuaag

SEQ ID NO: 303842 - RNA, 24 nt, Artificial Sequence
  Synthetic
uucuacaucaguggauaaguuaag

SEQ ID NO: 303843 - RNA, 18 nt, Artificial Sequence
  Synthetic
gaguuugguaagguuaag

SEQ ID NO: 303844 - RNA, 19 nt, Artificial Sequence
  Synthetic
ugaguuugguaagguuaag

SEQ ID NO: 303845 - RNA, 20 nt, Artificial Sequence
  Synthetic
augaguuugguaagguuaag

SEQ ID NO: 303846 - RNA, 21 nt, Artificial Sequence
  Synthetic
uaugaguuugguaagguuaag

SEQ ID NO: 303847 - RNA, 22 nt, Artificial Sequence
  Synthetic
guaugaguuugguaagguuaag

SEQ ID NO: 303848 - RNA, 23 nt, Artificial Sequence
  Synthetic
uguaugaguuugguaagguuaag

SEQ ID NO: 303849 - RNA, 24 nt, Artificial Sequence
  Synthetic
uuguaugaguuugguaagguuaag

SEQ ID NO: 303850 - RNA, 18 nt, Artificial Sequence
  Synthetic
aucaguuuaaugguuaag

SEQ ID NO: 303851 - RNA, 19 nt, Artificial Sequence
  Synthetic
aaucaguuuaaugguuaag

SEQ ID NO: 303852 - RNA, 20 nt, Artificial Sequence
  Synthetic
uaaucaguuuaaugguuaag

SEQ ID NO: 303853 - RNA, 21 nt, Artificial Sequence
  Synthetic
auaaucaguuuaaugguuaag

SEQ ID NO: 303854 - RNA, 22 nt, Artificial Sequence
  Synthetic
cauaaucaguuuaaugguuaag

SEQ ID NO: 303855 - RNA, 23 nt, Artificial Sequence
  Synthetic
gcauaaucaguuuaaugguuaag

SEQ ID NO: 303856 - RNA, 24 nt, Artificial Sequence
  Synthetic
agcauaaucaguuuaaugguuaag

SEQ ID NO: 303857 - RNA, 18 nt, Artificial Sequence
  Synthetic
gcagcugauaugguuaag

SEQ ID NO: 303858 - RNA, 19 nt, Artificial Sequence
  Synthetic
ugcagcugauaugguuaag

SEQ ID NO: 303859 - RNA, 20 nt, Artificial Sequence
  Synthetic
gugcagcugauaugguuaag

SEQ ID NO: 303860 - RNA, 21 nt, Artificial Sequence
  Synthetic
agugcagcugauaugguuaag

SEQ ID NO: 303861 - RNA, 22 nt, Artificial Sequence
  Synthetic
uagugcagcugauaugguuaag

SEQ ID NO: 303862 - RNA, 23 nt, Artificial Sequence
  Synthetic
uuagugcagcugauaugguuaag

SEQ ID NO: 303863 - RNA, 24 nt, Artificial Sequence
  Synthetic
uuuagugcagcugauaugguuaag

SEQ ID NO: 303864 - RNA, 18 nt, Artificial Sequence
  Synthetic
aaguauuaaaguguuaag

SEQ ID NO: 303865 - RNA, 19 nt, Artificial Sequence
  Synthetic
gaaguauuaaaguguuaag

SEQ ID NO: 303866 - RNA, 20 nt, Artificial Sequence
  Synthetic
ggaaguauuaaaguguuaag

SEQ ID NO: 303867 - RNA, 21 nt, Artificial Sequence
  Synthetic
uggaaguauuaaaguguuaag

SEQ ID NO: 303868 - RNA, 22 nt, Artificial Sequence
  Synthetic
auggaaguauuaaaguguuaag

SEQ ID NO: 303869 - RNA, 23 nt, Artificial Sequence
  Synthetic
aauggaaguauuaaaguguuaag

SEQ ID NO: 303870 - RNA, 24 nt, Artificial Sequence
  Synthetic
aaauggaaguauuaaaguguuaag

SEQ ID NO: 303871 - RNA, 18 nt, Artificial Sequence
  Synthetic
acggggguuaguguuaag

SEQ ID NO: 303872 - RNA, 19 nt, Artificial Sequence
  Synthetic
gacggggguuaguguuaag

SEQ ID NO: 303873 - RNA, 20 nt, Artificial Sequence
  Synthetic
ugacggggguuaguguuaag

SEQ ID NO: 303874 - RNA, 21 nt, Artificial Sequence
  Synthetic
uugacggggguuaguguuaag

SEQ ID NO: 303875 - RNA, 22 nt, Artificial Sequence
  Synthetic
auugacggggguuaguguuaag

SEQ ID NO: 303876 - RNA, 23 nt, Artificial Sequence
  Synthetic
aauugacggggguuaguguuaag

SEQ ID NO: 303877 - RNA, 24 nt, Artificial Sequence
  Synthetic
uaauugacggggguuaguguuaag

SEQ ID NO: 303878 - RNA, 18 nt, Artificial Sequence
  Synthetic
uaaagguucuguguuaag

SEQ ID NO: 303879 - RNA, 19 nt, Artificial Sequence
  Synthetic
cuaaagguucuguguuaag

SEQ ID NO: 303880 - RNA, 20 nt, Artificial Sequence
  Synthetic
acuaaagguucuguguuaag

SEQ ID NO: 303881 - RNA, 21 nt, Artificial Sequence
  Synthetic
cacuaaagguucuguguuaag

SEQ ID NO: 303882 - RNA, 22 nt, Artificial Sequence
  Synthetic
ccacuaaagguucuguguuaag

SEQ ID NO: 303883 - RNA, 23 nt, Artificial Sequence
  Synthetic
accacuaaagguucuguguuaag

SEQ ID NO: 303884 - RNA, 24 nt, Artificial Sequence
  Synthetic
aaccacuaaagguucuguguuaag

SEQ ID NO: 303885 - RNA, 18 nt, Artificial Sequence
  Synthetic
gauuuccuuaaauuuaag

SEQ ID NO: 303886 - RNA, 19 nt, Artificial Sequence
  Synthetic
ggauuuccuuaaauuuaag

SEQ ID NO: 303887 - RNA, 20 nt, Artificial Sequence
  Synthetic
gggauuuccuuaaauuuaag

SEQ ID NO: 303888 - RNA, 21 nt, Artificial Sequence
  Synthetic
ugggauuuccuuaaauuuaag

SEQ ID NO: 303889 - RNA, 22 nt, Artificial Sequence
  Synthetic
uugggauuuccuuaaauuuaag

SEQ ID NO: 303890 - RNA, 23 nt, Artificial Sequence
  Synthetic
uuugggauuuccuuaaauuuaag

SEQ ID NO: 303891 - RNA, 24 nt, Artificial Sequence
  Synthetic
guuugggauuuccuuaaauuuaag

SEQ ID NO: 303892 - RNA, 18 nt, Artificial Sequence
  Synthetic
uggggauuacaauuuaag

SEQ ID NO: 303893 - RNA, 19 nt, Artificial Sequence
  Synthetic
auggggauuacaauuuaag

SEQ ID NO: 303894 - RNA, 20 nt, Artificial Sequence
  Synthetic
uauggggauuacaauuuaag

SEQ ID NO: 303895 - RNA, 21 nt, Artificial Sequence
  Synthetic
uuauggggauuacaauuuaag

SEQ ID NO: 303896 - RNA, 22 nt, Artificial Sequence
  Synthetic
guuauggggauuacaauuuaag

SEQ ID NO: 303897 - RNA, 23 nt, Artificial Sequence
  Synthetic
gguuauggggauuacaauuuaag

SEQ ID NO: 303898 - RNA, 24 nt, Artificial Sequence
  Synthetic
agguuauggggauuacaauuuaag

SEQ ID NO: 303899 - RNA, 18 nt, Artificial Sequence
  Synthetic
accucuauuggauuuaag

SEQ ID NO: 303900 - RNA, 19 nt, Artificial Sequence
  Synthetic
uaccucuauuggauuuaag

SEQ ID NO: 303901 - RNA, 20 nt, Artificial Sequence
  Synthetic
cuaccucuauuggauuuaag

SEQ ID NO: 303902 - RNA, 21 nt, Artificial Sequence
  Synthetic
acuaccucuauuggauuuaag

SEQ ID NO: 303903 - RNA, 22 nt, Artificial Sequence
  Synthetic
aacuaccucuauuggauuuaag

SEQ ID NO: 303904 - RNA, 23 nt, Artificial Sequence
  Synthetic
aaacuaccucuauuggauuuaag

SEQ ID NO: 303905 - RNA, 24 nt, Artificial Sequence
  Synthetic
aaaacuaccucuauuggauuuaag

SEQ ID NO: 303906 - RNA, 18 nt, Artificial Sequence
  Synthetic
ugcuuccugauauuuaag

SEQ ID NO: 303907 - RNA, 19 nt, Artificial Sequence
  Synthetic
uugcuuccugauauuuaag

SEQ ID NO: 303908 - RNA, 20 nt, Artificial Sequence
  Synthetic
uuugcuuccugauauuuaag

SEQ ID NO: 303909 - RNA, 21 nt, Artificial Sequence
  Synthetic
uuuugcuuccugauauuuaag

SEQ ID NO: 303910 - RNA, 22 nt, Artificial Sequence
  Synthetic
auuuugcuuccugauauuuaag

SEQ ID NO: 303911 - RNA, 23 nt, Artificial Sequence
  Synthetic
aauuuugcuuccugauauuuaag

SEQ ID NO: 303912 - RNA, 24 nt, Artificial Sequence
  Synthetic
caauuuugcuuccugauauuuaag

SEQ ID NO: 303913 - RNA, 18 nt, Artificial Sequence
  Synthetic
aaauaagaaguauuuaag

SEQ ID NO: 303914 - RNA, 19 nt, Artificial Sequence
  Synthetic
aaaauaagaaguauuuaag

SEQ ID NO: 303915 - RNA, 20 nt, Artificial Sequence
  Synthetic
uaaaauaagaaguauuuaag

SEQ ID NO: 303916 - RNA, 21 nt, Artificial Sequence
  Synthetic
uuaaaauaagaaguauuuaag

SEQ ID NO: 303917 - RNA, 22 nt, Artificial Sequence
  Synthetic
auuaaaauaagaaguauuuaag

SEQ ID NO: 303918 - RNA, 23 nt, Artificial Sequence
  Synthetic
uauuaaaauaagaaguauuuaag

SEQ ID NO: 303919 - RNA, 24 nt, Artificial Sequence
  Synthetic
auauuaaaauaagaaguauuuaag

SEQ ID NO: 303920 - RNA, 18 nt, Artificial Sequence
  Synthetic
guacugacaguauuuaag

SEQ ID NO: 303921 - RNA, 19 nt, Artificial Sequence
  Synthetic
uguacugacaguauuuaag

SEQ ID NO: 303922 - RNA, 20 nt, Artificial Sequence
  Synthetic
auguacugacaguauuuaag

SEQ ID NO: 303923 - RNA, 21 nt, Artificial Sequence
  Synthetic
cauguacugacaguauuuaag

SEQ ID NO: 303924 - RNA, 22 nt, Artificial Sequence
  Synthetic
gcauguacugacaguauuuaag

SEQ ID NO: 303925 - RNA, 23 nt, Artificial Sequence
  Synthetic
ggcauguacugacaguauuuaag

SEQ ID NO: 303926 - RNA, 24 nt, Artificial Sequence
  Synthetic
aggcauguacugacaguauuuaag

SEQ ID NO: 303927 - RNA, 18 nt, Artificial Sequence
  Synthetic
ugaaacccccacuuuaag

SEQ ID NO: 303928 - RNA, 19 nt, Artificial Sequence
  Synthetic
uugaaacccccacuuuaag

SEQ ID NO: 303929 - RNA, 20 nt, Artificial Sequence
  Synthetic
uuugaaacccccacuuuaag

SEQ ID NO: 303930 - RNA, 21 nt, Artificial Sequence
  Synthetic
cuuugaaacccccacuuuaag

SEQ ID NO: 303931 - RNA, 22 nt, Artificial Sequence
  Synthetic
acuuugaaacccccacuuuaag

SEQ ID NO: 303932 - RNA, 23 nt, Artificial Sequence
  Synthetic
gacuuugaaacccccacuuuaag

SEQ ID NO: 303933 - RNA, 24 nt, Artificial Sequence
  Synthetic
agacuuugaaacccccacuuuaag

SEQ ID NO: 303934 - RNA, 18 nt, Artificial Sequence
  Synthetic
aaaauuaugcacuuuaag

SEQ ID NO: 303935 - RNA, 19 nt, Artificial Sequence
  Synthetic
gaaaauuaugcacuuuaag

SEQ ID NO: 303936 - RNA, 20 nt, Artificial Sequence
  Synthetic
agaaaauuaugcacuuuaag

SEQ ID NO: 303937 - RNA, 21 nt, Artificial Sequence
  Synthetic
cagaaaauuaugcacuuuaag

SEQ ID NO: 303938 - RNA, 22 nt, Artificial Sequence
  Synthetic
ccagaaaauuaugcacuuuaag

SEQ ID NO: 303939 - RNA, 23 nt, Artificial Sequence
  Synthetic
accagaaaauuaugcacuuuaag

SEQ ID NO: 303940 - RNA, 24 nt, Artificial Sequence
  Synthetic
aaccagaaaauuaugcacuuuaag

SEQ ID NO: 303941 - RNA, 18 nt, Artificial Sequence
  Synthetic
cugcagcuguacuuuaag

SEQ ID NO: 303942 - RNA, 19 nt, Artificial Sequence
  Synthetic
ucugcagcuguacuuuaag

SEQ ID NO: 303943 - RNA, 20 nt, Artificial Sequence
  Synthetic
cucugcagcuguacuuuaag

SEQ ID NO: 303944 - RNA, 21 nt, Artificial Sequence
  Synthetic
acucugcagcuguacuuuaag

SEQ ID NO: 303945 - RNA, 22 nt, Artificial Sequence
  Synthetic
uacucugcagcuguacuuuaag

SEQ ID NO: 303946 - RNA, 23 nt, Artificial Sequence
  Synthetic
auacucugcagcuguacuuuaag

SEQ ID NO: 303947 - RNA, 24 nt, Artificial Sequence
  Synthetic
uauacucugcagcuguacuuuaag

SEQ ID NO: 303948 - RNA, 18 nt, Artificial Sequence
  Synthetic
uuuuagaguuacuuuaag

SEQ ID NO: 303949 - RNA, 19 nt, Artificial Sequence
  Synthetic
auuuuagaguuacuuuaag

SEQ ID NO: 303950 - RNA, 20 nt, Artificial Sequence
  Synthetic
uauuuuagaguuacuuuaag

SEQ ID NO: 303951 - RNA, 21 nt, Artificial Sequence
  Synthetic
auauuuuagaguuacuuuaag

SEQ ID NO: 303952 - RNA, 22 nt, Artificial Sequence
  Synthetic
uauauuuuagaguuacuuuaag

SEQ ID NO: 303953 - RNA, 23 nt, Artificial Sequence
  Synthetic
uuauauuuuagaguuacuuuaag

SEQ ID NO: 303954 - RNA, 24 nt, Artificial Sequence
  Synthetic
auuauauuuuagaguuacuuuaag

SEQ ID NO: 303955 - RNA, 18 nt, Artificial Sequence
  Synthetic
guuaugaucuccuuuaag

SEQ ID NO: 303956 - RNA, 19 nt, Artificial Sequence
  Synthetic
cguuaugaucuccuuuaag

SEQ ID NO: 303957 - RNA, 20 nt, Artificial Sequence
  Synthetic
ucguuaugaucuccuuuaag

SEQ ID NO: 303958 - RNA, 21 nt, Artificial Sequence
  Synthetic
aucguuaugaucuccuuuaag

SEQ ID NO: 303959 - RNA, 22 nt, Artificial Sequence
  Synthetic
aaucguuaugaucuccuuuaag

SEQ ID NO: 303960 - RNA, 23 nt, Artificial Sequence
  Synthetic
caaucguuaugaucuccuuuaag

SEQ ID NO: 303961 - RNA, 24 nt, Artificial Sequence
  Synthetic
ucaaucguuaugaucuccuuuaag

SEQ ID NO: 303962 - RNA, 18 nt, Artificial Sequence
  Synthetic
cuaugcauguccuuuaag

SEQ ID NO: 303963 - RNA, 19 nt, Artificial Sequence
  Synthetic
ucuaugcauguccuuuaag

SEQ ID NO: 303964 - RNA, 20 nt, Artificial Sequence
  Synthetic
gucuaugcauguccuuuaag

SEQ ID NO: 303965 - RNA, 21 nt, Artificial Sequence
  Synthetic
agucuaugcauguccuuuaag

SEQ ID NO: 303966 - RNA, 22 nt, Artificial Sequence
  Synthetic
cagucuaugcauguccuuuaag

SEQ ID NO: 303967 - RNA, 23 nt, Artificial Sequence
  Synthetic
ucagucuaugcauguccuuuaag

SEQ ID NO: 303968 - RNA, 24 nt, Artificial Sequence
  Synthetic
uucagucuaugcauguccuuuaag

SEQ ID NO: 303969 - RNA, 18 nt, Artificial Sequence
  Synthetic
aacauuaacugcuuuaag

SEQ ID NO: 303970 - RNA, 19 nt, Artificial Sequence
  Synthetic
aaacauuaacugcuuuaag

SEQ ID NO: 303971 - RNA, 20 nt, Artificial Sequence
  Synthetic
aaaacauuaacugcuuuaag

SEQ ID NO: 303972 - RNA, 21 nt, Artificial Sequence
  Synthetic
gaaaacauuaacugcuuuaag

SEQ ID NO: 303973 - RNA, 22 nt, Artificial Sequence
  Synthetic
cgaaaacauuaacugcuuuaag

SEQ ID NO: 303974 - RNA, 23 nt, Artificial Sequence
  Synthetic
acgaaaacauuaacugcuuuaag

SEQ ID NO: 303975 - RNA, 24 nt, Artificial Sequence
  Synthetic
aacgaaaacauuaacugcuuuaag

SEQ ID NO: 303976 - RNA, 18 nt, Artificial Sequence
  Synthetic
ucaagauuggucuuuaag

SEQ ID NO: 303977 - RNA, 19 nt, Artificial Sequence
  Synthetic
gucaagauuggucuuuaag

SEQ ID NO: 303978 - RNA, 20 nt, Artificial Sequence
  Synthetic
cgucaagauuggucuuuaag

SEQ ID NO: 303979 - RNA, 21 nt, Artificial Sequence
  Synthetic
acgucaagauuggucuuuaag

SEQ ID NO: 303980 - RNA, 22 nt, Artificial Sequence
  Synthetic
gacgucaagauuggucuuuaag

SEQ ID NO: 303981 - RNA, 23 nt, Artificial Sequence
  Synthetic
ggacgucaagauuggucuuuaag

SEQ ID NO: 303982 - RNA, 24 nt, Artificial Sequence
  Synthetic
aggacgucaagauuggucuuuaag

SEQ ID NO: 303983 - RNA, 18 nt, Artificial Sequence
  Synthetic
guggggaaugucuuuaag

SEQ ID NO: 303984 - RNA, 19 nt, Artificial Sequence
  Synthetic
uguggggaaugucuuuaag

SEQ ID NO: 303985 - RNA, 20 nt, Artificial Sequence
  Synthetic
guguggggaaugucuuuaag

SEQ ID NO: 303986 - RNA, 21 nt, Artificial Sequence
  Synthetic
uguguggggaaugucuuuaag

SEQ ID NO: 303987 - RNA, 22 nt, Artificial Sequence
  Synthetic
cuguguggggaaugucuuuaag

SEQ ID NO: 303988 - RNA, 23 nt, Artificial Sequence
  Synthetic
ucuguguggggaaugucuuuaag

SEQ ID NO: 303989 - RNA, 24 nt, Artificial Sequence
  Synthetic
uucuguguggggaaugucuuuaag

SEQ ID NO: 303990 - RNA, 18 nt, Artificial Sequence
  Synthetic
aauauagcauuguuuaag

SEQ ID NO: 303991 - RNA, 19 nt, Artificial Sequence
  Synthetic
uaauauagcauuguuuaag

SEQ ID NO: 303992 - RNA, 20 nt, Artificial Sequence
  Synthetic
uuaauauagcauuguuuaag

SEQ ID NO: 303993 - RNA, 21 nt, Artificial Sequence
  Synthetic
auuaauauagcauuguuuaag

SEQ ID NO: 303994 - RNA, 22 nt, Artificial Sequence
  Synthetic
cauuaauauagcauuguuuaag

SEQ ID NO: 303995 - RNA, 23 nt, Artificial Sequence
  Synthetic
ccauuaauauagcauuguuuaag

SEQ ID NO: 303996 - RNA, 24 nt, Artificial Sequence
  Synthetic
gccauuaauauagcauuguuuaag

SEQ ID NO: 303997 - RNA, 18 nt, Artificial Sequence
  Synthetic
uuuuuuguaaauuuuaag

SEQ ID NO: 303998 - RNA, 19 nt, Artificial Sequence
  Synthetic
uuuuuuuguaaauuuuaag

SEQ ID NO: 303999 - RNA, 20 nt, Artificial Sequence
  Synthetic
uuuuuuuuguaaauuuuaag

SEQ ID NO: 304000 - RNA, 21 nt, Artificial Sequence
  Synthetic
uuuuuuuuuguaaauuuuaag

SEQ ID NO: 304001 - RNA, 22 nt, Artificial Sequence
  Synthetic
uuuuuuuuuuguaaauuuuaag

SEQ ID NO: 304002 - RNA, 23 nt, Artificial Sequence
  Synthetic
auuuuuuuuuuguaaauuuuaag

SEQ ID NO: 304003 - RNA, 24 nt, Artificial Sequence
  Synthetic
cauuuuuuuuuuguaaauuuuaag

SEQ ID NO: 304004 - RNA, 18 nt, Artificial Sequence
  Synthetic
uauuguucuaauuuuaag

SEQ ID NO: 304005 - RNA, 19 nt, Artificial Sequence
  Synthetic
uuauuguucuaauuuuaag

SEQ ID NO: 304006 - RNA, 20 nt, Artificial Sequence
  Synthetic
uuuauuguucuaauuuuaag

SEQ ID NO: 304007 - RNA, 21 nt, Artificial Sequence
  Synthetic
guuuauuguucuaauuuuaag

SEQ ID NO: 304008 - RNA, 22 nt, Artificial Sequence
  Synthetic
uguuuauuguucuaauuuuaag

SEQ ID NO: 304009 - RNA, 23 nt, Artificial Sequence
  Synthetic
auguuuauuguucuaauuuuaag

SEQ ID NO: 304010 - RNA, 24 nt, Artificial Sequence
  Synthetic
aauguuuauuguucuaauuuuaag

SEQ ID NO: 304011 - RNA, 18 nt, Artificial Sequence
  Synthetic
uaauuuuuguauuuuaag

SEQ ID NO: 304012 - RNA, 19 nt, Artificial Sequence
  Synthetic
cuaauuuuuguauuuuaag

SEQ ID NO: 304013 - RNA, 20 nt, Artificial Sequence
  Synthetic
gcuaauuuuuguauuuuaag

SEQ ID NO: 304014 - RNA, 21 nt, Artificial Sequence
  Synthetic
ggcuaauuuuuguauuuuaag

SEQ ID NO: 304015 - RNA, 22 nt, Artificial Sequence
  Synthetic
uggcuaauuuuuguauuuuaag

SEQ ID NO: 304016 - RNA, 23 nt, Artificial Sequence
  Synthetic
cuggcuaauuuuuguauuuuaag

SEQ ID NO: 304017 - RNA, 24 nt, Artificial Sequence
  Synthetic
ccuggcuaauuuuuguauuuuaag

SEQ ID NO: 304018 - RNA, 18 nt, Artificial Sequence
  Synthetic
cugaaugugacuuuuaag

SEQ ID NO: 304019 - RNA, 19 nt, Artificial Sequence
  Synthetic
ccugaaugugacuuuuaag

SEQ ID NO: 304020 - RNA, 20 nt, Artificial Sequence
  Synthetic
uccugaaugugacuuuuaag

SEQ ID NO: 304021 - RNA, 21 nt, Artificial Sequence
  Synthetic
uuccugaaugugacuuuuaag

SEQ ID NO: 304022 - RNA, 22 nt, Artificial Sequence
  Synthetic
auuccugaaugugacuuuuaag

SEQ ID NO: 304023 - RNA, 23 nt, Artificial Sequence
  Synthetic
gauuccugaaugugacuuuuaag

SEQ ID NO: 304024 - RNA, 24 nt, Artificial Sequence
  Synthetic
ggauuccugaaugugacuuuuaag

SEQ ID NO: 304025 - RNA, 18 nt, Artificial Sequence
  Synthetic
cacaucuaaaguuuuaag

SEQ ID NO: 304026 - RNA, 19 nt, Artificial Sequence
  Synthetic
ucacaucuaaaguuuuaag

SEQ ID NO: 304027 - RNA, 20 nt, Artificial Sequence
  Synthetic
uucacaucuaaaguuuuaag

SEQ ID NO: 304028 - RNA, 21 nt, Artificial Sequence
  Synthetic
auucacaucuaaaguuuuaag

SEQ ID NO: 304029 - RNA, 22 nt, Artificial Sequence
  Synthetic
cauucacaucuaaaguuuuaag

SEQ ID NO: 304030 - RNA, 23 nt, Artificial Sequence
  Synthetic
gcauucacaucuaaaguuuuaag

SEQ ID NO: 304031 - RNA, 24 nt, Artificial Sequence
  Synthetic
agcauucacaucuaaaguuuuaag

SEQ ID NO: 304032 - RNA, 18 nt, Artificial Sequence
  Synthetic
agaauuccaaguuuuaag

SEQ ID NO: 304033 - RNA, 19 nt, Artificial Sequence
  Synthetic
cagaauuccaaguuuuaag

SEQ ID NO: 304034 - RNA, 20 nt, Artificial Sequence
  Synthetic
acagaauuccaaguuuuaag

SEQ ID NO: 304035 - RNA, 21 nt, Artificial Sequence
  Synthetic
aacagaauuccaaguuuuaag

SEQ ID NO: 304036 - RNA, 22 nt, Artificial Sequence
  Synthetic
aaacagaauuccaaguuuuaag

SEQ ID NO: 304037 - RNA, 23 nt, Artificial Sequence
  Synthetic
gaaacagaauuccaaguuuuaag

SEQ ID NO: 304038 - RNA, 24 nt, Artificial Sequence
  Synthetic
ugaaacagaauuccaaguuuuaag

SEQ ID NO: 304039 - RNA, 18 nt, Artificial Sequence
  Synthetic
uuuuguuacuguuuuaag

SEQ ID NO: 304040 - RNA, 19 nt, Artificial Sequence
  Synthetic
cuuuuguuacuguuuuaag

SEQ ID NO: 304041 - RNA, 20 nt, Artificial Sequence
  Synthetic
ccuuuuguuacuguuuuaag

SEQ ID NO: 304042 - RNA, 21 nt, Artificial Sequence
  Synthetic
accuuuuguuacuguuuuaag

SEQ ID NO: 304043 - RNA, 22 nt, Artificial Sequence
  Synthetic
caccuuuuguuacuguuuuaag

SEQ ID NO: 304044 - RNA, 23 nt, Artificial Sequence
  Synthetic
acaccuuuuguuacuguuuuaag

SEQ ID NO: 304045 - RNA, 24 nt, Artificial Sequence
  Synthetic
cacaccuuuuguuacuguuuuaag

SEQ ID NO: 304046 - RNA, 18 nt, Artificial Sequence
  Synthetic
ugauuaacaauuuuuaag

SEQ ID NO: 304047 - RNA, 19 nt, Artificial Sequence
  Synthetic
augauuaacaauuuuuaag

SEQ ID NO: 304048 - RNA, 20 nt, Artificial Sequence
  Synthetic
aaugauuaacaauuuuuaag

SEQ ID NO: 304049 - RNA, 21 nt, Artificial Sequence
  Synthetic
caaugauuaacaauuuuuaag

SEQ ID NO: 304050 - RNA, 22 nt, Artificial Sequence
  Synthetic
acaaugauuaacaauuuuuaag

SEQ ID NO: 304051 - RNA, 23 nt, Artificial Sequence
  Synthetic
cacaaugauuaacaauuuuuaag

SEQ ID NO: 304052 - RNA, 24 nt, Artificial Sequence
  Synthetic
ucacaaugauuaacaauuuuuaag

SEQ ID NO: 304053 - RNA, 18 nt, Artificial Sequence
  Synthetic
cuuuaaauuauuuuuaag

SEQ ID NO: 304054 - RNA, 19 nt, Artificial Sequence
  Synthetic
ccuuuaaauuauuuuuaag

SEQ ID NO: 304055 - RNA, 20 nt, Artificial Sequence
  Synthetic
uccuuuaaauuauuuuuaag

SEQ ID NO: 304056 - RNA, 21 nt, Artificial Sequence
  Synthetic
guccuuuaaauuauuuuuaag

SEQ ID NO: 304057 - RNA, 22 nt, Artificial Sequence
  Synthetic
aguccuuuaaauuauuuuuaag

SEQ ID NO: 304058 - RNA, 23 nt, Artificial Sequence
  Synthetic
aaguccuuuaaauuauuuuuaag

SEQ ID NO: 304059 - RNA, 24 nt, Artificial Sequence
  Synthetic
uaaguccuuuaaauuauuuuuaag

SEQ ID NO: 304060 - RNA, 18 nt, Artificial Sequence
  Synthetic
auuauguuucuuuuuaag

SEQ ID NO: 304061 - RNA, 19 nt, Artificial Sequence
  Synthetic
cauuauguuucuuuuuaag

SEQ ID NO: 304062 - RNA, 20 nt, Artificial Sequence
  Synthetic
ucauuauguuucuuuuuaag

SEQ ID NO: 304063 - RNA, 21 nt, Artificial Sequence
  Synthetic
uucauuauguuucuuuuuaag

SEQ ID NO: 304064 - RNA, 22 nt, Artificial Sequence
  Synthetic
cuucauuauguuucuuuuuaag

SEQ ID NO: 304065 - RNA, 23 nt, Artificial Sequence
  Synthetic
ucuucauuauguuucuuuuuaag

SEQ ID NO: 304066 - RNA, 24 nt, Artificial Sequence
  Synthetic
gucuucauuauguuucuuuuuaag

SEQ ID NO: 304067 - RNA, 18 nt, Artificial Sequence
  Synthetic
acagccaucuuuuuuaag

SEQ ID NO: 304068 - RNA, 19 nt, Artificial Sequence
  Synthetic
aacagccaucuuuuuuaag

SEQ ID NO: 304069 - RNA, 20 nt, Artificial Sequence
  Synthetic
uaacagccaucuuuuuuaag

SEQ ID NO: 304070 - RNA, 21 nt, Artificial Sequence
  Synthetic
uuaacagccaucuuuuuuaag

SEQ ID NO: 304071 - RNA, 22 nt, Artificial Sequence
  Synthetic
auuaacagccaucuuuuuuaag

SEQ ID NO: 304072 - RNA, 23 nt, Artificial Sequence
  Synthetic
aauuaacagccaucuuuuuuaag

SEQ ID NO: 304073 - RNA, 24 nt, Artificial Sequence
  Synthetic
gaauuaacagccaucuuuuuuaag

SEQ ID NO: 304074 - RNA, 18 nt, Artificial Sequence
  Synthetic
uugaguuuuuuuuuuaag

SEQ ID NO: 304075 - RNA, 19 nt, Artificial Sequence
  Synthetic
cuugaguuuuuuuuuuaag

SEQ ID NO: 304076 - RNA, 20 nt, Artificial Sequence
  Synthetic
ccuugaguuuuuuuuuuaag

SEQ ID NO: 304077 - RNA, 21 nt, Artificial Sequence
  Synthetic
uccuugaguuuuuuuuuuaag

SEQ ID NO: 304078 - RNA, 22 nt, Artificial Sequence
  Synthetic
uuccuugaguuuuuuuuuuaag

SEQ ID NO: 304079 - RNA, 23 nt, Artificial Sequence
  Synthetic
cuuccuugaguuuuuuuuuuaag

SEQ ID NO: 304080 - RNA, 24 nt, Artificial Sequence
  Synthetic
gcuuccuugaguuuuuuuuuuaag

SEQ ID NO: 304081 - RNA, 18 nt, Artificial Sequence
  Synthetic
uuuggcaaauaaaaacag

SEQ ID NO: 304082 - RNA, 19 nt, Artificial Sequence
  Synthetic
guuuggcaaauaaaaacag

SEQ ID NO: 304083 - RNA, 20 nt, Artificial Sequence
  Synthetic
uguuuggcaaauaaaaacag

SEQ ID NO: 304084 - RNA, 21 nt, Artificial Sequence
  Synthetic
auguuuggcaaauaaaaacag

SEQ ID NO: 304085 - RNA, 22 nt, Artificial Sequence
  Synthetic
cauguuuggcaaauaaaaacag

SEQ ID NO: 304086 - RNA, 23 nt, Artificial Sequence
  Synthetic
acauguuuggcaaauaaaaacag

SEQ ID NO: 304087 - RNA, 24 nt, Artificial Sequence
  Synthetic
gacauguuuggcaaauaaaaacag

SEQ ID NO: 304088 - RNA, 18 nt, Artificial Sequence
  Synthetic
auguuagauuaaaaacag

SEQ ID NO: 304089 - RNA, 19 nt, Artificial Sequence
  Synthetic
aauguuagauuaaaaacag

SEQ ID NO: 304090 - RNA, 20 nt, Artificial Sequence
  Synthetic
aaauguuagauuaaaaacag

SEQ ID NO: 304091 - RNA, 21 nt, Artificial Sequence
  Synthetic
aaaauguuagauuaaaaacag

SEQ ID NO: 304092 - RNA, 22 nt, Artificial Sequence
  Synthetic
aaaaauguuagauuaaaaacag

SEQ ID NO: 304093 - RNA, 23 nt, Artificial Sequence
  Synthetic
aaaaaauguuagauuaaaaacag

SEQ ID NO: 304094 - RNA, 24 nt, Artificial Sequence
  Synthetic
caaaaaauguuagauuaaaaacag

SEQ ID NO: 304095 - RNA, 18 nt, Artificial Sequence
  Synthetic
ucaugugcaacaaaacag

SEQ ID NO: 304096 - RNA, 19 nt, Artificial Sequence
  Synthetic
gucaugugcaacaaaacag

SEQ ID NO: 304097 - RNA, 20 nt, Artificial Sequence
  Synthetic
agucaugugcaacaaaacag

SEQ ID NO: 304098 - RNA, 21 nt, Artificial Sequence
  Synthetic
aagucaugugcaacaaaacag

SEQ ID NO: 304099 - RNA, 22 nt, Artificial Sequence
  Synthetic
gaagucaugugcaacaaaacag

SEQ ID NO: 304100 - RNA, 23 nt, Artificial Sequence
  Synthetic
agaagucaugugcaacaaaacag

SEQ ID NO: 304101 - RNA, 24 nt, Artificial Sequence
  Synthetic
aagaagucaugugcaacaaaacag

SEQ ID NO: 304102 - RNA, 18 nt, Artificial Sequence
  Synthetic
cugcaccuuucaaaacag

SEQ ID NO: 304103 - RNA, 19 nt, Artificial Sequence
  Synthetic
acugcaccuuucaaaacag

SEQ ID NO: 304104 - RNA, 20 nt, Artificial Sequence
  Synthetic
gacugcaccuuucaaaacag

SEQ ID NO: 304105 - RNA, 21 nt, Artificial Sequence
  Synthetic
ugacugcaccuuucaaaacag

SEQ ID NO: 304106 - RNA, 22 nt, Artificial Sequence
  Synthetic
uugacugcaccuuucaaaacag

SEQ ID NO: 304107 - RNA, 23 nt, Artificial Sequence
  Synthetic
auugacugcaccuuucaaaacag

SEQ ID NO: 304108 - RNA, 24 nt, Artificial Sequence
  Synthetic
aauugacugcaccuuucaaaacag

SEQ ID NO: 304109 - RNA, 18 nt, Artificial Sequence
  Synthetic
ggagguaaaugaaaacag

SEQ ID NO: 304110 - RNA, 19 nt, Artificial Sequence
  Synthetic
aggagguaaaugaaaacag

SEQ ID NO: 304111 - RNA, 20 nt, Artificial Sequence
  Synthetic
caggagguaaaugaaaacag

SEQ ID NO: 304112 - RNA, 21 nt, Artificial Sequence
  Synthetic
ccaggagguaaaugaaaacag

SEQ ID NO: 304113 - RNA, 22 nt, Artificial Sequence
  Synthetic
uccaggagguaaaugaaaacag

SEQ ID NO: 304114 - RNA, 23 nt, Artificial Sequence
  Synthetic
uuccaggagguaaaugaaaacag

SEQ ID NO: 304115 - RNA, 24 nt, Artificial Sequence
  Synthetic
uuuccaggagguaaaugaaaacag

SEQ ID NO: 304116 - RNA, 18 nt, Artificial Sequence
  Synthetic
auguuaaaaauaaaacag

SEQ ID NO: 304117 - RNA, 19 nt, Artificial Sequence
  Synthetic
gauguuaaaaauaaaacag

SEQ ID NO: 304118 - RNA, 20 nt, Artificial Sequence
  Synthetic
agauguuaaaaauaaaacag

SEQ ID NO: 304119 - RNA, 21 nt, Artificial Sequence
  Synthetic
uagauguuaaaaauaaaacag

SEQ ID NO: 304120 - RNA, 22 nt, Artificial Sequence
  Synthetic
auagauguuaaaaauaaaacag

SEQ ID NO: 304121 - RNA, 23 nt, Artificial Sequence
  Synthetic
aauagauguuaaaaauaaaacag

SEQ ID NO: 304122 - RNA, 24 nt, Artificial Sequence
  Synthetic
uaauagauguuaaaaauaaaacag

SEQ ID NO: 304123 - RNA, 18 nt, Artificial Sequence
  Synthetic
uuaacgcauguaaaacag

SEQ ID NO: 304124 - RNA, 19 nt, Artificial Sequence
  Synthetic
uuuaacgcauguaaaacag

SEQ ID NO: 304125 - RNA, 20 nt, Artificial Sequence
  Synthetic
uuuuaacgcauguaaaacag

SEQ ID NO: 304126 - RNA, 21 nt, Artificial Sequence
  Synthetic
auuuuaacgcauguaaaacag

SEQ ID NO: 304127 - RNA, 22 nt, Artificial Sequence
  Synthetic
uauuuuaacgcauguaaaacag

SEQ ID NO: 304128 - RNA, 23 nt, Artificial Sequence
  Synthetic
cuauuuuaacgcauguaaaacag

SEQ ID NO: 304129 - RNA, 24 nt, Artificial Sequence
  Synthetic
gcuauuuuaacgcauguaaaacag

SEQ ID NO: 304130 - RNA, 18 nt, Artificial Sequence
  Synthetic
uuuacaaaaaucaaacag

SEQ ID NO: 304131 - RNA, 19 nt, Artificial Sequence
  Synthetic
cuuuacaaaaaucaaacag

SEQ ID NO: 304132 - RNA, 20 nt, Artificial Sequence
  Synthetic
ucuuuacaaaaaucaaacag

SEQ ID NO: 304133 - RNA, 21 nt, Artificial Sequence
  Synthetic
uucuuuacaaaaaucaaacag

SEQ ID NO: 304134 - RNA, 22 nt, Artificial Sequence
  Synthetic
guucuuuacaaaaaucaaacag

SEQ ID NO: 304135 - RNA, 23 nt, Artificial Sequence
  Synthetic
aguucuuuacaaaaaucaaacag

SEQ ID NO: 304136 - RNA, 24 nt, Artificial Sequence
  Synthetic
gaguucuuuacaaaaaucaaacag

SEQ ID NO: 304137 - RNA, 18 nt, Artificial Sequence
  Synthetic
ucuacuuuucucaaacag

SEQ ID NO: 304138 - RNA, 19 nt, Artificial Sequence
  Synthetic
gucuacuuuucucaaacag

SEQ ID NO: 304139 - RNA, 20 nt, Artificial Sequence
  Synthetic
ugucuacuuuucucaaacag

SEQ ID NO: 304140 - RNA, 21 nt, Artificial Sequence
  Synthetic
cugucuacuuuucucaaacag

SEQ ID NO: 304141 - RNA, 22 nt, Artificial Sequence
  Synthetic
ucugucuacuuuucucaaacag

SEQ ID NO: 304142 - RNA, 23 nt, Artificial Sequence
  Synthetic
uucugucuacuuuucucaaacag

SEQ ID NO: 304143 - RNA, 24 nt, Artificial Sequence
  Synthetic
uuucugucuacuuuucucaaacag

SEQ ID NO: 304144 - RNA, 18 nt, Artificial Sequence
  Synthetic
auucgauauuucaaacag

SEQ ID NO: 304145 - RNA, 19 nt, Artificial Sequence
  Synthetic
cauucgauauuucaaacag

SEQ ID NO: 304146 - RNA, 20 nt, Artificial Sequence
  Synthetic
acauucgauauuucaaacag

SEQ ID NO: 304147 - RNA, 21 nt, Artificial Sequence
  Synthetic
cacauucgauauuucaaacag

SEQ ID NO: 304148 - RNA, 22 nt, Artificial Sequence
  Synthetic
ccacauucgauauuucaaacag

SEQ ID NO: 304149 - RNA, 23 nt, Artificial Sequence
  Synthetic
accacauucgauauuucaaacag

SEQ ID NO: 304150 - RNA, 24 nt, Artificial Sequence
  Synthetic
aaccacauucgauauuucaaacag

SEQ ID NO: 304151 - RNA, 18 nt, Artificial Sequence
  Synthetic
aaaguuuuauagaaacag

SEQ ID NO: 304152 - RNA, 19 nt, Artificial Sequence
  Synthetic
aaaaguuuuauagaaacag

SEQ ID NO: 304153 - RNA, 20 nt, Artificial Sequence
  Synthetic
uaaaaguuuuauagaaacag

SEQ ID NO: 304154 - RNA, 21 nt, Artificial Sequence
  Synthetic
uuaaaaguuuuauagaaacag

SEQ ID NO: 304155 - RNA, 22 nt, Artificial Sequence
  Synthetic
uuuaaaaguuuuauagaaacag

SEQ ID NO: 304156 - RNA, 23 nt, Artificial Sequence
  Synthetic
uuuuaaaaguuuuauagaaacag

SEQ ID NO: 304157 - RNA, 24 nt, Artificial Sequence
  Synthetic
auuuuaaaaguuuuauagaaacag

SEQ ID NO: 304158 - RNA, 18 nt, Artificial Sequence
  Synthetic
auuuuugucuggaaacag

SEQ ID NO: 304159 - RNA, 19 nt, Artificial Sequence
  Synthetic
gauuuuugucuggaaacag

SEQ ID NO: 304160 - RNA, 20 nt, Artificial Sequence
  Synthetic
agauuuuugucuggaaacag

SEQ ID NO: 304161 - RNA, 21 nt, Artificial Sequence
  Synthetic
gagauuuuugucuggaaacag

SEQ ID NO: 304162 - RNA, 22 nt, Artificial Sequence
  Synthetic
ugagauuuuugucuggaaacag

SEQ ID NO: 304163 - RNA, 23 nt, Artificial Sequence
  Synthetic
augagauuuuugucuggaaacag

SEQ ID NO: 304164 - RNA, 24 nt, Artificial Sequence
  Synthetic
aaugagauuuuugucuggaaacag

SEQ ID NO: 304165 - RNA, 18 nt, Artificial Sequence
  Synthetic
aauaguaaaaauaaacag

SEQ ID NO: 304166 - RNA, 19 nt, Artificial Sequence
  Synthetic
aaauaguaaaaauaaacag

SEQ ID NO: 304167 - RNA, 20 nt, Artificial Sequence
  Synthetic
aaaauaguaaaaauaaacag

SEQ ID NO: 304168 - RNA, 21 nt, Artificial Sequence
  Synthetic
uaaaauaguaaaaauaaacag

SEQ ID NO: 304169 - RNA, 22 nt, Artificial Sequence
  Synthetic
uuaaaauaguaaaaauaaacag

SEQ ID NO: 304170 - RNA, 23 nt, Artificial Sequence
  Synthetic
auuaaaauaguaaaaauaaacag

SEQ ID NO: 304171 - RNA, 24 nt, Artificial Sequence
  Synthetic
cauuaaaauaguaaaaauaaacag

SEQ ID NO: 304172 - RNA, 18 nt, Artificial Sequence
  Synthetic
ugauuccaaaauaaacag

SEQ ID NO: 304173 - RNA, 19 nt, Artificial Sequence
  Synthetic
gugauuccaaaauaaacag

SEQ ID NO: 304174 - RNA, 20 nt, Artificial Sequence
  Synthetic
agugauuccaaaauaaacag

SEQ ID NO: 304175 - RNA, 21 nt, Artificial Sequence
  Synthetic
aagugauuccaaaauaaacag

SEQ ID NO: 304176 - RNA, 22 nt, Artificial Sequence
  Synthetic
aaagugauuccaaaauaaacag

SEQ ID NO: 304177 - RNA, 23 nt, Artificial Sequence
  Synthetic
aaaagugauuccaaaauaaacag

SEQ ID NO: 304178 - RNA, 24 nt, Artificial Sequence
  Synthetic
uaaaagugauuccaaaauaaacag

SEQ ID NO: 304179 - RNA, 18 nt, Artificial Sequence
  Synthetic
ggaagaaaaacuaaacag

SEQ ID NO: 304180 - RNA, 19 nt, Artificial Sequence
  Synthetic
uggaagaaaaacuaaacag

SEQ ID NO: 304181 - RNA, 20 nt, Artificial Sequence
  Synthetic
auggaagaaaaacuaaacag

SEQ ID NO: 304182 - RNA, 21 nt, Artificial Sequence
  Synthetic
aauggaagaaaaacuaaacag

SEQ ID NO: 304183 - RNA, 22 nt, Artificial Sequence
  Synthetic
aaauggaagaaaaacuaaacag

SEQ ID NO: 304184 - RNA, 23 nt, Artificial Sequence
  Synthetic
uaaauggaagaaaaacuaaacag

SEQ ID NO: 304185 - RNA, 24 nt, Artificial Sequence
  Synthetic
uuaaauggaagaaaaacuaaacag

SEQ ID NO: 304186 - RNA, 18 nt, Artificial Sequence
  Synthetic
aagagauguccuaaacag

SEQ ID NO: 304187 - RNA, 19 nt, Artificial Sequence
  Synthetic
gaagagauguccuaaacag

SEQ ID NO: 304188 - RNA, 20 nt, Artificial Sequence
  Synthetic
ggaagagauguccuaaacag

SEQ ID NO: 304189 - RNA, 21 nt, Artificial Sequence
  Synthetic
aggaagagauguccuaaacag

SEQ ID NO: 304190 - RNA, 22 nt, Artificial Sequence
  Synthetic
caggaagagauguccuaaacag

SEQ ID NO: 304191 - RNA, 23 nt, Artificial Sequence
  Synthetic
acaggaagagauguccuaaacag

SEQ ID NO: 304192 - RNA, 24 nt, Artificial Sequence
  Synthetic
aacaggaagagauguccuaaacag

SEQ ID NO: 304193 - RNA, 18 nt, Artificial Sequence
  Synthetic
aauaugcgugcuaaacag

SEQ ID NO: 304194 - RNA, 19 nt, Artificial Sequence
  Synthetic
uaauaugcgugcuaaacag

SEQ ID NO: 304195 - RNA, 20 nt, Artificial Sequence
  Synthetic
auaauaugcgugcuaaacag

SEQ ID NO: 304196 - RNA, 21 nt, Artificial Sequence
  Synthetic
aauaauaugcgugcuaaacag

SEQ ID NO: 304197 - RNA, 22 nt, Artificial Sequence
  Synthetic
caauaauaugcgugcuaaacag

SEQ ID NO: 304198 - RNA, 23 nt, Artificial Sequence
  Synthetic
ccaauaauaugcgugcuaaacag

SEQ ID NO: 304199 - RNA, 24 nt, Artificial Sequence
  Synthetic
cccaauaauaugcgugcuaaacag

SEQ ID NO: 304200 - RNA, 18 nt, Artificial Sequence
  Synthetic
aucagugucauuaaacag

SEQ ID NO: 304201 - RNA, 19 nt, Artificial Sequence
  Synthetic
gaucagugucauuaaacag

SEQ ID NO: 304202 - RNA, 20 nt, Artificial Sequence
  Synthetic
ugaucagugucauuaaacag

SEQ ID NO: 304203 - RNA, 21 nt, Artificial Sequence
  Synthetic
uugaucagugucauuaaacag

SEQ ID NO: 304204 - RNA, 22 nt, Artificial Sequence
  Synthetic
auugaucagugucauuaaacag

SEQ ID NO: 304205 - RNA, 23 nt, Artificial Sequence
  Synthetic
uauugaucagugucauuaaacag

SEQ ID NO: 304206 - RNA, 24 nt, Artificial Sequence
  Synthetic
guauugaucagugucauuaaacag

SEQ ID NO: 304207 - RNA, 18 nt, Artificial Sequence
  Synthetic
cuuaauacaguuaaacag

SEQ ID NO: 304208 - RNA, 19 nt, Artificial Sequence
  Synthetic
ucuuaauacaguuaaacag

SEQ ID NO: 304209 - RNA, 20 nt, Artificial Sequence
  Synthetic
cucuuaauacaguuaaacag

SEQ ID NO: 304210 - RNA, 21 nt, Artificial Sequence
  Synthetic
ucucuuaauacaguuaaacag

SEQ ID NO: 304211 - RNA, 22 nt, Artificial Sequence
  Synthetic
gucucuuaauacaguuaaacag

SEQ ID NO: 304212 - RNA, 23 nt, Artificial Sequence
  Synthetic
agucucuuaauacaguuaaacag

SEQ ID NO: 304213 - RNA, 24 nt, Artificial Sequence
  Synthetic
aagucucuuaauacaguuaaacag

SEQ ID NO: 304214 - RNA, 18 nt, Artificial Sequence
  Synthetic
ucgcucagguuuaaacag

SEQ ID NO: 304215 - RNA, 19 nt, Artificial Sequence
  Synthetic
uucgcucagguuuaaacag

SEQ ID NO: 304216 - RNA, 20 nt, Artificial Sequence
  Synthetic
uuucgcucagguuuaaacag

SEQ ID NO: 304217 - RNA, 21 nt, Artificial Sequence
  Synthetic
guuucgcucagguuuaaacag

SEQ ID NO: 304218 - RNA, 22 nt, Artificial Sequence
  Synthetic
aguuucgcucagguuuaaacag

SEQ ID NO: 304219 - RNA, 23 nt, Artificial Sequence
  Synthetic
uaguuucgcucagguuuaaacag

SEQ ID NO: 304220 - RNA, 24 nt, Artificial Sequence
  Synthetic
cuaguuucgcucagguuuaaacag

SEQ ID NO: 304221 - RNA, 18 nt, Artificial Sequence
  Synthetic
ugaaccacaaaacaacag

SEQ ID NO: 304222 - RNA, 19 nt, Artificial Sequence
  Synthetic
cugaaccacaaaacaacag

SEQ ID NO: 304223 - RNA, 20 nt, Artificial Sequence
  Synthetic
acugaaccacaaaacaacag

SEQ ID NO: 304224 - RNA, 21 nt, Artificial Sequence
  Synthetic
cacugaaccacaaaacaacag

SEQ ID NO: 304225 - RNA, 22 nt, Artificial Sequence
  Synthetic
acacugaaccacaaaacaacag

SEQ ID NO: 304226 - RNA, 23 nt, Artificial Sequence
  Synthetic
gacacugaaccacaaaacaacag

SEQ ID NO: 304227 - RNA, 24 nt, Artificial Sequence
  Synthetic
ugacacugaaccacaaaacaacag

SEQ ID NO: 304228 - RNA, 18 nt, Artificial Sequence
  Synthetic
aggaguccgggacaacag

SEQ ID NO: 304229 - RNA, 19 nt, Artificial Sequence
  Synthetic
aaggaguccgggacaacag

SEQ ID NO: 304230 - RNA, 20 nt, Artificial Sequence
  Synthetic
caaggaguccgggacaacag

SEQ ID NO: 304231 - RNA, 21 nt, Artificial Sequence
  Synthetic
gcaaggaguccgggacaacag

SEQ ID NO: 304232 - RNA, 22 nt, Artificial Sequence
  Synthetic
ugcaaggaguccgggacaacag

SEQ ID NO: 304233 - RNA, 23 nt, Artificial Sequence
  Synthetic
uugcaaggaguccgggacaacag

SEQ ID NO: 304234 - RNA, 24 nt, Artificial Sequence
  Synthetic
auugcaaggaguccgggacaacag

SEQ ID NO: 304235 - RNA, 18 nt, Artificial Sequence
  Synthetic
acaaaucaaguacaacag

SEQ ID NO: 304236 - RNA, 19 nt, Artificial Sequence
  Synthetic
uacaaaucaaguacaacag

SEQ ID NO: 304237 - RNA, 20 nt, Artificial Sequence
  Synthetic
guacaaaucaaguacaacag

SEQ ID NO: 304238 - RNA, 21 nt, Artificial Sequence
  Synthetic
uguacaaaucaaguacaacag

SEQ ID NO: 304239 - RNA, 22 nt, Artificial Sequence
  Synthetic
cuguacaaaucaaguacaacag

SEQ ID NO: 304240 - RNA, 23 nt, Artificial Sequence
  Synthetic
acuguacaaaucaaguacaacag

SEQ ID NO: 304241 - RNA, 24 nt, Artificial Sequence
  Synthetic
uacuguacaaaucaaguacaacag

SEQ ID NO: 304242 - RNA, 18 nt, Artificial Sequence
  Synthetic
auuucaagauggcaacag

SEQ ID NO: 304243 - RNA, 19 nt, Artificial Sequence
  Synthetic
aauuucaagauggcaacag

SEQ ID NO: 304244 - RNA, 20 nt, Artificial Sequence
  Synthetic
gaauuucaagauggcaacag

SEQ ID NO: 304245 - RNA, 21 nt, Artificial Sequence
  Synthetic
agaauuucaagauggcaacag

SEQ ID NO: 304246 - RNA, 22 nt, Artificial Sequence
  Synthetic
aagaauuucaagauggcaacag

SEQ ID NO: 304247 - RNA, 23 nt, Artificial Sequence
  Synthetic
uaagaauuucaagauggcaacag

SEQ ID NO: 304248 - RNA, 24 nt, Artificial Sequence
  Synthetic
uuaagaauuucaagauggcaacag

SEQ ID NO: 304249 - RNA, 18 nt, Artificial Sequence
  Synthetic
aauugaagauggcaacag

SEQ ID NO: 304250 - RNA, 19 nt, Artificial Sequence
  Synthetic
gaauugaagauggcaacag

SEQ ID NO: 304251 - RNA, 20 nt, Artificial Sequence
  Synthetic
agaauugaagauggcaacag

SEQ ID NO: 304252 - RNA, 21 nt, Artificial Sequence
  Synthetic
uagaauugaagauggcaacag

SEQ ID NO: 304253 - RNA, 22 nt, Artificial Sequence
  Synthetic
auagaauugaagauggcaacag

SEQ ID NO: 304254 - RNA, 23 nt, Artificial Sequence
  Synthetic
uauagaauugaagauggcaacag

SEQ ID NO: 304255 - RNA, 24 nt, Artificial Sequence
  Synthetic
uuauagaauugaagauggcaacag

SEQ ID NO: 304256 - RNA, 18 nt, Artificial Sequence
  Synthetic
cuauuaugaaugcaacag

SEQ ID NO: 304257 - RNA, 19 nt, Artificial Sequence
  Synthetic
acuauuaugaaugcaacag

SEQ ID NO: 304258 - RNA, 20 nt, Artificial Sequence
  Synthetic
uacuauuaugaaugcaacag

SEQ ID NO: 304259 - RNA, 21 nt, Artificial Sequence
  Synthetic
cuacuauuaugaaugcaacag

SEQ ID NO: 304260 - RNA, 22 nt, Artificial Sequence
  Synthetic
gcuacuauuaugaaugcaacag

SEQ ID NO: 304261 - RNA, 23 nt, Artificial Sequence
  Synthetic
ugcuacuauuaugaaugcaacag

SEQ ID NO: 304262 - RNA, 24 nt, Artificial Sequence
  Synthetic
gugcuacuauuaugaaugcaacag

SEQ ID NO: 304263 - RNA, 18 nt, Artificial Sequence
  Synthetic
ucaaaauuauaucaacag

SEQ ID NO: 304264 - RNA, 19 nt, Artificial Sequence
  Synthetic
uucaaaauuauaucaacag

SEQ ID NO: 304265 - RNA, 20 nt, Artificial Sequence
  Synthetic
uuucaaaauuauaucaacag

SEQ ID NO: 304266 - RNA, 21 nt, Artificial Sequence
  Synthetic
uuuucaaaauuauaucaacag

SEQ ID NO: 304267 - RNA, 22 nt, Artificial Sequence
  Synthetic
guuuucaaaauuauaucaacag

SEQ ID NO: 304268 - RNA, 23 nt, Artificial Sequence
  Synthetic
uguuuucaaaauuauaucaacag

SEQ ID NO: 304269 - RNA, 24 nt, Artificial Sequence
  Synthetic
uuguuuucaaaauuauaucaacag

SEQ ID NO: 304270 - RNA, 18 nt, Artificial Sequence
  Synthetic
uaaauuggaauucaacag

SEQ ID NO: 304271 - RNA, 19 nt, Artificial Sequence
  Synthetic
uuaaauuggaauucaacag

SEQ ID NO: 304272 - RNA, 20 nt, Artificial Sequence
  Synthetic
auuaaauuggaauucaacag

SEQ ID NO: 304273 - RNA, 21 nt, Artificial Sequence
  Synthetic
aauuaaauuggaauucaacag

SEQ ID NO: 304274 - RNA, 22 nt, Artificial Sequence
  Synthetic
gaauuaaauuggaauucaacag

SEQ ID NO: 304275 - RNA, 23 nt, Artificial Sequence
  Synthetic
agaauuaaauuggaauucaacag

SEQ ID NO: 304276 - RNA, 24 nt, Artificial Sequence
  Synthetic
cagaauuaaauuggaauucaacag

SEQ ID NO: 304277 - RNA, 18 nt, Artificial Sequence
  Synthetic
uuucauuaaguucaacag

SEQ ID NO: 304278 - RNA, 19 nt, Artificial Sequence
  Synthetic
uuuucauuaaguucaacag

SEQ ID NO: 304279 - RNA, 20 nt, Artificial Sequence
  Synthetic
auuuucauuaaguucaacag

SEQ ID NO: 304280 - RNA, 21 nt, Artificial Sequence
  Synthetic
aauuuucauuaaguucaacag

SEQ ID NO: 304281 - RNA, 22 nt, Artificial Sequence
  Synthetic
gaauuuucauuaaguucaacag

SEQ ID NO: 304282 - RNA, 23 nt, Artificial Sequence
  Synthetic
agaauuuucauuaaguucaacag

SEQ ID NO: 304283 - RNA, 24 nt, Artificial Sequence
  Synthetic
cagaauuuucauuaaguucaacag

SEQ ID NO: 304284 - RNA, 18 nt, Artificial Sequence
  Synthetic
gcauugaggagagaacag

SEQ ID NO: 304285 - RNA, 19 nt, Artificial Sequence
  Synthetic
ugcauugaggagagaacag

SEQ ID NO: 304286 - RNA, 20 nt, Artificial Sequence
  Synthetic
augcauugaggagagaacag

SEQ ID NO: 304287 - RNA, 21 nt, Artificial Sequence
  Synthetic
uaugcauugaggagagaacag

SEQ ID NO: 304288 - RNA, 22 nt, Artificial Sequence
  Synthetic
auaugcauugaggagagaacag

SEQ ID NO: 304289 - RNA, 23 nt, Artificial Sequence
  Synthetic
aauaugcauugaggagagaacag

SEQ ID NO: 304290 - RNA, 24 nt, Artificial Sequence
  Synthetic
aaauaugcauugaggagagaacag

SEQ ID NO: 304291 - RNA, 18 nt, Artificial Sequence
  Synthetic
cacaaugugauagaacag

SEQ ID NO: 304292 - RNA, 19 nt, Artificial Sequence
  Synthetic
acacaaugugauagaacag

SEQ ID NO: 304293 - RNA, 20 nt, Artificial Sequence
  Synthetic
cacacaaugugauagaacag

SEQ ID NO: 304294 - RNA, 21 nt, Artificial Sequence
  Synthetic
acacacaaugugauagaacag

SEQ ID NO: 304295 - RNA, 22 nt, Artificial Sequence
  Synthetic
aacacacaaugugauagaacag

SEQ ID NO: 304296 - RNA, 23 nt, Artificial Sequence
  Synthetic
caacacacaaugugauagaacag

SEQ ID NO: 304297 - RNA, 24 nt, Artificial Sequence
  Synthetic
acaacacacaaugugauagaacag

SEQ ID NO: 304298 - RNA, 18 nt, Artificial Sequence
  Synthetic
aagagcaggcuagaacag

SEQ ID NO: 304299 - RNA, 19 nt, Artificial Sequence
  Synthetic
gaagagcaggcuagaacag

SEQ ID NO: 304300 - RNA, 20 nt, Artificial Sequence
  Synthetic
agaagagcaggcuagaacag

SEQ ID NO: 304301 - RNA, 21 nt, Artificial Sequence
  Synthetic
cagaagagcaggcuagaacag

SEQ ID NO: 304302 - RNA, 22 nt, Artificial Sequence
  Synthetic
acagaagagcaggcuagaacag

SEQ ID NO: 304303 - RNA, 23 nt, Artificial Sequence
  Synthetic
cacagaagagcaggcuagaacag

SEQ ID NO: 304304 - RNA, 24 nt, Artificial Sequence
  Synthetic
ccacagaagagcaggcuagaacag

SEQ ID NO: 304305 - RNA, 18 nt, Artificial Sequence
  Synthetic
aagaggaggcuagaacag

SEQ ID NO: 304306 - RNA, 19 nt, Artificial Sequence
  Synthetic
gaagaggaggcuagaacag

SEQ ID NO: 304307 - RNA, 20 nt, Artificial Sequence
  Synthetic
agaagaggaggcuagaacag

SEQ ID NO: 304308 - RNA, 21 nt, Artificial Sequence
  Synthetic
cagaagaggaggcuagaacag

SEQ ID NO: 304309 - RNA, 22 nt, Artificial Sequence
  Synthetic
acagaagaggaggcuagaacag

SEQ ID NO: 304310 - RNA, 23 nt, Artificial Sequence
  Synthetic
aacagaagaggaggcuagaacag

SEQ ID NO: 304311 - RNA, 24 nt, Artificial Sequence
  Synthetic
gaacagaagaggaggcuagaacag

SEQ ID NO: 304312 - RNA, 18 nt, Artificial Sequence
  Synthetic
gugaagaggguagaacag

SEQ ID NO: 304313 - RNA, 19 nt, Artificial Sequence
  Synthetic
agugaagaggguagaacag

SEQ ID NO: 304314 - RNA, 20 nt, Artificial Sequence
  Synthetic
uagugaagaggguagaacag

SEQ ID NO: 304315 - RNA, 21 nt, Artificial Sequence
  Synthetic
uuagugaagaggguagaacag

SEQ ID NO: 304316 - RNA, 22 nt, Artificial Sequence
  Synthetic
guuagugaagaggguagaacag

SEQ ID NO: 304317 - RNA, 23 nt, Artificial Sequence
  Synthetic
uguuagugaagaggguagaacag

SEQ ID NO: 304318 - RNA, 24 nt, Artificial Sequence
  Synthetic
cuguuagugaagaggguagaacag

SEQ ID NO: 304319 - RNA, 18 nt, Artificial Sequence
  Synthetic
gaaaaggcuuuagaacag

SEQ ID NO: 304320 - RNA, 19 nt, Artificial Sequence
  Synthetic
ggaaaaggcuuuagaacag

SEQ ID NO: 304321 - RNA, 20 nt, Artificial Sequence
  Synthetic
aggaaaaggcuuuagaacag

SEQ ID NO: 304322 - RNA, 21 nt, Artificial Sequence
  Synthetic
caggaaaaggcuuuagaacag

SEQ ID NO: 304323 - RNA, 22 nt, Artificial Sequence
  Synthetic
acaggaaaaggcuuuagaacag

SEQ ID NO: 304324 - RNA, 23 nt, Artificial Sequence
  Synthetic
gacaggaaaaggcuuuagaacag

SEQ ID NO: 304325 - RNA, 24 nt, Artificial Sequence
  Synthetic
agacaggaaaaggcuuuagaacag

SEQ ID NO: 304326 - RNA, 18 nt, Artificial Sequence
  Synthetic
uguuuagaaguggaacag

SEQ ID NO: 304327 - RNA, 19 nt, Artificial Sequence
  Synthetic
auguuuagaaguggaacag

SEQ ID NO: 304328 - RNA, 20 nt, Artificial Sequence
  Synthetic
gauguuuagaaguggaacag

SEQ ID NO: 304329 - RNA, 21 nt, Artificial Sequence
  Synthetic
agauguuuagaaguggaacag

SEQ ID NO: 304330 - RNA, 22 nt, Artificial Sequence
  Synthetic
cagauguuuagaaguggaacag

SEQ ID NO: 304331 - RNA, 23 nt, Artificial Sequence
  Synthetic
ucagauguuuagaaguggaacag

SEQ ID NO: 304332 - RNA, 24 nt, Artificial Sequence
  Synthetic
cucagauguuuagaaguggaacag

SEQ ID NO: 304333 - RNA, 18 nt, Artificial Sequence
  Synthetic
gauaaaagacaugaacag

SEQ ID NO: 304334 - RNA, 19 nt, Artificial Sequence
  Synthetic
cgauaaaagacaugaacag

SEQ ID NO: 304335 - RNA, 20 nt, Artificial Sequence
  Synthetic
acgauaaaagacaugaacag

SEQ ID NO: 304336 - RNA, 21 nt, Artificial Sequence
  Synthetic
aacgauaaaagacaugaacag

SEQ ID NO: 304337 - RNA, 22 nt, Artificial Sequence
  Synthetic
aaacgauaaaagacaugaacag

SEQ ID NO: 304338 - RNA, 23 nt, Artificial Sequence
  Synthetic
aaaacgauaaaagacaugaacag

SEQ ID NO: 304339 - RNA, 24 nt, Artificial Sequence
  Synthetic
gaaaacgauaaaagacaugaacag

SEQ ID NO: 304340 - RNA, 18 nt, Artificial Sequence
  Synthetic
uuucauaacuuugaacag

SEQ ID NO: 304341 - RNA, 19 nt, Artificial Sequence
  Synthetic
auuucauaacuuugaacag

SEQ ID NO: 304342 - RNA, 20 nt, Artificial Sequence
  Synthetic
cauuucauaacuuugaacag

SEQ ID NO: 304343 - RNA, 21 nt, Artificial Sequence
  Synthetic
ccauuucauaacuuugaacag

SEQ ID NO: 304344 - RNA, 22 nt, Artificial Sequence
  Synthetic
cccauuucauaacuuugaacag

SEQ ID NO: 304345 - RNA, 23 nt, Artificial Sequence
  Synthetic
ucccauuucauaacuuugaacag

SEQ ID NO: 304346 - RNA, 24 nt, Artificial Sequence
  Synthetic
aucccauuucauaacuuugaacag

SEQ ID NO: 304347 - RNA, 18 nt, Artificial Sequence
  Synthetic
acuuuuauuuuugaacag

SEQ ID NO: 304348 - RNA, 19 nt, Artificial Sequence
  Synthetic
gacuuuuauuuuugaacag

SEQ ID NO: 304349 - RNA, 20 nt, Artificial Sequence
  Synthetic
ugacuuuuauuuuugaacag

SEQ ID NO: 304350 - RNA, 21 nt, Artificial Sequence
  Synthetic
uugacuuuuauuuuugaacag

SEQ ID NO: 304351 - RNA, 22 nt, Artificial Sequence
  Synthetic
uuugacuuuuauuuuugaacag

SEQ ID NO: 304352 - RNA, 23 nt, Artificial Sequence
  Synthetic
cuuugacuuuuauuuuugaacag

SEQ ID NO: 304353 - RNA, 24 nt, Artificial Sequence
  Synthetic
gcuuugacuuuuauuuuugaacag

SEQ ID NO: 304354 - RNA, 18 nt, Artificial Sequence
  Synthetic
caaauggaaaaauaacag

SEQ ID NO: 304355 - RNA, 19 nt, Artificial Sequence
  Synthetic
acaaauggaaaaauaacag

SEQ ID NO: 304356 - RNA, 20 nt, Artificial Sequence
  Synthetic
cacaaauggaaaaauaacag

SEQ ID NO: 304357 - RNA, 21 nt, Artificial Sequence
  Synthetic
gcacaaauggaaaaauaacag

SEQ ID NO: 304358 - RNA, 22 nt, Artificial Sequence
  Synthetic
ugcacaaauggaaaaauaacag

SEQ ID NO: 304359 - RNA, 23 nt, Artificial Sequence
  Synthetic
cugcacaaauggaaaaauaacag

SEQ ID NO: 304360 - RNA, 24 nt, Artificial Sequence
  Synthetic
acugcacaaauggaaaaauaacag

SEQ ID NO: 304361 - RNA, 18 nt, Artificial Sequence
  Synthetic
cucagacaggaauaacag

SEQ ID NO: 304362 - RNA, 19 nt, Artificial Sequence
  Synthetic
ucucagacaggaauaacag

SEQ ID NO: 304363 - RNA, 20 nt, Artificial Sequence
  Synthetic
cucucagacaggaauaacag

SEQ ID NO: 304364 - RNA, 21 nt, Artificial Sequence
  Synthetic
gcucucagacaggaauaacag

SEQ ID NO: 304365 - RNA, 22 nt, Artificial Sequence
  Synthetic
agcucucagacaggaauaacag

SEQ ID NO: 304366 - RNA, 23 nt, Artificial Sequence
  Synthetic
cagcucucagacaggaauaacag

SEQ ID NO: 304367 - RNA, 24 nt, Artificial Sequence
  Synthetic
ccagcucucagacaggaauaacag

SEQ ID NO: 304368 - RNA, 18 nt, Artificial Sequence
  Synthetic
aaaucuacauaauaacag

SEQ ID NO: 304369 - RNA, 19 nt, Artificial Sequence
  Synthetic
uaaaucuacauaauaacag

SEQ ID NO: 304370 - RNA, 20 nt, Artificial Sequence
  Synthetic
uuaaaucuacauaauaacag

SEQ ID NO: 304371 - RNA, 21 nt, Artificial Sequence
  Synthetic
uuuaaaucuacauaauaacag

SEQ ID NO: 304372 - RNA, 22 nt, Artificial Sequence
  Synthetic
uuuuaaaucuacauaauaacag

SEQ ID NO: 304373 - RNA, 23 nt, Artificial Sequence
  Synthetic
auuuuaaaucuacauaauaacag

SEQ ID NO: 304374 - RNA, 24 nt, Artificial Sequence
  Synthetic
cauuuuaaaucuacauaauaacag

SEQ ID NO: 304375 - RNA, 18 nt, Artificial Sequence
  Synthetic
cuuacaguuucauaacag

SEQ ID NO: 304376 - RNA, 19 nt, Artificial Sequence
  Synthetic
ccuuacaguuucauaacag

SEQ ID NO: 304377 - RNA, 20 nt, Artificial Sequence
  Synthetic
gccuuacaguuucauaacag

SEQ ID NO: 304378 - RNA, 21 nt, Artificial Sequence
  Synthetic
cgccuuacaguuucauaacag

SEQ ID NO: 304379 - RNA, 22 nt, Artificial Sequence
  Synthetic
ucgccuuacaguuucauaacag

SEQ ID NO: 304380 - RNA, 23 nt, Artificial Sequence
  Synthetic
cucgccuuacaguuucauaacag

SEQ ID NO: 304381 - RNA, 24 nt, Artificial Sequence
  Synthetic
ccucgccuuacaguuucauaacag

SEQ ID NO: 304382 - RNA, 18 nt, Artificial Sequence
  Synthetic
aaaaaaaaaagauaacag

SEQ ID NO: 304383 - RNA, 19 nt, Artificial Sequence
  Synthetic
aaaaaaaaaaagauaacag

SEQ ID NO: 304384 - RNA, 20 nt, Artificial Sequence
  Synthetic
gaaaaaaaaaaagauaacag

SEQ ID NO: 304385 - RNA, 21 nt, Artificial Sequence
  Synthetic
ugaaaaaaaaaaagauaacag

SEQ ID NO: 304386 - RNA, 22 nt, Artificial Sequence
  Synthetic
uugaaaaaaaaaaagauaacag

SEQ ID NO: 304387 - RNA, 23 nt, Artificial Sequence
  Synthetic
auugaaaaaaaaaaagauaacag

SEQ ID NO: 304388 - RNA, 24 nt, Artificial Sequence
  Synthetic
aauugaaaaaaaaaaagauaacag

SEQ ID NO: 304389 - RNA, 18 nt, Artificial Sequence
  Synthetic
uguauaauauuauaacag

SEQ ID NO: 304390 - RNA, 19 nt, Artificial Sequence
  Synthetic
auguauaauauuauaacag

SEQ ID NO: 304391 - RNA, 20 nt, Artificial Sequence
  Synthetic
uauguauaauauuauaacag

SEQ ID NO: 304392 - RNA, 21 nt, Artificial Sequence
  Synthetic
uuauguauaauauuauaacag

SEQ ID NO: 304393 - RNA, 22 nt, Artificial Sequence
  Synthetic
auuauguauaauauuauaacag

SEQ ID NO: 304394 - RNA, 23 nt, Artificial Sequence
  Synthetic
uauuauguauaauauuauaacag

SEQ ID NO: 304395 - RNA, 24 nt, Artificial Sequence
  Synthetic
auauuauguauaauauuauaacag

SEQ ID NO: 304396 - RNA, 18 nt, Artificial Sequence
  Synthetic
guacaucucaucuaacag

SEQ ID NO: 304397 - RNA, 19 nt, Artificial Sequence
  Synthetic
aguacaucucaucuaacag

SEQ ID NO: 304398 - RNA, 20 nt, Artificial Sequence
  Synthetic
caguacaucucaucuaacag

SEQ ID NO: 304399 - RNA, 21 nt, Artificial Sequence
  Synthetic
acaguacaucucaucuaacag

SEQ ID NO: 304400 - RNA, 22 nt, Artificial Sequence
  Synthetic
uacaguacaucucaucuaacag

SEQ ID NO: 304401 - RNA, 23 nt, Artificial Sequence
  Synthetic
auacaguacaucucaucuaacag

SEQ ID NO: 304402 - RNA, 24 nt, Artificial Sequence
  Synthetic
uauacaguacaucucaucuaacag

SEQ ID NO: 304403 - RNA, 18 nt, Artificial Sequence
  Synthetic
aagagaaacaaguaacag

SEQ ID NO: 304404 - RNA, 19 nt, Artificial Sequence
  Synthetic
caagagaaacaaguaacag

SEQ ID NO: 304405 - RNA, 20 nt, Artificial Sequence
  Synthetic
gcaagagaaacaaguaacag

SEQ ID NO: 304406 - RNA, 21 nt, Artificial Sequence
  Synthetic
ggcaagagaaacaaguaacag

SEQ ID NO: 304407 - RNA, 22 nt, Artificial Sequence
  Synthetic
aggcaagagaaacaaguaacag

SEQ ID NO: 304408 - RNA, 23 nt, Artificial Sequence
  Synthetic
caggcaagagaaacaaguaacag

SEQ ID NO: 304409 - RNA, 24 nt, Artificial Sequence
  Synthetic
ccaggcaagagaaacaaguaacag

SEQ ID NO: 304410 - RNA, 18 nt, Artificial Sequence
  Synthetic
uguggccacauguaacag

SEQ ID NO: 304411 - RNA, 19 nt, Artificial Sequence
  Synthetic
cuguggccacauguaacag

SEQ ID NO: 304412 - RNA, 20 nt, Artificial Sequence
  Synthetic
ccuguggccacauguaacag

SEQ ID NO: 304413 - RNA, 21 nt, Artificial Sequence
  Synthetic
cccuguggccacauguaacag

SEQ ID NO: 304414 - RNA, 22 nt, Artificial Sequence
  Synthetic
gcccuguggccacauguaacag

SEQ ID NO: 304415 - RNA, 23 nt, Artificial Sequence
  Synthetic
ugcccuguggccacauguaacag

SEQ ID NO: 304416 - RNA, 24 nt, Artificial Sequence
  Synthetic
cugcccuguggccacauguaacag

SEQ ID NO: 304417 - RNA, 18 nt, Artificial Sequence
  Synthetic
gcuucaauuauguaacag

SEQ ID NO: 304418 - RNA, 19 nt, Artificial Sequence
  Synthetic
agcuucaauuauguaacag

SEQ ID NO: 304419 - RNA, 20 nt, Artificial Sequence
  Synthetic
cagcuucaauuauguaacag

SEQ ID NO: 304420 - RNA, 21 nt, Artificial Sequence
  Synthetic
acagcuucaauuauguaacag

SEQ ID NO: 304421 - RNA, 22 nt, Artificial Sequence
  Synthetic
uacagcuucaauuauguaacag

SEQ ID NO: 304422 - RNA, 23 nt, Artificial Sequence
  Synthetic
cuacagcuucaauuauguaacag

SEQ ID NO: 304423 - RNA, 24 nt, Artificial Sequence
  Synthetic
acuacagcuucaauuauguaacag

SEQ ID NO: 304424 - RNA, 18 nt, Artificial Sequence
  Synthetic
uggagagaagcuuaacag

SEQ ID NO: 304425 - RNA, 19 nt, Artificial Sequence
  Synthetic
guggagagaagcuuaacag

SEQ ID NO: 304426 - RNA, 20 nt, Artificial Sequence
  Synthetic
gguggagagaagcuuaacag

SEQ ID NO: 304427 - RNA, 21 nt, Artificial Sequence
  Synthetic
agguggagagaagcuuaacag

SEQ ID NO: 304428 - RNA, 22 nt, Artificial Sequence
  Synthetic
cagguggagagaagcuuaacag

SEQ ID NO: 304429 - RNA, 23 nt, Artificial Sequence
  Synthetic
ucagguggagagaagcuuaacag

SEQ ID NO: 304430 - RNA, 24 nt, Artificial Sequence
  Synthetic
gucagguggagagaagcuuaacag

SEQ ID NO: 304431 - RNA, 18 nt, Artificial Sequence
  Synthetic
agaaaaaugaguuaacag

SEQ ID NO: 304432 - RNA, 19 nt, Artificial Sequence
  Synthetic
gagaaaaaugaguuaacag

SEQ ID NO: 304433 - RNA, 20 nt, Artificial Sequence
  Synthetic
ggagaaaaaugaguuaacag

SEQ ID NO: 304434 - RNA, 21 nt, Artificial Sequence
  Synthetic
gggagaaaaaugaguuaacag

SEQ ID NO: 304435 - RNA, 22 nt, Artificial Sequence
  Synthetic
agggagaaaaaugaguuaacag

SEQ ID NO: 304436 - RNA, 23 nt, Artificial Sequence
  Synthetic
aagggagaaaaaugaguuaacag

SEQ ID NO: 304437 - RNA, 24 nt, Artificial Sequence
  Synthetic
uaagggagaaaaaugaguuaacag

SEQ ID NO: 304438 - RNA, 18 nt, Artificial Sequence
  Synthetic
cgcuuugauuuuuaacag

SEQ ID NO: 304439 - RNA, 19 nt, Artificial Sequence
  Synthetic
ucgcuuugauuuuuaacag

SEQ ID NO: 304440 - RNA, 20 nt, Artificial Sequence
  Synthetic
aucgcuuugauuuuuaacag

SEQ ID NO: 304441 - RNA, 21 nt, Artificial Sequence
  Synthetic
uaucgcuuugauuuuuaacag

SEQ ID NO: 304442 - RNA, 22 nt, Artificial Sequence
  Synthetic
uuaucgcuuugauuuuuaacag

SEQ ID NO: 304443 - RNA, 23 nt, Artificial Sequence
  Synthetic
guuaucgcuuugauuuuuaacag

SEQ ID NO: 304444 - RNA, 24 nt, Artificial Sequence
  Synthetic
aguuaucgcuuugauuuuuaacag

SEQ ID NO: 304445 - RNA, 18 nt, Artificial Sequence
  Synthetic
ugcacacaagaaacacag

SEQ ID NO: 304446 - RNA, 19 nt, Artificial Sequence
  Synthetic
cugcacacaagaaacacag

SEQ ID NO: 304447 - RNA, 20 nt, Artificial Sequence
  Synthetic
gcugcacacaagaaacacag

SEQ ID NO: 304448 - RNA, 21 nt, Artificial Sequence
  Synthetic
ggcugcacacaagaaacacag

SEQ ID NO: 304449 - RNA, 22 nt, Artificial Sequence
  Synthetic
uggcugcacacaagaaacacag

SEQ ID NO: 304450 - RNA, 23 nt, Artificial Sequence
  Synthetic
uuggcugcacacaagaaacacag

SEQ ID NO: 304451 - RNA, 24 nt, Artificial Sequence
  Synthetic
uuuggcugcacacaagaaacacag

SEQ ID NO: 304452 - RNA, 18 nt, Artificial Sequence
  Synthetic
uacuuguuagaaacacag

SEQ ID NO: 304453 - RNA, 19 nt, Artificial Sequence
  Synthetic
auacuuguuagaaacacag

SEQ ID NO: 304454 - RNA, 20 nt, Artificial Sequence
  Synthetic
uauacuuguuagaaacacag

SEQ ID NO: 304455 - RNA, 21 nt, Artificial Sequence
  Synthetic
uuauacuuguuagaaacacag

SEQ ID NO: 304456 - RNA, 22 nt, Artificial Sequence
  Synthetic
auuauacuuguuagaaacacag

SEQ ID NO: 304457 - RNA, 23 nt, Artificial Sequence
  Synthetic
aauuauacuuguuagaaacacag

SEQ ID NO: 304458 - RNA, 24 nt, Artificial Sequence
  Synthetic
uaauuauacuuguuagaaacacag

SEQ ID NO: 304459 - RNA, 18 nt, Artificial Sequence
  Synthetic
auaacaggggaaacacag

SEQ ID NO: 304460 - RNA, 19 nt, Artificial Sequence
  Synthetic
aauaacaggggaaacacag

SEQ ID NO: 304461 - RNA, 20 nt, Artificial Sequence
  Synthetic
aaauaacaggggaaacacag

SEQ ID NO: 304462 - RNA, 21 nt, Artificial Sequence
  Synthetic
aaaauaacaggggaaacacag

SEQ ID NO: 304463 - RNA, 22 nt, Artificial Sequence
  Synthetic
aaaaauaacaggggaaacacag

SEQ ID NO: 304464 - RNA, 23 nt, Artificial Sequence
  Synthetic
gaaaaauaacaggggaaacacag

SEQ ID NO: 304465 - RNA, 24 nt, Artificial Sequence
  Synthetic
ggaaaaauaacaggggaaacacag

SEQ ID NO: 304466 - RNA, 18 nt, Artificial Sequence
  Synthetic
uagcacagggcaacacag

SEQ ID NO: 304467 - RNA, 19 nt, Artificial Sequence
  Synthetic
uuagcacagggcaacacag

SEQ ID NO: 304468 - RNA, 20 nt, Artificial Sequence
  Synthetic
uuuagcacagggcaacacag

SEQ ID NO: 304469 - RNA, 21 nt, Artificial Sequence
  Synthetic
auuuagcacagggcaacacag

SEQ ID NO: 304470 - RNA, 22 nt, Artificial Sequence
  Synthetic
aauuuagcacagggcaacacag

SEQ ID NO: 304471 - RNA, 23 nt, Artificial Sequence
  Synthetic
uaauuuagcacagggcaacacag

SEQ ID NO: 304472 - RNA, 24 nt, Artificial Sequence
  Synthetic
auaauuuagcacagggcaacacag

SEQ ID NO: 304473 - RNA, 18 nt, Artificial Sequence
  Synthetic
uaacaaucgucaacacag

SEQ ID NO: 304474 - RNA, 19 nt, Artificial Sequence
  Synthetic
guaacaaucgucaacacag

SEQ ID NO: 304475 - RNA, 20 nt, Artificial Sequence
  Synthetic
cguaacaaucgucaacacag

SEQ ID NO: 304476 - RNA, 21 nt, Artificial Sequence
  Synthetic
ucguaacaaucgucaacacag

SEQ ID NO: 304477 - RNA, 22 nt, Artificial Sequence
  Synthetic
aucguaacaaucgucaacacag

SEQ ID NO: 304478 - RNA, 23 nt, Artificial Sequence
  Synthetic
aaucguaacaaucgucaacacag

SEQ ID NO: 304479 - RNA, 24 nt, Artificial Sequence
  Synthetic
aaaucguaacaaucgucaacacag

SEQ ID NO: 304480 - RNA, 18 nt, Artificial Sequence
  Synthetic
agcugcuauagaacacag

SEQ ID NO: 304481 - RNA, 19 nt, Artificial Sequence
  Synthetic
cagcugcuauagaacacag

SEQ ID NO: 304482 - RNA, 20 nt, Artificial Sequence
  Synthetic
gcagcugcuauagaacacag

SEQ ID NO: 304483 - RNA, 21 nt, Artificial Sequence
  Synthetic
ugcagcugcuauagaacacag

SEQ ID NO: 304484 - RNA, 22 nt, Artificial Sequence
  Synthetic
augcagcugcuauagaacacag

SEQ ID NO: 304485 - RNA, 23 nt, Artificial Sequence
  Synthetic
gaugcagcugcuauagaacacag

SEQ ID NO: 304486 - RNA, 24 nt, Artificial Sequence
  Synthetic
ugaugcagcugcuauagaacacag

SEQ ID NO: 304487 - RNA, 18 nt, Artificial Sequence
  Synthetic
uuucaaaaauacacacag

SEQ ID NO: 304488 - RNA, 19 nt, Artificial Sequence
  Synthetic
auuucaaaaauacacacag

SEQ ID NO: 304489 - RNA, 20 nt, Artificial Sequence
  Synthetic
cauuucaaaaauacacacag

SEQ ID NO: 304490 - RNA, 21 nt, Artificial Sequence
  Synthetic
acauuucaaaaauacacacag

SEQ ID NO: 304491 - RNA, 22 nt, Artificial Sequence
  Synthetic
aacauuucaaaaauacacacag

SEQ ID NO: 304492 - RNA, 23 nt, Artificial Sequence
  Synthetic
aaacauuucaaaaauacacacag

SEQ ID NO: 304493 - RNA, 24 nt, Artificial Sequence
  Synthetic
aaaacauuucaaaaauacacacag

SEQ ID NO: 304494 - RNA, 18 nt, Artificial Sequence
  Synthetic
acuuacaguuccacacag

SEQ ID NO: 304495 - RNA, 19 nt, Artificial Sequence
  Synthetic
gacuuacaguuccacacag

SEQ ID NO: 304496 - RNA, 20 nt, Artificial Sequence
  Synthetic
ggacuuacaguuccacacag

SEQ ID NO: 304497 - RNA, 21 nt, Artificial Sequence
  Synthetic
uggacuuacaguuccacacag

SEQ ID NO: 304498 - RNA, 22 nt, Artificial Sequence
  Synthetic
auggacuuacaguuccacacag

SEQ ID NO: 304499 - RNA, 23 nt, Artificial Sequence
  Synthetic
aauggacuuacaguuccacacag

SEQ ID NO: 304500 - RNA, 24 nt, Artificial Sequence
  Synthetic
uaauggacuuacaguuccacacag

SEQ ID NO: 304501 - RNA, 18 nt, Artificial Sequence
  Synthetic
agagaugacuagacacag

SEQ ID NO: 304502 - RNA, 19 nt, Artificial Sequence
  Synthetic
cagagaugacuagacacag

SEQ ID NO: 304503 - RNA, 20 nt, Artificial Sequence
  Synthetic
acagagaugacuagacacag

SEQ ID NO: 304504 - RNA, 21 nt, Artificial Sequence
  Synthetic
uacagagaugacuagacacag

SEQ ID NO: 304505 - RNA, 22 nt, Artificial Sequence
  Synthetic
uuacagagaugacuagacacag

SEQ ID NO: 304506 - RNA, 23 nt, Artificial Sequence
  Synthetic
auuacagagaugacuagacacag

SEQ ID NO: 304507 - RNA, 24 nt, Artificial Sequence
  Synthetic
aauuacagagaugacuagacacag

SEQ ID NO: 304508 - RNA, 18 nt, Artificial Sequence
  Synthetic
auauugcaaaggacacag

SEQ ID NO: 304509 - RNA, 19 nt, Artificial Sequence
  Synthetic
gauauugcaaaggacacag

SEQ ID NO: 304510 - RNA, 20 nt, Artificial Sequence
  Synthetic
ggauauugcaaaggacacag

SEQ ID NO: 304511 - RNA, 21 nt, Artificial Sequence
  Synthetic
aggauauugcaaaggacacag

SEQ ID NO: 304512 - RNA, 22 nt, Artificial Sequence
  Synthetic
aaggauauugcaaaggacacag

SEQ ID NO: 304513 - RNA, 23 nt, Artificial Sequence
  Synthetic
aaaggauauugcaaaggacacag

SEQ ID NO: 304514 - RNA, 24 nt, Artificial Sequence
  Synthetic
uaaaggauauugcaaaggacacag

SEQ ID NO: 304515 - RNA, 18 nt, Artificial Sequence
  Synthetic
uuacaaaugaggacacag

SEQ ID NO: 304516 - RNA, 19 nt, Artificial Sequence
  Synthetic
uuuacaaaugaggacacag

SEQ ID NO: 304517 - RNA, 20 nt, Artificial Sequence
  Synthetic
uuuuacaaaugaggacacag

SEQ ID NO: 304518 - RNA, 21 nt, Artificial Sequence
  Synthetic
auuuuacaaaugaggacacag

SEQ ID NO: 304519 - RNA, 22 nt, Artificial Sequence
  Synthetic
cauuuuacaaaugaggacacag

SEQ ID NO: 304520 - RNA, 23 nt, Artificial Sequence
  Synthetic
acauuuuacaaaugaggacacag

SEQ ID NO: 304521 - RNA, 24 nt, Artificial Sequence
  Synthetic
cacauuuuacaaaugaggacacag

SEQ ID NO: 304522 - RNA, 18 nt, Artificial Sequence
  Synthetic
uugcucauggggacacag

SEQ ID NO: 304523 - RNA, 19 nt, Artificial Sequence
  Synthetic
uuugcucauggggacacag

SEQ ID NO: 304524 - RNA, 20 nt, Artificial Sequence
  Synthetic
uuuugcucauggggacacag

SEQ ID NO: 304525 - RNA, 21 nt, Artificial Sequence
  Synthetic
uuuuugcucauggggacacag

SEQ ID NO: 304526 - RNA, 22 nt, Artificial Sequence
  Synthetic
cuuuuugcucauggggacacag

SEQ ID NO: 304527 - RNA, 23 nt, Artificial Sequence
  Synthetic
ccuuuuugcucauggggacacag

SEQ ID NO: 304528 - RNA, 24 nt, Artificial Sequence
  Synthetic
gccuuuuugcucauggggacacag

SEQ ID NO: 304529 - RNA, 18 nt, Artificial Sequence
  Synthetic
aaaguuuuaaauacacag

SEQ ID NO: 304530 - RNA, 19 nt, Artificial Sequence
  Synthetic
aaaaguuuuaaauacacag

SEQ ID NO: 304531 - RNA, 20 nt, Artificial Sequence
  Synthetic
uaaaaguuuuaaauacacag

SEQ ID NO: 304532 - RNA, 21 nt, Artificial Sequence
  Synthetic
uuaaaaguuuuaaauacacag

SEQ ID NO: 304533 - RNA, 22 nt, Artificial Sequence
  Synthetic
uuuaaaaguuuuaaauacacag

SEQ ID NO: 304534 - RNA, 23 nt, Artificial Sequence
  Synthetic
uuuuaaaaguuuuaaauacacag

SEQ ID NO: 304535 - RNA, 24 nt, Artificial Sequence
  Synthetic
uuuuuaaaaguuuuaaauacacag

SEQ ID NO: 304536 - RNA, 18 nt, Artificial Sequence
  Synthetic
guuuucauaguuacacag

SEQ ID NO: 304537 - RNA, 19 nt, Artificial Sequence
  Synthetic
uguuuucauaguuacacag

SEQ ID NO: 304538 - RNA, 20 nt, Artificial Sequence
  Synthetic
cuguuuucauaguuacacag

SEQ ID NO: 304539 - RNA, 21 nt, Artificial Sequence
  Synthetic
acuguuuucauaguuacacag

SEQ ID NO: 304540 - RNA, 22 nt, Artificial Sequence
  Synthetic
uacuguuuucauaguuacacag

SEQ ID NO: 304541 - RNA, 23 nt, Artificial Sequence
  Synthetic
guacuguuuucauaguuacacag

SEQ ID NO: 304542 - RNA, 24 nt, Artificial Sequence
  Synthetic
gguacuguuuucauaguuacacag

SEQ ID NO: 304543 - RNA, 18 nt, Artificial Sequence
  Synthetic
uugaaagguuuuacacag

SEQ ID NO: 304544 - RNA, 19 nt, Artificial Sequence
  Synthetic
auugaaagguuuuacacag

SEQ ID NO: 304545 - RNA, 20 nt, Artificial Sequence
  Synthetic
cauugaaagguuuuacacag

SEQ ID NO: 304546 - RNA, 21 nt, Artificial Sequence
  Synthetic
ccauugaaagguuuuacacag

SEQ ID NO: 304547 - RNA, 22 nt, Artificial Sequence
  Synthetic
accauugaaagguuuuacacag

SEQ ID NO: 304548 - RNA, 23 nt, Artificial Sequence
  Synthetic
aaccauugaaagguuuuacacag

SEQ ID NO: 304549 - RNA, 24 nt, Artificial Sequence
  Synthetic
aaaccauugaaagguuuuacacag

SEQ ID NO: 304550 - RNA, 18 nt, Artificial Sequence
  Synthetic
caggaccugcaaccacag

SEQ ID NO: 304551 - RNA, 19 nt, Artificial Sequence
  Synthetic
gcaggaccugcaaccacag

SEQ ID NO: 304552 - RNA, 20 nt, Artificial Sequence
  Synthetic
ggcaggaccugcaaccacag

SEQ ID NO: 304553 - RNA, 21 nt, Artificial Sequence
  Synthetic
cggcaggaccugcaaccacag

SEQ ID NO: 304554 - RNA, 22 nt, Artificial Sequence
  Synthetic
ucggcaggaccugcaaccacag

SEQ ID NO: 304555 - RNA, 23 nt, Artificial Sequence
  Synthetic
uucggcaggaccugcaaccacag

SEQ ID NO: 304556 - RNA, 24 nt, Artificial Sequence
  Synthetic
guucggcaggaccugcaaccacag

SEQ ID NO: 304557 - RNA, 18 nt, Artificial Sequence
  Synthetic
ucaccauaaccaccacag

SEQ ID NO: 304558 - RNA, 19 nt, Artificial Sequence
  Synthetic
uucaccauaaccaccacag

SEQ ID NO: 304559 - RNA, 20 nt, Artificial Sequence
  Synthetic
uuucaccauaaccaccacag

SEQ ID NO: 304560 - RNA, 21 nt, Artificial Sequence
  Synthetic
cuuucaccauaaccaccacag

SEQ ID NO: 304561 - RNA, 22 nt, Artificial Sequence
  Synthetic
ucuuucaccauaaccaccacag

SEQ ID NO: 304562 - RNA, 23 nt, Artificial Sequence
  Synthetic
gucuuucaccauaaccaccacag

SEQ ID NO: 304563 - RNA, 24 nt, Artificial Sequence
  Synthetic
ggucuuucaccauaaccaccacag

SEQ ID NO: 304564 - RNA, 18 nt, Artificial Sequence
  Synthetic
uaauuuucuucaccacag

SEQ ID NO: 304565 - RNA, 19 nt, Artificial Sequence
  Synthetic
cuaauuuucuucaccacag

SEQ ID NO: 304566 - RNA, 20 nt, Artificial Sequence
  Synthetic
acuaauuuucuucaccacag

SEQ ID NO: 304567 - RNA, 21 nt, Artificial Sequence
  Synthetic
uacuaauuuucuucaccacag

SEQ ID NO: 304568 - RNA, 22 nt, Artificial Sequence
  Synthetic
guacuaauuuucuucaccacag

SEQ ID NO: 304569 - RNA, 23 nt, Artificial Sequence
  Synthetic
aguacuaauuuucuucaccacag

SEQ ID NO: 304570 - RNA, 24 nt, Artificial Sequence
  Synthetic
gaguacuaauuuucuucaccacag

SEQ ID NO: 304571 - RNA, 18 nt, Artificial Sequence
  Synthetic
gcauuaaaauccccacag

SEQ ID NO: 304572 - RNA, 19 nt, Artificial Sequence
  Synthetic
agcauuaaaauccccacag

SEQ ID NO: 304573 - RNA, 20 nt, Artificial Sequence
  Synthetic
cagcauuaaaauccccacag

SEQ ID NO: 304574 - RNA, 21 nt, Artificial Sequence
  Synthetic
acagcauuaaaauccccacag

SEQ ID NO: 304575 - RNA, 22 nt, Artificial Sequence
  Synthetic
uacagcauuaaaauccccacag

SEQ ID NO: 304576 - RNA, 23 nt, Artificial Sequence
  Synthetic
uuacagcauuaaaauccccacag

SEQ ID NO: 304577 - RNA, 24 nt, Artificial Sequence
  Synthetic
uuuacagcauuaaaauccccacag

SEQ ID NO: 304578 - RNA, 18 nt, Artificial Sequence
  Synthetic
ugcgaugaacagccacag

SEQ ID NO: 304579 - RNA, 19 nt, Artificial Sequence
  Synthetic
cugcgaugaacagccacag

SEQ ID NO: 304580 - RNA, 20 nt, Artificial Sequence
  Synthetic
gcugcgaugaacagccacag

SEQ ID NO: 304581 - RNA, 21 nt, Artificial Sequence
  Synthetic
ggcugcgaugaacagccacag

SEQ ID NO: 304582 - RNA, 22 nt, Artificial Sequence
  Synthetic
uggcugcgaugaacagccacag

SEQ ID NO: 304583 - RNA, 23 nt, Artificial Sequence
  Synthetic
guggcugcgaugaacagccacag

SEQ ID NO: 304584 - RNA, 24 nt, Artificial Sequence
  Synthetic
uguggcugcgaugaacagccacag

SEQ ID NO: 304585 - RNA, 18 nt, Artificial Sequence
  Synthetic
uugaaauauuugccacag

SEQ ID NO: 304586 - RNA, 19 nt, Artificial Sequence
  Synthetic
auugaaauauuugccacag

SEQ ID NO: 304587 - RNA, 20 nt, Artificial Sequence
  Synthetic
aauugaaauauuugccacag

SEQ ID NO: 304588 - RNA, 21 nt, Artificial Sequence
  Synthetic
uaauugaaauauuugccacag

SEQ ID NO: 304589 - RNA, 22 nt, Artificial Sequence
  Synthetic
guaauugaaauauuugccacag

SEQ ID NO: 304590 - RNA, 23 nt, Artificial Sequence
  Synthetic
aguaauugaaauauuugccacag

SEQ ID NO: 304591 - RNA, 24 nt, Artificial Sequence
  Synthetic
caguaauugaaauauuugccacag

SEQ ID NO: 304592 - RNA, 18 nt, Artificial Sequence
  Synthetic
agucuccauuaagcacag

SEQ ID NO: 304593 - RNA, 19 nt, Artificial Sequence
  Synthetic
uagucuccauuaagcacag

SEQ ID NO: 304594 - RNA, 20 nt, Artificial Sequence
  Synthetic
cuagucuccauuaagcacag

SEQ ID NO: 304595 - RNA, 21 nt, Artificial Sequence
  Synthetic
ccuagucuccauuaagcacag

SEQ ID NO: 304596 - RNA, 22 nt, Artificial Sequence
  Synthetic
uccuagucuccauuaagcacag

SEQ ID NO: 304597 - RNA, 23 nt, Artificial Sequence
  Synthetic
auccuagucuccauuaagcacag

SEQ ID NO: 304598 - RNA, 24 nt, Artificial Sequence
  Synthetic
cauccuagucuccauuaagcacag

SEQ ID NO: 304599 - RNA, 18 nt, Artificial Sequence
  Synthetic
acucuaaauacagcacag

SEQ ID NO: 304600 - RNA, 19 nt, Artificial Sequence
  Synthetic
aacucuaaauacagcacag

SEQ ID NO: 304601 - RNA, 20 nt, Artificial Sequence
  Synthetic
caacucuaaauacagcacag

SEQ ID NO: 304602 - RNA, 21 nt, Artificial Sequence
  Synthetic
ucaacucuaaauacagcacag

SEQ ID NO: 304603 - RNA, 22 nt, Artificial Sequence
  Synthetic
cucaacucuaaauacagcacag

SEQ ID NO: 304604 - RNA, 23 nt, Artificial Sequence
  Synthetic
gcucaacucuaaauacagcacag

SEQ ID NO: 304605 - RNA, 24 nt, Artificial Sequence
  Synthetic
ggcucaacucuaaauacagcacag

SEQ ID NO: 304606 - RNA, 18 nt, Artificial Sequence
  Synthetic
gcaucuugaggagcacag

SEQ ID NO: 304607 - RNA, 19 nt, Artificial Sequence
  Synthetic
agcaucuugaggagcacag

SEQ ID NO: 304608 - RNA, 20 nt, Artificial Sequence
  Synthetic
gagcaucuugaggagcacag

SEQ ID NO: 304609 - RNA, 21 nt, Artificial Sequence
  Synthetic
agagcaucuugaggagcacag

SEQ ID NO: 304610 - RNA, 22 nt, Artificial Sequence
  Synthetic
uagagcaucuugaggagcacag

SEQ ID NO: 304611 - RNA, 23 nt, Artificial Sequence
  Synthetic
guagagcaucuugaggagcacag

SEQ ID NO: 304612 - RNA, 24 nt, Artificial Sequence
  Synthetic
uguagagcaucuugaggagcacag

SEQ ID NO: 304613 - RNA, 18 nt, Artificial Sequence
  Synthetic
ugcacauuaaaggcacag

SEQ ID NO: 304614 - RNA, 19 nt, Artificial Sequence
  Synthetic
cugcacauuaaaggcacag

SEQ ID NO: 304615 - RNA, 20 nt, Artificial Sequence
  Synthetic
ccugcacauuaaaggcacag

SEQ ID NO: 304616 - RNA, 21 nt, Artificial Sequence
  Synthetic
gccugcacauuaaaggcacag

SEQ ID NO: 304617 - RNA, 22 nt, Artificial Sequence
  Synthetic
agccugcacauuaaaggcacag

SEQ ID NO: 304618 - RNA, 23 nt, Artificial Sequence
  Synthetic
cagccugcacauuaaaggcacag

SEQ ID NO: 304619 - RNA, 24 nt, Artificial Sequence
  Synthetic
acagccugcacauuaaaggcacag

SEQ ID NO: 304620 - RNA, 18 nt, Artificial Sequence
  Synthetic
cacuuagcuuaggcacag

SEQ ID NO: 304621 - RNA, 19 nt, Artificial Sequence
  Synthetic
gcacuuagcuuaggcacag

SEQ ID NO: 304622 - RNA, 20 nt, Artificial Sequence
  Synthetic
ggcacuuagcuuaggcacag

SEQ ID NO: 304623 - RNA, 21 nt, Artificial Sequence
  Synthetic
aggcacuuagcuuaggcacag

SEQ ID NO: 304624 - RNA, 22 nt, Artificial Sequence
  Synthetic
caggcacuuagcuuaggcacag

SEQ ID NO: 304625 - RNA, 23 nt, Artificial Sequence
  Synthetic
ccaggcacuuagcuuaggcacag

SEQ ID NO: 304626 - RNA, 24 nt, Artificial Sequence
  Synthetic
accaggcacuuagcuuaggcacag

SEQ ID NO: 304627 - RNA, 18 nt, Artificial Sequence
  Synthetic
aagcccuagaaugcacag

SEQ ID NO: 304628 - RNA, 19 nt, Artificial Sequence
  Synthetic
caagcccuagaaugcacag

SEQ ID NO: 304629 - RNA, 20 nt, Artificial Sequence
  Synthetic
acaagcccuagaaugcacag

SEQ ID NO: 304630 - RNA, 21 nt, Artificial Sequence
  Synthetic
uacaagcccuagaaugcacag

SEQ ID NO: 304631 - RNA, 22 nt, Artificial Sequence
  Synthetic
auacaagcccuagaaugcacag

SEQ ID NO: 304632 - RNA, 23 nt, Artificial Sequence
  Synthetic
aauacaagcccuagaaugcacag

SEQ ID NO: 304633 - RNA, 24 nt, Artificial Sequence
  Synthetic
aaauacaagcccuagaaugcacag

SEQ ID NO: 304634 - RNA, 18 nt, Artificial Sequence
  Synthetic
gaauuccaggcugcacag

SEQ ID NO: 304635 - RNA, 19 nt, Artificial Sequence
  Synthetic
ugaauuccaggcugcacag

SEQ ID NO: 304636 - RNA, 20 nt, Artificial Sequence
  Synthetic
uugaauuccaggcugcacag

SEQ ID NO: 304637 - RNA, 21 nt, Artificial Sequence
  Synthetic
auugaauuccaggcugcacag

SEQ ID NO: 304638 - RNA, 22 nt, Artificial Sequence
  Synthetic
cauugaauuccaggcugcacag

SEQ ID NO: 304639 - RNA, 23 nt, Artificial Sequence
  Synthetic
acauugaauuccaggcugcacag

SEQ ID NO: 304640 - RNA, 24 nt, Artificial Sequence
  Synthetic
gacauugaauuccaggcugcacag

SEQ ID NO: 304641 - RNA, 18 nt, Artificial Sequence
  Synthetic
auaggcaagauugcacag

SEQ ID NO: 304642 - RNA, 19 nt, Artificial Sequence
  Synthetic
gauaggcaagauugcacag

SEQ ID NO: 304643 - RNA, 20 nt, Artificial Sequence
  Synthetic
agauaggcaagauugcacag

SEQ ID NO: 304644 - RNA, 21 nt, Artificial Sequence
  Synthetic
aagauaggcaagauugcacag

SEQ ID NO: 304645 - RNA, 22 nt, Artificial Sequence
  Synthetic
uaagauaggcaagauugcacag

SEQ ID NO: 304646 - RNA, 23 nt, Artificial Sequence
  Synthetic
guaagauaggcaagauugcacag

SEQ ID NO: 304647 - RNA, 24 nt, Artificial Sequence
  Synthetic
uguaagauaggcaagauugcacag

SEQ ID NO: 304648 - RNA, 18 nt, Artificial Sequence
  Synthetic
gcauuaaccaaaucacag

SEQ ID NO: 304649 - RNA, 19 nt, Artificial Sequence
  Synthetic
ggcauuaaccaaaucacag

SEQ ID NO: 304650 - RNA, 20 nt, Artificial Sequence
  Synthetic
aggcauuaaccaaaucacag

SEQ ID NO: 304651 - RNA, 21 nt, Artificial Sequence
  Synthetic
uaggcauuaaccaaaucacag

SEQ ID NO: 304652 - RNA, 22 nt, Artificial Sequence
  Synthetic
cuaggcauuaaccaaaucacag

SEQ ID NO: 304653 - RNA, 23 nt, Artificial Sequence
  Synthetic
acuaggcauuaaccaaaucacag

SEQ ID NO: 304654 - RNA, 24 nt, Artificial Sequence
  Synthetic
aacuaggcauuaaccaaaucacag

SEQ ID NO: 304655 - RNA, 18 nt, Artificial Sequence
  Synthetic
gaacuggaagaaucacag

SEQ ID NO: 304656 - RNA, 19 nt, Artificial Sequence
  Synthetic
ugaacuggaagaaucacag

SEQ ID NO: 304657 - RNA, 20 nt, Artificial Sequence
  Synthetic
cugaacuggaagaaucacag

SEQ ID NO: 304658 - RNA, 21 nt, Artificial Sequence
  Synthetic
acugaacuggaagaaucacag

SEQ ID NO: 304659 - RNA, 22 nt, Artificial Sequence
  Synthetic
uacugaacuggaagaaucacag

SEQ ID NO: 304660 - RNA, 23 nt, Artificial Sequence
  Synthetic
auacugaacuggaagaaucacag

SEQ ID NO: 304661 - RNA, 24 nt, Artificial Sequence
  Synthetic
aauacugaacuggaagaaucacag

SEQ ID NO: 304662 - RNA, 18 nt, Artificial Sequence
  Synthetic
aaagaccugguaucacag

SEQ ID NO: 304663 - RNA, 19 nt, Artificial Sequence
  Synthetic
uaaagaccugguaucacag

SEQ ID NO: 304664 - RNA, 20 nt, Artificial Sequence
  Synthetic
cuaaagaccugguaucacag

SEQ ID NO: 304665 - RNA, 21 nt, Artificial Sequence
  Synthetic
ucuaaagaccugguaucacag

SEQ ID NO: 304666 - RNA, 22 nt, Artificial Sequence
  Synthetic
gucuaaagaccugguaucacag

SEQ ID NO: 304667 - RNA, 23 nt, Artificial Sequence
  Synthetic
agucuaaagaccugguaucacag

SEQ ID NO: 304668 - RNA, 24 nt, Artificial Sequence
  Synthetic
cagucuaaagaccugguaucacag

SEQ ID NO: 304669 - RNA, 18 nt, Artificial Sequence
  Synthetic
cugauaauccacucacag

SEQ ID NO: 304670 - RNA, 19 nt, Artificial Sequence
  Synthetic
acugauaauccacucacag

SEQ ID NO: 304671 - RNA, 20 nt, Artificial Sequence
  Synthetic
uacugauaauccacucacag

SEQ ID NO: 304672 - RNA, 21 nt, Artificial Sequence
  Synthetic
auacugauaauccacucacag

SEQ ID NO: 304673 - RNA, 22 nt, Artificial Sequence
  Synthetic
aauacugauaauccacucacag

SEQ ID NO: 304674 - RNA, 23 nt, Artificial Sequence
  Synthetic
aaauacugauaauccacucacag

SEQ ID NO: 304675 - RNA, 24 nt, Artificial Sequence
  Synthetic
caaauacugauaauccacucacag

SEQ ID NO: 304676 - RNA, 18 nt, Artificial Sequence
  Synthetic
acauguucucacucacag

SEQ ID NO: 304677 - RNA, 19 nt, Artificial Sequence
  Synthetic
cacauguucucacucacag

SEQ ID NO: 304678 - RNA, 20 nt, Artificial Sequence
  Synthetic
ccacauguucucacucacag

SEQ ID NO: 304679 - RNA, 21 nt, Artificial Sequence
  Synthetic
accacauguucucacucacag

SEQ ID NO: 304680 - RNA, 22 nt, Artificial Sequence
  Synthetic
caccacauguucucacucacag

SEQ ID NO: 304681 - RNA, 23 nt, Artificial Sequence
  Synthetic
acaccacauguucucacucacag

SEQ ID NO: 304682 - RNA, 24 nt, Artificial Sequence
  Synthetic
aacaccacauguucucacucacag

SEQ ID NO: 304683 - RNA, 18 nt, Artificial Sequence
  Synthetic
acauguucuuacucacag

SEQ ID NO: 304684 - RNA, 19 nt, Artificial Sequence
  Synthetic
cacauguucuuacucacag

SEQ ID NO: 304685 - RNA, 20 nt, Artificial Sequence
  Synthetic
ccacauguucuuacucacag

SEQ ID NO: 304686 - RNA, 21 nt, Artificial Sequence
  Synthetic
accacauguucuuacucacag

SEQ ID NO: 304687 - RNA, 22 nt, Artificial Sequence
  Synthetic
caccacauguucuuacucacag

SEQ ID NO: 304688 - RNA, 23 nt, Artificial Sequence
  Synthetic
acaccacauguucuuacucacag

SEQ ID NO: 304689 - RNA, 24 nt, Artificial Sequence
  Synthetic
aacaccacauguucuuacucacag

SEQ ID NO: 304690 - RNA, 18 nt, Artificial Sequence
  Synthetic
aucaucuccaagucacag

SEQ ID NO: 304691 - RNA, 19 nt, Artificial Sequence
  Synthetic
gaucaucuccaagucacag

SEQ ID NO: 304692 - RNA, 20 nt, Artificial Sequence
  Synthetic
ugaucaucuccaagucacag

SEQ ID NO: 304693 - RNA, 21 nt, Artificial Sequence
  Synthetic
augaucaucuccaagucacag

SEQ ID NO: 304694 - RNA, 22 nt, Artificial Sequence
  Synthetic
aaugaucaucuccaagucacag

SEQ ID NO: 304695 - RNA, 23 nt, Artificial Sequence
  Synthetic
caaugaucaucuccaagucacag

SEQ ID NO: 304696 - RNA, 24 nt, Artificial Sequence
  Synthetic
ucaaugaucaucuccaagucacag

SEQ ID NO: 304697 - RNA, 18 nt, Artificial Sequence
  Synthetic
uugauuccuacuucacag

SEQ ID NO: 304698 - RNA, 19 nt, Artificial Sequence
  Synthetic
guugauuccuacuucacag

SEQ ID NO: 304699 - RNA, 20 nt, Artificial Sequence
  Synthetic
uguugauuccuacuucacag

SEQ ID NO: 304700 - RNA, 21 nt, Artificial Sequence
  Synthetic
cuguugauuccuacuucacag

SEQ ID NO: 304701 - RNA, 22 nt, Artificial Sequence
  Synthetic
ucuguugauuccuacuucacag

SEQ ID NO: 304702 - RNA, 23 nt, Artificial Sequence
  Synthetic
gucuguugauuccuacuucacag

SEQ ID NO: 304703 - RNA, 24 nt, Artificial Sequence
  Synthetic
ggucuguugauuccuacuucacag

SEQ ID NO: 304704 - RNA, 18 nt, Artificial Sequence
  Synthetic
cucccuaccucuucacag

SEQ ID NO: 304705 - RNA, 19 nt, Artificial Sequence
  Synthetic
ucucccuaccucuucacag

SEQ ID NO: 304706 - RNA, 20 nt, Artificial Sequence
  Synthetic
gucucccuaccucuucacag

SEQ ID NO: 304707 - RNA, 21 nt, Artificial Sequence
  Synthetic
ugucucccuaccucuucacag

SEQ ID NO: 304708 - RNA, 22 nt, Artificial Sequence
  Synthetic
cugucucccuaccucuucacag

SEQ ID NO: 304709 - RNA, 23 nt, Artificial Sequence
  Synthetic
ccugucucccuaccucuucacag

SEQ ID NO: 304710 - RNA, 24 nt, Artificial Sequence
  Synthetic
gccugucucccuaccucuucacag

SEQ ID NO: 304711 - RNA, 18 nt, Artificial Sequence
  Synthetic
ucucaaaaaauuucacag

SEQ ID NO: 304712 - RNA, 19 nt, Artificial Sequence
  Synthetic
aucucaaaaaauuucacag

SEQ ID NO: 304713 - RNA, 20 nt, Artificial Sequence
  Synthetic
gaucucaaaaaauuucacag

SEQ ID NO: 304714 - RNA, 21 nt, Artificial Sequence
  Synthetic
ugaucucaaaaaauuucacag

SEQ ID NO: 304715 - RNA, 22 nt, Artificial Sequence
  Synthetic
augaucucaaaaaauuucacag

SEQ ID NO: 304716 - RNA, 23 nt, Artificial Sequence
  Synthetic
gaugaucucaaaaaauuucacag

SEQ ID NO: 304717 - RNA, 24 nt, Artificial Sequence
  Synthetic
agaugaucucaaaaaauuucacag

SEQ ID NO: 304718 - RNA, 18 nt, Artificial Sequence
  Synthetic
cuagugcuucaaagacag

SEQ ID NO: 304719 - RNA, 19 nt, Artificial Sequence
  Synthetic
ucuagugcuucaaagacag

SEQ ID NO: 304720 - RNA, 20 nt, Artificial Sequence
  Synthetic
cucuagugcuucaaagacag

SEQ ID NO: 304721 - RNA, 21 nt, Artificial Sequence
  Synthetic
gcucuagugcuucaaagacag

SEQ ID NO: 304722 - RNA, 22 nt, Artificial Sequence
  Synthetic
ugcucuagugcuucaaagacag

SEQ ID NO: 304723 - RNA, 23 nt, Artificial Sequence
  Synthetic
cugcucuagugcuucaaagacag

SEQ ID NO: 304724 - RNA, 24 nt, Artificial Sequence
  Synthetic
ccugcucuagugcuucaaagacag

SEQ ID NO: 304725 - RNA, 18 nt, Artificial Sequence
  Synthetic
agauauuccagaagacag

SEQ ID NO: 304726 - RNA, 19 nt, Artificial Sequence
  Synthetic
aagauauuccagaagacag

SEQ ID NO: 304727 - RNA, 20 nt, Artificial Sequence
  Synthetic
uaagauauuccagaagacag

SEQ ID NO: 304728 - RNA, 21 nt, Artificial Sequence
  Synthetic
cuaagauauuccagaagacag

SEQ ID NO: 304729 - RNA, 22 nt, Artificial Sequence
  Synthetic
gcuaagauauuccagaagacag

SEQ ID NO: 304730 - RNA, 23 nt, Artificial Sequence
  Synthetic
agcuaagauauuccagaagacag

SEQ ID NO: 304731 - RNA, 24 nt, Artificial Sequence
  Synthetic
cagcuaagauauuccagaagacag

SEQ ID NO: 304732 - RNA, 18 nt, Artificial Sequence
  Synthetic
cuguacuagagaagacag

SEQ ID NO: 304733 - RNA, 19 nt, Artificial Sequence
  Synthetic
ccuguacuagagaagacag

SEQ ID NO: 304734 - RNA, 20 nt, Artificial Sequence
  Synthetic
accuguacuagagaagacag

SEQ ID NO: 304735 - RNA, 21 nt, Artificial Sequence
  Synthetic
uaccuguacuagagaagacag

SEQ ID NO: 304736 - RNA, 22 nt, Artificial Sequence
  Synthetic
cuaccuguacuagagaagacag

SEQ ID NO: 304737 - RNA, 23 nt, Artificial Sequence
  Synthetic
acuaccuguacuagagaagacag

SEQ ID NO: 304738 - RNA, 24 nt, Artificial Sequence
  Synthetic
aacuaccuguacuagagaagacag

SEQ ID NO: 304739 - RNA, 18 nt, Artificial Sequence
  Synthetic
aaagagagaggaagacag

SEQ ID NO: 304740 - RNA, 19 nt, Artificial Sequence
  Synthetic
aaaagagagaggaagacag

SEQ ID NO: 304741 - RNA, 20 nt, Artificial Sequence
  Synthetic
aaaaagagagaggaagacag

SEQ ID NO: 304742 - RNA, 21 nt, Artificial Sequence
  Synthetic
gaaaaagagagaggaagacag

SEQ ID NO: 304743 - RNA, 22 nt, Artificial Sequence
  Synthetic
ugaaaaagagagaggaagacag

SEQ ID NO: 304744 - RNA, 23 nt, Artificial Sequence
  Synthetic
augaaaaagagagaggaagacag

SEQ ID NO: 304745 - RNA, 24 nt, Artificial Sequence
  Synthetic
aaugaaaaagagagaggaagacag

SEQ ID NO: 304746 - RNA, 18 nt, Artificial Sequence
  Synthetic
ucuaccaugugaagacag

SEQ ID NO: 304747 - RNA, 19 nt, Artificial Sequence
  Synthetic
aucuaccaugugaagacag

SEQ ID NO: 304748 - RNA, 20 nt, Artificial Sequence
  Synthetic
caucuaccaugugaagacag

SEQ ID NO: 304749 - RNA, 21 nt, Artificial Sequence
  Synthetic
acaucuaccaugugaagacag

SEQ ID NO: 304750 - RNA, 22 nt, Artificial Sequence
  Synthetic
cacaucuaccaugugaagacag

SEQ ID NO: 304751 - RNA, 23 nt, Artificial Sequence
  Synthetic
ucacaucuaccaugugaagacag

SEQ ID NO: 304752 - RNA, 24 nt, Artificial Sequence
  Synthetic
uucacaucuaccaugugaagacag

SEQ ID NO: 304753 - RNA, 18 nt, Artificial Sequence
  Synthetic
gagaagaauugaagacag

SEQ ID NO: 304754 - RNA, 19 nt, Artificial Sequence
  Synthetic
ugagaagaauugaagacag

SEQ ID NO: 304755 - RNA, 20 nt, Artificial Sequence
  Synthetic
cugagaagaauugaagacag

SEQ ID NO: 304756 - RNA, 21 nt, Artificial Sequence
  Synthetic
gcugagaagaauugaagacag

SEQ ID NO: 304757 - RNA, 22 nt, Artificial Sequence
  Synthetic
ugcugagaagaauugaagacag

SEQ ID NO: 304758 - RNA, 23 nt, Artificial Sequence
  Synthetic
uugcugagaagaauugaagacag

SEQ ID NO: 304759 - RNA, 24 nt, Artificial Sequence
  Synthetic
uuugcugagaagaauugaagacag

SEQ ID NO: 304760 - RNA, 18 nt, Artificial Sequence
  Synthetic
aguauuaaauuaagacag

SEQ ID NO: 304761 - RNA, 19 nt, Artificial Sequence
  Synthetic
aaguauuaaauuaagacag

SEQ ID NO: 304762 - RNA, 20 nt, Artificial Sequence
  Synthetic
aaaguauuaaauuaagacag

SEQ ID NO: 304763 - RNA, 21 nt, Artificial Sequence
  Synthetic
aaaaguauuaaauuaagacag

SEQ ID NO: 304764 - RNA, 22 nt, Artificial Sequence
  Synthetic
caaaaguauuaaauuaagacag

SEQ ID NO: 304765 - RNA, 23 nt, Artificial Sequence
  Synthetic
acaaaaguauuaaauuaagacag

SEQ ID NO: 304766 - RNA, 24 nt, Artificial Sequence
  Synthetic
cacaaaaguauuaaauuaagacag

SEQ ID NO: 304767 - RNA, 18 nt, Artificial Sequence
  Synthetic
aaauacugauuaagacag

SEQ ID NO: 304768 - RNA, 19 nt, Artificial Sequence
  Synthetic
aaaauacugauuaagacag

SEQ ID NO: 304769 - RNA, 20 nt, Artificial Sequence
  Synthetic
gaaaauacugauuaagacag

SEQ ID NO: 304770 - RNA, 21 nt, Artificial Sequence
  Synthetic
agaaaauacugauuaagacag

SEQ ID NO: 304771 - RNA, 22 nt, Artificial Sequence
  Synthetic
cagaaaauacugauuaagacag

SEQ ID NO: 304772 - RNA, 23 nt, Artificial Sequence
  Synthetic
ccagaaaauacugauuaagacag

SEQ ID NO: 304773 - RNA, 24 nt, Artificial Sequence
  Synthetic
gccagaaaauacugauuaagacag

SEQ ID NO: 304774 - RNA, 18 nt, Artificial Sequence
  Synthetic
uagccuuggcccagacag

SEQ ID NO: 304775 - RNA, 19 nt, Artificial Sequence
  Synthetic
auagccuuggcccagacag

SEQ ID NO: 304776 - RNA, 20 nt, Artificial Sequence
  Synthetic
aauagccuuggcccagacag

SEQ ID NO: 304777 - RNA, 21 nt, Artificial Sequence
  Synthetic
aaauagccuuggcccagacag

SEQ ID NO: 304778 - RNA, 22 nt, Artificial Sequence
  Synthetic
aaaauagccuuggcccagacag

SEQ ID NO: 304779 - RNA, 23 nt, Artificial Sequence
  Synthetic
aaaaauagccuuggcccagacag

SEQ ID NO: 304780 - RNA, 24 nt, Artificial Sequence
  Synthetic
aaaaaauagccuuggcccagacag

SEQ ID NO: 304781 - RNA, 18 nt, Artificial Sequence
  Synthetic
gucucuguauucagacag

SEQ ID NO: 304782 - RNA, 19 nt, Artificial Sequence
  Synthetic
cgucucuguauucagacag

SEQ ID NO: 304783 - RNA, 20 nt, Artificial Sequence
  Synthetic
ucgucucuguauucagacag

SEQ ID NO: 304784 - RNA, 21 nt, Artificial Sequence
  Synthetic
aucgucucuguauucagacag

SEQ ID NO: 304785 - RNA, 22 nt, Artificial Sequence
  Synthetic
aaucgucucuguauucagacag

SEQ ID NO: 304786 - RNA, 23 nt, Artificial Sequence
  Synthetic
uaaucgucucuguauucagacag

SEQ ID NO: 304787 - RNA, 24 nt, Artificial Sequence
  Synthetic
cuaaucgucucuguauucagacag

SEQ ID NO: 304788 - RNA, 18 nt, Artificial Sequence
  Synthetic
acuggagcagggagacag

SEQ ID NO: 304789 - RNA, 19 nt, Artificial Sequence
  Synthetic
uacuggagcagggagacag

SEQ ID NO: 304790 - RNA, 20 nt, Artificial Sequence
  Synthetic
uuacuggagcagggagacag

SEQ ID NO: 304791 - RNA, 21 nt, Artificial Sequence
  Synthetic
uuuacuggagcagggagacag

SEQ ID NO: 304792 - RNA, 22 nt, Artificial Sequence
  Synthetic
uuuuacuggagcagggagacag

SEQ ID NO: 304793 - RNA, 23 nt, Artificial Sequence
  Synthetic
uuuuuacuggagcagggagacag

SEQ ID NO: 304794 - RNA, 24 nt, Artificial Sequence
  Synthetic
uuuuuuacuggagcagggagacag

SEQ ID NO: 304795 - RNA, 18 nt, Artificial Sequence
  Synthetic
aaucaccuggggagacag

SEQ ID NO: 304796 - RNA, 19 nt, Artificial Sequence
  Synthetic
gaaucaccuggggagacag

SEQ ID NO: 304797 - RNA, 20 nt, Artificial Sequence
  Synthetic
ugaaucaccuggggagacag

SEQ ID NO: 304798 - RNA, 21 nt, Artificial Sequence
  Synthetic
cugaaucaccuggggagacag

SEQ ID NO: 304799 - RNA, 22 nt, Artificial Sequence
  Synthetic
ucugaaucaccuggggagacag

SEQ ID NO: 304800 - RNA, 23 nt, Artificial Sequence
  Synthetic
aucugaaucaccuggggagacag

SEQ ID NO: 304801 - RNA, 24 nt, Artificial Sequence
  Synthetic
uaucugaaucaccuggggagacag

SEQ ID NO: 304802 - RNA, 18 nt, Artificial Sequence
  Synthetic
agggauggugggagacag

SEQ ID NO: 304803 - RNA, 19 nt, Artificial Sequence
  Synthetic
gagggauggugggagacag

SEQ ID NO: 304804 - RNA, 20 nt, Artificial Sequence
  Synthetic
agagggauggugggagacag

SEQ ID NO: 304805 - RNA, 21 nt, Artificial Sequence
  Synthetic
aagagggauggugggagacag

SEQ ID NO: 304806 - RNA, 22 nt, Artificial Sequence
  Synthetic
gaagagggauggugggagacag

SEQ ID NO: 304807 - RNA, 23 nt, Artificial Sequence
  Synthetic
ggaagagggauggugggagacag

SEQ ID NO: 304808 - RNA, 24 nt, Artificial Sequence
  Synthetic
uggaagagggauggugggagacag

SEQ ID NO: 304809 - RNA, 18 nt, Artificial Sequence
  Synthetic
aguggaaaaaugagacag

SEQ ID NO: 304810 - RNA, 19 nt, Artificial Sequence
  Synthetic
gaguggaaaaaugagacag

SEQ ID NO: 304811 - RNA, 20 nt, Artificial Sequence
  Synthetic
agaguggaaaaaugagacag

SEQ ID NO: 304812 - RNA, 21 nt, Artificial Sequence
  Synthetic
aagaguggaaaaaugagacag

SEQ ID NO: 304813 - RNA, 22 nt, Artificial Sequence
  Synthetic
gaagaguggaaaaaugagacag

SEQ ID NO: 304814 - RNA, 23 nt, Artificial Sequence
  Synthetic
agaagaguggaaaaaugagacag

SEQ ID NO: 304815 - RNA, 24 nt, Artificial Sequence
  Synthetic
uagaagaguggaaaaaugagacag

SEQ ID NO: 304816 - RNA, 18 nt, Artificial Sequence
  Synthetic
aagugugaaaauagacag

SEQ ID NO: 304817 - RNA, 19 nt, Artificial Sequence
  Synthetic
aaagugugaaaauagacag

SEQ ID NO: 304818 - RNA, 20 nt, Artificial Sequence
  Synthetic
aaaagugugaaaauagacag

SEQ ID NO: 304819 - RNA, 21 nt, Artificial Sequence
  Synthetic
aaaaagugugaaaauagacag

SEQ ID NO: 304820 - RNA, 22 nt, Artificial Sequence
  Synthetic
aaaaaagugugaaaauagacag

SEQ ID NO: 304821 - RNA, 23 nt, Artificial Sequence
  Synthetic
gaaaaaagugugaaaauagacag

SEQ ID NO: 304822 - RNA, 24 nt, Artificial Sequence
  Synthetic
ggaaaaaagugugaaaauagacag

SEQ ID NO: 304823 - RNA, 18 nt, Artificial Sequence
  Synthetic
uuaaaagagaauagacag

SEQ ID NO: 304824 - RNA, 19 nt, Artificial Sequence
  Synthetic
uuuaaaagagaauagacag

SEQ ID NO: 304825 - RNA, 20 nt, Artificial Sequence
  Synthetic
auuuaaaagagaauagacag

SEQ ID NO: 304826 - RNA, 21 nt, Artificial Sequence
  Synthetic
aauuuaaaagagaauagacag

SEQ ID NO: 304827 - RNA, 22 nt, Artificial Sequence
  Synthetic
gaauuuaaaagagaauagacag

SEQ ID NO: 304828 - RNA, 23 nt, Artificial Sequence
  Synthetic
ugaauuuaaaagagaauagacag

SEQ ID NO: 304829 - RNA, 24 nt, Artificial Sequence
  Synthetic
augaauuuaaaagagaauagacag

SEQ ID NO: 304830 - RNA, 18 nt, Artificial Sequence
  Synthetic
aaaguuucaacuagacag

SEQ ID NO: 304831 - RNA, 19 nt, Artificial Sequence
  Synthetic
caaaguuucaacuagacag

SEQ ID NO: 304832 - RNA, 20 nt, Artificial Sequence
  Synthetic
acaaaguuucaacuagacag

SEQ ID NO: 304833 - RNA, 21 nt, Artificial Sequence
  Synthetic
uacaaaguuucaacuagacag

SEQ ID NO: 304834 - RNA, 22 nt, Artificial Sequence
  Synthetic
uuacaaaguuucaacuagacag

SEQ ID NO: 304835 - RNA, 23 nt, Artificial Sequence
  Synthetic
auuacaaaguuucaacuagacag

SEQ ID NO: 304836 - RNA, 24 nt, Artificial Sequence
  Synthetic
gauuacaaaguuucaacuagacag

SEQ ID NO: 304837 - RNA, 18 nt, Artificial Sequence
  Synthetic
ugccuauaguguagacag

SEQ ID NO: 304838 - RNA, 19 nt, Artificial Sequence
  Synthetic
cugccuauaguguagacag

SEQ ID NO: 304839 - RNA, 20 nt, Artificial Sequence
  Synthetic
gcugccuauaguguagacag

SEQ ID NO: 304840 - RNA, 21 nt, Artificial Sequence
  Synthetic
ugcugccuauaguguagacag

SEQ ID NO: 304841 - RNA, 22 nt, Artificial Sequence
  Synthetic
uugcugccuauaguguagacag

SEQ ID NO: 304842 - RNA, 23 nt, Artificial Sequence
  Synthetic
uuugcugccuauaguguagacag

SEQ ID NO: 304843 - RNA, 24 nt, Artificial Sequence
  Synthetic
uuuugcugccuauaguguagacag

SEQ ID NO: 304844 - RNA, 18 nt, Artificial Sequence
  Synthetic
cugcuucauuuuagacag

SEQ ID NO: 304845 - RNA, 19 nt, Artificial Sequence
  Synthetic
ucugcuucauuuuagacag

SEQ ID NO: 304846 - RNA, 20 nt, Artificial Sequence
  Synthetic
aucugcuucauuuuagacag

SEQ ID NO: 304847 - RNA, 21 nt, Artificial Sequence
  Synthetic
aaucugcuucauuuuagacag

SEQ ID NO: 304848 - RNA, 22 nt, Artificial Sequence
  Synthetic
aaaucugcuucauuuuagacag

SEQ ID NO: 304849 - RNA, 23 nt, Artificial Sequence
  Synthetic
caaaucugcuucauuuuagacag

SEQ ID NO: 304850 - RNA, 24 nt, Artificial Sequence
  Synthetic
gcaaaucugcuucauuuuagacag

SEQ ID NO: 304851 - RNA, 18 nt, Artificial Sequence
  Synthetic
caagaaaggccacgacag

SEQ ID NO: 304852 - RNA, 19 nt, Artificial Sequence
  Synthetic
ucaagaaaggccacgacag

SEQ ID NO: 304853 - RNA, 20 nt, Artificial Sequence
  Synthetic
uucaagaaaggccacgacag

SEQ ID NO: 304854 - RNA, 21 nt, Artificial Sequence
  Synthetic
uuucaagaaaggccacgacag

SEQ ID NO: 304855 - RNA, 22 nt, Artificial Sequence
  Synthetic
uuuucaagaaaggccacgacag

SEQ ID NO: 304856 - RNA, 23 nt, Artificial Sequence
  Synthetic
guuuucaagaaaggccacgacag

SEQ ID NO: 304857 - RNA, 24 nt, Artificial Sequence
  Synthetic
aguuuucaagaaaggccacgacag

SEQ ID NO: 304858 - RNA, 18 nt, Artificial Sequence
  Synthetic
gauuuaaaagaccgacag

SEQ ID NO: 304859 - RNA, 19 nt, Artificial Sequence
  Synthetic
agauuuaaaagaccgacag

SEQ ID NO: 304860 - RNA, 20 nt, Artificial Sequence
  Synthetic
gagauuuaaaagaccgacag

SEQ ID NO: 304861 - RNA, 21 nt, Artificial Sequence
  Synthetic
agagauuuaaaagaccgacag

SEQ ID NO: 304862 - RNA, 22 nt, Artificial Sequence
  Synthetic
gagagauuuaaaagaccgacag

SEQ ID NO: 304863 - RNA, 23 nt, Artificial Sequence
  Synthetic
ggagagauuuaaaagaccgacag

SEQ ID NO: 304864 - RNA, 24 nt, Artificial Sequence
  Synthetic
aggagagauuuaaaagaccgacag

SEQ ID NO: 304865 - RNA, 18 nt, Artificial Sequence
  Synthetic
cuccagccugggcgacag

SEQ ID NO: 304866 - RNA, 19 nt, Artificial Sequence
  Synthetic
acuccagccugggcgacag

SEQ ID NO: 304867 - RNA, 20 nt, Artificial Sequence
  Synthetic
cacuccagccugggcgacag

SEQ ID NO: 304868 - RNA, 21 nt, Artificial Sequence
  Synthetic
gcacuccagccugggcgacag

SEQ ID NO: 304869 - RNA, 22 nt, Artificial Sequence
  Synthetic
ugcacuccagccugggcgacag

SEQ ID NO: 304870 - RNA, 23 nt, Artificial Sequence
  Synthetic
cugcacuccagccugggcgacag

SEQ ID NO: 304871 - RNA, 24 nt, Artificial Sequence
  Synthetic
acugcacuccagccugggcgacag

SEQ ID NO: 304872 - RNA, 18 nt, Artificial Sequence
  Synthetic
caagaguaucaaggacag

SEQ ID NO: 304873 - RNA, 19 nt, Artificial Sequence
  Synthetic
acaagaguaucaaggacag

SEQ ID NO: 304874 - RNA, 20 nt, Artificial Sequence
  Synthetic
aacaagaguaucaaggacag

SEQ ID NO: 304875 - RNA, 21 nt, Artificial Sequence
  Synthetic
aaacaagaguaucaaggacag

SEQ ID NO: 304876 - RNA, 22 nt, Artificial Sequence
  Synthetic
aaaacaagaguaucaaggacag

SEQ ID NO: 304877 - RNA, 23 nt, Artificial Sequence
  Synthetic
aaaaacaagaguaucaaggacag

SEQ ID NO: 304878 - RNA, 24 nt, Artificial Sequence
  Synthetic
gaaaaacaagaguaucaaggacag

SEQ ID NO: 304879 - RNA, 18 nt, Artificial Sequence
  Synthetic
ggagaacaggaaggacag

SEQ ID NO: 304880 - RNA, 19 nt, Artificial Sequence
  Synthetic
gggagaacaggaaggacag

SEQ ID NO: 304881 - RNA, 20 nt, Artificial Sequence
  Synthetic
agggagaacaggaaggacag

SEQ ID NO: 304882 - RNA, 21 nt, Artificial Sequence
  Synthetic
gagggagaacaggaaggacag

SEQ ID NO: 304883 - RNA, 22 nt, Artificial Sequence
  Synthetic
agagggagaacaggaaggacag

SEQ ID NO: 304884 - RNA, 23 nt, Artificial Sequence
  Synthetic
gagagggagaacaggaaggacag

SEQ ID NO: 304885 - RNA, 24 nt, Artificial Sequence
  Synthetic
agagagggagaacaggaaggacag

SEQ ID NO: 304886 - RNA, 18 nt, Artificial Sequence
  Synthetic
accacagagacgggacag

SEQ ID NO: 304887 - RNA, 19 nt, Artificial Sequence
  Synthetic
gaccacagagacgggacag

SEQ ID NO: 304888 - RNA, 20 nt, Artificial Sequence
  Synthetic
ugaccacagagacgggacag

SEQ ID NO: 304889 - RNA, 21 nt, Artificial Sequence
  Synthetic
augaccacagagacgggacag

SEQ ID NO: 304890 - RNA, 22 nt, Artificial Sequence
  Synthetic
aaugaccacagagacgggacag

SEQ ID NO: 304891 - RNA, 23 nt, Artificial Sequence
  Synthetic
gaaugaccacagagacgggacag

SEQ ID NO: 304892 - RNA, 24 nt, Artificial Sequence
  Synthetic
ugaaugaccacagagacgggacag

SEQ ID NO: 304893 - RNA, 18 nt, Artificial Sequence
  Synthetic
aucuguauugggggacag

SEQ ID NO: 304894 - RNA, 19 nt, Artificial Sequence
  Synthetic
gaucuguauugggggacag

SEQ ID NO: 304895 - RNA, 20 nt, Artificial Sequence
  Synthetic
ugaucuguauugggggacag

SEQ ID NO: 304896 - RNA, 21 nt, Artificial Sequence
  Synthetic
augaucuguauugggggacag

SEQ ID NO: 304897 - RNA, 22 nt, Artificial Sequence
  Synthetic
aaugaucuguauugggggacag

SEQ ID NO: 304898 - RNA, 23 nt, Artificial Sequence
  Synthetic
aaaugaucuguauugggggacag

SEQ ID NO: 304899 - RNA, 24 nt, Artificial Sequence
  Synthetic
caaaugaucuguauugggggacag

SEQ ID NO: 304900 - RNA, 18 nt, Artificial Sequence
  Synthetic
gaagucaaaaugggacag

SEQ ID NO: 304901 - RNA, 19 nt, Artificial Sequence
  Synthetic
ugaagucaaaaugggacag

SEQ ID NO: 304902 - RNA, 20 nt, Artificial Sequence
  Synthetic
uugaagucaaaaugggacag

SEQ ID NO: 304903 - RNA, 21 nt, Artificial Sequence
  Synthetic
uuugaagucaaaaugggacag

SEQ ID NO: 304904 - RNA, 22 nt, Artificial Sequence
  Synthetic
cuuugaagucaaaaugggacag

SEQ ID NO: 304905 - RNA, 23 nt, Artificial Sequence
  Synthetic
gcuuugaagucaaaaugggacag

SEQ ID NO: 304906 - RNA, 24 nt, Artificial Sequence
  Synthetic
agcuuugaagucaaaaugggacag

SEQ ID NO: 304907 - RNA, 18 nt, Artificial Sequence
  Synthetic
augcugagggugggacag

SEQ ID NO: 304908 - RNA, 19 nt, Artificial Sequence
  Synthetic
gaugcugagggugggacag

SEQ ID NO: 304909 - RNA, 20 nt, Artificial Sequence
  Synthetic
ggaugcugagggugggacag

SEQ ID NO: 304910 - RNA, 21 nt, Artificial Sequence
  Synthetic
aggaugcugagggugggacag

SEQ ID NO: 304911 - RNA, 22 nt, Artificial Sequence
  Synthetic
uaggaugcugagggugggacag

SEQ ID NO: 304912 - RNA, 23 nt, Artificial Sequence
  Synthetic
uuaggaugcugagggugggacag

SEQ ID NO: 304913 - RNA, 24 nt, Artificial Sequence
  Synthetic
auuaggaugcugagggugggacag

SEQ ID NO: 304914 - RNA, 18 nt, Artificial Sequence
  Synthetic
guggguugauguggacag

SEQ ID NO: 304915 - RNA, 19 nt, Artificial Sequence
  Synthetic
aguggguugauguggacag

SEQ ID NO: 304916 - RNA, 20 nt, Artificial Sequence
  Synthetic
gaguggguugauguggacag

SEQ ID NO: 304917 - RNA, 21 nt, Artificial Sequence
  Synthetic
ggaguggguugauguggacag

SEQ ID NO: 304918 - RNA, 22 nt, Artificial Sequence
  Synthetic
gggaguggguugauguggacag

SEQ ID NO: 304919 - RNA, 23 nt, Artificial Sequence
  Synthetic
agggaguggguugauguggacag

SEQ ID NO: 304920 - RNA, 24 nt, Artificial Sequence
  Synthetic
aagggaguggguugauguggacag

SEQ ID NO: 304921 - RNA, 18 nt, Artificial Sequence
  Synthetic
gcaugggauuguggacag

SEQ ID NO: 304922 - RNA, 19 nt, Artificial Sequence
  Synthetic
ggcaugggauuguggacag

SEQ ID NO: 304923 - RNA, 20 nt, Artificial Sequence
  Synthetic
uggcaugggauuguggacag

SEQ ID NO: 304924 - RNA, 21 nt, Artificial Sequence
  Synthetic
auggcaugggauuguggacag

SEQ ID NO: 304925 - RNA, 22 nt, Artificial Sequence
  Synthetic
gauggcaugggauuguggacag

SEQ ID NO: 304926 - RNA, 23 nt, Artificial Sequence
  Synthetic
agauggcaugggauuguggacag

SEQ ID NO: 304927 - RNA, 24 nt, Artificial Sequence
  Synthetic
uagauggcaugggauuguggacag

SEQ ID NO: 304928 - RNA, 18 nt, Artificial Sequence
  Synthetic
acaguaaguuaaugacag

SEQ ID NO: 304929 - RNA, 19 nt, Artificial Sequence
  Synthetic
uacaguaaguuaaugacag

SEQ ID NO: 304930 - RNA, 20 nt, Artificial Sequence
  Synthetic
auacaguaaguuaaugacag

SEQ ID NO: 304931 - RNA, 21 nt, Artificial Sequence
  Synthetic
aauacaguaaguuaaugacag

SEQ ID NO: 304932 - RNA, 22 nt, Artificial Sequence
  Synthetic
aaauacaguaaguuaaugacag

SEQ ID NO: 304933 - RNA, 23 nt, Artificial Sequence
  Synthetic
aaaauacaguaaguuaaugacag

SEQ ID NO: 304934 - RNA, 24 nt, Artificial Sequence
  Synthetic
uaaaauacaguaaguuaaugacag

SEQ ID NO: 304935 - RNA, 18 nt, Artificial Sequence
  Synthetic
cuucagccuggaugacag

SEQ ID NO: 304936 - RNA, 19 nt, Artificial Sequence
  Synthetic
acuucagccuggaugacag

SEQ ID NO: 304937 - RNA, 20 nt, Artificial Sequence
  Synthetic
cacuucagccuggaugacag

SEQ ID NO: 304938 - RNA, 21 nt, Artificial Sequence
  Synthetic
gcacuucagccuggaugacag

SEQ ID NO: 304939 - RNA, 22 nt, Artificial Sequence
  Synthetic
ugcacuucagccuggaugacag

SEQ ID NO: 304940 - RNA, 23 nt, Artificial Sequence
  Synthetic
cugcacuucagccuggaugacag

SEQ ID NO: 304941 - RNA, 24 nt, Artificial Sequence
  Synthetic
acugcacuucagccuggaugacag

SEQ ID NO: 304942 - RNA, 18 nt, Artificial Sequence
  Synthetic
cccugaagggacugacag

SEQ ID NO: 304943 - RNA, 19 nt, Artificial Sequence
  Synthetic
ucccugaagggacugacag

SEQ ID NO: 304944 - RNA, 20 nt, Artificial Sequence
  Synthetic
gucccugaagggacugacag

SEQ ID NO: 304945 - RNA, 21 nt, Artificial Sequence
  Synthetic
agucccugaagggacugacag

SEQ ID NO: 304946 - RNA, 22 nt, Artificial Sequence
  Synthetic
cagucccugaagggacugacag

SEQ ID NO: 304947 - RNA, 23 nt, Artificial Sequence
  Synthetic
gcagucccugaagggacugacag

SEQ ID NO: 304948 - RNA, 24 nt, Artificial Sequence
  Synthetic
ggcagucccugaagggacugacag

SEQ ID NO: 304949 - RNA, 18 nt, Artificial Sequence
  Synthetic
auauacaucuacugacag

SEQ ID NO: 304950 - RNA, 19 nt, Artificial Sequence
  Synthetic
aauauacaucuacugacag

SEQ ID NO: 304951 - RNA, 20 nt, Artificial Sequence
  Synthetic
gaauauacaucuacugacag

SEQ ID NO: 304952 - RNA, 21 nt, Artificial Sequence
  Synthetic
agaauauacaucuacugacag

SEQ ID NO: 304953 - RNA, 22 nt, Artificial Sequence
  Synthetic
aagaauauacaucuacugacag

SEQ ID NO: 304954 - RNA, 23 nt, Artificial Sequence
  Synthetic
gaagaauauacaucuacugacag

SEQ ID NO: 304955 - RNA, 24 nt, Artificial Sequence
  Synthetic
ggaagaauauacaucuacugacag

SEQ ID NO: 304956 - RNA, 18 nt, Artificial Sequence
  Synthetic
uaagacaagggcugacag

SEQ ID NO: 304957 - RNA, 19 nt, Artificial Sequence
  Synthetic
cuaagacaagggcugacag

SEQ ID NO: 304958 - RNA, 20 nt, Artificial Sequence
  Synthetic
acuaagacaagggcugacag

SEQ ID NO: 304959 - RNA, 21 nt, Artificial Sequence
  Synthetic
gacuaagacaagggcugacag

SEQ ID NO: 304960 - RNA, 22 nt, Artificial Sequence
  Synthetic
agacuaagacaagggcugacag

SEQ ID NO: 304961 - RNA, 23 nt, Artificial Sequence
  Synthetic
cagacuaagacaagggcugacag

SEQ ID NO: 304962 - RNA, 24 nt, Artificial Sequence
  Synthetic
ccagacuaagacaagggcugacag

SEQ ID NO: 304963 - RNA, 18 nt, Artificial Sequence
  Synthetic
uguuccaagugcugacag

SEQ ID NO: 304964 - RNA, 19 nt, Artificial Sequence
  Synthetic
cuguuccaagugcugacag

SEQ ID NO: 304965 - RNA, 20 nt, Artificial Sequence
  Synthetic
gcuguuccaagugcugacag

SEQ ID NO: 304966 - RNA, 21 nt, Artificial Sequence
  Synthetic
ugcuguuccaagugcugacag

SEQ ID NO: 304967 - RNA, 22 nt, Artificial Sequence
  Synthetic
gugcuguuccaagugcugacag

SEQ ID NO: 304968 - RNA, 23 nt, Artificial Sequence
  Synthetic
agugcuguuccaagugcugacag

SEQ ID NO: 304969 - RNA, 24 nt, Artificial Sequence
  Synthetic
cagugcuguuccaagugcugacag

SEQ ID NO: 304970 - RNA, 18 nt, Artificial Sequence
  Synthetic
uaacucugccucugacag

SEQ ID NO: 304971 - RNA, 19 nt, Artificial Sequence
  Synthetic
guaacucugccucugacag

SEQ ID NO: 304972 - RNA, 20 nt, Artificial Sequence
  Synthetic
uguaacucugccucugacag

SEQ ID NO: 304973 - RNA, 21 nt, Artificial Sequence
  Synthetic
auguaacucugccucugacag

SEQ ID NO: 304974 - RNA, 22 nt, Artificial Sequence
  Synthetic
gauguaacucugccucugacag

SEQ ID NO: 304975 - RNA, 23 nt, Artificial Sequence
  Synthetic
ugauguaacucugccucugacag

SEQ ID NO: 304976 - RNA, 24 nt, Artificial Sequence
  Synthetic
gugauguaacucugccucugacag

SEQ ID NO: 304977 - RNA, 18 nt, Artificial Sequence
  Synthetic
auggaagaucucugacag

SEQ ID NO: 304978 - RNA, 19 nt, Artificial Sequence
  Synthetic
cauggaagaucucugacag

SEQ ID NO: 304979 - RNA, 20 nt, Artificial Sequence
  Synthetic
acauggaagaucucugacag

SEQ ID NO: 304980 - RNA, 21 nt, Artificial Sequence
  Synthetic
aacauggaagaucucugacag

SEQ ID NO: 304981 - RNA, 22 nt, Artificial Sequence
  Synthetic
gaacauggaagaucucugacag

SEQ ID NO: 304982 - RNA, 23 nt, Artificial Sequence
  Synthetic
agaacauggaagaucucugacag

SEQ ID NO: 304983 - RNA, 24 nt, Artificial Sequence
  Synthetic
uagaacauggaagaucucugacag

SEQ ID NO: 304984 - RNA, 18 nt, Artificial Sequence
  Synthetic
auuucagcucucugacag

SEQ ID NO: 304985 - RNA, 19 nt, Artificial Sequence
  Synthetic
cauuucagcucucugacag

SEQ ID NO: 304986 - RNA, 20 nt, Artificial Sequence
  Synthetic
gcauuucagcucucugacag

SEQ ID NO: 304987 - RNA, 21 nt, Artificial Sequence
  Synthetic
cgcauuucagcucucugacag

SEQ ID NO: 304988 - RNA, 22 nt, Artificial Sequence
  Synthetic
ucgcauuucagcucucugacag

SEQ ID NO: 304989 - RNA, 23 nt, Artificial Sequence
  Synthetic
uucgcauuucagcucucugacag

SEQ ID NO: 304990 - RNA, 24 nt, Artificial Sequence
  Synthetic
auucgcauuucagcucucugacag

SEQ ID NO: 304991 - RNA, 18 nt, Artificial Sequence
  Synthetic
ggucaggaagagugacag

SEQ ID NO: 304992 - RNA, 19 nt, Artificial Sequence
  Synthetic
gggucaggaagagugacag

SEQ ID NO: 304993 - RNA, 20 nt, Artificial Sequence
  Synthetic
ggggucaggaagagugacag

SEQ ID NO: 304994 - RNA, 21 nt, Artificial Sequence
  Synthetic
uggggucaggaagagugacag

SEQ ID NO: 304995 - RNA, 22 nt, Artificial Sequence
  Synthetic
auggggucaggaagagugacag

SEQ ID NO: 304996 - RNA, 23 nt, Artificial Sequence
  Synthetic
cauggggucaggaagagugacag

SEQ ID NO: 304997 - RNA, 24 nt, Artificial Sequence
  Synthetic
ccauggggucaggaagagugacag

SEQ ID NO: 304998 - RNA, 18 nt, Artificial Sequence
  Synthetic
cugcccccuuagugacag

SEQ ID NO: 304999 - RNA, 19 nt, Artificial Sequence
  Synthetic
ucugcccccuuagugacag

SEQ ID NO: 305000 - RNA, 20 nt, Artificial Sequence
  Synthetic
cucugcccccuuagugacag

SEQ ID NO: 305001 - RNA, 21 nt, Artificial Sequence
  Synthetic
gcucugcccccuuagugacag

SEQ ID NO: 305002 - RNA, 22 nt, Artificial Sequence
  Synthetic
ggcucugcccccuuagugacag

SEQ ID NO: 305003 - RNA, 23 nt, Artificial Sequence
  Synthetic
uggcucugcccccuuagugacag

SEQ ID NO: 305004 - RNA, 24 nt, Artificial Sequence
  Synthetic
cuggcucugcccccuuagugacag

SEQ ID NO: 305005 - RNA, 18 nt, Artificial Sequence
  Synthetic
uaauugaaucugugacag

SEQ ID NO: 305006 - RNA, 19 nt, Artificial Sequence
  Synthetic
auaauugaaucugugacag

SEQ ID NO: 305007 - RNA, 20 nt, Artificial Sequence
  Synthetic
uauaauugaaucugugacag

SEQ ID NO: 305008 - RNA, 21 nt, Artificial Sequence
  Synthetic
auauaauugaaucugugacag

SEQ ID NO: 305009 - RNA, 22 nt, Artificial Sequence
  Synthetic
aauauaauugaaucugugacag

SEQ ID NO: 305010 - RNA, 23 nt, Artificial Sequence
  Synthetic
aaauauaauugaaucugugacag

SEQ ID NO: 305011 - RNA, 24 nt, Artificial Sequence
  Synthetic
aaaauauaauugaaucugugacag

SEQ ID NO: 305012 - RNA, 18 nt, Artificial Sequence
  Synthetic
auugccgauaauugacag

SEQ ID NO: 305013 - RNA, 19 nt, Artificial Sequence
  Synthetic
cauugccgauaauugacag

SEQ ID NO: 305014 - RNA, 20 nt, Artificial Sequence
  Synthetic
acauugccgauaauugacag

SEQ ID NO: 305015 - RNA, 21 nt, Artificial Sequence
  Synthetic
gacauugccgauaauugacag

SEQ ID NO: 305016 - RNA, 22 nt, Artificial Sequence
  Synthetic
agacauugccgauaauugacag

SEQ ID NO: 305017 - RNA, 23 nt, Artificial Sequence
  Synthetic
cagacauugccgauaauugacag

SEQ ID NO: 305018 - RNA, 24 nt, Artificial Sequence
  Synthetic
acagacauugccgauaauugacag

SEQ ID NO: 305019 - RNA, 18 nt, Artificial Sequence
  Synthetic
ugugucgaauauugacag

SEQ ID NO: 305020 - RNA, 19 nt, Artificial Sequence
  Synthetic
uugugucgaauauugacag

SEQ ID NO: 305021 - RNA, 20 nt, Artificial Sequence
  Synthetic
uuugugucgaauauugacag

SEQ ID NO: 305022 - RNA, 21 nt, Artificial Sequence
  Synthetic
uuuugugucgaauauugacag

SEQ ID NO: 305023 - RNA, 22 nt, Artificial Sequence
  Synthetic
auuuugugucgaauauugacag

SEQ ID NO: 305024 - RNA, 23 nt, Artificial Sequence
  Synthetic
cauuuugugucgaauauugacag

SEQ ID NO: 305025 - RNA, 24 nt, Artificial Sequence
  Synthetic
ucauuuugugucgaauauugacag

SEQ ID NO: 305026 - RNA, 18 nt, Artificial Sequence
  Synthetic
auccauugaacuugacag

SEQ ID NO: 305027 - RNA, 19 nt, Artificial Sequence
  Synthetic
cauccauugaacuugacag

SEQ ID NO: 305028 - RNA, 20 nt, Artificial Sequence
  Synthetic
ucauccauugaacuugacag

SEQ ID NO: 305029 - RNA, 21 nt, Artificial Sequence
  Synthetic
gucauccauugaacuugacag

SEQ ID NO: 305030 - RNA, 22 nt, Artificial Sequence
  Synthetic
agucauccauugaacuugacag

SEQ ID NO: 305031 - RNA, 23 nt, Artificial Sequence
  Synthetic
gagucauccauugaacuugacag

SEQ ID NO: 305032 - RNA, 24 nt, Artificial Sequence
  Synthetic
ggagucauccauugaacuugacag

SEQ ID NO: 305033 - RNA, 18 nt, Artificial Sequence
  Synthetic
uggcagcuggguugacag

SEQ ID NO: 305034 - RNA, 19 nt, Artificial Sequence
  Synthetic
auggcagcuggguugacag

SEQ ID NO: 305035 - RNA, 20 nt, Artificial Sequence
  Synthetic
aauggcagcuggguugacag

SEQ ID NO: 305036 - RNA, 21 nt, Artificial Sequence
  Synthetic
aaauggcagcuggguugacag

SEQ ID NO: 305037 - RNA, 22 nt, Artificial Sequence
  Synthetic
aaaauggcagcuggguugacag

SEQ ID NO: 305038 - RNA, 23 nt, Artificial Sequence
  Synthetic
caaaauggcagcuggguugacag

SEQ ID NO: 305039 - RNA, 24 nt, Artificial Sequence
  Synthetic
ccaaaauggcagcuggguugacag

SEQ ID NO: 305040 - RNA, 18 nt, Artificial Sequence
  Synthetic
agggcuaucauuugacag

SEQ ID NO: 305041 - RNA, 19 nt, Artificial Sequence
  Synthetic
gagggcuaucauuugacag

SEQ ID NO: 305042 - RNA, 20 nt, Artificial Sequence
  Synthetic
cgagggcuaucauuugacag

SEQ ID NO: 305043 - RNA, 21 nt, Artificial Sequence
  Synthetic
acgagggcuaucauuugacag

SEQ ID NO: 305044 - RNA, 22 nt, Artificial Sequence
  Synthetic
uacgagggcuaucauuugacag

SEQ ID NO: 305045 - RNA, 23 nt, Artificial Sequence
  Synthetic
guacgagggcuaucauuugacag

SEQ ID NO: 305046 - RNA, 24 nt, Artificial Sequence
  Synthetic
uguacgagggcuaucauuugacag

SEQ ID NO: 305047 - RNA, 18 nt, Artificial Sequence
  Synthetic
caccuuuucauuugacag

SEQ ID NO: 305048 - RNA, 19 nt, Artificial Sequence
  Synthetic
ucaccuuuucauuugacag

SEQ ID NO: 305049 - RNA, 20 nt, Artificial Sequence
  Synthetic
uucaccuuuucauuugacag

SEQ ID NO: 305050 - RNA, 21 nt, Artificial Sequence
  Synthetic
cuucaccuuuucauuugacag

SEQ ID NO: 305051 - RNA, 22 nt, Artificial Sequence
  Synthetic
acuucaccuuuucauuugacag

SEQ ID NO: 305052 - RNA, 23 nt, Artificial Sequence
  Synthetic
uacuucaccuuuucauuugacag

SEQ ID NO: 305053 - RNA, 24 nt, Artificial Sequence
  Synthetic
cuacuucaccuuuucauuugacag

SEQ ID NO: 305054 - RNA, 18 nt, Artificial Sequence
  Synthetic
cauaugucccuuugacag

SEQ ID NO: 305055 - RNA, 19 nt, Artificial Sequence
  Synthetic
ucauaugucccuuugacag

SEQ ID NO: 305056 - RNA, 20 nt, Artificial Sequence
  Synthetic
cucauaugucccuuugacag

SEQ ID NO: 305057 - RNA, 21 nt, Artificial Sequence
  Synthetic
ccucauaugucccuuugacag

SEQ ID NO: 305058 - RNA, 22 nt, Artificial Sequence
  Synthetic
uccucauaugucccuuugacag

SEQ ID NO: 305059 - RNA, 23 nt, Artificial Sequence
  Synthetic
auccucauaugucccuuugacag

SEQ ID NO: 305060 - RNA, 24 nt, Artificial Sequence
  Synthetic
cauccucauaugucccuuugacag

SEQ ID NO: 305061 - RNA, 18 nt, Artificial Sequence
  Synthetic
aucagguaugaaauacag

SEQ ID NO: 305062 - RNA, 19 nt, Artificial Sequence
  Synthetic
uaucagguaugaaauacag

SEQ ID NO: 305063 - RNA, 20 nt, Artificial Sequence
  Synthetic
auaucagguaugaaauacag

SEQ ID NO: 305064 - RNA, 21 nt, Artificial Sequence
  Synthetic
cauaucagguaugaaauacag

SEQ ID NO: 305065 - RNA, 22 nt, Artificial Sequence
  Synthetic
acauaucagguaugaaauacag

SEQ ID NO: 305066 - RNA, 23 nt, Artificial Sequence
  Synthetic
uacauaucagguaugaaauacag

SEQ ID NO: 305067 - RNA, 24 nt, Artificial Sequence
  Synthetic
uuacauaucagguaugaaauacag

SEQ ID NO: 305068 - RNA, 18 nt, Artificial Sequence
  Synthetic
guuagggaaacaauacag

SEQ ID NO: 305069 - RNA, 19 nt, Artificial Sequence
  Synthetic
aguuagggaaacaauacag

SEQ ID NO: 305070 - RNA, 20 nt, Artificial Sequence
  Synthetic
gaguuagggaaacaauacag

SEQ ID NO: 305071 - RNA, 21 nt, Artificial Sequence
  Synthetic
ggaguuagggaaacaauacag

SEQ ID NO: 305072 - RNA, 22 nt, Artificial Sequence
  Synthetic
uggaguuagggaaacaauacag

SEQ ID NO: 305073 - RNA, 23 nt, Artificial Sequence
  Synthetic
uuggaguuagggaaacaauacag

SEQ ID NO: 305074 - RNA, 24 nt, Artificial Sequence
  Synthetic
auuggaguuagggaaacaauacag

SEQ ID NO: 305075 - RNA, 18 nt, Artificial Sequence
  Synthetic
cggaaugagucaauacag

SEQ ID NO: 305076 - RNA, 19 nt, Artificial Sequence
  Synthetic
ucggaaugagucaauacag

SEQ ID NO: 305077 - RNA, 20 nt, Artificial Sequence
  Synthetic
uucggaaugagucaauacag

SEQ ID NO: 305078 - RNA, 21 nt, Artificial Sequence
  Synthetic
cuucggaaugagucaauacag

SEQ ID NO: 305079 - RNA, 22 nt, Artificial Sequence
  Synthetic
ucuucggaaugagucaauacag

SEQ ID NO: 305080 - RNA, 23 nt, Artificial Sequence
  Synthetic
gucuucggaaugagucaauacag

SEQ ID NO: 305081 - RNA, 24 nt, Artificial Sequence
  Synthetic
ugucuucggaaugagucaauacag

SEQ ID NO: 305082 - RNA, 18 nt, Artificial Sequence
  Synthetic
ccgaggaaacgaauacag

SEQ ID NO: 305083 - RNA, 19 nt, Artificial Sequence
  Synthetic
cccgaggaaacgaauacag

SEQ ID NO: 305084 - RNA, 20 nt, Artificial Sequence
  Synthetic
gcccgaggaaacgaauacag

SEQ ID NO: 305085 - RNA, 21 nt, Artificial Sequence
  Synthetic
agcccgaggaaacgaauacag

SEQ ID NO: 305086 - RNA, 22 nt, Artificial Sequence
  Synthetic
aagcccgaggaaacgaauacag

SEQ ID NO: 305087 - RNA, 23 nt, Artificial Sequence
  Synthetic
gaagcccgaggaaacgaauacag

SEQ ID NO: 305088 - RNA, 24 nt, Artificial Sequence
  Synthetic
agaagcccgaggaaacgaauacag

SEQ ID NO: 305089 - RNA, 18 nt, Artificial Sequence
  Synthetic
acacauggacacauacag

SEQ ID NO: 305090 - RNA, 19 nt, Artificial Sequence
  Synthetic
aacacauggacacauacag

SEQ ID NO: 305091 - RNA, 20 nt, Artificial Sequence
  Synthetic
gaacacauggacacauacag

SEQ ID NO: 305092 - RNA, 21 nt, Artificial Sequence
  Synthetic
agaacacauggacacauacag

SEQ ID NO: 305093 - RNA, 22 nt, Artificial Sequence
  Synthetic
gagaacacauggacacauacag

SEQ ID NO: 305094 - RNA, 23 nt, Artificial Sequence
  Synthetic
ugagaacacauggacacauacag

SEQ ID NO: 305095 - RNA, 24 nt, Artificial Sequence
  Synthetic
augagaacacauggacacauacag

SEQ ID NO: 305096 - RNA, 18 nt, Artificial Sequence
  Synthetic
cgugguguauccauacag

SEQ ID NO: 305097 - RNA, 19 nt, Artificial Sequence
  Synthetic
acgugguguauccauacag

SEQ ID NO: 305098 - RNA, 20 nt, Artificial Sequence
  Synthetic
aacgugguguauccauacag

SEQ ID NO: 305099 - RNA, 21 nt, Artificial Sequence
  Synthetic
aaacgugguguauccauacag

SEQ ID NO: 305100 - RNA, 22 nt, Artificial Sequence
  Synthetic
aaaacgugguguauccauacag

SEQ ID NO: 305101 - RNA, 23 nt, Artificial Sequence
  Synthetic
caaaacgugguguauccauacag

SEQ ID NO: 305102 - RNA, 24 nt, Artificial Sequence
  Synthetic
acaaaacgugguguauccauacag

SEQ ID NO: 305103 - RNA, 18 nt, Artificial Sequence
  Synthetic
acagacacccucauacag

SEQ ID NO: 305104 - RNA, 19 nt, Artificial Sequence
  Synthetic
gacagacacccucauacag

SEQ ID NO: 305105 - RNA, 20 nt, Artificial Sequence
  Synthetic
ugacagacacccucauacag

SEQ ID NO: 305106 - RNA, 21 nt, Artificial Sequence
  Synthetic
uugacagacacccucauacag

SEQ ID NO: 305107 - RNA, 22 nt, Artificial Sequence
  Synthetic
guugacagacacccucauacag

SEQ ID NO: 305108 - RNA, 23 nt, Artificial Sequence
  Synthetic
gguugacagacacccucauacag

SEQ ID NO: 305109 - RNA, 24 nt, Artificial Sequence
  Synthetic
ggguugacagacacccucauacag

SEQ ID NO: 305110 - RNA, 18 nt, Artificial Sequence
  Synthetic
guacaaauucucauacag

SEQ ID NO: 305111 - RNA, 19 nt, Artificial Sequence
  Synthetic
aguacaaauucucauacag

SEQ ID NO: 305112 - RNA, 20 nt, Artificial Sequence
  Synthetic
aaguacaaauucucauacag

SEQ ID NO: 305113 - RNA, 21 nt, Artificial Sequence
  Synthetic
aaaguacaaauucucauacag

SEQ ID NO: 305114 - RNA, 22 nt, Artificial Sequence
  Synthetic
caaaguacaaauucucauacag

SEQ ID NO: 305115 - RNA, 23 nt, Artificial Sequence
  Synthetic
ucaaaguacaaauucucauacag

SEQ ID NO: 305116 - RNA, 24 nt, Artificial Sequence
  Synthetic
aucaaaguacaaauucucauacag

SEQ ID NO: 305117 - RNA, 18 nt, Artificial Sequence
  Synthetic
ugccuugugaagauacag

SEQ ID NO: 305118 - RNA, 19 nt, Artificial Sequence
  Synthetic
cugccuugugaagauacag

SEQ ID NO: 305119 - RNA, 20 nt, Artificial Sequence
  Synthetic
ucugccuugugaagauacag

SEQ ID NO: 305120 - RNA, 21 nt, Artificial Sequence
  Synthetic
uucugccuugugaagauacag

SEQ ID NO: 305121 - RNA, 22 nt, Artificial Sequence
  Synthetic
cuucugccuugugaagauacag

SEQ ID NO: 305122 - RNA, 23 nt, Artificial Sequence
  Synthetic
ccuucugccuugugaagauacag

SEQ ID NO: 305123 - RNA, 24 nt, Artificial Sequence
  Synthetic
accuucugccuugugaagauacag

SEQ ID NO: 305124 - RNA, 18 nt, Artificial Sequence
  Synthetic
ugguagacaggacuacag

SEQ ID NO: 305125 - RNA, 19 nt, Artificial Sequence
  Synthetic
cugguagacaggacuacag

SEQ ID NO: 305126 - RNA, 20 nt, Artificial Sequence
  Synthetic
gcugguagacaggacuacag

SEQ ID NO: 305127 - RNA, 21 nt, Artificial Sequence
  Synthetic
agcugguagacaggacuacag

SEQ ID NO: 305128 - RNA, 22 nt, Artificial Sequence
  Synthetic
cagcugguagacaggacuacag

SEQ ID NO: 305129 - RNA, 23 nt, Artificial Sequence
  Synthetic
ucagcugguagacaggacuacag

SEQ ID NO: 305130 - RNA, 24 nt, Artificial Sequence
  Synthetic
cucagcugguagacaggacuacag

SEQ ID NO: 305131 - RNA, 18 nt, Artificial Sequence
  Synthetic
cuuggaggcuuacuacag

SEQ ID NO: 305132 - RNA, 19 nt, Artificial Sequence
  Synthetic
ucuuggaggcuuacuacag

SEQ ID NO: 305133 - RNA, 20 nt, Artificial Sequence
  Synthetic
aucuuggaggcuuacuacag

SEQ ID NO: 305134 - RNA, 21 nt, Artificial Sequence
  Synthetic
aaucuuggaggcuuacuacag

SEQ ID NO: 305135 - RNA, 22 nt, Artificial Sequence
  Synthetic
aaaucuuggaggcuuacuacag

SEQ ID NO: 305136 - RNA, 23 nt, Artificial Sequence
  Synthetic
caaaucuuggaggcuuacuacag

SEQ ID NO: 305137 - RNA, 24 nt, Artificial Sequence
  Synthetic
ccaaaucuuggaggcuuacuacag

SEQ ID NO: 305138 - RNA, 18 nt, Artificial Sequence
  Synthetic
uaagauuguuaccuacag

SEQ ID NO: 305139 - RNA, 19 nt, Artificial Sequence
  Synthetic
guaagauuguuaccuacag

SEQ ID NO: 305140 - RNA, 20 nt, Artificial Sequence
  Synthetic
aguaagauuguuaccuacag

SEQ ID NO: 305141 - RNA, 21 nt, Artificial Sequence
  Synthetic
gaguaagauuguuaccuacag

SEQ ID NO: 305142 - RNA, 22 nt, Artificial Sequence
  Synthetic
ggaguaagauuguuaccuacag

SEQ ID NO: 305143 - RNA, 23 nt, Artificial Sequence
  Synthetic
uggaguaagauuguuaccuacag

SEQ ID NO: 305144 - RNA, 24 nt, Artificial Sequence
  Synthetic
cuggaguaagauuguuaccuacag

SEQ ID NO: 305145 - RNA, 18 nt, Artificial Sequence
  Synthetic
aguagacucuuccuacag

SEQ ID NO: 305146 - RNA, 19 nt, Artificial Sequence
  Synthetic
aaguagacucuuccuacag

SEQ ID NO: 305147 - RNA, 20 nt, Artificial Sequence
  Synthetic
aaaguagacucuuccuacag

SEQ ID NO: 305148 - RNA, 21 nt, Artificial Sequence
  Synthetic
gaaaguagacucuuccuacag

SEQ ID NO: 305149 - RNA, 22 nt, Artificial Sequence
  Synthetic
agaaaguagacucuuccuacag

SEQ ID NO: 305150 - RNA, 23 nt, Artificial Sequence
  Synthetic
gagaaaguagacucuuccuacag

SEQ ID NO: 305151 - RNA, 24 nt, Artificial Sequence
  Synthetic
ugagaaaguagacucuuccuacag

SEQ ID NO: 305152 - RNA, 18 nt, Artificial Sequence
  Synthetic
auuguccccaaucuacag

SEQ ID NO: 305153 - RNA, 19 nt, Artificial Sequence
  Synthetic
cauuguccccaaucuacag

SEQ ID NO: 305154 - RNA, 20 nt, Artificial Sequence
  Synthetic
ucauuguccccaaucuacag

SEQ ID NO: 305155 - RNA, 21 nt, Artificial Sequence
  Synthetic
aucauuguccccaaucuacag

SEQ ID NO: 305156 - RNA, 22 nt, Artificial Sequence
  Synthetic
uaucauuguccccaaucuacag

SEQ ID NO: 305157 - RNA, 23 nt, Artificial Sequence
  Synthetic
cuaucauuguccccaaucuacag

SEQ ID NO: 305158 - RNA, 24 nt, Artificial Sequence
  Synthetic
gcuaucauuguccccaaucuacag

SEQ ID NO: 305159 - RNA, 18 nt, Artificial Sequence
  Synthetic
uauguacuuuaaguacag

SEQ ID NO: 305160 - RNA, 19 nt, Artificial Sequence
  Synthetic
auauguacuuuaaguacag

SEQ ID NO: 305161 - RNA, 20 nt, Artificial Sequence
  Synthetic
aauauguacuuuaaguacag

SEQ ID NO: 305162 - RNA, 21 nt, Artificial Sequence
  Synthetic
aaauauguacuuuaaguacag

SEQ ID NO: 305163 - RNA, 22 nt, Artificial Sequence
  Synthetic
uaaauauguacuuuaaguacag

SEQ ID NO: 305164 - RNA, 23 nt, Artificial Sequence
  Synthetic
auaaauauguacuuuaaguacag

SEQ ID NO: 305165 - RNA, 24 nt, Artificial Sequence
  Synthetic
aauaaauauguacuuuaaguacag

SEQ ID NO: 305166 - RNA, 18 nt, Artificial Sequence
  Synthetic
gcagggguuguaguacag

SEQ ID NO: 305167 - RNA, 19 nt, Artificial Sequence
  Synthetic
ugcagggguuguaguacag

SEQ ID NO: 305168 - RNA, 20 nt, Artificial Sequence
  Synthetic
gugcagggguuguaguacag

SEQ ID NO: 305169 - RNA, 21 nt, Artificial Sequence
  Synthetic
agugcagggguuguaguacag

SEQ ID NO: 305170 - RNA, 22 nt, Artificial Sequence
  Synthetic
gagugcagggguuguaguacag

SEQ ID NO: 305171 - RNA, 23 nt, Artificial Sequence
  Synthetic
ugagugcagggguuguaguacag

SEQ ID NO: 305172 - RNA, 24 nt, Artificial Sequence
  Synthetic
gugagugcagggguuguaguacag

SEQ ID NO: 305173 - RNA, 18 nt, Artificial Sequence
  Synthetic
aucguauauuuaguacag

SEQ ID NO: 305174 - RNA, 19 nt, Artificial Sequence
  Synthetic
caucguauauuuaguacag

SEQ ID NO: 305175 - RNA, 20 nt, Artificial Sequence
  Synthetic
ccaucguauauuuaguacag

SEQ ID NO: 305176 - RNA, 21 nt, Artificial Sequence
  Synthetic
accaucguauauuuaguacag

SEQ ID NO: 305177 - RNA, 22 nt, Artificial Sequence
  Synthetic
uaccaucguauauuuaguacag

SEQ ID NO: 305178 - RNA, 23 nt, Artificial Sequence
  Synthetic
auaccaucguauauuuaguacag

SEQ ID NO: 305179 - RNA, 24 nt, Artificial Sequence
  Synthetic
aauaccaucguauauuuaguacag

SEQ ID NO: 305180 - RNA, 18 nt, Artificial Sequence
  Synthetic
aauuaugauaauguacag

SEQ ID NO: 305181 - RNA, 19 nt, Artificial Sequence
  Synthetic
aaauuaugauaauguacag

SEQ ID NO: 305182 - RNA, 20 nt, Artificial Sequence
  Synthetic
uaaauuaugauaauguacag

SEQ ID NO: 305183 - RNA, 21 nt, Artificial Sequence
  Synthetic
auaaauuaugauaauguacag

SEQ ID NO: 305184 - RNA, 22 nt, Artificial Sequence
  Synthetic
aauaaauuaugauaauguacag

SEQ ID NO: 305185 - RNA, 23 nt, Artificial Sequence
  Synthetic
uaauaaauuaugauaauguacag

SEQ ID NO: 305186 - RNA, 24 nt, Artificial Sequence
  Synthetic
cuaauaaauuaugauaauguacag

SEQ ID NO: 305187 - RNA, 18 nt, Artificial Sequence
  Synthetic
gcauuaugagaauuacag

SEQ ID NO: 305188 - RNA, 19 nt, Artificial Sequence
  Synthetic
agcauuaugagaauuacag

SEQ ID NO: 305189 - RNA, 20 nt, Artificial Sequence
  Synthetic
uagcauuaugagaauuacag

SEQ ID NO: 305190 - RNA, 21 nt, Artificial Sequence
  Synthetic
auagcauuaugagaauuacag

SEQ ID NO: 305191 - RNA, 22 nt, Artificial Sequence
  Synthetic
aauagcauuaugagaauuacag

SEQ ID NO: 305192 - RNA, 23 nt, Artificial Sequence
  Synthetic
uaauagcauuaugagaauuacag

SEQ ID NO: 305193 - RNA, 24 nt, Artificial Sequence
  Synthetic
auaauagcauuaugagaauuacag

SEQ ID NO: 305194 - RNA, 18 nt, Artificial Sequence
  Synthetic
cagguaauggaauuacag

SEQ ID NO: 305195 - RNA, 19 nt, Artificial Sequence
  Synthetic
gcagguaauggaauuacag

SEQ ID NO: 305196 - RNA, 20 nt, Artificial Sequence
  Synthetic
agcagguaauggaauuacag

SEQ ID NO: 305197 - RNA, 21 nt, Artificial Sequence
  Synthetic
cagcagguaauggaauuacag

SEQ ID NO: 305198 - RNA, 22 nt, Artificial Sequence
  Synthetic
acagcagguaauggaauuacag

SEQ ID NO: 305199 - RNA, 23 nt, Artificial Sequence
  Synthetic
cacagcagguaauggaauuacag

SEQ ID NO: 305200 - RNA, 24 nt, Artificial Sequence
  Synthetic
gcacagcagguaauggaauuacag

SEQ ID NO: 305201 - RNA, 18 nt, Artificial Sequence
  Synthetic
cguuuccugucauuacag

SEQ ID NO: 305202 - RNA, 19 nt, Artificial Sequence
  Synthetic
acguuuccugucauuacag

SEQ ID NO: 305203 - RNA, 20 nt, Artificial Sequence
  Synthetic
cacguuuccugucauuacag

SEQ ID NO: 305204 - RNA, 21 nt, Artificial Sequence
  Synthetic
ccacguuuccugucauuacag

SEQ ID NO: 305205 - RNA, 22 nt, Artificial Sequence
  Synthetic
accacguuuccugucauuacag

SEQ ID NO: 305206 - RNA, 23 nt, Artificial Sequence
  Synthetic
gaccacguuuccugucauuacag

SEQ ID NO: 305207 - RNA, 24 nt, Artificial Sequence
  Synthetic
agaccacguuuccugucauuacag

SEQ ID NO: 305208 - RNA, 18 nt, Artificial Sequence
  Synthetic
uagguagaaagauuacag

SEQ ID NO: 305209 - RNA, 19 nt, Artificial Sequence
  Synthetic
cuagguagaaagauuacag

SEQ ID NO: 305210 - RNA, 20 nt, Artificial Sequence
  Synthetic
ucuagguagaaagauuacag

SEQ ID NO: 305211 - RNA, 21 nt, Artificial Sequence
  Synthetic
cucuagguagaaagauuacag

SEQ ID NO: 305212 - RNA, 22 nt, Artificial Sequence
  Synthetic
ccucuagguagaaagauuacag

SEQ ID NO: 305213 - RNA, 23 nt, Artificial Sequence
  Synthetic
accucuagguagaaagauuacag

SEQ ID NO: 305214 - RNA, 24 nt, Artificial Sequence
  Synthetic
uaccucuagguagaaagauuacag

SEQ ID NO: 305215 - RNA, 18 nt, Artificial Sequence
  Synthetic
gcaacacugugauuacag

SEQ ID NO: 305216 - RNA, 19 nt, Artificial Sequence
  Synthetic
agcaacacugugauuacag

SEQ ID NO: 305217 - RNA, 20 nt, Artificial Sequence
  Synthetic
uagcaacacugugauuacag

SEQ ID NO: 305218 - RNA, 21 nt, Artificial Sequence
  Synthetic
auagcaacacugugauuacag

SEQ ID NO: 305219 - RNA, 22 nt, Artificial Sequence
  Synthetic
uauagcaacacugugauuacag

SEQ ID NO: 305220 - RNA, 23 nt, Artificial Sequence
  Synthetic
uuauagcaacacugugauuacag

SEQ ID NO: 305221 - RNA, 24 nt, Artificial Sequence
  Synthetic
auuauagcaacacugugauuacag

SEQ ID NO: 305222 - RNA, 18 nt, Artificial Sequence
  Synthetic
ucuacuugacucuuacag

SEQ ID NO: 305223 - RNA, 19 nt, Artificial Sequence
  Synthetic
aucuacuugacucuuacag

SEQ ID NO: 305224 - RNA, 20 nt, Artificial Sequence
  Synthetic
aaucuacuugacucuuacag

SEQ ID NO: 305225 - RNA, 21 nt, Artificial Sequence
  Synthetic
gaaucuacuugacucuuacag

SEQ ID NO: 305226 - RNA, 22 nt, Artificial Sequence
  Synthetic
agaaucuacuugacucuuacag

SEQ ID NO: 305227 - RNA, 23 nt, Artificial Sequence
  Synthetic
uagaaucuacuugacucuuacag

SEQ ID NO: 305228 - RNA, 24 nt, Artificial Sequence
  Synthetic
uuagaaucuacuugacucuuacag

SEQ ID NO: 305229 - RNA, 18 nt, Artificial Sequence
  Synthetic
auaauagaucucuuacag

SEQ ID NO: 305230 - RNA, 19 nt, Artificial Sequence
  Synthetic
cauaauagaucucuuacag

SEQ ID NO: 305231 - RNA, 20 nt, Artificial Sequence
  Synthetic
ucauaauagaucucuuacag

SEQ ID NO: 305232 - RNA, 21 nt, Artificial Sequence
  Synthetic
cucauaauagaucucuuacag

SEQ ID NO: 305233 - RNA, 22 nt, Artificial Sequence
  Synthetic
ccucauaauagaucucuuacag

SEQ ID NO: 305234 - RNA, 23 nt, Artificial Sequence
  Synthetic
uccucauaauagaucucuuacag

SEQ ID NO: 305235 - RNA, 24 nt, Artificial Sequence
  Synthetic
auccucauaauagaucucuuacag

SEQ ID NO: 305236 - RNA, 18 nt, Artificial Sequence
  Synthetic
gcuaugacucuguuacag

SEQ ID NO: 305237 - RNA, 19 nt, Artificial Sequence
  Synthetic
ggcuaugacucuguuacag

SEQ ID NO: 305238 - RNA, 20 nt, Artificial Sequence
  Synthetic
gggcuaugacucuguuacag

SEQ ID NO: 305239 - RNA, 21 nt, Artificial Sequence
  Synthetic
ugggcuaugacucuguuacag

SEQ ID NO: 305240 - RNA, 22 nt, Artificial Sequence
  Synthetic
uugggcuaugacucuguuacag

SEQ ID NO: 305241 - RNA, 23 nt, Artificial Sequence
  Synthetic
auugggcuaugacucuguuacag

SEQ ID NO: 305242 - RNA, 24 nt, Artificial Sequence
  Synthetic
gauugggcuaugacucuguuacag

SEQ ID NO: 305243 - RNA, 18 nt, Artificial Sequence
  Synthetic
gccucaaagaauuuacag

SEQ ID NO: 305244 - RNA, 19 nt, Artificial Sequence
  Synthetic
ugccucaaagaauuuacag

SEQ ID NO: 305245 - RNA, 20 nt, Artificial Sequence
  Synthetic
augccucaaagaauuuacag

SEQ ID NO: 305246 - RNA, 21 nt, Artificial Sequence
  Synthetic
gaugccucaaagaauuuacag

SEQ ID NO: 305247 - RNA, 22 nt, Artificial Sequence
  Synthetic
ugaugccucaaagaauuuacag

SEQ ID NO: 305248 - RNA, 23 nt, Artificial Sequence
  Synthetic
augaugccucaaagaauuuacag

SEQ ID NO: 305249 - RNA, 24 nt, Artificial Sequence
  Synthetic
gaugaugccucaaagaauuuacag

SEQ ID NO: 305250 - RNA, 18 nt, Artificial Sequence
  Synthetic
uagauuguaauuuuacag

SEQ ID NO: 305251 - RNA, 19 nt, Artificial Sequence
  Synthetic
auagauuguaauuuuacag

SEQ ID NO: 305252 - RNA, 20 nt, Artificial Sequence
  Synthetic
uauagauuguaauuuuacag

SEQ ID NO: 305253 - RNA, 21 nt, Artificial Sequence
  Synthetic
auauagauuguaauuuuacag

SEQ ID NO: 305254 - RNA, 22 nt, Artificial Sequence
  Synthetic
aauauagauuguaauuuuacag

SEQ ID NO: 305255 - RNA, 23 nt, Artificial Sequence
  Synthetic
uaauauagauuguaauuuuacag

SEQ ID NO: 305256 - RNA, 24 nt, Artificial Sequence
  Synthetic
uuaauauagauuguaauuuuacag

SEQ ID NO: 305257 - RNA, 18 nt, Artificial Sequence
  Synthetic
cuccuuuuaauuuuacag

SEQ ID NO: 305258 - RNA, 19 nt, Artificial Sequence
  Synthetic
ucuccuuuuaauuuuacag

SEQ ID NO: 305259 - RNA, 20 nt, Artificial Sequence
  Synthetic
uucuccuuuuaauuuuacag

SEQ ID NO: 305260 - RNA, 21 nt, Artificial Sequence
  Synthetic
auucuccuuuuaauuuuacag

SEQ ID NO: 305261 - RNA, 22 nt, Artificial Sequence
  Synthetic
uauucuccuuuuaauuuuacag

SEQ ID NO: 305262 - RNA, 23 nt, Artificial Sequence
  Synthetic
cuauucuccuuuuaauuuuacag

SEQ ID NO: 305263 - RNA, 24 nt, Artificial Sequence
  Synthetic
gcuauucuccuuuuaauuuuacag

SEQ ID NO: 305264 - RNA, 18 nt, Artificial Sequence
  Synthetic
auuaugcccauuuuacag

SEQ ID NO: 305265 - RNA, 19 nt, Artificial Sequence
  Synthetic
uauuaugcccauuuuacag

SEQ ID NO: 305266 - RNA, 20 nt, Artificial Sequence
  Synthetic
uuauuaugcccauuuuacag

SEQ ID NO: 305267 - RNA, 21 nt, Artificial Sequence
  Synthetic
auuauuaugcccauuuuacag

SEQ ID NO: 305268 - RNA, 22 nt, Artificial Sequence
  Synthetic
cauuauuaugcccauuuuacag

SEQ ID NO: 305269 - RNA, 23 nt, Artificial Sequence
  Synthetic
acauuauuaugcccauuuuacag

SEQ ID NO: 305270 - RNA, 24 nt, Artificial Sequence
  Synthetic
aacauuauuaugcccauuuuacag

SEQ ID NO: 305271 - RNA, 18 nt, Artificial Sequence
  Synthetic
cugugcuccccaaaccag

SEQ ID NO: 305272 - RNA, 19 nt, Artificial Sequence
  Synthetic
ucugugcuccccaaaccag

SEQ ID NO: 305273 - RNA, 20 nt, Artificial Sequence
  Synthetic
aucugugcuccccaaaccag

SEQ ID NO: 305274 - RNA, 21 nt, Artificial Sequence
  Synthetic
gaucugugcuccccaaaccag

SEQ ID NO: 305275 - RNA, 22 nt, Artificial Sequence
  Synthetic
agaucugugcuccccaaaccag

SEQ ID NO: 305276 - RNA, 23 nt, Artificial Sequence
  Synthetic
uagaucugugcuccccaaaccag

SEQ ID NO: 305277 - RNA, 24 nt, Artificial Sequence
  Synthetic
guagaucugugcuccccaaaccag

SEQ ID NO: 305278 - RNA, 18 nt, Artificial Sequence
  Synthetic
gcuaaaugaauaaaccag

SEQ ID NO: 305279 - RNA, 19 nt, Artificial Sequence
  Synthetic
agcuaaaugaauaaaccag

SEQ ID NO: 305280 - RNA, 20 nt, Artificial Sequence
  Synthetic
aagcuaaaugaauaaaccag

SEQ ID NO: 305281 - RNA, 21 nt, Artificial Sequence
  Synthetic
aaagcuaaaugaauaaaccag

SEQ ID NO: 305282 - RNA, 22 nt, Artificial Sequence
  Synthetic
gaaagcuaaaugaauaaaccag

SEQ ID NO: 305283 - RNA, 23 nt, Artificial Sequence
  Synthetic
agaaagcuaaaugaauaaaccag

SEQ ID NO: 305284 - RNA, 24 nt, Artificial Sequence
  Synthetic
gagaaagcuaaaugaauaaaccag

SEQ ID NO: 305285 - RNA, 18 nt, Artificial Sequence
  Synthetic
guugaguaauuaaaccag

SEQ ID NO: 305286 - RNA, 19 nt, Artificial Sequence
  Synthetic
uguugaguaauuaaaccag

SEQ ID NO: 305287 - RNA, 20 nt, Artificial Sequence
  Synthetic
guguugaguaauuaaaccag

SEQ ID NO: 305288 - RNA, 21 nt, Artificial Sequence
  Synthetic
aguguugaguaauuaaaccag

SEQ ID NO: 305289 - RNA, 22 nt, Artificial Sequence
  Synthetic
aaguguugaguaauuaaaccag

SEQ ID NO: 305290 - RNA, 23 nt, Artificial Sequence
  Synthetic
aaaguguugaguaauuaaaccag

SEQ ID NO: 305291 - RNA, 24 nt, Artificial Sequence
  Synthetic
aaaaguguugaguaauuaaaccag

SEQ ID NO: 305292 - RNA, 18 nt, Artificial Sequence
  Synthetic
acuuuccugagcaaccag

SEQ ID NO: 305293 - RNA, 19 nt, Artificial Sequence
  Synthetic
uacuuuccugagcaaccag

SEQ ID NO: 305294 - RNA, 20 nt, Artificial Sequence
  Synthetic
uuacuuuccugagcaaccag

SEQ ID NO: 305295 - RNA, 21 nt, Artificial Sequence
  Synthetic
uuuacuuuccugagcaaccag

SEQ ID NO: 305296 - RNA, 22 nt, Artificial Sequence
  Synthetic
auuuacuuuccugagcaaccag

SEQ ID NO: 305297 - RNA, 23 nt, Artificial Sequence
  Synthetic
cauuuacuuuccugagcaaccag

SEQ ID NO: 305298 - RNA, 24 nt, Artificial Sequence
  Synthetic
ccauuuacuuuccugagcaaccag

SEQ ID NO: 305299 - RNA, 18 nt, Artificial Sequence
  Synthetic
ugaggaggaaagaaccag

SEQ ID NO: 305300 - RNA, 19 nt, Artificial Sequence
  Synthetic
augaggaggaaagaaccag

SEQ ID NO: 305301 - RNA, 20 nt, Artificial Sequence
  Synthetic
aaugaggaggaaagaaccag

SEQ ID NO: 305302 - RNA, 21 nt, Artificial Sequence
  Synthetic
aaaugaggaggaaagaaccag

SEQ ID NO: 305303 - RNA, 22 nt, Artificial Sequence
  Synthetic
uaaaugaggaggaaagaaccag

SEQ ID NO: 305304 - RNA, 23 nt, Artificial Sequence
  Synthetic
uuaaaugaggaggaaagaaccag

SEQ ID NO: 305305 - RNA, 24 nt, Artificial Sequence
  Synthetic
guuaaaugaggaggaaagaaccag

SEQ ID NO: 305306 - RNA, 18 nt, Artificial Sequence
  Synthetic
cuguauagauuuaaccag

SEQ ID NO: 305307 - RNA, 19 nt, Artificial Sequence
  Synthetic
ucuguauagauuuaaccag

SEQ ID NO: 305308 - RNA, 20 nt, Artificial Sequence
  Synthetic
uucuguauagauuuaaccag

SEQ ID NO: 305309 - RNA, 21 nt, Artificial Sequence
  Synthetic
cuucuguauagauuuaaccag

SEQ ID NO: 305310 - RNA, 22 nt, Artificial Sequence
  Synthetic
ucuucuguauagauuuaaccag

SEQ ID NO: 305311 - RNA, 23 nt, Artificial Sequence
  Synthetic
aucuucuguauagauuuaaccag

SEQ ID NO: 305312 - RNA, 24 nt, Artificial Sequence
  Synthetic
uaucuucuguauagauuuaaccag

SEQ ID NO: 305313 - RNA, 18 nt, Artificial Sequence
  Synthetic
gaaaauauggaacaccag

SEQ ID NO: 305314 - RNA, 19 nt, Artificial Sequence
  Synthetic
ugaaaauauggaacaccag

SEQ ID NO: 305315 - RNA, 20 nt, Artificial Sequence
  Synthetic
uugaaaauauggaacaccag

SEQ ID NO: 305316 - RNA, 21 nt, Artificial Sequence
  Synthetic
uuugaaaauauggaacaccag

SEQ ID NO: 305317 - RNA, 22 nt, Artificial Sequence
  Synthetic
cuuugaaaauauggaacaccag

SEQ ID NO: 305318 - RNA, 23 nt, Artificial Sequence
  Synthetic
gcuuugaaaauauggaacaccag

SEQ ID NO: 305319 - RNA, 24 nt, Artificial Sequence
  Synthetic
ugcuuugaaaauauggaacaccag

SEQ ID NO: 305320 - RNA, 18 nt, Artificial Sequence
  Synthetic
gggaacaucacacaccag

SEQ ID NO: 305321 - RNA, 19 nt, Artificial Sequence
  Synthetic
ggggaacaucacacaccag

SEQ ID NO: 305322 - RNA, 20 nt, Artificial Sequence
  Synthetic
aggggaacaucacacaccag

SEQ ID NO: 305323 - RNA, 21 nt, Artificial Sequence
  Synthetic
gaggggaacaucacacaccag

SEQ ID NO: 305324 - RNA, 22 nt, Artificial Sequence
  Synthetic
ggaggggaacaucacacaccag

SEQ ID NO: 305325 - RNA, 23 nt, Artificial Sequence
  Synthetic
gggaggggaacaucacacaccag

SEQ ID NO: 305326 - RNA, 24 nt, Artificial Sequence
  Synthetic
ggggaggggaacaucacacaccag

SEQ ID NO: 305327 - RNA, 18 nt, Artificial Sequence
  Synthetic
gacauccacucccaccag

SEQ ID NO: 305328 - RNA, 19 nt, Artificial Sequence
  Synthetic
ugacauccacucccaccag

SEQ ID NO: 305329 - RNA, 20 nt, Artificial Sequence
  Synthetic
cugacauccacucccaccag

SEQ ID NO: 305330 - RNA, 21 nt, Artificial Sequence
  Synthetic
acugacauccacucccaccag

SEQ ID NO: 305331 - RNA, 22 nt, Artificial Sequence
  Synthetic
aacugacauccacucccaccag

SEQ ID NO: 305332 - RNA, 23 nt, Artificial Sequence
  Synthetic
caacugacauccacucccaccag

SEQ ID NO: 305333 - RNA, 24 nt, Artificial Sequence
  Synthetic
acaacugacauccacucccaccag

SEQ ID NO: 305334 - RNA, 18 nt, Artificial Sequence
  Synthetic
gagcagggaauccaccag

SEQ ID NO: 305335 - RNA, 19 nt, Artificial Sequence
  Synthetic
ugagcagggaauccaccag

SEQ ID NO: 305336 - RNA, 20 nt, Artificial Sequence
  Synthetic
uugagcagggaauccaccag

SEQ ID NO: 305337 - RNA, 21 nt, Artificial Sequence
  Synthetic
uuugagcagggaauccaccag

SEQ ID NO: 305338 - RNA, 22 nt, Artificial Sequence
  Synthetic
uuuugagcagggaauccaccag

SEQ ID NO: 305339 - RNA, 23 nt, Artificial Sequence
  Synthetic
uuuuugagcagggaauccaccag

SEQ ID NO: 305340 - RNA, 24 nt, Artificial Sequence
  Synthetic
auuuuugagcagggaauccaccag

SEQ ID NO: 305341 - RNA, 18 nt, Artificial Sequence
  Synthetic
ucaagggagagagaccag

SEQ ID NO: 305342 - RNA, 19 nt, Artificial Sequence
  Synthetic
gucaagggagagagaccag

SEQ ID NO: 305343 - RNA, 20 nt, Artificial Sequence
  Synthetic
ugucaagggagagagaccag

SEQ ID NO: 305344 - RNA, 21 nt, Artificial Sequence
  Synthetic
augucaagggagagagaccag

SEQ ID NO: 305345 - RNA, 22 nt, Artificial Sequence
  Synthetic
caugucaagggagagagaccag

SEQ ID NO: 305346 - RNA, 23 nt, Artificial Sequence
  Synthetic
acaugucaagggagagagaccag

SEQ ID NO: 305347 - RNA, 24 nt, Artificial Sequence
  Synthetic
cacaugucaagggagagagaccag

SEQ ID NO: 305348 - RNA, 18 nt, Artificial Sequence
  Synthetic
ugucaagggagagaccag

SEQ ID NO: 305349 - RNA, 19 nt, Artificial Sequence
  Synthetic
gugucaagggagagaccag

SEQ ID NO: 305350 - RNA, 20 nt, Artificial Sequence
  Synthetic
ugugucaagggagagaccag

SEQ ID NO: 305351 - RNA, 21 nt, Artificial Sequence
  Synthetic
gugugucaagggagagaccag

SEQ ID NO: 305352 - RNA, 22 nt, Artificial Sequence
  Synthetic
cgugugucaagggagagaccag

SEQ ID NO: 305353 - RNA, 23 nt, Artificial Sequence
  Synthetic
ccgugugucaagggagagaccag

SEQ ID NO: 305354 - RNA, 24 nt, Artificial Sequence
  Synthetic
cccgugugucaagggagagaccag

SEQ ID NO: 305355 - RNA, 18 nt, Artificial Sequence
  Synthetic
auccuggggagagaccag

SEQ ID NO: 305356 - RNA, 19 nt, Artificial Sequence
  Synthetic
cauccuggggagagaccag

SEQ ID NO: 305357 - RNA, 20 nt, Artificial Sequence
  Synthetic
acauccuggggagagaccag

SEQ ID NO: 305358 - RNA, 21 nt, Artificial Sequence
  Synthetic
cacauccuggggagagaccag

SEQ ID NO: 305359 - RNA, 22 nt, Artificial Sequence
  Synthetic
acacauccuggggagagaccag

SEQ ID NO: 305360 - RNA, 23 nt, Artificial Sequence
  Synthetic
aacacauccuggggagagaccag

SEQ ID NO: 305361 - RNA, 24 nt, Artificial Sequence
  Synthetic
gaacacauccuggggagagaccag

SEQ ID NO: 305362 - RNA, 18 nt, Artificial Sequence
  Synthetic
aacagaaacuuggaccag

SEQ ID NO: 305363 - RNA, 19 nt, Artificial Sequence
  Synthetic
aaacagaaacuuggaccag

SEQ ID NO: 305364 - RNA, 20 nt, Artificial Sequence
  Synthetic
aaaacagaaacuuggaccag

SEQ ID NO: 305365 - RNA, 21 nt, Artificial Sequence
  Synthetic
aaaaacagaaacuuggaccag

SEQ ID NO: 305366 - RNA, 22 nt, Artificial Sequence
  Synthetic
caaaaacagaaacuuggaccag

SEQ ID NO: 305367 - RNA, 23 nt, Artificial Sequence
  Synthetic
acaaaaacagaaacuuggaccag

SEQ ID NO: 305368 - RNA, 24 nt, Artificial Sequence
  Synthetic
uacaaaaacagaaacuuggaccag

SEQ ID NO: 305369 - RNA, 18 nt, Artificial Sequence
  Synthetic
uugaggaaucaugaccag

SEQ ID NO: 305370 - RNA, 19 nt, Artificial Sequence
  Synthetic
guugaggaaucaugaccag

SEQ ID NO: 305371 - RNA, 20 nt, Artificial Sequence
  Synthetic
aguugaggaaucaugaccag

SEQ ID NO: 305372 - RNA, 21 nt, Artificial Sequence
  Synthetic
gaguugaggaaucaugaccag

SEQ ID NO: 305373 - RNA, 22 nt, Artificial Sequence
  Synthetic
ggaguugaggaaucaugaccag

SEQ ID NO: 305374 - RNA, 23 nt, Artificial Sequence
  Synthetic
gggaguugaggaaucaugaccag

SEQ ID NO: 305375 - RNA, 24 nt, Artificial Sequence
  Synthetic
ugggaguugaggaaucaugaccag

SEQ ID NO: 305376 - RNA, 18 nt, Artificial Sequence
  Synthetic
gaagccaguucugaccag

SEQ ID NO: 305377 - RNA, 19 nt, Artificial Sequence
  Synthetic
ggaagccaguucugaccag

SEQ ID NO: 305378 - RNA, 20 nt, Artificial Sequence
  Synthetic
uggaagccaguucugaccag

SEQ ID NO: 305379 - RNA, 21 nt, Artificial Sequence
  Synthetic
uuggaagccaguucugaccag

SEQ ID NO: 305380 - RNA, 22 nt, Artificial Sequence
  Synthetic
uuuggaagccaguucugaccag

SEQ ID NO: 305381 - RNA, 23 nt, Artificial Sequence
  Synthetic
auuuggaagccaguucugaccag

SEQ ID NO: 305382 - RNA, 24 nt, Artificial Sequence
  Synthetic
cauuuggaagccaguucugaccag

SEQ ID NO: 305383 - RNA, 18 nt, Artificial Sequence
  Synthetic
aggcauggcaaauaccag

SEQ ID NO: 305384 - RNA, 19 nt, Artificial Sequence
  Synthetic
uaggcauggcaaauaccag

SEQ ID NO: 305385 - RNA, 20 nt, Artificial Sequence
  Synthetic
auaggcauggcaaauaccag

SEQ ID NO: 305386 - RNA, 21 nt, Artificial Sequence
  Synthetic
uauaggcauggcaaauaccag

SEQ ID NO: 305387 - RNA, 22 nt, Artificial Sequence
  Synthetic
auauaggcauggcaaauaccag

SEQ ID NO: 305388 - RNA, 23 nt, Artificial Sequence
  Synthetic
aauauaggcauggcaaauaccag

SEQ ID NO: 305389 - RNA, 24 nt, Artificial Sequence
  Synthetic
aaauauaggcauggcaaauaccag

SEQ ID NO: 305390 - RNA, 18 nt, Artificial Sequence
  Synthetic
uaggagaagacauaccag

SEQ ID NO: 305391 - RNA, 19 nt, Artificial Sequence
  Synthetic
cuaggagaagacauaccag

SEQ ID NO: 305392 - RNA, 20 nt, Artificial Sequence
  Synthetic
ucuaggagaagacauaccag

SEQ ID NO: 305393 - RNA, 21 nt, Artificial Sequence
  Synthetic
uucuaggagaagacauaccag

SEQ ID NO: 305394 - RNA, 22 nt, Artificial Sequence
  Synthetic
auucuaggagaagacauaccag

SEQ ID NO: 305395 - RNA, 23 nt, Artificial Sequence
  Synthetic
uauucuaggagaagacauaccag

SEQ ID NO: 305396 - RNA, 24 nt, Artificial Sequence
  Synthetic
guauucuaggagaagacauaccag

SEQ ID NO: 305397 - RNA, 18 nt, Artificial Sequence
  Synthetic
guuggugcugccuaccag

SEQ ID NO: 305398 - RNA, 19 nt, Artificial Sequence
  Synthetic
aguuggugcugccuaccag

SEQ ID NO: 305399 - RNA, 20 nt, Artificial Sequence
  Synthetic
caguuggugcugccuaccag

SEQ ID NO: 305400 - RNA, 21 nt, Artificial Sequence
  Synthetic
gcaguuggugcugccuaccag

SEQ ID NO: 305401 - RNA, 22 nt, Artificial Sequence
  Synthetic
ggcaguuggugcugccuaccag

SEQ ID NO: 305402 - RNA, 23 nt, Artificial Sequence
  Synthetic
uggcaguuggugcugccuaccag

SEQ ID NO: 305403 - RNA, 24 nt, Artificial Sequence
  Synthetic
cuggcaguuggugcugccuaccag

SEQ ID NO: 305404 - RNA, 18 nt, Artificial Sequence
  Synthetic
gaucccaggaaguaccag

SEQ ID NO: 305405 - RNA, 19 nt, Artificial Sequence
  Synthetic
ugaucccaggaaguaccag

SEQ ID NO: 305406 - RNA, 20 nt, Artificial Sequence
  Synthetic
gugaucccaggaaguaccag

SEQ ID NO: 305407 - RNA, 21 nt, Artificial Sequence
  Synthetic
ugugaucccaggaaguaccag

SEQ ID NO: 305408 - RNA, 22 nt, Artificial Sequence
  Synthetic
augugaucccaggaaguaccag

SEQ ID NO: 305409 - RNA, 23 nt, Artificial Sequence
  Synthetic
aaugugaucccaggaaguaccag

SEQ ID NO: 305410 - RNA, 24 nt, Artificial Sequence
  Synthetic
uaaugugaucccaggaaguaccag

SEQ ID NO: 305411 - RNA, 18 nt, Artificial Sequence
  Synthetic
acuuuaauuucuuaccag

SEQ ID NO: 305412 - RNA, 19 nt, Artificial Sequence
  Synthetic
cacuuuaauuucuuaccag

SEQ ID NO: 305413 - RNA, 20 nt, Artificial Sequence
  Synthetic
acacuuuaauuucuuaccag

SEQ ID NO: 305414 - RNA, 21 nt, Artificial Sequence
  Synthetic
gacacuuuaauuucuuaccag

SEQ ID NO: 305415 - RNA, 22 nt, Artificial Sequence
  Synthetic
agacacuuuaauuucuuaccag

SEQ ID NO: 305416 - RNA, 23 nt, Artificial Sequence
  Synthetic
gagacacuuuaauuucuuaccag

SEQ ID NO: 305417 - RNA, 24 nt, Artificial Sequence
  Synthetic
ugagacacuuuaauuucuuaccag

SEQ ID NO: 305418 - RNA, 18 nt, Artificial Sequence
  Synthetic
cuguugucacaaacccag

SEQ ID NO: 305419 - RNA, 19 nt, Artificial Sequence
  Synthetic
ucuguugucacaaacccag

SEQ ID NO: 305420 - RNA, 20 nt, Artificial Sequence
  Synthetic
uucuguugucacaaacccag

SEQ ID NO: 305421 - RNA, 21 nt, Artificial Sequence
  Synthetic
auucuguugucacaaacccag

SEQ ID NO: 305422 - RNA, 22 nt, Artificial Sequence
  Synthetic
uauucuguugucacaaacccag

SEQ ID NO: 305423 - RNA, 23 nt, Artificial Sequence
  Synthetic
uuauucuguugucacaaacccag

SEQ ID NO: 305424 - RNA, 24 nt, Artificial Sequence
  Synthetic
uuuauucuguugucacaaacccag

SEQ ID NO: 305425 - RNA, 18 nt, Artificial Sequence
  Synthetic
gauauuuuacaaacccag

SEQ ID NO: 305426 - RNA, 19 nt, Artificial Sequence
  Synthetic
cgauauuuuacaaacccag

SEQ ID NO: 305427 - RNA, 20 nt, Artificial Sequence
  Synthetic
acgauauuuuacaaacccag

SEQ ID NO: 305428 - RNA, 21 nt, Artificial Sequence
  Synthetic
aacgauauuuuacaaacccag

SEQ ID NO: 305429 - RNA, 22 nt, Artificial Sequence
  Synthetic
caacgauauuuuacaaacccag

SEQ ID NO: 305430 - RNA, 23 nt, Artificial Sequence
  Synthetic
acaacgauauuuuacaaacccag

SEQ ID NO: 305431 - RNA, 24 nt, Artificial Sequence
  Synthetic
aacaacgauauuuuacaaacccag

SEQ ID NO: 305432 - RNA, 18 nt, Artificial Sequence
  Synthetic
agaaucgcuugaacccag

SEQ ID NO: 305433 - RNA, 19 nt, Artificial Sequence
  Synthetic
gagaaucgcuugaacccag

SEQ ID NO: 305434 - RNA, 20 nt, Artificial Sequence
  Synthetic
ggagaaucgcuugaacccag

SEQ ID NO: 305435 - RNA, 21 nt, Artificial Sequence
  Synthetic
aggagaaucgcuugaacccag

SEQ ID NO: 305436 - RNA, 22 nt, Artificial Sequence
  Synthetic
caggagaaucgcuugaacccag

SEQ ID NO: 305437 - RNA, 23 nt, Artificial Sequence
  Synthetic
gcaggagaaucgcuugaacccag

SEQ ID NO: 305438 - RNA, 24 nt, Artificial Sequence
  Synthetic
ggcaggagaaucgcuugaacccag

SEQ ID NO: 305439 - RNA, 18 nt, Artificial Sequence
  Synthetic
gguaguucuauaacccag

SEQ ID NO: 305440 - RNA, 19 nt, Artificial Sequence
  Synthetic
agguaguucuauaacccag

SEQ ID NO: 305441 - RNA, 20 nt, Artificial Sequence
  Synthetic
uagguaguucuauaacccag

SEQ ID NO: 305442 - RNA, 21 nt, Artificial Sequence
  Synthetic
auagguaguucuauaacccag

SEQ ID NO: 305443 - RNA, 22 nt, Artificial Sequence
  Synthetic
gauagguaguucuauaacccag

SEQ ID NO: 305444 - RNA, 23 nt, Artificial Sequence
  Synthetic
agauagguaguucuauaacccag

SEQ ID NO: 305445 - RNA, 24 nt, Artificial Sequence
  Synthetic
uagauagguaguucuauaacccag

SEQ ID NO: 305446 - RNA, 18 nt, Artificial Sequence
  Synthetic
ggggucuuaguaacccag

SEQ ID NO: 305447 - RNA, 19 nt, Artificial Sequence
  Synthetic
aggggucuuaguaacccag

SEQ ID NO: 305448 - RNA, 20 nt, Artificial Sequence
  Synthetic
uaggggucuuaguaacccag

SEQ ID NO: 305449 - RNA, 21 nt, Artificial Sequence
  Synthetic
auaggggucuuaguaacccag

SEQ ID NO: 305450 - RNA, 22 nt, Artificial Sequence
  Synthetic
uauaggggucuuaguaacccag

SEQ ID NO: 305451 - RNA, 23 nt, Artificial Sequence
  Synthetic
uuauaggggucuuaguaacccag

SEQ ID NO: 305452 - RNA, 24 nt, Artificial Sequence
  Synthetic
uuuauaggggucuuaguaacccag

SEQ ID NO: 305453 - RNA, 18 nt, Artificial Sequence
  Synthetic
aaagagaaagagacccag

SEQ ID NO: 305454 - RNA, 19 nt, Artificial Sequence
  Synthetic
gaaagagaaagagacccag

SEQ ID NO: 305455 - RNA, 20 nt, Artificial Sequence
  Synthetic
ugaaagagaaagagacccag

SEQ ID NO: 305456 - RNA, 21 nt, Artificial Sequence
  Synthetic
cugaaagagaaagagacccag

SEQ ID NO: 305457 - RNA, 22 nt, Artificial Sequence
  Synthetic
acugaaagagaaagagacccag

SEQ ID NO: 305458 - RNA, 23 nt, Artificial Sequence
  Synthetic
uacugaaagagaaagagacccag

SEQ ID NO: 305459 - RNA, 24 nt, Artificial Sequence
  Synthetic
guacugaaagagaaagagacccag

SEQ ID NO: 305460 - RNA, 18 nt, Artificial Sequence
  Synthetic
ucuucaguugagacccag

SEQ ID NO: 305461 - RNA, 19 nt, Artificial Sequence
  Synthetic
uucuucaguugagacccag

SEQ ID NO: 305462 - RNA, 20 nt, Artificial Sequence
  Synthetic
uuucuucaguugagacccag

SEQ ID NO: 305463 - RNA, 21 nt, Artificial Sequence
  Synthetic
cuuucuucaguugagacccag

SEQ ID NO: 305464 - RNA, 22 nt, Artificial Sequence
  Synthetic
ccuuucuucaguugagacccag

SEQ ID NO: 305465 - RNA, 23 nt, Artificial Sequence
  Synthetic
cccuuucuucaguugagacccag

SEQ ID NO: 305466 - RNA, 24 nt, Artificial Sequence
  Synthetic
acccuuucuucaguugagacccag

SEQ ID NO: 305467 - RNA, 18 nt, Artificial Sequence
  Synthetic
guugugggagggacccag

SEQ ID NO: 305468 - RNA, 19 nt, Artificial Sequence
  Synthetic
uguugugggagggacccag

SEQ ID NO: 305469 - RNA, 20 nt, Artificial Sequence
  Synthetic
guguugugggagggacccag

SEQ ID NO: 305470 - RNA, 21 nt, Artificial Sequence
  Synthetic
uguguugugggagggacccag

SEQ ID NO: 305471 - RNA, 22 nt, Artificial Sequence
  Synthetic
auguguugugggagggacccag

SEQ ID NO: 305472 - RNA, 23 nt, Artificial Sequence
  Synthetic
cauguguugugggagggacccag

SEQ ID NO: 305473 - RNA, 24 nt, Artificial Sequence
  Synthetic
ccauguguugugggagggacccag

SEQ ID NO: 305474 - RNA, 18 nt, Artificial Sequence
  Synthetic
ucucccaucaccccccag

SEQ ID NO: 305475 - RNA, 19 nt, Artificial Sequence
  Synthetic
gucucccaucaccccccag

SEQ ID NO: 305476 - RNA, 20 nt, Artificial Sequence
  Synthetic
ugucucccaucaccccccag

SEQ ID NO: 305477 - RNA, 21 nt, Artificial Sequence
  Synthetic
cugucucccaucaccccccag

SEQ ID NO: 305478 - RNA, 22 nt, Artificial Sequence
  Synthetic
acugucucccaucaccccccag

SEQ ID NO: 305479 - RNA, 23 nt, Artificial Sequence
  Synthetic
cacugucucccaucaccccccag

SEQ ID NO: 305480 - RNA, 24 nt, Artificial Sequence
  Synthetic
ucacugucucccaucaccccccag

SEQ ID NO: 305481 - RNA, 18 nt, Artificial Sequence
  Synthetic
ucaaacggguagccccag

SEQ ID NO: 305482 - RNA, 19 nt, Artificial Sequence
  Synthetic
uucaaacggguagccccag

SEQ ID NO: 305483 - RNA, 20 nt, Artificial Sequence
  Synthetic
uuucaaacggguagccccag

SEQ ID NO: 305484 - RNA, 21 nt, Artificial Sequence
  Synthetic
auuucaaacggguagccccag

SEQ ID NO: 305485 - RNA, 22 nt, Artificial Sequence
  Synthetic
gauuucaaacggguagccccag

SEQ ID NO: 305486 - RNA, 23 nt, Artificial Sequence
  Synthetic
ugauuucaaacggguagccccag

SEQ ID NO: 305487 - RNA, 24 nt, Artificial Sequence
  Synthetic
uugauuucaaacggguagccccag

SEQ ID NO: 305488 - RNA, 18 nt, Artificial Sequence
  Synthetic
uacuaggcagugccccag

SEQ ID NO: 305489 - RNA, 19 nt, Artificial Sequence
  Synthetic
cuacuaggcagugccccag

SEQ ID NO: 305490 - RNA, 20 nt, Artificial Sequence
  Synthetic
ucuacuaggcagugccccag

SEQ ID NO: 305491 - RNA, 21 nt, Artificial Sequence
  Synthetic
cucuacuaggcagugccccag

SEQ ID NO: 305492 - RNA, 22 nt, Artificial Sequence
  Synthetic
gcucuacuaggcagugccccag

SEQ ID NO: 305493 - RNA, 23 nt, Artificial Sequence
  Synthetic
agcucuacuaggcagugccccag

SEQ ID NO: 305494 - RNA, 24 nt, Artificial Sequence
  Synthetic
cagcucuacuaggcagugccccag

SEQ ID NO: 305495 - RNA, 18 nt, Artificial Sequence
  Synthetic
cgcuaggcagugccccag

SEQ ID NO: 305496 - RNA, 19 nt, Artificial Sequence
  Synthetic
ccgcuaggcagugccccag

SEQ ID NO: 305497 - RNA, 20 nt, Artificial Sequence
  Synthetic
uccgcuaggcagugccccag

SEQ ID NO: 305498 - RNA, 21 nt, Artificial Sequence
  Synthetic
cuccgcuaggcagugccccag

SEQ ID NO: 305499 - RNA, 22 nt, Artificial Sequence
  Synthetic
gcuccgcuaggcagugccccag

SEQ ID NO: 305500 - RNA, 23 nt, Artificial Sequence
  Synthetic
agcuccgcuaggcagugccccag

SEQ ID NO: 305501 - RNA, 24 nt, Artificial Sequence
  Synthetic
uagcuccgcuaggcagugccccag

SEQ ID NO: 305502 - RNA, 18 nt, Artificial Sequence
  Synthetic
gaacagaggcguccccag

SEQ ID NO: 305503 - RNA, 19 nt, Artificial Sequence
  Synthetic
ggaacagaggcguccccag

SEQ ID NO: 305504 - RNA, 20 nt, Artificial Sequence
  Synthetic
uggaacagaggcguccccag

SEQ ID NO: 305505 - RNA, 21 nt, Artificial Sequence
  Synthetic
uuggaacagaggcguccccag

SEQ ID NO: 305506 - RNA, 22 nt, Artificial Sequence
  Synthetic
uuuggaacagaggcguccccag

SEQ ID NO: 305507 - RNA, 23 nt, Artificial Sequence
  Synthetic
auuuggaacagaggcguccccag

SEQ ID NO: 305508 - RNA, 24 nt, Artificial Sequence
  Synthetic
gauuuggaacagaggcguccccag

SEQ ID NO: 305509 - RNA, 18 nt, Artificial Sequence
  Synthetic
ccauacaaauguccccag

SEQ ID NO: 305510 - RNA, 19 nt, Artificial Sequence
  Synthetic
cccauacaaauguccccag

SEQ ID NO: 305511 - RNA, 20 nt, Artificial Sequence
  Synthetic
ccccauacaaauguccccag

SEQ ID NO: 305512 - RNA, 21 nt, Artificial Sequence
  Synthetic
accccauacaaauguccccag

SEQ ID NO: 305513 - RNA, 22 nt, Artificial Sequence
  Synthetic
aaccccauacaaauguccccag

SEQ ID NO: 305514 - RNA, 23 nt, Artificial Sequence
  Synthetic
caaccccauacaaauguccccag

SEQ ID NO: 305515 - RNA, 24 nt, Artificial Sequence
  Synthetic
ucaaccccauacaaauguccccag

SEQ ID NO: 305516 - RNA, 18 nt, Artificial Sequence
  Synthetic
uaaauccacuguccccag

SEQ ID NO: 305517 - RNA, 19 nt, Artificial Sequence
  Synthetic
cuaaauccacuguccccag

SEQ ID NO: 305518 - RNA, 20 nt, Artificial Sequence
  Synthetic
ccuaaauccacuguccccag

SEQ ID NO: 305519 - RNA, 21 nt, Artificial Sequence
  Synthetic
uccuaaauccacuguccccag

SEQ ID NO: 305520 - RNA, 22 nt, Artificial Sequence
  Synthetic
auccuaaauccacuguccccag

SEQ ID NO: 305521 - RNA, 23 nt, Artificial Sequence
  Synthetic
gauccuaaauccacuguccccag

SEQ ID NO: 305522 - RNA, 24 nt, Artificial Sequence
  Synthetic
ugauccuaaauccacuguccccag

SEQ ID NO: 305523 - RNA, 18 nt, Artificial Sequence
  Synthetic
aaucaccauaaagcccag

SEQ ID NO: 305524 - RNA, 19 nt, Artificial Sequence
  Synthetic
aaaucaccauaaagcccag

SEQ ID NO: 305525 - RNA, 20 nt, Artificial Sequence
  Synthetic
aaaaucaccauaaagcccag

SEQ ID NO: 305526 - RNA, 21 nt, Artificial Sequence
  Synthetic
aaaaaucaccauaaagcccag

SEQ ID NO: 305527 - RNA, 22 nt, Artificial Sequence
  Synthetic
uaaaaaucaccauaaagcccag

SEQ ID NO: 305528 - RNA, 23 nt, Artificial Sequence
  Synthetic
auaaaaaucaccauaaagcccag

SEQ ID NO: 305529 - RNA, 24 nt, Artificial Sequence
  Synthetic
aauaaaaaucaccauaaagcccag

SEQ ID NO: 305530 - RNA, 18 nt, Artificial Sequence
  Synthetic
uaaguuauugaagcccag

SEQ ID NO: 305531 - RNA, 19 nt, Artificial Sequence
  Synthetic
uuaaguuauugaagcccag

SEQ ID NO: 305532 - RNA, 20 nt, Artificial Sequence
  Synthetic
guuaaguuauugaagcccag

SEQ ID NO: 305533 - RNA, 21 nt, Artificial Sequence
  Synthetic
cguuaaguuauugaagcccag

SEQ ID NO: 305534 - RNA, 22 nt, Artificial Sequence
  Synthetic
ucguuaaguuauugaagcccag

SEQ ID NO: 305535 - RNA, 23 nt, Artificial Sequence
  Synthetic
uucguuaaguuauugaagcccag

SEQ ID NO: 305536 - RNA, 24 nt, Artificial Sequence
  Synthetic
cuucguuaaguuauugaagcccag

SEQ ID NO: 305537 - RNA, 18 nt, Artificial Sequence
  Synthetic
uuggaaggagcagcccag

SEQ ID NO: 305538 - RNA, 19 nt, Artificial Sequence
  Synthetic
guuggaaggagcagcccag

SEQ ID NO: 305539 - RNA, 20 nt, Artificial Sequence
  Synthetic
gguuggaaggagcagcccag

SEQ ID NO: 305540 - RNA, 21 nt, Artificial Sequence
  Synthetic
agguuggaaggagcagcccag

SEQ ID NO: 305541 - RNA, 22 nt, Artificial Sequence
  Synthetic
gagguuggaaggagcagcccag

SEQ ID NO: 305542 - RNA, 23 nt, Artificial Sequence
  Synthetic
ugagguuggaaggagcagcccag

SEQ ID NO: 305543 - RNA, 24 nt, Artificial Sequence
  Synthetic
gugagguuggaaggagcagcccag

SEQ ID NO: 305544 - RNA, 18 nt, Artificial Sequence
  Synthetic
gugcaaagaugagcccag

SEQ ID NO: 305545 - RNA, 19 nt, Artificial Sequence
  Synthetic
agugcaaagaugagcccag

SEQ ID NO: 305546 - RNA, 20 nt, Artificial Sequence
  Synthetic
gagugcaaagaugagcccag

SEQ ID NO: 305547 - RNA, 21 nt, Artificial Sequence
  Synthetic
ggagugcaaagaugagcccag

SEQ ID NO: 305548 - RNA, 22 nt, Artificial Sequence
  Synthetic
gggagugcaaagaugagcccag

SEQ ID NO: 305549 - RNA, 23 nt, Artificial Sequence
  Synthetic
ggggagugcaaagaugagcccag

SEQ ID NO: 305550 - RNA, 24 nt, Artificial Sequence
  Synthetic
aggggagugcaaagaugagcccag

SEQ ID NO: 305551 - RNA, 18 nt, Artificial Sequence
  Synthetic
cauauaccucaggcccag

SEQ ID NO: 305552 - RNA, 19 nt, Artificial Sequence
  Synthetic
gcauauaccucaggcccag

SEQ ID NO: 305553 - RNA, 20 nt, Artificial Sequence
  Synthetic
agcauauaccucaggcccag

SEQ ID NO: 305554 - RNA, 21 nt, Artificial Sequence
  Synthetic
aagcauauaccucaggcccag

SEQ ID NO: 305555 - RNA, 22 nt, Artificial Sequence
  Synthetic
aaagcauauaccucaggcccag

SEQ ID NO: 305556 - RNA, 23 nt, Artificial Sequence
  Synthetic
uaaagcauauaccucaggcccag

SEQ ID NO: 305557 - RNA, 24 nt, Artificial Sequence
  Synthetic
auaaagcauauaccucaggcccag

SEQ ID NO: 305558 - RNA, 18 nt, Artificial Sequence
  Synthetic
gcacuuugggaggcccag

SEQ ID NO: 305559 - RNA, 19 nt, Artificial Sequence
  Synthetic
agcacuuugggaggcccag

SEQ ID NO: 305560 - RNA, 20 nt, Artificial Sequence
  Synthetic
cagcacuuugggaggcccag

SEQ ID NO: 305561 - RNA, 21 nt, Artificial Sequence
  Synthetic
ccagcacuuugggaggcccag

SEQ ID NO: 305562 - RNA, 22 nt, Artificial Sequence
  Synthetic
cccagcacuuugggaggcccag

SEQ ID NO: 305563 - RNA, 23 nt, Artificial Sequence
  Synthetic
ucccagcacuuugggaggcccag

SEQ ID NO: 305564 - RNA, 24 nt, Artificial Sequence
  Synthetic
aucccagcacuuugggaggcccag

SEQ ID NO: 305565 - RNA, 18 nt, Artificial Sequence
  Synthetic
augaaccaccaugcccag

SEQ ID NO: 305566 - RNA, 19 nt, Artificial Sequence
  Synthetic
caugaaccaccaugcccag

SEQ ID NO: 305567 - RNA, 20 nt, Artificial Sequence
  Synthetic
gcaugaaccaccaugcccag

SEQ ID NO: 305568 - RNA, 21 nt, Artificial Sequence
  Synthetic
ggcaugaaccaccaugcccag

SEQ ID NO: 305569 - RNA, 22 nt, Artificial Sequence
  Synthetic
aggcaugaaccaccaugcccag

SEQ ID NO: 305570 - RNA, 23 nt, Artificial Sequence
  Synthetic
caggcaugaaccaccaugcccag

SEQ ID NO: 305571 - RNA, 24 nt, Artificial Sequence
  Synthetic
acaggcaugaaccaccaugcccag

SEQ ID NO: 305572 - RNA, 18 nt, Artificial Sequence
  Synthetic
aacgauagugaugcccag

SEQ ID NO: 305573 - RNA, 19 nt, Artificial Sequence
  Synthetic
gaacgauagugaugcccag

SEQ ID NO: 305574 - RNA, 20 nt, Artificial Sequence
  Synthetic
ugaacgauagugaugcccag

SEQ ID NO: 305575 - RNA, 21 nt, Artificial Sequence
  Synthetic
augaacgauagugaugcccag

SEQ ID NO: 305576 - RNA, 22 nt, Artificial Sequence
  Synthetic
gaugaacgauagugaugcccag

SEQ ID NO: 305577 - RNA, 23 nt, Artificial Sequence
  Synthetic
ggaugaacgauagugaugcccag

SEQ ID NO: 305578 - RNA, 24 nt, Artificial Sequence
  Synthetic
aggaugaacgauagugaugcccag

SEQ ID NO: 305579 - RNA, 18 nt, Artificial Sequence
  Synthetic
cccuucuaggcugcccag

SEQ ID NO: 305580 - RNA, 19 nt, Artificial Sequence
  Synthetic
acccuucuaggcugcccag

SEQ ID NO: 305581 - RNA, 20 nt, Artificial Sequence
  Synthetic
uacccuucuaggcugcccag

SEQ ID NO: 305582 - RNA, 21 nt, Artificial Sequence
  Synthetic
cuacccuucuaggcugcccag

SEQ ID NO: 305583 - RNA, 22 nt, Artificial Sequence
  Synthetic
ucuacccuucuaggcugcccag

SEQ ID NO: 305584 - RNA, 23 nt, Artificial Sequence
  Synthetic
uucuacccuucuaggcugcccag

SEQ ID NO: 305585 - RNA, 24 nt, Artificial Sequence
  Synthetic
cuucuacccuucuaggcugcccag

SEQ ID NO: 305586 - RNA, 18 nt, Artificial Sequence
  Synthetic
aaugcuagaucugcccag

SEQ ID NO: 305587 - RNA, 19 nt, Artificial Sequence
  Synthetic
aaaugcuagaucugcccag

SEQ ID NO: 305588 - RNA, 20 nt, Artificial Sequence
  Synthetic
caaaugcuagaucugcccag

SEQ ID NO: 305589 - RNA, 21 nt, Artificial Sequence
  Synthetic
ucaaaugcuagaucugcccag

SEQ ID NO: 305590 - RNA, 22 nt, Artificial Sequence
  Synthetic
cucaaaugcuagaucugcccag

SEQ ID NO: 305591 - RNA, 23 nt, Artificial Sequence
  Synthetic
ucucaaaugcuagaucugcccag

SEQ ID NO: 305592 - RNA, 24 nt, Artificial Sequence
  Synthetic
aucucaaaugcuagaucugcccag

SEQ ID NO: 305593 - RNA, 18 nt, Artificial Sequence
  Synthetic
uacagcagcucugcccag

SEQ ID NO: 305594 - RNA, 19 nt, Artificial Sequence
  Synthetic
cuacagcagcucugcccag

SEQ ID NO: 305595 - RNA, 20 nt, Artificial Sequence
  Synthetic
acuacagcagcucugcccag

SEQ ID NO: 305596 - RNA, 21 nt, Artificial Sequence
  Synthetic
uacuacagcagcucugcccag

SEQ ID NO: 305597 - RNA, 22 nt, Artificial Sequence
  Synthetic
uuacuacagcagcucugcccag

SEQ ID NO: 305598 - RNA, 23 nt, Artificial Sequence
  Synthetic
uuuacuacagcagcucugcccag

SEQ ID NO: 305599 - RNA, 24 nt, Artificial Sequence
  Synthetic
uuuuacuacagcagcucugcccag

SEQ ID NO: 305600 - RNA, 18 nt, Artificial Sequence
  Synthetic
aguuuuuucucugcccag

SEQ ID NO: 305601 - RNA, 19 nt, Artificial Sequence
  Synthetic
gaguuuuuucucugcccag

SEQ ID NO: 305602 - RNA, 20 nt, Artificial Sequence
  Synthetic
ggaguuuuuucucugcccag

SEQ ID NO: 305603 - RNA, 21 nt, Artificial Sequence
  Synthetic
gggaguuuuuucucugcccag

SEQ ID NO: 305604 - RNA, 22 nt, Artificial Sequence
  Synthetic
ugggaguuuuuucucugcccag

SEQ ID NO: 305605 - RNA, 23 nt, Artificial Sequence
  Synthetic
uugggaguuuuuucucugcccag

SEQ ID NO: 305606 - RNA, 24 nt, Artificial Sequence
  Synthetic
guugggaguuuuuucucugcccag

SEQ ID NO: 305607 - RNA, 18 nt, Artificial Sequence
  Synthetic
gugagccaccgugcccag

SEQ ID NO: 305608 - RNA, 19 nt, Artificial Sequence
  Synthetic
ugugagccaccgugcccag

SEQ ID NO: 305609 - RNA, 20 nt, Artificial Sequence
  Synthetic
gugugagccaccgugcccag

SEQ ID NO: 305610 - RNA, 21 nt, Artificial Sequence
  Synthetic
ggugugagccaccgugcccag

SEQ ID NO: 305611 - RNA, 22 nt, Artificial Sequence
  Synthetic
aggugugagccaccgugcccag

SEQ ID NO: 305612 - RNA, 23 nt, Artificial Sequence
  Synthetic
caggugugagccaccgugcccag

SEQ ID NO: 305613 - RNA, 24 nt, Artificial Sequence
  Synthetic
acaggugugagccaccgugcccag

SEQ ID NO: 305614 - RNA, 18 nt, Artificial Sequence
  Synthetic
ugacagacauaaucccag

SEQ ID NO: 305615 - RNA, 19 nt, Artificial Sequence
  Synthetic
augacagacauaaucccag

SEQ ID NO: 305616 - RNA, 20 nt, Artificial Sequence
  Synthetic
caugacagacauaaucccag

SEQ ID NO: 305617 - RNA, 21 nt, Artificial Sequence
  Synthetic
acaugacagacauaaucccag

SEQ ID NO: 305618 - RNA, 22 nt, Artificial Sequence
  Synthetic
aacaugacagacauaaucccag

SEQ ID NO: 305619 - RNA, 23 nt, Artificial Sequence
  Synthetic
gaacaugacagacauaaucccag

SEQ ID NO: 305620 - RNA, 24 nt, Artificial Sequence
  Synthetic
ugaacaugacagacauaaucccag

SEQ ID NO: 305621 - RNA, 18 nt, Artificial Sequence
  Synthetic
aaaauauacuaaucccag

SEQ ID NO: 305622 - RNA, 19 nt, Artificial Sequence
  Synthetic
uaaaauauacuaaucccag

SEQ ID NO: 305623 - RNA, 20 nt, Artificial Sequence
  Synthetic
auaaaauauacuaaucccag

SEQ ID NO: 305624 - RNA, 21 nt, Artificial Sequence
  Synthetic
aauaaaauauacuaaucccag

SEQ ID NO: 305625 - RNA, 22 nt, Artificial Sequence
  Synthetic
gaauaaaauauacuaaucccag

SEQ ID NO: 305626 - RNA, 23 nt, Artificial Sequence
  Synthetic
ggaauaaaauauacuaaucccag

SEQ ID NO: 305627 - RNA, 24 nt, Artificial Sequence
  Synthetic
uggaauaaaauauacuaaucccag

SEQ ID NO: 305628 - RNA, 18 nt, Artificial Sequence
  Synthetic
guuacgacgugaucccag

SEQ ID NO: 305629 - RNA, 19 nt, Artificial Sequence
  Synthetic
gguuacgacgugaucccag

SEQ ID NO: 305630 - RNA, 20 nt, Artificial Sequence
  Synthetic
agguuacgacgugaucccag

SEQ ID NO: 305631 - RNA, 21 nt, Artificial Sequence
  Synthetic
cagguuacgacgugaucccag

SEQ ID NO: 305632 - RNA, 22 nt, Artificial Sequence
  Synthetic
ucagguuacgacgugaucccag

SEQ ID NO: 305633 - RNA, 23 nt, Artificial Sequence
  Synthetic
gucagguuacgacgugaucccag

SEQ ID NO: 305634 - RNA, 24 nt, Artificial Sequence
  Synthetic
ggucagguuacgacgugaucccag

SEQ ID NO: 305635 - RNA, 18 nt, Artificial Sequence
  Synthetic
cugggagacaccucccag

SEQ ID NO: 305636 - RNA, 19 nt, Artificial Sequence
  Synthetic
acugggagacaccucccag

SEQ ID NO: 305637 - RNA, 20 nt, Artificial Sequence
  Synthetic
gacugggagacaccucccag

SEQ ID NO: 305638 - RNA, 21 nt, Artificial Sequence
  Synthetic
ugacugggagacaccucccag

SEQ ID NO: 305639 - RNA, 22 nt, Artificial Sequence
  Synthetic
cugacugggagacaccucccag

SEQ ID NO: 305640 - RNA, 23 nt, Artificial Sequence
  Synthetic
ccugacugggagacaccucccag

SEQ ID NO: 305641 - RNA, 24 nt, Artificial Sequence
  Synthetic
uccugacugggagacaccucccag

SEQ ID NO: 305642 - RNA, 18 nt, Artificial Sequence
  Synthetic
augauggucagcucccag

SEQ ID NO: 305643 - RNA, 19 nt, Artificial Sequence
  Synthetic
aaugauggucagcucccag

SEQ ID NO: 305644 - RNA, 20 nt, Artificial Sequence
  Synthetic
uaaugauggucagcucccag

SEQ ID NO: 305645 - RNA, 21 nt, Artificial Sequence
  Synthetic
guaaugauggucagcucccag

SEQ ID NO: 305646 - RNA, 22 nt, Artificial Sequence
  Synthetic
gguaaugauggucagcucccag

SEQ ID NO: 305647 - RNA, 23 nt, Artificial Sequence
  Synthetic
agguaaugauggucagcucccag

SEQ ID NO: 305648 - RNA, 24 nt, Artificial Sequence
  Synthetic
aagguaaugauggucagcucccag

SEQ ID NO: 305649 - RNA, 18 nt, Artificial Sequence
  Synthetic
guuaggaaaaugucccag

SEQ ID NO: 305650 - RNA, 19 nt, Artificial Sequence
  Synthetic
aguuaggaaaaugucccag

SEQ ID NO: 305651 - RNA, 20 nt, Artificial Sequence
  Synthetic
aaguuaggaaaaugucccag

SEQ ID NO: 305652 - RNA, 21 nt, Artificial Sequence
  Synthetic
uaaguuaggaaaaugucccag

SEQ ID NO: 305653 - RNA, 22 nt, Artificial Sequence
  Synthetic
auaaguuaggaaaaugucccag

SEQ ID NO: 305654 - RNA, 23 nt, Artificial Sequence
  Synthetic
aauaaguuaggaaaaugucccag

SEQ ID NO: 305655 - RNA, 24 nt, Artificial Sequence
  Synthetic
aaauaaguuaggaaaaugucccag

SEQ ID NO: 305656 - RNA, 18 nt, Artificial Sequence
  Synthetic
uagauuggauugucccag

SEQ ID NO: 305657 - RNA, 19 nt, Artificial Sequence
  Synthetic
cuagauuggauugucccag

SEQ ID NO: 305658 - RNA, 20 nt, Artificial Sequence
  Synthetic
ccuagauuggauugucccag

SEQ ID NO: 305659 - RNA, 21 nt, Artificial Sequence
  Synthetic
accuagauuggauugucccag

SEQ ID NO: 305660 - RNA, 22 nt, Artificial Sequence
  Synthetic
caccuagauuggauugucccag

SEQ ID NO: 305661 - RNA, 23 nt, Artificial Sequence
  Synthetic
ucaccuagauuggauugucccag

SEQ ID NO: 305662 - RNA, 24 nt, Artificial Sequence
  Synthetic
cucaccuagauuggauugucccag

SEQ ID NO: 305663 - RNA, 18 nt, Artificial Sequence
  Synthetic
ggaauaugcaauucccag

SEQ ID NO: 305664 - RNA, 19 nt, Artificial Sequence
  Synthetic
aggaauaugcaauucccag

SEQ ID NO: 305665 - RNA, 20 nt, Artificial Sequence
  Synthetic
uaggaauaugcaauucccag

SEQ ID NO: 305666 - RNA, 21 nt, Artificial Sequence
  Synthetic
auaggaauaugcaauucccag

SEQ ID NO: 305667 - RNA, 22 nt, Artificial Sequence
  Synthetic
uauaggaauaugcaauucccag

SEQ ID NO: 305668 - RNA, 23 nt, Artificial Sequence
  Synthetic
guauaggaauaugcaauucccag

SEQ ID NO: 305669 - RNA, 24 nt, Artificial Sequence
  Synthetic
aguauaggaauaugcaauucccag

SEQ ID NO: 305670 - RNA, 18 nt, Artificial Sequence
  Synthetic
uucccuuuuccuucccag

SEQ ID NO: 305671 - RNA, 19 nt, Artificial Sequence
  Synthetic
uuucccuuuuccuucccag

SEQ ID NO: 305672 - RNA, 20 nt, Artificial Sequence
  Synthetic
cuuucccuuuuccuucccag

SEQ ID NO: 305673 - RNA, 21 nt, Artificial Sequence
  Synthetic
ccuuucccuuuuccuucccag

SEQ ID NO: 305674 - RNA, 22 nt, Artificial Sequence
  Synthetic
cccuuucccuuuuccuucccag

SEQ ID NO: 305675 - RNA, 23 nt, Artificial Sequence
  Synthetic
ucccuuucccuuuuccuucccag

SEQ ID NO: 305676 - RNA, 24 nt, Artificial Sequence
  Synthetic
cucccuuucccuuuuccuucccag

SEQ ID NO: 305677 - RNA, 18 nt, Artificial Sequence
  Synthetic
gggaaauguaguucccag

SEQ ID NO: 305678 - RNA, 19 nt, Artificial Sequence
  Synthetic
ugggaaauguaguucccag

SEQ ID NO: 305679 - RNA, 20 nt, Artificial Sequence
  Synthetic
cugggaaauguaguucccag

SEQ ID NO: 305680 - RNA, 21 nt, Artificial Sequence
  Synthetic
ucugggaaauguaguucccag

SEQ ID NO: 305681 - RNA, 22 nt, Artificial Sequence
  Synthetic
gucugggaaauguaguucccag

SEQ ID NO: 305682 - RNA, 23 nt, Artificial Sequence
  Synthetic
agucugggaaauguaguucccag

SEQ ID NO: 305683 - RNA, 24 nt, Artificial Sequence
  Synthetic
gagucugggaaauguaguucccag

SEQ ID NO: 305684 - RNA, 18 nt, Artificial Sequence
  Synthetic
gccauaacaauuucccag

SEQ ID NO: 305685 - RNA, 19 nt, Artificial Sequence
  Synthetic
ggccauaacaauuucccag

SEQ ID NO: 305686 - RNA, 20 nt, Artificial Sequence
  Synthetic
uggccauaacaauuucccag

SEQ ID NO: 305687 - RNA, 21 nt, Artificial Sequence
  Synthetic
auggccauaacaauuucccag

SEQ ID NO: 305688 - RNA, 22 nt, Artificial Sequence
  Synthetic
cauggccauaacaauuucccag

SEQ ID NO: 305689 - RNA, 23 nt, Artificial Sequence
  Synthetic
ucauggccauaacaauuucccag

SEQ ID NO: 305690 - RNA, 24 nt, Artificial Sequence
  Synthetic
uucauggccauaacaauuucccag

SEQ ID NO: 305691 - RNA, 18 nt, Artificial Sequence
  Synthetic
acaccagaccuuucccag

SEQ ID NO: 305692 - RNA, 19 nt, Artificial Sequence
  Synthetic
uacaccagaccuuucccag

SEQ ID NO: 305693 - RNA, 20 nt, Artificial Sequence
  Synthetic
guacaccagaccuuucccag

SEQ ID NO: 305694 - RNA, 21 nt, Artificial Sequence
  Synthetic
uguacaccagaccuuucccag

SEQ ID NO: 305695 - RNA, 22 nt, Artificial Sequence
  Synthetic
cuguacaccagaccuuucccag

SEQ ID NO: 305696 - RNA, 23 nt, Artificial Sequence
  Synthetic
gcuguacaccagaccuuucccag

SEQ ID NO: 305697 - RNA, 24 nt, Artificial Sequence
  Synthetic
agcuguacaccagaccuuucccag

SEQ ID NO: 305698 - RNA, 18 nt, Artificial Sequence
  Synthetic
aagcaaacaaaaagccag

SEQ ID NO: 305699 - RNA, 19 nt, Artificial Sequence
  Synthetic
aaagcaaacaaaaagccag

SEQ ID NO: 305700 - RNA, 20 nt, Artificial Sequence
  Synthetic
aaaagcaaacaaaaagccag

SEQ ID NO: 305701 - RNA, 21 nt, Artificial Sequence
  Synthetic
gaaaagcaaacaaaaagccag

SEQ ID NO: 305702 - RNA, 22 nt, Artificial Sequence
  Synthetic
ugaaaagcaaacaaaaagccag

SEQ ID NO: 305703 - RNA, 23 nt, Artificial Sequence
  Synthetic
uugaaaagcaaacaaaaagccag

SEQ ID NO: 305704 - RNA, 24 nt, Artificial Sequence
  Synthetic
uuugaaaagcaaacaaaaagccag

SEQ ID NO: 305705 - RNA, 18 nt, Artificial Sequence
  Synthetic
ccuccaucuaaaagccag

SEQ ID NO: 305706 - RNA, 19 nt, Artificial Sequence
  Synthetic
gccuccaucuaaaagccag

SEQ ID NO: 305707 - RNA, 20 nt, Artificial Sequence
  Synthetic
ggccuccaucuaaaagccag

SEQ ID NO: 305708 - RNA, 21 nt, Artificial Sequence
  Synthetic
uggccuccaucuaaaagccag

SEQ ID NO: 305709 - RNA, 22 nt, Artificial Sequence
  Synthetic
uuggccuccaucuaaaagccag

SEQ ID NO: 305710 - RNA, 23 nt, Artificial Sequence
  Synthetic
cuuggccuccaucuaaaagccag

SEQ ID NO: 305711 - RNA, 24 nt, Artificial Sequence
  Synthetic
ucuuggccuccaucuaaaagccag

SEQ ID NO: 305712 - RNA, 18 nt, Artificial Sequence
  Synthetic
ugaagcaaaacaagccag

SEQ ID NO: 305713 - RNA, 19 nt, Artificial Sequence
  Synthetic
cugaagcaaaacaagccag

SEQ ID NO: 305714 - RNA, 20 nt, Artificial Sequence
  Synthetic
gcugaagcaaaacaagccag

SEQ ID NO: 305715 - RNA, 21 nt, Artificial Sequence
  Synthetic
ggcugaagcaaaacaagccag

SEQ ID NO: 305716 - RNA, 22 nt, Artificial Sequence
  Synthetic
uggcugaagcaaaacaagccag

SEQ ID NO: 305717 - RNA, 23 nt, Artificial Sequence
  Synthetic
guggcugaagcaaaacaagccag

SEQ ID NO: 305718 - RNA, 24 nt, Artificial Sequence
  Synthetic
aguggcugaagcaaaacaagccag

SEQ ID NO: 305719 - RNA, 18 nt, Artificial Sequence
  Synthetic
auaauuaaaacaagccag

SEQ ID NO: 305720 - RNA, 19 nt, Artificial Sequence
  Synthetic
aauaauuaaaacaagccag

SEQ ID NO: 305721 - RNA, 20 nt, Artificial Sequence
  Synthetic
uaauaauuaaaacaagccag

SEQ ID NO: 305722 - RNA, 21 nt, Artificial Sequence
  Synthetic
cuaauaauuaaaacaagccag

SEQ ID NO: 305723 - RNA, 22 nt, Artificial Sequence
  Synthetic
ccuaauaauuaaaacaagccag

SEQ ID NO: 305724 - RNA, 23 nt, Artificial Sequence
  Synthetic
cccuaauaauuaaaacaagccag

SEQ ID NO: 305725 - RNA, 24 nt, Artificial Sequence
  Synthetic
acccuaauaauuaaaacaagccag

SEQ ID NO: 305726 - RNA, 18 nt, Artificial Sequence
  Synthetic
agaaacccuacaagccag

SEQ ID NO: 305727 - RNA, 19 nt, Artificial Sequence
  Synthetic
cagaaacccuacaagccag

SEQ ID NO: 305728 - RNA, 20 nt, Artificial Sequence
  Synthetic
gcagaaacccuacaagccag

SEQ ID NO: 305729 - RNA, 21 nt, Artificial Sequence
  Synthetic
ggcagaaacccuacaagccag

SEQ ID NO: 305730 - RNA, 22 nt, Artificial Sequence
  Synthetic
uggcagaaacccuacaagccag

SEQ ID NO: 305731 - RNA, 23 nt, Artificial Sequence
  Synthetic
uuggcagaaacccuacaagccag

SEQ ID NO: 305732 - RNA, 24 nt, Artificial Sequence
  Synthetic
uuuggcagaaacccuacaagccag

SEQ ID NO: 305733 - RNA, 18 nt, Artificial Sequence
  Synthetic
ggccagagcagaagccag

SEQ ID NO: 305734 - RNA, 19 nt, Artificial Sequence
  Synthetic
uggccagagcagaagccag

SEQ ID NO: 305735 - RNA, 20 nt, Artificial Sequence
  Synthetic
auggccagagcagaagccag

SEQ ID NO: 305736 - RNA, 21 nt, Artificial Sequence
  Synthetic
cauggccagagcagaagccag

SEQ ID NO: 305737 - RNA, 22 nt, Artificial Sequence
  Synthetic
acauggccagagcagaagccag

SEQ ID NO: 305738 - RNA, 23 nt, Artificial Sequence
  Synthetic
cacauggccagagcagaagccag

SEQ ID NO: 305739 - RNA, 24 nt, Artificial Sequence
  Synthetic
ucacauggccagagcagaagccag

SEQ ID NO: 305740 - RNA, 18 nt, Artificial Sequence
  Synthetic
ugcaagaauagaagccag

SEQ ID NO: 305741 - RNA, 19 nt, Artificial Sequence
  Synthetic
augcaagaauagaagccag

SEQ ID NO: 305742 - RNA, 20 nt, Artificial Sequence
  Synthetic
aaugcaagaauagaagccag

SEQ ID NO: 305743 - RNA, 21 nt, Artificial Sequence
  Synthetic
gaaugcaagaauagaagccag

SEQ ID NO: 305744 - RNA, 22 nt, Artificial Sequence
  Synthetic
cgaaugcaagaauagaagccag

SEQ ID NO: 305745 - RNA, 23 nt, Artificial Sequence
  Synthetic
ccgaaugcaagaauagaagccag

SEQ ID NO: 305746 - RNA, 24 nt, Artificial Sequence
  Synthetic
gccgaaugcaagaauagaagccag

SEQ ID NO: 305747 - RNA, 18 nt, Artificial Sequence
  Synthetic
cagggaaaacuaagccag

SEQ ID NO: 305748 - RNA, 19 nt, Artificial Sequence
  Synthetic
ucagggaaaacuaagccag

SEQ ID NO: 305749 - RNA, 20 nt, Artificial Sequence
  Synthetic
uucagggaaaacuaagccag

SEQ ID NO: 305750 - RNA, 21 nt, Artificial Sequence
  Synthetic
cuucagggaaaacuaagccag

SEQ ID NO: 305751 - RNA, 22 nt, Artificial Sequence
  Synthetic
ucuucagggaaaacuaagccag

SEQ ID NO: 305752 - RNA, 23 nt, Artificial Sequence
  Synthetic
uucuucagggaaaacuaagccag

SEQ ID NO: 305753 - RNA, 24 nt, Artificial Sequence
  Synthetic
uuucuucagggaaaacuaagccag

SEQ ID NO: 305754 - RNA, 18 nt, Artificial Sequence
  Synthetic
uguacuucacagagccag

SEQ ID NO: 305755 - RNA, 19 nt, Artificial Sequence
  Synthetic
auguacuucacagagccag

SEQ ID NO: 305756 - RNA, 20 nt, Artificial Sequence
  Synthetic
gauguacuucacagagccag

SEQ ID NO: 305757 - RNA, 21 nt, Artificial Sequence
  Synthetic
ugauguacuucacagagccag

SEQ ID NO: 305758 - RNA, 22 nt, Artificial Sequence
  Synthetic
gugauguacuucacagagccag

SEQ ID NO: 305759 - RNA, 23 nt, Artificial Sequence
  Synthetic
ugugauguacuucacagagccag

SEQ ID NO: 305760 - RNA, 24 nt, Artificial Sequence
  Synthetic
augugauguacuucacagagccag

SEQ ID NO: 305761 - RNA, 18 nt, Artificial Sequence
  Synthetic
gaaaggaacagacgccag

SEQ ID NO: 305762 - RNA, 19 nt, Artificial Sequence
  Synthetic
agaaaggaacagacgccag

SEQ ID NO: 305763 - RNA, 20 nt, Artificial Sequence
  Synthetic
cagaaaggaacagacgccag

SEQ ID NO: 305764 - RNA, 21 nt, Artificial Sequence
  Synthetic
gcagaaaggaacagacgccag

SEQ ID NO: 305765 - RNA, 22 nt, Artificial Sequence
  Synthetic
agcagaaaggaacagacgccag

SEQ ID NO: 305766 - RNA, 23 nt, Artificial Sequence
  Synthetic
gagcagaaaggaacagacgccag

SEQ ID NO: 305767 - RNA, 24 nt, Artificial Sequence
  Synthetic
ggagcagaaaggaacagacgccag

SEQ ID NO: 305768 - RNA, 18 nt, Artificial Sequence
  Synthetic
ggaaaggauuuccgccag

SEQ ID NO: 305769 - RNA, 19 nt, Artificial Sequence
  Synthetic
gggaaaggauuuccgccag

SEQ ID NO: 305770 - RNA, 20 nt, Artificial Sequence
  Synthetic
cgggaaaggauuuccgccag

SEQ ID NO: 305771 - RNA, 21 nt, Artificial Sequence
  Synthetic
acgggaaaggauuuccgccag

SEQ ID NO: 305772 - RNA, 22 nt, Artificial Sequence
  Synthetic
cacgggaaaggauuuccgccag

SEQ ID NO: 305773 - RNA, 23 nt, Artificial Sequence
  Synthetic
acacgggaaaggauuuccgccag

SEQ ID NO: 305774 - RNA, 24 nt, Artificial Sequence
  Synthetic
uacacgggaaaggauuuccgccag

SEQ ID NO: 305775 - RNA, 18 nt, Artificial Sequence
  Synthetic
uuacagggaaaaggccag

SEQ ID NO: 305776 - RNA, 19 nt, Artificial Sequence
  Synthetic
cuuacagggaaaaggccag

SEQ ID NO: 305777 - RNA, 20 nt, Artificial Sequence
  Synthetic
acuuacagggaaaaggccag

SEQ ID NO: 305778 - RNA, 21 nt, Artificial Sequence
  Synthetic
uacuuacagggaaaaggccag

SEQ ID NO: 305779 - RNA, 22 nt, Artificial Sequence
  Synthetic
auacuuacagggaaaaggccag

SEQ ID NO: 305780 - RNA, 23 nt, Artificial Sequence
  Synthetic
uauacuuacagggaaaaggccag

SEQ ID NO: 305781 - RNA, 24 nt, Artificial Sequence
  Synthetic
auauacuuacagggaaaaggccag

SEQ ID NO: 305782 - RNA, 18 nt, Artificial Sequence
  Synthetic
aggauguaagaaggccag

SEQ ID NO: 305783 - RNA, 19 nt, Artificial Sequence
  Synthetic
aaggauguaagaaggccag

SEQ ID NO: 305784 - RNA, 20 nt, Artificial Sequence
  Synthetic
gaaggauguaagaaggccag

SEQ ID NO: 305785 - RNA, 21 nt, Artificial Sequence
  Synthetic
agaaggauguaagaaggccag

SEQ ID NO: 305786 - RNA, 22 nt, Artificial Sequence
  Synthetic
aagaaggauguaagaaggccag

SEQ ID NO: 305787 - RNA, 23 nt, Artificial Sequence
  Synthetic
caagaaggauguaagaaggccag

SEQ ID NO: 305788 - RNA, 24 nt, Artificial Sequence
  Synthetic
ccaagaaggauguaagaaggccag

SEQ ID NO: 305789 - RNA, 18 nt, Artificial Sequence
  Synthetic
ccccuaaccacaggccag

SEQ ID NO: 305790 - RNA, 19 nt, Artificial Sequence
  Synthetic
cccccuaaccacaggccag

SEQ ID NO: 305791 - RNA, 20 nt, Artificial Sequence
  Synthetic
acccccuaaccacaggccag

SEQ ID NO: 305792 - RNA, 21 nt, Artificial Sequence
  Synthetic
aacccccuaaccacaggccag

SEQ ID NO: 305793 - RNA, 22 nt, Artificial Sequence
  Synthetic
aaacccccuaaccacaggccag

SEQ ID NO: 305794 - RNA, 23 nt, Artificial Sequence
  Synthetic
uaaacccccuaaccacaggccag

SEQ ID NO: 305795 - RNA, 24 nt, Artificial Sequence
  Synthetic
auaaacccccuaaccacaggccag

SEQ ID NO: 305796 - RNA, 18 nt, Artificial Sequence
  Synthetic
accugcugcucaggccag

SEQ ID NO: 305797 - RNA, 19 nt, Artificial Sequence
  Synthetic
caccugcugcucaggccag

SEQ ID NO: 305798 - RNA, 20 nt, Artificial Sequence
  Synthetic
gcaccugcugcucaggccag

SEQ ID NO: 305799 - RNA, 21 nt, Artificial Sequence
  Synthetic
agcaccugcugcucaggccag

SEQ ID NO: 305800 - RNA, 22 nt, Artificial Sequence
  Synthetic
cagcaccugcugcucaggccag

SEQ ID NO: 305801 - RNA, 23 nt, Artificial Sequence
  Synthetic
ccagcaccugcugcucaggccag

SEQ ID NO: 305802 - RNA, 24 nt, Artificial Sequence
  Synthetic
accagcaccugcugcucaggccag

SEQ ID NO: 305803 - RNA, 18 nt, Artificial Sequence
  Synthetic
gguagugggucaggccag

SEQ ID NO: 305804 - RNA, 19 nt, Artificial Sequence
  Synthetic
cgguagugggucaggccag

SEQ ID NO: 305805 - RNA, 20 nt, Artificial Sequence
  Synthetic
gcgguagugggucaggccag

SEQ ID NO: 305806 - RNA, 21 nt, Artificial Sequence
  Synthetic
agcgguagugggucaggccag

SEQ ID NO: 305807 - RNA, 22 nt, Artificial Sequence
  Synthetic
aagcgguagugggucaggccag

SEQ ID NO: 305808 - RNA, 23 nt, Artificial Sequence
  Synthetic
aaagcgguagugggucaggccag

SEQ ID NO: 305809 - RNA, 24 nt, Artificial Sequence
  Synthetic
gaaagcgguagugggucaggccag

SEQ ID NO: 305810 - RNA, 18 nt, Artificial Sequence
  Synthetic
agcuuuuggagaggccag

SEQ ID NO: 305811 - RNA, 19 nt, Artificial Sequence
  Synthetic
uagcuuuuggagaggccag

SEQ ID NO: 305812 - RNA, 20 nt, Artificial Sequence
  Synthetic
guagcuuuuggagaggccag

SEQ ID NO: 305813 - RNA, 21 nt, Artificial Sequence
  Synthetic
uguagcuuuuggagaggccag

SEQ ID NO: 305814 - RNA, 22 nt, Artificial Sequence
  Synthetic
guguagcuuuuggagaggccag

SEQ ID NO: 305815 - RNA, 23 nt, Artificial Sequence
  Synthetic
uguguagcuuuuggagaggccag

SEQ ID NO: 305816 - RNA, 24 nt, Artificial Sequence
  Synthetic
cuguguagcuuuuggagaggccag

SEQ ID NO: 305817 - RNA, 18 nt, Artificial Sequence
  Synthetic
gaaugauauagaggccag

SEQ ID NO: 305818 - RNA, 19 nt, Artificial Sequence
  Synthetic
ugaaugauauagaggccag

SEQ ID NO: 305819 - RNA, 20 nt, Artificial Sequence
  Synthetic
augaaugauauagaggccag

SEQ ID NO: 305820 - RNA, 21 nt, Artificial Sequence
  Synthetic
gaugaaugauauagaggccag

SEQ ID NO: 305821 - RNA, 22 nt, Artificial Sequence
  Synthetic
agaugaaugauauagaggccag

SEQ ID NO: 305822 - RNA, 23 nt, Artificial Sequence
  Synthetic
gagaugaaugauauagaggccag

SEQ ID NO: 305823 - RNA, 24 nt, Artificial Sequence
  Synthetic
agagaugaaugauauagaggccag

SEQ ID NO: 305824 - RNA, 18 nt, Artificial Sequence
  Synthetic
cucuucucuucuggccag

SEQ ID NO: 305825 - RNA, 19 nt, Artificial Sequence
  Synthetic
ucucuucucuucuggccag

SEQ ID NO: 305826 - RNA, 20 nt, Artificial Sequence
  Synthetic
cucucuucucuucuggccag

SEQ ID NO: 305827 - RNA, 21 nt, Artificial Sequence
  Synthetic
gcucucuucucuucuggccag

SEQ ID NO: 305828 - RNA, 22 nt, Artificial Sequence
  Synthetic
ugcucucuucucuucuggccag

SEQ ID NO: 305829 - RNA, 23 nt, Artificial Sequence
  Synthetic
uugcucucuucucuucuggccag

SEQ ID NO: 305830 - RNA, 24 nt, Artificial Sequence
  Synthetic
uuugcucucuucucuucuggccag

SEQ ID NO: 305831 - RNA, 18 nt, Artificial Sequence
  Synthetic
guuguuaaaauuggccag

SEQ ID NO: 305832 - RNA, 19 nt, Artificial Sequence
  Synthetic
gguuguuaaaauuggccag

SEQ ID NO: 305833 - RNA, 20 nt, Artificial Sequence
  Synthetic
agguuguuaaaauuggccag

SEQ ID NO: 305834 - RNA, 21 nt, Artificial Sequence
  Synthetic
gagguuguuaaaauuggccag

SEQ ID NO: 305835 - RNA, 22 nt, Artificial Sequence
  Synthetic
ggagguuguuaaaauuggccag

SEQ ID NO: 305836 - RNA, 23 nt, Artificial Sequence
  Synthetic
aggagguuguuaaaauuggccag

SEQ ID NO: 305837 - RNA, 24 nt, Artificial Sequence
  Synthetic
uaggagguuguuaaaauuggccag

SEQ ID NO: 305838 - RNA, 18 nt, Artificial Sequence
  Synthetic
aacuuacaaccaugccag

SEQ ID NO: 305839 - RNA, 19 nt, Artificial Sequence
  Synthetic
aaacuuacaaccaugccag

SEQ ID NO: 305840 - RNA, 20 nt, Artificial Sequence
  Synthetic
aaaacuuacaaccaugccag

SEQ ID NO: 305841 - RNA, 21 nt, Artificial Sequence
  Synthetic
gaaaacuuacaaccaugccag

SEQ ID NO: 305842 - RNA, 22 nt, Artificial Sequence
  Synthetic
ggaaaacuuacaaccaugccag

SEQ ID NO: 305843 - RNA, 23 nt, Artificial Sequence
  Synthetic
gggaaaacuuacaaccaugccag

SEQ ID NO: 305844 - RNA, 24 nt, Artificial Sequence
  Synthetic
agggaaaacuuacaaccaugccag

SEQ ID NO: 305845 - RNA, 18 nt, Artificial Sequence
  Synthetic
gaaggaaugggcugccag

SEQ ID NO: 305846 - RNA, 19 nt, Artificial Sequence
  Synthetic
agaaggaaugggcugccag

SEQ ID NO: 305847 - RNA, 20 nt, Artificial Sequence
  Synthetic
cagaaggaaugggcugccag

SEQ ID NO: 305848 - RNA, 21 nt, Artificial Sequence
  Synthetic
gcagaaggaaugggcugccag

SEQ ID NO: 305849 - RNA, 22 nt, Artificial Sequence
  Synthetic
agcagaaggaaugggcugccag

SEQ ID NO: 305850 - RNA, 23 nt, Artificial Sequence
  Synthetic
cagcagaaggaaugggcugccag

SEQ ID NO: 305851 - RNA, 24 nt, Artificial Sequence
  Synthetic
gcagcagaaggaaugggcugccag

SEQ ID NO: 305852 - RNA, 18 nt, Artificial Sequence
  Synthetic
agaaaaucuaagugccag

SEQ ID NO: 305853 - RNA, 19 nt, Artificial Sequence
  Synthetic
uagaaaaucuaagugccag

SEQ ID NO: 305854 - RNA, 20 nt, Artificial Sequence
  Synthetic
cuagaaaaucuaagugccag

SEQ ID NO: 305855 - RNA, 21 nt, Artificial Sequence
  Synthetic
acuagaaaaucuaagugccag

SEQ ID NO: 305856 - RNA, 22 nt, Artificial Sequence
  Synthetic
uacuagaaaaucuaagugccag

SEQ ID NO: 305857 - RNA, 23 nt, Artificial Sequence
  Synthetic
auacuagaaaaucuaagugccag

SEQ ID NO: 305858 - RNA, 24 nt, Artificial Sequence
  Synthetic
cauacuagaaaaucuaagugccag

SEQ ID NO: 305859 - RNA, 18 nt, Artificial Sequence
  Synthetic
gaaccuuuguugugccag

SEQ ID NO: 305860 - RNA, 19 nt, Artificial Sequence
  Synthetic
ugaaccuuuguugugccag

SEQ ID NO: 305861 - RNA, 20 nt, Artificial Sequence
  Synthetic
cugaaccuuuguugugccag

SEQ ID NO: 305862 - RNA, 21 nt, Artificial Sequence
  Synthetic
gcugaaccuuuguugugccag

SEQ ID NO: 305863 - RNA, 22 nt, Artificial Sequence
  Synthetic
ugcugaaccuuuguugugccag

SEQ ID NO: 305864 - RNA, 23 nt, Artificial Sequence
  Synthetic
uugcugaaccuuuguugugccag

SEQ ID NO: 305865 - RNA, 24 nt, Artificial Sequence
  Synthetic
cuugcugaaccuuuguugugccag

SEQ ID NO: 305866 - RNA, 18 nt, Artificial Sequence
  Synthetic
aauguuuguaguugccag

SEQ ID NO: 305867 - RNA, 19 nt, Artificial Sequence
  Synthetic
aaauguuuguaguugccag

SEQ ID NO: 305868 - RNA, 20 nt, Artificial Sequence
  Synthetic
aaaauguuuguaguugccag

SEQ ID NO: 305869 - RNA, 21 nt, Artificial Sequence
  Synthetic
gaaaauguuuguaguugccag

SEQ ID NO: 305870 - RNA, 22 nt, Artificial Sequence
  Synthetic
ggaaaauguuuguaguugccag

SEQ ID NO: 305871 - RNA, 23 nt, Artificial Sequence
  Synthetic
uggaaaauguuuguaguugccag

SEQ ID NO: 305872 - RNA, 24 nt, Artificial Sequence
  Synthetic
auggaaaauguuuguaguugccag

SEQ ID NO: 305873 - RNA, 18 nt, Artificial Sequence
  Synthetic
guaaguuaguguugccag

SEQ ID NO: 305874 - RNA, 19 nt, Artificial Sequence
  Synthetic
uguaaguuaguguugccag

SEQ ID NO: 305875 - RNA, 20 nt, Artificial Sequence
  Synthetic
uuguaaguuaguguugccag

SEQ ID NO: 305876 - RNA, 21 nt, Artificial Sequence
  Synthetic
auuguaaguuaguguugccag

SEQ ID NO: 305877 - RNA, 22 nt, Artificial Sequence
  Synthetic
aauuguaaguuaguguugccag

SEQ ID NO: 305878 - RNA, 23 nt, Artificial Sequence
  Synthetic
uaauuguaaguuaguguugccag

SEQ ID NO: 305879 - RNA, 24 nt, Artificial Sequence
  Synthetic
uuaauuguaaguuaguguugccag

SEQ ID NO: 305880 - RNA, 18 nt, Artificial Sequence
  Synthetic
cauaaguggcaaauccag

SEQ ID NO: 305881 - RNA, 19 nt, Artificial Sequence
  Synthetic
ucauaaguggcaaauccag

SEQ ID NO: 305882 - RNA, 20 nt, Artificial Sequence
  Synthetic
cucauaaguggcaaauccag

SEQ ID NO: 305883 - RNA, 21 nt, Artificial Sequence
  Synthetic
acucauaaguggcaaauccag

SEQ ID NO: 305884 - RNA, 22 nt, Artificial Sequence
  Synthetic
aacucauaaguggcaaauccag

SEQ ID NO: 305885 - RNA, 23 nt, Artificial Sequence
  Synthetic
aaacucauaaguggcaaauccag

SEQ ID NO: 305886 - RNA, 24 nt, Artificial Sequence
  Synthetic
uaaacucauaaguggcaaauccag

SEQ ID NO: 305887 - RNA, 18 nt, Artificial Sequence
  Synthetic
guguuuuuuaacauccag

SEQ ID NO: 305888 - RNA, 19 nt, Artificial Sequence
  Synthetic
aguguuuuuuaacauccag

SEQ ID NO: 305889 - RNA, 20 nt, Artificial Sequence
  Synthetic
gaguguuuuuuaacauccag

SEQ ID NO: 305890 - RNA, 21 nt, Artificial Sequence
  Synthetic
ugaguguuuuuuaacauccag

SEQ ID NO: 305891 - RNA, 22 nt, Artificial Sequence
  Synthetic
augaguguuuuuuaacauccag

SEQ ID NO: 305892 - RNA, 23 nt, Artificial Sequence
  Synthetic
uaugaguguuuuuuaacauccag

SEQ ID NO: 305893 - RNA, 24 nt, Artificial Sequence
  Synthetic
cuaugaguguuuuuuaacauccag

SEQ ID NO: 305894 - RNA, 18 nt, Artificial Sequence
  Synthetic
uaccaaagguccauccag

SEQ ID NO: 305895 - RNA, 19 nt, Artificial Sequence
  Synthetic
uuaccaaagguccauccag

SEQ ID NO: 305896 - RNA, 20 nt, Artificial Sequence
  Synthetic
uuuaccaaagguccauccag

SEQ ID NO: 305897 - RNA, 21 nt, Artificial Sequence
  Synthetic
auuuaccaaagguccauccag

SEQ ID NO: 305898 - RNA, 22 nt, Artificial Sequence
  Synthetic
aauuuaccaaagguccauccag

SEQ ID NO: 305899 - RNA, 23 nt, Artificial Sequence
  Synthetic
aaauuuaccaaagguccauccag

SEQ ID NO: 305900 - RNA, 24 nt, Artificial Sequence
  Synthetic
gaaauuuaccaaagguccauccag

SEQ ID NO: 305901 - RNA, 18 nt, Artificial Sequence
  Synthetic
ucucacucugucauccag

SEQ ID NO: 305902 - RNA, 19 nt, Artificial Sequence
  Synthetic
gucucacucugucauccag

SEQ ID NO: 305903 - RNA, 20 nt, Artificial Sequence
  Synthetic
ugucucacucugucauccag

SEQ ID NO: 305904 - RNA, 21 nt, Artificial Sequence
  Synthetic
cugucucacucugucauccag

SEQ ID NO: 305905 - RNA, 22 nt, Artificial Sequence
  Synthetic
acugucucacucugucauccag

SEQ ID NO: 305906 - RNA, 23 nt, Artificial Sequence
  Synthetic
aacugucucacucugucauccag

SEQ ID NO: 305907 - RNA, 24 nt, Artificial Sequence
  Synthetic
uaacugucucacucugucauccag

SEQ ID NO: 305908 - RNA, 18 nt, Artificial Sequence
  Synthetic
ucauucacauucauccag

SEQ ID NO: 305909 - RNA, 19 nt, Artificial Sequence
  Synthetic
uucauucacauucauccag

SEQ ID NO: 305910 - RNA, 20 nt, Artificial Sequence
  Synthetic
cuucauucacauucauccag

SEQ ID NO: 305911 - RNA, 21 nt, Artificial Sequence
  Synthetic
acuucauucacauucauccag

SEQ ID NO: 305912 - RNA, 22 nt, Artificial Sequence
  Synthetic
cacuucauucacauucauccag

SEQ ID NO: 305913 - RNA, 23 nt, Artificial Sequence
  Synthetic
acacuucauucacauucauccag

SEQ ID NO: 305914 - RNA, 24 nt, Artificial Sequence
  Synthetic
uacacuucauucacauucauccag

SEQ ID NO: 305915 - RNA, 18 nt, Artificial Sequence
  Synthetic
agauaagguaagauccag

SEQ ID NO: 305916 - RNA, 19 nt, Artificial Sequence
  Synthetic
gagauaagguaagauccag

SEQ ID NO: 305917 - RNA, 20 nt, Artificial Sequence
  Synthetic
ggagauaagguaagauccag

SEQ ID NO: 305918 - RNA, 21 nt, Artificial Sequence
  Synthetic
gggagauaagguaagauccag

SEQ ID NO: 305919 - RNA, 22 nt, Artificial Sequence
  Synthetic
ugggagauaagguaagauccag

SEQ ID NO: 305920 - RNA, 23 nt, Artificial Sequence
  Synthetic
cugggagauaagguaagauccag

SEQ ID NO: 305921 - RNA, 24 nt, Artificial Sequence
  Synthetic
ucugggagauaagguaagauccag

SEQ ID NO: 305922 - RNA, 18 nt, Artificial Sequence
  Synthetic
guugugggagggauccag

SEQ ID NO: 305923 - RNA, 19 nt, Artificial Sequence
  Synthetic
uguugugggagggauccag

SEQ ID NO: 305924 - RNA, 20 nt, Artificial Sequence
  Synthetic
uuguugugggagggauccag

SEQ ID NO: 305925 - RNA, 21 nt, Artificial Sequence
  Synthetic
cuuguugugggagggauccag

SEQ ID NO: 305926 - RNA, 22 nt, Artificial Sequence
  Synthetic
acuuguugugggagggauccag

SEQ ID NO: 305927 - RNA, 23 nt, Artificial Sequence
  Synthetic
uacuuguugugggagggauccag

SEQ ID NO: 305928 - RNA, 24 nt, Artificial Sequence
  Synthetic
cuacuuguugugggagggauccag

SEQ ID NO: 305929 - RNA, 18 nt, Artificial Sequence
  Synthetic
guuuugucuaguauccag

SEQ ID NO: 305930 - RNA, 19 nt, Artificial Sequence
  Synthetic
uguuuugucuaguauccag

SEQ ID NO: 305931 - RNA, 20 nt, Artificial Sequence
  Synthetic
uuguuuugucuaguauccag

SEQ ID NO: 305932 - RNA, 21 nt, Artificial Sequence
  Synthetic
uuuguuuugucuaguauccag

SEQ ID NO: 305933 - RNA, 22 nt, Artificial Sequence
  Synthetic
uuuuguuuugucuaguauccag

SEQ ID NO: 305934 - RNA, 23 nt, Artificial Sequence
  Synthetic
cuuuuguuuugucuaguauccag

SEQ ID NO: 305935 - RNA, 24 nt, Artificial Sequence
  Synthetic
acuuuuguuuugucuaguauccag

SEQ ID NO: 305936 - RNA, 18 nt, Artificial Sequence
  Synthetic
guguggagaauuauccag

SEQ ID NO: 305937 - RNA, 19 nt, Artificial Sequence
  Synthetic
uguguggagaauuauccag

SEQ ID NO: 305938 - RNA, 20 nt, Artificial Sequence
  Synthetic
uuguguggagaauuauccag

SEQ ID NO: 305939 - RNA, 21 nt, Artificial Sequence
  Synthetic
cuuguguggagaauuauccag

SEQ ID NO: 305940 - RNA, 22 nt, Artificial Sequence
  Synthetic
ucuuguguggagaauuauccag

SEQ ID NO: 305941 - RNA, 23 nt, Artificial Sequence
  Synthetic
cucuuguguggagaauuauccag

SEQ ID NO: 305942 - RNA, 24 nt, Artificial Sequence
  Synthetic
gcucuuguguggagaauuauccag

SEQ ID NO: 305943 - RNA, 18 nt, Artificial Sequence
  Synthetic
augcacguuauuauccag

SEQ ID NO: 305944 - RNA, 19 nt, Artificial Sequence
  Synthetic
aaugcacguuauuauccag

SEQ ID NO: 305945 - RNA, 20 nt, Artificial Sequence
  Synthetic
aaaugcacguuauuauccag

SEQ ID NO: 305946 - RNA, 21 nt, Artificial Sequence
  Synthetic
gaaaugcacguuauuauccag

SEQ ID NO: 305947 - RNA, 22 nt, Artificial Sequence
  Synthetic
agaaaugcacguuauuauccag

SEQ ID NO: 305948 - RNA, 23 nt, Artificial Sequence
  Synthetic
uagaaaugcacguuauuauccag

SEQ ID NO: 305949 - RNA, 24 nt, Artificial Sequence
  Synthetic
cuagaaaugcacguuauuauccag

SEQ ID NO: 305950 - RNA, 18 nt, Artificial Sequence
  Synthetic
cuucagguuauuauccag

SEQ ID NO: 305951 - RNA, 19 nt, Artificial Sequence
  Synthetic
ucuucagguuauuauccag

SEQ ID NO: 305952 - RNA, 20 nt, Artificial Sequence
  Synthetic
cucuucagguuauuauccag

SEQ ID NO: 305953 - RNA, 21 nt, Artificial Sequence
  Synthetic
acucuucagguuauuauccag

SEQ ID NO: 305954 - RNA, 22 nt, Artificial Sequence
  Synthetic
cacucuucagguuauuauccag

SEQ ID NO: 305955 - RNA, 23 nt, Artificial Sequence
  Synthetic
acacucuucagguuauuauccag

SEQ ID NO: 305956 - RNA, 24 nt, Artificial Sequence
  Synthetic
aacacucuucagguuauuauccag

SEQ ID NO: 305957 - RNA, 18 nt, Artificial Sequence
  Synthetic
cgcaccacugcacuccag

SEQ ID NO: 305958 - RNA, 19 nt, Artificial Sequence
  Synthetic
ucgcaccacugcacuccag

SEQ ID NO: 305959 - RNA, 20 nt, Artificial Sequence
  Synthetic
aucgcaccacugcacuccag

SEQ ID NO: 305960 - RNA, 21 nt, Artificial Sequence
  Synthetic
gaucgcaccacugcacuccag

SEQ ID NO: 305961 - RNA, 22 nt, Artificial Sequence
  Synthetic
agaucgcaccacugcacuccag

SEQ ID NO: 305962 - RNA, 23 nt, Artificial Sequence
  Synthetic
gagaucgcaccacugcacuccag

SEQ ID NO: 305963 - RNA, 24 nt, Artificial Sequence
  Synthetic
cgagaucgcaccacugcacuccag

SEQ ID NO: 305964 - RNA, 18 nt, Artificial Sequence
  Synthetic
cacaccauugcacuccag

SEQ ID NO: 305965 - RNA, 19 nt, Artificial Sequence
  Synthetic
ucacaccauugcacuccag

SEQ ID NO: 305966 - RNA, 20 nt, Artificial Sequence
  Synthetic
aucacaccauugcacuccag

SEQ ID NO: 305967 - RNA, 21 nt, Artificial Sequence
  Synthetic
gaucacaccauugcacuccag

SEQ ID NO: 305968 - RNA, 22 nt, Artificial Sequence
  Synthetic
agaucacaccauugcacuccag

SEQ ID NO: 305969 - RNA, 23 nt, Artificial Sequence
  Synthetic
aagaucacaccauugcacuccag

SEQ ID NO: 305970 - RNA, 24 nt, Artificial Sequence
  Synthetic
gaagaucacaccauugcacuccag

SEQ ID NO: 305971 - RNA, 18 nt, Artificial Sequence
  Synthetic
cgcaccauugcacuccag

SEQ ID NO: 305972 - RNA, 19 nt, Artificial Sequence
  Synthetic
ucgcaccauugcacuccag

SEQ ID NO: 305973 - RNA, 20 nt, Artificial Sequence
  Synthetic
aucgcaccauugcacuccag

SEQ ID NO: 305974 - RNA, 21 nt, Artificial Sequence
  Synthetic
gaucgcaccauugcacuccag

SEQ ID NO: 305975 - RNA, 22 nt, Artificial Sequence
  Synthetic
agaucgcaccauugcacuccag

SEQ ID NO: 305976 - RNA, 23 nt, Artificial Sequence
  Synthetic
cagaucgcaccauugcacuccag

SEQ ID NO: 305977 - RNA, 24 nt, Artificial Sequence
  Synthetic
ccagaucgcaccauugcacuccag

SEQ ID NO: 305978 - RNA, 18 nt, Artificial Sequence
  Synthetic
ugggugcaucgacuccag

SEQ ID NO: 305979 - RNA, 19 nt, Artificial Sequence
  Synthetic
gugggugcaucgacuccag

SEQ ID NO: 305980 - RNA, 20 nt, Artificial Sequence
  Synthetic
ugugggugcaucgacuccag

SEQ ID NO: 305981 - RNA, 21 nt, Artificial Sequence
  Synthetic
gugugggugcaucgacuccag

SEQ ID NO: 305982 - RNA, 22 nt, Artificial Sequence
  Synthetic
agugugggugcaucgacuccag

SEQ ID NO: 305983 - RNA, 23 nt, Artificial Sequence
  Synthetic
uagugugggugcaucgacuccag

SEQ ID NO: 305984 - RNA, 24 nt, Artificial Sequence
  Synthetic
guagugugggugcaucgacuccag

SEQ ID NO: 305985 - RNA, 18 nt, Artificial Sequence
  Synthetic
ggcgcuagagaccuccag

SEQ ID NO: 305986 - RNA, 19 nt, Artificial Sequence
  Synthetic
uggcgcuagagaccuccag

SEQ ID NO: 305987 - RNA, 20 nt, Artificial Sequence
  Synthetic
auggcgcuagagaccuccag

SEQ ID NO: 305988 - RNA, 21 nt, Artificial Sequence
  Synthetic
cauggcgcuagagaccuccag

SEQ ID NO: 305989 - RNA, 22 nt, Artificial Sequence
  Synthetic
ccauggcgcuagagaccuccag

SEQ ID NO: 305990 - RNA, 23 nt, Artificial Sequence
  Synthetic
gccauggcgcuagagaccuccag

SEQ ID NO: 305991 - RNA, 24 nt, Artificial Sequence
  Synthetic
agccauggcgcuagagaccuccag

SEQ ID NO: 305992 - RNA, 18 nt, Artificial Sequence
  Synthetic
gggaucccaggccuccag

SEQ ID NO: 305993 - RNA, 19 nt, Artificial Sequence
  Synthetic
ugggaucccaggccuccag

SEQ ID NO: 305994 - RNA, 20 nt, Artificial Sequence
  Synthetic
uugggaucccaggccuccag

SEQ ID NO: 305995 - RNA, 21 nt, Artificial Sequence
  Synthetic
uuugggaucccaggccuccag

SEQ ID NO: 305996 - RNA, 22 nt, Artificial Sequence
  Synthetic
cuuugggaucccaggccuccag

SEQ ID NO: 305997 - RNA, 23 nt, Artificial Sequence
  Synthetic
gcuuugggaucccaggccuccag

SEQ ID NO: 305998 - RNA, 24 nt, Artificial Sequence
  Synthetic
agcuuugggaucccaggccuccag

SEQ ID NO: 305999 - RNA, 18 nt, Artificial Sequence
  Synthetic
gggaacggaggccuccag

SEQ ID NO: 306000 - RNA, 19 nt, Artificial Sequence
  Synthetic
ugggaacggaggccuccag

SEQ ID NO: 306001 - RNA, 20 nt, Artificial Sequence
  Synthetic
uugggaacggaggccuccag

SEQ ID NO: 306002 - RNA, 21 nt, Artificial Sequence
  Synthetic
cuugggaacggaggccuccag

SEQ ID NO: 306003 - RNA, 22 nt, Artificial Sequence
  Synthetic
gcuugggaacggaggccuccag

SEQ ID NO: 306004 - RNA, 23 nt, Artificial Sequence
  Synthetic
ugcuugggaacggaggccuccag

SEQ ID NO: 306005 - RNA, 24 nt, Artificial Sequence
  Synthetic
augcuugggaacggaggccuccag

SEQ ID NO: 306006 - RNA, 18 nt, Artificial Sequence
  Synthetic
aauccauucauccuccag

SEQ ID NO: 306007 - RNA, 19 nt, Artificial Sequence
  Synthetic
caauccauucauccuccag

SEQ ID NO: 306008 - RNA, 20 nt, Artificial Sequence
  Synthetic
ccaauccauucauccuccag

SEQ ID NO: 306009 - RNA, 21 nt, Artificial Sequence
  Synthetic
uccaauccauucauccuccag

SEQ ID NO: 306010 - RNA, 22 nt, Artificial Sequence
  Synthetic
cuccaauccauucauccuccag

SEQ ID NO: 306011 - RNA, 23 nt, Artificial Sequence
  Synthetic
ccuccaauccauucauccuccag

SEQ ID NO: 306012 - RNA, 24 nt, Artificial Sequence
  Synthetic
uccuccaauccauucauccuccag

SEQ ID NO: 306013 - RNA, 18 nt, Artificial Sequence
  Synthetic
ucuuaaggcuuccuccag

SEQ ID NO: 306014 - RNA, 19 nt, Artificial Sequence
  Synthetic
uucuuaaggcuuccuccag

SEQ ID NO: 306015 - RNA, 20 nt, Artificial Sequence
  Synthetic
cuucuuaaggcuuccuccag

SEQ ID NO: 306016 - RNA, 21 nt, Artificial Sequence
  Synthetic
ucuucuuaaggcuuccuccag

SEQ ID NO: 306017 - RNA, 22 nt, Artificial Sequence
  Synthetic
aucuucuuaaggcuuccuccag

SEQ ID NO: 306018 - RNA, 23 nt, Artificial Sequence
  Synthetic
aaucuucuuaaggcuuccuccag

SEQ ID NO: 306019 - RNA, 24 nt, Artificial Sequence
  Synthetic
uaaucuucuuaaggcuuccuccag

SEQ ID NO: 306020 - RNA, 18 nt, Artificial Sequence
  Synthetic
gguuaaagcuggcuccag

SEQ ID NO: 306021 - RNA, 19 nt, Artificial Sequence
  Synthetic
agguuaaagcuggcuccag

SEQ ID NO: 306022 - RNA, 20 nt, Artificial Sequence
  Synthetic
gagguuaaagcuggcuccag

SEQ ID NO: 306023 - RNA, 21 nt, Artificial Sequence
  Synthetic
agagguuaaagcuggcuccag

SEQ ID NO: 306024 - RNA, 22 nt, Artificial Sequence
  Synthetic
cagagguuaaagcuggcuccag

SEQ ID NO: 306025 - RNA, 23 nt, Artificial Sequence
  Synthetic
ucagagguuaaagcuggcuccag

SEQ ID NO: 306026 - RNA, 24 nt, Artificial Sequence
  Synthetic
uucagagguuaaagcuggcuccag

SEQ ID NO: 306027 - RNA, 18 nt, Artificial Sequence
  Synthetic
cccugccuccugcuccag

SEQ ID NO: 306028 - RNA, 19 nt, Artificial Sequence
  Synthetic
ucccugccuccugcuccag

SEQ ID NO: 306029 - RNA, 20 nt, Artificial Sequence
  Synthetic
uucccugccuccugcuccag

SEQ ID NO: 306030 - RNA, 21 nt, Artificial Sequence
  Synthetic
guucccugccuccugcuccag

SEQ ID NO: 306031 - RNA, 22 nt, Artificial Sequence
  Synthetic
uguucccugccuccugcuccag

SEQ ID NO: 306032 - RNA, 23 nt, Artificial Sequence
  Synthetic
auguucccugccuccugcuccag

SEQ ID NO: 306033 - RNA, 24 nt, Artificial Sequence
  Synthetic
uauguucccugccuccugcuccag

SEQ ID NO: 306034 - RNA, 18 nt, Artificial Sequence
  Synthetic
aaaagucacacucuccag

SEQ ID NO: 306035 - RNA, 19 nt, Artificial Sequence
  Synthetic
caaaagucacacucuccag

SEQ ID NO: 306036 - RNA, 20 nt, Artificial Sequence
  Synthetic
acaaaagucacacucuccag

SEQ ID NO: 306037 - RNA, 21 nt, Artificial Sequence
  Synthetic
cacaaaagucacacucuccag

SEQ ID NO: 306038 - RNA, 22 nt, Artificial Sequence
  Synthetic
acacaaaagucacacucuccag

SEQ ID NO: 306039 - RNA, 23 nt, Artificial Sequence
  Synthetic
cacacaaaagucacacucuccag

SEQ ID NO: 306040 - RNA, 24 nt, Artificial Sequence
  Synthetic
acacacaaaagucacacucuccag

SEQ ID NO: 306041 - RNA, 18 nt, Artificial Sequence
  Synthetic
uggacauuuacucuccag

SEQ ID NO: 306042 - RNA, 19 nt, Artificial Sequence
  Synthetic
guggacauuuacucuccag

SEQ ID NO: 306043 - RNA, 20 nt, Artificial Sequence
  Synthetic
uguggacauuuacucuccag

SEQ ID NO: 306044 - RNA, 21 nt, Artificial Sequence
  Synthetic
cuguggacauuuacucuccag

SEQ ID NO: 306045 - RNA, 22 nt, Artificial Sequence
  Synthetic
ucuguggacauuuacucuccag

SEQ ID NO: 306046 - RNA, 23 nt, Artificial Sequence
  Synthetic
aucuguggacauuuacucuccag

SEQ ID NO: 306047 - RNA, 24 nt, Artificial Sequence
  Synthetic
aaucuguggacauuuacucuccag

SEQ ID NO: 306048 - RNA, 18 nt, Artificial Sequence
  Synthetic
gguuauaucauaguccag

SEQ ID NO: 306049 - RNA, 19 nt, Artificial Sequence
  Synthetic
ugguuauaucauaguccag

SEQ ID NO: 306050 - RNA, 20 nt, Artificial Sequence
  Synthetic
uugguuauaucauaguccag

SEQ ID NO: 306051 - RNA, 21 nt, Artificial Sequence
  Synthetic
cuugguuauaucauaguccag

SEQ ID NO: 306052 - RNA, 22 nt, Artificial Sequence
  Synthetic
ucuugguuauaucauaguccag

SEQ ID NO: 306053 - RNA, 23 nt, Artificial Sequence
  Synthetic
uucuugguuauaucauaguccag

SEQ ID NO: 306054 - RNA, 24 nt, Artificial Sequence
  Synthetic
uuucuugguuauaucauaguccag

SEQ ID NO: 306055 - RNA, 18 nt, Artificial Sequence
  Synthetic
gagggagcagccguccag

SEQ ID NO: 306056 - RNA, 19 nt, Artificial Sequence
  Synthetic
agagggagcagccguccag

SEQ ID NO: 306057 - RNA, 20 nt, Artificial Sequence
  Synthetic
cagagggagcagccguccag

SEQ ID NO: 306058 - RNA, 21 nt, Artificial Sequence
  Synthetic
acagagggagcagccguccag

SEQ ID NO: 306059 - RNA, 22 nt, Artificial Sequence
  Synthetic
uacagagggagcagccguccag

SEQ ID NO: 306060 - RNA, 23 nt, Artificial Sequence
  Synthetic
uuacagagggagcagccguccag

SEQ ID NO: 306061 - RNA, 24 nt, Artificial Sequence
  Synthetic
auuacagagggagcagccguccag

SEQ ID NO: 306062 - RNA, 18 nt, Artificial Sequence
  Synthetic
aaaaaaacccagguccag

SEQ ID NO: 306063 - RNA, 19 nt, Artificial Sequence
  Synthetic
caaaaaaacccagguccag

SEQ ID NO: 306064 - RNA, 20 nt, Artificial Sequence
  Synthetic
acaaaaaaacccagguccag

SEQ ID NO: 306065 - RNA, 21 nt, Artificial Sequence
  Synthetic
aacaaaaaaacccagguccag

SEQ ID NO: 306066 - RNA, 22 nt, Artificial Sequence
  Synthetic
caacaaaaaaacccagguccag

SEQ ID NO: 306067 - RNA, 23 nt, Artificial Sequence
  Synthetic
ccaacaaaaaaacccagguccag

SEQ ID NO: 306068 - RNA, 24 nt, Artificial Sequence
  Synthetic
uccaacaaaaaaacccagguccag

SEQ ID NO: 306069 - RNA, 18 nt, Artificial Sequence
  Synthetic
ugacuauuucauguccag

SEQ ID NO: 306070 - RNA, 19 nt, Artificial Sequence
  Synthetic
gugacuauuucauguccag

SEQ ID NO: 306071 - RNA, 20 nt, Artificial Sequence
  Synthetic
ggugacuauuucauguccag

SEQ ID NO: 306072 - RNA, 21 nt, Artificial Sequence
  Synthetic
aggugacuauuucauguccag

SEQ ID NO: 306073 - RNA, 22 nt, Artificial Sequence
  Synthetic
caggugacuauuucauguccag

SEQ ID NO: 306074 - RNA, 23 nt, Artificial Sequence
  Synthetic
ccaggugacuauuucauguccag

SEQ ID NO: 306075 - RNA, 24 nt, Artificial Sequence
  Synthetic
uccaggugacuauuucauguccag

SEQ ID NO: 306076 - RNA, 18 nt, Artificial Sequence
  Synthetic
aaagggaaaaguguccag

SEQ ID NO: 306077 - RNA, 19 nt, Artificial Sequence
  Synthetic
aaaagggaaaaguguccag

SEQ ID NO: 306078 - RNA, 20 nt, Artificial Sequence
  Synthetic
aaaaagggaaaaguguccag

SEQ ID NO: 306079 - RNA, 21 nt, Artificial Sequence
  Synthetic
caaaaagggaaaaguguccag

SEQ ID NO: 306080 - RNA, 22 nt, Artificial Sequence
  Synthetic
acaaaaagggaaaaguguccag

SEQ ID NO: 306081 - RNA, 23 nt, Artificial Sequence
  Synthetic
aacaaaaagggaaaaguguccag

SEQ ID NO: 306082 - RNA, 24 nt, Artificial Sequence
  Synthetic
gaacaaaaagggaaaaguguccag

SEQ ID NO: 306083 - RNA, 18 nt, Artificial Sequence
  Synthetic
ccuauuauaauuguccag

SEQ ID NO: 306084 - RNA, 19 nt, Artificial Sequence
  Synthetic
gccuauuauaauuguccag

SEQ ID NO: 306085 - RNA, 20 nt, Artificial Sequence
  Synthetic
ugccuauuauaauuguccag

SEQ ID NO: 306086 - RNA, 21 nt, Artificial Sequence
  Synthetic
augccuauuauaauuguccag

SEQ ID NO: 306087 - RNA, 22 nt, Artificial Sequence
  Synthetic
aaugccuauuauaauuguccag

SEQ ID NO: 306088 - RNA, 23 nt, Artificial Sequence
  Synthetic
caaugccuauuauaauuguccag

SEQ ID NO: 306089 - RNA, 24 nt, Artificial Sequence
  Synthetic
acaaugccuauuauaauuguccag

SEQ ID NO: 306090 - RNA, 18 nt, Artificial Sequence
  Synthetic
gcuucucuuaaauuccag

SEQ ID NO: 306091 - RNA, 19 nt, Artificial Sequence
  Synthetic
ugcuucucuuaaauuccag

SEQ ID NO: 306092 - RNA, 20 nt, Artificial Sequence
  Synthetic
uugcuucucuuaaauuccag

SEQ ID NO: 306093 - RNA, 21 nt, Artificial Sequence
  Synthetic
guugcuucucuuaaauuccag

SEQ ID NO: 306094 - RNA, 22 nt, Artificial Sequence
  Synthetic
uguugcuucucuuaaauuccag

SEQ ID NO: 306095 - RNA, 23 nt, Artificial Sequence
  Synthetic
guguugcuucucuuaaauuccag

SEQ ID NO: 306096 - RNA, 24 nt, Artificial Sequence
  Synthetic
aguguugcuucucuuaaauuccag

SEQ ID NO: 306097 - RNA, 18 nt, Artificial Sequence
  Synthetic
acccaucuauaauuccag

SEQ ID NO: 306098 - RNA, 19 nt, Artificial Sequence
  Synthetic
uacccaucuauaauuccag

SEQ ID NO: 306099 - RNA, 20 nt, Artificial Sequence
  Synthetic
cuacccaucuauaauuccag

SEQ ID NO: 306100 - RNA, 21 nt, Artificial Sequence
  Synthetic
acuacccaucuauaauuccag

SEQ ID NO: 306101 - RNA, 22 nt, Artificial Sequence
  Synthetic
gacuacccaucuauaauuccag

SEQ ID NO: 306102 - RNA, 23 nt, Artificial Sequence
  Synthetic
ugacuacccaucuauaauuccag

SEQ ID NO: 306103 - RNA, 24 nt, Artificial Sequence
  Synthetic
augacuacccaucuauaauuccag

SEQ ID NO: 306104 - RNA, 18 nt, Artificial Sequence
  Synthetic
uaaauacacccauuccag

SEQ ID NO: 306105 - RNA, 19 nt, Artificial Sequence
  Synthetic
uuaaauacacccauuccag

SEQ ID NO: 306106 - RNA, 20 nt, Artificial Sequence
  Synthetic
guuaaauacacccauuccag

SEQ ID NO: 306107 - RNA, 21 nt, Artificial Sequence
  Synthetic
gguuaaauacacccauuccag

SEQ ID NO: 306108 - RNA, 22 nt, Artificial Sequence
  Synthetic
ugguuaaauacacccauuccag

SEQ ID NO: 306109 - RNA, 23 nt, Artificial Sequence
  Synthetic
uugguuaaauacacccauuccag

SEQ ID NO: 306110 - RNA, 24 nt, Artificial Sequence
  Synthetic
auugguuaaauacacccauuccag

SEQ ID NO: 306111 - RNA, 18 nt, Artificial Sequence
  Synthetic
agggaauuaauauuccag

SEQ ID NO: 306112 - RNA, 19 nt, Artificial Sequence
  Synthetic
uagggaauuaauauuccag

SEQ ID NO: 306113 - RNA, 20 nt, Artificial Sequence
  Synthetic
guagggaauuaauauuccag

SEQ ID NO: 306114 - RNA, 21 nt, Artificial Sequence
  Synthetic
aguagggaauuaauauuccag

SEQ ID NO: 306115 - RNA, 22 nt, Artificial Sequence
  Synthetic
caguagggaauuaauauuccag

SEQ ID NO: 306116 - RNA, 23 nt, Artificial Sequence
  Synthetic
gcaguagggaauuaauauuccag

SEQ ID NO: 306117 - RNA, 24 nt, Artificial Sequence
  Synthetic
ggcaguagggaauuaauauuccag

SEQ ID NO: 306118 - RNA, 18 nt, Artificial Sequence
  Synthetic
cugggaugaagcuuccag

SEQ ID NO: 306119 - RNA, 19 nt, Artificial Sequence
  Synthetic
ucugggaugaagcuuccag

SEQ ID NO: 306120 - RNA, 20 nt, Artificial Sequence
  Synthetic
cucugggaugaagcuuccag

SEQ ID NO: 306121 - RNA, 21 nt, Artificial Sequence
  Synthetic
ccucugggaugaagcuuccag

SEQ ID NO: 306122 - RNA, 22 nt, Artificial Sequence
  Synthetic
cccucugggaugaagcuuccag

SEQ ID NO: 306123 - RNA, 23 nt, Artificial Sequence
  Synthetic
ccccucugggaugaagcuuccag

SEQ ID NO: 306124 - RNA, 24 nt, Artificial Sequence
  Synthetic
gccccucugggaugaagcuuccag

SEQ ID NO: 306125 - RNA, 18 nt, Artificial Sequence
  Synthetic
uucaacuguagcuuccag

SEQ ID NO: 306126 - RNA, 19 nt, Artificial Sequence
  Synthetic
cuucaacuguagcuuccag

SEQ ID NO: 306127 - RNA, 20 nt, Artificial Sequence
  Synthetic
acuucaacuguagcuuccag

SEQ ID NO: 306128 - RNA, 21 nt, Artificial Sequence
  Synthetic
gacuucaacuguagcuuccag

SEQ ID NO: 306129 - RNA, 22 nt, Artificial Sequence
  Synthetic
agacuucaacuguagcuuccag

SEQ ID NO: 306130 - RNA, 23 nt, Artificial Sequence
  Synthetic
aagacuucaacuguagcuuccag

SEQ ID NO: 306131 - RNA, 24 nt, Artificial Sequence
  Synthetic
aaagacuucaacuguagcuuccag

SEQ ID NO: 306132 - RNA, 18 nt, Artificial Sequence
  Synthetic
uuaguggaaugcuuccag

SEQ ID NO: 306133 - RNA, 19 nt, Artificial Sequence
  Synthetic
cuuaguggaaugcuuccag

SEQ ID NO: 306134 - RNA, 20 nt, Artificial Sequence
  Synthetic
gcuuaguggaaugcuuccag

SEQ ID NO: 306135 - RNA, 21 nt, Artificial Sequence
  Synthetic
ggcuuaguggaaugcuuccag

SEQ ID NO: 306136 - RNA, 22 nt, Artificial Sequence
  Synthetic
gggcuuaguggaaugcuuccag

SEQ ID NO: 306137 - RNA, 23 nt, Artificial Sequence
  Synthetic
agggcuuaguggaaugcuuccag

SEQ ID NO: 306138 - RNA, 24 nt, Artificial Sequence
  Synthetic
gagggcuuaguggaaugcuuccag

SEQ ID NO: 306139 - RNA, 18 nt, Artificial Sequence
  Synthetic
uguguaucuuuguuccag

SEQ ID NO: 306140 - RNA, 19 nt, Artificial Sequence
  Synthetic
uuguguaucuuuguuccag

SEQ ID NO: 306141 - RNA, 20 nt, Artificial Sequence
  Synthetic
uuuguguaucuuuguuccag

SEQ ID NO: 306142 - RNA, 21 nt, Artificial Sequence
  Synthetic
cuuuguguaucuuuguuccag

SEQ ID NO: 306143 - RNA, 22 nt, Artificial Sequence
  Synthetic
acuuuguguaucuuuguuccag

SEQ ID NO: 306144 - RNA, 23 nt, Artificial Sequence
  Synthetic
gacuuuguguaucuuuguuccag

SEQ ID NO: 306145 - RNA, 24 nt, Artificial Sequence
  Synthetic
ugacuuuguguaucuuuguuccag

SEQ ID NO: 306146 - RNA, 18 nt, Artificial Sequence
  Synthetic
auuuuauuaaauuuccag

SEQ ID NO: 306147 - RNA, 19 nt, Artificial Sequence
  Synthetic
uauuuuauuaaauuuccag

SEQ ID NO: 306148 - RNA, 20 nt, Artificial Sequence
  Synthetic
uuauuuuauuaaauuuccag

SEQ ID NO: 306149 - RNA, 21 nt, Artificial Sequence
  Synthetic
auuauuuuauuaaauuuccag

SEQ ID NO: 306150 - RNA, 22 nt, Artificial Sequence
  Synthetic
cauuauuuuauuaaauuuccag

SEQ ID NO: 306151 - RNA, 23 nt, Artificial Sequence
  Synthetic
ucauuauuuuauuaaauuuccag

SEQ ID NO: 306152 - RNA, 24 nt, Artificial Sequence
  Synthetic
aucauuauuuuauuaaauuuccag

SEQ ID NO: 306153 - RNA, 18 nt, Artificial Sequence
  Synthetic
uccuucaugaauuuccag

SEQ ID NO: 306154 - RNA, 19 nt, Artificial Sequence
  Synthetic
auccuucaugaauuuccag

SEQ ID NO: 306155 - RNA, 20 nt, Artificial Sequence
  Synthetic
aauccuucaugaauuuccag

SEQ ID NO: 306156 - RNA, 21 nt, Artificial Sequence
  Synthetic
uaauccuucaugaauuuccag

SEQ ID NO: 306157 - RNA, 22 nt, Artificial Sequence
  Synthetic
uuaauccuucaugaauuuccag

SEQ ID NO: 306158 - RNA, 23 nt, Artificial Sequence
  Synthetic
uuuaauccuucaugaauuuccag

SEQ ID NO: 306159 - RNA, 24 nt, Artificial Sequence
  Synthetic
uuuuaauccuucaugaauuuccag

SEQ ID NO: 306160 - RNA, 18 nt, Artificial Sequence
  Synthetic
auguuggaaccuuuccag

SEQ ID NO: 306161 - RNA, 19 nt, Artificial Sequence
  Synthetic
uauguuggaaccuuuccag

SEQ ID NO: 306162 - RNA, 20 nt, Artificial Sequence
  Synthetic
uuauguuggaaccuuuccag

SEQ ID NO: 306163 - RNA, 21 nt, Artificial Sequence
  Synthetic
uuuauguuggaaccuuuccag

SEQ ID NO: 306164 - RNA, 22 nt, Artificial Sequence
  Synthetic
cuuuauguuggaaccuuuccag

SEQ ID NO: 306165 - RNA, 23 nt, Artificial Sequence
  Synthetic
gcuuuauguuggaaccuuuccag

SEQ ID NO: 306166 - RNA, 24 nt, Artificial Sequence
  Synthetic
ggcuuuauguuggaaccuuuccag

SEQ ID NO: 306167 - RNA, 18 nt, Artificial Sequence
  Synthetic
ccagucaaguguuuccag

SEQ ID NO: 306168 - RNA, 19 nt, Artificial Sequence
  Synthetic
accagucaaguguuuccag

SEQ ID NO: 306169 - RNA, 20 nt, Artificial Sequence
  Synthetic
uaccagucaaguguuuccag

SEQ ID NO: 306170 - RNA, 21 nt, Artificial Sequence
  Synthetic
uuaccagucaaguguuuccag

SEQ ID NO: 306171 - RNA, 22 nt, Artificial Sequence
  Synthetic
cuuaccagucaaguguuuccag

SEQ ID NO: 306172 - RNA, 23 nt, Artificial Sequence
  Synthetic
ccuuaccagucaaguguuuccag

SEQ ID NO: 306173 - RNA, 24 nt, Artificial Sequence
  Synthetic
cccuuaccagucaaguguuuccag

SEQ ID NO: 306174 - RNA, 18 nt, Artificial Sequence
  Synthetic
uuuugacuuaaaaagcag

SEQ ID NO: 306175 - RNA, 19 nt, Artificial Sequence
  Synthetic
cuuuugacuuaaaaagcag

SEQ ID NO: 306176 - RNA, 20 nt, Artificial Sequence
  Synthetic
gcuuuugacuuaaaaagcag

SEQ ID NO: 306177 - RNA, 21 nt, Artificial Sequence
  Synthetic
agcuuuugacuuaaaaagcag

SEQ ID NO: 306178 - RNA, 22 nt, Artificial Sequence
  Synthetic
cagcuuuugacuuaaaaagcag

SEQ ID NO: 306179 - RNA, 23 nt, Artificial Sequence
  Synthetic
acagcuuuugacuuaaaaagcag

SEQ ID NO: 306180 - RNA, 24 nt, Artificial Sequence
  Synthetic
aacagcuuuugacuuaaaaagcag

SEQ ID NO: 306181 - RNA, 18 nt, Artificial Sequence
  Synthetic
ucucucuuucaaaagcag

SEQ ID NO: 306182 - RNA, 19 nt, Artificial Sequence
  Synthetic
aucucucuuucaaaagcag

SEQ ID NO: 306183 - RNA, 20 nt, Artificial Sequence
  Synthetic
gaucucucuuucaaaagcag

SEQ ID NO: 306184 - RNA, 21 nt, Artificial Sequence
  Synthetic
ugaucucucuuucaaaagcag

SEQ ID NO: 306185 - RNA, 22 nt, Artificial Sequence
  Synthetic
cugaucucucuuucaaaagcag

SEQ ID NO: 306186 - RNA, 23 nt, Artificial Sequence
  Synthetic
ucugaucucucuuucaaaagcag

SEQ ID NO: 306187 - RNA, 24 nt, Artificial Sequence
  Synthetic
uucugaucucucuuucaaaagcag

SEQ ID NO: 306188 - RNA, 18 nt, Artificial Sequence
  Synthetic
uaagacuuugaaaagcag

SEQ ID NO: 306189 - RNA, 19 nt, Artificial Sequence
  Synthetic
auaagacuuugaaaagcag

SEQ ID NO: 306190 - RNA, 20 nt, Artificial Sequence
  Synthetic
aauaagacuuugaaaagcag

SEQ ID NO: 306191 - RNA, 21 nt, Artificial Sequence
  Synthetic
gaauaagacuuugaaaagcag

SEQ ID NO: 306192 - RNA, 22 nt, Artificial Sequence
  Synthetic
ugaauaagacuuugaaaagcag

SEQ ID NO: 306193 - RNA, 23 nt, Artificial Sequence
  Synthetic
augaauaagacuuugaaaagcag

SEQ ID NO: 306194 - RNA, 24 nt, Artificial Sequence
  Synthetic
caugaauaagacuuugaaaagcag

SEQ ID NO: 306195 - RNA, 18 nt, Artificial Sequence
  Synthetic
aaacuuauuccaaagcag

SEQ ID NO: 306196 - RNA, 19 nt, Artificial Sequence
  Synthetic
gaaacuuauuccaaagcag

SEQ ID NO: 306197 - RNA, 20 nt, Artificial Sequence
  Synthetic
ugaaacuuauuccaaagcag

SEQ ID NO: 306198 - RNA, 21 nt, Artificial Sequence
  Synthetic
augaaacuuauuccaaagcag

SEQ ID NO: 306199 - RNA, 22 nt, Artificial Sequence
  Synthetic
uaugaaacuuauuccaaagcag

SEQ ID NO: 306200 - RNA, 23 nt, Artificial Sequence
  Synthetic
guaugaaacuuauuccaaagcag

SEQ ID NO: 306201 - RNA, 24 nt, Artificial Sequence
  Synthetic
uguaugaaacuuauuccaaagcag

SEQ ID NO: 306202 - RNA, 18 nt, Artificial Sequence
  Synthetic
ccuaccuuugcaaagcag

SEQ ID NO: 306203 - RNA, 19 nt, Artificial Sequence
  Synthetic
accuaccuuugcaaagcag

SEQ ID NO: 306204 - RNA, 20 nt, Artificial Sequence
  Synthetic
uaccuaccuuugcaaagcag

SEQ ID NO: 306205 - RNA, 21 nt, Artificial Sequence
  Synthetic
cuaccuaccuuugcaaagcag

SEQ ID NO: 306206 - RNA, 22 nt, Artificial Sequence
  Synthetic
ccuaccuaccuuugcaaagcag

SEQ ID NO: 306207 - RNA, 23 nt, Artificial Sequence
  Synthetic
accuaccuaccuuugcaaagcag

SEQ ID NO: 306208 - RNA, 24 nt, Artificial Sequence
  Synthetic
aaccuaccuaccuuugcaaagcag

SEQ ID NO: 306209 - RNA, 18 nt, Artificial Sequence
  Synthetic
uccagcaaaggaaagcag

SEQ ID NO: 306210 - RNA, 19 nt, Artificial Sequence
  Synthetic
auccagcaaaggaaagcag

SEQ ID NO: 306211 - RNA, 20 nt, Artificial Sequence
  Synthetic
gauccagcaaaggaaagcag

SEQ ID NO: 306212 - RNA, 21 nt, Artificial Sequence
  Synthetic
ggauccagcaaaggaaagcag

SEQ ID NO: 306213 - RNA, 22 nt, Artificial Sequence
  Synthetic
aggauccagcaaaggaaagcag

SEQ ID NO: 306214 - RNA, 23 nt, Artificial Sequence
  Synthetic
aaggauccagcaaaggaaagcag

SEQ ID NO: 306215 - RNA, 24 nt, Artificial Sequence
  Synthetic
gaaggauccagcaaaggaaagcag

SEQ ID NO: 306216 - RNA, 18 nt, Artificial Sequence
  Synthetic
aggcuauugggaaagcag

SEQ ID NO: 306217 - RNA, 19 nt, Artificial Sequence
  Synthetic
aaggcuauugggaaagcag

SEQ ID NO: 306218 - RNA, 20 nt, Artificial Sequence
  Synthetic
aaaggcuauugggaaagcag

SEQ ID NO: 306219 - RNA, 21 nt, Artificial Sequence
  Synthetic
uaaaggcuauugggaaagcag

SEQ ID NO: 306220 - RNA, 22 nt, Artificial Sequence
  Synthetic
guaaaggcuauugggaaagcag

SEQ ID NO: 306221 - RNA, 23 nt, Artificial Sequence
  Synthetic
gguaaaggcuauugggaaagcag

SEQ ID NO: 306222 - RNA, 24 nt, Artificial Sequence
  Synthetic
ggguaaaggcuauugggaaagcag

SEQ ID NO: 306223 - RNA, 18 nt, Artificial Sequence
  Synthetic
ccaacucccaccaagcag

SEQ ID NO: 306224 - RNA, 19 nt, Artificial Sequence
  Synthetic
cccaacucccaccaagcag

SEQ ID NO: 306225 - RNA, 20 nt, Artificial Sequence
  Synthetic
ccccaacucccaccaagcag

SEQ ID NO: 306226 - RNA, 21 nt, Artificial Sequence
  Synthetic
cccccaacucccaccaagcag

SEQ ID NO: 306227 - RNA, 22 nt, Artificial Sequence
  Synthetic
acccccaacucccaccaagcag

SEQ ID NO: 306228 - RNA, 23 nt, Artificial Sequence
  Synthetic
aacccccaacucccaccaagcag

SEQ ID NO: 306229 - RNA, 24 nt, Artificial Sequence
  Synthetic
caacccccaacucccaccaagcag

SEQ ID NO: 306230 - RNA, 18 nt, Artificial Sequence
  Synthetic
ccucggccucccaagcag

SEQ ID NO: 306231 - RNA, 19 nt, Artificial Sequence
  Synthetic
gccucggccucccaagcag

SEQ ID NO: 306232 - RNA, 20 nt, Artificial Sequence
  Synthetic
ugccucggccucccaagcag

SEQ ID NO: 306233 - RNA, 21 nt, Artificial Sequence
  Synthetic
gugccucggccucccaagcag

SEQ ID NO: 306234 - RNA, 22 nt, Artificial Sequence
  Synthetic
ugugccucggccucccaagcag

SEQ ID NO: 306235 - RNA, 23 nt, Artificial Sequence
  Synthetic
uugugccucggccucccaagcag

SEQ ID NO: 306236 - RNA, 24 nt, Artificial Sequence
  Synthetic
cuugugccucggccucccaagcag

SEQ ID NO: 306237 - RNA, 18 nt, Artificial Sequence
  Synthetic
auauaaaacuccaagcag

SEQ ID NO: 306238 - RNA, 19 nt, Artificial Sequence
  Synthetic
uauauaaaacuccaagcag

SEQ ID NO: 306239 - RNA, 20 nt, Artificial Sequence
  Synthetic
auauauaaaacuccaagcag

SEQ ID NO: 306240 - RNA, 21 nt, Artificial Sequence
  Synthetic
gauauauaaaacuccaagcag

SEQ ID NO: 306241 - RNA, 22 nt, Artificial Sequence
  Synthetic
ggauauauaaaacuccaagcag

SEQ ID NO: 306242 - RNA, 23 nt, Artificial Sequence
  Synthetic
uggauauauaaaacuccaagcag

SEQ ID NO: 306243 - RNA, 24 nt, Artificial Sequence
  Synthetic
guggauauauaaaacuccaagcag

SEQ ID NO: 306244 - RNA, 18 nt, Artificial Sequence
  Synthetic
augaaaguuugcaagcag

SEQ ID NO: 306245 - RNA, 19 nt, Artificial Sequence
  Synthetic
aaugaaaguuugcaagcag

SEQ ID NO: 306246 - RNA, 20 nt, Artificial Sequence
  Synthetic
aaaugaaaguuugcaagcag

SEQ ID NO: 306247 - RNA, 21 nt, Artificial Sequence
  Synthetic
caaaugaaaguuugcaagcag

SEQ ID NO: 306248 - RNA, 22 nt, Artificial Sequence
  Synthetic
ucaaaugaaaguuugcaagcag

SEQ ID NO: 306249 - RNA, 23 nt, Artificial Sequence
  Synthetic
gucaaaugaaaguuugcaagcag

SEQ ID NO: 306250 - RNA, 24 nt, Artificial Sequence
  Synthetic
agucaaaugaaaguuugcaagcag

SEQ ID NO: 306251 - RNA, 18 nt, Artificial Sequence
  Synthetic
uacaaacucaucaagcag

SEQ ID NO: 306252 - RNA, 19 nt, Artificial Sequence
  Synthetic
guacaaacucaucaagcag

SEQ ID NO: 306253 - RNA, 20 nt, Artificial Sequence
  Synthetic
gguacaaacucaucaagcag

SEQ ID NO: 306254 - RNA, 21 nt, Artificial Sequence
  Synthetic
agguacaaacucaucaagcag

SEQ ID NO: 306255 - RNA, 22 nt, Artificial Sequence
  Synthetic
cagguacaaacucaucaagcag

SEQ ID NO: 306256 - RNA, 23 nt, Artificial Sequence
  Synthetic
ccagguacaaacucaucaagcag

SEQ ID NO: 306257 - RNA, 24 nt, Artificial Sequence
  Synthetic
gccagguacaaacucaucaagcag

SEQ ID NO: 306258 - RNA, 18 nt, Artificial Sequence
  Synthetic
uuuguaucacagaagcag

SEQ ID NO: 306259 - RNA, 19 nt, Artificial Sequence
  Synthetic
cuuuguaucacagaagcag

SEQ ID NO: 306260 - RNA, 20 nt, Artificial Sequence
  Synthetic
ucuuuguaucacagaagcag

SEQ ID NO: 306261 - RNA, 21 nt, Artificial Sequence
  Synthetic
uucuuuguaucacagaagcag

SEQ ID NO: 306262 - RNA, 22 nt, Artificial Sequence
  Synthetic
uuucuuuguaucacagaagcag

SEQ ID NO: 306263 - RNA, 23 nt, Artificial Sequence
  Synthetic
uuuucuuuguaucacagaagcag

SEQ ID NO: 306264 - RNA, 24 nt, Artificial Sequence
  Synthetic
uuuuucuuuguaucacagaagcag

SEQ ID NO: 306265 - RNA, 18 nt, Artificial Sequence
  Synthetic
agggugacccggaagcag

SEQ ID NO: 306266 - RNA, 19 nt, Artificial Sequence
  Synthetic
aagggugacccggaagcag

SEQ ID NO: 306267 - RNA, 20 nt, Artificial Sequence
  Synthetic
uaagggugacccggaagcag

SEQ ID NO: 306268 - RNA, 21 nt, Artificial Sequence
  Synthetic
guaagggugacccggaagcag

SEQ ID NO: 306269 - RNA, 22 nt, Artificial Sequence
  Synthetic
aguaagggugacccggaagcag

SEQ ID NO: 306270 - RNA, 23 nt, Artificial Sequence
  Synthetic
gaguaagggugacccggaagcag

SEQ ID NO: 306271 - RNA, 24 nt, Artificial Sequence
  Synthetic
ugaguaagggugacccggaagcag

SEQ ID NO: 306272 - RNA, 18 nt, Artificial Sequence
  Synthetic
gaguaccuauugaagcag

SEQ ID NO: 306273 - RNA, 19 nt, Artificial Sequence
  Synthetic
agaguaccuauugaagcag

SEQ ID NO: 306274 - RNA, 20 nt, Artificial Sequence
  Synthetic
aagaguaccuauugaagcag

SEQ ID NO: 306275 - RNA, 21 nt, Artificial Sequence
  Synthetic
uaagaguaccuauugaagcag

SEQ ID NO: 306276 - RNA, 22 nt, Artificial Sequence
  Synthetic
guaagaguaccuauugaagcag

SEQ ID NO: 306277 - RNA, 23 nt, Artificial Sequence
  Synthetic
aguaagaguaccuauugaagcag

SEQ ID NO: 306278 - RNA, 24 nt, Artificial Sequence
  Synthetic
gaguaagaguaccuauugaagcag

SEQ ID NO: 306279 - RNA, 18 nt, Artificial Sequence
  Synthetic
uaggaauacgauaagcag

SEQ ID NO: 306280 - RNA, 19 nt, Artificial Sequence
  Synthetic
auaggaauacgauaagcag

SEQ ID NO: 306281 - RNA, 20 nt, Artificial Sequence
  Synthetic
gauaggaauacgauaagcag

SEQ ID NO: 306282 - RNA, 21 nt, Artificial Sequence
  Synthetic
ggauaggaauacgauaagcag

SEQ ID NO: 306283 - RNA, 22 nt, Artificial Sequence
  Synthetic
uggauaggaauacgauaagcag

SEQ ID NO: 306284 - RNA, 23 nt, Artificial Sequence
  Synthetic
auggauaggaauacgauaagcag

SEQ ID NO: 306285 - RNA, 24 nt, Artificial Sequence
  Synthetic
cauggauaggaauacgauaagcag

SEQ ID NO: 306286 - RNA, 18 nt, Artificial Sequence
  Synthetic
uauuguguuuauaagcag

SEQ ID NO: 306287 - RNA, 19 nt, Artificial Sequence
  Synthetic
uuauuguguuuauaagcag

SEQ ID NO: 306288 - RNA, 20 nt, Artificial Sequence
  Synthetic
guuauuguguuuauaagcag

SEQ ID NO: 306289 - RNA, 21 nt, Artificial Sequence
  Synthetic
uguuauuguguuuauaagcag

SEQ ID NO: 306290 - RNA, 22 nt, Artificial Sequence
  Synthetic
guguuauuguguuuauaagcag

SEQ ID NO: 306291 - RNA, 23 nt, Artificial Sequence
  Synthetic
uguguuauuguguuuauaagcag

SEQ ID NO: 306292 - RNA, 24 nt, Artificial Sequence
  Synthetic
uuguguuauuguguuuauaagcag

SEQ ID NO: 306293 - RNA, 18 nt, Artificial Sequence
  Synthetic
aaauccugugcuaagcag

SEQ ID NO: 306294 - RNA, 19 nt, Artificial Sequence
  Synthetic
caaauccugugcuaagcag

SEQ ID NO: 306295 - RNA, 20 nt, Artificial Sequence
  Synthetic
acaaauccugugcuaagcag

SEQ ID NO: 306296 - RNA, 21 nt, Artificial Sequence
  Synthetic
uacaaauccugugcuaagcag

SEQ ID NO: 306297 - RNA, 22 nt, Artificial Sequence
  Synthetic
uuacaaauccugugcuaagcag

SEQ ID NO: 306298 - RNA, 23 nt, Artificial Sequence
  Synthetic
auuacaaauccugugcuaagcag

SEQ ID NO: 306299 - RNA, 24 nt, Artificial Sequence
  Synthetic
uauuacaaauccugugcuaagcag

SEQ ID NO: 306300 - RNA, 18 nt, Artificial Sequence
  Synthetic
uaaaucuacaguaagcag

SEQ ID NO: 306301 - RNA, 19 nt, Artificial Sequence
  Synthetic
guaaaucuacaguaagcag

SEQ ID NO: 306302 - RNA, 20 nt, Artificial Sequence
  Synthetic
aguaaaucuacaguaagcag

SEQ ID NO: 306303 - RNA, 21 nt, Artificial Sequence
  Synthetic
aaguaaaucuacaguaagcag

SEQ ID NO: 306304 - RNA, 22 nt, Artificial Sequence
  Synthetic
aaaguaaaucuacaguaagcag

SEQ ID NO: 306305 - RNA, 23 nt, Artificial Sequence
  Synthetic
aaaaguaaaucuacaguaagcag

SEQ ID NO: 306306 - RNA, 24 nt, Artificial Sequence
  Synthetic
gaaaaguaaaucuacaguaagcag

SEQ ID NO: 306307 - RNA, 18 nt, Artificial Sequence
  Synthetic
uacuuuugggguaagcag

SEQ ID NO: 306308 - RNA, 19 nt, Artificial Sequence
  Synthetic
guacuuuugggguaagcag

SEQ ID NO: 306309 - RNA, 20 nt, Artificial Sequence
  Synthetic
uguacuuuugggguaagcag

SEQ ID NO: 306310 - RNA, 21 nt, Artificial Sequence
  Synthetic
guguacuuuugggguaagcag

SEQ ID NO: 306311 - RNA, 22 nt, Artificial Sequence
  Synthetic
uguguacuuuugggguaagcag

SEQ ID NO: 306312 - RNA, 23 nt, Artificial Sequence
  Synthetic
auguguacuuuugggguaagcag

SEQ ID NO: 306313 - RNA, 24 nt, Artificial Sequence
  Synthetic
aauguguacuuuugggguaagcag

SEQ ID NO: 306314 - RNA, 18 nt, Artificial Sequence
  Synthetic
agaauagauuguaagcag

SEQ ID NO: 306315 - RNA, 19 nt, Artificial Sequence
  Synthetic
gagaauagauuguaagcag

SEQ ID NO: 306316 - RNA, 20 nt, Artificial Sequence
  Synthetic
agagaauagauuguaagcag

SEQ ID NO: 306317 - RNA, 21 nt, Artificial Sequence
  Synthetic
cagagaauagauuguaagcag

SEQ ID NO: 306318 - RNA, 22 nt, Artificial Sequence
  Synthetic
acagagaauagauuguaagcag

SEQ ID NO: 306319 - RNA, 23 nt, Artificial Sequence
  Synthetic
gacagagaauagauuguaagcag

SEQ ID NO: 306320 - RNA, 24 nt, Artificial Sequence
  Synthetic
agacagagaauagauuguaagcag

SEQ ID NO: 306321 - RNA, 18 nt, Artificial Sequence
  Synthetic
agauuggucuuuaagcag

SEQ ID NO: 306322 - RNA, 19 nt, Artificial Sequence
  Synthetic
aagauuggucuuuaagcag

SEQ ID NO: 306323 - RNA, 20 nt, Artificial Sequence
  Synthetic
caagauuggucuuuaagcag

SEQ ID NO: 306324 - RNA, 21 nt, Artificial Sequence
  Synthetic
ucaagauuggucuuuaagcag

SEQ ID NO: 306325 - RNA, 22 nt, Artificial Sequence
  Synthetic
gucaagauuggucuuuaagcag

SEQ ID NO: 306326 - RNA, 23 nt, Artificial Sequence
  Synthetic
cgucaagauuggucuuuaagcag

SEQ ID NO: 306327 - RNA, 24 nt, Artificial Sequence
  Synthetic
acgucaagauuggucuuuaagcag

SEQ ID NO: 306328 - RNA, 18 nt, Artificial Sequence
  Synthetic
gaagagagaaaacagcag

SEQ ID NO: 306329 - RNA, 19 nt, Artificial Sequence
  Synthetic
ugaagagagaaaacagcag

SEQ ID NO: 306330 - RNA, 20 nt, Artificial Sequence
  Synthetic
cugaagagagaaaacagcag

SEQ ID NO: 306331 - RNA, 21 nt, Artificial Sequence
  Synthetic
acugaagagagaaaacagcag

SEQ ID NO: 306332 - RNA, 22 nt, Artificial Sequence
  Synthetic
uacugaagagagaaaacagcag

SEQ ID NO: 306333 - RNA, 23 nt, Artificial Sequence
  Synthetic
uuacugaagagagaaaacagcag

SEQ ID NO: 306334 - RNA, 24 nt, Artificial Sequence
  Synthetic
auuacugaagagagaaaacagcag

SEQ ID NO: 306335 - RNA, 18 nt, Artificial Sequence
  Synthetic
ggccacauguaacagcag

SEQ ID NO: 306336 - RNA, 19 nt, Artificial Sequence
  Synthetic
uggccacauguaacagcag

SEQ ID NO: 306337 - RNA, 20 nt, Artificial Sequence
  Synthetic
guggccacauguaacagcag

SEQ ID NO: 306338 - RNA, 21 nt, Artificial Sequence
  Synthetic
uguggccacauguaacagcag

SEQ ID NO: 306339 - RNA, 22 nt, Artificial Sequence
  Synthetic
cuguggccacauguaacagcag

SEQ ID NO: 306340 - RNA, 23 nt, Artificial Sequence
  Synthetic
ccuguggccacauguaacagcag

SEQ ID NO: 306341 - RNA, 24 nt, Artificial Sequence
  Synthetic
cccuguggccacauguaacagcag

SEQ ID NO: 306342 - RNA, 18 nt, Artificial Sequence
  Synthetic
agucaaccaucacagcag

SEQ ID NO: 306343 - RNA, 19 nt, Artificial Sequence
  Synthetic
uagucaaccaucacagcag

SEQ ID NO: 306344 - RNA, 20 nt, Artificial Sequence
  Synthetic
auagucaaccaucacagcag

SEQ ID NO: 306345 - RNA, 21 nt, Artificial Sequence
  Synthetic
aauagucaaccaucacagcag

SEQ ID NO: 306346 - RNA, 22 nt, Artificial Sequence
  Synthetic
uaauagucaaccaucacagcag

SEQ ID NO: 306347 - RNA, 23 nt, Artificial Sequence
  Synthetic
uuaauagucaaccaucacagcag

SEQ ID NO: 306348 - RNA, 24 nt, Artificial Sequence
  Synthetic
auuaauagucaaccaucacagcag

SEQ ID NO: 306349 - RNA, 18 nt, Artificial Sequence
  Synthetic
accaugugaagacagcag

SEQ ID NO: 306350 - RNA, 19 nt, Artificial Sequence
  Synthetic
uaccaugugaagacagcag

SEQ ID NO: 306351 - RNA, 20 nt, Artificial Sequence
  Synthetic
cuaccaugugaagacagcag

SEQ ID NO: 306352 - RNA, 21 nt, Artificial Sequence
  Synthetic
ucuaccaugugaagacagcag

SEQ ID NO: 306353 - RNA, 22 nt, Artificial Sequence
  Synthetic
aucuaccaugugaagacagcag

SEQ ID NO: 306354 - RNA, 23 nt, Artificial Sequence
  Synthetic
caucuaccaugugaagacagcag

SEQ ID NO: 306355 - RNA, 24 nt, Artificial Sequence
  Synthetic
acaucuaccaugugaagacagcag

SEQ ID NO: 306356 - RNA, 18 nt, Artificial Sequence
  Synthetic
caguagcacuaccagcag

SEQ ID NO: 306357 - RNA, 19 nt, Artificial Sequence
  Synthetic
ccaguagcacuaccagcag

SEQ ID NO: 306358 - RNA, 20 nt, Artificial Sequence
  Synthetic
gccaguagcacuaccagcag

SEQ ID NO: 306359 - RNA, 21 nt, Artificial Sequence
  Synthetic
agccaguagcacuaccagcag

SEQ ID NO: 306360 - RNA, 22 nt, Artificial Sequence
  Synthetic
cagccaguagcacuaccagcag

SEQ ID NO: 306361 - RNA, 23 nt, Artificial Sequence
  Synthetic
ucagccaguagcacuaccagcag

SEQ ID NO: 306362 - RNA, 24 nt, Artificial Sequence
  Synthetic
gucagccaguagcacuaccagcag

SEQ ID NO: 306363 - RNA, 18 nt, Artificial Sequence
  Synthetic
aucuccugaacccagcag

SEQ ID NO: 306364 - RNA, 19 nt, Artificial Sequence
  Synthetic
aaucuccugaacccagcag

SEQ ID NO: 306365 - RNA, 20 nt, Artificial Sequence
  Synthetic
gaaucuccugaacccagcag

SEQ ID NO: 306366 - RNA, 21 nt, Artificial Sequence
  Synthetic
agaaucuccugaacccagcag

SEQ ID NO: 306367 - RNA, 22 nt, Artificial Sequence
  Synthetic
aagaaucuccugaacccagcag

SEQ ID NO: 306368 - RNA, 23 nt, Artificial Sequence
  Synthetic
gaagaaucuccugaacccagcag

SEQ ID NO: 306369 - RNA, 24 nt, Artificial Sequence
  Synthetic
agaagaaucuccugaacccagcag

SEQ ID NO: 306370 - RNA, 21 nt, Artificial Sequence
  Synthetic
uuuuggguauauacccagcag

SEQ ID NO: 306371 - RNA, 22 nt, Artificial Sequence
  Synthetic
cuuuuggguauauacccagcag

SEQ ID NO: 306372 - RNA, 23 nt, Artificial Sequence
  Synthetic
ucuuuuggguauauacccagcag

SEQ ID NO: 306373 - RNA, 24 nt, Artificial Sequence
  Synthetic
uucuuuuggguauauacccagcag

SEQ ID NO: 306374 - RNA, 18 nt, Artificial Sequence
  Synthetic
gagguggagucccagcag

SEQ ID NO: 306375 - RNA, 19 nt, Artificial Sequence
  Synthetic
ggagguggagucccagcag

SEQ ID NO: 306376 - RNA, 20 nt, Artificial Sequence
  Synthetic
aggagguggagucccagcag

SEQ ID NO: 306377 - RNA, 21 nt, Artificial Sequence
  Synthetic
gaggagguggagucccagcag

SEQ ID NO: 306378 - RNA, 22 nt, Artificial Sequence
  Synthetic
ggaggagguggagucccagcag

SEQ ID NO: 306379 - RNA, 23 nt, Artificial Sequence
  Synthetic
uggaggagguggagucccagcag

SEQ ID NO: 306380 - RNA, 24 nt, Artificial Sequence
  Synthetic
uuggaggagguggagucccagcag

SEQ ID NO: 306381 - RNA, 18 nt, Artificial Sequence
  Synthetic
aagagagguucccagcag

SEQ ID NO: 306382 - RNA, 19 nt, Artificial Sequence
  Synthetic
gaagagagguucccagcag

SEQ ID NO: 306383 - RNA, 20 nt, Artificial Sequence
  Synthetic
ugaagagagguucccagcag

SEQ ID NO: 306384 - RNA, 21 nt, Artificial Sequence
  Synthetic
augaagagagguucccagcag

SEQ ID NO: 306385 - RNA, 22 nt, Artificial Sequence
  Synthetic
uaugaagagagguucccagcag

SEQ ID NO: 306386 - RNA, 23 nt, Artificial Sequence
  Synthetic
auaugaagagagguucccagcag

SEQ ID NO: 306387 - RNA, 24 nt, Artificial Sequence
  Synthetic
aauaugaagagagguucccagcag

SEQ ID NO: 306388 - RNA, 18 nt, Artificial Sequence
  Synthetic
cuaaccacaggccagcag

SEQ ID NO: 306389 - RNA, 19 nt, Artificial Sequence
  Synthetic
ccuaaccacaggccagcag

SEQ ID NO: 306390 - RNA, 20 nt, Artificial Sequence
  Synthetic
cccuaaccacaggccagcag

SEQ ID NO: 306391 - RNA, 21 nt, Artificial Sequence
  Synthetic
ccccuaaccacaggccagcag

SEQ ID NO: 306392 - RNA, 22 nt, Artificial Sequence
  Synthetic
cccccuaaccacaggccagcag

SEQ ID NO: 306393 - RNA, 23 nt, Artificial Sequence
  Synthetic
acccccuaaccacaggccagcag

SEQ ID NO: 306394 - RNA, 24 nt, Artificial Sequence
  Synthetic
aacccccuaaccacaggccagcag

SEQ ID NO: 306395 - RNA, 18 nt, Artificial Sequence
  Synthetic
aaagacaugggccagcag

SEQ ID NO: 306396 - RNA, 19 nt, Artificial Sequence
  Synthetic
gaaagacaugggccagcag

SEQ ID NO: 306397 - RNA, 20 nt, Artificial Sequence
  Synthetic
agaaagacaugggccagcag

SEQ ID NO: 306398 - RNA, 21 nt, Artificial Sequence
  Synthetic
uagaaagacaugggccagcag

SEQ ID NO: 306399 - RNA, 22 nt, Artificial Sequence
  Synthetic
guagaaagacaugggccagcag

SEQ ID NO: 306400 - RNA, 23 nt, Artificial Sequence
  Synthetic
aguagaaagacaugggccagcag

SEQ ID NO: 306401 - RNA, 24 nt, Artificial Sequence
  Synthetic
gaguagaaagacaugggccagcag

SEQ ID NO: 306402 - RNA, 18 nt, Artificial Sequence
  Synthetic
uuauggacuaagcagcag

SEQ ID NO: 306403 - RNA, 19 nt, Artificial Sequence
  Synthetic
uuuauggacuaagcagcag

SEQ ID NO: 306404 - RNA, 20 nt, Artificial Sequence
  Synthetic
guuuauggacuaagcagcag

SEQ ID NO: 306405 - RNA, 21 nt, Artificial Sequence
  Synthetic
cguuuauggacuaagcagcag

SEQ ID NO: 306406 - RNA, 22 nt, Artificial Sequence
  Synthetic
ccguuuauggacuaagcagcag

SEQ ID NO: 306407 - RNA, 23 nt, Artificial Sequence
  Synthetic
uccguuuauggacuaagcagcag

SEQ ID NO: 306408 - RNA, 24 nt, Artificial Sequence
  Synthetic
uuccguuuauggacuaagcagcag

SEQ ID NO: 306409 - RNA, 18 nt, Artificial Sequence
  Synthetic
cguguaaaacagcagcag

SEQ ID NO: 306410 - RNA, 19 nt, Artificial Sequence
  Synthetic
ucguguaaaacagcagcag

SEQ ID NO: 306411 - RNA, 20 nt, Artificial Sequence
  Synthetic
gucguguaaaacagcagcag

SEQ ID NO: 306412 - RNA, 21 nt, Artificial Sequence
  Synthetic
ugucguguaaaacagcagcag

SEQ ID NO: 306413 - RNA, 22 nt, Artificial Sequence
  Synthetic
augucguguaaaacagcagcag

SEQ ID NO: 306414 - RNA, 23 nt, Artificial Sequence
  Synthetic
aaugucguguaaaacagcagcag

SEQ ID NO: 306415 - RNA, 24 nt, Artificial Sequence
  Synthetic
gaaugucguguaaaacagcagcag

SEQ ID NO: 306416 - RNA, 18 nt, Artificial Sequence
  Synthetic
gauugguuucagcagcag

SEQ ID NO: 306417 - RNA, 19 nt, Artificial Sequence
  Synthetic
ggauugguuucagcagcag

SEQ ID NO: 306418 - RNA, 20 nt, Artificial Sequence
  Synthetic
aggauugguuucagcagcag

SEQ ID NO: 306419 - RNA, 21 nt, Artificial Sequence
  Synthetic
gaggauugguuucagcagcag

SEQ ID NO: 306420 - RNA, 22 nt, Artificial Sequence
  Synthetic
ugaggauugguuucagcagcag

SEQ ID NO: 306421 - RNA, 23 nt, Artificial Sequence
  Synthetic
gugaggauugguuucagcagcag

SEQ ID NO: 306422 - RNA, 24 nt, Artificial Sequence
  Synthetic
ggugaggauugguuucagcagcag

SEQ ID NO: 306423 - RNA, 18 nt, Artificial Sequence
  Synthetic
cucuaggacuagcagcag

SEQ ID NO: 306424 - RNA, 19 nt, Artificial Sequence
  Synthetic
acucuaggacuagcagcag

SEQ ID NO: 306425 - RNA, 20 nt, Artificial Sequence
  Synthetic
gacucuaggacuagcagcag

SEQ ID NO: 306426 - RNA, 21 nt, Artificial Sequence
  Synthetic
agacucuaggacuagcagcag

SEQ ID NO: 306427 - RNA, 22 nt, Artificial Sequence
  Synthetic
aagacucuaggacuagcagcag

SEQ ID NO: 306428 - RNA, 23 nt, Artificial Sequence
  Synthetic
caagacucuaggacuagcagcag

SEQ ID NO: 306429 - RNA, 24 nt, Artificial Sequence
  Synthetic
acaagacucuaggacuagcagcag

SEQ ID NO: 306430 - RNA, 18 nt, Artificial Sequence
  Synthetic
accuucacaaggcagcag

SEQ ID NO: 306431 - RNA, 19 nt, Artificial Sequence
  Synthetic
caccuucacaaggcagcag

SEQ ID NO: 306432 - RNA, 20 nt, Artificial Sequence
  Synthetic
gcaccuucacaaggcagcag

SEQ ID NO: 306433 - RNA, 21 nt, Artificial Sequence
  Synthetic
agcaccuucacaaggcagcag

SEQ ID NO: 306434 - RNA, 22 nt, Artificial Sequence
  Synthetic
aagcaccuucacaaggcagcag

SEQ ID NO: 306435 - RNA, 23 nt, Artificial Sequence
  Synthetic
gaagcaccuucacaaggcagcag

SEQ ID NO: 306436 - RNA, 24 nt, Artificial Sequence
  Synthetic
ggaagcaccuucacaaggcagcag

SEQ ID NO: 306437 - RNA, 18 nt, Artificial Sequence
  Synthetic
gaggauugguuucagcag

SEQ ID NO: 306438 - RNA, 19 nt, Artificial Sequence
  Synthetic
ugaggauugguuucagcag

SEQ ID NO: 306439 - RNA, 20 nt, Artificial Sequence
  Synthetic
gugaggauugguuucagcag

SEQ ID NO: 306440 - RNA, 21 nt, Artificial Sequence
  Synthetic
ggugaggauugguuucagcag

SEQ ID NO: 306441 - RNA, 22 nt, Artificial Sequence
  Synthetic
uggugaggauugguuucagcag

SEQ ID NO: 306442 - RNA, 23 nt, Artificial Sequence
  Synthetic
cuggugaggauugguuucagcag

SEQ ID NO: 306443 - RNA, 24 nt, Artificial Sequence
  Synthetic
gcuggugaggauugguuucagcag

SEQ ID NO: 306444 - RNA, 18 nt, Artificial Sequence
  Synthetic
uauauauaugaagagcag

SEQ ID NO: 306445 - RNA, 19 nt, Artificial Sequence
  Synthetic
guauauauaugaagagcag

SEQ ID NO: 306446 - RNA, 20 nt, Artificial Sequence
  Synthetic
aguauauauaugaagagcag

SEQ ID NO: 306447 - RNA, 21 nt, Artificial Sequence
  Synthetic
caguauauauaugaagagcag

SEQ ID NO: 306448 - RNA, 22 nt, Artificial Sequence
  Synthetic
ucaguauauauaugaagagcag

SEQ ID NO: 306449 - RNA, 23 nt, Artificial Sequence
  Synthetic
uucaguauauauaugaagagcag

SEQ ID NO: 306450 - RNA, 24 nt, Artificial Sequence
  Synthetic
auucaguauauauaugaagagcag

SEQ ID NO: 306451 - RNA, 18 nt, Artificial Sequence
  Synthetic
uuaaaaagugaagagcag

SEQ ID NO: 306452 - RNA, 19 nt, Artificial Sequence
  Synthetic
cuuaaaaagugaagagcag

SEQ ID NO: 306453 - RNA, 20 nt, Artificial Sequence
  Synthetic
ucuuaaaaagugaagagcag

SEQ ID NO: 306454 - RNA, 21 nt, Artificial Sequence
  Synthetic
uucuuaaaaagugaagagcag

SEQ ID NO: 306455 - RNA, 22 nt, Artificial Sequence
  Synthetic
cuucuuaaaaagugaagagcag

SEQ ID NO: 306456 - RNA, 23 nt, Artificial Sequence
  Synthetic
ucuucuuaaaaagugaagagcag

SEQ ID NO: 306457 - RNA, 24 nt, Artificial Sequence
  Synthetic
cucuucuuaaaaagugaagagcag

SEQ ID NO: 306458 - RNA, 18 nt, Artificial Sequence
  Synthetic
aaagugaaaggagagcag

SEQ ID NO: 306459 - RNA, 19 nt, Artificial Sequence
  Synthetic
uaaagugaaaggagagcag

SEQ ID NO: 306460 - RNA, 20 nt, Artificial Sequence
  Synthetic
uuaaagugaaaggagagcag

SEQ ID NO: 306461 - RNA, 21 nt, Artificial Sequence
  Synthetic
auuaaagugaaaggagagcag

SEQ ID NO: 306462 - RNA, 22 nt, Artificial Sequence
  Synthetic
cauuaaagugaaaggagagcag

SEQ ID NO: 306463 - RNA, 23 nt, Artificial Sequence
  Synthetic
acauuaaagugaaaggagagcag

SEQ ID NO: 306464 - RNA, 24 nt, Artificial Sequence
  Synthetic
aacauuaaagugaaaggagagcag

SEQ ID NO: 306465 - RNA, 18 nt, Artificial Sequence
  Synthetic
caggagauuggagagcag

SEQ ID NO: 306466 - RNA, 19 nt, Artificial Sequence
  Synthetic
gcaggagauuggagagcag

SEQ ID NO: 306467 - RNA, 20 nt, Artificial Sequence
  Synthetic
ggcaggagauuggagagcag

SEQ ID NO: 306468 - RNA, 21 nt, Artificial Sequence
  Synthetic
uggcaggagauuggagagcag

SEQ ID NO: 306469 - RNA, 22 nt, Artificial Sequence
  Synthetic
uuggcaggagauuggagagcag

SEQ ID NO: 306470 - RNA, 23 nt, Artificial Sequence
  Synthetic
guuggcaggagauuggagagcag

SEQ ID NO: 306471 - RNA, 24 nt, Artificial Sequence
  Synthetic
cguuggcaggagauuggagagcag

SEQ ID NO: 306472 - RNA, 18 nt, Artificial Sequence
  Synthetic
cugcacauaugagagcag

SEQ ID NO: 306473 - RNA, 19 nt, Artificial Sequence
  Synthetic
acugcacauaugagagcag

SEQ ID NO: 306474 - RNA, 20 nt, Artificial Sequence
  Synthetic
gacugcacauaugagagcag

SEQ ID NO: 306475 - RNA, 21 nt, Artificial Sequence
  Synthetic
ugacugcacauaugagagcag

SEQ ID NO: 306476 - RNA, 22 nt, Artificial Sequence
  Synthetic
augacugcacauaugagagcag

SEQ ID NO: 306477 - RNA, 23 nt, Artificial Sequence
  Synthetic
aaugacugcacauaugagagcag

SEQ ID NO: 306478 - RNA, 24 nt, Artificial Sequence
  Synthetic
aaaugacugcacauaugagagcag

SEQ ID NO: 306479 - RNA, 18 nt, Artificial Sequence
  Synthetic
cgucauccucccgagcag

SEQ ID NO: 306480 - RNA, 19 nt, Artificial Sequence
  Synthetic
gcgucauccucccgagcag

SEQ ID NO: 306481 - RNA, 20 nt, Artificial Sequence
  Synthetic
ugcgucauccucccgagcag

SEQ ID NO: 306482 - RNA, 21 nt, Artificial Sequence
  Synthetic
cugcgucauccucccgagcag

SEQ ID NO: 306483 - RNA, 22 nt, Artificial Sequence
  Synthetic
ccugcgucauccucccgagcag

SEQ ID NO: 306484 - RNA, 23 nt, Artificial Sequence
  Synthetic
uccugcgucauccucccgagcag

SEQ ID NO: 306485 - RNA, 24 nt, Artificial Sequence
  Synthetic
cuccugcgucauccucccgagcag

SEQ ID NO: 306486 - RNA, 18 nt, Artificial Sequence
  Synthetic
aaccauuaucaggagcag

SEQ ID NO: 306487 - RNA, 19 nt, Artificial Sequence
  Synthetic
caaccauuaucaggagcag

SEQ ID NO: 306488 - RNA, 20 nt, Artificial Sequence
  Synthetic
gcaaccauuaucaggagcag

SEQ ID NO: 306489 - RNA, 21 nt, Artificial Sequence
  Synthetic
agcaaccauuaucaggagcag

SEQ ID NO: 306490 - RNA, 22 nt, Artificial Sequence
  Synthetic
uagcaaccauuaucaggagcag

SEQ ID NO: 306491 - RNA, 23 nt, Artificial Sequence
  Synthetic
auagcaaccauuaucaggagcag

SEQ ID NO: 306492 - RNA, 24 nt, Artificial Sequence
  Synthetic
uauagcaaccauuaucaggagcag

SEQ ID NO: 306493 - RNA, 18 nt, Artificial Sequence
  Synthetic
caggaggaggaggagcag

SEQ ID NO: 306494 - RNA, 19 nt, Artificial Sequence
  Synthetic
gcaggaggaggaggagcag

SEQ ID NO: 306495 - RNA, 20 nt, Artificial Sequence
  Synthetic
ggcaggaggaggaggagcag

SEQ ID NO: 306496 - RNA, 21 nt, Artificial Sequence
  Synthetic
aggcaggaggaggaggagcag

SEQ ID NO: 306497 - RNA, 22 nt, Artificial Sequence
  Synthetic
uaggcaggaggaggaggagcag

SEQ ID NO: 306498 - RNA, 23 nt, Artificial Sequence
  Synthetic
guaggcaggaggaggaggagcag

SEQ ID NO: 306499 - RNA, 24 nt, Artificial Sequence
  Synthetic
uguaggcaggaggaggaggagcag

SEQ ID NO: 306500 - RNA, 18 nt, Artificial Sequence
  Synthetic
ugcaaggccuuggagcag

SEQ ID NO: 306501 - RNA, 19 nt, Artificial Sequence
  Synthetic
cugcaaggccuuggagcag

SEQ ID NO: 306502 - RNA, 20 nt, Artificial Sequence
  Synthetic
acugcaaggccuuggagcag

SEQ ID NO: 306503 - RNA, 21 nt, Artificial Sequence
  Synthetic
uacugcaaggccuuggagcag

SEQ ID NO: 306504 - RNA, 22 nt, Artificial Sequence
  Synthetic
auacugcaaggccuuggagcag

SEQ ID NO: 306505 - RNA, 23 nt, Artificial Sequence
  Synthetic
gauacugcaaggccuuggagcag

SEQ ID NO: 306506 - RNA, 24 nt, Artificial Sequence
  Synthetic
agauacugcaaggccuuggagcag

SEQ ID NO: 306507 - RNA, 18 nt, Artificial Sequence
  Synthetic
auuccaaaaacugagcag

SEQ ID NO: 306508 - RNA, 19 nt, Artificial Sequence
  Synthetic
cauuccaaaaacugagcag

SEQ ID NO: 306509 - RNA, 20 nt, Artificial Sequence
  Synthetic
gcauuccaaaaacugagcag

SEQ ID NO: 306510 - RNA, 21 nt, Artificial Sequence
  Synthetic
agcauuccaaaaacugagcag

SEQ ID NO: 306511 - RNA, 22 nt, Artificial Sequence
  Synthetic
gagcauuccaaaaacugagcag

SEQ ID NO: 306512 - RNA, 23 nt, Artificial Sequence
  Synthetic
agagcauuccaaaaacugagcag

SEQ ID NO: 306513 - RNA, 24 nt, Artificial Sequence
  Synthetic
gagagcauuccaaaaacugagcag

SEQ ID NO: 306514 - RNA, 18 nt, Artificial Sequence
  Synthetic
guguugcugccugagcag

SEQ ID NO: 306515 - RNA, 19 nt, Artificial Sequence
  Synthetic
aguguugcugccugagcag

SEQ ID NO: 306516 - RNA, 20 nt, Artificial Sequence
  Synthetic
caguguugcugccugagcag

SEQ ID NO: 306517 - RNA, 21 nt, Artificial Sequence
  Synthetic
gcaguguugcugccugagcag

SEQ ID NO: 306518 - RNA, 22 nt, Artificial Sequence
  Synthetic
ugcaguguugcugccugagcag

SEQ ID NO: 306519 - RNA, 23 nt, Artificial Sequence
  Synthetic
augcaguguugcugccugagcag

SEQ ID NO: 306520 - RNA, 24 nt, Artificial Sequence
  Synthetic
aaugcaguguugcugccugagcag

SEQ ID NO: 306521 - RNA, 18 nt, Artificial Sequence
  Synthetic
agaguuaauucugagcag

SEQ ID NO: 306522 - RNA, 19 nt, Artificial Sequence
  Synthetic
gagaguuaauucugagcag

SEQ ID NO: 306523 - RNA, 20 nt, Artificial Sequence
  Synthetic
agagaguuaauucugagcag

SEQ ID NO: 306524 - RNA, 21 nt, Artificial Sequence
  Synthetic
aagagaguuaauucugagcag

SEQ ID NO: 306525 - RNA, 22 nt, Artificial Sequence
  Synthetic
caagagaguuaauucugagcag

SEQ ID NO: 306526 - RNA, 23 nt, Artificial Sequence
  Synthetic
ucaagagaguuaauucugagcag

SEQ ID NO: 306527 - RNA, 24 nt, Artificial Sequence
  Synthetic
aucaagagaguuaauucugagcag

SEQ ID NO: 306528 - RNA, 18 nt, Artificial Sequence
  Synthetic
acugacugccaauagcag

SEQ ID NO: 306529 - RNA, 19 nt, Artificial Sequence
  Synthetic
uacugacugccaauagcag

SEQ ID NO: 306530 - RNA, 20 nt, Artificial Sequence
  Synthetic
auacugacugccaauagcag

SEQ ID NO: 306531 - RNA, 21 nt, Artificial Sequence
  Synthetic
uauacugacugccaauagcag

SEQ ID NO: 306532 - RNA, 22 nt, Artificial Sequence
  Synthetic
auauacugacugccaauagcag

SEQ ID NO: 306533 - RNA, 23 nt, Artificial Sequence
  Synthetic
aauauacugacugccaauagcag

SEQ ID NO: 306534 - RNA, 24 nt, Artificial Sequence
  Synthetic
aaauauacugacugccaauagcag

SEQ ID NO: 306535 - RNA, 18 nt, Artificial Sequence
  Synthetic
cuaggcugcacauagcag

SEQ ID NO: 306536 - RNA, 19 nt, Artificial Sequence
  Synthetic
ccuaggcugcacauagcag

SEQ ID NO: 306537 - RNA, 20 nt, Artificial Sequence
  Synthetic
cccuaggcugcacauagcag

SEQ ID NO: 306538 - RNA, 21 nt, Artificial Sequence
  Synthetic
ucccuaggcugcacauagcag

SEQ ID NO: 306539 - RNA, 22 nt, Artificial Sequence
  Synthetic
gucccuaggcugcacauagcag

SEQ ID NO: 306540 - RNA, 23 nt, Artificial Sequence
  Synthetic
agucccuaggcugcacauagcag

SEQ ID NO: 306541 - RNA, 24 nt, Artificial Sequence
  Synthetic
uagucccuaggcugcacauagcag

SEQ ID NO: 306542 - RNA, 18 nt, Artificial Sequence
  Synthetic
ugcuagccaugauagcag

SEQ ID NO: 306543 - RNA, 19 nt, Artificial Sequence
  Synthetic
gugcuagccaugauagcag

SEQ ID NO: 306544 - RNA, 20 nt, Artificial Sequence
  Synthetic
agugcuagccaugauagcag

SEQ ID NO: 306545 - RNA, 21 nt, Artificial Sequence
  Synthetic
cagugcuagccaugauagcag

SEQ ID NO: 306546 - RNA, 22 nt, Artificial Sequence
  Synthetic
ucagugcuagccaugauagcag

SEQ ID NO: 306547 - RNA, 23 nt, Artificial Sequence
  Synthetic
cucagugcuagccaugauagcag

SEQ ID NO: 306548 - RNA, 24 nt, Artificial Sequence
  Synthetic
acucagugcuagccaugauagcag

SEQ ID NO: 306549 - RNA, 18 nt, Artificial Sequence
  Synthetic
agaaggagaugauagcag

SEQ ID NO: 306550 - RNA, 19 nt, Artificial Sequence
  Synthetic
uagaaggagaugauagcag

SEQ ID NO: 306551 - RNA, 20 nt, Artificial Sequence
  Synthetic
uuagaaggagaugauagcag

SEQ ID NO: 306552 - RNA, 21 nt, Artificial Sequence
  Synthetic
cuuagaaggagaugauagcag

SEQ ID NO: 306553 - RNA, 22 nt, Artificial Sequence
  Synthetic
gcuuagaaggagaugauagcag

SEQ ID NO: 306554 - RNA, 23 nt, Artificial Sequence
  Synthetic
ugcuuagaaggagaugauagcag

SEQ ID NO: 306555 - RNA, 24 nt, Artificial Sequence
  Synthetic
augcuuagaaggagaugauagcag

SEQ ID NO: 306556 - RNA, 18 nt, Artificial Sequence
  Synthetic
cagcagcacuccuagcag

SEQ ID NO: 306557 - RNA, 19 nt, Artificial Sequence
  Synthetic
ccagcagcacuccuagcag

SEQ ID NO: 306558 - RNA, 20 nt, Artificial Sequence
  Synthetic
accagcagcacuccuagcag

SEQ ID NO: 306559 - RNA, 21 nt, Artificial Sequence
  Synthetic
uaccagcagcacuccuagcag

SEQ ID NO: 306560 - RNA, 22 nt, Artificial Sequence
  Synthetic
cuaccagcagcacuccuagcag

SEQ ID NO: 306561 - RNA, 23 nt, Artificial Sequence
  Synthetic
ucuaccagcagcacuccuagcag

SEQ ID NO: 306562 - RNA, 24 nt, Artificial Sequence
  Synthetic
gucuaccagcagcacuccuagcag

SEQ ID NO: 306563 - RNA, 18 nt, Artificial Sequence
  Synthetic
aaauuccaaagcuagcag

SEQ ID NO: 306564 - RNA, 19 nt, Artificial Sequence
  Synthetic
caaauuccaaagcuagcag

SEQ ID NO: 306565 - RNA, 20 nt, Artificial Sequence
  Synthetic
acaaauuccaaagcuagcag

SEQ ID NO: 306566 - RNA, 21 nt, Artificial Sequence
  Synthetic
aacaaauuccaaagcuagcag

SEQ ID NO: 306567 - RNA, 22 nt, Artificial Sequence
  Synthetic
aaacaaauuccaaagcuagcag

SEQ ID NO: 306568 - RNA, 23 nt, Artificial Sequence
  Synthetic
caaacaaauuccaaagcuagcag

SEQ ID NO: 306569 - RNA, 24 nt, Artificial Sequence
  Synthetic
gcaaacaaauuccaaagcuagcag

SEQ ID NO: 306570 - RNA, 18 nt, Artificial Sequence
  Synthetic
aaauaauaaaaguagcag

SEQ ID NO: 306571 - RNA, 19 nt, Artificial Sequence
  Synthetic
uaaauaauaaaaguagcag

SEQ ID NO: 306572 - RNA, 20 nt, Artificial Sequence
  Synthetic
auaaauaauaaaaguagcag

SEQ ID NO: 306573 - RNA, 21 nt, Artificial Sequence
  Synthetic
uauaaauaauaaaaguagcag

SEQ ID NO: 306574 - RNA, 22 nt, Artificial Sequence
  Synthetic
auauaaauaauaaaaguagcag

SEQ ID NO: 306575 - RNA, 23 nt, Artificial Sequence
  Synthetic
uauauaaauaauaaaaguagcag

SEQ ID NO: 306576 - RNA, 24 nt, Artificial Sequence
  Synthetic
auauauaaauaauaaaaguagcag

SEQ ID NO: 306577 - RNA, 18 nt, Artificial Sequence
  Synthetic
uugccaaaugaguagcag

SEQ ID NO: 306578 - RNA, 19 nt, Artificial Sequence
  Synthetic
uuugccaaaugaguagcag

SEQ ID NO: 306579 - RNA, 20 nt, Artificial Sequence
  Synthetic
guuugccaaaugaguagcag

SEQ ID NO: 306580 - RNA, 21 nt, Artificial Sequence
  Synthetic
uguuugccaaaugaguagcag

SEQ ID NO: 306581 - RNA, 22 nt, Artificial Sequence
  Synthetic
cuguuugccaaaugaguagcag

SEQ ID NO: 306582 - RNA, 23 nt, Artificial Sequence
  Synthetic
acuguuugccaaaugaguagcag

SEQ ID NO: 306583 - RNA, 24 nt, Artificial Sequence
  Synthetic
cacuguuugccaaaugaguagcag

SEQ ID NO: 306584 - RNA, 18 nt, Artificial Sequence
  Synthetic
cucagacugugguagcag

SEQ ID NO: 306585 - RNA, 19 nt, Artificial Sequence
  Synthetic
ucucagacugugguagcag

SEQ ID NO: 306586 - RNA, 20 nt, Artificial Sequence
  Synthetic
uucucagacugugguagcag

SEQ ID NO: 306587 - RNA, 21 nt, Artificial Sequence
  Synthetic
uuucucagacugugguagcag

SEQ ID NO: 306588 - RNA, 22 nt, Artificial Sequence
  Synthetic
guuucucagacugugguagcag

SEQ ID NO: 306589 - RNA, 23 nt, Artificial Sequence
  Synthetic
uguuucucagacugugguagcag

SEQ ID NO: 306590 - RNA, 24 nt, Artificial Sequence
  Synthetic
cuguuucucagacugugguagcag

SEQ ID NO: 306591 - RNA, 18 nt, Artificial Sequence
  Synthetic
caugacuuucuuuagcag

SEQ ID NO: 306592 - RNA, 19 nt, Artificial Sequence
  Synthetic
acaugacuuucuuuagcag

SEQ ID NO: 306593 - RNA, 20 nt, Artificial Sequence
  Synthetic
gacaugacuuucuuuagcag

SEQ ID NO: 306594 - RNA, 21 nt, Artificial Sequence
  Synthetic
ggacaugacuuucuuuagcag

SEQ ID NO: 306595 - RNA, 22 nt, Artificial Sequence
  Synthetic
aggacaugacuuucuuuagcag

SEQ ID NO: 306596 - RNA, 23 nt, Artificial Sequence
  Synthetic
aaggacaugacuuucuuuagcag

SEQ ID NO: 306597 - RNA, 24 nt, Artificial Sequence
  Synthetic
caaggacaugacuuucuuuagcag

SEQ ID NO: 306598 - RNA, 18 nt, Artificial Sequence
  Synthetic
gaauuuacauuuuagcag

SEQ ID NO: 306599 - RNA, 19 nt, Artificial Sequence
  Synthetic
ggaauuuacauuuuagcag

SEQ ID NO: 306600 - RNA, 20 nt, Artificial Sequence
  Synthetic
uggaauuuacauuuuagcag

SEQ ID NO: 306601 - RNA, 21 nt, Artificial Sequence
  Synthetic
guggaauuuacauuuuagcag

SEQ ID NO: 306602 - RNA, 22 nt, Artificial Sequence
  Synthetic
uguggaauuuacauuuuagcag

SEQ ID NO: 306603 - RNA, 23 nt, Artificial Sequence
  Synthetic
uuguggaauuuacauuuuagcag

SEQ ID NO: 306604 - RNA, 24 nt, Artificial Sequence
  Synthetic
guuguggaauuuacauuuuagcag

SEQ ID NO: 306605 - RNA, 18 nt, Artificial Sequence
  Synthetic
uuccaucaggggacgcag

SEQ ID NO: 306606 - RNA, 19 nt, Artificial Sequence
  Synthetic
uuuccaucaggggacgcag

SEQ ID NO: 306607 - RNA, 20 nt, Artificial Sequence
  Synthetic
guuuccaucaggggacgcag

SEQ ID NO: 306608 - RNA, 21 nt, Artificial Sequence
  Synthetic
gguuuccaucaggggacgcag

SEQ ID NO: 306609 - RNA, 22 nt, Artificial Sequence
  Synthetic
ggguuuccaucaggggacgcag

SEQ ID NO: 306610 - RNA, 23 nt, Artificial Sequence
  Synthetic
aggguuuccaucaggggacgcag

SEQ ID NO: 306611 - RNA, 24 nt, Artificial Sequence
  Synthetic
uaggguuuccaucaggggacgcag

SEQ ID NO: 306612 - RNA, 18 nt, Artificial Sequence
  Synthetic
gauuauaaauucccgcag

SEQ ID NO: 306613 - RNA, 19 nt, Artificial Sequence
  Synthetic
agauuauaaauucccgcag

SEQ ID NO: 306614 - RNA, 20 nt, Artificial Sequence
  Synthetic
aagauuauaaauucccgcag

SEQ ID NO: 306615 - RNA, 21 nt, Artificial Sequence
  Synthetic
gaagauuauaaauucccgcag

SEQ ID NO: 306616 - RNA, 22 nt, Artificial Sequence
  Synthetic
ugaagauuauaaauucccgcag

SEQ ID NO: 306617 - RNA, 23 nt, Artificial Sequence
  Synthetic
augaagauuauaaauucccgcag

SEQ ID NO: 306618 - RNA, 24 nt, Artificial Sequence
  Synthetic
aaugaagauuauaaauucccgcag

SEQ ID NO: 306619 - RNA, 18 nt, Artificial Sequence
  Synthetic
cuaacuugcuuuccgcag

SEQ ID NO: 306620 - RNA, 19 nt, Artificial Sequence
  Synthetic
acuaacuugcuuuccgcag

SEQ ID NO: 306621 - RNA, 20 nt, Artificial Sequence
  Synthetic
cacuaacuugcuuuccgcag

SEQ ID NO: 306622 - RNA, 21 nt, Artificial Sequence
  Synthetic
acacuaacuugcuuuccgcag

SEQ ID NO: 306623 - RNA, 22 nt, Artificial Sequence
  Synthetic
uacacuaacuugcuuuccgcag

SEQ ID NO: 306624 - RNA, 23 nt, Artificial Sequence
  Synthetic
cuacacuaacuugcuuuccgcag

SEQ ID NO: 306625 - RNA, 24 nt, Artificial Sequence
  Synthetic
acuacacuaacuugcuuuccgcag

SEQ ID NO: 306626 - RNA, 18 nt, Artificial Sequence
  Synthetic
aaacuagaagaaucgcag

SEQ ID NO: 306627 - RNA, 19 nt, Artificial Sequence
  Synthetic
caaacuagaagaaucgcag

SEQ ID NO: 306628 - RNA, 20 nt, Artificial Sequence
  Synthetic
ucaaacuagaagaaucgcag

SEQ ID NO: 306629 - RNA, 21 nt, Artificial Sequence
  Synthetic
cucaaacuagaagaaucgcag

SEQ ID NO: 306630 - RNA, 22 nt, Artificial Sequence
  Synthetic
ucucaaacuagaagaaucgcag

SEQ ID NO: 306631 - RNA, 23 nt, Artificial Sequence
  Synthetic
aucucaaacuagaagaaucgcag

SEQ ID NO: 306632 - RNA, 24 nt, Artificial Sequence
  Synthetic
aaucucaaacuagaagaaucgcag

SEQ ID NO: 306633 - RNA, 18 nt, Artificial Sequence
  Synthetic
gauuggacugucucgcag

SEQ ID NO: 306634 - RNA, 19 nt, Artificial Sequence
  Synthetic
ugauuggacugucucgcag

SEQ ID NO: 306635 - RNA, 20 nt, Artificial Sequence
  Synthetic
uugauuggacugucucgcag

SEQ ID NO: 306636 - RNA, 21 nt, Artificial Sequence
  Synthetic
auugauuggacugucucgcag

SEQ ID NO: 306637 - RNA, 22 nt, Artificial Sequence
  Synthetic
gauugauuggacugucucgcag

SEQ ID NO: 306638 - RNA, 23 nt, Artificial Sequence
  Synthetic
ugauugauuggacugucucgcag

SEQ ID NO: 306639 - RNA, 24 nt, Artificial Sequence
  Synthetic
cugauugauuggacugucucgcag

SEQ ID NO: 306640 - RNA, 18 nt, Artificial Sequence
  Synthetic
ugcugaaauaaaaggcag

SEQ ID NO: 306641 - RNA, 19 nt, Artificial Sequence
  Synthetic
cugcugaaauaaaaggcag

SEQ ID NO: 306642 - RNA, 20 nt, Artificial Sequence
  Synthetic
ucugcugaaauaaaaggcag

SEQ ID NO: 306643 - RNA, 21 nt, Artificial Sequence
  Synthetic
uucugcugaaauaaaaggcag

SEQ ID NO: 306644 - RNA, 22 nt, Artificial Sequence
  Synthetic
auucugcugaaauaaaaggcag

SEQ ID NO: 306645 - RNA, 23 nt, Artificial Sequence
  Synthetic
aauucugcugaaauaaaaggcag

SEQ ID NO: 306646 - RNA, 24 nt, Artificial Sequence
  Synthetic
caauucugcugaaauaaaaggcag

SEQ ID NO: 306647 - RNA, 18 nt, Artificial Sequence
  Synthetic
ccauaaccagaaaggcag

SEQ ID NO: 306648 - RNA, 19 nt, Artificial Sequence
  Synthetic
accauaaccagaaaggcag

SEQ ID NO: 306649 - RNA, 20 nt, Artificial Sequence
  Synthetic
caccauaaccagaaaggcag

SEQ ID NO: 306650 - RNA, 21 nt, Artificial Sequence
  Synthetic
ucaccauaaccagaaaggcag

SEQ ID NO: 306651 - RNA, 22 nt, Artificial Sequence
  Synthetic
cucaccauaaccagaaaggcag

SEQ ID NO: 306652 - RNA, 23 nt, Artificial Sequence
  Synthetic
ucucaccauaaccagaaaggcag

SEQ ID NO: 306653 - RNA, 24 nt, Artificial Sequence
  Synthetic
gucucaccauaaccagaaaggcag

SEQ ID NO: 306654 - RNA, 18 nt, Artificial Sequence
  Synthetic
agcaccuucacaaggcag

SEQ ID NO: 306655 - RNA, 19 nt, Artificial Sequence
  Synthetic
aagcaccuucacaaggcag

SEQ ID NO: 306656 - RNA, 20 nt, Artificial Sequence
  Synthetic
gaagcaccuucacaaggcag

SEQ ID NO: 306657 - RNA, 21 nt, Artificial Sequence
  Synthetic
ggaagcaccuucacaaggcag

SEQ ID NO: 306658 - RNA, 22 nt, Artificial Sequence
  Synthetic
aggaagcaccuucacaaggcag

SEQ ID NO: 306659 - RNA, 23 nt, Artificial Sequence
  Synthetic
aaggaagcaccuucacaaggcag

SEQ ID NO: 306660 - RNA, 24 nt, Artificial Sequence
  Synthetic
gaaggaagcaccuucacaaggcag

SEQ ID NO: 306661 - RNA, 18 nt, Artificial Sequence
  Synthetic
gagacggaagcaaggcag

SEQ ID NO: 306662 - RNA, 19 nt, Artificial Sequence
  Synthetic
ggagacggaagcaaggcag

SEQ ID NO: 306663 - RNA, 20 nt, Artificial Sequence
  Synthetic
gggagacggaagcaaggcag

SEQ ID NO: 306664 - RNA, 21 nt, Artificial Sequence
  Synthetic
ugggagacggaagcaaggcag

SEQ ID NO: 306665 - RNA, 22 nt, Artificial Sequence
  Synthetic
augggagacggaagcaaggcag

SEQ ID NO: 306666 - RNA, 23 nt, Artificial Sequence
  Synthetic
aaugggagacggaagcaaggcag

SEQ ID NO: 306667 - RNA, 24 nt, Artificial Sequence
  Synthetic
gaaugggagacggaagcaaggcag

SEQ ID NO: 306668 - RNA, 18 nt, Artificial Sequence
  Synthetic
aggaaucccagaaggcag

SEQ ID NO: 306669 - RNA, 19 nt, Artificial Sequence
  Synthetic
aaggaaucccagaaggcag

SEQ ID NO: 306670 - RNA, 20 nt, Artificial Sequence
  Synthetic
gaaggaaucccagaaggcag

SEQ ID NO: 306671 - RNA, 21 nt, Artificial Sequence
  Synthetic
agaaggaaucccagaaggcag

SEQ ID NO: 306672 - RNA, 22 nt, Artificial Sequence
  Synthetic
cagaaggaaucccagaaggcag

SEQ ID NO: 306673 - RNA, 23 nt, Artificial Sequence
  Synthetic
ucagaaggaaucccagaaggcag

SEQ ID NO: 306674 - RNA, 24 nt, Artificial Sequence
  Synthetic
gucagaaggaaucccagaaggcag

SEQ ID NO: 306675 - RNA, 18 nt, Artificial Sequence
  Synthetic
acggagccgagaaggcag

SEQ ID NO: 306676 - RNA, 19 nt, Artificial Sequence
  Synthetic
gacggagccgagaaggcag

SEQ ID NO: 306677 - RNA, 20 nt, Artificial Sequence
  Synthetic
agacggagccgagaaggcag

SEQ ID NO: 306678 - RNA, 21 nt, Artificial Sequence
  Synthetic
gagacggagccgagaaggcag

SEQ ID NO: 306679 - RNA, 22 nt, Artificial Sequence
  Synthetic
ggagacggagccgagaaggcag

SEQ ID NO: 306680 - RNA, 23 nt, Artificial Sequence
  Synthetic
aggagacggagccgagaaggcag

SEQ ID NO: 306681 - RNA, 24 nt, Artificial Sequence
  Synthetic
caggagacggagccgagaaggcag

SEQ ID NO: 306682 - RNA, 18 nt, Artificial Sequence
  Synthetic
gucuuuccaugaaggcag

SEQ ID NO: 306683 - RNA, 19 nt, Artificial Sequence
  Synthetic
agucuuuccaugaaggcag

SEQ ID NO: 306684 - RNA, 20 nt, Artificial Sequence
  Synthetic
aagucuuuccaugaaggcag

SEQ ID NO: 306685 - RNA, 21 nt, Artificial Sequence
  Synthetic
gaagucuuuccaugaaggcag

SEQ ID NO: 306686 - RNA, 22 nt, Artificial Sequence
  Synthetic
ggaagucuuuccaugaaggcag

SEQ ID NO: 306687 - RNA, 23 nt, Artificial Sequence
  Synthetic
aggaagucuuuccaugaaggcag

SEQ ID NO: 306688 - RNA, 24 nt, Artificial Sequence
  Synthetic
aaggaagucuuuccaugaaggcag

SEQ ID NO: 306689 - RNA, 18 nt, Artificial Sequence
  Synthetic
caaggaggcauaaggcag

SEQ ID NO: 306690 - RNA, 19 nt, Artificial Sequence
  Synthetic
ccaaggaggcauaaggcag

SEQ ID NO: 306691 - RNA, 20 nt, Artificial Sequence
  Synthetic
accaaggaggcauaaggcag

SEQ ID NO: 306692 - RNA, 21 nt, Artificial Sequence
  Synthetic
gaccaaggaggcauaaggcag

SEQ ID NO: 306693 - RNA, 22 nt, Artificial Sequence
  Synthetic
cgaccaaggaggcauaaggcag

SEQ ID NO: 306694 - RNA, 23 nt, Artificial Sequence
  Synthetic
ucgaccaaggaggcauaaggcag

SEQ ID NO: 306695 - RNA, 24 nt, Artificial Sequence
  Synthetic
uucgaccaaggaggcauaaggcag

SEQ ID NO: 306696 - RNA, 18 nt, Artificial Sequence
  Synthetic
guuugaauuguaaggcag

SEQ ID NO: 306697 - RNA, 19 nt, Artificial Sequence
  Synthetic
aguuugaauuguaaggcag

SEQ ID NO: 306698 - RNA, 20 nt, Artificial Sequence
  Synthetic
gaguuugaauuguaaggcag

SEQ ID NO: 306699 - RNA, 21 nt, Artificial Sequence
  Synthetic
ggaguuugaauuguaaggcag

SEQ ID NO: 306700 - RNA, 22 nt, Artificial Sequence
  Synthetic
aggaguuugaauuguaaggcag

SEQ ID NO: 306701 - RNA, 23 nt, Artificial Sequence
  Synthetic
uaggaguuugaauuguaaggcag

SEQ ID NO: 306702 - RNA, 24 nt, Artificial Sequence
  Synthetic
guaggaguuugaauuguaaggcag

SEQ ID NO: 306703 - RNA, 18 nt, Artificial Sequence
  Synthetic
aggcaucacaacaggcag

SEQ ID NO: 306704 - RNA, 19 nt, Artificial Sequence
  Synthetic
uaggcaucacaacaggcag

SEQ ID NO: 306705 - RNA, 20 nt, Artificial Sequence
  Synthetic
auaggcaucacaacaggcag

SEQ ID NO: 306706 - RNA, 21 nt, Artificial Sequence
  Synthetic
uauaggcaucacaacaggcag

SEQ ID NO: 306707 - RNA, 22 nt, Artificial Sequence
  Synthetic
guauaggcaucacaacaggcag

SEQ ID NO: 306708 - RNA, 23 nt, Artificial Sequence
  Synthetic
aguauaggcaucacaacaggcag

SEQ ID NO: 306709 - RNA, 24 nt, Artificial Sequence
  Synthetic
gaguauaggcaucacaacaggcag

SEQ ID NO: 306710 - RNA, 18 nt, Artificial Sequence
  Synthetic
ucagcaguccacaggcag

SEQ ID NO: 306711 - RNA, 19 nt, Artificial Sequence
  Synthetic
gucagcaguccacaggcag

SEQ ID NO: 306712 - RNA, 20 nt, Artificial Sequence
  Synthetic
ugucagcaguccacaggcag

SEQ ID NO: 306713 - RNA, 21 nt, Artificial Sequence
  Synthetic
cugucagcaguccacaggcag

SEQ ID NO: 306714 - RNA, 22 nt, Artificial Sequence
  Synthetic
ccugucagcaguccacaggcag

SEQ ID NO: 306715 - RNA, 23 nt, Artificial Sequence
  Synthetic
uccugucagcaguccacaggcag

SEQ ID NO: 306716 - RNA, 24 nt, Artificial Sequence
  Synthetic
uuccugucagcaguccacaggcag

SEQ ID NO: 306717 - RNA, 18 nt, Artificial Sequence
  Synthetic
aaauucgcagacaggcag

SEQ ID NO: 306718 - RNA, 19 nt, Artificial Sequence
  Synthetic
aaaauucgcagacaggcag

SEQ ID NO: 306719 - RNA, 20 nt, Artificial Sequence
  Synthetic
gaaaauucgcagacaggcag

SEQ ID NO: 306720 - RNA, 21 nt, Artificial Sequence
  Synthetic
ggaaaauucgcagacaggcag

SEQ ID NO: 306721 - RNA, 22 nt, Artificial Sequence
  Synthetic
aggaaaauucgcagacaggcag

SEQ ID NO: 306722 - RNA, 23 nt, Artificial Sequence
  Synthetic
aaggaaaauucgcagacaggcag

SEQ ID NO: 306723 - RNA, 24 nt, Artificial Sequence
  Synthetic
uaaggaaaauucgcagacaggcag

SEQ ID NO: 306724 - RNA, 18 nt, Artificial Sequence
  Synthetic
uuauauaguuacaggcag

SEQ ID NO: 306725 - RNA, 19 nt, Artificial Sequence
  Synthetic
auuauauaguuacaggcag

SEQ ID NO: 306726 - RNA, 20 nt, Artificial Sequence
  Synthetic
aauuauauaguuacaggcag

SEQ ID NO: 306727 - RNA, 21 nt, Artificial Sequence
  Synthetic
aaauuauauaguuacaggcag

SEQ ID NO: 306728 - RNA, 22 nt, Artificial Sequence
  Synthetic
uaaauuauauaguuacaggcag

SEQ ID NO: 306729 - RNA, 23 nt, Artificial Sequence
  Synthetic
uuaaauuauauaguuacaggcag

SEQ ID NO: 306730 - RNA, 24 nt, Artificial Sequence
  Synthetic
guuaaauuauauaguuacaggcag

SEQ ID NO: 306731 - RNA, 18 nt, Artificial Sequence
  Synthetic
ucagggacuaccaggcag

SEQ ID NO: 306732 - RNA, 19 nt, Artificial Sequence
  Synthetic
gucagggacuaccaggcag

SEQ ID NO: 306733 - RNA, 20 nt, Artificial Sequence
  Synthetic
ugucagggacuaccaggcag

SEQ ID NO: 306734 - RNA, 21 nt, Artificial Sequence
  Synthetic
gugucagggacuaccaggcag

SEQ ID NO: 306735 - RNA, 22 nt, Artificial Sequence
  Synthetic
agugucagggacuaccaggcag

SEQ ID NO: 306736 - RNA, 23 nt, Artificial Sequence
  Synthetic
cagugucagggacuaccaggcag

SEQ ID NO: 306737 - RNA, 24 nt, Artificial Sequence
  Synthetic
gcagugucagggacuaccaggcag

SEQ ID NO: 306738 - RNA, 18 nt, Artificial Sequence
  Synthetic
gaaggacaucccaggcag

SEQ ID NO: 306739 - RNA, 19 nt, Artificial Sequence
  Synthetic
ggaaggacaucccaggcag

SEQ ID NO: 306740 - RNA, 20 nt, Artificial Sequence
  Synthetic
uggaaggacaucccaggcag

SEQ ID NO: 306741 - RNA, 21 nt, Artificial Sequence
  Synthetic
auggaaggacaucccaggcag

SEQ ID NO: 306742 - RNA, 22 nt, Artificial Sequence
  Synthetic
uauggaaggacaucccaggcag

SEQ ID NO: 306743 - RNA, 23 nt, Artificial Sequence
  Synthetic
guauggaaggacaucccaggcag

SEQ ID NO: 306744 - RNA, 24 nt, Artificial Sequence
  Synthetic
uguauggaaggacaucccaggcag

SEQ ID NO: 306745 - RNA, 18 nt, Artificial Sequence
  Synthetic
gaagggcaauccaggcag

SEQ ID NO: 306746 - RNA, 19 nt, Artificial Sequence
  Synthetic
agaagggcaauccaggcag

SEQ ID NO: 306747 - RNA, 20 nt, Artificial Sequence
  Synthetic
gagaagggcaauccaggcag

SEQ ID NO: 306748 - RNA, 21 nt, Artificial Sequence
  Synthetic
cgagaagggcaauccaggcag

SEQ ID NO: 306749 - RNA, 22 nt, Artificial Sequence
  Synthetic
acgagaagggcaauccaggcag

SEQ ID NO: 306750 - RNA, 23 nt, Artificial Sequence
  Synthetic
aacgagaagggcaauccaggcag

SEQ ID NO: 306751 - RNA, 24 nt, Artificial Sequence
  Synthetic
aaacgagaagggcaauccaggcag

SEQ ID NO: 306752 - RNA, 18 nt, Artificial Sequence
  Synthetic
caaaaacauuccaggcag

SEQ ID NO: 306753 - RNA, 19 nt, Artificial Sequence
  Synthetic
gcaaaaacauuccaggcag

SEQ ID NO: 306754 - RNA, 20 nt, Artificial Sequence
  Synthetic
ggcaaaaacauuccaggcag

SEQ ID NO: 306755 - RNA, 21 nt, Artificial Sequence
  Synthetic
gggcaaaaacauuccaggcag

SEQ ID NO: 306756 - RNA, 22 nt, Artificial Sequence
  Synthetic
ugggcaaaaacauuccaggcag

SEQ ID NO: 306757 - RNA, 23 nt, Artificial Sequence
  Synthetic
uugggcaaaaacauuccaggcag

SEQ ID NO: 306758 - RNA, 24 nt, Artificial Sequence
  Synthetic
uuugggcaaaaacauuccaggcag

SEQ ID NO: 306759 - RNA, 18 nt, Artificial Sequence
  Synthetic
gccagggcaaucaggcag

SEQ ID NO: 306760 - RNA, 19 nt, Artificial Sequence
  Synthetic
ggccagggcaaucaggcag

SEQ ID NO: 306761 - RNA, 20 nt, Artificial Sequence
  Synthetic
uggccagggcaaucaggcag

SEQ ID NO: 306762 - RNA, 21 nt, Artificial Sequence
  Synthetic
cuggccagggcaaucaggcag

SEQ ID NO: 306763 - RNA, 22 nt, Artificial Sequence
  Synthetic
ucuggccagggcaaucaggcag

SEQ ID NO: 306764 - RNA, 23 nt, Artificial Sequence
  Synthetic
uucuggccagggcaaucaggcag

SEQ ID NO: 306765 - RNA, 24 nt, Artificial Sequence
  Synthetic
guucuggccagggcaaucaggcag

SEQ ID NO: 306766 - RNA, 18 nt, Artificial Sequence
  Synthetic
auauuaaaucucaggcag

SEQ ID NO: 306767 - RNA, 19 nt, Artificial Sequence
  Synthetic
cauauuaaaucucaggcag

SEQ ID NO: 306768 - RNA, 20 nt, Artificial Sequence
  Synthetic
gcauauuaaaucucaggcag

SEQ ID NO: 306769 - RNA, 21 nt, Artificial Sequence
  Synthetic
agcauauuaaaucucaggcag

SEQ ID NO: 306770 - RNA, 22 nt, Artificial Sequence
  Synthetic
cagcauauuaaaucucaggcag

SEQ ID NO: 306771 - RNA, 23 nt, Artificial Sequence
  Synthetic
gcagcauauuaaaucucaggcag

SEQ ID NO: 306772 - RNA, 24 nt, Artificial Sequence
  Synthetic
ggcagcauauuaaaucucaggcag

SEQ ID NO: 306773 - RNA, 18 nt, Artificial Sequence
  Synthetic
caaggaggagagaggcag

SEQ ID NO: 306774 - RNA, 19 nt, Artificial Sequence
  Synthetic
acaaggaggagagaggcag

SEQ ID NO: 306775 - RNA, 20 nt, Artificial Sequence
  Synthetic
gacaaggaggagagaggcag

SEQ ID NO: 306776 - RNA, 21 nt, Artificial Sequence
  Synthetic
ggacaaggaggagagaggcag

SEQ ID NO: 306777 - RNA, 22 nt, Artificial Sequence
  Synthetic
uggacaaggaggagagaggcag

SEQ ID NO: 306778 - RNA, 23 nt, Artificial Sequence
  Synthetic
uuggacaaggaggagagaggcag

SEQ ID NO: 306779 - RNA, 24 nt, Artificial Sequence
  Synthetic
uuuggacaaggaggagagaggcag

SEQ ID NO: 306780 - RNA, 18 nt, Artificial Sequence
  Synthetic
cugaccugugugaggcag

SEQ ID NO: 306781 - RNA, 19 nt, Artificial Sequence
  Synthetic
acugaccugugugaggcag

SEQ ID NO: 306782 - RNA, 20 nt, Artificial Sequence
  Synthetic
aacugaccugugugaggcag

SEQ ID NO: 306783 - RNA, 21 nt, Artificial Sequence
  Synthetic
caacugaccugugugaggcag

SEQ ID NO: 306784 - RNA, 22 nt, Artificial Sequence
  Synthetic
acaacugaccugugugaggcag

SEQ ID NO: 306785 - RNA, 23 nt, Artificial Sequence
  Synthetic
aacaacugaccugugugaggcag

SEQ ID NO: 306786 - RNA, 24 nt, Artificial Sequence
  Synthetic
caacaacugaccugugugaggcag

SEQ ID NO: 306787 - RNA, 18 nt, Artificial Sequence
  Synthetic
augaugcauucuaggcag

SEQ ID NO: 306788 - RNA, 19 nt, Artificial Sequence
  Synthetic
gaugaugcauucuaggcag

SEQ ID NO: 306789 - RNA, 20 nt, Artificial Sequence
  Synthetic
agaugaugcauucuaggcag

SEQ ID NO: 306790 - RNA, 21 nt, Artificial Sequence
  Synthetic
cagaugaugcauucuaggcag

SEQ ID NO: 306791 - RNA, 22 nt, Artificial Sequence
  Synthetic
ccagaugaugcauucuaggcag

SEQ ID NO: 306792 - RNA, 23 nt, Artificial Sequence
  Synthetic
accagaugaugcauucuaggcag

SEQ ID NO: 306793 - RNA, 24 nt, Artificial Sequence
  Synthetic
uaccagaugaugcauucuaggcag

SEQ ID NO: 306794 - RNA, 18 nt, Artificial Sequence
  Synthetic
gaagaggauucuaggcag

SEQ ID NO: 306795 - RNA, 19 nt, Artificial Sequence
  Synthetic
ugaagaggauucuaggcag

SEQ ID NO: 306796 - RNA, 20 nt, Artificial Sequence
  Synthetic
augaagaggauucuaggcag

SEQ ID NO: 306797 - RNA, 21 nt, Artificial Sequence
  Synthetic
aaugaagaggauucuaggcag

SEQ ID NO: 306798 - RNA, 22 nt, Artificial Sequence
  Synthetic
gaaugaagaggauucuaggcag

SEQ ID NO: 306799 - RNA, 23 nt, Artificial Sequence
  Synthetic
ugaaugaagaggauucuaggcag

SEQ ID NO: 306800 - RNA, 24 nt, Artificial Sequence
  Synthetic
uugaaugaagaggauucuaggcag

SEQ ID NO: 306801 - RNA, 18 nt, Artificial Sequence
  Synthetic
agagagagauguaggcag

SEQ ID NO: 306802 - RNA, 19 nt, Artificial Sequence
  Synthetic
gagagagagauguaggcag

SEQ ID NO: 306803 - RNA, 20 nt, Artificial Sequence
  Synthetic
ggagagagagauguaggcag

SEQ ID NO: 306804 - RNA, 21 nt, Artificial Sequence
  Synthetic
gggagagagagauguaggcag

SEQ ID NO: 306805 - RNA, 22 nt, Artificial Sequence
  Synthetic
agggagagagagauguaggcag

SEQ ID NO: 306806 - RNA, 23 nt, Artificial Sequence
  Synthetic
aagggagagagagauguaggcag

SEQ ID NO: 306807 - RNA, 24 nt, Artificial Sequence
  Synthetic
gaagggagagagagauguaggcag

SEQ ID NO: 306808 - RNA, 18 nt, Artificial Sequence
  Synthetic
ucuuuguaaaaagggcag

SEQ ID NO: 306809 - RNA, 19 nt, Artificial Sequence
  Synthetic
aucuuuguaaaaagggcag

SEQ ID NO: 306810 - RNA, 20 nt, Artificial Sequence
  Synthetic
caucuuuguaaaaagggcag

SEQ ID NO: 306811 - RNA, 21 nt, Artificial Sequence
  Synthetic
gcaucuuuguaaaaagggcag

SEQ ID NO: 306812 - RNA, 22 nt, Artificial Sequence
  Synthetic
agcaucuuuguaaaaagggcag

SEQ ID NO: 306813 - RNA, 23 nt, Artificial Sequence
  Synthetic
uagcaucuuuguaaaaagggcag

SEQ ID NO: 306814 - RNA, 24 nt, Artificial Sequence
  Synthetic
auagcaucuuuguaaaaagggcag

SEQ ID NO: 306815 - RNA, 18 nt, Artificial Sequence
  Synthetic
uuggcuuggcgagggcag

SEQ ID NO: 306816 - RNA, 19 nt, Artificial Sequence
  Synthetic
cuuggcuuggcgagggcag

SEQ ID NO: 306817 - RNA, 20 nt, Artificial Sequence
  Synthetic
ccuuggcuuggcgagggcag

SEQ ID NO: 306818 - RNA, 21 nt, Artificial Sequence
  Synthetic
uccuuggcuuggcgagggcag

SEQ ID NO: 306819 - RNA, 22 nt, Artificial Sequence
  Synthetic
uuccuuggcuuggcgagggcag

SEQ ID NO: 306820 - RNA, 23 nt, Artificial Sequence
  Synthetic
uuuccuuggcuuggcgagggcag

SEQ ID NO: 306821 - RNA, 24 nt, Artificial Sequence
  Synthetic
uuuuccuuggcuuggcgagggcag

SEQ ID NO: 306822 - RNA, 18 nt, Artificial Sequence
  Synthetic
gucaacguguaggggcag

SEQ ID NO: 306823 - RNA, 19 nt, Artificial Sequence
  Synthetic
ggucaacguguaggggcag

SEQ ID NO: 306824 - RNA, 20 nt, Artificial Sequence
  Synthetic
gggucaacguguaggggcag

SEQ ID NO: 306825 - RNA, 21 nt, Artificial Sequence
  Synthetic
ggggucaacguguaggggcag

SEQ ID NO: 306826 - RNA, 22 nt, Artificial Sequence
  Synthetic
uggggucaacguguaggggcag

SEQ ID NO: 306827 - RNA, 23 nt, Artificial Sequence
  Synthetic
uuggggucaacguguaggggcag

SEQ ID NO: 306828 - RNA, 24 nt, Artificial Sequence
  Synthetic
cuuggggucaacguguaggggcag

SEQ ID NO: 306829 - RNA, 18 nt, Artificial Sequence
  Synthetic
ugggggauuggggggcag

SEQ ID NO: 306830 - RNA, 19 nt, Artificial Sequence
  Synthetic
uugggggauuggggggcag

SEQ ID NO: 306831 - RNA, 20 nt, Artificial Sequence
  Synthetic
guugggggauuggggggcag

SEQ ID NO: 306832 - RNA, 21 nt, Artificial Sequence
  Synthetic
aguugggggauuggggggcag

SEQ ID NO: 306833 - RNA, 22 nt, Artificial Sequence
  Synthetic
caguugggggauuggggggcag

SEQ ID NO: 306834 - RNA, 23 nt, Artificial Sequence
  Synthetic
ccaguugggggauuggggggcag

SEQ ID NO: 306835 - RNA, 24 nt, Artificial Sequence
  Synthetic
accaguugggggauuggggggcag

SEQ ID NO: 306836 - RNA, 18 nt, Artificial Sequence
  Synthetic
cccgaaaggcuggggcag

SEQ ID NO: 306837 - RNA, 19 nt, Artificial Sequence
  Synthetic
acccgaaaggcuggggcag

SEQ ID NO: 306838 - RNA, 20 nt, Artificial Sequence
  Synthetic
uacccgaaaggcuggggcag

SEQ ID NO: 306839 - RNA, 21 nt, Artificial Sequence
  Synthetic
cuacccgaaaggcuggggcag

SEQ ID NO: 306840 - RNA, 22 nt, Artificial Sequence
  Synthetic
gcuacccgaaaggcuggggcag

SEQ ID NO: 306841 - RNA, 23 nt, Artificial Sequence
  Synthetic
agcuacccgaaaggcuggggcag

SEQ ID NO: 306842 - RNA, 24 nt, Artificial Sequence
  Synthetic
cagcuacccgaaaggcuggggcag

SEQ ID NO: 306843 - RNA, 18 nt, Artificial Sequence
  Synthetic
ugguggggcuuggggcag

SEQ ID NO: 306844 - RNA, 19 nt, Artificial Sequence
  Synthetic
gugguggggcuuggggcag

SEQ ID NO: 306845 - RNA, 20 nt, Artificial Sequence
  Synthetic
agugguggggcuuggggcag

SEQ ID NO: 306846 - RNA, 21 nt, Artificial Sequence
  Synthetic
uagugguggggcuuggggcag

SEQ ID NO: 306847 - RNA, 22 nt, Artificial Sequence
  Synthetic
auagugguggggcuuggggcag

SEQ ID NO: 306848 - RNA, 23 nt, Artificial Sequence
  Synthetic
aauagugguggggcuuggggcag

SEQ ID NO: 306849 - RNA, 24 nt, Artificial Sequence
  Synthetic
uaauagugguggggcuuggggcag

SEQ ID NO: 306850 - RNA, 18 nt, Artificial Sequence
  Synthetic
uaugcauuuaaugggcag

SEQ ID NO: 306851 - RNA, 19 nt, Artificial Sequence
  Synthetic
auaugcauuuaaugggcag

SEQ ID NO: 306852 - RNA, 20 nt, Artificial Sequence
  Synthetic
cauaugcauuuaaugggcag

SEQ ID NO: 306853 - RNA, 21 nt, Artificial Sequence
  Synthetic
ucauaugcauuuaaugggcag

SEQ ID NO: 306854 - RNA, 22 nt, Artificial Sequence
  Synthetic
cucauaugcauuuaaugggcag

SEQ ID NO: 306855 - RNA, 23 nt, Artificial Sequence
  Synthetic
acucauaugcauuuaaugggcag

SEQ ID NO: 306856 - RNA, 24 nt, Artificial Sequence
  Synthetic
gacucauaugcauuuaaugggcag

SEQ ID NO: 306857 - RNA, 18 nt, Artificial Sequence
  Synthetic
agcucugugacugggcag

SEQ ID NO: 306858 - RNA, 19 nt, Artificial Sequence
  Synthetic
uagcucugugacugggcag

SEQ ID NO: 306859 - RNA, 20 nt, Artificial Sequence
  Synthetic
cuagcucugugacugggcag

SEQ ID NO: 306860 - RNA, 21 nt, Artificial Sequence
  Synthetic
gcuagcucugugacugggcag

SEQ ID NO: 306861 - RNA, 22 nt, Artificial Sequence
  Synthetic
agcuagcucugugacugggcag

SEQ ID NO: 306862 - RNA, 23 nt, Artificial Sequence
  Synthetic
aagcuagcucugugacugggcag

SEQ ID NO: 306863 - RNA, 24 nt, Artificial Sequence
  Synthetic
gaagcuagcucugugacugggcag

SEQ ID NO: 306864 - RNA, 18 nt, Artificial Sequence
  Synthetic
aagauucagugugggcag

SEQ ID NO: 306865 - RNA, 19 nt, Artificial Sequence
  Synthetic
aaagauucagugugggcag

SEQ ID NO: 306866 - RNA, 20 nt, Artificial Sequence
  Synthetic
uaaagauucagugugggcag

SEQ ID NO: 306867 - RNA, 21 nt, Artificial Sequence
  Synthetic
uuaaagauucagugugggcag

SEQ ID NO: 306868 - RNA, 22 nt, Artificial Sequence
  Synthetic
uuuaaagauucagugugggcag

SEQ ID NO: 306869 - RNA, 23 nt, Artificial Sequence
  Synthetic
uuuuaaagauucagugugggcag

SEQ ID NO: 306870 - RNA, 24 nt, Artificial Sequence
  Synthetic
uuuuuaaagauucagugugggcag

SEQ ID NO: 306871 - RNA, 18 nt, Artificial Sequence
  Synthetic
gggagcaggauugggcag

SEQ ID NO: 306872 - RNA, 19 nt, Artificial Sequence
  Synthetic
agggagcaggauugggcag

SEQ ID NO: 306873 - RNA, 20 nt, Artificial Sequence
  Synthetic
aagggagcaggauugggcag

SEQ ID NO: 306874 - RNA, 21 nt, Artificial Sequence
  Synthetic
aaagggagcaggauugggcag

SEQ ID NO: 306875 - RNA, 22 nt, Artificial Sequence
  Synthetic
gaaagggagcaggauugggcag

SEQ ID NO: 306876 - RNA, 23 nt, Artificial Sequence
  Synthetic
ggaaagggagcaggauugggcag

SEQ ID NO: 306877 - RNA, 24 nt, Artificial Sequence
  Synthetic
aggaaagggagcaggauugggcag

SEQ ID NO: 306878 - RNA, 18 nt, Artificial Sequence
  Synthetic
uuaauagaaacauggcag

SEQ ID NO: 306879 - RNA, 19 nt, Artificial Sequence
  Synthetic
auuaauagaaacauggcag

SEQ ID NO: 306880 - RNA, 20 nt, Artificial Sequence
  Synthetic
cauuaauagaaacauggcag

SEQ ID NO: 306881 - RNA, 21 nt, Artificial Sequence
  Synthetic
ucauuaauagaaacauggcag

SEQ ID NO: 306882 - RNA, 22 nt, Artificial Sequence
  Synthetic
cucauuaauagaaacauggcag

SEQ ID NO: 306883 - RNA, 23 nt, Artificial Sequence
  Synthetic
ucucauuaauagaaacauggcag

SEQ ID NO: 306884 - RNA, 24 nt, Artificial Sequence
  Synthetic
uucucauuaauagaaacauggcag

SEQ ID NO: 306885 - RNA, 18 nt, Artificial Sequence
  Synthetic
uucuucuucacauggcag

SEQ ID NO: 306886 - RNA, 19 nt, Artificial Sequence
  Synthetic
cuucuucuucacauggcag

SEQ ID NO: 306887 - RNA, 20 nt, Artificial Sequence
  Synthetic
ccuucuucuucacauggcag

SEQ ID NO: 306888 - RNA, 21 nt, Artificial Sequence
  Synthetic
accuucuucuucacauggcag

SEQ ID NO: 306889 - RNA, 22 nt, Artificial Sequence
  Synthetic
caccuucuucuucacauggcag

SEQ ID NO: 306890 - RNA, 23 nt, Artificial Sequence
  Synthetic
acaccuucuucuucacauggcag

SEQ ID NO: 306891 - RNA, 24 nt, Artificial Sequence
  Synthetic
aacaccuucuucuucacauggcag

SEQ ID NO: 306892 - RNA, 18 nt, Artificial Sequence
  Synthetic
ugaaggcuugcauggcag

SEQ ID NO: 306893 - RNA, 19 nt, Artificial Sequence
  Synthetic
cugaaggcuugcauggcag

SEQ ID NO: 306894 - RNA, 20 nt, Artificial Sequence
  Synthetic
ucugaaggcuugcauggcag

SEQ ID NO: 306895 - RNA, 21 nt, Artificial Sequence
  Synthetic
gucugaaggcuugcauggcag

SEQ ID NO: 306896 - RNA, 22 nt, Artificial Sequence
  Synthetic
ggucugaaggcuugcauggcag

SEQ ID NO: 306897 - RNA, 23 nt, Artificial Sequence
  Synthetic
gggucugaaggcuugcauggcag

SEQ ID NO: 306898 - RNA, 24 nt, Artificial Sequence
  Synthetic
ugggucugaaggcuugcauggcag

SEQ ID NO: 306899 - RNA, 18 nt, Artificial Sequence
  Synthetic
aacuuacaaucauggcag

SEQ ID NO: 306900 - RNA, 19 nt, Artificial Sequence
  Synthetic
aaacuuacaaucauggcag

SEQ ID NO: 306901 - RNA, 20 nt, Artificial Sequence
  Synthetic
gaaacuuacaaucauggcag

SEQ ID NO: 306902 - RNA, 21 nt, Artificial Sequence
  Synthetic
ggaaacuuacaaucauggcag

SEQ ID NO: 306903 - RNA, 22 nt, Artificial Sequence
  Synthetic
aggaaacuuacaaucauggcag

SEQ ID NO: 306904 - RNA, 23 nt, Artificial Sequence
  Synthetic
caggaaacuuacaaucauggcag

SEQ ID NO: 306905 - RNA, 24 nt, Artificial Sequence
  Synthetic
ucaggaaacuuacaaucauggcag

SEQ ID NO: 306906 - RNA, 18 nt, Artificial Sequence
  Synthetic
gucagguaaauauggcag

SEQ ID NO: 306907 - RNA, 19 nt, Artificial Sequence
  Synthetic
ggucagguaaauauggcag

SEQ ID NO: 306908 - RNA, 20 nt, Artificial Sequence
  Synthetic
aggucagguaaauauggcag

SEQ ID NO: 306909 - RNA, 21 nt, Artificial Sequence
  Synthetic
gaggucagguaaauauggcag

SEQ ID NO: 306910 - RNA, 22 nt, Artificial Sequence
  Synthetic
agaggucagguaaauauggcag

SEQ ID NO: 306911 - RNA, 23 nt, Artificial Sequence
  Synthetic
gagaggucagguaaauauggcag

SEQ ID NO: 306912 - RNA, 24 nt, Artificial Sequence
  Synthetic
ugagaggucagguaaauauggcag

SEQ ID NO: 306913 - RNA, 18 nt, Artificial Sequence
  Synthetic
ugcugugcucccuggcag

SEQ ID NO: 306914 - RNA, 19 nt, Artificial Sequence
  Synthetic
augcugugcucccuggcag

SEQ ID NO: 306915 - RNA, 20 nt, Artificial Sequence
  Synthetic
uaugcugugcucccuggcag

SEQ ID NO: 306916 - RNA, 21 nt, Artificial Sequence
  Synthetic
auaugcugugcucccuggcag

SEQ ID NO: 306917 - RNA, 22 nt, Artificial Sequence
  Synthetic
aauaugcugugcucccuggcag

SEQ ID NO: 306918 - RNA, 23 nt, Artificial Sequence
  Synthetic
gaauaugcugugcucccuggcag

SEQ ID NO: 306919 - RNA, 24 nt, Artificial Sequence
  Synthetic
ugaauaugcugugcucccuggcag

SEQ ID NO: 306920 - RNA, 18 nt, Artificial Sequence
  Synthetic
uuauuuucuaaguggcag

SEQ ID NO: 306921 - RNA, 19 nt, Artificial Sequence
  Synthetic
auuauuuucuaaguggcag

SEQ ID NO: 306922 - RNA, 20 nt, Artificial Sequence
  Synthetic
uauuauuuucuaaguggcag

SEQ ID NO: 306923 - RNA, 21 nt, Artificial Sequence
  Synthetic
auauuauuuucuaaguggcag

SEQ ID NO: 306924 - RNA, 22 nt, Artificial Sequence
  Synthetic
aauauuauuuucuaaguggcag

SEQ ID NO: 306925 - RNA, 23 nt, Artificial Sequence
  Synthetic
caauauuauuuucuaaguggcag

SEQ ID NO: 306926 - RNA, 24 nt, Artificial Sequence
  Synthetic
ccaauauuauuuucuaaguggcag

SEQ ID NO: 306927 - RNA, 18 nt, Artificial Sequence
  Synthetic
aggaagccaacguggcag

SEQ ID NO: 306928 - RNA, 19 nt, Artificial Sequence
  Synthetic
caggaagccaacguggcag

SEQ ID NO: 306929 - RNA, 20 nt, Artificial Sequence
  Synthetic
ucaggaagccaacguggcag

SEQ ID NO: 306930 - RNA, 21 nt, Artificial Sequence
  Synthetic
gucaggaagccaacguggcag

SEQ ID NO: 306931 - RNA, 22 nt, Artificial Sequence
  Synthetic
ugucaggaagccaacguggcag

SEQ ID NO: 306932 - RNA, 23 nt, Artificial Sequence
  Synthetic
gugucaggaagccaacguggcag

SEQ ID NO: 306933 - RNA, 24 nt, Artificial Sequence
  Synthetic
ggugucaggaagccaacguggcag

SEQ ID NO: 306934 - RNA, 18 nt, Artificial Sequence
  Synthetic
agaaggcaacuguggcag

SEQ ID NO: 306935 - RNA, 19 nt, Artificial Sequence
  Synthetic
aagaaggcaacuguggcag

SEQ ID NO: 306936 - RNA, 20 nt, Artificial Sequence
  Synthetic
aaagaaggcaacuguggcag

SEQ ID NO: 306937 - RNA, 21 nt, Artificial Sequence
  Synthetic
aaaagaaggcaacuguggcag

SEQ ID NO: 306938 - RNA, 22 nt, Artificial Sequence
  Synthetic
gaaaagaaggcaacuguggcag

SEQ ID NO: 306939 - RNA, 23 nt, Artificial Sequence
  Synthetic
ggaaaagaaggcaacuguggcag

SEQ ID NO: 306940 - RNA, 24 nt, Artificial Sequence
  Synthetic
aggaaaagaaggcaacuguggcag

SEQ ID NO: 306941 - RNA, 18 nt, Artificial Sequence
  Synthetic
aagacuguagguuggcag

SEQ ID NO: 306942 - RNA, 19 nt, Artificial Sequence
  Synthetic
uaagacuguagguuggcag

SEQ ID NO: 306943 - RNA, 20 nt, Artificial Sequence
  Synthetic
auaagacuguagguuggcag

SEQ ID NO: 306944 - RNA, 21 nt, Artificial Sequence
  Synthetic
aauaagacuguagguuggcag

SEQ ID NO: 306945 - RNA, 22 nt, Artificial Sequence
  Synthetic
aaauaagacuguagguuggcag

SEQ ID NO: 306946 - RNA, 23 nt, Artificial Sequence
  Synthetic
uaaauaagacuguagguuggcag

SEQ ID NO: 306947 - RNA, 24 nt, Artificial Sequence
  Synthetic
uuaaauaagacuguagguuggcag

SEQ ID NO: 306948 - RNA, 18 nt, Artificial Sequence
  Synthetic
auguuuuuaaaaaugcag

SEQ ID NO: 306949 - RNA, 19 nt, Artificial Sequence
  Synthetic
gauguuuuuaaaaaugcag

SEQ ID NO: 306950 - RNA, 20 nt, Artificial Sequence
  Synthetic
ugauguuuuuaaaaaugcag

SEQ ID NO: 306951 - RNA, 21 nt, Artificial Sequence
  Synthetic
gugauguuuuuaaaaaugcag

SEQ ID NO: 306952 - RNA, 22 nt, Artificial Sequence
  Synthetic
agugauguuuuuaaaaaugcag

SEQ ID NO: 306953 - RNA, 23 nt, Artificial Sequence
  Synthetic
aagugauguuuuuaaaaaugcag

SEQ ID NO: 306954 - RNA, 24 nt, Artificial Sequence
  Synthetic
aaagugauguuuuuaaaaaugcag

SEQ ID NO: 306955 - RNA, 18 nt, Artificial Sequence
  Synthetic
cccaaggaccaaaugcag

SEQ ID NO: 306956 - RNA, 19 nt, Artificial Sequence
  Synthetic
acccaaggaccaaaugcag

SEQ ID NO: 306957 - RNA, 20 nt, Artificial Sequence
  Synthetic
gacccaaggaccaaaugcag

SEQ ID NO: 306958 - RNA, 21 nt, Artificial Sequence
  Synthetic
agacccaaggaccaaaugcag

SEQ ID NO: 306959 - RNA, 22 nt, Artificial Sequence
  Synthetic
aagacccaaggaccaaaugcag

SEQ ID NO: 306960 - RNA, 23 nt, Artificial Sequence
  Synthetic
aaagacccaaggaccaaaugcag

SEQ ID NO: 306961 - RNA, 24 nt, Artificial Sequence
  Synthetic
aaaagacccaaggaccaaaugcag

SEQ ID NO: 306962 - RNA, 18 nt, Artificial Sequence
  Synthetic
uuuuccccucaaaugcag

SEQ ID NO: 306963 - RNA, 19 nt, Artificial Sequence
  Synthetic
cuuuuccccucaaaugcag

SEQ ID NO: 306964 - RNA, 20 nt, Artificial Sequence
  Synthetic
ucuuuuccccucaaaugcag

SEQ ID NO: 306965 - RNA, 21 nt, Artificial Sequence
  Synthetic
uucuuuuccccucaaaugcag

SEQ ID NO: 306966 - RNA, 22 nt, Artificial Sequence
  Synthetic
auucuuuuccccucaaaugcag

SEQ ID NO: 306967 - RNA, 23 nt, Artificial Sequence
  Synthetic
uauucuuuuccccucaaaugcag

SEQ ID NO: 306968 - RNA, 24 nt, Artificial Sequence
  Synthetic
uuauucuuuuccccucaaaugcag

SEQ ID NO: 306969 - RNA, 18 nt, Artificial Sequence
  Synthetic
gucauggggacaaugcag

SEQ ID NO: 306970 - RNA, 19 nt, Artificial Sequence
  Synthetic
agucauggggacaaugcag

SEQ ID NO: 306971 - RNA, 20 nt, Artificial Sequence
  Synthetic
cagucauggggacaaugcag

SEQ ID NO: 306972 - RNA, 21 nt, Artificial Sequence
  Synthetic
ucagucauggggacaaugcag

SEQ ID NO: 306973 - RNA, 22 nt, Artificial Sequence
  Synthetic
uucagucauggggacaaugcag

SEQ ID NO: 306974 - RNA, 23 nt, Artificial Sequence
  Synthetic
auucagucauggggacaaugcag

SEQ ID NO: 306975 - RNA, 24 nt, Artificial Sequence
  Synthetic
gauucagucauggggacaaugcag

SEQ ID NO: 306976 - RNA, 18 nt, Artificial Sequence
  Synthetic
uccacggaccuaaugcag

SEQ ID NO: 306977 - RNA, 19 nt, Artificial Sequence
  Synthetic
cuccacggaccuaaugcag

SEQ ID NO: 306978 - RNA, 20 nt, Artificial Sequence
  Synthetic
ccuccacggaccuaaugcag

SEQ ID NO: 306979 - RNA, 21 nt, Artificial Sequence
  Synthetic
gccuccacggaccuaaugcag

SEQ ID NO: 306980 - RNA, 22 nt, Artificial Sequence
  Synthetic
ugccuccacggaccuaaugcag

SEQ ID NO: 306981 - RNA, 23 nt, Artificial Sequence
  Synthetic
gugccuccacggaccuaaugcag

SEQ ID NO: 306982 - RNA, 24 nt, Artificial Sequence
  Synthetic
ggugccuccacggaccuaaugcag

SEQ ID NO: 306983 - RNA, 18 nt, Artificial Sequence
  Synthetic
gaaacaaauaacaugcag

SEQ ID NO: 306984 - RNA, 19 nt, Artificial Sequence
  Synthetic
ggaaacaaauaacaugcag

SEQ ID NO: 306985 - RNA, 20 nt, Artificial Sequence
  Synthetic
aggaaacaaauaacaugcag

SEQ ID NO: 306986 - RNA, 21 nt, Artificial Sequence
  Synthetic
aaggaaacaaauaacaugcag

SEQ ID NO: 306987 - RNA, 22 nt, Artificial Sequence
  Synthetic
aaaggaaacaaauaacaugcag

SEQ ID NO: 306988 - RNA, 23 nt, Artificial Sequence
  Synthetic
gaaaggaaacaaauaacaugcag

SEQ ID NO: 306989 - RNA, 24 nt, Artificial Sequence
  Synthetic
agaaaggaaacaaauaacaugcag

SEQ ID NO: 306990 - RNA, 18 nt, Artificial Sequence
  Synthetic
gaucauuuuuacaugcag

SEQ ID NO: 306991 - RNA, 19 nt, Artificial Sequence
  Synthetic
ugaucauuuuuacaugcag

SEQ ID NO: 306992 - RNA, 20 nt, Artificial Sequence
  Synthetic
augaucauuuuuacaugcag

SEQ ID NO: 306993 - RNA, 21 nt, Artificial Sequence
  Synthetic
aaugaucauuuuuacaugcag

SEQ ID NO: 306994 - RNA, 22 nt, Artificial Sequence
  Synthetic
aaaugaucauuuuuacaugcag

SEQ ID NO: 306995 - RNA, 23 nt, Artificial Sequence
  Synthetic
aaaaugaucauuuuuacaugcag

SEQ ID NO: 306996 - RNA, 24 nt, Artificial Sequence
  Synthetic
aaaaaugaucauuuuuacaugcag

SEQ ID NO: 306997 - RNA, 18 nt, Artificial Sequence
  Synthetic
gagagguugaggaugcag

SEQ ID NO: 306998 - RNA, 19 nt, Artificial Sequence
  Synthetic
ggagagguugaggaugcag

SEQ ID NO: 306999 - RNA, 20 nt, Artificial Sequence
  Synthetic
gggagagguugaggaugcag

SEQ ID NO: 307000 - RNA, 21 nt, Artificial Sequence
  Synthetic
agggagagguugaggaugcag

SEQ ID NO: 307001 - RNA, 22 nt, Artificial Sequence
  Synthetic
gagggagagguugaggaugcag

SEQ ID NO: 307002 - RNA, 23 nt, Artificial Sequence
  Synthetic
agagggagagguugaggaugcag

SEQ ID NO: 307003 - RNA, 24 nt, Artificial Sequence
  Synthetic
gagagggagagguugaggaugcag

SEQ ID NO: 307004 - RNA, 18 nt, Artificial Sequence
  Synthetic
guaggaacauggaugcag

SEQ ID NO: 307005 - RNA, 19 nt, Artificial Sequence
  Synthetic
uguaggaacauggaugcag

SEQ ID NO: 307006 - RNA, 20 nt, Artificial Sequence
  Synthetic
uuguaggaacauggaugcag

SEQ ID NO: 307007 - RNA, 21 nt, Artificial Sequence
  Synthetic
uuuguaggaacauggaugcag

SEQ ID NO: 307008 - RNA, 22 nt, Artificial Sequence
  Synthetic
uuuuguaggaacauggaugcag

SEQ ID NO: 307009 - RNA, 23 nt, Artificial Sequence
  Synthetic
cuuuuguaggaacauggaugcag

SEQ ID NO: 307010 - RNA, 24 nt, Artificial Sequence
  Synthetic
ccuuuuguaggaacauggaugcag

SEQ ID NO: 307011 - RNA, 18 nt, Artificial Sequence
  Synthetic
cgaaaacguaugaugcag

SEQ ID NO: 307012 - RNA, 19 nt, Artificial Sequence
  Synthetic
ucgaaaacguaugaugcag

SEQ ID NO: 307013 - RNA, 20 nt, Artificial Sequence
  Synthetic
cucgaaaacguaugaugcag

SEQ ID NO: 307014 - RNA, 21 nt, Artificial Sequence
  Synthetic
ucucgaaaacguaugaugcag

SEQ ID NO: 307015 - RNA, 22 nt, Artificial Sequence
  Synthetic
cucucgaaaacguaugaugcag

SEQ ID NO: 307016 - RNA, 23 nt, Artificial Sequence
  Synthetic
acucucgaaaacguaugaugcag

SEQ ID NO: 307017 - RNA, 24 nt, Artificial Sequence
  Synthetic
cacucucgaaaacguaugaugcag

SEQ ID NO: 307018 - RNA, 18 nt, Artificial Sequence
  Synthetic
cauacaauaaauaugcag

SEQ ID NO: 307019 - RNA, 19 nt, Artificial Sequence
  Synthetic
gcauacaauaaauaugcag

SEQ ID NO: 307020 - RNA, 20 nt, Artificial Sequence
  Synthetic
ugcauacaauaaauaugcag

SEQ ID NO: 307021 - RNA, 21 nt, Artificial Sequence
  Synthetic
augcauacaauaaauaugcag

SEQ ID NO: 307022 - RNA, 22 nt, Artificial Sequence
  Synthetic
caugcauacaauaaauaugcag

SEQ ID NO: 307023 - RNA, 23 nt, Artificial Sequence
  Synthetic
ucaugcauacaauaaauaugcag

SEQ ID NO: 307024 - RNA, 24 nt, Artificial Sequence
  Synthetic
uucaugcauacaauaaauaugcag

SEQ ID NO: 307025 - RNA, 18 nt, Artificial Sequence
  Synthetic
agcaguuucuauaugcag

SEQ ID NO: 307026 - RNA, 19 nt, Artificial Sequence
  Synthetic
uagcaguuucuauaugcag

SEQ ID NO: 307027 - RNA, 20 nt, Artificial Sequence
  Synthetic
cuagcaguuucuauaugcag

SEQ ID NO: 307028 - RNA, 21 nt, Artificial Sequence
  Synthetic
ucuagcaguuucuauaugcag

SEQ ID NO: 307029 - RNA, 22 nt, Artificial Sequence
  Synthetic
aucuagcaguuucuauaugcag

SEQ ID NO: 307030 - RNA, 23 nt, Artificial Sequence
  Synthetic
gaucuagcaguuucuauaugcag

SEQ ID NO: 307031 - RNA, 24 nt, Artificial Sequence
  Synthetic
ggaucuagcaguuucuauaugcag

SEQ ID NO: 307032 - RNA, 18 nt, Artificial Sequence
  Synthetic
gugaacacagguaugcag

SEQ ID NO: 307033 - RNA, 19 nt, Artificial Sequence
  Synthetic
ugugaacacagguaugcag

SEQ ID NO: 307034 - RNA, 20 nt, Artificial Sequence
  Synthetic
uugugaacacagguaugcag

SEQ ID NO: 307035 - RNA, 21 nt, Artificial Sequence
  Synthetic
uuugugaacacagguaugcag

SEQ ID NO: 307036 - RNA, 22 nt, Artificial Sequence
  Synthetic
uuuugugaacacagguaugcag

SEQ ID NO: 307037 - RNA, 23 nt, Artificial Sequence
  Synthetic
guuuugugaacacagguaugcag

SEQ ID NO: 307038 - RNA, 24 nt, Artificial Sequence
  Synthetic
uguuuugugaacacagguaugcag

SEQ ID NO: 307039 - RNA, 18 nt, Artificial Sequence
  Synthetic
aaaaaaggcuaacugcag

SEQ ID NO: 307040 - RNA, 19 nt, Artificial Sequence
  Synthetic
caaaaaaggcuaacugcag

SEQ ID NO: 307041 - RNA, 20 nt, Artificial Sequence
  Synthetic
acaaaaaaggcuaacugcag

SEQ ID NO: 307042 - RNA, 21 nt, Artificial Sequence
  Synthetic
aacaaaaaaggcuaacugcag

SEQ ID NO: 307043 - RNA, 22 nt, Artificial Sequence
  Synthetic
gaacaaaaaaggcuaacugcag

SEQ ID NO: 307044 - RNA, 23 nt, Artificial Sequence
  Synthetic
agaacaaaaaaggcuaacugcag

SEQ ID NO: 307045 - RNA, 24 nt, Artificial Sequence
  Synthetic
aagaacaaaaaaggcuaacugcag

SEQ ID NO: 307046 - RNA, 18 nt, Artificial Sequence
  Synthetic
ggauauagcuuacugcag

SEQ ID NO: 307047 - RNA, 19 nt, Artificial Sequence
  Synthetic
gggauauagcuuacugcag

SEQ ID NO: 307048 - RNA, 20 nt, Artificial Sequence
  Synthetic
ggggauauagcuuacugcag

SEQ ID NO: 307049 - RNA, 21 nt, Artificial Sequence
  Synthetic
gggggauauagcuuacugcag

SEQ ID NO: 307050 - RNA, 22 nt, Artificial Sequence
  Synthetic
ugggggauauagcuuacugcag

SEQ ID NO: 307051 - RNA, 23 nt, Artificial Sequence
  Synthetic
gugggggauauagcuuacugcag

SEQ ID NO: 307052 - RNA, 24 nt, Artificial Sequence
  Synthetic
agugggggauauagcuuacugcag

SEQ ID NO: 307053 - RNA, 18 nt, Artificial Sequence
  Synthetic
cagugccaccaccugcag

SEQ ID NO: 307054 - RNA, 19 nt, Artificial Sequence
  Synthetic
ccagugccaccaccugcag

SEQ ID NO: 307055 - RNA, 20 nt, Artificial Sequence
  Synthetic
gccagugccaccaccugcag

SEQ ID NO: 307056 - RNA, 21 nt, Artificial Sequence
  Synthetic
ggccagugccaccaccugcag

SEQ ID NO: 307057 - RNA, 22 nt, Artificial Sequence
  Synthetic
gggccagugccaccaccugcag

SEQ ID NO: 307058 - RNA, 23 nt, Artificial Sequence
  Synthetic
ggggccagugccaccaccugcag

SEQ ID NO: 307059 - RNA, 24 nt, Artificial Sequence
  Synthetic
aggggccagugccaccaccugcag

SEQ ID NO: 307060 - RNA, 18 nt, Artificial Sequence
  Synthetic
auuccagcagaccugcag

SEQ ID NO: 307061 - RNA, 19 nt, Artificial Sequence
  Synthetic
aauuccagcagaccugcag

SEQ ID NO: 307062 - RNA, 20 nt, Artificial Sequence
  Synthetic
aaauuccagcagaccugcag

SEQ ID NO: 307063 - RNA, 21 nt, Artificial Sequence
  Synthetic
caaauuccagcagaccugcag

SEQ ID NO: 307064 - RNA, 22 nt, Artificial Sequence
  Synthetic
gcaaauuccagcagaccugcag

SEQ ID NO: 307065 - RNA, 23 nt, Artificial Sequence
  Synthetic
agcaaauuccagcagaccugcag

SEQ ID NO: 307066 - RNA, 24 nt, Artificial Sequence
  Synthetic
cagcaaauuccagcagaccugcag

SEQ ID NO: 307067 - RNA, 18 nt, Artificial Sequence
  Synthetic
ggucuuagauaccugcag

SEQ ID NO: 307068 - RNA, 19 nt, Artificial Sequence
  Synthetic
aggucuuagauaccugcag

SEQ ID NO: 307069 - RNA, 20 nt, Artificial Sequence
  Synthetic
caggucuuagauaccugcag

SEQ ID NO: 307070 - RNA, 21 nt, Artificial Sequence
  Synthetic
ccaggucuuagauaccugcag

SEQ ID NO: 307071 - RNA, 22 nt, Artificial Sequence
  Synthetic
cccaggucuuagauaccugcag

SEQ ID NO: 307072 - RNA, 23 nt, Artificial Sequence
  Synthetic
ccccaggucuuagauaccugcag

SEQ ID NO: 307073 - RNA, 24 nt, Artificial Sequence
  Synthetic
cccccaggucuuagauaccugcag

SEQ ID NO: 307074 - RNA, 18 nt, Artificial Sequence
  Synthetic
ucugugccuugccugcag

SEQ ID NO: 307075 - RNA, 19 nt, Artificial Sequence
  Synthetic
uucugugccuugccugcag

SEQ ID NO: 307076 - RNA, 20 nt, Artificial Sequence
  Synthetic
cuucugugccuugccugcag

SEQ ID NO: 307077 - RNA, 21 nt, Artificial Sequence
  Synthetic
gcuucugugccuugccugcag

SEQ ID NO: 307078 - RNA, 22 nt, Artificial Sequence
  Synthetic
cgcuucugugccuugccugcag

SEQ ID NO: 307079 - RNA, 23 nt, Artificial Sequence
  Synthetic
ccgcuucugugccuugccugcag

SEQ ID NO: 307080 - RNA, 24 nt, Artificial Sequence
  Synthetic
cccgcuucugugccuugccugcag

SEQ ID NO: 307081 - RNA, 18 nt, Artificial Sequence
  Synthetic
acuggaauuauccugcag

SEQ ID NO: 307082 - RNA, 19 nt, Artificial Sequence
  Synthetic
cacuggaauuauccugcag

SEQ ID NO: 307083 - RNA, 20 nt, Artificial Sequence
  Synthetic
gcacuggaauuauccugcag

SEQ ID NO: 307084 - RNA, 21 nt, Artificial Sequence
  Synthetic
ugcacuggaauuauccugcag

SEQ ID NO: 307085 - RNA, 22 nt, Artificial Sequence
  Synthetic
uugcacuggaauuauccugcag

SEQ ID NO: 307086 - RNA, 23 nt, Artificial Sequence
  Synthetic
uuugcacuggaauuauccugcag

SEQ ID NO: 307087 - RNA, 24 nt, Artificial Sequence
  Synthetic
cuuugcacuggaauuauccugcag

SEQ ID NO: 307088 - RNA, 18 nt, Artificial Sequence
  Synthetic
gaggugaggaagcugcag

SEQ ID NO: 307089 - RNA, 19 nt, Artificial Sequence
  Synthetic
agaggugaggaagcugcag

SEQ ID NO: 307090 - RNA, 20 nt, Artificial Sequence
  Synthetic
gagaggugaggaagcugcag

SEQ ID NO: 307091 - RNA, 21 nt, Artificial Sequence
  Synthetic
agagaggugaggaagcugcag

SEQ ID NO: 307092 - RNA, 22 nt, Artificial Sequence
  Synthetic
gagagaggugaggaagcugcag

SEQ ID NO: 307093 - RNA, 23 nt, Artificial Sequence
  Synthetic
cgagagaggugaggaagcugcag

SEQ ID NO: 307094 - RNA, 24 nt, Artificial Sequence
  Synthetic
ccgagagaggugaggaagcugcag

SEQ ID NO: 307095 - RNA, 18 nt, Artificial Sequence
  Synthetic
gcaggccccaggcugcag

SEQ ID NO: 307096 - RNA, 19 nt, Artificial Sequence
  Synthetic
ggcaggccccaggcugcag

SEQ ID NO: 307097 - RNA, 20 nt, Artificial Sequence
  Synthetic
gggcaggccccaggcugcag

SEQ ID NO: 307098 - RNA, 21 nt, Artificial Sequence
  Synthetic
ggggcaggccccaggcugcag

SEQ ID NO: 307099 - RNA, 22 nt, Artificial Sequence
  Synthetic
uggggcaggccccaggcugcag

SEQ ID NO: 307100 - RNA, 23 nt, Artificial Sequence
  Synthetic
auggggcaggccccaggcugcag

SEQ ID NO: 307101 - RNA, 24 nt, Artificial Sequence
  Synthetic
gauggggcaggccccaggcugcag

SEQ ID NO: 307102 - RNA, 18 nt, Artificial Sequence
  Synthetic
ggauggcaugggcugcag

SEQ ID NO: 307103 - RNA, 19 nt, Artificial Sequence
  Synthetic
aggauggcaugggcugcag

SEQ ID NO: 307104 - RNA, 20 nt, Artificial Sequence
  Synthetic
caggauggcaugggcugcag

SEQ ID NO: 307105 - RNA, 21 nt, Artificial Sequence
  Synthetic
gcaggauggcaugggcugcag

SEQ ID NO: 307106 - RNA, 22 nt, Artificial Sequence
  Synthetic
ggcaggauggcaugggcugcag

SEQ ID NO: 307107 - RNA, 23 nt, Artificial Sequence
  Synthetic
aggcaggauggcaugggcugcag

SEQ ID NO: 307108 - RNA, 24 nt, Artificial Sequence
  Synthetic
gaggcaggauggcaugggcugcag

SEQ ID NO: 307109 - RNA, 18 nt, Artificial Sequence
  Synthetic
ucagcuaacaugcugcag

SEQ ID NO: 307110 - RNA, 19 nt, Artificial Sequence
  Synthetic
cucagcuaacaugcugcag

SEQ ID NO: 307111 - RNA, 20 nt, Artificial Sequence
  Synthetic
gcucagcuaacaugcugcag

SEQ ID NO: 307112 - RNA, 21 nt, Artificial Sequence
  Synthetic
ggcucagcuaacaugcugcag

SEQ ID NO: 307113 - RNA, 22 nt, Artificial Sequence
  Synthetic
uggcucagcuaacaugcugcag

SEQ ID NO: 307114 - RNA, 23 nt, Artificial Sequence
  Synthetic
auggcucagcuaacaugcugcag

SEQ ID NO: 307115 - RNA, 24 nt, Artificial Sequence
  Synthetic
gauggcucagcuaacaugcugcag

SEQ ID NO: 307116 - RNA, 18 nt, Artificial Sequence
  Synthetic
aaaugcgugcugcugcag

SEQ ID NO: 307117 - RNA, 19 nt, Artificial Sequence
  Synthetic
caaaugcgugcugcugcag

SEQ ID NO: 307118 - RNA, 20 nt, Artificial Sequence
  Synthetic
ccaaaugcgugcugcugcag

SEQ ID NO: 307119 - RNA, 21 nt, Artificial Sequence
  Synthetic
gccaaaugcgugcugcugcag

SEQ ID NO: 307120 - RNA, 22 nt, Artificial Sequence
  Synthetic
agccaaaugcgugcugcugcag

SEQ ID NO: 307121 - RNA, 23 nt, Artificial Sequence
  Synthetic
aagccaaaugcgugcugcugcag

SEQ ID NO: 307122 - RNA, 24 nt, Artificial Sequence
  Synthetic
aaagccaaaugcgugcugcugcag

SEQ ID NO: 307123 - RNA, 18 nt, Artificial Sequence
  Synthetic
acgugggucaaucugcag

SEQ ID NO: 307124 - RNA, 19 nt, Artificial Sequence
  Synthetic
gacgugggucaaucugcag

SEQ ID NO: 307125 - RNA, 20 nt, Artificial Sequence
  Synthetic
agacgugggucaaucugcag

SEQ ID NO: 307126 - RNA, 21 nt, Artificial Sequence
  Synthetic
aagacgugggucaaucugcag

SEQ ID NO: 307127 - RNA, 22 nt, Artificial Sequence
  Synthetic
caagacgugggucaaucugcag

SEQ ID NO: 307128 - RNA, 23 nt, Artificial Sequence
  Synthetic
ucaagacgugggucaaucugcag

SEQ ID NO: 307129 - RNA, 24 nt, Artificial Sequence
  Synthetic
gucaagacgugggucaaucugcag

SEQ ID NO: 307130 - RNA, 18 nt, Artificial Sequence
  Synthetic
agacaaaaauaucugcag

SEQ ID NO: 307131 - RNA, 19 nt, Artificial Sequence
  Synthetic
gagacaaaaauaucugcag

SEQ ID NO: 307132 - RNA, 20 nt, Artificial Sequence
  Synthetic
agagacaaaaauaucugcag

SEQ ID NO: 307133 - RNA, 21 nt, Artificial Sequence
  Synthetic
aagagacaaaaauaucugcag

SEQ ID NO: 307134 - RNA, 22 nt, Artificial Sequence
  Synthetic
uaagagacaaaaauaucugcag

SEQ ID NO: 307135 - RNA, 23 nt, Artificial Sequence
  Synthetic
auaagagacaaaaauaucugcag

SEQ ID NO: 307136 - RNA, 24 nt, Artificial Sequence
  Synthetic
aauaagagacaaaaauaucugcag

SEQ ID NO: 307137 - RNA, 18 nt, Artificial Sequence
  Synthetic
ccacggggagcucugcag

SEQ ID NO: 307138 - RNA, 19 nt, Artificial Sequence
  Synthetic
gccacggggagcucugcag

SEQ ID NO: 307139 - RNA, 20 nt, Artificial Sequence
  Synthetic
ugccacggggagcucugcag

SEQ ID NO: 307140 - RNA, 21 nt, Artificial Sequence
  Synthetic
augccacggggagcucugcag

SEQ ID NO: 307141 - RNA, 22 nt, Artificial Sequence
  Synthetic
uaugccacggggagcucugcag

SEQ ID NO: 307142 - RNA, 23 nt, Artificial Sequence
  Synthetic
uuaugccacggggagcucugcag

SEQ ID NO: 307143 - RNA, 24 nt, Artificial Sequence
  Synthetic
cuuaugccacggggagcucugcag

SEQ ID NO: 307144 - RNA, 18 nt, Artificial Sequence
  Synthetic
aaugugauuugucugcag

SEQ ID NO: 307145 - RNA, 19 nt, Artificial Sequence
  Synthetic
aaaugugauuugucugcag

SEQ ID NO: 307146 - RNA, 20 nt, Artificial Sequence
  Synthetic
gaaaugugauuugucugcag

SEQ ID NO: 307147 - RNA, 21 nt, Artificial Sequence
  Synthetic
ugaaaugugauuugucugcag

SEQ ID NO: 307148 - RNA, 22 nt, Artificial Sequence
  Synthetic
cugaaaugugauuugucugcag

SEQ ID NO: 307149 - RNA, 23 nt, Artificial Sequence
  Synthetic
ucugaaaugugauuugucugcag

SEQ ID NO: 307150 - RNA, 24 nt, Artificial Sequence
  Synthetic
gucugaaaugugauuugucugcag

SEQ ID NO: 307151 - RNA, 18 nt, Artificial Sequence
  Synthetic
aacuguuuuaaagugcag

SEQ ID NO: 307152 - RNA, 19 nt, Artificial Sequence
  Synthetic
aaacuguuuuaaagugcag

SEQ ID NO: 307153 - RNA, 20 nt, Artificial Sequence
  Synthetic
gaaacuguuuuaaagugcag

SEQ ID NO: 307154 - RNA, 21 nt, Artificial Sequence
  Synthetic
ggaaacuguuuuaaagugcag

SEQ ID NO: 307155 - RNA, 22 nt, Artificial Sequence
  Synthetic
uggaaacuguuuuaaagugcag

SEQ ID NO: 307156 - RNA, 23 nt, Artificial Sequence
  Synthetic
cuggaaacuguuuuaaagugcag

SEQ ID NO: 307157 - RNA, 24 nt, Artificial Sequence
  Synthetic
ccuggaaacuguuuuaaagugcag

SEQ ID NO: 307158 - RNA, 18 nt, Artificial Sequence
  Synthetic
ucugcugggacagugcag

SEQ ID NO: 307159 - RNA, 19 nt, Artificial Sequence
  Synthetic
cucugcugggacagugcag

SEQ ID NO: 307160 - RNA, 20 nt, Artificial Sequence
  Synthetic
ucucugcugggacagugcag

SEQ ID NO: 307161 - RNA, 21 nt, Artificial Sequence
  Synthetic
cucucugcugggacagugcag

SEQ ID NO: 307162 - RNA, 22 nt, Artificial Sequence
  Synthetic
ccucucugcugggacagugcag

SEQ ID NO: 307163 - RNA, 23 nt, Artificial Sequence
  Synthetic
accucucugcugggacagugcag

SEQ ID NO: 307164 - RNA, 24 nt, Artificial Sequence
  Synthetic
aaccucucugcugggacagugcag

SEQ ID NO: 307165 - RNA, 18 nt, Artificial Sequence
  Synthetic
gauauuggcaaugugcag

SEQ ID NO: 307166 - RNA, 19 nt, Artificial Sequence
  Synthetic
agauauuggcaaugugcag

SEQ ID NO: 307167 - RNA, 20 nt, Artificial Sequence
  Synthetic
gagauauuggcaaugugcag

SEQ ID NO: 307168 - RNA, 21 nt, Artificial Sequence
  Synthetic
agagauauuggcaaugugcag

SEQ ID NO: 307169 - RNA, 22 nt, Artificial Sequence
  Synthetic
cagagauauuggcaaugugcag

SEQ ID NO: 307170 - RNA, 23 nt, Artificial Sequence
  Synthetic
acagagauauuggcaaugugcag

SEQ ID NO: 307171 - RNA, 24 nt, Artificial Sequence
  Synthetic
cacagagauauuggcaaugugcag

SEQ ID NO: 307172 - RNA, 18 nt, Artificial Sequence
  Synthetic
uacgagcccagugugcag

SEQ ID NO: 307173 - RNA, 19 nt, Artificial Sequence
  Synthetic
auacgagcccagugugcag

SEQ ID NO: 307174 - RNA, 20 nt, Artificial Sequence
  Synthetic
aauacgagcccagugugcag

SEQ ID NO: 307175 - RNA, 21 nt, Artificial Sequence
  Synthetic
gaauacgagcccagugugcag

SEQ ID NO: 307176 - RNA, 22 nt, Artificial Sequence
  Synthetic
ggaauacgagcccagugugcag

SEQ ID NO: 307177 - RNA, 23 nt, Artificial Sequence
  Synthetic
aggaauacgagcccagugugcag

SEQ ID NO: 307178 - RNA, 24 nt, Artificial Sequence
  Synthetic
gaggaauacgagcccagugugcag

SEQ ID NO: 307179 - RNA, 18 nt, Artificial Sequence
  Synthetic
auugaucgggaauugcag

SEQ ID NO: 307180 - RNA, 19 nt, Artificial Sequence
  Synthetic
aauugaucgggaauugcag

SEQ ID NO: 307181 - RNA, 20 nt, Artificial Sequence
  Synthetic
aaauugaucgggaauugcag

SEQ ID NO: 307182 - RNA, 21 nt, Artificial Sequence
  Synthetic
gaaauugaucgggaauugcag

SEQ ID NO: 307183 - RNA, 22 nt, Artificial Sequence
  Synthetic
ggaaauugaucgggaauugcag

SEQ ID NO: 307184 - RNA, 23 nt, Artificial Sequence
  Synthetic
aggaaauugaucgggaauugcag

SEQ ID NO: 307185 - RNA, 24 nt, Artificial Sequence
  Synthetic
uaggaaauugaucgggaauugcag

SEQ ID NO: 307186 - RNA, 18 nt, Artificial Sequence
  Synthetic
auccuauuguaauugcag

SEQ ID NO: 307187 - RNA, 19 nt, Artificial Sequence
  Synthetic
uauccuauuguaauugcag

SEQ ID NO: 307188 - RNA, 20 nt, Artificial Sequence
  Synthetic
uuauccuauuguaauugcag

SEQ ID NO: 307189 - RNA, 21 nt, Artificial Sequence
  Synthetic
uuuauccuauuguaauugcag

SEQ ID NO: 307190 - RNA, 22 nt, Artificial Sequence
  Synthetic
uuuuauccuauuguaauugcag

SEQ ID NO: 307191 - RNA, 23 nt, Artificial Sequence
  Synthetic
cuuuuauccuauuguaauugcag

SEQ ID NO: 307192 - RNA, 24 nt, Artificial Sequence
  Synthetic
ucuuuuauccuauuguaauugcag

SEQ ID NO: 307193 - RNA, 18 nt, Artificial Sequence
  Synthetic
uauguuuucucauugcag

SEQ ID NO: 307194 - RNA, 19 nt, Artificial Sequence
  Synthetic
cuauguuuucucauugcag

SEQ ID NO: 307195 - RNA, 20 nt, Artificial Sequence
  Synthetic
gcuauguuuucucauugcag

SEQ ID NO: 307196 - RNA, 21 nt, Artificial Sequence
  Synthetic
ugcuauguuuucucauugcag

SEQ ID NO: 307197 - RNA, 22 nt, Artificial Sequence
  Synthetic
augcuauguuuucucauugcag

SEQ ID NO: 307198 - RNA, 23 nt, Artificial Sequence
  Synthetic
caugcuauguuuucucauugcag

SEQ ID NO: 307199 - RNA, 24 nt, Artificial Sequence
  Synthetic
ccaugcuauguuuucucauugcag

SEQ ID NO: 307200 - RNA, 18 nt, Artificial Sequence
  Synthetic
cacucucagauauugcag

SEQ ID NO: 307201 - RNA, 19 nt, Artificial Sequence
  Synthetic
gcacucucagauauugcag

SEQ ID NO: 307202 - RNA, 20 nt, Artificial Sequence
  Synthetic
agcacucucagauauugcag

SEQ ID NO: 307203 - RNA, 21 nt, Artificial Sequence
  Synthetic
gagcacucucagauauugcag

SEQ ID NO: 307204 - RNA, 22 nt, Artificial Sequence
  Synthetic
agagcacucucagauauugcag

SEQ ID NO: 307205 - RNA, 23 nt, Artificial Sequence
  Synthetic
gagagcacucucagauauugcag

SEQ ID NO: 307206 - RNA, 24 nt, Artificial Sequence
  Synthetic
agagagcacucucagauauugcag

SEQ ID NO: 307207 - RNA, 18 nt, Artificial Sequence
  Synthetic
cagcaauagauauugcag

SEQ ID NO: 307208 - RNA, 19 nt, Artificial Sequence
  Synthetic
acagcaauagauauugcag

SEQ ID NO: 307209 - RNA, 20 nt, Artificial Sequence
  Synthetic
cacagcaauagauauugcag

SEQ ID NO: 307210 - RNA, 21 nt, Artificial Sequence
  Synthetic
ucacagcaauagauauugcag

SEQ ID NO: 307211 - RNA, 22 nt, Artificial Sequence
  Synthetic
aucacagcaauagauauugcag

SEQ ID NO: 307212 - RNA, 23 nt, Artificial Sequence
  Synthetic
caucacagcaauagauauugcag

SEQ ID NO: 307213 - RNA, 24 nt, Artificial Sequence
  Synthetic
ucaucacagcaauagauauugcag

SEQ ID NO: 307214 - RNA, 18 nt, Artificial Sequence
  Synthetic
agauaauuuggcuugcag

SEQ ID NO: 307215 - RNA, 19 nt, Artificial Sequence
  Synthetic
aagauaauuuggcuugcag

SEQ ID NO: 307216 - RNA, 20 nt, Artificial Sequence
  Synthetic
aaagauaauuuggcuugcag

SEQ ID NO: 307217 - RNA, 21 nt, Artificial Sequence
  Synthetic
gaaagauaauuuggcuugcag

SEQ ID NO: 307218 - RNA, 22 nt, Artificial Sequence
  Synthetic
ugaaagauaauuuggcuugcag

SEQ ID NO: 307219 - RNA, 23 nt, Artificial Sequence
  Synthetic
gugaaagauaauuuggcuugcag

SEQ ID NO: 307220 - RNA, 24 nt, Artificial Sequence
  Synthetic
agugaaagauaauuuggcuugcag

SEQ ID NO: 307221 - RNA, 18 nt, Artificial Sequence
  Synthetic
acaucuagacaguugcag

SEQ ID NO: 307222 - RNA, 19 nt, Artificial Sequence
  Synthetic
cacaucuagacaguugcag

SEQ ID NO: 307223 - RNA, 20 nt, Artificial Sequence
  Synthetic
ucacaucuagacaguugcag

SEQ ID NO: 307224 - RNA, 21 nt, Artificial Sequence
  Synthetic
uucacaucuagacaguugcag

SEQ ID NO: 307225 - RNA, 22 nt, Artificial Sequence
  Synthetic
uuucacaucuagacaguugcag

SEQ ID NO: 307226 - RNA, 23 nt, Artificial Sequence
  Synthetic
cuuucacaucuagacaguugcag

SEQ ID NO: 307227 - RNA, 24 nt, Artificial Sequence
  Synthetic
acuuucacaucuagacaguugcag

SEQ ID NO: 307228 - RNA, 18 nt, Artificial Sequence
  Synthetic
cuggaggauaauuugcag

SEQ ID NO: 307229 - RNA, 19 nt, Artificial Sequence
  Synthetic
gcuggaggauaauuugcag

SEQ ID NO: 307230 - RNA, 20 nt, Artificial Sequence
  Synthetic
ggcuggaggauaauuugcag

SEQ ID NO: 307231 - RNA, 21 nt, Artificial Sequence
  Synthetic
uggcuggaggauaauuugcag

SEQ ID NO: 307232 - RNA, 22 nt, Artificial Sequence
  Synthetic
auggcuggaggauaauuugcag

SEQ ID NO: 307233 - RNA, 23 nt, Artificial Sequence
  Synthetic
cauggcuggaggauaauuugcag

SEQ ID NO: 307234 - RNA, 24 nt, Artificial Sequence
  Synthetic
ucauggcuggaggauaauuugcag

SEQ ID NO: 307235 - RNA, 18 nt, Artificial Sequence
  Synthetic
aaagauaauccuuugcag

SEQ ID NO: 307236 - RNA, 19 nt, Artificial Sequence
  Synthetic
uaaagauaauccuuugcag

SEQ ID NO: 307237 - RNA, 20 nt, Artificial Sequence
  Synthetic
uuaaagauaauccuuugcag

SEQ ID NO: 307238 - RNA, 21 nt, Artificial Sequence
  Synthetic
cuuaaagauaauccuuugcag

SEQ ID NO: 307239 - RNA, 22 nt, Artificial Sequence
  Synthetic
acuuaaagauaauccuuugcag

SEQ ID NO: 307240 - RNA, 23 nt, Artificial Sequence
  Synthetic
aacuuaaagauaauccuuugcag

SEQ ID NO: 307241 - RNA, 24 nt, Artificial Sequence
  Synthetic
uaacuuaaagauaauccuuugcag

SEQ ID NO: 307242 - RNA, 18 nt, Artificial Sequence
  Synthetic
accuucugugcuuugcag

SEQ ID NO: 307243 - RNA, 19 nt, Artificial Sequence
  Synthetic
gaccuucugugcuuugcag

SEQ ID NO: 307244 - RNA, 20 nt, Artificial Sequence
  Synthetic
ugaccuucugugcuuugcag

SEQ ID NO: 307245 - RNA, 21 nt, Artificial Sequence
  Synthetic
cugaccuucugugcuuugcag

SEQ ID NO: 307246 - RNA, 22 nt, Artificial Sequence
  Synthetic
acugaccuucugugcuuugcag

SEQ ID NO: 307247 - RNA, 23 nt, Artificial Sequence
  Synthetic
aacugaccuucugugcuuugcag

SEQ ID NO: 307248 - RNA, 24 nt, Artificial Sequence
  Synthetic
caacugaccuucugugcuuugcag

SEQ ID NO: 307249 - RNA, 18 nt, Artificial Sequence
  Synthetic
aaucucucagguuugcag

SEQ ID NO: 307250 - RNA, 19 nt, Artificial Sequence
  Synthetic
aaaucucucagguuugcag

SEQ ID NO: 307251 - RNA, 20 nt, Artificial Sequence
  Synthetic
aaaaucucucagguuugcag

SEQ ID NO: 307252 - RNA, 21 nt, Artificial Sequence
  Synthetic
gaaaaucucucagguuugcag

SEQ ID NO: 307253 - RNA, 22 nt, Artificial Sequence
  Synthetic
ggaaaaucucucagguuugcag

SEQ ID NO: 307254 - RNA, 23 nt, Artificial Sequence
  Synthetic
aggaaaaucucucagguuugcag

SEQ ID NO: 307255 - RNA, 24 nt, Artificial Sequence
  Synthetic
gaggaaaaucucucagguuugcag

SEQ ID NO: 307256 - RNA, 18 nt, Artificial Sequence
  Synthetic
gagaaaagcuguuugcag

SEQ ID NO: 307257 - RNA, 19 nt, Artificial Sequence
  Synthetic
agagaaaagcuguuugcag

SEQ ID NO: 307258 - RNA, 20 nt, Artificial Sequence
  Synthetic
uagagaaaagcuguuugcag

SEQ ID NO: 307259 - RNA, 21 nt, Artificial Sequence
  Synthetic
guagagaaaagcuguuugcag

SEQ ID NO: 307260 - RNA, 22 nt, Artificial Sequence
  Synthetic
gguagagaaaagcuguuugcag

SEQ ID NO: 307261 - RNA, 23 nt, Artificial Sequence
  Synthetic
ggguagagaaaagcuguuugcag

SEQ ID NO: 307262 - RNA, 24 nt, Artificial Sequence
  Synthetic
uggguagagaaaagcuguuugcag

SEQ ID NO: 307263 - RNA, 18 nt, Artificial Sequence
  Synthetic
ucuucuuuaauuuugcag

SEQ ID NO: 307264 - RNA, 19 nt, Artificial Sequence
  Synthetic
cucuucuuuaauuuugcag

SEQ ID NO: 307265 - RNA, 20 nt, Artificial Sequence
  Synthetic
gcucuucuuuaauuuugcag

SEQ ID NO: 307266 - RNA, 21 nt, Artificial Sequence
  Synthetic
agcucuucuuuaauuuugcag

SEQ ID NO: 307267 - RNA, 22 nt, Artificial Sequence
  Synthetic
uagcucuucuuuaauuuugcag

SEQ ID NO: 307268 - RNA, 23 nt, Artificial Sequence
  Synthetic
guagcucuucuuuaauuuugcag

SEQ ID NO: 307269 - RNA, 24 nt, Artificial Sequence
  Synthetic
gguagcucuucuuuaauuuugcag

SEQ ID NO: 307270 - RNA, 18 nt, Artificial Sequence
  Synthetic
cacacagaaaaaaaucag

SEQ ID NO: 307271 - RNA, 19 nt, Artificial Sequence
  Synthetic
acacacagaaaaaaaucag

SEQ ID NO: 307272 - RNA, 20 nt, Artificial Sequence
  Synthetic
cacacacagaaaaaaaucag

SEQ ID NO: 307273 - RNA, 21 nt, Artificial Sequence
  Synthetic
ccacacacagaaaaaaaucag

SEQ ID NO: 307274 - RNA, 22 nt, Artificial Sequence
  Synthetic
uccacacacagaaaaaaaucag

SEQ ID NO: 307275 - RNA, 23 nt, Artificial Sequence
  Synthetic
auccacacacagaaaaaaaucag

SEQ ID NO: 307276 - RNA, 24 nt, Artificial Sequence
  Synthetic
gauccacacacagaaaaaaaucag

SEQ ID NO: 307277 - RNA, 18 nt, Artificial Sequence
  Synthetic
acaaauacaaaaaaucag

SEQ ID NO: 307278 - RNA, 19 nt, Artificial Sequence
  Synthetic
uacaaauacaaaaaaucag

SEQ ID NO: 307279 - RNA, 20 nt, Artificial Sequence
  Synthetic
cuacaaauacaaaaaaucag

SEQ ID NO: 307280 - RNA, 21 nt, Artificial Sequence
  Synthetic
acuacaaauacaaaaaaucag

SEQ ID NO: 307281 - RNA, 22 nt, Artificial Sequence
  Synthetic
uacuacaaauacaaaaaaucag

SEQ ID NO: 307282 - RNA, 23 nt, Artificial Sequence
  Synthetic
cuacuacaaauacaaaaaaucag

SEQ ID NO: 307283 - RNA, 24 nt, Artificial Sequence
  Synthetic
ucuacuacaaauacaaaaaaucag

SEQ ID NO: 307284 - RNA, 18 nt, Artificial Sequence
  Synthetic
aauucguuagaaaaucag

SEQ ID NO: 307285 - RNA, 19 nt, Artificial Sequence
  Synthetic
aaauucguuagaaaaucag

SEQ ID NO: 307286 - RNA, 20 nt, Artificial Sequence
  Synthetic
aaaauucguuagaaaaucag

SEQ ID NO: 307287 - RNA, 21 nt, Artificial Sequence
  Synthetic
caaaauucguuagaaaaucag

SEQ ID NO: 307288 - RNA, 22 nt, Artificial Sequence
  Synthetic
ccaaaauucguuagaaaaucag

SEQ ID NO: 307289 - RNA, 23 nt, Artificial Sequence
  Synthetic
accaaaauucguuagaaaaucag

SEQ ID NO: 307290 - RNA, 24 nt, Artificial Sequence
  Synthetic
aaccaaaauucguuagaaaaucag

SEQ ID NO: 307291 - RNA, 18 nt, Artificial Sequence
  Synthetic
auggcauacacaaaucag

SEQ ID NO: 307292 - RNA, 19 nt, Artificial Sequence
  Synthetic
gauggcauacacaaaucag

SEQ ID NO: 307293 - RNA, 20 nt, Artificial Sequence
  Synthetic
cgauggcauacacaaaucag

SEQ ID NO: 307294 - RNA, 21 nt, Artificial Sequence
  Synthetic
gcgauggcauacacaaaucag

SEQ ID NO: 307295 - RNA, 22 nt, Artificial Sequence
  Synthetic
ggcgauggcauacacaaaucag

SEQ ID NO: 307296 - RNA, 23 nt, Artificial Sequence
  Synthetic
uggcgauggcauacacaaaucag

SEQ ID NO: 307297 - RNA, 24 nt, Artificial Sequence
  Synthetic
cuggcgauggcauacacaaaucag

SEQ ID NO: 307298 - RNA, 18 nt, Artificial Sequence
  Synthetic
gcaauuaaagcaaaucag

SEQ ID NO: 307299 - RNA, 19 nt, Artificial Sequence
  Synthetic
agcaauuaaagcaaaucag

SEQ ID NO: 307300 - RNA, 20 nt, Artificial Sequence
  Synthetic
gagcaauuaaagcaaaucag

SEQ ID NO: 307301 - RNA, 21 nt, Artificial Sequence
  Synthetic
agagcaauuaaagcaaaucag

SEQ ID NO: 307302 - RNA, 22 nt, Artificial Sequence
  Synthetic
cagagcaauuaaagcaaaucag

SEQ ID NO: 307303 - RNA, 23 nt, Artificial Sequence
  Synthetic
acagagcaauuaaagcaaaucag

SEQ ID NO: 307304 - RNA, 24 nt, Artificial Sequence
  Synthetic
cacagagcaauuaaagcaaaucag

SEQ ID NO: 307305 - RNA, 18 nt, Artificial Sequence
  Synthetic
uuacagaaacgaaaucag

SEQ ID NO: 307306 - RNA, 19 nt, Artificial Sequence
  Synthetic
guuacagaaacgaaaucag

SEQ ID NO: 307307 - RNA, 20 nt, Artificial Sequence
  Synthetic
uguuacagaaacgaaaucag

SEQ ID NO: 307308 - RNA, 21 nt, Artificial Sequence
  Synthetic
cuguuacagaaacgaaaucag

SEQ ID NO: 307309 - RNA, 22 nt, Artificial Sequence
  Synthetic
acuguuacagaaacgaaaucag

SEQ ID NO: 307310 - RNA, 23 nt, Artificial Sequence
  Synthetic
aacuguuacagaaacgaaaucag

SEQ ID NO: 307311 - RNA, 24 nt, Artificial Sequence
  Synthetic
caacuguuacagaaacgaaaucag

SEQ ID NO: 307312 - RNA, 18 nt, Artificial Sequence
  Synthetic
uaaccuguuaacaaucag

SEQ ID NO: 307313 - RNA, 19 nt, Artificial Sequence
  Synthetic
uuaaccuguuaacaaucag

SEQ ID NO: 307314 - RNA, 20 nt, Artificial Sequence
  Synthetic
uuuaaccuguuaacaaucag

SEQ ID NO: 307315 - RNA, 21 nt, Artificial Sequence
  Synthetic
uuuuaaccuguuaacaaucag

SEQ ID NO: 307316 - RNA, 22 nt, Artificial Sequence
  Synthetic
uuuuuaaccuguuaacaaucag

SEQ ID NO: 307317 - RNA, 23 nt, Artificial Sequence
  Synthetic
uuuuuuaaccuguuaacaaucag

SEQ ID NO: 307318 - RNA, 24 nt, Artificial Sequence
  Synthetic
guuuuuuaaccuguuaacaaucag

SEQ ID NO: 307319 - RNA, 18 nt, Artificial Sequence
  Synthetic
agaauagaaggcaaucag

SEQ ID NO: 307320 - RNA, 19 nt, Artificial Sequence
  Synthetic
uagaauagaaggcaaucag

SEQ ID NO: 307321 - RNA, 20 nt, Artificial Sequence
  Synthetic
cuagaauagaaggcaaucag

SEQ ID NO: 307322 - RNA, 21 nt, Artificial Sequence
  Synthetic
ucuagaauagaaggcaaucag

SEQ ID NO: 307323 - RNA, 22 nt, Artificial Sequence
  Synthetic
cucuagaauagaaggcaaucag

SEQ ID NO: 307324 - RNA, 23 nt, Artificial Sequence
  Synthetic
ccucuagaauagaaggcaaucag

SEQ ID NO: 307325 - RNA, 24 nt, Artificial Sequence
  Synthetic
uccucuagaauagaaggcaaucag

SEQ ID NO: 307326 - RNA, 18 nt, Artificial Sequence
  Synthetic
uacucacaucagaaucag

SEQ ID NO: 307327 - RNA, 19 nt, Artificial Sequence
  Synthetic
auacucacaucagaaucag

SEQ ID NO: 307328 - RNA, 20 nt, Artificial Sequence
  Synthetic
aauacucacaucagaaucag

SEQ ID NO: 307329 - RNA, 21 nt, Artificial Sequence
  Synthetic
uaauacucacaucagaaucag

SEQ ID NO: 307330 - RNA, 22 nt, Artificial Sequence
  Synthetic
guaauacucacaucagaaucag

SEQ ID NO: 307331 - RNA, 23 nt, Artificial Sequence
  Synthetic
aguaauacucacaucagaaucag

SEQ ID NO: 307332 - RNA, 24 nt, Artificial Sequence
  Synthetic
caguaauacucacaucagaaucag

SEQ ID NO: 307333 - RNA, 18 nt, Artificial Sequence
  Synthetic
uacucacgucagaaucag

SEQ ID NO: 307334 - RNA, 19 nt, Artificial Sequence
  Synthetic
guacucacgucagaaucag

SEQ ID NO: 307335 - RNA, 20 nt, Artificial Sequence
  Synthetic
aguacucacgucagaaucag

SEQ ID NO: 307336 - RNA, 21 nt, Artificial Sequence
  Synthetic
uaguacucacgucagaaucag

SEQ ID NO: 307337 - RNA, 22 nt, Artificial Sequence
  Synthetic
guaguacucacgucagaaucag

SEQ ID NO: 307338 - RNA, 23 nt, Artificial Sequence
  Synthetic
aguaguacucacgucagaaucag

SEQ ID NO: 307339 - RNA, 24 nt, Artificial Sequence
  Synthetic
caguaguacucacgucagaaucag

SEQ ID NO: 307340 - RNA, 18 nt, Artificial Sequence
  Synthetic
cuagcauaagggaaucag

SEQ ID NO: 307341 - RNA, 19 nt, Artificial Sequence
  Synthetic
acuagcauaagggaaucag

SEQ ID NO: 307342 - RNA, 20 nt, Artificial Sequence
  Synthetic
cacuagcauaagggaaucag

SEQ ID NO: 307343 - RNA, 21 nt, Artificial Sequence
  Synthetic
acacuagcauaagggaaucag

SEQ ID NO: 307344 - RNA, 22 nt, Artificial Sequence
  Synthetic
uacacuagcauaagggaaucag

SEQ ID NO: 307345 - RNA, 23 nt, Artificial Sequence
  Synthetic
auacacuagcauaagggaaucag

SEQ ID NO: 307346 - RNA, 24 nt, Artificial Sequence
  Synthetic
cauacacuagcauaagggaaucag

SEQ ID NO: 307347 - RNA, 18 nt, Artificial Sequence
  Synthetic
gauucacauuugaaucag

SEQ ID NO: 307348 - RNA, 19 nt, Artificial Sequence
  Synthetic
agauucacauuugaaucag

SEQ ID NO: 307349 - RNA, 20 nt, Artificial Sequence
  Synthetic
gagauucacauuugaaucag

SEQ ID NO: 307350 - RNA, 21 nt, Artificial Sequence
  Synthetic
agagauucacauuugaaucag

SEQ ID NO: 307351 - RNA, 22 nt, Artificial Sequence
  Synthetic
gagagauucacauuugaaucag

SEQ ID NO: 307352 - RNA, 23 nt, Artificial Sequence
  Synthetic
ggagagauucacauuugaaucag

SEQ ID NO: 307353 - RNA, 24 nt, Artificial Sequence
  Synthetic
uggagagauucacauuugaaucag

SEQ ID NO: 307354 - RNA, 18 nt, Artificial Sequence
  Synthetic
guaaggaaggauaaucag

SEQ ID NO: 307355 - RNA, 19 nt, Artificial Sequence
  Synthetic
cguaaggaaggauaaucag

SEQ ID NO: 307356 - RNA, 20 nt, Artificial Sequence
  Synthetic
acguaaggaaggauaaucag

SEQ ID NO: 307357 - RNA, 21 nt, Artificial Sequence
  Synthetic
cacguaaggaaggauaaucag

SEQ ID NO: 307358 - RNA, 22 nt, Artificial Sequence
  Synthetic
gcacguaaggaaggauaaucag

SEQ ID NO: 307359 - RNA, 23 nt, Artificial Sequence
  Synthetic
agcacguaaggaaggauaaucag

SEQ ID NO: 307360 - RNA, 24 nt, Artificial Sequence
  Synthetic
aagcacguaaggaaggauaaucag

SEQ ID NO: 307361 - RNA, 18 nt, Artificial Sequence
  Synthetic
gggggguaaauuaaucag

SEQ ID NO: 307362 - RNA, 19 nt, Artificial Sequence
  Synthetic
ugggggguaaauuaaucag

SEQ ID NO: 307363 - RNA, 20 nt, Artificial Sequence
  Synthetic
uugggggguaaauuaaucag

SEQ ID NO: 307364 - RNA, 21 nt, Artificial Sequence
  Synthetic
uuugggggguaaauuaaucag

SEQ ID NO: 307365 - RNA, 22 nt, Artificial Sequence
  Synthetic
auuugggggguaaauuaaucag

SEQ ID NO: 307366 - RNA, 23 nt, Artificial Sequence
  Synthetic
uauuugggggguaaauuaaucag

SEQ ID NO: 307367 - RNA, 24 nt, Artificial Sequence
  Synthetic
uuauuugggggguaaauuaaucag

SEQ ID NO: 307368 - RNA, 18 nt, Artificial Sequence
  Synthetic
cuucuauuacaacaucag

SEQ ID NO: 307369 - RNA, 19 nt, Artificial Sequence
  Synthetic
gcuucuauuacaacaucag

SEQ ID NO: 307370 - RNA, 20 nt, Artificial Sequence
  Synthetic
agcuucuauuacaacaucag

SEQ ID NO: 307371 - RNA, 21 nt, Artificial Sequence
  Synthetic
cagcuucuauuacaacaucag

SEQ ID NO: 307372 - RNA, 22 nt, Artificial Sequence
  Synthetic
acagcuucuauuacaacaucag

SEQ ID NO: 307373 - RNA, 23 nt, Artificial Sequence
  Synthetic
uacagcuucuauuacaacaucag

SEQ ID NO: 307374 - RNA, 24 nt, Artificial Sequence
  Synthetic
guacagcuucuauuacaacaucag

SEQ ID NO: 307375 - RNA, 18 nt, Artificial Sequence
  Synthetic
gguaagucugaacaucag

SEQ ID NO: 307376 - RNA, 19 nt, Artificial Sequence
  Synthetic
agguaagucugaacaucag

SEQ ID NO: 307377 - RNA, 20 nt, Artificial Sequence
  Synthetic
uagguaagucugaacaucag

SEQ ID NO: 307378 - RNA, 21 nt, Artificial Sequence
  Synthetic
auagguaagucugaacaucag

SEQ ID NO: 307379 - RNA, 22 nt, Artificial Sequence
  Synthetic
aauagguaagucugaacaucag

SEQ ID NO: 307380 - RNA, 23 nt, Artificial Sequence
  Synthetic
gaauagguaagucugaacaucag

SEQ ID NO: 307381 - RNA, 24 nt, Artificial Sequence
  Synthetic
ugaauagguaagucugaacaucag

SEQ ID NO: 307382 - RNA, 18 nt, Artificial Sequence
  Synthetic
cagaucuauagacaucag

SEQ ID NO: 307383 - RNA, 19 nt, Artificial Sequence
  Synthetic
ccagaucuauagacaucag

SEQ ID NO: 307384 - RNA, 20 nt, Artificial Sequence
  Synthetic
uccagaucuauagacaucag

SEQ ID NO: 307385 - RNA, 21 nt, Artificial Sequence
  Synthetic
uuccagaucuauagacaucag

SEQ ID NO: 307386 - RNA, 22 nt, Artificial Sequence
  Synthetic
cuuccagaucuauagacaucag

SEQ ID NO: 307387 - RNA, 23 nt, Artificial Sequence
  Synthetic
ccuuccagaucuauagacaucag

SEQ ID NO: 307388 - RNA, 24 nt, Artificial Sequence
  Synthetic
uccuuccagaucuauagacaucag

SEQ ID NO: 307389 - RNA, 18 nt, Artificial Sequence
  Synthetic
acucauuuuuagcaucag

SEQ ID NO: 307390 - RNA, 19 nt, Artificial Sequence
  Synthetic
aacucauuuuuagcaucag

SEQ ID NO: 307391 - RNA, 20 nt, Artificial Sequence
  Synthetic
uaacucauuuuuagcaucag

SEQ ID NO: 307392 - RNA, 21 nt, Artificial Sequence
  Synthetic
auaacucauuuuuagcaucag

SEQ ID NO: 307393 - RNA, 22 nt, Artificial Sequence
  Synthetic
uauaacucauuuuuagcaucag

SEQ ID NO: 307394 - RNA, 23 nt, Artificial Sequence
  Synthetic
auauaacucauuuuuagcaucag

SEQ ID NO: 307395 - RNA, 24 nt, Artificial Sequence
  Synthetic
aauauaacucauuuuuagcaucag

SEQ ID NO: 307396 - RNA, 18 nt, Artificial Sequence
  Synthetic
uaguccauuuugcaucag

SEQ ID NO: 307397 - RNA, 19 nt, Artificial Sequence
  Synthetic
guaguccauuuugcaucag

SEQ ID NO: 307398 - RNA, 20 nt, Artificial Sequence
  Synthetic
gguaguccauuuugcaucag

SEQ ID NO: 307399 - RNA, 21 nt, Artificial Sequence
  Synthetic
agguaguccauuuugcaucag

SEQ ID NO: 307400 - RNA, 22 nt, Artificial Sequence
  Synthetic
cagguaguccauuuugcaucag

SEQ ID NO: 307401 - RNA, 23 nt, Artificial Sequence
  Synthetic
ucagguaguccauuuugcaucag

SEQ ID NO: 307402 - RNA, 24 nt, Artificial Sequence
  Synthetic
aucagguaguccauuuugcaucag

SEQ ID NO: 307403 - RNA, 18 nt, Artificial Sequence
  Synthetic
augugucaaaaucaucag

SEQ ID NO: 307404 - RNA, 19 nt, Artificial Sequence
  Synthetic
caugugucaaaaucaucag

SEQ ID NO: 307405 - RNA, 20 nt, Artificial Sequence
  Synthetic
ucaugugucaaaaucaucag

SEQ ID NO: 307406 - RNA, 21 nt, Artificial Sequence
  Synthetic
cucaugugucaaaaucaucag

SEQ ID NO: 307407 - RNA, 22 nt, Artificial Sequence
  Synthetic
ucucaugugucaaaaucaucag

SEQ ID NO: 307408 - RNA, 23 nt, Artificial Sequence
  Synthetic
cucucaugugucaaaaucaucag

SEQ ID NO: 307409 - RNA, 24 nt, Artificial Sequence
  Synthetic
ccucucaugugucaaaaucaucag

SEQ ID NO: 307410 - RNA, 18 nt, Artificial Sequence
  Synthetic
acuucucacacucaucag

SEQ ID NO: 307411 - RNA, 19 nt, Artificial Sequence
  Synthetic
cacuucucacacucaucag

SEQ ID NO: 307412 - RNA, 20 nt, Artificial Sequence
  Synthetic
gcacuucucacacucaucag

SEQ ID NO: 307413 - RNA, 21 nt, Artificial Sequence
  Synthetic
agcacuucucacacucaucag

SEQ ID NO: 307414 - RNA, 22 nt, Artificial Sequence
  Synthetic
cagcacuucucacacucaucag

SEQ ID NO: 307415 - RNA, 23 nt, Artificial Sequence
  Synthetic
ccagcacuucucacacucaucag

SEQ ID NO: 307416 - RNA, 24 nt, Artificial Sequence
  Synthetic
cccagcacuucucacacucaucag

SEQ ID NO: 307417 - RNA, 18 nt, Artificial Sequence
  Synthetic
uaauugaaaugucaucag

SEQ ID NO: 307418 - RNA, 19 nt, Artificial Sequence
  Synthetic
auaauugaaaugucaucag

SEQ ID NO: 307419 - RNA, 20 nt, Artificial Sequence
  Synthetic
uauaauugaaaugucaucag

SEQ ID NO: 307420 - RNA, 21 nt, Artificial Sequence
  Synthetic
uuauaauugaaaugucaucag

SEQ ID NO: 307421 - RNA, 22 nt, Artificial Sequence
  Synthetic
cuuauaauugaaaugucaucag

SEQ ID NO: 307422 - RNA, 23 nt, Artificial Sequence
  Synthetic
gcuuauaauugaaaugucaucag

SEQ ID NO: 307423 - RNA, 24 nt, Artificial Sequence
  Synthetic
ggcuuauaauugaaaugucaucag

SEQ ID NO: 307424 - RNA, 18 nt, Artificial Sequence
  Synthetic
guugugauuggagaucag

SEQ ID NO: 307425 - RNA, 19 nt, Artificial Sequence
  Synthetic
aguugugauuggagaucag

SEQ ID NO: 307426 - RNA, 20 nt, Artificial Sequence
  Synthetic
uaguugugauuggagaucag

SEQ ID NO: 307427 - RNA, 21 nt, Artificial Sequence
  Synthetic
uuaguugugauuggagaucag

SEQ ID NO: 307428 - RNA, 22 nt, Artificial Sequence
  Synthetic
uuuaguugugauuggagaucag

SEQ ID NO: 307429 - RNA, 23 nt, Artificial Sequence
  Synthetic
guuuaguugugauuggagaucag

SEQ ID NO: 307430 - RNA, 24 nt, Artificial Sequence
  Synthetic
uguuuaguugugauuggagaucag

SEQ ID NO: 307431 - RNA, 18 nt, Artificial Sequence
  Synthetic
aacagagauauagaucag

SEQ ID NO: 307432 - RNA, 19 nt, Artificial Sequence
  Synthetic
aaacagagauauagaucag

SEQ ID NO: 307433 - RNA, 20 nt, Artificial Sequence
  Synthetic
aaaacagagauauagaucag

SEQ ID NO: 307434 - RNA, 21 nt, Artificial Sequence
  Synthetic
caaaacagagauauagaucag

SEQ ID NO: 307435 - RNA, 22 nt, Artificial Sequence
  Synthetic
ccaaaacagagauauagaucag

SEQ ID NO: 307436 - RNA, 23 nt, Artificial Sequence
  Synthetic
accaaaacagagauauagaucag

SEQ ID NO: 307437 - RNA, 24 nt, Artificial Sequence
  Synthetic
uaccaaaacagagauauagaucag

SEQ ID NO: 307438 - RNA, 18 nt, Artificial Sequence
  Synthetic
agauguuuaaaggaucag

SEQ ID NO: 307439 - RNA, 19 nt, Artificial Sequence
  Synthetic
cagauguuuaaaggaucag

SEQ ID NO: 307440 - RNA, 20 nt, Artificial Sequence
  Synthetic
ccagauguuuaaaggaucag

SEQ ID NO: 307441 - RNA, 21 nt, Artificial Sequence
  Synthetic
gccagauguuuaaaggaucag

SEQ ID NO: 307442 - RNA, 22 nt, Artificial Sequence
  Synthetic
ggccagauguuuaaaggaucag

SEQ ID NO: 307443 - RNA, 23 nt, Artificial Sequence
  Synthetic
aggccagauguuuaaaggaucag

SEQ ID NO: 307444 - RNA, 24 nt, Artificial Sequence
  Synthetic
uaggccagauguuuaaaggaucag

SEQ ID NO: 307445 - RNA, 18 nt, Artificial Sequence
  Synthetic
ggaggcagcuaggaucag

SEQ ID NO: 307446 - RNA, 19 nt, Artificial Sequence
  Synthetic
uggaggcagcuaggaucag

SEQ ID NO: 307447 - RNA, 20 nt, Artificial Sequence
  Synthetic
cuggaggcagcuaggaucag

SEQ ID NO: 307448 - RNA, 21 nt, Artificial Sequence
  Synthetic
ucuggaggcagcuaggaucag

SEQ ID NO: 307449 - RNA, 22 nt, Artificial Sequence
  Synthetic
gucuggaggcagcuaggaucag

SEQ ID NO: 307450 - RNA, 23 nt, Artificial Sequence
  Synthetic
cgucuggaggcagcuaggaucag

SEQ ID NO: 307451 - RNA, 24 nt, Artificial Sequence
  Synthetic
ucgucuggaggcagcuaggaucag

SEQ ID NO: 307452 - RNA, 18 nt, Artificial Sequence
  Synthetic
cuccaaaugguggaucag

SEQ ID NO: 307453 - RNA, 19 nt, Artificial Sequence
  Synthetic
ccuccaaaugguggaucag

SEQ ID NO: 307454 - RNA, 20 nt, Artificial Sequence
  Synthetic
uccuccaaaugguggaucag

SEQ ID NO: 307455 - RNA, 21 nt, Artificial Sequence
  Synthetic
uuccuccaaaugguggaucag

SEQ ID NO: 307456 - RNA, 22 nt, Artificial Sequence
  Synthetic
uuuccuccaaaugguggaucag

SEQ ID NO: 307457 - RNA, 23 nt, Artificial Sequence
  Synthetic
auuuccuccaaaugguggaucag

SEQ ID NO: 307458 - RNA, 24 nt, Artificial Sequence
  Synthetic
gauuuccuccaaaugguggaucag

SEQ ID NO: 307459 - RNA, 18 nt, Artificial Sequence
  Synthetic
uuaaauucacaauaucag

SEQ ID NO: 307460 - RNA, 19 nt, Artificial Sequence
  Synthetic
auuaaauucacaauaucag

SEQ ID NO: 307461 - RNA, 20 nt, Artificial Sequence
  Synthetic
aauuaaauucacaauaucag

SEQ ID NO: 307462 - RNA, 21 nt, Artificial Sequence
  Synthetic
uaauuaaauucacaauaucag

SEQ ID NO: 307463 - RNA, 22 nt, Artificial Sequence
  Synthetic
cuaauuaaauucacaauaucag

SEQ ID NO: 307464 - RNA, 23 nt, Artificial Sequence
  Synthetic
acuaauuaaauucacaauaucag

SEQ ID NO: 307465 - RNA, 24 nt, Artificial Sequence
  Synthetic
uacuaauuaaauucacaauaucag

SEQ ID NO: 307466 - RNA, 18 nt, Artificial Sequence
  Synthetic
aagcauccaucauaucag

SEQ ID NO: 307467 - RNA, 19 nt, Artificial Sequence
  Synthetic
gaagcauccaucauaucag

SEQ ID NO: 307468 - RNA, 20 nt, Artificial Sequence
  Synthetic
ggaagcauccaucauaucag

SEQ ID NO: 307469 - RNA, 21 nt, Artificial Sequence
  Synthetic
uggaagcauccaucauaucag

SEQ ID NO: 307470 - RNA, 22 nt, Artificial Sequence
  Synthetic
uuggaagcauccaucauaucag

SEQ ID NO: 307471 - RNA, 23 nt, Artificial Sequence
  Synthetic
auuggaagcauccaucauaucag

SEQ ID NO: 307472 - RNA, 24 nt, Artificial Sequence
  Synthetic
aauuggaagcauccaucauaucag

SEQ ID NO: 307473 - RNA, 18 nt, Artificial Sequence
  Synthetic
gaaaguacuagauaucag

SEQ ID NO: 307474 - RNA, 19 nt, Artificial Sequence
  Synthetic
agaaaguacuagauaucag

SEQ ID NO: 307475 - RNA, 20 nt, Artificial Sequence
  Synthetic
gagaaaguacuagauaucag

SEQ ID NO: 307476 - RNA, 21 nt, Artificial Sequence
  Synthetic
ugagaaaguacuagauaucag

SEQ ID NO: 307477 - RNA, 22 nt, Artificial Sequence
  Synthetic
gugagaaaguacuagauaucag

SEQ ID NO: 307478 - RNA, 23 nt, Artificial Sequence
  Synthetic
agugagaaaguacuagauaucag

SEQ ID NO: 307479 - RNA, 24 nt, Artificial Sequence
  Synthetic
uagugagaaaguacuagauaucag

SEQ ID NO: 307480 - RNA, 18 nt, Artificial Sequence
  Synthetic
uguuucaguugauaucag

SEQ ID NO: 307481 - RNA, 19 nt, Artificial Sequence
  Synthetic
cuguuucaguugauaucag

SEQ ID NO: 307482 - RNA, 20 nt, Artificial Sequence
  Synthetic
ccuguuucaguugauaucag

SEQ ID NO: 307483 - RNA, 21 nt, Artificial Sequence
  Synthetic
cccuguuucaguugauaucag

SEQ ID NO: 307484 - RNA, 22 nt, Artificial Sequence
  Synthetic
ucccuguuucaguugauaucag

SEQ ID NO: 307485 - RNA, 23 nt, Artificial Sequence
  Synthetic
aucccuguuucaguugauaucag

SEQ ID NO: 307486 - RNA, 24 nt, Artificial Sequence
  Synthetic
uaucccuguuucaguugauaucag

SEQ ID NO: 307487 - RNA, 18 nt, Artificial Sequence
  Synthetic
cagauccaauuauaucag

SEQ ID NO: 307488 - RNA, 19 nt, Artificial Sequence
  Synthetic
ucagauccaauuauaucag

SEQ ID NO: 307489 - RNA, 20 nt, Artificial Sequence
  Synthetic
aucagauccaauuauaucag

SEQ ID NO: 307490 - RNA, 21 nt, Artificial Sequence
  Synthetic
aaucagauccaauuauaucag

SEQ ID NO: 307491 - RNA, 22 nt, Artificial Sequence
  Synthetic
gaaucagauccaauuauaucag

SEQ ID NO: 307492 - RNA, 23 nt, Artificial Sequence
  Synthetic
agaaucagauccaauuauaucag

SEQ ID NO: 307493 - RNA, 24 nt, Artificial Sequence
  Synthetic
gagaaucagauccaauuauaucag

SEQ ID NO: 307494 - RNA, 18 nt, Artificial Sequence
  Synthetic
agacuuauucacuaucag

SEQ ID NO: 307495 - RNA, 19 nt, Artificial Sequence
  Synthetic
gagacuuauucacuaucag

SEQ ID NO: 307496 - RNA, 20 nt, Artificial Sequence
  Synthetic
ugagacuuauucacuaucag

SEQ ID NO: 307497 - RNA, 21 nt, Artificial Sequence
  Synthetic
augagacuuauucacuaucag

SEQ ID NO: 307498 - RNA, 22 nt, Artificial Sequence
  Synthetic
caugagacuuauucacuaucag

SEQ ID NO: 307499 - RNA, 23 nt, Artificial Sequence
  Synthetic
ucaugagacuuauucacuaucag

SEQ ID NO: 307500 - RNA, 24 nt, Artificial Sequence
  Synthetic
cucaugagacuuauucacuaucag

SEQ ID NO: 307501 - RNA, 18 nt, Artificial Sequence
  Synthetic
ccagcugccagcuaucag

SEQ ID NO: 307502 - RNA, 19 nt, Artificial Sequence
  Synthetic
gccagcugccagcuaucag

SEQ ID NO: 307503 - RNA, 20 nt, Artificial Sequence
  Synthetic
ugccagcugccagcuaucag

SEQ ID NO: 307504 - RNA, 21 nt, Artificial Sequence
  Synthetic
cugccagcugccagcuaucag

SEQ ID NO: 307505 - RNA, 22 nt, Artificial Sequence
  Synthetic
gcugccagcugccagcuaucag

SEQ ID NO: 307506 - RNA, 23 nt, Artificial Sequence
  Synthetic
agcugccagcugccagcuaucag

SEQ ID NO: 307507 - RNA, 24 nt, Artificial Sequence
  Synthetic
uagcugccagcugccagcuaucag

SEQ ID NO: 307508 - RNA, 18 nt, Artificial Sequence
  Synthetic
cuggagucuugguaucag

SEQ ID NO: 307509 - RNA, 19 nt, Artificial Sequence
  Synthetic
gcuggagucuugguaucag

SEQ ID NO: 307510 - RNA, 20 nt, Artificial Sequence
  Synthetic
agcuggagucuugguaucag

SEQ ID NO: 307511 - RNA, 21 nt, Artificial Sequence
  Synthetic
cagcuggagucuugguaucag

SEQ ID NO: 307512 - RNA, 22 nt, Artificial Sequence
  Synthetic
ucagcuggagucuugguaucag

SEQ ID NO: 307513 - RNA, 23 nt, Artificial Sequence
  Synthetic
uucagcuggagucuugguaucag

SEQ ID NO: 307514 - RNA, 24 nt, Artificial Sequence
  Synthetic
auucagcuggagucuugguaucag

SEQ ID NO: 307515 - RNA, 18 nt, Artificial Sequence
  Synthetic
gagcaccugauguaucag

SEQ ID NO: 307516 - RNA, 19 nt, Artificial Sequence
  Synthetic
agagcaccugauguaucag

SEQ ID NO: 307517 - RNA, 20 nt, Artificial Sequence
  Synthetic
uagagcaccugauguaucag

SEQ ID NO: 307518 - RNA, 21 nt, Artificial Sequence
  Synthetic
auagagcaccugauguaucag

SEQ ID NO: 307519 - RNA, 22 nt, Artificial Sequence
  Synthetic
uauagagcaccugauguaucag

SEQ ID NO: 307520 - RNA, 23 nt, Artificial Sequence
  Synthetic
auauagagcaccugauguaucag

SEQ ID NO: 307521 - RNA, 24 nt, Artificial Sequence
  Synthetic
uauauagagcaccugauguaucag

SEQ ID NO: 307522 - RNA, 18 nt, Artificial Sequence
  Synthetic
cuuuucguauuguaucag

SEQ ID NO: 307523 - RNA, 19 nt, Artificial Sequence
  Synthetic
ccuuuucguauuguaucag

SEQ ID NO: 307524 - RNA, 20 nt, Artificial Sequence
  Synthetic
accuuuucguauuguaucag

SEQ ID NO: 307525 - RNA, 21 nt, Artificial Sequence
  Synthetic
uaccuuuucguauuguaucag

SEQ ID NO: 307526 - RNA, 22 nt, Artificial Sequence
  Synthetic
guaccuuuucguauuguaucag

SEQ ID NO: 307527 - RNA, 23 nt, Artificial Sequence
  Synthetic
aguaccuuuucguauuguaucag

SEQ ID NO: 307528 - RNA, 24 nt, Artificial Sequence
  Synthetic
uaguaccuuuucguauuguaucag

SEQ ID NO: 307529 - RNA, 18 nt, Artificial Sequence
  Synthetic
auugaauccacuuaucag

SEQ ID NO: 307530 - RNA, 19 nt, Artificial Sequence
  Synthetic
cauugaauccacuuaucag

SEQ ID NO: 307531 - RNA, 20 nt, Artificial Sequence
  Synthetic
ucauugaauccacuuaucag

SEQ ID NO: 307532 - RNA, 21 nt, Artificial Sequence
  Synthetic
aucauugaauccacuuaucag

SEQ ID NO: 307533 - RNA, 22 nt, Artificial Sequence
  Synthetic
aaucauugaauccacuuaucag

SEQ ID NO: 307534 - RNA, 23 nt, Artificial Sequence
  Synthetic
aaaucauugaauccacuuaucag

SEQ ID NO: 307535 - RNA, 24 nt, Artificial Sequence
  Synthetic
gaaaucauugaauccacuuaucag

SEQ ID NO: 307536 - RNA, 18 nt, Artificial Sequence
  Synthetic
auccuccuugcuuaucag

SEQ ID NO: 307537 - RNA, 19 nt, Artificial Sequence
  Synthetic
gauccuccuugcuuaucag

SEQ ID NO: 307538 - RNA, 20 nt, Artificial Sequence
  Synthetic
ggauccuccuugcuuaucag

SEQ ID NO: 307539 - RNA, 21 nt, Artificial Sequence
  Synthetic
gggauccuccuugcuuaucag

SEQ ID NO: 307540 - RNA, 22 nt, Artificial Sequence
  Synthetic
agggauccuccuugcuuaucag

SEQ ID NO: 307541 - RNA, 23 nt, Artificial Sequence
  Synthetic
uagggauccuccuugcuuaucag

SEQ ID NO: 307542 - RNA, 24 nt, Artificial Sequence
  Synthetic
guagggauccuccuugcuuaucag

SEQ ID NO: 307543 - RNA, 18 nt, Artificial Sequence
  Synthetic
cugugcaaguguuaucag

SEQ ID NO: 307544 - RNA, 19 nt, Artificial Sequence
  Synthetic
ucugugcaaguguuaucag

SEQ ID NO: 307545 - RNA, 20 nt, Artificial Sequence
  Synthetic
uucugugcaaguguuaucag

SEQ ID NO: 307546 - RNA, 21 nt, Artificial Sequence
  Synthetic
auucugugcaaguguuaucag

SEQ ID NO: 307547 - RNA, 22 nt, Artificial Sequence
  Synthetic
gauucugugcaaguguuaucag

SEQ ID NO: 307548 - RNA, 23 nt, Artificial Sequence
  Synthetic
ugauucugugcaaguguuaucag

SEQ ID NO: 307549 - RNA, 24 nt, Artificial Sequence
  Synthetic
gugauucugugcaaguguuaucag

SEQ ID NO: 307550 - RNA, 18 nt, Artificial Sequence
  Synthetic
ggucaucaguaaacucag

SEQ ID NO: 307551 - RNA, 19 nt, Artificial Sequence
  Synthetic
gggucaucaguaaacucag

SEQ ID NO: 307552 - RNA, 20 nt, Artificial Sequence
  Synthetic
agggucaucaguaaacucag

SEQ ID NO: 307553 - RNA, 21 nt, Artificial Sequence
  Synthetic
uagggucaucaguaaacucag

SEQ ID NO: 307554 - RNA, 22 nt, Artificial Sequence
  Synthetic
cuagggucaucaguaaacucag

SEQ ID NO: 307555 - RNA, 23 nt, Artificial Sequence
  Synthetic
ucuagggucaucaguaaacucag

SEQ ID NO: 307556 - RNA, 24 nt, Artificial Sequence
  Synthetic
uucuagggucaucaguaaacucag

SEQ ID NO: 307557 - RNA, 18 nt, Artificial Sequence
  Synthetic
uaaaucuccuuaacucag

SEQ ID NO: 307558 - RNA, 19 nt, Artificial Sequence
  Synthetic
uuaaaucuccuuaacucag

SEQ ID NO: 307559 - RNA, 20 nt, Artificial Sequence
  Synthetic
uuuaaaucuccuuaacucag

SEQ ID NO: 307560 - RNA, 21 nt, Artificial Sequence
  Synthetic
uuuuaaaucuccuuaacucag

SEQ ID NO: 307561 - RNA, 22 nt, Artificial Sequence
  Synthetic
cuuuuaaaucuccuuaacucag

SEQ ID NO: 307562 - RNA, 23 nt, Artificial Sequence
  Synthetic
ucuuuuaaaucuccuuaacucag

SEQ ID NO: 307563 - RNA, 24 nt, Artificial Sequence
  Synthetic
cucuuuuaaaucuccuuaacucag

SEQ ID NO: 307564 - RNA, 18 nt, Artificial Sequence
  Synthetic
aaaguaauaugcacucag

SEQ ID NO: 307565 - RNA, 19 nt, Artificial Sequence
  Synthetic
gaaaguaauaugcacucag

SEQ ID NO: 307566 - RNA, 20 nt, Artificial Sequence
  Synthetic
ugaaaguaauaugcacucag

SEQ ID NO: 307567 - RNA, 21 nt, Artificial Sequence
  Synthetic
gugaaaguaauaugcacucag

SEQ ID NO: 307568 - RNA, 22 nt, Artificial Sequence
  Synthetic
ugugaaaguaauaugcacucag

SEQ ID NO: 307569 - RNA, 23 nt, Artificial Sequence
  Synthetic
gugugaaaguaauaugcacucag

SEQ ID NO: 307570 - RNA, 24 nt, Artificial Sequence
  Synthetic
ggugugaaaguaauaugcacucag

SEQ ID NO: 307571 - RNA, 18 nt, Artificial Sequence
  Synthetic
gaacugaucaagacucag

SEQ ID NO: 307572 - RNA, 19 nt, Artificial Sequence
  Synthetic
ugaacugaucaagacucag

SEQ ID NO: 307573 - RNA, 20 nt, Artificial Sequence
  Synthetic
augaacugaucaagacucag

SEQ ID NO: 307574 - RNA, 21 nt, Artificial Sequence
  Synthetic
caugaacugaucaagacucag

SEQ ID NO: 307575 - RNA, 22 nt, Artificial Sequence
  Synthetic
acaugaacugaucaagacucag

SEQ ID NO: 307576 - RNA, 23 nt, Artificial Sequence
  Synthetic
uacaugaacugaucaagacucag

SEQ ID NO: 307577 - RNA, 24 nt, Artificial Sequence
  Synthetic
auacaugaacugaucaagacucag

SEQ ID NO: 307578 - RNA, 18 nt, Artificial Sequence
  Synthetic
uggacuuugaagacucag

SEQ ID NO: 307579 - RNA, 19 nt, Artificial Sequence
  Synthetic
auggacuuugaagacucag

SEQ ID NO: 307580 - RNA, 20 nt, Artificial Sequence
  Synthetic
aauggacuuugaagacucag

SEQ ID NO: 307581 - RNA, 21 nt, Artificial Sequence
  Synthetic
gaauggacuuugaagacucag

SEQ ID NO: 307582 - RNA, 22 nt, Artificial Sequence
  Synthetic
agaauggacuuugaagacucag

SEQ ID NO: 307583 - RNA, 23 nt, Artificial Sequence
  Synthetic
uagaauggacuuugaagacucag

SEQ ID NO: 307584 - RNA, 24 nt, Artificial Sequence
  Synthetic
guagaauggacuuugaagacucag

SEQ ID NO: 307585 - RNA, 18 nt, Artificial Sequence
  Synthetic
guaccuugacugacucag

SEQ ID NO: 307586 - RNA, 19 nt, Artificial Sequence
  Synthetic
uguaccuugacugacucag

SEQ ID NO: 307587 - RNA, 20 nt, Artificial Sequence
  Synthetic
uuguaccuugacugacucag

SEQ ID NO: 307588 - RNA, 21 nt, Artificial Sequence
  Synthetic
cuuguaccuugacugacucag

SEQ ID NO: 307589 - RNA, 22 nt, Artificial Sequence
  Synthetic
acuuguaccuugacugacucag

SEQ ID NO: 307590 - RNA, 23 nt, Artificial Sequence
  Synthetic
uacuuguaccuugacugacucag

SEQ ID NO: 307591 - RNA, 24 nt, Artificial Sequence
  Synthetic
uuacuuguaccuugacugacucag

SEQ ID NO: 307592 - RNA, 18 nt, Artificial Sequence
  Synthetic
uauuauacccauacucag

SEQ ID NO: 307593 - RNA, 19 nt, Artificial Sequence
  Synthetic
uuauuauacccauacucag

SEQ ID NO: 307594 - RNA, 20 nt, Artificial Sequence
  Synthetic
auuauuauacccauacucag

SEQ ID NO: 307595 - RNA, 21 nt, Artificial Sequence
  Synthetic
uauuauuauacccauacucag

SEQ ID NO: 307596 - RNA, 22 nt, Artificial Sequence
  Synthetic
guauuauuauacccauacucag

SEQ ID NO: 307597 - RNA, 23 nt, Artificial Sequence
  Synthetic
uguauuauuauacccauacucag

SEQ ID NO: 307598 - RNA, 24 nt, Artificial Sequence
  Synthetic
cuguauuauuauacccauacucag

SEQ ID NO: 307599 - RNA, 18 nt, Artificial Sequence
  Synthetic
ucaauguuacuuacucag

SEQ ID NO: 307600 - RNA, 19 nt, Artificial Sequence
  Synthetic
uucaauguuacuuacucag

SEQ ID NO: 307601 - RNA, 20 nt, Artificial Sequence
  Synthetic
uuucaauguuacuuacucag

SEQ ID NO: 307602 - RNA, 21 nt, Artificial Sequence
  Synthetic
auuucaauguuacuuacucag

SEQ ID NO: 307603 - RNA, 22 nt, Artificial Sequence
  Synthetic
aauuucaauguuacuuacucag

SEQ ID NO: 307604 - RNA, 23 nt, Artificial Sequence
  Synthetic
caauuucaauguuacuuacucag

SEQ ID NO: 307605 - RNA, 24 nt, Artificial Sequence
  Synthetic
ucaauuucaauguuacuuacucag

SEQ ID NO: 307606 - RNA, 18 nt, Artificial Sequence
  Synthetic
ggauuaauaaaaccucag

SEQ ID NO: 307607 - RNA, 19 nt, Artificial Sequence
  Synthetic
aggauuaauaaaaccucag

SEQ ID NO: 307608 - RNA, 20 nt, Artificial Sequence
  Synthetic
caggauuaauaaaaccucag

SEQ ID NO: 307609 - RNA, 21 nt, Artificial Sequence
  Synthetic
gcaggauuaauaaaaccucag

SEQ ID NO: 307610 - RNA, 22 nt, Artificial Sequence
  Synthetic
agcaggauuaauaaaaccucag

SEQ ID NO: 307611 - RNA, 23 nt, Artificial Sequence
  Synthetic
gagcaggauuaauaaaaccucag

SEQ ID NO: 307612 - RNA, 24 nt, Artificial Sequence
  Synthetic
ugagcaggauuaauaaaaccucag

SEQ ID NO: 307613 - RNA, 18 nt, Artificial Sequence
  Synthetic
aaggaagccuuaccucag

SEQ ID NO: 307614 - RNA, 19 nt, Artificial Sequence
  Synthetic
caaggaagccuuaccucag

SEQ ID NO: 307615 - RNA, 20 nt, Artificial Sequence
  Synthetic
ccaaggaagccuuaccucag

SEQ ID NO: 307616 - RNA, 21 nt, Artificial Sequence
  Synthetic
cccaaggaagccuuaccucag

SEQ ID NO: 307617 - RNA, 22 nt, Artificial Sequence
  Synthetic
ucccaaggaagccuuaccucag

SEQ ID NO: 307618 - RNA, 23 nt, Artificial Sequence
  Synthetic
uucccaaggaagccuuaccucag

SEQ ID NO: 307619 - RNA, 24 nt, Artificial Sequence
  Synthetic
uuucccaaggaagccuuaccucag

SEQ ID NO: 307620 - RNA, 18 nt, Artificial Sequence
  Synthetic
uggcagaaguucccucag

SEQ ID NO: 307621 - RNA, 19 nt, Artificial Sequence
  Synthetic
uuggcagaaguucccucag

SEQ ID NO: 307622 - RNA, 20 nt, Artificial Sequence
  Synthetic
uuuggcagaaguucccucag

SEQ ID NO: 307623 - RNA, 21 nt, Artificial Sequence
  Synthetic
cuuuggcagaaguucccucag

SEQ ID NO: 307624 - RNA, 22 nt, Artificial Sequence
  Synthetic
ccuuuggcagaaguucccucag

SEQ ID NO: 307625 - RNA, 23 nt, Artificial Sequence
  Synthetic
gccuuuggcagaaguucccucag

SEQ ID NO: 307626 - RNA, 24 nt, Artificial Sequence
  Synthetic
agccuuuggcagaaguucccucag

SEQ ID NO: 307627 - RNA, 18 nt, Artificial Sequence
  Synthetic
cuccuucuccugccucag

SEQ ID NO: 307628 - RNA, 19 nt, Artificial Sequence
  Synthetic
ucuccuucuccugccucag

SEQ ID NO: 307629 - RNA, 20 nt, Artificial Sequence
  Synthetic
uucuccuucuccugccucag

SEQ ID NO: 307630 - RNA, 21 nt, Artificial Sequence
  Synthetic
auucuccuucuccugccucag

SEQ ID NO: 307631 - RNA, 22 nt, Artificial Sequence
  Synthetic
cauucuccuucuccugccucag

SEQ ID NO: 307632 - RNA, 23 nt, Artificial Sequence
  Synthetic
ccauucuccuucuccugccucag

SEQ ID NO: 307633 - RNA, 24 nt, Artificial Sequence
  Synthetic
gccauucuccuucuccugccucag

SEQ ID NO: 307634 - RNA, 18 nt, Artificial Sequence
  Synthetic
gucuugauggugccucag

SEQ ID NO: 307635 - RNA, 19 nt, Artificial Sequence
  Synthetic
ugucuugauggugccucag

SEQ ID NO: 307636 - RNA, 20 nt, Artificial Sequence
  Synthetic
cugucuugauggugccucag

SEQ ID NO: 307637 - RNA, 21 nt, Artificial Sequence
  Synthetic
ucugucuugauggugccucag

SEQ ID NO: 307638 - RNA, 22 nt, Artificial Sequence
  Synthetic
aucugucuugauggugccucag

SEQ ID NO: 307639 - RNA, 23 nt, Artificial Sequence
  Synthetic
uaucugucuugauggugccucag

SEQ ID NO: 307640 - RNA, 24 nt, Artificial Sequence
  Synthetic
auaucugucuugauggugccucag

SEQ ID NO: 307641 - RNA, 18 nt, Artificial Sequence
  Synthetic
uaauucaugccuccucag

SEQ ID NO: 307642 - RNA, 19 nt, Artificial Sequence
  Synthetic
uuaauucaugccuccucag

SEQ ID NO: 307643 - RNA, 20 nt, Artificial Sequence
  Synthetic
cuuaauucaugccuccucag

SEQ ID NO: 307644 - RNA, 21 nt, Artificial Sequence
  Synthetic
ccuuaauucaugccuccucag

SEQ ID NO: 307645 - RNA, 22 nt, Artificial Sequence
  Synthetic
accuuaauucaugccuccucag

SEQ ID NO: 307646 - RNA, 23 nt, Artificial Sequence
  Synthetic
aaccuuaauucaugccuccucag

SEQ ID NO: 307647 - RNA, 24 nt, Artificial Sequence
  Synthetic
caaccuuaauucaugccuccucag

SEQ ID NO: 307648 - RNA, 18 nt, Artificial Sequence
  Synthetic
aauauuuuggcagcucag

SEQ ID NO: 307649 - RNA, 19 nt, Artificial Sequence
  Synthetic
gaauauuuuggcagcucag

SEQ ID NO: 307650 - RNA, 20 nt, Artificial Sequence
  Synthetic
agaauauuuuggcagcucag

SEQ ID NO: 307651 - RNA, 21 nt, Artificial Sequence
  Synthetic
gagaauauuuuggcagcucag

SEQ ID NO: 307652 - RNA, 22 nt, Artificial Sequence
  Synthetic
ggagaauauuuuggcagcucag

SEQ ID NO: 307653 - RNA, 23 nt, Artificial Sequence
  Synthetic
aggagaauauuuuggcagcucag

SEQ ID NO: 307654 - RNA, 24 nt, Artificial Sequence
  Synthetic
gaggagaauauuuuggcagcucag

SEQ ID NO: 307655 - RNA, 18 nt, Artificial Sequence
  Synthetic
aggggccaucuagcucag

SEQ ID NO: 307656 - RNA, 19 nt, Artificial Sequence
  Synthetic
aaggggccaucuagcucag

SEQ ID NO: 307657 - RNA, 20 nt, Artificial Sequence
  Synthetic
aaaggggccaucuagcucag

SEQ ID NO: 307658 - RNA, 21 nt, Artificial Sequence
  Synthetic
uaaaggggccaucuagcucag

SEQ ID NO: 307659 - RNA, 22 nt, Artificial Sequence
  Synthetic
uuaaaggggccaucuagcucag

SEQ ID NO: 307660 - RNA, 23 nt, Artificial Sequence
  Synthetic
auuaaaggggccaucuagcucag

SEQ ID NO: 307661 - RNA, 24 nt, Artificial Sequence
  Synthetic
cauuaaaggggccaucuagcucag

SEQ ID NO: 307662 - RNA, 18 nt, Artificial Sequence
  Synthetic
uggcugugagcugcucag

SEQ ID NO: 307663 - RNA, 19 nt, Artificial Sequence
  Synthetic
cuggcugugagcugcucag

SEQ ID NO: 307664 - RNA, 20 nt, Artificial Sequence
  Synthetic
gcuggcugugagcugcucag

SEQ ID NO: 307665 - RNA, 21 nt, Artificial Sequence
  Synthetic
ggcuggcugugagcugcucag

SEQ ID NO: 307666 - RNA, 22 nt, Artificial Sequence
  Synthetic
uggcuggcugugagcugcucag

SEQ ID NO: 307667 - RNA, 23 nt, Artificial Sequence
  Synthetic
cuggcuggcugugagcugcucag

SEQ ID NO: 307668 - RNA, 24 nt, Artificial Sequence
  Synthetic
gcuggcuggcugugagcugcucag

SEQ ID NO: 307669 - RNA, 18 nt, Artificial Sequence
  Synthetic
guuaagugacuugcucag

SEQ ID NO: 307670 - RNA, 19 nt, Artificial Sequence
  Synthetic
aguuaagugacuugcucag

SEQ ID NO: 307671 - RNA, 20 nt, Artificial Sequence
  Synthetic
caguuaagugacuugcucag

SEQ ID NO: 307672 - RNA, 21 nt, Artificial Sequence
  Synthetic
gcaguuaagugacuugcucag

SEQ ID NO: 307673 - RNA, 22 nt, Artificial Sequence
  Synthetic
agcaguuaagugacuugcucag

SEQ ID NO: 307674 - RNA, 23 nt, Artificial Sequence
  Synthetic
gagcaguuaagugacuugcucag

SEQ ID NO: 307675 - RNA, 24 nt, Artificial Sequence
  Synthetic
ugagcaguuaagugacuugcucag

SEQ ID NO: 307676 - RNA, 18 nt, Artificial Sequence
  Synthetic
cccauuaucuaaucucag

SEQ ID NO: 307677 - RNA, 19 nt, Artificial Sequence
  Synthetic
gcccauuaucuaaucucag

SEQ ID NO: 307678 - RNA, 20 nt, Artificial Sequence
  Synthetic
agcccauuaucuaaucucag

SEQ ID NO: 307679 - RNA, 21 nt, Artificial Sequence
  Synthetic
cagcccauuaucuaaucucag

SEQ ID NO: 307680 - RNA, 22 nt, Artificial Sequence
  Synthetic
acagcccauuaucuaaucucag

SEQ ID NO: 307681 - RNA, 23 nt, Artificial Sequence
  Synthetic
uacagcccauuaucuaaucucag

SEQ ID NO: 307682 - RNA, 24 nt, Artificial Sequence
  Synthetic
auacagcccauuaucuaaucucag

SEQ ID NO: 307683 - RNA, 18 nt, Artificial Sequence
  Synthetic
gugguggagucaucucag

SEQ ID NO: 307684 - RNA, 19 nt, Artificial Sequence
  Synthetic
ggugguggagucaucucag

SEQ ID NO: 307685 - RNA, 20 nt, Artificial Sequence
  Synthetic
gggugguggagucaucucag

SEQ ID NO: 307686 - RNA, 21 nt, Artificial Sequence
  Synthetic
agggugguggagucaucucag

SEQ ID NO: 307687 - RNA, 22 nt, Artificial Sequence
  Synthetic
gagggugguggagucaucucag

SEQ ID NO: 307688 - RNA, 23 nt, Artificial Sequence
  Synthetic
ggagggugguggagucaucucag

SEQ ID NO: 307689 - RNA, 24 nt, Artificial Sequence
  Synthetic
aggagggugguggagucaucucag

SEQ ID NO: 307690 - RNA, 18 nt, Artificial Sequence
  Synthetic
gcuggcuuugacucucag

SEQ ID NO: 307691 - RNA, 19 nt, Artificial Sequence
  Synthetic
ugcuggcuuugacucucag

SEQ ID NO: 307692 - RNA, 20 nt, Artificial Sequence
  Synthetic
augcuggcuuugacucucag

SEQ ID NO: 307693 - RNA, 21 nt, Artificial Sequence
  Synthetic
aaugcuggcuuugacucucag

SEQ ID NO: 307694 - RNA, 22 nt, Artificial Sequence
  Synthetic
uaaugcuggcuuugacucucag

SEQ ID NO: 307695 - RNA, 23 nt, Artificial Sequence
  Synthetic
uuaaugcuggcuuugacucucag

SEQ ID NO: 307696 - RNA, 24 nt, Artificial Sequence
  Synthetic
guuaaugcuggcuuugacucucag

SEQ ID NO: 307697 - RNA, 18 nt, Artificial Sequence
  Synthetic
aacaaaauauacucucag

SEQ ID NO: 307698 - RNA, 19 nt, Artificial Sequence
  Synthetic
caacaaaauauacucucag

SEQ ID NO: 307699 - RNA, 20 nt, Artificial Sequence
  Synthetic
acaacaaaauauacucucag

SEQ ID NO: 307700 - RNA, 21 nt, Artificial Sequence
  Synthetic
gacaacaaaauauacucucag

SEQ ID NO: 307701 - RNA, 22 nt, Artificial Sequence
  Synthetic
agacaacaaaauauacucucag

SEQ ID NO: 307702 - RNA, 23 nt, Artificial Sequence
  Synthetic
gagacaacaaaauauacucucag

SEQ ID NO: 307703 - RNA, 24 nt, Artificial Sequence
  Synthetic
ugagacaacaaaauauacucucag

SEQ ID NO: 307704 - RNA, 18 nt, Artificial Sequence
  Synthetic
cuuuuuugguacucucag

SEQ ID NO: 307705 - RNA, 19 nt, Artificial Sequence
  Synthetic
acuuuuuugguacucucag

SEQ ID NO: 307706 - RNA, 20 nt, Artificial Sequence
  Synthetic
aacuuuuuugguacucucag

SEQ ID NO: 307707 - RNA, 21 nt, Artificial Sequence
  Synthetic
gaacuuuuuugguacucucag

SEQ ID NO: 307708 - RNA, 22 nt, Artificial Sequence
  Synthetic
ugaacuuuuuugguacucucag

SEQ ID NO: 307709 - RNA, 23 nt, Artificial Sequence
  Synthetic
cugaacuuuuuugguacucucag

SEQ ID NO: 307710 - RNA, 24 nt, Artificial Sequence
  Synthetic
acugaacuuuuuugguacucucag

SEQ ID NO: 307711 - RNA, 18 nt, Artificial Sequence
  Synthetic
gaggucauaagcucucag

SEQ ID NO: 307712 - RNA, 19 nt, Artificial Sequence
  Synthetic
agaggucauaagcucucag

SEQ ID NO: 307713 - RNA, 20 nt, Artificial Sequence
  Synthetic
aagaggucauaagcucucag

SEQ ID NO: 307714 - RNA, 21 nt, Artificial Sequence
  Synthetic
aaagaggucauaagcucucag

SEQ ID NO: 307715 - RNA, 22 nt, Artificial Sequence
  Synthetic
gaaagaggucauaagcucucag

SEQ ID NO: 307716 - RNA, 23 nt, Artificial Sequence
  Synthetic
agaaagaggucauaagcucucag

SEQ ID NO: 307717 - RNA, 24 nt, Artificial Sequence
  Synthetic
gagaaagaggucauaagcucucag

SEQ ID NO: 307718 - RNA, 18 nt, Artificial Sequence
  Synthetic
acuucaaagagcucucag

SEQ ID NO: 307719 - RNA, 19 nt, Artificial Sequence
  Synthetic
uacuucaaagagcucucag

SEQ ID NO: 307720 - RNA, 20 nt, Artificial Sequence
  Synthetic
guacuucaaagagcucucag

SEQ ID NO: 307721 - RNA, 21 nt, Artificial Sequence
  Synthetic
uguacuucaaagagcucucag

SEQ ID NO: 307722 - RNA, 22 nt, Artificial Sequence
  Synthetic
cuguacuucaaagagcucucag

SEQ ID NO: 307723 - RNA, 23 nt, Artificial Sequence
  Synthetic
ccuguacuucaaagagcucucag

SEQ ID NO: 307724 - RNA, 24 nt, Artificial Sequence
  Synthetic
cccuguacuucaaagagcucucag

SEQ ID NO: 307725 - RNA, 18 nt, Artificial Sequence
  Synthetic
ucacuggaaggcucucag

SEQ ID NO: 307726 - RNA, 19 nt, Artificial Sequence
  Synthetic
aucacuggaaggcucucag

SEQ ID NO: 307727 - RNA, 20 nt, Artificial Sequence
  Synthetic
caucacuggaaggcucucag

SEQ ID NO: 307728 - RNA, 21 nt, Artificial Sequence
  Synthetic
acaucacuggaaggcucucag

SEQ ID NO: 307729 - RNA, 22 nt, Artificial Sequence
  Synthetic
aacaucacuggaaggcucucag

SEQ ID NO: 307730 - RNA, 23 nt, Artificial Sequence
  Synthetic
aaacaucacuggaaggcucucag

SEQ ID NO: 307731 - RNA, 24 nt, Artificial Sequence
  Synthetic
gaaacaucacuggaaggcucucag

SEQ ID NO: 307732 - RNA, 18 nt, Artificial Sequence
  Synthetic
uagagggucugcucucag

SEQ ID NO: 307733 - RNA, 19 nt, Artificial Sequence
  Synthetic
auagagggucugcucucag

SEQ ID NO: 307734 - RNA, 20 nt, Artificial Sequence
  Synthetic
uauagagggucugcucucag

SEQ ID NO: 307735 - RNA, 21 nt, Artificial Sequence
  Synthetic
uuauagagggucugcucucag

SEQ ID NO: 307736 - RNA, 22 nt, Artificial Sequence
  Synthetic
uuuauagagggucugcucucag

SEQ ID NO: 307737 - RNA, 23 nt, Artificial Sequence
  Synthetic
auuuauagagggucugcucucag

SEQ ID NO: 307738 - RNA, 24 nt, Artificial Sequence
  Synthetic
gauuuauagagggucugcucucag

SEQ ID NO: 307739 - RNA, 18 nt, Artificial Sequence
  Synthetic
ccugcugugaucucucag

SEQ ID NO: 307740 - RNA, 19 nt, Artificial Sequence
  Synthetic
cccugcugugaucucucag

SEQ ID NO: 307741 - RNA, 20 nt, Artificial Sequence
  Synthetic
acccugcugugaucucucag

SEQ ID NO: 307742 - RNA, 21 nt, Artificial Sequence
  Synthetic
gacccugcugugaucucucag

SEQ ID NO: 307743 - RNA, 22 nt, Artificial Sequence
  Synthetic
ugacccugcugugaucucucag

SEQ ID NO: 307744 - RNA, 23 nt, Artificial Sequence
  Synthetic
gugacccugcugugaucucucag

SEQ ID NO: 307745 - RNA, 24 nt, Artificial Sequence
  Synthetic
ggugacccugcugugaucucucag

SEQ ID NO: 307746 - RNA, 18 nt, Artificial Sequence
  Synthetic
agcaaaacuccgucucag

SEQ ID NO: 307747 - RNA, 19 nt, Artificial Sequence
  Synthetic
gagcaaaacuccgucucag

SEQ ID NO: 307748 - RNA, 20 nt, Artificial Sequence
  Synthetic
agagcaaaacuccgucucag

SEQ ID NO: 307749 - RNA, 21 nt, Artificial Sequence
  Synthetic
aagagcaaaacuccgucucag

SEQ ID NO: 307750 - RNA, 22 nt, Artificial Sequence
  Synthetic
caagagcaaaacuccgucucag

SEQ ID NO: 307751 - RNA, 23 nt, Artificial Sequence
  Synthetic
acaagagcaaaacuccgucucag

SEQ ID NO: 307752 - RNA, 24 nt, Artificial Sequence
  Synthetic
gacaagagcaaaacuccgucucag

SEQ ID NO: 307753 - RNA, 18 nt, Artificial Sequence
  Synthetic
aggcugagguggucucag

SEQ ID NO: 307754 - RNA, 19 nt, Artificial Sequence
  Synthetic
caggcugagguggucucag

SEQ ID NO: 307755 - RNA, 20 nt, Artificial Sequence
  Synthetic
ccaggcugagguggucucag

SEQ ID NO: 307756 - RNA, 21 nt, Artificial Sequence
  Synthetic
uccaggcugagguggucucag

SEQ ID NO: 307757 - RNA, 22 nt, Artificial Sequence
  Synthetic
guccaggcugagguggucucag

SEQ ID NO: 307758 - RNA, 23 nt, Artificial Sequence
  Synthetic
aguccaggcugagguggucucag

SEQ ID NO: 307759 - RNA, 24 nt, Artificial Sequence
  Synthetic
aaguccaggcugagguggucucag

SEQ ID NO: 307760 - RNA, 18 nt, Artificial Sequence
  Synthetic
cuucuuaauuauucucag

SEQ ID NO: 307761 - RNA, 19 nt, Artificial Sequence
  Synthetic
gcuucuuaauuauucucag

SEQ ID NO: 307762 - RNA, 20 nt, Artificial Sequence
  Synthetic
ggcuucuuaauuauucucag

SEQ ID NO: 307763 - RNA, 21 nt, Artificial Sequence
  Synthetic
aggcuucuuaauuauucucag

SEQ ID NO: 307764 - RNA, 22 nt, Artificial Sequence
  Synthetic
uaggcuucuuaauuauucucag

SEQ ID NO: 307765 - RNA, 23 nt, Artificial Sequence
  Synthetic
guaggcuucuuaauuauucucag

SEQ ID NO: 307766 - RNA, 24 nt, Artificial Sequence
  Synthetic
gguaggcuucuuaauuauucucag

SEQ ID NO: 307767 - RNA, 18 nt, Artificial Sequence
  Synthetic
aaauguacuuguucucag

SEQ ID NO: 307768 - RNA, 19 nt, Artificial Sequence
  Synthetic
caaauguacuuguucucag

SEQ ID NO: 307769 - RNA, 20 nt, Artificial Sequence
  Synthetic
ccaaauguacuuguucucag

SEQ ID NO: 307770 - RNA, 21 nt, Artificial Sequence
  Synthetic
uccaaauguacuuguucucag

SEQ ID NO: 307771 - RNA, 22 nt, Artificial Sequence
  Synthetic
uuccaaauguacuuguucucag

SEQ ID NO: 307772 - RNA, 23 nt, Artificial Sequence
  Synthetic
uuuccaaauguacuuguucucag

SEQ ID NO: 307773 - RNA, 24 nt, Artificial Sequence
  Synthetic
uuuuccaaauguacuuguucucag

SEQ ID NO: 307774 - RNA, 18 nt, Artificial Sequence
  Synthetic
gacagagguuacagucag

SEQ ID NO: 307775 - RNA, 19 nt, Artificial Sequence
  Synthetic
agacagagguuacagucag

SEQ ID NO: 307776 - RNA, 20 nt, Artificial Sequence
  Synthetic
gagacagagguuacagucag

SEQ ID NO: 307777 - RNA, 21 nt, Artificial Sequence
  Synthetic
ggagacagagguuacagucag

SEQ ID NO: 307778 - RNA, 22 nt, Artificial Sequence
  Synthetic
gggagacagagguuacagucag

SEQ ID NO: 307779 - RNA, 23 nt, Artificial Sequence
  Synthetic
ugggagacagagguuacagucag

SEQ ID NO: 307780 - RNA, 24 nt, Artificial Sequence
  Synthetic
cugggagacagagguuacagucag

SEQ ID NO: 307781 - RNA, 18 nt, Artificial Sequence
  Synthetic
uacaaauguacgagucag

SEQ ID NO: 307782 - RNA, 19 nt, Artificial Sequence
  Synthetic
uuacaaauguacgagucag

SEQ ID NO: 307783 - RNA, 20 nt, Artificial Sequence
  Synthetic
auuacaaauguacgagucag

SEQ ID NO: 307784 - RNA, 21 nt, Artificial Sequence
  Synthetic
uauuacaaauguacgagucag

SEQ ID NO: 307785 - RNA, 22 nt, Artificial Sequence
  Synthetic
guauuacaaauguacgagucag

SEQ ID NO: 307786 - RNA, 23 nt, Artificial Sequence
  Synthetic
cguauuacaaauguacgagucag

SEQ ID NO: 307787 - RNA, 24 nt, Artificial Sequence
  Synthetic
acguauuacaaauguacgagucag

SEQ ID NO: 307788 - RNA, 18 nt, Artificial Sequence
  Synthetic
acugagcauaugagucag

SEQ ID NO: 307789 - RNA, 19 nt, Artificial Sequence
  Synthetic
aacugagcauaugagucag

SEQ ID NO: 307790 - RNA, 20 nt, Artificial Sequence
  Synthetic
uaacugagcauaugagucag

SEQ ID NO: 307791 - RNA, 21 nt, Artificial Sequence
  Synthetic
guaacugagcauaugagucag

SEQ ID NO: 307792 - RNA, 22 nt, Artificial Sequence
  Synthetic
gguaacugagcauaugagucag

SEQ ID NO: 307793 - RNA, 23 nt, Artificial Sequence
  Synthetic
agguaacugagcauaugagucag

SEQ ID NO: 307794 - RNA, 24 nt, Artificial Sequence
  Synthetic
gagguaacugagcauaugagucag

SEQ ID NO: 307795 - RNA, 18 nt, Artificial Sequence
  Synthetic
ucaaaccaucguagucag

SEQ ID NO: 307796 - RNA, 19 nt, Artificial Sequence
  Synthetic
gucaaaccaucguagucag

SEQ ID NO: 307797 - RNA, 20 nt, Artificial Sequence
  Synthetic
agucaaaccaucguagucag

SEQ ID NO: 307798 - RNA, 21 nt, Artificial Sequence
  Synthetic
aagucaaaccaucguagucag

SEQ ID NO: 307799 - RNA, 22 nt, Artificial Sequence
  Synthetic
uaagucaaaccaucguagucag

SEQ ID NO: 307800 - RNA, 23 nt, Artificial Sequence
  Synthetic
guaagucaaaccaucguagucag

SEQ ID NO: 307801 - RNA, 24 nt, Artificial Sequence
  Synthetic
uguaagucaaaccaucguagucag

SEQ ID NO: 307802 - RNA, 18 nt, Artificial Sequence
  Synthetic
guuaaaaacuuuagucag

SEQ ID NO: 307803 - RNA, 19 nt, Artificial Sequence
  Synthetic
gguuaaaaacuuuagucag

SEQ ID NO: 307804 - RNA, 20 nt, Artificial Sequence
  Synthetic
ggguuaaaaacuuuagucag

SEQ ID NO: 307805 - RNA, 21 nt, Artificial Sequence
  Synthetic
gggguuaaaaacuuuagucag

SEQ ID NO: 307806 - RNA, 22 nt, Artificial Sequence
  Synthetic
agggguuaaaaacuuuagucag

SEQ ID NO: 307807 - RNA, 23 nt, Artificial Sequence
  Synthetic
aagggguuaaaaacuuuagucag

SEQ ID NO: 307808 - RNA, 24 nt, Artificial Sequence
  Synthetic
aaagggguuaaaaacuuuagucag

SEQ ID NO: 307809 - RNA, 18 nt, Artificial Sequence
  Synthetic
aaaagacuagaucgucag

SEQ ID NO: 307810 - RNA, 19 nt, Artificial Sequence
  Synthetic
caaaagacuagaucgucag

SEQ ID NO: 307811 - RNA, 20 nt, Artificial Sequence
  Synthetic
ucaaaagacuagaucgucag

SEQ ID NO: 307812 - RNA, 21 nt, Artificial Sequence
  Synthetic
uucaaaagacuagaucgucag

SEQ ID NO: 307813 - RNA, 22 nt, Artificial Sequence
  Synthetic
cuucaaaagacuagaucgucag

SEQ ID NO: 307814 - RNA, 23 nt, Artificial Sequence
  Synthetic
ucuucaaaagacuagaucgucag

SEQ ID NO: 307815 - RNA, 24 nt, Artificial Sequence
  Synthetic
uucuucaaaagacuagaucgucag

SEQ ID NO: 307816 - RNA, 18 nt, Artificial Sequence
  Synthetic
uucuaaccuacucgucag

SEQ ID NO: 307817 - RNA, 19 nt, Artificial Sequence
  Synthetic
guucuaaccuacucgucag

SEQ ID NO: 307818 - RNA, 20 nt, Artificial Sequence
  Synthetic
uguucuaaccuacucgucag

SEQ ID NO: 307819 - RNA, 21 nt, Artificial Sequence
  Synthetic
auguucuaaccuacucgucag

SEQ ID NO: 307820 - RNA, 22 nt, Artificial Sequence
  Synthetic
aauguucuaaccuacucgucag

SEQ ID NO: 307821 - RNA, 23 nt, Artificial Sequence
  Synthetic
gaauguucuaaccuacucgucag

SEQ ID NO: 307822 - RNA, 24 nt, Artificial Sequence
  Synthetic
cgaauguucuaaccuacucgucag

SEQ ID NO: 307823 - RNA, 18 nt, Artificial Sequence
  Synthetic
aaugucagucaaggucag

SEQ ID NO: 307824 - RNA, 19 nt, Artificial Sequence
  Synthetic
caaugucagucaaggucag

SEQ ID NO: 307825 - RNA, 20 nt, Artificial Sequence
  Synthetic
ucaaugucagucaaggucag

SEQ ID NO: 307826 - RNA, 21 nt, Artificial Sequence
  Synthetic
cucaaugucagucaaggucag

SEQ ID NO: 307827 - RNA, 22 nt, Artificial Sequence
  Synthetic
ccucaaugucagucaaggucag

SEQ ID NO: 307828 - RNA, 23 nt, Artificial Sequence
  Synthetic
cccucaaugucagucaaggucag

SEQ ID NO: 307829 - RNA, 24 nt, Artificial Sequence
  Synthetic
ccccucaaugucagucaaggucag

SEQ ID NO: 307830 - RNA, 18 nt, Artificial Sequence
  Synthetic
guagacacauggggucag

SEQ ID NO: 307831 - RNA, 19 nt, Artificial Sequence
  Synthetic
gguagacacauggggucag

SEQ ID NO: 307832 - RNA, 20 nt, Artificial Sequence
  Synthetic
ugguagacacauggggucag

SEQ ID NO: 307833 - RNA, 21 nt, Artificial Sequence
  Synthetic
augguagacacauggggucag

SEQ ID NO: 307834 - RNA, 22 nt, Artificial Sequence
  Synthetic
uaugguagacacauggggucag

SEQ ID NO: 307835 - RNA, 23 nt, Artificial Sequence
  Synthetic
cuaugguagacacauggggucag

SEQ ID NO: 307836 - RNA, 24 nt, Artificial Sequence
  Synthetic
ucuaugguagacacauggggucag

SEQ ID NO: 307837 - RNA, 18 nt, Artificial Sequence
  Synthetic
acuagaggagugggucag

SEQ ID NO: 307838 - RNA, 19 nt, Artificial Sequence
  Synthetic
gacuagaggagugggucag

SEQ ID NO: 307839 - RNA, 20 nt, Artificial Sequence
  Synthetic
agacuagaggagugggucag

SEQ ID NO: 307840 - RNA, 21 nt, Artificial Sequence
  Synthetic
gagacuagaggagugggucag

SEQ ID NO: 307841 - RNA, 22 nt, Artificial Sequence
  Synthetic
ugagacuagaggagugggucag

SEQ ID NO: 307842 - RNA, 23 nt, Artificial Sequence
  Synthetic
gugagacuagaggagugggucag

SEQ ID NO: 307843 - RNA, 24 nt, Artificial Sequence
  Synthetic
agugagacuagaggagugggucag

SEQ ID NO: 307844 - RNA, 18 nt, Artificial Sequence
  Synthetic
gaacaguucgauggucag

SEQ ID NO: 307845 - RNA, 19 nt, Artificial Sequence
  Synthetic
agaacaguucgauggucag

SEQ ID NO: 307846 - RNA, 20 nt, Artificial Sequence
  Synthetic
uagaacaguucgauggucag

SEQ ID NO: 307847 - RNA, 21 nt, Artificial Sequence
  Synthetic
uuagaacaguucgauggucag

SEQ ID NO: 307848 - RNA, 22 nt, Artificial Sequence
  Synthetic
auuagaacaguucgauggucag

SEQ ID NO: 307849 - RNA, 23 nt, Artificial Sequence
  Synthetic
cauuagaacaguucgauggucag

SEQ ID NO: 307850 - RNA, 24 nt, Artificial Sequence
  Synthetic
acauuagaacaguucgauggucag

SEQ ID NO: 307851 - RNA, 18 nt, Artificial Sequence
  Synthetic
uugcauguguauggucag

SEQ ID NO: 307852 - RNA, 19 nt, Artificial Sequence
  Synthetic
uuugcauguguauggucag

SEQ ID NO: 307853 - RNA, 20 nt, Artificial Sequence
  Synthetic
uuuugcauguguauggucag

SEQ ID NO: 307854 - RNA, 21 nt, Artificial Sequence
  Synthetic
uuuuugcauguguauggucag

SEQ ID NO: 307855 - RNA, 22 nt, Artificial Sequence
  Synthetic
uuuuuugcauguguauggucag

SEQ ID NO: 307856 - RNA, 23 nt, Artificial Sequence
  Synthetic
uuuuuuugcauguguauggucag

SEQ ID NO: 307857 - RNA, 24 nt, Artificial Sequence
  Synthetic
uuuuuuuugcauguguauggucag

SEQ ID NO: 307858 - RNA, 18 nt, Artificial Sequence
  Synthetic
agggggaugacuggucag

SEQ ID NO: 307859 - RNA, 19 nt, Artificial Sequence
  Synthetic
uagggggaugacuggucag

SEQ ID NO: 307860 - RNA, 20 nt, Artificial Sequence
  Synthetic
guagggggaugacuggucag

SEQ ID NO: 307861 - RNA, 21 nt, Artificial Sequence
  Synthetic
gguagggggaugacuggucag

SEQ ID NO: 307862 - RNA, 22 nt, Artificial Sequence
  Synthetic
agguagggggaugacuggucag

SEQ ID NO: 307863 - RNA, 23 nt, Artificial Sequence
  Synthetic
gagguagggggaugacuggucag

SEQ ID NO: 307864 - RNA, 24 nt, Artificial Sequence
  Synthetic
agagguagggggaugacuggucag

SEQ ID NO: 307865 - RNA, 18 nt, Artificial Sequence
  Synthetic
cagaguacacaaugucag

SEQ ID NO: 307866 - RNA, 19 nt, Artificial Sequence
  Synthetic
gcagaguacacaaugucag

SEQ ID NO: 307867 - RNA, 20 nt, Artificial Sequence
  Synthetic
ggcagaguacacaaugucag

SEQ ID NO: 307868 - RNA, 21 nt, Artificial Sequence
  Synthetic
uggcagaguacacaaugucag

SEQ ID NO: 307869 - RNA, 22 nt, Artificial Sequence
  Synthetic
auggcagaguacacaaugucag

SEQ ID NO: 307870 - RNA, 23 nt, Artificial Sequence
  Synthetic
aauggcagaguacacaaugucag

SEQ ID NO: 307871 - RNA, 24 nt, Artificial Sequence
  Synthetic
uaauggcagaguacacaaugucag

SEQ ID NO: 307872 - RNA, 18 nt, Artificial Sequence
  Synthetic
cauaaaaauagaugucag

SEQ ID NO: 307873 - RNA, 19 nt, Artificial Sequence
  Synthetic
acauaaaaauagaugucag

SEQ ID NO: 307874 - RNA, 20 nt, Artificial Sequence
  Synthetic
uacauaaaaauagaugucag

SEQ ID NO: 307875 - RNA, 21 nt, Artificial Sequence
  Synthetic
cuacauaaaaauagaugucag

SEQ ID NO: 307876 - RNA, 22 nt, Artificial Sequence
  Synthetic
ucuacauaaaaauagaugucag

SEQ ID NO: 307877 - RNA, 23 nt, Artificial Sequence
  Synthetic
gucuacauaaaaauagaugucag

SEQ ID NO: 307878 - RNA, 24 nt, Artificial Sequence
  Synthetic
cgucuacauaaaaauagaugucag

SEQ ID NO: 307879 - RNA, 18 nt, Artificial Sequence
  Synthetic
gcaacagagcgaugucag

SEQ ID NO: 307880 - RNA, 19 nt, Artificial Sequence
  Synthetic
ugcaacagagcgaugucag

SEQ ID NO: 307881 - RNA, 20 nt, Artificial Sequence
  Synthetic
uugcaacagagcgaugucag

SEQ ID NO: 307882 - RNA, 21 nt, Artificial Sequence
  Synthetic
auugcaacagagcgaugucag

SEQ ID NO: 307883 - RNA, 22 nt, Artificial Sequence
  Synthetic
uauugcaacagagcgaugucag

SEQ ID NO: 307884 - RNA, 23 nt, Artificial Sequence
  Synthetic
guauugcaacagagcgaugucag

SEQ ID NO: 307885 - RNA, 24 nt, Artificial Sequence
  Synthetic
aguauugcaacagagcgaugucag

SEQ ID NO: 307886 - RNA, 18 nt, Artificial Sequence
  Synthetic
ugcaacccaauaugucag

SEQ ID NO: 307887 - RNA, 19 nt, Artificial Sequence
  Synthetic
cugcaacccaauaugucag

SEQ ID NO: 307888 - RNA, 20 nt, Artificial Sequence
  Synthetic
gcugcaacccaauaugucag

SEQ ID NO: 307889 - RNA, 21 nt, Artificial Sequence
  Synthetic
ugcugcaacccaauaugucag

SEQ ID NO: 307890 - RNA, 22 nt, Artificial Sequence
  Synthetic
augcugcaacccaauaugucag

SEQ ID NO: 307891 - RNA, 23 nt, Artificial Sequence
  Synthetic
caugcugcaacccaauaugucag

SEQ ID NO: 307892 - RNA, 24 nt, Artificial Sequence
  Synthetic
ucaugcugcaacccaauaugucag

SEQ ID NO: 307893 - RNA, 18 nt, Artificial Sequence
  Synthetic
aacugaaacaagugucag

SEQ ID NO: 307894 - RNA, 19 nt, Artificial Sequence
  Synthetic
aaacugaaacaagugucag

SEQ ID NO: 307895 - RNA, 20 nt, Artificial Sequence
  Synthetic
uaaacugaaacaagugucag

SEQ ID NO: 307896 - RNA, 21 nt, Artificial Sequence
  Synthetic
uuaaacugaaacaagugucag

SEQ ID NO: 307897 - RNA, 22 nt, Artificial Sequence
  Synthetic
cuuaaacugaaacaagugucag

SEQ ID NO: 307898 - RNA, 23 nt, Artificial Sequence
  Synthetic
ucuuaaacugaaacaagugucag

SEQ ID NO: 307899 - RNA, 24 nt, Artificial Sequence
  Synthetic
uucuuaaacugaaacaagugucag

SEQ ID NO: 307900 - RNA, 18 nt, Artificial Sequence
  Synthetic
auuucugucucgugucag

SEQ ID NO: 307901 - RNA, 19 nt, Artificial Sequence
  Synthetic
uauuucugucucgugucag

SEQ ID NO: 307902 - RNA, 20 nt, Artificial Sequence
  Synthetic
uuauuucugucucgugucag

SEQ ID NO: 307903 - RNA, 21 nt, Artificial Sequence
  Synthetic
guuauuucugucucgugucag

SEQ ID NO: 307904 - RNA, 22 nt, Artificial Sequence
  Synthetic
uguuauuucugucucgugucag

SEQ ID NO: 307905 - RNA, 23 nt, Artificial Sequence
  Synthetic
auguuauuucugucucgugucag

SEQ ID NO: 307906 - RNA, 24 nt, Artificial Sequence
  Synthetic
gauguuauuucugucucgugucag

SEQ ID NO: 307907 - RNA, 18 nt, Artificial Sequence
  Synthetic
uagaaagcauggugucag

SEQ ID NO: 307908 - RNA, 19 nt, Artificial Sequence
  Synthetic
guagaaagcauggugucag

SEQ ID NO: 307909 - RNA, 20 nt, Artificial Sequence
  Synthetic
gguagaaagcauggugucag

SEQ ID NO: 307910 - RNA, 21 nt, Artificial Sequence
  Synthetic
ugguagaaagcauggugucag

SEQ ID NO: 307911 - RNA, 22 nt, Artificial Sequence
  Synthetic
gugguagaaagcauggugucag

SEQ ID NO: 307912 - RNA, 23 nt, Artificial Sequence
  Synthetic
ugugguagaaagcauggugucag

SEQ ID NO: 307913 - RNA, 24 nt, Artificial Sequence
  Synthetic
cugugguagaaagcauggugucag

SEQ ID NO: 307914 - RNA, 18 nt, Artificial Sequence
  Synthetic
aaaaauguuuugugucag

SEQ ID NO: 307915 - RNA, 19 nt, Artificial Sequence
  Synthetic
gaaaaauguuuugugucag

SEQ ID NO: 307916 - RNA, 20 nt, Artificial Sequence
  Synthetic
agaaaaauguuuugugucag

SEQ ID NO: 307917 - RNA, 21 nt, Artificial Sequence
  Synthetic
aagaaaaauguuuugugucag

SEQ ID NO: 307918 - RNA, 22 nt, Artificial Sequence
  Synthetic
caagaaaaauguuuugugucag

SEQ ID NO: 307919 - RNA, 23 nt, Artificial Sequence
  Synthetic
ccaagaaaaauguuuugugucag

SEQ ID NO: 307920 - RNA, 24 nt, Artificial Sequence
  Synthetic
accaagaaaaauguuuugugucag

SEQ ID NO: 307921 - RNA, 18 nt, Artificial Sequence
  Synthetic
uaacaacauuauugucag

SEQ ID NO: 307922 - RNA, 19 nt, Artificial Sequence
  Synthetic
uuaacaacauuauugucag

SEQ ID NO: 307923 - RNA, 20 nt, Artificial Sequence
  Synthetic
cuuaacaacauuauugucag

SEQ ID NO: 307924 - RNA, 21 nt, Artificial Sequence
  Synthetic
acuuaacaacauuauugucag

SEQ ID NO: 307925 - RNA, 22 nt, Artificial Sequence
  Synthetic
aacuuaacaacauuauugucag

SEQ ID NO: 307926 - RNA, 23 nt, Artificial Sequence
  Synthetic
gaacuuaacaacauuauugucag

SEQ ID NO: 307927 - RNA, 24 nt, Artificial Sequence
  Synthetic
agaacuuaacaacauuauugucag

SEQ ID NO: 307928 - RNA, 18 nt, Artificial Sequence
  Synthetic
caucaaauuacuugucag

SEQ ID NO: 307929 - RNA, 19 nt, Artificial Sequence
  Synthetic
gcaucaaauuacuugucag

SEQ ID NO: 307930 - RNA, 20 nt, Artificial Sequence
  Synthetic
ggcaucaaauuacuugucag

SEQ ID NO: 307931 - RNA, 21 nt, Artificial Sequence
  Synthetic
aggcaucaaauuacuugucag

SEQ ID NO: 307932 - RNA, 22 nt, Artificial Sequence
  Synthetic
uaggcaucaaauuacuugucag

SEQ ID NO: 307933 - RNA, 23 nt, Artificial Sequence
  Synthetic
cuaggcaucaaauuacuugucag

SEQ ID NO: 307934 - RNA, 24 nt, Artificial Sequence
  Synthetic
ccuaggcaucaaauuacuugucag

SEQ ID NO: 307935 - RNA, 18 nt, Artificial Sequence
  Synthetic
gucaagguaguuugucag

SEQ ID NO: 307936 - RNA, 19 nt, Artificial Sequence
  Synthetic
ugucaagguaguuugucag

SEQ ID NO: 307937 - RNA, 20 nt, Artificial Sequence
  Synthetic
uugucaagguaguuugucag

SEQ ID NO: 307938 - RNA, 21 nt, Artificial Sequence
  Synthetic
uuugucaagguaguuugucag

SEQ ID NO: 307939 - RNA, 22 nt, Artificial Sequence
  Synthetic
auuugucaagguaguuugucag

SEQ ID NO: 307940 - RNA, 23 nt, Artificial Sequence
  Synthetic
aauuugucaagguaguuugucag

SEQ ID NO: 307941 - RNA, 24 nt, Artificial Sequence
  Synthetic
aaauuugucaagguaguuugucag

SEQ ID NO: 307942 - RNA, 18 nt, Artificial Sequence
  Synthetic
caccauaaaucaauucag

SEQ ID NO: 307943 - RNA, 19 nt, Artificial Sequence
  Synthetic
gcaccauaaaucaauucag

SEQ ID NO: 307944 - RNA, 20 nt, Artificial Sequence
  Synthetic
agcaccauaaaucaauucag

SEQ ID NO: 307945 - RNA, 21 nt, Artificial Sequence
  Synthetic
aagcaccauaaaucaauucag

SEQ ID NO: 307946 - RNA, 22 nt, Artificial Sequence
  Synthetic
aaagcaccauaaaucaauucag

SEQ ID NO: 307947 - RNA, 23 nt, Artificial Sequence
  Synthetic
gaaagcaccauaaaucaauucag

SEQ ID NO: 307948 - RNA, 24 nt, Artificial Sequence
  Synthetic
agaaagcaccauaaaucaauucag

SEQ ID NO: 307949 - RNA, 18 nt, Artificial Sequence
  Synthetic
uaaaaugauuccauucag

SEQ ID NO: 307950 - RNA, 19 nt, Artificial Sequence
  Synthetic
auaaaaugauuccauucag

SEQ ID NO: 307951 - RNA, 20 nt, Artificial Sequence
  Synthetic
aauaaaaugauuccauucag

SEQ ID NO: 307952 - RNA, 21 nt, Artificial Sequence
  Synthetic
caauaaaaugauuccauucag

SEQ ID NO: 307953 - RNA, 22 nt, Artificial Sequence
  Synthetic
acaauaaaaugauuccauucag

SEQ ID NO: 307954 - RNA, 23 nt, Artificial Sequence
  Synthetic
gacaauaaaaugauuccauucag

SEQ ID NO: 307955 - RNA, 24 nt, Artificial Sequence
  Synthetic
ugacaauaaaaugauuccauucag

SEQ ID NO: 307956 - RNA, 18 nt, Artificial Sequence
  Synthetic
uacuugcuuugcauucag

SEQ ID NO: 307957 - RNA, 19 nt, Artificial Sequence
  Synthetic
cuacuugcuuugcauucag

SEQ ID NO: 307958 - RNA, 20 nt, Artificial Sequence
  Synthetic
gcuacuugcuuugcauucag

SEQ ID NO: 307959 - RNA, 21 nt, Artificial Sequence
  Synthetic
agcuacuugcuuugcauucag

SEQ ID NO: 307960 - RNA, 22 nt, Artificial Sequence
  Synthetic
gagcuacuugcuuugcauucag

SEQ ID NO: 307961 - RNA, 23 nt, Artificial Sequence
  Synthetic
cgagcuacuugcuuugcauucag

SEQ ID NO: 307962 - RNA, 24 nt, Artificial Sequence
  Synthetic
gcgagcuacuugcuuugcauucag

SEQ ID NO: 307963 - RNA, 18 nt, Artificial Sequence
  Synthetic
aaucagccuuucauucag

SEQ ID NO: 307964 - RNA, 19 nt, Artificial Sequence
  Synthetic
uaaucagccuuucauucag

SEQ ID NO: 307965 - RNA, 20 nt, Artificial Sequence
  Synthetic
guaaucagccuuucauucag

SEQ ID NO: 307966 - RNA, 21 nt, Artificial Sequence
  Synthetic
aguaaucagccuuucauucag

SEQ ID NO: 307967 - RNA, 22 nt, Artificial Sequence
  Synthetic
aaguaaucagccuuucauucag

SEQ ID NO: 307968 - RNA, 23 nt, Artificial Sequence
  Synthetic
uaaguaaucagccuuucauucag

SEQ ID NO: 307969 - RNA, 24 nt, Artificial Sequence
  Synthetic
uuaaguaaucagccuuucauucag

SEQ ID NO: 307970 - RNA, 18 nt, Artificial Sequence
  Synthetic
auucucucauagauucag

SEQ ID NO: 307971 - RNA, 19 nt, Artificial Sequence
  Synthetic
aauucucucauagauucag

SEQ ID NO: 307972 - RNA, 20 nt, Artificial Sequence
  Synthetic
gaauucucucauagauucag

SEQ ID NO: 307973 - RNA, 21 nt, Artificial Sequence
  Synthetic
agaauucucucauagauucag

SEQ ID NO: 307974 - RNA, 22 nt, Artificial Sequence
  Synthetic
cagaauucucucauagauucag

SEQ ID NO: 307975 - RNA, 23 nt, Artificial Sequence
  Synthetic
acagaauucucucauagauucag

SEQ ID NO: 307976 - RNA, 24 nt, Artificial Sequence
  Synthetic
aacagaauucucucauagauucag

SEQ ID NO: 307977 - RNA, 18 nt, Artificial Sequence
  Synthetic
aaauaccuauagauucag

SEQ ID NO: 307978 - RNA, 19 nt, Artificial Sequence
  Synthetic
aaaauaccuauagauucag

SEQ ID NO: 307979 - RNA, 20 nt, Artificial Sequence
  Synthetic
uaaaauaccuauagauucag

SEQ ID NO: 307980 - RNA, 21 nt, Artificial Sequence
  Synthetic
guaaaauaccuauagauucag

SEQ ID NO: 307981 - RNA, 22 nt, Artificial Sequence
  Synthetic
aguaaaauaccuauagauucag

SEQ ID NO: 307982 - RNA, 23 nt, Artificial Sequence
  Synthetic
aaguaaaauaccuauagauucag

SEQ ID NO: 307983 - RNA, 24 nt, Artificial Sequence
  Synthetic
gaaguaaaauaccuauagauucag

SEQ ID NO: 307984 - RNA, 18 nt, Artificial Sequence
  Synthetic
acagagucucugauucag

SEQ ID NO: 307985 - RNA, 19 nt, Artificial Sequence
  Synthetic
cacagagucucugauucag

SEQ ID NO: 307986 - RNA, 20 nt, Artificial Sequence
  Synthetic
ccacagagucucugauucag

SEQ ID NO: 307987 - RNA, 21 nt, Artificial Sequence
  Synthetic
cccacagagucucugauucag

SEQ ID NO: 307988 - RNA, 22 nt, Artificial Sequence
  Synthetic
acccacagagucucugauucag

SEQ ID NO: 307989 - RNA, 23 nt, Artificial Sequence
  Synthetic
uacccacagagucucugauucag

SEQ ID NO: 307990 - RNA, 24 nt, Artificial Sequence
  Synthetic
uuacccacagagucucugauucag

SEQ ID NO: 307991 - RNA, 18 nt, Artificial Sequence
  Synthetic
ugaaaauguaauauucag

SEQ ID NO: 307992 - RNA, 19 nt, Artificial Sequence
  Synthetic
uugaaaauguaauauucag

SEQ ID NO: 307993 - RNA, 20 nt, Artificial Sequence
  Synthetic
auugaaaauguaauauucag

SEQ ID NO: 307994 - RNA, 21 nt, Artificial Sequence
  Synthetic
uauugaaaauguaauauucag

SEQ ID NO: 307995 - RNA, 22 nt, Artificial Sequence
  Synthetic
auauugaaaauguaauauucag

SEQ ID NO: 307996 - RNA, 23 nt, Artificial Sequence
  Synthetic
uauauugaaaauguaauauucag

SEQ ID NO: 307997 - RNA, 24 nt, Artificial Sequence
  Synthetic
auauauugaaaauguaauauucag

SEQ ID NO: 307998 - RNA, 18 nt, Artificial Sequence
  Synthetic
aacaauccuuauauucag

SEQ ID NO: 307999 - RNA, 19 nt, Artificial Sequence
  Synthetic
uaacaauccuuauauucag

SEQ ID NO: 308000 - RNA, 20 nt, Artificial Sequence
  Synthetic
auaacaauccuuauauucag

SEQ ID NO: 308001 - RNA, 21 nt, Artificial Sequence
  Synthetic
uauaacaauccuuauauucag

SEQ ID NO: 308002 - RNA, 22 nt, Artificial Sequence
  Synthetic
guauaacaauccuuauauucag

SEQ ID NO: 308003 - RNA, 23 nt, Artificial Sequence
  Synthetic
uguauaacaauccuuauauucag

SEQ ID NO: 308004 - RNA, 24 nt, Artificial Sequence
  Synthetic
auguauaacaauccuuauauucag

SEQ ID NO: 308005 - RNA, 18 nt, Artificial Sequence
  Synthetic
auuuuauggacuauucag

SEQ ID NO: 308006 - RNA, 19 nt, Artificial Sequence
  Synthetic
gauuuuauggacuauucag

SEQ ID NO: 308007 - RNA, 20 nt, Artificial Sequence
  Synthetic
agauuuuauggacuauucag

SEQ ID NO: 308008 - RNA, 21 nt, Artificial Sequence
  Synthetic
gagauuuuauggacuauucag

SEQ ID NO: 308009 - RNA, 22 nt, Artificial Sequence
  Synthetic
ggagauuuuauggacuauucag

SEQ ID NO: 308010 - RNA, 23 nt, Artificial Sequence
  Synthetic
gggagauuuuauggacuauucag

SEQ ID NO: 308011 - RNA, 24 nt, Artificial Sequence
  Synthetic
ggggagauuuuauggacuauucag

SEQ ID NO: 308012 - RNA, 18 nt, Artificial Sequence
  Synthetic
ggacaugugacuauucag

SEQ ID NO: 308013 - RNA, 19 nt, Artificial Sequence
  Synthetic
gggacaugugacuauucag

SEQ ID NO: 308014 - RNA, 20 nt, Artificial Sequence
  Synthetic
agggacaugugacuauucag

SEQ ID NO: 308015 - RNA, 21 nt, Artificial Sequence
  Synthetic
cagggacaugugacuauucag

SEQ ID NO: 308016 - RNA, 22 nt, Artificial Sequence
  Synthetic
ucagggacaugugacuauucag

SEQ ID NO: 308017 - RNA, 23 nt, Artificial Sequence
  Synthetic
uucagggacaugugacuauucag

SEQ ID NO: 308018 - RNA, 24 nt, Artificial Sequence
  Synthetic
uuucagggacaugugacuauucag

SEQ ID NO: 308019 - RNA, 18 nt, Artificial Sequence
  Synthetic
ucauaccuuacuauucag

SEQ ID NO: 308020 - RNA, 19 nt, Artificial Sequence
  Synthetic
uucauaccuuacuauucag

SEQ ID NO: 308021 - RNA, 20 nt, Artificial Sequence
  Synthetic
auucauaccuuacuauucag

SEQ ID NO: 308022 - RNA, 21 nt, Artificial Sequence
  Synthetic
uauucauaccuuacuauucag

SEQ ID NO: 308023 - RNA, 22 nt, Artificial Sequence
  Synthetic
auauucauaccuuacuauucag

SEQ ID NO: 308024 - RNA, 23 nt, Artificial Sequence
  Synthetic
gauauucauaccuuacuauucag

SEQ ID NO: 308025 - RNA, 24 nt, Artificial Sequence
  Synthetic
agauauucauaccuuacuauucag

SEQ ID NO: 308026 - RNA, 18 nt, Artificial Sequence
  Synthetic
uuuaggaagaguauucag

SEQ ID NO: 308027 - RNA, 19 nt, Artificial Sequence
  Synthetic
guuuaggaagaguauucag

SEQ ID NO: 308028 - RNA, 20 nt, Artificial Sequence
  Synthetic
uguuuaggaagaguauucag

SEQ ID NO: 308029 - RNA, 21 nt, Artificial Sequence
  Synthetic
auguuuaggaagaguauucag

SEQ ID NO: 308030 - RNA, 22 nt, Artificial Sequence
  Synthetic
cauguuuaggaagaguauucag

SEQ ID NO: 308031 - RNA, 23 nt, Artificial Sequence
  Synthetic
acauguuuaggaagaguauucag

SEQ ID NO: 308032 - RNA, 24 nt, Artificial Sequence
  Synthetic
uacauguuuaggaagaguauucag

SEQ ID NO: 308033 - RNA, 18 nt, Artificial Sequence
  Synthetic
uuacaaaacuuuauucag

SEQ ID NO: 308034 - RNA, 19 nt, Artificial Sequence
  Synthetic
uuuacaaaacuuuauucag

SEQ ID NO: 308035 - RNA, 20 nt, Artificial Sequence
  Synthetic
guuuacaaaacuuuauucag

SEQ ID NO: 308036 - RNA, 21 nt, Artificial Sequence
  Synthetic
uguuuacaaaacuuuauucag

SEQ ID NO: 308037 - RNA, 22 nt, Artificial Sequence
  Synthetic
auguuuacaaaacuuuauucag

SEQ ID NO: 308038 - RNA, 23 nt, Artificial Sequence
  Synthetic
uauguuuacaaaacuuuauucag

SEQ ID NO: 308039 - RNA, 24 nt, Artificial Sequence
  Synthetic
auauguuuacaaaacuuuauucag

SEQ ID NO: 308040 - RNA, 18 nt, Artificial Sequence
  Synthetic
guugcagcaacacuucag

SEQ ID NO: 308041 - RNA, 19 nt, Artificial Sequence
  Synthetic
uguugcagcaacacuucag

SEQ ID NO: 308042 - RNA, 20 nt, Artificial Sequence
  Synthetic
cuguugcagcaacacuucag

SEQ ID NO: 308043 - RNA, 21 nt, Artificial Sequence
  Synthetic
acuguugcagcaacacuucag

SEQ ID NO: 308044 - RNA, 22 nt, Artificial Sequence
  Synthetic
cacuguugcagcaacacuucag

SEQ ID NO: 308045 - RNA, 23 nt, Artificial Sequence
  Synthetic
acacuguugcagcaacacuucag

SEQ ID NO: 308046 - RNA, 24 nt, Artificial Sequence
  Synthetic
cacacuguugcagcaacacuucag

SEQ ID NO: 308047 - RNA, 18 nt, Artificial Sequence
  Synthetic
aaaaauuauucacuucag

SEQ ID NO: 308048 - RNA, 19 nt, Artificial Sequence
  Synthetic
aaaaaauuauucacuucag

SEQ ID NO: 308049 - RNA, 20 nt, Artificial Sequence
  Synthetic
uaaaaaauuauucacuucag

SEQ ID NO: 308050 - RNA, 21 nt, Artificial Sequence
  Synthetic
uuaaaaaauuauucacuucag

SEQ ID NO: 308051 - RNA, 22 nt, Artificial Sequence
  Synthetic
auuaaaaaauuauucacuucag

SEQ ID NO: 308052 - RNA, 23 nt, Artificial Sequence
  Synthetic
aauuaaaaaauuauucacuucag

SEQ ID NO: 308053 - RNA, 24 nt, Artificial Sequence
  Synthetic
uaauuaaaaaauuauucacuucag

SEQ ID NO: 308054 - RNA, 18 nt, Artificial Sequence
  Synthetic
gaggguccaagacuucag

SEQ ID NO: 308055 - RNA, 19 nt, Artificial Sequence
  Synthetic
ugaggguccaagacuucag

SEQ ID NO: 308056 - RNA, 20 nt, Artificial Sequence
  Synthetic
uugaggguccaagacuucag

SEQ ID NO: 308057 - RNA, 21 nt, Artificial Sequence
  Synthetic
uuugaggguccaagacuucag

SEQ ID NO: 308058 - RNA, 22 nt, Artificial Sequence
  Synthetic
cuuugaggguccaagacuucag

SEQ ID NO: 308059 - RNA, 23 nt, Artificial Sequence
  Synthetic
acuuugaggguccaagacuucag

SEQ ID NO: 308060 - RNA, 24 nt, Artificial Sequence
  Synthetic
gacuuugaggguccaagacuucag

SEQ ID NO: 308061 - RNA, 18 nt, Artificial Sequence
  Synthetic
gagguugcacgacuucag

SEQ ID NO: 308062 - RNA, 19 nt, Artificial Sequence
  Synthetic
agagguugcacgacuucag

SEQ ID NO: 308063 - RNA, 20 nt, Artificial Sequence
  Synthetic
aagagguugcacgacuucag

SEQ ID NO: 308064 - RNA, 21 nt, Artificial Sequence
  Synthetic
gaagagguugcacgacuucag

SEQ ID NO: 308065 - RNA, 22 nt, Artificial Sequence
  Synthetic
ggaagagguugcacgacuucag

SEQ ID NO: 308066 - RNA, 23 nt, Artificial Sequence
  Synthetic
uggaagagguugcacgacuucag

SEQ ID NO: 308067 - RNA, 24 nt, Artificial Sequence
  Synthetic
uuggaagagguugcacgacuucag

SEQ ID NO: 308068 - RNA, 18 nt, Artificial Sequence
  Synthetic
aauccggcuggacuucag

SEQ ID NO: 308069 - RNA, 19 nt, Artificial Sequence
  Synthetic
gaauccggcuggacuucag

SEQ ID NO: 308070 - RNA, 20 nt, Artificial Sequence
  Synthetic
agaauccggcuggacuucag

SEQ ID NO: 308071 - RNA, 21 nt, Artificial Sequence
  Synthetic
aagaauccggcuggacuucag

SEQ ID NO: 308072 - RNA, 22 nt, Artificial Sequence
  Synthetic
gaagaauccggcuggacuucag

SEQ ID NO: 308073 - RNA, 23 nt, Artificial Sequence
  Synthetic
agaagaauccggcuggacuucag

SEQ ID NO: 308074 - RNA, 24 nt, Artificial Sequence
  Synthetic
gagaagaauccggcuggacuucag

SEQ ID NO: 308075 - RNA, 18 nt, Artificial Sequence
  Synthetic
uuuccaaaaugacuucag

SEQ ID NO: 308076 - RNA, 19 nt, Artificial Sequence
  Synthetic
auuuccaaaaugacuucag

SEQ ID NO: 308077 - RNA, 20 nt, Artificial Sequence
  Synthetic
aauuuccaaaaugacuucag

SEQ ID NO: 308078 - RNA, 21 nt, Artificial Sequence
  Synthetic
uaauuuccaaaaugacuucag

SEQ ID NO: 308079 - RNA, 22 nt, Artificial Sequence
  Synthetic
auaauuuccaaaaugacuucag

SEQ ID NO: 308080 - RNA, 23 nt, Artificial Sequence
  Synthetic
cauaauuuccaaaaugacuucag

SEQ ID NO: 308081 - RNA, 24 nt, Artificial Sequence
  Synthetic
acauaauuuccaaaaugacuucag

SEQ ID NO: 308082 - RNA, 18 nt, Artificial Sequence
  Synthetic
cucuuucugugacuucag

SEQ ID NO: 308083 - RNA, 19 nt, Artificial Sequence
  Synthetic
ccucuuucugugacuucag

SEQ ID NO: 308084 - RNA, 20 nt, Artificial Sequence
  Synthetic
accucuuucugugacuucag

SEQ ID NO: 308085 - RNA, 21 nt, Artificial Sequence
  Synthetic
aaccucuuucugugacuucag

SEQ ID NO: 308086 - RNA, 22 nt, Artificial Sequence
  Synthetic
gaaccucuuucugugacuucag

SEQ ID NO: 308087 - RNA, 23 nt, Artificial Sequence
  Synthetic
cgaaccucuuucugugacuucag

SEQ ID NO: 308088 - RNA, 24 nt, Artificial Sequence
  Synthetic
ccgaaccucuuucugugacuucag

SEQ ID NO: 308089 - RNA, 18 nt, Artificial Sequence
  Synthetic
gaagcagcuugacuucag

SEQ ID NO: 308090 - RNA, 19 nt, Artificial Sequence
  Synthetic
agaagcagcuugacuucag

SEQ ID NO: 308091 - RNA, 20 nt, Artificial Sequence
  Synthetic
gagaagcagcuugacuucag

SEQ ID NO: 308092 - RNA, 21 nt, Artificial Sequence
  Synthetic
agagaagcagcuugacuucag

SEQ ID NO: 308093 - RNA, 22 nt, Artificial Sequence
  Synthetic
gagagaagcagcuugacuucag

SEQ ID NO: 308094 - RNA, 23 nt, Artificial Sequence
  Synthetic
agagagaagcagcuugacuucag

SEQ ID NO: 308095 - RNA, 24 nt, Artificial Sequence
  Synthetic
cagagagaagcagcuugacuucag

SEQ ID NO: 308096 - RNA, 18 nt, Artificial Sequence
  Synthetic
aaguauaauauacuucag

SEQ ID NO: 308097 - RNA, 19 nt, Artificial Sequence
  Synthetic
gaaguauaauauacuucag

SEQ ID NO: 308098 - RNA, 20 nt, Artificial Sequence
  Synthetic
ugaaguauaauauacuucag

SEQ ID NO: 308099 - RNA, 21 nt, Artificial Sequence
  Synthetic
cugaaguauaauauacuucag

SEQ ID NO: 308100 - RNA, 22 nt, Artificial Sequence
  Synthetic
acugaaguauaauauacuucag

SEQ ID NO: 308101 - RNA, 23 nt, Artificial Sequence
  Synthetic
uacugaaguauaauauacuucag

SEQ ID NO: 308102 - RNA, 24 nt, Artificial Sequence
  Synthetic
uuacugaaguauaauauacuucag

SEQ ID NO: 308103 - RNA, 18 nt, Artificial Sequence
  Synthetic
agacagccucuccuucag

SEQ ID NO: 308104 - RNA, 19 nt, Artificial Sequence
  Synthetic
cagacagccucuccuucag

SEQ ID NO: 308105 - RNA, 20 nt, Artificial Sequence
  Synthetic
ucagacagccucuccuucag

SEQ ID NO: 308106 - RNA, 21 nt, Artificial Sequence
  Synthetic
cucagacagccucuccuucag

SEQ ID NO: 308107 - RNA, 22 nt, Artificial Sequence
  Synthetic
acucagacagccucuccuucag

SEQ ID NO: 308108 - RNA, 23 nt, Artificial Sequence
  Synthetic
uacucagacagccucuccuucag

SEQ ID NO: 308109 - RNA, 24 nt, Artificial Sequence
  Synthetic
cuacucagacagccucuccuucag

SEQ ID NO: 308110 - RNA, 18 nt, Artificial Sequence
  Synthetic
uguaagacauagcuucag

SEQ ID NO: 308111 - RNA, 19 nt, Artificial Sequence
  Synthetic
guguaagacauagcuucag

SEQ ID NO: 308112 - RNA, 20 nt, Artificial Sequence
  Synthetic
aguguaagacauagcuucag

SEQ ID NO: 308113 - RNA, 21 nt, Artificial Sequence
  Synthetic
gaguguaagacauagcuucag

SEQ ID NO: 308114 - RNA, 22 nt, Artificial Sequence
  Synthetic
ggaguguaagacauagcuucag

SEQ ID NO: 308115 - RNA, 23 nt, Artificial Sequence
  Synthetic
aggaguguaagacauagcuucag

SEQ ID NO: 308116 - RNA, 24 nt, Artificial Sequence
  Synthetic
aaggaguguaagacauagcuucag

SEQ ID NO: 308117 - RNA, 18 nt, Artificial Sequence
  Synthetic
ucucaugaccugcuucag

SEQ ID NO: 308118 - RNA, 19 nt, Artificial Sequence
  Synthetic
gucucaugaccugcuucag

SEQ ID NO: 308119 - RNA, 20 nt, Artificial Sequence
  Synthetic
agucucaugaccugcuucag

SEQ ID NO: 308120 - RNA, 21 nt, Artificial Sequence
  Synthetic
uagucucaugaccugcuucag

SEQ ID NO: 308121 - RNA, 22 nt, Artificial Sequence
  Synthetic
auagucucaugaccugcuucag

SEQ ID NO: 308122 - RNA, 23 nt, Artificial Sequence
  Synthetic
gauagucucaugaccugcuucag

SEQ ID NO: 308123 - RNA, 24 nt, Artificial Sequence
  Synthetic
ugauagucucaugaccugcuucag

SEQ ID NO: 308124 - RNA, 18 nt, Artificial Sequence
  Synthetic
cuguugauucugcuucag

SEQ ID NO: 308125 - RNA, 19 nt, Artificial Sequence
  Synthetic
acuguugauucugcuucag

SEQ ID NO: 308126 - RNA, 20 nt, Artificial Sequence
  Synthetic
cacuguugauucugcuucag

SEQ ID NO: 308127 - RNA, 21 nt, Artificial Sequence
  Synthetic
ccacuguugauucugcuucag

SEQ ID NO: 308128 - RNA, 22 nt, Artificial Sequence
  Synthetic
uccacuguugauucugcuucag

SEQ ID NO: 308129 - RNA, 23 nt, Artificial Sequence
  Synthetic
uuccacuguugauucugcuucag

SEQ ID NO: 308130 - RNA, 24 nt, Artificial Sequence
  Synthetic
uuuccacuguugauucugcuucag

SEQ ID NO: 308131 - RNA, 18 nt, Artificial Sequence
  Synthetic
uuaggauaggugcuucag

SEQ ID NO: 308132 - RNA, 19 nt, Artificial Sequence
  Synthetic
uuuaggauaggugcuucag

SEQ ID NO: 308133 - RNA, 20 nt, Artificial Sequence
  Synthetic
guuuaggauaggugcuucag

SEQ ID NO: 308134 - RNA, 21 nt, Artificial Sequence
  Synthetic
aguuuaggauaggugcuucag

SEQ ID NO: 308135 - RNA, 22 nt, Artificial Sequence
  Synthetic
caguuuaggauaggugcuucag

SEQ ID NO: 308136 - RNA, 23 nt, Artificial Sequence
  Synthetic
gcaguuuaggauaggugcuucag

SEQ ID NO: 308137 - RNA, 24 nt, Artificial Sequence
  Synthetic
ggcaguuuaggauaggugcuucag

SEQ ID NO: 308138 - RNA, 18 nt, Artificial Sequence
  Synthetic
ugucuuucggcucuucag

SEQ ID NO: 308139 - RNA, 19 nt, Artificial Sequence
  Synthetic
gugucuuucggcucuucag

SEQ ID NO: 308140 - RNA, 20 nt, Artificial Sequence
  Synthetic
ugugucuuucggcucuucag

SEQ ID NO: 308141 - RNA, 21 nt, Artificial Sequence
  Synthetic
augugucuuucggcucuucag

SEQ ID NO: 308142 - RNA, 22 nt, Artificial Sequence
  Synthetic
aaugugucuuucggcucuucag

SEQ ID NO: 308143 - RNA, 23 nt, Artificial Sequence
  Synthetic
aaaugugucuuucggcucuucag

SEQ ID NO: 308144 - RNA, 24 nt, Artificial Sequence
  Synthetic
aaaaugugucuuucggcucuucag

SEQ ID NO: 308145 - RNA, 18 nt, Artificial Sequence
  Synthetic
aucagcaguagucuucag

SEQ ID NO: 308146 - RNA, 19 nt, Artificial Sequence
  Synthetic
aaucagcaguagucuucag

SEQ ID NO: 308147 - RNA, 20 nt, Artificial Sequence
  Synthetic
uaaucagcaguagucuucag

SEQ ID NO: 308148 - RNA, 21 nt, Artificial Sequence
  Synthetic
cuaaucagcaguagucuucag

SEQ ID NO: 308149 - RNA, 22 nt, Artificial Sequence
  Synthetic
ucuaaucagcaguagucuucag

SEQ ID NO: 308150 - RNA, 23 nt, Artificial Sequence
  Synthetic
aucuaaucagcaguagucuucag

SEQ ID NO: 308151 - RNA, 24 nt, Artificial Sequence
  Synthetic
caucuaaucagcaguagucuucag

SEQ ID NO: 308152 - RNA, 18 nt, Artificial Sequence
  Synthetic
acccaaaugugucuucag

SEQ ID NO: 308153 - RNA, 19 nt, Artificial Sequence
  Synthetic
cacccaaaugugucuucag

SEQ ID NO: 308154 - RNA, 20 nt, Artificial Sequence
  Synthetic
ucacccaaaugugucuucag

SEQ ID NO: 308155 - RNA, 21 nt, Artificial Sequence
  Synthetic
cucacccaaaugugucuucag

SEQ ID NO: 308156 - RNA, 22 nt, Artificial Sequence
  Synthetic
ucucacccaaaugugucuucag

SEQ ID NO: 308157 - RNA, 23 nt, Artificial Sequence
  Synthetic
gucucacccaaaugugucuucag

SEQ ID NO: 308158 - RNA, 24 nt, Artificial Sequence
  Synthetic
agucucacccaaaugugucuucag

SEQ ID NO: 308159 - RNA, 18 nt, Artificial Sequence
  Synthetic
uccucuaagcuucuucag

SEQ ID NO: 308160 - RNA, 19 nt, Artificial Sequence
  Synthetic
guccucuaagcuucuucag

SEQ ID NO: 308161 - RNA, 20 nt, Artificial Sequence
  Synthetic
uguccucuaagcuucuucag

SEQ ID NO: 308162 - RNA, 21 nt, Artificial Sequence
  Synthetic
uuguccucuaagcuucuucag

SEQ ID NO: 308163 - RNA, 22 nt, Artificial Sequence
  Synthetic
auuguccucuaagcuucuucag

SEQ ID NO: 308164 - RNA, 23 nt, Artificial Sequence
  Synthetic
gauuguccucuaagcuucuucag

SEQ ID NO: 308165 - RNA, 24 nt, Artificial Sequence
  Synthetic
agauuguccucuaagcuucuucag

SEQ ID NO: 308166 - RNA, 18 nt, Artificial Sequence
  Synthetic
aauucuaacuuucuucag

SEQ ID NO: 308167 - RNA, 19 nt, Artificial Sequence
  Synthetic
aaauucuaacuuucuucag

SEQ ID NO: 308168 - RNA, 20 nt, Artificial Sequence
  Synthetic
aaaauucuaacuuucuucag

SEQ ID NO: 308169 - RNA, 21 nt, Artificial Sequence
  Synthetic
uaaaauucuaacuuucuucag

SEQ ID NO: 308170 - RNA, 22 nt, Artificial Sequence
  Synthetic
uuaaaauucuaacuuucuucag

SEQ ID NO: 308171 - RNA, 23 nt, Artificial Sequence
  Synthetic
uuuaaaauucuaacuuucuucag

SEQ ID NO: 308172 - RNA, 24 nt, Artificial Sequence
  Synthetic
auuuaaaauucuaacuuucuucag

SEQ ID NO: 308173 - RNA, 18 nt, Artificial Sequence
  Synthetic
aaagcacccuuucuucag

SEQ ID NO: 308174 - RNA, 19 nt, Artificial Sequence
  Synthetic
caaagcacccuuucuucag

SEQ ID NO: 308175 - RNA, 20 nt, Artificial Sequence
  Synthetic
ucaaagcacccuuucuucag

SEQ ID NO: 308176 - RNA, 21 nt, Artificial Sequence
  Synthetic
uucaaagcacccuuucuucag

SEQ ID NO: 308177 - RNA, 22 nt, Artificial Sequence
  Synthetic
auucaaagcacccuuucuucag

SEQ ID NO: 308178 - RNA, 23 nt, Artificial Sequence
  Synthetic
aauucaaagcacccuuucuucag

SEQ ID NO: 308179 - RNA, 24 nt, Artificial Sequence
  Synthetic
aaauucaaagcacccuuucuucag

SEQ ID NO: 308180 - RNA, 18 nt, Artificial Sequence
  Synthetic
ccuaauacuuuaguucag

SEQ ID NO: 308181 - RNA, 19 nt, Artificial Sequence
  Synthetic
uccuaauacuuuaguucag

SEQ ID NO: 308182 - RNA, 20 nt, Artificial Sequence
  Synthetic
uuccuaauacuuuaguucag

SEQ ID NO: 308183 - RNA, 21 nt, Artificial Sequence
  Synthetic
cuuccuaauacuuuaguucag

SEQ ID NO: 308184 - RNA, 22 nt, Artificial Sequence
  Synthetic
ccuuccuaauacuuuaguucag

SEQ ID NO: 308185 - RNA, 23 nt, Artificial Sequence
  Synthetic
accuuccuaauacuuuaguucag

SEQ ID NO: 308186 - RNA, 24 nt, Artificial Sequence
  Synthetic
uaccuuccuaauacuuuaguucag

SEQ ID NO: 308187 - RNA, 18 nt, Artificial Sequence
  Synthetic
auugugaucaggguucag

SEQ ID NO: 308188 - RNA, 19 nt, Artificial Sequence
  Synthetic
aauugugaucaggguucag

SEQ ID NO: 308189 - RNA, 20 nt, Artificial Sequence
  Synthetic
aaauugugaucaggguucag

SEQ ID NO: 308190 - RNA, 21 nt, Artificial Sequence
  Synthetic
caaauugugaucaggguucag

SEQ ID NO: 308191 - RNA, 22 nt, Artificial Sequence
  Synthetic
gcaaauugugaucaggguucag

SEQ ID NO: 308192 - RNA, 23 nt, Artificial Sequence
  Synthetic
ugcaaauugugaucaggguucag

SEQ ID NO: 308193 - RNA, 24 nt, Artificial Sequence
  Synthetic
uugcaaauugugaucaggguucag

SEQ ID NO: 308194 - RNA, 18 nt, Artificial Sequence
  Synthetic
gaguauuuuaggguucag

SEQ ID NO: 308195 - RNA, 19 nt, Artificial Sequence
  Synthetic
ggaguauuuuaggguucag

SEQ ID NO: 308196 - RNA, 20 nt, Artificial Sequence
  Synthetic
uggaguauuuuaggguucag

SEQ ID NO: 308197 - RNA, 21 nt, Artificial Sequence
  Synthetic
auggaguauuuuaggguucag

SEQ ID NO: 308198 - RNA, 22 nt, Artificial Sequence
  Synthetic
uauggaguauuuuaggguucag

SEQ ID NO: 308199 - RNA, 23 nt, Artificial Sequence
  Synthetic
cuauggaguauuuuaggguucag

SEQ ID NO: 308200 - RNA, 24 nt, Artificial Sequence
  Synthetic
acuauggaguauuuuaggguucag

SEQ ID NO: 308201 - RNA, 18 nt, Artificial Sequence
  Synthetic
aagaggcuggcuguucag

SEQ ID NO: 308202 - RNA, 19 nt, Artificial Sequence
  Synthetic
aaagaggcuggcuguucag

SEQ ID NO: 308203 - RNA, 20 nt, Artificial Sequence
  Synthetic
caaagaggcuggcuguucag

SEQ ID NO: 308204 - RNA, 21 nt, Artificial Sequence
  Synthetic
ucaaagaggcuggcuguucag

SEQ ID NO: 308205 - RNA, 22 nt, Artificial Sequence
  Synthetic
aucaaagaggcuggcuguucag

SEQ ID NO: 308206 - RNA, 23 nt, Artificial Sequence
  Synthetic
uaucaaagaggcuggcuguucag

SEQ ID NO: 308207 - RNA, 24 nt, Artificial Sequence
  Synthetic
uuaucaaagaggcuggcuguucag

SEQ ID NO: 308208 - RNA, 18 nt, Artificial Sequence
  Synthetic
uugaggcucuguguucag

SEQ ID NO: 308209 - RNA, 19 nt, Artificial Sequence
  Synthetic
cuugaggcucuguguucag

SEQ ID NO: 308210 - RNA, 20 nt, Artificial Sequence
  Synthetic
ccuugaggcucuguguucag

SEQ ID NO: 308211 - RNA, 21 nt, Artificial Sequence
  Synthetic
cccuugaggcucuguguucag

SEQ ID NO: 308212 - RNA, 22 nt, Artificial Sequence
  Synthetic
ccccuugaggcucuguguucag

SEQ ID NO: 308213 - RNA, 23 nt, Artificial Sequence
  Synthetic
accccuugaggcucuguguucag

SEQ ID NO: 308214 - RNA, 24 nt, Artificial Sequence
  Synthetic
caccccuugaggcucuguguucag

SEQ ID NO: 308215 - RNA, 18 nt, Artificial Sequence
  Synthetic
gcaaguaugccauuucag

SEQ ID NO: 308216 - RNA, 19 nt, Artificial Sequence
  Synthetic
agcaaguaugccauuucag

SEQ ID NO: 308217 - RNA, 20 nt, Artificial Sequence
  Synthetic
cagcaaguaugccauuucag

SEQ ID NO: 308218 - RNA, 21 nt, Artificial Sequence
  Synthetic
ccagcaaguaugccauuucag

SEQ ID NO: 308219 - RNA, 22 nt, Artificial Sequence
  Synthetic
cccagcaaguaugccauuucag

SEQ ID NO: 308220 - RNA, 23 nt, Artificial Sequence
  Synthetic
gcccagcaaguaugccauuucag

SEQ ID NO: 308221 - RNA, 24 nt, Artificial Sequence
  Synthetic
agcccagcaaguaugccauuucag

SEQ ID NO: 308222 - RNA, 18 nt, Artificial Sequence
  Synthetic
aucagggcuggauuucag

SEQ ID NO: 308223 - RNA, 19 nt, Artificial Sequence
  Synthetic
uaucagggcuggauuucag

SEQ ID NO: 308224 - RNA, 20 nt, Artificial Sequence
  Synthetic
cuaucagggcuggauuucag

SEQ ID NO: 308225 - RNA, 21 nt, Artificial Sequence
  Synthetic
ccuaucagggcuggauuucag

SEQ ID NO: 308226 - RNA, 22 nt, Artificial Sequence
  Synthetic
accuaucagggcuggauuucag

SEQ ID NO: 308227 - RNA, 23 nt, Artificial Sequence
  Synthetic
aaccuaucagggcuggauuucag

SEQ ID NO: 308228 - RNA, 24 nt, Artificial Sequence
  Synthetic
aaaccuaucagggcuggauuucag

SEQ ID NO: 308229 - RNA, 18 nt, Artificial Sequence
  Synthetic
gcaacuggugacuuucag

SEQ ID NO: 308230 - RNA, 19 nt, Artificial Sequence
  Synthetic
ugcaacuggugacuuucag

SEQ ID NO: 308231 - RNA, 20 nt, Artificial Sequence
  Synthetic
augcaacuggugacuuucag

SEQ ID NO: 308232 - RNA, 21 nt, Artificial Sequence
  Synthetic
aaugcaacuggugacuuucag

SEQ ID NO: 308233 - RNA, 22 nt, Artificial Sequence
  Synthetic
uaaugcaacuggugacuuucag

SEQ ID NO: 308234 - RNA, 23 nt, Artificial Sequence
  Synthetic
cuaaugcaacuggugacuuucag

SEQ ID NO: 308235 - RNA, 24 nt, Artificial Sequence
  Synthetic
gcuaaugcaacuggugacuuucag

SEQ ID NO: 308236 - RNA, 18 nt, Artificial Sequence
  Synthetic
agaaaaauaagcuuucag

SEQ ID NO: 308237 - RNA, 19 nt, Artificial Sequence
  Synthetic
aagaaaaauaagcuuucag

SEQ ID NO: 308238 - RNA, 20 nt, Artificial Sequence
  Synthetic
aaagaaaaauaagcuuucag

SEQ ID NO: 308239 - RNA, 21 nt, Artificial Sequence
  Synthetic
uaaagaaaaauaagcuuucag

SEQ ID NO: 308240 - RNA, 22 nt, Artificial Sequence
  Synthetic
auaaagaaaaauaagcuuucag

SEQ ID NO: 308241 - RNA, 23 nt, Artificial Sequence
  Synthetic
aauaaagaaaaauaagcuuucag

SEQ ID NO: 308242 - RNA, 24 nt, Artificial Sequence
  Synthetic
aaauaaagaaaaauaagcuuucag

SEQ ID NO: 308243 - RNA, 18 nt, Artificial Sequence
  Synthetic
aucagcuaucaguuucag

SEQ ID NO: 308244 - RNA, 19 nt, Artificial Sequence
  Synthetic
aaucagcuaucaguuucag

SEQ ID NO: 308245 - RNA, 20 nt, Artificial Sequence
  Synthetic
uaaucagcuaucaguuucag

SEQ ID NO: 308246 - RNA, 21 nt, Artificial Sequence
  Synthetic
guaaucagcuaucaguuucag

SEQ ID NO: 308247 - RNA, 22 nt, Artificial Sequence
  Synthetic
uguaaucagcuaucaguuucag

SEQ ID NO: 308248 - RNA, 23 nt, Artificial Sequence
  Synthetic
cuguaaucagcuaucaguuucag

SEQ ID NO: 308249 - RNA, 24 nt, Artificial Sequence
  Synthetic
acuguaaucagcuaucaguuucag

SEQ ID NO: 308250 - RNA, 18 nt, Artificial Sequence
  Synthetic
ugauuggaauaguuucag

SEQ ID NO: 308251 - RNA, 19 nt, Artificial Sequence
  Synthetic
uugauuggaauaguuucag

SEQ ID NO: 308252 - RNA, 20 nt, Artificial Sequence
  Synthetic
auugauuggaauaguuucag

SEQ ID NO: 308253 - RNA, 21 nt, Artificial Sequence
  Synthetic
uauugauuggaauaguuucag

SEQ ID NO: 308254 - RNA, 22 nt, Artificial Sequence
  Synthetic
cuauugauuggaauaguuucag

SEQ ID NO: 308255 - RNA, 23 nt, Artificial Sequence
  Synthetic
ucuauugauuggaauaguuucag

SEQ ID NO: 308256 - RNA, 24 nt, Artificial Sequence
  Synthetic
uucuauugauuggaauaguuucag

SEQ ID NO: 308257 - RNA, 18 nt, Artificial Sequence
  Synthetic
cuccccuacagguuucag

SEQ ID NO: 308258 - RNA, 19 nt, Artificial Sequence
  Synthetic
ucuccccuacagguuucag

SEQ ID NO: 308259 - RNA, 20 nt, Artificial Sequence
  Synthetic
uucuccccuacagguuucag

SEQ ID NO: 308260 - RNA, 21 nt, Artificial Sequence
  Synthetic
auucuccccuacagguuucag

SEQ ID NO: 308261 - RNA, 22 nt, Artificial Sequence
  Synthetic
aauucuccccuacagguuucag

SEQ ID NO: 308262 - RNA, 23 nt, Artificial Sequence
  Synthetic
aaauucuccccuacagguuucag

SEQ ID NO: 308263 - RNA, 24 nt, Artificial Sequence
  Synthetic
aaaauucuccccuacagguuucag

SEQ ID NO: 308264 - RNA, 18 nt, Artificial Sequence
  Synthetic
uauaauuuacuguuucag

SEQ ID NO: 308265 - RNA, 19 nt, Artificial Sequence
  Synthetic
auauaauuuacuguuucag

SEQ ID NO: 308266 - RNA, 20 nt, Artificial Sequence
  Synthetic
uauauaauuuacuguuucag

SEQ ID NO: 308267 - RNA, 21 nt, Artificial Sequence
  Synthetic
uuauauaauuuacuguuucag

SEQ ID NO: 308268 - RNA, 22 nt, Artificial Sequence
  Synthetic
uuuauauaauuuacuguuucag

SEQ ID NO: 308269 - RNA, 23 nt, Artificial Sequence
  Synthetic
guuuauauaauuuacuguuucag

SEQ ID NO: 308270 - RNA, 24 nt, Artificial Sequence
  Synthetic
gguuuauauaauuuacuguuucag

SEQ ID NO: 308271 - RNA, 18 nt, Artificial Sequence
  Synthetic
acaaagaaacauuuucag

SEQ ID NO: 308272 - RNA, 19 nt, Artificial Sequence
  Synthetic
uacaaagaaacauuuucag

SEQ ID NO: 308273 - RNA, 20 nt, Artificial Sequence
  Synthetic
auacaaagaaacauuuucag

SEQ ID NO: 308274 - RNA, 21 nt, Artificial Sequence
  Synthetic
aauacaaagaaacauuuucag

SEQ ID NO: 308275 - RNA, 22 nt, Artificial Sequence
  Synthetic
aaauacaaagaaacauuuucag

SEQ ID NO: 308276 - RNA, 23 nt, Artificial Sequence
  Synthetic
caaauacaaagaaacauuuucag

SEQ ID NO: 308277 - RNA, 24 nt, Artificial Sequence
  Synthetic
acaaauacaaagaaacauuuucag

SEQ ID NO: 308278 - RNA, 18 nt, Artificial Sequence
  Synthetic
uacugaagucauuuucag

SEQ ID NO: 308279 - RNA, 19 nt, Artificial Sequence
  Synthetic
auacugaagucauuuucag

SEQ ID NO: 308280 - RNA, 20 nt, Artificial Sequence
  Synthetic
aauacugaagucauuuucag

SEQ ID NO: 308281 - RNA, 21 nt, Artificial Sequence
  Synthetic
aaauacugaagucauuuucag

SEQ ID NO: 308282 - RNA, 22 nt, Artificial Sequence
  Synthetic
gaaauacugaagucauuuucag

SEQ ID NO: 308283 - RNA, 23 nt, Artificial Sequence
  Synthetic
cgaaauacugaagucauuuucag

SEQ ID NO: 308284 - RNA, 24 nt, Artificial Sequence
  Synthetic
ucgaaauacugaagucauuuucag

SEQ ID NO: 308285 - RNA, 18 nt, Artificial Sequence
  Synthetic
augccaaaguauuuucag

SEQ ID NO: 308286 - RNA, 19 nt, Artificial Sequence
  Synthetic
caugccaaaguauuuucag

SEQ ID NO: 308287 - RNA, 20 nt, Artificial Sequence
  Synthetic
acaugccaaaguauuuucag

SEQ ID NO: 308288 - RNA, 21 nt, Artificial Sequence
  Synthetic
uacaugccaaaguauuuucag

SEQ ID NO: 308289 - RNA, 22 nt, Artificial Sequence
  Synthetic
auacaugccaaaguauuuucag

SEQ ID NO: 308290 - RNA, 23 nt, Artificial Sequence
  Synthetic
gauacaugccaaaguauuuucag

SEQ ID NO: 308291 - RNA, 24 nt, Artificial Sequence
  Synthetic
agauacaugccaaaguauuuucag

SEQ ID NO: 308292 - RNA, 18 nt, Artificial Sequence
  Synthetic
uaauuuuuguguuuucag

SEQ ID NO: 308293 - RNA, 19 nt, Artificial Sequence
  Synthetic
cuaauuuuuguguuuucag

SEQ ID NO: 308294 - RNA, 20 nt, Artificial Sequence
  Synthetic
gcuaauuuuuguguuuucag

SEQ ID NO: 308295 - RNA, 21 nt, Artificial Sequence
  Synthetic
ggcuaauuuuuguguuuucag

SEQ ID NO: 308296 - RNA, 22 nt, Artificial Sequence
  Synthetic
uggcuaauuuuuguguuuucag

SEQ ID NO: 308297 - RNA, 23 nt, Artificial Sequence
  Synthetic
cuggcuaauuuuuguguuuucag

SEQ ID NO: 308298 - RNA, 24 nt, Artificial Sequence
  Synthetic
ccuggcuaauuuuuguguuuucag

SEQ ID NO: 308299 - RNA, 18 nt, Artificial Sequence
  Synthetic
cugaguaacaaaaaagag

SEQ ID NO: 308300 - RNA, 19 nt, Artificial Sequence
  Synthetic
acugaguaacaaaaaagag

SEQ ID NO: 308301 - RNA, 20 nt, Artificial Sequence
  Synthetic
aacugaguaacaaaaaagag

SEQ ID NO: 308302 - RNA, 21 nt, Artificial Sequence
  Synthetic
aaacugaguaacaaaaaagag

SEQ ID NO: 308303 - RNA, 22 nt, Artificial Sequence
  Synthetic
aaaacugaguaacaaaaaagag

SEQ ID NO: 308304 - RNA, 23 nt, Artificial Sequence
  Synthetic
uaaaacugaguaacaaaaaagag

SEQ ID NO: 308305 - RNA, 24 nt, Artificial Sequence
  Synthetic
auaaaacugaguaacaaaaaagag

SEQ ID NO: 308306 - RNA, 18 nt, Artificial Sequence
  Synthetic
aauuaaaauaaaaaagag

SEQ ID NO: 308307 - RNA, 19 nt, Artificial Sequence
  Synthetic
aaauuaaaauaaaaaagag

SEQ ID NO: 308308 - RNA, 20 nt, Artificial Sequence
  Synthetic
aaaauuaaaauaaaaaagag

SEQ ID NO: 308309 - RNA, 21 nt, Artificial Sequence
  Synthetic
aaaaauuaaaauaaaaaagag

SEQ ID NO: 308310 - RNA, 22 nt, Artificial Sequence
  Synthetic
caaaaauuaaaauaaaaaagag

SEQ ID NO: 308311 - RNA, 23 nt, Artificial Sequence
  Synthetic
acaaaaauuaaaauaaaaaagag

SEQ ID NO: 308312 - RNA, 24 nt, Artificial Sequence
  Synthetic
cacaaaaauuaaaauaaaaaagag

SEQ ID NO: 308313 - RNA, 18 nt, Artificial Sequence
  Synthetic
aaagaagggcaaaaagag

SEQ ID NO: 308314 - RNA, 19 nt, Artificial Sequence
  Synthetic
aaaagaagggcaaaaagag

SEQ ID NO: 308315 - RNA, 20 nt, Artificial Sequence
  Synthetic
caaaagaagggcaaaaagag

SEQ ID NO: 308316 - RNA, 21 nt, Artificial Sequence
  Synthetic
acaaaagaagggcaaaaagag

SEQ ID NO: 308317 - RNA, 22 nt, Artificial Sequence
  Synthetic
aacaaaagaagggcaaaaagag

SEQ ID NO: 308318 - RNA, 23 nt, Artificial Sequence
  Synthetic
gaacaaaagaagggcaaaaagag

SEQ ID NO: 308319 - RNA, 24 nt, Artificial Sequence
  Synthetic
agaacaaaagaagggcaaaaagag

SEQ ID NO: 308320 - RNA, 18 nt, Artificial Sequence
  Synthetic
auacucagggaaaaagag

SEQ ID NO: 308321 - RNA, 19 nt, Artificial Sequence
  Synthetic
gauacucagggaaaaagag

SEQ ID NO: 308322 - RNA, 20 nt, Artificial Sequence
  Synthetic
ugauacucagggaaaaagag

SEQ ID NO: 308323 - RNA, 21 nt, Artificial Sequence
  Synthetic
augauacucagggaaaaagag

SEQ ID NO: 308324 - RNA, 22 nt, Artificial Sequence
  Synthetic
aaugauacucagggaaaaagag

SEQ ID NO: 308325 - RNA, 23 nt, Artificial Sequence
  Synthetic
aaaugauacucagggaaaaagag

SEQ ID NO: 308326 - RNA, 24 nt, Artificial Sequence
  Synthetic
gaaaugauacucagggaaaaagag

SEQ ID NO: 308327 - RNA, 18 nt, Artificial Sequence
  Synthetic
auaugagggacaaaagag

SEQ ID NO: 308328 - RNA, 19 nt, Artificial Sequence
  Synthetic
gauaugagggacaaaagag

SEQ ID NO: 308329 - RNA, 20 nt, Artificial Sequence
  Synthetic
agauaugagggacaaaagag

SEQ ID NO: 308330 - RNA, 21 nt, Artificial Sequence
  Synthetic
uagauaugagggacaaaagag

SEQ ID NO: 308331 - RNA, 22 nt, Artificial Sequence
  Synthetic
cuagauaugagggacaaaagag

SEQ ID NO: 308332 - RNA, 23 nt, Artificial Sequence
  Synthetic
ucuagauaugagggacaaaagag

SEQ ID NO: 308333 - RNA, 24 nt, Artificial Sequence
  Synthetic
aucuagauaugagggacaaaagag

SEQ ID NO: 308334 - RNA, 18 nt, Artificial Sequence
  Synthetic
cagaggcgaccaaaagag

SEQ ID NO: 308335 - RNA, 19 nt, Artificial Sequence
  Synthetic
acagaggcgaccaaaagag

SEQ ID NO: 308336 - RNA, 20 nt, Artificial Sequence
  Synthetic
uacagaggcgaccaaaagag

SEQ ID NO: 308337 - RNA, 21 nt, Artificial Sequence
  Synthetic
auacagaggcgaccaaaagag

SEQ ID NO: 308338 - RNA, 22 nt, Artificial Sequence
  Synthetic
aauacagaggcgaccaaaagag

SEQ ID NO: 308339 - RNA, 23 nt, Artificial Sequence
  Synthetic
gaauacagaggcgaccaaaagag

SEQ ID NO: 308340 - RNA, 24 nt, Artificial Sequence
  Synthetic
agaauacagaggcgaccaaaagag

SEQ ID NO: 308341 - RNA, 18 nt, Artificial Sequence
  Synthetic
uucaaaaauagaaaagag

SEQ ID NO: 308342 - RNA, 19 nt, Artificial Sequence
  Synthetic
auucaaaaauagaaaagag

SEQ ID NO: 308343 - RNA, 20 nt, Artificial Sequence
  Synthetic
gauucaaaaauagaaaagag

SEQ ID NO: 308344 - RNA, 21 nt, Artificial Sequence
  Synthetic
ggauucaaaaauagaaaagag

SEQ ID NO: 308345 - RNA, 22 nt, Artificial Sequence
  Synthetic
gggauucaaaaauagaaaagag

SEQ ID NO: 308346 - RNA, 23 nt, Artificial Sequence
  Synthetic
ugggauucaaaaauagaaaagag

SEQ ID NO: 308347 - RNA, 24 nt, Artificial Sequence
  Synthetic
uugggauucaaaaauagaaaagag

SEQ ID NO: 308348 - RNA, 18 nt, Artificial Sequence
  Synthetic
aguguggugggaaaagag

SEQ ID NO: 308349 - RNA, 19 nt, Artificial Sequence
  Synthetic
aaguguggugggaaaagag

SEQ ID NO: 308350 - RNA, 20 nt, Artificial Sequence
  Synthetic
caaguguggugggaaaagag

SEQ ID NO: 308351 - RNA, 21 nt, Artificial Sequence
  Synthetic
ccaaguguggugggaaaagag

SEQ ID NO: 308352 - RNA, 22 nt, Artificial Sequence
  Synthetic
gccaaguguggugggaaaagag

SEQ ID NO: 308353 - RNA, 23 nt, Artificial Sequence
  Synthetic
ggccaaguguggugggaaaagag

SEQ ID NO: 308354 - RNA, 24 nt, Artificial Sequence
  Synthetic
uggccaaguguggugggaaaagag

SEQ ID NO: 308355 - RNA, 18 nt, Artificial Sequence
  Synthetic
aagcuuaauugaaaagag

SEQ ID NO: 308356 - RNA, 19 nt, Artificial Sequence
  Synthetic
aaagcuuaauugaaaagag

SEQ ID NO: 308357 - RNA, 20 nt, Artificial Sequence
  Synthetic
aaaagcuuaauugaaaagag

SEQ ID NO: 308358 - RNA, 21 nt, Artificial Sequence
  Synthetic
aaaaagcuuaauugaaaagag

SEQ ID NO: 308359 - RNA, 22 nt, Artificial Sequence
  Synthetic
gaaaaagcuuaauugaaaagag

SEQ ID NO: 308360 - RNA, 23 nt, Artificial Sequence
  Synthetic
agaaaaagcuuaauugaaaagag

SEQ ID NO: 308361 - RNA, 24 nt, Artificial Sequence
  Synthetic
aagaaaaagcuuaauugaaaagag

SEQ ID NO: 308362 - RNA, 18 nt, Artificial Sequence
  Synthetic
aagagauuuauaaaagag

SEQ ID NO: 308363 - RNA, 19 nt, Artificial Sequence
  Synthetic
aaagagauuuauaaaagag

SEQ ID NO: 308364 - RNA, 20 nt, Artificial Sequence
  Synthetic
caaagagauuuauaaaagag

SEQ ID NO: 308365 - RNA, 21 nt, Artificial Sequence
  Synthetic
ucaaagagauuuauaaaagag

SEQ ID NO: 308366 - RNA, 22 nt, Artificial Sequence
  Synthetic
gucaaagagauuuauaaaagag

SEQ ID NO: 308367 - RNA, 23 nt, Artificial Sequence
  Synthetic
ugucaaagagauuuauaaaagag

SEQ ID NO: 308368 - RNA, 24 nt, Artificial Sequence
  Synthetic
gugucaaagagauuuauaaaagag

SEQ ID NO: 308369 - RNA, 18 nt, Artificial Sequence
  Synthetic
ccaggcauuguaaaagag

SEQ ID NO: 308370 - RNA, 19 nt, Artificial Sequence
  Synthetic
accaggcauuguaaaagag

SEQ ID NO: 308371 - RNA, 20 nt, Artificial Sequence
  Synthetic
gaccaggcauuguaaaagag

SEQ ID NO: 308372 - RNA, 21 nt, Artificial Sequence
  Synthetic
agaccaggcauuguaaaagag

SEQ ID NO: 308373 - RNA, 22 nt, Artificial Sequence
  Synthetic
aagaccaggcauuguaaaagag

SEQ ID NO: 308374 - RNA, 23 nt, Artificial Sequence
  Synthetic
caagaccaggcauuguaaaagag

SEQ ID NO: 308375 - RNA, 24 nt, Artificial Sequence
  Synthetic
acaagaccaggcauuguaaaagag

SEQ ID NO: 308376 - RNA, 18 nt, Artificial Sequence
  Synthetic
uauguaaaaaacaaagag

SEQ ID NO: 308377 - RNA, 19 nt, Artificial Sequence
  Synthetic
guauguaaaaaacaaagag

SEQ ID NO: 308378 - RNA, 20 nt, Artificial Sequence
  Synthetic
aguauguaaaaaacaaagag

SEQ ID NO: 308379 - RNA, 21 nt, Artificial Sequence
  Synthetic
uaguauguaaaaaacaaagag

SEQ ID NO: 308380 - RNA, 22 nt, Artificial Sequence
  Synthetic
auaguauguaaaaaacaaagag

SEQ ID NO: 308381 - RNA, 23 nt, Artificial Sequence
  Synthetic
cauaguauguaaaaaacaaagag

SEQ ID NO: 308382 - RNA, 24 nt, Artificial Sequence
  Synthetic
ucauaguauguaaaaaacaaagag

SEQ ID NO: 308383 - RNA, 18 nt, Artificial Sequence
  Synthetic
ucauggauggacaaagag

SEQ ID NO: 308384 - RNA, 19 nt, Artificial Sequence
  Synthetic
gucauggauggacaaagag

SEQ ID NO: 308385 - RNA, 20 nt, Artificial Sequence
  Synthetic
ugucauggauggacaaagag

SEQ ID NO: 308386 - RNA, 21 nt, Artificial Sequence
  Synthetic
cugucauggauggacaaagag

SEQ ID NO: 308387 - RNA, 22 nt, Artificial Sequence
  Synthetic
ucugucauggauggacaaagag

SEQ ID NO: 308388 - RNA, 23 nt, Artificial Sequence
  Synthetic
gucugucauggauggacaaagag

SEQ ID NO: 308389 - RNA, 24 nt, Artificial Sequence
  Synthetic
ggucugucauggauggacaaagag

SEQ ID NO: 308390 - RNA, 18 nt, Artificial Sequence
  Synthetic
guaccauucaccaaagag

SEQ ID NO: 308391 - RNA, 19 nt, Artificial Sequence
  Synthetic
gguaccauucaccaaagag

SEQ ID NO: 308392 - RNA, 20 nt, Artificial Sequence
  Synthetic
ggguaccauucaccaaagag

SEQ ID NO: 308393 - RNA, 21 nt, Artificial Sequence
  Synthetic
aggguaccauucaccaaagag

SEQ ID NO: 308394 - RNA, 22 nt, Artificial Sequence
  Synthetic
caggguaccauucaccaaagag

SEQ ID NO: 308395 - RNA, 23 nt, Artificial Sequence
  Synthetic
gcaggguaccauucaccaaagag

SEQ ID NO: 308396 - RNA, 24 nt, Artificial Sequence
  Synthetic
agcaggguaccauucaccaaagag

SEQ ID NO: 308397 - RNA, 18 nt, Artificial Sequence
  Synthetic
ccuuguucccccaaagag

SEQ ID NO: 308398 - RNA, 19 nt, Artificial Sequence
  Synthetic
gccuuguucccccaaagag

SEQ ID NO: 308399 - RNA, 20 nt, Artificial Sequence
  Synthetic
ugccuuguucccccaaagag

SEQ ID NO: 308400 - RNA, 21 nt, Artificial Sequence
  Synthetic
cugccuuguucccccaaagag

SEQ ID NO: 308401 - RNA, 22 nt, Artificial Sequence
  Synthetic
ucugccuuguucccccaaagag

SEQ ID NO: 308402 - RNA, 23 nt, Artificial Sequence
  Synthetic
gucugccuuguucccccaaagag

SEQ ID NO: 308403 - RNA, 24 nt, Artificial Sequence
  Synthetic
ugucugccuuguucccccaaagag

SEQ ID NO: 308404 - RNA, 18 nt, Artificial Sequence
  Synthetic
ggggugggaaagaaagag

SEQ ID NO: 308405 - RNA, 19 nt, Artificial Sequence
  Synthetic
uggggugggaaagaaagag

SEQ ID NO: 308406 - RNA, 20 nt, Artificial Sequence
  Synthetic
auggggugggaaagaaagag

SEQ ID NO: 308407 - RNA, 21 nt, Artificial Sequence
  Synthetic
uauggggugggaaagaaagag

SEQ ID NO: 308408 - RNA, 22 nt, Artificial Sequence
  Synthetic
guauggggugggaaagaaagag

SEQ ID NO: 308409 - RNA, 23 nt, Artificial Sequence
  Synthetic
gguauggggugggaaagaaagag

SEQ ID NO: 308410 - RNA, 24 nt, Artificial Sequence
  Synthetic
ggguauggggugggaaagaaagag

SEQ ID NO: 308411 - RNA, 18 nt, Artificial Sequence
  Synthetic
ucaacuugagagaaagag

SEQ ID NO: 308412 - RNA, 19 nt, Artificial Sequence
  Synthetic
aucaacuugagagaaagag

SEQ ID NO: 308413 - RNA, 20 nt, Artificial Sequence
  Synthetic
aaucaacuugagagaaagag

SEQ ID NO: 308414 - RNA, 21 nt, Artificial Sequence
  Synthetic
caaucaacuugagagaaagag

SEQ ID NO: 308415 - RNA, 22 nt, Artificial Sequence
  Synthetic
acaaucaacuugagagaaagag

SEQ ID NO: 308416 - RNA, 23 nt, Artificial Sequence
  Synthetic
uacaaucaacuugagagaaagag

SEQ ID NO: 308417 - RNA, 24 nt, Artificial Sequence
  Synthetic
auacaaucaacuugagagaaagag

SEQ ID NO: 308418 - RNA, 18 nt, Artificial Sequence
  Synthetic
gaaaggcuugagaaagag

SEQ ID NO: 308419 - RNA, 19 nt, Artificial Sequence
  Synthetic
agaaaggcuugagaaagag

SEQ ID NO: 308420 - RNA, 20 nt, Artificial Sequence
  Synthetic
cagaaaggcuugagaaagag

SEQ ID NO: 308421 - RNA, 21 nt, Artificial Sequence
  Synthetic
ccagaaaggcuugagaaagag

SEQ ID NO: 308422 - RNA, 22 nt, Artificial Sequence
  Synthetic
accagaaaggcuugagaaagag

SEQ ID NO: 308423 - RNA, 23 nt, Artificial Sequence
  Synthetic
gaccagaaaggcuugagaaagag

SEQ ID NO: 308424 - RNA, 24 nt, Artificial Sequence
  Synthetic
ggaccagaaaggcuugagaaagag

SEQ ID NO: 308425 - RNA, 18 nt, Artificial Sequence
  Synthetic
acagacaaauagaaagag

SEQ ID NO: 308426 - RNA, 19 nt, Artificial Sequence
  Synthetic
gacagacaaauagaaagag

SEQ ID NO: 308427 - RNA, 20 nt, Artificial Sequence
  Synthetic
agacagacaaauagaaagag

SEQ ID NO: 308428 - RNA, 21 nt, Artificial Sequence
  Synthetic
aagacagacaaauagaaagag

SEQ ID NO: 308429 - RNA, 22 nt, Artificial Sequence
  Synthetic
gaagacagacaaauagaaagag

SEQ ID NO: 308430 - RNA, 23 nt, Artificial Sequence
  Synthetic
ugaagacagacaaauagaaagag

SEQ ID NO: 308431 - RNA, 24 nt, Artificial Sequence
  Synthetic
cugaagacagacaaauagaaagag

SEQ ID NO: 308432 - RNA, 18 nt, Artificial Sequence
  Synthetic
caguauucauagaaagag

SEQ ID NO: 308433 - RNA, 19 nt, Artificial Sequence
  Synthetic
ucaguauucauagaaagag

SEQ ID NO: 308434 - RNA, 20 nt, Artificial Sequence
  Synthetic
aucaguauucauagaaagag

SEQ ID NO: 308435 - RNA, 21 nt, Artificial Sequence
  Synthetic
caucaguauucauagaaagag

SEQ ID NO: 308436 - RNA, 22 nt, Artificial Sequence
  Synthetic
ucaucaguauucauagaaagag

SEQ ID NO: 308437 - RNA, 23 nt, Artificial Sequence
  Synthetic
gucaucaguauucauagaaagag

SEQ ID NO: 308438 - RNA, 24 nt, Artificial Sequence
  Synthetic
ugucaucaguauucauagaaagag

SEQ ID NO: 308439 - RNA, 18 nt, Artificial Sequence
  Synthetic
guggaaggguagaaagag

SEQ ID NO: 308440 - RNA, 19 nt, Artificial Sequence
  Synthetic
aguggaaggguagaaagag

SEQ ID NO: 308441 - RNA, 20 nt, Artificial Sequence
  Synthetic
caguggaaggguagaaagag

SEQ ID NO: 308442 - RNA, 21 nt, Artificial Sequence
  Synthetic
ccaguggaaggguagaaagag

SEQ ID NO: 308443 - RNA, 22 nt, Artificial Sequence
  Synthetic
gccaguggaaggguagaaagag

SEQ ID NO: 308444 - RNA, 23 nt, Artificial Sequence
  Synthetic
agccaguggaaggguagaaagag

SEQ ID NO: 308445 - RNA, 24 nt, Artificial Sequence
  Synthetic
aagccaguggaaggguagaaagag

SEQ ID NO: 308446 - RNA, 18 nt, Artificial Sequence
  Synthetic
ggcuaauaagggaaagag

SEQ ID NO: 308447 - RNA, 19 nt, Artificial Sequence
  Synthetic
uggcuaauaagggaaagag

SEQ ID NO: 308448 - RNA, 20 nt, Artificial Sequence
  Synthetic
guggcuaauaagggaaagag

SEQ ID NO: 308449 - RNA, 21 nt, Artificial Sequence
  Synthetic
uguggcuaauaagggaaagag

SEQ ID NO: 308450 - RNA, 22 nt, Artificial Sequence
  Synthetic
auguggcuaauaagggaaagag

SEQ ID NO: 308451 - RNA, 23 nt, Artificial Sequence
  Synthetic
uauguggcuaauaagggaaagag

SEQ ID NO: 308452 - RNA, 24 nt, Artificial Sequence
  Synthetic
uuauguggcuaauaagggaaagag

SEQ ID NO: 308453 - RNA, 18 nt, Artificial Sequence
  Synthetic
ccaguaggggggaaagag

SEQ ID NO: 308454 - RNA, 19 nt, Artificial Sequence
  Synthetic
uccaguaggggggaaagag

SEQ ID NO: 308455 - RNA, 20 nt, Artificial Sequence
  Synthetic
auccaguaggggggaaagag

SEQ ID NO: 308456 - RNA, 21 nt, Artificial Sequence
  Synthetic
uauccaguaggggggaaagag

SEQ ID NO: 308457 - RNA, 22 nt, Artificial Sequence
  Synthetic
uuauccaguaggggggaaagag

SEQ ID NO: 308458 - RNA, 23 nt, Artificial Sequence
  Synthetic
auuauccaguaggggggaaagag

SEQ ID NO: 308459 - RNA, 24 nt, Artificial Sequence
  Synthetic
aauuauccaguaggggggaaagag

SEQ ID NO: 308460 - RNA, 18 nt, Artificial Sequence
  Synthetic
ucagagauuaugaaagag

SEQ ID NO: 308461 - RNA, 19 nt, Artificial Sequence
  Synthetic
cucagagauuaugaaagag

SEQ ID NO: 308462 - RNA, 20 nt, Artificial Sequence
  Synthetic
acucagagauuaugaaagag

SEQ ID NO: 308463 - RNA, 21 nt, Artificial Sequence
  Synthetic
aacucagagauuaugaaagag

SEQ ID NO: 308464 - RNA, 22 nt, Artificial Sequence
  Synthetic
aaacucagagauuaugaaagag

SEQ ID NO: 308465 - RNA, 23 nt, Artificial Sequence
  Synthetic
uaaacucagagauuaugaaagag

SEQ ID NO: 308466 - RNA, 24 nt, Artificial Sequence
  Synthetic
auaaacucagagauuaugaaagag

SEQ ID NO: 308467 - RNA, 18 nt, Artificial Sequence
  Synthetic
aaaauggaacugaaagag

SEQ ID NO: 308468 - RNA, 19 nt, Artificial Sequence
  Synthetic
aaaaauggaacugaaagag

SEQ ID NO: 308469 - RNA, 20 nt, Artificial Sequence
  Synthetic
gaaaaauggaacugaaagag

SEQ ID NO: 308470 - RNA, 21 nt, Artificial Sequence
  Synthetic
agaaaaauggaacugaaagag

SEQ ID NO: 308471 - RNA, 22 nt, Artificial Sequence
  Synthetic
aagaaaaauggaacugaaagag

SEQ ID NO: 308472 - RNA, 23 nt, Artificial Sequence
  Synthetic
uaagaaaaauggaacugaaagag

SEQ ID NO: 308473 - RNA, 24 nt, Artificial Sequence
  Synthetic
auaagaaaaauggaacugaaagag

SEQ ID NO: 308474 - RNA, 18 nt, Artificial Sequence
  Synthetic
gcacaagccuugaaagag

SEQ ID NO: 308475 - RNA, 19 nt, Artificial Sequence
  Synthetic
ugcacaagccuugaaagag

SEQ ID NO: 308476 - RNA, 20 nt, Artificial Sequence
  Synthetic
augcacaagccuugaaagag

SEQ ID NO: 308477 - RNA, 21 nt, Artificial Sequence
  Synthetic
caugcacaagccuugaaagag

SEQ ID NO: 308478 - RNA, 22 nt, Artificial Sequence
  Synthetic
gcaugcacaagccuugaaagag

SEQ ID NO: 308479 - RNA, 23 nt, Artificial Sequence
  Synthetic
ugcaugcacaagccuugaaagag

SEQ ID NO: 308480 - RNA, 24 nt, Artificial Sequence
  Synthetic
cugcaugcacaagccuugaaagag

SEQ ID NO: 308481 - RNA, 18 nt, Artificial Sequence
  Synthetic
aaaggagccuugaaagag

SEQ ID NO: 308482 - RNA, 19 nt, Artificial Sequence
  Synthetic
uaaaggagccuugaaagag

SEQ ID NO: 308483 - RNA, 20 nt, Artificial Sequence
  Synthetic
cuaaaggagccuugaaagag

SEQ ID NO: 308484 - RNA, 21 nt, Artificial Sequence
  Synthetic
ucuaaaggagccuugaaagag

SEQ ID NO: 308485 - RNA, 22 nt, Artificial Sequence
  Synthetic
gucuaaaggagccuugaaagag

SEQ ID NO: 308486 - RNA, 23 nt, Artificial Sequence
  Synthetic
ugucuaaaggagccuugaaagag

SEQ ID NO: 308487 - RNA, 24 nt, Artificial Sequence
  Synthetic
augucuaaaggagccuugaaagag

SEQ ID NO: 308488 - RNA, 18 nt, Artificial Sequence
  Synthetic
uaugcuggugauaaagag

SEQ ID NO: 308489 - RNA, 19 nt, Artificial Sequence
  Synthetic
auaugcuggugauaaagag

SEQ ID NO: 308490 - RNA, 20 nt, Artificial Sequence
  Synthetic
aauaugcuggugauaaagag

SEQ ID NO: 308491 - RNA, 21 nt, Artificial Sequence
  Synthetic
caauaugcuggugauaaagag

SEQ ID NO: 308492 - RNA, 22 nt, Artificial Sequence
  Synthetic
gcaauaugcuggugauaaagag

SEQ ID NO: 308493 - RNA, 23 nt, Artificial Sequence
  Synthetic
ugcaauaugcuggugauaaagag

SEQ ID NO: 308494 - RNA, 24 nt, Artificial Sequence
  Synthetic
gugcaauaugcuggugauaaagag

SEQ ID NO: 308495 - RNA, 18 nt, Artificial Sequence
  Synthetic
gggccugaaaguaaagag

SEQ ID NO: 308496 - RNA, 19 nt, Artificial Sequence
  Synthetic
ggggccugaaaguaaagag

SEQ ID NO: 308497 - RNA, 20 nt, Artificial Sequence
  Synthetic
uggggccugaaaguaaagag

SEQ ID NO: 308498 - RNA, 21 nt, Artificial Sequence
  Synthetic
auggggccugaaaguaaagag

SEQ ID NO: 308499 - RNA, 22 nt, Artificial Sequence
  Synthetic
aauggggccugaaaguaaagag

SEQ ID NO: 308500 - RNA, 23 nt, Artificial Sequence
  Synthetic
aaauggggccugaaaguaaagag

SEQ ID NO: 308501 - RNA, 24 nt, Artificial Sequence
  Synthetic
gaaauggggccugaaaguaaagag

SEQ ID NO: 308502 - RNA, 18 nt, Artificial Sequence
  Synthetic
uagaggaggaguaaagag

SEQ ID NO: 308503 - RNA, 19 nt, Artificial Sequence
  Synthetic
auagaggaggaguaaagag

SEQ ID NO: 308504 - RNA, 20 nt, Artificial Sequence
  Synthetic
uauagaggaggaguaaagag

SEQ ID NO: 308505 - RNA, 21 nt, Artificial Sequence
  Synthetic
cuauagaggaggaguaaagag

SEQ ID NO: 308506 - RNA, 22 nt, Artificial Sequence
  Synthetic
ccuauagaggaggaguaaagag

SEQ ID NO: 308507 - RNA, 23 nt, Artificial Sequence
  Synthetic
uccuauagaggaggaguaaagag

SEQ ID NO: 308508 - RNA, 24 nt, Artificial Sequence
  Synthetic
uuccuauagaggaggaguaaagag

SEQ ID NO: 308509 - RNA, 18 nt, Artificial Sequence
  Synthetic
ccgggacguuguaaagag

SEQ ID NO: 308510 - RNA, 19 nt, Artificial Sequence
  Synthetic
uccgggacguuguaaagag

SEQ ID NO: 308511 - RNA, 20 nt, Artificial Sequence
  Synthetic
uuccgggacguuguaaagag

SEQ ID NO: 308512 - RNA, 21 nt, Artificial Sequence
  Synthetic
cuuccgggacguuguaaagag

SEQ ID NO: 308513 - RNA, 22 nt, Artificial Sequence
  Synthetic
ucuuccgggacguuguaaagag

SEQ ID NO: 308514 - RNA, 23 nt, Artificial Sequence
  Synthetic
gucuuccgggacguuguaaagag

SEQ ID NO: 308515 - RNA, 24 nt, Artificial Sequence
  Synthetic
agucuuccgggacguuguaaagag

SEQ ID NO: 308516 - RNA, 18 nt, Artificial Sequence
  Synthetic
aagaguguuauuaaagag

SEQ ID NO: 308517 - RNA, 19 nt, Artificial Sequence
  Synthetic
aaagaguguuauuaaagag

SEQ ID NO: 308518 - RNA, 20 nt, Artificial Sequence
  Synthetic
aaaagaguguuauuaaagag

SEQ ID NO: 308519 - RNA, 21 nt, Artificial Sequence
  Synthetic
aaaaagaguguuauuaaagag

SEQ ID NO: 308520 - RNA, 22 nt, Artificial Sequence
  Synthetic
uaaaaagaguguuauuaaagag

SEQ ID NO: 308521 - RNA, 23 nt, Artificial Sequence
  Synthetic
auaaaaagaguguuauuaaagag

SEQ ID NO: 308522 - RNA, 24 nt, Artificial Sequence
  Synthetic
aauaaaaagaguguuauuaaagag

SEQ ID NO: 308523 - RNA, 18 nt, Artificial Sequence
  Synthetic
uaauagaaucaacaagag

SEQ ID NO: 308524 - RNA, 19 nt, Artificial Sequence
  Synthetic
auaauagaaucaacaagag

SEQ ID NO: 308525 - RNA, 20 nt, Artificial Sequence
  Synthetic
aauaauagaaucaacaagag

SEQ ID NO: 308526 - RNA, 21 nt, Artificial Sequence
  Synthetic
caauaauagaaucaacaagag

SEQ ID NO: 308527 - RNA, 22 nt, Artificial Sequence
  Synthetic
ccaauaauagaaucaacaagag

SEQ ID NO: 308528 - RNA, 23 nt, Artificial Sequence
  Synthetic
accaauaauagaaucaacaagag

SEQ ID NO: 308529 - RNA, 24 nt, Artificial Sequence
  Synthetic
gaccaauaauagaaucaacaagag

SEQ ID NO: 308530 - RNA, 18 nt, Artificial Sequence
  Synthetic
gggagaggugaacaagag

SEQ ID NO: 308531 - RNA, 19 nt, Artificial Sequence
  Synthetic
agggagaggugaacaagag

SEQ ID NO: 308532 - RNA, 20 nt, Artificial Sequence
  Synthetic
gagggagaggugaacaagag

SEQ ID NO: 308533 - RNA, 21 nt, Artificial Sequence
  Synthetic
agagggagaggugaacaagag

SEQ ID NO: 308534 - RNA, 22 nt, Artificial Sequence
  Synthetic
uagagggagaggugaacaagag

SEQ ID NO: 308535 - RNA, 23 nt, Artificial Sequence
  Synthetic
cuagagggagaggugaacaagag

SEQ ID NO: 308536 - RNA, 24 nt, Artificial Sequence
  Synthetic
gcuagagggagaggugaacaagag

SEQ ID NO: 308537 - RNA, 18 nt, Artificial Sequence
  Synthetic
uuuggggagagacaagag

SEQ ID NO: 308538 - RNA, 19 nt, Artificial Sequence
  Synthetic
uuuuggggagagacaagag

SEQ ID NO: 308539 - RNA, 20 nt, Artificial Sequence
  Synthetic
cuuuuggggagagacaagag

SEQ ID NO: 308540 - RNA, 21 nt, Artificial Sequence
  Synthetic
gcuuuuggggagagacaagag

SEQ ID NO: 308541 - RNA, 22 nt, Artificial Sequence
  Synthetic
agcuuuuggggagagacaagag

SEQ ID NO: 308542 - RNA, 23 nt, Artificial Sequence
  Synthetic
uagcuuuuggggagagacaagag

SEQ ID NO: 308543 - RNA, 24 nt, Artificial Sequence
  Synthetic
cuagcuuuuggggagagacaagag

SEQ ID NO: 308544 - RNA, 18 nt, Artificial Sequence
  Synthetic
aaaacagcaaaccaagag

SEQ ID NO: 308545 - RNA, 19 nt, Artificial Sequence
  Synthetic
aaaaacagcaaaccaagag

SEQ ID NO: 308546 - RNA, 20 nt, Artificial Sequence
  Synthetic
gaaaaacagcaaaccaagag

SEQ ID NO: 308547 - RNA, 21 nt, Artificial Sequence
  Synthetic
ggaaaaacagcaaaccaagag

SEQ ID NO: 308548 - RNA, 22 nt, Artificial Sequence
  Synthetic
aggaaaaacagcaaaccaagag

SEQ ID NO: 308549 - RNA, 23 nt, Artificial Sequence
  Synthetic
uaggaaaaacagcaaaccaagag

SEQ ID NO: 308550 - RNA, 24 nt, Artificial Sequence
  Synthetic
guaggaaaaacagcaaaccaagag

SEQ ID NO: 308551 - RNA, 18 nt, Artificial Sequence
  Synthetic
ggcuauugagaccaagag

SEQ ID NO: 308552 - RNA, 19 nt, Artificial Sequence
  Synthetic
aggcuauugagaccaagag

SEQ ID NO: 308553 - RNA, 20 nt, Artificial Sequence
  Synthetic
aaggcuauugagaccaagag

SEQ ID NO: 308554 - RNA, 21 nt, Artificial Sequence
  Synthetic
gaaggcuauugagaccaagag

SEQ ID NO: 308555 - RNA, 22 nt, Artificial Sequence
  Synthetic
ggaaggcuauugagaccaagag

SEQ ID NO: 308556 - RNA, 23 nt, Artificial Sequence
  Synthetic
aggaaggcuauugagaccaagag

SEQ ID NO: 308557 - RNA, 24 nt, Artificial Sequence
  Synthetic
aaggaaggcuauugagaccaagag

SEQ ID NO: 308558 - RNA, 18 nt, Artificial Sequence
  Synthetic
cuuagccagagccaagag

SEQ ID NO: 308559 - RNA, 19 nt, Artificial Sequence
  Synthetic
acuuagccagagccaagag

SEQ ID NO: 308560 - RNA, 20 nt, Artificial Sequence
  Synthetic
uacuuagccagagccaagag

SEQ ID NO: 308561 - RNA, 21 nt, Artificial Sequence
  Synthetic
auacuuagccagagccaagag

SEQ ID NO: 308562 - RNA, 22 nt, Artificial Sequence
  Synthetic
cauacuuagccagagccaagag

SEQ ID NO: 308563 - RNA, 23 nt, Artificial Sequence
  Synthetic
gcauacuuagccagagccaagag

SEQ ID NO: 308564 - RNA, 24 nt, Artificial Sequence
  Synthetic
ugcauacuuagccagagccaagag

SEQ ID NO: 308565 - RNA, 18 nt, Artificial Sequence
  Synthetic
ccuuuagucauccaagag

SEQ ID NO: 308566 - RNA, 19 nt, Artificial Sequence
  Synthetic
uccuuuagucauccaagag

SEQ ID NO: 308567 - RNA, 20 nt, Artificial Sequence
  Synthetic
guccuuuagucauccaagag

SEQ ID NO: 308568 - RNA, 21 nt, Artificial Sequence
  Synthetic
aguccuuuagucauccaagag

SEQ ID NO: 308569 - RNA, 22 nt, Artificial Sequence
  Synthetic
aaguccuuuagucauccaagag

SEQ ID NO: 308570 - RNA, 23 nt, Artificial Sequence
  Synthetic
aaaguccuuuagucauccaagag

SEQ ID NO: 308571 - RNA, 24 nt, Artificial Sequence
  Synthetic
caaaguccuuuagucauccaagag

SEQ ID NO: 308572 - RNA, 18 nt, Artificial Sequence
  Synthetic
auaaggaaggggcaagag

SEQ ID NO: 308573 - RNA, 19 nt, Artificial Sequence
  Synthetic
gauaaggaaggggcaagag

SEQ ID NO: 308574 - RNA, 20 nt, Artificial Sequence
  Synthetic
agauaaggaaggggcaagag

SEQ ID NO: 308575 - RNA, 21 nt, Artificial Sequence
  Synthetic
gagauaaggaaggggcaagag

SEQ ID NO: 308576 - RNA, 22 nt, Artificial Sequence
  Synthetic
agagauaaggaaggggcaagag

SEQ ID NO: 308577 - RNA, 23 nt, Artificial Sequence
  Synthetic
aagagauaaggaaggggcaagag

SEQ ID NO: 308578 - RNA, 24 nt, Artificial Sequence
  Synthetic
gaagagauaaggaaggggcaagag

SEQ ID NO: 308579 - RNA, 18 nt, Artificial Sequence
  Synthetic
uucccacuuaugcaagag

SEQ ID NO: 308580 - RNA, 19 nt, Artificial Sequence
  Synthetic
uuucccacuuaugcaagag

SEQ ID NO: 308581 - RNA, 20 nt, Artificial Sequence
  Synthetic
auuucccacuuaugcaagag

SEQ ID NO: 308582 - RNA, 21 nt, Artificial Sequence
  Synthetic
aauuucccacuuaugcaagag

SEQ ID NO: 308583 - RNA, 22 nt, Artificial Sequence
  Synthetic
gaauuucccacuuaugcaagag

SEQ ID NO: 308584 - RNA, 23 nt, Artificial Sequence
  Synthetic
agaauuucccacuuaugcaagag

SEQ ID NO: 308585 - RNA, 24 nt, Artificial Sequence
  Synthetic
aagaauuucccacuuaugcaagag

SEQ ID NO: 308586 - RNA, 18 nt, Artificial Sequence
  Synthetic
aaaguguaggugcaagag

SEQ ID NO: 308587 - RNA, 19 nt, Artificial Sequence
  Synthetic
aaaaguguaggugcaagag

SEQ ID NO: 308588 - RNA, 20 nt, Artificial Sequence
  Synthetic
gaaaaguguaggugcaagag

SEQ ID NO: 308589 - RNA, 21 nt, Artificial Sequence
  Synthetic
agaaaaguguaggugcaagag

SEQ ID NO: 308590 - RNA, 22 nt, Artificial Sequence
  Synthetic
cagaaaaguguaggugcaagag

SEQ ID NO: 308591 - RNA, 23 nt, Artificial Sequence
  Synthetic
ucagaaaaguguaggugcaagag

SEQ ID NO: 308592 - RNA, 24 nt, Artificial Sequence
  Synthetic
gucagaaaaguguaggugcaagag

SEQ ID NO: 308593 - RNA, 18 nt, Artificial Sequence
  Synthetic
aguaaaguuaaucaagag

SEQ ID NO: 308594 - RNA, 19 nt, Artificial Sequence
  Synthetic
aaguaaaguuaaucaagag

SEQ ID NO: 308595 - RNA, 20 nt, Artificial Sequence
  Synthetic
aaaguaaaguuaaucaagag

SEQ ID NO: 308596 - RNA, 21 nt, Artificial Sequence
  Synthetic
aaaaguaaaguuaaucaagag

SEQ ID NO: 308597 - RNA, 22 nt, Artificial Sequence
  Synthetic
caaaaguaaaguuaaucaagag

SEQ ID NO: 308598 - RNA, 23 nt, Artificial Sequence
  Synthetic
ucaaaaguaaaguuaaucaagag

SEQ ID NO: 308599 - RNA, 24 nt, Artificial Sequence
  Synthetic
cucaaaaguaaaguuaaucaagag

SEQ ID NO: 308600 - RNA, 18 nt, Artificial Sequence
  Synthetic
auuugcaguacucaagag

SEQ ID NO: 308601 - RNA, 19 nt, Artificial Sequence
  Synthetic
aauuugcaguacucaagag

SEQ ID NO: 308602 - RNA, 20 nt, Artificial Sequence
  Synthetic
gaauuugcaguacucaagag

SEQ ID NO: 308603 - RNA, 21 nt, Artificial Sequence
  Synthetic
agaauuugcaguacucaagag

SEQ ID NO: 308604 - RNA, 22 nt, Artificial Sequence
  Synthetic
uagaauuugcaguacucaagag

SEQ ID NO: 308605 - RNA, 23 nt, Artificial Sequence
  Synthetic
guagaauuugcaguacucaagag

SEQ ID NO: 308606 - RNA, 24 nt, Artificial Sequence
  Synthetic
aguagaauuugcaguacucaagag

SEQ ID NO: 308607 - RNA, 18 nt, Artificial Sequence
  Synthetic
gaacagaaaucucaagag

SEQ ID NO: 308608 - RNA, 19 nt, Artificial Sequence
  Synthetic
ugaacagaaaucucaagag

SEQ ID NO: 308609 - RNA, 20 nt, Artificial Sequence
  Synthetic
uugaacagaaaucucaagag

SEQ ID NO: 308610 - RNA, 21 nt, Artificial Sequence
  Synthetic
uuugaacagaaaucucaagag

SEQ ID NO: 308611 - RNA, 22 nt, Artificial Sequence
  Synthetic
auuugaacagaaaucucaagag

SEQ ID NO: 308612 - RNA, 23 nt, Artificial Sequence
  Synthetic
uauuugaacagaaaucucaagag

SEQ ID NO: 308613 - RNA, 24 nt, Artificial Sequence
  Synthetic
auauuugaacagaaaucucaagag

SEQ ID NO: 308614 - RNA, 18 nt, Artificial Sequence
  Synthetic
ucagcccagauucaagag

SEQ ID NO: 308615 - RNA, 19 nt, Artificial Sequence
  Synthetic
aucagcccagauucaagag

SEQ ID NO: 308616 - RNA, 20 nt, Artificial Sequence
  Synthetic
gaucagcccagauucaagag

SEQ ID NO: 308617 - RNA, 21 nt, Artificial Sequence
  Synthetic
agaucagcccagauucaagag

SEQ ID NO: 308618 - RNA, 22 nt, Artificial Sequence
  Synthetic
aagaucagcccagauucaagag

SEQ ID NO: 308619 - RNA, 23 nt, Artificial Sequence
  Synthetic
aaagaucagcccagauucaagag

SEQ ID NO: 308620 - RNA, 24 nt, Artificial Sequence
  Synthetic
aaaagaucagcccagauucaagag

SEQ ID NO: 308621 - RNA, 18 nt, Artificial Sequence
  Synthetic
uguauuugaguucaagag

SEQ ID NO: 308622 - RNA, 19 nt, Artificial Sequence
  Synthetic
auguauuugaguucaagag

SEQ ID NO: 308623 - RNA, 20 nt, Artificial Sequence
  Synthetic
aauguauuugaguucaagag

SEQ ID NO: 308624 - RNA, 21 nt, Artificial Sequence
  Synthetic
gaauguauuugaguucaagag

SEQ ID NO: 308625 - RNA, 22 nt, Artificial Sequence
  Synthetic
agaauguauuugaguucaagag

SEQ ID NO: 308626 - RNA, 23 nt, Artificial Sequence
  Synthetic
uagaauguauuugaguucaagag

SEQ ID NO: 308627 - RNA, 24 nt, Artificial Sequence
  Synthetic
guagaauguauuugaguucaagag

SEQ ID NO: 308628 - RNA, 18 nt, Artificial Sequence
  Synthetic
guauuuucuguucaagag

SEQ ID NO: 308629 - RNA, 19 nt, Artificial Sequence
  Synthetic
uguauuuucuguucaagag

SEQ ID NO: 308630 - RNA, 20 nt, Artificial Sequence
  Synthetic
auguauuuucuguucaagag

SEQ ID NO: 308631 - RNA, 21 nt, Artificial Sequence
  Synthetic
gauguauuuucuguucaagag

SEQ ID NO: 308632 - RNA, 22 nt, Artificial Sequence
  Synthetic
agauguauuuucuguucaagag

SEQ ID NO: 308633 - RNA, 23 nt, Artificial Sequence
  Synthetic
gagauguauuuucuguucaagag

SEQ ID NO: 308634 - RNA, 24 nt, Artificial Sequence
  Synthetic
agagauguauuuucuguucaagag

SEQ ID NO: 308635 - RNA, 18 nt, Artificial Sequence
  Synthetic
ggaggugacaaagaagag

SEQ ID NO: 308636 - RNA, 19 nt, Artificial Sequence
  Synthetic
aggaggugacaaagaagag

SEQ ID NO: 308637 - RNA, 20 nt, Artificial Sequence
  Synthetic
aaggaggugacaaagaagag

SEQ ID NO: 308638 - RNA, 21 nt, Artificial Sequence
  Synthetic
caaggaggugacaaagaagag

SEQ ID NO: 308639 - RNA, 22 nt, Artificial Sequence
  Synthetic
ucaaggaggugacaaagaagag

SEQ ID NO: 308640 - RNA, 23 nt, Artificial Sequence
  Synthetic
uucaaggaggugacaaagaagag

SEQ ID NO: 308641 - RNA, 24 nt, Artificial Sequence
  Synthetic
guucaaggaggugacaaagaagag

SEQ ID NO: 308642 - RNA, 18 nt, Artificial Sequence
  Synthetic
cauagaguagaagaagag

SEQ ID NO: 308643 - RNA, 19 nt, Artificial Sequence
  Synthetic
acauagaguagaagaagag

SEQ ID NO: 308644 - RNA, 20 nt, Artificial Sequence
  Synthetic
cacauagaguagaagaagag

SEQ ID NO: 308645 - RNA, 21 nt, Artificial Sequence
  Synthetic
gcacauagaguagaagaagag

SEQ ID NO: 308646 - RNA, 22 nt, Artificial Sequence
  Synthetic
agcacauagaguagaagaagag

SEQ ID NO: 308647 - RNA, 23 nt, Artificial Sequence
  Synthetic
aagcacauagaguagaagaagag

SEQ ID NO: 308648 - RNA, 24 nt, Artificial Sequence
  Synthetic
caagcacauagaguagaagaagag

SEQ ID NO: 308649 - RNA, 18 nt, Artificial Sequence
  Synthetic
ccaaagcuagcagaagag

SEQ ID NO: 308650 - RNA, 19 nt, Artificial Sequence
  Synthetic
uccaaagcuagcagaagag

SEQ ID NO: 308651 - RNA, 20 nt, Artificial Sequence
  Synthetic
uuccaaagcuagcagaagag

SEQ ID NO: 308652 - RNA, 21 nt, Artificial Sequence
  Synthetic
auuccaaagcuagcagaagag

SEQ ID NO: 308653 - RNA, 22 nt, Artificial Sequence
  Synthetic
aauuccaaagcuagcagaagag

SEQ ID NO: 308654 - RNA, 23 nt, Artificial Sequence
  Synthetic
aaauuccaaagcuagcagaagag

SEQ ID NO: 308655 - RNA, 24 nt, Artificial Sequence
  Synthetic
caaauuccaaagcuagcagaagag

SEQ ID NO: 308656 - RNA, 18 nt, Artificial Sequence
  Synthetic
aauuaaucaguagaagag

SEQ ID NO: 308657 - RNA, 19 nt, Artificial Sequence
  Synthetic
aaauuaaucaguagaagag

SEQ ID NO: 308658 - RNA, 20 nt, Artificial Sequence
  Synthetic
uaaauuaaucaguagaagag

SEQ ID NO: 308659 - RNA, 21 nt, Artificial Sequence
  Synthetic
guaaauuaaucaguagaagag

SEQ ID NO: 308660 - RNA, 22 nt, Artificial Sequence
  Synthetic
gguaaauuaaucaguagaagag

SEQ ID NO: 308661 - RNA, 23 nt, Artificial Sequence
  Synthetic
ggguaaauuaaucaguagaagag

SEQ ID NO: 308662 - RNA, 24 nt, Artificial Sequence
  Synthetic
gggguaaauuaaucaguagaagag

SEQ ID NO: 308663 - RNA, 18 nt, Artificial Sequence
  Synthetic
aauuucaacagcgaagag

SEQ ID NO: 308664 - RNA, 19 nt, Artificial Sequence
  Synthetic
gaauuucaacagcgaagag

SEQ ID NO: 308665 - RNA, 20 nt, Artificial Sequence
  Synthetic
agaauuucaacagcgaagag

SEQ ID NO: 308666 - RNA, 21 nt, Artificial Sequence
  Synthetic
uagaauuucaacagcgaagag

SEQ ID NO: 308667 - RNA, 22 nt, Artificial Sequence
  Synthetic
guagaauuucaacagcgaagag

SEQ ID NO: 308668 - RNA, 23 nt, Artificial Sequence
  Synthetic
uguagaauuucaacagcgaagag

SEQ ID NO: 308669 - RNA, 24 nt, Artificial Sequence
  Synthetic
guguagaauuucaacagcgaagag

SEQ ID NO: 308670 - RNA, 18 nt, Artificial Sequence
  Synthetic
uacacccacaaggaagag

SEQ ID NO: 308671 - RNA, 19 nt, Artificial Sequence
  Synthetic
auacacccacaaggaagag

SEQ ID NO: 308672 - RNA, 20 nt, Artificial Sequence
  Synthetic
gauacacccacaaggaagag

SEQ ID NO: 308673 - RNA, 21 nt, Artificial Sequence
  Synthetic
agauacacccacaaggaagag

SEQ ID NO: 308674 - RNA, 22 nt, Artificial Sequence
  Synthetic
gagauacacccacaaggaagag

SEQ ID NO: 308675 - RNA, 23 nt, Artificial Sequence
  Synthetic
ggagauacacccacaaggaagag

SEQ ID NO: 308676 - RNA, 24 nt, Artificial Sequence
  Synthetic
uggagauacacccacaaggaagag

SEQ ID NO: 308677 - RNA, 18 nt, Artificial Sequence
  Synthetic
gaaaaaaagaaggaagag

SEQ ID NO: 308678 - RNA, 19 nt, Artificial Sequence
  Synthetic
ggaaaaaaagaaggaagag

SEQ ID NO: 308679 - RNA, 20 nt, Artificial Sequence
  Synthetic
gggaaaaaaagaaggaagag

SEQ ID NO: 308680 - RNA, 21 nt, Artificial Sequence
  Synthetic
agggaaaaaaagaaggaagag

SEQ ID NO: 308681 - RNA, 22 nt, Artificial Sequence
  Synthetic
aagggaaaaaaagaaggaagag

SEQ ID NO: 308682 - RNA, 23 nt, Artificial Sequence
  Synthetic
aaagggaaaaaaagaaggaagag

SEQ ID NO: 308683 - RNA, 24 nt, Artificial Sequence
  Synthetic
gaaagggaaaaaaagaaggaagag

SEQ ID NO: 308684 - RNA, 18 nt, Artificial Sequence
  Synthetic
cagaaggcgaaggaagag

SEQ ID NO: 308685 - RNA, 19 nt, Artificial Sequence
  Synthetic
gcagaaggcgaaggaagag

SEQ ID NO: 308686 - RNA, 20 nt, Artificial Sequence
  Synthetic
ggcagaaggcgaaggaagag

SEQ ID NO: 308687 - RNA, 21 nt, Artificial Sequence
  Synthetic
uggcagaaggcgaaggaagag

SEQ ID NO: 308688 - RNA, 22 nt, Artificial Sequence
  Synthetic
auggcagaaggcgaaggaagag

SEQ ID NO: 308689 - RNA, 23 nt, Artificial Sequence
  Synthetic
cauggcagaaggcgaaggaagag

SEQ ID NO: 308690 - RNA, 24 nt, Artificial Sequence
  Synthetic
ucauggcagaaggcgaaggaagag

SEQ ID NO: 308691 - RNA, 18 nt, Artificial Sequence
  Synthetic
guauucaaauaggaagag

SEQ ID NO: 308692 - RNA, 19 nt, Artificial Sequence
  Synthetic
gguauucaaauaggaagag

SEQ ID NO: 308693 - RNA, 20 nt, Artificial Sequence
  Synthetic
ggguauucaaauaggaagag

SEQ ID NO: 308694 - RNA, 21 nt, Artificial Sequence
  Synthetic
aggguauucaaauaggaagag

SEQ ID NO: 308695 - RNA, 22 nt, Artificial Sequence
  Synthetic
aaggguauucaaauaggaagag

SEQ ID NO: 308696 - RNA, 23 nt, Artificial Sequence
  Synthetic
aaaggguauucaaauaggaagag

SEQ ID NO: 308697 - RNA, 24 nt, Artificial Sequence
  Synthetic
uaaaggguauucaaauaggaagag

SEQ ID NO: 308698 - RNA, 18 nt, Artificial Sequence
  Synthetic
ugaagagacugggaagag

SEQ ID NO: 308699 - RNA, 19 nt, Artificial Sequence
  Synthetic
augaagagacugggaagag

SEQ ID NO: 308700 - RNA, 20 nt, Artificial Sequence
  Synthetic
uaugaagagacugggaagag

SEQ ID NO: 308701 - RNA, 21 nt, Artificial Sequence
  Synthetic
cuaugaagagacugggaagag

SEQ ID NO: 308702 - RNA, 22 nt, Artificial Sequence
  Synthetic
acuaugaagagacugggaagag

SEQ ID NO: 308703 - RNA, 23 nt, Artificial Sequence
  Synthetic
gacuaugaagagacugggaagag

SEQ ID NO: 308704 - RNA, 24 nt, Artificial Sequence
  Synthetic
ggacuaugaagagacugggaagag

SEQ ID NO: 308705 - RNA, 18 nt, Artificial Sequence
  Synthetic
ucuauuaaaaaugaagag

SEQ ID NO: 308706 - RNA, 19 nt, Artificial Sequence
  Synthetic
gucuauuaaaaaugaagag

SEQ ID NO: 308707 - RNA, 20 nt, Artificial Sequence
  Synthetic
agucuauuaaaaaugaagag

SEQ ID NO: 308708 - RNA, 21 nt, Artificial Sequence
  Synthetic
aagucuauuaaaaaugaagag

SEQ ID NO: 308709 - RNA, 22 nt, Artificial Sequence
  Synthetic
caagucuauuaaaaaugaagag

SEQ ID NO: 308710 - RNA, 23 nt, Artificial Sequence
  Synthetic
ucaagucuauuaaaaaugaagag

SEQ ID NO: 308711 - RNA, 24 nt, Artificial Sequence
  Synthetic
aucaagucuauuaaaaaugaagag

SEQ ID NO: 308712 - RNA, 18 nt, Artificial Sequence
  Synthetic
ggguuuuaaaaugaagag

SEQ ID NO: 308713 - RNA, 19 nt, Artificial Sequence
  Synthetic
aggguuuuaaaaugaagag

SEQ ID NO: 308714 - RNA, 20 nt, Artificial Sequence
  Synthetic
aaggguuuuaaaaugaagag

SEQ ID NO: 308715 - RNA, 21 nt, Artificial Sequence
  Synthetic
aaaggguuuuaaaaugaagag

SEQ ID NO: 308716 - RNA, 22 nt, Artificial Sequence
  Synthetic
aaaaggguuuuaaaaugaagag

SEQ ID NO: 308717 - RNA, 23 nt, Artificial Sequence
  Synthetic
uaaaaggguuuuaaaaugaagag

SEQ ID NO: 308718 - RNA, 24 nt, Artificial Sequence
  Synthetic
uuaaaaggguuuuaaaaugaagag

SEQ ID NO: 308719 - RNA, 18 nt, Artificial Sequence
  Synthetic
auuccauuuccugaagag

SEQ ID NO: 308720 - RNA, 19 nt, Artificial Sequence
  Synthetic
cauuccauuuccugaagag

SEQ ID NO: 308721 - RNA, 20 nt, Artificial Sequence
  Synthetic
ucauuccauuuccugaagag

SEQ ID NO: 308722 - RNA, 21 nt, Artificial Sequence
  Synthetic
uucauuccauuuccugaagag

SEQ ID NO: 308723 - RNA, 22 nt, Artificial Sequence
  Synthetic
cuucauuccauuuccugaagag

SEQ ID NO: 308724 - RNA, 23 nt, Artificial Sequence
  Synthetic
acuucauuccauuuccugaagag

SEQ ID NO: 308725 - RNA, 24 nt, Artificial Sequence
  Synthetic
cacuucauuccauuuccugaagag

SEQ ID NO: 308726 - RNA, 18 nt, Artificial Sequence
  Synthetic
acaccuaaaucugaagag

SEQ ID NO: 308727 - RNA, 19 nt, Artificial Sequence
  Synthetic
gacaccuaaaucugaagag

SEQ ID NO: 308728 - RNA, 20 nt, Artificial Sequence
  Synthetic
ggacaccuaaaucugaagag

SEQ ID NO: 308729 - RNA, 21 nt, Artificial Sequence
  Synthetic
gggacaccuaaaucugaagag

SEQ ID NO: 308730 - RNA, 22 nt, Artificial Sequence
  Synthetic
agggacaccuaaaucugaagag

SEQ ID NO: 308731 - RNA, 23 nt, Artificial Sequence
  Synthetic
gagggacaccuaaaucugaagag

SEQ ID NO: 308732 - RNA, 24 nt, Artificial Sequence
  Synthetic
ggagggacaccuaaaucugaagag

SEQ ID NO: 308733 - RNA, 18 nt, Artificial Sequence
  Synthetic
gaaggcugaggugaagag

SEQ ID NO: 308734 - RNA, 19 nt, Artificial Sequence
  Synthetic
ugaaggcugaggugaagag

SEQ ID NO: 308735 - RNA, 20 nt, Artificial Sequence
  Synthetic
gugaaggcugaggugaagag

SEQ ID NO: 308736 - RNA, 21 nt, Artificial Sequence
  Synthetic
ugugaaggcugaggugaagag

SEQ ID NO: 308737 - RNA, 22 nt, Artificial Sequence
  Synthetic
uugugaaggcugaggugaagag

SEQ ID NO: 308738 - RNA, 23 nt, Artificial Sequence
  Synthetic
uuugugaaggcugaggugaagag

SEQ ID NO: 308739 - RNA, 24 nt, Artificial Sequence
  Synthetic
uuuugugaaggcugaggugaagag

SEQ ID NO: 308740 - RNA, 18 nt, Artificial Sequence
  Synthetic
agcaagaguggugaagag

SEQ ID NO: 308741 - RNA, 19 nt, Artificial Sequence
  Synthetic
uagcaagaguggugaagag

SEQ ID NO: 308742 - RNA, 20 nt, Artificial Sequence
  Synthetic
uuagcaagaguggugaagag

SEQ ID NO: 308743 - RNA, 21 nt, Artificial Sequence
  Synthetic
uuuagcaagaguggugaagag

SEQ ID NO: 308744 - RNA, 22 nt, Artificial Sequence
  Synthetic
uuuuagcaagaguggugaagag

SEQ ID NO: 308745 - RNA, 23 nt, Artificial Sequence
  Synthetic
auuuuagcaagaguggugaagag

SEQ ID NO: 308746 - RNA, 24 nt, Artificial Sequence
  Synthetic
uauuuuagcaagaguggugaagag

SEQ ID NO: 308747 - RNA, 18 nt, Artificial Sequence
  Synthetic
ccuaucuggaaauaagag

SEQ ID NO: 308748 - RNA, 19 nt, Artificial Sequence
  Synthetic
accuaucuggaaauaagag

SEQ ID NO: 308749 - RNA, 20 nt, Artificial Sequence
  Synthetic
uaccuaucuggaaauaagag

SEQ ID NO: 308750 - RNA, 21 nt, Artificial Sequence
  Synthetic
uuaccuaucuggaaauaagag

SEQ ID NO: 308751 - RNA, 22 nt, Artificial Sequence
  Synthetic
uuuaccuaucuggaaauaagag

SEQ ID NO: 308752 - RNA, 23 nt, Artificial Sequence
  Synthetic
auuuaccuaucuggaaauaagag

SEQ ID NO: 308753 - RNA, 24 nt, Artificial Sequence
  Synthetic
cauuuaccuaucuggaaauaagag

SEQ ID NO: 308754 - RNA, 18 nt, Artificial Sequence
  Synthetic
uguauauucacauaagag

SEQ ID NO: 308755 - RNA, 19 nt, Artificial Sequence
  Synthetic
cuguauauucacauaagag

SEQ ID NO: 308756 - RNA, 20 nt, Artificial Sequence
  Synthetic
ucuguauauucacauaagag

SEQ ID NO: 308757 - RNA, 21 nt, Artificial Sequence
  Synthetic
gucuguauauucacauaagag

SEQ ID NO: 308758 - RNA, 22 nt, Artificial Sequence
  Synthetic
ugucuguauauucacauaagag

SEQ ID NO: 308759 - RNA, 23 nt, Artificial Sequence
  Synthetic
uugucuguauauucacauaagag

SEQ ID NO: 308760 - RNA, 24 nt, Artificial Sequence
  Synthetic
auugucuguauauucacauaagag

SEQ ID NO: 308761 - RNA, 18 nt, Artificial Sequence
  Synthetic
auucugccaauauaagag

SEQ ID NO: 308762 - RNA, 19 nt, Artificial Sequence
  Synthetic
aauucugccaauauaagag

SEQ ID NO: 308763 - RNA, 20 nt, Artificial Sequence
  Synthetic
aaauucugccaauauaagag

SEQ ID NO: 308764 - RNA, 21 nt, Artificial Sequence
  Synthetic
uaaauucugccaauauaagag

SEQ ID NO: 308765 - RNA, 22 nt, Artificial Sequence
  Synthetic
cuaaauucugccaauauaagag

SEQ ID NO: 308766 - RNA, 23 nt, Artificial Sequence
  Synthetic
acuaaauucugccaauauaagag

SEQ ID NO: 308767 - RNA, 24 nt, Artificial Sequence
  Synthetic
uacuaaauucugccaauauaagag

SEQ ID NO: 308768 - RNA, 18 nt, Artificial Sequence
  Synthetic
cacccuauuguauaagag

SEQ ID NO: 308769 - RNA, 19 nt, Artificial Sequence
  Synthetic
ucacccuauuguauaagag

SEQ ID NO: 308770 - RNA, 20 nt, Artificial Sequence
  Synthetic
uucacccuauuguauaagag

SEQ ID NO: 308771 - RNA, 21 nt, Artificial Sequence
  Synthetic
guucacccuauuguauaagag

SEQ ID NO: 308772 - RNA, 22 nt, Artificial Sequence
  Synthetic
uguucacccuauuguauaagag

SEQ ID NO: 308773 - RNA, 23 nt, Artificial Sequence
  Synthetic
cuguucacccuauuguauaagag

SEQ ID NO: 308774 - RNA, 24 nt, Artificial Sequence
  Synthetic
acuguucacccuauuguauaagag

SEQ ID NO: 308775 - RNA, 18 nt, Artificial Sequence
  Synthetic
cagauuuugaacuaagag

SEQ ID NO: 308776 - RNA, 19 nt, Artificial Sequence
  Synthetic
acagauuuugaacuaagag

SEQ ID NO: 308777 - RNA, 20 nt, Artificial Sequence
  Synthetic
aacagauuuugaacuaagag

SEQ ID NO: 308778 - RNA, 21 nt, Artificial Sequence
  Synthetic
aaacagauuuugaacuaagag

SEQ ID NO: 308779 - RNA, 22 nt, Artificial Sequence
  Synthetic
aaaacagauuuugaacuaagag

SEQ ID NO: 308780 - RNA, 23 nt, Artificial Sequence
  Synthetic
caaaacagauuuugaacuaagag

SEQ ID NO: 308781 - RNA, 24 nt, Artificial Sequence
  Synthetic
ccaaaacagauuuugaacuaagag

SEQ ID NO: 308782 - RNA, 18 nt, Artificial Sequence
  Synthetic
uguaggagccacuaagag

SEQ ID NO: 308783 - RNA, 19 nt, Artificial Sequence
  Synthetic
uuguaggagccacuaagag

SEQ ID NO: 308784 - RNA, 20 nt, Artificial Sequence
  Synthetic
cuuguaggagccacuaagag

SEQ ID NO: 308785 - RNA, 21 nt, Artificial Sequence
  Synthetic
ccuuguaggagccacuaagag

SEQ ID NO: 308786 - RNA, 22 nt, Artificial Sequence
  Synthetic
cccuuguaggagccacuaagag

SEQ ID NO: 308787 - RNA, 23 nt, Artificial Sequence
  Synthetic
ucccuuguaggagccacuaagag

SEQ ID NO: 308788 - RNA, 24 nt, Artificial Sequence
  Synthetic
aucccuuguaggagccacuaagag

SEQ ID NO: 308789 - RNA, 18 nt, Artificial Sequence
  Synthetic
aaggccugccucuaagag

SEQ ID NO: 308790 - RNA, 19 nt, Artificial Sequence
  Synthetic
gaaggccugccucuaagag

SEQ ID NO: 308791 - RNA, 20 nt, Artificial Sequence
  Synthetic
agaaggccugccucuaagag

SEQ ID NO: 308792 - RNA, 21 nt, Artificial Sequence
  Synthetic
gagaaggccugccucuaagag

SEQ ID NO: 308793 - RNA, 22 nt, Artificial Sequence
  Synthetic
agagaaggccugccucuaagag

SEQ ID NO: 308794 - RNA, 23 nt, Artificial Sequence
  Synthetic
aagagaaggccugccucuaagag

SEQ ID NO: 308795 - RNA, 24 nt, Artificial Sequence
  Synthetic
uaagagaaggccugccucuaagag

SEQ ID NO: 308796 - RNA, 18 nt, Artificial Sequence
  Synthetic
auaaggaacuaguaagag

SEQ ID NO: 308797 - RNA, 19 nt, Artificial Sequence
  Synthetic
gauaaggaacuaguaagag

SEQ ID NO: 308798 - RNA, 20 nt, Artificial Sequence
  Synthetic
ggauaaggaacuaguaagag

SEQ ID NO: 308799 - RNA, 21 nt, Artificial Sequence
  Synthetic
aggauaaggaacuaguaagag

SEQ ID NO: 308800 - RNA, 22 nt, Artificial Sequence
  Synthetic
caggauaaggaacuaguaagag

SEQ ID NO: 308801 - RNA, 23 nt, Artificial Sequence
  Synthetic
ucaggauaaggaacuaguaagag

SEQ ID NO: 308802 - RNA, 24 nt, Artificial Sequence
  Synthetic
gucaggauaaggaacuaguaagag

SEQ ID NO: 308803 - RNA, 18 nt, Artificial Sequence
  Synthetic
auaauuauccauuaagag

SEQ ID NO: 308804 - RNA, 19 nt, Artificial Sequence
  Synthetic
cauaauuauccauuaagag

SEQ ID NO: 308805 - RNA, 20 nt, Artificial Sequence
  Synthetic
acauaauuauccauuaagag

SEQ ID NO: 308806 - RNA, 21 nt, Artificial Sequence
  Synthetic
aacauaauuauccauuaagag

SEQ ID NO: 308807 - RNA, 22 nt, Artificial Sequence
  Synthetic
aaacauaauuauccauuaagag

SEQ ID NO: 308808 - RNA, 23 nt, Artificial Sequence
  Synthetic
uaaacauaauuauccauuaagag

SEQ ID NO: 308809 - RNA, 24 nt, Artificial Sequence
  Synthetic
uuaaacauaauuauccauuaagag

SEQ ID NO: 308810 - RNA, 18 nt, Artificial Sequence
  Synthetic
uugggauaucauuaagag

SEQ ID NO: 308811 - RNA, 19 nt, Artificial Sequence
  Synthetic
cuugggauaucauuaagag

SEQ ID NO: 308812 - RNA, 20 nt, Artificial Sequence
  Synthetic
ccuugggauaucauuaagag

SEQ ID NO: 308813 - RNA, 21 nt, Artificial Sequence
  Synthetic
uccuugggauaucauuaagag

SEQ ID NO: 308814 - RNA, 22 nt, Artificial Sequence
  Synthetic
cuccuugggauaucauuaagag

SEQ ID NO: 308815 - RNA, 23 nt, Artificial Sequence
  Synthetic
ucuccuugggauaucauuaagag

SEQ ID NO: 308816 - RNA, 24 nt, Artificial Sequence
  Synthetic
gucuccuugggauaucauuaagag

SEQ ID NO: 308817 - RNA, 18 nt, Artificial Sequence
  Synthetic
auuacaugagauuaagag

SEQ ID NO: 308818 - RNA, 19 nt, Artificial Sequence
  Synthetic
aauuacaugagauuaagag

SEQ ID NO: 308819 - RNA, 20 nt, Artificial Sequence
  Synthetic
uaauuacaugagauuaagag

SEQ ID NO: 308820 - RNA, 21 nt, Artificial Sequence
  Synthetic
cuaauuacaugagauuaagag

SEQ ID NO: 308821 - RNA, 22 nt, Artificial Sequence
  Synthetic
ccuaauuacaugagauuaagag

SEQ ID NO: 308822 - RNA, 23 nt, Artificial Sequence
  Synthetic
cccuaauuacaugagauuaagag

SEQ ID NO: 308823 - RNA, 24 nt, Artificial Sequence
  Synthetic
acccuaauuacaugagauuaagag

SEQ ID NO: 308824 - RNA, 18 nt, Artificial Sequence
  Synthetic
gggcagccauauuaagag

SEQ ID NO: 308825 - RNA, 19 nt, Artificial Sequence
  Synthetic
agggcagccauauuaagag

SEQ ID NO: 308826 - RNA, 20 nt, Artificial Sequence
  Synthetic
cagggcagccauauuaagag

SEQ ID NO: 308827 - RNA, 21 nt, Artificial Sequence
  Synthetic
gcagggcagccauauuaagag

SEQ ID NO: 308828 - RNA, 22 nt, Artificial Sequence
  Synthetic
ugcagggcagccauauuaagag

SEQ ID NO: 308829 - RNA, 23 nt, Artificial Sequence
  Synthetic
cugcagggcagccauauuaagag

SEQ ID NO: 308830 - RNA, 24 nt, Artificial Sequence
  Synthetic
acugcagggcagccauauuaagag

SEQ ID NO: 308831 - RNA, 18 nt, Artificial Sequence
  Synthetic
uauagguauaguuaagag

SEQ ID NO: 308832 - RNA, 19 nt, Artificial Sequence
  Synthetic
uuauagguauaguuaagag

SEQ ID NO: 308833 - RNA, 20 nt, Artificial Sequence
  Synthetic
auuauagguauaguuaagag

SEQ ID NO: 308834 - RNA, 21 nt, Artificial Sequence
  Synthetic
gauuauagguauaguuaagag

SEQ ID NO: 308835 - RNA, 22 nt, Artificial Sequence
  Synthetic
ggauuauagguauaguuaagag

SEQ ID NO: 308836 - RNA, 23 nt, Artificial Sequence
  Synthetic
aggauuauagguauaguuaagag

SEQ ID NO: 308837 - RNA, 24 nt, Artificial Sequence
  Synthetic
aaggauuauagguauaguuaagag

SEQ ID NO: 308838 - RNA, 18 nt, Artificial Sequence
  Synthetic
agacaaauacaaacagag

SEQ ID NO: 308839 - RNA, 19 nt, Artificial Sequence
  Synthetic
aagacaaauacaaacagag

SEQ ID NO: 308840 - RNA, 20 nt, Artificial Sequence
  Synthetic
uaagacaaauacaaacagag

SEQ ID NO: 308841 - RNA, 21 nt, Artificial Sequence
  Synthetic
auaagacaaauacaaacagag

SEQ ID NO: 308842 - RNA, 22 nt, Artificial Sequence
  Synthetic
aauaagacaaauacaaacagag

SEQ ID NO: 308843 - RNA, 23 nt, Artificial Sequence
  Synthetic
uaauaagacaaauacaaacagag

SEQ ID NO: 308844 - RNA, 24 nt, Artificial Sequence
  Synthetic
cuaauaagacaaauacaaacagag

SEQ ID NO: 308845 - RNA, 18 nt, Artificial Sequence
  Synthetic
caacuucuucaaacagag

SEQ ID NO: 308846 - RNA, 19 nt, Artificial Sequence
  Synthetic
ucaacuucuucaaacagag

SEQ ID NO: 308847 - RNA, 20 nt, Artificial Sequence
  Synthetic
gucaacuucuucaaacagag

SEQ ID NO: 308848 - RNA, 21 nt, Artificial Sequence
  Synthetic
ggucaacuucuucaaacagag

SEQ ID NO: 308849 - RNA, 22 nt, Artificial Sequence
  Synthetic
aggucaacuucuucaaacagag

SEQ ID NO: 308850 - RNA, 23 nt, Artificial Sequence
  Synthetic
caggucaacuucuucaaacagag

SEQ ID NO: 308851 - RNA, 24 nt, Artificial Sequence
  Synthetic
acaggucaacuucuucaaacagag

SEQ ID NO: 308852 - RNA, 18 nt, Artificial Sequence
  Synthetic
cuaaaaugggaaacagag

SEQ ID NO: 308853 - RNA, 19 nt, Artificial Sequence
  Synthetic
ccuaaaaugggaaacagag

SEQ ID NO: 308854 - RNA, 20 nt, Artificial Sequence
  Synthetic
gccuaaaaugggaaacagag

SEQ ID NO: 308855 - RNA, 21 nt, Artificial Sequence
  Synthetic
agccuaaaaugggaaacagag

SEQ ID NO: 308856 - RNA, 22 nt, Artificial Sequence
  Synthetic
uagccuaaaaugggaaacagag

SEQ ID NO: 308857 - RNA, 23 nt, Artificial Sequence
  Synthetic
auagccuaaaaugggaaacagag

SEQ ID NO: 308858 - RNA, 24 nt, Artificial Sequence
  Synthetic
cauagccuaaaaugggaaacagag

SEQ ID NO: 308859 - RNA, 18 nt, Artificial Sequence
  Synthetic
uauuccuaguaaacagag

SEQ ID NO: 308860 - RNA, 19 nt, Artificial Sequence
  Synthetic
auauuccuaguaaacagag

SEQ ID NO: 308861 - RNA, 20 nt, Artificial Sequence
  Synthetic
cauauuccuaguaaacagag

SEQ ID NO: 308862 - RNA, 21 nt, Artificial Sequence
  Synthetic
ccauauuccuaguaaacagag

SEQ ID NO: 308863 - RNA, 22 nt, Artificial Sequence
  Synthetic
uccauauuccuaguaaacagag

SEQ ID NO: 308864 - RNA, 23 nt, Artificial Sequence
  Synthetic
auccauauuccuaguaaacagag

SEQ ID NO: 308865 - RNA, 24 nt, Artificial Sequence
  Synthetic
gauccauauuccuaguaaacagag

SEQ ID NO: 308866 - RNA, 18 nt, Artificial Sequence
  Synthetic
aaauuaucaccaacagag

SEQ ID NO: 308867 - RNA, 19 nt, Artificial Sequence
  Synthetic
aaaauuaucaccaacagag

SEQ ID NO: 308868 - RNA, 20 nt, Artificial Sequence
  Synthetic
caaaauuaucaccaacagag

SEQ ID NO: 308869 - RNA, 21 nt, Artificial Sequence
  Synthetic
gcaaaauuaucaccaacagag

SEQ ID NO: 308870 - RNA, 22 nt, Artificial Sequence
  Synthetic
ggcaaaauuaucaccaacagag

SEQ ID NO: 308871 - RNA, 23 nt, Artificial Sequence
  Synthetic
gggcaaaauuaucaccaacagag

SEQ ID NO: 308872 - RNA, 24 nt, Artificial Sequence
  Synthetic
ugggcaaaauuaucaccaacagag

SEQ ID NO: 308873 - RNA, 18 nt, Artificial Sequence
  Synthetic
uacaguuucauaacagag

SEQ ID NO: 308874 - RNA, 19 nt, Artificial Sequence
  Synthetic
uuacaguuucauaacagag

SEQ ID NO: 308875 - RNA, 20 nt, Artificial Sequence
  Synthetic
cuuacaguuucauaacagag

SEQ ID NO: 308876 - RNA, 21 nt, Artificial Sequence
  Synthetic
ccuuacaguuucauaacagag

SEQ ID NO: 308877 - RNA, 22 nt, Artificial Sequence
  Synthetic
gccuuacaguuucauaacagag

SEQ ID NO: 308878 - RNA, 23 nt, Artificial Sequence
  Synthetic
cgccuuacaguuucauaacagag

SEQ ID NO: 308879 - RNA, 24 nt, Artificial Sequence
  Synthetic
ucgccuuacaguuucauaacagag

SEQ ID NO: 308880 - RNA, 18 nt, Artificial Sequence
  Synthetic
gaaagguuuuacacagag

SEQ ID NO: 308881 - RNA, 19 nt, Artificial Sequence
  Synthetic
ugaaagguuuuacacagag

SEQ ID NO: 308882 - RNA, 20 nt, Artificial Sequence
  Synthetic
uugaaagguuuuacacagag

SEQ ID NO: 308883 - RNA, 21 nt, Artificial Sequence
  Synthetic
auugaaagguuuuacacagag

SEQ ID NO: 308884 - RNA, 22 nt, Artificial Sequence
  Synthetic
cauugaaagguuuuacacagag

SEQ ID NO: 308885 - RNA, 23 nt, Artificial Sequence
  Synthetic
ccauugaaagguuuuacacagag

SEQ ID NO: 308886 - RNA, 24 nt, Artificial Sequence
  Synthetic
accauugaaagguuuuacacagag

SEQ ID NO: 308887 - RNA, 18 nt, Artificial Sequence
  Synthetic
guacaauacaccacagag

SEQ ID NO: 308888 - RNA, 19 nt, Artificial Sequence
  Synthetic
aguacaauacaccacagag

SEQ ID NO: 308889 - RNA, 20 nt, Artificial Sequence
  Synthetic
caguacaauacaccacagag

SEQ ID NO: 308890 - RNA, 21 nt, Artificial Sequence
  Synthetic
ucaguacaauacaccacagag

SEQ ID NO: 308891 - RNA, 22 nt, Artificial Sequence
  Synthetic
uucaguacaauacaccacagag

SEQ ID NO: 308892 - RNA, 23 nt, Artificial Sequence
  Synthetic
uuucaguacaauacaccacagag

SEQ ID NO: 308893 - RNA, 24 nt, Artificial Sequence
  Synthetic
uuuucaguacaauacaccacagag

SEQ ID NO: 308894 - RNA, 18 nt, Artificial Sequence
  Synthetic
aauugaaugaccacagag

SEQ ID NO: 308895 - RNA, 19 nt, Artificial Sequence
  Synthetic
gaauugaaugaccacagag

SEQ ID NO: 308896 - RNA, 20 nt, Artificial Sequence
  Synthetic
ugaauugaaugaccacagag

SEQ ID NO: 308897 - RNA, 21 nt, Artificial Sequence
  Synthetic
cugaauugaaugaccacagag

SEQ ID NO: 308898 - RNA, 22 nt, Artificial Sequence
  Synthetic
gcugaauugaaugaccacagag

SEQ ID NO: 308899 - RNA, 23 nt, Artificial Sequence
  Synthetic
ggcugaauugaaugaccacagag

SEQ ID NO: 308900 - RNA, 24 nt, Artificial Sequence
  Synthetic
uggcugaauugaaugaccacagag

SEQ ID NO: 308901 - RNA, 18 nt, Artificial Sequence
  Synthetic
uuuccuucuuccacagag

SEQ ID NO: 308902 - RNA, 19 nt, Artificial Sequence
  Synthetic
auuuccuucuuccacagag

SEQ ID NO: 308903 - RNA, 20 nt, Artificial Sequence
  Synthetic
uauuuccuucuuccacagag

SEQ ID NO: 308904 - RNA, 21 nt, Artificial Sequence
  Synthetic
cuauuuccuucuuccacagag

SEQ ID NO: 308905 - RNA, 22 nt, Artificial Sequence
  Synthetic
acuauuuccuucuuccacagag

SEQ ID NO: 308906 - RNA, 23 nt, Artificial Sequence
  Synthetic
aacuauuuccuucuuccacagag

SEQ ID NO: 308907 - RNA, 24 nt, Artificial Sequence
  Synthetic
aaacuauuuccuucuuccacagag

SEQ ID NO: 308908 - RNA, 18 nt, Artificial Sequence
  Synthetic
gaccauagaaucacagag

SEQ ID NO: 308909 - RNA, 19 nt, Artificial Sequence
  Synthetic
agaccauagaaucacagag

SEQ ID NO: 308910 - RNA, 20 nt, Artificial Sequence
  Synthetic
gagaccauagaaucacagag

SEQ ID NO: 308911 - RNA, 21 nt, Artificial Sequence
  Synthetic
agagaccauagaaucacagag

SEQ ID NO: 308912 - RNA, 22 nt, Artificial Sequence
  Synthetic
cagagaccauagaaucacagag

SEQ ID NO: 308913 - RNA, 23 nt, Artificial Sequence
  Synthetic
ccagagaccauagaaucacagag

SEQ ID NO: 308914 - RNA, 24 nt, Artificial Sequence
  Synthetic
uccagagaccauagaaucacagag

SEQ ID NO: 308915 - RNA, 18 nt, Artificial Sequence
  Synthetic
uaucccuauuucacagag

SEQ ID NO: 308916 - RNA, 19 nt, Artificial Sequence
  Synthetic
guaucccuauuucacagag

SEQ ID NO: 308917 - RNA, 20 nt, Artificial Sequence
  Synthetic
aguaucccuauuucacagag

SEQ ID NO: 308918 - RNA, 21 nt, Artificial Sequence
  Synthetic
uaguaucccuauuucacagag

SEQ ID NO: 308919 - RNA, 22 nt, Artificial Sequence
  Synthetic
guaguaucccuauuucacagag

SEQ ID NO: 308920 - RNA, 23 nt, Artificial Sequence
  Synthetic
aguaguaucccuauuucacagag

SEQ ID NO: 308921 - RNA, 24 nt, Artificial Sequence
  Synthetic
uaguaguaucccuauuucacagag

SEQ ID NO: 308922 - RNA, 18 nt, Artificial Sequence
  Synthetic
cauugcuaaaagacagag

SEQ ID NO: 308923 - RNA, 19 nt, Artificial Sequence
  Synthetic
acauugcuaaaagacagag

SEQ ID NO: 308924 - RNA, 20 nt, Artificial Sequence
  Synthetic
aacauugcuaaaagacagag

SEQ ID NO: 308925 - RNA, 21 nt, Artificial Sequence
  Synthetic
caacauugcuaaaagacagag

SEQ ID NO: 308926 - RNA, 22 nt, Artificial Sequence
  Synthetic
gcaacauugcuaaaagacagag

SEQ ID NO: 308927 - RNA, 23 nt, Artificial Sequence
  Synthetic
ggcaacauugcuaaaagacagag

SEQ ID NO: 308928 - RNA, 24 nt, Artificial Sequence
  Synthetic
aggcaacauugcuaaaagacagag

SEQ ID NO: 308929 - RNA, 18 nt, Artificial Sequence
  Synthetic
aaaagagaauagacagag

SEQ ID NO: 308930 - RNA, 19 nt, Artificial Sequence
  Synthetic
uaaaagagaauagacagag

SEQ ID NO: 308931 - RNA, 20 nt, Artificial Sequence
  Synthetic
uuaaaagagaauagacagag

SEQ ID NO: 308932 - RNA, 21 nt, Artificial Sequence
  Synthetic
uuuaaaagagaauagacagag

SEQ ID NO: 308933 - RNA, 22 nt, Artificial Sequence
  Synthetic
auuuaaaagagaauagacagag

SEQ ID NO: 308934 - RNA, 23 nt, Artificial Sequence
  Synthetic
aauuuaaaagagaauagacagag

SEQ ID NO: 308935 - RNA, 24 nt, Artificial Sequence
  Synthetic
gaauuuaaaagagaauagacagag

SEQ ID NO: 308936 - RNA, 18 nt, Artificial Sequence
  Synthetic
gauggauuauggacagag

SEQ ID NO: 308937 - RNA, 19 nt, Artificial Sequence
  Synthetic
ggauggauuauggacagag

SEQ ID NO: 308938 - RNA, 20 nt, Artificial Sequence
  Synthetic
gggauggauuauggacagag

SEQ ID NO: 308939 - RNA, 21 nt, Artificial Sequence
  Synthetic
ugggauggauuauggacagag

SEQ ID NO: 308940 - RNA, 22 nt, Artificial Sequence
  Synthetic
augggauggauuauggacagag

SEQ ID NO: 308941 - RNA, 23 nt, Artificial Sequence
  Synthetic
aaugggauggauuauggacagag

SEQ ID NO: 308942 - RNA, 24 nt, Artificial Sequence
  Synthetic
aaaugggauggauuauggacagag

SEQ ID NO: 308943 - RNA, 18 nt, Artificial Sequence
  Synthetic
caauuuuucaauacagag

SEQ ID NO: 308944 - RNA, 19 nt, Artificial Sequence
  Synthetic
ccaauuuuucaauacagag

SEQ ID NO: 308945 - RNA, 20 nt, Artificial Sequence
  Synthetic
uccaauuuuucaauacagag

SEQ ID NO: 308946 - RNA, 21 nt, Artificial Sequence
  Synthetic
cuccaauuuuucaauacagag

SEQ ID NO: 308947 - RNA, 22 nt, Artificial Sequence
  Synthetic
ccuccaauuuuucaauacagag

SEQ ID NO: 308948 - RNA, 23 nt, Artificial Sequence
  Synthetic
cccuccaauuuuucaauacagag

SEQ ID NO: 308949 - RNA, 24 nt, Artificial Sequence
  Synthetic
ccccuccaauuuuucaauacagag

SEQ ID NO: 308950 - RNA, 18 nt, Artificial Sequence
  Synthetic
agaaagcaguauacagag

SEQ ID NO: 308951 - RNA, 19 nt, Artificial Sequence
  Synthetic
aagaaagcaguauacagag

SEQ ID NO: 308952 - RNA, 20 nt, Artificial Sequence
  Synthetic
aaagaaagcaguauacagag

SEQ ID NO: 308953 - RNA, 21 nt, Artificial Sequence
  Synthetic
uaaagaaagcaguauacagag

SEQ ID NO: 308954 - RNA, 22 nt, Artificial Sequence
  Synthetic
cuaaagaaagcaguauacagag

SEQ ID NO: 308955 - RNA, 23 nt, Artificial Sequence
  Synthetic
acuaaagaaagcaguauacagag

SEQ ID NO: 308956 - RNA, 24 nt, Artificial Sequence
  Synthetic
uacuaaagaaagcaguauacagag

SEQ ID NO: 308957 - RNA, 18 nt, Artificial Sequence
  Synthetic
cuuguuaguuauacagag

SEQ ID NO: 308958 - RNA, 19 nt, Artificial Sequence
  Synthetic
ucuuguuaguuauacagag

SEQ ID NO: 308959 - RNA, 20 nt, Artificial Sequence
  Synthetic
uucuuguuaguuauacagag

SEQ ID NO: 308960 - RNA, 21 nt, Artificial Sequence
  Synthetic
uuucuuguuaguuauacagag

SEQ ID NO: 308961 - RNA, 22 nt, Artificial Sequence
  Synthetic
uuuucuuguuaguuauacagag

SEQ ID NO: 308962 - RNA, 23 nt, Artificial Sequence
  Synthetic
uuuuucuuguuaguuauacagag

SEQ ID NO: 308963 - RNA, 24 nt, Artificial Sequence
  Synthetic
auuuuucuuguuaguuauacagag

SEQ ID NO: 308964 - RNA, 18 nt, Artificial Sequence
  Synthetic
augaguagaacuacagag

SEQ ID NO: 308965 - RNA, 19 nt, Artificial Sequence
  Synthetic
caugaguagaacuacagag

SEQ ID NO: 308966 - RNA, 20 nt, Artificial Sequence
  Synthetic
acaugaguagaacuacagag

SEQ ID NO: 308967 - RNA, 21 nt, Artificial Sequence
  Synthetic
aacaugaguagaacuacagag

SEQ ID NO: 308968 - RNA, 22 nt, Artificial Sequence
  Synthetic
gaacaugaguagaacuacagag

SEQ ID NO: 308969 - RNA, 23 nt, Artificial Sequence
  Synthetic
agaacaugaguagaacuacagag

SEQ ID NO: 308970 - RNA, 24 nt, Artificial Sequence
  Synthetic
cagaacaugaguagaacuacagag

SEQ ID NO: 308971 - RNA, 18 nt, Artificial Sequence
  Synthetic
gcaagacucaguacagag

SEQ ID NO: 308972 - RNA, 19 nt, Artificial Sequence
  Synthetic
agcaagacucaguacagag

SEQ ID NO: 308973 - RNA, 20 nt, Artificial Sequence
  Synthetic
gagcaagacucaguacagag

SEQ ID NO: 308974 - RNA, 21 nt, Artificial Sequence
  Synthetic
cgagcaagacucaguacagag

SEQ ID NO: 308975 - RNA, 22 nt, Artificial Sequence
  Synthetic
acgagcaagacucaguacagag

SEQ ID NO: 308976 - RNA, 23 nt, Artificial Sequence
  Synthetic
uacgagcaagacucaguacagag

SEQ ID NO: 308977 - RNA, 24 nt, Artificial Sequence
  Synthetic
uuacgagcaagacucaguacagag

SEQ ID NO: 308978 - RNA, 18 nt, Artificial Sequence
  Synthetic
aacaagagagguacagag

SEQ ID NO: 308979 - RNA, 19 nt, Artificial Sequence
  Synthetic
caacaagagagguacagag

SEQ ID NO: 308980 - RNA, 20 nt, Artificial Sequence
  Synthetic
ccaacaagagagguacagag

SEQ ID NO: 308981 - RNA, 21 nt, Artificial Sequence
  Synthetic
cccaacaagagagguacagag

SEQ ID NO: 308982 - RNA, 22 nt, Artificial Sequence
  Synthetic
ucccaacaagagagguacagag

SEQ ID NO: 308983 - RNA, 23 nt, Artificial Sequence
  Synthetic
uucccaacaagagagguacagag

SEQ ID NO: 308984 - RNA, 24 nt, Artificial Sequence
  Synthetic
uuucccaacaagagagguacagag

SEQ ID NO: 308985 - RNA, 18 nt, Artificial Sequence
  Synthetic
ucaccauaaagcccagag

SEQ ID NO: 308986 - RNA, 19 nt, Artificial Sequence
  Synthetic
aucaccauaaagcccagag

SEQ ID NO: 308987 - RNA, 20 nt, Artificial Sequence
  Synthetic
aaucaccauaaagcccagag

SEQ ID NO: 308988 - RNA, 21 nt, Artificial Sequence
  Synthetic
aaaucaccauaaagcccagag

SEQ ID NO: 308989 - RNA, 22 nt, Artificial Sequence
  Synthetic
aaaaucaccauaaagcccagag

SEQ ID NO: 308990 - RNA, 23 nt, Artificial Sequence
  Synthetic
aaaaaucaccauaaagcccagag

SEQ ID NO: 308991 - RNA, 24 nt, Artificial Sequence
  Synthetic
uaaaaaucaccauaaagcccagag

SEQ ID NO: 308992 - RNA, 18 nt, Artificial Sequence
  Synthetic
gccuaccugagcccagag

SEQ ID NO: 308993 - RNA, 19 nt, Artificial Sequence
  Synthetic
agccuaccugagcccagag

SEQ ID NO: 308994 - RNA, 20 nt, Artificial Sequence
  Synthetic
cagccuaccugagcccagag

SEQ ID NO: 308995 - RNA, 21 nt, Artificial Sequence
  Synthetic
ccagccuaccugagcccagag

SEQ ID NO: 308996 - RNA, 22 nt, Artificial Sequence
  Synthetic
gccagccuaccugagcccagag

SEQ ID NO: 308997 - RNA, 23 nt, Artificial Sequence
  Synthetic
agccagccuaccugagcccagag

SEQ ID NO: 308998 - RNA, 24 nt, Artificial Sequence
  Synthetic
uagccagccuaccugagcccagag

SEQ ID NO: 308999 - RNA, 18 nt, Artificial Sequence
  Synthetic
cagacagagaagccagag

SEQ ID NO: 309000 - RNA, 19 nt, Artificial Sequence
  Synthetic
ccagacagagaagccagag

SEQ ID NO: 309001 - RNA, 20 nt, Artificial Sequence
  Synthetic
accagacagagaagccagag

SEQ ID NO: 309002 - RNA, 21 nt, Artificial Sequence
  Synthetic
caccagacagagaagccagag

SEQ ID NO: 309003 - RNA, 22 nt, Artificial Sequence
  Synthetic
acaccagacagagaagccagag

SEQ ID NO: 309004 - RNA, 23 nt, Artificial Sequence
  Synthetic
aacaccagacagagaagccagag

SEQ ID NO: 309005 - RNA, 24 nt, Artificial Sequence
  Synthetic
uaacaccagacagagaagccagag

SEQ ID NO: 309006 - RNA, 18 nt, Artificial Sequence
  Synthetic
acagggaaaaggccagag

SEQ ID NO: 309007 - RNA, 19 nt, Artificial Sequence
  Synthetic
uacagggaaaaggccagag

SEQ ID NO: 309008 - RNA, 20 nt, Artificial Sequence
  Synthetic
uuacagggaaaaggccagag

SEQ ID NO: 309009 - RNA, 21 nt, Artificial Sequence
  Synthetic
cuuacagggaaaaggccagag

SEQ ID NO: 309010 - RNA, 22 nt, Artificial Sequence
  Synthetic
acuuacagggaaaaggccagag

SEQ ID NO: 309011 - RNA, 23 nt, Artificial Sequence
  Synthetic
uacuuacagggaaaaggccagag

SEQ ID NO: 309012 - RNA, 24 nt, Artificial Sequence
  Synthetic
auacuuacagggaaaaggccagag

SEQ ID NO: 309013 - RNA, 18 nt, Artificial Sequence
  Synthetic
caugucacauggccagag

SEQ ID NO: 309014 - RNA, 19 nt, Artificial Sequence
  Synthetic
gcaugucacauggccagag

SEQ ID NO: 309015 - RNA, 20 nt, Artificial Sequence
  Synthetic
agcaugucacauggccagag

SEQ ID NO: 309016 - RNA, 21 nt, Artificial Sequence
  Synthetic
aagcaugucacauggccagag

SEQ ID NO: 309017 - RNA, 22 nt, Artificial Sequence
  Synthetic
uaagcaugucacauggccagag

SEQ ID NO: 309018 - RNA, 23 nt, Artificial Sequence
  Synthetic
guaagcaugucacauggccagag

SEQ ID NO: 309019 - RNA, 24 nt, Artificial Sequence
  Synthetic
aguaagcaugucacauggccagag

SEQ ID NO: 309020 - RNA, 18 nt, Artificial Sequence
  Synthetic
gagguucacauuccagag

SEQ ID NO: 309021 - RNA, 19 nt, Artificial Sequence
  Synthetic
agagguucacauuccagag

SEQ ID NO: 309022 - RNA, 20 nt, Artificial Sequence
  Synthetic
gagagguucacauuccagag

SEQ ID NO: 309023 - RNA, 21 nt, Artificial Sequence
  Synthetic
ugagagguucacauuccagag

SEQ ID NO: 309024 - RNA, 22 nt, Artificial Sequence
  Synthetic
uugagagguucacauuccagag

SEQ ID NO: 309025 - RNA, 23 nt, Artificial Sequence
  Synthetic
uuugagagguucacauuccagag

SEQ ID NO: 309026 - RNA, 24 nt, Artificial Sequence
  Synthetic
cuuugagagguucacauuccagag

SEQ ID NO: 309027 - RNA, 18 nt, Artificial Sequence
  Synthetic
acaaaauaccuuccagag

SEQ ID NO: 309028 - RNA, 19 nt, Artificial Sequence
  Synthetic
cacaaaauaccuuccagag

SEQ ID NO: 309029 - RNA, 20 nt, Artificial Sequence
  Synthetic
ccacaaaauaccuuccagag

SEQ ID NO: 309030 - RNA, 21 nt, Artificial Sequence
  Synthetic
gccacaaaauaccuuccagag

SEQ ID NO: 309031 - RNA, 22 nt, Artificial Sequence
  Synthetic
agccacaaaauaccuuccagag

SEQ ID NO: 309032 - RNA, 23 nt, Artificial Sequence
  Synthetic
aagccacaaaauaccuuccagag

SEQ ID NO: 309033 - RNA, 24 nt, Artificial Sequence
  Synthetic
uaagccacaaaauaccuuccagag

SEQ ID NO: 309034 - RNA, 18 nt, Artificial Sequence
  Synthetic
acaucuagguuuccagag

SEQ ID NO: 309035 - RNA, 19 nt, Artificial Sequence
  Synthetic
cacaucuagguuuccagag

SEQ ID NO: 309036 - RNA, 20 nt, Artificial Sequence
  Synthetic
ccacaucuagguuuccagag

SEQ ID NO: 309037 - RNA, 21 nt, Artificial Sequence
  Synthetic
accacaucuagguuuccagag

SEQ ID NO: 309038 - RNA, 22 nt, Artificial Sequence
  Synthetic
aaccacaucuagguuuccagag

SEQ ID NO: 309039 - RNA, 23 nt, Artificial Sequence
  Synthetic
aaaccacaucuagguuuccagag

SEQ ID NO: 309040 - RNA, 24 nt, Artificial Sequence
  Synthetic
uaaaccacaucuagguuuccagag

SEQ ID NO: 309041 - RNA, 18 nt, Artificial Sequence
  Synthetic
auuaaguaagaagcagag

SEQ ID NO: 309042 - RNA, 19 nt, Artificial Sequence
  Synthetic
uauuaaguaagaagcagag

SEQ ID NO: 309043 - RNA, 20 nt, Artificial Sequence
  Synthetic
uuauuaaguaagaagcagag

SEQ ID NO: 309044 - RNA, 21 nt, Artificial Sequence
  Synthetic
cuuauuaaguaagaagcagag

SEQ ID NO: 309045 - RNA, 22 nt, Artificial Sequence
  Synthetic
gcuuauuaaguaagaagcagag

SEQ ID NO: 309046 - RNA, 23 nt, Artificial Sequence
  Synthetic
agcuuauuaaguaagaagcagag

SEQ ID NO: 309047 - RNA, 24 nt, Artificial Sequence
  Synthetic
aagcuuauuaaguaagaagcagag

SEQ ID NO: 309048 - RNA, 18 nt, Artificial Sequence
  Synthetic
aggaaagaaccagcagag

SEQ ID NO: 309049 - RNA, 19 nt, Artificial Sequence
  Synthetic
gaggaaagaaccagcagag

SEQ ID NO: 309050 - RNA, 20 nt, Artificial Sequence
  Synthetic
ggaggaaagaaccagcagag

SEQ ID NO: 309051 - RNA, 21 nt, Artificial Sequence
  Synthetic
aggaggaaagaaccagcagag

SEQ ID NO: 309052 - RNA, 22 nt, Artificial Sequence
  Synthetic
gaggaggaaagaaccagcagag

SEQ ID NO: 309053 - RNA, 23 nt, Artificial Sequence
  Synthetic
ugaggaggaaagaaccagcagag

SEQ ID NO: 309054 - RNA, 24 nt, Artificial Sequence
  Synthetic
augaggaggaaagaaccagcagag

SEQ ID NO: 309055 - RNA, 18 nt, Artificial Sequence
  Synthetic
ugucuagauguagcagag

SEQ ID NO: 309056 - RNA, 19 nt, Artificial Sequence
  Synthetic
uugucuagauguagcagag

SEQ ID NO: 309057 - RNA, 20 nt, Artificial Sequence
  Synthetic
auugucuagauguagcagag

SEQ ID NO: 309058 - RNA, 21 nt, Artificial Sequence
  Synthetic
cauugucuagauguagcagag

SEQ ID NO: 309059 - RNA, 22 nt, Artificial Sequence
  Synthetic
ucauugucuagauguagcagag

SEQ ID NO: 309060 - RNA, 23 nt, Artificial Sequence
  Synthetic
gucauugucuagauguagcagag

SEQ ID NO: 309061 - RNA, 24 nt, Artificial Sequence
  Synthetic
agucauugucuagauguagcagag

SEQ ID NO: 309062 - RNA, 18 nt, Artificial Sequence
  Synthetic
aucaauacacaggcagag

SEQ ID NO: 309063 - RNA, 19 nt, Artificial Sequence
  Synthetic
caucaauacacaggcagag

SEQ ID NO: 309064 - RNA, 20 nt, Artificial Sequence
  Synthetic
ccaucaauacacaggcagag

SEQ ID NO: 309065 - RNA, 21 nt, Artificial Sequence
  Synthetic
accaucaauacacaggcagag

SEQ ID NO: 309066 - RNA, 22 nt, Artificial Sequence
  Synthetic
caccaucaauacacaggcagag

SEQ ID NO: 309067 - RNA, 23 nt, Artificial Sequence
  Synthetic
gcaccaucaauacacaggcagag

SEQ ID NO: 309068 - RNA, 24 nt, Artificial Sequence
  Synthetic
agcaccaucaauacacaggcagag

SEQ ID NO: 309069 - RNA, 18 nt, Artificial Sequence
  Synthetic
gcacuuugggaggcagag

SEQ ID NO: 309070 - RNA, 19 nt, Artificial Sequence
  Synthetic
agcacuuugggaggcagag

SEQ ID NO: 309071 - RNA, 20 nt, Artificial Sequence
  Synthetic
cagcacuuugggaggcagag

SEQ ID NO: 309072 - RNA, 21 nt, Artificial Sequence
  Synthetic
ccagcacuuugggaggcagag

SEQ ID NO: 309073 - RNA, 22 nt, Artificial Sequence
  Synthetic
cccagcacuuugggaggcagag

SEQ ID NO: 309074 - RNA, 23 nt, Artificial Sequence
  Synthetic
ucccagcacuuugggaggcagag

SEQ ID NO: 309075 - RNA, 24 nt, Artificial Sequence
  Synthetic
aucccagcacuuugggaggcagag

SEQ ID NO: 309076 - RNA, 18 nt, Artificial Sequence
  Synthetic
gacucagaaggggcagag

SEQ ID NO: 309077 - RNA, 19 nt, Artificial Sequence
  Synthetic
agacucagaaggggcagag

SEQ ID NO: 309078 - RNA, 20 nt, Artificial Sequence
  Synthetic
aagacucagaaggggcagag

SEQ ID NO: 309079 - RNA, 21 nt, Artificial Sequence
  Synthetic
gaagacucagaaggggcagag

SEQ ID NO: 309080 - RNA, 22 nt, Artificial Sequence
  Synthetic
ugaagacucagaaggggcagag

SEQ ID NO: 309081 - RNA, 23 nt, Artificial Sequence
  Synthetic
uugaagacucagaaggggcagag

SEQ ID NO: 309082 - RNA, 24 nt, Artificial Sequence
  Synthetic
uuugaagacucagaaggggcagag

SEQ ID NO: 309083 - RNA, 18 nt, Artificial Sequence
  Synthetic
gaagcacuugcugcagag

SEQ ID NO: 309084 - RNA, 19 nt, Artificial Sequence
  Synthetic
agaagcacuugcugcagag

SEQ ID NO: 309085 - RNA, 20 nt, Artificial Sequence
  Synthetic
gagaagcacuugcugcagag

SEQ ID NO: 309086 - RNA, 21 nt, Artificial Sequence
  Synthetic
ggagaagcacuugcugcagag

SEQ ID NO: 309087 - RNA, 22 nt, Artificial Sequence
  Synthetic
uggagaagcacuugcugcagag

SEQ ID NO: 309088 - RNA, 23 nt, Artificial Sequence
  Synthetic
cuggagaagcacuugcugcagag

SEQ ID NO: 309089 - RNA, 24 nt, Artificial Sequence
  Synthetic
ccuggagaagcacuugcugcagag

SEQ ID NO: 309090 - RNA, 18 nt, Artificial Sequence
  Synthetic
cauauggcaucugcagag

SEQ ID NO: 309091 - RNA, 19 nt, Artificial Sequence
  Synthetic
acauauggcaucugcagag

SEQ ID NO: 309092 - RNA, 20 nt, Artificial Sequence
  Synthetic
uacauauggcaucugcagag

SEQ ID NO: 309093 - RNA, 21 nt, Artificial Sequence
  Synthetic
uuacauauggcaucugcagag

SEQ ID NO: 309094 - RNA, 22 nt, Artificial Sequence
  Synthetic
auuacauauggcaucugcagag

SEQ ID NO: 309095 - RNA, 23 nt, Artificial Sequence
  Synthetic
cauuacauauggcaucugcagag

SEQ ID NO: 309096 - RNA, 24 nt, Artificial Sequence
  Synthetic
gcauuacauauggcaucugcagag

SEQ ID NO: 309097 - RNA, 18 nt, Artificial Sequence
  Synthetic
cacaauuaaguugcagag

SEQ ID NO: 309098 - RNA, 19 nt, Artificial Sequence
  Synthetic
ucacaauuaaguugcagag

SEQ ID NO: 309099 - RNA, 20 nt, Artificial Sequence
  Synthetic
uucacaauuaaguugcagag

SEQ ID NO: 309100 - RNA, 21 nt, Artificial Sequence
  Synthetic
uuucacaauuaaguugcagag

SEQ ID NO: 309101 - RNA, 22 nt, Artificial Sequence
  Synthetic
auuucacaauuaaguugcagag

SEQ ID NO: 309102 - RNA, 23 nt, Artificial Sequence
  Synthetic
uauuucacaauuaaguugcagag

SEQ ID NO: 309103 - RNA, 24 nt, Artificial Sequence
  Synthetic
uuauuucacaauuaaguugcagag

SEQ ID NO: 309104 - RNA, 18 nt, Artificial Sequence
  Synthetic
aggcaaugauuugcagag

SEQ ID NO: 309105 - RNA, 19 nt, Artificial Sequence
  Synthetic
gaggcaaugauuugcagag

SEQ ID NO: 309106 - RNA, 20 nt, Artificial Sequence
  Synthetic
ggaggcaaugauuugcagag

SEQ ID NO: 309107 - RNA, 21 nt, Artificial Sequence
  Synthetic
uggaggcaaugauuugcagag

SEQ ID NO: 309108 - RNA, 22 nt, Artificial Sequence
  Synthetic
auggaggcaaugauuugcagag

SEQ ID NO: 309109 - RNA, 23 nt, Artificial Sequence
  Synthetic
aauggaggcaaugauuugcagag

SEQ ID NO: 309110 - RNA, 24 nt, Artificial Sequence
  Synthetic
uaauggaggcaaugauuugcagag

SEQ ID NO: 309111 - RNA, 18 nt, Artificial Sequence
  Synthetic
uauucuuaguuugcagag

SEQ ID NO: 309112 - RNA, 19 nt, Artificial Sequence
  Synthetic
uuauucuuaguuugcagag

SEQ ID NO: 309113 - RNA, 20 nt, Artificial Sequence
  Synthetic
auuauucuuaguuugcagag

SEQ ID NO: 309114 - RNA, 21 nt, Artificial Sequence
  Synthetic
uauuauucuuaguuugcagag

SEQ ID NO: 309115 - RNA, 22 nt, Artificial Sequence
  Synthetic
uuauuauucuuaguuugcagag

SEQ ID NO: 309116 - RNA, 23 nt, Artificial Sequence
  Synthetic
cuuauuauucuuaguuugcagag

SEQ ID NO: 309117 - RNA, 24 nt, Artificial Sequence
  Synthetic
ucuuauuauucuuaguuugcagag

SEQ ID NO: 309118 - RNA, 18 nt, Artificial Sequence
  Synthetic
uuguauuuuuuugcagag

SEQ ID NO: 309119 - RNA, 19 nt, Artificial Sequence
  Synthetic
uuuguauuuuuuugcagag

SEQ ID NO: 309120 - RNA, 20 nt, Artificial Sequence
  Synthetic
uuuuguauuuuuuugcagag

SEQ ID NO: 309121 - RNA, 21 nt, Artificial Sequence
  Synthetic
uuuuuguauuuuuuugcagag

SEQ ID NO: 309122 - RNA, 22 nt, Artificial Sequence
  Synthetic
uuuuuuguauuuuuuugcagag

SEQ ID NO: 309123 - RNA, 23 nt, Artificial Sequence
  Synthetic
auuuuuuguauuuuuuugcagag

SEQ ID NO: 309124 - RNA, 24 nt, Artificial Sequence
  Synthetic
aauuuuuuguauuuuuuugcagag

SEQ ID NO: 309125 - RNA, 18 nt, Artificial Sequence
  Synthetic
guaagugaaaaaucagag

SEQ ID NO: 309126 - RNA, 19 nt, Artificial Sequence
  Synthetic
uguaagugaaaaaucagag

SEQ ID NO: 309127 - RNA, 20 nt, Artificial Sequence
  Synthetic
cuguaagugaaaaaucagag

SEQ ID NO: 309128 - RNA, 21 nt, Artificial Sequence
  Synthetic
ucuguaagugaaaaaucagag

SEQ ID NO: 309129 - RNA, 22 nt, Artificial Sequence
  Synthetic
aucuguaagugaaaaaucagag

SEQ ID NO: 309130 - RNA, 23 nt, Artificial Sequence
  Synthetic
uaucuguaagugaaaaaucagag

SEQ ID NO: 309131 - RNA, 24 nt, Artificial Sequence
  Synthetic
guaucuguaagugaaaaaucagag

SEQ ID NO: 309132 - RNA, 18 nt, Artificial Sequence
  Synthetic
agaaacugagaaucagag

SEQ ID NO: 309133 - RNA, 19 nt, Artificial Sequence
  Synthetic
gagaaacugagaaucagag

SEQ ID NO: 309134 - RNA, 20 nt, Artificial Sequence
  Synthetic
ugagaaacugagaaucagag

SEQ ID NO: 309135 - RNA, 21 nt, Artificial Sequence
  Synthetic
augagaaacugagaaucagag

SEQ ID NO: 309136 - RNA, 22 nt, Artificial Sequence
  Synthetic
gaugagaaacugagaaucagag

SEQ ID NO: 309137 - RNA, 23 nt, Artificial Sequence
  Synthetic
agaugagaaacugagaaucagag

SEQ ID NO: 309138 - RNA, 24 nt, Artificial Sequence
  Synthetic
cagaugagaaacugagaaucagag

SEQ ID NO: 309139 - RNA, 18 nt, Artificial Sequence
  Synthetic
aaauaacuacgaucagag

SEQ ID NO: 309140 - RNA, 19 nt, Artificial Sequence
  Synthetic
gaaauaacuacgaucagag

SEQ ID NO: 309141 - RNA, 20 nt, Artificial Sequence
  Synthetic
agaaauaacuacgaucagag

SEQ ID NO: 309142 - RNA, 21 nt, Artificial Sequence
  Synthetic
aagaaauaacuacgaucagag

SEQ ID NO: 309143 - RNA, 22 nt, Artificial Sequence
  Synthetic
gaagaaauaacuacgaucagag

SEQ ID NO: 309144 - RNA, 23 nt, Artificial Sequence
  Synthetic
agaagaaauaacuacgaucagag

SEQ ID NO: 309145 - RNA, 24 nt, Artificial Sequence
  Synthetic
gagaagaaauaacuacgaucagag

SEQ ID NO: 309146 - RNA, 18 nt, Artificial Sequence
  Synthetic
aaucaugaucucucagag

SEQ ID NO: 309147 - RNA, 19 nt, Artificial Sequence
  Synthetic
gaaucaugaucucucagag

SEQ ID NO: 309148 - RNA, 20 nt, Artificial Sequence
  Synthetic
agaaucaugaucucucagag

SEQ ID NO: 309149 - RNA, 21 nt, Artificial Sequence
  Synthetic
cagaaucaugaucucucagag

SEQ ID NO: 309150 - RNA, 22 nt, Artificial Sequence
  Synthetic
acagaaucaugaucucucagag

SEQ ID NO: 309151 - RNA, 23 nt, Artificial Sequence
  Synthetic
uacagaaucaugaucucucagag

SEQ ID NO: 309152 - RNA, 24 nt, Artificial Sequence
  Synthetic
auacagaaucaugaucucucagag

SEQ ID NO: 309153 - RNA, 18 nt, Artificial Sequence
  Synthetic
aacaaauaugucucagag

SEQ ID NO: 309154 - RNA, 19 nt, Artificial Sequence
  Synthetic
aaacaaauaugucucagag

SEQ ID NO: 309155 - RNA, 20 nt, Artificial Sequence
  Synthetic
aaaacaaauaugucucagag

SEQ ID NO: 309156 - RNA, 21 nt, Artificial Sequence
  Synthetic
aaaaacaaauaugucucagag

SEQ ID NO: 309157 - RNA, 22 nt, Artificial Sequence
  Synthetic
caaaaacaaauaugucucagag

SEQ ID NO: 309158 - RNA, 23 nt, Artificial Sequence
  Synthetic
gcaaaaacaaauaugucucagag

SEQ ID NO: 309159 - RNA, 24 nt, Artificial Sequence
  Synthetic
ugcaaaaacaaauaugucucagag

SEQ ID NO: 309160 - RNA, 18 nt, Artificial Sequence
  Synthetic
accauugaugagucagag

SEQ ID NO: 309161 - RNA, 19 nt, Artificial Sequence
  Synthetic
caccauugaugagucagag

SEQ ID NO: 309162 - RNA, 20 nt, Artificial Sequence
  Synthetic
acaccauugaugagucagag

SEQ ID NO: 309163 - RNA, 21 nt, Artificial Sequence
  Synthetic
uacaccauugaugagucagag

SEQ ID NO: 309164 - RNA, 22 nt, Artificial Sequence
  Synthetic
guacaccauugaugagucagag

SEQ ID NO: 309165 - RNA, 23 nt, Artificial Sequence
  Synthetic
gguacaccauugaugagucagag

SEQ ID NO: 309166 - RNA, 24 nt, Artificial Sequence
  Synthetic
cgguacaccauugaugagucagag

SEQ ID NO: 309167 - RNA, 18 nt, Artificial Sequence
  Synthetic
agcagaacauggucagag

SEQ ID NO: 309168 - RNA, 19 nt, Artificial Sequence
  Synthetic
uagcagaacauggucagag

SEQ ID NO: 309169 - RNA, 20 nt, Artificial Sequence
  Synthetic
cuagcagaacauggucagag

SEQ ID NO: 309170 - RNA, 21 nt, Artificial Sequence
  Synthetic
gcuagcagaacauggucagag

SEQ ID NO: 309171 - RNA, 22 nt, Artificial Sequence
  Synthetic
ggcuagcagaacauggucagag

SEQ ID NO: 309172 - RNA, 23 nt, Artificial Sequence
  Synthetic
aggcuagcagaacauggucagag

SEQ ID NO: 309173 - RNA, 24 nt, Artificial Sequence
  Synthetic
aaggcuagcagaacauggucagag

SEQ ID NO: 309174 - RNA, 18 nt, Artificial Sequence
  Synthetic
uugaaagcguggucagag

SEQ ID NO: 309175 - RNA, 19 nt, Artificial Sequence
  Synthetic
cuugaaagcguggucagag

SEQ ID NO: 309176 - RNA, 20 nt, Artificial Sequence
  Synthetic
ucuugaaagcguggucagag

SEQ ID NO: 309177 - RNA, 21 nt, Artificial Sequence
  Synthetic
aucuugaaagcguggucagag

SEQ ID NO: 309178 - RNA, 22 nt, Artificial Sequence
  Synthetic
uaucuugaaagcguggucagag

SEQ ID NO: 309179 - RNA, 23 nt, Artificial Sequence
  Synthetic
uuaucuugaaagcguggucagag

SEQ ID NO: 309180 - RNA, 24 nt, Artificial Sequence
  Synthetic
cuuaucuugaaagcguggucagag

SEQ ID NO: 309181 - RNA, 18 nt, Artificial Sequence
  Synthetic
aagauaaaaaugucagag

SEQ ID NO: 309182 - RNA, 19 nt, Artificial Sequence
  Synthetic
caagauaaaaaugucagag

SEQ ID NO: 309183 - RNA, 20 nt, Artificial Sequence
  Synthetic
ccaagauaaaaaugucagag

SEQ ID NO: 309184 - RNA, 21 nt, Artificial Sequence
  Synthetic
gccaagauaaaaaugucagag

SEQ ID NO: 309185 - RNA, 22 nt, Artificial Sequence
  Synthetic
agccaagauaaaaaugucagag

SEQ ID NO: 309186 - RNA, 23 nt, Artificial Sequence
  Synthetic
gagccaagauaaaaaugucagag

SEQ ID NO: 309187 - RNA, 24 nt, Artificial Sequence
  Synthetic
agagccaagauaaaaaugucagag

SEQ ID NO: 309188 - RNA, 18 nt, Artificial Sequence
  Synthetic
agagauacggugucagag

SEQ ID NO: 309189 - RNA, 19 nt, Artificial Sequence
  Synthetic
cagagauacggugucagag

SEQ ID NO: 309190 - RNA, 20 nt, Artificial Sequence
  Synthetic
ccagagauacggugucagag

SEQ ID NO: 309191 - RNA, 21 nt, Artificial Sequence
  Synthetic
accagagauacggugucagag

SEQ ID NO: 309192 - RNA, 22 nt, Artificial Sequence
  Synthetic
gaccagagauacggugucagag

SEQ ID NO: 309193 - RNA, 23 nt, Artificial Sequence
  Synthetic
agaccagagauacggugucagag

SEQ ID NO: 309194 - RNA, 24 nt, Artificial Sequence
  Synthetic
uagaccagagauacggugucagag

SEQ ID NO: 309195 - RNA, 18 nt, Artificial Sequence
  Synthetic
cagcaguagucuucagag

SEQ ID NO: 309196 - RNA, 19 nt, Artificial Sequence
  Synthetic
ucagcaguagucuucagag

SEQ ID NO: 309197 - RNA, 20 nt, Artificial Sequence
  Synthetic
aucagcaguagucuucagag

SEQ ID NO: 309198 - RNA, 21 nt, Artificial Sequence
  Synthetic
aaucagcaguagucuucagag

SEQ ID NO: 309199 - RNA, 22 nt, Artificial Sequence
  Synthetic
uaaucagcaguagucuucagag

SEQ ID NO: 309200 - RNA, 23 nt, Artificial Sequence
  Synthetic
cuaaucagcaguagucuucagag

SEQ ID NO: 309201 - RNA, 24 nt, Artificial Sequence
  Synthetic
ucuaaucagcaguagucuucagag

SEQ ID NO: 309202 - RNA, 18 nt, Artificial Sequence
  Synthetic
gcagcacggucuucagag

SEQ ID NO: 309203 - RNA, 19 nt, Artificial Sequence
  Synthetic
ggcagcacggucuucagag

SEQ ID NO: 309204 - RNA, 20 nt, Artificial Sequence
  Synthetic
gggcagcacggucuucagag

SEQ ID NO: 309205 - RNA, 21 nt, Artificial Sequence
  Synthetic
ugggcagcacggucuucagag

SEQ ID NO: 309206 - RNA, 22 nt, Artificial Sequence
  Synthetic
uugggcagcacggucuucagag

SEQ ID NO: 309207 - RNA, 23 nt, Artificial Sequence
  Synthetic
uuugggcagcacggucuucagag

SEQ ID NO: 309208 - RNA, 24 nt, Artificial Sequence
  Synthetic
cuuugggcagcacggucuucagag

SEQ ID NO: 309209 - RNA, 18 nt, Artificial Sequence
  Synthetic
uaaaaaugaaaaagagag

SEQ ID NO: 309210 - RNA, 19 nt, Artificial Sequence
  Synthetic
uuaaaaaugaaaaagagag

SEQ ID NO: 309211 - RNA, 20 nt, Artificial Sequence
  Synthetic
uuuaaaaaugaaaaagagag

SEQ ID NO: 309212 - RNA, 21 nt, Artificial Sequence
  Synthetic
guuuaaaaaugaaaaagagag

SEQ ID NO: 309213 - RNA, 22 nt, Artificial Sequence
  Synthetic
aguuuaaaaaugaaaaagagag

SEQ ID NO: 309214 - RNA, 23 nt, Artificial Sequence
  Synthetic
aaguuuaaaaaugaaaaagagag

SEQ ID NO: 309215 - RNA, 24 nt, Artificial Sequence
  Synthetic
gaaguuuaaaaaugaaaaagagag

SEQ ID NO: 309216 - RNA, 18 nt, Artificial Sequence
  Synthetic
ccccaggagaaaagagag

SEQ ID NO: 309217 - RNA, 19 nt, Artificial Sequence
  Synthetic
gccccaggagaaaagagag

SEQ ID NO: 309218 - RNA, 20 nt, Artificial Sequence
  Synthetic
agccccaggagaaaagagag

SEQ ID NO: 309219 - RNA, 21 nt, Artificial Sequence
  Synthetic
uagccccaggagaaaagagag

SEQ ID NO: 309220 - RNA, 22 nt, Artificial Sequence
  Synthetic
guagccccaggagaaaagagag

SEQ ID NO: 309221 - RNA, 23 nt, Artificial Sequence
  Synthetic
gguagccccaggagaaaagagag

SEQ ID NO: 309222 - RNA, 24 nt, Artificial Sequence
  Synthetic
ggguagccccaggagaaaagagag

SEQ ID NO: 309223 - RNA, 18 nt, Artificial Sequence
  Synthetic
uggaacacacaaagagag

SEQ ID NO: 309224 - RNA, 19 nt, Artificial Sequence
  Synthetic
uuggaacacacaaagagag

SEQ ID NO: 309225 - RNA, 20 nt, Artificial Sequence
  Synthetic
guuggaacacacaaagagag

SEQ ID NO: 309226 - RNA, 21 nt, Artificial Sequence
  Synthetic
aguuggaacacacaaagagag

SEQ ID NO: 309227 - RNA, 22 nt, Artificial Sequence
  Synthetic
aaguuggaacacacaaagagag

SEQ ID NO: 309228 - RNA, 23 nt, Artificial Sequence
  Synthetic
gaaguuggaacacacaaagagag

SEQ ID NO: 309229 - RNA, 24 nt, Artificial Sequence
  Synthetic
agaaguuggaacacacaaagagag

SEQ ID NO: 309230 - RNA, 18 nt, Artificial Sequence
  Synthetic
agagauuaugaaagagag

SEQ ID NO: 309231 - RNA, 19 nt, Artificial Sequence
  Synthetic
cagagauuaugaaagagag

SEQ ID NO: 309232 - RNA, 20 nt, Artificial Sequence
  Synthetic
ucagagauuaugaaagagag

SEQ ID NO: 309233 - RNA, 21 nt, Artificial Sequence
  Synthetic
cucagagauuaugaaagagag

SEQ ID NO: 309234 - RNA, 22 nt, Artificial Sequence
  Synthetic
acucagagauuaugaaagagag

SEQ ID NO: 309235 - RNA, 23 nt, Artificial Sequence
  Synthetic
aacucagagauuaugaaagagag

SEQ ID NO: 309236 - RNA, 24 nt, Artificial Sequence
  Synthetic
aaacucagagauuaugaaagagag

SEQ ID NO: 309237 - RNA, 18 nt, Artificial Sequence
  Synthetic
aggagccuugaaagagag

SEQ ID NO: 309238 - RNA, 19 nt, Artificial Sequence
  Synthetic
aaggagccuugaaagagag

SEQ ID NO: 309239 - RNA, 20 nt, Artificial Sequence
  Synthetic
aaaggagccuugaaagagag

SEQ ID NO: 309240 - RNA, 21 nt, Artificial Sequence
  Synthetic
uaaaggagccuugaaagagag

SEQ ID NO: 309241 - RNA, 22 nt, Artificial Sequence
  Synthetic
cuaaaggagccuugaaagagag

SEQ ID NO: 309242 - RNA, 23 nt, Artificial Sequence
  Synthetic
ucuaaaggagccuugaaagagag

SEQ ID NO: 309243 - RNA, 24 nt, Artificial Sequence
  Synthetic
gucuaaaggagccuugaaagagag

SEQ ID NO: 309244 - RNA, 18 nt, Artificial Sequence
  Synthetic
ugggaauagacaagagag

SEQ ID NO: 309245 - RNA, 19 nt, Artificial Sequence
  Synthetic
gugggaauagacaagagag

SEQ ID NO: 309246 - RNA, 20 nt, Artificial Sequence
  Synthetic
ugugggaauagacaagagag

SEQ ID NO: 309247 - RNA, 21 nt, Artificial Sequence
  Synthetic
gugugggaauagacaagagag

SEQ ID NO: 309248 - RNA, 22 nt, Artificial Sequence
  Synthetic
ggugugggaauagacaagagag

SEQ ID NO: 309249 - RNA, 23 nt, Artificial Sequence
  Synthetic
uggugugggaauagacaagagag

SEQ ID NO: 309250 - RNA, 24 nt, Artificial Sequence
  Synthetic
guggugugggaauagacaagagag

SEQ ID NO: 309251 - RNA, 18 nt, Artificial Sequence
  Synthetic
uaccagaccucaagagag

SEQ ID NO: 309252 - RNA, 19 nt, Artificial Sequence
  Synthetic
guaccagaccucaagagag

SEQ ID NO: 309253 - RNA, 20 nt, Artificial Sequence
  Synthetic
aguaccagaccucaagagag

SEQ ID NO: 309254 - RNA, 21 nt, Artificial Sequence
  Synthetic
uaguaccagaccucaagagag

SEQ ID NO: 309255 - RNA, 22 nt, Artificial Sequence
  Synthetic
uuaguaccagaccucaagagag

SEQ ID NO: 309256 - RNA, 23 nt, Artificial Sequence
  Synthetic
uuuaguaccagaccucaagagag

SEQ ID NO: 309257 - RNA, 24 nt, Artificial Sequence
  Synthetic
auuuaguaccagaccucaagagag

SEQ ID NO: 309258 - RNA, 18 nt, Artificial Sequence
  Synthetic
cuacaagccagaagagag

SEQ ID NO: 309259 - RNA, 19 nt, Artificial Sequence
  Synthetic
ccuacaagccagaagagag

SEQ ID NO: 309260 - RNA, 20 nt, Artificial Sequence
  Synthetic
cccuacaagccagaagagag

SEQ ID NO: 309261 - RNA, 18 nt, Artificial Sequence
  Synthetic
uacaccaugagaagagag

SEQ ID NO: 309262 - RNA, 19 nt, Artificial Sequence
  Synthetic
uuacaccaugagaagagag

SEQ ID NO: 309263 - RNA, 20 nt, Artificial Sequence
  Synthetic
cuuacaccaugagaagagag

SEQ ID NO: 309264 - RNA, 21 nt, Artificial Sequence
  Synthetic
acuuacaccaugagaagagag

SEQ ID NO: 309265 - RNA, 22 nt, Artificial Sequence
  Synthetic
uacuuacaccaugagaagagag

SEQ ID NO: 309266 - RNA, 23 nt, Artificial Sequence
  Synthetic
auacuuacaccaugagaagagag

SEQ ID NO: 309267 - RNA, 24 nt, Artificial Sequence
  Synthetic
gauacuuacaccaugagaagagag

SEQ ID NO: 309268 - RNA, 18 nt, Artificial Sequence
  Synthetic
acucugcaaggaagagag

SEQ ID NO: 309269 - RNA, 19 nt, Artificial Sequence
  Synthetic
gacucugcaaggaagagag

SEQ ID NO: 309270 - RNA, 20 nt, Artificial Sequence
  Synthetic
ugacucugcaaggaagagag

SEQ ID NO: 309271 - RNA, 21 nt, Artificial Sequence
  Synthetic
cugacucugcaaggaagagag

SEQ ID NO: 309272 - RNA, 22 nt, Artificial Sequence
  Synthetic
ucugacucugcaaggaagagag

SEQ ID NO: 309273 - RNA, 23 nt, Artificial Sequence
  Synthetic
uucugacucugcaaggaagagag

SEQ ID NO: 309274 - RNA, 24 nt, Artificial Sequence
  Synthetic
auucugacucugcaaggaagagag

SEQ ID NO: 309275 - RNA, 18 nt, Artificial Sequence
  Synthetic
agaguccuccuaagagag

SEQ ID NO: 309276 - RNA, 19 nt, Artificial Sequence
  Synthetic
aagaguccuccuaagagag

SEQ ID NO: 309277 - RNA, 20 nt, Artificial Sequence
  Synthetic
caagaguccuccuaagagag

SEQ ID NO: 309278 - RNA, 21 nt, Artificial Sequence
  Synthetic
acaagaguccuccuaagagag

SEQ ID NO: 309279 - RNA, 22 nt, Artificial Sequence
  Synthetic
cacaagaguccuccuaagagag

SEQ ID NO: 309280 - RNA, 23 nt, Artificial Sequence
  Synthetic
ucacaagaguccuccuaagagag

SEQ ID NO: 309281 - RNA, 24 nt, Artificial Sequence
  Synthetic
aucacaagaguccuccuaagagag

SEQ ID NO: 309282 - RNA, 18 nt, Artificial Sequence
  Synthetic
caauggucucuaagagag

SEQ ID NO: 309283 - RNA, 19 nt, Artificial Sequence
  Synthetic
acaauggucucuaagagag

SEQ ID NO: 309284 - RNA, 20 nt, Artificial Sequence
  Synthetic
aacaauggucucuaagagag

SEQ ID NO: 309285 - RNA, 21 nt, Artificial Sequence
  Synthetic
gaacaauggucucuaagagag

SEQ ID NO: 309286 - RNA, 22 nt, Artificial Sequence
  Synthetic
ugaacaauggucucuaagagag

SEQ ID NO: 309287 - RNA, 23 nt, Artificial Sequence
  Synthetic
augaacaauggucucuaagagag

SEQ ID NO: 309288 - RNA, 24 nt, Artificial Sequence
  Synthetic
aaugaacaauggucucuaagagag

SEQ ID NO: 309289 - RNA, 18 nt, Artificial Sequence
  Synthetic
uuuuagagagacagagag

SEQ ID NO: 309290 - RNA, 19 nt, Artificial Sequence
  Synthetic
auuuuagagagacagagag

SEQ ID NO: 309291 - RNA, 20 nt, Artificial Sequence
  Synthetic
gauuuuagagagacagagag

SEQ ID NO: 309292 - RNA, 21 nt, Artificial Sequence
  Synthetic
ugauuuuagagagacagagag

SEQ ID NO: 309293 - RNA, 22 nt, Artificial Sequence
  Synthetic
uugauuuuagagagacagagag

SEQ ID NO: 309294 - RNA, 23 nt, Artificial Sequence
  Synthetic
guugauuuuagagagacagagag

SEQ ID NO: 309295 - RNA, 24 nt, Artificial Sequence
  Synthetic
aguugauuuuagagagacagagag

SEQ ID NO: 309296 - RNA, 18 nt, Artificial Sequence
  Synthetic
auuuuucaauacagagag

SEQ ID NO: 309297 - RNA, 19 nt, Artificial Sequence
  Synthetic
aauuuuucaauacagagag

SEQ ID NO: 309298 - RNA, 20 nt, Artificial Sequence
  Synthetic
caauuuuucaauacagagag

SEQ ID NO: 309299 - RNA, 21 nt, Artificial Sequence
  Synthetic
ccaauuuuucaauacagagag

SEQ ID NO: 309300 - RNA, 22 nt, Artificial Sequence
  Synthetic
uccaauuuuucaauacagagag

SEQ ID NO: 309301 - RNA, 23 nt, Artificial Sequence
  Synthetic
cuccaauuuuucaauacagagag

SEQ ID NO: 309302 - RNA, 24 nt, Artificial Sequence
  Synthetic
ccuccaauuuuucaauacagagag

SEQ ID NO: 309303 - RNA, 18 nt, Artificial Sequence
  Synthetic
aggugagauuccagagag

SEQ ID NO: 309304 - RNA, 19 nt, Artificial Sequence
  Synthetic
aaggugagauuccagagag

SEQ ID NO: 309305 - RNA, 20 nt, Artificial Sequence
  Synthetic
gaaggugagauuccagagag

SEQ ID NO: 309306 - RNA, 21 nt, Artificial Sequence
  Synthetic
agaaggugagauuccagagag

SEQ ID NO: 309307 - RNA, 22 nt, Artificial Sequence
  Synthetic
uagaaggugagauuccagagag

SEQ ID NO: 309308 - RNA, 23 nt, Artificial Sequence
  Synthetic
guagaaggugagauuccagagag

SEQ ID NO: 309309 - RNA, 24 nt, Artificial Sequence
  Synthetic
uguagaaggugagauuccagagag

SEQ ID NO: 309310 - RNA, 18 nt, Artificial Sequence
  Synthetic
uaaguaagaagcagagag

SEQ ID NO: 309311 - RNA, 19 nt, Artificial Sequence
  Synthetic
uuaaguaagaagcagagag

SEQ ID NO: 309312 - RNA, 20 nt, Artificial Sequence
  Synthetic
auuaaguaagaagcagagag

SEQ ID NO: 309313 - RNA, 21 nt, Artificial Sequence
  Synthetic
uauuaaguaagaagcagagag

SEQ ID NO: 309314 - RNA, 22 nt, Artificial Sequence
  Synthetic
uuauuaaguaagaagcagagag

SEQ ID NO: 309315 - RNA, 23 nt, Artificial Sequence
  Synthetic
cuuauuaaguaagaagcagagag

SEQ ID NO: 309316 - RNA, 24 nt, Artificial Sequence
  Synthetic
gcuuauuaaguaagaagcagagag

SEQ ID NO: 309317 - RNA, 18 nt, Artificial Sequence
  Synthetic
acucauagaagcagagag

SEQ ID NO: 309318 - RNA, 19 nt, Artificial Sequence
  Synthetic
aacucauagaagcagagag

SEQ ID NO: 309319 - RNA, 20 nt, Artificial Sequence
  Synthetic
aaacucauagaagcagagag

SEQ ID NO: 309320 - RNA, 21 nt, Artificial Sequence
  Synthetic
caaacucauagaagcagagag

SEQ ID NO: 309321 - RNA, 22 nt, Artificial Sequence
  Synthetic
ucaaacucauagaagcagagag

SEQ ID NO: 309322 - RNA, 23 nt, Artificial Sequence
  Synthetic
gucaaacucauagaagcagagag

SEQ ID NO: 309323 - RNA, 24 nt, Artificial Sequence
  Synthetic
agucaaacucauagaagcagagag

SEQ ID NO: 309324 - RNA, 18 nt, Artificial Sequence
  Synthetic
accuuccagagcagagag

SEQ ID NO: 309325 - RNA, 19 nt, Artificial Sequence
  Synthetic
uaccuuccagagcagagag

SEQ ID NO: 309326 - RNA, 20 nt, Artificial Sequence
  Synthetic
auaccuuccagagcagagag

SEQ ID NO: 309327 - RNA, 21 nt, Artificial Sequence
  Synthetic
aauaccuuccagagcagagag

SEQ ID NO: 309328 - RNA, 22 nt, Artificial Sequence
  Synthetic
aaauaccuuccagagcagagag

SEQ ID NO: 309329 - RNA, 23 nt, Artificial Sequence
  Synthetic
aaaauaccuuccagagcagagag

SEQ ID NO: 309330 - RNA, 24 nt, Artificial Sequence
  Synthetic
caaaauaccuuccagagcagagag

SEQ ID NO: 309331 - RNA, 18 nt, Artificial Sequence
  Synthetic
cacuucucacucagagag

SEQ ID NO: 309332 - RNA, 19 nt, Artificial Sequence
  Synthetic
gcacuucucacucagagag

SEQ ID NO: 309333 - RNA, 20 nt, Artificial Sequence
  Synthetic
ggcacuucucacucagagag

SEQ ID NO: 309334 - RNA, 21 nt, Artificial Sequence
  Synthetic
gggcacuucucacucagagag

SEQ ID NO: 309335 - RNA, 22 nt, Artificial Sequence
  Synthetic
agggcacuucucacucagagag

SEQ ID NO: 309336 - RNA, 23 nt, Artificial Sequence
  Synthetic
uagggcacuucucacucagagag

SEQ ID NO: 309337 - RNA, 24 nt, Artificial Sequence
  Synthetic
cuagggcacuucucacucagagag

SEQ ID NO: 309338 - RNA, 18 nt, Artificial Sequence
  Synthetic
agagugggagucagagag

SEQ ID NO: 309339 - RNA, 19 nt, Artificial Sequence
  Synthetic
gagagugggagucagagag

SEQ ID NO: 309340 - RNA, 20 nt, Artificial Sequence
  Synthetic
ggagagugggagucagagag

SEQ ID NO: 309341 - RNA, 21 nt, Artificial Sequence
  Synthetic
aggagagugggagucagagag

SEQ ID NO: 309342 - RNA, 22 nt, Artificial Sequence
  Synthetic
caggagagugggagucagagag

SEQ ID NO: 309343 - RNA, 23 nt, Artificial Sequence
  Synthetic
gcaggagagugggagucagagag

SEQ ID NO: 309344 - RNA, 24 nt, Artificial Sequence
  Synthetic
agcaggagagugggagucagagag

SEQ ID NO: 309345 - RNA, 18 nt, Artificial Sequence
  Synthetic
aaacagagaaagagagag

SEQ ID NO: 309346 - RNA, 19 nt, Artificial Sequence
  Synthetic
gaaacagagaaagagagag

SEQ ID NO: 309347 - RNA, 20 nt, Artificial Sequence
  Synthetic
agaaacagagaaagagagag

SEQ ID NO: 309348 - RNA, 21 nt, Artificial Sequence
  Synthetic
gagaaacagagaaagagagag

SEQ ID NO: 309349 - RNA, 22 nt, Artificial Sequence
  Synthetic
agagaaacagagaaagagagag

SEQ ID NO: 309350 - RNA, 23 nt, Artificial Sequence
  Synthetic
gagagaaacagagaaagagagag

SEQ ID NO: 309351 - RNA, 24 nt, Artificial Sequence
  Synthetic
agagagaaacagagaaagagagag

SEQ ID NO: 309352 - RNA, 18 nt, Artificial Sequence
  Synthetic
agcauaaacaagagagag

SEQ ID NO: 309353 - RNA, 19 nt, Artificial Sequence
  Synthetic
gagcauaaacaagagagag

SEQ ID NO: 309354 - RNA, 20 nt, Artificial Sequence
  Synthetic
agagcauaaacaagagagag

SEQ ID NO: 309355 - RNA, 21 nt, Artificial Sequence
  Synthetic
gagagcauaaacaagagagag

SEQ ID NO: 309356 - RNA, 22 nt, Artificial Sequence
  Synthetic
agagagcauaaacaagagagag

SEQ ID NO: 309357 - RNA, 23 nt, Artificial Sequence
  Synthetic
uagagagcauaaacaagagagag

SEQ ID NO: 309358 - RNA, 24 nt, Artificial Sequence
  Synthetic
uuagagagcauaaacaagagagag

SEQ ID NO: 309359 - RNA, 18 nt, Artificial Sequence
  Synthetic
cacagauugaagagagag

SEQ ID NO: 309360 - RNA, 19 nt, Artificial Sequence
  Synthetic
acacagauugaagagagag

SEQ ID NO: 309361 - RNA, 20 nt, Artificial Sequence
  Synthetic
aacacagauugaagagagag

SEQ ID NO: 309362 - RNA, 21 nt, Artificial Sequence
  Synthetic
gaacacagauugaagagagag

SEQ ID NO: 309363 - RNA, 22 nt, Artificial Sequence
  Synthetic
ggaacacagauugaagagagag

SEQ ID NO: 309364 - RNA, 23 nt, Artificial Sequence
  Synthetic
gggaacacagauugaagagagag

SEQ ID NO: 309365 - RNA, 24 nt, Artificial Sequence
  Synthetic
agggaacacagauugaagagagag

SEQ ID NO: 309366 - RNA, 18 nt, Artificial Sequence
  Synthetic
cugccaagacagagagag

SEQ ID NO: 309367 - RNA, 19 nt, Artificial Sequence
  Synthetic
acugccaagacagagagag

SEQ ID NO: 309368 - RNA, 20 nt, Artificial Sequence
  Synthetic
uacugccaagacagagagag

SEQ ID NO: 309369 - RNA, 21 nt, Artificial Sequence
  Synthetic
auacugccaagacagagagag

SEQ ID NO: 309370 - RNA, 22 nt, Artificial Sequence
  Synthetic
gauacugccaagacagagagag

SEQ ID NO: 309371 - RNA, 23 nt, Artificial Sequence
  Synthetic
agauacugccaagacagagagag

SEQ ID NO: 309372 - RNA, 24 nt, Artificial Sequence
  Synthetic
gagauacugccaagacagagagag

SEQ ID NO: 309373 - RNA, 18 nt, Artificial Sequence
  Synthetic
uuagagagacagagagag

SEQ ID NO: 309374 - RNA, 19 nt, Artificial Sequence
  Synthetic
uuuagagagacagagagag

SEQ ID NO: 309375 - RNA, 20 nt, Artificial Sequence
  Synthetic
uuuuagagagacagagagag

SEQ ID NO: 309376 - RNA, 21 nt, Artificial Sequence
  Synthetic
auuuuagagagacagagagag

SEQ ID NO: 309377 - RNA, 22 nt, Artificial Sequence
  Synthetic
gauuuuagagagacagagagag

SEQ ID NO: 309378 - RNA, 23 nt, Artificial Sequence
  Synthetic
ugauuuuagagagacagagagag

SEQ ID NO: 309379 - RNA, 24 nt, Artificial Sequence
  Synthetic
uugauuuuagagagacagagagag

SEQ ID NO: 309380 - RNA, 18 nt, Artificial Sequence
  Synthetic
cauaaacaagagagagag

SEQ ID NO: 309381 - RNA, 19 nt, Artificial Sequence
  Synthetic
gcauaaacaagagagagag

SEQ ID NO: 309382 - RNA, 20 nt, Artificial Sequence
  Synthetic
agcauaaacaagagagagag

SEQ ID NO: 309383 - RNA, 21 nt, Artificial Sequence
  Synthetic
gagcauaaacaagagagagag

SEQ ID NO: 309384 - RNA, 22 nt, Artificial Sequence
  Synthetic
agagcauaaacaagagagagag

SEQ ID NO: 309385 - RNA, 23 nt, Artificial Sequence
  Synthetic
gagagcauaaacaagagagagag

SEQ ID NO: 309386 - RNA, 24 nt, Artificial Sequence
  Synthetic
agagagcauaaacaagagagagag

SEQ ID NO: 309387 - RNA, 18 nt, Artificial Sequence
  Synthetic
acagagagagagagagag

SEQ ID NO: 309388 - RNA, 19 nt, Artificial Sequence
  Synthetic
aacagagagagagagagag

SEQ ID NO: 309389 - RNA, 20 nt, Artificial Sequence
  Synthetic
gaacagagagagagagagag

SEQ ID NO: 309390 - RNA, 21 nt, Artificial Sequence
  Synthetic
ugaacagagagagagagagag

SEQ ID NO: 309391 - RNA, 22 nt, Artificial Sequence
  Synthetic
augaacagagagagagagagag

SEQ ID NO: 309392 - RNA, 23 nt, Artificial Sequence
  Synthetic
uaugaacagagagagagagagag

SEQ ID NO: 309393 - RNA, 24 nt, Artificial Sequence
  Synthetic
auaugaacagagagagagagagag

SEQ ID NO: 309394 - RNA, 18 nt, Artificial Sequence
  Synthetic
auaaggggagagagagag

SEQ ID NO: 309395 - RNA, 19 nt, Artificial Sequence
  Synthetic
gauaaggggagagagagag

SEQ ID NO: 309396 - RNA, 20 nt, Artificial Sequence
  Synthetic
ggauaaggggagagagagag

SEQ ID NO: 309397 - RNA, 21 nt, Artificial Sequence
  Synthetic
uggauaaggggagagagagag

SEQ ID NO: 309398 - RNA, 22 nt, Artificial Sequence
  Synthetic
auggauaaggggagagagagag
